United States Patent Application Publication US 2015/0240253 A1 - sequence listing, part 7

SEQ ID NO: 28689 - DNA, 428 bp, Zea Mays
caactatgtaccccagtatcattgttgtagttagagagaggctgagttgtgattcctttttctttttataattctttttcttttacttacgcttaaccgtccacagatgacttcccacggatcctcggacgaagggaatgcactgtcccacactgacgggcttgcacgagagggctttccccatactttgtgggaggtacttcagggggccagttacacgacgcctcctcagtacgcggtgcagcagttcgagaagcaccgagtgccccgctgtagggtgaggatgaccctggagcctcatcccttgcagccaggctggcgttcgctggactctgagccctttggataccgggctgaggatacgatcgaggcgattgctcttcacggattgaccactttctgcggattccaccccttggagctgtcca

SEQ ID NO: 28690 - DNA, 602 bp, Zea Mays
ggtgggggctcgatattgtcgggccactgcccacagcccaaggcaacctcaaattcaccttcgtcgctgtcgaatacttcaccaagtggatcgaggctagggccgtattcacaataacatctaagacgacacaaaaaaatttctcgcagattatcgaatgttggttcggagtcccatccgaattaacagacgataacaacaagtagttcaacaaccaagactgtcggaaattctgcaactccatcggtacgaaggcagtgttcgcctccgtctagcacccacaatccaacggtgtagtcgagcgcgccagcaacaagatcttcagcgcaatcaagaaaaggctacttgattacaaaaagggcaaatgggtggaccaactacccgaagtcatatgggcattaaacacaacagaatctagagcacctaggttcacacccttccgcttgatgtacggatccaaagtaatgatgccgcaagagctaaagcacggatccccaccaacaagcccaacaaccacccctgatgtcgacgaaccaacctccaaaagaccttatcaacggagaccgtgtcctcgctttggaagcactggacaaataccaagc

SEQ ID NO: 28691 - DNA, 316 bp, Zea Mays
cccggatccacgaccaccgcactcttagccaaaccagtatgttacttctaatcgtggccatccgtgaccagatcagcggccatgcgattgtctctcccccacgcccgatctcgacggcgacgttgccccgtcgaacacccgcccaaggttctagggcataatccgaattctaccaggaggaaaagagggcgaacgctttcgtgaacatgacggggtggcatacaagtgcacagcacggccggagcctcattcgcggagtagcgcggttcctcgacgcggcttcatcaccggcaagaaatcgcccacgctcagctcg

SEQ ID NO: 28692 - DNA, 491 bp, Zea Mays
gattagaacccagcgttgtttatatgttgtaacacacccttgtcatccgatcccatatcaacggatgaggaacgcccacgccatgattcgatcccaaccatgcacccgcgatcgaacgaccaagattcaatgggatgatgaggcaagcaacttctaatctcggccgcacagatagtgatctatggtctaggtccaacacataccagatctaatcctaggcgtccttttcccatccaacggttatcggcccttcttcctctaccgagctgaccacggcggcgctcagtgcacggtggaggcctcgtcggagtaggtagatccatggctccagtgcgccacaccctaatacgcaaggcgcggaatgaaattgagatgaaggcgaacctggagagcgggtccttaccctatgtccggcattgtttcggtcagtccaaggcaaaccgcgaatgcccgacggtggaggcaaattgggcgcgctccggtcaccctcc

SEQ ID NO: 28693 - DNA, 540 bp, Zea Mays
cgagatcgaatcgctgggaggcccaatcgtcctcgggagcacgaaagctgtagttgtagctagtgttggcctgcgcaaccaatcgccaggtccccgccctcttcgttctaagcgcggcgcttctccgcccggttgctcctcctacggagtcggctccgtcctactacaccgtttcccccccaaattttctggcttttctgggcgatgatggccttaccgcccgccgccgcctcttgcgttggctggttacccgcgccctgagttcctgcaatttttttcttttgtatttctgattgctcaccttctttgttgtttgcgacgaccgtccggaaacacgacggaacgggggcttctacctcgagaaagctccccatgttcccatcgccttgtacttgcggctgcctagttagtacttcccctcgaacatgtttggcgcagttctctcagctgcaaatcacagatacgctagtgtgtgtcgagtacccagagttttcccttctctagaaaacatctctatctcgagtatgttgcgagtccttc

SEQ ID NO: 28694 - DNA, 1537 bp, Zea Mays
aaccagaagcaagaatcatgtggaccgaatggatccaaagatcgtatactaagatcaacttctcgttcatcatcttccagagaaaaaactatggagaaatcatgcagttcagcacacaagggcaaaagaaccttatggggccgtacttcagtaagtgaaaatgttattggtatagttcatattaatactggtaggataatcttacaattttatgggaacacttgatatacaggcaagaaaagacctgtcaacagaggagattgaatgctgcagcgatgatgagtaagtggcctgggaacctttgacctttgggcatatcctagctgtttattgaaagaattgcaaacatatatcctttaaaagcaccacgattctttttccagcttttctttatcaatactttattttttacttgtgatatcggtccatgtttaataccatcgcaaatttgccattcactgtgaagttgcccttgcatttgatgtttgcatgttgacttcaactagtaaaattataacatacaaacttaacagcagtttggaacgaaaaaaaatgcaaggaagcttttacaatttctggctgacatttgaggtattttctgatgtggcttctgaacaagggcccttgttgagaaacttgagagtaacaagattgatctccaatcaaaaattgcaaaggaggtaaagccttttctcctaggatcacatgaattgggttaagtggcattggatacctcccgatgagatgatattgttccttttctttcataggccaaagaaaatgcaatcctatggtcaagtctagaaaaacggaaagaagaactacatgagcgtcgtttagcacttgaaaaagaagtaagaactgaagggttatcttttcttttcatttttagtcagtaaaacccaggaagcttttaccactgaatcattttgtctcgataagaggtttttgttccatcaagaagaaataaagaccatattgattgaataaataaaataatgccaaaagtgtgcagtatgcaaaattatggccatgtagtatatcattcctctgaaggtgtttgggtgtgttttctcggagtaagtcatacatttctatttttgacagcaaaaaaatgttgattcaataggttgaaaatttgagggaccagctgaagagggtgatgaatttgcgaagggggcaggtgtcctcgccttcaacaatagacagcaaggtagtttcctaaagaagtgattagtgagtttgttctcagtttctttgatctttaggaaggtgctagtgctactgctgaatctgatatcatgaacttgaagcaagaggtttcttatcttcatgggcaggtcaggggccagcagctgtgctgtgaatcatgcaaccaacgtctcctaaatacagacaggcttagcgggtaagattttggtccttttttccctcactgttggacatcatttgggttgtagacttgtactaaactgaggccctttctccagacctgaaagctcatcagtggaagcgtcaccgactgttgggagtgatc

SEQ ID NO: 28695 - DNA, 675 bp, Zea Mays
tacctccactgttcccggagctgggtatgtaaaaacttccgcggggactgtagtaccggccggttttggggagagggaaaagaaagtcagaccggataggacagcaactcctcaggaactcgtcgccccccgcccctgcctgcctcgcggccctctctcccggttcggaatcttggatctggctccgcgatttttttaaactgtttttcgagacggatggttgatggaggagggcaggatgggcgcgcacctaccacgcgcgcggatttggagatctttgggggggcttgtgatggaatggaacacgggagaagcttctctcgaatggaagcggaagaagccacccacacacccacttgagcagaaagaaacaaagaaccccaacaggtaggggagggggaagagagaggagagagagagagagactctggtgcagtgcgcttcaagcatggtcttcgattcgccgcggatggatatactgggaatcgagcttcctccaatcgatcacacacgcatgcgcgggagaggaaaccgtcgaatcctacagccaaatgtgtatcctacgctactggagcccctgaggatgatgccgcaagaaagaacagagaagcagcaagcagactgcgtgcgccgtgtggttcgtccataatgaacagggcccctactcgcacgcgg

SEQ ID NO: 28696 - DNA, 281 bp, Zea Mays
ccgccacgacttactctaactccccgtcgatcaccggaacaaccgccacacctctagacacgtattcaccgcgcccaggcttcttcctcacctccggccgccgcgttgctcgtccaaaatttgcggccaccgctcactccgcctataaattgagccctccccaagatgcgtaacatcatcacgtaccccatcgtccagtatcacccccagtcctgccaccgtgagctccaattccaagttctccccaaatcgggtttgcgccatcgcacgaacatcctcac

SEQ ID NO: 28697 - DNA, 286 bp, Zea Mays
aagtcatctcagcgaaaacaatgtgacaggagatcaagagacgatgagtgataagattaaggcaccattaccccttgtgattagggaagtaaccaagaaagacacaacgggagaagtggggcaagattatgggagtaatggtagaaaggttgtggtagcatgcaaacccaaagatatgaagatggtcgtaggagagtggtgccaaacatagtgaagtagagtataggatcacgaaacgccttagtacaaagatgatcaaggatggaggtgatgtggaggatcttag

SEQ ID NO: 28698 - DNA, 397 bp, Zea Mays
ggataatttcttcctcggagcatgtcaaataatgtagtcaacatcttcgttcgaagctttgggggcaggagcttcagtcttttctggtacaatctgccttgctgttttgtcctcatgtgctgtaggcttcgtctcggtgggcactgaaggcccagcttcggctttggcctgaactttcgtagcttcggtaattttcttaggagcagggctcaaggccttcgtagtctctataacagcgtctaatacgctggccatcctcctcctcttgggagttgcggcaggatttttttgcatttttggcaaatctgcctctatcggtgggctaaggatttctggcgtttttatcaccttttccacctgtggctcttcagccttatcatctctagcttcggctggc

SEQ ID NO: 28699 - DNA, 409 bp, Zea Mays
atagacttaacaaaggggccgacggagcgaaaagaaaaagggttatcagcattctgagtaggcaaactgtctggtctgttaaggaagaccaagataatttgaagaagatgaaaacaatgtcggagctgaaggcaatgactcttaaaaaacggaagcttgctgaagaatcttggaagacgaagacacaagatgtgctgaaaccaattgcaaacccttcgtcttctgctgctgaggtcttagaaatattgaaggtaatgactgagtccttcccattcacaccgctaagtcctctggaattggaactgaccagcctcttacagaaaaaggaagtaccttcggctgctgatgggagagacgggggccagaagaaacgacgcattgtgaatatactacaagcaattgaacaaac

SEQ ID NO: 28700 - DNA, 652 bp, Zea Mays
cacaaactgagcagagcagagcacgcaagcataggccagcatggaatacacacaaggcagatcacaaactagttgctacaatgaaatgaatccatagagaattagcacaagcattcatggagcagcacaaaaagagagcgctccacaccaagcgctggagtctacaacaggagaaccaaaatacctggagcttgagtctcagatttgggaaggttgcagatgagagctggacggatggtgaagagccgaagagaagtgacggaggacagctagactgcacagctcactaaggagtgaggacctaggtcacacatgagcagctgagttgacatgcaatggagaacaaaccggctgctggacaatgagtggttgcgggagagaggaaccctaaggttgtgcttcgttgctttcattagggcctatccagacttgtacagtgcaagctcgtaacgtttggttactcaaattgggccttaagcaggcttagagggtgcagaagcaggctccaaaccagcattatggagcatgccaaaattgattgtgctagcttatgtactcttgcacaagccatgggtccacaagattgaagtgccctcgcgtcccaggccccttaccatggctaacctccacctgtaccccgtcccttcaccac

SEQ ID NO: 28701 - DNA, 671 bp, Zea Mays
attgaatagaaagagaaggaattagatcctaaattttaggagtttgttagattctaaagtttaggagtttgtttcagattagtggctagaatagaaagatacggaattagatcctaaagtttaggagttgttgcaagccaagactatatatatctataaccggcacttgagggaatcaagcaagaatttagtcatccagtcttcttcctcttttccctatcaagccgacggctagggggtataaccctgccagcgaagacggaccgagactacgagttgcggagtcgagggcaagctaccttaggaaccaacgcccttgacaacctggtatcatcgtcacgtcgatcctcttccacccattcagatcagtactccacagccgccgcgcccaaaatcagccatccaccatcaccacagtcctctactgcctccgccccgcagccgccagccatggccgatcccactatgaaggacatgatggagatgctcaagtccatcaccacggagatgtccaccatgaagaccgacatggccgctctgaaggagcagccggcttcgagtccgaacaccggcgaccgctcagatgggcagcgcgatcttgatcgccccccagattccagaaactcgacttcccccgctaccatggcaagtccgaccccatgctcttcctc

SEQ ID NO: 28702 - DNA, 434 bp, Zea Mays
agtttactgggatttgtggcacatttgtatgattgtatatgtatgacttcttctctatgtggcgtgtttgtttggtctctctccctgcttgcttgtacaataatgttcgtttccatccatgccgttttctgataatattatttgttaacctttatatgtagtaactgctcgctgttttctgataatcatgatttatacgaaatttacaatggaagatttgcatgacttggataataaatatcaatgcaactcattttagtagcgtgattaatagggactctctaattgtttgtttgttactgcacagttagatactgcatttttattttgtgttggagcctttgcattgcaaagcataggtgtctaagcattggaaccactaagggcatggtctacaggacattttaagtgtatgaaactaatggcatttggtt

SEQ ID NO: 28703 - DNA, 599 bp, Zea Mays
gagagctgagctcggcgagaggagagatcgagcaccatcgtcgcgcccttcattcccatgccctataagatagatccgtgaccgagcccgtccatccgcatcaaggctcgagctgacctcaaccacggactctggagcagcgcgggtcaaggtcgggcgcgagattcgccaccggcgcccctcatctccatgctcgttgggcatctactacgtgttcagaggtgtgcgcctgtgaaccctctgtatgaacccgtagaccgccaagcgcatggccgaccggaggcacgacgattgctcgccgtcgattagcgccgccgcgggcccgtccttcactgcaaacacgctcatcttcacctctaacctcggtaaagaaccctttccctctgtccgctttcagctcctcttcgcaatgcaccgatcggatttcgctgttgggcgcttgggaacgaaatcgttgtgccccggccatggcgccaccgtcagctcgggcggcgtcgccgtgcccaggcgaccaaggggttagggatgttctggccattggatggctagggaacgaccttgatcggatcgcgtgtacccctttcgcacatgggacatct

SEQ ID NO: 28704 - DNA, 427 bp, Zea Mays
gcaagaaataaaacatgggtccccacggacagtcccgtcagctgtccccgacgtggacgaacccacttcgaaggatctcatcgatggagaccgcgtcttcgccctacaggctctaaataaataccaagcccaaacaaaagcatggcgtgaccacgcagtcatcccgagggaattcagcgaaggagacctcgtactcgtctggacagctcggacagagtccaggggcaagctggagcccaagtgggagggtcctttcatcgtcaagacgaaggcgtctcccagcgcatacaggctcgcaacgccatccggcgaggacttggagcattcctggaacattgataatctccgcaagttttttgtttgactcctcagggccagctcgcccttgtaattcgcaaaaacaattttattctggcccgcactcttt

SEQ ID NO: 28705 - DNA, 299 bp, Zea Mays
cgaggcaaagaatgattctgattaaatggtcggattaccaacctggttcgcttctcaggtccctgattggacctgtcacccccaaatcccttggattttccttggcatgtattcttggcttctaccgtgacaccccagtgtcacctagggttccttctttaagctaaccccaacctattatcacatgtaaacctagtaaaggaatgaacattaaagattaagaacaaagatttataatgagtctcctcaaattctccttaatcttgtcatgaaccttaaaggaagactctcaaacccta

SEQ ID NO: 28706 - DNA, 309 bp, Zea Mays
gtacgaggaatctggaattgactgtcattttaaccggctgtttgttcatggtatcaatcttttcgctgtgtgatctggataccctttacctattccgctttttccttccctactccgtttgtcatggttaattgatcaggtttaggcctgttttgatccttgtggtaaacattttgtcggctaattttagcaccttaacctctaaacaggtcgactaacaaattgactaattgttttagcaccttaacctctaaacaggtcgactaacaaattgactaattgttaactggagcgctgacaaactgttta

SEQ ID NO: 28707 - DNA, 389 bp, Zea Mays
agaccgggtgaccttcaagaatctgagggtcttcagctctcctgggttgaacagggttggatggagcgggctcttggatccgtagggctctacgtggttatgggttaccaagtaggcctccatcaacttctggacatgctcatccttggcttgcttcagagcttcaatagcaaatgacttcacgactttccaaggcagttgcacgggcttgagctgtggtgagatccacatggagctgacggttgcacttctctgcatcttctgctcgagcaatcatctgacggtggtgccgagccaagaaatcatactgtgcatcaagggtgagcaggtatgcagtgaggtacacgactgtggggtcgtcctcaagcagctgctgctcttccaatgca

SEQ ID NO: 28708 - DNA, 380 bp, Zea Mays
cttgcttgcatcctcttgatgtatgcttcgtcatcaactggatgacttccccgaaggaaagttatgatctctgttctccagtctttgctgtgtgtaggggacactgttaagatagctctttccatcaaatcgaccaaaggtgcctttagtactccgaagaacacttcggggggcaaagggagcccatgagcggcagacttggccaacatgttagcatgcttgttatccagtcttgggacattttttactgagaaaccctcgaaggaagattccatccttcggaccatgttgaagtacttctcttagccaggatttttttactttgcttgacttatccacctggcctatgatgacttgggagtctgatttcaatactgccc

SEQ ID NO: 28709 - DNA, 719 bp, Zea Mays
gggacatccaattgctttcattagtaaggctttgggtccaaagaatttaggcctatcgacatacgagaaggaatgtttggccattttgtttgccgtggagcattggagagcatatttacagcatgatgaatttgtcatcagaacggaccagcagagtctgactcatatggacgaccaaagattaactacaccttggcaacaaaaggccctgaccaagctaatggggttgaatttcaaacttatttacaagaaaggggttgagaatcaggtggccgatgccctatccaggagaccaaatctgaaatgtgatgacacaactgttcagttaaatgtgcttgccagctctgcaattgtgccaagttggttgatagatgttacaaggggttatgagacaaatgaacagaccaagaaattgttgactgcgctgtctactgggcactctgtggaacatttcaccctggtggctggcatcatcaaacacaaagacagagtgtggttgggacacgatccggaactacagtctaaggtgatcgcagcccttcacgacagtgctattggaggtcattccggttttcctgttacctataggcgcattaaatctgttttcagttggcctggcatgaagagtaagatcaaagagtttgtagagacctgttctatttgccaacaagcaaagccagatagaagcagatatcccgggcttctgctccctctaccca

SEQ ID NO: 28710 - DNA, 293 bp, Zea Mays
acaatgaacaagaagaaattggagaaaatggagcagaaatcacaacagtattgcatacctcatcatactaattttcttttgatgcatcacattacatttcatactcatgttgcgagttgcgacggcacataattgaggttggtcaagccgatgagagcacgaacaccacaagtggcaccagaccgggggcatcgcatcgtaggggcccctgcaacgggcgggccggcgacaaggtgggtgaagttacacttcacaaagagtgacaacaaagtcatttagtactttaatgtgac

SEQ ID NO: 28711 - DNA, 501 bp, Zea Mays
gacatgggattctgccgcagaaccactccttaccgtggccggtgcgtctgggggcacggactgcgtcatgggtcccctggcctcgatcgccttgtcactctcgtcgtgttgcaccatccacgtcgaggtttgggctgctgtgtggggatcctgtaggttgcggccatggcaccaccgcgatggcgacgacgtcaccgcctggtctcggcgtggggaggaagacacacgatcgccgttgatcttctgatgagcgggctggattaaaacaaggtaacgcttcgcctgggctcgtccaccgccgtagatctaggatcgtagggccgctggcatgcgtaatatattaactgtagatcttggatcggacgattggagtcacgtaccggttcgagatggggtccgatctgatctaggtcgcacatcttcgattcaacggccagcgtgtgccgataccccttcagccgtgcgcaaattattaaatagaccctctggtttctattattc

SEQ ID NO: 28712 - DNA, 344 bp, Zea Mays
cccacggcagtccgagcagctccgacaagcaattcgaggtcgaccgccgcgcaatccgccgaggcgaagtcccggtcgtaactcgctcgaccagaagaagctcccgcacccagaccgaggcctaaacactggggaaccagccggtcgacgacggcggcccgaagcttgccccgatcgcgattcaagacgacgaagcccaagtcctgccaggtgccggattcctaccagagttgagcgctcacagatgagggagacgagacgattgcatgggagggaagactcaccaagccacgaacacggcggagctcaattccacgacgagctccacccgacggagctcccac

SEQ ID NO: 28713 - DNA, 460 bp, Zea Mays
aatatggttcaaggatcggatatgagttcctaagattgatagccttcgtgagactatattgaaggaggcccatgattcggattattctattcatcctggtagtaccaagatgtatcaggatttgaagtaaaagtattggtggtatgattgaagagagatgtggctgcacctgtggttatgtgcgatgtgtgtcaaagagttaaggctaaacaccagaggccaaccggactgctgtacccactaaagatacacgagtggaagtgggaagagattggtataaatttcattactggattgcctcgcaccctgaaaggatatgatgctatatgggtgattgtggatagattgactaaagtggctcatttcattccggtcaagactacttataaaggatcttagctagcagagttatatatggctcgaattgtgtctccatatggagtaccaaagaagatcgttt

SEQ ID NO: 28714 - DNA, 348 bp, Zea Mays
gaaaaagttggggtcgatttgagctattttggctggtttaggcatttcaccaaacaattggtgtgcgaggtttgagaatggtggtgaaacgtctatttagggtttgaaacctcctagagggagctcaaaatctgtaggggaagcatcatagagtaccagggactctacgacacacattgatttcacaaatatcataagatttgagagaattgcaaaaggtaggtgagggatctccttatggcagagaggagagatagagataggaggacatctcaccagaggggagagcacgagctctaggcagaggggcttgccggagctagacggccgaagatcgccggcgatgag

SEQ ID NO: 28715 - DNA, 328 bp, Zea Mays
atggcgatgaagtttgcccaccatgtactagcggggcctcgcagttgttgagcagcaaacaggggcttctaagtctccgtgcatcagatcagtccaaatttttgttccatcatgcggatccattcatccaccaccagaggttcttctcctttaatgaagatagggggacgagtttctgagaattccatataggttgtgtctcttggagcttgattttggccttggcctctttgtggatgcatctgatttcctgccatctctcggagaaaccgggtattgtcagcagtagcgttcagcagggtagcaatgacctccgctagagttggag

SEQ ID NO: 28716 - DNA, 451 bp, Zea Mays
tttgggactctttcctcgtccattatgaaattgctactatttgacctctattccattttgttattgacatgctcgtatccttacatttttaatacccttatcccttgatctaaagtacttacccttgtatctctgttgcctatttaaacagtttagtttatgtgtccatgaccttcttgtcttctgagatcctttcttattttgttgttaagtcgctatcttttggcaatttctatgtccttggccttagtatgctcgtatccttggaatcttgtatactcttatattcttatgtatgcttattttcataccccaataactgttcaagacatttcagttaacatgtccttgaccacccgttttttaatggtccatgagcgatcattttatgttgcccatccttggtgatctcgttgtttccttgtaactccactcggtaatgaatctttac

SEQ ID NO: 28717 - DNA, 472 bp, Zea Mays
ctgaatgagatgataggggtagttctaaagaacttcgaaatatatcttcatcagctgactcctaacgctattgttaggctcagcgtctttatctgggccctccgaagccaagggatgagcccagatgccgaagctttctgccgagtgcatgagctgcactatcaaacgaaggtcagggcagatggtctccacaaaaattttggttgttataattttgcgtatcgaaaggatacgaaggcaccagtcctcagctaccgcacaaagtggccaaccggctggaaaaatgaatggttttatatgaaggctgacgagaaaaatagggaaaaactgatgaccatggccatgagtccactgagtttgagcttcggaatgaccaggcctttatgcaatatgaaactggggtcaccctttcagctagctgaagtagaatttagagtggtagctgagcaaatcattaccagggacttggtgc

SEQ ID NO: 28718 - DNA, 415 bp, Zea Mays
tttgcaccattcaaatccaagacatttcctgccttggctaaccttttcacttatgtgaagactcggttcagttgcaccattcaaagtgttcagtgtgacaacgaccacgagttcaataactccttaactcacacttgtcgtcctactccagatatagtgcccatacacgtcctctcgaaacagtgaagtcgagaatatgatttgttgcattaataacatcatatgttcgatgctccttcaggcctccctagccccgtcatattgggttgaaagccttcaaaccgacacataccacatcaatcggctagccaccaaaacatcggcatttggcaccccaccaccattttgtccattttggtacacatctgtcctaacaccaccactgggtttcggctgcacatgttactccaacatg

SEQ ID NO: 28719 - DNA, 392 bp, Zea Mays
tgagaagagtaagatcagtttcgactgtgtctgtgcctgtgttctgctacgccgttttgttgggaggtatgtggacaggtaattctatgatgaatgcactatcgtgtaatgtgttgagagaggcgacggaattcgcctccccaatcggactgaagagtgcggagtttgcaattaagctggcgttcagcatgcgcttgaaatagatgaaaggcatgctcaacatcagattttcgtttgagaagataaatccatgtgaaacgactgaaatcatcaaggaaactaacataatatttaaaaccaccaacggatgtaacagctggcccccaaacatcggagtggactagttcaagaggggaagaggttacatgcattgatttttgaaatggcaattg

SEQ ID NO: 28720 - DNA, 835 bp, Zea Mays
gtgtaaatgcagatgataaaatcacaacattacctagttgagtacattactatttgaatgtgaacttgaactctgtcgtgggggtgggtggggggtggagtagcatgatgtataggtaggtggagcaacaggaagcttgtctctgttcacatgaattggtgtaaatatagctgggtttgaaaggaaatgatgattagtctctcttgaggctattcccaaacagatgcacctctaaaaatagaattttaaagttttacgcgttgcattaagtttagtccaccttttggaggtgatatgatgtgcattagttaagtgatttcgaggtctggcaaatgctacatccttatcttgactgcaaggggggactaatggatggaataattttgtctgtgctatcacaatatccaacacttccttttgctactgtcaggttcagtttatggcgagcagcgcaagcacagatctgacggggttttaaatttcgaattgaaaagcctgaagatttgctacaggagagaaaagcctgaagatttaattcagcgaagtagtgtgaaaattcgtatccaagcgaagaaatctgcactgaaacaaacccaaaatcagaagtccagcactgtcccctacctgacccatagaaagcgatatgagccaccactcacctcggctccacacacgagggaattttcaactgtcgaagaaaatagcgcttgatggcgcaataacgaactcgtggagaacgacagcaggtgcaagaacctaatctcccaaatactttagatccacgaagagatgcaagaaccaagaccctaaacatagacgcaagaaccaagaaccc

SEQ ID NO: 28721 - DNA, 405 bp, Zea Mays
tgagtttgggacactgttccgccctggccgtcgtacccacttgcctcacggccagtccggataacctcgccggagttggccgcctgccgctcgggtgccacgtgcctaaacgtattacttcatcgcagtgactcgccttaacatatccggtcatcgccggtggtcttgccacggtgaagtgccacagtaaccctgtgccagtgaccacccctttctccggccgccgcgcgtcttctcaaaattagcctccaccgccgatggaacctataaattgtcgccctagtgagctccgctaagtagttgtgcacccagtaaaccagccctcacctccaatcgtcccctacagctccccaatttgggatttcccccaaatctgtcaagaacaccgtagtgtgtgagctcgcc

SEQ ID NO: 28722 - DNA, 377 bp, Zea Mays
gaaaattaattaccataaaactgagctattctgtttcggtaaggcagtagagcaggaacatcaatatcaacagattttttgttgtaagaaaggggggtacccgtttaattacctaggtatcccgatgcactacaagaggttaagaattactgattggaaaatgatagaggaaaagtttgaaaagaaactcagtggttggaaaggaaagatgatgtctgtagggggtcgtcttgttctaattaattcggtacttaccagtttggctatgtttatgttgtctttctttgaggttcctaagggtgtaattgagagattggattattttcgatctagatttttctagcaaggtgaaaatcataagaagaaatacaggcttg

SEQ ID NO: 28723 - DNA, 402 bp, Zea Mays
ggttcggctaggacacctcaggcgagtactaacaggtttctggacatccaaagttgtatcaacctctggaaggggcaccaccgccaacgtaccaacaggagcagcgtcggaggaatcctcagctagcagatcaagcatgtcatttatgtctgcatcactagggttcaggggctcttcaaaatgaacctgccgttcatcatcaggaatctccccaagtgaagcaaccaaagtactgacttcttcagcagagggtcgcactctaaggcccaaattgccatcagtcacaggcggatttgacacaaaaaaggtgaaggctttgggaggaggcaggttccaggccgagtatgccgctggagcaccaacatttgacaccttacccctgaggatcatttcaagtcggct

SEQ ID NO: 28724 - DNA, 398 bp, Zea Mays
cctgaggagggctgcccacgaaggggtccttcacggcggcgctaagaacggtgaggaggagattatggcctaactaagtccctcagtgaaattgggtggtttgcgcaagcactcgtgtgtgtgatgcagtgaagaagcagcgctcgtggtcaatttatagagggatggccggaggtggacgagattcaaagatcttccagtgcgctggcgagctcacccgcgcgggcagggccacgacgagcgtccggtgaacaccgattaactggacaacgccacctcatggtttatgcgccacgtcgcggaagatttttaccgcggccgcaagtccgatcctcagccgcggtggcattcttatctcctacgaggtttgctgaattacggtgaacagtatgcctgcc

SEQ ID NO: 28725 - DNA, 394 bp, Zea Mays
atggtggagggggttgctgataagtgtgcacgacaactctagggttgtcagctggctgcgcccgtgccatcctgtctttggtggccttcgtctctgggcagtctctggtttggtgggcgcagtcttcgccgtgaaaaagacagtagaatcggcgcggcggctgcgcacgtccccgacccctaccgcgagttccattttcgtggcctggggggatattcctgacggcgaggggcgtcaccagcggggtgttggttggtgatgttgtgcacctgctgctgattgcggccgtctcgaccggagtctggctgcggagttctggtccacgtgcggctggactgtggagcatctttgagtttcctctgagactcaaccttgcactggtggagctctttgg

SEQ ID NO: 28726 - DNA, 726 bp, Zea Mays
aaagatatgaaataacagaaccaaatccacatacctcgtgtgcacctgagtctgtcaggtgttcgtcggagaacctcacgtcgcggtgactctgccgcggccacggggaaacgtcacagtggtatcaaagccgacgatcttcggagaccgtcactacggcgccgtcaacaaaaccgtccgtgcagacccgtttgctgctggaagctatggccggagcggagctgaagggagaggagcgttgggataagatgatgcgggtgttggagagggtggatcggcgattggaggcgctggaatcagggcaacagtctgcaaacgaggctgcgcgaaaggcggaggaggaacgtgtcatcctggcacgacaggtggacgagacagggaagacggtttcgcgtcttcgactggaatggatggcgcaggaaatggaaggtatggagtctgatcctgagagggagaatcgtggtcgacgagagtttggtagaagaaatttggaggagagggagcagtatcagtttggagggaatagaaatttggaagagagggagcagaaccagtttaggggaaatagaaatttggaggagagggagcagtatcagtttgaagggaatagaaatttggaagagagggagcagaaccagtttagggggaatagatatttggaggagagggagcagtatcagtttggagggaacaggaattttcgttccattgatttgccaaagatgt

SEQ ID NO: 28727 - DNA, 374 bp, Zea Mays
gacggagccttatgaatgggctgcgtacccggaatcagcttaatctcaaaagctacatcgcactcaggaggaatgcctagaagctctgccggaaacacgtcagcaaagtcacacaccacccagatgtcctgcgcccacaaggcagcctcaccctccaccaccatggagaaaaagattcctgacttcctggaccggtgatccggaagcaattgcgctaacaaggataacgtgaacttaggggaacttcccaagaataccacctccctacctaatggcgcttgcaataacactgtcttccaaaaacaggatataactgcgcgatactgggataaccaatccatacccaagataacatcgaatgcccccaaggaaat

SEQ ID NO: 28728 - DNA, 391 bp, Zea Mays
gaaagctagaacaccaattaagaaagcttgaactgacctgcagaagggtggccacgacgaggtgttcacggggcggtggtttggctgatttgggggaaatgggaaattaggcggctctagtgaacaattggaggtaggtgttagtgcattggatgcgtatttacctagtggagccgcagatgcgctcaatttataggctccaggggcggtggcacgtgaatttgggttggtgcggtggcgatcggagaagaaaggggtcacgggcgcacgagattagtgcctttcaccgtggcggctctccggcgatcaccgggcatgcatgacgcgattcactgcgacgtggtaccgtgcttaagcacgtggcgcacaggcggtaagtggccaatggcgg

SEQ ID NO: 28729 - DNA, 737 bp, Zea Mays
gatcattggttatgttgccatatgaaattgagagaaaaattgccttcaacagggactgataggctgtctgaatgagttagtcgccatggtatagtgctccagatggattagaccgccagcagggaatcctcaccgccgacgactccctccgccgcgattcgtgtcaccggcgactagattcgtgcctggcgttgatgaatggcctcgcgaggtaaaaaaccgtgccctggacgccactccggtgactcaccgtcgtagcccttctgctttatggctggagcagataagctcgccggtgaaccgccgtcgtccgaccttgtgccgcgtgtcccgacctcgccaccgcatcgccgtgactccctctaagcttcccgtcgaccagcggagttactgccacggcgttgaacacgtatccactgcacccgtgttcttcttcacctccggccgccgtgtgtctcacccaaattcgcgaccatcgctcgctcctcctataaattgagcccccgggcagctgcactagatcatcatgaagctaacgcacccaccctccccctcaattaaccaccatagccggagaattccctatttcccccaattcagtttccgccaccgtgaaatcaacttcaccgtggtcagccctccacaggtcagccatgctctctcacagctttgtgatgcttaccgaaccctcaatttgtactaagtagccttagatcgccgggaacaccttcatccgt

SEQ ID NO: 28730 - DNA, 286 bp, Zea Mays
gtgggatctcagcggatggttcaggttaagtccttgggataccctttcggtggtttgatcggtgtcgtagatcggtgatccgatggtcgtgatgtcgtaacgattcatatatataactctctaatctagaccgtgtggtttagatctggcggccacaattcaacgatacccattcgcgtggcttatttcctaaagagacccctgattattttagaaccaactcgcagtccactgcgctgggtgatctgagtcataggaattcttgcacaaaagaccctgtgctttc

SEQ ID NO: 28731 - DNA, 393 bp, Zea Mays
gtgcaggcgaactcaaagcctgaggaagacctcgcggtacctgcgaatgaacctcaagccgtgacctctatacggctgactgaagaaaccaagagaatcaatcttgggttcaccaacgaatgcaaaacatctatcatcagttccagcctggatgacaaataggaaggcgcgctcgtctagtttttgtaagataaccgagacgtattcgcatggcaacctgcggatatgccgggagtcccgagagaactggccgagcacaaattgaaggtctacccccaggcgaggccgatccgacaaaaattgtgttgcttcacgcccgacaagggagaagccatccgtgctgagctggctcgcttggttgtggccagattcattagagaagtattacatcct

SEQ ID NO: 28732 - DNA, 464 bp, Zea Mays
gtttctagttggattgttactatatcactcaggatgtcagattactcagcttatttctagatcaattgaattattttgggattactcagggcattggatcactcgtattgtctttggatcacccgactacagatatattcatattatttttggattacccaaaactccagatcactcagcttatttctagatcatcgaaattactcgaatcaactctgaattactcacattgtttcagatcattcatattaattttaggatcattatttctagattattcctgttatttcaggatcactcagggtttcatattactcaaattatttctagacattcaaactgtgcattacgtacctcggcgcactcagatcatctctgcatccttatgtaactggcgtcatgaaccctatatgaccacggttaaaacgaggcaatcggtctggcccgccggtgctacatgcctc

SEQ ID NO: 28733 - DNA, 600 bp, Zea Mays
gtcagtgcgccggtgtagatcttctgtccagctcgtcgcgcgtcgctgtgcttcggtgctgtgcccataacgttaggtgaggcctgttcagcggattttaaaatcaaacaaatccgtctcgtcgcctgtgcttttccaacagcgcaggatcgctgttcttctgtccttcgtcgtagcgcccatccctctgctttctactacatatgtggagccccttcgctggtgcctttgtctttccgtcggcctgctacccggcggaagcgcctttctcctctcgactccgtcgccgtcgtccgttcatttcttccagtgctaatttctcttgtctcggttcctggaactcatgatgtctgttgttcttgtagatctgctgcgtagcagaagggcagacacgcgcaggtcgtctcttctgcgcctattcgaggtgagccactccttccgccattcctctctttgttatgttgatttggtgtccatggatggtctctctgcatttttccagactggtcataagtgaactcattactgtctttggcctgatttacttgctcacgttgatgaatctggtaaactttactgtctttggccttatcatttaag

SEQ ID NO: 28734 - DNA, 401 bp, Zea Mays
ctaacactttaccatttgttagagttaaattaatcaaatgaggactaacaagtagacttactaatttttatccatgtcatttcgtgcactagaattaccacacacgtttaacaaatgcattcaccataaccatgcgcatttaaaccataacaagcaatccaccgtgattacgagcttaaccacacgcctagataagcatgatttgaaatcaaattgcccatattttaaatctcggcataagcttggcaattggctaacgacgtgacccttttctaattaccaacatacaccacctttcaccatttttggatacttgcacgtcccaccgctattgtaatacctaacaagtacattcaacccctcagtaaagcactagcacatttcagaaaatttcctgagac

SEQ ID NO: 28735 - DNA, 372 bp, Zea Mays
tgtgccagccacctgttggttgtattggctcaccgaatgatcctgtttctatcgattataagagtgaatatcagatgggttgtattgtttcctaggcgttggagctgatggcaaggtgagaagtcacctatcacattcactaatggaatgtgaaactttacatgcaaaatcggttcaaatcatgggtcaaagagaacttcctgtaactttatggagaagctgaaaggtcaaagagaacttcctcgtcgtgcgagttgtggacttgatctattcataatgtttattgtcatttttataattctctacttatgttagtgatgactttgccaaattagtgaacctgttatatgttgagcagttctattcaataac

SEQ ID NO: 28736 - DNA, 290 bp, Zea Mays
gaaatgatcaaacaaaaggtggacaaatacaaatgcttccgtcaggacaacaaaggaatcctatggtttggagaccgattggttgttcccaagaaccctgagctcagaaagaagatattggatgaagctcacctttcaaaattctccatgcaccccggtagtaacaagatgtatcatgatctcagatccttatactggtggaccagaatgaagagggaaattgcctagtatatatccgaatgtgacacctgctagagagtcaaggccagtcatttgaaggtagcaggcac

SEQ ID NO: 28737 - DNA, 455 bp, Zea Mays
gaattgttgtcttcgccgaatggggcgggcataggcgaaggggatcttcgggagctctttgagggtgaggagttgaggataatgctgtttaattacagggagatgggtatcattccgaaggttgagccgatgtgttaggcgatgccctcgccgtgtgtatgtaattgtaatggtggtgtggcctgttggtcgtattcgtacgcttgtattgttccggctacgtatatgggcggctttgtgcagagtgtctttgtaatgatagactttgattaacgttattctggctgcgcccttaggtaattgttgcgctgtcttttgaataaaagactttgtttgacgcttctgttgtgctgttccggctgcacccttaggcgacttttgctcggaatgtcttgtaaagaaaagacttcgaataacgctcttgttgagctattccggctgcacccttaggcgac

SEQ ID NO: 28738 - DNA, 841 bp, Zea Mays
atcaaggcttgtggtttctattctagtgaccatgatcctgcattgttcattcatgtttcttcacgaggacggacgttgctattactatatgttgatgacatgttgattacaggcaatgatccagaccatattgctcatgtgaaggcgtctctgagtaaggaatttcaaatgtctgacttgggggcactcagttatttcttgggcattgaggttttgcagactaaaaagggtatttatctttctcaggccaagtacatacaagaccttcttgatcgttctggtcttagtgatactcgcactgttgccacacctatggatcttcacttatctcttcgtccgactgatgggacacctttggaggatccatctcgatatacacatcttgttggcagcttggtttaccttactgtcaccaggccagatattgctcatgcggttcagattttgagtcagtttgtctctgctcctacatcagttcattatgggcacttacttcgtgtgcttagatatttacgggggacaaaaacacaatgtttattttatgactcaaattccccacttcagcttcatgcttactctgatgctacctgggccagtgatcctacagatcgtcgctccatcactggttactgtattcttcttggatcatcccctgttgcttggaaatccaagaagcaagctgctgtatctagatctagtactgaagcagaacttcgagccctggctactactactgctgagattatctggattcgttggatcttggctgatttaggtgtttcttgtgactcgcctacacttcttcgctgtgacaatactggagctatacaaatttgtcatg

SEQ ID NO: 28739 - DNA, 295 bp, Zea Mays
acatcgaggcagagacaattcagattcaaaaagatctccagtactgggaaaagccagtaaagattctcgactcagcagtccgaaggacccgcaactcagaagtgagactttgtaaggttcagtggagcagagaaggagaagaggaagccacctgggaaattgaggactctctaaggagagaatacccttaccttttctcaaaccccgtctgaatctcgagggcgagattcctttaagtggggtaggtttgtaacatcccaatttctaacccaggtttgaaaccctaatctaaccc

SEQ ID NO: 28740 - DNA, 412 bp, Zea Mays
gttgaatagggtttttgatgtcattggtttcgtatacctagattactgttatccttcgcgaaagcaaggaaagaaaagaagagctgctgcttcggtgatctctaatacgccgaagccaaaaagagttaaggttttaacacatcgccccaagcgcgctgcgacggctgaagagctgaggcctattgaagagtcttctgtttttgagtcaagtcactccgctcctaccgaagctaaaacagaatcggccgaagagccaaaacagaagatagcagcaagcagttgaaggctttgtgtccgttgcaagagacagagctaccgaaggtatcaaagattgctgcgataactccgaagaggagaaggatggccagtgtactagacgctgttatagaatctgtaaaggtgtcgactcctg

SEQ ID NO: 28741 - DNA, 1053 bp, Zea Mays
gccaagtaaaatttagagaaaatcgagcctcaaatctctctgtcagttcatctgaaaggaactcgccatggtacagtagccgatcggatcagaacaccagctcagctccccgccgacgaccttcgccgcgattcgtgctgccgccgtccggattcgcgctcgcgacttgtggataacctctcggggtaaaagatcttcgccgccgtcaagctggtagccaccccggtcagccgcggtactcctcccctggctcaccgctcgcgggtaaagttgctcaccgtcgtcgtgccattgccgttgtccaccgcgtgtcctaaccgcgccaccgcatcgctgtgactccctctaaactccccgtcgaccaccggagttactgccacgacgatgaacacgtgttcactgcaccagcgttcttcctcacttccgaccgccgcacatcaacgccaaaattcacggtcaccgccgaagagccctataaattgagcccggactccgctgcttcatcacatcccgcacctcaacaactgagcactcgaatcgattacgccgcagaactaacgcagtccccaaatctccctctcctctgttcttgctccgccgtgaagaactccttcgtggccagcgttcctctggtcagtaattatcaaattactccctgttttagttagtctttgatctcctattgctcctagttgcggcaatttggagtttggccgaagcccaacaccggaacgcacccgtgcgctgtcaaacaccgccgtgacccccctcaccgtcgacccgctcttcgggtcttgttctgcccaaaccaaagtatgtccatggaccctggtgaacccgtgaacctttacccagcctcaatttggccatccccgtcgctgtttgattggaacatattcatcctcctgtccatccgctcagtcaccgtgaactgatagattcagtgtcccctgggtgaaattgatggaggggaaatggtcggggtggatctaattgtgtccctgtcgcttgggagctccagccgtggcgtcatctggccggaataggctcgcc

SEQ ID NO: 28742 - DNA, 351 bp, Zea Mays
gcataaaggcccttttagatcgcatctttctcggccatgaccatctaatcaatggatcaaaaggtatagaatggagcccccccagcttgaatagacaaagagactatatatgtaccatgggttcatagtcgtaccattccacatttgaacatggtagcatattgaccatgggtaggcgagtggaaagtatcctatcatcactggagatggatgaataggcgatggttgttgcgccacctttagggccattttgttttaccgggtgaccgatgtttctttgttggccgatcgtgtagaacgaccttcttgctagcatatttggagagcaattgatcaaaagtagggccagct

SEQ ID NO: 28743 - DNA, 379 bp, Zea Mays
cgagtgctctagtgttgctcccctgcagattctgagctccctagggagggtttcgcatcccaaactaccgtttcaccgatgttctaaactctcgcgcaccacgtgttcggtgaaatgctcaaaccagtcaaaatagctcaaatcgactccaactttttccagcacactctagctactgtcaatacctctcacgccaaatttcacgcctacccgatattccagtcacatgtttcacaaccaattcacctttttagtgatccttttttagccaagtgccaaaaatatttttcctctgtcaaacttcaaaccaagcacccactacactcattttcacaaatatatatctatccatgaagtatcggctcaattccaagtcatg

SEQ ID NO: 28744 - DNA, 796 bp, Zea Mays
gacaaatttagtgtcatcagcagaaatcaaaactctgtcatcaggagcgccggcctctaaggtgacttcctgacccgaagctcgtgccgctgccatgcaaccagaatgcggaggagaagaccctacgtgaacatccatggaagtatgagagggagaaccaactcggacaccctcgggggctgggtcatagctcgcgctacccatccttgaggaccgagctctctgtagcagccacctctaaggctgaaggaccttcaacaagttccatgggaatggagcaatctagatcagcctctcgactcttaagaccacgctccaaggtcgacgaggcacaagatgctgctcgggataactctaacccggcatcaggcacatcagcgcaaacttccatcatcccaccgtccgccggctccgacaacagatcttctgggaccatgtcttcgagagtctgatcaaaatttgccagcgacaattcttgcagaccaacgagagtagacaaagctagagaaggaacaccactactctccccgctggctatgtagcgtcggctgttcttccgaatcaagggaatttcctcctcctcttcctcatcttcatcaataatgcggatggtacacccattgggatcaactttggccggattacacccattgggctcaacatcatcaaggtcacacccattgggttcagcatcagtcaggtcacacccattgggatcagcttcagcaaaaaccggcactggcacttcctcagcagcaggagcagaagggtcggcgtcctgattcaagcatgacac

SEQ ID NO: 28745 - DNA, 641 bp, Zea Mays
agcaatttcaggtttgtgtttctaagttttatatatgtttccttttccctaattgactgtagctttatcattcgtgcaccctttcctactctataagaacctaacgtagaccacggtgcacggttctgcctcctcacggcgcatacgacccacatgttagtgtcttccttcttccccgtgcgcgcccttcccccactacccctgcatctgcatggtcctagccgcaatcggccatggaaggaaaaatcctgtcacagccacagaaggaaacacatcctctcatcgctatccacgcctcgcaggaatcccatcgccaacgacccgcgcgcgcaggaccacatcgcccaatcgttcttcccatgcaccgcggatgccccgcccatattctctgcaccccaaacgcaatccacgcctcgtcgccatggaaggaatcgtaacccaatcccctcgtcgctatctagtgcacaagaccaccatcggcccgcatccatcgcatgtgcaggaccaccccgccatctcattcttcccattctacgcgtcagccccgcccagatcttgcgatgctcgagtacttcccattctacgcgccagccccgcccaaatcttgcgatgctcgagtataagatggaagacacctctct

SEQ ID NO: 28746 - DNA, 528 bp, Zea Mays
gtgtgatgaccttgcggggctggcgggggcttcaatttatagggatcaacggcggtggcccgggaatttcagtggggacgcgcggcggtcggaggaggaagaagagtactggcgcagtggcttggtgtctagcgccgtggcaattactccggcgagccacggagagtcgcaaaggttcacggtgacacggtggaaacactcgggtacgtggcacaaggccggaagacggcggttcaccgacgagcttatctgctcaagccgcaaagcaggggggtacgacggtgagtcaccggagtggcgtccagcgtacggggtgatgatcttttaccccgcgatgctatccagcaactccaggcacgaatccagtcgccggtgacacgaatcgcggcgaaggatcggtcgtcggcggtggtagactgtcgcgctggtgttcagatcttcatcaggcactgtaccatgggatgctccatttagttaacctgacaaccatagtttagggccagatttcttccaaatttctatgacaac

SEQ ID NO: 28747 - DNA, 413 bp, Zea Mays
gcggtgagtaccgcggcgtgagggtgctcggcggtgctcaccctccgaccaacttggaacacaagtttgtggagcaggtatttctatttttcttttctgttcgtctctctccacgaggttcaccttatacaagtcttaacagaaagccctacggcctgacagtggaccaacattattacaaatacgtaaacgacaatgaaacacgtattacacttatgccgtaactccggtgatggttggcgccggtgttacatcaccccctcctggaatggaagcttggccccaagcgcttgaatcagggaaacgagcttgcatcaccgtccagtcttcccatgtagccgaatcagctggaagtccttgccattgcaccagcacttgtacaatagccgcgccacctttcttgaccagtcggc

SEQ ID NO: 28748 - DNA, 284 bp, Zea Mays
ataggacccaccatctggtatctttcatcctttgattcatgcaacaggacctgcaggatttagcctgggaaaccaagtcgtatgcccggacccacaggatcatagttccaaatactagggcactcgttgcagagtggtggagcgtgcgggcttagggtacggaaccatgctaagcagctacacagctccggaccactccaggagacgagcgcccattctctagaactggaccccaggttgccggaccccctgcagcagtagaggggtcctgaactgcaagtctt

SEQ ID NO: 28749 - DNA, 300 bp, Zea Mays
gagcaggtatgcggtgaggtacacgacagaggggttgtcctcaagtagctgctgaccttccaatgcacgcatcctggccatccaaacaggacagtttctctgaaagggcggaaagaatctgagcggtgtgtcggccacttcttcttcatagatctgacacagggccctcaatgccttacgggcgacgacttggcaggtgtctttgaatctgtgcccagcagcagtgacactccattccacatggtgtggactggatccaatgtatacagtcatgacacacttctctgtgccatgctcgac

SEQ ID NO: 28750 - DNA, 377 bp, Zea Mays
aactctataccaactaccatatattatattatttcttttttcattctctaccctttcccacccaactaccagtacagacgaactgccgcacctgctgccttgcatgccgccaacggagaggagccacgccgagaggatagcgcagccactggtagaacgctacatttgaagttttgccatgcctcggcgacggtgcagtcacggatacagttgaccgctgcagttgaagagtaaacactatctctgttaagaaacctttcttgggccaggaaggcccatgtggcccatatgcctgaaaccctagttttgtctataaatagagaggagatccccatatcatgtaacctttgagagcagcaccatatagtaacaaagaa

SEQ ID NO: 28751 - DNA, 272 bp, Zea Mays
tgccatgccattcatttggtggcagtacttgatgatagagatgtcgccttgggcgaaagtgctgaaggcagtgtcgtggtgaagagcatgagcctctcggttgttggggaaccgctccttgatggcaatctaggcctggtgagtcgtaccaccctgttcgcggacaacatcttgggctcaatggtcaccgtgtcgaggatctagaagaggacgatgttatccatccgatgccaggagggtataccggtatagtagatgatgccatgttgttg

SEQ ID NO: 28752 - DNA, 338 bp, Zea Mays
tcctaatcgatctcatgtgactacctctcctttcacctggatctggtaatctttttccttgtgaatcatgttgtggctttatcatccgaatctctagatccttcgtgattcttccctattatctggttatctgctataacccgttctcaaatatcagatgttgatctacctaaatctctcaattttggtcgttctcataccctttcttcaagaatcatgatgtcgctttatcaactaaatctataaatggcatatccatttggatctagggattttgttgttatcttgtggttctctcatgtctctacaagttcatcaacttgatctcgagcttgttt

SEQ ID NO: 28753 - DNA, 350 bp, Zea Mays
tcagtaaaaagcagactaatcaagtggccaaagaggaaacagaggcactaaccagcatttgtcatctccaactcagatacccgtcgctgaagtaacactggattccaatgcatcagagacagagctctttctaggacagaagcaccctgtgatctcagctgatcagccatctcatcaaccaaagcctggtattaaaaacaagtgagtgcagagacaatatttcgcccaaagtctaactatatcaggaaaaaccaagttacctgaagattggagaagaatgaaggaagccccaaatcatgagaaaccgattggtgactcgatgagggaatatcaaccaaggcaatctgaag

SEQ ID NO: 28754 - DNA, 483 bp, Zea Mays
gcttctctagctgcatcctttatggcaggtggtatgggcagcgtggacccctagcgccatcattactacctctatgcgacatcgacccatgtcctccgtagcatgggactcggggtggctcataatattatgagtcccattgatggccagcacactcaagcctagatttaataggtcatgagtggggcgtaggatgagggctcataggtcatgagtggaaggaggactgactctcatactgtggcttggttccatgcgtagtttatgtggtcggtcatgggccaggcaatgaatccactcgagtggcttcctctcggttcgcccagccccttctctgactccacatcgcctgaccctaagctcggtgcctcaaggtttatccaagggtgcgtgcttccagggtagacgattcccttactctcctgctgactagtgggccccagggttcttttccctgacatagagtgtcacacccggttttgg

SEQ ID NO: 28755 - DNA, 302 bp, Zea Mays
ttcttactcagcccatctagccgagcactattggaacaccacaactccacgagagatcaaaatactcaatatcatgcgcatcattatattaacaagaaacaaaagcccatgtctagaaatggaaatggaccaaatacaacaccctccttacgaaagccaaaaacaggaatacaaaaatagatccatcaaggaggacaaaacagctaagcgacctccccccttttccctgaactatggccacaaggttcgccaagccccaaagtctagcgtcctctttgatatcttcaataacttttgtgatg

SEQ ID NO: 28756 - DNA, 450 bp, Zea Mays
ttatgaactagaaccatcaccttcaacctctggttcttgcgttctctacatagagatgtcgtgtgagcagggggaaccggcgagggtcatccaaggggtcaggtttcggcggtgggggtcgacgaggagaagtagaggacgtcgtcaggtggtcgtcgacaaactccggacagcggtaaggctttaatggcgagcaggggctcccccggcgctctggtcagtgagtagtgaggaggaggtgtggggatcgagctcgatgatcgggaaccgaatccctagggctcggcgttgggttttatagagagagggaggagagagggcgttgggtgagggagaaacggccgacgacaaccatcaaactccattgatggcgctgccgcagtgaagagcgagagtggggaagaggagagggagacacactgcggtttctggtgaggggatgagagcggc

SEQ ID NO: 28757 - DNA, 537 bp, Zea Mays
ctgaactacagaggtgctgtccgtcaaagattggactgcaaagatgttaaaggtgctgtcctaagtaggaatgctgaccctagatgctaaaggatatgtcctaactgcagatgctgtccttagatgctaaaggtgcagtcaagatagcagatgctgtccttgtgcagtcaaaactgcagcaaggctgctgtccttggctgccaaaggactgctgtcatacacaaagatgctcaagatttatttcatcatcagatatgcagacagcaagagagctgcacataattgcaataaagataagagtataagaacataagaacactacttgcacacggacacttaacttatattacattaacacttggtgtggacatttctacttttttccagtcagctaattgaacccctttcttacagtacaactgatcttgctctgcctaggttgacatctgtacctttttccagtcagctagaatactgtcatgcaaaaaaaaggaaatttgacatcataattcatcatgcacccatatttcatcttcc

SEQ ID NO: 28758 - DNA, 592 bp, Zea Mays
ttgttttctttgtatgttaatttgttattccgcttacattcattttttccttgcgtaacgaactccgttattttttccgtaactttcttatcgattcttcttcttctgtggtgctgccactgcttttactaatccaggagaaacactgctggagatcaagaaatccttccgcgacggcggcaacgcgctgtacgattggtccggcgacggcgcgtcgccgggctactgctcgtggcgcggcgtgctatgcgacaacgtcaccttcgctgtcgcggcgctgtaaggagtttcctgtggcgaaactactggcctctacttactgctagcgccgatgtgcggtactgacgccatttcctgtatgcaatgcagcaacctctctgggctcaatctcgagggtgaaatctcagcggccatcgggagtctgcaacgtcttgtctcaatgtagtggcgctgcattgtttcctcatgaactatcagatgctgaactgtgcttgacattttttttcacggcgtgttggtttgtgtctagcgatttgaagtcgaatggactctctggacagatccccgatgagattggtgattgttctttgct

SEQ ID NO: 28759 - DNA, 503 bp, Zea Mays
gcggatgacacctgcaactattgcggcaaaatcgaccactgggcgagggaatgccgggggaggaagaaggaccagcaggctcagcaaagtcagcaggcacatgtggcccaagacaacgagtcgtctcttcttcttgcccatgttgcagatgtcgccatcaactcctcgccaaagctgaaccaggcacaagcaccgagcgatgcagcggtgatcagcaactcgtcgaacaccacggcagcgcgctcaccacaggagtgtgttcatctgatggagcagaaggtctttgccacgctcgacgaaaaggaggagcgagatccacgacgctggatctttgacacgggggcgtccaaccacatgacagggtgccgcgacgccttctccgacttcgacatgggcgtccctgggaccgtccgttttggtaacggatcaacggtgtgcatcaaggggcgcgacaccgtgctcttcgagtgcaagaacggcgaacactgcaccctctccaacac

SEQ ID NO: 28760 - DNA, 392 bp, Zea Mays
acgaggcaatgctagactctagggaaggtggcaccccagagcgagctatgctagctgtgtccaagctagaagctggctcgagatcctctcccttgatatccacgtcctcatctgcttccatgtcctgatgcatctcctggtgatgcatctccaggtgctcgttcgcctcctcgagctattgctgggtattctggagctagttttcaagaacctcaatggtgtggttcctttcttccacttgctcttcaagctcatggatccaccacaagatcttcccggttgatgatggtgacctttgcatcctgagtcaagcccatcaaatgtgacatggcctcgcgttgtaggacctgcaggtggtatagtgcactcatgcaccgaaccgtcagtcgagc

SEQ ID NO: 28761 - DNA, 434 bp, Zea Mays
cgaggagggttgcccatgaatgggtccttcacggtggcactaagaacggtgaggaggagcttatggcttaactgagtccctcggcgaaattggtggtttgcgcaagcactcgtgtgtgtgatgcggtgaggaagcagcgctcgggctcaatttatagaggggtgcccggaggtggacgggattcaaaagatctcccagtgcactggggagctcacccgcgtgggcagggccacggcgagcgtccggtgaactccttttagccggactacgccacctcatggttacatgtgccacgttgtagaagatttttaccgtggccgcaagtccgagcagtgcctcagtcgcggtggtgttcttatccccggcgaggttcactgaaccacggtgaacagtgcgcctgacagcccgaattcaaatggctattgcgccaagtt

SEQ ID NO: 28762 - DNA, 551 bp, Zea Mays
gtgagctagaaaaggtgggtggtttgtggctcatgaactcacgatgtttgtctctacatggtggttggtgtgggtgatgctggtgttggggactatcacgtcgatgagctgacaggtggacccaaacacttgggggtaggtaagagctcatatgcacaacgaaacaaactggaggaactatagcttctcgttatccatgtcacatcctgccacagtacgggggtatttatatgtccatctggggtaggtggtacaaaatacggccctacccccggataccagctacattcggggaatatcccctcctacggggtaattatagcattgttcgtacagtaatctgcgcacaccagccaacacaccctcacgctacgatgacgggtgggcccttgtcgatgtcttctattgtgttggaggtgttcggggtcgacttgtggcctttgcccctaaggtctttgcatcttctctccctccagctgtgcctcgcctgatgatggaagtcctttagtaaattagatggcaaaggcctcggcttccacatacaagttgtc

SEQ ID NO: 28763 - DNA, 369 bp, Zea Mays
acgggactacgcgttggaggttggagaagcccgagccgagctcgagctcgagttcgtgcagggagaagaaatccggtccaagaacagagtggaatgcaagaaaggcggcaacttttacccctccaatcgaaagaaaacccccacctcctcctcaatagcaccaaaaccagcgccggaatcaagaaccgctcggcgctacaaaccaccagaaaaacggcgtgctttcgccgcaaatcgaggcaagaccctggtgctccgctgcagcagctgcgattcgagggagtggggactccgagttggatcggcgtggagcagcagatgagaaccggagtgggaagaaatgcgacaacttggtggctgcaagtcaaa

SEQ ID NO: 28764 - DNA, 614 bp, Zea Mays
agagatgagaagggtaaaggcaataagaaacaaaagcacaacaaaggatgaggttacaaactcgcgagccaaagaagaggatacggccaagagaaagaaggtatgagacgaaagaggggcgattttaaagggcaggtatgagacaaacatcaatgtaggatatagaggtgtcaagggtgcatatgataataattaaaagcataacaaaggatatagttaaggcaagactcgcaaaacgacaaagtggagaaaacaatcaagggtcagataggcaaggttccaacggaagggttgaagtaaagattcattaccgagtggagttacaaggagacaacgggatcaccaaggatatgcaaagtagaatgaccgctcatggatcattaagaaacaagggtggtcaagggcacgttaactgaaatgtcttaaacatatattgggatataaaggtaagcacatataaaaataagagtaggcaagattccaatggtacgagcataccaagaccaagggcatagaaattgtcgaaagatagcgacttacaaccgaataagaaatgatcccagaagacaagaaggtcatggacacctaaactgaactgtttaaatgagcaatag

SEQ ID NO: 28765 - DNA, 379 bp, Zea Mays
cagagaaaaggccaaaggctttaagccttgttttggaataaaaaataactgctcgtgctgtgctggggcatcaccgccatctctctcccacatgactatcaagaagttgggcactgacttctgcaatgttgacccccacaagttgagccttgatgctttaaataactctaggtcctccagtgctgccatccagaggcctcgttcctcgtcttgctccaggaatgagccaagttcttcgtctgaagaccagagggaggcttctgatatggatgatgacacggagtctcatccctcagcggggctgtaatgtgtcgtcgtctcttctgtctcagcttggggctgctgtgccgcggttcttgacatcttttggtttaattat

SEQ ID NO: 28766 - DNA, 289 bp, Zea Mays
gtcattccagggctgtgtgtgagctaatcttgccacgccctcctatgcgcaaggccaccacaggtgggagctcgtgcacatgcagaattgaaaacagctaaacatgcaactaccatgcacacggattactaacaaattctcttaagccttgcgcacgttcggtacatcaatgaccccgagcttagtacgaagttcactgcaccgctcatgtctccgggcctttgtcaaattgtagccagctgcttaacagtcccaatggactcaactgtgaccctgttctccttgatga

SEQ ID NO: 28767 - DNA, 277 bp, Zea Mays
ctacaagacttgacgtctcggtgtctaggcgctaagcctttcgtatgaggtcttctatcattgcattgacttctaggctgccattgtcttcaaaacaagcatttagttgagctgattctttcttccagtattccaagaagttggccgctttctccccgaaaggttttcagctgagggcgtctgctactacattggcctttccggggtggtagtggatctcaatgtcataatctttaatcaattctagccatcttcgctgacggagattgaggtctgg

SEQ ID NO: 28768 - DNA, 322 bp, Zea Mays
caagcactcaacatgtcctccaatacttgattagtcctttaagtctatccatcagtctgaggatggtaggccaaactaaaattcaacttcgcatccatattctcatgaaaacttttccaaaatctgggggtaaactgtgatcctctatccaaaatgatcttcttcggtacaccgtgtagagacacaatccgagccatatataactctgccaattgagataccttataagtagtcttgaccggaatgaaatgagccactttggtcagtctatccataataacccatataatcatatcctttcgagatgcgaggcaatccagta

SEQ ID NO: 28769 - DNA, 333 bp, Zea Mays
tgcaagtcggtaagcctcagtaaccttttgttcacaggttcattagtatattaattgtaccttttactcatcatgacattgtaacagcaacatgtaacttatttacatttttcatcaacagatattggtacctatgcttagtaggggacattggacactgtatgtaatcaacctacaacatcggtgtatacacattttagattcgaatctgtatggtatagaacttggtggcaccacatggaaggactaccattatgacccaatctatttaggtggaaggaaattcccatgggctagggttataatgagtaggttgagcaaagcgttacaaca

SEQ ID NO: 28770 - DNA, 515 bp, Zea Mays
tgaaatttaaaaccaagcaaaaaactgataaaagaaaatagaaaagaacaccaaagaatgtcgtgtgggccgaattctttcctcttggcccatcccacggaccactctccccaacgcacgcggcctagctccctcctctctcggcccaactcgcgcactcagtcacttgggcgtgcgcctgggagtgttccgtctcgccgacatgtgggtccgccctgtcatatcaatctctcacctacgcacaacagccccgcgcagactctagcgaattccacgcgctcttgtgcccgcaaccctcgctgacaatccgggcccgttcgcctgtgggtctcgctgcgtcgctgtcatgtgggccccgtgcgtcattcgtctccttcaagtctgaatcaaagatagctccgggttgttgtgaaccaccaccggggatcacgggatcccgatctggccgagcctcaatcgactcgccctcgcccctagagtataaatgcgggaccctgtgacctcctcacccctcg

SEQ ID NO: 28771 - DNA, 444 bp, Zea Mays
attcaaaagcaaattgatattagtgaattatccatgctcctatacagtaaaccatctaagagaaataacataaattatactgataaaaaacaattgtcaaatagacattgtatagtttgtgccatatacacatttaacaaacctccaccaaaggagggggatgcccccctcgacattgcaataagaaactaccaagattcgaacatagaccagcaagggtagaaccccaagcacacttctctaaccagtataacaagcaaaaagttcattggatcatagcaaattagccacgctctgatgcagttgtacatttaagagaaaccatttaaatgtttaaattgactgcttaatacaactgtacaaattaagactacaagaagcatgtctgaaggcaaaagccagaacaagaagaatgaaacactatagtagtttaacatatcaagc

SEQ ID NO: 28772 - DNA, 323 bp, Zea Mays
tttaaatgttccgtcttcttcaaatttccaattccccgtgttttttgcgtatggatggataatggtgcagtagctgatgtcaaatactattagaatagagcagtagcgagcatatacttcagttattattgcccggtgcaaggtggtgattgtagaatccttctgcttggtcaacaaagaacaatgatgaatttagtggcacatgttttcttctaccatgaattgtttgccatcagaatattacattttaaacactttatgttggaatacagcaaccttttgattgtactagatatctgatgtaccaatgctagaatagaagt

SEQ ID NO: 28773 - DNA, 610 bp, Zea Mays
ctccatcaaccattcataaccaagtatggcatcaaatacccccaaaggtaacacccgcatatcagtatgatagaaatgtccatgtgaccaccactccaagtttttaaccatagtgttacaatccaatgcatgcccactagccaccttaactttcactggctgacagtgttccacctttaaacccagcatatgcaccatatgttggctgatgaagttagaggaactgccagaatccacaagcattaacatggtatgttttcccaccactgacctgattctcatgctttgttcattgtcagttcctgatacagcctgaaaagataaccgacagcagtgatcctccctctcatcctcctgggcaagtttctggagaacgtcatcagtgagttccattggctcttcctcagtaaccaccgcattcaactgaacgggtttcctccttacacacttggccaggtgtccaggctcgaatttctcaccacatgcatagcacagtccattaagcttgcgaaactctctaacttgtctctcacgaaataattctccccccatttgttgtcctcttccatctaccttattaccagccaagttttgcttcgtagcataccct

SEQ ID NO: 28774 - DNA, 385 bp, Zea Mays
atgatgtgagctatgttccgattgttaatcgttctcggtagggactattgattgaggtcagttggtctatgcatttacctaaagtccataaccaaatgacgacgccacgatggtatgtggtgtctggcatcctacgtggctacgtgtgtgcccgatacacgatggcctctaatgccccgccatcctccgtgtacgccatcgctagcttgatgcgacgatatgtggtgcccatgctttcatttaggcctggctccaccactgtagctattagttgattgatccatcgtcaaaaattgttaacagacaagagcggagtggctttacatcaaggaatagatggacatataacaaatgtgaacatccgccatggaccccctcatagtag

SEQ ID NO: 28775 - DNA, 481 bp, Zea Mays
atacgaaggggaaggtgcagtggtgggggaagggtaaggagatcttgggcgacggtgttcgacggagtagaactagggaaggggaggcgaaggagaccggggaaggggcagcggtgttcgacggagaagactgagagaatgggcggcgctgttggacggaggagaccgacggaagaggcggcgatggtccacgaccctagacgtcgaacctacacgacgttggacgagttgggtgacgaaacaaatgggaacgagtataggggaaggagtggaggtggtacacgaacctcgacggaggacaagcgaggaaactgtccaccagcgacaaatcagatgagacggcggcgtgagaactaagcactcggtagggaggcggtggcatgagaactgctagtcgggtatgcagctagaagaagggtaaaaggtggaaaaatccacttttagtcccttttagttaccctttgtgacaagaagactaaac

SEQ ID NO: 28776 - DNA, 432 bp, Zea Mays
tctgttgatcatcctagctgatcctgtttgctacctctccttttgcctagatctggtaaccctttttcttgtgaatcatgttggctttatcatccaaatctctggaaccttcatcgattctgccccgttatcaggttatctgctataacccgttctcaagaatcggatgttgatctcgcctaaatctctcatttctgatcattctcatacccccttctctgaggattatgacgctgttttatcgattttatctctaagcaatggatccatttggttcaatggattatgttattgactttaattctctcatgtctctaaaagctcatcaatcttgatctcatggtcggttcctcctcatatccactctcatataaatctctgatctgataatctctatgttgatcacaacacagttctctgagttaaataaaa

SEQ ID NO: 28777 - DNA, 471 bp, Zea Mays
gcctcctataaattgagcccccggccagctgcgctaggtcataccgaagccatagccatcactcccgtcttcgattagccccccatagccggagaatcgctcacttcccccaattcggtttccgccaccgcgaagaagacctcaccgtggccagctcgattcaggtgagctcaagtccctctgctgcttgttctagcctccttaggtaccccgcaaatccctcgaaccctttaattgaaccggaccgccagggatcaccgggaacacgtaccattgtcctcatcattcgcgattcacgtggacagggcgtgatagcttaccaatcgtgaaattaagttgggggaatcgttcgaggagagtttaatccggtgtacgccgctcgggagcaccggccgttgcctaaatccgccggcacaacctcaccggagttcatcctccgcgctgccgttgtcggggacctcccactgcgaa

SEQ ID NO: 28778 - DNA, 363 bp, Zea Mays
agaggaaccgcagtggagacagaggtgtctgtgtcgcctagaacacctacaccagctccagcaagcccgcagatagagcatgtgactcctctagagaatgatagtgaaagggtggatgcttatcatgatggtgaagagcttcgttataggaagatccatgatattattggtaatcagccaacccctttgccggcacagaggttgtttgcagaactgaacctcactcatgtcggtgagcccacaagctatgaagaggccaaagatgacccagattggcaggcagcaatgaaggaagagctgagctcagttgagcggaatgggacttgggaacttgttactcctagttataggtgtacattcggg

SEQ ID NO: 28779 - DNA, 476 bp, Zea Mays
aaattgagaggctctggtggatgatccgaggcaagggctggtgcgttggatgcgtaaatacctagcggagttcattggggtggcaatttataggttccatcggcggtggcgtccaattttgcgaaggcgcgctggcggcaggagagagggaagatcactggcgcaagtgattcgtggctttcaccgtggcaaggcctctggcgatggacgggcttgctacacaggttcactgcgacatgctaatcttccaagacgcgtggcacatgatcgttaagcggctaacgccggtgaggatcatcccggccagccgcataccaagtgggtacgacgaacttaaccatgaccgagcccgagccaatccggtgccaagatcttaactccgccgcaaatatctcccctccagagagcacgaatcgaagcaatggcgcagatcacggcgcgagggtcaccgacggtgaagggtgatgtacctgaag

SEQ ID NO: 28780 - DNA, 593 bp, Zea Mays
tcttgacatacaggaaggggatctatgattggcactactattgacaaagtggggtatgagattacaatcactcccgagccgtcggattttgaaccagcaatgcctcccaaatttgacaaggaggatggggattcaggcgggggagagagaatctggtacgtcgagaaagaagcaaaaaagtgcgacaagctcctttcaaatttgtaagatagctcccatgagaagctagatagggttctcatgacaaccaacccacttgtctctgtacaggctttggatagaggcgtatcggatcatacgtccctacttctagatataagatcacccgctttcttgggaatacgtagaccgttcaaatttgagcttaactagtttactagataagatttttatgcttaaatttttatgatgttcggctgttctcgattcgttctgctatgatgttctgcttcgtctgttgcttgcccaatgcccctgcagatgagttgctgccgtaatattaatcactgacgaagccgttccacgaaggcgacatttggctcttgagaaattaaagctgggagcagaaacgcccaagcagacgtggagatcga

SEQ ID NO: 28781 - DNA, 442 bp, Zea Mays
gcgcaggccgccctgtctattccgacatgtgtccacataaagcatcgcatcgatggcatcagcgacgcttggcacatcctcgataaacaggtgtcgggaacaagaagaggtcaagcaaccacgcgaaagaagacacgcgtgcagccccagcccgcctagggtgggaccacgcgccttcgggcgtgaaatccgaaaggcacaatttccccaaaggtacgtgcgccggccaacatcatgaagtacgatggctccacgaatctcagtgtgtggctggaagactaccgactcgcatattgcatggcgtgaatcaaggacaacaacttggtaatccagttccttcatgtccatcttgcggaaggggtaagggattggcttgagcacctacctgctggcaccatacatgattgggccgaccaccgaagagcgtccgtcgggaacctcc

SEQ ID NO: 28782 - DNA, 299 bp, Zea Mays
gaggaaatgaggaacccaagctgattttgtgattaactcttgtttatttgtgctgcaattcaatcgattagatgtttacgtatgcgaattggtagaggtgctgtccagaaattttgtgggtgcgcgaacagcagtagttctagcagattctgggaatttttcatgggtaattagtgggaatcagtgggagaatcatgtagagctttttcatacctttccaacgagtacttatgcgctcgattcggagttatattttaggagatatcgctgtttgaatccgggtatgttgctgtccaaaa

SEQ ID NO: 28783 - DNA, 366 bp, Zea Mays
cagcgacgagctgcttgggacatattccaaggccgaagatgatgccttgtccgcagccttcgggggccagggcaagaaaagattgaacagggtgtttgatgcatttgacttcgtataccctgattatcactacccattgcgaaggtaagggaagaagagaaaaactgccgcttcggccaccactgctgtgccgaagggcaagaaaatgaaggttctgacccaccggccgcgatatattgaatcgatcgtagtgcctgaatttggtgaagggacctcttcgactgccgaagaaaaacaagttgctcccaccgtgcaaagcgctgaataattgaccgtagtgcctacagtcgggccagctgaagccaa

SEQ ID NO: 28784 - DNA, 378 bp, Zea Mays
cggagttcaaaggtctggattttatgcgcttgagcccatcccgaaccgtccgatcagaacaacagctccgatcgagttgcacagcggatgaaggtttagatctaatccgaccgtccattcgggaatcagtggtcatgaactcgaccccatcccctgaccacaagccacggcggcgcgtccagccacccggcgaccgagcacgccggtgacccccaactagtgattcggagcgctcataccacgattacccaaggctacgcgaaattgagagtgtggcggacccaggagagtgcttattaccggcaacggtgaggtgaaggagccgcaccacgacgcgaggcggaaggacggcacacaccctgctccgacgagcaattc

SEQ ID NO: 28785 - DNA, 352 bp, Zea Mays
gtgtagaagaatattatcagaaattacaaatgggtatgttgcgttgtaacatagaggatggtgaggaatctgctatggctagatttttggggggttaaatatggaaattcaggacatccttgcttataaagattatgctaacgtaacccgattgtttcatcttgcttgcaaagctgaaagagaagtgcagggacgacgtgctagtgcaaggtctaatgtttttgcaggaaaatctacaccatggcagcagcgcatgactacgtccatgaccgaccgtacaccagcaccaactccctcgccgagtcgaccagcaccaccaccttcctccggcgacaaaccacgtgcatcttcc

SEQ ID NO: 28786 - DNA, 398 bp, Zea Mays
actgaatggctggcaaaagtgcagtctgaagagcagaagtcagagcagactgcaaggatatgcgtcatgaattcccggtgctctgccctgtctaccaagagctgttgctgatgggtgttatggtggtcctaaatagtttggaacatagacaacatccgctcggacatttgttgttggatggctgcctaacgagcctcctcgcctgctaggtgagcctgctgctgagtgagagtctaaagtatggcagccaacgcagggtcaatcgctggaggagcagccggaggagcagcactagagccactagcctcatgatcatgggaacgaggtggcacaggaggtggtggcagaatccctagatcctcatcgtctgaagagatgtcagcagtggcaccctgatc

SEQ ID NO: 28787 - DNA, 389 bp, Zea Mays
cggagacggttgggaatgcaacgacgacggcggtggtggatcaaccaattcgacatcccttcaaggccaaaggatgaaattcttgatggcttgtccaagtgtctcaataccttcggacctagggatgtctagcatgttgtctaaactcgctatttgtggagacagattatttcgcgttggtgcgacagagttcgcactcgccatttgctacatcaattttggaggaggattcaataacatttgagacattaggtctctaaactctttcttagcctcctccttaaaataatctgtcatctcctccttgtatcgatcacatttcttgtatagaccggtctgaatccttccttctatccttccttagacgagattcctcgtacaaaaccagg

SEQ ID NO: 28788 - DNA, 437 bp, Zea Mays
agcggagttcttgagtgatttgggggaagtaagaaattggagctctctggtgaacgattggaggcaagacttggtggcttggtgcgtgattaccctacggagcttgcagtgcgttcaatttataatgggcaagagcgatggccggtgaattagacgacgacgcgcggcggccgaagaagacatgagttactggcgcgagactcagtggcatctaccgtggcgacctcaccggcgacaagccagtgctaccgagcggtttctagtgactcaccgcgacggagtaaagcatcaaggcacgtagcccggtcggataacggcgaacgtcgttgatgccagcgcgactaactacggtgagacacgacgacggtgagaacagtggtcggagtttatccccaacgtgatactttacaccgaggagtgtttatctgagtttggtc

SEQ ID NO: 28789 - DNA, 396 bp, Zea Mays
ctcttctcttgtgtgctcccagttttattggcgaaggcttaatcttgcatcagatgttgctgcttcccaagtcgtgggggtcatgtcaaattgtcaacgattgttggtagtcatgtactcatgttcaatgttagatgtctcccatgtctcagcaacataaatccacatcatctccatctcttctcctctcccctgtacctcactacaacccttcggatctgtggtgtactgccgagtggagtggtgacccagacagaatcgagatgttgaccttgcttgacccgacccttgatttggatgtcctggggttgcagaatgcgcccgatcctgaccacagtgatctttcttgctttttttagtctgcaacaagttgtgttcagtaaagctaactttggg

SEQ ID NO: 28790 - DNA, 918 bp, Zea Mays
taaatacccattcaaaaaggcacttttgacatccatttgaaaaagcttaaaaccctttgaagcagcaaaggctaaaagcatcctaatggcctctaaacgggcaacaggggcaaaggtatcctcataatcaattccctctttttgataatacccttgggcaaccaacctcgccttgtttctcactaccaaaccatcctcactctgtttgtttttgaaaacccattttgtaccgatgggatggcagtaacaaggaggtggcaccaaaacccaaacctgatttctttcaaaattttcaagctcctcatgcatagcattaacccagttaggatcagataaagcatgtccaacatctcggggctcaaaagtagcaacaaaagctgagtgagcaaaatgagaaatgtgttgtgacctagagcgagtgactcgatcgtgaagctccccgatcatctgctgaggtgggtgacagcgctgaatatgctgtggagcctcccttgaggaagtggcctccccctcaacaatagattcaacttctccagtctcagcaggagctgggtcgagtggaccccaagtggtggaaggagtggggtcgggtctgtcagccgtagtagtggaagcaggctcgactaggcggctggtggagttggctcgagagaaacccaatcagcgtcgtcgtgctcctcctccacaaagatggtctgtcccatctgatctagacctacaggctcaaagacaggggatggacaaggtgcagtctcatcgaatgtaacctcacaagtctccataatgcggttagtctctaggttaagaacacgataagcatgataatgtattgcataacccagaaaaaacccatcagaagaccaggactcaaacttgtccagattaccctattttagcacaaagcatctgcagtcaaat

SEQ ID NO: 28791 - DNA, 321 bp, Zea Mays
ttagaattgtctctctgctgacagtgataggcaagtagtctactccgttttgtggtgaaagggaagtattcaaggacgcatattcagacagtcagtatgatgatgcagggagaaaacgtggttcatcaagctggaagtcagtggtcagagtcaagacatgttgaagggagcaagagcaaatccacctctctgtctataatctgcgtgttgtttcatctacaaatgaggcaggctcctcttcagatgcttcagctccagttccagaggtgcacttgaggagaggtctcggcttctctggtgctcaccaagaaacgacttctc

SEQ ID NO: 28792 - DNA, 293 bp, Zea Mays
aacaagctcatcaattagagttgaacaaactcatcaagggagttgaagactcattgatttgagttgtgcaaacttgtacggggattcccaattgaggaagaacatgcaatgtggagaattgaaccacaaactctatatatggggaaacaaaatattctcatattcctttagaaagaggaaataatattgtaacaattgctccgtgcgatatcatgatatgttaatatcaagtcccctttggtaatggaagtatcaaggatgtgttgatatatcctaattttattttaccaaat

SEQ ID NO: 28793 - DNA, 288 bp, Zea Mays
gtggtcatcatactattcatatccagctccctttgatcaaggatatgctttcaagtaagataaagcagctccaaccacgtgaccgaccaaaattcattgaaaagtttgttgagtatgattctgaagttggcaaagcttgttccgtcataaaaagtactcttaccaagatggttgtcaagcagtatgaactagcggacacatttgctgagttaattgatgatgtccttcgcgcggagtctggcgacccagacaatgttgcggaagcgcctcaaacagataaacctccag

SEQ ID NO: 28794 - DNA, 352 bp, Zea Mays
gggaaaccgtcccacgttcaccgatggagcaacttactccagtgagcagtggtggctccggcgtggtagtgagctgggggagtgactggggaggtttactggagctcaaggaccatgacagtgtgcttggatggggctacgatagtgcggttcgctcggaccacgatggccatgcatcagggagaacagggggcggcggtgctcggtccaacggcgtttctggtggccggtgacttaggcacagtggtgggttcgagtagcactccactgaggccatgaggtgagctttatagataggcgtgggcatgggcacacgatcgggccgaccaacgcttcgggcgcggttgggcac

SEQ ID NO: 28795 - DNA, 426 bp, Zea Mays
agtacatctaatacattgaccatccttttcctttttggggtcgctataagatctttttgtgccttcggcactgttacttctgccgaaggacttagaactaatattttgtcttcgactctaggttcttcaattttgttaaccttcggcattgtagccggttcttcattcctctgtgtgagggcagattcttcggctttagtagccgaagaggtctcgccgccaaattcgggcactacggtcggttcaatatatcgcggccggtgagtaaggaccttcacctttttcctcttcggtgcgggctcgcttggagcagctggagcagcatccttcccggaagttgcactctttctcttctgcccccgcgacgtatagcggtaatcagggtacataaacctaatagcatcgaaaactctatttagcctcttc

SEQ ID NO: 28796 - DNA, 549 bp, Zea Mays
ctttcccacggctaggatggcgggttgatttgagcaaaggccaggggttcttttacaattaggctacaacgaaggggtatcgttgatctctgaccgcacgattttaaatcgacggtcccgattaaaagaaccattcaccgaaccggtacactacaggggcccttagatgccgatccaacgtttcctattttaaataccaatgctccagccacagccgttggatagcagatcgatggtcaagcccgagctagtatgggatgatcacatcacacacgttgatgggttgatcaacggcttggatcgacacgaggcgaaacggtatcgttggacctaatcgggactgtccgtcaacgatccgacggccaggggccatcacctacctccgaccacgcctgcgttcagccccggcggcgcccctcgccggagttcgcgcaatccagccaaccggtacccgatttcccctaataatagttgtatgcaaagagtagggagctacaaactaactggtcgtgatcataccggcgattgggacgtgtagatctcggcccg

SEQ ID NO: 28797 - DNA, 276 bp, Zea Mays
ctatggtttatgttcttagataggatcgtggtgcatagacatagtgtgctgctttatatattcatggctagtaaacatcatggagcttgagggtggttatgccatggcattgagcctaggtccagggttcctggtgtgttgacggtgaacatttgtgcgggtagtgggtggggtactatgggatattgaggaaagcatttgcatcttaccagtttcgataatggttatgtctttgagccttctcttctcttgttgatggtattttcatggcactcg

SEQ ID NO: 28798 - DNA, 368 bp, Zea Mays
gtccaatccatattaactacatcgatcgaacctcatatcgcgcaactcttataacttacaatctcaaatacaaccatagcacgacatgtagttgagactctttgttcaagttaacacaatcacgactaccatacacatgcgtaccgctttttcctccacgtacatttaatctacgccaaaaacatactcgtgcacatgcctacttacaaacctaagcacaacgacaaaaccgacgaccatctcactataacatctaacaagagctgtgaataaaattaaaaggagtatctcaccacttcatcacactcattcatctcctatatgcacactaattcatttcttgcgacacatgcactcaaaaatcaatc

SEQ ID NO: 28799 - DNA, 350 bp, Zea Mays
agaggcacaccttttgatgcgttatgtgaagcggcgctggctggctaacgtcaggaagagagggcatttaatgcgacgggacgcttcagcctgcaggccgaccgttgcatcgtgcgtgtgcgtggaattcgaagagacccagcccattcctagtttggactcgggatggctcggcccacgcctcggcgactccgcccgcccttataaattcacccgagaggggctctttggttctttacttcccgctcttgccttcctgccctagccaccttctaccttcgccgcgaaaacgcttgtgctcttctcctcttcttccttagccccgatggttgagaagttcaacgttcttc

SEQ ID NO: 28800 - DNA, 451 bp, Zea Mays
atgtgcattacctccctccccccaacttggttctgccgggggcaccacgtactccgactgtgcaactctgagatcgcactctgttgatctgttccggcggtcaggcatgctggtcttcttggttccaaagatgcggcggtctagacgtccactactcctgttgctcccaaactggtcgtcctcctcttcgttctcacacccctttctcgtttgcgtctttttgggctgacgctgtcccttttcgaacctcgagtcccccaaacaaatctctctccgtctctcgctcttcacgctactcccaaactctagtaatataatatttttgatgatgccatccgtttccgtttttttaattttattaatggcgaggagagagagaccacagatcacagagagctccatgcttcgctttgtccgctaatgctaatggggatggccgctcaccttgccg

SEQ ID NO: 28801 - DNA, 424 bp, Zea Mays
gcaatcgttgccgccgtcaaccgagacaacagcgaggtaggtgggatttctgttcgtattatttcctttctgccagtttcatcatacacacaagagttatacccgtgtcccaacgtcggcccatatcaatgttcccattacaacagcccatacggcccacatccagccttacacttcctattccacatccgccagcccctgaacatcttccagccttacccttcttgaccagccgacgatcgactatctccaatggaaccagttcatacttgctgaggtccacagaaaccggaagagtagaaaacactggcgaatagttagcagtaaaaggcttgagttgggaaatatgaaaaaccggatgcacctgggctgataaagggagatccaaacgataagcaacagacccaatacgttccagcacttt

SEQ ID NO: 28802 - DNA, 418 bp, Zea Mays
ggcgagcagaggaaagcgacggcgctagatgaggaacacaggggcggcggcgatggcgggagagcgggttgggtaggcgtctagtgtgtgcgcgtggagaaagtgaagattgggcgacagaagggcgcgcccggctgaaaaagtgaatttgaatcagcggttatgggcacaccagacattgcataatgtagtgtctgatgcacgccggacagcctgaacagaggaagagcaagctgaggccaaggcaaagcaccgaacagtgcacactaaatataggttgctatatctaaatcctttgaatgtgactgactcatcatccattttagatacaacaacctctgacagagtgaataagcactaaagtccaagatcacacagctgaccgactgatagcaagttgaaactcaatggagaaacc

SEQ ID NO: 28803 - DNA, 447 bp, Zea Mays
aataggaggggtctagcatctagccatctactataccaaataaatgcagtatcatggtggacttgatgaaaccaacttgatgttgtacatgttggtgcgttttttctataaacttcggcaaagcaaagtttgacttaggttaaaacaaaaaagaacaccttacattttggtgtttgtatgtgtgtgtttttgggcagagagggtaaggtagcaacatcattattatcttaatagacctttgaacagcccatggtcaagtaaggaaccatgtgatggcttaaaaaaatggtcaacatgtgatatccaactaaagtgctaaaaaccaatgataagttgtgggcttgtggcaaaagctaagatgatgttgtcttcaggtggcgaaggtaaaaggcataaacacacatgatcataatcaaatagaactgccatttaacatgcttacaagct

SEQ ID NO: 28804 - DNA, 356 bp, Zea Mays
cgaggacgacggggccgcgtgtggcgtaggcagaggtgatgcggtcgtgtggggcgcaggcgacatggccatgtgtggcgtgaaagagggcaacagatgaggaacattgacacaatcgacatcaaggtcgggaggtgaggagctagcaatgtggaaaacgtcctcatcaaagacaacatgacgagagatgatgatgcggcaggtgagaagatcatggcactggtaccccttgtgattaggggagtacccgaggaaaagacaacaagaggaccggggtgaaagtttgtgatgattggtgacagaggtgttgggatcgcaggcacaatcaaagatacgaaggtgctcataggaggggg

SEQ ID NO: 28805 - DNA, 556 bp, Zea Mays
atgagtcgggtttggttggctagaacttgggctaaatctaatggcagctccggaggtgcggggaggtgggtctcactcccttctccaccagcttctccttcagctcctaggggaaaccctgctccaatcccagaggcggtaggcgtggttttatacgaagccatctgccagggggagagagttactattatgcatatgccaattttttcaaccaaattattttattcattacaccagttcattacaagcatatagttaccacaagtcgcactacacgcgagcgctttctaaggtactttcgaactccttttctaaagtgtccccaaattccttgagaaggtcatcaaggctagctagggacatatcctcgatgtcggacaaattctctatcctggagagaggtggtgttggaggggctttcttcttccgctcggtctggcatccttggctcttggtcttcttttggattttctttgtgggggagcttctttagcttcttattgtaatccagcttcagggttcggtaggcttcacgagtgttggcctcttcgccttc

SEQ ID NO: 28806 - DNA, 547 bp, Zea Mays
gagacttgcagcagtataaatacttaaatagtccataacagcacaacaatatcaatattcaatttcaatacttggaagtccaagactgctacatccagctcactagaccagcacaacaacaacaagtttattcaatacttgaatagtccatactccataacagcacaacaacaacaagtttatataagactacgaaactgcaagtttacaacttactagaccagtagagtagtagaccatgatcaagaaggcagtcacgtaccatcataagagctgctcatctccggactccggagtgctgctgttgttgaagagtgaagaacagagaagagtgaactcagtgaagaacagaagagaatggaaatggagttggaggctctgggaagcaagcagacacaccaacttggacctgctaaacagcctaccgtactagcctggatagggatatgaagagactggaagcagaagagacgcctggatagggagttgaagagattgggcgtttggagagacgcccagagtgcatttaagcctaaaatggcatttg

SEQ ID NO: 28807 - DNA, 342 bp, Zea Mays
cgcccctaggatctataaattgaccccgcagagagcttcacaacatcatcacccacccagccaccacgtattgctagcaattgttcgcccgagctcgcgaattttgaattcgccccaaatcaattctccgccacccgaaacccaacctcaccgcggccagtcttattccggtcagttcatctccttctctccctcgtttaagctttcccttaagtctacgatgcttgccgacccacataatcgagctaggagccctttggtcaccgggaacacgtaccaattgtcctcatcgtccgcggttcacgtggacagagcttgatagcttaccaattgtgaaattga

SEQ ID NO: 28808 - DNA, 521 bp, Zea Mays
ggaattgcattaatataaaacataccaagtgcgatgtcagccccttcagcagtagcatcagtgttgacttgattaaccctggcaatagagaatcccttgccaggagtctgttgcttgttctgagctggtgcactagaattccccaccgaacaagcattagcatattgcccaatctgactacacgtgaagcatgtagggcctgtcttctgtcctgtaggcctcgccggggttccacgggggccaacctgacgagtgtggggcatctgtggagtcccctgcggagcatactgagctggacgtggtcctcctcctggacgagctgctgtaccctagggcggcacgtagcgagggcgaatactgctgctaccctgccccttggcaatggccttcctcttcagatctcctagttgaacacgcttgtgttcaatagctagagctttatcaagcagcctctaaaatgatggaacgtgtgagcaaccattgcgtactgtagtggcccattgagtccttctgtgaagtgc

SEQ ID NO: 28809 - DNA, 302 bp, Zea Mays
ttccgaaaccacgacatttggcgcgccaggtaggggactgttattgtgcaaagtggcattttcgcttcaatggcccaatcatcagtatccgtcggagatgagaccttcgcccctaggagccacatcacgttcagcaccctcgacttccttgccaccttaactggcgaactctgccttgccaaccctgacatgcatgttcccatagaactagggcatgtgcactcagccaggagcaaggcggagaagagacacctcaagaggcatgccaccgcccttaagtggtgcctcaaccaacttgccgc

SEQ ID NO: 28810 - DNA, 512 bp, Zea Mays
cgcctcttcacctgcgtccgccacggccggtgtcgctcctccgataagcatcggtttgttgagaactcgttgatcggtgcgtacgtcgcgtgcggcgatgttggtgccgcgggtaaggtgtttcacgaaatgacggtgaaggatgtcatttcgtgtacaagcattgtggcagcgtattctaggagccgtgatatgggttcagctgaggaggtgtgtgcgctctggtgaaggatatggtggcgtggacggcaatggtgacggcgtatgcacagaatgccatgccagtgaaggcactggagccatttgagcagatggaggtggccggcatgcccattgatgaagcttcactcaccggtgcaatctgctcagctcggtgcggtgaggcgagacgcctgggttcagggaattgtagaatggaatggtcttgggaggaatgcagttgtcgggtcgggttctttgctggtgataatacacacccatggatgcatgaaatatagaataagattattgga

SEQ ID NO: 28811 - DNA, 336 bp, Zea Mays
atatttttatccacatatttgaaaaataatagcatatcgaagctattttatgtgatcatattggaactcgaagatgaggggaaaagtatgtcccaccgggcgtgccagaatctgatgtcgggaaaacgggcggcgaaagcgccgtctccacgtcaacagagacaagttttaatttagatataatagagtaaataatacaggtattgcaggctcatacttccataattcttatatttgaataaaaattatgttaattacatctccgtagagaaaacccctgattaagagttccaacatgaatacataaaagaaaaataaaattacatcatatggctg

SEQ ID NO: 28812 - DNA, 302 bp, Zea Mays
gtttagtccatgagttcagatcaggtgatacaagacacccccaaacaaggcagatctatgcattactggaagatatggagcagagattacaactgattggctatgtcaaggataccagccaagtgctcatggacatggacgacgaggaagataagggaaataccttgtcctaccacagtgagaggcttgcattagcatttggtattctaaacactccccgtcacatgcctattcgaattgtcaagaatcttcgagtgtgccgtgactgccatgtctatgccaaacttgtgtccaagctctac

SEQ ID NO: 28813 - DNA, 730 bp, Zea Mays
ctgaatctggaacagactaaggtgcataaaatatcttctctccatgctgagtttcatctggtggtagggattgagatagagatggagatacggaggaagtgcatagttcgtgcgctaggagcttttctcctctaaaaatatctagtttggactgttgtgaagcagtgaacagtgagtaattattagttttgtttgttgtctacagtaggggaacaaaggtgatacttgtgtgctgggattgagataagaatgaactggacaacaaacattatagtggcctcacccctgcaaaatatcacactatggaccctttagtgtttatccaccaataggttctcagctgccttctcttgtctgcagctgagacaaagctgatattttggtggtgtgaggcatactaaattcagtgttctgggctgtttcactcgactgtaaaggttgagatatggatgtagcacataactaaagtctagaggcctcacccctggaaaaaaatatcaagcatgggcactgctatttctcttgtccttattcctagacaaattggatatttgtgtgctatatttatgaaacaatccaagttcagtgccttggctgggtttgagtgctggcgtgggtcaaaagagcagcaccacgtgtatacctcatgttgtgttggcgcccttggagctctcctttgctgtgttctggccagctcaagaaccactgcatctgccccctataatcagta

SEQ ID NO: 28814 - DNA, 390 bp, Zea Mays
tccgtatactgtttctataagcgcagggaggcgaaagaggatggataattggatcggatagccgtcccctgggttctgtctggggagcaggagcagcagtcgccgagagcaacccaaagcaagctgcaggtatttgctttcgtctgcgtcttcgtcttcgtcgtcttggttgccgaaaggtcagccactcatacatcgattgatccttccctcatcccctcccatccagttcgtaagaggatcaggggccggcgccggaggagatcccccgcgctatttggagtaagcaaaccaaccatccccacgaactcatcaccactcttaactgcaagcgtgcgctgtgtgacacctgtttttagcgccggctttttccggaacccgccagtttag

SEQ ID NO: 28815 - DNA, 524 bp, Zea Mays
aaaatactaggccctcaagacgtaattacagtatatggagaccaacaagcagtaagaaacatagaaagagacttcatccccgaacagcgcaacgttcattgcctaacaacagaacgtgaagacaacaatagtcctcgcccaactaaacacaaaaaagtccaacgcccaactacagagcaacgagggaactaagacagtcccccttgatctcacaactcccaagcaaacagtcttaatcagcgaagacctttcaccaaacaaagaagcaagacttatctcctgtctcaaccgcaacaaggacagccacgccatcatcgaacacagtctagcatcgaaccctctgtgcgcccaaggaagcagcgattacggaaaatgtccgacgagaaaatagaagcagtgaaagtcgagatgcaccgtttattagtagcgaagtttatcgagccaatagtctaccccacctagctcaccaacatcgtcatggtacagaaggaaaatgggaaatggagaatgtgcatcgatttcac

SEQ ID NO: 28816 - DNA, 339 bp, Zea Mays
cggttcgcattggtataggttctaatctcgatcgtgcgatggcgatccaacgaccggaaacaacccgtaccctttcagctgccactttttacataagagcccctaggtttttggtaaacaaacctgttgtccacaacaatataaagaacattacagatcggtcctgttttttacgagttagaccgtatgctctctggtattttatgcccaacgggtggcgttcactggacttcgaggccgtcggattcagggtggatgacaccattgaggccgcagcattgaaggccatgacaaccttcttcgaataccatccactggagatgatgatgcacctgctcg

SEQ ID NO: 28817 - DNA, 329 bp, Zea Mays
atttaaacaacagtttggcattgattactctgacacatttagtctggttgttaaacctactactattcgtttattgctctcgttggcttgctctagaggatggacacttcggcaaattgatattcaaaatgcctttttgcatgggtttcttgaagaggacgtttatatgaagcaacccccgggctttgtggataaggcccaccctaattatatttgcaaattggataggtcactttatgggttgaaacaagctccgcgagcctggttttctcgtctcagcaagaagttggttgcccttggcttctccccgtctaaagccgatgtgtctc

SEQ ID NO: 28818 - DNA, 354 bp, Zea Mays
caatttagttcatcaaacatacagcacgacaaaaacagcgcgtgcagcccaaaacagcaattaataaaattcagcttctatttacttcaaaaattgccgcattctagagactcgacttattctaacttatagcaaggcacacttaagcatagtcacacaatagatgacgtgacagctacgtagtcatgccatcacttcaccccacaatcccaagtaaaataactctaaccgaacttggcatttagccgatcgattcctaacccatttttcataccaccactacacgacatgcctaatacgttaaatgactcgttcacaattcacctacatctttaccaaaacattcccacatcg

SEQ ID NO: 28819 - DNA, 493 bp, Zea Mays
ggatgaactcttcttgtttcatatggagcactaccactggaacataatgctctcgaaatagtagcttgaattcctcctaggtgatctgatgtccagccggttcaattgctacaaaatttggccaccaagtactggcaggccctctcaactgttgtgcagcaaacaatggcttttgcgtctctgcaatgaatcaacccaaatttctgttccatcactcttacccactcatcggcttctagaggttcttctgttttaataaagagcgggggtcgagtctcagaaaattccaagtatgtagtttcacgcggtccttgaggaggagctctcccaccatgcggttggaactgattgcccaccatttcgtgcaagaagcgcgtattatccgcagtagcattgaccagggcagcgatagcctcggccaaagtcggtggtactggtggcgggttaggagtatcctccctaccgcgggaagtccccgcaccatcatgtgcgc

SEQ ID NO: 28820 - DNA, 294 bp, Zea Mays
agccttatttattaaacacacaatacgcatcgtcacgactcggcttataaatatagagaatgcggcgactactttggcatgtcaccacctctctacataagccaaaataatttctacctacaacgaccaaacattcatgtcgagcacactttattttaccatgtctcgcatacaaccatatggtggcgtgcactcgagacacttcaatcaatgcggcgcgaccactaatatatgaactccgatactcatgttttaataattcatcctctacgcaactagcattttctaactact

SEQ ID NO: 28821 - DNA, 804 bp, Zea Mays
tgggaggtgcttgcacaggatgcaactccagccccttttgaagagggcctgagagaggattcagctgttgatggctcgaggagaaagggctgactctctgagttgaatacccgtctctctgaattgaatgcttgagtgaaacaggtaggtcacgaaatgaatgagatcttctctgggaaatatctctaggacaagacctagccctgtgtccggtctgcagacattgccagcagcgaaccggcgctgagcaaagaaaggcgtagtggtcagacgccagacagttgaagcattttccacttaatttcttcttaaaaaaactggtgttcttcatctctctatgctgtttcagaggcaattctccatgagaatcaagactcttcctccaccagaattttggcttgaccagtgaccagccttcatcaaagatcgacgaagcacctgccttcaccttccagctgcacgacctatggaaagggcgacacgaagtgaccgtcggtactgttccgccgaactccccacgccgatgggacaagacaccaccagcaccaccagcattcaagccccgcgaagcattgaagacgtgctcatccagaccccacttcaacttctcagatgcagagatcctcttttgcgaaatccgctccgccagatctgcctcgaggaccaacccagaacaaccgtccttgctaccaccttccccagaagccgcaaccagggaacggagctccgcccgctgggcaatatccgctgctggatctaggggtagggggctggggcaggcagcggagatggagcgggcagctg

SEQ ID NO: 28822 - DNA, 838 bp, Zea Mays
gggtggatggggtccaacagaccacgacaactgacatgtgggccatagcaacccgttagcacgtaatagagacccgaacatatattgagcccttaagagacatactttaaaaatttatgggctgggttgacatagccagacaagtttaaggaccgtgattgtattttattcaatttccttccttggatattttgtatttgtttctataaaataggatcttgattagaaagtttccacaaaaagaaggatagcttacttagttttttcccctcgaacgacgcataagagttgcatgtcatttcattaagaagataaaaagaaacaacggttcaggaactaataaggttttaaacctgaacacaccgcccctcactcactccaaacttggaacagtaaagaaaggcgacctagagagcaggagctgaagcttaacagcaccaaccttacaccacaaaaaacactcgtctatcacagcctgaaggagaacctgagtgttaggttgcgctccctcaaaaacacatgtgttcctatgtttccacacctcccaggcttcgaggatgataagagagttgagaccctgccacagctccttctgtacgttactgatagccaccttccaccacgcattgaacctagagcttgtaactgaaggtgccagagttgccaaacctaaatactgcactattatatgccaaatctgtcgggtgaagacgcaagagattagaatgtgcagaattgattcctcgtcttggtcacggagagtacagacatccgagtgtggtaatcctcgcctggcaagtcggtccacggtctagcatctgttgttgattgccaacca

SEQ ID NO: 28823 - DNA, 346 bp, Zea Mays
ctaaacccgttactaggcaaaacctaacaaaatcctgcaagatattaggataacctcaccaaacattaggactccaacctgaattaatctaatcacaggtcgtccaggctgtcaagtcaaaccattcgtaccacaaggtcggaccgtctagtcgtataggtgccagatttgtcgctcaacacatgccccccgcattttggcagagtttgtcaagccaaaagcacctagttccttacatatgttctgggaatataacctgatgtgagaacgtcgactttctctgcatcataccacacactaggatagtactgctttaggaaacgggtgttccatgctttcggtaact

SEQ ID NO: 28824 - DNA, 482 bp, Zea Mays
tgcacccgcaaggcagcctcactctccaccaccatggagaaaaagattcccgacttccttgaccgacgatccggaagcaattgtcactacaatgataacgtgaactttggagaacttcgcaagaataccacctccctacccgacagcgcctgcaataacactgttttccaaaaataggatataactgcatgatactgagttaaccaatccatacccaagataacatcaaatgcccccaaggaaatctccacaagattagctgaaaagacctcatcagcaagaatgaccgaacaaccctgacatactgaacaactactaatggagccattagtagaactaaccacaattgggtgacctatcctctacaccgaaagaccagctcgtgacacaaaattctccgaaacaaacgaatagctagcgccagagtcaaaaagagcatgggcaacaaacgaatcaactgagatcgtacctgtcaccatgtc

SEQ ID NO: 28825 - DNA, 326 bp, Zea Mays
ctgttatccaacctgacggatatgggcatggatatatttttttgactcatggggtagttccatgtcatacccgaagtcggacgggcacggattcagacattacttcccacctgtgagttgcccgttcgatatcccaaattgatccataactttatttaagactctcactggttatattacacttacacatcaaagagcataccctagtccctaagcgtgtcagacttgagactcccaccggccaccacccatcgctcctaggctagccaccacccctcccctagtttgagcttaggaccagttttcagtgatgttttctgtaaatt

SEQ ID NO: 28826 - DNA, 345 bp, Zea Mays
cgacggttgtggtgcagcacggcgggagtgccggcgcaacgcacggttgttagagcggagtagacgaagtagtcgaggacgagagaatgatgttggtgacgaggttgtgctggacgaagcgaagaggtaggcgtggcgacacatcgaggttcctggagttgcggcggtgagagccatgacgcataggaaacgagcctcaatggcgccagtggagcgtgatggcggtgtttgtcggcgaagaactcgatgacaaatgcggtgtagaccggcgacggtggctggcacgcctaggacaggcgcaacaccagcgtaaggtgttgacgcagcatgcaggaggacccgcaa

SEQ ID NO: 28827 - DNA, 347 bp, Zea Mays
cagccatcatcagcattggcagcaacattttcctcagcattgattccatcttcaggaggaatattgaggtcgaactgaaaatggaagttgggcatcggttgtcccataccaaaaaactcaaccgggagctggtgaccatcatgggggtatggaggcacggggtcctcatcctgaggttgggcgccaagcatgaactgttgcacaatgtcacattgaaccgtccaagagacaccctgaaaaccatcagccactgagaagacaatgaactgtggcacttcctgcaaagaagtcacccttgcgcggaccaacagcctagtagcattgttaggatcagggtcccacatgag

SEQ ID NO: 28828 - DNA, 393 bp, Zea Mays
gtttgccaaggtctcttttataaaataggcccagcggaaggttatcggctgcccaggaccgtcagatctaaaacatgcgccctagattagaccggagtcttccccgaaccggtatggaatcttagccgttggatttaaaaacaaaggagtagattagacctcactggtacgttctagcagccatcagatcatcgatcagtggcccaaatgtcgcccacgaccttccccaatactagacgtccaactggaaatctacgattgcgattaagtacaacgaaggggtatgggacttctaatcgtgaccacccaatctcaatcgacgctcagtattataactcaccgagatcaaacctcagccgctggccctagatctactagccaatgcgctttctc

SEQ ID NO: 28829 - DNA, 292 bp, Zea Mays
ggggagagcgcgttcgaccgtcgatcgacgaatgcacggtctggattagatccgcaccataccggttcaatggttgatcccagcccatggatctagatcgtgcgcaccagaatagatcacgacgttttaaaatcgggggccatcggatcatgatccagcagcccataatgcaccgtaccccttcggccagcgctaatgcaaaagagacccttggtttggataaatcaacctgtcaaccaccactactgtttcctgagtcttagtacatttgcgtgttagcccctgaactccc

SEQ ID NO: 28830 - DNA, 875 bp, Zea Mays
acacttcagaggtgagtagagaaggaggcgagcttgagggttggaacgcagtggatatgggggtagtgggcagctgatgtcgcggctggctggatgagccagggtgaccgaagagctgtccactaaggaataacttcttcgatagatccctagtacaaactatcggctggctttatagatgatgagccaccaaacctttcctattacttaacctagatatttggaaacagaaatatcaaatctaaacttcctaacaactcagcccttgattggaggatttgatttattcaatcaaaaccttcctactgacctcttcttcctttcctgtgttgactccttcctttcctatgcatgctgcccctttcctgcgcctgctgccagccttgggcgcctgtgatactggcggcccacaaactagtccacaacatttccctccacaccgacaaagaactcgtccgtgagctcgaactctggatacctctgcttgaattcttcaagtggttccctggaagcatctgtctcagcacgaccaaaccactgaatcaacaattcctaaacacctctattgagcctggcacgtaccaccttggatagtgttggtaggacacgaccatgcaagatcacaggtaatggtaccacttgtgttggcgcctccccttcaaacttcctcagcaaggaaacatggaagacatcgtgtattcgagcacgaggtggtaactgcagcttgtatgagaccagccctacccgaaggaggacctggtatcgaccgtagtactttggcccaagtttggagggagcagcagaagtcaacctgactgctgtgaactgttgtaggcgaagccacacccaatcgccgacttggaactccacctggc

SEQ ID NO: 28831 - DNA, 534 bp, Zea Mays
tgacactcagcacgacgatgcgcttcaccacaacagaaacacaccaaccccaacccaggcttaggaacaacctgatacctctgagtactccctcctgaagtacccaattcagaggacttgccatgataggggttgtggcgctggtgttgaaactttcccttcttgtgagctggacccccagtgtagcccctcctcatatcctggccacgaggctagtcaacacctgaagacttctggaactcatttgtatactgatgttgcatctccatgcccaaagcctgctccgcagtagttgaaaaatccactagcagaaaggcactcagagcatgcctgatataaggtctcaagccctaacaaaactggctcgccttttctaattcattataggccacatgcggaacaaagcggaccatcttgttaaagcccacttcatactctgtaaccgtctttttctcctgcttgaatgattgcaagtctatcttcatcttctccaggaaagtgactgggtaaaatctcctttcaaattgcctgaca

SEQ ID NO: 28832 - DNA, 559 bp, Zea Mays
caattttttaagtggcctaaggcaaagctcacattttgatgacaaatttggctttatttttttttgcagtagtcttgtactcttgtgtgcccatcatccatgttccacaataaataaactagaaacaaagccacgcttgcatatacatatttagtgtgatacttttctaatttatttgcacttaatatttgttcgtattgtagaatagtattgtactgtgaatctgtgatgaagttattctttatttgttcataaagagaacaagcaaaacagtggtactttttatgtttacctcctatcataatagattttactgcgaactcacaatgcggacttggatataccaattaaaaggtcagtcaattaacctgctttttaataaccatcagtaaggaggttatattgtttgatgtgttgcctctttttacattacacgatgacacacgtcattttgcttgtataaaaagggcaaacatagtggccgaggctcccaagtgagtggagtcaaatcaagattacatttcaatttgtgaattagatggacgattgtttataagag

SEQ ID NO: 28833 - DNA, 288 bp, Zea Mays
gcgaggccggggccggggacgggcgcagcaaccgcgcagatattactgcctgtttcatgacgaggattgcacacacccaacaagggattgcccagaaacaaaggacactaggtacaggatgtctcgagcacaaccagccgacaaccagagagttgtcgcacacacatatcatcaccaccatccacaaccatacaacaacggccacgtccagcacccacccaaccacgcatatacgcaccatcaggaagtacaagtcgttccacccccgcctccgcctccgcatcaccc

SEQ ID NO: 28834 - DNA, 760 bp, Zea Mays
ccttgattcgagttcccaggagtctgctgaaagttggatttattttgcttcgggtatgggcaatccttgatgaaatgtccagacttcccacagttgaagcaaccactggaggaactgggaatagcagggaaacgagtaccgggggcactcggctaattggtaggagcgggggcagtagtgggacgaataaagataggctgcttgaatggatatgaaggtgggcgaggcgaagaacgattttgattaaagggtcggatcaccaacctggttctcttctcaggtccttgattggacctttcacctccaaacccctttgattttccatgtcctgcatttttggcttccactgccagtgctatacttacagccttactgcaggtgaggtccaagcatgttgccattttctgctgaagcctgtcattgagccccctcataaaacaattctttttctttatgtcagtatccacctggtcaatgcatactgagagaggtggttgaatttgttgagatactgcatcaccgtatctcctccttgcctaatccggataaactcttctagcttcatctggagtactccctctagaacataatgctctcggaatgccaacttgatctcatcccaggtaatctgatgtccaactggctggattgctgagaaatttgcccaccaagtactggcaggccctcttagctgttgtgcgacgaacaggggcttttgcgtctctatgcatcgaattaacccaaacttctgttccgtcac

SEQ ID NO: 28835 - DNA, 613 bp, Zea Mays
aagaagaagagatgtcttcggcgagtgtctagcttggatcgggatgctggtccttcggctcctgctgctgaggaagtgcccgtgcctgaatttaccgacgctgaccccaatgggtgcgacccatctgatgctgaccccaatgggtgtgttgtccgtgttgctgatgaaaatgaggaggaagaagaagatgaaatccctctgattcggaagaacaatcggcgctacgtagccagtggggaaagtagtggagttccttctcctgctttgtttgccctcattggtctacaagaattgtctctggcgaactttgatcaaactcttgaagatatggttccagaggatctattatcagaaccggcggatggtgacgcgatggatgtttgtgctgatgtgttcgacgtcgggttggggtcatcccgggcagcgtcctgctcctcatcgaccttggagcacggtcttgagggtcaggaaggtgacttggattgtcctgctcccatggaagtgactgagggaccttcagccttagaggtggctgctgcaaagaactcggccctcaaggatggtgttggcgctcacccagcccccgagggtgttgtcgagggtgactcggctc

SEQ ID NO: 28836 - DNA, 357 bp, Zea Mays
ctggaacaggctgaccacggtgaacacataccgcacggtgtttttggtggatttggggaaagtcccaaattgaagctctctgggagacgattcaaggcgcgagttggtgcacgggttacttgactaccctacggagcgcgtggcactctcaatttataggccgaggaccggatttggatgaaatttacggattgcggatgtgctggcaagcctaccgcgcggcggatttcggtgagggcacggtggccgccgattaaccggagcttgccacctcagttactcactgacacgtcgccggggacttttaccgtggccgccgatgacctatccgagccacggcggcatccttatcgccgg

SEQ ID NO: 28837 - DNA, 485 bp, Zea Mays
atagcgctgcacgccgctgcttctccttccccgcgagtgtccgctccgtacgccggcgactacgatcctgtttctggtgcgtaccttacagtccatccttcttcacgtgtctacgctcttcactgcgccatgcgattcctccagtaatagatcgcgccctcgacaggtgaaagggagtgtcgcattccccatcagcactgttactgacggctgccgcgtggtgttcccgacgtgtgctaccatctccagtacacccaatcctcaacgtgccgacgatccacgcaggtacgaagacttctctggctatgtgttcttcgtgctaggttttgtcttttgcatctcattctgattccattgaacacggctagatattagggcttcgattttaggtttttggttgtaactttctcctccgtgcacgggtgattagggcttacctccagcttcgctcacttcgactccattttttattcatcgatttttta

SEQ ID NO: 28838 - DNA, 287 bp, Zea Mays
cgcccgacactgttaccaaagtaaccaagccgctgcatctccagcatgtggcccaagaaaatccttgaggtcctaaactccacggtgtggccgggctgcaactcaaccaccgccaagtcactcaaggtctccttggacgacggcgcggccggcgatgcgctcgcatcagacgaggaagaagacattggaacgtaccgtcggcggcggcacgcagtctgcttgatacgggccagatttccggtgcagaacgagcaaggacggcaggcgaacaactgtaaaagctaggg

SEQ ID NO: 28839 - DNA, 596 bp, Zea Mays
cgagtgctgggcgtctgtggcgaagggcgatggtgaagcgtagggtgagtgaggttgagggtggtcgtcttcgtgtggacagggctggcaaatgagaattgttggcctcgccggctggggtaagcgtaggtgagggggagttgcgaaatttgtttgagggtgaagagctgaggataatgttgtttaactatagggagatgggtatcatcccgaatgttgaaccaatgtaatgtgtggtgccctcgctgcacgtatgtaactgtaatttgtatgatgagtctgtgtgccttcgctgatccagacgtgcccgtgggggacttgtgcatttgatctagcgcgtttattatgccggtccggctgcgcctgtattcggtctttgcgcgaatagtttttcgacgaagattttcgcacggatgtgcctgcgattttgtgcgcttgttgtgctagtccggctgcacccttgggcgacttttgcacggatagtcttttgaggaagacttcgattttaagcacttgtcgtgctagtccggctgcacccttaggcgacttttgcacggatagtcttttgaggaagacttcgattttgcgcacttgtt

SEQ ID NO: 28840 - DNA, 293 bp, Zea Mays
cgaagtggagtcctaactaagttttggcttggcgacgaggctccagcctccaggtcctcctcctgtttgtcggtcttctaggtgttgtcttccttggggttcgtcccgtccgcccgggggtcggtctcttccttttataggctaaggaagggggttgaccagcggtggctttcttaggaagtagtcgtctcgtgaagctagaactgaatgttcttatcatgggataaaaccttctttattatggacgacgtgggcagcgtgggccagggcgtcatcatttgggctataccgac

SEQ ID NO: 28841 - DNA, 367 bp, Zea Mays
ctggtctgctgatgatggcgttgaagggaggttaacctccgcgacgtcgaacaggacgttctccgtgcggaagttctcctcggccccaaatgttaccgggagtgcgatgctcccaaggggatacaccggttgtgggcccactccagagaatgggcgagagggtcctagccgggatcctgggatctgtagctgcttgaatgcagcatggttgataacgttgaggccggcccctccgtcaataagaacatggtgcagctgcatgttggcgatgacaggagcggtgatgagcggtagtacaccggcccgtgccatgttgtcgggacagtcagatgccccaaaggagacggtggtgctcctccaccgctga

SEQ ID NO: 28842 - DNA, 539 bp, Zea Mays
tcaacggatggctaatgtcagacgatgggtcctatgggtgtgctactaacgctccctagccgaagctgtgtttaggtccaggtcccagtcgaggctgcctcctgggggccgttgccaactcttttaggtatgctggtatccagcctcgacacgtcgagcctacatcccaggggggccaggtactagggaagagtcggcagcgccacacacaacagggacaaatagtatgcagataagtgctaatactgctcgataaatagtactcaaaaagtaccttacaaaaacaaagttattacatccgccttcaagtggggccctagccttatgtctacgggtatgacctactcgacatcagtagggtcgcactggaagcgtgcggccgccatctccatggcgtacaacgtcttgtacgacctcctgggtgacgtcttcagcagccggcgacactgaagccatcaaagccaaagagatggagccgcagcacggctcgcttcccaccccatggagatggaggcgcaaaagatggagccgcagctcat

SEQ ID NO: 28843 - DNA, 278 bp, Zea Mays
gaaatattgtgaatagaccaaacttcagcttatcagcatcagatctgatagatatcccaagcctggcccgaagcattgggaatagattcatgacccagatctgggtaagtggcgggcgaaaaatggcgggtgacgaagctcgtagtcattttaagcaggtaagaaactgatatttgttacttttaccttttccttgaaatttgcacctttcttattctgctatttggtatacgcaggatgacgaagctgaagtttgacgaagcctagcctgaagcttg

SEQ ID NO: 28844 - DNA, 517 bp, Zea Mays
cgcagtgcatggttgataaccagaggagaagtggtgctgcgtttgtggggttctagtcgtgttgattggaagccggatcgtctgtgtgacatctccaccaaatcgatagttaccttcacctaacggaagatcgggcacccccgttcctatcaagtggtattcaaagacttaggtattaccgtcaggattaccctagtttagtttatgtttttcttcctatagctccagaaaattgccatacaaaaaaattccgctgtcctagaacactgtttagccttgcaatttcgtttcagattgctttgttgagtttgtgtccgtgttcgagtcttgttgctggtttaggtcatgtcgtcattgtagttcaaccgctccgtcgctgttatttgtttccgccgctatcccatccacctttcccagattacaagtcgagacaccacattactcgatttgccctcgctagccgccttgtgtgaactctcgccacgctagccctagattaggttgcaagccgccttgc

SEQ ID NO: 28845 - DNA, 584 bp, Zea Mays
tagccttcgtctgataatgaagttcatgtactcggcagaatgcatcggcgagcggctctaccccttgacttcggagagcccagatgtacacgctgagcctaacaatggcgttgggggtcagttgatgaagataaatcccgaatttttccaagacttctgcaatcattccatgcagaggaaatctcagccctgctttgaagaagctcttaaaaactacaacttcatcatttttcggcttcgggatagtctcttccccgccaaagtgaaccaaccccttatcggcttccttgaagtagcctagcttcgtcatcatagtcatatcagcttcaggcacatttgatttcccaaaatccagatggctgggcttcgatggcataataacatcataatcaatctctccttcattagcatcaccctctttaatttctgcctgctcggtttcagcagcgggtgattcttcttctgcagcgccttcagtcacaaccagtcccgatagcctcataacttcggagatcggagcagtttcagcagcttcggcttcgtctccgtcacgagtaactctagctgtcgagcgtaccctggcc

SEQ ID NO: 28846 - DNA, 354 bp, Zea Mays
tcacaaaccgtcaaaaaccagtatggtcaacaatagataaaggatactcatgtaatgtaatcatggaagcaagctctctcctagcaacttcaggatcaaaggtgtaattttccacagatattttccctccttgtgaatttaaccttaaagatgattgtgcaagtgctttgttctgtcccatcagcttgatccttcttactgtggatattttcaaatggtcatgcagatgttttgtcccattaatgctcttctcaccaagttgcttgtggcaatgtagacattgagccttgacatcatcacggactttgacttttttgaaatctttccaaacaacagaagtaagcttccgcttag

SEQ ID NO: 28847 - DNA, 565 bp, Zea Mays
cccgcatccacgtagaaccaaattcactactacccaatccgattgagatgagtgttatctcggattgcggtcacagcgacacggaccaccatgatccgcgactatggtgtagcggcggcggtgccatgaacattcgtcaacccggttcgctaacgagtgaatctctacgcgaagtacgctaccaagaacggaaatcttaacgagactgtacgaggggctctcaccttaacggcgaggttcattgacgacgaagcactgactgcggcgaggtccggcttcctgcacacacaccgccccaaaattttcccgacaatggcacgcccagatgaggacgatcgcgccgagactcccccagcgcccgcagtggccacgattcggaacagcgtgttagcaaccctcaccgatagaacatgaatcactgaaccagacaaagcataactcaagcaacaagtgctggatagatggagtttgggaaggaaacaacaagtagggaaatcacagctagaaggaagatgctataatgttctagatgatccgggtacaagagagagttggggaaagaaga

SEQ ID NO: 28848 - DNA, 613 bp, Zea Mays
ttataacataacagaggtgtaggagtgtcacaacatacaccaagatcagccaatagccagcggagccaaataatttcagcagtggtagtagcaagagcacgaagttcggcttcagcactagaacgagatatggccgcgtgcttcttggatttccaagcaataggagaggatccaagaagaatacagtaacctgtagtagaacaacgatcaacaggatcacttgcccaagtggcatcagaatacgcatgtagccgaagtgggctaccaaaagcatagagtaaacatctggatcgtgtcccacgtaaatatcgaagcacacgaagcaaatgaccataatgaactgaagttggtgtggatacaaattggctcaacatatgaacagcatgagcaatatcaggcctggtgtcccatcatatgaacatcatgagcaacagataaacaagactacccacaatatgacgatatcgagtggggtctgctagtggtgtcccatccttcgaacggaagttttaaatgaatatccattggtgtggcagctgtgcgagtatcagtaattccagagcgatcaagaagatcttgtatatacttggactgagacaggtaaaaacctttt

SEQ ID NO: 28849 - DNA, 629 bp, Zea Mays
gatgaaggtcctgatggtacaatagtctgacaaagatcatcagatacatcgcacctcgccgccggtgatccccgcgcctggattcgcgccggccatcacgattcttgctcggcgcaaagtagataaccgcgggggagtaaaagatatggcggggagatggattgggtcgcgggtagtagcttatcggagaggcttgggggctgtgcgacgtgggaaaacggccgtggttgtcagaggtcgccgatgaactcgactgtgccacgccgtggtccttcaccacgtagtcgtaatcctggcatgctcagaattactctccctgtgtttgtaggccgtcgagcaccacgacgtgctcgccagtgcaatgtcttgtcaccgccgccctccaaatccattccaaattcggagtaaccatggacaacctctataaattgagcacctcccttgcttcaccccctcataacgaacctagtgcaactctaatctcggtcggtcatccaccatagctcgagcaattccgttttcccccaaatcggttctacgcgtcgccgttagcatctcgccgtggccagtaatccacaggttggttcatgcttctcttcttggtgttttcgcatcccttgagtttcctg

SEQ ID NO: 28850 - DNA, 324 bp, Zea Mays
ctagtacgaaaatattagatatcgatatcatattattttatgacttagcaggtagaatatttttaatcgaatcacacgatgcctacaaatttattacatattcttcacatcatttatacctcagacctatcctccatgtcaccactttgaccaaacaaaccaaattcatgacaaacaagactaacaatacttatcagtcaagtcttgacaaattctaaactcatttatcaacattcattaaataagtgagcattaacaagagaactagtggtgccccgctagcagcgagaacatgattattagcccaaacctcactacaccaat

SEQ ID NO: 28851 - DNA, 321 bp, Zea Mays
gaactcgaatttgggattttccccaaaacggttgaagaacaccatgaacccaacctcaccgtgggaagctctcctcaggtccgatcctgttgtctttagtcttgttctagcatcctcatgtgcccttgatgctcaccaaaccgtccaattaaactagaagcccaccaatcgctgggaacacgaactaatatccatggttttcgctgtcctcgtgggcagaacgaaataggtcaccaatcatgcaattgacttaggggaaatactccttaggggtagaatcaggtgtgaaccaaagattagcgtcggtcttcgccctctccg

SEQ ID NO: 28852 - DNA, 305 bp, Zea Mays
ctgtgcatcaacgtgttgttcctctctgccgtcgaatgcagaacaagatggggaaacaagataaccggaatttccgtatttcggttaagatgccacctagcacgagtatataactcggtgccggccttctccgtcgattaacgaagccgccgaccacctcccatcattgccaaacacagaaaagacctatagtcagctgcaccgtgagggagaaccaccgccgaccgaggcgaggaacaaagcaaaatgctgatggccgccgccgttgattctcgttctcatctttgatatggccttggtgttga

SEQ ID NO: 28853 - DNA, 307 bp, Zea Mays
gccgaagcatggcagaatcagccgaaacaagtcctacatactacttcgtgttattccccaaacattcccgagtatgtgggcaatcaacaaccattttcacatcctacagtttcagtagcttcagcaagccactctccagctacatgtgctctgccacaaccaccagtcatagctccaacttcgtcccacaaccagcagcctaaagagcagcaccaaactcagcaacaacgcaatgcaagggaagagttcgaagctcggacaattattagcactgttctagagtcaaggcacatctactgaagccaca

SEQ ID NO: 28854 - DNA, 489 bp, Zea Mays
gtgctggtctatagtgctactattgcagatcatgtcagacatttgaagcaagtatttgagctgctcagccaacaacaactacatttgaaacagtcaaaatgcctgtttgctcaagagaaattggaatttctggggcacatagttagcgctgctggcataaccactgatccaaagaaagtggaagtcatccaacaatggcctataccaaagtcgaccaaagatgtacgcagttttttggggatggcaggatactatagaaaatttgttgctcattttggaatcatcagcaggcctctcactaccttattaaagaaagatactatatttgtgtggactgaacttgcagatcagtcattcaaggcattaaaaacagctttggcacaggcgccagtgttggtcattccaaattttgctaaaccattcaccatcgagactgatgccaatgggggcggagttggggctgttttgcagcaggaaggacatccagtg

SEQ ID NO: 28855 - DNA, 2311 bp, Zea Mays
ccgggacaaggtagcttttagttttcctggtcattctgctacaagttgttatgtcgaaacgctgaaaattctggtttaaccaatgagacttgagatcctggctggcagccaattttcctggtcggccgtcagctgtagttggcagctaccatggctgcctccctgtgtcctctcctggctgggcagctagatgtagctgacctcggctgtcttgacgactgctccatggctgggggatgggcagcacgatggaaacggttctgaaccttggaatctgatgaagtcaggtgaaacttgattaaaatggctaatgacattgctgtttcaaaatagctgctgtgggacagttgttttttggagttgttcttttgtccaagttttatggatgctcttggagttgctcttaatttgacccaaaacagacgcaagttggccatatctttcccaacaccaccctctttgctttcagttagttatctcatccttatcgatttgaatagatatttacctgctgagactgagagtttactcttactgagtttgtcgtgtaatcgatcttgatttcttttcttggttgaattttttctctgcctatttattaatgggaggctggtcaaattcaaggagctgtggtttccagattcagtggccatggcgttcttccagtcgctcccagatcaatctagggctctaatagccgcagcccgagtaaacaatgggcttctggttacgcaccctcacacatcaatttgattgctgcagctttatgctgtaggctgtagccattttttctcttcaatcaatgtagccagttcgctgcagcttattccgaaacggcttctgctacagtattttgtctctgaattacagctgcagcagtctgaacagctgtcttaaagccgcagcgaacaggctagttgaggcctggtgatgagatctccctctgctgctattgctgcatggctgtgatgacaaaaaggttatttggttgattatgattacttaatgccatataaggatcaaaacgtgatgaccttatttgtgcgtgtctgagccgatgcaatgcagagtccatgtttactatttttcctgctgacattatcaccttcgatttttattcctgctgattactttttggcagtgatggtttctagtctgatccttgtgttcctgacactttttgtctactaagggttttgcactattgtttatttattctggtcatgggatggtaattaattcagggtacaaatatccttttatctatagctgacactttgacaggataatatccggatggcctgggacagaaacatatgtatgacctggctgggatgacaaaaacatacgttgtcgattggatttctttgtagtgtcttcgtatggcctggctgggatgacagaaacatacgtttctcgatcctgatacttgattttttttcaaggaccaaactttgatgacctttgtgcgtgtctgagccagtacaaatgagtatgttttcctttttttttaacttgaagttttccttatttattgttacaaggttatggccctttgacctttgtggctatgatgataaaatgtttgtttctcgatgctgagacttgaattattcaaggactatattttgatgagctctgtgtgtgtctgagccagcaccttcacctttgcttgaaaactatgaacctcttttgatgcccatggtatatttgaattctcttggcctgaagtgttggtattggctgtttgtctactgttatatttggagactttgcagattggaacaggttgctcgtgtccgaatcatgaaattgactgtgttgcggtgttagaaataataaccactattttctggatgagatataagcattacctattctttgtacgtaaagtatgcctttttttctgttgtccatggcttatttgagttccgtttagcacatttttgctttctttattcatttattgagttatggtgacaataatatccaaaatgatgctactggttacttgtctgttgtgatttttggcgagttctcaagttggatagattgctggcactgcttcagtcttgtgcattctaaaatgtcatcatagcttttctggatgatcatatctgtattaggggtcatgggtcctcttttatcgagtttaatacatgaacatggattctttgtggtcatcagattgtcatacatgacttgtggctacgtggctgctgttcctatccaggccatggttcgaattatcatggtttgaattatcctatatatgaatcctatatatatcctatccaggccatagtctgag

SEQ ID NO: 28856 - DNA, 464 bp, Zea Mays
attcgatgagccgaatgatgactggctagatgccatcgaagcaaccagtgatgaattgcttggtgcctactcgaaggctgaagatgatgctatgacaacggccttcgggggtcaaggcaaaaagaggttgaatagagtttttgatgtcatcgggtttgtatacccggattattgttatccttcgtgaaagcaaggaaagaaaagaaagactgttgttcggcgatttctagcatggcgaagccaaaaaaagttaaggttttaacacaccgccccaagcgcattgaaacggccaaagtgctaaggcctattgaggggtcttcttccatatctgagccaagtcgctccgctcctgctgaagctgggacagaatcggtcgaagagccagaactgaagacggcatcggagcaaccgaaggctttgagtccgttgcgagagatagagctgccgagggcatcaaagattcc

SEQ ID NO: 28857 - DNA, 478 bp, Zea Mays
cgctggggcctgtgaatggcatcgccggcggtggttctcatcgccgccgtgcggtggggtattttggccggagggaagacgatgtttggtggtcggtcaatcaatggatcaacggtccagatcatgtcgcattgtaggaggtgtctaggccactggatcgatcatgggcggttcagattagagtggcatactgtttcaatacattaaaccctagccgtagatctctgatcgatcggatccgagcgaaacttgttgcattaaattctgggtcgacgatcctcgatcggacggtacctgttcctttccagttcacaccgctgcggatctaatcaggcgcgtagaattctgatctagcggtcagcatttcccgatacccgttcgcgggttagttttacacatgtgcccctatgtttttcctatatagaacccgccgtccacatacattgttcactgagtctaggattttatgcgagcagcc

SEQ ID NO: 28858 - DNA, 881 bp, Zea Mays
agaggttggaaaagaacgaaggaactcccaagtcgtgggaagttaattgatggctcgatgaaggatcaccaaccggaacaacccgcgatgcatcagtggggaccaagtcagtatcatcggcagaggtcaaaactctgccatcaggagcgctggcctctaaggcgacttcctgacccgaagcttgagctgctgccatgcaatcagaatgcggaggagaagaccctacgtgaacgtccatggaagtgtgagagggagaaccgacttggacaccctcgggggctgggtcatagctcgcgctacccatccgagccgggtcatccccggcaacatcctcgggggctgggtaagcgctagcgccatccttgaaggccgagctctccgtaacagccacctctaaggctgaaggaccttcacccacttccatgggagcagaacaatccataccagcctcctgacccttaagaccgcgctctaaggtcgatgaggcacaggacgctgttcgagataactccagcccggcgtcaggcacatcagcacaaatatccatcattccaccatctgccggctccgacaacagatcttctgggaccatgtcttcaagagtttgatcaaagtttgccagagacaattcttgcagaccaatgagggcagacaaagctagagaaggaacaccactactttccccgctgactatgtagcgtcggctgttcttccgaactagagggatttcatcctcctcttcctcatcttcatcaacaatgcggacggtacacccattggggtcagcttcagccggatcacacccattggggtcagcatcatctaggtcacacccattgggttcagcatcagtcgggtcacacccattggggtcagcttca

SEQ ID NO: 28859 - DNA, 302 bp, Zea Mays
caaccgaagatgtaatgactgcatacttgcccatcgtcctcaggcaagatgcattgcaatggctacgacacctaccgcggcactgcattgacgattggagcgacttcaatcagtgttttatcaccaatttccaatccctctccgacaagccgacgcagccgtgggacctcaaatccatcaggcgccagggggatgaaacacttcggtcgtacctcaagaggtttcagaccatgagaaatcgaatccccgaggtcgctgaggcagcagtgattgaggacttctaccggggatccaatgactcg

SEQ ID NO: 28860 - DNA, 298 bp, Zea Mays
ctcgacatcgtgtgctctactgagtacgacgcttacgtcgaccaactaggattctgttgaaccaacgctggtttttgtgagcaccgtgacctacgtgaccccctgatgctctccgttcccttaatttgggatttctatggtgaataccgcaagaacgtgtaccacggaaccgagaccctgacgtgtgcatggttagggcattctctgggcgtgtgagccaaattagtacccatggcggctcgggttaggttagaattaggtcgggcaagtatcaatgggtgctcgggccctccgccgc

SEQ ID NO: 28861 - DNA, 288 bp, Zea Mays
cggtcgaacggggcaaggactggcgtccttcgtcggtctaaaccagattcggggcctagtgaatgtttcccctaagttaatttcagaaatgactaaccgaatgtctctggccacggtgaccgtggacattgcggacaaatgaatgtgttcccggtgattcatggcggtccagttcaattaaaggggtcgaggagcttgaggatagcctagggatgctagaacaagcgacggagtaacatgaactgatctgagctgagctgaccgcggtgaggttgttttcatggtgtt

SEQ ID NO: 28862 - DNA, 346 bp, Zea Mays
acttatcctaattaaaatatatcttatcttaaaagattttctcttatcttaatagattcatctcatcttagaagattctatcctatcttatcttgtcatatcctaactactttgcttatctcgtactaagtgtaacaactatgatctattctaaaataagtagatcttaactagtctaatctagttatatccaatctgtctatccccacctaacatcaaacaagattttgacctacatcatgtagtctatctcatccatatctatcttaaccatattccccaaccccgatgatacacactaacctcgaatcaatgagaccaagaccaaagaagagaaaatcgacct

SEQ ID NO: 28863 - DNA, 415 bp, Zea Mays
gtcagtcttctcagcagtttggggtagaaaacttatccattttgatcggttcaatacagccttgatgactctgattcccaaggggggagctgaagaggttaagaattacagacctatcagtttggtgcatagtatggccaaactaacaactaaggtgcttgctaatatattggctcaaaaactgcaggaaatggtttctcttcgacaaagtgcattcatccatggtcgttttatacaagataacttcatgcttgtgcaacaaactaccagacttcatcaacaaaaaagaacaaggaatcttttgaaagttgatattatcaaggcatttgactcttatctcctggcttttcctactggaagttctccagaaacttggttttgggcagatttggagagacatcctcagtggtctttt

SEQ ID NO: 28864 - DNA, 324 bp, Zea Mays
ccaaaactgaaacatactctgcagaacaactgcaaagtgctctcgctgagtaccaagaagatgcagcgctgttcatatttcgcttaaaatcattgaggcaagggcaattccatagccttttaacacaggcttctcgccatcatgctgctcaggtaggctaatccttcctccataacactgtcagttggcccaaagattggttgaatacataacctaactatcacactgttctttggactgtagttaagctttttcaggagagggctgaagtgtcttgaggcactcgaaccccatgtaaaagctatagctgagagacagcacatt

SEQ ID NO: 28865 - DNA, 298 bp, Zea Mays
tcaccacctgcttgaaacccggtaaaaccgtccaaaaattctcaaatttgaaggagcgcggacgcctcggcctagcattattagatagaagcagcgggcagtggtcagagactgaagatgaaagagtgtgcagcccatagttgtcgaaaaactcctcccactctgggttgcaaaagaacctatcaagcctgaccaaagtggggtgtcgcctctcattgctccaagtgaattttctattttgcagaggaatttcctttcggtcacaattatcgagagcttgtctaaaaaactgcacaag

SEQ ID NO: 28866 - DNA, 384 bp, Zea Mays
gtcgtcgcaactgcagaaaaactggccactgggagtctgggacgaaactgagctaaagaagaggatgatagatggcacgttgatgtatgctgcggcggaaactgagctagtcacgtcgatcccgttgtcttctctaccacgtccggtgttgtccaccattaatctacaacaaccccccacctggacaaaggcaaggctctcttgcaccaccaaggcaggaagggatggatcggtggtcgccatcgaaggaaagggagccataccactcgcctgctgatggtccgatcagaatatcgctgcctttagctaggtcagcgagcaggctctaccgagcctagatcggtgagtttcgcactgcatgcggtctcgccgtcatagttggcg

SEQ ID NO: 28867 - DNA, 288 bp, Zea Mays
gtggcagatgcactaagtcgcaatgcttcctgccattgtcttacagtgagaacccctgacatcacattatgtcaagaaatggagaagttaaacctgggaatgatacaacatggaactttgatccagttgaagcttgagtcagttcttctgcaaaagattattgttgcccaaagaaatgacaagggtatgaaacatattcatgagaaaatagaagttggcaaggctaattgtttcagaaaggatgatctaggcatagtatggtttagcaattgcatagttgtgcctaag

SEQ ID NO: 28868 - DNA, 392 bp, Zea Mays
aaaggagagaaccaccaaccacaaatcaccattgaggaggaggcggaccaaagaattgagtcgccaagttagccgcaaagttttcttcctcaggctgagctgggggaggatagctgcctgaaggatcatggggaggaggatatgaagaggattgacccggatccccctggtggggaggcggggcaaactgctcacaatcatcaaagtattcttcttcttcatcttcatctttagctgacataaagggcaccccataggcctgctggtgccattcattgatttctggtggcggaggatgaagaggcacatcaggcgagcggggagcaaatggcatacccatggaagaagcttgacgacagaggttgtcgtcagtctcccgctgacgcctcgcc

SEQ ID NO: 28869 - DNA, 439 bp, Zea Mays
gaccaatccgcgccgtgatttgcgccagggtcgggatgggcgcgcgacgtgcatctcctcgcaaagatctttttgatccgggtaagatcgccgcggtggagcgtgatgattccggccgccacgcggccactaatcactccggccatatcaggtcatcggcgccgctcctcttcgttcatccacgccctcattgatttgaccgcgttactgtcgcggcggaacgtggcaagctcgtaggaaaggatagcgctcgacgccgccgttgatcgccagctaaggccggcgatggttatcaccatggccatggccgtggctcactacacctataaattcaccgcatcctcaccccctccgttcaaatcaaccgagcacaactcttcgtctctaaattgcgaagccaaagcacccgctcccaccctcgattagccaccatagccgg

SEQ ID NO: 28870 - DNA, 424 bp, Zea Mays
cggagacgccgtgagctcgtgacgggttgggctggccgctggcgatggcatccattggagacgtccaggagctagacccaatcgccgaggatgaggaaaggaggctagaagacgagaacgcagccgatgatgcactccagttcctcttcggtggtgctggtgtcgttgaggcgggaaccgcgactggatccacgccgattggatccacgccgacgagccccacggtcgaggcgaccagtggctctagatcccgcatccgttcgaggaggagggaacctacgtccaaagtatggcaagactttgaagaagtgactgccatggagggaggtaaggaggtaagaatcgctgccgtttgccattactgcaagcaaactttatctgctaagtcttcttctggtactgggcacttgatcagacactcgat

SEQ ID NO: 28871 - DNA, 468 bp, Zea Mays
aggcggaggtggaatcccaaaatcatcatcatcatcatcatcaacaactgctgcatcctgagcttcgaactgatgaagagcagcatcctcggcctgagtgtcaaaaactagagcagaagctggcacaggatcctcaggcgctggacggtaggacccaaagacaaggcgtgaggcctcaagtgtgccctggaactgtggaggccgaatcagctgcgcaaaaatgtgacacaggtagtgagcatatggcaactgtcgacgagcacgcatgccatccaaaacggtgtcctcgatctcacaaataaggaaatccacaacgtcaaactcagagtgagagacgagggcaccaaggagccagagctggatatgtgtggtagcctccctatatcccatccgcggcagaagtgtccgtctcataagctgaaataggaactttgctgctgtagtgaaatctgtcggtgagcgttgcga

SEQ ID NO: 28872 - DNA, 459 bp, Zea Mays
aacgaacctgggaacagttggtcatggacgggtgcctcacggcgggaaaatgaccacgatggtgaaaatctcgaatttgtgagctctagtgggtaattggaagcgaggaagggtgcgctaggcacgtaaccagaaggtggatcagggagagcctttaatttatagtagctacgtgagtgcttcgcgaatttgggatgagaagatctcacggccgaaagggggtgagtcactggagcgcaactgtcttggcgctcggtgaggtaaggccccaggcagtaaatgggctgtccagagcgacctattgcgatgtggtaacgtctccaagcacgtggcatcctcgcggcgagtggcggatgccgacgaggacattccgatcggtcgtgaagcaagtggttacggtggccagctcacaaacttatccatagtcatgatcttttcacttgcccggtaatatccgcg

SEQ ID NO: 28873 - DNA, 452 bp, Zea Mays
gaaaacgacacaagaaggaaacacatcttaggggatctcacccagcttatcaccaacaaggacgatgctgatcttcaattgatttcaatgtggggtgcaggtggaggcaccgggacgacatccatcataaggaagtgctacagtgatccagagatcatccaaaatttcatatgccgagcctgggtcaacctcagccatccattcaacccccatgagtttgtgcggtctttgatggctcacttttatgcaaacagttgccaagaaagacaaggagggatcatcggtgttgatgtcctaactagcatggatgcgactgccacccagggggatctcctcagcgagttcgttcagctagttgacaagaacaggtaccttgttgtcttggaagacctgcccaccatggcagagtgggactctatcaggacgttccttcccgacagaaagaatggcag

SEQ ID NO: 28874 - DNA, 344 bp, Zea Mays
aaacagcagggacctcggggcaatactccacagacactgtgaacagtcccatgtggatggcgggttagtttcctggaatcccagggactatttagcaaaagctacacgacgaagggtatggcggtttactgaccgttggatctcgcgcgacggctaagattagaactctgctcaaatcaaaccggtatccattatgggccctcggatcccaatctaacggtggctattttatgaaagcggaatcggatcgagtccgtcagatctcatcccacggtccacgatcaatatccgaaagggtaccccgtgttctatatcgaccgtgcgatggttatcggacggtgccg

SEQ ID NO: 28875 - DNA, 310 bp, Zea Mays
ccacgtcgagccccagtctacgaaagctagggtcatcgtggcgcagaggcagtaatgatgacgccagagctccccgccgtccacacgtagtcggtcttaaagagcacgattagagaagctcaaacgaccgaggcatatgccgacaagcacgattttaccaaggtataatgtcccattttgccacgatgcagtagctccttccctgagaagctaccggtaaccaccccaccttggcctataaaagggggaaggtcgaccgagaatgaagacacacacacgcagggagccacataggactatgaaggccgaa

SEQ ID NO: 28876 - DNA, 285 bp, Zea Mays
ccccgcctgctgatgacgtggttgctgctcaaatgcgactactacaacaaatggccaacacgatgacagaaatgcaagcacagatccgtcaagaatgtcaagaaatgcgtcaagaatgtcaagaaatgcatcaggaacggcaagaacgacaacaactaccatctccaccaccaccagctccgcccagggataagcaccgggagtttatgagtcacaagccatctacattctctaactcctaaaaacccactacaagttgatgacttgttaaagtctatggaaaag

SEQ ID NO: 28877 - DNA, 279 bp, Zea Mays
caagatgcggtggtgaggatttcaccaacctaaacgctatattgtgattaaatcctgagcgcaagatggccgatccacggtcgagagaagccttggacgaatcaatactccgatctaatcgcagccctcgcctaaagatccaacggccaggaggccttctcccaccactgtccaagccgagcgacagcgccaggagctccccacgatggagttgtcgccggagatagccatctctcgccccgagaccttcccacactgcctgactagcgctacacgaac

SEQ ID NO: 28878 - DNA, 418 bp, Zea Mays
tatgcataactagcaatatcaaattctaacaaaccaatctcgatatatagtagcacccttgacctcttgcccaaaccttcccctatccaactttctcctccactgtaattgcaagcacctatcgatttcaccccgatggttcttggactccaatccacacccaactacatcatttccttgcttgccaaagtgtgctacgacatatgtttgtctttcattatggtcggatgaccttgaagtgttgtcgtcattaagaacacctatattgaccatattgtgacctcctaatctcatgccactcgttggagtttggtaagaacaatagtgttgtcgtgattgagcttggcatgagtggcgaagaggttggcggtgagagacttggcgctagctagctagcggggcgcgacggggaggagag

SEQ ID NO: 28879 - DNA, 369 bp, Zea Mays
gtcctgttttcgatcctattttcaatagtcctattttttattccgtttccgaaataaaatgtgaaaataaaaatgggagaggggttatcccaatcgatcctttttgttgtcatccctaattgccttattgcctctaaccctaggtagccaatgtagtttgttaaaacatcaacccaactagtgtagaaatttagctataacaatctgatcacgccagaagatctagttagatctgtaccattataaattcaccgattttgaggtgcgccattggaactcaagaatttgtgccagtaccgttacaattgtgctgcaatttgagatatgccatgaaggccccttagaccctcggccaggtgtatggatgtg

SEQ ID NO: 28880 - DNA, 482 bp, Zea Mays
cccgatcagaaatcaaggcttgagattataaggctgaagtgatatgagtgagatctaatccggtccgtccattacgatcacacggtctagattcagtgaagacacaatttaatcgtagccattcacagacaatcccactactagaaatccttcttccacctgcagtagacaacgcggcggccagaactccaccgtggcggcgccatcgccggtgttgggcgaaattgaggtatagtgggtaatccacaactccaattgaagttatgcacagaggggaccgaggggaacccaacggagggcttaccttgagcagacatcaacgcagggagctcgaccacgtcgccatgcggcttggtgatgaccagcaaagtccgccgagctatcccgggcgtccccggtgtcgatcccattcgataagggcatggtcgtcatccagccgacccgcagagcacccccagccggacgtagatgccacaatgtcg

SEQ ID NO: 28881 - DNA, 466 bp, Zea Mays
cgtcaggagatccctcgtgacggccagcgcagcgagctgcggctgagggccaccgatcccggaccagcggacaacacgttccttgtgccagaacgccatggtgaggtcggcgaagttccacaagatcggccccagggtacgcagccattgtaccccgagtacgacgtcgaagccatccatcgcgagtgtgtagcaggagatgtcgaaggtgtccttgtcgatggagatagccccacctggcggcatatgcccgtgctggggacacgatcgctgttcgccaccttgacggagaggccggtccggcgttccaccatgagccccagcttggccaccagtccctcttggatgaaggtatgagtcgatcccgagtccaccaaggcgaccagggagactccgttgatgacgactgggagtttcatcgtgttgcccacgtcgatccctgttagggcgtgcagggagatcccca

SEQ ID NO: 28882 - DNA, 616 bp, Zea Mays
gaaggattggagccttatcaccggactattcactgtgccacttgccgcgcgattgactaaggtgtcctcgccggagtttgtcgtctttcgtagccacgccacgtacttagaagagctaccacgtcgtagtagataaccgtaggttgtctgtccgtcacctgagatattaccctggtgaacgccacggtagtttgcgccggtgactcacccctctcttcaactgtcggtctccccctttcaaaattcagggccaccaccctcaaacactataaattcatggtgctgctagctccgcaaggttgtcacaaagccagagcatccacccctaccctcgattagccaccatagctggagaattttgttcttccccccaaatctgttgtccgcgccaccgtgagacatcgcgttgtggccagtcgtctctaggtccgcccttgctctccttggccatgttttagcacccacacatgcttgtgatactcatcggctcaacccattgtgcttgaccccactcaatcgactagaacaccttgatttgtatgcagtgttcgccgtcaccgtggtcgaatgattccagggcaggattagttcaattgaggcttgttctaggttcgcc

SEQ ID NO: 28883 - DNA, 499 bp, Zea Mays
gttccccgtaggccgagggacgcgaaggccattaaagcgccacagtccggggctcgtaggtcatgagcactatgtggccgaagggtccataggtcatgaataggaagcggaccggtgcccatgccgtggctcggtgccaggtgtggttaatgcggccagtcatttatggtgggttagttcaggtccagacgcggggatccactcgagtggttcccttctgacatgcccatcctcctttgtcaggcttcgtcacgcccgaccctaggctcggtgccacggggtgcaaccgggggcgggtccttccagggctggcgcacctacctcttccgactgacaaacaagccccaggtatcaggggctctttctttagtgcgctcacggaccggtgggtcccagggactggtgatcatctccccgacaagagcccctgagcccccgaggggagagtgtctcccttcagaggctaataacgggtcatgcggcgggtcagacattttcc

SEQ ID NO: 28884 - DNA, 451 bp, Zea Mays
gggaaatggggaactgggcggctctggtggacgatcggaggcaagagctggtgctttggatgcgcaataacctagcggagctcactggggcagcaatttatggactccatcggcggtggcatccaatttgaagaaagtgtgctagcggccggagaaaggagaaagtctttgacgtgaactacagtggcagtcacaggctaaggagctacgatggtcactggtgagctattacagctggtaacgatgtggtgaaagggtcatggcatggcgcaatcgtagtgaatggtgtacaccccggcgacaccgcatggccacgtcgccggcaagtggatgggagacagagcagccacagtgctccaagttcatccacggcgagatcttttcaccagaggtcatcatccgcgcgttactgggcgcgagtcgtagcgctggtgcgaattcgagtgggagg

SEQ ID NO: 28885 - DNA, 344 bp, Zea Mays
tcgttattgaggacatgagaacatcagtatcatatcaaatttagcaaactatgttttcttagcagtggttaccaatggaattgtagcatttatatcaactagagactgaactgagattacaatacatattaagtagcattaaagtagagtgcaccaagagcttaagcactggtgctagacttagcacatttattaagatttcagagtggaatgaacttaacttcagttcatcctaacaaacatgtcctaatcgttccttctttagttcctcaactactcctttaaaggcataaaatactcaggtgcactttgatcagtagtgattacatcaagatttgctctca

SEQ ID NO: 28886 - DNA, 342 bp, Zea Mays
agcaggcagctaaagcaggcagctaaattcaagttctccttctcctttgccttccccctcccctttttccatctccttgtcatgttcactgctactgttccaaaagtccccaatatttgtcaaatttttctttcattctgattcccatcagtgtttgcaaatcatctgtactgtccatccatgattgaatcaatgcatgcacttctccaatttcatgaaaaaatgtatgtgcagtgacatggagagttgtagagacacgaacagtcagatcataaaagtgctctaaaaattctgccatcttccttgcgttttcccaatctatctcatcaggatgaccaaaac

SEQ ID NO: 28887 - DNA, 293 bp, Zea Mays
acgttccaaatgaacgtcctttcaagcagctttgtgattgcgtctggaataaagcctgatggagtgttcgctatgagcatatcgcaaggccttttgacaattctttgagccatgtgcccaaagagaatgaagtctgtatcagctgtctcgtctcctgcagtgacaagtattttatacctgaaataagaggtgtcaatgacttagtgtggttaacatagtaggcttgtaagtcccaaaggaatctatatgtaaacaggaaaacattgacataaagaaggtagaacgtttttgtg

SEQ ID NO: 28888 - DNA, 358 bp, Zea Mays
cgtttcagttttccaataatggtggaaggcagctgtgttgaaggagcctaaacagaagagaggaggctttaactcgatggtcgctcttgtggcttggtggctgtggaaacatcgtaatgcatgtgtttttgataaaatttccccagtgtggccatggttgtcaaagatattaaggaggaagccaggttatggtgcttagcaggggcaccggggctgaagcagatttggccttagtgtattgtgtggttcaggttctctctgctgtcttgtaaccctcttctattttcgtgcatttaccgctccgacggtttgtatcggtctattttagatctttttcttcttaatataatggtgcgca

SEQ ID NO: 28889 - DNA, 356 bp, Zea Mays
acgcaagcaagatctgtgtatgaaaaatttgtgacttaccaccaccaaggtctgtgcgtgttgtttctccaaccatacttccacagggcatcttgatctcggacaagcagcgaaaagcggatcgatgacggcggtggatggggcgacgacgacgaggtggacggatagggcaatgctgacgaggatggggcggtggatgcagcagcgaggtggacgatggggctgtggcgacaaggatgggacggtggatgcggcggcgagttggacggatagtgcggtggatgcggttgggtgtagaatttcttttaggtttagagttaaaggcgatggtgtatatagattacgctagaatttcg

SEQ ID NO: 28890 - DNA, 591 bp, Zea Mays
gtgagtgggtatggagtattggcaagaccccttactcagttacttcagaagcaacatgggttcaaatggactgaagaagctcaaacagcatttgaagccctaaagaaggctatgtcctcaactcctgttttagctctacccagatttgaccttccttttgtggtggagacagatgcttgcgagactggaatgggtgcagtgctcatgcaacaagggaagccaatcgcttatatcagcaaggccttaggtgtgaagaacaggcacttgtccatctatgacaaggaatttttggctttgattctagctgtagagaagtggagaccctaccttcagagaagcccatttgttatcaaaacagatcacaagtcactcacatttctgggtgagcagcaattacaatcagaactgcaaaggaaggctatgtccaggttaatgggcctgcagtttcagattgtttataaaaagggaacagaaaacttagtggccgatgccctttccagagtggggtctatgatggagcttgctgttatttctgaagtccaaccagtgtggatccaggaaatcttgaattcctatgtaacagatgctgag

SEQ ID NO: 28891 - DNA, 375 bp, Zea Mays
gtccaatgcgtgttcgacggtttgctgcagggagggagcgtgaacagcaagcagccaggcgtgtggcagtggccaccgccatggtcagccaatccctggccattgccgccctctctgcccatggtcgcctggtccttttatgccagtagcgctgcatccttccctgcagtggcttccatttcttcctccccatccagcccccattcttccaccttgagcagtgaggagcagcttccatggatggtgccgccccatctcgtctcctctctgcagcagctggctatcgagtgcttccttgctgctgtcccatgggcgctatcccctcctctctggttttgcttgagcagggagcagccccttcatccttccatggtg

SEQ ID NO: 28892 - DNA, 542 bp, Zea Mays
gcaagggtgaccgttggggcgatggatcctcccatggtggccccataggcaatgacaacggtccgatgtggtcatctttctacaacccctggattgggaccatctccatgtggccagccctggccatgggttcttcttcgtcatgcccccacattcagcagtcctaatgacaccctcctacggtgtcccaccaccttcagcgcctcctctactctaaccgtcatcggctccgcgtctcttcccgctcttagggacccctgcctcagccccttggtcccccgttggctaggggctgggaccaggattccctcgttgcctcatttagcatgatggcgctgactccacccccacctctccaaattgggtggtggactctagcgcctcctaccacaccactcctgttgtcggcgcattatatcgctctcatcctcctcctcccttccatccttcttgtatcattgtggggaacaattccactctcccggtcacttcagtagatgattcggttcttccgcgaacgttctacctcaaagacattcttg

SEQ ID NO: 28893 - DNA, 856 bp, Zea Mays
ggacgagcggccaacattggcttggacttgcagccgcatgttttttttctttccttcactgcatcagccacatggccccatgtgtcaggtttctatttcccttcctggtgtttagttcgatcggcaatcggcacatgctggtttcgcaggtgtggctgccgcccttcgtcctcgtgccgtgccacactgactcttcgcctcttcgtcccgtcgccacgatatgccgctccagtctatgcgcaacggttcttctcctcccccacatcaaagttcattctgcagtgatttctcataatcatggcaagtgttaccaccattaatggccttcaatctccttcaaaccggctatatttctcccttccctctccagctataaaagttgaggtgcgctcacctccttctcctcgcccctgctcttttctccccgtcgcaatctttctctccctctcgctcctccatgcacgcgtgtgctccaccgttccctgctgctcaaccccgtcccaccgtgccatcctctgtgttcggcatgccgctactcgtctgatttctccttacttgcccgtccgcactccatggtttcgcagctgagcctcgacgccgtttctccgatctccttgcttgttgtgccacgtgcgtgcctgctctgctctactcagctcagtgctgccgtcaacgccgttctgcgctgctgctcaccgttgtctaatgttccccctgcgcagcctctaatcacgccatcgctcgtgtcactgctccattgctatcatacagtgcgccagcccctcctgtaactgcttcgccatcgttcttcgtctcatcagaacacgccatgcctcatcatcaaagcctcgctttg

SEQ ID NO: 28894 - DNA, 664 bp, Zea Mays
cgggggatcatcgcacctcgtggaaggtgtgctcctcattgattcgggtgaagttcaccggagcactatgtaatttctcgccgtagagcctaatctgctgcagatccgctcttccacgtggattgcccgcctgcgtgcatcatcctcgggaaggttccctcacccgcattcgctttcattttcgcatcgtgtagagttatttgggttagaggttggggcactaggactgtggactcgcctcgccagtgaagtcctccgccatggtagtcgtaccgtgccgccctcggggagctaggtggtgggcgatgtcgaagatgattcctgggccgtagatttcgtgtgtaacggccacgattagatggggataccccttcggttgtatggcactcagaccattgagatcgaatcgaagggtcaaatgtgggtcacgtttcataaaaccatagctgtcaatctcgcattgggcgtttccgattagcgcatgaacagacccccatcgcggcagtatgatttggccatcgatcggttagctggcggttaggatgtcatgagggccttgcaccgtagatcctccatccgaggactcgtatagcatactggtcttctaactgtgccaatctaatctaaaccatccgtgttcaatctggtggcccatatgcgacgg

SEQ ID NO: 28895 - DNA, 361 bp, Zea Mays
ggtgatttggtaactatttcatccatgttctatttgtttcttatatcactcgctgttgaagttgcatgtgctcattcatatcacagttactggaagatacagaattgcgatagtgttttcaaattgctcgattaatcatgatttgtcaatgattaatctacaaatcattccctaaatatcgattaggtgcaccggtttgattagttcgcctagccgagggatcaagagtctagtcattgattaatcgtgactaatctaacatgtctagtcgctcgactagccaacaaaccatcgagttggaccttcagcccatcaggactccaaggaccagaccatcctaggaccaatatatatccttgag

SEQ ID NO: 28896 - DNA, 538 bp, Zea Mays
cggcgcttaccgtgatgagaacaccccctgctacccgaccggcaccgtttgcaggagggccccggaatctccagatcgatcgccgccgtgggcgaaatagggtggccagaggaagggaacggacgaaagggaaagtatgatcgttgtccagaatatgcgaggaagagagagaagtgtggatttgcgcatgctgtagccagacctctaattatgcgataccctatacctacacgcatgctgttgggacaggtacagtagctcctcaatacgtaaaatggggatgcgagaccctttacgaatcctactagagaaagcctaacccagcatgatgccatgcataacccacccgccgctgtctcacgggcaccaaaacaccaccgcaatgcagccatcattgatgccctgcagtctcgcgcgcaccagccgatgttgtccgtgcaacgaaacgtcgtcgcaagcgtggctgtgtgcacgcccaccgaagcgctgctgcgggtcttcataaaaaatagactaaataaattattcacaaaaggtt

SEQ ID NO: 28897 - DNA, 406 bp, Zea Mays
ctactgtggcaaatcctctgaatcgggtacttcgggaggaagtactcagaggtatcgagctgttcctaagcctaggctggggctggtgtgtttctgttgcggtgatgcacatcgccgtgctgagtgtcagtggagtggcaggtgttctatttgcagtcaggaccacaaggatgtggtgtgtaggaggaatcccaatgggaagttcagatgggagctagtgacttcctcctctttgcagggcactgtcaacatgatgtcaagcgctgagcagcaattttcagttccactccctccgcagcagttctatgtgcctggggcttctcagttcatgctgatgcagggttttcctcagtatctggctgcacctactcctgcaccgactactcccatgtcgtctcagtttgga

SEQ ID NO: 28898 - DNA, 521 bp, Zea Mays
ggctgtttgaacggataggagggtggacgaggcgaagaacgattctgattaaaaggtcggattaccaacctggttcgcttctcaggtccctgattggacctgtcacctccaaatccctttgattttccctggcctatgttcttggcttctactgccaacgccgtgctgacagctttgctgtaagtaagatctaggcaggtggccattttccgttggagccggtcgttgagtcctctcatgaagcaattcttcttcaggtcagtgtttacttggtcaatagcatattgggataaatgatttaacttgttgagatactgcatgacattatctcccccttgctttagtcaaataaactcctcttgtttcatgtgaagcactccttctggaatgtagtgttcagggaatgctagcttaaattcatcccaagtgacctgatgtccggctggttgaattgctacaaaattcccccaccacgtactagtagggcctctcagttgttgggcagcaaataatggcttctg

SEQ ID NO: 28899 - DNA, 339 bp, Zea Mays
tgatgccttttgcagtgcgtgctagcttgatatggaggcgttttagtggcgcacaggaggagcatacaggtttggaccatgcatcttggacggcctctttaaatccctccatctttactcaaaagttttcgaaacggaaggaggggctacatgttctcgtcagctctccctgtaggagaagcggagtgtggtcagacatgagggacgggagggagtgcaggtagcaattggggaataacatctcccattcagaagtgcagaagattttgtcaatccttattagagttggactagcatggccattgctccaagtgtaacgacgaccattgaggcggattt

SEQ ID NO: 28900 - DNA, 449 bp, Zea Mays
ccagtccacaccatgtggaatggagtgtcactgctgctgggcacagattcaaagacacctgccaagtcgtcgcccgcaaggcattgaggaccctgtgtcagatctatgaagaagaagtggccgacagaccactcagattctttccgccctttcagagaaaccgtcccgtttggatggccaggatgcatgcattggaaggtcagcagttgcttaaggatgaccccacagtcgtgtacctcactgcatacctgctcaccctggatgcgcagtatgatttcttggctcggcaccaccatcagatgattgcccgagcagaagatatagagaagcgcaaccgtcagctccatgtggatctcaccacagctcaagcccgtgcaactgcattggaaagtcgtgaagtcattgctattgaagccctgaagcaagccaaggatgagcacgtccagaag

SEQ ID NO: 28901 - DNA, 312 bp, Zea Mays
ttagatccctggcgtactgtttagctttggcaatctgctctttcgacagctgcttccccgaagcatgtcgcacgataaagtccaactcagcaggtacttcgggagcaggaactttcttgggcgcattttcttcttccaaggtcaaaggaataatttctgaagcatatgcctcgataggagttgatggcccagcttcagcagtatctagtgtcatatcagcttcgctagatttctttgggatttcaccctttctatcaggagttgaagcaggggtttgtacttttgaagattccataatagcttctagtacgc

SEQ ID NO: 28902 - DNA, 497 bp, Zea Mays
ggaacctcaacaacctcctccaattttgtccagttcataaaggtaatcatgttctcattgaaaacaggcttgtacaaattgttcgaggctctgacccggaagtatgtgatgttgtagacgactccttcttttattagaggcttgaacttttgtatgactggtgggaatattgcagcatggataccgtttccctgcacaaagcagcgatggaggaaacaacaacataacaacaattaatctcataccagtaccagcttccctttaccaaatagataaccgtgcagatgttgtacctctttgtcaagcagcaccatatcacaatggagcaactttgcttcatcctgaggatcatagaaatcccataaacgagaaacacgagcgcatatggtcacagaagtgttcccacgctggagctccgggatcaacacgtctcccatctacaaggtaaaacaggaagaaaaaacataagagcaaggacatcggaacccatgcatgaa

SEQ ID NO: 28903 - DNA, 363 bp, Zea Mays
tgtgagattaacattgaccaggtaaatagtactgcccaaaccttcacgtagagcgagggcgatccgagcaaactcccaacgagccacaagacagatatgttagcacaaggccacttgctcggaaccgtgtccaaggttgtacctcacactcccgtgcggtaacccagttgatggggtggcccatgcccccctttgatcggaggtccaaccaaagggacgatacaagcttgagtaaggaaggactcaaagagatctctcaacacgagccgagcacccaagcgggaccgcttgccagaccagaccccatcgaaaggcggtcggatcttacttggataactcgttagcagctcggcagactcccac

SEQ ID NO: 28904 - DNA, 846 bp, Zea Mays
gggagatggagaaagcttacaggggaagtaaaaggtaggtagcccgaggctgtgtgacgtttcctttagaaacctccattgctggctccccatcctcttcctgcttcatggtttcacctgctgccttctccttcctcgattgccgcagctgctatgggaataccatctttctacaaatgggtcgtcagcaagtacccaagcatcatctcccctgtgaaggacgaaccagaggagtgccctgatggcatcatctacgacaacctctacctcgacatgaattgcatcatccattgctgcttccacccacaggaccagctaacgcatgcagacatagatgtatccacacacctcaatccatgcgaatctggacggtataaatgtatgtgttgactgactgacacaccgttgcaggtgcgccctccgacgacggccaatgaggtgttcgagtccatgttcgagtacatggaccgcttgttccgcatcgtcaggccaacaagtctgctgtacttggcagtaggttcgtgcatagattgttacacatcaaactgaactgaattccgtgtttggtttgaggaacaaattctcacctctcactttttttatttggtttgtgaaatggaatgaaatgagttgatccatcatcatttcatttcttatatactaataattagtaactaataatatgaggaatgagtttattctattaccgcggtgtacattaacaaccagcaacaagtgttaaggatgatgtttgttaccttcagttatttgagcaacttagttacacatgcatgcacttccctatctgttccatctgcagacggcgttgctccttttgccaaaatg

SEQ ID NO: 28905 - DNA, 328 bp, Zea Mays
attttttattatttctttatttcaaatatgtctgaaacatacaatactgttatttttggaaaccagttggaggatcagtagtgttgtccagtccttccctttagattttacgtgatatatcaatatgaaattgatgggcctaagaaattctgagaattcagagagagtgttgaattgttgccggacacatcactcaaccattgaattgttgtcgtgctgctagctcaaattaatacatcataaacatgccaatagtacgcttgtttttgtatctaaataaggcatgaactttttgtttgacaaggcaacattgccatcaataaacgat

SEQ ID NO: 28906 - DNA, 588 bp, Zea Mays
gccacatccaatctctgcaaatataatgacaaaaataagttagcaaagtcaggataaataaattgtactaacaaaattatagtatcatttttctcactcacttcccttgagacgatcagcaagattatccaacatctgtttctcggctcgagccgcttcccattcccttacatcctgtgctctcttctcatctgccgccttcaacctcctatactctgcacgcttcgggctgtcataaaaggcagatttcgcgtacctacgcatgtcgtgtatgcgatcgttaatgtacgaatcgacgagctgagatccacaacgcatcttctgtcccattagtctcttggactctattgtgcgcagcacctctcctttgtcgtcgtaactctcccaactgcatttcctcgtctcctacaaaataatagtaagtaccggtataacattacagctggtgcaaaacaataaataaataccaacctcatcgtaatcgaccatatgtccacaaaaatatccaacaccaagctcggaagaaactaatccatacttagtttcaataccatatttgcagagtactggatcaaacttcaactcttc

SEQ ID NO: 28907 - DNA, 292 bp, Zea Mays
cccagatggacacccagacataaagacgacagatcgacaggaggaaggaggacacatcgatgggacccaaagatcggagctctacctccaagccaagacttagttaggactccactttgtagcccttagctccacctcctccatcataagagacttgggagcctctcctccctctctcgcccacttgtaacccctactacgagcattgatcaacaatggtaccggtagcacaagcagccaatggctggatgtagggacatgatgtctaaatcagtataaatcttgcgcccac

SEQ ID NO: 28908 - DNA, 315 bp, Zea Mays
gtcatcctcaagcagctgcttcccttccaatgcacgcatcctagccatccaaactggacggtctctttgaaaggccggaaagaatctgagcggtgtgttggccacttcttcttcatagatctaacacagggccctcaatgccttgcgggcgacgacttggcaggtgtctttgaatctgtgcccagcaacagtgacactccattccacatggtgcggactggatccaatgtatacagtcacgacactcttctctgggccatgctcgacgaattcacggccatcatactctggctgactcctgattccgaggcaaac

SEQ ID NO: 28909 - DNA, 357 bp, Zea Mays
tgaacccaaacattttggaatttctgccgaggctacaataccagtccaggatttggctgaatggctgcacgaaagagagttgatgacgaaactggttcggttgcatcttacccgtgcgcaagagaggatgaaacgacaagctgacaagaaacgctcggaacgagtatttgaagtaggagattcaatttacctcaaattacagcctaacatccaatcttcagtggcgactcgttctaaccacaagttgtctttcaagttctttggtccgtatgacattctggagcgtattggtgctgtggcctatcgtctcaacttgccagcaaacagctgtgttcagcggttacccctaaatttctc

SEQ ID NO: 28910 - DNA, 342 bp, Zea Mays
gcaatttcgtttcagattgctttgttgagtttgtgtccgtgttcgagtcttgttgctggtttaggtcgtgtcgtcatcgtacttcaaccgctccgtcgctattatttgtttccgccgctatcccatccacctttcccagattacaagtcgagacaccacattactcgatttgccctcgctagccgccttgtgtgaactcttgccacgccagccctagattaggttgcaagccgcttgtgcttcgccttgcatcgcaacccctccttgtttcatcatctggcgcttacctattgcttacagccgctacggttcgtgccaatttgtgcatttgaaaaccataac

SEQ ID NO: 28911 - DNA, 386 bp, Zea Mays
tacaaaccttcaagctgttgtaggcgaggctatccgcaagttgatccttcgtcattgcagacatacatcatttcacggcaaacattgatttccttactatctggcagacagtaaaggaaatcatcttcgttgtctcctccgtataccaaagacccacgggggtatttcagctccttagcataatgtcgtgtttcggcaagttgctctgctgatagctgctttctcgaagcatgtcgaacaatatagttccaatcaccctgtgaaggtgcatcgggagtaggtgatgtgggcttttctggcagattttctttcactagctctactagcgtagcccccgaaggccctgcttcaacatgaacaggagaagcgcttgcagcggctacttc

SEQ ID NO: 28912 - DNA, 294 bp, Zea Mays
gttcacagatctactactggtaggtatcatctatactacgtacgcatgcagaggccgggctgggctgggctgtttgtatccggctgattggttgctcggttggccacatccagaaccgccagatgcattgaccgtcgatgagcacttgattggtaaactgcatgtcacggttcgaatttgtatacgcgggtgcagctcaggattaggtcaccgtgcattcggctgcatcagcgggaaagtgagatgcgcgcgttcgaaccgatgcaggccctcgtgagccaggaggctaggctg

SEQ ID NO: 28913 - DNA, 727 bp, Zea Mays
ctcgggtgggtagcgcgagctacaacccagcccccgagggtgctgccggtggtgatccggctccaatgggcgatgcaggctgcgacccagcccccgagggtgtccgagcgggttcccattctcatacctccatggatgtccacgtcgggtcttctcctccacattctgattgcatggcagcagcacgtgcttcaaatcaggaagtcgccttagagaccggcatacccaacgctagagttttgattcctgctggtgatgttgagttaatccccaatgatgctctttagattgcctcggctgatattccctcattgagtcaccaacaggtttctcatgatttggggcttccttcattcttctccaatcttcaggtaacttggtttttcctgatctggctgtacttcgggcgaaatattatctttgcactcacctgttttcaataccaggctttggttgacgagatggctgatcagctgagatcacagggtgcttctgtcccagaaagagctctctctctctgacgcattggaatccagtgctacttcagcggcgggtatctgagttggagatgacaaatgttggttagtgcctctgtttcctctttggctacttgattaatctgatttttgctgagtatccttcttcaaccatttcttgctagatatggttcggcggtactctgagctcgaggagaagtactcttaaggtcagatgtacctagctcgag

SEQ ID NO: 28914 - DNA, 323 bp, Zea Mays
atcttaaagactctctcttatcttaatagatccatcttatcttaaaagattctttcttaccttaatagatccatcttatctcgaaaaagattctaccctatcctactagatctaactaatctcaaaagattatgtcttattcttagagactcgttttgttctaacaagcatacttatcccaaccacttggcttatatcataaccttgtaacgaacatgatctatttcaaaataaatcaagtagatcttatctagtctaatctgattacacccatttaattctgatcccatctaatctgctcagatctaacctaatggacaaac

SEQ ID NO: 28915 - DNA, 504 bp, Zea Mays
aacaaatctatcgtgcatagctaccttaagatcttcccaagtcgtaggtgctctaccatccccaactagaccagtccaccagacaatagcaaaatctttaaattcattagtggcttgtctaacttgatgtcgttcaggtacaaggtgggtagcaaatttctgttatatcgtcatttcccaatcaagatatccctcagcatcataatgacccgaaaaagatggtatagaaaatttaatcttagcataagggtcgtcaggagcacgattgttattaccttgctggctgtgtggcataccttctgtgttttgatgaagacggcgatgtaggcgcaaatctctggtggccacttcatcataattaccttcttcatcaaacaccacatcatcgggaagacatggatgaggaggaggaggtggtggtggtggtgcttgttattgcgtctccaacacagcaagtctgtcgatgatctgggacaatcgtcgatccagcctctcgtaagtctt

SEQ ID NO: 28916 - DNA, 439 bp, Zea Mays
cgggatgattgcagcaacggtgctctacctcttctgctttggcgccatcgcaatctttctggcggaacgagcaagatcgaaatctgagggaagcagaggagtggttcgaagggaaaaagttaagttagggctcaaaaatcaaaaaaatcacgtcggcgcgagtacaaatggggtttcctgggttgggcactatttctgaagtgccaagtcactactcgggaaagcaaagctttaggcatcactcggcggttacctctaaaacgccggcaatatcaggcatcactcgacgcttacctctaaaacaccggcagtatcaggcatcactcgacggttacctccaaagcagcagaagacatcaattacttggagcaactaaaagttattcattaatatcaaaaggggttacacaaactcaaaagttgactcattatgagtcggc

SEQ ID NO: 28917 - DNA, 498 bp, Zea Mays
catggactgcttcagcaagtactgccacttcatcccattggtggacccgtacacgaccgagtccatggcgtaggcctttttctctgacatggtgcgcctccacgggattccacagtccatcgtgtctgatcgtgacccggtgttcacctcggcattctagcgcaagctcatgcgcctcatgggcccgaagttgcacatgtcgtcagccttccacccccagacggacggccagacagaggctgctaatcgcgtcatcatcatgtacctacgctacttcactagtgatccccctcgatagtggttgcgctggctgccgtgggtcgagtacatctacaatatggcataccagtcctcgctccacgaggtgccattctgagtggtctacggacgcgacccgccctccacccgctcctacgagcctagcaagactcatgtggcagttgtcgcctaggagatggaagctcgggcggttttcctcaccgatgtccgctaccgcct

SEQ ID NO: 28918 - DNA, 1052 bp, Zea Mays
ctcgcaagtaattgccttgcttaatacaagtttgacacctgccattttgaagaggccatgccacatgtggctagtgagattcggtcgcgatcgctggcgatggaggtaggaaagctgtgaagacggatgacaccctcgaagaaggcgcgagcgatcgagcatctgagtacaggtagttgagggcgatgaagtgtgcgtacttggagaagcggtcgacaacggtaagtatgatagacttcttgtggaccttgtggaggccctcaatgaagtccatcgagatattgactcacctaggacgacacgtcgaggggttgtaggaggctagctggctatagggtctctgccttgttgcactcagcactagcatgtgaggcaagtgggcatgtagtcctgaatgagcgtccggtcgtgggaatgtagaagtttgctcgtagccgcttgagtgtcctcatggtcggttgtatgggccaatgcaagtacctggtggtgtaggtcctcttgtgtcggcataatgatggcaagccatgaaagaggacgtcggtcacgtgccacaactcccaaagggttgcatcctagaactgctaacagagctggcctacctccgtgtcgtctgttgttgttgtgcaaatctcatcgaggaggtggaacaagggcctcaagatggcgtgtatagcctggcgatgtcggcgtcgtggtgcgagagggtgtttgttgtcttattgaggcgaccggggtgatactccatggtgaagtcaaagtcgaacaacttgttactaaactgatgctgggggactatggataatcgctgatccagaaggaagttgaggtttttgtgtttggtgtggatgaggaagcgacaaccctataagtacgaccgctagtatcggatggcctgcttgaggtggcgggcgacgaatggcttcctaaagaactccagggggtggttccctagttaaggattggatcgaagctgacacccgacgcgtcgcagttgacgatgatttgtcgatcgaagtctagcatccacgggactagtccaatgggcagggagt

SEQ ID NO: 28919 - DNA, 468 bp, Zea Mays
cctgaacacgaagttctattcctgcaagcaatcgaagaaacaagcaagaacaagatgtaggcaaaactgaatatcaatcactcacgagttgggctttactaggctgtccataggtagccattaagcacaactgaagtactggaagtttgcacaatggctaaaactatcaaagaaaaacccacccaaggagggggcataacccctagctaaatagggaggaggtggtgggcatccatccttcccacaagataggaaataggcgcccaatcagccgcacaatctcctacccacaaggcagggaataggcgcccaatcagccacacaatctcctgcccacaaggcagggaataggcgcccaatcagacacctccatgatctcattccttatttaggtggcgcaacaccttattgattatttctttccataactaaaagacggataggtggggcagcacctagactttattc

SEQ ID NO: 28920 - DNA, 275 bp, Zea Mays
ctttgcctcaatgcagactcctcattcatgccacatgtcgtctctagtttctgttagaactccattcgagttttgaggctcaaaccagaaactgtccgcctgttggttttaaggtcaaaccaccaaaccctctcgtgagtagcacatctgatactcccttcatgatctactcgtgtgtcacagtcagtcctcgactacctgatcaccaagttatccaatgttttcgcttgactttgtcaacctcatcttgacctggtcaatacagtctactcctc

SEQ ID NO: 28921 - DNA, 401 bp, Zea Mays
agttcatacgtcactttggggtaatctcccaacctctaacatccttgttgaagaaagggattatttttgtatggacaccagaccatgacgtggctttccaaaccttgaagcaagctcttgtcacggcgccagttttagctctacctgatttctctacaccctttatgatagagactgatgccagtgacactggaattggggctgtactcatgcagcgaggacatccgttggcatttctcagtaaaacattgggacccaagtccagaggattgtccacttacgagaaagaatacatggcgatcctgactgcagtccaacagtggcgcccatatctgcaacaaagtgaatttgttatcttaaatgaccataagagcttgtcccaactcaatgaacaacgcctc

SEQ ID NO: 28922 - DNA, 319 bp, Zea Mays
gcaaaatcagatctcagatcattgagcattgcatctatagcttcttgagaggaactagcaacaatgatgtcatctacataaacaagcataaaaatagtatcagatttggaagcctgaaaacccagtttcaccaacttttcactgagtcttgaataccaagcccttggtgcttgtttgagtccataaatggctttatcgagtttacaaacatgatttggtctcaacttatcttcaaatcccgacggttgtttcatgtaaacatcctcctctagaatgccatgaaggaacacattctgtacatctagctgcctcaatgacc

SEQ ID NO: 28923 - DNA, 322 bp, Zea Mays
ctgaagatgaacgtgaaactactgaaaggcaagatgcttttaccagcagaccatttggtgtccgccaaagcgatgaatttgatgatgaaactgctgcattgccctgcactgattgcataccacaagaaagggtatttgtttgcaacagatctaatccaataatgaagattggtagtttgtacaaggatatgaaagaattcagactggctatcaggcagtatgagattaataatgagtttgagttagggattgagtcaagctcacctttcagatatcgagcttattgcaaaggaggtgattgtccatggagaatcaatgcaag

SEQ ID NO: 28924 - DNA, 498 bp, Zea Mays
ggaccagcagggagagtgaagagacgctgcgtaccgttgattcccccaaccaacggcgccgatcagacctcgatgatgatttcggcctgcttgatctaagtcattggttatggtgtggatgggctggattaaaggtagcttaccattcgagagaatttgacccgagccagtaatcttagatcgtaaggctgggggtgttcaggacttcattgaacccgaatcgatggatcgtgatccgatgttggtcatggcataccgcttcagtgtgggtacgatctaatcctgaccctcggatctgatccaacggtcggggatcaacgcgtacccccctcagccaccactttgcaaaatagatcccgccttcccttaaaataaacccgccatccccgcacagtttgaaacaagttacagataggtcccttggaattgcaataatacccctggagtcttatttaagtgcaaaataaatattaaaaataacctaaaacttgtttaacc

SEQ ID NO: 28925 - DNA, 334 bp, Zea Mays
gtacagtacattagatccatttcatacattcgttcacacaaaatatgggaatcaaataaagaggactagatccgggtgcaaaggttgaagatggccaagaggccgactcctcattctcacagtcgatggcccgcagagagccgccaccgaggcatgacttacctcaccgaccatggaggccacaaccaccgacaatacccgaccaacggcggcacgcccacccattgcgacacgctagccggcgggagggtctagggggccgcttagaaggtcgtccatggtactgctgctggctggggtcagtcggatgatgagagcagtgaagagagaggaa

SEQ ID NO: 28926 - DNA, 417 bp, Zea Mays
gtgataacgggccacgtcggtgttttagaaataacgaccgagtgaagactggtaacgtcagcgttttagaaataacagctgagttatattgggccacgtcggccgttttggaaataacagccgagtgatgacttggcatgtcagcgttttagaaataacagctgagttgtattgggccacgtcggcgtttatggaaacaacggcctagtgatgactgggcactttttagaaatgacatctggcccgggaaaaccccatttgtactacgtcgtcgcatgcctctgcattctgagtcctagccctgcttttctgcatccagaccttctctgcttccttgtgatcttgcttctgctcagttcgctagcgagattgagatggcgcccaagcggaagaataagagttcatctaccgcgacta

SEQ ID NO: 28927 - DNA, 801 bp, Zea Mays
agaaattcgtagaggccgtcatgcgttctgaaagccgttttctccacatcacccggacgcatgcgaacttgatgatatcctgagcgcaaatccagcttggtgaaataccgagcaccgtgcagttcatcaagaagctcatcaaccattggaattggataagcatctttgacggtaatggcattcagcgcccgataatcaatacagaaacgccatgatccatctgccttcttcacaaggagaactggtgaagagaatgctgaggagctgtgctgaataatcccttggcttaacatggtggcacactgacgctctaattcatctttgtgggctgctggatagcggtatggccgcacagccaccggtgccgaacctggcagaaggttgatgcaatgatcgcgatggcgcggtggtggcatacctgaaggctcagcgaacaccgacgtgaattcctccaataaggctggaaaaaggtcatcagagctgcacacccgaactgatggtgcccgcgatccggctacgccgatccagcaaacacgatggtcgtgatgccagaacgacatggtgagtgcactgaaatcccagaggatgggtccaagagaggccaaccattctgtcccaaggaccacatcatatccggctagaggcagcgcgaaaaaatttgtggtggaggattcgccgtcaatggtgaaagggacatttcggtacacgcctggacaggggaccttctcaccatttgccaccgtgaccttcatgttgccgcgcggattcaattggagcgaggtgcggcctgctgcttccgaa

SEQ ID NO: 28928 - DNA, 444 bp, Zea Mays
cccgggccatgaccagtcatccgaacgtcagaccgaaggcacgccgagtggctgctatcgacatgaccgcacctctctaagtacgccgcccaaccacgctcccacaggctcgagggcgggactaacctatacataaagtaccttagcatcagagcttctacagtaacccgaataccaggtagtgcgcagcagatacaccataccgagtgtactcctacgcacgtcaacgagtgaaacaatctcgtgatgacgagcaaggccgcacgatgcacgactactccatacgactgacctgcggggcccaccacacactaccacaagaatgtcagcgaaagaccacgaggacgggacagtacgccatgatgcaagtacagctacacacgaccctacggacaacatcagaggaaccatgcttcccaagggccaccggccaggcccccccag

SEQ ID NO: 28929 - DNA, 335 bp, Zea Mays
tgaggcgctaccggtggaagctgaatctagaaaagtgtgtctttggagtgccgaccagaaagctactaggattcattgtcaacaaccgaggaattgaagcgaatccggagaagattgaggccatcatgagaatggaagcgccatggtcgtagaaaaaggtgcaaaggcttactggatgcatggcagctctcagcaggttcatatcaaggctaggcgagaaaggaataccattatacaaattgctcaagaaggtggacaagtttcattggacaacagaggcataggaggccctagagccactgaagaagttcttgaccacaccgctagtactcaag

SEQ ID NO: 28930 - DNA, 330 bp, Zea Mays
tccagaaagactgagtacaagggaggtctagagatcacaatgaaccaaatcaaaagcctgcttagcctgagaagaagtattaagggagacgagtatgtcggcctagctgacaagcatggcatagaccctcaaaatgtcccctactacgaggattgtctaaactgctggtgagtttggtcatgacatcgggtcctcgatggccgagacgacgatgccaagtggtggaggaagaggtggagagcaacacgggtgcaggagacgcgccagtggagaaaggctggagcgtgtagaggggccccgagctgtcgcagcgggcgagaggggtcctag

SEQ ID NO: 28931 - DNA, 336 bp, Zea Mays
ttggcgctcctgttgcatactcggcctggaatttgcctccctcctaggcttttactagtttcgtgtcaaatcctcctgctggtgatagcggtttgggtcttagagtgcgaccctctcccgaagaagttagtactttggttgcctcgctcggagaaattcctgacgatgagaggcaggttcattttgaggtgcctttgaatccaagtgatgcagagataagtgccatgctggatatgttagttgaggattcttctgatgccgctcctgctgaaacattggtggtggcgcccatccctgaggctgacaaagttttggacgctcagaggtctgtcaatg

SEQ ID NO: 28932 - DNA, 477 bp, Zea Mays
cccttgtgaggtatctattgtacgttagcttcacgcttggagcattgacttcaacatacgttgctctagcgccgactccactaactccccctcccacacattgggaggtaccggctcacctcgcgcggatcgaggggtgctggtttcaccattagcccttctatgggtcaggagatgtcgacttcactagatccccttgcaggttaggagactctagcccctccggcgggtcgggagacatcagctccccctgcggtcgggagacaccagcttcatcggctccccctcctacgggttgggagatgtcaactccaccaatagccagcgtcaaacccagcccttcgatgacatccacaagcctctgagacgctgcctcagcaaggtcatcaccctccaagaggatgtagccctcgctcactcgctcgagatcagtctcgtagtgagaggcgacaatggctagtgctcgtttcactcccg

SEQ ID NO: 28933 - DNA, 341 bp, Zea Mays
ggtaactccagcgaggaatcccagccgtggggaggggcaatcgagtgcgctaaggctcagactcgctctgacgagggtagggaagtgctatgggccaacataggggcacgggacggggccaattggccagtcaccgtgcggggcacggcgaaccggtgcagatgaactccagcgagggaaaattagctaagatcaggtgtgaataaggaaaaccaagcatgggaacgagtttctcacctcggggtggagctcggagtggcttggctcagcttctgatgggctggatggccgacactgtggggggtagatatcccccggggtccactcgggggcgaaaactc

SEQ ID NO: 28934 - DNA, 411 bp, Zea Mays
gtgcttccattctcatgatggcctccattttttctgggttggcttcaattccttggtggctgacaatgaatccaagtaacttccctaccggtactccgaaaacacacttttctggattgagcttccaccggtatcgcctcaagctgttgaagaccagctgcaaatcttcaatgaagttttctgttttgatcaccacatcatcgacataggcttacacccgcttgccccagtgatgggctaagcatgtttgaatggctctctggtaagttgctcctgcgttcttgaggccgaacgacatggaggtatagcagaaagctccaaatggggtgatgaatgccgttttctcctcatcttcttttgccaagctgatctgatgatatccagaataacagtctaggaaggacaacatag

SEQ ID NO: 28935 - DNA, 569 bp, Zea Mays
cacgattggagcagatggtgagggatatttttatccggctggtcagacgacacagaggttggctgtagagcagcaaaagaggaagaatgacgaggagaagaagcgagctcgcgagaaaaaggtggcttgcaatgctctcgagaggcgccaccgagcgcgagagagggagggggtgccactggagccattcccaagcacgatctccgccgccgccgacgatgatgacgacgatgaggggatggagatccggcttggcttcagtcccaacgttaggctctggtccgaaccatcctcaatgggtctgtacgttggtccggacgcgccggtgctcgggctcgagatgttagcacctttgcctgagatgcggacgcctgttgtgccggagtctatccccacagtcgaggaggaggaggttgtggagcggcctaccgacccactcccagcgccggcctcagggaccaacgacatgaggagcatggggccattgaggctaggcctgtctcggcccgagtaagttatcgtgagatatctgaaacttggtctttttccttgagtttttttgatgaatt

SEQ ID NO: 28936 - DNA, 335 bp, Zea Mays
tccagaccgtaggttagtgcactgtggcgcctgggcacttcacaccagcgatgttcgccgctgcggcatatgctctactgccaccggccctgctcaaatcccagcacctccaacgctaaacccaccattcacatgttcgccctgacctccacaccacgtagcacgttttggatcatagtctcgtgcttggcaggggaaacttgggtgctcggatctgcgcggctgtggttggagcatggcgccgtcgcccagctcgggggagggaagaagataacgctgtggccatcgatctgatattctacggtcgagattataccctagatactgattcgacc

SEQ ID NO: 28937 - DNA, 271 bp, Zea Mays
gactattgcacccattgaagataccccagtggaaatgggaagaaattggtatggatttcattgttggactaccccgcactccggcaggatatgactctatttgggtaattgtggacatattgacaaaagtgtctcatttcataccggtgaggactaattacacgggagttaagctagcagaattgtatatgactcggatagtttgtctacatggagtgcctaagaagatcgtatctgaccgaggatcacagtttacttctcggttttggaa

SEQ ID NO: 28938 - DNA, 344 bp, Zea Mays
aatccgaagtctatcgcgaagactatccgcgcagaagtcgcctaagggtgcagccggactaagcacaacaagtgcgcaaaaatccgaaggctatcgcgaagactatccgcgcagaagtcgccgaaaggtgcagccggactaagcacaagcgcgcaaaaatccgaagcctatcgcaaagacttcgcgcaagagccgcctaagggcgcagccgacccagtacaacaaaagcagaaacgacaccaagaccaattataatcatgctggcacagcataaccaatcacaccagacaaagtacacagccctcgcaggcacaggcacgcgagggcacacaactccattttac

SEQ ID NO: 28939 - DNA, 443 bp, Zea Mays
tggtctgtagcaaagtagtattatgtctgttgggtttgattatttacagtttgcaatttatcagcacacatgatgctagtaatagtagtattctggtaatatggaattatttcatctgtttcagtgaccgctgcactgtaccccattaatttatgcatgttcccttatgaaggacttatgttttaattcatgccgtcatggagttccaagtgctgcttaacatcaactagaattatccacatatgatagcttgttatgtttacatgttctttgtcgttgaacgcattatgtttacacgttatgtttaatggcatagatactgattccaatttgaaggactcaaggattattatattttcccattaccgagaaagtgtcaagtaagaatcaaacctggcaacttggtctttatttctactaagtatatttttcatacatttctg

SEQ ID NO: 28940 - DNA, 484 bp, Zea Mays
ctaaagcaaagatataggaaactatccatgaacttagtaggaacaaatacatctggtgccggtatcgtaagccaccgaagattggagtagggatattcgacccgaactaatataactcttgtgtccgcctcgcataccatccaggcctaaagcgtatcacaaatttacttggcgatgcttactcgaaacaacgacacttgtctattagatccaccattaatgactgagtgtaattccacctggggacaacacgtccaattgtgtgaaaacatagggattctttagaaaatagtttgagaagacgtgggattgcacttggccatagatggtggatcttatggacaagttttaatgttagcatgttagaccctaatcgtttttacactagatatgttgctgttagagaatctgctacatatggaagggcctgagcctggcaatcctgtgccggccggccactgtaattatagatagagggaattag

SEQ ID NO: 28941 - DNA, 550 bp, Zea Mays
gagctgtcatcgttgcgcgccacgtgcttatgcgctagcccttaccgtggtgactcactgggtgcatgtccggtgatcaccggaataactgccacggtgaaagccatttattccacgcacagagctcgtctctcctccgaccgccagcactgctcggccgaattcgtcaccgccgctcgctacgtctataaattgaccccgccgcgagctccgtaaggtagttaagcgtccagccaccaagaattagcctcaatcgttcacctgggtgcgcgaatttggaacttcccccaaatccgcgcaagaacaccgtaggaaagacctcgccgcggccagccccctttccggtcagtccaaccctccctctccctcgtttaagcattctcacatgtctacgatgcttgttgaaccgcccaattggactaagggtccactgaccgtcgggaacgcatggatccttggttcatccgcgcgctcaccgtggccagaccgcagtagttcacgatttgtgcaattaacttgggggaattactcggggtagcttggatttggt

SEQ ID NO: 28942 - DNA, 362 bp, Zea Mays
cgatggaaggggatggcggggagcgtggcgaggatggcgtgggaggtctcgtgccgcccagatcgacggagaaccgggtggatcccctcgggcaccgatggaaggggatggcggggagcatggcgaggatggcgggacatgagcacaacacaggggcgatgatggcggggcgtcgacggagattttcctaggattgcgctaggggttcaccgcgaggatttgttggcgaggcgtcggcaaaagtgcgtcgtgcacaaggatttgggggcgaggcgggtttgggggaatgatgagcaaaagcacgaggggaggacaggcgcggggcataatcgtggtgcacgtgtggacgactataataggat

SEQ ID NO: 28943 - DNA, 454 bp, Zea Mays
ctggtgcctgatgtgatggcggactgtgtagtagcttcgcgcctgctgacttcccgtagagagccgaggccaatggatcgtccaaacgcctgagctcccgaggcagagtccgcccacaccgtagtggttgtaacagcgacgggatgtgggccaagggccgcttatggggtatgtcatcgtcctggcgcgcgatgacgtcgatattctctgcagcatccattgagataagagcctttgtttagttgatgaagaagtctttccgaggcgctagtcgagccatctctcgacgtgcgctacagtcaggcgaaatgaccgcctgtggaccccgtggcgtagtcgttggccgaggccgagctcgggcgaggcggagagcttgtccgaggtctgagcttgggtcaggcgaggcggagtactcgaagactcgtctgctcggcttgtcgtatttaggagtccc

SEQ ID NO: 28944 - DNA, 1085 bp, Zea Mays
ctggcgggtggctgtgcctgacaagagactgactttccctgctggtcggtgaggaggactgtcttgtctgcgcaactgatgatgcctttgtgtttagttagccaatccatccctaggatcacatcaattcctttggatggcaagacggttaagtctaccaggaatactaccctacttaaaaggattctgacttgggagcatttgagctgacatagaaggtcggaccctggggttcgggtgaccaagggaatctctagaggagtagagggaatgccatatttttccacaaagctagtggctatgaaggagtgggatgctccagaatcgaaaagtatggtagcaggagtaaattcaataaggaactcatcgagtactactcccggagcctgctaagcttcctgggcatcgacgtgatttactcgtgcccttccttggtacggagccttgttctgctggctgacggcggagggcgccttgggtgcggatgccgaggtattcttggggccattcaccgagttggagtaggcgggtcctggtggcttcagctgtggacagttgttcttgaagtgactgggatcaccgcagtgccaacatgcatttgccgggggttggttgcttgccaatgagggggaatggaaagagctctgactctgctggctgagtcgtgacggagtgggaccagctggtctactgaagtttggccccttgggtggaaacccaaatgatcgagtcttctgctaccggtcctgctactgtgcccagagaacctggaacttccttttgagatgccctttttcttcctcctttgccctttcaacttgcatggccttgttggaaaggtgagagaaattgaggaagtcttggcttgccaggattgtcttgagttctggcctgagtcccttcaggaaatgggccatcttcttgccctcggtactgacatcatctggcgcgtagcgggctaactctgtgaacttgtgcacatattcgctgacagatcttccatcttgagtcaattctcggaactcgtcctccttaagctgtacaagtccttggggcacatggtgctcccggaaagctgcttcaaa

SEQ ID NO: 28945 - DNA, 380 bp, Zea Mays
cgcatgacgaaatcaaacaagaccataaaaactagtgttgcatagaattcaagtttatatcaatacacgatagaagtttcatattaatactagattgttagggcccacctgtcgggcctgagctcccttgtatgtgcctcgcttggcctataaaagggaggcacatgcgttgcaaggggacaagctcttacaaactctctcgaactcagacatcctcagcaatacaacccacaagtggacgtagggtattacgctccagcggctcgaaccactctaaacccttgtgttcttgtgttcttgcatctccacaggtaaatcctaggtagcccctttgttcttagtattagggggtgcattccgcacacccggctggagtttac

SEQ ID NO: 28946 - DNA, 283 bp, Zea Mays
aagggtgcagccggaatagcacaataagtgcgcaaaatcgtgcatcaatcgaagtctttcatttaaagacactccgcgcaaaagtcgcccatgggtgcagccggatcaacgaaggcgtgcagccacatcatacaaattacagttacatacactcagcgagggcatcatatactacagtggctcaaccttcgggatgatacccatctccctgtaattgaacagcattatcctcaattcctcaccctcaaaaagatttcgcagctccccttcacctatgctcgcc

SEQ ID NO: 28947 - DNA, 352 bp, Zea Mays
aatggacctgctgttcgtcattaggaatctccccaagcgaagcaaccaaagcactaacttcttcagcagagggtcgcactctaagacccaaactgccatcagaaactggtggattcgacacgaaaagggtgaaggctttgggaggaggcaagttccaggccgagtacgccactggagcaccaacatttgacaccttgcccctgaggatcatttcaagtcggctcaccaagtctgcagaaggaattctcctgttggtaacccgagttgagtcggctagcccccgatacagataagctggataggctctgtctttcagtggctgaatattcttgaaaacaaagtcagtaaccac

SEQ ID NO: 28948 - DNA, 499 bp, Zea Mays
gccctatcctggtgggataccttcagcgttgccgtcagagatgctacctgggcagaatttgaagccgccttccgagaacatcatgtgccccaagggatcgttcaactcaaggaagatgaatttcgggaattaactcaaggaggaagatctgtcagtgagtacgtacacaaattcacagaattggcttgttatgcacctgacgatgtcagcacagaagccaagaagatggcccatttcttgaaggggctaagaccagaactcaagactatccttgccagccaagatttcctcagcttctcgcacctctcaagcaaggccatacaagtggaaagggcaagggaagaagaaaaaggtcacctcaagagaaaattccaagtcctccaagctcagcagcaggaaaggcaccagagaatttgatcctttgggtttccacccaagggaccaagcttcaacaagccagctggacccactccgtcacgtttcagtcagcagggtcaaa

SEQ ID NO: 28949 - DNA, 372 bp, Zea Mays
acagatgttcattcacatccacatacaagtctcattcacaaaagtacacaaaacacaatcttgtccacatataattggtcatacactcatacatgtccactcttaaattttaacacacaacacataagtcttaaaacacgattgttcattaacattcacatacaagtctcaaccacacaaatatacaatacatagtcatgaccacacataaatgatcatacatgttcactaaagttttatccacatagtatgtaagtcttaaacacacgatacataaactagaaatcatgtggcatgtcgtctggatcacttgatatatcttctatgacatctaaaaccctaatctctaaaccctaacgggtatagttcttg

SEQ ID NO: 28950 - DNA, 325 bp, Zea Mays
gaaaattttggttgctataattttgcgtatcgcaaagatatgaaggctccggtccttagttatcgtaccaagtggccaaccggctcgaagagtgaatggttttatttcaaggccgatgagaagaagagagagaagctgatgcaaatggttatgtgtccgatgactctaagcttcaaactgactaggcccctgtgccgcatgacgtcggggtcaccatgccaacaagctatcgcagaattcagggtggtggctgaacagatcagcactagagatgtagtttaagaatatttggctaacagaacgtctccgaccttaagtgaattta

SEQ ID NO: 28951 - DNA, 307 bp, Zea Mays
catttggcgcccaccgttcgtgctacgaacaaaccacccgcgatggcacccaagagagctagctcgaaggcagccccatccgttgatgaagcagcaaaggcagtgctgctagccgagaaaaagggcaaggcccttgcagacaccacccaccaagaagcccgtgaagacgacgccgtcagcaagagacaacgcaacgatcaaccaattcccgaaggcagcctccgcacctgcagctccagaggacagccacaggaaccacccctaggcttcgctccactagagggcaaggacgccacagaggacggtg

SEQ ID NO: 28952 - DNA, 354 bp, Zea Mays
cggttatagacatcagttacctgattaaactgaacaatccaacattcaacctagtcggcccaatgcaccggcaccgaacagacggtaaacggtaaccctagattctcaacccaatccactgtctagtctctagccccaaggagtggcggcgagccagtgacgcaccgcactaccaagtcgtacatcacgccggcacccggcaagctacagactgttgtccgctagggcgctagatgtcgtcattcaccgaaggttgtccctccctcgttgtcgctggctcactgcatctgcagctcgtgacgcgccgacgcctcccgtgaacttcaacgaccgttggtcacctcgtctgtttcc

SEQ ID NO: 28953 - DNA, 495 bp, Zea Mays
gacatgttagtttagcgaaaacagagggtcttatatgcataactgtcgcggccgaaggggtacgagtgtttttcggctgttggatctcagtcagatggcacagattagatcgctacacgctacaaagcggtttggaactgggccatcggatcaacgttcaacggttaagatttaaaatacgcccgatccgatcctgcccttacgtcgacgatcctatggttagcacgagatcaagccgaggcggtgcaatctccctaatctacaccgtccatcccaaatcagacggtccgaggccatctccccaaacgatcccgacggcggcggcaccaaccccttgcacgacggcgccctggactggaaatccaatccgcgccttgaggtggccattttttaattcggcctagctacacgatgccccatatctgacgaatgcagtggaaggtcaagtacctcacgatttgatacagaagaacccgaccacatcaagcggcagac

SEQ ID NO: 28954 - DNA, 464 bp, Zea Mays
ccggccccgttatattgagccggctgtggtgcccgagtttggcgggaagacttcttcagctgttgatccaaaggagccaattcctcctacgcagaaggctgaagaaccggctaccaagccgaaggcaccctcagccgagcaagctgaggcaaagactggtaaagataaggccaaagagccaaagactgaaggaacaaaaatgttagaagttttaaacccctcgacggaagtaacagtgccgaagatacaaaaaggtcttgcgaccactcccaaaagaagaaggatggcaagtgtactagatgtgctagaaacagtaaaggcttcaagccctactcgagggaaaattgccaaggcttcaaaaatgcaaatcgaagctaaaacaaaactgaccgaagtcgaagctgcaatgagccaggctagtgccgaagctgggccttcagagcctgctaagaaaaaaccctcgg

SEQ ID NO: 28955 - DNA, 736 bp, Zea Mays
caggaacgcctttgtggggacagcactgattgatgcctactcgctttgtggggccgtctgtcatgcgaggtgcgtgttcgacgggatcgtcgggaaggatgctgtcacttggacagctatggtttcttgctactctgagaatgacattccagagtatgcacttaatactttctccaaaatgaggatgacaggttttaagcctaatccttttgtgcttaccagtgcgctcaaggccgcagtttgcctgtcatctgccttgctaggcaagggcatccatggttgctcagtcaaaacactctatgatactgaacctcatgttggtggtgccttgcttgacatgtatgccaaatgtggagacattgaggatgcccacgccatttttgagatgattccccatgatgatgtcatactctggagctttctgatctcccgttatgctcagagctgtcagaatgaacaggcatttgagatgttcctcagaatgatgcggtctttcgttgtgcctaacgagtttagtttgtccggtgttctccaggcttgtgctaatattgcctttttggagctgggcgagcaaattcataaccttgctataaagttaggctatgagtctgaattatttgttggcaatgcactcatggatatgtatgcgaaatgcagaaatatggaaaattcgcttgagatcttctcgtcattacaggatgccaatgaggtgagctggaacacaattattgttggc

SEQ ID NO: 28956 - DNA, 377 bp, Zea Mays
tcttagcaaactcttatatatgtcgttccagatatgttttagatggacatatttatatatgatagttatgcactttatcttgtgttctggtttttatatcttcttcagtgacgtacttcaatgcattggatgttttattctgttatgtacgttcgtcagttctgctctggtgtgattatgcatataactgaactggtttatgtcttttgatacacttatttactgtatgcgcttgtttatccagtgccaatgcgctgcctttctatgttcagttatgtacaatattttcagttcttctctgtattgattatgcaaaaatctgatacggtttatgcatataactgaactggtttacgtccttttatatacttatttac

SEQ ID NO: 28957 - DNA, 451 bp, Zea Mays
gttatagagctactatagagaaacaactttgctgtagaacttggtatgagttgccataaagatatgggagaaaatccagcccaaagattgactgtcaggtgcactgaaggagtatcccatggtacagtaaccgcctggatcagtttcagtgatcctcaccgccgacgaccgattcttcgccgtgattcgtgtcaccggcaactggattcgtgcctggagttgatggatagcgtcgcagggtaaaagatcatcgccgccggtgagctggaagccactccagctagccgcggtacctctccccttgctcaccgccctcggataaggattctcaccgccgttaagccgtcgtcgttgtccgccgcgtgtctctagcctgtctaccgcatcaccgtgactcactcttgctccccgttgatcgccggagcaattgccacggcgcaggacaccaatc

SEQ ID NO: 28958 - DNA, 296 bp, Zea Mays
cttcctatgtttaccattcgcgaccagatggaaatatttagtgttcgcatccccttccagcaaacctttagtttttgctctctggtaccacttaacctcctcttctcgtaacatggccgcgagcctattacgaagaaaactgcgcatgtctacttcttgtgtagaaagaagacatgtttcagctttcttatcaagggtgtcaagtttttggagaatttctttcttttccttcttatttgatccactcgtgttttttgcccatcctctcaagtattgtcttaacttccttatttttc

SEQ ID NO: 28959 - DNA, 506 bp, Zea Mays
gtgagcccgcagtccaaattggtggttcggcaagcatcgtagacatgtgagaaagcttaaacgagggagagggagggttggactgaccgggaagggagctggccgcgttgaggtcggtttcgggtggcggaaactcgaattggggggaatgagcgattctccgactatgggggctaattggaagcgggagtggtgggctatggcttcggtatgacctagcgcagctggctggggggctcaatttataggcagagcaagcggtggccgcgaattttggacgagacacacgacggtcggtagtgaggaagaacggtggtgcagtgaacacgtgttccaccgcccgtggcagtaactccggtggtcgacggggagtttagagggggtcacggcaatgtgatggcgcggttaggacacgcggtggccaacgacgatggcacgacgacggtgagcactttacccgcgggcggtgagccaggggagatgaactacggctagccggagtggct

SEQ ID NO: 28960 - DNA, 274 bp, Zea Mays
gaggttggttagtgctcgatctgggaagatttcatgacaagcttaaccctcgttgcccatgagggctaccaagcacctcgtcgtcaccgctgccttcctcctcgctgtcgatgtcgctgccatccctttgctcgatggtggtggggcgtcctgtccatgctcctcccagcaggtggccaggtgctggacctcagagtgatagcgtgggagcagaggcttccaccgtgacgaccaatgatcctcctatacgagcatggtggctacatcacctacg

SEQ ID NO: 28961 - DNA, 319 bp, Zea Mays
caaaattccgtggtacagtgtcaatagattaaattagtttttttaccaatctgcatcctataatgttgtttaatgttaaaatgggttttctaattattgattctgatttagcattttcctttcaggtatacctggttgtgcaaagtcagctctgtgtaaggaaatattgaacacacctggtggccttggagatgatcgcccttttcatagcttgatgggggatcttattaaaggtacagagcatttgggacgttatctagtgttatatggtcgctttgtttattgcagtaaaacatggcttcagttagtgatggacagt

SEQ ID NO: 28962 - DNA, 410 bp, Zea Mays
caagcaaaagttgcataagggcgcaactagatcagcacaacaagtgcgtgacaacacctatgggtgcgaagtcgtccccgagacacatagttctatccacacaaaagttgcctaagggtgcagctggattcacacaacagacgcatcacaaaaaggcgaagtcatcgcctagacagaagataataccctaccaacagtcgcctgacgttgtagccgtatcaatataaatgtattaacgacacccaagcgcgcgaagacatctacatttgcaacttagcgcatatacatgcaccacaatggaagacacatcatatttcaattacaagatgcgcactgcgcatgataaaatagtccatatacatgtccccacagccatcctttggcgaagggaggcgagggcagcgttttcg

SEQ ID NO: 28963 - DNA, 487 bp, Zea Mays
tgcccagtggcatactcggcctggaacctgcctccttccaaggccttcactcattttgtgtcgaatccacctgtcgctgatggcggtttgggccttagagtgcgaccctctgccgaagaagttagcgctttggttgcctcgctcggagaaattcctgatgatgaacggcaggtccactttgaggtgcctttggatcctagtgatgcagagataagtgctatgcttgatatgctggccgaggactcttctgatgctgctcctgctgggacattggtggtggcgcctctcccggaagctggtacaaccttggatattcagagacctgtcagtgttcgcccgaaacgcccttgccgagccaatcaacctgattctcctgctgatgagtagaaaaagaaaaagagacatcttcggcgagtatctagtttggatcgagacattggtccttcggttcctgctgcggaggaagtacctgtgcctgaatttactg

SEQ ID NO: 28964 - DNA, 304 bp, Zea Mays
attggactccacagcaaagtacatgggccgtagacaaacctagtttggagaggtgacatttctatatattaaacgcgagcgcaaagacgctcagccaagcatccacgtcgtctctatttttcgtagccacatgatggcctttcaacggtagccaaaggttcaaacttctccatggatggccgatttctatatattaaacgcgagcgcaaagacgctcagccaagcatccacgttgtctctatttttcgtagccacacgatggcctttcaacggtagccaaaggttcaaacttctccatggatgg

SEQ ID NO: 28965 - DNA, 575 bp, Zea Mays
gtttgatgaacccaacgacgactggctgaagtgtatcgaagctacaagtgatgaattgcttggagcttattccaaggccgaagataatgctttatccgtagccttcggaagacgggggaagaatagactgaacatggtttttgatgccattggcttcatataccccgactacctctatccgctgcggggacagggaaaaagatgaaagctgctacttcggctaccctagttgagcctatgccgaagagcaaaaaggtgaaggttcttacccaccggccgcgttacattgaaccggctgtggtgccagagtttggcgcagggtcctctttagcagccaaaacaatacaaactgtttcgactgcacatggcgctgaagaaccggcgataatgccgaaggtgcttacagtcaagctggttgaaacgaaggttgataaggctgaagagctaaaaattgaagaaataacgaagatgccagagattttgagccctctaacagagacaacagtaccgaaggtacaaatgggttctgtcgtaactcctaagaggagaaggatggcaaatgtgttggatgttgt

SEQ ID NO: 28966 - DNA, 350 bp, Zea Mays
ggcggcccaggtccagggaaaacgcgcctgcgcccgcgcgcgctggtggctttgcaaaaacatcctcggggttctagctaactagaaacgtgttattttactatttctatgtgtcgctgacagcttgcagaaatgtcccccggtttctaattcttcacagaggaaggtcctcgacggcgttcgcgcacagccgagctccggcgagcacgtagaccggccagaggaggccaagacgggtgctcagcttcggcctaacccaaattcactacctggagaacgtttcccctaacttaattgcacgaatggtgatctattctcttcttcccacgagaacagcggagactacggac

SEQ ID NO: 28967 - DNA, 467 bp, Zea Mays
atcaactggatagcacttggagatcatcgccgtggataactccggccagtaaagtattccggccaccgtacaagcgttcaccgcggcggaattggataagtacaccgatgaccgccgcttctcggccttgcaccgcgtgtccatgcacttccaccgcatcgccgtgacctcctctcgctccccgttgatcgccggagtaattgccatggcatcagacacgaattcactgcgccagtgaacttcccctttctctgaccgccgcgcgtctcgcccaaattcatggccaccgctcactaagggtataaattgaccccgccgcgagcttcgtaaggcagtgaagtatccagccaccgctaattagccacgatcgttcgtcagagctcgagaatttcttgtttcccccaaactggtctccgccaccgcgaaaaacagctcaaccgcggccagcccaactcaggttagttcta

SEQ ID NO: 28968 - DNA, 784 bp, Zea Mays
gttatttcgcgctctagaactatcatacacaattaatcaacgcattcaccacaatcatcaaatccggcatacatatatatcgatgcgctcttcacatagtaatttgcattttaacttgggcatcacatgaacactactaatttttacctgcgaccgtaaccatacacatttagactacaacaagcaaatcatcgtgattacgagcttaaccaacccatctaacacttcggctaactagagcaacgacatagcccgctaaataacatacacgtcggcttgcctattattatcactatctaaggcacaacatacaccacaacatttttataaacatacatattcacatgtatattcacatatcgaccaaatcatacgaaccgtaaaccactaatctctaactcgaaaccatcatgcgcttacttcccaattcatgaacacataacacgtattgacccgactcaagatatagaggaagcgataactactttggcatgtcaccacctcactatataagccaaaacaatttctaccatcgactaagagttctaagtattaaacacattattactttccacgcacaaataaacctcaacgtaacactagtggcaccgatggatttttactaaactcatcatgcgcataacctcgtctcgtatgcaaccatatggtggcgtgcactcgagacacttcgatcaacgtggcacgaccactaatatgaactccgacactcacgtcttaataacacatcctccacgcaaactagcattttctaaactactcgtca

SEQ ID NO: 28969 - DNA, 365 bp, Zea Mays
gaagcatacaggttctctgatatgaccaagggcttcgaaggaagacttcatcccagttatgtcagatccatccataactccaatgccaacgaagaacgggccaataatgctcagagcaaccatcatagctcacagccttcgagcatgcagtagaccccctacagaccatcagcttcaagaggcagaggaggaagaagcttcagtggaggaagatttggtaatcaaccctggaagttgtattgcctcttctgtggagaggataatggccacacaacaaggacatgccaggtcacaatccagaagcaaaagcaaattgctgaagccaaggcgcgtcagaaccagccgaagcaagtcctccatactgc

SEQ ID NO: 28970 - DNA, 408 bp, Zea Mays
ccggggatgaaatggacgaactcccaggattctcatctgacggtcacacgctccacatgaagttgcttcgcctcagcacacccttcgtgatggtgtcacgtgccgcctctgattcctttcgaaaccgcatcgccgagttttgaggcccaaacttagcaaaaccagcagctcggggtttttgaggctcaaccatcgaaaccgccgtgagtagcgcaccacatgtgcgtcctccatgtcctgaaagcgtgtcccgccaatcctcgaccatgctgacgacacgatctgctctgccacgtccttgttgtcccaggtgtcagccactacggctagtcacccggcttctctggtccctcggtcaagtccaagcactcgtccttcgccgctccaagtccatcgacatgaacccac

SEQ ID NO: 28971 - DNA, 383 bp, Zea Mays
ttcatatatagcttatttatccggaacaaaagcatgacacttgttataagttaggcggccacacaaatacttaaactgtagagaaaagaacaaccatacacttgagtgcacctgttagagtgttaggaagtactgatgtactcctgttacgaaaaaaaggatgttcgttccaattcggtgtgaaattaaaattacatgcctaagcacgttttgcatttggacaacgacagctagcacaacgagatgagctctccagcgaatagtagcacaggatgcatggcgccctagtagtactgtcctgcagcctaccggccagttgcgcgtgcatggtgcatgcatggacttctccgtcgccgttcaactccggacagtttgtataccaa

SEQ ID NO: 28972 - DNA, 412 bp, Zea Mays
cccttaggtgacatttgctcggatggtgtctttgtggaagacttcgcaccctatggttggtatcacacacttgttgtgcttttctggctgcatccttaggcgacttttgatcggatttgtcgcacgcagaggctgccaaggttggccattgcggtgactgttatgcgtcaaatgccgaagaccggtgttgcggtctctttcgacatccacagccgccggtttggacttgtttttcttgggggatttttgtggcaatttattacatggctccacctcgttaaaaacctcacccgcttggaggaaaagtgtgcgggactgactatgatattgtttggaaaaattacagaggcgctcaggccttgggactagacaaagaatttgcgtaggttatccacattccacgagtgctcta

SEQ ID NO: 28973 - DNA, 421 bp, Zea Mays
atcattatcattttgtaccttccgttcacctctagccatgaggcacaagtgagaagtcgatgagggtgatggcggtggtgaagagaagtccccagcgatggcgacaacttttttcatcattttcttctttgcttgaagaagacccacttgatgactcaatgtcagtgagccaatcaccaacaatgtatgcctttccatttttccttttgtggaacctcttgtgctcccatccttcctcttgaagaatctcttttcccttttctcgtcatcactgtcatcttctttcttgcccttgaacttgtacttcttgggcttgttgcattgatgagcaagatgaccaagctctccacagttgtagcaatccatttcagaaatgggctttcttttactggaaaataagttcttctttcttgagtcaaac

SEQ ID NO: 28974 - DNA, 1074 bp, Zea Mays
aaaaaaacatcattgacattgcacatttgctcagatcataagtagtataatgcagcaagtcattggcatatgggcatttgctcagattaaagaagcaagaaaagcattcataatagttcatcatcaagacagcaagccaaatggttcatacaggcacaagcaaaatataaggtaagtgcaagtcagcaggatcaggttatcaacaagcaaaatataaggtaagtgcaagtcatcccttaattcaccaatggcatacaaaacttctttaaaatacctgctaactgtctccacagacctcctccaactttggtgtatgaccctaaaacactggttgtggccaactacatgaaggaacatggctacttgttcctccacactgctgtggatactatctctaagcaggttcctactcttaagcaactcacagagctgaaaaaagggggttcttctcatgcgcaacatgttaacacactccacatcattgaagttgtaaattctattcaagtttctgtgcctctcttcatccattgcactcattggggcataagtgatcctaggtcgtgccacttgacactggacaagtctagaaacaaaaaatgcatacacaacagcaacaagtccagctgccctcactattaacatgcgcctctcatcatcatgatccatctagatgcaaaggaacagagccaagtatcacataaaagctcaccagcagtaacatgatgcagtactagatcataggcatggcaacaaaataagctcagatctagggaccaaatcataggcatggcaacaataagctcagattaaatgctataaaatcataggcatggcaacttaagctcagatctagtgctaatcaatcatagacatggcaacatataagctcagatcattcaagaaatgaagggggaaaggggaggggaaggaatggcgtctgttataccgaacagcaacaggaagaaggacgaagcgccgagaggaagcagctacaaggcgtgaggaagcagcaatccggatgccctgtcaagaaatcaaaaaggggattagaaaccctaggtcgcgaaatagaac

SEQ ID NO: 28975 - DNA, 449 bp, Zea Mays
ttttatttctggcacgtctgcttggatgagatgagtttctggttgtcgtgcagagatgtatgctaatgaattctggcacgggaaggggaagccagttggatgacttgcgtagcagattttgtgagctcttttcatgatgatgcctgctgcagctttgatgtttttcccctgtattggttgatctattgtttgtggtccgtgttggttatatgtgcttgtctacaataggttacatgttattctctttttcttcgcatatgatcttgaggtgtttgcaattgattgtctagtgcccctgttatgatgttagctagtggtctatagttgtcttttctggtggttgtggtggcatttacttttccatcttatgctcatgttccccttttcaaagactttcatgttgcttcatttgatctcatgaaactttttttctaatgtgtcacttcgca

SEQ ID NO: 28976 - DNA, 402 bp, Zea Mays
gttcaggtaagaacttcaccttgaaattagaataaaacaaactgccggcgatatgttgtcgccggtatctgctgaggtcagcctcaagctttggaaagccaacactcttcgatagagtgctgacaaccttcgccccaatccggtcccagaggcatcctaaactctcttcggcaacaccaccgaagagcaatgctcctggtttatagccgcatgatattgcgtaatccctcaattcttccttctcagccttagacagctttttgccaagtatgtattgaaaattaaaatcctcttcctctgaagtctctttagcaacctccttctctttcccgagcactggggccagggtcttttcggcagctgtagcagcttcttccgcggccatgttcaagatcatcttat

SEQ ID NO: 28977 - DNA, 431 bp, Zea Mays
agcaatctgcagagcatcattggggaccaactcagcatcaccagcagaaatcaaaactctagcatcaggtgcgccggactctaaggcgacttcctgacccaaagcacgtgctgctgccatgcaatttgaatgtggaggagaagacccgacatggacatccatggaagtatgagaaggggaacccgctcggacaccctcgggggctgggtcatagctcgcgctgcccacccgagccggatcatcaccggcaacaccctcgggggctgggtaaacgctagcgccatccttgagtaccgggttctctgtagcagccacctctaaggctgaaggattttcaaccacttccatgggaacgtagcaatctagatcaacctcttgactcttaagaccgcgctccaaggtcgacgaggcacgagagacgagacgctgct

SEQ ID NO: 28978 - DNA, 323 bp, Zea Mays
ccggggccactgtcggtaccctgaatcaggggtaccccttactacagtatgaagacacggtgcccgtacggcgatctctagccgcacggtgaacagcacccgaccccaccacgtgaacggctcaaggggctccacgtggtgagaaaagatgatacatcccagggtatattagttggaccggaccttcgcgaggaagcaccggacccctgtacgcatgacccggaccccagattacggtccgggactcccaagtaagcatgtcgggtcccttggatggggtccagatccctccgagtaaggtccgggccacaacgaggtcccgg

SEQ ID NO: 28979 - DNA, 576 bp, Zea Mays
gctgtagcgaccattcctgtcctcgattagtcaccctggccggagtattgccattttcccccaattcagttcaagcacacccgaaacccaacctcatcgtggccagcactcctccggtcagtaatgatcaaattactctttgttttagttagtatgtgatctcttattgcccctggatgcaacaatttggagtttgaccgaagcccattgccggaacgcacccgtgcactgtcaaacaccgccatggcaccctctccgtcgccccacctttccgctcgtgtctagcccaaaatttggcgtgtgcgtcatctctagtgaacccaggaacctttctctagcttcaatttagcccgcccagccctcgctgatccggaacaccttgatccacttaatcacccgcgctgacaccgtgggcagaagggtgtagagcttcaattcagaaattgagtgaggggaaaggtgcgataggtagctaatctggttcctgtcgcttgagaactccagtcgtggcgtcatctggccggaatagtctcgccggagcgcggaccggcgtcgctcgtcgacagggacttcggt

SEQ ID NO: 28980 - DNA, 288 bp, Zea Mays
ttactggtggacaaagatgaagatcgaaattgcacactatgtggcgaagtgtgacatttgcagacgtgtcaaggccatacacatgaaaactgctggtccattacagtcgctaccaataccaacatggaaatgggaagacatcagtatggactttattgtgggattgcccaggaccgcaaaaggatatgactctatttgggttatcattgatcgacttaccaagatcgcccacttcctccctgtcaaagtaaaatatcccgtcattacctatgcggagttgtacatcgc

SEQ ID NO: 28981 - DNA, 675 bp, Zea Mays
gcccctatggcttgcccgggtatggaggcataccccccaccacgacgccaactgatgatgtgccaccacccagctcccaatccatcttctaccattgccacattccccttcgcccatcccacattatccaccacctacactgccatctctcaacgccatttcccatactcctactgcaggagttcctcgcttccatcgcctcgaatttgccctatttgacggcaaggaagaccccctccagtggctcaatcgatgtgaacaattctttgaaggtcagcgcacgctggaggatgggaaagtctggcttgcatcctatcacatgacaggaattgcccggacgtggtacacccagctgcagcgcgacgaaccttccatgtcatgggaactcttcaagcagcattgccaactccgctctgggcccccattacgcagcaatcctctcggcgaactggcacgccttccattccgcacaacagtggatgactaccaggagaggttttgggacctgctagcccaaacagctccactgtcacaggagcaaaaggtacatctgtttacggctggacttccggagcgtatcaagatcgacgtggaactcatggcaccacgtgatatcaatcacgccttgagtttggcgcgcgcatatgaacggaggtcacaagtgctcgatcacca

SEQ ID NO: 28982 - DNA, 324 bp, Zea Mays
ttgcgcgccacattttagagtgtgtttatttatctcctatattatataagttgtattacagtgtaagagtagggtgataaaatactacttatactattgtatcataatctagcttatacaatttagaagggaaaacattaatctttttcgccccaacttggccatgccattctgctatagcagaattgtccaacatcgcttacctggccacacgcccacagaaccacgacgtgtcaccttcgtcataagttggcccacatgtcagcgtcagagcctgctcccaatcagcaccggttaatcaccccagcccaaatctaccccgcg

SEQ ID NO: 28983 - DNA, 938 bp, Zea Mays
tactcccaatggctgtggactgcaatcttcggcttcacagccaacaatgtttcctctggaacctccagggatgaaagattctctgtctgatatgttctcaggtttaaatgtgtctcctttggaaacaattcgagcttcttgggatgaagagtccaactgcatttatcaagcgaaaaactgaacgaacaaaagcatccatcctccaaggaaaagaagcagggccctgcatcaatttcattatccatgtatttcaccgggagcatagtgatggataagttaggagcacgatcattgtcagtagtagtgacactgatgcaataagcattgatggatccatttccctctgacaagccaaggaataaagagccatgtggggtggcgcgaccaacgaatggtagccccttggtgtcaattttgtgccactcgactgaattggtgtcaaatgcatatgtgccccaaagttgattgaatgataccagtatgtaggtgtcgaccaccacataagacgtgataagtacaactggcagcatggtataaacaaatggggtaatcttccaagggaagcaaggtggatgtggtagctcaatccaggagcatccctccaggtgggagcggtcgtcaacaatgacaactttggctttggaaagatcgagtacctcgaaccagggtgggaaatcggggtctgtgaaccagcagagagtcttgcacagagcataaaccttgtcccccattgttgttaggacagggcaccactttgtagaattgagagtcggcccgtgaatgaccttcttcgtcttggtgtcgaagatgacggtgtcacccggatcacccccgaccctaatgatccacgcgcggtgcactgaccgtagggacgtgaaggtcataccgccagcaacggtggtcagacgggtaactcggtgcaggctcttccgcttcac

SEQ ID NO: 28984 - DNA, 441 bp, Zea Mays
cgctgaattccttgatttttccgatgtcctctaacaataaatccaaacagttagcagcacaaggagtccaaaacaggtgtggaattcttttcacaagggctccctgctgctctaaagttagatccattatcagtgactatctagacgacatgttctctaccaacactgtcaatttgcttctctagtagatctgccaacaattcagcactagctacctcactcggtgcatcaacaaaagctaaaaagaatgtccctgcaggactattagcaagaaagttgatcaaatgccgctgtcttgtatcggtccacgcatctgatataattgagcagtcatattccttccaagcctgttcatgcttcaacctcaatgtcgttgtcctatcgacagccctatcaagccaaggtaccctaacatcatggtaccatggaccaattgactcc

SEQ ID NO: 28985 - DNA, 607 bp, Zea Mays
gaagaacacgggcgttcacggcagcccagggtggtctagctcaattaaaggagtcgtacagcttgaggaggacctaaagacgctagaacaatcgaccagagtgtatgaacgaacctagaataatctggccgcggttaggatgattctgcggcggcggagagtcggtttgggggaaattggaaattggggagctgtggggaatgatcggagctacgagcgggttctctggacgcacgattacctagcagaacgggctgaggcttcaatttataggatacttaagcggtggtggccaatttggtcgagcaacgctggcagtcggagatggagaagaacttggcgcggtgaattcgtgtccatcgccggggcgagctcaccggcgacgattggacaaccgtagcgagtcacggcgtcgcagtggaaagcaaagccacgcggcacaaggtcgaacggcggcggcgcgaatcttcgcgcaggggggagtcaccggcggcgagcaagctacgctggcattctgatccatttggtctactgtaccatggcgatgatgctgaggcactctgacagaccattttggagcgcctatttctcccaattttgtgtggtg

SEQ ID NO: 28986 - DNA, 590 bp, Zea Mays
gagaactcaacataaggtagactcttgtcccaacttccaccatgtttaagagcacaagctcttaacatatcttccagtacattgttagtcctctctgtctacccatcagtctgaggatggtaggctaaactaaaattcaactttgtatccaagctctcatgcaacttcttccaaaaccgagaagtaaactgtgatcctcgatcagacacgatcttcttaggcactccatgtagacaaactatccgagtcatatacaattctgctagcttggctcccgtgtaattagtcctcactggtataaaatgagccacttttgtcaatctgtccacaatcacccaaatagagtcatatcctgctggagtgtggggtagtccaacaatgaaatccataccaatttcttcccatttccactcgggtatcttaagcgggtgcaatagtccagctggtctttaatgttcggccttaactctttgacacacgtcacacttagccacatgtgcagcaacatctctctttagcccataccaccagtacttttgcttcaaatcctgatacatcttggtgctaccaggatgaatagaataatccga

SEQ ID NO: 28987 - DNA, 599 bp, Zea Mays
tgaagccccgcttcctagggccataccgcgtcatcgagctgatcaacaacgtcgccgttcgcctggagctaccaccacaggcccgcattcatgacgtcttccacgtgggcaccctgaagaagtttgtaggtgcacctccatctaccccaccgcccctacccgacatccatcatggggcgattgttccagagctagctcgggtggaacgcactcgcctggcacagggtgttcaacaggtgctggtccagtggtggggcgaaccagaaacttcggtgacctgggaggacctcgacaagtttcgcgccacctacccagattttcagctcaaggacgaactggaccttgaggggggggagagatgtcatgtggggtcacacctacacgcgggctcgcgacgctaggagggctgaggctagggcgtttaaggtgggcgccaacagcagctcacctaaggaaggttcgtccaaagaggaaagtagcaggagctcagccaaggaaggtccgtccaaggaaagtggctagattagtggccaaattgataggccttaattgtaggggagttggtttccaaataagtcatttcctaaattagaagttac

SEQ ID NO: 28988 - DNA, 297 bp, Zea Mays
ctgaatccttgcctatcaagctaagtccactgggccacatctgacgaagcttttacagaagaagaaggagccctcagcaaagaagaagtctgctgggccaaaaaacgaagaattatcactgtgacagaggccattgaagaaacaccaccaccagcttcggcgtcaaaaccaccagctgttgagagcgctacagctaccgaagctgcacctaccgaagccgcaattgccgaagctgcaacggccaaggatgcaaacttagaaagcacactttctgatatagataaaatacttctggat

SEQ ID NO: 28989 - DNA, 321 bp, Zea Mays
gcaatctcgatattcaatctcgatttataaatctcgtctaaagctcatattaatcaaacgctcgacagttgctggtcgcgctgtgtccgaatccaatttctcgatgttcgatcgatgtccaactattttaatccgagtccatactcacaaacgaaataatcaatatgtcgtcctctgatcaaatcttactcgactcagcttagcatctctgtatccaatccgatttcaaaatcaacatcggcaacgatttttaaatatcacgattcgctttcttcgactaaaaatccaaagtcaatcaaatctcaggacgatttattttcc

SEQ ID NO: 28990 - DNA, 637 bp, Zea Mays
gaatccttgaaggaccagggagaatcaccgtcgggcatccatgtggtcgtagtcttacctggtgaggaagaccagccagagccatgggagtccacactgtcgtttaggctacaatgcggaactactgcctggcgtggtcagcatcgtctacaccgtgatcacgagtaagaaattgccccattaatttgccactggattagggttgtttagcgcctagtcgctcagttgtttagactccagaatgcgcaaccgagttgcgtagcaatggcgccgccgtgggcgtagccttgccggcgccgccagtgagttgagcggggacgatgcccatcagccgtagatcggggtatgggcgatggtgatttagtgcagagccaatgggaatcgtggtctgttgatctccttggctgcggctaggattagaagtcattacatcccttcgcgtgattcgatccagaccatcggatcgtgatcgtgcggatccagcgcgatctggaacattttgaatcggcaccgtcgatctttgatctaacggctagagcgccgcacaagtctattataacgctgttttaatccggggcgtcggcacttgatcggacgatcgagtttgctcggtacaccctttcacggcacattttgc

SEQ ID NO: 28991 - DNA, 304 bp, Zea Mays
caagatttcctcagcttctcgcacctctcaaacaaagccatacaagtggaaagggcaagggaagaagaaaaaggtcacctcaagaggaaatttcaagtcctccaagctcagcagcaagaccggcaccagagaactcgatcctttgggtttccacccaagggaccaagcttcattagaccagctggacccactccatcacggttcagtcagcagagtcagagctcctttcatgccccctcagttgcaagcaaccaaccaccagcaaatgcatgttggcactgtggagaccccagtcacttcaaga

SEQ ID NO: 28992 - DNA, 504 bp, Zea Mays
cgttcccttgcccaagggtttgggttctgtgggacattaatgctcgccctaggtgcctcataatgcatgttaaatgtttccggcctttttcggagtgaaaagtgctcgccccacgtgtttgtggggttgtgccatgattttgaggagctatgagtggtaaggggaagcttggctaatgtgggtgtaaagattgctggtaataatccacatcttgttctgcatgccctatgtcagacgatctggtgtaatacgaggattgtccataagtatactcagatgatccgcgcatatagtcggatggtccgagcatgtctattagcccttgcacatagtacgacagccctagcacggatctcggtggctcatcatgaagtacggagccaaccgccactgggccgaacggtctgagctgaggaccatacggtccggccgtgtgcagattcgcaggtttgtcccagatcgattgagagggttgtggttgtgtcgtgaatgtattcatcggca

SEQ ID NO: 28993 - DNA, 284 bp, Zea Mays
cttggatcaggactggactagagtgtggaaataatgtaggttccacatggtgttataggaatattttagtaacctgtgataagcctgtgccttttacctttcatgcttgaactgatccacatgctcttttaagaaattggtacgttggacgtccagcctgttggatgaaccatgtcctatctttttaaaatgtttctggatatacaccaatcagggatcatattctaatgctctttgactagctagcagcaaacatgcatattagtatagcacgtgttatgccg

SEQ ID NO: 28994 - DNA, 388 bp, Zea Mays
acccattgggatcagcatcagtcagatcacacccattgggatcagcttcagcaaaaactggcaccggcacttcctcagcagcaggagcagaaggaccgacatcctgatccaagcatgacactcggtgaagacgtctctttttctttttcttccccttagcaggagaagttggttgagtggctcggcgaggacgcttcgggcgaacactgtcagacctctgaatatccaaacctttgccagcctcggtaatgggcgctacagccagtattccagcaggagctgcatcagaggaatcttcagccaacatatccagcatggcacttatctctgcatcacttggattcaaaggtacctcgaaatgaacctgcctctcgtcgtcggggatttc

SEQ ID NO: 28995 - DNA, 459 bp, Zea Mays
tgagaaccgaagctgaatttgggacgattgaggtgcgacatgaagagatcaacagtgggatgtgtcgtgcacttatgccgtcatccgacgacaacaagaggagccaaagataaggataaatattagtgttagggtttgatgtgtacaaacgacaagaatcataaccaaagtggaagagtctagagctcactaatgatgtcggagcaccagagtggccaggaatgcagtagatctagaagacgatgggaattagaactgagtttggaatgaacataaagggatgtaggatgagatcgatgaaggggtgcatcgtgcacccaagccaatgtctggtgatggcgggggaaccagagataagggggtaaattgagatccaagagggcaaagaggtgagcgatgggcaaagccaaaactgtgaaggcgatggcaaagtgagtgagactatggggagagctagtg

SEQ ID NO: 28996 - DNA, 660 bp, Zea Mays
tcctcatcaagcgcaattcatttgtgtacatcttcaagaccatacaggtaaaacacattgtttttgggagtctctcccatgaaactttccaagactcccagtgctaattgactgaccttattgttgtctgtcctgtgaactctgaagcttatcattgtagccctcatcgcgtcaacggtgtttctgagaactcacatgcatacgacgaatctagatgatggctttgtttacattggagcactgctctttactctgattgtgaatatgttcaatggttttgctgagctttccttgaccataacaaggttgccggttttctacaagcaccgggacctgctcttctatcctgcttgggtcttcacagtaccgaacgtcattctcagaatcccattctccattattgaatctatagtatgggttcttgtgacatattacaccatagggtttgctccagatgctgacaggtaaatgaaggagtagtccttttttctaaaacatttctggaatcagaattctgtaatggctaattgtattatgtatatgggcaggtttttcaagcacttgctgctcgtgttcttgatccagcaaatggcaggtgggcttttcagagcaacagctggactttgcaggtccatgatcattgctcaaactggtggagca

SEQ ID NO: 28997 - DNA, 290 bp, Zea Mays
tgctggttctgactttgattattcctctggccttgttgtccagagcgttgcacttgataattatttccaccctgatttccagagcggaactgcgaaccttgagcgttgttcgggcgggtgttcctgttggactgaccttggaacttccttttgtggtgagacagttcccttcttttactttcaaggccaattgccttgttcagtagagtctggaagttagggaaggtatgactctgcagctgatagttcagaggtccaatcaatccttccaagaaactatcttggcgctt

SEQ ID NO: 28998 - DNA, 455 bp, Zea Mays
tgcccacccatcccgtcggaaccaaatgagttattagatccatcatcgtccaactgtccccccatctgatgaagatttagattagccaccactcgacttgtttcatccaattgcttagccatgacttgttggtccttagtaagctgaccaatcacaccagaattgagatctaactagaccatcatgtgttgctggttcgcaaacatcatgtcaatattatccaacacccgctgccaattgttttcctctttctcaaatcccgctgccataacatccaatacaaaccgggattgcacggaaggctttggaggcgccgtgtctgttggttgatgaagcaatcaaagagaagaacacactcagacctttcgtcgaacaggtcatgagcgctccgtctaccgccgccacacttcgccgaaatccaatcaccgccaccagcaccaccttctaccgccacc

SEQ ID NO: 28999 - DNA, 369 bp, Zea Mays
ggcacggtttggtggcttgggtgcttgactaccttacggacccgacgacacgctcaatttataggctccgggggcggtggcgcgtgaattggagttggcgcggtggcggtcggagaggaaagaggttaccggcgctagcaattcgtggcgttcaccgtggcaagctcaccggcgatgaacagatgagttatggtgactcactatgacatggtaaggctttgaggcacgcagcagggccagataacggcgaactctggtgatgccagcgtgatcaaccgtggtcggacacgacggtcagtgagaacagtggccggaagttatctacgacacgatatttcttaccccttcttcgttatccaacaacgccag

SEQ ID NO: 29000 - DNA, 361 bp, Zea Mays
ggaacgaagagagagggagagaatggagtccacactcgaggtatgtatatatgagtatgagcaatggcagcttgcacgtagacccaaatccatcatccatggacgcatgcatagcgctgcagtatctttgacctgaggcggggctggtggtggtgggtgacgccacgtatattgcgcctgtatatcatagccctacaggcccacacagctagcgcagtagatcacgaggtggctgcagaagattcaggttcaggcatactactactacaaccaatgcagcagctcgtgcatgcgccagattttgatgggacatcatggcacacagatcgcgcatctccggagaggagtgtgtacttgctgc

SEQ ID NO: 29001 - DNA, 317 bp, Zea Mays
tgtgatttgtggacctcccctttgactagtgtctctggtcataaatactatcttgccattttagatgattattcccactttttgtggacattccctttgcgcctcaaatcagacactttgtccaccctcaccactttctttgcctatgtccgcactcagttcggaatcaccattcagggtattcagtgcgacaacggccgtgagttcgacaacctacatgcccgcacatttttttcctcgcacggcattcaccttcgtatgtcatgcccctacacctccgcccagaatggcaaagccgaacgcatcatacaatccat

SEQ ID NO: 29002 - DNA, 298 bp, Zea Mays
ctcttcacagttggccagtagaaaccagatcttaaagccttcctgaccagagtccttgatgcagcttgcaacccacactgcccggcatggatttcatctaacaattgtctcccagtggccgagtgaatgcatttcatgaagactcctcctgcacctctcctgtacagtaagccccctatgatgatgtagtgggctgactgccttgcgatgcattctgccacagccttgtcatccgactcttcttcatttttatgtacctgatgataggctctctccagtcgttgggatctgcctctgg

SEQ ID NO: 29003 - DNA, 376 bp, Zea Mays
gttgtctccatgaacgggatggtatacggcggagcgtccatgccatggacatacacggttccgagcgctggtgaaggacgacggagaaacagggacggtcgtggatcgacgaccggagcgtggcgcgatagactggggcgccatgatggtcgacgagcacagggagatggcggcagcgaaggtgggtaccaacagcggtgacccgagccatcattctctctccttctcattctcctccggcccatagttcgctctgcgcatacacacgacacgggggcaacttgcttcggcatggcgtatctacggaggacttatggggcgaggggtcctgatccatagccgcacgactcgtgagcatgccgctacgagaaactcg

SEQ ID NO: 29004 - DNA, 393 bp, Zea Mays
gcattgtgtgtgttccatggcctcctagaaacatctgttgcctcattcctatttcctagaaaaatatattaaagcagggctcgacgctccccagacatggtggccacgtagtgcaggtttcaagagctgttagatgaatattctacagtcgaacaattgttttgtttggtctgttctgtccagtacttcaggcctactcttcatctacttttttaatggagttggccgagtctctcgaaagtgctccagtctggtataagtgccagtaaatttgagaggcgttatcttccagacagtcgatgacggcaggtggcctcggcgtcatggtcgctttacctggggcattgaaggtaacactcattcctccctctctctacattacgctctatcctt

SEQ ID NO: 29005 - DNA, 658 bp, Zea Mays
ggtggaagcctcgtcttcaattttggtggccgtcatcagtcaccaaccgacatccgtccttgacttgctccaggacgattcgaggcacggctcgatcggggctaactctgatgctgatgaagtgtcgaaaagggcctgcttcatagcaacgccaccacgaaatgtcaatggcgggggagacaaagaggccccaaacaagagaagtaccagtgctagcgccaagccgagatggccactatgcagcaagccgagatcgatcagtagttccccctcgggacgaaaagctatggtctacaaacgacctcatcttggagcaggcgggcacaaccttctcaatccacaaggacacgtgtccccatgaatgaccatatcgaaggcatccgcgatgcacggcacatccttaacaacctacgccgggatcaagaagaggtagagaagccacatgaaagaagacacgagcataccctcaacccaccctggttggggccgcgcgccttcggatgtgtgatacgcagggcacattacccttcaaaggtgagagcatcgactaacatttccaaatacgacaggtcttcgaaccaggcatatggctagaagattaccgcctcgcatgtcacatggcgggaatcaaacatgaccacctcatcatctagttctt

SEQ ID NO: 29006 - DNA, 410 bp, Zea Mays
ggaggacctcgtggaggcgaacgcacgctggacgacatcctcgatgcctagtgcccgtaccacaaggacatgtgccacacccttcggaactgcagagacttcatgcactccgtcgggcacagccgacccttccaacctctacctcctcccccgccgcgaggaggaccaggagaaccgcgacaaccccagcagcaggaggagggaggaggtggggccttcccgcgcgtcgacagagaggtcaatgtcatcttcggcggacacggatcgcaggagaacaagagacaacaaaagctcaatgatcgctagatactggtggcggctaccggtcctcccgccccataccgatggtcggagcacccgatcaccttcacccgggcagatcagtggctcaacttcgaccacccaggcaa

SEQ ID NO: 29007 - DNA, 501 bp, Zea Mays
gagaaggactcggatgtgtagggatatagtctgctacaaaccaggagataagccagtagataccaattatcatatgtatgggataactctccctagtcgcgtatataaagccaggaggtacacctaccatatcatctcatcttagccttcaacaccaacaactctcagcttgtaatcctcacatcaatactagaatcaccacaggaagtagggtattacgcaactctacacgacccgaacctgtataagtctatgcgtcaccccgtcgtgttacataacgaaccatcgagtcacgatcaatgacgctgtctcacccaaaagcatcacgtgggtaaccccatggtcgtggtcggatcacaaataccgacacataccaatcacattctcaaaaggtgaccttcgtctcaaggattatccgcacagagacaccatctcatggtgcgtggtcgaatcacacatgcattcgaaaaatctaccactcccagatttccatctcatgat

SEQ ID NO: 29008 - DNA, 383 bp, Zea Mays
ctgaagtctagcttggtgcccatagcttgctgaaggctcatccaaaattttgaggtgaattgcgttcccctgtctgacactattcttcatggaatgccgtgaagtctgactatttctttgaggtatatccgagaaagggtggctcctccgaagttagtttttactagaataaagtgagctaccttggtaagacggtcgattataacccagatagaatcgttccctttttgggtccggggtagtccgattacgaaatccatgcctatttcttcccacttccaattgggcactgggaggggttgcagtaggcctacaggcctctgatgttctgccttagttcattaacaagtatcacaccaggccacatattgagctatgtcctt

SEQ ID NO: 29009 - DNA, 743 bp, Zea Mays
ggctgtaggtgagatgctaactggacctgcaaaggctttgttcatggatgaaatatctactgggcttgatagcaacagcacatttcagattgtcaagtacatcagacagacggttcatgtgatgaattatacagtgatgatttcccttctccagcctccacctgagacctataatttgtttgacgacatcattttactgtcagaaggttacatagtctaccatgggccacgggaagacatccttgaattctttgagagtgttggtttccggtgccctgaacggaaaggagtggcggatttccttcaagaggtgacttccaggaaagatcaacagcagtactggtgccacaaccacgaagattaccattatgtgtcagtcccagagttcgtgcaacatttcaagacattccatgttggccagaaactccagaaagagttacaagttccttatgacaaatctaaaacacatcctgctgctttgactacccagaagtatgggctgtctagctgggagtctctcaaggcagtcttgtctagagaatggttgctgatgaagcgcaactccttcctctatatattcaagttttttcaattgtttgtcctggcagtcctcaccatgacagtgtttttcagaacaaagatgcccagtgggaagttttctgataacggaaaatttatgggtgctttggctacttctttgatcacaattatgttcattggaattactgagatgaacatgacca

SEQ ID NO: 29010 - DNA, 580 bp, Zea Mays
cgacattcttatttacagtccttcttttgaccaacacctcatccacattcggtcagtgctggacttgttgaagcacgatgactggaggatcaaattatccaagtgttcttttgctcagcaacaactgtcttatttgggccatgttatcagttctgatggtatatctacagatccagctaaaattgatgccattgtcacttggcctcttccctccaataccaaagaacttcgcagttttcttggtcttgctggctattatcgcaagtttgtgcgtcattttggagtgattagcaagcccctaacgaatctattaaggaagaactctctcttcatatggaccactgagcatgacactgcattttctacactcaaatctgcattacagtctgccccagtactatctctgcctgattttaccaagcctttctgtatcgaaactgatgctagtggcaagggtgttggtgctgttttgatgcaagatgagcatcccattgcatttgtcagcaaggcattgagttctaaaactttgggtttatccacttatgagaaggaatacctagcaattttgcttgctgttgag

SEQ ID NO: 29011 - DNA, 276 bp, Zea Mays
cataaccgaaaccgaaggcctagagatcctccgcgaagtacacgacggaacctgcaggtcacactcaagacccagggccctcacagccaaggtgattcgtcagggattctattggcccacgataatatgcacggccaaccgagtcaccaggtcatgtgaagcatgccaaaaattctccccttgctcatgtgccccttcgtagtttactaagctcatcgcacacacctggccacttcagcgatgggggctggacatcgtcgggtcactacctatggc

SEQ ID NO: 29012 - DNA, 494 bp, Zea Mays
taatcgatgcatatcatcctggtgccatctttcttctccatgaataggacatgggcggcccaaggtgaggtgcttggtctgatgtaacctttctctgacatctcatctatttgcttcttaagttccaccaactcttgtccagataccctgtaagctcttttagaaaggggcggtgccaggaagaagctctatgacaaactcaactttccgctcaggtggcatacctggtaaatctttcgggaacacatccgaaaactctgacacaaccttgatagtctcgagtgaatctgcctccttgctatcaatagccatctgatgacaacctcctttccttggctcaggtgagactaactcagccaccacttcttctcctagtggggacaccaacttaattgtcctcttatcacagctgataactgcttggtacttatctagccaatttatccctagaataacatctattctctgagtacccattactatgaggttagcgg

SEQ ID NO: 29013 - DNA, 605 bp, Zea Mays
cccgattaccctataaatactctcatctagacccttgagagggacgcttgacaagacatttgagcaatttagcttcttgttttatcgtgcactattagtcacaactgataccgagtgtttggcaccatgtgtcaggacccaacatttggcgcccaccattttcgcttcgaagacgaaacccatgatggctcctaggaaaccaaacactagggccaactcctccctaggatgaagtcgtaaaggcagtcctcgtcgctaacaccaagaaagctaaggtcgcaatcaccaatgaagtcttgccaccctagaaaaaactgccccctccattgtcaatgaactagaaggtgacaccaatcatttccactgcaaagagcaactcactccataggtaagtgtccacacctgtagcttagagaccccaagtcatgcccctttcaacccataaagccacccttaccatgccaaacttgcctgacctaacaagaaacatgccttctaccccttggcttcgcactcctagagcacaaccaacacccctcgatgaatatacccccaaatgaggaagacaaagacatttttcgagacaatgaagcctcgatgtcaac

SEQ ID NO: 29014 - DNA, 744 bp, Zea Mays
agcaattgtgacttgtgctttggatatttattgaacttcgctcatctgcactcgattttgttccacattcacatacatattgtgcctgtcctacagctccacatactatatcttctgatcaatacagatttgaccttgcaattgcggtttcactccctcttggtaagtatcacaaaccagcctccgattgtaccatcctttgcttgtatttcgtcagacacttgtaagagcttggtaagatacattacaacgtgttcctatgttccacctgagaggagcgtgtagtgaaattattagggataaccgtcaccgtttgtttcctgtttttgtgtttcgatggcaggcgacgaagaagaagcaaggatccctatagacttcaatgaatgtgttagccgccaagatcttgaggcaaacaacaagctcctaaaggagcaaatggaggagacggtctacaagtcagtgcatgatgccttcattaacatggaccttggcaggacttacgagaggctggatcgacgattgtccgagattgtcgacagacttgctgtgctggagacgcaacaacaagcactgccaccaccacctcctcgtccacgtcttcccgatgatgcggtgtttgatgaagaaggtaattatgatgaagcgaccaccagagatttgcgcctttgtcgccgtcttcatcaaaacacagaaggtatgccacaccaacaccgccagcaaggtaataacaatcgtgctcctgac

SEQ ID NO: 29015 - DNA, 1334 bp, Zea Mays
ccttgtgggcatcatgaatagaagctttgaccatctggaggttagaacttacacccctaaaaaaagaagaaaggaaacctctctttttgttcagattaaggattatatctttgcaagtactatctgattccaaattttacaagacactgtgcatatagacatatagttctatttagtgtgattgggtcttttagtgtgcatgtgggctttctgtaaatactccccctaaatgtttgttactcctgtcctaaaatataaggtatacaatcattcaaaatttgttctgaaatatagggggattcatgtgaagtaaccctaaacttagttttaaatggcggcatgcacatacatacctaccattaatgtctatcaccaaccccataaggttatgtgcgtcattttctttacctcatattgtcctagaatttctaggtacattgtatttcacggcggtgtatgatatttgttttttttatgaaacaaaaagctgtaagggagacccctacagcacagatttattaaaatcaagcgaaaacgagagtatgatatttgttagtctactttgcggtttagaaaggtttgaattgatattttttctcatttgttttaatggtaaacctgctggcaagtagatcagttaccaccaattttaccttaccattatgttcatttacatagtgttcattaattttggtgctgttatatttacttatttgttgatctcggtgttctatcatctggaggccacaaagtgatcacgcttctgcttattttaccagctatatgttgctgttagcttagttttttgtttgtttgtttttttacctcatatatttccatgaaaggaccaaccgagttttggcacaagaccagctgttgctgcaaattgagcgatatgtagttttagattgctcttatttgtatttgcgctatatttgagtttataagtttattttattcagtgttagcctagacatttaaacaggctaacggtcaccttcccgtttagctatttattcgggctaaacagccatttaaacggactaaacggcataaatggctgattaaacgggcacgataggccacggtgcagcatttacacggcgtgtacatgggctaaacggccgtgtatgtgaacagtgattattacatgcacgtctccagatttggagatatttatttgctttggctcaaatttaattattttgcaggtcacaatgaaaataattgaggattacattatttttggcggttcagaatttttgaaaagccatggtgcaagcctagctaacatcattgatactattgttggaaatgtcaatgataaaggactt

SEQ ID NO: 29016 - DNA, 650 bp, Zea Mays
cacgccgatagagctacggtaagaaccctatgttgtcttcactctcttccctgatacgtttaggaccgtattaatctgggattcatgcgccgggtcaccactaatttctcgccgaatatcacctccgccgcgcgatacaggagcgccgccgccgccgtgttacgtgcgtgcgcgagctgttgccgtcgtgcgactgttgatccggtccgttggttctcagatgtgtggatgagagatagtcaggctgtagtgtctctagaatagatctgggtcgtcgattggcgatcggatggttgccttagaaccctagcgcccaccgtcgatcctggatccagcgatagttgagagaaaggccttgtatagttgggccggtttaatctggaccacccattccggatccgacagccgaaaggcaacgatgcctcttcagctgtgtcggtttacaactgagcccctgtgtttagttgatttagaacccgcggtccacacatggggaaattagagtctcggttacatttaccccggggcccctgaactctccaggaaatgaggcccagtccagagaacatataaaataggtaaataaatacagaaattgatttttaatataaaaagaattcctaaaacttgtttattgcatagaaaattca

SEQ ID NO: 29017 - DNA, 305 bp, Zea Mays
ctatggccttttttggagccaaggtcttcttcacaactatatctttctaaatatacattttagccttcttctttgccagacccgagggtggatctttgtcaacctcactcttagtagctctcttccttttctctccagctccgacattggccgaaagatcttcataatctaggtattcaaaccctagagcatccataactctgttaagccgaagtttccctcggttcccaaagacagattgcatatcttcgtgctctctattaaggtaatttccacacatttcattacacctctcttcaataaac

SEQ ID NO: 29018 - DNA, 372 bp, Zea Mays
gacagtatgagcaaccacctgtttcagtgctgcatacaagtcggtttcaggacagctgtttcagtgttcttggataaaaaaagaagaaggcatgctttgcagctgacaaactcacagcagttaagtggcagttgcttatcagcatttgtcctcgagatggctgcacttattgttaaccttcaggtaacagcctgcttttaactaccgtctgcacctctactttccactggacaaataatttctcccagccacctctctagtagtttaatgaatgaccatccatgaatctgcaaaagttgccgtcactaaaccagacggtagtgcaaggcaccaaaaaagatgtttttttttgctaggacatggttaaaaaac

SEQ ID NO: 29019 - DNA, 528 bp, Zea Mays
gcggcatcagaagcggtgaagctcgcgacagcggcggcgttcgttacggagaagatgaccgagctgacgggtgggtcctgtgttgcagtgtaacagagccgcggggcaaaggtttctggtgagcgcgtggcatggggagtgcatcaaatccgagcaggcggtagcgttcttcatagacatcatccatcacttcgaggtccccatctccatcatcacagacaacagcacacagtccacaaggaagacattcctaagcttctgcattgaccaccacatccacgtagactggtcaaccatagctcatccgaggacaaatgggtaagtagagcgtgccaatgacatgatcttacaaggccttaagccaagagtcttcaatgaactaaacaagtttggaataagatggcttaccgagctctcctcggtgattcagagtttaaggacaacctcgagctgggccacgtggttcacgccattttttctagcctatggggtagaggccgtcttacccatagacttagagcatggctc

SEQ ID NO: 29020 - DNA, 280 bp, Zea Mays
aagtggctcttgttccaggaatcctagtcatggctaaccaacgtccactttatgtcattaaggtacatgtttaaacttgggaaaaagaaatttgaagtactaaacatccattataggtcatattcagtaactaagatgtttcccatttcaatgtgtataagacaacagaaagaatgggacagatgtacagaaagcagcataatggttggctttgtggtgttttagtccaattgtgaataagatgccccttaatcttttaatcagcgcttccatattgttg

SEQ ID NO: 29021 - DNA, 336 bp, Zea Mays
ttttaccataagcaacctcgatcgatcagagtggacgggataaaaaggataggatatggttggtgctacagctccccgctccgaggacgctgaacacctggcatgttaaaatctctgttcccgagagaaaacccctcaaattcacacggttttcagcgtggatcctccagagctcggttgtcgtcgtcctgtggtgccagcggtgagtctcagcgggcagaggaggcggtcgccatcgaattccttggggcgaacgaggccgggcatgaggccccaaatgtgtcctgttcaggccaaatttgtgccagactagaaagcatggcgcgccgttggcgc

SEQ ID NO: 29022 - DNA, 716 bp, Zea Mays
gtgaaaagaaagagaagtgctcagaagaagacagggaaatggagaaaaagaggttggaattggaagcagaaaaggtcatcatacgaaaaagggaattgaaacttcaagaactagattgtgctgaaaaaagattacaaaggctggaggcaacaaatgaagaagatgtcgaacccgaagtttggattatgatgaaacaacaaaaaaagaagttgcaagaattcatatttggttatgagtgaaagatatattcggttactcgtaacttcagcttgttcaccaaaccggtttctattatttgcttatgtcattacgttacatttgtttggcagaccattatatttttgttcgaaccataagttgtgaaggacagttgtgttgtgccgtttgttgtatcgtgttgtaatagacaataattatttgactgtgctgtgaacatgtatgcttaaagtttcatatatttgatcgtgaacgttttcgaggttcggaactaattgctgcgtgttctgcttggaaccgcttgtgatgtgtacaaatcgtttgcacttttacttttacatggctcaagactacatatgaatgtttttgtgttcaaagaacaagtacaggtttgcaatgatcatatactttatttcataaccgatacgtaggacatgacaatggaaattacacatagtagaatgaagttgaaaaaacttagcaacgaattatgaagttta

SEQ ID NO: 29023 - DNA, 1549 bp, Zea Mays
atagagcattagtatctcaatggatgatccaattgatcctagcacaggggaagtccacctcgcctcagacgagcatggacccaattatgctacaaatagagcggcaattccgaggagaaaagagtagaggatgatgatgagtacaagctgtttgatgaggatgagaccccaccaccgaaagtaaatttcagaaagaaaggtatcttctgcaaacacgagatgcatttattctatttttttagagaaaaatctagtcctctgctttattattggaatctactaacatgcccaccaacaagttcaggagtcttatggcttaacataaacccactactacttaaatagtttactaacacaagacagatcatcaaagtttttctccatgttgcattcttgctcaacctgctgactcaaacaccaatggagatgtactcattttatctgtatctctcgaagtagaccctccagcaggttccattccacctcctcggctcggacgcttgcgttcacttcagcctgggagtttgcctcgcattatcctctatagctgataggcatcgattcaacctgagagcaactccctccttgcataagcatggccatattcagcgtcctctccgctcttgctatgaccacacacacctccgactaagtcattccttgaaagcataaatagtttctcagattgcataatttaacaattaacatacgcaaatcaggtatacccgaagccctcatacctttttcttctgggttgtaggtaacctcagtattatcctttacaaactttgtttcgttataggcttatcgcaacattttctaagaacattattttgtctaggtcaaggctttaaatgggatcagataacatattgtgggaaacttgcggttggagagaaaggatctagttcaaagcccattatttctgacatatcctggaacacgtacaaaaaactgcaccctaatttgaccaggactgacaaagttctagcttgtacgggatcttttggtacctttttgttctattattcagaattatcggaggttgctcttgattctggtacgaaggggaaagaccttaaggaaggttgggacaagatactttgcgtattttacataaaaatgattttttaggctttacagtgactagaaagcttttgttgctgctgttgtatagattcaacgttcaaatgtctcagcaaagctatgcaagtgggctccccttaaattaggaagatggcttgctgtgggagctattatatctaatgaaagaggtagaatatatctcgctgactgcgttggcgctaaagatgaaatttatacatggactgaagtttttatggtaaataaatgttattttcatttaagttacatttatgttattttcgaaaacgaatgaattgaaatcttgcttgtctaagtgtattgtttttttgtagtttaatgtcggcaaaggaataaattcattgtcttggaactcgaaatgcaaatatctccttacaacatgcaatgatgttaacactgttgcgatattaaaacacttctcaaa

SEQ ID NO: 29024 - DNA, 310 bp, Zea Mays
ccattgtttaacagtgaggacttctgacattacattatgccaggagatggagaaattgaacctgggaatgattcaacatgggacttcaaatcatttgaagctggagtcaatcatcttacgaagaataattgacgcacaaaaagatgatgagagtatgaagcacatacgtgagaagataatggctggaacatccaaatgtttcaaagaagacgatctaagtgtgatatggttcaataaccgcatagtggtgccaaagaatgaagaactctgccagcaaatcttagatgaagcacatcttagtcgctattct

SEQ ID NO: 29025 - DNA, 322 bp, Zea Mays
gaaggagaaacggcgctgcacaaatgctcggcatctattgaaggtagctggtgactggacaagaaactgacgtggttaatggagaggaattagtcacgagaaactgtcacgacgagtaacgggcgtgggacagctaggcactgagtgcggtgcggcagtccactgcctgggatgcgagcaggcggggaacacaaagcagcagtggcgggcgacgagaaggcagattgcggcgacagcgctgcctagacccgttcgaacagacgaacagagaagaagactggagcagcagtgggatccacctgccattgaaagaaagaaaaag

SEQ ID NO: 29026 - DNA, 327 bp, Zea Mays
accctgcactacaattacgtgaaagtattcacactgccagtgccggtcacacaagattgcccatgttcactacctcaagcgcccatcgccgcagccacctgcaaatgcaacaagcggctgcgcctactcaatcagcgccatccttgctcccaccggcatcagatggcccgcctagcgatacttacaccaaaaaaatgcagaatgtcagattttacggacaatcaaatttccaactaaatgttctcaaaatttaagtgcaggctgtgctcaacgataaaaaatgttatatgaaatcgagaaattaatcgctgttttattccttccgaa

SEQ ID NO: 29027 - DNA, 329 bp, Zea Mays
aatgatcatgtggaatgtgacgtggtccctatgcaagcatgtcaattgctgctaggccaaccttggttatatgatcgtgatgtctagatttttgaaagaaccaacaagttgtctttattgtataaaggagagcgaatctctttgcttcctttgacactagaagaaattatgaaggatgatctaaagaagaaacagcgagagagcgagaaccacttgagagtgatccacaaaaatagtaaggaagagtttccaaagccaaataaaactccacagcctctaataactaagacaccgggaaaagaaggattagtcatgatgactaggaaggg

SEQ ID NO: 29028 - DNA, 646 bp, Zea Mays
tttggacctaaaattgctctgtcaggttcatctaactgaacttcctccatggtacagtgctatcgggaggatcagatcgccagcgcaatggtcctcaccgccggtgacctgccgccgcaatttgggtttggctaagttggatagcactttgggtcacataaatatcctcgtcgtggataactccggccataaacaagtccggccaccgtactgtgtatgccgcggtggaaagttcgatgggctcgccggtaaaccatcgtcgcacggccttatgccacgtatccgagcaccccgtcgtatcatcgtgactccttactgctgtctcatcaacgccggtgaggttgccacggcgggggacacgaagtcgcgacgacagtgctcttccgtatctccggccacccgcacggcccggccaaattaagcgccaccggcgaagctgcctataaattgagcccccgggcagctgagttaggtcatcacgaagcccacacacccgttcttcccctcgattgcccaccatagccagagaattccccttttcccccaaattggtctccaccaccgtaaagcaccactccaccgtggcatgtccgttctggtaaggaaccatccaattcgcgcgttgttctcatgtccctgtatgctg

SEQ ID NO: 29029 - DNA, 274 bp, Zea Mays
aagggctggccgcggcgaggtgttcttcgcggtggcggagacttgatttgggggaagtttgaaattctagagctcggttgaacgattacgggtgggagtgggtgctaaggcttcacgatgacatagcgcagctaccccggccatcaatttatagagggcatcgacggtggccgggaatttgaagaaggacgcgcggcggtcggaggagaggaagggcacttgagcacgtgaatccgtgtccatcgtcgtggcaagctcaccggcgatgatctaa

SEQ ID NO: 29030 - DNA, 330 bp, Zea Mays
cggggcagggtgaaaatatccggggaggcgaatctagtcactagcgagaccggctgtcgtgtcccgctgcggtcagtcgcgctggcatcaccggagctcatcgttctctgactgtgacacgtaatgatcactcccccatgtcgtaagtgtcgtggcaagcagccggttatagtccatagaccagttccctctcgcacgccacggtgagcaagccactgtgaaatatcctggccgagtaaccgtgatctcaatcaaaaattcatgaccagttcaatcgggatttataaattgaagataccctctactctgcctctttgttacgtgtccaac

SEQ ID NO: 29031 - DNA, 709 bp, Zea Mays
atcgatcgagtcgagaagcatcaggggcatgtaagggtgttgaaacaagagagcagaggacgagattggacctggagtgcactggccacggaaaactgatttgggagaactgagcaattcggggtttctggtgaataattggaggcacgggtgggtgtgttgagtgcacaattacatagcggagccgagggtgtgctcaatttatagagcccttgagaggtggcctgtgaatttgagctcgcgcggtggtggtcggagagaaggaggtgcactggcgcaagcgattggtggcatttaccgtggcaagctcaacggcgatcaccggatgggctgagatgactcactgcggcgtggttaaagcaccgagtcacgtggcgcaaggttgcagggtggctaactccggcgagcctatccaaattggctgtgactcaggcgggtactgcggccggagtagaatagtggccggagtccatccacgaggtgatatttcgtaccccccttgccgttatccaactgcgccgagcacgaatcaccgcggcgggcgcgaatccgggcgcacggtcgccaacggtgagttctctgagctggcattctgctcaggacactgtaccattgaaaacccgatttagagtgactgacaggccgaattgcaatgcctaaatctcgaatttttgtgcaacaacttgtccatacatctgcagcaaacttg

SEQ ID NO: 29032 - DNA, 449 bp, Zea Mays
gttatgtcgaccttttgtccaaggatactctaagggtgtgcttgttgacgattggtgtcaccttccattgccctgtacctgtctccttggagactgaagagtatttgaccctaggggcaggagttggtattgtatggctataatgtgttgcaggcggaatgacataatgcagttgggatgaatgtggaaattgtgcatacggtgcatcccctgctctatgtacacagaaccagatggtccgggataaggtgccagacagttcgtctagactctagactgtccgacgtgagtcgacggatggtctgtgactaggccaaggagtccgggttatacctggactatctggtcatataagacaccatctaggtggcatgcacaaagatcagtgtggggtctgatggtctggtgaaggatgtcggacggtccatgaggtggccagacggtttgtg

SEQ ID NO: 29033 - DNA, 394 bp, Zea Mays
atctttggactggaattcaaccatgatctagtgagagtttggctatggctgctatagcaaggttgtagctagatcattagacaacaactttgctactggccgatccacaagttgccatgaaaaatcaggagaaaatcgatgccaaacttggtctgtcaggctaactgaagaacaatccgatggtacagtaaccggatagaatcccaagttcagccccctcgccaccgatgagccgcgcgcggattcgtgctatcgccaccgtgattcatgcacagatcagttggatagcgccgggggtcagtaaatatcacgccgtggaaacactccggccaccgtacccgagcagaccacgactgattcggatgagttcgccagagacagccacttcacggcc

SEQ ID NO: 29034 - DNA, 393 bp, Zea Mays
ttgaaatactcggttcatatgataaacatgtatgcgttcatgatttgggaggtaaatgcatggtgattgcgatttggagattagtggtttacgattcgtatgagttggtcggtgtgcgaaaatacttgtgaatatgtgtgtttataaaaatgttgtagtgtatgttgcgtctcggattgcaataataataggcaagccgacgtgtatgttgtatagcgggttatgtcgttgctctagttagccgaattgttagatgacttggttaagctcgtaatcacggtgaattgcttgttgtggtctaaatatgtatggttatggtcgtggatgaaaagtagtagtgttcatgtgatgtctaagttaaaatgcaaattagtatgtgaagggcgcatcgat

SEQ ID NO: 29035 - DNA, 305 bp, Zea Mays
cagaaatccgccgccaggggcgtctgcctacaacgatgctcggggcacgatagttggttaggggagattgtcatggcgctctagacgcgcgtgcattggtcctagggtcggatgactgaccggggtggcggggtgccgctgttgttcgctggaagaactgctccactaggaatcatcctgctcgtgtgggcagcctcattggcacattcagctccagtatggctgtctcctgtcgcttcactgtctcctcgccatgttttgagccgttcgcattggattccagggcctggtatcgggggaatcgg

SEQ ID NO: 29036 - DNA, 420 bp, Zea Mays
caggaaaatggataagggaactgccctacgtcgtttggagcctaagaacccaacctagtcgagctctgcatgggaacacccctttcttcatggtctatgggtcagaggcagtgctacccgctgatctcaagtttggggcaccaaggttgatcttcgaaagcatagcggaagccgaagctacgaggctggaggacattgacgtactcgaagaagaacggctgaacacagtaattcaatcagcacgataccagcaaactctaagacgctatcacgacaaagccgtgcgacaacgagcctttttagtgggagatctcatcctccgctgaattctaacgggggagagacgacacaagttgtcaccctcatgggaaggaccattcatagtagcagaagtcactcgaccgggatcatatcgcctca

SEQ ID NO: 29037 - DNA, 489 bp, Zea Mays
ctgatttgtaaatacctgccttgtctactctctcttaccatatgtatctaactcagatggtcaataccaggaggggtggtggaattgatttgcctcctaatcgacacactcgacggatatatagacaaccccagccacaaccagcagagatgaatcctcctaatcctccacccgacggagtcgacccactggttgcagctcagatgaggatgatgcagcaaatggcggacactatggcagatatgcgggctcagatgcagcaagaacgctaggagatgcgtcaggaaagagaagagatacgccaggagttacgccaggagcgagaagagatacaccaggagagaagagcgcaacagcagctgcaacaacaatttcagcaacaacagcaacaacaacaagtaccattgcctccaccaccaccactagttccacctcgtgataagcaccgggagtttatgagtcataagccgccgaccttcgccagctcgc

SEQ ID NO: 29038 - DNA, 364 bp, Zea Mays
aatctcgagcatcggtaccgtaagtgccgcgaagaatgtcaacagaaagacaaagatgttattaaacaattagttggcatactccgtgaaaacccgtactctgagcaccttaggagcatgggccatgttgagaaccttgatgactatcgtatcacattgaaccttgaccaaacgttgaaccagaagacatataacacgcctctcacttcagaggtcgctgctgtctagatcgaggggagcgaacggcgaggccagtttagcaagagcgttatgctacatgggaaggataggtcaagccacggcatccgctcataccatggatgctacgatgcactatcgtatccactgttcttccctagaggtg

SEQ ID NO: 29039 - DNA, 658 bp, Zea Mays
ttgtggctccgaaagcacgttaagacgtactcgatggccgaccggcagagtttgccgccctcggcctccaagcgggcgccaagaacctgatccagacgtcggaggcagtcaacagcggaatctagtattgggagcgcgtcggagatggacgctggccgcaccaatgccgggatgggactcatccccaacggtactagcgctgtgcttgcctcgctagcccaagcggcgaagcgctgagctccggcgcgttgctctgcccggaggtcgtcaagtgtcttcctcaacacctccactgcctgggggcccggggccgactgcgtcgcctacgctgcctggaactggcggacctgcccctccagcgcctgcactttcccttccagacgcttcactttctcctctgcctcgagctcaagctcatccagcagcttgttccgccttgcccacatctcctctctaaaggcgaggtccttctcctgccaagtgaggtcagtcgttcgtttcgctagggaggcttccctcgccttgaggtttccctcaacccgagcaatatcactggccttgtcggagagttcctgctgcagcttctgcagcttcgcctcagccgcagcttgcttgtcccgctgtttctccagcactgcattataagctttcagcttat

SEQ ID NO: 29040 - DNA, 484 bp, Zea Mays
aacaaagatcagtagatgcagtgaacctcgccgccggtgactcccgcgcctggattcgcgccggcgatgcgattcgtgcctatgggcgcgcggataacaactaggggtgaaaaagatcttaccgcaaatgaggtcgggtgctggccgtcgtacccacttgctctgtggccagccgaaatgatcctcgccggtgttggccgcttgccatttgtgcgccacgtagtctatggtgttaccacatcgcaatagaccacatcaggtagcctatccatcgccggtgacagtgcctcagtgaatgccacggtagagcgccgcggtgactcatcccctctcctcgaccgccagcttctattcttaaattcggtgccaccattcatggactctataaattgatgccctagtgagctccgttaggttattacacacccagtacactagtcctcgcctccgattagtcattgtagctcgcgaatttcaagtttcc

SEQ ID NO: 29041 - DNA, 407 bp, Zea Mays
cagattgccctgctgcttgattcttaaattggtgatagtggaactgtcttatgcaattatgaattgtgataagtagaggctgaggaaatagtcccaatttttgcagaaatttgactgttactctaggttgttttgtgtgggcgcacttgaaattggcatgagtgcaattaaatatacatgttgtgccattttgttcagaagccttgtactatctagagcatctgatgtcggcacgccattcataaaagttctttgtgtttgcatgtgttccaagtgaaatacatcgcaatgccttctctctgttttgcattgcaatatgatatatagcttgatggatctgcagtactgtcaaacaaataaacataatgtacattttttccatttcatgctatactattatctttcca

SEQ ID NO: 29042 - DNA, 280 bp, Zea Mays
gtagttcaaacctaccctagaaaccctaaatggaaatcaaagaaaggaaaatggataatgtgaattaatgttatctcaaaacccttgtagtctgtccactaaaaatgtatcaaggtaataccaatccactatgttatcctcactgaaaacccaagcctaaggagtattaaacctaacccactggaagccccgcatgactaagaactctaagttacttcttgacttagtttcttttacaaaatgttgttaaatcatgcataatcatgacatacatgttcat

SEQ ID NO: 29043 - DNA, 424 bp, Zea Mays
ggtagcactaagatgtatcaggatttgaagcagaagtactggtggtatgggctgaaaagagatgtggctgcacacgtggctaagtgtgatgtgtgtcaaagagttaaggctgaacatcaaagactagctggactaccgcacctgcttaagatacccgagtggaaatggtaagaaattagcatggatttcattgttggactaccccgcactcttgcagggtatgactccatttgggtgattgtggacagactgacaaaggtgactcacttcatacctgtgagaactaattacacgggagccaagctagcagaattgtatatgactcggatagtttgtctacatggggtgcctaagaagatcgtgttagaccgaggatcacagtttacttctcggttttggaagaagttgcacgagtgcttggaca

SEQ ID NO: 29044 - DNA, 292 bp, Zea Mays
tgccagtcccgtccacacgaaggcgaccaccttccacctcaccacgatgacgcctatcacttcacgacaactcactcaccctccgcttcgccaccgcccttcgccgcctatgcccaacactcgcacccggaggatcgtcatcacccattacgcgcggtgaggcctccatcgtagccacgtccaatgccgcaaaataatccaaatcctcatccgaagactcctctgtccacacaatcgaactcccagaatcatcagactcaaaacacttagacacagaatcatcagaatcatc

SEQ ID NO: 29045 - DNA, 454 bp, Zea Mays
cttaaggggttaagcattgttgttatgcaatgttgagagaaaactaggccgaaagttgggctgtcagtcagtctaaaacatgaattatggtatttagtggcatgggatggactttgggggtcattttgaagatgattccgtggatgtttgagtatggttaccacagtcggtttatagctggatcattagacaacaacttttctactggccgatcaacaacttgccatgtaaatttaggagaaaatcaatgccaaacttggtctgtcaggttaactgaagaacaatccgatggtacagtaaccggataggatcaggttcaagtccctcgccgctgacgagccacttgcggattcatgctttcgccgtcgtgattcgcgctcagatcagttggatagcgccaggggtcagtaaatatcacgccgtggaaacactccagccattattttactctgac

SEQ ID NO: 29046 - DNA, 339 bp, Zea Mays
gtctaatgttgctcatcatgatggttgctatgatcgaaatgtcttacctatgcgtcatgatgttgttgttgattctcatgccatgtttgcatcgtctagctcgtcatatgttcttggtaggagtagacctaggcgccatgttcatcatgtttctcatgcgcctagaaatgcatttaatggtccaactatgctttatcatacttatgatgcctcatatgagctactttgtaaaaatgataaagttgttgctataaatgtggggcctaaatgcaagggaggtaagacttgcatttgggttccaaaatcttatgtgactaaccttgtaggacccaacaagag

SEQ ID NO: 29047 - DNA, 581 bp, Zea Mays
cgtggggccacgcggtcagacctctctccaacagaatcgcccgcagtcctcggatcgaccggcgccgacgcgagctcctcatccatgaccgcccggatcctgcagcctcgttgtgcctataaaaagaatcggttgtgccccgttcctggtgaccgacccaatcgcgtagacgactagagccttgacgtcgaaaatagagagagaggcagggaaggagagacgggtggagccgttgttggcttcgtgccagatctcggtttgtcgccaggatcaaggtggtcgcgaccttatcatcggcaggtgagtctcccagggttgtcgctttctccgttccttttcgtacggtcgcggttgacgaggactcgcttggtggttgtggtcggtctaagcatcgaccgcctaggtgtatcggtcgcccctagtactggcttgcgaggagagaggataatgggcgtgaggtaaaaaatggactaggaccgtccaattgataataagcgtcttagattagattagcttaccccttcgcctggatggaaccccgtccgtcgattccagatcgggcggatggaaatcgatcgcgt

SEQ ID NO: 29048 - DNA, 674 bp, Zea Mays
aacgggcagggcaagccctcggatgaggaaaggcacaaagatgacagcttcgtaggtgtcctctgtcagaacggtcaccccgagccagatttggcaagaacacaactctttcggcggcaaaaccccagtttccataagatgcaagagatcagactcagaaatgatagacatgtggttaccggcaaatggaagctggctattgggaccaatgggcagaatgattggagcagcagcactctatctcttcctcttgggggccatcgcaatctctcgggcggagtgggcaggctcgagaactcagaaaacagagaagcggcggaggagaaaagtaagatttagggttcggaactcaagaagacatgtcggtataattataagttagctccataagtcgggcgcaaagagtgctagatcataactcggaaaagcaaggatcacaatcatcactcgggcattacctctaaaatgccggcaagacttcaagcacacgaacaaaaagcatgcaacagtggttaagtgaaaaaactgcattctttataggggagttcatcacaaacttgaagccgactcattatgagtcggcctcttccacccctggtcattacattacattacattacattacactactctactacttacactacgttatactaatactactctaattcaca

SEQ ID NO: 29049 - DNA, 327 bp, Zea Mays
agccacgcctgcgcacgcctcaagcgtcggtcggaacgaccatgcgcccacacccatgccttcgcctttaagatagcccaacccctcggtctcgctctcctgcacgcctttcaccctcaccaaggcctaaacgccggtgttcgcctaagacccaagcccagtgccacccacaagcttgctcgagtctcggccaccgtggttcaaccaacatagcccctctccactcagtcaagcttcaccattggcttccccagaggccgttgaagctccccagaccctcagactgaacactacctcgccggagaagccaaatcacacgctccggac

SEQ ID NO: 29050 - DNA, 368 bp, Zea Mays
gaaaaatatgaaatgcaacatgtttctgggagtgagatgcaacaggaaatagggtgcacgagattaccagtgacttagctctatgcaagctctatgcagttcaagcaagtatgtagcatgcacgtcgatagctctgtgcagccaggcgatgtaggtgatgccaaacaaacaactgcacaatgttagggtatgtacagtggtgtttaatatgggatggttgtttcagccatctctttggcttacacattagtctcttgtttagaaaatcctaactttcatttcctagttgagcccgaggtccacatatgctttgaacctacgcgtctttgttttgtaatcttcatcgattaatctgaggaatggtgatc

SEQ ID NO: 29051 - DNA, 320 bp, Zea Mays
tagatccaagcttctctctgggagcaaatttaaaaacgcatgggttaaaaggcacactttttcagtagtgaatctgagttatacatgtaatcacctaatgcgctttccgtgagatgcacatggtcacagacatgtgttctgcccttctgggtgctcagtggccgaccttctggtgtttcacgacctgtgtgtgagaagtatcttcttagtgcaatgcagttgaagctgttttctccctccgtaggtttttttatagttaaagcaagattgctggctacaattgcctaaccttgctaaattccaacattcatgaacataga

SEQ ID NO: 29052 - DNA, 390 bp, Zea Mays
cacgatcggacgcacgcgattattacgccgtaatttcgggacccatttacggttacgaaacagatatacgatttacgctaaatttcgtactcatttacgctattttggttcatgttttacgctaaaatctgtccgagtcagaacccgatcacgatgggacgcgcgagatttttacgccgtaattttcgggccgcattcgccgtttcaaaacagatctacgatttacgctaaaatttgtaatcatttacgctgtttttgttcacgttttacgctaaaatctgtccaagtcagaacccgtgcccgatgggacgcacgctggtacggaacgtggctatacctggctggggcttcctgatactaatggaagcccagggcttccattaccatcgc

SEQ ID NO: 29053 - DNA, 461 bp, Zea Mays
tggagcaagtcgcaagagaggttgagcagcctatggagataatggatcaacctctagaggtcccaaaaaatgcgagagtttagtaaggagacgttgaagatcattttttctaaaccttttctatgagtacaaggtcgatgaatattctagttctaattcataatactccatgcatactaagatcagtactactccaactatctaattccattgtgccactactaatccttttctagatattccatgcagctagcttggccatagcatcagccaccaatgttgtctcgcaagtgatttgcaaagagagtcgtccttgtctttctagagtatttttcttcatgtgtggaatcttgaacttgtttgaaccatgcactttcattgtctccttccatactagttgaagtgtaagatagattttattcgctttgcgtggagaatactcatggaatgcctagtttatg

SEQ ID NO: 29054 - DNA, 742 bp, Zea Mays
gccacaaacaatgtttcatccaagccttggttatgcaccacagttgcatacctcacctcatcgaactccttcagatattcctccaccgaccccttctggtaaaccgtcatcaggttgttcatcgcctgcgaatattcatccgccccaaacttcttcatcacagcatccacaaactcctcccacgttactaatccatactgcaacttaaaaatctaaaaccatcgtgaagcatttccctccatatgcagtgaggctgatgttacccagacagcttcagggactcgatacatcgcgaaataatcagcacacttcctcaaccaaatcttcggctccaatccatcaaacctagggaaggtccacttcggtatagatactggtggatactcccccgcatctccgccaccattcccacctccccgatcgcgaacaggagaataaccgcgataccttcgattggcgttcggctcgtgatgtcaaggttccccgcgagctcgctcctccatcaccgattctgaaccttccatgttccgcgccatccactcgagtcggatctcggccacctctcgtcctgtcttctccacttgctgcgccaaatggacccgctcttctgccgccttctgagccacagccgccgccaattccgactgcatcattagcttctgttgtacctcctccactccaacgaccttctccgtcagccgatcgatcttcgccatcatccgatcccaccgatccccgtctt

SEQ ID NO: 29055 - DNA, 430 bp, Zea Mays
ccggggtggaaggcctcaatggtcaacatggctgggagaacaactctggtaaaagcagtgttaactgctatccctatctatcacttaattgctcttcaatgtcccaagtgggtcatcaaggccattgataaaattcggagagggtttctttggaaagaccgtaaagatgtcaaaggaggccactgtatggtcagttgggcaaaggtttgcaggccatttgaccttggagcgctaggtctgcacaatttagaggtccttggttgggttcttaatatgaggtggctttggatgaagaaaactcaaccgaatcctatgtgggctgatttgaaaattagagtacaccccaatgctgcagccatgtttgcatgttcagtggtttctttggcaggagacggatcccaaacctccttttggacggatcgctggctcc

SEQ ID NO: 29056 - DNA, 407 bp, Zea Mays
tttgatactatgtatcctatgtggcagtctcggatcttggtatatcaaaccctgcaccgggagtagccttagttctctctttttgcgatacagtcctaggagctggagcaacatattcaggatcaataagctattctgtcgatttggatgccttttcccctaactgtacaactataactgcttttattgtgatacccgagtatattgtgatacccaattgaggtggttttaacgtttagagcaactccaatagcctatttaaaacaacgtactcggtaaaaaaagaaaaaaatctcgtagaaactcgttccaatatactcgccttcttcctcgcctcttcatcccgctcgccattgcctgcccttcgctcggtacatttgccgaggttgtaggactcgccatatccc

SEQ ID NO: 29057 - DNA, 420 bp, Zea Mays
agaaaaccacacagactctcctaggtctctataaattctcggctgccgcacctccccttgtcaaatcccaagcccaatcccgcggaggaagccacctcgtcgccatggccggagggaaggagagagaaccgagagattggggatgaatgccgccatgggatatggccacgacgtctccctgttcagtgtacgaggggtggtggcttgggaggtctctccgccgcctgtgcgtggttcagtcaactcgggcttggcgcgggtgccgcgcgagagctaagacttgttcatccacgtttgtcgccgtagtgcgtccgcttctcagctaggccttctctaaccattgcttaatcaccggtaagatgccctaaacgtattcgtggtaccataatcctcgtgttctagtcactaattggtgctggg

SEQ ID NO: 29058 - DNA, 415 bp, Zea Mays
ggcccttgggaagctttccaaaccgaataattgtttaatgaacacatccaaggttgtagcatgagatgagggaaagtttcgtgcttgtatttggcctagtttgagttattatgaggtgttattgtaacaataatgtactcatggggctactagctccttagaacctcatatggctcactagcgatgaccttcacgcttggtgcagcatcatgtgtatgaggtatcaagagacgccttggtattcatggcagatggctctaaggggacaagaatagtcaagccacaatatgtagactacgaggttgttgcacttggccttgcttggtagaaaccttatgtcgagagttatactatgactgggggaagctttggtgattgggagcatatccttagttcatctctatgcaaactagat

SEQ ID NO: 29059 - DNA, 291 bp, Zea Mays
aaagaggctgaggagaaagttgtcctgatccgcagaagattacttgaagctcagagtcagcagaagagttatgcggacaacaggcggagagaactcagatttgaggaaggagactttgtctacctcaaggtctccccgatgcgtggtgtcagaaggttccaagtaaaaggaaagctagcaccgcgattcgtcggtccctatcccatcattggcagagtgggacccacagcataccgtcttgaactaccagaatccatgtctgacatccacaatgtgtttcacgtatcccag

SEQ ID NO: 29060 - DNA, 335 bp, Zea Mays
acttcttcaaaacttcaccgatcatttcgtatagaggcaatcgaattctcgctctgaagaagctcttaaacgtaatgacctcatcatcttttggctcgggaactacttcgtacctagagaaccgtatcaattcatcatcatctttcccaaaatatcccaactttttcattaaaaccaaatcttctgccttaattgtggattttccgaattcgatatggcaggcttgctcggacttaaaatgccatcgtcttcttcacaatcactaccagcttcggcaatagcatcatccttcttcgagatagctactcctccctcttgagcagccaacccagaac

SEQ ID NO: 29061 - DNA, 406 bp, Zea Mays
gcgggtgtgaagcttgccgccaccgttgacccatgatatcatcaccgttggagccttgctgtcgggggggcttcaccaggcttcgttgatcatgagcgttgctccgcctagggagattacgctccggccgccgggaattgttcaccggagcaactcccccaccgtgaaaagaccctgccgcaaaccaccttttgtgcgtcgccatatctggtaaggcccttctcatctagttcgtgaagccatccttttcgcgtatcaccaagcagggttcgtagtagggcttcgggtgagtgttgggatttctccggcgaggccccactgtaatggctggcggtgccgctgcctggcagcagcgtggggaggagaaggcgtcggggcattgatgttgtgattgatggctccagat

SEQ ID NO: 29062 - DNA, 424 bp, Zea Mays
tggctgccgctgatgttggcgtcctggtcgtgcgacgtcgcgttgttgccgctattcttgacgtggtggtgctggtgcatggacatggacgacagctcggtggtgctcatggactcatggtggtgagctcgggtggtactcttggggctggagttgggcgacactccctggccctgcatcaccctcttcttcaggtacgagttccagtattttgtcggcaggtgtagtgtaaagtatgctgatgtagtgatgtatgatgggaaggagtaacttgaacttatttggataatatgaactatctaatatcttttgtatctgtgaacttgtggattatgcctaaaataggatagcatatatgttgctcaaattttctgaatttgattgttttgctggattcactaaaggtcggttaatttggttagat

SEQ ID NO: 29063 - DNA, 942 bp, Zea Mays
tgctgaagcaatgaaatgactagatggagatggaactactttattgtcgagaagtgaagaacagatacaaacctgaattgctcccataaatttttcgggagaaaattccacagagtatacttggtattggatatccggttgtcacagtaggaataccggcacgaatcatcattgatatagacaaaacgtttcattgtttcccaagatgtcactattgtgccattgcaagctttgaatcacatgtgcaaccgataatttttgccaaaaaacaagttagtagacatagtacatgtatagattcgttattagatccgatagccagataacttaaattagggttcggatgctcagtttttgcacagaatgacagggttaagggcaggcatacctgtggttgctcgtcgccagcaaagggcccgacgattcgacgaagatctgggcagttccgggtaatgcggtggcggtcgcttgcacagttgcactgatgtcctgtccccgtacggtcgagaaacctagcccggcgtaaacaaacggttggatcgcgtgggagaaaaaacagcagcaaacaggtacaggtgtgggtgtggctagagatgtaaggcctagcttggcaccaaatgagaggaaaaacaaggctaccaagggattaaatatatgtcattgttttctctcacttagattggtagtcacaaaatccaaaggaatttgtcgggaccaataattagtgacacccaaattatccctaaaaacacactcagaaaaatacagactaaactcccgatgggtgacagccgagccacctataaaaaccgagacatcttttcgagcgtctcccaccacgagcagggctccgcctcgtccgaggccgccgccgctcagatcgtctcgcccgagccagcctcagcagataagacagggggcgcccaaaaacagacagaggac

SEQ ID NO: 29064 - DNA, 685 bp, Zea Mays
ccatgcacccaaactggcctcggctctctaccaaatcaaaggacaagctacagggctcggacacgccccccgccgatcggccacgtcgctacagggatcgggcatcctctcagaggagaaggccattccatcagccacgccgctacagggctcggacaggcccccaccgatcggccgcgccgctacagggctcgaacacgcctcccccgatcaagccacaacaatagcacagtgcccccttgtacacccgggcctcctccttgcgcctataaaagggagggcccggggccttcactggggagaggaaagaggggaacaagaggaagaacacacgacactccaccgctccttcctcactcaccaccgatattggcacttgcttcaatcacacaccagagacttgggacacgttccctctctcgaccagcttgtacccctgctataagcacctaggtgcaagataatacaagtctcctcccccgctggatgtagggccttcttttacccgaaccaggataaatcttgtgtgatctcttgcatcgaccatccgggacaaggacacgcggcaaaaattcgctagtcggacgagacccccgggttcaaaacaccgacaaataataataatagtagtagtagtagtcacgtactccaggctcttcatgttaattgttaattgaacttatgt

SEQ ID NO: 29065 - DNA, 598 bp, Zea Mays
agcagggcaatccaaaccagcttcctgaccctcaagaccgcgctccaaggtcgatgaggcgcggaacgctgcccgggatgaccctaacccggcatcgagcacaccagcacaaacatccatcacgccaccatctgccggttctgataacagatcttctggaaccatgtcttcaagagtttgatcaaagttcgccagagataattcttgcagaccaatgagggcatacaaggcaggagaaggaacaccactactttccccactagctatgtaacgccggctgttcttccgaatcagagggatttcgtcctcttcttcatcatcctcatcaacaacatggacagcacacccattggggtcagcgtcagacggatcacacccattgggatcagcttcagtaaattcaggcactggcacttcctcagcaacaggagcagaaggaccagcaccctgatccaagctagacacccgacgaagacgtctcttcttatttttctccccctcagcaggaaaagaggcttgatcggctcggcgagaacgttttggacgaacattgacagacttttgagcgtccaaagctttgtcagcctcagggatgggc

SEQ ID NO: 29066 - DNA, 1000 bp, Zea Mays
cagaattaaactgaaagaagttagtgagactttgccagaagcatctcagaacggcgattctagcaatgaatgtgctttttcaaatgttagagataaatggtagagtataccagttgtccctcctatggctctttgtattctactttccatctataaaatggaacattgtgacagtgatcacaattagaaaacattgtgttatttcaagataattgcataacacaaaactagggatattaagtgtggattcttaatcttacgcacttttttctgtcagtgttattgtaaatttatatgctggtatatggtaacaccccccccccccccccccaaaaaaaaaaaaaactaaacacttattcctcatttgttcatgtttttagtggttttatcaacatatttgtattaactgttcgtgttgctttagtatttgcttagtagcattattgacttctctgctttatgatctgatagctgctttatttctttgctgcatcattttaccagtaccacatctgttcattatgtcgttatcctgtttctgaagctcaaccaaaaagcttgctgcccaacaccacttggttacttgcaatgttaatgggcatggagcggcccatgctgacaatggtatcaaaattgcggctcaagcccatgacaaggaagtcaagccttctattgtccgaaaaatggaacaatatgaagggacacaagcatcattggttggatctcatgcagttcttggaaagggcaaccagaacacggtggacactgcagcatcagggaaaaataattttggtggcgaactttgctgttcttcatcagatccaatccatgtgccctctcctggttctaaatcagctggaacttttggagccataaagcgtgaagttggagtagttggtgctaggcaaaggccagctgatagtgcagcaatatacacatctacttctaatggcttagtcaaagtggtatcagcaccaaagggtaataatccttcaaaaga

SEQ ID NO: 29067 - DNA, 309 bp, Zea Mays
ctaaccaggagaaggttctctatgcttctggtcgtctgactggtcctgctgcttattggtgggattcttatgttgctgcccatgatgctgctgacactattacttgggtggaattcaccatacagttcagaaactaccacattcctgctgggctgatgaaaattaaaaagaaggaatttctgtcattaaagcaaggcaacatgtctatcaatgagtaccgtgacagattcattcagctatcaagatatgctcctatgaggtggctgatgatgagagaaagcaagagcacttcatagaaggactcaatgg

SEQ ID NO: 29068 - DNA, 351 bp, Zea Mays
ggcggatgcaggcaagctggcgacggcgagtagagtcggggcgtgcgagcagtggacgagcggaacgggtgggtacagatagattgaactgggactaggagaattggcacaccttattatatagagcttagctagccgttgtcagttgccacgcacgcgaatagatagagacccatagataccggcatcgatctagacacggggacatgcatacgcgctagctccaggagccctgtgcatgcatgagtattgagtagtatagtatgtttcggaccaggcagtgaaacttaaaaagttatacatggattaattagtctaattaagtttaacaggccaaagcccaaataaaac

SEQ ID NO: 29069 - DNA, 453 bp, Zea Mays
ccggaccgacacaataatgtaccagaccgggtgcgcaacaccttacgaacacacccagatgcgcgaaggcagtcaaccttatcatacaaactacagttacacgcgtacagcgagggcatcacaccttacataggctcaaccttcggaatgatccccatctccctatagttaaatagcattatcctcagctcctcaccctcaaaaagccttcacaactccccctcacccatactcgccccaaccggcgaggacaacaattcttgcctaccagccctgcccacacgaagtcgaccaccatccaattcactcactctacgtttcgccaccgcccttcgccgcctacgcccaacattcgaaccatgcaaaatttcagcatccgtaacacgcggagaagcctccgcctcaaccacatccaaggccgcaaaataatctaagccttcatccgaagactct

SEQ ID NO: 29070 - DNA, 324 bp, Zea Mays
cacgaagcggtgggagacctggtggtaagtctttgggaaagacatcagcgtactcctgcaaaaggttagcaaccgcagggggaatagccaaagatggtgcatcatcaagtgaaatgaggacactagagcatacaagtgcatagcatggcaaatgagcaccgtgtagatcatcaaaatcagcacgtgtagcaagtaaacaggagcattcaacttgatttcagaaggaacagagggtgatggatcaagttgtttagcagttgtagcagctcgggaaagatcatctttaacaatttgttcaggtgtcattggacgtataattatttt

SEQ ID NO: 29071 - DNA, 489 bp, Zea Mays
aaataacccagacacagcgcacaattatataggacagcgggtttgtttccagaaagtctgaggtttcttaagtaaaatgtccctgtgaagggggtatcgcttgatctcagccgtcggattaggaaccagcgaatctgattagatctacgaatcacgcgactccgcacccgacatcaactgtccgatcgcaagcctacgctctggattcaaaatagcctaaaccaacccattgcccgtgcgatcagaatcttatggtccagatctaaatcgcgaaggggtatcctacaatctaatcctgaccgcggagtccaggatggacggtcgagggcagtcttccccaactcgaccccggcagtggcggagcaccagccccggcacggcggcgccatggccgggacattccaaagcacagtaccgcgcgcaacgcacggatccgagatgctctaatcgatgccctaaacaaaatgaatgcgatgaacgtgaacttac

SEQ ID NO: 29072 - DNA, 397 bp, Zea Mays
gcggtgttccaaatagataaatcaagtaatgtggtagttgtcaagcatgatagaggttgagtcacttaggttataaattgatgctcgacatgtgaggtctcctaaaatatggtgttttaagtgacttgtgtgttgttcagtttaagttgagaaaatggttaagaaaaactaattaaccttctcccacctatgtttttgagttgcgaagtctaaaatactttgctaagtgttataccggttaaccaacttgttagatgactttagttaagctcgtggtcacgatgatttgcttgttgtagtctaaatacgtatggttgtggtcgcggatgaaaagtattagtgctcatgtgaggtctaagttaaaatgcaaattatggtgtgaacagacttcgatatc

SEQ ID NO: 29073 - DNA, 352 bp, Zea Mays
attcggcccaacctgccttgctcccgcatctagttcgtgtttgcgctctcagtctagtagcctagccagcctcacgttcgccagcggtcgcttataggtggggcccaccagtcagggtctctgtccgcctcccacacccaccgcatctgtgcctcagcatttgtgcccgtgtgctcgcacgttcacttccctcatgcccccactcatttgcccgcaacgacgcttacattctaatcaaagtggtgttgctgttttcccctgccacgctgtcgttagcccccagccaccaccaccatcactattgaccctcccaagagttactctgcaagcgattaatcgccaccaacgccgc

SEQ ID NO: 29074 - DNA, 450 bp, Zea Mays
aagaaggttactggtgctcgagattagtggctttcaccgtggcaagctccccggcgaccaccggacatgcaagacgcaattcacagcgacgtggtacaacgcttgagcacgtggcgcacagcggtaagtggccaacgacggcgaggtctatctcggttgatcggcgagcaagtgggtacggtgaaactcatccgcgaccgagcccgagcctatctggtgccaagattcttactccgtcgtgattatcccctcaccagagagcacgaatcgcggcgacaacgcaaatcacggcgcaaagatcaccggcgacgaggggggctgaacttgtgatctgtttcagttactgtaccatggtggttaccatcagagtgtatgacagaccattttgttggactcggatctcgatttttcatgtgatgacttgctaatccaccagtaacaaagttgtta

SEQ ID NO: 29075 - DNA, 295 bp, Zea Mays
cgggtaaacggggatggggacggggaagcattcaacgaccataatttcttccctccgtcccgacgttcagccacggtggcgctttggccccgcgacggagaacatgtcggcgcccacctccctcaagcttctggtgctcgattgaccacacaacccggtgctaattgatcataaggacaaagtaaaccatgggagggctaattaacgaggatcgaagtaggaagatcactagccacgcgagcggcgatgccgtggcaccggacttcctctggtgaagaatccccgaggctctaga

SEQ ID NO: 29076 - DNA, 471 bp, Zea Mays
tcggcgtcgcggcagctcgggttgaaattggggttggggattgaggctacagggccgtaagaagttgtgttttcattgcacacaatcaatttgggcgaagatggagagggcagcgcgaatttgacttcgactgagcttcactggtggagatgaaagcacctcaccgtggctccctgctcaatttataggcacgacggcccaacagatgagccctggccaaggatagtagcgcaagcgcatgcctaccacgttggaaagaggtacagtgagggagatggaggcatgggcgacaccgcgacaaaattcaatggtcgcggtggctgccggtgaagtctccggctggactcagggaacggtgccacgtatgcgctgtttaactccgactctatccatttcctatcgcgcacgaacccggacggcggcggcacggattttggcgcaaagaggtcgccggcggtgagcaagctgcgc

SEQ ID NO: 29077 - DNA, 275 bp, Zea Mays
actgcatcctgagtggttagcaaatcctgttattgtactaaaaaagaataaagtggattggcgcatgtgtgtcgactatacggatctcaacaaacactatccgaaggatcccttcagacttcctagaatagatcaggtggtagattcgactgtcggatgctctatgttgtccttcctgaactgcttggcaaaagaagacgaggaaaaaactgcattcattaccccgtttggagctttctgctatacctccatgtcgtttggcctcaagaacgctg

SEQ ID NO: 29078 - DNA, 348 bp, Zea Mays
gccgaaaccagcccaatacagcccacgcccaggcgaaacgcgccgtgctcgcgcccgcgttggcggttttacacagaagacctcagctttttgaataagcagtaaataacccagagtactatttgtttgtctcactgacatttgcaccgagacccctgaagttctattccttcgcaacaccagatccgcgatggtggtcggcgacgagcacgtctccagtgagcctctactggccggaatatgccaatatcggacccctaacttgaccggcaccgaattctaccctcggcgacactaacccctcaatcaattgcactaatccgggccggagcacgcctgttcacgacg

SEQ ID NO: 29079 - DNA, 503 bp, Zea Mays
cctccacccggcgggcctcttgatgccactaccggtgccgcagggtgtgtggacggacgtcgcgcttgactttgtggaggccttgccgcgcgtccgcgggaagtctgtgatcctcacagtggtggatcgcctgagcaagtattgccactccatcccgttggcacatccctactcggcagagtccgtcgcccaagcattcttcgccgaagtcgtccgcctccatggggtcccacagtccatggtctccgacagggacccggtcttcacgtctctattttggcaggagcttatgcggctaatgggtaccaaactccacatgacgacagcattccatcctcagtcggacggacagtccgagtcggccaaccgcgtcatcatcatgtacctaaggtgccttacgggcgatcggccacgccaatggctccgatggctgccgtgggcggagtacttgttcaacaccgcataccagtcctcactgcgggagacgccattccgcgtcgtct

SEQ ID NO: 29080 - DNA, 463 bp, Zea Mays
gtgggaatggatcatctttggtcattgtggtactctagcaaggggatcactagagatgtctggcaaggtgtcaagtgggttcctgagatggttagtgttggaggtcgccttctctcgaaggtcctaaaaacactcattaactattctgtttttgatacaaatgtattcaagctttgctccgggacgatcagggatacatcccagtatttcttcgtctacaccaccaaagagtatagaacgaggctgatagccaccttctatggcgaactccctaaactcatatatgtcttcttcacttagctcctgaccacccaaatgcctcaagtcgaaggtattgtcttccattgaagtctcccctgctttctttgtcttagaagacaaagccttagatgtaacatccttttgcttttgaaccttagtagcggttgcatcttcaacctctttcccaggcgctacatctgca

SEQ ID NO: 29081 - DNA, 373 bp, Zea Mays
acttcacagcctatgctacgacacctctgaccctcctcgtcgccctcacggcggtgtggctccgggtacagctcacgtcgcggctctgttccgcccgcccttcttagatgggtcgcgacgttcacaggcagatttcactacagcagccaagtacttatttgagcttatcagacggactcttctgccgaggatgggatacagggaggctaccacacatatccaactctggctccttggtgccctagtctctcactctgagtttgacgtcatggatttccttatctgtgagatcgaggacaccattttggatggcattcgtgctcgtcgacaattgccatatgctcactacctgtgtcacatttttgcgcagctg

SEQ ID NO: 29082 - DNA, 367 bp, Zea Mays
taaagtgctagcaacataacaagtcaaacaagaccatttggtgtttcatccatacaaattacttatctgtgttccatgatgaagtctgcacttcattggcctaatgtttaacacttgataaagcatacatagacatagatatgcatctaattgcacaagtttcatggtgcatccagatagttggctgcaagcaatgtactagcaacataatttattgaaacactattatggcatgccattttaattagcatagacagagcaaggtatgaggtatgagctatccaaatcgagaggcaataagagatgtctttgctgcaactccccttgagtgcaaataaaacctcacaacactaatggtggatcctca

SEQ ID NO: 29083 - DNA, 343 bp, Zea Mays
cagcatctagcacgttagccattctcctcctcttgggagttgcggtagaagttttttgcaccttcggcaaacatgtcgttctcattggactcaggatttctggtatttttgtcactttttccatctgtggctctttggccttattatcttcagccttggctggctcaactgtagtcatcttcggtactacactcggctctacagccctctgcataattgaaacactctcttttgcttctgcagctgaagaagtacctttgccaagttcaggaatcacggctggttcaaggtaacgcgccgtgtgagtcagaaccttcatcttcttgcccttcggctcagctgt

SEQ ID NO: 29084 - DNA, 598 bp, Zea Mays
gggaggggagaagacggcggcggcgccatcaaaacgccattgatggcgcactactagaaaaccccccatgtagctatgcttttttggacaataggcacgctttaattcgtctctatatgaatgtactcacactttccaaaaacgtgttagaagcgtcttcgtatggaccgtatcagactttgtagaaacgattattgtaagcgtatatattagatgaatagacgtttcatagacacgttagatgcatgtttagacacattgatacgcttttatagatgcgcatataacatgtgtctattattgttacgtcatatagtaacgtttcattatgtgtgaaaaaatatagatacgatattatagatacattcataattcatgtgtattactatagtcacgttttatagtgacgctttattgcgcattaaggagtatagagacgatatagtaggtgacacgaatgatgacatggcaggtgatgtggataggtgacatggcaggtgatgtggaaaaatgatgtggcaggtgatgtggaaaggtgacgtgtcagctgaactggcgagtgacacattttatagtaatgccaaaacgcgtgttaaca

SEQ ID NO: 29085 - DNA, 328 bp, Zea Mays
cgggtgcactccgccacccggccggagatccactctccgacatttggcgcgccaggtaggggcctaggcattaggttttcgccagattccttgcccaagcatgatggtgcagatcgtagagcaccgcgccaagacttcggtagactttgcggtggagggagaagctgcttcctccacaccgcaggctcccagtcgcccggcacaagtcactcctgctgtgcatgccgcacggcagcacacggtagtgcaaacatccaggactccatcaagagcgtctccgggggcgttgtcagcagccagggagttgttgcgacaccctccaaactcc

SEQ ID NO: 29086 - DNA, 403 bp, Zea Mays
cggcttcccgaaatagttgctcggaggtagtcggcgctttctgcagtatggcacggacgaaggccgagtcattagatccccggtagaagtcctcgatcaccgctgcttctgcgacctcggggatacgattcctcatggtctgaaatcttttgaggtatgaccagagagtctaattccctcagcgtttgatggatttgaggtcccatggctgcgccgatttgtcggagagagattggaagttggcagtgaagcgctgactgaaatcactccagtcatcgatgcagtgtcggggtaggtgtcgcagccattgtagttcatcctgcccaacaacgataggcaagtatgcggtcatcacgtctttggttgccccagcggctcgggcggcggtggtgtagacagccag

SEQ ID NO: 29087 - DNA, 533 bp, Zea Mays
gcccagcaaatcggtctctcacacgctctgatgaagatctgatagtacaataactaaatatgatattaggttctgcccccctcgccgccggcgaccccgcgctcggatttgcgctggcgccacgattcgtgcccggtggagtgcagataactgctcggggtatgtaatatcgcgttgaggatgaacttaggccactattccaccctgttgttgtgcccctttgcccggcgacgtggcctcgcgaccatcactgtcgtgtcgctgttcctcgcggttatgccacaccgtcagccatgttaccacatcgcagttgatcacaatacacagcccatctatcgcctaaggtcttgccacggtaacagccacggtcatccacgcagtgactcagtccctcgctccggccaccatgcgtcttctcaagaattagccaccaccgccaatggacactataaattggtgtcccagcctgctccgttaagtaattgtgcatccagtaaactagtcctcacctccaatcgtctcctacaactccc

SEQ ID NO: 29088 - DNA, 311 bp, Zea Mays
ttatcacccaggaaaagccaatgtggtagtagatgccttgagtcaggatggattctcgcattgacaccttgtgtgatgagttgagcaagatgaagattgaagtaattccttctggtgctttgtctcacatttccgttgagccagctttgcaagaccagatcatcatggcccagctcagtgaaaagggagtacagattatcaaggagaacctccatcagaagaccgagaagtataaatgtttccgccaagatgggaagggtatattgtggtttgaaggtagattggtagttcctaaaaataaggatctcaag

SEQ ID NO: 29089 - DNA, 507 bp, Zea Mays
agttgaaccagccttatgggttgttcagcctgccttgaccagaggtgctctctagaattatgcggttgtaccgacctctggtgggtggttctaccatgttaggtccctaaaactctctaattttttgcagttgacctagcccctagtgagcgattcaaccggcttaggtcctcggacctctctagtcatatgcgcctgggtggttcaaccgacatgtttggctagtgatctgattatgaggtggttgaactggcctatcaggggcagttcaaccatgtcaggcagttgaggttgctggttgaactagctagctgaaccatgttcagctctggatttatgcggttcaaccgacgtcggggcagttaaatcgaccttttcgtagaaaagtcaaactgttagccgtgtgggagggcctctcaatatatatccctctgtcatctctcctcatttactctagctactcccccgaatttactactcaccaaacttcaaacaaggcacattaac

SEQ ID NO: 29090 - DNA, 322 bp, Zea Mays
atcgggaagccccagccaattagacggaatcagtcagaccgcaggtttgttcggcggtttatggtctggtcgaaccacagcgtaaatcataagacaagagatcgtaaacccttgtgtattttagcgtaaaatgatatacgcgataaaatcgcgaacgataaccgaagcctcccgaaaatatcgcccaacatgcacgtaagcagaaacgcgaggcataaatatgtacatacaatggcgtaactggttgcatatacttcagtaaatataaatctgtttcaacaaaccgcgataaattctctcgagttgttatcaccagtccgac

SEQ ID NO: 29091 - DNA, 305 bp, Zea Mays
gtgccctagtgagcatgcatatcacataggtctatgtcagttcgctcttttgttctcctcagtttccatatgccactaacctcccatgtgctctaagtttgccctacctccgtgcacccactcaacattggttcattgtttatcccatgtcgcacctccactacaccactatgatgcgccacacactcaccaccatgccatgtgttgcctatgcctgcattgttcttcatcacttgctggtgttcccatgctttgtctcgcctttcgctgtgtgccactaaagcatgcactacactcacgtagtt

SEQ ID NO: 29092 - DNA, 388 bp, Zea Mays
cgcctaccttttgcaaactctacttcgcgagctctcaagaattttgatttaatccattgtgatctgtgggcctctcccatttccagtctgtccggttacaaatattatcttactattcttgatgactgctcacattttctttggacgtttcctctttgccttaaatctgaaacattcactaccttggctaactttttctcttatgtgaagacacaattcggctgcaccatccgaagcattcaatgtgacaatggtcgtgagttcaacaactcttccactcgcaccttctttctcactcatggtgttttgctccggatgtcatgcccctacacgtcctcccaaaacagtgaagccgagcgtatgattcgttccattaacaacataatcc

SEQ ID NO: 29093 - DNA, 328 bp, Zea Mays
gtccatcatagcaccgcgtgcgggtctatcctctacaaccccgggaagtcgtcgtcggggatctccatcgtcgcttcgtcgtgagcgtgggtctctgcaccaccatcaggggtaataacccatccattctcttcgtatcacattgtgcttcgtgtagcgtgtctccaattcgagattagctcacttggcgacgatcggggcgctggaggaaggtctccgccgtggggattttgcgctgctgcccggggtttggtcggaggttgaaggcgcgccgtcgaccgtctgatttggtgggcggtcaggatttgataaagggctgggtctgtgt

SEQ ID NO: 29094 - DNA, 450 bp, Zea Mays
tgaccttcaagaatctgggggtcttcatctctcatgggttgaactgggttggatgaagcgggctcttggatccgcagggctctacgttggttatgggttaccaagtaggcctctatcagcttctggacgtgctcatccttggcttgcttcagggcttcaaccgcaatgacttcacgactttccaatgcagttgcacgagcttgagctgtggtgagatccacatggagctgatggttgcgcttctctgcatcttctactcgggcaatcatctgacggtggtgtcaagccaagaaatcatactgcacatccagggtgagcaggtatgcagtgaggtacacgactgaggggtcgtcctcaagaagttgttgctcttccaatgcacgcatcctagccatccaaactagacggtctctctgaaagggcggaaagaatctgagcggtgtgtcggcc

SEQ ID NO: 29095 - DNA, 752 bp, Zea Mays
gtatagggttcacaatttagggttcagggttcagggttcgggctttagggtttggggctctgtgtttagagtttaggcttttggggttcgaggtttaggatttcaatttgagttttaggatttgaagtttggtgtttaggatatggagtttaggatttggagtttaggatttgaggttttgtgttttgggggttgggttttagttttagggttcggggttccggattcatggtttagggtttgggtctcggggtttaggattttggggttcgaggtttagtgtgctatagctcactggatgctaaaaacatccttacctgtttcagtggccaaaacatgggtggtggacgggaggaatgaaattgttgttcgacgatgaaaacatgtgtcgcgggaggccaaaaatagccttaccggcctccggggccaaatgcgtgtacaatggttcggacactagtgtactatggtttggacactaaattggttgttcggccatgaaaacatgtgttgtagctcacgcgaggccaaaacagccttactttactttttagggtttggagtttggggtttagagttttgtgttttggtggtcgggtctttgttttagggttcgaggtatagggttcacaaattagggtttggggttcaatgttcaggctttagggtttggggctcggggtttagagattaggcttttgggattcgagatttcgggttttgatttgagggttagggtttggggtttaatgttt

SEQ ID NO: 29096 - DNA, 436 bp, Zea Mays
gttttgccgcctattccgattgccggcaatggtgtccgccgcgggctcgtgtgcgctgccgcgctctcccgtcggagtggggaggggcgctctgcaccgttggatcctaccagacggctgggattaggatatggcataacccttcgcttgaatataccctagtcgtagatctgtgatccgttgaatacgattcaatctcgggtattttgaatccgagccatagatataggatccagcggctatcgttgtgtaccagctcagttaaagtcagatctaatctgtagcgtccatttgtgatcgtgcggccgagattacaagatacctcatcggccctgaaaacttgcatatgtgtccctctgtttttctagaatcaacctgcattccatctagcagttctctgtgtcttagggtcttttgcgcaagtacccctgcgctt

SEQ ID NO: 29097 - DNA, 418 bp, Zea Mays
agatagtctcatactctctattttgaatgactctattttgaatgagcacaaagggcgagaaatgagcttcaatcagccttctctatttatagatgaattagggatattttttaagatttttattgaaccttttgaagttaaaacagtaaaaaatggctagttctaaactgctaatacacgtggtgctgatgtgggggtgatatcgccccctatcaccgggcaatgggagagcagccctgccccccgaaacccatgtattggatcttgggaacattcttcctgggggtgaaatagtgagtactgcccggacgaaccagccttaaacaccacctcctgctagttctggaagtttgttgcgacaagatggaaagttttgtgaatcagatcacagtacaacaactattcacggttcactact

SEQ ID NO: 29098 - DNA, 343 bp, Zea Mays
agactgacgacaaccttcgtcgtcaagcttcctctttgggtactcccttcgccccccggtcgcctgacgtgcctctccatcctcctcccccggagatcaacgagtggtaccagcaggcatacggggtgccttttatgacagcagacgacgtcgacgaagaagaagcttattttgatgatcgtgagcagtttgtctcgcctccgtatcacggggatccgggccaatcatcctctcaccctccgccccaggatccttctggcagtgctcctcccccagatcagtctggggaagaacactttgcctctcacctggcgcaccacctctttgctcctcatcagcctcc

SEQ ID NO: 29099 - DNA, 384 bp, Zea Mays
gtttgttccttggcttccaatatattcattgtgcgttgtttcttctggccctcgtctctcccatcagcagtcgaagagatttccttttttgtaagaggctagtcagtttcaatcccagaggacttagcggtgcaaacgggaaagactcggtcattaccttcaatatttctgagacctccatggcagaagacgaagggattgcagtttgcttcggcacatcttgcatcttcgtcttctcagaggatttcttagcaagcttccgtttttaggagccgataccctcggctttggcactgttttcatcttcttcgaagtctcttggtcttccttgatagaccgaatagcttgcctactcagaatactgacaaccctttttcttttgac

SEQ ID NO: 29100 - DNA, 338 bp, Zea Mays
gttgtatgtgtactccgcccagtgcagccacctaagccactcacgcggctggtcgccagtgaaacagcggaggtacatggcgatgactttgttggccgcctccgtctgtccatcggtctgtgggtgaaatgccgatgacatatgaagcttggcgcccatgagcctcatcaattcttgccagaatgtggaggtgaacacggcatcgcgatcggagacgatcgactgcggcattccatggaggcgtacaatgtcggagaagaacgcctgtgccaccgtctcagcgaagtacgagtgagcaaggggaataaaatgtgcgtacttgctgaagcgatccacca

SEQ ID NO: 29101 - DNA, 408 bp, Zea Mays
cggaggagacgatcccgacgactccggagacgacgatgacgaggatgacgacgacgaagagggtggagacgaacacgtccacgaggaagctgactacgcccagcaggacgacttcatgggatttggtcctgttgtcgaatattacacatcaatgttcgagacggggcacttccccaacctgctacaagaagtgctgcacgcgctaggcacctacgtccgccccctgtacgaaacaaggcgagtgagcgagcctccccgggcttgctattacatcactcgtatccacgtcagggtgatggatgcaggtgacaggggattcaggactctgtctgctcacgagtccctgacttcgctgtccacctatgctgcctcggtcagcgacgctgcccgtcggaccctgtggtcgct

SEQ ID NO: 29102 - DNA, 451 bp, Zea Mays
ggagtttctcccacctccgagatctcatctcgtgacacaggctgcgccggatctcgttctccggcttcatgatgtcgtcgggcgttacggcgtcggttccttcgtcgacgagcttcccgctgaggaggttcttccccaggcatagttggattgtcgtcggagatgggggatgattccactctcccaccgataaagaggacgtcagggtagaacggagttgtcgcgacggtaagcttctttctgttctcctttgagggcgaatgcaccagaagggcagcttgatgggtccttgtttcttttttcctcgtaatccgtgtccactcttctgtggatgagttggacaatggggttcctcgggtgaatgaattttccgctcctggtttgcaggtggtaatctttgctcggagcgctggaggttgcggtatttccggctttgctctggctttcccga

SEQ ID NO: 29103 - DNA, 356 bp, Zea Mays
gccatggttaagctagagatgatatgtgtgtcttgttttatatgtttcttctttagttgattgtgatacagaattttcgtagccattgatgcctatgtcatcggttaaacttgtgctggatgcttttgtgtgataaatagaagaactaatgaaaggccgtagcaaaattaaataaacgcttgtacttatggggtcgtatttgtgttgcgtaagtatacgaaatgtttgtcgtttttttgtggtgttaacgttgtgcgctcgatgataggtagttaggtaacgctagtgtgtgtggttgcttgggatgtctcgctacttggtgtttaattcgctagcaggtacttaaaatatcttgt

SEQ ID NO: 29104 - DNA, 394 bp, Zea Mays
cggcagcggaacgcatcgcaaagcagtcagcccattacaccctcataggggcacactgtacagaagaggtgcgatgggagtcctcatgaagtgcattcactcggctgttgggaaacaactgttagatgaaatccatgtcgggcagtacagagtacatgcagcatctagaactctggttggaaaggttttcagatctggtttctattggccaacagcaaagagtgatgtcgccgagttagtccagagatgtgaagcttgccaattcttattaaagcaacaacatttacctgcacagcagctgcagaccattcctataacatggccattttcatgctaggggttggacatgatcggaccctttagaaaagctcagggaggctatactcacgtactg

SEQ ID NO: 29105 - DNA, 349 bp, Zea Mays
attgtgcatacgatggaaaattaggtcagacaccatacatcgtacatgttattgatatttgtacatacatatatattttatttatttgcacatgaagttacaattgatccgaggttggtacctaaagttggtatgacattcagtggtgtggatgaagcatatcaattttatagtatgtatgcatatgaagtttgcttcccattgaaaaagtatagggaacggaaaaattgtaagtggttgaattgctcgatggaaggaaagagtgcggtaaggggaatatcgaacccaaaggtacgtaataccagctcgaagcggacgcaatgcaaggccggtatggaacttaaaaaaa

SEQ ID NO: 29106 - DNA, 389 bp, Zea Mays
gtgcggggaggtgggtctcactttcctctctaccggcgtggttttatctaaagccatctgccagggggagagagtcactattatgcacatgccaattgttttcaaccatgttatttattcattacaccaatacattacaagcatatggctactacaagttgtactacacgcgagcgttctctgaggtactaccgaagtctttttctatagtgtccccaaattccttgagaagatcatcaaggctagctagggacatatccttgatgttggacaaattctctatcctggcaggagctggtgctgggggagccttcttcctccgctcagcctggcctccttggttcctggtcttcttttggattttcttcgtgggggtgagcttctttagc

SEQ ID NO: 29107 - DNA, 544 bp, Zea Mays
aggttgaagacgacgtgttgaagcattctacgggggcgctttatgataggatgtgggcgctcatggccgcggtgttgtccgaaagagggccgaccgaatgctggcacatgcatgttttgtgtttggcgaaggtggtgtgtgtgtttgttgtctgatatgttgttgtgctgtcttcacaggcgatgagggatgaagaggtggaggacctcactagccttgagagcttggtggcctggaaggatgctgcggtggaggtgggagcggaggagaaatccttgcttcaagaatgtggtgcttagggtcctgtggcagcgggcacttctgtggaggttgaaagaatgtaataggaatggtttgacagttttcattttgtacatgatacttaagattggttgctgcgcaggtttcggcatctgggcctgcacaagcaaaccttgatgatagggcaaatgatgatatgttggtgtgtgaaaatgtagtgattcttagtagtgacgcatctgatgaatctgatgttgggtcatggtcttcagaaggtgaaggg

SEQ ID NO: 29108 - DNA, 318 bp, Zea Mays
gtgcatggagaattttgaaaggtgagcttcatccagtatcttctttctgagctcagggtccttgggaacaaccaatcattctccaaaccataaaattcccttgctgtcctgacggaagcacttgtatttctctgccttctgctcgatcatttcattgataacctgaacacccttgtcttcaatctgtgccctgactatttgctcttgcaatgtgggctccaccgagatatagtttaagtcaccagaagaaacaacttccaggttcaatttgcacaactcatcacacagggtggtaactctcgcatccatgctcataca

SEQ ID NO: 29109 - DNA, 355 bp, Zea Mays
tccggggtgaagaggccttctcaaggcactattctatcactgagagggacactgccaagatagccatgcaagatgttgcacagcatagattttgcagtactgctcattgttcatcggggtagctaacggcctcgacctgaagtactaccctcgccattcgaccggtagtgctggaggtgtgattgtctcgcccattggtgagggcaatgccaggctgaacagcatggtcaacctggtcgtcgtgctcaacaccgagctggacaacgcccttaacgagttgggcaaggctcaggcggagattgagaaattgcgtgctgagcacgcggcgcgccactatcaggatggtggttccccc

SEQ ID NO: 29110 - DNA, 484 bp, Zea Mays
agcagcctttagcattaactgtaggggtccagggatcaatcgtgatctgagcctttgttgttctcatgcccaagggtctgaagtaaccaaggtcccctatcattttaggatctggaaatctcatgacaaacttattatcacccacagatctagcagaccatctccacagattcttgcctaacatgttcatgaattccagctcaatctatttttccccaacatttccttggacaactgtgataatagcagtacttgacttttctttgatcatcctattatccactttttcttcaatatagaaaaaaatttgatcctcaacttgtgcagctcaaaatttcggaccaaagttccatggtaagcattttttgcagtcaaacacgacatgatcatcacaaccgtagacatcacaggggaagtagtgtctacaatccttagtaagatggttcttaaaatgacagaaagcacatccgactctatccgagtt

SEQ ID NO: 29111 - DNA, 506 bp, Zea Mays
atgaaatagcggcagtagaaattgggaatctttgatcccctggcattcgtgcaatttggaggtgccagactgccaagtgcctgctcattggttcactttctccatttattagctgccaagaaattttaacacgacgaattaccaattactgtaatgagcctgcaagattggataaaccacctcggaatgcctgcaagctgctgtggaagagtggagagagcttccccttttccattatccttccacagacaaaaaaatctattctccaattctccagttcgtccatacagttcacttctaaagtcatgtgcggccccgtggttcatcttctcccccgcggcccctcctcgctcctgctcggttgctctgcggcagtttctagtgctactccgtgtccgtctgtagcgagttcctctttagaaaggggtggcatttcagctaacaaacatatacgaagtgttcttgaaattctgcttgctgtttggtagaggggggaaatatctagc

SEQ ID NO: 29112 - DNA, 765 bp, Zea Mays
cactaattaaactaaatattgtagtatattttgatctcaaccacaaccacaattgtctgaattcccatttgatacaagtaatttttgtatacacttctcacagatcagccactatgcctcacaattaacatataaacttgtggaatctaactaattaacatatattctctgaagattatagcaggaacacccttttgcttggacgaattgccttgtgtggttccaaaatataaattaggggcacacgggttgtgggggatgttgttttagggaggtgaatgtggttcctaaggtgagaagatggtcgcgacctagaagggaagggatggggatggccgctcctgctcccttttgacctaggaattacagaggggaggaggaagacgtggtggctggttaggaattaccgaggggaggaggaagacattgtggccgcccctgctccgtagattgatctattgacagggaacagaaggaaatcttgaaggagatctagtgagcttcgattcaggcggggttgttgtagatcgtgtcaattccttttctgtttacgcgcgggttgaggtaggtattcacgccaatcactgtggtcgtcgtgaaggaaaagttggattctatgtttaacgatcacagaggtcagctcgctaaccatgacatgtttttggtcgtcggctgggttggacagagcttgcactgtgccgccgagactcctcacaaccacatattacaggtggtcttcattttctggtcgttgataagcttttc

SEQ ID NO: 29113 - DNA, 1851 bp, Zea Mays
tccgtcagtctcctggttccacgccgcctcctcttgactgactccgcccgccgcaggtttccctcgccatgcctccgaatctctcccctccttggcctcaacatcctctcttttagtgtagtactaaatccgaggcaaccaagttcgccgcaagcgcaaagccgccgcctttttgtgtgccccgaccgagcctctgtttcttggttcccgttccgttaccgcacaggtcgtcctcttcagtcttcgcctcggaggtgtcctcgttttcctaggattttttcccggagttctacgcgcattttgttctgggtttgctttccggttgggagaggaatcgggtgcggcgcaggaagacactggttttatcccacatgtccaatcagtagcagctaggaacagtaggcgtgcgccagtgcgtgtgatgcgaagcgaggagaggatgaaagtggaggaagccggcggcggcgagattggagaaatggagccccccgcggtcagcacggtggcggtggcggtcagcgggggcaggagtagcaggcacgcgctcaagtgggccctcgacaagttcgtccccgaagggagggtcctcttccggatcctgcacgtccgcccggcgatcaccatggtccctactccaagtgagtaatcggcttcccccttctctctctctctctctctctctctgaatggccttaattctatttacgcctgtttgcgtatgcagtagcacttctagtagtcttcagataaacttcctcgtgtttactgtactagtctgaaatctgaaacgcctagtttctgatgatttctctttttctggcctaaaaagtgggagcaattgagagaatatatgtagttcattactttattgttaaggaggttctaacaggaggaggtggaggttagcgatctgatgcatccaagatgtgaattaactgaaatgctttacaaggtccttgcacattagtgacattacactgaatggtgagttctgctccccagtgttagataaagcagcagtataaaccagatttggtatcactgactctatgaaatgacactttgcaaattgggatgtcagaaacccagaattttagttctggaggacagccttttgaagctagcaatttgtcaacgatactcttatgaacctcaaaagtatctttttgtttctgccattttctgttaggacttaggactcttcccaagttatctgccagctatcttttcatgcatggtactagatactactccttaagtcataacttagaataaaacagtagtgctagacctaacactttgttcgtgaccaagatgccacaccaaatgtgtacccagctactgaattcagtgtactaagcttattagatcgtaagaattctgggacctctggtgtaggtgcaaatttttttgaaattattagtgtacctgctacttgcaagttgcaacaacaccaaatcatttgagcaccaaccggttcttttttctcttttgttagtgggaaattttataccaatctcacaagtacgcgaggacgtggcatctgcctacagaaaagaagaagaatggcgagcgagtaatatgctagttcctttccagaagatgtgtgctcagagaaaggttaggattagcctgcataattgtctaatcgttccacctgcagttagtcttttgttttcagaaccatttgaacttagtatggctgacgaaccatagcgtctttaccctacatcttattaacaggtagaggccgaagctgttttacttgaatcagatgatgttgcttctgctataagcgaagagatagggaaattcaatatttgcaagttagttttaggttcttcatcaaag

SEQ ID NO: 29114 - DNA, 287 bp, Zea Mays
gttctctacgccgagccggacagtccgcgtctgatggccggacggtctgtgcatgcgtagagcagcgacgttcgccaacggcacctagatctccccacgaagggacctcgttagtgagagatcatagggtttatcttgcgatcgataggtcgcccaaaacgcctctagataacgtggaatcactgagaggtgaagattaagacaaagaaggctacattactagctactcatagggcaagaaagtaaaggaattgataaatgggttgattggttcgattgatggtgcc

SEQ ID NO: 29115 - DNA, 543 bp, Zea Mays
atctcgtcgaacgttgggagcctgggaccgaaaaccgcacccctgaccacaggtataagtacgcgggctcggtctggttatagccataaacaagacatgctggaagatctcgagtgagcgccttgctacccgaaacttgcatcgcactggggggctgctctgcatctccgaaatccaccgcacgccagccccagcgcgcgtcaacgaacaagtcgatacctcgctccaccggatctcgcaggcaaccatcccctccggcgagcttcgtcaaggtcagagaacctatacttgaatacaacgtactccctgtgcgagtgttcgtcttgggcctcgaccggctgtctgaagtaggcatggcacctaaccccccccccccccgtgtatggcgaacatggggtcgtgctccgtctcagtgtagcaggcgactatggcccttcgtggtcatagcgtgcgacggctggttgaagacgatatgagtgtcgtttatcttttgttggactgtggagattagatctccagttgtcacattgaagccgagatcta

SEQ ID NO: 29116 - DNA, 358 bp, Zea Mays
gggaagaggtcagcaagctccttgcgaccgggttcattagagagatacaccccttgagtggttagccaatccagtattagttcacaagaagagcgggaaatgaaggatgtgcgtcaattacaccagcctagagaaggcatgcccaaaagatctgtttcccctcctgcatatcgaccaggtggtcaattccacctcggggtgcgagctactaagcttcctcgatgcctactcattctatcactagatcgcgatgaaggaatccgaccaaccggctacttctttcatcacccctttttggtttgtactattatgtgacaatgtcattcggtctgaagaatgctggagcaacataccagaa

SEQ ID NO: 29117 - DNA, 275 bp, Zea Mays
ctccaagcagaactgggatgttccgcactgctgcttccacgttgcacgtatgatcgtgcagacccttctacttcacctccatcgcctccaacctactgtcgaggcgatctaggacccgcatcaccttgtcccatcgttcctcgcccttctgctctgatgtcggcatcgcagcaagcaggatgcttgtctgagcggacggcatcaccaacgatgttgtagcgaggaaacaccgcagatcatcgatggagaacgaagcctgcatcgatgacccaacc

SEQ ID NO: 29118 - DNA, 350 bp, Zea Mays
gatcgatgtcgccgcggcgcgtccttggcatgcctttctgttcgaccccggtggtgtcactgtcacgtcccagatcttaatcagtttttgtaaacaacgtttcgggataacctatgcatgtaattgttaaatgtcttccaccgcttctgaggttggtgctgctgctacccatatggtattccaatgcctggtcttgaaagttcgccacttgttgttctctttctaaccgtgtcatcaaattgactctcttctttcttccatccatgtcgctatgtacgtattgttattttcccagcccaacccaccaactggttgaacccgtctttacaacaagaatctgtggatttgct

SEQ ID NO: 29119 - DNA, 325 bp, Zea Mays
caatagtatactaaaagaccaggttgcaataggtctgcctccatcacgacacgagggtagactgtatggaagcggtaggatgggacggaaatccttcatcccactggattataatacagtacttgaggcacatcacagcatcctacatcagctagagataatggagccatttatccaacaacacatcaatgatcttcgcgagcaaaatcctgggcaaacagatgattgggtaatgaagcgacataagctgcggttcaacacatggctaattgtgaaggacattccacacggagatacaatagaagaacaaaccattaaggggttg

SEQ ID NO: 29120 - DNA, 888 bp, Zea Mays
aaaaaaggaagaagaggcggcttcggcgactgtcatgcttggaccagggtgcaggtccttctgctccggttcatgatgaggtaccagcagaggcccttcctgaggttaatgccaaggattgtgatcgtgcacaagatgatgtctgcatattcgatgaagatgaagaggaagaagaagaagtcccgctgatccgcaagaatagccggtgctatagaggtagcgaggggggtagtgatattccttctccagctctgtcagctcttgtcagtcttcaaggactttcaatatcagactttgatcaagtgctggaggaagtcatccctgaagatatgctatcagagccaactgttgatgatatcccggccatctgttcagaggtcctagacggtgggctttccttgcttgactctgctgggcaagatgcgacccgagcggtgtcttgcgcatcgtcgactttggagggcagtcttcaatgtcaagacgctggtctgagtcacccgactcccatggaggtgactgaggagccctcagccttagaggtggccgctataggagacccagcccccgagggtggtgccggaagttacccagcccccgtgggtgttgctggtagtgatccagctctggtgggtagtgcaagctatgacccagcccccgagggtgttcaggtgggctctctttcccacgcctccatggatgtccacgttgggtcgtccccacctcggtccgatggggcgacggctgcacatgcttccacagttttaaatggactagtcgccttagaggtcggcgagcttgatgcgaggagcctgctgcctgctggcggggctgagatcacccctgatgatgcccttcagattgttcctgctgatcttccctcgtcaagcc

SEQ ID NO: 29121 - DNA, 503 bp, Zea Mays
gtgttaccagcctgtacgcgctgggggatgccttcgtcttgacaatgaatggaccttcccatttcggctccagcttgccccgtgactctgtccgggtggtccgggcgagtacgaggtctcctttgttgaattcctttgggacgactgtgttgtcgcgccaggccttggtttgggcctgatatctgtcaagagtctgcagggcgaggacgcggtctccgtcgatgagatctttggaagttggttcgtcgacatcggggactgctgatgtgtttgtcctgggcgatccatgcttgatctcctgcggcgtcatggcttcggatccatacaataggcgaaaaggtgtgaacccggttgcccgacattctgtagtgtttagggcccataccacttcaggtagttggtcggcccatttgccctttttatcgtcgagaagtattttcttgatagcggtaaaaatcttgccattggcacgctcgacgacgtcgttggattgtgggtggtat

SEQ ID NO: 29122 - DNA, 1073 bp, Zea Mays
ttcctcgagagagtgaggagtcagggggttgcattgcatcgctctctctatcggatcctcttgtcgggctatgtaagggcaggcaagttcgattctgtcatccatacatttgatgagatggttacatctggatgccgtgagtttggtgtggactacaacaggttcattggtgttctagttaagaattgctgctttgatttggtcgagaagtattatagtgtggcacttgataaaggtttttgcttgacttcattcacttattcgaggtggatatctgcactgtgccaatcagaaaggattgagctcgtagagagactccttgccgatatggataagtttggctgttttccagatatttgggcatgtaacatatatgtggactgtttgtgtaaacataacaggttgcatgatgccttgaagacgcttgagaatatgtggatcagaggaaccaatccagatgttgtcacttacacaacagttgttggatgtttatgtgataacaagcagtttgcagaagcggtcgagctttgggaagaaatggtgaggaggggcctcaaacctgatatcgttgcctgtggcgtattgatatttgggctgtgcaagagtgacaaggttgatgaggcttttgagctggcattgaggatgctgagtcttaatttagaactcaatgtctgtatttacaatgccctgataagtggcttcttgagatccggaagcattaataaagcattcaaaatcatatccgtcatgcggacaaatggttgtgagccagacgttgtcacatataatatccgtttgaaccattactgcaacacaggtatgataaaggaagctgaaaagttgatcgaggagatggaaatgagtgggattgtaaatcctgatcggtacagctataatcaaatgttaaagggattgtgcaaagctcatcaattggacagggcatttggttttgtttcagatcatatggaggttggtgggttctgtgatattgtatcttgtaacatactgattgatgcattctgtaaggcaaagaaagtaagttctgctttgaagctgttcaaagaaatgggtta

SEQ ID NO: 29123 - DNA, 474 bp, Zea Mays
ccgggagcagtgacccacacgatcttcacgactcagtcgggtgaggccgaccccacctgtcagctggagctcccccttcttccccgctaacagaacaccacgcagccataaccgccccatccgagatcctagccaacctaacaaccgggccgagatccgctcgacactatccggctgcatcctgccttctatatatcaaggccaacccctcctttcatcctccttttccccaacgacacagagcagcgagaaatcggctagtgagggaaagagaaggttccgccgcgtggtgtcgcatccgcgtcgtcggtgtggtcacgatagtaggccagggtgctccagcatgatttccggtgtgcgtgcatggcctcacttggtacgataggagcatgaggcgcagacaatcgctcccggtgcttcaccaccgtcacggatccgcggtgcgctgtgggcagactgcggctcgactgggac

SEQ ID NO: 29124 - DNA, 327 bp, Zea Mays
cgaggccacagtaacttgaacccatccgcgacgagatcttttcaccggcgaactcaatccacagaccagacgcacgaatcgcggcgagcagcactaatcccggtgaagggtcactggcggccagttcactgaatctgctgattttttggttactgtaccttcacgatcttcttcagtcagcctgacagacagatttgtgacgccaaaatcttgaattttcacgtaagaacttactaatccatttgtagcaaatctgtagccctatgatccagctataaaccgactgtggtaaccatgctcaaacatccacaggatcatcttcaaaat

SEQ ID NO: 29125 - DNA, 386 bp, Zea Mays
cagcaatggtcctaggcaccatcattcgggctatgccgacccctggcttccgtagcctggggctcggcgtggctcgtcgtgtagtgccctgcaagaggtctgcgcactcaggcctagtctgataggccataagtgtgtcacagatcgaggggcgcatgggctattaatgcaccgcagtctaggggctcgtaggttatgagtgctatgcggtccgagtgtccgtaggtcatgagtggaagcggactggtgcccacgctatggctcgatgccaggcgtggttaatgcgatgagtcatttacggtgggtcagtccggggctgggcgcaggatccacctgagtggttcccttctaacacgcccgtcctcccttgtcaggctctaccatcc

SEQ ID NO: 29126 - DNA, 307 bp, Zea Mays
atgagttcatgcatttcaatcagtatcttggcttaagtgatttatgcctttaaaatgttgtttcttttggtgcacctaagaaaccttcttaattatggcatgcttagacattacgttttatttgcatgattgtgttgttcttcaattggtacatgtggtacaatgattgtcatgtatgaagcatgtctagattgcttgtaaaatgtaatactacttaaggcatgcattgttggattaagtcaatctttcacttgatattcaaattggtatctttgtgtgatgaaagtgatagagtatgccttgacca

SEQ ID NO: 29127 - DNA, 491 bp, Zea Mays
ggggctggcttggtcgacgccatgaggcttccatcctggatggagtgttgctatccgcttttgcgctgcgctcgcgataacgttatggattatgggtctgcgtccttgggtgcggggatgtggaggcaaggctgcgtgcgtggaggactggaggtggctggataggcgccagttgggaggaatggccgatggttgtgctttcgttggcgtgtggagtttatggggaacggttggtgcgtgccattgctgccgcggtggtttgaccattagtttcattgcaaggacagcagcttttggtctggactctggagatgtcagtcactatggaacagtggtggtgtaggtcaattccctgtgaggtttcgtgttgccttcaacatacgtgcaggagttgccaacttgccacattccaactactgctgtagttgtagctgaaccggccggctacaaaacagtacagtaattcactgttatgaagcaatgttccgcag

SEQ ID NO: 29128 - DNA, 288 bp, Zea Mays
gttggatggaccttgacttcggagtcgtcagaggggagattgtcagtgaggcggcgctgcgtaggttactcgtgcgtaggacaaatagaaggagagaggtgaacaagagacgtctaggcgactgtccacttagatggataatacacataggggcagaactatccgtgacactgcctgatacgaggaaaagaaacacaacaacataaaaataacgagaaggggcaagaaatacctaaaaagaagaatttgtgagctatagtgtcaatttctagaaggacgatgaattgg

SEQ ID NO: 29129 - DNA, 395 bp, Zea Mays
gacccaaatcaggtgcacgaccatccatctctgaggggcgcgatccaaggggtacatttcgttgctgctatgttcgtccaacaaagattggcatggctagtggttctacttcgcaactatggggcttcgtctgccgctggtaacgacctccctgccttccttcccggggtgcccttggaggcccccaaaagctgggtatgggcatcccaaaggacgaggagaagagaacagctagaggtattgcaactgtgttaattcttcgtggtcttggggtcatgctggtgggtgtgattggtaattacctccaccgggggtggctcctgtcatggtcaggcaattgtcattatacaatatgactgtcgaggcactgtcaaaaggcactcggttgatcgccc

SEQ ID NO: 29130 - DNA, 440 bp, Zea Mays
gcgacttcctccccaccaacggcacccttctcaaaaccctcacgcgctgctctggccatttcttttatcgctcagggttgcgtcgtatcatcccaccggagtcagcaatcctcactttcctcctctcgttgggtgggtgtcgcgtcatcccctcaccgatctggtaaccgctcgcctgcgggaggactccgcgaccccgatgaacatcagtccgatgactctcgcggccccgtcctcagcgccctgctacacgccagctctgcccctatcctcctcgagtccccccgcctctacagccaccgagttggcctgtggggaggttggccccaccctgcccgagattgcccctcgccccccaagattgccgccgtcgaaatgtatcatgcacaaccggcgccgcgtttgccaccgtccagttccatgtcgaccgtcgtgctctt

SEQ ID NO: 29131 - DNA, 398 bp, Zea Mays
ttcacccttttcctctttggcgcggcctcacttagagcaactgaggcatcaccttttccagaagttgcgctttttctcttttgccctttcagcgggtagcggtaatcagggtacataaacccaataggatcaaaaactctattcaacctcttcttcttccggcctccgaaggtcgcagacagcacgctgtcttctgcctttgaatatggtccaagtagttcgtcgcttgtagcttcgatgcacttcagccaatcatcatctggctcaataaacttaccctcgtatctgaaggtgtatttcaacctaaccagtccgccttcgtcagacttactgatagtttcctttggcatttcccattgctctacaagcggccacactctgaaggctatgtgctcctg

SEQ ID NO: 29132 - DNA, 343 bp, Zea Mays
gtgtaccggaattttcccggcattggtgcgcatgtgcgtgtggcgggaatcatcgaatcgacgccgccatggggaggaaagctccgccacaacccagtgagtatcctcaatacctgtagcttatgttctcaagtcgatgggctcttattttcgcatgatgcctggcgttgtggccctactagcgaatttccctggcgtggcaccctgcctgctggtgcgctgccgatgctttgtgtgccggggtttgggcagcaggcgggaggttgacgatggcacgtccgccgtcggatctggaaggagtgtgcgagattcatccaagtggggcgatgatcgttggccgtta

SEQ ID NO: 29133 - DNA, 454 bp, Zea Mays
cgacctttctctacgaccttcagttaggtcgcccacagacgacatgatgactacgaaggcatgtcaccatttcatcacacccattcatcgcctatatgcgcactaattcttttcttgcgacacatgcactcaaaatcaatccacactacacaaaatacacttatctcttatttatgcgcagacttaacacctttcgggataaagtgtcactataaacaccttacacataattgccttaggaacctattagttcactcgaatacatctattcaagtcataaacacaaccatacacttatttgcgaagcacaatttaaggaatgcctaacgcgtatagactcgacttataattatagaggaagtgatgactacttacggcatgtcatcacctctttacctaagccaaaacaatttcactatcgactaagagttccaagtattaaacacattgttac

SEQ ID NO: 29134 - DNA, 595 bp, Zea Mays
tgggatgtatgaagcgggctcttggatccacacggctctatgttggttgcaggtgaccaagtaggcctccatcaacttctagatgtgctcgtccttggcttgcttcagggcttcaacaacaatgacttcatgacttttcaaggcagttgcacgggcttgagctgtggtgagatccacatgaagctgacggttgctcttctctgcatcttctgctcgggcaatcatctgacggtggtgccgagccaagagatcatactgtgcatcctgggtgagcaggtatgcactgaggtacacgattgtggggccattctcatgtagctattgcccttccaaggcacacatcctggccatccaaacgggactgtctctctgaaagggcggaaaggatctgagcggggtatcgaccacttcctcttcataaatctaacacacggccctcaatgccttgcgagcgacgacttggcagatgtctctaaatctatgccccacggtagtgacactccattccacatggtgcagattggatccaatgtatacagtcatgacacccttctctgtgccatgctcgatgaattcatgaccatcatactctggc

SEQ ID NO: 29135 - DNA, 528 bp, Zea Mays
cgtgatggagcggatcctgctggtttgctgaagtttgaccctttggaagggaacccaaaagatcgaaccctctggtgcctatcctgctgcttagctcggagaacttgaaaccttctcttgaggtgacttttttcttcttctcgtgctctttccacttggatggccttgtttgagaggtgtgagaaactgaggaagtcttggctagcgaggatggtcttgagttctagtctcaaccccttcaagaaacgggccatcttcttggcttccgtgctgacatcatcaggtgcatagtgggcaagttctgtgaatttgtgaaagtattcgctgacggatctccctccttgagttaactcccgaaattcctcttcattccttgagctggacgattcccaagggcacatggtgctctcggaaagcggcttcgaattctgtctaggtggcatctcttacgacaacgttgaaagtatcccaccaggatagggccatcccggagagctgatgagcagctaggtgaacacgctggttttc

SEQ ID NO: 29136 - DNA, 520 bp, Zea Mays
aagcagggaggaagggaagaactgtggcatgctctgatctaatgtaggaggcttctcacgtccatgacactctcatggccctcactagtccgcctcgccatcaccgatgtcgccgtcatgctcttcactctccatgtcgagaaggtttaggtttctctcctctcaatcgatactcccaacctcggacgggagacatagtcacaaatcacccgagggcaacctccgatgggagacgcagtcatgactcgcccaaggccatccccggccaggagacgcaatcacgactcgtccgaggccagcctcgggcaggagacatagtcaccactcgccctagggtaggagacatgttaatgactcgccccatgccaaccctaggcagaagatgcagtcacgactcgctcgaggccaacctcgggcgggagatggtcacgactcgcctaaggccaaccccggacaggacatgcagtcacgactcagtcaaagccaacttcggctgggagacacagtcacaactcacccg

SEQ ID NO: 29137 - DNA, 308 bp, Zea Mays
aacaagtgttttggtgctattattcttcaggatcagatcagccggggttgggaggatgcaataaatctgcttggtaagctggttgaggaactgctgctgttcaggtgacagggcaattcctgcatactgcggagctggccttccaacatcaacgcagtttgccagtttaaccaggatttgtcctgcactcattacagtcctctccactgcatcccctacctcttctactaatgtctcaataacctgatgggtcgattcctactctctttccttgtcttccaccaaccttgccttctgtaattgtcttc

SEQ ID NO: 29138 - DNA, 298 bp, Zea Mays
taattcaaattccttttgtgctcttgtgacaaaggtctttatcttttcttggacttcacttttgtcatacataaagaacacccaggtaaatctagaataatcatcaacaattactaaacaatacttattaccaccaatgctcaagtaggtgactggaccaaagagatacatgtgaataagctctagttattgtcttgttgtcatgatggtcttggtgggtgaggaactccttgttttcctacctgacatgcactgcataccttatgtttctcaaactgcacatttgttagtccaagga

SEQ ID NO: 29139 - DNA, 357 bp, Zea Mays
gagacatgagaaggtgttccacgaaggaaccatcctccatcaagacactgcgtttgaggtatctcaggcactttgagatggggtggagtgatatccgttcaaaattcgagaaacttgaatatgtggaaatcgtagttaatgataagaatccgatggagataccagattttacattggattgggatggggtatggaccaaggatgagaaggaagagcataataaccaccagaggttgcaggcggcgcctaataaaaaagacgttgggatggataaggatgttcaggacgatggcagcgggaatcacaaaggtgcgctatatctaacgtgttgcatccttcacattcatatcagtttaa

SEQ ID NO: 29140 - DNA, 492 bp, Zea Mays
ctcaattttgaccttcaaagtctccaactaacaaaatgcacaccgtttcaaaattacttaaagtaaaaattgtaacttcaatgggtatgttgatgcattcatgcagaggcacagcaagaaaactaagtgcaatgcatactttgcctatgtttgtgtttataaaaaaatgatgattaaacttttcaaaagcaccatagcaacttgcaaaggaaaaaattaacagtaattttactttctagaataatgtgagaacaaataactagttagctttcactatttgtacctttcgattagttaaattatagtcatataactcactgctgattaaaccagtacaccatgtgaaatatcttcaccggtgcaaacaagtaggtatgataccaaaaaatgtggttatatgaaatacagataggtttagctacctcatattctacaatatataatttgcaggcaaagaataaaaatggatgatacctcaataaacagagcgcg

SEQ ID NO: 29141 - DNA, 447 bp, Zea Mays
ggacgtctgcttcttttggtcgatggctgaaattgtgaagcgatgccaggagcgagattgattaaggctctggccagcagcgtggaggtaaggtcctgcgtcctggaggagctggacggtggctgcgcagactgacaatgcggttgctcatcctcaacgacatggagcagggcgccatgggaggagctcggagcagggggcgtcccccggggaagatgttgctggggagagggacgccatggggaggagaggatgctcctgcgctgaaccagaggggaggaggaaaagtggcgtggggagaggagaagagctggtgctaccatttgaagagcagagctctgcacatgtcagactgcaccagcaggtggcaggtggaaatgtgtggacattgggcggccatttttggcgtcttcctcttggaatcggaccttggccactgcacgaaat

SEQ ID NO: 29142 - DNA, 457 bp, Zea Mays
ccggtgggttcgggacgtcgatctcgcccacgccgagcggaatttgagaggggttcgcatggtgtgaatagagggcaccgcagaaggggcgatttccatccattaataggagcccgggagtcgccatgcacgcccggcatgcatggccgggttacggagtccgttgcgaggtggacggagtgcgttgttcggggaagatccacagcgcgaactgacagaagggaccgcgtggtagagactcaaggatgggagggcgtgactgcgccagagctgccaaaccggacccgcttgtaagccaaacagagcagcgcgggtggtgttagtctggcgagcaggtcccgcatggtcagtgccatcttcagccctgggccgcacggaggaacaggttgggcagggagctagattctttttttttcaagcgcggtttggttctgctgggccaaaagtgtagttcgag

SEQ ID NO: 29143 - DNA, 491 bp, Zea Mays
acaatacgaacaacatacccattggggtcagcgtcggccagattgcacccattgggatcagcatcatcaaggtcacacccattggggtcagtgtcagcagggtcacacccattggaatcagctcctgtaaaaagttccactagcacttcttcagcagcaggagcagaagggccgacatcctgattcagtcatgacactcgtcgaagcctcctccttttcttcttcttcccctcggcaggagcagttggatgactggccgggcgaaggcgctttgggcgagcaccatcagatttttgagcagtcaaggtcttttcaggctcggggacagttgcaatagctatggtttcagcagggacgaaattagatgaatcctcagccaacatgtccggcatagcacttatctctgcatcactcgggtttataggcatctcaaagtgaacttgcctttcatcattggggagatcaccaagtgaagcaaccagagcctcgac

SEQ ID NO: 29144 - DNA, 339 bp, Zea Mays
aaatactccatccaagattgtggatcttgattcctttgaagatctgacttgaatcttatccttccttgatttgatgaggtcaatcatcttcaatcttcgttctcgaagttgctatccgaatttgggacatgtagtgaaggtagattcttaggtaaacaaaatagattaataggaggttatgagttaaataaggttaaggagagtctgtcttgttgttttgcttccaggttggttggataagttatgtaacctgttataccggtcaagtttggtgttatcatcaaggataatgggtattggtgttaccataactagggacatagttgagataggtgtggg

SEQ ID NO: 29145 - DNA, 271 bp, Zea Mays
atttagcacaccctcgactccgctaggtattcaagcaaccagcacacccactcgtgcctccaattgttcacctgagcccccgaattgctcacttcccccaaatcgggtttctgccaccgtaaaagggtcctcgccgtggctagctcgtttcaggtccgatcttatcctctgctctcttgtttcagcacccttacatgcccctgatgctcctcgactcgtttgattaagctagactgccctagattgccgggaacacttctgctcatccgtt

SEQ ID NO: 29146 - DNA, 326 bp, Zea Mays
cttggatattctgggaaaaatgatgatgagttaataaggttcactggagacaaaatagttccagagccaagagatgacgaagttgttgtttttaagagcttcttcagagtagggcttcggttccccctgtatgaaatgatcagtgaagttttaaagaaatttgaaatttatcttcatcaactgactccaaacgctatagtcaggcttagcgtgtatatctaggcattgcgaagtcaaggaaatagcgctaatgccaaagcattctgcagggtccatgagcttcattatcagaccaaggcaagggcagatggtctacataaaaactt

SEQ ID NO: 29147 - DNA, 406 bp, Zea Mays
gccaaacaccgtaagagaaagaattttattgctacgttggttgatggggatgatatccttactagtcatagggacaaggttgcagcagtggatggtttcttttcaaatttaattggttcatgccgggagagagagcaagcagtggatttggaggcccttggcctttctcagcatgatttggctgcgcttgaggctccctgtttggaaagggaaatatgagaaaccattaagcttttaccttccgataaagctctagggccggatggatttactggctgtttttacaagtcctactggaccgttatcaaatctgatatcatggccgcaattcaagctatctggaataaaaactttgttaattttgacaagttgaattctgcttacattaccttgatcccaaaaaaag

SEQ ID NO: 29148 - DNA, 402 bp, Zea Mays
ggtgcatagggatgaaatggggtgatgcatatatggtgaaattttgactattataaccggttttagattttttttggggggtgggggagctgcatgtgcacattacttctagttaaaagacgcaaggtttttagtccctccccgcgtttctggggtacgattgggtaccggcgttggacacgtcacgcacgcagcccacagacatgttctcacttcgcagaagccaaataccatgggcggaagccaaataccgttggcagaatatggatttcgacatttggtctcctcccaccgtatctctgcactgcgtactctctctccctccctcccgagcgtctatccccttgctgcttcctcctcgaccgtgcaccgccgcctccacgaccacgcgccacccctctc

SEQ ID NO: 29149 - DNA, 329 bp, Zea Mays
ggaagatttcggaggggagcaattaaggcctcaatgtcctctgaggagggtcacactctatggcccgggctgccatctcgaacagaaggattggaaacaaaattggagaagatactctatggaggcaggttacatgcagagtaagataagggggcaccgacattcaaaaccctgccccttagcatcatatcaagtcggcttagcaggtcctcattgggaatttgtctgttagtgactcaggtagaatcgttgacccctgtgtacaagtaagcagggtagactctgtccttcagaggttggaagttcttgaagacaaagtcagcgaccac

SEQ ID NO: 29150 - DNA, 583 bp, Zea Mays
aagctgccattagacttagcccaagttctggccaaccaaacccgactcattgaggtcctcaccagaagccttgagaaccagcgcccgaatggtggaaggcctcaggacaggatgggagattttctaaggctcaagcccccccacattcgctagatccagcaacccgctcgacgctgatgactgactgcgcacagtaaaaaggaagttagaggccatcggatgccctgaaaaccagcgtgtttatcttgttgctcatcaactttccgggatggccctatcctggtgggataccttcagcgctaccgtcagagatgctacctggacagaatttgaggccgccttccgagagcatcatgtgcccctagggatcgtccagctcaaagaggaagaatttcgggaattaactcaaggagggagatctgttagtgaatacatccacaagttcactgaattggctcgctatacgcctgatgatgtcagcacagaagccaagaagatggcacgtttcttgaaagggctgagaccagaactcaagactatcctcgccagccaagattttctcagcttctcgcacctctcaaac

SEQ ID NO: 29151 - DNA, 479 bp, Zea Mays
caggcactcatcaggcgtgtcgtcgtctcccggagaggcggcgagcaagactaagctactacctagggaggcatttggatcaagccggctggttttagatgtcaaacagaatgttaagcgtaatctggtgtgtgtggtcgtctggacaaggctggccaaatgacacgaggagggcactactactacgtactactacgagcctggcctctggctttagctctactgctccgaccccgtccccggctgacctagctagatgacaagcgaggcctgcctccccctctgtccggttgtccctctggcgttgtggtagtccgtagcacggtagcaggcttctgtgtattgctctctctccctcctcgtcctcacgtactagtacagctttcttctgtttcctatgctgctttgtttgtttccgactcggatattttttgcgcgagcggagtggatatggatgcaggcactgtagcaagggtggt

SEQ ID NO: 29152 - DNA, 412 bp, Zea Mays
atgaggcagtcaacagcaagcgacatcgccaagagaatccgcccaccccagaaggcaccattcgcacatgcagctctgagggactacctcgagcacctctgctaggcttcacccctagaggctgatgacatcactgaagacgatgaagtcctaggcatctcagtcgaggaccagctcaagttgcgagccctttgtatcaagaacaatcacctacagaagcagaaggagatacttgcatccaagcgccagcgcatcaccatgcaggccaaggtcaggcagaagatactagatgaggaacagaaggccaaagagctggagcaacaaatcgcacatatgcaagacaaaggccaccatcaactacaacaaaaccctatccatataccagtcctaaccccagctactttccaaggac

SEQ ID NO: 29153 - DNA, 495 bp, Zea Mays
tagagcaactcctgaaattttgatctggcgagatgcactcttcacaaatttgcttggccgtgatgcaccattcgcgatatgccacatgttgcctctaattccctccagaaccgtaccatcgagttttgagccccaaacctggtgacacccgcgaactatcacactaggtggttttgaagctgaaccaccgaaacctaaagggtagcatactccatacgcatcccccacatcctgtacatgtgtccccactggtctacaaccacgtcgcgacatgatcccacgatctactcttccatgtccttgcgcctaacagtgtccccaagtatcagccaccatggctagtcaccacacttctccaatccctcgatcaagactcgacactcgttcattgctactcctggtctattgccacgaactcgcatgacattcgtagtcaaccaccatctccaaactctacacctgtacaccataagccaagagacatgttgcataaac

SEQ ID NO: 29154 - DNA, 622 bp, Zea Mays
ttcacctcagtcaccatgtgaatctgcatcacatgaccagtcctggatagagcatcgacagccacattgtccttgccttttttgtaaacaattttgaaatgaagccccatcaacttagccatagccttcctctgcatatcagattgcaaaagttgatcatccagaaaactcaaagcctgatgatcagtattaatcacaaattcagccctctgcaaatattgcctccacctgtccactgcaatgattagagccaaaaactctttttcataaatggagagcatcttattcttagcacccaatgctttacttagatatgccactggtctatcacattgcatcaaaacagcacatatcccatcatcacaagcatcagtctccacaacaaataactcatcaaacctaggtagggccaacacaggagtagtaagcatagccttcttcaacgcttgaaaagcctgatcagcctcaggactccactgaaaagccttatgcttcaacagattagtaaggggttttgcaataatcccataatgtctcacaaatctcctgtagtacctagtgagacccaaaaaccccctcaactcagttattgactaaggaacaggccatttctccatggcta

SEQ ID NO: 29155 - DNA, 1074 bp, Zea Mays
aagaacgagacggtggcaagccctgaggagcctcaaacaaaggctgaaactgctgtaggacagttgcaatgtggggatcaactggcagctctgaagagtcagtgtccactgagttcacaagatacaccacatgaaacagttcctaagtgggtggatgctgaaatttgccctggagcactatggagcggccattgtaaggcagagacagccatttctctgtccaatgaatcttcatgggactgaactattccaaccagtccataccgagtatcacatcatatgttaacagggaaaaactcaaaaatctgtgaagaatgtgtagccttgaactgaccagccagcatttctgaacacttgtgtacaaggaaccttgcctccattggctacgtgtgaaccgtgacaggttgaggaagtaatgtagcccctgtcatcttagctgctaaggtggaactaacaaacgagtgggaactacccgaatcaattagcatcaccacaagctgaccctgacactgtccagacaactgtaaggtgtggcaagagggattaccagagacatctgagagagacaaggacaacaattctccagaagcagtgtactccgcatcatcagatggtgtttctgacggttcctccatcaactcccagacctcttccaacacatgaagctgtactgttggagcacaacgatggcctggagcccacttctcagcacacttgtcacaaagtccgcgagcccgacgatacgctttaagagatgccaacttatcattagcctgccgaggacgaggaacattggtcagcttgggctgatcagcagctgaactgtcagcttggggaggacgaggtagaggcagtggtgagtgcaaattcctgatagctggcgtggaccgtgacggctccgagacctcctgcaattgggcaagagcacaagcagtatcgaggtttggtggacgctgtattaaaactgcagattttttatgatccttcaacccatctgtgaagcgcatggtataaaagagaggatcggtctgggactcataggctaacaactgatccactaatctagtgaattgc

SEQ ID NO: 29156 - DNA, 423 bp, Zea Mays
cgaagagcggtggcgaagcgtagagtgagtgaagtggatggtggtcggcttcgtgtgggcagggctggcaagcgggaattgttgtcctcgccggctggggcgagcatgggtgagggggagttgcgaagtcttttttagggtgaggagctgaggataatgctgtttaactatagggagatgggaatcattctgaaggttgaaccaatgtaaggtgtgatgccctcgctgtacgtgtgtaactatagtttgtatgatgaggttgtgtgacttcgcgcactcggctatgttcataggggcgttgcgcacttggtctagcacgtttaatatgtcggtccagctgcgcctgtagtcggtctttgcgtggacagtttctcgatgtagacttttgcacggatgtaatgtgccttcgattttgcgcactcg

SEQ ID NO: 29157 - DNA, 557 bp, Zea Mays
ctcgccggcgttagccgctcaacaatcatgcaccacgtgccttggtgtcttaccacgtcgcggtagcttgtattacacacgtccagtgatcgccagtgagctcgccatggtgaaagccaccaattgcttgcgccagtgcacccccttctctccgaccgccaccgcgctatctcaaattcacgggccaccgctcaggggtcctataaattgagtgtgtcattggctctgctaggtagtcaagcacctaatccatcaactcgtgccccaaattctccaccagagctcgccaatttgagattttccccaaatcggtccaaaacaccgcgcaaagtgatctcgccgtggccagtcttctgcaggtcagttcaagcttccttaagtggtgttctagccttccccattttccctgtagctcaccgacccattcaattgaactagactgccttagattgcctaaaactccttggattatcctcggtttccgccgtcgtcgtgggcggacgtgctccagtccgggttagtgaaattagttgagggattagtgttgcgaagggttg

SEQ ID NO: 29158 - DNA, 413 bp, Zea Mays
cgccgccatcaccgccagcaagcactagggcccctccttccctcgcacctgctatagcgtggcacccactctattgccaccactctacaccccgcgtgccctcgtcttgttgtaccgttgacaacatctgaaaagcatattattgtacaaaacttttaaagaagacttcctcatgcaccgttgataaaatcaagcttagaaaatatcagtaagaatcgtaattaggcaaaaaccgtgttgaatttgacgccatacaaaccgaaccctatcttgtacccagctggacaccaacccattacccaacccaataatctggtagatgtagcaccactcaggacggagagagagagagaggaaaaaaaaagacgccttaacagtgaccttcctcacatagtgcaaaagtgtcggacttt

SEQ ID NO: 29159 - DNA, 313 bp, Zea Mays
ggggggggcagaaacaatgttaaactccttgcataaggcattatgtttaacttagataatctcacggcttatactatgtagtagctcatgaccatgtaagaagtacaaccatgaattacatcatcgactaaaagcaatatgtgaaaacatggggtgtatccagcactccagtaattcaaggcattcaaggcactgacagaatgaagtcaagattattaatttgttttgttatgtcatttgtcatgtaataacacaagaatgaaccaaaattccagaatacaaacctttctctcttgctttgtcatgaatgaaa

SEQ ID NO: 29160 - DNA, 1664 bp, Zea Mays
tcttcaatatgatagttgataatttcagactttttagttttcctggaaaattgttacaaaattgcaactaactttgccttctaatataggtggttctggatcctgagaatttttccaatttcatctctgacagagagatctctgcaagtattgccacatcaatacgcgatgtttgcaagcaaaatccagatagaggcgttgatataatattatctgtctctgtgagtgttttctctttttttttctgatctctattgtttaattattctgctttctaacatgtagtcaaatacctttagttttgtattgagagtcgtgattctgtggttcaagctcttggcctcgagagcctctcgtacctttgtgaagcagatgtggtcggtaagttcaactttctgactttccactaacctaactacatagttccaagcctacgtttcaacaaattattaggttactgcaagtataaattacaatgttataagaagccatgtgttctgaaaattagtaagggagtaatttttgtgtaagaagtcatatttgctgaacctcacacctgaagttagctcctcttttgtatgtcagatttctacacggcgtggaaagttatatcaaagcaggtgcttgattattacgttgagcctgctgttgctcacaggtaagaatgctgacaacacttcactgaacacatagaatttgtctggtctggtggactggtaccaacactttacaggcgtgtattgatatttgcttctctatgttttcttgttgtttttttgcagtttgtgtattctgttgaggtgcggagcgatggatgctgaggcatattctgtaatatctggtaaccttgtaagaacattgtggagaattggaacatccaagaaaaataatcccgatccactctgggataaagcaagaggaactgcttttcactccttgtccaactacaaggttatactatgattctttgtctatgttatgagtttaactgctatttttttggttgaaaacctatttccaaatttcatgttttttaacaaggggcgctttacaggtatcacttattcaagatgctattcctgatttctggaaactaaactatgagttctttacgaacgaacataatctggcagttctcaaggccatggagcaccttcaagatgagatcatcagatatgagcacatgttagtatatttttgttgtctttcttctgaattcagatgcttagtgtcactcttaactgatgaaccctgttcacatagaaatcgtcgtcgagtgactactgacaaaagaactgcagtgcataaatttgagaagctactggaggtttttcctcgggcggtatttaaaggtaagctagtgatctagttagactcttagttgatgactggagttgaatacttgaatgcattctagtttgttcattcatatgtcagaaagcaaatacttgagccttttctatcctatgttctatacttctatatgagaaatgcgtagtttgttctgttctgtctttaaaagaatatggtgtcagtttcatcttttagattccatttgattatagctttcgaattgcagggatgttatctcatcatcagttgcctggtgctgctcttttaactctcaattttactccaaaggacatacttaatgaagggaaacc

SEQ ID NO: 29161 - DNA, 512 bp, Zea Mays
gggagatcaactggagttgtgtgctagcaggaaattgcacgactacaatccccgcaatcattcttcaccgtctcctgtgcgccaatacacatagcagggagaagggggcaaacctagtatttggcagcgcaaggccagaagccagctgctacagaccattttggtccatcgattcatgcctgatgcctcccttgtccctcctttgactcattcctccctctctccaccgatttatgccttcaattcgtgcatccatccttagcatcctcttctccaccaattgacgccttcagttcgtgcattattcctcatctcgaccaatttgcacctctgattcacgcatccttcctctgccccccaccaattcccatccccattagcatgttgtcacaatctcatgggcacacatgtatctctctctctctcatacacctccctcttatggttgttgcttgaacgttgcattgcccctccagcttgtgtctgctctgctgtgatgcacctgcttgtgc

SEQ ID NO: 29162 - DNA, 580 bp, Zea Mays
gtgcatcattttttcttacttactgctcagtgttcatgctctagaaagttgcagaaagaactttatgaaaggcgtggccagggaacgtcgtgacgcggatcacggtaggactgggctctaggatctctggtagggtaagcagcctggtctgtcgacgaggtaaacggtcgaccctagtcgaaaggttctttcgatcgcaccttacttttgctctagccatgcatggtacccgatcggggggtcggctgacccggtagtgactcgaaagttggcgcaatccctctgaaatggcgacactttttgttacaaaaaaatgcgacacacacgcacacaagctctacatacactgtccattgacaacgagaaagtcgtttcctaatcaccagctccctccaattattatcgctccctctgaaatgcaaatcgctagtagaaagcaacgtgcaggccaggcaggtagggtgaggttggagccaacgccagttcgattcctgcgacctaacactcaactcaccagcggttgggtctggcagaagcgaccttgaatgaatgattggcgagattcagacacgaccgacac

SEQ ID NO: 29163 - DNA, 371 bp, Zea Mays
cttgcttgtgtcttcgattctcagacaggaattagccctcgtggcgaggtcaatcgcgcagtgcacggttgataaccagaggagaagtggtgttgcgattgcggggttctagtcgtgttgattggaagccggatcgtctgtgtgacatctccaccaaatcgaaagttacccctcctgacggaagatccataacccacgtccccatcaacagtcgtattcgctcaccctaggaaggagaatttctggtcggggatcctaaggcggcgtcggggcatcctgcgtcgtggacatcgcgacccctcacccatcgctggtaaaaccttgacagccgtattccccctgcccttgttgcaagtagcgtcagatccgtg

SEQ ID NO: 29164 - DNA, 304 bp, Zea Mays
cttcggccttatctttatcagtcttcgactcagctggctcggctaagggtaccttcggcattatagccggatcttcagccttctgcgtaggaggaatgggctcctttggttcagtagctgaagaagtctccccgccaaactcaggcaccacggtcggttcaatataacgtggccggtgggtaaggactttcaactatttgctcttcggtgcaggctcatctggagtggctgaagcagcagttttccttttctttccccgtccccgcagcgggtagtagtagtcagggtaaacaaaaccaatggc

SEQ ID NO: 29165 - DNA, 524 bp, Zea Mays
ctcggctctagtgtacattggtgaacaaatttgtcatggcgatgtttccgagtaggccaatcttaattgcatcggccgcgaggattattcgggagatctatgctccgatccatgccacgtgcactgtgtgggccttgaggttccaacaggggaggcctcggctccggtgcaaggggggatcatgatgatgtctcttccctttggtgatctgggcagtcggagctcgttccaattggccagggggagcttgtagggatggtgcgctctgattcttgtgatgctcactgtgtgggccttgaggatccctccggggaggcctcggctctggtgcgcattacagtgcaattccggtaggttgctggctccttgagcgttactggcctggttccttcacgtcatcttcatgtatactctcgacggcatcttcaaaaaaaaattccattgtattgacagagatacctgttgcctaggatggtggtatgcaaggctctacactccatccccaacagcgggcacatcagagg

SEQ ID NO: 29166 - DNA, 297 bp, Zea Mays
ggtcataaaggacaagtcctcattatccatagatataaaaacataattacaagagttatataatgtcacatatttacttcataataaatgtattgatgttatcgaaatttgtattacattgagagattttccaaaatagtgaaacttatgaccatgttgttagagaagggaaagaatttaattggacccagacctgccaagatagttttaattagctaaattgaaattgatgtcaccctagtgctagtcatgcgagatatgcagaaaggttttgatgtatatgtgtatcatcaagga

SEQ ID NO: 29167 - DNA, 381 bp, Zea Mays
ctctctgcaggagcgaagacggtctatggctctgggctggacggtccgcgacctcggcgtagcagcggctccttccctgtatgcttccgaacggtccgtgcttggtgccagatagtctgcgatggcgcaaagggtattcttctcctcgaagaatttggatcttgcctcccggcagggaccccgtcggggaagggagttccaggggttgtcttggggtcagtaggccgcccaagatggacaacatcgggccaaggagatgtaaagaaataggtcaagggagactaatactagggctagattacttctactcctaaggaatggaaagaatagtgcaaataaggtaaatttgataagtagatttgattggattggttgtggggg

SEQ ID NO: 29168 - DNA, 520 bp, Zea Mays
aggggttgtgcattcacgtcgaggaaccaatcgtagagcgagaagaagaggggcttgccgaagaggtcggtgacgggccctcagcgacgggcatggcccgaggttgccgccgctgaggaagttggtcaggaggttgctggcattattgagttggttcagctgctttggtttgggtggtcgttgctgctgcttatcgactggcacctgcaccaacgagcaattggtacagaccggtcgatcagccactcggcctagcagtgattattctattagatacaaacggtaactcgagcgaattcagccggaggcacccccatctacatgttgaagtcgacagctcgttgttcccgtggaccatggcggtgtagtgtagccgtgcaggcaacagatcgagcacctggcggtcggccatacgtggaccgcgccaccgcaaccaccggcgccgagagtgaatgaggaggtgggtgagtgcccgtatggacgcgtacctgaagctgaaggtgaggcgacgtctccagtg

SEQ ID NO: 29169 - DNA, 4040 bp, Zea Mays
ccagaggtcgccgccgtggggctgcacaattacgtcgcgggccacgacgaccccaccaacctggacaacggcgaggtggaggcaatcgcgaagaagtgagtagctctcgtgtcttgttgcagcattgagtttattggtgaaatggttcgagctactgctgtgttgcctcctggtagtcttgttgcagcattgacgttattcttatatttggtagtgagctacctggatccaatgaagtgccccttagttgaggtttttattttgctcatgaactaaatattagtacttgcagacataatatagtactgtgattagctcagccttttattgtgatacgcacttgtctccccactccatttccaataattcttgcacgcttgtttatttggttcccccatagtcccattgattgttggaatgcaagtaaattttggtttagctagttacatgtatgttaaaagaagttatatacaatttccatatttgtaagtttttttttggtttcttgggaatctaaattgcataatcagttcccgttatctcttttggaggctaattattgatgttgctgttgctcctcttcatatattcttataatgtgcaattttaattttagatatggagttagcacacaggatgacgccttcaaagcagagctctgtgacttgtatgccaggtgtgcttctcggtgctcttgttttttccccagctggcacatgtgcttgtgtgcattaagttttcttaaattcttaaggtgtcacctcacctcacgctttagtcgcttataagcgtaaggtggtagtaaatctcaatcgccccgcttcgtcctaccaacttgataaccatgggcataactagtgttgtgctactcactactcactacctgttgccccctgcatactacactagttggaggcacgaaggtttctgcaaacaattgcaggaaaaaggaataaccataatcctctagatgtaatcatactattgactatatattaagaagcaattggtctctgtttttttaatctatattaagggacccaggcaagcaaataaattattgctattaggcgcagtcagccggccactcagtttatttggtgttttgggtttgtatatttggtgagcaaaatttcagttttctgaatagaaaacccagagtttttgcctcaaaccagaacatacactttgttgttcggtgtcttcttgtgtttactgaagaaacggcatggtaaccagggacagatcgcaaggggtaggaacagtggctagtttggcggacttcatcaccacggctggcagcttgccgagccacgatgaccgaggtagtcctgccgaactccagggagacttcattcctcgatgatctcctaatacaaactagggtctgcctttatagtatgaggcagccacaaaaataggaactgaataacttattttggaagtaaactaatgcatatctccctagaataaaactttccaactaactcgatttctagccacgttgttggtcactttcctgttttccgcctgctgccccttgattactttcctgtcttgcgcctgctacttcttgggctggatcctggcgccgacgcttttgatattggcagcccacaaaagcgtcagtaacagcttgtcattgtcagtgcactacaatgttatcaagtcatctagttgatcttagtcgccatgggaccaaccaggtgactagttggtcctagtcgtcctatatatatcaggactaaactaatataccaaatatgtactgatgtactatatgtctggagtataaatcaagcaggaagataactctagggtggtggctgcatgtaggcctgcaaattgggttaaacaatacgggccttagtgaattatgctatcccagttgcagcctatgtcctaagctgtttggcaattccattatgtttctggtcatccacctcttagtcagatgactaatcggatgacaagaaaactacttgacctaaatgagtcgtagcccctagtcaagtccaggatactgattgggatgactaatcggatgggttgataacactggtgcactagctgaggctagcataccagtgagtggtggttgtcaagtcatgcgctcgtcacggccacctgcatgtccatgtgccatcatgcccatgttgtggcagctagctttcttgtttgcctgggtcagttaggggaaggagcggggagggataagtggatagtaacacaatgtggggtcagctggtccggttagggaacaaactgttgttctctgtacagggcaattcacatgcctagtgagctacctactaacgaaccatcaatccaacatattcctcataaattgccttctgtggccagagctaatatgcacaacacaagcaaataccaagcttgtttggtggtgttggttgtggaatttgtatttgtgcatttgggtggtgtctccaacttttaatgacagcctttcagtttcgtggatggatgtcaacaatcttgcctgggtacaactgaactcatgtatacaatactcatgtagtcatgtattagcatctagatcagatgggcagttatttggtcatccttttcctgaccatgcttttatgcaggtatctttactcagtacttcctccaggagatgaagatctcaaaggtacagaggttcaggcaattataaaatttaaaagtgctcttgggcttgatgatgtagatgctgctaacatgcacatggaggtattgcctcccgatctatctcctatgctcttattgttttcgtctttgtttcccacattctctatgttttatgccaataaggtacattttcctctttgattgttgtactagattggtagacgcatatacagagagaggttggaaacgagtgatcgtgatgctgacatggaacaaagacgggcaagtgtctatgctttgatatatgaatgagatgtttggaacttcctgttggcccatgttataaccatgtcgaattttttgcaggcatttcagaagttaatttatgtgtccaatcttgtctttggagatgcatctgtattcctacttccttggaaacgtctgtttggggtgactgattctcaggtaattaattataaaaatgcttgttaattttttgcatgccttctctcagttttatgctttgatctcacagagttatttgttctgtattttgaagttcagttcgttttttctggcaacgttgctctttgcatagttgttatgctgcttttgatgcagttgatatttcgaagagtttggacaaatgttcatcaagtgttaatgccactactcacagtccaaataagaatgtctttctttacttaccatggtattaagtatcatttgacattatgtttctagattgacattgctatgagggaaaatgccaagaatttatactcggtgcagctcaagtctattggaagaggtaatgctagaacacagttttgtttaggtgttagttcaattataaagtcatagtgtcatattattcataagttttgctttatcaagtaaatcatatagtgtgctgtaaagacagcaatatcaattttgttgttgttatatttattgtttgatatatctcttattgcatctcaagaacattctgaaatcacaaaatgctctcggtttaggtcttgacataggcacactcattgaagtaaggagagcacaacttgcatataaactttctgatgaggtaactcttttctcaactctgttgctgcttatttgttttttcttcatttgggatgaaatctacatcagtacttatagaacaatgtcattttatatccatgctatgatgcatatacactagctgagagtttagacaaaaataaaaggtcaattatcattggtgcttggaaaagataatagagtcaatgtaagcatgtttttgtttttaagtgacattctaaatttcttgcagattgctgctgagatgttccgtgagcacgcgaagcagctagttcaagaaaacatttcatcagcattagacatcttgaagtcacgtattccgt

SEQ ID NO: 29170 - DNA, 339 bp, Zea Mays
cgcgaggaaaaaacgagggaagcagctagatgcccgcgcgctgaggggattggggaggaatacaggacacggatatttggaggagagaaagctggatattggcgacgcgaagatattgggggaaagaagggggaattgttggagggctcaaagtgggctttttccctaataaacattttacgggttactttatggattctgttggagttgctctaagcataaaacacaaagaccaaggaaaaacaaatcaggcctgttctccattacttcaactacttacaagaatgacttgtgcagttgtgatgtgcattaaatcgaccacaaaaatgtaccatcctg

SEQ ID NO: 29171 - DNA, 307 bp, Zea Mays
gtatgaaattgattggggggaaatggttaggctagccccgatttcatgtctgccgctcggagaacccagccgttgccccgttcggccggtacaggtgctcgccggagcacggcctcgcgtgaacggcgtcggggaccttgaactcagaatagatagaaggggaaggacttttatgcaaacgtcagtgactgtgttaaatagtgaatgggctcgttcgctgttagacaaaaacgcgaggtcctctgtgcaaggttaccgcgggcgcgcgcgcgtgggcgtgcttctgctggtagtgggccgacctggg

SEQ ID NO: 29172 - DNA, 412 bp, Zea Mays
cttgaacatgagatactttatcccagcattgacaaaccaggaccagatatgataggaggtattaccaacgtgttatgctaatagacatgatggtccagatataaacaaactagcctctaccaaaattcggaattaagatctgctaccaaattagcctctactacagttagcttgagatgtaaacactgattatataatagaatttgcagacatctaattatctaatcgtgaatgaatagcaaaacagtacagaatttgtcgagtccaaagtgtagattgcagtagtgcattgtaaattaatgatgcaatttcagattttcaaaaaaacatggttgcaaattgtgaaatcaaaaagcattcatggtcctgtttactactccctcggttccaaattggaagtcggttctggcct

SEQ ID NO: 29173 - DNA, 560 bp, Zea Mays
cacggcatgggatcgcatggacaacattgtcttgtcttggatttttggcaccatctccatcaagctgcaggagcgtcatggcacggctcgtcaggcttggctcgctcttgagaacgatttcattggtaatcgtgagacatgtgccctccatctcactgttggtgagtattgtcggaagatgaaaggctccgctgaatcgctgatgctctctccgacctcgacgcccctgtctttgaccgcatcttggtgctcaatgtccttcggggcctaactgcctgagtcccaagtatgccaatctccggaccatcatcaccaggatgatttggtcttgtaaaagattgtcgcagacactgctactcctgactctacgaccaccgctctgtacacctctactacagctttgtcgactacctcatcaccttctcgtcctcctgcccagggaactcgaccacctacccagggaagggtgccgggttcaagtgctggtcgtcgcaacaagaatcgtcgtcacgacaatgtcgtggtggtggctctccttggcattccgtctacaatccctg

SEQ ID NO: 29174 - DNA, 473 bp, Zea Mays
gattagggaattaagaccttttcttagactctcctcaatttttttgatactttggcaccaccagttcgagaatcgagtgcatccaggctgagggacaatggctaggaggcctaaattgtgtagaatggacttccatatttgccaagcaaacacgcaggagacaagaatatgttggatggattcctcggtctgatcacacagaggacaaacaactggatggggcagacctctttttgccagtctatcagctgtccaaaccctgtttttgattgccaaccatacaaagaatttgcatcttaaaagggcccaggtcttccagacacgtcgccaagggacaaaagagatagagccaacaaagaaagcatcataggtcgatttgctacaataagtaccatgagcagagaggcgccaaatatgttggtctgcgatgtcaggttgaagaactaccccatcaaccaagttccggagctgca

SEQ ID NO: 29175 - DNA, 438 bp, Zea Mays
tgaacgcatgtacggtggccggaatatttcatcggccggagtttatccacggcggggacccttgcttgatcccaagtgttatccactcggtccgcacaaatcacggcgagcaacgatcaacggcaacgagctaccggcgacgagcaggggggtgggatcttcttcagttcatcttttactgtaccatggcaatcgccattcagtcgactaacagaacatcttggagcatgatttactctcaattttcaatgacaactcattaaactttctgcagcaacattgtagagctataaactagctacaagtttgtcatagcaaccatggttcaattcttaataaatcaagcttgaattcacgcccaaagctacctctgttacactgaacatctgaatttcagagtgaaaccagcctgacagccaaactttaggcttaattatc

SEQ ID NO: 29176 - DNA, 308 bp, Zea Mays
acaaaatctgcgagaatattccagaggtgtagataatctacaatggcaccaactgtaagagcccctttgatgtctgcaatccatcgtctgttcaatagggcctgctgcacagttcttctgttaataattctttttggaataatgctgaataatcttggagcaatatcagatacccttttgccatggatccatttatctatccagaacatggtgttggtcccattccccacctcagagatcaacaccttggagaaggaatgggccgtgctaggaatttgaatggacaggctagaccatgggcgtcttgg

SEQ ID NO: 29177 - DNA, 542 bp, Zea Mays
gcagaggccggaggccagtcatcggctgcagtgtcggagcgtgacgtgaaatcaagagggggcgacgaacgatttggcttctggatgtagaatcggagatagatcgaagcgcgtggcggcgtgtttccgtttgtgaaaatataggagtgctgtatggtcgatggcgtgcgcgacggtggagcagcacggcgtagtggcgggaggaggccgtggccgcgccaaccattcacttgggactgtcgtgcaagctgcccatccctgcgctcttgctgaagtcctgtgttgcagctgctcagctgtatgcttgtgacgagcatgtggtgctgggggccggcggggcacataatttcaagcaagcagatgaggatctacaaccaggagggtgtatccatccatgaattctagtccaacacccgagcatttaaccaaactagcacctttgatttcatcctgtgtctggcacgattcgtgctctggatcgtgttcgtcttccctaacaacagctgggtccggtgagctgaggtttgggtttgggggttttc

SEQ ID NO: 29178 - DNA, 307 bp, Zea Mays
aggggcaaagtatcaaatattggtgctcctgttgcgtattctgcctggaatctgccatctttcaagtcctttttcgattttgtgtccaatcctcttgatagtgacagtggtttgggtcttagagtgcgaccctctctcgaagaagttgaggttctggttgtttcacttggtgatctttccaatgatgataggcaagttcactttgagatgcctatgaatccgggtgatgcagagataagtgctatgctggacatgttggctggagattcttctgactcggcccctcctgagccaatggctgttgcaa

SEQ ID NO: 29179 - DNA, 348 bp, Zea Mays
cttggggttttaactaactgcgaacgggttctctcactatttaacagagtcactgacactttgcaagaaagtccctcgagttctattcctttacgtttcacggtccccgacggcgtggagcacggccgagctccggcgagctgtctgtgccagccgattggggcaaggactgacgtccttcttcggtcgaaaccaaattcacaccccggccaacgattcccctaagttaattgcacaattggtggattactttggtctggccatggagagcgcacggatggaccaaagatccatgcgttcccgacggtcaggggacttctagcccaattggacggttcagtaagcatc

SEQ ID NO: 29180 - DNA, 660 bp, Zea Mays
aggggacccccaaatcgtgagatatcaactgatggctcggtgaaggatcaccacctggagcaacttgcaacgaatcagcaggaaccaattcagtgtcatcagcagaacccaaaactctgtcgtcgggaacgctggcctctaaagcgactccttgaccaaaggcttgggctatcaccatgcaaccagagtgtggaggagaagaacctacgtgaacatccatggaagtgcaagagggagaacccgctcggacaccctcgggggctgggtcatagcttgcgctacccatccgagccggatcatctccggcaacaccctcgggggctgggtcgcagcttgcgctacccatctgagccaaatcatccctggcaacaccctcgggggctgggtaagcgccagcaccatccttgagggtcgagttctctgcagcagccacctctaaggctgaaggtccctcagtcacttccatgggagcagggcaatccaaactagcttcctgaccctcaagaccacgctccaaggtcgatgaggcgcgggaagctgcccgggatgaccccaacctggcgtcgagcacatcaacacaaacatccatcgcgccaccatcagctggttctgataacagatcttctggaaccatgtcttcaagagtttgatcaaagttcg

SEQ ID NO: 29181 - DNA, 1674 bp, Zea Mays
gccaaatgcctgagcgtaaccacatatcgtacacggtgctgctcggtggcttcctcgacgccggccgtgttgacgaggctcgcaagttgtttgacgaaatgcccgcaaaggatgttgttgcgtggactgccatgctgtctgggtactgccaggttggccgggttgatgaggcgcgcactctatttgatgaaatgccaaagaggaatgttgtgtcgtggacagctatggtctctggctacgctcagaatgggcaggtgaaccttgcccggaagctgttcgaggtgatgcctgagcgaaatgaggtgtcgtggactgcaatgctatttgggtatatacaggctggccgcatagaggatgctgaggagctgtttaatgcaatgccagatcacccattggctgcctgcaatgggatgattgttgggtttgggcagcaggggatggtggatgctgccaagtcagtctttgacaggatgtgtgagagagatgatggaacatggagtgcaatcatcaaagcatatgaacagaatgaattcttgatggaggcactgtctacctttcgtgagatgttgcacattggaatccgtccaaactacccatcagtcatcagcatcctcaccgtatgcgcagcactggctgttcttgattatgggagggaagtgcatggtgcaatgctgaggcgctcctttgatatggacatctatgccgtgtcagcattaatcacaatgtacatcaaatgtggcaatttggataaggccaaaagggtctttcacatgtttgagcccaaagacgttgtgatgtggaactctatgatcactggttatgctcaacatgggttgggagaggaagcactccacatattcgatgacatgaggttggctgggatggtgcctgatggaattacatatattggggcccttacagcatgcagctacacaggaaaagttaaagaaggcagggatatttttaattctatgcgtacaaaatctggcatcaaacctggattagagcattatgcttgtatggttgatttgcttggtcgagctggacttgtggatgaagcactgtatttgataaagaccatgccagttgaaccagatgctgtcatctggggagctctaatgggagcctgtaggatgcacaagaatgctgagattgctgagatttctgctaagaagcttttagagctagagcctggaaatgctggaccatatgtcttgctctctcacatttatacatcctctggaagatgggaagatgcttctaatatgcggaaattcattagctcaagacatttgaacaaatcactcggctgtagttggatagaatacgacaagagggtgcatctcttcaaatcgggtgatgttttagcacatcaagagcatgctagtatccttaaaatgctggagaagttagatgggttgttgatggaatctggatactcagctgatggaagttttgtgcttcatgatatagatgatgagcaaaaaacgcatagcctacggtatcacagtgagaggcaggctgtggcatatggactattgaaaatcccagaagaattgcccatccgtgtcatgaaaaatctcagagtctgtggtgattgccactctgcaataaagttgatcgctaagataacatctcgggaaatcatactgagagatgcaaatcgattccatc

SEQ ID NO: 29182 - DNA, 515 bp, Zea Mays
gtgcaatagagcgcgcgacacacgaaaatgatgcgcacgacgagtgggaaacagcgcacgtgacgacgtgcgatagcgcgcgaaagacgtgctacgaagtgtgcgaatgacacgtgatgacaagacacaagagaaagacgcgacaacatggctatgctcatgggggtagataagggtggacatagggtagacggacgtcatcggagttttgacgacgtgctgcgagtaagcgagcatgagtgaacgctgcgaggatgtggtttgggctgttgtacacgtgcggtttggcaaacacgacatggcaaatgacgagggtgaggcgtgatgagttgtgttgcatggactctacgggcagggttgtgcataaggcacgaccacgagctaaggcacaacaactaggctcagcgtagagagatggcgaggtgcatgtggcatggtcaaaggctgacacatgacatagagttgtgggcacgcatgcgctagatggggtcgagatgggggtagacgaacaatgg

SEQ ID NO: 29183 - DNA, 469 bp, Zea Mays
cggacctgggggtggtcgagccgggcggccgcccagggcccccaaaatgttgggccccccactaagtatatatttaagtacagtgtttggtgattaaatcagactaaacaaacaacattcgctttgttagttgatcgatcaaaatatctaagccaagctatgatcacgttcacgtctctactatatttaaacaccatttttctagttccatgatttccactgtcattgtgcattctatatttaaatgaaaaatgctaacattatgtacaataaggattcaaaccataattgttggctttaaaccaacatttacactcacttagccaatagaacacacatgtctttatgttttatattatatacttaatcgtaaatagaaaacgtagcaatgtacgaacactttactagtatacggtatacgtcatttcctatttccaaagtgccctaattcttgccaagtaattacggt

SEQ ID NO: 29184 - DNA, 302 bp, Zea Mays
tgaggccatgagggggatgagccaaagctgtcgccttctcgagctcaggaatgataaacaatcatggcgtttagcctttgcgtccttttgatcgggaacagtggtggtactctcacccccacatgtctgatcgacgcgaggcggatccaagtgtacgttgctggtgtgtttccatgcgtcttttgagaggcattcttggtaggtaggcggcgagaggcccacgtatgaaatggacaccgtcgcaaccttctaggaggaaaatggatcgtttacaccgatctagacacatcctcgtgtttttt

SEQ ID NO: 29185 - DNA, 335 bp, Zea Mays
tctgtttacaacgctatcagctatgggttgggctaattaaacacaaaacaatgtgaaaactgcaaactgtttgcgggcaaaaactgtgaatcaaacagctcatgggagaagagcataaccctgtttcgtgcatgcaagaattataaatccagcaatggtcgattatccagtcatgtaagtggaagttcacagaagcacaaaaattatcattgcgagtaactaaatcagcacttaatactttgagtcataggccataaaggaaaaatttagatgacataaagttcagtagaattgagcgtctagttctgaacatgttagtagtcaccatacagtca

SEQ ID NO: 29186 - DNA, 589 bp, Zea Mays
gtccactgcctcctgccaaaataaatccgtccgctctccagcttggtggcacaatcccatcgaaagctagggtttcaagcctcttccgacttctccttcccttcccttccccaccacaacgcggccgccatagacgcggtaccgcgcgaactcccatagatctgagcgagccaccctgcgaatcatcccctgacgcaccaaatctggtcagaaacggtgaagagttcggacacgatcttaagcgtcgttgatttaagaccacacacaaacacatctgtttgcccttcccccctatttttttcctgtttcggacgattcataagaacagacctgcaaggtttgcagatctacctgttcaagaaccagggaccttgttttggacgcccagaacgaacccttgaccctgcggatctgctcgatccgttttggatctgcttgcttttttctggatctagagagaatgttcaagtcgatggtttatttcgtgaacatctcaatcggggaggttgaggtgtggcccaagggccaggcgagcgcaggcctggccgtggcggcgtgggcgcgagatatccgcgttgaccgcctttcc

SEQ ID NO: 29187 - DNA, 424 bp, Zea Mays
acttagttatatatttcaggtattgtgccttctttgttgtttgaatctaaataatatacccttaaagtactgaaagctattacaaagttttaaattacatagacatccgaaattttcacaggaaaaggtttgaatctaaataatgtacccttaaggtacagaaaaagagcaggaccagctatactattacatagttctaaatttcacagacatctgaaatcagtgtagaagcctgctcaactccttaagccaagggatgatcctgtcattggtgtcagccaccttaacctgttctttctactaagcagagagcgccacgaaaatccatctattttagacatcaagaaaattatgtactggaacgacatcaaaattatctaagaagttccatttagaataatagatttatcgatgaaacggttct

SEQ ID NO: 29188 - DNA, 288 bp, Zea Mays
ttggtacctagcatccatttttgttattcttacctccttcctcgtcttccccgtctctgcctcgcatttttcggatctccttcctccgtcttccttgtcttccagatctgatttcttgccgacgccgctgggattgcctgttgcactgatgccgttcgtgacctagctcgggtggaggcggtcgtggtcgtaggtttgtttggctaactacgcttgcttccgcatcttagtcctctgcttagtgtgcgttcttctttgcttcctggaacacacgtggtttggtttatc

SEQ ID NO: 29189 - DNA, 349 bp, Zea Mays
ttggtggttgccacctccggtccgacctcaggcgtccataaaagggcgagactggattccttcttcccctttggaaccccaccgccaacaccatagaaccgaagttggagtattggacgcgacaacctcgtcgccgccttagttgacccgtggattccacactaccgtggccccggattggtgcgtcgagtcttcatcagaccaagggaagggcattcgtggccttgtaacacggtattatcaagcgaaggccctgaaatttctcaccgtcgctcatccatcaccaccgtgtcgcgagtggtgtgctcttccgcacaactgctcttaaggtacctccagtacaattccc

SEQ ID NO: 29190 - DNA, 661 bp, Zea Mays
ctcctatgcaaatcggtggtaaaatcaccgatctgcgcatgtccgggccgtacgcacgtgagcgcggaccgtccgggccagcgaaagccgatactgttttttagaaatgaattaccaagacatgcacccgaaccaccacgtactactcaaaacctaaatggctcagtcagaccgtccacgtatagcgacagacagtccgcatataacaccggacggtctgaccatatggcccgacagtccgcgcacgcagctagacgcttcggcgtccgtcccaactaaacttctcatcacgtcatacgacacaccagcaccataatatagcatccctagcccatgggggcgagtactttccggcccctcctagaaggctgaaaaggaatggctagtcctatgagccgcatagggcaagtagtaatgcgccacaaaacccaaaccaatggggggaagacaccatactaatatccaaacaacctcacccatattggaccagagagcatgtggtcttccaccggccgcattgacatagtgggggaagagatagccgaggcgttccgagataagcttggagttagcatgatctctgggaggcagtcatattggagaccttatgatagccgatttgactatcacccatacccacagggaactaggataaccaaat

SEQ ID NO: 29191 - DNA, 555 bp, Zea Mays
gtttggttaaccaatccattcctaagatcacatcaatcccttgggatggcaagacgattaagtctgccaagaacactaccccacttaaaagaattctgacttgggagcatttgagctggcatagaaggtctgaccctggggttcgggtgaccaagggaatttctaggtgtgtagagggaatgccatgcttttccacaaaactagtggttataaacgaatgagatgctcctgaatcaaaaagtacagtagcgggagtaaattcaactaggaactcaccgagcactactcccggagcttgctgagcctcttgagcatcgacgtggtttactcgtgccctgccatgatactgggtcttgctctgttggctgtaggaggagggtgccttggaggcgggtgctggggcattcttggggccattcaccgagttggagtaagtaggtcctgatgccttcaactgggggcagttattcttgaagtgactggggtctccgcagtgccaacaggcattagctggtggttggttgcttgcaacggagggagcctgaaaggagcttt

SEQ ID NO: 29192 - DNA, 369 bp, Zea Mays
catgatttggttgcggcgtaggctgacatgctaccgtgtgtagggatgctccggcgatgtcgtcatatcttctccgcctatcaccctttgccttggttgctcgcgcactatagtgggagccatgatggcagctgcccacgcggcgcagagagtcaatggccctatcttggtaacgcgcgagccactatgtggtttgtgcatttcggtcgtagcacccgccactggagtgggcaggtaaatgtcttgtctgtggttaatgatgaggcgtgctggaggtcaatatcgtgttttcccgatgattcacgccatgtgtcacaggatacacggcaacgccgggtttcacctagtgagggaggcagtggtcaacac

SEQ ID NO: 29193 - DNA, 381 bp, Zea Mays
cacgagtacaagggtctgagattatgatacatcttgttactgccggggtgcatggaaaatttagaaaggtgagcttcatccaatattttctttctgatctcggggttcttaggaacaaccaatcggtctccaaaccatagaattcctttgctgtcctaacagaagcacttgtatttgtccaccttctgtccgatcatttccttaatgacttgaacacccttgtcaccaatttgagccatgactatctgctcatgtaaagtgggctccactgaaatataactcaaggcacctgaggaaacaacttctacgttcagcttgcataactcgtcgcacagagtggcaatcttggaatccatactcacacagttgcactgggctttt

SEQ ID NO: 29194 - DNA, 356 bp, Zea Mays
gcctgttgggccatgatatagacatcgtctcctagtaaggtggaatcttgtcaaatttcgactatcccaagattagaatgtgttcatctcgtcacttgagggtcaaaccaatgacatttgaatatcgctggagtaagaggtttggaaccataaaaattgagttcatatatttcttcaattcgtctaaaataattgacatcgttaaggccgggcgtaaagactccagaacacgttattttccgattgggccgactttggtcatagtttattgtgcgaaaacggtatccattgacgtcatacctagaatatttcttgaccctataagcaaagtcgttggctacttgtctcaactcggc

SEQ ID NO: 29195 - DNA, 339 bp, Zea Mays
attgattaaagattatgatttgtccattcattatcacccagggaaggcaaatgtggtggttgatgcccttagcaggtccggggttccaaaagtggccttgtcgttgattgctgatctggaccgtttggggatcgctttgtgctatgtcggcaccgctagtgaggagactcatatgcttattcaatcttccctcatggagagagtgcgtgcggctcagcggcaggatcgtttattgcaggaagctcgaaagaaggttggcgatggtaaacccagggagttctccattgatgagaatgatttggttcgtttcaggggccgcctttgtgtgcctcagaaatc

SEQ ID NO: 29196 - DNA, 271 bp, Zea Mays
ttaatgcattgtgtgacctgatctgagtacttgacgagagtcacagactcaccgttagctgttcttgtgatccctggtacagtttgtttatctcatgccttctattcgttgtttgcctgttttaggccaatcagagccgatgcagggctagcagagtaggcatcatcaatgaattcacacctagatatgtttgaagaattttttaagataaaattattatatacttcttatttgatattttatatgaacaattgtttagatatacatgaag

SEQ ID NO: 29197 - DNA, 598 bp, Zea Mays
aggaacgttagcctctaaagcgactccttgaccaaaggcttgggctaccaccatgcaaccagaatgtgaaggagaccccacgtgaacatccatggaagtaccagagggagaccccgctcggacaccctcgggggctgggtcatagattgcgctacccattcgagctggatcgtctccggcaacaccctcgggggctgggttgcagcttgagctacccactcgagtcgaatcatccccggcaacaccctcaggggctgggtgagcgacaacaccatccttgagggctgagttctctgcgatagccacctctaaggctgaaggtcccttagatacttccatgggagcaggacgatccaagtcagcttcctgaccctcaagaccgcgctccaaggtcgatgaggcgcgggacgctgcccgggatgaccccaacccggcgtcgaacacatcagcacaaacatccatcgcgtcaccatccgccggctccgataacagatcctctggaaccatatcttcaagagtcttatcaaagttcgccagagacaattcttgtagactaatgagggcagacagagcaggagaaggaactccactactttcc

SEQ ID NO: 29198 - DNA, 401 bp, Zea Mays
gcgcaattcaatttagagcctttcataaagttttaacaaatttcacaacaagaacctcagcaagcgagggggagtcgttgcttggatgtgcacgccatctgccagagttctttcccaaagcctagggaccatgggaaacaacgaaactaaatcgtctctcccatttaacttaagtttgatcaaggacctttaagatttattacttattagcaccaaagaaaattagacaaactgagctgagtgccctacaacaaaaggacatttggcactaagacagccaggagttccgcttcagtttcgcgctcgacataatgatacatcaatatcataatagagtagatagaaacgcaagacagctaatgacagcaaggatgaccgaggaccggaaacgaatatttccg

SEQ ID NO: 29199 - DNA, 344 bp, Zea Mays
gctacaactacaccttgaatcgcggtggtaagtctcccggtgcattcgatatcctttccgcttggtttagcaccgatcaaatcgatgaatggggctcggtgtctccatctgtccggactccggcgatgtctaccactatgaaggtgggtggcgccgcctcagcgaggttggatgtggggaagcgatccctgtccatcggattcatcctcaatgcacgggattaaaagcgacgaaccgttcaccagaatggattcaccaccgtagatctgaaatcgtgtggtgatcgggtggatcatgtttcattaaatcacgattgctgatcccagatcctacggatatggctg

SEQ ID NO: 29200 - DNA, 545 bp, Zea Mays
ccgcgcaaattcgcccacgggcgcagccggaccaacacaggcgtacgaatacggcaaacaggccacattaccatataaattacaattacaaacacacggtgagggcatcacatattacattggctcaaccttcaggatgatacccatctccctgtaattaaacaacattatcctcaattcatcaccctcaaaaagcttccgaagatccccctcgcctatgctcaccccaatcggcgaggacaacaattcttgtttaccaacccggtctactcggagacggccacgctccatccccatacgacgacgcctgccacttcgcgaaaactcacccacactatgttttcccaccacccttcgccgcctacacccagtactcgcactaggaagatccccggcaccctccacacgtagcgaagtctctgacgcagccacatccaacgcaacaaaataatccaagccttcatccgaggactcctccgtccaaggaaacggactcccagattcaccatcagactcaaaacactcagacatagaaccaaacaaac

SEQ ID NO: 29201 - DNA, 378 bp, Zea Mays
catttaacataaattatgtttgtaaattataatacgattgttaccgctttgcatttatccaattcgtctgtctcgggcaatgtactgtcgagaaatgtgtgtaggacagattcatcaaaaggttgttggtttcggctgtgccattcctgttcctcaaagttcagtagtgactgcaataaacaaaatgaatggagtcagtatatttgggataccattgtgtatatgaatatgatataggtatgttacgatagtttaccccaacattaacgtcgagaattaatctgttggaactcatggaaggctgctgatttatggcatcatcatcaacacatttaatgaagcactgcatgaacacattgtcgaggcacttcccgtcgg

SEQ ID NO: 29202 - DNA, 332 bp, Zea Mays
ttgatgaaatgccttgttacatgtattgttgtagttgtgttcatgtttgagaaataatcgcgttgcgtgaggcttaggtttaagatgcttattatgctaggaatgtgttaataactgtataagtcaagtgtgattggatcggttttaataactatattgtgaagtatagtgtaggagtcaagtgtgaagtatattgtgaaactagccgacgggttctatcagtgatgtgtgccaattgtgttaatgtgatagtttattattgtgaagtaaacacatcgcttagtaaggtttggactaaagtatgtattatacgaagtaaaattaaaatagtt

SEQ ID NO: 29203 - DNA, 301 bp, Zea Mays
gggcgacggtgtcgaactccgctaaattggtctgaacctggagaaaggtatttctttaggcctgccatagtgaaggaggccgaggaaaaggttcagaaaattatccataatcttaagaaagcccaagctcggcagaagggttatgcagacaaacgtcgaatgcccttgtattttcttgaaggggactatgtctacttgaaggtttcaccaatgaagggagtatcgcgtttcgggataaaaggaaagcttgcacccaggtacattggtccatttcctatacttcaaagatatgggccagtag

SEQ ID NO: 29204 - DNA, 654 bp, Zea Mays
cgacgctgaatatgttgtggagcctcccttgaggaagtggcctccccctcaacagcagcttcaactcctccagtctcagcaggagctggctcgagcggaccccaagtggtggaaggagtggggtcgggtccgtcagccgtagtagtggaagcaggctcgactggggtggccggtggagttggctcgagagcaacccaatcggcgttgtcgtgctcctcctccataaagatggtctgtcccatctgatctggacctacaggctcaaagacaggagatggacaaggtgcagtctcatcgaatgtaacctcacaagtctccataatgcagttagtctctaggttaagaacacgataagcacgagaatgtaatgcataacccaaaaaaaccccatcagaagaccgggactcaaacttgtccatatcaccctgttttagcacaaagcatctgcagccaaataccctgaaatgcctgaccttgggtggccatccaaatcgcaaatcataagaagttttgttcagaaaaagcctaaagaaatatgcgattggacacatggcaagcagtgttgatcgcttcggcccaaaaacgcctaggagtcctatgctcatcaagcatcgtcctggccatctcaacaagggtccgatttttgcgttcaac

SEQ ID NO: 29205 - DNA, 312 bp, Zea Mays
acatcagtggcccacaacgcttctttctcctcccgtagccaagaccaaaactagtggcagcgcgaccggaatccgccccccaccagcgagccattaggcttcccccgcacaaccacagccccggctcattgtaaatcgatgctacacacttttacggatcagaggggaaatgtgtttaccgtggatggggtagcagcgacgtttatccacttctcttctcgtgacgtccgtgcttggtgagattctaatctccagatagctttcgcggtgcagccatgcagcgaggacgacccgcaccgctggattgaaggg

SEQ ID NO: 29206 - DNA, 405 bp, Zea Mays
tggcaagtcaaaacaacactataaataaaatagctgatgaatagacattcaagacacaaaaggatgcacaaccaaacaaacaaacaagtgaccttggaacatgttgttgttgtgagtactatggacttccttgtcgccaaatcaatgcaaatgaaagtgaaactgcaaaacagaagaaccagattttattttctggcataaaaagacaaatgtctccccaagaacaactaatagcagattatctgataactaatgcactgtcagttgatgaaatgcaaagtattccaaaaaggaaacatcacaaggatgcccagccccaagaagaaacacaggagtgttacattgatggatgtactattacttgcacatagtttcagcctcgtggacgcatcaggtccaggaaac

SEQ ID NO: 29207 - DNA, 447 bp, Zea Mays
tgcgttggtatagacactcgcaacgcttatataggcttgtaccaacacatatatgcattgctaaaggggggatcattttgtagtgcttccatgaaccttgccgatgaacggtctcctgaagtaggcaatgaagcagctaaggatgaagaaaattagaatagtatagtttaagtaatgtacttatgtaaaataagtaaggaagtcaagttgtataatggagtatgtataattattacagttcagaagtgtaataaagactgtatgtttggcatgttatattttccaatgtttcttttgcctcagatgccatcccggactcatgctcatgatggggcgggtacatcccacggcggggaggacacccccaatccaccacttgtacctcctaccctggcttaggctatcgctgccttggtcaacgccaccgccgaccacacgcgctttctg

SEQ ID NO: 29208 - DNA, 411 bp, Zea Mays
attgtcaactttgaccggttatatcggatgtttcataagactttacaacataaaagcaaagttactagattcttcatgacttgaactaccataatatgtaattcttttagttcaaaataatttaatcttgtatatattgttggtcaaagctaaaatagtttgacttaggataaacttaaaacgactaaatcatgtggacggagggagtactaagttttgcaattttttaacatgtcagcattacattactaaggcatttattcagcaagtgaggtgcgcaaccttaagtttgatcacccggacaagttctgtgttctgataaatataatgtcaagaatagttcagaatgcaacatatatcaaataacgtaggaaaaaattgcatatatttttgttgatgaacttgtcaccg

SEQ ID NO: 29209 - DNA, 460 bp, Zea Mays
gcggagcatgtaataaatcgccgcaaaaatcgaccccaaaaaataaaagcggcaccatgacagcgggatgttgaaaaagaccgcggagtcagtcttcagcatttgacgctaaaacagtcactgcaacggccagtctcaatagccgttgcgtgcgacaagcacaatccaagcaaaagtcgcataagagtgcagctggatcatcacaacaagtgcataacagcacccaagggtgcgaagtcatcctagagacgcatatttttatccaagctaaagtcgcctaagggtgtagctggattagcacaaccagtgcgtaacaacacccaagggtgcgaagtcatccccgagacacatagttctatccccacaaaagtcacctaagggtgcagctggattcacacaacatgcgcatcacaaaaaggcgaagtcatcacctagacaggagataataccctaccaacag

SEQ ID NO: 29210 - DNA, 318 bp, Zea Mays
gccccaagtgaagtcctttgtcccccgcaatgttcatagaaatggcaggcttcgctcttccgactgtgaaatgaatctattcggtgcccctaggcttcctttcagtttttgctcatctcttgcccactgcggaggctgcatgtctaatatgacctttaattttgttaggtttgcttatattcctatgtgcgatacgaggtagccagtatcttgcccgggtagactccaaatacacatttttctaggttaaggcaaagtctggcttcgcgcatatttgcaaatgtttctgtgaggtcggcgatgatcctccatgttttt

SEQ ID NO: 29211 - DNA, 418 bp, Zea Mays
ggacatgccacacgagcgcgtatgctgtctctatcgctaagcagtgtcgtgccaagtgggatgggcttgttttgccacttatgtcagctaatgatggagagtaaataactagttgattgggggtgtagtggacctacaatgtataaggtaataagcatattttacggtgaatactccatcttcttggaactcttgctattacttatctttcctccgtaggagcctcacatgaacacatacgagaatcacctctcttctcaatcgacttgcatttgagccttcttgcaccgatcttatgtgcactcggagcgttgggaggcaagccttagaattgctatctgtatctacgacatctgctagggtgtgcaggttatcaagtttttgggaagtgttgccacgactgctcgctggtaatctc

SEQ ID NO: 29212 - DNA, 430 bp, Zea Mays
ccccgaacttacaaagaaaatattggatgaagctcacctttccaaattctccatgcatcccggcagtaacaagatgtatcatgatctcagatccttgtactggtggaccagaatgaagagggaaattgataagtatatatctgaatgcgacacttgccagagagtcaaggccagtcatttgaaggtggtaggcaccttacagccccttcccataccatcttggaaatgggaggatatttgcatggacttcattgtaggattgcccaatacctcccggcaccacgattctatttgggtcattgtggatagattgaccaaaacaacgcatttcttgccagtacataccacccaccggacagaaaagtatgcagaaatttatattgaccagatagttcgtctgcatggaataccaaggactattgtgtctgac

SEQ ID NO: 29213 - DNA, 318 bp, Zea Mays
cattcaggtttggagataaattcgatgaaccaaacgatgactggctgaaatgcatcgaaactacaagtgatgaactgctcggggcttattccaaggtagaggataatgcactatctgcggccttcggtggttgggaaaaaaagagaatgaacagagtttttgacgccatcggctttgtctaccccgactactactacccgctgcggggataggggaagaagagaaaagctgctgctttggcctccccagctgagcctgtgccgaaggctgcgggcaaaaagatgaaggttcttacccaccggccgcgttacattgaac

SEQ ID NO: 29214 - DNA, 489 bp, Zea Mays
tgaaagtagggccttcttttgcccgaactaggataaaggcttgtgtcatattgcatcaccatctgggttagggacacacaacattatttcactggttggttaggcccttgggtccatacaccgatatgtgtgaacactaatgacccaccctgtgtgaagttgtgatggtttagctaacgacccaccacgtgaggggttcgcaatggatttaactagtgacccaccatgcaagtaacccgcaaggcttaactaggctcaggcctaatgtatgtacactaatactaagtacaaggggttcactgactactagggagccacatagattagttcgacgttcacatgctcaccatgctaggacttttccaaagcaccttaatcaagaggaaacatggaaaaaagcaaaaaccagacacaacaaagagaggggggccaaaaaggaaaaagagatgtaatgtacattcattattaacttatggatagaaatcaatc

SEQ ID NO: 29215 - DNA, 421 bp, Zea Mays
cgcctccggaggcaacatgtggaaacctctgcaggtggggaagatagaagtggcagaccagagggagccatggggccataaatgagaaggtccaacctggtggtggagttgtagggggccgaaggggaattctgtctcgtcaaaggcgacatgacgagagatcaaacgagggtgaagtagaggaagcaggatgcggtgtagagcacacaaacaaccacatggtgtacaggggctggggcgaccacgacgctagtggaggtgtgccacccatagaaggttctggccacagagagatgcgattggtccatgggttgtagaagatggccagggagtgtcccccttgccactaccatggccacccttgcatcggcgacgcccaccatcgcttgaacctccatcaccaccagtggtggcatctccc

SEQ ID NO: 29216 - DNA, 451 bp, Zea Mays
gttctgcaagctttgccgctgtgactgaagctccatcaagaccccggttattgataaaccagcatagtgactcaaagggagacgagcatagtcttctcaagactgccggggtggacgtggacctccgagcattctgccattcatcccgtgctgttggggtcagcggtcagccgtttgtcagtgactcaaatctacaaatcaacagcaggttattgcaaaatcaacaggatgcccctggattattagagctagaacaacggctgataatagtgtcagggtacacattttgataattatccctttaattttgttcatacaaagttattttgcactaacagagttttttaaatctttttccaggtgcagataaactgaggcaaatatagttgtgcatctacaagtagagtacaaggcacaatggcctcccaagcctgggttgcagaaagagcta

SEQ ID NO: 29217 - DNA, 417 bp, Zea Mays
ccggaacagcatgataactacgaaaagatcgaagtctttcacaacagactcataccaacgaaggcgcacaacattaccatacaaattacggtcacatacacacagcgagggcatcatacattacattggctcaatcttcgggatgatacccatctccctgtagttgaacaacattatcctcaattcctcaccctcaaaaagattttgcaactccccttcacccacactcgccccaactggcgaggacaacaattcccgtttacctgtctcatccacgcggagacgaccactctccatctcactacgatgacgcctactcactctctgttttgccaccgcccttcgccgcctatacccagcactcgcacccggaagatcctcagcatccaccacacgcggcgaagtctccgtcgcagc

SEQ ID NO: 29218 - DNA, 607 bp, Zea Mays
ccgctggcaaagatctcctgcagcaggcaggcaatttctcgccggaacctcaacaccgtcgtgtctctgccgcgcgccgtggcccctctcttgtgcattccgtctctggtgagtaagccccgctcggtattcgcttcgaccatgtgatggtgttgcacctagtagatttaagcttcgggcactgagtgttgggattcaaatccgtggcgatggcgccgtcgtgcctcggtcgggcgccgtcgggttgacgccggtgagagaaaagggttggggagaatcgcgtgtgtcgtccgattttaacggacagccgggattagagctggcgtacccgttcgccacaagtgaacggtagccgttgatctagatccgtgggccgcggcgagatctcggcttcattaaattcgagccgttggatatagatcagagcgctcatgtcgcataccggttcggtatatattaaatctaatctgggccctcggttgggaatcgaacggctaggatcgcttcataccccttcggactggcgtgtttgcacataaaaccctctggttctaggaaaataacccaccatccactggagctgtgctctgtgtctgtggaatcttac

SEQ ID NO: 29219 - DNA, 341 bp, Zea Mays
gtggtggtggtaatggttgatttggatgctgtggtggtggtggaggaggtagagctaggatttcttggttttgctcgtatatattgtggttttgttgatgaggatggaagtggtcattgtggggtttggtgctggttgtactgatggggatggtaggtgtgggtgacaactctttgattggcagtcggttggtttctggccattcgatcttttgttgctttagtttcagggcaatccctaattgggtgtgctaagtcttcgccatggaaaagacaatagaatcttcgctgctgcgggccatggcctctacccctgcctctagttgcgtgaaagtgcattca

SEQ ID NO: 29220 - DNA, 357 bp, Zea Mays
acgttgagatgagagcgatgacagcggcatgggaacaggggtggaggcatcgacgaggagccaacgaaggatccaaaggggaaggcaaacggtgaccgcaaaaataatagttggtggcggcttcgtgtgaatggaatatagaaggagacgggcgcaggaacatgaaggattcaacgtgattgcacgaacggttttaattttctaagtgacgtggacactcgatgagatctagaatttcattgggttttaatataagagataagatatatgaacctaaagcggtaagaaacaaagtgacagaatgagaatacgtatggaagacctatctaagcatcctcaaactagtacagaaactgc

SEQ ID NO: 29221 - DNA, 502 bp, Zea Mays
gccggaccgtctgcacagtcatttttgctctccaacaagaccaatgtattcaatctatgattgaagtaataataaacatggataattatgtttgtctaagtcaaattacagtaataactagaacggctgtgtcgagggggctccgctctccctcgcctctgtagccacccttgccccctcctttcgctcgccaccgctggagtgggctcgccggcacaacctgtgtgggtcccacaaggacagcggcaggggctccacggtcgtcttcctctcttcctaatcactcacctctgaccgtcagccagaactcgattcaaaatctaatagcccagtcctcccgtgcacccgctccaatagccactccgtctcctcgtgctttgcggagtcccagttctggcacgacttcttctcacccaccctcctccctctcgtctagccgtcgtcggcgctgctcgtggtgtcactgcctcggtccggctctagtggttgtgcatatcttccc

SEQ ID NO: 29222 - DNA, 555 bp, Zea Mays
tttcggcgcagctgtatgctgcccagcagcaacatcagctgcagtagcaggcgcaggctgcttatggtgcgcaacagcaacaacaggctgcccaatcaccctggaactcgtggcaaggtgcctgggatcagcagtcgctggcctcttccttcaacacgatgactcttcagcagccccaatccatcaccgagtggattgctaacccggggcctccagccatacgaccccggactctggtaacatctcccgttttcgttctccaacttctgctattccttcatccatcgttgttggaaacggtccagcctgtcggtcacctcagtaggagatacggtgctttctggccagttttatcttaacaatgttcttgttacacctgatattattaagaatcttctttttgttcgtcagtttacaactgacaataattgttccatggaatttgacctgtttggcctttctgtgaaggatctcaattccaggaacacaatccttaggtgcaacagctctgggccactgtacaccatcagtcttcctactgcgcgtgctcctcca

SEQ ID NO: 29223 - DNA, 621 bp, Zea Mays
atctccagcagcgttacctattctaccttctatttcaaactttacttcgtaaacagtataatttgtaatgcaaaacaatgttttatacggtcatatacacggttcgctagccacagcctaaggccaactccaatagactgttctgtactgcagacgacaatgtttacatagtaaagtttgaaatactgattgaagtacgtagtttgctggagatagcataagcctccttgataaggctctttcaaaggctcctccaacaactccttaaaaaatctatgaaacgggggctattccgctagcttctcgttgaaaatagcaaggagctgcttccaagaaacgagcaaagtcgggggctcgaaaagaggcttctaaggctccctcccatcctccattcctcccctctctcatgggttccatgttggctgaaggtgctgcatttcgtactaaatagggtgctcatcccgaaactttttgtgaaaacaagaacatagctattttcacacaagagccaaaaccagagttggagttgttgacacaaaagtctaactaaaggcgggcaaacatgcatacctggtattccgcggtgtgttggtcttgcatatattcaattttcctattaag

SEQ ID NO: 29224 - DNA, 497 bp, Zea Mays
ggatggacggtgccagggagttgttgtacaccgtcgcgagggggagctgagagtggatcgttggaggcagcctcagtactgttatcgatggcggcaagaggttggggtggctggtagcttgcaatgttgggatttggtgaggagcagggctggatgccagagggaaatgctattgtgaaagatgatgcttgctacacgtgtgcggcatgcgctttatcagttgccattggctgaaaaggactgtgatcaggcgttaggtggaatgctgattggctaggctagcaaggatagtgctatttcatattcttggaatataatatgagtgaattgtacatcagtttacgaaggataaatgtaacatcgcacgggctcccaactcaccttcacttatttttatacattgtttgatttacattgtcgtgtcatgcttataaattttatgctttgtttgatttgtggtaccacctagataacggttccatgtgtttcctcgtagc

SEQ ID NO: 29225 - DNA, 632 bp, Zea Mays
cgaggagtaagcgtggagactccgcacgcatcttcttgtcgatgttcgagtcgtcgatcccagggaagggagtcagtatgaggtcgtctctaccgtccctagaatgggctgttggttgaagctaccaccgactcgatccatgttgcacggcttcgcgctggtacaccatgatctcggacgtactcctcccagcgccttatttcatttttgtgtcgttggtcgtgtgaagcattgatggtgctccatgcatctcgtcggctgttgatggcgtgacacaagtcgttcgcaggatgagcaagaggtagaagatgattggccgcctgagcaagcagccgctgataaccctccgcgtctagggttcgcggaagatcgtcggctatctgcgccagcactcctttgacttcactcggcgtgttcaatgctcgggcgaagtcgaggtataggtttcgagcgaggagagggttctcccgccggagtctagcatcttgctcagctagttcccattcccgttcttgagcctatcggcgatcgcagcggcttgagttgcgtctttattggtgtactcgttcatcagaagtttctcccacttccaaagcttcgtcctaggataccggttgcaccgggtcccgttc

SEQ ID NO: 29226 - DNA, 349 bp, Zea Mays
tcacattaaaggtaaagcctaaagcttgttgtggaccaatcacaatcagattgtacctatcatagacatagcagaatctgactagggcctgtccaaggtatgtatgctgaatttcattgatacacaactgtctaatgtccacgaaaaattcacgaacaacatcggtaattgctttgaaattaatcacatgctccgacaaagggtgaactagaataatggcctagtcctcatttagcaatgaagccttaggggaggaatggagaaggattggtgtagcaacgaagccctaggggaggaatggagaaggatccactcgatgatacgccatctctgcagggggatacaaagt

SEQ ID NO: 29227 - DNA, 541 bp, Zea Mays
aaggaagaaagagcgggaggaggagtggttgaacttgccgcactagatagcacgaattgggcaaccgaactatgtggaaacccaagcaaaggagtgtgaaagagtagtgaaagtatcgggctttgagtgcaaaggaaaaccaggagggtggaatcgttccccataataatagaggatggaatggatgtatgaggagggtgggagtgagataacatgtcggcatcaggagtggtgtggtaggaggccctggagtcgaccacctaatcgggcaaggtgagaggcggtgtcaatgcaatggtgttgaatgagttggtgagggagacttcatcccaaccaccatccctagggaatgatggaggcagaggtcccctgagcgagaggagaggtagagtcgacgacgagtgtggaagaggggacgctgaaggcggtggagcatcgaagtagacgtggttagtagagctagctggggtagacacgacaaggaagcaccctgggtcaggcttggccacatggagatggtcgtagtccaaggtttatagaa

SEQ ID NO: 29228 - DNA, 323 bp, Zea Mays
tgcagatgtcgtcggtgacggagatcccatagtggagagtcatgcgtcgccgccggggtgatggaaaggggattagggttaggggattggggagcgagtaggtgccgacacgccgcactccagtgactagtagagacgaagatcttgctggtcggacgatcgatgacgaagatccgataccggcagtggcgatggtaaggcggtgatggagattggggatggagcagcggcgagtggagagtcaaggattatgggagagaagacgcggacaagcgaatcgagtgtcgagtacgggagtagagatggcaatgggtacccgcgac

SEQ ID NO: 29229 - DNA, 627 bp, Zea Mays
gaggatcacagtttacctctagattttggaaaagttttcatgagaatatggatacgaagttgaattttagttcggcctaccatcatcagactgatggactgatcgaaaggactaaccaagtattggaagatatgttgagagcttgagcccttcagcatggtagtagttgagacaagagtctaccttatgctgagttctcatataataatagttaccaggccaatctgaagatgtcactgttcgagactctatatggcaggaaatgcaggattcctctacattggatcagactgggggaagacagttctttggatctaaacttattcaaggggcgaaagaacaagtccgtataattcgggagaatttgagaattgcacaatcaaggcagaagagctatgctgataataggagaagactactggagtttaaggagggtgatcacgtgtatctgaaggtgtcaccaatccggggtaagaggagatttgaagttaaaggaaagttgttcccttgctttattggaccattctgagtttttaggcgagttggggagatggcataccaactcgagttacctgatagtctatcggatgcgcataacgtgttccacgtatctcagctaaggaagtg

SEQ ID NO: 29230 - DNA, 615 bp, Zea Mays
gagactcatgtgctgacagagtcctgaaccctctatcacctgcatccattaccctgacatgaatgcaagtgatgtagtaccaagctcgaggaggctcgtacactcgcctggtctcgtacaggggtcggacgtaggttcccaacgcgtgcagaacatcctgcagcaggttagggaagtaccctgtctcgaacattgaggtgtaatgttcagtgacaggccataacccccacgtagtggtcctactgttcttcgttggcttcatcgttgaggttttcctcatcttcttcttcttcctcgtcgtcttcatcatcgtcaccagagtcgtctgggtcgtcgccttcgggagcaggggcttggactactggtgctggcggtgctgaaactgacgatccagctgcgaaggctagtgattctgccaacggggtgggcgtaggcagaaactcctccgagctgtcctccagaatgactccgttctccacccgaatgcgagggagatccacaggaatttcctcgactaccactgggtagacaggaacttgccgtggcggagggatgtagttggtgttgatccgagtggtttgaatggtacataccatctataaaagaaaatatcaa

SEQ ID NO: 29231 - DNA, 431 bp, Zea Mays
gcggggtcaacgaaatcgtgcgccgatgtgctgcaccgtcgcggctttgcagtgcgccgtcggtcggagtgctaggggtaggtgatgggttatcggtcgtgggatctagtttggatgatgtagattagatcaacaaatacctcttcatccaatagaatcgcgaccatagatctacaatccgatgggtgcgaacgcgtctggctactttaaatcggggccttagacattgatccaatggctcagatgaggtggtagcatgccccttcacgcgttagatcgtgtccaccgattgcctgatcgacaatcctctgcgcgtaccaattcattaaagaccagatctaatcctaagcactgaacccagatccaacggtcagaacagatccataccccttcgttgcatgcactttctaaaagaaaccatagagtattag

SEQ ID NO: 29232 - DNA, 525 bp, Zea Mays
ggacaatgagggctccccaccggcgtagcctgaacccaagcactggagatccgtccgctcctctcctaactgcggaagcggaagcgacggcgatggcgaccacgtcgtcctcttcctcattcatcaacgagtcggtggtggaggagcatacctagggctctccctcgccgtggcaatggatgactccacatgcgaagtgtgtcagtgcctgctttactaggtttcgcttccctatgttgtgttgttggtttcaggatcaattcattttttgcttatgatggtgcactgtggtctgcagagaagaagtgcctcaactcggagctatggcatgcgtgcgctggcccgctcatctgcctccccaccgtcggcacgtgcatcgtgtacttcccgtagggccacaacgagcaggtcagtcaaagtcctcgtgccgtctcccttagcctcgctgctactacttggcacattcagttctgaaaacacctaagcagttcgatttgatgcacttgaaagtcgcctagatgtggg

SEQ ID NO: 29233 - DNA, 428 bp, Zea Mays
taatttaaaaatatatgtcatgtataaaaaaagattgcatgtgtagatgtacaaatcccgttggagccacattatgtcacgatccacatcatgcattatatatttgataaagaatgaatgaaatgcaaccattaaacttgttgcccttccaaaaggctagcatagactgaacagcaaaaacataagctttatggctaatgacaagttataagcacataatattactgcaatgctaacgctgatttataatgctataaaaaattgtcttataaaaaattgttacagaaacattacctctgctgactgtcgctggccatgaaaatcactcccactcctagcaaagtcccgtgtcccgcatgtgtatgtgcgacatggagtccttcagcttgcagtcacaaccaccacaaccatcgccacattagcgtgca

SEQ ID NO: 29234 - DNA, 422 bp, Zea Mays
gcctaggcaacactatgcccaaaactaactgaaccaaaccgactcgggaagccctctacgcacgacaacggtggagctagagctccaacgaggtcgttccccacgacacagcacggtagcgttcaatcacaaagcatggctagcttcaataacttatgtgacaactataacaactagcaaaaagaccagaaagggaacagaaataaccggccacgttaaggcgatctacggcggcgctcacggacgacaagatggtgttcccatcaacacaccgtggtagagttcaatcgacaaggttcataagcaaacagagatcatagggatactaaaacacgagacagggagggtcaagctcacatgaggagctttggccacggtggagcacctcacggcggcaacggtgaccgattctagggaaatcc

SEQ ID NO: 29235 - DNA, 308 bp, Zea Mays
cggctggctaccgatgacggtcactagagttgacagtgaggctcccaccgccttttttatggtgtcgacgtttctgttgaggtagcgcttcaaggcagcgacatgtctcttcaggcatcggttctccaccttgctcctggtggagtctttgagttgtgtgcccgtggcgacgagcacgccggggtggcgaggcggagatcactggtggtggtagctaagaagttgagggtgtcaaacatgatgtggctccccaatgcgaaggtttcaccactggcaaatgtcgatgcgtgggccatcggagtgatggg

SEQ ID NO: 29236 - DNA, 1006 bp, Zea Mays
ctgaatcaaaaagtgcagtagcgggagtaaattcgacaaggaactcaccgagcactactcctggagcttgctgagcctcttgagcatcgacgtggttaattcgtgctctaccctgatactgggtcttgctctactgactgttggaggagggtgccttggaggcgggtgccgaggtattcttggggcgattcaccgagttggagtaagtaggtcctggtgccttcaactgggggcagttattcttgaagtgactggggtctccatagtgccaacaggcatttgctggtggttggttgcttgcgaccgagggggcctaaaaggagctctgactctgctggctgaaacgtgacggagtgggtccagctggtctattaaagcttggtcccttgggtggaaacccgaaggatcgagctctctggtgccggtcttgctgctgagcttggagaacttggaatttcctcttgaggtgacctttttcttcttcctttgccctttccacttgtatggctttattggagaggtgcgagaagctgaggaaatcttggctggcaaggatggtcttgagttctggtcttaaccctttcagaaaacgggccatcctcttggcttctgtgctgacattgtcaggcgtgtagcgagccaattctgtgaatttgtgcacgtactcactgacagatcttccaccttgagttagttcccgaaattcatcttccttgagctgaacgatcccttggggtacatggtgctctcggaaagcagtttcaaattctgcccaggtagcatctctgacggtagtgctgaaggtatcccaccatgagggccatctcggaaagttgatgagcagccaattgaacacgctgatattctgggcatccgatggcttctaatttcctttttatcgtgcgcagccagtcgtcggcatcgaggggattgctggatccagcgaacgtgggaggcttgagccttagaaaatctcccattctgtcctgtggtcttccaccatttg

SEQ ID NO: 29237 - DNA, 486 bp, Zea Mays
tgcttgtgtcttcgattcgcaggcaaggattagccttcgtggtgaggtcaatcacgcagcgcacggttgataaccagaggagaagtggtgctgcgattgcggggttctagtcgtgttgattggaagccggatcgtctgtgtgacatctccaccaaatcgatagttatcttcacctgacggaagatcgggcacccccgttcctatcaagtggtatcaaagactcaggtattaccgtcaggcttaccctagtttagtttaggtttttcatcctataactccagataattgccatacaaaaaatatattccactgtcctagaacccttgtttagccttgcaatttcgtttcagattgctttgttgagtttgtgtccgtgtcaagtcttgttgctggtttaggtcgtgtcgtcatcgtagttcaaccgctccatcgctgttatttgtttctgccgctatcccatccaccttacccagattacaagtcgag

SEQ ID NO: 29238 - DNA, 386 bp, Zea Mays
ctagaacctgcaatcgtcagcgtccatctcatccacaccacaaaagggtcaaagaccacacggcgaacaatttttccccgttggccattgacggacaaacgcgttctccctgaaaagcatgctgtgaggctcgatatcgctgcggctgtcgtgctcccgcagcgcacaggaaggtgagtgaggaggaagaaaccgcatgcaaggggacgggagtacgggaccggcgggcggaagacgaacgggattccaaaaaaacgacttgtcgtggcggagcggaatccacaatagcgacgagccgtcggggtctgccggcctggatgcaaaccagtctcgtcgtcacggactcccggaataaatactccctcctgcgtatagctcttccctgt

SEQ ID NO: 29239 - DNA, 290 bp, Zea Mays
ctcaactcctagacctgtctatgaccccgactgccactgtgaccgctctccacctcgatcccaaaggtatggcccacatattccctatccctcttcctctacctcactagggcacaagttgtgagtctattgacctatcagaaagaacttatacgacttaatagagggaatcagcttgtttctaagttcagaaagatccaacgatggtattagagccagactaccaaattcctctaacctaagtcaagtagaacgacaagagaagaacttaggaacccagggaggtctag

SEQ ID NO: 29240 - DNA, 611 bp, Zea Mays
gaacgaacttctacgactcctcgcggctctactgctgactcctcgactctactgttgacggctagacctgatggcgcatcacctgcgcgcatagaaaaggggcacatggcccctctcatagcagaagaaaggccagagggttgctgagtagagttggctacgtggcaccctcgtcgtgtcctctatggagtgccacggaccgccgcatgagggagtgtgcatgcaatgcaggaaaatcggataaccggttctaccattaacgtggggtcgctctctaggttgcacgagccgcatgcccggtttccacgacagcatctccagtggttatgtaaacaagttcttaaatcttgaatacttattaaaacagcaatggtaacccacaccattcacattcccattctcccgcacacaggccacacctagctacctttcccattcccttctcccccgcacaacacacacccattcttatccccccacacagcccacgtctagctaaaataaaaaacgtatggtagcaaggggattcgaccctgcaccccaaggccaatgtgagcagtagctaccgctacaccacatgtgtgtttttgcctacatctactacataaaaa

SEQ ID NO: 29241 - DNA, 612 bp, Zea Mays
atcaaacagttcacaacttttcttatgctctacactctaattcaacaaaagaactcgacaattcataaaattccaagtcacctctaataaaattaggaagtaaggcccttgatcgtaaaaacaagatccgcagtcactaaatgccttctgaggtgttggaagttgtaaccggactacaaagacactgactttttctcttgttttattgcatgacaaggcaaaaaatttctctatattataacatctgtagttaacgacatgatcaactgtaccgcaacctgctctagtttacacaattattggattcttctcgatttttaaagtaatattcacaacatggcaacatccaacacaacatgatcttctatggactaacattgtatttatgtcatatttggctacattttttgaaatgctgaaacaaaacgccaccatgaaatgaagaggcacatggaagaaatgtaacacgagcaccacagaaatatgcataaccaaggtgcaagcatagaagtagatgaaatctagagagcaaatgagggacctcttgttagaaactactagttctaccatgattatttggcatgtaacaatgactcccatgctacaatgtgg

SEQ ID NO: 29242 - DNA, 541 bp, Zea Mays
ttttaaatttgtagacgtcacatgaaattggagaagactatactgcagggtgattaggtgaatatgctgtatgttcttaagcctggacacacagattcagtgatttgcctcttgcaagtaacgccgtgacttaccgtgctgtatgcaccgtccaaagatagtccaagggctcccaacaatttcatcctaggataggatttggcttttcacctgtgaaaggcagcccatgagggcctttctctgtacatggacgtgttgcgtcgtcatcctgcaacccacaacaccctgtgcactgcatcggactggaagagctggaggcccttgcttcaccccaaaggagagggagaagtgcaggcagacatcagaacgccatcgatgagaagcaagcaagccaccgctagggcaccacgtagtcgccgaggaaaggatgagctctagcgagatttaagatgagcctgtggaagcggactcttgtgtccatccttatgtgtgcagactcggagaatacagtgaaaggccaggcctccaccaaggattccca

SEQ ID NO: 29243 - DNA, 343 bp, Zea Mays
gttggatattttgatagttgggagcatagtggttgttatgtgtgttattgccttcgctagttggtttggaactaaccttgtcatactttccttagccttttttgtgattgggaaatccttggttcagtgcctaacatcctctccatggaagacacaatatgtgtccttcgctcctgactggatcccctaatgcagttgtggcctctaccagcatttcctcccttgctaggtgctagatatgatcttgggttcgagggggctttttgttgtggtgtcactgattggttatgctattgacatcgggttgccagcggtcatgttgatggcttttggtctatagccg

SEQ ID NO: 29244 - DNA, 354 bp, Zea Mays
gtagtggaccacgcaagtcttggcgctgcccttgaaagcacaccagtgtgagtggtaggcccccttgaggccccacagccagcaagccgcccccagcggggtcatgttgacgaaggcgtagcccttgtttgcctccttcctgaatccatcaacatgtagaggaaatcataatgctaacaatcccctacttgacatgccaaatgtcgaagagtaaactccagccgggtggtggaatgcacctgcctaatcctaagaataggggcagcctagggtttgcccgaagagatggatgaatacaagaacatgcaagggtttagagtggtttgggccaccggagctatgggtgtggatgaa

SEQ ID NO: 29245 - DNA, 447 bp, Zea Mays
gtcagccttgttattacattaccctttatatcattaactctaaaacctatgctgctgtcgtcaggagaaaccaagggctgtggcctctgtatagaggtaagctgaggcattcacatttcaagtgtgagtggaggtgtgctctactaacatgtattccatggttaggtttctttgttgatgtgaatttgttcaaggcaaacaataagaaggcagctgaactagccaaagatggtaacactttactgaaaaatatcaatggtgccttggattcaaatggttcagttgtggatggtttggctgatgaggattcaaatctaatggttaaactaaaattcttgacatacaaggtactcttctatcagtattttcagcttttttgtaggtattattggttgcttcttgaggtaccacgctagtgtttgctactccgggttgtccgggttcgtt

SEQ ID NO: 29246 - DNA, 769 bp, Zea Mays
agataaggatactgaaacgaaagagcagggggcatgagcggacctggagcacgctgaccacgatgaggtcacaaggcgcggtgtttcggaccgaattgggggaaatccgaaattggggctcgctggtgagcaattgaaggcacggtttggtggcttgggtgcttgactaccttatggacccaacaacacgctcaatttataggctccgggggcggtggtgcgtgaattggagttggcgcggtggcagccggagaggaaagaggttactggcgctaaaaattcgtggcattcaccgtggcaagctcaccggcgatgaatggatgggttatggtgactcactgcgacatggtaaggctttgaggcacgcagctgggtcggataacagagaacttcggtgatgccagcgcgatcaaccgcggcgggacacgacggccggtgagaacagtggctggaggttatctacagcgcgatatttcttaccccttcttcgttatccaccagcgccggacccgaatcaccgcggcggcacgaatccggacgcacgatcaccggcggtgagcttctctgcgctagcgttctgatccggtcactgtaccattggaaacgttcaacagagcgcctgacagagcaacttgcaatgcccagatctcggatttttgtgccagaacatgccaatccatctgtagcaaacttgtagccctatgatccagctacaaatcgactatggcaactatcctcaatcgagcaacaaatcttactcaaaatcaag

SEQ ID NO: 29247 - DNA, 371 bp, Zea Mays
gcaaaatctcctgcccccgaagccgctgtcgaggatgctgattatatttatcgtcatgcttcggggaaaaagttgtccgaagaagaagttctggaagccagatattatgcgcgaaaattgaaatatccgaagagagctttagtgtttaacgacactaacgatgacgacttcttatactgtctcccggacaacaaagaaatatccatttgctgggagatagctaagagtatgggattcccgaagctggaagatgacctttcaattttgtcgaaggatgatcttgctgacagcctagcatacaacagtataaaggtataaaagttaacttttaagttggaaacgaagtatttcattgtcatactcaattcttt

SEQ ID NO: 29248 - DNA, 330 bp, Zea Mays
gtgtgcacgaactccactatcagacgaaggctagagttgatgggctacataagaacttcggatgctacaattttgcataccggaaagataccaaagctcatgtgattggttatcataccaagtgggcgactggatggacaaatgaatggttttatgtgaaggttgacgagaaaaagagggagaagcttatgactatggtgatgagtcccttgagaatgagcttcggcatgacacgaccattgtgcaatatgcaactcagctccccctgctagttagccgaagtggaatttagggttgttgcggagcatattagtactcgggatttggttc

SEQ ID NO: 29249 - DNA, 586 bp, Zea Mays
gtgaaaaagagtccaagactcaggctatcactggactggaccgcgggttaattgcctaaaaacttaaggtctcttctgcaaaatgtgcaagccgaaggggtacggaaggatcgtggccgctagattagatttaaacagcccggattaaatcgcaactcatgtgaaccggtgtgcgatctcaaccactggatcccccatcaacggagtagattttaagtgactaaatccgctctaggtcacccgatcacggatcgacggctacgattcaactgaacgaaggggtatgatgtaatctaatcctagccgtccaagaaccgatcgacgacgtctggtccatcttctacccccagcgcgacagagcggtggcatggcatagaccgcggtggccatcaccggcgagcccgactaattcgcgcggacggatcccgacgaccatcccgaagacctctaaacacgacattggatcaacacgaatattacggtgcattattacctgtcggtgtgcagaggagagctccaatcgcggcgaggggcggagaggggaggtcgagaccgcgttggcgagaaattcgcagtgcactattgt

SEQ ID NO: 29250 - DNA, 393 bp, Zea Mays
tgccgatcgaggtcaagtatgctggcatcatgcttagttagcgaagactgctatctcagatagtgagtacgacaacctttccaagttcaatttataggcggcggccttagtcctcatgtattggtgtgtttaacttgtccgctttttattatcagaacatcagtaggttttggtttgttgtccgcttttattatcagaacatgagtgtgtttaacttggcctccgcctccccctctgcgcgccgccttctcgttcgcccgcagctgcacggcaacacacaccagccacaagcgtatcagctagcaatgccagtgtataatcgagaacagagtaaaaagctcagaccgatctcgttcatcgcacgcttcacgtgctggtctggctcaatgtcca

SEQ ID NO: 29251 - DNA, 537 bp, Zea Mays
ggatattaggggtggtctacatgtgcaagccttgattgagtttctctggctctgggatgttttgcttggcattcaactcatgcccggggtgccagaccaccatctctagacaccagcaccctcaggaatttactcctccaaatcagcatacaaaaggttttttgaaggttctgttggatttgaaccttgccaaagaatatggaaatgttgggcaccaccaaggtgtaaattctttatctggcttgctactcataataggtgctggacggctgatcgtctggcacgacgagggcttgaccatcctgagagttgtcctctttgtgaccaggaggaggagatgatgcaacaccgcttttagtgtcttgtgtatttactagacaaatctggtggcatgtcttttccccaatgggctggcaagtcttgactcctcaacctcatgatcatgttttccaggactggtggaggaatgcagagcagcaggtggacaaaagtcagcgcaaaggcttcaattcagctgtcatcttagtcgcttggtgg

SEQ ID NO: 29252 - DNA, 392 bp, Zea Mays
actgctgcctgtgagcactgatcttcaatttcttcctggggaatacacatatcttggtgcacattttccggtcggctccagctgcaatgcaggggatggggaatggggagaataggtcacaacagctagtactcctagccgatctccacccagccagcactgcaatgtggacggcacctagcatctattggagagaatgggaaggaagaagagagaaggagagctgatcttcaggaggaactcatgggcgacaacgccgggagcagtgacggcgttgcggacgacagccatgctcacacagactaatcctcacggcggaggattaagctgtgtccagcgcgccttagagagaatccatgtctataccagcgtctgcacatcgtgtgggtttt

SEQ ID NO: 29253 - DNA, 879 bp, Zea Mays
aattattccgaaggttgagccgatgtacatatgtaatggcttgtatgatgaggttgtgtgccttcgcacatttggctatgctcgcgaaggcgttgcgcacttggcctggtgtatttgttatgtcggtctggcgcgcatgtagtcggtctttgcgcggacagtttggtgtagtcattttcgcacttgttgtgcttggtccgggtgcaccctaggcgacttttgcacggatacttcgatttttcgcacttgttgtgctaatccggctgcacccttaggcgacttttgcgcggagtgtcgcacgcgagggtagctagcgctgggcctagcggtgactttgtattggtcgaatgtcgaagaccgtcgtcgtggtcttttttcgacgtagatttttgcgggggatttttcacttgtatattacatgactccgcctcgttaaaaacctcacccccccgggaggaaaagagtgcgggccagaataaaattgtttttgcgaattacaagggcgagctgaccctgatgagtcaaacaaaaaatttgcggagattatcgatgttccaggaatgctccaagtcttcgccgtttggcgttgcgagcctgtacacgctgggggatgcctttgtcttgacaatgaaagggcctcccacttgggctccagcttgcccctggactctgtccgagctgttcggacgagtacgaggtccccttcgctgaattccctcgggatgactgcgtggtcgcgccatgctttcgtctgggcttggtatttatttagagcctgtagagcgaggacgcggtctccgtcgataagatccttcgaagtgggttcgtccacgtcggggacgactgacgcaactgttcgcggggacctatgctttattt

SEQ ID NO: 29254 - DNA, 387 bp, Zea Mays
gcggaggcgatggacgtcacgtcgttttcggcggagggggaggaattaaagagtcacaattccactcccacttggctaagcttcctcagggtaccgtatcatattataatattgtctagctactagaatgttgtgcggtgatagatgatgatgcaatgcaacgcgagagcgaggcagctagctagatagctagtcttgctgaaaagcatctttagcgtgttgcctcatcagctagcttaatattctatcgcaaagtacctgatatcaatcatccccttacgatctctctctctctctctctctctcttctaatcatcctcgtgtacaatgaatggttgtataaactatacaaggtctaagctagggtagaccgtatttagatatggc

SEQ ID NO: 29255 - DNA, 334 bp, Zea Mays
caacaagccaatgtagtgccacctaaactgcctaaaatggcacatgctaacacccccgcaatcagatcgtcagccactgtgcacgttcagactggtcctgaattcggtgaagacagaggatggaaggcccttggtgaagatgtcggcatactgtgatgtcattgacacatgtaggacatgaagatcaccagcggcaacccgttctctgacgaagtgtagatcaatctcaatgtgtttggtgcgttgatgctggatgggttcagaggtcatgtagacgacactgatgttgtcacaatacaccagtgttgcgcggcgaagaggagcatggagttcc

SEQ ID NO: 29256 - DNA, 378 bp, Zea Mays
gtagctgcctagggtgggcttagcactagagtgattaagcttatttcagaatttgtgttcgcatttttatccttacctaaaaagaattactagtgttgtatgctcattttgtgctattggacgtaagagaccattggaatatgtttcactgaccaatctgaataagccttagtgtttaatatttctgtattgagcatatatgttttgcttcaaggtattatttatcagggaatcaaattaattgctattaccaaaaatatgtaattgcacactgtttgttttcccaactattttgatactaatctgagaagaaattgcagagattagctcttgaatttactataattttgtctaggtgattcaatcccctatgcaata

SEQ ID NO: 29257 - DNA, 565 bp, Zea Mays
tgggtcactaggggccctgcaacatgcacttcgtttgttggcctctcgtcccagcgcctatcccattgcttgtttccctccttcggcgcttagggtggaggcttcatgtggccgatgaggttttaggccttctcgtcagtggtgatgtagatgtttgcttctcaaaaaagttgttctgaggtggcttgagctttctggaggatggcccagacaaaggccgagtcattagacccgtggtagaagtcctcgatcacggtggcctccgtgacgttggggatgtgattcctcatagtttgaaaacgcttcaagaacgagtggaggggctcgtcgcttcggcgtttcatggatttgaggtcctagggttacgctggcttgttggaaagggattggaagttcgagacaaaccggtggcagcagtcggcctagccgtcgatgcaatggcggcgaaggtgttagagccactgtagcgcatcctacccaaggacgatgggtaggtacgttgtcatgatgtcctctgtttccccggtgacttgggcgacgaacgtatagacgactaactagctgc

SEQ ID NO: 29258 - DNA, 572 bp, Zea Mays
caagaattgggaaatacaaaaggtttatttgactacttgtgtggactaatgggcctgattgtaatagtttttctataagagaggacggtgggttgatttgtaataatctgagggtctcttttgcctaaacacgtggccgaagggatatggctaggtctcagccactcgatcaagcacgtgtggcaccgattagatcagtcccccatccaaatcgatatgtgttgccatccgctagatcgaagatcgacgactatgttttaatgaaacggggagctaatcctatccgtccatcgcttgatggacgaccctcataacctgaccgaaccggcacgggtactgtctattcatagtcgttcatccaaggatcaacggctagtattcctcccacgaagaggtgtgagcaggatctaatcttggcccttaattcatccaatggacagtgtagatgcctccgcccatgcccccagtggttacccacagcgacaccccaaacccacggtggaagtcgtcggcacgcaaccaatcccatgtcctggtgtgccattcttcaaccggccatgctatgcgatggg

SEQ ID NO: 29259 - DNA, 291 bp, Zea Mays
cgagggggtaagatagatcacacacctggatatgtgctccaatcatttgatctatgttgtgtgtcccgggagaggtcgtcagatgtgtgattttttaaatgtgatggtcggatatatagcagcaagtgtgaaaatgtattgggcaatcagtgacacttggttaatcatatgaaagagaaaataggctctatctgattctttagtatgacaaatctgagaattgtgcattgctagtgaacagtagtacaatgtccgtgcgctgcgaaggtacccaaatcatatttaatgcta

SEQ ID NO: 29260 - DNA, 468 bp, Zea Mays
gcgatcgttagacttagtgtctacatttgggcccttcggagtcagggtatgagtcctaatgccaaagctttttgtcgggtgcatgagctgcattagcaaacgaaggccagagcagatggtcttcatgagaacttcggttgctacaactttgcgtactgaaaggatacgaaggctccggttcttagctaccgtactaaatggccgactagttggaaaagtgaatggttttatatgaaggcagacgagaaaagaagggagaatctgatgactatagttatgagcccactaaaattgagcttcgggatgataaggcctttgtgccatatgcagcttggctctccatgccaagtagccgaagtggaattcagagtagtagcagctgaagtcagcactagagatctagtgcaagaatacttggcaaatagggtatttccgacctctagtggttggggaatgcccaagaagaag

SEQ ID NO: 29261 - DNA, 512 bp, Zea Mays
gccggagatagcctcttcgcggccttgcaccacgtgccttggcacattaacctcaccgccgtgactcacgttagcccgtccagtggtcgccagagagattgccacggtaataggccacgaatcaccgcgccagtaaccttcttcttctccggtcgtcgtgcgtctctctcaaattcaccggccaccactgtgggagcctataaattgtcgaccccgcctactccgctaagtaattgtgcacccagcagagcaaccagtgcctcgaatcatccactagagctccccaatttgggatttcccccaaatcacccaagaacaccgagcggtgtgacctcgccgtggtcagctcatctcacgtcccctcatgccctctgccctctcgttttagtgttcttgtgtgcccctgatactcctcgactaactcgattgagctaagctatcttagatcgccgggaacacatgggtttggccgttgatcatacagttaccgtggacagagaaggttagagcgc

SEQ ID NO: 29262 - DNA, 393 bp, Zea Mays
cgacaagttgaagatcacaatacaagttgcaaatcacatacactcagcgaagggtcaccaagcccaccacaaataaatacaattgcgagggaaccacatactacatcggctcaaccttcgggatgatgcccgcctccctataattgaacaacattattttcaattcctcaccctcaaaaagattccgcagatcagtctcaccaatgctcgccccaatcagcaaagacagtagctctcattaaccaaaaccgctctactcgaagacggttccgctccatccctatccgcgcggcgcctaccacttcgcgaaaccttgccaacgctatgctttgacaccacccttcgacaccggcactcggtcctcgcactaggaagatgagacatctcggcaac

SEQ ID NO: 29263 - DNA, 398 bp, Zea Mays
gaaaaccctgttgttgcgatgaaaggtcaggtaatgcagaacaaaagcacgttggtccaatggttcatcctgaaatagacataatagttgaattaatgataagaagatgtataaaggagtaatatatgcatgatcaaaacactaatttagtaacataccggtacaacaaattctgataagtcgccatcatcaaaatcgtagcatcggaggaagtttgcgacaaaaaaaccacaatcatttgaccctggtatcatggttggacaattgggaagaagcttaatcttgtagttgctaaactttggtaaacttgaatctggtcgagcttcatgtaacgcaatgctaagtcttctcattattaatctggaccaaggtatttttgttccatttatcaacaattg

SEQ ID NO: 29264 - DNA, 293 bp, Zea Mays
gcgctagtgcgcgctctagcgtctggcacaacgtcgagcacgaggcagcgcagagagaggtcgtgttcaagcgcggattggctccaaatctttgacattatagccatgatcccgttgagagatctcttcccctgacattcctttgtcgtttgtgtgtggaagcttgcaggttttgctgactggatcaagagatagagaggggagaagtcgggtttgtctcactgccgaccacagagaaaagatcccgggtttgatgtgtccagagcacgcgtctcgatgccatcttctagtat

SEQ ID NO: 29265 - DNA, 287 bp, Zea Mays
atcagctgggaggggtagcaatcggcaagggggccgcaagcgagccagtcgtccagccagaagtttttatgactgagggggaggagaacttgtcaagtcttaactttttgctggacagggggaggccgaggtatgactgagggaaaccgtcaagccgacaattcaggatggaggtgaggtgagcagcatgatctaggaattgttcatgtgcacgttgaagaatgcgtgatcaagcagttcaagagtgggagatttcctcctgttcgtccatgtgaagaggcggtcgg

SEQ ID NO: 29266 - DNA, 438 bp, Zea Mays
cactcggtctccggtgattttcagcaaagcgttggcgaagttgcccgtgtgtcgcttcagtcgacgggatctcccgttgaacagagatcgacgcaccatcagttgctggaattccttcccgatgcgcttcggttgccacccctttcccaaattgatcaatcttagcttggattgtcttcagggcttctgcaacttccgacaccttcgtctcgacctctggccgccatcggcgaagttcaccttgttccttcatcaaccctttgaccgttgcttcaaccgtcaccatggatgcttgcattacctccatgcgccggtgtgtttccttgttaccctcctcgatcttagccaacagttgcgccatcggatcctccacccgcgacggcgccatggcttgagacctggtgaagtagccgtgtgagtgctccagtctcagctccg

SEQ ID NO: 29267 - DNA, 426 bp, Zea Mays
agccggaggagtcccgatgcaaagactggaccggaagttgcagaacgtcgacgaaggaaggcctttggtcatcacatcggcaaactggtgcccactcgggatgtggagaacgcgaagatcaccgagggcgacatgtttcgaacaaaatggatatccagctcgatgtgtttggttcgcatgtgatgtacggggttgctggacatgtaaaccgccgagacgtttgtggcctaccgcttgctcgaccatgaaaccagcaatttgctgaagaagacgtagtacctgaaagtggaacggtgggtatccgggcagccgtcccagtcggcgtccgtgtaggcggtgatggaggttgtcaaggatgcccgaagatgtaggccgagagatgtcgtcccccgaaggtaacgcaagatccttttcaggagagcaagg

SEQ ID NO: 29268 - DNA, 314 bp, Zea Mays
gatgacgagaagggagagtgcgggacctgcaccgcgctgcgctgcaggaacggccacagacgcccacagtgccctggcgacgcaaccattgatgaatgagagaggctacaggcatctcttcttcgccctccctgatgagtccctgtgcgcatgaactgatgaatcgatcatgcgtcttggccgtaccgtacgccccaccaagcaggcacaggcagagggcagaggcagagctcgatccacgcttgctacttgttgctgtctgcaggccgatcgatcgggttggggcaggcagtaaaacagtaaatcgatcgcgg

SEQ ID NO: 29269 - DNA, 426 bp, Zea Mays
gcaaggactacaagaaggacctctagaaggtgtacgcccgggagctggaggtgggtcggaaggagaagaggctggccaagaaggaggaggccttgaaccagagggaggaagtcgtcatagagctccaggccaagctaagtgccttcaacgaaatcctggaggagcagcgggtccagcagatcgttgctatggagagcctgcaaaagctgcagcgagagcttgatggcaaggcccgcgacagtgccctcgccgaggagaagcttaaagcgaaaggagaatccttggacaggcgggagacagacctcgccaggcgggagaaggatctcgccttcaaggaggaaatgcttgaaaggcgggagaagttgctggccgagcatgagctcgaggcggaggagaaggagcggacgttggaggagcgggtccgcc

SEQ ID NO: 29270 - DNA, 278 bp, Zea Mays
cttcttagagaattattatgataataataacagtgatatagttttctgtttgttaggttatccgatgtcctggacatgtctttttggccatgtgcttttctttggtaccatgatgttcttctgtaataatcatgattccacgcattcttaaatgataatggtacaagtgtttcaaaaagctacgaagattaaacgctatcaggcttctctattttttcttctacaaaaattaaagcgtgtcaataagcccacttcgaccttttgtatctagaaagtgt

SEQ ID NO: 29271 - DNA, 747 bp, Zea Mays
cgagggacgggattgatggtggtggcgcgagtgaaggagagcggcagcggagacccgagaggtagggagagaggggaggctggggttgtaattctgggacgggattgacgatggtggcgcgagtgaaggagagcggcagcggagacccgagaggtagaaagagaggggaggctggagttgtaattctgggacgggattgacaataatggtggcgcgagtgaaggagagcggcagcggagacccgagaggtagaaagagaggggaggctggagttgtaattctgggacgggattgacaatggtggcgcgagtgaaggagagcggcagcggagacccgagaggtagggagagaggggaggctggggttgtaattctgttgtaattttgtacacgtgacgtgcgtacggcgtcatcaggcaggcaggtagccggtttcgacgtggacgtacgtccacatcaattcttgtgtggcaccgttggcgccctgtacgtacgtaccttcctctagctagcgatgttcaacgtgcatccttgtcgtatggcatcatgataaaccgttaatgcgtatggtgcaccggccggcctttacgtcgtaccttgtcatgcattgtcccgcacctagctagctattagctagtcgctgaattcatggagagtaggcatgtgctgctagctgcttgtcctcctactgcaccactcgtcattacatgctgccgctgtgtccgatcgatccatccgtccgtgtagc

SEQ ID NO: 29272 - DNA, 412 bp, Zea Mays
tttgtttggtacttttaattcgtgaatgcgtactgtgactgtattataatgctgtgctcagttcgttcagttgtctgtttgtttacagtaaactagtaaaatgatttttttattagggtacaaatgtagacctgcttaattccattattagttttatatatgttgacgttgaggtcttggtggtgtggttgatattatctgatttgttactcctagtctttattgtgtaatatccacctgcgatctgcaaatctaatgttgctacagtgatgagttgggcacaaacaatctcagatttgtttccgcaccaggttatgtataaaaccgagaacagctgttaataatgctggttggctaaagtaatctggagagggacttacaatactgtactgtttcgacctggacgagcaaa

SEQ ID NO: 29273 - DNA, 391 bp, Zea Mays
ggtcccccttcccctcatcacctgtgcttccgcgaaacaacgcttcgaattcaacagtgcctaaattatgtgacacaaccctaaactttcatatgactactatatagcatgtgttacacacgatcccgaggagatgaatgatgatggtggtggcgcaagtggggagagggggaagggatgagggatgattcaaataaagtagttcatggggaagggagatgagttatccaactatctggaccgttgattttgatagtgtgttaagtttgagtacaatatgtttggtgaatttagtgggataatgagtatgcggtgatttggttgtgtgacttttgcaaagtttaaactgatggattatatagtggtaagagcataactcttttctattata

SEQ ID NO: 29274 - DNA, 408 bp, Zea Mays
tgttcccaaaagatttaccaggtatgccacctgagcggaaagttgagtttgccatagagcttattcctggcaccgcccccatttctaaaagagcctacagggtatctagaccagagttggttgagctcaagaagcagatagatgagctcttagagaaaggttatatcagaccaagtacctcaccttgggtcgcccctgtcttgttcgtggagaagaaggatggcactaggaggatgtgcatcgattaccgagctctgaatgaagtcacgatcaagaacaagtaccccttggccagaataaaagatatgttcgaccagctgagaggggccagtgtgttttcaaagatagatctgaggtcaggttatcaccagctcaggatccgaccttcggacatcccgaagacggctt

SEQ ID NO: 29275 - DNA, 550 bp, Zea Mays
ttgctttctccgctgcatgtgaattgtgatgtgagtccccctgcccagtccccaccccccacgtcggtcgtggtggtcagactccagctctgaattttcaacgctggatggcccatgagaccagcaagaaagaaaaaactttgacttccattttctatattccgtagcaaaactaatataatacaagcaacatatgcagctttaaaactattaattaaggtgctaacacgttgacgtcaagtcttgcccctcggatctaccatccacggctgcgtgccatgccatctcgcccgagaacgatgcaccctgcactccgccaagacggtggatccgattcacaatatttgatttgatgttagcaccctaatcatttttacactggatatgttgccatataaatgtaagtttaaactttgaagccaacagctttagctcattaagctcacgaagctcgttaactgcacgagctcagcaagtcgaaaaatattaatgaatcgagctagccgattcgagcgagctggccgagctgtgagttcttcatatatccaac

SEQ ID NO: 29276 - DNA, 567 bp, Zea Mays
aggagttcggacttcaactccagcacctcacaccccactccatcctccaggtggccatctttgtccatttccttgagatgttcgtgggagtggcagcatgcacttctctcttccgccagttttttgtgctggtgaggtctgggaagggcaaagaccaccttggggcctactacttccagacaaggccagatccaacagtgacctacatcgcctcccttggcggcgcgaggtgggagaactggcagaacgactgggtgatcgccagtgctgaggtcaacgaccgccttgcccttccgagtgacgggcccagactcgaccagaagcaatggagggtaaaaccatgcctcgtgccggagttcgggcctgtcctagacaggattaaggaactgacggttggtggcctgacctcgatgcacgtactcgacgatttcctgaagcgccgagtcatgccactgcaggggaggtcgcgtctgtgttgctggtttaccggccctattgacattggtaggatccagcgcgagcctgggactaacctgtcctgggagcagatggaaattttggtgaggg

SEQ ID NO: 29277 - DNA, 315 bp, Zea Mays
attgctgcttccgcaacctcagggatacaatttctcatggtctgaaaccttttgaggtatgaccggagagtctcatccccttggcgcctgatggatttgaggtcccatggctgcactggcttatcggagagagattggaagttggcgatgaagcaccgactgaagtcgctccagtcgtctatgcagtgtccgggtaggtgtcgtagccattgcagcgcatcttgcctgaggacgatgggcaagtacatagtcatcacatcttcagttgccccagcggcttaggcagcggtggtatagacagcgaaccagcctctt

SEQ ID NO: 29278 - DNA, 479 bp, Zea Mays
cgcacatataagatgtacccgactttatcccttaaatccgggtgtgacaaattttgccggtcctcgacaccgccgttcttcttcctggtgtcatctccgcgccgtcgacccattcctcaccaactggagatgctactcgtgccttgctgtgtacactgtcgtcgtcgcaggagatctgcccctgtgcccatctggccttgctccgggttcgtcacaacatgtctctaatcggcgtcgttgctccttgctgcacgcgctacttgtcggagactcctcgctacgatgccatgatgttcgtgaatttccttgctggagcattatctgggaagccatgccgtcggcgccgttcatcatcgctgcgccgagctcgcccaacgacctcatcgtcacccgtcccttcttgtcaacgcaccatcagttactgctccctcgccgctagtgacccacgccaagcgttgcgctggaagctactccctcag

SEQ ID NO: 29279 - DNA, 685 bp, Zea Mays
gaagggctatccacggcggcgcggagattcaatttgggggaaaccccgaattgcagcgctatggcggatgattggagatgagagtgggtgctttggcttggggataacctaatggagctcacagaggcatctatttatagagatcgaccgtgagcacgacaaatttgagcggcggatggctatcagtaagaaacaagatgagtcaccggcatggtgattcgttgccttcactgtagcggcctccccggcgatcatcggacatgcataatactggtgattgcgacatggtaattgctgaggcacgtggcattcggtcgacggcagccaactctggtgatgataatcttggccgaccgcgcggtaagtgggcatgacggccggaccagctagcgatcgaaacttatcccaccactgatcttttcatcgcgcccagtgttatccactcctcatcgagcacgaatctcccaggcgaaacccgattcccggcgcgagctcaccggcgatgggtgcactgcacctacaatcttcttcagaccactgttcattctgaatctcccttcgaagttgcctgacaacccatgtttgagccacaattactccctgctctaggcagtaacacacctaccttcctttgacaaagttgtactccaatatatggtctccaaccttgtcacagtgacccaag

SEQ ID NO: 29280 - DNA, 618 bp, Zea Mays
ctatagaggcaagataggtgtcgacacatttgtctcccacgtttaataattatcttcgtcatttcccaaaaacgaaagattcattgttctgtattcctagcacaatgatattgcgtgcattgctagaaatttcatcatcaagatgaacctctcagtgaggcaaatcaccatcagggtgaattaatcggaggagagttatcacagaccacgtgaatctgcaatcagaacatatgctttgactaaggcttatggatcatattcgcaggcgtccccgcagaatagatcaaatgccaataagtcaaatgtggatatgatattaatctcgggtatatccacatctacatcaggtagaagcattcaaaccaatatggttaatcctcaacgatttctggcaaactccatatacacaagagtacacactgaacgacaggttcagtttggcttttgtgcgttttatagaatattgaggcattacacaagatgggcattcctccccctaatcccgagatgttctaaaagcatagagataaaatccccaaccacaatcatccagttgtggccaatgtatgctattgtggtgatttatttgggaaatcttacgcacattacagatcgggg

SEQ ID NO: 29281 - DNA, 309 bp, Zea Mays
ttatatctcaatatatgtttaagacatttcagttaacgtgcccttgaccacccttgtttcttaatgatccatgagcggtcattctactttgcatatccttggtgatctcgttgtctccttgtaactccactcggtaatgaatctttacttcaacccttctgttggaaccttacctatcttacccttgattgttttatccactttgtcgtttcgcgagtcttgccttaactatatactttgttatgcttttaattattatcatatgcacccttgacacctctatatcatacattaatgtttgtctcatac

SEQ ID NO: 29282 - DNA, 498 bp, Zea Mays
gtacgaatggttctcggtcgtcggattaaaaccctacggtcccgattagatccaaccacgaatgaatcagtacaacgcagcggccgttggatcgaacatctgcgttccagattcaaaataaccctggccacttctcgccctcacgatcttagcttcacggtccagatcagttagcgtgaaatggtacgcgcgctataatcagggtcgtccatgaccagataaacagcccctgcgtgccatctctcaccttggcctcgcccacggcgacgaacgacaccacggtggcgccatggcaggctgtcctccgaagtttggaaaccaagcccctaacccgcaactaactcgtaaatcgtagagaagaagactaggcgaatcatcctgagggttttcttaccgggattagagcgatgacgtgagcgggcgacgaggtgaggcagatccgaggcaaagtctaactccggcaagagattcctaatgccaccgccgtcctccgcgtga

SEQ ID NO: 29283 - DNA, 336 bp, Zea Mays
tttggagctgctggcaagggataaatggcaggtcaaagtgccgaagtgttcctttgcgcagtctcagctggcgtatttgggacatgtcatttcagctgacggggtagcaacagatccatctaagattcaagctgtcgcacagtggaagacacctggcaatgttaaggaattgcgtagctttctcgggctagcagggtattaccggcggtttgtgcgccattttggggtcattgccaaactattgacattgctgttaaaaaagggggcaatatttctctggacatcagaccatgagttggcttttcaagcactgaaacaagcattggtgacagcacc

SEQ ID NO: 29284 - DNA, 411 bp, Zea Mays
gcaatcaaaaggtagcatatcatccttccatcttctattctatattagtagtacgtcttttttgtaacctgttgtatctatcatttatctaactaatgcttagactatatatatactaggccagctgaatgaatattagcttgtgggccgggcgaacggtcctgttaaacatgcttaggatgggaaaggtgatgcagtccaggttcatttgttcaggcttctacgcaaagcaatgtacattattatatagcttcgtgtcgtgcctaccatgatcgtagaactccctttacaaaattaggccacggataaactttggagaatatgggggattgggagtggctggcaagtacgaggcgactagctgtagaacttgtagcactctattgggattgtatcactccctatcgggac

SEQ ID NO: 29285 - DNA, 378 bp, Zea Mays
accgaacatgccattgagtccagaggtccattttgcaatagtatcctaaaagaccaagttgcaataggtttgcctccgtcacgacacgagggtagactgtatggaagcagtgggatgggacataaatccttcattccaccggattacaatagagtacttgaggcacatcacagcatcctacatcagctagcgataatggagccatttatccaacaacacatcaatgagcttcgcgagcaaaattatgggcaaaaagatcactgagtaatgaagcaacataagcagcggttcaacacatggctaattgtgaaggacattccacgtgaagatacaatagaagaacaaaccatcaaggggttggcatctagaccatcacgc

SEQ ID NO: 29286 - DNA, 453 bp, Zea Mays
aacaaaagtctagcccccttgaatccaaattgttaaacatcatcttgggatcatcatttcatgtagccatcattcaatgtaactagtatttcatattcaaatcatattactttaattcaaacacttgcaataactacccatatgcaatttaacccaataggtatcaaggcacaagataaacaatatctaggatgtccttaaggtaacaaattagacacatgcaatatgaattatgatggttaaaagtgaataggtaacaaggatagtcccatgttatacttgcctttgacttgagatccttcttctatagatgacaaccttcaaatactcgattcttgatcaccacataattctcatcgacttgacacgatcataaaataccacacaagcataccagacaagcacatgcatagcatacacatattcatctaaattagaatagtacaacaatca

SEQ ID NO: 29287 - DNA, 286 bp, Zea Mays
ggtttatatgggtaaatatgagtgaagtgtgcgcttggtttgattttaggtgaagaaagtggaatttgggcactcggctcggaatcaatcgctataaagggaaatttgtgtaaaattgaagcttgggatatcggattggcatgagattttgcgaatatgttactggaggtattttgaaggtgcatgaaaattttgggatcgattggagcatttttggctggtttgggcatttcaccgagcacgtggcgtgcgacgttctaggtttttggtgaaatggctagtttag

SEQ ID NO: 29288 - DNA, 464 bp, Zea Mays
aaaactttaagatccaagcgagcattcaaattatccttagattttccagctatgtccaataaagtattaattatgttgtcacacacatttttttcaatgtgcatggcatcaaaattatatcgaaatatcaagtccttccaatatggaagaaggaaccaaataggtttccttttcagaaagactaatggttccccttccttccgttttttccttgttgccttaccagatgatttcttgccataaactgtttctagattttcagtgcattccaaaatttgctctcctggcagaggaagaggtgctggtctcaactcagtttgggcaccgaaggaatgagtgtcaaatctaaatggatggtctggatgcaagaacctgcggtgtcccatgtaacaagtcttgctaccatttccaagtctaagggaacagatcaaagagtggcaatcaggacacgctgcctcaccaga

SEQ ID NO: 29289 - DNA, 494 bp, Zea Mays
gtaagtttgcctaagacacagaaagctactggtgtggaaggcgggttgatttgctaaaattataaggttctttctgcaaactgcacacgccgaaggcgtaagaagagttaacgatcgtccgatcaagcgcggatggctcggattagattagtcccaccgtgaactggtacgcaatctcgaccctcagatttggatctgacgacatagattttaaatactaagatctaactacagccactggatatgagatctacggtcaggattgattgcgcgaaggggtaagtagtgatctaatcttaaccgctaaacctgagatcgacggcttctatcgtgtcgttccccatcacctgcccttctcggcgaacagacacggtggagctctcacatgcggtggcaccatggccggacacggcgaatcagcggcttaccaacctaaacagagcaaaactacaccgagagaaaggggagagggaggcgaactcgccagagcggtc

SEQ ID NO: 29290 - DNA, 333 bp, Zea Mays
atgctgcctagaaagccctcctccaactatgccaaaactacagcaaggaagtcttcgagacacccctctgctactttgcacccagcaacaaaaataaccctgcatggaggaaaagactctaggccttgtcatggagagagcataatgaagatgaccctaccataatctacatggtcggatatctccacacccttgacaaccactttgatgaccttttctcccactgcacccacctaaactcccgggtggaaaacctagagcggcaaatcaaggaattgaaggaagaaaaggctgctcttcaagacagtctcgagatggcagaaggcgaggaag

SEQ ID NO: 29291 - DNA, 293 bp, Zea Mays
caaggatatattcgaacgacattttggtgtacctagggttttcactaatgaggtttacaagattaggatcaatgatggtaagtgaccttagcattagtcgcatgacgtcatgatccatccatcttgtactcctgtagctttggatcttgttcaccagagtcttgagtctgctgcacatttcagttgactcttcccctctcttcatggtgaacctccctagctcgcctaccaccaactccatattggtaatcatggttatattgttcccctcacgagtaatcttgagggtgtcc

SEQ ID NO: 29292 - DNA, 394 bp, Zea Mays
agtttgtccccctaaatccgggtgtgacatttcttctccattcttatatcctgctttgctacactcgcttatctctctggttcttgtgcagcgtattagtgatcagtcaggatggtgaggaccaagaatgtcaccccagtagggggagacgatgattaggaccctcctcgcccattcagatagcataagggcaaggatgtataccttgagcagcaggcaggaaagatgaaaaggaagttggatagagctactcgagcagcagtagcagcaccagctgagagagcagagcaaggtgggcgttgaggattggctcagatcagatcgcctttcgtgtcagtcacctctcgtatcgaactctcttcactctagctcggttcgacccctctactcccgc

SEQ ID NO: 29293 - DNA, 541 bp, Zea Mays
ggcgaatccgtaggtggagccagaagtgtgctttgattctaaaaggcatcatgcatggggccctcatgtctttgtgccttgaacggagggtgttcctgcacttggcttcgtaatggtgcttggtggcatacctatggggacctcatcctgattgcatttaattctctggattatgcttttggaccttgccgagcaggatttcaagaacctatccctcagtgaggataaggtttaggtctctaggggccaagtcctaggtactagaacagttgttctaggatggtggagggcttacggtacggagccaagcttctagtatggaaccaggctaagtggctacttgcctccagaccacccctcagaacgtggtcctttcccctggacatagccccttacaacccgatccttatccattataaggggaggttctaaaactgagtgacaaggtggaagcaggtttcttgaaggcaacaaaaactagatcctactcaaggttttaggtgagtggcgctcgggccttgcttcctgttgtaaaggcaag

SEQ ID NO: 29294 - DNA, 454 bp, Zea Mays
ttgcttcagggcttcaacaacaatgacttcacgactttccaaggcagctacacgggcttgagctgtggtgagatccacatggagctgatggttgcgcttctccgcatcttctactcgggcaatcatctgacggtggtgccgagccacgaaatcatactgcgcatccagggtgagcaggtatgcagtgaggtacacgactgtggggtcgtcctcaagcagctgctgcccttccaatgcacgcatcctggccatccaaacgggatggtttctctgaaagggcgaaaagaatctgagcggggtgttggccacttcttcttcatagatctgacacagggccctcaatgccttgcgggcgacaacttggcaggtgtctttgaatctgtgcccagtagcagtgacacttcattccacatggtgcggactggatccaatgtatacagtcacaacacacttc

SEQ ID NO: 29295 - DNA, 296 bp, Zea Mays
gaggtgaaaggtccttttcttttaccatccccaccatctactgagaaaactagtgctgcaacttttgatcgtaaacccacatagccatgtaagaacgttgaagagcgcgtgacaactttacgtgtgttccggagagcaaaagggttgtgtgacaatcgtgtagaaaattagtatcgagtgcatacatatagcacgacaatacagttgcaggctatgcaggaggtctgggatttgttttctgtggaggagaacccttctcctaccccttatgaagcagcccctaaagaacacctctt

SEQ ID NO: 29296 - DNA, 761 bp, Zea Mays
gcggcggagaaaatgaaggggatggtggtggaggacttaccagtgtgtggaggggaatgaggaccgaccgatttccggtccctctgtggtggagaagaccaaggcggtggcggctcggtctatgcggtgcagaagctgaagtcgacggcgggttggtctctgcgttggagacgctgaaggagaatgcggatagaatctctagggttcggtcgccgcggtggagctaagatggctcggtctctacggtggagaagaacaaggcgacgatggctcgatctccgcgttggagacgatgaaggcgacgacggctagaatctctagggtgtggctgctgcagtggagcgaaggcgactcggtctctacggtggagaagaacaaggagacgacgacgataatggctagggttcggccgtagcgtgcgttgcgggtgaggtgagctgaataattgcgtgctcgtgggtggaatcatgggcccgatacacatactctgctggacgaaatctacgtgaaggcccatggaccgacacgtggattactgtttcgtaaacggaaacataagacatcgtaataccaatatttgtgtggggactaatatggctgcccagattgcgggaacacaatcttctcgtgggctcggatacccaaaacatgcacataccataattgtataaactgatacacaaattagcctaacatgtattaatatttgacgtaagtagttaggtacagtaaggcaaaaagtgtccgatgcggtctgcgca

SEQ ID NO: 29297 - DNA, 283 bp, Zea Mays
gtcatgggatggataattattttctgacccttaaacatgaaagaataatgattcaaacgaccatgatgtaaactatcattatcatattgccacggtctaccaagtaacaaagagcatgcttccataggaataacatcacaatcagcataattgttgcagccgccactatcgatgatgatgcgaaaagggaacacgtaccgagcgtgtaactttgattttgccaccatcattaagccattgaatgtgatatgggttcgggtgcttatgagtgggcaaggataac

SEQ ID NO: 29298 - DNA, 279 bp, Zea Mays
tgtagcatcgcctttcgagaatgacgttgtaggacccccgaaagtccaccacctcgaactgaagccgctcggtgcaaaagttggaggggtcaccaaatgtgatgcatatagtgatccacctgagcgggtaggcctggtggccaaagatgatgtcgtgaaatggcaccgagttgggtcgtagtgaggagtgtgtgatccctaaatcatcgaaggtctcaacatacatgatgttgaggtcgcttcccccgtccatgagtaccttggagaggcacttcgagc

SEQ ID NO: 29299 - DNA, 330 bp, Zea Mays
tgttgacttccaaatatgaaatccaatttagcctttccaccatatgccttctctagatcatgggttagagcattcactctatctactaatacttcattctcaacaatgatttgtgattcatcacgagcaatattatcattcataagagaaattttgcatttatcacaaatagagttagtaggttgtggttcacttgtaggactatcaagtaagtcacaagtgactccaacatcctcagtgatcaccacaacttcatgcacaatagatgagttttgagcttccacaagcttctcacaattctcttttagatcgttgtgagaggtcttgagc

SEQ ID NO: 29300 - DNA, 921 bp, Zea Mays
atcatatttgatggtatagtgcaacagttgtacgacacccgagggtccagtggcaagccagttcgatggactctccccacaaaaaaataaatttaaaattaaagtggagtagtggaccctccccacaaaaaattgatttaaaattaaagtggatatatggcccacataccggatattaaactacaaatactgcattttatcttagctaaaagggagaaagttgagttgaaaatgagacctggcctttttttatagctcacttggtcgctcgtaaactgtagatactgcattttatcttagccaaaagggagaaaggtaagttgaaaaggagacatgtccatttttatagctcgcttggtcgtcctccttcacctagagacgtggtactatccgggagcgctgcgctgtgtgtagcttcgtgtcatatgttgggcttgagtgtttttctcactacctatctgagaggtaacgacctgtttgttaagcgagacatggggagaaaaatagatctactctacgcgtgtgacgcacgacgcacaaaactcgtgttttaaaggagtagagattaagactattagtccattaggctagaactcccattacaactacaaggtgagggagtgctagtatggacagctatgtgcaagcttgtaatctacttcacatttgtgttcatcaatcaatgagaggatgtagagtattcacaacctgaacctctctaactgtccacatgttggctcctagtcgtgccatgtttagcacgaccgccgacttacaccccgctctcttccaaaacctatcatttcatgcaactacattattattgatacattgtgtggttgtgtggcaaaaatcgttgtttctgtctggcttgttgagtatcatccgctttatacattttgcttgttaatcaagaagtat

SEQ ID NO: 29301 - DNA, 373 bp, Zea Mays
ctgaaactgaatttgaaaacataaatggtcacagtggaatggagccaaattggacgcgccatatctttggattcactcgattttgacccaagtatcctatagtaagtttgaagacggttgataggtgaacaaactttattaatgaagtttgctctatccttaacaagaatcaagagattgacaggatggaaaggggtcggttcaggcaaactttgaagatccagtgcactgaaatatctaaaataaagatctgggcactgttgaatcggatgagttcggatgaatcggtggggatttgatcgcggagaggtaactttggacgtggcaccatcccgcgagctcagtcgtgcgtggccggagatatcccaccggc

SEQ ID NO: 29302 - DNA, 365 bp, Zea Mays
tacgatcggaatctaaaatatgatcggtattgtaccgtcggtaaaaaatgatccggaaacggtcggaagagagctaaaccgtttccatttctgattttttctaccgattctgtttccgtttagacctaaatttcggtaaaactttgaaaacgatttccagtatccgaaaattaccgtttccgttttcaaccctactcattagcattattgtgattttgggcacgagttcttctggaatatactttcaaactttggccatcattagtttctgtcgtgattatgaagcctcgatagattgataggagatgaggtactctttatagactcataaccctaaccctaatgggtcggcagcccaacagtga

SEQ ID NO: 29303 - DNA, 328 bp, Zea Mays
gtgacttagggcgccgaattgttgatcaccggcgatgtttcgccactggccgttggcggcggcgccgtctaacggtggggattggggagaatcacgtgtgtcgtccgatttcaatggacggcgtagattagatgctgagcgtaccgtttcgggcgagcgcgcgcgaccgtagatcctggatctgagggtggcacgttgatctcggttatgttgaacgtggtccgttgatcccagatcgtagggctggcgtagcttattccttcgcggtaatggatgatctaatcgcgaccgtagaactccgatccaacggccagtaaatccagatacc

SEQ ID NO: 29304 - DNA, 662 bp, Zea Mays
tgcatgtgaggtaggtgtcgtagaattgattaaggggttggaaagcatggcagtagaggtttgggtccctctagaggagggagggagctcagcacccgctcttgaagaggaaacagggagggcagtgggacccgaggaagcggggagagtaggtggcagggggaatagggggaaaatcggaatgtagtccccctgttgattgaactactactctatgggctagatgtggacggggaaacctgaaccacacccccttcttaggtaaaacatgagcgctttgagagccagacctcactaggaatatctaggtagtggttgacctcaaggaccagcttgattgggtcgaaatagttggaggtgaggcaagccgggttaatctccacgacctcaccaccgatagcaaaagaatgtttgatcgcctctgtcgtccattgctcgggggaaataaatgaccgacacaagaggggaaatcaatgaccaacacaagtctaggacctagaagaatccgctggaggtttcctcgaggtgatcaaacaggatggtggcatcctagaagcggaggggcaagggagcgaattctttcacgctcgaagttggagcctaagtgaagcaaggcatcacccctcaaggaaggtaggagaccaacctggagcatggtggca

SEQ ID NO: 29305 - DNA, 313 bp, Zea Mays
taaggttgctgatggtaatgtgttacagtgtatggttgtcttacctcaagctaaatggacaattcaacagtgcactttcattcaagatctcaaggtgttatctctgccttcttatgatttaattcttggaatgaactggctggagcaatttaacccgatgagagtggattggaaagctaaatggctgctcattcagtttcatgggactccggtgcttttgcaaggatgcggacagggtatgcctgatgatttgttccttcatgttgcagtggttaaacagccccaagatacagtggtgcatccggcagtagcc

SEQ ID NO: 29306 - DNA, 395 bp, Zea Mays
cgggtgcaaaggaaatacccgagcctaaaggcaagttgatagtttttgaggccttttttgctgccggtcttcacctcccggcacatcggttcgtggtggaggtgttgcgacgatttgaggtccaagtccaccagctgatgcctaacatagtggtggcgcttgcgaagtatgtctggacagttccttcctacatcggcagccgtctgtggaggtcttcaccaagaattattgcctgcattggcagaagaggaagatagggaataaaatagcccaatttggatcatgcaccttcacgtcgaggactgggaagacttcggctgaggttgtggagatagtcccctgcgctaggaacaaatggggtaactggtgggatttttggttctatgtggctcctg

SEQ ID NO: 29307 - DNA, 322 bp, Zea Mays
cctctttgacaaaggtaggtccttctagtgctttttcccctacgttggaccacatgagaggggtctggcatttctgtccatgcaatgcttcgaatggcgacatcttgatgctggcctgatagctgttgttgtatgagaactctgcgtagggtagactggattcccaacttctatcaaatgctagcacacatgctcttagtagatcttcgaggactttgttaactctttctgtttgtccgtctgtctgagggtgataagcggtgctgaaatctagcttggtgcccatagccttctgaaggcttgtccagaatttggaggtgaa

SEQ ID NO: 29308 - DNA, 365 bp, Zea Mays
cgaagatggaggtgagggttgtcgtgtgcgtgggttgtctctacctcctcgcccacaccgatattgtccggatttgcctttgccccgagctaatgtgtgcgtgggttgtctctacctcctcgcccacaccgatgttgtccggatttgccattgcctttgccccgagctcagtggggaaggatttgccattgcctttgccccgagctcagtgaggaagagagtgacgttacaacctttgtggcctcacctctcgcgcgccctcacaccaaccccaacccgtgtttgctccgatccgccattcctatgtcctcgccctgacacgcactcaccttagccacatagccttgcgtcaccataccctcgcc

SEQ ID NO: 29309 - DNA, 318 bp, Zea Mays
gacacaccaaaggcaacattcatagcttcgtcctcagctttggtatacgcccctaatagttcatcacttgttgctttgatggcgtcaaggcagtcattgtcaggctcgccaaattgattcatataccgataagagtacttcaaatgaaccagactgctttttctggcattcacatcagcttcagcatccatcggcatttcccacttggcagctaggggtcataccttgaaaactatgtgctcttgcactaagtctctagtgctgatatagctgcacacaacgttgaacgctgctaggcaggcttgagatctttcagta

SEQ ID NO: 29310 - DNA, 337 bp, Zea Mays
cagctattgaagccaaaggacctgctcctacgcagaggattgaagagccggctgcaatgccgaagactgacaaaattgaagaaccgagaatcgaagggacaaaaacattagaagttctaagcccttcggcagaagtggaggtgccgaaggcacaaaaaggtctagcagcaacccccaagagaaaaaggatggctagtgtactagatgtgctggagacgataaaagcttcaagctctactccagaaaaaattgccaaggctttgaaaacacagattgaaaccgagacaaagctgaccgaagccgaagctatactgagccaggctgatgccaaagctgg

SEQ ID NO: 29311 - DNA, 306 bp, Zea Mays
ctcttaggcgctaaggcgtgcagcagatgaaaggcgtgcctgtcgccttagacctaagactaaagcgtccgctttgcccagtaaggcatcaccctggcgccttgaagcttgctaaggcatcgctatgaagacgccttgaaggtctgcaagggtggattaaggggctggaaccctgacctgtgtacgctgcattttgaaacggtccagaactccagatcccgattcctggcggtggcaacgctggtctcttggctgtgacggcgtgggggagggagagagagcagagctgtcagctgtgctgggctg

SEQ ID NO: 29312 - DNA, 338 bp, Zea Mays
agcccatacgctggtaagtcatgcatggagtactggtaccaaacatgcattttgaagtttgtctttgtagctcggtcataggtccataccccttcctcccaagcatgtaccaatttatcgatcaaaggctccatgtacacgcccattttattccccaggtgtccgggaattatcaacgacacgaatatattcttcctttgaaagcacacaccgaggggggagattgattgggataacaaacatgggccaacatgtgtacggggcagcgctcattccatagggattgaacccatctgtggccagtgcagcacgtacattacgagcctcttcgactttct

SEQ ID NO: 29313 - DNA, 324 bp, Zea Mays
caaaccgccgtggacgaggcgtgctctaggtttgctacgcctggaaacgcgtcgtagacgaatgcacgtgttggtgttgccagtaccgcacgtactaggtagaaggctccaaccaagtgtcagtgtctgaagggaccaacagagaagacctccacgacggttgtggtgcagcatgtcgggagtgctgttgcagctcacgattgtcagagtggagtagacgaagtagttgaggatgagatggcgacgctggcaacaaggttgtgctggaagaaggtgaagaggtaggcatggcgacgcatcgaggattctggagtcgcggcggcg

SEQ ID NO: 29314 - DNA, 522 bp, Zea Mays
ttgaacacaaccaactccccttctggcttagggacatcttcagcccctggagcccgcccgactccgttcccaaaatagcccagacgctgcatctccagcacgtggcccgagtaaatcctcgaggttccaaattcgaccgtgcgcccatgttgcagttccaccaccgctgccggatcgctaatcgtcttctctgacgatggcacagtcgaggacgtggtcgcaacagacgacgacgaggaagaagacgacatggtcacgtaccgttggcggcggcgagcagtttgcttgacgcgggccagatctctggtagagggagagcaaaagagggcaagcaagcagagaggaaagctagggtttttttcaacgcacgcgaagacgggtaaaaagttacagcccatgcacaaccttttataggctaggggcagcgtctcgggaactcaacagtcccacagtaaaacgtctcatcaacgatcacatttcaaaaacccctgcgggaccaattcgagcgagggtagcgtttca

SEQ ID NO: 29315 - DNA, 670 bp, Zea Mays
accagctctaagaggactatttccctgtgcaatgttaggttcgttatacataactgttactgttttttagccacgtagggatttgtttcctctgccttcatctacatatgcttcattatatgactcttcctacatacttaaactaaaaacaacaacaacaacagttcggtaaatgttgttctctggggtgggtaagctagcttattccctggagaacagatctacaacgatggtcagtcctctccacagatcctgatgtttgttggcacgcttgtcaagaaatacgcgggtatactaactttgaacttttgcatttagtgcttttttatagttgggacctaatgccctttgttttagatggactgtgcttgtctggaggctcaccctgtaagtggtacattaatcctgatgttcctgaagcaagtgccctcatggctaggtaatattctgctatgtctggtgcacgtatcagactaatgtttgtctttgctctgttctaacctgagcttgactcattgtatgtaaaaaccagtgcgagaaaagcgcatagtcccattaagtggaacgaggttctatcttcgaatcagcctatgcctcatgttcctgaggaacaaaaaatcgcttatatcagagatctgcacccatttgagaataaggtatgttccatgtt

SEQ ID NO: 29316 - DNA, 422 bp, Zea Mays
ctacaaaagagaatcaaatgcaggtacaatctcaaaaagaaagcaatctttgaagatgacatctagtctatctgtgcagtagctcagaagataattgtggcatgatcctgagctgccctttggcatttgaagcagtgcatgcggaagatggggcacacgccttcataggtctcaaaaagaatgcagtgttttggttttaccagttctctgaaccgtttgtgcctagcatgatagcactggtggctatgatgttgacccagggcatgcggaagatggggcacacgccacgaagagcatgagagcaaacatagatctgccatgcacagcagctggaacaccaggtctatgtcaccgagtagaggccggtggaggacagcactgcgcccacctccatcacttgagctaatgcccaacgatcttgc

SEQ ID NO: 29317 - DNA, 284 bp, Zea Mays
agatgcactatcagacgatgaattgccaggtattccagaaaggaaacatcacaaggatgcccagctacaaaaagaagcacatgagtgttacattgatggatggactatcacctgcacatagtttcagccccgtcgccgcatcaggtccaagaaacaaaaatggaaacatggaaaaagtcaagaaataacttcaagaaagtcttgctatcaatgtggacgtgaaggtcattacttccgtaactgtcctgagaagagttcactaccggatacctccgagataaagc

SEQ ID NO: 29318 - DNA, 303 bp, Zea Mays
cggggttagccggatcataactctcatcatcactatcaaccatttcatagtcaacaccatcggaagacgcaagttcgtcattaatgtcattgccttcaaggattactaagtcattatcattttgcacctcctcatcctcctcatcaacaaccatttcaatatctacgtccatttcgatagcttcggttaagactatctcaaattgcccttctagcccatcttcttggaagaactctccatcatatgtgttcgggtctaagttataatcttcatcgttaggaacatgtaatctcccgtgcggcg

SEQ ID NO: 29319 - DNA, 338 bp, Zea Mays
gaggagcacctcacggaggcgaacgtacattggatgacatcctcgacgcccagtgcccgtaccacaaggacatgcgccacaccctccggaactgcagagacttcaagcacttcgttgggaacggccgacccttccaacctctaccgcctcccccaccacgaggaggacccggagaacctcgacagcctcagcaacaggacgggggaggaggcggagcattcccgcgcatcgacggagaagtcaacgtcatcttcggtggacatgggtcgcaagaaagtaagaggcaacagaagctcaacgactgtcagatactggtggcggccatcggccctcccgcc

SEQ ID NO: 29320 - DNA, 305 bp, Zea Mays
gccgtgttgctgcccatggcctgccatattgttatcagcagtagggatcctactccgagctctccattggcagcaatggattcatcatgggaggtgcatcgttccttcccacacattccgttcgcatgcctcccttgatggttgaggctacgacgggcctcctttttatgaggtgagcccccaagtccactattcgttatgggggatccatcttggggtgtgtcccatattttcactgttccttcccacacatctcgttcgccggaagtgaaggatgatctataccatgcttccctcagtggtca

SEQ ID NO: 29321 - DNA, 626 bp, Zea Mays
gggtggacgggcgcgcaggcacaggcgtccaggtccaaccgtccacgggcacgtaggcacagtggcaggagcaggccgatcaggcaatcaccgatcgccaacgagggggcgggcaggtgctaggcggaggcggcgagatcgtgatccaacttctagtccaagagagttgcacagggtttatgtaattgagttcgatacgtagacacagtcatctagtcaaaaggctgacgagcaaggcagaggcctatgtttttgagtgtgggggcccatttctttgggggggcggtgccgttgcacccccagcaccccctaggtccggccttgcctgcactcgtgcccccaacacaaaagggtcattgccggcatgcccacccagccttagccccttaccgtcgacgctcgccttgcactgtgtccgcaccacgccgtgcacactatcgtcatttgctgcatgccagaaccacacatgtccatttaccccctagacatcgctcatccaccccctacgtatgcgcgttcgctatctccccgccccgctgttgctcgcgtcacgtcatcacgtgtgtcatcatgcatcattcacgcttgtcacacgtgttattcgcacattgttctcgtgttttcgc

SEQ ID NO: 29322 - DNA, 313 bp, Zea Mays
acaatattcacgaactgtcatacgagacgaaggctactggcaaagaacaatatcacaataattttggttgctacagcttcgtgcctcgctctggtgcgagctatccagttccaacgtttcagaataggtggctagggtcctggatgcaagagtggttttatgtgaaaaatgaccaggtcaaaagagaagatattaagggtatcattcaacgccctatctagtctcgcttcggcatcagaaggccgtctcttgctcttgggatgacgtagaagcatgccaagctgcttataacacagtttgcacatatattggc

SEQ ID NO: 29323 - DNA, 441 bp, Zea Mays
ggctcgaggatcaggagggtcggcacccccgatgccccgccacaatacacggtggtcgtcgtgctggaatgccatcatcatggcctcgaggtcccaagtgatgggccctaaggtccgcaggtagtcgacgccgaggatgaagtcgaagcaacccaagtcgaggtcgacgcacgtgatggagaagtgctcgttctcgatggagatgggcacatcgcgagccaccccggcgcagcgaaggttgtcaccatttgcgacagtgaccctgaggtgctcccctgcggcgggtactagccccaaacgactcatggtggcactctggaggaagttatgcgtggagccggtgtccagcagagccataagtcgctcccccttgaccatcaccggaagcaccatggagctctctgtgtgaatgcctgcgagtgcctggagggagaccacaaa

SEQ ID NO: 29324 - DNA, 334 bp, Zea Mays
gctccgttagcagggcatagtggtcaccctgagttaagtaagcgtgagcatgttgcaccgtcttaagtcgttgccgacttaagccgattgctccgttagcagggcatagtggtcaccctgagttaagtaagcgtgagcatgttgaaccgtcttaagtcgttgccgacttaagccgattgctccgttagcagggcatagtggtcaccccgagttaaataagaatgcaggtcgatcatgaacaaactgagtattcttgaagccttttttattgatgacatatttcccattttacagagtacattgtcatcccaatagcttttgaaatacagttagg

SEQ ID NO: 29325 - DNA, 524 bp, Zea Mays
gaggcgagggctgaagactcgcggaggcgaagggtggttgtgtcgaaatagagcaccagtgagacgtcacggagtggaagacatcgccgaatgggtatggaaaggtctcgtcttcgactggatcggggtgatcagcgcgagctactttcctcgacgtccggaacgtgcatcagagagggggacttgcgggacctatttgagggggaagagttaaggatgatgttgtttaatttctgagaggcgggtcttattccgaaggtggagcctatgtgacattttcgttgccctcactgctcttgttgcgattgtgagtgaaaacgctgccctccccctcttcgcaatagagttgtgagggtaacagtcgtgatttgtattattgcgcaatggtgtcgttgagaccttcgtttgttgtttgtttgtgattgcgagttgtatgttgtgctattgagagttggcttggatttgtaaccgcgtttgtgccgtagggatgacttcgcggcactttaattatcggttgcgcccct

SEQ ID NO: 29326 - DNA, 697 bp, Zea Mays
cggggattggtcagaggagtgctatgccaggaagaccagctttgagttcagagtgaaggtcagagtggaggggattccagttcactgctggggagaagatgtggctgctagggctttgggcaggagctgtgctattcactatgtccaggagcgctcgaggcgcagggagcgcacgaggtcctttgatctttgggcttggtgctcggacccttgtgatattcccaaggaggtctgtttaaccgtcacatagcctgatagagagctccctcctcctagtgcccctctgcctctggttggggctcagtatgacttaccaactgatctgaaggcaggccatgtgtacaccatccgcaaccacattgaggtggttgaagacctctcattcgtccatgggagggatgttagagggagccccacttgccgcaggcctcgcagagaatttgtgtggagttacggagtgccagactctgttggagaaaaaagagagagatcagaggatcgcagaggcagagattttagtcgtcgggactgggaccatgatgatgatgaggactttcagcagaatagacgtcatggcacccgtaggcaccgcagtctatctggctggacgcgttcttcgcggtgccgcggcggtccagaggattgcttcagctcaagcggaagacgcaggccgtccaccccattcagacgtcgtggg

SEQ ID NO: 29327 - DNA, 430 bp, Zea Mays
ctcacatcccactcagattcacaggttcagcagatacacagcacctggttgatatttttctacagccaaaatatccgtcccttcgttcagtaaacagataggaaagggagtagataagtctcccatttgggtatgcactatggtccaaaacttgatatttgctactggggtgaaggcgtgaagccactggatttttgctgtccagttaattccaccacagatcctatagataaggcctcactgcctaccaaaacagtccaaatctgctattttcccagtagcaaataaggcctctagacccttagtgatgtatctcaaccttgactccatccaatactcgagtaacctaacagagaggaagtgatcttcagaatccgaatgccacattgaacacaactgtatcagcctgctgcttcattccattcctccc

SEQ ID NO: 29328 - DNA, 783 bp, Zea Mays
tgcgggacgacctcgttcctttgctgagaagcacgacagagaaggtagcagatcgtgcacgggcggagtagcaatggaaggacaaaagaaccagggtggagaagagtaggcgaaggaccgagcgctagatgcacagggactgtggcgtcgagattgactgaactgatgaggatggggatgacgatgctacggtgcaggctctgagctttgggccattcctgatgcctcccttgacgcatcaatggttgattctgttctggcctttcctcgcgagacggtgagtacttttcccatcatggaggaggctgacgtcttggagctccctaccctttttccagggccgatggccctggtgttactcgcccttccgcctaccgagccctcgtccgaccgaccacttgggtgacttctgggggagctcttctgcctcgggcttctcggaggtcccgactgacacaactctgggtacgctcgtgctcgctatgacatcccagttttcactctaaaggttagtatagaaaacctagttacctaacccgttaaaaccctggcatcatgacatttttcttttgaaactcgctcatatgcatggttgatgattgttagaagcacctcacataactactttcacctagtaacaaataaaaagaatttatttttgcacatagaaaatcacacacacacaaatagagagagaagaagaaaagaaaatggagaaaaaagaaaaggaaaccccctcgccctagaccgattttggcctagagtcccgcgctcgcgtccgcc

SEQ ID NO: 29329 - DNA, 554 bp, Zea Mays
cacagacgatagggccacgccaggtcggtttccggaggattcgatggagtttgttgcgatttttcagcaaccgagcacataggctaagaggattccacggagggtttgttagcgaggaggaccgtggcggagatctagagcggctcgcaatgaaccgagcagggtgacggacctgacgagaccgagggcagaacaactgcgtgcgcgcgagaggttttctgttggctagggtctgcgcggcgtccgatccttcaactaccagcgcacgaagcggagaggagatagggagagggatagagctagcacagggtctgcccggtgaagttgttatagagccgccgccatgagcgcgcctgatgtaggtgattgccggtggtggtttacaaccgaccggagctaggagaagggctctgacaagccgggcccaccaggcggtgagacaagccgcgacaacaggaagcgcaggcgcgggcggatcactgagcggcatcagatgcgtactggagctaaatggaccaacgatgaaatgtggccgaagtcaaggctgccaggct

SEQ ID NO: 29330 - DNA, 302 bp, Zea Mays
cggggagcaggttgggaagtagcatacggccactacgcagtagaggcatgggccttgccgccccgagaatgaaccatcttttttggctgctgctttggtagataccactttctgctagtttatcttgctgctgctcgcttatttgttccgtgtggaatctggaaagctgtatgctctgttctgttttgccttttatgtgcttggttatgctgcaacgagcttttagtattgttcctctcggttcaactttcttgatttcaccttcctcgtgcttctatctgcggcagtgtggcatctctcct

SEQ ID NO: 29331 - DNA, 530 bp, Zea Mays
tgagtacaagccgggacatgccagaggatgatgcggtcttggtgatgtccgcacctcgtttcgacttcattgagcgctccgtcagcagcaggagtctgatccatctctcattgccttgcgggaggaaatccacgcccggctcgcgggcgctgccatgggcaatggtggatgggatggtgtagtacacttatagtgggtggtcgtacgtcccaccctcgtctgcccttctttaggagataatggtggccatccacgaggaggggcacgaaggcatgtagtgttccctgcaccggctacggcgtgacttccattttgctaacatgaataagttggtgcgggatatggtttgtgcacgcctgacgtgccagcgcttcaaatccgaacacctacacccggttggcctccttctatcgctacccgtgccacaaggggtttggacggacatttccatggacttcgtcgaggcgctgccgcgcgtccgaggcaagtatgtcatcttgacggtggtggacagattcagcaaatactgc

SEQ ID NO: 29332 - DNA, 610 bp, Zea Mays
ggaaagaaggcaaagaaaatatttaatgacacacatctacaatacccgccgataagagatggaaacctaagaccaccaaaacaactcaagtagccacaaaaatagaagaaaaaacagcagttgtataaatctctgcaggtacgatgaaccgtccggctccagcaaccagaccatctaagcctaacgtggaccgtccaaccctgagtccagactatctgtgcctcactaggaagccttcgatgacatgccatcacctattgatgaggacaacatcgaggaggacgatctattgggagaggatctggtcgactacggggcctagctcgagcacgcaggtatggatgttaatgtaattacatttttagctgattatgatatcattggcaatgatgaacctctagttgctcaattcgattttggtcctaaagagatcgtcttcaccaaaccaaaagaatcgatcaaccatttaaagtcgctctttgggcgcgaccacattgatgaaataccgattggatccatgcaaatcaatgtataccttctactttgcaccaaaggttgttacaatgggtaggaggcgatggcttcgtatcacccatataaacactccaag

SEQ ID NO: 29333 - DNA, 471 bp, Zea Mays
tgcaaaagtcgcctaagggtgcagccggacaagcacaataagtgcacgttacaaagtctttacagacaaatccgcgcaaaagtagcctaagggtgcagccggacaagcacaataagtgcacaatacgaagtctttactaaaagtcaaatccgtgcaaaagtcgcccaagggtgcagccggacaatcatagcaagcacgaagtccccatctcaatcaacaacatcgcatgaacaagcaaagggtcaccggccacattatacaaacaacaatgttgtcacagattacatacacacaacgaagggtcaccaaccacaccgcacaaataagtacaaatcgcactttgtcgcccctccctctttattgcgagccgggggagggcagcgtttttactcactaccgcaagacaagagtgagggtagcaaacatgctacatcggctcagccttcaggataaggcccgccttccgaaaat

SEQ ID NO: 29334 - DNA, 361 bp, Zea Mays
ctcgggaaggttatcaccgtggacatgaaaagatcggagagggagtggatcgagccgacctcaccgaacccacttgcccgacgacgtgtccgtgcgactgtcgtcgtggttgccgccatttactttggtcacgccatgccataggccgttttaccacgtcatcgtgagtcgtggagagtaaccagcgactgccgtaaactcctgcccagtgagcgccacgatagaggaactccggtgactcattctcctatcacagcaggctcttctccgtccaaattcgttgtactcctggtcgccctctataaattgagttttcaacgtgctccgctagcatgttacgaacccagagcaccgctccttg

SEQ ID NO: 29335 - DNA, 368 bp, Zea Mays
aggagaaggtggcgggtggcgaacaggacgatgccgtccgcgaggagcgctgcggcggctgggctgcagatgctgcaaagcacgctgtgcaggtgctgctagcgacggaaggtggagacgtagcggccgggaacgacgctggggaggaacgcgatgagatggcaaggaggagcagcaatgacgaagaagcaggccaagaggaagcacccgaaggtgagaatgaggatcatgaggatgagagtggggctgccaacaagtccagcgacgagtttgtaagcatggaggacgaggacgaggatgagggcgaagaggatggcgtaagaatgcctgctcgtgcagctttgtcgtcagagagtccgaagcccggg

SEQ ID NO: 29336 - DNA, 400 bp, Zea Mays
gccgccgccgtgtgtggggagcgggaggaggatgatagcgcgtcggtcgtgcgatctgtggctgacggatggaattagatcgtgtccagtggtgatccagtgcgtgcgattgggatcgtgcgactgtgatgagtatgtgtaatgcccccttcgaccagattgaatctgaatcgttggatgcaaatcaggcggccagggctgtgtaccggttcaagatttagtctggtgcgtcagatcctaatcgagcggctcggggtgcgtgcgcgttttgctgccgaccataattgctaaagggcccctgaagatcatgcgaattaaccctcggtccactactgcaaacaagtaattgcacttaagtcctggtttttacagatttgaccctgggaaatttcagaataat

SEQ ID NO: 29337 - DNA, 320 bp, Zea Mays
gtgaactcatactgaccataacgggttctaaaagctgtcttcgggatgtcttcttgacaaactctgagctgatgataacctgacctgagatcaatcttggagaagaacttagctcccttcagctgatcaaacaggtcatcaatccggggtagagggtacttgttcttgatggtgactgcattcaggtctcggtagtccacacaaagtctcatacttccatccttctttttcacgaagagcactggggctccccagggtgaagcagcaggtctgatgaatcccttctgctgaagttcttcaagctgcttcttcaactcagc

SEQ ID NO: 29338 - DNA, 416 bp, Zea Mays
gaaaaaacatgaatgacaagttgtggaccatggtggttggacaaggccagaggaggcacgacactatcggccgctaatgcacgagtctgcgcggttgggagctagatgtggcatggagtggtcaaagaccatatgtgggcctaagacgaccaaacataggtcatggcatgggccagcgcggtccaaagcgaccaaaggtggcatgacgcgaccgatgttggttaggggcgaataggcacatgccatggtgcaaccaacacgactggcatgggccaaagacgttcaggtgtagctcgaggtgtcatggagtgactggtgactaggcacagagtagtgcgagtgtgtgactgggagcggtcgaaggccatggcatgggttatcgggcgtgaacagtgaggtgagtagtgaaagttgtc

SEQ ID NO: 29339 - DNA, 450 bp, Zea Mays
aataggcccttcggtgcgtagcccggttgagcagcggtcgggattttgttgaagaatttgttgcctacggcgtgtggccgctggcacacaggtggggtctgggtgaagtcacgcttcacctgatgccatttttggatgatcagatggtgcagagccctgccttcgccatcgatctgcgagggcaggatgcagccgccttcgttagggaggtggagtcgaaggctgttaaaattgttggtaaatatgtgccaaagacagagatgataaggagctaggatatacgaggttccaacgttaggttgaaccgagtttttgaactgaatagcctgcggtacggccattacccggagggggactttgctgatgctggggacgaccgagggaaacaggtgaagactcggtctaaagagggcacctcgaagggaaagaatgtgattgcagcgactcgta

SEQ ID NO: 29340 - DNA, 413 bp, Zea Mays
gtcccgggacacgatcgtacgcggcgtggctctacgcgccgcacaccctgtgtctcctccaattgtacgtggtacatatgcctggtgttgtgtgttgtgtcgtcttttctgatgtgcaggctactgttaagactcctatgctgaggtctcccctaaaacccctcttatgtagtgtgcgcacgttcaggcgtggcatggtgatgacacgtcttgtcgtgatgggtgcgggttcacatcattgggttcgggtctccacctcgtggcacaatgacttggtcggtagatctgcctcgcaagcttgctcggtggggacttggtcggcagctccttcttgacggcttgcttggtgagggcttggtcagcaacaccgccttgctagcttgctcgacggggacttggtcgaccgattcgcc

SEQ ID NO: 29341 - DNA, 297 bp, Zea Mays
ccacttttcacatcataatcatcactgtcattagaatcttcagacaaatcctccattatctccttggtaattttctctgtattcatctttgccatagattcataaaaaccagcaataaaaggatctgcaactttcttctcttcatacaacttcttctcctcagtcatcttcttctcctcagacatggatcaagcacgtctttaaactgaagctcgaaaatcaggcaaggactgataagcaagagttaaaaatgtgagaaaatagcgcaaacaacagaaatgacgtatcaaatgctgc

SEQ ID NO: 29342 - DNA, 350 bp, Zea Mays
gttaaatctggttccaggacaacatctgtcacttcaatggttcgatcgggaacccgaagacacttcttcaattgcgacacatggaacatattatgtacagcagacaatgtttcgggaagttgaagtcgatacgccactggcccatatctttgaagaataggaaatggaccaatgtacctgggtgcaagttttccttttatcccgaaacgcgatactcccttcattggtgaaaccttcaagtaaacatagtccccttcaagaaaatacaagggcattcgccgtttgtctgtatagctcttctgccgagcttgggctttcttcagattatgaatgactttctgaaccttttc

SEQ ID NO: 29343 - DNA, 375 bp, Zea Mays
ggatagcacactagagagccagttacacttcaccgacgttgggccaccatggggcagagcggcaccgccgtgcacaaggtggtcgagaggtgagggacgactgtgagccactgattcttctttgacggtgtagattatatgaggaaataacccttgtgtcagtttgatcaggaccaatgatcattcgttggaggtctaggatcggatcactacgtggacataattcgggtcgtggatctgtgatcctacagctaggactcgtaccagttcataaattcaggtggatctaatctgggccgcatctttctgatccagtggcttagatctgaacgtaccccttcgctgtgaaaaagtttctaaagagcccctcatctt

SEQ ID NO: 29344 - DNA, 307 bp, Zea Mays
ctcagataaccttacacaagctaactcttacacagataacacatccagtgcccattccacaccacccatactactctacttcctctgacgaccccgaatctcttcataattgacatcatccagtgcccattccccaccacccatatcttgatcttcagcaaattggttattgaaatactcagataatggtggcgacggaccagcttcgagatcttctaaacgttgtgcttcctcctcaagtgactgagcaagctcatacacgcgccacattgcgaagttcactgacacctctttggccgtatctggc

SEQ ID NO: 29345 - DNA, 272 bp, Zea Mays
ctgccactgcaagtgctgcacgagcggctctatccatacggcacttcttccgaccctctggctgctcaaggtaaaccttcttccccttgacctgcctaaaggggcgagggggtcctcgtcgtctcttccccctgacgccgagacattctttgtccacaccatcctgatctgagtgctgcatggaaatgtcacgagagagagaaggtccaagcagaacaagagatgggcacacgggcaggcgagagcactgaaatggtagaagaggtgagcac

SEQ ID NO: 29346 - DNA, 304 bp, Zea Mays
taaatcccaaggcagcataaaattgctcatcaccaacaaaaatatcagcatcatgcatcatagtaggatcgacatcccccacatattgacttgcatttttggtgcatggcaatttccccaacaatttctcctccactgatatgctccttacataacctggtttcagttcaaattgtacaaccaatgttagcactttacttgtccaatacatctgaaatgcgttgtcaagatcagtgtttgtgataatctgttgtagatacttattttctcgatcccaaaaccagcatatcggctcttgacaact

SEQ ID NO: 29347 - DNA, 543 bp, Zea Mays
cgggcatccagttcctatcaagtggtattcaaagactcaggtattaccgtcaggcttaccctattttagtttaggtttttcatcctataactccagataattgacatacaaaaaaaattccgttgtcctataaccctgtttagccttgcaatttcgtttcaaattgctttgttgaatttgtgtccgtgttcgagtcttgttgctggtttaggtcgtgtcgtaatcgtagttcaaacgctctgacactgttatttgtttccgccgctatcccatccacctttcccagattacaagtcgagacaccacattactcgatttgccctcgctagccaccttgtgtgaactctcgccacactagccctacattaggttgcaagccgccttgcattgcagcccctccttgtttcatcatctggcgcctacctattgcttataccagggaggtttgtgcccctgtgctctatagccgccgctacagttccttacagcagattcctgactctattctggggtgacccaaactagccttcggcctgtttggtt

SEQ ID NO: 29348 - DNA, 602 bp, Zea Mays
cacaagatgttagctcccatcaatcctactttgagaatttttcatgtgcaatataatgatgggcaaaatactgcataatatagaaatatggaaaagataaacttttacatatgtacaaatagatatttgaaagtatatcagaccaaagatcaaacttattttattgcaactggttaggccataagtcacctgtagttatcactaacaaaaggtaaaccatagaataaaataatttcgctaagacgcacaaaatattgtcaaaactatttcatcgctcgctagtgagaatcagcaagcaccaccattacttgttaagaagcagtgccaacaagcatgtgtttcagagcataaggatatagttcccataaagcataatctaatgtaaaaaataccaacaatttcgaaccttgtgtgagcacccaaaatggtcaaatgtgcttttcgacgtagatgaacaaataacacaatttgcttagatggtaatgttgtggtagtaggtagcatcgttctatatggatcagccaaggaacttgagttctgaagaggtcacatagatgaccaatgagaatagatttctcctcttaacctagccaaaaatattt

SEQ ID NO: 29349 - DNA, 277 bp, Zea Mays
ccccgcgcccgaggaggacgtggacgtctcggtgacgtcgccgtccatcggcatcaccacggacgacggagatggtcgcctcagctactagctgctgcccgctgtactgcccagcttctgttcctttttcttgtgtgtgatcttgacatggatcttccatgtatggctgattggttgacttgaacacattcgtctcatccggtttttgcacgtctgagtctgagaatggacccatgctcactgttgaagctgcggctgtagtttacctgcttgtttg

SEQ ID NO: 29350 - DNA, 271 bp, Zea Mays
attctttttcttcaggtcagtgttcacttagtctatagcatattgggataaatggttaaacttgttgagatactgcattatagtatctcccccttgctttagtcgaataaattcatcttgtttcatgtgaagcactccctctggaacatagtgttcatggaatgctagcttgaattcatcccaagtgacctgatgtccggctcgttgaactgctacaaaattcgcccaccaggtactggcagggcctctcaattgttgggcagcaaataat

SEQ ID NO: 29351 - DNA, 281 bp, Zea Mays
actacatgccataccacatatctaatgtacactgagacattggggttgtgcttgggactctgcagcactgttaaactgtagatacctggacaacttgtgtatatcacttagaagacacgaccatgctaactctgcaacagataagaagcgctactccttttcaaggtacctgcaacatgtagtggatgttgtcaatgttgtgcagagtacagtaggtcacttgccatattttggaatattagattagtgtactgggagggagatctgggcgaccacatgca

SEQ ID NO: 29352 - DNA, 595 bp, Zea Mays
cccgattcgacttcattgatcgactacgccacgcacaggccatggatcctgagctgaccgccatacatgccgagctccgcgcaggcaaaagaacggcgttgtgggccatggtggatggcatgatagcgttcgatgggcgcctctatatcccacctgcctcatcgctcctgcaggagatcctggccacggtccatgacaacggccatgagggcatccatcgtactctccaccgactccgccgcgactttcatttccccaacatgcgcaattgggtgcaagactttgtgcgggcatgtgcaaacctgccagaagtacaagtccgaacacctccacccggcgggattactgcagcctctaccggtgccatccatcgtctgggcggacataggtatcgacttcgtggaggcactaccccgcgtgcacggcaagacggtcattctttccgtcgtggaccgcttcagcaaatactgccactttgttcccctggcgcatccatacaccgccgagtccatggcgcaggcattcttcaccgacacagtgcgcctccacgggatcccacaatccatcgtatccgaccgggacccagtattcacct

SEQ ID NO: 29353 - DNA, 495 bp, Zea Mays
gccggtgatccacgtgtccggatttgcgctggtcgtcgggattcgtgctgggcacgttgttgatattcacggggaggtgaaagatctcgcggggaggcagatagggtcgaaggggaagcttatcaccgtgcctgtagccgttgcgacgtggccggaccgccggtgtcgtcgtggacactccggcgacctcaattataccacgtcgtgactcttcactacgtggtagtaaccgtggcacacttaggcttaccctctctgaaccactacaccggtgaacgccatgattgcgccaccagtgacctcttccttctccggccgccaccgcgccaactccaaattcacaggccaccgcccccagagcctataaattgagtgtgccgtcgagtccgtaaggtagtcaagcacccaacccaccaagtcgtgcctccaattgctcaccagcaagccccaatttgggatttcccccaaatcaaccaagaacaccgtgcggtgtga

SEQ ID NO: 29354 - DNA, 282 bp, Zea Mays
ggaaatgtagagagtacctgtcgtttctccttatattttttgtatgcagtcaagttctattgactcccaacaagaaatggagttaatataaggagtgctctgcttacaaatatcctgtaaatagtgttctgcttcctcttgttgaaccatgatgaatgcattttcatttaaactttctttaattggtaaaggtacatcaccgttgtcggcttctcctgctcactgctcctcttgtgcacgtctctcatctccggcaaggtattgcttttaatttgtagcgca

SEQ ID NO: 29355 - DNA, 537 bp, Zea Mays
atgaaagcaagtccagtgtctatcctatccaatgctctttggaggatattatggttactcaaaatctgttgcgttgtgcgctgtcagtgtttccctgtcagtatcttggtcttcctctctccctagtcaagcttactaaagaccaagtacaaccttttgtggataaaattgcaaggcagctccctaactggaaggcggatctattgacaagagcgggtagaaggatccaggtttagcatgttttgactggaatgatggtctatttagcaatggctatcgatttcccttcctgggcctgggatgccattgacaaaatcagaaaaggctttctttggagaggtcacaaagaggccaagggtggtcattgtcttgtgtcctggcggagagtttgtcgccctctcaagcttggtggcctgggcatctccagtctgcccgagatgtgttgggctctgcgtatgaggtggctgtggttgcacaaaattgatccaactcgtccctgggcgcagctcccttttcatgtgccgaataaggttcgag

SEQ ID NO: 29356 - DNA, 563 bp, Zea Mays
gacggtttcaaagtgggtcacccgctgttgtccggctgggaggagtccttgctggtgctgcctctgccctcctccctccggttgctggctggacgagacccaagagagactgaaggtccctcgtccactggatttgccaaaagatcgcagcgcactgcacgccagcacaaaacaaactgccacgcgcgcaggtgcagggcaggggcatccgatgggcgcgcgtcatgatgcctgctcctctatccgttgctctcctcctccaccccagtcacatgacatgcatacctggagtacgtagcagccaggagaggagaacagatacagaagctgggttgcacggcgcctcctcctcctcctcctctttcgtccgtccgattgcccatcatcgagaacaaatccggagcgcagcttttagaatccaaggaccggcgatcgtgaccccgccctactagacaaaatactaagaacactggagcggtcaaaaaagcttgcaggtctgcagaggctagctaggcaccagagtgcatgcagcgctggccactggcttactcaacaaccacgcc

SEQ ID NO: 29357 - DNA, 356 bp, Zea Mays
aacaaatggaggaagataaaggaacaaaaaatgccaggaagaaggaactcaccaaagtgctcacgacatcgttagagagaggaagggtgaatcctcgtccataaaggatcccgatgacaatgccctgacgactttgacccgggcttcgatctcggttagtgcgagtggcgcgaaggaatggtggtcaaggtcatcgacatcggagtacttgtgcaccggtttctagcgggctatcaagggccgaatccgacgatgcatgaaggtgcgcaccagccgcacaatggtgagacctcgctgcttcgacgtcaggatcatcatcagaagatggtccacctcactcttgaggttcacctccg

SEQ ID NO: 29358 - DNA, 506 bp, Zea Mays
gtatgattgtgtttatgactttgaatgggtgttttcgagttaactaataagttcctaaagaaattatgtgtaaggtgtttatagtgacactttatcccgaaaggtgttaagtctacgcataaataagagataagtgtacttgtgtagtgtggattgattttgagtacatatgtcgcaagaaatggattagtgcgcatataggagatgaatgtgtgatgaaatggtgacatgccttcgtagtcatcatgtcgtctgtttggtgacttagctgagagtcatgaagaaatgtcgcttacctatgtgttaatattgtcactctgcaactctgtataattgccatgtgaagtatgattggattagtctatgtttgcgatgtgtggtgtggtggtgctatgaaaaaggggttaggaatcgatcggccaaatgccaagttcggttagagttgttttgttacttgggagtgtgtggtgaagtgatggcatgactatgtagccgtcacgtcatct

SEQ ID NO: 29359 - DNA, 346 bp, Zea Mays
tagcattatcctcaattcctcaccctcaaaaaggttctgaagatccccctcgcctatgctcgccccagtcggcgaggacaacaattctcgtttaccaacccggtctaatcggagacggccatgctccatccccatacgacggcgcctgccacttcgcgaaaattcacccacactatgttttcccaccacccttcgccgcctacacccagtactcgcaccaggaagatccccaacaccctccacacgcggcgaagtcttcgccgcagccacatccaacgcaacaaaataatacaagccttcatccgaggactcctccgtccaaggaaacgagctcctagattcacca

SEQ ID NO: 29360 - DNA, 304 bp, Zea Mays
ggccaacatgtgaagcaacaagcatgagaacttgctccagcacagatgtaccatcaaaatgcccagaatttctgaccttttgctgtatcacagtcatagagatcagaaaaaactatataacaaatcattgtagcactagcattattagagtaaactccatgtgtcatctaccagacaaatgatatttttgtttttagaacctatcagacaaataaatgacagaacatggtttgcctaaaaagtaaacctggctgatacacatggtttcgacatatgccttaggtgttacagaaataaacaaact

SEQ ID NO: 29361 - DNA, 630 bp, Zea Mays
gttaggttgaaatacaccttcagatatgaaggtaagtttattgagccagatgacgattggctgaagtgcatcgaagctacaagcgacgaattggttgggccgtactccagagcagaagataacgcactatctgcggccttcgggagccggaaaaagaagagactaaacagattttttgatgctataggatttgtgtaccctgactaccggtacccactacggggtcagaaaaggaaaggtgcagctcctgtgaaggatgttgcttcggctgtctctagtgagcctacgccgaagaggaagaaagtgaaggtcctcactcaccgaccacactacattgaaacgaccacagtgcctgaatttggcggtgacacctcttcggctaacgaagccaaagaaactacgcttatgcagaagactgaagagccggctgcgacgccgaaggcgccattggccaaattgggtgagccgaaggtcgagagtgttaaagagacagaggttgagagaacaaagatatcagaagttacaagtccttcggcgaaggtgacagtgtcgaaggcacaaaaagatcttatagttacccccaagaggaaaaggatggtccacgtactagatgtactggaggaaataaag

SEQ ID NO: 29362 - DNA, 405 bp, Zea Mays
aaaaaatagagaggaaaagtaatatagggggaaaatttaggggtacggttgcggatagcctaaactccccatcgatcggtgctatacgaagtacagaacgaggcaaacatgaaagccatggggagcatccacacacactggcgaacgccctcagctgaccaccgagggcatgatgatggcggtgaagtccggccatggaggaagcagacctacggcgcagcgcatctccaccgagagatttccgttccttcggtggatcacttcgcccagggcgccctcgactagctttggtagacgcatgctatcaccccctaccatgccttgcacatcgaatgccggtgaagacaatggaccacaccgacagcattgattcctctggttctctctccctcggttggctcggcg

SEQ ID NO: 29363 - DNA, 350 bp, Zea Mays
tatgcaatctaatatacattaatgaaaatccaaaacagttataaagaacttacatatctctgcagaatcactagtgtgtcctgttcatgctcaccaatagtgcgcatagtagtaagctaatgtactccttgatttatgcccatcctcgacgcatctgatgtgttgggatcatcaacccccggctccctcaatgcaatgctgctggtggagtaattgcccctcctgtagtttctgtttgcccgtgtccatctgcatccgagccaaactggtttcctcctggttgatcttcctgcaccattgatacgatctccaagcatggatttgatcgatgaacacttgccagcgttgtg

SEQ ID NO: 29364 - DNA, 465 bp, Zea Mays
caagaacacaggccaaggaaaatcaaggggatttggaggtgacaggtccaatcagggacctaagaagcgaaccaggttggtaatccgaccttttaatcagaatcgttcttcgcctcgtccaccctcctatccgttcaaacagcctgttttcattcgtcctaccactgcccccacttctacaaaccagccgagtgcccctggtgctcatttccccgccctccctagttcttcaactggctgcttcaaatgtggaaagtctggtcattttataaaagactgtccatatccgaagcagaataagttcaacaatcaacagaactctgggagttccaatcaaggcaaagggaacatggctaataattcagcgggcaaaaatgtcaagaagactgggggaatttattatactcaagtggccactacatcggaaggagagccggtaatgatgggtacgttccttgtggccaa

SEQ ID NO: 29365 - DNA, 391 bp, Zea Mays
cggatattaaagagagcccaggtcggggagggggtctggtccactcagccgtcagcgcgtgggtctgatggagatgagatagaggacatgtagaaccgacggcgtcatgacggggtggattaatggaaaggcgggaatcatttggtaattggcagaattatagggattagatttcgcatgcaaacgtgcgtaatctgaaacgtgggcgcggaattaatggatcttgcatggcgtttaattgaggcagttaaagatgatatcaaataagatgatgaatggtttggcataaaaaaggtacgctataaatgttgcatatatagtatatctagaatggcgtaaaacattgaggcattgtgcgtaagaagttgtaatgttgttttgtattgaagtt

SEQ ID NO: 29366 - DNA, 578 bp, Zea Mays
caaaattataggaactagaatggatcaatttggacttaatatgaattttctacaaattttaaaattttctagcatttattttctcattaaaagttattttctaattacttttactggattttctaattctctggactgggcgcataaatatcagaaactacaggggctaactagcaatttttctcaagactcaggattccccacagtgtggactgcgggttgtttataggattttacagggtctctttagcaaatcttacatcgcgaaggggtaccggtgcagatcgactgttggatcagaatctaaaggccaggattatatcatgaagcggtacgccactcatttaatctgaaccatgattcaccaaatcgagggcgcggatttaaaataccttggatcgcgctggatccgttcgatcatgatctgatggttcggatcacatacaccaaagaggtattatggtcaaaataacagtcgttcgctaactatgcaatggcccaaggcctttcttctacctatccctcggctaccgtagcaacgtcggccagaacacggatgcgccatgacagtgccacgc

SEQ ID NO: 29367 - DNA, 465 bp, Zea Mays
gtcgctcctttcttctcgtcgactccgtcgccgtcgtctgtttcttttctgcggatccctattgcttttgtttcgattcctttccgtctctgcaccggattcttgtgcatttgattcatctgctatttcatctgttgtagatctgccacgttggagacctggccaacacgcgcaggtcctgaaatcgttcagttcgtcccttcttcagcgatttgaggtaatccttggttccaccgttcctcgcttttttatgttgctttggttttttggttcattgcagtttcttggttgattgtgttcgccatgttttcacgctccttcctgtgccccttacacgcgtagaattttttccctgcctaggaggtaaagaacgatgcccagataagatatgatgagacaacaactagaaaagtaataaagatctggctgatctttggaacctgatatggcgatgttccgcttaca

SEQ ID NO: 29368 - DNA, 329 bp, Zea Mays
gtctaccatatgctgagttctcatataataatagttgtcagactagtctgaagatgtcaccatttgaggctttatatggcaggaagtgcaggactcctctatattgggatcagactggagaaagacagttctttgggcctgaacttattcaagaggcagaagaacaagtccgtataatccgggagaacttgagggtagcacaaactcggcaaaagagctatgctgacaatcgaagaagaccacttgagtttgaggaaggtgatcatgtgtacctcaagttgtcaccacttcgtggaatgaggagattcaaagtcaaaggcaaattatcc

SEQ ID NO: 29369 - DNA, 685 bp, Zea Mays
cgcgccgctcgccggcgcagctctcaggtgcgtctttctctcttcgctattccgccttctttgttgcatctaccatgtctgctgttgttcttttcttttttttttactcaaacttgtatcagttttctgttgtcttggaccagatgagtaaataaataataaattagtttatactcgataacctaaatttactacagttgaataagtcatcatgaaggctagtactactctaaaaagtttggtgccttttttaataatgtacttcctcctttatttccaaattataagctacttatcttaaaaaaagtcaaaaacggcttataatttagagtcggaagagtaatagttttctaattttgtacactgtgatccaaaacaggtgatctaattaatttattgaaattataggcctgggagcactggaattctgggcaactcagtggggatgttatcgcatactctccggcctatgccggtgacaccaacagcactccgatggccgccaggggcagggagtgacaatcctctgatggctaagccggtcatgtgcctgctttgcaagggtagctatgaccgtgagcttgccaagcttgcagctgagcagaaggaaaacccagcatcacgcgctgaggctgctaagcctggtttgccacactggatgcagcccagcagtgatcaaccacag

SEQ ID NO: 29370 - DNA, 790 bp, Zea Mays
gctgcgaatctcgtggctatgagcacgccacatctcgcggatgacacgggagctcgagcctccgaggacttcgtcgatcaagttaccaggggtaagatggggagagaattgattccaatgagggttggctcgggagcgtgatgcggtgggttgtgagggacacgattgcagcatgcggttgcgaggatattgcgctagctcgcattgtggacttttgccaccacgctgccatacatcgatggtaaattccagtatgccatcggtctgtttgagagtttgttagttgcggatctggacccattgctgggtgatttcgacgttgttgcgatcgtcatgttgggggtggtatttgcgaaggaattagctttcacaattgttcgtagtctcatgatttgtaatcttccatggctttttgtgcaactcaatcatttgataacgtgtatgggttctagggcccctgacactgccttgtctcgagccctcctcgaatatagggggtgcgattcgtgcaacttttgttcgtctgccatactcgtgcgtggcgagcccttaagcccctgctcaatgcagaggtccgtctaggggtttgtctcgtcttttcgatttactctcccccgtgcatccccatcgcgggaatgaggggaggtgagcagtgccatgctttcttcgatgggatagcaattgcgctcggtgagcttcaagcggttaatttgggtgaggcccttgttccttttgcaggatccaagtgcggggtttgctggggaccatcctcatactctcgggcattgac

SEQ ID NO: 29371 - DNA, 395 bp, Zea Mays
gggggcgcgagtttggagatgcgccgtgggaggaagaccgactacctcgacatcccactcaaggatagcatcaaaggatggtgcctggaatggtttatcatggagaatcacgggaattccctccccccacggtcagggagacagccagatgttcgcactccgagctagaccgaatcccccacagacctggaggtggctaaggcaggggctctacttgctgaggttggattgttgaaagagaggggtctaactgcagaagctgtggtcgccgatttcattttcaagaacattcagccactaaaagacagagcgtacccatcttatctgtatcgaggccttgctgatccaacccgggttaccaacaaaaggattcctgctgtggatttggtgagccg

SEQ ID NO: 29372 - DNA, 697 bp, Zea Mays
ggcgtcgtattcttgttctgtgcgcatgcgtcgttatcttgtgctcggcttcggtgtgtgtgtgcattgttgttagggatattctaggggctgtgtttccacaaggtcgtctgaggaccagccgaggtttagtacatttccatcttttcaatggctcgactgtttttgcctgataccccagagttgccaacaagtagtacaaagtgcagtgaaggtggcatcattttttggttctgtatatatgtctgcgatggtatctgctgctcatgctctaactaggacatcatactgcatatgtacattgtgcaaaatgcgctaccatgttgtcctaaaagattgttattacaccacattttatgctttggccatgttgtttggataattttcttggatggctaactgctgtgctatgaggttgagtgccaatgtcccattgattttaattcctggagcaacatggcttaagactattctacaattttatactcctacctgatggtaatgtagtaacaggcttgcatttcttgaaatgggcagtggtacttctagatgctcctgggatgggtgtattatacgagtcttgcaagaaactgctctggttccatacctaataattatctctgtaccaatgtattgggcacttctgtcttttggttgtatcattgcatcgcttgtctcgtcctcaatgtgaatgtgg

SEQ ID NO: 29373 - DNA, 305 bp, Zea Mays
attgattgtgactcggggcaggcgccagtggtggtggtggtggcaactaagcccaggaagcttgagaatgacttgccgaagcaacagaagtcgtaggctattgatttcctacatactctgggatatacggagagtagcatgaagcagtatgcaagacctgcttcagctaattctgtcgtgcttcggcttgagcaatttccttctacttctggatcatgacttggcacgtccttgttgtgtgtcccttgtcttcgccacagaatagtcagaacagtttcctaggctgattaccataccttccctcg

SEQ ID NO: 29374 - DNA, 312 bp, Zea Mays
atcgtctatatgctaagctgtccaaatgtgacttctggctgaaggagataaaatttttgggccacaccatctctcaggatggggtatcagttgatcctgaaaagcacaagaagtgatggattggaaacctcctaccacagtacgacagatccgtagttttctgggattggtagggtattatcgatgatttattccggatttctccaggattgccaagccaatgactgaattattgaagaaaggagtcaagtatgattggagccagaagtgtgaggatgcctttcatacactaaggcagcatttgacaacagc

SEQ ID NO: 29375 - DNA, 642 bp, Zea Mays
gaagctttggtgcacgtagttgaagaatcggggcggtcttgcttcggtaattcctcgccggagactttacctcgaccccaatccgccgcgcaccgcggccgtgtctccctgccctcttcgatcaacggtatgtgaccctaatcgatacgctacagttcgggcatcgtgtataagtctttggattaaagaatggcacactggggcgcctaatcgcttgactccggcgatggtccgccgcgcacgggggtattccggtggccggagttgggcggggttcggccgggaatcgtgggccgtcgatttctcgttgtatggctcggattagatggcgggtaacgttttggtgggtttcgcgtcagccgttgatatccgatcggatggatcgggtggctctggacaaaattaaatctgtgccgtgggatcgtgatccagtgggcggcaatgcgtaccggttcggtgtataataagtctaatctgggccgctcggttcagatcgtgcggccgagattcaattataccttttcgcgctggcacttttattaaagaaccccctggaaaccagagaatcaacccgccgtccagggcactgtgcgctgtgtctctgtagttttaccccgtgccccctgggtttctctgaatttg

SEQ ID NO: 29376 - DNA, 289 bp, Zea Mays
cggaccatcttgttgaagcccacttcatactctgtgacagacttcttctcctgcttgtaggactgcaaatcaatcttcattttctccaggaaggtgaccgggtagaatcttctttcaaactgcctgatgaagacatcccaagacaggactcctggtgaggaggagtgcgctgcctgcatgcctctccaccaattttgagcatctcccttcagcaactatgtgccaaagcgaactcgatctccatacacaatctcgaagacattcatcttatcctccacgtaagttagcc

SEQ ID NO: 29377 - DNA, 388 bp, Zea Mays
cgagcttgcactggccaggatacacaatgaccggtgctcataagtggtggtcacctaatttgacccctaataatcatttcccctcaaccaatttcaagattctaggcctcaatcgctctgcccacggtgacagtgcgatcaacggacaacctgaagcgttcccggtgatctaccccggtctagtgcaattggttgggccgatgagcttcaaggacatatcagagcactgaaacaaaggaacagagggtgagaatggacctgtaacgtgctggccacggtgagagtctttcacggcggcagaaaaccgatttgggggaagtgagcaattcagaggctctggtgaacaattagaggcaagtgctggtgctttggatgggtaattacccta

SEQ ID NO: 29378 - DNA, 316 bp, Zea Mays
gtgaccagtaatccatttagcgaccggtcaccaccatgcagggtccattgctcatcctcacatgtgctggacacactggcacctgagacgctggcgcgtgggaccatcttcacagaaccatcttcccaggtgtcaccactccgcgctaaatcccaaacagaatcctcacctccaaatcctccgcggggccgttagaacggtttgccagctggtgtccttggccgggatataaaaacggaccttccccaggcccatgggatcatctagccagagagcagggccatagggcatggtgtttcctcaatgtagagagtgt

SEQ ID NO: 29379 - DNA, 401 bp, Zea Mays
atagcaaaatctctaaattcactagtggcttgtctaaccctatgctgctcaggaacaagatgggaattaaaattttgttctaccgtcatctcccagtctaagtaagcttcagcaacataagaacccatgaacggtggaatagagaacttaatcttagcaaatggatcatggtctggttcaagattatgatgacgatgtctaccattacctcccataccttgtcgattacgtgcgaggcgttgttgcagcggtgcataaacatcatcgtcgtcgtcgtccacaggagagtgagctggggctgaagttggaggtgagggacgagcctccagtacgcccatgcatgtaacaagttcagcaactcgtcgatcaagctgctcataggatgtcaccgcagagtcctg

SEQ ID NO: 29380 - DNA, 802 bp, Zea Mays
cactgacaaattgcagaaatgccctccatcttctatctcttccccgcgaatgcccttgaccacggcacgcacgtcgctcgtccctgacgtggtccgtaccgaccatggccggcgacgactgttacggctaactaccggggaggcattattggcttaaggcgacctaggaacacgcatcaatttgacaagaacgcactgagaacggcctgtccacgtgcacggcggaaaccgcggtgtcaatcccgtgttctcaattatccacgctcggattggtaaaacggccactacgaggagcttcatgaacacatagagctgctaaaacaaggcttgaatcggacagggacttaccagagagggctggccacggagcgcagggctttacgttcgccggagacagagaaagggggaaatcggtgtcacgacggctctggttgaaattggggttggggattgaggctacagggccgtaagaagctgtgttttcattgtgtgcaatcaatttgggcgaagatggagagggcagtgcgaatttgacttcgactgagcttcactggtggagatgaaagcacctcgtcgtggcaccctactcaatttataggcacggtggcccaacagatgacccccacagatagtagcgcaagcgcatgcctaccacgtcggaaagagatacagtgagggagatggaggcatgggcgacaccgcggcaaaattcaatggtcacggtggccgccggtgaagactccggctgggctagggtagtggcgccacgtatgggttatccctccccgacgttatccattcc

SEQ ID NO: 29381 - DNA, 475 bp, Zea Mays
gcctcagtgtaaggttctttcaactgcttgggactgcgggttaattcgtggagatcccaggggttattttataactcggacgcggcgaaggggtacgggcgatctcgagccgcttgatcatgaaccaagggccgagattagatcgagaacaccactgaacgggtacgcgatcgtgaccccgataagcaatcaacggccggtacgaatcgatgcgcatataaaatcctgtccgtccgccagatcggacggcacacacgcaccaacgcaaacggtacagcctcagttaatctacaccgttcatccccaaaccgacgatggagagcacatcttcctccgcacagctcgccacagtggtgggagcagggcgccgccctgagagcacgacggcggatgcaattccgacggctccccgatttatactccaatcggaagattgctaggcaaagcacggacggaaccgaatctagggaaggta

SEQ ID NO: 29382 - DNA, 279 bp, Zea Mays
gtcgtccatgtatgtggccttgtatagactgtgcagccaacgcgaacagccccggcaagacgtgtccggatcgacaccgtccaactcaaaccccaacggccggatccgacccggcgtgctctacatatgcgtcccgtcacccctctcctcttcatcctctcttttcttcgcccaaatctcgcgtgctgcctccgtcctgcccccagcgcgtgcgctccgatccgccgggtttcagcgctgcggctgtcgatttacgcgatttgtctggcagaatacagt

SEQ ID NO: 29383 - DNA, 381 bp, Zea Mays
gtggaaccaccctagagtatgctgtggtgaaatgagagacagagtagtagtcatcgacaaaatcctccattctgacatccctaaattcttgagctgttatcaagcacaaagcatggttacatggtttgcccgtgtgctgccactctttgcaagagcattcccgcaaatgagcattgacaatgtgcttcgaatgcacgtcattgttatccctaacctcagcaatgtagttgtcagctttacgaactgataaatgacttaaacctctagttctgtcgtgtaggatatgcaggaccgaaggtaaaatcctcccttgcaacctttgtgcaatcctcctccgtctgtgaaacatcaccataatttcctcccttatcctttcagcca

SEQ ID NO: 29384 - DNA, 540 bp, Zea Mays
aggtgtttctgcaatattcatgagttatcataccagacgaaggcaaccggaaaggaacaataccataacaacttcggatgttacagcttcgtgccccgccctgaggcaaattatcctgtgccaacatttcagaagaaatggccgggctcttagatgaagtaatggttctacgtaaagaatgatctgaatcagagggaggatgcgagggcatcattcaacgttccatatggtcgctcttcggcattagaagaccatcaatcgcaattgggaatgaagtgcaagcgttcctaatggctttcaacacagtatgtacttacatcggtaccagagatttagttcaagaacacattgctttcaaagtctggcctcttgcaaatgaatgggaaatgccgaaggaaactgccgctggctctagtcaaggtggcttggtttatcttagatacaccttccggtatagaaggcaatttgacgagccaaatgacgattggctagacgctatagaggcaaccagtgatgagctacttggagcctattcgaagg

SEQ ID NO: 29385 - DNA, 599 bp, Zea Mays
gtgccctgcaagtgtccctctcctcttcattatcagctctggttaaggtgtccatattattgttctgaatatgtgccctgcaagtgtccctcccctcttcattatcagctccatttaaggtaccaacttcatggttcatggctgcaagacatatggaataacacataatactcaaaagaaataaatataggcattttagtgttgtactgaaggtacgaaatactcacatttcagcttctttcgtggcctgactcgatgcgactgtctatctcctttaaacgatgcatgctttttcttcaataccatattttctcttctgttttcttcttcaaaagcaccttcagagttctccctcccctcttcattattagatctggttaaggtgtcagcttcatggttcatggctgcaagacatgtggaaaaactccatacaactcaaaagaaataaatactagcattttactcttgtactgaatgtaggaaatactcacattttagcttcttttgtggcctgactcgatgtgactgtctatctcctttaaaagatgcatgttttttcttgaataatatatcttcagaagcaccttcagagttctcat

SEQ ID NO: 29386 - DNA, 470 bp, Zea Mays
gcttaagtcggcaatgacttaaggcggtgcaacatgctcacacttacttaactcggggtgaccactatgccctactaacggagcaatcggtttaagtcggcaatgacttaaggcggtgcgacatgctcacgcttacttaactcgaggtgaccactatgccctactaacggagcaatcggtttaagtcggcaatgacttaaggcggtgcaacatgctcacgcttacttaactcggggtgaccactataccctactaacggagcgatcggtttaagttgatactgacttaaattggcacggcacactcagcacgtttgcgattactcatcttagggcgacctctatgccccacaaagaaatttcaaaatcatcatactgcatttacttctacgattaaagataccgttgtattctaacaacgggaaaacaataatggcattcagtactaaaaagtgttttctaaacaaaata

SEQ ID NO: 29387 - DNA, 528 bp, Zea Mays
caagagagcagaagacatgatcggacctgaagcgcactggccatggtgagacccttctttcggcggcagaaaactgatttgggggaagtgagcaattcgggggctctggtgagtaattggaggcacgagtgggtgtgttgggtgcataattacagagcggagctgagggtgtgatcaatttattggacccctgagcggtggcccatgaatttgagatggcgcggtggcggccggagagaagggggtgcactggcgcaagcaatttgtggctttcaccgtggtgagctcaccggcgatcaccggacgtgtgtaatacaagctactgtgacgtggtaagacaccaaggcacgtggcgcacgatcgttgagtggctaacgccggcgatgatgattccgacgagtcgcggtccacgtgggtacggcagcacaacagtgagcaagcccgagctaatccgagcaccaagatttttatccttcttcgttatccatctgcgctgggcatgaatcaccgcggctggtgcgaatccgg

SEQ ID NO: 29388 - DNA, 504 bp, Zea Mays
cgcggatagttacgctaggagcgtccggtgatcgccggagatacagccacggtagaagccacctagcgcttgcgccagtgccttcttcttcctctggccgccgcgcatctcgcccgattcaccagccaccgccgttgagccatataaattgaagcctccaccagccccacaaggtcatcagctacccagcctccgagaatcgttagcaatcgttcgccagagctcgcgaattttgaattcgccccaaatcagttctccgccaccccgaaatccacctcaccgcggccagccccatttcggtcagttcatcctcccctctccctcgtttaagctttctcatatgtctacgatgcttgccgacctgcgcaattgcgctaggagccctctggtcgccgggaacacgactgtctagccgcactgctcacggtcaccgtggccacaacaaacatattggtcattagtgaaattaggttgggggaaaggtttgggatgggtccaattccg

SEQ ID NO: 29389 - DNA, 1311 bp, Zea Mays
caaattgtcactctcagcagtcgcctcaacaagagtggcattttgatactggtgcctccagtcacatgacatccggcgctggtataatatctcatccctcttcttcccagcatcttcctacccatattatcgttggcaatggtcatctcatccctgtcacctccactggcaccacccaccttccctataatctttctcttcacaatgttttagttccccctccctcattaaggatctgatttatgtccgtcaatttaccactgataataattgctctgttgaatttgatccttttggttattctgtgaatgatctacccactcggcgcgagatcttcagatgtaacagctctggtccgttgtaccccctgcgattcccggcttctgctctccttgcatctaccttatggcaccaatgacttggacatcccggtcatgtcgttttatctcatttagcgcagtcatctgcaatttcttgtaataaaaatactagtactcatccatgtcatgcttgtcaactcggacgccatgttcgtataccatttcctacctcttcctcccgcgccacatgtaactttcaattaattcactgcgatctctggacatcacccatcaccagtgtatctggccacaaatactaccttgttattttggatgactgctcccaatatttatggatatttcctttacgcctcaaatctgacaccctctccaccctaaccaatttctttgcctacgttcgtacgcagttcggtgtcactatccagagcatccagtgcgacaatggtcgcgaatttgacaaccttcaagcccgcaccttcttctcctcccatggagtccatctgcgtatgtcttgcccctatacttcacctcaaaatggtaaggctggacatgttatccactccatcaacaatatcattcgcaccctcctcattcaatctagtgttcccccaatttttgggatgcggctcttggcactgcaacctatctcctcaacatattacccaccaaaacacttgcactctctacaccacactttgctctcttcggccacaacccatcctatgagcaccttcgtgtttttggctgcaaatgctaccccaatctttctgccaccactccacataaattatctcctcgctcaaccccttatgtcttccttggctattctccccaccacaaaggctacctatgctttgatcgccaatccaatcgtaccatcatttcctgtcatgtgttttttgatgaaacctcatttcccttttctgaggattccaatccacccacaccagcggcctttgacttcctcgat

SEQ ID NO: 29390 - DNA, 328 bp, Zea Mays
tgcgctaagccgtaaggttgcctatcattgtcttacaatgaagacctctgacaacactttatgtcaagagatggagaagctaaacctgggaatggtccaacaaggaactttgaatcagctaaagcttgagtcagtcctcttgcaaaggataattgatgcccaaaaggataatgagggcatgaaacacattcgtgagaagttaagggctggaaaagtcaaatgcttcaaagaagatgaacaaggcattgtatggtttaataaccgcatagtggtgccaaagaatgaagagctccgccagcagattcttgatgaagcacatcttagccgc

SEQ ID NO: 29391 - DNA, 472 bp, Zea Mays
tgttctttgtccacctctacgagatgtttgtaggtgtggccccctgcacttccctcttccgctattttttcgtgctggtcaggtccgggaagactaggaaccacatcggtgcctattacttttaaacaaggccagatccggccatagtctacatccccacctttggtggtgcgaggtgggaaaactggcatagcgactgggtgattgccagcaccgaggccaacgaccacctcatcctgccgagcaatgggctagcactcgaccgcaagcaatggaggaccaagccatccctcttgccagagttcctgcccatattggacaggatcaaggtcttggccacgggcggcctgacatcaatgcacgtggtcggcgatctcctgaagcaccagatcacgccgctgcagaagaggccacgcctgtcctgctggttcaccggcccgaacgacatatgtaggatccaccgcgggccggg

SEQ ID NO: 29392 - DNA, 472 bp, Zea Mays
aaataatccagttcaatttgaccgcatgaaacatgtggagattgataagtttatttttatcaaggaaatattgatattggggctttgaagttggagtatatcaagtcttgtaaccaattagcagatagtctcacaaaaggtctaggtcttaaggataatgagttggcatgtaacaagatgggaatgttaaatatatttagcccatcttaaggggggagcgttggtgtaaatagaacaagtgtaaatgaccttcttgtaagatgtggaaatatgatgtgtgtgtgggagtgttgaaagagcaacacacaaactattcaacaattttgtggccatacaagaaggtgatcaagtccggaacgatggtatacatgatacggtaggggtagcactaattgaagaaaatcgtgtccaacaacatttgagatggtttgaacatgtccaacaaagacctccagaggcacccgtgttgtcc

SEQ ID NO: 29393 - DNA, 319 bp, Zea Mays
tgaatctccatataccatcagtctcttgatgcccagtgatacgacaatgttcagtccatgaatcaaagcttcatattctgttgcattattggacgctgagaatagtaactaaagagcatatttgagttgttcacctccaggtgcaatgaagaggattcatgtgcctgccccctatagctttaacgagccatcgaaatacattcgccatacttctgcagtctccgggttatctggcacttgttgctcagtccattctgatacaaagtcaactaatgcttgagtcttgattgcagtgcgaggtcgaaactcaatgtcgtga

SEQ ID NO: 29394 - DNA, 369 bp, Zea Mays
accagaggcaggtgaatagatagtctaaaatcagcaagaaaaacagtcgtgcaacaaggaaaagagtggtaatgcagctttagccaccgcaattgaggagaagcgaaagaatcaacgctagaaacaagggcctcaaggtctccgtcgacctcggttcttcatctcaatcctctgaggtaccttcccagcatgattgctctcttatgctgggaaatcctcatacctccaatattttccctggacctgtcaaatttccatccttacaaaatctcttagattgtgatggaatctacccggaaattgctgcttccaccttgcagaaggtggctgttgatagatgcggtgtgccccctgtggaggcggccgtgg

SEQ ID NO: 29395 - DNA, 500 bp, Zea Mays
ggtggattccttagctaattagagaatcttctagcatcacactcatgcgtgtacattgatcatgagcttcaactcatatgatcaggtttagtgggacctactgctatgattaatttgcttcttggtccgcctaaatctagaatttaatgaagctatacaaaagagaagggctatgggatatagatagtggattttcacaggaacatatagaggcataaagactgatgcttactgccacaatcagtctcacagtttcatatacaagagtgacctccactccgatccagcttcttggtcaagtaaactgccgaggaggaagaaaagcgagtgccaagaaaatggaggacagtaaaatggaaggtgattggtagtcccctgagaattgcagggttagagttcatatttgttgcaactcatgtgaataaaagtcttgccattttaaatttttgttgccaatttagcttgtaacagaaggacagacagacatggctcaatggtag

SEQ ID NO: 29396 - DNA, 498 bp, Zea Mays
gcgggtttcaatcacggccctatgatccagatcctgcggagtagatttttaatagccagaaggttatcgccgatatgatcctgtccattgaatactggatgaacgccctagatcactactctgaagcggtatccgcaaatctaatctccaccgtccataactagatggacggcccacggcacaacttgcctattccttcacctccccaactcaggcagacaggtgaggcggcgccgatagctccccacgacggggccatggccggcgatggccatcccacgcaatagtgcttagaacttttgaacgacaggtgctaaccaacgcttggatcctagcgggtacgttggtatgaatcttaccggggttggaagcgcagagggcactgcccatgatgacgagcggctccacgggcccgaagggttccagtgagcaattccgggttcatcggtcgacgatcatccccgccgtgacgaagaccacctccccggaccgcccgtg

SEQ ID NO: 29397 - DNA, 289 bp, Zea Mays
gaaaagtaaagaatgcattaagtatgaaaattttctgatcgagcccctatattgcttcagtaaatgtgtctcaactcgggcacagtgctattgactgtgggagcttcggactcttcatgtgtatcacgttgttgttgcgcttgatggtgcccttctggctgctgattgtgaggcaaggttggtgccataggtggtggtggtagcgaggcccatgcagcttgagagtgacttgctgaagcaactgatgttgtggactgctggttgcccacatactcaggaatgtatggag

SEQ ID NO: 29398 - DNA, 315 bp, Zea Mays
gaccgagcaagctcccagagagctataagctaggtgaccgacccataggtcacttgtccagctccacatccaaggtcgtacctcacattctctcacgaaaacccaactaatggggtggcccccctttgatcggctagaccaaccgaagggccgatacgggattgaataatgaaggactcgataagatgccccagcgggtcgaacaccctcagcgggatcattcgccgaaagataccctcgcaagaggatgatcagatcttatttgcatagcccgcttgtagctcgatggccccttcccccgcactgactaggtcg

SEQ ID NO: 29399 - DNA, 331 bp, Zea Mays
ccgggacggtggccaccggtgggctccgccgtgtgtacctgtgtggcgctgcctcggagccgtggtaggatagctgaggagggtgaacggttggttgtcgttgatctggaatgtgcggccaagatcagaacgtgcatacctctttgatgaaattaaatcttggccgttggggcgaatccgagggatgagtatggctgatggcgtgaacgtactacaaccgtggatctctgatcctgcaaccatcattagataccgattcacccaattgatacaatttaatctgggcccctgaactgggatcggatggctaggatcgttagataccctttcg

SEQ ID NO: 29400 - DNA, 560 bp, Zea Mays
gtgctgtacagaaattggagaaaaatagacatgaagttgaactgttagtcaaccttaagactgaatcttgaccatcagtgaaattggatgaactttgagatcgatttgcgggggatttagtggatgtttgagcaaggtctttgtaacaaagttgtagttggtacattggacaacaactttaatacaggcaggtgagtgagttgccacacaaaaactggagaagcgcttcaattcgctctgtcagaacaactgatgaagaatgtgatggtacagtatatgcaaaagatcacagatgtagtgaacgttgtcgccaatgaactctgcgccgcgatcctcgtcggcattgtgattcgtgcactctggcgtgcggataacggtcgacgatgaaaagatcttgcacgaggatgaccttggggcactgttttgccctatcgacgtacccacttgcaccggcgatgtggctgcacgaccatcaccgtcgtgccgccgtctagctcggttgtgacacgccttaagtcatctcaccactcgtcgcaagccatgaagactcggcagtgacc

SEQ ID NO: 29401 - DNA, 1017 bp, Zea Mays
cggtgcgctcatggcgcggtgccccgcgctcgcgaggctcgtgctccgcatggactggtgaggacaggtcaagagctgatctgtatgcatgcggcggcgcttttagtggaactgatctggtaccgtgagatgcaaatgacgggcatggaggtcgatgcaatagaacgctgctcgatccaaacgggagggaaaggaactaacgaacgaacactgaaattcgctagtaatccaccttaaacctgatttaactagtggttgaactgctgctcttgactgcagtgcagatatgtgaactgatctggtaccgtgagatctccgcttgtggatctttgatcggtgcttggttggactctaaaatctaaatacgcatcgtgcacggtcaagtcggaaatggaaagcgaagttggcaccgaaatggaatttaagggtcgatctgctgtggcttgactatatgaacttgaatttttgctggatttgattttcttagtggagttctagttatattgctgtgagatctggtctggtggtctgagggtaggaagtacggatctgataactcgtagctttgatgcagtatcactgcctggttgacgttagatagtgaaattctacttggccttgtgaacagctaggtgaagctgataaatcagtagtgatggtaaaagcttcatgaatctctgatgtgattgcctgtcggagtaaacatcagtttgtgcagcagatgcagagttagttggccttctgaagaacaccttgcttgatctaagatgaacttggtgccttctctatggcaaacaggggtgtcatttggtacatctatgaatttggttttggggaatcaacctattctagatgaggtgatgatgagttcatttgtttaaatttagtggaatgttcccattcctcatcctagctatattactaattactccctcggtcctaaaatataattcgttagactaatcatatattcattaagtaccatatgaatgtagtttctatgtatgtctatattca

SEQ ID NO: 29402 - DNA, 437 bp, Zea Mays
ggattaaacagctgaaggatctaccattgcattgcatggttgatgccattagagagaagggggtgtgttatttgagaagaggaggagcatagcaagggcactagatggggtgatcttgccagctgttgtgcaacagttgaatgctgcctccaaaggactgaaccatttgaaagtgacaaagggtatacctgaccagactgaggtgacagtgatgtatagggatcaagaagtgaggaggcatgttgtatacttagagaaaaaggaatgcacatgtaggtagtggcaggtgacaaggaagccatgcccacatgctttcgttgtaatcactacttgcagacaacctcagctagaaccctacgtggacatggctttctttgtttcaatgctaagggcagcatatgacaagggatggcctaacattactgacatgtcacaat

SEQ ID NO: 29403 - DNA, 474 bp, Zea Mays
tgagatcttatcagctactctatactctcgcttatcttttcactctaccttgcagtagtctagtcaggatggtgcagacgaaaaatgtcacacagtcagggggaaggacacgacgaggaccctcctcgccccttcaggcaggttgaagggaagatagtctatcttgagcagtaggagggcagaaagaagagacgtatggacagagccgctcgtgcagcacttgcagcgacagcagtagcagaccaagctgagcggggaggccagctcagatttcctctaatcagattgcctatcgggttcgtcgcctcatgtctcggcctcgctccactgctccccccactccttctgccacagtctccactccacctcccacttcgccagctcctgtcgcttcagagccatccaccacttccactgtgcccaccacttccactgctccagcttccactgctcgcgctcccgcttccactccgc

SEQ ID NO: 29404 - DNA, 589 bp, Zea Mays
gctcaagtgatgatagggcaaaccacactcaaggcaaccaacaaagctcccaatcttcagggatgcaacaaagctcttacaagccaccagctccaaggggtagagaaggaagaagctccagagaaaggttcagctccaaacctaggaagttgttatgtctattctatggggaggataagggacatacaacaaggacgtgccaagtcagaatccaaaagtagaaagagatagcggaagctgaagcacgacagaattagccgaagcaagtcctgcatactgcttcgtgctattctccatacattcttaagtatgtgggcaatcaacagcccacaacatcagttgcttcggcaagtcactctcaagctgcatgggctcagctaccaccaccaccacctatggcaccaaccttgcttcacaatcagcagccagaagggcaccgccaagcgcagcaacaatgcgacacacgagaggagtccaaagctcgcacagtcaacaacaaaagctcgcacagtcaacaacaatgtgcctgaatcgagacatatttactaaagcaatgcatgggcttgaccagaaaagtttccaagttcaa

SEQ ID NO: 29405 - DNA, 444 bp, Zea Mays
ctttgattggctcactagtcacagtcccatgcattgcaattgggatcagaagctgttgcaatttgtggatcaaggggtgatggtacaattgcaaggtgagacagtgcctcaagcatgtgcactcactgaaatttcagggcctcaacttcaccagttattcaacaccaatgatatttggtcatgtgtcttactcgatcacactacttccactactccagaggtggtacctcctgagatctctcacctcctccttgacttccaaaacctttttgctatcccctcagttttacctccacatagagtatatgaccattccattccccttctccccggagccattcctgtcaacaccaggccctatagatattcacctctccacaaaactgaaatagagaaacaagttcaacacctcttagacaccggtctaattgttcccagtatgag

SEQ ID NO: 29406 - DNA, 388 bp, Zea Mays
atttcatcagtgaagttctggggccctcaaagaagaaatatcctcaagttcaaaaactattgtatgcagtacttctaactgcacgcaagctccgtcactactttgatgaccacaaagtcatagtagtcactgaatttccaataggggatattctccacaacaaagaagccatcggaagaatagccaagtgggcctgcgagctgggagctcacgacattgagtttcgacctcgcactgcgatcaagactcaagcactagttgacttcgtatcagagtggaccgagcaacaagtgctagataacccagaaactgcagaagtatggcggatgtatttcgatggctcgttgaaactgcagggagcaggcgcaggaatcctcttcattgcacc

SEQ ID NO: 29407 - DNA, 310 bp, Zea Mays
caacccgagatgtcaccacgatagagctcgaccgcatgtctaccaccatggtagcgcatgcaccaccgcattacacactgccctggtctcagtctcattctagtttcatcaattatcaagataatatgcagtatgacaaatcatcaatatgtaacatggcttcaatcaatggtttctctcagtctctcagtgtgtcatctcatgcaattcctatgtctagcaagttttaaatttaacctcacttatgttcaaagtaagaggtcgatgagacttgccttcgctcaggtacgcgtcggcggtggcgtcttcc

SEQ ID NO: 29408 - DNA, 524 bp, Zea Mays
tcaggctgatttcaacatgaggcagagaaggtggctagaattgatcaaggactacgacttggaagtacactaccacccggggaaagccaatgtggtggctgatgccttgagaccccatcacaatgcaattgtatgatgatggattctcgcatcaataccccgtgtgatgagttgagtaagatgagaatcgaggtaattccttctggtaccttgtcttacatctccatcaagccaaccttgcaagacaagattgttatggcccaactcagtgataagggaatgcaaatcattaaggagaatcttcatcagacagtggagaagtataagtgttttcgctaagacagcaaagggatactatggtttgaagacagattggtggttcctaaaaatcgagacatcaagaaaaaaatcttggatgaggctcatctctccaaattctccatgcacccgggaagcaccaagatgtaccatgatctgaagcccctatattggtggaccagaatgaagagagagatagctcagta

SEQ ID NO: 29409 - DNA, 373 bp, Zea Mays
cacgccgtgtagtccatccagcagttcatcgaccactggaatagggaatgcgtccttgatagtgatgctattcagagcacggtagtcgatacaaaaacgccatgagccgtcggctttcttaacgagaaggatcggcgaggagaatgccggctggcttgggcggatgagtccttgttggagcaaggcttgacattgacgttctaactcatccttgtgggccgatgggtacctgtatggtcgcacagccaccgggacggcaccgggcaacattgtgatatggtggtcgtgcgtgcgtggcggtagtagaccggtcggcttggcgaagatctgctggaactccgtcaggatggcatcgaggaggtcaccatccgtc

SEQ ID NO: 29410 - DNA, 306 bp, Zea Mays
gagaaattgggaggctctagtggataatccgaggcaaagactgatgcaatggatgcgtaattacctagcagagccgcgggtacgctcaatttataggctctaggaacggtggcgcatgaatttgggttggcgcggtggcggtcggagaagaaaagggtcactggcgcacgagattagtggctttcaccgtggcggctctccggcgatcaccgggcatgcatgactcgattcactgcgacgtggttcaacgctttagcacgtggcacacagcggtaagcggccaacggcggcgaggtctatcccggc

SEQ ID NO: 29411 - DNA, 389 bp, Zea Mays
tgggtgcagggagctcgaagccgcgctcgtagaatgaggcgagcaccacgaccttgccattacgtggtaccagagtgccgtcttcttcctccagccgctagccagagatcgacttaggtgggaggaactctttcctctctagatcgtcgagatggctccgggtggtcgagcacaaagggaaggtgtccatgagcgtaagagaaagtggtgaacaaacacgtggaggggaggctactaagtgaaggaggaggcgaattctcggacgcaagaatgtggtaagcgtaaccgaccccaggtacttctcccattctatttatacgtaggcaccagaaagcaagcgacatctgaaggatgggcccccgcgaccgacatgggaggatccgtcgttc

SEQ ID NO: 29412 - DNA, 348 bp, Zea Mays
gtggtgccgacagctacccagcccccgagggtgttgctggtagtgatccagctcttgtgggtagtgcaagctacaacccagcccccaagggtgttcaggtgtgctccctttcccatgcctccatggacgtccacgtcgggtcgtccccacctcggtccgatggagcgacggcggtacgtgcttccgcagttttaactggacgagtcgccttagaggtcggcgagctagatgcaaggagcctgctgtctgctggtggggctgaggtcaccccagatagtgctcttcagatcattcctgctaaccttccctcgtcgagccatgcctcagttcctcctgccctgggtctac

SEQ ID NO: 29413 - DNA, 557 bp, Zea Mays
ttgtagtgcgcgttaggccgggtggtttgcgatgtggacgcatgaattatattggttcggccgaatatccctactctagtcttcggtggcttacactaccaacaccaaattattcgtagtacgaggttgcaagctggcgagagagggaagcgttcccaagtctctggtgtgagtacgtgcgtgcgtgggtcggagtgtgtgtctcatctgaatagagaagaccaacccttccttttacagctcaaggaagatgcctcttacaaggatctcccctagggagtgtgtagaaaggtaaaaagggtcttctgttgacaagcgtgttggtactgtgcttcgttcttgccaacgtactttggttaaaaatactctgggttgtttacgtgggtacaatgctccataccttcgaaggtatgtgaccatgaccaaggatacctgaagtttgtagcgcaaacggcggagttggtaggacagtatcgcctataatgacaacgtaagctctgagcctatgctatgaaagttttgtccgtactctttactttagccgaccctcgtacccg

SEQ ID NO: 29414 - DNA, 476 bp, Zea Mays
gtcgtggggaggaagcacattcactttcctggacatcaggactggggaagaagacgagaggagaatgcaagagtttttcatggctaaaggagtaggcggctagggcaggaaggtgagagcagagggtaaagaactgaaaggtccatctcaggtgaatttataggggcaggcggagccaccgagtcttgggccgagccaccctaagacaaaccgaaagccggttgggacgcttcgaattccccgcgcacgtgtgcagcaacggtcagcatgcagaccggcgcgtcttgtcacatttaattcttgcccttcctatcggctgacgtcagacaacaagcgctgcctcatgttacgcatcaaaagttgtgcctctccctctccctccccttccatctccttgcagataatgggtagaagacacctcccaccttgagcaattatcttcaaaaaggaaaaaggggaaaagcagagtattgttt

SEQ ID NO: 29415 - DNA, 328 bp, Zea Mays
aattttagctgtaaatcaatttctagtgtaggtattgaaacactaaattttagctgcaaatcatgtgaaaagaattttgtcctttgaatgatagaagggttggcctgctgtatagtgtatgcttagctgacaaactgacacactactcttaagcatatctgctcttggatttttgaagcatctttaagtgattccaaaaatccatggatctgatccgagcacaattaaaaggccaaagggaggtcacacacgagtttaccaagcggacgcacgcgagtacatccggcgcccaccatcagccatgtaattcactaccttttcatcctgc

SEQ ID NO: 29416 - DNA, 348 bp, Zea Mays
agctgttgcggagatcggggaggtcctggcgaacacgtcgatggttggatgacgaccagtggtggtcggagtcatccggtctacctcccccagcggtcggagtttggcggtggaggtgctctggctagtcgacgttggtagggcttgattcattcggcggacaagcacctcaggtagtgggaagacgattccctagaggaatttggctagggttgtctgtgaaagcaggtccacgcgcaccggcgctcggttgaggtccggcgagcggtggcactaccttagcgaggcgcacaggcaaattgggttggccaaggaggttaactgggggctagaacctcctggtagtga

SEQ ID NO: 29417 - DNA, 375 bp, Zea Mays
ggagaagaggcctcgcgatgaagtccacgccaccggaccactcgtctctcgtgcccgaggggcaccctgtggaggcgaacgaacaatggacgacatcctcgacgctcaatgtccgtaccacaaggacatgtgccacattctttggaactgcagagacttcaaacactccgtcgggaacggccgacccttccaacctctgccacctcccccaccacgaggaggacccagagaacctcgatgacctcagcagcaggaagggggagaaggcagagcattcccgcgcgtggacggggaagtcaacgtcatcttcggcggacatgggtcgcaagagagcaagaggcagcagaagctcaacgactgttagatacttgtggc

SEQ ID NO: 29418 - DNA, 364 bp, Zea Mays
cgaaagggtatgctctattctaatctggtccctacacccgagatccgatggtcgagattcctataatgcctgatctaatactggccttgcgatcacgatccaagggctatcctaccatctaatctacatcgtccaacagaatatcaacggcgcacagccatcctccacctctcgaccgcccagagcatggcgccgccacccaggcaccacgacggacctcgccgtcgccgggtcttcttccgctgcggcccacaatttaccaccccgactaacgcaacacgatgccaagattaaaacgaatcgagtttgtaagctcctaccagccgtgacgtcgaggtgagggcggtccacggagagacgcaat

SEQ ID NO: 29419 - DNA, 727 bp, Zea Mays
gtcagacacactgaatcagagttaccatggtacagtagcctgatcgggttcagtaaacctcaccgccgacgaccgatcctccgccgcgattcgtgtcatcggcgtatggattcatgctcgtggcagatggataacatcgtggggtaagaaaatcttcgccgccggtgagctggacgccactccggctagccgcggtacctctccccttgctcaccgcccctcggacaaggattctcaccaccgttaagccgtcaccgttgtccaccgcgtgtctaaccctttccaccacatcgccgtagcctgctttcactctccgttgatcaccggagcgattgccatggcgttggacaccaatccattgtgctagtgctcttctccttctccggccgccagcactgctcggccaaattgagcgccaccgctcttccctcctataaattgaagccacgatgagctccataggatagttaagcatccagccaccaagaatcaccagcaatcgttcactgcagagcaccaattctggatttcccccaatttagttttccgccaccatgaaaacgacctcgccgcggccagctcagctcaggtcagttcaagtctcttcgtggcttgttctagcatccctaggtcctccttaagctcttcgaccccttcaattgaactggaccatcacctatcgccgggaacacgttcctttgtccgcatggtcttcggtcgccgtggc

SEQ ID NO: 29420 - DNA, 650 bp, Zea Mays
gctgcctccattattacaacagcagctgaggagtcttctccctatccctttcataaccttcctaccgaagatcaaacttgcaataatagtgtgcagaatttacctctgaccctgcaaactgtagatccctcttgcagtagacagtctagtggtgcttttgctggaaacccgcagctttcgagtcccattcaacgcaaaagcagcaggctagcaaaaaaggctaggaatagagtcggcaaaggagcactacaaatagctaaagatcttttggtcaaaaaattaaattcgacatctgatcgcaatgaactatctgtattatctgaacttgaggttgttgaacaactttcgcagcactttgatcgcccactgaccaaaggcaaggcggaggcaattatttcactggccaacctcggcacgaaggagacgaacaagatgaagaaatctaccagggcgacggtggcaccagtcgatgcagtggaatttgcggcgtaaggccatgtcattgggccagtggtgtgtggtagtagtttcccctatgatgtgtctctaaggaagtttgtgttcatggcttagtgtttggtggtctattattgccagtagcgagtgtttgtgtcctttgtgtttctggctttggatttgggatggcctgc

SEQ ID NO: 29421 - DNA, 324 bp, Zea Mays
cttggaggcaggtgctgagggaatcttggggccattcaccgagttggagtaggtaggtccgggtgccttcaactgggggcagttattcttgaagtgactggggtctccgcagtgccaacaggcatttgctggcggttggttgcttgcaaccgagggggcctgaaaggagctctgactctgctgactgtaacgtgacggagtgggtccggctggtctattgaagcttggtcccttgggtggaagcccgaaggatcgagctctctggtgacggtcttgctgctgagctcggagaacctggaatttcctcttgaggtgccctttttc

SEQ ID NO: 29422 - DNA, 414 bp, Zea Mays
ggaatgagaaattagcgagctctggtgatcgattgagggcactgtttggtggcttggtgctagactaccctacggagctcacggcaggctcaatttatagcaggcaagagcagtggccggtgaatttggattgagacgcgcggcggccggagataacaggggttactggcacagtggattcgtggagtacaccgtggcggactcaccggcgatgattggatggctaacgtgagttatggcggtgcggttaaaggcttgaggcgtggcgcaactacggtgagcatcgcggatttcagtgatggccgtaaggccacgtcgctagcgcagggaaccgagggacagcgtggccgcagtacttgaacccatccgtgatgagatcttttcgccagtgagctcaatccatagcccatacgc

SEQ ID NO: 29423 - DNA, 715 bp, Zea Mays
aaactgaatgagatagtctccccaaaccaaagtgctgtcatcaaaggaagatttattcaagacaatttcatgctggtccaatagaaatccagattactgcattctcagaataaggccagattgctcttcaagttagatataacaaaagcatttgattctgtttcttgccctttcttgattgaagtaatgaaacatatgggttttggtctgatatggagagacatcatatgtgagcttcttggatcatctaccactcaagtgcttttgaatggcggtccaggcacaattatccaacatagaagaggcctcagacagggagaccatctgtctccaatgctatttattatttctatggatgttctgagttttctatttttcaaagctgaggaaggtttgttacagcatttatgcagcaggaaaaaaatacacagaatatcaatctatgttgatgatgtggccctgtttatgcatcccacccaggatgatatctctaccacccttgacatcctaaaactttttggggatgcttctggactccataacaatgctcaaaagtctaatgtttatcccataagatgttctgaggaaactatactggctgttcaaaacatcttaccttgtgagattgcttccttcccttgcaaatatttgggccttccattatccttacataaactttctaagcatcaatcctggcccttggtggacaaaattg

SEQ ID NO: 29424 - DNA, 349 bp, Zea Mays
gtggtgagcaaccgatggtgaaggcgaaggactgcggcggcggcaatcttcttctctctccctctctttctgtctctcaaccgcggtggatctcggtgagctggggagcgcgagggcgcagagttttatacactgacccgaggaggtaacgagcaacaaccggcgacatttatgtagttggatcttcggtcgttccgagctaatgccgcgcaatggggaggaaggagtctgacgtgagatccgtgaggttgaggattgtgctaacaactagggcccacccaacagagacacgaagtgtgaaacgcgggcgcagagtgcggatggatgaccggccgagcggctaagggtg

SEQ ID NO: 29425 - DNA, 554 bp, Zea Mays
atgactactctggcatgtcaccacctctctatttaagccaagacaatttctaccatcgactaagagtcataagcattaaataccttactactttacatgcacaaataaacttcaacttaacacaactgacaccgatggaatttttactaaactcatcatacgcataaccctatctcgcatacaaccatattatggcgtgcactcgagacacttcaatcaatgtggcgcgaccactaatataaatgaactccgacactcatgtcttaacgatacatcctccccgcaaacaagcatttgctaaactactcatcacatcaaccattataactcctatataatcatgaatcccatcacattgcgtagtatttgcacttcaatctcgacttctctgcacgcctcatactcgtttattcaaaaattcttcgcctaaccaatacactacactctacatacgtaggatccatttaacacactcgacgtataaacttaatagaacgtttttcatacgacctataaaatcaagctagccttttcatcgcactacatgtctcttt

SEQ ID NO: 29426 - DNA, 494 bp, Zea Mays
gtggaacgcgggtcatacgaactggtcactccctgagatgtcttggtcacaacgaggtgaggaaccggtgagcgtggtcaccagacttagcacgcgcagcacatgacagtgctaacctgggctggggagaggattaacaccagcagtggctacatgtcgcaggtagccgtgtggctgcagggattcgagcccaggtcactacgatgaacttggctagcaaccatggagaccatgagcactcttattgagctgaacatgatacaaagaatgcaacacgccgcgtgcagctgcttcttataaccagggactagcgagctggcgcaagcagttagtggcactaggacgcatggctgcaatacatggataccacgtatcagcaaccgcacagaaaaacaatgaacctggccgacgacttgaaccagcggcaaacaggccaagtgtccccctaacgtggataactctagttctctgcatgcgtagatatttgaactttg

SEQ ID NO: 29427 - DNA, 431 bp, Zea Mays
cacagggggggaaatgtcttactgcggagacgggcggacgacggtcgagcttgaccgtccgaagtggcggtggagacgcatgaacggcgggttgtcgaaaccctagggttggggacgaaggagcccatgtggaatgcgagaagtcacccgacttcgtgaagacgcggccttcggtcgacttctcgcgatttgtggtaaatgggctacggacggaagcgcttccaccaaaagccactcctgaagctgagcgcttggctcagattctagcttctggtagccataagctgcccagaaattgaaccaaacaggggctaggtgtcgttcgcggtagcgcttctaaggcagtggaggagatgaaacaacactagcggtggggttcgaagaaaaaacgattgaagaaacgaaacctcgctaggcaaatcctttattct

SEQ ID NO: 29428 - DNA, 466 bp, Zea Mays
caaagtattgtccgaagtgtaaacgtctaggttcatggagatagacactggtgatggacataagaggcagctcgacatccccgtgacaatcctacgccacctctcgttcatactgagaatccagcgtctatacatgaacgaggaatctgcgaaatagatgacatgtcacaaaaatggcaaacaatacaatcctgacaagatggtgcatgcatacgatgatgaagcatggaaacactttgaagtcattcaccatgagaaagttgaataggcttgtaatgtacgtgttgcgctggccatagatgggttcaatccctatggaatgattgttgccccgtacacatgtgggcccgtgtttgttataaccatcaatctccccccggcgtatgctttcaaagatagaacatagttgtgtcgttcataattcctccacacccgggaattaaaatgggcatgtacatggagcctt

SEQ ID NO: 29429 - DNA, 489 bp, Zea Mays
cgacatttcaagtaacccagatctaacccgatccacacgatacaagatcgacgacttccgagacaaccacgctttctactactctcctctttccaatcagatctgtacggtcatattttccccgagcgaagggttatcactgatctagtcgcaaccgttggtgtgtggattgacggtcacggttcatccctcccatcggtggcgtcctcatggcggcatgccccggaccacaatggcaactcaccggcgagagccgcgcctgtaccccggcgctctattcccaaatccctctatcttaaatgcacagggagacaatgcgagccaaatggaggggttccaactggtaatggagtggccaaatggcttggccgcgacatggatggcttcacggcggcgacgaggtcatcgacgagaaattacggtgcccctgaggatcctccgcgcccaccagtcgctaggatagctccacccgttggtaggacacgtcgg

SEQ ID NO: 29430 - DNA, 351 bp, Zea Mays
atgaaatcgaggccaccgaaacaacaccgattttagaagtaatgaagcgatcaggtctggttgtggtagaggaggttgctgacgaaggtgcttctaatgccgaagctgaacaaactgtggttgagggtgaaaatgttgatgaaagtgaagaagactatagcattctgatcccaacaaagactagtcatcttgaatttgaaaaatccactgtgacggaagatgacatgcctatgatgatgaaattgggctatttcggagaggctgagagcaaacttattcgatttgctggagaagaggtaatcccagagccgaagaaggatgaagttgtcatctttaagagcttcttcagag

SEQ ID NO: 29431 - DNA, 386 bp, Zea Mays
aaaatccatcggatgtgcctcctccctgctgtattcttcactgccagccgaagtcctccacagccagcgcctcccacctggctcaagcgacacctcaccgcctccactgccacaacgagcgccaccatgttaaaccggtggaggtcacccttgcccttgccctgtccaactgcctccccccactaacaggccagcggcaccacaaaggtctatttttggctaaaagtgagagtgagccttgaatcactggaatagctttactcttcgtttaagctctgtcttttaagcagctttgtcttgtaagctggaatcccaaagtcttgtattgtatccttacaagcagagaaaattcttctttcaaaaaaaaacaactatgaggagcttac

SEQ ID NO: 29432 - DNA, 594 bp, Zea Mays
tattcagggtcagcttgtagagcactagatcatacatatggaaatggatgtcaacagctttactgctttagtagattctatgtcacaggctaagagactacactctctgatttggaggatgtcactgttgaagggtgctctcggtgccagatccgagggttgttggtgagggcctcaggggctgtggtcaggccagagacacttgcccatggtggcgtaggggagggagattagccagcagtgatagtagtgcctaaatgacagtttttttccgtcttcccatgctgtaccaatcagtaattccttgtggtggcgtgggggtgcatggctagccaacacttgtatagtacctaaccaattaaccatgataggtttttccttctttccatgccataccagttaccaatcagtattttttttgtagataccagatgtgcaggcaaacattgtagtatactgtatcatagtgatccagataactgacacttacatcatgccatattgccacttgcattttgttcgacttgagcaaattttctgtttattgtgtttgttgctgtcaaagcctgcacaatccattgaatcgaggggaca

SEQ ID NO: 29433 - DNA, 317 bp, Zea Mays
cgaggtgttacggcttctgtatcgtgacttggcatgtcctcgttgtatgccccttatcttctccacagaatagacaaaacaaccttcttggttgcgagctgaatcttccttcaaagcttctacctcctctgcctcttggggttggtggcctgaaggaactttgttgtgttcttgatgattgagagttgtgttgatgcccttgagtatgacttcccctctcttcacttgagctaggattatggatcgtcctgacatgccttggggtggagtcttcctacaaagccattggtcatttcagagtatttgtaggcttcttc

SEQ ID NO: 29434 - DNA, 346 bp, Zea Mays
ttttaaaacagaccattgatttacgctaaaattcatatccatttacgttgtttcggatcacgtcttacgcttaaatccacctgacctagaacccgagcatgatcggagcgcgattttcacgtcgtaatttaggccacattcgttgttacgaaatagattgatgatgtacgataaaatttgtacccatttacgctgtttggttcacgttttacgctgaaatttgaccaagccaaaatccgtgcacgatcgaacgtgatcaatctacgctgttttagctaatataggatttacgctaaatttcgtatttatttacgatgttttagctcacgttttatgccggaatctg

SEQ ID NO: 29435 - DNA, 378 bp, Zea Mays
gtagttggtctgtccatttgccctttttgtcgtcgaggagccttttcttgatagcgcagaagatcttgcccttggcgcgttcgacgacaccgttggactattggtggtagacagaggcgaacactgccttggtgccgatggagctgcagaattctcggaagtcctggtcgtcaaactgcttgccgttgttgactgttagctcggatgggactccaaaccggcagacgatgttctgccagaagaatttctgcgcggtcttcactattattgtggagaatgctccgccctcgatccatttggtaaaatattcgacgatgacgaaggtgaattttaggtttccttgtgtcgtaggcagtggtccgacaatgtccagccccc

SEQ ID NO: 29436 - DNA, 644 bp, Zea Mays
gatggcgcgcgtgggccgagaggagaacaactcaggagaagccagcgagtgccgcggcccaacaagcgcttcactggtgaggaatggcgacggtgagggtaggcccatggggcagtgcgagacgtaacctgtaaataatcctggcagttgtgcggggagagacagaggatatacgaactcggaaccggctgtgtccggaggctggcgtctggcggcgcgccgtgtaaagaacctatagctaccttcaattctgagagcttcgagagaggcgacgggtgccgggagcggcgcccaactcctccccatatcagttgtcttacagttggtattcagagctggatcttccccacgattatttcaccagatcgaagacaggggcgatggcgccgtcgaagactgaggactcaatggcgcagctcctcgccaagattgaggaaggcaacagggagacccacaggcgtatggaaacgatgcaagcttctatggcaaacatggaagcgacggtaaaaggggtgatgaaggaacacggcgagttccagagatggcggccggaagtggagaagaaggtgtgggagatgaatgaagccctaaaagtcatccaagtcgccatcgagaagcaatcgcagaagcaaccagtggacacc

SEQ ID NO: 29437 - DNA, 534 bp, Zea Mays
cttgaatatcatcctttgaaactcactgaaatcagcctggcctactgagacttcgtcttgagaaagtcagattggttgggtcaaattgttgatatcatcatcagactccgcagggaactggatatcatcaaatgatgagctgggttctgcctggccatcaatgctcttctccaaactaacaatctcagctttggcctcctgacgaagcatgttcaacctatcctcgtactgttggcgctgctgagcatattcttttgacatttgtaactggaacatcttctttcacttggcagcgggcaccggctttttcaaagctttgatgttgtccttcagctgtttctggattgcagcctgtatccttttctcctccgcttcaaccttcttctcggcatcagccttcttcttcacagcttcttcagctgcagcctttctcttaatctcagcttcttcggcctcagcctttctcttattctcagcttcttctgccttcttcttctcggcatcagccttattcttctcagcttcttcagctgc

SEQ ID NO: 29438 - DNA, 434 bp, Zea Mays
ggatgaggaagatgttcctcctttggtttgcaggaatcgtcgtagcaaagccagcaacgatgtcccaattcaagctctatcggggctagttagcctccgtgggatgacaatgtctgctattgaccatgcactgaaggaaatcattccaaagggcctcttattggaactttctgaagctagaggtgttgacatccgtgtagaggtcccggatggtgctccttctgctagtcttctggctgggcaagaaataacccaggcagtttcccatgcatcttcaacctttgagggtggtctgattggtaaggatactctggcccctgaggttacacatgatgggtatctagccttggagggtatgactgaagataacccaacaccctagggtgctactgaaggtggtttagcccccgagggtattgctgaggatgacccag

SEQ ID NO: 29439 - DNA, 376 bp, Zea Mays
gttagctgaaaggtattatctgaaagactgcaaggtgggaccatggagcagcaagatggaactatcacaagagcacgactaaggggggtagtttcttcttcataacttgtcgtgcatgtgtgcagactaatagtccgggttcatgggggcagacccaaccgggttatcatacacgtatgcgtcatttagttacaaaaaaggaaacagactcgaccccttagtcttgctctatggatagaacttacagagatatttggcatcggggtaaggtactcctccaatcgtagctagatggttgcccctgggtcggtgcactcccgttaccttgaagggtccttcccagctgggggagagttgcggagcacctcttggtatg

SEQ ID NO: 29440 - DNA, 400 bp, Zea Mays
aacccaacaagaagttttagagagagggaagttgaaagtaacaagaccctatggggttggcaagcagttgaatgcaggggttagaggagaaggcaaacctcaaattatggggggtgatttgtctaaggagaggcaagtaagggagttcaggaagttgaatggattgtgttatgcgtgtggggagaagtttgagccgggtcaccttgctaaatgcaccaaaagggttcaagcacatctaaatgctgttattaccaaggaggaacccattgtgctcactgatgatgtgttgaaacaactggaacaggaggatgataaggaggaagtatgttgtaaagtgtctctgcaagctatggctggtagagatgatgagaacagtatgatggtgagtgcaatggtgaat

SEQ ID NO: 29441 - DNA, 312 bp, Zea Mays
tgctcggctttggatttctccgacaatcttcgctttcaggattggatttccagcaagtttaatcgcccgatcaacctcctctcgggtaacttcgaccgccacgagtttttttagtcgtctcctttggcagatgctccttgcgattgtgctcagagtctgtggggcttctcctgcaatctttcattggtggcgcggcggacttattcagggtctcgcccctttcggatcgggtctttcgtttctcgctttcttgcaagaatgttggtttcacagtttatcggcttcgttcttactcctgctccgtgttcaaag

SEQ ID NO: 29442 - DNA, 934 bp, Zea Mays
gcgagggcagcgttttcgctcatcgtcaccaaagaacggtgatggcaacacacattattacattggttcttgtttcagaataagaccgacttctcagaaattaaatagcatcaaactcaactctttgccgtcaaaaagagcccacagatccccctccacgaagcacgacccggccgtcggcgccagtataacacgataggtcccttgatccaatagcggacccatccaaaggcgtgacctctccattcccattcaacgatgtcttcgagagactttaataccttgcgaagactctcctaccatcccgacactttgtttcgataccccaatcttttttcacccccgctgttcaccaggggctaccccgcccgaagtcgacggcgcctcaaggggggcgaccctcaaaggagactcgactgcagttaaatctagcgtcgcaaaataatctaaatcatcttccaaacattcgtcatgtatccaagcaaacgggctccccaacttttcaccttccgaagaccacaacccaacatcagattcaccagacacatttgcatccaccaaaatatcatcattcacgttatcatcacggttcgcatgtgcaggcccagacgccggaacctgtgcaacaaccaatcttctgtatcatgcacaaagcgaacactgtcaggctattcctattacattctttcaacctgctcagaagcacctactgttgcaggaccctcagctccgccttcttggagcaatgattgcccctccgctcctgcctccactacaacatccttccggaccaccaagctctcgaggccgacgagctcccttacctcttcttcccccatcgcctacgaagacagcacaataacatttcagacaatgaacacacataacacattcgccaagcccaaaacatacttgtaccagcgctcggttggcc

SEQ ID NO: 29443 - DNA, 335 bp, Zea Mays
ttggatacttaactaccttacggagcttgcggcggggtcaatttatactacgggagggcggcggccgggaatttgatcggtgacgcgcggcggtcagagaaagggaaaatttactggcgcaatggcttggtgtccagcgtcgtggcaattgctccagcgatcaacggggagctagaatgagtcacggtgatgtggtagataagcagagacacgcggcggacaacggcgacggcataacggcggtgagaatccttatccgagggcggtgagcaaggggagaggtatcgcggctagccggagtggcttccagctcaccggcggcgatgatcttttac

SEQ ID NO: 29444 - DNA, 555 bp, Zea Mays
gtaagataagtaaaacaccgctctcagattgggataggagattggagattttcaataacagacataatgtaatcaccaaggtaagatcgagggatgagaaaggtaatgataataacaaacaaaagtaggcaaaggacggagttaaaaactcgcaagtgacaaagaagatgatacatcctagagaaaaataggtaaaacatacaactctcagattgagatgggagagaggagactttaaaggacaagtataagataaacctcaatgtaagatatagagatgtcaaaggtgatagtgataataacgaaaagcgtaacaaaggatagagttgagacatgactcacgaagtggcgaagtggggaaaacaatcaagggtaagataggtagggttccaacagaagagttggagtaaaaattcattaccaaaggaagtgacaaggaattaacgagatctccaaggatatgcaaaataaaatgaccgctcatgggtcattaagaaacaagggtggtcaagatcatgtagaatgaaatatcttaaacataccttgggatataaa

SEQ ID NO: 29445 - DNA, 322 bp, Zea Mays
cttcgctagagatttgtgggatatcctgtatcctagagtcgtctagctggaagttggattcagtagctagaccgaatagagttttgtaatacaatgtgatatgtttttttaaatcaatatcccccgtaattacattgtctccattcataagcttgtaaatacgggttttcctgtgtttaccattcgcaactaaatggaaatacttggtgttcgaatctccctccaaaagacctttagtcttggcccgttgataccatttaatctcctcttctctcagcatcgttgcgagcctattacgaaggaagtttttggtatcaatttc

SEQ ID NO: 29446 - DNA, 384 bp, Zea Mays
ggtcgcacgcggtacacgccggtgtgtgggtgcttccgttccatgcgaacgcagcaagaaaacgattttggtgatgtgtgcgtccaggtccaggtccatgtccaacacaacaagaggaatagtataatcgtacggtctattcctctgacaaagactgtgatctccctgacaccattttctggatacgctcaccactgccagcctaccattgcgtggggaccgggaaacggtcgccgtctgaccaactgatctcttctggtgccaagccaacggcgctagccgctaggcacgctggacgcaccgctaagcgatggttacggaaagcactttaagaattatgctactgtagtcatcgtcggcgaaaggtcgccatcacagcatcac

SEQ ID NO: 29447 - DNA, 360 bp, Zea Mays
ttaagtcagcgatgacttaagtcggtgcgacatgctcacgtctacttatcttagggagaccactgtgccctaccagccaggcgattggtttaagttgaaaacgccttaaaaccagcatgacacacttgctttcacaattgttcagggtgaccactataccctaacgacaaaacaattagcactccaagaaaaaagaatgttttacttgttggcaccaggggcatgttctggcgccctgtccgcaaaatattcgagttctaacgcaaccatcacacgcacacagaattcatattacatcaagtgttttgtaggacatcactgcatcgaaacgtctttgccagcaatgtctttcgcaggagc

SEQ ID NO: 29448 - DNA, 387 bp, Zea Mays
aaactctttagaccatttctatgcctaagcatgctcgccaatgtcagaaatgaggtagcaaatcgagtcacacctagcctaacaagatcaccacctagcttctctctcattaggttgtgaattctaccatgcttgtagatgaacctcgacactttcttagccatattgatgcagctattgaagtccttgatctttccaatgtcctctaatagaaaatccaaacaatgggcagcacaaggtgtccaaaacaaatgggggatcctatccatcaagattctccctgcagctttaaaattggctccattgtctgtgacaacttgcaccacatgctctcttccaatcttgtcaatttgcttctccaacaaatcagccaacatgttagcatta

SEQ ID NO: 29449 - DNA, 374 bp, Zea Mays
ccggtgtcccctatcatgtgttcgttagtagtaaaactctgttgggtgatggaatatgacatgaagaataaactattagtataacacgcaattgttgtgaaggtaaaggggtgagttgggaccttggggtttgaaaaggaggtgacttgggcgatcaatgttttcttttattcatgaggcatcacatgttttggctgtctccattgttggtatgccctgctgataggggatttgacccccagctgtttcttatctgttgtcatactcaataggaaaattagatgctaaatgacaagcgcacatcagcaggtaattttgatgagatatctggatgtttgcagaaaatgaatagcgcacatcagcaggtaattttg

SEQ ID NO: 29450 - DNA, 593 bp, Zea Mays
attttctatgaattactcaagttttataattatttttatactcaaaatcaatttctaaatctattttctggtttcatttaattcctggactgggcctcaattttcagaaagctcaagggtctctgcgaaagataacctagacccagggaacagtggccaatggacggcgggttggtttcctgaaagcagaggggctctttagcaatattgacccgcgaaggggtacagtggtattctggccgttggattcctcctggatggcccggattagatcttaccctcagcacaatcataccacgctctgacccgatggattaaggatcaacggcacacagtggtccgcgtctactcttaactcaagcccacagatcccgatcggacggcccaatcttcatcaagcgctacacctaatctgaaccgaacgatacacgatccacggccgaggtgctatcgagacccgagtcaaatctgaccgcacgatatggatctaacggcccaaacaccgtcttctcccccccggtcatccgagcggccaggagcagagctccacggcgcgctcaccggcgagcacccgctgacggcccagtaccccg

SEQ ID NO: 29451 - DNA, 509 bp, Zea Mays
cgagttctcgggccacaatggatggattgaagtgaggagtggtgcactgggcgtgtaacaagagggcggaatagggagggcactcaatttatagacgtcggctacaggtgctctgaattttggacggagatgagctaacggtggtgaagaggtgagtcaccggagctcgtttaccatggcgctcaatagggtaagaactcagggcaataactggccatccaccacgacttactacgacgtggtacgatagtgtatggcgtggcacgatcggagtaaacgacggtcatgatggcggtggtcacgtgggcacgtcgcggggcaagtgggtacgatgagaccagctgaatccactccccctcagatcttttcatcctcgcggtaacatctcacccgaatcgagcacgaatcgatgcggccaacccaaatcaccatgcggacatcgttggtagcaagattccgtgacctgcgatctttttcagtctactgtaccatgctgactccattaagtg

SEQ ID NO: 29452 - DNA, 385 bp, Zea Mays
gctatggcaaaattgtagttgaatccttggtctacaactttgctacagaaccataagtgagttcctatagaaaatttggagaaatctggacctgaaaatgcactgtcaggcgctctgaagattccttccatggtacagtgcaccccatctgaatcagatcacgagttcaatcctatcctcgtcgtctgtgatctttcgccgggattgttgattgatcgtcgcgattcgtgcaccgtggtcagcagataagcacgggtaggtaaaaatcttggcatctggatcagtttgagtccggccgcggctaagctcgccgtacctcccttgctcatcggtcgaccagataaccttcgccgccgttgatctgtcaccagtgtgcgccacgtgc

SEQ ID NO: 29453 - DNA, 853 bp, Zea Mays
ggaagactgccctccaaggtcgacgatgcacgagacaccacctgggttacctcttgcccagcagagtcaggcagcgaaagtccaccatctgggaccttagaacagatggttggaatgtcagcctcaggaggctctgataaaatgtcttcaggaacgatcttttctagtgcctgatcaaagtctgatatcgaaagtccctgaaggctgacgagtgccgacagggcttgggagggaatatcgctacccccgtcgctacctctatagtgacagctgttcttgcggatcagcggaatctcctcttcttcttcctcttcatcctcatcaaatgtgccgccagcagcctgcgcatcatcacaaccttcggcattaacctcaggaatagcgtccaccaggacatcaccaaggatcggcacagaaggaccagcatcctgatccaggcacgacagtcgccgaagtcgcctctttttcttcttctcctcgataggtgcagccgggcggttcacatggcgtgaacgctttggtcgggcaccttcgggtttccggatctccacatcttcgtcaaactcttgtcaagtcgtgatggatattggctcggtacgggtagagtcggatgattccccggccagcaggctaagcacgacgtccatctcagcatcatcggtgctaactggcatttcaatgtgagtttgcctctcagcctcgagaagattccgaagtggggcaatcgaggtatcaatatcctcgggggagggtcgcactctatggcccgggctaccataacaagcaggagggttggagacaaatgcagagaatagcctatctagaggtaggttccacacagagtaagataaag

SEQ ID NO: 29454 - DNA, 350 bp, Zea Mays
tgttactggaggtgttgtgaaggtgcctgaaaaatttgggttcaattggagcatttttggctggtttgggcatttcaccgaacacgtgacgtgcggagttctagggttttggagaaatggctattagaggctgtgaaaccctccctaaggagctgagaacctacaaggatgttcaaggcacacaggggaatatatttcaccacttggttttactggaattcacaggaatttgaaatgggcacaaaggggtggaagaggggagctcactgcccagagaaatggagagagagagatagggaattcaggggagtctcaccagagaggagggcagggctaagcactggttcgcc

SEQ ID NO: 29455 - DNA, 1231 bp, Zea Mays
gaaaggttcaagagaacgtggagacggacattgcccggggcattgcaaagggcaacgtgtttgtgcagtgcgcgcttgtggacatgtttgccaagtgtgggtgcttaggtgaggcgaggaatatgtttgagagcatgggagtgagggacttggcttcgtggactgcgatgattggaggagccgtccgcggaggagactggcttgaggtgatgacgttgcttaagcgcatgaagtcagaagggtttcggcctgattcaatgatttttgctactgttattccagcatgtggtaaggtgaaagagctgaggactggaatggcattgcatggatatgcagtaaaatgcggagtaggtgatgatatctgtgttcctaatgctttggttgatatgtattgcaaatgtgctaggctggatatggctgcttctctgttttggtctatcgatcacaaggatgtgttctcttggagtaccataattgcagggcattcacagaatagaatatataatgtgagtgtcagtttgtttactgaaatggttgcttcaggcataaaaccaaattctactaccatagcaagcatacttcctagcatttcagagctgaggttactgaggtatggaaaagaaattcattgcttctccttaagaaatagattggagcacagtgagtttctagctagtgcactcatcgacttctactgtagacaaggatacattagggacgcacaaattgtttttgaattcaagccgaagaatgatttggtcgttttgaattcaatgatcagaggatatgtcgtgaataaggattcagagtctgcattacgtctattaagggcactgctgaaagagggactcagacctgatcatgtgactgttgtttcagttcttcctctatgcaatcaaccctcgaggctcctccagggtaaggagctacatgcttatgccatcagacataacataagttcgtgtttctcagttactaacgcacttacagatatgtactgcaagtgtggttgcctagaaatagccaacaagatttttctgctgatgacagagcgaaatactgttacatataacactctgatttcttctctgggaaagcatggccatgcagatcaagcattcattctttttgacctaatgaagagggatggagtttctccagataaagtgacttttgtagctctgttatcatgttgtagccatggaggccttattgacaagggcttatgctt

SEQ ID NO: 29456 - DNA, 745 bp, Zea Mays
ctcgttagctagtttgtctttgacaaggcaaggatgtttaccatcagattttggatttccgagctgaccattgtcagaactacccatggtatacacatgaccggatgtagcaagggcaacagtcatgttctgtccacatcccagctgatgaaaattgtgctcaagaagagcttgaagacaggtaggaatcagcctagcttctttgtccccttggcctaaacgattcttatctccatcaccccacgtatacagcttcttagacaccacattcatgcctgtctgaacagaggcctccacaattgctgcagaatgccagactccgcatgcaactttgacagttctaaatccattcaaggcttccacttcttttgggtacgcagcgctttcacggtttccatgcccaagagcaccgaattttccgtcaccaaatgtgtaaagtcttccagttgatgtgatcagagctgaatgccacgagccacatgcaacagacagtacctgaagcccctccaagggccctgagacacgctttggaagccaatggctagccccagtgtcgtatccaagcaatccagcacggtaagagccatccccccagttgaacagatcaccagaagcagatatagcacaggtatggaactctccgcatgaaataaaatcaactatggtcacggatagtgactcaacaagcttgggacgactaatatctgtatcagttccatgaccaaggcgcccaccaagttcctcg

SEQ ID NO: 29457 - DNA, 642 bp, Zea Mays
tggatccacctcatgtccccaggataagagcactccatagatgcaccctacggccgaacccctgtgggacggtcccaacaccatgtgtgtgccatctagacctccagccaatggaggtctggtgctgccacatgtccgggctaataccagtgggacccaaacttccctaagtaccttttggaccctcggtcaagagaagtttggagctaccacgtctgcatgtgctcctagccgctgctcgtcgctcaggcgaagacctagtgctgccacatagcttgtggcacatgatgtaagctgccgggtggagcctgacgtaagcctctgacatggggtcgtccgtgttcaatacgagcaaggtgcgtgcctatccacactagtgacaggtggcacgcaccccgcattgaatgtaggcggcctgcgcagcccgcaaggcctggactgtgttagtaacccgcatgttatcaaggcaagaccattgactctctacgccatgcatgggcgcttctcatcatgactccgactgttccagctacagagacaagtggaggagacaggatgacatcatccatctacccctctaaacatgccaacgtaccattctacgccgctacctacaccagtgccttcgcccgcatgtcaaca

SEQ ID NO: 29458 - DNA, 614 bp, Zea Mays
aactctataatctgttatagattttctcaaggtatgccttatctgtagaagtttttgtagagcaattgcagcactagtgtaccaggcatattgtttatcatctttgctaattttgaattgtctgaatatttattatccctcattaatccaaaactctacagttcaaaattgcagtaacataaaagttgttgagtgttgatgttgtagttaaaaaagatttaaaaagacaaaaaagtagcaatgttgcaatcaattgaacattgaacactattgtacttcattaccatacaagccgaggtgcccatgcgttggtagtttgcttcaaggtctcgaatacatgatagtttaaaattgtattgctggaactgggtgatgttccacagcttagaaagtggtcttataagtaggcctgtgggtaccgtgtacgaatgtaaaggagcaagtcgaagtggtttcagccaaaacaaatagactaactatgtacatttcatcttctccacttcctcacgcagccacagccattaattccctcacactgtcatgagctcacggtcgcacgactccttcccccacttcctctatgcctcccacaacggtgacccactaggcgaaac

SEQ ID NO: 29459 - DNA, 573 bp, Zea Mays
ggggtcctcatcctgagcttggccgccaagcatgagttgctgaataatttcacactgaacagtccaagagtcaccagcaaatccctcagcctccgaaaaaacaataatttgggggacctcatcaagtgaagtgacacgaacacgaagcaaggttctagagatattactccgatcctcctcctagagaatcagccttccaaatgatccaatggcagcttgcaggtattctgaagaacgataatccaaaggaaaccccagaagcataagccagcattcatggttgaaaagaagagcccggtggttccaagcatcattgtgacggaccacggtgaaagtagcatccagatattgctgggggcccagcaaaaccaaattatcccgctccagaacactacgaaactgcactatcacctgccccaagtgcgagcgctgaatggcacgaacaccgacccgacgatgctcaacaagatactccctgaccacatctctgaccgcagggaacaaaacctcgtgctcaggtaaaggatgaatattgataatcgccagtcctcatgcattggcggcaaacgctgc

SEQ ID NO: 29460 - DNA, 756 bp, Zea Mays
caccaggatccaggagtcattcttttgagcacagctgtcagcccagattgctctgtgagcgcaccggctattggatctccctgcgtttctgcttgccgccggtgcggattctgaggtgcacctttcctatctacctggtctactcactcaactgactaccagcggtagatatgttgaggagtgggtccgagttttctatgcttctgtatagatcgaccccgatcaccagtggatgaggttccgctttgagcgagaggatgttactattcatgccagccagattcgctagctgtttggatttaccgagtcatcgactcgccttcacagcttgtgctacggtacctctgatcctcctcgttgccctcacggtggagttgctccagctacagcccacatcgcagcctgttctgaccgcctttcacagatgggtcacgacgctcaccgacagatttcactccagcggccaagtacttatattagctcatgagacggacgcttctgccccgaatgggttatagagagactaccactcatatccagctctggctacttggtgccctgatctctcattcagattttgatgttgttgacttccttatatgtgagatcgagggcacagtattggatggtcttcgtgcccgacgagagctgtcgtatgctcattatctctgctacatcttcgcgtagctaatccagccaccacagttccaaggcacccttgaggcctcatgcctccactttggttcctaccatcca

SEQ ID NO: 29461 - DNA, 306 bp, Zea Mays
ctccccagcttctatgtccgctgttatcttgaattgatgttgtccccacacaattttattagaccgttttgtatgttgtacgatccaatctttatcacaaccgtctgtgtcctttaatattttgtatgcagtggcgtatttcattgattcctcaaatctattcataacagctctggtgtatgctctagaaactcttacttcgaatctatacaatgtatctgttgtccttggtccctataagacgttattatcataattaaacaaagtatttacataaacatgtatgccatactgtaataataacaa

SEQ ID NO: 29462 - DNA, 342 bp, Zea Mays
tgatctcatatatgaagttgtggtcaaaattttcatgttgagaatcgtctcaaagtaaaaaatgccatacacttaccaatagagaataattgcaattcggatcaacatagccttttattgcaattcggatactgtatctattagtttgatggaataaaataaagtcatttgccttttattgtggtgagttgcaacactcttctactgtttctcactttcacgcattttatggttacatggcatagctctcagttttaggctgtagttgtttaagttgctgggatggcagtggatgctaggtagtgagcattgggattgcttactgggaaagggaaatgtttg

SEQ ID NO: 29463 - DNA, 818 bp, Zea Mays
cattagtgacggcttggtactcagcctcagcactagagcgagaaaccatgggttggcgcttggacgagatgaggttggccctgagaaacaccacatagccgaagttagaccggcgggtgtccgggcgcctggcccagtcaacgttgatagatacaaccagctcgtgtgtggaggagcgccaaagatggagcccatagtcgacagtaccccgaaggtaccgaaggatgtttcacaacgctcatatgcgactttcgaggatcatgcatgtagagacagacacattggatagcatacgcaatgtcggacctggtgaaggtgagatactaaagagcaccggcaagactgtggtagacaatggggttgttgatagggcaccatcactggagaccttggcttgtataccaaccggtgtcacacagggcttgtagtccagcataccagcgcgctccaagatatccagggtgtactatcgttgctaaagaaacagtccattcgggtgacgctcaacaacaatctccagaaagtggtgaaattgcgaactcatgctaaagggttgtaatgaacaagtgcaggaggcttgaagagaggtagtgagcacaatgtcatcaacatataggaggaggtacatagtttcattgccacgcctgtagatgaacagagatctgtccaacttagcctcagcaaaacctagggagagcagatatgtgccaaacctattgtaccaagcacggagggcctacttaagaccatagagggacttgttgaacttgtagaccaagtcagggtgggtaggattaacaaagcctacaagttgactg

SEQ ID NO: 29464 - DNA, 330 bp, Zea Mays
tttctcgtattccttccgttaataatgatgatagtgaaagtgagaatgaggacgtgtgagaagaggagatttgccagttctacaccaatctcaacaaagaagacaaagtgctcttgattaagttgttgagaaggaacaaggaacaaggcgagacacttctcaggctggaggagactctcatcaaaactaatgacaacctaaagaagatggccaaagacaatgaggagctaaggtgctctcatgatgatttggtccaacgatatgattcagttttaatcgagcaaagaaataatgatgatgctttatcttgtgttgctcaacttaaaattg

SEQ ID NO: 29465 - DNA, 667 bp, Zea Mays
tgccactgcgttgcatgaagagttgcaactggaggaccactcaacttatataacgcccttttccggtggtgatacaacatcttggattgtggccacaaaaggtgttgtaccaacagtacaacctgaaacgtcatcattctttttggcaattaaggaaaaaaaatcgctagtgtcattacccaagggcatgttccaaagatcagagcaacttcatgtattgaaactctgccactgcaccttcaacttttcttcacctcctttcctttgttgccgaaacataagattccttggagttgatagctgcaaggatgaaccacaagataaaccagaagaatacaaagaacaagaagaggaaggaaatttcagaccaacaatagaaggagaattctttcaaagcctatgggtgctagacgtatgccaaacagattgggaattgactttatccccaaatgcaatagagacgatggcaacaaacattagggagatacatataaagagcggaagaatatggcacaacaatctttcgtggacatgtctggggaacattcacaagcttcgactgatcaaccctacacgtccttgggagacaggtaatgaggatgaatttaaggatatggtgaagctggagcttcttgacctgtcagggaataccacaatacaatttttg

SEQ ID NO: 29466 - DNA, 747 bp, Zea Mays
agaagcacgagcacgatcgatcgtgcagtgcaggtcctgatgtgaggcggcactgtcgtacgtcagtggtgttaactgccagaagaacccatgacccattttcaagcttcaattgttggggggtcgatcggtgctgggattacgttttgcgccttctctttctcttccttctggaaataggacaagtggatgtcatgattggtgtctatcaaaccattttgtatcatattagaagtgagttatttcttttcctgttcatgatatatctggtgtaatcaccaagttgcttttatttaaaacgtttggttcattatgttcatgttattcctatatttgcttcttgctgtctatgcttgttcatctccttctctcttattgtgttcctttcgatttacaagtaaccaccctatgtattcgttctcttgcacatgttcaccctgataagaaggtggctctatgtttttctcttccgatagggttcgcacacacatcgataatttgccaacttctgcataagttcgtagcagcctctgaaacatttcagccaaaatgaggatagcttttctcgtgctgttggttctctccctgtttctcctccctaatgggatcggcaaaagcttagccgcaaggccttcggtcgtgaatattaggtcgattcttcagttgaactccaccactggaggtgtttcagatgttgccatccgtgcagcagtggaggatatcaatttagaccccacagttctaaat

SEQ ID NO: 29467 - DNA, 297 bp, Zea Mays
tcatcaacatcctcacctggattgaagaccaggttctcccactccttgcgaagtccctgcagtgtggtcttgcgggcacggtcgctaccgatgcgggtcgcagcgatggcgtcccaggcctccttggcagtccgcttctgggaaagcgaaaactacatctcggacgggactgcagcaatgagggcatccagcgcccgtcgatcctcgtggtagtcgacgtcgccgtaccgaactgcttcccacatgtggcgaacctggagccgtaccctcatcaccgcggcccactcgacgtagttg

SEQ ID NO: 29468 - DNA, 554 bp, Zea Mays
gcgctctgcctacacagccaccgataacgacaccgaccatcgacgtttccacgctggccctatttgcctgctgcagcatcccttccgcatcatcgccgccgagaagctccccggccttatcttctatgcctagtacatatgatctgtagtgcacgaagcattaattaacgctcggctgacatgcggtttgctccaccctaaacaacttggagattctgcttgtcggtggggagatcgtggtggatggccacatccccagcgctgctgccattgacgacaccaagcttcgatgtcgcgtgcgctcctttaccaggcctaccgcagggaacatcttctatcccggatctctcggtacgtaacgcccactaactcctcgctcgacatccatctgaacatggagtgatggagaagatgtaagatgatcatgtgtgtgtcgctgcaaaggagactcggtacgtcggtggggagatcatggttggtcgcagccccagcaatgagcatcaacaagacctcgccgagactcccagctacctcggtatgtgacgccaaccacc

SEQ ID NO: 29469 - DNA, 317 bp, Zea Mays
ctcagagacaaaagacacctcaggtgcacgacaagacggtaggtagggaaatgtagcatctcgttatgtatgtatcattccgctacaagatgggggctttataggtcggtccggggtagccggataggtggcccaaagtacattactgcccccagtcagcgaccacatttttacaacatgtactgtacaacgaggtaattacagtgccgcagcccccactagttacgtgtacacacaattatacccactgattacattgacaggtgggccccacatagcatcattgcgtgtccacgaccaagataggtacgtcttct

SEQ ID NO: 29470 - DNA, 449 bp, Zea Mays
gccatatctgtccccgcagctgactgacccatggcccccacgcctggtggtttcgtcgggccacgcacggggcacctcattgctgctgcattggtttaaaatattaccttttgtcttccgcaggggccccaaggaggcgcactacagacgcgcgtggcggttcgctctttccgcacccgaaatccggcacacaaactgtatgacttgtggaccccgggccctcgtgtcatagattgggctgtctgggtcctaggtacccgtcgagcgagatttcctacggtgattcaggggcgcgtggaagggtttccgtgaacaaggactctggtttccttgaaaaaggattcacccctcatgcagcaggtacactttcgcattctctcctaatcgcttgcgccactttgccttcgtgctcctctgctccacgcccgcgccgccgcacacgccatggc

SEQ ID NO: 29471 - DNA, 306 bp, Zea Mays
gaaagtgtagggtaaggaaagactccatccaagatttgtggatcttgattcatctgatgatctagcttgatctttgaaggcttgagttggggctgaagaccagatttggcttgactcttatccttccttaacacggttgatcctttcttcctcgagctttggtgtcttcatccgtgtttgtgacaagatgggtagagggttcaatagctatatgctagatgcaattagttatgtaacctgttttgtaggtcaagttgttgggtagggtcgagttaatctaagatctcaaacttgtttataggagca

SEQ ID NO: 29472 - DNA, 422 bp, Zea Mays
cacgggtgaggcctccaccggcaatcggccgctatgctccatagtagatggagtcatctctgctgcccacgtgggatgacttgttctacctaccaatgagttataggaagctataataacaaatgctacgtatttgttaatatggcctcaccagaatctattggtaggtccccatgggccaggaggaaggctagcgcagttcgctgcactggcctatgttatggtccccggcacatatggtgactgtcgatggccaccacacaaactcatggtgtgctcagtctccaccatcgcccacgcccgaagggggtttaatcctaactcccttggtgtgctgatagagaccagcaagcaagcctatattgggttgcgccttcgacaacctcatcatgcatgaggtggccagccagccatggtgggcc

SEQ ID NO: 29473 - DNA, 1247 bp, Zea Mays
cgcttacgctgtaggtcacgctttatcacgttcattggctagctctcaatgcagctatggtgggcgtcctttgcttggacacggtccttgaaaatggtgctagatcggaggggggctgaccgatggctaaccatattttaggcagagtttaaattatggcaggatggattaggattgcacggcagcctgtgatgcccaggcttccattaaagcctagctccaccactcccccccccccactcactcagaagcccccaataacctctctctgctataccgctatgcccaactcctctaggttctcgctcttgacatgggtgattaggttttccctgctggctgctgcccaccacccctctcacccactccgcttagccactcctcactgtttcccatacccttttagacagctggacgcacacaccaacacacgaggctgttagcatgcatcgttcagagacagacaccatcaaccaaagtcactagtccacttccatcgcccagctcctccatgtgaggcccaatgcatctacatccccctccttagatctgaaacttggatgtttggttttacatgtcctcactagatgtatgattttcccccttgtcaataacgtgtgaaggatatatgcagctggcaatggtcactggataggataaaatagtcagtaacgtgtttattgcgaactttatccaaaagggtaatctaagaataaaattggtgctatattgaacatcttatcttataatatttgcaatattggattaagccgaatgcactattacacctaactgaacaaaactaggcttaggtttcaagcacctagaaagtttcctgcccaataaaattcagtattacaagcagctctcatggtgtaatataatcatataagaggttcgagggtacacatgaaagccatcagaaaagatttccatgagtgcctgtgtagctcctacataggctcgcttaaggactagtggatcctggatacgccacaaagcctagagtgttagcgatattattgtgttgtattgcaaagtacaatcttccatagttaaccacatatatcaacaggaaaagacatgtggtcgaccttcagaagacaatgaaataaggtctgatatcagcagactcactactagcagaactgacttaccacaccccaagaaaaaggatctagatgattctaagacaaacaacaccctctgtcctcgtacacaagctagcattcttacactgggaagtt

SEQ ID NO: 29474 - DNA, 1014 bp, Zea Mays
gctttctacgctatgttatcgcggtttggcatttcacattatctccccccacccccaccccccacacacagagtgattctgttgattcttttttttttgttgttgacttgcctcgtaagattcagtttggtgggggctcaaatgattgcggttgtaatataaccaaactgtttgaccagaccgattgggtcagggatgctcatgtattgatttgatggtcggtgtatggacttgctgtccattgcgtttttatctgtgacgataggtggtttttttttctgtttgccactttttccatgtttttgatcgatcttcttgctgcaatggtaatatttactgcggccaattatttgttatgtaaactactggtgtgtttggttcgaagaatcaacttatcctaatgcagtgatgcatcataagtttattcctcagatttagtgggatgacctcattcctcatgctagtattaattattaacccgtgaggaatggtgtcggatcaatggatcacatcattccaccaaccaaacaccccatacaggtatcactaaagctgggttcatggattcttagaaaagctacaagagggtattcatgctttagatataacagaacagtaattttcagtctagttgcttaagcagttaaaagtaattcattcctttgtccatgggcaatgttggttctgccaagaggtaacctgcttttcatgacagtgaacctgttatgcaatgggcaatcttgctcattgtgcatgagggattattttgcttggcatttggacacacattggattgcttgggcttcgatttggcaactctgcagtgacaatatatgtgatgttccttaacatccagtggaatacatgctttgcaaaatgtgaattaattttgatattcaagttcttctctttctatagctgttgcatgtcatcattaggtctgtgcaaggtcgtcatcttgcctgctttcagagttggcaaggacttggataagataaatacaaaatatttcaa

SEQ ID NO: 29475 - DNA, 714 bp, Zea Mays
aagataaacatatattcagtgttgcatctgatggcatatactcagcaaagagtgcttataagggtctcttccttcctgggatcaagtacctttggtcactatagaagggtgtggaaaacttgggccccatcaaagtgcaagttcttcatctggcttgtggcccaaaacagatgttggacagctgacaggttagccaagagaggcctgaaccacccaaacagatgtcctttttgtgaccaggaagctgaaacaataaatcatctgctggtgtcatgtgttttgcacgtctcttctggtacaagctgctgagaaagtatggaatacattccctagctcctcagccagggattattcactttctggattggtgggaagatgcttcggatgcagtaaatgggctcatcaaggagtggatttatcctaattatcttaggtgcctggatgctctggaatcaccgtaatagatgtgttttttaccacttgacacccagcctaactctgctccttaggcttgctaatgatgaagggagaaagtgggaaattgctggggccaaggggatatctcaccttgttgccccgctgccagattcttgatggctgctgtgagagcgaccttctaggggtgattttttccttatggattatttcttgtatgcttgttactggcccccgtaatggggttcttttgtatctgggcatttctaaggccctttc

SEQ ID NO: 29476 - DNA, 417 bp, Zea Mays
gtggtagactggcttctggatggttcggacccctgtggttggtcccgagtcctcaaactcctagccttccgtcaacatcatggtggtcgaaccaccaccttctcctaggggaacttttttacctcccctggggatgttgtgtcgtcctttcgacgaccagcaccatgctcaccacctctgtagccgctgcaatgtataagtacaacgtctcccctggctctggagctaccagtattggtagggacacaaggtgctgcttcaactcttgaaaggctcgttttgcctcttcggtccaagagaatgggccggacttccgcaatagcttgaagaagggtagtgccctctcagccagtcttgagatgaagcgactaagggcagccagtgaccccgtaagcttctggacgtccttgatgcggg

SEQ ID NO: 29477 - DNA, 426 bp, Zea Mays
atgaccgcggatactgaactctgatcgaggcgttccggttgattaggtgaagtcaagctccaagggctgggcaagtgacgatcacaagcacatgtgggtgctaaaacacgaacaacaagggcgaggacggacctggaatcagctagccgtgagtaggcggttcacggcggcgcagtcggccgaactgggggaagaaggaaattctctagttatggtggctaattgagggtgagaacgggtgcttcggcttcgtgataacatggtgcaactgacccggccttcaatttatagaaatactaagcggtggtgtccaattttgaaaggagagaccggcggccgagaagagagatgagtcatcggcgtgaactgtcgtggcgcttcctggggtaattactccggcgaggaactgacctcctacggatatct

SEQ ID NO: 29478 - DNA, 330 bp, Zea Mays
atctcctacaccgtcgagagccaatggcgactagggtgtctccattggatgcagcaggatgaacaggaggagggcggtggcaaggtgttagcagcagaggaggaagagagaattagagacaggaatagggggaacgcgcaggaggacgcgctcaggaattgtattccttggacaagggtttagaattctcttacaagtctgtcttcttctctctcctttgttctatttatatttagtattctattacatcatgggcttaatctgtgatccactctgggccgcacacagctgagttaactcgtcggattcttccactccttctcggcccat

SEQ ID NO: 29479 - DNA, 326 bp, Zea Mays
gacagagggagcccacaaccacctatggcaaaacacatgcgtaaataaatcgtaagcctgcctctagccgccttggcatttgtgcgtcctggcaagccccacctacaccctctgccctgagacagccttgtcatgcatgccgaactgctatattaaagtgtaggttgcagaccttgaagtgatacctcagtgcagaaagtcactccggcaagacctcgtgcacccgtctgagcacacgccagtcacttgtcacaatcacaactaaatgaatgccccaccatgagccaagtaaccctgccaaccttgggatgttgcaactgcactgt

SEQ ID NO: 29480 - DNA, 454 bp, Zea Mays
ggatcgtgttcgctttggcacacagctgctgaaggaagaggctcagatttggtggagaggcgtgcaggcagctcactcctattcaccaggagttctgtcctgggatgttttcatcaggcagtttgagaggaggttctacccggtcaccttcctggagaaaatgaagattgatatgcagtcctacaagcaagagaagaagtccgtcacagagtatgaagtgggcttcaacaagatggtccgctttgttcctcatgtggcttgcaatgagttggagaaggcgagccaattccatcagggcctgaaaccttctattaggcatgccttgggagccttttcgttggtggatttccgtactacagtggagcagacattgggtgtggatatgcaacaccagtacaccatggagtcacagaagtctttgggtgttgatcagcctcgtggccaggacgtgagg

SEQ ID NO: 29481 - DNA, 439 bp, Zea Mays
cgcgcgggggaggaaaggagcaacatgggggaggggaagagggctcacctctgctcacggcggattcttggtgacgatggagatcggcacggggagactcgacgtgctacgacagtgttccaggccagatggatagtcaccaggcgatgcagcgctcgatgcctcgtcgacgccagtgaacttggtgagcggctgaggagaaactgcgagagcgcaagagcaggaaaaggataaccgttggacggggaaggaagatctttataccgcgacgtggacggttgccgagttcaccggcgcggactcatccgagtgcgcgggagaagtagttacgaggaagaggcaaagatgaaaggcgggcccctcagcgcagcgagatggctacggcacgggtgtctccacatgcgcataggtgctggtgggccaggagcttggccaaaag

SEQ ID NO: 29482 - DNA, 721 bp, Zea Mays
tcagggaggcataaccgatcaaggataatctaggaacatccttcaatttgacataaaccccactgggaactgtctgcccacgatcatggcagaaaccgggttcacgagtacgcgttcccgccaaatcatggccgaattgagtaaacgggtgccacggtgagctttaccagcatgcagagccacggaaacaacacttgaattggataggaacttaccagagcgggctggccacgatcgggctattcttggtggcgcggctgaccgatttgggggaaattggtgattctccggctatggtggctaatcgagggtgggagcaggtgcttcggcttcgcaaagaactctagttttactgcgcacacttaatttgagaggaggggtagaggtagcgcgaattcggcttcgattcaactcactgtgtgtgtgatggtcacacctcgccgtggaccaccatgctatttatagccacggcgacccgacagacgatctccggccacggatagcattgctagcgcatgcataccacgtcggtaggaggcacaatgaggcagatcgtggaatgagtgacaccgcggcgaaagttaccgagtcaaggtggccgccggtgaagaactccggctggactcgggagatggcgccacgtacgagttatccatccccggcgttatccgttcctcaccgggcacgaatcaggacggcggcggcacgaatcgcggcgggg

SEQ ID NO: 29483 - DNA, 536 bp, Zea Mays
tggagatcgtctgtcactgcaaatcagcattcaagtctcctgtacgaggcgccgctggatgccagcctaggtaaacctactgaagacgaggtcgatggatggacaacggtccgttacaggcgtcaccggagggtcaacacacctgcgcattcaagcctcccaacaacccggcacactgcgctgcgctccccggccagggaggaattgatggcaagcttgagaggtaaatgcatgcgctgcttgtccagaggccactttgctgcagattgcagggatccactgaaatgcctcaagtgtcgaggttcaggtcatatggctcggcagtgccctcagagaagtagtagcagcagcacaccaaccactccacccccacatctcgacggcccctgcttcccacctcttgtccagaccgtcatggtgaggcccggcgacccggacgcccgtccgaaggagacgttcactgtggcggcctcctcccaggagatggaccgggagcttgacagtctgagcacccatgccgtggtggcctggctcgg

SEQ ID NO: 29484 - DNA, 489 bp, Zea Mays
gcacagttcgcgtcgtctctggccgacaggacaggaagtgagagggtggcaagtgcagcaaattataatcatggactcatggtcatggtatggtatcagtagtatctgttaccttcggtgttgcacggcataccacatctgactgaagatttacgtgcgctattaaacagcaggaaggacgtccaataaattggcggtcacattatatcaagatttcattatatctttccggtgttagagcagaaaactttttttatccgtctcctttatttaagattattggaaggtaatatatatacctcccaatggggatgaggtactatgtgccacatggacatggggtctaggtgaaggagcaagaagggtacggagaaatggagtacagagaaagtgcccattgctgttgcctcaattagaggtgatgaacacagtccatgctcaccactttagagcctgttcgtttatggattgtgtcagattgagcttgag

SEQ ID NO: 29485 - DNA, 434 bp, Zea Mays
gacgttggaggccttgaagttaggaggccattggatggcccggagacggggagtaagtgcagaaactccgcatgtatcctcctgccgatgtttgtgccgtcggtcccggggagaggagttggtagtaagccgtctcgaccgtcccctgaatggaccactagtcgaagctaccgccgactcaattcgggtggcaccacttcgcgccggtacaccgttatctcggtcatactcctctcagcgcctcatctcattttcatgccgtcggtcgcgcaaagcgctgatggtgcttcgtgcgtctcgttggccgttaatggcgtgacgtaggtcgtttgcaggatgagcgaggggtagaagatgattggccgcctgtgtaagcagcctctggtaaccttccgtgtctagggttcgcgggagtccgtcggctatatgcgcca

SEQ ID NO: 29486 - DNA, 381 bp, Zea Mays
gagaagagggcataccaatctggtatcaaagatgccgggcaacaatgacaacactgccagcgaagtcgcatctgctgtgacaacaaaccccccactagtgcagtcctagagcagaagattgacaccatgacgaaggccattgtcaatctcgccaccagggtgtccaatctagagatgcacgtgacataaatcgatgggcacacactcccatagtgtccgccaccagcaaccatccagggtttccttacggtctcccaagttatggcagcattccagagacacaggcgccatcgacctccaccatgctagagccagctacagctccaccaccatccaacccattaccaatccaccaaatccccatgccccactcgctgtcac

SEQ ID NO: 29487 - DNA, 294 bp, Zea Mays
ttcggaaaagacaaaaaagccaacaccaaaaatttcaagtaagtcataatcaaatggccagagttcgctctactgcaagggtcgatcgtgagggagatgagaccgaagctgttgagactgttcctatttcggaagcaatgaagcgatctaggttggtaacaccggaagacgtccctgctgctgaagcagagcaagctggtattgaagagaccgattctgaagatgattacagcagcgcaatgccgagcaagcctagccacctggacttcggaaagtccaccatcttcgaagctg

SEQ ID NO: 29488 - DNA, 292 bp, Zea Mays
aattgcttcatatgattaaacactggtaaatgtgattacaaaactaggtacaaagaaatgtttagggagctgccctatatgctttaactagctgatttcgtttcattcacttttcatttatggcagctgtttaaattccagtaaagcaaatgttcatgtcacatttggttactgttgtaccatgcttatactactgctatggccagttttgacatgagaagattacttatgtcaatgttcttttgttacagggtaaacgaaggttcctttatagcttacttgatgcaatgta

SEQ ID NO: 29489 - DNA, 1159 bp, Zea Mays
acgacggcagcgcacggagaagctccggcgagccactgtaccggccgattggggcagtgaccaacgctaagctaccgccgagaccaaattcgagtcaccacgactgtttcccccaacttaattgcactattggtgaactatggagctccggccacggtggccgtaagcatagcggcgaaatgatcatgttcccggcgaccagagagcccccagcccaattacatgggtcggcaagcatcatggagttacgagaaagctcaaacgagagggagagaaggatgagctgaccgaaaaggggctggccgcggtgaagccggtttcacggtggcggaaggtgatttggggcaaaaccaaaattcatgcactcggaggcacgattgctagcgattgttggtggccgagggggtgatggtgttacgcagctaggggagggctcaatttataggcggagtgagcggtggccgcaaattttggacgagcaacgcggcggccggaggtggagaagaacactggcgcagtgaatacgtgttcaacgtcgtggcagctattccggtgagcaacggggagctaaagtgaatcgtggcggtgcagtagcgaggctcggacacgcggcgcaaggccgaggggcggtggtcatcggcgaggttatccagttccgccgcggtgaatgcttgtacggtggccggaatactttactggccggagttatccacgacgatgatctccaagtgctatccagtggatttggtcacgagtcacggcggtgatggcacgaatctttgcgcagggagggtcaccggcggcgagcaagttacgctggcattctgatccactcggtctactgtaccatggcgaatcccattcaaacagcctgtcagccgaacttggagcatcattttctcttaatttctaatgtcaacacatgtcaagctctgcagcaaaagtatagagcaatatgccctctacaactttgtaatatgatgatgccacaaaaactcattggatcatgcttgaatttaagcttgaagttgatggcatcaatctgccagtctgattttcagacttatccaacctgacagcctgactttaggcttacttatctctggatttttcttaacaagtgagcttaccaccttaagcaaagttgttcacctaagat

SEQ ID NO: 29490 - DNA, 454 bp, Zea Mays
gaaaatttcacttttatgaaaattgattttgagaccagacatctgttcaaataaacatagaatgaacttaagatttctggcaccctccagatcatctttgagcaaaaaaatggtatcatcagcatactgcaaacaacaacagccattaggaattatatgtggaatgagcccactgataataccttcatctttggctctgtgaaccatacaagcaagaccatcagcagcaatattaaatagcaaaggggagaaggggtcaccctgtctaacccctttatgggtggtaaaatagggacccactctgtcattagtcttgatggccactttaccacccctaacagttctcataacccaatcacaccatttgtcaccaaagccttttttcatcatcatatgatgaagaaagttccaatttaccttgtcatatgctttctcaaaatcaaccttaaagatt

SEQ ID NO: 29491 - DNA, 284 bp, Zea Mays
ctgtccaaaaattctgctagtgcctatttgattgttagttcacccttttggctaaaaatggttggttagcactaaattaatatagaattgccatggctaagcttgaaataacatatgtgtcatgtttttatacgtttctttctcttgttaattgtgatgtagtattgtgttgcgtaaatatccaaaatgtttgtcgtctttttagtggtgttaatgttgtgcgttcgacgatatgtagttagttaacgctagtgtgtgtggttgcttgtgatgtcttgctactt

SEQ ID NO: 29492 - DNA, 634 bp, Zea Mays
atttttggaagacagtgttattgcaggcaccgtcaggtagggaggtggtattcttgggaagttcccctaagttcacattatccttgttggcgcaattgcttccggatcgccggtccaggaagtcgggaatctttttctccatggtggtggagggtgaggctgccttacgggtgcaggacatccgggtggtgtgtgactttgctgacgtgttttcggcagagcttccaggtacgcagcgcgatgaagcttttgagattaagctgattccgggtacgcagcccattcataaggctctgtatcgaatggccccaaaggagcaggttgaattgaagcgacaattggatgatttgctggctaagggtttcattaggcctagcaggtctccatgggcttccctagtattgtttgttgagaagaaggataaaagcaagcagctatgtgtggattatcgcgctttgaatcaagtgactatcaagaataaatatccactcccccgtattgaggttctctttgaacagttgaggggtgcccagatgttctccaaaattgatttgaactctggttatcatcaactgaggattcgtgaggaggatattgagaagaccgctttttgcaccaggtatgggcattatga

SEQ ID NO: 29493 - DNA, 426 bp, Zea Mays
gagtaaaataggccaaaagttgggctgtcagtctgcctaaaacctgaattatgatattcagtggcataggatgaactttgggggccattttgaagatgatcccgtggatgtttgagcatggttaccacagtcggtttatagccggatcatagggctacatgtttgctacaaacggattagtaagttcttacgcgaaaattcaagattttggcgtcacaaatctgtgtgtcagactgactgaagaagatcatgatggtacagtaaccaaaaaatcagcagattcagtgaactggccgccggtgacccttggccgggattagtgctgctcaccgcgattcgtgcgtctagtttgtggattgagttcgccggtgaaaagatctcgtcgcggatgtgttcaagtaactgtggcctcgctgttcctcaatc

SEQ ID NO: 29494 - DNA, 287 bp, Zea Mays
aatgaaaagttcgcaggaaagtggatcagagagttgccttatgtggtctggagcctaagaactcaacccagtcgagctctgcatggaaacacccccttcttcatggtctatggttcggaggcagtgctacctgccgacctcaggtttggagcaccaaggctggtcttcgaaagcatagctgaagcagaagccaccaggctagaagatattgatgtgctggaggaagagcgattgaacacagtaattcagtcagccagataccagcagaccttgaggcactatcatga

SEQ ID NO: 29495 - DNA, 320 bp, Zea Mays
gtggcggtggcgtaagatatttgttgaggtgtgcgggtatacgctgtaatatggttatactcgcgacgaggaaagatgtctgtactgtgtaaaacgatgcttaggtcgctattatataaacgtgtgaaggatgctcgtgatgattgtgtgattgaggagtgatgtagtggcaagcgggaagtaagtttagtttttcaacggttagtgggtagtatctgtcagtgttgtcataaatttttgttgtatgacggatcgatgcgtagctttataaattattacattccattcccttttgataaataaatgtcttgttgatcgat

SEQ ID NO: 29496 - DNA, 497 bp, Zea Mays
cttccaaattttggctcctcataggtcatagctgttttctgataactaagagcaaatagcaggtaatagtccaataaaccaacatacccattgacatgtcatatgacaaaggcaaattttgatgtggaacatccaacttgcgtggatttgccatttcaaaccacaaacaaccaaattggccagttacctttacaaaagtatggatctttgctcgttcacacttcacacttcacaccacagccatgtaaacaatcattttccaatatgaaacagagggggtagaaatgtatttccgatccacttcagttcttcctccctctctctccaactcctgtgttggtgattggaagctgggggccaccaccacctcttccttctcgcaatatgaatcgcagcctgatctgtgcttctacatcctatttgtccccccagcagcgagtccaagctgggtgccggcagctcatccatccccttccagcagtgggacggatccagat

SEQ ID NO: 29497 - DNA, 332 bp, Zea Mays
ggtggagttagggttgaagttgcccgtagtagtgcgagagcacccgcatgaagctactcgccggcaccccaaccctcacacgtggaaggcggtgaagctcaccacatagcctgtcggtggggatggctcttgcttattgcccgacgcaaaccactcaggctacgggtcgtgggtgcaagggcaaagcagcctagcgctcaccaacgccttcagattcacattggtaatcaaggaaatgggccacgggttgcgagaggaagaatgctcaacttctcagccatcggagctaaggaagaagacgggagaagtgtgcaagagtttttgcggctaag

SEQ ID NO: 29498 - DNA, 713 bp, Zea Mays
tttattcggggtacaaggaatgacagaagactgagctagctgagtgaggactgcagatcctggatgtccaagtcgttgatgccacaatgaagaggtggtagcatggagagaagatgttgtgctcctgagtgggtagagtgggctggagctatcacaccgaaggatcatgcgccgagtgggaagatccttcacagagcagccaagagggtcaaattccacagaacaattattgtcagtggtgaattggcgaacagaaattaaatctttaatgagagacggtgaaacaaggacattgttaagacgaaaattgtgagaaagttgagtggtgccagtggaagtgacaggaagaaggttgccattgccaacaacaatgttagagggtagatgatgataagaggagaggtgggaaagtataccagcgtcggaagtcatgtgactggaggcacctgtgtcgaagaaccactcttgctactggggatgttgaagagtggtggtttgggaattggtgacgagttgttggagatcccaaccaggagggggtggagcagcgccagtgtagtcaggggccggcccatatgcctgagggggggccaggagcctgcccactggccgggaggaccagcaagaaaggcctgaggcggttgagttggagcaagaggccctgaggtcggtggacgaggtgctggcggtcatgaccctggccacatgtagat

SEQ ID NO: 29499 - DNA, 609 bp, Zea Mays
gccgacgagaagaagaactatgcaccatcacctgcaggacggtcatccacatcaggggctcctgttgtgtcacgtggccacgacgtcgacgctgcgtcgtcgtcggcactgcagcttcggatggatgaggagcttccagtcctccaaggcctcctcaagaaagtgaagcccttgccccgttccacgtctcctgccgccgacgagaagaagaactatgcaccatcacctgcaggacggtcatccacatcaggggctcctgttgtgtcgcgtggccacgacgtcgacgctgcgtcgtcgtcggcactgcagctccggatggatgaggagcttccagtcctccacgacatcctcaagaaagtgaagcccttgcccccttccacgtcccctgccgccgacgagaagaagaactatgcaccatcacctgcaggacggtcatccacatcagtgcctcctgttctgtcgtcgacagcaaacacgacgacgtcgcaacccaatgcagaaaccgagtttgtgtatcagaaagaaagggaggaattccgccaaatgctgatggagatggagaagtcggcgctgcgtgatgagacgatatacccagaggacctacaggag

SEQ ID NO: 29500 - DNA, 385 bp, Zea Mays
ctcaatgtatgaaaggcatcctcacatttctggctccatttatatttgactcctttcttcaacaattcagtcattggcttggcaatcctagagaaatccggaataaatcatcgataataccctgccaatcctagaaaactttgaatctgccgtacagtgggaggaggtttccaattcatcacttcttggactttctcaggatcaacagataccccatcctgagaaatggtgtggcccaagaacttgatttccctcagctagaattcacatttttggacaatttagcatataactgatggtcgcgcagtctctgaagtacggtatgcaaatgcttagtgtgctcgacttcattcttggaataaaccagaatgtcatcaatgaagac

SEQ ID NO: 29501 - DNA, 435 bp, Zea Mays
ccgctgcagcagcagcactaccgctgccacctccacttggcaaagtatccctacctacatcagctggaccacaaccactaccacaaccatcatttgttgttgctgcaccagaaccactaccactgccatcattttgatgtagacacaaaccactaaggttttggcacatattttctgaccttgatcgcttagatcctgacaacaattcaatagatgattctaccattatatacatgtacatacagctaccattatatactgaacacacacaactaccagtgtagcagagcagtgctttacctgatgttggatttggtgtaggaagtgtggtgctatacaccaccaccggcaatggtggatccaggatgaagctcttggccttggatgccgatgacgacgagccaacagcagggccatcggcagcagcacccccag

SEQ ID NO: 29502 - DNA, 533 bp, Zea Mays
gattttggaagcttgccccagacaattatttttcctcagagcagttctaaactcctttgctacctcgatgggtctcaaagttaattaccttaaatcaagtatgtacccaatcaatgtctgcccagcgtcgttggagattctagccagaactttaaactgccagacaggttctatgcctttcacttaccttggtgtacctctaggcctgtcaaaacccagaatctgccattttttaccacttattcaaaggattggagggagactgtcctgtacttctggtctcctctcccaggccggaagactggaggtagttaactctgttttctctgctctcccgactttcttgatgagcacgctgaaaattcatgcctccactgtcaaaaggattgatgcttcccagaggcattgtctctggagaggaaatgatgtgaactcaatcagatcagctcttgctccttggagcatgattactcagccgaagcgaaatgggggccttggggtggtcaggttggagacgcaaaacaaggccttgc

SEQ ID NO: 29503 - DNA, 475 bp, Zea Mays
gggtggggtcctccgcgctgcacccttcggtaaggacctcccttctgtgcattagcgttgactctagctttgcgtggatttatcgatggggcagggtagggcgtgtgcttgtggtcttggcaccgtgggcgagtttccggcgattgcctgtgccgtggttgcgtctgccggttcggcgcgcgattggtccctggtctgggcggcgcaaggaagaagaacatgcccttgccgtcggatcgagatggatggtcgagattgaaacagccataccctttcgcttcaagaaaccgtgttcgtggatgacgaaatcgacggtgtagattaggtctggatttaccccttcgcgcgatctgatctggaccttcagaatctgatcgggcggctcacgagtagccatacccctttgggcaagatattttgctaaagagtccctagtgttttgtggaatcaacccgccgtccgctatagatctaag

SEQ ID NO: 29504 - DNA, 512 bp, Zea Mays
attccccctggtaaaatatttatcgtgtgtccttgttcgtcgaggaagcgtgccaacgaagggagtctgagcgtcatcattcccttctctgtctgagtcttccacgccgacccttggtctttgcggtctgacccctggccttccttcattgctttgtggccctcatagggtgtcgggggactcaggcctagatctgtaggtcatgagtgaactcatatctagggcttataggctatgagtgggaggaggatcagttgcctgtgtactgtgacttagtgtcaagcatagttaaggtggtgtgcgtagcattgatggcgggagcagtccgatggttgcactgggtctactcgagcaatctcccagtggtctgtctttctctccagcatggctttatctcgcccgaacccccggcttggtgcgctggagttatttgggggtggacttacccaagcgaggatctctccgtcccctctggctcgtgggccattgggttcagggatctgatccccgat

SEQ ID NO: 29505 - DNA, 572 bp, Zea Mays
gatcttcatatctctgagactgataaatattgggagtctaccaatctgcacaagttctagagatacataaattctctctacagaatgactctcattcccaaagggggtaatcaaatgaatatcctgggagagagcaaagtcttgctctcatttatgaagccaaacagttctgaaagcatcaatatatttgatatgatttggcaagaaatcatacatgctgcctgcttccctctcaagggatgccttcacgcccccttcatcatgaagatgattgaagtggtgtctcagtttcgctttgagaaaggaacaagacatctctcctacaccccttctggattgatccaaacaatccagcagggcgtctgaggaaagccccctccagctctcgtggacatgctgctgccggtctctcgcgtccctctcctggtcgcggatctcccacaccacgtggtcatggtcatggtcgaggtcgtggtcgcgggatgggagctccactggcccatggtattgcagccttcttttccatgtgcaggaacatatcttacgatgtgcatgagctagtgaggcatcag

SEQ ID NO: 29506 - DNA, 482 bp, Zea Mays
ttgaagcctcgaaggcttaagtgcatgaaggaaccaatgtgagcgtactgcaggtggtaacacgtctcatggcgatgaagtcaaagtacaccttctccaataattgttacaatgattttgtgaaactgattattgatatcaccccaccgaatcataacatgccgaaggacttgtaccattgtaagaagctcgtagctggtcttggcatgaactatcaaaagattgatgcttgcgaggacaattgcatgttgttctggaaggagcatgaaaataccacacattgcatccactgcagtaagtcaagatatgcagtggtgctagatgaggatggaaacgaggttatgacaaaggtgccgatcaagcaatttcggtacatgcctatcactccacggcttaagcgtctctttctaaatcaagagacagcaaagaaaatgaggtggcataaggaaggagatcgtcagggtcaatgtcacacccggatt

SEQ ID NO: 29507 - DNA, 411 bp, Zea Mays
aactaggtgagctaacaaatctgaggagtctgagtattgggttggacacgatacaaggcgacaaagcatgttacatggagaagctggtgtcctctctctgtaaactggacgcatgcaacctcagtgatctgtctcttgtattagccctgcacggagacggacacggcgatgacattgtgtcgttccctgctctaagtagcatccgaaaggtttggctctcgagtccaggaatctccaagaccaccaccagatggctagtctcgctcgtcaacctagaatacttgaatatctacgttgctgatgtgatagagcagcgagacattgagttgttagttggaagcatacctactactcatctgcttgatcttacagtaactgtccgtaggacctacaacttcgtcgggccacaag

SEQ ID NO: 29508 - DNA, 438 bp, Zea Mays
caagagagagtttcaagttctctgagctcagcagcaggacaggcaccaaagggttcgatcttttgggttcccttccaaagggtcaaacttcagcaaaccagcaggattcgctccatcacgtctcaacaagcctagtcaaagttccttccacactcggtttgttgcaagcagccaacctccaaccaatgcttgttggcactatggagaccctagtcatttcaagaataattgtccgcagttgaagacatttgtatctgcctactccaactcggtgaatggccgcaagaatgtttcagcacccgcctccaaggcaccctccaccaacagccagctaagcaagacccagtttcacggcaaggctcgagtgaaccacgtcgacacccaagaagctcagcaagcccctggtgtagtgcttggtgagttcctagtcgaatttat

SEQ ID NO: 29509 - DNA, 572 bp, Zea Mays
ggtttgactgcagaggctgtggttgctgattttgttttcaagaacatccagccgttgaaggatagggcatacccagcctacttgtacagaggtttagctgactcaacccgggtcaccaatagaagaattcccgctgtagacttggtaaaccggcttgaaatgatacttagaggcaaggtgtccaatgttggtgcccctatcgcatactcggcctggaacctgcctccttccaaggcttttacccattttgtgtcgaatcctcctgttgctgacggcggtttgggccttagagtacgaccctctgtagaagaagttagtgctttggttgcttcgattagagaaattcccgatgatgaacggcaagtccactttgaggtgcctttggatcctaatgatgcagaaataagtgctatgcttgatatgctggctgaagactcttctgatgctgctcctgctgggacattggcggtggtgcctctcccggaagctggtacaaccttggatgttcagaagcctgtcagtgttcgctcgaaacgcccttgccgagccaatcaacctgattctcctgctga

SEQ ID NO: 29510 - DNA, 403 bp, Zea Mays
acgagtaccccatcgacctccacgagatcctcctcgaccaccatttcctctaggattaggacaattgtaacttaggtgtcccttttccccacaattatagcattctcgatcctcgattgcagcatagaccggtttcacatgattatcattacccatcactcgaagtctgctctcttcatcaatcatggctgacacagcctcatccatggtaggaagactctcctggtgacaaaaggcagctctcctactctcaaactcaggatccatattctttaagaagtgggtcactctcctgtcctctacccacttatgaacaatgtgtgcatcatgtggacaaaccatttggagaggggcatagtgatctagttctccccataagtactgaagctcactagcatattgc

SEQ ID NO: 29511 - DNA, 368 bp, Zea Mays
tcagaacctagctaagtggacggcgggttcatttacaaaaaggacaggggctcttatgtaagtgtggcatcgcgaaagggtatggtgaactttgggccgcaggatcgcacaccaacggtgtggattagatcggccccggtccgaaccggtatgcgctagacaccgtccgatctggatccaacgctcccaatctaaataccctaaatcaaatctaagccgttcatccacagatcgacggcgcacataccttatgacgaaacggtacgcgatcttctaatctgagccgcccgctatggatctaatggcccgaacaccgtcttctctccacggtcatccgaacggccaggagcagagctccacggcacgct

SEQ ID NO: 29512 - DNA, 284 bp, Zea Mays
ccacgatgtgcttctttgtatgacctgctcatacaactcaacgcaaaacaataaagctgaacgcatgctgcgcaccatcaataatatggttcacactttactgtttcatgcctctatgccaccgcgctattggctcgagagccttcacaccaccacatatttaattaactgcctacctacgaaaaccatatcctctccctgcccgcacatcgctctatacaacacccctcccacttatgagcatcttagggtttttgggttcacttgttatcctaacctctccg

SEQ ID NO: 29513 - DNA, 550 bp, Zea Mays
agcaatttagcatgactgtgagcatgtggacttcaactacaagataacaacattagtacattacattcatatgaacacttgactttaactacttcagctaaaacatttcaaaattttataaacattgctgtgcacataaaagtactctagaacacaactatttctgcagactactcccctttagatgaaaactttaataatagttcataattcaaacagatattgccagaaggggcagaagtgtacttgttgaaatgcgcacagctctcctgcattgtttgataaaaaatattgccaaaaatgataacaagtcactcaaataccagtttttgtccgagcgcaaaccaacttcacatttcaaagtatcctagcttgcaaaaccttacctaaagataacaatgattgcaacaaccacaaaacgacaagtgaaagccacctaattgcaatcctctccttaaaaacagaatcagcaaaagatggtaaacagaatcagcagaagatggtactctgatgctagagttcgctatatgtcatacatctcataaaaagc

SEQ ID NO: 29514 - DNA, 602 bp, Zea Mays
gaagagttgaacgatgctttggctagtcaggataagttgcttaggtaggctgctcgtgagaggagagagtttagatccaagtacgagagcacgcttagggaacttgagtctgctagagcttcagttgtggtgtccgacgagactgaatgtgatgagtgcgctctacacatgtcgaacatcaccactttacagaccaagaactccaacttgctagatgagtgcgacgagtttagatctaggtctatcctattggggtgcgtgtaccgtttgtcctggcttgcagtctgagctagcagagagagatgctaggatagctttgcttgagaaggctagctcagtgattgccccagcacctccacagtatgcactttgtgagggtttgttgtttgcccttgagtcctacagacacgacaagacaagaatcaaggaagaaaacacataccttcgatctgtcttgagttggatgtcgtgcagtgatccccagttgggcatgatggccagtcagttcaagaggggaactggcggaccggggttaggctttgctgctaaggatggaagtgtcactcgctttcggaagcttggtgagtgcagtggtttgacac

SEQ ID NO: 29515 - DNA, 365 bp, Zea Mays
ccaccactagttccacctcgtgataagcaccgggagtttatgagccaaaagccaccgaccttcgccagttcgctagacccactagatgcagatgattggttgaaatcaattgagaagatgctcaacatcgcccaatgttttgaccaggagaatgttctttatgcctctggtcgtttgacaggtcctgctgctgactggtgggattcttatgttgctgcccatgatgctgctgacactattacttgggcggaattcagtacacagttcagaaactaccacattcatgctggattgatgaagatcaagaggaaggagtttctgtcattaaagcaaggcaacatgtctgtcagcgagtaccgtgacaa

SEQ ID NO: 29516 - DNA, 379 bp, Zea Mays
gaactgggcgtcattttctgggaagtgcaggggtgttggtgcaaaagatcctaagacacatatcactctgcgcagaggaccgcgggttgaatctctaaacctataaggggttttctgcaaggtggatacgcgaaagggtatcggccgagcacggccgttagatccgcaatcgtcggtccagattagaccgaggtacacttgaacccgagatcgcccacatacgttggatcccaatcctacggtccacggcacactatccatccccttcccccacggccgcacgattatttatcaatggctacgattgatgaaccgaacggaggcctcaagatctaatcctagccgttcacgggcagatcgacggctggtagtgttttcc

SEQ ID NO: 29517 - DNA, 364 bp, Zea Mays
gcaaaggcccatgctgatctgattcagctctttgtctgattgcctgagatcctcttcccatgcaagacgatcctcatcacgtaccatcaacgtgttcttgcgttcttccacatcctggaatttggcgttagccaaatcaaacatttcctttagtctttggagctctatggtgagctcctctacttatttctctgcacctttggacattgtgaaggctgcttgagctttgttaatggaaatatcagttccgatcaacaaagaatcataatcctcctgcacttttcccaacacatatttcactgaaatcactttggcaaccaatgctttgtgtcgttcttgaatattattcagcttctctctaaac

SEQ ID NO: 29518 - DNA, 1050 bp, Zea Mays
accaaacattgctatgatatatgtggagttcgtatattatggtttcaactagctattttgcagattcgaggctcacatggaagttcatgttggatcaattgatgaggaggaggacgagcagggaattgcacatatgattgaacatgttgcgtttcttggcagtaaaaaacgtgaaaaaattttggggaccggtgcgaggtctaatgcatataccgacttccatcatacggtgttccatatccactctccaactaaaacaaaggtttttactttctgtctttattcagttctttgtggttgtggcatttatcagtgtccattttcaatttagaaataaactttatgacaatttgtattttttgaagcccaaaattgttcccttgtttagttgtccttggacaaaacacatacgtaaatggactgaatgtatttgttgactgaaattataattcttagaacttatgatcttataagcttgtcttccacctgcaggaatatggtgaagacttacttccttttgtgctggatgcattgagtgaggtaaagtgtttctaaatagcattcttttttggagcgatcatatggaatatgtcagttttggtcatctttatgattatttgaaattctgcatgtccaatcagtacctgggattttaggtcaatgttgccaaggtgttcggaaatctttataacatatcctttgtattgtgacacagaatataacaaatttgccgatctatttttccagatagcttttcatccaaagttttcttcatctcgtgttgagaaggagagaagagcaattctttctgagctccagatgatgaacacaatagagtatcgggttgattgccaggcaagtgaactgtttgcaccgacctagtgtcctttgttttatccgtatgtgacttcatttgagacgggctatatccttattgcttctgaagactcgtgctaaatcgattaatgaatgagggcgccatattggtatgttaattataatttgtttgctgcagttgttgcaacatctgcactcagaaaacaaactgag

SEQ ID NO: 29519 - DNA, 465 bp, Zea Mays
tggatattattatcctggtgggtggattacgttttgatttctttaaaaaagaagtcattcattatctgactttattgtttagtgcaggtgcatacggaggatgggatgagaatggctactttgttggatataatggcctagaggtgcacccagcagtaagttataataatagtgtactttacaaagtgtcatatatgcctttcctattgtagtccctagtggtcctaactaaaaactgaaggatggtgcactttgtgcgtctctatggtggtaccaacaagctttgcacctgttagctgtcatcttttcttgaattgtttgggaaagtgtccaactattttagtgtcaccctttattgtgctacactgctactgttatccttgttccaaaaatctctctgctggatttgttaaacgatttaattgtcatcaccctatatggtgtcatgacctcatgactattcca

SEQ ID NO: 29520 - DNA, 636 bp, Zea Mays
gtgcattgtcagcaccaacataaagggatgaatcaaaacaaaagaaaaatacagaactcactcaaatgaccaaaagtcagagaaaagccaaaacaaggtcaattgaaatgagtaaagtttggtccctaaagacatgggcaataactcaacacaaccaaccaaaaatagctagtcctcaagaagaggccaaaaatactcaccaccgctaggaaaagatcagagagccaagaaatgttgctagtcccttagacgaggcaaagactcaatacaactagcaaaagtagctcagacacaaccccttgaacaagtgcaacttctcaaaaaatgcatgctttcaataagtactctcccttttggaaattaattgtttgtatgcaacattctcgcctttgttggcacatccacacatcaatctatcaaaaactacaaccccctcaaactatgctatgaaatgtaagggatacataaaatgcaagagatttagaaatatatcaattacaatgaaaagatactctaagtggtcctatcatgtgcgttaagcaacaaatccatgtgttagcaaatgctcaaactgatggtaagatacaaattgtgattatttaatgatttgagcaattttcacatttacataaggtg

SEQ ID NO: 29521 - DNA, 320 bp, Zea Mays
gcaatcgcaaggaacaacatccacctcggtgatggccactgggccatgtggccggcaagtgggtacggcgactgagcaagatcagtaccccaagttcatcctccgcgcgagatctttcacctcacgtagatatccgcgcaccactgggcacgaatcacagcaccggcgtggatcgcggcgcaggttcaccggcggcgagatgcgctgatcctagatccttgttcagttcacagcaccatcgcaattccatttagttgttttgatagagcaagttcaagagctcttttctcaaacttttatgcaacaacccactaatccat

SEQ ID NO: 29522 - DNA, 655 bp, Zea Mays
cgccgcccagggaactcacccacactgcctgtctgtgtgcatggtcgggccatggaacatcgcgagtggaaagtgacgtcattcgcaggctcagtgggaaggattgatcatcaaggcgtcagaaattgctcaccagagctcttcgctgtcgcggggccactcgccaccatgggcatggccgtctatgctgacatcggaggtaagaaaccacctatgaagtttgtgttgccctccttctcgtggtgcaccagttttgtgcaccggacgttgctcgagcttgttgccagctggcgccgccactaggttcctgcgcgcagatgtgttgttcgtcggggagagagaagttggggaagatagtgccaacgtcgttgatctggtaatgggcgggcgagatctggccattggatacccctttggtgaatcaaatcttgactttcgaactagaagcgtgcgaccagggatggatcaaagcgctttattatctgaaccgtggatcgcgtatcctgcggcccggagagcgtaccttgatccttcatcgcgcggccccggttggcccgaaccccttcaggccaccgattttgctaatgagcccctgtaatattctcaaataaaccagccgtccagggaggcgaagcctctgtctagggaatttttg

SEQ ID NO: 29523 - DNA, 402 bp, Zea Mays
cctatagaacagatcctgttcaagtaaggtcatagtgtgaggctccggagctgaacatttaagccggcttctgctcaatcgagcaaccgaggtggaattaattggtgggaatgtccagcaaatcgtgtactgggtcggcccattctggtttcccgatttgtgggcttcaggtcgagcccatcaagatggttgtagttcacacttcagagttcaatccttggcccatgcgcaatgctgaatgttgccaccaacgttccagttgatcctgacaggatggttggcctgcagtctgcgtctctgccaatttgatgctattcgcctattcctcgggaaatcaagatacaagctccaaataaattgggtaatgattactagcaagcacacacttgacactagacgcac

SEQ ID NO: 29524 - DNA, 441 bp, Zea Mays
tgggtgaagcgcgccggaaccacccgcaggaacttcttgacgacgcggacatcttccacgacctcgccaagtgctcgaaggttgccgacgaggttggtgattcgcatcccgaaatcttcgaccgattctccgtccttgaacttgatgttctcgaactcttggagcatcttctgggcgttcacctccttcacccgatctgcaccgagccgcatcaacttcactgcctcccacgcctccttcactgtgctgcgcgcgccaagagactgccacatctctttcggcaccgagcgcaggagcgcgctcatggcttgacggtcatgcgccctcttggggttgatacctggactgatcacatcccagatctccagcgcctcaaagttacactgcattaacatcgcccactcggagtaattatcacgagtgaggagtggccacatcagt

SEQ ID NO: 29525 - DNA, 1153 bp, Zea Mays
accaagaattggcgaactccaaaatttgagtgtcctgtgagtacgttgtattattctgtagattatatatgcctttgacattatcacttttataaacatcaaaaggggatggtttacccttacactatagcaatagttaatatatttttccagagaattacatcatgatattcaaagtaagattatagaatgagtacatgcaataaatttataatgaatacattccagacactttgcatgtcagaaattaggaatcggtttctctattgaatcttactgttctatgactctattgcttctgcttctcttcatgttttggggcaaactgatatgtactgaaacaagatcatagtgggctagccatctgtgcaagtaaactaggatgatatggattgcattataccagtgtcacatatgctaacatattttattccagacctttagatatttgtcatacatgaactactgttcaagcttggtgatacttctcggactactatgaaactgtatagcatatgatgttgcaggtcattggctggtaacaggattactggtaccatacctgaggagtttggcaatctatctagcttgacaagcttagatttagaggacaatcttttagttggagaagtaccagcttcccttggcaacctttctaagcttcagctgttgtaagtattttaaaatcagagttcccttcttataaatagagttatatgtcctacatatttgagaaaagaaatagagttatatgtgacctttttcatgtaatcttatcttcctttctctcataaccaggatactgagtcaaaataatttcaatgggtcaattcctggtagcatagcgaacatttcaagcttgacagacatgtaagactgagtatgatacctttcagtttcttataactcaagttcatttaaatgtgcttgtcatgtgttgacaaaaaatattttgattacagacgcctggcatataataatttgtccggtcagatacctgggttgctgtttcaagtagcacgttacaagtatatgaagctttctcttattttttttctttcattctatgtttttgttagtgaatgatggaattctctttttccacgatcagcttttctggcaatcacttaaactgtggacctaacttcccgca

SEQ ID NO: 29526 - DNA, 536 bp, Zea Mays
tactcaaagaaacttataatcgggtttttttatgaaagagacgctcgtagtgtgtcatgaagtcaatgactttggatggggttcgattaatgagatatgttgttgtggcaaaaacttcatcccaaaattttacaggcatagatgtgtgtgcaagcaaggctagaccaacctcaacaatgtgcttgtgttttcgttcagctaggccgttttgttggtgtgcgtgaggacacaatactaggtgtgctactccaatttttgtgaaggggttgagttttggtactctccaccccaatcagtctgtacaacaaataattttgctgtcaaacattcgttcaactatattttggaagttatgaaatttctgaaaaacttcagatttaaaacgaagcaaataggcctaggtgaacttactataatcatcgatgaaagaaacatagtatttatttctgcctaccgaacctatggcaggaccccatacattagaaaaaatgagttctagtggcttggatgaagcactagtggacacaagatacgga

SEQ ID NO: 29527 - DNA, 717 bp, Zea Mays
ctgggaacgggttccttcactgttactcagagtcgctgatagtttgcgctaaggtccttcggtttctatttccttccacgtcgaagtccccgacgacggtgagcgcagggaagctccggcgagcttgcagactggccgaacggggcaatgaccggcgctcccgagcggcggacacgaaattggacctcccctgatcaattcccccaacttaatttcacgattggtaagctatcaacctctgtccacgtgaaccgcgaacgatgaggacaatggcacacgttcccggtgatgggggtggtctagttcaattgagcgggttggtgagcatcaccagtatacaaggatgctaaaacgagaacagagagggcatgatcagacctgtggagggctggccacggccagggtgctttcacggcggcggagaactgttttggggaaaacaagagattctcaagctctagggaacgattcaaggcacgaatggctccactggttgcgcaattacctaacagagcgagtggtggcggcaatttataggaggcttaggcggtggtgctcaatttagccgagcaaagctggcggccggaggggaaaagggctctggcgcatgacacaggtggcctttcaccgtggcaggtgctccggtgatcaccagacatgcaccgcatgattcaccatgacgagagctagcgcataagcacgtggcgcgcaacgacg

SEQ ID NO: 29528 - DNA, 320 bp, Zea Mays
cgcgggtgaaagatcttcgccgccggtgtgctggacgccactccggctagccgcaatccctctccccttgctcaccgcccttgaataaaggttctcaccgccgtcaagccttcatcgttgtccgccgcgtgtctcagactgtctaccgcatcaccgtgactcacccttgctcttcgtcgatcaccggaataatcaccacgacggttgacacgagttcacttgcaccagtaacctttctctctctggccgccaccgcgccatcttcaattcaagcgccactgcccctgggatctataaattgagcctgcagcgagcttcgc

SEQ ID NO: 29529 - DNA, 356 bp, Zea Mays
tgttatcatatgctaggttgctagaaacttgacccaagaaatatgcatgtcaggcatgttaattggattgttttgcttgaacagttaaacctgacaatggaatatgaactagactggaaatatgcaaattgtgccaagtactagctactgcgctttcaggaataaaacttgaaagcaggcagaaccctttgtttgaacaaaggcaaatttggagataaaggactttgttaccaatttcccgatgaaagtcacaaaaatactataatgagaatggaaccccatcaatgttgccaaaacagcgactagcagatctttgaaaaaaacagttcctagctagatgtcagtagcaaattcct

SEQ ID NO: 29530 - DNA, 347 bp, Zea Mays
aaaagatatacaaattcagcaaaaaccaaatataagaactgtgaaacattatatggtatggttgatcctgcagtcctgtactaaccgctggagtgtggtgtggtgccgctgctgcattcagggttcgagtgcttggagagcacagctttcaatggcatctcgacgaacctggtgatgtacctggagaccgtcctccacggcagcaacgtggccagcgcctccaacgtcacgctgtggttcggcaccagctacctgacaccagtcttcggcgccatcatcgccgacgccttctggggcaactacaacaccatcctcgtctccctcgccatctaccttcttgtatgcac

SEQ ID NO: 29531 - DNA, 306 bp, Zea Mays
ggagaattggagaagtggtcggcggatttctctagaaatcagtcggccccctttttgaccaaaccataagatggtgcaacaggagcaacacgagcccttgctttgtaatccaacggtgtacaatttaacgatgacgtggatagccccacatgcgtcgttttgaaccgactttgttataagagaaattagaaatagtcgaacgacgttggatcgacgaggatacctatttcggtgtctgatgattcgtagtatccggtgtttgtcgaaagcctagagattgatgagcaatgccgagtcttccaatcg

SEQ ID NO: 29532 - DNA, 854 bp, Zea Mays
cagctacgcaaatatgtgacagagatagtgagcgtatggtagctgacggcgagcacggagaccatccaacactgtgtcctcaatctcacaaatcagaaaatcaaccacatcaaactccgagtgagagatcaaggcaccgagtagccagagctgaatatgtgtggtggcctccctatatcccatcctgggtagcaaagtccgcctcatcaactcatcgagaaacttcgttgctggagtgaagtcggctggagaacgttgtgacccatctgtgaacggaggtctgaacagggcagcgacgtgagcagtggctggagcaactccaccgtgagggtgacagagaggatctgacgtgccatagcacaagttgtggagcctcgtcgacgactcaggaaacccaaatagctctcggatctaggtagcatgcaaggtcacatcctctcgctcaaacctaaacctcagccactaatgatcttgatctatccatactatggcataaactaatctgacccactcctcaatgtatctaccactgaaggtcagaagagaaagtaaacctggcatataggagagatgaccctctgactcagcaacggttgctgacagaaaggcaggaagatccaaaagctggtgcgccctcaaggcaacctaggcagacaactgcaccctgaagaacgactcctgagtcttggtgccgaagagtggcgcagctgctgggtccctctaagctggcaaccaagaatccacaggtacatgtctgaatcgacgtacccgggcagctgtgactcactgaagataaagcagacgaggattagcagcaagcggtcgcaccttggtctcatcacgctccctgaagc

SEQ ID NO: 29533 - DNA, 1428 bp, Zea Mays
gtccaaccccaggtccacgcgtgcaaccgcgtccttggcgcgctggctgctgcgggccacgttgaggacgcgctcaagctgttcgatgaaatgtcggagggtggtgtgcagcccatcccagtgacgtttgccatcatggttcgtgcactagcacacgccggaatggttgataggcttctggagatgattgggaggatgcggaacgaggtgtgtcggcctgatgtctttgtgtacactgcactggtgaagacaatggtgcggagggggtatatggatggctgcatgagggtttgggacgaaatggaaaaggatggggtggagccagacacaatggcatatgctactatggtcgggggactctgcaaggctgggatggtggaggaagcagcagaattgttcaaggagatgaggagcaaggggttactggtggacaggatggtgtatgcatcgctcattgatgggtatgttgctgttggcagggttggggatgggtgtaggttgttgaacgagttggttgatgctggctaccgtgctgacctggggatatataacacacttattattgggctgtgtggcataggtagggaggataaggctcataagttatttcagattgttcttcaggaggaccttatgccaagttctgatactgtttcaccgttgctagcttgttatgccgaaaagggtgaaatggttacattttttgggttggttaacaaactggcagagatgggcttgtctgttgttgaaatgttagtagattttatgaagctccttgcaggaaaggatggtagggtattgaaggctgtggaagtgtttgatgcattgagacaaaaacagtattgtagtgttggcatttataatattcttattgaaaatctgctgaagatcaaggataggaagaaatcacttttgttgtttgaagaaatgcaaagctcagttgattttaaaccagattcatgtacatatagtcatatgatcccatgtttcgtggatgaaggaaatgtcaaagaggcctgctcatgctacaacaccatgatgaaggaaaattggataccaagtatgtcagcctactgtgttcttgtgaaagggctttgcaagatgggggagatcaacacagccatatcacttgttaaagattgtcttggaaatatagaaaatgggccagctgaatttaaatacaccttgactattctggaagcttgcagatcaaaaagaccagagaaagtcatcaatgtggtgtatgagatgattgaagtaggttgttcaatggaagaaattgtctattctgctatcatatatggcttctgcaagtatgcaagttcaactgaggcgagacaggtattcactatcatgagagatcaaaatatcttatcagaagccaattttattgtttacgaggacatgctgaacgagcacttaaagaag

SEQ ID NO: 29534 - DNA, 306 bp, Zea Mays
ctcccggtggccgagtggatgcatttcatgaagactgctcctgtgcctcttctatacagcaagcccccaatgatggtgtagttggctgactaccttgcaatgcattctgtcgtagccttgtcatctggctcttcttcattttttatgtacctgatgataggctctctccagtcgttgggatctgcctctggctgactcaaggtattgcattcttccatctggtccgtgatgatgctcggctgtgatatttcttggacgaagatcccaggcggagcctgggcccgactggatcccagcttcgacaat

SEQ ID NO: 29535 - DNA, 541 bp, Zea Mays
tgaagatatagagaaagtgagattgctgatgtggcagcatagtagtatatagggcaggggcaggcacaaggggtggggtgggcaatgggggccatggtcccacctcaattttgataaactctaatacctagagttagatatacaacaaaataaacaaacttttatatactacgtcaggctaaatttaatgaaaattagtttttgatctaacttttactcgtagctctactgctgagcccactccctatccaaaccgttctattcccgcccctagcgctagcccactcatgacttgctcgctccatcgatcatcaaatgatccgttcgatgacataacccgtccgctgccagtgccaccttacctcctcgtcacttgaactatcgtcttgtagggatcctgtccgtagtgccactacttttcctcctaatccgcaccgacagatgggcaagcaccacaacgctatctgccctcgctatatcactgggttccaccgcaccatcggaacgcggcaatggctgccaattgctgacatcgctgcat

SEQ ID NO: 29536 - DNA, 478 bp, Zea Mays
aacagtttgaggcgctatcgatggaagctgaacctagaaaaatgtgtctttggagtgccagccggaaagctactcggattcattatcagccatcgaggaattgaagcaaatccgaagaagatcgaggccatcatgaggatggaagcgtcgcagtcgtagaaaaaggtgcaatgactcacgggatgcttggcagctttgagcaggttcatatcaaggctaggcgagaaaggaatgcccttttataaattactcaagaaggtggacaagtttcagtggaccacagaggcacaagaggctctagaggcactaaagaagttcttgaccacctcgctagtactcaagccaccacgccgagctacgcccggtcagccggtagaagacctgctcctgtatatctcctgcacgactcacgtggtaagcaccacgttagtagtcaagcgggcggaggaaggacatgcatacccggtgcagcatctag

SEQ ID NO: 29537 - DNA, 381 bp, Zea Mays
atcggcattcgtgatccacacgatcaaaggtctacaggccatcggattatcatctaacggtatacactcacccggaccaaccgatatctaggcttctaatcatggtcgtacccaaccattggctagggatccaatggccaccagacttcttccccaccagcaacgccgtacccagcccatggcggcgttcaccaccgcggcgagcaacgccagtgaggaggcgacctagtaacccaactgtagcatgggtaagacctacatggagaggaaaaaggattgaattgatcaagggggctcttaccgctaatcagcatcacgatgacttccgtccatgcgtagtggtggaagaccgaccatggtgagcaattggcagtgcaccac

SEQ ID NO: 29538 - DNA, 471 bp, Zea Mays
gccggattggggtatggtgcgcccagggttggatcggtcgctcgccggtgactttcggtagtggtgtagtcatgagcgccgccgcttggtctggctcagggaagaagagaacatcgtggccgttgatggggttaatcaacggtgtggattgggggctggatatcgggccgcgggagccgttggatctccaaccgatggtggagattggattccaaggtacgccctctcgtcaaatgaataggggccgctgatcggccgatgaacaaacctaattgagtagtggcgctgattgtcttgtgccgtggatctctaatcccttggcccagattagatctgtgattcattaaaccatgaccgtaggattttgatccgagggatagcgtacacgtaccggttcatatcagggctgatctaatctggtcggttagattgtgatcgggcggctgaaaatcaaagataccccttcgccgt

SEQ ID NO: 29539 - DNA, 397 bp, Zea Mays
gcgctagtcctaagggcccaggctgcatagatggtattgatgtattagggaaggtttatctgattgtatcctattgatgtattaggcaaggttcccctgattaggatcctatgtaccataggcgagctgctccgaaaaggagcaaaagtgttatgggtggacggagggccagcccacctaccctcctcacaacgagtctggactaatgtgaacagtacccgtggtagtgtacctatgaggaagggataaggattaggaaagagattatattacatcaggttgctcccttagttctagggattagtttcttaagggttaagtccactctcataaaaggatgggattgtatctcccttcaagcaagaagccaagaaatgaagaattaatccaatttccc

SEQ ID NO: 29540 - DNA, 377 bp, Zea Mays
agctcagataacacgtatgtcgtcaaaggttcagatgactgcaccggacccaccagtgcttctgattttcgtcacagcttgctacgtgtcaatgcgttcagagtaagctttatatcatcaattagtgcttgttctctgggcggtgtggtacttgtattgctagcgactgtggcagaggcgtagacgcgtagtgatactgtgccgcatgaccgactgggctcgtgcaggaaccttggttctgtttatacgcatattgagccttttgtggagtgtttcatgggccatgttttcgtgtggtgggctaaatttaagcaacaagtccacaaagcatcagctcaatctgagatggctaccaacctgagagttttcgttcacct

SEQ ID NO: 29541 - DNA, 302 bp, Zea Mays
tggcgtaagataattgattgaggtatgcgggtatatgccgtaatatggttatactcgcaacgaaggaagatgtatgtcttgtgtaacatggcgcttaggtcgctattatatagtcgtgtgaagtatgcgcatgatggtcgtgtgattgaggagtgatgtagtgacaagcgaggagtaagttcagtttttcaaacggttagtggatagtatccatcggtgttgtcatgattttggttgtatggcaatgtgatgcttcactttgtcaatcatcacattccatgcccatgggataattacatgtc

SEQ ID NO: 29542 - DNA, 307 bp, Zea Mays
gccctgtggtgcctccatttacctttttactgagtctgcagttccttccttttgtgctgctttgctgttctcggtacgtagtgttgtaatggtttgtagtgattttcgtatccatttcttgatttaatctattgtaaccgagttcttgcgtaccctcagaaacctatcgttttacttgtaagagctttaatttaaagagaacactatattatggctctattcaagttctatcctctcacgactactgcgccgctgatcctgcagagaatgttataaataaaccaatggagcactaaagaaaaccaga

SEQ ID NO: 29543 - DNA, 396 bp, Zea Mays
gattaatgctaacgggcatttctaattttaaggcaaagtaaattactctccatatgcttttgtccatataacagtcaaaaaagagacggtgaaaactttcatttcgattgcaaaagctacatgtcaagctaccattccatcgccttttggctaaattatctttagtaaggattgctccacgacataaattccacaaaaaaacttttattttcaaggggaacttaagtttccaaagcttcttgttccgttcgttgttgggaatattcatcaacaaatggtacatagattggaccgagaagattccattcctttgaccgtcccaaacaaatttatctctagacagagacagagtaacctcagttagcaagtttagcatgttgtgccattccactaatt

SEQ ID NO: 29544 - DNA, 370 bp, Zea Mays
cgcctctcccagaagctggtacaaccttggatattcagaggcctgtcagtgttcgcccgaaacgcccttgccgagccaatcaacttgattctcctgctgatgagcagaaaaagaaaaagagacgtcttcggcgagtatctagcttggatcgggatgttggtcattcggttcctgctgctgaggaagtgcctgtgcctgaatttaccgacgctgaccccaatgggtgtgatccatctgccgctgatcccaatgggtgtgatccatctgtcgctgatcccaatgggtgtgatccatctgttgctgatcccaatgggtgtgctgtatgtgttgctgatgaaaacgagggggaggaagaagatgaggtcccttt

SEQ ID NO: 29545 - DNA, 1281 bp, Zea Mays
gaaaaccctggtattgggccgctcccctccaattcggcccattccaccttccctctcgcgccagcccacccacgcgcttgcttctgcttcggtcgcttacacgcggggccggctggtcagtcgcgtcgcgcgcacgctggctcgcgggacccgtgtgccagtcaagctaacgcagggattcgttgggtggtgtcgatgatgggtgggacccgctcgtcaggttcatcctcgacctcctaacagaagcaccgaacccgccgcgcggcacgctcgatcctcgctgggttgttgcgatccccggatataaaaccaaaacgatcccgcgacccccttcgacgatcccatcctcttctcacctcatccagtccgccgtcatcgccgttgtccgagagagagggcagtggggagctcgaatcgcgccgccgtgaagagaagctctacccgaccaccaaaatcagccggtgaacccgtcgttgtggtgcattgggtgttggggagggtgcgcgaagcctcgccttgggcgaattgtaatccgggactccggaattcctcgccgtgtccgctgcgccgccgtgaacccgcccttcgccgtgggatcgagcccctgcgtcggccggaacatcaaggtatgcaccgacctcttcgttggagtggttagaaggtagttggagtagcgccgcggggaaatctcggcgtgtgcccccggaatttcacaccggagcaccgccggccgccttaaatcgcgatgcaccgtggacctggggtctgcgttgggaaacgattgaaattgaggggtgaatcgggttcgggatgtctcgaatctcgcgtgggtcatacgaatttggggttggcgctcgggttagccggattcaaggactccggcgaagtccaccgccgcgcccctgggcgacaccgccatcgggacagcttgggttgggaacgacgccgctcggccgttggatgcgtaagggacggtcccgattagatcaagcttaccccttcgtccaatccaactgcgtccgtcgatgcgagatccagcggtgcagagtagatctttgattcattaaatccgtgccgttaatctttaatccaacggctctgatcgcgtaccgattcggcccgggatacatctaatcctagcggtcgatagtcgatcgtgcggctgagattgcaagatacctcttcggccgtgctttttgctaaagagaccctctgttttattaaaatcaacccgccatccccgttttactgtttcctgagtctgggacgacttaccccgag

SEQ ID NO: 29546 - DNA, 283 bp, Zea Mays
ccgccggtacgcaacccctagaatgtttttctagtgctcaactgtgcctagcgttcatcgggtctggggtactaggccgggggcgtggtttcatggatagccggtaaagctcctttgttggtccggctgcccgacctactaggtaacgatcctaccgcgaaggccacgtggatcttcgccaacgttgggggcagtgcagtgctgttccatttgcttagtgtgtcttctcgctcgtcgctgcgtgatcatgcaacatgaggtcacggctggcgtgccaccgcag

SEQ ID NO: 29547 - DNA, 456 bp, Zea Mays
gtggtcagcagataagcacgggtaggtaaaaatcttggcataggatcaactcgagctcgattgcggctaagcttgtcgtaccccccagcttgtcggtcgatcggataactctcacctccgtcgagctgtcgccgttgcgcgccacgtgcttaagcgctggccctcatcatggtgaaccatggggtacatgtccggtgaaagccacctgtttcacacaccgagctctttttctcctccagccgccagcgctcctcgaccgaattgatcaccaccgctcaagtatcctataaattgaagcctcagcatgttctactaggtaatcgtgcgtccagtgaaccaactcgtagctccgatcgttccccacagctccccaatttgggatttcccccaaatcggttgaagaacgccgcgaaatccagctcgccgtggccagcccaaatcaggtccattctcgcc

SEQ ID NO: 29548 - DNA, 377 bp, Zea Mays
catgaactctcggtgcttatctcggggtggaactggtggtggtggtggaggcagtggtgcttgctgatgttgctgttgttgttgttgttgctgttgctgccgcaccctcctttcctggcgtatctcttctcatttttggcgcagctctcgacatatatcctcccgctcttggcgcatctcttggcgttcctgctgcatctgagcgcgcatatctgccatagtgtcagccatttgttgcatcatcctcatctgagctgcaaccagtgggtcaactcctgctggtggaagcggtggtggatgatccatctctgctggttgtggctggggttgtctaaatatcctccgagtgtgttgattgggaggtaaatcaattccac

SEQ ID NO: 29549 - DNA, 399 bp, Zea Mays
ggcttttaccttagtgggtggagtgattaaacataaaggtagagtgtggctgggtgctaatcagcaagtgcaagctaaagtaatgggtgctctccatgatagccctgtaggtggtcattctggttttcccgtgacctatcggcgtatcaagtctttattcagctggccaggaatgaagtgacagatcaaggactttgtgagtacctgcttggtttgtcaacaggctaaacctgagaggggcaaatatcctgggttgctcttaccattgcctattcctgaccaggcctggaaggtagtgagcatggatttcatctctggattacctgtgtcacataaatacaattgcatcatggtggtggtcgataagttttccaaatatgctcacttcttgcctctggc

SEQ ID NO: 29550 - DNA, 365 bp, Zea Mays
gacaagtccctaattatgacgggggtggcagctatggtttgggctctatgggttagcaggaatgaggtggtttttgatcatgataacccgaaaacttatatgtaggtaatctacagggggacctactggtgccgttcctgggcgctgcttcaaaggcatgaagctgcaaaggagaagctagtccaggcttgcagacatctggagaaagtggtgatgatggtgtttgcgcataatggatggtgtttctccaatcacattaatttgtagcttttttatgtctttgaagccctgcgtggtttccccttgtttcagtttcctgtgtgcttaactatggtgttcgtgtggatgttgtttatgtagttgtt

SEQ ID NO: 29551 - DNA, 735 bp, Zea Mays
tgattatctctacggtaggggtgtttacggcaacgcttttagctctactgatcccgttgctttcagagtcttcaaggcaaatgaagctttatgtttggattccatgcgccttctcagctttgatgttctcaccatggagtatttctgaaaataatgtgtgttcattcagggactggaagacagccacacaaacggcgataaggaagagggcctcaatttggagggctcagcagttactaaggtgattgtagtttctgcttgttttgttatggtgcgactgttgcataggagatttatgtgtggtttctgcgtgatgtgttgttagcgaggggacctgttggaggccttgtttgaggttccagagctcgatttcctgtcggtaagatgcatctcaatagtttcacctgtacttttatgtagtttcctgctctgtttcaaactctgctctgctatttcattgtatcaaaggttttgcagaagaaaattgcatcgtttgatgacgaagagccagatgcttgtgccggcacctattcatttggtgtccgagacatgaaaatcattccagtactctacaccatctcatctaagttttaagctatttactaccctgtattccatattttgttggagttgcaatctagttatgagaaatgaatcaaaatgttgtgcttggatgcacatgttctttggcaagtcacatattaatagggatcactaatctacattaatgtatgg

SEQ ID NO: 29552 - DNA, 387 bp, Zea Mays
acggtatccagcacaacccgtctcctaggatgagacctctgaagtaggggaaacccccaacaaaagaacgctccgagaaagccgcaactcccatcgttgtgatcgtcaccgcgcccaggaacgtgagcaggatcaaggtgaacaaggcactaggctctgacgcgagaacccacttctcccttggaacctattccctgactttgttcgagcactaaatacgctaagtgaggtcggaggggtccgagctcaaattaccaacatcctaccacacaccccagatgcggagggctattgacaagtgctcacccaagcggcgaaccaccttctccccctcactcacccactgaatgatcagcgccactccatcaacaatcggcgagacgcacg

SEQ ID NO: 29553 - DNA, 571 bp, Zea Mays
ccgccttaagtcattgccgacttaagacgattgctccgttagtagggtatagtggtcaccccgagttaagtaagcgtgagcatgtcgcaccaccttaagtcattgccgacttaagccgattgctccgttagtagggtatagtggtcaccccgagttaagtaagcgtgagcatgtcgcaccgccttaagtcgttgccgacttgagccgattgctctgttggtagggtatagtggtcaccccgagttaagtaagcgtgagcatgtcgcaccgccttaagtcattgccgacttaagctgattgctctattagtagggtatagtggtcaccccgagttaagtatgcatgagcatgtcgcaccgccttaagtcattgccaacttaagccgattgctccattagtagggtatagtggtcaccctgagttaagtaagcatgccggttgacggcgaacaattcgagtgcctttgaagtctttttattgatgatatatttcccagtttacagagtacattgccgtcccaatagcttttgagatatagctagaggtaaaacttcctaagatgttctatgtt

SEQ ID NO: 29554 - DNA, 503 bp, Zea Mays
gccacaattcacgcccgtctgggagattcgtgccacgggaggagtagataacatcggggcggggtgaaaatatccggtgaggggtgaatccagtcgctggccgaaccgaccgtcgtgtcccgacgcggtcagtcacgctggcatcaccggagctcgtcgtttttccggccatgacacgtaataaccaatcctccgcgtcgtaagggtcgtggcaagccgcaggttatcgttcgcagaacagttccctcttatgcgccacggtgagcaagccactgtgaaatatcctagcttgataaccgtgatctcaatcccaaaattcttgtccagttcgatcgggacctataaattgaggatgccctctgctccgcttcttagttacgcatccaacccatccccagctagctcctatcgtgcaccaccgcgccccaatttcgcatttcccccaattcacttctttgcgctcccgtgtgttgtcgtgtcgtggaccgccaattctaggttcg

SEQ ID NO: 29555 - DNA, 297 bp, Zea Mays
ctttgtgtcatctcatgcgtctggttgtgttcttcaagataaacaaacgtttcaaccgaggtacaagaggcatgtaacgaagttgcttatgtgctacctcagtcatcatggtcagaccatcatcgtttacaacctctataaatctcgtctcaccacatattgcacacttcttctcattcacggtctctttctagaaaaatcatgtagttattgtcacagacatcaattgttttgtagtgcataccgagacatgaggcaatttcttggactgcttcatgtatttggcgaatcacttgt

SEQ ID NO: 29556 - DNA, 353 bp, Zea Mays
gttgaatatcaacgccccttttggatatttcagtctctgggcataatattgagcttctcgcttttcttctgcagataacctttttgccgaagcatgtcgtacaatataatcaagagcttcggaagatgcttcgggaataggaatggcagttttttcagacacaatttgttctgcagattctttttccgcttcttcttctccgatttccaaggatttctccttggcgggctctgaaggcccagcttcagtctcggcatgactttgtgtagcttcggcttcagtctgttttgtttcaattcgcgtttttaagctttagttgttttccctggagtagagcttgaagtatttatttt

SEQ ID NO: 29557 - DNA, 392 bp, Zea Mays
accaagtccttcttagggtatcacctactaaaggagttgttcggttcggtgtctccggaaagcttagcccgagatacattggaccgttcactgtcttggcctgggtcggtagcttggcttatcgtttgcaattgtcggattccatggcaggagtacacccggtatttcatgtctctatgttgaggaagtttttgtgggatctggaccatcaaatcgagatggaaccgattgttgtgtagcagaatctgactctggagtgtcgtccggtgcgtatcttggagtcctcagagtgtgttatgagaaggagatcaattaagtatgttaaggtcttgtggactaatcagtctgagcgcgaggctacctgggaacttgaggagctgatgcggcagaaa

SEQ ID NO: 29558 - DNA, 289 bp, Zea Mays
tgctggctgaagttggactgctgaaggagaggggtctgactgcagaggttgtggttactgattttgtcttcaagaacattcagccattgaaggacagggcatacccgacctatctgtaccaaggtctagctgactcaacccgggtcaccaacagaagaattcatgttgtagacttggtgaaccggcttgaaatgatacttagaggcaaggtatcaaatgttggcgcccctgtcgcatactcggtctggaacctgcctccttccaaggcctttactcattttgtgtcgaa

SEQ ID NO: 29559 - DNA, 290 bp, Zea Mays
agaaccaacaattcgacttgcaaattttattcaaatcattagtgcactaaaattactacaaccaattaacaacgcattcttcacgacaatcactcaacaatttgcgttttaaattagacatcacatgagcactactacttttcatctgcgaccataaacatatgcatttagactacaataagcaaatcatcatgactacgagcttaaccaagtcatctattaattcggctaactagcgcaacaacataggccgctatacatcctacacgtcggcttgcctcttattatcg

SEQ ID NO: 29560 - DNA, 538 bp, Zea Mays
gagctccctactcccggcccagctcggctcaccttttggcctaatttgatgccgcgcgtgcgcctcgcccactgatgaaagggtcccagtggtcagccgccgcctacgctctctcgcgcacagacgtttcaccgaaccgtggggccccctggtcagctacttcttctcctctttaacagaacgtgctcagctccacagacgcgcgggtggaaccccctcgcgctcctccaactgatttccccccccccaaatcggcgctgatttcggtatccgatcgatagccgctgcttgaatcgcgctagccacctccgtgcgggccatcttcgtcagctcccctgttcttctcggtcgtgagctagaaacaaaatcgcgcgctcgcacggggccgttgcaaccgtctgccgaaaacctcgctcaggaccgccccagtcaaatatccatgaaccggacttcgcaatggccgtgggttataagccttgcccctaccgctcctttgtggatatgccaagccgaagcaagttgccctcgtgccgcgtgt

SEQ ID NO: 29561 - DNA, 448 bp, Zea Mays
ctggataatttcaaaagtgaagggtcagctagcaaatgagggtttcaatgattggcatcaccttggcattagacttgaagagcatgaaagtggtgcagaacatcttacaaatatggctacttggtatgacttgcaaattgaaccaagatactaatgggaatattttaggactgattgaaatgctagctgaatttgacccaattctgcaacaacatgttcagcgcatcaataatgatgaaattcatgttcattatcttggccctagcattcagaatgagttactaagtttgcttgccactgcaattaggtctgaaatttgaagactggcgctggtgcctgtatatgaccacccaacaaggacggcctctccctcatcatcccaatgcaagatgtcaagaaattacctgttggtttggttgatttggctgtagttttacgcccaggcgcc

SEQ ID NO: 29562 - DNA, 589 bp, Zea Mays
ggagacttggtccttcgccgaattctaacggggaaaggacgacacaaattgtcaccactatgggaagggccatttgtagtagcggaggtcactcggccaggctcatatcggctcactcaaatggatgacacggaaatagggaattcatggaatgtagagcatctcaggaagttttacccttagcgagatttcaaaagctagcgtggcagcattgtattctgtaatgggataatacatcatcaataaaaagacttcattctcaagggcactcgaactgttttattatcagtcaacacgattactcgactaagggtgaccactattccctactaatggagcaatcgtcttaagtcggtagtgacttaagacggtgcaacatgctcacgcttactcgactcagggtgaccactataccctactaacggagcaatcgtcttaagtcggtagtgacttaaggcggtgcaacatgctcatgctaactcggcttagggcgaccactatgccctactaacggagcaatcgtcttaagtcggtagtgacttaagacggtgcaacatgctcacgcttactcgactcagggtgaccacta

SEQ ID NO: 29563 - DNA, 550 bp, Zea Mays
gtttattggtagatgagtcatctgatgtttctggtaaggaacaaatggctgttgttttgagatatgttagcaagcttgggttaataaaagagagacttattggtgtagttcatgtgaaagagacctcagcttcatgtcttaaatctaacattgatagtttgtttggcaagtatggattgagcataaaacaagttagaggacaaggttacgatggagctagcaatatgaggggtgaattcaatggtttaagagctttaatattgagggaaaatagctctgcatattacatccactgctttgctcaccaactccagttagttattgttgcggtagcaaaaaaaaatgatgatattagtgatttctttgatatggtatccttattaataaatgttgctggagcttcttgcaaaagaaaggatatgattcgagaatgtcagcaagaaagagttagcaaagccatatgtagtggacaacttagaagcggaacggggttaaatcaagaacaatcacttcaaagagccggtgacactcgttggtcgtctcattttaa

SEQ ID NO: 29564 - DNA, 358 bp, Zea Mays
aaaaaaggtacatgtcatagctcatttagtgttctacaatagttatagtaacaggtacacatgcatagttcaaagtccaaattagctaactaagatcatatatccatatgttggatgtggatgagtaggtgtatgcatgagaagacgagtaggtgtctaaaactgagttgcatgagagaacctcgagtgtcaattggaactgggccgtgtcctgaccctgccgtgccggggcactatcggccgtagactggcagcggcactattggccgtgcatgtgcatgtcagcatgcatgcaatgcaagactcgccgtgccccagcgtgctgctagcagcacgtcgcagcagaggagcaggctca

SEQ ID NO: 29565 - DNA, 340 bp, Zea Mays
gttgggtacttgggtcttatgtgtgtcactatcagtatgtgcatggcatgactgttgctcgattatagctgggagtttttatgagtgatgactactagttctattcgttgcaaaaaaatagtcaagttgtgattttatatatttcgggtaaattgggtatacctgtgggggacagatatcccccaggtccactcgggggcgaaaactccgctcggggccacatgccagtcgccctgcagggacaccacgtcgtgggccgggcaaaaagaatggcggacatgggccgacccaggaatgtgatgggcccacgctcggattactcgtggcttgggtgtgatcc

SEQ ID NO: 29566 - DNA, 1301 bp, Zea Mays
gggaacaggcgcctgcaactcatcaaccgaggaattcgggagaggagcggcatcaactgttccacctcccccacaaggagtgatacgtggtcccaaccgtgcatgaacggaggtccggaccgaagagaactgatgattcggaaggtgctgcctctgacgctgatgcttgctatcccgatcttcatcatcatctagggaggaaaacagaggctgctcctcaactggcaatgcaaccagagtagtcaccttcaccgaaacggagtaaatcaatgtgcgagggaagcaggatccatcttctccaatagacgtcggctcttcaacatggagaccacagcgagaaggcaagcaatcatagagaaaccccaagcctttagtttcagaactgacatatccgtcccatcagcagaatccggatgtaatccctgaacaatgcagtgtccaccgagtagatgctctgtcgtatcaatcccccagaggtgtgctggaatcccgccaagttcaacatccataagcacagggagggcacctccaccagaggccaacacctgatgtgaccacctcctaagatgcagccggagggggggtatggaaatggaatgtccaccagccaaggcgcgaacaacgtgttccacggaggggaagaaagccaggtacgagttggacgcagcacgtcggatttggagcgcatcagcctcaagaccatacttcgaggcgagtgcctccaaaatcacaagggcgcagtcaggaccctcttggccaagaacattgacgatcaatgcacgatgaaaattctcctccgcctggtcgagcaaccttgaacgcctaagaatatgcgaacgaggggggtgcaccaccgaaggcaaggaagatgaagccatcgatgagacccgaccaggtgctcccaaatcctcccggtccatccttcggtgcctctgtccacggcgagtgcacttcatcttcttcattccatcaccgccgacccgcgaaataccttccatatcgcagagaggaactttctccgggacgaccttcttggcaactggacgccacaccaacaccttcgctgggtgatgcagagtcttcttccgacgtggacacgtgcgcacccgatgcctaggcaggcggcaatggaagcaccacaccaaactgccacagtcagccgcacggtgggacggtgagaaacagttgaagcacttcccacgtaaatcagtgggaacgggtctgggggtgcaagggaagaggggggcagggacttcgacggcgagaccgacgtcccacaaccttcacccagccaccgtcac

SEQ ID NO: 29567 - DNA, 550 bp, Zea Mays
gttgctttctccagtatggggattccatatctttggcaattctcgagctggctcttgtagctatcactggaaagttccttctatttttttcttccctttcttgcttaatgccttctcccattcctgttcaccatcttcttctgtgtggtaaagctcagcctcctccactatgttcccatgccaatcttcctcattgccctctgttgggaagtcatccagcatgtgtttcaaatcctgtttcccttcctcctggtttgaaagctgaaggttaatcatttcccccaaaaagattcataccatccagcccaatactgtttttgttgacctgactgtttgtagttgcattaatctccttgtttgagcagaatgtctgaccttccactctctgcttcatcatttcaatatgagatttctccggagccaccttggcccgatcatccaccgaaccttcattatccaacacttcagagagttgactatcagagatgattttttgttctatttctttattaagcatcaagacttcagctgtgttcaccgtagaagtttg

SEQ ID NO: 29568 - DNA, 387 bp, Zea Mays
cggatggccatgattctacagcgctgaagggggactccgattaaatcggaggcacacattctccgatcaaaggtcagcacactctcttccctcccaagctctagtcatggcggcgctgcccaccgcggcggagaacgcgggcgcgacacccatcagcctcccccgagcaccattgtcaaattgaacggagcaacacgatgggcacggcatggcgatcaccatggatgtattcttaccttgattcgtgcagcgcagagccccggccatggcatcgcgcggccaacggcgaatggactgttctggtgagcaattgcggtgttccctgtggagattcatcaccggagcggtcaccattacagccacgggcaccaagcaaacccacccaag

SEQ ID NO: 29569 - DNA, 295 bp, Zea Mays
cagctgcttgaacgcagcatgactaatgacgttgagccgagccccaccatcaatcaggacatgatgcagcttcatgttggcgatgactgggcggtgatgagtggtagtataccggcccctgccatgttctcggggcagtcggatgccccgaaggagatagtggtgctacgctaccgctaatgtggggctgccttcgggacccctggagtcgccgaaaggaccttgcggcacagggactttacgttcctgcgggtggtgagctcccatcttccgccatacataacgtacatcttct

SEQ ID NO: 29570 - DNA, 966 bp, Zea Mays
gcaaaagtgaagatggtttgtagggctacaactttgatacagagtgttggtcgggtcactacacaaaatctggcacgaattgccctcaaaggagctctgtcagaccaactgaatggaattcaccatagtacagtaactgaagaagattccaagttcatcccccttcaccgccgacgaccgtcgcgccatgattcacgttggtcgttgtgattcgtgcgttgtgacttgtggataaaggtgagcgggtaaagatctgggcgcctagatcaacttgggtccggtcgcggctaagctccccgtaccacttgctcatcgatcgatcgggatagacctcgctgccgttggccgattaccgtcgtgcgccacgtgctaaagcgttagaccacatcgctgtgaatcgcgtcttgcatgcacggtgatcgccggtgtgctgccacggtgaaagccactaacccaagcaccagtgacctcccacccctccgaccgccacgcatctcaaacccaaattcaccggccaccgcttagcgatcctataaattgatggtcgggtctgttgcgccatgttatcacgaagccaacgcacccacacttgcctccagttgtccaccagagaccacgaattgctcacttcccccaaactgagtttccgccaccgtgaaagaatcctcaccgcggccagctcgattcaggtctgctcatgacctttgccctctcgttttagtgttcttgtgtgcccctgatgctccccgaccaacttgattgaactaggatcccttagatcaccaggaacgcggttgtctatccgcgatggccgctgtcaccgtggccagaacaaattgggtagttgttcgtgaaattgagtgaggggaaacgctcattagatcttgaattcggtctcggctaaggtagggcaccggtatttgagtgaattggccggtacacaagctcgacggagctctgcgcgac

SEQ ID NO: 29571 - DNA, 372 bp, Zea Mays
gtcagcctgccagccgtcttcttccccgattctgcgcggagtatgttacgatctaggaatcggctgttacgatcctatacatccccttgtgcctataaaactatgcacctctccatgcccgccaccacctacgtatccaccgtcgagttcgccaccaccacttggtttgtatgccaccatctccatggagagtgtcgacgccgaagtagagagtggaacatgtcgccacagtcgaacccgcggttcaccatcgccaggtcctcgaggaattaccatggagcgtcgtcggggcatgtgggagctggcgcaagtgttggcgtgcacaggtagcagtggggtgaccgggaattgctcgctggagtcctccttcgc

SEQ ID NO: 29572 - DNA, 371 bp, Zea Mays
gtgctcacgtgccctctccagggagatacgagcatcctcacccgcatgactgtggttgagctctgcccgtaggtcatcagtccacgtgcccctcactacgggtaagtgcacggatgctgacgcctcacttgatgctaggatattcgtggcccggttctggctaagctagtagcagcttgggccatgctgaggaggtggtcgacatctttacgccaccgcctcatggcccctggtgaggctgtagagcttggggctgtagagcaactccctggctgctgataactccccactgagagtagcccacaagggggtcctagacgccttcaccaacgtgtgctgttgcgtagcatgcacaacagcagcactagacg

SEQ ID NO: 29573 - DNA, 557 bp, Zea Mays
agcacgatggccacggcgaggtgctcacgcggcggtatgtagaccgatttggggataatgggcaattaggcagctctggtggacaattagaggcaagtgctggtgcgttggacgcgtaattacctagcggagttccctgaggcttcaatttatagcacgcaaaggtggtggtgctcaattcggaggagaagtgccggtgaccgaggagaggggtgagtcactacggcgatcaaccgtggcgatcgcagggcaaagagctatggcggtcactaggcagtcactacagctcacgatgacgcgataaatgtcctaaggcatggcgtccccatggtgaatggcgaacatgccggtgatggccgctcggccatgtcaccggtgcgaacagatgaataatcgagcgcatagtacttccaagctcatccgcggcaagatcttttacccggggatcgttatccacgtttatccaagcgtgaatcgcagcgttggcacgaatccgcgtgcaagatcaccggcggcgaggtgcactgcacctgtgattatatccagtgcactgtacc

SEQ ID NO: 29574 - DNA, 369 bp, Zea Mays
cacaccggggatgaaggtacgcaccagtgttgctagcaaaagacatactaggtagaggaccccaaccatacgtcagtgtctaaagtgactagcagagaaggcctccgcgatagttgcaatgtgtagaagaacaacgaggaagcatgtgtcaatgcaccaatggttgtcggtgtggatgaagtagacgaggacagaggacgacactggcaacgagattgtgatggacgaagtcaaagaagtagatggttgacacatctagggacccagagtggcagtggtgagatctgcattgcgcaaggagtcatggtggtgctagagtgttgcaacagtggtgcttaaagaagatgacgaagagcatgaacggtccag

SEQ ID NO: 29575 - DNA, 830 bp, Zea Mays
ctcgattagaaatcaacgtcgcggatcactctaacattttaaatgaaccggaacgcaccgtggctcgttggattaaaaacctacgatccagattaaaaacaaccgcgctccatcctcgttcgcacgatcccaaatctatgctcctgatttcattgcgcgaagaggtattcacattctaatctaagccgtccaggaagggatcgacgaccccctacccttcttcaaccccgtcgtcctaccgctctccctctcactcgccaatgcctggacggccagacaaccattggcagcgaaagtgcttcaccggcggataccacaccagtgccccgacgacgaaagctaaatgcgaaaaagtgtgatgcgtaatgggaaataaagcaagtcagggcggtaagagctcacccacatctgggcagcaacgacgccatccatggtgctcggccgctttggtggttctccatttttctcccggcaaggcgcgtctcttcttccaacacggcgcacacccagattgcccagtactgctgggttccatccacggctacggtcgctcccggctactatggtggcgctgccaaccaacggttcacgctggcgtctatctcctcggtggtggcgtgcactagctcctatgtgtggttatggccgaagggaaaccgtcggctgaattatatacccgttggagaggggtgtccgaggtgcttggtcaagcaaacctcatgctgatccggtattcacggagcggtcagcgacaaacgcgacgaggaagacggctccgaaagtggctcaatcgtacccgtatgcgaaaatatttgttgatgcaagcacat

SEQ ID NO: 29576 - DNA, 462 bp, Zea Mays
gtggggctgaggtgcccttcccgtcagtggtctctctctgatgcaatggatgggcatgaagctagacacctttgatgacagtggtactccggtttaggcagcggattggctgacttatgtggaggataagatggatgtcttcgagattgtgtatggagatcgggttcgttttggcacgcaactattgaagggggaggctcaaatttggtggagaggcatggaggcagctcactcctcctcaccaggagtcctgacctgggacactttcatcaggtagtttgagaggagattctacccagtcaccttcctggagaaaatgaagattgatttgcagtctttcaagcaagagaagaagtccgtcacagagtatgaagtgggctttaacaaaatggtctgctttgttcctcatgtggcttacaatgagttggagaaggcgagccagttccatcagggtctgaaacc

SEQ ID NO: 29577 - DNA, 305 bp, Zea Mays
gtgtatagtcaccttattgtgtaggataaaagataggttagggcaaaaatagcctagggtaagcaagtttatgatggggaagaattccgtgttgagtggtaatgcatttgaaaattgaatttgacttctctccttccttgacggggttgatcttttcctttttccaatcttggtctcattaattcgaggttaatgtgtatctcgtcggggttggggagtatggttatgatagatatgaatgagatagactacatgatgtaggtcaaaagtttgtttaatgttaggtgagaatagacagattatgc

SEQ ID NO: 29578 - DNA, 392 bp, Zea Mays
cccgtggaccgctggctacttggcgccgtcggcgacgctcaggatcagcagcagcagcagccgcagtgaggaaacgggaaacggctcggcgggcgcatcccccaacggctgacatgacgtagcagcaccagtaccctacgggtctacggctccgccgcagcggccgtgctggccggccggccggcccaccgtagcgaaaggcgcgctggaatcgaaggcgtttcgactgattttttcccccctccatgtcttttccatcgcaccagctggtgaattgaatgaggtttccgtttgggcccgggtgtcgtcttgtcagatgtacgtatcctactagtagtactgtagtaggcaaggaaaaggagacgcagatcagtagagagagtagaggtcca

SEQ ID NO: 29579 - DNA, 385 bp, Zea Mays
tctaaactggtgattgaaacaaggtggcgcgaactcgaaactctagcggtaagaaaactttagaccagcaactcgacccaaatgcaacaaccgtgaattcaacaagtcgaaaactaagtagtaaagcaaaggctcaaactgtttttaggtgaatttctgatctaaatatatgtttgggcaaaagtggactgtaggtaaataaaacaaggaagattgagttctctcaccgagcatcctgaaatttgataccacttgataaacccaacgggtagaagggtgcccgatctttcgatgagagatgatggaggtggaaaatttgttgaagaacgacgttggctgcccgactaccacaacaaagatggtttggcgccttgagcgacaggta

SEQ ID NO: 29580 - DNA, 555 bp, Zea Mays
atctgccccgattctgcgctttggtgtgcggccgggaacccatgttcgtgcgcgttgtgaatcggtttggttggacgctctagaactcagtaattgctcgtcggagctcttggctgtcacgggcgccgctcttcttcgcgaccagaaccacccgcgctacaataaccggtgagaccacccttcctagccccgcaatcttctccactagggtatgcacccgttggttagggattttcgggtggaaactgggccttagaatttgatggtgaagtctccgccgtgtacgagagcaccgcctccactgcgagcatcgcgttggggaagacgggcgatcggccgttgatatacgtggcgacggccttgatcagattgtgtgtaccgcttcgatcaattgaatcataaccgtccgatcgagatcagatggtggttactcatactgggtctcatgaaatcatgggcgtcggatttggatccggtggccgagagtgcgtactgattcgagttaatagagacctaattcaggccgatgggcagagatcggacggcctggattca

SEQ ID NO: 29581 - DNA, 474 bp, Zea Mays
cgggacctgtgaagggctaaccgcggcgagctcacacacgcggtgttcttcaccgatttgggggaaatctcaaattggggcgttctggtggacgattcgaggcacgagctggtgtattaggtgcgtgtctacctagcggagctgatgacacgctcaatttatagggcccgagggcggtggcgcctgaatttagcatggcgcgatggcggccagagagaggggagagcactggtggcttaatcgtggcgtttaccggtgcaacggatcaaggattgtaattctaagtgtgccacggttactaccgcacaatagcgagccacgacgtggcataaccgaggtcaccggagtttccacggcaacaccagcggaccggccacgtcgcacggctacaggcgtggtgataagcttccgcctcgaccaaatccactcccccgcgagatctttttacctccccgtggatatccactgcttgcc

SEQ ID NO: 29582 - DNA, 334 bp, Zea Mays
gcgccctgacacccaagatctgtatagcctcggcgtgcagggggaagcttctcgtacaagggatgagtacagtgcaccatgcagcacgggtgcactatttcggcaacggactggacaggtgcgccgtctgcagggtggccctggcgccgcctgccagcggaatggacaggacacaataaatgtcgtgggggcacatcacctgtcagaagggtggacaagcggcgtgtcctttccgcaataaatgcggaggctgcgcggcccaaagcccttacatcatgctccgcccgctggcctacgtcacggacaataagccatgtgacaacattagaccctc

SEQ ID NO: 29583 - DNA, 283 bp, Zea Mays
tcacttcatcaccattcatatgtgcaggtggacgattccgagacacaccctttggttgctcatcaacataagtctctggcatgtttcttatttctttggactacccctgcaaacaagtgaacattcactcaagcaattatttgttaaattcatctgaccataaacatcaacaaaagaattttacaaactacaggatatttaatgtgacagagcgtgaagacatttcaaatcacacagaaaggcaaattaaggatatctgatcaggaaatacatcagaattcag

SEQ ID NO: 29584 - DNA, 323 bp, Zea Mays
cccttacccagcagatcctccaattggtgtggtagctgattaccgaggccctggtgtcctttcagtacgcaaaattatagcatccaaagtttttgtgaaggccatccgccctggccttcgtctgatagtgcaagtcatgcactcggcagaaaccttcgacattggcactcatgccctggcttcagagagcccatatgtaaacactcagcctaacaatggcatttagcatcagctgatgaaggtttatctcaaacttcttcaaaacctctcctattatatcatatagaggaaaccgaagccctgcccagaagaagcttttaaaa

SEQ ID NO: 29585 - DNA, 365 bp, Zea Mays
gatgaagcgggctcttggatccgtagggctctacgttggttatgggttaccaagtaggcctccatcaacttctggacatgctcatccttggattgcttcagggcttcaacagcaatgacttcacgactttccaaggcagctacacgggcttgagttgtggtgagattcacatggagctgacggttgtgcttctctgcatcttctgctcgggcaatcatctgaaggtggtgctgagccaagaaatcatactgcgcatccaaggtgagcagttatgcagtgaggtacacaactatggggtcgtcctcaagcagttgctgcccttccaatgcacgcatcctagccatccaaactggacggtctctttg

SEQ ID NO: 29586 - DNA, 434 bp, Zea Mays
ccaagtggaattaggaggtgaggttggggctacactgtcgcaaaggactgtggattcactgtgcgccactaattttgggagaggtggagaggattctgtgaattttgtgcttcaaccgagctcactggtgaagagatgaaaacctcgtcgtgggtggcggggctatttaaaggcgcggtggtccggctagcgatccacggccgcggattacatcgtttgtgcatggttaccacgtaaagaagggacacagtgagggaggagcgaggcatgggtaacacggcggtggaaatgaccgagccacggtgaccgtcggtgaattatctccggctaggctcgggctaggtcagcgggattgcgacacgtccgaagctacctccccgtggtcgattcttaccccaaatcactcagacacatccgattctatagtgcccctg

SEQ ID NO: 29587 - DNA, 340 bp, Zea Mays
aaataggcacaacatctttattaggccttttctctaatttgctggcagctggcgccctcccgctctcccatagtctccattcctcactttatgccccgctgccactcaccaatttgctagacgccaaatatcttgtcgtcggcctatcgcaggacggttgcctcgccacgactcctagcgctgctctctccgagctccggccagcgcttagtgctagtcaccctgctccctcgtctggccagcacaccggtggaatgtcctagggcttgccaaccacgtcgttccatcctccaggcggtttctccatgtttcctccacccactggccaccatccctgtgt

SEQ ID NO: 29588 - DNA, 675 bp, Zea Mays
ctcctcgtctccgtccgtcgtcgttctcggaatggtacgtacggtcggcgtctagctcctcatttctcaatttgaattcatctgtgcaatttctctctgccaaaatttcaatctgggtgaggaacaaaaaagagatctagcgttatttcggccgaaccgatacatttagtattttattttatttaccgaaataattatcatataccgtcttattattgcattacataagaactttgtttttatatatattgtgatgtatcatatggtgaattattggcatgaacgcacaatgtagtatacccatcgattgctcctaattgcctgcttgaatttggatggtttctaaatgcatatacacagggatcagtgcaacttcttcaaaattccctaggttctccaggctctcgcccactacaatgccaggcaccctgtatgtctgccctttagtactagatcgcaaatatctgcattatactgcaatgtcgtggacatgacctagcttaattggagtatgcattgcagggtggcgagttcgatgatgtgaagcccctaaagcagagccgcgtgggattccggggccaggcatggttccatatcaacttctgggctcgcccccgcagcagcagcagcagtaataacaagacaatcaagcgcttctttgctgaggtgcactac

SEQ ID NO: 29589 - DNA, 303 bp, Zea Mays
ttaaattagaactattaatttgttgctgctgcagatgccttgggtcacgacttcatagcacagaacctgataatcagaaacatggtagggccggaaaggaggtaggacatggcgctaaggtcaaattagaacaagtcggtcgtctactggtgcagcatggaaggtcatgaggacaccttgtacgtggagaacaggatccagttctacctgcagaccttgatccggggcaccatttggacttaatttgtgtttggcaatgcccaggccatgttccagagctgctcgctgctggtgcgccgccca

SEQ ID NO: 29590 - DNA, 353 bp, Zea Mays
acttgtcggcaaagaaatcgatgatgaacgtgatgcagaccagtgagagagggtgtcgacgcagcatgcaggtgcagtgcagatcaacgagtgtgtcgacgtagctcgcaggtgttgaacagctcgcagatcgtgcacacggactcgacagcgatgtagatgcaacggcgagggtcgacgacgaacggcgacgctgctgcccgaagaggcaacactgctgcaaccctcgtgcttggttaagaaactcgtggcagacgatagaagtcttgggagggtgaggttgtgtgcgatcggatggccagaccaacagtgtgtgaggcgaagatgatgacagtgatgtcgatggcagaacc

SEQ ID NO: 29591 - DNA, 355 bp, Zea Mays
ggcgagccctgacctttcttgtccttgcccatggctagatggaaaagaagagaaggttgagaaagaaacaacggacgatcagaggatgtgtgaaaataacaacggagcaaacatgctatttatagagaccggtggcaactgttcatctcataccacgcccaccgaatagtccaagtattcaataagcaattcaaatcgcctgaaggcgagtcaggcagcagacgccgcttcgcgtaacacgacaccatttggactaagatcaactgcttgggcaatatgattatgcccaacggtcacgtcaagttactactccaggacaatgtgctaaacgctttgcgtaccaagacgtcccttg

SEQ ID NO: 29592 - DNA, 315 bp, Zea Mays
caggaaggttgctgtcggtaaggcgggtggcgacgcggacaagcataggaagtatgcccaggcgtatggcagaggaggcaacggatgatggaacggcagagggcaacccggtggtgaggtgagaggcacttgaagcaccgtcctttaaaggtctccagagcttgaataccaaacagcctctccaggcggcgcctctgcttctgtgtgtggtgactctccacgagtgtgaaaccttcacgatccaccaagggcttctggcgcatgggctgaaccaaagagtgcagtggggaagaccgacggacgaaccgtccacca

SEQ ID NO: 29593 - DNA, 273 bp, Zea Mays
agataagaatttcctaggctttttagcttcgtgtaaattgtaagatgtgtacacttgttgtaataaaggaatgaaccccataccacccctggcttgtaccaaaaagaaggaaataaaaatatgtcacgttttcttttccattagttgccctaggactttttaatctcgggacgagattcttttatgggggtaaggatataaaacctttagtgttactgccactaaaacttgagcatgacatcataagcattggcacatcatgtgtttgttaca

SEQ ID NO: 29594 - DNA, 478 bp, Zea Mays
cgaggacgagctaggcctctttggtgccttcatgggtggtctcctaggcggcatggggacgagatgaggcctcgatcgatgttccaacaccaagcttcaccgcgttggtagcggtaaaaaagggttcgtgggctcggcgcttagtgctgaagcaagaaaagatgtcaagaaaaaagcctcacgcataggaaaactatatttatggttcggcagcttacccgaattagggcacaacgaccgacctcggtttccagttccacaggccccgatgctctgccactagcgtcggtagcggggcagcagccctctcctctgtggtcctcggagttggtgcctaggacaggatgatggccaagtccaccacaggccctaggacgaccgcgtgggtgggttaacgggctactcctccgtgttccctgcagtgggtgtccacagggggaagtcagcctgcatccccacaggctccacgacagctccc

SEQ ID NO: 29595 - DNA, 548 bp, Zea Mays
aaatgacttggttgaaaaaaattggcatatgcataatagtaactctctccccctggcagatggcttcggataaaaccacgcctaccacctccaggattggagcagggtttcccctaagagctgaaggagaagccggtggagaagggagtgagacccacctccccgcacctctggagctacctttagattaccccaagttctagccaacaaaacccgactcattgaggtcctcactagaagtctggagaatcaacgcccaaatggtggaagaccacaagacaggatgggagattttctgaggctcaagcctcccacattcactggatctagcaatcccctcgatgctgatgattggctgcgcacgattaaaaggaagttagaagccatcggatgcccggagaatcagcgtgttcaattagctgctcatcaactttccgggatggccctagcttggtgggataccttcaacgctgccatcaaagatgctacctgggcagagtttgaaactgccttccgagagcaccatgtgccctaagggattgttcagc

SEQ ID NO: 29596 - DNA, 966 bp, Zea Mays
ggaaaattggtttgacaattttaggatttttctacaattttctataattgttggagttctgctggaaaaagaaaaagataaagaatgaacagttcctgggccgatttcagcccaggcagcccaacaccagagggaaaacgcgcgcacgcgcgcccgcggggaagactttgcagaagagcccacagggttttggctaattgtacatgggttcggtcactgttgcactgagccgctgactgtttgcagaaaagacccccggtttctatttcttctcaggggaaggtccccgacgacggtgaacgcggccgagctccggtgagctagcagaccggccaaatggggcaacgactggcgttcccgagcggcggacatcaaatcagacctaccccgagtatttcccctaagttaattgcacagttggtgagctatcaagctctgtccacgtgaaccgagggggtggcggacagatgagtgcgttcccggtgatccctggcggtccagttcaattagaggggtcgaggggcatcaccagcatgcaaagatgctagaacaggggcggggagggtatgaacagacctgtggagggctggccacggcgagcttggttctatggtggcagaaacttgatttgggggaaacaagaaattcgggcacactggtgatcgattgctagcaattcttggtggctgggtagttaatgaccttgcggaactggtggagggctcagtttatagggagagcgagcggtggtgatcaattcggtcgagccgtgctggctgccggagatgaagaagaaccttggcgcagtgaattcgtgtccaccgtcgtggcaacctccccggcgacgatgggacagctctagggagtcacggcgacgcggtggaaaggcagagccacgcggcacacggccgagaggcggcggtcaccggtgaagttatcggattccgctgcggtgaacctggtacg

SEQ ID NO: 29597 - DNA, 586 bp, Zea Mays
cctcgaacccgcctagctgcgtggtcagctctgccctatacatccccgcctaaaaaatacctcggttgtgttcgccgttgttccctcctcccgtggagctaggatcgatgagttcagggaacgattttgctagatgctggactccgtccatgcgcgtcgccgtggctcggcggtgggaaggggatggatcttcggacccttggatcttgaccaacggtcacgattaggcagtaggcgtacctcttcacgtgatcgatccggaccattgatccagtggagaacggctgagaatagatgctttcggtgatttgatccgagccgttgagcggatcgaatggtccatattagatcgtgtcccgttagatactgaccgtagatctgggatcctgtggtcgcgagcgcgcaccggttcattatatgggccgatctaatctaggtcgttcgtgcccgatcggacgactgaaaccaactcataccctttcgccctggtaatctttcctaagagccctcctagaattttaaaaccaacccgcagtccatctgtatacaaagatcattaccataaggtccttattttctccaaaca

SEQ ID NO: 29598 - DNA, 306 bp, Zea Mays
aactgtgaacctcgatcaaacacgatcttctttggtactccatgtaaacacacaatacgaaccatatataactctgccaattaagataccttataagtagttttgaccggaatgaaatgagtcattttggtcagtctatccaccataacccatatagaatcgtatcttttcgaggtgcgaggcaatccagcaatgaaattcatatcaatctcttcccatttccactcgggtatctttaatgggtataatagtccagctggtctttggtgttcgggattaaccctttggcacacatcacacataacc

SEQ ID NO: 29599 - DNA, 1368 bp, Zea Mays
cctcgagcgtcatggtcgggtatctaagcttgaagtcttccagctgctcccaagaagtatccgtctctgctcggcctgtccacttgatcagaacttcccacacccccaattcagccttgcatggaggactttttctggtgtagggatgactctgccgatgaggagctcgggcagtggtataacttgggttggagcctcccctatgaatttcttaagtagagaaatgtggaacacatcatgtattctggccctaggaggaagctggagcttgtaagagacagtgcccaccctcgatagcacttgataaggcccaaagaactttgagccaagcttgtgaggtgtagcagaagtgacaccaactgttgtgcgctgctgtaagcgtagccatacccaatcgccctcatggaactccacttcacgtcggtgcttgtcctggtagcttttcattgtaacctgtgacatcaatcggtcacgaatatccgccaagaattcatcgcgagcatgtagttgtttgtcaatatcagccacctgtgatgttcctggatggtagggcagaagagcaggaggttctcggccatataccaccttgaatggagagcatcgaagagcagtttggaaggaagtgttgtagcagaattcagcccatggaagccatttaagccactctcttggtctatcccctgccaggcaccgaagatacatggtgataattcgattgaccacttccgactgtccatcagattgggggtggaatgctaaactcatgggcaacttgactcctgccagctggaacaattctgaccagaatgtgctagtaaatattgtatctctatcactgacaatggagtaaggcaacccatggagacggacaatgttatcaaagaaggcctttgctaccgatgctgctgtgtaagggtgtcccagagcaataaagtgtgcgaacttggagaaacaatcatcaaccgtgagaatcaccgacttgtcgcccacttttgggaacccctcaatgaagtacatagaaatatcactccatacttctgaaggcactgatagaggttgcaggagaccaccgggatggagatgttcagttttattgcgctggcagactgaacaacctttgatgaactccttaactctctgtaatgcatgaggattatcgaatgacgaccggaacctgtgaattgtcttttggattccttcatgtcctgtgtcatgggcactggcaatagtatcggccaaagagtagaggcatatggcacatagactttaccttcgaaaaggagcaacccatccaaatctgtccaacccgatgaaacagtgtcggcagcaagctgctggcgcacatcttggatttgtgggtccgttgca

SEQ ID NO: 29600 - DNA, 316 bp, Zea Mays
gttcagtgaaccggccggcagcgactctgcacgtggattcatgccggcgaggtgattcgtgcttactcaggcccagataacgccttggggtagaaagatcttcacagctattgagctaggggcactgttccgtccggccgccgtgtccgcttagccccggtcgctttggatctaccctcgtcagagttagacacctcgcggccttgcgccatgtgcctcggcactttaaccacaccgccgtgactcatgtaacttatccagtgatcgccggtgaggttgccacggttatggacaccaatcgtatgcgcagtgcacc

SEQ ID NO: 29601 - DNA, 333 bp, Zea Mays
agcagaggaaagacaagaccgacagcaccaacccgctggggaggacaaaagacacgaactctccagcggcaaattcaccggggtggagggtgccgacgcaaatccttccaccgaacgccggcgcatcccatccaagtaggcggcacaccatgtcgagcacccactcagtctgggcatgctcgagatgaacttacaaggccatggtaaactatggcgacacaaagcagaaaccttgaaggcaaaggggcgcagaaagctcgaaggcgaaggggcaccgcgagtgggaaagaagcaaggcatggcttctactcaagggatgaacccctctttaaa

SEQ ID NO: 29602 - DNA, 415 bp, Zea Mays
gtcagtcagcactcagaaagaactgtttaatatcatcaatcagttcaaatgaggaatttaaccttttagattaacatgttaatgtcaatggtgacagtagtttgcagagtcgatctctcttgctatccaagttgtgtaatttgccgtgttatccactttcatgttagtgcaaatgagttgatgaggaaatggcttgtacgcttatgtgacacattatataactatgatggttacaacaaagtggcgtacctggaagcagcagttttggatggtcaaattactgattttctggatgataacactgagtgatctctctcactggcctgggtgttggggtgtaaatcatgtcagttttcgtcaaaccacttactaatcgtttttaacaatgttttcaggtattgcctatcaggatcat

SEQ ID NO: 29603 - DNA, 366 bp, Zea Mays
caccagccctaagaggcggaggggggagaagcttcggaggaaggtttggcactcaacccaggagattgttctgcttattctatggggaggataaggaacacacaacaaggatgtgccaagtcacgatccaaaagcagaaggagatcgctgaagccgaagcgcgacaaaattagccgaagcaggtcttgcatactgcttcatgcaattcgccatatatccctgaatatgtgggcaaccagcaacccacgacgtcggttacttcggcaagtcattctcaagctgcttggactcagttaccaccaccaccaccactggcacctaccttggttcataaatagcagcgagaagggcatcaccaggcgcaac

SEQ ID NO: 29604 - DNA, 520 bp, Zea Mays
gtgatatgtcaaacgggttcccgatctttcgatgaaagctggggataactcgatttggatagttgttgttcttgctgtgccaagaacaaccccgaacctgcaagcaaatcgaagaacaagcaagaacgagtggacaagcaaacagcacacagtctttgcccgaaggatgaatctcttactcacgaaatgaggttctgaatcgagtaaaacaggtgctcaactgagtcacgagtttacaaggaagaagcagcaactttctttcaacaaaacaaaacctggggttcagggtgaggactacagtagcgtttataggtggacaagtgatttgggggtggaaaccctaaagggggcgcgcccctgaatgggctctaaaggaacacagcctacaacccaggttggatggctcgacttctcctggactattctgatttgctcgctttgaatctgacagtgaggactagctcatttgaaagtagacttcctgatctttccaacatgtccttaatcaccttctttggat

SEQ ID NO: 29605 - DNA, 383 bp, Zea Mays
gtgaataccgttgctgattcctttgaccacgatgctgcttgcattctctcgcgtcggatcgtttgcccactcgtgctcagcagtggagcgtcatgtcggacgttccatttctccttgcctctttcccttctttcccactcagcagtgcggctgctgtttctcggcaccattaatggtacgtttacagccgcatacgcattcaatcggcataaactctagcgtgattctctctcctttattgcctataaatcaagtccagcaacaaccgtgctactcatccctgctgtcgcacctcactcgcgctcactgccactgcattgcgccaccgctcgccagaccgtccgcatccgtacaccgttcgtcgccggagttcgtctacgctg

SEQ ID NO: 29606 - DNA, 483 bp, Zea Mays
ctgaaatgtattgaggctactagcgacgagttacttggggcatatactagagctgaagatgatactttgtcctcagccttcgggggtcggggcaagaaaaggttgaacagggtttttgatgcaattggttttatatatcctgattattgctatccctcacgaaagcagggaaaaaagaggaaaactaccactttggccatctctgttgtgccaaagtgcaaaaagatcaaggttctgacacatcggccgaggtatattgagacgaccacagtgccaaaatttggcgacgagacatctttcgctgccgaagtggaacaagctgctcccgccgctcggagcgctaaggaatcaactatagtgccaaaggtgcctatagttgagccagtcaaagtcgaagatggtgcggccaaaaagccagagttagaaaaaacaatagtgctgccagaaattctaagcccgccggtagaagcagaattgccgatg

SEQ ID NO: 29607 - DNA, 397 bp, Zea Mays
ctggactgtggtgaggcccagacactggtggcgcaagagtgttgaaaatcttaggagatccccgacgcggcagcagatggatgtgaaaggacccaacacattcaagatgaagcttcagggtaaatgctacaactgcctctcaccaaatcacctagctttttgttgctcggcgcctactcgttgctggcgatgtctacaatctggacatagggctaggacatgcccagggacgtactacaggagcaggcacaattcaacttcctctctgcctgaaccagtgaagcattcaatgcagaataccaacaatatcagctccagacaccagcaacaggcccagttacgacacagccctcttcataaggagcaagaacaaatccctcaacctgcactcaacacc

SEQ ID NO: 29608 - DNA, 298 bp, Zea Mays
aatgggacgcgatctgcttcgagccgtaggatgccaatcaaacgacaccaatccaaacgccccaagtggtacgctagagctaatctggccacccattaatggatccaccgcccctcgtttttcttcttcgacctgatcaccagagcggcggtgagcgcacagcagacggtggcgccgcccggcaaacaccggcccaggtgagcccatgcatgaaaacgagcacaaagagttgctacgcaatgcgacatcatagagaaaagggatccagggattcctaccaggtcttgatgcagcggtg

SEQ ID NO: 29609 - DNA, 519 bp, Zea Mays
atccacacgaacaaccacagagtcaaacacacaggaaactgtaacaaggggaaaccacgcagggcttcgaagacataaaaaaactacagagtaatgcgattggagaaacgccatccattatccgcaaacaccatcatcaccactttctccagatgtctgcaagcatggactagcttctcctttgcatcttcatgcctttgaagcagcgcccaggaacgacaccagtaggttcccctgtagattacctgcatgtaagttttcgggttatcacgatcaaaaaccacctcattcctgctaagccaaagagcccaaaccaaagccgccacccccatcataattagggatttgtcatgtttactgaaacccatcaaccaattcccaacaacgtgctccatatcccgagggatcggcagaccgaaagcggctaacaacgccctccaaatgaaatgagcgtaatgacactcaaagaacaggtgtctgatcgtttcactattagagcaaaacacacaaagcttattc

SEQ ID NO: 29610 - DNA, 584 bp, Zea Mays
caatagctcaccacatgaaaaatggagaatgaagcttctcaactcgctctgacagacacactgatgaaggtggccattgtacagtaactgaagatgatctgaggtgtgttgcacctcgccgccggtgacctcgcgcctggattcacgctggccgtcgcgattcttgccaagcgcaatgtggataactaaggggagtaaaagatcttagcgcccagattggctcggactcggtcactgttgaattcaccgtacccacttggtcgcggctggccggaatgatcttcgccggcgttggccgcttaccgatcgtgcgccacgtgcctgggaggtttaacacgtcgtagtgaacccttgtagcaatcccgtccatcaccggtggctttgccacggtgaaagccacgatagcgctcgcgctagtgacttctcctctctccggccgccaacacaacttctcaaaattagccgccaccgctctcggacactataaattgatggtaccgctagctccgttgggttgtcacgaagccagtgcacccgctcgtacctcagatcgtctaccaccaagctctaatttgggatttccc

SEQ ID NO: 29611 - DNA, 334 bp, Zea Mays
ccaagatttcctcagcttctcgcacctctcaaacaaggccatacaagtggaaagggctagagaagaagaaaagggtcacctcaagaggaagtttcaggtccttcgagctcagcagcaggacaggcaccagagagttcgatcttttgggtttcctcccaaaggaccaagcttcaacaaaccagcagggtctgctccatcacgtttcagtcagtagggtcaaagttccctccaggccccctccgtagcaagcaaccaacccccagccaatgcctgttggcactgcagagacctcagtcacttcaagaataattgtcctcagttgaagacattcgtg

SEQ ID NO: 29612 - DNA, 327 bp, Zea Mays
cgcattcgttgatcttcgcgcgaacgggcgagattagaagtagggtagcgattcaccgagttaaatcctagccgttcgactgtggatggacgtatgtgatgggatcgcgtagtattgaactcgtggccgttagatctggatcctaaggtttagatcgtgtaccggttcacttaaatgggcgctataatctggggcgttcgctcgtgatccaacagctgatgcgtatccgtaccccttcgaccactctagtttgctaaagagcccccgcagtttatacaaaataacccgccgtcctgtagaatagttctgtgtcttgggaaaacttgc

SEQ ID NO: 29613 - DNA, 286 bp, Zea Mays
ggagaacttgagggtagctcaaaccaggcaaaagagctatgctgataatcgaagaagaccactggagtttgaggaaggtgatcatgtgtacctcaaggtgtcaccacttcgtggaatgaggagattcaaagttaagggcaagttatcccctcgttttattggaccattcagaatctttaggcgagttggggagatggcctatcaactcaagctacctgataatctatctgatgtacatgatgtattctacgtgtcacaactcaagaagtgtctctgtgtccctgag

SEQ ID NO: 29614 - DNA, 349 bp, Zea Mays
ctgatatagctgacaactcaggttgtacatgtggtcttctggaaagggcatcagctgcactgttgtcagatccctttttgtacaatactttgtattggagaccaagcaatttagtaaaaaccttttgctgccaaggtgtgtgtagccgctagtcacacaaatgagacagacttatatggtctgttttgatgataaactccccatattgcagatagggccgtcactgctcaacggcaagcaaaattactaggtattccttctcataagtggataaacccaaagttttagaactcaatgccttgctgacaaatgcaatgggatgatcatcttgcatcaaaacagcaccaac

SEQ ID NO: 29615 - DNA, 462 bp, Zea Mays
ccactataatgctgttgctgtcctctcactttcacacgacgctacaaaagactgcaccgacatccatcagcgcaaatcaaggaggagcagtgaactgaaatgcatggatacaatacaacaaacaagagagaaaactaaacagaacaaataattcaataccaaaaccaccgagctctgactggtcgttgcctttaatttcttatatatacatacacgtattcaaagatgatgacgatgatgataatgatccatccatacatacatacacagtacgtatatacaatacaatacatgcatgtatccaacaaacagcccatcatccaacacacgaatccaatgcaattatatatgtcctgtatccagcagagccgatcgatctgaatagaatagtttagtgatggcgaaaggcatcgtagctctatgatgatggtgatgatgagttcgtcacccaccaccgtacgc

SEQ ID NO: 29616 - DNA, 300 bp, Zea Mays
ctacaaccattgctgaccgaagcagcgtaggtagatagcggcgtcagagactcatggctgatggagtcctgaaacctatgtctcctgcatccatcactctgatatgcacacgagtgatatagtaacaagcccgagggggtcagacaatcgtcgtgtgtcatagagaggtcggatgtaggttcctagtgcatgcagtacattctgtagtaggtttgggaagtatctcgtctcgaacattgaagtgtaatgctcggtgacaggccacgtcccaataaagttgtcctccagctcattgttggg

SEQ ID NO: 29617 - DNA, 397 bp, Zea Mays
cactcgcggaacttgtggtggaagggaaagccgtggttttggcatggtgggtcattagtttatggaagtggtcgccccccatttttggtcggtgacctaggtggccgatccattgtggcaacttcttgctcgtcgcgtcgaggacgatgattcatcaacacttgtcggggtgctcctgacgttccttcttctcggtgctgggctcaccgatgtcacatgtgatcttccctttgcggaaaatagcacctaccacatcctccccataagcaaacttggtctctatattgaggaggtcgacggtggtcttcgatcgccgtcgcccgagctcgtggacaagcgcctcgttggcggtgccataagtgaaggcacttactacatcaacgtcggtggcattggg

SEQ ID NO: 29618 - DNA, 569 bp, Zea Mays
gttatgttattgtctgtgctagtttgacattatctgaagaggtgctatgccaatcttatttacttattattctcacccctgtggctgcagctatgccgcctcgtagggctcggtgcagtccgcaagttcctagtggggactcgatgagtccggcggcaatgttagccgcgatgtaggccatgtagcaggagttggccattctgaggcaagctattcttgtttcccctgcgggtgctacttagggtgctagtggtggaggagtgcccgggggcgctatccctacgggtgctgctccaggtggcgggggcgaggtgcctcttccagtcagtggtctttctctgatgcagtggctgggcatgaagttggatacatttgatggcagtggtactccggtcgaggcggcagattggctaacttacatggaggataagatgaatgtcttcgagattgtgtatggtgatcgtgttcgctttggcacacaactgctgaagggagaagctcagatttggtggaggggcgtgcaggcagctcactcctcttcaccaggagtcctgtcctgggatgttttt

SEQ ID NO: 29619 - DNA, 383 bp, Zea Mays
cttcaagcttttcccatgtggcgtcatcttcagccaatccacgccactgtacgagaacctgccacacgccccgcctaagttgagcgcgaagcaccttggccggcacaggaagcagctggccatccatcatagggtcaagtgtccccggagttgcaggaggatccccacggtgcggcttcagcaggctgacgtggaagacatcatggatgcaagcaccatctggcaactgcaggcggtaggctaccgatccaatcctttcctggacacggaaagggccggcgtagcgaggtcccagcttccccttcgcgcgagggtggagggactgaaaggtgcggtgcagcaggcgtagccacacccagtcgcccacctggaactagaccttc

SEQ ID NO: 29620 - DNA, 336 bp, Zea Mays
ccaagggactccatgtctggcacagaaaaaactccacaagtgttaatattttgccatcacttagagcaactatacatgtgagaacgattctgtttccatgcttagcacatatcaccaccgtgaaatctgcacatcacatcgtctattaccaggagttggcatcaggactaaagagtgaaatacttgacaaattgttaggcctaaatgtgttaaattttgttatgagtccagtcaaggttagtagccactctgcacatagacagaaacatgatccccattcacctctactgggcaaaatagttatactgactctgtcaaaaattaaaatttgtttta

SEQ ID NO: 29621 - DNA, 638 bp, Zea Mays
ccggggaagcttcacaggttgagaacaaactgaaggtggacggttggcgacgctaaccgcggtgacagtggtgttcatagacggcgaacccaccattccagacgaaaaaggcagtagaattgaaaggacaactccgcgagcatcattgataccagacagttatggaacataaaccaagtgtacgagaaggcggactttgatagtggcgtggtcactaggttaggagagaacggcgtgcagcgagctccgaccagttaaacgacgacgagacacaagataatttggtcacgagggcgtgaactagtgaaacgtacgacgaactttactaagggtcgagaaacggcaaggaaatgcactaagtcgaagtgcacgacgactgaaagaagagaggaaaaaaggactctgcaattatcagccaccaaaagttcaagaactaagatttagaagggtccaaagttgagaggaattcagcaaaactgaactctgcaccaaactcaccccccatcgttgaccccattaatccacacgattcaaaacaataaggccaaccttgattaataaaacttgttcacagagcatatctctacaagtttgctgcagcagccctaggccaaagaatcatggattaagtgttataa

SEQ ID NO: 29622 - DNA, 508 bp, Zea Mays
ctggtctcgcttcgacctccgaaggacgaaggtggaaattgacggcaatgttgaagcatgtcagaaggcctttagcactgtgtgtgctttcattggcacgagggctttgattcaagaacatatatccttcagggtatggccacttgtggagagctgggatatgccgaaggagaccactgccgatgctagtgagggtggtctagtccgattgaagtataccttcagatttagggagaagtttgatgagctagacgatgactggttgaaatgtatcgaagctaccagtgatgagctacttggggcatactctaaggccgaagataatgctttgtccgcagctttcgggggtcggggcaagaaaagattaaacagggtatttgatgctattggcttcgtataccctgattaccattacccactatgagggcaaaataaaaagagaaagattgccgcttcggccattgcagctgagccgaagggcaaaaagatgatggttctgacccaccgg

SEQ ID NO: 29623 - DNA, 473 bp, Zea Mays
tgaccgatattctcagcattgtggaagaacaaatcagtacacactagatctaaaagggagaaagtttgtattcaagactatgacccctcaacaaatcatggttgaacacttacaaaagaaaactgaaattagtgcagcaattagaggaggagaagagcaaaagaaattgagtgccatccacaattcggtgagtgagtgctacaagccaaattcaagagataaaaagaaagaagagggagaacatctagttacgctagccacaaaatctgagctgagagaagtgaggaacaacccttatcaagtgctatttgtacttgtgagcaaagatgttttgatttctcctaacgacataacatctcttcctagtgttgtgggtgatcttttgcaggactttgaatatgtgtttccacaagaaacactagctggactacctccaattcgagggattgagcatcaaatcgatcttattccag

SEQ ID NO: 29624 - DNA, 619 bp, Zea Mays
ggggggcataaaacccgcagcgacctcttgcctcgcctctctgattccctagtcgagccatcatcctccccctttgcgaattttgaggaagagacgccgccgccatggaaattgttttccgtcttcgcttaaggcgcaagctcgggtcagtgggcttccttggggtacgacggtgatcattgtggcgctcgcgggtggaagaagcctttggtgctgccccaatttctcaccagcaccaacaattgccacggaaccacacttcgtcgtggcctggggactgcaccgcataaccaccggtaagattgcccccattgagttcgccgtaatctccactaccgattgatcatcaccgtgttcggggtagctcgccaaatcgttgatccgtcgttcgccggcgcgctcacaacagtggattggcccggcagcgccaccgcgtctggttgcggcttggggaagacgggggttcggccgttggatgatgaaggaacgacgtggattacaataggtgtacccatccgctcagttggctctcgaccgttgatttgcgcttgaatgcttcagattagatctcgcacaccggttcgggtggttggatcctgatcgtaggatctgatcggac

SEQ ID NO: 29625 - DNA, 359 bp, Zea Mays
gtggaagagaccctctagtgtctctaaaatccgaagtttcttggggctcgctggatattatcggcgcttcgtaccaaatttctacagcattgctaagcctttgactagactcttggagaagggtgttcccttcgtctggtctggcgattgtgaggtcggttattagacattgaagagcaagttggtggacacccctatcctagctttgcctgagagcggtaagcatttcacagtttatacggatgctttgcgtattggtcttggctgtgtgttgatgcaggaaggcaatgtgattgcttatggctcaaggcagttgaggaagcatgaggggaattacgcaactcatgatcttgaattgg

SEQ ID NO: 29626 - DNA, 298 bp, Zea Mays
tctgtatcaatttggtatcaaagaaaagcactagggcatttaccaccatgtactgatcttgcggatattgcggcaaagttggattgcatcttagagcagctcaccacccttggcaatcggatggactcccacgacaagcgcattgcgcggatggagaagttctagtctatggaggatgacgtggacctcaccgagaactccgtgcaaccataataacaggattgtagcagccatggtgttgatggcaaaggcgaccatgcccgggatcccttctgtgacaacgacttccatgaagacg

SEQ ID NO: 29627 - DNA, 788 bp, Zea Mays
cttgtatacaacaatatttcgtctggcgctatccctactcgcgcttcatacggaaacttcaccaactgcctttcttctccgttatatacacgcctatctagaactatgctgcccctccgtccatcccacgtcgcccccgtccgtccatcccatcccaggcaagctccacatatctccacctcgcatcctcctttctccatctctccttcatccattgatcttcctcgcagcctccttcctcgacgatacaggaacttgttgcctgatcttcccctcctcccctttccatcataggtgcttagttctggtctatccagtcgcccctccccaccgttcgcgatggatggacgacaagcacccaaatcccgtcgtgattcgttggatgctgccctaggtatgatttctagatcccatcgaagttctgtgcaagacattcgagggaactccatggccgccagtggtattgctcgacgccatgttcagacagcaccagcctctaatcaatctgcgtccattagtgtcgatccagcatggatgatgcccgagtacaggtttgtaatcaatttttagtacctcagttaggtacttgcataataacctactgctatggtctgctagaatgttgcttcgcagaatgtcttttagcagctgtatgagcatagttgtgcatactgactattgtgaaaagaatatatggaaaactggaatatagatgtgatgcttcaatggccaaggctaacttgaaatatatgctaaaaagaatacaatgacacctgtgaacaacaaaa

SEQ ID NO: 29628 - DNA, 434 bp, Zea Mays
acgactcagcaacagagcgagttatggtaccatcgggtacacgtcgctgatagacgaataggatcggcgaagcgcggtgtggccgcgcatggcgcggtgggggcctctgtggcctcgcgtggcacaggagatcagggtcgcgggtgtcacggtaggaggctctggggccacatgtggcacattaagtggcaaacctacaggaggaaagtgagaaggtggcgctatcgaaggaaccacatggccaagaacaagaagggaatccaactcattgatagagatgggctaagaggtgaaggggaagtgcgactcgtcgaagatgacgtgtcgagagatcaatagacggttagtggagagattgagacaatgatatctcttatgattagacagtacccaagaaaaacactcctatgtcaattgaggcacaagcttgtgca

SEQ ID NO: 29629 - DNA, 333 bp, Zea Mays
gagcatctcaggaagttttacccctagctagatttcaaaagctattggggcggcattgtattctgtaattggaaaatacaccatcaataaaaagactttattctcaaaggcactcgaattgtttattgtcaatctacatgcttactcgacccagggtgaccactataccccacgaacggagcaatcagcttaagtcggcaatgacttaaggcggtgtgacatgctcacgcttacttaacctagggtgaccactatgtcctactaacggagcaatcggcttaagtcggcaatgacttaaggcggtgtgacatgctcacgcttacttaacccagg

SEQ ID NO: 29630 - DNA, 499 bp, Zea Mays
acgacgaggaccctcctcgcccccattatgcaggtcaaggggaagaccgtgtacctagagcagcaggaaggtcgcaagaagcggcgtttggataaagcagcccgagcaactcttgtcgtggcaacagcagcagcagagtaggcagagagaggtggtcagctatagatatcatcagatcagattgcctaccgggtctgtcatctcgcgtctcgacctcgctcctccgctccctctacacctgccgtagctaccactccacctcccacttcgccagctccagtcacccctgagccatccaccacttcagccatacctaccacctccaccactcccgcttccattgttcctcctcccactcccatctctgcaccacccattccacatgcccacttccgggagtgtgacgagaccgaggtgcgaccactggctgtcgatcctcgtctgatcgatctacagcgtgctactgcgacccgggtacatcggttcaaacacgtacccg

SEQ ID NO: 29631 - DNA, 298 bp, Zea Mays
ggaaggctgacaggttgcaaacatcttcgtataatattgaaataagaatatcaataaacataccccgcgagcagatgtggctgctcctgatgttgtgattggagctggagaagtgtagtttgtacataaattagtccaaaacagagatatttgatccatttgaatacaagtaaaactacaaaagcaaaactaacctgttcctgaactcaaaacactgtcactggaagaaccaatcatatctgataacttctttttcctcacatcatctaatttctccaaggatcgttccaatggtttc

SEQ ID NO: 29632 - DNA, 946 bp, Zea Mays
ctcagaagttcgttgcttgataaaggttcttcctttataacttctaaacagggtgtcttgagcctgatacaaacaatacgatctcttactacaaatattcaattttcatgagtctctgcttattgttttgattgattttatatttgtcagtcaaccctaaactttggtttggaaacacgggctccattacttctacatatttgcatagaaagttgttgcttaatcagggctcattccattacatatacctttatcccttccaaatagtgagctcagcttccacaatttgttttccattgttggtagtattacatatttcttcttttgataattgtgcatttttaaaaggcttatgaatgttggatgttttctaaatggtctatctaaatgacattataaaaaaaatcgatccttctcttttctatgactgtgtgcttaattgcgaactaggtatacaaagaaagtaaaagcatgcacatgaaataaatagttgcgactaaaaaatacctgccctatgttctaaattttccgacaattatttttcatgagatgtggtccatggaaaacaaggtcctctacttactgtttttgttgttttttgcagtacattctaaactcctgattagcaacatcggcttcattaacatctacaaatatactcaaaagtttactgcttcgtaaaggttccttctattacgccttcgtttataactacctcgcatggtgcattgatcttgatacagacctttcgagcatcttacaacggatattcaatattcacgactccctgcctattgttttgattgcttttttatttatcagtcaaccctaaactttggtttggaaacatgggcttaattactgtctacgtctacgtatctgctcaaaaagttgttgcttaaacaaggttcattccattacacattcttttatcccttcctaacag

SEQ ID NO: 29633 - DNA, 295 bp, Zea Mays
gcagaagctgcctgctggtagtggcaacgatgatcaccacacagtcgttcttagccgcctgtccaacgtcattgatccgcaggggagctggcctctacgtgcggatgctttcatggtgaagcggtgcggcggtgtcgctgctccgctgccttgctacaccagcatccaggcagccctgaatgccgcaccagcaccacaagaagccgaggaggtggaggacaagtacgtcgtgcatgtgctcgctggcgtctacgacgagaccgtcaacataacaagaaggaacgtgatgctggtc

SEQ ID NO: 29634 - DNA, 397 bp, Zea Mays
cgattgcacaagtgctcgtgtgtgtgatgtggtgaagaagcagtgctcgggctcaatttataggcagatggccggagatggatgaggttcacggagctgtaaacgcgctggcgagctcacccgcgcgagaagagccacgatgagggtccgatgaccgccgattaaccgggcagcgccacctcaagaatttagcgccacgtcgcagaagatttttaccgaggccgcagacccatcctcagtcgtggtggcggtcttatccccggcgagatttttctgaactccggtgaacagtacgccaatcagcccgatttcaaacggcaatttcttcaaattttatgtgacaacctcatcacccatccgcatcaaagttatagacctataaaccatcttcactttt

SEQ ID NO: 29635 - DNA, 565 bp, Zea Mays
agctcttcattcctcagttgcgaatccaacaagccactagccatcacgttctatcccccatcctctgtgatcaacggaattcgcgtgaaccggtttcttccgccgccgtgaagaactcttccgtggccagcactcctcgggttagtgcatacccaattgattcgagttcttgcttgtttttagccccctgttgctctcggagccggccaattggagtttacctgagtctcatcaccggaacacccctctgctccgtagaacgccaccgcgatgccctctctgtcgacccgcttttctactcttgcccagcccaaattctagcgtgtacgtaaactctggtgaacccgtgaagcttacccaagcttcaatttagtcagccatgctttcggttatccagaacacattgatccattcgaccatccgcactgtcgccatgaactggttgattcaaagccccgttagtaaaattgattgaggggaaatgcgcgggaggagttcaatccagtgtctgccgctcgggagcacctgtctttgcgccatccggccagtctaacctcgccggtgt

SEQ ID NO: 29636 - DNA, 306 bp, Zea Mays
ccggaactcatcaccgaagtggaacgctcctatctaatcctatgcgtccaccgcggatccaatgacctgccagtgccacccccaatcctcacccgcagcatgaccctgcccggtgacgcaaggacatcatgacggcaccatggccgaaaaaccctcctagaggtttggctacaccatccccatccaatcggtgctagtagaaattcaaagcttgactaaccagctgaacaagccctcaccggcagatgtacaacaaaattccctatccacggcccagcgaggcgcaacggcgtcgatgaagtactg

SEQ ID NO: 29637 - DNA, 624 bp, Zea Mays
cttagtgcggccctcgacagtctacaagtatactgcaatactttacatgaggaagtacatgtattgtatgatcgactgcacccgaacgtgcctcccgacgctgctgcattgggagccggaccatcgggaacagcaaacgaagggctggatgaggagttgaacctttttaagccccctccttccatgaaccttgctgacgaacggtctcctgcggcaggaaatggagcgacaaaggatgatgaagactagaatagtatagtttagatactacacctttgtaaaataagtaatgaagtcatgttgtacactggagtctgtataattacatttagttaatgtaatatgatggtatatgctggcatgttatatttttcccaaatgtctctttgcctcagatgccatcacggactcgcgcgcacgacggtgcggggacttctcgtggtcgggaagatactcccaacacgccacctgtaccaccgacactggccgaggctatcgctgccttgatcaatgctactgcagataatacccgcttcttgtgcgagatggtgggtaatcagttccagcagcatggtgggagagctcctccacaaggaccgcgtgaaacctcatatctgggattct

SEQ ID NO: 29638 - DNA, 314 bp, Zea Mays
gtccggtgcgggtcacccgcgggttgaaatagaaacatgcatccacacccgtgaaacttcgtgtcgggtgcaggttgcaccaacgggtcaaaatcttcacttgtacccgtgctcgtcgagattccggtttgcgagttaaattgccatccttatctagtgccccccatcccctaggtagtaatgtggtcactagcaagtgggtctaaacacacaagtgacgagcagatggctctgtggaccgatacaaagcctatcgggttctccgagctttactcaacatccaagtgttgattatgataagacattcggtccaa

SEQ ID NO: 29639 - DNA, 502 bp, Zea Mays
ggacaagtacgtcgtgcatgtgctcgctagcgtctacgacgagaccgtcaacataacaagaaggaacgtgatgctgatcgacgatggggtcggtgccaccgtcatcacggggaacaagagcaatgcaacaggcgtccccatgaacatgatggagacagtgagtgagtaactctggcgatggatatttcactgcagttgagctgccatgcatgcatattgtaaatcagaacagaactataaatttgctgctgctgcagatgcctgggtcacggcttcatagcacagaacctgacaatcagaaacacggcaaggccggaaggcaggcaggcccgtggcgctaaggtcaaattcgaacaagtcggtcgtctaccggtgcagcattgaaggtcatgaggacaccttgtacgtggagaatgggatccaattctaccagcagacctcgatatggggcaccgtggactttgtgtttggcaatgcccaggccatgttccagagctccccg

SEQ ID NO: 29640 - DNA, 602 bp, Zea Mays
atgtcctccaaccccattcagcaccagcgcaccaaacatgtagagatggacattcatttcgttcgggaacatgttgctcttggcaatgttcgtgtcctacatgtaccgacaacttcacagtatgctgacgtcttcaccaaaggtctgtcgtcttcggtgttcactgattttcggtccagcctcaacgtccgctcaacggatgtatcgactgcagggggatgttagacagcaatattcattgccttgtatataggcgtgatgcctggcttccttaagcagtcggccagccttttatagcaggtcaggatagagagagatttggggaagagtctaggatggtaaggatcaattagggtcctgatgtttccttgtttaggatgtttccttttgcctctggctcttcccctatatatgtaacagcactcttctctatcaatacacacacaattcatgcattctacttcccttacactaccatataaggcccctgcccccgcatggttaccccttttcctcacaccttagcacctgaccccgccactgcacgccaagctcgccggtgccgacgtcgtgtcaaacaccgcggtgcccgaaggccaccg

SEQ ID NO: 29641 - DNA, 400 bp, Zea Mays
ggggaagtctccaagtccctagagatgattgacacaagtgccaatatctaagacaaagtgagagagcaagaactcgtctacgtgtgtcccccttcgccaatggagtggccactgccctatttatacacccaggggaccgtccgtgacgaaactgagtcttgtatttgaaggagagatgccatggcatctgacctgacggcgaaccgtgcagtagattcacgcgtgttgactctccgtagagagccgaggggtcgtccgtacgcccgagcttccaagggagaggccgcccatgccgtagtggttgtaacagcgccgggggatgggccaaaggctgcttacggggtgcatcatcgtcctggcgcgtgatgatgtcgaattctctgcagcactcatcgagatc

SEQ ID NO: 29642 - DNA, 457 bp, Zea Mays
agctgacctggattgggctgatcacggcggggtgtgttccacggtggcggaaaccgaattgggggaaacccaaaattcgtgagctctggcgaacgattgagggtgggagcgggtgctgtggctttgtgatgacatagcgcaactgacccggccatcaatttatagagggcttaggcggtggcgctcaatttgaccgagcggtgctggtggtcagagataaggaagaacactagcgcagtggattcgtgtcttccgtcgtggcgacttcactggcgatgagtaattatcgcaagccaagcgaatgcgacgtggtaaagtgcttagcacgtggcggacgacggtgatggctccacggcggtgagaatcttatccgaggggtggtgagaaagggaagaggcacggcggctagccggagtggcgtccagctcaccggcggcgaagattttcctaccccacg

SEQ ID NO: 29643 - DNA, 547 bp, Zea Mays
cactcccaagtaacaaaacaactctaaccgaacttagcatttggccgatcgattcctaacccctttttcgtagcaccaccacaccacacatcgcaaacatagactaatccaatcatacttcacatggcaattatacagagttgcagagtgacaatattaacacataggtaagcgacatttcttcacgactctcggctaagtcaccaaacagatgacatgatgactacgaaggcatgtcaccatttcatcacacacattcatctcctatatgcgcactaatccatttcttgcgacatatgtactcaaaatcaatccacactacacaagtacacttatctcttatttatgcgcagatttaacacctttcgggataaagtgtcactataaacaccttacacataattgctttaggagcttattagttaactcgaaaacacccattcaaagtcataaacacaatcatacactatatgtgaagcacaatttaaggaacgcataacgcgtatagactcgacttataaacatagaggaagcaacaactactttg

SEQ ID NO: 29644 - DNA, 351 bp, Zea Mays
ggcccgggcagctgcgctacatcgtcgcgaaaccagagccccactcccaccctcaatcgttctccagcgttcaccaatttcggattctccccaaattaatttccgccaccataacagccgcctctccgtggcccgcgctcctcaggttagaacatacccaattgcttagtgttctagcctctgttaagtaccttattgctcgtgaatctgtccaattgcgccaaaccaccttgggtagccatgaacgcgagcgaatgtcctcgcggctcacggttaccgtgggtagagagttgtagggcagtaattcagaaattggtttgggggaaatgcgcgggggaagttcaatccggt

SEQ ID NO: 29645 - DNA, 286 bp, Zea Mays
gtgaactggtgatggatgctgtgctgtggtctgtgatcgaagaaccggaggcctttttacgtggttgcctttattgaccaacgacccccggcccatgtgtgctactgtaccatgtgtgtgtctctactctgctaggggcatggctgtcctgcacaagatgttcccactacactacagtttccatttctgttaagttgctgcagtacggcatggttcctcatttcgggcaacggcaatggtgactaatggcaagagttacacacggcacgcacggactctcattggc

SEQ ID NO: 29646 - DNA, 360 bp, Zea Mays
atcgggatagcgaaaatcggctcttgtagccgcttctcttgaggaagcgctgggagtatggatgattgctttggcaggccaggcagagatggattggtctcgtcgttgagctctgtttgttcggaatcagggcgttgcgcagtgataattccgtcgcatttgttttcttcacggtaatgcaaatcagtcggcgagcacgtagatattttgggcaaagttctgcactactagtttctccacttcacagaagttttctaatagcatgtctgcatatgtggcgttcccgtctactaattatctaaccaagatactgatttgggggaaaacgatatgtagccttgtggcatttttacggctttt

SEQ ID NO: 29647 - DNA, 307 bp, Zea Mays
ctagtttcgtctttactccacagccgccaggctgccgatttcatccatgtcgcactgccctccatcattgttctgccatccatgctgtgctaccctccttcgccattgcctcgtcgtccccatatcctaacccaagctctgctttctccagcacatcgcacgcagcaggtatggtgccggtcattgcctggccctcccctctttcttacccttcaaggatgagattgtctaacttgcgtaactctagatattgatggcactgtttgatccatttctcatatgtgttaaaatgttaatatgtgttaac

SEQ ID NO: 29648 - DNA, 378 bp, Zea Mays
ggtcaggcgaaccgagaggaagccactcgagtggattcctcatctggctcgagactgacccgccataaatgatcgaccttattaactacgtctgacaccaagccacagtaggagagtcggtctgcctctcactcatgacctacgagctctgcatcctacaaaacacttatgacctatgatcccctcgtcatgcggcgcactcattacctattaagcctaggcctgagtgcacaagccatctacaggacccacaacacgacgagccacgccgaggcctaggctataaaggccagaggttggtgtaacgatggcgtcggggctccacgccgcccaccattaaggatacagccagagaagcctaaatgacaagggcgcaag

SEQ ID NO: 29649 - DNA, 541 bp, Zea Mays
cttctattcccttcactaaggacagggacacggaggatcgtcaccatgtcatctagtgacgaagcagcctgtatcatctactggggaaaatagtcttgtaattttaatgtttgtactaaacatctgcgcactttgtaagcaagtatatttagacattgcttatctctctcgttttcccccaaaaacataacaatggtggtaataaagtattgactcaagtttaagtgaaactggagaaagaataactgaaagcggactcaagttttttctctgaccaaaatctcttgcatgctttgactacaattccgcagctgcccgtctatctatatctacagcttgcatgctttgctgtgcatggtgttttttggctttttagacatattacctgactattcgttttattcaaaaaaatgcggaaaataaatagttaaacaaaaaaacatcgtctgttttaggagaccgagacaacaatacccctagacaagcatggagaggagtgaagatcctgacgtccatggctcgtcctcatctatgctgaatc

SEQ ID NO: 29650 - DNA, 418 bp, Zea Mays
cgaggagctacatccatcaggaggcctcatcccctcccctccgataggttcctgccacacagcagaaacctgacacctaagcaggggcacaaaccatgcctctgccatctgcaaaagctgccaccagcagttaacaccttctcggccacgaccacgcgcagcaacaccttcgacagctcaaaggttcaaggaagctgcgaaactccaattcttgtacgccctttgccctccagagatacaaggacggccaagggagcccttagaaggagaccggccagtcaaatcattgacccaatggtcaaaccttagatccttagaacatctctttctcctgcccctgttgtaatctctctcaagcattctaacacgaaacaactctctgctggacagagctccatgcccaaacaagataaactcc

SEQ ID NO: 29651 - DNA, 548 bp, Zea Mays
ggtcagaggattctgaagcagaactggacagaacatggtcaggaaacagatcctcccaactagctgaacaaaaaacatgatctgatttaacaagagtaggattttccctctggcttgaccaggtaaatttccttcccttcaaggtgacaactttgagctccaattcattgataagatttctgaaattatcaagccacctcctattgatattagaattgtttttgtcacctaaactgcagatcagaatgaaatctccggccactaaccaagggtccacacatattgtcttgacttcagaaagttcttggaggaaagagtgtctgtgttatggtcgctagatcagtggaggaaagagtgtccacacaacaaactaactgataactttgcagcatgattctggacctctgtgttttgacaactagattatccagaaacccaaattatcagaaaagctcttcagaaaaacatgtcccaaacaggactttaccttttgttcaaaagcttcagctgtttatgctcgaaacacacctgccatgaacaaaaataat

SEQ ID NO: 29652 - DNA, 525 bp, Zea Mays
cgagaagcagcatcagtgcaggaggcggtggaactgctgccgtcgtcctgctcgactcggggaacttggttatccagtcgatagatggtactgccatatgggagagctttgatcacctgaccgacaccgtcatccctggtgtaagtttatcgttgagctcgtctgatgctgctgctagtgctaggcgccttgttgcctggaaggggcctgatgatccatccagcggcaacttctccatgggtggcgactcaagctcagatctccagattgtcacttggaatgggacgaggccattctggcggagagctgcgtggggtggtgaggtgacattcggcacattcgaggacaacaccagcttcacgatgtacgaaacaataacaggcggcacaggggatgactactacatcaaactcaccgtctctgatggcgcaccgatcatacgcgtaagcctggattacacgggcttgtttacctaccgaagatggaacctcaaaacatcctcttggacagtctttgtacaattcc

SEQ ID NO: 29653 - DNA, 496 bp, Zea Mays
gtaaggggcagcctctgcactttcaataagctttggcacatcggccgtcccaataggcttgggcctacatgtcaagaccttggctctctttggtttcgacgcactagaagaggttgaagcagcaattttcctttttcccccttgccttcgcatgggaaaacaataatctatgtaaacaaacccaataaaatcgaagaccctgttcagcctgtttttcccacgagcgccgaaggcaactgtcatggcttcgttttctgtcctcgagtaggctccaagtagctcatcactcgttgcctctatagcgtctagccagtcatcatttggctcatcaaattggcttctgtaccagaaggtgtacttaagataaaccaagccactttggctggagctagcgacagcttccttcggtatttcccattcatttgtaagaggccatctgttggagccttcctctttcgaaggtcctcaaaaacatgactaaccatatgttttcaac

SEQ ID NO: 29654 - DNA, 471 bp, Zea Mays
gtggcgtggatgaccgatttgggggatttccgaattcctgggctacggtggatggcacgatgtggttggggttgcgttgggttcgtaacaagggggcggagcagggagagtcttcaatttaaaggaatcggctcagctactcacggatttgaacgaagttaggatcatggcgatgacaggacatttttactaaggcaagttcactgtggcacgcgatggggcaaagtcctatggcaatcactggttactctccacgaatcacgacgacgtggtaagatggcctatggcatggtacgattgaggccaccggcatcccacgacgacatcggccgctcggccacgtcctagagcaatagagcatggcagatgagctcacgccagagaccatttccacctcccttccgatctttttgcctctagcagttatccacgcgccaccgagcacgaatcataacactagcgtggatcacg

SEQ ID NO: 29655 - DNA, 618 bp, Zea Mays
tgaccatctctctccatccatggatttccaggcgactggtaatgaaattgtccccttcaatttttctgcaatggtagtcaggaacgacagactgaaatatggccggtcctgtttgctacacctgcaatgcctctgctcggcgattttttttcaattccagacggagggtgtgggttaagcttggccttcaccatgagtcgtagtcctccagccattggtatacgtctggtcctagtacaaggggatgaagcttggtactgcgtgtgtcttgtatatgtatttttcaattgggagtggtttctgcaaagtagtatttaattgcgttgctatttaattgcttcatgaactggtagtctcttatgcctagtttctcaagtaaaagttctaagaaatcgacaagactttatattaagactgatggttgatagaaatgacagcactagatatattattgcagacaatgggtatttttccagcctgatggttgatgatactaatcttgaagatttggataataataacaacgcatacgctgaccagcaatcccaatcaatgcaagtcaatcgtgcagtcccctctacaagaccaaaccataaaagatcaaagaattttagtgac

SEQ ID NO: 29656 - DNA, 368 bp, Zea Mays
caataaggagggcaccaacagggaagtcgacgatgtggtcaagtcgcagcgaacagcagcacgaagggtgtggtcgttgcgcagtgataaaattcgttgaacgacgaatggcgatgacgtcgggcgagcagttacaacagtgtcaagcgacaacaaaccagcaaaccaggtggctgacttctcgacgcatgcagcaggagtttcggcgaggtattgcgcagcacggtggcaagcagagatacgcagcaatggcgggcaacagcttacgcggcgcagagtcacaaacgaggagtcgacgacgacggtggtgctgctgcgcgcgtaggcaggggttcttgacgaggtgctgcgtggatgacgaggctcca

SEQ ID NO: 29657 - DNA, 557 bp, Zea Mays
gttcgtttagaaaatatccgggcgaaagggtatctagggtttctgaccgttggatcatcaatctgcgccccagattagatcggcgcggccgtgaaacggtacgcgacgagaaccgttggatgcaaatacgacggggaggattttattattctggatttgattctatccgtccgatctagatcaacggatcaggccgaatgctacggaagggtatgcgatcatctaatctcagcccctgaattctagatctctggcccacggttcttcttctctccgccaaatccacgcgacggctgagcactgctcacccacggcggagcatcaccggcggacgcacaatccgacgcccggacgcccctaacctgaaattggccggtgctaaacctagacggggtgatggcgagcacggaagggagattcttacccgcgattgaaggagtagcgagctcgtccacggttcggggcgggtctgcgacatgaacagagcgctgttgagggattcccgacgctctggtgacccacatcgtttgggaggacaacacataggttcccggtgc

SEQ ID NO: 29658 - DNA, 410 bp, Zea Mays
cgagcatgaagaccatccaataccatgtcctcgatctcagataaggaaatcaaccacatcaaactctgaatgtgagatcagggcaccaagtagccagagatggatgtgagtggtggcctctctataacccatccggggcagtagcgtccgtctcatgatctgatagagatacttggtcgctggagtgaaatctgctagagagcgtcgcgacccatctgtgaaagacagtcagaatagggctgcgacatgagctgtggctggagcgactccgccgtgagggcatcgaggaggatcagaagtgccataacacaggctgtgaaggcgagtcgacaactcaggaaatccaaacagctggcgaatctggctggcatcaatagtgacatcctctcgctcaaaacaaaacctcatcc

SEQ ID NO: 29659 - DNA, 559 bp, Zea Mays
ccgccatcaggcccgagcctttcgcggagcagccaatgccccgcagcaagaggataagaaagcccacggtggagaacgacacgactacaccaagtggcggggtgacggcacaccatgatgataaacgtctgtcgtcgtctagtctatggcaggggcacggcgttgtgtttccctcgggtgagccaaaacgtcgcggctattgcggtgcttctggacaagcgccccaaggcatatactccaaacgaatggaaaacccaccaagagattcaggatcttctcggcctcgctatgcaactacaagccgagagctccatgtctcagcgtcgtgaaccagagaccaaccagtacaccgcgtctacgccaacggtgaacgatgccatgtcatggtgacccctcgatctcgaagaaagagcggcacgtgtccgacctcgccagccccaaaacccgggtcaaagcgcgcagagcgcgcatggtcataggactagggggatgtgacagatcgggtgactctcgtcggtacaaacaatgccgcagaggccgctttgaccccgatgggaac

SEQ ID NO: 29660 - DNA, 362 bp, Zea Mays
tctcctcaggattatttttctaagattttcctaagttttcattgttttcctaaaataaaaggaaagacatttcttttgcactaacagagggtttaataaaattttccagtgaactatactaaataagtgagctagcaaaaatgtggttgcccctggttcttattttacactaccttttctattttctttaactttgagctaaaatgattttaaatggtaaaccctaccttaatttggtgtactgaggggtttattatttttaaacagattagggagtgattaagtacttctctgatttttcttaaccccagtctaacagtgtaactatttttccctcttttatttagcttttggccagaaca

SEQ ID NO: 29661 - DNA, 313 bp, Zea Mays
ccaaaattgctggcagactcccgcatccataggcacaactatgcaatcattaaaccatactatcccttggtcatcctttctaaaacaattagctttgtcaacttctattttctcatgaatatgcttcataaccttgtcacttctttgggcatcaataattttttgcagaagaaatgactcaagctttaattgggtcaaagttccatgttgtatcattcctaggtttaacttctccatttcctcacataatgtgaagttaggggtcttcactgtaagacaatggcaggaagccttgcgactcagcgcatctgcc

SEQ ID NO: 29662 - DNA, 406 bp, Zea Mays
ctgggaagcggtatccggtaaaactgacttggaaagaaggatggttcggatagtttcggctttctcccaggtagactgccatagagcatttttccattccgttctcgagatactccttccagacgtattctggcttcttgcggattcccatgcgaagcgcacaacttcgcaacagatgtgggaacccttccacctctgagcagtaggatgtcctaatggctagagtgtcttccatctggaataggaaaagaagggtctgttaatatcggggaagaggagagaagacttttcttggggtaagaggtattttcttttagggcaagtcttaggatcagggctgcgacctacggccagtcctatgggctccgataccacctgaagcgtccccaatcatttgggactcaaa

SEQ ID NO: 29663 - DNA, 569 bp, Zea Mays
atgcctaggaccgcgggttgatttatcaatactggaagggctcttttgctaatacgtcctgcgaagggatatcgaccaacacgggccacccgatcgagtctggacggacgagattagatccccatcgaatcaaacgggtacgcaacgctgatcctcggatctagatccgatggtcaccgttttaaatagcgcggatcgaacgaagcccatttgatccagatccaacgaatcatatcaatcatgtgaaggggtatctccaagttctaatcacagccgttcgcatcagatcggacggcgccgacaccttcttcttccttgagcccgcgcgacggtcgagccttggtcaggcctgacgagcggcaatcggcggagcactaatctaccgtttggagcgcgacccgaatctacgcagcataggaatgacggcgaattctaaggccataaccttaccgccgcaagaagcgcaggccgagtcgtccacggatgaccagcgcgacggaggagtccgaccacgaggaagtacgacgcggtggtgaagcactccctccggcgagcaattggcggatttc

SEQ ID NO: 29664 - DNA, 434 bp, Zea Mays
ctggaatagtagggatataatctggattccgatcacacttactgaaatctttatctaaagcatgattctctcgaataaagttatgaagacacattgtagctgcaacaatcatcttttgcacttccatcttgtaggtaggcattttcaaaagtatcctccacttcattttccaaactccaaatgcacgctccaccacattgcgaatactcgaatgcaaatggttaaaatgttcttgctcaccattaggagatggccccctcctccaatctggtatatggtacctttgacctttgtatggtgccaaatatccaggacgatttggatatcccgcatcaacacaataatattttcctaccggagggtggggaaaattatcgctatcattcttcaatgcatggaaaagcacattggtgtcatgcatagacccaggctgc

SEQ ID NO: 29665 - DNA, 508 bp, Zea Mays
ctgtatcacacctggttacaaaggaggagagcgcaagcaagcaagcaaaaccagacatccacacgaaactgaaccgggagcagatcagccagtcggccacgtagcggagagtgcttcggcaccagaagcagggacgagaggcggaggcacgggacatcaagaagaccgcgttgacttctgcgacgtccttgtcgccggggaaaaacacatgtggtcatgtggctgagcctgaaattagactccacaactcgacgcgcggacggaatgtctccgccgggcaccagaagcagggaggaagaagcataccagtgagaaggcggtcgccggagcagatcgacgccggattgaagaatttcgtatccgtgccaccgccgtcgcgtgcccttccggtgtggttttcaggctgggatattttccaccccggaaggacagggcgtggttaccggcctggaacgacgaggaacgagcgggatacaacccacgtcgggtttaatcgaaggctcctttt

SEQ ID NO: 29666 - DNA, 594 bp, Zea Mays
cggatgtgttgggttccgccataacagaggttgatgagactgcgtcggatggtggtgaagagatggatttgggcggcggaagtggtggggaggatggcctggaatccggtaccaagatgttgtgacgtgttccaatggagttgaggggtgccggaggcggcgacccctagctgcgcaaggcgtagccaccggtgttggcagcacaaggttttgcccctcggctatctatttttgctggagagtaggtgaggaagataatatgatttattgcttgtctttcctgattacaaaatcctaattatataggcctaaggctaatcgactcttcccccaataataggagataaaactgctaagacctatccgaactaacaaatgagatctagctgctaaggcttatccaaactaacgaactcaatcacaactgattctatctattctaaccaacttgactgatctaatgttaaccactggcctgaccgttcccttatcctaggcttacgtgaataccgtttgccccacatgacaggtccattttctgacgcgcataggcgataccagtcataacattatttcttgtcatgtggacatttc

SEQ ID NO: 29667 - DNA, 311 bp, Zea Mays
gaagctaggagctcacctcctgtaggaacgtgaagtccctacaccatgaggtcctttcggcgactccatgggtcccgaaggcagctctacatcagcggtggtggagcaccactatctccttcggggcatccgactgccccgaaaacatggtaggggctggtatactaccactcatcaccgcccctgtcatcgccaacatgaagcagcatcttgtgttgattgatggtggggctgggctcaacgtcattagccacgctgcgttcaagcagctgcagatcccaggatcccgactgggaccctctcgcccattc

SEQ ID NO: 29668 - DNA, 390 bp, Zea Mays
ccaccgggtgtctttggtctgatctggccatagagatctgcgtgaaccaggtcaagtcctttcttagctcgataattcgccacctaagggaatgagtgtccctaatgcttgcccaatgcacagccatcacatacttcttctggacgatttaacagtggtatcccatccaccattcccttctgtccaagctctctgagtgctctgaaattgagatggccataccggccatgccagagccaggcttgatcatctgtattcgtcttcagacagactggagcggccaggtgcgtcttcagtagatagagacggtttgacacccgcggtgcgcgcgccaagagcaagcgctcgacgtcgtacacattgcagtacccgttctccagtataaccttg

SEQ ID NO: 29669 - DNA, 742 bp, Zea Mays
ctcaagggctgagcaaagacttgcacctgattgccagacagatggggaagcccagaaattgaccgttacttcatcgccaactcatcttcatgctgttattaaattggacccaaataatggtgctttcggtttcgcgtttagtacaaaaggtccagaagagttaatatatgttaatacatggaaagctggggatgaactgaattggatttacacttttcatagcagtggcaagcaaacaagcactgtgggaagaacctcaaaggacaggcatgggtgtctacctccaattgtaggccagatgcatgtgtcttcctttttgtactctagcgttggagaagatggtattttaaagacctcagccaccactgaatttgttttgtatgacattgctcatgcaagacggagttctgctgttgagagaattcaatgtacagatgccattcgaccatcattctgcaatgctgtcaataattcaatgtctggacataccagaaatgatctggtgcaaagacaaaatactacaaggattgactcagatctatcaacatcttgtctctggtctcgagaagatcttcatcctcatttggaggttgctgccattgtaatccaggcaccacttcataaaacgaagtccaaagaattgaaagctggatcgtcacctggtactatcaaagcggttacagcaggtggtgcacatgggttaccaagggatgatgaggcaagcccatcaccattacttgac

SEQ ID NO: 29670 - DNA, 402 bp, Zea Mays
aggtgcagtcgtaagagatgctcttgagttgcaaaatttaccatagatttcaaaactttcataactaggatgaaaaacataggcgacaagggatccccttggcaaaggcctcgatgatgaagtatacagctgccatccatcttctagattaacctccacaatctagattgatgtaaacctatgttggaccatactaggattattagcttcactttgcaatatggaaggtacacatgagcgaagcttatatctaattttctgttgagtttttttatgttatgcatcatagctatgtgatacaacaccaacttattgatatgcagttagcgaagcttccacatgatgatatggatataataaattgtttaggatacttggatggttcaaatacaaaaaaatcat

SEQ ID NO: 29671 - DNA, 377 bp, Zea Mays
aggtgcacggtggtagatccaatttctgtgaattgtgtttcgatttgttggattagttcaccttaatctgcttaagaatactcttggtgtgatatagggtggcacgtatattacatggatctatgcagtatttcttactagtccagttatgtaggaggccgtctagttctacaggttggtttccatagtatatgaccatgttatgttgcatggcagatatgtgaacgccaaaagggtctaggacaatgggtgagtgattttgttttgttctgcaactatttatcttaatgttcttcaacaaaccattgagttaatcaccactgattgtcacaatgatataaaagtttgttgtcagttggtttctgtggaagtgtggg

SEQ ID NO: 29672 - DNA, 643 bp, Zea Mays
cagcgtcgccatcgacttgttgatataaataatcaactgatagtgactccgatccaacaaacgctcatcaggtatatagctatagtttgtgtgcatcgacgaggacgacgaactggcctgatatttccgtgcatgccattgccaaaaaatggtcatttgaaatcgcgacgtcctgctagggaagttgcacgtactcagcctaccgctgcatgctgccaggaaccgatgtgggatgatggttagtttagttctcgttgctgctagttcttacagtacttgtgttagtggtgtgagctgcatcttttctttctttttttttgtttcttcgatgatcaagttggcgtggtggcgctcgatgaccgatcgatgcacatcagcacatgcacctaattctaattcgttatctgaccaccctagctaggcaacaagagcagtgtcggtcgttatcgagcgctctcgacaggtgcacccagatgaaacacgaaacattggaatccgatgcaggggaaatcaaaagctgcaattgtcaattgaactacaccaccacaccgatctatatagagttcctctaaacggccgggtgcatctgatgctttgtttctcgtgccaaattatttagataatgcaacgaaccttctcgtcg

SEQ ID NO: 29673 - DNA, 355 bp, Zea Mays
ggaaggttcagttcccatcccagaaggttgttctgtttattctgtggcgaagataagggacatacaacaaggacgtgtcaagtcacgatccagaagcaaaaagaaatagctgaagccgaagcacgacagaatgagcccaagcaggtcctgcacactgcttcatgctattctccatacattcccgagtatgtgggtaaccagcagcccacagcatcagttgcttcggcaagtcactctcaagctgcatgggccccactaccaccaccaccacctatggcaccaaccttgactcacaatgagtagccagaagggcaccgccaagcgcagcaacaacgtgatacacgtgaaaagttcg

SEQ ID NO: 29674 - DNA, 369 bp, Zea Mays
ctcgagtaatctgtgaggattgcttggaggtttacttagttcctaacgaggccatggacctgccttttgccgaccttcttgccatgtcagatacgctttcattttgtgccttggttttcgatccggccctttgggttggtcaccgaagcagggtgctgccttggtcccgtacattgtttcctatgggcagtgaccgcgctctagcatagtctccaggggcaaacccgtacgaagttgcctcagagacggttccaccgaagcgtggcttgaatgcgcgcaagcgcatcagcatgatgtagccctgagcccttgagcaatatgtgtggattgcttggggttactttttcctaggtgaagatcaagactttc

SEQ ID NO: 29675 - DNA, 337 bp, Zea Mays
gaggaggaaagaattgagcatgacaaataaaatacttcattctcaaattcaaagttaacttctatacctttatactgttgtatgctaggctgtcagcaagatcatccttcgataaaatcgaaaggccatcttctagcttcgggaatcccattctcttacctatctcccggcaaacggatatttctttgttgtccgggagacagtataagaaatcgtcatcgttagtgccgttaaacactaaagctcccttcgaatatttcaactttcgcgcatagtgtctggcttccagaatttcttcttcggacaacttcttccccgaagcgtgtcgaatgatgta

SEQ ID NO: 29676 - DNA, 318 bp, Zea Mays
gcccaatcgttcaattgcactagcatgtcagccgtcccaacccaactcgtgtgtatgtcgtataggaataggacactcctatcctaatacttgccagccgccgcacaacatacaggtctcgagatcgtgagtcgcaaaaaccctaggtcccgtcgccacctccgccgcccccaccagatatctccaccgcccgccgcagtaggtgagttccccgggacaagggaggccaatataacatacatgtgaggccaatacaacatccaatcctgtggatccgtggcccgtggcgttgctgcgtggagatcagagcggtcaagt

SEQ ID NO: 29677 - DNA, 294 bp, Zea Mays
tacccaaccccttcaactctcaacggaacacatgcttacagttttcaccaagtgcacacaacccatgagaacactttgcatttttctaggattcagctatagcaaaaagatgaaaatgggtaatcagaatacaattctaaaaataaggacagccctactgtcggaaggtcccacatgagtggggtctggggaatgtataaaccgagtcaagccttcccctcaaatgtagagagacttctttaaacccgcgacctggtgacttagtgacagcactcaccactgcaccaggcctgc

SEQ ID NO: 29678 - DNA, 771 bp, Zea Mays
ggctgatgactgcatctgttccagcacagctagcgcccaaatctcattgcccttactccacttaacgaactttttagctggtagtttagaaacttgcaatggcgggggaaccacaccttgaagctgaatgggttgtccgtggtgcacacacattagtgtccgatgagtccaatgacactctaggactatgaggagaaagccagtcgtaaccgagaacggcatcgtatgcacccaattggactaatttcatatcagtgcgaaaggtatggccttaggtccaccattccaacatgtacaggtttggaatactgagatgaaagacccaactggttcacaaaagcagtactcacaaaactagtagagcttccagaatcaacaagaattaacgtcacttgattgtgcaccagagctcacagatgcaaacaaccatcacgttctgtaccggacagagcattcagggatagatgatggaactccttagtcaaagcatcctccacagccaattgatttaatgtctcctctgtcaactccaaatcaagatcattcaccacaatagcatttagttgtggcttactacgcttggtacacttgtcaggatgtgtgggatcaaatggctcgccacagaaaaaacatggtccattggctttacgataatcatgtagttgtcgttcacaccacaaaggagttgtggtaacggaacgctgctcaggtttaaccggtgctatagcagtcttatgaggccatatctttgaatgtttctgtcgactctgg

SEQ ID NO: 29679 - DNA, 511 bp, Zea Mays
agaagacataaatatcacaagggtcaaaggtgataacggacaagggtataaaagaaaagatgaagacatagaagagccagtggtatgagtacaacaaagaatggagttaagataagactcacacctagcaaagatgatgttccgaccaagggcgggataagtaaaacacttccctcgaattgagatgagagagagaattttaaataatagacataagatagtcatcaaggtaatatggagagacaacgaaggtaaaggtagtaacagataacaaagggtggagttaaaaactcgcaagcgacaatgaataggatacaactaagggaaaataggtaaccttcaacttttaaaattgagacgaaatagagaaggttttggagcacaggtataatataggcatcaaggtaagatatagaggtgtcaaaggcaaaggtgataataacaaaaggcataacaaaggatagagttaaggcaagactcgcaaaatggcgaagtggagaaaacaatcaag

SEQ ID NO: 29680 - DNA, 644 bp, Zea Mays
gtcagttgtcctcccccttgtcattgggccgaccctccccttttatagactaaggagagggcgtttacaagtggcatctcgtggaaggagttattgtgtcgtggtagaacgaagcattctacctatggtagaaacttgtctatcagtattcactctagtcgtctgagctctccggtcgggccctttaagtcggctgggatgacgtgagtgggtggtgggggacttaggcatcatcattactcctccagtgtcgcgctaacccttggccttcgtagcatgagtctcggtgttcctcatcgtgttgtgggccctgtagatcatcaggggactcagacctaggctcggtaggccataaatgaattatagatctatgacatcataggtcatgagtggggcactggtccaggttcgcaagtcatgaatggaaggaggatcgactctttttatcgtggctcggcgccaagcatatttaatgcggccagtcatttctgacggagataatccctagatcgggtgtggaatctactcgagtggcttcctcttggttcgccccccccctcggctctaccacgtctggccaccgagcttagtgctcgaggttcttcagggatgagttcttctagggcagactcttccttcgtcct

SEQ ID NO: 29681 - DNA, 919 bp, Zea Mays
caatactgcagcgaaccgaccaatgactcgctcacaaaccggctccctctacattgtctagcgcttctgcttctccgcctccgtcgcctcgccaatccctgcaaactatcgcagtgctcttgccaatccgaattggtgtgctgcaatggcggacaagtacaaggcattgatcgacaacaacacttggtgcctcgtacctcggtcacctggtgcgaacattgtcactggcaagtggctgttcaaacacaagctccactctgacggctccctcactcggcacaaggcgcgctgggacgtcagctacgacatgtgctccacaactccatcccacgtgcgaccgttgtctactgtgacaatgtgagcgtcgtttacatggcggctaacccagtccatcaccgccgcacgaagcacatcaaaatcgacatccacttcgttcacgagaaggtagctctagggcagtttcgtgttcatgtcccatctacgcaccagttcgccgacatcatgaccaagggtctgcccatccagctcttcactgattttcagaccagtctatgcgtacgtgatactcccgctcagactgcgggcgggtattatgatatgtatatatcaggatcaatcagagcctgattagcgattaattgtaatctcctagattggctagctgcaattatagcctaggattggtttccatctatagcctaggattgtttccttgtacagggaatagtttcccatctatgtactttccatgcttgactactggctatatataacaggctccccacccacaatgggtgtgtggtgattccctccattcttcccttctacacattcaaacaccccctaagtataatggatattgtccttctaccgacattctttcaaattaaattgttactacctatgcaatagcatgtaa

SEQ ID NO: 29682 - DNA, 316 bp, Zea Mays
cacgagttaactatgatgttattcgacattcacacccgtctcgtgtggtatgaacttattgtgaccacttgttggtaaacctccttttgtgtgttttacccaagatggtgcatctgattctgtttgggtaaactcgcgtatctaccgctcgctcaacagactcagataatacaatgtcatcagaaaaagcaaactgcacatatgaaaccttatgtgttcttctgacagacatcgtctctattggtggacatttctaaattagcctaaggcaatacatgttatgtccactggagaaaccacatcctgagacactcgc

SEQ ID NO: 29683 - DNA, 679 bp, Zea Mays
gaaaataaggataggacactagtctagggtgtagtattgtcggaaatatgatccccggtcccggagcccatcggttagcaagcatgttggggaagaagcctctggcaactgttgggccgctaatcagacagaggagataggttgtgtttgccctggaagaacccgcccccggacgaacctcgcggcattgagctcgaggtcaggcgtggcggaaccggacagggggaccaggcataccaaagggaaaccagtcgagtggatcacacgcctggctcgagaccgaacgtcataaatgaccgaccgcattaactatgcctagcgtcaagccacagcggatgcgcctgtctgccccactcgtgatccacaaacccttcgggccacagagcactcaaggcctacaagccctcagactgtggcgtatttatggcatgcgcgtcccccagccaacaacgcactaatggcctatcgagactaggcatgagtgtacattgtaaggccacaagcatgtgtggctttagcccatggtaagacacccaattttaccatcacgcagtgactccttcttgaggaagccatcatgggcagaccccctccttagcctataaaaggaggaggccgcactccgaactcgggaggtcctttctcgcgggcggataatggaaggacagacctagataag

SEQ ID NO: 29684 - DNA, 304 bp, Zea Mays
cacgacctcagctgggcagacattccatcaactaaagcctatggtcaaagacgaataagcataagaaagataatttaccaataggaacaataaaaggcaagtagttgactcacctaaagattggagaggaatgatggtagacgtaaggcagggggagctatgtcatggcttgacgagagaggatcagcaagaacaatttaaagggcgttgtcaggtgtgatctcagccccaccagcagataacagacctctcgcatccagctcgccgacctacaaggcgacttgtttgttcagatctgtggaag

SEQ ID NO: 29685 - DNA, 294 bp, Zea Mays
ggttgacctcttcctccgtgttgttgaaataggtttctcgccatttcgcatagaaagcgtgtgttgtcagtggtggcattgaccaaggcaatgatagcctcggccatggtaggaggtacaggtggcagattgggagtgtcctccccgcccgtgggatgtacctgccccgtcatgagcacgggttcgtgatggcatctgaggaagaaaacatcctgaattattacatgccaacacaccatctttattacattgcggaacagtaataattatacatactccattatacaactcgat

SEQ ID NO: 29686 - DNA, 506 bp, Zea Mays
gatgcatcttgtgccaaattgttagctctgtgattctcaactctagagatgtgtcgaatactgaattcgtcaaaagaatgaattattccccaccatttttcaaggtaactgtttagagtaccatcaaaacattgatactcttctaatacatgttggacaaccagttgagaatcaccaaataccttcacatgttttactcccatacaatttaaaagttccaagccgaacaaaagggcatcatattcggcttgattgttagtgcaataagttttcaatcggctagagaagtcgaaggagacattacttggtgaaacaagcacgatgtcgattaattgtcctttattgcaaacagatccatcaaaatataaagtccaggattaacagtgaggtatgatatgtctagtttatgagtatcatcaatccgatgttctacaataaaatctgctacgacctggcctttcatagatttcaatggttcataggccaagtcatattctatgagtgca

SEQ ID NO: 29687 - DNA, 950 bp, Zea Mays
agcagggtcttcttggggagaggtctaagatttctatgagtacactaaacaagaacattgtatccagtcagccgccccttgtttcatcatctgctgatttgactattccaaaggtatcaggaaattctcatatgcatgcctcctaatttctgatagcaagacactttgatgtagtggttgtttccattttttatggaatatctgtatccgagattcatgtttgcttgttcccctcatatatatatatatatatatatatttaacacagacaactgctacaccgttgttactagcttcacctcatcagtctactagtgtgtcaacgagtttgcatactggatttctgcgttctcgaagtacctcaggtggcttgctagcttaacacattcatgacaacattagttactcaagccttttaccttttatttacagttacattgtcatgcctatcttttataggattgcctaggcaaccttcatatactactggatttgggattgctttaaatatagagacacttgttgccgtcacggaacaaagagatacaccaattgaggttggttttgttttctgagtttcctcttttgggttaatacataactcatctcgtgctaatggacttttcttaacttagacacctccacctgaagttcaggacaagattctttttatgatcaacaatatatccatctccaatatggaagttaaggcaaaggaatttaacgaggtcatacaggaacagtattatccttggtttgcacaatacatggtcatgaaaaggtatcattctcaattactgattttgtatagatttgtctgacaatgctgaggtatacaaatcacttctcatcttaacagggcaagcattgaaccaaatttccatgatctgtatctgaagttctttgataaagtaaactcaaaatccttgaacaaggaaatactgaaagcc

SEQ ID NO: 29688 - DNA, 377 bp, Zea Mays
cgaactacgcacatcccacacgtctggcttccccgctgccaagtctagctccccgccgccgtcggtccctgtaccccgtcgtcgtttcagttctgcactgcggtgtcgccagtctcgttccctgccaccagctctcgttttccgtcctaggtcccagtcgccggtcctaggttccagacgtcgttctgcaccacaagccatcgtagtaccttgccaccggacctaggtcccaggctccagcaaaaggtagtgtccagagcagacgtgtgtgtgctgggaaagtttggacgtttggcctggttggcggtgaaatatgcaatggagaggagggcagcggcacatctggttgaggacgggaggatgggcaacgagcaacg

SEQ ID NO: 29689 - DNA, 288 bp, Zea Mays
ttcttcttcgctcctccgcgtagatctgcccgtcgtttcttcttcgattgtgcgggccgacggcaccacacacgcacccacccccatcctgcagcagatccgcacggcaccacacacgcagatccccacggcaccctacagcagacctctgcatttcacagtccccaggccgctaggggctagatggctagtcggagcgtcgggctctgccgctaggggtagcgtcaggctctgccgtcacatctaggagacgcttggtgtgaaggagatgtctgtacgtgccatggc

SEQ ID NO: 29690 - DNA, 493 bp, Zea Mays
cacaacgtcgtctgacaggtgggtcccacaaccgtggcatcttctctgtttcccattcccacacatgtgtgccgctctggcatggcatgtgggtcccacctgcaacggtagcctgccattcccatcgtgcaattcattccctgttctgccacactgagcacgccgggcccaccttcaattcctcccatcatgcacaatccattccctgttctaccacaattagcacgtaggacccatgtgacagcctcggcccccgtggttctgccgttctgcctcccacgcctccgacaggtgggcccaaggtgtagctccgcaactccctctcgcacccaacccaacgcatgcaagcctctacccagcgggccatttccttgccatgcaaaaaacatgtctaaatggcctgaaccgttcccaccaacgccattatgccacaaacaagttgacatttgtggccgcatcaacgcttataagccgctctttgtctgtttccctg

SEQ ID NO: 29691 - DNA, 502 bp, Zea Mays
tgccatggagctcctgtttcgccagaaaagtatgcaaggaaggggactactatgaggacctgatgcgctatctccgcaaaaaccttgcagtacgttgtccacatctttcttcttccgatccttaattagtcagttattttaggatatcccgcagaaaagagaaaaatctgtatcctgtattcctgttctgatgatatcttgtttataagctacttgtacaagtaactgggaaacttatactgaacagcagagttcctagccaggcttcaaaacgatcataaacaattttaatctacctgtttccatacttctttctttctttcttcgaaatgctaaatactatgactgaagcttgctcatgtaacacagttcttttactaatattcttaggcccgtgggtacttttgtaaaacatctatatcatgactgccatggaacaatatttttgcagttatatccataccatcttgcagacttcatatgccgagtgatgaggatatca

SEQ ID NO: 29692 - DNA, 581 bp, Zea Mays
attgtctggtttgtgataccagctataaagtattcctctgctgagcacaacaataacattctggtgctcatagttcttgctcagtatcttccaagattgtatctcatattccccttaacttatgaaattgtcaaagctactggagttgttgcaaagactgcttgggaaggagctgcatacaacatggtgctctatctgatagctagtcatgtatgacactcatatgtacttaagtggtttcatcattccgtatcttgatgtaactaattgttagatgtgatgcaaatcattcatctttccccccttttctttcaggtgctaggtgcactgtggtatttgctatctgttgatcgccagacattctgctggaagacgaactgcctgaatgaaactggttgtgatcttaagtacctagattgtgacacgacaccaaatgctacatgggcgaatacgactgctgtcttcagtaattgtaatgctagcgataccaatataagttttgattttggcatgttcgagcctgcattgtctaatcaagcccctgctcaaagttttgcgatgaagtatttctattccctctg

SEQ ID NO: 29693 - DNA, 648 bp, Zea Mays
aaccaaaacaaaactaacgtcaatgtggcatcatctcgcaaaccactccagtgtcctcgatgccttgaccctcgccattgcgcacatgaccctcttctccaactagccgctcaaacgccgccacatcaactgggacagccagtagttgtcccacaggatatccagtagtagcagacacaccatgcaacgtgactgtcgacacgcaacacaacgactagcttcaatagcgcggacgcgtctcggcgtaggcccctgctcgacggcctccctcaccacctcctaggtggcatccatggagaccacacacccagcggcgatgatgttgaaggcacgggcgttcggtaggcacccagcgcgctccatgcaccccagcatccagcatgacagacaagtcacccctgtcagacaacgcgtcgaggtagacgtcataaacacatgcgcacgagacgagcttgtgcatgagaattttgttgaatgccttctcaacggtgtcgagcagtccgcatgaagcagccgctcaaactccaggtggcctagggcaacgccgttagtggcctcccgcctcgtacaacctcgtatgcctcaacaaccactccctcacacaaaagcgcttcaacgacgatgtggtggttgggctaagccggtggg

SEQ ID NO: 29694 - DNA, 358 bp, Zea Mays
ctttgggcgaaattgggagatgggatcggggctataggtccgtaagaggctgtgctttcactgtgcacaatcgatttgggagaaggtggagagggcagttcgaattcctggttgtactcaagcttacttgaagaacagcgagcacctcgccgtggctccctgtcctatatataggcacggcggtccggtgatcgatccactgctacgaggtgggctattaacgcatggcaaccacgtaaggaagaggcacagtgaggcgaatcaaagcatgtgcgacagcgcggcgagagctcactgagtcacggtggccaccggtgaggtctttctggctggactcggggtagggtgccacgtatgc

SEQ ID NO: 29695 - DNA, 497 bp, Zea Mays
cgggttttggacccctaaaacctaggtgtgacacttcttccagattgtctcctccgccaactgcagcatagccaacctagtctcccatggccgacaaagccaaaagctaatccctaactgttgggttgttgcaaatagtatcagtgagacactattgtagattcaaactgaggtttcgatcgagactccacccctttgctgccgcaaccgcatgggactcgccactgtctgcctctggccagatccacacttgtctaggtcagatccaccctcccccaccccagatcatggtccccaacccaagctcgctcctctgctgggtcattcaagctcgttctctaagaaggaggcccaaactcgccactccaccacccgtccatgatcagctcgaggaaggagagcaaggcaccagtgtggaaggagagcacatgcctagcctcaagccccatgttcgagctcgtctactgctcgttctcgaatgcatgtcccaatcccgc

SEQ ID NO: 29696 - DNA, 465 bp, Zea Mays
acttgagctcactggctatggctgcgacgagcaggacaccaccgccggaccgcccacgcgtacgtcagcgcctgagcgtcggctcaaggaagaagaaagagaaagacgttctatcgggtctgtctcggtcacttttggacttaggtgagatccaagcagtgaataaggtcttactatacacactttaaaagtttatggaccggttgacacacccgctcaagttaagggaccgaaaatgcactttactcatcccatctcctttctataccttctgactcatcctgctactactagacctgcctcaagcttggtgtcgcaccacaatagcagcctcaccttcttcagatgtgtctatcttttgtttggtgtcttcttctgtggcccctttatcggtgccttccttggagcctgtttctctagcctctgactacacaagcctccagtgacacatgtctacacccgttt

SEQ ID NO: 29697 - DNA, 290 bp, Zea Mays
gtccaatacagccaaaagttctaaaatgtcccacttgaggtttcttgtcgtgccaggcctcatacggtgctttcccttgtacacttttagtaggtgacctgttcagcaaatacacagcagtagagactgtgattgtattcaacaatatttctttattccatacacatatctgtatgatattatgcacctatccaggaatatagttctatacttctatcattttatacacatgacataccatgaccaaaatgattcaataaaagcagacaagatggatacattgatttaac

SEQ ID NO: 29698 - DNA, 458 bp, Zea Mays
ctccaatgtcacctcctcgccggataccaccgcagcaaaggacgatcactccgagccggctctggtaactgacccggaaccaaaggaggaacaggagccagacatggagatggaaccggaacaggaagcggaactgcccatgcccgagcagggcggggacaattcggggaaggcccctgcggaggaggatgaggagaagccgccgcagctggaattggaagacgagcccaatgaggttgacggcgaggaagatgatcccgaggcggcgaagaggaaggctccaagtaagaagaggaagctcccgcctctgtttagcccgggtgcacgttaccactggaagctttgcggcgccaatagcggctaccactatatcccctgtgtggatttcgatggggatgggaggcagaggcaccatgaacgcagctgccaaaggtctcctgtgacatgtttggtgtcac

SEQ ID NO: 29699 - DNA, 547 bp, Zea Mays
attggctccgccgggttgtcgtggtgggtccaccgtagggccatgcgtagccatactcttggtatggcgtatcgtcttgctcttgtcacacggcctcctgtagctaatacattgctgacacctccatagtagtgtgtgggtggtccctcgtgagcggttgtgcgttgcacggttctgcctgtcgtcatgggcctacgtcaccccgtggcgtgtgtagacatacacctcagtatggtgtacatgttatgttctttcgggtatgcgggtcactgtagagactccggtgctaagacccttatgaccgaggttgactggctccatgagtcactgagggtatattcgtgggcgcatgtgggggtgttccgtcacgtcaaccagagccctttgggtactgtacatacggttcaaacgtgacttggtgatgttacgttttattgcgggcgtcgtgggctggcagcgtcgacctatgttcccttcttgtggatcaacttggcgggtacttggtcgttcagcccgtctcgtagatttgctcgacgggaacttggtc

SEQ ID NO: 29700 - DNA, 279 bp, Zea Mays
gccggactagcacaacaagtgcgaaaaaaccgaagtctaccgcgaagactatccgcgcagaagtcgcctaagggcgcagccggaccagcacaacaaaagcagaaacgacaacatcaaaccgtccgcgccaagaccgactataatcgcaccagcacagcataacaaaacacaccagacaaagtacacaacgccttcgcaggcacagacaagcgagagcacacgactccatcatacaagcctttacacatatacaagcaagggcgccacactctacatcgg

SEQ ID NO: 29701 - DNA, 329 bp, Zea Mays
ctttgaaaaatccttggattgtgtgaagaaaataaaagaaagtttcgccaaagtgggtgcctattctgccgaagagaacttcatacgaggcgaccccgaaggtgttattgaatggataagtggagaggccgagaccttcgaagaaattttaagtgatcgcggggatgtttgcacgttttccggtgcgtggggaatttcagccatcttggagaaggtgggatgtgatcatatcaagaccatggcccaggccgaagctgccttctccgtagacgatacgaaggatccttcagctgaaacaacctcgaagggcggaagattttacaatgatg

SEQ ID NO: 29702 - DNA, 380 bp, Zea Mays
ctctgttacctggagcagttcctgtgaattctaaaccttatagatactcaccttttcacaaggatgagattgaaagacaggtagctgcactgctgaaagctgggctcattaccccaagtgctagtccttttgcttcaccagtgttactagttaagaaaaaggatggctcgtggcgtttttgtgtggactataggaaattgaatgaccttactatcaaaaacagatttcctatgccgttggttgaggagatattggaggagttagctgacactaaatactttacgagtctggatcttactgctgggtaccaccagattcggatggggataacagaagagtacaaaactgcatttaagacacatcaagggcattatcaattc

SEQ ID NO: 29703 - DNA, 332 bp, Zea Mays
gtacaatgctacaacacgtccttgccttgctacatgtggttatgagaaaactctgagctggctcggaccgcgacagcaaatgatataggtaaaaactaagtacgtcagcacagatcactgtacgttttttaatcttattccgaaggtggtgaaccgtgaaaacccactagcccagtaactaaacaagatccttttggacaaaactgtacattttatcaggatcagtagaccttttctatccggaggagaattgatggtgcatgtttttgttattctagcatgtaccatgtattccccagctccagtgccttttgtcgtgttctacccgacgc

SEQ ID NO: 29704 - DNA, 714 bp, Zea Mays
agcatcatagacacatgaggatgctagaacaaaactaagggcgacaggatcagacctgatttgcgctggccgcgacgaggtgttcttcgcggtggcggaaacttgatttgggggaaaactaaaattcaagctctctgacgaacgattgctagtgattttcggtggctgggcgtgcgatgaccttgcggggctggcgggggcttcaatttatagggctcaacggcggtggccgggaatttcagtggggacgcgcggcggtcggaggaggaagaagagtactggcgcagcaacttggtgtccagcgctgtggcaattactccggcgagccacggagagtcgcaacggttcacggtgacatagtggaaacactcgggtacgtggcacaaggccggaagacggtggttcaccggcgagcttatctgctcaagccgcaaagcagggggagtacggcggtgagtcaccggagtggcgtctagcgcatggggtgatgatcttttaccccacgatgctatccagcaactccaggcacgaatccagtcgccagtgacacgaatcgcggcgaaggatcggtcgtcgtcggcgggggactgtcgcgctggcgttctgatcttcatcaggcactgtaccatgggatgctccattcaattaacctgacagccatagtttagggccagatttcttccaaatttctatgacaacacatccagatctctg

SEQ ID NO: 29705 - DNA, 332 bp, Zea Mays
ggcctaacaggaaactgcttttccttgacggtcggtgagaaggacggtcttacttgcgcaacttatgatacccttgtgcttagttagccaatccattcctaggatcacatcaatcccttgggatggcaagacggttaagtctgccaggaacactaccccacttaaaaggattctgacatgggagcacttgagctggcatagaaggtctgaccccggggttcgggtgaccaaaggaatttctaggggtgtagaggggatgccatgtttttccacaaaactagtggctataaatgaatgggatgctcctgaatcaaaaagcacagtagcgggag

SEQ ID NO: 29706 - DNA, 400 bp, Zea Mays
gtgcagccggactagcacaataagtgcggaaaatcaaagtctaccgcgaagactatccatgcagaagtcgcctaagggtgcagccggactagcacaataagtgcggaaaatcaaagtctaccgcgaagacttaccgtgcagaagtcgcctaagggtgcagccggactagcacaacaagtgcgaaaaaccgaagtctaccgcggagactatctgtgcagaagtcgcctacgggtgcagccaggctagcgcaataagtgcgaagaatcgactatccgcgcaacagtccgcgcaaaaaccgactacacgcgcaccagtccagcataacaattacacctgaccaagtacgtaacgccttcgcgagcatagccgaatgtgcgagggcacacaacttcatcataca

SEQ ID NO: 29707 - DNA, 996 bp, Zea Mays
gccaggccctattgcaactaaactacttgctctaaagtttgtggaaacatggattttgtgttgcacacctcaagccaacagtgaccaagtacagccaactgagggtaccattttccagtttaaagttaacaagtgaatgggcaatatttttttgaaagagaatgactttcacattgacaagtacaccttacatacaggaaaaaactggagatttgatacttcacgatcatctcaatttcatcctagccttgatcctgctattttggaagctgatgcacatcgagctctcctcctcctcctggatattctgcgaacagcttatgcccatcgagggtccttcctagttggcaccatcaactcgtaagaatttctaccaactttatcgtatatgttgagcagaagtgatttgttacactcactatcctgccatttcatcctctctttgaactagctttctctgtgtatgaagatgaacctgaatttatttaatgaatggcatcagttcctagctatctacatgtttatcttgacttataaatatgctaacattatggagcaattgaattactttaggtgatcaactggtatcctaccctttttgttacacaacctaggttctttgtgatccactgacattattttgacctttgtgggcttgtgtgtttggctccttgcttgcttgctgcgagcccaggcccagctatgcatgcaggtgtagctatctttgaagcttgagacagtgtatcattttgtgctgtttatcttgcaaagccgcatagctgtctgagatgtatttatttgtgttctgaaatataatatatggcacttgtcagtcttgcagcagttgtaaagatccgaccgatttactatgaccgcgtgttgccagttttgcttgattttgaccctggcttggagactgcaaagggggcacattcagcaagcctgcggtatgctgtaagagcagcttttttggggtttctacggagtccccaccag

SEQ ID NO: 29708 - DNA, 513 bp, Zea Mays
aaaacttatccactaccacgaaaatacagttggctgacccagaccgaggaagtccatcaatgaaatccatggaaattgtgtcccatgctgttttgggcactggtaggggttgaagtttgccgggatacgctgcacgatctggtttggcttgtaagcaggtctgacactggtcgacaaaattgtggacgaaggctttcatgcggcgccaagcaaacaactgtttcagtctgcaatatgtaactggcacgccagaaagaccacctactggcgaagagtggagagcagcgaccagcctgttctgcaataaggcatcattgccgacccagattcgacctttgaaccgaagcaagccatcccttaaaacaaaattaggcagcgccgagggatccacagacagcttggacaacagggactgagcatcaaggtcctgggaataactggcctgtatatcagacaaccatttgggagtaactgaagagatggccgacaattcaggctgcacttgtcgggaca

SEQ ID NO: 29709 - DNA, 526 bp, Zea Mays
aggtgcttttgaagatggaggctttgcactaaagttatgtaaaccatatgtggagccctagtaacctgattggtggacgttgttgaaataggtgacacaataacaattatcactaagatgaacgatgtttgaagtgtaatgattggaattacctcagacaccccatcaaaacatatagtctgatctagaacgggtgagatatgctagtagggactctagcccaagagttctcgagactatattactagggccattggagtctaaagtgtaggctaaggagccatattaactagcaatggtgggactactactctagactattggaacaggttgtgacaatagaccatgttttgagtgtgatctgccaacaactatcgctagaaattgatcatgtctgacctgatagtctcaaatagtgttagcatcatatctatctgcctatgttaggcctcattctatcggtgttgctcctcatgctgcttagcatcacatcttagttcatcatctattatcctctgctactgag

SEQ ID NO: 29710 - DNA, 393 bp, Zea Mays
gggaaatccgaagactggaggctacggtgcacgaaaacgctgatcaaggagtggaatgaagacttaatagagaggcggagcgagggcagtgctcaatttaaaggaatcggctgcgcgtcatgccaattttggccgacatcaaacacggcggcgatgggatatttcgcgggtgagctcgtcgtggcgccagccaatgcaacggctccgaaatggcaagtccgggcatgccatggttactactacatggtaaagggctacggagtggcgtaattgaggtcgctggtgtaccacgacgacaccggcggcttggccacgtcgcacggctacaggcgcagttgataagtttctccccgcgactaaatccaccccccgcgagatcttttactgccccac

SEQ ID NO: 29711 - DNA, 578 bp, Zea Mays
gtcagttgttctgatgaacaatcccgatggtacagtgcacccaaatatctcagatacagagcatctcgccgtcggtgacccttcgccgcgattgacgttgatcgtcgcgattcatgcgccgtgacttgcggataaccgtggacaaggaaagatctcaactcgggaaagggatagaggcttatcgccggactgttcactgtaacacttaccgtgcagtggacagaggtgtcctcgtcggagttcgccgtcgatcgtagccacgccacgtgcttagaagatctaccacatcgcagtagatatccgtaggaggtcagttcgtcaccggagacattaccccgcggagcgccacgatagttcacgccggtgactcacttcacctctcggccatcggtctcccctttcaaaattggacaccaccgcttagtgcccttataaattaatggcctggtctgttgcgccatgttatctcgaagccagagcacccattcccaccttcaattagccaccatagccagagaatttccttcttcccccaaataggtcgactgcgccgccatgaaccacctcttcgcggctag

SEQ ID NO: 29712 - DNA, 734 bp, Zea Mays
tcactattttttcttctaatttgattcactgttgtacttagcacaccacaatcatttcttatttgaatgcccccaccaaaaaaagttgtggaacctgcggaagtgaaattgtttgcttcctgtcttatagtgaaatcatcagttaattttctgcattatttcagttatcaggatcccctattacgctgaaagaaggatcaataaaatccttgctagtaagattcgctgctagctgcgagattgttgttgaagaattggagcttgtgctttctccatctgttgcaagtgaagttgatgatgtgcatactgaatgctctgtctctggtagtactagtgacacacacactttagtcaagatccaaagaaatgaatccgatagtaatcagtgttccacttctgtatctcgagatgtggatgatggtgtaaagagaattgccaatgccgtcaaacggtttctgacaagctttaatatcaagttaaagaatgcctatgtcatatttgatcctcaaaccagtttgagtagtagatttccagaaactagtcgatctctagttttccgaattaaagagttggaatttggaacccaacttggtctatttaaactggacaactttttaactttccgtgaggcagtcattgagtttttgaagatggatgatgtcgacacactgcttcaaaatgatctaaatagaggaacagctgacatttcagcacatcatagtactaccgcagtc

SEQ ID NO: 29713 - DNA, 492 bp, Zea Mays
tttgggcttgatatttgtcgagggcctgcagggcgaagacacggtctccgttaatgaggtctttggaagttggctcgtctacgtcgggtattgctgaaacgcttgtccgcggggacccatgtttgatttccggcggggtcatggcctccgatccgtatagcaggcgaaatggagtgaatccggtcgcccgacactcggtcgtgttcagtgcccagactgcttcaggtagcaggttggcccatttgcccttcttgttgtcgaggagcattttcttgatcgccgtgaaaatcttgccgttggcgcgctccacgacaccgttggattgtgggtggtacactgaggcgaaggcaagcttggtgccaatggagaagcagaaatccctgaagtcttggctgtcaaattgcttgccattatcaactgtgagctcagacgggactccgaaccggcaaacaatgttttgccagaagaatttctgggcagtcttcgatgtta

SEQ ID NO: 29714 - DNA, 318 bp, Zea Mays
ctcggcatcagtcgcctcctagggaccgccagtgcgatcgcgttcgagaagaccgttgggagacgtgtgaagtctctaccctttccacttggcttcgagcgattcaatggtcgcctaactgcaaggtctcgaaagtcgacaagtacgagcccaatcaagatccgagcggctgattagccgtctatacgaccaccgctcgagccgtcagggcagtggaggacatcatgacaacgtacttgcccatcgtcctcggcaggatgtgctgcagtggttccgatagattcctcgccattgcatcaatgactaggccaacttctt

SEQ ID NO: 29715 - DNA, 318 bp, Zea Mays
ggattctgtgcagcacgctgatctcagttcttggctttcacaacgtgagctgatgctgcgcattatcaggaacaacttgctgcgtgcccagcagaggatgaaacatcagtctgacaagaagagaactgaacgcgtatttcaggtgggcgataaggtatatttgaaactccaaccgtatatccagtcctctgtcgctactcgggcaaatcataagctttcatacaagtattttggcccttacgaagtcttgcagaaggtgggtgcagttgcatacagacttcgtttaccagattcttcttcagttcatccggtgtttca

SEQ ID NO: 29716 - DNA, 322 bp, Zea Mays
tccagggattagatctatgtagaattccacttctctttctggtggcatccctggtaattcttctggaaacacatccatgaattcttcaaccactgatatgctttctgctgttagattgaacatcatcgggtcattggcgggtggctgggcctgacaagagactaactttccctggtggtcggtgaggaggattgtcttgcttgcacaactgatgatacccttgtgtttagttaaccaatccatccctaagatcacatcaatccctttggatggcaagacggttaggtctgccaagaatactaccccacttagaaggattctg

SEQ ID NO: 29717 - DNA, 418 bp, Zea Mays
agagaagttcatgaacatgaacatcctggtgataaagacactgaacagcatcggccttacagtctagtaaaccaagcatttgcagctgcagttagtaaggtcctcgaaggctatttctgttccttgaatactttaccagcatcaattaggcttaggcgttcagttggccaatctggtataccttccaagacttcagatggaatgagttgtaattccactgcagaagtcactcttctggaagtttatctacacactgaagagttaagaaggcatgttaaatcccttggaaatatttgtttccctaagtttgcaggtgctacattgtgccatgatggtttggatactgaagcaagtgtggagtttgagaatttcccacggggcactgatttgctttcgtatttgtatgtctatattcgtg

SEQ ID NO: 29718 - DNA, 409 bp, Zea Mays
ctcctcctccataaagatggtctttcccatctaatctggacctgcacgctcaaagacaggggatggacaaggtgcagtctcatcaaatgtaacctcacaagtctccataatgcagttagtctctaggttaagaacacgataagcatgagaatgtaatgcataacccagaaaaactccattagaagactgggactcaaacttgtccagattaccttgttttagcacaaagcatctgcagccaaataccctaaaatgactgaccttgggtggccgtccaaatcgtagctcataagaagttttgttcagaaaagcccgaagaacgatgcgattggacacatggaaagcagtgttgatcgcttcgacccaaaaatgcctaggagtcctatgctcatcaagcatcgtcctggtt

SEQ ID NO: 29719 - DNA, 573 bp, Zea Mays
ctcagtatgtggtaaataccatctaagtggtaaggtgcacttgattgcaccaataagcccaccaagtagaaggaccaaaatgcaagcagcaccataaaacatacagcctatagtcagatggtgaattgagtcacctgagagcactctgtcaccatccattaccccaatccaatgttgacttgatggaagctgctggacatcaaagtgatgggaccttgcaccattccatgcgtttcggcccttgaggggtttgtcaagcacaaatgggactgcaacttccttgtaatgatcttctgttaggacttgaactttgaatacttggatggtatagccagatccaccaccacgatctttgcctacgcgataaagattgtcattgtaaatgaatggcctgcctccatttctggcacttggcctgttgcctgtattacgaattgggttctgcttgtgtgaactccaaggaccaagaggagagctgctgtaccaaataaagagttcacctgtctgttttgcaccataagaacttaaatctgatccaatgagccaataggaacccttggaatgtatgatgac

SEQ ID NO: 29720 - DNA, 477 bp, Zea Mays
aaaaatcttccgcgacgtggcgtataaaccatgaggtggcactgtccagttaatcggtgttcactggacgctcgctgcggccctgcccgcgtgggtgagctcaccagcgcaatggaagatctttgaatctcgtccacctccggccatccccatataaattaagcccgagcgctgcttcttcatcgcatcacacacacgagtgcttgcgcaaaccacccaatttcaccgagggactcagttaggccataatctcctcaccgttcttagcaccgcagtgaaggaccccttcatgggcagccctcctcgggtcagtactcacccaattgtctcttgttttagcttgtatttagcctcctattgctctcggtgccggccaattgaattttaccaaagcccaaacgctggaacaccatgtagtcccgtagaacgccgccgcgtacaccctctctgttgacccgctttcctaccctcgttcgg

SEQ ID NO: 29721 - DNA, 280 bp, Zea Mays
tgtaccgagacctagaagttcctgttcgctgcccacaattgagaggtcccgccagcacctggttggcaaactttacaactgttcaacctaaaggacatcttgtcacgtgggcagaattcaagcaagcattcagggaacactacattcccgatggtgttttacagatgaaacttgaagactttgtgcgcttaaagcaaggaggagattcggtgatgcaatatctcaccaaattcaatcatctctcccagtatgctatagagcaagtggacacggacctgaa

SEQ ID NO: 29722 - DNA, 305 bp, Zea Mays
tggagtggtggtcacatggacatttctatcatactgatatgagggtgttacctttgggggtatttgatgccatacttggttatgaatggttgatggagcacagtcctatggagtgtgattggattgataaagtattacagtttaaggatgctggccaacgggtgaagttgtatggagatggtgctgggaacaatacttccattcagaatgtgtcagttctgcaagtgcagaaatggctcaaaggtcatgaagtgtgggtcatggttctgctagaggaggttaaggagaataacagcactgttcag

SEQ ID NO: 29723 - DNA, 295 bp, Zea Mays
tggaagacatgttgagagcttgtgcccttcagcatggtagtggttgggacaagagtctaccttatgctaagttctcatataatgatagttaccaggccagtctgaagaggtcactgttcgagactttatagggcaggaagtgcaggactcctctatattgggatcagactggagagagacagttctttgggcctggactgattcaagaagcagaagaacaagtccgtgtaattcgagagaatttgagggtggctcagaccaggcaaaagggttatgctgataatagaaggaggcc

SEQ ID NO: 29724 - DNA, 393 bp, Zea Mays
cacgaactgaggagtcccgggcacataaaactgctacggagggggtggtacttaaaattcctgctcagcgcttgacatcatgttgacagtgccctgagacgaggaagaagtcgctggctcccatttgagcttcccattgggatttctcctacacaccacatccttgtgatcctagctacaaatagagcaccttccactccactgacactcggcacgacgatgcgcttcaccacaacaaaaacacaccagccctagctcgggcttaggaacagctcgatacctctgagtactccctcctgaagtacccgattcggagggtttgccaaggtaggggtggtggcactggtgttgtgactttcccctcttgggggctggacccctagtgttgcccct

SEQ ID NO: 29725 - DNA, 384 bp, Zea Mays
gagattttgagatttcttggctcctctatcaaggggggatttggtctttcggtcttcctctcatccaaggggagagatgtgttatttggagttgttggtttctatgagagatttttgggagtattgtgacaggaggaggaaaatcgagccttttggagcttttgctagttgtgttgaaccatttgcctctttctggaggaactaactttgattttagcttttatgctgattttatgctctgaattagtttttatgctgcgataaagctttttgttgctctgatgagcttttggcttctactagtggtgttgagccctgcttttgcctcttattgagggctagccttttcttacttggtcgtgttgatccgttgcccacttcttt

SEQ ID NO: 29726 - DNA, 384 bp, Zea Mays
agagtagatacttcagataatgaagccggtgaagttcttaaagaaaggtcaatgagtcgatgaaagtgggttcaatataggccaatttgatgaacacaggcattgaattatactagattaggctgctgaatagcgtaatacctacatccatttaggtgtgttttcttgttagcgtgctattgtaatgtctatattgtaatgggtctcgacccaccaaactttgttatattaatgcactcccaatcttgattaggattagggttttcaatatgttataaagctagattctctcttccccctttcatgcctctccagccactagcctccttgctatagttgtcgtcgtcaccacatccattatcggtagttgtcctccctcgggct

SEQ ID NO: 29727 - DNA, 347 bp, Zea Mays
gttacgtgcgtttgaatatattgctcagtgtcttagatatggagtcgatttccatatcatcatcgattggcggtggtgtcgactcatttgcaaagttactatcgagaagtagagttgatttcggtcaccaaattttactctgtggtgttgaggcctatgttgttgtgtttcctagcaatcataagtgcatgtgaatctaggaagcaatcaagtttctcttatcttgctactattgatcgatagtgcagaaaaaaagttcatttttagcgatgtttgaaatatgcacccaaacatattaccaaaaggtttgaagtttattgctgaacatgcacaagttgtgtactagg

SEQ ID NO: 29728 - DNA, 276 bp, Zea Mays
gcccagggaatctggataacagggattatggcccctaggtgctcactcccctgggttatcctccctagctgccaaaggagccctacgtgtcctctactgcgagatagtcacgtgggccaccaccactttcttcacgccttcttcactcgtttataaattagagtcaacggacattcctacggtttgccgtcgagtgttttgctagcgtttatttctccaccggtttccacgagtgaagaaattagaatcccctatctcctttgcattgcatcctac

SEQ ID NO: 29729 - DNA, 1110 bp, Zea Mays
cccctcccccgcatggcccatctaccgggagaattccactcacacaccacgcagcccacgttcgtttattctttctttattcatttggccggagcttacatcaccctgacctcagcaatgacgccaactctgtctaagtgacatgtgggcccttggccagccacacagcgtacccacgcctggtggactccaaactgcctggccgagttccacgccagctctcgcccatcggcaccgtaacaaccccacgcttctcggcatccggtgcataaatacgggagctgcgacctgatcctgactcataggctcggtggaaaccaatgtcccatgcccccatattgacccggcgtgaacgttgtggcaagcaagaagtagccgccagggacagcgctcgaagcacaaccatcttctgtcgtcgccgcgaaaatctaccaccaagggatcatcggcgcaagccgccttgaggtatgacactgatgcttgcgatagtacctcatatcgaagccttccacgttcagtcacggcctccgccgcatctagagtggtccgtcagaaagggataggatatggtgaagatgagaccaaaccacaaacggaaaatcaacggctaaattagaaaatgaacatatcctttcagatccctgcgcctagccataaatctttcactggggccccggtaatggcgtgccaccgcgggcgggggaaacgacgccgctgctgggtttctgggtagaagatgagccgtggcagttggatcttgattcgacggtcttgattagatctgggggaaatttgtgcgtgccgttgatctgcggatggacgaccccgattagcgcacgcgtaccctttcactaggattctcccgggtcgccggatcgggatcccgtggcccaggatggtgctgggcgttataaaatccgcggcgttgatttctaatcggacgactcagatggcctcgtaccccttcggccgtgtcaaattctaaaagagtccttgtgttctaacagattcaacccgcagtcctgatggtggtgatctgagtctgtagaagttttataattttaccccgaaactctctggtaattggtgctcggtccagataattgattt

SEQ ID NO: 29730 - DNA, 329 bp, Zea Mays
attgtgtgctggtcgaccattagtcggctcggcggtgcacataggggctgcacacagatggaggacggcaatggcgcagcgagagctttgactcacgtccattagatagcgtgaaactggttgtggcggagcgactagaacgcgccgggatcgaggcatacacgagcagagcagtgaccacaactagcaatggggagcggcatggtgatcgacagggaaccccagcctaggcgttgcggttgcagggagccggagatcagggaagggggcgagcacgaggaaggtgtcatggggaagaggaaagcgcgctggcgagctagagaatcgcg

SEQ ID NO: 29731 - DNA, 324 bp, Zea Mays
cacagattctagccttcacgaatagaacgactttcgcaccggcgcacgactaattccgcgcagcgcaggtgagagcgtcgatgctctgtatgcgctccttgatgccaaatcctccctcgctcgccgtgccaccctctaccaccgcctctctgtgctccacaacaccattgtgaatggttgcctcgatgtccctcctctcttctttgcttcgctccgctctctcaatctccttcctataggtgttgttaatgatcttcactagtaagaatgtgatcattagtgacgattttctagtgaggctggtgacttcagtcacagattgat

SEQ ID NO: 29732 - DNA, 681 bp, Zea Mays
gcccgaggcctggcacctcacttctctgattctctgcctctgctctcgggttcaggcgatttctcccctcaccggcgatctcccctcaccggcggcgactctccggcgaccctgtgcctgcgctcgtcctctccctctctcggtgagctgcactccgctctcctctccctttctctcttgttctctgactaaaaggcagtgaagcccttctttctctcctcttgcgcaaatctcgaatctctgtgaaatccagtgaaaccatgtggccatttgtgttcctatgtgtgccttaaacatccttgcaggtacctagctccttcgggagggttttcatacctcaaatggccatttctctaaaaccttaattcctcgccctccacgtgttcggtgaaatgcccaaaccagccaaaaatgctccaattgaacccaaatttttcaggcaccttcacaacacttccagtaacctacttggcaaatttcacgccaatccgagatcccaggcttaaatttcaccaaatttcccgttttgagcgatcgtttccgagccgagtgcccaaattcctttttcttcgcctaaattcaaaccaagcacacacttcactcattttcacctatataaacctattcgtgaagtatcggctcaattccatatcgtttcgtgcctcaattcgaattccaaac

SEQ ID NO: 29733 - DNA, 401 bp, Zea Mays
ccgacccagtacacccctctactgtgtcactttacccaccctgtcgggctggttcagcatcaactcggtccgccactgcatcagctcaggactccgtagcagccccctgcagttcctacctccccgactgcgccatggactccatggactagatcctgggatcaccagtctctcgccaacaacttcagcaccatgaccctcagtcctcctggcatcacagattgggtcatggattctggtgcttctagtcacatgactcccgacagtggtaacatctctatttcgtcctccgcgctccacttccatcatggttggaaacggatccactttacctatcacaacttctggccactccattatactgggtcccttttatcttaataacattcttgttgccctcg

SEQ ID NO: 29734 - DNA, 300 bp, Zea Mays
cctcatcgaccctagaggtcaagacgagcaatttaatattccgctgatgtgtttctttcatggtaattagagtgacctcctccatctattagctgatgtcctgaccaagaacatgtcaacaacaacctcaccagctagattccatggcgtcatctagctccacactaacgatgcctcctagggcaaagcattgttgtaaagctcaaaaagaccaacttttgctctggaaagtgcaagttctgcccatccttagaggtgcacaactacaaggctatctagattgcacgactgtaatgcctg

SEQ ID NO: 29735 - DNA, 280 bp, Zea Mays
gcaaaatggcaaagctgagcgctctcttcgtatcattaataacacctcacgctcactcttatttcaggcgagtcttcctccggtctactgggttgaggcactccaaactgccacataccttgtcaaccaactccccaccaaaaccctcgcctcctccacccctttcttccacctccacaccactacacctttctatgaacacctcaaagttttcggttgtgcttgttacccaaacatgtcctctacagcagcccataaactcgctcctcgttcatctcta

SEQ ID NO: 29736 - DNA, 320 bp, Zea Mays
ctgcttgtcagctctcctccctctaacctccggtctgcacgctcaccatggccgcgcccatgtccgcataaatcccggccactacccacgcgtctgacccctactcaaaccgcctcctgtctgctctgccattttccccactcgcagacacctcccagccctccttcgctcgtgtgctgcctcttgcccgagcttggaagaccgccgccgttcaccgcgcccgcatgtccgttctgccgccacggtcgaggcccagccatgtcttttgcctcggtgagttctgcctcggtgtccgcaactcgagatgcgcctccatttgc

SEQ ID NO: 29737 - DNA, 687 bp, Zea Mays
atcgggtggaaattgggtttcaaatcgctcggtcaggcactctaatgatggctcccatggtacagtatctgatgaagatcagatcgaccgtccccctcgccgtcaacgaccctcgcgccatgattcccgccggtgaggtgattcgtgctcaccagtgtttggataacgctcggggtcacgtaaatatcgccgccgttgataggtccggccagtaaacaactccggccaccgtacaggttgccacggtcgctttggataagctcgccggtgactgtcgccttccgtccatgtgccacgtgccctagccctccatcgcgtcgtcgtgacccgctgtaaccttctgcccatcgccggggagatggccacagtaaccggacactaatcgcgcgctagtaactcctggtccctcctgccgccgcgcgtcgtcgcccaaattcacggccaccgctcgcgggctctataaattgaccgcgcccttatctccaccatgcattcaagcagctaacgcacccacccgcacctcaaatcctccaatagggagcttgaatttctaacttcccccaaaatcggtttgaacacaccgcaagaacacttcaccgcggcccgctcgattcaggtcagcccataccctctgctcccttgtttaattgttctcatgtgcctgtgatgctcgtcgacccacccaat

SEQ ID NO: 29738 - DNA, 450 bp, Zea Mays
gaggtttgagtctcaggaaatcccccattctgtcttgtggtcttccaccattcggccgttgattctccagatttcgagtgaggacctcgatgagtcgggtttgattggctagaacttgggctaggtctaaggatagtggtggaggtgcgaggaggtgggtttcactttcttctctaacgacttccccttcagctctcaggggaaaccctgctccaatcccagaggcggtaggcgtggttttatccgaagccatctgccagggaagagagtcactattatgcacatgcaaattgtttttaaccgagttattttattcattacaccatctcattacaagcataagactactacaggtggaactacacgagagcgttccccgaggtactagcgaattccttatctaaggtgtccccaaatgccttgagaagatcatcgaggcttgctagggat

SEQ ID NO: 29739 - DNA, 690 bp, Zea Mays
gtggcttgaaagggctgtcgagaggacatcatcgctgacggcaaagcatgaagaatcgtggaaggagtatggctgctcattgatgtcagattcatggacagatgttagaggacatcatctaatcaactttttggcaaacagtccagcagggacacactttttgtgctctattgatgcatcaagtgagatagctaatgccaacatgtatttgctagaaaaatcagattgaaaaaattgacagagaaaatgtagtgcaagtagtaactgacaatggaacaaacttcaaagctgctaggaggcttcttatggagaggattccatatttgttttggacaccgtgtgctgcccattgtttggatttgctgctggaggacattgagaagattaagtacttcaaaacttgcatcaaccaagcaaagagggtgtgtcggttcctatacaaacatgggaggttgtacaaccttatgagacaaatgattggaggtgaccttgttaggcccgatattactaggtttgccacgttttttctcaccctggctagcatgctcaagcataagaatggtttgaagagtgtgtttattagtaacgaatggcaacaaagcaagttctccaccactcaagaaggcatccaagctgaaaatattatcctctctacagagttttggaatagtgttgagttctgtctacgag

SEQ ID NO: 29740 - DNA, 410 bp, Zea Mays
gaagacctgcatgaaccgaatataaaaccatgcacacccaaaagttaatggggccaactccagagcccataccacccgccgtccacctattgtttgtcttgcttatcttcatcagttgaatcatcagtcttttcatcctccaaatccttcctgccaaccctctgctgaccaacagatcctacagccgatttcttcttctttaaccgatgctcagaaaggtcgtcctcagacaggttacagaacctggagcccagattccgcagcaccttggaggatagcgtgggggccatcgaagttatgttggcacatgaggcagttcctttttgggcaggccccatgtctgaacccagcacgtgattctttcaagcgtttgcttcttctgagttctgactccacaatgattggtgtcg

SEQ ID NO: 29741 - DNA, 544 bp, Zea Mays
gtaaaattttgaagcatcagagattcaactttgcatgattaaaatgcaattgtgcaaaactgtacccttatcacatatgcacattcagtgctgagaaaacatcctatttggtactatcatgtgaacctactgaaagagggcaggggcttaagaagaaaatagttaaactcaacttatgttgggtggggctgagggttattcagtaattccaagctagacattgcctgaagttacacaaagttttcaataatcaaaactcataagatgttacacattatcagtctgcaacagtgaaactaacttcaaaactacaaaactcaattttaacttcaattaggagtaatgagttctcagctataatggatcagcctatagcagtagtctataaattcaatgattcacacaaattaggctaaaataaattacattagaatcaaggtatgccaattcaagagtagtataggtaaagcactggtgacgcaaagatgctaataaataaactgaaaccaggcagtcaagtacgatacaagcagtcaaaacttca

SEQ ID NO: 29742 - DNA, 405 bp, Zea Mays
ggatgtgacagagcgagaaagtgactatacttggagaaacgatccacgaccacgagaatgcagtccatcaatccagacttgggaagtccttctataaagtccatagaaatagaatgccacacatgaggcggaatgggaagaggtgccaacagtcctaggtagtgagatctatccggtttggcctgttgacaggtgctgcaagattggacgtactggtgaatgtcatgtttcatgcccttccagtaaaacagttgtttaatgcaacgatatgttaccggaaaacccgaatgtccaccaagcgctgaatcgtgcattgctgaaataaccttggattgcacaacactattgtttcccagccacacttggcccttataacggatgattccttgtgagagagagaacgac

SEQ ID NO: 29743 - DNA, 579 bp, Zea Mays
tctgtgtaggtagttggaacgtagggtccttaacaggtaagttacgagaaatagtcgacgttgcggtgaggagacgggtaaatattttatgcgttcaagagaccaagtggaaaggacagaaggcaaaggaagtggaaggtataggcttcaagttgtggtacacggggactgcagcaaacaagaatggagtaggcgtcttgatcgacaagagccttaaagatggggtagtagatgttaagaggctaggagatagaatcatcctagtcaaactggtcattggggacttggttctcgatgttatcagcgcgtatgctcctcaagtaggccttaatgagaactcaaagagggagttctgggaaggcctggaggacatggttagtagtgtgccagttggcgagaagctcttcataggaggagatctcaatggccatgtgggtacatctagcaccagttttgagggtgtgcatgaaggcttaggctttgggactaggaatcaaggagaggaaatcctgaactttgccctagcctatgacatgtttatagcaaacactttctttaggaagaggaaatcccacctgg

SEQ ID NO: 29744 - DNA, 540 bp, Zea Mays
tccaagcaggagggttttgcaggatggcctttatttaatcgtagcgctcaccattgtcctgtccaccttgcttttggttccctggaccctcatcttctttgcttggcctatccttcctttgcttgggtcttctgtcactgctcccattgtcggattagcgctgatccttgacgagttaggagaacctttaggccctcatcaagcgtggtttactggatgaagtaggtggttgattccaggaatcaaggaggccttgactctgcctcccaattatgtggtttcgtttgttcatttctatgagtggggtctcgctctcccccttcatccttttgtggtgactctcttcaagtacctataggtgcagctccattttctgatcccgaatgagatccagcatatagatgccttcatctccatatggatcccatcctcaccttaaggtggtacttcttctgcatcgagctattgtggaagagggaggagcaaagggtaatggaagaatggccagtcagaagcgccaacattcgcctccacagcgga

SEQ ID NO: 29745 - DNA, 275 bp, Zea Mays
gcggccggaggggagaaagagtactggcgcaacgaaacaggtggctttcaccgtggcggctcctccggcgatcaccggacgtgcatagcacggttagccgcgacgtggtaaagcgtttggacacgcggcggatggcagggatgactcaacggcggtgagatcttatctgatcgacgatgagcaaaggggaaaagtgtgtcggctagccggattggtgtccagctccacggcggcaatgatttttctaccccacgacgttatccatttaccctggg

SEQ ID NO: 29746 - DNA, 348 bp, Zea Mays
gaagatggcaaaaagaagggcctcggagacagggaagacgaccaaggtgaggagttctctgacgtccacaactgttacatgatattcgatggacagactgtgaacccctcctcgaggcaacggaagtaggagcgtcgggaggtcttcttgatcgaggtagcgactctggtctatctagactggtccgaccgcgccatcaccttcgacagtgatgaccacctaggctacgtcccgaatcccggaaggtacccgctcatcgtcgaccccgtcatcggcaacacttgtatcacttaagtgctcatgcatggaggcaacaacttcaacattatctatgttgacaaattggat

SEQ ID NO: 29747 - DNA, 421 bp, Zea Mays
tgtatttgggttagctacccttcagagcacgagatgacctggtgatatgctcttgactttcactttcctgtctctccatttaacggtttctgcttgatgcttccttatgtgctcgactgctttgagccttgattcttctattgtatccttcgaaactttttcattgtcctaatcctaagctgaagctataactcttgctgaacccaacttgatttcttcagtggtaactaattcgtccccgaagaggagcttgaacggcgtgaatcctgtggatcttgatattgatgtgttctggttccacacaaccttaacaagctcttctgtccattttgccttcagcaatccaaccaaggactttgtgattcctagcaagattataccattcaccctttccacgagaccattagactctggatgcctg

SEQ ID NO: 29748 - DNA, 316 bp, Zea Mays
ggcaatgtggcagcatgtgaaaggtcaggaacttttctttaggcaacttggcagggacagctacacagatacccaaccgtaagtacatcaagcagttcctatttctgaccttcttattggttgtgtcaggttcagttcaactggttcttatgtactgtagtgttcaggatatgttaacttaggacaacattttctgcccctttaactttaagtaattgatccgtaactgtttaaattgtagttttgttgtcaacatctttcaactcaacggtattggtcaaagagaagaattcagacgtcattctgttgacagctt

SEQ ID NO: 29749 - DNA, 415 bp, Zea Mays
aatacccctacattgtacattgatggtacacgcttaacaagacgctacagttctctgcctaccgttttcttgagcacttgaatactcccgtgcaagggtggaagacgcagtgccctgcggactattggagggacatagggcatggagtactagagggtagaggtagtagattgatgcctaccagagcctatatgatgaaggcgcgactgtggtgcctcacgtgggcgtgaacgcgtgagtaggggtgggggcgtgagacaccaaaaccggagggcggattagaggcagtgtctaggtcgagggacgatggcaggacactgggcatctagggtggaacagaggcaacatcgtgacttctcctagcatttactaaaaaagtttctagctatgcccatggtcgtggccaggtagcccg

SEQ ID NO: 29750 - DNA, 285 bp, Zea Mays
aacaaccggagctaaggaagaaggtggtgggggaaggtgtggcaaccgcccctaaccgatcgaaagcatgagcatcaagataattgcacgataacgatctcatatcgtgattcattcattaggctagtactagtagctatgctatctcgtcctagctcgttcacgtgtgtgagcaggtctatcgatgtatatgtcactgttggtgggcccaccatgccagtccatttcatgatgtcatatggcccacggacacttgcctactcggtcgccggagaccagctgggc

SEQ ID NO: 29751 - DNA, 363 bp, Zea Mays
gtcctcgccgtcaccggtcagtcagtgtccccctcccatcttccgatccatgccatgctcacccgcgctcgcatgctcctgaccatctcctcctcctgcttcactcgtgcgtggctgtggcgcagccaaggccaaagggcacaggaccaagacgttcctgcgggtgctcaaatactccaatggcggggtcctcgaggtgaccttccagccgtctctctctttctttgctggtcttcctcagatcgccagaatggaaaattaattgtaaaagatgcgttattctgattgcctatgcatgcatgcatgtatcactcactgtatcagccggcaaaagtgtacaagatcaagcatctccacaagata

SEQ ID NO: 29752 - DNA, 549 bp, Zea Mays
aaaccacttttggaggagccacccttgcccggatatatcttaaagagatagtcaggctccatggtattcctcggaagatagtgtcagatagagggacgcagttcacctcaaaattttggaaaggccttcagcaagctatgggcactaagttagatttcagcaccgcttatcacccccagtcagatggtcaaacggaaagagtcaacaaggtcctcgaagatttactaagatcctatgtgttaacgttcgacaggaattgggagtctagtttgccgtacgccgaattctcatacaataacagccatcaggccagtatcaaaatgtcaccattcgaagcattgtatggtagaaagtgccaaacccccctaatgtggtccaatgtaggtgaaaggacactagaaggacccgactttgttaaagaagctgaagagaaagttgccctgatccacaagaggttactagaagctcagagtcgacagaaaagttatggagacaatagacggagagaactcagatttgaggaaggagatttcgtatacctcaaggtct

SEQ ID NO: 29753 - DNA, 344 bp, Zea Mays
agcgggcggcgatggcctccgccgtggccctgtatagcgccgccgcctgggcatgtcgggggtagaagaaaggattgggtgagttgtcagccgttggattcagcgggggcggtggggattagatgggaaaataactcttgatgcattgaatccgggtcgttgatacgatcgcaggcggatcggatgtagtcgtactgtgggccgtagatctcaaatcctgtggtctgtattgaataccgttcggattaatgatgatctaattgtagccgctgatagaagatcgggcggttcaggatgcaagataccccttcggtctggagatctttctaaagagcccctcggtt

SEQ ID NO: 29754 - DNA, 433 bp, Zea Mays
ttggtcccttgggtggaaatccaaatgatcgagttttctggtgccggtcttgctgctgtgctcggaggacatggaatttcctcttgagatggcctttttcttcttcctttgccctttccacttgcatggctttgttcgagaggtgcgagaaactgaggaagtcttggctggctaggatggtcttgagttctggtctaagccccttcaggaagcgggccatcttcttgacttcggtgctgacgtcatccggcgcgtagcgggccaactctgtgaatttgtgcacgtactcactgacagatcttctgtcttgagtcagttcccggaattcatcttccttgagctgaacgatcccttggggcacatggtgctcccgaaaagccgtttcaaactctgcccaggtagcatctctgatggtaacattgaaggtatccca

SEQ ID NO: 29755 - DNA, 1110 bp, Zea Mays
cccgaccatgccctttcttcttgccagatgctgaggtgagagtgggttgcctttaattttcggaggagcgtgccaaagtagaggaagaagttggggcaaatggcatgagggtgatcggtgaaggagtggcgatgaaggtcgtcggagcaacaacagggcagtggcaatcatgttgagctcctctagaacaagatcatctgggtcgaccttgaggaaggacgggaagggagagtagcgtcggatgatagccctgatgtgctcaaacttcttatttaggccttgaggacaaggatctagtcgttgacagagtgcccaggtcaaccaaggagtcagtcgtccccttcaacttgcaacagtagtcatcgacgggtaggtcaccctggacgaggtgcagaaggtagcgtcgaactagagggtgcgagtctcatgattctcgactgattctcaaaaacgagtcagaggtggcgtgtcatgccattgcagctccctagcaattcagcggagatggtgccgaagatccagcagatgacgatgttgtccattcgatcccagaatgaaccgttgtctgagggacaaataagatgtggtcgacaaggcgtacagcttgagcacaagcaacacttgatcacaccaacaggagtaattgtcagaggacgcgagaacgaccatcaccaacgatacgaagtcgggaccaacagctgcctagacatggttggcgacgatggcaacctcataagatgcagtagggtcgtcctgtggggaatgccctagggtgggggccgacggctgtggagtgctatagcccaaaccctaccaggcagcgacggccttctcctgttcgagaagggtggctgtctggagatgaggatgtgtgttggtagcctccttgttcgtagcttgagccatggtgagcatgtcgtcaatcttcttgcgaaaggccacaacctcctcgatgtggccacgctccacggcagtcgatgaggtacctgccatggtaaaggagatgtgtgcgttgttgcggcaacgcagcacaagggaggtggtggccctagattggcggcaaccagggaaggagcaaaagtgagattacactcgtgataccttgttaga

SEQ ID NO: 29756 - DNA, 382 bp, Zea Mays
caaagaaataaattacaataatttacatattcaattcaaagttacacacatcaaatattacagtcttgttacaataaaagcacaatgtccattctagtgtctcatacatcgactatttcaaaatgtttttacaataagtgctattcctctttaaggactttctctgcaacttcgttcagtaatttgttaacgacttcatcgacaatagattcagccatgtttatgatctccagcgcttccttcatttttggatcagctaggggatcgtacggttcaggcggcggagatagttcagctgaagtaggaaaaatttattagctcgaagccataaagcaagtaccgaagctgaaacaccaaaaaataatacctatacgcctttcgc

SEQ ID NO: 29757 - DNA, 316 bp, Zea Mays
aatttttcagcacatatagatttagggccagattataatcctagacaaggccctttgttgaatgcgacaaatttcggaggcgtgcgttaccaagttttcctagattagttgttgtacgtgttcctttaccgacatatgaccagtgggaacgaattaaggtgggtcctgtataccagtgatgtcactgtgtacgccgatttctcatttctcacagaggtaattatatatgtcgcgtgttgtctcgcatttggtggggtcgggcttcgtgtgggacagaagagtcagtttctcagagaggttgccgtgtcgcgctcga

SEQ ID NO: 29758 - DNA, 282 bp, Zea Mays
acttagttggaccagtgacagagcatgaagttcacaaaagcattgagctacgtggaggcgaggtctaccttcaccgtgttttcagtcagatggggctgctttaggatgtgcataaagcgcgtccaaagaggtcaatggcaaagatgatcggtttgtctccaaagggggctacacgttcccagacatctatagagacccctattagttgaaagcggacggcacagagtggtggattacagtggtctacgggccccaatccgatgcagacaagctcctgtttct

SEQ ID NO: 29759 - DNA, 464 bp, Zea Mays
cacgaaccaacaacccgacaagcattgggagaagaggcctcgcgaagaagtccacgccgccggaccacccttctctcgtgcccgaggggcaccccgtggaggcgaacgaacattggacgacatccttgatgcctaatgtccgtaccacaaggacatgcgccacaccctccggaactgcagagacttcaagcactccatcgggaacggccgacccttccaacctctaccacctcccccaccacgaggaggacccgaagaaccccaacaaccctagcagcaggaaggagaggaggcggagcattcccgcgcgttgacggagaagtcaacgtcatcttcggtggacacgggtcgcaagagagcaagaggcagcagaagctcaacgaccgacagatactggtggcgaccacaggtccacccgccccatatcgatggtccgaacacccgatcaccttcactcgggcgga

SEQ ID NO: 29760 - DNA, 382 bp, Zea Mays
tcaagggaccccactccataggaatatgacactcttcttagaaagggtgcgagaaatgggttgcccgatttcatttcctggttcaaacgtaaggtgcgtgcttagtttgtaaaagagatacgtctttgaactcaatttagcatcttttaacttgcgaatacttgtagggccaaagagatccgtctatgagtgccgagttgagacaagtagccaacgactttgcttatagggtcaagaaatattctgggtatgacgtcaatggataccgttttcgcacaataaactacgacaaaattcggcccaatcggaaaacaacgtgttctggagtctttatgcccggccttgacgatgtcgattatttcgtatgaatcgaagaaatata

SEQ ID NO: 29761 - DNA, 421 bp, Zea Mays
ccgaagaggaaaaagttgaaggtccttactcaccgaccgcgctacattgaaccggccacagtgcctgaatttggcggtgagacttcttcagctattgaagccaaaggacctgctcttatgcagaggattgaagagctggctgcaatgccgaagactgacaaaattgaagaactgagaaccgaagggacaaaaacattagaagttctaagcccttcagcaggagtggaggtgccgaagacacaaaaaggtctagcagcaacccctaagagaaaaaggatggctagtgtattagatgtgttggagacgataaaagcttcaagctctactcccgaaaaaattgccaaggcttcgaaaacacagattgaaaccgagacaaagctgactgaagccaaagctatactgagccaggctgacgccgaag

SEQ ID NO: 29762 - DNA, 732 bp, Zea Mays
caaaagccgcctaagggtgcagccggactagcacaacaagtgcgcaaaatcgaagtcttcctcaaaaagactatccgtgcaaaagtcgcctaagggtgcagccggactaggtcaacaaacgcgccaatcgcaggcgcattacatccgtgcaaaagtctacaccaagaaactgtccgcgcaaagaccgactacaggcacagccggaccgacataataaatgtgctagaccaagtgcgcaacgcccctatggacatagccagatgcgcgaaggcacacagcctcatcattcaaactatagtcacacacgtacagcgagggcattacaccttacattggttcaaccttcggaatgattcccatctccctatagttaaataacattatcctaagctcctcaccctgaaaaagacttcgcaactccccttcacctacattcgccccaaccggcgaggacaacaattcccgcttgccagccctgcccacacgaagccgaccgccatccatttcactcactctacgcttcgccaccgcccttcgccgcctacgcccagcactcggaccaggcaaaacttcagcatctgtaacacgcggagaagcctccgccgcagccacatccaaggccacaaagtaatccaagtcctcatccaaagactcatccgtccactcaaccgaactcccagagtcaccaaaatcagaaaacttagacgtagactaatccgattcattcccagc

SEQ ID NO: 29763 - DNA, 294 bp, Zea Mays
aaaaagcataatggagaaggaggcggcttgcgtgtgggtggagcaatagcagagggacaaaaagacagggtggagaagccacgacggagggctgagcatcagatgcgcagccgtggcaccgagaccttctcgatcgacgaggatggagacgacgatgatgatgcgaacgcaggctccgagctttgggccattcctaatgcctcccttgatgcctcaacggttgatcccgtcccaactttacctggtaaggcgaacagtgccttccctatcgtggaggaggctgacttctcgaac

SEQ ID NO: 29764 - DNA, 338 bp, Zea Mays
tgcctgccgatgataatttgtttggctctgtgtctgagtgttttgagtctgatggtgaatctgggagttcgttttcttggacggtggagtcctcagatgaaggcttggattattttgctgcgttagatgtggctgtagcagagggtggtgccggggatcttcctagtgtgagtactgggtataggcggcgaagggtggtggcgaaacacagtgtgggtgaattttcgcgaagtggtaggcgccgtcgtatggggatggagtgtggccgtcttcgagtggaccagattggtaaacaagaatttttgtcctcgccgattggggcgagcataggtgaaggg

SEQ ID NO: 29765 - DNA, 1334 bp, Zea Mays
cacttataaattattactatgcatcctcaagggatatgcaccctcccctgattaactctagcttcgacgctgcttccaagcatcccctaagtggtgcaccacaatattcgatatggtctagaaatagacatgtggtccatcattttacaagtttagggatgtgtgatgcactgtaaacaaatttagggacccaaaaacacatttacaaagttcataggctcaagtggcaccctttgacaagtttagacgtcgctgatgcatttaactcattatattatgtgcacccaatttttatcagatgtctaggcggattattgatgcgaattggtattgctttgtatatacggatgttgcttgttagttgttactccaattacccaccaaactagatttaggtaccatttggatgggatatgtgggttgggaattagaaatgttgtggaggataaggtttgtcccatgttcgtttggagggaattgggaaacaagggaactcaatagggaaacgcgtatcctaccaattcaatcccagtggaagagatgggttacatctgggaaatgagaacagaagtgcagcgctttcaaactaggattggttcccacttcccaggttgctatggtgagctcggcgtgtgcttctgggggatgagaatggcctgttcagctgcttgctgttagcacagttattctttgagtggcagctgcaaagaccaaatgatgaacaggcccatggtgaacagctgccaaacaggccctgacagtgttgtatatatgtggccatggtgaacgaagccaccatcattggccttgccgcccggtggccagggcggtagtcttcagttttggctctagcacctgcggctagcggctagccacatgtgtgctcaagaaaggcagcaccagcaggaccagatcatcaacaaagcctaccatctttggttggatgtgccaatcgccttgcacagcagtgcgcggagctaggggtgggtgggggactatgtgaaggagaatagaattggtgtatttggatggatctattacattgcgcccttaggtggtttatattgagtacatgacttagaagcaacccacgtatacatatgacaatctatgagacacaatatctaaactactaaatatactgtaacacatatgacaatctatgagacacaatatttaaactaccaattatactcccccccggcacagttgtagcatgagcattgtatacggttacactatagaagaagttgatgaactaacatactcccacagtcgcgacgttgttgcaatgcagatgcaacagctgacactattttcaagtcgaagtcggt

SEQ ID NO: 29766 - DNA, 482 bp, Zea Mays
gggcaggcgcacaaggcaacaagcctgtgcaaccatgccacctagactgcctaaaatagcacacgctaacacgaacaaccaaactgttaaggtcatatccgttcaaaaaggaaaaagggggtggggatcagaggacattccattgctttgagtgaactagcagatatgaagcgtcattgcaatgcaggacatttttcctatagaccatagctaggccagcatagtcctcagcagtacaaacacaaaaaaatgtaactattacagtaaacaaaagggccaagagatgcctgtttcaacatggatagctgattctacacaatcctcattggacaatacaattcattcattcctttgctaaaaaaattatgggttcacaggactcttaactgcaatctgataggtgaacagttttctatgcttacaattgttttcatctgcatgtgctgtaggaaatcagtaaaaccctatttatcagctgcttc

SEQ ID NO: 29767 - DNA, 403 bp, Zea Mays
tgattagggaatatttagtggagcaccgaaggctaggggtgagggatattcagcgctctaacttgggtcaggtgctggtgcagtttcatagtgttttggagcgagataatcttgtttttcttggtccccaacagtacctagatgctactttcactgctctttgtcataatgatgcttggaatcaccgggctctttttttcaatcgtgaatgttggctgatgttattgggctttcctctggactaccgctcttcagagtacctgcaagcagctattggttgttttggcaagttgattatgtgggaggaggatcgacataatgtagccaggacactgcttcgagttcgtgacacatctcttgaagaagtcccacagttcgttgttttctctgaagcaaatggatt

SEQ ID NO: 29768 - DNA, 757 bp, Zea Mays
gccaaaaatgggtgtttcaaggcaaaaaaatgtgcatacttagaatatctatccaccaccaccaaaattgtatcacacccttccgacttaggcaggccttcaataaaatccatagtcaaatcttgccatgcaccctggggaacaagaaggggttggagcaatcctgggtaaaggactccttcagacttagcatgttggcacaatgcacactgctacacaaatagtttaacatccgacttcaatcctttccaccaaaatagcctcttcaccctctgataggttgccagacagcctgagtgacctactatactgtcatgtaatgccacaatgatcttagttctaagggctgagttctgagcaatccaaatctgagaacctcttctgatcacaccctgctgcacagaaaaaccttgttcattgggactgtgaagcaccaattcagccaatgacctttgagcttcttcatcagtcacataggaattaagcacttcctgtacccataaatcacctctgtcaaggtttgtaatgccataaaatgacccaccttgataatgcatctgcagcaatgttctccttcccttgtttataaacaatcttgtattgcaatcccattaatctggccatagctttcttttgtagatctgattgcaacacttgttcagttaggaagctcaattccttgtgatctgttctaatcacaaattcagccctctgtagatactgacgccatctttccattgccattaggagagctaga

SEQ ID NO: 29769 - DNA, 891 bp, Zea Mays
ggagaacttgggcgcggccaggccaaggtcgtggtgctcatctgtcagcaggcggaagaggtgaggagagaccgcggacagttggtgacggttcctgctttccccagccgccagcagtgaactcggctgggcacggttcgtcgagtggtacgatcgtcccggctggtgttagcgaccaggcgggactggcaacgattctccagcaggcactcactgctctgcaaggtatgaatgctgagatggctgttggggagcccagggccgtcgatcacaagcaggtgagtgcaaatgctggaccactccttccttcagcgtcggcaaagggagagaagaagaatactgtgaacaaggagaaggaaggtaccaaggaggagggcaagctgaatagcaaggggtactgccatagatgttacgggaaaggccacgtgatgagcgagtgtacagcggagttattctgcgaagtatgtggtactgacacccatatcaagctgaaatgtccggtgttcaacgctcctaaggtgcatgctatcccagctggttttgccataaaaaatggcggtttctttcacatcccctccaacaagaagctcactaagggtagcaatgagaacaggttggcaataatacaagtggtggaggggtgtattagcctggacaatgtgattcgagagctggaaaggctgctacccggacttggtccatggtacgtggatcaaatcaccccaaaggtgtttcggacttcctttcctgcagcagcggaattgcaaaggatgatcgaatggggtccggtccagactaagtctcagaaggcaattcttgagttcaaggctagttcatccgggggtcgagtgaaggccactcttactgacgtttggatacagtttgatggtc

SEQ ID NO: 29770 - DNA, 458 bp, Zea Mays
atttgggatttcccccaattctgtcaagaacaccgcgtgtgtgagctcgccgtggccagctctctataggtctgatcatgccttcctcgctctcgtttcaacatccctgtgtgctgtagatgcttagtagcccggccaattgaactagatcacgctagatcaccgggaacacttcggattgtccttgttttgcgctgtcaccgtgggcagcgagattaggagctagaaccttgcaattgatcgaggggaaatgatcgtcaggggtagaattgtgtgttagccaagctagagcaccggccattgcgtatcttggccggtacaggctcgccggagacttgcccgtcgctgtccaccgtcatggacccggcattgtgaagaaatagaactacaagggtctatctgcaaatgtcagagacacatctgaatagtactaagggctctttatgggttattcgaac

SEQ ID NO: 29771 - DNA, 321 bp, Zea Mays
tttcgaggaaaaaaagaggacattgacaacaaaaaatggcctaacttccatgttctcgattttcattatccaaaattctaatcctcccttgctgcagagaaagttcgtggacaggcaacgagcaagtgacgtttccatccgtggaagtaaatcttctcatatcttcttcttcaaagtgccttacgttgtattgcgttgcctaatgccatgcaacagaagaacaaggggatcaacattgtgttctgaaatatttattacatcagcacaacacccctgttcgttttcggattgcagtacatgcaacaatatcatatatccaag

SEQ ID NO: 29772 - DNA, 277 bp, Zea Mays
ggggaaggtcctatggcggtgatcacctttgctggtgaggtagagctccgaggaaaagctcggggagcttcacaaagccttgttgaagtgcttcgtgtgctctaatttggcaatggcggcatgggatggccagtccacgctcatccgtggatggatgtcgagcgacggacgaaaatgatcctcacttgtgtagtagagctcaggcgagcgagtctcagagctctgggagatgcagggaagcttttggtcggctgagtttgtgggggagcgattgtgg

SEQ ID NO: 29773 - DNA, 763 bp, Zea Mays
tttacagggaaaggatgagaactcacatggaagctgtctatgtagtgttatcaattcctcctcaccacatcatataggataaacactactcttctgaatattagttttcagacctgatgcttctccaaatagcttcaaaatattgatcatagtatggatttcactctccctaggttgcagaaaaagtaccacgtcatcagcatatagtgatatcctgtgctgcaggggtctagacttagcaacaatacacccaagaatatccattaccaatataaaaagcttaggtgacagaggatcaccttgtctcagcccccttttaagttgaataatatcccctggaacaccattcaggagaacttgtgtagaggaggtggccaataacccactcaagatatctttccagatctgcccaaatccaagtttctgaaggacttcaagcaaaaaaggccaagagacggagtagaaggccttggtgatgtctaacttcagcagtgccctcgtctttttttgttgatgaagtaatctggcagtctattgtaccatcatgaagttgtcctgaatgaaacgacctttaataaaagcgcacttccttagggagactaaatcatgtaacttttgggacaatctgttagccatcagctcaagatatctctccagatctgcccaaatccaagtttctgaaggacttcaagcaagaaaggccaagagacggagtagaaggccttggtgatgtctaacttcagcagtgccctcgtcttttttt

SEQ ID NO: 29774 - DNA, 424 bp, Zea Mays
gggaaatcccaaattggggagttctagtggatgatttgaggcacggattgctctactgggtgcacaattacttagcggagcagacggggtcggcaatttatagcaggcttgagcggtggctggtgaatttgagaaagacgcgcggcggtcagagaaggaaaaggttactggcgcgcgcgattggtggcaattatcgtggcaagctccccggcgatcaccggataagcttaacacgatcaactctgacgtggtaagatgcccaggcacgtggcgcaaggccgcgaggtggctatctccggcgaacccatccgaagcaaccatgactagctcgggtacggtggtcggagtaaactagtggccggagtatatccacggcgtgatatttacttacccccagcgctatccaactgatccaagcgcgaat

SEQ ID NO: 29775 - DNA, 324 bp, Zea Mays
gtttttcctgtcaggtttccaatgtagttctgatgaggacctaaatgcagatgttgtctggctgcttgctcgattataatttggggaaaaactgaaatcctgtcttgctttggatcctcatggtggatagtttgtctagttctagttttttggtgcttgactttatgtctcaatctcttagttgtgagacttaatgttctgaccagatgttcttttcgctacatttttcagtgatgttgatgccacaacgctggcatgtattgcattttcctgtcccaatttacagtccctggatatcagcatggccaatagcgccgccaacag

SEQ ID NO: 29776 - DNA, 457 bp, Zea Mays
ccagctttcaaggatttgttgagtcgattacacaggccaactatctggtttacaaaatcctagcttctgacctcacagataacatggtaagttgcttactgcaggatggttgcacagaccaactatcttggagatatccatagactaaactggtaatctgacgaacccgagccaatgccttcgttgccgtcaaactcatccaatccaatcaactcttcgatccgactcttcttatccgctactttttggacgcctgctgcttcaatcttcttattactagatcgatctgcctgcaactgtggagaggtaatctttcttggaccaccgagtttcaagtgaggcggccttcttttctgacagatgctcggcatctggtgatgactgtaactggagggtgcagatgcttttgttaacctggaggcaactgcagccgtcttctgaatcttctcttggcagg

SEQ ID NO: 29777 - DNA, 289 bp, Zea Mays
ctaagtcgcaaggcttcctgccattgtcttacagtgaaaacctctgacatcatattatgccaagaaatggagaagttaaacctgggaatgattcaatatggaacattaaatcagttgaagcttgagtcggtccttctgcaaaagataattgatgcacaaagaagtgatgacgatatgaaacacattcatgagaaaatgaaagctggtaaagcaaactgtttcagaaaggatgatcaaggcatagtatggtttaacaaccgcatagttgtgcccaagaatgatgttgtcc

SEQ ID NO: 29778 - DNA, 278 bp, Zea Mays
ttgacgaatgacttcatattggtccatgcgaataatcccttgacatggctgtaagttactggaaccccggagtgaccccctaccgctgaagaatgcaatgctgacacaatgcggactgaatggttgtgtcgtctcccacccaaatacgacctttgtatctgaggatgccttcggtcagagtaaaattggaaacagcggatggatcgatggcaagcttagccaacatatattgagctattgggtcatggttgtagttgttttggatgtccagcaaccat

SEQ ID NO: 29779 - DNA, 316 bp, Zea Mays
tcggagtcccgtccgagctcacagttgacaacggcaaacaatttgacagccaggacttcaaagacttctgcttctcaattggcaccaagcttgccttcgcctcagtataccacccacaatccaacggcgtcgtggagcgcgccaacggtaaaattttaacaaccatcaagaaaatgctcctcgacgacaagaagggcaaatggaccgacctcttacttgaagcagtctgggcgctgaacacaactgagtgcagtgcgactgggttcactcctttctgcctgctatatagatcggaggccatgaccccgcaagaaat

SEQ ID NO: 29780 - DNA, 370 bp, Zea Mays
gaaaatctaggcaaccctaaatgcagatttttatgtggttgttgataagaaataagtgttggacagatgatagacttgcaatacaaggattgtctcatccttgagtgtgtcctctttgtgttgaaattatccaacatctatttattgtgtctttgctagataagtgtagggtgctgtgatttagagggtgattctcttattttttgtgccctagcccacatatggttgtccatcttggtagagtagagtagtgaaggtgattcccaaggaaaaagcaaaggaatgaatattaccactattcttattgcttgttagctttggaaatgtagaaatacttgtgtttctaatgggctttaacctattgttaatt

SEQ ID NO: 29781 - DNA, 576 bp, Zea Mays
gtgaaagtgctgatggaaatgatggtatcacttccgtggatgagacagaatctcatgtgaaagagaatacagagaatgtgtcaagtggagaagatataaaccactcatctaaacaaccagaaggtagcagtcctggaaaaactgattcaatcatgtccaaatatgattgtgcttttggtgaggaaaatcccaatttaagcattgtttcatatggtagaggaaaaatgagatattaccgaggaaacaaagttggtgatcatgtgggtgctgatggtatcgagcgagtcagtggcttgcctgactatttattagatatagctgtcaactcttacttgaaggcgcaatatgcaatgtatcttcgtgaatttctttacacagaattgcaactcaaatcaccagagtctaattcagcaactgatcttttccttgatccacaagagggtaaatggaaaattgaagaacagatgggcaatgtgcaaaatgacaattttgaatcctcacaagagtcatctaagatggacaatgctattgagccaccctactttataccaggaaaaaatccagacatcgcataca

SEQ ID NO: 29782 - DNA, 345 bp, Zea Mays
ttcaattcatgataatttcctctacgttcaaaaagttattcagaaacttcataagagcaaacaaccagcactttttgtcaagctcgacatatcaaaagcgtttgactccgtcaactgggcatatttgttagaggttttaagagctttaggattttctcagaagtggaggaattggatcgccacaattttgggctcttcctcctccaaaatcttaatcaatggccaacaaacaaatgcaatcaggcacatgcgtggcgttcgtcaaggggatccgctatcactattcctgtttattttagctatggacccgctacagaggatgattgagatggcggcagatgttgg

SEQ ID NO: 29783 - DNA, 813 bp, Zea Mays
ccaacactattgaaccgacgatcacgttcttggaaaaaatccttcacagaaacaccaaacagatcaaattcaatggagtggtgattatcagtagtaaagcgccgggcaaaaaggagattcacgataatattatggcaagtaaaatgttgttaaggtagagcggaccaagaagaactgaatcacctactaagatgatcgacagagagaatctgttaccaacaaggatagaggaaggaagagcaagatgcggtggacgaagggtagatatggtaccggtgtcgaaagtagtgtggttggtggcgtcggagtcaacccaatatgctaccgcggtagacggctgggaaagggccatcgtgccgaaggactttgcaagactgctgatcccaagagccaatctagggcgtccacgactgttgtggcacccaatgctgctgtggcgtaggcgctgacacaaggctgctgggataggcgctagaggaggcatccactgccgctggtcgcccaaggacttgctgggggtgctgttgctgaacctctctttttgctgggctaggccacatggtgatatgactggtccaagggttgtagaaggaggtccaggcgggttccttggcaggggcgtctgatgtgtggccgctggtgttgcctctggagtcgtcgttgctgccattgtggttgttgccaccgccttgcggcctttgccgtgcccctttgcgcccaccggaggggttagggacgctggcgccagcaagaggggcaacaagagttggagggggcgtcgggcgctgctgcgagctgctagagccggaggcg

SEQ ID NO: 29784 - DNA, 3311 bp, Zea Mays
cgccgccgtaatctgcgccaacatcctcgaggtgacctttgtctttgactcctcttacgctcgtcaaactgccgtctccccttcttcctcaattcaccatgtaaaagtaactctaaggcgccaagcatccactggcggtcccttatgctagatacagcacgtgtgcttggtggtgtggtatgatttccaagcctctgtgcattgtgcacactagtgtccacgctagctatcaagatcagtcgctgtgatgtcgcaaacgagttgtgtgtacagtagatgcaaaaggaaatgctgatttacctatctttgctgagaaatctctttcccatctcttttctctccctcttgctctcttgtgtccgctgagcttgttttgtgatactaatatacgtgatttatatgatttcaaacgcaaagttcctcgttcaactttgtttgaactttgtttctgaagtgtttattgatgttgggtaccagtcgaaattctatgaagaactacaacatggcaacataattaaattatggggcaattgtgattatacacttctgatcttgcaattgtgattttacctctccttttttaactttgtgattttatccctatgctttgaaaatgaagctgcgccctctcctttaacaccattagcgaaaatcggaattagtgattaaaaaataaaaaataaggggtaaaattacaattgcaaggggagagaagggtataatcacaatcaaccctgaaaaattcaacattttttcagggttaattatgattatacccttctctcaccttgcaattgtgattttactcctggttttttatttttaatcactaattttgattttcatcagcttcgttttcaaaacagtgtggtaaaatcacaaagttgaaaaacaaggggtaaaatcgaattgcaatgtggtagaagggatcacaattgctccctctcattttcgaaggggatgaagtggagaagggacctgataaatatattcatacgccgaaactcatgaaaaattacgaagtttaaaaatggaagttgcaatggcatgacgaaggtaagattcacgttcccttaaatgattgaacttacaagaagcacattatcaatgaacaagtcataaagtagggaactagatgtgcaactgaagctaagtatgtaaagaccgtgttatcatgtatctttggaagttctcttgacagatgtaaagaccgtgttatcatatatctttggaagttctcttgacaggggatagatacaggagcagggatgtaaaatgccgatctctgtagcagtaacactgttaatctatttataggatcaagctgctatataccttcatatgaaattacaattttgccctccctattacataattgtcatactcagcaacaggagtacaatttcgtcattttatgtctttgacgtgccgtgtacaacttttcttttccctgtactgtaaggctttggcttcattggtcagcgcctttgacttcgaagacattagggcttcggtgctttgaagatgttagggctttggcgcttcaaagatgttagggcttggacgtttcgaagacgttagagctttggcttcttttattcatccgaaggttcagcttcatcattggtccgaagctcacctatgcttcagatttgatttctttcgttaccttgaaactgtaaactggacaggcctctgttaatatggaccttcggtcagggactctccacattaattggtttatataagtttgagactcctgtgacatggcaaaacaaatatgaacattgtgttttgacttttggaccaccctctgctaattagagggctacagcagttaccactggtatgaaaacatcataagttgtcagcagcatggttgaacattgaaccaggcttcaaaagcgtttcaatcccacactctccataaacttgtgtacagattatatcctcacgttgcagtaactattatactattctcatgctgaccagtgaagaagttatcactttgtgtaccctaatctgttgaattgcaatatgttccagatttcagaaagttctactacaaactgaagtttatgatacaccgtcttgtacatatgaaaaatatgtccatgcactggtaaaaggacatggaattgcgaagtataatatatgccacaagtgtggcctgcactgtgcttctccttacactcctggataaccgctgagcattagttgacttggtttgtgtattactttgtgtaaccttgctgctttacatggtttgagacggcatgttatctatgctcgttttgtttcgttggttgtgttctaaaatgaaacattactggattctttagaagtaaggttgagtcctagtcactggatgaaaggaatgacgaataaacacaattgaaccttctcagatatgtagttgtgtgaattgtaagactcgcaccgttgtatatgttctgttttcaaatcatatctgccagtgttcttgtcttgaatccacattgtcgaggtatatcaacatgtggtttttcttgtcaccctgtattactataatccactatagtgttacacaattgttatgcactatgtatggaggagggggtgtatctgttttatttgatggttgcttgtccctgtaggttccaagtgaacagaaactaccatcgctgtatctgcttgacagtattgtaaaaaatattggaaaagattatgtcaaacatttctcagcaagattaccagaggttagtatttcattttgcaccatcttcttgacatgggaacagagatggttcctacccctggaaaccatatttatttattgagaggatgacttggacatcacaataactaagttttctttggttgtatttttcatttttgctaggtgttctgcaaggcatataaacaagttgatccttctatacatcatagcatgaggcatctttttggaacatggaaaggagtgtttcctctacctcctctccaaacgattgagaaggaacttggttttcagtcatctaccaatggattatcaggtgctgcaccatcaaggactgattctcaatcgccgcgtccatccaatagcatacatgtaaatccaaaatatttggaagcgaggcagcagctcaatcaaccaactaaggcaagatattctttctcaagttatgttgatacacctgttcattcctttgacctcttggacataatcaaaatatgtaccatgtgtagcattgtggctgccactttgttcttttgcaccccatgtgattttgttcctggttctgttttccccttactttggacaggggatactt

SEQ ID NO: 29785 - DNA, 626 bp, Zea Mays
aacgagctcaggctggcaaaggaggcagcttaggagcaggcgacacaatgggtggtcgtgcatcatcttgggggtgcgcatggtggcaaaccagataggcgcaggcacatcgatggtgctacggtcgagggcacgcatgatagcagccttgatgggcgtggacacgtcggcggtgcccctggcagtggcattcaggtcaacggagatcctaacctttacaggcagcgcaactctccttccccagattggtaccatggtcaccatggggtccaggccattatcacggacatcggtcccggcggtgggtggcctaccctcaccaagacccactacgttgagtgggccacagtgatgaggttatgactctaggttcgccacatgtgggaaacagttcgatatggcaacgtcgactactatgatgattgatggacgttaatgccctcattgctgcagtcccacccaagatgcatttttcgcttccctagaagtggactgccgaggaggcttaggacgccagcgatgtggcttgcatcgacaacaaccatgcccacaagaccacactacaggcacttcacaaggtgtaggagaagctgaccttcaaggtaggtgaggacatttatgatttt

SEQ ID NO: 29786 - DNA, 371 bp, Zea Mays
cttgcatggcagacagtaccaacaaaatgtgtcggttctggtcaagctagatagagtgttttgctcagtggattaggagttgctcttccccaatgttcttcagagtactgcctcacaggattcggatcattgtcctctaattctggggcttagggataataattctggaagaaggcgtttccactttgaatccttctggaccaagctcgaggggttccaggatattgttcttgccgcatggaattcttttgagtcggctacatgtccttttaaaaccctggaaatgaagttacaaggaacaacaaaaagtttgcaggcctggagcgaaaagcaggttgggcatgtgagatcccaacttgctcttgccaaag

SEQ ID NO: 29787 - DNA, 504 bp, Zea Mays
aatttcataattttaaaattataacagcagtgatatcaaagaaaaactccagaaacatctgcataaaattacccacaagttttgtattcaaaagataattaaattccaacatcacgatggccccaaacaaccgacaaagtacaccccgcgttcagtttttggacagcaacctagctgagttcaaaatgtgatatctcctagaatataccaccgaatcgaacgcataagtactctataaaaagatatgacaaagctccacatgattttcacagcgattacagctacttacccccacaaaaatcccagaaactacccacactactgctgtcctcccgccaggacagcactactaccaattcgcctaggtgaatggataatcaaatgtaattgcagcacaaatacaaaataaacacaagatcaccttgagttcttccttcacccctttcttcttcatcccaccaattctccaattagaggcttgcaccaactcgatggagatccaag

SEQ ID NO: 29788 - DNA, 605 bp, Zea Mays
gtcgaattgaagtaggatccagtggttgattaggtatggttactataacaaagttaaagctggattataggacaataactttggtacaggaagattagtaagttgtcacatggaaaatggagaacaaggctcctcaaatcacgctgtcagaacgattgaacatgatcgccatggtacagtgaccataaagatctccggtgctgtgagctcaatgccggtgatccgccgccacaattcgcgcccgcctaggagattcgtgccacgggaagagtagataacgttggggcaaggtgaaaatatccagtgcggggtgaatctggtcgctggccggaccggccgtcgtgtcccgccgcggtcaatcgcgttggcatcaccggagttcactattatctggccaagctacgtgcctcaaagccttaccacgtcgcagtagaccgccttaggtagcttgttcgtcgcctgagacacagccccgataaatgccacgttacgtggctccggtgactcacctctctctccgaccgcgagctttctctttcgaaattgggtggcaccgctgatggacactataaattgatgccccagtgagctccgttaggttgtca

SEQ ID NO: 29789 - DNA, 295 bp, Zea Mays
gaaataatacctcgatctgtgaaaccgaccacgaaaatcctaaagaagagtggagagatggtggaggagcccgaggggatcgaatctccaacaatctccacgaagttttgatagtttttggagggatttgagtgtaggatgtgagagagggagagagaaatgagggcgtcggtggctggaagaaatgagagagtgaagatagaaagtagagaggaggagaaaaaaggggcagcgtcggctggtcacactgaccaaaaccggttcaaccggttttgctgcagcgcgcacactaaaa

SEQ ID NO: 29790 - DNA, 597 bp, Zea Mays
ggcggccccttagaccacgaaggcacaatgcatagagaggaaaatgcgtgggctgctcatgtgtgagaaggaagagggaaggggttcatggcaggcgtgtacgattgtatagaaaggagagggcgtgagaggtggttgtcaatttcacggcggctcttgtcctggccgagcgagagagacagctgcgcggcgagttgcacgagacagggttagacagagttagatgggtggtagacatggttagaaaaaattagacgaagacggtcagatccggcccgtgggcccaagatgacgaggtggacgccgaagggaaagacgaggatataggaggatcgccgacacaagcagcatgtcgttcgcgagaagacgcggttcagtaatctcgcgaaaaggggcacgagatctggtataggttcgacgtgaggaagaaatatatatatttatattatcgagttccaaaaattttatagttttcacaactaccacattttaggtatttaattaatattggaaaaccgaaattcatatttcatacccgaagaaaccttccgaagattccaaaaactcttgggaacatcctcgatatattttaatctg

SEQ ID NO: 29791 - DNA, 361 bp, Zea Mays
gaatttgagaaaaacctgatttttcttttatgtctttccctttggtgacctttttggggtttttctgaatcctttttggggtcactctctttctatgttttgtagggtattaagtgtactacaacttttataattagtccaagtcatgacaatgtgatttacatagactttttgccataatcccttctagggctccatttgcctataagggatttgaattagggtttgggtctttcccctctctttagtgcatggtaaggccaaggcatgacttctaagatgggttacacctacttaggatcttgatccccaagtttggtgtcttttgctcaaactaaaccacatgtgatgatgggtttac

SEQ ID NO: 29792 - DNA, 1078 bp, Zea Mays
tgcatttgcagtcatgaaaaacttttgatttcgccaggagacaaacatgctacataccctcataagaatatgaatattgaggaggaacccacaaacaaagaagatcatatattgaatgtgtcacatacagaagggtacatttatcaactattccaaattttaaataataaaatagattaatttctacttttatttcctgagatcaacttctatttgttaagttagtgatatgcgtttactttgcatttgcagtcatgaaaaccttttgatttcgccaggagacaaacatggtacatcccttcgtgaggatgtgaatattgaggaggaacccacaatcaaagaagatcatatattgaatgtgtcacatatagacgggtatatttattagctattccaaaatttaaataataaaatagatcaatttctacttttgtttactgagatcaatttctatttgttaagtgagtgatatgtgtttactttgtatttgcagtcataaaaaccttttgatttcgccaggagacaaatatgctacattccctcatgaggatgtgaatattgtggaggaacccacaagtaaataagatcgtatattgaatgtgtcacacacaaaggggtacatttatcagctattccaaattttaaataataaaataaatcaatttctacttttattacctgaaattaatttctatttgtttaagttagtgatatgtgtttaatttgcatttgcagtcataaaacctttttacagtttatggctgaaaatgatatgtctactggtgttatcttatatgatgacgtaaaggattgtatgataacagttattgtaagagaaatgagtgtagactttctaaattacatttttaataaattcgagagaggaaagtgttggagtgatggctgagaattaagtgatatggaaatggaagttgaagcaagaagaaagtttgtcattaccaaggaggctgacgcagatcttactgttgaagatgacacacaaaatatatttgttcatcttggttttctggtaccgtattataaaaaaggaaactcaatccagcattttttgattcct

SEQ ID NO: 29793 - DNA, 445 bp, Zea Mays
caggcagccaggcccaagcacgaagcaatccgcctatgctgttactgccttacggatgcacatactgctattgtattgttgttggcctatgggttgtgtcgctgctgctgctgtacttgtacacttgggctgaggatatgtgcctgtgttgctgctccagctgttggtcagtgtggccgtatgtggttgtgtaacgttgaagcttcgcttcgttggctgttgtctgttgatcatttggcctgttgtgtgcccgtgcagttcagaaagccggtaactctttggttgattgattgtaaacactaaacaataacatatagcttcctttcttcgctaagtcctagaagatatttcggttaccgtctgttttcgtttaattttcgttcgtatttattcgttttcgtatacccgtataacccgctcccgttcccacttccgactgtcccgc

SEQ ID NO: 29794 - DNA, 278 bp, Zea Mays
tactcgaattgcaacagatggaacagacaacgacaattgaaatccctgagccaatcaagcaattattgagtcattatccacatctgttcagtaaaccccacgacctaccacccaaaagaacagttgatcatgccatcgatctggtacccggtgcaccgcccttcaggctcagaccttaccgctatacacctcaacagaaagacgaaattgagaaacagatccaagagatgttagacagtggaattgttcaacaaagttctagcccttttgcttcgccg

SEQ ID NO: 29795 - DNA, 769 bp, Zea Mays
ttaagcattgttgacatataaaatctggagataaatagccctaaagtctagctgtcagtcagcccttagactgaattctaagaaacagtgaagttggatgaacttggagattgattttgagtaggatcctgcgactatttcattgtggatactataacaaagttagagagggattataggacaacaatttatctacaggccgaagatcatgttgtcacacaagaattggagaataaggcatttcattcagctctgtcaggcgctctgaatgggatcccaatggtacagtgcctgacaaagatcacagattcagctcccctcgccgccggtgacccgcacgctcgtatccgcgtcggcgctgcgattcatgccctctatggcatggattatgatcgaccatggaaaaatcttcatcttggatgggcttagaatcctgtagccgctctgtcacgccgtttgccatgaccatttcaccacctcactgctagccgtaacaactcaccagtgactgtcgtagctcctcaaccagtgattgccacggtagatcgccgcggtgactcctcccctctatccggccgccagcgcacctttgtgaaattggacaccaccgctcaaaaactctataaattgagcatgcagtgagcttcgctaggtaatcacaaagccagcacacccgctcctgtctccgattagccaccatagctctctaattcctctttctccccaaatcggttttccgcacccgtgaacacctcgtcgtggccagacg

SEQ ID NO: 29796 - DNA, 644 bp, Zea Mays
tgctgtgcaacgttcgcaacaaccccagacacagggcagtgagagtcccgtggcatggatgacaccacaccctcccccatcggaaggtcgtcgaaggaggaattgaggtgcttggctatcggaaccatgatgccaaacaaaagatcaggtcaaaacctaagcaaagccccctcctggcgtgccaaatgtcggaggtaaactctagccaggtagccgaatgcatctgcctaatcctaagaacaaggtgcagcctagggttagcctaaggagatgcaagaaaacacaagggtttagaatggttcaggcccctcgagcataatacccaacgtctattgtgagttgtattgctaagagcttgagtgaggatgaagttgagtctaagagaggatgcctcttgtatcgcatgtgccctcccttttaagggtggcacatacaaggctactgagccctgacaggtgggccctagcgatataatattaaatatatacaacatggagttgtaaatgttgcgacaggcagagatctcctcggccatggtgtggatcttctagccgggcgtgtccccaccctgtttgctggtctgagccagacgcaaactggaacttgacactcacgtatgtagcggtaggccctgctgacgtgcg

SEQ ID NO: 29797 - DNA, 461 bp, Zea Mays
aagtagtcctggcagataggagagatgcacctctgaatcagcacctgctgcgagcagaaaagcaggtagatccaatagccggtgcgctcgcagggcaatctgcgctgacaaaagtgcccgaaagaaggacttctgagtcctggtactgaagagagttgccgctgcagggtccctctgagcaggaaaccaggactccacggatacgtgtctgaaccgacgtacccggctgcagtggcacgctgaagatcaagcagtcgaggatcagcagctaggggtcgcacctcagtctcgtcacgctccctaaagcaaggtggaggaatgggcgaagcgaaaatgggagcgagagggggaacagtggaagctggagtggtggagggggtgggtatggcagaagttgtggatggctctggagcgacgggagctggtgaagtgagaggtggagtagaagttgtggcggaggg

SEQ ID NO: 29798 - DNA, 321 bp, Zea Mays
accggggaattgaagctaatccagacaagatcgaagctatcatgaaaatggaggcaccacgatcacaaaagaaagttcagagacttaccggatgtatggcagcactgagcagattcatatccagactgggagaaaaaggcctaccattttataaactactcaagaaggtggataagtttcagtggacttcagaagcacatgatgccctagacgcattgaaaaaattcttgacgacaccaccagtgctgaaaccgccacggcgagccacatcaactcaaccagctaaggatttgctgatgtatatctcttgcacgactcacg

SEQ ID NO: 29799 - DNA, 755 bp, Zea Mays
tgaacatggtaattcaatcagcacggtaacaacaaactctgaggcgctatcacgataagaccatgcgacatcgatccttcacagtaggagatctcgtcctccgccgaattctaacgggggaaggatggcacacgttgtcacctctatgggaaggaccgttcatagtagcagaagtcactcggccgggatcatatcgcctctctcagatggacggcacggaaattgggaactcatggaacatagaacacctcaggaagttttacccctagccgtatttcaaaagctattgggacgacaatgtactctgtaaactgggaaatatatcatcaataaaaagacttcaagagcgctcaaattattcattgtcgacctgcattcttacttaactcggggtgaccactataccctactaacggagcaatcggcttaagtcggcgatgacttaagacggtgcaacatgctcgcgcttacttaactcagggtggccactataccctactaacggagcaatcggcttaagtcggcgatgacttaagacggtgcaacatgctcgcgcttacttaactcagggtgaccactataccgtactaacggagcaatcggcttaagttggcgatgacttaagacggtgcaacatgctcgcgcttgcttaactcagggtgaccactataccctactaacggagcaatcggcttaagtcggcgatgacttaagacggtgcaacatgctcgtgcttgcttaactcggggtggcca

SEQ ID NO: 29800 - DNA, 380 bp, Zea Mays
cccgatcttcacgatagtatgttgataaataggatggttgggtataaaagtaacggaataacaaggtaaatttactgaagaacagcgggtaactgactttatacctgatcaagttcagaggtgaccaagcgacagggagagagacattgaaaccgtgtagacttcgactcgatctccgaacgaccgcagaaccacaaccggagctaatccacacaatatgaggtagccatactggaactcacaagacacgaactagtggatcctagaggaatctcttcacaagtccaggagaacaaggaacagcaggggtagagtaaacactcagtagctcggctgcggtaatcacttggattatcaaatcattaaaggttataaaagtt

SEQ ID NO: 29801 - DNA, 381 bp, Zea Mays
gcttctaattcttgcttacccttaactgatacaatagtgttcattttatagagacgactgacttatctctttccaactaaccaaatctggtctaatttttatctcttccttaactaatctgatctaattgttatcaaccaaatctggtctaatccttatatcttccctaactaatatgatccaatcaatccctatcttttgcctaacaaaccaactattttgttctgatctaatctcggtactgttcacgcgctatagtaactgcgtgagcacccccatggacaagtagctcgtcctcgagctgcagcataacgggtgtccatagaccgactcaatttggcctaagcctatacctagaagaacaagtcttttacatctcgg

SEQ ID NO: 29802 - DNA, 319 bp, Zea Mays
gtccggggtccaggtgcggaccgtccgcagtacaaatttcagcaaatgcgcagagtcagcaaaactttgttttggctcagttttatgtatcgcggaccgtccgaccttgaggggcagaccgtccgcaagtcatttttgaatgctttgacatttttataaccgtttttagccgttgggattcttgtgcggacagtccgggcttgtattgcagaccgtccgcatgtgcgcagaaaaggggcaattgacccataacggctagttttggagagggggctatatatccttgtgttgcacgggttgaaagggtgaaggaggctag

SEQ ID NO: 29803 - DNA, 321 bp, Zea Mays
tagccttacaaatttttatccaaatcattcagtgcactaaagttactacaatcaattaacaacgcattcttcacgacaatcactcaacaatttgcattttaaattagacatcacatgagcactattacttttcatccgcgaccataaacatacacatttagactacaataagcaaatcatcgtgactacgagcttaaccaagtcatctattaattcggctaactagcgcaacaacataggccgctatacatcctacatgtcggcttgcctcttatcatcgcaatccgagacaacacatatataacaaacacttaacgaaat

SEQ ID NO: 29804 - DNA, 489 bp, Zea Mays
tgtgaatgatgtggtacatgatgacctcgaggtggtacatgatgtggatctggaggtccatggcgttgatctggtgaaatttcttcgagaccctcttcaaagatgactttatttctatttgtggttgatgtcttgactactaatagttttgttgactactaatagttttgtgtggtacacggtggtagatccaatttctgtgaattgtgtttcgatttgttggattagttcaccttaatctgcttaagaatactcttggtgtgatatagggtggcacatatattatatggatgtgtgcagtatttcttactagtccagttatgtaggaggtcgtctagttctacaggttggtttccatagtatatgaccatgttatgttgcatggcagataagtgaacgccaaaagggtctaggacaatgggtgagtgattttgttttgttttgcaactatttatcttaatgttcttcaacaaaccattgagttaatca

SEQ ID NO: 29805 - DNA, 438 bp, Zea Mays
ggagagtacccatacaatacctcaaatggtgaatagcccagagcggagtgccaactagagttgtaccaaaactcaaccagatatgtccagtccacccatttattaggacatgcatgaacaaaacatctaaaaaatgtttccatacattgattcacacgctccgtctgaccatcggattgggggtgataagcggtactcatactgagagaaactccagccatagagaataatgccttccaaaagtgactggtaaaaatgcggtcccgatcagatatgatggttgtgggcatgccatgcaatctgtaaatctgctgcagaaatactttggccactgaaacagctgtgaaggggtgtttgaggggcacaaaatgactgaatttggagaatttgtcaactaccactaagacatagttcattcctctagaaacaggaagtccc

SEQ ID NO: 29806 - DNA, 1076 bp, Zea Mays
aaaaagaggaggcttcggcgagtgtcatgtttgaatcaggatgctggcccttctgttcctgctgctgaagaagtactagtggaactttttacttgggctgaccccaatgggtgtgaccttgatgatgctgatcccaatgggtgtgaccctgctgaagctgaacccaatgggtgtgatcctgctgatcccaatgggtgtgatccgaccagagctgaccccaatgggtgtgttgttcgtattgttgacgaggatgaggaagaagaggaggaaatccccttaattcggaaaaacagtcggtgctacctagtcagtggggagagtagtgatattccttctccagctttgtctactctcgttggtctgcaagagttgtccatagcaaattttttatcaggctctcgaggatatggttcctgaagatctgctgtccgagccaacagatagtggtatgatgaacgtttgcactgacattccggatgtggggttagagttatcccgagcagtgtctcgtgcctcatcaaccttggagtgcggtcttcaaagtcaagaagctggtctaggttgctccattctcatggaggtcattgagaatccttcagccttagaggtggctgctgcagagaacccggtccccaaggatggcgccaacagttacccagcccccgagggtgttgccggtaatgatccggcttgggtgggcagcacgagctacaacccagcccccgagggtgctgccggtggtgatccggctccgataggcaatgcgggctgcgacccagcccccgagggtgtccgagcgggctccccttctcatacctccatggatgtccacgtcgggtcttctcctccacattctgattgtatggcagcagcacgtgcttcaaatcaggaagtcgccttagagaccgacgcacctgacgctagagttttgattcatgctggtgatgttgagttgatccccaatgatgctcttcagattgcctcggttgaaattccctcgtcgagtcaccaactggcttctcatgatttggggcttccttcattcttctccaatcttcaggtaatttggcttttcc

SEQ ID NO: 29807 - DNA, 763 bp, Zea Mays
tgctcgatgaactacatggtgccaagctcttcaccaagctggatttgcgctccggctaccatcaagtacgggtacacccagaggacgtggccaaaatggcgttccgcacccatcacggccattttgagttcctcgtcatgcctttcggcctttccaacgccccggcaaccttccaagctctcatgaacctggtactccaaccattccttcgccgctgcgtcctcgtcttcttcgacgacatcctcatatatagcagaagcttcaccgagcatatgcagcatgtccgtgcagtcttggacactctgcgcgccaacaacctacatgtgaaacggcccaagtgttcattcgccacatcaaaagtttcatacttggggcatgtgatatctgaagatggtgtcgccatggatgtagccaaggtgcagtccgtagcgtcatggccgcagccacgctccgcccgtggtctgcgaggcttcctagggctcgccggttactacaggcgtttcatcaaagattttggggctattgctgccccactcacgcagctactcaagaaggacgctttcctctggtcccctgcggccacatcagcgttctcctcactcaaggaagccctcacaacagcaccagtgctccagcttccaaacttcgcagctgaattttttgtggattgtgatgcctccgggtctggttttggggtcgtgcttcaccaaggtgatggaccaatcgccttcttcagcaggcaatttgcacaaaggcacttgaa

SEQ ID NO: 29808 - DNA, 506 bp, Zea Mays
ctttgagagccaccggcgatgaggagcaaccccgcggttggtgtcgggctgcctccctagcagtggacattatcgattgcgcacgtcaatggggccacccaatccatcgtcaccccaccacgtcagattctgtacccttggctgctcagtatgggcaggagtggtgtgtgatgggattggggaccgtggttgcgggttcgacaacactcccgtactgggaattggttgccacgcgagatcttagccgccattgatttttagcatacaacttggaatcttgttctacaacgtgctatttgttttgtggcctcgattctccagttctatccattggttcgaccctgactgtgtgtgaatgtgggctgaactttacataatttctggcacataacactaatctcgcaatgtcatattgtttcatgctatgtggctcgaatattgttgctggtaatcttagtcccatcttgctgcttaaagctatggcagttgtcatggtctctgatttt

SEQ ID NO: 29809 - DNA, 636 bp, Zea Mays
ccctaaaactccgccctccacgtgttcggtgaaatgcccaaaccagccaaaaatgctccaattgaacccaaatttttcaggcaccttcacaacatctccagtaacatattcgccaaatttcacgcccatccgatattccaggctttaatttcacccaattccccgtttcgagcgatcgtttccgagccgagtgcccaaatctcattttcttagcctaaattcaaaccaaacacacacttcactcatatttacccatataaacctattcgtgaagtatcggctcaattccacgtcatttcgtgcctcaattctaattccaaacctcctatggcactttttatcgttcaaacgccgttttcacgtcgtttgacctctcgatcgtctcatctcttgttttctgtgccatatttctctgtgtatgtatttattcacatttcatatacttatgactatgttactaatacgtgctcacctcttctgtcatttcagtgaccttgattgcccgtgtgccgtatcctgtcctgcctggattgtcacctctcgtgtgagttttccaggtagtcatctcatcctctgatattctatcggattttatcaacctgtgcttagcctctctctctcattcgtagtcatcag

SEQ ID NO: 29810 - DNA, 973 bp, Zea Mays
aagttcactttgagatgcctatgagtccaggtgatgcagagataagtgttatgctggacatgttagctggggattcttctgactcggtccctgctgaaacaatggctgttgcaactatcccagagcttgagaaaaccgtggacactcgaaagcctgagggtactcgcccgaaacgtctctgccaggtcagtcatccaactgcacctgtcgaggggaagaaaaagaaaaagagacggcttcggcgagtgtcgtgtttggaccaggatgctggcccttctgctcctgctgctgaagaagtaccggtggaactctttactggagctgatcccagtgggtgtgaccctaccagagctgaacccaatgggtgtgaccctgctgacgctaatcccaatgggtgtgaccctgtaagaactgatcccaatgggtgtgaccctgccagagctaatcccaatgggtgtgatcctgtgtcgtttattgtccgtattgtttataaggacggagaagaagaagaggaagtcccattgattcggaagaacagtcggcgttacagagtcagtggggggaatagcgatattccttctccagctttgtctgcccttgttagcctgcaagaattatccatagcaaattttgatcaggctctcgaggatgttgttcctgaagatatgctgtcagagccaactgatggtgatatgatggacgtctgctctgacactccagatgtgggattagaggtatcccgggcagcatcttgtgcatcatcgaccttggaaggcggtcttcggagccaagaggttggtcaaggtcgctcaattcccacggaggtgactgagaatccttcagccttaaaggtggttgttgcagagaacccagtcctcaagggtggtgttggcggttgcccagcccccgaggatgttgctggtaatgatccggctcgggtgggtagcgcaagctgcaacccagcccccgaggg

SEQ ID NO: 29811 - DNA, 655 bp, Zea Mays
caccggacaacaattgccgccgcgcgcggtggactgcgagctacaccgcgttaaccggggtaatgatgcctctcctaccttcgtactattcgtcctcgcgtatgtctccaacgaatcgaagtttagggcgctgtggctctggtggatccacgtgcggcaatggcgccgccgtggctggggtctgttcatcgtcgccggcaacgtcttgggttggggcatcctacaccgtagatttttagggcaacggtgatgattagactacgcatactggttcgctagagtgagggcagatctgtccgattttgatccatcgcgttaggatagatccagccattttgaatcagaaccgtccatctggataccggcggtccgcgttgatcgctcgatcattgggttctagatctaatctggaccccgtatttcagatcgggtggctcagatcgcttgataccttttcggccgagcccttttacataagaaaccttaagtttttaggcaatcaacccgcagtcctgcgcgggttgagtctgagtcacaggaatttttgtaaattaacccctgttgtctctggaattcgaggagcagtccagacagcaaataaaatcagagaaattcattataaattcattttgaatacaaaaataattactagaac

SEQ ID NO: 29812 - DNA, 508 bp, Zea Mays
actagcttccgttacaacctcagatcttctccccatttttggcagcaagtaccaaaaatagagagaggcacaagactcaatagtccccagggtcatcaccaccataatgacccgaaggaggaggatatgaaggatagggagggtagggagggtagcccgaaaagaaggtatgcactagatcttcctcaaatgtcgagtcccgagggggctcgtcagatggaggaaaacctgacaaagatgaaggaccctagtatggaggaggaggagggtgactagaaccagaaggcctagggtcaccaggaataggttcaggggcgggagcaggagcagaatggaagaaggagtcatcaaactcctcggcttcatcctcaggagtaattaatggcacaccatactcctgttggtgtcattcattaagggtcttggggtaggcaggggtcggaggtggaagagggcgctgaagcatgggatggcccatgggggctgcgaagcctcgcatgtcatcatg

SEQ ID NO: 29813 - DNA, 524 bp, Zea Mays
tgcgagtgtgcggcagttgcgatctccatgaccgtggacgatgtcgcgacggtcgtcgacacagtctccttcctcttctcaccttcagcactagggggtgaaatcctgcgccaaaccttattacgaccctcgaatcgacttggatgagaagccgggatgcggagccggttccaaactggcgctttagaagcctgctgcgaaagcttggttacagacgtcgtcttcactacagtctgaacaccagccgccggcgcagctgaacccagtctatcccacacggagcctctagataaccgccggtgaaccgtgagcctgttgtcgttacgcaccggccctggacatgtataggatcgatgtcccagagccttgcagcgaaaacaccttggctccctgcggcacgacacagcgaagtggtcgtcggcaaagcagttgaaacagcggccgatcaagtcgacgggcacagccttgctagcccgcagcaatttagcactccgctgccttgtcttcttcgaccttacttcaac

SEQ ID NO: 29814 - DNA, 681 bp, Zea Mays
ccaaaaagaatcttggagctgagctgtgccaaataggcatttattgtgtctctgatcattaatgctatacttacctttaatctatttgaccctgctccagtggaagcatgctagcagctcagtgaacaaccgacgaggaaaaaagaaccttgtcttatcctcatggggtgatgagtcaacgctttccgaaggctatgttaaccctcactatatttctgattactataggtcatataatgagagaaccaaccaaaatctagtgagttccattatttgatctatatttatggcattgttcggttctaataacgtttttgttctgactaaatcttttgttgttaacacagaaacgcttgaatgaagatgtcatcgattttgatctattggaagacttgatatgctatattgatgagaactgtcctcagggtgctattcttgtttttcttcctgtaagtttacgatggcatcacatcagcttagtgctttgtttgctaatatatatcttagcccttttcttccattgatgctgctacagggagttgcagagattgacttgttgattgatagattatctgctttagttagatttggaggggcatcatctgattggatccttcctttacattcactgcttggaccctctgatcaaaggaaagtgttccagtctccaccagataactt

SEQ ID NO: 29815 - DNA, 427 bp, Zea Mays
cgtgctcaaataatgctcgctcctggcctcctgctaccaaggaccaagaaaaggagggccggcgaggacgtctggccgtctgggtccctatatatgagacagcgaggaggtgggtgtgaaggctgtgcccagtgagctcagctcgatccatcgatcggagagcttttgcactgcaccagctctgaagccatggctgctgcttcttcctccatggacaggatcgcccagtggtacgtatgctgatcgctcaagcctctgttcgtacgtgcttcaatccggttcggggaggtgaattgacgacgctccctatgtttgctgttgccctctatctgcagggtgtcgtcccaggaggtcccgaccgacctcaccgtccgcatcgccgactccgtcttctctctccacaaggtacggtggtgttcactcaccg

SEQ ID NO: 29816 - DNA, 352 bp, Zea Mays
gtcacccctgtgagagatggtgtgattgatgaacctatgagagatcctcctcagaaacaagtgtggcttccaaaacctaaccatcttaggaacacacttgacacctttcccgacatctctagcgatccccttcctagagcccctcagccatccgaaaagaaaatcctcttccacaaacaaaatccacccaagagaggggtgaggtaccattgtgaatattgtgagagggatgggcatctagcttctttttgctttaggaggaagagagatgagcgatgggtttctaagtcgagcaggaaggacatgaactgcccctctcatggtgttcatgctcagcctgttcaaagacgtc

SEQ ID NO: 29817 - DNA, 302 bp, Zea Mays
cattgatttcatggcaggaaacaactctagggttgctatcactactgatatgtggactgcagacaaccaaaagaaaggctacatggctatcacagcccattttattgatcaatcatggaagcttaggagcattgtgatgaggtaatgtgacttgttcatggaatcatggaaccaattttatgtttactattgtatgtttactgttgtatgttcactattgtaggttcatttatgtgccaagtccacatactgctgaggttatcgctgaagagttgaatgaatccttaattgcatggaatctt

SEQ ID NO: 29818 - DNA, 456 bp, Zea Mays
gttgccacgtgcctaggtactgtaccacgtcgcagtaacgtgccttggcgtgtccgttcatcgccggtaaccttgccacggtgaaagccacgcacctcttgcgccagtgctctcccctctctccggccgccagcgcgccatgccaaattcaagagccaccaccctcgggtcctataaattgagcgtgccatcatctccgctaggtagtcaagcatccagcgcacccacttgtgtctcaaattgtccaccagagagctctaatttgagatttcccccaaatcggtcaagaacaccgcaacgtgagagctcgccgtggccagctctgcacaggtcggattatgccctcctcgctcttgttttagcatccctgtgtgcttgtgatgcttttcgacccagccaattgagctagaacacgtaggatcaccgggaacgcttcgggttgtccgttgatcgcgc

SEQ ID NO: 29819 - DNA, 362 bp, Zea Mays
gactgtgcgctgactagtggacccacagtccctcgccgctcccccgcgggccgaccgagccaatatggtcaacgagccagacccatcagacccctttcaattatttcagctcgggtccacccaaaccctaaaaaattagctcctccccgtcaccgtcattcgctcctgcgatcgccatcgacgaccgcccccaccgcttccacccgctgtaatctccgcgcttcatcgattcaccgccgtcgttctcctcccctggttcgcttcccctctcattctttcgagttccccacattcttttacatagttcagtcgctaatgtccatcaggttcgccccgccccttctacatcccttcaattgatt

SEQ ID NO: 29820 - DNA, 469 bp, Zea Mays
aatgcatttccgacttaagccgattgctccgttagtagggcatagtgatcaccctaagtcaagtcatgccgatttcaagtcaagcccaatcgaagtcagttgccaatcaagagtatgaacgcctttggaaaatgaaagctttattgatgatgaaatcttctggttacagagtacaacttttcttcaagggtttttgaggcattgctaagggtagaactttctaaggtgttctatgttctatgagttccccacttctgtgccgtcgatctgagtaagtcgatatgatctcggccgtgtgatctctgatacgatgaacggtccttcccatggtggtgacagcttgtgtcgtccctcccccgttagaattcggtgaaggaccaagtctcccactacaaaggatcggtgccgcacagctttgtcgtggtagcgcctcaaggtctgctggtacctggccgactgaattactgtg

SEQ ID NO: 29821 - DNA, 615 bp, Zea Mays
atttaatgaagacgagactttgatctaaccttttcttggtgcttcactactcagcccactccccacccaagtcgtggtgctcgtcgccacacgtcgggatcctgcaccaatacagctactttgccttctaattcgcaccgacggatgggtaggctattagtgggattctaccttggcatcacagcaccatctgcccttgctatctcacaagggtcccgtcgcgccgtcgcaacgcgacaatggctgttgcttgctgccaccgccttttgccttgtcgtcgccatctaccgtcgcatcgtcgcctgccctcgctatcccacgcctattgtcgcctcactttcgtcattttgcggtggagtcactgactctccacactaacgtgttgatgcgcccgcttcgccctaacgtccagtccccgccagtccacccctttgttctctccaactctcctttatggtggccaaaaaaaagtttcgatattgatgttatttagaacactactcatattatcaattaatcttcatgttattatcatggaactatttttatcaaatggtgtagtatattgatttgtctcctacgttatcgccccacctgaaattttgtcctgcgtcc

SEQ ID NO: 29822 - DNA, 639 bp, Zea Mays
tcgatcaacgctaactccatggccatcatcttcaagagcaagatcacctttagcccgggagctattttctgcttcaggaccatcccgtgcgtagcggacatagagggaactctgcatcgcatagcaacgccaccccagaagaaaccctcctcggaagttccatgggaagctggagtgaaaccgcgagccatgcccccactcatagctcggcaaggcatggccccgcgcaagtctgagctcaaaagtccccgaaggatggaaggccagtcaaccagggcctccccagcctggaaaactccattgtccacctcacccactaaggagtggacacgaatcactcggagaagggaagtgaatgttccgtatcggggaaggagaacacaacgagcaatcctcccaacacctccgccctcaaaggaggatgagatgaagcacaccacagtacctgctcctttctaccccaacatcctcttcattcagggaagattgaagtcatcgcccacctctgacgatgaacccaccatgctgggggaggaacctccccagcgtgatgaccgacgatggagaaacaggcaccggaacacaaggcaacatcacaaagtcgaagaatgggacccaacacaacctgtctctaaggac

SEQ ID NO: 29823 - DNA, 306 bp, Zea Mays
ctttggtaagttgctaatcttttgcttgtgcttctgatttgtgtttgtcgcctctggatctctggtcaaaccgatgaaccctaatctattctagttccttgctctgtgattggaggttgtagctgtgagggaccgatctggtgctccggctttggtaagttattaatctgaccctaatctattctagttccttgatctgttctttgttagtatgtgtaatctgatgcttgtttgtgtgatctgttctttgttctgtgattgtagccgtgaggggccgatctggtgctccagctttgtgcctctgtg

SEQ ID NO: 29824 - DNA, 330 bp, Zea Mays
aatgcattgaaatggtacctatgtcctaatctcgtccgtcatcatccaatccaactactggaatactctcttccccagcagagccaagctgaggcgccccaagcccacggcggagctctcgctggcaccccccgcaatcccctcgttccggtgacatagtttgatgctaccaagcgcaaaatgaaattgactgttaggcgaacacgaggaaggtgcctcacctaaaatgaccacgacaaagaagccgaccatgatgcagtccgcccccacgatgaagctcggacgtcgacgaggaattcacacgaataattagttagagctccgcccgat

SEQ ID NO: 29825 - DNA, 665 bp, Zea Mays
cggggacttgcctgtactaatcatcataactaagccactagttagtcgtcctcgtcccggtggcctggacgaccgggcagcgggcacccctccaccaccatttaatccgcttctagcttgtttctctatctctctctctacccccatctctggcagcttggcttcgccattacttggcttgcaggagctggccgtggagttcccgtgaggtggagaccaagccatgactgactcgctcgaccctacccgcacccgaaagagacgcttcgattcctatgcataaataggaaaaaaggagaggaggaattcgagaaaatcaccgcctctcttcctttcttcatcgccctgcccttttctcttctcctctcctctccacctaccgaatcccgtcgctgggggtcctcgatctggttcgcttgctgcgtgactcccagcctctgaattgtcttgttgtgccagacggatttgtgtctcttgacattggattgctgctcgtgttgttcttgtgtgggcaggtcgggacgtgcggtagattggtggtggcttcgtggcgctatcaatgctggtggatttgagcaggggcggtgggtgcgcggatagacgcctgagaaatccgggtgcccggggcagtgctgctccggaaatctgacctgccggcggagaag

SEQ ID NO: 29826 - DNA, 350 bp, Zea Mays
tgcggagtcatcggagcaagagagatagcaagttaatacctggaggttgtctaatctgcttgtgctgttgtggacggagcgacatcgagggcgatggttgaacgccgcctcttgtgattcagagctcatcaaatcgtgtagattgtcggacccgccagatgccggcgtcgatgttgcggccgcgatggaggcggcaagacccaactgagacacgttcatctcgacgagtttgagacacgagcggatgcgcttgcttctcctgtcatggcttgacctgttgcgcgcgaggatgaaattacacgcgggaaataggtgggacgtgagcgcgcgagagtattggggaggttttc

SEQ ID NO: 29827 - DNA, 381 bp, Zea Mays
gcgtcggtcgcgggtttgtcgaacttcagcgagcacaccgtcgtgggggggtcttgctccgccgtgcgggggtacctggtggcgtgggtatggcgcggtaaccgttggataccagatgaacgcacgagattaggtcgtcgaatatcgtttcggttgcatcctagcgtcactgttggatggcgatcggaccgctccgatgcaattttagggcaggaaggattgttgggcgtggatctttgatcctgcggacatcatcacataccggttcgtgcatgggatcagtttcatgtgggccgtaggattagatctgagtggccgtggctagcggataccccttcgcggtgtaacatttactaaagagaccccccgaagatagttaaa

SEQ ID NO: 29828 - DNA, 334 bp, Zea Mays
ggaatcacaagcaaagcaacgcaacgcatgccctttaccgggctgatgttgcggcatgatgatgtgaaagaatccagcccccacaacgctcatactactagcgaactccaaggcggctggtgcctggtggggtacctcatgtgatgtactactgcttgctgcacggtgaaaggcgcggggcgggcagggcaccaaagttgaagctgcaatccacctcggattttgggccgggcacagaggaaaggacccatcacattcacatgctccccctccctattccctcgtctgcgctgcatattcagcatctatctacctatcacctctagaaccttca

SEQ ID NO: 29829 - DNA, 294 bp, Zea Mays
tatgcaaaacgattataggagactagtacatgcatttgataaatctagtattgcaaattcccttcgcacgaggttgaattaggggataacacgcgtaatacatcggctataggttgtcacgaccagtcacaacccctttatgggatgccgatggacacataccctgagcaaccgcaaatcggcagtaaatcagccaagctgcacatgctcggacagtacgcatgtgagcgcggaccgtccaggccagcaacagtcgggcccatttttaatgagttaaccagacatacacctgag

SEQ ID NO: 29830 - DNA, 341 bp, Zea Mays
acgctggtcgtcgtgattgcgccacatcatgacccttttaccatgtcgttactagccgtaatagctcaccagtgacagccgtagctccttagccagtgactgccacggtagctcatgtcagaggccttctcctttctctggcctccagcacgccttctccaaattggacgccaccgctgatggattctataaattgatgccctagtgagctccactaggttattacgcacccagtgcaccagctcccgcctctgatcatccaccatagcctctcaatttcccttttcccccaaatcgggtttccgcgccaccgtgaacgcctcgccgtggccagctctctg

SEQ ID NO: 29831 - DNA, 373 bp, Zea Mays
ttgagttcgacctcctgctttcgtgcggcgtagccctacggtgtcgtctgctaagtcgtccatcgccgtacccctggtatggcgtcgtgtcttctccgttcgtcatacgggtttctgtagctattctgatactaacgtagtggtgcttggtgggtcccactgagtcggctcatggtgagttttagggacgccttcagtacaacttcatattccgtcatccccaatgtgtcaccttccatcatgcgtaggcatacgcatggtacggcatattgccctgtcccttctggcatatgggtcactgtagagatcccgatgccgaggtccccacaactagggttgactggtcccaccagtcagcgaggatactctccag

SEQ ID NO: 29832 - DNA, 388 bp, Zea Mays
cacggattcgcacccctctccgtgttcaacgggcattcagtcacgcagcgtgccgacgggtggcagacgcctggacccgaaatccttgattcaatggaaccgtgcgtgagatcacgtcttcccctccctctccacctctccgacccaccaaccactcgccgagatccctagaggagagtacatggagcccttcgatgaagcagatctcctagtgctcccattgtccctcgtcgcgtcgccacctcctcccaagccaccgccactacctctagctctcatgtcggctcccttcctttgcctccaccaccactgatggaggaaacatcgagcgagtaaatcctagcgctgaacttgtcccctcctcgtgaccccacacccaccgacgctg

SEQ ID NO: 29833 - DNA, 509 bp, Zea Mays
cttcattcaaggatctgtaatcaatgcacatcctttttgtaccatccttcttttccacgaataacactggggctgcccaaggcgaggtacttggtctgatgtagcctttctctaacaattcatcaacctgcttcttgagttccaccaactctggtctggacactcgataggctctcttggaaataggggcggtgccaggtataagctctatggcaaattcaactttcctttcaaggggtatgcctagtaactcctcgggaaacacatctgggaattatgatactatgttgatagcttctcacggctcgatttcctcaatatgggcggtgacttggtgacaccttcctttccttggtccagacaagaccaactccactaacacttcctctcctaataatgacactaacttcactgttctcttgtcacagctaagactggcttgatatttggttagccaattcatccctaggatgacatctatagtcgcatcatggttactcataactatt

SEQ ID NO: 29834 - DNA, 312 bp, Zea Mays
tgtactcatcttttgaaccacccagacagaaagtatttccttaaacttatcttgcgtcggcgaaatttatcagacatattaattatctaatcatgtaactgcatttttttatgtagatgataaatgatgaagatactgagacacctcaagcgcatcttcctccagttaaaataagtcatcttcaacctagttctttcgttccagctgtaatagataaagttgttaaggtcgattctgggatatcattttcttccggagaccttcaaacatcagacatactatacctccagtgtgatgatataatcgcaaaag

SEQ ID NO: 29835 - DNA, 329 bp, Zea Mays
gtccgatggtgctacaccctacctagggttgcctcccttaggtcgtggaattagaacagggtgcacaccctgtcaatttcctcgatccagtgcgggagccatgagatccagaggtggctcacaagtttttcgtggtcgaggtggatctagaggatgtcgtggaggtcgaggaagggccatagttactcgtggtggatgttctggtgtcaacccaaccactgaccatgcccttgttcaagatctagaatatgaagaagaaaatgaattggacgctcgatctccagtggtaaggaaatgcatattaatttttgtgtttactaactgccact

SEQ ID NO: 29836 - DNA, 278 bp, Zea Mays
aagacatgaaaaaagataatactaaagctagctatgaaaggttcaataccaaatgaaagaatgattttcaaaatttggttagtttaacaacaccacaatgatatgtaatgaggttacaatttcctttggtgccaaagcacattctaattttatatatttgagcatgtcacatttgtccactccactccaccacattacatttgttttattgtttaaaaggagagtggaaaaagaaaccctaccaacagtctcattatcctcacagactcatggtacta

SEQ ID NO: 29837 - DNA, 365 bp, Zea Mays
gctcgccgtgagttgcaacgtgaccctacttatgatccacaagaccatgaggtaaattacacatccttaatttcgtgtgtgtacctaattagctgatttcacaatgtctattacacatgcatgatttcttatgcattttattacatgaataggaggtcttgtctcaatttcgtgcgatgctcgatgacgctgcggcacgataccaagacgcaccggaaccgacccaagacgcaccggaaccgaccgagacaaccaccgagaggtcaaggaaaaggaagcagagcgatcggaaaagaggtgacaggggactgaacaagtttcctgacaagacaaataaaatctctgatgtgagcccgaatggtcag

SEQ ID NO: 29838 - DNA, 296 bp, Zea Mays
tgtgggtggagcactaggatgtgtccttggtactgacaattataacattttgttttcctgaagtactatttgtttttgttgtcagggtataacagtcatcctgaacaattgtggaagtaaatgtggcgtgctggttttggaacatttcctgacttatgccaatcgcttggctggtaaggcatagtggtcgccttaagatgagtagatgtgatcgtatcatgctgacttaaatcattgctgacttgagtcgattgccccgctagtagggtatagtggttcccctaatccgagtcagc

SEQ ID NO: 29839 - DNA, 523 bp, Zea Mays
gtaccataaggtcagaagttgcattatcttcttttgcttccactataatgttctcattctggtggctgctatctgatgcattagtgttgcttgaatttttttttctggagcaggcatggaatcgttggagttttcagatttgtctaccacggtttcagaagttgcattttcggtgtttgctcccactacaatgctctcatcattgtgggtgctctctgatattgtagtattgtcggaattatcttctactgtagcaggaatgggatcactggaatttttggatttgtcaagatcaggctcagcttctttctgctgcaggagttcctttatagttgtcgtctaatctgggtttgaagcaattgcgttctctttcatttggttgatatggctctctttctccacaagagctgcttccaattctttctgcgtgttggtaagatatgtcgtggtagtttctgaatccatgagcttgtttttcaattctgccctctcaatacttaggacaaatgtttttcaattctgc

SEQ ID NO: 29840 - DNA, 328 bp, Zea Mays
tctcagccattccagtctatctcctcattgctatgagcgttcccaagtgggtgatcaaagctattgataaaattagacgggctttcctctggaagggtagaaaggaaataaatggtggttgctgccttgtggcttgggagaaggttgctaggccgctgcatcttggtggtcttggcctcccaaatctgctttacagaagctgggcactgcaagccaggtggttgtggctacagaaaaccgaccctagcaggtcctggattggtcttgatatccctgttcagccacaagtcaaggcgttggttgccatttcagtgatctcccatgtggg

SEQ ID NO: 29841 - DNA, 275 bp, Zea Mays
ggacgagcatgcatgcattcttaattaaacaatttaataatcgggtaagaacttaaatatacaatgatgacaaattaagtacccccgtaccattgtcgtagttatagagaggccgagttgcgatcccttttcattttatacttctttttcttttacttacgcttaaccgtacacagatgacttctcacggatcctcggacgaagggaatgcacagtcccacactgacgggcttgcacgagagggtttcccccgtattttgtgggtggtactttag

SEQ ID NO: 29842 - DNA, 311 bp, Zea Mays
ctcgaagatagtacaccgatggtgtttgttggctatgaaagcgggagcaaggcgtggcgcttctatgacccaaacatgaggtgtgtgcacgtatcacgtgacgtcatgtttgaagaagaccgttcctggaactgggaagaggagacgggcaccgatattcccttcggtgttgaggttgtgccaggcgaaagcaccacctgactggacatgggcgcctcgacgaatttgtcgagctcgacaacttcttcaccgagctcgtcgtccgattcaccaagttcgtcaagatccacgcagtttggaggtggtgtcat

SEQ ID NO: 29843 - DNA, 377 bp, Zea Mays
gtttacggtcaggctagtggccaaagcaaaatcatcaagcactttcctaagcactggaggttttcacaaagataaatgtgtcatcggcatacttaagaacatgacacggctccccatctacgatgggatgacacagatcgtgctcaacactcctaaaggcaatgagctgacggagaacatcgaccacgatgatgaaaagaaaaggagaggccttgagtttagtagcatggcagatttggaagcatagaaatgcgtgtgtgtttgacaatgcttccccaaacatccacgtaattttgttgtccatccatgatgatgccttattatggggctttgttggggctgctgctcttaggaaggtctggcagtagttgggtgtg

SEQ ID NO: 29844 - DNA, 449 bp, Zea Mays
ctcgacatcccactcaaggacagcatcaaaggatggcgcttggagtggtttattgtagaaaatcatggcaagtccctcccccctcggtcagggagacagccggatgttcgcgctccaagttggactgaatcccccacatacttggagataacagaggccagggttctgcttgctgaaattggcttgttgaaggagagaggtctgactgctgaagctgtagttgcagactttgtttttaagaatattcaaccactaaaggatagagcgtacccagcttatttgtatagtggtgtcactgattcaacctgggttaccaataagaggattcctgctgtggatttggtaagccaactggagatgattcttagaggcaaagtatcaaatattggtgctcctattgcatattctgcctggaatttgcctccttccaagacttttttcaattttgt

SEQ ID NO: 29845 - DNA, 366 bp, Zea Mays
cgcagccgggggagttacagcatgccgaccatctgaccaacagggtaacgtcgatgttgtattctctccacactgcaccgatccgctagccgtcgccatggtgtatgccctaaccctcccaggtcaatgaacaaaagcggtggttgtgtgtagccctgttttttggagttatgctcctggattagccaaaaccgtcctggttgatattcatggtttgttccaaatatcccgcgtgatttgtatgtcgcgagatttccgtgtcccgacccaattacgattacctgcctattatgttatagccacataaacatcctcacccccacgcgcgaccccaccacgaatccacgatcccggtagacccgcgcg

SEQ ID NO: 29846 - DNA, 575 bp, Zea Mays
gttgtcagctatcccggtttatcttcttattgcattgaacgtgcctaaatgggtgatcaagaagattgataaaatcagaagagctttcttgtggacaggaagaaaagagacaaacagggttacaggggcatttgtttggtagcttggggaggtgaccagacctatcaatctgggcgggcttggtactccaaaccttcaggttgctggatgggctctccaaatacgatggctttggctgaaaaaaaatagatgggtgcaaccttgggccggaattgagatccctgtccatcctaattcacgtgcattgttctccatctctttgatcagccaagtgggctatagcttgaatacattcttttggacagatcgctgggtgcatggatgcgctttagctgatctcatgcctgcagttgttgcttgtgtacctaaaaggttacagagtagacggacagtggctgaggctatggtcgacaggagttgggtgagagatattattagggccctatctatggatggcctgttgcagtatttacagatctgggatgtggtagaaagcagtatcctatctcaagaac

SEQ ID NO: 29847 - DNA, 299 bp, Zea Mays
aacaaattctgtcccattatcagcttggaagcatttaatagtgtagctaaactgtgtgcgaacataaggaataaaatcagcaatgtgctgacggacctcagacttgtgcttaaggggaaatgtccagcaaaaatgtgtgaagtcatctagtaaaaccaagtaatatgagcaccagatatactaggaaccggggatgtccagacatcacaatgaactatctcaaaaggggaaacagtgtgggaagtagatgtactaaaaggtagacgggcatgtttgcctagctaacaggcatgacaaag

SEQ ID NO: 29848 - DNA, 338 bp, Zea Mays
tttttttatcctgattactgctttcatgtccgaaaacaagggtcgaaaagaaaaatggtgactttatattcttccatcacgcctaagcagaagagagctaaggttttgacaaataggtcgaagccacactctttagaaaggacagctgcaatacctgatacaaagaggatagggattgctgaacaggtcgaagctatccccttggctttggaaacaatttctgctgtgacgatcgaagctagtgtcggtctagtagaagagtcaaaggaagaaaagcattcaatattgttgagtcccctaaccacaacggggttgccgaagctaactactgctgcaac

SEQ ID NO: 29849 - DNA, 313 bp, Zea Mays
gtcagctgtccagcacctattatgctccacaagccaaataaagaacttgcacttcctaggagcccaagatttccacactcgttctgctggttcaaactgaactgaaccatggaagagagctttataagcagaattagctgtataatctcctgaagcactgaatttccatatttgtcgatcccttactccatgctgaagaacaactgcctcaagcatttcacaaagttctaggaattcagcaatgattctgagtgaaattgccccttttatatcggagatccaatggagattagggagagcatctttgaccaac

SEQ ID NO: 29850 - DNA, 402 bp, Zea Mays
cacatttagaccataacaaacaattcatcgtgaccacgagcttaaccaaaaccatctaacaagtctgctaacccattattatcgcaacccgagacgcaatatgtatataacaatcacttaacgcaattgactcctacttaacatgagttggctaatgacgtgactatttcccaattaccaacatacaccacctttcgccatttttggataacctgcacgacacacagctattgtaatacatctcaagttcattcaaccccatcagtatagcactagcacatttcagaaattttcttgagactacgatatcatgcacctaaaagcatcacaagcatatttacggaacctatcggttaacttgatcgacacactacacatgttcttcgcccttcaaaatttatc

SEQ ID NO: 29851 - DNA, 539 bp, Zea Mays
gtgagattgagatgaagcttgaggtcgtccatgctgatgatagggacaaggtcttacttgcagtgcagcaattaaggggtcaggctcttgcttggtggcaaagttatcgagaggtaaatgaagatgcagttgtgatggggtgggctgattttgtcaagatctttcgagagcagcatattcccagcagtatgatgaagcttaagaaagatgagttcagaaagcttcgtcaaggcgccatgtccgtgtcagaatatcttcacaagtttacagaattgtctcgttatgctcctgaagatgtcaatgatgatgaaaagaagcaggaagcctttcttagtggccttaactctgagatcaggacccttgtggaagtcactgttcataatgactttaatgccatggttaacagagcaatcaccaccgaaagaaacaaaaaggcggagttcaatgagcgcaaatgtcgatttgagagcaagaggccccaacagcctgagaagtttcagagaattcagtttcctgctcacacaggccaccggagccag

SEQ ID NO: 29852 - DNA, 483 bp, Zea Mays
ccgggctgcacgacaaaaatccttgaagccgagcgatggccgaaagacgccgatctccacgaggccgcgctcctccaacgacatcaagggcaaggcgacgttggagcaccccgtctgggggctcaaaaggtggaagggcgcaatgtatgaggggaggacgaaggcatggccactgcctaggggatcgatccccctttataggcagacctcctcgcttgcaccccttagcgtcacgggcgaaatccccactgacatcctccagggttctccctctacgacacgggggctgggacccgcacgtcatatgagctgatccgaagcacgaagatggcgaactgctgcacgcgaggcatgtaaccgtcccgcggttacaagcgctctcccatcttcgcagaaaccggtggtcgaaagggtggaccgccacgcgacaggcatccaactgcaccgcaactgtgcgccccttcggcttcgaccacatccggc

SEQ ID NO: 29853 - DNA, 321 bp, Zea Mays
acgaccctggtgtgatgatgggggagaggtgtttagaactgttggatctgtgaatagcggctaggattagatttggtggcttccgtttggcttaatcaatcacagccatcgatcattgatcgtgcggccggtgtgggagagaatagatagtgtgctgcagatcgtaagattcggatccgacgtgtgaggatgaactcaggttcatgagtgtctcggtctaatctggaccgactattttagatccggcagctcttgtaccccgataccccatcgccgcgtgcttttgctaaagaagccctggcgaatttcaatataaacccg

SEQ ID NO: 29854 - DNA, 1629 bp, Zea Mays
ttgcaagactccaacacaagaatattgtgcgtcttgttggcttttgccatgaaactcaacgccaattcataccgcacgatggaaaaatgatttttgctgatagcaaatatatggccctttgcttcgaatatatgcataatggaagccttgacaagttcattattggtattattgcgctcttcttattctcgtatgatcaattgaattcacttgaagtaaccattcttcaaattcacattttgagagactgtttgctccaacagatgaaaatagtgtccatgactggtccacacgctatgcaataatcaaggggatctgtgagggcttgaaataccttcacgaggaattgaatcctcctatttatcatttggatttaaaaccagctaatattttgttggatgacaatatgatgccaaagcttgcagattttggcttgtcaaagatttttgaacaggaacgaacacgaatcacacaaagttgtgtaggaacacagtaagataaactcttatgaattttactcatgcaatgatttttatatttttttcctgtatttcatcatatcagtaacatgtatacatgatgtcttatgcagtggatatctaccaccagaatatatagacaggaaagtaatctcaaataagcttgacatattcagtctgggtgtcatcatcataaagattataagtggacctacaggttacacccagtgtgctgaaatgccttccaaacaatttgttgagcttgtaagaaaacttgctacaaatggtgatcaattgtattttttgtggaaatagcacttactttttttaatatatactcaattttctatgttccgaatccaaaccatcaggtacatgaaaaatggaggaataagttacaaacaacaatggatgcagctgcattggagacatattgtgaacaagtagtgagatgcattgaaatggctttaagttgtgtggagaccgatcggcacaaaaggccgagtataggggctattattgatgagctaaataagatggagacaaataccgaccaggtatagtcactgatgacactttcatttctgattatttaatgtttatcttactgttaaaatctagccatgacataatacgaaggaagttatatcagccaataaatcttcataatcacatcatcaacaacctacatgtttggtacagagctactaatgcatgagatggacggttcaaaccacaacggctccttttttattgtggaactccacgttttggacaagaagtgattaatgttttctattgaagtagtaatatttgttagtaagacaactcatttcacatgtcttttcactgctctgaataaatgaaagaggaaagtctgttttgcacagtgaatttaggcatttacaaagcgtacacaatatttcaattttaccaccatgttacaccacatttaaaattgtaactccaacgttttgattttcccattaaacattttagctttattacatagagaaacaacaaaactgccaaaacattattgcctgaattaaattaatgttttcctaggttctgatatccacgtttaaaataccatctccaggtattttcagtggatatatgctcgactccagcacaaacacaaccacca

SEQ ID NO: 29855 - DNA, 476 bp, Zea Mays
cgataggcctggctaggacagcacatgcaatccgagacgtgccactacagcttcacttaggaatgtgtgagtggatcatgaatccactagtgcagttaaattgatgccattgattgtgactgggagcctgagagtatttgtgacgcctatcccagtaatggcctgaagagaaattcccaagtcgactggtgatggaggttctgtggttgtatcctcttcttccagttcaagcaagaatataccatgacctgaacacttgtgctctggtgaatatttttccttacaatggtagcattctccaatggcgcgtttggcggctaattcatccggagacaggcgcctaaaacgtggtcgattggctgtagttgctgtcggtcgtgccattgttggtgctgcaggtttggagggtacttctagagctgctgttgactgtccagtggagcttcccgtgagcatcaaacaccgttcatacaccc

SEQ ID NO: 29856 - DNA, 312 bp, Zea Mays
cacaacatatatataacaatcacttaacgtaattgactcttacttaacaagagttagctaacacagtataaacttagcaaaccattttagacattgcaactcaaaaacatgggttggagcatattaatcagtttttcttaaccattgctcaacttaaattggataacacaaaagtcacataaaacatcatatttttaggagatctaacatgaagagcattaactctacaacataagcgattcaacctctaccatgcttgaccgaacctattggctaacccttccgaaacaccctatccattcttcacatttc

SEQ ID NO: 29857 - DNA, 743 bp, Zea Mays
aacggctcaacacgaccaagcaagaaacgactagccctcaagaagaggcaaaatcagggctcaacaccactagccagcagccaaaaactcatcggagcataaaaagcttcattggagcataaaaaccatttcagcgcataaaatcagcacaaaggctgaaatcaaagctagtccctctagaaagaggcaaatggctcaacacaactagcaaaaactccaagaaggcccaattctcctccccctgtcacaatactcccaaaaatctctcccagagaccaatagctccaaataacacatctctcccccttggatgagaggaagcccgaaagaccaaatttctcccccttgatagaggaaccaggaaatctcaaaatctctcccccttgttgacaagtgaactcatcaagcacaaacaagggtagaaagaaaaacttcccctcgacaagagaactccccctgagaaaatgcagaaatgcaacagagagtaggaaatagagaaaatgcaggagcttcaggagtatactagtcagagtgtaaaaatgttctaagtgatgttgtgctaagtgtgcagcaataaatgcacgtgctagcagatgctcaaactgatcatatgcacaagatatgtgaagtgtaagcattttgatttagttttaagcatttcaaagaggtgttcaccacaaagacaacactaagcatatagtaagcaggaaatcaactaagtgcctgtcataggtaaacaaggt

SEQ ID NO: 29858 - DNA, 296 bp, Zea Mays
gcgggttatcgtgtctttcaccgtggcaaagcctccggcaatggacagaattactactacggttcactgcaacgtgttaaagctcctaggcatgtggcgcacgaacggtaagcggccaacgccggcgaggatcatctcggcgggccacagaccaagtgggtacggcgactgggtggcttggtccatccccctttcagatcttttacccctccgcgactatcccctcactagagagcacgaatcgtagcaccggcgcggatcacggcgcgagggtcaccggcggcgaggtgcgatga

SEQ ID NO: 29859 - DNA, 345 bp, Zea Mays
cgaagaattatgctactgtttaatcttttaaggccattttcagcatgtcttttatctcatcctatatttcaaatttcactatgtaaatagcaggtttcttatcttatcctctatttcaaacttaggttaaagactacgaattgttataaggtaggcacacgcatcactggaaatcgcgtggcccatctccacttgtgaaggcaatgccggtatagtaaccgttttccttctgaaagacagatcacgccaatacatgtatgggttatttttctttacaaaaaggaaggctctcgtcaactattatcactactaacagcatcttgtactttataatcttgttgtgcc

SEQ ID NO: 29860 - DNA, 1474 bp, Zea Mays
atggctagggtctttcattggcactgtaattggaaatatcaagttatccattggcaatattcatatcagatacgaagacgtagagaggtaattcagttctgctcagtgcatttatcctttaggatgcatattgttaaggagtataagagcaccatgacttgtttcctgtagcaatcctggccacccttttgcagcaggtctggtactttcaaagctttcagcagttacagtggatgaccttggcaaggagacttttgccacaggtggtgatttggaccgagtgaaaaaggtacattattcctacattttatttccatggttagtttgataactcatggctgatgtcaacttctggagtccagttatgttttttgtgatcttgtagaaagcaaagcgagcacacgaggaaatgcctattcttctggcatttccttgataaatctatcttccatctccaagaaatggtgattgctcattgtctacttagtcgaatattagatttgaaagtaaaaaataacaatagctcattttttattttctaattttggcgatcaattaatttgatttaaagttttcaggacctagtaatgaattcttttcgcttcacacatcaagcatttttcacatttggtgtgcttatttgttttagtttgaccttttttacttttgatcaatttgcgtgacttctttaacttggcattttgcagtctgttgaacttgagagtctggcggtgtattttgactctgatagcagttcttggattgtggataaaccctgggaggatttacttccatcagagtggagtcaggtgcctcccaattttgtttgtgcgcaaataaataccctgggtttgagagaataaattggcatggagacaattacctttgtcaatttctgtttgaaaaaacatgtggtagagtgtgaatagacgcagtgctgtaatgaggttttgttgggatcttttattcttctgttgcttgcatccagcaacctaacaaatatttattggtttgtaaactacattttcaggtttttgagtttcaggagcaggatggttccagatctgcttcgaaaaagcatgcctacattttacagcctgtatctggcaaagcaaaatatacaaagatacaacttactgaggcaaagaaaacaggacaagcattgcaaaatactgcagtggatttggatgatgttactctgtcgttgtcgaaggtttgtactcctgtcttttctctttcagttttgtcaaaagcactgtgaaaagtaataccttttccctcaaccaggatggctacagggacatgttaaagttggctgataatttctctacattcaatcaacggctgagatatgctcatctccgaccatcttcaccattaaaatcggatccacgagcttggtggaagtatgcatacaaggtggtgactcaggaaatgaagaaagcaaggtatatatacaacaacaaaacctttt

SEQ ID NO: 29861 - DNA, 549 bp, Zea Mays
gttgaaacaccatgcccttaacatgaaggacgagaggtcagacttctcaaccgtcgccgggtgcagttcagaaatgaggcatgagccatgcagcagatgttccgccgtagagcgtgcccaagcatgaggcggtataccccggattttcacgtccaccagggccgggagggttgctgtcgacgcatgagcacatctcgtccatctcttgaaatgcagattgaaacgcggacctctgaaaagcctgcctcccccgtagaccctcgatactgtgtcctcatcggggagaaacaggaggaagtcttctggcatggcctgatgaatcgccattgcagccacatcgatgccgaaactgagagcaacttcctccagcacctcaacgccctgaacttcaggcctggtgcccaccaccgagacgaacagggcttttcgcaatgctgcttcttcacgcgtcatttccgtcgtaaaagccaagacgcaagaaggcctcatggacctcgccggcaggcaagcatccagcaggccttcatttgtagcaggaaccctctgttc

SEQ ID NO: 29862 - DNA, 476 bp, Zea Mays
cagaagtgtaggggtgcatggaggattgcatagccaggaagacgtcaagtagacaaaagcaataggtgaacacagttgcatgatcacaaagcagctctggataccgacaccatatttggaattccaggggtagatgatgcaccgatgggttaaaaacacgatccaggtccggtgctggttgaacatctaaacataaatctcatgctagtggcaggcttccgcgtggagcagacagcagcaacacaaagggcgactctaaacgccatgacgatggcagttaagacggttgacatagtagatggtacagacccacatgaggatagaagatgatgtactactcttgtgcaggctccggcgctaaggtgttctcgaggccaatcagagcagaaagggtcgtgatggctactcttgtgcaggcttcgacgctaacgtgttctcaaggccaatcagagtagaaagggtcgtgatggtggagt

SEQ ID NO: 29863 - DNA, 570 bp, Zea Mays
actgccctggaagtaacagaggctaaggttctgcttgctgaagtctgtctgctgaaggaaagaggtctgaccgctgaagctgtggttgctgattttgtttttaagaacatccagcctttaaaggacagagcatacccggcttacttgtacagtggtgttgctgactctactcgggttaccaataggagaattcttgctaaggatttggtgagccggctagacatgatcttgagaggcaaagtatcaaatgttggtgctcctattgcctactctgcttggaatctgccgcctcctaagtccttttttaattttgtgtctgatcctcttgctggtgatagtggtctgggtcttagagtgcgaccctctcctaaggatattgaggtcttggttgcttctctttgtgatcttcctaataatgagaagcaagtccattttgagatgccaatgagtccagatgatgcagaaatgaatgcaatgcttgacatgttggatggagaatcatttgactcgggtcctactgaagcaatggttgttgccgctataccagagcttgacagaacaacggacgcc

SEQ ID NO: 29864 - DNA, 344 bp, Zea Mays
accatatgaggcctggcatggcaagaaaccacaagttggtcacttgaggacttttggttgtgtgggtcatgtgaagaagattggtccaggtgttgaaaaattgtcagacaggtccacaaaaatggttctgcttggatatgaggcagggaccaaagggtacaggatgtatgatccttcatctgggagactgtatatcagcagagatgttgtgtttgaagaagaagtggggtggaattgggacagtgatgaaaatgttcagcaagctgagacagaatctggtccttgtgaattccagtttcagtacactatgcctggtcaggtgttgcggcagccaggtgtttcag

SEQ ID NO: 29865 - DNA, 365 bp, Zea Mays
ctaggtccctaggacaaggatttggcatgtaggctggaccgagtaaaccacataggccgatcagtcggatgtaaccagaaggagacacgggaatccatacgcgtgaacctaaaacatcgcatccaccccccatgcatgcaggggatgagataaagctccatgaaagattgtgcgccaccgtatgagtcagggtagttcaatgtatgtaggcttgattatagcagtgagctcaacagtgtaaaccctaactccgtcgagtatataaggcggagtatgaactacaaaacgattggatcctctgataggctagctagagcatagacttcatacactttgtaatctcgaactcaagagcaatttcttta

SEQ ID NO: 29866 - DNA, 767 bp, Zea Mays
tcggaaattacaaaaaccttcagagctacagatggtgtcatctttgaaggtctcagaacggcttctagtacattggccattctctttcccttcctaggagttcctgcggggcagatattgtctggctgcttttgtaccttcgggagttctggcatcttcggctccatgttagccttagatgttttagcagatgattttttgatatcctcctgctcctgtccgaaaattcaaaaggtttaataatgaagctagcaagaaagttcaaagttgaatttaaaaagtaaaaacctttaccttcgaaggcaaaatacttttagtaactagaaaggcaggcagttctgttgccctttccacataatatgacatcggacaatgagtgagaatctttacttttttctgcttcgacgcagcaagaaaagccttcagttctctttagccccttttttcgagcagggaaacaataatcagggtaaataaacccaatggcaacgaaaaccgtgtttaatcttcttcctcgggtaccaaaggcaacattcatagcttcgtcctcagctttggtgtaggcccctaacaattcatcattggttgcttcgatagcattaatccattcgtcatttggctcaccaaattgatttctctagcgataagtatacttcagatatatcaaactacttctttcggcactttgactcgagccagccctagtatcctttggcatttctcagtcggcagctagggggcacaccttgaatgctatgtgctcctgc

SEQ ID NO: 29867 - DNA, 439 bp, Zea Mays
gttgttcctgtcgtagggttgcagaacgtccaactctagccacagactgttcgcgccgatgcagagagcaccgccaggcgatacaccacgagagtttggtcccaaatcagagccaacacactttttggcgactctggtggggacgaaagattggatccatcagatcatatctattagatcagatctattagatcgaccacgatggtcgatcccaaagaatgcaccaatgtctcccgagacaacatccttaggctgacttttgagccgagtttatcgactgacgaccagcaggaatttaaagactacatgaggaagcagggcgaggagttcaagcatcgacaagattcggagcgcaaggagatggagagttgctacctcttgcacttcatggtaggtcaccaccaaaaggacgtccaggagaagaggggtagagctcgct

SEQ ID NO: 29868 - DNA, 337 bp, Zea Mays
ggtgaatgctacatggagttatttggagcttgtgtgccacctttactgtaatatgtatccccgacaagcccccgagcttcaagttaacttgagaaacaattagcttgaaggtccgaaaaaggccatgtgtagaagcaacttcaatggcgtgcaccataggttcaccaattgggtgtagcccccgagcatcaagttgacttgagaaacaatcagcttgaaggttcaaaatctactttcataatgtattgccttgtagtcttcaaaagttttctgatggtttcctccatgcaacccctgaacctcaagatgattaggataatcaggttgaggatcaagc

SEQ ID NO: 29869 - DNA, 307 bp, Zea Mays
gcaaaacggatggccgaaggggtatggttgtatcttggccgctggattaaaagttgatggctcagattttataaaccaaaggggtataatgcttctaatctggaccctcaatccagagatcgacggcaccaagcatcctattctctcttctattcctggcctttaatcacaagatcaatggtccaggggtcttcttcctcccaagacaccttctctcctccaccccaaccggtctacaccagggcggcgccaggaagctctgggtggtgacttcgcctggcaacacggtcggtcggcccctacttcc

SEQ ID NO: 29870 - DNA, 456 bp, Zea Mays
agacgtcttggcgccctgcaagccgacgtgacggtgcactgtattgttgacttgtgcctgctggttttctactgagagccgaggtagaggccgaggggttgcccgtacgctcgagccctcgggggagaggctactggtaccatagttgtaatagtgtcggggcatgggctaaatgcctgcttatggggtgcatcagtgtccttgcatgggtgacgttgagattccctgttgtgcttatcgaggctagagccttgctcgggcgaggcagaagtcttctcgaggtgctggacgagacatcccttgacgtacgccacagtttggcggagtgggcgcccgcgggaaatggtgtgctttgcttgtcatattaggtgtcccatcgggagatgttaggcggcgtgcacgcactatagcggagacataatcatgttgttgcgcccggatgtgattgatgtcttg

SEQ ID NO: 29871 - DNA, 402 bp, Zea Mays
tggttgaacatagaggagaggtgcacataaggtagggtggtgatgaggaggcgtgtgcccacatagtggaggcgagcaggtgaacccaaccgagaggccgacatgcagggaggtgagtcatgagagggcaactcaacaggaaggtagtgtggtgggaaggtgtgtggtcagccatggcggagaggtacagtgatgatggggaggggaccacctgtggggaggtgcatggatgctcacaaagagtgttccgtgagagacgaaaagagatagaacgagaggaaggtaagtggatgtcacattgtctcaattgatagtcgacctcgatgctgagatccaaggcaccgattttggtgttaagatgcacaatattgagtctttgtctttatcagtgctagatcatca

SEQ ID NO: 29872 - DNA, 397 bp, Zea Mays
gcagttgttcttgaagtgactggggtctccgcagtgccaacacgcattcgctggtggttggttgcttgcaaccgagggggcatgaaaggagctctgactctgctgactgaaccgtgacggagtgggtccagctggtctaatgaagcttggtctcttgggtggaaacccaaaggatcgagttctctagtgccggtcttgctgctgagctcggaggacttggaatttcctcttgaggtggcctttttcttcttcccttgacctttccacttgcatggctttgttggagaggtgcgagaagctgaggaagtcttggctggctaggatggtcttgagttctggtctgagccccttcaaaaagtgggccatcttcttgacttcggtgctgacgtcatccggc

SEQ ID NO: 29873 - DNA, 450 bp, Zea Mays
ctattgctggccgccgtaggtggtggcagcgtcggtctgatcgtcacagtcaatcccccgaagggatgtccatttccacgcaggcacaatttgcacgtgtcgacgatgagatcatgcttgagcgttcccatgctggtgatggtttgcctgagccaggcacaggtggcctggcggtcggtcgcggccgtggccgcgtccaaggtattgatccccacgcagcagagcagcggacatacttcttggtggcaatcatgtcctgccttaggagtcgggatcacgtccatggctgctgggcagcaatgagattccgatgacattgatggtcagcgcctttgttctctcgatgggcgtcgtggtcagccagtggggatgagttctagacgcactctggtcttgtggtgatccgaactttccgcttctactcgcccttctgctgccacaaatatctcg

SEQ ID NO: 29874 - DNA, 494 bp, Zea Mays
gcgctcctctgcccgatgtacgtcgcatgcgcatttgcgcctggtgtaggcttgtccgcacatgacatctctccccctcgaggtccagctcgtcctcgagatgaatgtccgaaaaccgggagcggaagtcgccgagatcttcccatgtagctgacgaggctcgctcgccgtgccagagcacgagcacttgttgatttcctcgcgccaggcgagcccgctcgacccggaggggttctagaaccaccgtgccatggtagattgtgggcagcttaggaggcgtggccggcggagtcccgatgaatttattgagtacgaacatggaacacatcatgaagacgcgcgctcgacgacagttccgggcagacagcgacgcggtagggcccgacgaagaggggtttgagcttccctgtggccgagcgtggaagggaggtggccgcgtgctaacggaggcgcaggaacgcccagtagccgatctgatatgacacctgccgatg

SEQ ID NO: 29875 - DNA, 277 bp, Zea Mays
atctgttgccttttctaattccggttttctggttgtctcatcttcggcttcgacagctcgattataggcatcttcggcactacagtagattcttcagcaatccgagcagcgggagcagcgggttccgcctcggcagcggaagatgtctcctcaccaaatttcggcactgtggccgtttcgatatatctgggcctatgggtcaaaactttgattttcttgcccttcggcacaacagaaatggacgaagcggcagctttcctctttttcccctgctttt

SEQ ID NO: 29876 - DNA, 729 bp, Zea Mays
cttgtgtcctgggggagagtttgtcgtcctctcaggcttggtggcctgggcatctccagcctgcccgagatgtgttgggcccttcatatgagatggctgtggttgcacaaaactgatccatctcgtccctaggcgcatctcccttttcatgtgccgaataagattcgggctttcttctccactgttctagtttcagaagttggcaatggtgccaacacccttttctggactgataaatggatctcagggtagagaatttgtgatatcgctccaaggatttttcagtgtattcccaagaggaacacaaaaagaactgtgcaagaggctctcctaaatagaagatggatctcagatattaagggggccctctcggtgggagttttggtggattaccttcagatttggaaccttatgtctgagatagtgctgcagcctactattgaagacaaacatgttttcagtattgccccagacggtatctattcagcaaaagtggcttacgaaggattcttcatgggatctaccttttccgccattattccagggtgtggaggacttgggccccgcctaaatgtagattttttctttggcttgttgcgcacaacaggtgctggaccgctgacagattagctagaagagggctggatcaccctccgatatgccctctgtgtgatcaagaggaggacttgggccccgcctaaagggctttcctatctgtctccccccttc

SEQ ID NO: 29877 - DNA, 408 bp, Zea Mays
agaattatttggaggccgtcaaaactggccgttcacagagaaagatgtccataacaagtaggtcataaaaaaaactaacatcatatctttgtgcgatatattgagaatagcatatttacttgttttttcttttatggtacaggaaagctgagcaagcaagggaggagagggatggggacatggataaattgttccaatttttcagggagtgcaaagaacacaatgaataattttactggaatgtggattttgaaccaaaaacaaaggtgcttcggagcattttttggtgtcatgcaagtcagcgtgcagaatacaaggattttggggatgtagtcacatttgacacaacacacaagactaacagcaagcatatgccgttggccatgtttgtgggttgcagcaataatt

SEQ ID NO: 29878 - DNA, 347 bp, Zea Mays
gggacttgggcttcaagtggatttcttccttcaagctgagcttcaagggcttcaatcttggcatgtgcttcttcaagttctccatgtacccttgagagatccagggtagcattgtctaggttagtgttaagacctgccaccacacctacaagggtgttgaggcgatcttctccagcttcacctagaacaacactggtctagctttctccacgaagacatagaggaagatgtttgtattccgtgttgtgcagctgctttcgataagtgtggttgagagaccacagggctcttctagaagcattgctgtctaaagcagcataggtagacagcagcgttagatactcaag

SEQ ID NO: 29879 - DNA, 838 bp, Zea Mays
ggccactgccgggggcggagactcgctccgtgtcaccaagacgccgcagcctggatccagtgtgagcccccgccacctccggcctccccttccttgtctcgctttgattttttacggccacctctgtgtgtcatttcttcgtaggttaagttcagcgtggaggtgcctacttccatcattcacgagtgctaccaatccacgctacaggagtacgccaaacgtgttaaggtatcagtttctgcgcaaactggctgcaaacacgtggacgagcacacccatatgaaatttcgaaacgcattattggttcctttatatgataacgaggttgggtatgttgcaaacaatttcctggcacagcaatgcattttaagctgtcacttcaaatctaatgagtgcatgcttctgtgatcatgtacctatgaggctatcagtgggtcatgctctatgcattgcttagcacactgatagttttgtgggtgtgtggccaagtgcccaagtgtatgcccaacattctcatgaaaattgggcctcatccttttcgtgtataatatagcgctttgaaattggagacagtcagccgtgcttgcaattcctgattttgcctactcgcacagaagtcagtatcaatttatcgtagccgtaagtagctacactagacatcatttaaagaaatcagagttccaaagttggggcagagatatgcctatacgatgtttcttcaaagaagggtgctgtctgtcagttgtcacttaccatgcgaggctgtatattctacagtctgttctgatgtccgtgctgtttcttcttgtcaggttcctggatttcggcctgggaagac

SEQ ID NO: 29880 - DNA, 371 bp, Zea Mays
atgaagtgggaatgccatgcttttccgcaaaactagtggcgatgaatgaatgggatgctctagaatcaaaaagtacaacagtaggggtaaattcgactaggaactcactgagcactactccaggggcttgctgagcttcttgggcgtcaacgtgattcactcgagccctgccgtgaaactgggtcttgcttatccggctgttggtggagggtgccttggaggtgggtgataaaacattcttggggccattcaccaagttggagtaggcaggtacggatgtcttcaactaaggacaattattcttgtagtgactggggtctccatagtgccaacaagcattggctagaggttggctgcttgcaacagatggg

SEQ ID NO: 29881 - DNA, 313 bp, Zea Mays
ctcatcatgactcgtgcgttacctaggaagcagccgcgagatattaatactatatgcactacggacattatggtgctcggagatcttctgggcgacactggcattggatacttctatatgtattccctccgttttgctcctggacccacatgtcggggctcaacatccttgtacgtgcccccttgagctataaaagggagggcacacgatgttacaaggcagcttcactcatatccaacttagacactcagactcacaagttcatacaagctctcaagctcaatacagcacacagtggagtagggtattacgc

SEQ ID NO: 29882 - DNA, 413 bp, Zea Mays
tggattttctggagtggtcgggtatggagttggaggcctaggtaacgacaggggaaattccctcgagtcccatggaatggctggagcacatggtaaaggtttgatgtcttcacaccggatcggctggatggagctcttctcaaggttagtaaccaagctcgaggcacatccaaaggcatgcaggatgtctttaaccaccacaagttcatccctagaggggttgatgaagatagcagcagcatcaacataaagagacgtccttagattggttgtgttcagcggaaggggggagaggattccttgtcgggttgccagctcgaggatacgatgcaccaggtcaatggctagaatgaacaacataggggagagggggcctccctctctcacccctcttctgtgttggatgcctagcc

SEQ ID NO: 29883 - DNA, 295 bp, Zea Mays
cttggtaattaaaaaaccacccaactgaatatttgagtggagcaatacagaatacataactgtgcaaccttatcatatatacaactaatgtcttgtccattatttcattctttaacatgattagcaaagcactatgccactatgtaacaaaacagggcataccggtttagcggtgttggggtctaatttggggcgtttggagcagatcagactggtctagtcggccttccttcatctcgtatgattgacatttggtgaattgaaacgacaacgtgtgattgaatgtgaaaactca

SEQ ID NO: 29884 - DNA, 499 bp, Zea Mays
gcagaaggtgtgttcaaggaagaggccaaagagaaagggaaattgagggtgactaatcagcgaacgactactcgagacttataaagagagagaagtgtctcactccaccccgagggacgacaagtcaccatgaaagcagcccaagtccctaggaggaataaaacaccatgatcactcgaaaggcgaaaggacaaagcgttgttgaacccttcatcagccccgaagggagatactctcaccctctagggctggggctactgtcagggataagttgcctgacccctaggcccatcggtcagcgaacacactagggagaggcctctagcaactagggtcctctgttcagtcggaggagataggtaacgtctaccctggaggcacccgccctagacgaacctcgcagcaccgagcttggggttgggcatggtggaacctaacagggggccaggcacggcaaagggaaaccactcgagtagatcctgcgtctagcccgagaccg

SEQ ID NO: 29885 - DNA, 360 bp, Zea Mays
caggatgggcgaggggtagcctttcacgtccggggctcgcgggagaccgtcagctatctgtgctagtactcctccgactttactcggcgtgttctgtgctcgagaaaaattggggtacaggttttgagcgaggagagggttctctcaccgaagcctagcgtccttctcggctagctctcgctcccgatcttgagcctgtcggcgatcgcggcagcgggagttatgcctttctcggtgcactcgttcgttgggagtttctcccactttagaggcttcgtctcgggacacaggctgtgccggatcccgttccccagcatcacgatgtcgctgcatgtttcgacgtctgtttctccatcaccg

SEQ ID NO: 29886 - DNA, 423 bp, Zea Mays
aactgttcttgacagaatggcttaagcaaaacccgagccctaatgtggtggtggctactgattatatgagggttaggagcatgactccctccctggacgcgccctaatggtctcaacaaagatacacggcccaaaggccaagttacggtgtcacagcactgagacagattatggacgtcatcttgtttcgatgattctgaacgacttggatggaattttgaggtgggaccaatgccattggaagctctatgaaattctggtccacccatataaagaacgtccaaaaccgactctgtatgcgacttgattgtctgttttacgacgggctgttcctagagtccgaaactgaaatgaagtcaaatcggtttggacctccaccttgatccgaacgtccttgctggccttccacgcctccaagtcctt

SEQ ID NO: 29887 - DNA, 343 bp, Zea Mays
ctaaatgctgactcagatgctactgttgatatcggaatagctaaaaggtcatgggccatgcgagcaagtattggcagtctagtagcattgtccttccaccaattaagaatgtcaaaaccagtcttatcttcctcattgtcctcagataaatacttatctagttcatacttgacagtaatatttccactcccattattgttcatttgttgagcaactataggcctcatcaaccgtttgctatgtgatggctgctctttagagtcatttggttgtggtgtcttctcagctggagcatacatatctttgtactcatcaaacaagaaacgaaaagaagtgtttactg

SEQ ID NO: 29888 - DNA, 521 bp, Zea Mays
caggaccctacggaagagaatcttctacctttctgtcaatgccttgggggaggtcttaccccaggggttgggttttgttttgaatatgcgatgacgccaacgggaaaatttcattagcagtcttgtcctgcattttcatttaggtcctggtactctcaaaatgcattgtcctgcgttctcatttcagttccggcacactcaaatacattttttgccaccctaaatttgttgctaattgtaccacatgacgtctaagtccttagaactttcattaaaccctttatggcatgatgatcatacgatgatgtaggtctgacatctggtgctcaccgtcatctccatctcccttatcctcgtctctatctagccttcttcccttcagtgagctgaccaggcatactatgaaagagtatagaccatcatcactggttcaggcatacctcaacaatgccaaatctcagtgtggccaggagccatagttgctggggaagagaggataataaaggatatgagagtgacac

SEQ ID NO: 29889 - DNA, 400 bp, Zea Mays
cgattaacttttgagcttcggcatcagcacaaccatcgtctgaatggctgaggagaagaagatcactgaccctgcattagctggtttctacgaagctatggacaagatcaatgctgaaaaattaccaatgagatgttggctgggttgtctaagaactccagcgatagtgaaagctttgatattgagagtgaagatgagaatgccgaagatcggccgtggagacctagctacattgtttttgggaaatccactatgaagcaaggataaattgaatcgatgaaggggaaatattttcatgatgtgtctatagtgagggctgggggagaggacaccgttctgctaccagaaagcaatgaagtggtagtcttcaggagcttcatgaaggttgggcttcgtttcc

SEQ ID NO: 29890 - DNA, 467 bp, Zea Mays
ggcgccgacgccttgagcctaggcgctgacgcgtctatcccattagatggctggtacgatgggcccattaggggcagctcggaccaaggcctcaccttggggctaaagccgagccagacctccatcccgttatcatcttcgtcgccatcattgtcgtcattaccgtcggacaattctagggatgcctcccgcggtagtccctccttctcctgcgctcgatgatgcttctcaagctcgtcgcgagcctccatcttctcatgggctcgcttcctctccttgtccatcttcttctactgctgctctacacaacctatgtgctgcccgacccgccacgtcctccgagaccgaaggaagggcaaatttgtaaccctgtagcccctgggaataaatgaaaaacctagataatcaggttaaaatgcagaaaatatggataaagcagaggcaagttctacggcttactagagaca

SEQ ID NO: 29891 - DNA, 314 bp, Zea Mays
ttttaaacttggccttcatcggattattgaaatcttcaattgatgcagccaccaactattacaaggccatctatttctggaagcttaacactgcctacattactatggtgcccaaaaaagatggggctgagcaagttaaggacttcaggccaattagcctcgtccacagcattgcaaaactgattacaaaaatcctcgcgaaccgactggcaccaaggctgaatgaattggtttccctaaatcaaagtgcattcattaaggggcgattcatcgaagacaacttcatgctagtacaacatacatcaagactgttt

SEQ ID NO: 29892 - DNA, 547 bp, Zea Mays
gggccgtcatgccatctcccacaaagaagctgcaaatatgcaaaggcccttcagatgcaccttcaattaggaaatcaactatcagaatcctgggtgttaagggagctgctctaccacccacagggaaatctcaagttgaaactcggaaatgctttgctaatgctacagcagaagtgatttctgctagtacaaacgagatcagtgagccagataatgcagctgccccattgcttgcacagcagttgccaccagacactgcaaagaactccactgtcatcatgcatacccatgaaacaagtaaagtcaatcagttggctgctacatggccaagggcgaactttcaaactgattacaacaagaagccttccaatgtacccataatggctaaccagcccagtgggttcgctggtgcgactgctcccttggtgacaccaaagatggaaatcggaaacatgaaggacagttccaatcctctctcaaatcctgcttacgcaagggcgcttgtaataaagcagcaagagcagctccttcagcaatataaattggg

SEQ ID NO: 29893 - DNA, 367 bp, Zea Mays
gtgctttgcacgattacatgtgatctttctctccattggggtggcttcggaagaagccaactatgctcctgacgatctacctggtgcactgagatgggtagaaggcgaagtggatgtttttgacgaagtgatgaagggacagggcgacttctgtgcacttgttgctgctcaaggtacaacatctgttttttgaaaaggcaggatgcacccatctgaaggctgtaaacaagccggaattcgatatttctgcggatgacctagctatagtgtccactaaagcttatatcgtgggaaacaaatttatcactcaaatatggtcgaagggtggtagggaaactgcgggagatgaagataggcgcttctggat

SEQ ID NO: 29894 - DNA, 341 bp, Zea Mays
ccgagccaatatggtcaacgtccgagacgcacccgaccacaatcaaccccctcgttgtggccccactgaaaccctaataaaatccactcctcgccgttgccgtcacccgctcctacgatcaccatcaacgaccgcccccactcgccctaatcgccgtgcttcatcgtttgccctccgccgttccccgccctggtttgtttccccctctccttctttgttccatttccctacatttctcataatctagcaattgtttacaatatgaatcagttttttcaccgtcccggcacccccgaatcctgcaatgtaccgtcgcctttaggttcgccacgccccatccc

SEQ ID NO: 29895 - DNA, 505 bp, Zea Mays
agaatatatattcaagtgagtcgaggccttgtcatggtcactgaaaacaacagtagactcaacaattttatcggcaccaacagtcaccacagtgtgaggatatagcagtgtgctgtccttgtggaggaggtagtagcatttgatgcagaagtagaaggggttgttcagagcccacttatcgtcgtcagtcaccttcgtcgcacttatgcaagcccctctacaattggaacgtctggagagggtattctgcttggtttcagtgtgccatctgggagtaccaacctcatgtcccttatcacgatcttgtgcttgcagccccctgaaaatgtccaacaaggtatcagaaaacatggttgtatgatctgatatctttgttttgctgttggcacggtaaggctgcaccatgaataacacagtgaagttgaaattagcaatgagcaaacatcaagaatcatccgcattgcagtttagataataaataaatgttagatttcgtcaaaagcat

SEQ ID NO: 29896 - DNA, 377 bp, Zea Mays
gctctccttccggtgtagtggccacttgagtgtaataaattcgcccagtcttcgtaacatttttgcccactaaattattagccatgtttcctttgacttattctgcctcggatatggatagtctttgataaaatgaccagactttccacagttgaagcagccagttgaggaactagggagggcggggaaatgagcaccaggggcactcggctgatttgtagaagtgggggcagtggtagggtgaatgaaaataggctgtttaaacggataggagggtggatgaggcgaagaacgattctgattgaaaggtcggattaccaaccttgttcgcttctcaggtccctgattggacctgtcacctccaaatcccttggatt

SEQ ID NO: 29897 - DNA, 1208 bp, Zea Mays
gcacatgctgcaactgagctctggacatatggttggagcttaagataaaccatgtcaccgaccgaataaacacgatcagtccggttcttgtcagcttgggatttcatgcgctgctgggcgcgaagcaagtgctggcgaacaatttgtgtcatgagctggcggtgtgataaccattcctgaagatcggcatgaggaatggcgtccgaggcggaaactcccagactgcgaggggaacgcccatataagacttcaaacggtgaagtgcccagggaagaatgtaatgaagtgttgtaccaatattccgccagcggcagccatttacgccagtgatgtgggtgagaactcacaaaacaacgaaggaatgtttccaaacattgattaacccgttcggtctggccatccgactgtgggtgataggacgaactcattcgtagcatggtgccagacaaccggaatagctccttccagaatgtacttgtaaaaattatgtcacggtccgagacgatggcttctggtagaccatgtaagcggtatacaaaatccatgaacagttgggcgattttcagagcagtaaagggatgcgccaatgcaaggaaatgtgcgaatttagaaaatttgtcgacgactaccaggatgcagtcatatctcccagatttaggcagtccctcaataaagtccatcgaaatcacttgccacgcatgagaagggacctgaaggggttgcaacagtcctggatacttggacctgtctggtttggcacgtgcgcagacatcacatgagcgaacgaaattgcgaattgtggatttcatagcctgccaagcaaacaattgtttcactcgacgatatgtaactggaaaccctgaatgccccccatggcgctgttgtgcagagcagcaatgactttggtctgaagggatggactgtgacccaaccaaatacggtccttatatcggatgatgctgtttgaaagagtataatgaccggtatcagatgaaccagcagataactcggtaagcaattgaatggctttagggtcttgattgtaactggaaataatgtctgataaccactgcggtgtgctaactgaaatagcattgcagtccagggaagtgtgaggacgtcggccactcggttggtcgatccttgcttgtaaactatttggtattgaagacctaacagtttggtaaataccttctgttgccagggtg

SEQ ID NO: 29898 - DNA, 376 bp, Zea Mays
tcgtaacttacctgttaaggaacctacgttccaactacctacacggaccctagttggctcgactaacttccttacccttcgcacccgccgaggaagatgcaaagacccttgctcattttccactacacccgggcgtcgatgtagcgcgccactaaggatgcgacgacccgatccttgctcatttatcaccggctccagatcaagagacggcgcgtcacttaaggggtgacggcccggcccttgctcatttaacaccatacccgggttccgatatggcgcgtcgctaagagggttacgccccaactattttctttgtggtttcaacaattatgtaacaacaaaacaaaattgttattcagcacagcatggaaaccca

SEQ ID NO: 29899 - DNA, 536 bp, Zea Mays
ttgcggccatttccttagccttttctacagactcctcgtgctcggccaaatcaacagtacgtgacgtgaggtcccgtccaatccctttaaaaaatcgagttatgccagcagtagtagctttactcttctttttctcgaatgtagacaccaattttggtagaggaaatttagatttctttgattgtcgtgaatcccttgatggatgtggagaaggtggtggtgtcctaaatgttgatgcttgtggcggagacggtggattagaaagaggatgaggagcagcaagggaagattgtggagttgatgatggatgtaaaggtactaaagtttgaggaggcggagatggttggggatgagacgacgacggcgttggtgtatcaaccaattcgacatcccttcgaggctaaaggatgaaattttttatggcttgtccaagtttctcgattcctttgggcccatggatgtctagcatgtcgtccttagatccttggacgaccatcgtcacttctatcctgcaataatcatctggtatgtcgctt

SEQ ID NO: 29900 - DNA, 389 bp, Zea Mays
agaggatccaacccccccagggttataagggaatcgaaaccctccctgattaacccaggagtagcttcacaagctgttcaccagtccatgaagctagagatacccccgctgtggagcaagctgctgcagaccaaactgccgaagtagcaagaaccaaaatttcttagcgaagaagcaggatattagaaggtgatccggtctcactttcctgatcacaaagtgggcacttttcaggatgatctaagcccattttctcgagtctatctgctgtgcagcatctcttttgagcagcgagccaaatgaattatcgatactttggggggagcccaggatttccatataggctcataaggttcaaactgaatcgatccagtaaatagacactcgtg

SEQ ID NO: 29901 - DNA, 459 bp, Zea Mays
agggctggccacgatgagatgtctcacggcggcgttccgaccgatttgggggaaatttgaaatttgcgagctacagtggctaatcggaggcgagggctggtgcactgggcgcgtaacaacataatggagctagttgaacgctcaatttatagtgatcatcagtggtggcgctcaatttggggaagacacgcgggccaccggagagagggggaggtcattggcatgagttaccgtggcattcactagagcaacgactcagatgatagacatgccatctattgcgacctacggcgatgtggtaacaaggtagtagcatggcgtgctcgggttaacggtgatcatcactgtgacggccacgcggccacgtcgcggtgcaactggatgcggtgatagagcggccatagtgccccaacttcatcccgtgccaaagatctttcaccccgagtcgttatccgaacg

SEQ ID NO: 29902 - DNA, 362 bp, Zea Mays
ggtcgatgatcaatggccacacaacacacataaacttaaactcatattgatgtgtttatgtccactcaagtaaaacgtcgcacatcattatgccacatcgtttctcaaaataaaataaaaccatgggaaatttagccaaactgcacgagagaactgtccaaacataggttaaggttgtaaggaatcttctttccaccaaacagttgctaataagtaggaatataaagaattcaaaacaatagatcatcttttaaactaaaaatgacgtttccctgatgtcaagggcattgtattcgcacgagagggtattagagtacaactagtggatgaagacgttattgggctagctaatgaccttttgt

SEQ ID NO: 29903 - DNA, 357 bp, Zea Mays
gtggaagaaggcctagtctgtggtttcacctagcgagaggtattgctagtgtgttcgctatctgtcgcagccatgcagcagacatagttgagatgtgttgcgaggctcagcggatggacgacaacctacgccaatttgccgcttccatgggctatcggatgcctgatcggcagcccgcaactcccctgcatcaatatctagaagatctcaaccagtggcaccaacaacaatatggtgtcctcttcataactctagaggaagaagaagaatatgttgatgatgatacctttggtcagtctatcaccgctgctcctgcttctgccctagctcctagtggccctcgcctgtcctcctccg

SEQ ID NO: 29904 - DNA, 372 bp, Zea Mays
cactgaataggcgcaacgatggtacactaactggatagagccgccaggtcagagatctcgccgccgacgatccctccgccgcgattcgtgccatcaccgtctcgattcgtgctctgggtaagtggataacgctcggagtacgtcgccgtggataagctacggctagtaaaatattccagccaccgtacagagctcgccgcggtggattctgataagcacgccggtgaccgccacctctcggccttgtgccgcgtgtctatacctttccactgcaacgccgtgacctgctctcgctctccgttgatcaccggagtaactgccacggcgtgggacacgaattcgttgcgccagtactcttcctgccctccggcc

SEQ ID NO: 29905 - DNA, 654 bp, Zea Mays
gtcttcgaaaggctccttggatacaggtgttgcttcaacacgcagagaagagagcgcatctcgctcaggatctgatgtctcccctcccgaggcctttgatggtacgggatgcgtagcccaaggcgcaagtgtggcagactcgcgtcctgactgtagctacgggcccaagcgaatatgaaccggtctccgctgaatctgggagccgctcgagcgtcgagaccggggatcctggtcctcaccgttgtcgtcatcactaggtcgcctgctgaacgctggaggtgggggcggtagaggctccatggtcgtatcatgtaggtgcgccggggtagcgctcacactgatcttgaaagtgaggcatctcttctcaattgtgtgcaaacctggctcgatgatgtggaggtccataacacggtgtagtcttccaggatcaaaacaccaagcactgacatgaaaggatgagaaatctttctcttgcaaagtgtcggggtgcacttccgaaatccagcattagtctctcaagatgttttctgccatagaacgaaaccaagcgtgctctggaatccctctaatctcaacctccaccataccagacatgatcgttgaagatgcatgagtaaacctcgaccagcgcttgaacatcagactaaaatgagg

SEQ ID NO: 29906 - DNA, 287 bp, Zea Mays
tatatgtacacctaagacctttgctattttcaactttaaagtcgcattgggtcagacgagtcatcaacatgattccaatcaaagttcagaagttttagatccaagggaacgtaagagaatacgagaaagaactcgatttgcaactcaaacaaaagaacaaagggcattgcgtaatagggaatcatgtaataagatggcaaggaaaaactataaagaagacaacgagaaattaaactccaggacttaatcggcattgaggacccaaagtttaccccggagcttgtgtg

SEQ ID NO: 29907 - DNA, 388 bp, Zea Mays
agaatattctaactcccttcccatctccctccaaaccatcgatagaatattctaactcccttcccatctccaacctcatctaagccacaaccctaccaatttcctccgtcttacgaaacaactcggttctctccaccgtcacgtgcttatccaccaacgttgccaactccacttgtgtcatcagttgatggtgcgccttttccaccgccaccaacctgttggtgatcacatccagagatgcaaacacccaactccagttgttctgattggtgcggtccttctctgctatcgcttcaagcaggaagggagtctacaccgagggtcgagcttgtggagccgtcacgccccctccacgagaccaacgacgtactcccttcgttcaaaaatc

SEQ ID NO: 29908 - DNA, 271 bp, Zea Mays
gtgcttgacactgtcggcgttttagaggtaacggtcgagttatgcttgacattgtcggtgttttagaggtaacgaccgagttatgtctgaagtctcactttctcgagggttgacttgtcactttttagaaatggcgcccaacccgggaaaaccccatttatactcatgttgacgtgtgcttttgatttctgagccctaacttcacatttccgccttgaaccactcccatgttttccttagatttcactcctgttcattccgccggtgagat

SEQ ID NO: 29909 - DNA, 276 bp, Zea Mays
agagagcgatgggggccctccagtcttcggtcatgataagacttattatcatgtgcccatcgcggtcccttacgatgggggcattgattatttggaagaagacatacgatggcatagggcctcctcttgcagcagccttcacaagtgcctcctcgtttttgcctcggtccacatgctggattgaaaatcctttgaattgcttctccatacatcgcacgaccgataggtactggaggaggactggctctcgggctgtacaatctttttctatgtggc

SEQ ID NO: 29910 - DNA, 622 bp, Zea Mays
cttcccttaatgaagaatcatttcgcctcctctgtgtcaattatttagctttgtattcagttgatctctgtcgtgatgtttattgcccgtaatgttctctatctgttatgtctgtggcataacttagagttcttgaaccattcctccgcctgccttgttggtgaaattgattcctttggaatagcgattaaataactcgggcatcatcgggcatcatattgacgcctttgggggtgatggccgagctattattgtcacattaacgcctttgaaatagcgtccgagtgatgacgaaaccatgtcagcgtcggaataactgttgaccacgttggcgctcttagatgtgacagccgagtgacctgtgacaacgccagcgttttttagagataaccgccgagcaactgaggacatcgttggcgctttagagatagctgccgagtgactgaagacatcgtcggcgttttagagatagacgccgagcgactgaagacaccgtcgacgctttagagatagccgtcgagcgactggagacatcgttggcgctttagaggtaaccgccgagcgactgaagatatcgtcggcactttagagataaatgccgagcgactggtgataacgttgg

SEQ ID NO: 29911 - DNA, 350 bp, Zea Mays
aatggcatcacctttggttcttcagtaggcgccaagcaactcatcgctagttgcgtcaatggcatctaaccagtcgttgttgggctcatcaaattggctcctgcatttgaatgtatacttcaagtaaaccaatccaccttggctagacccaacagcagcctccttcggcatttcccacccactcctgaggggtcacactttgaaagcaatgtgctcctggactaagtccctggtgcctatgtaagtgcatacggtgttataagcagcttggcatgcttgtatgtcgttcccaatggcaagggttggtctcctaatgccaaagtgagaccatatagggtgttgaataatcc

SEQ ID NO: 29912 - DNA, 753 bp, Zea Mays
gagggctcccagtagcgccatggtttgttgcgtataggagaggaggcatgtctgagcccctgtagtcagtatggtcgccgatatggccttcatacttgttgctaacttgaacccgaaggtggttgtccgttccctgtatttgcatctttgaccgagcagagagccgaggccagcgtctggggctcgaacacgtacttgagcctgcctgatgaaggcgttgcctgagtcgtagttgttgccacagtgataagcatggtaaaaagcgcatggtaatccgtcccatatggtgtaaagcagacttgacgtcgatcctatagccatcctgttgtcagcagccttcgcggaggagttggtgatgtcctctagtcgatgttatctaggccgaggccaagctcgggcgagatggaggttcctccgaggccttggccgagcctgcctttgggggccgtataaggaggaggtagcacagttgtcggagtggcctcctgcaggattcgcagggagttgttgttggggcagttggccgaagccaagctcgaacgaggcggagttttctccgaggctgaggccgacttcaggcaaggcggaactctctcctgagggtgagaccatgccctgacgtacgcacatctcgtccggagttacttgagtacagcagacagcgtggggagcagacaacgtgggggagcagtggtcgttatccccgggcctgcgccatcgtagttggtgaaagtggatgggaccgcggtcccg

SEQ ID NO: 29913 - DNA, 337 bp, Zea Mays
attgacatcagcagtaaatgaagtgtttccaaatgctgaaaaaagagaatgcttccgccacctcatgcaaaactacattaagcacttcacaggttcagagcacatgtatcccgcagctagagcatataggaacaccattttcgagcaccacttcagtaatgctagggatataccaggtgtgaagcaatggatagatgagtggcaccctcttttatggtacagatgtggtttcaacacggctataaagtgtgactacataaccaacaacattgctgaggtatttaacaactggattaaagactacaaagacctaccagtttgtgaactagcggacaaa

SEQ ID NO: 29914 - DNA, 381 bp, Zea Mays
gtcttggttaatctatccacaatgacccaaatggaatcatggtgccgagaggtattgggcaatcccatgataaagtccatggaaatgtcctcccatttccaagatggtatgggaaggggttgcaaagggcctgctgtcttcaaatgattagccttgatcctttggcaagtgtcacacttggatatgtacttggcaatttccctcttcattctggtccaccaatataaggatctgagatcatgatacatctttgtactgcccgggtgcatggagaattttgaaaggtgagcttcatccaatatcttctttctaagctcagggtccttgggaacaaccaatcgatctccaaaccataggattcctttgctgtcctgccggaag

SEQ ID NO: 29915 - DNA, 470 bp, Zea Mays
gaggatggacgtaaagagcaccagaagcttcgcgagacgccgagagcggagagaccgagaagagaggcgtgcgaaaaaggagcgagcagctctatgcgttcggttttaggtttagtggcagggtatcgggggacgcaactgtttgcctgaccgcccgggaggtgggttgggcctttgtgccctctgcctgtattggatcgggccgattacaaaggccggttaatactaggtcgtgcccgggctagctcaacatgctaagatcactgtcgagcacaacacgttgtccatggcgggctaggccaagcccacaacgacccttgccaggtcgaggtagtgtcgggtcaaaaaagggcttcgtagcaggctaacgggtcatgtgctttctagacatctatatatactatccttcctatggaatctatatattttataatggtctataggaaattggttgtatatttttaacgaat

SEQ ID NO: 29916 - DNA, 356 bp, Zea Mays
tttgattgatggaattgctcgagttactcattatgaatatggtgcaaaaatttgaatggatttggatggttattttatgtcgaatcgatgattggatggatggggcggctagtgttctagaaatcacctctagacggccgcggaccgtccgccaggatggcgcggaccatccggtccctgacagaaacttacacttcctttctctatgttgtgacatcatcaactattaaccagtggatattcctcatatatattgtagtggtctgggtggtcttaagaagaagcttgcaggtcgttttaagtcaaagcaccgtcgtgcagatgatgcagattataatccagctacagactctgag

SEQ ID NO: 29917 - DNA, 341 bp, Zea Mays
tgacaagaaaaatcacgcaagggaggagagagagaaggggggagcatagcataggcatagcaagagcaaagctgaaaaagaggagcaccactcgtggggggttaaaaccccgagaacaaacttgggagtagcagcggccagccggaagcgagcggagaccgaggggagagggggtgaagaagcaacgagacgcagcgagcaagcgaaagcataccagagcaccaagcatagggacgcgcgcgcttctccagttctccctccctgccctgcaaggcggctgcaactgttccagctagcccctctcccagcctctgcgtcgtagacgtggtagtagcagccgc

SEQ ID NO: 29918 - DNA, 362 bp, Zea Mays
acatctggtcgctggttcttccatgtagggcaattaatcgcggctagaaacccattagtcagatgactggacgaccaggagacctaatcgagtcgttaagcctaatggttgcttcctgatccattagactgattaatcgcgattaattggacgacttgaaatcattgctgaaaacactggttcaattgcactttgttgaagtattatgtgttacatgaccttgcaaactgaacaaagttattgtgttgttcaaatctcctttcttggtaaattttctaggctttagctggtctggtcgcggattgctaaataattaagagtgttgtagccttataagaattgaaaaatgtattgcatttgtt

SEQ ID NO: 29919 - DNA, 298 bp, Zea Mays
ggaaatacttcaaaacctgaaggattggctgaaatcattaaagctggagcaatgggtttgaagctgcatgaagattggggaactaccccatccgcgatagataattgtttatctgttgcagaagattttgatattcaggtaagtgtctaatgttatctagtctttatggtatattgtggtttatttattttaatgtttacctgattttgacaggtcaatatacacacagataccttaaatgaatcaggctgcgtggagcatacaatcgcagcttttaaaggtagagccatacatacat

SEQ ID NO: 29920 - DNA, 368 bp, Zea Mays
cggccatatagatatgcaccagctgttaaagatgagatagagcgtcaggtttcagaaatgctggcttccggcatcattcaacatagttcaagccccttttccatcccagtgctattggttcgcaagaaggatcagtcttggcgcttttgtgtcgattttagacacctaaacgctctcacggtgaagaggaaatacccaatgcccattatttaggaattcttggacgaactgcaaggtgccagttggttttctagtttggatctgcgttctaggtttcatcaaatactgctccaaaatggtgaagaattcaaaacaacatttcagacacatagtggccactatgagttcaaggtgatggcattcggtct

SEQ ID NO: 29921 - DNA, 714 bp, Zea Mays
tagctgcaccgaaagaggtgaatgcaaacaatgaattgtaggaccggataagcctcaagaaacgcctcgagcgagtacctccatcaaatttcaaaagatcagcaagcaaaggcggcggatattcaaatggttttaggttcaccttccctcctttgcagcaaaggttgtacacaattttcctctgggtggagaaggaatcgtttttgacacgctcttggaaccagaaaacagcgtggcagtatgggcatacatgttcggggccaccgtagtatgacctctcagggtatgcatctacacaggaagaagagaaagggtagcaccaaagcaaagtaggaagaatgttaccaggaatgtcgggcataatacacaccttttagagcatctacgtatgacctgtccaaaggaagcgtggtcgacaatggctcgccaggtagcatgtgatgtactctactgcgccggcgttgcctattggatgcggcaagcgctgaagggaatgacattatagatctactacctgtgccgacataagcatcactaacaccatattgttttttgctgaagcaatggctgaacaaacatggttgtacacacgttttccctgtagcgcaagtattggctggttagaggtccccgaaaggttagatgggtctacttcgtcttcaccatgaaaaatgcgatgggcatcagttgtctcaaagactgggcaacctaaag

SEQ ID NO: 29922 - DNA, 687 bp, Zea Mays
ggccaagctccggtgagcttacaccggccgatttatgcaacgactggtgctctactttggcagagaccgaattcaagtcctaacaaacgtttcccctcaacaaatttcatgaacagcgctctaacctgctctgtccacggtgactgtatgatcaacggacattctaaagcgttcccggaaatctaaggtagcttagctcaatcgagttggtcgaggaggatcaagggcaggtatgggtgctgaaacaagagggcagggagcatgaacggacctggaatacgctgaccacggtgagccagcaccgctcagtgttcttgggtgatttgggggaaatcccaaattggggagttctagtggatgattcgaggcacgggttgcttcactggttgcacaactacttagcagagcaggcggggtcggcaatttataggctcccacagtggtggccggtgaatttgagggagacgcacgacgaccgaagatgaaaggggttagtggcgctcgggatcagtggcatttatcgtggcaacctcaccggcaatgaccagacgtgctagagcgagtcactacgacgaagtactgcgtctaggcacgtgtcatccgagtggcagacggctaactccggtgaacttatccacagcggccgtggcatgctcgtgtacggtggccggagtagaatagtggccg

SEQ ID NO: 29923 - DNA, 316 bp, Zea Mays
agtcaacaaccaaaatatttatcacttccataggccagccaacatgcaagttgctttccaaggattaaactacctcgatgagcgaagcctcctatcagcacagctccaggcctccccgtggccgcaaaactacagagcgggcacctatcccaagtacaacgacaatacagacccaacccagtataatgagttaccaggtcgatgtcgcatcctcgggaggagatgactccaccatagctaagtcattcatcatggaagacctcaccctcacatggtactcaaggctatcgcctttgtcgatcaactcatggaagac

SEQ ID NO: 29924 - DNA, 455 bp, Zea Mays
ctagaaccgagtgcaaagtgcttctgcagcatgcacgaacttgcatatgagacgaaggccatgggcaaggaacaatatcacaataactttggctgttatggatttactgcccgccccaacgcaagctatccggtgccaacataccgaaaaaggtggcctggagcctggacggaagaatgacctgaaggcaagagaagatattaaagaagttattatgcgccccatttggtcccgcttcggccatcaaaggccaaaggttaagattgacgaagccaccgaagcatgccaaaaggctttcggtactgtctgcttttttattggtacaagggatttaatccaggagcatatagccttcagagtatggccacttgtagagaactgggaaatgccgaaggagactgtcaccaagtttggcgaaggtgagctggttcgactgaaatacaccttcagatacg

SEQ ID NO: 29925 - DNA, 273 bp, Zea Mays
ccgagttcgactaaaccagtattgtctcagaataatgtatacgatatctagttcgtttccgtgttgcccgaaacagtcacgaaaactatccgaacgagaattagtcagaactcgtcgactacggttttcggtgcaaacaattcggctcacactcgtcaaccgtgaaatcgagtacgaggatccaaaaattgtgcatcgattcactgataaattactctagctgtggaactaggtgttcagatgttagacgtatgtttatctgattttaaacaa

SEQ ID NO: 29926 - DNA, 345 bp, Zea Mays
tagatgtgtattcatcacttgaactttcttcatcacttgatgtttcaaacaccttctttgacttgtgctctttgctcttcttggaagaatcttgttcatttgaaatcaaggcatgagagtctcttgtcttgattggggcttcttcggactcatgttgttgaatcttggcaaatagttgatgaggtgtcatctcctcataatcatcacggtcccttatcatccttgctagacccttgtcctttttttgtaggctctcatgaatagcctagtgaccttagagtcactccaatcttcacttcctagtactcttattttgttgaccaagaccatcaaccgatcaaagag

SEQ ID NO: 29927 - DNA, 444 bp, Zea Mays
accggtcacagtttgccatctgcagtgctggtaagaaccttgtaagagcggggtaagacgcttcataattcgtattccaccaccaccaccaccaccctgagagatagttgtagggttcacattgtttgttgtctttttgtctctgttttgtgctaacaattacaggaccaaagaatcaaatggacaaggacaaggggcctaagcttaacgatgatgagtgtgtctctcagctggaattgaaggagatgatgcgcgcgatgactgaagcttttaaaaaataccaggactctgtggcgacatcctatgagcagcttgatcgacgagttgctgaacttgttacacgcatggacgtactggaggctcatcccccaccaccaactccagccccagctcactctcctgtggacgacgacgacgatgacgacgatgtttatgcaccactgc

SEQ ID NO: 29928 - DNA, 508 bp, Zea Mays
atactgcttcagcaaaggaagttgcttcagccgctcccaatgagccagcgccggaaaggaaaaagataaaggtttttactcaccggccacgatatattgaaccggccacagtgccttaatatatcggtgaaacctcttcggccaccgaagccaaggaaccgagccccctaccgaatgttgaagagccaatcataatgccagaaatgaagacgatagaagaaccaaaggctaccaaaacaaggacatatgaaatttgaagtccttcagcaaaaattgaagcaccaaagagccaaaagggtccagcaatgacccccaaaagaaaaaggatggttaatgtgctggacgttttggagacaataaagtcttcaagcacgactccgaagaaaattgttgaaacttccgaagtgcaaattgaagcctttggtgccgaagcttcaaagcaccaatctgagactgaagctgggccttcagagcccaccaaggtgaaatccttggaagccaaagaaac

SEQ ID NO: 29929 - DNA, 454 bp, Zea Mays
tccttccggtagttcccaagccttcttctctcctctgatagagaccgggtgaccttcaagaatctgagggtcttcagctctcctgagttgaactgggttggatggagtgggctcttggatccgcagggctttacgttggttatgggttaccaagtaggcctccatcaacttttggacgtgctcatccttggcttgcttcagggcttcaacagcaatggcttcacgactttccaaggcagctacacgggcttgggctgaggtgagatccacatgcagcttacggttgagcttatctgcatcttctactcgagcaatcatctgacggtggtgccgagccaagaaatcatactgggcatccagggtgagcaggtatgcagtgaggtgcacgactgtggggtcgtcttcaagcagctgcttcccttctaatgcacgcatcctagccatccaaactgga

SEQ ID NO: 29930 - DNA, 420 bp, Zea Mays
tgttcttccaatagcttccttattgtggagtatatctcctattgggaatcatgtgactactatgactttgtggtcgtcaaaatagtgtcggagtttacgagcagttagaagtacttcatataatagcttctgaacttgagggtaccttatcttcgagggccgaggacttcgctgataaagtaaaccggatgttgtactggatacgcatgcccttcttctgcctgctcaacaaacaacgtagtgcttaccatgtgaatcgtgcaggagatatatagcaacaggtctttggccggctgatcggatgtagctcgacgtggtggcttgagtactggcggtgtggtcagaaacttctttagtgcttccaaggcttcttgagcttctatggtccactagaatttatccacctttttgagcagttta

SEQ ID NO: 29931 - DNA, 389 bp, Zea Mays
aagctaactattacacagataaccttacacaagctaactcatactcagataactcttacacaagctaaccttacacagataacttgaacacagctaactcttacacagataaccattccacaccacacatactactctacttcatctgacgatccacaatctcttcagaattcacatcattcagtgcccattccccgccacccatatcttcatcttcagcaaattggttattgaaacattcagataatggtggcgaaggaccagcttcgagatcttctaaacgttgtgcttcctccagcagtgactgagcaagctcatacacgcgccacattgagaagttcactgacacctctttggccgtatctggcgaatccattatctcgtttccg

SEQ ID NO: 29932 - DNA, 391 bp, Zea Mays
gcggtaccgacaccgacggacgccgaatctcggacaagagcgagagcaacaacgacgactaagtggagaaccagatgctgggacgtggcggtgccgtaccagaactccagaagagcaggaggaggctggcggtgtcttgctagaagatatagatcagcagcagtagtagcatcaatgcatcaccatcgtctttcgatccaactccatgcatatatatcatctgatcgaatcttctccaattctagcttttggaccaactccgatccatagcgctagcatttctcaactaagtgaacttcgctttgaatgggatctaagtgaaaccactcaagcaaatagagtccgttgcctcttcaccgctctttaaacagacatagatagtatgatctcg

SEQ ID NO: 29933 - DNA, 375 bp, Zea Mays
gctcggcctcgatggctgtttctcgttcatgccgccgtcgtggtctgcatggccaccagtcccgtgcagccgtctggtggggttgtgaggtagaagaaggctgctagccgtcggatctgtgatctgcgatggagatgggtgtgtgccgatgcgtgcttggcgacgtggatccggtattgggcgatacagattagaagtagaaaaactcttcgggctgatggattctcggccgtagatgggagatcgtgcgtccaccagtgcacctccgattcgcatagcacggttatattcctgatcgttagattctaatctaatgatatgacatcctagataccccttcggacggaccatttcgcatttacgtccctgtaaaac

SEQ ID NO: 29934 - DNA, 679 bp, Zea Mays
gccttgcaaccaagacagttcaacagaaggaatcagatggaagcgggacagtgagcttgttcgacgttgaatattacggccaccacatttgcaagaaggatgtcgtcaaccatccgtgtgttgttgacacagcacactattacagtgtgccgattgccaatcagaaccaaagcagtagcagcccaacgtttgttcacaatgatgtctatggaatccaggatgaaagctttgaaaacctgttcatggtgccgagcataccagagtatctgacagatttcacagacattgaaatggcgggggcacttgaggttacctccgagatgatctctgaaaatatatgggcgtacgagatgatctctgaaaatatatgtagacagccattgattgcaccgtgaggtgtgacaagaaagagacacgagtatgttatgtgtgtactgtagagagtataatatgtgagacaagaaaagaaaatggacgtgcagagagacagaaattatgtctcaaaagttgtaaatgctgtcccgcatggtagaatgttggtgtgccaatgtctagactttcactttgagttgcaattgtaaccatctcacttccagcagcctctgtaaggcacatcctgcaaagtcttcatagcaggtaaagtgtcctggaatagtagcttataataataatttgttgg

SEQ ID NO: 29935 - DNA, 428 bp, Zea Mays
gctgactttgtcttcaagaacattcaacctttgaaggatagagcttatcctgcttatttgtataccggcatcaatgattctacccgggtcatgaacagaaagattcccaatgaggacttgttgagtcgactggacatgatactgagaggcagaatctcaaatgctagtgctcctttagcgtactctgtgtggaacctgcctccggataggttattctctgcatttgtctccaaccctcctgctggtgatggtagcccgggccatagagtgcgaccctctcctgaggacatcgaggcgttgatcgctccacttcggagtcttgatgaggacgagaggcagactcattttgagatgccagccagcactgatgatgctgaaatggatgtcgtgcttagcctgctggctggggagtcatccgactctacccg

SEQ ID NO: 29936 - DNA, 320 bp, Zea Mays
ctgcagtttagtgcacacaagggtgcaaaacgttagccaaatggtaggaagggaaaccctacaaagtaaccaaccaagagagctaagactacgagtctgcaacttaaagctgcttcttccttctctgagattttgtgctagcttttctccaaatttagttagtctttgataagagcagagccagtgcttagtgacccaccttgtttggccccaaagaaatatatggtagtcccacactgagtggaagaaagggttcgttttagctccagtaatcagcagaaaccagaatcttttagctacttcctaccgagtgaagtttg

SEQ ID NO: 29937 - DNA, 575 bp, Zea Mays
aactcataaacatcatcttcactggtgtccaggctcaaatattgcagaggtattggattcatcaaaactactaaatcaggtattgacacccccaaactatgtaaaaccatcaagtagccctctagatggctttgttagcagggtgcattaaattagctattatatggcactaacttgacgaatggcatgtgggccattctctgtgttgctaggtctctacctcaacaaggttgtcatcagtgatgaagagaagtaacaccccgtttggatgtagatattgacgtctggaattgggaactgaaaccaggattcctgaattatgttgtatcttgttttgttgtctaatgaattcagagttgcaattaaaactcgattcctcagtattggactatagctagaagttagaattgaattagatccaataccaaacctacctagtattagaaatgggatgcaatacaaatctgttgtttgaatgtaactgaaattgcaattcgagctaatacagaggcagagggtctatgctctgaattgtgagaggcaacttctagctatagtccaatactgaggaattc

SEQ ID NO: 29938 - DNA, 349 bp, Zea Mays
gtcgtggccgaacagaccaatttctccgccatggccgttgaccgcgccttgctccgcaaaactcgaccatgattggttacttccactacccctgctaccgtggacacgtccggagtataaatcctccagagtcgcgactctacaacccgatttgcgcctagggcataaccactgccgcggagagccgaaaagaaattgccgctgccgctgcttctcctctacaccgtcgtctagtgtgccgggattggtcatggctttttgccaagacctcacatgtgttttcagtaacctgtcggagacgattcgcgcgccagtgcctcggaattgctcgtcggacttgccgttcgac

SEQ ID NO: 29939 - DNA, 296 bp, Zea Mays
gaagactatccgcgcagaagtcgcctaagggtgcagccggactaagcacaacaagtgcgaaaaaaatccaatgtctatcgcgaagactatccgcgcagaagtcgcctaagggtgcagccggactaagcacaacaagtgcgagaaaacccgaagtctatcgcaaagactccgcgcagaagccgcctaagggcgcagccgaaccagtacaacaaaagcagaaacgacagcatcaaaccatctgcgctaagaccgactatattcacaccagcatagcaaaaccaaaccatacaaagtac

SEQ ID NO: 29940 - DNA, 313 bp, Zea Mays
gggagagcagagagcatgaacagacctggaacaagctagccacggcaagggctctttcacggtggcggaaacccgatttgggggaaatgagcaattcgtgggctctggtgagtaattgaaggcacgagcgggtggattggatgcttgaatacctaacggagccaagggtgtgctcaatttatagggctcttgagcggtggccagtgaatttgaaggagacgtgcggcggatggagagggggaacagcactggcgcaagcgattggtggcatttaccgtggcgggctcatcgatgatggccggatgtgctacgg

SEQ ID NO: 29941 - DNA, 361 bp, Zea Mays
gaaggaaatccacctcaatggccgccgctacacttggagcaacgggcaagtgaatccaacgctaacaagaattgacagatttttctgtacaacggaatgggagttgctttttcctagctactatctgcactcccttccgtccctcatgtctgaccacactccgcttctcctccagggagaattgacgacgacacatagcccctctttctgtttcgaaaatttttgggtaaagatggagggattcaaggaggctgttcaggctgcctggctgaaaccacttcgttcctcctttacacccatgaagcgccttcatatcaaattagcgcgtgcaacaaaggccatcaaactatggcgtaagacc

SEQ ID NO: 29942 - DNA, 484 bp, Zea Mays
taccgtggcctccagtccatcccgaccgccggggcgtccttatcgccggcgaggtccaagtccttatccaccgcgcgatattttctgaagacggtgaacagtgcactggattcagtaaaaagcttgactgactgaccaagttggagcatgattttctcccaaattcctgtggtaacacgagttaatctttgcagcaaacttgtagagcattatacccactacaaacttgctatggcaaccacaggtagattttcactggatcatgctcagaatttagcttgaagtcgatgttagttcactgctagtctgaaaattcagaccataacagcctgacagtccaactttgggcataattatgttccaatttttcacaagaacatggcttgcactcttaagcaaacttgttctcctataattgggctacaattttgatgtggtgacctaatatgaattctcactattttgaaagctacacagccccaaa

SEQ ID NO: 29943 - DNA, 370 bp, Zea Mays
gttagttgttcagcggggtagctgatggccttgaccagaagtactaccctcgtcgttcgaccagcagtgttggaggtctgattgtctcgccagttggttagggcaatcctaggctgagcagcatggtcaacttggtcgccatgctcaacacagagttgaaccactcccttgacgagttgggaaaggttcgggtggaggttgcagaattgcgtgctgaatgcgcagcatgccactatcttgatggtggctctctcgcccctgttgggattcagcatccttaccgttcaccgcccagtggtcgcttcgactatggtaccccagactgtaggacccgcatagatttagatccatagatcgatggagtcggagt

SEQ ID NO: 29944 - DNA, 424 bp, Zea Mays
cgatgaaggacaaacgtgaggtagacagaacgaccaagatggtcgagaaattgaatgtgggtggttgacacttgattacttccacaagcaaatgtatatgtggagaagaatatcgtgttgaacaagtcaagacgatggttgaaatggatgtgctagaggacttagtgatcggatggtgactcatgtcgagatcgtggagtaagcataggagatatgattcttcaatggatttggtgatttgggcctcaaactcactagtaaatggtttctctggtttggacctcaaaccccacttggagtttaggatggacattgaggtggcatgaggcaacctcgtgaaactcgcgtcgaggcaaaggagagccgtgaagagctcattgccatcatatgcaataattaatactccctctgtctcaaattaaaa

SEQ ID NO: 29945 - DNA, 480 bp, Zea Mays
tgtgcagaagcatgtgatgcttccgcgggcgcaacaggaatgggccacactccgcttcctcgacttcaagactgtggaggcttacaacactgccattcatcgcattgtcgctcagctacgtttctgtggccagatagtcacagacctggagatgattgagaaaactctccagacctttcacccctccaacatggtgcttcagtagcagtaccgaaataacaagtacacgaagtactatgagctcgtcaacatgttgcttggcgcagaggctcagaatgagctcctgatgcaaaactaccagaagcgtcctgtcggcgctgcggccgtaccagaagtacatgcaaaacttcccgtctcaggggaagagaggctcctccagaggaaggggtcgtgggcgccgcaataatcaggggccgacaaggggaacttttaagaagcagccacagaatggcagcggcagtagcagcaacaatggtcgtg

SEQ ID NO: 29946 - DNA, 1086 bp, Zea Mays
ctttccgggactgaagcaccctgcaacctcaactgaccagccatttcgtcaaccaatgtctgacgttaaaaacaaataagtgtaagaacagtatcatacccgggctatagtcagatcaggaaaaaccaaattacctggaggttggagaagaacgaaggaacccccaaatcgtggaaagtcagttgatagctcgatgaaggatcaccaaccggagcaatccgcaatgcatcagtggggaccaattcaatgtcatcagcagaaatcaaaactctgtcatcaggagcgccggcctctaaggcgacttgctgatccaaagctcgtgctgctgccatgcaaccagaatgcggaggagaagaccctacgtgaacatccatggaagtatgagagggagaaccaactcggacaccctcgagggctgggtcatagctcgcgctacccatccgagctggatcatctccggcaacaccctcaggggctgggtaaacgctagcgccatccttgaggaccgagccctctgtaacagccacctctaaggctgaaggaccttcaaccacttccatgggaacagagcaatccagaccagcctcctgactcttaagaccacgctccaaggtcgatgaggcacgagacgccgctcggaataactccaacccggcatcaggcatatcagcacaaatttccatcatcccaccatctgccggctccgacaacagatcttctggaaccatatcttcgagagtctgatcaaaatttgccagagacaattcttgcagaccaacgagggcagacaaagctggagaaggaacaccactactctccccgctggctatgtagcgctggctattcttccgaattaaagggatttcctcctcctcttcctcatcttcatcaataatgcggatagtacacccattgggatcaactttggccggattacacccattgggttcaacatcatcaaggtcacacccatttggttcagcatcagtcgggtcacacccattgggatcagcttcagcaaaaaccggcactggcacttcctcagcagcaggagcagaagggccggcatcctgattcaagcatgac

SEQ ID NO: 29947 - DNA, 498 bp, Zea Mays
cgattgtactggtgtcataagtttggaacagaggttctaatatggatttttggcctatataaatgaccatacgagggatttcatcctcaagagatcgaagggtttaatagttttggtttgaaattgcacaaactaaacggttttagcttctctgtgattcacaaactagaagcttgagactgtcactggtaattttttggtcattcactagtaatgtatgttgtaatgttgtgttcttgttgggaaattggattatgataaaatgacccttaagagtggcatgtcatatacctctatttatgattttgatttggaataatctaatggataccagttttataattccatgctcttccacatgatacttgctgcgatgccccatgtcagtgcgatatcagtagcttacatttaactcacataatcaattaatttcagttgagtccatttactgatgccccattgacattgctgctgtcatagtacttctgtcattatttg

SEQ ID NO: 29948 - DNA, 1440 bp, Zea Mays
gccttctccagcggctcagccaaacttctgtgctgaggcgaggaaggtccagatgaggtcagcagcccatcaccaacactgatagcagcaccatcttccagagctagaaccggcgcctccatcatatttccatgcatagctacagaccgttctctgcccactctctgatgtgaaccgaggcgatggtggataggctgacgctgcaaagggcacgactgtcggatccggggattggacggaccccggacatctccatcctcctcaccatgaaactcattctcatctgaaggaggcagactgctgtccgagggaagctgaaggggagccgaaatagcagcaatgctaatcttgtaggttagacatctcgcctcctgattaaatggccctcgctcaatgatgtggaggtccatatccctgcgaagcttcatcggatccaaacaccatgcccgaagcttgagtgaggagagatctgtcttgctcgcagaggcggggtgcaactccaaaatgtgacatgagtcgtgaagaagcatcttggctgtgttcagaccccacgcgtgcgctgggatcccacggatctcaatatccatcaagtgagagaaggacgtagccgaggcatgtgcaaatcttgtccattgcttgaacacgagcgagaacataggtcctctgaaaggctttccttcattaagcactcttgtcgccacttcctcatccggcaaaaacagaaggaagtcttccggcatggactggtgaatagacatatcatcaatattgatgcaataacgacgggccgcttcctccagcacatccgagccgagaacaacgggtctggtaccagtaacagtgacaaataatgctcggcggagtgcaacttcttctcttgccatgtccgtcgaaagttccagaacgcaagagggcaagttcgacgtgagaggaaccaagtcagcagggggagactgactgtgccccaacaccgcagcccctttcccgcgcttagaacgcctccttttacgcttgggcagtaagggcggctgcctcactaaatccatggcaggctccatcgcgacatgatcatgcgacgaagcaagacgtctccagaccgaggtcttgcgcgtgccctccagagaatgagccttgtccatgccagacaacctctgccacaccggaggccgcaccggaatcctcagcctcaccaaggcatgctgggaggtttcctgtcttcccggaagacgctgcttgacgttgcccatgcgctgccacactggatgtttctgagattcgactagcagagacgagcagactgccacccgatgtccaaagttgagacaccgaaagcaccttgttggacgccggcaggtagcaacccggtgagaagtagagaggcagttgtaacaccgacctcggagatccacacgggaccctcgacgagggaggtgcacacca

SEQ ID NO: 29949 - DNA, 511 bp, Zea Mays
cgggagcgggtgctctggcttcgtgattacctagcggagctcacggcgtgctcaatttataggacctgagggtggtggctcgtgaattggagatggcgcagtggctgccggagagggaagaggttactagcgcaagcaattcatggcattcaccgtggcaagctccccggcgatgaacgggtgggctaaggtgactcactgcaatgcggttaaagcaccaaagcacgtggcgcaaggtcacgaggtggctaactccggtgagttcatccgaatcggccgtgagtcaggcggacacgacgaccggagtgaaacagtggctcaagttcatccacaaggcgatttttactaccccgagcaactatcagtattccgttgagcacgaatcatagcgtccagcgtgaatccaagcgcgtggccgtcggtggcgaggttccctgaacctgcagatattttgctattgtaccatcacgtttgttcttcagaacaactgacagagcacattcaggggtca

SEQ ID NO: 29950 - DNA, 287 bp, Zea Mays
gttctaaagaaagtgggttactcaaatttttaattcctctttgtctttataatgcatgcatgctggaagtaacgttgcctctccaaaaatagggtgctttttagggcatccttagaaatataagtactggcccacggggcctaattagttagccacctatttctccctctatgcctaaggcctttcgtcctaggtctagcggtctagtcctgacgatccgtagcagtttctaggcaagttttagattttgaaaattggtattcatggtttattgtccttctctgtgg

SEQ ID NO: 29951 - DNA, 336 bp, Zea Mays
gctggctcaactgttccacctgtaggtccttctccaccaactctgaagacaggtcgaccacgaagtcctctcggctgtcgagggtgagcttagtggtctgggcgaggttagcaaggtgcgccatggcatcgctctttagagcctgaaggctgtacagtgcgctcatgcactgaacagtgatcctcccaacttggtcaggatgcatagcccacacgtctttcacatggctcacacggttgcaccacatggggtcatccctcttctcagcggggaagagtcccagtgggtgcattaccatctccaagggatggtagccaccgaaagtcggcagagtct

SEQ ID NO: 29952 - DNA, 866 bp, Zea Mays
gccgtgtccgctctgccccgatcgcttaaaatcaaccctcgccggagttagacacctcgcggtcttgtgccacctgcctcggcactttaaccacgtcgcagtgagtcgcgtcatgcatgttcggtgatcgctagtgagtccgccacggtgaaagccactaatcgctcgcaccagtgcaactctccttctccggccgccaccgtgccattccaaattcacacgccaccacccccggagcctataaattgagcgtgcttttgggtccgtaatgtagtcaagcacccaagccaccaagccgtgcctccaattgctcaccagtcaccagagctcgtcaatttcagatttcccccaaatcagccaaaataccgccgcgtgaacacctcgccatggccacccttctgcaggtcagttcaagctttcttaattggtgttctagctttcctcatgtcccctgaagctcaccgacccattcgattgaactagaccgccttaaattgcctagaacaccttggattatcctcggtttcagccgtcgtcgtgagcaggcgtgctccggtccggattagtgaaattagctaagggattagtgttggggagggttgaattaagtgacaaacaaaggagaagtctagccgttgcattttccggccggtatgggctcgccagagtcgctgctctgccgcccacggtcgaggatctcaggttgtaaagaaacagaaaggggaggggcctttgcacagatgtcagtgagacagagaaacagtagagaggattctttactggtatttcaaatgaccagggatccctatgcaaaatggacactgcagcgcgcgcgggcgcgtttcgcctgtctcaggccggctcgg

SEQ ID NO: 29953 - DNA, 1377 bp, Zea Mays
gcctcccgcgacacatgtttttgtcgttgaacaacaatttgatgccacccgttcgccacccttgttttggccactaagacaggtaaggctgtttttggcctcgcgtgagctacaacacatgttttcatggccgaacaaccaatttagtgtccaaccatagtacactagtgttaaaaccatagtacacatttttgtccccggaggcctgtaaggctatttttggcgtcccgcgacacatgttttcttcgtcgaacaacaatttcatgcctcccgcccgccaaacatgttttggctactggcatgggaaaggttgtttttagcatctattgagctacatcacacaaaacacttaaatcctaaaccccgagccccaaaccctaaaccatgaacccgtaaccgcgaacccttagactaaaacccgacccccaaaacacaaaatcacaaatcccaaactccaaaccctaaacattaaaccccaaacgctaaccctcaaatcgaaacccgaaatctcgaatcccaaaagcctaagctctaaacctcgagccccaaacgctaaggcctgaacattgaaccccaaaccctaatttgtgaaccctatacctcgaaccctaaatcaaagacccgaccaccaaaacacaaaactccaaaccccaaacttcaaaccctaaaacacaaccctaaaaagtaatgtaaggctgtttttggcctcgcgtgagctacaacacacgttttcatggccgaacaaccaatttagtgtccaaaccatagtacactagtgtccgaaccattgtacacgcatttggccccggaggccggtaaggctatttttggcctcccgcgacacatgttttcgtcgtcgaacaacgatttcatgcctcccgcccaaactctaaacacagagccccaaaccctaaagcccgaaccctgaaccctgaaccctaaattgtgaaccctataccccaaaccctaaaacgaaaacccgaacaccaaaacacaactccaaacccaaaaacacaacactaaacagtaaagtaaggctgtttttggcctcgcttgagctacaacacacgttttcatggccgaacaaccaatttagtgtccaaaccatagtacactagtgtcactgtaaaccctaaactccaaaccccaaactccaaaccctaaaacacaaccctaaaaagtaaagtaaggctgttttgggcctcgcgtgagctacaacacaagttttcatggccgaacaaccaatttagtgtccaaaccatagtacactagtgtccgaaccattgtacacatttttggccttggaggccggtaaggctatttttggcctcccgcgacacatgttttcatcgtcgaacaacaatttcatgcctctcg

SEQ ID NO: 29954 - DNA, 334 bp, Zea Mays
gccgggtctactagccgacggaggggagaagaggtgttgtggagaacttgtgcaggggcttgcattggaatgggcaggacgccatggtgctggtgcttaggcgcccgacctgcagggacaaggacgacgcgcgtctggcatcgcgacacgacaaagctccttggctaacgcagcggatcgaaagcgagcgaccggagcaggtgcataaatgacacgaacagaaatcgaaaacacgagagaagaagaaggcctcaccggggggcagagaagatggccaaagcgggcatgagaggcgatgcagcagttccgtggtgcaggggctgctgtggtttcg

SEQ ID NO: 29955 - DNA, 468 bp, Zea Mays
ctactgatctctactctcgcttatcttttctccttatcttgcagcagtcaatttaggatagtgaggacgaagaatgtcacaccgtgtgggggaggagatgacgaggaccttcctcgccccttcagacaggtcaagggcatgactgtctaccttgagtagcaagagggaagaaagaaaaggcatcttgacagagccactcgtgcagtgattgcagcagtagatcaggtagagcagggaggccagttacggatttcttctgatcagattgccttctgagttcgtcgccttgggtctcggactcgctcctccactgcttgctccactccttccgacccagtctccactccacctcccacttcgctagctcctgccgctctcgagccgtccactactcccgctgcttccaccacctccaccactctagcttccactgctcccgcttatgctccacctattcctccacctcgc

SEQ ID NO: 29956 - DNA, 302 bp, Zea Mays
attgattcgaatccattcagatgcctgggaaagcttctcatgtcagtttgcctggatgtaatccaaacaggccttcaccgcattgcctgtcaggccataaggaatatactctcagcttcgatttacctcacattcacatataatccatgccatttgagcttctgtttcccttcacaataatataatggattatcctctgtatactaactctaatctgctgggaaacatatgattggcattgttactggtatactccagtcacgtggtcgacaagagggcatctctgattgtgcggcaaataa

SEQ ID NO: 29957 - DNA, 300 bp, Zea Mays
gtttttggtagatcgaaatctaaaaggacaatatttggtttaatttattgtacttcaaatcattcaaattgagtgtttttctgaatttaaatattaaatgttactagcaagacatattaatggttgccacatactagttaatcaatacattccgctagcaacacatattaagagtttctgtatcctatttaacacaacggatggtacacataaagcattgccaaaactctaataacttaatggatgatgcttgcaacgcatattaaacgttgcccgctaatttcttacaacgcataaaat

SEQ ID NO: 29958 - DNA, 280 bp, Zea Mays
atgaatcgaagggcgaaggtctttaatcgttaacaattgtgttgctttgttcttgatgtataacattcgagagcaaggaccaacaccgggtgtccaggaattattaatgacacgaatatgttttgtctttgaaagcgtacccatggagagattgatggggataacaaaaatgggcgaacatgtgttggggtagtggtcattccgtagggattgaacccatccggggccagcacaacacgtacattacgagcctcttcggctttctcatggtgaatgacat

SEQ ID NO: 29959 - DNA, 416 bp, Zea Mays
ggctaagcttgtcgtacctcccatgctcatcggtcgatcggataaccttcgccgccgttgatctgtcaccggtgcgcgccacgtgcttaagcgctagcccgtatcttggtgaatcatggagtgcatgtccggtgatcgccggaggactgccacggtgaaagccacccgttcggagcaccagtgcccctttccccctccgggcgccagcacttctctgccaaattgagcgccaccgctgttgcgctctataaattgagtgcacccgcagctccgtagtgtaatcacgcatctattgcaccaaaccttgccccggattatccaccagggaccgagaattgctcgtttcccccaatcacggtttccgccaccgtaaaacacacctcgccgtggccagcgcgatacaggttagctcgtcc

SEQ ID NO: 29960 - DNA, 311 bp, Zea Mays
ttgagttgttggaagttcttgtgctcttgttcttgagtttcattctcactctctcccccactctcaactttgtaaggctatcaagagacaccaaattgtgttgtgatccttgcagggactaagtgtgctttgagattgagaagaacactcaaccagtctaagtgactgtttaagagagagaaagggttcaaagatgtccatccttagtggtctcctcaatggggagtaggttcttcggaaccaaaccttaggaaacaaatcactcatgttcttgtgttcattcttgtttgtaatttgtttcttcctctccc

SEQ ID NO: 29961 - DNA, 566 bp, Zea Mays
attttatatgctctctggactggacctcgaattccagaaagtgcaggggggtctggcgtacgtttaccgagactcataactctatttgcagtactgcgggttgattctagaaaagcacaaggactcttatgcaagtttctagggccgaaggggtatcttcaaatcgaagccctacgatcgcagatggacgtggcagattagctccgagccacggtgaatcggtatccgaacacaaccatccgatctgcagcgaacgtcctagatttaaagcaaccagatccaatcgcgcacgcccgatcacaaacggacgcctcagatcgatcctacgaaccggtacacacgcgatctaatcggagccgcacctggaggatcccacggtcagccataactccccccaatacccactcccgactgtcggacctgagcggcgccgccacgattccacggtggcgcgcacaccggagtttcccccaatcacgcaccagagcccccggttcccaatccgcgagtcctacagcgcgtatatgtgacaaggaatcgaccgaggggatccttaccatgaatca

SEQ ID NO: 29962 - DNA, 408 bp, Zea Mays
caacgttgaccattagatctaggatcaatggccagcgactcgtccacgcccgtgctcgaatcatgcccatccgagaccagatcaacggttgagatgagcccgacccaaaagggcatgtgtgcacaaatccaggccaccatcttttgatccaagggcccagagatgcccaatcccagatctaatcctaaacgcccctaaccaatccaacggccaggaggccttctcccaacttcgcaccgggtcacgtcggcgcgaactcctccccacggcggagcatcaccgggaaaaatcccgattacagaccggagcctcgattgctactccaagtgcgagataaatgaaatggaggacctagggaatcatctaatgactaattttctggtggcatgggtgcacgcgaagctaacc

SEQ ID NO: 29963 - DNA, 546 bp, Zea Mays
tgctcttatgatcggtaagggatcgtatggcacagtttacagggcgaagcttcgtcatacagtagcagctgtcaaagtactgaactcccctgaaggctgtggaactcagcaactacagcaggaggtattccattttgtttaacaaagtgagaatccgatgtttctatcgcacaatttatgaacattcttttaatgcaacaagtttatgaacaaatttactttcttgaagcagtcactgttttgtatgttaattagtgtccgcatcgtttacgctgtgctcatcaccattcatgttgtttcagctcgaggtcctcggcaaaatccggcaccctcacctgctgatgatgctgggagcatgccctgaacacggctgcctggtctacgagtacatggaaaacggcagcctagacgacatgctgcaacgaaggaagcagaactcgtcgccgctggcctggttcgaccggttcagggtggcctgggaggtggcggcggctctgatgttcctccacagctcaaagccagagcccatcatccaccgcgacctga

SEQ ID NO: 29964 - DNA, 285 bp, Zea Mays
gtgtcgggggtagaagaaaggattgggtgagttgtcagccgttggatcgtgacaatgagatagagattagatggagcgtcggctggtcgtgggattggtgacggatggctatgatcgggtcgcagatacccttcgcattgtagtgtcctagccgttcgttctaagatgatcgaccgcgattagacgacttcataacccttcgcgcgatctgatctggaccctcagattttgatcgggcagctcagaatagaacgtaccccttcgggctggccatctgtgaatcaa

SEQ ID NO: 29965 - DNA, 491 bp, Zea Mays
agtaagggtgctgaaacatgaggacagcgaacatgaacggacctgaaactcgttggccacggcgaggtcacaccgcttggtgttcttggttgatttgggggaaatcccaaattggggagctctggtggacgatctgaggtgagggttggtttactggttgcacaactacttagcggagcaggcgggggcagcaatctataggctcccaccacggtggtttccaatttcgcgaagatgcgctggctgccggaggggaaggaggttactggcgcgcaagcttagtggctttcaccgtggcagctctccgtcgatcaccgggcatgcaagacgtgattcactgcgacgtggtacaacgcttgagcacgtggcgcacagtggtaagtggccaacgacggcgaggtctatcccggctgatcgacgagcaagtgggtatggtgaaactcatccgcgaccgagcccgagcctatctggtgccaagatctttactccgc

SEQ ID NO: 29966 - DNA, 306 bp, Zea Mays
gtgcgtttttgttcaacaatttgattgattgtatgctaaatactacacagcgtagagccatacctaaacttttttcgtccttcgccactgcctgcatcatggcagactatgagtctgttagtgagctgctcgcgcgggcatctggttttgagatgcatcactcggaagccttttaggattggtacaaaaagttgatcgcctacacatagactcaagaagaagaagatggagactcagttgatgaggacgaggttgtggcactcgattggtcctagggagcacaactcattccgtgcccctgggtca

SEQ ID NO: 29967 - DNA, 583 bp, Zea Mays
cccactgcaagaggtccctcctccccaacttcttatcagaaacaggcagccccaaatagttgcatggaaaagaagtcggattgcactgcaaaatgttacaactgtcctgaacagtctgatcatcacaactgagagggatagcacaactttttcgcaaattcacaactaagcccgaggcctctccaaagcaatccaggatcattttgacacaaataagatcgtcaaatgcaggcttgacaaaaagaaccacatcatctgcgtaaatggagagcctagatgtcacgtttctgatggccaggtcatgcagcaatcatctttcctcagcatgcttgaataagctactaagcacatccatcacgattatgaaaagcataggagataaggggtcgccttggcgcattctcaaagcatgttttagttgtaagctacccaggtaagatagtttgcctaccttcatttccaaagttgtctgtaagcaagtatgcctagtagacaagttcccaacactaaaaagagcaagcataccctaactgtcttcaacgcttcacaatttagaaactgtgaagccaactgaatcttttat

SEQ ID NO: 29968 - DNA, 580 bp, Zea Mays
ctcaatttctctgattttctcggggtttggactgcgcacacaaaatccagaaagtacaggggcgaccttgcaaaattcccgagacacagccaacagtgcacgggacggcaggttctattttgtaataacctagggtctcttacgcaattttacagggccgaaggggtatggttctttctgagccgctggatttcaatccgatggtacatattagattaggcgcttaatgaaccggtacgcgcctgatttaatctctaccgctcgttttcaatccaaaggcccgagttctattactatgtgatctaatctccaccgcatagactctatccaacggttaaaatgcatcccgccaaggatctaatcacagccctccatggagatctaacggtccagtgatcgtcatctacattgccatcacccgaccgaatgccccgccgcggcgttcaccagacacggcaaggccattaccggcagcacccaaagctcaagtcccaccggtaaacttcactccgacaaccgcgaaacgaagagtagtggattgcgagactggtacaggagttctcaccacggttggtagcgc

SEQ ID NO: 29969 - DNA, 409 bp, Zea Mays
cgaaggcgaccgcgcttggtgcctaagggccaagtcgatccggtcccaggggctgctgctggcgacaacaaccttgctgtctgggatggcagcaggatgaacttcgcagacaacgtaagtctcatcccagtgcagcgagcattcacaactatcctcgattcccttccaacatgccctgctatgcagctactgcctttggtgcagtctgaggaggaccatgtgctgttaggctctccctgcagcacggttgctgcgggctacaacgccgaagctgtgacggactccaatgtcgacgcttcctctcggatgatagctgctgtgcatgaaccttcaacagatgttgcagcggtgtcaaccaccgcgcaaagccatctactcaacaccatattcaccaagccctcgcctgcca

SEQ ID NO: 29970 - DNA, 444 bp, Zea Mays
gctgggaggggagaggaaggaaaattggctccgataccatattggaaaccttaaccctagaatagggttgggcagtgtattaatagaccatataacttggccaggcccattacaagggacgggtatctaacagcttgcaagtaaataaactaaactagtggaatcaaagctcaaatgttaagtgtcatgcaactaaaactagaacgttatgctgcatgtcgggaaccagacactattactcatcctatgatatgaacgtcttcatgccataccattcccaaaatctgatagcataagtcttgttcagcttaattgtgtctttgtttagtccctatgttggacgcccacacaccccacctgctgttgttcctgtgtgactgtgtgttgattgttgacatcaaggggagtagttggtatgcagccatgctgcaagttgtagcacag

SEQ ID NO: 29971 - DNA, 444 bp, Zea Mays
ctcatgatatatccatatgtttttttattttaataacaagagtgtggactcaatactcaattatattccatatcagtcacttagaatacaacaatacataatttatttttccctctcacaagcacaagaatcgctcgtgctgtaagatgtcacactttattaccttcaggttgcaagaagtaccaatttaattaacatcttcaggattattaggtagacagtatctagagaactatatcagtctccagctttattttttaatattgatagacctctactgcagaaggcaccaaaaatctgttgttttgcgtgcttagtttgattcgccaggtctaagtttttaaagcaaacatgagttctttatctctcttttttcaactgtctgatacacattgtaattgatttggatacaggcagttaaactataattcctgcagtaccaag

SEQ ID NO: 29972 - DNA, 729 bp, Zea Mays
gaaccatctccacacgtcgccagcagagtcgctgatcacctatattttgatgatggtttctttgagaaccttgatcttgatgcaattgaagctcaagcaaccgaacagtggagacagaagaccacacaatcgacgcagaaaccagtggaaattaagaatgcatcagacatgagttttgcacctccgtcattcgatttaggtctctgatagtggtggtaaagttagcatccattcatgatgtcatctagctgcagtacctagccatctcagagcatgctgagaactgcacaagcaatgaggttttctgcagaaggcccgaacctgcatcacatgacaatgccgcaggatctggcatgtctgccgctgtgatatttatcggcgccctggagctggaagatgcgctggcggcagattttgtagagtatttatctcagtacaggctcaatacaccatgtatattctcctgtaaatactgttcgatgtataagggtcttattgtatgcagacatttcagagacttgatgtgttaaacccagtggcaaaggtgacgtcagtgtcggtttttgttgcgcaggattatcctcgctctcgatgctgaaccgactggttttgcatagacgaggcatccgtgcagcatgatggcaacgtggagtttggtcaataggacgagtggttggtacatgatgcctggttgctttccgaaaacaggcaatgttttgtgcagtcttg

SEQ ID NO: 29973 - DNA, 374 bp, Zea Mays
aaaattttgaacttgcaaaagtgaaacaagaaataagtgaatggtcgaacactaggctggagaaaaatgttgagaagcttcgggaatccaaggaaaaatgctttgagaaatccttggattgtgtaagaaaattgaaaaccagctttgccaaggtgggtgcatattcttccgaagagaatttcattcgaggtgaccccgagggtgttattgattggataagcggagaagccgaagcttttgaagagatcctcagtgatcgcggggacatttgtgcctttgccagcgctcgaggggttgcagcaattctagagaaggttggttgtgaccatgttaaagctgcagcctagaccgaagccgccttctccatagacaac

SEQ ID NO: 29974 - DNA, 378 bp, Zea Mays
tcggattagaagaccacacatctgaaccggtacggacttaggaccgttcgatcccgatctgacgcccttgcttagatcacccgaatcattaccccgcgccaaatctcattcgtccatccgaaaaccgatggccgaggtatccccatccatggatctaatcttggccactacattaaagatcgacggtgctggtgcttcttctccccccaacaagtctgcggcaaccgcgacattagccacgacggcggcaacatcggtgaaccctagttcttcgcctagggacactatccccgagcccgctagcgttgatgtgatgcagacatgatgatgaaaacgaggatggatgacttaccggtagtggcgccgaagacccccccc

SEQ ID NO: 29975 - DNA, 293 bp, Zea Mays
cggccccgcgagggtgaagagccccccgacgacgaattcccaccacttggcgcaccaaatcgcccgctaaagacgcacccaaaccccacgaattatccgcagacgccgaacgaccttggtaagcgaagaatagcgttggcgtcgtacttcactctgcactattctctgttggcggcgcggtgagtaaagacgctacgaagctcgctccagcagatggaagaagaggacgccaggcacaactacttaaaggcccaaggccagggaccccgaggagctagcacagggtacccgca

SEQ ID NO: 29976 - DNA, 501 bp, Zea Mays
ctccaactcccatcatctgggttgctgactctggcacctcataccacaccacttttgatcctggtactgccgctttaccccatccccatagccccaccttcccttcctccatcattgtcggtaatgcgtatactctgcctgtcacggtgtcacctcagtaggtgacacgatccttcctaatgctttgtacctcaacaacatccttgttgcccccaacatcatctagaaccttctctcggtccgtcgccccaccactgataaccactgttctatggagttcgatccctgggggctcaccatacgggattttaccacttgtgctttggttgctcgatgcgatagctccagcctcctatatcccattcgctttcccgccctactttcctctgcccatgttgccacattctatgccctcacctccactgcctctgcctccacttggcaccgtcgtcttgactacctcggccacgacgtcctctccagactcttggacacctcggc

SEQ ID NO: 29977 - DNA, 626 bp, Zea Mays
cgtgggagaaatcgacgtcccgaactcaccggtgtggtgcttggactagtcgccgccatcaatccgcgcaaatgccgtcgctgggtccctagtgactagcgtaggcgcgcctccattgcccgcgggattaggagactgccggtggagctcttcggacggggcgaaaccatctgtgcaggagggtccttggcagcgatctttcgtgaagcgtcgcctgtgcccagcctctacctcgtctcggcggggtgagttcttgttctgctatctttgctgctatgattttggcacgaggtatcatcagggtatagattgtagtgggctgctcgagtatcacacagaccaccgggatatcgggcggtgggtggcctactgcagggcgccaccgctggagcgttttgctcctcctggttcgcagctagaggtagaagaaggcctgtgcgttgtccgatcgtgtagcggcggccatgattgttggagggtgtccagtcggctgggtgtaggagaaggaacgggcgccgttgttcaaggattgtgcggtcagtgtgggatagaattgatagtgtgctgtggatcataggattcggatccaacgtgtgaggatgatctcgggttcataagtgtctcgg

SEQ ID NO: 29978 - DNA, 423 bp, Zea Mays
gagcattagagttcacagcagggttgagagagggaccggtgaaattatcgctgtggaataaatcggtgagagacgacacagttgagtgcttaaacctggtcgttgtaggtcatagaggcctgaagaccgagtctatcaagccaagtccatgtcgaacctgctaaatacaaaggaggttctgaattataaactatcgcgatccgctcccctacacgacacgcaagtcggtagtcctctagccagagaccggggttcgatttcccagtgtactttgcgatggcggggcctgtagtgtcgcggtgcgggcgcctgcaggatatggcgatcaaaagcctatggccttggcggctgggggcttaggcttcgatcctcgttggcccctgtggtgctggctgtatcaatggtcgtcgtttggccccttcc

SEQ ID NO: 29979 - DNA, 400 bp, Zea Mays
ccggaccatcctaacccatggatttagatccaatggcgtacaccaatttcccccctaatctaatctcatccacccaatccaaatcggacgacatatacatctccttctacctctgtcaacaaataagcgacagcgcgcaccagggggatgcaaacccaccgagcgccagattcgcaaccagagatcattgtttagagcacgaacgtaacttacgcatcacggagtcgatgacaagtaccaggtcgtgaccttaccagtgtttagtagcgtggtcagggttgcccctggaggagcagtgcgacggtgcatccatgcttgcaaatggcgatgcaccggcccttcgaccctgacgtcgtacgaggaagcaccatgatccgccccgccccacagcaccccgcgc

SEQ ID NO: 29980 - DNA, 482 bp, Zea Mays
cggctcgctgcctctagatggtgtagtcccctaacgtcgtccatagggtcgtgtgttgtcgtacccctagtatggtgttccatcttgtatgttcggtatacgagtccctgtagcttgcttggtgccagtgctatggtaccttggcgggtcccgcaaagtaggcttatggtaaggttcaaggtcgtgtccggtacaacttcatcttccgacataccccttacatcactatcaagcacacgtaggtatacgcccagtatggggtactgtcttgtcctttctagtgtatgggtcactgtaaagactctggtgctgaggtctctagaccggagttgaccagaccggcgagtcaatgagggtatatccgtcggtgcacacgagagtgttccatcgtgtctgtctgatgtcctttggtactatatgtatggcctggtcatggtttggtgacgttgtgtcttatcgcgaccgtcgtggaccgatagcgt

SEQ ID NO: 29981 - DNA, 876 bp, Zea Mays
ctgattttccaccagagtaacaacaacaccaggtgggagtgtgctgggaggactaggctcatccactggaatcaaggtgccggtaaaccagcctcatgtccgggtggagaggaggcaggcacgtcgaggatgcacggggcacaaaaacaactgcgaccgcatgtggcatggcaggtggtgtagcggtcgacattgtcgagccaggcgcaggtggcgatcccagcggggtagagctgaggtcagccagggtgccagaaggaggcgcactggcggcaggtgcagcgcgtggagatgtagcgtgtggtgtggcaggagtagccacgtgaggcggtgtaggggcgacggtcgtcaggcatgaaggagaggaggaggtggaatggatattcgtgcctgtgtcgaagaactactcttgttgtggaggctgtttaagtgttgtggtctggaagttggctgctagagcctgttgatcccagccttgagccaaagcgaggaggatgggtggagggatgccccattgaccagtccattggccaggaggatcgaagacgtctgactgtggcgcctgctaaaagagattgtatctgtgtgcaacagtagattgataaatgagagacatagatgttacaatctatagggggtgaggcgatcttgggcaaaaggaaacccatacacaagatctcctcaaggatggaaagccccaattaggatcctgcctactaggtcctactaggtccagctgactacagagccagacgcaggtcctgtatatggtagggattcagctgtctaacaccaggattcctccctacgcgtgggctcttcaagccgtcgggggctccttaccctaccacggattgtgcctcctctgcaacctgg

SEQ ID NO: 29982 - DNA, 705 bp, Zea Mays
gtctatttccatggatttaaaaaagttgagcattgaagaagagttggatgacttgataacaagtattcaacatttgccgtggacgaaattcataggattggtacggttttccttgagcaagcttggtacagataaaataatctttaatgctttttaaaatcaagcatgatgttgactttggtgatggaagctcatatattgtatgttcttctatggttagtggcacgcacagaaatggacatcccttgatttgtgtttttcgcccatgtgaacagttttcctgtctcattcagttgtaaccaatcttccctaatagattccatgtagccattggcgaagatttttttaatcataggcccaccacaccttatagcaccaaatgagttggtgtcctccatcatttggtgaaagatctaccagtgactgtagtagaactgtagaagcaaggaactagaaattcctgcttcctcctgatgaagaagccggtgccagtgccacacaacaatcggaacatgtggatctgaagaggacgtggtagttgggtaaaccagacaggtcagtgcaggaggtggacaaatcatggccggttgatgtgttgtactgctagggaatgggtgcattaaacatgggtgcactatgaccttgctggccaacaagctacatttgataagctggtgaggctagctggccattgacattcaagga

SEQ ID NO: 29983 - DNA, 812 bp, Zea Mays
tatgggtggtagtggatcgcttgactaagtctgcgcattttattcccatgaagaccacaaattcagcttcagatttggttcccttgtatatgaaggaagtagtcaggcttcacggggtacctaagtctattgtttctgatcgagactccaaatttgtatccaaattctggtagagtcttcacagtgtattgggcaccaagctttcacttagtgtcgcttttcaccctcagactgatggtcagtcagagcgaacgatccaaaccttggaagatatgttgcgtgcttgtgttctgtcatggaagggtagctgggaggatcatcttgcattggcagagtttgcttataacaacagctaccaggctagcatcaagatggcaccatttgaggctttgtatggcaggcggtgtatctcccctctgtgctgggagactttgggagagagatccctagttggtcctgattgggttcagcagatttctgaaaaggttcgagaaattcgtcagaatattttggcagctcagagccgtcagaagagttatgctgatgtgaggaggcgggatctggaatttgctgtgggtgaccaagtccttctcagggtatcacctactaaaggagttgttcggttcggtgtctctagaaagctcagcctgagatacattggaccgttcactatcttggcccaagtgggcatcctggcttatcgcttgctactgccggattccatggcaggggtacacccggtttttcatgtctctatgttgaggaagttcttgcgggatctggaccatcagattgagatggaaccaattgct

SEQ ID NO: 29984 - DNA, 490 bp, Zea Mays
caaaaaggaattcatactcaacttccaattcttttctcggggatttatctgtacatgttcacaactcagccaaaattgatgtctgagatgaacacaactgtggccaaaactgtctcacatccaatcatttctcgggttccaagttgagatgtgtactctcgatttcatcataagcaacggcatgttgaagtgtaacttgaaaaaacaatagtatcacctcaccgaggctctacgtcaataggtttcattgtatctaggaagtatggaccatcttgggagacaaatcccctgcagcttcgttgcagtccttatctttcgtgcttctagaagttttttcgtgcttctagaagtttccggggcacaggacctgaagtttccggggcacgttgttgattctaagagcctcggcttccatccccttcgccactgccatcagaatttttcgtgcttctagaaggcgagggggggccctccttatctttcgaacaac

SEQ ID NO: 29985 - DNA, 434 bp, Zea Mays
aaaatgtcaactatcttggaatggagggagtatatagatatgccaagtaaaaatgatttagtacatttttgtgataaggagtctgtaaatttatctgttatcaattcttaaagccccaactagtgatgttaaaaccagtatgaataattttattttattatttgataagctaataatggtttgcccatatgttgaccaataattgttaactagagtgagctactatgaatcagtcttcatcctaaaaacattatttgaatcaaagaattttaaaaaattgattgttatttgatattttgttatgaacattgtactttgtataccattaccttgtgaaagtaggagaatatgaataacacaaatattggatggtttgtaacaactattaagtctcgtgcgtaggctatctatatgaagtaaaatgtggcctgatc

SEQ ID NO: 29986 - DNA, 564 bp, Zea Mays
ataaaaatttgagaacaaagcattgcaagttgctctgtcaggtgctctaatgaatgattgcgatggtacagtgactgaacaagatcaggttcagtgtatctcactgctggtgaattggcaccacgatcctcgctcgcggtatgattcgtgtgcctggtgtgcggataacggtcgccagtgaaaagatcttgcgcagggatgaagtcggggcactgtggccgccctgtcgccgtacccacttgcgctacgacgtggccagacgatcatcaccgtggagatcgccattcaccatgattgtgccacgctgtagtcgattcaccacgtcgtcgcaagatgtatggactcggtagtgaccgtcgtagatagttagcctgtgagtgccacgttagcggcctccggtgactcctcccccttctcaccgtgagcgcttccccgtccaaattcaccctcctcgcagtcatcctctataaattgatgcatcgacatgttccatctacttgttacgaacccagagcaccagccctcgcctccgatcatccaccgtagcgaccaattttgttcccc

SEQ ID NO: 29987 - DNA, 426 bp, Zea Mays
atggctaaaagaatgtaacatgcagtatggttatcaatggtttgtggtcatgagtgcttgtggaggtgagggcaagggcatgagaaggctagcctttctctaacattagagataatgtctacgagagcaaaactagtcacatgctagagagggaattgagggaggaagacatggaatgagagcgtaagtcagttaaaaagtaaggtaacattttgactatcatttttctcgttgagggatgcactcgcatcatagttaaagggacaattatcacacgcctcctttgtattttttttacatccaactaatgaaataattttagctttataatattgtttccacgcgagtaagaaaaatgccaccttacatgggatattgtgtgattttggtgttcgatgaacaacataatcattttgactaatggca

SEQ ID NO: 29988 - DNA, 391 bp, Zea Mays
tccagatttgcccatcctctgagtgtattgctgcaatgaaattctttttcttcctgaaccttgtttgtgcatgaaagagagaggtattggcatccccttctttgagccacccaatccgcgatttcaaccttgccacggtacgagagatagaagacagggcaagggagtgcttcttgagcatgttccagagccacaattcagcaggagataatgagcgattgtcctgcgcaacctataattgatgaaggagctccctagccatctccagctgcagcttaatcttcccaacttttttgtcattccagccctgcaaactcctagccgttgcctttaacttcttagcgaaagtaataagagggcacgaccctgcaggaacagacgcccaagaatg

SEQ ID NO: 29989 - DNA, 326 bp, Zea Mays
gatttactcgggccgcgtgctttagatgcagtgcttggggtattttgaggatagtgtggggtgcccttcgggagccgaggaggtcccagagtcaaagggggaactggttgttgtttttgaggagttcttcattgttggccttcgctttcctatgcattgatttgtcatcaaagtgttgtagcgtttcaaagttcaaattcaccagatcacgccgaactccatggtggcgctggcaaagtttgtgggcagcgactacgtatggtggagagccctcagttgaagtcttcgctaagaattattgcctccattggtagaagaaggttgct

SEQ ID NO: 29990 - DNA, 382 bp, Zea Mays
aaaatgtggtgagatatgaaagctgaaaacaattttagataataacaaatgttggtgagatatgctataatcaaaggtgagctgttacttggtctatttcatctctgaaatgaacaccagagtgtagactgttttgagtgttgacatggactaaagaaagcataatcaagttgatatggatatgaaaagcatatgcacttacatctctctcagcctgctccttgtgagcttttgcatatatcgttcattcttcttagcccaagattttcatctgagaccatcacgaatcaaaaggtgccacaacgaagagctgtccacttcgagattgaaacctgcctcttcttgttctgccatgcttcacctataatataacacaaagtca

SEQ ID NO: 29991 - DNA, 377 bp, Zea Mays
catatatgattccataaatacaccctaccatataggattccgtaagataggtctcagtgttcagtgtataaatagctactagcagacagatgtcagctaatgattttttattagtgacaccatctattgatcacaattcagattttataataccgccaatttataatgacccattattatataccatacagatccatttaagatagtatttagattattactagttagtgtgtatgaactttgtatctaatagtactagtttacttatacatgcatttgatgtgcaaaatcagaaaaagcaaaaaaaataagatttggtttgcatgttgacgaatgattactgctagaaatgatattagtgctatacatatctttgt

SEQ ID NO: 29992 - DNA, 330 bp, Zea Mays
gaagaagcggggtgcgcggaaagagccaggggaggtgctctgacagtcactactaggggagggagacgacaaggtctcgatcgccagggaagcaatcacagctctggggaagacaagcggcaaaggcgcgtgacgacccgcctgagggtggagctcgatgcaatcacaaaggataggattcatggcttaatagaaggccacgaaaatgccccgggcaaactggtcgtcgtgaaggaggtcgcacacaacgatcccgatgaaacaaggcggagccaaaaaggaagtggcaccgtcggctagggcaacgacatgatggggagtagcgggggg

SEQ ID NO: 29993 - DNA, 318 bp, Zea Mays
agttttacaattcctctactcgggctttctttctcaccaatggtgtgaagcttcgcatgtcttgcccttatacatcacaacagaacagtaaagttgaacgcatgctccgcaccaccaacaaaatgatcgcaccttgctgctccaagcgtccatgcctccacgctattgggtagatgctcttcatacagccacttatcttcttaatcgccttcccaccaaaactgtccgcgcctcttgtccctttgctgccctatacaacacacctcccacatatgagcagcttcgagtctttggatgtgcttgctatccaaacctctc

SEQ ID NO: 29994 - DNA, 371 bp, Zea Mays
gaaaaagagaatatgagatgtgggaattggatatatcacaagtgcctgttcctgttgagtgccgcagatgagatcgtcctagtacttagtgtaagatcaagtctagtgcatgatagaccatcttctaaggatggttagacacaaagatgagataaacgagtttggaaatggttatgcggtctgtacaatatggcatgacggtatgacatctctagcgcacggtggttcatagtagcctttggtttctgtgatgtttttcatccaattaccactaaggatgttgtgcttcctagccggtggtgccagccatcaacttctaatgtcatgttatgaaggtaccctgtgtatcattgtgctactgctgatcttaa

SEQ ID NO: 29995 - DNA, 294 bp, Zea Mays
gctaagaatgagaagagatacaccaggaaaggagggcgcagcatcagcaacaacaacaagtaccactgcctccaccaccaccacctgttccaccccgtgataagcaccgggaattcatgagccataagccaccgacatttgctagttctcctgatccactggacacagatgattggctgaagtccgtagagaagatgttgaacattgctcagtgcactgaccgggagaaggttttatatgcttctggacgtctgacaggccctgctgctgattggtgggattcatatactgctg

SEQ ID NO: 29996 - DNA, 495 bp, Zea Mays
aaaatcgcgacgctagcatttatagagcaggggaagagccgaaggcaaggtcggtccgcaaagcagatttcgaggagttcggccatatcggtcaaagcgaccatcggttatcagggcgaatctcagcggatggggcccacacaccagggcttgaaggcgtgtggacacgcaggtcccgcggcgagcaaataggggccagccttggggagtagggagtgggttgcgcggcgaggattcagcagcatcaaaccccacgagctgctcggtaatagaccagagcgagatatcgtggcttggtccttggttagaaggtgacctgacaggtgggggcggattgtcatcgagtctaggcgaatcaaaggaggagatagaatggcccattgtggtaatggcggctggattgcaggatgggctagatgaccgccgagctgggccaagtcagggaaggtggcccaggtgcagttccctcactctcttttttttatttgtttcttt

SEQ ID NO: 29997 - DNA, 599 bp, Zea Mays
gtttattcttccctttccgttacaaatgagtcctcggggcactattcatgtgagtcagcgggttcacagaaaaccccttaggtttctatctctctcaaccctcgatcctctctaggccagaacagtgttccgtgaagaaaatacggcggcgccgctcaatgccatcggtagcgttctgggggtgaggtcggggagaagtgggaggatgtggcgaacacgctggtaccattggtttggccggaggtggtcggagttgtgctggccacgtgcaggggcggacgaggtcatcgacggcaaggggcttggcctgtacacggtggtagagtttgattggattgcttagggagcttcactaggtgatgtagaggctgtgcgcgcaaagaatcgaagaatggtgcaccggcttacctgggccatttacttcggcgggcaaaggaagtctggtgagggcgatcaggtgtctccagcggggtatcacttggtttgagggcttgggaagtctcaccagactctgggaggctggatgagtagctggcttgggcagggatggaccggagcagcccgtccatggtggtcgagttcggtcgtctctggcgggc

SEQ ID NO: 29998 - DNA, 333 bp, Zea Mays
aaactcaggctcaactgttgttctgtccacgcccgccgtagctctgcgcacgacgtcgctgctttgccgcgtacctaggattttggagggtatgcatcataaaacttaataattaaccggaaattttgaactagattacaatagagcccaaacatatgaaatatgaaatttgcaagaaataatgattgaaagataattaccatactatttgcatcttgaaagataattatttaatttgcatcttgatgaatggatgaattattaatctatcaaacttatggacttactcaatgcatcaatggatcaggagacaagatcgctcgttcgttgcga

SEQ ID NO: 29999 - DNA, 338 bp, Zea Mays
gggggataccatctttggctgcggaggaggatgcgtaggcgggaaaaaaaggtaggggccctgctcccgccttgtcatcttcttcctgttcatcgccgacccgtatcgacgcgtccgtggtccatgggcctccccctcacggtcgcgctggataggttggtcttccggggtggtgtcttcggactcggcccagtgcgaagggcggaaggcgtcgacacgtggagtagggttttcttcaggtaaggagttagggtttccgcccgatatcatcggtgctcattcttttccacatttcgcgtcgtttctctctcgcctctggtctcttccgagcgcgtcgc

SEQ ID NO: 30000 - DNA, 421 bp, Zea Mays
gagcttatgaggcgcaccctgctaccaaggatgggctagagagaggctacaactcatattctgctctagctcctcggtgccctggtgtcacattcagtctttaatgtggttgattttctgatctgtgcgatcgaagacactatgttggatggtctccatgctcggcgtcagctgccctacgctcactatctctgccacatctttgctcagctgatccagcctcttcagttccaggctcctcttgaggcctcgagacttcagtttggtttctaccgcccagctcctgaggacactgctccagctctagttgatccactagcaccgaatttcagggttgaggacaaggccatcagacagtttgaggatcagggtgcaactgcagagacttcttccgatgatgatgaggatccgaggattccgc

SEQ ID NO: 30001 - DNA, 295 bp, Zea Mays
ctatcctagaaactgttgcccagttcacaaggtctatagtacacttatttggaccagaattccttaggaaaccaaacgcacatgacataacatctttgcttgacgttgcccaaaggagggggttttcgggaatgttagggagcatagattccatgcaggcagttgaattgctcgaagtgctggtactacgagccttctttgcacggtccctacccattggtcgcacaaaggtatcagacggtgaaccaaattcgtcttccccctgcttcgcctgggacccggtttcgttgacgtt

SEQ ID NO: 30002 - DNA, 278 bp, Zea Mays
agcaagtagaactctggcctccgttacctccaaaggagttcgagactcaacccagctaggagtacgtacatctggttgcctccctgaccgaggggggagggactcgcagggggtttccacaataaaccactcaaggcgccaccctttaatgatatccttgagaggaatgtcaacgtattctgtcttcctcctgcgacgcatctccaaacttgcaccaccaacgagctggtgctgcccccagccatcccgggccgacaatgatacaaatacttccagag

SEQ ID NO: 30003 - DNA, 358 bp, Zea Mays
cggcggggttcaccagggaccctagctcgtggccgcgggttcaccgaaggatggtggtggctgagcagcacgaaatcactcatcggagcatggcaccgtcacagattctgcacctcgccgtgatcaactcacctacaatagtgccaaggcctcgatgtgtggtccatagcattcgttggatcacacaaaacatttttagggattggaatgggtgggaaatcgctcgtgtggtgcgtaatttgtcaccgcagttgatcgtccgcctcggggccacgcaacgtcgtggtcagcttccctgaccgtgctaaactcggtatgagcatctcccttctgttcccttttgcccccttgatgtgta

SEQ ID NO: 30004 - DNA, 499 bp, Zea Mays
tgtggcagtaccaagagcagcagcctagaaagtgggagggatgctggcttggaagagaagcgtgcggacgacattattgatggagcgaatgatgcgttcggccttgccattttggggggaagtgtaaggacaagacatgcgtaaaagaactccatgggtggagaaaaaatcgcgagcgttgaggttatcgaattcgcgaccattgtcacattgaacaccctggacggtgacaccaaattgtgtgcgaacataagcgaaaaaatttgtaagggtggaaaaggtgtcagacttaaggcgcaagggaaatgtccacaaatagtgggaatagtcatcaagaatggccagatagtatttatgaccagacacactagtgattggtgaagtccaaagatcacaatgtattaattgaaaatttcgagtggcatgtgatgaagaagaatggaaaggtagacgaacgtgacgtcctagctggcaggcatgacataagggggtattttta

SEQ ID NO: 30005 - DNA, 357 bp, Zea Mays
gctcggctacaccacaggtagacttgaatgggatccgcgaatcgagacaaggaggataccacgacaaacatcgttgggaccgctcgtggcagggcagaggacacgaggtcctcgcgatgagacgatggggtcgcgagtggcagtgcaggagactgaggggccacacgtgccgacacggggggacgattgtgccacgggcaaaggtaatctggccatgcgtggcgtaagcgtagttggcggggtcgcgcacggggccgcatgtggcgcgggtggggtcaacgggacagtgtgtggagaaggcgacgacataggtaaaggtagcggggctgcatgtggcataggtgagagcctcagggc

SEQ ID NO: 30006 - DNA, 399 bp, Zea Mays
ggagtatgtgatatagggagaggatttactatctattatgtgtgatacctaattatattgtcattcgttcatatgttccatgcacattacctttcatgcattatacattactttatattgcatgcatatgaaatgttgttgctttgattactctcattctatctttatcatgtcccctatgctttttatgctcttacatttacatttcatgcaaacaaacttaatcgtgtacttgcgcttaatctttcactcctatggtacatgttctagacttggtttgaatgaacttgctctaacatccatgttttattgtcataagttcatgcaaatcaagtactttcaaaccctcaaatcttttgcatactcaaggttgtgttgccatcagactaaaagcatcta

SEQ ID NO: 30007 - DNA, 485 bp, Zea Mays
ttctttatttgtccctttaatttgaagatatggagtcgacactccttgtagatggtcaacttctattaaaatcttcaatggatttcaaaaggcatcagaacatacttgtaattaacagctacactactgattccatcataacattacaaaataatgctatataaaataacagatgagaacatcttgctttaggtatgcaaagttactaatggagcagttttcgaccacaaaatgagagacaaatgtgttaaattcgtatgtacagccatactgatagtgagtaataggcagtaggactgtgccccgttacaagattgttcatcagtatgcatgcattcagttcattttcatcactatagtatttattctgtacagctagataaatattacacgtccatccaaaaaccactaataaaattactaacaaccaatttttatgcctggcaagagattgtagttttcattttcaaaataatcaatgtctc

SEQ ID NO: 30008 - DNA, 282 bp, Zea Mays
caagttcgagttttttagggcaatcggctttatgcccagttttgttagttgggcaatatgtcaactaggaaaattcagagacagaataatggtccaaattgtgaattatatctgcctactccctccgtcccaaattataagtcgttttaggtgcatagaaagctatgcacctagaaaagacaaaaccacttatagtttgggacgggcggagtacttctcaaatgagatgattaattccatcatcctgcagaatactgtcaatcctgttgtttatccttgtgt

SEQ ID NO: 30009 - DNA, 651 bp, Zea Mays
aaaccttttgcacataagatctcacgtcccttgttaacttcctgaaaagctatagttgcagaagaagaaaaatcaggcaattaatccagtaaaaaaagggttgacaacatttaatattcttgtatatttaggcaaaccattctaaacagccctccaagcagtggaccagcaagatctagtcgtttgtttccataatgatctcggtcatcctcagctcttcgactaagagcgcacatcagtaggcggtgaataatatacctgcaaaataaagggtagatcaaccttgctactttcaacagaactttaatttttgcagatgccagctacaagtccacaaggcttgacaaggagaacatacccaaaatagtatgccttcttagtttcacagaattccccaacaccaacatgaggcaacatttccttctgaagtatttcctttgcgtatctgaaatacagaaagatgtaagcatgagtggaacaactcaaacctaaatacctaatatgtaatatcaactatttgcttgacatacttaattctcttttctcgagtgacaccaactgttgcgccacgctttccaatgtagtccagagcaacctatgagcagtcaaactagagcttttaaaagaagaaacataagccagagcacatct

SEQ ID NO: 30010 - DNA, 312 bp, Zea Mays
cttcattctggtctaccagtaaaaagatctgagatcatgatacatcttgttacttccggggtgcatggaaaatttggaatggtgagcttcatccaatattttctttctaagctcggggttcttgggaacaaccaatcggtctccaaaccatagaatccctttgctgtcatgacaaaaacatttgtatttttccaccttctgttcgatcatttccttaataacttgaacacccttgtcaccaatctgtgccataactatttgctcatgtaaagtgggctccactgaaatataacttaaagcactggaggaaac

SEQ ID NO: 30011 - DNA, 449 bp, Zea Mays
ataaccttcaccgtttgtttgctgtttttgtgtttcgatggcaggcgacgacgaagaagcaaggatccctacaaactttgatgaatgtgttagctgccaagatcttgaggcaaacaacaagcttctgaaggagcaaatggaggagacggtccacaagtcagtgcatgacgccttcattgacatgaaccttggcaagacatacgagaggctggatcgacaattgtccgagattgtcgacagacttgctgtgtcggagacgcaacaacaagcactgccaccaccacctcctcgtccacgtcttcccgatgatgcgatgtttggtgaagaaggtaattatgatgcagcggccactagagatttgcgcctacgtcaccgtcttcatcaaaacacagaaggtatgccacactgtcagcaaggtaataacaatcgtgctcctgacgacccttatg

SEQ ID NO: 30012 - DNA, 281 bp, Zea Mays
agaccagatggggcactggataatttccttgatgtcttctcttttaatcagatcatttttaacataaaaccactcctccatctaggccctgggccaccttttccggtatgtcggcatcgggtaacttgcattagagcgggcaatgaacccgtagcaaccaaagttgttgtggtattgttctttgccggtagccttcgtctcgtataaaagctcgtgcatattgcagaagcactttgcactcggctccaacccttggcttcttacagcccagacaaacatcc

SEQ ID NO: 30013 - DNA, 322 bp, Zea Mays
ttttgatgatatcttgatctacagcacttatttatctgaacatcttgaccatctacgtgttgtttttgatgctttgcgcgtcgcacgcttatttgctaaccttgacaaatgcaccttttgcaccgcacgcgtatcgtttcttggctatgttgtcactacacagggtattgaggttgatgaggccaaggtgcatgctatttagagttggccaacgccatcgacggtgacacaagtacggagttttcttggacttgcaggattttatcgtcgtttcgtgaaggatttcagcaccatcgctgccccattacatgagttgaccaag

SEQ ID NO: 30014 - DNA, 395 bp, Zea Mays
gatgatggacttgcagcggaggagttcggcgttggcgagggttgcaggcgagtgacagccgagagggaagtcccccgagcttataggcatgctggggaggagaatcaggggatgcccggtcgtgcgatgtgtgggtcagttacgatggttgaagggtatagagttgaaccctttggtccacaaggcagtgaggaagagcacagggcgacatgtgggggatgaccggccacgcaggtcccacatgtcagcgtctcatccatgctgggccgcccgtagggtgaagttgtgttgggccagagtggagctttgggcccaggtcggcgtggatgcccctgttttctttttattttattattcctaattcttttctaatcccactttaatgtatttcaaac

SEQ ID NO: 30015 - DNA, 414 bp, Zea Mays
cgagtctgggagcacaaggtcgtgggctgtgggttttataggccggcgagggggaagctagagtgcctggcagggagtaatggggaggagagaaaacagccggtttgaagaagattgaaggccattaatggttaattagacgctgttaatagagggaggccactcctcttgattcctcatagaaacggacgagcaagaaacttcagacattaatggtgtcgaagaaaggaagagtaacggctggacaggggagaggaaggggaagaggtaggggatggtggctggcgctccaatcaaacagggaaacgagcgaacgggtctcagtggcacgagctgaagaacaacggctcggaagcacaagcggcacacacaagccagacagaacagaggagctgtacaaaggttgaagacgag

SEQ ID NO: 30016 - DNA, 311 bp, Zea Mays
gacgccgagctggcgcagccccaaacaacagggaaccgacgagttaagtttggtggccgagagcagctatactgtgcccgacggcgcccagcagcaaggaaaaatcggacacatcaacgcgggtgccgtggacgtacggtaatgcccgccgagaggccctaccgctagctcaagggttcatacctcgagttcaaacgagtcagcgattcatcgatgcaatcgccccggtcacgacgctatcttgccgcagagttccgagcgcgtatcaacgacctcgctcagtcccccggcgactagcttcttctccctgc

SEQ ID NO: 30017 - DNA, 550 bp, Zea Mays
cttatctctggccgggggtgcatactgctgttgctgctgatgttgctgattctgctggttctgctgaatttgttgaacagccgtagtgattccttgcagaatctgcatctgggcggcaatgaactgctccatgttgggattcggtggtggtggtatctgttgaccacgctggttccggttgttgctgggtcctgaacgggcgttcaccatctgattggtcagagattgaaaatcttagagaagtggggagtagaaaagattctagaggggaatttcttaagtttatgttttttaatgctcttatggccattaggccattgcactcaaacaaaaatccaactcaaacatatcaaagatcaccatcacattgttgttattattatagtataacacaattttatcgtctactgcgtctagcttattttaataaactatcctgtcaacctaaaggagtatggtgatagactcaagggttccataacaaagccttccaaaaagaatgaggataaggcagagaaagacgtttcttcttcatcatccaaaggtgggg

SEQ ID NO: 30018 - DNA, 271 bp, Zea Mays
gccgccgctggacgatgggcaggggcacaggcaggtcttgagttatggctagggtttcagttgcactggatggccgccactgtttatgtgactgtagatgggccgaaaaaacaataaagcccaatagtaaaccctagccatcactaaaccctagccgccactggactggacgtccagaaaccctctaatcggacgcttaattgacgatctggacgcttaatcggacgatctagacgaccagaaagtccaatcgagtcgtccagctaattgg

SEQ ID NO: 30019 - DNA, 299 bp, Zea Mays
gagccacccttgcccgaatgtatcttaaagagatagtcagactccatggtattccacggaagatagtgtcagacaggggaacacagttcacttcaaaattttggatgagccttcagcaagctatgggcaccaagctagacttcagcaccgcctatcacccccagtcagatggtcagacagaaagggtcaacaaggtcctcgaggatttattaagagcctgtgtgttgacgtttgacagaaattgggagtccagtttgccttatgcagagttctcgtataacaatagctaccaggccagt

SEQ ID NO: 30020 - DNA, 1067 bp, Zea Mays
ggaaaagggagcctacgatgcttgctttagcttgtgtggactggtgccttgctattagaaaagggaacatgtggtgcttgctctataatgcttgctttaatcttgtgtgggctagtgccctactgtcactaagttgctcgcttgcacggagtcatcaactcatcacgaagatggttggcgattagcaagttgaagcacaatcgaagtcttggtaaggcaagttgtcgtgacttgctttaggtagtgttgcttaggcgacgtcaattggtgatacgccttggtggactcattcatatgccaagtgttaatattatatattacgtacctaggtggtgtccttcctttttggggcctagagcggcaccccttttcccttatgcctcaccaccatcatctttctgacgacaatgatgacacatgttttgaccggagttgttaccaatgacttgttatagacacaacacttagttgttgaagtcgaggtaaccgatcatgataatctagtagttgtcttgatgtagtaatggttgacgtcgccgctcattgttgaaggcacaaaaaacttgagatatattgtagataaagttgtagtgcatagaaataggcctcttgcatcagaggataccattgggggcattttgcatatgttagaggacatcatagtcttgcatatgtcaagaggatgttgagcaatattgtagataagagttgtagttcataggagggacatcttgcttatgttagaggatgccattggtagcctttgacatatctgatttggagtgtcttgcatatgccagaggacattattattgcaaatgtgcactatgttacatatatcaaggacatcatagtcttgcatatgttagaggaagtggtcctcaatggcaagccaggcgtcgaggtgggtggcatgagtctcctggttgcctaagaagtgctcctcgatggtgagccaggcatcttgggctgtgccgccatagatgtgaaccatgtcttgcagcttgacagtgatggcgccaaagagccaagacagtacaatgatgtccatatgtcgccatacaagg

SEQ ID NO: 30021 - DNA, 386 bp, Zea Mays
cgaatatgtgcacaagttcacggaattagcccggtacgcgccagatgacgtcagtaccgaagtcaagaagatggcccgcttcctgaagggactcaggccagaactcaagaccatcctggccagccaagacttcctctgtttctctcacctctccaacaaagccatgcaagtggaaagggcaaaagaggaagaaaaaggccatctcaagaggaaattccaagtcctccgggctcagcagcaagatcggcaccagaaaactcgatcctttggatttccacccaagggacaagcttcagtagaccagctggacccaccccgtcacggttcagtcagcagagtcagagctcctttcatgccccctcagttgcaagcaaccaacccccagc

SEQ ID NO: 30022 - DNA, 309 bp, Zea Mays
gtaaaggagtggtacaatgaggtagaatcatggtgtagaggacaccgcggcggaaaacgattgactcggtggccaccggtgaggtctccggctggactcggggtagggtgccacgtatgcgctatctaactccggcgttatctgttccctaccgcgcacggattcagacggcggcggcacgaatcttcgcgcagagaggtcgccggcggtgagcacacaacgctggcagtctgatccacatccgagcactgtaccatggcgtttcttcagtcagtcgacctgacagagcatcttggagctcgatttact

SEQ ID NO: 30023 - DNA, 427 bp, Zea Mays
gaagcttcaggttgtgaagaggttcaaagtatctgcggtggagtccgtagctaccttatcactagttgcgttgcctgcccaagctcgatgccttgttgtgcctgtgaacctgcgtggtgcctgggatggaagccacatgctcaaacccaagcagcttgtggcacctttggggtcattccttatcgtggaaaaatcgagcttggccagcgcctgtttcttatcttgttgcttgcgggcatagtgtagtgaagctctccactaccccactcgctagtcctgttcaccgtgtgcctctggggttcacatcttcacgttggagttaatcccagccacgccgtctattttgcttagtcccctcacatcgtcgtccctatgtcctgtggccacaccaccggaggtccacctcacctcggccagggctcttcgg

SEQ ID NO: 30024 - DNA, 397 bp, Zea Mays
cggagtcgaggagacttttccgcgatatacgtagtacgatggtttgctctcacgccttctcatcgctccgtggatatcgagatctctctacggtcgccctcctcccagtcctcacactacgacggtcgagtagtcctatactactaaaaccaatgcgtagtatccgtgatccgtctcggcggatcctactacacacctcagcagcagactctaggcgctgtagaccaggaaagagattgcacgtactatatacttgcattattgcatatctacacttgtacagacatccattcgatacgaaaggcaaagaaagagaagctgacaagctgtggatgtggagtcggtgtggacaatcgccgcgcgccgtctcagaagcctccaacgcctccgatccggc

SEQ ID NO: 30025 - DNA, 468 bp, Zea Mays
aagtgccatgctggatatgttagctgaagattcttctgatgcagtccctactgaaacactggcggtagcgcccatcccaaaggatagcgaagctttagatattcagaagtctgacaacgttcgcccgaagcgttctcaccgagccaatcagcctgcttctcctactgacgagaagaaacagaagaagagacgtcttcgtcgagtgtctagttttgatcaagatgctagtccttccgttcctgctgctgaagaagtgccggtgcctgcatttgctgaaactaatcccgatgggtgtagcctgcctgctattaaccccaatgggtgtgacctggatgacgttgaccccaatgggtgtactgtccgtgttgttgatgatggtgaggaggaggaggatgaaatccctctaactcggaagaacagtcgacgctacattgccagtggcgaaagcagtggtgttccttctccagc

SEQ ID NO: 30026 - DNA, 284 bp, Zea Mays
ggctcttagacaaagctctagctattgaacacaagcgtgttcaactaggagaaatgaagaggaaggccattactcaggggcaaggtagcagcagtattcgcccttgctatgttctgccctagggtacactagctcacgctagaggaggaccgcgcctagctcagtacacacctcaggggactccacagacaccacacactcgttaggctgcacccactagcaccctggcgagacccgcaggacagagaacaagccccacatgcttcaggtgtagtcaggttggg

SEQ ID NO: 30027 - DNA, 360 bp, Zea Mays
gactagagcaactttaccttgaagtgataatcaagtggaagaaacacttgagttgctagatcaacttcaaactctagattaagaccaaaggtgaaatggtgtttaaataaagcaaatcctaaactaaggacactttggacctaagttctatatataccaaagttgtagaccatggaaagggaacaactttcatatttggagatttccaagtggtgtagagaaatttggagttaagtgtaaaaattcagattggtttcagtttgggattagctgaaaacagtttcatttatctatttttggaacactgtaactattaaactatgaacttttggtaaggagtggctataataaacttgtaga

SEQ ID NO: 30028 - DNA, 1077 bp, Zea Mays
cagaattcttaatgttttggagacatggctgcttaggcgcttgaagaaatgctctctggctcttgcctccttaatccgctcggtggctaggactagatcaagaattgcctggctcaaagatggtgatgctaatacaaagctctttcactcttggtctcgtcatcggaaaagaaaaaatttcatagccaaaattcaagacggggagcagctagtgaccagtcatagcgataaggcagaggtgcttcggtccttctattcagatctaattggtacagcgcagcaaaggtccagaactgtcaaccttgacaccttaggactgcagcacattgaccttcaggggctcgagcagccaatctcggaggaggaggtgtggaataccatcaaacagcttcctccggacaaagccccggggcctgatgggttcacaggtcgtttctataaggcctgctggtcaatcatcaaaaaagacattatggctgctatcctggctgtctggaacaaggacttctggaacttcagatacctcaacacagccttcatcactcttttacctaagaaagaggatgccatccttgccatggactttcggcctattagcttgatccacagcttcgcaaagttaatcacgaagatcatggcaaacagactgagtggctatatggacaagctgatttctaggaaccaaaatgtgtttatcaagggccgattcatccaagacaacttcatgttagttcagcagactgcaagattgctgcatgctcaaaaacagcctagaattcttctcaagctggacatatccaaggcctttgattcggtatcttggtccttcttacttgaagtattggaaaaggttggattcggccccatttggagagatgtgatcagtgggctgcttatgacctcctctacccaaattatgcttaatggagtgcctggggaatacatccaacacaagaggggcctgcggcagggggactcactatcccctcttcttttcattatcgttatggatgttctcaatggcctaattgttaaagctgctgatgagggtctgctccaacccctttcaactcattc

SEQ ID NO: 30029 - DNA, 413 bp, Zea Mays
gcaatgggctataaaccttgtcttatctgtcttaagaccagcaaattcaaaaccatttgtaatagcgaagtgcctaatagcttttctaaaagtaacaatgtcagggaacaatgcaccctgcctaatgtctggtttaagagggttatgaagcacaactacagcttcagggtcagcatcattcaactctgcctctggaataggtcctccagtagcagctggtgttgtttcattatcaacatgtgaggttgtttcatttacagtagactcagtaggctcattcggctcagtaggttcaatactaggcttgaggataacaccatacaagtactcatcattgacaccaacatactcctcaacattgtcgaacacgtcaggaagattagactcatctccatctgcctctacatcagtag

SEQ ID NO: 30030 - DNA, 295 bp, Zea Mays
atttcatagtatgagaagacttcctgccctgaactgcagctactgaaactgcgagaaataactgctcctccccagaatgagccgtttccggtggggtgaaactgtcatcatcttcacactgatataaatcccagacttcctgcaatgcttgaagctgcacagtcggcggacactgatgatctcgcgaccatttctccgcacaacgctgacacaatccctttgctcgcctgtaagcacgtaatgcagccaacttatcatccatcccacgctgacgaggaacctcatcatgtttgtt

SEQ ID NO: 30031 - DNA, 864 bp, Zea Mays
ggaaagtccagaatcagcttttgattcaatggagtggatggcatccgacattggccacctgggagggagaaagcgacatcaagcggcattttccattcgctccagcttggggacaagctggcgtttcaggaggggaaaatgtcagcgtaccggcggatggagatgcaagcgccagtgcgggagagagatggggaatggagccaggtgtgcgcgttgatgggcctaggagaagccaacgggtgacacagcccaacgtccggctgtcgggccatgaatgagtgaaatgatttaggcccagatggtttagcagctagcagagagaaaatatacactgccgtggagaggaggagaggatcggactggaacttggaactggatccggctgcgtccggcgccgtcgtgtaatccccatacttactgctacctccgtaaacttcgagagaggatctgagcgccggaagcggtgctcgactcattcccaaccacgtgctctaacactccgtgtacctctcgggttgttgcgccctcgccgggataagatcgtgcctcgctaggttataaaattgtgctctgttgtctaaccgtgcggccgaaacaccagcaccagaagctaccgcgggggaaggatctaggttggggaaaccatgtgtcgccgccattacggctgggaaaactgccgccaccgcgggacctcgcctgggttgccgtttgggtcatgtggtctggcctgggggcttcacaacattgcctgggagttgatcatggttgttctggacggaatggtgctccgtggctccatcgattgctcaccggcactgaagcaccaccgcggcgccgcttcatgctgcgggccggcctcaccac

SEQ ID NO: 30032 - DNA, 345 bp, Zea Mays
acccgtatccggtctcgtatccgagagaaatacattagggtaggatacgggatgaccctgtatccggctgtatccgtcccattttcatccctaccgaagggaagccactcgagtgaattcctcgcctggcccgaggctgacccaccataaatggctggccccattaactacgcctagcaccgagccacagtagaaaattagtctacctcccactcatgacctgtgagccccatggcttgcagcgcactcatgacctacgagcctctcagattgtagtgcactcataaactaccaagactaggcatgagtgcacaggccatctatagggcccacaacacgataagc

SEQ ID NO: 30033 - DNA, 873 bp, Zea Mays
ctaaattgtgttagattgattttgaattgctttgggccggcttcagcgttggttactaatccatttgggaggtttgggatttctagtttgaaggaattatgctgggctcttcgtatgagatggttgtggctacataaaattgatccaggcaggccttgggcaaacctcactatgcaagtccctaagaaggcaaggtctttcttctccactgttttggtttcagaagtgggaaatggagcacgcactctgtcctggactgataaatggctcttgggtcagaatgtgagcaatctggctcctaggttatttgccatcattcctaaaaggattgctaataggaggaccgtcctcgaggctctagccaacataaaatggatatctgatataaagggtgccttgtctgttggagctatagtggactacttgaacctttgggagattctatcagacatagtgttgcatcctgtagtggaagataaacatgtattcagcattgccgcagatggcaaatattcggctaagttggcttatgaaggtctttttgttggttcaacatcctttggtcattaccatctggtgtggaaaacctgggcacctccaaagtgtcagtttttcctttggttggctacaaacaagagatgctggactgctgataggcttgctaagagaggtttgtttcacccagctaggtgtctcttatgtgatcaggaagctgaaactcttgaccatatccttgtctcttgtgtgttcacaagagtgttctggtttaaccatctgaaaccttttggttttgaaagattgactcctcagctaggtcttacatccttcatgatttggtgggagcaaatctcagaaatggtcagtggtctatct

SEQ ID NO: 30034 - DNA, 283 bp, Zea Mays
gtaccctgacataccaaagccacccaggaagtcaagaaggaagaaatccaagaacaactcgccgagggcatcctcaaggtcgaggtcgagaagctcatcttcatctaccgctgacagtttcggtgttaaggatatgcaagcggaaatctagattgtataggtcattcgatctgacgtctgagagtaattggttctttttgttgagtggttgattagctgttgagacccttttatctttgcggccggctcagagaaaatcagcagtagaaatgtccggtggatg

SEQ ID NO: 30035 - DNA, 338 bp, Zea Mays
ttcgggtgaacgattaagggtgggagcgggtgctatggctttgggatgacctagcgcagttgcccgggccatcaatttataggaggcttaggcggtggcgcgggatttgatcgggcagtgcgggcggccggagacagagaagaacacagtggctgtaaccgtggcagtcgtcggtgtaacgacgcaaggagaatactcctaagggtgccacgcttgctaacccgcagtaacaagcttcggtcgtggcacaaccgaggtcaccggcgctgatgatcggacacggccgggaggagggatggccgcgtggcagccggagttagtgccctccaccgcggcgg

SEQ ID NO: 30036 - DNA, 484 bp, Zea Mays
aatacaccctaagcctataggtgctaagtagtgaggtgatggtgccgccctgcaacatggtgtcgatgtatcccagaagagatgctagattttgttgtcaaatagcctttccgcgacctagagtgaagtggggttgatggccctccccgtcacctcgtacaacaatgactaaccattgttgtccattgggaagggatgcatcaacaccaagcttgcaaagatccagaagcaaagtgtatcatcggttctcgaacttgatacgatgtgttatttaggtccctgaactcaggaaactagaaaaatagaccctagtgcaaaatcattcagatctggatttgctcaaaccatatggcgatgtgacgtgctacatcaaatccttcccacacgcatcatgtgcctgctgatacacaagtccccaaatttggcatgttatgtcacttaagtctctgaacttgtgtccccaaactttcattagtgagctcta

SEQ ID NO: 30037 - DNA, 279 bp, Zea Mays
gccgtccttccttctctagaggtggcggctgcatgccctgtgattccttccttcttctagccactgattttctggctttccttttctagtgctggcgtggccctagctgctgctcgctctgcagcgtgcctcacgtctctcgcgcacctccgacggttataggggagaccccacatgatagagtagttactccccttatgtatgtctccaaggaacatgtcgaccagatgagctctttgaatggtttggtgtactctcaggtgtggcacttgacttctt

SEQ ID NO: 30038 - DNA, 535 bp, Zea Mays
acaccctcgggggctggattgcagctcgcataacccatcagagccgaatcactaccggcaacaccctcgagggttgggtcatagcttgcattacccacctgagccggatcattaccgacaacaccctcgggggctgggtaaccaccagcgtcacccttgaggactggattttctgcaacagccacctctaaggctgaaggatcctcagtcacctccatgggagtcgggcaatcttgaccaacctcttgacactaaagaccgccatccaaggtctacgacgcgtgagatgctgcccgggatacctctaatcccacatctggaatgtcagaacaaacatccatcatatcaccatcagtcggctctgacagcatatccttaggaatgacatcctcaagggtctgatcaaaatctattatagataaatcttgaaggctaacaagagcagacagggctagagaagtaatatcactatctcctctactacctctgtagagtcggctattcttgcgaattaatggaacttcttcttcttctt

SEQ ID NO: 30039 - DNA, 347 bp, Zea Mays
ctgcatgtcgtcatggagctacatcaccccttggcgtgtgtagacacacatcccagtatggtgtacctgttacgttccttcgggtatgtgggtcactgtagagactccagtgttgaggcccttatggtcgaggctgattggtcccatgagtcagtgagggtatatccatgggcacatgcgggggtgttccgtcgcgtcagccagagccctttgggtattgtgcgtatggttcagacgtggcttggtgatgttacattttattgtggacgtcaaggtctggccacatgggcatgtgttcccttcttgtgaattagcttggcgggtacttggttgttcacccaaccttg

SEQ ID NO: 30040 - DNA, 304 bp, Zea Mays
tggaagtgtgggtttgtctgagcactgtgttgtcgaacgtgtatgttgaaatgcgttgtagtagtgattgcgttaagttgaacagaagtgtctcgagtacacgccgcaacatggttgtattcatgacaaggaggtgtaggttttactcaatgagaagtttggttgttgtggctaggaaattgtttcggcttggttagtgaattggtgacgtgaccaagtagtcaccccccggttatgagtcgggtctagatgtgttatgccttcactgtgatacccatcacatatgctaattggatgtatatga

SEQ ID NO: 30041 - DNA, 297 bp, Zea Mays
gttctcccctccttcctccagggttagatccagggaagacaactagatcgctcccacttcttcctcttgcctcctctgtgcttggatctatgtttccccacccccaatgctgatccttctcgcctcgatgtccaagagctccgatatgtcgtccaccgagccccggtgctcagatcacaacacgtgcgtgtcctcactctctctattcgcttacgcgtccgaatttgatgagctcggccggggtggctggctgtggtgggggcgcagatgccaaaggatttggcgggcgtagcaggg

SEQ ID NO: 30042 - DNA, 1083 bp, Zea Mays
cggccaatgagttagtctaagataattatattttatgtattcatcgttggtgaaggttagagtgggttgaaaatgtaaattatgcgacatgttattggtgtttgaagaagagatgtgcaaataatcagtttggtgtttcactcgtctagtcgataaatgttgttataaataattgcgctaaaacttggtcataagagtgcactgggcacgtggtgtaggttggatgtgataagtagattggaagtgtgggtttgttgagcactgtattgttgaaagggtatatcgaagtgcatggtagtggtaattgcatcaagttaatcagtagtgtctcgagtgcacgccaccacatggttgtatgcgagacagggcaatataagatgtgctcgccacgatagttcggttagaataggtagaaattgttttggcttaagtagaggggtgatggcatgccaaggtagccgttgcttcctctataattataagtcgagtcaaaatgcggggtactagtggtacgctagacgggtggtgtccaaataaattaactggtcgatatggtagtcgtcgtgcgtgatttatggttagtgagtagttgaattacgagttatgcgagaatcatgttagaaactaatgtgcggcgtgtaactgtgctcgggtggtaaaccctaggtcggtaggtattattggtgtcgttggcaaatggggatgattcttgttgtgcgataaaattggaaaggcaaagaacaggggtagtgtgtcgatcaagttaaccgataggttccgtgaacacgcttgtgatgcttttatatgcatgataagatcgatgccttgtcgtcgtagtcttagaaaatttttctgaaacgcgctagcgctctactgatgggttgaatgaacttgggatgtattacactagttgtatgtctcgcaggttatgcaaaaatggcgaaaggtggtgtaggttgataattgggaaatagtcacgtcattagccaactcatgttaagtaggagtcgatggcgtaagtgattgtgatataaatagatgtggtgtctcggactgcgataataataggcaagccgacgtgta

SEQ ID NO: 30043 - DNA, 383 bp, Zea Mays
ctggccacggtgaccgaggacaaggcggcaagatcgtcgtgttcccggcgatgggtggcggtctagttcaattgggcgggtctaagagctttaggagggcctagggatgctagaacaagcaacagagggacttggactgacctgagttgagctggccgcggcgagctgagttttgcggtggcggagagtcgacttgggggaaatgaacaattcgcggttgctggtggataattggaggcaagcgtgggtgcgttggcttcgtggtaacttggcgcaacagccccgaccatcaatttataggagggtaaagcggtggccagtgaatttggggaggacgcgcggcggccggaaatgaagaagaaggcgggcgcggtgaattcgtg

SEQ ID NO: 30044 - DNA, 402 bp, Zea Mays
cgtttcggtaatcctggatgtggaagcaaggtactatttcgtaacaccgcatcaagtatcagcacacatggagcagcctggctgcctcaagcagcaaattgagcgaagacagcagtactacatgtgaaatgcttctgacgcttggtgttacttctgcatgaacagtgctataaaatgtctacacctgctaccgaaaaaattaaggatgagtgctcatgacttcatgagacatatatcatggacaacactattactataatggggaagttcatctgctaagtttagccagcaattctattgccaaccacacaaattatagtaagcaagagaacatagataatcggtggaatggtcgactactgtgtatcacacatataacacagtaaacacacactgcatatt

SEQ ID NO: 30045 - DNA, 395 bp, Zea Mays
cgcaacgcggtgaaccaatcggtggccggtgagggtgaggaggcggcatcgtatttgcggaatcgctcgccggcgccgcgattcggcacatcaacgtgaactagtcttcttgcgccgccgttctaggtatgagtaacccccattgcatcttgttcattcccgcaccgtagatcgtcatcagatggggggattggggtcgggatctcgtgtctccggtgatggtccgccgtctgtgtgggcgccgccgtgcccaggcatgcgggggaggtgatggagcctggggccatggatctccaatccgacggtcgtaatagcgtaccaactcgtcagtagatctggccgttggatctcgatcgtatgggtggattcagggtgcgtgtgtcgattcagcagag

SEQ ID NO: 30046 - DNA, 481 bp, Zea Mays
cattatttggtcacttgatcttttcagtttgcagaaaaaaggttgttgatccaagaacaaggataaataaagccggccgaccatgcacgcatataaaatttctctgccgccgccgccgccgccgatggttacctggaacatggaatccagtgcaggggaagcagatcgacaagtgtaatcggattctgccaattgtctatacagtttcttaggtagaaccgaatggtccggtcctcaagcgaatttttaatcctgttgatttatgcttttttgcgggggggaaagtctggaattcgtcagagctgagttaacgaatccttctcaggccatatctgcgcgtgatagattgtgcgcgcgcgaatcgccatggcagcccaccagtccaccaccattctctgataggatcttctgagctcctgatacactgttaacgaatccttatcattgccaatgaacagacttttaatagcgcacttctacg

SEQ ID NO: 30047 - DNA, 870 bp, Zea Mays
ggcggtgagggatcacagggcggtactgagcgcactggcccgggcgctagctacgacggagtcggcgtacctggacatgaccagtcagtcaatgggatcccacccagagctggcagtgaccggagcttgcctgctcgtggtcctgttgagggatgacgacgtgtatgtaatgaaccttggggatagccgtgccattgtggcgcagcgacgggacgacgaagattgcttgattgggagcattccggtggaggacattggtgtgggcttggagatcgagacaaggatccctgggtattcggcaattgggctcgaggcattgcagctgtcgactgatcatagcacgagcgttgaagaggtaacctttttgcagacatagctgaattgatgcatagtgctaaattgctaatgcatttgtgcatctactgagtttactgaaaagatgagcttgcatcatataaaaaaaatattcaaacacattttttgttatcctggttgaacatgccctctggtagcttctgtgaatacatgtgcagtatgtggactggcctgttcaacagcatggttttacaatcggcagaccatttttcttttggagttatgaatttatatatcgtgggatagtatgagtggatgtgaagcatcataagtgttttaatctatgaattctttctgcatatgaactcatgttcttttgtgttgatgtgcaggaagtgcagaggatcagacgcgaacatccagatgatgatcagtgtgttgttaatgatagagtgaaaggtcgtctaacagttacccgtgcatttggtgctgggtatctcaaacaggtaaagagactgtaggttgattgttatgaaaggtccatgtaggggaaac

SEQ ID NO: 30048 - DNA, 390 bp, Zea Mays
gttgggttcggttactatgcttatgagtcactgacacttcacaaaaagaccctccggtttctatctattcacgatttgaagtccacgacgccgttcatgcgtggccgtgctccggcgagcgccagaaccggccaaaaggggcaacggctagggtttttgagcagcagacaccaaattcaactcctaaggactctttcccccaatcaatttcatatttggtgatctgccaacctctgcccgcgaggacagtgcacgacgcggataggtgttcgtgttccaattaattcatggcagttaagttcaattggatggtttggagagcatcaaggacacatgagaatgttagaacaagcaacagagcaacatgaactgacctaatttgggctggcc

SEQ ID NO: 30049 - DNA, 497 bp, Zea Mays
aactgttctttcctgagaggaaatcagacatccgagtcgctgtatggttggtggaggaatctaagagggctctgtaataggcaatctcggaaaaaattcgacggtcttctgatttatttttggtggagcttatggttagaaagaaacaacaggatcttcaggaatcaacagaagaatccagatcaggtcgcttctttagtgaaagaactagttggtgcccttttgggttagttggagcctgttgggctcagtgttgtgtttaacctcagtaggcggttgagtttttgcccttctgctctcttttttctccctctttgtcttcgtgtgagtgtcttgtaaatgtttctcctctctaatatattggagcggcaaatcttttgcccctcccattcaaaaaaaaaaaagtttccgtgcaagtgctccccgtctgactttgcaatcacatttatttcaatcagattaaatacaaaggaactgcgctcctcggtcgccatgag

SEQ ID NO: 30050 - DNA, 297 bp, Zea Mays
ggaaatatatcctagattcctcaacaatatccaccttcattgctgccggttgccccacatactgccttattctttcccctacattgccaaagctagacatctaagataatgttacagaatcaatactaatagatgtgcttacctttgtgcccttgtttcaatcctggtatcgcacaaccatccatcccctggcttcctccaaggcttgctggatgtgttagctgcgtgttggaggcgaacgctgaggtaacggtcgttgcccacctcccgcaccatctgctcctcgtgcacctggtc

SEQ ID NO: 30051 - DNA, 347 bp, Zea Mays
ctaggatgtatggagagtagtacgaagcagtatgaagaaagtgcttgagctgattctgccttacttcagcttcagtatttccttctgcttttgtattgtgacttggcaagtccttgttgtgtgtcccttttcctctccacagaacaagcgaaatagtctttttggctaggagttgtatcttcctccaaagcttcgtcctcctttgcctcttggggctggtggtatgaaggaattttggtgtgtccctattgattgggagtggctctgctgctcttgattatggttgttcttgtcttcactttggcctaggttgtggtttgttctaacatgtcttggatgaaatcttc

SEQ ID NO: 30052 - DNA, 485 bp, Zea Mays
catcgggcgtagaaggtggagttgacgtcgaggaagagcgatacaagagctcggatgatgggcacaacaacagcttgagcatggaggttgagcagcgtcgagagttggggcaggagcgtcgtcatctgcggcatcgttggagaagacgtcgtccgccagagaggagacggtagtcgttgcttgtccgtcggagacgagacggcagtcgctgctcgtcgatggaattaggatccatatgaacaagcacaaattgataataatggagtaaatcttagaagtattgagatgcacggtacccaaatccatgcatcaagaaatgagcaaaaataacttcattggtgctcgacataggatatgtctactaaccggtgatttttcactggtttatcttcttttcttgaagcaatcctgccacaatcgaagctctatggtccttggattcaatggtggaggcctcgtactcatgcggatgagacgtggtgttg

SEQ ID NO: 30053 - DNA, 474 bp, Zea Mays
cgctcattgaagccacggaggaggttaaggacatgtgtgcgatcggagacaggctccccgaggtcacaaagggaggttgccagcctttcatctggcgacaatactcgatgatggagaggtcctcctagacaaaggtctgaaaggcgacgttgaggtgaagagcatgagccccacaattgccaaagaattgctcctcaatggcaaccaaggtctgcgggcagtgccgccacactcgcgaacgacatcctgcagctcaaaagtgaatgtccaatggatctagaagaggacccccccccccattatgcatccgtcgccaggaggggatagtgagggacgttatgtcaatgaggacatggtcttccagggcatagtgttgcaggatgaggaggataaggtcgcacagcggacgtatgactggcgagggtatcggcaacagtgcgttcatgcttccaggcgagagcaacgacgcgttcg

SEQ ID NO: 30054 - DNA, 297 bp, Zea Mays
ctgaacccaaaacccttccgatacgctaagctacgtgaggggctcaactcatgtagttggctattcggacgtgaaggctacaaacaccaaacgacgtggtgcttgtatgatagactcaaacaccaaccgaaatggtttttgacttataggtagcaaaacccccgtcacctgtgtttagaacccacctaaagctgttcatcgcggtctagaggccattttggagaagggtttacctggatccgctcttaacgtagttgtcacaccgcgtacatggcagtaggaggaattaaatatagc

SEQ ID NO: 30055 - DNA, 372 bp, Zea Mays
tcgggcccaggtggtgcggtctcgtgttcaatttgttatccacttcttccacacaagtgctattgaacagaactccgggggattatattcgtcatcggagggggctgcgccaaggcgaccccttatctcctatgcttttcataatcgtgatggatgtgcttagtagcttattcaagcatgctgaggaaagaggattgctgcatgacctggccatcagaaacgtgaaatctagactctcgatttacgcagatgttttggttctttttgtcaagcctgcagttgacgatcttatttgtgtcaaaatgatcctggattgctttggagaggcctcgggcttagttgtgaatttgcgaaaaagttgtgctatccctc

SEQ ID NO: 30056 - DNA, 528 bp, Zea Mays
gttggactgaccggagtacggctggccgcggtgaggttgggcttcgggtggcggagaacagatttggggcgaacgtgaaattggagagctgtggggagtaatcggagctacgcgtgggttctctggacgtacaattacctagcggcactggccgaggctccaatttataggcagctttgacagtggccgggaattttaacggtgatgtatggcggtcggagataaggaagaggtctagtgtcgtggttacgtgtccccagccgtggcgagctcatcgacgatgatgggacgacagtagggaatcacggcggtgccgtggaaaggctcggacacgcggcgagcacagagatggcacgacgacggtgagcggccttatctacggcggtgagcaaaagggggaaagtattacggctgaccggggtggcttccagctcgacggtgacgacgatctttttaccacgcagcgttatccggttgccagcgaacgttaatcttaatgcggcggcgcgaatccttgcgcgggggagg

SEQ ID NO: 30057 - DNA, 570 bp, Zea Mays
ataccaccagaaagaaacgtagggctctccttgaattggcgtggctcccgagtggccttgcccttgtcaccagatttcttacgcctgaactggatctcattgaagcgttcaatctcaggttggaacaccgtgatgtcagactcattttcccatgtacattcctcatatgtaagttcattccatttaacatagtattcccgatcgccaactaagttttttctgtccagtaaacaatgtataaaataaaatctcaatatgccagacctctgctaaatggaaattaatggatagatgggtgagaccatcatgacatggaaacttagcatatgaagctgaagtagaaagcatgatttatcatgagtaattgtgtactagactccattctagaccatggaataaaatcctgtcacatgagtttcgtatgacctgtgttgcatggatacgtggctgagggctcgtatcgcgtattggatacgtatccgatacggatatactgccaatatgtatcggtggagtatccaaatttttattgttttcgcaaactttgagtacgtggatgatacatatctg

SEQ ID NO: 30058 - DNA, 518 bp, Zea Mays
acccctctgtcggcgcagcggctgtttgcagaactgaatctcacccattctggtgagcctacaagctatgaagaagccaaggatgattcagattggcaagcagcaatggaggagctgagatcagtagagcggaatgggacttgggaacttgtttctccccgtcccggtcaccgcccaatctcactaaaatgggtgtttaagctgaagaaggatgagcatggagctgtgattaggcacaaggcaagacttgtggcccgtggttttgttcaacaggagggaattgattatgaagatgtttttgcaccagttgcaaggatggaatcagtacgtgttttgcttgctttagcagcacaagaaggatgggcagtacatcacatggatgtgaagtctgcgttcttgaatggagaactcaaggaggaggtttatgttactcagccaccaggttttgcagtatcaggagaggagaagaaagtgtacaggctacacaaggctttgtatggcttaagacaggcccctcg

SEQ ID NO: 30059 - DNA, 367 bp, Zea Mays
gcacgggatacgttcctggaagagataccaacattgccaatataaaggcacgtgtatcagatcattagagatcaatagtcgccatatcaatgtctcggttcgtctttatcctacgtcttaccgtagcaccgagcgcgaggacaatgactccgcgcgtccaggagctgcttggcgacgagcatcatccacgaaatatggttgacaacatggctctgatcattatagaccagacgtactctgccttgctcgagatctacgggtccgagggatcgccttccggcgacggggacatccagatccaggtcagccagcccgtggaccctgccgaccctgagtcgctgatgctcagcgtcaacgccagccccac

SEQ ID NO: 30060 - DNA, 386 bp, Zea Mays
cttttatctgatttttattgtttttatagtactcgtatcacgtggtttgtctgtaacaataatcacagtttggacttatttaaaatggtacttacaagtatgattcttctttaaaatagtattccagccttatttcctctatttatattttcttttcttattcactaccacttaaaaggatatttttacctttgtcttttctcacaatacataaacgaaagaagtcttgagggaactctcactgccgtcaccatccgacatcttcctcgtgttgccgctagccgtcctccggtcgtatgcctatgcacttcaactatctacaatcgtcttatgaatgaatttaattattttgcttcatatacaggaacaagtttattttgctttat

SEQ ID NO: 30061 - DNA, 373 bp, Zea Mays
aggaattacagtggttacacaggtcattttctagaagcaaaacaggggtagggtggatacattgagaagaggttacaactaggctatacactaaagatgttacaccaggcctccatttggtggcgtttatgtgggcggaggctttttgtccacaaacaggagtctaccttgcatgcttgaatcacttgacgcaggggtgagatcgcctctgaaaaccttggcatttcgacatttccaaaggtgccaacaacacaggggatgaagtcgttgaagccttgatcgtgaagggtgggcgggcaggtaagctcatggaggtgagagtagtgcatctctggtgaaatgacgatgccagcagaagtccagaaagcgttgg

SEQ ID NO: 30062 - DNA, 592 bp, Zea Mays
ttgggggccatcgcaatctctcaagcgaagtgggcgggctcaagagttcaagaaacagagaagcggtggaggaaaacagcaagaattagggttcagaactcaaggggatacgtcagcataaatatgagttggctcgatgagtcgggtgcaagggtgccagatcataactcaaaaaagcagaaatcacaagcatcactcgggcattacctctaaaatgccagcgagccgtcatttgcgcaaacgaaaacatgcaacagtggaccagcaaagaactgcattttcttcatagagggagaacaacacaaacttcagaccaactcattatgagtgggcctccttcaccccttggtcattacattacactactcaactacttacactaccctatactaatactaccttaatttactactacatactactactgctgctgctatctatactaatatctaaaccaacagcattatgctactggccttgtcgtcgccgtcgtcgcccttgccgccgtcaccgtcgccttgccaccatcaccgtcaccgtcgcccttgccgtcactaccatcgccttcgccgtcaccgtctttgcctttggc

SEQ ID NO: 30063 - DNA, 355 bp, Zea Mays
cgggttaattcgagataagtgcagggtctatttagcaaagtctatcggcgaaaggggtatcggacgggctgagccgtccgatcatgatccgaccgcacagatttaattagtcgcgcccgaaccggtacacaagcatgtccatcagatcaagatctaagggtccaaaactaatagaagccaaactgtccacactcctccgatctagatcggacggtccaaacactactccctcttccagccaacacacgagcaaatcttgaccctccatcgaggatcccacggtcacgcgataagctcccccaacggcggcaagcccggcggcgccgcccgagtcttacggcgcagaccatggccg

SEQ ID NO: 30064 - DNA, 395 bp, Zea Mays
ttgatttgggcgttccctttgaggctcccattagttggagccatgacatcatgtccggcgaaaagatctagatccacaatcatctggcacgtgtgtttatccttccagagaagggtgtgttgggtgtcgacgctattggtgcctaggttgctcctctcaagactcaggctacgcccctgagtcagatggtccccaaccttttcccctaggtactgagggtctcccgagagatgtagatgttgctcggtggcttgggcaggccttagagatttgaaggggcacaaatggggtgacatagtcatctatgtgccccatccccgggtgtcctccaatgcaccctgactgaactaggcttcattgagttcgtaagaattccgttctaacaccttcatttc

SEQ ID NO: 30065 - DNA, 512 bp, Zea Mays
agcgtcgccaccgttgtggcctagctagagcattgctcgacactgtcgtgccctgagcccgtgcccctgatcaccctcgtgctcccgtgcccctgaagtttgcgcccgagttttgcactcctgaaatccaaaactgcatgagtcgcggtggaagatgaagatagagttcgccttagagtgaggaagcagctaccgacgtctccaccaggcattgatgaggcttcaagcaagcggtggcagtgagcaccggcaagcaaccagcaattgacagcaaccttcttccccttctccatttccacaaccctaggtatggatctgatcaacaactacatagattcgcactttggtactcaatatcgtcgaccaatccccatggatctggaaaatagaatctggattaggtaacactgctatagtaattttgattacaaagttggcctataacaatatgaatcgtgctgaatgattattcacagagacatgaaagttttgtgattctagcctatgacaac

SEQ ID NO: 30066 - DNA, 635 bp, Zea Mays
ggagagatgctcaatattgcccaatgcactgacagggagaaggtaatatatgcatcgggtcgtcttactggcccgctgctaattggtgggattcttaccgtgctgcacatggcgctgttgacaccatcacctgggcaaaattctcagccaatttcagaaactatcatattcctgctgggttgatgaagattaaggagttcctttcatttaggcagggaagcatgtctgtgagtgagtactgggataaattcatccagttgtccagatattctcctgaggaggttgctgaagatgaaaagaagcatgagttgttcttggaggaacacattgggccactccaatactagctgatgtctcattcatttccatctttctagagacttttggacaagaccatagctcttgcacacaagcgtgttcagctaggtgagatgaagaggactataactcagggatagggtgacaacaatagtcgtccttgttacactcagcctcagggtacactatctcgttcaggaggagagcaacagtcataccagtaccctgttcagcaaacaccgcaggccacacctcagacaccacgccctcatcaagatgccctagctagcacccaagcgagacctataggctagaac

SEQ ID NO: 30067 - DNA, 312 bp, Zea Mays
gtatggtggatttgcccagtaaccagattcagttttggtataatcagaaggagcacatttaagtcatccccttaagatcacggcaaaaggagaacaagcatgacccaaaagagaagaagaaaaaaattgtgctaggaaatagacaaggcgattccgattctataataatgttgccaccaagaaagcgatgaatataattacatcaatttggttaatcaaaatggagtaaatcattggtttggttctttgacaatatggatggatttgctcagaaacaatattcggttttggtataatcagatgggatgcaat

SEQ ID NO: 30068 - DNA, 404 bp, Zea Mays
gagcagcagacgccgatgaggacatttcggccggtcgtgaagcaagtggttacagtggccagctgacaaatttatctgtagtcacgatcttttcacttgcccgataatatccactttgatctgtgcatgaatcttcacggtgagctcgaatcgcggtgcccgagcactggcagcgaggtacactgcaccaagaatcttcttcagtgtactgtaccatggcaatgttcattcagtgcgcctgacagagtcatttctcttcaactttcattcaacaacctaccaagccgaccatagaaaagttgttgtccatcatgtgagccttaattttgttatagggttcttgttcatacctccactcaatcaagcacaattcagctctcaacttgatctaatgtcactgttag

SEQ ID NO: 30069 - DNA, 463 bp, Zea Mays
caaacttcttcctctgagaaaggcacatccaactcatttagattgaaagaaggcatcccaagggcataaagattaagagagttttctctccccaaagcagtcccgagcaagccatcacagaaatggaacaaaccatcagccttatcctcatgtgatgtcaaaataagcccttcacttgtagataatgaaccaataaaattcttcttctttcttaatctagcctgagcatggaacagggaagtatgagcgtccctttctttcaaccaattaattctggaccgaagacgagctatagatcttgacaaggaggagagcaccaagatgtgcttcttaagggtacgccttaaccaatcctcacttggagatagagtcctactgtcatgagccatctccagcctatgaaggagctcctaagccatttcaagttgaagttttaaatcccccactttattatcactccaac

SEQ ID NO: 30070 - DNA, 353 bp, Zea Mays
cgacgtggtaatgtctccaagcacgtggcatcctcgcggcgagcggcggacgccaacgatgacatcccggccggtggcgaagcaagtggttatggtggccagctcacaagtttatccgtagtcatgatcttttcacttccccggtaatatccgcgttgatccatgcacgaatcttcacggcgagctcgaatcgcagcgctcgatcaccggcgatgaggtacactgcacctaggatcttcttcagtgcactataccatggcgatgttcattcagcgcgcctgatagagcgatttgagagtcatttatcttcgaatttcattcaacaaactaccaagccgactacagaaaagttg

SEQ ID NO: 30071 - DNA, 542 bp, Zea Mays
gtgtcatttcattaaggcagaaaaaaaataaaaggagaggagcactcgaacactttacacagcagctgcaaacgacctaaacgaccacccccagcctaaggagcctcccttaggaggagcttcttaaggttagaagccccagccaagcaccacatgtgggattcaacagccgattgagcaaaaatcgcttgtggctgaggttgaactccatcgaacatgcacgcatttctgtgcttccaaagctcccaagagactaaaatgaccaagaaattcttttttaaaatctgtggatagcaacagtggccttacaccaccaggtccaaaacgggatagaggaattggggcgtggaaccatatcaagattaagtttcctcaaaatcccatcccaaacttctctgggcagcacacaggagaaaaggatgtgatgtatggtttcctctgactgatcacaaaaagggatgctgcttgatggggtaaccctcgcttagccagtcgatccgaggtccagcactatgcttggccggttattaagaacaatttta

SEQ ID NO: 30072 - DNA, 467 bp, Zea Mays
tgatctgaactcctagtcccagggtaccgattttccatatctctcatcctaccaagatgttctccagtcaggtgatggtggatccgacctaggtttgcctcctcttggtcgtggtagatcagcgcgcacactatttcaatccaccagatccatttcagctcctatttctcatgcccgaggtgcaattcgaggttaccgtggagttagggggagaggcactagtagtcatggtggaggtcgatctgctatttatgcacctattgaccctgtcctcattgaagattttggagatgaaccaaccaatgaaatggattctcgagctccagtggtaagaaaaattttcatgtcttcattacaatgttttactgtgtttgctataatgaattgtatgtgcctcaagtggtgattaaacaagatctgtatgtaccatcatctattgtccagtgcatcaatgaattcagttggcc

SEQ ID NO: 30073 - DNA, 417 bp, Zea Mays
cggccaatgatcaccataatctaaaatgtatttcgaaagctctcatgctaagttgctagcacagtagcactacaagcagtaggtaaaggaactggcatgctagacataacatgagcataaaaggattcattacaccccactgcatgaggttgtgataccaatatatgattcatagcataaattgatattttatttccatctactttcacagatatccttgacaaatccgtcaagttgcattaggtactctgcgattaaggcaaggtcagtagaaaggagaattggacagtacaaaaatcattaatgatacaattctataaagatgtaggataagcctgagggtttgataagtcaataccgctaaaagtaataacagcatgagaacactttgcagacaaagtaaattattcaaagttt

SEQ ID NO: 30074 - DNA, 349 bp, Zea Mays
tcatcaaatgcagatgggaacccagggtcgggacctagtcttacaagagtaccagaccaaattagggctccgtaacactcccccagctgggaaggacccttcatggtaatgggagtaccccgacccaagggcaactgactagctacgaccgaaggaatgcctcccccagtgtcgaaatatctctgtaagttttatctatagagcaggtctgaggggtcgaagtttttcccttttgtaactaggtagtgcatacgggtacgccaacccggtggggtctgcccccataaacccggcctgttggcccgcacccatgcatgattagctataaaggaaaactaccctctcaaga

SEQ ID NO: 30075 - DNA, 365 bp, Zea Mays
ctgacctgcaaggaaggggggcgaccgtaggagacacaaggtcgagatcgaggaacacatagagctcggtgagagaggcagtggaagaagtggaaaagggaaaatccaactcctcaaaaatgacgtgacgagaaatgaggactctgtgtgaggtgaggtcgagacaccggtaccccttatggtcgggggagcatctgaggaagacacaacgagtggagcggggcgctaatttatgaggagcagtggaggcgagattagggtagcaagcgcacccgaagacacgaagatgatcataggaggggtggatgccgaaaagagcgaagtaaggagtggggtgggcaaccgtctttgtgggcagacgattg

SEQ ID NO: 30076 - DNA, 298 bp, Zea Mays
atgggcaaggattcagtcattacctttagaatttatgctatttcagcagcaggaggcattgaaggagcttcttctcttgcctcaggtaccttcggctcagctacttcaggcttcctctttttggagactgccgccttcggctcaggagctgattttgccttcttcgaaatcttctcatcctcctttaccagtctggcagcttgtctgtttaaaatactaacaatccttttccttttcaaaccttcgacacccttgtcaaatctttcatagtccggatattcaaaatttagcgcgtcca

SEQ ID NO: 30077 - DNA, 319 bp, Zea Mays
aagactgagactcaaacttgtctagattaccctattttatcaaaaagcatctgcagccaaataccctgaaatgactgaccttgggtggccgtccaaatcgcagctcataagaagttttgttcagaaaagcccgaagaaagatgcgattggacacatggcaagcagtgttgatcgcttcggcctaaaaacgcctacgagtcctatgctcatcaagcatcgtcctggccatctcaacaagggtccgatttttgcgttcaacaataccattctattggggcacatatggagaggaaaactgatgctcgagtcccaaagaaac

SEQ ID NO: 30078 - DNA, 485 bp, Zea Mays
taaatctttcgggaacacatccggaaattctgacacaaccttgatagtctcgagtggatctgcctccttgctatcaatagccatctagtgacaacctcctttccctggctcgggcgaggctagctcggtcaccacttcttctcctagcggtgacaccaacttaattgtcctcttatcacatctgataactgcttgatacttatctagccaatttatccctaggataacatctgttccctgagtatccattactatgaggttagcggggaactctatcccccttattttcacacttacattcaagcaaacactatcagctcgaactttaccaccggctgaatcgatttgaattggtgtcgacatggtagttattggaatattatgcgcttttacccatgatgcagtaatgaatgaatgtgttgctccagtatcaaataacacttttgcaatatgggattcgactggaaacatacctactatcttgc

SEQ ID NO: 30079 - DNA, 496 bp, Zea Mays
tgagctgtcatgcatgcatactataaatcagaacagaactattaatttgctgctgctacagatgccttgggtcacggcttcatagcatagaacctgacaatcagaaacacggcagggccggaaggcaggcaggccgtggcgctaaggtcaaattcgaacaagtcggtcatctaccggtgcagcattgaaggtcatgaggacaccttgtacgtggagaatgggatccaattctacctgcagacctcgatctggggcaccgtggactttgtgtttggcaatgcccaagccatgttctagagctgcccgctgctggtgcaccgcccaccgaaaggcaagcacaatgtgctgatggcccagggctacaacaacgcaagccgcgagtccagcttctcgttcaacatgtgcaccgtggaagcggcgccgggcgtggacctcgacggcatggagacctacctcggccgcccctacaggaacttctcccacgtcgccttcatca

SEQ ID NO: 30080 - DNA, 417 bp, Zea Mays
ccgagttactctggaccacgtcgacgtctttagaggtaacagccgagtggtgcttgatgacgtcagtgttctagagataatagccgagttactctgggccatgtcgacgtctttagaggtaacaaccgagtggtgcttgatgacgtcagtgttttagagataacaaccgagttatgtcggaaatcttgtttttcccgagtgatgacttagcacttcttagaaacggtgtccaacccaggaaaaccccatttatatcacgtcgccgcacgcctctgagttctgagccctaacttcacattttggcctcaaaccattcctctgtttccctctgatttcgcttctattcaatccgccggtgaaattgcaatggcgctcaagcggaagaaccagaattctgctgcggtagtgattcctccc

SEQ ID NO: 30081 - DNA, 684 bp, Zea Mays
caaagatagaggctcaacgcccacaagtcttgctagttgagaaaagtgtgccattgcatgcacaacagcttcttgcaaaagatatctctttagtattgaacgtcaagagatcacttctggaaagaatttctcgctgcacaggtgctcaaattgcatcttctgttgaaaatatcacttctacaggagttggacaatgccaaacattctggattgagagagttacagaatgttcatcaccgaaggtctcaaacaaaaacacagtcaagacactgatgttttttgatggttgtccaagacgcttggggtgcacggtaataatcaaattatttaattgcatttcaaatatagcttttattcagtgttactgttaatttcctccaaatagtttaaattcttctgtcatttgtcttttctgtccattatttttacacctctaaatgcattgcaatgaattttctttggtggatagcaaatgctttgtttcaatagtgtcttaatcctttactatatttggtacttactattttgggtctctttgtttatatcatgatcataccatatccgaaaaatggcatgcatttacgccttcaacaatatgattttatttggtttatggaaagttaatgcctttatattgtgattatgtcacataggataaaagtgacgcctttgtttatactgtga

SEQ ID NO: 30082 - DNA, 377 bp, Zea Mays
gctacctaaaatcaattttccacaatttgatggtactgaaccgcagttgtggaagaggcagtgtgagagttattttgagatgtatgaaactgaacctgcgatgtgggtcaaagtggcttcgatgtactttggtggccgcgcgtcgtgctggttgcagtcgatagaaaagcagctgcgccagttcgcttgggaggaattttgtggattagttcatgatcggttcggacgagaacaacatgagtccttgatttgtcggccttttcatatcaggtagaatggccctgtctctgaatatgtggaacgattcacatctctggtggacgagttagctgcttatgagtcccagaccgatccactttattatgcgatgcgttttg

SEQ ID NO: 30083 - DNA, 304 bp, Zea Mays
aagagtggatcgggattccaaattcatgttctcttaatccataaattctaaacaaacaccaggctcgacatttcgcgaaataaatacgcgagatcgatccggcatcgaaattgtgatcccttcggaagcgaagtcacacatcgttcacgtgggcgagaggctgtgcgctgtctagacaccgcttaacaccagccacgcgccacgatgccaggccacagagagacacgggcaacataagcgtgaaaggatttcaaatgaagtttaagaaaccagatccgatttccagaattaaagtttgggcaag

SEQ ID NO: 30084 - DNA, 596 bp, Zea Mays
tatccctcgcatagggcagcaaaagcggccatatgttaaaccctattgaaatttaggtgatacaactggatcttgtaatggtgcagcatccccaccaagaaagggtgaagagaaattatgaagacacactcgtgtaagtgcacgaacaacactacaaagccctccgactgatctgtaacttcttcgaagccggggagcaggtagtcgccttcgcggaggagcccgcgtgagacaagagtggccaagcgatttttatcggccagagagcggctccagaatcccatggtgggcacatcgagtggcggtggtgcgaggcgacggcaacgagggggcgaacaaagccataagaaagcaagatgagggagaagaccgaacaacaccaaacctaggacaatcgacccaccaggccacaatcattcgaccgaggacatacaccgataagcagcgagagatgataactgacgtatcgctagtttcgatgtacaaggttgggacaggcatgataggctccttggaatcacgcggcccacaggcccgaccatcaggttgggagacagccacaccagaagtggcgtcgaggcccagccattatcgag

SEQ ID NO: 30085 - DNA, 539 bp, Zea Mays
gtcgctgatgtgcgggccatgttgtcatccgcactgactgttggggcctagttgacagctccatcctttccccccaactgacactacacatggcacgccggctcgccacgagatccacggcatggccgccgcattccgcgggataactcccaactccaaggtataaaggcctcaggatcgagccgcttggaccatcgcgctccacctcatgtttgcattgccgggcagggaaagtcgagaggtgaatccaccgtggccactcctcaccggcgctgcgaattgaagcataaggacaggctagtgacctccatggggttcccttgagtgaagacgagaccgccccggtacgaattggtgctcgggtcgggcggaattcctcaccggagccctgttcgtgccgcagtcccgccccgcaccgtgggcaggctcgctacttcttcaatcgcgggtgagaacctcctttctgtgttctctagcgtctgtaccacgttttgcacctgttctctcctaggatagggcatccgaccactgggatatcc

SEQ ID NO: 30086 - DNA, 517 bp, Zea Mays
gatttttcccttgcacttgaagtctatacttttacgacttatttgcatttcactccattggttttcactcagtttggttgcaccattaaggtcgtcaagtgtgacaacaatcgagagtttgatgactcctctcgggctttctttctctcccatagcgagcggctacggatgtcttgcccgtacacctctccagaacggcaaggctaaacatatgattcacactactaataacatcatgtgctccatctgtttcagttgtcagttcttgctcgctactgggccgagccttcacactgccacctacttgctcaatcgcttccctaccaaggcgattagtgctcccacaccccactttgccctcttcagcaccactccattctgcaaccatctacgcatctttggttgtgcgtgctatcccaatctatctaccacaactccccataagcctgcccctcgctgctcctgttgtgtcttccttgggtactcccttgatcataaggggtatcagtgtcttgac

SEQ ID NO: 30087 - DNA, 412 bp, Zea Mays
ccgcctctttccctcctattcactttatattcccgcgcagcagcttcgtgctcatcttttccccgcgcgtcgaaccccgcttctacatgccttgtttccgcctcagcgcgcatagcgcaaatcatgcaccgcctacacgcgcccaccgcgtaaaccaccgcccaggtcctaagcgcagcgctaacatgccgcttagcgtctaattgtgattaggcggacgcttaattgcgcttttttgaacattgcttttatttgaacccaccaaaccaatcttggaaactgcattgcagtgttcacgacgcagctcattaatattttcatattattcatatataaaatgtaaccaggatactagagaaatgatgatcagcccaaggtacttggatcatttttagcagttagcaagttattt

SEQ ID NO: 30088 - DNA, 457 bp, Zea Mays
tgtcgcaaccattcgtacaaagatgcgccagactcaaacagcaaagagatccatcactatacaaaatgagaggttagttacttacctatgcagcaagttgttttacccatgaggttatacttgtgactcgttttaatcgtgtttgtagctgtactccccttgaggttgtgctgtggggtgagcaggcaacctccttcccggctgatcagattagtattgccggccaggactcagtccagattattatctttgttggtactattgctagatcctatgctggtatgtttgtctaaccttgctatttacacttctattaagactctatgtttacccaaggttccaaacctttcaggtaccacttcgctgacaggtggatcgtcttgcaaatggtacgtgaatccgcaggttccagaggcaacaagccttgcagccaggtaccataaacacgtcacccgct

SEQ ID NO: 30089 - DNA, 299 bp, Zea Mays
gccgaccgtgcatggcgcgcgatcagagggcagccagtgcgcggccaagcgcttgagcacgcgatcgaacacgtggaagtgtgattctgcccgagttcaaacgcctgttggccgaccaaaacgtgcatatcttgccaaggatcctgtgtagcgtctcttcaccgtgccaaggtcttcctgtcgtgtgtgagtcccgagtgaagatatggcctaggtgagaagatatgatggcctgaagatagctctgttagcactgtccaaaccgagacaaaacttatgtcaagtcgtgtcaaacgatt

SEQ ID NO: 30090 - DNA, 581 bp, Zea Mays
gctgtgtgtgcgtgctttcatgcccgtacccaagaggaagatacaatgtttgcaaactagagaagtagagatgtccttttggtttaatcaggtcaattgttctttaagttactgccatgtattttagattcctctgagcctgccaaattctttgtggattactgctattgcagtattgcgtagttcccacagccaattttgtctctccaaaattgaacattttaataattgacaattgatttacttgacgctctccttatatattcctcaccagagtgcgtttcaataaccttatgtattgataagattttattaatgtcttatgatactttcctgaatagcatacaacgattccaactgtgtctttttgcagacacaaatagcacaggattcattctaccatgggatgctctaatgctttcatgtttgattctgaactgaccagtaaaaatcttgaccaataagtttcctgttgcttgataacttatgcagttccctttagtagtttgggtgctgattatgcatcttcaaaatttgtttttgaggtccttttcttgttagtctatatataaaattcccat

SEQ ID NO: 30091 - DNA, 438 bp, Zea Mays
tagtgattgagattgttccttgtgcaaagaataagtggggcaactggtgggacttttggttttatgtggcaccgggggtgtcgaagggttgcctaccttgcctccggccattttgtgctcgcattgttatgtggccttcccgcaatttaaagtgaagaaggggatcagaacgaggaggccctacgcaacgcaacccagttgagtagcgcccgagatctagtggaagaattcgttgcctgtggagtatggctgctggagcacgggtgggatctgggtgaggtcaggcctcgcccgatgtcatctttaggggatcagatggtgcggaggccagccttcgctattgatttgcggggacgggatgcggctgccttcgtgcgagaggtggagtcggaggtagttaagattgttggaaaatatgtgctgaggactgagatgttg

SEQ ID NO: 30092 - DNA, 512 bp, Zea Mays
tggatgtctcggcgaattttagcagctaattgttagttctagtgcattcaaacaccacctaagtacaccgcatgtcccaacggttaaaagctcatgcatgcatggttattgtgcataaaaatggttgtagatgaagcatttccagcggtaaacacgtggatgagttagccagctaggtttgtcgttgaatcacgaaacacatgatgcactagcaggctaggtttgacattgaatagttcacaggcaaggatgttatcacacaaaccacaaccacaacgtacatataagccaatagggctgttaacttgtctgagatgtttgtgaacatagatagattttcaccaccacaagcagagatcggccaatctacgaattctgggcacagcacaggaaagctagggaagggcatgtctggtcgcgtgttcgaagcagcctctcggcgttgtgggaactggggaaaggattgttttggtttatcccttctccagacccacagggaaatctccagggtt

SEQ ID NO: 30093 - DNA, 977 bp, Zea Mays
aacacaagtgggactggtcgctgctgaacagtgtgaagttccggatcttcaacagtttctggaagacagacaaaatgtgcttcaacaggttcgcatgcatctgcaacgagctcaagcacgaatgaaaaggtaggctgatcagggcagaactgaacgttctttttcagttggtgaccaagtgtttctaaaattgcagccatattgccagtcgtcggtaactgagaggcagaaccagaaactttcttttcggttctttggtccttatactatcagcaagcagatcaatccagtggcttatgaactggcgttaccagctggcagttctattcatcctgtctttcacgtttctcaactcaaggcggtcatcggatctcgtattccggtgagtcctgtgttacctgatttgtctcataatcttcaggtgccggttgctgtgcttgataccaggctgaggcgtcacgcggggaaggtccagaaccaattgctgattcaatggagcggatggcatccgacattagccacctgggaggaagaaagcgacatcaagcggcgttttccattcgcaccagcttggggacaagctggcatttcaggaggggaaaatgtcagggtaccggtaccggtggtaagccagtcccaggcggatgaagacgcaagcttcagtgcgggaggaagacgtgaagggaagacaggcacgcacgctgatggactacgacggagccaacgggtgacgcggcccaacgtccggctcttgggccgtgagtgggtgaagtgattaggcccagacctgtgatacggaggggggggggaatatttgcggcagctgagaggaggagaggacagactggcatttggaacctgaacccggctgcgtccggcgaaccgacggtgtgccgtcgtgtaaccatcgtacctgctacctccataacttcgagagaggatccgagcgccgggagcggtgctcaactcattcccac

SEQ ID NO: 30094 - DNA, 440 bp, Zea Mays
agtatcagggcagagcccgggtcaaccacgtcgacgctcaagaagctcagcaagccccaggagtagtgctcggtgagttccttgtcgaatttactcccgcttctgtgctttttgattcgggagcatcccattcttttatagccgctaagtttgtggaaaagcatggcatcccctctacatcactagctatccctttggtcacccgaaccccgggatcagacctcctgtgcaaactcaggtgttcccaagtcagaattcttttaagtggggtagtgttcctggcagacttaaccatcttgccatcccaaggaattgatgtaatcctagggatggactggctagctaagcataagggtatcatcagctgtgcaagcaagaccgttctcctcaccgatcaccaaggaaaggcagtttcctgtcaagcccaaccgcccgcaaac

SEQ ID NO: 30095 - DNA, 330 bp, Zea Mays
cacggcgatgcggtggaggtgccaaggcacgtggcacaaggtcgtgaagaggcagtcacctgcgaggttatccgaagtgaccgtgacaggctcggtacggtggccggagtagattaatggccggagtttatccacggcgaggattcttactcgatcccaggcgctatccacacgatccaagcacgaatcacggcgacatgagcgcgaatccgtgcacggctcgtcggcggcgagtttctgaacctgttttccctggtgcactgtaccatggcgaggtgggttcagttggcctgacatatcatattcaaggcaaattttctctaaattttg

SEQ ID NO: 30096 - DNA, 362 bp, Zea Mays
ctcagaatccactgttcctccagttggaggtgttacaaactgcacattcggtgtattcagagttataataggtgttgatggctctggtgactgtgtgatttgctcattaactgtccatgagccgcctgattcactgttctgattgggagaccctggatccatcactaaaaaatcaggtgctacagctgattgtccagctgaattttctgaaacataatggtcattatctgatactgttattcttctgggaatagaatagaattccacttctactcctgtttcagtgttcctgtcttggttttcctcaccccagctccattcacgatgttcttcaaacacgacatcacgtgacacttgcagtt

SEQ ID NO: 30097 - DNA, 601 bp, Zea Mays
ttggaaccgaatggtgtgtttatatgtcttttgtgcagaaatcaaatgtagaaaatcaaagagaaaatatggttttgcttctcgcaaatattagtacaagaactgctgcccaggaagggcatcctttggtaagctcaatgctacttggaagacattgtttgagacatttttttatatttcaagtaatgtttatgcaaaagtcactacacctttaaagtgggtgtttggtcgcgcgtcgtccccctccccacgcgcctagcgagtgtcgtccgctccccgcacgcgcccgcgaaaaatccaaaaatggagcgcactcgctggggttcaaacaatggtcgcaaggaacgagcgttcgcctcctaactactgcagctcgtgttggtttgtgccatataaggatagatattgtaaatatcacatttaagcaatgtctacctatatgatatatagaaactgtagtgatgcacaacaactaactagtaatgtttttgcactggtgaactacacattttgatataaacaaatatgatactgatctagcatgttattttcaggttgatacagtgaatgaattgtggaaaaaaatatttggaaattataa

SEQ ID NO: 30098 - DNA, 428 bp, Zea Mays
tgtaaccccatgtatgctatgggaattgagaatacattctgatgtatttggttaagtctatcattcttattcctgcaatcagttgatccatccaaaagtcataaacggatgactcttttgcctttatattatactccctttgtcccaaaataagtgtccttctcatttcccaagaggtcaaatacttttacctttgaccaaatatgtgcaagaaaatattaatacttagggacacacaattattattagagagattgttgaatctattttcataataaatttatttggaggtacaagtattgctgatattttctataaacatagtcaaacttaagaaagtttgagcggcatgcgacacttattctcggacggagggagtacttatgggatttaaaatattttgaatactggaggtagttaatattttc

SEQ ID NO: 30099 - DNA, 582 bp, Zea Mays
catatgctgcctttgttgaatatttcccattggctgcaagatgaaagatgtgcatgactgcaacatcagtccttaactaaattgattcaagcaaatccgcaaatcccataaggtgagatagtctgtaatagctccaatagtaagggctccttgtatatccgaaatccagcactggtttgataaagcttccaacattgtcctcttgtgaacccatcttttaggaatcaacctatgtaaccggggtgcaaggtccacaattctatgcccaaggagtgtgagtgtggtagcaccattgccattgagaataagtcttttactttactaggaacttgaatagctaaagaagcccaaggacgttctggttcagttttagtcaaccaaagccatcacatcctgagcgcccaagccagacccataagttggaaataacaagtccaccaagttcacgaggccgacatacctttcctcatgcaacctgacagtgccccccttttacatctttgcagcaaagaaaacctcgatgtatgtcatcaatagctttaagagaccaagatggtagatccactgccatggctaaatata

SEQ ID NO: 30100 - DNA, 283 bp, Zea Mays
cctaactgtgctaagaactggtctatgtgctcacgcgtgctctttccttggtcacccgaaaactttgcgaattcggtattctggtcccctgtgggtatgggagacggtcaaactggatatcataaggtctccgatatgaataccccccgaggactatactaactccgagcttatctcggaacgtcccagttatttcctctcttactatatcaatggcagccggtgagagaccatcgactctttggtccaatatgggtgagtttgtttggatgttggtatgttg

SEQ ID NO: 30101 - DNA, 612 bp, Zea Mays
gaaacgtcaaccttcatccgcttccaccagaagttttgcttcaaatctcggtacattttggttttgccaggatggacggtgtaaggcgttttatgagcttctctcaagatatccatcttcacctctgatttctgaggcacacagaggcggtccctgaaacgaaccaaatcattctcatcaatggtgaactcccgcggtttaccatcacccaccctctttcgagcttcctgcaatagacgatcctgctgctgagccgcacgcactctctccatgagagaggattgaataagcatctgagtctccttgctagcggtgccgacataacacaaagcgatccccacacggtccagatcagcgatcaacagcaaggccaccttcggaaccccggacctgctaagggcatcagccaccacattagccttccctgggtgataatgaatggacaaatcataatctttaatcaattccagccaccaacgctgcctcaaattcagctccttctgagtaaaaatatacttgagacttttgtgatcggtgaaaatgtcacaagtctcgccataaaggtaatgcctccacgacttaagagcaaaaacaaccgcggccaattccaga

SEQ ID NO: 30102 - DNA, 307 bp, Zea Mays
gctacgacacctaccgcgtcattgcatcgacgattggagcgacttcagtcagtgttttattgccaacttctaatccctctccgacaagccggctcaaccatgggacctcaaatccatcaggcgccgaggggacgaaacgcttcaatcgtacctcaaaagatttcagaccatgagaaatcgcatccccgaggtcgctgaggcagtagtgattgaggacttctaccggggatccaatgactcggccttcgtccgagccatactgcaaaaggcgctgaccacctccgagtagctattcagggaagcggac

SEQ ID NO: 30103 - DNA, 415 bp, Zea Mays
aataaagaaagataacacgatgtaccaacttgtatgttactttgctagtgcagctcatatacaacttctttcatttgcaaaaaaaattctcagttatcaaatgtagacgtgaggtatgcatgggcaggaactcttggcagagagcaacaacccgcattaaatccagttaaccagaaacgataaaatatatatgtgtgcagaactgtgtggctcaagataggaacaacccctagcactgagagccgagcaaaaactttgagtgcaagtgtgacatcaacttaggctatccaagggtatgtgtgaacatggggatcaaaggtcagctaccagcgcgagatgctcacatcatagaaccctagaagcaatgaacaaaagggaactggttcacaccaggcaccagtggaagaagcaccaa

SEQ ID NO: 30104 - DNA, 719 bp, Zea Mays
ccgagctcatcccaagattgcttttaaattctttggtcccttcaaagtgctacaacatgttggatcagttgcttataagctggatttaccttctacggctttggttcatccggtgtttcatgtgtctcagcttaaaccatttacgcccaagtatacaccagttttttctgacatctctcagttggtcgacctgtctggccgggatgttcatcctgttcggttgctggatcgtcgtttagttcggcgaggtcacaagcctgtggtacaagttcaggtggcctggtcagagctaccagatgatgctactacttgtgaagatattgatgtgttgaagactcggtttccagaggctcttgattggggacaatcaattcatggcggcggggaagatgtcatggccggtccagcgacaggaggcgacatcgattggtttttgaattttcaacattctgtaaggtgttgggccgtgtgggccggatgatgtgtaagggcgtgaggcccatgtaagcgactgcttaaataattctgtgtgagagaccagggagctaacgaagaagagaaacagaactccacaaaccgtggcaaaccttgcgtcttctgtatctctgagaatcactggtgatcctcacgtcgacggcgacgcgacgtcggccacgggcatcacactaacccagcataatttgaatcagctgacatctgaagtgacagtaagttgtaaa

SEQ ID NO: 30105 - DNA, 350 bp, Zea Mays
aggtgatgctgctgggggaggaggaagacgacacttcaaggttgggtgagctcttggtgctagctaaggtgtgattacgtttccaagaggaggacgagtttatatctaagactatcgatgaagtagaagccacttattacaagaaaacgaccgatgaagcagaggttgaggactagttattttcccaggctacagttatggcagaagtagcttactacaagagaaagaccgaagagtaagatgcaggactatcaacaagtgaaacgacattgtgatttacgattgtgcaatggatgactaagatgacgagttgcttattgataatgtttcagattgatttcactactcat

SEQ ID NO: 30106 - DNA, 281 bp, Zea Mays
gttcgatgcgaggccatagatgatgaaactggtgagattatcctttggcctcgaagggatgtcgaattggttgatccaccacgacagtcgtcgtcgcaggcccaaccgtctccgtcttctcaaattgttattcctattgtacatccatcatcacctcctcaaacttcacatgctgctcctcatcctctttctgaccctccttctcctcatcctcatggtggcccaccgtctccgccacatacatcgcccttcagggatccaccttctccacagccatcaag

SEQ ID NO: 30107 - DNA, 362 bp, Zea Mays
tctgatcctggactagaccacgtagtccacaaggaaactattaggaaggtaagctaccctctattttgaataaatggattcataataattttaggatagattactacgatagagaaaacaccatactaccaaccattatttggagtaattatgcactgatcagtgattgttttactagcatgctaagagcatttacaacagtcatataaacaactccctaattgtgcatttaagatttttttaagaaaacccttctccaacaattatataaaaacaactatcgaaaatttgaaacttcctacaaaatctaatttcatctctacatttactgaccttacaccaagtccatcacgaaaagccta

SEQ ID NO: 30108 - DNA, 604 bp, Zea Mays
tgcctgcgcacggaaccgcacatgttttccattccttttccttcaaactcaacagtgacaaaaccccatatgtttcgcatttgatgcttgatgctgaatgctatagttaatgttacaatcgtggtgactgggaacaatgccgggctggcagtgatgttgtagctatcaaggactttagtacaataacacataggttcttccgaagttacagtagtttatcaactgttgattcgcgctactcatagaagcaagtatcgttcatgttatgtagaggaattgttcagttctctttatctttcttgtgataaatgcagagcatattccttggttatggatatgtgtgttgggtaactgggcattcacgttttgtatctgttgttgcaaggtccatatggatagtccggctgatctcggtatctctgataggctgtcgttcattgctgaaaacttttgtgcccgttgttatctctgatagcctgttgttcgttgcctgatatttgtttcatatattatctttggtgtttgtgtctccacatgagtacaggaggcaaaataatcatccactttgagctcattttaataaatcttctcaagacataaaagt

SEQ ID NO: 30109 - DNA, 276 bp, Zea Mays
gttatacgaaagtgaaagaacgttgattaatgtaccactttgataaggaccgatttgtaagtcattacacgaattagggcgcaaagttcaaccgaactcgggctggcagacaaggtagcaatctaggtttagtgcacttcaccatggataagaatgccaccgctgccgtgttcattgctcggactcacgggcgtgggtaaaaatcttccaagacgtggcacatgtaaccatgaggtggcatcgtttgaccgaagcgtttcacctgggcgctcgtcg

SEQ ID NO: 30110 - DNA, 342 bp, Zea Mays
ccctactgtccaaagcggacgccttaggctctgagataaggcgactgggacgccttacgatttttgcacgctttaccgctggacgctttaacaactatgatatatatggcaattggacatgtacaccgatgtcgcccttctatccaattgtgcactgcactgcatgctcctcctttgcatattacattcttttttgtccttgtttttactttatcttatatatttgtgaagaacttgtctttgagatcatagcatgtgtggttctatttactgtgttcattttgttacattctgccactgcaaacaggtcactccttgcctttttcttatataaagtgtaat

SEQ ID NO: 30111 - DNA, 541 bp, Zea Mays
agacttgtgtgagtgggtcgtggaaatggggccagctcattttggcgcctataaagactaccgtgctgtattaaagaagggatgaaaattgaaatagagaatataccttgccatttacccagagttgagtgttgtcttctcatcggcaggccagacctcacgccgtgcttgctcaccaagggccaaggggaacggcgaacgtgacaagtggtatcagaggtctccgatcctcggtggggcgtgtgagggtcgcgtcctctttggcggcgattccgttccagcgacctagcttactcgtctacctcggcgtcgacatcatcccacgatgcggttgtgcttctcgacacagaacttcttctcctgccgtcgggatcggaacaggaccgggacggtccttgacgggaggtgtgcgaggtacaaacaaccaactcgattcattctgttcgcgatggaagagtggaggaaggaggatgcagggcgttgggatagggtgatgaaccggttgaatcgtttgattcagaagttggaagtggtggatgac

SEQ ID NO: 30112 - DNA, 447 bp, Zea Mays
gaacgcgttccctgcgatctatggtagctcagctcaattgaacgggtcggtgagtatcaagagcaagcaagggtgttgaaacaagaaagcagagggcgagatcagacctgaattgggctggccacggcgaggacacaaggcacggtattcttggttggtttggggaaaatcccaaattggagctctctggtggaggatctgaggtacgggtgggtacgctagatgcctgaatacataacgaagccgatggtgcacttaatttataggctctaggggcggtggctctcaatttaatcacggcgtgctggcgggctgcgatagggaagaacacgggtggctgtgaccgtggcgttcaccggtgcaacgaggataatactcctaagggtgccacgattactaccgcacagtaacaagctacagcgtggcgcaaccggggtcaccggagct

SEQ ID NO: 30113 - DNA, 401 bp, Zea Mays
gcgttcggaggttgtttaagcattgggccgaccagtgcctgctatttgggcgaaattaaatgctactcttgcaacaaatttgatctggcatggtgggccattagaaggggataccatattgtgatagtgaccttgattgttgaccatatatctttgcctttgggcgctattgtctttagtggtggaaacggttgggatatatcccgttccgctccgatttctgcattgactcgttcgaattcgtatttatgggcatccaattcgttttgttttttacaatgcaaaaataggacgtaaacgatatgagtgtttttccgaccgttttcaattttcccgtttttagtcgggatatcactttttcacgtagaatgtctctatttagataatacaatgaataaatc

SEQ ID NO: 30114 - DNA, 692 bp, Zea Mays
attaaaaatcattttctaatcacttttactgaatttctaattttctggactgggcgccgaattctggaaaagccaggggcttcgggataagaattcccaagacatagagaatagttccagtggaccgcgggttgttttcttgaattcacaggggttcattaacaaaacgtgcggccgaagagggtatggggcaacatcggccgcccgatcaaaacccgatgggtgtgattagatctattacctcacgaagcggtacgcgatccagaccctcggatcaaagaccaaaggttaggatttaaaacacgcccgatccactccatccccacatcgacgatccgacggctgagataggcacaagctgaaacggtacgcacgctctaatctacacggtccaactctcatccgacggcgcggaccaactcttccacctctatccgtggctgagcaacggcgacaaatccacccacggcggagtaactccggcgagcccccgttggccgcccattgcccctaaaccctaaccgaaacatactatgtgcagcgtaggataatgcgaacggcagataagggcaattaccggcctagagcgcgcgttggagtcggtcctcgacgtagagcggcaccgcggcggatgtgaagtccggcgagcaattacttgagccccggtggagtatcctccatcgcgcagccat

SEQ ID NO: 30115 - DNA, 288 bp, Zea Mays
ggatgatggagacgttggaagcagtgtgtgcgcggctgaaggatgtggagcgcgcacagcaacagttgatggtacgctcagaattggcggccacggtggctgagcgggtagcggccgagcgagtccagatgagccagaagatggaggaaacagagaagttggtggaacaactccgactggaaaacaggagcaaagaacttggagaaacgccaggagcagctgtggaaggggagcaacaccatcagccaccagttcctccattcaacaggccacgacaggaaaggaggg

SEQ ID NO: 30116 - DNA, 403 bp, Zea Mays
catctcacgcacgattcagaaaacaacactgaaaaaatgggtattcacaaaatagcactggttttgccaagggaatttataaaatgacactatgtttaacactagttccttcttcacacacaattataccaaatttctgatgatgtttctacggcatcattttttcccaactgatgatgcagccctttctttctcagatagaacaaagaggcgtttgattgggtagtggcaatagatggtcctgtaacattacatactcttggtcttcctttaacaaaaaaatccttcttcggagaatacttcctaaaaaaatattatcagcgggtagtgtatttggcctggcaaacgaatgattttttttgaagagatgataaaggatgaggcatgcgtttttctgactgct

SEQ ID NO: 30117 - DNA, 410 bp, Zea Mays
gctgctccagggtggtgcgctggctcaatcgttccacctataagtccttttccaccaactctgaggacaggtcgaccatgaagtcctctcagatgtcgagggtgagcttggtggcctgagcgaggttagcaaggtgtgcatagcgtcgctctacagggcctgtaggcgatacagtgcgctcacgcactgaacaatgatcctcccaactaagtcgggatacatagcccacacgtccttcacatggctcacacggttgcaccacatggggtcatccctcttctcagatgggaagagtcccaaggggtgcatcaccatctccaggggatggtagccacagaaagtcgtcagattcttcaaagctgccgcctcggtggtgtcgtctgtcatgaatccaatagcctcggagtaaa

SEQ ID NO: 30118 - DNA, 461 bp, Zea Mays
tcagttgttaagaagaatttagagataattaagtctaaagttggactgtcaggttactaaggtctgaattttcagacagacagtgcaatcactacaactttgagcataaattcaactatgatccagcaagaatctgcccatggttgctgtgacaaacttgtagctgatctatagctctacaattttgctgcagagcatggagtatgttaccattgaaaattgagagaaaatcgtgctccaagtcgctctatcagttcatctgatgggtgctccccatggtaaagtatcccgatggatcagatcgccagtgcgactgtcctcaccgccggtgacttgccaccgcgattcgtgccattgtcgtcgtgatttgtgctcggctggtttggataacgctcagggtcacacaagtatccccgccgtggataaactccagccgataaagaattccggccaccgtaccg

SEQ ID NO: 30119 - DNA, 301 bp, Zea Mays
gatcaacataaatctccgcatacttctctgtcttgtgggtggtatgtactggcaagaaatgggcagtcttggtcagcctgtccacaataacccaaatggaatcatggtgcctagaggtagtgggcaatcctacaataaagtccatgcaaatgtcctcccatttccaagatggtatgggaagaggttgcaaagggcctgctgccctcaaatgactggctttgattctctggcaggtgtcacactcggatatatactcggcaatttccctcttcattctggtccaccaatataaagacctgag

SEQ ID NO: 30120 - DNA, 311 bp, Zea Mays
ctgttagtcacgtgttaccaaggcaagaccattgactcattgcaccacctgggtgaccttcattatggcctctactattcctcatgatttgccgaggcatgatgagataggtggaggagacaagatgactacatccatacactcctatgcatgacatggtattaggctacgtcgcaatctacgccaaggcctatgcctgtgttccaattagacgaggcaagaggataggatgccaacagcctgcacgacgatcaagaggagatacacgcctagaagatctagcaccgccaactctacccgacgcctcccga

SEQ ID NO: 30121 - DNA, 620 bp, Zea Mays
tgtccttcgttacatgtagtgccctttgtaataggggtatgtgacctgtgttgccggggcgcttcctcattatcgtgttgccatcgcagggtgggcgcacgccattggagtgcgaggttggagcaagaataagaggttagagccgttgatctccttctgggcgactctgattagaacatggagatatccctttgtgcattaaaccgtagtcgtcgggtttggatcggaggaataggataacattttggctagatcagatcttggtcataagatggagcgttagtggattagattagatctctccctaataaaatctagatcgtatattcaagatcggacgaccctgattagaaattgagataatgtttcgatccgatgaaaactgggcgtcaatcggggatctagcagtaggaaatccataccagttcagcgaggggatctaattcatgcccttagttgaagatctagcggccgagacacgctcatacccctttgggtattgtggttttgcgtaagagaccatgcgttcctcaaaaagcaacccgcagtccaccctagtgcaaagactcttacgaattagtcctaagaattgtgacttagaccctacagtcttcaaaaat

SEQ ID NO: 30122 - DNA, 336 bp, Zea Mays
atcttcgtgtactagtagcttcaatgcccagctcaaattcttgcttaattgcatattgtatcattgaaagcctaaattccttcatgctactgtaagtgctgccaagcctcataacagggttatttatatcaaacatgaccacatcatcatcattatcaagacatggcattgtggcctgtgcatcttcacaatcattttgaacacaatcaacttccttttgcaatcctaaagtatcatacatcccatcttcttttaccacttcttggtgtccttcttcctcccatctagactcagattctattgaagcccagtcaatttgtggtatgtcagttgatc

SEQ ID NO: 30123 - DNA, 447 bp, Zea Mays
cagattttcactttccaattcctatttatctcttcttttgttctttaatttggttcgtacgtacaagacttctcggatcactcgtcttctttgattgcatcatcgagacctgcattttcccttccaaattcgtcactcactctggttggccgccttctgtcttctgatccaatccggttgaaatcctccgtctccttccagcaagatctggcacataaggagaatcggcaagaaccattctgcaaatgaggccggatacgcggcttgaatcggcggtgttccagctcaccccgacccgcaccaggtgagctgccggatctgctcgagtaactcccggcgatgtttctttgtttcctctggtaatttggccagtcaattatatatatatgtgtcatcttttgtggctctggtgtgtggcgtgttgccaaaaatggagcgagctctgga

SEQ ID NO: 30124 - DNA, 348 bp, Zea Mays
gtaagtgtggcatgcttctactacagtcatttttttagagttcaagggctatcgccccagtcccactttgcattgggtcccactttgcattgcaaaaagaccgttttaacggtttacaaccagagggctcaaacagccagagaaggaaacaagtcttgaggcacaaagtaaacttattacatggccatattccagccaagatcatctatactagctcagagcacctggtgagaacgtagccaccatcatcctggaagaaacagcttacagtgctatccttccacactttgatgcctccacttgcaaactcctcaaaatctccctgtactcctcctttctttgatccgg

SEQ ID NO: 30125 - DNA, 803 bp, Zea Mays
caacgcgaggggatcgatcccttatagaatcggcatgataccaaaaagggaaggggttacacaccagggaaaaactcaccaaggtgctcatgacatcttgataaaggggagtgggtgaatcctcatctataaaggacaccgacgatagcatcgtaacaaccctgatcctggcttcaatctcggttagcacaagcggcgcggaagaatggcggttaggatcattgattctagagtataggtacatcggtttctggcgggccatcagaggttcgatccagctatgcatgaaggttcgcaccagccgtgcgctagagagaccatgttgcttcgatgtcttaactaccgtcaatagattctccacttcgattttgaggctcgcctctccaccatgttgccactcatccgtagacaccagatcccgatcggtgaatggttgggcactcgaggccacactcctcacataaaaccactcacctttgtgtcggacgaagggagggagggggatcttgaatgatggcctttcgactgaagtgaagctaagtgatggtcgaaccgacgtacaattgattatcgtgactcggggacatctacgcactgaagaagtactgccacaacctctagtgggggctgatcccaatgaatgattcacattgcatgatgaagcacgctatgtgaaggatgacgttggagtggagactctagatctctagttgataatggtgtaggagtccgcgcatgaaggcatgaaggggtaaactgaacccgcactcatagaatgacgcgagctcgaccagttcatcgtc

SEQ ID NO: 30126 - DNA, 466 bp, Zea Mays
attagtatttcacatattgtctttcttgtatacaattaccatagttgtttctcatagattgcttacttgttgtcactagagaatttatacctcttgtcatattgtttaaatttctctagtgttttttattgtagtcaaaatcgtctatttacccccccccccccccccccctctagccggtgtcctagatcctacaacaggttggaggagagttgtccctcgccacgacgaaattcacgacgccgggaagactccgcttcttcctgcaataaggccaatgcacaagcagtatctaggttgctaggacgttgtaccaaaatgacagacttaatatcatcacacaagtcgtctatgaatctcatggtataatatataggattggtattgtgttcataagcgactaacagatcgactaacttgctaaaactatcaacaaaatcatggactatggaggtttgtttgatgt

SEQ ID NO: 30127 - DNA, 361 bp, Zea Mays
gcctaatcaaccagggaggaggctgcgggttgatggatctggccgaagggcgcaccacaggagtagcccgccggggccacgctaccgtacaaccgtcgaccgcatcaagtgaagatgaatcatccatcggcaacaggggctcagcacgcaggtcacaaccaccggggctcagcgctggccttggcctattatctgttgggtcatgggaggcagggaggcggggagcaaccgagtggggaagccagacgccagtgtgccaccgtgggggttgggaagatgaagagggactctgtgaagatgaagaatgagggctttaaggtaaactcagcattctaaagccaccttttcccacttagttaga

SEQ ID NO: 30128 - DNA, 427 bp, Zea Mays
tctaaaatagaatgtttataactctcaagtaagatggaagtaacaaccagaaattagaatgacgaacagagtaaggagatacttaactggaacctaacctaagttggcatacgctaaagtgaagttgtttaatgcaggggagatgctagttggtctggcaagatgcttctttatggatgatatatcaacaggtcttgatagctccacggcatttgagatcatgaagtttctccaacagatggcccatttgatggatctcacaatggtaatttccttgttgcaaccaccgcctgagacattggaattatttgacgacattatacttttatgtgaggggcaaattgtgtatcatggtccccgagaaaatgctacggacttgttcgaaaccatgggattcaaatgccctgacaggaagaatgtagccgat

SEQ ID NO: 30129 - DNA, 537 bp, Zea Mays
accggatacaaatccaagcgttccggttgattgagtgtggtcaagcataaagggttgagccgatgagtatcgcgagtatgcacgggtgctaaaacatgattaaggagagcaggagcagacctgggagcgactggccacggagcgcggagaattctgctcaccggcatctgagaagggggaaatcggtgccgcgacgggctctggtggaattgggaggtgaggttgggctatacggtcacaaagggctactgattcaccgtgcaccactaatttagggagaggtttagagattccgtgaatttgtgcttcaaccgagctcactggtgaagtggtgagtacctcgccgtgggtggtggggctatttataggctccacggtccggctagcgatccgcggccacgaattggattgtcagtgcatggttaccacgtaaggaagagacacagtgagggaggagcaaggcacgagtgacacggcggcggaatgacaaagccacggtgaacgccggtgaaatatcccggcccggctcttgctagg

SEQ ID NO: 30130 - DNA, 338 bp, Zea Mays
gcccctcatgaattctgctcgcttatctctgggcacctgtggcatctggacttatactggaggctgaggtgggggtggctgctgctgcacctgctgcattgctgctagtgtctgaccaattgctgggactgcctgagtttgcatgaggaacatctgctcaactgtcatcggaggtggaagtggcaactgctgctgctgagctgtctcctcctagtgtgcctgctgttctgcagacatctgtagaaagcacacacacatcagatctgactctgcaatttttcagcataagaaaagatatacagaaatctccatagcactaaacaaatgatcatcttcac

SEQ ID NO: 30131 - DNA, 497 bp, Zea Mays
gcgcgtggcgcctgacggagcccgtagagggccttgtggagtttcagcaccttgttcttgtgcttgtcgtcgatgaagccggggggttgctggacgtagacttcttcttggagctccccattcaaaaaagccgacttcacgtccatgtgatggacgccccagccgtagtgcgctgcgatggcgaggagcagacgcacggactccagtcatgcgatcggcgcgaagacctcatcgaagtcgacgcctggctgctgcacatagcccttggcgacgaggcgggccttgtacttgacgatgttgcctttctcgtcatgcttgactttatacactcatttgaggcctatggcgcggtgaccacgcggaagctcggccagtgaccatgtcttgttgtcatggatcgacgccagctcctcctccatcgcggcaacccaatttgggtcaccatcggcctccttcaaggtcctgggctcctccacgctcacagcatgcagttcagc

SEQ ID NO: 30132 - DNA, 537 bp, Zea Mays
gggacatgtcatcaaaggaaatatatgtgtgttgcatttgcccaaacaaatgaataactaatataaatggaataaataacttcaagccatgctagaatttattgactatgcattgtaattaaattgagagttcaaactatatttgaatttgaattgaatttgcaaacaaaatggaaagcacaaaataaaaagataaaaggaaaacatcgtttgggcccaaatcccggttggcctgctcatcctcacccttgccttggcccaatatcgtatttccactgctcggcccagccccatttcttgatccgcacggcccactctacgctcttcccttttctttttcgtttgtggcgcttacatgtgggtccgctttgtcagccatctttcttcttcccatggcgcacagaagtccgttggctgtccgccgccgcgcgatatccgccgccagactggggcatcctcagccagagctctcggggtcggactctgcagtcgggtataaatgccgagccgtgcgcccttcctgctgcccaccatgtg

SEQ ID NO: 30133 - DNA, 362 bp, Zea Mays
cttttttgtcatgctttgcacatgctgtttcatgcatgggtcccgatgtccttgctcttatgttttttcttcctattttatgttgtagatgggagacgtgttgatcccggagctccagcgtgggaacacttctgtgaccatatgcgctcgtgtttctcgtttatgggatttctgtgatcctcaggatgaagcaaagttgctccattgtgatatggtgctgcttgacgaagaggtacaacatctgcacgcttatctatttggtaaagggaaggtggcattggtatgagattaattgctattatgttgttgtttcctccatcactgctttgttcagggaaacggtatccatgctgcaatattcc

SEQ ID NO: 30134 - DNA, 354 bp, Zea Mays
gcccgcatgaatcggctcactggcactccaaacccccgctcatggaaggggatgaaactgaccacataccccggcggcggagtcgggtcggcctcgctcccggagccatccactccggctgcggcccgccggagagaggacggagcaaaccatcggtaataagggcctccagatcctccacaacaacggtggagaaaggccacgggtcgcgcggcggaacgacggtcaccttgtcagccatcgccgaacggaggtggtgaggcggaggggatgaggtgcgcggttttctctgtctactctcttaggttgcggaaacaaaagcagaaagcaagcgcaaatggcagggtaaagaac

SEQ ID NO: 30135 - DNA, 541 bp, Zea Mays
gttttttgaggaagaggaggacatgatgttggtcatgccggaagaggtggctttggtcgtagtcatggataagggcacgatgcacgaggagatacaagatcggtgtggtagttgtgtgaaaagccaggacatgtggcatccagatgttagaacaggttgttatctctgtccacaaactagccgctgataattgtatattccttaagtatcatccttgtttttttgtaaaggaccaggacccaaagagaattcttctacgcggtagatgttaagggggactttatccatggccaagcttagagcaatcatcttcatccaagtgcattttcatgaccaccaagccttcatgatcaaggtgccatatcattgtcaataaggttgttagtgagaataaattgccatgctcttccttatggtcaagtgaaatccaagtgtgtgatgtgtgtcaacacgtgaagagtcatcaattacctttacctaagtcgtttagtatgccccaagctcctctagaacttgtgtttttagatgtatggggtcctac

SEQ ID NO: 30136 - DNA, 478 bp, Zea Mays
aagagctaagcgtagccatggcaaatctgcaagcgtacaataacactctgcatgaggaagtacacatgttgtatgaccagttgcatccgaacatgccacgagaggttgcggcaatgggagctggaacatcaggagcagctggcggaggaccttatggggagttggatctctttggagcccctccttccatgaacctcgcagatcatcgttctcccgaagcaggtagtggagcgggagcagccaaggacgcagataactagagtagtatagtagtaggctgtttccttatgtagtctaaataaggaaaaatgatttgtacaagttgagtatgtataattagtactagtttggaataatgtaactaaggtggtgtactggtggcatgtaataatcaagtatattttcttcttcagatgccgtctagaactcgtgctcaagatgggacaggaacttcccatggtggggaggaaactcccga

SEQ ID NO: 30137 - DNA, 313 bp, Zea Mays
gggcctcacccctcacacgatgatctgtgggccttgttctcgtcctacaagcctctctacggtgtatggcgagggaggatctactctcacgatggctccggtgacgcacccgaggcgcttttgcctcacctacatcatgcttcaagcatgatcgcgaccctcatggcccacggccatctcccgactaccgatgacccgatgttcgtagggatggttgaaggcggtggggatctaatcttcgacaccctttgctcggactaaggctcgtactcaggctcagaccctggctccccgatgaatggtgaaggtggac

SEQ ID NO: 30138 - DNA, 430 bp, Zea Mays
atgccctagccttgccccctactccacccacttctttggccccctgcttcactcacaccaccgcatcttcgacaacccccgccgctgtgccccccactaaacctttcttcggcctctactccagttgtgtcatcatgtctctagcccctatgtgcatctgtgtttccctactccaaggcgcacagtcactttttgctctctgtctgtggccacgccactagctccccatgcgccggccatgcccctgctccctaccacacccctgcactccatgtgcgccattgcgccaccagttcccccgcgcgccgcgcacctacgacgccgctcgcaagccaaatttacatttgatggtataatttgataattttgatgttttaaggtgcatttacatgctagtagttgatgttataagtcaatattataagttgat

SEQ ID NO: 30139 - DNA, 442 bp, Zea Mays
cgagggcggtggctcctcatttgggcatggcgtgctggcggccggagagagggactgagtcaccgcgacgatctaccatggcgatcactggttgaggagctacgactgtcactagtgagctactacggctagcagcgacgtggtaaaagggtcacggcgtggcgcgatcatggcgaactacgtatacctcgacaacggttgctcggccacgtcgccggcgcaagtgcatgggcgatagagcaaccacagtgctccgaactcatccgcggggaagatatttttactgccgagcgcaatccactgacccgaggcacgaatcgtggcggctagcgcgaatccatgcgcggggtcaccggcagcgaggggggctgaacctgggatctgattcagttactgtaccatcataatgtcattcagagcatctgatagaacacatttgggg

SEQ ID NO: 30140 - DNA, 632 bp, Zea Mays
tccatcgcgatcagcaaaggaaaaggtagtttcatcaaagataacatgcctcgagatgatgatgtgattggaagagaggtcatggcagcagtatcctttgtgatgatcagaatagccaaggaatacgcatagggcagacctaggggcgagtttgtggggaactgtggctgacaagttcggatagcatttgcaaccgaacacccgtaggtgataatacgccggaggagtgccacacaaggcaaggtgcgacgtaaagaaggcaagggtcttggtcagcaagatgttaaggagtcatgtcactgtggagagtgcctcggcccaatacgagggggcatagatgcctggaacaatagggagcgaacaacattattaattgaccgaatgatgcgttcagctttaccattctgaggtgaggtgtaggggcaggacatgcgaaggtggatgccctggctaagaagaaaggtatgagcaccagagttgtcaaactcgcgcctgttgtcacactggatggccttcacagcggcgccgaactggatagaggcataggcaaggaaggtcgcgagcgtgctgaaagtgtcagctttaacacgaagagaaaaagtccacaggtaatgagtgcaatcgtcaagaat

SEQ ID NO: 30141 - DNA, 467 bp, Zea Mays
gagatcaacgattcagtactcacggatctcatccgccgatcccgcactaatcttgtacacccggttatgatccaacggactggagactctccccccctcggcactgacacatggtggcgtagcccaacgcgcggtggcgagactgccaggattgttaactcgaccaacccgagcgccattttcaaattcgctcagccctcgcacaattgatgactcctcgaatctaatttccccaccaattgtagccgccatcaaacgcaggcccctgcccacggcggagccccgatttgcggcggcaccgacgtcgccagtccaaatccacaaccaagacccgatctcttgccctaattccaactctagaccaagcgaacaatcacacatgcgtaggaatgggaccttaccggggctaaggtggtgaaatggtcgtcggtccacccaaacggagctgcggaggcacaaatttccgg

SEQ ID NO: 30142 - DNA, 280 bp, Zea Mays
gcaggagtaggcacagcctgatactgcggaaaaccttgcatcggcacgaactgagaagtcccaggcgcataaagctgctgtggaggaagaggaactgaaaactgctgctcggcacttgacatcatattgatagtgccctgagaagaggaggaagttatcggctcccatctgagcttcccattgggattcctcctacacaccacatccttgtggtcctgactgcagatagaacacctgccactccactggcactctgcacggcgatgcgcatctccacagc

SEQ ID NO: 30143 - DNA, 420 bp, Zea Mays
cacagattcacattctcgtatggtacgcgtagcatcattctggttggaggattgggccccggagtacgggatccgcgcgctccggccatggcgctgccaccagcttggggcgccgctgccgcatctcggcctatgtttggggtgacataggagaagccacatgacccgttggatcttattcaacggctaggattagaatgcttttacccgttcggtttatttgaatctgggccatcaatagtcgatcgggcggtgctagtgtagctcgcgcttcggaccgtggatctaagatccaacgggtactattgtgtaccgattcggatattatggtgatctaatcgggaccatctaatgtggatcggactattcatggtggccgataccccttcggccggggtaaatttcaaatgagccccccgg

SEQ ID NO: 30144 - DNA, 348 bp, Zea Mays
tgggtcacacaatattttgcccaccaggctccagcttgaccctgggtcacacaatattatgcctcacagaaggtgagtatgatcaatgcctacactaatgagttgtgcaactgcattctcaagcatggatgttgactgtggattcgatgtgttagccttattctgggaaatgccctcaccatgaaccaatccagaatgagtcctcattctgtcaacaaaagagaacttagctcccaatctcacggatttgaaaagacaagacagaaaagcaagaatgggtagcatgaatagggtggatgaaacactctcaaatagctacatgggggttgaatttaaggttatatgtca

SEQ ID NO: 30145 - DNA, 275 bp, Zea Mays
cgtgatgacctttacaagattgcggtgtcgaatacttttcagcaccttgcattcagccaggaaactccgctcagcgccgtgctgcaggaggttcagtacttttactgcgacttcctgctcttcatcgcttagtgttcccctgtatactgagccaaagcttccaacgccaatgaggttagctgtagagaagccatcagtagacctactcagttcagcatacgacagtttcaattgctggtccatcaactttggaacaggaggtgtctcattactct

SEQ ID NO: 30146 - DNA, 427 bp, Zea Mays
aaaggcgcaaggcatgaggggaggacgaaggcatggccactgcccaggggatcgatcccccttttataggcagacctcctcgcttgcaccccttagcgtcacgagcgaaatccccactgacatcctctagggttctccccccacgacacggggtgggacccacacgtcatacgagctgatccgaagcatgaagaaggcgaaccgccgcatgcgaggcatgtaaccgtcccgcggttacaagtgctctcccatcttcgcagaaactggtggtcgaaagggtggactgccacgggacaagcatccaactgcaccgcaaccgtgcgccccttcggctccatccacatccggtggaccagcgcaaaggaagcgggcccgcatgtcatgtaaccggtacgccggttacgacgtgcaagaagctacaccgcca

SEQ ID NO: 30147 - DNA, 739 bp, Zea Mays
gctttgtcacgccgaccggggctggaacgggatgcaccacatcttcaactgaatctagtggcaacttcaacggtggttcccagttggttacagcaagtagttcaggggtatgagcaagaccccagtactcaaaaactgttgcaggtattagccactggaacagaccagggtcagtatactctgacaaatggagtgatcagatacaagggtcgtatttggttgggcaccaatctggttttgcagcagacagtcatgaccgccttgcatgccagcgctctaggaggtcactctggtttcccagtaacataccggcgtctcaaagctatttttgcctggcctggtatgaagaagcaggtgaaggaatttgtgcaatcatgtgtcacatgtcaacaggccaaacctgaccgggtcaagtatcctggtctcctgctgccactactagttccaacacatgcctggcatactgttagcttggattttatcaccggattgcctcagtccaatcggtctaattgcatcttagtggtggtggacaagttttctaagtatgctcactttcttcccttggctcatccctttacagctctttcagtggctaaactatatttgtcagaagtctatcggctccatgggttgccagctgctatgatttcagacagggacccggtctttacgagtcacttgtggcaagaactgttcaaaatggctggtactcagttatgcttaagcagtgcatatc

SEQ ID NO: 30148 - DNA, 336 bp, Zea Mays
tggaaatcaaacatgggtcaccacggacaagcgcttcagccgtccccgacgtagacgaaccaacctccaaagacctcatcgacggagactgtgtcttcgccctgcaggctctcaacaaataccaagctcaaacgaaggcctggcgcgaccacgcagtcgtcccaagagaattcgacgaaggggacctcgtactcgtccggacaactcgaacagagtcacggggcaagctggagccaaagtgggagggtcctttcatcgtcaagacgaaggcgtcccccagcgcgtacaggctaaccacgccatccggtgaggacctagagcattcctggaatatcg

SEQ ID NO: 30149 - DNA, 1451 bp, Zea Mays
aagatcaatagtcttctgctgacaatgagatcgagtaaaagatgcatcgacaccaatgtgtttagtaagttcatgcttcactggatcatgagaaatctgtatagcactcaagttatcacataacagaggtgtaggagtgtcacaggagacaccaagatcagccaagagtcagcgcagccaaataatttcaacagtggtagtagcaagagcctgaagttcggcttcagcactagaacgagatatggccgcttgcttcttggatttccaagcaataggagaggatccaagaagaatacagtaacttgtagtagagcaacggtcaacagatcacttgcccaagtggcatcagaatacgcatgtagctgaagtgggctatcaaaagcatagagtaaacatctggatcttgtcccgcgtaaatatcgaagcacacgaagcaaatgaccataatgaactgaggttggtgtggatacaaattggttcaacatatgaacagcacgagcaatataaggtctggtgatggtgagataaacaagactacccacaatatgacgatatcgagttgggtcttctagtggtgtcccatccttcagacgaagttttaaatgaatatccattggtgttgcaactatgcgtgtatcagtaattccagagcgatcaagaatatcttgtatatacttggactgagacagataaaagccttttggagtctgcggaacttcaatacccaagaaatagctaagtggacccaaatcagacatctgaaattccttactaagatactgcttgacattagaaatatgttctgagttgtcacctgtaatcagcatatcatcaacatataatagaagtaaagtgcggccttttggagagacatgaacaaacaatgcaggatcatgttcactagtagagaaaccagcagctgtgatgacagagaggaatcgctcaaaccaagcacgaggggcttgtttcagtccatacaatacgcgacagagacgacaaacgtgccatgagggagtatgaacccccagaggaggatgcatataaacttcatgtagatcaccactgagaaaagcattcttgacatccatctaggagatagtccaagaagaagaggctgcaactgcaatcaaggttcgaacagtagtcatatgcacaacaggtgcaaaagtctcatcataatcaagtccttgagtctgttggaaaccacgagccacaagacgagctttatacctctcaatggaaccatctgattttgtcttaactttgaagacccatttacatgtgatagaaacaacatgcgagggtaaaggaacgatatcccatgtatcagtgcgttcaagagcagccaattcatcaatcatagctagctgtcactcaagaatctcagaagcttcttgataagtagtgggttcaacaattgccacactagctcgtggaaaaccataacgatc

SEQ ID NO: 30150 - DNA, 334 bp, Zea Mays
ctgtcagagccaactaacagtgacatgatggacgtttgctctgatattccggatgtgggattagaagcctcccgagcagcatctcgcgcatcgtcgactttggagggaagtctttaatgtccagaggttggtcacgatcgcccgactcccatggaggtggctgagggtccttcagccttagaggtggctattgcgaagaacccagtcctcaagggtggagctggcggttgcccagcccccgagggtgttgctggtaatgatccggctcaggcgggtagcgcaaactatgacccagcccccgagggtgttgccggtgatgatccaactctgatgg

SEQ ID NO: 30151 - DNA, 310 bp, Zea Mays
acacatatgtaagcttgtgcagtgctggcactctcaaagccatcctttgctgtgctctggctgactcatgaaccactgtatttgcccctgttgttcagtgccttaggtctgagcttagtggagttttctccctgtcctcgagtctgaccggtgttcatcacttgagggacatagctcttgagttcaagtcggtgtaaacccactccacagccacccaacatgatgtattttgtgcatcgagtgccaatggcgaccacagcagcagttctcaccctcaccgtggacatgattcctcggaggttgtctcggc

SEQ ID NO: 30152 - DNA, 275 bp, Zea Mays
ctagccgactcaactcgggttaccaacaggagaatcccttctgcagacttggtgagccgacttgaaatgattctcaggggcaaggtgtccaatgttggtgctccagtggcatactcggcctggaacttgcctcctcccaaagccttcacccttttcgtgtcaaatcctcctgtaactaatggcaatttgggccttagagtgcgaccctctgctgaagaagtcagtgctttggttgcttcgcttggggagattcctgatgacgaacggcaagtcca

SEQ ID NO: 30153 - DNA, 826 bp, Zea Mays
tgagtgatagactggagaatcgaagcaagagcagggtccataggctgaggggtagcaggggcagcactagaactcccagcctcatgatcatgtgagcgtggaggcataggaggcagaggaggaaccccaaaatcatcatcatcatcatcatcaactgttgtagcctgagtgtcgaactgatgaagagctgcatcctcgtcctgagagtcaaaaacaggagcagaagctggcacaagaatctcaggcgcaggacggtaggatccaaaaacgaggcgtgaggcctcaagggtgccctgaaaccgaggaggctgaatcagctgcgcaaagatgtggcacaagtagtgagcatagggcaactgccgacgagcacgaatctcatccaaaacggtgtcctcgatctcacaaatcaggaagtccacaacgtcaaactcagagtgagagaccagggcaccaaggagccaaagctgaatatgtgtggtagcctccctgtatcccatcctcggtagaagagtccatctgataagctcatataaatacttggctgctgtagtaaaatctgccggtgaacgtcgcgacccatctgtgaagggcgggcggaacagagccgcgacgtgagctgtacccggagccacaccgccgtgagggcgacgaggagggtcagaagtgccgtagcagaggctgtgaagacgagtcgtcgactcgggaaatccaaaaagctggcggatctgactggcagtaatggtgacatcctcgcgctcaaaacgaaacctcatccagtgatgatccgggtctatccatacagaggcgtagaagactcgtacccact

SEQ ID NO: 30154 - DNA, 566 bp, Zea Mays
gaggattcagttcaattttatcgtagtttagcactttagccataaatgtaggagttctcctggctattagtagttcacagaattgtgggtgttttgcgcccaactgaacagaatggtaacctaggctgctagctttgactggaggtgttttcttcatagcttgctgtcaggtggttgatagggtgcatggattgattcggccttgcttcatgaaggaagggggatttgcattagctaacattcctgtatactgtcgcattgactgcgtttgtctgtttgcaattagatgaagaacccactgaatctgttatgtcactgtagttgcattcctaaattgtttggtgtttcatgcatgctaccaattccacttgttggttcatggcatctcttcatgaatagttacatatcaagtaaaagattccaggtctcgatatacaaatccccttaaaatcctctatgcatctgcacatgtctcatagtatgcagttgcagggttggcttgattctgtgaactgcggctattttgttacattttaactttgaaaatgctgttaacaacttaacat

SEQ ID NO: 30155 - DNA, 393 bp, Zea Mays
aaacattgaaatggccagagtgcgatcgactgctagagtgtctcgcgagggagacgaggtcgaagtaactgagacgtcaccaatatcagaggtgatgaggcagtcgggtcttgttgtatcagaagaacctgttgccgaaggtattctgactgccgaagctgagggaatcatagttgaagagggaagtggtaatgaagacgaagaagattacaccatcttgatcccagaaaaacctagtcaccttgactttggtagatctactgcgatagcagatgatatggttataatgaaaaaattgggttactttggagaagccgagagtaggcttgttcgttttgctggcgaagaagtggtcccagagccgaaggatgatgaagttattgtgtttaaaag

SEQ ID NO: 30156 - DNA, 392 bp, Zea Mays
cagcaaactctgaggcgctatcatgataaggccatatggcatcgatccttcgcagtgggagaaatcgtcctccgccgaattctaacgggggagggacgacacaagttatcgccactatgggaagggtcgttcatagtaacagaagtcactcggcctgggtcatatcgtcttactcaaatgaacggcatggaaattgggaactcatggaatatagaacatatcaggaagttttacccctagctatatttcaaaagctatggggacgaccttgtattctgtaaactgggaagtatatcatcaataaaaagactttgttctcaaaggcactccaattgtttactgccaacctgcacgcttacttaactcagggtgaccactataccctactaatg

SEQ ID NO: 30157 - DNA, 501 bp, Zea Mays
ccttagcatgtccggtcatcaccggtggtcttgccacggtgaagtgccacggtaaccctgcaccagtaactctccccctcctcggtcgccattctaaaatcaagagccaccaccctcgggcactataaattaagcatgccatcagctctgttgggtcatcacgaagccagagcaccccgctcctgcctccgattagcaaccagagagctccaatttctttctctccccaaatcagttttccgcacgccgtgaaccactgcgtcgtggccagccttctgcaggttagctcaagcctccttgattgatgttctaccctccctcgagttccctagtactcatagaccctttggattgaactagatcgccctggataacctagaacacgtcggtgtgttcttagtttccgccgttctcgtggacagtgagttcccaacccggaattgtgcaattaattgaggggttaatgtcgccaggggttgaattagatgtcagccgagtcag

SEQ ID NO: 30158 - DNA, 294 bp, Zea Mays
agatgcaacatcactaaaccacgttcgaaccgtacatacaatacaaaaatatctctagcagacacgacagaacacccccgaatgcgccctcggacatatcctcgtggagacctcatcaccagagtctctatagtggcccatacactggaaagtacgagacaataccccataccagacgtatacctacgcacgcttgatagtgacgcaaggggcatgacgaaagatgaagcagtactaaacacaaccctcaacctcgctgtaagtccaccttgcgaggcccgccaggtaccgcaa

SEQ ID NO: 30159 - DNA, 324 bp, Zea Mays
ctacatctacatggatacatcagatggagtcatggagacccccgattcccagagctgctgctcgccatctgcctagtgtgagtgctccccatccctcctcatagattgcttctctctctcaatctccagatgtgccaccacccaaaacttctccctcctgctttttcctcactgctctacaccctcagatcaaccattgctgcagtccccttccatttgactgtgatgcagcaccggagacagcagggatcgcaacaattgccctctaccctctcgttctcccttcatccctctctttcactgatttttggtcgtggcaacccg

SEQ ID NO: 30160 - DNA, 418 bp, Zea Mays
ggcggacctgggagcagctagccacgaggaggcggttcacggcggcgtagtcgaccgaattgggggaagaaagaaattctttcgctatagtgactaattgaaggtgggactgggtgctttggcttcgtgataacatggcgcaacagacccgaccatcaatttataggattgctaagcggtggctagtgaatttggattgagcgcggtggcggtcagagaagaaatgagtcacgggcatggtgattcgtggccttcaccgtggcggcctccccggtgatcatcggacgtgcataacactggtgattgcgacgtggtaattgctgaggcacgtggcgttcggtcgacgggctgccaactccggtgacttatccggaccggccgcaaagcagaaaggagcacgacggctagccggattagt

SEQ ID NO: 30161 - DNA, 313 bp, Zea Mays
cttaagtaacagagaacctaggaaaaataaaaggacccctagtccagaacagaatcaaggtgaaatgttttatttagcattattccaactagaaaacaattattagaattatggaaacaaatccaaaattgttaataaaaatccagtggacttataaccactagaaccccactacaaaaatgataaccaccccagctcatcattttatgtagggtaaacaaataaaacttgatattgggtcctattccaaataaatcatgagcaacccaaaaatagtgcaataatgggtaaataaaattatactagatcaatg

SEQ ID NO: 30162 - DNA, 311 bp, Zea Mays
atgagtcaaaggataaaagataccagttggtgggtcctatgggtgcgctactaaaactttctagccgaagctgtgtgcaggtccaggtcctagttgagactacctcctaggggctgggtcaccaattctttcttaggtatactggtatccagcctcgacacatcgagcctacatcccagggggctaagtaccagggagaagttggtaacgctacacacagcaaggacaagtagcatacagataagtgttgtttgattaataattctcaaaagtatcttacaaaaccaaaaattattacaagccgcactcca

SEQ ID NO: 30163 - DNA, 443 bp, Zea Mays
tttttgggtttggccggatactacagaaaatttgttcgtcactttgcagtcgtggcaaaaccccttaccaatttgttgaagaaaaatgctctattcatttggactagcgtgcatgaggatgcttttactgccttgaagtcggcattatcctccgccccagtcttacagctgccaaatttttctcttccctttgagttggaaactgatgcttcagctggagggattggggctgttctcagccaaaaggggcaccccattgcctttgtcagtaaagctttgggcatcaagaaccaaggtctttcaacatacgaaaaggagtacctgacgattttaatggctgtcgactagtggagggcatatcttcagcacgacgagttcatcatatacacggatcagcgaagcctcgcccatctaaccgagcagaaactgaacaccttttggca

SEQ ID NO: 30164 - DNA, 321 bp, Zea Mays
caaaaaacattgtttaaaataatggcatcaaaacgatatcgacaaatgattacataacttttttatattgacgtaaagaccataaaactgactaacctgccgcctggggaagaatatcatctgattttgtagttgttttctgcacatcataaccatcttcattgtcccccgactcagcacggaggacctcatcaattaactcaccaaaaatatcagatatattgtattgtttctcaacaatctgctgaagagtctgtttaataactgaacacgccttaccaacctccgtatcataatgtgacaacttctctatgaaaccca

SEQ ID NO: 30165 - DNA, 478 bp, Zea Mays
atggattgaagcgcaggttgagaatgctaaacagcaggctatactctctatattgaaagcacaagtgtcatccgacgaggctcatatacatagggatatccattctcttaggtatatgttatgctatgtttattgatcctgactaatcagttttccagctttgtaccatatacgtaagttatatagttatatgcataactgcaaataaattcctagagcagaatcaaagatttatctaattatcttataagccctcatgtatctatggcatttgccttcaggagaaaaggttctgagcttgctggagagctctcgacactttctcaaaaggtgcaagctttggtatctgaggtgtgtaagacacaatcttatctttataaaatatattttgttcctgggttataaattagtagctcacaagtcaaatttaagtttgattgtcggggtattttttgtgcttttgggatctggaaatgtc

SEQ ID NO: 30166 - DNA, 432 bp, Zea Mays
attaatctgcttagctaataaatcccccaaagtaacatgattcataatcatctgccttgtctactattctctcttacaataagtttctaactcagatggtcaacaccaggaagggtggtggaattgatctacctcccaatcgacacacttagaggatatttagacaaccccagccacaaccagcagagatggaccctccaccaccgcctccaccagtcggagctgacccaatggttgcagctcagatgaggatgatgcaacaaatggcagacactatggcagatatgcatgctcagatgcagtaggaacgccaggagatgcgccaggagagagaggagatatgccgggagctacgccaagagcgagccgagaagagatacgccaggagagaatggcgcagcagcaacaacaaccgcaacaatcaccactgcc

SEQ ID NO: 30167 - DNA, 314 bp, Zea Mays
gtcgatggtctgtggcgatggaggaggaggatgtggtagtgtactagtgtccaaggacgtcggtcctttgtgcaatttttgttggttgcggaaagctggaagcatcgatggaggcgggaggtttatgcagcaacggaggaggtggtcgtgtccaagaacgtcgccatcgacgcgctgtcagcagcaaaggaccgtatgcttgtgcaagccaaggaatgcagcagcaagaccgaagacgggaagatgaacgagaaaggtgcagggcgaatctggcttgggccgtcgggtctccaggcccaacagttgttacctat

SEQ ID NO: 30168 - DNA, 564 bp, Zea Mays
gaagagcacatttcaaatgagcgacctgggattgctcagttactacctcgggctggaagtaaagcaatgcaagggcgggatcgccatcagccaaggggcgttcgctcggaagattgttgaagaagcaggcctgaagaattgtaatccaagtgccacgcccatggagacacgcccaggactgagtaagtcgagtacctgtccagctattgattctactgcatacaggcgcatagttggtgctcttcggtacctggtgaacacaagaccggacatagcatttgctgtgggatttgtctcacgttttatggagaagcctactaccgagcatctgcttgctgtgaagcgagtgctgcggtacgtagcaggtacttcggactatggctgctactatcagagaaggaagaaaccagcaggcttgaccgggtacagtgacagtgaccatgcgggtgttgatactcgcaagagcacgacaggggtggtcttcttccttggtgacagtctcattacttggcaatcacagaagcagaaaatagtggccttgtcaagctgcgaagctgaatatat

SEQ ID NO: 30169 - DNA, 428 bp, Zea Mays
aacgatccccgggtgaaaagatcccgccgtggatgaacttggagcacagtagctgctctgtcgctcatccacttgccagcgacgtggtcgtgcgaccatcattgtcgtgctgccgtccctcgcgtttaagccacaccgtcagccatcttaccacgtcgcaattgatcacaatacacatcccttctattgcctaaggccttgccacggtaacagccacggtcaccgcgcctgtgactcagtccctctctccggccaccaccgtgtcatgccaaattcaagagccactgccctcgggtcctataaattgagcgtgccatcgactcctctacatagtcacgcacccaatacaccagcccgtgcctcggatcatccaccagagcgccccaatttgagatttcccccaaatcggtcaagaacaccgcgtgtgt

SEQ ID NO: 30170 - DNA, 415 bp, Zea Mays
caggccttcgtttgagcttggtatttgttgagggcctgcagggcgaagacgcggtctccatcgatgaggtctttggacgttggctcgtctacgtaggggacggctgatgcacttgttcgaggtgacccgtgctttatttcttatggagtcatggcctccgatccatacagtagacgaaaaggagtgaatcccgtcgtccggcattcggtcgtgctcagcgcctagactgcttcaggtagaaggtcggcccatttacccttgctgtcgtcgagtagccttttcttgatagcagtgaaaatcttgtcgttggcgcgctcgacgacaccgttagattgcgggtgatatactgaggcgaaggcaagcttggtgccgatggagaagcagaagtccctgaagtcctagctatcaaactatt

SEQ ID NO: 30171 - DNA, 1470 bp, Zea Mays
gttgtaccagcagaaggttactgttccatgtacggcatttgtgcacaacgaagtgacgggaaggtcttaaactgtgcaaatgcaaccaaagctgttaaggtgacaaactgacaatatgatccttggaccttgatttgaatataacatagttaaagaaaccctatatctttgaaaaatatttatgattattcaaatgtggcctgtttagcaagtgttttattgtttttccagccagacacattgttttcttcaaggatccaaagtttgtgcccaacaatcactggcgatgtctgttgtactgtagatcagtttgacacattacaccaacaagtccaacaggtaaatgtgctgattgctgaagatgtacatggaccatgcacttttaataagcaaaccaatgtggtaataccacttatgtttgatataggtcaaattatcaaccagaaaaggcacattaatgagtgcttatcattcactgatcgcagttaatcttcagtaaagttgtctttgcagtgtatgaatatatatatgtatatatattttgttttttcaagaagaaatgtttggtgaatctgtaaccagctaacctgaaccttcttattttgttagtgacaagttcccttttattttacatgaggttcatgtttgcttcataggttatatcctccactcctttggtgctaatgcatacttctatctaccatcatgtagagcctctgtcaacaaatacatttacctaattgttgattatttgtttgttgctggtctttgtcataacatttgcactgtatttcctaatagacagtgctgcagctgtttggttgcatttttcagtatactattttatattaaatgtgaattgatgcctattttattgtacagtcacaagcctttttctctacaagttcaatgaaatttgaatatatccacaatgagtttctcttagtcaaatgtcttgattatttttttgcacgccaagtgatctagtggctccttggtgacttctactctagatgtatgttcaatacaaaacctcactccgtggtctgaaaatgtcaacatttttcaggccgttccgtttcttgttggatgcccagcatgcttgaggaatttcttgaatctcttctgtgagatgtcttgttctccaaaccaaagcctcttcattaatgtgacttcagtaaagcaggtcttttcttaatccatctacatcgccaccataaaatttcttagattgtaccagccccatttcataaagttttgtgcaaccatatgttgtcatttatttgcttaaactgctagctcactatgaaaacacattcgtaaatactttgtatgttcaacttttacaggtgcatttttgtctcttttgcagattaatagcactatgactgttgatggcatagattactatgtaactactaactacggtgaagagctatataactcatgcaaggatgttaagtttggcac

SEQ ID NO: 30172 - DNA, 334 bp, Zea Mays
accaactcgagttacctgctagtctatcggatgtgcataatgtgttccatgtatctcaactgaagaaatgtctccgtgtccctgaggaacagttaccaatggaagagctcagtgttcatggtgatttgacttacacggagtacccgatcaagattttggatactttgactcgagttacgagaaataaggtgataaagatgtgcaaagtgcaatggagtcaccacggagaagatgaagcaacttgggaaagagaagaagagcttcacatagattttcctcaccttttccctcgttcttcctaaatctcgtggacgagattatttttaaggggggg

SEQ ID NO: 30173 - DNA, 374 bp, Zea Mays
cacgccatggtgaaccaccacctctggtcacgtgccaactcaactagagccaccactaagatcccttgagttccctagggctctccaaggcctcagccagagctctacctcaccagaaccgcgcaaccatcttcgccagagcacggtttccgccggtgaacgtggactcgcgtccacagccaaccatagtccaattccttcaagcaatcatctcctcgacaccccgtgaagtttccccactggtggaattgaaccgtaccatcaccgactagctagaacaccgccaccgacgaactccgaccgttaggagacgtaggtcggacacctccgaccaccaccagccgccatctgaccaccgacgtgttcaccgaagc

SEQ ID NO: 30174 - DNA, 294 bp, Zea Mays
ctggttataagatatggtattaacaatcaccatacgaagaaagtaggcacatgccttgtgatcccaggaggcaagttccatggaagcgacattctagatgattattgtagggtagaagtgacgatggtcgtccaaggatttgaggatgatatgctagacatccagatatccctgggaccgatggtatcgagaaacttggataagccatcaagaatttcatcctttggccttaaagggatgtcgaattgtttgatccaccaccgccgtcgacatcacatctccaaccatctccgc

SEQ ID NO: 30175 - DNA, 843 bp, Zea Mays
aagattcattaggcttgtttaatgcatggagacttcggagaaaggttgatagtcccttaaccaaaatgggatgacctacatttatgtcacaaagatcggcatcatcatcaagtcacaatgatcttcgtagcataggtcattcttaatcttctaccgcactacaccacaatgtatctcgctacaaacttactttgacatgataattacaactttgtggcaattgcaaaggggattcaactttgggccacattaggtaagcctcaacatggcaggttttacgacctcatccatccttagaccttagtccacttgttatagaagttgacatctttacttactacgagaagcttgaatatcccaactatggtggcaaagacaacttaacgaattcaattgacccaaatataagtatttttccaacgatagacaaaggaaggcaacaaggtcctctttgttgcatacacatattgtcggcaatacccaacagtggtacattaaatagggaattgtgtgtatactctcgaaagtgtggtttggtatagaacacaacgcacttgtcaattgttttgtcacaccatgaaaatgtggatttgtctacaacacatgacacaaattaaaaatatttctacccgtgagagagagctaggtcataccacctatcgaattataccattagagcagtgcgctcgaggtctccctttgtctgtccatgttcgaatcctactacaacttattgcaatgaccaggggtgtcaacactatgtggtttgagttttttaggttggttgttaattaacattatgcccttaaaggcaaattactagcaattcatcgatgttagatc

SEQ ID NO: 30176 - DNA, 327 bp, Zea Mays
cggttggatagcaggggccttggctggaacaacattgttcagggccagaacactgtctaaactatttagaatcgaggcgaaaacattattaagatccacagtattagttaccttgcacttggaggcatcaggttccttggaggtttcctggttggcaccgtcaacagaccctggcgaggcacccacaccagcagcaagctccaggtcgcctacctgcggccagacagcagaaacagcagggtctgcaaaagaaacggtgctgccctttctcttgggcacccagcagcgagttggcgtggcacccacaccagcagcaagctcccggac

SEQ ID NO: 30177 - DNA, 559 bp, Zea Mays
gattgtctatacttgatgcccacacagatgttttcccccttattatgtgatggcccagatttcagaagaaaaaacactattttggtcgctgatgtatgacttttgtgatataggtcctagaaatagtcaatgacagaccaagggttttgaaggagcggagagaattatatgatgagatggaagtgttggactatttgtaaaaccttgagaaacttatgtaagcactctttcatctcaaccttgatcattcatacatgaaaaaaatgaaggttgccatgcatgctggttgtgcagcatttggaatatagactgtctaccaaacttattctgttttgttcttgagattttttatagttattttgatatatgaaaggtttctatttacattggaatgacatcataaattcaggaatatttttctgccagacaaaaaattcttagcagaaataatcatgtgactgcaggtacataatagaaaacattaattgtcctgagaatcatcgtttcagacaatttgagtgggaatactgtacgcaacatgctacagagagagagatat

SEQ ID NO: 30178 - DNA, 569 bp, Zea Mays
cttcttgtggccttcctgctgctccaaatgcacagtcttccccttgacctgcctaaaggggcgtggagggtcctcgtcatctcctccccctggcgccgacacattcttcgtacgcgacatcctgacctgataactgcaaatgagagagcgaagctaagcacaagtcgataatggccgataggatgtcaaaagaacaaatagctacctggaaatctcacacgcgaggagagaatccaggcagggcaggagacggctcatgggcaggcacggtcactgaaatgatagaagaggtgagcacgtattagtcacatagtcataagtatatgaaatgtgaataaatacatacacagagtattatggcacagaaaacgagagatatggcgatcgagaggtcaaacgacgcgaaaacggcgtttggacgagaaatagtgccataggaggtttgaaattcgaattgaggtatgaaatgacgtggaatagatccgatacttcacgaataggtttatatgggcaaatatgagtgaagtgtgtgcttggtttgatttgaggcgaagaaatggaatttgggc

SEQ ID NO: 30179 - DNA, 441 bp, Zea Mays
cgaactcactgcgccatgatcctgccctgtttctggccgccagctctgcccaaccaaattgagcgccaccgtcgatgccctctataaattgatggccggggcagctgcgctatgtcatcgtgaagccttagcacccgctcccacccttaatcgttcacccgagctctggaatttcaaacttcacccaaactagtctccgccaccgcgaagaacagctcaaccgcgaccagcccaactcaggttagttccagtccctctgctgcttgttctagcatccttaggtaccccgcaaacccctcgacccctttaattgaactggatcgccagggatcaccgggaacgcactcatctgtctgccaccccctcggttcacgtggacagagcttggtagatcaccaaccgtgcgattaacttaggggaaatgctcggagtaggtctgat

SEQ ID NO: 30180 - DNA, 365 bp, Zea Mays
agttgtgagcttgtgatctaccatttttaggtgctgatagggtgtctactaataattggcctattgtaaaatactgaaactattatgatctctgttttgtatgctccttaataggaatatttgtaggtcatcagattacatgttgatattttacaaagttttaagccagagtatatactaaggctccgtttgtattggagaaattccaaagggaatttgtaggaatcacaaaactgaggaaaggaacttagggtgtgcctttggaatactgtaagggtcaattcttttcctttggaatactgtaagggtcaattccttttctttggaatactgtaggtagatgcccacttcacagcgtctaaacg

SEQ ID NO: 30181 - DNA, 494 bp, Zea Mays
cacgcttcgcctgcccgcttcccctacatcgacctctgccccgcatgttcttgcagcggccgcctcttctgtgacttggcatcgtcgtctcggccaccctgggtgtgatgtgatgtccaagctctacagtagtacctctgtttctggttgtaggggatcttttgagcacctctgtcatgcttgtcagttaggtcgccatgttaggctcccattcccccacctcctcttctagggcagtaggcattttttatctgatacactgtgatatatggacatcccctgtaatcagcatttctggctataagtattatttacttattctcgatgacttctcgcactatttgtggacttttcctttacgtcagaagtcagacacttatcccaccctgtctcacttcttcgcttgggtatccactcagttcggtcgcaccatccggagtgtccagtgtgacaacgagcgcgagttctataacaatgtgtccagtgactttttc

SEQ ID NO: 30182 - DNA, 309 bp, Zea Mays
gttgtggcgaagagcgcagtaagcacctcgtcccgctgggcatcctcgtgctcgaggcactagatgcgggcgtggatcctaaaagagatccaagaggggcggtaggaaagagacagtgtagagatcggcgttcgagtggaggtagtcgccgatggagagttcgatgatggtgcaggcatccttgtcgtacatctctcgtcactctctataaagcatcggatcaagacccaatggtctgacggtcaccattttatagggtccaacactcctataaaaagaacagtagctgctacagttgcaatatttgat

SEQ ID NO: 30183 - DNA, 425 bp, Zea Mays
gggagatcgagaactcgggtatcagtcacctgagtgggacctcaaggacgtcttcgccggagattccgactccggagatgacagcgaccgccgcaagaaattgtacgtcatgtacggcagaggctgggaacttacctcccgcaggaacgtcaagtccctgcgccgtgaggtcctatcggtaactccaggggtcccgaaggctgctccccaccaacgatggaggagcaccatcatctccttcggggcacctgactgccccaataacatggcaggagccggcatactgccgctcatcaccgcccctgtcatcgccaacatgcgactgcaccatgtgttgattaacggcggggcaggcctcaacgtcatcagccatgctgcgttcaagcagctacaaatcccggagtcccgactgggaccctcgcgcc

SEQ ID NO: 30184 - DNA, 532 bp, Zea Mays
ctttcttcgtgtagttcccaagaatttcattgcacattgtttctattagctccaaccattcagtgcagggtgtgctgaatcttttttggaatttaaactggtaagaaagtcgtacaagttcatactttttcccttcttcccttttcttcggcatcccccacccaccagaagttggaaacattctgtttaccagatattcttgcaccaagtccctagtgctaatatgttctgccacgactctaaactcgacttcggccagttggtagggggaccccagctgcatattacacaagggtcgagtcatgccgaagctcaattttaagggactcatcaccatagtcataagcttttccctcttcttctcgtcagccttcgcgtaaaaccattcatttgtccacccggtcggccacttagtgcagtaaccaatcacagaagccttggtgtcttttcggtatgcaaagttgtagcacccaaagttcttgtgcagaccatcagacctagccttcgtctgataatggagttcacgcacccg

SEQ ID NO: 30185 - DNA, 2042 bp, Zea Mays
tgatcacggcttggttcggcatctcggaggttcctattaccgcggtattgtattcaccaatgctactcattctacaagcatttactttttaattgtgctttcacttaaaatgtaattttgtcagttcacagtaccctgtactaccacactagcgaaaagggttttgctcttctttgagtgatggcatttacttgagtatgtagtgtacacatttttgtttatgtttcagagagatttattcatcagtgcttcacgtatttgattctgctagtccttagcttaaaacggtattgctgtttggaagttaatttgggaagccgtcctggaaaacgatacttgcgagctctacggcgatgcacaagagtgacatgagtcacatgaccacctcatcttccactgtaccgtcgcccgctccttctgggaacacatcggctgggcggctggcaacttgaccacttgccacccgtcaccccggctgtggcctgtgggagatgcctagtcctgcacacgccccttcagaaattttctcaaccttgttgctgctatgctgttggtggcgtatataaaaccaccggaatgacgtggtcttttgtcactagcaaccttgcctgcggagactcttagtggcctgcagagatgattgtcgtctctggcgttatcggctgcgtttacatgatagctggatcgtcgacgattggtgtcaattgtttgtcatggcctacaggcctagtcctcccctcacctctgcattgtattcccatggatcccaacccaaaacaactgcaggtgcctatgaaccctccatccctaacataccagcatcaatagaaagtatttagggaggggggggggggtatttggaatttttatttttggaaaaaaataaattcgttcgcactagtctatttggcttggaatttattattccgtaaccttttgaagttcacatacaagcttatcttaaattcgtggggtgtgatatgaaaattgattacatagattcttctgctatgtttctatgctgtaatttactgcacactcttcatcttagcttcctgtagcagaagtgaacacataagtatctcctccatatgagtatatgaccattgatgaaatacaaataaattttgcatagaactatattagcttaattcatttatgcctatattatgattaaggacagacccagtgctggcggctctcatgtaagtggagccttttttcgataagaagcgctgtattaaattcaagagttagcatcacgccgatacaacatcgaagagttcatgcccgacctctgcataactagggtgcacacaacctgatataagtggagcctagagaaggaataatcaagacaagtcttaaccctgcattttgcatagaggttgcatcaaacctaggaccttagtagaaagacttctcattgtgtcaggcctatcattctgtgcttaaactatggttattggtatgaaactcattccaaggacccaaacggtacctacatgaaaaagaagaacaatttccatctacattctgtacaacgaattgctttcttttgctactactaattttaattttgttccatgattcctacctcttttcttgtagaaaactgttagagatgagaaagaagtccttaaagctgttgagtatgtgcatgaattgatagacaaagaagtagctgcgggaacgagcccgtcaaacatattcgtttgtgggatgagccaaggaggtaaatcaatgagcttaatctgcattttatttagtattctaggccataagatagtaccaatacagatacttctgtttattttcgcaggtgctctagctatagcgagtgctctactctacccaaaaactctgggtggctgtgctgtcttcagtggctcagttccgccgaataaatcattcgccgataaggtgtcacctgaagctagaaaggtaataagctgcagctatgcttatgttttcagaactgcatcttgttgactcttgttacctaaatacgaactcttgtttcagacaccggtgttatggtt

SEQ ID NO: 30186 - DNA, 424 bp, Zea Mays
atcgacgtcagcatcgtcggcaccagcctttcaagcacctgcacctggaggcgacgaccccgacgactccggagacggcgatgacgaggacgacgacgacaaagacgatggagaagacggacacatcaacgaggaagctgactacgcccagcaggaccacttcatggggattggtccagttgtcgaacattacacatcaatgttcgagacaggacacttcccaaacctgctgcaagcagtgctgcacgagctaggagcctacgtccgccccctgtacgagacgaggcgagtgagcgagcctccccgggcttgctattacatcactcgcatccatgtcagggtaatggatgcaggtgacaggggattcaggactctgtctgctcacgagtccctgataccgctgtccacctacgctgcctcggtc

SEQ ID NO: 30187 - DNA, 719 bp, Zea Mays
gtagccggttcttcagccttctgcgtaggaggaatgggctcctttggttcagcagctgaagaagtctccccaccaaactcatgcaccacgaccggctcaatataacgtggccggtgggtaaggactttcaactttttgctcttcggcgcaggctcatctggagtggccgaagcagcaactttcctcttctttccccgtccccacagcgtgtagctgtagtcggggtaaacaaaaccaatagcatcaaaaactctattcaatctcttttttcctcggcccccgaaggatgtggataatgcattatcttctgctttggaatatggcccaagcaattcatcacttatagattcgatacatttcagccagtcgtcatttggttcatcaaatttatctccatatctgaaggtgtattttagtcgaaccaagtcaccttcgctagattcggtgatagtctccgtcgccatctcccaatcctctacaagcagccatactctgaaagctatatgctcttggattaaatctcttgtaccaatgaaaaaacagacagtacctaaggctttctggcatgcttcggcggcttcatcgatttcaacctttggccttcgaaggctgaagcgggaccaaatggggcgcataataacctccttaacatcctccctcgccactaagtcgttcttcacataaaaccattcttccatccaattccctggccacctctt

SEQ ID NO: 30188 - DNA, 416 bp, Zea Mays
ggaccaaccaaattatataagcatgcgggtgcggaagccgatgaattatcctgtttgagctcgctactctgtggaccgctagtgttcattgttcaaagatatgctcatttaattttgtttttaataacgtgattgaggaatgtgtttttggaccttcaacataagccttcatcagtttcgcggtctgagcatgttatggaaaaatgaactaatctcatgaggggctactgttagagaatgcctttgctaaaggttctccaaactaattgatactaacaattatacagtctgtttcacggataactaatctgtgtttgaagaaggatgccagcacaagtaataaaattggaggaagcttaggcgctcacccaaagcacgtcgtccaggccgaagcagctgacatagaaacgaagaag

SEQ ID NO: 30189 - DNA, 323 bp, Zea Mays
tgtttggatgtagtctgcttgacccagcatcatttctactcaatcccatgctgtgacaccatgtgttcggttatccatcacgcttgaagcatggaggagctcgtttggtagaggctgggatggggtgaacctagccaacatcacgaaggtaaccaacctgtccaagaagcaattcagctaagtataactagctgaacataaaagcacacattggtagtcacaagagataagatgctgcttcacatagataagaggcatcctctagtttgcattgttattgaggacacggtatagtgtatgaggaacaaattccatgataaggg

SEQ ID NO: 30190 - DNA, 557 bp, Zea Mays
cagacgcggagctccaaactgagatgacataggggtagtcggtgcaggagtaggcgcagccagatactaaggaaaaccctgcaccggcacgaactgagaagtcccaggcacatcaaactgctgctgaggaggtggaactgaaaattgctgctcagcgcttgacatcatgttgatagtgccctgagaagaggaggaagtcattggctcccatctgagcttcccattgggattcctcctacacaccacatccttgtggtcttgactgcagattgaacacctgccattccactggcactctgcacggagatgcgcatcaccacaatggaaacacaccagccccagcccgggcttaggaacagcccgaaacctctgagtacttcctctcgaagtacccgagtcagaggatttgccacgatagggatggtggcgctcatgctgagacttgcccctcttgtgggttggacctccagtgttgcccctcctcgcgtcctggccacgaggctgatcaacacccgaagacttctgcgactccatggtatactggtgttgcatctcca

SEQ ID NO: 30191 - DNA, 271 bp, Zea Mays
ggggaagtgagcaattcgggggctttggtgaacaattgaaggcaagtgatggtgctttggatgggtaattaccctacagagctcatggcatgctcaatttatagagtccgtgagcggtgttgtccagttcgaagggattgagctggcggcccgagaagggggtgagtcacggtggtgatctaccatggcaatcgcagggcaattgagctacaacggttactggatggtcactacaactcatgacgatgcgataaacgacctaaggtgtggc

SEQ ID NO: 30192 - DNA, 296 bp, Zea Mays
tcagacttgaaataagatgaaaaacagtacaaatctaaatccaaacccccaaaaaagaatcattttctcgatttctgtaacaagagcatggcaagacatggattcatccaccgagcagaacaaaacatgaactgaagataaagaggttagctatggattttggcatacagtctaaattaacatctgaaaaatatatggccgtaaaaactatagaacagaaactgcaggagcatggtcactggcatatggcctgcagtctagcgttgcagtgcctgaaccaaataccagaacaaaac

SEQ ID NO: 30193 - DNA, 402 bp, Zea Mays
atagcagcttcttccgcggccatattcaaaagcattttatccatatcagaaaacgtgccctccagatttgtatcttcggccgttgcagcttcggcagttgcagcttcggcggggggagcttcggtagctgtagcgtcgacagctcgtgtttttgacgccgaggccggcggtggtgtttcttcaatggcttcaatcacagtaataatcctctgcctttttggcccagcagacttcttcgctgccaagagctcccccttcttctgtaaaagcttcgtcagatgtggccctagtggacttagcgtgataggcagggattcagtcattacctttaaaatttcttccacgtcggtagctaaaggtgttgaaggagtctcttcttctatttcagttgtttttggcttc

SEQ ID NO: 30194 - DNA, 468 bp, Zea Mays
gttatccctatggtccaaacaaactacttggactcactgtcacatactcttttgagtgaaaattccaagtcatctcaacatagtgaatgtttcgcttacctagagcatatataaatctgttttggacctgtgtctgaacagctttgcaatttagttaccatgcccttctcattattctgacttctaagtataagggtataaaaattcagcattttcagcttatctggatgcactttattttggtctttgtaaggatcttttgtgcttttcttttggtagttggtattgtccttctgggctactctttttgctcggtttgggtgcttccccgcacatggcaggctctcggccacgtgcgtgtcgacacgtgcggtaggggcttcgggcccaaaattttcttcgattcaacaaaacctacgtggctgcgttacccgcggtccgcgcttccttgtcagactctgtctaacc

SEQ ID NO: 30195 - DNA, 385 bp, Zea Mays
gcagggtaaagtgtggcaaaggaggaaacgaaacacgggtggacaagttggtagaatcgtctttgctcatccagctgagggggagcgcttttatcttcgacttctcttaaaccatgtgatgggtgctacctcctatgcggatctaaggacagtagatggtgacacactaccatcttttcgtgaggcagcacaaatgaggggactgcttgaagcagacgacacaatagatgagtgtctcaacgaagccgctatttaccaaatgccgtcagcactacgaaggttgtttgcaacaatactggtatactgcgagccgaacgatgtggcagaattatggcagagacaccttgactcaatgtcagaggactatcaccgtagtactcaaagc

SEQ ID NO: 30196 - DNA, 592 bp, Zea Mays
tgagattttgatggatccatgatattgtagatgtatcatgtgcgacctgtcgctggccaagcaaggcaaactcttggacgttgtccaggcgagcactggagcagcagcacctcacccaacggtgagggaggtggttgccaactactactcccccaaccgtcatcgccgatggctcccatcatcggtcagaggaagaggagttgctgctgcaaggcagattgtacttcggtcttacgatcatgatgaagcgcactgcgtggcagcggtagctggtgcacggcaatggtagcatggggctcatgcttgacaccgactgtccatgatgcaaagggacgactaatcgaccttccttgacatggctttggctccgcagcctcatgacaggtggagggcatgctcgttatcacttaaacggctacacaacatggtcacctgcttatgcaggatactaaacgggtggcaactctccgttttgtttggtttaaggttaaagtaggatgatacggggtgacactgtccccttgattttttagaatatgctgtcacaaaatttacttcggtatttatctcgttttcacgtgactgtctcaac

SEQ ID NO: 30197 - DNA, 337 bp, Zea Mays
ctcattttcaatttcaaacctcctatggcactatttcacgttcaaacgtcgttttcgcgtcgtttgacctctcgatcgccatatctctcgatttctgtgccataacactctgtgtatgtatttattcacatttcatatacttatgactatgtgactaatacgtgctcacctcttctgtcatttcagtgaccttgcctgcccgtgagccgtctcctgtcctgcctggattctctccctctcgtgtgagatttccaggtagctattcgttcttttgtcatcctatcggctgttatcgacttgtgcttagcttctctctctcatttgcagtcgttaggtc

SEQ ID NO: 30198 - DNA, 394 bp, Zea Mays
gcctcggtgttccctcggatgtcaggttgacgacaggatcctccttgtcactgcacccgctgcccttcggtttggcctggttagatccaccttgtttcttgcctcctcctgtcaaggatgactcaagggtaagtctctggcagtactttgacagccactcctcctctaacagcatgaggtgccctatcttttcgttgatggagtcgatctcgaatcgatcttcaatggcatgctactcctcatttaggatgagacacccccatcttcttggtgatggagtcgatctcgaatcgatcttcagtggccttcaagcttccgaccaagtcttccaccgtcaatgtctttagattgagtagaatctcaatcgagaatgcgataagggagtagcgcttcg

SEQ ID NO: 30199 - DNA, 483 bp, Zea Mays
aaaagttcccggagctttggtcttttgcctctatcaaagagattagcattcgtcaagctcggttggcgtccccgaatgaaatgttccatatccccctctctgctgaagctttcgagcaacttctctcacttcaggacgtccttggtaatatacagttgcttgatcgcaatgattgttggcgatgtaatgcctcttccaatcggttttcttctcagaaggtctatgctcacttgactggcacctgtcaaacgctccctctcttcgtttggttatggaaatctaaatgtcaacctaagcacaaagttttcttctggttattgctcaaaaatagactgaatactcgctcccttctcaggcgtcgctcaatgcctttagactcattcacctgcgacaactgtattctccagattgaagaaaggcctattcatcttttcttcaggtgcaactttgctaagagatgttggcttcttttgggtttcctcc

SEQ ID NO: 30200 - DNA, 294 bp, Zea Mays
ctggattccattttcaccggtgagctttggccggatccgatccataaacgcccagtagctgcagtgcaacagtgttggattgattgggtggtgcctggtgctggtggtactcgggcaggcctgttcttgcagttaatctgtgtactctctccacaatctttttccttcctgttcttgggcttccaagaaggaaccgcacgtgggatgctatgcaaaccgatcttactactactgcagtgccactcactgttcactgtcaagaagactctcatctagctcgcttcatactacagc

SEQ ID NO: 30201 - DNA, 341 bp, Zea Mays
gaaaccttgaaggtgacacctggagatggtgcgaatgtcggataacaaagggtgctacgatgacgaaagcacgaagacattgccgatgatcgagatatatctatcccgagcagacccccgggagggcgcgaagactaataagcccccttcctagctacgaccggatgcgtcctagacctctccacaaggcctcctcacagtcagagcagaggcccaacaatgaagactcctagagcgaaggcgtacaagacgggccaaagaggactaagtgcaggaggttgaaccgagctggggctaccccagccgcaccatttgggcccgcctgctagcctcttgagcgg

SEQ ID NO: 30202 - DNA, 992 bp, Zea Mays
ctcgccgagagggttggagcggatgggcggcccaaaacggaggttgaggagttctgaaaactggcgccaggacggtgttcctccctcgttctggatctggatgtaccacatctgggcgccgccttctagattatatgaagccatccagacttgttcctctgcggcaatccgctgttgatgaaaataggattcgcatcggttgaggaaggccagcggatcagacttgccatcaaattttggaaaatccaacttctgaaaacgcggaggtcgttcaccctgatggtcagtgaacctcgagcccgacggaatggtaccgcgctcacggcgcagctcccccacttcggcctggagggtggtcaggctggtggtcagctgtgcgatgagattggccaggtcggcgttggtgggattagccatgggtgtcgctgatgatgaacttggagaggaaggagtgttagcagtggagtggtggtcggaggtggaagaggatcgccgggatcttgataccaagttgtcaagggcctcggtccctaagctgggaggtccctgactacgtagttcgtagttgggtagatgtggtgccagggctgtttcctggtcaccgaagcaagggggatgagattgaaggctagaacaggtgagaggtttagataatacttctttcttgatccctccttgcatactgcttacatatatatataggagatagagcctgctggctgttagtctccaagactcatgttcagaccacataatggtctaggctttcaaacttcctgctaaactcatgttcacaccccataatgatctagactttcacacttatggcccttcggtcacctcctgtcccttggcgccctggccacctgtgctggcctcttcttggtgtctttggcgccggctgtactgccggccccacatgacactttgtagttacagacttgtgtaattcggacttgtgtaatttcagacttgtgtaaattgtggcttct

SEQ ID NO: 30203 - DNA, 410 bp, Zea Mays
atgggacccttcggtcagtgagcgcgctgaggaaagagcccctgatcggtggggcctgttagtcagccgcaagaggcaggcacgctagccctggaaggactatcccccagtcaaaccccatggcaccgagactagggtagggtggtggagcctgacaagggaggatgggcgtgtcagaagggaaccactcgagtggatcccgcgcccggccgcagactgacctgccataaatgactgaccgcgttaaccacacctggcaccgagctacagtgtgggtgtcgatccgcttccacctcatgacctacggacccctcaggctgcataacactcatgacctacgagcccccgtactatggcgcattaatggcccacgcgcctctcagcctacgacgcacttatggtctatcgag

SEQ ID NO: 30204 - DNA, 391 bp, Zea Mays
ctagaaacagcctgctaattttttgtttttcgtagtcctaccgatgcagaaatcagtgttgtggattcaaccaaaacaatggtctcatggtcacattggtggaccgtggaatacaaaatatgatttactaaatactaagagtgtttttattgcatgtcatgaggtgttgaagttagcaagttatgcatggtgttcttgtttttctgaggactggttgggtctgtaaatggtggacataatttactaaataacattctttcctgcatgtggctggtgttatggccttgtagccataggtgtagtgtgtggcaccacataatacataattgccactagattttgtgttgttcttggcttgttcgacactggaagttgtactgtctggataaag

SEQ ID NO: 30205 - DNA, 295 bp, Zea Mays
caaaatccaagggttcagaatagatcgtgaagcggtaagtgagcttggccatcagatctctaatcgacgacccagatttaagtaacagaggtcgacacggagccacccgatctgaatcaatggccaggattaagaattgaaccggtacacccaagatttaatcgcgtgcatccatcacagatccaacggctaccgtcaatgggctgaaggggtactcgccgcttgatctggtacgttcatcagtccgccaatggtcagggaccgtcgtcttccaccccagactgcggccagccaa

SEQ ID NO: 30206 - DNA, 310 bp, Zea Mays
gacaatttgaagtcaaagagataatgctttggtagtttagttactcatttgcctgtttgttacatgctcacatatggaagcaatactgacattagtgtggctgaagaatgtacatcacaaccaccgttgctgcctccttagggcatctccagtgtatggctatcatttctgtgagttgagctttaagctctttatgatgttctgtcggcatgcactttgtcttgtaatggcatctaaaggtgagtttgttttgtctaattttctccttgatccaggcggagatagctctgaacttaagctaccttgcgta

SEQ ID NO: 30207 - DNA, 356 bp, Zea Mays
tggcagactggcaggtcagaaaatgacagaaggaacagtgcagaacctggttgaaccgatttttgaaactgatgaacagattttgagaaaaccgaggtgaaccaaagtgaaactttagtggggagtgaaggtggtttttccaagagcattcatgatctagtaaaatattttcttagaggatttgaaagggtttggactgagctcatcgcattacttacttaactattgcagatccctcttaattgaacggtgatttctatgactcaagaattataaaatgcaaactgtcgttgttcccaagcacttggagcacgctatatgatgtagaattttaatccgctgtgcttttacatttg

SEQ ID NO: 30208 - DNA, 441 bp, Zea Mays
ggggagggagaagtgggggatgaatagatatgagaaggctttatccggctgagaggagagtagcccagggcgcatttggtgaggcaaaacccaggagattttcggctgggttgttacagtgggcgtgaaggagtctgccatccgttagcgcacgaagcggagaaaagatagggaggggagaagataaatctgactggtggggcccggcatcagtcaccacccacgtcctcgcacgcaaggacctagagtctggtcaaagtgacccaccaggcagtgagtgaccgagaggtccgagacgcgtcgtgagcgtgaggcctggcgcgaatgcaggagaccaggatggcgcatggactgaatttctggtcagaggggcccacatggaagcgagtgaccgtgttagggcgctgggccgtgcggtaagaatgaaatggcttactgggc

SEQ ID NO: 30209 - DNA, 667 bp, Zea Mays
atagatgtttatcaagttcatagtctagcccctctgtagtttcagtaaatgtgccttgattctggggcagtgttgttgactgttcgagcttcagactcctctcttgcatcacgttgttgttggacgtggcgctgtccttcagtctgctggttgtgggatgaagttggagccagtgtaggtggttgtggtaagacccacgcagctggagagtgacttgccaaagccgctgaaattgtaggctctaggaacgactgatggttgcccacatactttgtaatgtatggagaataacacgaagcagtatgtaggacttgcttcagtttattctatcgtgcttcgtcctcatctatttccttctgcttctgtattgtaacttggcaggttcttgttgtgtgccctttatcctctccacaaaataagcaaaatagtcttcttggttgagagttgaatcttcctctgaagcttcgtccccctctgcctctcggggctagtggtctaaagcagctctgttgtgtccatgttgactgagaactgtgttggtgcccttcgttatggttgctcctgacctcactttgactagtattgtgtattgttttgacatgccatgggtggagccttcctccgaagcccttggtcatctcagaatatctgtaagcttcctcccttc

SEQ ID NO: 30210 - DNA, 523 bp, Zea Mays
ccagagtaggagatcgcctttcattggaccaagtatatttccgacccaacaatggaatttccaatagatcattatcatccaaaaaacactggaatctccccatcatagccctatctagattggcattattcttgttagcgacttggtaaattaagttaaaatcacatgccacaagccagggcccattgcaaagagccctaatatttctaagctcctgcaggaacaacactttttcatcatcaccttgaggaccatagactccagttagccaccaattacgaccttcctgctcagcgaaaagaacagaaactgagaaattatcaacccttgaagcgacggcctgacaagaaccccccttccaagcaaccagaactccacctctagtgccaacagcaggtaaagcaacgaagttatcatagacagtcccaaaaactgaaaggagcacctgctgggtcaaaatagcgaccttcgtctcttgcagacaaacaatatcagcattactagagaggatgacatccctgac

SEQ ID NO: 30211 - DNA, 289 bp, Zea Mays
caacgaattgctcaccgtcatcgtagacccgcagacttccgccgtgcgccgtgggcgagcctcctggtgacctaatccccggtaaagtttccaccactgtgctcgccaccttctcctcttcgtttcgcatcgaatcgcgttagacatagagccttcctggtgtgcccgggagttcgccggtgatggcgccgccgcactggccgtctgctgtcgctcggtactgagagagtaggaagactatgcgtcgtctgtagattggggaatcaacggttgtgatcgggcacaccca

SEQ ID NO: 30212 - DNA, 315 bp, Zea Mays
gcgttccgccagctcggttgaccgtccctgcgggttataaagccaatgtggccagggactcgttcgccccatactcctccacaattccccctttctccttgcgccagtatagccccacgaccatcgccatcgctgtgaggaaaacagagatccaccgtgggggaattactggctcaccgtcgaccacgcctcagtattgtgcactagagacttcttggaacgggtgtgggcgagcgcatccggttggagctgaaattggccgtcagttcgaccggaattcgtcaccggatgacgacctctgctgcgctcggtgga

SEQ ID NO: 30213 - DNA, 484 bp, Zea Mays
aacactaaaacgagagggcagagggtatgagcggacctgagatgagctaaccacggcgaggtcacactgctcggtgttcttgagtgatttaggggaaatcccaaactggggagttctagtggatgattcgaggcacgggttgcttctctggttgcacaattacatagcggagtgggtggggtcggcaatttataggcttccacagcggtggtgtccaatttcatgaagatgtgctgttgaccggagaggaagaaagttactagcgctcgggattagtggcttcaaccgtggcaagctccccagtgatcaccgggcatgcacgatgtgattcactacgacgtggtcaagcgctttagcacgtggcgcatggtggtaatcggccaacggcggcgaggtctatccgaccgattcgacgagcaagtgggtacggtgagcttagctgtgaccgagcctgagtcgatccaggcgccaagatctttactcg

SEQ ID NO: 30214 - DNA, 564 bp, Zea Mays
aaataatcaagagatgcatcagaaggtgatgtcgacattacatgatagcgcagttggcggtcattctggatttccagttacctatcgaagaattaaatctaattttgcctggccaggaatgaagcaccaaatccgtgaatttgttcaagggtgtcagatctgtcaacaggctaaaccggaaagggttaaatacccaggattactattgccgcttccagtccctaaacaagcatggcaaacggttagccttgattttatttctggacttcctccaacaggcaaaggaaattgtattctggtggttgtggacaagctatccaagtatgcccactttatggttttgaaacaccctttcactgctttaacggtggctaaaacatttttgtccgaagtatacagactgcatgggttgccaacagctattatttcagaccgtgatcctatttttaccagtcgcttgtggcaagaacttttcagactaactggtactcagctgtgtcttagcagctcctatcatccacaatcggacggacaaacagagagagtcaatcagtgtcttgaaac

SEQ ID NO: 30215 - DNA, 328 bp, Zea Mays
gcagtgggataactttgaaagtagaagaaaactgcatgttttgtacagaccactgtgcttctggcaattccatgacacaattcagtataccacgagcaatatgagcatatccaacccttgtaactgaccttggaatcgaaatgcctttgattgagtttttgtagaaattgcttcagtagacagtaaaatcatgaactgttcagccgagtcttggaattcggcctcaggttctgtggaatcggaagagagcatgtcccagagctcctgaacagcatgtaactggactgttgtggcacattgatgacccttactccacttctcggcgcaa

SEQ ID NO: 30216 - DNA, 415 bp, Zea Mays
aggtctcttgtgccaacgaaggcacgaacattgttgaaagccttctggcatgcttcggtatcattttcaagtgcagtattcggtctttagaggcctaagcgagaccagatggagcattggataatcccctttatgtcttccctttcaatcaaattattcttgacataaaaccattcctccatccaggccccgggccaccttttccgaaatgttggaacgaggtaacttacatcggagcgaggaacgaagccatgacatccgaagttgttgtgatattgctctttaccagtggccttcgtcttgtacagaagttcatgcatgttgcagaagcacttcgcgctcggctccagcccttggcttctcacggccaaaataaaaatacccattctaattatagctttgggagtgatttgat

SEQ ID NO: 30217 - DNA, 771 bp, Zea Mays
ctctcaatgaaataaactttaaacatagcgtaagatttactatagtcaatcaactttagagagacttctgaagcagaataaatttcttgcgccgataaatcaattgttagtatgacgatagtttctctatttccttaaaaattaaataatggaaggtcatgacaatgaggaagattgggctacaaaggctaaggcatgggttgctgctaaatctgttatgggaaaccaccagattcaacagcatgccatatccacaagtagaactgaaggtcatcataatggttaccatgatcagtatcagcaaccagctggtctgccaacagaagttacagaagctttgcacccaccagtacctcaatcaagtattgatcatgtgccatttccaatgacaggtcaacagagagaaacaaaccatttattaggtaaagtatcttattgcccttgatctatatattttacttatggatgtgtaagtttcagaatggagctgaagattatattgcagatagaggtccaatggtgtctccagcaaagaattttggttcattttcgtccacctatgagcaggaggtatcttataattattcttctgctccaggtatgccttgcttggcaatttaatttctttgcgcagcctgaatcataaaaggctggtcgctctgggtatgttaccagattcagttgtggaaagactttaaatctagagcgtcatttattttagaatagaaagtctggtacacttaacctatctctgtgatacttagttagcag

SEQ ID NO: 30218 - DNA, 670 bp, Zea Mays
gtagaaccttaccagagtgggctggccacggacgagctatccacagtggcttagagacccgagttgggggaaaatggtgtcgcggcggctctgggtgaaattgggggtggagattggggctacacggccgttaggaactgtagtttcatcatgcacactcaatttgagaggaggggtggaggctgggagaatttgggcttggatcaacgcattgggtggaggtgtgcataccccgccgtggatcatggtggtatttatagccacggcggctcgactagcgatctccggccacagatagattcgttagcgcatgcctaccacgtcggtaagggacacagtgaggaagatcgaggcatgggtgacaccgtggcaaaagtttaatcgagtcacggtggtcgccggtgactaactccggccacgcgtggctcggcccgcggaatgatgccacgtactaagttactcccaggcgatcaaatcctcaccgattcatccaagttcatccaaatcaacagtgccgtagatcttttgatgttcttcagattttgagcgtattggatcttcaggacttatctgaaccggcaaccttctacccaccatatctctagatttttgttaagaacagagcagcctcccttaataaaattcgttcactaaacatcagtctacaaac

SEQ ID NO: 30219 - DNA, 454 bp, Zea Mays
ctgaaatgcgtgaataccgagttaacccccaagcaatccacatgggttactcgggggcacggaggatacatctagcagatgcgtttgcgcacacccaaaaatttggtcctcaacaaaaacctccgtgcaactccaaggtgttacatgaaggctcgagggctgctttggagtactcgagaaccgggtacccgaaataggcccatggcccttttaaaaaatggtccacctgccaaccaagtctctgtcgagcgactttgtgaggcagactggttgaccaactacggcgaccaactctatgaggcggacggatgaccaactccgctgaccaactctgtgaggcaaatcggctgaccaactccactgaccaattctgccaacaaactcggcggaccaactccgtcgaccaactttgcaaggcggaccggctgaccaaatctccaccgaccaactccgg

SEQ ID NO: 30220 - DNA, 555 bp, Zea Mays
tcgggatggactggaggctgcggtaaatatccttggtcatgtggcagtaactctctgtggtggcggactccggttaaacggcggtcgccgtgccatcaccgggttctgccgcgcggcgagctcacctgcaccgtctaaaatccgcgatcctcatccgtcgccggccagtcgcctataaattgagtgcgggcactgcgtcgtcaccgcattccgcaaaatccgcagctaagcacttgactcgagctcaccagaaatacccgcgcagccccaattccctctcttcttcgttcttgctccgccgtgaagaacttcctcgtagccagcgttcctctggtcagtaactctcaaattgctccctgttttagttaatccttgatctcctattgcccttagatgtggcaatttagagtttggccgaagctccttaccggaacgcacctatgcgctgtcaaacaccgccgtaaccccccccccccaccgtcgacccgttcttcggggcttgttctacccaaatcaaagaatgttcgtagactctagtgcacccatgaacctttc

SEQ ID NO: 30221 - DNA, 899 bp, Zea Mays
aaatgtcacaagcctcgccataaagataatgcctccacgactttagagcaaaaaccaccgcgaccaattcaagatcatgagttgggtaattcccctcatgcttcctcaactgccttgagccataagtaatcactctgccttcctgcatcaacctacagccaagaccaatacgtgaagcatccgtataaactttgaaacgcttacccctctcaggcaaacctaggataggggtgtccaccaacttgctctttaatgtctgataactgacctcgcaatcgctggaccagatgaagagaacacccttctccaagagtctagtcaagggcttagcaatgctggaaaaatttggtacgaaacaccgaaaatatccagcaagccccaagaaacttcgaatttcaaagacactagagggtctcttccactccaccacagccgcaacattcttgggatcaaccgcaatgccctgctgattaatcacatgccccaggaaagccacttcggacagccaaaatgcacacttcttcaacttgccatagaactgattctcccttagggcacccagaacgagacggagatgctgctcgtgctcagcctcggtctcagaataaatcagaatgtcatccaggaacatgaccacaaagtcgtccaagaactcatgcaacatcctattcattgcttccataaaagcagcaggggcattagttaagccaaaagacattactatgaattcataatgcccatacctggtgcaaaaagcggtcttctcaatatcctcctcacgaatcctcagttgatgataaccagagttcaaatcaattttggagaacacctgggcacccctcaactgttcaaagagaacctcaatacgggggagtggatatttattcttgatagtcact

SEQ ID NO: 30222 - DNA, 272 bp, Zea Mays
tgtcggccagtagaaaccagacctgaagaccttcccaaccagagtcctggatgttgcgtgtatcccgcactgtccggtgtggatctcatctagcagttgcttcccagtagccgaaagaatgcacttcatgaggactcctgttgcgccccttctgtatagtgcctccccaatgagggtgtagtgagatgactgccttgcgatgcgttctgctgcagctttgtcatccggttcctcttcattctttatatatctgatgattggctccctccagt

SEQ ID NO: 30223 - DNA, 462 bp, Zea Mays
acaacaacaacaacaacagcaacaacagcaacaagtaccattgcctccaccaccaccaccagttccacctcgtgataagcaccgagagtttatgagtcacaagtcgccaacctttgccagctcgccagatccactagatgctgatgattggctcaaatcaattgagaagatgctcaacattgcccaatgctcagaccgggagaaagttctttatgcttctggtcatctgacgggtcctgctgctgactggtgggattcttatgttgctgcccatgatgctgccgacactattacttgggcagaattcagtacacagtttagaaactaccacattccagctggattgatgaagatcaagaagaaggagtttctgtcattgaagcaaggcaacatgtcggtcagcgagtaccgcgataagttcattcagctctccagatatgctccggatgaagttgctgagga

SEQ ID NO: 30224 - DNA, 316 bp, Zea Mays
tgtgggcaattaagggcaagctgggagagtggcacctatggtgttagtggccactgtttggaagtaccacttaaacaatgcatattttagcaaaatcataagattccatcacaaacaaagaacatcattgcatatgaaccagcacatggacaccaataagaagatgtttttagaaatggaattaaggagcaaacgctaccacacagtgatatgtctaaattaacaaattcaaatattgtgaagcaaattcagcctaagaaagagtattggtgcacaaatattgtgagtcttaagaataagggggcacagatgacac

SEQ ID NO: 30225 - DNA, 345 bp, Zea Mays
ccctccccgccattaactgccatagacggcctctccccttcatctccccacttgaatccggccatttcttctccccttgctggtgtgcgcgtatggtgcttaagcgccatcaatggtgattcaactcctccctgctcgtgctccattcaatccattaatgacgactgtttcttctccattactcccatcacagcgtccgttactcctccctgctcgtgctccatttaaacggccgtttctaccactgtagtgacgccaataatgactgacgctactgctcctcgacaggcgcctcctcatctccctgcgctctctgcttggcctataaatctgacgcggtgtccc

SEQ ID NO: 30226 - DNA, 744 bp, Zea Mays
attttctcagctagcctgatttatacaatatgcttgagtttagtatataattccttggaattcagtgggatagttcaaagcctgcctctggaagcaatagctggcctattggcgtagtccagattacaaccttgaccttgttagattttacttcactttgttagttgccttgctgctcgactccattttctagaggataggcaccacaatgtaaattttcttactttcttcattttggtcgctggtgccaaccttccgaatctgaaagtgttggtgacttggtgtattctattgcaagggagatgcaaccactctcagaatggttattggattaatgtacacaattgtgatgtttgtcggcatcaacaattgttcaaatgcgcagccaattgtttcaattgagaggatggtcttctacagagagagggctgctgctgggatgtactctgcaatgccatatgtcgttgctcaggtaaagaaatatcatagaagtatagagaacacaacggtaactaaggtgatatcttctctctacagacgttctataagcatatgttctcacttatttatgtttcctcaaacctgattgttagatactgtcaatgctctttgttacagacgacaatgtccatactaaataatatcaatgctctttgttgcaaacgactccacgcttaagatcatgactggctatgttatattggttatccgttttgggattgtgcaaactgtgcatttttcaaa

SEQ ID NO: 30227 - DNA, 569 bp, Zea Mays
gtcaaaagcaaatagcaagcaatttttcctcatccctgagctgtcagagggccaggaaaaatccaactagagagcgcatagataagaccctcccctactcacaaactcccggccatagtgcaccaaaactaccaaacacttgcttaacacccaaatttgcctccaatctctgcgtaactatctgcaagtatttgataaatactccattgcttgcagtgattccctacgagaagcacacaaaccctgaacgaggaagctctcacaaagacctccctgccccgcagcgaccgcagggctgacataccgacgcctccgtgccggcatcagcacgaagtaacaaacacccagagtcccgacgccaatacaaagtaacaaacatccatagtcccgataagttacgaggaaagcccagagcccgcagacccgcgccagcgacgcggagagatgtttccgccttggcgacacccgcatctcccggctgcccgattgaccacgaccggagcgttgaccgaagcactcagatcagatcgaagcacgcccgcctcaggaatcaggagcaaacaaagcgc

SEQ ID NO: 30228 - DNA, 619 bp, Zea Mays
cacggtattggatggataacgccggggaaagggtaactcatacgtggcaccatctcctgagctcggccggagttattcaccggcggtcaccgtgactcagtgagctctcgccgcgctgtcgcacatgctttgattcgcctcactgtgcctcttccttacatggttgccatgcgttaatagcccacctcgtagccgtggatcgatcaccggaccgccgtgcctatatataggacagggagccaccacgaggtgctcgatgttcttcaagcaagcttgagtacaaccaggaattcgcactgccctctccaccttctcccaaatcgattgcgcacagtgaaagcacagcctcttacggtcctatagcctcgatcccatctcccaatttcgcctagaaccgccgcgacaccgttttcccctttctctgtctccggtgaacgtaaagctctgcgctccgtggccagccctctctggtaaggccctgtccgattcaagctttgttttagcagctctgtgtattcatgaagctcctcgtagtggccgtttgaccaatccgagcgtagattattgggaacacaggatcgacaccacgggttccgccctgatcgtggacaaatagttt

SEQ ID NO: 30229 - DNA, 429 bp, Zea Mays
gcaatacaacagtacactagctgtagcaggacagcggtacactgatttcagcagcacactgattcagtggcagacccaagatttcttgactaggtatgcgagatcaagagatgtcctagggagtagggacattgccgtagtggcctagtgggttgggaggatagctgtggaagacagaaactaatgggtctgataagatcgtggaggaagttttggagagtaaagatagtgttgcatacatacatatactatatgctatttatattttgcaaaacagcgccgcgtgatggagggggcacaactgacgctcgagcagagggccgctggagcacagcagggcagcaggagaggagggcggcgacgctggagaaggtgcgacggcgctggagaagggtgcacgtgcgagcacgactctgcgttgcgttatgc

SEQ ID NO: 30230 - DNA, 543 bp, Zea Mays
gtgatcaatttctcactggcaaacaaatttccgccgtgggccatggtgcatcgtgtgcagacggttgtgccgcgctagttcatgtaaggatgattcgttcggatccgccatgatcttctgcccattctgcgcttactctcgtatggattggggcactggggtggctgatgcttctcctcgtcggcgtgccatgccgtgttgggcggcgcggctgccaccgccgtggagcttgggatggcgagtgggcacgatggactgtgaccgttgatctggccaggaccggcagagatcaagtcatgggataacgataaagcgttctgaatctcgaccgtccgatttggattgatcgggtgagatctggtcttaggggttttaaatctgggacgttgcttttggatccgagggcttggattgcgtaccggttcgataaagccaagatctaatcctgacattcgatatttgatcggacggccgagagtaaaccgtaccccttcggccgggccgttttgcagaagagaccctgcgatttttagaaatataccc

SEQ ID NO: 30231 - DNA, 459 bp, Zea Mays
aatcaaagtctgaacgtttgtgcgcaaggatgatgaactccgacgatgtctcctccgtggctagggtcgctccgtcgatagggtgggcgactgattaggtgggggggaaacaattggcatcggacgttgatctcgttacgtgtgggcgagattataagtaggataacgattcacccagttaattcccagtcgtccgatctagatcggaggtgtgtggataggttggccttaattagttttggacccttagatcttgatctgatgtccatgcttgcattccggttcgggcgcggctgatttgatctatgcggtcggatcatgatcgaacgactcagcccgtccgatacccccttcggtgagtaatttttataaagagccactgcccttttgttatatgaacccgcattccattgcaacagtggactgagtctaggaaaattttacacgctagaccctgcg

SEQ ID NO: 30232 - DNA, 432 bp, Zea Mays
gagagtgggtgagttgtcgcgaagtgataggcgtcatcgtggtgagatggagggtggtcgtcttcgtgtggacgggactggcaaacgggaattgttgtcctcgccggctggggcaagtgtgggtgagggggagctgcgaagtctgtttgcgggtgaggaattgaggataatgttgttcaactatagggagatgggtatcatcctgaaggttgagccaatgtaatgtgtgatgccctcgctgtatgtatgtaaccatgattttgtgtgatgaagctgcacgctttcgttgatcaggctggtcccgtaggcttctgtacggagtgctttggaaaagacttcgattttttgtacttgttattccggctgcacccgtaggcgacttttgcacggagtcttttggaaaagacttcgatttttcgtgcttattattcc

SEQ ID NO: 30233 - DNA, 310 bp, Zea Mays
tttaggatgacagagtgtgcagttcacagcaagcaatggctcggcggtggaggcaagactcaggtgagcaatcatcgatccccatatcgttaattgtgcttggaggcccctcgctcacgtactacggactcacgtaaagctcctaggccttactcttgaagcagaacgatggcatgatgtgcgtggtggtagcggctccctctatctctatctctctacttggcgtgggcgtaattcgtatgcaactaatggctaggagcgggcaccagcatttatatccgcggcaagtgtaacacctcgtacactctcg

SEQ ID NO: 30234 - DNA, 384 bp, Zea Mays
ctgctgagcaacgaacttgcatgaaatgaccgaggcagatctccatgcatccattttcgagtgtttgaccgtcattataacccttcaacctaataaactaatccaaaggtaaaaataccacaaagcatgtactcggacttgttccatgttaacatgaatcctaagacgcaacttcaaactgacatggttgcatgcatcccaggcatgcaacacgggttggcagcgtcatagatattccacctagcaccaggtccatgttacccgttggatgctcagggagggccgaacgggggctgatgataaaacagaggcagaaacatgcgtagattttaccagtccaaggaattcttggactgctgaagcttcgcgctatatgcactttcc

SEQ ID NO: 30235 - DNA, 404 bp, Zea Mays
gtctttttcataaatgtgaggacctaactgctacgttgaatgcagcaaaggtcaggggctcttttgaaaattggtttcggcaaaggggtatcttgaagtatcagccgttcgatcttattcaacgacccggattaaatggtggttttaagtgaaccagttagcgttgtagttcatcagatcatcatccaacatcttaaagccgaccacgccacccggctaagctcacccttagatcaccgatctacggtcaaggcatgatccaccgaagcggtatgctcgatcagatctaagtcgtccatcaatggatcaatgacaacgcttggcttcaccaccgtgacactagcacatggtagcgccgcccggcttcacggcggtagagcacgccggaattgcgtggatcgacc

SEQ ID NO: 30236 - DNA, 301 bp, Zea Mays
acatatggtttggcacatattcaaagctaaagaatgtaacaataacaacaagtcgacagggtatatgcatgaaattaaactctcaactatatgccaagtagtaccaacatgatacaaggttatgaagtacgtaccggtttggggcaccgacaaaggggcatgggcacgcggcaccagtagacggggcggagcagggcagcgccatccgagggggagtaaggaagaaacggaccaaaaccctctgatttgtaggttgactttttcaaaatttattaacaactgttattttattattgtgaat

SEQ ID NO: 30237 - DNA, 358 bp, Zea Mays
caagaggataggtaggcaactgggtgttggatggtggttagcacccgatggctgagatcaggcaagctaggtggccacccaggcagcaattagggggacacctgtgacgcagatttcaagaacactgcctgtaattgtggtggtaagctgctggttcttaagcgcttttttgaaggtccttgctgacacgacctatggacaaatcactacaaccatggggaatggtcacagcggatcaaccaatcaatgtatacttgttacagcccgttcttacagctacagctaagaaagattcgaccttgcatgatcgcaaacacatgcgtcgagaagactaaaacggcagcataatcgaactgaa

SEQ ID NO: 30238 - DNA, 309 bp, Zea Mays
ttcactgcctccatccgttgcaaatcactgcctccagcgcccactcgacccctccatctctgcaatggtggccggtggtgcggtgaaaggagatgacgatgtgcagcttccatgcgggcgcggggaagatgacgtggtgaagaccgccagcctctacaccgtctccagcaaatgtcgatgccctggccatggttacctcgctctcgctagtgtcctcgtcgtccacgtcaggttccttcacatggcgaagtagggggtgtgcacgttcctcccccttcatcgctcccactctcgttccagttggcagac

SEQ ID NO: 30239 - DNA, 1591 bp, Zea Mays
gaactatttacagtaatgattggcaggctgagttacagtttcgctgggtaaagtatttggataagttagtcatgttaggtgtaaagttttcatatgcaatcttaaaactttggaacatgcacattaagccacaggaagctaatttggggaaaaacgagggggggatagcactgtactgaaaccatattgtattattcatgtgtttgattaattcaatttggatatcaattaatagtggattaactcaatttataatgacataatagttactattttgctatatcatctggtggacatttgttcaagtcttcaattggcagggactgctaggacttctcttgttgtgacaataggtccatctgctaggcattactcagaaacttcaagcacaatcatgtttgggcagagggtaagttcaattcaccattccattggtccaatgttgcattatctttcttttcaatattattgtgttttttgtaatactggaagtttggtcgtttctcttttcatatgtgtaggaacaccttactcttaaacagttagtatttatcttctgcgtgtctttcatgactaaggtgttctacaaaacccaggcactagattgttgaacctggtagttgagacaactttcactagttgtatgatggttaagcattaccaaattgcaatcaattatagacatgtatttctcggtgcacctgcctttattcaacttaatgcactttcacctactagcgagctggttatgtcatctcaattgcttcggtggtagaaaactagaattatgattgtgaaattaagcaaagtaacaaacccaactttgcagttctccacatgggttactgggttctggcaccccctgtagatgagaatagcaacacatgactgcaaaactgcttccgatggcaaatactgttagtcagttacctagctgccttttgaagcagtgagctagtgactgcctgaggctgcgacatcctgaatcaacgagtgcctacaagctgaaccgttgaacctccctccctactctgtcagccaactcaaagaaatgcgtgaagaccccccttcccctacccatacacactcacccttggcattcatccatgctagtaaacgccatcagccatggaacacaagtggtgggatctggtctaggggatgctagaaaccatggacacaaaatttgtgtcctttacacgacgtatagtaatagacttatgagattatgatataatccatttcttgtttttggtaccgtagtgctaccaaagacattggatcattgaagattgtaaccacatttttctttggaaaaggaatgctttctttgagtctcttaaaacttatttcttgggtttttatttagtttgtgatttgcaggcaatgaaagtagtgaacacaataaagctgaaggaagaggttgattatgaaattctttacaagaagatggagcgtgaggttgaccaactcacatccgagatggagagacaacagaaggttataagaagtgagaaaatgcagatggataaaaggttgaaagaatctgagaggtccttccatgatttaagaatgacatttaacatgcaaa

SEQ ID NO: 30240 - DNA, 569 bp, Zea Mays
ggatgacgatgacgttgctaggtgagctccggcatggcgatggagaacaacaatgatggcgtggcttcaccgatagtgctccgacgaggaaaatttacagacagcagggcatcgacggtgaaggagcacagcagcacgacacaacaatgacgtcgggcaggagtggcaattgatgaacgagcagagaactcggatggtagcctgcagcgcacggcacgacaataaggaactcggatcacgaagggagagaagcgaggcaagtgacttagcagctggagcaagtgtcgagcagggagaaaagggatgaagctcagcaccatttataggctggtagaaggaaatcacggcctcgaatttgattatcgtagagaaacgtccgcacgaaatgccattaatggcaaggagaaattgtcatcgcagagaagaggagtggtggcggcagtggtggagagtacgactgggttggggagatgaatcggatgagcggtggtgagtgctccataacgctgggaggtgaagcagtgacgacataaggagcagggcacactagacggcggcgagatttatag

SEQ ID NO: 30241 - DNA, 1080 bp, Zea Mays
acagtcctgtcactggctctatctcatggttggcccattcatcaactagatgtcaacaatgcattccttcagggcactctgtcagaaacagtctattgtgcacaaccttcagggttcgaggattcagttcatccagattatgtttgtcgactcaaccgctcactatatggtctgaagcaagccccgcgtgcctggtagtcgctttgcctctcatctatttcagcttggttttacagaaaccaaatcagacacttcattgtttgtatatcgcaaaggtgaagacataatttatctcctgctatatgttgatgatattgtcctcactgcatcctccatgtcacttcttcggcgcaccatcagtgctcttcagcaggaattctccttgaaggaccttggacaattacatcacttcctcggaatgcatgttcagcacaccagctctgggctctacttgtcccaacaacaatacatgcttgacattcttgatcgagctggcatgcgcgactgcaaaccgtgcactacccctgttgacataaaccccaagctttcagccgatggtgatctagtttcagacgctacagttttttgcagtcttgcaggagctcttcagtatctgacattcacctgccctgatatttcttatgcagtccaacagatttgtcttcatatgcatgatctaagagaacctcaccttgctgccctcaagcgtatactgcgctacattcgtgggacattggacttgtgcctacttgtgcgcccttcttctcagattgaactggtggtctactcagatgcagattgggttggctgtccggatactcgcagatctacatctggatatgctgtttttcttggggacaatcttgtctcctggtcctccaagcggcaaaacactgtttcccgctcaagtgcagaagctgaataccgcgctgtcgccaatgtagtcgctgaggctgcctggattcgtcagctcctgaatgagttgcactcccccctgcccaagaccactctcgtgtattgcgacaacatcagcgcagtctacatgtcttctaatcaaatccagcaccagcgtaccaagca

SEQ ID NO: 30242 - DNA, 301 bp, Zea Mays
ggcaaatccggaaaaattaaagccattatgagaatggagccaccacgatcacagaataaagtgcaaaggctcaccgggtgcatgtcagcgttgagtagattcatatcaaggctcggtgaaagagggatgccattctataaactactcaaaaaggtggataaattccagtggaccataaaagctcaagaagccttggaagcgctaaagaagtttctgaccatgcagccggtactcaatccaccgcgtcgagctacatctgatcggccgaccgaagacctgttgctatatatcgcctgcacga

SEQ ID NO: 30243 - DNA, 646 bp, Zea Mays
attttataaaagaatattgggtttctaaataatattgtttttgaaaaagatgtattttaattttgttaataatattttagttttttattatgaatttgtgaatatatatatacattcggctatttgtttttctaaaaaagaagtgtttggaaatttgaaaataaaaaaacatctaaacgccgctagtcccaacaaaaaaacaaaaaaatcaaagcccagccgatccctctatcttctctgttgtatctttggtatggaccccacatgtcagtagctccttcatctctttccttcagtcgtttttccgttcgttgtacgcataggcacgccacgccaccgcgcccttcatctccccgtgcttggctgctcaagtgctccactaccgccgaatctgttcctctgtctctcccactggctgcgtccatccatttcctctccccacctcgcggcgccattaatggccgcggccacctccgtactccctcccgacgtccgttccctctcccctcctcctataaatcatagccacgtctgtgagcttcgctcgagctccttcttcctccctgctcttcgcgctctgcagcctctctactgtcgatcgcccgtccgttcgcctgcaccagctcgcctcagctgtggatcacgc

SEQ ID NO: 30244 - DNA, 440 bp, Zea Mays
gtggagatgagaagcagtggtagccagtcgtccgccaacgtcgctgcgaaggggaatcgcagcaacttcaagccaaaccaaggaagtggtggccgccctaatggtggccgtggaggtttcaaccgtggccccaagggtggtcgcactggtacttggactccttccccggagtaccagaacggcgtcaagtgtcagatctgtggcctcaagggtcaccctgcctggaagtgctacaatcgattcgatgagcgctacaacggcaaccgtccacagaagtctgcctccgctgcatcaaccaactacggtgtggacacaaactggtacatggattcaggtgccaccgatcacatcactggagagctgaacaagatgaccgtccgtaacgagtatcacggaggagagcaggtgcatgcggccaacggctcaggtatggagatctc

SEQ ID NO: 30245 - DNA, 382 bp, Zea Mays
ggcatgaaccacggcgaggcactcactgcctcaaccgcaagcttgagaagaacccaagattcgcactgccttctccacctcctcccaaatcgattgcgcacggtgaaagcacagcctcttaggccctatagccccgatctcatctcccaatttcgcccagagccgccgcgaccccacttccccctttcctgtctccggcaagcacgaaacaccgcgctccgtggccggaccaccctggtaagcccctgcccatattaaatgttgtttcgacagctctgtgcacttgtgaaactcaccgtggcgtctgattactcaatccggctctggttatgcgggaacgcgtgcccatggtcgcggtttccgccgtgcacatggacagacc

SEQ ID NO: 30246 - DNA, 934 bp, Zea Mays
cttgcttgcttgcgttctctaccacgacttatgctcgatcgtaaactaacctcagcaccgtcctccagcagatactacttgtgtagcgggcgagggtgaggtgaggtgaggaagaaagagagccctcgccgcgtgcttaggccccccccaagacgccgagagaggaaagggattaggcagcaagaggaggcgctccgctctcggattagaggcgagcttcctatttccagcaaaggcaaggtgagtagcactggtagcagtactgatgagtgagtgatggtgcggtggagcactgcagcggcaggtttatctttctcctctcttgctcactcgcacatgcatatcccactcacaccagcagcagcgagctgaggctaggctagccatcctcatcctcaactcctacgcgcttagcttgcttgcacaaacctctctctatgtctaagagcttctcgctgcagatctaccgccgatccatccgctaccgagctatgccaatctatatatgcagctcatgcatctaacctactgcatgtcacacagccccagccccatgcccgctgtaccgtgccgccgtgttgttgcttttgcttctctgcctgcgcgcaccttctgcttctgcgccagcttttttcttactcccaagatctctatttgtttttttttccgttgttgctgtaggagaggatcagctagctagctgctaggaggccggagggagagaaagatcggaggaggagctgcaaaggctagcttttctttggtgcggctggtgctggtggtgaactggtctcggtgctcggtggtgcgtggtgtggtgcacactgcacactctccctctcgcgttcgtcttgatggtgggtggtggtggcagctgcctcgcatggctgggttctctctgaggggcggcggaggcgggaggggcggtgaccgg

SEQ ID NO: 30247 - DNA, 284 bp, Zea Mays
tcccggacgatgccaaggtcgtggggggcccacatcctatcataaagcacccctgccacgtcatcttcaatctggaatactccatgatcgaagtcctcattctcccggtcgaagacttcaaaatgcatgcatccctctcgaaacaaagcatttgcagccccctcgcaagtaacgagagacgcgtaggacatgagacctgtcacaatggacgggagcaactccagctcgtcttgcagccacaccagaaagcggagccccacctccttccccaattcgtcaaaggg

SEQ ID NO: 30248 - DNA, 306 bp, Zea Mays
ggggctctgcttgctgaggttgggctgctgaaagagaggggtttgactgcagaggctgtggttgccgacttcattttcaagaacatttagccactgaaatacagagcatacaccacatatctgtatcgaggcctggttgattcaacccgggtaaccaacagaagaattcctgctgtggacttggtgagccggctcgagatgatactcagaggcaaggtgtcgaacatcggcgctcctattgcatactcggcctggaatctgcctccttccaaggcctttagtagtttcatgtcaaatcctcctgct

SEQ ID NO: 30249 - DNA, 467 bp, Zea Mays
ctttggcctccgaaggccgaaggttgaaattgatgacgccgccgaagcgtgtcagagggccttcagccctgtttgctcttttattgggacaagggatctaattcaagaacatatagccttcagggtgtggccgcttgtagaaagctaggaaatgctaaaggagaccatcactaactctagcgaaggtgatttggtccggctgaagtacacattcaggtttggggataagtttgatgaaccaaatgatgattggctgaagtgtatcaaagctacaagtgatgaactgcttggagcgtactccaagaaggaagacaatgccttgtccacagccttcgggggtcggaataagaaaaggttaaacagggtatttgatgctatttgtttcctataccctgactattgttacccactgcgagggcaaggggtaaaaaggaagattgttgctgctggaaaagctgctacttcgg

SEQ ID NO: 30250 - DNA, 473 bp, Zea Mays
ctgagctctgtcaccagggcgctgtcgggttggggggaaagtgcctgggcgtcggattgggaacgtgtggtcaagatcagatctcaacgtaccggatcgcagtgtggcctggtgccgtccaatctcctgggaagggctcagattagaagtcgaatacccctttcgcctgcattcgatctaaaccgtagatctacagatggatggacctagtcgtggtttgccgcgcccttgattcgggccaggggatcacgatccaacggccgaaagcgcatacccattcataaccctcaccaatgtaatcgtggccgtccactcgtgatctggcggccagaaacggacgataccccttcggcctgtaagttttgcatatgagtcctcaagttcttagacaattaacccgccgtccccttggggtgtttattgagtctcgggaagtttgtggtttagtccctgcctttctctgtaatagtgcg

SEQ ID NO: 30251 - DNA, 777 bp, Zea Mays
gctattttgagtgtgatttagtgagaattgaagtatggtggctatagcaagattaaagctggattataggaccacaactttgttaaaggtggattagcaagttatcacatgaaaattggagatctaggcactgcaaaccgctctatcaggtgctctgaatgtcgttctgatggtacagtgcccgcagaaagatctcaggttcaatccccctcgccaccggtgacctctgcataaggattcgcgctgatcacggcgattcgtgctagactcaggcaggatagtaccgggcgggtgaaaagattggagggggagcggatttggtcgcggggtgaagcttatcaacctgtagtcgtgcgacgtggccggaccaccggtgtcgtcgtggaaactccggtgacctcaattatgccacgccatggctatttactgcgcaattgtaactgtggcacacctagacttaccatctcagaaccgctgcaccggtgaacgccacgactgagccaccagtgaccttcttcctctccggccgccagcacgccatgcccaaattaggagacaccgcccttggatactataaattggtgccccagccggctccgctaagtagttgtgcacccagtgaaccaaccctcaccttcaatcgtcccccacagctccccaatttgagatttcctccaaatcaatcaagaattccaccatgtgtgagctcgtcgtggccagctctccacaggtccgatcacgccctcctcgctcttgtttctacactcttatgtgctc

SEQ ID NO: 30252 - DNA, 430 bp, Zea Mays
cttgcttgcatacatacatatatggctgggggctaatcaagtaactaatccgatcccaaatgatcaaagtccaagcatccctccctctacaaagccccgaaataaataagctcaatctccgtcactagttcctatctagccagagacattcagacatacatatacatacatagtgctactacataagcttaaacctaagccttggatcgatgtacttactcctcatatatggcaaaggtagctagctagatactagatagaggctgctcgagctacctgtcctagctagatcccactacatgcaactgcaaggcgcgtggtgaagtcgagcatgcatgcacatgcgcgcgcgttcatgtggctccgaccccgaggaaatctatgaacgctggcggcggcggcgccgcggcagcttcaaagtgagcgccgg

SEQ ID NO: 30253 - DNA, 308 bp, Zea Mays
aacgcgtctcctggctatctcccccacgtgccctcccctccctcactcgcacaaccgcagagctcccgtccacgccctgctctgtgcacacgccggagaagacaccaccatcgtctgccttggtctcgagcttgttccatgatcgtcgtcgagttctcgctatgttcgttgcctcgatgagcttcgcctcaacgttcgtgacctaggacaccccttggtttgccccctcccctctgtttctctctgccagcgctcaccggtcctcgtccacgcagccacagcaccactgccatcaacctgaaccctca

SEQ ID NO: 30254 - DNA, 995 bp, Zea Mays
gcatattcttgaacttactaactagttcacctgaggtccaaactccaaaaccttttgacatggacgctagcaaggtatgaaatggagagaagaatagaagacaatgttaagagatgccaagtgtatagattatcactgattaggaaattggagttcaggacctgaaattagtagtccagggatctagattacattccaggacaagttcaaggacagttgctgtattccacttcctaaaactacaaatgctggccatgcatccaaggtacaggaaggaatcaatagtcaatctattatagggcattccccataatctgctatgatcagaggatcctttcgacaggagaagcctgtagattagagagtgaccagtctccctgtcactgtattcatctggttgcatagtctttggtatcgcagtgacattgtatattgcttcccatccacaagtttccagggccactgttttcactgtatctgttgctgctgctcattgcctgttctcgcttctccgcccgtgcagctgctatttgtttatcgcctttgctcagaagccttcaaattgccaccaccagcaaccacaatgtgccctcctgatcccaacaaattggatgacgcctctgcgtggtttccttctgctccactgcctcaactttgtttgtttcctgcatcaattgctcgcaccaactgtcaaattgctgccacccctaccctctaagtccctctgctactgattcccctgcagctgatctctgcgaaaattgtcctcagccatccttcacgacctattctcacagcagttgtcctcctatacattagctgtactcgtcctccatttttaacggtgtgccacctgccctcccatgcttctgctcgtggcatcaatttattgccatcaaataccattggcccactaaaaccagccacaaaatcaatcactactttctgcaatcatatgccaggctttctatgtttcctgctgctaccttccaacg

SEQ ID NO: 30255 - DNA, 669 bp, Zea Mays
aaggactcctgagtcctggtactgaatagagctgccgctgcggggtgcctctgagccggcaaccaggactccatgggtacgtgtctgaactgacgtacccaggctgcaatggcacgtgaaggtaagcagtcgaggatcagcagcaaggggtcacaccttagtctcgtctcgctccctgaagcgaggcggtggaatgggcggagcggaaatgggagcgagaggtggaacagtggaagctggagtggtggaggttgtgggtatggcggaagtggtggatgactctggagcgatgggaggtggagtagaagctgtggcagagggggtggagggagcagaagagcgaggccgagatgcgaggcgacgaactctataggcaatctggtctgaggaaatctgcaactggccaccgctacttcttttggccttcctgctgctctaggtacactgtcttgcccttgacctgcctgaaggggcgaggagggtcctcgtcgtctcctccccctagcgctgagacattcttcgtctgcaccatcctgacctgagtgctgcataggagagtgaaaagctaagcacaagtagatagcagctgataagattagtaatgaaagaatggctacctggaaaccatacgagaaagagagaatccaggcaggacaagagacaggcaca

SEQ ID NO: 30256 - DNA, 334 bp, Zea Mays
gagcttacgcaccccttaagaagctttttcccatgcttagcactgtgtcaaccactacggtatgggcaacccctcgccaaggggctcgggtacgtgaccgaaccctcggcctcggctctcaacaggaaacaagcgggcacaagtcaacaacaaagtacaaggccataccatctacatgatatgaatacatcccttcacagtgtgcagcaaactcccatcctccaggaagctccccttgagcctatgaatagggtagtctacggcttctgaagggtagacgaacacttcacaagttttcttctccactcggtattggcacttgcctcgatcatcc

SEQ ID NO: 30257 - DNA, 287 bp, Zea Mays
acagcagagagtagtacacccaagtgcccaacagcagagccatcggcagcaacaatcggccagcagcaatcgcttcctctactccgctcaggcgctcagccaccagccggtccgccgtccagccgcaatcgacaatgccgcacgcagaggagagagaagccaagggcggcacggcacatccgcacacatgcaccacgtccgtgagtccgtgacggcaagctagccagctagggttatatttgaggctttgggccaagcacactgcacacatttgggccacacacgca

SEQ ID NO: 30258 - DNA, 306 bp, Zea Mays
cccagtgcaattgtatgagcatggatgcaagaattaccaccctgtgcgatgagttgtgcaagctgaacctggaagttgtttcttcaggtgacttaagttatatcttggtggaacccacattgcaagagcaaatagtgagggcacaaattgaggataagggtgttcaaatgattaaggaaatggtcaagcaaaaggcagagaaatacaagtgcttccgtcaggatagcaagggaattttatggtttggagactgattggttgttcccaaggaccctgagctcagaaagaagatactgcatgaagctc

SEQ ID NO: 30259 - DNA, 561 bp, Zea Mays
gggcctcggggtaaaaatctgtagacacagagcactattcgtagtactgcgggttaatttccacagaggttagggtctcttttacaaaacctacggtcgaaggggtatgggccacgatgggccgttggattagaatcctacggatcagatcagacctacctgagattgaatcggagcgaggcgagaaccgcacgatccatgatctatggccagatcgcgcactagtaatcgttacgcgactaactaaatcataaccgcccattgaaccacccacgacccagatttaacccagccgaaggtgtatcctatttctaatcgtatccgcccacgcgatgatcaacgggcacgaccacatctccttcctccgaccaaccgagacggtggcgccgccctgaaccacggtggtccattgccggaccacacccaaaactctactctggccgccgtgaattgatccgaggagcgtaaactactgcatatgggtagtgagatcggtggagggcatcataccggagtaattcgcgacggtcgagcgggtccacggcaggggatttctcgaag

SEQ ID NO: 30260 - DNA, 512 bp, Zea Mays
ccgccacccaaatccatctcttcaccatcatccgacgcagcctcatcaacctctgctatggcggaacccaacacatccgatctagtcaccatcatctaattccttgcagcaacggtggaatacctcatgctgtcggccgccgaactccagcaggaccaccgaaccgagtcctctgcactgggcgggaagggacagcacaccggcgatcatcaccaggatcgacccccgcggttccagaagttggacttcccaaagtatgatggcaaaactgatccattggtgttccttaaccgatgttagtcctacttccatcaacagcgcatcatcgacgaggaacgcgtgtggatggcctcctacaacctcgacgacgtcgcccagctgtggttcatccaaatacagcaatatgagggcactccatcatggcactgcttctccgaactcctgaacctgcgctttgggcccccgtgcattcaaagccgctaggcgagcttgttgcatgccgccgaacgggc

SEQ ID NO: 30261 - DNA, 657 bp, Zea Mays
tcatgtcaggttgaattggttaaagatggaggacatgcatattttattaagtttcttgacagtttggatgctttcccagaacagcgtgcaatggccgcttttgttatagcagtcattgtggatgggtataggatgggtcaagaggcttgtatgaatgctgggcttatggatgtttgcctgagacatctgcaacctgagaattctcatgcacaaacagaacctttgcttttgcagtggctttgtttatgccttgggaaactatgggaagatttccctgaggctcagttacttggtctgcaaacaaatggaccagaaattgtaatatgcttattgtcggagcctcaacctgaggtatgatgccttcatattctgtgtactctctttttcctgcttcacaagatacatattaaacttttggtcttgccaggtcagagctgctgctgtttttgcacttgggaatctccttgatactacatcaaatagtcatgatgatggttccgatgatgatgaaaaggtgaaagctgaaataaatgtagttcgaagccttctgcagatctcttcagatggcagtccccttgttagatctgaggttgctataggtacatgcattggaaaactagaattttttaattgaacacttgttttagtgtcttgaat

SEQ ID NO: 30262 - DNA, 315 bp, Zea Mays
ggcgaggggtgggggttgctctccatcggagatgcgtgaggacgataacacaacgagcaccaccccctagcgggtgggtggggaagggggatgggcaatggctctccatagccatgtggaagcttatgtgatggtggtgttggtgctgcatgggagttctacggcccaagacaagcttgcgctagctttgcaactgggtcgggagtggcgatgccacgagagctctacggcccgcccgcgacaacggcacttgggtgaccaagtgggaacatacgagctaggtggcctattaggctacttatggtgcaacagctg

SEQ ID NO: 30263 - DNA, 349 bp, Zea Mays
atgatgtcctttagtggcagccatacctacataagggccgatacattatgtcacctctgtagatattatagtctatgccattgggtaccacatacttgctaactagtgtggcaatctatacttgataatacttcatggaatactaacatgttcatgagtggcctcatggtcgatgcacgtaccaaatagtgttctctagtaccttattgcctaagtcattgtgacagtgcatctatcaggctataacgtcgtgcatcatatatttaatatgtctgatttgaggcttattcaaaataacaatgttatggccatgtcaagattaggctttaacgtggtatctctgttttag

SEQ ID NO: 30264 - DNA, 328 bp, Zea Mays
cgaggttgtatatttatatagatatgagttgtctattacaagagtaatcctattcgattacaacatcccaaccgactctgaatctaaatgaactggatgcatacagtcatgttccattttatcactaacctctattccaatctagtccaagaggatcatgaacaactagaatggggacgacaaaggtggataaccagggtccgactagagtgacgacggtgtattaatgatgctcatacgggatagaactattgtactatctagtcatggctataggggttttcccatctaaagcaggtagaattgcaagaccagatatggtcataag

SEQ ID NO: 30265 - DNA, 309 bp, Zea Mays
cgtttctgattggttcaagagtggtgggttcatgacatcaaccttctatctcattatgaaaccagtaggacgcagagtttggcatagatgtgcttccctactcccagtttgaagtcatgaaatggcaatgcactttagtacatggcatatactcatatagcaagtcaactagagatacacattgtatctaatctatccatcaaattccaaaccaagaggcaaataattggcacaaagaatctccaacaatagtatcaccgtgatatctttctgatgcagtgacaatgcacttccgtacatgactctaga

SEQ ID NO: 30266 - DNA, 338 bp, Zea Mays
cctgccgctcgggtgccacgtgcctaagcgcaataccacgtcgcagtgactcgccttagcatgtccggtcatcgccggtggtcttgccacggtgaagtgccacggtaaccctgcaccagtaactctccccctccccggtcgccagcgcgccattccaaaatcaagagccaccacccttgggcactataaattaagcatgccatcagctctgttgggtcatcacgaagccagagcacccgctcctgcctccgattagccactagagagctccaatttctttctctccccaaatcagttttccgcacgccgtgaaccaccgcgtcgtggccagccttctg

SEQ ID NO: 30267 - DNA, 370 bp, Zea Mays
aaaatatttttgattcgtaattaaactaattacagttttaaaagtgctccttctgctttgtgacctggatgcactaaaaaaaattgtcgagacatacataaccataatttctagctgtcgccaagagggaaagtatcaggcaccactgccctcagaacatgggctagcgtatggtagatgggcatcttcaggtctgtctgtcgacattgttaaatgcagggcactgtcctatttccagcaatcagtctccaatcccttttcctatatatcaattatactggggtcattctttccttccgccttggcttgcaccatttcctctgctccgcacgtttgcttcttgcacagtacctccaccgaacatgcattt

SEQ ID NO: 30268 - DNA, 377 bp, Zea Mays
aagaaaaggaaaactgctacttcagccatctctactgcgccgaagggcaaaaagattaaggttttaacgcatcgacctagatatattgaaacggcaatggtgctgaagcttggtgaagggacaacttccactgctgagccagggcggcctgctcctgccggctccaaggaagaattggctgcagtgccaaaggttcctgcaaccgagttggccgaaacgccgaaacatgctgtggaagccaaaggaaaggcagccgaagagccagagcgagagaaaacgacggggctaccgaaaatcttgagtccgccaccggagccagaattgtcaaatgtatcgaaagctcctgcaataactcccaagaggaggaggatggcaag

SEQ ID NO: 30269 - DNA, 605 bp, Zea Mays
catgttccttgctccgcatagcagagttttggccagtgttggctcgcctgggcgtagtcagggaccttgttcatggcgccgccgcccaggttggtcgagaggatgggaagcccctggctgttaaatcggccattaaattcacggcgaacatacctctgtttgaagtccggtcagtggctgggtccgtacggggggtcctcggcgtgcgtgctcgcctagaaagcgccgcggtgcgaacctgctgactcagccgtgtcgcgtgcgtagagaggaagacgatacggtagccgtcgatctcgtaggtaacggctcagattagatctgggttgtaatggaatctggtcgttggttcttcttaggacggttggattagaatgaggtgtaccctttcacggcatgtaatctctaccatcgatctatctgcgggcggccacgatttcatcgcgccacgctcggttctggaccattggatcgggatccagtgatcctggtttcataccgattcataatagcttcgctctaatcctatccgtctgtgtttgaacggacgactctcatgtcgtgataccccttcgtcgtgttaacattgctaaagagaccctgac

SEQ ID NO: 30270 - DNA, 322 bp, Zea Mays
ggcggtcatgagaaggtaggttatgtttccaatgcagttgggttgaccttgaatgtagaagcaaaggatattcggaatggtttgaacttacagcaacttcgtgctcaagtttgctgatagtaagatcttttatgtgtagaattattataaataggacttcatatattcgacaattcgatgaatatatatgatatttacttcttggctatgaaaggctaactggcagctaggaggctgcgggtgaaaacaatatgaggaagcatggtggaaattgataatcaacttccaactgagcttttcttgtaccacaaatgtgctgtga

SEQ ID NO: 30271 - DNA, 312 bp, Zea Mays
cctcctctagagcagcagacatttttgatctgatacactgtgatgtatggacatcccctgtaatcagcatttctggctataagtattatttactcattctcaatgacttctcgcattatttgtggacttttcctttacgtcagaagtcggacacttcccaccctatctcacttcttcgcctgggtctctactcagttcggtcgcaccatccggagcatccagtgtgacaacgggcgcgagttctataacaatgcgtcctgtgacttcttcctctctcgcggcatccacctccgcatgtcatgcccctacacg

SEQ ID NO: 30272 - DNA, 389 bp, Zea Mays
aggagtatgtaaaagaggaagagagagtagtgtgcggaggagaggaaggaaaggccgggatggcttcgatgcagcgcgcaggtgtttttataggcgaggagagggaattgctggcgtgttcaatggccattgaagctgataaacggccgccattaatggaggagaaaatgccaacagttatagcggtggggaaaaggaaacggacggacacagtattccatgtcgccgagacgacagcggcatgggctcgaatgtgggcgtacgcgacggcgaggtgctgtgtgcggcagctgcatagacgaagagagtacaacagcatcgcctgggaacaaagcgtttaagcagagaaacgaatgaacggaggagaaagaaatacctgcaagggcccc

SEQ ID NO: 30273 - DNA, 326 bp, Zea Mays
gaatatccttacaaatgatcaagccatgaatgtattctatgatgctcttgatataaatgagttcaatcgcatcaagaatctcacaaccgctcatgagatttggattaagctaatggaaattcatgaaggaactacaattgtgaagtgtgccaagctatatgtgtgcaatgggaagtttgatcagtttattatgaaagaagatgagagtgtatccgatatgttcaaccggttaaatgagatagtgaatgaaatcaagagacttggttttaatgtaccggatgtggatttcactcataagttccttagatcacttccggagaaatatg

SEQ ID NO: 30274 - DNA, 596 bp, Zea Mays
aagtcacttgcattccatagtcgcgtacaacccgttagagttgagtttgggggcgtagaagtgtgctgcagcgttggtcgtccatggcgccgccgtggaatcgcctctgggtcggtcaccgccgcatctgccttccagggttgaagacaaggcacgtccgttgatttgatctgaacgtctgggattaaaccgtagataccctttcagcactttaaatcttgaccgtggggcgtccatccgagggggggaaggggcactgtcgtggttggatctcgggcgttggcttgggatccaacggtcacggttgtatactggttcacataatgcgccatctaatcgcgaccctcagagtaagatccaacggccaagagctagtgacacccccttcgccgaggccgttttctaaaagagtccctcgggttcaggataaataacccgcggtcctcgggcgctgttcttagagtcttagaaacatttgtgcaatagcccctgtagtttctagaaattgacacgcagtcctggcctctaggaaaacagagaaactcatttaagaaatgatttttaacacaaaattaattatggaaacttgtttaatt

SEQ ID NO: 30275 - DNA, 413 bp, Zea Mays
caagtttctattccttcacgaatcgagtccctaacggtgggcggtgtcgcgcagagctccgacgagcttgtgtaccggccaattcactcaaagaccggcgccctaccttagccgagacagaaatcaagatctaatgagcatttcccctcactcaatttcacgaacggatacccaatttgtcctggcaacggtgacagtgggcatcgcggacagacaatcgcgttcctggtgatctaagggatcctagttcaatcaagttggttggggagcatcaggggcacacaagaacactaaaatgagagggcagagggcatgagcagacctgaatcgagctggccgcggtgaggattctttcacggtggcggaaactcagtttgggggaagtgagcaattcgtggtctcgggtggacaat

SEQ ID NO: 30276 - DNA, 830 bp, Zea Mays
tgcagtgcatcttgcctaagaacaatgggcaagtacgttgtcatgacttcctcagttgctccagtggcctgggcagtgattgtgtagacggccaaccacccacctagatcctgtttgggcttgtagttgtcgacgttggagactttgaagataggcagccattgaattgcccaaagtcgggtgaagggtcgagaccccgcacgtcccccagtcctcctggtgatattcttgggcatggtcgtgatgatggtccctgggaggtgagtgatctcgtgtgtcatgtcgcctctcccgggctgaccggcctagagccgggctattcgtataggctacttccaactcagctctggtggcacggctacatgccggtgcaccatgatctcgatcatactcttccccctgcctcatctccttttcgttccagtgaccgcgtgaagctttgatgttgcttcgtatgtatcgccaactattgatggcatggcgtaggtcatttgccggatggatgagggtaagaagatggttcgctgcctgggtgagtatctgccagtagccttccacgtctaggatgcgcggcaagccattggcgatctgagccaaggctccaccgacttcactcggcgtgttcaatgtttgagcaaaatcaggtggcagattccgagcaagaagcgggttctcgtgtcaaagcctgtcgtcctgctcagcttgttcccgctcgcgctcctgggcatggtgatgatcacggcgtcgggaattgcggcgctcacggtgcgctctgtcgttaggggtttcccctacttcagaggcttcatcctgagagatgggttgagcag

SEQ ID NO: 30277 - DNA, 383 bp, Zea Mays
tgattttcgacgaccgtcccttagccgtcaaaaataactgcttattttcagcggtaagtcgatgtcgttactatagtgtcagactttattgtataaacaatgcaatcacaaataatatttgacaccaccatatataacatttctattctttaaagccggtgcaaaacggcgatgctgggactatccacgtcgacacaaaaacttcaagccgctcgatcgtgaaccggcgacgcggctctatcacatttttctactggcagctcgtgcagccacgcaatgcttctagagaaaccggccacctcctctctctctctccctctccctcgtatggctcggtcgtcacctcgcttcgcctcacccatcgtcacacggcgccctcccgc

SEQ ID NO: 30278 - DNA, 369 bp, Zea Mays
gcgcgatcggtgtcggtgggaccgcgggtaaagaaatagaggggacaatgatagggttggcatccaggagggtgttgaggtcgataggtggggaagaaccggtgaggtgaaagagggtttagagtttagggtcgattggtgggatgactgagcaacttggacggaagactgttgaggaggtaggtgacagtgttcagtgtctcaacccagtggcgggcgagaaaagcttggaagaggcggtaacacaacatgttagtggtggtgcgaatctgcactcagcccgtccgttctaagttctgaggggaggtgtgaggacactggacacaacatctgcagttgtatgctgtgggagagaaagaacgtatgaga

SEQ ID NO: 30279 - DNA, 288 bp, Zea Mays
ttcttcagtttttgacctttcagccttatctttgtcaaccttcgtttcaactagctcaaccgaaggtgccttcggcattatagccagctcttcagccttctgcgtgggaggaacaggttctcttgattcagcagctgaagaagcctccccgccaaactcaggcaccacggccggttcaatatagcgcggccggtgggtaagaacctttaactttttgcccttcggcataggctcgtctggagtggccgaagtagcaacttttctcttctttccctgtcctcgcagcgg

SEQ ID NO: 30280 - DNA, 302 bp, Zea Mays
ggcggagttaagaacagggagaaaggggatttgtggactgtgtgagttctccggtgaaattgaatcgagtgcttagtcactgaggtgcgagatgtggtgaagaagcggagtctgggctcaatttataggccgacgaccggaatcgaatgaggatcgtggatttcagatcgcgctggcgagcttaccgcgcggcagaaccacggtgatggcacgatggccgccgtttaaccggggcttgccacctccccgctttaacgccacatcgcaaaagtcttttaccgtggccgccgatgacccatccc

SEQ ID NO: 30281 - DNA, 352 bp, Zea Mays
attagaagagatctcatagctcttatccttagatcagataagcatcagctcggatataaatacttgtaagaggtcatctgtggaattaagcagaatcagattattctggcttccctgagggatccaggagttggaatcaatctctcttacccgcgcagcctaggtcaaccacggcgccccagcgcaaccgcccccatctccctcgcgcagttgttcatccttataggctaagggagatccctggtaggatcagcaatcctaccaatttggtaccagagcccttcgatcctccggccaccatgagttcttcgtcgcaatccccaccggcctccatggccgccacgcctccagc

SEQ ID NO: 30282 - DNA, 295 bp, Zea Mays
aatgaccatgcacgttgtaggaactaacgggccacaaagcaagactataggagatcatgaattatttactccaccgacaccacctagagcatggagtttgtcacgacatcaaagctatttgttaggtgatccaagttcgctgaccttgtctcggcaagtaggacgacaacctcatttacgcagccacctcagtgaagctactcaatggtgaagcccgtcacgacgccatggtgactcccaaattccacagcctcacaaacacgcattggaatgtcaatgagatgcgacatttgat

SEQ ID NO: 30283 - DNA, 442 bp, Zea Mays
ctgatttgttgtagaagcaaattgacaagattgggatacccactttgtcctaacaatttggataccctaacaggaccatatgctcaccaccctcgtctactctggctccacgccatgcttcatggcggctcaggtggcacgccggctccacctgactcccacgaccaaggatggcacaacggtggaggtgccaacggcaagcatctgtcttacctcagggtatgctccgcgctcacgttctccatcgacgacgagtcgttccacatcgacttcctcgtcatcgccttggaaggttgagccgatactcgagtgcaactggttgcacactctcaagccaatcatctaggaattcttacgcactcaccatggcgttctaaaggctcaacaactgggtcacatggacaggattgggcgtgtctcgcccgccggcattcgctctctc

SEQ ID NO: 30284 - DNA, 288 bp, Zea Mays
ataccccagacgtggaagactaccggcggctgcttactcatgcagctaatcaccttgtacccctcgctcatcccgtgaatgaccttcgtcacgccatcaacagccgacgagacgcgcggagctccatcaactcctcgcgcgaacgacatcatgaaaattagataaggcgcagggaggagtacgactaggatcacggcataccagcatagagtcgtgccacccaagttgagtcggcggcagcctcaaccagtgagccattctggggacagttgagacgaccagctattg

SEQ ID NO: 30285 - DNA, 271 bp, Zea Mays
gcaagctttgcctcagtaggcactgtgggttctgcctcagtttcagcctgagtcattgtagtctcgacttctatttgcttagtatcagctttgggttccgttttatcagcttcggcaaccttccctataggagcgggacttatggagtcggttgtttctaaaatatccaatacatttaccatccttcttctcttaggggttatggcagagctcttttctaccttcagcgctgttgcttctgctgaaggacttaaaatccctggcatctttg

SEQ ID NO: 30286 - DNA, 355 bp, Zea Mays
gtgggatcctatctccgggtcgtactatccctagaggatctcgtcattccttgtatatttatgataggattatacttaaccttgccaagttccttgcttcgatggggctctaggtctcaaagggttcagcgtctgataactctcgtatatgaggttgactgactgaggaatcttaaagactaagagcggtagaggaccgtgagcatctaagtgttgttagtgcttaggacggactggccccgggcatctatggccttcttaccgccatggggcatgagaggggacctaggagacataaacttataagtgcatcaccatacaagtgacatttgggaattaaactcgtaagtgccct

SEQ ID NO: 30287 - DNA, 521 bp, Zea Mays
ctcaacacctccactgcctaggggtccggggccgactgtgttgcctgtgccgcctggaactggcggacctacccctctagcgcccgcaccttcccttccaaacgcttcactttctcctcgacctcgagctcaacctcatccagcagcttgttccgccttgcccacatctcctccctgaaggcgaggtcctcctcctgccaagcgaggtcagttgttcatttcgccagggaggcttccctcgtcttgaggtttccctcaacacgagcgatgtcactggccttgtcggagagctcctgctgcagcttcttcagcttcgcctcaaccgtagcttgcttgtcccgctgtttctccagcactgcattacaagctttcaacctatcatggagtgttgtgacggcctcctctttttggtctaggtgcttttattcctggccaagcttctttccctttgggtcacctcctcctctcggtcagacaccttccggatgtcctccttgaagtcctcacgctcctgctcaagc

SEQ ID NO: 30288 - DNA, 393 bp, Zea Mays
tggattttgtaaccggactgccccagacgcaaaaagaaaacgactctatctgggtgataatagaccgtcttaccaaggtagcccacttcatcctagtgaaactaccttcggaggagccacccttgcccagatatatcttaaggagatagtcagactccatggtattccacggaagatagtgtcagacaggggaacacagttcacttcaaaattttggatgagccttcagcaagctatgggcaccaagctagacttcagcaccgcctatcacccctagtcagatggctagacagaaagggtcaacaaggtccttgaggatttattaagagcctgtgtgttgatgtttgacagaaattgggagtccagtttgccttatgcagagttctcgtataa

SEQ ID NO: 30289 - DNA, 713 bp, Zea Mays
gtgcaaaagtcgcctaagggtgcagccggactagcacaacaagtgcgcaaaaaccgaagtcttcctccaaagactatccgtgcaaaagtcgcctaagggtgcagccggactagcacaacaagtgcgcaaaaaccgaagtcttcctccaaagactatccgtgcaaaagtcgcctaggggtgcagccggactagcacaacaaagtgcgcaaaatcgaagtctccctcaaaagactatccgtgcggaagtcacctaagggtgcagccggactagcacaacaagcgcgcaaaatcgaagtctctctcaaaagactacccgtgcaacgaccgactacaagtgccgccggaccgacataataaacacgctagacctagtgcacaagtcccctacgggcacgaccggatcagcgaaggcacacagcctcttcatacaaatcatagttacatacgtacagcgagggcatcacacctaatattggttcaaccttcgggataatacccatctccctatagttaaacagcattatcctcagctcctcaccctcaaaaagacttcgcaattccccctcacctacactcgccccagctagcgaggacaacaattcccgcttgccagtcctgtccacacgaggatgaccaccctccacctcactcactctacgcttcaccaaagcccttcgacgcctacacccaacacttggacccggaacttcagc

SEQ ID NO: 30290 - DNA, 399 bp, Zea Mays
gcgaatcccgtctggcgaggtcagcgtcgtcatgaatcggtgcttcgccgtgggcaggggcctgggcgcatcgtttcatggatgggggttagccatgagtttcatagtggtcgagcgttcatgaaaaccaagtcgggtgcgtgaatcggacgagggtcaccgtagggcgcgttcgccggtgtgcctctgtcactctgggtgcacgtcgccatgtccggcgcacggaggtagtaggagtgtgccgccaccatttgatcttgatcctgcggtcaccatgccataccggatcgcgtgggcgaagatctaatctgagccacacatcttcaatcctacggtcggaatcggataccgattcgttactgaggccgatctaatcgtggccgtggaatttaatccgac

SEQ ID NO: 30291 - DNA, 400 bp, Zea Mays
ggtgagcaccaacaccatccttgagggccgagttctctgcagcagccacctctaaggctgaaggtccctcagtcacttccatgggagcggggcaatccaagtcagcttcctgaccctcaagaccgcgctccaaggtcgatgaggcgcgggacgctgcccgggatgaccccaacccggcgtcgagcacatcagcacaaacatccatcgcgtcaccatctgccggttctgataacagatcctctggaaccatatcttcaagagtttgatcgaagttcgccagagataattcttgtagaccaatgagggcagacaaagcaggagaaggaacgccactgctttccccactagctatgtagcgccgactgttcttccgaatcagagggatttcatcttcttcctc

SEQ ID NO: 30292 - DNA, 677 bp, Zea Mays
cgttgatgttgtgcatcaaaatcaatgacttagcataaggaagctcccacaagccacatatgtgagtccagttatgctcctcaccaaaaccttgataccttttcccactatcgtctaggacaagtttcctatgctcttctgtaatttctatcccactacgtcgcttgggcggtcccttcgtgacgatggtgcccttcctaaactcctttctctgccttctgaaggggtgattgaagggtagaaaacatctatggcaatcaaagtaacatatcttgccaccagcactaagacgaaaacaatctgtatctttagcacaataaggacatgtcaatctaccatgcacgctccatccaaagaaaataccatacaccataaaatcatgaactgagaacagatacgcaacacagagattgaatttctgcttcttgaagtagtcataggcttccactcctcgccatagcttctttaactcttcaatcagtggttgaagcatcacattgaggcgtacgccaagatgctcaggcccaggtataacaagacataggaacataaactcatatttcatgcaaagagcaggtggaaggttatacggtatggcaatgataggccaacatgaatacgatgcagcggtcatattgaaaggtgtgaaaccatcagttgccaagccgatacgaacg

SEQ ID NO: 30293 - DNA, 451 bp, Zea Mays
ataaagttatgaagagaaaattcgccccaccccagatttgctttatggaggtcttatcctgcttaatcttgcaaccattatttttaactaacccgcccacacggattccctccatcgctggtatatggcatccggaactataatcctgtaggtccggaaacccgaggtccgactctaaagaaagggcacacgtctcagggggaggtccagagctgcgtgactgcttagcccgatcccgtaccgtaagcctacgcactccaccaccatgcgacgagtaccctagtaattagaagtcgtgacccagggggtccagacacacgggtcggctagccagaccaaatcctacaggtcataagtcaaaggatgaaggataccaattaatgggtccgatgggtgcactactgaaactccctagctaaggctgtgtgcaggtccgggtcccagtcgaaat

SEQ ID NO: 30294 - DNA, 505 bp, Zea Mays
gcttgagcaggagcgtgaggacttcaaggaggacatccggaaggtgtctgaccgagaggaggaggtgacccgaaaggagagaagcttggttaagaagaaagaacacttagaccaaaaggaggaggccgtcacaacgctccatgataagctaaaagcttataatgcagtgctggagaaacaacgagacaaggaggctgcggctgaggcgaagctgcagaagctgcagcaggagcttgccgacaaggccagtgacattgctcgcgctgagggaaacctcaaggcgagggaagtttccctggtgaaacgaacaactgacctcacttggcaggaggaggacctcgccttcagggaggagatgtgggcaaggcggaacaagctgctggatgagcttgagctcgaggcacaagagaaagggaagcttctggaggggaaagtgcgaacactggagcagcaggttcgccagttctaggcagcgcaggcgacgcagacggccccgggctcccag

SEQ ID NO: 30295 - DNA, 296 bp, Zea Mays
acaatagagaaatcagctagcgatagtccaggtactaaatctaaacttaagagcccaatgtgcccaaacaaccgagaagcccacttggattatcaatctggcacaagaggctagaaaaactcagtgcacaagagctggagacgagaggcatgacatgggcctctaatgggagttctcaagatccaggtaaggatgattcttttggaagaagtggagcaaaggcaaacaaaagaaagaaagcaagtacaagacgtttgggtgaaaggtttgccccaactcaacaaagttattggtca

SEQ ID NO: 30296 - DNA, 336 bp, Zea Mays
tcatttgcttctatgttgttgagtatcacttgccccaccgagtggctcgacagtttggtctgcgttaggagtatccggtggagcccttctccacttcaatagaactccacaagtgagtgactttgtccatttgtatagtctaattattatttcagatatgcaatgaattactaaaacatgtgtgtaccttttgcaggttcgacagacagaggcagaagaaggtcaccgacttcgagacccaccaccgagattatattgatgaatgggctaaggaggcggacctaaactacgagaacgaccaaccgcacatgaactaccacttccgcaggtatttga

SEQ ID NO: 30297 - DNA, 398 bp, Zea Mays
agatcaacgctccagattctaaagacccgaatggattcctatgcttcggatctaaatcggatggtgcatgctaaacacccaaagggctacgttggcttctaatcacaaccacccattgttaaatcgacggtcaacgctcatcccccatccccggctgtccatccggtggcgccgctctgctccctctgccgcaaactcgccggagttcccccatcttgcgaaccgaagctccagaccatgagctattaggtgcaacacgatgccctcgccaccctgaatcaacaggatgggcacagacactcaatacttatcccagagcggcttaccctgacgcgctacgaccctagggcggcgccgccgcagcaacgaccaatttcccacagccaagtccaaattcc

SEQ ID NO: 30298 - DNA, 368 bp, Zea Mays
tcttgccagagcaccaaaacccgatgattaagaaccccaatcccctagcccgacggatcaaagcatagagaaccagagagcgaagtggtggggggtttcattaccggcctccacgtagtgtagttctctgtttgcgatgagagacgaccacgcggtgatgaagcgctccggtgcggaattggccaagcttcaatcgatcaccgcccatagagactccatctgtgcggtgcgtcgacagcgactgccatggcaccggcaccagcaactccatctatgcggcggtgcgaggtggtgtcggggctagggccagcgggattcgacgggtgctctagggttgggctctggacggcgggtggctgaggcgtggg

SEQ ID NO: 30299 - DNA, 392 bp, Zea Mays
gccaaacttagatgatctcggagctaggtataactgggcatgattcataggtttgtagcactgagtggagtcgtataaggatcaagaagataccgaagaatgttctttgtttccctagtgggatgggactatgcaataggagaccaccgaccatccaaaaactcaaggagtatgggtacctcaatatccacaacatcaagctagggcatgggcaagactacaagtgctccatttactcccaccaattgaattacaaaaacaatattgtgaccaaactgaggaccactcgctcacttgaatgctcttagagatgatgacactctagtgcaccatctcttgatctccaaccactttttgcggtggtctttgtgagaccaccatatgcaagagag

SEQ ID NO: 30300 - DNA, 472 bp, Zea Mays
gttagttacttagttatcagtgttcattggttgtgttcaagtatgcaattcagtataacatgactgatcgtaggggacatagtatgtagaccatgctacctaacttatgggtcaattaaccgatccagctgtctctacagacacctagcaaccttttctttatagagctcacatgcaatccgttgtcgcattcaaaaggattctaaggatgctttgcctcacctgtattggtgttagtggttttcagtgacagggtttatgaaaacacagttcgagctcgttttcttctccattatttccccttcgtttattgcgataaaactttttggtttgggtgtacgtaggatttcagtttcctttttgtgaatgtggtcatgcttagcatattatcataaagatgcattgattattcaggacaatgatttggtcaactcaatcccttgcaaaaatgtacttgagcagttgaggatgc

SEQ ID NO: 30301 - DNA, 440 bp, Zea Mays
gaagcggagagcaaagtcatcaacatcctcacctggcttgaaggccaggttcccccctccttgcgaagtgcatgcagtgtggtcttgcgggcacggtcgccgctgatgcgggtcacagcgatggtgtcctaggcctccttagcagtccgtttctgggaaagcgaaaactgcatctcgggagggactgcagcaatgagggcatccaacgcccatcgatcctcatagtaatcggcgtcgccgtactgaattacttctcacatgtggcgaacttggaaccgtaccttcatcaccgcggcccactcgacgtagttggtcttggtgagggtaggccacccaccaccgggactgatgtccttgacaattgcatggaccttgcggtggccatggtattgatccggggaggaagagccgcaccgcctgtagaggccacgatatccgtt

SEQ ID NO: 30302 - DNA, 308 bp, Zea Mays
gctttgttttgcctcagatgcctatgcgtactcgaggttcggatggggccggaatatcgcatggtggtgtagaaactaatcctaatcctcccccgccactggttccgcctacgctggcagacgtcgttgctgccctggtaaatgtcactgtggataatgccagggtactgcggcaacttgccaacaatcaaaacaatcaggttggagttcgtgcccaccagcatcatatcagcaaaggaatgctatatatatggagatcatggagatctatcccctagtgtttgcaaaagcggaagagcctcttgaag

SEQ ID NO: 30303 - DNA, 423 bp, Zea Mays
ctggcagtggaagctaaaactgtaggacacgaaaaatcaaaggggttcggaggtgaaaaatcaaatcaagggcctgagaaaagaaccagatcggtgatctgacctttcaatcaaaatcgctcttcgccttgcccaccttcatacccattcaagcagtctgtttttattcgtcccactactgcccccgctcctaaaaatcagtcgaatgcctctagtactcgtttccctgctcccccctagttcttccactgcttgcttcaactgtggaaagtccggacacttcatcaaggactgcccatacccgaagcaaaataaaaccaatttccaacagaactctgggaactccaaccaaggaaaggggaacacgggtaataatccaacgggcaagaatttcaagaaaacaggacggatttactataccca

SEQ ID NO: 30304 - DNA, 332 bp, Zea Mays
taaccatacacatttagatcacaacaagcaattcatcgtgattacgagcttaaccaagtcatctaacaattcggctaactagagcaacgacatagccgctacataacatacacgtcggcttgcctattatcatcacaatccgagacacaacatatactacaacatttttataaacacacagattcacaagtatattcgcacatcgaccaatttatatgaatcgtaaaccactaatctccaaatcgcaatcaccatgcatttacttctccaatcatgaacgcatacatgtttatcatatgaaccgagtacttcaataattatcctaaaacaac

SEQ ID NO: 30305 - DNA, 419 bp, Zea Mays
ctggtttgatctccttggattctcaaaagggacccggtcgctttttgccctcccagtccggcttttagcgtaaaggtgagaagtccagcccctgttactgttagtggcttagtgccaatccgccaaacaactccagtgcagggagcaagtttgcttccctgtctgtctgtctgtctctctttctttctactgtagtatcttttaacttgctctgatgatcctggagatgagaatctgtgagctacacattattgttcttgtccacatgcaaatcaatggcagtaacttgttggcaagaccaagagactgaatctgctggtagcagacaccgggcacgcatgcagcgcctgtagcctgtttcttgcgccgctctatgcaatgcaatgcaatgctatgctattgcagccacttgtttgttg

SEQ ID NO: 30306 - DNA, 552 bp, Zea Mays
aagaaatgcagtaggctttagaaatgcatgcagtgatgagtttacatcatgctttaattcttatgcagcaaaataaattacaaaacaaagtgtgatatgcaggtacctgtaagcctgctatctgctacgtgaacaagcaacaatgtgctcatccttctaggcaactgctactagaatggaaaatatatgaatgttttattgaacatattgatagcaaagtggagcaataaaataagcaaaactctggcctttaatgcaaactccattacgcagatgatccaccaagttgctgcttccgaacttctcgcacccaactgaaaaaacattgttcaacataggcaaaaataaatcttactatcacaaaccaagcagagcaatacaagctgcccaatgaaacgagtagtccgactccttaccttaggttgatcataatgcttgcttccaatcattatgatattttgaagaaaataattgaacaaaatgtcagagaagttccaatcagtacatgaataaagacattacttaattacttaccaaggtgaagaaattgat

SEQ ID NO: 30307 - DNA, 375 bp, Zea Mays
aaaagatagagaagaaaagatactacaagaagaagggtggcgaggcacacatggggtgtgaatgggactccgacgagagctccaccaactcctcctccaacaaggacgttgtcggtgtttagagcccgagggtgttggggcaggttccccttctactgcttccatggacgtccacgttggaccgccaccattccaatccgaggaggctgcggtgacacatctatctacgactctcgctggtctggttactttagaggctagtgaaccagatgctaggagtctgccgcctgctgatggggtcgaagttcctctgactcatgactttgatatcattcccgctgatctcccctcatcaaacaatgtgtcaactcttcc

SEQ ID NO: 30308 - DNA, 413 bp, Zea Mays
cagccgaaggggtatcggccaacgagcgccattggatgcaggatcaacggcgcagattacacaaacctctttatgaaccggtacatgatgattgccataggatcggaaatccacggtcgttacttaacggggcgaaagcgtatctgtcacttaatctgattcgttagttccgtgatgaacaaccatcacactgtatcccttccccaatcaccatcgcgaaggcatgtgcccaccatggcggcggcgccacagttccccacggcggaagtcaccggagtagtgcaatccggccccagtgaggaattgcgatggcgccaaggactcccacgactagctactcccgtgagcacctgccccgaggatcagcgatgccccaaggtcccctgttgacaccagaacaaccacgcaagaac

SEQ ID NO: 30309 - DNA, 505 bp, Zea Mays
ggactgtctggtgtgacactgagaaggcgccgctcttacgcccaggtcgtggatcgtccggcccagagacgcagttcatccgtgctgccatagagggcattgctaggcggtacaccccctgtgattagcgctgcctagatcagtgccaacactcttatctcgctctgcaaccctttttccgtgcctcgatgaactgttcatagctccagcaggccccctatcccggagtgcaaaatagaagccacccctggcgctcagtatgcctatgagttctttctcatctccgcacctcaaccttcactttcgtccgctcccaccgaatccgctaccaccctgaggatcgaccttctttctccccccacctattgtcgaaaccacaggagttggtctcatcacgacgctccacctctaagcccacctgctgctcaaggaggactgaagggagtacatcaacgtctgctcctgcatcaacaatgttgcatcctccgtcgatcgtcgccattgt

SEQ ID NO: 30310 - DNA, 453 bp, Zea Mays
ctcgcgtgtatatatgtaaaggtttgtacgatgaagttgtgtgccctcgcttgcctgtgcctgcgggggcgttgtgtactttgtctggtatgttttgttatgctgtgctggtgtggttatagtcggtcttaacgcggacggtttgatgctgtcgtttctgcttttgttgtactggttcggctgcgccttttaggcggctactgcgtggatggtctttgcggtagacttcggggtttttcgcacttgttgtgctagtccggctgcacccttaggcgacttctgcgcggattcgtcgcacgcgagggtggctagcgcttagcctcgcggtgaccccgaattggtcgaatgttgaagaccgtcgtcgcggtcttttttcgacgcatgtttttgcgggggatttttcacacatatattacatggctccgcctcgttaaaaacctcaccccccccggg

SEQ ID NO: 30311 - DNA, 397 bp, Zea Mays
taaaagtaacttttaatcccttaatcagctacacagaaaaggatcctatgtgactattacaaacaaccattttttgctgcaggagccaaacagcacctctccagtgtcataagctaactagcttgcagctgcagaccaaagggcagctgagcaggcccattgagacatccagagcaccttcttaaacatttaagaatttactgcgtttccataaaaacaacaggttcaagcaatttggggtagggactgaggttttataggtggttagaaaaatcaacaaccttagtaattttacaagaacaaataagctctgtgatcacagttctatctagtatatgttatggtatggtacatggtgtatgcccaccctattgatgagaaatttctgagtatagca

SEQ ID NO: 30312 - DNA, 396 bp, Zea Mays
gtcttggagtacatgatctggaaaggatgagttgggcactgcgtatccgctggttatggtttatgaaaactgatccctcaaaaccatggtttggtcttcctagcaagctcaagcgttcttccaaatggccataactgtaaatattgggaatggtatttcttccaaattctggacagacaattggttacaaggaaagagtgtggctgaccttgctccaaatctgatcctagtagtcccaaagggagtaattaagaggcgtacattgagccaggcattatccaacagaggctgggtggctgatatcaagggcgctctaacagttcaggttttgatagaattcctcaaagtctgggagcttgttgagggtatagttctacatcctaatgtcccagatca

SEQ ID NO: 30313 - DNA, 382 bp, Zea Mays
tgcagcaccacatttggaaggaagcttttgagatctttcgattgatgcattgtgtagctgtacggcctaacctggtcacagtggtgtctgtccttccttcttgcagtgatttctttggtataaaccatggggagtctgtgcacggcatgattatcaaacttggccttgcagagcacgtttctgttgctagcgctcttgtgtccatgtattcgaagcttgggaaattggactcatcgttgctccttttctgctgttgtactgagaaaaacaatatcttgtggaactctatgatttctggataccttgtgaataatgagtggaacatggctcttgatgcgttctgcaaaatgcaaattgcaggtgttgctccagatgctacaac

SEQ ID NO: 30314 - DNA, 508 bp, Zea Mays
gcggagatttggcggcgggttaaaggtgggagttttatacggttccagggtcacatagctcgtgcgcgcgcccgggatgtaggcttcgaggggattatacccagcttgatgccggcatcttggtccagtcttttttgtttttgtatggtttcggactggccgtcagctcatgctctggagtaagttggtgggtttgcaattgctaggtctggctgcactagtttcactaaatttatgtaaacctaggatttttatcatgaggaggaactgtgcctacagggaaatttcagacccaattttggcgtcgctatattgacaaccaaaagaaactgaaatattgtcttgttcatgaaattgtcctgtctggaactaagcaagcttgcattccttaacagttgatatctctactgccatccctggttttggctgtgcctttgtggtaccattacttcagcacaagcataccaaatgaaatgtgtgggcaaaccatcctatattatttgttgat

SEQ ID NO: 30315 - DNA, 530 bp, Zea Mays
gtttgccttcttgaccgttggatgcggcgaagatggaggggcgtactaccgcggggcggtggcatgctccctgtgcgacgattcgccttcttcgcgcttcgggccagcttgtatgacatgtgaggcctggcccccgtgtcataggatgggaaccctggtgcgcatcgggggagaccttgcccgtgacgcttcggggcgcgagcggggaaatctgcctttaaaaaggggttcacccctcgagtagcagccatgtcttgcttctctcccactcgcggtgtcctttcacctccgagctccctgcgcccttttgccttcaaggtctctacttcacgttgtcgtagtttgccatggccttgtgacttcatcccgagcacacccagactgagtgagtgctcgaaatggtataccgcctgcttggatggaatacgctggtatttgccgggaggacttgtgctggtgtctctcctctcgacgacctttctgccaaagagtttgtgttctttgtttccaaactccccagtgggttggct

SEQ ID NO: 30316 - DNA, 467 bp, Zea Mays
aagacaagagcacagaagaagacaaggaatttgagaaaaagaggttggaattggaagcacagaaagtaataattagacaaagggaattgaaacttcaagaactcgaatcggcccaatcacgattacagatgctgtgttcaacgaatgaggaagatgttgatccagaagtttggattctcatgaaggaacagaaaaagaagttgcagcagtttatttttaagtttgagtaatttttaacgttgtgtgacatggcgtcaaaatcattcctggcgtggatagtttttatgtgacatctttgttcagaacattgtacttagttcgaaccataaatcgtgcaggacataatagctctatgttatgtcgtctaatgttgtaatagataataattctgcccaggagtggaaccatgttagatcattatttgaagcatttgtatgtcatggatttgttgtgaacaatttttcaag

SEQ ID NO: 30317 - DNA, 363 bp, Zea Mays
ctttagaatgcaggattgtgagaacataggaataggaaaaatataggaattctataggaatgtatatggaaaacagaggattgaaaaacacagaaaaaatgtgaaagcaagtctttggatgaagcgtaggaaacttataggaataggaattcataattcttcttagattagattagcagtcacaaaacgatgctttggatgaatcataggaaagtatagcagcaacaaagtactgatttgcctcgatcctacgcgacaggaattgaaaaaagaggtccaagccaatgttttatttcctgcgttttccctacaaaatcagccatatgggaaactttccttcacttttcctttgcttcgttcctg

SEQ ID NO: 30318 - DNA, 339 bp, Zea Mays
agcacgtgatgcagcctcacgttggcgatgatggggacagtgatgagtggcaatacgccggcccccgccatgttattggggcagtcggatgccccgaaggatatggtggtactctgccaccgctgatggggagccgccttcaagacccccgggatttcacgtccctccaggaggcgagctcccagctcccaccatacatcaagtatatcttcttatggtggtcgtcgtctctagagtcagagtctcctgagaggacatcctttgggatttgctcgggggactagtacccgaagtcccgctcgcctgcggccgtgttgccgctgtcagctttctccttgc

SEQ ID NO: 30319 - DNA, 503 bp, Zea Mays
gttccttattgacatctagatttggaatgaccatcatgcaaaggaagctcacaccaaatgatgatcacgattaaacgcataagaagccccttgacaagactctgtcccggccggccggcgcactacctcctatgataagctcccgtaatcaatcagaggtgacatctcccaggacttttagtgggggaggaagaattgacatgatacccccctttgaacagtgcagcctacagcagggaccaaagcccccactagctagagaagcagtcttttgtttcgggcgactgttggacacaagtttgctgctatagacccacaacgactaacgctgttttcagttaggcaattggttgttggtaacaccactggagtgtccttcagaccaatcactgcactccatgcccattttgtggccacaaccagctcccatgaatccgatccctacaggagcccactcacgagtcgtctatcacgttgacctatagagtatagcctcatgcccc

SEQ ID NO: 30320 - DNA, 344 bp, Zea Mays
ggacacttgagaaatgtcttaataagtgaaaattaaccgtctcatataataggatctgtagtagtgtctgcacaggtgtagtagaaaccctctttggacaaaaaatagcataatgacctgtcttaccacacttatagcacgtggtaccagcactctgccctaagaatttcgccgaggtgccagtgggggcagcctgacgagtcggtggagtcccctgaggtgtgtgctgagctgggcgctggcctcctctagtgccagttggtgtatcatagggtggaacataacgaggacgaacgctgctgcttccctgaccttaggatatagccttcctcctcaaatcccct

SEQ ID NO: 30321 - DNA, 813 bp, Zea Mays
cgtccaccccgaatttctccactctaatgcgacttcacataagtggccgtttggaggtacgattttgtgtggtttcagactttttcagactacaatcttcaatgttgttgcattgtgtcttacttttgccttgttatatagccttggcagagttgttggacaatgcagtcgatgaggtaattaaacaaactcattgttgagccatacactttgattgctcataattaattgtgtgactagattatttttggtcaaacagatagaaactggtggtgctacaacaatattgttggacaaagtcaccgacaaacggaatggatcaccagctatactaattcaaggttctgcttgttatattatactaatgggataacatttttataagtgatatgtgattggataataaactaaaatacaaacttataaacttcactgatttttatggagtttatatgaactagatggtttgctcatgcttgcactgtaatgaagcttattttaaaaaaatcaggcaaatatggatagatgtatgaatttgcaactaacagagtgcagaatttctggttaccatacagatgatggtggaggcatggatcctgattctttgaggcggtgtatgagctttggattttcagagaaacaatcaggatcttcgattggacaatgtattgccaacttttgttctataatcagcaagtcatatcctgaaacccattgtctaacgttttggcatttatcactttgatcagatggaaatggttttaagactagcacaatgcggcttggggcagatgttattgttttcagtcgctg

SEQ ID NO: 30322 - DNA, 495 bp, Zea Mays
cgttgcgtccgaatgtggagcactgcggaggtccttgtctcttgcatcgaaggctatcgggacatgggaccgctttgtctagaccatcgggccaatgtagaccatcgggccaatgacgacgacgtgatttacccttcggtaatgatcctttttctgtcttttattttcaaattctaagttggaccatccgataatcatatggatcactcaccgaaagggtggttgagcaaagtcttcctcttgtttgggtggtggagggagggatttgatgggcttgttggtttatttgtggtggtagtggggggagtagtagtctttcctagtgggggagttggggaagttgagggggaatctgtcgtggtgcgggttgaattttgggtggtactgggggaagggtgtgtggaggtcttcatagcgagggggtattggtattagtaattatgggctatggccctttagttgttttagggcaccaccctggccatgcgacccttg

SEQ ID NO: 30323 - DNA, 499 bp, Zea Mays
tgtatgtcccttgtaatgttgtgtgccttcccttttatagtttaagggaggcacatacaaggatgatgagccccgacatgcaggcttaggagcataatggaagaaatacattataggaataactaatgttgaaagagtaacgcatgagtaattagcggaagtcatgatggttgtagtccatgcagcattgataggcagtaacccgcacgagtaatggtgagtgattgccctcgatatggtaacgtgcgagtaattgcgcggcccacgtatcgtggactgggctcgccacctgtcagtggaatggataggcgcacgccttatccgtaatgaatgcgaaggcgcgcgtagcccagaggcatcatgccaggttctgcccgttggcttataccgtgcgtagtatgccatgtggcagcatcgggtctccgcctgagcgaggaacatgagtatatgcggacaggtccggacacgtgtcggcatcggacccccacctgggccctga

SEQ ID NO: 30324 - DNA, 319 bp, Zea Mays
gtttggtgttgtcaggttgagctagcacgggtgctgttgtcaaatgctgccttagtgtatgaaaggcatcctcacacttctggctccattcatatttgactcctttcttcaacagttcagtcattggcttggcaattctggagaaatccagaataaatcgtcgataataccgtgccaatcctagaaaactatggatctgtcgtactgtggtaggaggtttccaatccattacttcttctaccttctcaggatcaactgataccccatccagagagatggtgtgacccaaaaaaatttatctccttcagccagaaatcac

SEQ ID NO: 30325 - DNA, 503 bp, Zea Mays
cacagacggacactctgcccggctaaagcacacatcaagggatggctcggctaatgccttaggaagacttccgcctcaaccaagcagatgctctgatctcgataagcgtagcagggaatctcgacgtcatcacgtgccaggacgctgacgcaccacctaagcagcctttggcccataccctggcgctgttacaacaactacgacatgggtggcctcttcctcgggggcttaggcgcacggacaacccctcggcctctacctcggctctttatgagaaatcagcaagcgcgaatcaacagtacagttcgtcgtcacatcggcctgtagacgatagggcatcactccttcggatacaacacccggctttattgaggacactccccttcgataaatagggcagtggtccctctagggaggccatccataacacacgcagacgaacgctcactcccccccactttgtcttagatattggcacttgcctcaatcatctctagggactt

SEQ ID NO: 30326 - DNA, 320 bp, Zea Mays
ggaagtagaacctgaggagcgctactagagccacctaaccaacttagctaaaggcctgttcacagaactttgaacacatgaggttagcactgtcagatttaactgagatcttggcccttgtatttgtagtgtttgtttgccctttcccccccttttatattggatgtacatcattgattttttcctctggttgtatttgctattttatgggacactcctgtcccaaatgaatgatgtttggacattgatttggtctttgagacatagctttggttactattttttgttgtgatgtctatatatatatatgaaaattatag

SEQ ID NO: 30327 - DNA, 325 bp, Zea Mays
atgctccagaagtagatactgatgagaagcgccaagaacgttttctagaaggcttgattggaccccataactaccaactgtagagtcatagtttccctagtttcaataccttgctcaataaggctattcgtctggagagcaagaggaaagagttgactgaccataagaggaagtcctagactccaggccagtctagcaggaatgtccactactagcaaggcaaccaagattcttattctcgctctgcgggacagagtgggaattaccaaaaccagaaccaatgctcaagacagcaagctcagaggtacaaccaacatgggcaaag

SEQ ID NO: 30328 - DNA, 412 bp, Zea Mays
cagcccatttaccaccagagtctttacctcaccgagcgccacgatcgtatactccggtgactcacctcccctccggccacaagttcatctcatcccaaattcgcaaaacactcgtgtgatcactataaattgagtgttcgacctgctctgctatcttgttacgaagccagtgcaccgctcctcactgtcgattagcctccagagcccccaaattcttattttcccccaaatcgagtcactcgcgccgccgtgaggcctccagtcgtgatcagtcattcccaagtctgttcatccccctctgttccatgttttagcatccttgaatgttaacgttgcttgtcagctcaactgattgaacactactgtgataggttatcgagaatatcacctcaccgccgcggaacacctccga

SEQ ID NO: 30329 - DNA, 383 bp, Zea Mays
aagccaatgtagtagcagatgccttgagcagaaaggcccagggcaattgtatgagcatggatgcgagagttaccaccctgtgtgatgaattgtgcagattgaacctggaagttgtttcttcgggtgacttaggttatatcttggtggaacccacattgcaagagcaaatagtcagggcacagattgaggataagggtgttcaggtgatcaaggaaatggtcaagcagaaggcagaaaaatacaagtgcttccggcaggacagcaagggaattctatggtttggagatcgattggttgttcccaaggacccagagctcagaaggaagatactggacgaagctcatctttcaaaattctccatgcaccctggtagtaacaagatg

SEQ ID NO: 30330 - DNA, 359 bp, Zea Mays
cggtaaggtagctctaaaggattcggtcgttacttctaaaacgccggtatcatcagcaaccgttcggtcgttatctctagaacaccgacacggcccgccgtaactcggccgtcattcctaaagcaacgacgggattttggatgactcggccgcaaccaccaaagcgctatcattacaaataaggcaatcagaaatgtgattcgatgatcacaaatactcctcgcgcattgataagattggcgaacagcgagaaagcaacataacgcacacagaagtggagcgaaatcacttttcattataaagggaagctacagaacttacaaatcaactcgttatgagttgatgacctccctactact

SEQ ID NO: 30331 - DNA, 474 bp, Zea Mays
agcacttcaccgccgtcgatcacccctccgccgcgattcgtgccgccggcgttaggactcgcgctcggggtgggtggataaggacgtgcggtgaaagatccttgccggcggtgagctggaggtcactccggtgactcaccgtggctttcttttctactttgcggctgggcagataacctcgccggtgcaccgccaccttccggccttgcgccgcgtgtcctaaccacgccaccgcatcgccgtgactccctctaaactctccatcgaccaccggagttactgccacgacgatgaacacgtgttcactgcaccagcgttcttcctcacttccgaccgccgcacatcaacgcccaaattcacggtcaccgctgaagagccctataaattgaagcccccgctagctccgcaaggtcatcctccacccggccaccgctaatcgctagcagtccttcgccagagctcgcgaattttgaa

SEQ ID NO: 30332 - DNA, 333 bp, Zea Mays
gggagttctatggtttgaagaccgattggtagttcctaaaaatccagagctcgggaagaaaatcttggatgaagctcacctttccaaattctccatgcaccccggcagtaacaagatgtatcatgatctcagatctttgtactggtggaccaggatgaagagggaaattgctaagtatatatctgaatgtgacacttgccaaagagtcaaggccagtcatttgaaggtagcgggaaccttgcagcatcttcccataccatcttggaaatgggaggacctcagcatggattttatcgtgggtttacccaacacatccttacatcacgattctat

SEQ ID NO: 30333 - DNA, 400 bp, Zea Mays
tcgacgctcgctctatgtcttcgcaggccgattccccgcgcaggaggtaactacgcctgcctctctattcgtatatatatgggcgtcgtaaccctcggtagtggtgatgttaacttgtgagatctcagcttagttctgtggatgccgtttgatttcgttgtagggtagtatgggaaaacggagcatccatagagaagataataggatatgcgggagggaatgtgtggttgtgatttctgttgttctatttgtcatgttttgaggtaaacgatgaatagtgaggctcaccgtaccttgcttcttgtgcttatgagggcaacgatagctatgtgtttagacttcttgtgtgcatcttaagatctctagtatgagctcctgggttatcaatatggatgcacca

SEQ ID NO: 30334 - DNA, 539 bp, Zea Mays
gccgcgcggagagctcgcctgcgcaatctaaagtccgcggtcctcatccaattccggccgttggcctataaattgtgcctgggttccacttctttatcacatcccgcacctccacgatcgagcactcggctcaatttcaccgaagaacccacaaatccctctctcctctgttcttgctccgccgtgaagaactccttcgtggccagcgctcctcgggtcagtaattatcaaattgttccctgtttcagttagtctttgatctcttattgctcttggatgcggcaaattgaagtttggccgaagcccatcaccggaacgcacccgtgcgctgtaaaacgccgccatgacaccctttccgtcgccccacctttctgctcatgcctagcccaaaacttagcgtgtgcgtcatctctggtgaacccaggaaccttttcccagcttcaatttggccagccaagccttcggttatccggaacatcttagttcacttgatcacccgcactgtcaccgtggacagagcttgatagaccacctctagc

SEQ ID NO: 30335 - DNA, 398 bp, Zea Mays
caaagttgagccactagtttgcttggctgaatgtgatggcatgtttgaaccaccgatatggggccaaggcactgttggttgcaaccaagatctgccgattggacactgacctccctatcaatgcgtgagaaggctccaccaccaccccaccctgctgctgcggttgatcttgctcaataggttctcctgggggaagcggcagcggctagaatggttatttgtctctaacgaaattcttgaagtccctatagtttctcagggtatgacgcatctccttgtggtatggacactgggagtcgaggatcttgtccagtgttcatacattgtcacacatcgtgccgcggggctaagtcaatggcagcccaacggcgtgcacttcttccatgggccttttgtcc

SEQ ID NO: 30336 - DNA, 301 bp, Zea Mays
cggacaccctcgagggctgggccatagtttgcgctacccacttgagccggattatctccggcagtaccctcgggggctgggcagtggcttgcgtttcccacccgagacgagtcatccccggcaacatcctcgggggctgggcaagtgtcaacaccatccttgagaaccaagttctccgaagtagccgcctctaaggctgagggtccctcaattacttccatgggagcaagatgatccaagtcagtttcctgaccctcgagaccgcgctctaaggtcgacgaggcgcgggacgctgcccggg

SEQ ID NO: 30337 - DNA, 3256 bp, Zea Mays
aaaggatgggattgagaccactcgaggttccgagctcccgcaatcaccagtgaggtatgtcggagaacttttcttataagttatgcggatacgacccaaagtgctagggagcagcatcgtgttcctcgtgccgcaatttctcgctcgcctcagttccgcctccctgactcaccaggactggggattcgctgatcagatgcggtgtgtggggccttgctcagcggcggggctgggaggtccgagcggaatagatgtcgatggcatggcggttgctccgcacaatccatttccggcatctgaggtaaacgagcgagggctttcatctcaccacctgtactgcactgatttttctttcggtctaactgattgattcaatcaatttcagcccaggtgtcaggcgagcatccaagattgtagaccaaggctttaccaataatgccccagagctgagtaccaacaaagggagtttgctgaggtgtagcagcatccgcttcggggagaagcggaactcaatttttgcttgcgctccagacaatttggagcagaaatctggacaaacgttcgaagctgatgcccattctgcgctaaaattgtgctctggtatcgggagtgtagttatagccaagtgttctcacatatttgagagaaatggggacacctttgatgggaactgcagtttgcaagatatcctcaagcctggtttatggctctcaccggagaccctccgccggttttggcgtgtctctgagctgaagcctaaggattttcttgacattttgaatggttttggactcagtgccgtaaaagtgagaaatgcaagatttctatggaatttgtacaggtggacatcgcggcagagcaaagagttccaacatctgccaaggtcaaatgagacaatggtatccatacttgcagatgctcatatgctcagtcaagcagaatcactactgctttcattgattgatcatatgactccagctgtttctagtgaactattcagtcagattatccaggtgtattcagaagcaggcaaccttgggaaatcagttgcactttatgattatgcaaggggcaagcatttgattccttcagcttcatgctatcaagtacttcttcattttctaaccagaaacagaaaggatgaattgattttgagagtatatctggacatgcttgaagttggatttggttcttgcaccgaaggaaatattcttgattctgttgtcatggctttaatcaggaaaggtaaacttttggaagctcttggtattcttcggcaattaaagagtttgggtcttaaattaagcaagggagccttgtcaaatatagttgaagaatttaacaagaaaaaggatattggggatctgatgaatttcttggaagattggaggtgtatacctgagttgcgtctttgcaacagaatccttgcgtctttgtgcacaaatcttggtacttgtcaggcatggttggtcttccaaagtttggaggccttagggtttgctccagatgctacgacttttggaattttcatttttcacagctgtagagaaatgaaactaaaatctgcacttgtatatttatcagagtgctttgctaggcatgttaaacctggagtgtgtgcctataatgctattttaggtggtgttttcagggaggggctatatagacatgcaaagtatatatttgaagacatgattgaaagagaagtaacacccaatctttcaacatataagataattcttgcagggtattgcaggtataggcggtttgatgatattgaacaagtcttgaggcacatgaaaaccaatggtgtaaatgttcttctctctggaaactgtgtgctctccaaggccttatcattcttggggctagatcacctaggggtgaaaatcaagagagataatgtcactggtttcccaaaagctgagttttttgattcagttggcaatggattgtatttggacactgattccaaaatgtttgaggtttcattgtcacaagttttggatagcgcacttctcccagatattaactcagagctaatcagggcatctcagcaaggcgatgttgcaagtgctcttcttgtgaaagacaaagcttttcaatggggatatgacatttcaccagatagctgctctgagctattcaaggccttatgtgtgagccctgcttatgttatagatgtcattgaccttatggaggagatgccagatatactttacaaacttgatgctcaaaatctagatttggttgcccaaacattgagtaggaatggaatgtctgctcatgcaaaactggttttagaaaaaatgttgagagaagacttgtcaatcagtcacaatacatatacttatttaatgataggtttatgcgaagaaaggaacatagcagggttttgggaatgttggaatcttgcaacaaagtgcagatggtcacctgatagcaaggatatgatgggcctcatcagttacttgtgcaaatggggagtgattgaggaagccctgaaacttatgaactctttatttgactgctaccatgatctgttttttagtgcatattgtgcacttctcaaagagttgtgcaggacaggtcataccagcattggatgcgcaatgttggaggctctcaaagaaaagggtgtggctgtggatcgatcattattcttttatgtgatggagggcttcctaaaggagcaaagaactgctgaatcaattggaatgcatgacatgtggcttagcaaaagcaaagaacttgatgtttttacttaccgatctgtgttgccttcattaccatggctggacacagatcgagccaagaacttggtagaatctatgctgaccgtgaaacttactgaattctcatatcgcggttgcattgtgaatgaattaatgcaaacaaggaatataaaatgggccattccagtcttgcaagaatcagctcctgggaagctcagtgccactttgttaaattccttacttcaagcctatggttggctaaaaaattggagaaagttagatgcagttctttgcaagatgctaaagatgcatgccaccctttctatatctagctaccgctttcttgtgtgcagaatgtgtgagcaaagtcgtttttctagcgcttcaagccttagagcacttttccaacatactgacaagtcaagagaactgattgcatgcaacattctaatattttatctttttcaaagaagaaacagctcacagattcatgatttattgaaggacattgaaggtaatgg

SEQ ID NO: 30338 - DNA, 311 bp, Zea Mays
tggcgtactgcatgttggtacacgtattggtagtggtggataatgctcccatgctgcagagttgcccacgttgcttgtaggggcaccttgcatgctccttttttctgctggaatctgcacagaacagcttgtcgcagtatcttgattcttagaaagattagtcacgtaatccatattcgtacccccgaaatggctaggaagcaagactggcggtaaaagtaatatttcagatcttaatttagctcctgcatttttatgtaatttagagaagggaaagatattctcatcaaaaacaacatctctagaaatat

SEQ ID NO: 30339 - DNA, 456 bp, Zea Mays
gcaacatttgcatataaccccctagggtttcagtccagggttttccaggggtctatttagggtttttggtacttctagggtttggatgccacttaagtctattaatggtgacattttatgatcattactaataagttttgaagttttctcttacttaggctttgtttactcttttaggcccaggttagggttaagtaccctactctagggttttacccatgacatgtcacatcaatacaacttgtttgaactttttgcctagtgaatgcactctaaatgtatcaatcacatgatatgctaatgttcatgatgttatgctcaaatttagtggcagtaacaccaggggtgttacatccttccccccataaaagaatcttgtcccgagattaaaagtcctagggcaagtaatggaaaaggaaatgtgtcatatttttatttccttatttttggtacaag

SEQ ID NO: 30340 - DNA, 600 bp, Zea Mays
gctgagtcctacgtgcatcttcttcgtgcaatagggctactggcttcctactgtgttgcctcatcgagccgcaacactgttgcccggatgtctgcttcgtcgttgtatctacatcgccattcttcgtgcatcgacgactgttctgcgaaatctttgcttcaccatccgttcgcaaaaggtctttatgatcaggtcttcgctatcaacttggagcgctacctatgagcgtgaggccaccgttgatcatccactgctgccaccatgttctacatccgaactactcactctcaagcacccaccgcgcttgaactgctcacctttcggtttgacgcattcattcccacactgcttcttattcgtctagcacaaccacgtcgtcaacgttgttgttttatccccagatactttgtcttttcagacaatcgtgtgctatgtcggcaccttctaccccgttgttctgcagaccactaccatcatcgagatctctgctagtccctcagatgttgatacatggttggggctttctaccttgtacgtctggtattggcaacaccaatgcatgcttttgtctttgatgtgttgatgggttttgcgaaccca

SEQ ID NO: 30341 - DNA, 297 bp, Zea Mays
tattgaccagtcacatgtttgctgaggaatattataccctgacgagcagatgcatgaaaccagtggtggacacagcgccctttttttggtttgaatccttcccatatatagcatccagttgtttctgtaagcccatccaaggccatagctgttagtattcaaattcttggatttgtcaacccaattttataaccgtaactaatccatattaacatttgcatttcattctgtagtgtctaggtgatggataattggatatatccatttgcaacattgtatcttaatgaagcctttttc

SEQ ID NO: 30342 - DNA, 282 bp, Zea Mays
caccctttgtgtgagtcatgaaaaataaggcatccaaacttggaggtttgttatccttaccgccctagtatatgcatggaacaaatgtaatcaaaactaacaagtaatacaagaaaactaatcaacatgttgagataaaatgacaaatacttacattgtcataagttacttttctaaatggtttgctgccactgtgatggaggattgtcaagttagatctattttttgaatttctcttgctccttgcctagaatgcaatgaataattagattactatacatg

SEQ ID NO: 30343 - DNA, 420 bp, Zea Mays
gttgcaagcgcttctcctacctgcgttgaagctggtccttcaggaactaaaccggtggagccagcaaaggaaggtcttccagagaagctatcatcgcctacatccgaagcatactgtcgagacgattttggttatattgtttgtcatgcttcagagaaacagttaacggaagagcaaattgtcgaagtacaatacaatgcaaaggacctgaaatatccccggggatccttagtatacggaggaaatgatgaagatgatttcctttactgcccgtcggataacaaagagatagatgtttgtcgctaaataatggataaaatgggctatccgaagcttgaacttggtctatctgcaatgccgaaggatcaacttgcaaatcatcttgcttataatagcttgaaggtttacatatttttaatt

SEQ ID NO: 30344 - DNA, 280 bp, Zea Mays
gaatgcatcatgtcggtcgagacaaggattattccggggattggctctcactggtccttaggccactggcctggttggcattttgtcgcttgccctgttcgctaggcctgattacttgtaggatgttctgattatgtggtgaaggttgtaaccatggtgactcagatctgcttcacatgagtaggaccaggttttggagtgttctcggattcacgtgtccctgatacatgggccaactagatcctaggaagtcatcggttctttatggccgatacctccc

SEQ ID NO: 30345 - DNA, 655 bp, Zea Mays
ttcatttggaagaaaaataaacattacttctgattctcatgacaagggtaagatttaccccatgggatctgtgcttatcagtgcattgcgtcttgttgatgtcttctctgatgattcgaacttcagatcattctttttgaccaacactgtaagattttttgcttaactatttgtgttgacatttatatcttgtattttccttagcaactggatatgttttaagccaaaataatgtcttgcttcaacttttttgttcataaattgtgcaggttccatttttaatccagattctagctgctcctcacgatgaatttgtttcgagttggtgcgctgtcaacttaccaacaattgaggaagatgcaagtctagattatgatccttttggtgcatctgaggtggcactattagcttctgataatatgttgactgaagctaaagctaactattcttgcccttttcgccctagcgtgccttcaatggcatatgcacagacaagaacatcatgcgtagtgaaaataatagcaaatttgcatgtttttattccaaacatatgtgaaggtagactatttctacatgttatgagtttaaatttattcacaacacattgttaaaataagttctgttctgacaacagagcaagaaagggatctttttc

SEQ ID NO: 30346 - DNA, 306 bp, Zea Mays
gcctaagtgagttcagggtgagggtgtggggatagatatccccgagtcatcatggcattgttatgcttcatgggttgcctacaaggctcccaatggtccgctcataaggcgcctagtgggcattagccgggtgcaaccgaaggagatgcacgcgtgggcgcaaaggttctagagatcatacccgcgcatgccccacaaagaccaactgatcaccggaagacgtggcatgcttctggcggaattagatagataggagtcatgctctgagattgtacagagtgatccctcctaagtcagatataagga

SEQ ID NO: 30347 - DNA, 387 bp, Zea Mays
gcgctgggggacgccttcgacttgacgatgaatggaccctcccactttggctccagcttgccccgtgactctgtccgagtggttcagacgagtacgaggtctccttcggtgaattctcgtgggacgactgcatggtcgcgccaggccttcgtttaagcttggtatttgttgagggcctgcagggcgaagacacggtctccgttgatgaggtctttggacgttggttcgtctacgtcggggatggctgatgcacttgttcgtggtgacccgtgctttatttcctgcggggtcatggcctctgatccgtatagtagatgaaaaggagtgaatccagtcacccggcattcggtcgtgtttagtgaccagactacttcaggtagttggtcg

SEQ ID NO: 30348 - DNA, 682 bp, Zea Mays
ggagccccttgtcttcctaccagctttggtgcgggtgggagccaccatcggtggaggggtggccgtggtggcagtagcgagaaggatgacgctccctagccgtcactctacaacttgtggattggccacatctctatgtggactagccatgggtggtttgtcgctatgcccactgcagctgcaacagctggtcctccttgctttacccacgttcggtagctctgggtgtcctcttggatcatctcctatggcttttccggcactgtaccagcctccacttatgttggaaaccctaaccctaaacaagctagactgttgtatatatataatggagataaatatgggctgggccaaagcccattacaacaacaaacacaattaatctaacacccccctcgcaatcgaaactgtagctgtggtaaatgttgagactggagcaaaactttgagaacaatgaggaggtaagacccttggtgaagatgacgacaacctacgagcttgccgggacgtgataaacatgggcgtctttgacagcaacacacggatgaagtggaggtcaatctcaacatgcttcgtgcgttgatgttggataggtttgacggggaggtagatagcgctggcgttgtcacattataccgggtgcttgtgggaggctgttgtgaagctcctagagaagctgtcg

SEQ ID NO: 30349 - DNA, 296 bp, Zea Mays
gtctgactgcagaagctgtggtcgccgatttcattttcaagaacattcagccactaaaagacagagcatacctggcttatctgtatcggggcctcgctgattcgacccgagttaccaacagaagaattcctgctgtggatttggtcagccggctcgagatgatactcagacgcaaggtgtcgaacatcggtgctcctgttgcatactcagcctggaatctgcctccttccaaggcttttaccagttttgtgtcaaatcctcctgctggtgatagcggtttgggccttagagtgcga

SEQ ID NO: 30350 - DNA, 601 bp, Zea Mays
acacgactaagaagagcaggagcggacctaggatcggctggccacggagcgcggaggattttcgcttgccggagactgagaagggggaaaatggtgtcgcgacgagctctagtgaaattaggaggtgaggttggggctacacggtcgcaaagtgctactgattcatcgtgcactgctaatttgggaagagatggaaaggatttcgcgaatttgggcttcaaccgagttcactagtgaggtggtgagtacctcgtcgtgggtagcggagctatttaaaggcgcggtggtccggctaacgatccacggccgcggattacatcgttcgtgcatggttaccacgtaaagaagaggcacagtgagggaggagcgaggcatgagtgacaccacgacggaaatgaccgagccacggcgaccgccggtggaatatctctagccacgctcggctaggttcgtgggatggtgccacgtctgaagttatctccccgcgatcgatcccttcaccaattcatccgaacacatctgattctacagtgccccagatctttgtcttcatttcagatattttcagtgctctggatcttcaatgttcttctaaaccgac

SEQ ID NO: 30351 - DNA, 601 bp, Zea Mays
cgagagaagacggggccatgacgggcacaagggaggacatcagggccgtgtgtggcgctgcaggagaacatagggccacagcaggagatatcgaaggcgagagaggaggcaccaaggccacagggggcaccaccaaaggcgtcgagacaacacgcgacgtggccagcggtgaacctgcaagaggatgtcaagctcggtggtggtgtcggacggagtggaagtggtgatggggaaatcggactcatcgaagacgacgtgccgagagatgaacaaatggtgggtagagagatcgagacacaggcaccccttatgatcggcggcccgaggaacacacaacgagtcgagcgaggcgcaagcttatgaggtgttgtggctgagagattggggtagcgggtgcacctaaaaactcgaaagtggtcataagagggggaggccccaaaaagggggaagtggggcactaattgccttcgtatgaaggcaattcagaagtaatgtggtggtgtcgagaccctcagcccagtagcgagcaggaagggagacatgaaacatcaaggtgcgaatgatgtcggtggtggtgcgaatcatacgctcgaccttgagg

SEQ ID NO: 30352 - DNA, 974 bp, Zea Mays
gaagcgtcaaatatagccactcctgaatggttgatagttgcgaaagaggcagcagtccggagagcttccatcaatcgtcctcccatggtttcacactgtcagttgctctatgaacttgcgttgtcattgtgcttgaggtattcatcacattttgcatgcttcatagtgcagatttttttcttatgagaattttttgctttctgcatcccatttggggaaacaaaaaagaagcaaaagtgatttcattgcccaatttggctgtagtgcttgtctattcaattgatcaacttcatcactttatcaacaacgtaataggtgttctataaagagcttacatctgattagttacttatataaggctctattctcagtggtgtctatgtctgattatatctccatttgagtttctgcaataagaggcaataatttgcataaggttttctgctttcttatattacagtaaccatgtatctgttatggaacctgcattcttttctaggttcttctatgatttaagaagtctctcattacatgtgtatctggaccctttttaattgatttggtttaaacttgtacatttctagggatccatcaaatgacgttatggaaccacgaagctgtagattgaaggagaagaagaaaagtgaaggggaccaattgatcaaaaagatttttgtgcaaaatgttattgaagacaataaactgcttggtcattttctgagtgatgggtctccttgcattattcttccagtcaattacaatgatggctctccactatcaactttgctctcaaaatttcagtcaacaactgattcaaggatatcgcatggccagtgcagtaaggcagaagctccaaaagactccagacgcttaccaatggatggggctgacaagaaccgggaattgtcatcatccaacaaaaattcattgtcagccttctcaggaaagacagtcccactcccacctagaatctg

SEQ ID NO: 30353 - DNA, 1063 bp, Zea Mays
aacgggtgaaagcgcgcccgcgcccgcacgcctgcagattttacacggaggcccccgcggttttgaatatcttgaaccgagttcatcgtactgttgtaataggtcactgacagtttacagaaatgtcccccgagttctaattcttcgccgcccgaagtccccgacggcgacaagcgcagagccgagctccggcgagcttgtaccgggtgatttacttaaggactggtgccctacttcggttgaaaccgaattcaagtcctattcaatgttttccccaagttaatttcaagaatgatgagctaatttggtctggccacggtaaccgcgcggatgaaccaaagaaccacgcgttcccggcgattggcggcggtctagctcaattaggtgggtcggcgagcatcgcagacacatgagaatacttaaacggggaagcagaagacatggactgacctgaatcgcgctggccgcggggaggctaaactatgcagtgttcttgagcagattgggggaaatccaaaattcgagttctctggtggaggatttgaggtgcaggtggatgcgctagctgcttgattacatgacggagctgagggcgcggtcaatttatagagcccgcgagcgggtggccgtgaatttgggcgacgacgcgcggcgggccggaggggagaaagggtactggcgcagtggattggtgtcttccgtcgtggcgaactcaccggcgacgattagacggctatagagagtcacggcgacgcgacggaggtgtcagggcacgtggcgccaagccgtgcgacgactgtcaccggcgagcttatctgcagtggccgtggcaagtacggtacggtggccggagttgtttaatggccggagtctatccacagcgaggactcttattcgatcccagacgctatccacacgattcaagcacgaatcacggcgggatgagcgcgaatctgggcgcggctcgtcggcggcgagctgagttgttgatctgatctatttcagttgcagtactgtaccatgggacttcctcattcagttggactgaccgagcaagtttggc

SEQ ID NO: 30354 - DNA, 541 bp, Zea Mays
tgattgggcaatctttggactggaattcaaccatgatctagtgagagtttggctatggatgctatagcaagattgtagctggatcatcaggcaacaactttgttactggtggattagcaagtcatcacatgaaaaatcgagatccgagccctacaaaatggtctgtcagacactctaatggtaaccaccatggtacagtaactgaaatagatcaaaagttcagcccccctcgccgtcggtgacctttgcgccgtgatttccgccgtcgccgcgattcgtgctctctagtgaggggataatcatggcggagtaagaatcttggcaccagataggctcgggctcggtcgcgaatgagtttcaccgtacccacttgctcgctgatcagccgggatagacctcgccgccgttggccgcttaccgctgtgcgccacgtgctcaagcgttgtaccacgtcgctgtgaatcgcgtcttgcatgtccggtggtcgtcggggagcttgccacggtgaaagccactaatcccgagcgccagtaaccttctt

SEQ ID NO: 30355 - DNA, 398 bp, Zea Mays
atttgagggccaggattagatccaggggtgggtgagcatctggtcgttagattaggatcttgtggaccagggcgtataccggttagatgaagtggacttcggatccgggtcgtagatcatggattttgtggctgaaattgcataccggttcgctatttaatctgggccctagatccttggatggatggcccaggcgcacctgagttcactaagtcgtggcacttttgtaaagagcccctgagtttagtaagaatcaacctgcaatccacagggactgtagcctgagtctggtatttattgtgctgaagcccctgtcttctctggaatttgaggcgcagtctagacagggaataaaattataaaatcatttagaaaatgaattgctaatgtgaaaataa

SEQ ID NO: 30356 - DNA, 419 bp, Zea Mays
atcagtcacaggcggatttgacacaaaaagggtgaaggctttggaagtatgccgttggagcaccaacatttgacaccttacccctgaggatcatttcaagtcggcttaccaagtctacagaaggaattctcctattggtaacccgagttgagtcggccagccctcgatacagatatgctggataggccctatctttcagtggctgaatgttcttgaaaacaaagtcagcgaccacagctttagcagttagacctctttctttcagcagtccaacttcagtcagcaacacacccgcctcagccgcttcctgatctgtgggagactcggtccagctcggagtgcgaacgtctggttgtcttcccgatcgggaggggagagaatttccataattatcaactatgaaccactctagacgccac

SEQ ID NO: 30357 - DNA, 819 bp, Zea Mays
cctccctacctgacggcgccagttataacactgtcttccaaaaacaggataaaactgcgcgatactgggataaccaatccatacccaagataacatcaaatgccccaaggaaatcacaaccagattggccgaaaagacctcatcaacaagaatgacggaacacccctgacaaactgaacagctactaatggagccattagcagaactaaccaaaattgggtgacccaacctctacaccgaaagaccagcctgcgacacaaaatcctccgaaacaaacgaatagctagcgccagagtcaaaaagagcatgggccacaaacgaatcaactgaaatcgtacctgtcaccacgtctccttgctctctgccatccgcaacgggtagcacataagccccggaaatacccgcagaagaggaagctctcggaatgaaattaacagaagaaccccactgagacgccgggtgaggcagacgcggagctccaaactgagacaacataggagtagtcggtgcaggagtaggcgcagccagatactgaggaaaaccctgcatcggcacgaactgagaagtcccaggcacataaaactgctgcggaggaagtggaactgaaaactgctgctcagcacttgacatcatgttgatagtgccctgagaagaggaggaagtcaccggctcccatctgagctatggtggcgctgatgctgagacttgcccctcttgtggctggacctccagtgttgcccctcctcgcgtcctggccacgaggctgatcaacacccgaagacttctgcgactccatggtatactgatgctgcatctcca

SEQ ID NO: 30358 - DNA, 536 bp, Zea Mays
ccggagcgtaataccctacttcattgtgtgttgtattgaatctgtgagcttgaaagcttgagtgtgtgagagtctaagttgggtctaagtgagtgtgccttataacgttgtgtgccttcccttttatagctcaagggaggcacatacaaggatactgagccccgacatgtgggctcaggggcaaaatggaaggaagtaactaatgcctataacgccagggtgatctccgagcgccataatgtccgtagtccatatagtattgatatgccacgctgcttcctcagtaacgtgcgagtcatgatgagtgtagtacatgcggtggtatggatgtgccgcctgccaatggaatggacaggcatgccgcctgcgggatggtccggtcaccgtcagccagcggagtggacagggctcattaaatgctgaggcggcacatcgcgtgctagtggaatggatagggctcattaaatgccgaggcggcacatcgcctactagtggaatggacaggcgacacgccttatccgcaataaatgcagagg

SEQ ID NO: 30359 - DNA, 271 bp, Zea Mays
ccccggtgtgcccttccatccatggcttcactcggttgcccccgcgatccccttccatccatggcttcaatcggttgcccccacgatccccttccatcgatggcgaggtcgctggttattttcaacagtccaccgacagcactcgctcgccctaaaccctcacctctcagatcctgcccctcgctcgccgcccaatcaacagctcagacattgccgccccatccgagcaaaggtggaggcgtctgcctccacacacatcgccctcgccacc

SEQ ID NO: 30360 - DNA, 311 bp, Zea Mays
cacacagtttttggataatgatacctggagtattacccttttacactaagctgctaagttttaccaatgactcaacttatgctatatcagtatcatctttttttatgtttttatttgcagaggctagaggttttgaactagcagcatttctagacttccgtattcccaagaaatgtaatgagacccatcaaaataagattcagcgtatttagtgtacttaatgagacccagcacatttctagactttcgtattcccaagaactgtttatcttggaacgattactcagctggacctgctgatgaacaattac

SEQ ID NO: 30361 - DNA, 416 bp, Zea Mays
aagagaaagacattaaaggacataaggagaggaccctcctcaaaccttagcacaagattgtcaacaaatgtgatgaagccacgctggtaaagcacccccaagagaagactagacaactatcccacaacacaacagaagcatccaccaaagatgacacagagctacaaaataagcaaaatattcgaaagattgggggcacaaaatcagtagcaaagcatctacatgagagaacgcccaaagagacaacgacgacaaagtatccatctgagtagcactgacgtcaacatatctaactatgagggcactagcggtcaactatccatcatagagaaccaaataaacgtgacacaccaatcatttgtacaggacaaaccaatgcaatgagtaagttgaagcaaaagcaagcacaacacaac

SEQ ID NO: 30362 - DNA, 1556 bp, Zea Mays
tcttgggaagttgcgaccttgaagtgaactagaagcaccgattgcatcatccacatgagcccatgcacatgcatgatcatccccttctctaactgtttcattttgattgtccacccacccattgtcccattggtaatcctctaaaattaaagggttaccaatatttccctcctcacgcaatctttggaacctagctgccatctttctattgtattcgatataaaccaaattgtttaacctttggtgctccaatctgttccttttttttggtatgcattatgtgctaaataatgaattagtggtggtgtcctagaatcaattaaaacaagatagaaactgaaatgacaatttttacttacaaattcaaaagtgctccaattgcgctcacatccggaagcggaacaacaaaggctaacaattcgctttgcaaaggattgaatctcaaatgcaaggccaccatatgcatcccaccaacgaactaaaaaagagaagtttgagtgttgcccttgcaatgcctctcacgaaccacatcttcaggtgctttgcgaagcatggatgcaattgacttagaagacttcgacatgtgttgattgttttggcttgcttcagctgagagccttctcttttgggctgttccggaactgggctgaacaactgaatgggatgctctactttccccttctccaagtacttcaacttcatcatctttatcaccatccttatcaccatccttatcatcatccaagtcaataggcttatgtctagcattcttcttcaaataatcactcatctctttgctgattgccgatcttgtctttgggcacttagcaacatcaccatgaccaccaacaaggtgctgcttcaaccttctaacacctgcatgaacaattttgccacaaaaggatgcacttcaccacatcttttttgtttcaaatccggtcaataacaatagttccatgctggatccttcgattttgcctttcttcttaggatctttagctggatcgtatggctgctggcttcctgactccccttgtggtcgatctgcagatgcatcttccatctcttcaagggcctcctgcagattgatgagagggcgagggagggtgagcttgctgcgagggcgggagagggggagcaggactcaccaagtcactaggttcctgcagattgatgagggcggcgtgcagactgcagaggaggggcggcgtgagaggaggggcggccggcggcgtgaggactgaggggtggccagctctgtgcaaaggaggggcggatgactctatgcagatgaggggcggctttggttgtgggttaggttagggtttaagttgtgtaatgggctacttgggccgaattggggacaagtcggccgactagctagaacaagtcgacgactagtcgactgagaaattcccgtcgttgacaagtcacctgacttgccagaaaagtcgagccggtcccccaagtcgagctcccaggaccgaccggacgactagtcgctgactagtcgacgacttgaaaacatgggtcctcacctacatgcatgtatcctt

SEQ ID NO: 30363 - DNA, 532 bp, Zea Mays
gccggactaggtcaacaagcgcgcaaaatcgcaggtgcattacatccgtgcaaaagtctacaccaagaaactgtccgcgcaaagaccgactacaggcgcagccggaccgacataataaatgtgctagaccaagtgcgcaacgcccctatggacatagccggatgcgcgaaggtgcacagcctcatcatacaaactatagttacacacgtacagcgagggcatcacaccttacattggttcaaccttcggaatgattcccatctccctatagttaaatagcattatcctaagctcctcaccctcaaaaagacttcgcaactccccctcacctacactcgccccaaccggcaaggataacaattccctcttgccagccctgcccacacgaagccgaccgccatccacttcactcactctacgcttcgccaccgcccttcgccgcctacgcccagcactcggaccaggcaaaacttcagaatccgtaacacgcggagaagcctctgccgcagccacatccaaggccgcaaagtaa

SEQ ID NO: 30364 - DNA, 369 bp, Zea Mays
tttcttgcaccagggttgcgctgactacgctgggtgatgctgcaatgtagagtagtaggggtagagctggatctaggctagttaatgtcgccagatcaaataaatattgctttaaggactcgaaggctgcagcttgctttaggcctcgggtggagtccttggctccgcgcatcgttttcaggaaaggaaggcttcgctcggcagaccgtgaaatgaatatgtttagtgcagttagtcttcctgtcaaccgttggatgtctttggttgattatggaggggccatgtccattatagcctgtattttgcttgggttttctttgatccctctttgcgatacaaggtaaccaaggattttgccttgtcggattc

SEQ ID NO: 30365 - DNA, 468 bp, Zea Mays
tgctagttttcctcttttttcctttcctcaaggggtagcagtaacaaggatatatgaagctaattgcatcaaaaaccatgttcaatcttttcttgccccgaccctcgaaggctgcggacaaggcatcatcttcggccttggaatatgtcgcaagcagctcgtcgctagtagcttcaatgcatttcaaccaatcatcatttggttcgttgaacttctcttcgtatctgaaggtatatttcaatcgaattaatccaccttctatggattcagcagtagtctccttcggcatttcccagctatccacaagtggccacactctgtaggctatgtgctcttgaattatgtcccttgtgccaatgaaagcacaaacattgctaaaagccttctgacatgctttggcgtcactttcaatagccaccttcggtcttcggaggccgaagcgagaccagatggggcgctagataattt

SEQ ID NO: 30366 - DNA, 304 bp, Zea Mays
caggaactgagtttggctatggcaggaaccatgaaaagagatgcaatagatcattgtaactacaatctgaccaaccatacttagcttttaggatgagcaactcaagcacaaagcatagcacagtccattgtgctcgacaacccttttcaacagcatacaaagtcatgttcgatgctttttcaccctttctaaaatttctagaccttttgtgctctttagtataatctctggtccaagggcctgaagcatttcctccaaataatcgacatcacctttgtccccaacacgtcctccgccatcattg

SEQ ID NO: 30367 - DNA, 427 bp, Zea Mays
cagtaggttcacgtactcctctacggcatgacacaaatggggatcggtgatagtggcgctaacggaggaggggacatgcaagggagtcagagcagcgtcggtcgtgagcaccagtcggtcgacgtggtgagggtcgttgtagagggcgacgtgatggtacactagcagttcatcttggaaatggcatgaggcacgggctagcataacaatcgtctgtagagccacaccaatcttcatcgaaagaatattgtctgacgatacaaacaaggtatgctcgagctgcccccaatcttcatcgaaagaatattgtctctgacgatacaaacaaggtatgctcgagccgccccaagacaacaacacatatactcttaccctacagttttgcccgtgacttataggttactactggcattagcgtcgatacctc

SEQ ID NO: 30368 - DNA, 275 bp, Zea Mays
tagaatattattgttcatggttcattaactaagcttggcaactcaaaccatataaaagcactatacttgacccctaatagcatccagttacaaaacgacagtgtgccttggcatctcactaataattactgtccaaatcagacagtggttcaaattcccagtcagttattgtttttatcctaatccaacctacaagtgcaaacatgtccaatagccaatacactgaattgtaacttagaatgactgaaacgctaaaggcacaatctgctccggca

SEQ ID NO: 30369 - DNA, 272 bp, Zea Mays
ttcagctatgctatctaagtattggctttcaaaccgcggcgtctccttggagaatacttgaaaggcagcagttctgcaggaaggggggcaaccatgttgttgcgatgaaaggtaaggtaatgcagaacaaaggcacgttggtccaatggttcatcctgaaatagccataatatcaatttaatggtagaataaaatctgaaggagtaatatatgcaagattagaaaactaatttagtgacataccggagtataaaattctgataagtcgccat

SEQ ID NO: 30370 - DNA, 368 bp, Zea Mays
cattgatcaagtggatacaggcttgaaaaagaagaatttctttatgaggggactaaatgacatactccagcgtaagatagcaacgtgtctagatctcacatacagcaggggctgtcagtacaacgctggcagttgaagccaaaaatgcaggacacgaaaagtcaaaaggatatgcgggtgaaagatcaactcagggacctaaaaagagaacaaggttggtaatcctacctttcaatccaaaccgttcttcacctcgcccacctacatatccattcagacaacacatatttattcgtcccactcctgccctcgctctgaccaatcagccgagtgcccctggtactagtttccctgcccttcctagttcc

SEQ ID NO: 30371 - DNA, 444 bp, Zea Mays
cacggccatggtgtagacgtccagcgcgtgacaggttcggtgacgtaactactcgaagaagcttctagtgtcatgggacccttatgccagctgtatcaaggtggataggctcagggtcattctcctccccccttcgtgagctcacgcggccctgatcgcgttcgccatggatcttcaaagggtaagagctggttgcgcacgaggacccacatggcggggaccacatgagtgcgcgtggtagggaatcaagctagcaaacatggcccacggtgtcagcaacccacgcaaaagcgccactgccttggtggcccacctgtcggcacaccgcggcggtcgcatgggccagcagaaacgcctatgtatacagtcacgacatagttctcaacaacttggggaaaccatattcattatggcaaaaactagtttagcagcggaccgccatct

SEQ ID NO: 30372 - DNA, 293 bp, Zea Mays
taaataccacaattgcgacatcttcctttcctccttggtgttccctgtgatgtgaacttccctttgtttgagctgcttgaactcccaccatctgatcgatgttaagcctttgccttccactgacttgaagcattacaactactgtctttatttgtattggcctgaaaacgatgcttatgtttttcaagccaatcctcctcagctaatagtaacctccctgctttgtcagtgacatgatccaaattattctcaaacctgtcttcagctgcacgtaaacgtccaactaaatcctc

SEQ ID NO: 30373 - DNA, 574 bp, Zea Mays
tgagaagattgtgttcccgcaatctgggcagccgtactagtccccacacaaatattggtattacaatgtcttatgtttccgtttacgaaacagtaatccacgtgtcggcggtccatgggccttcgcgtagatttcgcccagcagagtacgtgtatcgagcccacgaatccacccacgagcacacagttattcagctcacctcacccgtaatgcacgcggcggccgaaccctagcattatcgccgtcgtctgcttgttcttctccaccgcggcggccgaaccctagagattctacccgctgtcgccttcagcgtctccaacgcagagaccgaccgccatcgcctttagcttctccaccgcatagatcgagcccccgtcgccttggtcttcttcaccggagagggacccggaatcgcggagaccgagccgccgcccccttgttcttctccaccgtagagaccgagccgcattcgctccaccgcggcggccgaacccttgagattctacccgccgtcgccttcaccgtctccaacgcagagtccgacccgccgtcaacttcagcgtctcctacgcat

SEQ ID NO: 30374 - DNA, 276 bp, Zea Mays
gcgagggtgtggtaattcgttgccagactccgaaccttgcggccaagtcgctacacggcgtgggcaagcctcctcggggtctaatcactggtatggtacccgcccctgtccttggtattcacttagctttgcgtagcactaacagggattatggatggggcactagaatcgtggatcattgcgcgacggcgagccaccaccgtgacttgcgactgggggaggaggagaacgcgggggccgtagatcaaagcatggacagcgcagattagatctagc

SEQ ID NO: 30375 - DNA, 840 bp, Zea Mays
cttaaccgcagaaggaatagaagtggacccttcctaggtggaagcagtatcaaaatggaggcagccgaccaacgtcagtgaagttcggagctttctgggaatggcaggatattaccaccgcttcatcaaaggattctccagcatagcaagaccaatgacagaacttctcaagaaggaccataaatttgtgtggaccccaaaatgtgaaggaagtttctaggtcataaaggagaaactcacaacagcacccgttttggaactaccagatattcatcaagattttgtcgtcttctgtgatgcctcgaggcaaggcttagggtgtgtgctaatgcaaaaacgagaaagtcattgcttatgcatcatgcctactcaagccgcacaaacagaattaccccacccatgatttggaattggcagccatagtgcatgccttgaagatatggaggcattacctaatcgggaacaaatgtcacattttcaccgatcacaagagtctgaggtatatcttcactcaaacagatctcaatctccgtcaacgaagatggttggagctaataaaggattatgacctagaaattcattatcaccccgggaaggccaacgtggtagaagacgccctcagtcgaaaaccattcggaataaaggggaccaactttttagaagattggaagaaagaatcggctcaactaaatacatgtctgggaaacagcaacaatctagaagtcaaaccaatgctagaagacctcatatgcaaagctcaacgtctagactcagagacagcaagacttgtggagaaagcccgcaaggaacaactcccggacttcacgacggatggacaag

SEQ ID NO: 30376 - DNA, 384 bp, Zea Mays
catgagtcctaggcgccatcatttaggctatgctgacccctggccttcttagcctagggttgggcgtggctcgtcgccttgcgccctgccagcggtttgtgcactcaggccaagtccaatgggtcatgagtgcatcgtaggctgaggggcacgaggaccataaatgcgtcgcagtccagggggtttgtaggtcatgagtgctatgtggcctgaggggtttgtaggttacaagtgggaagcggacaagcgcctgcgctgtggctcggttccaggcgtcgcgggatccactcgagtggtttccctccgacacgccacccatttcaggttctgccatgcacgaccctgggctcggtgccatggggtccgatcgagggcaggttcttt

SEQ ID NO: 30377 - DNA, 312 bp, Zea Mays
gccccttttggatattttaatttctgggcataatgatgagcttctcgcttttcctcttcatatagcctttttcccgaaagcatgtcgtacaatataatcagggtactctggaaagatgcttcgggagttgaagagagagttttttcaggcagaatttgctttatagcctcttttttcgtttctcctccggtttccaaggatttctccttggcgggctctgaaggcccagcttcggcctcggtctggctctttgcagcttcgtcttcggatggttttgcctcaatttgcgttttcggagcttcggcaggtttc

SEQ ID NO: 30378 - DNA, 363 bp, Zea Mays
cagattcttcacgtgtatcacactgttgctgcgcttggcggtgcccttctggttgctgattgtgagtcaaggttggtgccataggtggtggtagcaggacccatgcagcttgagagcgacttgccaaagcaactgatgttgtgggctgctggttgcccacatactcgggaatatatggagaataggacgaaggattatgcaggacttgcttcggctgattctgtcgcgcttcgacttcagctatttctttttgcttctggatcgtgacttggcacgtccttgttgtatgtcccatatcctccccatagaataaacagaacaaccttctgggttgggagctgaaccttcctccaagcttcttcg

SEQ ID NO: 30379 - DNA, 295 bp, Zea Mays
atagtcactgttcttggccacatacaagtgtggcgtaaagtatgcacagttgcacaccattatgtgaccctgaaataccacacgaaaatatcatctacgttttgatggaaaataatttctccatcattcgcgtacagctgcaattttggcagttcaattaaatttgtactaccaccaaaatggcacgtgggtcatgctacaaatctcgtgtaatggtctagtgtaagctgaacaagcacaactacaattcattgccgattttagctattacctgtgtgactggcttgcaagtttc

SEQ ID NO: 30380 - DNA, 476 bp, Zea Mays
cgtagccaatcttccacgtccatggggtcagcagagtgggcaaagacagggggatggcccctcttgaattctgcccgcttgtctctaggcacttgaggcatctagacttgcattggaggctgaggtggtgggggctgctgctgtgcctgctgcatagctgctaatgtctgaccaattgcctggactgattgggtctacatcaagaacatctgctcgatggtcatcggtggtggtggtggcaattgctgctgtggctgagctgcatcctcctggggtgcctgttgctctagctgagcacgcctcgcaccgctgcgcctgttctcagacatctgtaggaatcacacacatatatcaaatctgactctgtagtctttcagcataagaaaagatgtatagaagatcgtcatagaactaaacaattggccaacttcactgacagcttctcagatagaggaaagtggagacaaatgggttac

SEQ ID NO: 30381 - DNA, 275 bp, Zea Mays
atcggcgctcctgttgcgtactcagcctggaatctgcctccttccaaggcctttaccagttttgtgtcgaatcctcttgccggtgatagcggtttgggccttagagtgcgaccctctcccgaagaagttaatgctttgattgcctcactggaagaaattcctgacgatgagaggcaggttcattttgaggtgcctttgaatcccagtgatgcagagataagtgccatgctggatatgttagctgaagaatcctctgatgcggcccctgctgaaac

SEQ ID NO: 30382 - DNA, 315 bp, Zea Mays
atacatagtcaagacaaaggcatccccaaacgcttacaggctaacaacatcatctggcgaagacttagagcattcatggaacatagataacctccgtaaattctttatttaagatacaagacccgagtgcctttgtaattcttcaaacaaagttactcaggcccgcactcttttcctcccggggggtaaggtttttaacgaggcggagccatgtaatatactgccaaaaagcccccacaaaaaatccagccagcatcatgagtgtcgaaaaagactgcatcgatggccttcgacattcaacatacaaaacagtca

SEQ ID NO: 30383 - DNA, 364 bp, Zea Mays
caagaatcaaaacaatagagtttctctcaagaaaatgctcaattcgatctagaacgagtcaaaagtgtggttgcattgaatcggagtttcgatgtgcttttattatgcttagttaacaactccatgggcctagggggtccttttatagccccaagagccaaaggagtcgtttcttctctgcttggaaggccatggttgccttctgtccataggtgcaccagattgtccggtgcacaccagacagtgaacagtgcgcgatttctttccatccccgccacactgaccgttgaattagccgttgcatccttcggctgcccggcacaccggacagtccggtggcgcactggacagtccgatgctgtca

SEQ ID NO: 30384 - DNA, 421 bp, Zea Mays
aacattacatgcttacagccatcaaggctgctagactaggacagattcacaaacatgttcacaaatcacaaatcacacattcagtctcaagttctcaattgtcaagtcacaactcacacaactctcgagtaataagccaataacttgggcttttgtgatcttggtgccatcttcttccttccatgttgtgcacaatccttgtcaaggtcaaccacctcttgatcaggagccccttttgattgtgatggttgtgtttgtgtcccatcattttctagagtgccagtgcccactgattccatacccttgtccaatatgtcttcaggttcaggcatctattaaaaaggaggacacacatagtaagtcaataatgaagatgaatacatgatgcaaggaaaacatctcatgtgcaagaaggaaacac

SEQ ID NO: 30385 - DNA, 553 bp, Zea Mays
cgagcgtgtacatgggcaccccggcgagccgcggaagatcccgggacggagcagacacaggagctgcctggcgacgtggagaagaaggtcctgccataggaagccaaggggttggggcgctcatcggttcttgggtccgccctcgctcttctgctgcaatctgaggagcaaggggcaagaagcatcgactcaatttttatacccactgtacgggagcgttccagctgaggaagagaacgacccccgcaagatcgccgtggtggttcagatatgggctatggctcagctcgagtccgcggggaggttggtagatgtgcggcgcagaaacaggcttcagttgcgtggatggcggcgtgattcttttcggtttcatggaggaagaagcgctgacaagctaaccggccaaatcatgtgtgcgtgagaaatggatagatggctggccgcatgggtcccatgcgtaagtgtcacaagggaccatgcatgtgtgaagtaatggtgatgtcatctgcggctatgtgaataattaaatcgaaggaaagagggtgggctacgt

SEQ ID NO: 30386 - DNA, 465 bp, Zea Mays
ctatgtttattaatgccctttcccagcagggcctcgtgctggaaaatgtgaacgtaaggttatgttatttacaaatgggtcctgttatagctactgtaagtgcttcccactgctaaactgttaacaaaagacatgtttgcctggaactgactgcaaactgtttttggaggactaagttttgcccttgtgaattgtgacctgcagtacttgcatctgagagccgggggcaaacatcatttgacagattataatttgattataagagatcatgaagaaatatttgatttcataacagcaaaagaacatgtcatctcagagcagagaggttagtaccaggaaatatttgaagttcgtacatgtatatttgtcctttgctttatagaattcctataaccgagcctgcacactttgtacatagataacatttaatctggacaacactggaagcatatatttcagtaataa

SEQ ID NO: 30387 - DNA, 512 bp, Zea Mays
gtcgggacggccgcagtcagcagcaggtgcacaacatcgccaaccagcaccccgctggtgaggcccctcaccgccaagattatcctccccagggccgtggcaatggaactcgtggtcgggcccaacgacgggcgcagcagccgcacagattttactacttgtttcatggcgaagactgcgcgcacccaacaagggactgcccggaaatgaaggccaccagagataggatgtctcgggcgcaaccagccgacaacacaagagttgtcgcgcacacatatcaacaactctcacaaccatacaaccacggccccgctcagcatccacctaaccacgcataccaacaccaccaggaggtacaagtcgtacctcccccactcccacctccacacccgcaacagccaaacatccaccacccaaaccacccccaagcaccaaaacaagaagacttcgttgatcagccgtatcgcggagtcattcacatgatcactggggggtccagtgtcacacccggg

SEQ ID NO: 30388 - DNA, 507 bp, Zea Mays
aacattcccacataattgaatcaggaaaggttgaaatcaatatagtgccaaattttctacccacccaaaactgatggattcttctaatctcgcccttctgcacagagaacacaaccccatatgtaatgtgaatgatcaatccttgcaacaaatctagagcacaagggacaatcacagaaggattgtgtatctcttgtatctcaactagttgaacagtaatgacaccatacctagccataaatgaacccacttgtgagaatgcatcaactccgcaattttccttgcctttatcatacaccattctgaactgtaatccccttaatttgtttagggatttttgttgaatgtctaactatgactgaactgccataccaccatttcctaaacaaaaaacatttagccacccttgtgtcagctcagatatcatataatgaacattgcctttgtgctgcctcccataaaaatcaacacaaaaccagccccatgttcttctagcaacaaactatg

SEQ ID NO: 30389 - DNA, 372 bp, Zea Mays
actcgataatctcctcaggagagacaccagagcagtggaacttaggttggatagctagcccgctctagctttggccaagaacctcatgttccatgaacggagcaagcacatccgggtgtggtaccacttcatccaagacttcttggtagaagggagcatcaaggtgcactaaatcaacaccaaggttcaacttgcagacctactcaccaagccccttaggaggatcaagtttcttgagctttgctctggtccgagatggcctaacttcctcacaagatgacacataagacttaaggggagaatgatggaataagtcttgtggctgttgtggaggactgcagttagaggacaacacaaccttgccgtagcttt

SEQ ID NO: 30390 - DNA, 342 bp, Zea Mays
taatttatttcctgcgtaagtggccagactaggccttgggctgtagagtgggtgcgggagggagtgtgcatagttgaatacacaggatgcgttacacatgtaattggtttccttcataagtggccagactaggccttaagctgcagagcgggtgtgggagggagggttcataacaggatacacaggatttggccggtggtgcaggctgaacttgctttgaggacagtgctagcctgcatatgggattatgcaggcaaccaaacatggacgaattgcactatgggggcctgtataaggggttgttcaggcaaccaatttgacccttagttgtgcttttgcctt

SEQ ID NO: 30391 - DNA, 398 bp, Zea Mays
gttctttaagtatgaattaattgatcctagtagtattgttaccttcaggaacttttaacccatcctgtctctcaagtgcatcagcaaggatagtgacatcatgtgcagacccctcccacccagctagtacatatgtgaacttcaaatcaaaatcaactgcagctaatacattctgtgtaggataatgcttcctccccctgaatgcagattgcatgctctctggaacactagcataaatgtgagttccatctattgccctaatgcagtcctatgtgttaacaaataaggtgagatcattgtatcatgaatgcatgtctatgtgttaacagaatcctaagaaattaccttaaaatatgggtaccatcttggactgtttctgattttaagtggggtttcac

SEQ ID NO: 30392 - DNA, 359 bp, Zea Mays
tgtgccgtaggatcgtaatctggcggctaggattagatcgcgatggcggtaggatattgaccgcagatttgagaagcaacggtctagattagattatgtataccccttcgtccacatagaatctcggtcgtggatcactcgatcgacggttctggatgagcattgtttcattgaatcgacgaagttgatcgaggcccttgatttctaatcctgcggcgggggatccaccataacccttcgtcgtggcaacttgcaaagaaacccctctgttttcacgaaaataacccgccgtcctatataactgtgagctgagtctgggttattttgcgctaatgcccctggttttctctgtatttgag

SEQ ID NO: 30393 - DNA, 364 bp, Zea Mays
ccaccatccaccattagcagggcatcaatcagcatgcatctttcttcctggtggcctctgcaagctctgttccgacttcatcgcctttcacctactcccattgctccgccattaattttttaccggatcaagagcaccttccttcctgtcctgtgcatcgaggaggagagagaaagagtatgtgcgtgtgagagggagcagagtcaagaacagcaagcagcccagaacccaacatacatttaagagggggatccaaaaaaattgcagtctttacctgcaccacccctccctaccacaaatttccctctctgctggaactggaagcagccgtggcatccgccgtttcttgcgtgcttcctttctt

SEQ ID NO: 30394 - DNA, 459 bp, Zea Mays
gccaggtttccttaccaagatgcgacgcgcggggaggcttggcacagcaccagagggctccaatcgatgggacagtgagcaaacgcggacgcgacgtcctctggtctacatagggagatggggtgagcaggggcggggcagagagaagggatgggggaatctagggtgagttccctgagcgtcgtgcttaggcggagttcactatagctaaggcgacgacggaggatcaacgacggcggtagaacagtctcatggcgacggtgaggtgagcgtgcaacgtggaggtggttgctgctaggcgagggcgaatgcgagtgtgaggaagagggagtgaacgaacaccgggggctcaaatggtcgtgctcgcaatgtgagcgtttgaatgggggaggctctaggtctcgtgcggaggtgggcatgtccacgacgcgtggagagcgcggatagaggagggagacg

SEQ ID NO: 30395 - DNA, 835 bp, Zea Mays
ctttggacatgcttccattatcaaaagggtatcgtctgcatattggacgataggaaaatcttatcatcgcactcctcaagcgctccccgccttgctctgccgcggccatgcctcgccgccacaagtccactgcccgagatcccaatcgacgctccggcctgatctccatttttggccttcggttggagatcgacacttttcggtgacgtccctttggctacacgaccacccaatcaggtgtttgggtcttcgatttgggtctgtagcgttggagatacccccttcaaactactaccggtccggaagccgtgcctcctagccactcacgctcgccgttcgtgatccgttctcgactgttggtgctccggactcataggtcagcccgcgccgccctcttctctacatcccagccttcgagttctaggctgtagatcgattttcgttgacacgttgtttggtgcttcatctgcatcctttttttgcagttctctagtccatattgatggctacattatcatggttgatggaatggtcagtggagaatgtttgtgaggcatttttctcctatttcggggaaaatcagcatgtgagattgccatctaccccagtgatccccgttgatgatccgaaggtgccccttcttcatacatgtttgcaccggttcaaggggacccttggtggcagagagaggcatcgcacctgcttttcgccgaggtgcattattgcaagtggtgacgaagatttgattgaccgcttcagaattgacgctactttccatcgactcacagagatccttgggagttggtctcatgggtactatttcaaggaggaagct

SEQ ID NO: 30396 - DNA, 432 bp, Zea Mays
agtagctaataactcaataaaaacggggaaatcatgggggtacggattggatatatgaaggtgtcgaagtccatagctagtttggacgttttcagatcatttttcatgattcagtcttcaactaccggccgtcgtcctttgcacagattccgtcgacagagaatgcatcaaaaggaacaagaagaatatgcgctaactatatagtactgcagttgaaatatgacatgtcaaatttagtagcttcacaatatcttaataaggacacaaaaaaatgttgccatttggtacgtgccactcatattattcgatttaccccccatactagctaagctgttgatatcaacaggtcacattaacaaattcgtaatgatatatttcacattgaaattgaagtgcatttgatatgtttaaaaaacaccaaacccgttaacc

SEQ ID NO: 30397 - DNA, 761 bp, Zea Mays
ctgaatcctcactagcagtaaagtaggatgaacttagagctcgatttagagttagattcattgctcgattgagggtagttgctatagcagaattatagttgaaataaagggctacaagtttgctacagatggattggtgagttttcacacaaaaatctgagatctgggcactgtaatcctgtctgtcagatgctctgaatgagatttcccatgatacagtgcactgaaaatatccccagtacactgaatgtcacagccggcgatctccacggctggattcacgccgccgttgtgattcgtgctcaccggtgcccggataatgcttctgggtaaaagatcttcgccataggataacaacggaggctggccaccgtacccccttttgctttgcgtccggctcagataagttcaccggagttggccacccgtcgatcggatgccacatgccttgaagcttcaccacatcgtcgcaagccgctctatatcactggctcgtcgccggtgagtccgccacggtgaaagccactaatcgtttgcgccagtgccccttctcctcttcgcccaccgcgggtctccatcaaattcactggccaccgctcaagcacactataaattgagcacaccctcggctccactaggtagtcaagcgcctaacccagcaacacgtgcctcaaatcatccaccagagctcgccaattcgagatttcccccaaatcggtcccgagcaccgcgcaaagtgatctcaccatggtcagcgtgct

SEQ ID NO: 30398 - DNA, 439 bp, Zea Mays
gtagccgtgagggaccgatttggtgctccggctttggtaagttcttaatccggtgcttgctcttgtgatctgtgcttgtgatctatgttcgaaccctaatctactctactgccttcttgttctgtgattgtagccgtgagggatcgatccggtgctccggctttggtaagttcttaatccaatgcttgttcttgtgatccgtgcttgtgatctgtgttccaaccctaatctactctactaccttcttgttctgtgattgtagccgtgagggaccgatctggtgctccggctttggtaagttcttaactcggtgcttgttcttgtgatttgtgcttgtgatctatgtttgaacccaattatactctactcccttcttgttctgtgattgtagccgtgaggggccaatttggtgctccggctatggtaagttcttaattcg

SEQ ID NO: 30399 - DNA, 338 bp, Zea Mays
atagaatctcgggccgtgactagccaaagctttaggcgggagttcaattggattcgcttggtcgcggtgaaggttgccagcgacgtttctggggcgaatcggggcccagcaccttggatttctcgccgttgagttgcagtccaccgcgtaccgcactgctctggagccagggcacgactcgacataaacctaggtataaacgcttatcccatgctcgcgttgtccttctgctctcgttgcgcgcttcggcagggtggttgggggattgttatcgggttgggtttgctcaccggcgtggtctccgccgtgaacggaggtgagcgccgccgtgcccaatg

SEQ ID NO: 30400 - DNA, 809 bp, Zea Mays
tccgtcttccacgcaaagctcacagctaacgaactgggcgccgccgcggaatccggtgaattctgttggcgtaacggtttccgtgagctgggtggcgcgctgcgctggctttaaaaggctataccgccgcactcctcgcgactcaaccattgtatagcccaaatttcttgtcgcaattgacggagggagagaaccgggtggtgacagtgccaccattcgcgctgtgccgccgccgccaggcgcgcaattgctaccccctgggcctcggcggggagttcgcatggggaatctccgggactccgctgctcggggtcgacctggggatgggcgaatcgctcttcggtgtttcctccatccgcagatccgggtgcgtcgtggatggagcacatcaactctcgtatgccggtaagaagtcgtccaacgagttctatttcacctcctccacgtgtagagtagagcggagcaaggtttgggggtccctgggcaccggattgcggactgcgaccatggcgccaccgcatacgctggagcaccgccgcgtctggtggcagcttggaggtgaagggccgctggccgttgattctatcggggacggcgtagattagaccgaagggtatcatttcgtaaaatagaatctcgaccgttggatggtcgacgtgtgggcgagatcgggtcatgcgcataattgatcgcagcccttgattacagatccaacgaaccagatcacgtaccgattcattaaaggctagatctaatcctaagcgttgaactcagatccaacggtcagaaaccctagataccccttcggc

SEQ ID NO: 30401 - DNA, 654 bp, Zea Mays
gattgaacaaaaacttgagtgaagaaaaatgtgtatcataatagatagataggttggtagaagcaaatgagataagtagatagataaacaacctggatttctcgcagcaaaataccatctgtcatgaacttgatggagcattcacttcctacctttctatcatgcctaacttgaaaaccaacttctcttcccagcttaagtcctaactcataggaaaccctcttagctgtggcatgaacagctacgcgccgtggttgtgtgataccaatcatcccttttctatcagctcggtcactagtgccgaagccagcttcgtataggaactgtacaacatagagagcataagtaacaatgacagatttgactacaattagccttttaacacaagcaggcagcaccaaaagtcttagttttaatacacgttcaagaagcatcatgcatgcacacacactgacctggggaacctgggtagttttaccgcagccagtctctccgcacagaattactacagaattttcatagatagcttccattatttcttgctccatcattattattgggagatccctccttgccttctcaacttcatgcagtcttgacacaggtacaacaattggaggatttatgcactcctgtacagaatgctgcccttgt

SEQ ID NO: 30402 - DNA, 483 bp, Zea Mays
tatggctcctcttcattcctaaactcaggactgttggaggcaataaaaccatcaccgaagcagccacgtgcctcagtctgaggatcaaccacaagagtaggggtctctcctgcaacatgtacaagatgatcggtcccacgtcaaatggaatgagcaaagtgctcatggtccaaaatgaagatgtaatgccaataagacttactgcaattggtttgtgccaaagggatacacgcaactaaatctgtctgcagaccatctcctagctgacttaatgggatcaaattggggccagattgagcatcaggaacagttggcacgtcatcgatagcacgatcaaagtcttcagggggacggtctactacaaccggatgcaccacaacctccatgagttgcaaatgggtcttcatagccgaagtaatataattatcccaatccagttgataatcaattgggatgactcgtcttatgacatttggtggatga

SEQ ID NO: 30403 - DNA, 304 bp, Zea Mays
agaaaaaggatggctagtgtattagatgtgctggagacgataaaaacttcaagctctactccaggaaaaattgccaaggcttcaaaaacacagattgaaactgagacaaagctgaccgaagccgaagctatagtgagctaggctgacgccgaagctgggccttcagtgcccgccaaggagaaaccctcggaaactagagaaaaggcagcagaagaagagggtatagaacaaattttgcctgaaaaagctgccgctcctgctcccgaagcgtcttccgaagtccttgattatattattcgacacg

SEQ ID NO: 30404 - DNA, 455 bp, Zea Mays
gcgagctggtgccggtgacgaggatcccacggccatggacgtcgccaggacgtagctgatgccggaggaggaggcacttcggctctgcacaggctgcgtccacttctagacttccttgcctcgcttgtcacctgcaggaaggtatgccagcgtcatccccaccccacccctccattgtcccttcgttatgaatatgcatcccctcacctccacaatgccgcagcgatgcccaccttgaaagaatttgggggatgaggagcccacgtcgcaacgttctagatagcgaacgaacgagggcaaaagagaggcacatacatgttctgcaaggtctgggctacaccacgtcttcacctgcggtcacgcctcgtgcctaagactggttaggattcttgacactggggcagtgggtcatctctagcgcctagcgggttagtacttgatccttgacgagttct

SEQ ID NO: 30405 - DNA, 651 bp, Zea Mays
aaaagattttagcgcccggattggctcggactcggtcattgttgagttcaccgtacccacttggtctgcggccgtccggaatgatcttcgccggcgttggccgcttaccgatcatgcaccacgtgcttgggaggtttaacacgtcgcagtgaacccttgtagcaagcccgtccatcggcggaggccttgccacgatcacccgcgtcattacatttcccctctcctgccgccagcacaattccttcaaattggatgccaccgctaatggacactataaatcaataccccagtgagctccgttaggttgtcacgaagccagagcacccacccttgcctccgattagccaccacatcgcccgaatttccttctcccccccaattcagttctccacacttccgtgagtgagctcgccatggccagccttctgtaggtcagttcaagtttccttaattggtgttctagcctccctcgtgtccccggtagctcacaaacccattcgattgaactagaccgcactagattgccctgaacaccattatttcctctcagttttcgccgtcgtcgtgagcagacatgctctgggccagtttagtgcaattggtggagggattagtgtcgccgagggtgtaattaggtgttgagcaacggag

SEQ ID NO: 30406 - DNA, 627 bp, Zea Mays
gactctccatgcaaaagtcgcctacgggtgcagccggaatagcacaataagtgcgcaaaatcaaagtcttctccaaaagactatccgcgcaaaagtcgcatacgggtgcatccggactaacgctataactgcgcaaaaccgaagtcttctccaaaagactatccgcgcaaaagtcgcctacgggtgcagccgggctagcataacaagcacgcaaaatcgaagtattttccaaaaggttcggatcaacgaaggctcgcagtttcatataagttacggttacatacatatagcgagggcatcacactttacattggctcaaccttcgggataatacccatctccctatagttgaacaacattatcctcaactcctcaccctcaaaaagacttcgcaactccccctcacctacactcaccccaaccggcgaggacaacaattctcgcttgctagccccatccacacgatgacgaccaccctccacctcactcactctccgcttcgccatcgcccttcgccgcctacgcccagcactcggaccaggaaacacttcagcgtccatcacacacggagaagcctccaccgcagccacatccaaggccgcaaattaatccaagtcctcatccgaa

SEQ ID NO: 30407 - DNA, 329 bp, Zea Mays
ctgcgggtcccactctgccaatgatgggataggggccgacgaatcgcggtgctagctttcctttcacttggaaccttttgacaccacacatcggggagaccttgaggtagacgaagtctccttcctcaaatctgagttctctccgcctgttgtccgcataacttttctaccgactctgagcttcaagtaatcttttgcggatcagggcaactttctctttggcctctttaacaaaggcaggtccttccagtgtcttttcccctacgttggaccacatgagaggggtctggcactttcgtccatacaaagcttcgaacggtgacatcttg

SEQ ID NO: 30408 - DNA, 587 bp, Zea Mays
atttggtggcagtaaacgacctttgggctggggacatctgcgggcttgttaaggggccatatgatggtgagccggtgtactctgtccggatgtgaatggcacgcaataatctcttcttggggtccttcagcattataacatcacagccatgccttctctgtctaactgcattggaaagcgacttggataggtcctggggtgacagtgatcagaaacacctttttagcgatgtggtcagaaacttaataagaactttacaactatgaacagctatagtgatgtgatgtccggtatcgatgtaaaattagtcaaagaaggccagttatggaatctgcacaactcgcaagccatttctgagtagtatcaggaatgcacagttggaagttgatctctggtggagaatgatgatcctgctccggaatttcgtccttcgtaggtagtaaagactatgggacctcacagttactagacattctgccttcctgtttggtggaacggtgttctgcatgggtcacaatccaacagactaattagaaacacactatccgatcagaaaccactctttagttttatattcaaagaaaaca

SEQ ID NO: 30409 - DNA, 277 bp, Zea Mays
tatgcttgcaatgtattagtgtaatgaataaaataacttggctgaaaacaattggcatgtgcataatagtgactctctccccctggcagatggcttcggataaaaccacgcctaccgcctccgggattggagcaaggtttcccctgagagctgaaagagaagccggtagagaggaaagtgagacccacctccccgcacctccagaactacccttagatttagcccaagttctagccaaccaaacccaactcatcgaggtcctcactcgaagtctgga

SEQ ID NO: 30410 - DNA, 285 bp, Zea Mays
tgaaactgtccaaatagactggagcaatggcttgtacaccaatggtttcaatttacagttgagttctttcttgtaagaaaaggtatttaaattgaactgtttaatgatggaatgtttggtcgtaggctcgtagctagtgtcatgttaggctgtgtgtacaacagctggcctcaacttgttcagttcattagggtcagactaagctctgtataatgaacttttagctcctacttggattgagcagtaataaatctctctagtgcatccctgtatccctgatttgtg

SEQ ID NO: 30411 - DNA, 372 bp, Zea Mays
aactaccccaacatgatgcccggcgatggagaaacagacgccggaatgtgcggcgatatcacgaagccggagaacgggacctgacgcaacccatatctcggggcgaagctttggaagtgggagaaactcttgatgaacgagtgcactgagaaagacgcaactcccgctgtcgcgatcgtcgatgggctcaagaatgggaacccggaactagctgagcaagatgctagactccggcgagagaaccctctcctcgatcgaaacctataccccgacatcgcccgagcattgaacacgccgagtgaagtcagaggagtgctacgcagacagccaacgatcttccgcgaaccctaggcacagagggttattggcggc

SEQ ID NO: 30412 - DNA, 382 bp, Zea Mays
gacgaggctttacgtctgcgagtacgggtcacgggtggctgcgtccaatgcaaagccgcgaaagtatttgggcgcacggcgatcgagcagtgatagtgatcggcggtgggggtgaagatgcatggttgggagcgggacattacgaacatcgacgacggagatcgcgagatcttgccgacttgatggccacatcccgctcgataggcgacacgtgtcctcttgtccatgcatcactgcagactcccccatgacctagcctcgtcgaccgtgcactgtgcacacacacacatacttacgtgatatcattgcgaatccaactgcaggtcctcttgcagtagtgcagtacaggcatgcatgcgcatgcacgcatttccctgttccc

SEQ ID NO: 30413 - DNA, 307 bp, Zea Mays
caactccaacaccaacgatgacagggccaacaatgctcaacatagccatcatagttctcagacttcgagcatgcaacagacttcctttagaccactagctctaagaggtacaagaggaagaagttttagtggtggaaggtttggcaatcaaccccgaaagttatactaccttttttgtggcgaggacaagggccacacaacaaggacatgccatgttaccattcagaagtagaaggaaattgctgaagctgaagcgtggcagagtcagccgaagcaagtcctccacactgcttcgtgcttatcacac

SEQ ID NO: 30414 - DNA, 322 bp, Zea Mays
ttggggtagcacgcgcagcatcttcttcacgacccgagtgtcttcaatctcctccccggacgtgcgtagatccgccgccagtgcattgatgcgcatcgcgaaatcgtccaccgattcgccgtcactgaaagcgatgttctcaaactccttcaataggcgttgtgcattcgcctccttcacgcgctctgctcccacacgcatgctcttcaccgccgaccatgcttccttcactgtcctcttggacccaagcatttgccacatctcctttggtacagaccgcagcagacagcccatggccaatctgtcctgcgatctcctgacg

SEQ ID NO: 30415 - DNA, 297 bp, Zea Mays
ttggtgagagagctagtgtcgttgaaaagggatggggttgaacactgatggttctcccgtaaccctttacatgtccagccatggaacgaccggctcctcccagcccgttggtgggaggtctggtgaagctggcgcgtcctgacccatggcgtgaggggctggtggaaccaaagctccccacactatgagaggaggagccagcagggttgttgttggggatgcgcgtgtcgccgatgatgccccatgcgtcacactgacgtcggccaggtccctcgcaagggagtctatgtcatcagc

SEQ ID NO: 30416 - DNA, 1439 bp, Zea Mays
tgtaatgcagttttccaaattttaggaattaagcattaatgactctccattgatcttttgtgccctatctctaaacaccataatgaatgatttttatacttgaatttatctggataatcatctgtgctgattagatatgtatgaaattgtagatggagaagttggcaaggttgcaatatcttaaaagcaaggatcccaaggattgtgctttgctctacatagcattgaacagaataaaagtgttggttggtcttttcaagattagtagagatgaaaaggataaacgtctatatgagtttctgtccagaaacttccaggtatttcagtctgtaataagttttgtatttaattacttgacaaaatcagtcatgtggttgttcctatttcacatgcgttgcttgatcctataattatcttgcaatgttcatgtttcagattcttcaggaaataagtaatgctagttctggcacctcatatcagctaggggacagttcatagattatcattatgctggcaatcctggccttttttgagccagatgcagataatataacaaaaggaattttatattattttttaatagtattgtttttgaaatattcatttttttaaatttacttgtttccatgtttgttcaaacatgccatcatataatcaattcgcaaaacggtctgttgcttagggcacacagcaaccttagtagcacccctggtcctaggtttcttttctggagggagtggatttaaacaagtctggataaaagacacccctcgtcggctgcgttcctgagttataaccatttgagttgtttccagcgagatacacatgtccataggcatgttgtaaacaattgttggcgcgtctggggcagtcatcctttagggtgtttctcttctcggtctgcacaagagaagcttcttcctgatgcaatgctgttggaccagtctttcccctgcaggtcgatattttctagagccttgccaaatgatttgacgtttgcacattttcaccctccttcggcaggttccttctgcaataagttcatgatattgccaacacagattgacgagggttacatcatatatttgtgaatgaatatctaagttttgtattggttaaaaacacgaacttcatatatatgaaaacaacactctgtgttgcaaactatattattacatcacacttattgtgatgaatctattcaggaagaaaggcacaaggctgctgctctaaaaaatgcttatgtactaatgggaaggcaccaatgggagcttgctatagcttttttcctccttggtgatgatacttcatcagcagtgaatgtttgtgcaaagaaccttcaagatgaacagcttgccattgtaatttgtcggcttattgaaggatctggagggcctctggagcgtaatctcatttctaatgtgctacttccagatgca

SEQ ID NO: 30417 - DNA, 390 bp, Zea Mays
ccttgcaagagtgggtcgtggtgagtcttgtggcccatgctcttcctgagggggggtcgagccagaggtcaccaagatttttggctacatcaggcatgtcacttgttaaggtagccgaggctttagaggacctcgtcatctctaattcattgacgacgaagtctagactcccgaaacaaatggtcgtcgctagccatccatagcttagagaacttcgtcgcggaacgagcaagccccctacctagcatgccaactgtcgatgtttcgaaccttgcttcgacaagtaaacttattgtgcgcgttctgggctccagagggtgtgcacggcgggcgcgagatttatactggtttggacataacgtccctactttctatcataagcggtttgcg

SEQ ID NO: 30418 - DNA, 301 bp, Zea Mays
cattcattgccattgcactgtcgtgctgttaaaaaatttaaccatagctgaagctttctatattgtgctttcgagcgaacgcttcatcatttaagattagcttcgtcaaaaagtgaaaacattaaaatggccagagtgcgatcgactgctagagtgtctcgcgagggagatgaggccgaagtaactgagagggcaccaatatcaaaggtgatgaggcagtcgggtcttgttgtgccagaaaagcctattgctgaaggtactttgactgctgaagctgagcaaatcacagttggagagggaa

SEQ ID NO: 30419 - DNA, 319 bp, Zea Mays
ttttgattcagttcagtagctgaaaccagatttagtgtttcttttgtcaggcattggagttctcttctgtctgatctaaggagttttaagttaagacctctgtagtaaagtgttagagggtgggtttatgaacaattctccttaagtttggtttccctgttgctgttagaaactgtgagatccaagaggttagaaactgtgagtcccaagagggtaacagatgggatgcagtttggacagtgggcaataggttcagttagtgcagtgcgaagtggatttctaaaaaatgattttaccactgttgtgccttgttgtttct

SEQ ID NO: 30420 - DNA, 399 bp, Zea Mays
cgtcgacggggaggttgccacgacggtggacacgaattcaccgcgcaagcttcttcctcacctccggccgccgcgcgtcctcctcaaaattcacggccaccgtcttactctccctataaattgagcccatgactagctctgtgaggtcgtcagctaactagccaccgctaatcagccacaatcatctaccagcgagcttgaatttccaatttcccccaacctcgttctccgccgccgtgaaacccaccctcaccgcggccagccgtccccaggtctgctcattcctttttcatccctgttctagcatgcttacgtattggtgatgctctccgacccttccaatcgaaccaaaccgcccctaatcgccaggaacacggctgtctggccgtagggttcacg

SEQ ID NO: 30421 - DNA, 413 bp, Zea Mays
tttcatccctagtaacgacccacttaaattgacgatacacgacggcggtggaaccatggaaactggtgaaactggtgctttataggagtaaagagaagtgaaatagaaatgcatatgtatatacagcgtaacagaagcaatgcaataatctaaacctaagggtgcaatttagaggcaatctaaagcggcatctgtaccacagcagctggtgtgatgtactcatgtgcaccaatacttactcctcaatatcatgtatcctagaacctacatggaaatgtaaagcaacaacaagctcataagacctaataaaatgtgatgaatggagtaagtttcgggtctaggatataagctaaagtcggaaattgtctaagaagattgagtcatgaagatccgtgttgcaaagctttaaacat

SEQ ID NO: 30422 - DNA, 1362 bp, Zea Mays
aatgagctcctcttacagtatgtggccagtttttgctatcccttataactttcctccgtgggtatgtatggagcaatcaaacatcatgttgtgtctactcatccctggtcgggaatgtccaagaaaagattttgatgtatttctagagccactagttgatgagttacaagaactttggttgggtgtttctacttttgatgcactgagtaggaaagattttgatctacatgctgctgtaatatggtgtattcatgactatcctggtttgagcactttgtctggtagagttaccaaaggatactacgcttgtgtccattgtgacaaagatccttgctccaaaagaataaggaataaaatatgctatattggtcatcgacgttggctaccacatgaccatccatggaggaaaaagaaggattatgatggacaaattgagaaccgtgacaaaccacaacaatttagtaccactgagttgatgcaacaattggaaagggtgaaggaagttaaaccagggaagcatccaaatagcaataagaggaagcgagatgcaaatggtggtcaatgttggaagagaaggtcaagcctgtgggatttgccatattggacagatttgaagttgcgtcataatcttgatgtaatgcacattgaaaaaaatatatgtgagtacttgctaggtacatttcttgctcttccaggaaagtcaaaggacaatattaatgcaaggcttgattttgaggacatgggcataagaaaagatttacacttaaagtgtgatggaggtacctatgtggttcctcatgccccctatataatggataaaaatcaaaaggtagcattttatgattttttgagaagtgtgaaatttccagatgggtatgcttgtaacctagcatcatgcatcactgctgatggatgcaacctccaaggcttgaaaactcatgattgccatatcatacttcaaaggattttaccagctgctcttcgaggaataatgcacgatgaaatatatgtagcaattgcagaactaggtaacttctttcagcagctatgcgctaggacccttaaattagatgttttgcaccaaatgaaagagaatatcccaattgttctatgcaagcttgagaaaatatttcccccatcattgtttgatgttatgctccacttgtcggtacatttacctgatgaggcaatacttagaggaccagtccaatatggatggatgtaccctgtagaaagaaggttatacactttgaaacattctgtgcggaacatggcacgacctgagggttcaattgcagaagcatatgttgctaatgaatgtttgcatgcatgttcgaggtattttgacgatcttgagacaag

SEQ ID NO: 30423 - DNA, 274 bp, Zea Mays
aagcgttcgatatcacctgcgggaagtgaggtccccatcccatccaagtaccacgccaacacgattacaaatcgagacaatcttacaataaatgtgtcacacgttataccatcgtagtttacatacacaaagcgaagggcccgtcggctacaccgcacaaataatacaaatcatattttgtcgccctccctctctattgcgaagcgggggagggcagcgttttcactcactatcgcaacacgagagcgaggccaacaaacatgctacatcggct

SEQ ID NO: 30424 - DNA, 299 bp, Zea Mays
atgttcctattcttgtttgtgtaatggtgtggctttttccattacccaagagtcttgacaaaccgaagtccgtgattttgggcaccatgtcatcatcaagcaatatattgtccggtttcagatctagatgaattatgttcttgtcatgtaggtagtgcaagcccaggcaaatcccttttattatttggtaacaaatgtgccatggaagcccacatggttcggctgaaaagcatgcatatcactcaatgtacgtcaacaataataaagaaaaaaagatcctcaaatcaacaaagtacata

SEQ ID NO: 30425 - DNA, 286 bp, Zea Mays
taaaaatggatgtgatatgttaagataacaacaataaacatgtgtttatgggttattaagatagtattcatagcagggattagagaattaatcctttacaaaaaagtgaggaaaacaactacatatatgcattctacattcatttagtaaccctgtctacctcatgatctccacattatattaagtgggcaaacaccaaaattcccagatgagttgatcacttactactaatacttaacaaaataatgaatataagattaaattatagtttataatagaaatacta

SEQ ID NO: 30426 - DNA, 331 bp, Zea Mays
gtccgtaggttatgagtgggaagcggaccggcacccatgttgtggctctgggctaggcgtagttaatgcagccaatcatttatagcgggccagccggggccggacgcgggatccattcgagtggttcccttccgacacgcccttcctcccttgtcaggctctgtcacgcccgaccccaggctcggtgtcgtacggttcacccgggggacgtgtccttccaggtttggcgcatcttcctcttccgactgactaacgggtcctagcgatcaggggctctttccctagtgcgctcactaaccggtgggtcccaggtctgggggtcattccctcg

SEQ ID NO: 30427 - DNA, 273 bp, Zea Mays
ccaaacttgagatcaacaggtagaactgcctccgaaccttaaaccatgaagaagggagtgtttccatgcaaggctcggctgggttgagttcttaagctccagaccacatacgacaactctctgatccactttcctgcgaacttttcattcttgtcgaagactttctttctgagtgcttctaatatcattccgttggctctttctacttgcccgttggctcttgggtgtgctaccgatgcatatttgatctgaatgcttttttgttcgcagaaa

SEQ ID NO: 30428 - DNA, 531 bp, Zea Mays
ccgccggagcgtaataccctactccactgtgtggtgtattgagcttgagagcttgtatgaacttgtgagcctgagctaggtctaattgtgcttgtgtgagcttgagtttgtgtctgcttaagtgaccttgtgttgtaacgttgcgtgcctccccttttatagctaaagggggcacgtacaagggtgctgagccccgacacgcgggctcagggacataacggatttaatacttggagcaactaatgccggtcgccagtgcaatctccttgcgccctgatattcgcagtctgcgtagtatcggcgtgcggcggaagcttcactggcaacgtacgagtgatgatgagcacagtgtatgccgcagcatgggcgtactgcctgtcaccggagcggacgggcacgccgcctgcaggatggcctggccgccgcccgtcagcagagtggacagggcacattaaatgctgaggcggcacatcgcttgtcaatggagtagacagggcgtatttaatgctgaggcggcacatcacctgccag

SEQ ID NO: 30429 - DNA, 466 bp, Zea Mays
agactattgctgacatatccaaggaaataactagctgattcagcattgttggtcacgccccgaacatcctgtggatcaccaccaccgatgatgccagaatcttgccgttaaacgccgtaccagtcatcgccgcagatttggcagccggtcctgaaaaccgaagaggaacagtcataattccagcaacagtgtaaaacctgtcttgcgacgagtgcgttacggaatcatccatggctttgactgccgtcggaaccagcaacctgaacggaactcacgccgtgaatgctggagtcaaaccatgcatcgcccctctccactctccagtcacttccaatgaccgcagcagtcaagatgcgaatgctgaaggcgttttacagggttcaaatgaagtcgtcaccaagttcaagttgatccatgatgctaaatgcatcttcctccctaacccgcacgatgcgtccatccgccg

SEQ ID NO: 30430 - DNA, 702 bp, Zea Mays
caaaggggccagataagtggcaatctttgcattgaaggttggccacaacgaaactgcagttctccgtgccgctcagatttctctgttttgtgacggcctcgaacaagctgccacattatcatatcttatatgttatccattttgttttggtttttatcttcttcgtatcgtgtctccagttaaaagctacggaaactaacatgaactacataatacatatgtacagtatgtagcgcatatcgcatgacaaccgaacactacatgccacagatgaaagacagatagtgtcagtaaagaaacagacggtaaagccaatttgcagagcaaaggggccagataagtggcgatctttgcattgaaggttggccacaacgaactgcagttctccgtgccgctcagatttctctgttttgtgacggcctcgaacaatctgctacatggtctcttatctgtgatccaatttggtttttggtcttttttccatcctagttaaaatcaaacatgatgaactatactaaacattacgtgtcgcatgacattggctttgaagcggcagttttaacagatgaattactgctcatcattaaagaacgagttaatatcagtaaagaaccgagtggataaatcagagcagatcagtaaagaacggttaactagggcccgttccaatcgcaactgctctttggtgcctagtaccgcagt

SEQ ID NO: 30431 - DNA, 514 bp, Zea Mays
gtgatctatagtgaactcttctctggacaattacggaagtaatgaccttcacgtccacaagcttttcttgaagttatttcttgactttttccatgtttccctttttgtttcttggacctgatgcgacgatgaggctaaaactgtgtgcaagtaatagtccatccatcaatgtaacactcctgtttttcttcttggagctgggcatccttgtgatgtttcctttttggaatacctgacaattcatcgtctgacagtgcatctgctattagttgttcttggggagaccattgtctttttataccagaaaacaaaatccggttcttctgttttgtagtttcactttcgtttgtgctgatctgacgacaaggaattccatagtactcacaacaacaacatgttccaaggttacttgtctgttggtttggttgtgcatcattttgtgtcttgaaggtctgttcatcagctgtttcatttatagtgttgttttgacttgtcaacacaccgcattctttgc

SEQ ID NO: 30432 - DNA, 427 bp, Zea Mays
gttttatgggtacgtgacctatcccacatcgtccatggccagatcgatggctgggatcagagccacaaaggggtacgctcctgatctaatcgtgaccgttccacggcagatcgacggcacaccagcttccttcccattgactgcatcagcacgacggcgcccgcggctcccatggcggaggacatcgccggagatgagactatcgcgcccaagcgtgccaaagcttatcacaagcggtgctatacgcagcaatggatacggcgagtaggttggaggaggtcttaccatgaatcacgtgagcaggagcacagtccacagcgtagggcggcatgcggtggttcccccactccggcaagggattgccgatgcccaggtctccatcctccccatgccatcaccgcaaatacaacccagaacccaaagcgag

SEQ ID NO: 30433 - DNA, 303 bp, Zea Mays
accaaataccacacctaatcggctaatccatttgaaattcgacgcccatgaaaccgtagacgccaccgtgttgatgttgagatgagagtgacaacgatggcaggacaacataagccgggtcgcaaaacttcttcggctgtttccaggcaattcgttcaccaaataataccggccatgtgctccgaccaggtcaacatcaccatcgtgttagagagagctagccgccacgacgcagagcatgatctcactagcttatataaacgcgagcgatccaacgccattcttgtatactcctgcggcttc

SEQ ID NO: 30434 - DNA, 300 bp, Zea Mays
tggtgctcggagctggtctggccacaaaactaggcggtggagcttgtcggtgcaacctgtaccagccataccacagcggtagagctcaatcagaccgcatagggaggtttactgggtggctgggagtgtgtgtgcgcaaggaatcgaagcatggataggtagattacctaggccacgtacttcgacgggtgaaggaagtccgacaaggtgttctggcttctccggcgaggtaccatttggtccaagtggctgggaagctctgctagcctctaaggaagctggctgaggagctagattgaa

SEQ ID NO: 30435 - DNA, 463 bp, Zea Mays
gaccagaaaggagcggtgttatttgtcgtcatcaatttctgaaatagatgctgcccacaagaaagggtagtttaatggggcatgaaaatgtgggttagacatttcctcctgttcctaatccgtgcccaataaaagcaagatgattgaaggcatgaagcatgggacagcgcgtatagtatacagtgcaggttggagtgttggaccagctatgtttgatgcttgtctagtttaggagctgctactatttcattactgaaactaacacctttggctttaccctcctaatcattctccactaacctgtataatctatgtggctgacacctcatacaagtagaaatatccttttggttagctttgatgctctggattcccgagttcttggctccctggcaaaacatttcattgtaggagaggggtcaggtagggtgacccgtgatccccctctctcccttgctgtttg

SEQ ID NO: 30436 - DNA, 775 bp, Zea Mays
atttggtggaagaaatgtgggaattggctatacaaggggagagtgtatctgaggaagttaatgacaacaacaatgaacctacagccgatgaaagcatccaggccatatctgtagcagctgttaatgggagcgaaggtagccaaacaattagattgtgggcctcggtgcattgttaacaggtttcggttctagtcaattcgggaagttctgccagtttcttgggtagtcatcttatgggagtcatgccgggggtacagttattggccaagccagtgagggtcaaggtggttgatggaagaacttttgtgagcaaatattgggttcccaagtgcaagtggctttgtggtgggttgacattttctactgatttcaagattttgcctctgggtggttacgacataattttgggtatggactggttggagtgccacagtccaatggaagttcattgggcagaaaaacggttggagtttgactataaccacagaagggtgcagttacaaggagtgcaacccaaaattcagacctgctacagtctaacttgttttcaattggcgtcattgatcagacaggaggctgttgagcaacttttggagttacatggagtggagagtggggatacagctgcgacactggttcctgagtcgatcaagcgagtggtggaccaatatcaacatcttttcttgaaacctactggtcttcctcccaagagagcagttgatcatgccattgagctcttgcctggtgctccaccttttcggcttcgaccttatcg

SEQ ID NO: 30437 - DNA, 332 bp, Zea Mays
cttagaggtggctgttgcagaaaacccagcccccaagggtggtgctggcggttacccagcccccgagggtgttgtcggtaatgatccagctcggatgggtagcgcaagctgcaacccagcccccgagggtgttgccggtagtgatccggctccagtgggctgtgcgagctctccctcccatacctccatggatgtccacgtcaggtcgtctccaccacgttttgatggagtgatggcggtgcgtgcttctttggcttcaagtgagtgagtcgccttagaggtcggcgcatcggatgccagaattctgttatctgctagtagagctgaatcat

SEQ ID NO: 30438 - DNA, 639 bp, Zea Mays
aacttcttcatgtagatcaccattgagaaaaacatttttgacatccatctgggagatagtccaagaagatgaggctgcaactgcaatcaaggttcgaacaatagtcatatgcgcaacaggtgcaaaagtctcatcataatcaagttcttgagtctgttggaaaccacgagccacatgacgagctttatacctcaatggaaccatctgataggaacaacatgcgagggtaaaggaacgatatcccatgtaccagtgcgttcaagagcagccaattcatcaatcatagctagttgccactcaagaattccagaagcttcttgataagtagtgggttcaacaattgccacaccagctcgtggaaaaccatagcgatctggaggttcaatggtaccacgatcacgaagacgatatccctgactaaaaacatcattagactcattgttagtacaataatcgggtacaagattagtatcaggaccagccgtaggaatagagcgagaaccacgaatgtaggtttggatgataggtggtttggaagagtaagaagaagatcacgtggaggtggaaggtggtgttatgggaatgagaacatcagatgtggatgtagaaaatgatggttcagatgcaggaatggaagga

SEQ ID NO: 30439 - DNA, 875 bp, Zea Mays
cggctggcgtggatgaagatggacatgcctcgacggccgcaacactggaggagatggaggacatctgctgggcaaagtcgcatagctgacgttggacttcacctagtgtcacggcgatggacgccagggacggttggagggcagtggctgccgtgctatcttcctcatcgtgacctgacatatatgataccgattgtaatgatctcaacttctgaggttgtatgagtgggtagtagggcgaggccttgaggattgagggcgagagggagccgtgctagcgcacggctgagacggaatgtggcaaggagcaatactcttcttagattgatctttgctaatcctcctaggtacaaactaaggactttatatagtccagtacaggcgcacataaactgctgccgcccctatttattctctaacaaactcctactatctctccttttgatatctaatctgacaaacttatccttatccctctaatcttgatctcctggcgtggcctggcctatgggctgcttgggccgcctttcatatgttttacccaccataacactacatgagcattaaaatcattatgctgaagatgatctaaagcgagacattcaacaaacatgtatacatgctatgatattttcaaaacaacagaagcatggtgtattaaaatacatatatggcatgaagagttttttttctcgaactacgtaggagagctgcatgtcacttcattaaggtagaatgataaataaaaaagaaaaatgtaaaatagtctgataaggatctgcccgagtaactccccccacacaaactagactatgaccgcacaacttggtctcctggtcgtccaagtgacagaccaccggctcccgctctagaat

SEQ ID NO: 30440 - DNA, 383 bp, Zea Mays
ctcgatgagtctggcggcaatgttagccacgatgcaggccatgcagcaggagttggcccttctgaggcaagctattcctgttgcccctgcgggtgctgctcagggtgctggtggtggaggagtgcccgggggcgctgtccctgcgggtgctgctccaggtggtgaggccgaggtgcctcttccagtcagtggtctttctctgatgcagtggatgggcatgaagctggatacttttgatggcagtggtactccggtcgaggtggcggattggctaacttacgtggaggataagatgaatgcctttgagattgtatatggtgatcgtgtttgcttcggcacactgctgctgaagggagaggctcaaatttggaggagaggcgtgt

SEQ ID NO: 30441 - DNA, 498 bp, Zea Mays
ctatcttacacccccttctgaattgatccaaacaatccagcagggcgtctgaggaaagcgccctccagctctcgtggacctgctgctgccggaccctcgcgtccatctcctggtcgcggatctcccacactacgtggtcgtggtcgtggtcgaggtcgtggtcgtgggatgggtgctcgtctggcccatggcattgctgcattcttctccatgtgcagaaatatatcttcagatgttcatgagctggctcggcgacaacgggagactgacgacaatcttcgtcgtcaagcttcctctatgggtatgccatttgctccccgttcgcctgatgtgcctctccatccacctcctccagaaatcaatgagtggcaccagcaggcatatggggtgtctttcatgtctccagaagatgaagaatactttgatgatcgtgagcagtttgccccgcctccccaccagggggatccgggtcaatcctcttctcatcctccgccccag

SEQ ID NO: 30442 - DNA, 587 bp, Zea Mays
ggagaaccaaacaggggagggaacagaggggacagaggaagggcgccatatgatctatatagaagagcaccatataaatatccatataggtataaaggaggaccattggtggtaggagcttaagaggtaggagaaggagcttcagtggtaggattttcattgggaggaggacaagcatctatgggaggttggtagggatacaaaggaggagaatatgtgtatagaaatagaggttatggacatagggaacacggatggtcagaaacatcctcatggtgacaatgcatgagagaaaggccatcgaagaaggtctgtcccacacaagtacgggtgccagaatgttgtgacgattgatcgttggccaagtcagtaaatgttccaaactttggactctacctgtgatcttggaataaagagtgttcggctacaataaatgaaggaagactagtgaactggagaatgggggtgtgaatgaacccaaacaccctcctctatttataggtatactctatttttgaatttcttgaaaaaattttaaacttcaaatagccaaaatggcataaaccatttagaagattacacatggt

SEQ ID NO: 30443 - DNA, 356 bp, Zea Mays
gtaggtcgctagattagttagaaatggaaagcccagtcagtcgttcaaaacttgatttaattgtcttcataaaaacttactttatatcaaaactcgtctcctttatcttcaacccttcttgtctgatttttcgtctattagaaggttctaatgagaagcattgcaagatgatcaagctaggagtgcggaacttgaagcgaagtttgctagaagaaaccctttcgaagctatcgatgatgccctattctctgtcttatccccactccgcaagaagttttgctatggattctttggaactattaccagacttcttggttaggttgataggattgttctttagtattaaaattttcgac

SEQ ID NO: 30444 - DNA, 376 bp, Zea Mays
gcagacaaaggcaaggaagggcagcccaatgatgcaccaacagaggaggatggcaagaaaaggaaagctattgctccaaggtcagatgtatgggaacatttcagcaaagatagaactaaaggaggggaagacagagccaagcgtaggtattgtggcaagctctttcgctgtgacacaaggacaaatggtacatcttctctgaaaggtcatctaaaggtttgcaagaagaatccaaacaaactagtaattgataatcaaggtactttacagctacaaccttgtcctagcaatagcagtgttggtattgtttcaacatggaaatttgacatcgatgacttaaagaatagttttgctgaaatgataatagaggatgaac

SEQ ID NO: 30445 - DNA, 366 bp, Zea Mays
gatcggtcgcatcaactacgcttggcaccgagccacagtaggagagcctcccactaatgacttacgaacacctcggcttgcgacacactcatgacgtattaagcctaggcctaagtacgttggtcatctacaggacccgcaatacgacgagtcacaccaagacctaggctacggaggccaagggtcggcgtggtgcaaaggcagtaatgatggcattggggctccatgctgcctgtaccgactgccataaaggacgcaaccagggaagcctagacgaccaggacgcaaggtgacaagcacgatttatctaggtagaacgtcttgttttaccagggctcggtagctccttctaagaggagtcagtaa

SEQ ID NO: 30446 - DNA, 394 bp, Zea Mays
cattcgggattcgcagggagttgttgctggggcagttggctgaggccgatctcgggcgatccagagttttctacgaggctgacactgactttaggcgaggcggagttccctcccgagggagagaccgtgttctgtcgtatgcacatcccgtctggagttgcttgagtacaacagacgacgtgttcttgcatcgatgcatggcatcacgctccactcgttcccgctcatgctcatgggtgtggcgacgatcgcggcattgggaattgtggcgctcgcggagcgccctatcgtaaggagtcgctcccgtcttggatacctggtcccaagatacggggtgcgctggtcccattctccatcctcatgatgacatcaaacgttacggtgtctgtttcgg

SEQ ID NO: 30447 - DNA, 382 bp, Zea Mays
ttttactggccggccacgaagaatgatgccaccgagttagtccagaagtgcgtggcgtatcaattcctgtcaaaacaacaacatctacccgcacaacagttgcagactattcctgtgacctggccatttgcatgctgagagctgaacatgatcgggcccttcaagaaagctcaaggacgatatactcacatactggttgccatcgacaaatttacaaagtggatagaatacaagccaatcgcttctttgacctcagcaaaggcagtggagttcattcaggagataatgttcaggtttggaatacctaacagcatcatcactgacctagggtctaacttcaccagcttggagttcttcgacttctgcaagcagaggagcattc

SEQ ID NO: 30448 - DNA, 319 bp, Zea Mays
tctctgtgcctgcctggtggaggcggaccaccgtgtcgtgggacagtattgtcttttgctttcatggagatcccttttggctgtcttgacctctctttgtccttttcagaactagaactagaggtcatgggcctccacgagggtgcggatgaggtggtcaccattgtctgagcttagggcgccgattgaagggagtgcctccttgatgtcaccaaccgggtgtgcctagtcgtctatcgtggtgctcgtcgcagtgatgtcggggctctagcctttgcgtagttccggtcaggcttcaagctcggtactggtgacctgt

SEQ ID NO: 30449 - DNA, 455 bp, Zea Mays
agaacgatcagaaatgagagatttaggcgagatcaacatctgatacttgagaacaggttatagcagataaccagataacggggcagaatcgatgaaggatccagggattcggatgataagccacaacatgattcataaaggtaacggtttactagatccaggtgaaaagagaggcagtcgcatgagatcgcttaggatgagcagcagaaaggttatgaagatttagggcaggatctatggaatgaaacatggcttggtcatggtttgcgcaactagacacaaacgatgtttttttgacataaccacgtgcttaaggaagtttcggtttggctagctgttaagctatgggggtctacaagttgtgtaggtgcaacttcagggtaaaacacacaagggttagaaaacaccgacacaagaatgaatttgttttttttaagattttacttgctaactac

SEQ ID NO: 30450 - DNA, 457 bp, Zea Mays
attgtttgagtgggttccacttcccgtgttcatgagcagtggagtgtggtcagaaatttctctcgtcaaagcttgaaccgttgtcaaaggatactttgactcccactcggtagtaaccaagatacggtcaagagtctcaaaggtgggtacacttctagagttagcccaagtgaatttccgatttgacaatcccaattcccggagatccaagctatcaatgactgcattaaaaaggaaaggccatctatcattgtagttgtcattatttttttcatgttggtttctaatgatattgaaatcaccaccaacaataagaggtaggttttctttggcacaagtttgcaccagttcagccagaaaagattccttgaattcatcttgtgcagccccatagaccgccaccagaacccaactaaagccatcatccttgtttcgtagatggaacttcacatagaag

SEQ ID NO: 30451 - DNA, 609 bp, Zea Mays
tgggcaggtgaattagcacaataactaataaagaggtcacatgtcagattttttttctcggatacacaaaagagcggtgtaccattgcattaagaagagaagagagttcaaaacagacttcaccctctacccggacccagtagagggttgccaatacaaaacaagttcaatagctgacttctatcctagaccctggacttgacctagagcttgcaggttatcagatccttcaagacaccaaaaacaacactctatcatcaaatgggcggagagccgactgcatacaaggacgcttcccataaaaaactatagcattccaatgtttccaaagcatccaagcacccaatattatcaccaaattgaccattttttcgttaacttgggtaaattcctgaccactcttgcccaccaatctacaaacgaattttaattctggcaaggggttctgtcagttaagtcgatacaaagtattacaaaggaacatcctaaaccaaaattctcttgcaaatacacatgtcagattcttgacatattgtccaaccacatgcccaaacttactgtcaagttacagaactctctccctctcttagtccatcacctggactaaaa

SEQ ID NO: 30452 - DNA, 932 bp, Zea Mays
gcgctggtcgcatccgtgccttccgccgtgttcccgggggcagctcctaggctcgctcctgttctgcatctgtggcgtttctttattggcccggagcagcggcagcgcttaactgtttccgccattgatccggcgacctcagctctggctttgcccttgtttgtggaaccggaaagccttttctcagcgctcaaaatcccgcatatgatctggtgctgggggttgccaccaacaggttgttgcccctgcccccgtaatccttgccccctttgctccttgctttcttctctgtgctgcctttgaagtgttgccagatcgctcttgggagatcactggttcgttagccggcccatagtttgtggacaaacaagggccagttcggtctatttcatttcacagaaggggaaaaaattaggcggcgggatcctgctctttcctgcatggtcccttttggagatactgtttgggttgggaggaagtaaaagcggacaagcttggaggttccgaggagggaggaacatatccctttgtagctgcatgaggaggcactgagacaatgagagatgacaactcaagcaagaacaaggtaagcgtgtttgcacctccatcatgtttgtagtcacgtttccatgttcgtctctgatcctgttttggttctgattggtgctcaaaaagctgtcctggtccaagacccttgttaggaagtggttcaacatcaaaacaaaggcgaaggatttccattcggattatgcagccgaggaaggtacattcatttatcctcaacccccaacaagtcttttcactatctgttctaacagcaaagaaactgcacatttctgtcattaaacatctctttaccacagtaggatcagaatgcctactcttttcatgtgctaattggcctcatacttcctgacttcctgttctcttca

SEQ ID NO: 30453 - DNA, 839 bp, Zea Mays
ctaatcgtcgccctaatcgcgattagtcgcctggtcgcccctctcactcgaccagctggtcgcccgacttgtaaacattgtgtagaagcatgtttggatggtgggttagactactaaatcattcagattggacctttacatatggaaaatttaaaaattatctcctgagccctgactaaaaaaatcgacaattatcgggcacatctggttcatgaacacatttcctgcatgataacatcgcagttgtgaagtccgccagcactaggtcacttgctcacccgtaccagtaccatcatctgccaccattgccaccttctagcacattgatttgactcgcatcttcagcagtgtcttcctctttaacgtgacatgccttgattcatgccgtcgattctctcacatgtttcattcatagggcagaactagagcctctttcatttgtcattttgttaacagtgtagattctctcacatgttttgccaccttggccatgaatgaaatagctacgaaggatttccttgttgctgttgtactatatgcaatgctagatttgtgacgtgaacttatatgcgattaatgtcattccaaccttggccatggttccgttcaaattcaagcatggctttgctttgttgcaacttgcaagagttacttcccataattagtgaatgactagatggtctcttttgatgtttcttgttcctttaacttttgtacttaagttgtcttctgctattagtattaaccagtaggggcacaaacccttcctgtttcttcaaaaaaaaaacttatatgctattggcatgcacattgtttctagaagatgttttataaacaaa

SEQ ID NO: 30454 - DNA, 702 bp, Zea Mays
ggtgcatcgtatttattgttgcgctacgtggatcaagtgtctcgagtgcatgtcgcattatggttgtattcgtgacaaggaggtgtaggttttactcgattagaagtttggttgatgtggctaggaaatttgttttggcttaagtagagaggtggtggcaacgccaaagtagccgtcgctttctctatgtttataagtcaagtctatacatgttatgcgttccctaaattacgcttcacatatagtgtattttgtgtagtgtggattgatattgagtgtatgtgtcgcaataaaggaattagtgcgcatataggcgataaatgggcgtattatagtggtggtggcgcaagatatttgattgaggtgtgcgggtatatgccgtaatatggttatactcgcaacgaagaaagatgtatgtcttgtgtaacacaacgtttagattgctgttgtataaccgtgtgaaggatgctcccgatggtcatgcgactaatgggtgttgtagtggcgaagcgagaagtaagtctaatacttttaaacgattagttgataatggcctatcagcttcgtcatgatttttgtcttatggcggatcgatgcattgtcgtcgtagtctcggggaattgtcggaaatgttctggtgctttaccgatgggtttgaatgtacttgtgacgtattacaatagttgtgtgtcgcgcaagtac

SEQ ID NO: 30455 - DNA, 306 bp, Zea Mays
tatataagccgaaggaaggaagaagaagagaaactcactcgaacgaccaaaagctagataaaagccaaaataggtcatccggagcgagcaaatattggtccccaaagaaatgggactcaacacgaccaagcaaaaaaggctagtcctaaagaagaggcaaaagtagggatgaacaccactagccagcagataaagccaaatcagagcacaaacccaacacaaaagctgaaatccaagatagttcctccagaaagaagcaaatggctcaacacaactagcaaaagctccaaaatccagtctctctcc

SEQ ID NO: 30456 - DNA, 345 bp, Zea Mays
ctttgtgcagctgcctgtttgtcaccaacacaaaattgtaggtgcctgtttgtcaccaattatcctctaccacaaagaactacaatagtgatggaggatccgatccagcacagatccactataatgcatagtgggtgatgcatgcctaatggtggttgtttagtgttagtttgggcatgttggaactaagcaattgtcgatgccatacactagaagtgaagaatgttgttagcgttaggagtagaggtgtcaatggggaccgatacccgttaagccatggagaatttctctattagatttagggtatgggaagattttaatttccatttgctgaagttaggtata

SEQ ID NO: 30457 - DNA, 295 bp, Zea Mays
ggccgtactaaaattcaacttcgtatccatattctcatgaaaacttttccaaaatctggaggtaaactgtgatcctctatccaaaatgatcttctttggtactctatgtaaacacacaatccgagccatatataactctgccagttgagagcctttataagtagtcttgacaggaatgaagtgagccactttagtcaatctatccataataacccatatagaatcatatcctttcgaggtgcgaggcaatccagtaatgaaatccataccaatatcttcccacttccactcgggt

SEQ ID NO: 30458 - DNA, 421 bp, Zea Mays
aaaaatttcatgcatcgcaaagaaatgaattacaaaactatttatatattacattcaaaacccatgatcaccaaatattacaagcatagtttagcaaatgttacattaataatctagcaatgtctttacaataactattcttcttctttcaaaactttatctgcagcttcggtcagcagtcgggtaacgacttcgtctataatagtttcggccatgctaatattttctgatgattcttttgcctctgcttcggccagtggctcgaagggctctgggggaggagatagttcagctgtggtagaaaacgtaaattatttcgaattcgcaaaagtaaacaacaaaggtaaaaatcattaagtaatacctattcgtctctcaagctccgcagccttttcagctgtttttgttgcttctctagtgt

SEQ ID NO: 30459 - DNA, 614 bp, Zea Mays
ttcagcaaacctgcaggccgcttatgctcggccttcacgcgctaacatacttcacaggtggccacatacttggaaacgtcaaccttcatccgcttccaccagaagttttgcttcaaatctcggtacattttggtttcgccaggatggatggtgtaaggcgttttatgagcttctctcaagatatccatcttcacctctgatttctgaggcacacagaggcggcccctgaaacgaaccaaatcattctcatcaatggtgaactcccgcggtttaccatcacccatcctctttcgagcttccttcaatagacgatactgctactgagccgcacgcactctctccatgagagaggattgactaagcatctgagtctccttgccagcggtgccgacataacacaaagcgatccccatacggtccagatcagcgatcaacggcaaggccaccttcggaaccacggacctgctaagggcaccaaccaccacattagccttccctgggtgataatgaatggacaaatcataatctttagtcaattccagccaccgacgctgcctcaaattcagctccttctgagtaaaaatatacttgagacttttgtgatcggtgaaaat

SEQ ID NO: 30460 - DNA, 681 bp, Zea Mays
gcgaagtcttcatggaaagacacgtccgagcaaaagtcgcctaagggtgcagctggacgaaagcacaataagtgtgcaacatcacccacatggtgcgaagtcttcacggaaagacatgtacgagcaaaagccatctaagggtgtagccggacaaaagtgtaagtgtgcgtcaccaccgcagggtgtgaagtcccctacaaaagcaacttccaaaacagatatcgcctaggggcgcaaccgataactaaagtgttgcatagtcatccctacgacacgaacacgattactcatacaagcgcgcaatctcaaatatacaacaaacaaagggctcaacggcaccatcacgcaataatacaaatcacaactgttaccctcacaactctattgggaagagggggagggcactgttttcactcactatcacaacaagagcagtgagggcaactaaaatgtcacataggctccgccttcagaataagacccgcctcctggaaattgaacaacatcatcctcaactcttccccctcaaataggtcccgcaagtccccctctccaatgcatgtcccggacgtcgaggaaagtagctcgcgctgaccaccctgatccagtcgaagacgagacctttccatacccattcggcgacttcttccacttcgtgacgactcgctggtgctctgtttt

SEQ ID NO: 30461 - DNA, 473 bp, Zea Mays
gaaggctggccaccctatcaacaatggcctgaacctggtcccttgtgagtttcttgggagacaaaggcaaaccgaggtacttacagagaaattctgaaatattatatggcagcaagtcctgtaagcaattcacctcttcttccccacagcagattgggaacacactactcttctggatgttagtccttagacctgaagctgaaccaaaaagatgaagaatatccataaccacactaatgtctgaggcagtagggcttagaaataacactgcgtcatccgcgtacagcgagatacgatgctgcatattccttgtagagagaggttgaagaagcccttcctcagaggctcgctgcacgagcagattcaagacatccattacaagaataaacaacataggtgatagaggatcaccctgtctcagccctcgttgatgcccaatacattccccgggcagaccatttagtaaaatcttg

SEQ ID NO: 30462 - DNA, 281 bp, Zea Mays
ataacgtgccatgcacaaatcaacttatgccacaaacatggcatctccatggaggatcacatgtcgattgatcaggcgctcaaggcctatgctgcaatgtacaaggggacactcccgaaaagcaccatcaacgctttgactgacttgtttggcattgggattgagttcgcggagctgatggatgacaccctgatagaaatgatgggacaggaggtggacgacctcaatgttgctaagggtgtagcgaccgacaccgaattctattggttactactactgca

SEQ ID NO: 30463 - DNA, 838 bp, Zea Mays
gactccaggactgcaagtgtttcgaaagcctttttaacttcactgcaaaacgttgcaggggacaataggaacccactggctgcacccaagattcttccaccttttccataaaaccttccaattttggccaatagctttcaaagtgaaacagtctcctgccctgggaatactcatgcagccccaacagaagaggacagtggtctgaaatgaatgttgccgaactttgcaatacgcagtccgggaaataatccccccagtctgaagtgtgaaagacccggtctaaacgaacaagcgtgagacttgcgcgttcattggaccaagtaaatttgcgccccatcaatggcagttccgacagatttaactcattaagaatacgacagaatctacccatcatagccctgtcaaggttgctattgttcttgtcttcggctcgatatataagattaaagtccccaccaatagtccaaggtccaaaacatgccgagcgaattgtgcgcagctcatttaagaactgcaacttctgatcatctggttgagggccatacaccccagtaaaccaccaaggagtactagaaatatgatcaacttgaacaaatactgaaaaagagtctactctggtctgaagaaccttacaagtgtcccccttccaagccaccaatatccccccacgcgtgcccagtgcagggagacaaatgaaatggtcaaactcacttccaagcaaagacatcaccataaaacgggagatagaggccttctttgtttcttgtaagcagaccagatctggttgagtgctaacaattgtttgacgaactgcatctcttctggctttcttattaag

SEQ ID NO: 30464 - DNA, 303 bp, Zea Mays
gcattccatgcagtttgcacacattatcaaacaccacttgttgaatagaatatgtatgcttaagaggaaaaaatgagcatatttcgaaaatcgttccactaccaccaaaatggatgaataaccttcagatttaggtaatccttctataaaatccacagcaatgtcttgccaaacacctttgggaatgggtaagggctaaagcaatccaaaaggatgtatgtgatccacttttgcttgttgacacacaacacattgttttatatagttctctacatcacccttaagtcccttccaatagaatgc

SEQ ID NO: 30465 - DNA, 349 bp, Zea Mays
ctcggctgcattaatctttgtcatcggccagtagaaaccagacctaaagaccttcccaaccagagttctagatgttgcgtgtatcccgcattgtccggcgtgaacctcatctagcagttgcttcccagtaaccgaaggaatgcacttcatgaggactcctgttgcaccccttctgtacagtgtgtcccctatgagggtgtagtgggctgactgtcttgcgatgtgtttcgctgcggctttatcatctggttcctcttcactctttatatacctgatgataggctccctccagtcattagagtctgactctggctggctcaaaacattgcactcttctgcttgatctgag

SEQ ID NO: 30466 - DNA, 603 bp, Zea Mays
gctgatacctaattcaacatctaacaaatgtttcccctcgatcaattgcacggttcgagctcccaacctctctgctcacggtgactgcgcaatccagggacaattcaaagtgttttcggcgatctaatgggttctaggttaattggccgggtcagggagtatcaagagcacatcagagtactgaaacgagtgaacagagggcatgaacgaacctgaagcacactggccacggtgagagcctttcacggcggcggaaaaccgatttgggggaagtgagcaattcagaggctctggtgaacgattgaaggcaagtgctggtgctttggatgggtaattaccctacggagctcatggcatactcaatttatagagtcagtgagcagtggtgtccaattcgaagggattgctggcggccgagaagggggtgagtcactgcagtgatctaccgtggcgatcgcagggtaattgagctacgacgattactggatagtcactacggctcatgatgacgcgataaacgtcctaaggcgtggcgcccccacggtgaatggtgaacacgccggtgatggtcgctcggccacgtcgtcggtgcgaacagatgaa

SEQ ID NO: 30467 - DNA, 681 bp, Zea Mays
ccgccgcccgcgccgccgaaggccgaaccctcgtcgcctcccctgcccacgcccgccgcctccagcaggaccacaccgccggattcgacttttttgtcctcgccctctccccctcctctcgtctcctttgatggcgtcgaggggaggctcctccggctttatcggtgagccctagcctttttctgattgcgtgctaatttgttgaatcctctttctcgaactaatagcgttcggaacctaaccctacgtcctgcgagggatggatggatactcctatccatctgttttgcattgttggcttgtggaccctgttgatataagaaaccccattctgattcggttctcctgcttgtgcattcgcccgacactgtccggtggcataattaacctaaagtatcattcactactattaatatattatcaccttattctgaattttcagcccgacctgcaactccatgccctgtgttaccccccgccactagagttgggaatgggaattgttaatgccagggcctagatatttaatgtatgcattggagcattggtctttatggcatatatgttttcttttgttttatgactatgagcacattcagttttttttaatgaagtgctaactattgttaaatgcccccctgcagagtattttcataacagcacaaagcgtcatggcagcaa

SEQ ID NO: 30468 - DNA, 416 bp, Zea Mays
taggatggaggtaggagtaaagaagttatcgcttcgtttgggagagctctggtgtcacgcaccttcatcgtgaatgtcaccgcatatgaggaagagagcaggagaggtccgaggaagaagagcggaagaaatggacgaatattgttctgttattcgacaactctattaccagcatctcatcgagtatttgtataacaatatatttgacacggcccacggcccattagtcaagtcatccttcggctcccgtcacccatgtattaggcctgcgcacgcgacggcccatccttccaacagcagcttcattcgttcctgcgcttgccgattggtgttcagagtgtactgaagccgatggtatgctgacattctcctccccttgagaagtcgcttgaccccaagctggcgctgatggaaat

SEQ ID NO: 30469 - DNA, 319 bp, Zea Mays
gtcctctcgaaagagtcgatgaggtcggcttcgaagagagccttgatttgatcatactttgcttggtgctctagaggcaactcttcatacgtgacatatctgtcttgcactggtctacacgcatttgtctgagtgttcgctatctggacagctcatgttgaagatgttgacatagatggtcccaccggatgtgccaaaatgtgtttccacctgaaacccaccagcgagagacgacaaccaacatgaggagacatgaggcttttgggacggctggtgagcctcagtcccttggtcaacgactcaaatcctggcgtacgac

SEQ ID NO: 30470 - DNA, 367 bp, Zea Mays
gtgaatctcttccttcacgtcgaggcggaaaagtacagaagaggagggacaaaagccatccagtgacagcagtagtcagcgccggtcacatttttggctgcttcgagaatcggattaccatggcatgtggagttcctgtcctggaccaatggagttcgccgaaagctgttctcctctctttctctctaccattagttacatctgttaaaacatcggatcatattaagatcggatcatattagttatagatctgttaaactactattagtttgcgtttgctgctgccccggaggcaaggcgaatgaccggcccggcccaccttcccctagctaggttagcaaccgttaacgcgtttgccgcggtcaat

SEQ ID NO: 30471 - DNA, 342 bp, Zea Mays
gtagaagtgtcaatagtcatccaaggatacgaggaagacgtgctagacatccctaggcccaaaggtattgagatatttggacgagctatcaagaatttcatcctttggcctcgatgggatgtccaattggttgagccaccaccagcatcatctcatgcccaacccctaactcaatagtcatcacatgcagatcctattgctaaaccatcctcacctcctaaatcttcaccttttgcccaatctattccttttcatctaccattgccacctcctcgccctctttctaacccaccatctactccaccagcatcaccattatgggctccaccaccttctccagac

SEQ ID NO: 30472 - DNA, 494 bp, Zea Mays
gtttagaaaatgctagtttgtgtggaggatgtgttattaagacgtgagtgtcggagttcatattagtggtcgcgccacgttgattgaagtgtctcgccacaatatggttacatgcgagacgaggttatgcgcacgatgagtttagtaaaaatccatcggtgtcactggtgttatgttgaggattatttgcgcgtggaaagtaataatgtgtttaatacttagaactcttagtcgatagtagaaattgttttggcttatatagagaggtggtgacataccaaagtagtcatcgcttcctctatatcttgagtcgggtcaatacgcgttatgtgttcatgatttgggaagtaagcgcatgatggtttcgagttagaaattagtggtttacgatttgtataaattggtcgatgtacgaaaatacttgtgaatctgtgtgtttataaaaatgttgtagtatatattgtgtctcgggttgcgacgataataggcaagcc

SEQ ID NO: 30473 - DNA, 347 bp, Zea Mays
tccgggatgaatagaatagcgactaagatgtgcttcatccaaaatttgctggcggagctcttcattctttggcacaactatgcagttgttgaaccatacaacaccttgatcgtcttctttgaaacatttggcttttccagcccttatcttctcacggatgtgtttcataccctcatcatttttctgtgcgtcaattatcctttataaaaggactgactcaagctttagttgacttaaggctccttgttggatcattcccaggtttaacttctccatctcctggcatagtgtattgtcagaggtcttcaccgtaagacagtgacaggaaaccttacggctaagtgcat

SEQ ID NO: 30474 - DNA, 609 bp, Zea Mays
ggcacgacctgagggttcaattgcagaagcatatgttgctaacgaatgtttgcatgcatcttcaaggtattttgatgatcttgagacaagacacaattgtgagggaaggaatagagagcatgttgatatgagtaagggtgatatatctgttttccaacatggagtacaattacttggagccccaaggattacatatctagataaggattatgataagatggtttggtatgtgcttaacaactgtgtagaggttgaaccatatatggagtatgtattcccactattcctcttgcttgctcttgttattttagtattcattgcatgctacatgatgattttaatatattttacagtctatacagaaaggagttacagaatgagggaggatttcctgatgttcaaaaacaactagaaaaacaattttcttcctggtttaaaaaccatgtgagaacatgttttatatttcattttaatcctttattacttgaagtttttctcattgtatacaaatttgatatgtacagattggaacactttggcatgcgcaaggagaagatctctgttctgatctattcgctttgtcatgtgaacctgatatgcgaataagag

SEQ ID NO: 30475 - DNA, 317 bp, Zea Mays
atcggtagccaaagggatttcctttttctaaaaaaggtttgtcagttccaatcctagaggacttagcagcttgaatggtggggattcagtcattaccttcaaaatttctcacacttcgacaacagaaggtgacagagggcttgaagttttcttcggcgcatcatgtacattcagttcgacagaaggcatccagtcaggcttccgttccttaggagctagtgccttcagcttcgaagctgttttcattttcttcgaagcctcctcgtcttccttcacagaccgggcagcttgcctgctcaaaatactaacaacccttt

SEQ ID NO: 30476 - DNA, 311 bp, Zea Mays
ttgtactattagcactcttcgagaaacaataaatctcacaagtcattttgtttctgaagtaagagctaaggtcgatgccagttaccgacatttcaatctcataggctagttatttaatagagttctaatgcataaaggtcgttttaggattgcatctttctcggccatgactacttgatcaatggatcaataggtacaaaattgtggtgtccccaggccgaataagcaaagggatgatacatgcaatacgagttcctcatagggctcctggtcattagccgtgagtgcctctagagttggcttgatgaagt

SEQ ID NO: 30477 - DNA, 472 bp, Zea Mays
gggtcctggcctggcccacgaactctgcaaggttccttctcccttgcgccctgctagaccagaccagaggacgagatgtgagcacgccatttcaattcaattcaagggcgcatgaacgaagcccactcggcgctccaaagaatcgattcccacgaccgatcgatcgatcgccagccagcttttagatttgcccctggcactggcaggcaccgtcgttcgatcgcctttgcacacatatgcacgatccctcgtgctttcctctcgtttgccagcttcccgcgaaagaacactcccttcggctgcagcctcacgctctcctcctctcaacaagaaggcgcaggcaggggggcagggtttaggctagctagctaagcttggtagaggcctcaagttcaagtataccttccttgtcgccgggttcaccaccgacgcggccgcggcggacgctttgccttccctcccggctcccgcc

SEQ ID NO: 30478 - DNA, 625 bp, Zea Mays
gaactaagagggactgatcagctgcgcgaatatgtgacagaggtagtgcgcatagggcagctgacaccgagttcgcagtccatccaacactgtgtcctcaatatcacagatcaagaagtcgacaacatagaacacagagtgggaaaccagtgcatcgaggagccatggctgaatatgagtggtggcctctctgtatcccatcgtcggtagcagggtgcgcctcattagctcataaagaaacttcgcctcttgggtgaagtctgtaggagagcgtcgagagccatatgtgagcagaggccggaagagagcagcaacatgagtgatgccgggagctactccgccgtgaggacgacgacgagagtctgaggtaccatagcacaagatgtgaagccacgtcgtcgactcacggaatccaaataactctcggatctgagctgtatacagagtgatatcctcacgctcgaaccagaaccgcatccactaatggttaaggtcaatccatattgtatcatagaagagtcgaacccactcctcaacatacccgccaccaaacgtcagcatggagtagagacctagaagatatgtaatgtgactctcagactttgcaccggctattgtacgaaaa

SEQ ID NO: 30479 - DNA, 436 bp, Zea Mays
ctcgtagacccgtttgattaagctagaccgcactgaatcaccaagaacacctcggtttgtctccggtattcaccgccgtcgtgggcagacgaactctaggccagatttgtgcaattgatggagggattagggtcgcctggggtaggatttggtgttagccgagttagggcgctggtcattgcgtattccgaccggtacaagttcgccagagagtgtgctcgtcgccgttccccgtcgtggacttgacatggtaaagaaatagaactccgagggccttagtgcaaacgtcagagacacagatgaatagtgcgtaaggattcttaaccagttattcaaatagccgaggtcctctgtggaaagtcgctagcgcgcgggcgcgtttttctgttgatgggctgacttgggctggtttgagcccattactgtttaatctttt

SEQ ID NO: 30480 - DNA, 558 bp, Zea Mays
cgtccatccctgaggccggcaaagctttggatgctcagaggtctgacagtgttcgcccgaagcgttctcgccaagacaatcagcccacttctcctgctgaggggaagaaaaagaagaagagacgtcttcgtcgagtgtctagcttggatcaagatgtcggtccttctgttcctgttgctgaggaaatgccagtgcctgaatttgttgtagctgaccccaatgggtgtgacccgactgctgtggatcccaatgggtgtgatcctgctgaagttgaccccaatgggtgtactgtccgtgttgttgatgaagatgatgaagaagaggatgaaatccctctaattcggaaagaacagccagcattacatagctagtggggaaagtagcggtgttccttctcctgctttgtctgccctcattggtctgcaagaattatctctgacgaactttgatcaaactcttgaagacatggttccagaagatttgttgtcagagccggcagatggtggcgcgatggatgtttgtgctgatgtgcccgatgccgggttggggtcatcccag

SEQ ID NO: 30481 - DNA, 346 bp, Zea Mays
cacgcagatctgggagatcagcaggaacctatggaaagcagtggccaggaaggaaattagaagaatggaaagttgagggaaggaaaggagagattgattagtgattgattaagtgattgattagtgttaccatgtttaggcttgcctaaaataaaggctccaggacagcaggccgatggctatatatgcggcacagggagacaggaataaagggcagcaaacaagttatctcctctccacctctctctaccatctaagcctacgactgtgggggataaccacgccagagaagacgacgaaccgcggctacgaccttcgtagccgagggccccctgctctaaacgcc

SEQ ID NO: 30482 - DNA, 359 bp, Zea Mays
ttggtaaaaatcttatagctcacgttaaggaggcatattggtctgtattgttggataacatttgcatgaaggactttagggatgagagtaatgattccaaaattaaggctgaacaaggggagttcgcccttgtctaaatcccgaaacatttgcacgagatcccccttgatggtctcccagaactgctgataaaactcagcgggaaaaccatccggatcgggagctttgttgggtttcattgaaaagatagcctctttaatctcctcttcggagaactcagatgtgagtaacatgttttcctggctggatacctgaggtaagtcaagaattatggattcatctaaagtgaaggaattttc

SEQ ID NO: 30483 - DNA, 459 bp, Zea Mays
aatttctgagctgtgtggtgaattccgcccaagtgatagtatcaacaacatcatgggcaacattgtaagaatcccaccaatcagcagtaggaccagtaagacgaccagaagcatagagcgccttctcctggtcagagcattgtgcgacattcagcatcttctccactgactttaaccaattgtcggtgtgcagaggatctggagagctggcgaaggtaggtggcttgtggctcataaactctcggtgcttgtcccggggtggaactggtggtggaggaggtattggtgcttgttgctgtcgcaccattctctcttgacgcatctcctccctcatctcttgtctctcttggtgcatctcttgacgttcatgccgcatctgcgcctgcatatccgtaatagtattggccatttgttgcagcatctgcatctgggctgcaaccacttgaaagtcgcctagag

SEQ ID NO: 30484 - DNA, 305 bp, Zea Mays
taggtatctcctcctgttcccacttgaattgcaatcaacttttgaggcccaaacatgagaaaacatacacctagtggttttgaagcccaaaccactaaatcccttgtgagtagtgtattcgatatgctccctccatgatctcgtcgtgtgtcaccactagtccttaacaatacgatcaccaagttgtctagcatcttcgcttgacttcatcaatatgttctacccccatattttcttgcacttgtcgatgttcttagatgtcagtcaccatggacattgcttcgaattctctaatccctcagtcc

SEQ ID NO: 30485 - DNA, 423 bp, Zea Mays
cgggggcagtagagcctttattacatgaaatagaggatgaactagttaaatgacgaagggcgtcgtggctgatgtgaccaagacgacgatgccaaagctatgaagaggcactggtgaggaggacttggggggtagtggtggaggacaacgggatggagagtggatagaggtcgcctgagctattgcacctggcgatcacgctccgtgtcctgagatccttcacagaaaaaccagcggggtcaaattcaacagagcaattattatcaattgtgaattgacgaacagagacaaggtttttgataatagatggtgagacaagcacattattaaggtggatcagacccatatgtgtggatcccgtggagacaacgggcaaggaggtcccatcgccgacaataattgaagaaggagtggaagaggaag

SEQ ID NO: 30486 - DNA, 309 bp, Zea Mays
gaacggtaagggtgctgaatcccaacaggggcaggagaaccaccatccagatagtggtgtgccgcgcattcagcacgcaattccgcaacttccgctcgaaccttgcccaactcgtcaagggtgtggtctaactctgtgttgagcacggcgaccaagttgaccatgctgctcagcctgggattgccctcacccactggccagacaatcacacctccagcactgtcggtcgaacggcgagggtagtacttcaggtcaaggccatcagctaccccgctgaacaacgagcaatactgagaaagtgcacgtcgt

SEQ ID NO: 30487 - DNA, 354 bp, Zea Mays
tcacctaccacctgctggtgcagtctgacatatccagagctgggctctataaatggcagcccctgccttcttcttctccccccacgccatcctccctctccctcactgcaacagcaagccgagcacctctctagctccctcccatgggcgtgcgtccctctccctgcagccatggtcgagcgccatacagcagcggcaacctactgtgcgtgcacattccagaggaagaagaagactccccctgtacatgacgtgtgggcccaaggccaagggtaatggtgcttcaaattccagatttcgtaatatcttctaaaatccatatcttgagtttcggagctccaaaaatcacgaaat

SEQ ID NO: 30488 - DNA, 271 bp, Zea Mays
gagatgtgtctagagaggatcgggcgacagcagcaagccccattgccaccaccgccaccaccacttccaccccgggtcaagcaccgggaatttatgagccacaagctacccaccttcgccagttcttcagatcctctacacgccgacgactagttgaagtcagtagagaagatgataaacattgcccaatgctccgatcgggagaaggttctctatgcttctggtcgtctgactggtcctgctgctgattggtgggattcttatgttgctg

SEQ ID NO: 30489 - DNA, 764 bp, Zea Mays
ccactatagctgcagtgtgccacacaccacatgccacagcaattgttttcaaccctgatagtgactctacctcccttgggtaagaaacacttttcagatctccgtgacctaatacaccaaatgaaccgtccccaaaggtaaataactggcccatggatgttatcaaggctgtatgccaggtcccacatgaaacataagcaacttgaagaccttccagtgctccagaaatcctcttaggtatccagtgtcctacatcattgccatgtccgagaaggccaacattgtaagttccatctccccatgtataaagctcacccgttgttgtaacagcacatgtatgaaattcaccacaggcaacaaaatctacattggaaactgtcaaagactcaaccagacgtggacgaacacaatcttctcgtgttccatggccaaggcggcctccagaatcttcaccccatgtaaaaacctcaccatttttcatgaccaatgcagcatgcttaaccccacaatctacatgatacacatcaagaactaaattggactccaatggcttcgggaggagaatgtcaatcctgccagttgaactaataacagtatcagaaccagttcgtactgaagtatcgcagacaacctcaccccatacatacacatcccctaatgaatcacattcatcttgtgcagaaccatggctagatgtacttggggcgctagaaatgcttgctctgagaacatctgaagatggccccttcatgagcatattgttg

SEQ ID NO: 30490 - DNA, 327 bp, Zea Mays
ggtacggtgtcacttcgtcaaggtaccattcttgatgattcaaggtcttagtggtcgaaccacttgcgcttccgagttgcccacagaaaaggctaaggttcgattcattttcgttaacattgtaacgagggggtggattatgcacactagggaggttgtcaccatagtatgttgttgtgaagttcgacacctcctctagaatgtatgcctctgcaatggaagcctcaattttgcatttatttctatatttctttcgaagaacctttaaacatctcatatgggaggtgcaaaatcaaatgttgcatcaaattgaagaagtcaggtgga

SEQ ID NO: 30491 - DNA, 330 bp, Zea Mays
gaaagttactggcacagtggattcgtgtcttccgtcgtggtgaactcaccggcgatgagctatcatcgcaagccgagctacggggatgtggtaaagtgcgttagcacatggcacacggcggtaaactctaagtcttatctcgatcggtcgatgagcaaggagtacggtgagcttagccgtggccgggctcaagtggatccaggcgccaagatctttactcgcttgccgttatccacaagtcacagcgcacgaatcccggcgatcgacgtgaatcactgtgcgacggtcatcagcggcgaagttccctgatcctaatcaggctactgtacc

SEQ ID NO: 30492 - DNA, 272 bp, Zea Mays
cacgcagcatccaggacactagtcgggaaagtcttcaggtcgggattctactggccaacagcaaaaagtgatgcagccgagttagttcagaggtgcgaagcctgccaatacttgtcaaaacagcagcatctaccagcgcagcaactgcagaccataccagtaacctggccgttcgcatgctggggattggatatgattggacctttcaagaaagctcaaggaggatacactcatatactggtagcaatagacaaattcactaagtggataga

SEQ ID NO: 30493 - DNA, 497 bp, Zea Mays
gaatttgtaagtgagctagtcaaattattcaatttctattcgccactacttttttatcctcagttcttcattggttacttttatttgcacttgtagatgcataccaaaaataggaataggttagagcacaaaaggttgaatgacttggtatatgtttcatacaatagaaagatggttgataggtttcaaaaaatacgtgaggaaggaaaaaactttgatcctttgattttagaagactttgattgggacaatgaatgggttgatccattagctaattcttctcatgttagcaatgctcttggagatgatttcaatttatcatgggaccaagttgatgaagctattggtgcatctgcacatctcagaggtcgtaattttccaaggagagctgctggtgggtgtgtgagaaggaatgaagaccttgaggaagaggagactaatttagccaatgaagatgacgaggatgaggaatatattcttgatgatcttgatgtgga

SEQ ID NO: 30494 - DNA, 330 bp, Zea Mays
ggtagcggtagtcggggtagacgaagccaatagcatcaaaaactctgttcaatctcttctttccctgacttccgaaggctatggataatgcattatcttctgccttggaatatgatccaagcagttcatcacttgtaacttcgatgaattttagccagtcatcatttggctcatcaagcttatccctatatctgaacgtatacttcagccggaccacttcaccttcgctagacttggtgatggtctccttcggcatttcccagctctctacaagcggccatactctgaatgctatatgctcttgaactaaatctcttgtaccaatgaaaa

SEQ ID NO: 30495 - DNA, 372 bp, Zea Mays
cttttggggctgagtagctttaagtaccaggatgtagatgaccttaatatctttattccttcttatgaggttgatggtaaccgagtaaaatcaaatccactgatttagatccttcttgccatcgtacttatcaatgttgatgggcttgactttctttagtacgtgaaggaattaatccttcttgagaaacaaagaaaggactcatcctcagcgttgtactcgttcatccaaggagatttttcatggtcaagatcccacctcctagaattcaatcgcttgcaaatatcatgcctatggaggacatcgtacaaatcgccctaatgttggtcatttgagggtggtctcttcctcccctatcttggtcattgtttc

SEQ ID NO: 30496 - DNA, 479 bp, Zea Mays
ggaagaggcgcggaagctccgcgcggaagcgtcggagcattttctcgcggcggccaagctgaatcccaacgatggcgtccccttccgcttccttggccaccactatgcgcgcggcggtgacaatcaacgagcggtcaagtgctatcaccgtgccgtgaccctcaaccctgacgactctgaggctggtgtatgtgtgggaatatgtatattcatatgcccaatgtattcgtcggtttgcttgtgctggattctaatgtgttttcccctttatttctgggatatggcgcaggacacactctgtggcttgctagatgttgaagggaaggagagcttggagcttgctgtctgcaaggaggcagctggcaagtcaccgcgtgcgttctgggcttttcggagacttggctatttacaggtaacttgtatagcaatttcttgaatggactatttgttgaagcaagaatgccaatagtatgtgtcat

SEQ ID NO: 30497 - DNA, 396 bp, Zea Mays
ctacgtcaaggcgcagattcggtttactccgtcgaggttgtggtcgtcgatttgggcggcgcttcctcaggtggataatgagagaaaggaagagtggctagagcgcgtgagaagtggaagatgatgcgatcaccgtccaatttagattgagtggatgggattagatctgggggagcaatcaccgtggaccgttgatcgggtatctaacgcctggggttcagatcggttgtgatacgttggatttagatctagcagtatatatcgcataccgattcagcgtaagccatatctaatctgggccctcgattttgatcgaacgacccaaatagctcgataccccttcaccgtgtcaaattttctaaagagcccctttactttccttaaaccaacccgtcg

SEQ ID NO: 30498 - DNA, 367 bp, Zea Mays
cgggggcactgatggttgccaccagtatctgtcggtcgttgagcttctgttgccttttgttttcttgtgatccgtgtcctccgaagatgatgttgacctctccgtcgacgcgcggaaatgctccacatcctccctcttcctgctgctgaggtcgtcgaggttcaccggtccctcctcatggtgggggacatggtagaggttggaagggtcggccattcccgacggaatgcttgaagtctctgcagttccgcaaggtgtggcgcatatccttgtgatacaggcactgggcattgaggatgtcgtccagtgtccgctcgcctccgcggggtgcacctcgggcacgagagacgagtggtccagcggcatg

SEQ ID NO: 30499 - DNA, 296 bp, Zea Mays
tataaatgccacatagattttcatcaaaagagactgcagatgcaaacaacacttgtacatacatacacctcttagctaaatgtactaaaacctaattcatttggctccctcatctattcataggcgttttggtcccagagagaaggggcagtaaaagaaaaagaaaagacaaattgttgcagctagctacacataatcccagattcttctgatgtagtgggtttttacagagacatccctacgcttgggtcgaatcgtcagcatgacctacctgggttacaatctggcaatctgtc

SEQ ID NO: 30500 - DNA, 660 bp, Zea Mays
tgaaaactcctggtttcattaattgtatatgcaactcactttctacttgctattattgttccatatgagatgggctaacatatttcagtaaaaattgccaacagcagcttggaaagttcccacttgatagttgtgcacgacatatatcattcttgtttgctaagaccctgtagtatctatttgtggaatctaaccttcatcccagtgcctaatgctccaattgactgttggagtttctgtgtatgtaagtgtatctttgcgtgaggacaattacagatagcgttgtttgaagttgaaataatttgagtaatttatagtttcacaaccccctccggccctccctcttgtaaaatgttggttgttttagttatgttctaggccaaactttatgaactttgaccaagtatatagatatgcactatctacaacatcaaatttagtttagctttgttaaatccatcatgagaatgccttgatagtgtatttatttggtattgtacgtgttgatagatttttgtgtaaactttgtcaaaaatagagaagtttggctttggacaaaactaaaacgacctacattctaggacggatggaccgatggagtattgttctttctaactgcgcacagaacactttgcaccttattttcttcttggacacttc

SEQ ID NO: 30501 - DNA, 588 bp, Zea Mays
agaacgggacccggcacaacccgtctctagggatgaagcctcagagatgggggagaccctcgacgaaagagacatcgacgaaagattctaggctctagcgggagaatccgctccttgcccgaaacttgtaccacgattttgctcgagccttgaatatgccaagctaagttggaggagtcctggcgcagatagccgatggcctcccgcgaaccccaggtgcgaagggctatcggtaggtgcttactcaggcggccaatcatcttctacctctcgcccacccaccaaacgacctgcgtcatgccatcaacaaccgacgagacgcacagagcaacatcagcgcttcacgcgatcattgacatgagaatgaaataaggcgctaggaggaatacgaccaagatcaaggtgtaccggcacatagccacgcaacccagattgagtcagcagcaacctcaaccaatagtccggcccggggacagtctaggcgacctaatactcgctcccctccccgggatcgacgacatgatcatcgacaagaggatacatgcggggtctccacgctcacccctcgcctccgagccatccaatggc

SEQ ID NO: 30502 - DNA, 390 bp, Zea Mays
ccacaacaactttggttgttatggatttatcgcccgtcccaactcaagctacccagtaccaacattttggaaaagatggccgggaaattggatggaggaatggttttatgtgaagaacgacttggtagctagggaggatgttaaggaggttattatgcgccccatttggtcccgcttcggtctccgaaggccgaaggtcgaaatcgatgaagccgccgaagcatgccagaaggcctttggcactgtatgcttcttcattggtacaagagacttgattcaagaacatatagcattcagagtatggccgcttgtagagagctgggagatgccaaaggagactgtcaccaagtctggcgaaggtgagctagttcgactgaaatacaccttcag

SEQ ID NO: 30503 - DNA, 626 bp, Zea Mays
aaaccgatgagtcagaagcctcggagacagtccgttgagcggcaggacttcatccgtaaggaggtccggaagctgctacacgctggcttcatcgaagaggttcatcatccagtgtggctggccaacccagtcatcgttccaaaggcaaacggaaagcttcggatgtgcatcgactacaccagccttaataaggcttgtcccaaggacccgtatccacttccacacatagatcaaatcatggattctacctccgagtgcgacctcttgtccttcttagatgcttactctagtttccatcagatccacatgtctagggaagataggaagcataccgcttttgtaacagtggatgggctttactgctatgttgtaatgccctatggtctgaagaacgccttgccaacatttctacgggcgatgagtaagacctttggggacctgattagggacatgatagagatatacgtcgatgacatcatggtcaagactaagagagggtcgactctagtggaagacttgaccctggtcttcgacaagctacaagcaacacgcacgaagctgaacccggacaagtgcgtctttagtgtctctgctgggaagttgctgggattcctagtttcgcgccg

SEQ ID NO: 30504 - DNA, 363 bp, Zea Mays
gggatgtagtgcagttctttggactctttggaaaataagaaacgaagcttgttttgatgataaaagaatagttaatacgttagacatctttatattgtgttgtttttggatgaactcatggattttattacagaaaaaatcggcaagaaggatgctggaggaaagaagcaatcagatcaggaaaatggctagtgagttcttcagtcgagcttggggatggtctccagttgacaggaggctgacgcagtgatcggttgagcgggggatcttttttggcgatgatgcttctttctgttcttgaacctagagactcttttggctattatatcaggatgtcggtctgtaataatgtcttggttaaac

SEQ ID NO: 30505 - DNA, 339 bp, Zea Mays
gtgcaatccgatgtaaacgaacaaggcctaataatttttcgaaccgtcggtgttagagacaagtagaaataaaattacgaaacgtatatgcaacggcacggatgaattctgatatagggctccccccgtgcacatatataatagggtttcatgcaaaacgacaccctaattttgtccaggcacacaaactatgttttcgcggccaccattaggatcccagccagttcgtccaaaacacggatgcacgaactttattctctaacgaaaagcatcctctccaacctggcaactgtatcctcctccgaaatgtcattgtctgcaccgaatgattccagcaac

SEQ ID NO: 30506 - DNA, 356 bp, Zea Mays
caccaggatggacggtgtaaggcgttttatgagcttctctcaagatatccatctttacctctgatttctgcggcacacagagacggcccctgaaacgaaccaaatcattctcatcaatggtgaactcccgtggtttaccatcaccaaccctctttcgagcttcctgcaatagacgatcctgctgctgagccgcacgcactctctccatgagagaggattgaataagcatccgagtctcctcgctagcggtgccgacataacacaaagcgatccccaaacgatccagatcagcgatcaacggcaaggccacctttggaaccccggacctgctaagggcatcagccactacattaacc

SEQ ID NO: 30507 - DNA, 426 bp, Zea Mays
aaggtataccatgccgggttcatgcctacgtatgctggaaggtgacacaagggtcatgacagaagatgaagctatcgttaacacgaccctgaaccccaccgagagtctattctgtaggacccaccaggtgccgctacgttgacatcaaaatagctacagggactcgtatgccagacgaacaagatggaatgccataccaagggtacgacagcgcacgaccctacggacaatgttaggagggctatgccacctagagcaaaaggtcgagctccctcctagtagaatacgagttcccaatgtaaagtccacccttgagctataaaagggcaggaccaccttctttctacacacaagcacaccagtgtaacacgccccaaggaatactacgatcatcactacactggagtaggatgcgaacccgaacca

SEQ ID NO: 30508 - DNA, 580 bp, Zea Mays
ggcatgcccatgggacccgtttcccatctcgcgcatcaactaggtcgtcgattccacctcagactgcaaggtgttgagcttcctcgatgcgtactcgggtctatcatcagatcacgatgaagaaatcagaccaccccgccatgtcctttattaccccgtttagctcacactgctatgtgacgacatcatttggtctggagaatgtgggggcaacgtgccagcgatgcatgatcgaatgtttcgacaacctcatcgagagggttgtggaagcatacatcgatgacattgtggtcaaaactaggtgatccgagggtctcgtagttgatcgtgggctaacatttgaaaggttaaaggctaatgacatcaagttaaacccccaaaaagtggggctagaaagggaaggcaccagactactagcctagcctctcaaaaactttttacgtcctttacgttcttcacatccttctgacatgcgtggctgcactaatatctttcccattttgtctgccagattaatgtagggcctcgaaagagccgaaggaaacaaaaacaaaccatgccaccatttggaacacccctg

SEQ ID NO: 30509 - DNA, 695 bp, Zea Mays
cggggtggcctcaagaggttagggagggtgtagggactcgctggcgagggccaaaccatggtggaagcaccgaaggtcggagatccacgacgaggtggcatggtggcgacgctagcaactccgacgagcaattgcgcaatgcagagagcgagggtgcaatcagagtgggtagggggggttccttacctcaaggtgagactcgggatcccctctgaggcagcgacgacacgacgacgacttcaaacgatggccacagttctagggctgcacggggaacgacgattgaacgcgggcagagtgaagtagagggatagagagaaattgagggtgagttccaggctattggcaccgagacaaagcttaccgtggcaagaaaaacgacagggcctcgacatcggtgagagaatgggtgtggggcgatgatgagcggtggcggttctccctcagcgtgtgtgcaatgtggaattgggagggtgagagctctcagagtgtatgagtgagagagggggagagcaggtgggggcactaggggttcaaatggccgagagtggggcggttttgggtgagacctcctcggcgtgcgcgctgtccacgtaggcgcgcggttgaaggaggggacagaactgacaggtggggtcagctagtcagcgggccagcgctaggtgtacccaatggatgggaaaaagagcgccgac

SEQ ID NO: 30510 - DNA, 349 bp, Zea Mays
cgccatcagtcactcgaccattacctctaaaacgccgacgttgccgtcagtcactcggctgttagctctaaaacgccaacgttgccatcagtcactcggttgttacctctacaacgctgatatcacgagtaaccactcggtcgttaattctaaaaacaccgatgtggccccgccatcattcggacgctacttcagaagcgccaatgttgtcaataataactcggccgtcacccctaaaagcgacaaggtgaccccaagtgactcggccactacttctgaggcaccgacggcgcaggtaaagcgaacggaagaatgattcgagaactccaagttactacccaagcatagc

SEQ ID NO: 30511 - DNA, 749 bp, Zea Mays
gccatatatttagtttcttgtgtttgttgcctttcaaatgtgtattcttgtctgtcgccatatattatgtaaaaaagaaagaatatcaaattcaagttgaccaaacttacgtagaacagtatgtaaatgatttgcagtctttcatagtttagggtttagggtttagcagtctttcatagtttttaaactgttacagatggaatttacaggtcctccaaatcaacaggcaacgattcgaaaaaaagtagatgactgtgggttaaacagtaagaaacaaaaaatcaattgtattgtatgtaggtggggaaggagttgaaaaatagcaactaatgattggtaaaacctaaatatttgtggtgtacctgtcgtagatagaacttttaaggtttccaaaccagctgttgatgatgttgaaaagctggtggtaaatacaacttgcaagatttccaaaactagctgttgataatcctgaaaagtaggtgaccatttagtatataataagaaacaaaaaacatagactcagtgatctaggttgaggagtgaaaattctaaaggagatggtagttgtaactgtttttgaggtaccatgacctaaaaagtcggaaagtattcttatattcagaactaagtagggaaaggcggtattacaaatcccagtgcataatataacagtggaaaattttaaaacaaggccatatatttaggttattatgttttgatgcctttcaaatgtgtattattgtctgccc

SEQ ID NO: 30512 - DNA, 686 bp, Zea Mays
gagttatatgtggattatgttagaaactagtatgcggcatgtaattgtgttcgtgttgtgaataatagatcagtaggtattgttggtgtcattagcaaatgggatgatttcagttgtgcgataaattttgaagggcgaagaacatgtgtagtgtgtcgatcaagttaaccgataggttccgtaaaatatgcttgtgatgcttttatgtgcatgataagatcgatgtcttgtcgtcgtagtctcaggaaattttctgaaatgtgctagtgctctactgatggggttgaatgaacttgagatgtattacaatagctgtgtgtcgtgcaggttatccaaaaatggtgaaaggtggtgtatgttggtaattgggaaatagtcacgttattatccaattcatgttaagtaggagtcgattgcgttaagtgattgttatatacatattgtgtctcggattgcgataataatgggttagccgacttgttagatggctttagttaagctcgtaatcacgatgaattgcttattgtggtctaaatgtgtatgattatggtcacggatgaaatgtagtagtgttcatatgatgtctaagttaaaatgcgaattattgtgtgaagaacgcatcgatatccatatataccgagtttgagtattgtgctgaatgcgtttgttaattgtgtgtggtaatt

SEQ ID NO: 30513 - DNA, 1215 bp, Zea Mays
ccttgttcctcttattatcattgatcaatgccacaaggctggttttgagaaattttgaaggcttctttaaaacttcaaccttggatgttccagacttcagtagattgctgcttgttgattgacttgattcacatgtgggggtagatcctgcataatgtggtaattatatgagataacagtagcactataagataaagctaattcattttattggaaaactctttactaactttggtcatttttgttgcaaggattcttctcatgggcatcattttgatatgatgtagacaccttatcctgtgacttttgtgctgagaccaccttacttgatgggtaagaaggccttttattcaccacagttactttcccaatagttcttccagatgacaagctcctttgcagtggctcaccggcagaaacatatgatccctcacaagaactgaccatgtcagaagttaaatagacactcatgtcaggctgataaactgtgatgcttgcttttgattgttttctcacgtcaggagcacaactgctaggctgctgtgcattacttttggcaggataagttgcatccccattaccactcattgcatctgaaccaaaatagttgtttgacacctgcagtcataatgcaaatggttgaactatctaatataaacatgtaggctgaagaagacaagtgaactctacgtgtttgcttaaattaccttgtttccagataaaatctccgaagagtgtatttcatcagcagcattataattattcttttcaaaagatacaccaacagcaccattttcgctcatatgaataccttgatttgatctattcatgttgcttctatctgccggaaatgggtcagtatctagattgtaaccatcagttgtgggaaaggatggttctgataaagtatcgaagttcatgtcacgcaagtgaatgtcaccacctggaagaggtgaattcaagttagccaagaacggcatctgttcagtagcctcagtgctagatccaccaaagctgctagaaccactaccaagccatttttggcatgtttccttatgtccttgcctccagtgtactatttgacacttcccagagctgcagaacattcaaaatggcattatcactttatgaggtgtcattgacaataggggcaatatgatgtacatagtagttatgacacagtgaagacaattaacacagtagtggtgcacgaac

SEQ ID NO: 30514 - DNA, 639 bp, Zea Mays
aagagcgaatttcttaagaagaataaaggttctaatcctgctgggtcatattttttctttgtttcatctgtttatgtttaatatatgtcgtttattcacctactccagctgctgttatcaccccaaccaaatcagttttgaaggtgaagttatctaacaacatccccaaagggaatatctcaagttcacctgcaccttctcctgaacaacctggagaaagcaatccttcgtttcctgttggatcagatgcaaataatgaagtcataacaccttttgattttaacaaagaggaaaacagtaaatatgagaaatcagttagaaataagatgtctaacaaagatataaatcgccgagcaagttctcatgctgcaaatgtggatgataatacaaatgaagtgcgaagctacttgatatccgtgctctcaaaaaatccaaaaggaatgggcctaaaggtaaatctctctatctctctgagcatgggtaacatgatattaatcaagtccatgtgcaaatggtaaaaatactcaggaaccttgtgcactcctttgtaaagactcataccttattagttattaatgttgaaggtgttgggacttacatttctgcagagtttgttgccttttcttttgactgtcaaac

SEQ ID NO: 30515 - DNA, 427 bp, Zea Mays
cgaggggttgcgtcggtatagctccttttcttctcctagcagcatgaaagtcttcacctactgggcgagacgtcgggcctcggccttgcctagagggagctcccctcggaggacatattctaggtacggcgtccgccagtccaaggctagggtgaccccgtccttctcactgtctatcctcaggacttcaggcttgtcagctgggggtgtgtcgtcgtgaggggcaggttcagacgcctccttgggtaccatcgagggtttgtagatgtccctagcgaagatatttggtggaacagtggttcgtcccgaggctaccttcgctagttcatcggcgacctcgttgtaccaccgtgcgatgtgattaagctccagaccgaataatttgtcttcgaggcaccaaacctcttcgcagtaggcttccattgtt

SEQ ID NO: 30516 - DNA, 428 bp, Zea Mays
ctaggagctcacctcccgtaggaacgtcaagtcccagcgccgagaggtcctttcggcggtcccaggggtcccgaaggctgctccacatcagcggtggaggagcaccactatctcctttggtaggggccggtatactaccgctcaacaccgcccctgtcatcgccaacatgcggctgcatcatgtcctaattgactatggggctcggctcaacgtcatcagccacgctgcattcaagcagcggcagatcctagggtctcgactgggaccctctcgtccattcttcggagtgggcccacaactggtgtatacccttgggagcatcgcactcccagttacattcgggaccgaggaaaacttccgcacagagaacgtccagttcgacgtcgtggaggttaacctccccttcaatgccatcattggcaggccg

SEQ ID NO: 30517 - DNA, 552 bp, Zea Mays
ccgtcgcagatgcctgggatccccagggaggtgatcaagcaccatctgaagatctaccctgacgccaaaccgttgagttagaagcctcggagacagtccgctgagcggcaggacttcatccgaaaggaggtccggaagctgctggacgccggcttcatcgaagaggttcatcacacagtgtggctagccaatccagtcatcgtaccaaaggcaaacgggaagcttcggatgtgcatcgactacaccagccttaataaagcttgtcccaaggacccgtatccacttccacgtatagatcaaattgtggattctacctccgggtgcgacctcttgtccttcttagatgcttactctggtttccatcaaatccatatgtctagggaagataggaagcataccgcttttgtaacagtggatgggctttactgctatgtcgtaatgccttacggtctgaaaaacgccttgccgacatttgtgcgggtgatgagtaagactttcggggatctgattagggacagagtagaggtatacgtcgatgacatcatggtcaag

SEQ ID NO: 30518 - DNA, 287 bp, Zea Mays
ggccacagaagaagctgccgtagtcgctgaagaagccatggctacagtacctgggaaggagaaggaaatagctgaagaaacttcggaagaagaaaactttaactttcaaaacttaattgggcaagaattgtcggaggttgagaaagaagagttgagagaatacgccatatcctgcgggtatcaaccaggggcactactcttcggcggtgttgacgatgaaaaattgggctgcatccgagatcaaattgaagcgaaggttatcggtactctgtcaaagagtattggtt

SEQ ID NO: 30519 - DNA, 747 bp, Zea Mays
ccgagttgatccaaacttgccacaaaaggattacgcctgctcttattgttcagttggacttcgctaaggcatttgacacagttagttggcctactcttctgcgcataatggatgctcgaggtttccctgccaaatggtgcgcctgggttaactccctcctcacttcctcccggtcggcagtgctgccgcatggttgtccgggcccctggatccagtgcaagaccgatctcagacaaggagatcccctcttcccataccacttcttgattgtggccaacctccttcacttgatcatcaaaagctacccaaccgtgctgcaccccttgctgatggtgctcttgcccccgtggttcagtatgttgatgacacattgatcatcgccaaagcctccactgctggggtcgcccagctacgctctgcgcttgatgccttctctaactcgataggtatacacataaactaccacaaaagtaccattgtcccgatccatgtggcacccaccactattgaaacctttacctcgattcttcactgcaagctcagcagttttccattgtcgtaccttggccttctctttctgcaaaaaagcttaacatccatgcccttgccccctgctcacaaaaacaaacatgttcctatctggatggaaggcattgctacttaataatgttgggcgctgtgatctagtgaattcagtcctcaacaatcaactcatctttgccatgtgcgcctccctgattcccccat

SEQ ID NO: 30520 - DNA, 679 bp, Zea Mays
agatccctgatgagttccgtgttgaacctctgggagggttgttggtttctgcttagacagacacaccccccttttcttggtcggttgttgattatcccgatgaataattctcctattcttgtatggaacgtcagaggtttgaatgatcctcatcaaaaggatactctaaggtccttggtgagctgtgtaaacccctccattgtgtgtgttcaggaaaccaaaccctccttttaatcactgggatttggctttctgccttggctctgagtttggtgactttgcttttcttccatctaaagacacaagagggggcatccttgttgcttggcaaagaagcctttttactgcagtggacaggaaaattttgaatcattcagtcttggtttgctttcgtagtgcctctaatgtctgctggtggttctcagggctatacagcccttgtagggatgaggagaagcaattctttcttgatgaactctccctggtcagaaataattgtcctggtccctaggtggttgcaggcgatttcaacatgatcttgactgctagtaacaaaaataatgctaacctcaatagtgatcatgggaatgttcagaagatgggttaattatcactctcttatagagctgcctttgactggacggaaatatacttggtcaaatcaacgagatgatccgac

SEQ ID NO: 30521 - DNA, 404 bp, Zea Mays
acgaggtacgcatatgtctctgactctctgtaacgcagcagatgttacacacacccatcacatcttgctcaacctgaatccctcgacgaactgaactggtaaatgccgtggatacgcaatgcaggtgtgcccgccgacgacgttcgacgaggtgttcgcggccatgttcgagtacatagatcgcctgttccgcatcgtcaggcctaccaagctgctctacttggcagttggtactgtatactagctagcacatgtttaatttcaaccgttctttttcctcccggcccattctcttcggcgtttgatcgacagagtatacaatgcaatgcaacacgcgcgccttgtttgaactgcagatggtgtagctccccgcgccaaaatgaaccagcagaggtcccgacgct

SEQ ID NO: 30522 - DNA, 357 bp, Zea Mays
ctggaatccgttcattcacattagttcggtcaactacggaactgaaacataaaaatttccaaaacaaagttacaaacaaataactacgaagagggggaacaccatgttcgtacctgatgagctcaagatccggcccgcaacaacaagattcgaaccgatgaactctggatccaagcgagccctcgaaggacggagaagaaatccaccgatggcgagacgtaccggcaaaacggagtgggatttgtgggcgcttgcgcttccgaggcgaacgaacttcactcgtcagcaacaggacgtggtcgtcgtcgccgccgacctccaccggctcggaatcggccttgcgccgccagatccgcc

SEQ ID NO: 30523 - DNA, 548 bp, Zea Mays
ctcaaggtgactgttgcttccggtaggaatcacaagtggcaggtgacaactgaggaccaagagtgtcaagctcatgccataccacagatagatgtcgggagaactcctcaactatattgttaccctactgtaacaactgttcttgacttagagcagcaggataggtggattgaccagaggacttagtgctgatgaaggcctacatttgagaacatgatcaagctgaacctcatctgtagcaaacgcttgtccatactagcaagaagaacactgacacggacatcctcatctaaaccacacatgataggttgtaaatttaggcatatgatggcatatcatcatcatgagcattacacaacttgtggtcatcttctgaggttctggtaggaatcaacagctgcaccagagaaggtgtagctcgatacggcagcttgccactgagaaactcacaaggtccgagaccacacatataccaccggtccaccgcatatgaggaactcagtcacgataatccgtgtcattgaaaagcacgggacaatgcggaagtt

SEQ ID NO: 30524 - DNA, 280 bp, Zea Mays
tcatgatggattcgggtgccaacacggtggtggcagggatctccgacgttggttacaacgattaggtggtggtgtgccccccgctgcggcgaaacctgcaactgctagcagccgctccgctcggtgaggtgagcaaagccttatttatgcagaagaggtcacgttgctcgcgcgttgtgctattgctgttggttgtttatttgttgatcgtgtgctcttggtgcggtggaacctgcagcgacgtggctcacctcctttgccctcctgtttaacctccccg

SEQ ID NO: 30525 - DNA, 416 bp, Zea Mays
tcagacctctatccttcagcaagccgacctcggcaagcagcactttagcctctgttatctccgaaggagtcggagattctatccaactcggtgtgcggacatctggctgcctccctgaccgaggggggagggacttgcagtggttctccacaataaaccactcaaggcaccaccccttaatgttgtccttgagaggaatgtcgaggcactctgctttcctcccacgatgaagttccagactcacgccgccaacaagctggtgttgtcccccagccatcccgggccgataatgataaaggtatttccaaagaccgaaatgggggagaatcccgagaaaggcctcgcacagatgtacaaaaatggagacttacagaatggaattagggttcaaatgtgtcaagttcaattcatagaaa

SEQ ID NO: 30526 - DNA, 277 bp, Zea Mays
agcccccgagggtgtccgagttggttctccctctcacacttccatggatgttcacgtagggtcttctcctccgcattctggttgcatggcagcagctcaagctttgggtcaggaagtcgccttagaggtcggcgctcctgatgacagagttttgacttctgctgttgacactgacttggtcgtcactgatgcattgcgggttgctccgggtgttgatccttcatcgagccatcaactgatttcccacgacttgggagttccttcgttcttctccaac

SEQ ID NO: 30527 - DNA, 598 bp, Zea Mays
ggctaaggtgttgtgttcccggcgatcccaggcggttcagtttgattaaaggggtcggggagcatcactaacatgtaatggtgctaaaacaagaacgagaagggaatgagcagacctggggaaggctggccgcggtgaggtgagttcacggtggcggagagtggatttggggcgaatccaaaattcgcgagttctagcgaaggactgccagcgattagcggtggctgggtggatgatgatgttatgcagctaggggagggctcaatttataggcagcttcgacggtggccgggaattttaacggcgatgtgtggcggtcggtgataagtaaaaaatcgtggtgcggtggttgcgtgtctcgtgtcgtggcaattgctccggtgatcaacggggagctaggagaggtcacggcgatgcggtggcgaggttgggacacgcggtggacaacggcgagggcacgacgacggggagcagctttattcacggcggtgagcaaggggaggagtattgcggctaaccgaggtggcttccagctcgacggcgacgacgatctttttacctcgcagtgttatccggttacaagcgaacgttaatctta

SEQ ID NO: 30528 - DNA, 319 bp, Zea Mays
acgatcttgaggcaagaagtgatcctagagatcagtttgtcctcggtcagatttagtcggggcagcacgacaccgtgttcacgcaccagtctctcctcgaccgccttcaaatgcccaacatgttcgtcgactgagatttctctcaaatcgagcaacgtctcaattgacaccgcaatctggtcgaaacgagacgtatgagagggcctgcaggaacttgcaaacaacctcctcctcggtgtactcgttgtcgagcaccaccagctctcctgtgatctggccaatgcgcgcgctgaagtcgtccacggactcgccgtcgttg

SEQ ID NO: 30529 - DNA, 278 bp, Zea Mays
catggactcatttcgaatggtgaatcaggagactcaaacaggaggtttatattggttcaggctcgtgccagtgtagtgttgattgtggtattgttcaaaggagcgtgttacaaggaactcttttatagtttaaggagaggctcttacataggggacttgttgtctaaagcagggtgcgacctgttgtctaaggttgtcctactgacatagttctcttggcgtcgtcttctagtacgtgtgtagtcgtatgtctggcatggctggtcactctgtctatc

SEQ ID NO: 30530 - DNA, 344 bp, Zea Mays
ggcacaggggcagatagtctgcgacaaacgatgccccagcgagtcgcaaatgccggcggctcgatgacacggcaacggcgagcggtgcgaacatcaacaagcaaagcatgggaattgtagaggaggacgcaggcttctcgacgagctacccaccagcgatggggacggagcagaaggctcctgagatggtaaacaacggcgatcgacggcaagcaacagagtgagagagaggggaaactcagctgtgggagggagagttccgtgggcgtggttgtccaatttatagagaaggagaggggaggggagaggagaagagccggcgaacggcgttgcagcagtgtgga

SEQ ID NO: 30531 - DNA, 510 bp, Zea Mays
tttggactccttcgtatcttggcaagaaggcgacgagaggggtcctagatcctcatgactccttgctcgacctccacgcgcgaaccattctcatctagctgtcccaaactgatgataaagttcctcaacgcagggatgtagtagactctggtagcagcctgtgctcaccagacgcggcggtgaatacaactgagtcggcacccttgatctctaggtcggaggcgtccccaaacttgatagagcctctgatgctagagtcgatctcggtgaagaactcccgtcggctggtcatgtgatgagtggcgctggtgtcgaggcaccatccttcgatcatgtcgttgttggagccatcgctgaggaaagcgcgtgctttcgactcatcaaggtggaggagtgacgttgcagccggtgccgctggaggtagctcgatgcttgcgtgtgctaggagcagagcttcctcctctgcctccgcctatgcgacgttggcctggctgcgtcatgactgtcgac

SEQ ID NO: 30532 - DNA, 282 bp, Zea Mays
ttgagacaatgtgcaatgaaattttgggaaactacactaaaaaagaagatcaattaatgactgcagccttcgacacccgaccgaaacgaaggttgaaccgagtaatagacgctctaaattttgaataccctgattacgagcgactcaacaaaggtgccgaaggggcaaaaaggaagagagttgtcagcgttctgagcaggcaggctgccagaatggtaagggaggatgaaaaaaccttgaagaagagaaaatctagtctcgagccgaaagcggtggctttga

SEQ ID NO: 30533 - DNA, 351 bp, Zea Mays
tctgggtagtggctatccaaccctacaaggccacaattgcagcccatagatgcagcaccaaatggcagcccagaagtccacaaccgcaggtccaaaagcccatctaaaaacatgtgtctaatctggtcattccacaccaaatcggacgactaatcatgattaattgtcgactgatcggatgactaggattctggtcaagctattcgcttcggtgggtctagtcgggttcaagttatcgattagtccgactaatcagattaatcgcggttagtcagacgagttcaaaaccctggtataaaacttgccttttagcttttatggtaccctcttgtcacagaacgccagatggac

SEQ ID NO: 30534 - DNA, 319 bp, Zea Mays
cccctgcactttcacataagtagactgggagggtgctcggggttggttttgcttaccgtatttccgtgtttgtgagctagccctctcgaccgctttgtcttctctcacactttcacctttgtgcccgtcctctcgttttctgctcgcatgacgtcgttcccttcctgcaggatccatgagagtcgttttcgcggcctagataagaaagggttcctcccctcgaaagacgtcttggagtggaggctagaagtcgagggcaaggtgcctcgtcctcgggacgacgaagtggtcgtgctcgtgtccttctacaaacgcgggg

SEQ ID NO: 30535 - DNA, 368 bp, Zea Mays
gggggcctcgaccacactcccctctgctcatccgccgcattcctcgtcgtcttctcaggtacgcggttcatttcctccattccgttccgtatccgctcgtcgtcctcccccggctgcctcgtttcgaaaaggtgcctgaccgttgacgtcgccatggttttgcccgcgccgccgcaactccgtcggcaaggttggactcctccgtatcgcaactcgtcgtcaaggttccactcctctcgtatcccaactcctcgtcttcacaggtacattcgtaacttccatttctaccctatctcctcccccatgtgctgttacggatccggtcctcccccatgtactgattagggtttaggttgcatccacgtccg

SEQ ID NO: 30536 - DNA, 595 bp, Zea Mays
gacttcttagctccctagagctctttatttatgcttacagacgttcgagttgtgtgctcggaacttagttatctctcttatttatagttgtggttctttgtgctatggaacacctgccttgctacagccccgatgatgttggtgggacccttttgtcaaaatgcgttcctgcatatgcccttcacctctttactgctcttcttttcctagttgtgtctatgtttggttcttcttcgtttatatattctgagattgattttgtgtcctttgcttcctctcatagacccttaccacatactggtgctgccttagtttaacttcctttgcttacctacactttgggaatctttgcttttgatgttggcataagctgaatgtaggcttttgctgttgtataattgtgctttgtctcttttttgccctccttttgttggttctatctgtgttttcttttttacatgtatgtgttcttattgtttatgtatttacttgttcttattatttacaattgttgcttcaggaatttgcaacgtgcttccccttctgcccacgtgctcgctccactgaatacgctgcgtatcaggtatgtcgcagg

SEQ ID NO: 30537 - DNA, 283 bp, Zea Mays
tttcacggtgggctgggattgaatccgctctaggatcatccccgtggatggggccatgattccagttgggaatggcctaaccaaacaaggccctaaagtgaattagtctgtccaattaatattaagaatactgcaacgttaagattatttttacctactcttctcaaaagccactatgcaaagttgaaatatacctgtaatattgctattatgccctctaactatggttcattttactttcttaaaacattgttagtctcaaatgtgcatgtctggctactac

SEQ ID NO: 30538 - DNA, 385 bp, Zea Mays
tttgccctttcagcgggtagcgataatcagggtacacaaacccaatagcatcgaaaactctattcaacctcttcttcttccggcctccgaaggtcgcagacagcgcgttatcctctgcctttgaatatggtccaagaagttcgtcgcttgtagcttcgatgcatttcagccaatcatcatctggctcaataaacttaccctcgtatctgaaggtgtatttcaatctaaccagtccgccttcatcagatttactgatagtttcctttggcatctcccattgctctacaagcggccacactctgaaggctatgtgttcctggactaaatccctcgtcccgatgaaacaacataccgtgccgaaggccttttggcatttttcggctgc

SEQ ID NO: 30539 - DNA, 395 bp, Zea Mays
cgttccctttttgggtccgaggcagtccggttacgaaatccatgcctatttcttcccacttccatttgggtactgggaggggttgcagtagacctgcaggcttctgatgctctgccttagttcgctggcaagtgtcgcaccaggccacatactgtgctatctcctttttcattcctctccaccagtatctggtcttgaggtctaggtacatcttggtggtccctgggtggatagagtaggctgagttgtgagcttcgtcgagcagaactccttgtgcctctccttttggtacacacagacggtttctgaaccagaggattccttcttcatctgtcctgaggtccaggagttgttcttggcgagttctctccacaagacttgctgtctcagtgtcc

SEQ ID NO: 30540 - DNA, 440 bp, Zea Mays
tagcattcgaaaccttgcctctcagcatcgaatcaacttgactcaacacgtcatcctcagatattcgcttgttggtaattcaagtggggtcattaacaccagtgtacaggtaagcaaggtagactctatctttcaaaggctgaatattcttgaaaacaaagtcgacaacaacagcttcagcggtcaagcccctgtccctcaacgcacatatctctgcatgtagcaccctggactcggcaagctctaaatctgtggggatctctatccagctaggcattcgaacgtcaggctgtctccctgatcgagtgggaagtgaattgttatgattttccatagtaaaccactcgaagcgccatcccttaatgctgtctttcaaaggaatgacgagatactcatctttcctgcctcggcgaagttctaagctggcacctccaacaagc

SEQ ID NO: 30541 - DNA, 293 bp, Zea Mays
caattgaccaggtcaatactgacctgaaaaagaggaattgttttatgataggcctcaatgaccggctacaacgaaagatggccacctgtcttgatctctcctacagcagggctgtcagcacagcgctggcaattgaagctaagtatgcaggcccagacaaatcaaagggaattggaggtgacaggtccaacccggggcctaaaaagcgacaaaggttggtaatccgacctttcaatcaaaaccgttcttcgcctcgtccaccctcctaccccttcaaacagcctgtattcatc

SEQ ID NO: 30542 - DNA, 723 bp, Zea Mays
ggtccaaatatttgtctctctagcttgtgaccaatttagcggtgttctacaccttctcccatacaaggcctcgaacggtgccatctttaggctggactggtagctgttgttataagagaattctgccaaggaaaggcacttgtcccaattcttcccatagtgcaacacacatgccctcaacatgtcctccaaaatttgattcaccctttctgtctgaccatctgtctgaggatggtatgctgagcttcttattagatgggtcccaagtgattcttgcattgctcccagaaacgtgctacgaacggtgcttctctgtctgacacaatagtctgtggtattccatgcaaacgaactatctggtcaatataaatctctgcatacttttctgccctatgggtggtatgtactggcaagaaatgagctgtcttagttagcctgtccacgatgacccaaatagaatcttgacgtcgggatgtgttgggtaaacccacgataaaatccatgctgaggtcctcccatttccaagatggtttgagaagaggctgcaaggttcccgctaccttcaaatgactggccttgactctttggcaagtgtcgcattcagatatatacttagcaatttccctcttcatcctggtccactagtacaaagatttgagatcatgatacatcttgttactgccagggtgcatggagaatttggaaaggtgagcttcatccaag

SEQ ID NO: 30543 - DNA, 827 bp, Zea Mays
aaaacgaattatattttgggacggagggagtagaaaataattctacttgattacatatgcgtccaatgttcaggaaagtatctatacagctggcatctgatgcattgtttccttgtcaacaaaaagggaaacagatatcaactattcccataggtaaaaagggaaatgtatgccaaagctggaaatattgtgatgtaattaatgggttattgctataagataatttatagcatgattagtaagtagaacaagtgtgttttagagagcatgcatcgtcatccactgcctattaatggaaagaccatgagaagaatacccagcagtccaatctcagttcacaagcagcaggaaacatgttatagttacaccaggactgagtctgatagtgattcgaaaccagcacaaacaactccgactacacgctaccaaaccaaaaaaatggggggaaacaaaaggagcgcgtgcgagggtgcgacaaactcttgcgccacttgagcaactctatgtcaaaggcagatgcggaatcaccgcattgtttttcgctcaattgtcctcaaacaagcttctcgacaacaatgctatgggcatccaagtcaaacagcggggagcactagaagctcagcgtaacagtttttagcgccaaaaaaagctactacatgcaagcaatttgaactaatcttgcctgatgcgtttagcagacgctaagcattcgaaaatagcaagtgcaaccaggtctccggtcctccccgagctggaactatcaaccatccatacaccatgcaacgccggacctcagattgcaggcagaggtgtcaattcaccagaac

SEQ ID NO: 30544 - DNA, 596 bp, Zea Mays
gagggggcgagtgtgatgactccgaaggtctgagtagctttgttggatgattaactacttttaggccatatggtgggccatagtcattagctgtcattggctgtcatagtggcttataagccgtgtctgtaacagaatcagaggatttgagaaataacagaaggaaaaacagaatcacaccttgcatcagtttctatctccccaccgtgattctcttcgggttcttctactgtctcccgtctcagcgtttggggtgcgccggtggccaagggacagtacattgacctacctgccaacccattcaaccagagggtacttagacagcaacaacagcaagctgagatgaatcctctgaatcctccaccagcaggaactgatccagcagttgcagcccagatgcggataatgcaatagatggctgatactatggcggatatgcacgcacagatgcggcaggaacgccaggagatgcaccaagagagggaagagatgcgccaagagcgaagggcgcaacagcagcaagcaccactgccaccaccaccaccaccaccagttccacctcgggacaagcaccgggagttcatgagccacaagcc

SEQ ID NO: 30545 - DNA, 338 bp, Zea Mays
ggctatcatgctcttttacagtttgtttcaaacaaaaatattttctctctccacaaccgttagttttcaagggctatcttcaacaatcaacatgacatttttctaccatggctacaatctcatgctcgtctacctcgacatcggtacaaatagctactatcttcaatgaactacttatcagttcatgtcagccacaagaatctaattgtctacaatgttactgcagtcctgctacgaatgcaggggggagcttagaataatatatcactaccggaatagagttagctaggattatgatcttgatccccgaatcatgtaaactctacgtatacacaccg

SEQ ID NO: 30546 - DNA, 383 bp, Zea Mays
cgaggtcacaatacttcgtgtacttgttgtttcggtactgctgttggagcaccatgttggaggggtagaaggtcttgagagttttcttaatcatctacatatttgtgactatttagccacagaagcatagctgagagacaatgcagtggatgacagtgtcgtaaagctccacagtcttgaagtcgaggaagcggaatatgacccattcttgttgcgcccatagaatcatcacgtgcctctgcaaaccgaagtgctcctacagcttcgtccactactaaagggtctttcacctctagatactccatctttaggtctgggtggatgtggcatctaaggaagataacacctttaccttctcacgaagctgcatgccagtgtcgttt

SEQ ID NO: 30547 - DNA, 536 bp, Zea Mays
tctttatgcaatacatcaatccaatagttccaagaaagaaaagaaggggtcatgttcctgaagatgaagtcattcctctgcttccaaatgcaccagactaccactgccagaatatccatgaagttgtgcccaaaggcaccccttgcagcttcgatcatagggaaaataatccaggttgtggcaccaatgaattccaatgtaattcgagcattctgtactgaaggggaaccaaaaaggtgatatgttgtttcttcatagccttgatcacagaaaacacagttgagatcgctgccctcattcagaaagcatttttttcttaagatgtttttcgagttgattctatcacagaaaaccaaccaaacgaaaacttttgctttcttacagaccttggaccgccagatccagatgaaaggagctgggggttggatggatctgaaagttagcttgtaaaacttggaggagctaaaacactcattacctcacggataaatccaaatgtccttgccagctctggtagcttgcatctgataaaaaat

SEQ ID NO: 30548 - DNA, 386 bp, Zea Mays
gccgaagctaaggcatagcataggactccagtttcgtagtctttaggtccatccgcgcataagagactttggagcccttcctctctctctctcccccacttgtaacccgcttgtaactcctactacgatcatcgagcaacaaaagtgccagtagcgtgagctgacaaagactggatgtagggacattctgcccgaaccagtataaatcttgcgctctccgggcacaccatccatatcctagaaggcacacatagaaatttaattatcggagcaaaggctcgaaacaccaactattggcacgccaggtaggggccttgcgtgttcttgacaaactctctagactccggatggctagcaacaacattgcgtggtttggacccctggaa

SEQ ID NO: 30549 - DNA, 555 bp, Zea Mays
ttggtattgacatgctcgtatcccttccatactcttgtttcaaatacttgcctctaaatttctactacctacttaaacatttcatttatatgtccatgaccttcttgtcttttgagaccctttcctattctattgttaagtcgctatcttttggcaatttgtactctcttcgtcttggtatgctagtatccttggaatcttgcatactcttatattcttatgtatgcttattttcataccccaataactgtccaagacatttcagttaacatgtccttgaccacccctgtttcttaacggtccatgagcgaccattttatttcgcacatccttagtgatcttgttgtttccttataacttccctcggtaatgaatttttttcctcaaccattctgttggaaccttacctatcttacccttgattgttttctctacttcgtcaattcacgagtcttgccttaactctatcctttgttatgcttttcattattatcatctttacccttgacacctctatatcttacattgatgtttatcatatacctaccctttaga

SEQ ID NO: 30550 - DNA, 592 bp, Zea Mays
ctcgtggccacgtgataaggtcctcaatcaagtgcataagatcgttgtgatagccgtgtcgattgcgtccaacaatatgtgaccagtcatgaactcattagggactcctcatgaggagctgttagagtatattatcttctactcccatattatggcggggatctatacaatacgattttatgtctattagtgtgtagggaatatgaccacatagctgggataaccacaaccctatgatatcactcgaacggtggtcataaacatctcttgaatattctaggtccgacacgatctttctattgatgctccctctcatctgtataatccctcgtttgcaactagtcattgcccccgtagcgcacaaacgagtaacgattgatcattcctcaagaacattgccctcctctgtccataaattatcggcgctccatccttctgcaagaacatcgccctatgttgtccacaaattatcagtgtcgcaaggagataagctagcatcacatagcaagtatgaatcactttctcatcattccgtctcactctcatccttcgatcagtcacctcctatggtcctccccaaatcttgcttggc

SEQ ID NO: 30551 - DNA, 550 bp, Zea Mays
ggtgacacacggtggcgcagacggccgatttggtggaagcaagaaattctccggctatggtggctaatcgacgacgagggttggtgctctggcttcgtaacaatctagtggagctagttgtgcactaaatttatagtatccgtgagcggtggctccgaatttggaagagggaagctggcggccgaagagacgggtgagtcacaggtgcgaacttccgtggcgttcaccgggcaaaaggttacaactgtcacttggttatcctacacaacccgtgacgacatggtagaatagcttaaggcgtgtcgtgaccgaggtaagtggaggcacaacgacaacggtcgagcggccacgtcgccggtgcaagtgggtacgatgaagccggctcaatccattcccccttcgatctttttgcgtcctcggtaatatcctacccgagctgagcatgaatcgtggcagacagcacggatcgcagcacggagatctctggcggcgaagttcattgaatctgatcttgttcagttactgtaccatcgcgaacacccatcagtgc

SEQ ID NO: 30552 - DNA, 304 bp, Zea Mays
ccaaccaacctggttgtgcctcagccaaaaaatcgggttcgcctgcggctccccaaccctcagaccgagcctccaccgccacctaaaagctagccgctgtcgagagagagtccagagagggagaaagtgttgccaccatcgagacctacgtgtgccatcactcaagcttcgtactgggtccagtggcgttcgtggacactctcggattgtgtccgtgcaagcgggcgggtgggggatcatcagagtcttctgaatcgctcgtcggagttgtgggaccgccacacaccatgagcagcatcgtata

SEQ ID NO: 30553 - DNA, 566 bp, Zea Mays
gtgcagtcgggcggagtcaggggggcggtccttggtgattcgccgctctaccaggggggattcatccggtgcttcgcaagaatggcggaccgggcctcttccctcgccgctgtcgcaagaataggagggagattaccgccatggccgttccctgtgcgcgacgctggtccagacgcggggattggtcgaggcaataggcgtggtgtcccgtgtggcgtcggtaggtgattacatctgcgaaattactttgggatggagcaattcctcgtcggccttcgcaaggaagctcggatgtcgccgctagctgtgggtagtatcccagcggtcgtctttgccttcggtaagccatcaaccctctccgacgtgatcacagaatcttgtagaaccgttgggattaaggaatagtggggcgaggctcttgttcggccgtactccggcgggagcgccgcctcggtcgcaactgtgccaccgtggcatcttgatgggtggaagacaggtctgtggccgtcgatcttatgatgggtggctaggattagatcttagtttaccctttcgttccatcgagg

SEQ ID NO: 30554 - DNA, 663 bp, Zea Mays
gaagacttggctccagtggctgccatgggcggagtacaactataattcttcatatcaaactgccatcaagtgttcacccttccgggtagtctatgggcgtgaccccccgccattactaccttaccagtcgggtaaagcgcgagtagatgcggtggatggccagcttcgcgatcgggatgagttcttagcagaaatcaaggagaggctggtccaggcccaagtcacaatgaagcagtaccaagaccagactcgacgggaggtgaaattctaggttggggattgggtgtggctccggttacagcaaaggtcagtcgtgggcgtgacaccagtatctacatccaagttgggacctcgtttctttgggccctaccaggttacacagttagtgggggacgtatcttataaattgcagctccctccaaaggcaaaaattcatgatgtttttcatgtgtcactattaaagaaatttattgggcagttgccagacgaggtggtgcctcttccagatctgttacatggcagggtggtacctacacctgagaaggtatccaaggtaaggcttaacagaggcgtgtgggaagtgttagttcactgggtgggtcgtccagcagcagaagcatcctgggttcagctagatgatttccaactatgatatccaagtat

SEQ ID NO: 30555 - DNA, 439 bp, Zea Mays
agaaaaccattatcattctaagcctcaatttttgagactgagttatgcaaaccagtgagaagccactgtagattttatagaagttttggaaatgtttgaagctatgttgtagttcaaacctactctaagaggcctaaatagaaaagggaagaagggataagtgaagtactacgttaagtcataaatgcttcagccaagaaccttatttaatcatcactaagacattgagggattggttgtgtacaaccttaatccaacttcctagaccgaccacacctacttctaattaccaagtataccccaaaaatcttaaataatagaactaaaacctgtcttgctaacttgagtacttcacctcgcatttcaattattaatttacataccatagcatacatatctcttattcattgcattcatttagattacaacctcgctgacg

SEQ ID NO: 30556 - DNA, 646 bp, Zea Mays
tttgagtctcttttttcttgtcatcactagtatttctatcattttcatcctttttttgcaacatcaattgttttttcctaccaagcattgtctagccagttccatttccttaatcaagtcaatagactccatgtgggccccatttgttaggtgtagcttccagatccagccaccatacgctctgttctgttcgacgcatgccactgctctttgtcatgacgctcgagcgttgtaccacgcttcacctcccgcaccttgcgaccattcctgtcgttgctgcacgtgtgttgtggaacgccacccggctcctctccttcccccaataagtctgatcgtttcacttctccctcaccattaatagccttgccggcctccctgtccacccggcaccagcccatgtccccctctccagctataaaagaccgcaccagactcgttctcactcgcctcgacgccatgctgctacttgtcattgccgttcccatgcagctttcgaagctgtcgtcctcatcgccgaccactgcagccgccgctctgctcgcgtcatcacaccagatttccacgtctctgcccgcttacgttgtatcttgctgctccgcgccgcgcttgctgctcgctatgcgtcgcacactgtcgttgtccgcag

SEQ ID NO: 30557 - DNA, 617 bp, Zea Mays
gtgagctttgtcgggcgttgtggaagaattgatcgggctgaggaggaactccgtcgtgcactgatcgtcagtgttgtaggcagggaggattctggctgcgccgtggaggtgcgtgacgcgatcgccttgaggttttgccttgaagcagggtcgctccgcatacgtcgtgctgcgcctaattctttcctagtcttcttcccctcggttgccgtggctgatcgggtgtttggggaggggcaatctcttcatgtccctccgctcaggttgcatattcgaaggtggtctcgtcaggctttcgcttctggaggtggacaaccgcttgtgcccgttggcgttgaacttcgtggaattcttgcgcatctctgggggattgaggcggctgaggctgttcttggtgcattctgtttgattcatggttttttgcctggctttgttaaggaggaagatatgtctgttctcagattgaaggtatggtgccggtcacctgtgctgctgccggcggtggtggatctccttgctgaagagccgatggtctgtggagaggatgggagctgggttcctagcacgttggtgttccctgtttctgtggtggttcttcattctgatggaagttcagc

SEQ ID NO: 30558 - DNA, 716 bp, Zea Mays
gcaggtgctaaggcgaaatcgatatgggtgctcttaccgaggattacatcgcgtcgtcctccgcccatcgagaagtgcgttccgcagtggcgctcccgtcaccggcgacgaattgccatggctctgtggtcccgcacactccactgcttccccgagcacgcaccatacacctgacagaacgccttcagtcacattggggattctggatggtggcggaggcgaatgatgtcgacgacggctatccttctccctttctccctctctgatcctcaccgaaggtgctctccaattgggtcgtcgcgatggttcgatttgatggatgaggaggtggttcagggcttatatatacaccctgcgaggcgaatcggataataaccagccgatcacaaccggccgcgcggatcctgggtttgctgtaatcgcccagcgatggacttcgatgaggatgacgtacctggcgcgctggtccctcatgtaagcgaagcaaggacgcgatcgtagtctcccatcgcgtgtcgctggctaagtaggctcacgagtcaagcatgcacgataggagaggattacgatccagccctagctatcggtgcacgggagagagtggtcggcagggctgagggactagcgggtggggtccacgcccaccaccggtagctgagctgggttgaatgggccacgcaggaagttgggtagttggaccaagagagggaaattcg

SEQ ID NO: 30559 - DNA, 571 bp, Zea Mays
ctgccaaaataaatccatgcgctctccagctcggtgctgcaatcccatcaaaagctagggtttcacgcctctcccgacttcacagttcacattcctctcctccccttcccacctccccaactcggccgccgtagacgcggtggcgcacgaactgccctagatttgagcgagccaccctgcgaatcttcacctgacgcacaaagtctgtcagagacagtgaagaattcgaacacgatcttaaacatcgttgattaagaccacacacaaacacatctacctggcttcccccctatcagttgtttttgtgtgtttttttttgctgtttcggacgattcataagaaccgacctgcaaggcttgcagatctaccttgagaaccagggcccttgttttggacgtccagaacgaacccttgaccctgcggatctgcttgatccgttttggatctgcttgtttttttgctggatctggagagaatgttcaagtcgatggtttattacgtgaacacctcaatcggagaggtggaggtgtggcccaagggcgaggcgagcgcgggcctgaccatggcggcg

SEQ ID NO: 30560 - DNA, 629 bp, Zea Mays
cagctactataacaagatcaatataatcatatgatcacgaaaaattcacacagaagggagtcaagcatagaaaaagttactacgaatggatagtaaaaaataggagtgtctacgtttatgttagaaactgttgaaaaaaatcaacactttctaagctctacttacacaaaatctaaattgtgcctgaaagttacaagaccaatgcataaaacatattaaatcaattaggtacaaacaaaaagtctgcaagtatgttttatattattgtatttatcatcttgcccaagaggtaggaacactagcagcctttgttttttttctcgaaaaacgcaggagaactgcgcctcattttattaagtaagaagaaaaaagggtcggaaaggacccgaatacaggacctccttatggaggccagaaacaagcataaaggaaacaatccatacacaactaaaagatacaactagcagcctttgtttaaaaaggcgatttgcctaggcgctaagtggtggtgcaccaccttgcctagcacctgggttttttttaatacgcaggagagctgcatatcatttcaataaaaggaggacgaaaagaaagaaattacatacgcccagccaaaggctaaggcacac

SEQ ID NO: 30561 - DNA, 530 bp, Zea Mays
gtgaaatgttgggttgtctttggagatgatgaatgaagaagaagttgatgacctcgccggtcttgaaagctcagtgacccggatgggtggtccggcggaaggcgggagttgaagtgctctcaacacctccaggaggttctagcaaagaccctgcggtggcggcagttctggcctaggttgaagagatgcattaggggtttagggttgacggttttggttttgtgtgatactgaaggtcggttgctgagtaggttccggcgtccgggcctacgcaagcaaaccctgatgatgttgaaactaatgatattttgatggatgggaatgcaacatttcttagtggcaatgtgtcggagggatctgattttgggtcgtggtcttcggaggagaggtaattggggagtcctttctcgtgggttaacgaatcttctgatgacgacttagattattttaccgcgttggatctggctgtggcggagtttccattgtgatccgtccctctcgaggtgctggcaacctcgactgatgcagga

SEQ ID NO: 30562 - DNA, 294 bp, Zea Mays
caagtaataccatggtggcttgggagttgtggtatacaatttcctccacctccatagggttgtagtttttgtcgtcggcatcaaggatctccattcctatttcaacaatgtcccaaataattgggtggagtgagtataaatgactcttcatttttataactccaccatgaataatcctcaccatcaaagtgaggtggtttatcaagggggcagacagtaattgggcatgtgaatttctaggaatgcgagaatagttaaatggaatgtgattaaaattagatttaaccatcttgt

SEQ ID NO: 30563 - DNA, 294 bp, Zea Mays
atgaaactttaataaggttagaaacgattcaacctgcaaagtatgcccaccacattgaggtcctcctccgtgcgagcacctcctttagcaatatcttgtctgcacgagcagaggtatataagctagacactaaaaaagagttatgcgacagataagtagattgcaataaattgggtattctaaattaatgtctattgctgaagtttaatctagtaaataagatcctcaaaacttaaattctaagtagacatctaccgaaaagttggaaggttcagaattgtgaatacatcccag

SEQ ID NO: 30564 - DNA, 281 bp, Zea Mays
agttacggagtagcgtttgatagtccctaagtaagtctttcacatcttgagaacaagcgacaatctcaggtctaaggatacagtatacatgttccaaaaagagaactatattacaatatctcacattgggttggtccagcctcatgtcatacatgcgcccacattattagtttaacatctctatgtccatgacttgtgaaatgtagtcatcaactctgactaggtacatcatttagaataaccatacaagtaaagaatctcacaaataattcacataattg

SEQ ID NO: 30565 - DNA, 334 bp, Zea Mays
ttcttttagtattatttcaatagctgattattgccctgctaccctgtttagtggccttactacactcaaatcactatctatgaacccaagaagtcaaacagcctataattctgtccaatttgatgtattgctttcattcttgtgcttgataccatgttattggtaggttcattggcataaatcataacatctaatggatactctgtattcatgcatgtcattttgcttgagtgtgtccctagctataccagtaggcagcatctatagtgcaccaaagaagccaaactgcggataactctacatctctgcaagggtctgatccaacttattttat

SEQ ID NO: 30566 - DNA, 492 bp, Zea Mays
gtggttcatgtattctgtgcatagatacgtgattcataaatgaaagcatagatacatgattcatcatcccacttttgtgatgtggttcatgcattctgtgcattatatccctacaatatactactctttaaatatctctcactattttattacaacattcactcccaccgaaatactcttatatgcatgatattatatacatggtagttcatgtttttccccacccactggaatactcagtctgcaccgaaatactcttatatgcaatgtcaatccatattgcaaccaccagttttatagtttgataagatattggaggcaaacaaatcattttgtcgtaaaaaataggatgttaatcaattgttcatatgtaagaaatgacaagatgtcgttcctattatgatcgtttgtaacccgggatcaccccctgtgacgagtaagccaacctccatatcatcacggtagtgtattgtaacccactggggattccac

SEQ ID NO: 30567 - DNA, 863 bp, Zea Mays
gaaagcaggccttcggtttccgctgagcaaatttgtggttgaagtgttaaagatattccaaatctttcttcatcagattaccctcgaagctataattaggatgtggatgtttgtctgggctgtaaagagccaggggctggagccgagcgcgaagtgcttctgcaatatgcacgagctattatacgagacaaaggctaccggcaaagaacaataccacaacaacttcggctgttacgggttcattgcccgctctaatgcaagctgccctgtgccaacattccggaaaagatggcctagggcctggatggaggagtggttttatgttaaaaatgatctgattgaaagaaaggatatcaaagaaatcatccagcgccccatctagtctcgcttcggcctccgaaggccaaaggtggctatagaaggtgacgtcaaagcatgccagaaggcctttagcaatgtttgcgccttcattggcacaagggatataattcaagagcacatagccttcaggtgtggccacttgtggagagctgggatatgccgaaggaaactactaccgaatccagtgaaggtggcctggttcgattgaaatataccttcagatttagagagaaatccgacgaaccaaatgatgactggttgaaatgtattgaagctaccagcgacgagttgcttgggacatattccaaggtcgaagatgatgccttgtccgcagccttcgggggtcggggcaagaaaagattgaacagggtgtttgatgcgattggcttcgtataccctgattatcactacccactgcgaaggcaaggaaagagaaagactgcagcttcggccaccactgttgtgccgaagggcaagaaaat

SEQ ID NO: 30568 - DNA, 713 bp, Zea Mays
tgaatttacagcaagttcatgcctgacacttctttacactataaatttctgttcggttatcactactgagggtctgggtgatagccaatatggctttcatgctgttcaggaaaggatgtctgggtttcatgcctctcagtgtggcttctgcactcctggaatgtgcatgtctattttcacttcccttatcaaagctgacaaatccaagaggcctgaaccaccaaagggcttctcaaaactaaaagtatcagaagcaggaaaggctttctctggcaacttgtgcagatgcactggttatcgtccaattgttgatgcctgcaaaagttttgcatcagatgttgacttggaggatttgggccttaatatattctggaagaaaggtgataggaacccagatgttagtgaattgccaagttacacccttggtggtggagtctgcaccttcccagactttctaaaaactgagttaaaatcctcgcttgatcatctgaataatccttgtattgcagcctccggggagggttggtatcatccgaaaagtatcaaagaatattacgagttaataaattcttgtttatttagtgactcagtcaaagtggttgttggaaatactagcagtggtgtacctggatacaaggatcaagacatctacagtaagtatattgacataggaggcattccagaactttcaaatattgtaaggatggggtctg

SEQ ID NO: 30569 - DNA, 355 bp, Zea Mays
acatgttttgattctacatggtgaaccactcgaggcgccatcccttgatgctgtccttgagggggatatcaaggtattctactttcctcccccggtggagctccaaactagcaccaccgacaagctgatgttgtcctccagccatacccggccgaaagtggtaaagatacctctagagtccaaagtggggaaggattccaagaaaggcctcgcacaagtgtacgaaaatgggaacttggagaatggagttgggatttaaatgtgtaagatttagatcgtagaaatcaaggagaccacagaaaaatggagaaacgggaagggcaagccctcggatgaggaacggcacataaaccac

SEQ ID NO: 30570 - DNA, 450 bp, Zea Mays
atgaacaagaccacgtagctagggggaggggctagaatctcctcagtactgggagttgcgcagtatccatcatccaacaagccaggcctcacaagagctcaaaggtgaccctggtccaccaatgatcgacaacaacaagccataggggagcatggcaaaggcaagatgaaggctaaacaaaggagatgggacaacatggaaggcaagaggaaaatagggagaatgaggagaacaccacaattaaataaaggccacactacgactcctcatcactctgatcgaggcaaggtgactcgtctaacaaggaaacatgtcgggtccattgtcgggtcgagaatagacaagcgcggagcccaccacctctcgaacaaaggcacgagcaataattcttcctgagaagaacaagagaatacatatgcattagataaagccctaggttgcggtgctttt

SEQ ID NO: 30571 - DNA, 460 bp, Zea Mays
aaagtcgtcgtcatcatcatcataatcagggactgctgcgcccggagtctcgaactggtgaaaggtggtatcctcggcctgagtatcaatcactggagcaggtgccggcacaggatcctctggagctagacggtaggacccaaagaggaggcgagaggcctcaagagtaccctggaactatgggggccgaatcagctgagcaaagatgtgacacagatagtgagcataaggcagctgtcgatgagcacagagaccatcaagtacggtgtcctcgatctcacaaatgagaaaatccacgacatcaaactctgagtgagaaattagagcaccaaggagccaaagttgaatatgagtggcagcctccctgtaacccatccatggcagaagcgtctgtctcatgagctgatatagaaacctggccgttgtggtgaagtctgtcggagaacatcgcgacccatct

SEQ ID NO: 30572 - DNA, 272 bp, Zea Mays
tcgaaacgggaaaaactgatctgcggcaaacgcccaccccccgatctccgagtatcgtgcatgggttcatatggataatagtgctccgggagaaaaccagagagacgggtagggtgaggtgggtgtgtacccttgaccgggccgtgaatcagggtaaattcataccaggactcacgctcccggtggtatgaatcgacgtggtggtcgtacggcccgacggcaggaggtggacctgaatatgggcgcaggggcaccgtcgtgaagttgccgag

SEQ ID NO: 30573 - DNA, 342 bp, Zea Mays
gacctttcgttgtgaaggcagatgctggcgcattcgagtggccatgcttttgttaccctttgctcctccctcttccgcaacagctcaacatagaagaagtaccaccataaagtgaggttgggctcgacgcctagatacccctcacatagggcaatgaaggcacccatatgctggttcccgtttgggttcaaaaaatggaactgcacctgtagatatttgaagagagtcatgacaaaaggatgaagggggaaggcgggaccccactcgtgaaaacgaacaaacgagaccacataacttggaggcagggtcggggcctccttggcacctggaatcaaccacccg

SEQ ID NO: 30574 - DNA, 271 bp, Zea Mays
acctcctgtccttcttagatgcttactctggtttccatcagatccagatgtctaggcacgataggaagcataccgcttttgtaactgtggatgggctttactgttatattgtaatgccttacggtttgaaaaacgccctgccaacatttgtacgagcgatgagtaagacctttggtgatctgattagggacaaggtggaggtatatgttgatgacatcatggtcaagactaagagagggtcgaccctagtggaagacttaaccctggtctt

SEQ ID NO: 30575 - DNA, 802 bp, Zea Mays
agtgtctccatggatgaactcaagtggaatccaaaccctaagagtgcaagaaaccctaattggaaccctggaaaaccctagacctaaaccctaggggggctaagtgcaaaatcagtgcacttttggactaaagtgcaaaaactatgaaagtaaggtatcttaagtcatatggttcacaatcatgaagatttgcaagctaaaccctgaattttggacctatttgcaaaaggaccctatttgagttctaaagctaagtctgaaattcagtgttttgagctcatctttgtgaccttgtaacttccaaacaagaaggattttgccctagatcaccacatcaacattgtagacctgtcaaaggagaataactttgcttaagagagtaagcatggttgttatgaagaaattggagaaaaatgcacccaaagatgggctgtcaggctgtttgaagtctgaatttcagactaacagtgcaactgcaagaactttgggcacgaattcaggcatgatcgagcaagaattttcctagggttgctataccaagattatagctggatcctagagctataactttgctaaagagtgtcgatcatgttactacataaaattaagagaaaattcgccctaaactttgactgtcaggtgcactgaatgaggaatggccatggtacagtatctgaagtagatcagaccgccagctcagtttctcgccgccgacaatctctccgccgcgattcgtgccgccgccgtttcgattcgtgctcgggttgatcggataacgctcggagtcacgctgccgtggata

SEQ ID NO: 30576 - DNA, 356 bp, Zea Mays
cctcctaaagcaaaaagaagctagatgtccatccctctcacaatattcacaatggtacctcatctctctcttgggtggattttgtttgtggaagggggctttcttttcggatggctgaggggctctagcaaggggatcgctagagatgtcgggaaagctgtcaagtgtgttcctaagatggttaggttttggaagccacacttgtttctgaggaggatctctcataggttcatcaatcacaccatctctcacaggggtgacaggcttagtagaggtggttttgataagcttgggagtggatgaaggtttctctgaaggtgtcaaaccactgcactcaccaaccttcccaaagcgag

SEQ ID NO: 30577 - DNA, 309 bp, Zea Mays
cgccacgacgcgacgtgaaccagcaacccgacaaacgctgggagaagaggcctcacgaagaagtgcacgccgccggaccacctgcctctcgcgcccggggaggacctcgcggaggcgaacacacgctggacgacatcctcgacgcccagtgcccgtaccacaaggacatgcgccacacccttcggaactgcagggacttcaagcactccgtcggacacggccggcccttccagcctctacctcctcctccaccgcggggaggaccaggagaaccgcgacaaccccaacagcaggaggagggaggaggtg

SEQ ID NO: 30578 - DNA, 395 bp, Zea Mays
aagggaagagtgtctccccttgatggctttgcctaggtcaggcggagattgctctgcctctctcggcgtccgagtatagagggtagataagatttatgagacccgccattagcctttcaagggccagtcggttgctataaaatagagggtctctccgctctatccaaaatcagctttgtctgacgcctttttgttctccgtggatggcatcctatcggaaagctaccctacccgagtcctttagggggtccttggctaatcatggatggtggcaagcgccctaccttggagtctcctcaccagggctggctcaaagtcacccaatgcgggaaggtagatggttctctggaagcttgctaatagttccctcttttgttacttttcaggtatggctt

SEQ ID NO: 30579 - DNA, 363 bp, Zea Mays
accggaggaagccgatcatcagatacataaagaatgaagaggaaccagatgacaaaaatgcaaccgagagcatcgctagacagtcagctcactacacactcattggggaaacactatacagaagaggcgcatcgggcgtcctcatgaaatgcattctctcatctactgggaagcaacttctggatgaggtccatgctgggcaatgtggaatacacgcagcatccaagacgctagtcaggaaagtcttcaggtcgggattctattggccaacagcaaaaagtgatgcagccgagttagttcagaggtgcgaagcctgccagtacttgtcaaaacaacaacatctaccagcgcagcaattgcaga

SEQ ID NO: 30580 - DNA, 495 bp, Zea Mays
tgtaaatccgcgcccgcgaaggggtatgcagcgcctgggatcgtccgattagagattgacgcataggattatatcttctccctatgcgaataggtatgcaccgctgaccattggatcaacgatcgaacggcgccggtttaatgaatcctaaagcgatgtccatcgtccgatcctaaacgaacacccaagatcccaccgcgaaccggtacgccacggtgtgatcctggccgacccgcgatcatccaacggcgcacatactaacttcccaggatctaatcgtgaacgttggttaagatccaacggtcaccaatccaacaccccccaacagacaaagccgatggcggcgccgccccgcacgcacgacggggctcgccggagcggaccctaatccctgcccaaaggcccccaattcgatggccgatcacgactattgcaagagcgcatgaaggcgtacagagtggcaggtttttctcaccgaaatcggaggtagccgac

SEQ ID NO: 30581 - DNA, 330 bp, Zea Mays
gataacttccatcggtatcacgttcctgaaggtttgatgatagcgaggaaggaagaattcctggcattgaagcaaggccccctatctatcagtgagtacaaggacaaatttctacaactatctcgctatgcacctgagtatgtcaacactgatgccaagaggcagtacaagttcttgagaggtttggtcaaccccttgcactactagttgatgaaccataccttccctacctttcagcacctaattaacagagccataatgacttagaggaatcgctaggagttggaagaccggaagcgcaagattggtggacctcaggccgagagcagc

SEQ ID NO: 30582 - DNA, 501 bp, Zea Mays
gtcgtactctatggcccgggctatcgtctcgaaccggaggattggaaacaaaattggagaagggactctgtggaggcaggttccaggcagagtaagataagggggcgccaacattcgaaaccctgcccattagcatcagatcaagtcatcttagcaggtcctcattgggaatccgtctgtttgtaactcgagtagaattgttgaccccagtgtacaagtaagcaggatagactctatccttcaaaggttggatgttcttgaagacaaagtaagcgaccacggcttccgcagttaggcctctgtccttcagcgagcaaattttagcaagcaacaccttggcttcggctgcctctgaataagtgggggactctacccagctgggcatgcgaacgacgagttgcctctctgatcaaggggggacttgttgtgattctccatggtgaaccactcgaggcgccatcccttgatgctgtccttgagagggatatcaaggtattccac

SEQ ID NO: 30583 - DNA, 289 bp, Zea Mays
agaggcagtactgccttctgatctcaagtttagggcgccaaggttgatctttgaaagcatagcagaggccaaagcaactaggctagaagatgttgatgtactcaaagaagagcggctgaacgcagtaattcaatcggcacggtaccagcagactctgagacgctatcacgacaaggccgtgcgacaacgatccttttcagtaggagatctcgtcctccaccgaattctaacgggggagggacgacacaagttatcgcccttatgggaaggaccattcatagtagcagaa

SEQ ID NO: 30584 - DNA, 418 bp, Zea Mays
actgaggacaattattcttgtagtgactggggtctctgcagtgccaacaggcattggctggaggttggttgcttgcaacggagggggcctggagggaacgttgaccccgctgactgaaacgtgacggagtggacctagctggcttgttgaagctcggtcaaaagatcgaactctctgatgcctgttctgctgctgagcttggaggacttggaacttcctcttgaggtgacccttttcttcttctctagccctttccacttgtatggccttgtttgagaggtgcaagaagctgagaaaatcttggctggcgaggatagtcttgagttctggtcttagccctttcaagaaatgggccatcttcttggcttccgtgctgacatcgtcaggcgcatagcgagccaattctgtgaacttgtgg

SEQ ID NO: 30585 - DNA, 358 bp, Zea Mays
tgccatttgccatagctctgattgttttgttccgctacatatcgcttgattatggccttcgtagaaagagcgtaactagaacagatcatgccagtcattcactcgtcaaaacaaaaggtactgaggtaaagaaagtcattcatcagactgaaacggatggaaaaatagattggaggagcaaggttaactcgcctccagttgaagcagcattcgaacagttcacaaggcaccttatctcagaatgggtaacagatctgtggtactcgcgcgtaacacctgacaaggaaggtccagaggaactcatcgatgtagtcaatactgtccttggggagatttcagttcgggcaagaaatgttaa

SEQ ID NO: 30586 - DNA, 631 bp, Zea Mays
gtcgcaatgtgtgttgtaaggcatccgcctagtccgctactatcgtggtgctgtgcatgtttttaggtatgccccaagttccttaccagtttcatttatgtggtttgtaatgtgttaccccttgtttcttgcttcattgctatgcttttttttgttgttgctccgagagtttcgggtgaaatgtgtgtatacatgtgaaatagtacaactcaattggtggcttgaggggtttcagcagcatgttgaagaagttgtgatgacacagtgatttggaaggatttagattgtattaatctctgttggtcttagtatggggtgaggtcattttgttgtatgagtctctggaacatagtttttaaggcattttcgcctagatggtaaggcgctccagtgaggtaaggtgtcctccccgccttgctttgtcacctaaggcgggtgggagagaggctagcgcacgatggctggcgacggaggcacatgagagagggagaagcggatagagaggctagcgcacgattgtagtgccaagtaattcattctgaccacattctgcagttaaatttgaccaaaaaatgcctcctattttatatattttatatagttgtataccatctttaacattggttttctt

SEQ ID NO: 30587 - DNA, 628 bp, Zea Mays
tttcggtctcggttcaattgcaggaaaggaatggtgattgctggtggctcactgggtttatggtcctcaccaggacaatcttaagtcttcttttcttcatgaattaagagagatcagagatatatgtgtggggccatggatcattggtggtgatttaaatctgatttttaaggaggaagacaagaacaattccaatattaacagggctattctgggtaacttacatggtcttattaattccttggatctgaaggaagttcctttgaagggaagaaggtatacttggtccaatcagaggaatgatcccactcttgttaagctggaccatgtattttgcacaagcagttgggaagatttatttccggacgcatttcttcatagtaatgctaccacatcatcagatcattgtcccttcaccctcaaagtcagagatagctgcatgaggaagaaacggtttcacttcgagagtttttggcctaaacttcctgggtttttggaggtggtgggtgcgtcttggaacctgccagttcggagctcctgcccattgaacgggtgtcattgaagctaaaaaggttggctcgtgatctgcagtcctgggggcataaagtgcaagcaaagggactcaaac

SEQ ID NO: 30588 - DNA, 477 bp, Zea Mays
gggaaaacggtgtcgtggcggctctgggcgaaattgggagatgggatcggggctataggaccgtgagaggctgtgctttcaccgtgcgcattcgatttgggagaaggtggagagggcaatgtgaattcctggttgtactcaagcttacttgaagaacagcgagcacctcgccgtggctccctgtcctatatataggcacggcggtccggtgatcgatccacggctacgaggtgggctattaacgcatggcaaccacataaggaagaggcatagtgaggtgaatcaaagcatgtgcgacagcgcggcgagagctcactgagtcacggcggccggtgagtaactccggccgagctcaggagatggtgccacgtacgagttaccctttttctggcgttatccatccaataccctgcacgaatccggacggcgatcaacgacggtgagctgagctagcattctgatccacccagaacactg

SEQ ID NO: 30589 - DNA, 302 bp, Zea Mays
aggattagctgagagatgggattgtcattgtcaacaggttggtgtcgtgcagttatgatgcaagcacgcacgtacgcaccagtagcagcagtactccatatggtgccgccatgcatgttgatctctgtgattcgaccgaccctcaagtagctgcaaaccacacatccaacaactgcggccgctataaaggcgcgacgacgacgtgacaaagccatgcgatcgacatgtgcatgccacgcgcgccgagcagcggcccgttcttctcctcttccaacgcaagcactgccaccccttcaactcgg

SEQ ID NO: 30590 - DNA, 361 bp, Zea Mays
ttcaggggcatatccaaacatttagctttcttgcctcaacgaagttctaggctagcccttccaaccacttgttgttgtccacccaccatacctggcttacagtggtagagatacctccacaatctaaaatgtgggctaatcccaagaaaggcttcgctgagatgtacgaagatggcaatttgtagaacagaattgagattcatatgagtcagattaagagaatagtagtcaagaagacagtgaaaggaggagacgagtaaacctaaatctcgaattaagaaaggagcgaagacaacagactcgtgggtatcatctatggggacagtaatccccttctagactggccacgaactcaactctt

SEQ ID NO: 30591 - DNA, 422 bp, Zea Mays
gtgactaggatgactagagagttgaaacccttccgaagatccttaggcaggcgattgacagcttcagatcatcaagaacgaaaacggcttgtagaattaggtggtaagatcgacatttaagttcagcccctgcagaattcgagtccacgcttcctgcaccagcacacaggaggagagaatgtggttgatcgtttcctcatcctggtcagaaaaaggacaggtcggctgatggggcagcccttgcttggctaggcgatcagaagtccaacatcggttattaattgccaaccatataaagaattcacaattggccggggcccagctcttccaaatcttcttccagtgagaaaacttgatggtcccaatgaacattgagttataggttgatttgcagctgtacataccggaggccgagaatttcc

SEQ ID NO: 30592 - DNA, 293 bp, Zea Mays
agtttctttagcagcatccaagcgtgggttccgctggtgaccatccacatactcctaggttctgactcatagttgctagccctgttcgaccgggtttgacagctcgctgcctctctccgtgataaactatgagtcagacattccctaggactcgaacataatttagaaatgcccttagtgcttgtgcactagggtactggctgcaacagtgctcatctcataatcgccccttgctctagggtttcgagagcggtcgtgaacccattagggacaaccttcgaactccaaaaaac

SEQ ID NO: 30593 - DNA, 405 bp, Zea Mays
caaataaccaccaacgccgagggccatcgcattgtcaacctcatcatggccgaagactggtgggccccaataaccctgttcttggaaggatattaccatccaggtgatgtcaacgaggccaagcgcctcaaacaccgatgccgggatttcacacttattgagggccagctatacaagaaagggatcagtcaacccttgctcaaatgtgtcacagagaccgaaggcctccagatcctgcgcgaagtccacagcggcacttgcggctctcactcggggcctagggccctcgatgccaaggtgatccgtaaaggtttctactggcccgctataatctgcaccacaaatcgagtcacgaggtcgtgtgaagcctgccagaagttctctccccgttcgggcaacccctcg

SEQ ID NO: 30594 - DNA, 827 bp, Zea Mays
ggaaggtcttcattcctgacgcctcttcagtatgggcagaaatcttggcagcagcatatgactatggtcacgaaggcattgagaagactttgcatcgatgcagagcatccttctacagccctcgtgccttacgaagggtcagagaattgtgcaagcttgctacacttgttaacgaaataaaactgagcatctacacccagcaggcctgcttcagcccctgtcggtgccatcggaggtatggagtgacatctccatggactttgttgaagaattccctaaggtcggcggaagactgtggtattgacaatggtggacaggttctctaagttcgctcactttattcctcttggccatccatatatcgtagtgtctgtggcccgggcattttttgaagggattgtgcgccttcatggtattccttgttcagttgtgagtgatagagacacagttttcactagtgctttctggtccgagctctttcaccttgctggggtcaagctgttacttagttcagcgtttcatccccagacagattgacaatccgaggtggtcaaccggattattgtcatatacttacgttgcttggcgggtgatcagcctaagacttggttacaatggcttccatgggctgaattttgttacaatacttcataccaaactgatgtcaagtgcaccccattccggattgtctatggtcgggatcctccaacaatgctatcctatgcgccagggacggccagggtagctgcagtagaccagcaactccaggatcgggatgttttcttggcagacatcaaacaaaggttactccaagctcaggtgacaat

SEQ ID NO: 30595 - DNA, 364 bp, Zea Mays
ctaaacggtaaggcggatatattaagcttaactagtaaaaatactcgttcaagactaaaacgatggtggctaggtgctggtccgctagaagggctcttgccgagactccatcaagcacgatgtcgcttgcaattgcaagttcaacagcgctaggttctttaacagggacatgctgctcaacaactcgaccacagcgccgcctcctcgcaagagcccgtcatgggacaccactatcgctgccaccactttcgacactcgacagggacttctcgacgccctcaccctcggcaacagcgtgcacctcaaggggatgagcctcgagtccaccacgctacactcccgatgtttgacatctcgtgtgccg

SEQ ID NO: 30596 - DNA, 400 bp, Zea Mays
gggacctcaccggggttgacgacaacatgtcgaagctgtccaaacacgaaggcgaagacgatggagcgaataacgcacatacgacacatcaggacaaatttcttaaggctaggcatttcctcgagcagtcagcgagcatcgtggacgtaatactgctccagcgtgcaactgcacaatattcatatgtgcgttaaaaatcaatacacgacggtacactaacaactactttatgttggatgctaaatgagcctttagcatcctacatacgttcgataaagacctttagcaacctataaagatggtggttgtaagtaccgtcgctaaacagtcacacccggttttaaggacaaaaccagatgttccactatacatgaaatcgtatgagaatcacatgtatagc

SEQ ID NO: 30597 - DNA, 340 bp, Zea Mays
gtggtccttgttgaggtcagtcggggtgagcctgcatccacaatcggaaccattggagaggatttcttcccggttgggtccacgatgcggtggaggatccctttccaatatacgatacaggagagggatacaaagtggaaaacctcctcggtgttgaagatagtcgaagatgattgccatggagtcgttgtgaatcgacgtcgcaccccctactttagcgcgccagctgtcgtatttagtcccgactgctcactgtggggtaacccacgcagtgcttttgagaggatagcgatgttgattgcaactcgatggtacgtgcaggagcacgtcagaatacaag

SEQ ID NO: 30598 - DNA, 352 bp, Zea Mays
cgggccgttcgtgatcatatgtggatggtctgtctgtgtggtttagggcttgtgtaacatgtggcggctcagacacatatcttggtaactcattaaaaatgggcccgaccgttgctggcccggacggtccgcgctcacgtgcggacggtccggtcatgtgcagattggctaatttattgccgatgtgtgtaggaagttgtggttgctcagggtatgtgtccatcggcatcccataaaggggttgtgactggtcgtgacaacctgcagccgatgaattatacgtgctttctcctaattcaacctcgtgcgaaggaaaatttgaaacagtagatttatcaaacacacgtactat

SEQ ID NO: 30599 - DNA, 671 bp, Zea Mays
acctcaagttatgtttttggcagcacgactagaaagtggcggttagggcaaaaaattccctatctacaatcacaacggttagggcaagtcaattaatggggtggatcgacttgtgatctgggtaatggtggatgggatagcggtgtatcagcaatctatctagggctggcgcggcggcggctagcgagggcaagtcgattaatgggtggatcgacttgtgatctgggtaatggtggatgggatagcggctagcgagagcagttgatcacgacgaagatacaccctaaaccagcaacacgtctcgaccacggacacgaactgaacaaagccaaactgaaaacgaaattgcaaaggctaaacaagggttctacgacagcggaattttttttggtatggcaattatctggagttataggatgaaaaacctaaactaaactagggtaagcctgacggtaatagctgagtctctgataccacttgataggaacaggggtgcccgatcttccgtcaggtgaagataactatcgatttggtgatgtcacacagacgatccggcttccaatcaacacgactagaacccccgcaatcgcagcaccacttctcctctggttatcaaccgtgcactgcacgattgacctcaccacgagggataattcctgcctgagaatcaa

SEQ ID NO: 30600 - DNA, 419 bp, Zea Mays
cctcacatatctgcctggccttctgactcttttgactaccagcggcaggtatgttgaggagtgggtccgagttttctacgcgactgtatggatagacccagatcatcactggatgaggtttcgttttgagcgagaggatgtcactattactgctagccagattcgccagctctttggttttcacgagtcgtcgactcgacttcacagcttatgctacggcacctctgaccctcctcgtcgccctcacggcggtgtggctccggtacagctcacgtcacggctctgttctgcccgcccttctcagatgggtcgcgatgctcaccggcagatttcactacagcagccaagttcctatttcagcttatgagacggacacttctgccgcggatgggatacagggaggctaccacacatatcca

SEQ ID NO: 30601 - DNA, 475 bp, Zea Mays
tcggatcaagaagtacttctttgcagccatgagattcacaatgcaatgcccttaggtatgcaaattctccttcaacatacccgacaagggtcaaatactatgatgaagccctgattattagctgcagagatagaaaactgtgaccaagcaaggtcaaatacttcacattctgcgtagtctttccactcaacccatgtgcgcaagtcagttgatatatcatatatatacctaatgtaacaggtttgactagcacagcgaaatagaaatgtgcactccaaagtctagcctcgtcactcgtgttatgaacttatgataagctgctaggcgagccgtgaccgacaaaaattcttgtgaaacacctccaatgcgtgcaacgaagacaccggacaacacaattcccccacattcacccacctcgggagtcaggacccctggagtggaatggatgcaaattcggttcgcagcaccggtttgt

SEQ ID NO: 30602 - DNA, 464 bp, Zea Mays
cagaaacccaacatctgccgccatctcaatcatcctctgtagcgggtccatagctaaaataaacaggaacggcgatagcggatccccttgatgaacgccacgcatgtgcctgattgcatttgtttgttggctattgattaagattctggaggaggaagagcccaaaattgtggcgatccaattcctccacttctgagaaaatcctaaagctcttaaaacctctaacaaatatgcccagttgacggagtcaaacgcttttgatatgtcgagcttgacaaaaagtgctggttgtttgctcttatgaagtttctgaataactttttgaacgtagaggaaattatcatgaattgaacgtttctgaatgaacgcgttttgggctgtggagacaatctcattcattcttggcgcgagtctatttgctaaaattttggttaaaattttcataaaactgttgatgagactga

SEQ ID NO: 30603 - DNA, 306 bp, Zea Mays
ctgggatatctgagggttccagtgatagtgaagactttgatgcagaaagtgagaatgagggtgtcgaagatcggccctggaggccaagtcatgttgtcttcaaaaagtcaatgatcaaacaaggacaaattaatgccatgaggggaaggtactttcgtgacatttcaattgtgcgggttggaggggagagtaatgtccctctgcccgaagctgacgaggtggttgtctatagaagtttcatgaaagcagggcttcgttttcctttggatagtatgctggttgaaatgctgaaaacctttgaagtct

SEQ ID NO: 30604 - DNA, 437 bp, Zea Mays
agggcacggtcgacgtcgaccccaacctcggctctccatggaagggcacgttcccggccgaccccgacccggccactacgcggctctccacggaaggcacccagatccactctctctccttcgtggtcctaccgctaccaccgccgcccactcgctgccatggtgctccagccgcgaaagtgggcagcctactggatcttggcatctcgccgccgctcctcacttccgctccacctggtatgcccttctccctgcttcccctctcgctagatgactccgctgctccagaatccactctctctctcttttgtggtcctgtagctaccctgccgccccactcgctgccatggcactccagccgtcaaagtgggcagcctactggatcttagcatctcaccgtcgctgctcactttcgctccacctggtatggtgtcctt

SEQ ID NO: 30605 - DNA, 459 bp, Zea Mays
ctgaaaagcagtcatacaaggttcagatttgattggcttaatttctttggaagtatgatgactactaatgtactagtaacttactcgcaccctgtgcgagtggtagtctacacggttaaaacatggctattttagatatatagggtatcaatatagtccaatatatacatgtagaagtaccagaaaatctgaatagaaagttgtttgtagcaatagaacaatccaatctataaacatccatatttctatggaacactcgtacatattgacacataaatttcatagaagaggagcatccttgttcccccactcgagatctttagtctggaagagtcgtgacactttgtcatcgagcgaccaatatgtgtttgttcaatttggatcattgtccattcgatcctgtagctggtaaaaaaataacgacgtggatgtgttgagcagcgagatttgatcttcaat

SEQ ID NO: 30606 - DNA, 280 bp, Zea Mays
caaataacaacaagcatgttccaacaaattaagtattgacagcaaggtcatgagttcatcaaagagaagaacagatcaggagttaatggtgtaagcagtaatgacaacaagcatgatccagacatctcacctttgtgcttgacgcgactcattaatggcgtaagcagtagggtcagagcaccgattccgtcaccgccaaggtggcgcacaccgatccctcacggtctaccaaaatacaacaaggtcatgagttcatcacagagaagagcagatcaggcac

SEQ ID NO: 30607 - DNA, 311 bp, Zea Mays
aacctcgggactcgagagcctcacctgacggccatgaagcgcatcctgcgctatttacaggcacaccagactttggtcttcttctgcgtcaatcatcctgctccgacctcgtctacatcgagtcaccgacagcgactgggctggttgtccgtacacatatcgctctacgtcaagctacgtgttgttcctaggggacaacctgttgtcttagtcggctaagcatcagactgttgtctcatgttctagtgctgagatagagtaccgcactatcgctaaaggtgtggctgagacgacttggctgcgtcagctgc

SEQ ID NO: 30608 - DNA, 294 bp, Zea Mays
cttaccccaagaaaaatcttctctcctttcccccgatattaacagacccttcttttcctattccatatggaagactctctggtcattaggacatcgtactgctcagaggtggaggggttcccatatctgttgtgaagttgtgcgcttcgcatggggatccgcaagaagccagaatatgtctggaaggaatatctcgagaacggaatggagaagtgctctatggcagtctacctgggagaaagccgaaactatccgaaccatccttctttccaagtcactttcaccggataccgc

SEQ ID NO: 30609 - DNA, 562 bp, Zea Mays
gttggaatcatttatgtttaacagtttttttacaatcagaccaaaaaattcaggggtgtgggcaaatacctgtgagtagtgtgactccccagcatccatgtggtctgtgtgctgaatcgagtcaagcaccctctttgcaaatatatgcaggcttgtcacattgttaacataaccatctttcaaaaccatattttggctctcagatctctgggtggaagtcattcgcccacagtacatgcctttgaaatatgttgctatccatctcttccttttctgccacaatgcaacaattgcagggtgttctcttatgccacattcatccaccagcttattccactccacctcaaattgtgtgggccccaaaggatagtttatcagggattgcagtttctcctttagattattatcattgtgcaatttgtacagctcctcgagctcgtaatcccatgttctggttatgtgccatctgcaatttcggtgttgtgtcttgttaaacacaatccttattgcttccttcatcgctgcatcttcatctgtgtgtcaaaaataaaaatcagcaaaa

SEQ ID NO: 30610 - DNA, 714 bp, Zea Mays
tgagggtgaggaggcggcctcgtatttgcggaatcgctcgccggcgccgcgattcggcacatcaacatgaactagtcttcttgcgccgccgttctaggtatgagtaacccccattgcatcttgttcattcccgcaccgtagatcgtcatcagatggggggattggggtcgggatctcgtgtctccggtgatggtccgccgtctgtgcgggcgccgccgtgcccaggcatgcgggggaggtgatggagcctggggccatggatctccaatccgacggccgtaatagcgtaccaattcgtcagtagatctggccgttggatctcgatcgtacgggtggattcagggtgcgtgtgtcgattcagcagagcgcgatctggaccgttggatttgtgctggtgggctcagatttgagaatggcgcagagctacctccgaccgtagatttcggatccaaggggggtccaattgcgtaccagttcaggctttgcgcggtctaatctggaccaccgattactgatcgtgcggtcgtgatcccgcgataccccttcgcccagacccttttgcatatgagtccctagattatttcagaatgaacccgccatcctcgtctgtgatgccttgtgtcttgggaacttttgctccgaggcccatgtgcttctctgaaattagtgcacaggccagtcggtgaataacacttataaaaccatttagaaaat

SEQ ID NO: 30611 - DNA, 469 bp, Zea Mays
ggagttggggtctggtcaaaaactggcccactgtcattgtgttccatttcctctgttgccatttcacctctctacacaaaggtatataattagtataactgtgtagtatgtatagtaaaatggaattataacatgagacatgaactgctaacaaacatttttttccggtgtcacgtcaaatttcggcaagcgggtgcaagctgatgtggtttgaggtgtgatatttgtgttcctcaaaatgatgtttcgaacatcaaaacagaaatcttgttgacaaaaagtgtggttcgtatactgctaaaaagtagtatgcatacaatgtacgtatgatgagtgaaaatagtattggagttggacaaattacctgttgatctgtaaccacatccgattcatcgggacacgtctcaagcactctacggatatgctgttgtctttcatgaatttcttcaaactgagtaccacccagctg

SEQ ID NO: 30612 - DNA, 503 bp, Zea Mays
tttgcgacttggacttggaaaggcttactgattgtggtcacatttggcaaggactgagctacagtagtgctgacgaaagagtgtgagctccctgagtccaacagaactaaaacatccaagccagatatatgtcccacaaatttcatcgtacggggaacctccagaccagtgaccgctgcctgcgacaggtgcaagacattaagttctgtttccgcatcagctgtatcctccactgaatcttcctctggcagctgcaccatcttccacatctcctcaactaagtgcaactgaaccgagtcagcacacttgtgacctcgagcaaatggtgccccacacttgtagcataaacccttcgccttgcgataagcatataatgatgtgagccgatcatcagacgatgtgcctgtagcagccttgtcctcccctgctgcagaactgctcttgatatctctagctgtcgaaactgaagccccaaaattcttagtataatttttagaatccgg

SEQ ID NO: 30613 - DNA, 750 bp, Zea Mays
ttcgtgagccgtacttgggtgcggtcaagcggatccttcggtatcttcggggcactgtcgactacggcctccaccttcgatgttcctccactcatgagttgattgtctacaccaacgccgactaggtcgggtgcttagacacccatcgatcgaccttcggttatgcgatgtttcttggagccaacctgatctcttggtcttccatgcaacagtctatggtctcacgctccagtgctaagattgagtatcaggctattgctaatggggtggctgaggcgagctggctacaccagcttctctaagagcttcacatctccctcgctaagagtaccctagtatactacgacaatgtaagcgccatctaactctttgtcaaccccatctaccatcagtgcacgaagcatgtcgacattgacctccactttgtccgtgagcgtgttgttgtcgggacatccatgtccatcacgtctcaatgagctcgcagtttgccaacatcttcaccaagggtcttccctcctcgctgttcccggagtttcgcttcagtctcaacatttgtcacggctagagtttcgactgtggcggttggattatgatgtgtttgttgtagtaatgggccttggcccagcacattcatttccctctctaagagcatcaaaagtgacttatctcagtgccccaaattaaattatagggctcaagctaaaaaaatgctacaaaagtgccctaatttacaaaatattggcgaaaata

SEQ ID NO: 30614 - DNA, 325 bp, Zea Mays
ttgttcctttggggtgtctgtgggttgtgcttcgggcagttgttggcataatgaccaatttctccacacttaaaacatccactaggttgaactggggtagttgtattgttatttccggtcggtgtgttcacggtgcttccttgacgattctgttggtaatcactagacctttgactagtctgagagctgtttctttgttggttctggtattgatttcttctatgaccttgctgtctagagcgttgcatttgataattgttatttccactctaatttccaaagtgaaactgataaccttgagagttgttatgtggataagtgttcc

SEQ ID NO: 30615 - DNA, 278 bp, Zea Mays
ggaatgcgagggtaacataaaggaatttggttactcttctaacgctcgttgtgcttggaagaggttgatttggcgtctgatgtcaatggcgcggaggagttggtctcgtagtagaccactctcttcattctcttctgattttcacctttcttcttgtgcgacttggtggagccggtggactcttcattgtgctccttatgcttgtgcttgtcgcaggatatcttgatctcacccgacgatgccttatcttcgggcttgggtcccgacgacaccttctc

SEQ ID NO: 30616 - DNA, 351 bp, Zea Mays
caccggaccacctgcctctcgcgcccgaggaggacctcgcggaggcgaacgaacattggacgacatcctcgacgctcaatgcccgtaccacaaagacatgcgccacaccctccggaactgcagatacttcaagcactacgtggggaacgaccgacccttccaacctctgccacctcccccaccacgaggaggacctggagaacctcgacaacctcaatagcaggaggggggaggaggtggagcgttcccgcgcgtcgatggagaagtcaacgtcatcttcggcggacatggatcgcaggaaagtaagaggcaacagaagctcaacgaccgttagatactggtgacgaccac

SEQ ID NO: 30617 - DNA, 344 bp, Zea Mays
cttcgacaaacatcgttagcaactaaaacaattgactaagtgatagaatcatacctttttctcatcttttcgtagggatttacaatgtgtgcaaactcaagcccaaagagtgcttttctctacaaaaatgtgttatagcccaaacacaagtactagaaacattataaaagaccagagcaacatatttaaaagtgcaaacctcacactcataccattttacacaaagatgcatatttgggtccatgtttgagctcttttggattttgcatcttcaatttgctttcttctacacctatgcttatgctcttatcaatatagttaattcaaagtggtgtgttggtcac

SEQ ID NO: 30618 - DNA, 430 bp, Zea Mays
gggcaagctcctcgggttcgacttctccgatgagtacaagtcaggagcaacgaacacggtggccgacgtgctatcgcgtcgcgacaccgacgaggacggcatggggactctccaggcaatctcagctccccgcttcgacttcatcagccgcctccgacacgcccaagctactgagcccgctctggctgccatccacgacgaagtcagggtaggcacacgcactgatccatgggcggtggccaacgacatggttctctacgacaggcgcctgtacatcccaccggcctcgccacttctgtaggagattgtggcggctatccataatgatggacatgagggcgtccaacgcacactacaccgcctccgtcgtgacttccattttcccaacatgcggagtgtggtgcaggacttcgtacgggcatgtcccact

SEQ ID NO: 30619 - DNA, 312 bp, Zea Mays
tacatgcgctctagcgaggctacccgaccacaattgaagccctggcgctagcgtggatgggaaatcagcccacggcggtagtcccttttctctcccctccgcctatggttcaattggtgactgggtactcggcgagatggataggggagctggagcggccgggttatataggggcggggcgagtccgagctcaagaatcccgaggatccgcaacaactcccgccagcgtagggcacggagcggtagctgcgggattgacgaagttcgtttcggcgtttggtggcgatatgcggaaggtgacgtgcctgacac

SEQ ID NO: 30620 - DNA, 453 bp, Zea Mays
tagcccatacactggtaagtcatgcatggagtactggtaccaaacatgcattctgaagtttgtcttcgtagctcggtcatacgtccataccccttcctcctaggcacgtaccaattcatcaatcaaaggctccatgtacacgcccattttattccccgggtgtccgggaattatcaacgacacgaatatattctgcctttgaaagcacacaccaggggggagattggttgggataacaaacacgggccaacatgtgtatggggcagcactcattcgatagggattgaaccaatctgtggccaacgcaacacgtacattacgagcctcttcggctttctcatggtgaatggcatcaaagtgtttccatgcttcaccatcagatgcatgcaccatcttgtcaggattgtatcgttttccatttttgtgccatgtcatctgtttcgtggattcctc

SEQ ID NO: 30621 - DNA, 353 bp, Zea Mays
ctggaacgggctactgttgtaagatcatattctgaattcttctttttaatgcaatggcagaacctaaccatttgaatatatggcactggatggagcagacttaccatgctgttgaataaatgatttctttctttcacctttcacattcattgcactagcgatgagaatattttgtatttgcatgtgttgtatgtatgtgtacatttattgtgaataaatgttatggttctcattctaacatattcacatggctaattagtaacgcgaatctgtggctgtatcttgtcaaacaaatcatggattcctctagcaattccagtgctaaagtaagataattcatatacaaattcatc

SEQ ID NO: 30622 - DNA, 340 bp, Zea Mays
gggacataagggcaccacacggccccatgattgctggtcggaaaggcattcaggcaagggttctacaggcccaccgccatggtggacgccgagctgatcgtccgcacctgtgaaggttgctagtactacgcgcgacagatacacatgcctgtccaggccctccaaaccatacccatctcttggccattcatggtatggggtttgaacttggtcggacctttcaaaaaggcgcccgggggtaatatccacttgctcgtggtggtggataaattgaccaagtggattgaggccaagccaatcaccaaactcaaatcatcgaaagccaccattttcttccgcg

SEQ ID NO: 30623 - DNA, 367 bp, Zea Mays
gtaactttggacgtggcaccatcccgcgagctcagccgagcgtggccggagttattcaccggtggccgtcgtggctcggtcgatttcaccgcggtgtcatccatgccttgctcctcccttactgtacctcttctatatgtggttgccatgcgtgaacaaagccttccacggtcgctgatcattagccggaccgccgtggctataaatagcaccatggaccactgcggggtattcacatctccaccagtgagtttgattgaagcccaaaatttgcactgcctctgccacctcttcccaaattgagtgtgctcggtgaaactatagttctttacggccatgtagccccaatctcacatcccaattccac

SEQ ID NO: 30624 - DNA, 325 bp, Zea Mays
ggtccatggaaccagtgagttaggaaggcagagagggtgaattaacgcccgcacgaagtgcggagtggaacaaggaagctcaccgaaggttccttaacaccggagaagcactagcaacgatagaatggggtagaaaacttgagcggcgacccaagctgcaaggtcgacggtgactaatattttaggcgagtgaaagagggagccaaggcatgtgctaggtgtggtagacggcaaagctcacctagtagatcttgatggtggagaggggttgctggcttgagaatgtgacgaagacgatgatgcacgagcgcgaagaggaacaaac

SEQ ID NO: 30625 - DNA, 357 bp, Zea Mays
tttggaagcatgagtgagttaagaaatgccaaggacccaagtattacccaagcttttaggcaatgatcacctagggcaaaggaggattgaaccttggaccccccctctcttaaagcctttagttgagaaaaagatcaagcaaatgcacatttcatgatttaaaccttaaccaaagtttaagagtaccaaaatgtttacaaaagacagcaaaggaactttacaaaaagacccctataagacccctaaatcagccccaagtggagaacactatggaatcaccaccattccctctaagtccaaaaatcagccctaatctagagatcaggggtgttcacctagctaatggcaccaaaaccc

SEQ ID NO: 30626 - DNA, 456 bp, Zea Mays
ggaactgaggcggcctaatcagctgcgcgaagatgtaacagagatagtgcacatatggcagttgacagcgagcacgaagaccattcaacaccgtgtcctcgatctcacagataagaaaatcaaccacatcaaactctgaatgtcagatcaaggcaccaagtagccagagctgtatgtgtgtggtggcctctctgtaacccatcctaggaagcagtgtccgtctcatcacctgatagagatactttgctactagagtgaaatctgctagagagcatcgcggcccatctgtgaaaggcagtctgaacaaggtcgcgacgtgagtagtggccagagcgactccaccgtgagggcgtcgaggaggatctgatgtaccatagcacaggctgtgaaggcgagtcgacgactctggaaacccaaataactggcgaatctggctggcatgtaaagtgacatcct

SEQ ID NO: 30627 - DNA, 489 bp, Zea Mays
gtgatttcacacacagcgttgccgaaacagcgaagcagataccgtggacgagaaagactactaggtggcatatgacagcatgtggccagagaaccgaaactgctactccggcgtcattatcgaacctgggaccttgattagatcaaataatgctagcatttaaacccatacctcgaggtagcctacgacaaatcgtcggagcgaaagatacggtgtcgtcgtcacaccatggcggtgccccggtcgatagatccggccaccccggccccggccctggccccgatccctcctctgtttggcaatggcgacatggttatccgattgtttggggtagatctagattggttgggtctaactcctgcgctagccatgattatatagggcaaagtatttcagagtgttgaggggtattcgatcgaggagattgagtccgtcgtcccggacagaaaacccgacgcggataatgcaacggccaaggggcccaacggc

SEQ ID NO: 30628 - DNA, 295 bp, Zea Mays
agaagattctaaatgacataaacgctgacaaagatggtagacttctatttcatattgtcatgaagaatggaaaaaggaagaagcgtgttcagacaagagaagagaaaatattcttgctagcaaatgattgcttaactggagactctctaatccatgatttatccctcaaccaggttgtttgcttgtttaggttcagacaccccttgattttctcccctactatgttgacttaagtggactcccatgcaggaaacaaatgcaatatgctcaaatggatgtaggattgccaaatgca

SEQ ID NO: 30629 - DNA, 307 bp, Zea Mays
attagatccccggtagaagtcctcaatcactgctgcctcagtgacctcggggatacgatttctcatggtctgaaacctcttgaggtacgaccgaagtgtttcatcgccccgacgcctgatggatttgaggtctcatggctgcgcctgcttgtcggagagggactgaaagttggcaatgaaacgtcgactgaagtcactccaatcgtcgatgcagtgtcgtggcagcctggcaggtgtcgtagccactgcaatgcatcctgcccaaaaacgatgggcaaatatgcagtcatcacgtcttcagtttcct

SEQ ID NO: 30630 - DNA, 483 bp, Zea Mays
aacgtcgtgttgctcatgtctacccccgtcttcccctgacatctacccctcggcgctaccatcgtctacccccatcaaacctacctcgcctcgctccaccatgcaaccactgcctccatgtcgacgcgcgcttctcgccgctgcactgcatatcccactagttcgagtcttgtgacaacttcgtctcgccaaaccatcgtccacaatacgcgctcgtgtgacacaagcgcaggcgcctcgtttcgtcttgctttgtcacataatgtcccgcacgtcgtgcatgcaatatccttgtcgcacccctcctctatgcatacgcacatgtccttctggtttcccgattgccaacctcctccactttccctagatctagatcatacagacagagcaggtgccccttaggttatcgatcgtcataccaaggtgagtgtccttcttctctcttcgtcccccacacgatgccctcctcctccactaatcccc

SEQ ID NO: 30631 - DNA, 622 bp, Zea Mays
gcggtgtatctcccctctgtgttgggagacattgggagagagatgcctggttggtcctgattgggttcagcagacttctgagaaggttcgggaaattcgtcagaatattttggccactcagagccgttagaagagttatgctgatgtgaggaggcgggacttggaatttgcagtgggtgaccaagtcctcccagggtatcaccttctaaaggagttgttcggttcggtgtctccgaaaaactcagcccgagatacattggaccgttcactatcttggcccaagtgggcagcctaccttatcacttgcaactgccggattccatggaaggggtacacccggtatttcatgtctctatgttgaggaagttcttgcgggatccggaccatcagattgagatggaaccaattgctgtgcagcaggatctgactttggaatgtcgtccggtgcgtatcttggaatcctcggagcgtgttttgaggaagagatcaattaagtatgtcaaggtcttatggactaatcagtctgagcgcgaggctacgtgggaacttgaggagctgatgcggcagaaatatccggaacttttcgttgtgggtaagtgttgttgattcattaatatttcct

SEQ ID NO: 30632 - DNA, 430 bp, Zea Mays
tgaggcttattggacaaaagttgcaggtttccaagaggtagtgtcagaggcttggaattaggtcccgcgaggtaactgcccctttgagtctttagcaaaagctggagtcaaaagtgcattggtcatgtggagttccagcttggccttgcaagggagattttgcatcagtttgagatcgcacaggacatgcgtcccctctctgttagagaaatctggttgcgtaaccatctcaaggggcaccttttggccttgtcatctctcaagcgtaccattgcgaggggccactctcggatctcttggcttaaggaaggggatgcaaattccgctatatttcatgctcatgctcggtaccgtatacaaagaaacttcattggtagtctggtcgaaggtgatctcattctcactaggcatgaggagaaagagaaggttg

SEQ ID NO: 30633 - DNA, 272 bp, Zea Mays
caaagtgtcagtagcaccagcaccttcatccagccagaggtccttgaaggactcctctaattcattgtccaccacagcatgttgtgcccgctgttggcctagctccctatctttgatgcacaccaacatctccactctctctgagttcaagcaccgtcgccgatcctcaagaatcctgccagacaaactgaaagtagactccgaagaagtagttgaggcaaaaattggataggttagtttatgctcatgccaccaatttaagatatcaaaat

SEQ ID NO: 30634 - DNA, 366 bp, Zea Mays
ccgcgccaggcttcttccttatctccggccgccaccgcgccatcgtcaattcaagcgccaccgcccgtcctccctataaattgagcccatgactagctccgtgaggtcgtcagctaactagccaccgctaatcggccacaatcatccaccagtgaccgcgaattcggagtttcccccaaatccgatttccgccaccgtgaaacaagcttcgccgtggtcagccatactccggttagctcctcccctctgctcccttgtttaagcactcttatgcgtctacgatgcttaccgagccattgaattgaactaagagtcctctggtcgccgggaacacggctgtcttgccgcgatgctcacggccaccgt

SEQ ID NO: 30635 - DNA, 1341 bp, Zea Mays
tgtgttgcttgtatgacaggatgttgatgtatttggtccgaactagcaattatctgttcttctgagcttaactggtatcatagggtcaaatatacaaaactgttaatataatagtattctcttatttagtttatgcgatatggacacaagtgactgatgtgatgtttgtaaagttgctagataaagtccaaggatcccttcaatctgctgaaaataaggggatggcaataatttcagagctcactgctaagcatcagaaggtaagagaaaaatccaggaatgaaatttggggagcatgccttcaccaaaagcattaaggtgatctaactttacttctttttgtcctcagcaaatagaaagcttgcaggcgcagctagctgaagtttctgcagaaaggacgaaggcatctgaaaccatacaatctctacaggtaactccagcatttagcatcatagtattatcataaaactataatttccaggtggtatttagctgtgttagtctattaggtgaatgcttttaaacattatgccattttctgttgtgctttactgaggaaagtagtgactcatgagtagctgaacaagactgatctcagtatgctggcgaaaaaatggtgaattagagtaagcaatcatattatcttcaacatttgcatataattatgcttttgcaggtggtattaacggagaaagactcagaaatagctgaaattgaagcagcatcaacaggtgaagctgcccggcttagagctgctctggaggagatgaaaggggagcttgttcatctaaaggatgaacatgtatgtttctctattctgtactgaaacatgccattgctgtacaaagttgagcatcatagatgtcaaattcgaactggcggatatatgagcagctgtagttctagacttgtaatgatgattagttttatataaactacaaactatggtaatctaaaattgatgagattagtgtgttctgaggatggcgtaattgcacaaaaatcgctgaataaagtgatcttgcgtgacttagaaaccctgcccattattcagagcggacaaaacgtatgtaaacttttagtacatgatggtagccattgtttaaaaagatcgaaacagcttgtagacgtagacctgacttgaatttaatttagtcttgcttctgtttggccagaagatcagttatgatgtgtgtgggaactaagtagactttgtctgacttctgcaattactcaggaaaaagaaaggcaaagctgggagtctacttgtgaatctcttaggtcaaagctggaagcatcagaaaatgcatgccttagatctgaaaaagaatccgccgaagt

SEQ ID NO: 30636 - DNA, 632 bp, Zea Mays
cctatgatgatggcgaggacctggtcataagtacctaagcaagtcaaagactacaatcttggtgcaagctctggaccacaacaatagaggatagacagtgggccatggacaagtaagggcaagacttcgggagagagcttcttggtaaggcttgccattggcatacctagcacaaatgaccctagtgaaggtgatggtgattacgataatgatggtagctacagggatggtggaggtgagcctggaacaaatggtgttgggggtattcatgtaggagggagtgatgtaggggattggagattcaccggagagagttagttcacccatgccacataggattcagatcataaagcgccacattcgtaacacgagactagaagcgaccgacgtcatttcgtttgccttcttgttgatgatggaagccacaactcaatgagctctagttacaactatccgactcgcacgatcaaaacttagccctttatgcaagttcatcgcctcttggtccagtacgaccatcagtcatgtatgggtatggagaaccacccactctacctgcatatgcatattcacttctggcgcccgctccgacacatggacaaccattttttggtattaaaaacatggatctg

SEQ ID NO: 30637 - DNA, 293 bp, Zea Mays
gcatcgtatctatcggttgtgtttgtttgtgtgcgcgtgtcaagggtggtggtggtggtgatcaagacgatccaataattaatagccccgtcggagaggtagtgcgtgatgttgagtgagacggagaccattaatacccgcgtactcatccattgggtcgattgggagtttcgttctcagctggacgctatcgtggtgttgagtgagacggagaccattaataaagcaattgtaaccgcccgctgcgacgatagggaaggttgtcgctctacgaacacgtagttctccctgcg

SEQ ID NO: 30638 - DNA, 456 bp, Zea Mays
cagaaagtcctagtttgatatttttggactaataattaaagagttatgattaaaacaagtgactgctgtattgctgtccaaaaattctgcttgtgcttatttagtgttagttcaccctttttggctaaaaatggttggttagcactaaattaatgtagatttgccatgactaagcttaatactgcacgtgtgtcatgttttgtatgtttcttgctgtagttgattgtgatatagaatttgcatagccgttgatgcctgtcatcggttaaacttgtgttggatgcttttgtgtgataaatagaagaactaatgaaaagctgtagcaaattaaataaacgcttgtacttatggggtcgtatttgtgttgcgtaagtatatgaaatgtttgtcgtcttttagtggtgttaacattgtgcgctcgatgataggtagttagctaacgctagtgtgtgtggt

SEQ ID NO: 30639 - DNA, 291 bp, Zea Mays
atctattggtcccaatccccttgaatattgtctgctggctgaacctggacatcgccttctggtgggaaattgagatcccacccgcagcaggcataggttgacccagaccttagaactcgagggggagctgttgaccatcttccggaaccactggtaccggatcttcatcttggggctggctcccagcaaggtttgctaaatgatttcacactgcatcgtccacgagtcaccgataaagccatcagcttccgaaaaaacaatgaactgcgggacctcctcgagagatgtgac

SEQ ID NO: 30640 - DNA, 437 bp, Zea Mays
gagatgatgatcttgcgagtggatagatcaaggcaccagtagcccttttgagaaggagggtaaccgagaaagacacacaccgtggaacgaggagacaatttgtggggggtcgtggcactgaggtttggatagcacaggcaaccaaaaactcgaaggagtgagtaatctggcatcttgcgataaaggagatggtagggaataccgttatgtatggacgacgaaggccgtcggtttgtgagaaacacggcggtggggagagcctcggcccaatagggaggaggcatagccgcatggatcagaagcgtccgaacaacattgttcagagtgcgaagcatccgctcagctttgccgttttgggcggatgtgtaggggcacgaggtgcgaagaaggatgccacgggcagccaggaaggcggcggtggtactgttaatgaactc

SEQ ID NO: 30641 - DNA, 964 bp, Zea Mays
cgccaccttcgtcctccaacattcttggtgctgctaaagaaatggctttttgcagagttgatcctacgccgttcctcccccatggcttcgtggcgcagcaagtcgatcatcgcgagataatggcacgtactgttactcgtcctcaaccttcggcgcatgaagattggggcattgtgcttgttcaccccttgccggagcatgaggtcaacttccatatcttcgatgatattatccgtgagtatttggtggaagtccggcgggtccaagtccggtgcatccagcgctctcatctggggcaggctttggtgcgattcaggttcgcgttcgacagagataacttggtggctttgggcccccagcaagcactgggattttcctttactgttattcgccacaatgagggctggaatcagcgtgccctaacctttaatcacgaatgttggctgattctgcttggtttccctatggatttctggactcatgaacacattcagaatgcggtgggtgcttttggaagggtgctcatgtgggaccctgatcctaacaatgctactaggctgttggtccgagctagggtgacttctctgcaggaagtaccacagttcattgtcttctctgtggctgatggttttcagggtgtctcttggacggttcaatgtgacattgtgcaacagttcatgcttggcgcccaacctcaggatgaggtccccgtgcctccatacccccatgatggtcaccagctcctggttgaattttttggtatgggacagccgatgccaaacttccatttccagttcgacctcaatattcctcccgaagatggaatcaatgctgaggaaaatgttgctgccaatgctgatgatggctgggacccttggcctgttgagcaggctcaaccccctgtgccagaggctgtaccaaataatgttaacgctgcgaacaatgaagaagagcagttcagcta

SEQ ID NO: 30642 - DNA, 621 bp, Zea Mays
tgaaaaattctactgctattacaataatgagaactcatctcatcacatcataaaaatgtttatggctttagagccatgcatgcatcatacgatagaccaaatagttattacagaccgattgttcattacaaaataaagggtactgcataaagggtactgccataataaagggtactgcataaagggtactgccataataaaccttctccccctttttggcaacaagaaccaaaaagagagagagacgccagtccaaggatcaccagttgggaggaggatgatgaggagcaaagaggtggtgcgccaggtgagaggcaaagtgttcctccccagactggtccgggggagaagcactcccagaaggatcctggggcggagggtgagaggacgattggcccggatccccgtgatacggaggcgggacaaactgctcacgatcatcaaaataagcttcttcttcttcttcgtcgacgtcgtctgctgtcataaaaggcaccccgtatgcctgctggtaccactcgttgatctccggaggaggaggatggagaggtacgtcaggtgagcggggggcgaagggagtacccaaagaggaagcttgacgacgtaggttgtcgtcagtct

SEQ ID NO: 30643 - DNA, 701 bp, Zea Mays
tggcttgcaacctcttttgcattctggttagtggaatattgcaagccattattgctaatgtcgctgctaaaccagcccaggccccgacccctaagtttgtatggagcacataaacagctagagaaagttgaatgggtagcatccagatatagtttgtataccatataacatcagttatcctttgtatatccacactcatgtagtttatgatctctccactagtatgcttctgccttgaactgcaggataagcgaaggcccttttgatagatgtgggatatcaaagcagctcgcagccgcatcccaagctgtcgagctccaaaaatccactgcctctgtgctatggtctccacaactttggcacttagaaaaacaacagcgagaatataacctcttttgagtccatattgcctctctcctccaaggaatttcaccaaatcattaatcagtgagggtccgacataggatgcgctggcacttaaaattgcaaatcctgcattgataattgctttccgtcctataaatagaaacattgctctatagatcgataaagtacttaaaccatgcctgtgttcaacatcacctatgatctttttaaatgaatcagaaagaaactcagcagcgtctttgccatcaacatctggcacctcattcttctctagaggtttcttgtatccgatagaaaagacggggttcatccag

SEQ ID NO: 30644 - DNA, 448 bp, Zea Mays
ttgctctgttttatggtcagaaatgaagatttttagcttacaactgaagatttttatgctccaacctggactgcgcacaaatgaaacacataccatattttctgtgtgtgaactaaaaaggaatactgtgacttatggtgcccataattgtcataaaaattcaaatcgcctaatcaactcaccaaattaaatcctctaatcaactcccctaatcaaatcccttgatttatgacggatacatggacatgggggttgttagttggtatatatctaacactattttatgctcaaaactgaggattttacgatcaacgcatcagagttatcaacgtttctcacattggctagctatttactctcaaaatgaaggtttttacgctcaaacctgaaggacgaccattagcgtcccacgggcgcaataaaagggaatttcgtgatttatgatatc

SEQ ID NO: 30645 - DNA, 890 bp, Zea Mays
cgataaaggagcatctagatagccctgtaatagcataaaaacattaggacataaaaacagcttatgtcctaaaccctaaatattgaagatttcaatagaagtgacactctgcaagagaaacaatcgttcttgtgtgcacttacatcaatcaggatgtttcaggttattcatgaataaaaggatgctatcgacaccccttctctggttatttcagctctctagataagaaactggtagcaataaagtttatagatataaggagtaaatcaaccttactttcttacaatcggcagtagagattgtaaggggatggcttctctttatttatcagctaggataatatgaggacattgcctggctacccatctcatgtcctactgcaattgtcttagattcacacctgacaccacttattttaataatttgacatgctagagaaagattctgattccagatccagctacagcttccatgttgtctacaacatcacaacctgactgatttggacaccttccataaacagcagtgggtacatataaattcaccaaactccaagacccaactcgctaaagcacacttctacttgggccaaaataggagactgaaaagaactcgccctactcgctccttcttcccctctcctgtctcaacccttgatctcaacacagttgacaccagtacggtgagatgaaggtcatcatgaagatgctaagggctccagcttccagatcgaagtggaccccaccaacaaggaaccaatctatcgctatggttctagttgaacattaatagaactcctggcaagtgattgctagaatacctaaatggtttcctcaaacttagattacagttaagattatattcttatgctaaacaatttggttattgcg

SEQ ID NO: 30646 - DNA, 372 bp, Zea Mays
tgaccatttacattccatatgggaatgtgttctcagtgcagaaggacaagactagaagacttcctcaattttgggtgggcaggagctcaacattcagcactaaattgattcgaagctttcatgattcaatggtgtgggagtgttctgtaagtgcagcggaagcatggtggatcggtctgcaaactatggtggagcagttcggagagcagtggtcagttactgagcaagagaaagaagagcagcaatacttgtttgctatccaggatcatcctcgactgtggaaaattgggggttgttttccctgtacagcacgatatgggtataacaatgtggtattggttgtactggtgctcaacgggattgtggatttag

SEQ ID NO: 30647 - DNA, 397 bp, Zea Mays
gtggagttgcgtaataccctacttcttgtggtggttctggtattgatgtgaggattacaagctgagagttgggggtgttgtaggataagatgagatgaaatggtaggggattcctcccggccttatatatgcgaccagggagagttatcccgtacaagtgataactactatctacttgcttatctcatggtttgtagcaggctatatccctacatattcggagtccttctcgcccattcacccgagctatcactgagggcttatcatgtaaggtgatcccaacagtaccacctgatacatccgtgctcctgtagcacttaactcgggtatcgatttctgtcggcttagatcgggcctgcccagcctggctatgtttagctagcccatcccgctggac

SEQ ID NO: 30648 - DNA, 449 bp, Zea Mays
cggggtggcacaataagcctctaccacacctaggtgggtggtgcaacagtatagtttagctacgccatgggtccgggtttggcaaggctgcaacatgccgattcaaaaaaggctacaatatgcaaaaaaaaacaaactatgtctatgtccggcttgtggcactaacacatataattcaaatacaattcaataacacatataagccaaagtcaaatgcactaactcatacaaagtcgaagtcaagtgcactaacacatgtaagttaaagtaagcaaaatgaatcagtcaaacatataatgcataagttatcagggaacatgtcagatgcaaaccaatcacttgagacaaaccatgtaaacaatcatgatactttttcaaaacaaccctcccaccgtgtgtcggcttttaaaacggcccttccacccctcctgatatattttcaaatacac

SEQ ID NO: 30649 - DNA, 426 bp, Zea Mays
gtgtggggtaggacagatttccgccaacttcactcggtgtttgcatggcctgagcgaagtcaggcaacaagtttcggggatgaggcgggtcatcacgccggtgcctggcattatgttctgcctgttcccattcgtgatcctaggtgaggtggtggcctcgtcatcggagttccactattcgtaaaacgccatctcattaggggttcccccgcttcatacgctttatcccgagaaacgagctaggtgggatcccattctccagttgtgtggtgacaccgagcattttagcgccgatttcgatgatggagtgcctcatgctacgggggctcctccccttgcaaggtgggttcgtcgtcggagggagtgtcttctattcttccatggatgaagaggacatccaggaaataggggcatggagccaccccc

SEQ ID NO: 30650 - DNA, 701 bp, Zea Mays
tagctaccaggacttagcggtcagacaacttctgctgccttttgttctctctggagtcgtgctctctaaaaattaagttgatcactctatcgattcttagggaacatttagctgttgtcttcccatagtggtggttgtggtggtgggttatggttctgccttgcaggtggtggtggtagctctaggaatggtcggccatggccgattgagttattgaactccctacagttaaataggttatggcgcatctccttgtggtaggtaatcgaggatctcgtctagtgatctcatgttgttgttgttgccatgaggggaaccatgctaccatgcgggtggctgtcccatggcattgacttcttccctcaacctcttgtgccagcgtcggtcttaccgcagggcatcttatttattcatggacatgtcattttcactagtcgatgaggtcgtgggctcgtttgttggtggtgatgtatctgtcggtgtcccagaagagttgctcggaggtcaccaaagccctttggaggatggcctatacgcaagccacatcatgagacccccggtagaagtcctcactcactacctcgatgatgttggggatgcggttcctcatcaactgaaaacacttcaggaacgagcaaaaagaattgtcctccttgcgcttgatggatttgaggtcccatggttgcatcagcttatcggag

SEQ ID NO: 30651 - DNA, 569 bp, Zea Mays
cgggaccgggagagagaggtttttacttaccatggctttgggtagaggcggtagagccatgcatctcgttctcgccaggcgccacctccatgcccccttgcctgcctcccacagtcgtcccatatatacataggggttgcaaactgcagagcagcggaggcggaggtggggggcggtgaggtcagtggtcacagcgacatggaccgatcggtggctgcttgccatgcattaccacttccactgctccgatccatgcatcatatcctgggtcgctccatccatcccgagctcgatctagcacagtagcagctggtagtagctagggctctcttgccgctgcaggcgagagaaggaccacgcacgaggcttgctgcatcggtgttccgggaggagaacacggccgcgagttattgctgctctcgtttgctgcatcttccatgtggagtctccgtccgaccgacgaggcccagaggtacgtacgtacgtaacacacacgcacgctgctggctggccccgggacgatggatggaggtctgttcgggcttcggcggggaggctcggcggagcgg

SEQ ID NO: 30652 - DNA, 403 bp, Zea Mays
tacattgtttggttctctttttttagcttggcccaattgggttgccaacagttttcacgtgtaaaatgaagctcccgccaaatttaaaaattttaaacgctattaaacaaattacaacagatttgaactaaaaatatgatttttacccataaaatgaactaattgcaatcatctaaatatgatttacaatcatttgaattacaatcatatgaactatagtatttgaacaccagctgatacatcttgacccataaacagaaacagacaaacgtgataaatatgaataaactgggagagcaccagaaacagccagaatcatttgaattacaatcatatgattttgacccataaacagattgaattacaatcatatggatgaaaacaccagactatgaaacagact

SEQ ID NO: 30653 - DNA, 354 bp, Zea Mays
gatcccagtcatggctttaagtatgtccgttacgttgttcagcagcacccatattctcttgccgcatggaattcctactataaggtggtatcaaggtgactagttagaatacacattgttctgtattatgtattacagtaatgatgagacatttatggatatatgtacaaaaaattggtttggctgatataataacttcttatagccttgcacatattatgtataagttgactcactaattctttaagatccaaatttactaggaggttacttcaactgctggtatagtattgttgaaaggctgatggctcattccccaatctttgaatttcgaagttaagagtgaaaagaacc

SEQ ID NO: 30654 - DNA, 344 bp, Zea Mays
atcaattgaaggtaaaaagatattagaaggaaatccaatctctcttgccaaccgtagacaaagttgtgcaaccgcctcctaaccccttagccacaacttctctctagattagccatgacgccttgcgccctatacagcctcctcacctccgccgacaagacgtctccctcccgtcacgtacaaccctaacccatgaacagtagacgcgggtaatgtagcacgagatactgcagcacgaaaccatgcccgacgcactgtagcactgtgggtactgtagtaccccaaccatccataacaacaaaaccttttagttgttcgatagatagaaacacgctgaaattcag

SEQ ID NO: 30655 - DNA, 486 bp, Zea Mays
agcaaaacgagtaagcggccaaataatatatgtggaattgctgttcaattcattatatagaagcatcaagcatgtaacattcaaaacatgatatctttatagggccatattgtccttgcattatgggcacgaaagaaatggtgataggcagtatacgatggccaaaatattgcgcaaagtaattgcaagatgctttatctttattgtgttttcgtgtcatagatcatcttgtaatgtgctctatgataaattcgtggttttggggctgtaatacagaatttagttcattactaattttgttatggcccagaaatactgctttcaagtttcatctacctcttatgtcctagagcaaatgtgctttttaatgatatttggacagccttgtaaacattgttgaggatttatgcctttggacaggggaattgactgtaatgtttctggaacaataacctggaaagttaattttcttggataaatttagga

SEQ ID NO: 30656 - DNA, 321 bp, Zea Mays
aatagaggagcaagcttcccacaccaccatagcgcactagaaagactgatggctggcaacgcgcatcatggcaaggtagcgaggccacagtggctggtcaactgatgaggacacggctcatgtgggtagcctcgttgtccagacgccgtagaggtgaggttgatgcgatggaggagcgcgtcgagaagctcatcgcctgagctaggagaaagagcgtgtgcgtgaaacttgtgaaatttccagggagccaacgtgcgtagcgagcagaggtaggcgaggatcgctagcaagagcacgtagtggtggagggactagcactct

SEQ ID NO: 30657 - DNA, 353 bp, Zea Mays
ggcagattccaggctgaatatgcaacaggagcaccgatattcgacaccttgcctctaagaatcatctcaagccggcttaccagatccatagcaggaatccttttgttggtaacccgggtcgaatcagtgaggccacgatacagataagctaggtacgctctgtccttcagtggctgaatgttcttaaaaacaaaatcggcgaccacagcctcggcagtcagacccttctccttcaacaatccaacctcggcaaggagaaccctagcctcagctatctccaagtctgtgggggattcagtccaacttggagcgcgaacatccggctgtctccctgaccgagggggagagaattc

SEQ ID NO: 30658 - DNA, 594 bp, Zea Mays
tcaacagcgactgcttgcccaatttgtcttacatcgttgccgatccatggctcgtggagggtagcttgactgacgcccagggtcgtggtaagatttctatctcgaagtttgctttgccctccgattcaggtagtgacggtcggatcgaagctcttgcgctgggtcgccgaatctctgcgtaccggtgatctgcgccgccttggagctctttgctctgagccgcatgggtgtttggaggaagacggcaccagagccgtggattttggtgatgaccggttaggattagatcagggggcaggtagagtttgaccgttgattcgagaatggatggacggatcgttgatgggcgagcggggctgagcgagtgcagcggggaccgttggatcccagatggagagcagggctttaatcgcagccatattaaatcttgtgcgtcgatcttagatccgagggcttgcgttccgtaccgattcatttaaagatagatttaatctgcactgtgcgcctctgatcgtgcggctgtaatcgctccataccccttcggttgtgcaaatattcaaaaggacccctgatctctattgatatagacccgcg

SEQ ID NO: 30659 - DNA, 309 bp, Zea Mays
atcaagagcacctaaggatactgaaacgaggaaccagaggacatgaacggacctgtagcacgctggccacggcgaggtcacttcgcgcggtgctctggaccgatttgggggaagtttcaaattggcgagctctggtggatgatttgaggcacgagttgatggattgggtgcttgactacctagcgaagccgactgcacactcaatttataggctctgggggcggtggctcatgaatttgcgatggcgtggtggtggctggagagaggggagagtactgtcgcaagagattggtggctttcactgtggcg

SEQ ID NO: 30660 - DNA, 1520 bp, Zea Mays
gttggatggagagttgcctgcttccctgtcaagttgtccactgcttagggtaatcagcctgaggaacaactctctgtctggcgagattgctatcgacttcagccggctgccgaacctgaatactttcgatattggaaccaactatctgagtggcgctatacctcctggcatcgctgtgtgcaccgagctcaggacgctgaatcttgcaaggaacaagctcgtgggggagataccagagagcttcaaggagttgacatccctgtcgtacctctcgctgacagggaatagcttcaccaacctggcatcggcactgcaggtattgcaacacctgcccaacctgacaagcttggtgctgaccaggaatttccggggtggcgagacgataccagtggacggcatcagcgggttcaagagcatgcaggtgctcgtcctggcgaactgtttactcaccggcgtcatcccgccgtggctgcagagcttgggaagcctcaatgtgctggacatttcatggaacaagttgaatgggaatatcccgccatggctggggaagctggacaacctcttctacattgacctgtcaaacaactctttcagtggtgagctccctatcagcttcacacagatgaggagcttgacttcaactaatggctcgagcgagcggtcgccgacagaggacctcccattgttcatcaagaggaactcaactggcaaaggtctgcagtacaaccaagtcagcagcttcccaccgtcgctcatactctcgaacaatctgctcgtggggccggtcttgtcgagctttggttaccttgtgaagctccatgtcctggatctgagctggaacaacttctcagggccgatccctgacgaactgtcaaacatgtcgagcttggaagtgctgaatttagcccacaacgatctcgacgggacgataccttcgtctctaacgaggctgaattttctctccatgttcgacgtgtcgtacaacaatctgaccggagatatacctaccggcgggcagttctccacgtttgcacctgagaattttgacggcaaccctgccctgtgccttcggaactcttcgtgtgcagagaaggactcgtctgtgggagctgctggacacagtaataagaaaaggaaagctgccaccgtcgccctcggactgggaactgcggtcggggttctcctcctcgtgctctgtgcttatgtgatcgtgtcaaggatcgtccattcaaggatgcaggagcgcaatccgaaggccgtagcgaacgccgaggactcggagtgtagttccaactcctgcctggtgctgctattccaaaacaacaaagagttgagcatcgaggacatcctcaagtccaccaacaacttcgaccaggcctatatagtcgggtgcggcggtttcggcctcgtctaccggtcgacgctgccggacgggaggagagtggcgatcaaaagactgtcgggagactactcgcagatcgagcgggagttccaggccgaggtggagacgctgtcgcggg

SEQ ID NO: 30661 - DNA, 310 bp, Zea Mays
gtgagcccagggtcgcttggttgttagattctttatagcggatggtgcgagcatcgtggagcccgagcgtcatcatttgagctacgcgacccctggcctccatagcctgggtctcagcgtgacttgtcttgttgtgcccggcaagcggtctacgtactcagacatagtcccgacaggttacgagtgcatcgcagaccaggggacacgtggcccataaatgtgccgcagtctggggggttcgaaggttatgagtgcatcgcagcccgaggggctcgtaagccatgagtcgaaggcggtccggcgcctctgc

SEQ ID NO: 30662 - DNA, 357 bp, Zea Mays
tgcaccgtcgtcctaggttgggtggggtgagagatgataacggaggaaatcctggtcgttgattcgagtttgggcggctgcgattaaaacacaggtctaccggttcggtgaatctgatcgcagccgttagctaggaatcggacgcgtggaaaaccatctcgagcaatttaaatttgatccatagatcttggatctggcggttgggatcgtgcccttgcgtatctgattgcggatcaattttcgcccgttggatcgggatctaaggctctgtaatgcataccggttcgaggtctctttctggcttggatatcagatccaatggccagatcgagctcgtgtttatgcggtcgcataact

SEQ ID NO: 30663 - DNA, 286 bp, Zea Mays
gttccttctctgcaagtttggctcgacgaaaggaaagtagtagttcaattggtccagcaacagctagctcgtgcacaacttcgtcagaaaacacaagctgacaaacatcgtactgaaagaacctttcagataggggactgggtctatttaaaactacaaccgtatgtgcaggcatccttggttcgcagagcaaatcacaaactggcgttcaagttctttggtccttaccaagtcattgcaaagatcggctctgttgcctacaggttaaatcttccagactcttgcc

SEQ ID NO: 30664 - DNA, 572 bp, Zea Mays
cgcctgcagggcacaacgagacaagccacgctaagacctaggctatgaaggccaggggtagacaaagctcgaataatagcgctcaggcaccaagctgtccgcgccgtccgccataaagaatatgagacaaagaggcgacctagacgatcacggatgagcacgacttcactagggtaagatgctctattttaccatcacctagtgactccttctcaaggatcggaagccaccattggacgaccccctttggcctataaaaggaggaggttggccaccggacaaagaacgaaccaacgaaaggagggaggacacatcgacgaggacctgaagaccagagacctatcgccaagccaacacttagttaggactccacctctgtaaccctcatttttgtcgaaaatagctatgaacaaccattttcctaatgctcaaaatgtcaggtcatgctagaaccaacaccgtaggcaccacgacacaacatgcatacgaatgcgaagtcgagtgatgtgacttggctgagggagccaccactgcacaagaactatcggaggtgctccaaatcatcgatgaat

SEQ ID NO: 30665 - DNA, 724 bp, Zea Mays
tttctaacgaacttggggctcccaaggaaaaaaacaaacaaacagcaccaagtgtgaagaaaacaatcaaaaagtcaaaacctaccctggcctcagccctacacccccaccagtagcctgcacttaaaaacagaagagatttgcacagctgcaagtaccaatcaccaccgttaacctctcgtagaaatatatgacatggcacaacaaaccaaagaaagaaagaaaaaactactcaaaggacagcgaagaacccctctcagaacctcgaataaacacaatcagtgaagatcgcaagatctttgggcccatatctcccaaccagcaatggttcagttcctgacttcctgctaccgcatagacgcatgcaacgatgggtgcgttcctttccttgtcgttttagctcctcgcaagaacgcggatcagaacttatagcagaactcgacccccaacaaaccagtgctgctgcggcattgcgaaagaagcccgcgagatccaggccagcggcggcggggggcaagcaaacgccgagacgcgcggcaaggaatgcgggacggaggggaagtgaacagaacccgtcggtcgggattaaagcgaagaatgcgcgaggaacaacggaggacatgacgatttctcaccaggaggaagcctgggcgcgcacggaggcggcggcggcacggggcgaggagggaacggccagggctttttgcctcgacggggtcgggac

SEQ ID NO: 30666 - DNA, 526 bp, Zea Mays
tgagtgccatatagttgggtagttgggttctcttttcctgctccctccctttaattcgtctatgcttacctcttttctctctctacccttttcctcttgtacctgctcagttggcagagtctgagtcgaatcgaagaatccatgtgccaaccttgttttcttgctagtcttcccttgaaacacaataccatcaacctatccctgtcaaaatacaacaccatccttgtttcacgctagttgtcacttcttttctattataaatgtctaaatgtccttgtttcatatttgcgctttgtatatatcatgaaccttgtgaaaccttgtctcactctccctttttcccctacttagatgatgaatcctaataaagataaagtggagaatgtcaacgacaagattccaaccccaacagtggtgaaaaggaaagatgagtctcatagatatctgctgaatggaatgaagaacaacaagaggaccagaaagatgtttgggtacaagattaaaccacctcaaccgcaagcagaag

SEQ ID NO: 30667 - DNA, 369 bp, Zea Mays
taaggatggtgcgtcgtaggaacccatcagttgttgaatctgactccgatgatgatcaagaaattcgtgaagaaacttctccgcgttccagatctaattgtgggtgaggatccgaaaatgtgatgcaaggtggtgaggcctcagggtctcatggtgctcgcggtcgaacagcccagaatccctctggtcggtctcgacctgcggccaatccacaggcatgggagccaactagcaatgatgacggaggcaaggatgatgaagttgacctcccctctgccaacgcacccattatccgggggttggttcttcacagggcggaggctcgtcgatctgcaaatgagcctgtcacagatttcactgccagtggag

SEQ ID NO: 30668 - DNA, 283 bp, Zea Mays
ggtatgtaattataaccacacgatcgtgatccgatggcgcatgatcaatagatcgaaagggtacgctcaaactaatctctaccgtccgttaagatcagacggtcgaacggcctgcccacgttctccggtcacggcacccggtggcgccctgcttcccccaccgcagagctcgccggagcatggcgaaactacacagacaagccctaggtcctaatccacagtgcgcgatacgtaataaaggacctggcgaacacagggagagagtcctcaccatacatcgttg

SEQ ID NO: 30669 - DNA, 376 bp, Zea Mays
atggattgaacgaattcttttggtgataattcgaggttatgtccctgagcatgtctggctagcacttgcagagttaagctatttcttccgctagctttgtgcaaaagagttacctcagatagtgattgcagacttgaaaagattacgctcgtgttactgtgtaagcttgagaagatctttccaccccgcttattcaatcctatgcagcatttgattcttcatctcccgtatgaagcacgaatggggggcgtgcaaggacgttggtgctatccattcgagagatgtctcaagactattcaaaagaaatgtagaaataaataaaaaatcgaggcttccattgtagaggcatacattctagaagatgtgtcaaacttta

SEQ ID NO: 30670 - DNA, 531 bp, Zea Mays
ctccataattgcggccctaaaatatgggttatcgacctttcgatccgggatgccaatggcatgacaagcctttgcctaagccctaccaagaatctctttcgagctccttcccttacttgtccagggaccagtatctatcatttgttgccttagtccataggctagcaagattgtagtctctaacacgttcaggtacttgttccctactccttcccatcatcctatcaagtggcccttgagataccctctggctggaggatccaccacccctgtcataccttgcaccagccctctgactaaattcgtgctccacacgtgactgatgcagagccgctttaagttcatcttcatactcatcgttcccaaaatgggttcgtgctacctcatctgccctcagctgctgcctaaacctagaactcttcttttcctttgtcctatctatgtcaagttggaagtatgcctttatgtctagaggaacagagagacatttcttgacattcttccctctatgcgtgagatgctccttcaatc

SEQ ID NO: 30671 - DNA, 560 bp, Zea Mays
tggattcacgccagtgaggtgattcgtgctcaccggtgcctggataacgtctcgcagtgaaaagatcaccacggatgagcttaagacactgttccgtccggccgccgtgtccgctctgccccaatcgctttgaatcaaccctcgccagagttagacacctcgcggtcttgtgccacgtgcctcggcactttaaccacatcgcagtgagtcgcgtcatgcatgtccagtgatcgccggtgagtccgccacggtgaaagccactaatcgctcgcatcaatgcaactctccttctctggccgccaccgcgccattccaaattcacgcgccaccgcccccggagcctataaattgagcgtgccttcgggtccataaggtagtcaagcacccaagccaccaagccgtgcctccaattgctcaccagagctcgccaatttcagatttcccccaaatcagccaaaataccgttgtgtgaacacctcgccgtggccacccttctgcaggtcagttcaagctttcttaattggtgttctagctttcctcatgtcccctgaagctcaccg

SEQ ID NO: 30672 - DNA, 415 bp, Zea Mays
cgggtatttgcccgggtggtcgaagttgagccattgatctgcccgagtgaaggtgattgggtgctccgaccatcggtacggagcgggtggaccggtggtcgccaccagtatctgacgatcgttgagcttttgctgtcttttgttctcctgcgatctgtgtccgccgaagatgacgttgacctccctgtcaacgcgtgggaaagctcctcctcccccctcctcctgctgctggggttgtcgtggttcttctggtcctccccacggcggaggaggtagaggttggaagggtcggccgtgcccaacggaatgcttgaagtcccggcagttccgaagggtgtggcgcatgtccttgtggtacgggcactgggcgtcgaggatgtcgtccagtgtgcgctcgcccccgcgaggtcctccc

SEQ ID NO: 30673 - DNA, 282 bp, Zea Mays
agctgtcgccgggcacgaagaccatccaataccgtgtcctcgatctcacatataaggaagtcaacaacatcaaactctgaatgagagatcagggcaccgagtagccagagctggatatgagaggtagcctctctataacccatctggggcagaagcgtccgtctcatgagctgatataagtacttggccgctggagtgaaatctaccggtgagcgtcgcgacccatctatgaaaggcggttggaacagggccgcgacatgagctgtagctggagcaactccg

SEQ ID NO: 30674 - DNA, 408 bp, Zea Mays
caaatagtcatggcacagatcggtgacaagggtgttcaagtcattaaggaaatgatcgaacagaaggtggataagtacaaatgcttccgtcaggacagcaagggaattctatggtttggagactgattggttgttcctaaaaatcccgagctcagaaagaaaatattggatgaagctcacctttccaaattttccatgcaccccggcagtaacaagatgtatcatgatctcagatccttgtactggtggacccgaatgaagagggaaattgctaaatatatatctgaatgcgacacttgccagagagtcaaagctagtcatttgaaggtagccggtaccttacagccccttcccataccatcttggaaataggaggatatttgcatggattttattgtgggattaccc

SEQ ID NO: 30675 - DNA, 278 bp, Zea Mays
ttctccatcccaccagcacaccatggcttcttcccacatggttaactcatggatgtagtgcatgacaagtaatttctaattatcatacatactactgcaggaactgctgtgggacccataaccaggaattgtcaatcctaaatccagtttaacaatattctctttgcatgcaaactatatttactgctatgtgtcaccattacaataaataaatattacacaacagattgttgtacaccacagaaaccaccattgcgtaaagctaagactacaggttt

SEQ ID NO: 30676 - DNA, 353 bp, Zea Mays
aggatcgttgtcgcacgaccttgtcgtgatagcgtctcagagtctgctggtaccgtgccgcttgaattactgcgttcagccgctcttcttcgagtacatcgacatcttccagcctggtcgcttcggcctctgctatgctttcaaagatcaaccttggcgccccaaacttgagatcagcagacagtactgcctctgacccgtagaccatgaagaaaggagtgtttccatgcagggctcgactaggttgagttcttaggctccaaacgacgtaagacaattcccttatccactttcctgcgaacttctcatttttatcgaagaccttttttctgagtgcctccaatatcatcccg

SEQ ID NO: 30677 - DNA, 466 bp, Zea Mays
caaagtcaatgttgtggcagatgctttaagcaggaaggtccagtgcaattgtatgaacatggatgcaaggtcaccaccctatgtgatgagttgtgcaagctgaacctagaagtcgtttcctccggtgccttaagttaaatttcagtggagcccaccttacatgagcagatagtcatggcacagattggtgacaagggtgttcaagtcattaaggaaatgatcaaacaaaaggtggacaaatacaaatgcttccgtcaggacagcaagggaattctatggtttggagaccgattggttgttcccaagaacccagagctcagaaagaaactattggatgaagctcacctttccaaattctccatgcaccccggcagtaataagatgtatcatgacctcagatctttatattggtggaccagaatgaagagggaaattgctaagtatatatcggaatgtgacacctgcc

SEQ ID NO: 30678 - DNA, 739 bp, Zea Mays
cgacagatggagtacacccattgggatcagcaacagacataccacacccattggggtcagcgtcagtaaattcaggcacgggaaccccctcagcagcaggaaccgaaggaccagcgccccgatccaaactagatacttgccgaagacgtctctttttctttttctgctcatcagcagaaagatcaagttgattgactcggcaaggacgtctcgggcgaacactgataggtctctgaacatccaaggttgtaccagcttctaggagaggcgccaccgccaatgtcccagcaggagcagcatcagaagaatcttcggctagcatatcaagcataacacttatttctgcatcattaggatccaaaggcacctcaaagtggacttgtcgttcatcatcgggaatttctccaatcgaagcaaccaaagcactaacttcttcagcagagggtcgcactctaaggcccaaactgccatcagcgacaggtggattcgacacaaaatgagtaaaagccttggaaggaggcaagttccaggccgagtatgtgataggggcaccaacattggacaccttgcctctaagtatcatttcaagccggctcaccaagtctacaacaagaattcttctattggtgacccgggttgggtcagctaaacctcgatacaagtaggctgggtatgccctatccttcaacggttgaatgttcttaaagacaaaatcggcaaccacagcctctacagtcag

SEQ ID NO: 30679 - DNA, 334 bp, Zea Mays
atttgaattttccatgtgtatgggccattcattacagctggaatttttttaagaatctttgtaaactatatatgtcatgtcatttatgaagaattcgcaaaatttttactcagtcaattttccgtatagggtatggcctgtggacgtataatgtgtatcaacaataatccttgatagtagtcatgttggcggtgatactttttatgcagaggatgacaatgatttgtaatggttcaccttaaccttcaacctataataacgtctcattttgttgatactgccgtgacttcataagttgtacgagtaggagatactgccgtgacttcaccttaac

SEQ ID NO: 30680 - DNA, 1302 bp, Zea Mays
tccagttgctcttacattaattggtggagtgcagcgtgttgatgcttctggaacaaaggttcgtggagaatcccatatgcttcttgttggtgatccaggtactgtattcatgacgtgtatatagaagtagcaatttatctatggggggctgcaaggttggatttcttttgagagtggacaggagttgtgcctataatccaaggggaaacacaaaatataggatatacacaatgggcctagggactattgcacagacatggatgggcaagggtgacagtcagaatccaacttggactccagtcatttcagccatagattttggagttgactggaataattttgaactcgaccagacatcataattttttgtaacaacgctgtcatgatgacttgatgaggtctgtgttgggtgtattggataggagagggtagtaccgtagtagtaagaggtttctggacgtgatcctggaccttgttaacacaactggggaaccgtggttggctactgcaccagcgagatgggctagagaatcacaatgagataataaattgaaccattgcctaaatatggtgggtgctccggttgttaatgtacgcaaaaagcttggccctaactattcatgtaaaatgaggaaaaacgttatttagaaaaggaaaggcaaaattgcaactatattttgttctactgaatttcaggtattggtaaatcccaatttttgaagtttgctgctaaattgagcaaccgatctgtgatcacaactggtctcggaagcaccagtgctggtttaactgtcacagctgtaaaggatggtggtaatatgtttgtcatagcattatgctgttttttttaattttatctgcatctaataacacttttgttcccttttttgttgcgatggcggtggtgggggtgtaatgtcaggggagtggatgcttgaggctggtgctcttgttttggctgatggtggcttatgctgcatagatgaattcgacaggttatcaatcgccaattttctatttaatactgtttactagaccctgtttgggcagtgtcccgtacgcaccagacagtcacggcattgctgaaaacacggcgaacaattcttccactgaagatttagcaaaaaaaatctgccgcctactgaaggaaaagttgtggcagcctaacctgtgacaagatatggttgtgatctgaacaacggtctcaacttatgtaccgaattttggcgagatgtggaagtgatcgaaatacgttcttatagtgctctatgattattgaattcaagacgttccaattcctaa

SEQ ID NO: 30681 - DNA, 509 bp, Zea Mays
tcgcgcttgcggtggatgcactcataggcaagaccgagggaggaacgacgtctaatttctcgccgtcgaccgctctgtgtcacgattccgccgtgctcgacgatcatgccttgactgctatcggttggtggccgagaaacgtcgcctagcatccctgaccgcactggtggtgtcgcgtccggaagatttggtgatcggagcgaggagaggatttctcaccgttctattcttcaccaccgcgccgcccgcacgcgggcacgaggattcgtgcgccaaccctccggtacgacctctggtatatgtccacccgcaccttcgtttcacataggttcagacagggatagttttgggtagtgggaaaatggggctccggggccgggcgcgctgctcgccggcggaagcaccaccgcggtactcgcacatctccactgcgggtgaacagaaggaagaagaccgtgtcctggccattggatcttttgccaacatgcatgattagatctgggtagtgc

SEQ ID NO: 30682 - DNA, 547 bp, Zea Mays
cggacagctaagcggtggtggcgcctcagcaacgttggacagcaattccgtggcgattttgtggtgctaaggtggactgaggcgatgaggaagcggtcggacctgcgcggcgggcgaaactgtgactcaggaaaagaaagttgatgtgtgggaatgataaactgcacaggctgcacgtcaaaaagagagctcgtcaccatgctgcttcccgatttcatatccatgttccggcctcagtgctgctcctcgatctgttcccgccagacaccattcctgacatcaagttgcagttcctccccccgcccggctgctgtgacctcttcctccctccgtgtgccacggtgagccgtaatccaaaggccagacctcctcgttgccagttgtcgtgacctgaagctaggcaagatctcctgttctcctcacgcctccgctctcctctgctcctctctcctttttctccctgtcatcttcctcctctgtagtccttcagtccttcctcctctgctcctctataaatttcagaggcatattattaaatccttccctg

SEQ ID NO: 30683 - DNA, 744 bp, Zea Mays
ccacgacccaacatcagattcctcagatgcgtcactactaagaatcacaacatttccacacaccaacatatcatcattcgtgttatcatcaaggtttgcttgcacaggcctagtcgccggaacctgcgcagcaaccgaccttcagtatcatgcacaaaacgaacactaacaaactattcctattacattttttcaacctgcgtagaagcacccgccgctgcaggaccctcagcgccaccttcttgaagcaaggatagctcctccgctcccgcctccaccgcagcatcctttcgagccaccgagctctcgaggccggcgaggtcctccacctcttcatccctcatcgcctgcgaagataacacaataacgttttagacaacgaacacacacaccaccctcaccaaaacccaaaacatacttgtgcccgcgctcggtcgaccctctctcggatgacaccgcgtccatgagggccccacatcctatcgtaaagtgcccccgcagagcgcttgaacacgtcatcttcgatctgcaaaacaccaacatcgaagtcctcattgactcaatcgaaggcctcaaagttcctacatccctcgcgggacaaggcattcgaagccccttcacaggtcacaagagacgcataggacatgaggcccatcacaatggacgggaacgactctagctcatcctacagccaccccaagaagcgggtccccacctctttcactgatttgtcgaaggggcagt

SEQ ID NO: 30684 - DNA, 523 bp, Zea Mays
gtcaagttcaatcaaaggagtcgtgaagcttgaggaggacctaaggacactagaacaatcgaccagagtgcttgaacgaacctggaataagctggccgcggtgagggtgtctctgcggtggcggaaaccggattgggggaagtaagaaattcgcggtctctggtgaacgatttgaggcaatacttggtggcttggtgcgtgatcatcctacggacctgaccgcgcgctcaatttatagaagacaagagcggtggccggtgaatttgggagggacgcgcggcggccggaggaacaaggagttactggcgagcgcgattagtgtccgactaccatcgcaggctccccggtgatagacggagggttacagcgagtcacggcgacgccggggatgtgccaaggcacgtggcgttcggtcgacgggcagccaactccgatgacttatccgaaccgaccacaaagcaaaaaggagcacgtcggctagccggataagtgcccatagtccaacagtggtgacgatcttttt

SEQ ID NO: 30685 - DNA, 378 bp, Zea Mays
cgctgtcctagaacccttgtttagcatttgcaatttcattttcagtttggctttgttcagttcgtgtccgtggtcgagtcgtgttgctggtttagggtgtatcttcgtcgtagatcaactgccctcgctagccgctatcgcatccaccattatccagatcacaagtcgatccacccattaatcgacttgccctcgctagccgccaccgttccagccctagatagattgcagatacgtcgctatcccgtccaccatttcccaaatcacaagttgatccaccccattaatcgctgtgattgcagatagggaatttttgccctaaccgccgttttctagtcgtgcctccaaaaacataacttgaggtaccttccttaaacc

SEQ ID NO: 30686 - DNA, 385 bp, Zea Mays
ttgctaccagggtgcatggagaattttgaaagatgagcttcatccagtatcttccttctgagctccgggtccttgggaacaaccaatcgatcttcaaaccatagaattcccttgctgtcctgacggaagcacttgtatttttctgccttttgcttgatcatttccttgatcatctgaacacccttatcttcaatctgtgccctgactatttgctcttgcaatgtgggttccaccgagatataacttaaggcacctgaagaaacaacttccaggttcaatctacacaattcatcacacagggtggtaactctcgcatccatgcttatacaattgcactgggccattctgctcaagacatctgccacaacattggctttgccaggat

SEQ ID NO: 30687 - DNA, 501 bp, Zea Mays
ggataacggagaagggtaaaaatcttggcactcggattgctcgggctcgctcaccgttgtgcccaccgtacccacttggaccgcgactggtcgggatcatcctcgccggcgttagccgctcaacgatcatgcgccacatgccttggtgtcttaccatgtcacagtagcttgtattacacacgtccggtgatcgccggtgagctcgccacggtgaaagccaccaattgcttgcgccagtgcacccccttctctctggccaccaccacaccatctcaaattcatgggccaccgctcggggatccaataaactgagcatgccatcggttccgcaaggtagtcaagcacctaatccatcaactcgtgcctcaaatcatccaccagagctcgccaattcgagatttcccccaaatcgatccaaaacaccgcgcaaagtgacctcgccgtggccagcgtgctacaggtctgatcatgtcctctgctctcttgtttcagtacccttat

SEQ ID NO: 30688 - DNA, 950 bp, Zea Mays
gcaggagcaccatccactttcaaaccggtgaaaccgaactctatccctcagaataataacacggcaaagtacctttgagattatcttcatccattcatgacagtcactgcaaacctgcaaattctttgaaaccattatttctgtccctggaccagtcttcaggacactataagccactgctagcttctcactatggaaggtaaggttttcttctctttcctcttcggagacatcttttgttactagttcagtcaatggagcataaccttcaaccttagctcttctgcataatccatgcagcactacgtatatatcctcggtgtcaggatgagatctatcaccagctttaaattcatgggtgcttccccctaactcaacccaactcaagcctttggtcttcctaactttcttttgtttcctctgtttccatacttcctctgaatcattccatctatttgctgatgaatagatgtttgaaagaagggtataatccccactgccatggcatgccatatgctcaatagtggcctcacctagttttgtgtggcgatatctgcgacaggcgctaagtaatgccctccatatcacaacatcaggctttacattcatcgacattaccaactcgtatgcttcatccagcaacccagctcgcgacaacgtatccaccaaggcaccgtagtgctcaacctctggcgtgatagaatactctgtagtcattgatctgaagtaatgccgagcctcttcaaccatgccacagcgactgcatgctgtcaagagtgcaacaaacgtaaccccatcaggaaccagctcttcacttttcatcttgtggaacaaaatgactacatcggatccaagaccatgcgatgccaagccactaatcatagtattccagacagaaatatggtttcccttgactttattgaatatctcagttgctacatcaattcttc

SEQ ID NO: 30689 - DNA, 558 bp, Zea Mays
tgatgaagcaattactgaccatgagatctatagtgcaacagtgctgtactattgttggcgtgggcaggcaggcttgctttgtcttgagaattgtttaccaaggattaacctgctggtagttcctgcacctgatgccagtacacctggttctcacagcatctcatctgtcctctgtgaataaatgaaaattatgtagtgaaataaaatgtaacgaggggaagatttactgtgtagttctagttcagtagaaataagagtctgatgcacgattactacatcgtttaaccaaaaaaaggcagaacaaagagatacatttgagaacttaattgtccacacagatgtgttctgattaaaggtccgttcgtttagttcagattgggcccaggaactgttccggtttattaaaattatacaaatttgtgaatactatccacggggaacggatccagagcgtcattccgaagcaaccgaacagaccctaaatgtaagtcagtacttaatacagtagtcttcaaaaggaagacactacctaatatagactaagccttgtaccaaggc

SEQ ID NO: 30690 - DNA, 325 bp, Zea Mays
acattatctttttaacaaaattcttcctgatgatggtagagaattgtttcacattcatgcatttttgctgttagcaaccaagtatcatagttttttaagaagtatgataatctaaggtggtctattaaaaaggatgaaatgagaaccatctttatgcaatttcctgaagcttatgttgccacaattactactttgtagatagatggatcagttgttgaggacatttcctgaaagcacaaagttaggacaaatgtactgattgaaagaacactcctttataaccacaccacaacctatgatcatcccaaagaagacccaagtaaac

SEQ ID NO: 30691 - DNA, 316 bp, Zea Mays
gagactcgtatgcttattcaatcttccctcatggagagagtgcgtgcggctcagcagcaggatcatttattgcaggaagctcgaaagatggttggcgatggtaaaccccaggagttctccatcgatgagaatgatttggttcatttcaggggttgcctttgtgtgcctcagaaatcagaggtgaagatggatatattgagagaagctcataaaacgccttacaccgttcaccctggcgaaaccaagatgtaccgagatctgaagcaaaacttctgatggaagcggatgaaggttgacgtttctaagtacgtggctg

SEQ ID NO: 30692 - DNA, 282 bp, Zea Mays
tgagcacattagcactagggacttagtgaaggaatatttagcaaacaaaactttcccaacctctagtggatggggaatgccgaaacaaaaggaagagggaaaaagtataaacttgtatgccttccttatcggttcaaattccaaaaacgattcagcaaaccatgcactaaatggttggagctgatagaaacagtgtgcaacgaaattctcgagaactacatgaagaaagaagatcagctgatgactgctgccttcggcacccggccaaaacgaaggttgaac

SEQ ID NO: 30693 - DNA, 1104 bp, Zea Mays
atttagggtttggtattttgctcaatatattgttaaacttggatggcttgtaccatatacaagcaaccagtttgcaactgattgttgccattgctgtggcggtggtgtcgtttatatttccaagtgaacaatcctactcaaaagttcgtttagcgtgtggagggaggagttcatgtttcttctgcgagtgttgtgttgatgttggggcaaatctgagccattcaatgtgacattactctttctattctgtcatatacttttgtctatgattctatttccttcatgtatccttcttttgctgtgatttcaacttgggacctggatcatgataccgatgggacaaatctgagttcgatttgatgtcatataagattcttgactcgggtagatttgatgcatatattcttcatgtttttggttgggatgcccaagcttaactggatgagttgctcattttgttctaaagaatgattttatttcttctccacactcttatttactacttttattcttccaccaatacttataactggttccctaatgcgtctttacttctgtgtcctgaggcactagcttggaaatccctttgggtaactggcattggtgttagtggtcctaattttgtgccatggctttgatcaatctggattgatcaatccaaatgatagacatgctaaattattgtcatgagcttggttgtgctttttttggtcatgtttgtgaaaagcttctctacgtttgtgctgtttctatgctgttcacgcatgtatcgatctattttcccaagtgcagagacattgggagttatgatgcagagttgttggagagctttctttccatcctgccataaaaccaagattgggagtgtgtttctgggaactactggagatgctctgatagggagtagcgttcacaagcatgttttcactactactacttgatggatggaacatgtatactttcctcctaatgtgttgcagtggtgatcttcttttcttcccttttagtttcctgtgggacatttaaatttttttccatcttctctccttcaccccccttctttccttctcccttcctcttctccctgcgtgctctctctctctc

SEQ ID NO: 30694 - DNA, 478 bp, Zea Mays
tttacactcagcgctccatggagggcaccgcacacggaccgtacgagtccggggaacgtcgcaggtgcacgacgacggcggccaataccctggttctctctctacgacggaactcccttgggcggtactgcagcggctagggcacgagctcctctttctctctcacgggtgacatcgcgtttctctctccctcttttcctcttcatggcgcctacggctccaagctatatggtctcgactaggtggaagatcgcgaccctatgcattatagcaccgccacagagggctgagggggccacggacggttcggcgttctgtcatgtctgagtcggatgcagcttcccaggatgtggatgggcaacagtaagtgcactagagtgggccgtgggccgtgtttagtattctaatctggtatcatgggttcttttagagtctgtaatagcctgttaagcgaggggataaatacgttgtacttggc

SEQ ID NO: 30695 - DNA, 306 bp, Zea Mays
gcatcctctcccttagtctcataaacgaggaaaccacagtgtataaacataatgcatgataaggataaacatacataacattattaactcagctagcaaagaaacgatcaccataatgaccagaacagattaaaccacttgcacacattatttaaaagagaccaacatcattgacccgaagtccctaattaatgtcattactaagcagtggcaaagttatttaaaagtgtaggtgaacgtgctgctacttccctcctttcccaaacaagattcaagttcctgcatcaagcaatgtaagagtgagat

SEQ ID NO: 30696 - DNA, 419 bp, Zea Mays
cgggcgagttccatgcttgaggaaacaagaagaccagaaggcagaggcgagaggacctgaacttggtggccgacgagaggaaaggggaggaggaagccaccaccgccatggtcagatcaccggacgggagacgccacccggcatcaccggttccttcccgttagcttgccctggaggagcggcttgggggccatcaaactccctagtgtggtgtgggaaacattctcaagcatgtgactggtgacatttagtttgactaatctctactactaattatgttagtatcgtaggcgtccacatttctctacggtgcacggttctgccgtcgccagcgcgccccctccgcgctccatctgcctccctccgctagaatcttgcggcttcctccgctcttcgccatcagcgctccccgatccccc

SEQ ID NO: 30697 - DNA, 409 bp, Zea Mays
cggaccgccggtattgccgtagaaactctggtgacctcggttgtgccacgtcgtggcttgttactgtgcggtagtaaccgtggcacacttaagagtacaatctttaagccattgcgcaggtgaacgccacgaatcctttacgccagtgctcttccccctctccggccgacgcgcgtctcctccaaattagccgccaccactcatgaatcctataaattgagtgtgccatcagctccgctaggtagttgtgcatccagtgaaccagctctcacctccaatcatcccctacagctccctaatttgagagttccgccaaatcggtctagaacaccgcgtgtgtgagctcgtcgcggtcagcgctccacaggtccgatcttgttcgcctcgctcttgttctagcactcctgcg

SEQ ID NO: 30698 - DNA, 284 bp, Zea Mays
gaaaaattttcactgacatttgggaaaatggcagccgagggatggctcacgaaataataaagaaaagcgaaaaagatactcatgacactagagaagcaataaaaacagctgaaaatgttgcggagcttgagagacgaataggtattacttaatgatttttacctttgttgtttacttttgtgacttcgaactgatttacgttttctaccgcagctgaactatctcctcccccagagcccttcgagtcacttgtcgaagcagaggcaaagggatcatcagaaatt

SEQ ID NO: 30699 - DNA, 355 bp, Zea Mays
catagccgacggatgagcagtcggacccgggccagaggatgtgcagggtgcaggcatggtgccagcaacaccaggagttcatgcaacgtttgtagtccccgtagaaacaaatggtgatagctcgaaaggaactggagccgtgttaggtatgtcgtccaaaaaatcaaaggatgcacacgtgggaggagaggaaacctcaaaaagggaaaagagttttcctcgaagaccacatggcgggagatgatgaggcgattggaaggacgttctaggcaaagatatcctttatggtggagggaataaccaagaaatacacacaaggaagagcggggacatagtttgtgggtggtggtagcgg

SEQ ID NO: 30700 - DNA, 278 bp, Zea Mays
gttcagcttcgtatgaaattataagtacgcccacgaattatacacacatggttcgcaagtatcatgggggcactatcatccttcccccttcctttttgtgatgaacaagtcttctgggtcttctttttcttctttgcttcgtacatcaaaaccttcggcggccttcgcaacacctatgcacaggtaaagctccacaacttctcctttctggtttgcaaactgcttctaacgaaagttagcttcgctgattctttgtattgtacccaaaacacgccttc

SEQ ID NO: 30701 - DNA, 513 bp, Zea Mays
ctcggcgaaaaggttgacaaaggagtccagcagtgccttagagagctcccaagtcgtagacaaggccatgtgccaaggtggcgtcctgcccacctgtccatcaaattgtgcgccattgacaccaaaaggccatggttatatcatcgaaattccataagacgggacccaaagttaccatacgagacgtcggtcacacccacaggagtaattgggttctccagcgatggttcattggctagttgttagtcgtgggaatccaagcgtgtgttcgccatggtgacctgcaccaagatgtggtccagtgtggcgagtcggagaggtttctaggatcagtgtcgacatcggacatgatggtcgatgtgtcgggtagctttgatactaaattgatacgagcgtagagggtgtagcagcggatgagattggcggatggaacgaagtggatagggaacttgactggaagtggtactattgttgtcaccaaggccaaattgaatgccaactaaggtgaccaaa

SEQ ID NO: 30702 - DNA, 371 bp, Zea Mays
ggtccttcggctcctgctgctgaggaagtgcccatgcctgaatttactgaagttgatcccaatgggtgtgacccatctgacgctgaccccaatgggtgtgctgtccgtgttgctaatgaagatgaggaggaagaagaagatgaaatccctctgattcggaagaacagtcggcgctacatagccagtggggaaaatagtggtgttccttctcctgctttgtctgccctcattggtctacaagaattatctctagcgaactttgatcaaactcttgaagatatggttctagaggatctgttatcagaaccggcagatggtgacgcgatggatgtttgtgctgatgtgctcgacgccgggttggggtcatcccg

SEQ ID NO: 30703 - DNA, 471 bp, Zea Mays
gagaaagtgggggccgctttcctcgacaaaactaggtgtttgctaatctttggtgggtctgactactacatgtcaagaaggcacataagtcaaaacgacgtgaggtactccaggctcaggaagcatccccgaccttccttgactggtccgaccactccattagctatgaccactctaaccacctagagcacatcccctgtcccgggcgatacactcgcgttgtcagtcccattgtcgaattagtgtggatgaaaaaggtgttgatggatggagggagctggctcaatatcctctactttgccacgcttgatgttaagggcctcgatcgaggacgccatcgaccgataggagggccattccatggggtcgtacaaggaaggagggtgaccccgctcgacgaattgatctccttgtcaccttcgggatgccgaccaacttcaggactgaaaccctaacctttgaggtagttgg

SEQ ID NO: 30704 - DNA, 478 bp, Zea Mays
ttgcccctgatgacgggggcggtgtcgacgacgagggcacgacaaacatggcagcagaagtcgccactgctacaagggaaccaaagcgctgctggcacatgatcttgaactgtggccacgtgacctcatgctcgtcgcgttccagccgccagaaccacgtatgtgcgtggccggtgaggtgatacgatgctagccaggccttgtcggactccagagtgcgctggctctagaagaactgctcgcagccgttgaaccaccccagagggtcatcgctgccatcgtagatgggggaggggggggtgctgcatcgtcgacatggtagcagcaacgagggtcggcgctaggggctggtacaccggtcctggtatggttgcctctggcgtcgtcagccatgcaactggtgatgaagacggccctaagggcgcaacgcaactggtaggcatcgccgcccacgaagatgtaggtgccggagcgggcg

SEQ ID NO: 30705 - DNA, 421 bp, Zea Mays
ctcgaagagcagcaagatacgtcgtcagctcagtcagatcagatgaggccggctaggaggagggatgttgaaattgatgaagccggcaagttcagttccgtttagccggccggagcctttttgattggagcggcggggtctcgagtgagtgacctctgccttgacagggagatgtagcgaggctgatggttaggaaggagagttcaggttgactatgcatgactaatgctcttttcatatgcttcttcattgttgttgttgttgtcagttttgaattctgtaggcagtgtacataggatcagtgtcctctgtaggggggtcgtgggatgttcatcatcaattcaccagccatgtacagagctgccatggctggcctgtagatgcaataagaagttcaccagggtttaagcttaagaggcat

SEQ ID NO: 30706 - DNA, 742 bp, Zea Mays
ggggctagcgtgcaaacattcccaagactcagttttaacgcatggtggacggcgcgttgatatctagaaaagacaggggtccatttataaaacatacccgcgaaggggtaccgcaacatatgggccactggatcgaacgcggacggctcagattttatttaacgcgatctaatctacttcgttgaactctagatggatggtctggatcttagcttcaatgtgacgactagagatctgatctctaccgtccatcatgtgaccatcggcacacgggcacatagccatccgcgtggggatcaatggtccagacccacctcgcccaatctcaaccgttcatcatcaatcgagcggtctccagcccatcttcaacctcgcgctcctaccgcactccctctcactcgcctatgccgggacggtcacgcaaccactggcagcggcggtaccacaggcacacatccacgcccattaccctctcccctcgcaagctagaaccagggcgaccgatacacctgggcggtcggcgcccagaccggccacaatcaccatgcgctccatcgtcaaccgcgaccgtacgaaaaggaacagagaaagcgacaaccccgagagactcaccagccgatgatgaggtcgcggtcaccctgatcccgtcgacacaccaagctccagcacgaaaccagcagcggctccaccctcttctctctcctccgccttggcgaacccggatcacggtggcgacacagct

SEQ ID NO: 30707 - DNA, 501 bp, Zea Mays
gaagggggttgtggagctccaggagaagctagcgcagccaggaggcctatgccacgtcgttggacacagcacggtactcgacctctatgctggagcgggagacgacgggctgtcgtttagtggcccaagagacgaggttggcatccaagaacgcgacataacctgaggtgatccctccggtagggttggcagctaggcgaggccgttattttacaatccctggaccaggaccactccatgtgaccgattaggcccaaagtgtctcccgtccaccgtcgccagccctcctaatagtgcatccctacggcgtgcctccgatgccccctacgacgtgccaccgacaactctagctccaccctaggtcccgctggctggaggatgggactctgcctccctcgttgtcgccttcagcaccacggcgatgacctcaccccctccgaatgggtggtcaactctggtgcctcctaccgcaccactcccacaacaagcatgctctctcgc

SEQ ID NO: 30708 - DNA, 389 bp, Zea Mays
ggggaggccaacccacgctcgtaaaaggacgcaagcatgaccacctcgtcatcctcgctccccgggatgaggcacttcaccctcaccctccagcatccaccctaagacctgtctcgaggggaggaacccttcttctctagaccaaggagacgactctcctagatcaaggaaacaaggaacgatgccatgcgtacagtgagcaagctggacgggcacaaggaagcaaggaggcaaagcgagaaggcactgcagccagaggatttctagaggagaaaggaagcaaaggctcaagtgtaggaatacggtaagaaacaccaaccccgagcactccctgcctacttatgcagaagtgaaggggacaaggatgatgcctgaaaggtgcggccacc

SEQ ID NO: 30709 - DNA, 534 bp, Zea Mays
taaaggagatgggtggcccatgcaaatgaatgacccttaggtaaagctggtgagactgtgaaacgtctatgcctcgacggctaaggcatcgctcatcgaacaggaccagggttggaaggcgctgactgcgctcctcaaaactcgacaatcgcaaagaacaagaaatcattcgaatgagaaacaaacaacaatcacatttacattttccatgaatgtcagcggaaccacacccacgtttatataagttttgaaacttcctagctccttgtaggaagagcgccataagcgaggatatctgcaaggcgatgagacaaccgctccaacgcatcggtcatgtccgcaagctccgcgtcggtccattctgtggaataccctagacttagggtgtctgtcagtaccctaaatcaggggtaccctctcctacagcatgaagacaccgtacccatgagacgtctcctagccacgcggaggaccgcgcctgaccccaccggatgggcaggccaaagggcgccacgtggcaaggaaagacaccac

SEQ ID NO: 30710 - DNA, 557 bp, Zea Mays
cagaaatagactctacattgtaaaatttggattaacctcactagtgtgtctgcatgttgcaaaatctgatgaattagcgtggagatggcatgctagatatggccacttaaatttcaaagccttacatgatctgtgcagcaaaaaacatggtagaaggcatgcctacagtgaaaaggttagagcagatttgcgatgggtgtgttcttgggaaacaacacaaaaagtcattccctcaaaattcaaatttcagagcacggaaaaatcttgagttagtccatgctgatctatgtgggcaaattactcctaaaagtataggggagccacctattttctcctagtggttgatgactacagtagatacatgtgggtagagatgcttaaaaccaaggatcaagctctggtcaattttagaaaaattaaacaaagagcaaaaactgaaactggtgataagttgaaggctctcaggacagacaggggaggagaatttacctctattctgtttgaaactttctgcagtcaagatggcatcaaacactacactaccactccatattccc

SEQ ID NO: 30711 - DNA, 599 bp, Zea Mays
ccttcgcttcggtcgggtgctgaaggccgcagtcatcagctgatcttcttttttagtgtaattacccaaaatttcgttgcacatggtttctatcatttctaaccattcttggcatggccctttaaactgtttctcaaatttgaaccgataaggcagtcgcacaagttcattcttctcttttgtcccctttagcttcagcatgttccattcactcagtgtcgggaacaccttataggccagatattcttggactagatctctggtgctgatctgctcggctaccacccagaattctgccacaacttcttggcacggtgaccccgttgacatgcggcacaagggcctagtcaactcgaagcttaagctcagcgggctcagtactagcgtcttgagcttctccctattcttctcatcggccttaacataaaaccactcattcttccaaccggttggccacttggtgcgatagctcaccaccggaaacttcatatctttgcggtaagcgaagttgtaacaaccaaaattctcatgaagaccatcttctgtggctttcgtctaataatgaagctcatgcactcggcaaaaagcttcggcattcg

SEQ ID NO: 30712 - DNA, 322 bp, Zea Mays
agagacgctaggatagctttgcttgagaaggctagctcagtgaatgagcctgcacctaagtagtgtgcactttataaatgtttgcagtctgtccttgagtcctgcagacatgacaagacaagaatcgaggaagaaaacacataccttcgatctgtcttgagttgggtgtcgtgcagtgagccccagttgggcatgatggtaagtcagttcgagaggggaactagcggactagggttaggctttgctgctaaggatgcaagtgtcgctcgctttgggaaggttggtgagtgcagtggtttgacaccatcagagaaaccttcac

SEQ ID NO: 30713 - DNA, 357 bp, Zea Mays
atagcgactatttttcccaatgcagtgcccatacactcttcaagctctatctgtttactctatttctacatattccatgcgtgtatgtcaccaccctactaatattgaacaggaagtttaagaaaaactacaatggcaagcaccaattgatctaccaagttccacaaagattcaaaaccccggaactaaatgtggtaccggaactgtaaacaacatttagagcaaacatactgaacatgcatcgcttgttacaaaaaaggaatcatattatacagactgacgctaccgtaaaaccaacgaataagaagagtaatgtcctgaaaatttttgtggacgcaaattggcagtagatgaact

SEQ ID NO: 30714 - DNA, 409 bp, Zea Mays
acaaaatcaaggcagtggctgaatggtctactccagcatccctcaaggagctacgtagcttccttggtttggtggggtattatcgacgttttgtacgccactttgggatcattgccaagcctcttaccacactgctcaagaaaggagtgttgttcatctggactccgacacatgaatcatctttttaagcgttgaagcaagcattggtgtcgacaccggtattggccctgcccaatttctcaattccattctgtttggagacagatgctagtggcctgggtgtaggtgtggttcttatgcaggctagacatcctattgcctaccttagcaaagccttgggacccaaattgcagggattgtctacatatgaataagagtttttggccattttggtagcagtggatcattg

SEQ ID NO: 30715 - DNA, 698 bp, Zea Mays
cgcctaccgtcgacctccccagtcgccgtcaaccatccgccgtccgcgcgccatcggggctgccacacgcatggtcaggctccttcaccaacatccgtcgatggtaagcacctctactgaattcgcctaagacaccactacgtgtagggctgttctaggtcagggattgatcactgggggggcatcgttgtggagctggccgctgtggttggagcatggcgccgccgggtgtgcgtcctgatggagaagaagtgcgctgaccgtcggatctctgtgggcggatgggattagcttgggcgtaccgctttaggcgactggatccgtgccgtcggatcggtatcctgtggatcgaaatagatcgtgtttcattaaagttgtagccgtcgatctccgatctagcggccaccagtgtataccggttcagggtgttgtgtgatctaatccgaaccactagatatggatcgaacggcccatatacagcgataccccttcgcgtaaccactatgcagaaaaccccttataagtttagagattcaacccgcagtccattggccactgttccctgagtctaggttatcttgcgcagagacccttgagctttctgagaattgatgcccagtccagaacctgtttaaaatgaataaattaattagtaaatgtatttttaatgcaaaaacaattgctagaacttggaaaat

SEQ ID NO: 30716 - DNA, 682 bp, Zea Mays
aaaatcccggtgcttatctctggccggggggtgcattctgctgttgatgctgatgctgttgattctgctggttttgctgaatttgttgaacagccgcagtgagtccatgcagaatctgcatctaggcggcgatgaactgctccatgttgggattcggtggtggtggtggtatttgttgaccacgctggttccggttgttgttgggtccttgacgtgcgttcaccatctgattggttaggaagtgaaatccttagaaaagtgaggagtagaaaagattatagaggggaacatcctaagtttattattattttttatatgatcttatggccatcattccataagaccattgcactcaaacaaaaatccaactcaaacatgtcaatcaacaccatcacatggttgttatttattataagataaattaaacgagtgttcaacgtctgacgcagaaactaacttattacatcataacttaaaacacttaaagtagcctagtgacggatctgggctccccatagcgcagcctcttgtggggaggagacaacgccatggtggggacctgagcttcgggcggatccagtccttgaagttgggcttccagggctgcaatcctggcatgggcattctccagctccaaatgcaccctagagagatccagggtggcactgtccaggtcggtgtt

SEQ ID NO: 30717 - DNA, 594 bp, Zea Mays
acaattctcaatggtacctcacctctctcttggttcgattttgtttgtgggagggggctttcttttttgatggctgagggggctttcttttgtgggaggggatcgctagagaagtggggaaaggtgtcaagtgtgttcctgagatggttaggttttggaagccacacttgtttctgaggaggagctctcacaggttcatcaatcacaccatctctcacaggggtgataggcttagcagggctggttttgataagcttgggagtgggtgaaggtttctctaaaggtgtcaaaccactgcactcaccaaccttcccaaagcgagcgacacttccatccttagcagcaaagcctaaacccggtctaccagttcccctcttgaactgactgaccatcatgcccaactggggctcactgcacgacacccaactcaagatagatcgaaggtctatgttttcttcctcgattcttgtcttgtcgtgtctgcaggactcaatggcagactgcaaaccctcacaaagtgcacactgcgcaggtgcagggacactcactgagctatccttctcaagcaaagctatcctaacgtctctctctgct

SEQ ID NO: 30718 - DNA, 317 bp, Zea Mays
acgatgctgctagcgcagcatgtaagacctcgtggtaaacaacatttcgagtacaggagccacaggaaccatcatcattttcgatcacaattctaagcccctccctagatgtcgcacacgaaacagcaacatagagctggccatgtgtaaatactggtttctttaggtaaaggccaacagtggaaagcgtctgtccttggcttttatttattgtcatggcatagcagaggcgtagtgggaattgggtcctctgcaaagtgaaaggccattttacatttgttgtgttcagcgcaatacgtggaatgaatacctcatcg

SEQ ID NO: 30719 - DNA, 1019 bp, Zea Mays
ctgatgttgtatgtaaatgggagataattgggtctaaggttgggctgtcagtcatcattggagactgaattttgaccaacagtgaaatcagatgaactttgcgatcgaatcgcggggatttagtggatgtttgcacaagatccttgtaataaagttgtagttggtacattggacaacaactttgatacaggcagggtgagtgagttgccacacaaaaattgaagaacaaggccctgcaagttgcttggacagagggactgacgaagatagccatggtacagtgaccagaaagatctctggtgtcgtgaggctgacgtcggtcatcttccaccgcaattcgcactcgcctaggagatttgtgctgcgggagtgatagataacaccgggtcaaggtgaaaatatccggggaggggtgaacccactcactggacggaccgaccatcgtgtcccgccgcggtcagtcacgttggcatcaccggagctcaccatttctccaaccgtgacacgcaacgatctctactccgtgtcataagggtcgtggcaagcgaccggttatcatccctggagtaattccctcccgcacgccacggtgagtcgaccaccgtaaaatatcctagccgcggtaaccttgatctcaatccaaaattcgtgataagcttggccggagtctataaattggaagcaccccctgttccgcctactcgttacgaactcattgaaccactcctcgcccccgatcgtccatcgtagcgccctaatttggaatttcccccaaatccattcttcgtgccgccgtgagcaccccctccgtcgacccactatcctgtccctccacccgtcttcgtagctgtcgttcttgagtcttggtatgtaactaaagcttaccgtgtccccaatttgtttgttactacactgtgtcatcaggaaagtcactagttccgcggttgtgcgtggactgagctctagagctgtgttcaggttaaattatggatttccagtggatcgcgaggggtggaatt

SEQ ID NO: 30720 - DNA, 587 bp, Zea Mays
aaccatgacttctaacagattagtacttgatgtcaatgttggggtaggttcttcttcacagttattgtaattattcacagaatatacttatacactctctatgttgtttctaagctctgctaaattttgaagaacaggaacgtcatagtaagaatcctcagccgtttgatcaaaatgtgttacagaattgcttacataacacactgccttcgttggtaaatctggataaatgcaagtcggtaagcctcagtaaccttttgttcacaggttcattagtatattaactgtaccttttactcatcatggcattgtaatagcaacatgtaacttatgcttagtaggggacattggacactgtatgtaatcaacctacagcataagtgtatacacattttagatttgaatctgtatggtatagaactcggtggcaccacatgaaaggactaccattatgacccaatctatttaggtggaaggaaattcccatgggctagggttataatgagtaggttgagcaaagcgttacaacatgtttgccccaatgcatccttccccaaatttggtaactttccaatggatatgccatc

SEQ ID NO: 30721 - DNA, 531 bp, Zea Mays
gccatcaccagcaggaggatttgacacaaaatgggtaaaggccttggaaggaggcaggttccaggccgagtatgcaacaggggcgccaacatttgataccttgcctctaagtatcatttcgagccggctcaccaagtccacagcaggaattcttctgttagttacccgggttgagtcagctaggcctcggtacagatatgtcgggtatgcactgtccttaagtggctgaatattcttgaagacaaagtcagcaaccacagcctctgcagtcggacccctctccttcaacaatccaacttcagctagcagagcccctgccgcagccacctcctcgtctatgggggattcggtccagctcggagtgcgaacatccggctgtctccctgaccgtgggggagagaatttccgtgattctcaacgataaaccactccaagcgccatcccttgatgctgtccttgagggggatgtcgaggtaatcagtcttccttccgcggcgcatctccaagctcgcaccccccaccagctgatgc

SEQ ID NO: 30722 - DNA, 274 bp, Zea Mays
tcacacatttcattttgtaattggcaatgatgccacgtaaaaacaccaaatttcgacccacccacccatccaatgtaaaggtctgtttctgcagtgagtttggactaacctgaattgctgatgaccacctgtgcacagctggatcctttttcctttttaggtaaagatctgcctacgctgtcagtttggccttccctggattgccgatggcactcagcaaacagctggatcctcttttctgatggccatcaacaaagatctggatccttttttc

SEQ ID NO: 30723 - DNA, 370 bp, Zea Mays
ggacgttcagatggatgaagatttataaactttcttaccccttgaaagcataaggtagtttgtttggcccctgttgcattgtagcttggcaacagttcagtatgaacccatagtgtgcatcttattaattttattatttaatctacctccttattgctacattagtatatcgatgaatgtgcgatgttattttcaacactggacaacatccagcaggcaagtaattttagaactggacatgaatttcaataaacaatatatgcacctatgtgtgttttggattcttcatagatttgtatgagctctaaatctaacggaaacattaatcaattgcctggattagagaaggaaatgttgagattcaatggct

SEQ ID NO: 30724 - DNA, 320 bp, Zea Mays
gagggcgcgcaccgattcatcagctcgccgatctaatcgagaccgtgtaattgtgattggacggctgtgatagctctctaccccttcggcttggatattttacttaagagccctcggagaaagtgaaaaacaacccgccgtccaccagtactgttccctgagtctaggttatcttgcgcagagacccttgtgcttaccagaaaatgaggcccagtccagaatgtcatgaaaccagagaaattaatttataaatggatctttaatagataaataaatgctagaacttgtttaaatcatagaaaaatcatttttagtccaaa

SEQ ID NO: 30725 - DNA, 311 bp, Zea Mays
gatttcttgcttgtatattacatggctccgcctcgttaaaaacctcaccccccgggaggaaaagagtgcgggccagaataaaattgttttgcgaattacaagggcgagctggctctgaggagtcaaacaaaaaatttgcggacattatcaatgttccaagaatgctccaagtcctcgctggatggcattgtgagcctgtacgcgctaggggacgccttcgtcttgacgatgaaagggccctcccacttgggctccagcttgccccgggactctgtccgagctgtccggacgagtacgaggtctccttcgct

SEQ ID NO: 30726 - DNA, 910 bp, Zea Mays
ctcaaggaggtgtaggtgatcaatcgtgttattaaattgcctcatgagtcttctgttgattgatcctttgtttttctcccttgctctcctgatcatgttgaagtcacctagtaatacccattctggtctgaccatggcttggatgttacggagttcagaaaggaaaatcattttttcattgtccagctgaggcccgtaaacccccgtgaggtcccaaacctcctcatgtgatctagagctgatcctgactgatagagaataagctgctgaacatggcaagagggtcatgtcaaaggaatccgagtccgcagcaataaggatgccgcccgaggtgcccagagaaggcaggtgaaaaacttgattagcaagcttggtgcctacagtttcctttaataaaacattggaccaattcgagatctttgtttcttgtaggcaaacgatggaagcaccggtggacagaattgtatgtctaacacttgctctcttcgcgtggtcgtttagcccccgaacattccaagaaaaaatagcacatttttgattcataaggaaaaagctgtcactccacttaacacagcatgctgccatacatggatcagcaggagagcgtgctgtaaaatcctaacaggatgggaaacctccaaacaaggacccgccgagcaaagacacagctcggccacacccgacaaccagaaagaacaacagaggtacacaggcaagctgggggaccttgaccagcgcccagaagtaaaaacgcaagaggggatacaaccgctccacaagagcctgaccatctgagaacacattgatcaccaaaagctccaccaaccggcccagacaagcagctcagatgacccccgcctcgacatcttctatggccggcatcacctttctccccttttttttattcttc

SEQ ID NO: 30727 - DNA, 756 bp, Zea Mays
ggggagtatcagggcacacaagaatgttgaaacaagataacagggggcatgaacagacctagaggtcgctgaccacggtgaggtcaatccgggcggtgttcttgagtgagttgggggaaatgcgaaattggagctctctagaggaggatctgaggtacgggtgggtgcgctagctgcttgaatacataacgaagccgatggtgcactcaatttataggctccgggggcggtggctctcaatttgattacggtgtgctggcggccgaagatagggaagaatacgggtagatgtgaccgtggcgttcaccggtgcaacgatgcaaggataatactcctaagggggcacgattactaccgcacagtaacaagctacagcgtggcgcaaccggggtcaccggagcttccacggcgacgctggcggtccggccacgtcgcgacggctataagcacggtgataacttcaattcacgatcaaatccattcccccgtgagatcttttaccttcccatggatatcctctgcgtgccaagcacgaatcacagcgaccagcgcaaatccggacgcgcggatcaccggcggcgagctcactgagctggcaatctgatcagacactgtaccatcgcgaagtgcattcagtcggtctgacaaagcagattcaaggcagcttttctccaacttttatgtgacaaccacataattcatttgcatcaaagttatagctctataatccatgttcacttttgctatagcaacaac

SEQ ID NO: 30728 - DNA, 539 bp, Zea Mays
cctgaaacgaaccaaatcattctcatcaatggtgaactcccgtggtttaccatcaccaaccctctttcgagcttcctgcaatagacgatcctgctgctgagccgcacgcactctctccatgagagaggattgaataagcatccgagtctcctcgctagcggtaccgacataacacaaagcgactcccaaacggtctagatcagcgatcaacggcaaggccacctttggaacctcggacctgctaagggcatcagccactacattagccttccccgggtgataatgaatggacaaatcataatctttaatcaattccagccaccgacgctgcctcaaattcagctccttctgagtaaaaatatacttgagacttttatgatcggtgtaaatgtcacaagccttgccataaaggtaatgcctccacgactttagagcaaaaaccaccgcggccaattcaagatcatgagttgggtaattcccctcatgcttcctcaactgtcttgagccataagcgatcacgctgccttcctgcatcaaca

SEQ ID NO: 30729 - DNA, 508 bp, Zea Mays
gccggggatggataactcgtacgtggcgccatctctcgagtccagccggagttcttcaccggcggccaccgtgactcgataactttcgccgcggtgtcactcatgccgcgatctgcctcactgtgcctcctaccgacgtggtatgcatgcgctagcaatgctatccgtggtcgaagatcgtctgtcgggtcgccgtggctataaatagcacggtggtccacggcgaggtgtgaccatcacacacacagtgagttgaatcgaagccgaattcgcgctacctctgccccctcctgtcaaattaagtgtgcgcagtaaaactagagttctttgcgaagctgaagcacccgctcccaccctcgattagccaccatagccagagaatcaccaattttccccaaatcggtcagccgcgccaccgagaatagcccgatcatggccagcccgctctggtgagttcctatccaattcaagtgttgttttcgtggctctgcatgctggtaaagctcac

SEQ ID NO: 30730 - DNA, 487 bp, Zea Mays
gcacgatgggccatcgtgagttcctccaacaggagagtggcccggacgtcgtggaacgtcggaaagcggcgaccgaggcgaagatgatggccgatgtcggagaaccggtcgctgaggccgcgcagaacgttgaggaccaacgtccggtcggtgactggttcaccaagatcaccgagggcatctgccatggttttgaaacgacgacagtaatcggagacatgtagatcaccttagatgaagtgccggaactgagcgtcgaggtggagggcgcgagttttccgattcccgagaaactgattctcgagagtcagccaagtggtgcgggcagtggcgtcgcgttccatggccatttcagcaaggtccagggagatggagccggagatccaggacttgacaacgcagtccatgcgtgcccagtcggggaaggcgcgggagtgtcgtcgaggatgtggctgtccagggagtatttgccagtgacgagaaggaa

SEQ ID NO: 30731 - DNA, 491 bp, Zea Mays
ccggcgagctcctggaccggccgattggggctatgaccggcactcccgagcggctaacactcaattgaactctccccaaatgactctcctaagttaatttcacatttggtaaactatcctgttctgtccacgtgaaccgcggatgaggaagaaaatggtacgtgttcccagtgatccctggcggtccgggtcaattaaaggggtcggggagcatcaccatcatgtaaggatgctagaacagggacaagaagggaatgagcagacctggggaaggctggccgcggtgatgtgtggttcacggcatcagagaatcgatttgggggaaaacccgaattgcggggctacgatgaacgagtggagatgagagtgggtgctatagcttgacgattacatggcgcaaccgactaggccctcaatttatagaagggtaaagcggtggccagcaaatttggggaggacgcgcggcggccggaatgaaagggtgagtcacc

SEQ ID NO: 30732 - DNA, 349 bp, Zea Mays
gggaactcgggtatcagtcgttcgagggggacctgaaggatatcttcgccggaggctcctactccggtgaagacaactagacggacatcgggggaactccgtgtcccccgatctatgaagctgaagcacgccttcctccgaaggcccttccagacccccatgggtccgagctgcagacaggtacatgcagaagtgatcatagccagagacaagggctcccgtgtcaaatgcagacaggaaccctgggtcggggcctagccccgcgtcaagtgccataccaagaggtgctccgcaactctcccccagctgggaaggacccttcaaggtaacgggagtgcactgacccagg

SEQ ID NO: 30733 - DNA, 325 bp, Zea Mays
tcttctagggttttctcccatctctgagatctcatctcgtgacacgggctgtgtcgggtcccgctctctggcttcgtgatgtcgccgaatatttcggtgtcggttccttcgtcggcgagattcccgctgaagaggttcttctcccggcgcggttggttcatcgtcggagatgagagttgattccactcttcccccgatgaagaggacgttggggtagaatggaaccgtcgtagtgacaagcttcttcctgttctcctttgagggcggaggtaccggaagagcagtttgacgatcctttaccttgttcgcctcctttctccttgtg

SEQ ID NO: 30734 - DNA, 348 bp, Zea Mays
agtgaggtcatatttgagttggtggataaagcaattcaggatttaggaccggactcggtagtgcaagttgtcacggacaatgcttctaacaatatgggagctaaggcattgttgcatgactagaggcctaacattttttggagttcttgtgcaactcacacaataaatttaatgctacgaggcattggaaccttccaagattcaagaagagaattgaccaagctaaatcattcaccatctttgtctatggtcaccaccgcaccttggcatgtatgagatcattcacattgaagagagatattataagacctggggtaacaagatttgctacagcctaccttactttgc

SEQ ID NO: 30735 - DNA, 298 bp, Zea Mays
ttaatgatacatatcctcagtacccgccaccataaaaaaggtagaaaccaaaggctaccgaagcaactcaagtggccacaaaaatagaagacgaaaaaatagttgtgcatgtcgatgtaggtaccgcgggtagtccggctctagaagccagatcgtccgaaccaggagcggaccgttcgacccctaagtccggaccatcagcaccccaccaggaagcctgcaatgacgcgccaacgcctatggatgaggacaacatcgaggaagacgatttactaggagagcacctggtcgactacga

SEQ ID NO: 30736 - DNA, 341 bp, Zea Mays
cggaggcggaggaggaaccccaaaatcatcatcatcatcatcatcatcagttgttgtaccctgagtgtcaaactgtcgaagagctgcatcctcggcctgagagtcaaacacagaagcagaagctggcacaggaatctcaggcgcaggacggtaggatccaaaaacaaggcgtgaggcctcaagggtgctctgaaatcgagggggctgaatcagctgcgcaaagatgtggcacaagtagtgagcataaggcaactgccgacgagcacgaatctcatccagaacggtgtcctcgatctcacaaatcaggaagtccacaacgtcaaactcagagtgggagacca

SEQ ID NO: 30737 - DNA, 478 bp, Zea Mays
gagagagaaaaggggtagatgggcgcggtgaggaagaagacagccggtgatccgtggagtgggagatggacggtggggattggtcggtgctgggccgttgatcctgctgcgagcgtacgagattagaaggcaggaaaatgttcagcctggtgaacatcgaccgttagatggccatcgacggtctagattagaccaaatcttaccgtttcgcgagattgatccgggtcattgatttggtgatgtgcggctcagggtggtagagaccatcagccgttggatcgggatctatcagtcgatgtggagcgtgtgttcatggtcacctggatttaatcaggcgcgttgagttttgatcggacggctgagggccgtggataccccttcgtagtggcgatttagcgtatgagcccctcggtttacttgaaaacaacccgtcgtccaccctgtacagcgcgctgagtctaggatattttaccagcta

SEQ ID NO: 30738 - DNA, 314 bp, Zea Mays
aagagtaatgatgatgctcggacttccgtcgctagcacgctcccccaacagtcccaaaaacacaatagaagacccacatgggaatggatatcgacgtatgtcaaggtcttactgggggtgaaccgctctattttaccttatgtagcgctctcttcttggagaagctatctgtaaccgcccctccttgatctataaaaggggagggtcggtctcaaaggagaaggtccccgatgagagagaaaaacacaagggacatatgacctctagttagattagggacacctctagtcgaacaacacagagacatgattctt

SEQ ID NO: 30739 - DNA, 278 bp, Zea Mays
atttatatataatattgaaggttcttgaaatgaagccgctagcgattttcttaggccattaataattatgctctagtagtttctctagtactatgatatttggatggctacgtacaataatagtagtagaaatatataccgctaggtggatggtggatttaatctgtattatttattattataaactggctagtaattaaggatggtatactgtatctagcacatcttctggaacagagttcaggtgatgcgaggaagcaggcacagacagaagcgcc

SEQ ID NO: 30740 - DNA, 418 bp, Zea Mays
taaatttctagctctagtgctgcttggtaatggggtctgcatgcaatgtgaagtttaatgggaagaagtgccttgctttatttgatgctgaactaattctctcttagcattccataataagtaagatttgcatcctatcatgttttacaaacatctgtgatatgggtgctagcgttaccaaacgaagtgatggctgcatacatgttgcatctgtgtccatctatgacggaattggtagattgacaggcacatccgaccaaaatcttcaggctgcatacaatacatctgtgcccaacaacacatctgtagtattgtgctgctttgatgctgtattggtgtatctgaaatgtagttaaactagtgacttagcaccgttgttgaattgttgtaccaggccaattgtagatagacaagtgtg

SEQ ID NO: 30741 - DNA, 343 bp, Zea Mays
gtgcatgcgcagcgcgagtgcgacggggtcaacaaacaccaaggcggcttgtggtgccaggcacagcactgatcacccacaaagctacgccactaagactagataacgtaaacacaaatgttccaactagattacacgtgacaaaccttattcagactaacatatcacccccttaatcttgttggacttgaaccatccctagtcttgatctcagttccacaagtctgattcggctcaaaggctttgtcaggatgtctgcaagttggtgttcagttcccacatgctccacatccactatgcctttgtcaatgcagtcacgaatatagtgatatcgtgtatcgat

SEQ ID NO: 30742 - DNA, 328 bp, Zea Mays
cgttgctggagacagcctaactcaatagagtttaagtggggctttttgcaaataagtccaaatctcagggtttaagttgcaaatccacatacatgtgaatcatatgagttaaggtaccctaatttcatggtttttgcacttaggtccaaaatgtgcatacttttacagataaccccgtagggtttcagtccagggttttctaggggtctatttagggtttttggtacttctagggtttggatgctacttaagtccatccatggtgatattttatgatcatttcactaagttttgaagtttctcttagttaggctttatttactcccct

SEQ ID NO: 30743 - DNA, 377 bp, Zea Mays
gtttcgtggttgacgtccctatgttaatgcacggcggttcccatggtgtaggctcgggactcgacaaacacggcatggttccccttttccctccgtgcatgtggatttgtccattagatatggtaccctgtcttgttgttcctaccatactgtctattgtataggcttcgatgctgaggtcgcccctgataggagagttgtgtctatgtcttatcacttgggctcctggcgtcacgcactgtcatggtcgacgtatgcttgtagctctacctcaaggcttaaacttgctcgatgggggacttgatcgtctagtccgccttgtagacttgctcaccaggggacttggtcgcccactctgcctcatagatttgatcgag

SEQ ID NO: 30744 - DNA, 622 bp, Zea Mays
tagcaccctagttcgtctttgtgtgggtcctatagcgacaatatgctcacgcttcccgtaggcattcatgccctctttgagagcaatggggtgtacgggcgagcagcaacaacaatgcctgagtgcaatacaagtggcctcgtggccccaacaagaaggatcttgttcaatggttgttgaagacgtggaggacaaggccgagacactaaccgagggtaggtggcccctggtgtgacgtgcacctgcgagagtaagtggcccttgaagtcgacgcacccctacgaggccaggaggccccaactaggagatatcccagaaggggaagaggtagcacgaacgaggccgattcaagtcgttctcgtaagagggtgacatagcttggggacccctcccccacaagcatcaaaggcaagatccagagatccttttctcgggtacctggcacctattcaagtaagtaggcttctttatttcttctctttccctttttacatattcttatgacttttttagacctattgcaacatcagcccagtgtggggcactcagaccctgaggtcggcccatggcccgactcaaatggagtttggggcatcatttcctcgcgatggcgagcatgcgc

SEQ ID NO: 30745 - DNA, 441 bp, Zea Mays
ccttggtcctagtacctgccccttataattgaatatatcctttgtaaggcaaagtatcctgtgcacatgggggcttggcgcacatataacatttgggccttcaatctatcatccaacggtttcccttcccacctcaaactttatcaaaaaaacaccccacttccccctaaagctccctgcattatttctgaaaaaaccggtgctacttctaacccttcatgttccctggccaacgcccccggcgtgttcccttggttgccacctccactgcaacaaaaaggatgcctccccttcatcctcgcctcccaagcactgcctccccttcatccatgcctcccaagcgtcactgttgcccttcctcgaccaccgcctcccacaatcaccgccttcaatcctcactgcaggctcctctccatctttgacatagcaactagatctcca

SEQ ID NO: 30746 - DNA, 511 bp, Zea Mays
gatttccaaagacattgtgcttacacaagaaaaatatatgtctgatcttctaaaatggttgggatggttgattgcaaaccaatcaacaccccactattgacaagtgaaaaacttaatgttcatgaaggagagctagtagggtcgaatgatgcaacaagttagaggagtttgttaggagctttgtaatacctcacattgacaaggttagatatagcctttctcgccaactagatatgccatttttttgcatgctcctactaccgttcattagattgcacttaagaggattctacggtatctcaaatcaagtttaaaagttaggttgaagctactcaagccatcctctttgagaagaagttcatattcaaatacatattggacggattgtctcgacgatacaagatctacgaggctttgctatattttttgctttaatctcatcttttggagtgcaggagaacatgccacaagcacagtacaaatgctacaatagagatcatatagattcaga

SEQ ID NO: 30747 - DNA, 272 bp, Zea Mays
cgacggactgccctatctgtgtggtacgaaatcaagatctgttgggggataggctctgttggtgttcaatttgctatcttgttttagttcttgcttgtttcgatagccatattaattttcgtactgatctggtagggttttgtttcccctgcgaggcgatttcctttttctctgttgtggttggggttgggtggggttaggtttggttaaacaattccccttttggattagaggggacagggcaatgaactaatttgccaactcaagccctt

SEQ ID NO: 30748 - DNA, 331 bp, Zea Mays
caccaaagttccttcagactaccagccccaagaggcagaggaggtcgaagctttgaaggaagatacaactcccaaccaagaagattgtactgtctgttctatggagaggataagggacacacaacaaggacttgccaagtcacaatacaaaagaataatgaaatagctaaggccaaagcacgacagaatcagccgaagcaagttcttcacactgcttcgtactactctccatacatcccagagtatttacgtaaccaacaaccacttccacagtccacaacttcggttgcttcaacaagtcattctctacctaggtgggcattaactcaac

SEQ ID NO: 30749 - DNA, 343 bp, Zea Mays
cggcgaaggactccgccgagcggtggtgtctctgcgcacgccgccgggggggggggggggaagctggctgctggcgtaggattgatgacggaccgatggccgttggatgggaaaggagcgcccgagattagatcgtgtgaaccgttgattcctaacccttggatcataatcggacgataggcacgtagctctgtattcagtagatccgggccgtagatcctcaatccgagggcggtcatcgtgtactggttgatgatacctagatctaatcgtggcccttgattcgcgatcgggcggccagaaaccgtgcataccccttcgcggtcacgcatttgcatatgag

SEQ ID NO: 30750 - DNA, 358 bp, Zea Mays
gccaatgtggtggcagatgcactgagccgtaaggcttcctgccactgtcttatggtgaaaacctcggacaacactttgtgtcaagagatggaaaagctaaacctggggataatccaacaagggactctaaatcagctaaagcttgagtcaatcattttgcaaaggataattgatgctcaaaaggataatctgggtatgaagcacatacgagagaagataagggctggagtagccaaatgtttcaaggaagacgatcaaggtgtgttatggtttaaaaaccgcataatagtgccaaagaatgaagaactccgccagcaaatcttagatgaagcgcatcttagtcgctattctattcatc

SEQ ID NO: 30751 - DNA, 361 bp, Zea Mays
gcatgccaagcaccttcatacagtgctacaacgattgcgagatcaccatttatatgccaagttctctaaatgtgacttttggctaaaggagatcaaattcttgggtcacaccgtctctcaggaagggatagcagttgatccagacaaagtgcaagaggtgatggattggaagcctcctaccaccgttcgccagattcggagttttctgggattagctggatattatcgatgattcattctagacttctcccgaattgccaagacaatgacagagttactaaagaagggagtcaagtttgagtggagttagaaatgcaaagatgcctttcacaccttaaggcagcacctgacaaccgcgcca

SEQ ID NO: 30752 - DNA, 332 bp, Zea Mays
accatcatagggggtctgctatacaggagaggtgcggtagtgatcctcatgaactgtattcactcgactacaggaaggcaactactggatgaaatccatgcagggcaatgtggtatacatgcaacatcaaaaacattggtagggaaagccttcaggtctggtttctattagccaacaacaaagaaggatgcgacatatttggttcagaaatgcgaagcatgccagttcctatcgaagcaacaacacttgcccgcctatcatctgcaaattatccctataacctggccctttgcgtgctgggggctggatatgattggaccattcaaaaaatc

SEQ ID NO: 30753 - DNA, 776 bp, Zea Mays
gcgagggtcgcggtggatggcgacaagattgtacactggctgctcgtcacgagagcgagtcatggcactaggccacacatgtcgttggtaaaggaagaggagggacgtccacaggattggatcaaagagggtgtcgaggtcggggcctcttgggggatgagacgacaaggggaaagacaatctcgtcaaacaccacgtggcgggatatgatcacgtggtgggtggtgagatcgaggcaccagtaccccctgtgatcaaaggagtatctgaggaaaagacgagtggagcagggcgctagcttatggggaacagtggcgaaaatgttgggatagcaggcacaaccgaagacgcgaaggtgctcgtaggagaggttgtgacgaagagggcaaagaagggagtggggtgggcgggtggttgactgccttggagggaagacggttgaggtaggtggcagtgtttagcgcctcaacccggtatcgagtaggaagggaagcctgaaacaggaggcgacacagcatgttggtggtgatatgaatcatgtgctctgtccagcctttctgaggggaggtgtagggacacaagagccgcagttgaacactgtgacggagagaggaaggaatggaggagtcgccaaactcgtgaccgttatcacactggacaacacgaacgttgcgatcgaactgggtggagacccaagacaagaagtgcgagaacgtggtgaacgtatcggactttaaacgcaaagggaaagtccaaagaaaatgagagaaatcatc

SEQ ID NO: 30754 - DNA, 503 bp, Zea Mays
aggagtcacgctgtcccgtgtgcaatatctatcccgtgacccgtcgtcgtccttgcttctctgcgcgtggcagtggcatcgccttcgtctccggccggcccggctctcttttccccccgctagtgcagcggccatgactagcagactgctcagtatgccgtgtgacgatgtaaactcagcttggatcgcccgatgatggccggtgagtgaggggcactcccatgttcattatgcaaaccgtgctctgtccgctgtcaaagcgcgtggtaatctgctgcctctcttttcactttaggccaacttccgttgcttgctattggctgatctgttcggcagccacttcgttgagccgtcattctccggacattattagaacgtgtcattagcaaacatgatcgtgcaggactggtaacttggacgtacgcttagtagatcagaccactggggggtgtgcactgcttggtagaccatttggacactgctcagtagaccatgtgaacttg

SEQ ID NO: 30755 - DNA, 416 bp, Zea Mays
cgtgtgcgtcgagaatcatgatggttgggcgctctgggactcggtgattgctcgttggagttcgtttcccctcgtcaagctgttggccaccacggacgactcggaccggcaccctaagtcatggtaatgatagcctctcttgatttcccatacttccctcactgttttgcattccgccgcgtccgcgtaggagctccgaatcgggcaaattgcatgcgcgagggtcgcgctcgccgttgaccaccatggacgccaccgtcatttgctctgttggggaagggaggatttgggtcgtcgattggctagtgaacgattaggatcagtgcggggagtgggaatgcttcgggccgttgatggacgatctagtggccatcatcacgtaccaattcgttttaagtgtagacagatcctggcgc

SEQ ID NO: 30756 - DNA, 425 bp, Zea Mays
ccccaccccatgtagctcatgtgcccttccttttatagcctaagggaggcacgtacatggacactaggccccaattggtgggcccaggaaaaataataatatggagcggtacatgcaacaatgggttgagatctatcgatgcggtgagcagctatcttctcttggtcactgtgccgattttttgcccagatttatcttcgccctgtcttgtcgacgtgtgggtgaaggctctggtgtaggctgtggcgtagattgacatgtcgacgtgcgtaaggggagtacatggacggtgtcgtactatctcctccgcttgtctcctttgcctatctctgtagcaagaatagtagaagtcatgatgagggctgccaatgtgtggcgcagagagtcaatggtcttgcctcggtaatgcattggttacttacacg

SEQ ID NO: 30757 - DNA, 282 bp, Zea Mays
cagaaccagaaccttgccacgtctcgcagacccgccgtcgtgcaagcttatcaatcggaggagagagagggattgaggtgcgccgccgtgtgggatccccactggtgttctctttcggggctggcgatcggtcaggggctcctatcaagcatctgtgccatattgtggggtttggcggggaggacggacgatatcggcgaccgtaatccttcaccgacgtcgtgacttcaccgcgcgccgtaacccgagctaggcactgccagaacctgggtaagaaatcgc

SEQ ID NO: 30758 - DNA, 700 bp, Zea Mays
ccggactagcacaacaagtgtgaaaaatcgaagtcttttccaaaagactctccgtgcaaaagtcgcctaagggtgcacccggactagcacaataagtgcacaaaaccactctccgtgcaaaagtcgcccaagggtgtagccagaataataagcacgaaaaattgaagtcttttccacaagactccgcgcaaaagtcgcctacgggtgcagccggaatactagtatgaaaaatcaaagtctttttctaaagaactccgcacagaagcctacaggaacagcttgatcaacgaaagcgcgcagcttcatcacacataattatggtaacacacatacaacgagggcatcacacattacatcggctcaaccttcgggatggtacccatctccctatagttgaacaacattatcctcaattcctcacccgcaaacagacttcacagctccctctcacccacactcgccccagccggcaaggacaacaattcccgtttgacagtcccatccacacgaagacgaccaccctccatctcaccacgatgacgcctttcacctcgtgacaactcaaccactctccgtttcgccaccgctcttcgccgcctacgcccagcactcgcacccagatgatcctcagcacccatcacacgcggaggagtctccgccgcagccacatccaatgctgcaaaataatccaagtcctctt

SEQ ID NO: 30759 - DNA, 449 bp, Zea Mays
atttcccctcacctggaagtccctcgttccctaggagcaccgccccgtgcagctccatgttccagaacaggacgttgcttccctcctgctccctcacgcaaacctctgccacgctacagctcccagacatgttgctcgccctcgcaaagtgttggccttgtgtgctccaccgcatagcaccctgcgatcgctgagtcccgccatgttgtctccctgcttgtgttcacaagctttatcgccttgtcgtgcacacctcagggctcgcctccgtccgccatgagtcccaatcgcgggttcctggtgccttaacttcgccctagttatgctccctcaccagaagcactcgttgtgtccgcagatgcctggacgcgtgctcgtccatcgcgctcaagccactagacgctgctgtctccgccacctgcaacgagcttcgtaaccgcatcctgtcg

SEQ ID NO: 30760 - DNA, 1449 bp, Zea Mays
catcccagttcataaatgctgaaaatacccaaacctccgagttcaaggggtctacaaactttttcccatgccacaagacaatgtcctctaacctcttttcgaccacgccaaagaaacccttttctgattctatcaatgtccttcacagttgaagatggcaaatccacagccatggcaatgtaaattagcatccctgtcataacagactgcaccaaaacacgtcttccggcttttgttaacaggtcagctttccacctaggaagttgattagcaattttgaccacaatgggctgagcttgctccttcttcaacttatgaagagagaggggcaaaccaagatatttgcaaggaaaaccagctatctgacaaggccaaaaatgatgaacaacctcgagatcttcctcatgacacctgatgggatagacattagatttctggttgttattgtagagcccagaagccccgccaaaaagttgaaggatgtctaaagtaacattaatatcctcccccactagatgtatgaagagaaccacatcgtcggcaaaaagggagatacgatgttgcaaaagcctagatgaaagaggctgcaacaaaccttcttcatctgctttagaaaaaagctgaccaagcccatcaatcactaggacaaaaagcatcagagaaagtggatcgccttgctgaagccctctctgatgtgtgatggtgctcgcacggtggccattaagcagcacatgagtggaggaggtaaggagcagcccagacaggatgtctctccacacttgaccaaaacccagtctctgcatgacctcaagaaggggctcaactctctcattgctttgagggcatggattatttagaatcaacaaaacaagtgtatctttgatggctggacccccaatgtctctctagctcttcggttagctagggaagagagaatgatgtgggagatggctggggccaaggcctctcttacctagcagcctctattcctgaggtttagttctaggaagggtgggtcggatattttggtgaggttttctagtttgtttagatggatcttcttatgttgctgagttttcgacgtccgtaaggaagtccttgtacctagtctattttagaccttttccttcttaatataacggtgcgcagttctcatgtgcttttcgagagaaaaaaaggaaggaccgaagaaggctaagggaggacattgtctcttgccttggcttaaggtcactatgtctaaagacttagggggccttggcatcagtgatctttgatccttggttgggctgcgtgctcgctggccgtggttgcagaagacttaccagagcaagccatgggctgatttcccaattcaggtgggtgcggtaaatcagaaactgattgataggtggttctctctcatgtgggtgatggagctaataccctgttctgaaaagatcgatggct

SEQ ID NO: 30761 - DNA, 273 bp, Zea Mays
atggagcgtggccatcttcgagtagaccggattggtaaacgagaactgttgtcctcgtcgactggggcaagcataagtgagggggatctgcgaaatcttttttagggtgaggaattgaggataatgttgttcaattatagggagatgggtatcatcccgaaggttgagccgatgtagtatatggtgccctcaccgtgtgtatgtaattgtaacttgtattgtaatgtggcctgttggccgttttctcggcgagagactttgatggcgtgtttt

SEQ ID NO: 30762 - DNA, 573 bp, Zea Mays
gttggggtttcggctcccccggttaattaattgctcacgggaacttgtgatgtgccgtgtgacctagtggtgttttgtgggtttgagctaagggggtttggtcgtgtgatgcctggatggtaccatgccgatctgcctttgttcctgttctagatttgccttacgtgtggtctttagcttgttctggggcgtgagaattgcaacctgatacccctgatcacttctcttggaaactctcctcttcttgtcagtacagcagcggcttacatttcaatgtttactggttctatttgtttttcaacctggaggaggatttggaaaacatgggctcctgttaattgcaaattctttatttggctggccatcaataatcatgtttggacttccgcttggccaagaggggacttcctcatcagcctgcctgctctctttgtgatcaaagatggaaaatattagccttatccttgtttcttgtgttttctctagagaggtctggagttttgtgcttcagagagtcattccggctgtcagaccgccaaacatgaacagtcgatgtataactcatggtggtgc

SEQ ID NO: 30763 - DNA, 330 bp, Zea Mays
gcgaaaggccaggttactggtatggtctgcagttgctgtgctggcatatgctgtagctttgacaagtattggcaagcttcacacctctggactaactcggctgcatcgttcttcgccgtcgaccaatagaatcctgacctgaaaacctttccgacgagtgttctggatgctgcatgaattccacattgccctgcatggacctcctccagaagctgcttcccggtggacgggagaacgcacttcatgaggatgcctgacgcgccccttctgtacaatacctccccgatgagtgtatagtgagctgactgcctggcaatgcgatctgccgag

SEQ ID NO: 30764 - DNA, 368 bp, Zea Mays
gagctggaggcaacccggagggagaagaaagtggccgggagggaggaagccatgacctagagggaggccctcacgacggagtaccagaccaagctaagtgctctggacaagactctggaagcctagcgggcccagcaggtaaaggtcatggaaaggctgcagaaatggcagcaagagctcgaggacaaggccagcgacgtcgccctcgccgaggaaaaccttaaggagaaggagctgtccttggacaggtgggagacggatctcgccaggcgagggacagatcttgccttcaaggaagaaatggtcttccggcaaggcgagttgctggccaagcatgagctcgaagcagaggaaaaggagaggaagct

SEQ ID NO: 30765 - DNA, 329 bp, Zea Mays
cttggaggactttcctatgacttagactagtataatccaattgactaaaccctagaaccatactatttctcaacctctcctcaacttctctgtttcttctcaagtagggccccaaatggcactttctctacaaaccaagttagagagcaacctaaagtgccaaatgcttagtaaaaggtgtatgcaaaatattcaaacactcaaagcttgcacacttaacctttttcatcgttttgctcttttggtctgtttgaggtcggaattggactctaaaactccaagtctctatgagttgatcactatagccatctatgcgctccaataccctg

SEQ ID NO: 30766 - DNA, 604 bp, Zea Mays
cttggaacacttattcagcattgctatctgttactgacttgtgtgccacatatatatatttagtcagccttcctagaactccagctttctctcgagcagaacaggtactcctttgcaatcacacccacgctcgttggacagtcacaccggtcaccgtttgccacctgcagtgctggtaagaaccttgtaagagcggggtaagacgcttcataatttgtattccaccaccctgagagatagttatagggttcacattgttgcatttttgtctctgttttgtgctaacaatgataggaccaaagaatcaaatggacaaggataaggggcctaagcttaacgacgatgagtgtgtctctcagatggaattgaaggagatgatgcgcgcgatgactgaagcttttaaaaaataccaggactctgcggcgacatcctatgagcagcttgatcgacgagttgctgaacttgttacacgcatggacgtactggaggctcatccccccaccaactccagccccagctcactctcttgtggatgacgacgacgatgacgacgatgactaacccagtgttcttccaggcaagccccggtgcatgcaacctcttt

SEQ ID NO: 30767 - DNA, 1129 bp, Zea Mays
ggcacctgtggttggaggtggaaatcatggagtctaaaccagagggagacgaattcctcgatctgcaccgtggaggtaatcttgcctctcaacgacctgatccaattcccgtcattgatctcaatggcaactgacttgttctttcttgagactagctcgaagaggtgtggtgctaggtttcttggcgccatgccatcaagccaactgtcgtgccagaatttggctgtcttgccatctccaacggtgacgatggtggaggcgctaaagaggagcctatccacaaggttacaaggcacatcaaaccctttccaagggtgatcctctgtcgtccagctcttccaaagccatcttagccggagggtgcagttgaatttgtcgaggttgaggatgcccagaccgcctaaagttttgggcttgctgactagtggccaagccacaagacaatggccaccatttgattcagcctttcctctccagaggaaggagcgacggatcctatcgatgcgtttacgggcccatgtcgtgaggggaaagaccgacaagtggtatgtgggcatagcggacaggacggaagacataagcgtgagacgaccagcccgattgagcatgcttcctttccatccggccaaacggttctggattttctcgatcagaggttggacatgaattttctggagcgcccgggtgtgaagttggaggcctaggtaacgacacgggaaggtccccctggtcccttggaacggctggagcacgtggtctaggtctatgttatcacatcttatcgggtggatagagctcttctcaaggtcggtgaccaagcccgaggcgcagccaaaagcgtgcaagatgtctttgaccgccaggaggtcttctctagaggggttgataaagatagcagcatcatcggcatagagagaagtcctcagttttgttgtagttagcggaatgggggaaaggatcccatttctggctgcaaggtccaaaatacgctgcagcggatcaatggcaaggatgaacaacataggggaaagggggtctccctgcctaacccctctcctgtgttggatgtttgctccttgtcggccattgaggagagctcgagacgaggcggatccaaaaaggatggaaa

SEQ ID NO: 30768 - DNA, 465 bp, Zea Mays
agctacaagtgatgaactgcttgggccgtattccaaagcagaagataatgcattatctgcatcctttggtggccggggaaaaaagagattgaacagagttttcgatgccattggttttgtttaccccgactactggtacccgttgcgaggacggggaaaaaagaggaaaactgctgcttcggccaggactgttgcctcagccactccagatgagcctgcgctgaagagcaaaaagttgaaagtccttacccaccggccgcgttatattgaaccggccgtggtgcctgagtttggcggagagacttcttcagctgctaaaccaaaggagcccacttctcctacgcagaaggctaaagatccggctataatgccgaaggtaccctcagcggagctagctgagtcgaaggctgataaaggtaaagctgaagagccaaaaatcgaagaagcaaaaatgttagaaatttt

SEQ ID NO: 30769 - DNA, 803 bp, Zea Mays
gtcagtgtcgtagcacggcaaggatctcgcgtactgcctcgcgcaggacaccatgggcctgctgtggacaccgccacagttcccatggccactagtgccgcacccgcggaggtcttattcgcggtcggctgctgtcgcgcgggaggtagaagatggctcctggccgttagatgcagagcgtgggcatatcctttgaaggcgaattggagcaccagggtgataggaattcttcatcagaattgctccaccgccgcggggccatatatcaccgtgggtagggctccttgcacctcgattctgggttaaggggaatcgtctagcatggcggcctcaattgctcgtcgctgctgtgcatccacggtagcaccgctcttcgtcgtggcccggttccggcaccaccttgtcgcacggtatggagccctctgttacttcgccttaattacttgcacgcatagggctatcatgtttgggaaagagttactggtgtgccgagaacgcctccggccggcgagtgcgccgccgcagggaaaatgtgtgtcgtcggatagcagagaggaggaggaagaagcgttgtgagccactgatgtgtgatgggcgatccagatcaactgggcgcactgtctcagctgggcgcgtggtgagccgatcgatcacggttgaacgcctacgattaggcccttacgtatcccttcgccagattggttaccggctgtccgatcagaatcccgtgaccaagattcgacctcagtcattttaaatcaatgtcgtggatcggcgatcttgcggctgagattagaaccaac

SEQ ID NO: 30770 - DNA, 582 bp, Zea Mays
aaacagccgcccatattcatcaagagcttcttgtgccaatccctcctggtcagccaatatccccaaagttctagcaatatccactctgatttttctgacagctgtggaaggcgccccccctaccatccttcttcagcctgtgacttcttctaggcataaagtcttttggcgtctgcttacgtcgccgcttttgggtagctggtctggccaagatgcagtcaactggcttagtgatggtggccaaaaaatcctgcaccagcgaatggtcaacatctgaagtcgtggtatccaaaactgatgccgaaatacagtcagtggagcaatcatcccccgtctgtccctctagtagctcttgccttcccgttggagaactaagctcgagatcatccacccggtctgctgtcctagaaacagagtccgcaccaacatctgcgagaatggggcgtcttctagaatagacaagcagagcccgtggggaaatagtcccagcaaccgacaacacccccattctgacagaagacgcctcgagtgtaaaatcaaaaccaccaggatggagcgaattcgcaccagcctgttccagcg

SEQ ID NO: 30771 - DNA, 315 bp, Zea Mays
ccctcggcgacactaatcccccatctaattgcactaatccggaccggagcacgcttgctcacgacgatggcgaaaaccgagaagaaactatggtgcttagggcaatccagtgtggtctagttcaatcaatcgagcctacaagcaacaggagaccctagagatactagaacatacaacagagaggcatgaaccaacctgaggagggctggccacggtgagagactctcacggcggtgttctgactgatttgggggaaatggggaattgggaggctccggtgaacgatcagaggcaagagctggtgctttggatgct

SEQ ID NO: 30772 - DNA, 432 bp, Zea Mays
ggaaggaacgaccccggtggcggcctgaatttgccgtcggagcttcgtttctgccgtgaatgtgttgtgcatcgtgggtgacatcaccgcctcgtcaaatcttggtatggcgccccctatccaaatcacgagtaggtgaatttcattttgcgtgattcctcggggtggtttgctcgtcgggctcgcggttagcgcgacaccggtgagggaccgccgtactctaggcacaccaccgtactctgccgtcgagggtaggagtggtcctctgtgtcgtccaatcctagcgtgacggccaggattagaactacgcgtaccgattcgcactgcgcatctgaggcgtcgatgcagtgtcgggcggttaggatccagtcacgtgtacgataaacctggacttgatctcagatcccagggctccgtttgcgtaccggttcg

SEQ ID NO: 30773 - DNA, 338 bp, Zea Mays
gaggagttgagtcatggctcgacgagggaaggtcagcagggacgatctgaagagcactatctggggtgacctcagcctcaccatcagacagcaggctccttgcatctagctcgccgacctctaaggcgacttgtccagttaaaactgtggaagcacgtaccgccgtcgccccatcggaccgaggtggggatgaccctacgtggacgtccatggaggcatgggaaagagagcccacctgaacaccctcggtggctgggttgtagcttgcactacccacaagagctggatcactaccagcaacaccctcgggggctgggtaactgccggcaccaccctca

SEQ ID NO: 30774 - DNA, 341 bp, Zea Mays
gcaggagcagtgtagcagcctcaccacagagcacacgtactggcacagccacagtggtttggtttcatctcacgtcgtgttcaccttctccacatccgatgggaatggtgctgcatcctcacccaagtgtgctgcttccggcaaacagtacagacgggaacatctgcatcattgacatcggcaaacactagccagtcaactttaataatatggagtatgtatactaatctattaaaaacataatgtaggcatttggtgctactatgctgcatcctcccccgtgacactctggactcaccccacgcgtcccacctgatccccgtccacgcagctaccatgag

SEQ ID NO: 30775 - DNA, 515 bp, Zea Mays
caccccgttggcaaagtcaccggccttcgcagctaagtcatcgacatcggccccgcctgcaccagccgtccaagcacctgcacctggaggtgacgaccccgacgactctggggacgacgatgacgaggatgacaacgacgacgaaggaggagacaaacatgtcaatgaggaagccgactacgcccagcaagactacttcatggggtttggtcctgttgtcgaacattacacatcaatgttcgagacggggcacttccccaacctgctgcaagacgtgctgcacacgctaggcacctacgtccgccccttatacgaaacaaggcaagtgagcgagcctccccgggctttctactacatcactcgcatccacgtcagggtgatggatgcaggggataggggattcaggactatgtctgctcacgagtccttgacaccactatccacctacgctgccttggtcagcgatgctgccagacggaccctatggtcgcccagccacacctaccggcagcagc

SEQ ID NO: 30776 - DNA, 374 bp, Zea Mays
cagtcatcaactggtcgtatagttcccaagaatcttgttgcacattgtttctatcaattctagccattgagtgcatggctatttaaatgtcttctgatttttgaagcgttaagggagtcaaacaagttcatactttttcccttttccttcttctttggcattccccatctgctaaaggttgggaaagttctgtttgccaagtattcctgcactaaatccctagtgccaatatgcccagccaccaccctgaattctactttggctagttggcatggagagcgaagctgcatgttgcatagtggtctcgacatgccgaagcttaatttcaaagggctcatcaccatactcataagcttctctctttttttctcgtc

SEQ ID NO: 30777 - DNA, 363 bp, Zea Mays
gggagaaaaggtcgtcatagtggttgtcaagggtgtggagatatccggccatgtagactatggtggggtcatcctcattaggatctcttcctgacaaggcctgaagtcttttcctccaggtaggagtatttttgttgctgggtggaaagtagcggaggggtgtctcagagacttccctgctgtagttttggcatagctggcgtagtgctctttgggcagcattttggcaagtgtctggaaagcggtgtccagtggcagtgacttggaagggagggtgatttgggtagtttcggatttctcccaggtagactgccatagagcatttctcaattccgttctcgtggtattccttctagacatact

SEQ ID NO: 30778 - DNA, 283 bp, Zea Mays
cgggaacgtcccgtggtcaagaagatacacccaatccaccgccggtaccgcccacgttggccgaggctatcgctgccttggtcaccacgaccactgacaacacacgcttcctacgtgaaatggcaggacatcaatttcagcaacaaggggtgagggcttatccacagggaccccgtgaaacttcgtacctggatttctcagaaacccgtcccccacttttcgtcaaagctgaggatcccctcgaagctgacgaatgggtacgggtcattgagcagaaatttgg

SEQ ID NO: 30779 - DNA, 491 bp, Zea Mays
tcttgaagccacggcagatccgagctggcagcatgacgacgggttgggggagattgggtctcggtggcctgagcaacatgacgatatttgaggagggagggaggggagcgacgggcagggggagattgggtttggggttcctcacggcggcccgaccactgtggcgtcttgaagcatcgtgccctatcgtgtgagtgggatggagacttcgcgtggtgcatggatgagggcagagagggctcgtgtaccattggcgagcaatcttatggtcataattttagaggagacatgtaccatctcgggaggcagctttaatttgctcccacagttaatataatgtgggattacaagcttttactagactctacaaaataatagagagaaatcaaattgggtacataaagatgatatagaatcatggaaaggcaaaaacataggaaatactagtaaattgttctttcgaattactagaaccaataaacatactcccc

SEQ ID NO: 30780 - DNA, 412 bp, Zea Mays
agaagctgcaaggtggagtcctaactaagtcttggcttggcggggctctggcctcctggtcctcgtcggtgctcctcctcctgtatgtcatggtgggttcatttctgtctaaaggcatctggttgtctccaagtgtctgatccctctcaatctccctgccctaaggcgactctctcccttttataggccaggagaggggtcagccagcggtggcttctctaggaaggagctgtaaggtaggggtaaaaccagcgctttaccccgggtgaggccaccgtaccgtacttatgggacacgagggatgtctagctgtcatgtatttatcgtggtggatgacgtgagggcggcgatggtcccaggcgccaacattcaggcaatgtcgacccctagcttctatagcctggggctcgac

SEQ ID NO: 30781 - DNA, 455 bp, Zea Mays
ttcatgtttcccaatagatctctatttttagttgacagttttgtgctgcacagatcatagaaacaggaaacttatagctagctttctaacaactgcacagatcactcatttatgggcatggcatccgataaaaaaaacgaccacgaaaacaagacggcatgcttgattctccaatctccatcgcacactccaaagggatggcacattcgcagcactcgcttgagacaaagaatacatcaatcctgccggatcagcctgtggcatattgccccagtgcccccaaaaaccatcatccctgtcatggtcatggcctcacggcgcagaacgcagaatctaatcgctcactgaccgagtcgttatatgcccggcaggggaccaaagcatctcaacatagtcgccgatgaatggctgccctgatgttccactgctccagtgcgtgttgactgtcagggatg

SEQ ID NO: 30782 - DNA, 350 bp, Zea Mays
tctcttactttcagaagaaggattgtgggtaatttgaggatgttattcgaagaaatgataagttgttgtaatcaggtgtctttgtctgatcaggaggataaaattgtgtggaatctgggaaaaaaggcttctcagttaactctatgtacaaaaagaaaatggaagatcaagttttgattccatataagttcttgtggaaatctaaattgcctcataaaatcaaggttttcttttggttagtggtaagaaataaaattcttactagggacaacttgaagaaaaggaactggattggttctttggattgttgtttctgtggtgtggatgaatctattgatcatctgttcttt

SEQ ID NO: 30783 - DNA, 309 bp, Zea Mays
ccgggatcatatcgtctcactcaaatggacgacacagaaattgggaactcctggaatatagaacacctcaggaagttttatccctagctgtatttcaaaagctattgggacgacgatgtactctgtaaaatgggaaatatgtcatcaataaaaaaagcttcaagaatactcagtctgttcatgattgacggtgcaacatgctcgcgcttacttaactcggggtgaccactatgccctgctaacggagcaatcggcttaagtcggcaacgacttgagacggtgcaacatgctcgcgcttacttaactcag

SEQ ID NO: 30784 - DNA, 312 bp, Zea Mays
gagagagggaagagcactggcgcaaaggattcatggctttcaccgtggcaaggtcaccggcgatgatcggacacgctaaggtgagtcactacgatgaagtactgcgtttaggcacgtggcacccgagcggcaggcggctaactccggcgaggttatctggaccagccgtgagacaagcggacacggcggccggggcggatagtgtcctgagcacatccccaatgcgatatttcttaccccgagcagctatctgcacttcactgagcatgaatcacaacaacggcgataatcacggcgcgggatcaccggcgg

SEQ ID NO: 30785 - DNA, 403 bp, Zea Mays
ttgaggtccaagtgggggaaatcgctagcaagttcctggcagggaggtgagctcggccaggggaaatagcgcccacaccttggctggagatgagctgtcgtggggaagaagagacaaggaagaaggaaagtggcggctagggaaaagagaggggagtgagtgaaaaattgccaagggcaagagagagcacccctatttattgaaaatggctagggttagggtttcttggtgggctgggtcgggctggaatgggcttggcccaaaccctaaaccgggccgcgctaaattatttctagagtaaaaatgctccagcggatttcgtctctatggagaacagagcgaaatagagttcggacgaatggacaattgagcgattacttcggccgagagtctaattttattt

SEQ ID NO: 30786 - DNA, 277 bp, Zea Mays
gaaggtttccctatccttgaccaccgaagtcccgatgatgtcgcccgctgacaatgggtggcttcatttgagcctgcggaagtcgaattgcccgccagggttaacttaaccaatggtggcggtgatgcggcgaaaccaacctggttagtgaagaaagaggagcagtttgcatggcgtaacatggcggtagaacaaagagaacgatgacggagaacgcgcgagcggaaaatcatgaagctacaacaaaaatcacgagagcaaagtgaaaaatcctacc

SEQ ID NO: 30787 - DNA, 398 bp, Zea Mays
ggcttcaatttatagagctagtgggcggtggccgcaaatttgaagaaggacgcgcgacggtcggaggaagggaagagcactggcgcagtagcttggtgtcctacgccgtggcgattactccagtgatcaacggagagtgagagtaggctacggtgatgcggtggaaaggtagagacacgtggcggacgccggtgatggcttaacggcggtgagaaccttatccacgggttcggtgagcaaggggggaggcacggcggtgagttaccggagttatccttaggcgaagagctgctatctggcaggcttatctggtcaccggtggcgtaaatcacaacggcggtggcgcggatcgcagcggagatcggtcgtcggcggtgagagctctgcgctggcagtct

SEQ ID NO: 30788 - DNA, 487 bp, Zea Mays
ggttttgggaccttcttgcccacatagtgcccctcacctaggaacaaaaagtccagctattcactgcaggcctcctagaacgcatcaaaattgatgtcgagttgatggcaccatgggaccttaatcacacactaagtttggcgcgcgcatatgaacgacgttctcaagtgcttgatggcaacgtcatagcagcacccaccaagccagtgagaccgccccaacgaccatcagttccaatcccagcaacatagccaacagtgccagccataggcaatgcagcgccgcaacgaccattcaagaagctcacacctggagagatggcagaacaccgaaagctagggctttgttacaactgtgatgaacaatatgttcgtggccatcgatgcccccagttattctatttggaagtagctgacttcgaagaggatactgccatagaggaagttgatgaggagccagaaccagttatctctctacatgctctgac

SEQ ID NO: 30789 - DNA, 390 bp, Zea Mays
gtcttaccctaatcactttacttaactcatcctaatgaaacaatcgggacctaatccaaaataatgagatcttaactagtttaatctattcgtaccaacctaatctagattctatctaatatattatgatctaatctagagtaagttacttaatgctggtacaaaggataaagccatactccaaatccacttaagcttaaattggtgacctaaatcaacttggccatacccaacaacttgacctacatacacagatctatcttagcctcttgtcccaaacccggatggagacaccaaagagcaagactggaaaaggacaatatcaacctcgtcaaggaaggagagaagtcaaactcgatcttcagatgcattaccacccaacaaggagtt

SEQ ID NO: 30790 - DNA, 354 bp, Zea Mays
aaattacaagaaataatccatctacacactacacgctcagggtatacccacaggccagatatctctaagcccagcagcacccgccaagcaccagagcctggcatcctccttgatgtcgtgaatgactctagggacacttgggggcacgccatcaaacacacaaacatttctatgcttccaaatccaccaagaagaaagcgccaccagcgagttaaagcctcttttcttctctttacatactcaggctgctttccaccgatccttgttgctaatgtttagaaagagactaactatttgcatgaaggtcgatcgaactagttgctgttttttaggtaggtttggatgttcttttag

SEQ ID NO: 30791 - DNA, 358 bp, Zea Mays
tgtggttaactgttgtgaattgtgatgcctagtgtcctagtgtgcctggtgagttggttcagttatggcactgctgagtagtccagcctgtttggcaggggggacttataccgatagataaatgatagaaactggcaactggcatggacaaatgtgagattagaatgttgacaattaattaatggaactatagtcagtgtttcaagttgctatggttgtacttcatacaatttttacttcatcagatcagttgcctacctgcatctatgccgtgcattactatttaatttaggtttgcaaatttctgaacaaggaaataaatcacaccttgttttttctaactaaatattccaataac

SEQ ID NO: 30792 - DNA, 611 bp, Zea Mays
gtcatcagtcaaatatatttcatcacaggcaaaattcacaaaatgagcaaggaaaacaaagcaacaagtcatactcccttgattgatcatcattataaaacatatcatcataggcaacagttcaatataaaatcatcacagacaggtacaaaagtctcagaattattaattatcatccacagttccagattcagtgacataggcatagagcaaagtattaggcatagatcaaagtactacgcatagagcaaggtattaggcatcataggcataagactggtctgctcaaatctttgcaaggtgctgccttagccaaagcacacggtgtttaggctccatcttcacaaagccatcaccttgccttttgttgtccaataggtaggtaaggcaagtcatcaactcctcatcagtgaaacctggaatactcatgcaaatttgatatagatcagggtggacatctgtggtctggactacaacaggtgcttggacagcttcagccaatttgttcacagctccagtaagccctgtcataatccccaactcttcatcactgagtctccttttctttgcatatgatccataggaactaccagcaacatcaccactatgag

SEQ ID NO: 30793 - DNA, 320 bp, Zea Mays
aagatatctaactaacgactaatgcaactaagaacttttcaacccaaacaacatctagcgaaccctagagcacaactaaaaataatacctgacacattgccatgcaccaccacaacaacaacttggagcacctccaaagcgagacgacaatagcacaataacacgacaccagagctagaagggaaggtctacattcgagaaacccaacatagaacaagtatgactgcatgagaagaggtatgaagagaatgcctctaagaaggtagtagtgtctgcaaacattgttgtacaagctttcgccataatctcaagcatctcac

SEQ ID NO: 30794 - DNA, 526 bp, Zea Mays
aataaatatatgctccaccctgtcctaaattggaaatgcttccagataaatactcctttatgcttcacctgatggactcctatgtttatacagaaatttgtattgattaccaacattatggctgtattttataaagtgtggtggtgaggactgtttttggtgtgttttgtagtaactttgccgcttggtgtcctctgatttcagtaccagtgcatttcatctcttctaatgtaatatagttgtgtccaatgttctggtccccttaattgtcctgagtacgaactgtttaactccagatcttgatctatgtagcattttgataccttgtgaagtttacaacttcaaaataaaccaggcttatgttgtggttttcagaaaataaaaggcagggcagtgacgtggactttgttcttagcgaacaattgtttcatgtaaatttaatggaaaaggatcacatgctagatatgctgaaatatgatatcactgttttctggctaaataagtagcttacattggctgcccgcag

SEQ ID NO: 30795 - DNA, 500 bp, Zea Mays
gtggcagggcctaacaagggaggccaagcatgttggaagggaaccactagagtggatcctgcgctcgaccctagactgacccgccataaatgactggccgcattaaccatgcctggcatcgagccactgcatgggtgtcggttcgctcccacccataacctacggacccctcaggccgcatagcgctcatgacctacgagcccttggaaaacgcattaatggctcacgcgtcctcggcctatggtgtacttctggcctatcggactagtcctgagtgtgcagacctcccatagggcactacacgacaggctgtgtcgagcccgaggttacgggagccaggggttggcgtagccagaatgatggcgcctgggaccatcgccgccccctcgtcattccaccacgataaatacgcgacaaccaggcaaccctagaccccgcaagtacgcatggcctcacccggggtaaaacgctggttttacccctgccttacggctccttcc

SEQ ID NO: 30796 - DNA, 321 bp, Zea Mays
aaagaatattcagcaaaagaccccgcactcatgcagtatcttacggccgttcatagtctcgagagacggttcaaaggcttcaccctacaacatgtggaccgcgccaggaacgaagaggccgacgcgttggctaaggcagcggccagaggcgagaccttgccctcagacgtgttctatcacgtcgtcggcacaccagccgtccgcaacccagagggcttacaagtaaccaacgacgctgaaggccatcgcatcgtcaacctcatcatgactgaagattggcgggccccaataaccctgtttctgcaaggatattaccaccca

SEQ ID NO: 30797 - DNA, 416 bp, Zea Mays
tttgtaagatacttttgggaactatcaattaaacagctcttatctgtatggtgcttgttcttgctgtgtgtggttttatcaactcctctcctggtacttggcccccctgggatgtaggctcgtcgtgtcgaggctagataccagcatacctaagaaagagttgttgtcccggcccctaggaggtagcctcgactgggacctggacctgcacacagcttcggctaggaagtgttagtagcacacccattaggacccatcgtctggtatcagacatcctttgatttatgcaacaggacttgcagggtttggcctaggaagccaagccatgtgcccggaccccctgaatcacagttccagatactaggacacccatcacagagtggtggagcgtgtaggcttacggtacgggaccaggc

SEQ ID NO: 30798 - DNA, 348 bp, Zea Mays
ctctgctcaggttgaactagtactatcttgtatagatatggagagccctataatgtgcgtgcatcaattgtgtcatagcttgtcgcggcacatcatgtaaaatagcgatttgcgccgtagattacactgtttgcagagtaaggtttaaaataacggatcagatagaggatgtgacaggatagctgttggaggcagcctaaatatgttttgctgggtagcggcagatacagaagtctatgttgttgggtatggcatggttgataaataatatagtttcctatattttgtaatgcttgtgggtttatctgtttggttcacggacggtaacgtaaatggtaataataatga

SEQ ID NO: 30799 - DNA, 357 bp, Zea Mays
gtgcttctcatcctctcgatgtattgtcactctttcttcaagggttttccaaggtaagtgacatgtcgccctgatgtggtctccgatcgtgttaggatggtatgatgtcaccatcttacctcggtagatcttgtactaagtattgttgttggtaagatttgctagttatcatatgcattttcaatctatacatttactcttatgcttcatgctattagattgattttacattgccacatgtgtatccctttattggttgctacatcctacgacatgctagctacacatgtgcacgtggcaactcaaaagtctgataagcgtctagcaccatatcttacatgtttagtctcgttgttt

SEQ ID NO: 30800 - DNA, 808 bp, Zea Mays
gtcgtccgcattgttgatgaagatgaggaagaggaggatgaaatccctctagttcggaagaacagccgacgctacatagtcagcggggaaagtagtggtgttccttctccagccttgtctgctctcattggtctgcaggaattgtctttggcaaactttgatcagactcttgaagacatggtcccagaagatctgttgttggagccggcagatggtggaatgatggatattcatgccgatgtgcctgatgctgggctagagttatctcgagtggcgtcccgtgtctcatcgaccttagagtgtggtcttaagggtcaggaagctggtctggattgttctgctcacatggaagtgggtgaaggtccttcagccttagaggtggctgttacggagagcttggccctcaaggacgacactagcgtttacccagcccccgagggtgttgccggggatgacccggctcgaatgggtagcgcgagctatgacccagcccccgagggtgtccgagtcggttctccctctcacacttccatggacgttcacgtagggtcttctcctccgcattctggttgtatggcagcagctcaagcttcgggtcaggaagtcacattaaaggccagcgctcctgatgacagagttttgccatctgctgatgatactgacctggtccccactgatgcattgtgggttgttccagttggtgatccttcatcgagccatcaattaacttcccacgacttgggagttccttcgttcttttccaacctccaggtaacttggtttttactgatctggctgtaccccatgt

SEQ ID NO: 30801 - DNA, 488 bp, Zea Mays
cttgctcccatccatggtcatcgcgtgggagtgtgccaccgggggatgctcaactggttgcgcactggacgtccagcctccctgtgcgtgcggcgtggagcaaaccgggcgttgaattctgtgtgggtggccgaagctgctgtgccgccatggttagattctatcctagtcgtcggtccggccttggagggaggacgaaggactaccggtatgcaacgaacctagagataactccctagagggcagggtactcttgatccttggcgacgttgaggaatgtcgtgcgttccggttctctgtggccgacgtcgtctacacctgaatcaccggtataatcacgtttccctaactcgccatcgacccctcttctggtagcatccatcaaatcagggtttggggcgaccaatgcaccgattgcacgtctcaccggcgtgcgccgccgtgctgcctgtacgcgcctccgtgacccggtgcggaggtaggagaag

SEQ ID NO: 30802 - DNA, 411 bp, Zea Mays
acattatagagatcaaaagcttggggaagagggatgtaccatatatcacacgatagtccttgacaatagacaactcaaggtacttcaaatgcagataaagtgacttgggtagcttgaagattgcatcccttgcagcatacttacccacaagagccttgaagagcttcacaaatgacttgtagcaattatctatttcagactcagagcgactcatgttcagtgatctgaataccagtaaatccaactcaggcagcacaccaaggttttcttcaatgaaatcggtgtcaggaatcgataaaccacatgtcttgctgaaatacaaagggagtaatccagatctcattagcttgcgaaccctatcatgggttaagaacgggaggtcattgtcaatatcttcaatgagacggttca

SEQ ID NO: 30803 - DNA, 423 bp, Zea Mays
gttaaactacctttgtacgatttcttgcaatgtttacattgccactcctttgttccaccaacattttttccactcggaacaccaataatattaatttcatctagtagtggatgtctcataccagtagccgcagccgtagccccatcttcgtcaccgctgtctgcgtcaccatcttggatatctacaggcacctcttggacgacttgcacatcatcatcttctttttcatctgcacactttcttttgcttgaagaaccaaaaaccatgtctgcgactgcggtattcagactttgagttgggctgttgtggcactgtgcatcaatgaattgtgaggaggtctatttaaataacagcgaagcctgtacgcgtccaagtctaacgcttcagcttcctacgcggcggcggccggcagtcccactccca

SEQ ID NO: 30804 - DNA, 478 bp, Zea Mays
gttcctgatgggtattgtaggaatatagcaacaagtgttaatgttgcagaaggaaaaattgttggtctaaaaagtcatgattgtcatgtcaagatgcaacaacttatgcctattgcttccagggggattcttcaagatgatattacaacactactgtttgagttgtctgcattttttcgagggatatgttcaaaagttctccatgtcgatgagttggaccatttggaaaaatctattattattactctatgcaaaatggagatggtttttcctcttggttttttcacggtgatggttcatttaatagttcatcttgcggctgaatgtaagattgctggaccagtcaattatcgatggatgtattatattgagaggtactaatgagctatggtaacaatattcattatacaaatcttttggttgttcaatctaatattttggttattttgtttgtgttgtaggtacttagggaagctaa

SEQ ID NO: 30805 - DNA, 360 bp, Zea Mays
tgccactaggtgcattaaccggctgaagggaatatttaactcggttggagctacttctgaagaaattaacccttcagccgaagatatccccgggaccttcgaacatattgaaaatgaagttgaagcccttgatgaagtataaccgggcacggagatttatgtgcactggtggcttcacgcggcacagctgcagcatttatgaaggtcgggtgcaatcatgccaaaactgttaataagccaattttcaacctttcaacatcagatctaattgatattccagtcgaagcccgaagcataggaaacagatttattacccaaatttgggcaaaggacgggcgtgaactggtcggggacgaagaa

SEQ ID NO: 30806 - DNA, 551 bp, Zea Mays
cgtgtagtgagattattagggataaccttcaccgtttgtttcctgtttttgtgtttcgatggcaggcgacgacgaagaagcaaggatccctacagacttcgatgaatgtgttagccgccaagatcttgaggcaaacaacaagctcctgaaggagcaaatggaggagacggtccacaagtcagtgcatgatgccttcattaacatggaccttggcaggacttacgagagactggatcgacaattgtcccagatcgtcgatagacttgctgtgttggagacgcaacaacaagcaccgccgccaccacctcctcgtccacgtcttcccgatgatgcggtgattgatgaagaaggtaattatgatgaagcagccaccagagatttgcgcctccgtcgtcgtcttcatcaaaacacagaaggtatgccacaccgccagcaaggtaataacaatcgtgctcctgacgacccttatgctaagattaaattttctataccatctttttcgggtcattatgatgctgagggatatcttgattgggagatgacgatagaat

SEQ ID NO: 30807 - DNA, 326 bp, Zea Mays
caaccgcctcaagcgagcctgcgccgaagaggaaaaaagtgaaggttcttactcaccgaccacgctacattgatccggccatagtgcctgaatttggcggtgaaacctcttcggctattgaagccaaaggacctgctcttacgcaaaagattgaagagccggctgcaatgccgaaggctgataaaattgaagaaccgatagccgaagggacgaaaacatcagaagctctaagcctttcggcagaagcggagacaccgaagacacagaaagatctggcggcgacccccaagagaaaaaggatgattaatgtattagatgtgctagag

SEQ ID NO: 30808 - DNA, 533 bp, Zea Mays
ggtgtatgctagctactgtagatatttgataggtcgcctcaaaaggtaaaatgtttccacgacaaacacaaacggctcctccaggttgcaatcgcaacacggggtttttttaaaaaaagattttttcgcacgcctgggtcgtctctgaaagcgccgcggttttttctttctcggagctgtgtgcagaatccctgcaaaaagttgagaaaaaaaaaccatgcaagaacagcgaccagcccacgccccacggttcttagccaagtcgctacgtcccagcgttatcgcctctctacacggatccgcgtcggacgttgttgtcatccgcgtggggccgccgtggagacaaagaccattcatccactcgccaccgcaccaccacgcgacaaagcatttctctcctctctccacgccacggtggccgtgtcgttttcgcgtgaactgttcgaaaaagaagaagaaaaaaacacatacacttacccgtcacaagattttggcacgcgaggttattcatcggcacgcgacgtacggcgacc

SEQ ID NO: 30809 - DNA, 308 bp, Zea Mays
cgccgctgtagggtccctctgagctggcaaccaggactccatgggtacgtgtcagaaccgacatacccgggctacagtggcacgctgaaggtcgagcagacgtggatcagaagcaaggggtcgcacctcagtctcgtcacgctccctgaagcgaggtggaggaatgggcagagcagaaatgggagcgggagggggaatagtggaagctggagtggtggaggtggtgggtatggcagaagtggtggatggctctggagcgacaggagctggtgaagtgggaggtggagtagacactgtggcggaaagtg

SEQ ID NO: 30810 - DNA, 349 bp, Zea Mays
gccgcttcagagtcccgtccgagctcacagttgacaatggcaagcaatttgacagccaagatttcaaggatttctgcttctccattggcaccaagcttgccttcgcctcagtgtaccacccgcaatccaacggagtcgtggaacgcgccaatggtaaaattttcacagccatctagaaaatgctcctcgacgacaagaaaggcaagtgggtcgacctgttacccgaagcggtctgggcgctaaacacgactgagtgcagggcgactgggttcacccctttccgccttctatatggatcggaggccatgaccccgcaagaaataaaacacgggtcaccacggacagtcac

SEQ ID NO: 30811 - DNA, 794 bp, Zea Mays
tgtcctaagctgtccagtaaacaaacgcatcccaaatgaacataatagtagagcgagcgccatgcccatagttttttcattaattatttgagctcaagtatcttcaaaccaaatacctacaaacatatatatgcagctgtaggtcaaaggcgtggagtctcaaccgaaagcctgaaccaaggatacgtcgtacgttacgttgcgttgccgttgcgtcgtctcaagcatgcagatgcaacgcaacaacctctcggacggacgtgtgacggccgacatgcatggtcaagcaggaatcatcggtgtcctagtttttcatctgcaatctgcagcggaactgtgagtgacggccgctctgcctagtatactatacaactcgtactcctgctaggctagctagctacacaaccgcacaatccatgcatccacccggccggccggtacccagcccagatgtacttgcgatggcagctttgttgtcaccggcacgcactggcaatagtagaacgagtcagcgagggatagattgaagaattaatggcccacacctccactggacaactgctatatactaggataacagagtgctgttcatcaatggatccaaagaaacgttctaactcgtaacagtattcacatttccgtctctagaccaactccagcaacgccctatactcggctacacgttcgtattctgcacgcccgaagccactattccaccctccaacagactctgtaaaccacagtgcaaaatgggtgtgcattttttcattccgtatttctacggtgtctctctc

SEQ ID NO: 30812 - DNA, 524 bp, Zea Mays
ctggtctgaaccaccgcgctcccacgagctccatgctacccctttgatcaagatgagtcaacaaggtcatggctataagggaatggacgaggaggaggaatgacgtcaacggagcgagcatgatcatcctttcaatacatttcatctattcttcgtcttcacgtttataactgatccctctcttggcatataaaagaaggacaaccgacacactctcgatcttggactctcactctctcactcgaattcaatccgaccgatctaaggagaatagactcgatccaacccgacataatcaggacataacaccatgcatgaaacacacgctcatgaagcaaacacaaccctcgaaccaaagacttgggagctcctgcatctctcgctcagcttgtacccctactacaaataatcatgtaccggtagcgaaaaccagtgaatactggagtagggatattccaacagaaccggtataaattctcgtccaaaccttaaaacacgcataacaaatttgctcaacagtatgt

SEQ ID NO: 30813 - DNA, 1410 bp, Zea Mays
tggccagccagcagggagcaaagcgcgggggcgcggggctcataaaaaagcgagggcaatggaaagctcagtcaccgacaccgcgccgcatagtatattcctgtatactatagaggtagtaggaccgttgggtccgtgtctgctatggactccgctgtcacacgacacgtaaagagaaagggttcctgcccccgggagattagggtggtcgtgctttattacgatatggaccgactcttctcagtggcggacgcagaacaaaattctaggtggggccgacagtgcaagagacaaatcaatagactagaccataaatatagattaatgataataacatgaatattaaatgataatatctagtgtttccaaaatgatatgaataccaaaaaacctttttggctaccaaaaggagatctagagagagaaaataggtggactgaccgaggacgaggcactagggcggagcagccgcatcggcgcgttgttctggcgaatcattgaaattgtcgtgagatggcgttggtgagacgacgacagctaggaggagcgagtgcaggaagcaaggtagcgatagatgacggtgacagcaagcgacacccattgtcgtgttgcaacggcgcgatgggactctaatgagttagcgagggacaggtgacgccacggtcccaccaacaacttgcccatctgctggtgcggactaggagacaaaatatcaacattgtctgcaggatcccgacgagtcgacaagctgatgagtgatgagaaggcaaggtgcgctgcagcgggcggattaggtcaccgacttactggtcagtcgatgaccgaagaagcgagtgagctacgactgggcttgcgctagggaagagaatcaaatggcttaggtgaagagtggactgagcagtgaagcgtcggcagaaaaatagatcaaaacttagttttcattagatttgtccacgctaactatacaaaaatttgtttattttagtgtgtacctaaatcttggtataaggagttaaaaaaattgaggtggggccatggcccaccttgcccaccccttggatccgcccctgactcttctagcgtcgttggcgactgcaacttgctgacttgagcatgcgtagcaataacacgcatggtgggggtggtggttgggaacaaactaactacccctgctacggttacggacggttacgtccgcagcactcatggttgccgcacggttggtcccccgtcgctttcctttcatgcgcgcccgcccgatccgcttcatgggatgctggttagttgcgggctttatggctgtctgccattcgtcttccccgggacggcctctttacactttgagtttcagctcagctgcacctgcacgcgcgcgcggcgatgatcacactctcatcagattcggccccc

SEQ ID NO: 30814 - DNA, 284 bp, Zea Mays
cgcgcggcggtggggcgccggcgagcgtggaggagatcgaggccaggcttagggaggccgagctccggaggcaggtacgtgtccctttcgtcctgtttccttcttcccgccgcgtgctagtttggtttacgttgcttcttgcttgctcgtagttgccagttgggttgcttcggcgtgaactgtgaagtcgaaataattcgtagcggtcacgataattacttgatcgctttttactggtgcggtgaggcgaggccagggtagttgttctccgcccgtttctgaag

SEQ ID NO: 30815 - DNA, 464 bp, Zea Mays
cacatatccagctctggctccttggtgccctggtctctcactctgagtttgacgtcgtggatttccttatttgtgagatcgaggacaccgttttggatgggattcgtgctcgtcgacagttgccatatgctcactacttgtgccacatctttgcgcagctgattcagcctcctcggtttcagggcacacttgaggcctcacgccttgtctttggatcctactgtcctgcgcctgaggctcctgtgccagcttctgctcctatttttgactctcaggccgaggatgctgctcttcgtcagttcgacactcaggatacaacagttgatgatgatgatgatgatgattttggggttcctcctccgcctcctatgcctccatgctcccatgatcatgaggctgggagttctagtgctgcccctgctgcccctccggctattgaccctgcccttgcttcgattctccag

SEQ ID NO: 30816 - DNA, 486 bp, Zea Mays
taatcgcttgccgacataacatccaacctcttagggagaaggataagatagtccgaattcagcaacccaagtttatgagcatttccttgatgcaaagaattcagggcagccagcagatcctccttaataatgttccaacatgtcttgtaaaacctccccgtaaacccatcaaccccaagagctttatcagaagggaggcctgcaacagtatctcttacctctttctccaggaaaggattatctagcgcactaagatccaccgcatccctatgacagcttgatagatcaatagtaacacgcctctgaaaatcagcgcccagaaggttggaaaagaaaccatccagaacttcttgtatgtcatcatgatttgtaatcacccttccatcatcctctagttttgaaataaacttccgcttcttacggtaacaagcatgtcggtggaagaattgagtattggcatcaccttcttttaaaaattgaatacgt

SEQ ID NO: 30817 - DNA, 457 bp, Zea Mays
aggtgagttggtccaacttttcgattttatatgggtgttcaactgagcctcttatagccctcgttttatccgcccgccgctctggaatgtaatacactccgaatttgatgtgaacacaaactctgtgaattccgacatgtatttatgatccgctgtgctggggctgccttgtgcaccgaatcagtgatcgggcaacgtaatacaaagagggagcgcttgatcatctgagctggttttgtacagaatgtcaggtatagccaggtgctcgttgtcgttgcttcagttttaacgagtcggtcatgcaatgcagctaacgttctggcatcggccatgctctgttgcagagagtaatgtggatagcatccagatatctgttagtaacgatgagaagaggaatagggcagatgctaagatctcgcaggacgagccgaggcacaccatgatgcggtcactgaag

SEQ ID NO: 30818 - DNA, 317 bp, Zea Mays
ctcgggaatcgtctcttctccagcgaaatgaattggttcatcatcactctccccaaagtatcctagtttcttcatcaaaactaaatcctctgcctttactgtggattttccaaacttgacatggctgggtttgcttgggcttaggatactgtcatcattctcactttcattgtcactttcagcttcagcagtggtctgttcagcttcggtgtcagtaacaccttcggcaatagtttcttcctacgcaaccaacccaaaatgcctcatcacttctaagataggagctgtcttagtggtttcagcctcatccctctcgc

SEQ ID NO: 30819 - DNA, 321 bp, Zea Mays
agaattgtagtttacgagagactcgaggcccctttatgtaaagaatgatgtagccctaggtggaccttggtctaatgtacaatttttatcctgacacccttctttgtgtgaatgaatacttacgtcgagtcttccttcgagagttggtggcatgacgtgtggcctgacacaccggcgggccatgcctgcttcctcgtctagtgggtcttttccgtcggtcccaagtagcagggtttttgcaggatggcctttgtttaatcgcgttgctcaccctatgttgtccaccttgctttcggttctctggaccctcgtcttctttgc

SEQ ID NO: 30820 - DNA, 344 bp, Zea Mays
caattgtagcacacaggttgagctctcaaagtgccaactttccagtttccatcttcacttcaacgcaacctccaactcatatgactgtcagtctgttgtcgttgaccttcatttcctcctgatggaaatggatcaccaccgacttcaatgcttatgctctgtgctccagctgtggagcttctccatccttctgcaaccgtacccagtatgataataatgaagaaatcaaacgtaagatcttcgttggtgctttgattcttttctccttgaaacaaacagcctttcttgttttctatatagcccagcatacaacagccaatcccactctataaaactctttgcct

SEQ ID NO: 30821 - DNA, 333 bp, Zea Mays
tatgtgtgccaaacgaaagaacttaagggttgggatgttgtgtataaggtatcaccgcacggtagattacctaatcctaatgatgaagattataacttagacccagacacatatgatggagagttcttccaagaagatgggctagaagagcgatttgagatagacttaaccgaagctatcagaatggacataaatattgaaatggttgttgatgaggaggatgatgagatgcaaaatgagaatgacttagtaatccttgaaggcaatgacattaatgacgaacctgcgcctttagatggtgttgactatgaaatggttgatagtgatgatgag

SEQ ID NO: 30822 - DNA, 278 bp, Zea Mays
ccgttcaatcggctatcgacggctgggattagaaggtgcatacctcttcgagtcactaaattatggccattgatccgcagacgaatggttctgattagatcgttcgatacctcttcgcggtattagatctgggcgtcgatcggacgatgtgcgggtgagattagagcgaccacataacccttcgccgtgaaatctggaccatagatcccggatcctgcggcctggattggataccggttcacatatgatggcgatctaatccgagccctcaaatgccg

SEQ ID NO: 30823 - DNA, 383 bp, Zea Mays
aaaatggacccacactcagctcgtgacgaccatcgtaagaagggtcagtccctagacttaaggcttaacccgtaaacccccatgcaattctcacaaattactcgaagggggctgcatctagcagatgtgcttgtgcacaccgaggaagcgcttgcatgccccgtacttcggtcttgagcagggagcaagacaataacaaatagacccacgctcggcgcgtgacgaccaccacaggaagggtcagcccctagactgaaggcataactcgataaatccctaagcaattctcaccaattacttgtgggctgcatttagcagatgcacttgcgagcaccgaggaagcgctcgtgcgccctgtacatcaatcatgagtagggagcaag

SEQ ID NO: 30824 - DNA, 297 bp, Zea Mays
gcggacgccacttctcaattcattaattctgtcgccatctgcgacccatatatcagtcctgcggcagagttccgcttggagccgattaacttgtgcttcaagatcccctatcggatcattacttccaatactactatcatcatgtcttggggccagctgatgacatggcacaccaatcggtccagtatgcttgcgcgtagttctcctcgtgtgcggcagcatttttctaaggggaaaattttattagcatagttcttagcatgatgcatgtataattacagaatcaaccttagttga

SEQ ID NO: 30825 - DNA, 272 bp, Zea Mays
gatatgcactgcttaagcataactgagtaccagccattttgaacagttcttgccacaagtgactcgtaaagaccgggtccatgtctgaaatcatagcaactagtaacccatgtagccgatagacttctaacaaatatagtttagccactgaaagagctgtaaagggatgagccaagggaagaaagtgagcatacttagaaaacttgtccaccaccactaagatgcaattagaccgattgaactgaggcaatccggtgataaaatccaagcta

SEQ ID NO: 30826 - DNA, 398 bp, Zea Mays
ggcccaatggcttgctctggccacggtggccgtgaacatcacggcgagacaaccgtgttcccggcgaccagagagctcttagcgcaattacgtgggtcagagagcatcgtagatctatgagtgtacttaaacggggaagaagatggtatgagcggacctgatttgggctggccacgacgagattgagttcacgatgttctagaaccggattggggagaatccaaaatttgtgctcgctagtgagggatttgggatgcaggtgggtgcagcagctgcttgagtacatggcggagctgggggcgcggtcaatttatagagtccgcgcgcgatgaccgtgaatttgggtgctgacgcgcggtggccggaggtgaagaagaactggcgcgcgtgagtgcgtg

SEQ ID NO: 30827 - DNA, 426 bp, Zea Mays
cgaagggttacctttaagtctcagccgttggattagatctggacgaatcggattgtgaggatgaaggggaacaacccgagccacacatcaatagatccatggtccggatcgggttggcacaaagcagtacacaggttttaatctgcaccgcccatgtcgatcaaacggctgagagatcatcttccatcctggccgacagagcggtggcgcccgagcgacggtggtggcgggttcgccggagccacacacaaatgcgcaacagagcgtagtttgcctatccaactagtgaaacgcagggagggggttatggtggtcacgcagaggggaaacttaccgacggcggcgaagcagggacacccggccatggcgcggtgcggatccccaactccggcgaggaatcgccagttgccccgcgtacaatacgtg

SEQ ID NO: 30828 - DNA, 1092 bp, Zea Mays
attgccttgacctagcaggtgatattgttctgactggcgctagagagcaggaccaatgctagtgacaatgttcattgttacttgttagtgagccgcacgacaggtcccgtggtcactatggcaacgaggacttttgtagcttggcgctgacgagcttgaccgtggtgaggtccagctgaggactttcttattgaaggcggtgaccatcgatggtggctatcaagattggtcctgggcattgggggtgacgccgaagaataatagaagtgttattttgccatgggaagggtggcacttccgctgaagccgtatagcggttctcggcttgctgcaattgttgtggttgatcccgtgtgatcaaaggcatgcagaaagatgatatctgcctggctactgctgttggctaggactttgtgcatatgccatcttgctatgttgcatttgatgaccatgacgtctacatgtggggcacttcaaagattcgtgtcccttgtatcgaaggttaggaggacatgcgacatcttgtttgtatcactggtccggtgactacaacatgattgacccttttgtaagtcttttcgttgccttttattttcgaagtctatgctagacccgccagatatcatgtttattatgccgtgaactgtcgattgttggaagtgaccttcatctttgggaggtgggggtgtatgatttgagggggagggtggagttggatcctttcttggtgggatagctggggtggtagtttgggggaaatgagggtaaggttgtgtgttttggtagtgagggggattgctgttggtatgaagtgtgggcgatggtctttgtcggctagtctggaattgatctggccattctttccttggcctctttggtgacggggcaatccctagttgaatgcccgacgtcctctccatggaagacacaatatgaccttcgctcttgtttggatcctctgtcgctgcctttgtcggccctcgccccccttgttgagtgcttggtatgctcttggttgcaaggcgtcccttagctaggttgctggtgatgagtgatgctattgatttggggttgttggcggtattgcggctg

SEQ ID NO: 30829 - DNA, 447 bp, Zea Mays
caaatggctaacaccatggcggatatgtgcgcacagatgcagcaggaacgccaagagatgcgccaggagagagaagagatacgccgggagctacgccaagagcgagaagagatacgccaggagagaagggcgcaacagcaacaacagcaacagcagcaagtaccactaccaccaccacctccagttccaccccgagacaagcaccgggaatttatgagtcacaagccgccgaccttcgccagttcgctagacccactagatgctgacgattggttgaaatctattgagaagatgctcaacatcgcccaatgctctgaccgggagaaggttctttatgcttctggtcgtctgacaggtcctgctattgactggtgggattcttatgttgctgcccatgatgctgctgacactattacttgggcggaattcagtacacagttcagaaac

SEQ ID NO: 30830 - DNA, 363 bp, Zea Mays
agaatccatgtctgacatccacaatgtgtttcacgtgtcccagctccacaaatgcctgcaagcaccagaaagtcacgtcgaagaagaggcaatacagattcagaaagatcttcagtaccgtgagaagccagtaaagatccttgattcagcagtccggaagacccgcacctcagaagtgaaactctgtaaagttcagtggagcagagaaggagaagaggaagctacctgggagagtgaggactccttgaggagggaatacccttatcttttctcaaatcccgtctaaatctcgagggcgagattcctttaagtggggtaggtttgtaacatcccaaaatctcaacccaaggtttcgaaccctaa

SEQ ID NO: 30831 - DNA, 329 bp, Zea Mays
ggccaagttacgggtatggtttgtagttgctgcgctggtagatgttgctatttcgacaagtactggcaagcttcgcacctctggactaactcggctgcatcactcttcgctgttggccagtagaaacccgacctgaagaccttcccaaccatggtcctggatgctgcatgtatcccacattgcccagcatgaacctcttctagcagttgctttccggtggctgagagaatgcatttcatgaggactcctgatgcgccccttctgtatagcgtttctccaatgagagtataatgagccgactgtcttgcaatacgttctgctgcattttt

SEQ ID NO: 30832 - DNA, 541 bp, Zea Mays
acaggactatcttagtgttgtcctcagctatcacttaaaattggagggataagaggggacattggaggacgtggttgtcccgcaaccaaacacacccttaagatttttgggaaaccatacatgaaccaaacaagaccctaaaacaacacccacgtggattgagcaagaactaggtcaacaaacatagaaaccctacggcaaagcaaatcctgatgtcatcgtcgcatatacgaatcagccaacctttatttcctgcatttcctcctgtccacacaaaagtgggagcacatcattttaccttttgctccaagtgacaccatgatagcttactactcatcccgccatatccatccacacaattcacactgatgataaacaaattaaatgaagacgctttgctggagacgacagagcaaatcgattttgtgtagtctcgaacaacaacagagagggaccgggaggacataggaagacacacgctgagcgagctagctgaaattcgacgatgatttgatggcaaccaacgacatggctgatctct

SEQ ID NO: 30833 - DNA, 346 bp, Zea Mays
tgtgtcgtcctcctcttccccatgtaatcctgcctctgcgagagcgataagctcactcaatctagatgtgtcatcgtcctcctcctccatcagctccatcgccgccattttttcttgaacatatcttgcatgtgcctcatctaccatatagtttacgccacatccaatctctgcaaatataatgagaaaaataagttagcaaagtcaggataaataaattgtgctaacaaaattatagtatcatttttctcactcacttcccttgagacgatcaacaagattatccaatatctgtttctcggctctagccgcctcccattcccttgcatcttgtgctctcttctca

SEQ ID NO: 30834 - DNA, 287 bp, Zea Mays
cgaggatgaagaagaagaggaggaggtccccttaattcggaagaatagtcggcgttacatagtcagtggggagagtagcgatattccttctccagctttgtctgctctcgttggtctgcaggaattgtccatatcgaactttgatcaggctctcgaggatgtggttcttgaagatttgctgtccgagccaacagatggtggtatgatggacgtttgctctgacattccagatgtgggattagagttatcccgagcaacgtctcgtgcatcgtcgaccttggagtgcg

SEQ ID NO: 30835 - DNA, 368 bp, Zea Mays
ctggcggcggacactatgggagttgtgtgcccatcaatttctgtcacatgcagcgccagattggacaccttggtggcgagatgtgcaagggccttcatcatggtgtccatcttctgctctagggctgcgctgatggtgtttggcgccgcagcagatgcgacttcgctggcagtgttgtcgtcgttgcctggcatctccgataccagattggtatgccctcttctccttaggttgtagctgtgtgtggtaggtggccgctccttgagcagttggcgatgagaggaggtcgtggttctcacggcctgggagaagacagcaggggaggagaaactagggcagggcggcggctgatcaacaatatgttgatc

SEQ ID NO: 30836 - DNA, 545 bp, Zea Mays
ctgggtgcacaattacttagtgaagcaggctggggcaccaatttatagtgtccaagggcggtggcttccaattttggaatgtcacgctggcggctggagagaaggaaggtcactggaggctccgtcgtggcgtccgccggtgcaatggttctgaaatggcaagcctaggcgtgccacggttactactacgcagtaaagagctacgacgtgcataaatgaggtcgccggagtaccacgacgacaccggcggtccggccacgtcgcacggctacaggcgcaggtgataagcttcaccccgcgaccaaatccactcccctaccgatattttcaccccccggtactatcctgcccgagtcctgcacgaatcaccgtgatcagtgcgaatccttgcgcggaggtcaccagcagcgagggggatgaatctgaagatttttttagtattgtaccatggccaccaccttcagtcgttctgacagcccaagttgaggagcaattttctccaatttttatgtgatatctcactaatcttcctgtatcaaagttat

SEQ ID NO: 30837 - DNA, 721 bp, Zea Mays
gtgcagcttcagatgagcactgcgtatcatcctcagtccgatggatagtcagagcgtgtcaattagtgcttagaaacctttcttcgctgctttgtccatgcctgtccacaccagtggagtcgatggttgtctgtcgcgcaattctggtataattcttctccacattcagctataggcatgtctccatttcaggcattgtatggttgcacacccaagcagtttggcattgcagatcagactgttattacgtcttctgaattgagttcctggttgaaggagcgtcagctcatgtctgagctggtgaagcagcatttggagcgtgccaaactacggatgaagcgtcaggcggacaaaggtcgttcggagcgtgagttcgcagtaggtgattgggtatttctcaagcttcaaccgtacgttcagtcatccgtggctgttcgagcacatcaaaagctggcgttcaagtttttcggaccatttccagtgttgcagcgtgttggctcagtagcgtataagctgcagttaccttcctcttcacgcattcacccaatttttcatgtgtcgcagcttaagcgtgcgttgggcactggtttcactgcatctgtgactttgcctactgatcaatttcattttagtgtgccggtcaagattctgcaacaccgcacagtgatgaaagggctgcaagcttgtgcacaggtcctggtccaatggtctcacatgtcgc

SEQ ID NO: 30838 - DNA, 400 bp, Zea Mays
ccatgcgtatccgatccgaatccatccctagtagcaagtgacttggcggtggtattccgccagtttggcactaatgtcgaccttggcgccgagccatgcatgaaccctagacaagtcctccattttgtcatctgttgtcttcctttctctttttatttcggatgtactactatgtagaagttggttttactttggacgaactgtagcattggatctcttgaattaaggtcgatatcatggaaaactaacagaaaaataagaactaattattgcacacatcctaatttgtttttttcaaccatttgaagaaacaaatcatttcaagcgctacataaacattacatgtgacgatatatggcttgtgtggaactttaggtaggtaaaactaaatagtctcaaa

SEQ ID NO: 30839 - DNA, 313 bp, Zea Mays
acacctagcatccggctctagcccttgactcctcatagcccatataaaaacccccactctaataaaggcttcgggggtaagttgatgaaggtatttcgaatgtcttcagaacttcaaccaacatcttgtgcagtgggaagcgaagcccagctttcatgaagcttttaaagactaccaccccatcagcttcggaaagagggactgtgctttctcccccgccctcactatagaaatatcatgaaaatattttcccttcatcgcttcgatttgcccttgcttaacagttgacttcccaaaaacaacatggctcggc

SEQ ID NO: 30840 - DNA, 359 bp, Zea Mays
gttgtatttattctaaataaattggacctctatcggaacagcaatgaggtttggtgttgtaacatcatttctgcaccattgaaatcaaagcaagatttattttgttcctaattgcttgtttctaattcattgccttgtttctcaatctgatgtgtatagcttgaagaagctactgcatttgtcaaggaaaatgcaatgaaattgcttaccgcagaggatgtcacactgtttcctgtatcttcacgctctgctctggaagccaaactttcatattccaaaaacagtgatggaaagcattcaaccgaagctatgtataatgatcctagatggagaagcagcaaattttttgaacttgagga

SEQ ID NO: 30841 - DNA, 291 bp, Zea Mays
tcaatttataagggcgctaagcgatggtgccgaattttgaaaggggaagaccgacggtcgaagggagaggtgagtcaccagcgtgaactatcgtggcgttccccggggtaatgccttaagtgacgaacagacctcatatggatttctagtgcgacgtggtagttcttctaagctcgtggcacggctacgatcgacggcgaactctggcgaggacacctctgtccaattgtgcggcaagtgtcatagtgataaggctctactcctttcctgagttgagagctttcatttccc

SEQ ID NO: 30842 - DNA, 360 bp, Zea Mays
cgtcatgtggagtttcaggtgggtgcctgggtgtggctgcgcctacatcattgcatcgcagccaccctcactgataaagctaaggggaagttagctccaaaatattatggacctttcagagtgctggaatgcattggtactgtggcgtatcgtctggagctgctacctaactcgcgcattcacgatgtattcaatgtggttttcttgaagaagttcgtgggtgagccgcctacatctgtggcacccttcccgcgcattaaaaatggcagagtattgccagttccagaaaaagtgctacgaatttgactcaacaacggcaactgggaacttctagttcaatggatcgggcgttccagttct

SEQ ID NO: 30843 - DNA, 478 bp, Zea Mays
gccgggcccaagggggtccgccaccgtctccgactagctgccgaccggcaagggagctctaggagcaggcgcttattaatgcgcacgccagatccgtaatctccgcgaccgccgcgccgtaacagcactccccaattccccatccgtaaagccgagcgagagagcgcatatgcatgcagtgcagtgcaggtacgggtacggacggcagcagcctcagccatactctgtaagctagctagcaagatccacctgggatttctccttgtttcaccagtaatcatcaatggcgcagtaacctctcacctgatacgcgtccaacggcaaagtttaggcgcgccgtgacaataacagaacaccattaattcaacgtcctcttcttcttcctccccatccgtccatctcaccccccgcagttccaaattaacacgcgtgcgtacgtgcacactgcagtactgcacagcggcattgacaacacgcc

SEQ ID NO: 30844 - DNA, 621 bp, Zea Mays
cgcgagaagagctcggcttcggtgcacagaacctccatcaacagagacctgtgggtgaaccgtgaaccttcccatcccacagactgcattgcaagagcacaggagtttctcagagtttatctgaattctgcttccaggtataatgcggttttcgggacagctctcgctctcgggcaggaagacgtcaaggatacaaagctggacgatgggactggactagctctggatttggatgtcgaattggatcacgatgctgcgggcttcaagacacagaagcttgctcatgtgagtcgacagttccttcaactttctccagatgactactctactcctagatggtttgcctcgtagtaataatatgtgtttttttgtttggcaaggcaaactagcattggcatctatcttttagacaagtgacgagttgtggtcactgtttgcagctgacaatttaagtggtgccaaggagacagccgtttgatccacgtacagtataatatttgttttctatgccgtggggcctttttttttgtcatattcctaggatcctcagttgtctatggttggttgtagacatgtagcatccactgagctgttcggtttaaaaagcttgcctcctgaact

SEQ ID NO: 30845 - DNA, 520 bp, Zea Mays
cattgatcaaggcaaggatattagagaagatatggaacgatgacatgaaacaaaagacgaaaaacacaaagaagaccgatgtactgggagaacgcttccgcgtggtcaccttctttagggctgctgtcaaaagagtaggaggagatggcgccgcttggagcaccgtatgcaacatcgtctcctccatgggggaggaagcttccatgggctctttccctgcacgatgctctgacgataccgagaaagccaacgagagcagggccgctcacgtcacccccatcaccacgcctggctccagcgatctctacgcaaatctccaagggcgcccctaatgcgacacggtcactggccaactcatccctcttggaaggaccattgaagctggcctacgcatcgtcgcagtgagacggactgcccaccgatgcatcgacctccatccctgagaagcgatggagaaaatatcctccaagtcagaggaaagaaggacactcacccccggttctacacaagtgggttggga

SEQ ID NO: 30846 - DNA, 338 bp, Zea Mays
ggttcttgttgcatttacacatttgcaaagtatgagctgatagttcacagatattttgttgattgctctatccaaatgccatttcacttggtaaaacaaattagttttccttgaccaaatgtcaaccattgcaggtccatgcactgtgtcactgtctgtcttagaaaaaggtagccatgtacatctccaataatgcaatatgtcacataacgaaggaaacaatgattatacaactacttatgctagtttcagacactcatgtatttagacatctccaataatgcaatatgtcacataacttgattttatcttttggtcatgaggtaggttgcacttgt

SEQ ID NO: 30847 - DNA, 681 bp, Zea Mays
gcttggttaaatcgcctgcgcgtagggatgcccagcacgacatcaattagacaggaagattctggtggtgaccagcacaatggggatcacaaaggacctgttcggatgtgggaccctccccgtggccggatctctcgtgattgagcgggctctgaaactcaggcaagaactctcatgtgcttccctgtttccttcacgtagctagtagtatttggtttggctgtgggagcacttgaagcaccgagcttgagctctggtaatggcgacttgaggggggggaggtctcccacaccagcgtgttcgacagacagagggttgaagaagaaccgtgggccactagatttcgcatcggtggatgaggttgacctttgagcgtacccccttgtggcctgtatcttggtcgttgatcggtattcaacagccgcgatcgcgtcgcgcataacccttcaggcgggaaaatcagaaccgtggattgcctgatgggcggcccagatcgtataccaattcgggtgtgattcaatctaatctgggccactagttttggatcggacgactgtcatgcgcaaataccccttcgtcgagcctttatgcataagagcccttcaacttttacaaaactaacccgccatccttttccgttgaagctaatcacaagcaagtccctggtttttacaaaatcac

SEQ ID NO: 30848 - DNA, 587 bp, Zea Mays
cgcgtcttcgccctgcaggccctcaacaaataccaagctcaaaccaaggcctagcgcgaccacacggtcgtcccaagagaattcaacgaaggagacctcgtactcatccggaccacccggacagagtcacggggcaaactagagccgaagtgggagggtctattcatcgtcaaatcgaaggtgtcccccaggcgtataggctgacaacgccatccggcgaagacctagagcattcctagaatattgacaatctccgcaatttttttgtttaaacccttagggcccacgcgcccttgtaatgcaccaaacaatactattccggcccgcactcttttcctcccgggggtgaggtttttaacgaggcggagccatgtaatatacctgcaaaaatcccccactaaaactcagacgcaacatgtcaaaaaagaccgcatcgacggtcttcggcattcgaccactccgaagtcaccgcgagaggcagcacagactaccctcgcgtgcgacactccacgcaaaagtcgcctaagggtgcagccagaatagcacaacaagtgcgttaatcgaagtcttttatttaaaagacactc

SEQ ID NO: 30849 - DNA, 491 bp, Zea Mays
cacctggccgcgctcacatgatctcgccgccggtgagttctccggtgaggaccagcaccctaacaccgaccctgaggtataccggtcaaatatacttcaagaatcgaaccactattgcactagacctacaccacccacggccatggcagcgagctaagtccggcgagcccgtacctgagccaccactgcagtagagtttaaccaaacaccacgggtagcatcagtgacatacctagattcctatgctcgcgaaaaaccggccgaggatgaagcaagttggtcgggcgacgacggagctgttcacggtgtcagtctgcggcggtgtgctcttgttccagccaaaacacagcagtatcgttggggataacagctcggtgagcttcactaatctaagggggacatggaacaagcacaacacagaccaatacttgcctgagttagcctagccacggcaaggtgacaaattggtaggcgtggtcacaactcatagg

SEQ ID NO: 30850 - DNA, 359 bp, Zea Mays
tgattggaatgatgaagtgattgcccagttttactcaactctgtgggttaagctggcggatgaggatagtccatacaactatccttatcttaacttctacattgagggaagctggtacaaggtgagctaccgtcggtttgctcacattcttggattcactgacaatgatatttctggggataagataaagattcatgatttccgccaacctactagagacgaagccagagaccttcatctttctgagtctaggaaattttgggagtccaccaacgtacacaagtattacagatacatcaactccctcagccggatgaccctcattccaaaagggggtaatcagatgaacattctcgacg

SEQ ID NO: 30851 - DNA, 291 bp, Zea Mays
atttcgatctaactgacaagcatgacataactatcaaaataagcccctgctccaagagatgactgagctgctaaacaatttgtacatgacatcgaagccaggatgtccaagacaacgatgttaggtggtggacaaagtagtggcagccaaggatgcggggaatacgtggcgacggagggagcgggcagacacatagtgtacaatggtgggggaggcgctgacggtgagagtgcgcctaggctcaccggcataaaatgcccgcgcagagtgtacaatggtatcagtgctgac

SEQ ID NO: 30852 - DNA, 271 bp, Zea Mays
gctgattagtggtggctggttagctgatgaccctgcggagctggtcacgagcttaatttataggcggcttcgtcggtggccggtgaatcggacgagacgcgcggcggtcggaggtagaagaaggtactggcgcaagcgctaggtggcttctaccgtggcggtcattccgacgatcaacggagaggctagaggaagtcatggcgatgcggtggcgcggttaggacacgcggcataaggccggaaggtggcggtgcaccggcgaggttatctg

SEQ ID NO: 30853 - DNA, 292 bp, Zea Mays
ggtgaccttacatgtaaattctatctatggaccctacttgtcattaggccaagtgccctatcctgtcttggccttatacaatactaggtcctctgcctcgaaaacatgtagcacatgttgggtgtgtggttgtgtaatcatacttgttgaggtgatcgatgaagatcatacccagagtagggacaaataccttaatggcattagtgcaccataataggagcactagggtttaatacatgaaagtacatcaatactacctagtcatggttgtaaaagggcctctagcgtaatg

SEQ ID NO: 30854 - DNA, 602 bp, Zea Mays
cagccctatatttgctgacacatgcactttcgccaccatctgcaggagctgtgggccattggctaacccaacaatctagttccagtattttctcgggtattcaatatttcctgcacaatttagttgccatactattgtacaagaagtttcttgtacagattaattttcatttgtgtctgtatatgttttaggttacaccaactatgatggagtcgcagctgataaggaagaggcacacagttctactttatcacggaattctcctaccagatttaccaaggagaattctgcaaataaaatgcatggagatgtgatgggatcggctctatcttacaaagaaagtaaacatttggacgaatggcatgatttttcccagatatcagctggaaatgagaaggataggctcacacctctaagtcaaattggatttcgtgaccctgctagtataggtggcgggcaacaactgactatacttagcgtggaggttctacttcattcttttctgttctgttcccaataaatatactgccttttcttcattcgttgatggattcagtgggataatttattcattgcagatcaaccaccaagcattctatttc

SEQ ID NO: 30855 - DNA, 327 bp, Zea Mays
aaacgggataaggcgtcgggaggagtacgatcgggaccatggcatcttggctcgaagtcgcgccacccgagttgagtcggcagcagcctcaaccagtggcccgatccgaggacggtcgagacgacacatcaccgactcccctccccaggaccgacaccatgaacgtcgacaggaagacacatgtggagtatccgcgcttacttcgtgtctcagggccatcgagtggcccccaaacttcaaggtctccaacgtcgacaagtacgagcctttgcaggacccgagaggctggttggccatctatacgaccgccgcccgggccgccggagc

SEQ ID NO: 30856 - DNA, 307 bp, Zea Mays
aagaccacgacagtggtgaatttgcaaggccccgatggcgacaatcctttctctctcaccgtcgtttctttgttcatttgggcgctcggttcttcggtgctgagttaggatgggaaaggtaggggtagcgacgcgtatttatgcactggagtgtagctatcttgcgcgattaccgggagtttgttggggaggagatcccggcgcacgcacgggtttgttacaaagtccccgcgatgaaggagattccgacaaacgggccccacctgtctgtcccacggtacctggggtaagggaggggacagcgcgc

SEQ ID NO: 30857 - DNA, 383 bp, Zea Mays
catgtgctcatttaattgttagttcacccttttggctaaaaatggttggttagcactaaattaatatagacttgccatgactaagcttaataatgtatgtgtgtcatgttttatatgtttcttctctagttgattgtgatataggagtttcatagacattgatgcctaggtcctatttaaacttacgttgtcttggttgctcttgtgtggtcaataggagaacatatgaatgattaaggtgagcgtagtaaatgcgtgtacttgtgatgtcatatttgtgttgcgtaaatatataaaatgtttgccatctttttaatggtgttaatgttgattgtcgataatgtgtagataactaaagctaacatgtgattgtttacggtgcc

SEQ ID NO: 30858 - DNA, 543 bp, Zea Mays
aatttttgcgcttatgtccacacacagttcagcctccctatcaaggttgtataggctgataatggcactgagtttgttaataatgccctcaccacattctttgcctccagcggcattcactcacaactctcctgcccttacacctcctctcaaaatggcaaagctgaacgcatcattcgttctctaaacgatatctgtcgcacactgctcatccatgctcacatgccacccaaatactaggcagaggcgctagctacagccgcctatctcctaaacagatgtccctgctcagccattggccatagaatccctttgagcaactccaccagcagccccctgactacaccattcttcgtgttttcggttgcctttgctatcccaacctcacagccacctccaaacacaagctggcaccacgttccacagattgtgtatttctcggatacccctcttcccataagggttatcgctgtcttgacctcaccactagatggattatcatttcccgtcatgttgtcttcgacgagatgtgatttccttttt

SEQ ID NO: 30859 - DNA, 503 bp, Zea Mays
cctaattccacgccctgttgcacgtcgtcttgttttgttcatcgagcgactcgctcgcccgcccttgcaagctccaatcaagctccgcgccgtgccatccgcaacctcattgattggagcagtttctcggaagcttcttttaggtatatattcttagcctttttgagaacagtaccatagcctactaatagttgtttatcattattttcttttgttccaactttccttgatgtgccagatctccctcctaatgcatatggtcgcccagatctccctcccagtacactaacctaatattccaaaatatggcagactttattactgctgagttttagtgcagacgacctattgtactctgcacaacactgacaacatcaactacatgttgcaggtaccttgaaaaggagtagcgcttcttatctattgcagagctagcatggtcgcgtcttctaagtgatatacgcaagttgtccaggtatgtacagtttaacattgctacagag

SEQ ID NO: 30860 - DNA, 472 bp, Zea Mays
acagcaacatagagctggccatatgtaaatactggtttctttaggtagaggcaatagtggaaagcgtctgtccttggcttttatttattgtcactggtaggatgcataataggaattgtgtcctctgcaaagtgaaaggccattttacgttcgttgtgttcagcgcaatccgtggaatcaatacctcatcgccaatcctggatcatgtgagtattatgcatcgcagaacacgctgacctagctgggaaataagcagccttgtcccattacagaggcccatagtttggttcagattgcgaagcagcatcaccatcgcatcctctttaagcacaagtctatggcaaggaaaattgggtgcatttatggaattgaggaattcggttgggtaaagcacatcaaaatctagaatgtgttctgctgattttaaaattgtgtcacagctaatgcactcgacgccactgctaggtaccat

SEQ ID NO: 30861 - DNA, 323 bp, Zea Mays
caaggccatacgacatcgatcctttgtagtgggagacttggtccttcgctgaattctaacggggaaggacggcacaaattgtcaccactatgggaagggccatttgtagtagcagaggtcactcggccaggatcatataggcttactcaaatggatggcacggaaatagggaattcatggaatatagaacatctcaggaaattttacccttagcaagacttcaaaagctatcgggggagcattgtattctgtaattggtaaatacctcatcaataaaagatttcgctctcaaggacactcgaactgtttattatcaatcagca

SEQ ID NO: 30862 - DNA, 277 bp, Zea Mays
ggagagagaggcaaggaaccacctggagccgccaccggtaaattttctttgtgtattccatcctcgtggtgttgctctggacgtctctggcacatgtgtggtctcgctgcggactcgtgctcgatgtcgggatcatcggagcaagtccttcgtcgcggagccgaggtcggcacggaccgcaacaccaccgccacctattcgaggacttcgtcgtcggctttcttcctccgtcgtagttgacgccttggcatgggcagggctctacgctacactgatg

SEQ ID NO: 30863 - DNA, 430 bp, Zea Mays
gtcagttatgatgctgtttggtatcccgaatctgaatattatatcttgtatgaattccacggctttagctgaggtcaaagaagcaatgggcttgaactctatccatttagtgaatttgtcgatcgctaccaatacatgagtgtatcctccttgagctttcttgaaaggtccaatcatatccagtccccagcatgcgaaaggccaagttactggtatggtctgcagttgctgtgccggcagatgttattgttttgacaagtattggcaagcttcgcacctctgaactaactcggctgcatcactcttcgctgttggccaatagaatcctgacctaaagaccttcccgactagtgttctggatgctgcatgtattccacattgcccagcatggacctcctccagaagtcgcttcccagtagatgagagaatg

SEQ ID NO: 30864 - DNA, 282 bp, Zea Mays
cgcgagtgggcaaggataatttctctaccaaagctgtacttgctaaattattgcagctgccactatcgatgatgatgcgaatcgaccgttcgttcacaacgcccttggtatggaatagagtgtgtcgctgattttttcggcctgggcaacctgtgtgctgagaacacgctgcacaacaagactctcatacctatcggcgtcgatgggatcaatgtggacttcctcattttctgcatggttagtggcaatcatagcatgactagtttcctcagaatcactggc

SEQ ID NO: 30865 - DNA, 834 bp, Zea Mays
gcctggcaacaatggaatggcatgatcacactgtcgggtaggaggcaagccaaccgggtcatcaaaaacttctgtgaattgggagagcactgcctgcaccctgtcgtcggcaggaatttgttgctggtcactggttggtgttggagagtcagaaaacagcctcagttcaatcaccgcgcccactggtaacgtcgaccgcattccttgaagacagactgaggtgccctgataaggaatagtaatccacttgtgataccaatcaatatgcatgggactataatgctgaagccaatccatgcccaccactaaatccactgagggaagaggtaaaaaaatgaaatcggaaatgaactggaaagtggccatagaccaagtggcctatggtagatgttgagaacaagtaatgagttgtccattagccactctgactgccattggacgatgcaatggttggctgcccgtcaacagtgacaaaaatcggttgctaataaatgaatgggtcgacctagaatcaataagtatcatcaaaggttgctgttgaatattgccctaaaaacgcaatgtggagactgcctctttccctgtccacgctgcatcagacagtgtcatcagcaattgaggttgactgtcttgcacggctttactgtcggctggctcatccagcaaatcccaaacctcctcaataaattgtagttgcacagtattggggcatttgtgtcctctgaaccacttttctgcacagcgatcacagaggcctcgggagcgacgataactctttaatgaagcgacacgatcggttgatgaacccagccggcggccgtccgtcaccggctt

SEQ ID NO: 30866 - DNA, 762 bp, Zea Mays
agtgagaactaacaaatagacttactaatttttatacaagttatttcgcgcgttagaattaccgtacacaatcaacaaacacattcaccacaataatcaaacctggtataaatgtgtatatcgattgcgcccttcacacactaatttgtatttttacttagacatcacatgaacaccactaattttacccgcgaccataaccatgtgcgtctagaccaaaacaagcaaatcaccgtgattacgagcttaaccaaagccgtccaacaattcggctaactagagtaacgacatagcccgctaaagaacatacacgtcggctagtccattattatcgcaatccgagacacaacatacactacagcaattttataaacaccatattcacaagtattttcgcacatcgaccaatctatacgaatcgtaagccactagtctataattcgcaaacaccatgcatttacttcccgaattacgaacgcatacatatttatcatacgaaccgagtatttcaatatttatcctaagacaactaactccattacacacttgtatctacttgacttacttgaagcgtctactcgaaatcgtgaacacaatcatacactatatgtgaagcctaatttattaaacgcacaatacgcatcgtcttgactagacttataaatatagagaaaacggcaactacttgggcatgtcaccacctgtctatataaaccaaaacaatttttactatcgactaagagttctaagtattaaacccat

SEQ ID NO: 30867 - DNA, 286 bp, Zea Mays
attataaattgtttgtcgtgttcctaagatgctacagaaaattctaatttggacatcctagttctgtttccctactggagttcatgtttgatctacatggttgctacatcgagtagttcatttcaaaggttcagcttcccattagtatgtttgttacttcgtcatttcttcataatactccttctggttataaaaacatattgtctgggacaagagttagtcaaaccttaaaactacaaacatcactaacttttaaattatttagatcgagaacatgaaagtgcac

SEQ ID NO: 30868 - DNA, 562 bp, Zea Mays
tgaacttcaagcggctttgcatcagtcacgtgtggagcacgaatttagtcagagggctagtgcaaggtatgacaggggtggtggatcctctagctagagggtatctcgagggccacttgataggatgatgggaaggagtagggaacaagtacctaagcttgttatagactagaatcttgctcaagcctctggaccaagacaacagatgatagatattggtccctggacaagtaagggagggagctcgaaagagattattggtagggattgggcaaaggcttgtcatgccattggcatcccgggtcgaaagcgctataacccatattttagggccgcaattatggagtcccaaaaacaaggtaacaaataacatagtgatgataacacaaccgaccctagtgttggtgatgatgacaaccatggtgatgttgaattatatggtgcaggagggagtggtacagaagggagtggtgcaggagattggaggtccactggaggaagtccgttcacccattccacacaagattcttaccatgatgcacctcattcacagcgggagaca

SEQ ID NO: 30869 - DNA, 375 bp, Zea Mays
cccccaacaagcatattcagaccgttcgaccgtacttagtggtgacccatcgtacattgcaggcggcgataatggttaccctgaatataagttcattggtataacataatatggctgggactgagaaagcttatttgttgtcaatgtgtttgacgcaactatttcgttgcctaatctatgcgacgaaaaattaggcatgtgaattttttctagttcatgtgtcatcttatccatagtctccactatacgttcaatgtgatcatctaaagaattctaggatatttaataacgtcatatgacacaatgttacttaaaatggggagttgcagtgaggccatcatagaagcgagctctacttccctctcctggatgacc

SEQ ID NO: 30870 - DNA, 351 bp, Zea Mays
gcagggacacattagcaaaacggccagcgggcagatcgcgcgctaaacccgagccgtccgatctcatcacaacggctctgatccaatcgtgcgaagggctatccttacgagctaatctcaatcgttgcccaaggatctgacggtcatggacccaacttccccaaccgagccaactcacggcagcgccgccattcccacccggcgaaccacgccggagtaacaccgacctacaccgccagtaagtaattcacgctcagaatctcacagaaccaaattctctcctacccgagttgactgggcgggttttatcccgggttgcggtcgcggtgatctagtctgccacggttcgtg

SEQ ID NO: 30871 - DNA, 496 bp, Zea Mays
aataacaataaaaatcttgcaaattcatgctcttgttatcgtcgctaaaatcacggttacacctacacgatattagcacagaatagaaaatataaaaggaatttgtagaacatcccaatgcagtcaagtaaaataggttaccacctacacgattgattttatgtcatgaagctctagaatttttctatgaagcacaggattctatcgaagagcacaagtgaaatgggaaaaaataggtacttgcagtactgcttctctaccacttttattttcgtagtgttcaaccctaaaacactaaaatcatggatataaactacttactatagacaagaataaaatttgcaaacattctaggttggtacaaaaacgatcctaatgcagtattggaatagggtacctcctttacgactgatgtggtctcacggagtaggatcctcgggcaccaaaatcaaatagaaacaggttacttgagcctatatagaaagatagagacatc

SEQ ID NO: 30872 - DNA, 561 bp, Zea Mays
ccaggttctaatttattttgtgttcggttaagcccatcaggattcttgcccataggtttggaatattttttgggcagaggaggccctggattgcaaccaggactcgaggggccaggaacgaatcccatgcgagcgatgagaagacgtgctgcggcggcgaaagcgagaagacaaggtgtcgatgagcggggatcgcgacgacgacatcctccccaccgccggcaacctccactacgctgtcaagcttctatccagttggtctctctcttttgttagctagggttcttgagttgagtcatttctcggtcctagtgttcatggtagtggacttgtggcggtggctccagatccactgacggacttgcagagaaatctgatgtgtgatatactttttttgtttgtttcgcaagcaggcacacaccatgatgagatctagcaaggaatgatttggctagcagttggtatgcttgcatgattggtcagatagagtacaccatgattcctgaaaacatgctgtagtgtgatttaggctgctcgagggggcgagggactcaaatttct

SEQ ID NO: 30873 - DNA, 495 bp, Zea Mays
gtcgtggtgtggccattggacggctgaattcagagtggtgcagttgatatcttcatcttgttagagtatagtaagtggagtaaggacggcgcaaaaggagatatggggctgctgaacactgtaggaatgaagaggacgcactgtgctgtgatggaacagataccgctcgaagattctggatgcatgtatgatcgaagtggaagcttacctgtaagccttatcggcatactgcttgtcctcttcttcctacttcgtgctatagcctatgtatcaacacctcagcgtgatgttgcccacttggagatccagctagcgctagacgacccctacgcttaattgatcttgcactactagcccccggccggcactggtctcagcgtgtgaatgaactgcagtcggaggctgaaatagaacctgcagacgatgaagcacttgatccggcacttgaactacttccagaggaccacgccctgaagctagctttccgatcccaag

SEQ ID NO: 30874 - DNA, 394 bp, Zea Mays
gcggctccagatccacatccgccacatcccccggcacgatgcgagggaacaacaaccatgcggctccgcaccagccacaaccccctcgatccacgaccagaagagctcgagtcgtgtgtaggcacaggtgagtcgtcctactcctctccccattccgccctcaacaacgtcgggatgccgatggggaggacaccggccacacgagacctcaacaccccatgaagcagttgcgcttcgacttcactaaggtggatgccacacttctccccaccgtcactggccattcgtggggtctcctcccccacaccgtcgcttgttgtgccctcccccctccgaccctggtggtatcttatggatatgaccatcggtgctggttattatcctcgacagttcg

SEQ ID NO: 30875 - DNA, 428 bp, Zea Mays
tccgtttcgttgtagcgatgggggctctatatttgagtcagagtcatcggatagcgaagagggtttgaacttcttcgtgaggatggacgaggagtcctgtgaagaggacttagacttttttattgcactagacattgcgtccgtagcagaggctagcgtggtcgaggggcctttgaatggggccctgttagcctcgataaaggggaaaaggaggcgcattggtgtctcaaagcgaagggtggatagcgccaacacattcatacgtggtcgctaagcggtcgcaagcaacgacgcatgggcttggttcggcccgcttctagggtctcacttcgtgaggtgttgggaatgacacccttgtgtctttgcgagggagaagcgacgaagttggacgtagattcctgtcatgtttttccaacgagggtgttgag

SEQ ID NO: 30876 - DNA, 343 bp, Zea Mays
caccgggtgaggcagacgtggagctccaaactgagacggcataggagtagacggtgcaggagtaggcacggccagatactgaggaaaaccctgcattggcacgaactgagaagtcccaggcacataaagctgctgcagaggaagaggaactgaaaactgctgctcggcacttgacatcatgttgatagtgccctgagaagaggaggaagtcaccagctcccatctgagcttcccattaggattcctcctacacaccacatccttgtggtcctgattgcagatagaacacctgccactccactggcactctgcacggcgatgcacatcaccacagcagaaacac

SEQ ID NO: 30877 - DNA, 448 bp, Zea Mays
cattcagccgctaaaagacagagcgtatccagcttatctgtatcaaggccttgctgattcaacccgtgttaccaacagaaggattcctgccgtggatttggtgagccggcttgagatgatactcagaggcaaggtgtctaatatcggtgctcctgttgcatactcggcctggaatctgcctccttccaaggccttcatcagttttgtgtcaaatcctcctactggtgatagcggtttgggccttagagtgcgaccttctcccgaagaggttgaggctttggttgcttcacttggcgaaatccccgacgacaagaggcaggttcattttgaggtgcctttgaatccgagtgatacagaaataagtgccatgctggacatgttggctgaagattcctctgatgcagcccctgctgaaacactggctgtagcacccatccccgagtctggc

SEQ ID NO: 30878 - DNA, 404 bp, Zea Mays
acttcatggcttatggagccgaggcggtcctccccaccgacctcgagtatggtgccccaaggtttaaggtgtacacgaacgaaaagaatgagccaagcctctaagatgcgttggatcagctcgatgaagctcgcgatgtagagctcatacggtcacaatgtaccaacagaaactgcgaaagtacaatgaccgtcacatacgaggaagaactatggaggtaggagacattatacttcaactggtacaaagcgacaaagattggcacaagctatctccgccctaggagggtcgtttataattggagagatacttaggctgggcacctacaagctgaaggacgagaaaggtaggacacttgccaacacgtagaaaatagagcagctacgacgattccacccttaaca

SEQ ID NO: 30879 - DNA, 273 bp, Zea Mays
ttggtctgcacccatgcatgtaaggttataaagaaaagaattacccccttagatgtgcttttatgatagtcttatcctcctgctccatggttttatcctgcagtttctggatattattttttatctaacccacccatacagttcccatccctactgatatgacgacatccgaattgagtagccgggcttgtagtttgggacccctctacgaaggcagggggtccgacagtctgggggcggttctaaagaacggcagctcgttccatggggtgg

SEQ ID NO: 30880 - DNA, 394 bp, Zea Mays
catcaccatacaaattacaattgcacacacggcgaaggcattgcccattacatacacatgacgagggcaccgcctatcacatcggctcaaccttcggaataatacccatcttcctataattaaacaacattatcctcaattcctcaccctcaaaaagctcccaaagatccccctcgcctatgcccgccccaatcggtgaggacaacaattctcgcttaccaatcccgcctactcgaagtcggccacgctccatccccatgcgacggcgcctgccgctccgcgaaaattcacccacacactgttttcccaacacccttcgccgcctacacccagtactcataccaggaagatcctcagcaccctcaacacgcggcgaaatctccaccgcagccac

SEQ ID NO: 30881 - DNA, 450 bp, Zea Mays
cccctgccataccccaaagccaaagatcactcccagccatacataaggcagcagaaagccgtggtggtttgccttcaaataagcaatcattcctatgtctccataaggttcaggctcccaggattacaatagagttgagacctttttgcatgagcgaaggaagagaggaggaagcattcctccaccaccccagaaaagagatatcatcaagctgcggggcaaagacagccaggcctatccagctaaggaaaaataaccagaactgccttgaaaagacgcaagagactaggagatggtcaagagtttcaggatcttggtcgcacaggacacaagcctcatggtggggcaagctcctcctttgaagcctatcagctgtccagcatctgttgtgggccactaaccacatgaagaaagcacattttggtggcgcccaggtgttccatatccgat

SEQ ID NO: 30882 - DNA, 291 bp, Zea Mays
aagaactgtctttctccagtctgatcccaatatagaggagtcctgcacttcctgccatataaagcctcaaatggtgacatcttcagactagcctggtaactattattataggagaactccgcatatggtaagctcttatcccaactaccatcatgtttaagagcacaagctcttaacatatcctctagcacttggttagtcatctcggtctacccatcagtttgaggatggtaggccgaactaaaattcaactgtgtatccaagctctcatgcaacttcttccaaaaccga

SEQ ID NO: 30883 - DNA, 352 bp, Zea Mays
ccagagtccttcgctgacatgccttccctcagtgttcttcgtcttgcctataatcgcctcgaaggacggttccccatgaggatcttccagaacagaaacttgacggttgttgatgtcagttataattctaaagtatccggtctactgcccaacttctcatctgccagtattatgacggaactgctttgtagcaacactaacttctctggtcccattcctagttcaataagtaatctcaaagccctcaagaaattaggtattgcagcagctgacgacctacaccaggagcacctccccacttcgatcggtgagctcagatcgttgacatcattacaggtttctggggctggtg

SEQ ID NO: 30884 - DNA, 804 bp, Zea Mays
gggaagtctgcacttattttctgttctacgagaaaaggtgcacaagaagcagcgcagtgcctttcacaaactggagcatcgcttggctattcgaatccatttatgaaatcaatgcagcagtatgaacatctaaaggcggcttccctaacctgtagtgacaagcaactgcaagcttgcatcatacatggaggttatctggaatcttgttccctgggcacccataataccttccttaactttgcaagctccattttttcagtaatgtcttcttttttttgaaagggaagcaatgtctttttaggtgcccatgttagttgatacacttataaaactttagttgattgcttaacagatgcaatcctgttccattttcagttggttttcataatggtggtctttgcttaaaagaccgaggtcttgttgaggggcttttcctcaagggtgatcttcaagttctatgcacaacaaatactttggcacatggcgtcaacttgcctgcacatacagttgtgataaagtcaacacagttcttgtgagaatcaattttagatatgacatcaattaaattgacatatctatacttctagtttttgacatagattccattatgcagcaacaaagagaagggcctatatgttgaatatgagagatccatggtgcttcaggtgcactgagtctaatgtgtcctattaaactcttcgcctaaaaaagtcatataaatctattatctttgatatgcaggaatagatactccatcttgcttcacatcttactgtgattttgtatggttaatgttggtgtata

SEQ ID NO: 30885 - DNA, 419 bp, Zea Mays
gtgttgtcggctcagcaggatgacttgggccatggagagtgggaccagtggattgtgaatgagcagcccattcagcaagaccaacaaccccctttgccagaggagcaacacattcagcaggaagaactgcaactcagcaatcagcactctggcttgtcatctgatagctccattggtgctggtcagcttgcaccccccacgaatggtcattttgcggtgaatggtcatgctctgattgggaatggaatggacatcaatgctgcccctttcaatgggcctcaggaggttgatggaccggcgcctcaagtggatcaggcctaggatttggaggttgtgccccctcaggcccatgttgatttgcctaacaataatcaccatcagaatttggagatgaatttcatgcttcatcaggattggca

SEQ ID NO: 30886 - DNA, 289 bp, Zea Mays
taaccgaaggccgacagtaaaaaatgcctcgaacacaactatctcaccctccggctccggaatctcttctgcccccggaactcgtccaactccactcccaaaataccccaactgctgcatgtcttgcacgcgagccgaggagatcctcgaaacgccaaatttcaccgtgtggcccgggtgcagctccaccgccaccaaatcaccgaaagtatctttggacgacggttcgaccaacggcgtactcgcagcggatgaagaagaagatggcatggctacgtaccgtcggcgg

SEQ ID NO: 30887 - DNA, 505 bp, Zea Mays
agtgaccacccatggcactatccaaatcaaaccgcccttcctaatgactcctttagagagagagtagccatgttcatccgggctgtggacacacaaccgagccagaagtgattgtgcagccgagtcagtcacataggaattcgtaacttcctggacccagagaggttgaacttcactgactgctgtcaatgccatcacacaacccacacgctacagagcatcagctactttgttctctttaccctgctagtagatgactttgaactacagccccataagctttgccatggctttacgttgcaactccgagtgaagctcctgactacccaagaagctgagagccttatgatcagtctgtatttcaaactcgctccattgcagataatgacgccaatgatccacagccataatcagggcaatgaactccttctcatagatcgacatcttctgattggtaactcccaacgccttactcaagaaagctataggccgcccctgctgcatc

SEQ ID NO: 30888 - DNA, 426 bp, Zea Mays
gaaaaaaaaaactaccctgaactgaactatgctgcaattttgcaaagtgtagaacgaagacggagggtgggggctgcacatggagggccacagcgcaatgctgggcacaaccctcaactacgttgctctgagactgatcggcgagggcccggacagtggtggagatgatggagcagccatggagagaggccgcaactggatcctacagcgcggtggggcaacctatacaacgtcgtggggcaagttctggctaacggtagggacattagtttcttgttgtttattactgttaattttcacagcctagtttaattatggagcttttcaaggtgctcggagtatacgattggtctggtaacaacccgctgccaccagaaatgtggctgttgccctatcacctgcctttccacccaggttcctcctgac

SEQ ID NO: 30889 - DNA, 372 bp, Zea Mays
taagtatctctggagtgaggcagtgatgacagctgcatacctgatcaatcgcatgccatcgagggtactaggtatgagatcacctgctgaactcctattgaaacaacgagagtttaaagtcccacctagagtttttggttgtgtttgctttgtgcacgaccatcgaccttcagtgggtaaattggatccgcaagcagtcaagtgtgtttttgttggttatgcatctacacaaaagggatacaagtgttgggaccctattaggagaaggttatttgtaagcatggatgtgactttccgtgaatttgaaccatactattcaaacaagtgtgatcttgatcacttctttgatgagttctcttcagtcaatgaaag

SEQ ID NO: 30890 - DNA, 294 bp, Zea Mays
aaaagattctaccttgtccttatggattcatcttgccctaataagcatatttacccccacactagtaacaaccatgatttaatccaaagtaattagatattgtttagtctaatctggtgatatcgatctaatctagactccatctaatctactatgatccaatctaaaatgagttacctaacaggatagtcaatcctggtggaatacattagaccctgctcctataaacaagtttgagatcttagatcaactcgaccctacccaacaacttgacctacaggttacacaactaat

SEQ ID NO: 30891 - DNA, 360 bp, Zea Mays
ccatgccaccacaataccaccactggctccaactgaagggagaaacacaaaatcagcaaaatctgcacctaaccacgagagaatagagaatctagagatctcttccattttggtttcctggatacaaactacctctgcccaaaacgaagaaaccagctctctcacaacattttgccaagaggacgagttgagccctctcacattcccacaaataatttttgatggatccattaaacaaacatcatcaacgcatccacaaggggaggagggggaaaagcctgactagcagatcccatctggggtactccacccaaaaagggctgacaaagcctccacatgacaaggggacagaggttgctt

SEQ ID NO: 30892 - DNA, 446 bp, Zea Mays
ccgagcagagatcaaactcgaataatacgacacaagaatgttatccatgcacgattttcgcagaggaatggcggggattctgagacgcgtcctagacgcgaccagatagcgacctactcggaggataactcagaggaaaagcaaccgaaccctggaagaatagacacgctcgcagtagaagatgatagactcaaacaatatgtaagataggacatctatctagtcggctatataaggctgcagaggtacctttaccaaaaaggagtctctcactcacctttagatcgataggaactctttaattcacctccacaactacctgtaatctgcaaactcagagcaatccaatactcaacaccgcaaatgacatagggtgttacacattcacgtggcccgaacatgtttaaaccctatgttccgacttgcatccacgtgtaccatcaagc

SEQ ID NO: 30893 - DNA, 463 bp, Zea Mays
gcacgctgaaggtcgacgagacggggatcagcagctagtggttgcacctcagtctcgtcacgctccccgaagcgaggtggaggaatgggcggagcggaaatgggagtgggagggggaacagtggacgctagagtggttgaggtggtgggtatagcggaagtggtggatggctctggagcgacaggagctggtgaagtgggaggtggagtagacactatggcggaaggtgtggagggagcagtggagcgaggccgagatgcaagacgacaaactgtataggctatctgatcagaagagatctgcaactgtccaccccgctcagcctgctctgctgctactaccgctgcaagtgctgcacgagcggccttgtccatatggtgcttcttcctgccctccttctgctcaaggtaaatagtcttccccttgacctgcctgaaggggcgaggagggtcctcgtcgtctc

SEQ ID NO: 30894 - DNA, 502 bp, Zea Mays
ggaatatgcttgattgcttgtgttatacttaattatgttgatgacatagtgtttccaccaggattgctttttcgtgtctgtggtcatcagaaatatgccagagctgcatgataaaccagtagcagtttgccattcggacaatcctaaaggaacagcagaaatatcgtctgcaaactatcctgctcgaaactatggtgctgctattttattttccattaattgagacttataatttagttatgtgaacacatttgaagagataaaggctggcatcctcattggtgcattccagggataaaggctggcatgtttgttagagatgctaaagctcggtgccctcacctaatgatcgttccttataactttgatgcatatgaggaggtatatattttttaagaattctagatagtccatttgatggctaactcaacttttacttttgttgagtaattgagtttgagaatctgagtgactgaaattcttgtaggttgctgatcagttc

SEQ ID NO: 30895 - DNA, 477 bp, Zea Mays
ccttgttccacaccaagatcatcgtcatcctcctctacatcctcgtcctcctcttcgccatgctcctctccggcagattccccggttgatattatctactcatactcccccatctgagttgttctcgcttgtagccctgccctgtatcacgtctactattaaagtaacctccattcacaaatactatcatatacacagattgtcttcgattgattgatctgttggattggattggatctgaaaggagccggaaatggggaaaaatgaggagtaagaagagaaaagggagcgccgccgcgagggaaagggccaaggaaagggaaggctcttcttttgccctcccagcgaaaccaagccccgttctggaagggaggcggagacctttcgttgcacagcacagcacagccaccgtgtaactgccggaacacggatggggatccgccgttgcattctctcttctccacaccataagcagga

SEQ ID NO: 30896 - DNA, 552 bp, Zea Mays
cgcactctaaggcccaaaccgccatcaccagcaggaggatttgacacaaaatgggtaaaggccttggaaggaggcaggttccaggccgagtatgcaacaggggcgctaacatttgacaccttgcctctgagtatcatttcgagccggctcaccaagtccacagcaggaattctttagttggttacccgagttgagtcagctaggcctcggtacagataggtcgggtatgccctatccttcagtggctgaatattcttgaagacaaagtcagcaaccacagcctctgcagtcagacccctctctttcaacaatccaacttcagctagcagagcccctgcttcagccacctcctagtctgtgggggactcggtccaactaggagtgcgaacatccagctgcctccctgaccgtggggggacagaattcccatgattctccacgatgaatcattccagacgccatcccttgatgatgtccttgagggggatgtcgaggtaatcagtcttccttccgcggcgcatctccaagctcgcaccccccaccagctgatgc

SEQ ID NO: 30897 - DNA, 491 bp, Zea Mays
cggacgagctggataaaccgaagaggccagacagagcctgagagaatcctcgaagacgatccccggccgaaaatccaattttgctaggtccatttaggtggaattgagaagaccagagggcagggaagcaggaggaaggagatcacctgaacctagaaaccgccgaggggaaaaggggaggaagtcaccgccaccaccaccaaacagctccaccgacgacaagccacaaccagatcactggtcgggatccgccgtcgcgacgcctccacgaggcaacgacacctcaacgctcatggttccgtccaacctgttgtgctaatttagttgtgcacatatgtaaaacgagcttgggtcgacacggtcctgtttctaggtcaggctagctatacaaacccgacacgtttaggctcacaccgtgctagtgatctaaagtccccgagtcattaaggcctgatccgatttgatagacatgtctatcggcctatgtccta

SEQ ID NO: 30898 - DNA, 371 bp, Zea Mays
gtgcctagggggtccttttatagccctaagagacctaggagtcgttggagcttcatttgtaaactcccagtcacagccttccctgtctttgggtggaccggcctattcggcggtgcaccagacaatgcatagtacaatggtcctgatgcatagtacaattttggtcactttccatctaagatgggcatcagactgtctatgagggcaccagactgtccggtgctccatcccatcgttggagttggctgacgtggttgataaccgttggttgtcctcacaccggacagtccagtgggtggcagcggacagtctggtgatttatatctagtaagacctggccaagaccgagcgaagacagttcggccgttaca

SEQ ID NO: 30899 - DNA, 361 bp, Zea Mays
ttcaagtcttcttttattgtctcttcctatgccatcttcgacatttcgatgcctctcttccctatagcatcgtgtcttagaatcctactacgctactacgcattggtgcatctgaaggtctctgtttaacatatccaaaccatcatcgttcagaaatcagaaccttattggatggcgacaagtagaacacaataatcgtattttggcaacattatctactgaccatgtagtttaatcgtcgtcatataaaacttgtgttttcgcttgtgagatgcttagcaccacttactccactgtccactctgttttgattttatagctaatatcttcattagtgtcctatctctctgtagcatactgc

SEQ ID NO: 30900 - DNA, 635 bp, Zea Mays
aaaagaacgaaggaactcccaagtcgtgggaaatcagttgatggctcgatgaaggatcaacaaccggagcaacccacaatgcatcagtggagaccaagtcagtgtcatcagcagaaatcaaaactctgtcatcaggagcgccgatctctaaggcgacttcctgacccgaagctagagctgctgccatgtaaccagaatgcggaggagaagaccctacgtgaacatccatggaagtatgagagggagaaccaactcggacaccctcgggggctgggtcatagctcgcgctaaccatccgagctggatcatccccgacaacaccctcgagggctgggtaagcgctagcgccatccttgagggccgagctctctgtaacagccacctctaaggctgaaggaccttcaaccacttccatgggagcagagcaatccagaccagcctcctgacccttaagaccgcactccaaggtcgatgaggcatgagacgccgctcgggataactccaacccggcatcaggcacatcagcacaaatatccatcatcccaccatctgccggctccgacaacagatcctctgggaccatatcttcgagaatctgatcaaaatttgccagagacaactcttgcagaccaacg

SEQ ID NO: 30901 - DNA, 434 bp, Zea Mays
tgataagtcctctgagatcggaactgaccaacattctacagaagatgaatgtgccttcggctgtggaggagaaggtcggagggcaaaagaaatggcggattgtaaatgtaatgcaagcaaattagcaaacactaccttcaacttcggcggtgaaagcagcaattcctgcggataccaaatatgctggcagagctgaagctgaagaactcgcagccacaatgtcagatattgacaaactgatatcagatgtggttgcggaggagacaaatgtggctacggaggaaagcatggtcatagtgcctgataagggaagaaaattgatgatactccttcggaagaaaaaggtttcgaccttcggcacttgggtggccaagaacttttggaggaagataaactagagctaaaataattcgctatggcttgcggttaccaac

SEQ ID NO: 30902 - DNA, 318 bp, Zea Mays
agttgctttgctaatgtggttttacaatgtctctcatgcacgagaccacttgtggcctatctgttaggaaaggaccatagcagggaatgtatgtgattgtctataatatgcatgcattgatgacatctcgttatttgcttaaaaatgttcatttctatgtttcaggttctgtgaggcatgaagattggtgttttttgtgtgagctacaatgtcatattcagagagctagtggaagtttgcacccatttgctcctacaaacattctttctcatctgccaaatattggtggcaatcttggcgttggtaggcaagaggatg

SEQ ID NO: 30903 - DNA, 394 bp, Zea Mays
ccgatcgtgtcggaagggaaccactcgagtggatcccgctcatggccctagactaactcgccataagtaactgaccgcacttaacccgagccacagtgcgacgccagtccgcttcccactcatgatctacgagcacctcgggccgcatagaactcatgacttacgaagcccttggattgcggttgattaatggcccacacacccctcggtctatggcacacatatggcctatcgggctaggccttagtacgcacacctcccacggggggctacacgatgggctgcgccgaaccctagtctacggaggacaggggtcgacatagccataatgatgacgcctgggaccatcgccgcccccacctcatccgccacagtaaatatgagacaaccagac

SEQ ID NO: 30904 - DNA, 464 bp, Zea Mays
gtttttgggagagtctcgaatcagaagaatgactcaaatgataagttgatgatccgctcatacccttttggacagtcaatggcttcaaacctcgggcaacccttttactgacggacctaactactacttacaggcaagagtggtgagtggtggtgacatggctgctaatgtgtgagggatcatcactcatcagggccgggacgccagaagtcatggatgggtgaggtcatggggtttgtttggtctgcaggagttgtaatcgatgccgttacatgctcgccggtgattgtactctgtagactgtactcctgcagtctgcactctgcaagcaggcttcatccatctctagaaggtcgcgcggcgtcgctctccatctcaatcgcttcttcgccttcacagagcaacttcctactctctagctactgcatttccgcatgtggatatttccgagtgctagctacgac

SEQ ID NO: 30905 - DNA, 526 bp, Zea Mays
attgaaaggcctagacctctagtgtgtaggaaacacgcagtaccactgaatgcacccgtgtgtgtaaaaccctaccggcaaaaaacccaacccacgcctgtcttctcgcacacctggcgaacgaacctactgggctacaacccagtcctcctggcccaggggcgaagctaggatttggggatgagggggcaagcttacctcaagcaaccaagccagcgagggcacaagataaaaatgacaagaaaattacatctcatttatatcgtggtgagtggatgatccaaatgtatataaaaataaacggggtctatttcatttttttacctttgtcacgagacacaagtaagcaacccagacttgactatcgccttgcgcccttgccggttgtcgcgtccgcccgtgagaagtgagaacagctcgctgccagcaatgcctccaacctccacatgcgcgtccacaattacctgggtcaagcgagaggaggcgtcgtcccgtactcccgtggagctccacgatggcgcagcgg

SEQ ID NO: 30906 - DNA, 475 bp, Zea Mays
tatacaccaggatttcgtcgtcttctgtgatgcttcaaggcaaggcttagggtgtgttctgatgcaaaatgagaaagtcattgcttatgcatcacgcttactcaagccacatgagcagaattatcccacccacgatttggaatttgcagccatagtgcatgccctgaaaatatggaggcactacctaatcgggaacaaatgtcacatcttcaccgatcacaagagtctgaagtatatcttcactcagccaaatctcaacctccatcagagaagatggctggaactgatcaaagattatgaccttgagatccattatcaccccggaaaggccaacgtggtagcagacgccctcagccgaaaacctttcgggatgaatgggatcaactttttagaagattggaagaaggaatcagctcagctgaatgcatgtctgggaaacaacggcagcctagaagtcaagccaatgctagaagac

SEQ ID NO: 30907 - DNA, 608 bp, Zea Mays
atggactgcaggttaaaatccagagaacctagggtctttttaataatttactcggccgaaggggtagggataggtctcagccgctggattagaaaccaagggcccagatgaaatcttcatttactgaaccggtatgcaatctggttctttggatctgtgatcaagggttgtgatctattatgtgcacaatttgatcttgcccatatgtcgacaatccaacggccgggacaagtcctccccagtcagtacacaacctctaatctcattcgttggccgccagatcaacggtccccatgattaccccctctttcctgctctccgaccaacccgagacgacggcgccctggttttcatggaggcgccatagccggagctcccaaacccccaatcccgcatctaaactccgatccaaaggtagcaactgacggcggtaatgacggggaattactacggaaggtgctcaccgctgatcgaagtcgtggaaatcctgtccacggaatgtcgcggactcgcagcgacagcgacgaattgggggctcccagatcgctcccgcaccacgattccaccgcgaaagagttccgggtgaccaggcggagcaccacgactcc

SEQ ID NO: 30908 - DNA, 558 bp, Zea Mays
caaaggatgtgctcggcggatctgattctcggctggctgatgaagctataggcgttagccactgcgaacctgaagccatggtggttaacaccggaggagacaccgatgtgaaagatgcctgcaacaatgtctcggaagagatcaagattgcccctcatgacctaaccaacaaaccggtgagtttgattgtggagcatctccgcgcccttctttttctactagctgttcatggtagcaggatatggttttcgcgtggttttctactagctgtgtaggtacactatgttgctgctactcagctagtttcgttatcacgtataagctcgtgaactgtataggaggattaaaacattgggggattaccaaaagtctaaaaccttgtattttcgtccctgctataatgagattaggaaaagcatccatgattccatgatcatgttttcagattagtccagttttcttcatgaaactaagtttttttggtgtttcagttgcttgccggatgcacaaggtcgaggtttgttcatcatccgagctcgttcagctacaagaggatgc

SEQ ID NO: 30909 - DNA, 521 bp, Zea Mays
ggatgatcagaggcgagagctggtgcactgggcacgtaacaacctaatagagcacagtgagcactcaatttatagagatcctcgacgatggcgtccaatttggggaagacacgcgggcggccggagagagggggaagttactggcgcgagctaccgtggcagtcactggctaatgagctacggcggccactgctgagttcttacgactgacaacaacatggtgaaagggtcacgacgtggcgcaaccgagtgaacagcagtagccacggcaacggccgcacaaccacgtcgccggcaagtgagtacggcgatagggtggccacagtgccccaaactcatccacggttaagatcttttacccagagtcgttatccgcgcgctaccgggcacaaattgcaacaccggcttgaatccgggcgcaggagtcaccggcggcgagatgcagtgcacctgaagatctttctgttactgtaccattggaaactccttcagtgcgtctgacagagtaaggtaaagagctt

SEQ ID NO: 30910 - DNA, 559 bp, Zea Mays
aaggaattggagctctctagtgaacgattggaggcaagacttggtggcttggtgtgtgatttgcctatggactcgacggtgtgctcaatttatagcgttcgtgagcggtggccgatgaattggacgacgacgtgcggcgaccggagaagataggagttactggcgcgcgtgattggtgtcctattaccgtggcaagctccccggcgatgaatggagggttattgcgagtcacagcgatgcggtggatgtgccagggcacgtggcgcaaggccgtgaggcggctatctctggcgaactcatccgaatccggtgtggctagctcggaaacggtggtcggagtaatttagtggccggagcatatccacggtgcgatatttactgacccccggcgctatccaaccgatccgagcgcgaatcacggcggcgaaagcacgaatttgcacgcggctcgtcggcggtgagggactgagctggcaatctgatcagcgcactgtaccatcgcgaaccttattcagttggcctgacagagctcttttgagggcaatttgtgccaaatttt

SEQ ID NO: 30911 - DNA, 1643 bp, Zea Mays
cagaaaaccagcgtgttcaactggctgcccaccaactctctggtactgaggagaaaattcaaaagatatgtacctatggttcaaatatttagaacagaaaatctgagaataagatgagaaaatctgagatcaataacagcaatgaaatcattagttacctgaggttcaaatatttagaatagaaggtatgggctttaagcggttcagcccaagcttatgaagcagaccttcagtcttgaaaccttcaagagcatattgagcataatttgggaatatatagcgaagtaggcgaatgacttcctccctggtgtacgtgtcaagtaaagggtccttaacacctttgaagcttgccttacaaatatcgttgatcaacttgttttcaatggaatgcatgcaaccaattcgcatagtatccaccaaagctgaccctatcggatgcagaactgaggggggtcgatatggcaatatgttcaaagaaggattgttatgatactgcccagcaattggcttccctttaaccaatttggaatgtaccccaagaaaattggataacatgaagtgaccctggcaagtaaagataacatcttggtcataatatgccacatttagatgtgcacagattgaacatgcttcagttccttgattcctcatcaacatctcatgacgaacgagacggtgagtgtgaatgcatagattagagaactcttcatctgagagaaatgctggatggtatatggcatcatgcaacttatgggcaggatttttcaaggtctcaaaaagcgaatcccgatgctcaggtagacttgagatactacatgacaactccttctgcagaaccatctccataaaatcttcaaagagagactcttgtaaaggagagcttgaagaatcttctgaaggagaacttgtggacaaagataaatttttcaagcacagcatgttcagtccattaataacttctaagttatcataactaagaaggcccttcagtgaaatctttcttgattttgcaaactctatctgaattagtcctgtccaaagcacatgcctgttgtcatctaacatctgatactttctgtcagccagcacagttgttatcaatctttgtgttggaataagttccatgacaggccttgctttgaaccaatcctccagcggggtacagtgtcgagcaggtctcccaaggtgagtccttgcctttttttcgttgacgggttgtaatttctctgtccctgtgcgcatccttcagagccgaggagcaaccctaataccctatcctgtcacattgaagctgaggaggagtcgccgccctgtcaccagaagcagaggagccgccgccctgtcacccagaagaaccgagcagacacagaggtactctcttcattctgcttgtattctggaatgacgaaaatgaaattaaaaaattttgtgtggtaaacaccatctcttcctccattctgcttgtattatgtaatgacgagaatgaaattaaaaaaatttgtgtggtaaacaccacggttacacaatgagttagcccttgttatgatatcattcttttagtttagcagttttctgttaatatggaagatttattgttgtccctgcttttgtaaattttgtacgtttttggatgatgtccctat

SEQ ID NO: 30912 - DNA, 485 bp, Zea Mays
gttggcagtgtcggtggcggctgtaataggtggtgaaaacaacaagaccattcgactatgggcttcaatacatcacaaacagatgttggtgttggttgattccggaagttcagctagtttcatgagtactcatttaatggaagctgtgaagggggtgcaacaaatgtcaaaacctttaaaagttaaagtggctgatggaaattacttgtggagtgattgttgggtacctaactgtccatggctttgtgggggagttactttccataccgactttaagttcctgcctttggatggatatgatattattttaggtatggattggttggaaagccacagtcctatggctgtacattgggcagagaaatggttggaattcagttataaggggaagactgttcagttgcaaggggttcgaccaaaactgacatcatgtatccctctaactgacaaacaattgagaggtctgctcagtaaagaagcagtgg

SEQ ID NO: 30913 - DNA, 588 bp, Zea Mays
attaagtccctgtgtgacttcagtaaatgtgccttgactcgggcacattgttattgactgtgcgagtttcggattcttcacgcgtgtcgcactgttgctgtggctggcgatgcccttctgttatgagccaaggtaggtgccaatggtggtggtggtaactgagcccatgccgcttgagaatgacttgccgaagcaactaatgtcgtgggttgctagttgcccacatgttcagggatatatggcgaataacacgaggcagtatgtaagacctgcttcggctgattctgccgtgcttcggcttcagcgatctcctctgcttttggatcgtgacttggcacgtccttgttgtgtgtcctttatcctccccatagaataagcagaacaatctcctaggttgcatgctgaaccttcctccaaagcttcttccccctctgcctcttggagctggtggcctataagaggtttgctacattcccaaagattgtgatctttgttggctgccttgggtgtgatttgttctattatcatttgtgttgggattttggattgttctgacatgcctggggtggaatcttcctctgaagcccc

SEQ ID NO: 30914 - DNA, 279 bp, Zea Mays
tctccgagctcaacaacaagaacgtcaccagagagctcgaccttttgggctcccacccaggggaccaagctttaataaaccatctggacccactccatcgcgctatagtcagcagagtcagagctcccttcagacaccctccgttgcaagcaaccaaccgccagcaaatgtctgttggcactgcggagaccccagtcacttcaagaataactgccctcacttgaaggcacccggaccgacctactccaactcggtaaatggccccaagattccctcggc

SEQ ID NO: 30915 - DNA, 915 bp, Zea Mays
caaatttgctgcagagtttgggttgtgttaccacaggaatctgggagaaaatcaagctccaacttggtctgtcagacaagccttttactgaatctggcgcactgttcaccgtcttcagaaatatcgcgccgtggataagggtcagcccctcgccggcgataagaacgccaccgcagcgcggatggtcgtcggtggccgcggtaaatatcctcggcgttgtggcagatggtcactgaggtggcaggctccggttaaacggcgacccccgtgccatcaccggaatccgccgcgcggatagcttgccagcacatctgaaatccgcacttcttccccaactccggtcaacagcctataaattgagctcggactccgcttcttctccacattacgcacctcagtgcttaagcaattgacccaattccgccagagaacttgcgcagccccaaatcccctcctcctctgttcttgctccgccgcatgggactccaccgtggacagcactcttcgggttggtagtttctcaattactctctgttctagctcgtgtatagtctcctattgctctctgtactgagcaattggaatttggccgaagtccatcaccagaacgcgcccttgccttgtaaaacgccgccgtgaccccctcaccgtagacccgctcttcgggtcttgttctgcccaaaccaaagtatgtccatggaccttggtgaacctgtgaacctttacccagcctcaatttggccatccccatcgctgtttgatcggaacatgttcatcctcctgtccatccgctcggtcaccgtgaactgattgattcagtgtcccctaggtgaaattgatggaggggaaatgatcggggtggatctaattgtgtccctgtcgcttgggagctccagccgtggcgtcatctggccg

SEQ ID NO: 30916 - DNA, 436 bp, Zea Mays
gtgtggccttacgatgccattgccaagtccctgtcattgtcaccagaagagaaacatatggcggctttgttggttgagagagcctacatcgacctgaggaaccattgcacagttggtaatgtttgctcattgcccgcttctgatgttaagtacatgctagcggatcattcccgggcgaaagtttggaccgtgactagcatgacatttgcactctggtatgcctcacatacacagatgaaagttgctatttttttgaaagatctggaacagatgaaatgtgttaattagatcactgttctccccagcacatagtaggtactttaacatgccaattctactgaacaacttgctacagggatgctcgtacaagggagttgctgaaagtatttgggatggatggccaagttgactcagcaaagctagagacacctgtcat

SEQ ID NO: 30917 - DNA, 311 bp, Zea Mays
gccggagaggtgaacgccaaagtgaccggccggagcggagaggtaccagcagggggtccagacaagatcgtaggcaccactggagcgtgaagcggtggaggcggagcagactgaaccggaggtgctgagataccagaatgctggagcatgagagccatgaatgcccctattctctgccctatcctgaataagctgctgctgaagagcatcctgcctgtcctgcatgctctgaaacatcgagagcatcctgtcggataaacgggcctgctcggctgccaggagagcctgctgctgggtgagagtctgctgct

SEQ ID NO: 30918 - DNA, 940 bp, Zea Mays
gaaggagacataccattctccatgtccaagctgaagcaccttgagaacttgtaagttgtatttttcatgccagacattggttaaataaaattaccctcactgcttgtttcatcatgtttggtgtcgtttcctgttttcgtaggattttgaagaacaacaaactggtgggagtgatcccatcgacactctctcaacttccaaatttgaagatattgtaagtcctaatacttattatgtggtattaaatgggattaatctaatgcgacatgcaccatagggacttggctcaaaacaagttaagtggtgaaattccgaatctaatatattggaatgaggttcttcaatacttgtaagtattcttgtgaacgatgaaattttgtttttgcttagtacctcacttgcctagtttaagagcctagcaaatgcttataaactaattttatgtcatctatagcttgaaccattaatttagggcgatgccaccttttggttcttcacactcgttcgcatctaaatttctcatgtgcaggggattgcgaagcaatagtttagaaggaagcctctctcccgatatgtgccagttaactggtctgtggtacttgtgagtgaattgcctcccttcatttataatcacgaaccaaattatgtcctttactaaattcagaaagttacttatatttatctcagtgatgtgaagaacaatagcttgacgggtgcaataccagaaaccatagggaactgtacgagctttcaggtcttgtatgtacattctattccttttgaataacactgatcaatgtttcacttgtagagcattcctgacctttcattgttttagagatttgtcaaacaatcatcttactggagaaatcccgttcaatattggtttcctgcaagtggctacgttgtatgtgatagtaatcctatttattgaaacaaa

SEQ ID NO: 30919 - DNA, 294 bp, Zea Mays
cgacgatcccattttgacgacgagcctaccgtgcaagggggaacctccaaagtgtgaggcacgtctccatcgagaatcagtgctgcaacatccaccgtcaccatgccaccggggagcaggacccaacccaacctatttcgaaggatgaggcgtccaaggtagacgagtccctggacgagcgcgtactccgcatgcaaaggaacacccattgtcggaactaacacgtcgatcaggaatgtgagcacgagatggctgagtgcaatcctaggcttcctcatgatcattagcttctcc

SEQ ID NO: 30920 - DNA, 410 bp, Zea Mays
cgaaatctgaacatcacatgtcacacgttaatcgttagtaacccgttttgaaatagtcgtgaatagaggggggaagtattaaccacggacgtggatgcaacctaaaccctaatcactacatgggggaggaacggatccgtaacaacacggcggaggatagacagggtcgaaatggaggtgacgaatatacctgcgaagacgacgatgcgatgggggaggagtccaaccttgacgatgcctgcgggatgtggcgacggagttgcggcggcgcggtcaaaaccctggtgaactgaacggtcatggaccttatccaaacgacccaggcggtggaggacgacgagcggaatcgtaacgacatagaggataggaacctcgtacctgcgaagacgacgaggaaggcggcggatgaa

SEQ ID NO: 30921 - DNA, 299 bp, Zea Mays
caaggagggttcaggaggaactatgacagagtggccgagatgcccacaaccaaattcaaatgatcgacttttaacgccatcaagtctacaccaccccgacacaaaaacactatgacagccaagctactactacacaagattactccactactttcgtaggacaatgtggaagctcacaacgacctgtggatgattcacaacatggagtatacagcggttgatgcagatgctacaccggctttggataacaccgaggcatccgatgattcaaactagaaggaaaggtctagaaatacctc

SEQ ID NO: 30922 - DNA, 424 bp, Zea Mays
caacaaccaattaacaacgtattcttcacgataatcacccaacgatttgcgttttcaattagacctcacatgagcactactactttttacccgtgcccataaccatgcacatttagaccaacaggcaaatcgtcatgactacgagcctaactaaagccatctaacaattcggctaactagagcaacgacctagccctgctatgcaacctactcgtcggatagcctattgttatcacaatccgagacacaacatatactacaacgtttttataaacatatatattcacaagtattttcgcataccgaccaaagcatacgaatcgtaacccactaatctccaaatcgaaatcaccatgcatttacttcccaaaccgtgaatacatacacgtttatcatatgaacacaacattccaataattattct

SEQ ID NO: 30923 - DNA, 275 bp, Zea Mays
ttttaaagtatgaatgagttcagagaaaatgttgcacgcttttgcggcaccaaaccaaccactccattcaattgttcgtttagttatcagaggtagcagtgatatttggcatcagagctaattagagtccaggaggtcggtgaacacggaacgctaccggcgttgggattgggggcgcgggttcattgaccaggtgatggtctgggccaatccaccaccgagagagcaggaaacgaacggatcaggtggaggggtcattgtgtagttcatagtcc

SEQ ID NO: 30924 - DNA, 365 bp, Zea Mays
gcgaaggcccagccaaggccgtggggtcttcggcagccggctcggccaccgccttcaaggcgtcctcgcccgtcggcacggggtctttgctggctccagttggcactgtcggtgcaggggttgatgaggggccctcgccggcataagacggcagcaccagatccgcctccacagcctcgggtagcgcgccgtctagaccaccaaggtcctcgacgccttcggcatgcgccatctgcagcaacaacacacttattcagcaaaaccacacatacccccactcataaccacacaaaaaccagactttaccatttatattgcccggtcggaccgctcctggaccgtttctcggccgtgcgggccccaca

SEQ ID NO: 30925 - DNA, 438 bp, Zea Mays
tctgcccattttgttgcttgcaaaggaacatgctggatgtgcacatacttcaactcatgttgcgtatagtgagtagtctggactctggagtatacttcctgaccaatgtcgagtcagcatgaaatgggtcagtgcgacaaccaaataatattcggtcacagcagttgcttttgaagtgcatacagtcgatgccattatgcatagttacacatagctcaacatagggttggtcagatccttcctttgctaacttgagtgtctggacatgaacccataaccctgagatttggctgtgccaaatggttacaccatattcctatagcttatcaaaattttgagacactgattgctggcttgctgtgccatggttgttgttcaactttcaagcatctaaattttgctctgaggaagaatacatagatttgcactagtctttag

SEQ ID NO: 30926 - DNA, 461 bp, Zea Mays
gggtcataaaccctgcacgagagaggagttgggtggaggtggcatggagtggcaaaggtcaccggacaccagttaacacaatgctgggatctatagctcgttttcactatccaggggtggtacaactcaacggggcagagataggggcgtatcactgggctcactggggcctcaaaccctatggacccgaccgtactcaccaagacgcagtgtggtcatcgttttgggtgagtttattatgtcttttaaatttacttatcgtgggcgtctataaatgaatttaattgcttcttaattttgcaggaacaatttagattggacgaaacaacgaacgaagaacatgtgaaatgtgtattcctcaatgctgctagaaaagttataaatggttcaatgtcagatgcacgggtcaaagctgttaccgtgtacttcaagaaagtgaagggtcaaagaatgaccaacaa

SEQ ID NO: 30927 - DNA, 971 bp, Zea Mays
gccgtctgtatgcccctctcctccgggcagtcttgacccgtgatggcaccggcgacacacccttctccgtcaccactgctcctacccttgctgccttggacaacaccctcgccctttgcaatgctgcggtccatgtgcctccacgtgctgatattgtctccatgacgatcgaggccttgtcttctcccctacttgtgatcgccgtcagcatgctcgccactgccggctccagcacccctcccggtggctctatgggggtgcctctgatggctctccttccccatccccatgtcatcaccacccactcctcccaccgactgggttgctgactccggcgcctggcaccataccacttctgttagcatgctcgccactgccggctccagcacccctcccggtggctctatgggggtgcctctgatggctctccttccccatccccatgtcatcaccacccactccttccaccgactgggtggctgactccggcgcttggcaccataccactcctgaccccattattgtttctttaccccatccccataaccccaccttccctttttccatcattgtcggtgatggatcgaccttgcttgtcacctcagtaggcgacacagttcttcctggtcctttatacctaaaccacactcttgttgtccccaacatcatacagaatcttctctcagttcatcggttcaccactgacaaccactgctctatggagtttgatccctagggccttaccatagtacaccttaccactcgtgtcgtgcccgatatgacagttctagcccctatatattccattcgctttctcgccccacctccatcatcttgtgttgccccacccttgcctgtgctgcctctgcctccacttggcatcgatgtcttggccaccttggttccgacgtactttttagactcttgtccacctcgaccattccctgtccccgctgcaacactacctcgcc

SEQ ID NO: 30928 - DNA, 376 bp, Zea Mays
gccgttttaaggactaattgatttttacttcacctcatccttgatgctgtttcaaaatattagtcaccttgactaattctatgttgtgctcctatatgcccccttgccaaaagtattttattccagcatggtctacacttttctcaatctactagatctgatctcggtcttatgcttgcgacatctttgtagatgacccctgaccatagccttttgtattttgggattctttcctcttccaacattaaattgctaccatttgaccatccctattcctttggtattgacgtgcttgtacccctagattcttcaatactcttgtttcaaatacttacctctgaaaagtttgttgcctatttaaacattccagtttata

SEQ ID NO: 30929 - DNA, 338 bp, Zea Mays
attatgggctgttagatcgtccatcaagcgcccagattagatcattcatcttaaatgctcccacactcttgatcggccgttggatcataaatcgatggcaccgattaggtcttcttctaagtgaaccggtatgaaaccaggtccatccgatccccatcccacggttcacattcgactgagtgaagaggtatgcatcaccttgatccccaccatctggtgatagatcgacgggccaggaccctcatcccccccaaaccagtcagacgcggcggcgccgccgagcgcctacggtggatgcacatcgacgtcaggtgatccggcagcctggccttcccacc

SEQ ID NO: 30930 - DNA, 396 bp, Zea Mays
agaccgccttaggtagcttgtatatcgcctaagacactgccctggtaaaagccacgatagcgctcgtgccagtgacttcccctctctccggccgccagcacacttccttcaaattggacgccaccgccgtaggactctataaattgctgcccccatgagctccgctaggtaattatgcatccaaagcaccagctcttgcctccgatcgtccaccagagtctcccaatttcccatttcccccaaatcggtcagaacgccgccgcgagacatctcgccgtggccagatgtctacgggttagttcatgcccttccgtgtgatgttctagcttccctcatgtcccctgttgctcatagacccgttcgattggactagaccgccttgaatcgtctagaaca

SEQ ID NO: 30931 - DNA, 355 bp, Zea Mays
gttagaagcatctacaaccccactcagaatgcagacaaaaccaaccagacttagggacaacaaaattgatcatagggctcgggatctcaacaacaaccctctcaaaacaactttcgcccacctgccccaagaggaggaagaagagtatgaagcttcggaggaagattcaactcccatccgaggaaatcgttttgcctcttctgtggagaagacaagggacacaccacaaggacatgccatgtaacaattccaaagcaaaaggaaatcactcaagcacaacaaaaccaaccaaagcaaattctccacacttcctcatactactccccatacatcctagagcatgtccttcgtcaac

SEQ ID NO: 30932 - DNA, 506 bp, Zea Mays
gtgtgagccccgccacacaagtcgtccaggaagacaagcaacaaaggatgatcggtcgacaacacaacgtccagggatccggacgacagtgatcaccagaaggatgatcggtcggcaacgtccagggatccggacgacagtgagcaccggctggaaggcgacgacaacgtaccacgacatcggcggccaagacgtggcaacgttcgcgtaaccggacccgagtgggccgtgtaattccctatgttgggctggaccgtcggttagtatatatcccacgacattggcggccaagacgtggcaacgttcgcgtaaccggacccgagtgggccgtgtaattccctatgttgggctggaccgtcggttagtatatatctcgaccgggagcgtgtatgaggcatcaaacatgtatgaggcatcaaacatgaccgacctcgtgtatgaggcatcaaacatgaccgacctcgtgtatgaggcatcaaacaacaaacaccagaagcaaacacttg

SEQ ID NO: 30933 - DNA, 364 bp, Zea Mays
ctggggtgtgcaagccctgcaagatgtacctacagatagccttccctgtggtgcctaaggcaggggagttactgacgaggcggatccccctatgtggcctatggggcccattctctaggcaccactttattttctggttcctgcatacaaaaaggacatggatgtgtttggaattggttctgctcaccatgtattctcgcctgcgcgtcttctgccccctgttctagcttctacgttcttgcttcccttctggtagcttcacgataatggcgttgttccccgcctgctccatccgagactttgcctccatggcctagagaggaaagggttcctccctccaaggaagtctctcagtggagattgg

SEQ ID NO: 30934 - DNA, 355 bp, Zea Mays
tcccgggcagcgtcccgcgcctcatcgaccttggagcgcggtcttgagggtcaggaaactgacttggattgtcctgctcccatggaagtgacttagggacctttagccttagaggtggctgctgcagagaactcggccctcaaggatggtgttggcgctcacctagcccccgagggtgttgccgggggtgactcggctcggatgggtaacgcaagctgcgacacagcccctgagggttttgccggagacgattcggctcgaatgggtagcgcaaactatgacctagcccccgagggtgtccgagcgggttctccctcttgtacttccatggatgttcacgtagggtctcctccac

SEQ ID NO: 30935 - DNA, 415 bp, Zea Mays
ggagcggagaggtaccaacaggaggtcctgacaagatcgatggcaccactggagcgtgaagcggaggaggtggagcagactgaaccagaggtgctgagataccagaatgctgaagcataagagccatgaatgccctactctcagcccgatcctgaagtaactgctgctgaagagcatcctgcctgtcctgcatgctctgaaacatcaagagcatcgtctcggataaccgtgcctgctcggctgccaggttggctagaatcgtcgcaagagcagggtccatagccggaggaggagcaggggcagcacgagaactcccagcctcatgatcatgtgagcgtggaggcataggaggcggaggcggaggaggaaccccaaaatcatcatcatcatcatcatcatcagctgttgtaccctg

SEQ ID NO: 30936 - DNA, 474 bp, Zea Mays
ccgaattaccctaatagaccgaatgcccagccctacacacaatcacgcaagaacacgcgaggatctagagtggtttgggccaccggagcataataccctacatccacttgtgaaagtgttgtattgcctaagcaagagtgcataacctgtgtcttggaactgagcctagtatcgagtatgccctcccttttatagtccaagggggacacgtacaaggctattgagccccgataggtgggcccaagaatataggataatcgtggagtaagagctttaatctcctctgtcctgtcttatcctctgctcggtcttggtgtgtgggcaaaggctacgacgtaggcgagcgggtggtgtcattttgtctccttcgcctgttcccttcgtctcggtaacacgtggggagcagtattagtcataatgaggcgtgcccatacggtgcattgggtcaatggtgttgcctcggtaacatgtggc

SEQ ID NO: 30937 - DNA, 347 bp, Zea Mays
ctagttttcttgaaattcttgcccgtagaagtgttggccgtgttccccttttcttgatttgagttcccagagggctgatggaagttggatttattttgcttcgggtatgggcagtccttgatgaaatgtccagactttccacagttgaagcacccactggaagtactgggaagggcagggtaacgaataccaggggcactcgactgattggtaggagcaggggcagtagtgggacgaataaagacaggctgcttgaatggatatgacggtgggcgaggcaaggaatgattttgatttataggtcagatcaccaacctggttctcttttcaggcccttgatttgacct

SEQ ID NO: 30938 - DNA, 584 bp, Zea Mays
tctttagcaaaataccttgcccgaaggggtatggctgttttaatctcgaccatccatctcgatccaacggcgagggcttgttcttcttcccttattcctctgaatcaacagccgacgatgcattttcccccaccacgctccccagccgtggcggcgcgttcacttcacacggcagagctcgcctgagaagcgctacccggcggtccagtgctcgattccccacatcaactgcatctacaagatactgcgttcaaagctaatccacgggaagggtccttacccgatcttatcgcatggagaccaccgcccatggcggagtgcggcccgatggtggtgcccaagaaccgatgaacaattcgcctccccgatactcgatcctttccaccgagcccacggtcgacaccaccacccaccaacgatgctccccggcccgaccgcgtgcacagaacgacggcgcgagcgagtttgcagagcggcggcagtcccggcctacaacctcaccagaactcgttgaatcatcttgggattcccaatcggatggaggaacgaggcgaggtgccggtcttttatgcgcaagagggaga

SEQ ID NO: 30939 - DNA, 567 bp, Zea Mays
cacaaccgcggggcggttgcacgctccttgtgcggcggttcgccttcttgaccgttggttgcggtgaatatgaaggggcgcacaaccgcggtcggttgcacgctccttgtgcggcggtttgccttcttcgcgcttcgagccagcttatatgacatgtgaggcctggcccccgtgtcatagaatgggaaccttggtgtgcatcgggggagaccctgcccgtgacgctttggggcgcgagcggggaaacttgcctttaaaaaggggttcatccctcgagtagcagccatgccttgcttctctcccactcgtggtgccctttcgccttcgagctctctgcgcccctttgcctccaaggtttctgctttgtgtcgccatagtttgccatggccttgtgacttcatcccgagcacgcccagactgagtgagtgctcgaaatggtataccgcctgcttggatggaatgcgccggcgcttggcggaaagatttgcgccggcatcatccattctgatgggcttgccgctagagagttcgtgtcttttgtcctccctagcgggccggtgctaccgg

SEQ ID NO: 30940 - DNA, 362 bp, Zea Mays
attaagatcgtcatatgaggagagcagcaagttgttagaatctaagaaggaagatgtagttaaacttgttacagacaaggaaacgaatgacaacataattttgcaactcaggcaagaacttgaggcaacaaaaaagttgcatgaggcagagactcagcaattagagaccaaagctgccaaagtaaataaggagtttgaacagaggataaaagaaatagaactcatgttagaagattctacaaagaggagaagagaacttgaggaatctactgaatctagaatccaattttggaagcagaaggaaatagtggtaaacaaatttgtgggtttgcaagtaaagaatgctcaggtattggtcaacc

SEQ ID NO: 30941 - DNA, 303 bp, Zea Mays
tcccccgctcgaagcggtatacctactatctaatcgcgaccgttggctaggatccagcggacgaggtccatctccccctccgaccgcgcccacgacggtgaaccggtccctagcggcggcgccatggtcggtccacagccggaataccagtgaggcacaacagcacgcatacgatggttccaaaataatgagaaagcgattacagaaggctcaagaggtacatcattggggattcgacagaagagcgctccacccacggcaatgggcgagtttgccacgttctgcccacaccagtgaggaaat

SEQ ID NO: 30942 - DNA, 495 bp, Zea Mays
ggaatatcgctattccccccactgactctgtaacatcgactgttcttccgaatcaatgggacttcctcttcttcgtcctcgtcaacaatacggacaataaacagcgcatggtcacacccattgggattggctccggtagggtcacacccattgggatcagctttggcaaggtcacacccattgggttcagctttggtagggtcacacccatagggatcaacatcagcagggtcacacccattgggtttagctccagtaaagatttccaccggtacttcttcagcagcaggagcagaagggccagcaccctggtccagacacgatactcgccgaagccgtctcttcttcttcttcttcccctcgacaggtgcagttggatgactaacctagcggagacgtttcgggcgagtacccttaggctttcgggtgtccacggtttcttcaagctctgggatagttgcaacagccattgtttcagcagggaccgagtcagaa

SEQ ID NO: 30943 - DNA, 684 bp, Zea Mays
ctttttttcaaccgtcgagctacggctttcctcgcggcgccatcacggagctcgcggcttatttgttttgtgcttgggggctttcggaattcgcttttgttcttccagtaacctcgtcgtcgacgtcgacttacctcactacgccgtcatggatatggtttgttgttgcgcaggtccacgcgacggttctcctgtacaactactaccaccggaagcagttcccgcagctcgagtttgccaaccccgaacggttctccatgtctgcctccctcagcgtcaccaacaaaaatctgctcatgtacctgaaccaggcgcagaaccgcctcggcaacggagtgggggccgggctctcggtcactgacaaggcaatcgtcgacgcctgcgacatcgctgaggcgctcgaccccacgaaggactcccccgagatgaccacgtggccgatctccaaggtcgctgttctgcttctcaatcggacaaagaaagagtgcgtgctcgagcatggctccgaaaccaagggcgtctggtcgatgtttgagaaagagatcacgacggcattgggtggttcgctcagcagtgacatgccagtgcaggggtcgagtaataaatccgtgggacttccttcggaaccgtacgtgcttcagcagattgcatattcagaggtggaactcaaaacaggttggtgct

SEQ ID NO: 30944 - DNA, 654 bp, Zea Mays
tgtggatgtaatcctcttcaacatgactggtactttaacgtgtaatcagccctgttttgtacgggacaagattgagatgtttgcagatagcgttaataaagaccatgccatagttttagctgcacgggcatcaagatctcaacatgagttgtacattgaaccaattgatgcagctattctaagcctccttgatgatccggagcaggttgctttctctaactaaggagaattttaatgggtatgcttcttttaaatgaagatgcatactgaatttgtaggcacgactcggtgttcaagtcttagagcatcatgccagtttctttgttgcactgaaactgatgttccagactacatacatcgacgaaggcaatagattcaagtgttgcgtattcaaaggtgatcctgcaaaggcaagttgctgttgaaatttcaaacatacatctcgaggcacatataggaacatgcatgcaagttccaccaacatcttgaggcacataaacacgtgcgtgcatgcagttgcatatgttttgtatgcagagcttgtctcttactcattatctgcttttgtgctataggttgctcatcactgtggcagcagcaaagaagttaaagagaaaataagcatgataatggatgaacttgcccttgatggat

SEQ ID NO: 30945 - DNA, 288 bp, Zea Mays
attgaggtaccttcggcaatagcctcctctggcacaacaagacctgattgcctcatcacttctgatattggtgccgtttcagtcactttggcctcgtccccctcacgagacaccctagcagtggatcgtactctggccatttcattgtttacgcttttctgacgaagctggtctcaagtgacgaagcgtttgctcgaaaatgcaatacagaaagcttcggctatggttaaattttttaacagcacaacagttcgatggcaatgaatgttgtggtaactcttcaccaac

SEQ ID NO: 30946 - DNA, 315 bp, Zea Mays
ggacatagtagggtaaggaaggactccataacgcatagcggatcttgattcctttggaagtatagcttgattcttattattcctcaacgagtttgatctccttcttctcgagtcttgatgtcttcatccgggtttgggactagaggttaagatagatctataggcaacagatgggtagagggtttaataggtagctatatgctagatgggattagttatgtaacctgttttgtaggtcaagttgttgggtgtggccgagttgatctaagtcaccaatttaggcgtatgtgaattaggagtatggccttatctttt

SEQ ID NO: 30947 - DNA, 375 bp, Zea Mays
agcattgccttagtgaccgccacggtagcttgcgctagtaacttacccctctctccggctgccagcatgtcttccccaaattgagcgccaccgttgttgatccttataaattgagtgcatagctagctccgctaggttgttacgcgcctagtgcatcgctcctcgcctccaatcgtccaccgtagcaccttaattcaggatttcccccaaatcagttttccgcgccgcagtgagcttctcaccgtggccagcaatctacatgttggttcatgcctctctacttggtgttctagcatcccttaagtctcatgttgctcgtagacccgattgattgaactagaccgtgttgagtcacctagaacacctcagtcttcc

SEQ ID NO: 30948 - DNA, 287 bp, Zea Mays
tcagctcatgctagacgtgaccggttcttctctgccttcctctcaagacggtgtttcttacacgctgtcgtggctgattgctccgcctccctcttccgtttcttctccgccttaatagcgacatcctccgggagagggggacgagaaactttgatactgcaaagcccttggcaaaggcactcattggtgagacccgaagaaagaggagagggaaaaggttaaagggaacttaccggatcgctcaaccgcgcttggttgaacggtagtgggccactctcgtccaaaat

SEQ ID NO: 30949 - DNA, 606 bp, Zea Mays
ggtgtggagatgcaacaccagtataccatggagtcgcagaagtcttcgggtgttgatcagcctcgtagccaggatgcgaggaggggcaacactggaggtccagcccacaagaggggcaagtctcagcatcagtgccaccatccttaccgtggcaaatcttctgactcgggtacttcgggaggaagtactcagaggtttcgggccgttcctaagcccgggctggggctggtgtgtttccgctgtggtgatgcgcattgtcgtgcagagtgctagtggagtggtaggtgttctatctgcagtcaggaccatatggatgtggtgtgtaggaggaatcctaatgggaagctcagatgggagtcggtgacttcctcctcttctcagggaaccatcaacatgatgtcaagtgctgagcagcagttttcagttcctcttcctccgcaacagctctatgtgcctgggacttctcagttcgtgccgatgcagggttttcctcagtatcaggtcgcgcctactcctatgttgtctcagtttggagctccgcgcctgcctcatccagtggctcagtggggttcttctgttaatttcactccgggggcttcctcttct

SEQ ID NO: 30950 - DNA, 363 bp, Zea Mays
ccaatagagagtaaaaccatggagaccttcaaccaaataacccacatttcctcaaactccaatggatttacaagaaatttcaaggaaatgaaagagctccccaagaacaccatgaacgtaccttggagagaagcttgaaaccaatccacgcaagaggagatgaaggagaagcactagggagagcagatctgagatctcccaaggttttccctcacaaatcaatggggaatgggtggatttggtggaggagagggagaagggggaagaggaggcgacggcttgggctagggaagaaggaggcagcggctggagagagttatgggagaggaagagagagaaaggggaagaaatagagcaaaaccc

SEQ ID NO: 30951 - DNA, 317 bp, Zea Mays
cgagcccctgtattgctttagtaaatatgtcttgattcaggcacaatgttgttgactatgcgagcttcagactcttctcgtgtgtcgtgttgttgctatgcttgacgatgcccttctggctgccgattgtgaatcaaggttggtaccataggtggtggtggtggtaggtgagcccatgcagcttgagaatgagttgccgaagcaacagatgttgtgggttgctagttgcccacatactcagggatatatggcaaacaacaagaagtagtgtgtaggacctgcttcgtctgattctgccgtgcttcggcttcagctat

SEQ ID NO: 30952 - DNA, 355 bp, Zea Mays
tgtatccacctatgagggttagttcaattggtgggagaacccaaatagatagattttgccctagtgcaagagttcaaataggagggatagagttccctgctgatctaatagttatgagtaactaggatgcgactatagatgtcatcctagggatgaattggctaaccaaatatcaagcaagtcttagctgtgacaagagaacggtgaagttagtgtccttatcaggagaggaagtattagtggagttggtcttgtctggaccaaggaaaggaagctgtcacaaagtcatcgcccatattgaggaaatcgagccatcagaagctatcagcgtagtatcagaattcctagatgtgtt

SEQ ID NO: 30953 - DNA, 305 bp, Zea Mays
ctttagaatctcccaccataactctagtttccaatttactcctactcgacttttatcaactagcactacattatccgcaaaaaacatacaccaaggatatccccttgtggtcctttgtggccttatctatcactaaggcaaaaaggtatgggctcaaagtcgatccttcatgtaggtctatttttgttggggtggataccacatgtgtgacgtggcatgggatcaataggaggtgacaagtatctaatcgtttggatccccatccaaccttcatggggcagacctcgtttcatctatccatcggg

SEQ ID NO: 30954 - DNA, 528 bp, Zea Mays
ggggatgtccgactccttggctgacatgggcacgtcggggccatcattcgacgccccccttcctatccttccttaagattcaatacgatcttgttctggaggatctcaacatgaccaccactggtcttgctgttgctctaatggccttcatcgccactcccccgtcgatcgcccccacatcggctgccctagctcctttttattttggcacactccttcgggacttgaaagcaacccactcccatctcacgatctgacaagaagaaaggtgtggtcggggtaacactctttggcgggccttctacaaccggtggacgggtagcatcaccatgctcctggcctggctcctagcagccagcagcaatagctgcgccaggtgtcctaggccatgatggcggcgtttgtactgtttggaccgtctgacatacttgtctcttaacccttataggcttcaacattcccatcacaaccgcctacaccgccaagttgaactccatgaaccgatagctgggattagtaaattcttgc

SEQ ID NO: 30955 - DNA, 340 bp, Zea Mays
caggagtcttgatcttttcagggtcaatctgccctgtcgttttttccttaagcgcgataggcttcgccgcgatggacgctgaaggcccagcttcggcttcagcttgagctttcgtagcttcggcttctgcttgcccagttttggcttcgacttgcgctttggcagcttcagcaattttctttgtaggtgcagggctcaaggcctttgtagtctccagcacagcatccagcacgttggccatcctcctcctcttgggagtcgtggcagaagtcttttgcaccttaggcagtttcgctttttccacttgtggctcttcggccttatcatcttcagcttcggc

SEQ ID NO: 30956 - DNA, 637 bp, Zea Mays
ctcttgtagcgggggatccatgagcagccaaccctagcttgcctggacgggaactctctacagctgtctttcgcgattctcctcgggcgtgggttttgttgcaggaggtgtttcaagctgcattgagccaccgtgcccggagtttcctgtctcttagtccttcgttcagttgcggatttctttgctgcgttctggagtggaggatcgacgtgctcctttcgtggctgtttgatgcttgttgagttcgagtaggttcgtattcctggttcggaattcagtaaggtcagtttctcgctgcttggaacttgatccgaggtgttagtttaatttctgagatatgatcgggaggggatcagcggtgctgcattttctcgggagattgtacggcgcgcccgaatcctgctctgcactgctgtttcctgaagtgcaaagagtgggtgtctattgtcttgttgcaatgcaactcatgtgcatatccagttctctttctgtccctaatgacttgtttgttttcgggggtatggttgccatggttgattgcgatatatggaaatggagggtggaatttatctctctactatctgctgtgtagtgggccattgctgctgttgacactcgacggtaggatcggccgttg

SEQ ID NO: 30957 - DNA, 367 bp, Zea Mays
aagcaatgtgcgtggaagatgatatatggggactaggaatctaggcatgagcagctacctattcttctaatgcaaagaaggcggttaatctaagcatgcattatgagtacatccctaaaccaaattcttggatttatgggaggtagatattcttccgtgcgttctggtgctttccctagtgtgtggatgccttcaggcattatcgtcctgtcttttccattgacgacacgtttcttctcggcaagtaccaaggcacgcttctaattgccatatacggagccacccgcaccaaacacatcgattataaatgggtcatcctgtacccatccattgtatggcatgtcaatgaatacattcgtagcgccac

SEQ ID NO: 30958 - DNA, 739 bp, Zea Mays
cgcgcagtggataaccaagaagggtaaaagatcttggcgcccggataggctcggacccggtcactggttggttcaccgtacccacttggtctgtggccggtcgagatgatcctcgctggcgttggcccctaacgtttgtgcgccacgtgcctagtagctttaacacgtcgcagtgaaccatagcagtgagtccttccatcgctggaggccttgccacggtgaaacccatgatcactcacgccagtacatttcccttatctttggccgcccagcgcaacttctcaaaattagccaccaccgctctcggacactataaattgagtgtgttgctagctccgataggttgtcccgaagccaaagcacccgcccttgccctccgatcgtccaccgtagcgctctaatttggaatttcccccaaatccactttccgcgccaccgtgaacgcttcgccgtggccagccctctgcatgtcagttcaagcttcttttcttgatgttctagcctcccttgagttccctgctactcgtagacccgtttaattgaactagactgccctggatcaccaagaacacgtcagattgttctcggttttcgccgtcgtcgaggacagagagattccgaccaggattagtgcaattagttgagggattagggtcgcctggggtggaattaggtgtcgaacataggagaggcctagccgttgcgttttcctgccagtacgagttcgccggagatgtgc

SEQ ID NO: 30959 - DNA, 380 bp, Zea Mays
tttttgacgttatcggcttcgtatatccagactacatttacccctcatgaaagcaagggaagaaaaggaaagctgctacctcggccatctctgctgcgccgaagggtaagaagatcaaggtcctaacacatcggtcgagatacatcgagacggccacagtgccgaagcttggtgaagggacatcttccactgccgaggcaagacggattgaattactgaaggtgcctatagtcgagccagtcgaagccaaagaagaggcggccaaaaagccagagctagaaaaagcaatagtgctgccagaaatcttgagcccaccggcagaagcagaattgccgaaggttgcaaaggctcccgcaacaactcccaagaggagaagaatg

SEQ ID NO: 30960 - DNA, 1135 bp, Zea Mays
tgattgcttagccaagcaagttatggaccatctagagaagtgcccatttgtgaccaggaagtggagaccattgatcatctcttgatctcttgcatctttgctagagaattttggtactggtggttgtgacaaatggggcttcaagatgtccgccaatctgaatgaagtttcattcttctcatggtggagttgctgatgaggctgctgtgggtcaagttagaaaaggactcaactcgcttatcatccttggagcttgggtgctttggaagcatagaaatgattgtgttttttatgcagagtctcccaatattgttgatgttttgatccaagctagagaggagagaagactttggaagatagctggagctaagggcatttcactcctaactgctcccttcctggatatctagcttagtggctattttgtccttgtgttcctaatggatgcctgtgtattttttgtttttggccaccgtgagctcgcccttgttttggtccactttgtaccttgtattacctattttcttcttaatataataatggtagttctcctttgcgttcgtgaaaaaaaggtcatgctttgtttttggccctagcagaccatgccaaacaatttaggtcatcatttggttgaagggtagacgtggaccaggccaaaacaaatttggcatggatagatattatcttcacaaaattgtggccattccaggcacccaaattgctaggctgagctacacaagaagccaaattgcatgccaacctgacgtggcagagattgatggtacccctagcattgattgcttcatttctaaaattccattgatcataccagttgaaccatggcaataatatataatccgacttcaaagtcatactccatacaattgattcagtaaatcaagatccatattacctatatgttattaaattgttttttgtgttatgatccttagatcattggggggataacccttgccaagaggaagatggttgggcaatgtctacgtgaagggagactagagtatttggggaatcggaatatttgttctttcttcggtcattcctttttcttgggacatcacctcccattatatagagaggactccagtccacctaagaaaggaccaattaaatc

SEQ ID NO: 30961 - DNA, 397 bp, Zea Mays
gtcccatcgatagctcctatgcaatcgttgaagtttggccaaaatgctggattctctaaatttgggtgcatctctgcaaatgttgggtccttgggtgcaatgttgtcatgtgctaacttcaggaggcatgtcaaaactctgctaaatgtcctacttactgtctccagagacctcctaaaacggttgtcagcctgtctaactgtctgtgagcctccaacaatccataaaaacatagcaagagcctctacagatgtcaattttttagtggatttcaacccatatctacggaccaaagtattatgcagtctataaaataaaggcctctcaaccctaaacatgttgtaacattgggtatctcttgctagtgtctcttgcacccattccaaaccagaatccc

SEQ ID NO: 30962 - DNA, 283 bp, Zea Mays
agcaaggaacgaagacactaaaacaattaggccataacataacgcacgcaaccaacaagagttaagggtaaataatacaaagggcatactaccaacatgattccatgaaactaaaaaccatcaaaggggtagcaacattggccagcctttcacggaacggtgtagcaactccaaaatgcactgtaatgcctggccccctagcgaatgaacgcattttccccaatagtcagcgacacaaacacacatccccacccctttataagctaccataaattagaggtcg

SEQ ID NO: 30963 - DNA, 350 bp, Zea Mays
gaaaagaaagggtgcaacttctggaaaggttgctgcttcggctgctccaagcgagcctgcgccgaagagtaaaaagttgaaggtccttacccaccggccacgttatattgaaccggccgtggtacctgagcttggcgagaagatttcttcagctgctgaatcaaaggagcccattcctcctacgcaacaaactggagaaccggctaccatgccgaaggcaccctcagccgagcaagctgaggcaaagactggtaaagataaggccgaacagccaaaaactgaaaaaaaaatgttaggaattttaagcccttcggcggaagtaacagtgccgaaggtacaaaaaggtcttg

SEQ ID NO: 30964 - DNA, 382 bp, Zea Mays
cctgccaatgatggcattgaaagggaggttaacctccgcaatgtcgaactggacgttctcagtgcggaagttctcctcggtcccgaatgtaaccgggagtgcgatgctcccaaggggatacaccagttgagggcccactccagagaatggacgagagggtcctagtcgggaccctaggatctgcaactgcttgaacgcagcgtggctgatgacgttgagccctgccccaccatcaatcagcacatgatgcagcttcatgtttgcgatgacaggggcggtgatgagtggtagtatgccagcccctgccatgtttttggggcagtcagatgccccgaaggagatagtagtgctccgccaccgctgatgtggggctgccttcggg

SEQ ID NO: 30965 - DNA, 380 bp, Zea Mays
tagttcggcaatatctgcaagactcaagaatatatgttttgggaatggcggcatttgaaatggaactgtgtacggctccacgacagtttgtctggtgagatacaattccattggaccacttatatgtcgaaactgatgttcacccatactaatactgaaatctacattgtgcatcttgaaaacatgcttttcatgtagcaaattgttgaagtgcttgactgtctcgtacgaacttgtcattgcctcgatcttggctccctaatattattccagcagaaaaaggcagtggtatggagattatataatttttttgaaattttgaaatggaacttatgtgaatgttaacttacattgatgtcagacaaaatgaaatgttgtct

SEQ ID NO: 30966 - DNA, 486 bp, Zea Mays
gggatctccaatcccatcccgaacgccacccatcagcgtctaaccagccatgccccacctcgaatctccgaatcaccgtccagatgcgcagtcgcggtgatccctcgcgtccaatagcccgaccagccatgaaccctattctcttccccctctgcatcggccacgaccccagatttggcaatgcaccatgcctcccaatattcgcgcttcatctatcaaattcgtgcatgatctccgtcgccgatttggaaagcgtattgccaaacgattccaactcaaatccccaaatcgtgcacccaccaccattaccaaagtcccgattgtcatcctgctccatccatcctacagtgacaccaatactgcgcccaccctcgcccaggttagtctgcattctgtttaccattactcttgtgttggagcagttcatgatcatgcataaccatgatcaaccatgtcgtaccttcctattgataactgaaaaattgc

SEQ ID NO: 30967 - DNA, 346 bp, Zea Mays
ttaaaagatatcgctgtttgaatccgggtatgtcgctgtccaaaagacaaaaaacagattacagggttcatcttgtggactattttgggctaattagatgttggaatttaattataaattgtgtacaaaacttgtggggaattttatgtagatgcctctggagtttttgtttgttaccactgctgtcataattttgaggttatgaaattattaaacagccccgctgcagtttggtgggtgtggggagagatgtaacctgcggcggggtttgagtttgtgcgtaggtgtggcgtcgcttatgagcctgattatgtgaaattggtgcactaagttgtgtgtcaaaaac

SEQ ID NO: 30968 - DNA, 655 bp, Zea Mays
cggggtgaaagatctcgccgcggatgggctagaatgtactgtgtgcttgatggttcatcagtgcacaccgacgacgtggccgagcggcaatcaccggcgtgttcgctgttcatcgagtggacgccacaccttaggaggtttatcgcgtcagtatgagccgaagtgaccatccaatgaccgtcgtagttcagtcgctctgcggttgccacggtagatcgccgccatgactcattcccctatcggccgccaccgcaattcgtccaaattaagcaacaccactcacggactctataaattgagcacgccatgagctccgtagggtagtcaagcacaaagccaccaagtcgtgccctcaattgatcaccagagctcgccaatttcccatttcccccaaacctgctttccgccaccgtgaaagaggcctcgccgtggccagctcgtctcaggtccgctcataccctctgccctttcgttttagtgttcttttgtgcccctgatgctccccaaccccgctaattagactaagaccccttagatcaccgggaacgcgtatgattgttcgtcgtgccctctgccaccgtggacagagcgtgttagagcgccgttagtgaaattagttgaggggaaactcttgttagggtttgaatttggtctc

SEQ ID NO: 30969 - DNA, 303 bp, Zea Mays
cgccaccagtgaccagataaggccgccaggtaaaagccatgcgcctaaggataactccggtgactcgccgccgtgcctcccccttgctcaccgaacccgtggataagaattctcaccgccgttaagccatcaccggcgtccgccgcgtggctctaactttccaccgcatcgccgtaagccttagtggctccccgttgatcgccggagcaattgccacgacgctggacaccaagccactgcgccagtactcttcttcctcctccgaccgccgcgcgtccccactaaaattcccggccaccgccg

SEQ ID NO: 30970 - DNA, 295 bp, Zea Mays
agaactgacttgggagttagtaatgaggatttaaatccaatctctgaagatcctacaaatgaggatgaaaaattccatgaaagtgaagatgatcttttaagctctcaagatctggaggaatttgccaaagatgatgagggaatcatcccttcctctcaagggaaaaacaacaagtctcctttgggtaaccaaactgaaggttctggtaaaatggagtctgaaaaacaagctgtgggtatggaagtggatcatgctgaaggtataagaaggagcagcagacttgaagctaacgatg

SEQ ID NO: 30971 - DNA, 302 bp, Zea Mays
ggggaccagagtaccagaccaacaccaaccatatacggtcagtggactgcacatgcactgcacgagcacggcacggtgggggactcatgggactcatggcctcatgggggtgtactgcacggtggcgacacatgggccttttgggttggttcgagtcgtgtcgtgccgtgcaccgtcctgtcctgtcgtgtcgtagagacacccgtcacccgtacctcgtacagcaggtggaactgttccgtgatgcgctgagcgccgtgtgcctggcaccacgaacatggcggcgccgccgcagggtccgg

SEQ ID NO: 30972 - DNA, 449 bp, Zea Mays
cttaaaggtttgagtagtcctacgtggaaaacatcatggatgcgagctcctttaggcaattccagatggtatgccactaagctgatgcgttctagaacttggaatgaccctgcataccttggtcccagtttcccttttggtcagctgaccagtgactgtgcctgtcggtgtaacaggcgtagccaaaccagtcgcccaccttgaacaccagatctcggtgatggccatcataaaaccacctagcatgttcctgggcctgtaggaatctgtctctaacctccgtgagaaagcagtcttgttcgcgaaaaatttcttctatagttggtgcagctgttgctccttgttggtatgggatgagtggaggggggtctctgccatagaccactttaaacggggttgtcttcagggctgagtgataagaggtattgtagcaatattcagcccaagca

SEQ ID NO: 30973 - DNA, 275 bp, Zea Mays
tttatgcacaatatcgatttagcataaatacttcatccgaacccacgttctagaaatacaggattaggcccactaccccactttccacgcggtcaaacaattctataccctaactccccacgcggtcaaccttcgtggccgactcgccgcgattcttcaagcatcgtcagggcgattcgtcttcctcccctcccgccagtgcgatttgccttcctccgcccccgcacgccctcaactctaatcgtcaccgccgttgatagtgtcatcgagccgcc

SEQ ID NO: 30974 - DNA, 516 bp, Zea Mays
cgtgattcgtgctaggtgcgtagtggatatcaatggggaagtaaaaagatctcgtgggggagtggatttggtcgcggggtgaagcttatcaactgcgcctgtagccgtgcgacatggccggaccgtcggtgtcgccgtggtactccggtgacctcaattatgtcacgccgtagctctttaccacgtagtagtaaccgtggcacgcctaggcttgccattttagaaccgttgcaccggcgggcgccatgactgagccgccagtgactcttccctccctccggtcgccagcacgccattccaaaattaggagccacctcccttggacactataaattgagcataccactagctccgttaggtaatcacaaagccagagcacccgctcctgcctccgattagccaccatagctctctaattctatcttcccccaaatcgggtttccgcaccaccgtgaacgccgcgttgtggccagctctctgcaggtccgttcacgccctcctcgctcttgtttcagc

SEQ ID NO: 30975 - DNA, 925 bp, Zea Mays
cggtgctctagagaacatcgccaagggcccatccgttagcgtagcatgcgggtgtgttgtctagtgtatgcggattactgtacggacaagactgtaattactctattacatgagatatccctcgaatatagttggtagctaggggtagggcgtacattagaccagctacccccaaataggcctataaatatctccgtcctatagtgggatgggacaagcataatgagaagctacagttctccgcattttgtttcgttgtgcacttgtgctcacacctgtcacttgagtattagggtccacctgacagcgtagccatgtgttagtgcccaacattttgcacccaccattcatgcgacaaagacaacacccatgatgcctcccaagaaaagcacatgtgctagcccaccaccaaacgatgacgacgctaggactatccttgtcattaagaaagacaaagtagtcctcactgctagatcatcccccaccaactagcccgaaggccactatcgacccactaggcgaggacctcctcgcaaagcaaaagcagacaacagtctccactgcgcaagcaagcgaggtccataccaccagctcagaagactcaggagacctcccgcccaacccaaaaggccaaccttaccatgctaaggtttggcaatacatgacaaggagcttgcctcccacaccaccgggcttcaccgcatagcaggccctcaccacccattcgggatgccatcggaaaacgactacgaagacttataggccaacctagacctcgacatcaactctgaggaccagcagctgctcaaaatccttcgcacgcacaattccaacctccaaaagataatagatgcccttgtggccagacagtagcgcggcgaggcccgaaccagagtgtgtcacctcattcggcaagagaaagaac

SEQ ID NO: 30976 - DNA, 382 bp, Zea Mays
cccttgtggcaggaacttacttttgtttgcttttctgctgcctgtcaaatcctgatatttgtgtgtttgcaaacttacttggttgtttaattcattgctattgattgtcaggtattgtgcttgtataattacattttcatctggtttctattgcatttgtagcagattagttgtagtcattgtcctgcaagcatatagtccttgggaagtatatgtccagtcgagttttgtgttggctatgcgtgatgtgatttaggtttcctttccttgggactgatcagagcacatatgttgtggccataaagctgtttcgatagcgtagttgtcaaacttttgtatgtacttatggaccaggggacctgctttgcagcatagatttgtt

SEQ ID NO: 30977 - DNA, 451 bp, Zea Mays
ttagctcaggtcatctgtatccggtgatcgccggagagccaccacggtagatgccaccaagctctcgcgatagtgctcttctcactctctggccgccaccacgccaatccaaattcactagccaccgcttagcgcccctataaattgatggcatggtctgctacgctaagttatcaccaagccagagcacccgctcctgcctccgattagccaccacaactcttaaatttctctttctccccaaatctgttttccgccaccgtgaaagaggcctcgccgtggctagctcgtctcaggtccgttcatgccctctattcacttgtttcagtgctttgatatgctcctggtactctctgacccagccaactaagctaggacccaccaggaacacattggattgtccgttgatcgcacggtcaccgtggacatagcgagttagagctccgctagt

SEQ ID NO: 30978 - DNA, 603 bp, Zea Mays
cctaacaagagtttcccctcaacaaatttcactattagacctctaactcactctgcccacggtgaccgtatgatcaacagacattctaacgcgttcccgatgatctaaggcagcttagctcaattgagttggtcaaggagtatccggggcaggtgtgggtgctgaaacaagagggcagggagcacgaacggacctggagtacgctgaccacggtgagcaaacacacggggcaaggactggtgcaatggatgcgtaattatcctacgaagctgcgggtgcactcaatttatacaaggcttgagcggtggccagtgaatttgagttgggcgcggtggcgatcggagaaagaatgagtcactggtgcggtgattcgtggccttcaccgtggcggcctcaccggcgacgaaccagtagcagagagtggcttacggtgactcactacgacatggtaaaacgttgaggcacgcagcctggccagataacggtgacttcggtgatgccagcgcgactaaccatggcgggacacggcgactggtccggccagcgaccggattcaccccgcgctggatattctcaccacacccgacgttatccatacttctc

SEQ ID NO: 30979 - DNA, 324 bp, Zea Mays
ccgtaacgctccaaccagaggcatggctttaggcggcctagtattagtgatgcctataggtgaaaccaacttacacaagactagcaattcaaggctttgtccattgcaaagtcatgaggaggtgaatcctatactgcaaggtgtagcttaacccgtatcgggtctgcactgtaaagctggtatatgaaagcatagagattgagtcaattggagaccttggctttggtggggattgttggaattaggcccatttgtgtgtggcccaatttaataaggaagccaaggaggtgtgtagggatggcacggggctttagtcccacatcg

SEQ ID NO: 30980 - DNA, 450 bp, Zea Mays
ctggtcagagggcaaagtgtttgtcgctaggaactgtgttttcttagataaagagtttctcaaaagagagaaaagtaaacgaaaggttgtatcttgaagaagtttaggatgagccagtgggacaagatccaacaagccatgctaatgtagcagaacaagttgagacgtctatggcaagagaatcacctccacaaccacgaaggtcatcaaggcttcgtgaggcacgaagagaagttctattgttgggcaatgaggaagtgttgttgttagattatgacgatcctgcaacatatgcagaagcgatgatggacccaaattctaagaaatggcaagccgccatgagatccaagatagattccattggagaaaatcaggtttggagcttggttgacccacctcatggtgttagacccatagagtgcaaatgtatctataagaagaagaaagaca

SEQ ID NO: 30981 - DNA, 297 bp, Zea Mays
gttggattcaggatgtagggatgggtttagatctgggagagagtcaccgtgggccgttgatcgactgatgatcgggctggatcaaattggggcatagcgtttcgcccaggggggtttaccaccgtggatctttgatcctgcggacatcgtcgcgtaccgattcagttatgatgccgacttttaatctgggccgtccgatttctatcctgcggccacgaatccatcataccccttcgcgctgagtgttttgcataaaagcccctggatttctaataaaccaacctgccgtccatttgg

SEQ ID NO: 30982 - DNA, 495 bp, Zea Mays
cttgaaaggataggtagttgaatggtaaggaacatttgtagaaccagcagtcctgattacctccttctggcatatcgccgtcgactaagaaaaccctgacctagaacctttccatgcctgcctcacattttgatgtactcgtgccttttcttccacgatgatagccacaattattgcccgattgaaggtaagatcatagcaagaggccagcttcttttgcaattttgagttgaggtctctcataaaaaaatctcttttcttggtatctgtgttcacatgctcaatagcatactgagaaaggtggttaaatttcccaatatactgcaacacagtatttaccccttgcctaagtcgcataaactcctcaagcttcatttgcaaaaccccgtcaggaacatgatgagtacaaaaagcttctttaaattcaacccaagtaacctggtgatctagaggttgtatggcaacaaagttggaccaccaagtgctggcagctcc

SEQ ID NO: 30983 - DNA, 523 bp, Zea Mays
ctggttgctgacgtagggtctatatggtggacaagatggggtgaatagtcttttctaaaacttaatcacgttggctgaccaaaataattgcggaattaaacttaacggtctagccacatccgagatacgaccacagcgaggtggctagaacttgcgaccacgacaccacgtgcgcatggtgttactgaccatggcgaggcagccctggccgatagcgtgatggccacagtacgaaactatgccgacattgcaccacggcacaacgttcatgcgggagtagtcatggcaacacgcacgcatgtcttcacgcagcctgggctggaactatgtggtgcacacgtggcttagataagtgtctgccttgttggtccccatatgcatagaggtgacccaatgcacaagcacgctggtgatgtatgcagtctgctctagagacggtgccttagatacgatttggcttccagttccaatagcttttaatccatcagtgtagaattatggaagtgcttgatatattgatagg

SEQ ID NO: 30984 - DNA, 393 bp, Zea Mays
tacttgtattttcctttcttcacaacaccttggtcatccttaatcttgatgaagtgttcccacatttcagatcttggtgccattggttttctggcatgtttttccttatcaacttcctcatccccttctgttcctttttgctctctttcattaccttggttatccacattctcatcaacccttaccactgcaccatccacctctgcattttcagtttcaattcttgccccaatctcatcatcaggttcagaggacatctacagaattgaatagtaatacaaatcactcaaatagtctgtattggggccttgggggcaacaaatagaatagatttgatgaaggaaaaacatgagtacacctagttccacaactaagaaaatctagggataagag

SEQ ID NO: 30985 - DNA, 572 bp, Zea Mays
caagaacatgggttggagccgattgatcagtgtttctcaaccattgctcaacttgaattagttaacacacaagtcacctaaaacaccatattttaggaggtctaatcatagaaacattaaaacatggcataaaactccataagatctacattggttactgaaggacctaaagcactcgcgtgcatatgttgtcggatggttcttcaattttagcaaggactgactcatgagcgctactcgcctccaataattatttggctgcgataacgctcatataagacttctcatcgatcaacaagacattcatttatcaaaaggaaatggaatgcagtaatttataaagctacgcatcgatccgtcatacaacaaaaatcatgacaacactgacacatactatccactaaccgttgaaaaactaaacttacttctcgcttgccactacatcactcctcaatcacacaaccatcacgagcatccttcacacgtttacataatagcgacctaagcatcgtgttacacaatacaggcatctttcctcgtcgcgagtataaccatattacggcatatacccg

SEQ ID NO: 30986 - DNA, 354 bp, Zea Mays
atggagagaactcgcaaagaacaacttccgaacttcaggacagatgaagaaggagtcctttggttcaaaaaccgtctgtgtgtaccaagaggagaggcacgagaagttctgcttgatgaagctcacaactcagcctactctatccacccaaggaccaccaagatgtacctagacctcagaaccagatactagtggaaaggaatgaaaaaggagataacacagtatgtggcccggtgcgacacttgccagcaaactaaggcagagcatcagaagcctgcaggtctactgcaaccccttccaatacctgaatggaagtgggaagaaataggcatggattttgtaactggactacct

SEQ ID NO: 30987 - DNA, 280 bp, Zea Mays
attaaatctaggatgtacatcctaagcccaacaatgcagattagatctaggttaataagatctcgacccttggatttagatctgacgggtagtttcgcgtaatgattcatcgtttaatatgggccgtccacttcatatccggcggctgaagttagcccataccccttcagccgcgccaacttacaaaagtgaccctctgattttccagattcaacccgccgtccaccgtggattaattctgagtctggggtatttttatatgtcagccctcgagcttctc

SEQ ID NO: 30988 - DNA, 473 bp, Zea Mays
ggctgaaggacatgatggccaagacgtgggtgaaggcacagggcacgcaggagcgtgccactatgttggagtcagaattgttggccgtgaaggcttatcatgagaagttggaagttgatacgcgagctggcgtggaccgagtgcattccctatttgttgaggcctatcacgacctaggcgctgtaacgatgcccaacgatatgtccgggggggagatggacacccgcttccttggttggttgtagggggaaatggcgagtctccgggacattgtgattgggttgatggcctattcctcccttgttacctgcgagggcgttatgaatgctttatctcgtgatgactgccaacacttcgagagtttcgaacagagcagtgcagactttgactgagaggtgttccaggtcgaggacctgtgtatgaagcgacctgccggcaccctgttcgacaggatgtggggaccgcatgggcat

SEQ ID NO: 30989 - DNA, 324 bp, Zea Mays
attcgatcaattaataacaatcaccaatattcgatcaattaataacaattaccagcaaaagacgagttaaagaaagaactattcaatcaactaataacaattactgatagctactagctgactatcaattaataacaattactgatagctactactagctgattagctcatggtaacatcactagcagaagacgagttaaaagaaggaatgacagcaccggatattgtgaatttggacaatttgcctttcagggttcctgcgccctcgccgatgggacgacggctccacggtgcttgatgggccggcaacgcagtctctcaccg

SEQ ID NO: 30990 - DNA, 303 bp, Zea Mays
aagtgctgaacaaactgtccacttcaattctccaaacaaacaggtaacacaagcagaacaggttaaaacatatgccaaatgtttggtttatgcaccaaaggcaaacgaactgtccaatttaatgtataatcagaagaacactacaagcagattgtccaaatggttcagtagaaccagttttctaaaaacagagaatgctgacaagaagcagatacaagagattggggttcagacacacgagaatgcagttcatgagacatggcaagcggcttcttgagatggcttccttctctgtagatatgc

SEQ ID NO: 30991 - DNA, 342 bp, Zea Mays
atgtggtggctgatgcacttggcaggaccggtgtcccaaaggtggccatgcctttgatcgtaaatctggacttgtgtgggagttgctttgtgctatgttggcactgctagagaggagactcgaatgctcatttaatcttcccttctggatagagtgtgtgtggcacagtagtaggatcgttttttgtaggaggctcagaagagggtcagtgatggtaaacctcgagagttcaccattgatgagaatgatttggtttgtttcagaggccacctttgtgtgccacagaaatcgaaggtgaagatggatatcttgagagaagctcataaacgccttacactgttc

SEQ ID NO: 30992 - DNA, 322 bp, Zea Mays
cggactcctccatcatctctacactcttcgttggaattttcatggtcgattcgacagatcgaagtattgtctcattttccccatttttgactcgatccaacaccgttcttgattatcttaagtatcttttcaaggatattgtgtagtttaggtgcttggcacacttaaactgttttcattgtctcgaacattgtttgagttaagtagtttggtattgttcattgtagttaaaccgctcacatgaacggttgaagtgcatgctcaatatcatacgtgtctttcctcaaacgtgttcattaaaatccttgaacatcgattacct

SEQ ID NO: 30993 - DNA, 457 bp, Zea Mays
acatgagggacaaagcggaccatcttgttgaagcccacttcatactctgtgacagacttcttctcttgctcgaaagactgcaaatcaatcttcattttctccaggaaggtgaccgggtagaacctcctttcaaactgcccgatgaagacatcccaagtcaggactcctggtgaggaggagtgcgctgcctgcacgcctctccaccaaatttgagcctctcccttcagcagctgtgtgccaaagcgaacacgatcaccatacacaatctcaaagacattcatcttatcctccatggaagttagacaatctgctgcctcgaccagagtacccctgccatcaaaagcatccagcttcatgcccatccactgcatcagagaaagaccactgactggaagaggcacctcagcctcgccacatggagcagcacctgcagggacagtgccctcgggcactccac

SEQ ID NO: 30994 - DNA, 505 bp, Zea Mays
gtgatcttgaccagatccaggattagggttaggggacaaagaagctggaaggggatagagaagttagaaggggacaatgaggggaagatggaaggggataatggagaagatggcactggcacgctggcacctatgcaaccggagcaccggattcgctgacaaggtgacaacattgcagggctagaggggatagagaaggtgagcacaagagtcgagttgctgcagcggtgatggtggctcaccgtcgcccccacatctgcagctacatgtggggaaaatggagacaacgaggacgagtggttgcgcgtgagtggggaggggaaatgcttaaggtttctaagtaggccacgagctatggtggcggatgggaccactcatatgtactcccgatgacggtccctagccagaccagtcgttgtagatgggctgggccgtgcttgcaccatgggctgcttttaatggctcgagcatggctgttgtcacgcaaggccatgctgggctccag

SEQ ID NO: 30995 - DNA, 578 bp, Zea Mays
gtgggatcatggccggttcaggcgactgaaatagatgagccatggtacagtgttttggatggatcagaacgccagctcagctcgccgtcgttgatcaccgtccggaatcgtgcagggtgttgggtggataacaccgggaaaaaggtagctcgtacgtggcaccctctccgtgctcggccgaagttactcaccagcggccgccgtgactcagtggattccgccgcagtggcactcatgccatagttctccctcactgtatctctttccgacgtggtaagcatgtgcgtgtgttactctccgtggccgggggccatccgttgggccgccgtgcctataaattgagcagggggtcacggcgaggtgctcgctgatcttcaagtgagctcagatacaaccagaaattcacactatcctctccaccttctctcaaatcgattgcgcacggtgaaagcccagtcccttatgatcctatagcctcaatccccacccctaatttcatccagagacgttgaattgccactttccccaattcagtccgccgcgccacccaaaacagcccgcccgtggccagcgtactc

SEQ ID NO: 30996 - DNA, 377 bp, Zea Mays
ttgggttcagttacagtcagtgtctggatgaattggcatgcgagaggagacgaagaatacacaaaatgaagggtcggaccaggcagcagaatgtgggaatgaagggaaagaaagggaggagtggtagcttctgccatttcactgctgcacgctatctatctttatgggccaacaagctacagtccaacaacgacgaggagcagtgcatagcacctcctactcctcctatcttctttgaaaaaaatacaagtagatttatgttgtttcaaacctagatatagtatttgttttctagatcaaaaagtttgatgcttttggttcacgttaatacacctccctctctcagggtccttgtaaatttgacatctcggtcctgc

SEQ ID NO: 30997 - DNA, 397 bp, Zea Mays
atatattcatcctcagacatgctcactttctgcatacttgatttccaggccatgttttggaatgttgagcctgagcacacaccccattaaactcgttagcctccagcccactaccgtggaaaaataaaatacatataatatttggcacacagatgaactacctttacaaattgcaatcagagcaaaaaccctgaccccctgtacaatatgtgattaggcattcattatgttcacttcttcaaccacataattgctgtctggtgcgtattcctcgtcatacgatttcactcgtattgttgttgaaaggcatccttattagtaatccttggtactgctaaggttaataaacagtgtaatgttttactagttactaccgttttagatgaaaatatttggc

SEQ ID NO: 30998 - DNA, 307 bp, Zea Mays
gttgttggagatgcttttagtgcttctagttaatatagtaagattgtccatccgaccataccttccatatacatgactctataggaccctagtcgttctatatgggggctataaaagaacaccgaaagatcattcgaatcggaaacgggtcccaaaaaggaacagctctttcatgtgcatgcccaaaaggtgaccaatgcaacgcagctagctgacaaaggagcttaacaacttcagatctgcccatgtgaaatctttttggagaaaaaccaggaagacgagccagcactgcacgatgtaatcatcg

SEQ ID NO: 30999 - DNA, 456 bp, Zea Mays
gactcagagacttgcctcacaaagggccatctggagttggtctcctcttcctagaggcgattggctttaatctggacaccctcgccctcagaatgaagtggggcctcctcgctctcaagagactcggccctagagcagagctcggccatcgtgctgcatggccacagaatgggcagcccccacatggagctactccacctcccactagatggagaacaatttctccgccctggcccttgatcgcgcgaagatacgctgcgaaaggataacccgatgatcaccttaggcgaggataaaaggcaagaaacaaggagtaatcgataagcggtgtctacctacccaaaggggatgaaatcctatgtcatcgacgcccgagcaatcgataccacgtcccgaaagctaccgagcatcacctcaatagtgccaggctgggattgccctaagacgaagccgatt

SEQ ID NO: 31000 - DNA, 463 bp, Zea Mays
ctccatgcctagtggattttatcagttcgataacaagaccagtttcccctcccctgattgcgcaaacacctctcacaaaccctgatagaactggtctgaaccggtttgctcatgaaagcaatcactctgctcctcaccttatccctacagacagcttgaaccatataccctctgatattgctgttgaaccagacttaccacaacctcatgtacatgaaacaaatgggtacagtcctttgcatattctgggagcagcctcagaaccaacctcaaccccccaagatcagctgtcaaaaacagttccattttctggaccttccacctccacacaaatgccaattaaaacagctgcctacgctgtaactcgccatagtacaagactagcaaacaaatcaaaaaaacgagacggtaaaggggcgattcagattgcccaagaactgcttgctcataagttaaaagattt

SEQ ID NO: 31001 - DNA, 421 bp, Zea Mays
gaacaagtccagcaaataagggagaatttgagaactgcacagtccaggcagaaaagctatgctgatatccggagaagactgcttgagtttaaggagggagattatgtctatttgaaggtatcaccacttcggggtatgtgaagattcaaagtcaaaggaaagttgtcccctcgctttattggacccttcttgatcttaaagcgagtgggagaagttgcatatcaattggagttaccggaccatcttgcggatgttcatgatgtatttcatgtatctcagctgaagaaatgtctcagggtacctgaagaacagttaccaatggaagaccttagtgttcaagatgacctgacttatgctgagtaccccatcaagattttggatactttgactcgagttacgaggaataaggttataaagatgt

SEQ ID NO: 31002 - DNA, 297 bp, Zea Mays
aaggaggtgccttggaggtaggtgctgagggaatcttggggccattcaccgagttggagtaggtcggcccgggagccttcaactgagggcagttattcttgaagtgactggggtctccgcagtgccaacaggcattagctagcggttggttgcttgcaacggagggtgcctgaagggagctctgactctgctgactatagcgtgatggagtgggtccagatgatttattgaagcttggtcccctgggtggaagcccaaagggtcgagctctctggtgacgttcttgctgttgagctc

SEQ ID NO: 31003 - DNA, 374 bp, Zea Mays
caacaaactccactacaccgggatatctctgtccccataaagcgcgggcacaaatagccctcggtgtccttttccctgaaccatactatgccaaaacagctcacaaaacaccgccgccatcgaggagagatagaagttggcaagaagagagaaactcgcggtcgcgtgccacacgggttgactgaaggggttgggagagtcgcctgggtacgctggtcacatccgtggtcttgcggcggtcggaaaagtgaggtgtcgccaggaattcctcgacgaagatcctctccgtcgcagcgtcgtgggcagggtgtcttcgcgtgtgaaatctcagtgagtgtccctccaacgaagtcgcatttacctctgcatcgttt

SEQ ID NO: 31004 - DNA, 333 bp, Zea Mays
gccacggggcgatggtaaaaccgagcattctaccatgggtgaagccacgtgtactcatgggcctcggggtcgcctcgctgtctcgtattctttatggcgaacggcgggggcagcgtggggcccgagcgcgctatgctgacctctagcctccgtagcctagggctcggtgcgactcatcgtgtttgtgccctaccagggatctgcatactcaggcctagtctcgatagatcatgagtgcgccgcaggccaggggtttgcgggccataaatgtgtcgcagcccgaggagttcataggctatgagtgggaggcggacccacgcctcttatgtggct

SEQ ID NO: 31005 - DNA, 539 bp, Zea Mays
cgattccttcctctagcggctagctattcggcctacttgtggctcgatcgctccttcgatcatgactggatcagtagtgggtgaccaaacccgtccgctattagtgtcatcttgtcttctcgtcactcgttagttcacgcgttgtcgggatcccacacgcagcgccactactgtgcctcctagtctgcatcgactggtgggcaagctattggtgggatcctgccttagcaccatggtgccaccaccatctgccctcactatgtcaccagggtcccaccacgtcgtcgcaatgcaacaattgttgtcgcttgccactgtctacagccgcttgccctcgctgcccctcgcatgttgctacctcatcatcaccatttcaaggcagactcgccacagcgacgcgccgatgtggccgcttcaccctggtgctctcccctcgccccttgttggcccacccctttccctctctccgtctttcccctagggtggtcaaaatggttttctgatattcatatcgttttagaacgctcctagtattatca

SEQ ID NO: 31006 - DNA, 596 bp, Zea Mays
tgaagatgctctatgagaacgactgaagaagatcttaatggtacagtaacgaaaagatcttcagatgcagtgaacgtgccgccgatgaactccgcgccgcgatcctcgctggcattgcgattcgtgcactctggcgtgcggataacggtcgacggtgaaaagatcttgtgtgaggatgaattcgaggcactgttctgccctgtcgtcgtacccacttgcgccggcgacgtggctgcacgaccgccaccgtcgtgtcgtcgtttatcgtggttatgacacgccttcggtcgattcacttcattgtcgcaagccgtgaagactcggcagtgaccgtcgtagaccgtaaaccagtgagcgccatgttagcaactccggtgactcttccccctttctcaccgcgagcacttccccgtccaaattcgccctcctcgtggtcgtcctttataaattgatgcctcggcctgttccgcctactcgttacgaactcagtgaaccactcctcgcccctaattacacactgtagcgccctaatttgaaattttccccaaatccgttctccacaccgtcgtgagcacccctccgtcgacccaccgtct

SEQ ID NO: 31007 - DNA, 352 bp, Zea Mays
gtaatcgtcaagctattgcacccactcccatctccactcgctcaccgtagctccgcaattcgggttttcccccaaattgatctccgccaccgtaaaacaccacctccccgtggactgtccgttctggtaaggcaccatccaattcgcgcattgttctagcaccctttcatgctggtgatgctccccgacccctttaatcgaaccaaaccgactgggaccgctgggaacacatcgatctagtcgccatgctctcggccaccatggccagagttccttagtcgatcattagccaaattaagttgggggaaaggtttagggcagatccaatttagtgtctgctgctcggagaacc

SEQ ID NO: 31008 - DNA, 327 bp, Zea Mays
tggttttcgatccggtggcccgaggccctaatccaaacaccgtgacctaaaaaatgaaaatggggaggagtcgattgcaatagcgccgtcttaccagtgaataatcgatgccctggtggacggtggttcgagcagcggtcaggacatcccgacaagaaattccccactaccagctagcagttgtcaacgtcgttgatcttcacacgtcataccgacacgcgtgaacatcctagggcaatccataccccaggggaatggcgctgaggaggtggtcatcgtccacgcacggttcggcggcgggcgcagtgctccaacgagccattgcga

SEQ ID NO: 31009 - DNA, 528 bp, Zea Mays
acaaagccacaaaagcggtcatatgttgaactccattagggttgaggtggtgtagtcggatcttgtaatagtgaagaagccccaccaggaacgggcaccacgaagccccactcgtggaaatgcatgaacgaaaccacgcagctcgtcgacggttttggaacgccctcggagccagggagtaggtggtctccttcatgtaggaggctacgagaaatgagcgcatccaggtggctttgatcaaccaaggagcggctccagaatcccatgatcacccaagagcgaatggcggtggtagggattcaaggcgagaggcaggtagcggtgatggagtaagagacacgcgacgccctataagatgaatagggaaccaaagcaaagtggcgcctcaaccccaaattgataggagcgacccaccacgacgtgaccttcaaattgaaggcacgacccagtaagcaataaagaatctaaactaacatgttgccgacaatggtgaacaggcctggtccaaacaagacgcccacccccgag

SEQ ID NO: 31010 - DNA, 512 bp, Zea Mays
gttgcttaatcgggtttcacaatcattcacagcattctactgcaagcatacaccccagagaacacacatgaggagatagtttaatcacaattacacattatactactttaatgatattggttacttactagtattagcagaaaggcaaagacaagacattatcattttgtttctccgaacatataactgcattgctaagagttgattaagccatgctacttattagacctcaacaaaattagttcactaacttagtgagacatgtactacttacttgtatataactcaaattatattagtcactttcattattactcatgttcaattaaaaccaaaacaagcaagcagtcactcaagtcaaacacaatagagtagagcaatcaatcacttctaacacatttaggacagtagcacagcagttgtttgttttaatcataactcttcaaatattaatccaacaatagcaaactagaaccttctggaaagcttaaaaagtgctctacaactttggt

SEQ ID NO: 31011 - DNA, 447 bp, Zea Mays
atgtcgccatgtcagacagatggaaaccgtacgggtgggttagctgaaaggtattatctgaaagactgcaaggtgggaccatggagcagcaagatggaactatcacaagagcacgactgagggaggtagtttcttcttcataacttgacgtgcatgtgtgcagaccaatagtccgggttcatgggggcagaccccaccgggttatcatacacgtatgcgtcatttagttacaaaaaaggaaacagactcgaccccttagtattgctttatggatagaacttacagatatgtttggcatcggggtaaggtactcctctagtcgtagctagatggttgcccctgggtcggtgcactcccgttaccttgaagggtccttcccagctgggggagagttgcagagcacctcttggtatggcacttgccgcggggctaagccccgacccaggg

SEQ ID NO: 31012 - DNA, 566 bp, Zea Mays
taagtgtcaaagtgtgtgattttctttcctggtttatgtagaaccaatgcagctgattatacttgttccatatttactcttgcatgcctgtctctgcaaacgtatgtgcagaagtatttaatgctgtacacaactttcttctggtactgctgtcctggtaggtaaactctgttaggctccaacttacaagccatataacatgactaggtcgttttagttcagatgaaatgtgcacaaacaaccgttgtaacatgtcttaatagtactatgtcagcacagagctcattatttcttaccgactctgttttatttctcccacaggttgaacatgtcataagggaagaaaagttcatgcaagcatatgacttgattgaagtatactgtgaacttatagtagcacgtctgtccattattgactcacagaagtaaggcaaccttttctttctattatgcaaacttatatttgttgttccatgattttagttgtatagtttttttttattgatctgaggttatagaagcagcggcggagcacagccaacaaatgaggtatggcagtcgcgggg

SEQ ID NO: 31013 - DNA, 613 bp, Zea Mays
cctaatccgccgcggttccacccacgctaaccgaggctatcgccgccttggtcaccgcgaccgctgacaacacccgcttccttcgcaaaatggcgggacagcaattgtaacaacaaggcgggagagcttatccgcaaggaccccgcgaaacttcatatttgcatttctcggaaacacgttccccactattcatcaaggctgaaaatccccttgaagctgacgaatggattcgggttattgagcagaagtttggactcctccgatgcacagaaactcagaagccattttttgcgacgcagcagttaagaggccctgccagcacctggtggggaaattatgtggccattcagcctgccggccatcaagtcacctgggacgaatttaaattggcatttcgggagcactacattccagaaggagtgctccatatgaagcaagaagaattcatgaagcttaagcaaggtgcacagtatctcaacaagttcaatcatttgtcccagtacgctattgaccaggtcaacactgacctgaaaaagaagaattgttttatgaggggccttaatgaccggctacaacgaaagatggccacctgcctcaacctctcctacaccag

SEQ ID NO: 31014 - DNA, 540 bp, Zea Mays
cgtgacctagctcgggtggaggcggtcgtggtcgtaggtttgtttggctaactacgcttgcttccgcatcttagtcctctgcttagtgtgcgttcttctttgcttcctagaacacacatgctttgatcggtctctggtgtactgcagaggttaggttagtggcgcgcttagcagacatggtttttcgcatacacgctgatgttaggttgccagcaacacagctgcagaaacacaactacggatagggtcttctaggttgagttgtcaaggcacttagtggatcgtgacagtgtggataattgtttgatgaaaactaaaacgtagggtggtcacgaactttttgtccatgttcacaccagtgctttatgctggaatctagattcagattcgatgtttcgctgctggggctgtcccaaatggaacccattaccaatgggttacattcggatctcgggactggagtctcaaataggtgaagatatatgtatgttcagaaactgtaagcatctgaacatctataagtagatcctgctaaagtcc

SEQ ID NO: 31015 - DNA, 345 bp, Zea Mays
agactgcagagtcagatttgatttatgtgtgtgatttctacagatgtctgagaacaggcgcagaggtgcgaggcgtgctcagcctaaacaacaggcaccccaagaggaggcaaccccgcagcagcatttgccaccaccaccaccgatgatcttttagcaaatgttcttgatgcagacccaagcagtccaagcaactggacagaccttagcggcaatgcagcaagtgcagcagtagccaccaccgccttagcctccagtgctagtccagatgccacaagtgcctagagataagcgggcagagttcatgaggggccattccctagtctttgcccactctgctaatcc

SEQ ID NO: 31016 - DNA, 355 bp, Zea Mays
ggggacactttgggcgagcaccctcaggcttccgagtctccactgctttgccaagctcttatccagccatgatagccatcggctcagcatgggtcgagtcggaagattccccagccaacatactaagcacatcatctatctctgtctcgtctgggctagctggcatctcaaaatgagtttgtttcttatcattgggaagattccaaagaggggcaatcagagcctcaatgtcctcgggagagggtcgcactctaagacccagaccaccatcactagcaggagggttggacacaaattcagaaaatgacctatcaggtagcagattccaagcagaataggcaacaagagcaccaac

SEQ ID NO: 31017 - DNA, 484 bp, Zea Mays
ggcacatcacctgtcagcagggtgggtaggcggcacattgcgcggcccagagtccttacgtcatgctccgcccgctggcctacgtcataggcaataagccatgtggtagtatcgggccctcgaccgagcgaggagcggaggcgtaccggatagggcccggacacgtgtcagcaccggacccatgcctaggccacgacacttcctcccccgggaccttgttatgggtggtccggagcttacttggtgggtccaaactccacccaatggctccagtctgctttacttcgtgggtccggctttgtgcgcataggggtcctgcgccttcttgaggaggtctgggcctgatgatggtgtctcaaacaacgccaccttaaccgctcacgagatacctttggggctgttctccgcgtggctagggatagccgcacaggcatcatgccttcataccgtagtaaggggtacccctgaaccagggtaccgacag

SEQ ID NO: 31018 - DNA, 464 bp, Zea Mays
ctagccgtctcggcaccgcgattcgactacatcacacgtctgaggcacgagcaggaggctgaccccgccctgatggccctctgggacgagttcgcggccatcacccgcggcgaaccctgggccatcatcgacaacctgctcacctacaacggcatgctctacgtccctccgtcatcacttgtcctccaggagatcctagccgccgtacatggtgacggccacaaaggcgtacaacgcaccctccaccgcctccggcatgacttccacttccccgacatgcgccgcatcgtccaggacttcgttcgctcctactccacctgtcaacgatgcaagaccgagcacctccacccgggcggcctcctgctgccgctaccaattccgttgggtgtctggacagacatcggcatggacttcatcgaggcactaccgtgtgttcgcgggaaatccgtcatcctcaatgtggt

SEQ ID NO: 31019 - DNA, 724 bp, Zea Mays
gaacgagaaatagtgccataggaggtttgaaattcgaattgaggcatgaaatgacgtggaattgagccgatacttcacgaataggtttatatgggtaaatatgagtgaagtgtgcgcttggtttgattttaggcgaagaaaatggaatttgggcactcggctcggaaacgatcgctagaaacggggatttgtgtaaaattgaagcctgggatatcggattggcgtgaaatttggcgaatatgttactggaggtatggtgaaggtgcctaaaaattttgggttcaattggagcaattttggctggtttgggcatttcaccgagcacgtggcgtgcggtggattaggtttttggtgaaatgactagtttaggctgtgaaaccctccctagggagctaggaacctgcagaggtgttcaaatgatacacatggacatacacaagtgcttggatcacaagaattttgacaagaatttggaattggatcaaagagtggagcacaagctagattgactggaaaacagagagaggagaagggggacaaggagcaggggttgctcacgagagaggaggaagaggaggatcacttggtcgtcgtggaacagtcgccgtcgaggagatcgccagagaggagttgagatcgatagagagagaggggagcaactggggaacagagaggaaaggctctggccacgggctcgggcaggggaaaccttttttaaaaacga

SEQ ID NO: 31020 - DNA, 325 bp, Zea Mays
cgggtttctactagccaacagcaaagagtgatgcagccgagttagtccagaggtgcgaagcctgccagtacttgtcaaaacagcaacatctaccagcgcagcaactgcaaaccatacccataacttggccgttcgcatgctggggattggatatgattggacctttcaagaaggctcaaggaggatacactcatgtactagttgctatcgataaattcactaaatggatagatttcaaacccattgcttctttaacttcagctaaggtagtggaattcatacaagacataatattcaggtttggaataccgaataacatcataac

SEQ ID NO: 31021 - DNA, 439 bp, Zea Mays
gaacggacctgtagcgcgctggccacggcgagctcactcagtacggtgttctagactgatttggggaagtctcaaattgggacgcgctggtggacgatctggggcacgggttggtgtattgggtgagtgactacctagcggagccgatggcatgctcaatttataagacccaagggcggtggcccgtgaatttgagatggcgcggtggcggccggagagaggggagagcactggcacaaggaattggtggctttcaccatggtgaggtcaccggtgaccaacggagatgtgtaatacgagttactccgatgtggtagagcacctaggcacgtggcgcgctgtcgataggcggccaactccgacgagcttatctgaactgaccgtgagtcaggcggacacggcggccggggctgaacagtggcctaagttcatcctcaat

SEQ ID NO: 31022 - DNA, 658 bp, Zea Mays
gttgggtttgggtttgtatgcacaatgaatcaaactggtttggttttagtctgaacatttcgatttgccgattgactgaaaccatggttatgacccagcaagacaccatgcaccaggcataaccccatccgcatcattacagtgttgaagcgatggtcccatcctcgtctgtgatccatgtatgccaagcaccacacctggtggcgaaagttctaacttgacgaagcatgtcacagggcaactgcggcggtgctgcggcggcgtcaccagtgccatgcatgcgccacaaagatgagtagttagcagtagggccatggagatggcacagtaagagctgatttagtcattgcctgaaaccatgggcttggaaatggttcaccgacaaaacgcctcaggttgtagcctgggttgaaaaatgcaacagtttggattggtttgaatgtagtggagtgggttgaatggttgattaaactttaaatgttgcacatggtttggagtgggtttagtttggatcccataccattagcaggtttacacgtgttattaacaagaaaaatatgaataaaccagaaaagcacagggaaaagatataaccatgtcttgagacaacgaagacaaaatcatcttagtcaacttgcaaaagagattatatcgttga

SEQ ID NO: 31023 - DNA, 330 bp, Zea Mays
ggaggagggaagaaatgaccgctactatcgatccaccactgggatgaccctccggcctcgacaggtgatactggggcatcgagggatcccgccgcgcatgtatgtggcctcgtcgggcgagaactacggtcggggaccagaaatttcacgccgatgctcaccccatccaccaattcgcagaatgtcatgggcaggcatactcgttggtgtattcgtggtaatatgctgtcgatcgaatttgttaccttccgatcttcgcttagcagcttctggggatcgattaggtcactggtttgtcgtttgttcggcgcgccggcgaggtgccgccgc

SEQ ID NO: 31024 - DNA, 562 bp, Zea Mays
cagatttggtgaaccgacttgaaatgattcttagaggcaaggtatcaaatgttggtgccccagtggcatactcggcctggaacctgcctcctaccaaagccttcactcattttgtgtcgaatccacctgttactgatggcggtttgggccttagagtgcgaccctctgccgaagaagttagcgctttggttgcctcgctcggggaaattcctgatgatgagcggtaggtccactttgaggtgcctttggatcctagtgacgcagagataagtgctatgcttgatttgctggctgaggactcttctgatgctgctcctgctagaacattggtggtggagcctctcccagaaactgatacaaccttgaatattcagagacctgtcagtgttcgcccaagacgcccttgccgagccaatcatcttgatccttctgctgatgagcagaaaaagaaaaagagacgtcttcggcgagtatctagtttggatcgggacgttggtccttcgattcctgttgttgaagaagtgcctgtgcctgaattcactgacgctgaccccaatggggg

SEQ ID NO: 31025 - DNA, 477 bp, Zea Mays
ccggtctgaaacaatagtctttggaactccatgtaaacgaacaatctccctaaaaaacaaatcagcaacgtgtgaagcatcatcgctcttatgacaggggataaaatgtgccattttagaaaagcgatctacaacaacaaaaatagaatccctccccctctaagaccgaggtaaccccagaacaaagtccatagatatatcttcccaaggtacatgtggaataggtaatggagtatataaaccatggggattcaggcgggacttagctttcaagcaaacgatgcagcacccaacgtgccgctggacatcacgtcgcatgtgtggccaaaagaaatgatcggagagcatgtccaatgtctttttgacaccaaaatgaccatctagtccaccttcatgtgcatcctgcaaaagaactggtcgaatccaacaagctgggatgcatattttgttagtccgaaataagaagccatcatgcac

SEQ ID NO: 31026 - DNA, 736 bp, Zea Mays
gtcaatgccaactgatgatgtacgcatgtaccagtcatgcaaccttttaataccaacaggaaccttcctcagtttctcaagagtcagtatagatctggccggcacataatgtttaggcacatttttataatcagtcttagttgggatctttatctttgcggccattgccttagccttatctgcagactcctcgtgctcggccaaatcaacagtacgtgacgtgaggtcccgtccaatccctttcaaaaatcgagatgtgccagcagtagtagctttactcttctttttctcgaatgtggacaccaattttggtagagggaatttagatttctttgattgtcgtgaatcccttgatggctgtggagaaggtggtggtgccctaaatgttgatgcttgtggcagagacggtggattagaaagagaatgaggagcagcatgggaagattgtggaggtgatgatggatgtaaaggtactaaagtttgaggaggcggagatggttggggatgagatgacgatggcgttggtggatcaaccaatttgacatcccttcgaggccaaaggatgaaatttttgatggcttatccaagtgtctcgattccttcgggcccagggatgtctagcatgtcgtccttagatccttggacgaccatcgtcacttctaccctgcaataatcatctggtgtgtcgcttccatgaaacttacaacatgggatcgccatgcctgttcctactttc

SEQ ID NO: 31027 - DNA, 1318 bp, Zea Mays
cgaggatgatgaagaggaggaggacgaggagaagaaggggaggaagaggctgatccggaccgtgccatccgtcgactggttcgacgtcgaggggaacgaggtctccgtcgcgcagcagctcgacgactccgaggtgaggggggggggggggggggggggggggcacgggtgttgtttctgttgcgtgatcgagatgaatttcctgtgctcgtgcgcttacaatggcctgggtcacgtgctgatttgcttatttagagaagatgaacttctggattcgtagttaatgatcaggtgggaagggaaatctgcataaattgaccttttggctaagattgagcgcagtgcaacggcacaatcacacatgcacgccaatttactcctccaacctgaagttatatcacaaagatttacatgtagttgattaaaacaacgcagatagtcttgctagagacaacattggtttggtccatacaaagttgagtacatatgtgaaagcagctaacgaattgtaaaagcaagctgggcaacatcaaaactgaacttacagacacgtagtgtaaatgttcaataatgttccaggtgggttttctgcaatatcatcagctaattcttttttcaaaagaaaacagtagccattgtttcaaacacctgtacttaacaatgatttatttgactatatatcttcaaatgaacctgaattatgatatcaactccctcaatttgaaatatatcacaaacacaataaattctgtgggataccagatacatgtgaaattcctttttggacgcttcaggaaattaggtttggtgtacatggttacttcctaatatgttcctgtttgctgaagaatgtttgcaactgttgatcatgtttcactcattatctttcatatggtttagttatttcatttacatgtgcaggagtttgattttggcaggacaatgtttcttgctcttcagactcttgctgtggtgtttggagatattggaattggtccattgtatacatttgatgtcatgtttaacaagtaccctattcttggagaggaggatgtccttggagcactctcactagttctgtatactcttatattgatgccattagtgaagtatgttttggttgtcctttgggccaatgatgacggtgaaggtatatgggaggttgtgaattgagttaatcagattcaggctttttccgcaaaagtgtgtcagaggcttacatcttccattggttccatgattctgcaggtggtctatttgccttgtattctttgatttgtagaaatgcaaaagtgtgtctcattccaaaccaagtaca

SEQ ID NO: 31028 - DNA, 436 bp, Zea Mays
gaagaactccgtggtccgttggatccggcgctgacgatcgagattagaggatagggtaacctttgctcaagtaaaccgtgtccgtaggattcatggtgggcgggttagattagatcggggtaggatcgaccttcgtccgttgattctggatcggacgatcggggcggattatctgttttataacgcgataatctaatcttgcgcgtcggtttgtgatcggacggtcagcgtccgcccgtaccccttcggctggacggtttagctattaggcccctctgttctatagtaatcaacccgcggtccgtagagttgttttctgtgtctcaggaaaacttaccccgagacccctgcgttttccagataatgaggcccgatccagagctgtgtgaaattgagtaaataaattggaaaagggatttttaataggaaaataatg

SEQ ID NO: 31029 - DNA, 366 bp, Zea Mays
gcactctgttaccccaatcacagttcatgggactatgtgattccagccaatcaaaaccgagtatggcatcataagctccaagttccagtaccctgagatcagtataaaaagtgtgaccatttgcccaccaagccaactggtgtacctgagctgcactactaaggaaatcacccttcgctacctgaactcgagccatagtacatggacgagtatgcagacccagtctctccacaaaatgtttgttaataaaactgttggagctaccagaatcaaccaagactagcatagtctgagtacccacaagagctcggaccctcatacacccttcttgagttgtacctcggatggcattcagagaaagattag

SEQ ID NO: 31030 - DNA, 330 bp, Zea Mays
ggcgatctggcggactccttgcaatccgcacgcttttcgtcgggtgggtgcaaccaaccgaccatgcttcaggtacttatatcatggccatcactaccttttcattcatctcccttgccccgtgagtgctgcatctggtacccgtgccctgtgcgcttctcgcgtacatcgccatggagggaaagtcgggagcccatcacctttgcctcatcgtcgcgcttgccaccagctagccttcgagggccgaccagggatcttcaccggggcacaccgagggttgctgtagctctggtgcgggaaaagaccaactgtgatcgtggaatttctcat

SEQ ID NO: 31031 - DNA, 1313 bp, Zea Mays
atgggtatacaactcccctcccgaacgcttccaggccttgcgggtttcttctgcacgacgacgaagacgacatgaacgaggcattcttgcgggaggtggacgccatctgcgaggagcgtgcgcggtccacggccaggaaggaggaaaaggagaaggagaaggagaaggagaagaagccagcagaggagcataaggggacgggcggagtggcgctcatggcggcagcgggcacgattgacgccgctggaacagagacagcaacggtacggttcttgtttcatcgaagtgcctggaaatggggttaggaatccggtgggtgtattttatttacaaatgctggatattcagattctaaggaaatatggagagccaatgcacgaaggacgttattatttgtttaactggggtttgctttgaagtggaaacgccatttagtgacattttttgaaaaaggaactcacattgttgctctcttatttggacggaaattagcttgacgatgctttctgggaggaggtgagcgccatctgtgaggagtgtgatgcccagtctgctgccaagagccaggagaggacgaaggaggaggggagcttggtgctgtcctgcgatgatgcttcactcccccctgctatttccatcaccgcggagggtggggaggtatgtgaatattctgtgttcatgatgtttgtttttgattccatgaatcagaggaggaaattgggacgttcttgtatcgagtatggtgcatgggattgttatagatttggggagaatccttaagttatgagagcacttcacaataacttaattttttgtttcatgaactgaaatgattttaggaaatgtctgtgaaacatagcaaattcatgtttattgtgtgtgtggcgaagataggaaataggcatgcacaatttggggtttattgtttcttgaaatgcgactgtgttaatgtaccttatttgtaagagaaatttattgtgttgaatctctgttgaatttcttttgagatgaatttagtttgaagatgcattctgggagatcaatgccgttatggaggagcacaatgccaaagctcatgccaagtatcaggaggggctcaagggaatggaggagaaagatggattgttagcactgtgcggtgatcatgatccttcagtttccccagtaatatccgttgcaatggggggtggagcggtatagcttttttcttcagacaatggaacaccgagtagttgtaggacatcagacagtttttgtttcctgtgtctggaaattagcatcagtaccaaatggaaatttgtactgagtggttt

SEQ ID NO: 31032 - DNA, 427 bp, Zea Mays
ccgttcggttagactggtttggtccattccgggcctggttccaggtggaaaaaatgactcggattgaaattgggccgcttgtctaaattctgttcgtttgggcctgaatcaaaaaatgagaaggatctggtttggagtttttctgaacaccgtggcccggtaggaatccgggtgtgctgccctccggatccaatctcggagaaacgaacattgggcaacgctggcgacgaacgaggcgaggagacgccgccgctaagtgacggcgtggtagcgcgaagtgacagcttggcgacacagcgcagcgacgacgacaactctcccgttgccttctcaccggtaaccactgccctctcttccccaaacgcacctgcgctgcctcgtccttgagtgctgctggtccccactgcatctgcatctgcgctgtgta

SEQ ID NO: 31033 - DNA, 852 bp, Zea Mays
ttttacagagtacatcgtcgtcccgatagcttttgaaatacagctaggggtaaaacttcctgaggtgttctatgttccaggagttcccgacttctgtgccatccatctaagtgaggcgatatgatccgggccgagtgacttctgctactatgaagggtccttcccataagggcgataacttgtgccgtccctcccccgttagaattcggcggaggacgaggtctcctactgagaaggatcgctgtcgcacagccttgtcgtgatagcgccttagagtctgctggtaccgtgccgattgaattactgcattcagccgttcttcttcaagtatatcaacgtcctccagcctggtggcctcggcttctgctatgctttcaaagatcaaccttggcgccccgaacttgagatcggcgggtagcactgcctccgacccatagaccatgaagaaaggagtgtttccatgcagagctcggctaggttgggttcttaggctccaaacgacataaggcaattcccttatccactttcctgcgaatttttcattcttatcgaagacctttttcctgagtgcctccagtatcattccgttggctcgctcaacctgccctttggctcttgaatgtgctacagatgcatacttgatctgaatgcttttttgctcgcagaagtggaagaattctgaacttgtgaagttggatcctaggtcagttatgatgttgtttggtatcccgaatctgaatattatatcttgtatgaattccacggctttagctgaggtcaaagaagcgatgggcttgaactctatccatttagtgaatttgtcgatcgctaccaatacatgagtgtatcctc

SEQ ID NO: 31034 - DNA, 318 bp, Zea Mays
gtgatacatttttcttgagtgatgtgtcatatttggtgcaagcagctgctagactttcttgtgagatccaaataaatggaggcagtgtagaaaattttcttttcagactatcacttctttttatggacactaagaacaccttggtatagcaaatgacttttctgcaatcttcatttctttccctaagggatgtgacaaatttacatattccagtcccacttaaatgttgtcgcatagtgcatgttcagtttattaagattcaacacgtacctatctgtacaatctattaagaatccagatttggcggcgtatgccaaa

SEQ ID NO: 31035 - DNA, 847 bp, Zea Mays
atgattggatcagggtaatagagcagaagttcggattaatccgctgcaccgaaacacagaagctgttgtttgccgcccaacaactaagatgtcttgtcagtacctggtggggaaattttgtggcagttcaaccagccggacatcaggtcactagggatgaatttaagttagcattccgtgagcactatattccagaaggggtgcttcacatgaaacaagaggagtttattcgactgaaacaaggagggatactgtgatgtagtatctcaacacgtttaatcatttatcccaatatgcaattgaccaagcaaacactgacctaaaaaagaagaactgctttatgagatgactcaacaaccggctccaaaggaaaatggccacctgcctagatcttacatacagaaggctgtcacacggcgctggcagtagaagccaagaatacaggccaaggaaaatccaagggatttggaggtgacaggtccaatcagggacctaagaagcgaacaaggttggtaatccgacctttcaatcagaatcgttcttcgcctcgtccaccctcctatccattcaaacagcctgttttcattcgccctgccactgcccccacttctacaaatcagccaagagcccctagtgctcgtttccccgccctccctagttcctcaactggctgcttcaactgtgggaagtttggtcattttatcaaagactgcccatatccgaggcagaataagtccaacaatcaacagaactcggggggctcaaatcaaggcaaagggaacgtggcaaataattcagcaggcaaaaatgtgaagaagactgggcgaacttattacacacaagtggc

SEQ ID NO: 31036 - DNA, 531 bp, Zea Mays
aactgtactccatgacaattcctcaaatgctagatcttgtgtgcatactatacttcaaagatgatgagcatttgcacacaagatcaatataactatttatgcatactatacttcaaataaaggtaacgggcagtctatttatgcatattatacttcaaagatgatgagcagtctgtttagcgaacagttcaaacaaaaaaaagcacagttctacatttacaataaaataaaatcaacagaagagagaagcaggtaaaagaatttcactaaatggttcattgtttgagtgatgcaaattgtacagcacattagcacctaagatatgaggaatcatgcataatacaaggataacaacatatcatgcaaatcttgtggaaacaaacttgacattattaatatgaaatatgacacaaactatatgattcatatcttctatggcttcttgcaaataaggcatgaaatgacccaaaagaggaaaacacatctaagagtcatggcaatttcatattaaatatatcaagcaacatgaac

SEQ ID NO: 31037 - DNA, 976 bp, Zea Mays
ctgcgtacccggaatcagcttaatctcaaaagctgcatcgcactccggaggaatgcctcgaagctctgccggaaacacgtcagcaaagtcacacaccacccggatgtcctgcacccgcaaggcagcctcaccctccaccaccatggagaaaaagattcccgacttgctggaccggtgattcggaagcaattgcgccaacaaggataacgtgaacttaggggaacttcccaagaataccacctccctacctgacggcgcctgcaataacagtcttccaaaaacaggacataactgcgcaatactgggataaccaatccatacccaagataacatcgaatgcccccaaggaaatcacaaccagattggccgaaaagacctcatcagcaagaatgatggaacactcctgacaaactgaacaactactaatggagccattagcagaactaaccaaaattaggtgacccaacctctgcaccgaaagaccagcccgcgacacaaaatcctccgaaacaaacgaatagctagcgccagagtcaaaaagagcatgggccacaaacgaatcaactaaaattgtacctgtcaccacgtctcctttctctctgccatccgcagcgggtagcacataagccccggaaatacccgcagaagaggaagctcccggagtgaaattaatagaagaaccccactgagtcgtcgggtgaggcagacgcggagctccaaactgagacggcataggagtagtcggtgaaggagtaggcgcagccagatactgaggaaaaccctgcatcggcacgaactgagaagtcccaggcacataaaactactacagaggaagtggaactgaaaactgctgctcggcacttgacatcatgttgatagtgccctgagaagaggaggaagtcaccagctcccatctgagcttcccattcggattcctcctacacaccacatccttgtggtactgactgcagataga

SEQ ID NO: 31038 - DNA, 406 bp, Zea Mays
taagatgtatcaggatttgaagcagaagtactggtggtatgggctgaagagagatgtggctgcacacgtggctatgtgtgatgtgtgtcaaagagtcaaagctgaacaccaaagaccagctggactattgcacccgttaaggatacccgaatggaagtgggaagatattggtatggacttcattgtcgggttgccttgcaccccgaaaggatatgattccatatgggtgattgtggatagactgaccaaagtggctcacttcattccggtcaagactacttataaaggatctcagttggtagagttatacatggcgtggattgtgtgtttgcacggtgtaccaaagaagatcgtttctaatagaggatcacagtttacctccagattttggaaaagctttcatgag

SEQ ID NO: 31039 - DNA, 465 bp, Zea Mays
gcgcccttccccactacccctgcatctgtatggtcctagccgcaatcggccatggaaggaaaaatcatgtcactgccacagaaggaaacacatcccctcgccgctatccacgccttgcaggaaccccatcgccgacgacccgcgcgcgcaggaccaccccacccaatcgttcttcccatgcaccgcggatgccccgcccatatcctccgcaccccaaacggaatccacgcctcgtcgccatggaaggaatcgcaacccaatcccctcgtcgtatccagtgcataggaccaccatcggcccgcatcccatcgcaagtgcaggaccaccccgccatctcattcttcccattctacgcgctagccccgcccgtatcttgcaatgctcgagtacttcccattctacacgccagccctgcccggatcttgctatgctcgagtacttcccattctacacgccagccccgcc

SEQ ID NO: 31040 - DNA, 376 bp, Zea Mays
gtcatcgtcacaggcggagcagctcccttcacattgagccgcaccaccttagcatctcggcatgggtccaccagccgaagaggggccttccgtttcttccgctgggcatcttggtgatctttctccatcactgttgacacaacatcaccaatatttctctcgtaaagaaagattctcagctcacgagccaaacaggatgtaagtcatcatcggtggcccgggtatagggtcattcctatgccatcaacccccggtaaccttcagcatatgcggagatgtttcccggagctcgggcgaagacatcacctccccgggacccacacacatccccattaactcctcaacaaaaatcctagaggcccttggccccgtctta

SEQ ID NO: 31041 - DNA, 581 bp, Zea Mays
ttgggggcagtttacacaggcagttagggagaagttcggagtaggcgaatatcctcaagctatgagagatttagtcaatgtgactcagcaacaaggagtggaggaatactctcaagcctttgatgatatcagatatgtcactactttgcataattctgagttggatgagactttctttgtgacactatatcagggggctgaaacctgaaattcaaactcaggtcatggctcagatgcctaagacagtggataagacgaagaggttggccaaggtgtatcaggagatttcagagaagaatagaatgaagcatcaaaaggggctggctctgaaaactcaggttacaggagtaaggggagataatagggcaggaacattgtatcctgagttgagcaaggagaggcagttgagagactacagaagagcaaatgggttgtgttttatctgtggtgataaatttgaaccaggccatcaagcaaaatgtcccaagaggttggtaactcaactgcataatctgacagtggaagatatgggtatgattttgactgatgaagtgttgcagaagttggagcatgaggagaag

SEQ ID NO: 31042 - DNA, 321 bp, Zea Mays
gcgggacactaatagaggcaatatcgagagcagacttgagttccagaggatgattagagctcattcccaaggcaacacctagtgggacctcagctccaacagcgtgcagcagatcctcaacgcctgggtcactgacctctaaagtgaccgggcaaacaagagcagtaggaagattaaggcttgtcactgctggttcctcagactgaactagtggtgatccgacatgaacatccatagaagaagccgaagaagagccaagcttgggaccctcgggggttggctcaccctcagaagcaccctcgggggctgggtcaccctcaa

SEQ ID NO: 31043 - DNA, 474 bp, Zea Mays
ctatccttgagtgtatgtgcgcgcggtcgcagccctgttggttgtccagcggccgaaacagagagaactcctcaagcttctttcccctcgctcgaacggaatccgcgcgttcttcgccgtcgggatctctgaccggccgttgtggccctgctccctgacgcataagtagcgggcccctggccgaaaagcatccagtcgaagacttcccctcgtcccctcatctactgtcgttgagccgtgcgcttctctttccctatttcgctattaaccaacgggaggaactacgagcgaaccatcgttgcattgaaggatttcaggcgcggtggaatctcggattgcaccagcattttggccgtactggggaatcggcggacctcgtcggtaatcaccgagcgcggtcgtgctcttactggcgaaaggaactccagcacgacgcctctcggggtcgagcatctccgcaaccatgaacttcgg

SEQ ID NO: 31044 - DNA, 446 bp, Zea Mays
cagattgcccgcgatgcaagtggtctgggaggaatccccagcgaactggatagtcttgatgggaccgccgtctgctctagatggttgcaccttaggcaccttggtaggcgccttggtacaggaagtcgaggggtccctccccccgtcatccgggcgagcggtttctgccgctagggcgtgcaacgtttcgacagctgcaagtgcagcgaggcggtcgccccgcacggtgaggaccccagcaggggatgacatcttgaggaccaagtacccgtaatgggcaatggccatgaaccagtacagggccggcctgccaatgatggcattgaaatggaggttaacctccgcaacgtcgaactggacattctcagtgcggaagttctcctcagtcccgaatgtaactgggagtgcgatgctcccaaggggatacaccggttgagggcccactc

SEQ ID NO: 31045 - DNA, 327 bp, Zea Mays
cggtgctaatgaatcttctatattcctttgtaagcatgaactcgcaaatgacaaccctccattacacattgaaactcatattcattgcttcgagactttagcactctgaattccttcctcaaacatatagaccatcgcttcacaacctccttgatagcatcaaggttaggaaatttagcaccctatacaacaacaatgacaccaatgtgccactcatgacacgattaccgaatccatgacccctccaatcagccgacactacatagccctcatcatctaatgattcgcctgaatcttctatctattctgcttcgatgtcttcattta

SEQ ID NO: 31046 - DNA, 532 bp, Zea Mays
gggggatatgcccaagaagcaattataaacaatttagattagagtcttactcgtattaggattatagatttaatgggccacgacccatcaacatgctctataaatatatgggaaggggctagggttatgtcattccaccacacgtgcaaaccctagttgttgccttggacccgatcgcgagacccttgctgcacacgcggtgctagcacatagatgtacattttttgtccccgtacatgtgaactacatggaggcatgactatgactgatgtgctgatcggctacggaggaggagacaatcgtaatcaactatctcttcatcgacgtgtccctatgttggatcaatactctaagtcttcttctgatgtgctgggcgtctagtggtaacgatcttgatctcttacttgcaagtttcttaggtgacatggtagatgtggctagcccgttcccttacacatataggataattgtcaggaggagctggtagcatctaaaaatttcataggtgtagtggcacccatgcacaaagtat

SEQ ID NO: 31047 - DNA, 573 bp, Zea Mays
aatgttgaccgggtttcatagtgatgacaccgacaattcagtactgtacaatccacagcttgttgcgagacagtttggttatgatcaggctgctcctgtgtccattgtcagggaaatccactttgagggaatcgagttgtggataccaagtatcggtagatatgggatgcctggtgaagattatgttgcatggtgtagcagcagtgggcagttctacaagcatcaaaatgatgtccaatatggttgctcggtattacgaaatcatgaaaatggggctatttcgtcgcaactgaatgtaaatgagaaatgtgttgtagtgccaacacttgatcaatttatcacccaagtcactaggagagaccacatcaattacattgtagaagggcagccggagaaaatggataatggaagtcatgaggatgaaacagaggtgattgtctgtggccttgaagcttgtgtcaaggatagcagaactacttcagtgaaacagaatgtgcagaaacaaagagataaatttgctgaagatggaggtgatagtaagaagaaaagaaaagtagaaagtaacacgaaaag

SEQ ID NO: 31048 - DNA, 311 bp, Zea Mays
tgtcttcccagagtagcatgtcccgtatctaggaaccaggatccagcaggccatgctctgtgcatgcaaaaagggtatgtttggatgtctggctgtcaccggcctggttgcaggagatgttgtttggtttaaagatgtagtacacctagacaacagcggccagttcctttttgcatgccgctggccaggctcaggagaaacgaagaaaaaggtcgcacgccgctggccaggccgaggggtgcctcgtgcatcaggagggacaggcccaatagactctccaggtaaccaatcagccataggttgcatcccat

SEQ ID NO: 31049 - DNA, 316 bp, Zea Mays
tcatttggtgggcgaggaactgtgtatatgtgtgcgttaagccattaacatctttgctctgaatccttgcactgtccactcatcgtcggtgctctgattgagtgacactgctatccaaattactccaggtgggagatgggaatattctcttgatcgttgcatagctttggtattatggtttagatctaagcatgagggctgcgtacctggtaccatgctatatgtagacttacagtaatgacatatgttgcaatacactgctatccaaattactccaggtgggaaatgggaatattctcttgatcgtgcgcatagc

SEQ ID NO: 31050 - DNA, 686 bp, Zea Mays
taaagcatgctcggtgactgccgcagtcggctaatggattagtctaaaataaaaatagtttatgtattcatcgtggtgtaggatagagtggatcgaagatataaattatgtgacatgtggttagtgtttttaagatgagatgtgcgaatgatcggttagtgttgcacttgtctagtcgataaatgttgtcataaataattgtgcaaaattggtcatgagaatgtcgtgggcacgtggtttgtttggatgtgacaagtagattggaagtgtggggtttgtcgaagcactgtgatgtcgaacgtgtatatcaaagtgcattgtagtggtaattgcgctaagtgaatcggtagtgtctcgagtgcacgccacaacatggttgtatgtgagacgggaaaatctaaggcgtgctcgatgggaatgttcggtcgttggaggtggaaattgtctttgcttgaatagagaggtgctgacatgccgaagtagtcatcgcttcctctatgtttataagtcgagtcaaaatatggggtactagtggtacgctaagcggtgctccaaataaattaaccagttaaggcgaaatctgtcatgcgtgatttattgttggagagtagtttgaattacgagttatatgaggattatgttagaaactagtatgcggcgtgtaactgtgctcgagatgtgaataa

SEQ ID NO: 31051 - DNA, 394 bp, Zea Mays
cgcggcggccggagaagaagaaggttactggcgcgcgtgattggtggcaattaccgtggcaagctccccggcaaccaccagacgagctaatgtgagtcacgacgatgaggttaatgtgccaaggcacatggcgcaaggccacgaagaggacatctctggcgaacctatccaaatccaccgtggtctgctcgggtacggtggctagagtaaaataatggccggagtatatcctcggcgtgatatttacggacccccggtgttatccagctgatccgagcacgaaccaccaacggcgagcatgaatccgagtgcacagctcgtcgacggcgaggggatctgaatctgatccaatctggtcattgtaccatgggattgttcttcagtcagcctgaca

SEQ ID NO: 31052 - DNA, 423 bp, Zea Mays
aaactatagggtttcatttatgaaatgttaggacctgtttgtatggatcttataatacacgtggatggcaggttgaataaacaaggggtttttaacaaaaccccatggccaaaggggtacgtgcgcgctggagccaccagatctaaatcaggaactcgagattagatcttagttttaatgcaaacgtacgtaactgggacccttggattttagatccatggcccctatttgattgacggaaacgatacacgctcctattctaatccgggttgtcaacggtcccgattttattgagtgagatctaattctgtctgtggattctccgatcaatggtcgtggtgttcccaagtcgaaacagtatctctgatatgacctcgattgttgcttactgatcaatggcacccatgcgactctcctctcccc

SEQ ID NO: 31053 - DNA, 299 bp, Zea Mays
agcagagaagtccctcatggaagaccaagttgtatgtttaatgtatctacattggaaggcccagttgcagttcctagcagactgtttcttaacaggagcctttccagcagctcttacttgagggaaaagaaagggtgcatgtttggacaaaatccagcagcaaaagcactcggccattctagcagcaacacttatttagtaagtggaaaatattcttgaagcaaatgggtaaggctattgtttgaattgcagctgtaaaacttgccagaagttcagcaaaactgccacatatatgtgag

SEQ ID NO: 31054 - DNA, 314 bp, Zea Mays
cttctatagaattgggagaaaaagggtggtgaacttggccctgtatgttgaactgaagaagttcagaacagtccaaaatccctgaaaatatctcaacccactggtttctctgggtagttctggcgtgcagcagatatggagagattgtgttgaaaggggggaagtgcatgacatgagtttatcaccccatggatgagtttgaggaggtgtaaaacctatctatttgatgactcagctgctggctgtttgccttgctgtcacatatgcaacaagggtgaacttggcttttcccctgttaccttgtatgccttgcc

SEQ ID NO: 31055 - DNA, 503 bp, Zea Mays
atcatgcccatgccccagccaccgcaggcgggtcccacacagtcgcgtcgcgtcgcgtcgcgtcatcttttcagcgcttgtccactgcgggcctgcggcattcctttccttctcctcgaaggcgaagcaaagctaccaacgcatacaagagtgagagcagggagcacgagcgctctgagtgagtggaagacgagaggagttggagttccccagggctagggtttcattcgccacccgcgccgcccttcccttccccaggtatcggcatcgcccctcccttctccactgctccgaccctacctgtagatagatctgtctgtccatcggtttcttacgtttttttggttgccccctctctctcgtgcgccgcgctgccgttgctccatgacctccatagagaggtggtaggataatgtgcccgtggattggacgggatctcgttctgcccgcccgaccccatccgttctgctcaggcctttttacctagttgcgctgcctcctcc

SEQ ID NO: 31056 - DNA, 355 bp, Zea Mays
aaaagattgaacatggtatttgatgctattggcttcgtataccctgattaccattacccactacaggggcaagagaaaaagagaaaggttgccgcttcgaccattgcagctgagccgaagggcaaaaagatgaaggttctgacccaccggccgcgttacattgaaccggtcgtggtgcctaaagttggtgcgagaacctcttcagctgccgaagcaaagagagctactccgattgtgcagagtactgaagagccgattgtagtgccaaaggtgcttacagtcgggccagtcgaagctagagatgataaggctgaagagccaccggtggaaaaggtgataaaaacgctagaaatcc

SEQ ID NO: 31057 - DNA, 392 bp, Zea Mays
gaaaataatgacaacattgaggatgccaacattggacaagaagacaactttgatggattacggactgtcgcagaacattagacttcaatgttcaagatgagacagtttccaaacttgctgcaggatgtgctgcatgcactaggaacctatgttgacctctctatgacacaaggagagtgtctgagcctcctcgggtttgttactacctcacttgcgtgcatatcagagtgttggatgcaggagatcaaggtttcaggactctatcatcacgagtctctgacgttgctatccacctacgctgcttcggtcagcaatgctgctcaaagagctttgtggtccctcagccatacctattagcagcagttgcatgacacgacgtacatgcatcttcc

SEQ ID NO: 31058 - DNA, 599 bp, Zea Mays
ggaggatacgacgaggaccctcctcgccccttcaggcaggtcaagggcaagacaatatatctagagcaacaggaaggccggaagaagcaccgtatggatagagccgcccgtgcagcacttgcagcggcagcatcggtagagcaagcagagcagggtggctagttgcagatctcctcacaccagattgcctatagggttcgtcgcctcacatctggacctcgctcctccgctccctctacacccgccacagcaactactccacctcccacttcgctagcccctgtcgctacagagccatccaccacttccccatacacaccacctccaccacacccgcttccactgttccccctcccgctctcatttccactccacccattccaccagcccactttagggagcgagacgagacagaggtgtgaccgttagctactaatcctcgactgcttgatcttcagcgtgccactgcagcctgggtatgtaggttcagacacgtacccgtggagtcctggctgcctgcttagagggaccctgcagtggcagatctttttagtaacaggactcaggagtccttccgagcacagttgtcagcgcagatc

SEQ ID NO: 31059 - DNA, 474 bp, Zea Mays
atcacaagcacacagggatgccaaaacaagagggaagaggtcatgatcggacctgtggagagctggccacggcgagatcacacacgcggtgttcttgatcgatttgggggaaatctcaaattggggagctctggtggacgatttgaggcacgggttggtgtactagatgcttgactacctagcggagccaatggcacgctcaatttatagggcccgagggcggtggcgcctgaatttagcatggcgcggtggcagccgaagagatgatagaacactggtggcttagtcgtggcattcaccggtgcaatggctcaaagattttaattctaagtgtgccacggttactaccgcacagtaacgagccatggcgtggcataaccgaggtcaccgtagtgtccacggcgacaccggcggtccggccacgtcgcacggctacaggcacggtgataagcttctgccgcgatcaaatccgcg

SEQ ID NO: 31060 - DNA, 562 bp, Zea Mays
agatgagaattgtaacggatagagcagggtcgtaagctggtgcgccggggtacagaagatgagaattgtaacggatagagcagggtcgtaagctggtgtggtgtgcgttgtacctgggtgcaaccaagtaccagcatgagggcagtttagataggttcaagaaatgcgtaatatcctaggttttcttgggtgatatagaatgatgaacacaaatgtgaagaagtttacaagctttaagtatcatctgagcgccatgacctcctagcactctatttctgcttgattttggtgagagttctattctaatggtctctagttcatctatatgcttgccctttgaagatcgggaatcccgaagtctaggatctttgaaccccttgggaatgtctcgaaccctgagattgggatctagttttgacccttcgaccctttcttacattgctctgctccccttttatagaccaagggaggagagaatattacttatcagccgtatcgtgggtttcagtctgctgtggaccaacaactccaaccttctcctagtcgtggagtcatacgtagc

SEQ ID NO: 31061 - DNA, 852 bp, Zea Mays
cgacggagcagtggctccggcgagcctataccggctggaaaacgcaacgactaggcccctccattgctcaacacctaattctaccctcaacgacactaatccctcaaccaattgtggagttctagctcaaaatctctttgtccacggtgatggcgcgaactgaggacaaactgaggtgttcccggcgatctaacgtggtctagttcaattggtttggctgaaaagcatccatagcacacaagggtgttgaaacgagggcaaggagggtatgaacggacctgtagacgtctggccacggcgagctcattcatggcggcgcggagaactgaattgggggaaatgagaaattgaggggctctagtggatgatgtgaggcaaggactagtgcgttggatgcgtaaatacctagcggaacacacgggggcagcaatttatagagttctatggcggtggcgtccaatttgaaggaagagtggtggcggccggaaagatgagaagtcactggtgcaagtgcaatcgtggcttttaccggggcagtggcttaggcgatgaacaagctacctagagcggtctattgcgacgtggtaaggcgtcgaggcacatagcctggccggataacggcgaacttcggtgatgctagcgcgattaaccatggcgggacacgacggccggtccggttagagaccggattcaccccacagtggatattttcatcacgccccgacgttatctactcttcccgtggcacgaatctcccaggcgagcgcgaattgtggcggcggatcactggcgtcgagcacacggcaccggagatctttatggtcattgtaccatggcgatcatgttcagtcg

SEQ ID NO: 31062 - DNA, 637 bp, Zea Mays
gactgtctcactctgaccatcagactgagggtgataaactgtggtgagagccagtttagtgttgagtgaggaaaatagagccttccaaaaacagctagtgaaaactttgtctctgtcagaaaccagtgatctgggtgtgccatgcagtttaaccacattatccaaaaacacttgggccacctttgctgcagaggaaggatgtttgaggggaggggggggggaatgagcatatttagaaaatctgtccaccaccactagaatagtgtcaaacccttctgatttgggcagtccttcaataaaacccattgtgagatcttgccaggcaccttgaggtataggtaaaggctgaataatacctggtggatgaaccctctccactttagcttgctgacatactgcacactgtttaataaagcacaccacatcagccttcaaacccttccaccagaatagccttctcactctgtggtatgtggcctggcctcctgaatgacccccacaacactgttatgtagggcatctataatttttgttctcagattagagttgcttgccacccaaacctgatcacccttcctgatcactctctgctgcaaggagaaacccttttcatctggactatgcactgctaactgag

SEQ ID NO: 31063 - DNA, 2191 bp, Zea Mays
ttcaggatgcactttctacccttttctctctgtacattcgtgatcttggccctgctgttgaatttggagatgcacactggcttggaagacagggtattgcattagcgctccactctaccgctgatgttttggccgctaaagatcttcctgttgtcatgacatttctcatctcacgtgccttggtaagtaatttgtttttatggatcttatcattgcagatttgcagtgccacttacatagttacatttaacttttaatgcttctcatgacgaatctacaggctgatccaaatgttgatgttcgtggtagaatgattaatgctgggatccttattattgataggcatggaaaggaaaatgttcctttgctatttcctatttttgagagctacttgaataaaagggcaagtactactttcctattaataattgtactagcattattcaatatactacgttcctattagtaactttactaatatattattattgctccttgttttttatttgctatgcaatccatatgtaacaggcatcagacgaggaaacatatgatcttgtgagggaaggtgttgttattttcactggtgctctggccaaacatctatcaaaggtgtagatggatactgaactatcttttgtttacaagatacattcacagtactaaatatagcatttgtaacaggatgatcccaaagttcatagtgtcattgagaagttgttagatgtccttaacaccccatcggaggcagttcaacgtgctgtctcagattgtttgtccccacttatggtatccaaacaggtgtgttttgttttgtatcattggattttgggtttgaatgatgactatccattttcaacccattttttaagctttcctttttctgatttatttgattaaaatgctttattctcaatataaccaggaagagggtcaaactcttgtttctagactcttggatcggatgatgaaatgtgaaaaatatggtgagcgacgtggtgcagcttttggccttgctggtgtggttaaaggatttggaatttcttccttgaaaaaatatggcattgctgcaacattgcagaaaaatttggaagacaggttgtctactttgttacctcgtccactagtgctgtatataatgactttgtaaataaaatgagtatgcattcacctgtcacaaattttcactaaattatgttctgcagcctttgtatcttttcatgttttgttgttctctaggcatttgaatacaatttatctagagtattcaatgggaatttttgattgacaaacatcatagcgctaaatttttccatttgtgtgcagaatgtctgcgaaatctcgtgaaggagctttacttgggtttgagtgcctgtgtgagaagctcggcaaactatttgagccgtaagtgaggcacctcttcacttagaactgttgctctgattccaagtggttcattatgtttgctttcttgtaggtatgtcattcaaatgcttccattcctacttgtgtctttctctgatcaagtcctagcagtgcgtgaagctgccgagtgtgctgctcgggcaatgatgtctcagctcactggtcctggtgtgaagcttgtccttccttcacttcttaaggtatcaatatatatgttctatgctatcaaattgtaacatttgttgcatccaaatgttctggagagtacaagtggccagttcatcttgttgttatacattgaaatctgacaataacttaactttccgccgaatatttaggccatctgcaccagaaaccactagtttgtttccgttaatttgaaagagcagaacatattgaggtccatctggtaaactttttttttaaaaaaagtctacacattctggattttttccacttattgtcatttgcactgttcgcacctttatgttagttgttcgaatgaagataaaataggtattcagatactttacaaaatattatgccagccacactcatttgtaaaagctacatgaaacgaatttatttggcttgtctgatacattcaaaattttccttaaagcacatatttggatgatccttaatatgattttcagggtctagaagataaagcatggcgtactaagcaaagcagcgttcaacttcttggtgccatggcatattgcgctcctcaacagctatctcagtgtcttccaaagattgttcc

SEQ ID NO: 31064 - DNA, 284 bp, Zea Mays
cacctagccgcaatactcacggttgccgtggtcagggcaaattagggcaccattcttcaaattaatttaggggaaacgttcttcaggtagtgaattcggtttatgccaaagctaggcgccggtcacggtcccgttcggccggtctgctggctcgccggagcacggccgcgcttgaacggcgtcggggactttaaacacagaataggtagaagaggaaggacttttgtgcaaacagtcagtgacccagtgaaacagtaaacaaacctgatttgagttagccaaaa

SEQ ID NO: 31065 - DNA, 338 bp, Zea Mays
tgccctaaggtgccccggaattagaaacaagctaacaggttggtagcagcaccagacatagctgcaagattagaattgcacgctacaggttttgcactaaaataaatagtctgtgaggatccttacatgtagagctctgtggagcaacgaaataaatgtgatttgtcgaagcactgagcatctagtagttcctatttcctagtgaaccaccatgctgctactactggttcgaacgagcagggcaggcccgggcaaggcgattagcgaaagcaagctgaccaccctccgtatgcacagcaagcgaacccgtcgatcccgagaagtaagattcgggcttg

SEQ ID NO: 31066 - DNA, 558 bp, Zea Mays
cgctttctcagcgtctcttttgtagaaccagacacaatattcggccacagattcttgcacagcctgatctccttgcgccgccttccccatactccgtagctcccaagcgatctttcgctcaggtgctgacggctggtgttggcgaagctgcaattgagggcggacatccctctgtttggagactggctgatcgccggggtcaggctggcccgaacggtggtcgggatcgcttccaaacagtggatcgtcgggctttgcgtggtcggggccccagacttgatcgtggtcgcggctcatggcgtggccatggtggacgctttggagggcgctcgtttctggaatctgatagaagagtcatccgagacaatgcctgaatcgagcaggggagtcgtgtcatccaatgcttttgatgaagatgctaaaaagagagcagcagacacagtagatgacggcgccctggctgatggcaagggcaagaaacgccgtgaggatccctgctgtgagatttgtgagggagaccatgtgtcgcttgactgtcaagtatacaatggacctaaa

SEQ ID NO: 31067 - DNA, 371 bp, Zea Mays
gttcagtattgatctatttgaagagatgtataatatcaaatcattcccgagctgaagcttctgaaatcatcagtaaggaggttatccctatagttgttcatttgatttgtctaatcaataaattctgcatgtactgatgattgtcttcctggcagaggcactttgtgacagattgttggattatgaacaaaatgtgcggatgggagtggtggctgcactttgtgatgtagctacccattctcttgacgctattccaattgttacattagttagagtagtagcagagcgtgtctgtgataaattgattggtttttcctttgctattctccacatgcttctgttttccttgtttgttttcatctgtatgatta

SEQ ID NO: 31068 - DNA, 294 bp, Zea Mays
gtttattatgtgaaaatagagggtctcttatacaaaattgtctggccgaaagggtatggggacactacggccgtccgatcggacatgggtgttccagattagatctagagtggatcgaaacggtacgcgtcggccatcgcacgatcaaatctcaacgctccagattcaaaacgctagctacacctgtcatccgtctgatctaaatcggacggcccacaacccccaaacccgaatcggtatacaagttctaatcgtagccgttggcttggtgatcgacggcaagcggtctttctc

SEQ ID NO: 31069 - DNA, 295 bp, Zea Mays
cttatttcaagcacggtataccataccatccttgcatgttaacatatgctattgctacgagtctttgctgcattttccattcattacaattgcactattcatctacttttagccttaaatttatactattagtcaagagcacccaaacttccctaaaaacagtgctgtatgcagtttcactggtggaacaaagggaacctatgaaagaatctgccatctgccattatgcttttccctgtctttagtgaacaatcctggcctggtctttgtcttttctgaggaagcaccacattac

SEQ ID NO: 31070 - DNA, 458 bp, Zea Mays
gaaattcagaatccaacttgcagaagagtaacacagtgtggtgtgaaagaaggatgcatgtctatgtaataacaaggcaagtaccccgtgagttatctccactcttcatgaatcaacgtatatatttccaggtgctcagactctcgaacaagggtcacgagttagcaaagctgagagtgatgcagggatcaaaagcaaccaaatggatacatgtgatgaagctaaaaggtactagaacagatgttggcggcccagtatacaggcttctagttctagcgaaggtgcaaactcacaggcagcatgtgacaaaagttcagcatctggaaggcaacgaatgcattgtaagaaaggccaagctgaaccccgcaatcggaatatttatatttcttcacaacggattaagtaaactcctttttatttatatatctgtccatacaacttcattggcgaagcctttt

SEQ ID NO: 31071 - DNA, 274 bp, Zea Mays
tatatccatttggcccaccttgtaaatccctctggcgcggcccaagtctctgcctctccccgcacacggtcattcagacatcgggggcccactggcatccgctcatcgcgcgcgcttgagtcgctgcaggtcggggccagcatgtcatctcgattgcggcgacaacaacaacccacgcgagaagctcgccaccattgccggaaatcgagcgcgtcgttacccctatcccgagccgagtcttcgggggataagtagggataccccctcttcccct

SEQ ID NO: 31072 - DNA, 753 bp, Zea Mays
accgagctgtgagatgctaatgagatgaaaatggagggggtcccccttagccttatatacatgaccgtagggtgcttcccgcgtacatgttgatcatactttttttgcttatctcctaattaatagcaaacaaccttcattgtcccgagtaaaacccggcgccttcgatccgagctatctccggcgtttgagaaagtcgggcgcgagaaagacgaatgacctcaacacgatcacgcctaacccacgactagctcgggcatgggcccatcgtgctcctaggtcggcccacttccatcgtttccctttgcccgacccacaacgggatgtcatagaggggcgaatgtcacgtggccccgggcgaagttttcaccaccgagtggacccgagggatatctgtcccccacataagggactcgtcgtcaatctcaaatgacatctcaacaggagagcagtcgccatcaaggggaaggcggtgggggcctcacccatggagattgaggttgtcgctgtcagccccccgccaggctccactgcgcttgaggttgcccccgttgacctctagccaagtatagtggcattcgagggtgccgctgctgaccagcagccaagcacatgtgaggttgtcaccatcgaccgcctgttatgctctatggtatgtgaagttgtcacccctgatgcccggggtgacttattctacctgccaatcgattttaggaagccatgacaacaagagctatgccttcgttagcatgg

SEQ ID NO: 31073 - DNA, 418 bp, Zea Mays
gagaggatcccatgaattttggcttcaaccgagctcactggtgaaaatgtgagtacctcgccgtgggtgatggtgctatttataggggcggcgacctggctagcgatccatggtcacgaaattcattgttagcgcatggcaaacacgtaaggaaggagcacagtgagggaggagtgaggcacgagtgacacggcgatgaaatgaccgagccacggtgaccgccggtgaaatatctcctgtcaggctccggccaaattcgcggaacggtgacacggctcatagttatcttgtcgcggtcgctccaatctccaattcacctgagcacatccgaatccacagtgccactgatcttttcgttctttcagatatttcctgtgccactgatcttcatcgtttcactgaaccggcctcctttcac

SEQ ID NO: 31074 - DNA, 626 bp, Zea Mays
ctggatcaacttgggtccggtcgcggctaagctccccgtaccacttgcccatcgatcgatcgggatagacctcgccgtcgttggctgattaccgccgtgcgccatgtgctaaagcgcttgaccacgtcgcaatgaaccacatcatgcatgcccggtgatcgccggggagctgccacggtgaaagccactaacacgagcaccagtaacctcccacccctccgaccgctgcgcgtctcaaacccaaattcaccgaccaccgcttagcgatcctataaattgatggccgggtctgttgcgccatgttattacaaagccaacacacccacacttgcctccaattgtccaaccgagaccacgaattgctcacttcccccaaactgagtttccgccaccgtgaatgaatcctcaccgcggccagctcgattcaggtctgctcatgccctctgccctctcattttagtgttcttgtgtgcccctgatgctccccgaccaacttgattgaattaggatcccttagatcaccaggaacgcggttgtctgtccatgatgctcgctctcaccgtggctagaaccatctgggtagccgttcgtgaaattgagtgaggggaaacactcattagatcttg

SEQ ID NO: 31075 - DNA, 316 bp, Zea Mays
atgggtcgcaccgagccccaagctacaaaagctaggggtcagcatagcccgaatgatagcgtctgggacaatagccaccgccacgtcatccaccatgataaatacgtgacagccaggcatccccgggccttgcaagtacgtgtggaatcacttgaggtaaaacactagttttacccttgccttacggctccttccaagggaagccaccgctgaccgacctctgtcctggactataaaagggagaggctggcatctaggcaaggggatcgatcgatcaaggaacagaaagacggactaagggacaaccggatgcctt

SEQ ID NO: 31076 - DNA, 418 bp, Zea Mays
acacgttgattaataatgcgtcagaaatagaattattagctttcttgatggtaattccggatataattagattttcatggccgaagaatatgcatctaaaacggcctttatatgtccaggcttcattggtttatttgagtgggttgtcatgacatttggtctgaaaaatgctggcgctacttataagagagctatgaatttgatctttcacaagctattgggaaacactgtggaagtctacattgatgatattatagtcaatcggctgagtttagttctcacatagctgatttgcgcaaagcctttgacaaaatgtgttggtatggtttaaaaatgaagccacaaaaatatgcttttggagtgtcggctggtaagttcttaggatttatcattcatgaacatggtatagagatagacc

SEQ ID NO: 31077 - DNA, 743 bp, Zea Mays
cagtttccgcacaagccaggactcctcccaagataataatctgctgttctgagccatttcctgtctatgcaaaacctccctagccatcccaactggttcctgacattgccaaccttcttatgcccccaagattgcaactttctggccaatcttcttaactttgtagacagcctttccaagggacacgtggcctgaattggttgattccaggatgccgcaactacttccaaaaaacctggcatttttccccagaaacattcgtaatggaatccacgcttccccctgaattcgtcatacgatttgagaattagagggcagtgatccgaagtctcagaagcattactaagcaatgtgtggtcaggaaacagctcctcccagctggaagaacaaaagacatgatataatttaaccaaagtaggtgtatttcattggtttgaccatgtgaattttctccctttcagagggacaactttgaggtccaaattattgataaggcttctgaagtgacccatcaacaccctattgatattagaattgtttttgtcctccaaactgtagatctgattaaagtccccagccacaatgcaggggtccacacaaacagctctgatctccaaaagctcttgaaaggactgcctgagactgtcttgatttgggtcatagacacccggtaaccaaccaaagaggggcacgttgcaattgcatagaaaccgagaactccttcaccatggatctatcggcgg

SEQ ID NO: 31078 - DNA, 402 bp, Zea Mays
tcctgtcacagcatgcacccgtcagtagtactagcaccccctcctagtcctacagtctaacagccctactagatagccggctagctgcagtacaccagctccagctccagccaccaagagaagagctccgtgcatcacgactcaccagtctcgtcagaatattgctgtccagtcgttgaaaaactcggtcttcaatcttgcggtacgagacatggtgttctctcatgtcacacacacaccatgacaccaacgcctgccgaggcaatgcacgtacggcaaagtcagcactgtggagtgtggtgtacgcacgcaccccaccccacacccccagccactccctgcagcttacctcacggccatggagtgtgtgtacttaactaagggccactgggccagacggac

SEQ ID NO: 31079 - DNA, 564 bp, Zea Mays
gtattgggcaatcccacgataaaatccatacaaatatcctcccatttccaaaatggtatgggaaggggctgcaaggtgcctgctaccttcagatggctggccttgactctctggtaggtgtcacattcggatatatacttagcaatttccctcttcattctagtccaccagtacaaggatctgagatcatgatacatcttgttactgccggggtgcatggaaaattttgaaaggtgagcttcatccaatatcttctttctgagctctgggttcttggggacaaccagtcggtctccaaaccatagaattcctttgctgtcctgatgaaagcatttgcatttttctgccttctgttcgatcatttccttgataacctgaacacccttgtcaccaatctgtgccatgactattttctcttgtaaggtgggctccactgaaatataactcaaggcaccagaggaaacgacttctattttcatcttgcataatttatcacatagggtggtgattcttgcatccatattcatacaattgcactgggccttcctgcttagagcatctgcc

SEQ ID NO: 31080 - DNA, 557 bp, Zea Mays
gtaaggtacccaccacctttaagtgactggctttgattctttggaaagtgtcgcactcagatatgtactgagcaatttctctcttcatcctggtccaccaatataaggatctgaggtcgtgatacattttgttacttccggggtgcatggaaaatttggagagatgagcttcgtccaaaattttcttcctgagttctggattcttgggaacaaccagttgatctttgaaccataaaatacccatgctgtcctgaagaaagcatttatacttatccaccctttgattgagcatttccttaatgacttgaacacccttgtcaccactctgtgccatgattatctgctcttgtaaggttggctcaactgagatataatcgaaagtacctcgggaaaccacttccatgttcagcttgcacaactcgtcgcacaaggcggcgaccttagagtcaatggttagatagttgcgctaggcttttcgactcatggcatctaccacaacatatgccttgccaggatggtaatgtacttctagatcataatccttgatcaattccaac

SEQ ID NO: 31081 - DNA, 307 bp, Zea Mays
atcttgacaaagcaaaagggagtggggccaacagcggttacaacgacatcaagattgccacgacaaaagcatttcatcagccatggagaccttcatagggacattccacgcacttcgaaagggttcaatactggcaccaagacccaactcgtttgtcacaagctccatggcattcagggtagcagccaaagaccttcatcgacctttgcctttggccatcaccaaggcagaaagggacactacttactctttgagttagacgcacaacagagctcaggcggtttaggtcggcctcgttccttccatc

SEQ ID NO: 31082 - DNA, 299 bp, Zea Mays
ggaagaattcttttctaagacaggactcagacacgacaccaaacaatttaagaatagatggactcagtgtaaggccttgtactctttttggttgtttcttaacaatcaaagtgggttaggaagaagggctgatggtgtagttatagcttcggattcattctggaagactcacacagaggttagtgcactggtgtcatatatctctgtacatgaagcccttacaactgatagctaaaatgagtgttaccttttattgcagaaaagaaaagagtgcaggaagtttcaacatgcgattccta

SEQ ID NO: 31083 - DNA, 488 bp, Zea Mays
ctaaggcccaaaccgccatcaccagcaggaggatttgacacgaaatgggtaaaggccttggaaggaggcaagttccaggccgagtaggcaacaggggcaccaacatttgataccttgcctctaagtatcattttgagccggctcaccaagtccacaacaggaattcttctattggtgacccgaatggagtcagctaggcctcggtacagataggccgggtatgccctgtccttcaatggctaaatattcttgaagacaaagtcagcaaccacagcctctgcagtcagacccctctccttcaacactccaacttcagctagcagaactcctgcctcagccacatcctggtctgtgggggattcggtccagctaggagcgcgaacatccggctatctccctgaccgtgcagggagagaatttccatgattctcaacgataaaccactccaagcgccatcctttaatgttgtccttgagggggatgtcgag

SEQ ID NO: 31084 - DNA, 679 bp, Zea Mays
ccagaacctctaacgagcccgagatggaagagctccccctgcaagccgcccctggtggctgattggaggaaggctcgacggatggaggggtgtgcaccaccgggcccatcgaccaaggaaaaagggcggggagctccaggaagtcagcctccatagcgacaaaagtatcggccatctcaccaggaaaaaggtcagagtggagtcaaccgttgacgcatcaagggaggcatcatgaatggcccaaagcttggagcccggacacatgtcatcaatgtccctgtcctcatcagttcagtcggtcttagctccatgtgtcatcatcattcccatcctcatcgtcccttcaacgcctcttctccaccctggttttcttgtccctctattgctgctctgctcgtgcgcgaaccgccttcttcttcgccatgcttcttggcaaagggacaaggtcatcccatagcatcggagaggaaaacgatcagagggcacgaaaacagcacccagagagagatatataagggaacttgacgaattctcaaattccacgaagcccgactttggacgcatcggggggcaaccaaggaacgggaaaacatatgggatgacggccccatccgcacctttgcagacctccatggcttccatgagccagcaagcgatctacacgtcactgggggcgggg

SEQ ID NO: 31085 - DNA, 399 bp, Zea Mays
cggagcgaagaccgtcggatccaaatcctctggtcccaatattattatgcgctagatcgccctcaaccgtccatcctagatctacggtttggattagaagcgcgaaggggcatgcacgggtccaatcccaaacgttggccgaggatccaacggtggagataggctcatgtcgagttggccctatcttctaatcctggccactggtaacgcgatctacggctcacaggttgtcatctacctctagaatccagtagcgacagcggcgatccacacggtggcgcactccggcaagtagagcacccagggtcttaaacctagatacgattgaatctatgcagaggtgtggagaaatagaatccgatcgaagccataccaacggttgggagcagcagaggcgga

SEQ ID NO: 31086 - DNA, 378 bp, Zea Mays
gtcgtttggggatgttttcgtcttgacgatgtagggcccctccattttgggttcgagcttgccccgagactctgttccagtagttctggtgaggattgagtctccttcattgaactctctagggatgacagtgttgtcgcgccatgccttagtctacgcttggtatttgttcagtgcctctagggcaaggacacggtctccgtcgatgagttccttggaggttggctcgtcgacgttaggattggttgtggggcttgctcgtggagatccgtgctttagctcttgcgacgtcattgcttcggatccgtacatcaagcagaaaggtgtgaacccgatcactctggattatgtagtgttcagtgcccatatgacttcggg

SEQ ID NO: 31087 - DNA, 341 bp, Zea Mays
gtcgaggaagtgccagtgaagctttttactggagctgatcccaatgggtgtgaccttgatgatgctgatcccaatgggtgtaacccggctgacgctgaccccaatgggtgtgaccttgatgatgctgatcccaatgggtgcaatccggccagcgctgatcccaatgggtgtgtcgttcgtattattgatgaggacgaggaagaggaggaggaaatccccttgattcgaaaaaacagtcggtgttatatagtcagtggggagagtagtgatattccttctccagctttgtctgctctcgttggtctgcaggaattgtctctagcaaattttgatcaggctct

SEQ ID NO: 31088 - DNA, 372 bp, Zea Mays
gcaccagagggcagtgctgagctgatggaggaactagccaccgagcttgcctgatggaaggagctaggcgtgcgagtggcaaggcaagcactgaggagaccaagcgcatagcaagagaagggctcgatcgatgtctagactttaccgggtgtttggcaggtgctgctctagcgttggggaggaggagagggagatgacgcggaggaaggagtattgagagccgagcgttttggacttccagagagctagcgtgaggactggaggtttccaaaggagtgatcgtgctttggctaggaagtaggaggtggcgtcgaagatcactagagactgacgcgtgcacgcaaggatagaagatgctaagagattgcagcg

SEQ ID NO: 31089 - DNA, 425 bp, Zea Mays
gaatatgttccatcattttaacactgaaaagttaatcaatttagctaagtgctatcctgctgattttagttacaaggatatggaaactcttgagcgtgagcttggactatatattgacaatgtactgcatgatacagaattctcaaacttgcaaagtattggtgatttggctaaattgatggtgacttcaaaaaagaatttttcatatccattagtgcatcgtctcattaagctagcgctaacactccctgttgctacggcaactgtagagagatgcttttcagctatgaaaattgtgaagaatgccttgcgtaacaaaattggtgacaagtatatgagttattcactagtatgttttgtggagaaagatatgttgaacacaattcctaatgaagtgattgtggagcgttttcacaagatgaaag

SEQ ID NO: 31090 - DNA, 409 bp, Zea Mays
gacatgtcaaaatcccatgaaaactccatccagcaaagatacgtaagccataaaatcgtgaatagaccaaaaaacggaactctcaggttgaacttctgtttcttgtaacagtcgtacgcctcgactccttcccacaaaaatttcaattcttcaatcaggggtctcatcatcacattgatctttgttccaggatgatccgaaccaggtattacaaggcacaagaaagtaaattcatatttcatgcaaagagctggcggaaggttgtatggaacagcaaagacgggacaacatgagtaggacgatgcagttagattgaaaggagagaaaccatatgttgccaaatcgaagcggacattccgcacttcatatgcacacctggaatcaaaggaatctagtgccttccatgcat

SEQ ID NO: 31091 - DNA, 309 bp, Zea Mays
catcaccttctacagcaagatcgccatgcgtcctggatccgtattctgcttcgggacgatctcatctgtagcagatgaagagggaattctacaccgtatcgcggatccaccagaaaaaaagtctcctccaacgaactccggaaatgctggagagacgcaacctctggctcttcggaaaaagatcgtctccggaaaggctggagctgggagcttggtgacccggaaaactccgttgtctacttctccgacaaaagaatggatgcggatcacgagaaagaaggagaccagggaaaggcaagtcgttctttc

SEQ ID NO: 31092 - DNA, 1020 bp, Zea Mays
catcacagcttatgctgccaaatgcctcatacaacttaaaaaaagtgtcatcacagcttatgctaccaaatgcctcatacagcttatgttacaatacatggtatgcactaaatgtgatactggcccctgttctcccacatctgatttgcccacacatccctgatagaagcccatgcattattgtcctccatggccactccatgaccattgtttccatggttgtttggctgccaggtagactctagaggtattacctcatcaacaccatgacttaggatccaattatgcaatatgcaacatgcaaggacaagttttacttgagtcttgaatgggtggaaaggtttattgtcaattattcgaaatctattcttcaaagccccaaatgctctctcaacagtcactcttaagcttgagtgcctaagattgaacaactcttttgcatttgtggggtggttcctaccaccatactcctttagatgatacctagtgctcctgtatgggggtaagaatcctgggcgacatgcatatccagcatcaactaggtagaattttcctagaaaaaagtatgaattagatgctattgtctgttctttaagtatgaattaattgatcctagtagtattgttaccttcaggaacttttaacccatcctgcctctcaagtgcatcagcaaggatagtggcatcatgtgcagacccctcccacccagctagtacatatgtgaacttcaaatcaaaatcaactgcagctaatacattctgtgtaggataatgcttcctccccctgaatgcagattgcatgctctctggaactctagcataaatgtgagttccatctattgccccaatgcagtcctatgtgttaacaaataaggtgagatcattgtatcatgaatgcatgcctatgtgttaacagaatcctaagaaattaccttaaaatatgggtaccatcttggactgtttctgattttaagtggggtttcaccagtgggtgccttaatcatgtcagcccttaattcac

SEQ ID NO: 31093 - DNA, 336 bp, Zea Mays
aaaacgattattatgagttcgtggcctttatgaagccatgcatgtgtgcgtggatcacaagcagccgtgtatgtggcctttatgcaagagttcgtggcctttatccacacttgaatttttttaataaacactacctgacgtgtatggacctgaacacgtcttgccattgggccatgttgcctgggtcactaaggcagtaaaatcattcatcaaggagtcgacgacacaactagctgatttgtctgctctgacgtgtgtgtaagcaaatgttgtatcaggtcatgtttgtaaggtgtgggaaatgaagtccaggcttatgcagtgccacaagtgtta

SEQ ID NO: 31094 - DNA, 480 bp, Zea Mays
cacccatgtacgcagccggaacaatacaagtgtacgaatacggccaacaggccacatcaccattacaataacatacacacggcgagggcatcacctatcacatcggctcaaccttcagaatgatacccatctccctataattaaacagcattatcctcaattcctcaccctcaaaaagctcccgaatatccccttcgcctatgcccgccccgttcggcgaagacaacaattctcgtttaccagccccgtctactcgaagtcagccacgctccatccccatgcgacggcgcctgctgctccgcaaaaattcaccaacacattgttttcccaccacccttcgccgcctacacccagtactcgtaccaggaagatcctcagcaccctccacacgcagcgaactctccgccgcggtcacatccaacgcaacaaaataatctaagccttcatccgaggactcctccgtccaaggaaacgaactcc

SEQ ID NO: 31095 - DNA, 329 bp, Zea Mays
tagctgcaccgaaagaggtgaatgcaaacaatgaattgtaggaccggataagcctcaagaaacgcctcgagcgagtacctccatcaaatttcaaaagatcagcaagcaaaggcggcggacattcaaatggttttaggttcaccttccctcctttgcagcaaaggttgtacacaattttcctctgggtggagaaggaatcgtttttgacacgctcttggaaccagaaaacagcgtggcagtatgggcatacatattcggggccaccgtagtatgacctctcagggtatgcatctacacaggaagaagagaaagggtagcaccaaagcaaa

SEQ ID NO: 31096 - DNA, 299 bp, Zea Mays
cttgtttaatagtcaactttccgaaaacaacatggctcggtctccatggccgatcttcggcatcttcaattccactttctacatcgaaactctcgctatcgctggagttttcaaatattctagccaacatctcattggtgatcttttccatgttgattttttccataggttcgtaaaatccggccaatgtcgggtcaacgatcttcttctcatcagccatttagacaattgttgctagaataccaaagctcaaaatccaatcaaactcgacgaaacaaggaaggttaaaatggcaaaca

SEQ ID NO: 31097 - DNA, 333 bp, Zea Mays
acgttttcattacaaaaccttgatggagcaactacccttttccccatccccttatcacctaacaatctcaccgtcaagtgtctggtactctggttatccaacgcataaaaaaacaatgtcttgtgttctctatagtataggaaatcagggaaagttctcctaatgttagcctgcctttgggttttccagaaagctacctttcttctggcaatgataaggtgctagtttgtcaccttaaacctttccagtttgtcgccaagtccagtcaggttgttattttcagtttttctccttcgttgccataaagctagagacgcttaagcttcaatgtgg

SEQ ID NO: 31098 - DNA, 436 bp, Zea Mays
tatctctcaatctaggccgttggatcaacagccgagggcacagattagatcacatctcggtcgaaccggtacgcgcctagagtcgtccgatatagatccgatggctccgagtttaaagtgttgcaatcaattctaacgcgtgagatctcgatccaagggctaggatcaacccttgaaccggtacggtgtggatctaatccagaccgagcgttcgccgatcgacggtagaggcccatcttcctcacccggataaaggcaggggcggtgcccgagcagaacacggcggcgttcgcacagcccatggcggcaccattgccgaccagcccccaattcggtgccccgaggaccaaattcgtccaccgatcaaagaaaaacgtagcagaggccaagacgagagcgacagggacaacctaccggaggtttgggcagcgtagag

SEQ ID NO: 31099 - DNA, 497 bp, Zea Mays
cgtgaatgaccaaattgaatcttgggaaagcttcacaggtttaccagagatgacgcacatactaaaatttggactgggcacgaatagaaatgtggggcgacggagagggtgtcgcggcggcattctacagagcaattgtgtgttccggtgaaaggcttcgaccgaacttagattggttggtactgagagcaataggaggctacaaacgagctagaacagggagtaattgggaagttactaacccgaagagcgctgaccatggtggagtcctttacggcggagttaagaacagaggaggagggaatttgggggctacgtgagtgctccggtgaaattgagccgattgctcagtcactgaggtgcgggatgtggtgaagaagcagaacccgggcgcaatttataggccatcgaccggaattggatgaggatcgcggattttagattgcgcaggcgagctcaccgcgcggcggaatccggtgatggcacggtggccgccg

SEQ ID NO: 31100 - DNA, 587 bp, Zea Mays
gtcgtgtccccttacccatcaacaaaaatggtttggccgaacacaaacactgtcatattgtaaactagtgtcgctctcctagctcacagcggcatgctaattaaattttgggataaatctactcaattacgcagtcagatgtattttggatttcaataaaatgcattgtttgatgttaactaaaagtctacgaaagagggggaaaaacccgatgtaagcgatgaggtgactgtaggtttacagtaaaggttaaggttgtgcagtggagcgttgtgatagataggaactgataatcgacataaactggttggtagttgatatgacagccagggctcgaagcaacctttaatagtttgggagctaggtctaggcttgcatatggcctcatgctctctctgatcattatcagcgtcgtccgccccgtcaggtaattgggttaaccagaacgcagacaactggccgtcctaggacaccgacatcatacggggcaggagtgcagatggaggaagaagacgacacccatctgattcagatcctgcgccacctagacagtgtcgaaggagaagccttcgatgagtgcataataa

SEQ ID NO: 31101 - DNA, 412 bp, Zea Mays
agggaggattgatggcatgtatcttgttaagtctggtcatattatggcttagtagggtaggctttttggattgggtggtgggtctcttgggtgtctgagctagaagtatggacttctagctcgagcgatggtatcaacttttgggttgtggtgtcgtctaggccttctagcacaatggtggtatttagatcattggatggtggtgggatttcatcggtgaaggccaccttgccctttttggtggcaagggttgcccttactatgtcatcatcaggcggagagctagcttgggtgttcttcttgggaggcatcgtggggttggtcttcattgcacaaacggtgggcaccaaatgttggacctactgacacgtggtcaagcggggctaaacactttggggcaaatggaactcag

SEQ ID NO: 31102 - DNA, 477 bp, Zea Mays
gcatgatcgatccgagaacctcccaacaggtggtttgtcggcggtgggggcctgccacgggcaccggtgggctttcaaaggcagcaccaagacatgtgcggtccgctaaaccagtcactagccaagccccatggcattcgaggttgccatcgtcggccaccagctaagctccaccctcgacctttatggagacggcttaggtcgctgcccaaatgaagagaccgacgtcaatcgagaagtagaaagggcgcccccacaccatctacccataaggtggcatgagagtgaactcttcctttgtaataggataacatttatccttgatccagcccggtgtggtcggccctcataaacctggtctttggcgtccatcacaaagctctctatgtatccggttataaaggtagaatttgcacttattagttcaatccttgtggtcgattcatcttcatgttttaatttacatatattgtttcc

SEQ ID NO: 31103 - DNA, 955 bp, Zea Mays
ttatatcagatctgtaatccgaaccagattcaaaatcagaactcgaatctgaatcagaactagagctataatgcacggggttcagaacttgtaactcatgtttgtttttccttttatcttttcagagttgcagtatgtgctttacagtttaggcagacatactgaagttactatgaaggattatttttaggtttccaaatgtctgatcgtttggagggagctaagctatagagctatgaacttttgtgctactgttaccactgcctgtttaatcatcaactcgtctattgtaatagttcagtttctatagttgttgaaagattatgtttctgaacatcattgcccatatgacattttgctgctagggctacaatttgagcatcgttggacaatggtcatgtgactgattatggtggtatttgtgatgtgatttatgtttcttaacattattgttatggtgatatttgtgttgtgatttatgtttctgaacataattgctcatatgcatgttgctgctagtgccgcaatttgagcatcattggacaacggtcatgtgataatgttggtatttgtggtgtgatttatgtttttgtacaatctcatgaatacttagctttgtcagcatgcagagaatgttttctggattagggtacacttgctgtgctgatagtttcttaggtttatgtgctcatcttcctcatctgacatgaataatgtatgggtgtcgtgttgcggagtactatgtgaagccatcaacctgaaagctttcataattatccgcacgcaggaggacgcccaactatgcccagaaaacattgcagctcaaaattgctacacccatatcaaaattgcatgtactcgtctttatttttactatactccaggtctgactgtatgttttattcttcccacaggtctgttcacaaattgcagctcagcatgcagccaattctaa

SEQ ID NO: 31104 - DNA, 395 bp, Zea Mays
aagtcctcggtccctcaaatataaggtaccctcaagttcataagctattatacacagtacttctaactgctcgcaagctccgtcactactttgacgaccacaaagtcatagtagtcacaaggtttccaataggagatatactccacaacaaggaagctgtggggagaacagccaagtgggcatgcgaactcggagctcatgatatagagttccgacctcgcacggcgataaatactcaggcactgattgattttgtatcagagtggactgagcaccaggtcccggaaggcccaaaagttgctgaaatctagagaatgtacttcgatggctcgctgaggctgcaaggagtaggggcagggtttctcttcatcgctcctagaggtgaacaactcaag

SEQ ID NO: 31105 - DNA, 373 bp, Zea Mays
taaaccaaatggtaaaggtcgattctgaatagacatatatctagggtttatgtagcagaactacattgtattccactccttggcatgcttaccataatctatatatgatctaccagaagtaagaagagtacaaaaatagccatggaatcccacatcaccacagagcttgaagctacattaggcattaatttgtccttggttctttgcgttggaagagccacaattctagaccgcaatactgtcagtgatggtaatttgtgatagaaatataaagatcttatggagacctgttgtattctccctagtcctgatgactccttcgtatgagagtagtattatctgatgttgaagataagtcccagacggatattgg

SEQ ID NO: 31106 - DNA, 407 bp, Zea Mays
tctgctggtgatgctgaattggtccccaatgatgctctgctgattgcttcagttggtaatccttcgtcaagtcaccaactgacttcccatgatttggggcttccttcgttcttctccaatctccaagtaatttggcttttcccgatctggctatactccgggtgaaatactgtctttgcactcatttgttttccatgtcaggctttggttgacgagatggccggtcaacggagatcgcagagtgcctctgtcctggaaagagttatgtctctaacacattggaatccagtgctgcttcagcagcgggtatctgatttggagatggcaaatgctggttagtgccctttgttcctccttggctacttgattaatccgctttttggttgaatatctttgttttaaccgtt

SEQ ID NO: 31107 - DNA, 384 bp, Zea Mays
cgagaaaaaaaaaggcaggtgacagacctgcgaccggtcaaaaaggtgctgcgcgactgaaaaaattgcaggtgacagacctgcgcggacaggccggtcagagaccggttcaaccggtccaccaaggcggttcaaccgcttttaaccaggatggtcctggtaaaaacaggttaaaaacagctgagctgaagttcagctgctaagttcagctggcctcctccagctgaactagaaagttcagctggtcaagccagttgagccccaaaagaaatcttagcactaaaatgcattcaaattttaacaatttcaccaagtttttgaaagatcatcacatagctttaaaactatcaatcaaaaacagtgaatcaaccaatttttgtgacc

SEQ ID NO: 31108 - DNA, 344 bp, Zea Mays
aaactggactggtgcagccattgttggggtacgcaataagagaaactgaacagccactggtcaggggcatcaaagaacagaacagaaagcttcagaatcaccttctccagttctcctttgtgctggctctcacccccaattctgatatcagatctgattctactgcctgttctctttttttctcacctgatgattcttgtaatcaagatgggtctaagctgtctcttatttttcgtcttctaccttaaatgaaatgacacacagctctcgtgcgtagttcgaggaaaaaaacaggagagatacatatctttgtattgaagaaaggaaaaagaggggaaagaatc

SEQ ID NO: 31109 - DNA, 368 bp, Zea Mays
caagtattgtggtggagtgacacgtgaccatgcttgcacaatgaataagatcccgttcatattatcactaagacaaatacttgacgtcggaggagcacgagatggagatgtcgaggaagtggtgtaaggcgctgaggttagtcatggtgaacctcgagtgcagacaacacataatatgctcaagagagctatcgaggaggcaatgagaacgatgtcgtcaatgtataataggaggtaggttgtggttggcccctccttgtagacaaagcgagaggtgtcagatgtggtggagatgaagccaacacatcgaatgtaggcgacgagctgctggtacctcgcatgaggtgcctatttcagaccatagagag

SEQ ID NO: 31110 - DNA, 472 bp, Zea Mays
gatgaaacaaggaggggctgcaatgcaatgcggcttgcaacctaatataaggctagtgtggcgagagttcacacaaggcggctagcgagggcaaatcgagtaatgtggtgtctcgacttgtaatctgggtaaggtggatgggatagcggcgggaacaaataacagcgatggagcggttgaactacgattatgacacgacctaaaccagcaacaagactcgacacggacacaaactcaacgaagtaatctgaaacgaaattgcaaggctaaacatggtttctaggacagcggaatattttttttgtatggcaattatctggagttataggatggaaaaaactaaactaaactagggtaagcctgacggtaatacctgagtctttgaataccacttgataggaacggaggtgcccgatcttccgtcaggtgaagataactatcgatttggtggagatgtcacacagacgatccg

SEQ ID NO: 31111 - DNA, 283 bp, Zea Mays
caatttgaaaaaggcgcgctggcggtcggagagaggggaagttcactggcacgagcgctatcgtgggtttcatcgtggcaaagcctctggcgatggacggactccctactacggttcactgtgatgtggtaatgttcctaagcacatggcacgggcggagaacggtgatcttcggtaatgccagcgcgaccgaccgaggcgggacacgacggccggtccggccagcgaccagattcaccccacattggatattttcaccccgccccaatgttatctactcttc

SEQ ID NO: 31112 - DNA, 399 bp, Zea Mays
tccgagccgaatcatccccgacaacaccctcgggggctaggtgagcgccaacaccatccttgagggccgagttctctgcagcagccacctctaaggctgaaggtccctaagtcacttccatgggagcagggcaatccaagtcagcttcctgaccctcaagaccgcgctccaaggtcgatgaggcgcgggacgctgcccgagatgaccccaacccggcgtcgagcacatcaacacaaacatccatcgcgccaccatctaccagctctgataacagatcttctggaaccatgtcttcaagagtttgatcaaagttcgccagagataattcttgcagaccaatgagggcagacaaggcaggagaaggaacaccactactttccccactagctacgtaacgcc

SEQ ID NO: 31113 - DNA, 480 bp, Zea Mays
tttcacttctggtattggcacttgcctcaatcatactcagagacttaggactccctccctctatcgactcgcttgtatcccctactacgagcacttaggtgcaagataatacaagtctccctcctcgctggaagtcgatccttctcttgcccgaaccaggataaatcttgtgtgtcttcttgtatcacccatctagggacaggggcacgtagcacaaatttaatagttagttaggatccctagtttccaaaacaccgacattagggatcgaattagatcgcgtgagcgtggggcgtgcgtcaaggttgtgcagggcagacgatgatggtgggaatggataccctcgtcccagcgtctctgctgaggcgtgagacaaaatgcatggtcgaggaggtcgtacggtgtcggtgcctagcgcacgatggctggatgtgtgccacgctatcgcatgagtgcgtccaagtggttgtcgtaggcgct

SEQ ID NO: 31114 - DNA, 459 bp, Zea Mays
tgctaccttcatgttgaggatgtaaagccgatttggactcctgtgtaccttgacaagaaggcgatgagaggggccccagatcctcatgactctgtgctcgacctccatgcccgaaccattctcattcagctgtcccaagctgatgatagagttcctcaacgcagggatgtaatagactccggtgagcagcctgtgctcaccagacgcgacggtgaatacaactgaatcgacgcccttgatatctacgccggaggcgtccccaaacttcatgaagcctcggacgctagagtcgagatcggtgaagaactcccgttggccggtcatgtgatgagtggtgccggtgtcaaggcaccatcctttgatcatgtcgttgctggagccgtcgtcgaggaaagcgtgtgctttcgattcatcaagatggaggagtgccgctgcagacggtgccgctggaggtagctc

SEQ ID NO: 31115 - DNA, 321 bp, Zea Mays
caccgggggaggtactccttcagtcgtagctagacagtcgccctcgggtcggagtattcccgttactttgaagggtccttcccagctggggagtgttgcggagccctaatttggtttggtacttccgtaagattaggtcctgaccccgagtttccatctgcgtttgacgaaggagcccccgtccttggccttggtcactcctggataaacctgtcagaagtctggacccgtgggggacccagaatggtttccggaggaaggcaggcttcagctccgtaggccgggggacatggggtcccgccggtggttcgtctagtcgcc

SEQ ID NO: 31116 - DNA, 420 bp, Zea Mays
tccctattgaggccccatcatttcacaaacccctatggcaataggccagacttacttaaccaaaactgccatccaaacacagctctactactttgttacaacacccctaggctacaaacttacagataaaagttatgatgccccaaacacagcaaaagatcactgaaacctccaattttcagttactgaacagcacagcctcaacttgacagggaactttctgacacaacttactcccggttttgtaccgcaccaagtcccaccttcctaagagaatttgttcactactctatggactttcattttgttatagggactttagcttaaaactccttagattaagtacaaaagatccccaatgcctgacagaaaaacatagaaactattgtcaggtactgaagtgagccaacacacctcccc

SEQ ID NO: 31117 - DNA, 389 bp, Zea Mays
acaacataatggcgagatacatggaggataactcggacgaccgaactccacggtagtcggcacacaatagaagcggaagtagatagactcatatatgattagataagctgttacgatctgtaaagggacgtcttcctagctggttatataaggccgagggggtacccctacaaaactctctcgacgttactctcaccgcaaccacaccaccattagactggtaggagatctcatccatcaccacccgcaaatcatatgtaatctgtgcaccaccagcaaactcaatactcagcaccaaacatgatgtagggtattacacattcaggcggcccgaacctgtattactcccttgtgtatcgacgtgctcctgcacgtaccatcgagtcgcg

SEQ ID NO: 31118 - DNA, 355 bp, Zea Mays
gtttgtatgaaggtggacatggggtagcctgcaattctatggctagggggaagcatcatcaaaagaaatgttatcgtgatgaaaatcatcatatcatacgtcatcatagcttgggctttcctgacgaagctctctcagttgtggcttacgcccttgcttgttgtcttgtactataatgtgacacatctcttcggctgcttcatcaatcttcttctagagttcagccagccgaagcatcttctcccttcttctctccagttgttggtggatagcttctagatctctgatttcttggtccagcttttcttcctgtggtgttgggctaatgaatttccttttctggcttcgagcctcc

SEQ ID NO: 31119 - DNA, 463 bp, Zea Mays
ttgattgttagtgcaataagttttcaatcggctagagaagtcgaaggagacattacttggtgaaacaagcacaatgccaattccttgcccttcattgcaaattgatccattaaaatataaagtccagggagtaatagtgaggtatgatatgtctagtttatgagtatcattgatccgatgttctacaataaaatctgctacgacctggcctttcatagatttcaatggttcataggccaagttatactctataagtgcataagcccatttaccaatcctaccactcataatcgagttttgcaacatgtatttaatcacatcggtttgactggcaacagtgcaatgactagacagtaaataacatctacacttggtgcatgcataaaataggcataagcataactttttgataaaagtgcaccttgtttcagcatcaaccagccttggacttaggtaggtcacc

SEQ ID NO: 31120 - DNA, 281 bp, Zea Mays
gacggctccagcaaagacatgatcgaaggatggtgcctcgacaccggcaccactcatcacatgatcgcccgacgggagttcgtcaccaagcttgactctagcgtccgaggctccgtcatagagatcaagggtgccggctcagtcgttttcaccgccgcgtctagtgagcacaggttgcttaccggcgtctactacatccctgcgttgaggaactctatcatcagcttgggacaactggatgagaacagttcgcgcgtggaggtcgagcacgaagtcatgag

SEQ ID NO: 31121 - DNA, 761 bp, Zea Mays
tagaaactcctttctcttaatcttcatgagcccagcaggaatatggtaattcctgaattgagtggagaattctgcccaggtaattgtattgacagcagcatgagcagcgcagtacgcatcccaccaatccgcagcgggaccagcaagacgacctgatgcatagagtactttctctctatccgagcactgagctatgttgagcatcttttctatggactttaaccagtcatctgcttgcagcggatctgcggagttggagaaggttggtggtttgtggctcatgaattcccggggtggaactggtggtggaggtggaggcagtggcgcttgttgctgttgctgttgcgcccttctttcttgacgtatctcctcccgctcttggcgcatctcccgacgtgcatcctctctttcctggcgcatttcctggcgttcttgctgcatctcagcgcgcatatttgctatagtgtccgccatttgttgcatcatactcatctgagctgcaatcaatgggtcaactccgcctgttggatgattaggaggattcatctctgctggctgtggttggggttgtctatatatccaccgagtgtgtcgattaggaggtaaatcaattccaccaccccgcctgatattgaccatctgagttagatacatatggtaagatagtcaaaggaatcatttgtaggcagaatgaataagctaatagttggttatggactgaaaattctttggcagggtttgaccagatattttatgtcaag

SEQ ID NO: 31122 - DNA, 666 bp, Zea Mays
cgactgcgtcgcgcggaggatgaactccggtaagcacacagaccgaccggaggaggccaagaccggtgctcaactttggactaaaccaaatccgtgacctaaagagtatttcccctaacttaattgcactaatgaccaactaaggagctctggccacggtgaccgagagcatggcggctagatcgtcgtgttcccggcgattggtggtctcttagtttgaattgatggctcggcaagcatcacagagcaaccagagtgctcaaacaagggagagagagagatgaactaaccggattggggctgaccgcgatgaggttggtttcacagtgttcttgaactggattggggagaacgtgaaattggagcttggtggtgatcggctgggagtaatactaggtgagggggtgcgcaatgatgttgcgaggctagtcacagactcaatttataggcagcttcgtcggtggcgctcaatttggtcgagcaacgcggcggccggagataagagagaaccgtggcgcagtgaattcgtggctaacaccgtggcaacttcaccggtgttgataagacagtggtagggagttacagtgacgcggtgtaaagatagagccacgcggcgcacgaccgggaggcggcggtcaccggcgaagccatcggatttcaccgcgg

SEQ ID NO: 31123 - DNA, 534 bp, Zea Mays
gcttgaggagggtctagggacactagaacaagcaacagagacactggaactaacctgagttgggatggtcacggttgagttgttcttcgcggtggcggagaccagtttgggggaaacaagaaattcttgagctctggcgaatgatcgtggctaattagcggtggctggatacttcactaccttacggagctcgcggcggggtcaatttatacgcatcgcgagcggtggtcgcgaatttggacgagacacacgacgactggaggaaaggaagcttcgctggtgcagtggattcgtggcctctatcgtggcggtcattctggtgatcgacgagaggctaaagtgaatcacggcgatgcggtggcgaggtttggacacgtggcgcaaggtcggacgacggctgtcgccggtgagcttatcagcaccagccgcaaagcacgggggggggggggggggtacgacggtgagtcaccggagtggcgtccagcgcacggcttttacctggcggtcttatctggtcactggtggcgtaaatct

SEQ ID NO: 31124 - DNA, 296 bp, Zea Mays
atgctgccatcgacatcggtggctccctcgatgaagatctccttctcaggggggtactacttagataggatctcgggggactaaacgtgtaggtggcgacaaccagcgctcgccagtcgatcttatggaggccacgaatgaagtcaacattctcttcctcaggtgctactccttgaggatgagattagggaggacaagcgcatgggtggtggaaatagaggagaggaccagcaaaacctccatatgtagagaatgtgctagtcgtcctctaccataacgaaccatttattgggtgt

SEQ ID NO: 31125 - DNA, 345 bp, Zea Mays
tgaaatttcagtgtgctctgacacgtgagttacccatgacgttccctagtccagtgcagttccgtcagttatgtttgttgagatcaacctcgttgcttcatctctgcagtttgagatattattacgccctgttactctgtatgtgcaaacaaatacatcatgatctgttaattcttttctgcaagcaaatagttaactaccatgtggcttgtctctaattctgagtcacctaggaagcatgcttgaggatgtactctatttgtttgccatgatgattatggaatttttatcccactcagcttcattttctgaattcagtggacttttgttcatttcgtgtttttg

SEQ ID NO: 31126 - DNA, 299 bp, Zea Mays
gaggggctgctgctcaacaatcccctctctcggctgctcagtcagcgaccaccgctgatttcatcgccagaatgtccaggccggccgctcgggtcctgtgtgtgtcgcagaagcggcaacgtcgccccagggcacctcatgagggatctcttcctcggcggagcaggcgcttggctagagcagatgttgaaaaggtaatggccccagcacgagtttcgaaaggaaaatggaggattgctaatgagctcggccttcttggtggggatccatctgaatcgctgtccctggaggttctcgat

SEQ ID NO: 31127 - DNA, 315 bp, Zea Mays
caacagaaggtaggaatacaaaattgtcaaaagctggtcctagcatccgcaataaaaggaaccgagaaacatccaccgttttagttttttgaagacaaaccacatcaactcgagcagaatccaccaaagtgcgtacaacatcctgtctagcagacccattaaggcctcgcacattccaaattagaatttttgaaggatccataggggatgaaaaaagaacgactaccggcgagggtcccaataaatcagcagattggtccgccctgcaacagctccttaggcctagaccagccgaatagcgctgccatggccgtg

SEQ ID NO: 31128 - DNA, 711 bp, Zea Mays
gcgcactaatactggaaagctcgggggctaatttgtaagattttgcaagactcaggctacacccgcactagtttgcgggttaatttctgtttccccggggtctcttttgcaagactatgctatcgaagcgatatcttagaatctgtgtcgtgcgattatgatcctacggtaaggattagatccaacctttcactgaaatggtatgggatgcaagcccatggatcagggatcaacgacccagattttatattaactgaactcgcttgcgtccctcggattgtagatctatggttagggttttaccagtcgaaggggtttccatcgctctgatcatcaccgtccaacgagtatccaatggctaacccaatctcccacctctagccgtagcagagcgatggcggcgagctctcttgcggcggagttctctccggcgaactcccactgggcgcccagggtatcgaaacctaaccccaagtagtcctacgtgatgcgcacggtattgggaatgggattagaccacaattacccgcaatcgtacagcgacgaagcttgacctcggcaacacgcacaccgcggcggagaagaagatcgcgacgacgaattcccgtggcctcgagttgtcacagtcctcggggttgcccaagataccttcgcagtgctcccacgaagccctctgagtaccccccaaggctacaaccgtgtgtggatgtg

SEQ ID NO: 31129 - DNA, 321 bp, Zea Mays
ggtgatgtatttagtgatcagaggcgggtagtttagtttgcgaccgtttctcttcgttgatcccctcccccttttctacgtttttatgcaggtttcatgtgtttttcttatatcctgtttctgattcatttttccctaattccttttcctaaactctggtgcccttcagtactagtctttactactgctagtagtatcacaaacggcatcaacatttttgttccccactttatcagtagtataatggaaaaacgtctggcgaaattcggaaatacgcttttgggatgcttctgataaccaacgaatgtgctcttccttgtt

SEQ ID NO: 31130 - DNA, 448 bp, Zea Mays
caaaaccctagcattatcagcagtggcattcactagggcagcaatggcatctgccagtgtaggtggaactggtggtggtggtgggttgatatcagcttctgcaacaccacgggatgtgccagccccatccgacccacgagtatgcataggcatctggagtaaaacaaactcatgaataaacatccataaccatggaatatattacacgagacaggtacatggagtattattcattacaataccaaaattgacatagcttactatcatatgcctacactagaggtcacgacaccatacacatgccacattaaccttctatatcactagctatcttagaaacatcactacctcctagggactcaacacctggtacaagcataggagttgcttcttcctctaagtctgcatcatgctcacccccatcagctagcaccacaccaccctctgc

SEQ ID NO: 31131 - DNA, 289 bp, Zea Mays
ccccaccgtcaatcaacacatggtgcagccgcatgttggcgatgacaggggcgatgatgagtggcagtatgccggcccctgccatgttgttggggcagtcggatgccccgaaggagatggtggtgctcctccatcgttgatgtggggcagccttcgggacccctggagttgccgacaggacctcacggcgcagggacttgacgttcctgcgggaggtgagttcccagctcccgccgtacatgacgtacagcttcttgcgacggtcgctgtcatccccagagtcggaatc

SEQ ID NO: 31132 - DNA, 488 bp, Zea Mays
ggttcatctttcgtcacccctttgcgtcaccttttatcatgcatagatgtacgcctggtacggcgtattgccccatcccatccggcgtatgggtcactatagaaaccccgatgctgaggtccctgtggctagggttgttcggtacctgccgggggtgataattaggggcacccagattatccctccgaaagatgcactcatgagaagtaaagacataacccccgaggggaagtagctgaggtacctcctaacctgaggcctcaccacgagagtctcccaccttaggcagaactctgccttgcccgaagtcaccaccactctgtccatctcgcccgagttgatcccagacagataagacaaaggcgcccgaaaacaggtggggaacactcgcattttatgtgcatacttaccccacgtcgcggcacaggagcatagtggctaacaagacatcagtcatatctgagcgcaacgacatgattacacccccg

SEQ ID NO: 31133 - DNA, 380 bp, Zea Mays
ccttgagggaatggtggaggcgcatggtgagtatagtttttagtcccagtctgtcttggggttcgtgagacctcgggccctgtaatgcaaagtcttttagatcaatgttgagaagtgacaatatttaggctgccgatagaagttcattgtcaaaccttgagcacgaggcggtggataagatggggcatgtaatctatttgttttgttattgggattactggatttccatccctgagcatgagatctaccagtgggtgccaattctggagctatacttggtggtgagggatgggcatgtggcactgatgaagcattcttcgggattgaaggcatgtttgtgttctggggcaaaggacttgttgcaggcgcagatcctgaaa

SEQ ID NO: 31134 - DNA, 328 bp, Zea Mays
tcgagaacagtcaaactcgcgctcgattagaataataataggtaacaaactggcgttcgattggaattagaccatctccagcagtttggatgttgcatcagttcaattcatttcatttactgtctccggactcgataccttattattagctgtatgtaatcacgtataaagtagtcatgtcctacgtgcctccttttattcgttttcggagaaggaacgcgttgcgatttggaaacttctcatagagaccgtatacctagaccttttctacaacaatcagctagcagaccacttggattccatgcatctactctactctagccttagc

SEQ ID NO: 31135 - DNA, 510 bp, Zea Mays
ctgtgggggccatgcggtatggtctctttgcgatgggcgcagtgccaggaatgagatctatatagaactccactcctctttctggtggcattccaggcaactcttccggaaatacatccatgaattcttctattacggatatgctttttgctgccagattaaacatccttggatcgttggcgggtggttgggcctgacaggaaactgcttttccttggcggtcggtgagaaggacggtcttacttgcaaacttatgatacccttgtgcttagttagccaatccattcctaggatcacatcaatcccttgggatggcaagacgtttaagtctgctaaaaacgctaccccacttaaaagaattctgacctgggagcatttgagctggcatagaaggtctgaccctggggttcgggtgaccaaagggatttataggggtgtagagggaatgccatgtttctccataaaactagtggctataaatgaatgggatgctcctgaatcaaaaagcac

SEQ ID NO: 31136 - DNA, 316 bp, Zea Mays
ctgatatataagctaggcttgtaatagttctggattgtaatagttctggagaacaaggaagaaaacaatactgctcgtacctttcttctcttctgaatttctctcctattcttggctccctgttcttcgcgctaaactccggtgaccgccgaacttcctacctccggttgtgacaccatcattctcgtcgcagggagcagcgccgccctgatcgctccatctccgaccccgaggaaggctccagggccgcagccacagcccgtgccatggctcgtcgggggtaacattgtgctcgataggttctgtcagaccagca

SEQ ID NO: 31137 - DNA, 272 bp, Zea Mays
gtgggctctgaactatcttctccttcttctcatcaaccttaacataaaaccactcattcttccaaccggttggccatttggtgcgatagctgatcaccggagtcttcatatctttgcggtaagaaaagttgtaacacccgaaattctcgtgtagcccatcttctctagcctttgtctgataatgaagctcgtgcacccggcagaaagcttcgacaaccgactccactccttggcttcgaagagcccagataaagacgctgagcctaacgatg

SEQ ID NO: 31138 - DNA, 497 bp, Zea Mays
gaggggttagctgtgggcgttgggttagctggggaatggatgccttgtagagatttgtgtgtgggtgtatgtgtagctttgtattgagctcagtgttatgtgactcttcaccattcactagccagagcttttgtggaatgatctgattttatacaattagagtgcggctaacgtactggttatctgctcattgttgattttcaaatggaattctgttatatactttttatactagttgctggtaagctgtatattagagattagagcaaatagtagtactgggctactggcatatagggcagtttgaattgttgcccgtggaagcctggcccaattttggtggttgaccgtggacaaggataccatttggatggcagccgagatttggcttgccctggttcctgtgcccatgcagccgttaattttctagttcaatcctggccgattcctccgctaaattttggctggccaattgtttggcatggcctgcatgtggc

SEQ ID NO: 31139 - DNA, 365 bp, Zea Mays
agctcaaggaggatacactcatgtactagttgctatcgacaaattcactaaatggatagagttcaaacccattgcttctctaacttcagctaagacagtggaattcatacaatacataatattcaggttcggaatatcgaatagcataaccgacctgggatccaatttcacaagttcagagtttttcgatttctgcgaacaaaaaagcattcagatcaaatatgcctcgatggcgcatccaagagccaacgggcaggtagaaagagccaacgggatgatattggaagcgctcagaaggaaagtttttgacaagaatgagaagttcgcaggaaagtggattagagaattgccttatgttgtttgga

SEQ ID NO: 31140 - DNA, 613 bp, Zea Mays
ctatcccatccccgaaaaaagagcagcgctctgcagaggattctgttccgttcttaatccagtcttcgccatccgtatctgaacttttgtgtcatcatccatgcggctgatactaacaattagtatagcactagtagtctagtataccacaactcatccaatacatcacccttctggagcttcagtcactgacggatgaaccccataatatcttgccatgacatctatcagcagccagccaggatctgttttccgtgcaaagtgcagatgcggtggggatgctgagaccacggcatcacgtgcaggagctcatgtattatgttgctcaagctaatcatgtgtactactaccatctgccaaccagagtacactgcctcagctaagcaacactgctaattaaggactatcacgtgaaagcgctctgctcgtaactcgaattactagattggttggcccctgtccctgttcctgtctaatttcatttagtgtcctgtccttgtgatcattcatggtcgcagcagactctgcgccagctgccttgtttccttgacacgagagtctgtctctgacctgttctctctgtcttctgcatttatattacaatgctggactg

SEQ ID NO: 31141 - DNA, 430 bp, Zea Mays
atactcgtcttctccaatgggaaacttgaaataaggtgaggcaacaatttacttaaagacttctcgatgtgtctgtgcctctgtggatactaaagtgacgtcaatgtgcattgaaactgcagatccctgccagacttgtccttgttgaaggatgcctttttacgaggttttgtgtactcaagaaacttgaattcaagtagttccataacatgttcatctgatggagaagccatcttggtatgctctgcgcctgcccatccatttcccagactcttcattgtttaaagcctttatctacgaaacagtgtttaaatttttttagttgtaaaaaatgtattgtcttataaaataatcgaattaattttacagattaatggagaagagacctattttttctctacgctctgccaggatgagatatacaggtatg

SEQ ID NO: 31142 - DNA, 275 bp, Zea Mays
tgacactgtagcctccagtgctatgtttgcagttatgcaactgtataacagctctgagcgcaacttggagatggtcaatggctctcttgccatggcttagaatgagttgcaccggactcgagaggcacatgctgtagagatagctcaagtctagatagagttagcccaggttaccttagacaaggatgaggcaattcaggttagggatgtggatgtacttgacaatgcgttgtggattgacaaatgccaggactaccaggccatggtagtagaga

SEQ ID NO: 31143 - DNA, 636 bp, Zea Mays
attggatgtggctgctcggaggcctctccgcgtgtggtgggtgctgaagttcccggtccaagtgttgggtgtaggcgtcgaagggcggtggtgaagcgtagagtgagtgaggtggagggtggtcgacttcgtgtggacaggactggcaagcgggaattgttgtcctcgccagctggggtgagtgtaggtgagggggaattgtgaagtctttttgagggtgaggagctgaggataatgctgtttaactatagggagatgggtattatcccgaaggttgaaccaatgtaaggtgtgatgccctcgttgtacgtatgcaactataatttgtatgaagaggctatgtgccttcgctgatccggccttgtccgtaggggacttgtgcactaagtcttagcgcgtttattatgtcggtccggctgcacctgtagtcggtcgttgcacgggtagtctttgagagagacttcgattttgcgcacttgttgtgctagtccggctgcacccttaggcgacttctgcacggatagtctttggaggaagacttcggttttgcgcacttgttgtgctagtccggctgcaccattaggcgacttttgcacggatagtcttttggggaagactgtttttgcgcacttgttg

SEQ ID NO: 31144 - DNA, 739 bp, Zea Mays
ggaagtctcctgctcgccagaaagagaaggaagaagactgggagccaccccagctggagacatcagaatgtctgccacagccgcagtaggctcagccaaactcaaaataggttcagaatgtgtaaaagttattgccgtggctggagacacaatagcatctgccacatccccgataatgactgggccctgaccaacgtgatctgtcccatcagcagccaaaccagtcgccgaagctgaagaaattatagcatctgcagcagccccgacattgccattctcatcaatactgtcaatcagctgtagcttttgatgtcttttcctggaataaactaacagacttggtgacataagatgcttccttgataaggaagactccataaggtgaatgttctgcaaatcagattcaaccaagggaagacccactccctcggagaggacatttacgtcctgcagattagattcaaccatgggaaaccgggctggagcatcagaaataatagcagcttccgaacagattccaccatccactggaataacctctggagagccagccaaagtatcttcagtaacgacagtagaactagtagcttccaaaaatgcatcatcaaccgcaaccgggagtggagacacaagagcagacgatgtcttaggaatccaaacagacacagatgactccaactttctcttgggaatccaaactcgcttcatcttcttgactgcacctttatcagcgttaaat

SEQ ID NO: 31145 - DNA, 309 bp, Zea Mays
tgttgataggtgttgggcagtcccacaataaaatccatgttgatgtcatcccatttccatgaaggtattgataggggttgcaaggcatcagctgatttcaagtggcttgcctttatcctcttacatgtgtcacattcggatacatatcgagctatttccctcttcattctggtccaccaatacaggggcttcagatcatggtacgttttggtgcttcctagatgcatggataatttggagagatgagcctcatccaagattttcttcttgagatccttatttttaggaaccaccaatctgcttccaaac

SEQ ID NO: 31146 - DNA, 516 bp, Zea Mays
aaggtgctgttcatggacgagatatcaactgggctggacagctccacgacgttccagatcgtcaaatgtctccagcagattgtgcacctgggcgaggccaccatcctcatgtccctcctccagccagcccccgagaccttcgacctgttcgatgacatcatcctgctgtcggaaggccagatcgtttaccagggacctcgtgaatacgtcctcgagttcttcgactcctgcgggttctgctgccccgagcgcaagggcactgcggacttccttcaggaggtaccattcggcacttgtctagtaaagtagtaaccatatattctctgaaagcaaagtttatgaattgcaacaagacgaccgattctttgggtgcctttccaggtaacatcaaggaaggaccaggagcagtactgggcggacaagcagatgccttacagatacgtttcggtgccagaatttgcgcagcggtttaaacggttccatgtcgggctccagcttgagaaccacctctcgctg

SEQ ID NO: 31147 - DNA, 364 bp, Zea Mays
ttcctttgtataatatttaattattcacccgtaaagataccttttaattatacacaaactaaactacacgtaaatattactccgtaaattatttaattcctccttccataaaagataccttgtaattctacacgagtagaccaggagcactacgtgaaagggtttcatacaccaaaaatcccaacaatcccagcaagcactatactcaatcccccataaaattccaaaacccaaaaccaagctatataaatgatatactccgtatataatacaaaataaatgaaagagcagagagtaaacaaaaagaaattgcgaagcagcttccaagccgtgtgctcagctatgtccttccaactacgctgtc

SEQ ID NO: 31148 - DNA, 813 bp, Zea Mays
cacggtttactatcagccgtccgatcacacttgggtggaccagatttaaatcgatccgcatccggtatgcaccgaagaccatcagatctcgatcctacgacgcacagggatggacccgaactgttattgcctattcccgcattgtcacgatccaacggtcgcgatgccatttagccgaacaagtacgcccagctcgatccgagccgttagcggctggatcaacgacagtcgaaacgtcttcctcccacggccgagggggagcggtagcgcgcgtacgggagcggtggcaccatgccaggatccccccacatagcgcacccccgattgttaactggcccaaaacaaagaggaggagcgggtgaactcggtagtaatttacctaccggtgctaagggcaggagaggtgtcgccccacagcaaagggcggatccacggcaaaactggtgcgacggcgagaaattgctagagcatcggtcgtccaattgccaaattagtggtaggggcagcatctttgtatctccatgattcttcagagacaccgccgaggacccattgatgcccaccagcaagaacgatgatggcgacacaagctcatctctcactcccaatcgcgaggtcatctctcactcccaatcgcaacaacccagagatccccatgtgcttcgtgattctgacgtcgggttccgcgcgtgtggttgagccatggagctcgaaaatcccgggacgccgagcgggttgttgaggagggggataagcctgacgagtgggccccaccacgacagaggtacaagcatcgcatgatggtgacaagcc

SEQ ID NO: 31149 - DNA, 580 bp, Zea Mays
ttcccaaccgagaacgcaatcgtgtcgccgccgtcgcgaaggccattccaccatcatcgttgagcccctgccactgctttttccacgatgagctccacctaaatgcgatgcacgaggaccctgcctcgatttcccattttcctagtatgtctaccctgccctcgcctaatttttccatatgcagtcctagaaccgtcagatgcctccgtgttgttgtcgcctccgagaggatcccgagtctcgccctgaggtaaggaacctctcctgcccctccatttacctccaccctctggtgctcctatcctggtttagcccccaccattgggttccttaccctcccccatcttcctaggccatcccagtcgccttaagccccttggagtgcccacgcctcttgtatccagtgagctttctcgccgcgaacacaagcgatgctgcttctagttgctggaggaaagggccgaagccagccgcccaatcccccccattcaccctagatccaacggatggattctaataaacctgagcctaaacctaaccgtccgcccgagacccaacgacctgcactcgtgtcccagcc

SEQ ID NO: 31150 - DNA, 761 bp, Zea Mays
gtgatcttgcgcccagatccacgccggcgtcgcgattcacgcccgaccgaactcatataagtgctcctcggtaagaaatatcgcgctggagataaactccggccactgttctcatcgccgttgtgtcccgccatgggaagtcgcgttggcatcaccggcgttcgccgttatacagccaggctacgtgcctcaacattttaccatgtcgcagtgagtcaccgtaagccactctctgctactggttcgttgccggtgaggccaccacggtagatgccaccgagctctcgcgacagtactctcttcactctccgaccgccactgcgccaactcaaattcacgagctaccgcccccaggtcctataaattgagcacaccatcaggtccgtagggtagtcacgcatccagccaccaagccgtgccctcaattgatcaccagagctcaataatttctcatttcccccaaacctactttctgccaccgtgaaagaggcctcgccgtggccagctcaattcaggtccgatcttgccctctgctttcttgttttagcaaccttacttgctcctaatactcactgacccattcaatttagctaggcggtcctagatcaccgggaacgcatgtgaatgttcattgtgtccgttgtcactgtggacagaacatgttagagcgtcattagtaaaattagttgaggggaaactctcattaggacttgaattcggtctctgccaaagtaggacgccggtcatctagtaaatcggtc

SEQ ID NO: 31151 - DNA, 402 bp, Zea Mays
caactatgtagatctattaaaggtgaacaactttgtttaagaggttaagcattgttgttatgaagaattgggagataattaaacccaaagttgggctgtcaggctatttaatgtctaaaattcagactatcagtggtactaagtcatctttggacaggaaatcaggcatgatcgagtgggagtttggctataattgttatggcaagattatagctgaatcattggtctacaactttgctgcagagttttaggtgagttgctatagaaaatttagagaaaattgaccacccgcaacatccacggtcgccgtagccagagcaaaccgggtagctattcgtggaattaagtgaggggaaacattcattagatcccgaattaggtttaggccaaagaagggcgccg

SEQ ID NO: 31152 - DNA, 350 bp, Zea Mays
tcttggtgatctttctctatcactactgacacaatagcactaatatttctcccataaggaagggttttcagctcacgagccaaacagatgtaaactagtcatcgtcgtcggtcaggggtatagggtccttcctatgccatcgatccccagtaaccttcagcatgcgtgaagatgtttccaggagctcgggcgaagacatcacctccccaggacccgcgcacgtccccgttaactcctcaacaaaaatcctagaggccttcggccccatcttgtcatcccccataccttacaaatctattttcctctttcgagtagctgcaaccacaaccttccccttcgaggtgccctcc

SEQ ID NO: 31153 - DNA, 311 bp, Zea Mays
ggaagtatgatttagaatgctaagcaggctgggactacaacatcttgctcccacgtctgatgctacagggtttcaggaatggtggagtgaggcagaaagatttgtgtctaagcataagaaaaaaagtttcaactctattgtaattttagtagcttggcagatttggaagcatagaaatgcgtgtgtgtttgacaatgcttccccaaacatccacgcaattttgctgtccatccatgatgaggctttgttatggggccttggtggggccgctgctcttaggcaggtttggctgtagtttgatttttgttttt

SEQ ID NO: 31154 - DNA, 372 bp, Zea Mays
ggtagattatggagcgtcgatctcataacggacgatcgggatcaatactctgtgtaccgattcgcgccgcgtaatctgtggcgtcgatccggtattggacagttaggatctagtcgcgtgtacgttgaacctggacccttgatcacggatccgaaggccccgtttgcgtaccgattcgggataaaaccgatctaatccgcaccgtcagcttgtgatccaacggccgagatctgactgtaccccttcgcgggtcaacattgctaaagagcccctacgcttatcagaaaacaacccgccatccactcatactgtgctctgtgtcttagaaaacttacactgagaaccctgtgcttaccagaaattgacgcccag

SEQ ID NO: 31155 - DNA, 302 bp, Zea Mays
aagaattgccaagaatgcctccggaaagagaagtagagttctacatcgacctccttccaggcacaacacgattgcaaaaagaccataccgcatggcacctacagaattggcagaattgaaaattcagatcatagagcttcaacagaaatggttcattcgtcccaactcatcaccttagggagccccagtattgtttgtcactaaaaaggatggaagcatgagaatgtgtattgattaccgatccttaaacaaaatcacaatcaagaataagtatccattacctcggattgatgaccttttcg

SEQ ID NO: 31156 - DNA, 374 bp, Zea Mays
cgtggaacttgagctcagaggtctgccggtgcacgcgtgggagacttcggtggtgcagcatttgatcaacccccatgcgtgcatatcccaggttctgcccgacacgctagaaatcaggagtctagaagtcttttgatgccttgcttggtgttgtgatcctgaacgtatcccatctaagaaagacctctggatcactgaaccagaccatgcttctgctgctgaagggaagaaggctctggtgtacccggtgaaaattcgttgggtccctgctgatttgagtctcatacctggcgctccacagccgccagttggtggtggtgatcaggacaaacctgataccccccttcatggagaagatgtggtgacaaccctcc

SEQ ID NO: 31157 - DNA, 446 bp, Zea Mays
cggggggtgaacgagctctgggtggcccttttataggcacccagggcgggggtggctgtggccagctgtgcaccggcaagcggcccagcagtggcacagaggtggtgatgggacatcacagcatgagggagagggtggtgccatgcgggtacgagagcacagcggcgaggggatatgagaagtgcataactccactaggggagtaatggcgggaaggaggagggaggacaatggacgaaggcaatcgcgctgaagctatgcgcgggtgagggaggaggtagctgactggcggagtcaggctatcagcggtgcgcgggctcgagagggtgagggagagcgcatgctagcaagtggggtcgagcagcagtgagagagagagggggagcgcgcagcgtgggagagcacgcggggatgggccgagttgggaggagagggggagaccgcgc

SEQ ID NO: 31158 - DNA, 405 bp, Zea Mays
acaggacagtgggtcgacggaggggtgcccacggcagtgcggaaaacggaattactcgggctatggtggatgactggccgaggttagagttgcactaggctcgtgatgaggagacgaagcaagggaggtactaaatttatagaggttgaccacggttattccgaatttgggaagagagcgaagcacggctgcgacaagacattgtactggcgggtccgtcgtggcgccagcaggtgcaatggctccgaaatggcaagtccgggcgtgccacggttactactacgtggtaaagggctacggcgtggcgtaattgaggtcgtcggcgtaccacgacgacaccagcggctcggccacgtcgcacgtctacaggcgcaatcgataagtttcaccccgcgaccaaatcca

SEQ ID NO: 31159 - DNA, 378 bp, Zea Mays
cgctgggagaagaggcctcgtgaagaggtccacgccgctggaccacccgtctctcgtgcccagtgcccgtaccacaaagatatgcgccacaccctctagaactgcagagacttcaagcactccgtcgggaatggccgacccttccaacctctaccacctcccccaccacgaggaggacccggagaacctcgacaacctcagcagtaggaagggggaggaggcagagcattctcgcgtgtcgacggagaggtcaacgtcatcttcggaggacacgggtcgcaagagaaaaaaaggcagcagaagctcaacgatcgacagatactggtggcgactaccagtgctcccgccccctatcggtggtcagaagacccgatcacc

SEQ ID NO: 31160 - DNA, 624 bp, Zea Mays
aggaaatgcacttgtgtacgcttatgcaaagtgcgggagcatagaggatgcagacatggcattctctggcctgccggagaggggaattgtctcatggtctgcaatgattggggggcttgcacagcatggacatgggaagagagcattggatttgttccatagaatgcttgatgagggtgttgccccaaatcacatcacgttgaccagtgttctctctgcttgtaaccatgccgggcttgttgatgacgcaaagaaatactttgaatctatgaaggagacgtttggaattgacaggactgaggaacattacgcatgcatgattgatattcttggtcgtgcagggaaactagaggatgctatggagcttgtcaacaacatgccattccaagcaaatgctgcagtttggggcgcacttctaggagcctcaagagtacaccgagatccagaactcggaaggatggcagctgagaagctcttcaccctggagcctgagaagtctggtacacatgtcctgcttgcaaacacttatgcttcagcaggcatgtgggatgaaatggctaaggtgcgaaagctaatgaaagacagcaacgtcaagaaggagcctgccatgagctgggttgagat

SEQ ID NO: 31161 - DNA, 682 bp, Zea Mays
cccggggataaaaaggcgtggaccggtggctccgctacgaaccctaggaccaaggaccccctaggtttctgccaccaccattaggaccgagagagtaaggaatgggagagtcagggcgctactgctgtggggatcgagctgggctgcatccctgtccgtgaatgggagtcccaaggcatcgcgggtgttcaccgcaaccgtgccgggtcttccctgatgcggtgggatttcatcaagggcagaattcgtcgtcggagttcaatgccctggcgcctcgtctgggttgcggcgatgctctagctcacttttgcggtggacggaggaaggaagaagacgcgactcggatcgttgatccggtgatgggcggaccagattagtggaacacaacactttggccaggggcaatggagtccgtagatcatctagcgaacggatgagatggggttctagtgtatctgttcgctcattttgatcgagccgtagattctaggctcgatggtccggatcgggtgggtgcgcaccgttggatgacgatctggcggccttagtttagtaccggttcggttagggaaagatttaatctgagccctaggtttctaatcggacggctagagtttacccgtaccccttcgccatggctagttttcaaaagagtccccgcagaattccataactaacccgc

SEQ ID NO: 31162 - DNA, 318 bp, Zea Mays
gtttattttgatgatatccttatttacagcaagtctatagaggagcattaataacatttgtgtgctgtttttgatgctttgtgtgctgctcgcttgtttggtaacatggaaaagtgcacattttgcatgcaacatgtctcatttattggttatgtggttacttcgcagggcattgaggtggatagcagcaaggttgaagccattcaggactggcctacaccaacgacggtcacccaaattcagagttttcttggacttgcaggattttaccgccgttttgtgcgtgattttagctccatcgctgcccctttgcacgaa

SEQ ID NO: 31163 - DNA, 593 bp, Zea Mays
acaagggcagcattctgtacaggagtgcataaatcctccaattgttgtacctgtgtcaagactgcatgaagttgagaaggcaaggagggatctcccaataataatgatggagcaagaaataatggaagctatctatgaaaattctgtagtaattctgtgcggagagactggctgcggtaaaactacccaggttccccaggtcagtgtgtgtgcatgcatgatgcttcttgaacgtgtattaaaactaagacttttggtgctgcctgcttgtgttaaaaggctaattgtagtcaaatctgtcattgttacttatgctctctatgttgtacagttcctatacgaagctggcttcggcactagtgaccgagctgatagaaaagggatgattggtatcacacaaccacggcgcgtagctgttcatgccacagctaagagggtttcctatgagttaggacttaagctgggaagagaagttggttttcaagttaggcatgatagaaaggtaggaagtgaatgctccatcaagttcatgacagatggtattttgctgcgagaaatccaggttgtttatctatctacttatctcatttgct

SEQ ID NO: 31164 - DNA, 274 bp, Zea Mays
tgcgagagacgtaactatcctcatgattgcttgtctgcatacgcacatgcaggcttgtccgagcttggctcacgggagacaatcttcccatgtttctgcgcgtgcaggctgagagacacaaattggtctatgttgcaccagcatatacaggcctgctcgctcgtatgcagccatccaaacatgtgcttacttaaagtcaacgcacacgccgtgcatggctgttagcacgcatccaaccaaacactacctatatgaacagatacctgcactgcgc

SEQ ID NO: 31165 - DNA, 298 bp, Zea Mays
aacaaatcagagctttcttttggccaaaacattgtgtcatcttcagtatatatgcctggattcgggcacgatgctattaactgtgcgagcttcagactgctcccgaaggtcacgttgttgttgaggccgaagatgcccttctggctgccgatcatgatttggggcgggcaccattggtgggtggtggtaattgagcccaagaagcttgagagtgacttgctaaagctacagaagtcgtaggttgttggttgcctacgtattctgggatgtatggagagtagcacgaagcagtatggag

SEQ ID NO: 31166 - DNA, 463 bp, Zea Mays
taaggatgctagaacacgaaccagagaagcacgaaccgacctatggatggctggccacgacgaggtgtcttacggtggcacgactaaccgaattggggaaaactggaattctcgggctacggtggctaatcgagggcgaggactggtgcactagctccgtaacaagttagtggagcaggccaaacactcaatttatagagggcgaccaggagtacgacgaatttggaaggagaagagcttgcggtgataagagaatgagtcacaaaagttcatctattgtggcacccgctgatacattggctcaagaaaggtaattccaggcttgccacagttatagctacatggtgaaagggtcacgacatggtgcaatcgcgaggaacggcgaccaccacggcgatgaccatccgaccatgtcactacacaagtggtacgacgaactgagtagtaacagtgcccaagctca

SEQ ID NO: 31167 - DNA, 339 bp, Zea Mays
ctagacacggatgattggctaaagtctgtagagaagatgttgaatattgctcagtgctttgaccaggagaaggttctatatgcttctggtcgtctgacaggtcctgctgctgattggtgagattcatacactgctgcccatgatgctgttgatactatcacatgggcggaattttctactcagttcagaaactaccatattctcgctgaactgatgaagattaagaagaagaaatttctgttgctgaagcagggaaagcatgtcagtaagcgagtaccgcgttaagttcattcagctctccagatatgcaccggatgaagttgctaaagatgagaggaa

SEQ ID NO: 31168 - DNA, 488 bp, Zea Mays
gtggccatgtatgggcgatgagcttggtgaattgcgaagggctgcctgagcgaggggagaacttttggcatgctttgcatgaccttgtgactcgattggtagtacaaattattgcgggccagtaaaatccctaatgaatcaccatggcagcgagggccctaggtcctgagtgggagccgcaagttccgctgtggacttcacggaggatttgtatgccttcggtttcagttatgcacttcagcatgggctggctaatccctgtcttgtacagctgcccctcgactaatgtgaagtcccggcttttgtgctttagtcatttggcctcattgcgattgcttggatggtagtggccttgcaggtatagagttattggggcccgctagtcttcggccatgatgaggttgacgatgtggtggccttcggcttcttgagttatttgtagaccttctgggttgtggacagctggcgtgccgatgacgtggtagaac

SEQ ID NO: 31169 - DNA, 665 bp, Zea Mays
tccaactcgtacctggtcctcttcccctctgtggaacacgctgttcgtgccttggctggtggacaatccatctgcatcccccctcccgctgcatcttaggaggtggtctcgccaggcgtcggccactagaggaggtgtcctgccggtacttcttgatgttgagcttggcgggattcctgcacacctctgggggattgatacggcagagcatctaatcggtgggcactgcatcgttcaaggattgcatacggattctgttgatgggacggacatgtcggtcctgaagctgaaggcgtggggtttctctatggattgtctgccttctcgctatgatctccatgttgaagagccgacgtctattggagaagatggatccagcttccctcgcactttgatttactctgtttctgtgaaggttggtctttcggttgccttgtcagatgaggaacaacctccgccttcctcctcggatgatgatgaagatcgtgataacaaacatcagagacagaggccacaccttccgggacatcagttctcttcggtccggacctcagtgcatgcacggttgggaccccgtatcgcttcgtctgctgggggaggtagaccagttgatgctgctcctctcctgaatgtctcgattgatgagttgcaggcgcctgtgccct

SEQ ID NO: 31170 - DNA, 316 bp, Zea Mays
gaacgaagcactacaaatcgctctgtcagaaccactaatgactagcgcgatggtacagtgattggatcagatcgccaagtttggtgtacctcgttgccggtgacctccgcactgcgattcacgccgatgccacgattcatgccgataaagagtagataaccgtgagggttaaaaagatctcggggaagaaggtcttagccggggctgagtcaccgccatacccacttgcccgcgcggtcggtaaaatatcgccgctggtgctcgccatgattgcagcaagggacatgtagtcgcctgattcaccacattgccgtga

SEQ ID NO: 31171 - DNA, 364 bp, Zea Mays
caaagttataagcgggcacgaagatttctgtgccttggtagcttctcgcgggacgaatgctgcgtttatgaaggcgggatgtactcacgccaaggtggttaacaagccaacttttaatctttcggcgtaagatataattgatatcccggtcgaagcccgaagcatagtgaacaaatttattactaaaatttgggctaagggcgggcgcgagctggctggggatgaagctcgaaaattgcttgattcggtatgagacttttacttatcttttacatttgttttcctttatttctgattaccttatactttcatttgtgtgcaggatggtggcaccgaaggttgttgagtcgaagcttgttccaaa

SEQ ID NO: 31172 - DNA, 2073 bp, Zea Mays
tttactttttccagtagaactgtcttacgattaacatatttccaaccagttttttctccaccatgctttactttttattcctttccaacattactttgttttgaatcatttttttcattgtcatggcacctgtgtcaaggttgggcaggaacttaaaagaagctttggaggtcaggctgctaatctagtgaagtctgctggaaactctgctgcgactcttattgaactgattactcgacattttcctggtaaatccacttggtattatgtttatcgtctttggtcaaaagtaggcaaagtccagtttgtcattgtattgcacaaataagttcatcagctgatagtctccttttgtcccctttctgcccatatgctatagcttgctatctgatattagtttcctgtattgggaagcacagcggtgttataaattattggtccaaaaaaatatttcgttcatttgtcaaatggttatggtggtccctgttggctgtaggcacctacagtgaaagtgaaactggaatggcccatccacccactactactgtttgtctgcatatggatttatgttctgcctgctactttggatctgagagtcaggaaacagtgatgattgatgaactggtgcctcatctaggcatatgaacttcgtatgagctgggccattcaaaaccagatgattgtgaatatttgatgcttacacttacacccttacattttttcatttctcgtgcaaaacgttagtggttttcattttttagcagttggccaagaaatctgttcacatgatttcacttgaagttaacatttattctcggtgttggtgctttcgttggatctccattgatttgagacattgaacatggagtttatttcctcaaagaagaacatgaaactgttcccgtagtgtttaactgattatacttgttcgacaaatatgtccagacatgagctaatcatctgaaattccagtgatttaggagtaattgatttcaggcttccagcacattattctatcatatatggacatatttgattgcacagataggttcactgacaaacatgtacaaatcttaactattcaaccggttagtctgaattcagaaacaaggaaggatgctagttttacccctgatctggccatagccaacttcagaatatttcacaattcgttcttcgatcattgaatttaaattgtaccttgcgctcttgcagggaattttagcatgtattgaatcttttgttaataggatagcgttgtgcaacttgatggtaccttttgctaacgttctatgaacacgtacatctgcatgcattcaaaaccaggttatattttttcttgttttgtactgtcctgagtcatgacatgactcatgaccaagtgtacatccatccaccaaatagtattttaagtttccattttggcaggtttccgggaccattcactctacaaggggcaccaggttttcctgtacaagagagcccagatctttgttgctgatttgtggggcgccttcaagggacaaaactatggcgagttccacgatatcaattccatcaccatatttgctgactacattgttccagcggtcctgagggagcttggagtacttaaatatggctcgaatctatcttgctccatcgactcgaacagtgagatagtgcctggaagcgaggaggaagtggagatacgcgcgtgctccatctatgcagtggagaagatgagggacctgatcagtaagaagtttggaaagcaggtaggcgcatctgaaccagtttcgcctgactacctgagacttccattcattaggcatgccaatgccgtttgctttctgacctgcattctcggtgggccgatttacaaaaaaaaaaaaaaagaaattcactaatcttcatagccgttgaacttgaacgagttaaattaaccaactcataaagcagtcactcgatacgtgaggttcggctcggaactaacgccctcttggtctcgtgttttctcggcagcttctgagcatcgacattgatctctggctctggtcctgcggcgtgcagaacatggcgctgtcacatcac

SEQ ID NO: 31173 - DNA, 288 bp, Zea Mays
cgggaggccaacactctttgatatagtgccgacaacctttgccccagtgtggtcccgaaggcatcctaagctttcttcgttgactcccccgaagattaacgcacctggtctgtacccgcaagatatagcatactctttcagttcgtctttttcagccttcgacaattcttgcccaagtatatcttgaaaattgaagtccttttcttccgaaatatcctcggctttctcctttccttttccagccactgtgcccgggatctcttcagcggctgcaacagcttcttccac

SEQ ID NO: 31174 - DNA, 699 bp, Zea Mays
ccctagcacccgcctctaaggcaccctcctccaacagccagcagagcaagacccagtatcatggcagggcacgagtgaaccatgtcgacgagcaagaagctcaacaagccccgggagtagtgctcggtgagttcctagttgaatttactcccgctgctgtactttttgattcaggagcatctcattcattcatagccactagttttgtggaaaagcatggcattcccactgcacacctagaaattcccttggtcacccgaaccctatggtcagaccttctatgccatctcaaatgctcccaagtcaggattcttttaagtggggtagtgttcttggcagacttagacatctttccatcccatggaattgatgtgatcttaggaatggattggttaaccaagcataatggcgtcataagttgcagataagaccgttcttctcactaaccaccaaggaaagtcagtttcatgtcaggctcagccacccgcccaagatccaatggtgtttaatctagcagcagaaagcatatctatagtagaagaattcatggatgtattcccagaagaattgccaggaatgccgccagaaagagaagtggagttatacattgatctaattcccggcaccgcaccaatcgcaaaaaggccataccgcatggctcccaccgaattggcagaactaaaactccagatcgcagaa

SEQ ID NO: 31175 - DNA, 334 bp, Zea Mays
ggaaataaggtccgctatccagttgatgacatcacaaggcatgtgtcatgcacactagttataagatatgttattaacaatcagcgtacaaagaaagtagccataggccttgcgatcccaggacgcaagttccatggaaacgacattccagaagaatattgcagggtagaagtgacgacagtcgtccaaggatacgaggacgacatgctagacatccctaggcccgaaggtatcgagacacttggacaagctatcaagaattttatcctttggcctcgaagggatgtcgaattggttgattggtcgaattcgtcgcaggcccaaccgtctccgc

SEQ ID NO: 31176 - DNA, 297 bp, Zea Mays
caaaagtactagtggtatgggctgaagagagatgtggctgcacatgtagctatgtgtgatgtgtgtcaaagagttaaggctgaacaccagaggctagctggactactgcatccactaaagatacccgagtggaagtgggaagagattggtatggatttcattactggattgcctcgcaccccgaaaggatatgattctatatgggtgattgtggatagattgactaaagtagcccacttcattcgtgtcaagactacttataaaggctcacaactggcatagttatatatggctcgg

SEQ ID NO: 31177 - DNA, 510 bp, Zea Mays
ggctggtctacttttgcataacattaaaaaattggcatgtgacctagagtcgtgtagtgattcagtgttttgtagtaaagcataattgaggtgtgcagttattaagtgtgccagtgctactgctaccagttaaatttgtttctccaattactggtaccagtgaataagtgctactgctatcatagaattatccacaaataataaagtgtagcaagtgcacgatacaaaagagattcttttaaaacagctgcaataaaaaatgattcgcaccatctaactaactgaagcatagcttacctgatgaaacaatggtgtgattctgtccacgtgcaggctttcctgatgaaacaaaacacttctcagttttcaaagtcaactcaactgaaaatgatactaaaattcacatctggaaaattcacagaaaaagtagaaccctttttcagcacagatcagacagataaaaactctgaaaccagcgaacttttgcaggggtacaccgcacaagctaca

SEQ ID NO: 31178 - DNA, 557 bp, Zea Mays
aatgcatgatcgagcaagtatttgcctaggattgctataacaatattgtagctggatcttaggtctagaactttgctaaagggtgtcgatcatgttactgcacaaaattggaagttattggctctgtaaattcccctgtcagaaaccctgatggagcatcccatggtacagtaacccgtgtggatcaggttgccagcgcggcttgctcaccgccggtgacctctttgcgccaaattcacgctgccgccgtcctgattcgagtgcggtatggagtggataacgtcggggaggggtaactcgtacgtggcaccatctcctgagctcggccggagttactcaccggcggccgccgtgactcagtgaaattccgtcgcggtggcgcgcatgccgtagttctccctcactgtaccttttaccgacgtaggcgacgtgcgcttgtgatgctatcctcggtcgcgaggtgaccaccgggccggcgcggctataaatagcccatgctccgcggcgaggtttgagcatcgcgcacaccgtaggttgaaccgaagcagaaattcgtg

SEQ ID NO: 31179 - DNA, 328 bp, Zea Mays
tacggtttgaaaatgaacccacgtaaatgtgcttctggagtgtcggctggtaagtttttaggacttgtcatccatgaacatggtatagagatagaccctgaccgaatcaagtctatttggaatgtgggacctccgacctataaggtcgaagtgcagaagtttctcggcaaggtgaattatttacgaaggtttatttctaacctagccgggaagattgatgccttcacccctatccttcggcttaagaatgatgccgaatttgcttgggggcagagcagcaggaagcatttgatctcattaaaaaatacttgtcttcggctcccgtatt

SEQ ID NO: 31180 - DNA, 312 bp, Zea Mays
gcgtagtgttgtgcttctagcatctctccttgggatagttcttttcccgaagcatgacgaataatgtactcaatacttttgttcgaagcctcgcgagcagaagtttcgatctttccagatgcaatttgctctgtcgccttttcttcaagtgctgcaggctctttctcagtcggcactgaaggcccagtctcggcttcagcttgaatttgtgcagcttcggcttgcttagtttcggtttcggcctgcgatttggtttcagttggaacaactttctttgcgagtgcaggactcaaggccttcgtcgtttccaac

SEQ ID NO: 31181 - DNA, 283 bp, Zea Mays
ggaggtggttcagcagataggtagtagcagttagccccttggcccaatagcaggcgggaagggaggcctagaaaagcagggaacatatgatgttgttcatggtgcagatcatgcgtttagccctgctattatggcattaatatggtggtaatccacacaaaatcgctaggtgttgtctttctttttgactagtaacacagaggatgagaatggaccagcacttggttggatgataccattaagcagcatgtcgtgcaactgtttctcgatctcatccttgagg

SEQ ID NO: 31182 - DNA, 906 bp, Zea Mays
aagaggtaaagtataggatataaccacgggtgagataagtaagagaccatgcttgaactaaggtgggagattggaggttttagataacgaacatagcgtaatcaccaaggtaagattgagagatgagaagggtaaaggcaataagaaacaaaagcacaacaaaggatgaggttacaaactcgcgagccaaagaagaggatacggccaagagaaagaaggtatgagacgaaagaggggcaattttaaagggaaggtatgagacaaacatcaatgtaggatatagaggtgtcaagggtgcatatgataataattaaaagcataacaaaggatagagttaaggcaagactcgcgaaacgacaaagtggagaaaacaatcaagggtcagataggtaaggttccaacagaagggtttaagtaaagattcattaccgagtggagttacaaggagacaacgggatcaccaaggatatgcaaagtagaatgaccgctcatggatcattaagaaacaagggtggtcaagggcacgttaactgaaatgtcttaaacatatattgggatataaaggtaagcacatataaaaataagagtaggcaagattccaatggtacgagcataccaagaccaagggcatagaaattgtcgaaagatagcgacttacaaccgaataagaaatgatcccagaagacaagaggtcatggacacctaaactgaactgtttaaatgagcaatagaggtacaagggtaagtactttagattaagggataagggtattaaaaacgcaaggatacaagcatgtcaataacaaaatggaatagagatggtcaaatagtagcaatttaataatggatgaggaaagagtcccaaaagactaaaggctatggtcaggggcatctacaaagatgtcg

SEQ ID NO: 31183 - DNA, 539 bp, Zea Mays
cgactctctaaatttgagaagaaatgtgatgagggttttctacttggatattcatcaaatagcaaggcttatagagttttcaacaagactcatggtattattgaagaagcatatgatgttgagtttgatgaaactaatgggtctcaagatgaaagtgataatcttgatgatgttggtggaactcagttgagaaatgctatgaaaacaatggttagtggtgaaataaagccaaaggaagatgatgatgataatagtgtggttgtcattccatcctcttcaaccctaaatgaagaaaatcaccaaagccaacaaaatgatgaaattatggatgctcatgatcaagatacttcaagtcattcggttcctcctcatgcttcaactagcaattctcaaatggtatcaagaatccatcattctattgtgaaggccacccagttgatcaaattgtgggtgatattagtaagggtgttcaaactcgctctcgtatagcttcattttgtgaacatttctcttttgtatcttgtatggaacctaaccgt

SEQ ID NO: 31184 - DNA, 439 bp, Zea Mays
ctttcgtggcctgactcgatgcgactgtctatctcctttaaacgatgcatgctttttcatgaataccatattttctcttgtgttttcttcttcaaaagcaccttcagagttctccctcccctctccattattagatctggttaaggtgtcaacttcatggttcatggctgcaagacatgtggaaaaactcctcataaaactcaaaagaaataaatactagcattttactgttgtactgaatgtaggaaatactcacattttagcttcttttgtggcctgactcgatgcgactgtctatctcctttaaaagatgcatgttttttcttgaataatatatcttcagaagcactttcagagttctcattctcatgttcagaattgtattcactttcatgttcataatcagactcactttcattacaataattctcactgtcat

SEQ ID NO: 31185 - DNA, 320 bp, Zea Mays
ttgatttgtaaattttgtagcttcccttttatgaagaatgatttcgtctcctcctgtgttaattactttgcctcccggtcagttgacgattgctgcgacgttggtgcctcgaaggtagtggccgagtcactcggggtcacattgtcgctttttggggtgacgaccgagttattattgacaacattggtgcttctgaagtagtgtccgaatgatggcagggccacatcagtgtttttagaattaacgaccgagtggttactggtgatatcagcgttatagaggtaaccaccgagtgactgatggcaacgtcggcgttttag

SEQ ID NO: 31186 - DNA, 413 bp, Zea Mays
ctccaatatttcctgttctatgtggtccaaccctgcattcttatttctccaagaatcgttagcccacaagcagttgtcattaattaccaaaacatcaccaaaggggcctagatgattcacaatctccccctttttggtaattgatgacaacactacataatatattaaagagaagtttagtttttccaaatctccctcataccttaggtataagatagattttggagatgagtttcataggacttatcttgatttaaagttctgtccgagagatagataaatcccaataaaaaaactcagtatgtaagaaaggctccccctaagtgtgtgcaggattatttgaagctgaagatataacacatataatagatcggagttttgatggagactttcctacaaacatggttatcaag

SEQ ID NO: 31187 - DNA, 504 bp, Zea Mays
aggttcgcctaagcctgctgtgtacatgttagactgttgtcgatgagacatgtcgtcacaacggcacaacagggttaagaattggcgcgaatactcttccacggtgcctgtgtgcttcagttcttttaaattagccataccattgaacctgagtggtggcccgaagctcatctggatgaactcaatgaagcgtgtccaagtcagcacgccgcctagatcacgctccaaggcatagaaccattccgcagccacaccttccaagtgaagcgatgcttgccagaccctctcgtcttgatgaactcccatgccgcgaaaatatgtatcacatttattcagccatggcaagggatcagaatcaccatcataatggggaaaagaaaaattgggcctacgtggtcctccttcgtcgtggcgatcacggtgtccaccaagaatgccccggcgaccacttccatatccaccgtcgctgcccccagatgcagtttgccctgcaccaacatggct

SEQ ID NO: 31188 - DNA, 345 bp, Zea Mays
tcagattttgaggggaagatggtgaggtgatatatagacatggacaacagaaccgaggtgactaatgtcaaacacctgactttgtttaatagctttcctttctgtaggaacatatgaggaggctagaactgcattgattcattgcataacagggtagagaggttacacatatataggcaaggatcacagggtttatagaaatacccaatcacagattgatccttgcctaatcagctcatataccctacctattctggttagaatacattgggaaggtaatcatatgtctagccctgattttagcttaccaaaactgactaacactttccaacctggaagtctctg

SEQ ID NO: 31189 - DNA, 394 bp, Zea Mays
ggtgaactggctctagctgcatctgcagcggaggttggagatgcagcaggatggtgaaaatttaggttcattcttactcttcttgtgctttctttatttttgttcatttctgaatttaaaatttatcgcaaagatttgataggcaacaaattcttgctttctttctaattccccgtgtaaagaacttccatggttctatgaaattgtactgcgctagagcctggaatagagtgttcttatctgttgggttgggtgaataagtgaaagtgcatacttcgttgtcatctttggtgttaccataatattatgactgttttagtaattccttgatgaatgtgtttactttgttgtcatctttttgtgatgattgtgttatcaatgacacagaactgtt

SEQ ID NO: 31190 - DNA, 365 bp, Zea Mays
gtgcagtctagattaggtcatacaataccccttcatgtcataaattctgggtcatcgagattggatccgagggctcggaatttgtgaaagtgtggtcgtttcaagggccatcgatcttctatccgatgatcacttggttcctactggttcataaatacctagatttaatcgtgacccttgaagtcagattggacggatcacgattgccaataccacttgggtcggggaagtttgctaaagagtcctttgtcttttatgaaatagaacccaccgtccacaattgttgaaacaacataacaaataggtcattttatttaggaattagcccctggcttttggtaaaatggaactcaccatctatgtca

SEQ ID NO: 31191 - DNA, 310 bp, Zea Mays
gaaacacggtcttattagtattggcggagctgtcactatgacagcgctcatgcaaagatgtcatgaccgcctgactcctagctttcgtgctaacgaggtcgactcgcttcatctgcagcttcgatcgtcctcacctacctccgatatccacgtccacgacccgtgcaacgcctgcttctccacgccgcttcacttccctcccggcccgcacccctatatagccaaaccctagctgcccagcttctcatcaactaaccagctctcgcctgcctcctccatcatcttcgaattcttcatttcttccactgac

SEQ ID NO: 31192 - DNA, 325 bp, Zea Mays
caccaggtgtggtggacgtgagcgacaagagctggcgaagtgggaggtggagtggagactatggcggaaggagtgggggggcagaggagcgaggtcgaggcgcgaggcaatgaactctataggcaatctgatcagaagaaatctagagctagcctccctactcagcctgatctgcagctactgccgctgcaagtgctgcacgtgtggctctgtccatacgccttttcttcctgccctcttgctgctcaagatagacagtcttgcccttgacctatctgaaggggagaggagggtccttgtcatctcctcccccaggtggtgtggc

SEQ ID NO: 31193 - DNA, 484 bp, Zea Mays
tggccggcggacaatctgataccactcctactacattagtgcatgatttttgtgagacatagattcttattaaagcacgcctgtttttaattatggtttcatatcacatgatgacattataatggagtaattgttggataaagacatactttttcctctcgagccccaaacctcgtcctaacgagatggaatacacgttgagatttcaaacgaagagtgagggagagagtatctgtttcctgttaacataatttcttattgcctctcaatgtttgtttcttttgggttcgttcaacattcaacaggaagccttacacctgttctgttcaagacggcaggtgttggtgtttcggttgcaatagagtgattggggaaactgatcagccagaattgttggtcaaccgatgggaagcaatgaccctaacacaccctcgaaggcttcaaaggcgtcagaacaagtacttcaaacagtgataacacgctt

SEQ ID NO: 31194 - DNA, 290 bp, Zea Mays
gccattttccgctgaagcctatcatcgagtcctctcataaaacaattctttttcatcagatctgtattcacttggtcaatggaatactaggatatatgattgagcttattgagatacggcattacagtatctcccccttgctttaaccagatgaactcttcttgtttcatatagagcactccttctagaacataatgctcccggaatgctagcttgaattgttcccaggtaatctgatgcccagctggttggattgctaaaaattttgcccaccaagtactggcaggccc

SEQ ID NO: 31195 - DNA, 392 bp, Zea Mays
gcaaggtaggtggaccgactagtaggctcataacggtcatgcaaaaaaggcgacatctgatgttcaaactcaaactcaacaatattagcaacaagacgaccctccatactagaggctagaataacactgacacgaacatccttatccaatcaagtcatgtaagcactaaactaagagtcataggaggaatctgatcatcatagtctgcgagcaactcctcgtcagtagccttctttagaatcacttgcgatgtatgagtagtgggacaagtagggcacaacgaatcactagtgaggaactcccaaaggcgcaaaccacacatgtagacgcatgcatgaaacctagccatgataattggtgtcattaaaagcatcataaatcatagaactaga

SEQ ID NO: 31196 - DNA, 390 bp, Zea Mays
gccaacctcccaaaccattacgcattttgtgaaactgccaccattgtgctgcagtatgttccaaattcatcaatgcaactgaaacccacatagcagctggcacactgaagatcgaaaaatattccaaacaattattcaaccataccactaggtcgccttcagagtacttcggaaacggcagcttcggtagtggctgatgatactgctccccatgtggacgtggttctccctgaccaccatgcatgccaccatgaaaacctcatggtggttccctcctttcctgtcgtggcctgttgaatggaggaactggtggctgatggtgttgctccccttccacagctgctcctggcgtttctccaagttctttgctcctgttttccagtcggagtt

SEQ ID NO: 31197 - DNA, 457 bp, Zea Mays
ctttcttagattcgcggagtccgtagcgtcgtgtagccagcttgggttagggaagtactgtgcccaggcatcgattcgagtttcccagtgattgcgccgctgggcatgcgtgcgccgtcgttttggaccaccaaggttgggggagatgtgttggggtcgtgtgtccgtggatcgacggtggtgatcgagcggtcgtagtgttttggccgaaccaagaaatagtcattgattctcgatccatggggtaggattgaaggctggatatcgcttcaccctgatggattatgaccaaggatcctcgtgtggacggacccgatgcaatcttgtgctaatgaaattggaaccgaagattcccaatcgtgcggtcatcatctcctactggttcgggcttgtgccagatctaatctgggtcgtagcttttaaatccaacgactctcgttcatccataccccttcgg

SEQ ID NO: 31198 - DNA, 336 bp, Zea Mays
gtgggttgtctcattctctccctagctcatcgctgagggtccatagaaagcttcaggtgtccttgggccatgcttccgctccttagagcttagggtagagggatttggatcagcttgtgaaacaccaaaaggcccatcaagcccaactgactaaaggtgatggtcaggctattcgctagtatgccctatctagtcttgattatggcccatctctagtgaaaggaaattagagaaacgtattaacatcagggagtcaatcgatggtctagtagtttccaaggcatctcctgttggctaaagatccactaccttttgatctatcaccatattttgaat

SEQ ID NO: 31199 - DNA, 1020 bp, Zea Mays
aattatgaaacatatttttatattaaagaatttggaaccataaatatgaataccatttaccaggaaccataattatgaaacatatttttggacagccatattgtgcccagaagttcatgaatttctcgaaaaactaggatagtccaaagcttaatgagcttcttggatttagcttgtgcccaaacgctaccaacgctgcgaagacggacgcatctcacttatccgaagcatctgtgaagactgaagagagtttggcattatgcttgaatgtaaatgacatgaaatatcattataacaaaatcgcgaaagctaatttgtaaaactgctaatgttatctagcataaatcaagcaacaggcaaagcgtacatagaacagcggttatgtaagtcgatttcttaagcaaaaccaaattggcatcagaagggatgtcatgtattcatatcaccgcgggttgggctacaagtgcccatgaactgctcatagcccttgcgcaataatcccagcatcacttgccattggaaaggggtgtgaataaatcttatatctcaggaaaaaatgccaggtagaaacggcaaattaaatgctttttttgtagaaaactgaacaatcacaagactacaaagcaaatgaagtttcctcgcaaaagggtgcagatccaggaccgaaaactgctgccatcagaagggataatacatacatatgttgtgatctcatcgcattcggcaaacacaagccacgaattgctcaaagcccttgcgcaatattcccagcatcacttggcagcaggaaaaacacacacgtagatttggggctacaaggaaatgaacgaatgaagcaggcacgcccaaagactgggaggagagacgaggtacacggggacacggctgtgtctggcaagaagcaacaaatctcccatggttgctgccttgctgattggaggcggcggcggcgttccgggcacagcggtagggttaagggggtggcttaacgacgacgcgtgcgcgagtcatgggctaaat

SEQ ID NO: 31200 - DNA, 402 bp, Zea Mays
gatcctcgccaccccttgcgcctcctttctgtagctgccagcgtagtgccacccaggcaccccacgtgtgtttctgcccctcgccggcgcagtcctacccagccacgtgcgtggaggaaggatgactatgagattaggagagaacaagagtgattgacggcggctgctttgttgttttgtacagtgggaatagggtatcatgatttgtagatgggttggatgggccataaattgcagcccatattgtgcagttcgttaggggagagagcagatgtgccctttcattgtatagtgtgctcatgattccatggaatggctcaactattctttcattattattttactaatgaataatatgtaacgtttaagcgtgtttaatcaacatttaagcattctgggtgc

SEQ ID NO: 31201 - DNA, 345 bp, Zea Mays
acggatttatgcaacggccggtgatcccgagtggcatacaccggattaaaccctccccaagtacttcccctaagttaattgcacaaatgaccaactaatgaactctggccacggtgaccgtgagcagtgcggacaaaggaaggtgttcctggcgataggtgatggtccagttcaattaaaggggtcgaagagcttaaggaggacctagggatgctagaacaagcagcagcgggacttgagctcacctgaatcgagctggccacggtgaggtattctttgcggtggcggaaaccgaattggggaaagtagggaattctccggctacggtggctaattgagggggag

SEQ ID NO: 31202 - DNA, 788 bp, Zea Mays
aacgaattggggctaggcgcggtggaatcgaagggcggagagggaggatgcagtgcctcatgctgtgcaattgggagggggcggcaccggcctgaccatccccgatctatgttgctgcctcgccccatctcctattcatgtccattattccttgctcctccaaatcttttaatgcattttcagaggcacgcattgctgtttgactgttgcttctcgactgattccatgggtgaggatgagtatcgggattacttgaggggcattgtcgcgcaattgtaggaattttttccggacacatcacttatggcatccaatttttggtctagggacaaaagaagccggatatcagatattttatctgagtatgacatgacagtaatggactacccacaacagtatgaaggatgtccgctgcttcagctcgagatgatccaccatttcttgaaatcatgtgaaaattggctatcagtggaaggacaacataacatgcttttgatgcattccgagagaggaagctggccagtgcttgcattcatgttggccagactgcttttgtatcgcaaaatatacattggcgagcagaggacactagaaatggtctacaagcaggctcgcagggaatttatacagcagttctttcccttgaatccccagccttcacatttgagatatctgcactatataacaagacaaagaggtggttcagaatggcctcctattagcagacccttcatcttggattcaatagttctccatgttgttccgcggtttgacgcagatggtggttg

SEQ ID NO: 31203 - DNA, 276 bp, Zea Mays
cacccaaacatcgaaatagaattttccacctatcaaagtagcttcggccgaaggctccttagcgttgtctatggagaagacggtttctgcctgggctgcagctttaacatgttcacaaccatttttctccagaattgctgcaacccctcgagcactggcgaaggcgcagaaatccccacggtcgctaagtatttcgtcaaaagcttcagcttcttcgtcgatccattcaacgattccttcaggatcgcctctaataaatttttgctccaatgcgta

SEQ ID NO: 31204 - DNA, 376 bp, Zea Mays
aaagcatagcagaagtcgaagccaccaggctagaggacattgatgtactcgaggaagaacggctgaatgcagtaatccaatcagcacgataccagcaaactctaaggcgctatcatgacaaggccgtgcggcagcgatccttctcagtaggagatctcgtcctccgccgaattctaatgggggagggacggcacaagttatcacccttatgggaaggacccttcgtagtagcagaagtcactcggccaggatcatatcgtctcactcagatggacgacacagaagtcgggaactcctggaatatagaacacctcaggaaattttatccctagctgtatttcaaaagctatcgagacgacgatgtactctgtaaaat

SEQ ID NO: 31205 - DNA, 501 bp, Zea Mays
gacgaccgtcaaagaagtaatcgacacgtggagttcctgaagaagctgccgcaaccagcaacactcagcaacagtgtgggccacgacccggtactcagcctccgtgctggaccgggagacggtagtctgtctcttggaggaccaagagatgaggttgtcgccgaggtagacgcagtagcccgaagtggagcgacgagagtcaggacacccagcccagtccgcatccgagtaagcggtgagagactgaatggggccgacgcccaggtgaagaccggaggaaagcgtgcccttcaagtagcgcaagatccgtttgagcaaggccagatgtggctcgcgcgggtcatgcatgaaaaggcacacctgctgaaccgcgtatgccaaatcagggtgagtcagcgtgatgtactggagagcaccgacgatgctcctgtacatggaagggtcggcgactggagcaccaacagtcgcggagatcttggcatgagtgtcgacaggggtcgt

SEQ ID NO: 31206 - DNA, 467 bp, Zea Mays
ttcgtccgtatctcctctacgtctagcaccacttttcagggagtttagcgcactcaagcgatgagttgcgtgtcaccagtagacctccgccgtagggaatggcggagccgccgtggccgcgtgcggaaggtggaagatggccactagccgttgatctgatgatgggtggccaagattagaaggtagctaccccttaggttaggaagaacctggaccgtagatctcgcgatgtacggtagaaatctgatcgtgggttcattaaaccgagaccgtcggattcagatccaagagctatggctgcataccggttcggttttaggcgatctaatctaggccatagactttagatcgtgcgactcacattagatcttaccccttcggccgtcatctttacaaaagagcccctccgtttcctcattatcaacccgcagtcctacagctggctctctgagtcttaggaacatttg

SEQ ID NO: 31207 - DNA, 272 bp, Zea Mays
atcttgttcttgcttgtttctttgattgctcgcaggaatagaacttcgtgttcaggttgattttgccaccagcaaggtcaataaccatttggagatggttttgcgattgctaaggcgccacgacctaggtcgttcgtagtcggatcgcgagagtcacctcctccaccaaataaaattattcacctcactaaaagatcaggcactccagttctatcaaatggtagtagattttcaggttgctctgtgagctttatcaagttgtatccctttag

SEQ ID NO: 31208 - DNA, 503 bp, Zea Mays
ctttgacaaactgcaaaaatattgagaacaagggtactgtggtctattgcttctgtttgttatagtacaagttttaaatccagataaacccccctaaatttcgccacctctagacaataggcaactaactatcagtaactcactgtccccaatttactgtcctgggccagttacggatatgtgctgttttcttgccctcagtcagtggggacttggtgagggtcaaacgtggccatgctttcccccctgtgccccctctcctttcatacctaagctatgccactgctcctaggactgaacatgatttcattgtttgagggagagccaaatctggcctccaccactagcattctaacgattttaggcaggggtggatgagaaaacaaataacacactggaattgtggtcctgaacatgcttcggatgacagatttgtgctttagaatagctcacatacaaatttaaatctagggaaatgaatgggatacagttttagacctctt

SEQ ID NO: 31209 - DNA, 701 bp, Zea Mays
ctccgtcccacttccccggctatagagttcagtttctctccccactttccccatttttaccgcacctctctctttctctctcctccggtcctccctcaaccccagcagcttcgtctcccctcccctctccccagaaatcggaactagatagatagatcagccctatctttgcctcctcccggacgactcggcgcaaggtcgcagcttttctctcgatctttcgcgcttcctctttttgacgcttgctccgcatggggttcctggagatctttggggcggttcgctgctgagatggttcgccgcatcacgcgctgctgtgactctcaacaggtgggcttccgtagactttccactttcttactccgatctactgtacggagcagccggggagtagtattcactaaccttctctgccggctgagagcgtgagctcggtggaggagtcctgatctagccaaagattggatttttgtggggttgattcgaggtgttttttttcttgcgcgatttggtggtgtgggcttccttcctttcattttcgtagcatctatctttatattccttccgatttcgtgtcacttctagtccatatctcgcactagtgatgacttgcttgactagtttcttgactggtttcctctgtttatcatcgtcgcttcagttcttccgatccgacgagccccggtgatggacggcacgcc

SEQ ID NO: 31210 - DNA, 362 bp, Zea Mays
agaaaactctaaatctggcgaacagttatgggtggcttccagttcattacttcttgcaccttatccggatccactgctattcccttttgagagatagtgtgccccaagaatttaatctcctttagccagaaatcacactttgacaattcgacataaaggcgatgttctctcagacgttggagcactacatgcaaatgaccagcatgctcttcttcatttcttgagtatactaagatatcatcgatgaagaccaccataaatttgtccagttcaggcatgaagactgaattcatcaaatacatgaagtatgctggcgcatttgttagcccgaaagacatcaccagatattcatacaacccata

SEQ ID NO: 31211 - DNA, 513 bp, Zea Mays
aaaatggactagcacctcaatcgatagggacggccgggtcacaatcgccactatcctacccactagtacatactagagcagccgatggcctcctcctccgtttcactgctcgtcaccatcatgctgctgctgcagtcgtcatcacctgcttgctcctcgctgagttgcggccttgactttactagcgtggcgctgcactcctgccaggagacggcaccacaaaatgctactgcctcatgctgcaacgccctcctctattccatcgacatctggccaattcatgaattagaaaaaggtctttgatgcctatatgtgtacatggtttcaaggaacactacctttgatctgcctacgtcttacgtctcatgcggtggtaaagactcaagtaatgtgctgcagtggaatgtcatcatccctcgccctacagactgcaatggtaagtctcgaacattccttaattaatcactatgtactccattccatcatattattattatactacatgcatactcc

SEQ ID NO: 31212 - DNA, 345 bp, Zea Mays
gtaaaaaccaagctacctggaggttggaaaagaacgaaggaactcataagtcgtgggaagttagttgatggctcgatgaaggatcaccaaccggaacaacctgcaatgcatcagtggggaccagatcagtatcatcagcaggagtcaaaactctgtcatcaggtgcactagcctctaaggcgacttcctgacccgaagcttgggctgctgccatgcaaccagaatgcggaggagaagaccctacgtgaacgtccatggaagtgtgagagggagaaccagctctaacaccctcgggggctgggtcatagctcgcgctacccatccgagccgggtcatccccggcaa

SEQ ID NO: 31213 - DNA, 291 bp, Zea Mays
ctcagcttcaaccttgtctccatgggtgtttgacacgaattgcactctttcatcccatttctttccagtatctgtgctgcatatgctccttggctgagtgaaattccctctttgctttgctttacttcagtacccagataataccgaagcaaaccaaggtctgtcatcttgaaaacagctgccatctcctgcttgaaccgcttgatatcttcacaattggtgccagtgattatcaaatcatccacatataccccaatcaccaactgtgacctgctgtcgagatgccgttgt

SEQ ID NO: 31214 - DNA, 967 bp, Zea Mays
tgaaaatggagtttgaacttaaaattttgcagaaggctgaatgaatttcgtaccacctgtacacaacttttctgaaacttatgttaaggtaagatgaattgagcaatgagcactgattacctgagaaaagtagcaaacagttactgtatttgtagccaatatctgataattttctattatttaagctgcccaagaattgccataacgcttttgtgaagtgtctagcatggtctaacttggtactaacctagcaagatcaaccacccaagttcccatcccctgtttctcccaatgatcaatgaataactaactaccccctccacctccagtcaaacaacttatgaattaacgatgacaagcatcaagcaagcagtacctttcttgctggaatggccaaagtaaagttgctgagcacttggacgtctgggcgggatgggtatttgaagcttacatgcctgaaatctatgttgccatcaactttttctataatcacgccttcatcactagtcgagttgattttagatctcctgtctataatagttagtattgaaattgtggattcctgggcttttgttgaatctgttgccgttgcacttgtttgggaaactccaaaagctgtgaaaatcagagcaaaatagacctgccagttgcctaaatttagtcagttgctgaacaaaatgtcattgtttaaatgatcccaaatgcgtatctcttaccctaaaaacgtctttaaaagttgtttttccttcgtgtacgaacagtgcaccaacatagaaacaaagagcatatgtgagatacataattaagtttgataaactgaaaccaaggcctccaaccattccacttctaatgccatgtttcattgaagcttggcatttttggatgtatgatgtaattaccctcttctctgcacagaaagatgctactgtttgaatactaccaattgcctcggttacgacttgacttg

SEQ ID NO: 31215 - DNA, 692 bp, Zea Mays
gttcaaagcaaggcctgtcatggaacttattccaacacaaagattgataacaactatgctggctgacagaaagtatcagatgttagatgacaacaggcatgtgctttggacaggactaattcagatagagtttgcaaaatcaagaaagatttcactgaagggccttcttagttatgataacttaggagttattaatggactgaacatgctgtgcttgaaaaatttatctttgtccacaagttctccttcagaagattcttcaagctctcctttacaagagtctctctttgaagattttatggagatggttctgcagaaggagttgtcatgtagtatctcaagtctacctgagtatcgggattcgctttttgagaccttgaaaaatcctgcccataagttgcatgatgccatataccattcagcatttctctcagatgaagagttctctaatctatgcattcacattcaccgtctcgttcgtcatgagatgttgatgaggaatcaaggaactgaatcatgttcaatctgtgcacatctaaatgtggcatattatgaccaagatgttatctttacttgccagggtcacttcatgttatccaattttcttggggtacattccaaattggttaaagggaagccaattgctgggcagtatcatagcaatccttctttgaacatattgccatatcgac

SEQ ID NO: 31216 - DNA, 520 bp, Zea Mays
atcgccggcaacttacatgatgctgatggaatttctatccggttcattcgtcttcaggatgtcggttcacatcttggtccgcttcaccagccctgaaccggttcgcatcgtcttcaggatgtcccaggcctcctttgtcgtcgctttcacccccaaggactggtgcatctctggaggaaccactcgtaggatcgtctccatagcccaccgatcctcgttgcgctcaacgttgccagtgtcgactgccttcgacagtccacacgcatccatcatgaccttcatcatcaccacccagttgtcgtagttggtgcgggtgagcatagggtatggtgctccgcctccaacatcctgcatccttcgctggatgaccagagcactgcctccgccaccgcggttgtgccccggcgagttggatccttgccgctcccggcatctaggggactaggacctcgtcacacgcgacatctcctcaggaaccgaggcttcaaaccaggcttcgatgccactgttaacaaaacca

SEQ ID NO: 31217 - DNA, 413 bp, Zea Mays
cggggatgaactcacagtgatgtcgagatgagtcaccggagttcgtctaacgtggcattcgatggggtaaagtcacggggcagcaaatgggctatccactatgacctatggtgacgtggtaacctggtctatggcatggcatgtcatgaccgagataatcgatggccaccacggcgacggcctcacgaccacgtcgtcggcaagtgggtacgacaggcttgcttaagggcccaagttcaccccctcggcgatcttttcaccctccccaccgatattttcacgttacagcacgcacacaactcaaccatcacgtggatcacgacgcacgatcatcggcggcgaagtgctctgaatccttgatcttttccagttattgtaccatgtcacggtcgatttagggtgcctcacagagc

SEQ ID NO: 31218 - DNA, 388 bp, Zea Mays
gtctggccgagtgaaaatgtactttaggctcttgtgatctgtgaagatatgacattcgttcccaatcaggtagtgcatccatatttttagggcatgcactatggctgctaattccaaatcatgtgttggataattatgctcatgcggcttgagtaggcgtgatgcataggcgatgactttctcattttgcataagcacacatcccaaaccttgccttgaagcatcacagaagatgacgaaattctggtgaatatctggtactttcaatactggcgcggtcgtgagtttcttctttatgatttggaaactttcctcacactttggggtccacacaaatttattgtctttcttgaggagatcggtcatgggtcttgctatgctggagaac

SEQ ID NO: 31219 - DNA, 338 bp, Zea Mays
gtttagagaagaaattgaccggattagtaggctagataatcgttctataaagaggggtcaatggctttggtcggtgtaaaacttagtgcgtcatagagcatctagtagttgcatttgcatgaggactgacatcgctttggatttcaagagttaaaatctttttgaaagcgtgtttaaaaagcatctaagttttggggtcgtcggaccatccgggccaggaggccagactgtctacgatccatccaaaggggtccaaagttgcacatgcctccgtgtccttgtgcggaccgtccggccagggtcggtggactatccttaggtgccaaattggatttggg

SEQ ID NO: 31220 - DNA, 309 bp, Zea Mays
aaaatcatgtgcgcagaatctccgtccacgatgctctgtgatttggcggcaatgtcgatcgtcggtgaagaattccccaccagaccacgacgttccccgccaaattgagggttgtcatgtctttctagcgcgctcgtgaagctccctaaccaactcccggtcactatgtggcgtcacaggcatcagacggcgacggcggatttccccttccttccgcccccctctgaagcaccaattctcttccctggcaatggcgctctgctagttggcggggttgtagatgtggagaggtagggagatggccccggc

SEQ ID NO: 31221 - DNA, 307 bp, Zea Mays
ggtagctaggtggctatttatataggccataaaggctactactactattaataaggatgttgtagaagcatccgaagaattagctaggtctgagaagacgactagaatgagcatgcatcatgattgtcgcataattgtctcttgtgcactaacatgcttctctcacctttattccaataataagaacttgtgaataatgtgatgtattgctatgttagaaatgccttacctcgtgtcagattggtaagtcttgttaggttgtgttatgtgtttctcttgccttgctatctaagtggtattgaaattg

SEQ ID NO: 31222 - DNA, 345 bp, Zea Mays
tccatggcgggtggttgagcctgacaagaaactgactttccttggtggttagtgagaagaacagtcttatttgcgcaacttatgatgcccttgtgtttggttaaccaatccattcctaagatcacatcaatcccttgggatggcaagacgattaagtctgccaagaacactaccccacttaaaagaattctgacttgggagcatttgagctggcatataaggtctgaccctggggttcgggtgaccaagggaatttctaggtgtgtagagggaatgccatgcttttccataaaactagtggctataaatgaatgggatgctcctgaatcaaaaagtacagtagcg

SEQ ID NO: 31223 - DNA, 363 bp, Zea Mays
ctacacgaggttaacatttatgtagtaatattgtaaatcccaaccatctactggagaatcatacatcttgtttaaactagaataaaattcttcggtctagctcggcccaatcatatcacgacactaaccagacatggaaaattactgccttgagacagaattcaaccaactcatactacccctacatgctcatacgctaggtagcttaggtactattcactcttgtgtcatcaataactcatgtcgcttcacacaatatgctacgacgccactattcgtcaaatgactgcacctgaaaagaatcaaaggaccatgttacatacatcgaaactactcaaggatttggtaggaggtcatactgtc

SEQ ID NO: 31224 - DNA, 702 bp, Zea Mays
agacaaggtgatgcactctggacatgttcagagttagaaacatgagaaatgtgcaagaattatctcagcagtatcctagaagcggtgatgaacataagagaactatcaagataacacatccagagacacacgaagaactgatgctagatagacatgggcattcctttataaatgttcctgcttctgggcagatgcctttaaacaatataaaccagctacctcactctattcaaacattttttccacttcagaaagtgtattatcctagaccaggaacgtacaattcagcacatgtctatcttcccaactttactgatgttcctcttgcaagtaggcaattttccaccaaaattcaaccttcgatgcatggttttgattccactaaaagcaaccagccatttacttccatcagacctcctatgccgatatctcggcttgatgctactttcgagccattaacaaatttccatactgcttccgaaatatcaaatttcaaagggatgtttccatcaagcctacctgctccagttcatgttgagctaaagccgcctattacactccctgctgaaaagaatagtgaatctaccatatcaaatcaacaaaaatattgcaaaattgggctagaaatgtctcttgaacctgtaaatttagtttatgaaggaaagaaccatgtttttggcaaactgtctatcaggaaccaat

SEQ ID NO: 31225 - DNA, 356 bp, Zea Mays
gccgaatcccttgctcccgaagcaccttccaaatatcttgattatatcattcgacatgtttcgggaaaaagattatctaaggaagaaatttttgaagctaaacactatgcccgagaactgaagtacccaaaaggggccctagtgtttaatggtacggatgaagatgacttcttgtattgcctcccagacaacaaagaattatccgtctgccgggagatagccagaagtatgggttttccgaagctcgaagttggcctctgtaccatgacgaaggacgatcttgcggatagccttgcatacaataatctgaagatacaaaatgtgaattttgaagtttatgaattttgaattagtct

SEQ ID NO: 31226 - DNA, 345 bp, Zea Mays
atttggagaaaatagctgaaggcaaacttcacggcgagcaaaagcacccaaaagatggagtacttgacattgtcaaatgttccctcacgtaggtcagggcataattgatcttccaatttgtcttctccaatttgtttcgcacccaaggcacaatgaagagcacgatggcaaggacctcagggataacaaacgctgcaactgcatcgaggaagctcctcatctgtgaatcagctgctgacgaccactgcccattgtctgtcctctggttctagaccctcttgtataggacagcgaacgcaacaacccaagcagctgcaacaacgaccttgagcaccatgcacacag

SEQ ID NO: 31227 - DNA, 358 bp, Zea Mays
tgacgccgcaggagataaagcatgggtcgccccgaacaagcgcatcagcggtccctgatgtcgacgaaccaacgtctaaagacctcattgatggagatcgcgtccttgccctgcaggccctcaacaaataccaagctcaaaccaaggcctggcgcgacaacacggtcgtcccaagagagttcaacaaaggagacctcgtactcgtccggaccacccggacagaatcacggggcaagctggagccgaaatgggagggtccattcatcgtcaagacgaaggtatcccccagcgcgtacaggctagaaccgccctccggcaaagacttagagcactcctagaacattgacaacctccgcaa

SEQ ID NO: 31228 - DNA, 315 bp, Zea Mays
ccctcggcaacgaagaagtctgttgggccgaaaaaacgaagaattattactgtgacagaggccattgaagaaacaccaccactagcttcggcgttaaaagcaccagctgttgagagcgctgcatctaccgaagctgcacctgctgaagccacaattgccgaagctgcaacggccaaggatgcaaacttagaaagcacactttctgatatagataaaatactcctggatatggccacagaagaagttgctacagccgccgaagaaaccatggctacagtgcctgggaaagaaaaggaaatagtcgaagatacttca

SEQ ID NO: 31229 - DNA, 321 bp, Zea Mays
tcctcccgggcggagtccgcacgaacggcgagatccacggcgagttcggtagccatgcgcgcggcggagatctagcggaggacgaaacagactgagcaaggagaacgaccagacggcgggtccatgagctagcgacacctcatggggagcggctgtagggatgggcccggattgtctgcgagagaagaaggggaaagagggcagcgctgagcgggtgctatgtgaggctgagcagtgggctccacccgtcagccacacgcctgagagagcaggccgcacagggtagaagtggagtagttgggccgaggtgggctagttttg

SEQ ID NO: 31230 - DNA, 280 bp, Zea Mays
atggagttggctcaacgagttgctagtgttggacttgttggcactgacattgtcactagcctcgttgtcattggttcaaggattactgctggtgctggccttgttacctctggtctaggtccttcagggattgctgctcgtgctggccttgttacctctggtatgggtcctgtcagcagtggacaagtcaatgtctccgtctttatttgggaccctagcagtcatgcgaagaatagtttggggacaaactgtatttctaggattggggaatgtcagccct

SEQ ID NO: 31231 - DNA, 482 bp, Zea Mays
cgacaagaaagttcagtttgttgtcccgtccctgcccgcgaaacagcttcgtcacccacacaggcttgcgtctgctgcacagggagctttcactccacgccgcatcgatgggacttcttgccagccacagcattcaagccaacttcgcatcaaggagcaactatgcgaaatcgaatccattgaagatgatggtgcggctgggtggactacggtacattggaggcgccgcgggagagtcaattcggcagagcctttatgtcacccaacaagtagcctcccaactcacccccatccggtgtggaaaaatttgcaagtgagtgtgagaggtaaatgcttccgctgcttggccaaaggccactacgccattgattgcagggatccgatgaggtacctcggctgtggaggtgttggccacaaggcctggcagtgcccgaacaagcctgcctcgacaactgctgctactttctctccatcccctcatg

SEQ ID NO: 31232 - DNA, 467 bp, Zea Mays
agacacttcacttggttcttgtcatttggatcaactaaccacccccattcccatcctatgtcacttgatttcctctttaattgactctcaggctcagtggttgcatcaacttgaggctcaaatgaagacatcctacacaaagcatgtgcacgtactaattaaacatccaagccaaagtgtccatgttaaacattgcatagaacataacagaagaggtggaggagcagcagaagaatagcaaaggagggagagggaaagaacacctggaatactggatgattgggggaagagaagggttatgctgacctggacgattggggaagagccaaagaggacaaactggcaggcgacaacaacagacctggaggctggggaacagggcctgaccgacggcgccaccagcagcttccacttttttccctcctctcccgctgtttcgctcctctgtcctctcccacacagcagct

SEQ ID NO: 31233 - DNA, 395 bp, Zea Mays
ggcgcgagatcacataacggtgttctaagccgatttgggggaaattccaaattcggtggttgtagtggctaatcagaggcgagaagtggtgctctagcttcgtaatgagctaacagggcaagtcggggcatcaatttataataatcaacagcagtggcacccaattggggaagacacgctggcgactggagcaaggtgagtcaccagagttatctgtagtggcgcttactgaggcaaaggctcgggataatagtttatcgttcatcatgacttacagcgatgtggtacaatggcacatagcgtggcagactccggtaaactgcggtcacaccggcggtggtcgtgcggccatgttgctgtgcaagttggtacggtggaggttggctcaatcccga

SEQ ID NO: 31234 - DNA, 328 bp, Zea Mays
cgggactctgttctggtggtccttatgagtactaagtccccttcgttgaattctcttgggacgacattgttgtcacgccatgccttagtctgggcttgatacttgtttagggcctgcaaggcgaggacacagtctccgtcaatgagatctttggaggttgattcgtcgacgtcagggacggctaattggtttgttcggggggatccgtgctttaactcttgcggtgtcattgcctcggatccgtacatcaggcagaaaggtgtgaacccggttgctcagcattctgtcgtgttcagcgcccatatgacttcgggtaattggtctgccc

SEQ ID NO: 31235 - DNA, 746 bp, Zea Mays
gaaaggctgaagccgaacaagctgataagaggaaggcagaagaagctgagattaagagaaaggctgcagctgaagaagctgagaagaaggctgatgccgagaagaagaaggcagaagaagttgagaataagagaaaggttgaggccgaagaagctaagattaagagaaaggttgcagctgaagaagctatgaagaaggaggctgatgccgagaagaagaaggcagaagaagctgagaataagagaaaggctgaggccgaagaagctgagattaagagaaaggctgcagctgaagaagctgtgaagaagaaggctgatgccgagaagaaggttgaagcggaggagaaaaggatacaggttgcaatccagaaatagttgaaggacaacatcaaagctttgaaaaagctggtgcccgctgccaaggtaaagaagatgttccagttacaaatgtcaaaagaatatgctcagtagcgccaacagtacgaggataggttgaacatgcttcgtcaggaggccaaagctgagattgacagtttggagaagagcattgatggccaggcaggatccagctcatcatttgatgatatccagttccctgtggagtctgatgatgatatcaacaatttgacccaaccaatccgactttctcaagacgaagtctcagtaggccaggctgatttcagcgagtttcaaaggatgatattcaagcgcctaggtgatagagtgctgaagaagcctagggagtac

SEQ ID NO: 31236 - DNA, 473 bp, Zea Mays
gaatttttcaataacatctctttgaagcttgcaatctcaccaatttcttcctgaaaatctaactaaaatactcgatacattacactatatgtttgtctcactagctttgttgtttgaaggttctttgtcatttgtagtttgactctcagtgcccatctatttggtaggttttggtcatgtttatttagcaggtcttggtcaggtgaagcctttttggaccttcaccactatggaacccgatgccttagagttggacatgtctttgtctaataaaggcctttggacctttgtcattatgtaacttgatgcttgagagttagatagttttcatcgagcgaaggttttgtacatgcgaacacaaggttgacctgacccttgtggttcgtgttgatgatgagtgattgtcaatgggtagtgtcttaggtcgagtcaaggactgacccataagattatgtatgtgcaaccatgtcggt

SEQ ID NO: 31237 - DNA, 529 bp, Zea Mays
cttaagtcattaccgacttaagccaattgctctgttagtagggcatagtggtcaccccgagtttagtaagcgtgagcatgtcacactgccttaagtcattgccgacttaagccgattgctccgttagtagggcatagtggtcaccccgagttgagtaagtatgccaattgacagcgaacaatttgagtgcctttgaagcctttttattgatgatatatttctcaatgtacgaaatacatcgtcgtcccaatagcttctgggatgtagctaggggtaaaatttcctgaggtgttctatgttccatgagttcccaatttccgtgtcgtccatctgagtgagacaatttgtgctactatgaatgttccatatgatcccggccgagtgacttctgctactatgaatggtccttcccatagaggtgacaatttgtgtcgtccctcccccgttagaatttggcggaggacgagatctcctactgcgaaggatcgatgccgtatagccttatcatgatagcgcctcagagtttgct

SEQ ID NO: 31238 - DNA, 392 bp, Zea Mays
tactgaagggcactacttgctggtttctgggcagatttggctgctgaatttgtggaagatgcatgtggtttgtcgccagaggaaggtggtggtgctggtcgactcgacgagggaattggtgctggtatacggccggtcatggacgtagtcatgcgctgctgccatggtgtatattttcctgcagaaacattagaccttgcacttccctttcagctttgcaagcaagatgaaacaatcgggttacattagcataatctttataagcaaggatgtcctgaatttccctatttaacccgcccaaaaatctagccatagcagattcctcaccctcctctatgttacaacgcaacatacccatttgtaattcctgataatattcttctacactttta

SEQ ID NO: 31239 - DNA, 435 bp, Zea Mays
ctgtggctagaaatcctttgtgcaacacatgtggataacacagaaactgtacttttactagcaacgtgcaacttaagaaggagcacttaaaaaccttacacagcctctattgggataataaatctgtaccttgtcacttgtattttcgaacacccagctccatccacatatacttctatttatctgtttctgatgtgctcaagcttatgtctaaatgatgcacaaatggtgattgcatggcaatgtgttttaatgcacaattgattgtttcatgcccttacctttactccgccatgccctaagtttaagtaggtctacaaatagtaaccgaggggcaacattcacatatggagttaaagtgaaagctatttttaggaaggatgcaatgttccaattaaattgcactatactaaatgataatattttaattgtctt

SEQ ID NO: 31240 - DNA, 370 bp, Zea Mays
atatttatagatgtatggtgcaataaaatacgagggcagacctaggagatcgagtccattgctatctctaatcgtgaccaaacacattcttgttgcctgaaattctagggcctggctgtccgggtgcagtcctcctctccggcgtggctcgcacgaaacgatgggatcgatccatttctggacagcctggctcgcgcgagcggcgtgcgtacgagagagcggtgatgcagtgcaggtgcgggcgcagagtaccaacacgacaatggtcatagccaggctagatgcgatgcatgcttcatgagaaggaaaacagaatgccatttgctactctgctgtctgctctgcttgaagatttggagacgcaacgcag

SEQ ID NO: 31241 - DNA, 397 bp, Zea Mays
gtattctcttaatccataaattttaaacagacacaagactcgatatttagcaaaataaatacgcgagatcaatgcgacataaaaagtgtgatcctttcggaaacgaccacacgcatcgttcacgtgggcgagaggttgtgcgctgtccagacaccggttaacgctcgccacacgtcacaatgccaggccgcagagggacgcgcacgacgcagacgcgagggaattaaaaatggattctacagaaccagatccgatttcaaagggtagagtttgggcaagacgtcgatggctcaacccaaacgatactagattcgatgtttcgaaagattactgaagtctgaatttttttgcaaaataaattaggacaatttaagcagatggagacagacacgatatc

SEQ ID NO: 31242 - DNA, 391 bp, Zea Mays
ctgggaccatcgccgccctcacagtaaatacgagacaaccaggcagcaccgggccccacgagtacacatgactccacccgtggtaaaactttggctttacccttaccttacgactcatctcaagggaagccaccgcttgccgacccctctcctagcctataaaagggaaaggctgacctccaggcaaggggatcaaaaggagagagctcttggggcaaccggacgcctttagacggacatgaaccgacaaggacgaacagtaggagaaggagcaccgatgaggaccaggaggttggagcccgccgaaccaagacttagctaggactccaccctacatcttctaagctccacttccaccccccgataaagagacttaggagcatcacatccc

SEQ ID NO: 31243 - DNA, 522 bp, Zea Mays
gttatttaggccataaaggctactaatattaataaggatgctgtagaagcacccgaaaaattagttaggtctgagaggacgcctagaatgagcatgcatcatgattattgcatcattgtctcttgtacaccaacatgcttctcttacctttattccaataataataacttgtgaataatgtgatgtactatgttaggagctataagaagtgccttgtcctgtgttgtcatgataagtcttgattaggttgggttatgtgttcttcttgccatgctgtctaggaggtacgataactatttagtacattttacctctaaccaataaaaaaattgttgcctgttttgcccataaaagaccccccactttaactggcctagtggttagcaagtgaaacattttttttaaaaaaaaatccttcttgcgttggtattttctggcccttgagtgttttacccttgaagttaaacctgcacaacttatagacacccatagcttgacccctaaatcgactaaagcttcctt

SEQ ID NO: 31244 - DNA, 300 bp, Zea Mays
tgctcctattgcgtattctgcctggaatctgcctcctcccaagactttcatcagttttgtgtcaaatcctcctgctggtgacagtggtttgggtcttagagtacgaccttctcctgaagaggttgaggctttggttgtttcgcttggtgaaatccccaatgatgagaggcaagttcattttgagatgcctataaacccgagcgacgcagaaataagtgctatgctgaatatgttggctgaggatttctctgatttggtccctgctgaaacactagatgttgtagctatcccaaagcctgg

SEQ ID NO: 31245 - DNA, 284 bp, Zea Mays
gtcgcaggagccttcctggtcgtgtttgacggacgagttccaatcctaggttgcgccttcttcaaacaccgcgtcatgggtaacatgcacccgattcgcgacagggtcatacaccctgtaggactttgaaccagcctagtaccggaccatcaccatcttcgtgcttcgatcatcaagtttcccggcatttgtcttggtgatcttcacatgagctacgcagccgaatacccgtaggaagtgcacggctggcttctcaccatgccacacttcatacaacgtgcgcc

SEQ ID NO: 31246 - DNA, 382 bp, Zea Mays
tcctcagcttctttagagaaaggctctccacaagtcagtagtcacttatggactatagcactttgctccatttcaccgctttctgccctgattacagaacttatgctctccttctcagagcttgtgtaaaatgctcagacctctatgcttccattgaatccattgccatctcactaaagtggggttgctatctaatcagcatataacacctcctctgtttcaagttatattgctcatgatcacatgttggaagcgcatgaactactttggtcaatgctagagtggaataccgatcccttccatggcaatctgatgcttatgggattcttgaagagcggacagctagataaggcatatcagattttcaagaggttgtctgtct

SEQ ID NO: 31247 - DNA, 612 bp, Zea Mays
gttggtagtaggtcgtctcgactgtccccggaacgggccactggtcgaagcttacgtcgactcaattcatgtggcacggcgtcgcgctggtacaccgtgatctcggtcatactcctccctgcgccttatctcattttcatgccatcggtcacacgaagcgctgatggtgcttcgtgtgtctcgtcggctattgatggcatgacgcaggtagttcacaggatgagcgaggggtagaaaatgattggccgcctgtgtaagcagccgtcggtaagcttccgcatctagggttcgtggtaggccatcggctatctgtgccaacactcctccaacttcactcgacttgtttagtgctcgagcgaaattagggtacaggtttcgagtgaggagagggttctctcaccgaagcctagtgtcttgtttagctagctctcgctctcgatcctgagcctgtcagcgatcgcagcggtgagagttgcgtctttctcggtgtacttgttcgtcgggagtttcccccacttctgaggctccgtcccgggacacgggctgcatcggatcccgttcctcggcttcatgatgtcgccgcacatttcggcatctatttcttcgttgtcg

SEQ ID NO: 31248 - DNA, 443 bp, Zea Mays
accagaagagaaattccagaagacagctcaggccattctgatttcgaggaaattttgaaaagaccaatgaagtcagcaaatgctaacgcaatatagggaaatttcataggtaactggtagagataaagcagaagaatactgaacaccgagtatatctcaagtaacctccaccatcttcacaaaacattgaaataaaattaaacaataacactaaaaagtataattagtatgctaatcaaggagcttaccggaaaaggccaagaaagttacttgttaaggaccaatccacaaggccaatgcagctaaatacaaagaacggtaatgaaatccatgaaggatggctaataccgacaactaactgagcagcaggcagtaataagcagcatgctacccgcaaatggtaacctgcagagtaaatgtttttccattggagagtacaaaat

SEQ ID NO: 31249 - DNA, 333 bp, Zea Mays
gcagatgttgttgctttgacaggaattggcacgcctcgcacttctggactaactcggcggtatcattcttcacagtcggctagtaaaacctggacctgaatgcctttcccactagagttcttgattgtgcatgtatgccacactgctcggcatgaatctcatctaatagctgcctcccggtagtcgagtggatgcacttcgtgaggactcctcctgcgcctcttctatacagcagaccccctatgatggtataatgggccgactgtctcgcgatgcgctccgctgcggctttgtcatccgattcttcctcgtttcttatgtatctgatgatca

SEQ ID NO: 31250 - DNA, 382 bp, Zea Mays
gttgtccagtccttatatagctaaagggtggcctttacagttgggacttgtattctactctggggtacttgcttgttgcccttgggttgctctagccctcctggtgtcgtctgtgggggtgcgcgttgtcgtactctcgatacgacgttctgccccgtactctctccatatgaatctcatagcttgttcggtgtcaacgttgtggaacctggcaggtcccgcaaagtgggcttacggtgaggttcacggtcgtattcagtataacttcatcttccgtcataccccttgcgtcaccttccaacacgcgtaagcatactcctggtatggagtattgtcttgtcctttctagtgtatgggtcactatagagactttgatgctgag

SEQ ID NO: 31251 - DNA, 672 bp, Zea Mays
ctggggcagagtggccgcttcgatgcgtcagtgtggcgtgtcatgtgttagtgagtccatcgtgaaacggtgaggtaacaacagatgagggttaacaagggcaggtggggtttagcgagtgcaggcgatgatgtggtggtacatggcggcggcagcaagcagcagtcattcccacgttgcaacaacatattgagacacagtgagatagtgagcacatgtggtgtcatggtgccaaagtaagatcctaccgatagcttgcctatctactggtgcagactacgaggcaaggtagcggcactgtgtgcaagatcctgatgaggctttatttaggtactctagtatccatcccgatccacatttattgaggtggattggggtgtaaagtacccaaacaaagcatgatatgacaagctgacaagtgacgaggaggtaaggtaatgctggtagcgggcgagttaggtcacccaactgttcattcgatgatcgaaggagcgagcgaaccgtgagtgagctagcgctagaggaaggaatcgaacggctcgagtggggagtgggttgagtagtggagtgtcgagaaaaattagatcaaagcatattttcattaaatttggcccaacttactatataaaaatttgattattttattgtatatctaaacataggtataaaaga

SEQ ID NO: 31252 - DNA, 371 bp, Zea Mays
cagggacgtaacgtacggtttgctatagccaccaaccaccatgctgttcaccaagcctggtcagcgtcgccattcgccaacaccatgccacaccacttccataatgacgccgctggtatctcccggaagacaactccacctagccacagctaccacatggacatggtacgcgtggcagctagcaacacgtcattcgagccaataaaggccatccaaattgctgcattcttcatcgacctcgctgtccactagcagtcttgtcttgtgccaaaagccacaacgcctaccttgcatgcaccttggacaccgccgatcctaccgctctcctctttttggtcgaactaaccctagctagttgacaccacctcgac

SEQ ID NO: 31253 - DNA, 516 bp, Zea Mays
ccacgatgtcgatcgctgctcgatgatacgtgcagggacacgttggaacatgaggtatttatacaggttcggttacgcaagtgcgtaataccctacgtcatgtgtagtgctgagtattggattgctctgagttcgcagattacatgtgattgtgggaggtggaagatgaagttgcctatcaatctatggagtgctctctcttttttataggggtacttctgcagccttatatagctgactgaagagacatccctttatagatcactgagtccaatcgagtctactttctgttgctacaagtatgcctattctttcggtgcttggtttccttctccaagttatcatctgagtgatccggtgctcggctgtgctcaggacacgtctttagagttcaggtgatccctctgcggacacgcaacgtgatccccctgcaggacacatgcaccatcggtatacacgtgcaatattcttcgagattttcagctatcccctcgtcgtcacttcggttattatttg

SEQ ID NO: 31254 - DNA, 304 bp, Zea Mays
ctcatcgcccatacatggccacttcaacgctgggggctagacatcgttggaccactgcctacagctcaagggaacctcaagttcacctttgtcgtcgtcgaatatttcacaaagtggattgaggccagggtagtatccacaataacatcgaagaccgctcaaaaattcttttggcaaaacattgtctgtcgcttcggagtcccgttcgaactcacagtcgacaatggcaaacagttcgacagccaagacttcagggatttctgcttttccatcggcaccaagcctgtctttgcctcggtgtgcc

SEQ ID NO: 31255 - DNA, 616 bp, Zea Mays
acgaacaggactggtgctccccaagaggatgaactgggacgaatgtatcccttttgctgaagatctgcgatttgaagcttcggttctgctaactcggtgggagccatgcggtatggtctcttcgcgatgggtgtcgtcccagggatcagatctatgtagaactccacttctctttctggtggcattcctggtaactcttctggaaacacatccatgaattcttctaccactgatacacttcctgttgctagactgaacatcattggatcattggcgggtggctaggcctgacaagagactgactttccttggtggtctatgaggaggactgtcttgtctgcgcaactgatgatgcctttgtgtttagtcaaccaatccatccctaagatcacatcaattcctttggatggcaagacggttaagtttgccaagaatactaccccacttaaaaggattctgacttgggagcatttgagctggcatagaaggtctgaccctggggttcgggtgaccaagggaatccctagaggagtagagggaatgccatgcttttccacaaaactagtggctatgaaggagtgggatgctccagaatcgaaaagtacggtagcgggag

SEQ ID NO: 31256 - DNA, 273 bp, Zea Mays
taatttatagattgttttggcctagtcgattaactgttcatgaacatctttattggatggactaaccaacgtcggcctaagtctaggggaaaaggcccaaccagcgccatgagtagatcagcctgcaccagcgtgaacagtgaaggcaggcccaaccagcgccagcatcagatcagcccgcaccagcgcgaacagtagacgagtgaatagtaaccgagtgaacgaaggcaagagctaaataaatatgacagtttctatatttgtatatttatc

SEQ ID NO: 31257 - DNA, 277 bp, Zea Mays
cctctatccaaaatgatcttccttggtacagtgtgtagagactcaatccgagacatgtataacttagccaattgtgatcccttataagtagtcttaaccggaatgaaatgagccactttggtcaatctatccataatcacccatatagcatcatatcctttctgggtgcgagacaatccagtaatgaagtccataccaatctctttccacttccactcgggtatctttagtgggtgcagtagtccagctggcctctggtgttcaaccttaactcttt

SEQ ID NO: 31258 - DNA, 384 bp, Zea Mays
aaagaagagaatataactgagggtgaggtaagtaaaacactgctcccaaattgggatgggagattggagattgtagataacatacataatgtaatcgccaaggtaaggttaagggatgagaaaggcaaaggcaataacaaacaaaaacacgacaaaggatggatttaaaaactcgaaagtgacaaagaagatgatacgtccaagagaaaattaggtataacatacaactctcagattgagatgggagagagaagattttaaagggcaggtataagataaacatcaaggtaagatatagaggtgataagggtaaaggtgataatgaggaaaagcataaccatggacagagttaaggcaagactgacaaagtggagaaaacaagca

SEQ ID NO: 31259 - DNA, 581 bp, Zea Mays
tttatattgtacttgtgcacaccaatttgttcaatgttgttttccctcaatttcttgcagccattgccgagctccttgacaatgcaatcgatgaggtaatcattaaggtttttttcgacatgtacagaaagaaactaagacataacatgaagctaagtatggttgtttctgtgacatattttctctcaggtgaacaatggggcaacatttgtccgtgttaataaatttaaaaacccacgagatgggaacccctcattgttggttcaaggttgctgtttttaaggctatgttaatctgtttgttttcatatgaactgttatctggattgtaactttgttgtgttttacttttacattaataagatgatggaggggggatggatcctgaggcactgagacgttgcatgagcttcggattttcagataaacagtctgatgctttcattgggcaatgtatggtcttgggtatccttccttgtagtttcttgtgaatcagttgtcttgagcccctgaccgttgaatttatattgtttcttggatcagatggcaatggtttcaagactagtacgatgcggcttggag

SEQ ID NO: 31260 - DNA, 648 bp, Zea Mays
gggatatctatcccccacatggtgtgcctgttccggtttacacgagttggtcgctttcactccaagaaatcagaatgaatcagtgacctactaagactatggtgcttgcgcaaatttggacagaggcgacccggaacggtcgatcgacatgaacaatgtccacagcggtgttcctgagcgacaacatggtgttccctaagctacggtgtggtagcgtttaattggccaagaccagaagcttcactagcagtaaggaatgctaaaacatgaacctgggaggcatgaaataacctgagagtggctggccacggtgcgatgcatcacgacggcgacgacgaccaatttgcgggaaatcctgaattcttggggtacggtggatggattaaggtgaagagtggtgcattgggcgcgtaacaagagggaggaacagggagagcactcaatttatagaggccaactacggttgctccaaattttggacagagatgagctcacgacggtgaagaggtgagtcaccgaagctcctctaccttggcgctctatagggtaagggatcaagacagtaaattgccgcccaccacgacttactatgacatggtacgatggcgtatggaatggcatgattgggttaacgacggtcatgacggc

SEQ ID NO: 31261 - DNA, 440 bp, Zea Mays
aaaatactccggacccgactatgccaacttcgcagccgactacggagttgacaggcacccagttcgaggaaatacatgaaatgcaacaacaaatgcgtcgtgcatttgagggctgccctgatgatttggacgttactgcgcccatggagacgaactcatactcaaactctaaaaagcaggtattatatacaatctcaccattgttacattatatgttaatttcccactttgcatccaaatcttagacaaaaccataatcatgtcaacaggattaccattttaatgttggcaacaaactgttgagggacataaacatcccacctcaacatataccagactgcaacattatgagctcatatacgtcttcacacttaccgatgtttgatgccacaccgcaaaaacatgtatgtgtttcatatttgttttatccttttgtaatc

SEQ ID NO: 31262 - DNA, 518 bp, Zea Mays
actgaagcttggagttgaattggatacgtatgccatgcgcagaggcctctacaacaatgtctatgtaggaacagccttagtggacatgtatgctaagtgtggagatcttgagaaagccacgcatgtttttgggaagatgccattcaaaaatgaagcctcatggaatgcattaatctgtggacttgccttcaacggtcgaggctatgatgccattcagcagtttgaactaatgagagatgagaaaggactccaaccagatgatatcacattcataggtgtgctttcggcttgtgtacatgctgggctactcgagtatggccgccagttgttcaattctctgacacctgtttttaagatcattcctagaattgagcactactcctgcattgttgatttgttggcacgtgctggtcatttagaagaagcatgggattttattgaggaaatgcctggcaaggtagatgccgtcatgttaggcgctttgcttgctgcttgccggaaatgcaagaacactgagg

SEQ ID NO: 31263 - DNA, 474 bp, Zea Mays
tgaagttgttcttggtaagctttaccgccacggattgccctagaaggggtgttggcataacagagtttgaggtagatgccatggagatttattattgtcgtcggctagggttctagatttgagtggaggagttgcttctgattacaatgtaagaaaacatgatgccaggtttaaactgttcatcctaacctattagggcgaggggggccagggggctgagtatatatagggcaaaatattgccatcagaattataacatgacagggagtccaagtcagttacaactgccttaaccgactcctattctaactctgctatctctaggacagatcaagcctaattgtatcatatatttaatcagagtcgattgtggtcttcctctattatagaacaaccgcatggacccatgatctgatatgactgtagactgatatataagcacattctattttaacatagtcatctataagttaa

SEQ ID NO: 31264 - DNA, 274 bp, Zea Mays
gggtgatgggaaaaataaaggagatgggtcgctcgatagtaaggatgaagttaagatgtagtttatggtgtgaagagtgcgccgataaatatgtatgccatgtgtggttgaatagttgatgcgagtgatgaggtaataaaaatccatcgacgtcacctgtgcttaattgatttttgttgtgcggtgggaaaagagtaaagcgaagagtgtactggttttatacatgtgatttgtgattgtgggagtcgatgcgattgagaagtataattggttt

SEQ ID NO: 31265 - DNA, 971 bp, Zea Mays
gtgtgaggtcgcccaaacgccttcttggttaagcctttgaatgcagttttttcttctccttgaatttatcctcgaatgaaaaaacttagtgttcgcatcacccagcttgaggttagtgactctagaggcctgccgcttgcgggcacgctcaatgacggcaagtgcagtcacacgacgcttaaggccggatcttagatgacgctcggcaacagagagctccctggactcctgtgcgacgtccaaacggtgagatacatccagagccattacaaattttagcctcgcctcggagatgagcgaacgactccaagctctcaagtgtctggccgtagtagcaagcttgtggtgcagcgcctggacagagtgcataggggccgtaggcatggcccaagccttcgtgacctcgtcttgaaacccaggaagtttgatccagaaattctcgaaacggaacggacgcggtcggcggggcccagcaagactagagagaagtagaggacagtgatctgagattgaggtggctagtgcttgtagaccatgagaatcaaaggagagatcccagctttcattacaaaagactctatccagcttgaccaaagtaggccgacgacgctcattgctccaagtgaaatttcggttttgaaggcggatttcacgaagctcacaaaaatttaacgttgtccgaaatagactcatttgacgaaggtttaagttccgattgttcttatcccgagcacggtaaatgaggttaaaatcaccaaggactaaccacttctggccatccggaggcttgaggcgacgcagctcacgaaggaatgtcagtttttggttgcggcgtgtaggtccgtacaccacggtaatcaggaaagaggccccggaggtcttgattgtaaccgtagccgagaccgagaaacgcttgatagtaatgtcggtgaggtcaataaatgtgtcgttccagagtagtaggatcccac

SEQ ID NO: 31266 - DNA, 596 bp, Zea Mays
ctatttacttcaagaattgccgcgttctagagactcgaaccattctaacactttaccatttgttagcgttaaattaatcaaataaggactaataagtagacttactaattttatacaagttatttcgcgcgttagaattaccgtacacaatcaacaaacacattcaccacaataatcaaacccagtataaatgtgtatatcgattgcgcccttcatacactaatttgtatttttacttagacatcacatgaacaccactaattttacccgcgaccataaccatgcgcgtctagaccaaaacaatgtttactatcgactaagagttctaagtattaaacccattattactttccatgcgtaattaaacctcaacttaacaccagtgacaccagtggatttttactaaactcatcatgcgcataaccatgtctcgcatacaaccaaattgtggcgtgcactcgagacacttcgatcaatgtggcgcaaccactaatatatgaactccgacactcatgtcttaacaacacatcctctacgcaaactagcattttctaaactactcgtcacattactaaatatattcccgataaaatcac

SEQ ID NO: 31267 - DNA, 566 bp, Zea Mays
agtggcacgacaacaacgaggttcgagcagaagtcctgggcgtggttggtgaccaaacgacgcgtgcccagggagacacgaactagggccacggtgaggtcgtgcgatctcgagtgaggagggtggtgttcgtcgacgaggggaggcgtggcggccggtgacaacactaagatagaagacgacgggaggatgggaagaggagcagacggcgcgagggagatgagtgcatgaggaggaaccggggtacgatggatggaggagacaagcgcacggtgaggcactggacaatgccatgtggggtgaggcgctggaaaggcgcaacgtggagatgagcctgcgatgcgctgagggagatgatggcttagggaggagcagggacgctcgcacgtcaaggagaggaaaaatacgtgctgcctggtgcggatatgggtgaaggcagtgggtttggataagagaaggacgaaggtggggaaagaaaatatgaaaattttctctcatttttgcaaacgaaaagggaaaaaatacaaacataaatataatcctaggttctagaacttgggtttggg

SEQ ID NO: 31268 - DNA, 529 bp, Zea Mays
gggagaacgagctgctccggctgggtctccaccgtgggctggaggtggcgccgccgcatgggtggtgtctgaggttggggatgatgtcgtgaccgtcgatcgaaatgtggacgactcagattagagcctcgcgaacccattcgcttgatggaatctggatccttggatccggatcgggtggactggagtgcgtaccgcttcatcaaaacccttgtttgatcacaggcgcaggatctcgatcctacggatcatatggaccgagacctttcagtgcgcgtgttttacattagagcccccgaactccttacaaatgaacccgccgtccatctggcttgattctgagtcttaggacttttatgcgttagacccctgaacttctctgaaattagtgtccagtccagtcagtgaataaaacttgtaaaatcatttataaaatgattttttatgtaaaaataattattaaaacttgtttaaatcatataaaattcatactaagtccaaatgagttcattttaatctctataatttt

SEQ ID NO: 31269 - DNA, 657 bp, Zea Mays
ggggtgagaggatggatggcgagcatgggacgggggctcggctggccgcataggtgggacgtcgggcacgagcgggagaactccgacgtaggtcatcgacggggcgtcggcaagcatcagctggtacatggaacatgtgcagcgagcagtagagaaactatgggaggggttcaatggggtgtcagttttatagccgaaagatggggagacgagtggtcgtcggtggagcgcagaaagacggacgtcattgatggcatagcagcactaggaagggagagggacaagcgtgcgtagtggccagtggggaagaaacggatgactaattaaagaggagagtagagcgattacaaccattaatggtgtgaagaggaataatcaacgtcgtggtgggagagagagatgggaaggatagatgatgcactgatgagggcaggagaagggtcgcgggcggcttctccactcatgggggaaggcgatgtgtcaaggtgccaagccggcactgctctaaatcacgagcagagacatgggagacgcggggaagatgaacagtgtgctgacgtgtgggccccaatgtgaagtggatgttggcttgagggattgttgtttgagctggctgctatcctgcatcgaccgagcgacatctagcacggagaaaag

SEQ ID NO: 31270 - DNA, 820 bp, Zea Mays
aagagagcagggagcacgaacagacctagaattcactgaccacggtgagggctctaccacggtggtagaaaacagaattgggggaaatgggaaattggagagttgtggtggctaatcagaggcagggtgctaaggcttggtgatgacctaacgcagcagactgtgccgtcaatttatagcggcgctaagcggtggccagtgaatttggtttggcgtggtggcggtcggagaagaaaggagtcactggcgcacgagattagtggctgcaaccgtggcaacctcaccggcgatctctgtataggtcagtacgagtctcggcagcgtggataaagtgttaaggcacgtggcacaagaccgtgaggtgtctaactccggcgagggtcgattcaaggcgatcagggtagagcggacacggcggccggacaaacagtgccttaagctcatccgggggggggagaagatcttttcaccgtggaatgttatccgagcgccgatgagcacgaatcacctcaccggcgtgaatccacgcgcggggtcgctgacggccggttcactgaaccaatagattcttctggtcactgtatcatcagattcttcttcagtctgtctgacagaccatgtttggggcgaatttcctcctgactttatatggcaactagaccaatgcacgacagcaaagttgtagcctaatagaccaactctaactttgctatattgtgcacccacaaaaagtcacaaaatcttacttaaaattgagccctaagttcatccaatcttactgtcactctgaattcagacttagggcagtctgacagcccaa

SEQ ID NO: 31271 - DNA, 299 bp, Zea Mays
gcgcataatcttggttttcatatgtggcttcatcgaccgtggcatcgcgaattccacgccgttgaggaagaagcgccgccacccgccttacattgctgaccggatcgatcgaccctgcatgaaccggtgaggtacctccacctgatgcgcggtgatctttgcgtcgtttagcccgcgaaattttgggggtaatcgttggggcggggatcaccggcgagctccgcggccatgggttctgtccgccgccgtgtgacctcggtttcattggggtcctctgggggatgaagacagcccctgga

SEQ ID NO: 31272 - DNA, 636 bp, Zea Mays
cttgagctgaacgatcccttggggcacatggtgctctcggaaagcagtttcaaactctgcccaggtagcatctctgatggcaacattgaaggtatcccaccaggctaaggccattccggaaagttgatgagcagccagttgaacacgctgattttctaggcatccgatggcttccagcttccttttaatcatgcgcagccaatcgtcagcatcgaggggattgctaaatccggcaaacgtgggaggcttgagcctcaggaaatctcccatcctgtcttgtggtcttccaccattcgggcgttgattttccagatttctagtgaggacctcgatgagtcgggtttggttggatagaacttgggctaaatctaaggttagttctagaggtgcggggaggtgggtctcactttcttctctaccggcttctctttcagctcttaggggaaaccctgctccaatcccggaggcggtaggcgtggttttatctgaagccatctgccaggggaagagagtcactattatgcacatgccaattctttttttcaaccaagttattttattcattacaccaatacattacaagcatatagctactaaaagtcgtactacacgcgagcgttctctgaggtactttcg

SEQ ID NO: 31273 - DNA, 411 bp, Zea Mays
gaacagaattgggggaaatcccaaattggggagctgtgggtgacgattggaggtgagggctggttcactaggtgcacaattacttagcggagcaagctgagcataaatttatagtctttgagcggcggctccgaatatggaagggaggtgctggcggccggagagagaagtatactggcgcgggtgaccgtggctgtcaccatggcaaggccctaggcgatagatgggctgtctactgtgatcaattgcgacgtggtaagatggctgacggtgtggcataaccgcgaggaacggtggcacgacggtgatggtcacgcggccacatcgccgggcaagtgggcacagcgacagggcgaaacagtggcccaagtttatctttaactcgatatttcttaccccgagtagttatct

SEQ ID NO: 31274 - DNA, 488 bp, Zea Mays
gggggcgctgggtgggtggatcgagtctggaagggggagcggggtcgatgctggtggcatcgataatgcatgcaatggttgcggaagggtggtatgagacatgtgccctggtagtggaaaaatggtggagaggaaggcgatgatggtcgccacgaaacggccgagatgggcaaccgcctgggccacggcttctagggtaaggggcagcgttgttgagggggtgtgaggacatggctgtggtggtcgacggcggcgcagaggttgctggtaacacggtgatggtgggtggaggacctaacatagtcgatactagattgataggattggagtccctatgagggaggtggtgtaggttgtagggatgaaatgctatagggcgtggttgggtatggtttgaagatgtcatggctgctggagagagatagagcaagagatggcgctacaataccgtgctacagtacccgtgggtattgatgaagacatccaca

SEQ ID NO: 31275 - DNA, 308 bp, Zea Mays
ggaaaaagcgcgtggaggttgcgttatggcacacggggatggcaggcgcgtgagaagcaggcggaggaagaagcgcgtggaggttgcatgcatccctatctaggtgcgtgagaaagaggcgaccgagatgaggacaatggaggttgttggtgacttggcgtcgttccgatgtttgcggtcggggcagctcgtgcgcggagtggtaaaaagctcgattgatctacatgatacactgcacatttggaataaagttgtcccgtccatggattgaaatggtgcgaaataaaccaaaccatataaaaaccgaa

SEQ ID NO: 31276 - DNA, 347 bp, Zea Mays
caccttccctagaacactctaggccttagggatcccgactgctgacctcattgagtcggataccccattcttcggcatcatatcgactgaaggagagtacatgttagggaacctcttcatgtgggtcacctttggcgctccaaacaactatcagaccgtgttcttgtgctttgaggtagctcggtcgagtgcgggacaacaccatcatcgagaggccgagactggccaagttcatggtcatcccacactacccgtatatgatactcaagatgcccggacctcatggcatcatcaccattcgggccgacttccaaggagctgtagagtgccttcaggggctatctaga

SEQ ID NO: 31277 - DNA, 414 bp, Zea Mays
ctttattggatgactggatcaacgaggagagggtacttgtcggggtggtcgaagttgagccactgatctgtttggctgaaggttattgcatgtttcgaccgccgataaggagctggggcactggtggttgccgccaggacctaccggtcattgagcttatgttgccttctattctcttgcgatccgtgacctccgaagatgacgttgacctccctatcaacgcgtgggaatgctccacccccttccccttctggttgctaaggctgcctgggcttgccaggccctcctcgtggtggggggggtggtagaggctggaacggtcggccattttcgacgcagtgcttgaagtccctgcagttccgtaaggtgtggcgcatgtccttgtggtacgggcactgggcatcgaggatgtcg

SEQ ID NO: 31278 - DNA, 291 bp, Zea Mays
ggttctatcacccagtcgacagcaacaaggccaagcgcctccaccaccgaagccaggacttcgcattgatcgagggccaactgtacaaaaagggggtcaggcagccgatgcttaagtgcgtcaccgagaccgagggcgttcaaatcctgcacgaagtccatagggggacctgcggctcccacgcaggccccagggccctggcggcaaaggtgatacgacaaggcttctactggcccgccattatctgcgccgcaaatcgggtcgtcagatcctgcgaagcctgtcagaaat

SEQ ID NO: 31279 - DNA, 390 bp, Zea Mays
atttcgcagcattggatgtggctgcggcggagacttctctgcgtgtgatggatgctgttcccggtctgagtgttgggcgtaggcggcgaagggaggtggcgaagcgtagggtgagtgaggttgagggtggtcgtcttcgtgtggacagggctagcaagcggtaattgttggcttcgccggctggggtgagcgtaggtgagggggagttgcgaaatctttttgagggtgaagagctaaggataagctgtttaactatagggagatgggtatcatcccgaaagttgaaccaatgtaatgtgtgatgccctcgctgcacgtatgtaactgtaatttgtatgatgagtctgtgtgccttcgctgatccagccatgcccgtgggggacttgtgca

SEQ ID NO: 31280 - DNA, 342 bp, Zea Mays
cagggaattgccatacgtcgtttggagcctgagaactcaacctagtcgagccctgcatggaaacactcctttctttatggtctatggttcggaggcagtgctacctgccgatctcaagtttggagcaccaaggttgatctttgaaaacatagcagaagctaaagctactaggctagaggatgttgatgtactcgaagaagaacgactaaacacgatgattcaatcagcacggtatcaacaaactctgaggcgctatcacgataaggccatacgacatcgatccttcgcagtgggagatctcgtcctccgccgaattctaacgggggaagggcggcacaaatt

SEQ ID NO: 31281 - DNA, 622 bp, Zea Mays
ggagttcgcattcatcaccgttcgatgcttggagcggtattgtggggtccgcttgcgtcctagggtcacgtaggagcattccccttgagcacataagtgataggggccgaagaattccttgtcggtgtcaaattcctgccgtagaccccccaccaatgggagcaatcgtatctgcgcaccggatctcggtgagaactctttcccctggttcgttattgttttctctaagtatagtccgcacccggtgaaagtctatggcgggatcgaggtttggggcatcaccggtgatggcgtccgccatactctgcgagcgtggggtggaaaacgagtggttagccatcgataggctaacggacggcctagattagatcgaggattccccttcatctcataaagatccggcccttgatgtgtgatcgggtgggcgtgatgtggtgtagccataaatagaatcgagaccattcatttcagatcctgtgagtgggattgcgtaccggttcacttttaatcctcaccatacatcacagatccaacagtcgaggcacgcccgtaccccttcgccttggcatatttgctaaagagaccctagatttctaggatatcaacccaccgtccatacctg

SEQ ID NO: 31282 - DNA, 467 bp, Zea Mays
gccgtcaagagtatccccccagggccgtggcaatggcacgcgtggccggggccggggacgggcgcagcaaccgcgtagatattactgcctgtttcatggcgaagactgcgtgcacccaacaagggattgcccggaaacaaaggccaccagggacaagatatctcgggcacaaccagccgacaaccaaagagttgtcgcgcacacatatcaacaccaccacccacaaccatacaacaacggccacgcccagcatctacccaaccacacatatcagcaccaccaggaggtacaagtagtaccacccccgctcccgcctccgcatcaaccaaacccacaccaccaaaatcaccccaagcaccaaaacaagaagacttcgccgatcaaccgtatcgcggagtcattcacatgatcaccgaagggtccaacgttgacttcaagatgaagcggcaaaagagggatcactaccg

SEQ ID NO: 31283 - DNA, 345 bp, Zea Mays
aacagtcaaaggaatggtgtgatcgcaatcatgactaggaggcaacccctagggatcctcaaagagggtagcaaactgcttcaatagctcttggactgcatcggggattggtgaatggtcattaactgatactgtggcagcaaccagaagaagttccaccacggtgcatactggcacctgagatgactgtccatacaaagttgcagtagtgccattataaggaatagacaaccatttttgagcccaatccacacgcattagattgaaggcctgcaaccagtccatgtcaacaataatatgatagcaaggaatgggcaaaaatgccatatctgaccataaagtgca

SEQ ID NO: 31284 - DNA, 596 bp, Zea Mays
catttagatcaagtacgcatcagtggcacacccaagagctaatgggcaggtggaaagagccaacgggatgatactcgatgcactcagaaagaaggtgtttgacaaaagcgagaagcttgcagggaagtggatcagggaactaccatatgtggtctggagcctgtgaacccagccgagccgaggtctacatggaaacaccccattcttcatggtgtatgggtcggaggcagtgctaccagccgatctgatctttgggcgcccaaattaacctttgaaagcatagtcgaagcagaagcaaccaggctagaggacatcgatgtcctggaggaggaatggctaaatgtggtaattcagtcggctagataccagcagaccttgaggcgctaccacaacaaagcagtgcgacatcgatccttcgcagtgggagacttggtcctccgccgagtacttcgggtcaaatgacgataatgattttcaggacaataacaagaatggtaacttgggtggaaaatggagtagggggtcgggttcactagaaccatcaaacagaacaacagtgatgttgccaatgtttcagcatctaagcaaaacaacaa

SEQ ID NO: 31285 - DNA, 780 bp, Zea Mays
cagtttgtacctaaaacacatggtgataccgagtcagcacagtgaaaatgggtaggccatgtgtataggaaacagaaacgttcactcagggtgatgcatagaaaagtagctgctgcatattaaacgtgagtgggagtcaaaacagcgagagttgttgggaggcaaaggtagaatggaggcaattgaagtgaagagatgtcgactaacctttggttgggcgtgccaatgttagcgcaaacttgatcgctgcacttgtaggaatctccatgagccacagctgtgcgggtgcattttttgcatgcattgtaccaccacctatcaccaatcttttttacagtgactgtcaccaagaattccctatcctgcacgaacatgtaaatatacggtcatgctatattcccagatccaaccaactatggcacgactgcaggaaaacagtaacaagaagaccatggcagttggtaaggcaacatcagctaagtgaatgaaacatggaacataccttattctcaaatgggtgcagatctctgatataagcaaatttctgttcctcaggaacatgagacatagactgattcgaagatagaacctcgttccacttaatgggactatgcgctttcgtcgcactggtttgtacatacaatgagtcaaattgaagttagaacacagcaaagacaaacaatagttttatacgtgcagcaggcatagcagaatattacctagccatgagggcacttgcttcaggaacatcaggattaatgtaccacttacagggtgagc

SEQ ID NO: 31286 - DNA, 576 bp, Zea Mays
cgcggagtgtcgcacgcgagggtggccagcgctgcccctcgcggtgacttcgatgtggtcgaatgccgaagaccgtcgatgcggtctttttcgacattgtcttaattttttgcgggggatttttacgtgtatattacatggctcctcctcattaaaaacctcaccccctgggaggaaaagagtgcgggccggaataaaactgtctggtgaattacaagggcgtgttagccccgaggattcaaaaaaaattacggagattgtcaatattccaggaatgctctaagtcttcgccggatggcgttgttagcctgtacgcgctgggggacgactttgtcttgacgatgaagggaccctcccactttggctctagcttgccccatgattctgtccgagctgtccggacaagtacgaggtccccttcattgaattctctcgggacgactgtgtggtcgcgccatgcttttgtttgagcttggtatttgttgagggcctgcagggcgaagacacggtctctgtcgatgagatccttggaagttggttcgtctacgtcggggacggctgaagtgcttgtccgtg

SEQ ID NO: 31287 - DNA, 405 bp, Zea Mays
attaagagggcattttgggctggccttcctatgtccgagttggccacagttcgggcatttaatttttttctctgagtagcttcttctccttttcctctacaggtagggactgtttcttctttgcagcaacaccttctaagcaacttttcatccgattcttcctttgctcacaacgactgtgggagacccggcattcggtagccttgcattgattctccatggacaatcacctcctttgcaataagctctatatctgaaaggtcagattgactcaattcctaactcaaactcattactgatcgcatactgcctcatagccagcctgaattctttcatatccttgtacaaactaccaatcttcattattggattagatctgttgcaaacaaataccctttcttgtgg

SEQ ID NO: 31288 - DNA, 413 bp, Zea Mays
cgtttctgcctgcttccgtgccttctgtttttttactcccaagtcccaacgtttggctgcccgctgatttcatttcaacccttctcaacgctcaattggagaggacagttttatcgggccttccaattgccagcgagttgccttgtcttaccgaaaggaccagccagccagccagccatatgaaatgcattccattgacgggactgccagatcttgtttgcatcccacgcaattggggaccgctctttgttcgtagcagcgtctgggttttgttcccctgcagttattattattatagtacagcgctactcctccgttgaccgctacagaattcgctactgcctagtgcctactacaaccgtttagtatctccacttcaaattcccaccagtttctgcccttttcttttccag

SEQ ID NO: 31289 - DNA, 496 bp, Zea Mays
gccagcccaacttatgcactgatagccacttccacgtgggacccacagcctcacctaacacccgctcacgcacacctctcctatttcgctggctggtggaccatctctgtcaggactgtccctgacctcacggattcggtctcagcgaatcccgcgcacaccgcggggctcaacatccgtgcaacagaacgccgattacctcgccggggatctcgctcctcgtgcctcgctcggacttcgctactggagtataaatcaggcgtcacagtatcctcgttctccccaacctaatgcacccagttccaccattaccgagcgtagagagagaagaagcagcgccgccgccggcccggtttcgtgttcaccgccgtcgcgtccaagaattcgaccctgtgagtctcgccgtgcgtcggggactgatccggggacctccctgctgtggattggcggccggagccctcgagattcatcgccgtggtgcgaacacctccgcgcg

SEQ ID NO: 31290 - DNA, 315 bp, Zea Mays
gtttgacaccagcgtggacagagaattttgtcaagcacaaggcaaacacaggagcttgaaggcagcaaggttctttgaccacgcacttgaacgcagggataaaggaacaggcagtggctatgtccggaatcacgctgagtaggggtcttgaggtatcaacagctgcatgagtatggttacgtggcttcacacacagactccatgccggagcacaaacacagctagtcatcacttggtcggattccctctgccagggataagcagataacgtttcaccgtggataggcaccaactgacccagtgcatggatattta

SEQ ID NO: 31291 - DNA, 285 bp, Zea Mays
cagtgtccaggcgttgagccttgcatatgaggtcttctagcactggcttgacttctaggctgccattgtctcccagacatgcattcagttgagctgattcttccttccaatcttccaagaagttggtttctttcttcccgaaaggttttcggctgagggcatctgctaccatgttggccttcccggggtggtagtggatctcaaggtcgtaatctttgatcaattccagccatcttcgctaacggaggttgaggtctggttgagtgaaaatgtacttcaggctct

SEQ ID NO: 31292 - DNA, 790 bp, Zea Mays
gatgagcataggactcctaggcgtttttgggccgaagcgatcaacactgcttgccatgtgtccaatcgcatctttcttcgggcttttctgaacaaaacttcttatgagctgcgatttggacggccacccaaggttagacatttcagggtatttggctgcagatgatttgtgctaaaacagtgtaatctggacaagtttgagtcctgatcttctgatggggtttttctgggttatgcattacattctcgtgcttatcgtgttcttaacctagatactaaccgcattatggagacttgtgaggttacattagatgagattgcaccttgtccatcccctgtctttgagcctgcaggtgtagattagatgggacagaccatctttatggaggaggagcacgacgatgccgattgggttgctctcgagccaactccaccggccgccccagtcgagcctgcttccactactacggctgacggaccctaccccactccttccaccacttggggtccacttgagccagttcttgctgagattggaggagttgaagctgctgttgagggggaggccacttcctcaagggaggctccacagcatattcagcgtcgtcacccacctcaacagatgatcgggagcttcacgagcgagtcactcgctctaggtcacaacccatttctcattttgctcactcagcttttgttgctacttttgagccccgagatattggacatgctttatctgatcctaactgggttaatgctatgcatgaggagcttgaaaattttgaaagaaa

SEQ ID NO: 31293 - DNA, 570 bp, Zea Mays
cgggattcgtgccacgggcgtatggatttcgttcaccgggtaaatatctcgtcgtggatgtgcatgagctactgtggcctcgttgtcccctgccccttttcaccggcgacgtggcctcatggtcgtcaccggagttgccgtgctttactgcggctgtgccacactccaagtcttccaccacgtcgtccctagccgtaacagctcaccagtaaccgccgtagctcctcaaccggtgatcaccggaggaagcgccacggtgaaagccacccatcccttgctccagtatcactgttccccccggccgccagcacgaccttgcgaaattggacaccaccatcgatgggacttataaattgagccccccctcggcttcgccatgtatcccagcagctaccgcacacacctgcatcccaaatcccccactagcgagcacaaatttcggattctccccaatccggttctagaacaccgtgaactcaatctcgtcgtggccagcctgttctggtaaaaatctgcccaattcaaaccttgtttaagtgctctcgtatgcttgtgatgcccatcgaccca

SEQ ID NO: 31294 - DNA, 2140 bp, Zea Mays
agatttgctacttcttttataagaatatcgcatttgggcttacaatattttactttgaagcattcgctgggttttctggtcaatctgtatacgatgattggtttatgctgcttttcaatgttgttcttacctcacttcctgttatatcactcggagtatttgagcaagacgtttcatccgaaatctgcttacaggtatatgatataacatccaacttattttaaccatactgcttatgataaactaggcatgtttagaactgaaaataaagcttggtcctggaatgtggtgtgtgttctcatggtaaaagtttttgttgtgttgagtccattcattatgcttccagcaaagaagcaaatgaataaacgggtacttaaaagataatttgctaaaccttgtttgttgaggagaatgacactcccatggaaccacaatcattagcaactggatgtagatcagactatcagagaactatactgtacttagatgtcagtcaggtattccttctcaggctactttgcatggtatcaagtacaacaacacaactatctgacatggttcatagtatattagaaaactaaaaagaaccatgaataatgcctcaatgtagaagcatatcttagtccatgctactatgatctgtattgcccatttgttatggttaggaatgaactctatctacctttgcctctcctttcatgtaaatcatttgtatgaaacaacatattattaccagtaaaagatggtttcagaattaggaacgatttggtgtgccttgcttctccattccatgttccattataatgctattcagtctctaggttatctgcttcaggttttcattcactgaaatgaaatatgcaagtcacttttattatgtggatactatgtaaatactatgtaaaaatacaatggtttgaaatacacaatgggtattggaaagataccagttatctcaggtgtgatattatgttgggaaacatgagcctgactgatggtttttcaacacatatcatcccatagttattaaataatgtagttcaaattcatctggtttaacatcttccttgaaaatagtttgatttgcatagcatgtagaaaataattaaggcacatggtttgtggagccatttatgcagattgaagtcacttggtattattgtccatatttaaagctgaccgaaatttcaaggaaatgcaagcacacataagtttgcttcttgacaacattatgtttgtactatggcccccatcagtggatcaaatcacatcttaaaaaaacatgctcccaagtaaacttttattctagttaatttcatgtgtatacttttattctagttaatttcctgtgatctttggtgctactagaagactcatgcatcgggccctttgccctttgtactttaggagctgggcaatcttctctgatcatccacattgctgcttctaacctttcatatatctatgttgacatggcatggcttgcatgttgcagttcccagcattataccagcaagggccaaagaatcttttctttgattggtaccggatccttggatggatggggaatggcctctactcctctctggccatattcttcctcaatctctgcatattctatgatcaggcaatccgtgttggggggcagactgcagacattgctgcggtgggaactaccatgttcacctgcatcatctgggctgtcaacatgcagattgccctaacaatgagccatttcacatggattcaacatctctttgtatggggcagcataacaacttggtatctcttcatcctcgcctatgggatgacattgaggtctggcgacaactaccagatcctattagaagtccttgggccagctcccatatactgggcagcgacgcttctggtgactgctgcctgcaacatcccctacctgatacacatatcctaccagagatcgtgcaatccacttgatcaccatgtgattcaagagatcaagtacctaaagaaagatgttgaagaccagacgatgtggaagagggagcggtcgaaggccaggcagaagacaaagattggtttcactgcgagggttgatgcaaagatcaagcagatcagggggaaattgcataagaaaggcccatctttaacaatccag

SEQ ID NO: 31295 - DNA, 275 bp, Zea Mays
tgcataatgtgtttcacgtatctcaactcaagaagtgtctccgtgtttccgaggaacagttaccaatggaagagctcagtgttcaaggtgatttgacttacacggagtacccgatcaagattttggatacattgactcgagttacaagaaataaggtgataaagatgtgcaaagtgcaatggagtcaccacggagaagatgaagcgacctgggaaagagaagaagagcttcgcatagattttccccaccttttccctcgttcttcctaaatctcg

SEQ ID NO: 31296 - DNA, 331 bp, Zea Mays
agcgaatgtctggacgaaaatatggtcttctttagcataacatactttgggttttcatgggcacatcaaaaagctcttgccatttcctataatgttgcagaagttgcaagttgcaacaaaaacaatagacaaagccttttagtgccattgtgaaaagctacagttgaaacccaaaagaagccttaaggttttgttttacattcgctcatattcaaggcaggctaaatctttggctgcctcctcccatgtcaacttcagccttccactgcctctctttccattactacccggtcttacttctcaggataccaaatacccgacaaaccaactg

SEQ ID NO: 31297 - DNA, 577 bp, Zea Mays
aacccgaatatgagttgtccggtggctggagctgcttcaaatttatgcccattctttcgaaggtgtggaggaaaatgatgtcggcctggctgccattgtcgatgagtgccttgtgaatctctcaacctgctacattgcagccgataaccatggcatcggtgtgagggtcattgtggaggttgacatcgtttgagtcaaaggtcagtgggatgtgcgaccactttgtctggacgaccggttctttgacagcaacatggtttacacctcgatgatattctctcctttgtctcttcgtatcgaagtatgtgcttgagcctccactaatcacgtttatgatgtcgtgaactggggttgtgggtaggcctcttcttcttttggcggtggcagccacagctgcctctgatggtggattggttgcagaggggcaagggtagttgtaatctttctaggtgcactggtagatgttagtagtttggttggtactatgggtagcagttatatgtttcatgctgatgttgaaactgtggtaggaaagtgtgtgccatgaccttcgctggctgttttgggtagtcccttt

SEQ ID NO: 31298 - DNA, 313 bp, Zea Mays
cctgccggtatctcaaagaacgacatcataaagattggcaggctacttaacacagaattaagtaggacaagtcgtccacccgaagatagaaatttggccttccaagtactaagcctcttttcaaaccggtctataaccccctgccagtcgctatttctcaatcttcgatgagacataggaattccgagatatttgaaaggcgttgtcccaattccacaaccaaataagtgtgagtattgcaattcatattccttagccaacccatagcaaaataactcacttttatggaaattaatttttagtcctgacattt

SEQ ID NO: 31299 - DNA, 928 bp, Zea Mays
gatctgatctcactcttgtgcttgcgacatatttgtagatgaccctgaccatagatttttgtcttttgggattctttcctcttccatcattaagttgctaccatctggcgaactctagtcctttggtattaacatactcatgtctctgaattctttaatactcttgtttcaaatacttgtctctaaatttctactacctacttaaacatttcagtttatttgtccatgaccttcctgtgttttgagaccctttcctcttctattgttaagtcgctatcttccggcaatttcttgtctcttggtatcagtatgctcatctccttgaaatctctcatactctcattttttatgcttacctttatatcccaaggtctggttaagatattttattttacttgtccttgaccacccttgtttcttgacaatccatgagcggtcattttattttgcacatccttggcaatctcgttaattccttgtaacttccttcggtaatgaattttttacttcaactcttctgtcggaacctcacttatcttatccttgtttgttttctccacttcgtaactttgtgattcttgccttaactctatccatggattatgtttttcaccattatcacctttatccttatcacctttatatcttaccttgatgtttatcttataccggtctttaaaataacctcttttctatctcaatctgagcattgtactttacctacttttcccttggtcgtatcctcttctttgtcacttgcgagtttttaactctaacctttgttgtgcttttgtttgtcatttcctttaactttgtcatctctctatcctaccttggtgattacgttatgtctgttatctacaatctccaatctcccatcccaatttgggagcaatgtttttcttacctcacccttggctatatcctc

SEQ ID NO: 31300 - DNA, 470 bp, Zea Mays
gcccgaaaagccctccgacaactatgccagagctacaacaaggtgatctttgcaaccccccttcgctacttcccacccagcaacaaaaatacacctacctggacgaaaagacttcaggccctgtcaggaggagaccctattgaggatgacaccaccatcgtctacatggctggataccttcacacccttgataaccaatagatgaccttgcctcccactgcactcacctaaactcccgggtggaaagcctggagcaaaaagtcagggaacttacaagggaaaaggcgtcccttcaagagagcctcgagatagcagaaggcgaggaaaccgatacccgtgaggcctaccgcactctgaagatggattacgacaagaaactgaagaagctcgcccccgcaagaaaaatccgcaagaagaccaaaagccaaggatgtcagactgagtagaaggaagaagcccctccagcccta

SEQ ID NO: 31301 - DNA, 390 bp, Zea Mays
tcatgctgagtgagaaaacaagcaaaaacctaatgcctagcccctacctggcgcgccaaatgtcggagagggaattctctggccgggtggcagattgcactcaccctaaatcctaagatgaggaaggggcttaagtgttttgcctatcttgctaagcggtcatcaagcacatgaacacgcgaggatttagagtggatcaagccgccggagcgtaataccctactccactgtgtgttggattgttgtggaagcttgagctgtgtgtaagcttgaatgacttgcgtccaagtttccctgtctagtgcttgcattgtaacgttgtatgcctccccttttatagttcaacaggggcatgtacaagggttctaagccccgacacatgggcccagg

SEQ ID NO: 31302 - DNA, 305 bp, Zea Mays
ccgacgatggaagatctgtaccggcgaggaatccctagtgccatggtgacatatcttggaccgctagacaaccagatccttcccccaacatggtgaagccccagggcgagcaatcggatcctgagcgacaatatggacgtggttccatggcggaccgacgagttccctcgcgagcttggtttattagggggtcaccagtgatgacgatggataggggaaaagcggggccggatttttataccgaggcagagtccgcgttcaaggagtccatggccgagaatctcgccgacgccgttgcccaagat

SEQ ID NO: 31303 - DNA, 285 bp, Zea Mays
agataggaaggtaacgcttctgcgttttaaatcctgatcgtttattctgtcgcggacgcatgggatccaaacgcgtagcaatgttatccgggccgtcgatctgtgtttctggggcttgggatgcttaccgtttcactagggtttaggtctaatcctagccctcggggcgcgatccaacgactgtgatcagcccgtacccattcggccggtgaactttgcaaatgagacccccctgaattctatgattaaatctgtggccctaggtagtaataggatcattacctg

SEQ ID NO: 31304 - DNA, 630 bp, Zea Mays
gccacttgtggagagctgggatatgccgaaggagactactgccgaatccagtgaaggtggtctagtccgattgaagtataccttcagatttagggagaagtttgatgagccagataatgactggttgaaatgtattgaagctaccagtgacgagctgcttggaacatattccaaggccagagatgaagccttgtccgtagccttcgggggtcggggaaaaaagtttgaacagggtattcgatgcaatcggcttcgtacaccctgattatcactacccgctgcgaaggcaagggaaaaagagaaaagttgttgcttcggccaccactgatgtgccgaagggcaaaaaagtgaaggttctgacccaccggccgcggtatattgaaccgaccgtagtgcctaaatttggcgaaggtgcctcttcaactaccgaagcaagacaagctgctctgattgtgcggagcgttgaagagccgactttagtgccaaaggtacctacagtcgggccaaccgaagctaagaataataaggccgaagagccataggtggagaaaatagagaaaatgcctgaaattctgagcccaccagctgaggcaaaattgccaaaggtgcaaaaagctcatgccgcaactc

SEQ ID NO: 31305 - DNA, 555 bp, Zea Mays
ccgcttttcccgtgctaaacgggctgggctcggacaggttaacgagactacgggcttagatggcccagcccggttttctaaccgggcccaaaacgggtcgggcttcaccggccccgggcggggctaggccgggctgtccgtttggccatatctagtttaggcacacctcacagtccgttgtgcaccagaaactacaatgtgcactatacaatgctccggcttggcctcggctggctctacccctatccagactatctggtatgcaacgcacagtgtattgttcactatccggcatgcccataactgtcattttaaagcatttctctcacccaggctcacacgttagtctctcaaacctcattttgtcttcctcccactcacctcgtgcgcgctctctgcctgtgcttcccagcgctgtcacatagatctgctcaccaattccatgccaccacgagatccccgccttcgccctcagcgtccccgcaatctggtgaccttggcacgccattctccttacttctccccccgctggtgagctcggcagctccctctttt

SEQ ID NO: 31306 - DNA, 441 bp, Zea Mays
caagagcacacaggaatgctaaaacaagagcgaggagggcatgatcgaacctgtggagagctggccacggcgagctcacacattgcggtgttcttgacagatttgggggaaatcccaaattagagctctctagtggacaatccgagacacaagtgggtgcactggatgcgtgactacctagcatgcttaatttatagggcccgagggcgatggctcttgaatttggaatggcgcgctggcggccggagagaggggagagcattggagcaaaggattcgtggctttcaccgtggcaagttcaccggcgatgaccggacacgctttagtggtttactacgacgtggtaacgtcctaaggcacgtggtgcacgatcgataggtggccaactccggcgaggacccttttgcccgaccgcaacccatgtgggtacagcgagctcac

SEQ ID NO: 31307 - DNA, 457 bp, Zea Mays
gcaatgttagccgcgatgcaggccatgcagcaggagttggcccttctgaggcaagccattcctgtcgcccctgcgggtgctgctcagggtgctggaggtggagaagtgcccgggggcgctgtccctgtgggtgctattccaggtggcggggccgaggtgcctcttctagtcagtggtctttctctgatgcagtggatgggcatgaagttggattcttttgatggcagtggtacttcggtcgaggcggcagattggttgacttatgtggaggacaagatgaatgtcttcgagattgcatatggagatcgggttcgctttggcactcagctgctgaagggagaggctcaaatttggtggagaggcgtgcaggcagcacactcctcctcaccaggagtcctatcttgggatgttttcatcaggcagtttgaaaggagattctacccggtcacctttctgg

SEQ ID NO: 31308 - DNA, 634 bp, Zea Mays
ctcacaagagagtgcataatggttttcccccatgccatatgaacataggaatttactgaaggatgcaactatttttgtagctatacttggctgcttccactacaggacaatgtctattaagagtacaagttgattgatgtttagaggaatttaataactgatgcaactgtttttgcagctatacttggctgcttccactacaggacaatgtctattaatagtacaagttaactgatgtttagaaggtgacaaaatgtgagatccatgaggcacaacaaatacttttcacatattgcatctaaatgtaagctaacctacttttgcaggagcttgctattccaataatcacacctcaattgtgaaatgccagaaatactaagtcaaccaaccaatatagggcacataaatatcataacacacatgtgtgggactaagacagatgataaagttacataatgcaaaaaaaacacttacttcaatactgacttagaacaaaagaaacaggacactgactgaagaatgatatggcatacataattacatacaatttagtattggttcagaagtgcatagtttgtagcaaatgaaatgtggcctggagagctatcaaatttgtagctcttctatatttgta

SEQ ID NO: 31309 - DNA, 295 bp, Zea Mays
ccgggtacagtgggcctccgtaaggatggcttccctgattccttcattctcaggtacgcataagcgttcctctagctagaggattccttcctcatcctggcgaaagtctgggtgcaagcctttctccacctcgtttgccaaggttctcagttctgggcactccccttgtgccttcttgatccaatcctctaagtcacatttgacccgtaactcattcagctactcagagctaaggatggaaatcctcattcgctgcatctcctcacaaagttcggcagctagctcttcccccatg

SEQ ID NO: 31310 - DNA, 418 bp, Zea Mays
gtcacgattagtgccctctgtggtgtggctcggggatgaacttggggcactgttttgccctgtcgccgtacccacttgcaccggcaatgtggttgtgcgatcgtcgccgtcgtgccgccgtctggctcgattgtgacacgccttaagtcatcccaccactcgtcgcaagccgttaagactcgacagtgaccgccgtagaccgtgaaccagtgaacgccacgttagcgaactccggtgtctcttcccccttctcaccgtgagcgcttctctattcaaattcacccttctcgcggccgtccactataaattggtgcctcgacctgttccgctagattgttacgaagccagagcacccaccctctccctcgattagccaccatagccgaagaatttcattcttcccccaaatctgttgtct

SEQ ID NO: 31311 - DNA, 564 bp, Zea Mays
tgggtaagatatgacttttgcaagtttctagacatataaatattatttttatacctagaaataatttctaggatttattttaatagtgctcggaccgaggaaacaaaatcccgagagttcaggggctaaatcgtgaaaaacggggtctaagtgtaattatctttatacatgtgaggatggcgggttaatttagacaaaggtagagagcctatttgcaaccttcgcacggtcgaaggggtatgggtgaatggtggtcgtgcgatctgaatcgatggccaggattaaaacttcaaccggtacacgatagtggccgattgatttgcaactgacgatccaagattcgccacgtcagtcaccaaatctggtccgcccagatttcatcgcacggtccggattttattcataaagctgtacgcggtcgtctaatctcgcccacccatttggatcgaacgaccctcacacaccaacacgagtgggcacgacatcagctaatcctcaccgttcaccataaatcgacggcaatcgggtcttctcccaccagccacccagcacgacgcccagcca

SEQ ID NO: 31312 - DNA, 362 bp, Zea Mays
gtcggagagaaagaggtgcactggcacaaacgatttgtggcatttaccgtggcaagctcatcggcgatcaccagatgggctaaggtgactcactgcggcgtggttaaagcatcgaggcatgtggcgcaaggttgtgggctggctaactccagcgagcctatccaaagcggccatgactcaagcgggtacggcggccggagtagaatagtggccggagtccatccacggggtgatatttcttacccccttgccgttatccaactgtgccaaacacaaatcaccgcggcgggagcgaatccgggtgcacggtcgccgacggtgagttatctgagctggtgttctgatctggtcactgtaccatt

SEQ ID NO: 31313 - DNA, 343 bp, Zea Mays
tctgcttccacctatctgtttctgcgcgcacaatgcaccaaatccactttttcattttctattgagccgcatgggccaccattttcggatcctattgttgcagtggccgcatgcaaccgctttgaccacgacctctaatggcgcaggaaacatgcaaggctcaactgctctctcggcctttgttgaccactgcatgcatgatggccactgcatgcacacaccacacggtagtgagctcatccatgcaacgacatttctgcatgcgcattgatggtgctcatacgagcgcaacatcacttgtttgaccggtggataaaaagggagagggcctggtcaacaagac

SEQ ID NO: 31314 - DNA, 317 bp, Zea Mays
cagagaaggggtagcgacagaccctacaaagacagctgctatgctagcatggcctagaccacagaatatcactgagttaagaggatttctggggcttacagggtactacaggaagtttgtgtgtgggtatggagttctggcatgacccctcactcagctgctgcaaaaatagcatgggttcaagtggaatgatgaagctcaagcagcgtttgaggccctaaaaaaagctatgacgactactcctgtcttggccctaccatgatttgatcttccttttgtggtagagacagatgcatgtgacaacggaatgggggcag

SEQ ID NO: 31315 - DNA, 426 bp, Zea Mays
aaaatattcttttgggatatcctttgcaacgtgtaggccgtgtgcgtgcgtgcgtgcatgtcaactgcgaaaaaggagacattgtcaccgctgttcaatggggggactataggggagattcaatcattcatgttcttgggtccattgctcccccccaccatgtgagtaagaagcaaaagcaacgaacgtctatcgtgtctgcaggcagcacgcaggtgacaccgattggggagatgcatggcaggtggcagcatagctcttgtttttggttggcatagcggtatagcacagaagggtgacactatgggtctgggacagagtggttgaagtaaaaagtctgcatgtgggggcttgtatgtaggtggcgctgtctatgatcaaatcttttgactcacaccgacgttccgcgcgtagccatctcttgag

SEQ ID NO: 31316 - DNA, 527 bp, Zea Mays
cgaggtcttgttccctgcggtcagagatgtggtcagggagtatcttgttgagcatcgtagggtcggtgttcgagccattcagcgctcgcacttggggcaggtgatagtgcagtttcgtagtgttctggaacgggataatttggttctgcttggcccccagcaatatttggatgctactttcaccgcggtccgtcataatgatgcttggaatcaccgtgctcttcttttcaaccatgagtgctggcttatgcttctggggtttccattggattatcgttcttcagagtacttgcaggccgccattgggtcgtttggaagactgattctctgggaggaggatcggagtaatatctctagaactttgcttcgtgttcgtgtcacttcacttgatgaggtcccctaatttattgttttttcggaggctgagggctttgctggtgactcctggactgttcaatgtgaaattattcagcaactcatgcttggcgggcaagctcaagatgaggaccccatccccccggcccccg

SEQ ID NO: 31317 - DNA, 427 bp, Zea Mays
cttgatcactacaacataatttggccacatgcaaattacctatgagggcatatgacacaatcacatctaggagcagtacccaaaagagtggttcctcaccatggatctgttagaagaggatgagtatgaggcttgaatggttgtatctatatattataccctagctattcaatccacctttgaggccagaatgagtgatgtaacgagaccagtgatttcatcgttatgtgacctacacaaggatggcctatccaagagtgtctagtgctactacctgcactgccccacatgcaggaacaccgcttggatcacctctaaggaccttgtccgcggatctccttattggatcacctctagaggccttcgtagcctagggctcagcgtggttcgtcgtgttgcaccctgccattggcctatgcactctggc

SEQ ID NO: 31318 - DNA, 1112 bp, Zea Mays
cgaaagggtatcgttgaatggtggccgtccgatctaaaccaagggctcaaattaaatcagtctcacttgaaccggtaagcagtgctagccacacgatcctgcgcggatggctcagatcggatccgcaacccagcaaaccggtatgcactcacggccctacgatctaccatctacggtcgaggatagcgcctgaccgcaacccatctaattcgtctgctaacgatccgatggccaggaagcttcttcctccccaaggctggacgcggcggtgaatgcacagcgcacggcgacacctcaccggagatacataatctctcccctctggttccctaaatccgaatctgacgggtgctagacagacggggcgttattgcgaataggttggggagaatcttaccataggtagaagtcacaagtcgtgggtccatggcacaccacggagcattgaggcccacggcggcgctaaggtacccggcgagcaattcctactgcgccaaagctcgaatcgtccctaccgaagcagctacacgaagcggaaacaagcacgaagctattggaggattgctcaccgagaatcgcccgcgaagatgctctgcccacggtggtcagcggattccagaggaggaatggacggcggcgagaaattctttggtccagggcgacgcttacgccagatagcaagcttgcgtacgatcctcggtcactggttatcgcctccgaccaccactctgggatccgaacggcaggaattgccgcatgcaacggtggcggcgtacttttctctcctctcttcctctccgcggcggcggtggtaaggcactgcacgcacggtgatacggcctcgaatcggtggatggagggaagggggtcgcggagcttcggcttttatgcaccacggtgaagtccgagcatggttaagaagcgatatcttcgtgcgcggattcagcgtttgcgaacggaactagagctgggagaagatcctgccggtggggcccaccagcaagtgaccgagtaagacccggaaagattagttgcggttgcggcgaactcggggggtgagagccagctccgcgtggattttgttcaggtgcgagcgcggatgagaacgatga

SEQ ID NO: 31319 - DNA, 309 bp, Zea Mays
ctggtattgcgatggcaaagccaagcgctgcagtcgatccattgatggacgactccgatctgatcgggcataccgcttcggtagatcctgtctcgaccgttgatcggttatcctagggcttagatctgatgtgggtgtgtgaggttttgggccgtggatctctatccgacgcagagaatcagtaccggttcacttaacaaaataggtttaatcggtgccatcggtttctaatccgacagcagagaaccgctcataccccttcaccgtggactatttgcatatgagtccctcttcttggtacaaataaac

SEQ ID NO: 31320 - DNA, 451 bp, Zea Mays
tccgtggtgtctagcaaaaaaaggttaccataactcgattgtcaccgggttttgatgaggttaattttgacagttggtggagcagatcagctgaacgtatccacgaagatgcccggaaggggtttaactctgtggtgattttaggagcttggagtgtttggcgccaccggaatgagtgtgtgtttaatgggtcgcaacctagtatcgctaagagcttgaccttagccggggatgggtatagtctgtgcctctgtggtgtattgttggggctaaagggccttctatgatgtcaggttttgttcatgacctaggttgaggtactgtggtgcttcctttggtgtctagtgtgggtgatggggttggatctggcagtgagtgtgttgtgggcgtgtgtgttggttcttgtatctctgtttctcttttctctttaatggaatgatgcgcagttatc

SEQ ID NO: 31321 - DNA, 418 bp, Zea Mays
gccatataagtgaatcggtacgcgcccagagccgcccgatcttgaatctacgggtgagatttttaagtggtcgagattgaccagggaccgctcgatccaaacccacggtccagatccattcctcgaagcggtacgtggtttatctaatctgaaccgttcatctaccgagcgatggtagccacggcgtcctccacctccagaccgcacagacggcggcgcgcgagtatagacgcggtggcgccatggtcagccaccctccaagctaggccccactacccgaatccccaatccaacggacgctatacgtatataggcttattccgaactcgagggaggtacataccattgacggaaggcagagaggaaagctagccgcagcacacggtggtttgcccgcgaatccgaactctgccgagta

SEQ ID NO: 31322 - DNA, 501 bp, Zea Mays
aatgtccatcatggattctgctacgtgaccatgtggtccagcttgtttggtacacgaggccatatctttgtgttcgctttatgtatatgttccctttttattcctcagtttattcacttttatcttgtagttgcaggtttcttactcctgggtaggttccatttgtcttaaatagctttagagcaccaccttatgatatctccttttgactatgattattttcctatgaataatttttctgggaatactattaagataccaactaatctttgatatcctctaaaccaaacgcttcatgatagatgattcttgaggttgttgaatgaattggtcttgcgcatgtttgcaggcctttattggcccactaatctttgatacccactaatctttgtgctctcaattagctctaaactaatctttgatacccactaatatttgtgctctgaattggcctaattaatgatcaagtggtcatggtgtatgtcaactaatcactttctc

SEQ ID NO: 31323 - DNA, 378 bp, Zea Mays
agataatctttttcccgaagcgtgtcgtataatataatcaagaacttcggaaggcgcttcgggagtaggagtggcagctttttcagacagaatctgttctatagcttcttcttccgctgccttttctccagtttccaaggatttctccttggcgggctctgaaggcccagcttcggtgtcggcctggctcattgtagcttcggcttcagtcagctttgtctcggtttcaatctgcgctttcgaagccttggcagttttccctggagtagagctggaagcttttattatctccagcacatctagtacactagccatcatttttctcttgggggtcgctgctagacctttttgtgtcttcggcacctccactcctgccga

SEQ ID NO: 31324 - DNA, 298 bp, Zea Mays
tacgcgcatgacttggaccatcaaattttgagtacctaggttcaaaatcacgagacactagtcgctaggttcttaaaatcactttggccatgtgcatagtgttcttttggcacttgtttgatttgcgtgacgagtagatttgttctaccgagagaaatatggtaacatactaacatatcttcgttgttgttgtgttgatgcatcctgccgtggtggtggtggggcatggtcaccacagctggcgtaatctctattgccctgcggaggaacaataggcaccgagatccgagccaccgtt

SEQ ID NO: 31325 - DNA, 340 bp, Zea Mays
gaagtagtcatcgcttcctctatgtttataagtcaagtcaaaattaggggtactagtggtacgctaggcaggcggtgttccaaataaataaatcgggtgatgtggtagttgtcatgcgtgatttattgttagtcagtagttgaattacgagttatgtgagaatcatgttagaaactagtgtgcgacgtgtaactgtgttcgtgaggtgaataataggtcagtaggtattgttggtctcattggcaaatggggatgattcttgttgtgcgataaaatttgaaaggcgaagaacatgtgtagtgtgtcgatcaagttaaccgataggttccataaatatgct

SEQ ID NO: 31326 - DNA, 488 bp, Zea Mays
ctggagtaatgagattggtccggcaagcgcttctagggtggatcattatagtgtgactattcagttcagtccacgtgaccagcagccttggtggttaacatgtgtttatgggcctcaaggaaacagcgacaaaattcagtttatgcaagagcttcgcaacgtgagatctgcttgtcctgggccttggattttaatgggcgacttcaacctcatctacaaggatgatgataagagctctggcaattttaataggcacctcatggacagattcagaagactcatcaacgatttgggggtgaaggaattggctttacatggaaggaaattcacttggtctaatcgtcaagatccacccactcttgtcaagctcgatagaatgttttgctcgccagactgggaacaactctttcctaattgccttctgcagagtgctagcactgacgggtctgaccattgccctctgctccttgggcttcatgatttatctc

SEQ ID NO: 31327 - DNA, 2116 bp, Zea Mays
cttgaacaagtcgcatgcgtgctataaacgaattagcacggctttgaaacacttctctttcttgctgccaccatctctccttttcaacatcagtcccataagactcggctgatttccccatcaaaaggttccaaaccctcgtcgtctcaaaatccaagtcaaccttagcacgaggccgctgctttttgactaactgcaagggcctctcattgggaaccatcaccacaccaccatatgggacaagagcatttgaaggaccacttgttccctcaaaagaaataacagctggtgtggtcagagataaatgcatctcagttctctgcacctgttcagtattcaaatcaagatgcttcaactttgatgcaactccttgaacgtaatccatatagggtcctgttgatgtgttggttgatctcccttctgctacttcacaatgagtatcaacgttgattcttttattgtccagggtctgagatgaaaagtttggagaactctcttctgatattttgcatccattagttgcgccataaaaagtgcttccagctgaaagcctgtccttcagctcatcatttggttgaattacactggaacagtgcggtcttgccttttctgaacgttttttggtcaaaaacttaatgcaagaacttctatgcagcgcatccatgcatggctgtggcagtcttgttgatgcttgtagagtattattcttaagatccatagtataaaagggggaatttctgcggagtcgggcagatcgcttcttttttattgcacccgcttggaaaaatgcgaacatctcagctgcagccctcaagacaacagagtcccgtgtgccaggtagcgaaccattgctatggtgtgtggggttttccacttccgacaccttacccatctgacttcttgtgggatccatttgaggtaaagacctagctgaggaaacaagaccatcagcatcagaatagtttaattccaagtcctttttgttcccttctattgtggggtttaccaccctttcatcagcaaacaaactgcacttacttttgccatcaggtttgcaagttcttcccacattatcttcttcccttgccagttccgtactaaatgatgcagaagttgcagccgaaacttcttgtgtaggttttagcatatctggcaaatgtatgtactcatctaaaaatttgttcagtctgcgactcatgtcgaaagctaattctcctggtgaattctccataccttcttgcatcacacgcccagtctgcacttctgactctgagtagaaagaactttgagcatggccaggtttctcatagttgtgatggtgtatgttggccattgacgaatggccgccctgcaatccttgttctttggattcaaattgcagacttcgtcgaactgatgatgttctgcttctagctgcaactcctgttgctccagagattgattgatcgctaacaggaccagagcaattctccagagagctgaggtttcttttcttccggacataacttctcttgaccttttggttcggagattttccatctggtgttgaatcaggtttctgcactttggctggcttattctctctgattacctttggtctgtgttttttcttccgagccttcattttcagcgctggggtttcctcattcctgaacatttcggttttctcggcacttgctagctgcgtctcaatttgagtcagtgttttctccttgggtacagttggtgctgacaatggtgtgtgttcactcttgttgatttgtgtcttgagccttttttgcatagattggtacatatgaatgttgtcatcagtggtactttctgcaagacaggtggttgattcttgagaatgttgcactcgtgtttcccaggtagctgcaggaaccactgattccaaatcattgtagctgtcacggaaaattgctgttgctaattgtggaagttgggtacttccttttccattttcagtcttggatgcttcatcatgtaaacaattcatccgatgctctgaattgtatttatctgcagtggctagctgtgaagaattcgttgtcatatcacctgcaacgatgctaggtgttcttccatgtgacaagaaattactcccagcaagccg

SEQ ID NO: 31328 - DNA, 336 bp, Zea Mays
gggtaaagccagaaccgacgcaaaagaaagagctgacttcaatgcctgaaatgcttgatcgtgctcgttggtccagacaaacagtgtatgtttcttcaagagggtagtaagtggtttggctagtattccgaagtggcgcacaaacttgcgataataccccgctagtcccaagaatcctcgtagttctttacaattagtaggtgtgggccaagaggtgacaacatcaattttggcagggtgagtagcaaccccttgatgggagacaacatgccccaagtatgaaatttgttgtctggcaaaggagcacttggaaagtttgatctgccaacgatcctg

SEQ ID NO: 31329 - DNA, 371 bp, Zea Mays
atagaagtgaaaggcaaatgtcatgacaacttgacaaacatcgttccaaagcaaaagaggacaagaagtcgacaggatggtctctaaacagttaacactggacctaatgaccttccttggattttgttggaccaatagaccacccaaaaaatagacatgcatcgtcggtagtactcacttttccatagccatagatggtaatggtatacatcgatctggattgtttccaagtcgaagtcgaacaccatggcaacatgcattatcaccaaatcaccacatggcctggtgccctcgtcaaagtgtagccttcaaccaaaatgcaggattaaggagcttctccgtcatggatcgcgatctcttggagattcttg

SEQ ID NO: 31330 - DNA, 307 bp, Zea Mays
agagtatatgaaaatgtattcttcaagtgaggatacaaccaatgtaagtgacccaataacatcaaagcaaggtagaggtagaggagggaagctgaaggaaattgttgctaagaagatgaggctaggcattggttcaagcaacaacactaagtctgaacttgacaaatatctttctgaagaaactgaggacacagaaatgaagcttgatctcctagtatggtggaaggcatctgagcagagatttccaatactggccaagatggcccgtgatgtgcttgctataccaatctcaactgtagcatcagag

SEQ ID NO: 31331 - DNA, 493 bp, Zea Mays
catcaggtgttatggaagtcggcgtcgtcatgatcagggaggctggcgtcgttgcgggcaaggagctcggcgtctgctcgacaatggagggcgtcacactcgtgctcgacgtggaaggtgcactcgagatcagagaaaacgggggcttcgcgatcatgtagtccgagatgtttgcgatcagggagcctgacacatgctcgacgagggagggcagcacaaccatggcgacgttcgcgcggcgtggccatgattatgtccgtcagccgttaggctgggcacaattctgtccggcgacgccaaggttggttgcatgacaattagttgctaggtactgtgctgccaatcaagggttggattgcagtttggataatagatggggggctcatttgtaaaagtacaacagggatggttatacacgttagatatagatccagtggccgacgtcgtggtttgctcaggtttgcacgatacctgcagtttgtacctgatctga

SEQ ID NO: 31332 - DNA, 354 bp, Zea Mays
gcagtggtagggcgaatgaaaacaggctgtttgaacgggtaggagggtggacgaggcaaagaacgattctgattaaaaggtcggattaccaacccggttcgcttctcaggtccctgattagacctgtcacctctaaatccttttgattttccctggcctgtgttcttggcttctactgccagcgccatgctgacagctctgctgcaagtaagatccagacaggtggccattttccgttggagccggttgttgagtcccctcatgaagcaattcttcttcttcaggtcagtgtttacttggtcaatagcatattgggataaatgattaaacttgttgagatactgcatcatagta

SEQ ID NO: 31333 - DNA, 272 bp, Zea Mays
cagtgctgaccagagcgcggtgaatttcacgccgacacgagttctccactgcagcgccacccttcaccaggaacacgaaccttcacacccctcccgcagtatgggccatctccatcgatttcccatcgccctctcgtcgtgtaaacacaattaggtaggcgcgtagggcattagggcacctgactggtgtactcgccaaaattatcagatgcggcggcgcacaaccaccgtgttctgcgttgggtagccaacaggagctcgggcagccgctg

SEQ ID NO: 31334 - DNA, 282 bp, Zea Mays
gttgttctcattgcagagtgtgaaagagaacttgactccctgcaggtgaatttagtgcaagagaagcatcagtcaagaaatttgaagaatcttattgaacagctcgaagctcaaactgcttcagaaatgtcagaaaaggcagaggagcatctagaagttatgaataacttgaaatcattggaggagagaaatgaaacattagatgaccatctgcgagagcttaagtctagaacaactttctagttgtaccccttttctattttactttcataacaagaagta

SEQ ID NO: 31335 - DNA, 445 bp, Zea Mays
gctgttttgcggctgaaattgatgggcaacataggttcgggccgtcgtaaatctcacgagggctgagtgaattagagtttggggctcggggtggcaggaatttgtgcgctccggcgaagctccgccgtgggggtgctgtgcggcgccgtcggcgcagtgtttgtttgggggaaaggagaaattgggtcctggccataggatttggatggacggtggagattagtttggggtgtaccgctttaggcgattggatccgtgccgtcggatcggtatcctgcggattagaacagatcatgtttcattaagttgtagccgtcgatccctgatctagcggccaccagcgataccggttcatgtataggaatggtctaatccgcgccactgattctaatcgtgcggcccatatataaccataccccttcgctgaagccgttttacaaaagag

SEQ ID NO: 31336 - DNA, 485 bp, Zea Mays
agatcgcaaggaaatgttcagtaatttccacataacattggaaataactagctgtcatctcccaactgaagttgcacatgtcctccacgccagcatctcactacctcgagtaggaaatcaatcgaacatgttacacgcacagccaccggcaccaagtaaaagcgaacagtacttgtttggtcctcgatcgtagggcaccgaaccgaaccgcgcaaaattcaatcagaagggcaactgaaccaaaaaatcgaaacagaaccagacattcgcctagcgagccgtgtcccgtcgatcctcgatcccagaaccaccggcgattcaaggacgccccaccgatcctcgacccagcgcaccaattcagccaaaacccgacgcggaatccagaaccacccgcaccgactacacccggaactaaaacccaacgagaacctggagcccgaaggccattgcggcggagtagagaagaagcaggaggcaaacctgcg

SEQ ID NO: 31337 - DNA, 415 bp, Zea Mays
gacgcaagtttcatggaagtgacatacagatgattattgcagggtagaagtgatgacggtcgtccaaggatccgaggacgacatgctagacatcactgggcccgaaggaatcgagacacttggacaagccataaaaaatttcatcctttagcctcgaagggatgtcgaattggttgatccaccaatgtcgtcgtcgtctcatccccaaccatctccgtctcctcaaactttagtacttgtacatccatcatcacctccacaatcttcccatgctactcctcatcctctttctaatccatcgtctctgccataagcatcaacatttaggacaccaccaccttctccacagccatcaagggattcacggcaatcaaagaaatctaaattccctgtaccaaaattggcacattcgaga

SEQ ID NO: 31338 - DNA, 444 bp, Zea Mays
attgtattcacatgagagggtattagagtacaactagtggatgaagacgttattgggctagctaatgaccttttgtgatactaggttttctataatcccctctattcaaggcatacctagatggtgtttatgtccacacaagtaaaacatcgcacatcattatggcacatcgtatctcaaaataaaataaagaccatggaaaatttagccaaatagcacgagagaactgtccaaacataggttaaggttgtaaggcaccttttttccaccaaacagttgctaataagtaggaatataaagaattcaaatcaatagatcaccttttaaactaaaaatgacgtttccctgatgtcaagggcattgtattcgcacgagagggtattagagtacaactagtggatgaagacattattgggctagctaatgaccttttgtgataccggg

SEQ ID NO: 31339 - DNA, 324 bp, Zea Mays
tcaacagtgatgttggacagttcttttaatggagaacgaacatcattagtttggagcggatccatctacatatttcaggcagccacaaaacctatatgagaggatgaatcaccttatcatacttcaccaaaggataagatacgctcaatttctaatctaatcagataacattgattcttagagatagggaaagtcctaacgagcaaattggtacgttcagttaaatggtagacaatcaatgagaatcaaagtcaacatataagactaactccaacacggacctctaaagggtcctataccctaaatttagaggatgaggtcatc

SEQ ID NO: 31340 - DNA, 310 bp, Zea Mays
gaagacatgctccatccgtccaacgccatccctctctaagatccaaactgctaaagctacgagccacatagatctagtcctcacctccgcaactctatgcagatttagtctactgttactacaacggtgaaccattgacgtcctccacactttaggtttggtgcttcttcaccaagatgttaggtaaattcctaatgatggaagccactctaccatgcccgacactagccaactaggcaaaattcaacatggaaaactgaccaacattctcgtgcttggactaagggtcaagctcatgggtggacacaac

SEQ ID NO: 31341 - DNA, 592 bp, Zea Mays
aaaacacctaggtgcgcctaggctcgcctaagctcaaggcgaatgatcagtgcctagactgccttatgcaatcttgactgttagcatgcagtgcactatttttctgtatataagtgctactaatgtgtcaagggtcacatgcatcttacttttatgtcttgtagtgctagctctagttgctatatgtgtcccactcatttatagtttgggcatggaagttttagggtgtgattggttgccggatgagcccaacctggctcggcccccagatccaggctcatgggagcctggttccagtggtgcaagggggtcgtgattggttgccggatgagcagaaccatgcccaacccagcagttgattggttgcacagttgcattagcaaattcaaacacacagatgcaagtagagtgattggttgcagctgcatacaagtggtatggtcaccactgcatacaagtggtgaggttacccaaaccaaatgatcaacaagagcacaactatcagtacaaactgagagagaatcaagccatctttccaactgaaaccaacacgatcagtcttaatgactgattgtttaaaagcagcaacaac

SEQ ID NO: 31342 - DNA, 299 bp, Zea Mays
ctagctgtgcgggctatcatttgtcctaataattcaactgttgatgacatcaatgagcgtattgttccaatggtacctggcagtggcgtcgagtgcattagctgtgacacaatttcaaaatcagcagaacacattccagattttgatgtgctttacccaacccaattcctcaattccataaatgcacccaattttccttgccacaaacttgtgcttaaagagagtgcgatggtgatgctgcttcgcaatctgaaccaaactatgggcctttgtaatgggacaaggctgcttatttccca

SEQ ID NO: 31343 - DNA, 307 bp, Zea Mays
agcagctaccttggctgcgtacaagtgcgccccctttggttttttgtagattaggcaaggatctccttgattggtggtgtttctataaacctaggacatccttgcctacttgcctctttttgtccttgtagattaggcaaggatctccttgattgggggtgtttctataaactcaagagtccaggacatcctttcctatatatgtatgtgctatgcaccccaacataatcaatctactacttcccagccatacctttcttcatggtatcacgagaccgtgtcctctcctgatcccccttccgcttct

SEQ ID NO: 31344 - DNA, 351 bp, Zea Mays
cttcggcacgatagtggtggccaaagcggtagttttcctcttttttccttgccttctcaaggggtagcagtaatcaggatatatgaagccaattgcatcaaaaaccctgttcaatcttttcttgccccgacccccaaaggctgaggacaaggcatcatcttcggccctagtatatgtcccaagcaactcgtcgctagtagcctcaatgcatttcaaccagtcatcatttggttcatcaaacttctctctgtatctgaaggtgtatttcaatcaaactaatccaccttcgctggattcagcagtagtctcctttggcatctcccagctatccacaagtggccacactctgtt

SEQ ID NO: 31345 - DNA, 598 bp, Zea Mays
caagtttgcaaatttccaaggcctatgtgtattcatcttctcaggcgaatggactacgggttcatttaaatgaagtctgagggctcatttgtgaatagcacgagtctgtggaggtgggatcaccctgagccatccgatcgagatccaaaggacagaacccaatcggtaacataatgaaccggtacgggacttgaaccgttcgatgcaagctcgatggcctagatccaaataggcacggatgaacatcatccgctctatcacagatcgagggattggatcgaagcgccaaatgggtaccaatgaatctaatcttgagtgcccattttttgatgaatggccaccgtcaatctcctacctcagtccgagctgagcgacagtgtcctgccccaaccgcggcggcaccatggccgcgacaccgaacctcgacgccccgagcaccaccccaacctttgaaagctttagcacgatgcagatttcatggcgagcatgaggcaggataccttaccgatggaagcacaacagacacatctggccacgattcaaggcgaatccgcggcaacactagttgtccaacgaggaatttggccgagcaccggcc

SEQ ID NO: 31346 - DNA, 506 bp, Zea Mays
ggccgcggcgagactgccattgcagcaggtacggagggagccagggaggcaatttgcaatcgcggttgtggacttggggtttaaggaggagggcctcggatgcctatatatatactggagtcattagcaagaaaaccggacctaggtggttggctggagggctgcttcttatccgttgcgccagactcggctggaggttgcagacgaccagagggcccacaaaccagcgaccgatccaacactgcacacgagctagggagactagggaaccgggaatcacgaccgagcagttacgacgcacgaatatatcggaaccctctgttatcattcgtggtcatgaaatcttaacaataggacggcgactgtttttgcttgcttgatgtcatgtttgtgtcatgctgatgtcatgtgcgacaaggagaataaagaaaggaaaaaaacatataggtgacgcttgggctggaatgagtatatagaatggatactcgttgggctgctggtacgtg

SEQ ID NO: 31347 - DNA, 448 bp, Zea Mays
ctgggccgttgatctccctgtgttcggcttagattaaatggtcgatgttactttggcccgattcgatctgaatcgtggatatgaaattgagtggctgagattagatcctgaaataccggtttgtccaattagatccgagccatcgatccttgatcctatggttctgagagcttaccggttcgagtgagactgatttaatttgagcccttggtttagatcggacggccaccattcaacgataccctttcggctgcgtgtttttcaaaagagtccctggactatataagaatcaacccgccatcctacgtgactatgctctgtgtcttaggagttttaccccgagccccctgctgttctcaggttttgaggcgcagtccaggaattaaaataaaaccagaaaaatagatttagaaattgattttgtgtataaaaataattgtaaaacttg

SEQ ID NO: 31348 - DNA, 343 bp, Zea Mays
ccgttaaattctgaaataaacgaagagtcaaacctagcatctacagatgctaatggactacgcaccctttcacaactagcatgggcaacttgataatttttctttagaattaaggtagagcccactagcacgtaaactaatttgtcttctccttcgccgtcgaccatcagtcattaaagcctgggtagcatcagaatactgtttgcccttgtacacatgggtacttcaggaattggttccgttatgttgagcaccagatttggctgtgacccagacggtccacgccttagacggttcgcggtgtaggtcgaacggtccacgattagattaacttaggcgattc

SEQ ID NO: 31349 - DNA, 779 bp, Zea Mays
gccgccagctcctcaaccgcaacacacgggagggtaggggcatcaactggtcctgccaatgaatccgaagagacaggcaccgccaaaacatccactggagttaaagggcaacccgaatcaccagtagccatcaacgcatccaaaagccccacatcatcagagggtccatcacgcgtcgacgtggaatgaaaacgtgggcccagccgcgagtgcaccgaagtccaaggcaaaggtctgatcacccagcctccgcatctgccgagcccgacgaccctgctccggctcatcatcagatggatccggtggaggtggcggcagctcctcctcaaggacaccctccgatccaataatcttcactatcacagggaacaccaacgaacgtggaatccaaactccgttttcatcgaggaccgccggctccacagcatgcaggtccaacacctccggcaaccccacgggagagcgacaccatgctctcaacctgatgactgacaagtcctccccgccgatagaaaccgggtgcaggccctgaatcaggcagtatggaccaagcaaaacctccgctgtctccagtccccaaaggtgagcagggataccatggagctcgacgtcaatgagggaagacaagacactgcctcccgaagcaaaagcctgcctagtccatctcttaacatgcaaccttaatggagggacaaggagcgacgatccttcactaatcacccgcacagccagttcctctgaagggaagaggacaagaaaggagcctggcgcagcacgac

SEQ ID NO: 31350 - DNA, 389 bp, Zea Mays
ttgcttcaggacgaggccgtgtgtgtgtcacggctctccatgccggtgtgttgccaccgatcaacctcaacttgttataccacaaccctctacaacaagttgcataggttctagtacatcgccttcgcctcgggctcatccagtttggggatcaatcggagaatcatggccactgcaaccatgttttgaccggggttgaggaagtactgcgcaccatcgctactttcagtgacctgatcgcaaatcttcctcgccccgtcctttcggctctgaggtgtattttctcaatgttgtcataaacccgatcgagcctcttgacgagtgagtcgagctcctcctcctactgttggagggcagcctcgtgggtgagtatgcgtgcttgacgctgg

SEQ ID NO: 31351 - DNA, 337 bp, Zea Mays
ggccatccgagtagcccttcgttcaatgggagacggtgagattagcatttcagcatatgacacggcatgggttgcacttgtaaggagtttgaataataatggagatgatggaccagagttcccatcttgcattgattggattgctcaaaaccagcttcccgatggatcatggggtcatgacatcttcttcctagcccaagatcggatcatcaacaccctagcctgcgtcatcgcattgaaatcatggaaaatccacgatgatgcgtgcacaaaaggtatgattattatagagggctcatgtattattctaggatataattctgaacatcaaatgtat

SEQ ID NO: 31352 - DNA, 280 bp, Zea Mays
atttaatccggaaactagaaacccgtcggctgcggatacgagtgaagattttgactagtgggtgcaacccaccttcgacccgaagtttcgcaagtgtgagcgtgggtttagggtttagatctaaactagcacgtaaacagagatcttaccggttttgtattccttgatcctaacacagtgttcttatagtggtgctctctacgaccctagctagaactacgtacagcgtactagcatccgtttgcatatgcaccaatcaacaaggttacttcgattgcag

SEQ ID NO: 31353 - DNA, 555 bp, Zea Mays
gccgtggggaggtatcaaggattcggggataaaagcctcaccagtgacccccttcactaaaacctccaattccgcccaggacaggtcggtccctggcccgcgctggattctgccaatgtcattggggccggtgaaccagcaacacagacgcgacctcccctgcaacggcatgacccgacgcttcagaaaatctccaaccacgtgcatcgaggtcataccaccggccgccagttccttgatcatgtccagtacgggttcgaactccggcacaagggacagtttggccctccattgcttccggtcgagtcttggtccgtcgttcggcagggcaaggcggtcgttggcctcagcactgacgatcacccagtcattgcgccagttctcccacctcgcgccgccaagggtggcaatgtaggccacggttggatctgacctcgtctagaaatagtaggcatcgaggtggtccttgcccttcccagacctcaccagcacgcagaagtggcggaagagggaagtatagcccccacccccacgaacatctcgcagaggtggacg

SEQ ID NO: 31354 - DNA, 329 bp, Zea Mays
gagccattgaggaaccgccgaaccagagcctcttctctccctcctgtgtactgtggagtgtggactgtggttgtgtcgttgtggatctacctctactctcttctccggtgctccggctgcgcaggtaatctccaatctccatcttcctctactctctaatccactaatccgtcgctaatcctctcttgttttgtgctcaggccgtcgaccgattaggttggtgccgcgctcgctgttgaggaatcggcgcgtcttgtcacggttgtggatctcctcccaggcagctaagtagctaaccctaaccctaatccctaatcactcggcttctc

SEQ ID NO: 31355 - DNA, 489 bp, Zea Mays
ctcatttaaaattctgaattatttgtaaaatatcaaaggaccattcatgaagaggagtgttgcaatattgagatgagtgtagaaacattagtttcaccttactagttgaggtggagagaacccaacttaaatagttgagtacttcccatactcttgcatgtgttgggtgagagatagaaggaagaacacgtgtgtgctcgcctcgctgggctaggcgatgcgaagcgagacgtagggcgtgcgacatgcgcgtgaatggttggctgaattcggggtccatgccttgtgcgtgtgtggctttcttttgtagttttgttttgctagttattctagaatccatatttaataaggcttatcaagtgcaaattgaatcaactggtccttatctagtactatccttatctgatgcagatcagtggatccctatcagttactgattttttggaactaaacatagtattctccaacaaatagctacctagggtgcca

SEQ ID NO: 31356 - DNA, 278 bp, Zea Mays
ttgtatgcacatatgttcataggagtgagtgatgatatctatggtgactttgtcaatctattcactgctaccccaaaaggctacatgcctaacgcaataccttctccactttggtccactagtgtaaaccaaaacgaagggtttccaaagttagtatcaacatacacaaaaccttttccaaaacacatccaacactaagtgatgacctcccacaagacgataatttaactcaccgtcagctaccttttagcaaaaatcacaaaggccttagcttttcc

SEQ ID NO: 31357 - DNA, 281 bp, Zea Mays
attggttactagtccttgttcatacatgttcttgtattgtttgtttggtactagtccttgttcatatgtgttgttgcatctagcgaatggcatgcattactttgtattgccttctttgcttctagtcgttgttagtcgactattatcattaaaacaaaatctaacgacctaactcacaattagacgaattcgcctctgaaagaagctgataaagccattggcttaatgcaagacacttccaacaggattcttgctttagcaagggaaaaactctgccccgg

SEQ ID NO: 31358 - DNA, 342 bp, Zea Mays
ccattcaaacatgcttggctgatcactggggcaagcgtgtggaggcctacgtggatgacgtggtaatcaaaacacgggactcaaaaaacttcatcgaagacttacaactggttttcaacagtctgaggcggtatagatggaagcttaatcccgagaaatgtgttttcggggtaccagcaggaaagttgctcgggtttatcgtcagccaccggggaattgaagctaatccagataagattgaagctatcatgaagatggaagcacctcgatcgcaaaagaaggttcagcgacttactggatgtatggcagctctgagcagatttatatccaggctaggagaaa

SEQ ID NO: 31359 - DNA, 731 bp, Zea Mays
gaaaaacacaggggccataatcacaattaccctaagactcaggcttccccacagacaggactgcgggttgttttgtgaaaacagaggggtttctttgcaagttgacgcgcgtgaaggggtatcctattatctgggccgtcagatcgcgagtcaaaggttcagattagaagccccccctcaattgaaccggtatgcattccagtccacaagatccaagatcaacggtgggcacttaatggcaaacgattccatcccgagccgcaggatcacgatccaggggctgtgaattatccacccaatcggtcatccccctgttgatctcacccgctcaaacctcatcaaacggccataaggccatcttccaccccacgacggactgggcagcagcgccgctcacctcccgacggcgaacacaccggagcagcatgctcccacccaagtgcatagcttcccacacaatcgaatgctacacgagccaaagaacatggcgcattgaacggagaccttaccttgagcagacatcaacgcaggaagctcgaccacgtcgccatgcggcttggtgatgaccagcaaggtccgacgagctatcccgggcgtccccggtgtctatcccattcgataaggccatggtcgtcatccagctgacccgcggagcacccccagccggacgtagatgccacaatgtcgatgcccgcatggattaacgaaggcggccacggcttctctctctc

SEQ ID NO: 31360 - DNA, 301 bp, Zea Mays
aattcacctctcatatttgaagctctgtcataaccttgccctcgtattcttgcaatagctaaaccgtggtcactaagcacctcaaccactcctttctttattgcctcagatgtagtatctttgacatgcttcacacctagaaacctttcaatcacttgtccttttttgttgacatacctaaaaatggtacactcgttaaattagaaactttgtaatgatataattgatcaatgaaacataaggtataaaattagaaatgtacctgataactatggccatttgctctttgaccgatatatca

SEQ ID NO: 31361 - DNA, 302 bp, Zea Mays
tttcttcccacttccatttgggcactagaaggggttgtagtagacctgcaggcttctgatgctcggtcttagttcgctggcaagtgtcacaccgggccacatattgtgctatctctttcttcattcctctccaccagtatctggttttgaggtctaggtacatcttggtggtccctgggtggatggagtaggctgagttgtgagcttcatcaagcaaaacttctcgtgcctctccttttggtacacacagacggttcttgaaccaaaggactccttcctcaactgtcctgaagtccggaagt

SEQ ID NO: 31362 - DNA, 551 bp, Zea Mays
gaggcttgctagggatatatcctcttcgtcggaccagtcatctattttggggggaggtagggctagaggggccttcttcttcttctctgtctggcatccttggttggtggtcttcttatggatcttctttttgggggcgagtttctttagcttcttgtcatagtccatcttcaaggtccgataggtttcacgggtgttggcttcctcgccttctgctatgttgagactctcctggagggatgccttctcttgcttaagctctttgacttgccgctctaggctttccactcgggagtttaggtgggtgcagtgggaggagagctcgtcgtagtggttgtcgagggtgtggaggtatccgaccatgtatacgatagtggggtcatcttctgtgggatctcctcctgacagagcctggagtcttttcctccaggtgggggtgtttttgttgctgggtgggaaatatcggaggggggtctcagagatctctcggctatagttttggcacagttgtttgagggcttttcgagcaacgctctggcaagtgtctggga

SEQ ID NO: 31363 - DNA, 334 bp, Zea Mays
caagttttgtattcaaaagataattaaattcccagatctacttagcccaaaaccgtccataagatacatcctgcaatctgtttttagacagcaacatacccagattcaaacagcgatatctcctaaattataactctgaatcgagtgcataagtactcgttggaaatgtatgacaaagatctacatgattctcatatggattatcactaatttcccacgaaaaatccccagaaatccctagaactactgctgttcgtcctcccacaaaaatctggacagcacctataccgattcgcataggtaaacatgtaaccaattggattgcagcacaaat

SEQ ID NO: 31364 - DNA, 299 bp, Zea Mays
tggctatcgatgactagtggttggagctcgtcgctacagatggcgagcacgcggatgagatcaaacctagcctcgtttttagatgtaaacatagggttcaaagttaattacccagtaatatcgctcgtcataaagaaataacaattcattttcctcctattgccctccttgtcttgcagacgtcttcttcccatcaggccatgccacacaggcggtagagaggcttgcacgtgccaggacctctagctagagctgccatccgactatgcgtcgaggaggtggtgcacatggctatcgat

SEQ ID NO: 31365 - DNA, 386 bp, Zea Mays
cgactgacatggcatagaggttgcagatggcgtgaagactggcgattgacgactggcacggaggtcatggtttgcgggcggaggcagttcgttgcgagagccaatcggcgcgaacgcgagaagcgagagactggctggggcgtgtcgtgcggagggtgcgggaggcgacacgggtgttggcgagcgttcgtgggcctaggggagggtggagtcatggtctgcttgtgtacggtaggggagagttggtgtatgttttggtgtgagtgtgtacatacatgaacagatactataactgtacttgtaagtgagaggcaataaaaaatccattgcattgctcgggagacttgccgccagctacacaccgttggggctgggttgtttctgca

SEQ ID NO: 31366 - DNA, 606 bp, Zea Mays
ggcgaggtagccgcagctgagcgagacctaggataccagtcacccgagggggacctaaaggacgtcttcactagagactcccactccgatggtgactaggcgaaccaccggcgggaccccatgtccctcgtcctactgagctgaagcctgccttcctccggaaaccattctgggtcccccacgggtccagacttctgacaggtttatccaggagtgaccaaggccaaggacgggggctccttcgtcaaacgcagatggaaacccggggtcagaacctaaacttacggaagtaccaaaccaaatcagggctccgcaacactccccagctgggaaggacccttcaaggtaacgagaatactccgacccgagggcgactgtctagctacgcccgaaggagtacctcccccggtgctagaacatctatgtaagttctatctataaagcaagtctgaggggtcgagttgtttcccttttgcaactaggtagcgcatatgtgtatgccaacccagtggggtctgtccccataaaacccggcctgttggtccgcacacatgcatgatgagttataaaggaaaactaccctctcatatgtgcctctatgatagt

SEQ ID NO: 31367 - DNA, 290 bp, Zea Mays
tgcttctgcaatattcacgagctaccttaccaaacgaaggcaaccgggaaagagcaatatcataacaacttcggctgttacagcttcgtaccccgctctgaggcaaattaccctgtgcctacattttggaagaagtggccgggctcctggatgaagcaatggttttacgtaaagattgacctggatcaaagggaggatgtgaggggcatcattcaacgtcctatatggtcgcgcttcggcataagggggccatcaatcacaattgggaatgaagtgcaagcatgcctaat

SEQ ID NO: 31368 - DNA, 380 bp, Zea Mays
gttctttgcattctcccagtcttgttcatcaggataccctgggcctcctttctcttgtgactagtcaatagcatacattagatcttcatccaaataccttgcaaacaccttctcatatgagatagctgctttcaacataagatatgttgagttccacctagtgcatatgtataggttcaagaatgccttggtttcaaccttctcttcctcagcgatctccttgaatttagccaagcgagaagtgctatttttaatgtatctaacagcagctcggacacgcttcactgaaatatctactagtttgagtccatcttgtacaataagattgacaatgtgtgcaacacacctcatatgaagaaacttgccttcagctatgcttg

SEQ ID NO: 31369 - DNA, 300 bp, Zea Mays
ctggaaaccagcaaaagcggcatcatcaacagtgccacaatcgagcaaatccacgaccttgaggacatggtgatctgatcggtgcaggtggcagagttgcgagcaacaatgcgccacgaggtgaagggcgttgctggagatgcgctcgagaggatcagactcaatttggaagctttggaggtcctcacgccgcgcggcgatgatagcgagtgtcgcatctatgtggccacgacagccatcagcggatcagccaccacttcgcagagaccgcgcgctcgaaggcccgggacgacttttgct

SEQ ID NO: 31370 - DNA, 725 bp, Zea Mays
atttaggtttaaacacagtcacaagaaacaaactaccacctcctaacaactacaccacttgttgatttgtactatataagggatatatactaataatatatgtatactaataaataaaaaacctgtcggaccgaaccaacactgtgggtcaagaaaaatggttcaaacatgacacgatccactttaaatcatatcggactaggccatgacactattaaatggatcgtgtcttaggctggcctgctagatataactcatttaatctctactaactattaagaaggtaacgtagactaaaacgtgcccccgctcaccttatcacgtggcatgcacctactcccccactcacactgcatgcaagcatgcaagtatgcaactatgcaagctacggtgccccctcatccactcatgctacatgcaagcatgcaactagcctccgaagctaggccccgtggctcccttcgctcacgctgcatgcgttcttgtcgagacaaatttttgcatgtgttcttaattaaaattctctactaactattaagaaggtaacgtaggccaaaacgtgcccccgctcaccttatcacgtggcatgcacctactcccccactcacactgcatgcaagcatgcaactatgcaagctacggtgccccctcatccactcatgctacatgcaagcatgcaactagcctccgaagctaggccccgtggctcccttcgctcacgctgc

SEQ ID NO: 31371 - DNA, 284 bp, Zea Mays
cggttacacgtttagtgtagcatccatcattgtcttcatatgaaaaaacataaggcttcagactgcatcaatcgttggcggtggagatggccaactctggataatcgccggcgatggcaggagatggagttgtgattcgtcaagacactgaggcagtcgttgatggtaacttaatggttacaccacctcatgttctaatggggcctcgaatcaacgagataagcaatggggaggaaggagaacatcggattcgacctccgatgtccaatattagctcccgggag

SEQ ID NO: 31372 - DNA, 411 bp, Zea Mays
ctcccctattatgacgaactgctccttccacaaaacattgatgtgatgcacactgaaaagaatgttgccgaggcactttaggcaacaattatggacattgctgataagtcaaaggataacataaaggcaagagtggatctggaagcgttatgtgatagaccaaaccaagagatgaagccgccaagtggtggaaagacatggagaaggcctaaggccgatttcgtcctaagcagggcccagaggaaggaagtacttcagtggatcaagatgttgatgttccctgatgggtatgcagctaacctgagtagggggtgaacttatctactctgcaagtcttagggatgaagagtcatcacttccacatatggattgaacggattcttcctgcgatggttcgaggctatgttcttg

SEQ ID NO: 31373 - DNA, 457 bp, Zea Mays
actaccacttcgtcatcttttggctctaggatggtttcttcgtcagcaaaacgaagaagcttcttctctgtctccccgaagtaaccaagattcatcatcatcggcacatcggcctcagagacagtagatttttcaaaatctaagtggctgggctttgatgggactagagtgttgtagtcttcctcttcaacaacattttcttcctcaatatcagcttcttcagcctcagcagtgtgtacatcttcatcaacagtctcctctgtcacaatcaatccagattgcttcataacttcggaaattggcgctgtttcggtggcttcggcctcctctctgtcacgggtcactctagcagttgaacgtactctggccatcaggtgttgaatttcttgcagttcttacgaatgttgatgatttttacagttttgacgaagctccctcttatgccgaagctaaatca

SEQ ID NO: 31374 - DNA, 272 bp, Zea Mays
actcgatctagtgtcgattgaatataccaaaattctacttagccaactttctacagaaattcagaggcataaatggaaggcaaggcaagcagcagtgccgcgcagcaggccgataatgccgggcggtgacagtgctgctcataggggggtagtgccacgcaggcataaacgcacagaagttttcgcaaggggaaagaggatgatttgtgaagtttcaactagagcgaaacaaaactccatgcgcatatcagcaagtcccgttttggttgagg

SEQ ID NO: 31375 - DNA, 364 bp, Zea Mays
cagtatgcaattgaccaggtcaatactgacctgaaaaagaagaattgcttcatgcgaggcctcaatgaccggcttcaaagaaagatggctacctgccttgatctctcctacagcagggctgtcagcacagcactggcagttgaagctaagcacacaggctcagggaagtcgaagggattcgtaggtgagaggtccagtcaggggcctgaaaaccgacaaaggttggtaatccgacctttcaatcaaaatcgttcttcacctcgtccaccctcctaccccttcaaacagcctatcttcatccgccctgccactgcccccgcttcaaccaatcagctgagtgcccctggtgctcgtttcattgccc

SEQ ID NO: 31376 - DNA, 456 bp, Zea Mays
aaatccagtctaccctacgcggagttctcatacaacaacagctatcaggacagcatcaagatgtcaccgttcgaagcgttgtatggacgaaaatgccagacacctctcatgtggaccaacatagggggaaaagcactagaaggacctgcctttgtcaaagaggcagaagagaaagtttccctgatctgcagaagattacttgaagctcagagtcggcagaagagttatgcggacaacaggcggagagaactcagatttgaggaaggagacttcgtctacctcaaggtctccccgatgcgtggtgtcaggaggttccaagtaaaaggaaagctagcaccgcgtttcgtcggtccctatcccatcattggcagagtgggacccgcagcataccgtcttgaactaccagagtccatgtctgacatccacaatgtgtttcccgtatcccagctccgcaaa

SEQ ID NO: 31377 - DNA, 539 bp, Zea Mays
cttcagagtccttttggaagactcatactgaggttagttcactatgtgtcttgtctttcttaggatgcatgtaaatgtttagtaatgttagctaaaagggtgtgttacatttgattgcagaaaagaactgagtgcaggaagtttcaatatgggattcctacatacatggaacacttagcagagatgttccatggaatcgtggttgatgggtccagttcttgtatccctggaagtgacaacagacaatcagaagaagtgtatgaagaagaaggagatgatggagatggtgaaggattcctgaactccacacccactagtagcagccgcaaaagggccagtagtacaacagacacaaccactagtccacctaaaaaaggaaaaagttctatgataaaggtgttagaaggaataattaatgaaatgcaaacatcaaggactacagatactgaagttttcaccaaaattacaaatacccagcaaaatagaagtacactacccatagaagaaattgaaagttgtttgaacttggcagaagcaag

SEQ ID NO: 31378 - DNA, 313 bp, Zea Mays
tcatgtagaactttgtcatacctttccaacgagtacttatgcgctcgattcggaattatattttagaagatatcgctgtttgaatccgggtatgttgctgtaaaaaaacatatttctgcaggtgggcgaacaacagtagtattagcagtttctagggatttttcgtggaaaattagggataatcaatatgagatcatgtagagctttgtcatacctttctaacgagtacttatgcgctcaattcggaattatactttagaagatatcgctgtttgaatccaggtatgttgctgtccaaaaaaacagatttcag

SEQ ID NO: 31379 - DNA, 432 bp, Zea Mays
ggcgggagcactggtggttgccactagtatctgtcgatcgttgagcttctgctgccttttgttctcttatgacccgtgtctgccgaagatgatgttgacttctccatcgacgcgtgggaacactccgcctcctcccccttcctgctgctgaggttgttgaggttctccaggtcctcctcgtggtgggggaggtggtagaggttggaagggtcggccattcccgacggagtgcttgaagtctctgcagttccggagggtatgacgcatatccttgtggtatgggcaccgggcatcgaggatgtcgtccaatgttcgttcgcctccgcggggtgcccctcgggcatgagagacgggtggtccagcggcatggacttcttcacgaggcctcttctactagcgcttgtcggtttgctggttcgcgtcgcgcagtgg

SEQ ID NO: 31380 - DNA, 675 bp, Zea Mays
gtttttgtattaaaaatctactttccaattcaattattcaatttcagactgtattggactgggcctcaattttcagaaagcgcaggggccccagggtaaaaatccccagacccagcgaacagtggaggtggatggcgggttctaaatcaactaaacacaggggctcaattgtaaactgacccagctgaaggggtaccgcctaatctaagccgtccgatcggaaatcaggggcccggattagatctccacacccgtgcgaaccggtacacgccagatccgcaagatttgaatccaacgccccagatcaactctcccctcttttaatctacaacgttcatcaatgcttggacgtcgccgattcacctaagcgaaacggtatgaccccgtctaatctagaccgctcaatggaggatcgacgactcagacttgttcttccacctcgccgccaacaccggcgaccgcaccgaacgttgcgacgacccgccatggcaacgacgcccacgacactaatctgtatccggttcctacgtatctcgggtgcaaaatgaaattgagggaatggcgaacacgggagactgattattaccaatgttccagcagtggccagctccgtccacggcgcgttgtagtcccgcggcggagaacaattcgatggcgagaaattggaggcacacg

SEQ ID NO: 31381 - DNA, 394 bp, Zea Mays
cttgatgtcaggtggtgtagtttccttagacaattagtcgaggtagaagtacttgtgttaattaaggccaataatggacccatgttttgaatggtgttgctatatggggtaccttggatgttttgttggagtggtcgaatccgaggacgaattctttttaaggggggtagagtgtaatatcccaaataaaagttgccaaaggttgatcttcggtgcgtggatgtgggaaaaagggttgtgggccgttggatgctaagtcagagtcatctatggcgttgtttcgtttctcccgcaaagaaaccctagcggtggccctttccccttttgcccttcttggccgcccctttctcccccccacacacttggccgccccttcccctctccccttggctgg

SEQ ID NO: 31382 - DNA, 315 bp, Zea Mays
tgctgaatgagtgtgctgttgctgcagatggcggtgccgaggatgtcgaataccttggggatctgaatggcgcacggcccgaggccgaggtcaacccggtgctgcccgaggctgaggtcaaccctgaagctgttgagggctcctccgccggacctgtgcccactgtgtctggtgaaggctccttgctagcccctgcgtagccggcggagggccccccgaaggcggtggcggagctggcagcggaggatcccaaggcggcgacagggccttcgcaagtggcttagtaggtgtgggggagttagtaaattttgtctg

SEQ ID NO: 31383 - DNA, 344 bp, Zea Mays
catgcgtcatctagtgagtgaatgactcaaggacacgtaattgttaaggacaactactaaattgaaagaaattttctctaactcctattaattattctccgttcgttcttcctcaatgtttaagatataagctaaatttgttttgataaattttaatcacttatcctctagtcgcccctgggtcgtttcacttgcatcatcaacgagcctcacatccaacgaaccgatcaaaacgaattcaagtcgaccgaaaaaataccaaaaatcctgacgagctgttgcttttatgtaagtctgattggagatgggcgcgtgagcgtggtggttttaaataacagcccctc

SEQ ID NO: 31384 - DNA, 325 bp, Zea Mays
atgagattacaaattccttcaattcagtcttatcctcttcgaaaagctattggccacctaggtgtcgtagatcgaattatgtttcttccgaatagatttcttgtgcctccttccctttgtctgaaacttccgtggccacctccttttccacagccacatctgatataatcttgtcaattttggacatggtggctatgaggtctttgcctttagttgcaatagcagcttcagcatcagtagatttgacagtcttgtatgccgaagctggaggcggggtttgctcaattgcatggagtatgttcatcatacgtcgctttttctgtcc

SEQ ID NO: 31385 - DNA, 509 bp, Zea Mays
ctgctgtgtatctgctgaatcgagctccaacgaaaagtctacaagggaggacaccttatgaagcatggcataacagaaaacccaaagtacatcatctacgtacatttgggtgtgtagctcatgtcaagaaaataggccctggtgtttcgaagctgtcagacagatcaacaccaatggtgtttattgggtatgaggcaggcacaaaggggtaccgagtttatgatcctgtggccaagaaacttcacatatcgcgtgatgtgatttttcaagagagtaaagcttgggactggaaacaagaaactcgagcaggatctgcaacaccagtgtttgatattgagttttactcggttgctggaagaggaacagtaccagccgagcctgcaactccagaaaattcagaaaatgcagcagcacagctagccgatcctgcaaccccagatcaacaatcgcctctccaagatgattgggctattgacgctggctcagatggagcatcaaaccatgcaacg

SEQ ID NO: 31386 - DNA, 324 bp, Zea Mays
aacatctgatcgactgaatataattggtggactggatcggaggaaacataaacatcctgaccgatttggaagctactaagaccgggtacgtgggctgagcgaggtatcctgcgaactagaggccgttaggtttttggccattggtctcatgtcactggaaggtggcgaaaggttcacatgcaccgtactggagaggaatgcggcgtttttgttcgcctctgctatggccgatgtgcgcgtgtggaacggagaaaaccatgagcaatctgtacggttttggaggacatcacgcagagccccctgtttttgacgcttggggaggaa

SEQ ID NO: 31387 - DNA, 357 bp, Zea Mays
gtaatgtactgaatagtgggaagaagatcaactcataatgagttggtttttaagtttgtgaaaaaacttcccctccttatataacgaagaagacttctcatcactttgtacgcgtttcttgcttttccactgtttcttttgcaattagctgatcgactgtatttgtgtttagagtaaccgagtccttttgagccacctcggtgttttagatataacagccgagtgattatgggtgacgtcggcgttttagaagtaacagccgagctatactgagccatgtcggcgtttttagaaataacagccgagtgaagaccggtgacgtcagcgttttagaaataacagctgagttatatcgag

SEQ ID NO: 31388 - DNA, 596 bp, Zea Mays
atcggacctgtgacgggctgaccgcggcgagcccccctcacacggtgttcttgaccaaattgggggaaattccaaattggatttctctagtgactaattggagacacgagtgggtgcgttgagttcgtgataacctggcacaacagacctagccgtcaatttataggatcgctgagcggtggctgggaatttggatgaagacgcgcggcgatcggaggaacaaggagttactgacgcaaggaattcgtggcatctaccatggcagcttcaccggcgatggacaaagggttacagcgagttacgacgacgcgatggatgtgctaaggcacgtggcgcaaggccgtgaagcggccgtcatcggcgagctcggtacggtggccgaagtagtttaatgaccggagtttatccatggcggtgagacttactccaccccgagtgttatccagtcgatccgaacgcgaatcacggtggtgaaggcacgaatctacgcgcggctcggcgacggcgaggaactgcgctggcagtctgatccgatcactataccatggaatacatcttcagttgacctgacagagcaacttggagtccaattttct

SEQ ID NO: 31389 - DNA, 438 bp, Zea Mays
gtcgtgatttactggcaccgacgtctgggtcgtgcattagagagggggatctacgtgacctttttgatggtgaagagttgaggttgatgttgtttaatttccgagaagctggtcttattctgaaataagaaccaatgtaactaagaatgttgccaccgccgttctttggcaacgataagcgaaaatatcaccttcgctgaccagggggcccaccatcccagctgcattgtgtgtccgtccatggcagaaacagccccttcgccatcggcgcgtgcaacagcctagcgtagccattcaataacccgccccattgaccgtggcttataagaatcgactgtcgtaaacccttctcctccttccatctttgctagccgcccgagtaccctgactccacgacgaaccgggtagaggcaagctgtcgacacgtacctcatcttc

SEQ ID NO: 31390 - DNA, 705 bp, Zea Mays
cttcaatataatgccacaccttttctaagttacccattttgcaataactacgaatgagatagctataaccatatagatcaggggtagatccatgtctggtcttgatgtccaagactttttcagcctcctccagtttcatttctttgcatagtccatcaattaccatattataagcgatggactcaattgcaaccctttcctgggtgatctcatgaagaacagtgtatttgcttaccatgttataagctagatcgtactttccacaatcacaaaggccaattataaatgatgagtatccatgtgcatcaggtttcattcccatttcaatcatcctaacccacacttgaaatgattcttctgccttatttacttcaaaaaacgacctaatgactatgttcaatgattgagtatccagcatcaactgaaagcacttcatttgatcataagctctaacaaccatatctgaatcaccactctgggatacaaatttgataaggaaactgcaagcccaaagtgtaggaacaaatccaagcctgcaaaggtgacaaaacatctctactgtttcttgtacgtcgtggctgttagtgtatgccttgattaagcaattgactgcatatgagagtatgtgagaagtggcacaagttttgctcaagtgaccaataagtgttaagatttctgggtcaccattagcagttcccgaaagaa

SEQ ID NO: 31391 - DNA, 481 bp, Zea Mays
gtaagtgatgctgctggctctaatgaacttgattcattgacttcttctagtactggtaaacgtcgatctgctgtttgggatgacttcactgaagtcacagaaaaccgtaatggtaagaaggtgcgcattgcaggtatttgcaaattttgcaaagctaggttgagtgctaattctaatgctggcactggacatttgcttaggcaccagaaatcatgtaaaaagaagtctgatcatgctgctatggttcaaactagacttgctttgaaccctgatgggtcttttagaaactgggaatatgatcctcaagtggctagaactgagctttgtcgtttgattgctagacttgatcttcctttagggatagctgacacagatgcttgggatgagtacattcagcatgctcacattgtcacctatgcttgttggttatttgggtgctgatgttgatccaacagataccagtaacaaaacttatagtgtg

SEQ ID NO: 31392 - DNA, 276 bp, Zea Mays
tgagcggggagctgccaccgaccattggatgtttccccaacagacggatggtattttatcctgactgtttgatccatagcattggtcaaaggatggagggcccagattagaagtagagtaaccgattggccaggggctgcactggcgattgtgtctaggtggtcgtgggtatttaaaaatctgggtcgtgggatgcagatcgggcggtcggggttgctcgtgagtttgaagagtgtcatatttaatgcataccgtagatgctagatcgggtggctc

SEQ ID NO: 31393 - DNA, 351 bp, Zea Mays
gatgtattgagcttgtatgaacttgtgagcctaagctgggtctaagtgtgtccagtcagtttgagtgagcttgagtctgagttgtatcgttgcatgcctcccctttaatagctaaaggggcacgttacaagggtactgagccccgacatgtgggcccaggaacagaacagatgtaatactgggagtaaccaatgttcgttgctggagcaatcttcttgcgccctgacatccgagatctgcgtagtatcggcgtgcaggggaagcttccttggtagcatataagtgatgatggacacagtgcacctcgcagcacgggcgtactgttcgtcaatggactggataggtacgccg

SEQ ID NO: 31394 - DNA, 874 bp, Zea Mays
agcacctgtgcaggtgacggtcctccaccaatggagaagcggaaagaaccggcttttcctcttaaaacaatgccactgcatgctaacggctggttgaacgacatgaagctgtcctcgcctactgctgtccctgtgaacattggtagcaacagtgttgcttttgatcccatctaccgagcttggactgtgagtctacatcttacctactaacgtactgagacactcgtagtcgtagctgtaagagctggcattgacagccagtttccttgtcatttgcagcagaagtatccttcagctctgaacgcgtttgaaagaattgttgcctgcggcaaaggcaagaagattgcgctgttcttggattacgatggaaccctctcgccaattgtcgatgaacctgacaatgctgtcatgtctgatcaggtaatcgcgttgtagcatcaaccaatctcttaatcaaattaagatcgcgttttatttcactgatattttttttcttcaatatcatatatacagatgcgggaggtggtgaggagtgctgcactgcatcttcccactgcgattatcagcggaagatcttgcgataaggtggtgaacgcactgtagattatccttccccgtgtgggttatattttatacctgcactcatctctcttcctggccttttcaaactactttaggtgtttgattttgttagactcaccgaactgtactatgctggtagccacgggatggacatcatgggtccagtgggaaaaactggttctgtcactgaccatagaagcagaggcactaactccagtaagaagcaggtgtgaaaaatactttagtattttttttcaatctttatcacgtttagtgcaaagaagcaatgtat

SEQ ID NO: 31395 - DNA, 364 bp, Zea Mays
acctagtggtgctccctgcggcggcgcatactgttcgtggctcgaagacggacggtccgtgaccatactatgggagcggatcttccatatgcgttgatcggtccatacgcattggtcgaacggtccatgatggcacaaggtcgtattcttctttgtaggaacctagatttcaccgaacgacgtagagttacctgtgattcaggagagcactttggaaattttacgaccttttgtgtggttcttcctccctggctccgctaccaaacgaggagcacctttattaagtagtgagaggtacgttttattttatttccacccacacacacgattcaccacacgagacaattctacaaatggcccctcc

SEQ ID NO: 31396 - DNA, 297 bp, Zea Mays
ggcccccgactttatacaaggcacgcggcgtgcaaccgctcgccgtggcgccctgtctgtggacgcgtagcaggcggggtgggggcgaccatcgcgtacgtgtgtgcgtgtgacgctgttgtgtttgtgtgaccccgcgcgtcagcacgcgggtgcgtgggttccggcagaggcagtcagcggatctagccaaggagtcgtttcgttccctggcgtggcgtgacgtctagaaggaacgctagggtgtgcctcgctgacttctgggtccagatacgtggtatcttgcagcaccggcat

SEQ ID NO: 31397 - DNA, 408 bp, Zea Mays
cttggattattttaatgcgttagatgtggccgcagcggagtcctcgccacgtgtggaggttagcgaggcggctgatctgcctagtgcaaggactaagtacaggcggcgaagggtggtgtcgaagcacagcgtgggtgaggcttcacgaagtggtagacgccgtcgtatggggatggagcggggccgtcttcgagtagaccggattggtaaacgagaactgttgtccttgccgattggggctagcataggtgagggtgatctacgaaatatttttgagggtgaggaattgaggataatgttgttcaattatagggagttgggtatcatcccaaaggttgagccgatgtagtatatggtgccctcgctgtgtgtatgtaactgtaacttgtattgtaatgtggcccgttg

SEQ ID NO: 31398 - DNA, 987 bp, Zea Mays
gtttatgtcgtaatattcattttattttgagttcagactttattctttgttcgtactaaaaacttcattttttcttctggactaacaatggtaggcacagtcagataatttagaaataaatagtccaacagtttggatatcttcaacagtgtcgcattcttctatcctgggtagttctgccccttcgcatcatttgggaggaaccaatttgagcttcgctattcgacagagttcttcaatgcttgaagctgattctagagtagaaggtctcgctatcacattctaacactattgtttggtaatatccttaacatgcattataaatttcagttccaccttcaggtatcctaaatgagaaatataagatgtacacttctctttctcaaacaacagaagatacaaaaatggttcagtcacttgtagcagtttgggaggtttgttttctactttgtttgtgtacatgtgctatgaaatgttaataactgctaaacctctatgttattatgttcaggaacttgaacgattaagactgttggaggaaacaaaatatgctgatctgggtagacctttaagggaagaagttcttaaagattttcttcatggtattaagtatgagagtgccctttctgtgttgttttcacaagaggggccacatcacaaagtttccaccatagaagagtctgaaaggctagaaaggtgcttaaaatcgttgactgatattattgggactgttacattctcacaggataactactgtggtaatattgatgttggtaattctgctgatgtgcaaaacgacaaacccgatgcaagtctttgctcagggtcattagaacaaaacatgcagattatatctccagagagaaacagtgaatatcctgtgtcttcatctgtacaccaaagaacactatctcagttatctgataaaggtgaaaaggtagttcccgctcctcagatattaattacattgtccttgttttcttcata

SEQ ID NO: 31399 - DNA, 426 bp, Zea Mays
gcttaaggaggacctagggatgctagaacaagccatggagagacttgaattgacctgagctgagctggccacggcgaggtcgttttcacggtggcggaaaactaaattgggggaaatccggaattggtgctctgcagtgaacgattgctggtgattcttggtggctggatgcttaactatcctacggagctcgtcgtggcttcaatttataggagggaagagcggtggcactcaatttggccgagcagtgctggcggccggagaaggagaagagcactggcgcagtgtattggtgtcctccgtcgtggcgaactcaccgtcgatgattagacggttatagagagtcgcgatgttgcgacggaagtgttcagatacgtggcgcaaggccgtgcgacggcagtcaccggggttcttatcggttttcgc

SEQ ID NO: 31400 - DNA, 543 bp, Zea Mays
gttgattggctcggcaagggcgtttcgggcgaacactgacagacctctaaatatccaaggttgtaccagcttccgggagaggcgccaccaccaatgtcccagcaagagcagcatcagaagagtcctcagccagcatatcaagcatagcacttatctctgcgtcactaggatccaaaggcacctcaaaatggacctgccgttcatcgtcaggaatttcttcaatcgaagcaaccaaagcactaacttcttcggtagaaggtcgcactctaaggcccaaaccgccatcagcagcaggaggattcgacacaaaatgggcaaaggccttggaaggaggcaggttccagaccgagtatgcgatagggggcgccaacgtttgaaaccttgcctctaagtatcatttcaagccggttcaccaagtctacagcgggaattcttttgttggtgacccgggttgaatcggctagacctcggtatagataagccgggtatgccctgtccttcaaaggctgaatgttcttaaagacaaaatcagcaaccacagcc

SEQ ID NO: 31401 - DNA, 537 bp, Zea Mays
attgatcccaatacacaacccatctatcacctaaggccttgccacggtaacagccacggtcacccgcaccagtgactcagtccctctctccagccgccgcgcgtcttcttaaaattagccgccaccgccgatggcacctataaattgtcgcctcagtgagctctgctaagtaatcacacacccaacgcacccgcccgtgccttagattgtccaccagagcgctccaattttgaagttcccccaaatcagttagaactccgccgtgagtgagctcgccgtggccaacgctctgcaggtccgttcacgccctcctcactgtcgtttcaatacccctgtatgctatagatgctcatcggcccagccaattgaactagacctatgtagatcaccgggtacaccttggattatcctcggtatgcgccatcaccgtggacagagagttctcgacctagaattgtgcaattagctgagggattcttgtcgccgctgttagaattaggggtagagcaaagaaggagcctagccgttgcgttttcc

SEQ ID NO: 31402 - DNA, 340 bp, Zea Mays
ctcgggcatggaggttgagcatactcgaggagctagatacttggagctaactcaaatgaagggcacctaaaccccggataagcaggaatgcatgtcgtggacagattcagataaagttagatagtcatgacgacttgtaaagggataacactctggtcatctatataaggacaagggggtaccactacgaacgcatctcagatctcatctcatcacatcccatcaccacttcatagctcattagccttctcatagcaaccacaccaccactagatcaacaggagagctcaccctccaccaccgagagcctcgataggacatagggtgttacgcattctag

SEQ ID NO: 31403 - DNA, 389 bp, Zea Mays
aaatatatgtcttttatcctaattaaagaacaatattatttaaaacaaatagtgtatccttattatttatcatgatagttatacatgctgtcagttatttaagtagtcatttcgatctatggacagaaattgtgacccaaattgtggttgaaccatgcatgttatattttaaaccactgcacgatatctttatgcagcaagggaattagaaggatcgtgaacttattttgctgcaaaaaccaccagattcctgtatttattttgtgtggttattcgcagtaattttattctatcaatatatttggatggtattgtttgttgtgaagtagtgttagtatgtgattttgtatacattagcaatttagtgttggctgattacctgttgtcag

SEQ ID NO: 31404 - DNA, 294 bp, Zea Mays
gtaatttgtgtagatgtttgtactttataatgcttgtgagtgcactggcacgtttaggtgtggctacacgaacggtagcatgtactgcatagtgtccacatgtacacatgttgttgtttttcgataatgatgcacttccattaatagaacatcgtccatcgcatttaatgcggtagaacaaaaccttatctagatcaccttgtgatggtcgtcatgagtagggacactcatggaactggagccataccacctacgtctctcgtgatcccaggagaatctctactaagggttgtc

SEQ ID NO: 31405 - DNA, 466 bp, Zea Mays
ttccatcaacaaaagcctgcgatcatagacaaatgagcaaaagaaagataattcgctaaaacgaacaacgtagagcaagaggccaactcacctgaagattagagaggaacagtggtagacccaaggcaggaggagccatgtcatggctcgacaagggaagatcagcaggaacgatctgaaggacattatcaggggtgatctcagccccgccagcaggcagcaggctccgtgcatctagctcgccgacctctaaggcgacttgtccacttaaaactatggaaggatgtaccgccgtcgccccattggaccgaggaggggacgacccaacgtggacatccatggaggcgtgggaaagagagctcatctgaacagcctcggggctgggtcatagcttgcactacccaccagagctagatcactaccagcaacaccctcgggggctgggtaactgccggcacctccctcg

SEQ ID NO: 31406 - DNA, 329 bp, Zea Mays
tgaaacatcaatcatatatgcttgatttgcctttgaatgtgttgcttgttctctttcctgatcaatcttttgattgctccaattaagtaccactttgcctctagaaattcttttcttactttttggtgaggagtaaccaatttgaacatatgtaatctcttttcacttaatttcatgaacaagctcaaaagagatgtcgttagtaatacaagcaccaaattctcttttataacactttgaatatataaagtaggcagatacttaaacaaggaaaccttattatatgaactaaaattctcttaatcttcaatgcttaattttaacaaatt

SEQ ID NO: 31407 - DNA, 344 bp, Zea Mays
agtttgttcagctgtgttccaagctcggcctcgtcgacaccagtcaagtaaacaaggcttagggggatacttgttgaaaaaataagccttatcacattagatacgtagtcaacacgttagttgcatgcattagctagttagtgggttagtggcagcgcgtgtggtcgcatgagcttctgtggacgccatgcaatagtgggttagtggcagcgagttgcacgcatgcctgaggacgtggacgtactcgcggtgtgcggacgtggggatggacacgtcaatactgtacatcgaggagacgctcggactctacttgtattcctttgcttttgttataaagtgcatca

SEQ ID NO: 31408 - DNA, 284 bp, Zea Mays
cagatcacagtggggcctaggctccgtcccgtcaccatctggcccatctgttagcccttcacagggtagattttatagtatatctagactactgtacttcaccccactataatgaccccgtcgaagggcttattctagaaatgtagcaggtagccagggtataacggtacttaaagattaacctacccatccagttacctataaacactatcatactatacataacacgcataacaagacgatattgttccttacctactattttattatgctcctgagttctc

SEQ ID NO: 31409 - DNA, 423 bp, Zea Mays
cagttctctacaagcggccatactctgaatgctatatgttcttgaattaagtctcttgtaccaatgaagaagcatacaataccaaaggccttctggcatgcttcggcgggttcatcgatttcaaccttcggctttcgaaggccgaagcgggaccatatgggactcataataacatccttaacatcctccctcgctaccaagtcgttcttcacataaaaccattcctccatccaatttcccgaccacctcttctgaaatgttggcattgggtggcttgcgttgggacgggcaataaacccgtaacaaccgaagttgttgtgatactgttccttccccatggcctttgtctcatacacaagttcgtgcatgctgcagaagcactttgcgcttggttctatcccttggctccttgctgcccagacg

SEQ ID NO: 31410 - DNA, 394 bp, Zea Mays
catccgatccaatggcctggcagaactgaaagccctttataggacaggcactgtggatgcatatcagcgacagtttttagtcttgctttgtcactatgatgacttgtctcctatgcagcaggtgaacatgtttacagcaggtctcggagatcccctccacaccgatgtcgagctactggccccgacaaacctgcaaaccacaatgagtctggcccgtgcttatgagcacaaggaggagaacattgcagtgctcagagattgacaaagtcatcggaactcgtccgccatcaaagggactggttcaggaccgggggccaggccggctgctaccaatcggctgtgtgtcaggcgtctaacaccagaagaattagcagtgaaacgggcaagtggagat

SEQ ID NO: 31411 - DNA, 284 bp, Zea Mays
tgctggaggaaaaacgattgaacacaataattcggtcggccaggtatcaatagaccttgaggcgctaccatgacaaagttgtgtggcaccgatcctttgcagtgggagacttgatccttcaccgaattctaacgggggagggaagacacaagctgtcaccaccatgggaaggaccgttcatcgtatcagaggtcacacgaccgagattatatcggcttactcaaatggacggcacaaaagtggggaactcgtggaacatagaacacctcagaaagttctaccct

SEQ ID NO: 31412 - DNA, 312 bp, Zea Mays
agcaagggagttatatggtttgaagaccgattggtagttcctaagaatcccgaactcaggaagaaaatattggatgaagctcatctttccaaattttccatgcaccccgggagtaacaagatgtatcatgatctcagatccttgtattggtggaccagaatgaagagggaaattgctaagtatgtatctgaatgcgacacttgccaaagaatcaaggctagtcatttgaaggtagcaggtaccttacaaccccttcccataccatcttggaaatgggaggacctcagcatggattttattgtgggattgccc

SEQ ID NO: 31413 - DNA, 295 bp, Zea Mays
accctaaccctaatcccattcagatctggtgattggtgatgctcgttcatcgttggtgctcctcgctagtcggctggtgctcctcgcctcctcggatcgagttgtagcttcacagctggacggctggtgctccgtgcggtgctggtgcgtgattccttcctgattcttctctatctccggtccggtggtccgcggctccgcgccttgtatggtcactggctcactgcctcactggtgcagtagtgcccctgctggctgcttagacatctataattttgttatgttttcattttcc

SEQ ID NO: 31414 - DNA, 527 bp, Zea Mays
gtttggaggatttaccctaatttagcccggattgccaatctggattagtttattggagttcagatcgatccgttttctttaccttttctttttctacttctaggtttaaattattgctgcagtgttgtaccttgcagtttgatacagcattggatcattcctaatttctctccatctagattgcaatatcgccattaaatgtattcccaagattatctaatctcaattttgctgttgaaactttccccagctacttgcagttattcagacgaaaactcagatctttgttcctcactgtcactgcattgttcgtggtcctggtagcactgcatagttttgttttgtttgatctgtatttgaattgggctgtcagcatcaattgtgaaactggtcgcagtggaccattattgctttggtgcgttggatattttaggtatctagatttgagtctggctgtagtccttgctgtccttttatggaatttgtattgagctgaagatggcagttggcctcggaggatggcattg

SEQ ID NO: 31415 - DNA, 580 bp, Zea Mays
ggcatacttccctgtggctgcaacccaaagtcctggggagatagaggcgtcgctctgaccaccaaggttgcgtccctcacggacttgtgtggcacatacacgttggctggaaagaaaggaaaggaggagtagacaatgaataaaagaccgaaagcaggaacacgagcaaattgatataacaggatgagcgcttcgtggtaatcaccttccctagcgcgatcgacgaaggaacaaaaaattgcgacgcgacccgacaagctgccaccacgtgactccctgcaggatccaaagatgtcacggtgcatgttgtcgcctactctgtcccgctcatagcgacgagtactgcaacattgatagaaggcatcgcggtcgaggcggggttcatgaccgaccgacccgtctccgtccggacgttagatatggttgtggtgtcaccatgtcgcaatggaccacccaccaacatcgcagttcccgctccaccgaaaattgtggaagacgcttcctccgaggaatgaagaagaccgactccctctcccgattcaatagggcgcgcgacgcccttacccttcttcgctttaac

SEQ ID NO: 31416 - DNA, 441 bp, Zea Mays
gaagctcaatttcattggactcatgaccatagtcatcaatttctcccttttcttcatgtctgcttttatgtagaaccattcacttgtccaaccggtcagccacttagtgtgatagccaattgccggggccttcgtatcttttcgatatgcaaagttgtagcaaccaaagttcggtagtgtggctcatttacccggcagaaagctttggcattagcactcataccctggcttcggagggcccatatgtaaacactgagtctaacgattgcattgggtgttaactgatgaaggtatatctcaaagttctttaacattctcctatcatgtcatgtagagggaaccgaagccctgccttgaagaagcttttaaaaacaacaacttcgtcctctcttggctgcggaaccacctcctccccagcaaagcgaacacgcttgctctcgg

SEQ ID NO: 31417 - DNA, 323 bp, Zea Mays
tcgatcaacgtgtagctcgtcagcttaatgtcggtgttgtagtgcttggggtagacaagttcgtagtcgattgtgccaacaatgtagtgcaggatgtgcttgtcatggtccctccatgaatcggctcacaaaacaactgcaaacgtaatgtttggttgttatgaaccaaatagcacaaactctctaacataattttgtacattgtcgcatcgacctccgatgtttagctcttcatcgagagctttggtcagacctatattggcacgtggcatgggttataggtccccatgccaacttctccaacatcttacgggcgtacgcca

SEQ ID NO: 31418 - DNA, 749 bp, Zea Mays
caagggtaggacattacaatgggggtttgtttcctactggtaagggtatgatctgttgtagcgttgtcttcgatagtctcgctgacgtagccttcctgacgtcgtctccgggatcgtgcgtagttgttcaccaggcatggtgtactgttttatctgtccggtacgcgggtccctgtagcgagtccaacgatgaggtccccatattggacgcccggcggctcccacaaggcagagtcggggcatgtctcggggtcgtgcgcgacgcggccctgccttctatcagaaaccccgcgtcaccttcctagcatacactcaggtatggtgtattgctctatcctgctcggcgtgcgagttactgtgtcgactgatgcttaggttccctatgactggggttgatcggtcccacaaggcagagaccgtacgcggggtgtaccgtcacgttgatagggactttccggtacctcttcggtatgtcgtgccatggtcctgacatagtttggtgacgacgcgtcctgttgtggctgacgtggatcaatagtactggtttggggcctatgtctcgctgaattgctcggtagggacttggtcggcacctccgtctcgctaagttgctcggtagagacttggtcggaacctccgcctcgctgagttgttcaatagagatttggtcagcacctccaccctgctaagttgctcgacagagacttggtcgggacctctgcctcgctaagttgctcagcaaggacttg

SEQ ID NO: 31419 - DNA, 372 bp, Zea Mays
gcaccgtgcttacgtgtgcccgcgccgacgatcaggcgtaccccagccacgacgaggcctggtgtggaggcctgtctcccagtcttctgggatggccggctctggggataattctgctggcggagttgaggttggtggagatgatggcgatggaagattgaagaagcgcacccgccgtggtcagaggagaagatccggaaaccagagggatagcgaagatcaggaagcagcagtcgaggtgcctgcccagcattgtgccgaacaaggccttgatcatgcaacgggtaggcccaagcggatcatcaaatactctaggaggattctccaggaagaagataatcttcggcgggctctgatcatcactgtcattga

SEQ ID NO: 31420 - DNA, 483 bp, Zea Mays
gaaaatacaatttagttcatcaaacatacagcacgggaaaataactgtgtgcagtccaaaacaacaattgttcaagttaaaataacctagtgagaactaacaagtagacttactagttttttatacaagttatttcgcgctctagaactaccatacacaattaatcaacgcattcaccacaatcatcaaatctgacatatatgtatatcgaagcgcttttcacccactagttcgtattttaacttagaaccacatgagcactactaatttttacccgcgaccataaccatacgcatttagactacaacaagcaattcatcgtgactacgagcttaactaaagccatctaacaagttggttaaccagagcagcaacctaggccgctatacaacatactcgtcggctagcctattattatcgaaatccgagacacaatatacaatacaacatttttataaacacacatattcacaagtattttcg

SEQ ID NO: 31421 - DNA, 440 bp, Zea Mays
aaaagatcttcagattcaccccctcgccgccggtgaccttgcgcccggattcgcgccggtcgccgtgattcgtgctaggctcgtagtggatatcaacggggaagtaaaaagatctcacgaggaagtggatttggtcgcggggtgaagcttatcaactgcgcttgtggccgtgcaacgtggccggaccgccggtgtcgccgtggtgctccggcgaccttgcttatgccacgccatagctctttaccgcatggtagtaactgtggcatgcctagactcactactttagaatcgttgcaccggcaagcaccacgactgagccaccagtgatcttcctctccggccgccagccattccaaaattgggagccaccgctcttgaacactataaattaagcacaccgctagctccgttaggtaatcactcagagcacctagaggggg

SEQ ID NO: 31422 - DNA, 273 bp, Zea Mays
caaagacgtatctcaaactaagcacgtaccttacgtttgaaccaggaaatgaaatcgggcaacccatttctcgcaccctttctaagaagagtgccatattcctgtggagtagggtcccttgatcgacgccagaattcatgaagaaattgttccatgtatggcatcacctcttcaaggttggtcaatacatatagcatgatatgtcgccactcttcatgtgtcatggtcttggtggtcgagccacttgcgcttccgagttggcctcgaaatacg

SEQ ID NO: 31423 - DNA, 1057 bp, Zea Mays
gttccgcgcgccccgatcacctcacgttcccgttcctcatcaaggcctgtgcgcgcctgcagtacagatcgtacggtgccgcggttcttgggcatgtgcagaaactggggttcagcgctgacgtcttcgtggtgaacgccgcgatgcatttctggtctgttcgtgggcccatggctttcgcccgaaggttgttcgacgaaagtccagtcagggacgtggtctcgtggaacacactgattggtgggtacgtgaggagtggcctcccgcgggaggcgctagagttgttttggaggttggcggaagacggcaatgcagtgaggcctgacgaggtcacggtgatcggagcagtgtcgggatgtgcacagatgggggatttggagctagggaagaggctgcatgagtttgtggacaataaaggggtgaggtgcacggtgaggctgatgaacgcggtgatggatatgtatgtcaagtgtggcagtttagagttagcaaactcggtgtttgaaaggatcagtaacagaactgctgtttcttggacaaccatgatcgtggggcatgcgaggctggggatgatggaagatgcacggatgttgttcgatgagatgcctgaaagggatgtattcccatggaatgctctgatggctggttatgtacagaataagcagggcaaggaggctattgcactgtttcatgagatgcagaaatcaaaggtggatcctaatgagatcaccatggttaatctcttatctgcttgctcgcagctaggagcattagaaatggggatgtgggtccaccattacattgaccgacataaacttcatcttagtgttgcacttggtacatctctggtggacatgtatgcaaagtgtggcaacatcaagaaggcaatctgtgttttcaatgaaatcccagttcaaaatgcactcacatggacctcaatgatatgtggtcttgcaaatcatggacatgctgatgaggccatagaatacttccagagaatgatagatcttggattgcagccagatgagataacatttataggggttctgtcagcttg

SEQ ID NO: 31424 - DNA, 364 bp, Zea Mays
ggcttggcggtcctcaaggcctccctgcagtccaagacggtgctcacggatgtcttcatccacggcaaggctgcgtcgtctagtgctcgcgcttgaaggccaccgtgctagcgggcgcgactggctcctggcgtgaacgaaataagtaaggtttggtttgctcttttgtgatgggatggatcaacttgctgcgacgacgtcgtccggccgttttagccttttggtttgggtttgtactgaactgatatcatctggtagcttttggttggcggatcgcatggggtcttatttggttgcgatgtcggtgccggcgtgccgcaaagggactgaactttgtacacacatgccctgttcaacgtccatg

SEQ ID NO: 31425 - DNA, 292 bp, Zea Mays
acgcggcgcacggccgggaagcggcggtcgccggtgagcttatctgttccagtcgtagggtagagggggaagcacgggagggtcaccggagtggagcccagctcacggcggtgaagatctttactgggcgatgcttacctgctggccacggtgcacgaatcacgacgagcggcaatcgacggcgacgggccaccggtgacgggcaggggggaaaaaccgtgatctgtttcagtttggggtattgtaccatggcgagctcgtttcagacagcctgacagtcaagtttggaacc

SEQ ID NO: 31426 - DNA, 324 bp, Zea Mays
aaacaggtggctgaacaggggtgggtcagttgagtactgtagatccggatgatcaaaaatatctgccactaatcttttcccttgccgtgctccactgttgtacaagattgagataaagatgagggaatagcagggatattcagaaccttggccatcaccgaaatatctaaagtttaggctgaaaaatatctgcttcagtaaaaccttatctgcctaccctctgccgtggtgcactctaccatatccctgccttgctgtgctcaagggtccggcgtggatcttcaggattgagccacgcatccatacccatgcgttcactggcac

SEQ ID NO: 31427 - DNA, 302 bp, Zea Mays
tgcaaagaagttctctcccaagtggttatcactactcctacatgtatattttcccatactcatatgcagacatgctttccccagtctattcatgtgccatcaatattccaccactgctaccaaagtcgaaaccattaatgatgatatcgacaccgcccataaacaacatataatgagacgtcaaggagacaaagatcggtacatatgccttccttgcatataaaattgattctccaatccatctcaacaaccctagtatgtgaaggatatcttgtgacagctctctcctctaccaacctagt

SEQ ID NO: 31428 - DNA, 290 bp, Zea Mays
gttggattagatacgggcgcgccagattaaatcattattcctgcgaaccggtacggaatcgcatccgttggatccgaatcaaacggtgagggttttattactctggatctatcgttgtccgtccgatccagatcgacgaaccagatcgaaacgtggtgaaagggtatgcgcggactaatcacagccgttcacgccgatccgacggcgcacgatctccgccccaacagggcacacacgcacggcggcgccgccccacggtggtgcgccatgaccggtggagctaaactccg

SEQ ID NO: 31429 - DNA, 347 bp, Zea Mays
attcgacgtccggtaaggcaagatacttggttatctagtatcccatagaggcatagaagcaaacccaagtaagatacaagccataatggacatggccccaccgtagtcgacccgagatgtccaacgactaataggaagactcagtgtttaacagatttatctcacggtccgccgagcggagtctccctttcctgaaaatgctacacggagccaagtacttcgcttggggccttgagcaggcagtagccttcgaatcattaaagtagtacctaatctgaacttgtaactctaaccagcccaaaccccagtgttacccctcctactttacattgcagcattgcccagcg

SEQ ID NO: 31430 - DNA, 425 bp, Zea Mays
ccaaaattcgtgccgccgccgtccgggttcgtgcgcgataggaaatggatagagtcgaagttaaacgacgcatacgtggcaccgttccctgagtccagccggagacttcaccggcggccgccgtgactcagtggattccgccgcggtggcgctcatgccatagttttccctcactgtacctcctaccgacgtggtcgacatgcgctagtgatgctgtccgtggccgcgaagtgatcgccggaccgccacagctataaatagccattgggtcctcggcgaggtgctcgctgttcttcaagcaagcttgagtacaaccagaaattcacacgaccttctccacctcttcccaaatcgtttgcgcatggtgaaagcacagcttcttacgaccaagtagcctcaatccccaaccccaatttcaacccgag

SEQ ID NO: 31431 - DNA, 395 bp, Zea Mays
attcaccgcctcctcaccccctccattcaaatcaaccgagcacagctcttcgtctctaattgcgaagccgaagcacccgctcccaccctcgattagccaccatagccggagaatctcccttttcccccaaattgggtcgtcgcgccaccatgaacagctcgaccgtggccagcctgttcgggtaaggctctgtccatctcgaatgttgtttttgtggctctgcatgctagtgaagcttaccgtggcactcgtttgctcaattcggccatgatttagcgggaacgcgtgctcgtgatcccagtttctgccatgatcatgggcagacagttcccagtgaagttcatgtcaaattaacgggtgttcctagatcatccttggtcggttatgcctccccg

SEQ ID NO: 31432 - DNA, 485 bp, Zea Mays
caagaaattagaaccgtcggccaatctccttggcccaatcgcaccttgccttctctctttactcacttacgcatggggccctcttgacagtatttcttcaacctttagaatgtactcagttctggcactgctcgccgtaccgttcgctcgggcgctgcgtggagccacacccatgcctgccatttcgcgtcatgctggaccatctgcctgctcgtggcctcgcactatgcagtggaacgccaccttcccgacgactcttccccttcttccccactcaagcaatgtgacggtttcctctctctccctccattaatagctccctccattaatagctgtcgccgtttcttctgggtccgtggtcgcctcatcggctcgtcttctgctggttcatctccccgcgagtggactagtctccaacgcctgtccgtttctctcctctctcccttaatccgtcattttctcctcaccattaaccgatctgtatt

SEQ ID NO: 31433 - DNA, 883 bp, Zea Mays
atacagagaaggtcgaggtttattctgtaaaatcaaccagacacagacaacacatatgtggactgcgggttgttttgtataaaccgtggggtctcttttgcaaaatagtttcaacgaaggggtatggaaagagaccggtcgtttgattagattcggacagcccagattacatcgcgccaagggttagactggctcgggtctgtgccacacgatccgcaatgcacgacttggatttaaaacatcagaatcacttcgtggccacccatcatctgatcgacggctggggcataatctgcccaaacggcaagctagatctaatccgcaaggtccgtttccggatcaacggtcgtaggcctatcttccttctcgcactacagtagggcggtggcgtgcaggcccccacagctgagcacccgccggtgacagccatcttggcatgccaacgccccaatcccaaaacccgatctaattccgaagaggttgtttccgatccaccctaaccgttcgatccacgatcgatgaccactcgctttcttccccaatcggctgacccagggtggcgccaccaagccattacggtggcgtactcgctggagaggggcgacgccacacccgagcacacaaatttataacgcaagcagtgctacacatagttctggatgcggtgagcaaggtggaggagaccttaccagtgattacgccgcagggactcccacccaccacgcagggcggatcaacagcggtgttcacacatcgttgaagtattccagtcggcctggaggttattcctacccgagaagatcatgagcacaatcccaaaaacgtcacgaagctccccgaacaaccgccagagaccgagcggtggcacgcagttgactacgac

SEQ ID NO: 31434 - DNA, 352 bp, Zea Mays
aatcctaaccgctcatttctgatctgtcgcactgattatatcacccgaattcttacccgatcccctaatctgagccctccgttgttgaccccatattcccacgattcgcacccattctatccatccgagagaagacaacggtcagggacggcgacacagttagcccgcacggcggcgcatcgacggcgcgcaccccattccaacttcgagtgccaaaattgctccacaaatatgctttacccgatgttgaaggtcacgcgagtaacatggacgagttcttacctaaaatcgtggcgcaaaaccacaggccgacgacgggaagcggcgggaagccctccccacgcgtttcact

SEQ ID NO: 31435 - DNA, 280 bp, Zea Mays
acaggagccaaacagagtaagatatcaagccaggtagaaatcactagttcttcatgttataaaaacatgtgaatatgtgatgatgttgaatgaatttgcgaaagccttttctcattccatttcctctcaataaaatgtactgtctaaaagaaagtataaagttggttaaggcaccaacagttcctccattgcgattcatggtgttaacgcagtgtcatcaccatcttatcaatttaaactcagtgtcataaactagtatatccctgaaggtggattcttg

SEQ ID NO: 31436 - DNA, 437 bp, Zea Mays
ggctcctcccacaacttcgtgtcagctacatcggccaccagcacgaagacaatcttccagcagcagagcggtttatgggtcacggtcgcaaatggcgaatgtgttccgtgcctcggcgctttccaatatgccgcgttctccatccacggtgagccgttccaggcaaatttctttgtatttcctctcgccggctatgatgtcgtcctcgacacctagtggctagcctccctgggaccaatcctatgggattttggccatctcaccatgcagttttggctccgggaccacaaggtctgatagcgtggcctttgcggtggcggtccaccattgctcttaacaactgcatcagactccctcctcgacgccctgctgacagaattcgacgacctcttcactgagccccacaaactacctccacctcgtctacttgcgaccac

SEQ ID NO: 31437 - DNA, 586 bp, Zea Mays
tctgggagttcgattgcgtggacggaggagtcttcagatgaggacttggattattttgcagcgttagatgtggctgcagcggagccttcgccgcgcgtggagggttccgaggggtgcctgggtgcgagtactgggtataggcggcgaagggcggtggcgaaacggagagtgagtgaattttcgcgaagtggtaggcgtcatcgtagtgagatggagagtggtcgtcttcgcgtggacgggactggtaagcgagaattgttgtcctcgccgattggggcgagtgtaggtgagggggagctgcgaaatctttttgagggtgaggaattgaggataatgctgtccaactacagggagatgggtatcatcccaaaggttgagccaatgtaatatatgatgccctcgctgtgtgtatgtgaccgcaatttgtatgataaggcttctgcacggagtcttttgggaaagacttcaattttgtatgataggtcgatctttacgtatttgttgtgctgttccggctgcacccgtaagcgacttttgcacggagagtcttttggaaaagacttcgattttgcgcacttattattcc

SEQ ID NO: 31438 - DNA, 294 bp, Zea Mays
cttggattatgtctcttgtgccaatgaaagcacaaacattgctgaaagccttttggcatgcttcaacatcattttcaatcgtcaccctcggccttcgaaggacaaagcgagaccagatggggcgctggataatttccttaatgtcctccctctcaatcagattaatcttaacataaaaccattcctccatccaggctccaggtcacctcttctgaaatgttggaactgggtagcttgcattgggacgagcaataaatccataacaactgaagttgttgtgatactgttctttgc

SEQ ID NO: 31439 - DNA, 309 bp, Zea Mays
gaggcaccccgcgcatggcccaacaaagccattaagtgcggaggtcatgggttagtcaaccgtggggacaggcgtggcagtcggcatgaccaagggtggaccagaagtaattacaccaatgggcgcacagaagcagcgagccaatctccaatcaaactttggccccacctgcaggctcgtatcctcccctgaggcaggcccgggggccactgtcggtaccctgaatcaggggtaccccttactacagtatgaagacacggtgcccgtgcggcgatctctagccacacggtgaatagcacccgaccccac

SEQ ID NO: 31440 - DNA, 284 bp, Zea Mays
gccggactagcacaacaagtgcgcaaaatcgaagtcttcttcaaaagactatctgtgcaaaagtcgcctaagggtgcagccggactagcacaacaagtgcgcaaaatcgaagtcttcttcaaaagactatccgtgcaaaagtcacctaagggtgcagccggactagcacaacaagtgcacaaaatcgaagtcttcttcaaaagaccatccgtgcaaaagtcgcctaagggtgcagccggactagcacaacgagtgcaaaaaatcgaaggcgcattacatcagtg

SEQ ID NO: 31441 - DNA, 407 bp, Zea Mays
gcaatatagcggagaaggcgcttgatcgcggcgaggtggtcctcctgcggatcctccatgaaccggctcagatagccgatggcatagccgatgttcgaccgcgtgtgcgctagatagagcaaaccgtcaacgatgctgcggtagctcgtcgcgttcacccttggtgtcggtctgtcctttgacagcttgagcttctcctccattggggacaagcacgacttgcagccgcccatcccgctgcgctctagcagtttcacgacgtaggcactctgccgcagggtgatggagcgcgccgtctgctccacctcgataccaaggtagtagctgagcaatcctagatcactcatcttgaacaacgccgtcatctccctcttgaattcgtcgatgagccgctgcctggagccggt

SEQ ID NO: 31442 - DNA, 570 bp, Zea Mays
ccggataacgccatggggtagaaagatcttcacccctattgagccatgggcacttttccgtccggccgccgtgtccgcttagcctcggtcgcttcgaatctaccctcgctagagttagacacctcgcggtcttgtgccacatgcctcggcactttaaccacgccgtcatgactcatattaacctatcctgtgatcgccggtgaggatgccacgattatggccaccaatcatgtgcgccagtgcacctcctcctctccgcccgccgcgcgtccccattaaattcactagccaccgctcaaacacactataaattgagcacaccctcggctccgttaggtaatctagcatccaatccaaccgcttgtgccctcaattactcactagagcccgcgaattgctcttttcccccaaatcggtttccgccaccgtgaaagagccctcaccgtgactagcttgttccaggtctgttcatactctctgctcttgcatttcagcatccttaggatctcctgatgctcctcgacccgtttgattgagctagactatcctagatcaccggggaacacgttt

SEQ ID NO: 31443 - DNA, 661 bp, Zea Mays
agcatcacaagcgcacgagggtgttgacatatggacaagaaggacgaggatggacctgagggtggctggccacgacgcgacgtctcacggcggtgtagatgacgaatttgggggaaatccggtgactcggggctacgttgcacgagagaggctagctgggggtgggttggacgcataacaaggaggcggagcaggggggtgccttcaatttaaagacctcggccgagcttatcacgaattttggattgggattgagttcaccgcggccggatatttttacggtggcctgctcaccgtggcgcgcgagagggaaatggttcagggatggtaaccggttgcttgccacgacctttacgatgtggaggatgaatcgctacatgtcacggccagggaaatggagaactccggtgatgccaacgcgaccaaccgcggcgaggtaagggggaggcacgatggccggaccagccagcgactgggtttacccctccccggatcttttcacctcttcccggcgttatccacttctcacggagcacgaatcgtggtggctggcgcgaatccacgcgcgaagatcaccagcggcgagatgcactgcgtcactgatattttcagacattgtaccatctcaatcctattcagttcgtctgacagagcattttta

SEQ ID NO: 31444 - DNA, 293 bp, Zea Mays
gtcaattgagaagatgctcaacatcgcccaatgctctgaccgggagaaggttctttatgcttctggtcgtctgacaggtcctgctgctgactggtgggattcttatgttgctgcccatgatgttgctgacacaattacttgggcggaattcacaactcagttcagaaactaccacattcctgctggattgatgaagatcaaaaagaagaagtttttgtcattgaagcaaggcaacatgtctatcagcgagtaccgtgacaaattcatccagctgtcaagatatgctcctaatg

SEQ ID NO: 31445 - DNA, 361 bp, Zea Mays
ttaaagaatccctaagaactattcacatgtctctctgaccgttgcacttaagcccctatatttctatttcttcaccaaacaagtccctggtgacgacacgttcgtccgccgaccaacccttgctggaatttgcttcaaacggcggcgaatcatagcaccggtgcggatcacggcgcggagatcaccggcggcgaaattcactgaatctggcgatcttgttcagtccactgttcaccaccgaaactaccccgagctacctgacagaccaagtttgggagcaatttactccaaaaattgtacatcaccaggccaagctcagtataacaagtttgttcactaatattagggcttcaacttttcc

SEQ ID NO: 31446 - DNA, 274 bp, Zea Mays
gatgagacttatattacttgcacctaagtgtgcttgcagtagggaatacaagctgagcgggagagggaaggatcccaagtccatgggcttgattgaggcaaggaccaatatcgtggtggaggagaaaaccatgaagtgttctcctgcctccctgaagccgtaggctgccctatttatagcctcaaggagggctgcttggagtaccagagttggccatgtacggtgaggaggcgaagccgagcccctgtagatggtatggcccgaagcatgggtc

SEQ ID NO: 31447 - DNA, 436 bp, Zea Mays
tgacaaggccgttgtagagcgcatcgcaaggcagtcggcccacaataccatcttatgatttttgctgtacatgagaggtgtggcagggatcctcatgaagtgtattgacttggctacaggaaggcagttgatggatgaaatccacgcaaggcaatgcggcatacatgcagcatcaaaaacattggtagggaaagccttcaggtctagtttttattggccaatagcaaagaaggatgcagtagacctggtctagaaatgcgaagcatgtcagttcctattgaagcaacagcacttgtcggcccagcatctgcaaactatccgtataaattggccctttgcgtgctggtgtctagatatgatcgggtcgttcaaaaaagctcaaggagggtatactcacgtactcgtcgctatcgacaagtttacaaagtggatagag

SEQ ID NO: 31448 - DNA, 352 bp, Zea Mays
cacacttctcaaaaaatcataaaatgctaccttttgatttttatccattatatagggggcatgaggaaccacataggtacctccatcacacttcaagtgtaaatcttttcttatgcccatgtcctcaaaatcaagccttgcattaatactgtcctttgactttcctggaagagcaagaaatgtacctagcaagtactcacatatatttttttcaatgtgcattacatcaagattatgacgcaacttcaaacctgtccaatatggcaaatcccacaggcacgaccttctcttccaacattgaccaccatttgcatctcgcttcctcttattgctatttggatgcttccctggt

SEQ ID NO: 31449 - DNA, 783 bp, Zea Mays
caaaattcagcgagagacaaccaatgttttcacttggtagggcatgcttggacgaaacaacgaaggtaagtttctaaacactgattaactcgctccgtttgaccatccgattagtgatggtaggctgttgtcatccttagttcaaccctagctgatttgaacagttctttccatagagtactagtgaatattctatctcgatccgagatgatagccttggggaagccgtggagtttgaaaacatgttccataaaggcctgagccaccttcagagctgtaaaagcatggtggaagggaataaaacgactgtatttggaaaacttatcaacaatcaccatgatacaatttgagtggtcagattgtggtaaatcatcgataaaatccatggaaaccacttgccaggctccatctgggactgatagaggttggaggaggcctgggtatttgactcattccgacttcgcttgttgacagacagaacactgccgacaccagttgtgaatcatcttcatgcccgaccaaataaacattttcttgattttcttttaagtgacaagaaatcttgaatgcccacccaccaaagtagtatggagagcatctaatactttctagggagaaactgatgtgtctggcaagagaattcactctttatatttgatgagtcccttctgcaggaactagagggagaagcaacaactagggcctgaatcaaaggcagagtatccagatattgggtgtaggatgctgaaatgttggggcgaaggcgtaacaccccctcgctcg

SEQ ID NO: 31450 - DNA, 425 bp, Zea Mays
cgcgaccggcagcatggtgccacatgctttctggctttccctgagttcgaagtcaaggaaagggatcaaggtgaggttgtgttgcgtcagacaagggttaaaagcagtggctaagacttagtggaggagtttattgcttataggttatggtcgttgagccatggctggccgtcggggaaatcatgtggcgattgatgccgtagaagagcgttattttgaaaagtgaagttgtggtgattagtccgcccttcactattgagcttggcgggcaggatggggtagccttcgttagcgaggtacaggcggaggccatcaagatcattggaaagtatgtcgggaagttggagtggtcagagtatggacatccgtgggggtaatattcgtttgaacaaagattttgagttcaatggtctggagtatgggcc

SEQ ID NO: 31451 - DNA, 475 bp, Zea Mays
aagaaaaggaactcacccatcactaggctaaattccctcaaccggtccagtctcgtcgttttcgcttggcccatcccccctccttttctgccacgccagtccagtccgcacactcgtgcagtcactgaccggggggggggggggggacctaggtgtcgggctaggtcctccccacacgcacatgtgtttatgtcactagcacacgtgccaccattgtcttcttcgtcgtgtccgaacgtagctccaagccaaagttcacacagagtattcctcatccaacatcctgcaccacgtgggtcacttcctctactgcgtgggccctactactcgggagtggcaaccaccccaacctagattcgggatcaggcaaccacgtctgctcaggatttcctccccgccataacagttcgatgcaatctccacaacaaacctcacccaccgttcctatctatcccctcacgactatataagcaag

SEQ ID NO: 31452 - DNA, 798 bp, Zea Mays
aacaggtctcagtgatggctcttgagatgcaagggatgatgagactgcactagtagctatgtcactagaatctgttcttcctggatcgtaaccatcaccaccgtattccgttgacacaataagtttctcagtaacatatatgttttttactagagcaccagtgtcatcaagtttactgtctgaaatgcaaccagatgcagttgacgggctctccacaccttttgatagggtattaacaccatcagattcaagcctactgctctgcagagtctgacacgacgcacttgatgctgtggacagtctgctgtctttttcagcaaaagtcatgcctgttgatatggcattagaggcaaccctgcttctgggagaaacccctcgtaaagcagctgatgaggaagatggtctacagtttttgtcagcaaattctttgttcaatgcagcattgataccatcagaggccagccgtcttcttggcgaaaaccctcgtgatgaagttgacggtgttgaaggtctgatacatttttcagtaatgtctgtgctctttgatatacattctataccatcagaagtgagctgtcttcttggtgaaacccctcgtgctacagctgacatggctaagggtttgttactgttttcaatgagatcaatgctcattgatatcacattgctaacgtctgaggcgagtcgtcttcttggtgaaacccctcgtgctgcagctgacatggtgacaagtttgttattgttttcaacaagatccatgctctttataatcacattgacaccatctgacgaaagtcg

SEQ ID NO: 31453 - DNA, 292 bp, Zea Mays
atcgaaagatcgggcacccttctacccgttgggtttatcaagtggtatcagatttcaggttgctcggtgagagatctacatcttccttgttttatttacctacagtccacttttgccaaagatatatttagagcagaaaatcacctaaaaacattttgagcctttgctttactacttagttttcgacttgttgaattcacggttgctgcatttgggtcgagttgctggtctaaagttttcttaccgctagagtttcgagttcgcgccaccttgtttcaatcaccagtttaga

SEQ ID NO: 31454 - DNA, 505 bp, Zea Mays
atcaacggggagcgagaggaggtcacggcgatgcggtggaagtgcatggacacacggtgcaaggccgggaagcagcggtcatcggtgtacttatccaattccgccgcggtgaacgccttgtacggtggccggaatactttactggccggagttatccacggcgatgatctccaagtgctatctagtttatttggtcacgagtcacggcggtgatggcacgaatctttgcgcagggaggtcgccggcggtgaggttgccgcgctggcggcctgatctgttttggacactgtaccatggcactgcttcatcagtaagcctgacagccatagtttagggccagatttcttccaaatttctgtggcaacacatccagatctctgcagcaatattgtagtgctataaaccaactacaactttgctatattgtgttcccacaaaaagtcaatgaatcttgcttgaaactgagcttgaagttcatgccatatatctgtcagtctgaatttca

SEQ ID NO: 31455 - DNA, 304 bp, Zea Mays
atttcaattgccggatcctgctcatgtcataggggatttaccttgggtgggtgcttttgggggagagatttgaggtcatttgcctaagctagattttcctaaatttgatggagaaaaccccaagttgtggattaagcgcagtagagattattttgacatgtatgcagtagaagcgaggatgtgggtgcgtgtgtcaaccatgcattttgtgggagctgttgctcgctggttgtcatccgtcgaggagtcctcccaattggctagctggtcagtgttctgtcaagctttgctggagaggtttggt

SEQ ID NO: 31456 - DNA, 289 bp, Zea Mays
acgggcggcaaagaggctcgcacgtgccatgatctctagctagagctgccatctgactatgcgtcgaggaggtggtgcacatggctatcgatgactagctgttggagcttgtcgctagagatggcgagcacgcggacgagatcaaacctagccttggttttagatgtaaacgtagggttcgaagttaattacccagcaatatcgctcgtcataaagaaataacaattcattttcctcccgctgccctccttgtcttgcagacgtcttcttcccatcaggccatgccaca

SEQ ID NO: 31457 - DNA, 332 bp, Zea Mays
ggaggacgaggtcgcgccattgagggtagttggtggagaggggttcaggacgacaacgacctcaaactttaggacaatagtggtagattgttccttctctagggctttggctatggcgaggatatagccatgggcgtcagcagaagatttggcaaccaagttgacgctctcgttctcagcggtggtggcttactccttggtacgctatacaacctcctcttgggcatgagcagcggcgagcttggcctcactagggactggcggtgtcggtgacatggtggaaatggggcatagatgtgagaggagaggagggtggagtgcatcagctaggg

SEQ ID NO: 31458 - DNA, 411 bp, Zea Mays
cctaacatagcgcgacgctagccctgaaaacgtccataagctttgcttattacaacaaaatacaccccagactggaggcaaggctaacatagcagttcaacaaaagtaaaatacagacggaagagaagcagcagacaacactaacaaccatgaagccaactacccagaaatgcgacggtctctaggtctccaaccataggcctgacacaacacttcacttgccatcgttctgatgagcttgcttccttgtaccaccatcctttttccttctctttctaccggatagcccaggaatccagccagaagaagcaaataaaaatgatgttagagggatcaagcaaagttttgtcgccaaagcaccaatcatttctggttctccaaatggcccataatacaacaccacacccaaac

SEQ ID NO: 31459 - DNA, 700 bp, Zea Mays
ggcgatttctcgccggagttggggatccgcaccaagctgtggccgggtgtccctgcttcgctgccgtcagtaagttccccctctgcgtgaccaccatcatcccctctttgcgttgcactggttggataggcaaactacgctctggtgcgcatttgggtgcggctccggcgaactcgcgaccaccgtcgatcgggcgccgccgctctgtcggccaggatggaggacgatctctcagccgtctatccggatgtgggcggtggagattggatgtcttgataaccccttcgtgacgaaatctgggtcgtcgatccgtgcgccagcggtttggatcgaatccaacgtgtattgtttcgttgatcggatgctgaccctcggattcggatcgggtggtctgagtgctctagcggccgcgatctaatctagacggttggatcatatcgggcggctgtgatcgaagcttaccccttcgcttggaatactttctaaagagaccctcgtcttttcctaaaccaacccgccgtccacattcattattcactgagtcttagagaacttcggtttaggcccctgacgtttccagtatttggcgcccagttcagataattaataaaacagagaaaatcatttagaaaatagtttttagtacatatttaaatgcagattcttgtttaatttgtagaaaattcatataatgtccaaa

SEQ ID NO: 31460 - DNA, 372 bp, Zea Mays
ggcaagtcttagatgagcttagaaaggagaaattatttgctaatcttgagaagtgtagtttttgcacagaccatgttgtgtttcttggttttgttgtttcaggaaaaggaatagaagtggatgaatccaaggtgaaagcaatcaaggattggccagctccaatgaatgaaagaaccaatagggaagcctccaagcgtgttgcatatataaaaagatacatgagaagaccaatgaagcaattcagctcaaagtagtgcgcaaggctgcaaacatgaacaagcataggaagaaagtgttatttaaatcggaggacatggtttggattcacttgtgcaaagagcgttttcctgatcagcgcaaatccaaattgat

SEQ ID NO: 31461 - DNA, 323 bp, Zea Mays
gaagttgtgaaaggctaattgaactgtttccattgtagcattataccctttgtgtcaactgctgctatactttctgcacttaattttttcattccaagtcttgaacttaatttttttcattcgaagatttgaacttgcttcttatacccttttctgtttgttgtttccccccttttgcagcgtgctttgaaggtaccacacctcaactttttgtgctcttgcttatttatgtttaacatttattcttgaaattttgtgcctctgtcataattgataccaatgtgatattccacaataacaatatttgagttatgctatactat

SEQ ID NO: 31462 - DNA, 400 bp, Zea Mays
gcgatcctatgggtccggacatacggcttggcttcccaagctaaatcctgcatgtcctgttgcatgaatcaaaggatggcagataccagacgatgggtcatatgggtgtgctactaacacttcaaagccgaagctgtgtgcaggtccaggtcccattctagacgtaggtagtctcaaaccgtagagactacctcctaggggccgtgcaactaattttcccttaggtatactggtatccaacctcgacacgtcgagcctacatcccaggggggccaagtaccagggagaagttggtaacgctacacactgcaaggacaaaaagcatacaaataagtgatgtttgattaatagttctcaaaagtatcttacaaaaccaaaaattattacaagccgcactcca

SEQ ID NO: 31463 - DNA, 328 bp, Zea Mays
caagtacacgataaactgcgaattgacccggcgtcggtgctggtgcggttcatccgtgctttagtcgcgccccatgcccgtgcacgtcaagcgttcgtcttaatgcctgtgaggcacaccgtacgcgtacgtactcctaccctctctgtctctaggcggcgatcaatggtgctcaagtgcagcgtggtggaccgccaggtcgtccatggagaagtgctccccatgcagctcaatgtggacggccacttgccacggcagccaaggaggctcgcaccagggtctggaccgtcctcaacgagctgagcaatcacggttagtatcagcttca

SEQ ID NO: 31464 - DNA, 502 bp, Zea Mays
cgagcatgactagtaagaatttgagagtgattgctatagaaagattgaagctggatagtagaacaacaactttcttaaagatagattagcaagtattcacatgaaaatttgagatccgagcactacaaaatggtctgtcagacacgctaatggtaaccaccatggtaccataactgaaacagatcacaagttcagctcccttcgccgccggtgacctttgcgccgtgatttgcgccgtcgccgcgattcgtgctctctggtgaggggataatcatggcggagtaagaatcttggcaccagataggcttgggctcggtcgcggatgagtttcactgtacccacttgctcgccgatcagccgggatagacctctccgccgttggccgcttaccgctatgcgccacgtgctcaagcgttgtaccacgtcgctgtgaatcgcgtcttgcatgtccggtggtcgccggggagcttgccacggtgaaagccactaatcccaagcgcca

SEQ ID NO: 31465 - DNA, 345 bp, Zea Mays
atcacaagctcaagaatcaattgagtgtcatgccttcctagctcccgcttttcacttggtattggtgggagttctagtctactagtcctaatccacttttatgcctgcccttggatgtcaagtgttcaatctcctatgtgtgagtcgagcctttgtgtgggtatgtgtcaaaatcgaatgtggctaatccaacctgagcaagagtttctagatcctagccccctaaatgttaccccgatcccccttttatagaacaaggaaagagagaggttacaacaattggacaattggttcggtcagctaaggatgaacaaccctaatcttatcttgttcgtgaagacgtac

SEQ ID NO: 31466 - DNA, 298 bp, Zea Mays
ggcctggggcatgatcagatcctggatccgcccctggcaccgagatctcaaccatactaacgtttacgggacacactagcgactaacgtgatatatctcagcatcatagatcttggtgccaagtgtgtgagcacgggtttgtttcgttctgcgcacacatgtatgtaatgtagcgtgcggcacgctgctagccatgagactagagatgacaatggagaattctccgtcgagggttgagcccccatacccgtccctgcgagggagaagaatcctcgttcccatccccgcgaagtgtaac

SEQ ID NO: 31467 - DNA, 530 bp, Zea Mays
gctagcgacggacatgtcctcgatatcggacaaattctctatcctggcgggagctggtgctgggggagctttcttcttcctctccgtctggcatccttggctcgtggttttcttccgaattttctttgtgggggcgagcttcttaagcttcttatcatagtccatctttaaggttcgataggcttcacgggtgttggcctccttgccttccgctatgtcgagacactcttggagagatgccttctccttcttaagctctttgacttgctactctaggctttccacccgggagtttaggtgggtgcagtgggaggagagatcatcgtagtgggtatcgagggtgtggaggtatccggccatgtagacaatggtggggtcatcctcggtggggtctctccctgacagagcctgaagtcttttcctccaggtgggggtatttttgttgctgggtgggaaataacaaaggggggtttcaaagatctctctgctgtagttttggcatagctgtttaagggcctttcgggcaacac

SEQ ID NO: 31468 - DNA, 603 bp, Zea Mays
atcaattgggcatctgtctgaaattcagacatgcagttgcatcagatcaaattttagatcaaatagcgtccaatctagtggatgtttgatcgtggtctttataacaaaatcaaagccgatatgttgaacaacaactttcatgtagtcgaattggtagctctccacatgaaaaatggagaatggagcttctcaatctgctctgtcagatagctttaaaggggagaatggatgaacagtggactaaacaagatcacgggttcagtgcatctatcgccgccagtgatctccgcaccgcggttcacgccggccaccgcgattcacgtgtgaccgccgcgattcgtgccctgtgtgaagtggataaccgcaggaggtaaaaagatcggagggggaatggatcgagtcgacctcaccgtacccacttgaccggcaacgtggccgcgcgaccaccaccatcatgccgccgttaacttcagtcacgacacgccttaagtcgtttcaccacgtcatcacgggttgtggaggataaccagtgacggtcgtaaacctttgcccagtgaatgccacgttagcgaactccggtgactcacctttgctccggccgcc

SEQ ID NO: 31469 - DNA, 463 bp, Zea Mays
ccggcacacacgcagactcgctgctggtcgaagaccagaaaactcaggcagaagcgaaccgtacaacaactcatcaatccctagccagatctgaaaagaaccaccccgactccactgccataagaacgaccccaatcagcgctagcattcttattcgcctgcaccgttgttcccagcaaacgcaagagctgagagcacgaattgtatcatctagaagcacatcgatcaatattcccgtaggctacacacagaattaacctacataacctaaattacacaaacttaaccataaactgcgataaaaaaatcccctctccacccagacacccacaagaacacactacacacggtaaaccctcaaatccacaaccccaggtctggtctctagcagatccaaggaatgatggaagaataaatccccacagatccaattacccaaacgaatcctgacaccaaaccaaat

SEQ ID NO: 31470 - DNA, 396 bp, Zea Mays
aatttgctcaatgggaaccgaaggcctgccttcataaagcttcggtaaacaacaacttcattttcttcaggagcaggggcggtgctgtctcccccaaccctcacaatagacatatcacgaaagtaccttcccctcatggcgtcaacctgactttgtttaatcgtcgactttccgaagatagtatggcttggccgctagggtcgatcttcggaatcttcatctccactttccacatcaaaatcatcactgtcatcagaatcttcagataaatctgccattatctccttggtaatcttctctgtatttgtttttgccatagatttataaaacccagcaataaaagggtccacaaccttcttctcctcggccaccttcgtcacctcagacaccttcttc

SEQ ID NO: 31471 - DNA, 306 bp, Zea Mays
cggggtgccagtgggggcagcctgacgagtgggaggtgtctgtggagacccctatggagcatactaagctgggtgtggtcctcctcttggacaagttggtgtaccctagggtggcacgtagcgaggacgaacactactgctatcctgcccctgggcaattaccttcctcttcaagtccatcagttgaacacgcttgtgttcaataacaatagctttatcatgcagcctctgaaatgatggaaatgtatgagcgaccaatgcatattgtagtggcccattgagtccctctgtgaagtgctcttgctt

SEQ ID NO: 31472 - DNA, 482 bp, Zea Mays
ggagtctataaacatggggaagagcacattttcatagtaacttgatgaagaagaggaacaagaagtaacaactattctaggtagatctggatatctttcccagcaggaaatcaaatctgccattttgaaagcaacacaattcctaaggaaagcaaaaggggagtccaatggcaacagtgaaaaaacagatgcgtcagcatctgtccctgatgagacactgacgccagaacaggtgtgtgtttgttcggtaattatctacagaattctattcatgcgcttctaacatctggatattgtgtgcatactgtaggtacatagtttcttaagtttacacctttacataccccgaaatctctgaccattacattccacttttgtgtatttaccagttaagggaaaagaagaaacaaatattacttaaaaccacaacagagggcaaattgcacgctaagcagaaacgtgcttgctgaagaggaggcttt

SEQ ID NO: 31473 - DNA, 304 bp, Zea Mays
cactttgaactaacatgtaggtactgcaccacttactgccgtccagttgctatgggtgaacatgatcatggatacattaggagccttggccttagcgacagagccgcctaacgatgaaatgatgaatagaccaccagtgagacgggggcatggttttatcactcaggtcatgtggagaaatattcttgggcaggctttatatcagctccttgtgcttggtactctcatgtttaatgggaagaggatccttaacatcgaaggcccaaatgctgatagaactatcaataccctcatattcaactct

SEQ ID NO: 31474 - DNA, 408 bp, Zea Mays
ggggtggggtggccttcgcgctgccttttgctgtttacagcgtcatcttcgaaggcctcttagggggtagcgtccacgagggccttgtctttcttgtccgccaaaagcgatgccttcgccgtgtcgttgatggatgaggcagccttcgaattagctcgcttgggggccatcgcgtgttgtttttcatagcacgaacggtgggcgcccaaatgttgggaacctttccgtccgggcaggtaaatccaacggggaaacagaaagtgtgtttgtaaggtttagtatggaatgccaaaagctttttctcattactgttgcgggcactgtacatgggtatttataggcactcgagcagccgcctgtcccttgacaaagacgtttatggcctcgagtacctgatttatccccaaa

SEQ ID NO: 31475 - DNA, 469 bp, Zea Mays
cgagatccgaatccaagcagaagatgccaaaacgggcagccaaagtcgctctaccacctgctgcagctgactgacgcgactagagctctgcagctgccgcccgtgttcgccaatggatgaatctcactgcctccttttataccccgagtgccctgctccctcccttccctagcactcttcttcatttgcgcagaaatggtggcgagccgccttgtccctcctcctctgcgctctaggccgagtcttctccaatgtggagcaccatccatggctgccgaccacctttgctcccttgctctcccaccccacgacgtcctccaatatttccccgcgtcagctggacgccatccgagctcccacatggccgagctcccttattccctatccatcgatgcagccggcgtcgcacgtccagctgctctgctgttacgtggctgaaggttgaagatgactcgttgagtctatgaca

SEQ ID NO: 31476 - DNA, 306 bp, Zea Mays
tgaagcttgaagagtttgttcgcctgaagcaaggcagtgactctgtaatgtagtaccttgccaagttcaaccacctgttccaatatgccatggaaaaagtcaacacgaatttaaagaagaaaatttgcttttatgagaggcttgaatgataggttacaaccgaagatggctacctatttggaccttaccttcaattgggcagtaatcactgtgatatcggttgaggcaaagaatttagagcaagggaagatgaaaaggaccggacgtgaaggaggtgagggatcttcctagggatccgagaagcga

SEQ ID NO: 31477 - DNA, 307 bp, Zea Mays
attgaacacaagaccgcaccacctaggcctgaagccaagatgatataacacttctaggagaaaggcccaggacactgagtcaaaagcttttgtaatatctagctttagaaacagactagtgatcttctttctgtgaaaggccttgatagagtgctgaaccaacatgtagttgtcatgaatggagcgacccttgacaaaggcactttgatttgtagccaccagattttgaaggtgtggtgctaaacgattagccaagactttggataccaatttggcgaagctgtgaataagactaattggcctgtaa

SEQ ID NO: 31478 - DNA, 348 bp, Zea Mays
agtacggcggtgttgtccgctacagcgacaaaggtcaaggcggtactggaccccacgacggtgcgatcgaggtaagtagggcggaggagggtgccaccgtgagcgttagggcagatctacgcgtcttcagggcaatgtcaacctatggggcgactatgacgctggcagggacgctggcaaggcagcgatagtcacagcaaaggcaatagcggtgaactctagggtaggtgggtgtgtgctaaagccggtgggcccaacacgacacgcggtccaggaggagggacgggcgagtgaccacgcccatctatggcggcagtcgggcagctgaccgcagggaatagaagcggc

SEQ ID NO: 31479 - DNA, 358 bp, Zea Mays
cagtgctgtactaacaactctgctataggtaaggtccagacatgttgccattttccgctgaagcctgtcattgagccccctcataaaacaattctttttcttcaagtcagtatccacctggtcaatggtatgctaagagaggtggttgaatttgttgagatactgcatcaccgtatctcctccttgcttcaatcggataaactcttctagtttcatctgaagcactccctccggaacataatgctcccggaatgctagcttgaactcctccctggtaatctgatgtccaacaggctgaattgctgaaaaatttgcgaatcaggtactggcaggccctcttagctggtgagctgtgaac

SEQ ID NO: 31480 - DNA, 339 bp, Zea Mays
agcctgcactgtggaatcccgtcggagcacgacgctccgaggcccgcgatgcatggtttccgcccctatttgcgtaaatacgatgggaaggacatggcgaagtgattcaattggttatttaccttctgtaatgcgatcacgtgcccaatctgcggcgcacgacggcaacaccacggaggccggaattccatcaagaaataaaccggacttcggccacaattctgatgcgcacgtaccagacaaagctcccccgcgtgcttatgaagccccagaaccaccccactggtgtagaagggcagcaccggtgagccaaggatgcggcggccctctctcccccgc

SEQ ID NO: 31481 - DNA, 282 bp, Zea Mays
atcttgttgcctacctctcctttcacctggattcggtaatccttttgctggtgaatcatgccggctgtatcatctaaatctctagatcctttaattattctgtcctattatctggttatctactataacccgttctcaagtatcggatgttgaattgcttaaaatctctcatttctggtcattctcatacccccttctccgagggtcatgacgcttgttttatcaacttatctctaaatggcatatccatttggttcaatggatttgattgttgtccttggt

SEQ ID NO: 31482 - DNA, 454 bp, Zea Mays
tggctgtcgaactgtttgccgttgttgactgtgagctcagatgggactccgaatcagcaaacaatgttttgccagaagaacttttgggcggtcttcgacgttattgtggatactgccctggcctcgatccacttggtgaagtactcgacggcgacgaaggtgaatttgaggttcccttgagccgtaggtagtggtccgacaatatctagcccccagcgttgaagtggccatgtgtgggcgatcagcttggtgaactgcgaagggttgctcgagcggggggagaacttctggcatgcttcgcaagacctcgtgactcgattcacggtacagattatcgcgggccagtaaaatccttgacagattaccttagcagcgagggccctgggtcctgagtgggacccacaagttccgttgtggacttcacgaaggatttgaatgccttcggtttcggtca

SEQ ID NO: 31483 - DNA, 854 bp, Zea Mays
cctgaacggaagatgcactaggctacatcatcatagtgcacatggccacatgggtacaaaccataatccaaatgcgctagttgtgtgttgtactttcccgctcacagaatctcctacacagcacattaagttccagaactttgtaggctgcgttgactaaaaaaatgacgcatgcttatctaccatcgagccctcaacaaaatcaggggtccacatgcaaatcctgaactctgagaggtgcatgcagcaaaagtacacctaaactggaggtctgaagctctaaaacctagtaacgatctcttaaccagaccgtaatgcgagttaagtaatgacaaaaaacaagtaatcttacactcaaattaaattactcttcaatacccccgagtggccgagtcacagacttatcagatagtaaaaaggaatagcagttaccaatcccacgaaaacctctcactaaaataccaaaactcaagacaaccgagacattctcactgagaagcatcaatttgcagacaaaacaaaacaatagctgattaacaacagacaagcctaataaattcgcagatattgcagccaaagccgactcccgtactagccctaaatagtgaaataaacaccagaaaagggagtagccgccaaagcattccaccgccatcaagtccgcaggagtgatcgcggccacggccaagcggtggggtgaaaactgaaaacccaaacctcgcacacaaaaaaataatcaccaaaacccctgcccgccacaacaaagccctagaggttatagcaatcagccaccacgcggtgctggaaaacagcgaggccgccgatgaaacgcaccgaaacaccgtaaaaccgcg

SEQ ID NO: 31484 - DNA, 343 bp, Zea Mays
cgaaagtaaaagagacccactacttacaacatctggattgtccttaaatccgggtgtgataagcaacaagaatgacagcgggcggtggcgcacaaacctgatcaccaatcggaaagaataaaaggactcacaacatcaacaaatttgggtgtggatctgagggacgaggtgacagagcttatggcccaagcggcttccccacagtcatcactacaacgacacatggagaggaagcatggatgttgtgcccccactgtcgtcaccacgatggcatgcagaaaggacaaggcatgatctcgccgataggagatcccaagcaaccactagatcacgtggagaaacc

SEQ ID NO: 31485 - DNA, 411 bp, Zea Mays
cgagaatagggcccacattgtggtcgggtgggtttcccttgcggcggccaacatcatgctcgacgatgaccaccgcgcttggcggtgacccactggtccacaccagaggtgtacccactaggacgtatggcaatggggttggacgaaatactttcttgctagctctgaaatgaatgcgacttctagcctaggtggaagcacctctctagctatgcttctccgcaatcaataaatcatttgcaaaggtttgtcacagcttgccagtgtttgctcacagtttactggtcgtgcttctagcctcggagcaacggggaaaggaggctgttgcgtcgatggcaggatgaaaggggacatagtcctaaagcagaggctatgcttctctgcgatcaaagaaatcatttacaaaggtct

SEQ ID NO: 31486 - DNA, 283 bp, Zea Mays
gtcggacataggttcccaacgcgtgcagaacatcctgcaacaggttagggaagtgccatgtctcgaacattgaggtataatgttcaatgacaggccataaccccacgtagtgatcctgctgttcatcgttggcttctttgttgatgtcctcttcttcttcgtcgtcgtcttcatcatcgtcaccagagtcgtctgggtcgtcgcctccgggagcaggggcttggactgctggtgttggcggtgctgaagctgacgatccagctgtgaaggctagtgattctgc

SEQ ID NO: 31487 - DNA, 272 bp, Zea Mays
ggttaccctcaactaatgccaagacgagcttaagcatcctggtcaaggccccatgcacccgagtcagtggaccatgggatctttcttctccctaacaacatgaacacgtcagtctcaggtcctaaatagtttagctactctaccactatgtttcacattcaaacagagagattgtaagtataaagaaaggaggatagagaaatctgatggaggatggtttgcttcaggcactggcagggaggacaccaggcacctccaaggatcactccatg

SEQ ID NO: 31488 - DNA, 352 bp, Zea Mays
gaacagtgcagaaaccggttgaaccggtttgcaaattcggttgagtcaggccgaaattcggttgctccgttttgcaaattcggttgagccgggccaaaattcggttggtccgttttccaaattcggttgagtcaggccaaaattcggttgctccgtttttcaaattcggttgagccgggccaaaattcggttgatccgttttgcaaattcggttgagccgggccaaaattcggtggaaccaatttttgaaactgttgcgcagattttgagaaaagtgaagtgaaacaagggtaaaatggaagttttagatcaaggattttgagctttagtaccaacaccaaccttctttatg

SEQ ID NO: 31489 - DNA, 297 bp, Zea Mays
cagtactgtcctaatccatggtggctttgttgtccccttctccatcacactactagtagtattagtagctagtagctagtagcaataagtacaccgcctataggcttcggtcgcttcattccaagaggccaaaacaaaaagggcaagacaacgccggcacgtagtaggctataggcagctagctcctgcacctctgctgcagaccatgcacacacacatgtaatgtttgttcaggccgtggtcacgtctcttcgcaacatttactcacccccatttactactacgtactgcgctgca

SEQ ID NO: 31490 - DNA, 286 bp, Zea Mays
caacgtgcgtgacggcagcgagcaatccatcgaccaccagggcctctccgggccagatgccaccatatccgagcccagagatcacggcaaagctcccaaggccgagcttgcgcaccgaacggcaacagggacacggtcccatcgcggcggcttctttctccttcacagcgagatccggccctcggcgtgtgtgccacgcgagcggtcccagggagacggtgcacgcacatatagtctggagtacatatcctaacaaccctacggagatcacaggagaattcgcccg

SEQ ID NO: 31491 - DNA, 541 bp, Zea Mays
ccccgaggtcctttccctacagtttcagcgttattgtccccgagaggctcatccttccctccagtggcagccactcatcccacgctagccttcttccccacgaccggccttgatctgccccatctgtccacaccatcgctgctcctcatggtgatgccctactctcccttcgacgcggccgcgtggctctcccatctaccctgcgcatttggcggccgaccctgacccttcctctccctaactgacggcgtggctgcccctctccaacaacccagtgttgtggcccctcgtctcctactcccctgcatgtgtccgtgcatcgttgccaggcatcctctcctctagtcgtgcctccgccggctgtcctccacctcccgctaccacctgcagcactaggagcgtcacccctgggagcactgcaatcgtggaagcttcaccctccctgcctcggtcatcaccgcctcctctccttggccgaccagacgactctcctccttgggcgccgccatcttcccatcaccctaggcaccgcgaccacgac

SEQ ID NO: 31492 - DNA, 459 bp, Zea Mays
gattgggaagtaaatgcatggtgattgcgagttggagactggtagtttacgatttatatgatttggtcggtgtgcgaatatacttgtgaatctgtgcgtttataaaaatgttgtagtatatgttgtgtctcggattgcggcgataataggcaagctgacgtgtatgttatttagcggctatgtcgttgctctagttagccgaattgttagatgacttggttaagctcgtaatcacggtaaattgcttgttgtagtccaaatgcgcatggttatggtcgcgggtaaaattagtggtgctcatgtgatgtctaagtgaaaatacaaattagtgtgtgaagggcgcaattgatatacacatttataccagggttgattattatggtgaatgtgtttgctgattgtgtatggtaattctggcgcacgaaataacttgtataaaattagtaagtctacttatta

SEQ ID NO: 31493 - DNA, 678 bp, Zea Mays
gccacgacgatgaacacgtgttcactgcactagcgttcttcctcacttccgaccgccgcacatcaacgccaaaattcacgatcaccgccgaagagccctataaattgagtccggactccgctgcttcatcacatcccgcacctcaacaactgagcactcgaatcgagtacgccgcagaactaacgcagtccccaaatctccctctcctctgttcttgctccgccgtgaagaactccttcgtggccagcgttcctctggtcagtaattatcaaattactccctgttttagttagtctttgatctcctattgctcctagttgcggcaatttggagtttggccgaagcccaacaccggaacgcacccgtgcgctgtcaaacaccgtcgtgacccccctcatcgtcgacccgctcttcgggtattgttctgcccaaaccaaagtatgtccatggaccttggtgaacccgtgaacctttacccagcctcaatttggccatccccgtcgctgtttgatcggaacatattcatcctcctgtccatccgctcggtcaccgtgaactgattgattcagtgtcccctaggtgaaattgatggaggggaaatggtcggggtggatctaattgtgtccctgtcgcttgggagctccagccgtggcgtcatctggccggaataggctcgcc

SEQ ID NO: 31494 - DNA, 649 bp, Zea Mays
agagagatgccttctcttgcttaagctctttgacttgctgctctaggctttccacccgggagtttaggtgggtgcagtgggaggagagatcatcgtagtggttgtcgagggtgtggaggtattcggccatgtagacgatggtggggtcatcttctgttgggtctcctcctgacagagcctagagtcttttcctccaggtgggggtatttttgttgctgggtggaaaatatcgaaggggggtctcagagatctctcggctgtagttttggcacagctgtttaagggcttttcgggcaacactctggcaagtgtctgggaagcggtgcccgatgaaggtgacttggaagggaggttggtttgggtagtttcggctttctcccaggtagactgccatagagcacttttctactccattttcgtggtattccttccagacatattcgtgcttcttgcggatccccatgcgtagcgcgcaacttcatagaaggtgaggaaagccttcctcctctgagcagtaggatgtcctaataacccaggggccttccatctggtagaagaaaagaagggtctgttaatatcggggaaaggagagagagtgtttcttgggggtaagaggtgttttcttgttaaggcaactttttaaggtcag

SEQ ID NO: 31495 - DNA, 655 bp, Zea Mays
gtttaccctgcgcatcctcaccctctcactggcactcgggcccgcgcgtgagcactccctcgcgcgcgctacgctggtgtctacctctgacgtgtgggccaccggggggaagggcattgtagatcttctctccaacaacctcgccgatttccctggcgacaatgacgtctgcacgaccgtatcccttgcgcccgagccgacctgcgggggagcataaaacctcgtcgtgtgctccctcctccacctggcgtgaaccctagatcgagcaccttgtgacttccgccgccatcatcgtcacaccgtagggagagagagaccttctatgaaccacgtgttgtgccgagagggagagagggttgctggacccgtggagctctggcgcagactactggacttcatcagccgaacctcggtgcgcatcggtgaccaacatcgtcaactaccgcatctaggggagctctccatcgccgcgaagccttcgaccaccgtggaccgacctattcgtcttgtcaattgccggtgagaacatctcctccagttccgccatggtctagtagtgcgatagcacgggttcaattagtgaatgggagcgagaattgcagaaccgggcaacgctggcgatggcaccgccgcttggcaaccctgtgcaccgccg

SEQ ID NO: 31496 - DNA, 603 bp, Zea Mays
tggggtgagctcagtttcggttgatcaagtcctcaccgagaggtcgagcgatggccgaggcgatgtggaccccgagctagaacgcaatggcctccatttcacgaatgcgttcggagattagcgccattcaaggagtctagacggacatctccccttactacgaaaccccgagatgacagcatacgaggtcaatggccatagacagactaaagtgctcaacgttaagagcccgaagatgctcctccacacgcgaaagctcctccatcaccatcgtgggctgagaatagaaaatcccatgagacaactgctggggctaggagggccaaaagtctaggatgaaggagcacgagcctcaccttctgtcgagaacccagacaaaggtccttcaacatcgcgccccgatggccgcacttcggtaagatccggttcggccctcgaagagccctccctcgcttcgaccgcaggatgcttaggccccgccatcctaccgagctcagaccccgccaccatggctccctcagcagtggtacctcgagcagcagcatgagcctcacgcctcctcgaaaggctaggccaccaccggtatacagacatccgagcttg

SEQ ID NO: 31497 - DNA, 323 bp, Zea Mays
gtgggcgcaactttctcattggcttgacctcgcattgctgccagggatggcacaatattcgtcaatatacacttggtggaataagtgcaaagccaaagtcgataactgctcaaggagagagtttgatggtttgatcatccttttctggtgggagatttgggaagagcagaaccgcagaccttccaaagcctagagaagtcggagtgtgtgactgcagggttaatcaaggatgtttttaggcagcaacgagttgctaattcttttgactttggttgctagggtctctgcttagcgttctttatccttttttctttctagagtac

SEQ ID NO: 31498 - DNA, 496 bp, Zea Mays
cccatgtcctttacttgacccgcgccttcagttctgtgtgctttgatctgctttgctctgaatgtaggtgttaggcagtgcaaatgggatcaggatatgtgatgatgatatataaagtggtggtttaaaagctttgatgaaattacctagtggccattgcaagtgaaatttgcttagggtgaccgtgctgggcatggaaatgagcctgaacctatgaatggattgctgatggaaggcaaggatgttctaccttttcctgaattgcatgccattgagcaagcgaggcagctgcgagtacctaactagagctgaccctctatcctcctgaagcatatttaatcagcgctttttgtttgtggttctgcctaggaagatcatttggacgtgacaatcagcacagttacagttagagcatctccaacagtaccttaaaagaaatactacgccagccccaaaagaaaatcacttctagaattgcttgtttattccaatgttg

SEQ ID NO: 31499 - DNA, 351 bp, Zea Mays
ggaaaggtcatcatagtggttatcgagagtgtggagatatccggccatgtagacgatggtggggtcatcctcagtaggatctcttcctgagagggcctaaagtcttttcctccaggcaggggtatttttgttgctaggtgggaagtaacgaaggggggtttcaaagaccactctgctgtagttttggcatagctgtcggagggcttttcgggcaacattttggcaagtgtctgggaagcggtgtccggtgaaggtgacttggaaaggagggtggttcgagtagcttcggctttctcccaggtagactgccatagagcacttctcagttccattctcgtggtattctttcca

SEQ ID NO: 31500 - DNA, 1261 bp, Zea Mays
agtttctgaatctaagagacaacgagttctggttgcttcttctattctttattcagaggtaagtttatttattattgtcatagaataataggcctccatctgatgaggtttcagttttcagtgctctcattccaacttgagtggtttattgaagtcagcacatgatgtcacattttttttctaaccataatttttcttaaaagtgccatgaatcatactccctctgtcctgaaaattcaaaatttacaaactttgatcaattattcaaattatggacaagtttaggccatgaaacttgtttaatagatttctattcaaagtgcctctgagatgatattggttctttagcaaatgtcaacatatagtaacacaaattaatggttgaaatttattttgtttgacttttccctaatagaagtacgtttgccattccggtattgagggagtatgctgttaagttacttttctgctttggaggaatccataaaagtgttttaatgcttcaatgtgatctgcataaaagctgtatgttcatctttttttcccttaagcttaggattattttcgtcttatatgaaacataggatataaggaacatcaatttcacttgtaatctctcttgtacttttttattcttgtctgttctcttttgaatgaatcaaattgtcctgatacacaaagcatgtctcccgcgtgttcgagaaaaaaacaaagcatgtaccatggactgtttcaaactctaaaaacatatgttgtatacctgaaattgatgtttaatgctacctcaactctgtgtcactatagcttctttagattttaaggaagaatgtttgtctatacttattcagcgtctcaatgatctatgataatcataacgtgcactgctggatatcaaagcatagcttgcattttagaatgtctaagtaaggtttctgtgttagacattttaaattcatggaattctattctgctactgtctgtttgttgatactgcttatttctagcagctagatgaacaagttttctttagcacatattgctcatgaaatttatgtatcataacagttatggcatgctgtaagcagtgacagaaaaccagtgagaaaaaagtatgttggattgatcatgccgccatttgtagctgtcctgaaaagatatcgttctgttttggctggtatacatgagcttacatgtccagatgtgcaaaatccactacttattgatgactgggcttcgacagcagacacttcacctgttgagg

SEQ ID NO: 31501 - DNA, 367 bp, Zea Mays
caacagaatggttcagtaaaagaaattattacagagggaagttataaggaattaatgagatcaccaaggaagtgcaaaataaaataaccgctcatggatcattaagaaacaagggtgatcaagggcatgttaactgaaatgtcttaaacagacattggggcatgaagataagcatacacgaaaatataagagtatgcaagactcaaaagatacgagcgtactaagaccaaggtaatagaaattgtcgaaagatagcgtcttatcaacagaataagaaaggatctcagaagacgagaaggtcatagacacataaactgaactgtttaaatagacagcagaggtacaagggtaagtgctttagattaag

SEQ ID NO: 31502 - DNA, 1554 bp, Zea Mays
aaaacaaaaaagctctgtcagtttctagggaagaagacattcttgctgaggatgaaataagcaaatctgaaagaagagcaaaggaacgttatactcaaaatctggctgaggaaaacttgaaagcgatacgtgctttctcttctaagcttttggaagtactttgttctatattcttgatgtcttcgaatgatgctattggattattgcaggtatatcaagtaatttcctttgaaaagacttcttgaccatgttgctgtggttgagtcatcgagactcgagagatccattttcctatagctaaggacacgttaagcttttatatttttggtgacttatttgttttggcttctcgagttagtattcgaagagcatatttctctttgctagggttgttgattatagcttcatatcacactcccatcatatcctcaatgatgtcacttgaaattcgacagtgaaactcaatgatttctgtgtgctgattgatgaaactattcctgttggaaacaacttgtcatcaatacaattgttatgaccggcaaggtgtacaatagaaggcccaaggcccagtcggctataggagaaagccatggcgctgagccatagccgccgggttggtagggcgattagggttatctgagagtgaaaataggagaagatttagatagattaagtctaaggtggttgagtcagattagatgatgtattagggtgcctgtgctatataatgcacaggagatgattaataaagatcagaggagaattaatctaagaaaaggattatttccccctctcacctacaccagccagccgccgtgcccagcacggtgccaccagttcgccgccaccgatccaactggccgcgccccctctctcctcacccctagcacctcaggccaaggcgtggtcatcccaacaataaaggaagtttaacattttgtggattgaaattacagttctctttgtgtgggtctattaattgaattgatgattgcaattcagttatgtacttaattagttaattttcatattttccctctttattgtagcctgcgataagtgagatagcttccatatcagacaaaaacgttgttgggaaattcttccttgatgcaataagaaagttgttggatgctacaaaggctgttaatgcagagcctgtggatgatagttcaatggaaattgaagccgattccaacaaaaatagcatgaagaggtttgtatggtttatgatcttgaaatttcttagttatttgtagattttgattgaatttctgatgttgattttaagccttgacttgaataccagggctctacttttggattttgcagcttcattgatgcctggtttagctgcaaagtctatcaatgtgttgttcagttatgtgaaacctgcaattaaggtacatatctggtttaatgcaaattaagattatgtttttcatgtaaccatgaatctaagttcagtttaccacaatttttttgtttataggacagcgactctttgattcaaaagagagcgtacaaggtcctgtcaatgctgctcaaggtctg

SEQ ID NO: 31503 - DNA, 385 bp, Zea Mays
gaacccaaccaaggagatccaaagccatagctaggtaaataactctagctgttagcacacactggacataagtggcatgaccagccctagacataagctccgccttccatcctggccacatatccgcaatacgatggatgatggcttgtaattgatctgtgttaagcttcttgagagacaaagggaggccaaaatacttgcaagggaattctgaaaccacacagggcagcaactcctggatgacttcgaccttctcattagtacaacgaataggaaaacactacttttttcaccattagtcttcaatcccgaagcaataccaaacagtatcaggaggttcacagtcaaaatgatgtccgataggataggttttaagaagaccact

SEQ ID NO: 31504 - DNA, 639 bp, Zea Mays
aggcatctgcgacggctcccatgcgaacacatcgatgatgcctggaggaaggtgacgagcgcgagttcctatttttcctctagatcacccgcaatgcgactggtctagggggaatccgcgcagagccggatagccttgacggagacatcgtccactccggatggccgcacctttggcaccttggtaggttccttggtatcggaggtcgaggggtccctgccttcgtcgtccgggcgagcagtttccgccgccagggcgtgcagcttctccacagccgcaagcgcagcggcgcggtcgcctcgcacggtgaggaccccggctggggatggcatcttgaggaccaaatacccataatgggcaatggccatgaaccggtataggttcggcctgctaatgatggcattgaacgggaggttaacctccgcaacgtcgaactggatgttctccgggcgtaagttttcctctgtcccgaatgtaaccgggagcgtgatgatcccgaggggatacaccggttgagtgcccacttcagagaatggatgagagggtcctagccgggaccctgggatctgcagctgcttgaacgcagcatggctgatgacgttgagcccagccccaccgtcgatcagaacatgatgcagc

SEQ ID NO: 31505 - DNA, 367 bp, Zea Mays
gaactattaccccaacctaatctcagccgttaacttgggatgaacggccaggaactgttctcccacaacaccggccgacccaggacggcgctgccctgccgcacggtggcccaccataggtgagcaccaggaactaagtacccacccaaatccggccgctacctggtgtaaacgaacgcggggattcaatcgagcatcagagaggtttcataccgtgcttcgaagggtgatagaaccagtcacaacgacgcacagcaccttggtcaccaagtgcggcagagcccaacgctcggcgagaaattcgaccagcgcccccaaaatttcccctatggcgctagagctgtagtgaggccggacgacgggctcc

SEQ ID NO: 31506 - DNA, 389 bp, Zea Mays
tgtcgtttgacctctcgatcgccatatctctcgttttctgtgccatatttctctatgtatgtatttattcacatttcatatacttatgactatgtgactaatatgtgctcacctcttctgtcatttcagtgaccttgcctgcccgtgagccgtctcctgtcctgcctggattttcacatctcgtttgagctttccaggtagatatccactcttctgatattctatcggcagttatcgacttgtgcttagcttctctctcatttgcaggtcacgatgccgcgcacgaagaatgtgtcggcgccagggggaggagatgacgaggaccctcctcgcccctttaggcaggtcaagggaaagatcgtgtatttggagcagtaggaaggccgcaa

SEQ ID NO: 31507 - DNA, 780 bp, Zea Mays
tttggtcatcgatcgagggcaactgtgattttaataggaggaactttttgtaatagtcatgaagactttccttttcttgctgcctacaaagtgagagttctgccagtgcgtttgtttttggtctatagccttagaaattcagcaggaatttgtcgtgaagtgtcttccatgaatcaattgataatgacagtaaccttgactaccatgtgagagctaggccctcgagggctatgatgaatgacttggccatagtggcgtcgtcccactgatgatgcaactgtgacctaatagctcatgatgcactgggttggatccgcagtgccattgtactttgggtaagtgcctgctttgtaatttggtggccaaggggaggcctggagttgtggtgcgagagggcttcgctcgtcaaggtaattgagcccatgaaaggaaactggtgcgaaggctggtatgtggaagtggcgaaggttttggttggctacactggctggctacagatggcgggggtcttcatgtcgcatttctagcaatttcttgctccagctctctatctttttgctcctcctctaggatcatttgccttactctagcctgcatgttggttcgctgcctcttaatagcgtgtatctctctctgtttttatgcgaagttgttgtagtttgagttgatatttggctaagatgcccaggacttcgtcgtctttggtgatgtcatcagcctccggggggtaaaacctggcggggcgtccaagggaggtcctcagaactgcacgtgcaaatg

SEQ ID NO: 31508 - DNA, 418 bp, Zea Mays
acaactctgtacacctctatttagaatcaagcagaagcaattactattgtccgcttccctagggagtagggcgaaccctagctgccaccccttcttccttctctcgcttgcagccccaatccaacagcagcgtgggactgtagcgcgggtgctgtagcaccctctgttctcttgctctccttcagccgagcccagccacggcgccccagtgtcgtgatcgtcgttggtcccctgcacctcacctctattccctacgccacattcccggtaggatccgcaatcctatcaatctggtatctgtgatgtcaaggccctccagccaccaccacctcgcctccgacgtcctctgtgttactactggctgcctcaacccctgccctcgcgtcacttgcgacggcgtcgaccctcaccctagaag

SEQ ID NO: 31509 - DNA, 521 bp, Zea Mays
cacacccatcgcaccagcccaataacactgaacctggtcagcctccatagccaaaatattatcctttgttcaacaaaacaaataggacagggagcagataaggcctctcttccaaatgcacaaatgacaccagtagggatgaggtgatcttcttcagtttactcagcccactctgaattcagttccccagtcctgctgccccattcctcaccttcatgttcagtccatgttaactcacaaccccaaatggcaacaaacccatctcccttaatacacattattctccacacatagttctattaacttgttagaatcacccaagaccaagaatgcaaggaccaaaagttacagtgccccaaacttcttccaaactcactgaattttctgcttcagttatctgcaatagcataacaccaaccttgacagcccaacttggaacgcactcttctcccaattccacacagcaacaagactaacaccttatatgaaacttgttgtctttaacatgggctttcatcttg

SEQ ID NO: 31510 - DNA, 734 bp, Zea Mays
gtgcaataagttttcaatcggctagagaagtcgaaggagacattacttggtgaaacaagtacgatgccaattccttgcccttcatggcaaaccgatccatcaaaatgtaaagtccagggaataacagtgaggtatgatctgtctagtttatgagtatcattgatccgatgttgtacaataaaatctgctacgacctggcctttcatagatttcaatggttcataggccaagtcatactctataagtgcataagcccatttaccaatcctaccactcataattgggttttgcaacatgtatttgatcacatcggtttgactggcaatagtgcaataactagacagtaaataacatctacacttggtgcatgcataaaataggcataagcataacttttcgataaaagtgtaccttgtttcagcatccaccagcctccgacttaggtaggtcaccacatgctcctttcctccagtcacttgtgtcagaatagccccaataaccttatcttcagctgcaatgtacaatctgaacggtactcctacttgtggtgcttttaatacgggagtcgaagacaaatattttctgatgagatcaaacgcttcctgttgttctgcccccaagtgaattcgacatcattcttaagcccaaggataggggtgaaggcatcaatcttcctggctaggttagaaataaacctccgcaaataatttatcttgccaagaaacttctgcact

SEQ ID NO: 31511 - DNA, 408 bp, Zea Mays
gcttgaccgcgacgtgacacgaggaagaagacgatggttggatcgttggattggatttgggcagaagagattagatcgcgccagttagaattgtgctcgttagatcgtgaatgcacagttgggattagaagtcgcttaccccttcgtggtattaaatccagcccgtcaatccgagatcaaacggatctggatgggttgcggtcaggagctatcctcgatcgtagatggtagatcgtagggtcggtaagggttaccgattcgtcatttaatatggaccgttgattgtactccgtgtggccagattatgcggataccccttcgccatggcagaatagcataagagcctctggaacctttataaattaacccatagtcctcagatcctgttcactgggtcttagaaagctt

SEQ ID NO: 31512 - DNA, 685 bp, Zea Mays
cccgggccgctgtagcacgctgaagatcgatcaaacgaggatcgacagccagtggtcacacctcggtctcatctcgctcccggaagcgggcaggtggaatgggtggagcgggaggaggagcagtggaagcatgagtggtggaggtggtaggtatggctgaagtggtggatggctcaggagtgactagagcgggcgaagtgggaggtggagtggtagcagtggcgggtgtagagggagcggaggagcgaggccgagaggcgagtcgacgaactctgtaggcaatctgatcggatgaaatctgcagctgaccacctctctctgccttctcagctgctctatccaaacgccgtttcttgcagccttcctgctgctccaagtagacggtcttccccttgacctgcctgaaggggcgaggagggtcctcgtcgtctcctccccctggcgctgacacattcttcgtgtgcaccatcctgacctgaagactgcatatgagagagaaaaactaagcaccagaagagagtagaggaaatgattatgactgaggtgataaatacctagaaatcccacgagggagaatctaggcaggacaggtgacgggctcacgagcaagcgaggtcactgaaatgacagaagaggtgagcatgtattagtcacatagtcataagtatatgaaatgtgaataaat

SEQ ID NO: 31513 - DNA, 430 bp, Zea Mays
gataaaaagggcaaatgggtcgaccaactaccggaagtggtatgggccctaaacactacagaatgccgggcaaccgggttcacacctttccacctattgtatggatccgaggccatgacgccgcaggagataaagcatggatcgcccaggacaaacacatcagcaatccccgatgtcgacgaaccaacttccaaagatctcatcgacggagaccgcgtcctcgccctgcaggctctcgacagatatcatgcccaaaccaaggcctggcgtgacaacgcaatcgtcccaagggaattcaataaaggagaccttgtactcatccggaccacccagacagaatcatggggcaagctggagccgaaatgggaaggtccattcattgtcaagacgaaggcatcccccagcgcgtacaggctggtaacaccttccg

SEQ ID NO: 31514 - DNA, 328 bp, Zea Mays
attgccttgaaaccaaggccaccaaagataggatggccagaaatcagccagacgacaaccaatgagttgtcgcgcatacttaccacccccagcagtaccaccaacaataattccacaacgaaccaatccttcaccaacctaatcatatgtaccaccaacaccaagagatccaagtccttcctcctccaccacatcatcaaaatcctccaccaccagcacccaaacaagtggacttcgccgagcaaccttttcgcgggtcatgcacatgattaccagagggtcaagtacagacttcgacaccaaacggcagaagaaggatcactaccgc

SEQ ID NO: 31515 - DNA, 490 bp, Zea Mays
gaaagtagtggtgttccttctcctgccttgtctgccctcattggtctgcaagaattatctctggcgaactttgatcaaactcttgaagacatggttccagaagatctgttgtcagacccggtagatggtggtgcgacggatgtttgtgctgatgtgctcgatgccgggttggggtcatcccgggcagcgtcccgcgcctcatcgaccttggagcgcggtcttgagggtcaggaagctggtctggattgcactgttcccatggaagtgactgagggactttcagccttagaggtggctgctgccgagaactcggccctcaaggatggtgctggcgcttacccagcccccgagggtgttgccggagatgatccagctcggatgggtagcgcaagctgtgacccagcccccgagggtgtccgagtgggttctccctcccacacttccatggatgttcacgtagggtcttctcctccacactcttgttgcatgg

SEQ ID NO: 31516 - DNA, 378 bp, Zea Mays
aagacctcgtgctcaggcaaagggtgaatattgataatcgcccagtcttcatgcattggcggtaatcgctgcgagactgacctgaccatgatcccacgatgttggaccaccgaggcgctgaagcctgcagggaggaacggctccgggtctacgcgccggtacgccattgccagattttctgaggatcgccggagagccgagagcaaaggagtggtttggggttttggtgaagtgacacccagcgagagctccaaggacgctttgggcgcctgttcgtatatttttaataagaccgcccttgtgaattcaccgaagcaggcaaaagtgggaggggtcccacccgtcagggacccgggggaagggcggaaccaggacccg

SEQ ID NO: 31517 - DNA, 444 bp, Zea Mays
cggattgggcgcgctacatggaaacctgtacgtaccactccgcgttggcgcgttggatctcggtcctctgccgcgcaccggcgcacgtactaaggtagcggttgtttccggagacagttggatgtttcgtctgaaagattttacggagccaaatactttaacatttaagtactccctccgtccaagtttaactcgcgttttagcttttctcagacataataccagccaagataatagacgcatgtacccctgtgatctagcgtgaagtattaattgtaattaatgctgagtacacgaaagacgaaacggttcacagcctccagccctccacggtgaatgagaggaggccaagagtctgttggtatgggaacgaagcgaacgggtgtgtgaaacgaggagataactatggtggcatcgaggtgtagaccacgaacgacacataat

SEQ ID NO: 31518 - DNA, 307 bp, Zea Mays
gggagatcgatccatgatagctatatgttagttcaacaatctataaaggcgctacacagaagaggctttccagtttgtttttgaaattagatatctctaaagctttcgattcagtgtcttgaacttttcttctcgaagtcttgtttcaccttggttttggaattaaatggtgtaacctgatttcaatattctgtttacttcttccactcaagttatgttaaatggtgtccctggaaatattattatgcatcgtagaggactccgtcaaggagaccctctttcccctatgttgtttgtcttggtgatg

SEQ ID NO: 31519 - DNA, 439 bp, Zea Mays
ggatccgtttcttctcctgctggtgccttggtggtgagtgaacctagcttccttctgccggttgattcgatctaggagctccgtttgttcttgggggcatttactttgccgtggccgtggtccgtgagcaatcaaatccaaatctgtctccctttcgatttgtttgctgcggagtgcggagtgcggagggtgacgcgctgctagctcttaatctctctgcttgtttctccttcagatgctgatgcggactcgggactcctacggagagctgaggtgaccttgttgagtgtgcccttacccagcgccgcctgcctccgagccgagatctcctccgcgcaccccggcattctctctctctgtctctggtgccgacgaccgcgcggccgaccccgccctacgccaggtgctcaggtctccatcttcgggaccttcgccggcg

SEQ ID NO: 31520 - DNA, 524 bp, Zea Mays
gacgcttctagaacgagtttgttagggtcccttagatctcggtaaccaccatggtgtggtcctcccgcaccagccgggtgaagggtatcctcagcccttggaacaataaaaccgaaatcatgttcgccgtgagtgccatcaaccaaagaggagggaagtgaggctgcagacgaggactgacattgttgcactcgttccatcagtggagactactcagggcgcttcgtggaagcacgacgggtgtcgtgggggagggttcagaggccacgattgatcagagcacacagaatcgctaactagagtcaaaatccgttgtggagccgcaacacgtcgagagcagctacctcaacgccaccgttttgggtaagcacacctccgatcacttcgccttcgtctacacttcgcccggcaccaatccacgttgggaattaatcctagggagactgtatttcacctcgccggtgaactctcggtcatggggtgcggcggtgccggcctcacgcggttgtggggttggggatgac

SEQ ID NO: 31521 - DNA, 960 bp, Zea Mays
catctcagaccatatcttcaatatatcatccccctgatgaagaagaagatgggcagtgatcattgcattccatgacaccaagtctcgacaactcatccgctcaaacaaactgattgcatctttcaactccccacacttgccgtacatactgataattgcgttaccaactccacgagcgctcagaagcccggattttgcagcaaaagtatgcatttgttttccaagttcagcaaaacctagactgccacatactccaaggacagaagtcaacatgaactcatcaatgaattctgcaccactgcttctaaacatctgaaggaaggtcgaaagtgctttctcatactcaccacctctgacacttgccagcagtagagaattccaggcaatgtgaaagctctcctcatgctgccattgctcaaataacagatgcgcgtctccagatcggccacatttgatgcacatgtcaatcaacgcagcatcactccatggactagacacacatccacacttgatcacaaacgcatgaacctgctcgctcaccttcctatccgcagcaatagcacaagcattcagcacgcctgtcaccgtgacatctgagatctccagcccatcctccaccatttgcctaaacaaacccagccctcggagccccgccttcttggcaaaagtggcgcgcacgccttccttgttccgacaaaacccagtgagaaccgcattgtatgtaacgaagttcctctgcggcatccgctcaaacacatccagtgccatgtcaacgagaccaaactccatgtacccattcagcaaaccagtccacgaaatcacgtccttcacgggcatcctctggaaaacgctcaccacgtcctcaacagaggcaccatgctccgcgtagaacccgatgagcgcgttgcccacactcaggtccgtctccagccccgacttgaacgacagagcatgcaccgc

SEQ ID NO: 31522 - DNA, 294 bp, Zea Mays
accccccacacaaagggcctgttataggacaagcagtatatgaatgtgttgctggctggaaaatagaggataaaattgtttccatgactttagataatgcctcaaacaatgatggtgctattcgaggtttgagggccagattttcagctagacaaggaagtgcttttgttgcaaaatatttccatatcagatgttgtgcacacataattaatttggttgttaaggatgggactgctgcattggattctttaataagcaatctaagatctactgtcaagtatattaaaaaatctc

SEQ ID NO: 31523 - DNA, 637 bp, Zea Mays
caatgaccggcgctcccgagcggcggacacgaaattggacctcccctgatcaattcccccaacttaatttcacgattggtaagctatcaacctctgtccacgtgaaccgcgaacgatgaggacaatggcacgcgttcccggtgatgggggtggtccagttcaattgagcgggttagtgagcatcaccagtatacaaggatgctaaaacgagaacagagagggcatgatcagacctgtggagggctggccacggcgagggtgctttcacagcggcggagaactgttttggggaaaacaagagattctcgagctctagggaacgattcaaggcacgaatggctccattggttgcgcaattatctaacagagcgagtggtggtggcaatttataggaggcttaggcggtggcgctcaatttagctgagcaaagctggcggccggaggggaaaagggctctggcgcatgacacaggtggcctttaaccatggcaggtgctccggtgatcaccggacatgcaccgcatgattcaccgtgatgagagctagcgcataagcacgtggcgcgcaacggcgacagctcgacggcggtgagagttatccgagcgaccggtgagctggggaggaagtacggcgggctt

SEQ ID NO: 31524 - DNA, 352 bp, Zea Mays
tgtgtatgtatttattcacatttcatatacttatgactatgtgactaatacatgctcacctcttctgtcatttcagtgaccttgcctgcccgtgagccgtctcctgtcctgcctggattttcacctctcgtgtgagatttccaggtagacatccattcttttgatatcctattggctgttatcaacttgtgcttagcttctctctctcatttgcagtcgtcaggtcaggatgctgcgcacgaaaaatgtgtcggcgccagggagaggagatgacgaggatcctcctcgccccttcaggcaggtcaaggggaagacagtttacttggagcagcaggaaggccacaagaagcag

SEQ ID NO: 31525 - DNA, 309 bp, Zea Mays
gagggagtctggcgcacaaggatgctcttcgcagcgtctcttgggaggaatcgcgctctggaccaccggaatttttcaccggagttgaagcttcacggtggtgccgctcgtcaccgcacacaagaccgcccctgtgtcaatcaccggtaatcgccacagtacctaactcgtaatcctctgtacatcatcagtagccttggtcgggttgggcgagtgcctgtagcgccgttgggggctcgccggagattaccgccgtggctggtaatgtgccgccatcggctagcctgggggaagatgagagacagtccc

SEQ ID NO: 31526 - DNA, 420 bp, Zea Mays
gcgcctaataaggagaagagataagtcgggaatagtttctgtttaatcagttcctaaataataggttagttcctttttatgtggctaaatagtagcagttcctaaataataggttagttcctttttatgtggctaaatagtagcagtagatatgtctatcctgagatgatccagacctcctatggctataaagacggttgggcatcagctataatgatcaaccaggaataagatctcccttttgtttgggcgagatcacctgggatcatcctggccaggcacaacgccggcccaggagatctgggtgaccaacgccctcttcttccatacaccttgcgccactccaatctccctctccactccccattgaaggacaccaggaaaccaaggctacagactcaccagcaaggagtcggtaac

SEQ ID NO: 31527 - DNA, 427 bp, Zea Mays
cccgggaggaaaagagtgtgggccggaataaaactgtttggtgaattacaagggcgtgttagccctgaggattcaaacaaaaaatttacggagattgtcaatattccatgaatgctctaagtcttcgtcggatggcgttgttagcctgtacgcgctgggggacgccttcgtcttgacgatgaagggaccctcccactttggctccagcttgcctcgtgactctgtccgagttgtccggacgagtacgaggtctccttcgttgaattctctcgggacgactgtgtggtcgcgccagacttttgtttgagcttggtatttgttgagggcttgcagggcgaagacacggtctccgtcgatgaggtccttcgaagttggttcgtctacgtcggggacggctgaagtgcttgtccgtggtgacccatgtttt

SEQ ID NO: 31528 - DNA, 417 bp, Zea Mays
tggatctctccgcagctttcctcttccaacctcaagcttttactggagttcgcagtgctgctgcagcagcagcacacgcagcttcgtagcatcaggccagggcgtgggactcggaagagacgccaccatcggaggagctctctcctcgctgaacatcatttggtaaaggtctctcttgctggtgctgactaactagcgttagataaaatgaattttgttttgtgatgccgagtttatgataaatcgtgggtaataaagaacaaaatcgcaacaaacaaaggggaaacaccgccctccgttcttccatgttcccgcccaagatctggccagcatcccaccgctgtatcacccctggaggcgcgcgccggcgcagcctgcagcagcaacctcgccacgtcctttggccgcttaatcgcg

SEQ ID NO: 31529 - DNA, 336 bp, Zea Mays
actgtcgctgactagccgaaaaactcgccaccaacgagctccgaccgctgggagacacagtccgactgattccgaccacttccggccaacccaaaggtacaggcatgattgttgtaacctctagcgtcttccccacccgtttcccgaaccaataccgccgacatggagccacgccgccacttcttttctctccatccactttttggttggaagaaggatcgcgggtccgatactttaaaaactcagggggctgagcgcgaagtcaccgactcagttgaacaatgctccgagggtttatgtgtgagagaaaagggagaagatgatcagggacccgaa

SEQ ID NO: 31530 - DNA, 334 bp, Zea Mays
tttataattattatatagtagtaatttataaggtggttagtatattagtgggttgtggttatatttatagttatgtagctagtaattagtgggttgtggttaggcaataaccatccacagtttatattgaatgtttaattcgtgtttcaaatagatggacaattttttgagcttatattatggaggcaatgtggaacaagatccgtatggaaatgccaagttcattgacatgcgacacgtgccggtactattcgatggtagaccctcgttgagtgatgtgtttacaaaggctaaacaaaagctaggttaccatgaagatgatgacattgctgtt

SEQ ID NO: 31531 - DNA, 327 bp, Zea Mays
ttttagcgtgcctcacctgcgtaggcctcgggtagcgcgcagcggcggtaccgtacgccggagtatcactacctcgtccaaaacgccattagcgcaccagtcaggggaaatcgagggccgccgcgggctgagggcgttcggtggcgcgaagcttgtggaaggttgtaacgttcctggggtcggcgaacgggcggtgttcccctgttgggtcttggccagcgctggattgcctgtcatggtgggggaagtagtttgggcatggacggccatgcacaacgtcgcgaggttgaagaagccagggggccctagattctgtgatggacggct

SEQ ID NO: 31532 - DNA, 505 bp, Zea Mays
agccctacaaaatggtctgtcagacgctctgatggtaaccaccatggtacagagactgaacaagattacaagttcagcccccctcgccgctggtgacctttgcgccgtgatttgcgccgtcgccgcgattcgtgttctctggtgaggggataatcacggcggagtaaagatcttggcaccagataggctcgggcttagtcgcggatgagtttcaccgtacccacttgctcgtcgatcggccaagatagacctcaccgtcgttggccacttaccgctatgcgccacgtgctcaagcgttgtaccacgtcgcagtgaatcgtgtcttgcatgcccggtgatcgccgaagagccgccacggtgaaagccactaagcttgcgcgccagtaaccttctttctctccggccgccagcgcgtcttcacgaaattggacaccaccgctgagggagcctataaattgccgcccccgcctgctccgctaagtaattgtgcacccagtaaaccaac

SEQ ID NO: 31533 - DNA, 411 bp, Zea Mays
ccaacatcgccatttaagctcgtacaagtgtcctgggaggttcgccatggtgcatcggtgtcgtgcgtagtctctccgtactcggatttggtgcgggcgtaggacgattgctcgccggagtggaagctttgcagtcaagccgccattagccgtgaaaagccctccctccaccgattcactctatggtaagacctctaaatagctgtgacttgatcctaggattatgtagcacctgtccgggggaagatccgtgcactggaacgccaggatggcttgctgcgatgtgcggaccaccgtgggggcagagcgccgccgcgccctggtgtgtagtggggaggaactccggtgatctccataggtggagctcggtctcgccgccgctactgcctggagatgggctggtgagggtgt

SEQ ID NO: 31534 - DNA, 334 bp, Zea Mays
ggcgattagctttgtgaattgcgaagggcttcccgagcgtggagaaaacttctggcaggcttcacatgaccttgtgacccgatttgtgacgcagatcatggcgggccagtagaagccttgacggatcacctttgcagctagggccctaggccctgcatgagagccgcaagtcccactgtggacttcacgcaggatttggacgccttcggtttcggtgacacatttaagcatgggttggctgatccccttcttgtaaagctggccttcgatgagtgcgaagtcccggcttcggtgtttgaggcgcttggcctcgttgatgtcggttggatgatag

SEQ ID NO: 31535 - DNA, 342 bp, Zea Mays
tgaaatgaaaaggctttttctgtgatgttgcataaagagttgcagctttcgatgtctatacaagatttagaaccagacatcagtgaacgtataacagtacgattacagaaaccttgacatacataacgtattcgaaatgaatatcagtgtaccttgtcgttatctgtgaggccactctggttttcccttaggactctagcatagaatccagcaaaatttcctgtttctgctcttattttgtcccacctgctgctgagagccctattcagcctcaaaggaaactcacctctaagttcattgtaccttttctcaattctagcccacaaaccctccttcctctgc

SEQ ID NO: 31536 - DNA, 396 bp, Zea Mays
cgttgatgcgggtgtggcttactttatcgggtgtcaacatgggtggttgtttctccattagcaccactcacccattgaaattcctaatcttatctttaatgctagccactaaaccgagtaaaattgggttcataactttgagattggataaggtgtctatgcctttggagactttgacgattggcattggtgtgtggtagtggcagtgagacgacatacttcccctcactaattatgttagataatgtcgctaaccgcgttagataatgccaaccactagaatgactaaaatcaggaccatatctttaatatcggaggaggttgctataggaataggagacatcgcttttgacatctgagttgatgaatgatggtgatgacgtcgagggtgtagag

SEQ ID NO: 31537 - DNA, 387 bp, Zea Mays
cggctacgtaggtcgtaccctcggtccgtcttctccggtgaggttttacccctcttccgaaggcttgagagtggtagggatgagggaggagatagctgtgttattacttatttctcacaggagccggctacaaggctttatagcctgagttgcaacagaaagcagaaactaatctcctatgatttaggatctccactaaaggaaaactaatctctataatttaggatttctactaatctctttcctcttctagccggccttccttctctagaggtggcggctgtatgccctgtggattccttccttctagccactgatttcctggctttccttttctagtgctggggtggccttggctgctgctcgctttgcagcgcgcctcacgtc

SEQ ID NO: 31538 - DNA, 372 bp, Zea Mays
gccccgtctaaaccttacaagatcaacacatttcaattgacccttgacccttgcaaacaatcctgcctcatgctcccgcctcgaccgacccctgaccccaaggggcgagggtggggtgggctatccccaagacccctacttgcctgacccttggccgcataaggggtcagagtatgaagccatgtcccgtaatgtccacatcgcctgatctaggggttgagggttgcgcctgatccatcgaatatggaattcacaaggttgcaccaatgaccattccaggtaagggtatgtgtgggtcagcctctaacacgagagtgtggacaagggggttggaatgttagtatgccggcccctaccaccacagaatggtcc

SEQ ID NO: 31539 - DNA, 298 bp, Zea Mays
aatttatacccgtcatttgtatctgggcgagacacaattgaagcgaaccacgacactgactttaataatttactatgtgtctgatttaattgaagccagataaatctcatctgctaacaacccaaatacttgattatcaaccccgcgcacgatttctcttagacaatgcgcgattcagattattttgccccgaacattttagtcgttgagttcaaattaatttgcccgggataaaaatcgtaagagtaggtcgaccttccaaattcgtactctcctaatttataacttttaaacggac

SEQ ID NO: 31540 - DNA, 351 bp, Zea Mays
taccccgtgactactaactacaattgaacaagcacaaaccgattcaccctcaccaattaaatcgcgaagcacgattaaccaaaacaaactagaccgacagactcatgtttcaccacaggcaacttgaccatccaaatgtatatcatacttgaaacatgattgtcacagatgaatagatgatacagctgaaagcatataggtcttttaactagtctagagaagtaggcagacagcactgccaatttcagtgcaacacaataaatagcagccaaccagacagacagtcacagtacatgttctagagctctgcttctaaacaagcaaattaacctccaaaattcagaagaatgg

SEQ ID NO: 31541 - DNA, 551 bp, Zea Mays
caacaatgcaaacacccatatatcattccctcgcagccatttctccacctgtagagtagaaacttcctccacaacctgctattgtacagtattgcccaccaactgaacttccacacctttgtccacaaagctaataaccttatcatcccaatcacaatgcataggactgtgtcgacgcaaccaatcatagcccaaaatagcatcatatgcgcctagccccaacaccctcatatcactctgatatgtatgcccattagcccaccattccaatgatcataccatcgtgtcactatacataatctccccatttgccaccctcactttagctaaagaacaaggatgcactggcagccccattctatcgaccaactgcttgttaatgaaacttgtggagctccccgaatcaaccaacaccaacagcaactgattttgcaataaggctctcacagccatacattcctcatttgtggtaccactcggagcattaagtgacaacataaaattctcctcttcccctttctcctcctgctcaatttgtgtcaacgtttgct

SEQ ID NO: 31542 - DNA, 464 bp, Zea Mays
ggtgattttgggagcccgttttcgtggattgaggagtcttctgatgaagatttagattattttgctgcattggttgtggccacgacggagtccttgccgcagcctgaagtgcgcgaagggtttgctcccccggctggggcgatagccgaagagcaccgccgacaaaaggtggtgttgaagcacaatgttggtgagatgtcacgaaatgggaggcgtcgacagatggggatggaatgatcccgtcttcgactagatcggggcaaacaacgagatttgctatcttcgacgtccgggacgtgtattggggagggggatctgcggaatctttttgagggcgaagagttgaagatgatgttgtttaacttccaagaggcaggccttactccaaaggctgagccgatgtagcatgtttgctgccctcgctctcgtgttgcggtagtgagtgaaaacgctgccctcccccg

SEQ ID NO: 31543 - DNA, 494 bp, Zea Mays
aaaccattagtttcatttctaacttggcataaactaacgtacataggtctactaaacagatatgataagatgtaccttgagaaagaatggtcgacgatggctgtgaggacggtgtagttggaagtatgttgccaccatccatttctgcgtttatagcattcacttggaaggaaacattgccataaataattgtgctttcggtgaagctaacattccactcgaaagacttttccagtagatttgtaatctcttttggaatgaaatcgggtggattagtcgagatgagggtgtccacattttttttaatgaggcgctgcgccattcgtccaaagaagataaattcggcggtgtcagtgtcgtcttcagcggtgagggatatcttgtacctgcacagagtggttcgattgctaaacatcacaaaccatgaaatctgtcctagacactaaatgtctcctttagttgccatagtttgttttaacgactattcttttagc

SEQ ID NO: 31544 - DNA, 275 bp, Zea Mays
ctagaaacaaatggattttagcaattctagcttcttttgacaagcttggtgggaagtgcaagcgaggaatttaaaagttagaattggcaaggcaggcgctcatttgatagtggttattccataggcaggaatatgaaagtatgtttcatggcaagtatgaacaatatgaaaacactgctgaagtcgtgaactcaactatgttttcttgtacaattgtggttttatggcctgactgataactatctgtagtctgatcctttcatcattagtgaact

SEQ ID NO: 31545 - DNA, 637 bp, Zea Mays
tcctaacttcctggaccagcgatccggaagcaattgcaccaacaaggataatgtgaacttaggggaacttcccaagaataccacctccctacctaacggcgtctgcaataacactgtcttccaaaaacaggatataactgtgtgatactgggataaccaatccatacccaatataacatcgaatgcccccaaggaaatcacaaccagattggccgaaaagacctcatcagcaagaatgatggaacacccctgacaaactgaacagctactaatggagccattagcagaactaaccaaaattgggtgacccaacctctgcaccgaaagaccagccccgcgacacaaaatcctccgaaacaaacgaatagctagcgccagagtcaaaaagagcatgggccacaaacgaatcaactaaaatcgtacctgtcaccacgtatccttgctctctgccatccgcagcgggtagcacataagcctcggaaatacccgcagaagaggaagctcccggagtgaaattaacagaagaaccccactgagctgccgggtgaggcagacgcgaagctccaaactgagacgacataggagtagtcggtgcaagagtaggcgcagccagatactgaggaaaaccctgcatcgg

SEQ ID NO: 31546 - DNA, 492 bp, Zea Mays
gggagaaagacgtctggccgttggatgcgttttggacggattggattagatcctcataccgtttcgattgcatccaaccgtgaccgtagatcgagaatccgatggatgcgggatgatctcggttagatgaagtagagaccgtcgatctctgatccaaggatcaggactgcataccgcttcatttaaacctaaacctaatctgaaccgtaggaagtggatcgggcggctgagatccgtggataccccttcgcccaggcctttttgcacataagcccctcggtttacttgaaaacaacccgtcgtccaccctgtacaacgcgctgtgtctaggatattttacaccgtagcccctgcgcttcctaatatttgaggcccaatccagagaactttgaaaattagaaattaatatcagaaatcaatttttagtgcataaataaatgataaaacttgtataattcatagaaattgcataggaactccaaattggtccat

SEQ ID NO: 31547 - DNA, 509 bp, Zea Mays
ctttgtgcgagaacgtgtgcagaaaggtttgctaggtgttgattatatctccacaaaagatcaaatcgcagatggttttaccaaggcgctcacagcaagataattggagaattttaggtacaatctgaacttaggaaagttatgattgaggaggggtattagacaaatcatgtatcatgcttatccttgaatcgctggagatattattcagcggtggttgccatagatagatgtatttgttataacaaactccataatcatcggctgtaaataggagatcacggcaaccacccaaaactatctctaagattgtaatcctgtgccgtttggccctatataaacatgcaatctgccggcacaaggtgcaacggcgtttctcatccaatctacttccatactgcagttttctacaaacacaacaacatgcaggtctcggtctcgcatcaaaagtgactaggaatctgttggaatctctaattgacaaattaggagcggaggggctccgttcg

SEQ ID NO: 31548 - DNA, 522 bp, Zea Mays
ttgggtcgtaaacatgcaatatgaatcaacctggtgccttgtgatgcaatttgggcgtaatgatatagtatggtgccttctgatatttgtgccatgtgatttgtagcagccctgtaatggattttttataacctgagtgttgttatgttgtgccacctgttcttgagatttgtagcagccccgttcttgaggcttgtgatacatgtgagatagttcatagttgctttgccctatgatgctttctttgaaaatattgaactgtatgctacacttgatgttttttgtaaaaatagatgagggttgttctttgtcgtggcaagtgattgttttgaggccagtgatgttactgtggccagttatggtgcatatggttgtttgttgctggttctttgaaaatgttcaattgtatggtacacttgatgttttattgtccaaaaaactgagggttgttcttttcagtggtaagtgattgtagtgagggagtgatagtgcatatggatgtttgttgccagtgaatagtgc

SEQ ID NO: 31549 - DNA, 294 bp, Zea Mays
cctgcctctatagaagtacctagcatgggtgagaaaaatacaaaggaaaccgtcgaagctatcgtagctcgagttgaagctgaagctgggccctcagttcccgcagaaacagggcatgcagagcttgttgaaaaggatactgaacaggggccttcggatgctgcaaaagctccgttaccgttagaagaagagagaaccagcaaagaatctaaattccctgccgctgaagcttctaccgagggattggaatttatagtgcatcacgcggcagggaaagaactatcagaggagcag

SEQ ID NO: 31550 - DNA, 865 bp, Zea Mays
gcggacagttgaacatgttcccggtcattggtgggtttctagttcaattgggtgggtctacgagcatcacgggcacatgagaacacttaaacgagggatcagatgatatgagctgacctgaattgcgctggccacggcgagggtgttcttgcggtgggttagagcagatttggggaaaattcgaaattcaagctctcggttgcaagattggaggaaatactgggtggtgtggtgcgtgatgatcttgcggagcttacggagggctcaatttatactaagcgagagcggtggccgggaattggaatgatgacgcgcggcggtcggaggaggggggtttcactggcgcagtggattggtgtcctataccgtggcattcactctggtgatcaacagagagctaaagcaggtcatggcgatgcagtagagatgcctagacacgcggcacaaggccggaaggcggcggtcaccggcgaactcatccgattccaccgtggcgagtgcggtacgatggctagaatagtttactggccggagttatccacggcgacgacatttacgcgaccttgagcgctatccgatcaacccgagcacgaatcgaaatggcagcggcacgaattgcggcggagaggtcgttggcggcgagaaactatgctggcggtctgatctacttcagatactgtaccatggccattcctcattcagtgcacctgacagtcaaagtttagggcaaattttctcttaattttatttagtaacatgatcgacactctttagcaaagttatagatctaggatccagctataatcttggtatagcaaccctaggaaaattcttgctcgatcatgcctgaattcgtgcccaaagt

SEQ ID NO: 31551 - DNA, 281 bp, Zea Mays
cgtgggggacttgtgcacttgatctagcgcgtttgttatgtcggtccggctgcacctgtaatcggtttttgtatggatagtcttttgggggagacttcgattttgcgcacttgttgtgctagtccggctgcacccttaggcgacttttgcacggatagtctttggggaagacgtcaattttgtgcacttgttgtgctagtccggctgcacccttgggcgacttttgcacggatagtcttttgggggagacttcgattttgcgcacttgttgtgctagtccg

SEQ ID NO: 31552 - DNA, 391 bp, Zea Mays
gtggcttgcgtttcccacccgagccgagtcatccccggcaacatcctcgggggctgggcaagtgtcaacaccatccttgaggaccaagttctccgcagtagccgcctctaaggctgagggtcggtccctcaattactttcatgggagcaagacgatccaagtcagtttcctgaccctcgagaccgcgctctaaggtcgacgaggcgcgggacgttgcccgggatgattccaacccggcgtcgaacacatcagcacaaacctccatcacaccatcatccgctggctctgacagcaggtcttctggaaccatatcttcaagagtctgatcaaagtttgccagggacaactcttgtagaccaatgagggcagacagagcaggagaaggaactcc

SEQ ID NO: 31553 - DNA, 331 bp, Zea Mays
cccgagcgcagtccttgcccgagcgtagacacgattcgctcgagcacatctcagactcaccctaggtagacacgatttgtctgagcgcatctccatctcgctcgagctagacatgattcgctggagcgcatctctgacttgcccgagctagacatgattcacccgagcacatctctgactcactcgagggtgtctcaggtgattgtccggagaggcccaaacagccaaacttctccaactcttctccacttgatttcaactcttgggaggatcttccagtgacgtagacaaacacatttagagtataatttaattgactgagtcccaaaat

SEQ ID NO: 31554 - DNA, 382 bp, Zea Mays
ttcaaaaaggattttcaaaagtcttacctaaaaactcttttctcttcttacctaagtattctgaagagtctatcttaaagaccagataggaagagtgcaatgtatagaaggttgaatcgactaaggttgattctgtacttacacatgcatcatgctaagaattatactaataacattttcccccttaaaaagatgccgccacgcacaaggctaacgacgcgcaagtcaactggaccaatcggtgtgccccggcatcaactggcccctcgacatgaaaacagtagcagcgggagtaatgacccaataggagatcttgaagcccgagtgagtcgacttcaagcggcgctgcaacacaggaccgatgcttgggtcgcggacggag

SEQ ID NO: 31555 - DNA, 408 bp, Zea Mays
tgcgatttgggccacggaaccaccgaatcggagtttgccggagggagggctccgctgggtggcacctgtccgccgccttgctgcagctaggggaaggagatggtcacgggtcgtagatccatcagtggacgactgagattaaatcagatgcgtaccgattcaggcgaggaaatcgtagacatcgatctagtgttggacgagcaagattgggtgttaggataacgattcaatgggatgaatctgtggcgtcggatcgggatcatacggctcgggtcgtgtaccggttggggggtgatccaatctaatatgtgcccttgtttcctgatcggacagtcgagatcagttgataccgcgtcgtccgtgaaactttgcgaaagagtccgtggatttattgataaacaacccgca

SEQ ID NO: 31556 - DNA, 446 bp, Zea Mays
gccgggcagcagcagcgggagtaggagcgtaacggagagggagacgattagacgaaggtggctgggagaggaagctcgaccgatgctttcctgcccctcagtatagatgtacaaacgagccgtccgactcggcccgggtctggcaaagcacggtatgtttaggacacggcccaccatcaagtacgatcgtcaaactaggccggaccttaatgacccacgggcctaaaatactgcacgagtctgacacatcacgaacctaaacgtgtcggcccggctcgactagcctgtaatctctactactacttaagccagtagtgtagacgtccacatttttttggtgcacggttccgcctttgctttctgcctttctgcgcgacgcgagcccacgaaccagtctcccgcgtgccccgctcccccagcaacgccggcttccatccacccccgcg

SEQ ID NO: 31557 - DNA, 367 bp, Zea Mays
aggcggtgcctaccaaagtgtggcttgaatgcgcgtaagtgcaacagtatgatgtagcccccgtgtgatctgcgaggatagcttgggggttacttttccctaggtgaagattaggacttgccttctgttgaccttacctgatccagccttccgagttgttcgttgacacctgtcgattctttgtcgtgcacgcatctcccctagaagggcttttgggcccttttgaggagagggccgtcttcctcgacctaagtggcacgagggaatggtcgtcgagctacgaacggattatccaagtgagatccaattgcccttttatagggtctagtttcggcgagcgattccactggggggctcgacccgctcg

SEQ ID NO: 31558 - DNA, 822 bp, Zea Mays
aaaaatagacctgaagttggtctgtcagtcgagtgtagctctgaaactggactaacagtgaaccaggaccatgtttgggagctattttgattatgatccagtgagtatttgagtgtggttgctatagcaagattaaagctggattataggacaataactttgttacaggaagattagtaagttgtcacatagaaaatggagaacaaggctccacaaatcacgctgtcagaaaaacttaagatgatggccatggtacagtgcgcaaaagatcttcagattcatccccctcgtcgccggtggccttgctccaggattctttgccggtcgccgtgattcgtgctaggtgcacagtggatatcaacgaggaagtaaaaagatctcgcgggggagtggatttggtcgcggggtgaagcttatcaactgcgcctgtagccgtgcgatgtggccggaccgccggtgtcgccgtggtactccagcgacctcaattatgccaagccatagctctttaccgtgtagtagtaaccgtggcacgcctaggcttgccattttagaaccgttgcaccggcaggcgccacgactgagccgccagtgactcacctctctctccggtcaccagccttctccttcaaaatttggagccatcgaccttgggcactataaattgatggtgccgctagctctcaaggtcgtcacgaagccagaggacccgcccttgcctccgattagccaccatagcctcccaatttctctcttcccccaaatcgggttaccgtgccaccgtgaacgccgcgccgtggctagctctctgcaggtccattcatg

SEQ ID NO: 31559 - DNA, 357 bp, Zea Mays
gccaagtaaaatttagagaaaatcgagcctcaaatctctctgtcagttcatctgaaaggaactcgccatggtacagtagccgatcggatcagaacaccagctcagctccccgccgacgaccttcgccgcgattcgtgctgccgccgtccggattcgcgctcgcggcttgtggataacctctcggggtaaaagatcctcgccgctgtcaagctggaagccacccccgtcagccgcggtactcctcccctggctcaccgcccgcgggtaaagttgctcaccgtcgtcgtgccatcgctgttgtccaccgcgtgtcctaaccgcgccaccgcatcgccgtgactccctctaaactccccg

SEQ ID NO: 31560 - DNA, 305 bp, Zea Mays
tggttccggaaaacctgctgtcagagctagcagaagatggtgtgatggaggtttgtactgatgtgcttgacgctgggttggggtcatcccgcgcctcatcgaccttagagcgcggtcatgagggtcaggagactgacttggatcgtcttgctcccatggaagtatttgagagaccctcagccttagaggcggctactgcagagaacttggtcctcaaggatggtgctgacacttgcccagcccccgaggatgttgccggggatgactcggctcgggtgggaaacgcaagccactgcccagccccc

SEQ ID NO: 31561 - DNA, 314 bp, Zea Mays
gacacttcttcagttgagatacgtggaacacattatgcacatccgatagactatcaggtaactcgagttggtaggccatctctccaacttgcctaaaaactcagattggtccattatagcgaggggacaatttgcccttaactttaaatctcctcattccacgaagtggtgacaccttgaggtacacatgatcaccttcctcaaactccagtggtcttcttctattatcggcgtagctcttttgtctggtctgagctaccctcaaattctcccgaattatacggacttgttcttcttcctcttgtataagttca

SEQ ID NO: 31562 - DNA, 401 bp, Zea Mays
ccgcctgagcggggagcgcaagcgtacaggataaggcccaaacacgtgtcagcaccggacccttgcttacgccagggtatcccatgtcctgggaccttgtcgtggcccggaccttactcggagggatctggaccccatccgagggacccggcatgcttacttgggagttctgggccgtaatcgggggttcgggttgtgtgtacaggggtccggtgtttccttgcggaggtccggctcaactgacgcatcctgggatgtatcatcctttctcgccacgcagtgccccttgagccgcccacgtggtggggtcgggtgctgttcactgtgcggctagagaacgccatacgggcaccgcgtcttcatactgtagtaaggggtacccctgattcagggtaccgaca

SEQ ID NO: 31563 - DNA, 318 bp, Zea Mays
ggccgggctagcgttcatctattagttcatctattaatacgatggatacaaggatggcgtgagcagttgagcacacagactttgaggatcgaggaacaggaacagccacgatgagtagtacttggcagtgcatgtcgtcgactgcttcactccatcaggtaacagaagcaaattttctccggctggtgacagaggcaaggcgtctacgacccttcatcaggttcaggtgtccaggtgcgtgacgtacgatcctctagtgttgtatgtatgtttcttcgtctacgcaatagttttcgccggtcacaataggaatacaga

SEQ ID NO: 31564 - DNA, 339 bp, Zea Mays
aagacaaggctagcacaagtttcatcaaacccttcgacacatactgtttcgtgtggatgcccgaaggactcaagaatgtcggctcaaccttctcctgcctcaccaaaaaatattcttgaggaccagatgggctgcaacgtcttcacatatgttgatgacatagtcgttgcgagtaaaaacaaagacgaccacctctcagacctcgcagaaacattcgccaacatgtgtgaagcccgactctagctaaatctagaaaaatgcatctttggtgtccgccaaggcaagatacttagctatctcggatcgcatagaggaattaaagctaaccccagcaaaatt

SEQ ID NO: 31565 - DNA, 334 bp, Zea Mays
gttaccaaggccatggtttcatttatgcactaatgacttgtgatcacatgtggttaagtggaggagaagaagaacctaaaaccttggaagcatgggttagttaagaggggttaatggcaaaggcttcacccacacaattggaacaatggtcatgtggagccaaggtgattaaaccctaaagacacctaagtgcactagacttccaagcaagggatcagtggctaagttaatcaaattgccaaagcatgatcctagtccttaaacaagttttagtaacattgtaacctaccaaatgcagggagggaacattgcaaaaagaccccttgaagacccc

SEQ ID NO: 31566 - DNA, 544 bp, Zea Mays
cggcctctcccagcctgatcgaagccgccacgatagccattgaaagaaccgagcggcctcctgtacccataacgccccacgaactgcccctagccagaagagcgaccaccgtggctttcctgtgcacctccccgcccagtcgctccttggcgattcccccctccatggaccgagccgccacttgagtgtaggaagcagcgaaagacagaggggcgacggaagatttgtttgcagaatgctctcgtgcaataggagccctagacgccccaatattggtgcccgttcgtgcaaatagggagacaaggccaactgtgggcggcctatacggcatacgagggtccaatttcattgtacgtgaaacagaggacgctggaccatcaacgcacccagcattatgcctgagaatacgcccattagaagaattttgaaattctttcctaattacggttgatggctgtcgctgatccaaagaagaatgtatcttagtaatcccagatcgtggccaagagtttgcttttttctgtatgattctggccctgctgat

SEQ ID NO: 31567 - DNA, 343 bp, Zea Mays
gcatggtcccgcgcgagcctgggctcgggagtccctagacggtagaaggccagtcaaccacgacctccccagcccgacgaactgtgttgtccacctcacctactaaagagtggatgcagatcacccggcaaaaggagatgaatattacgggccggggcggaaaaacacaatggacgatcaccccgacacctccacccttaaaggaggatgggaagaagcacaccgctgcacctactcctttctttcctgacatcctcttcatccaagggagactagagtcatcgtccatctctgacgatgaacccaccgtgttgggggaggaacctccccagcgcgactcacg

SEQ ID NO: 31568 - DNA, 475 bp, Zea Mays
ggctccggtgagcctgtgccggctggaaaacataacggtcggcgctcaagtgtggccgacacctaattccaccctcaataacactaatccctcaaacaatttcgaagttcaagctcaaaaactctttgtccacggtgatggcgcgaactgaggacaaaccgaggtgttcccggtgatctacctaggtctagttcaattggctgggccgatgagcatctacagcacactggggtattgaaacgagagcgaggagggcatgaacaatccgagacacgggcgggtgcgttagatgcatgtctacctagcggagctcattggggcggtaatttataggtttcattagcggtgacatccaattttgtgatggcgtgctggcggccggagagaggggaggtcactggcgcaagtgattcgtggctttcaccgtggcaagaccaccggcgatgaacggacatgctaaggcgattcactgcga

SEQ ID NO: 31569 - DNA, 358 bp, Zea Mays
gctggttctatcttacttcggctttggcaatttccttctgcttttgaattgtgacttggcaggttcttgttgtgtgctccttaccctctccatagaataagcagaatatccttgttggctaagaattgtatcttccccaaagcttcttcctacccttccacctcttggagctggcggtctgagagaactctgttgtgttcctgttgactgggagtgattttgttgtccttgggtatgattgtttttgtcttcactttggcatggattgtgaattgtcctgacataccttggattgaatcgtccaccgaagccccttgtcatctttgagtatcttaagacttcttctctcctttggcaa

SEQ ID NO: 31570 - DNA, 479 bp, Zea Mays
gggggggtctgacactttcgtccatacaatgcttcgaacggtgacatcttgatactggcctgatggctgttgttatatgagaattcggcatacgacaaactagactcccaatttctgtcgaacgtcaacacacatgctcttaataaatcttcgaggaccttgttgaccctttccgtttgaccatctcactgggggtgataggcggtgctgaaatctaacttggtgcccatagcttgctgaaggcttttccaaaattttgaagtgaactgcgtccctctatctgacactatcttccgagggatactgtggagcctgactatctctttaagatatatcctggcaagggtggctccgccaaaagtggttttcactggaatgaagtgggccaccttggtgagacggtctattattacccagatagagtcattccctttttgcgtctggggcagtccggttacaaaatccatgcctatttcctc

SEQ ID NO: 31571 - DNA, 354 bp, Zea Mays
caaattacaagagcaaatcatcatggcacagattggagacaagggtgttcaggtaattaaggaaatgatcaagcagaaggcagaaaaagacaaatgcttccgccaggacagcaaaggaatcctatggtttggagatcgattggtggttcccaagaaccctgagctcagaaagaagatattggatgaagctcacctttcaaagttctccatgcacccgggcagcaataagatgtatcatgatctcagatccttatactggtggaccagaatgaagagggaaattgctaagtatatctctaaatgtgacacctgccagagagtcaaggccagccacctgaaggcagcaggcacttt

SEQ ID NO: 31572 - DNA, 470 bp, Zea Mays
gttctaggctggaggatgaggtgtgggacctcacgggggtttacgggccacaactagaaaatgagaaaatgatattcctctctgagctccggtacatccaatcaatggtcagaccagaatggattctcctaggtgacttcaacatgatcaggagagcaagagagaaaaacaaagggtcaatcaacagaagagtgatgaggcagtttaataacacaattgatgatctgcatctccttgaacttgagctaactgatagagcattcacctggtcaaatgaacaaatgagtcctaccatgactaggattgataggttcttcgcaacaattgagtggcatgacctgttcccctcggctgacattcattccatgtgcaccatgacttcagaccactgcccgcttttattgcaaagccactcttcgggtactttctaccaagggtttaggttcgaatctttttggcctaagattgag

SEQ ID NO: 31573 - DNA, 1165 bp, Zea Mays
ttctgggagttactgagatccattgcacggagatccattgcagccctgtggcaattactcaaatcaatagtaaaatgtctctgcaaatcagcacccagtagattgcaaaaatacccttcaagaatttgctgcatgtcatcatgattggtagccattcttccatcttcctcatgtttggaaatgaaattctttttcttccgataacaggcctgtaaatgaaagaacttagtgttggcatcaccctcctttagatagtggatccgagatctcaaccgagcaacagtcctttcaagagacgcaaggctaaggcagcgttgcttcaacatgtttagcaaccaaacttccccactggacaaaattctgatatcctgcgccatttccaacctatgcaacacttctctgacaagccccagctgcatccttacattacccacttctttatgcccctaggactgcagcacgcgagctaaccttttaatcttcaatgacacctgttccaatgagcaggagctcctaactggcatgctccaagacgcacccaccacctccagaaatccaggaattttgggccaaaaactctcgaagtgaaaccgtcttttcccatgcagccatctctgacattgagggttaaaggacaatgatctgaagatgtggtagcattactatgaagagaagcgtccggaaatagatcttcccaacagctagtgcaaaaaacacggtccagcttaacaagagttggagcatccctgtgattggaccaagtatacctccttcctttcaaatgaatctctttcagatccaaggaattaataagcctacggaagtcccccaacatagccctgttaatattggaattgttcttgtcttcctccctaaaaatcagattaaaatccccccaatgatccatggtcccacacaggtatctctgatttctcttaattcatgaagaaaagaggatttaagattgtcctggcgaggaccatacactccagtgaaccaccaacaagtaccatttcgctcctgcaattgaactgagaccgaaaattgcttgataactgaagccatagatgaaaaaactccatcacgccaggataacaacactcctcgtctggtaccaatcgctgggctataaacaaaattactaaatccagaccccaaaattgag

SEQ ID NO: 31574 - DNA, 463 bp, Zea Mays
cggggtgtctgcgccgtcagatgcaaattggacgatcacgattagattacgtgtacccgttcgcgcggttgagcagacaccattgatcgatgatcctacggttcaggttaggtcaggcatcattaaatcgtggtcgtaggatctaaatcttgtggacatcgtcgcgtaccggttcaatgttgtatggatctaatctaagtcgtagaaatcagatcgggcgactgaaattgagaataccccttcggcctgtctgtttcataaaggagcccctagactatttaggatttaacccgccgtccaggggtattgttcactttgtcttggagtttttacctaggcgcccctgtgcttaccaaaaattgacacccagtccaggggttaataaaaaccgagaaatgattatagaatttagttttaatacaaaaacaattctagaaacttgtaaaatgcatagaaaattcat

SEQ ID NO: 31575 - DNA, 557 bp, Zea Mays
cttattcctttgttattgacatactcatatccctgaattctttaatactcttgtttcaaatacttacatctgagtttttactgcctacttagacatttcagtttatatgtccatgaactccttgtcttcggagacccctccctattctgttgtgaagccactatcttttgcctttttctattctcctggtcttggtacgctcgtaccattggaatctggcatattcttatttttatatatgcttacctttatatcacagagtctgtttaagacatttaagttaacatgtccctagctacccttgtttcttaatgatctaggagcggtcattttattttgcacatccttggtgatctcgttaattccttgtaacttccttcagtaatgaattcttacttcaactcttctgtcggaacctcacttatctatccttgattgttttctccacctcgtcactttgtgagtcttgccttaactctgtccatgaattatgtttttcatcattagtacctttatccttatcacctctaaatcttaccttgatgtttatcttatac

SEQ ID NO: 31576 - DNA, 533 bp, Zea Mays
tatcaggctcaaaccaaggcctggcgcgacaacgcggttgtcccaagagagttcaacaaaggagacctcatactcgtccggaccacccggacagaatcacggggcaagctggagccgaaatgggagggtccattcatcgtcaagtcgaaggcatcccccagtgcgtacaggctagtaacgccttccggcgaagacttagagcactcctggaacattgacaatctccggaaatttttttgtttaaccatcagggcccacgcacccttgtaattcagcaaacaatgttattccggcccgcactcttttcctcctggggggtgaggtttttaacgaggcggagccatgtaatacaccagcaaaagcccccgcaaaaacaaaaactcagatgcaacatgttgaaaaagaccgctttgacggtcttcggcattcaaccaattcgaagtcaccgcgacaggtagcgtagactaccctcgcgtgcgacactccgcgcaaaagtcgcctaagggtgcagccagaatagcacaacaagtgcg

SEQ ID NO: 31577 - DNA, 393 bp, Zea Mays
tgtggatttggtgagccggcttgagatgatactcagaggcaaggtgtctaatgtcggtgctcctgttgcatactcagcctggaatctgcctcctttcaaggccttcatcagttttgtgtcaaatcctcctactggtgatagcggtttgggtcttagagtgcgaccttctcccgaagaggttgaggctttggttgcttcacttggcgaaatccccgacgacgagaaacaggttcatttcgaggtgcctttgaatccgagtgacgcagaaataagtgccatgctagacatgttggctgaagattcctctgatgcagcccctgctaaaacactggttgtagcacccatccccgagtctggcaaagctttggatactcagaggtctgatagtattcg

SEQ ID NO: 31578 - DNA, 440 bp, Zea Mays
atttcatagatactaatagcacatgaataatcaaacaaatgaccacgtctgccaagaacaagaaaaggtcatatgccctccattacgaaaatgacagaagaacttctaaatgtcatcttacatccaaccaaaagatgcagtgccttcatctgaagtatgagtacaatttattgtccagaactcttcaggttcatgagcttgaatctcccagaaacgctcaacaatgaatcctagggttggaaactgcaatgaataagaaaatttcagaaaaaaaggaaatcagcatatgtgcagtagctttgataagtgaagtacctgacaaggaccatagctcagaaccaaacttctctcatccccagtcacatcaattacaaatgcatcctttaacagcatggtttgaaaccttgtgaaggaggcaccaatgcgaaggtcaatttcct

SEQ ID NO: 31579 - DNA, 530 bp, Zea Mays
aattgaatgggtcaaggagcatcaggagaacctaaggacactgaaacgggagagcagagagcatgaacagacctgggagtagctagccacggagtacggaggattttcgttcgccgatgacaaaaaagggggaaaacggcgctgcgacgtttccgggcggaattaggaggtgaggctggggctacacggtcgcaaaggactatggtttcaccgtgcacaaccaatttgggagaggtggagaggatttcgcgaatttgtgcttcaaccgagttcactggtgaagatgtgaatacctcgccgtgggtggcacggctatttaaaggcgcggtggtccgactaacgatccacggccgcggattacaccgttcgtgcatggttaccacgtaaagaagggacacagtgagggaggagcgaggcatggatgacacagcggcggaaatgaccgagccacggcggccgccggtgaattatctccgactaggctcaggctaggtccgcgaggtcgcgacacgtccaaagttacctccctg

SEQ ID NO: 31580 - DNA, 293 bp, Zea Mays
caccagaaaaaatgtgcaaggatcctccttaagttggatatcaccaaagcttttgactctgtctcgtggcccttcctcctagaggtcttgggcaaatttggtacgatattgttagcattcttcttgcttcagccttttctcaagtaatgcttaatggtaaaccaggccgtaaaattcttcatagaagaggtcttcggcaaggggaccctctctccccaatgctattcatccaaggttatggatgtattgggctacttaattaagaaggctgctgatgttggattgttggagcc

SEQ ID NO: 31581 - DNA, 275 bp, Zea Mays
tcgggcctgagcccttgcttccttagcacaagccaacaaacgggattgtactgcccagtcgagtgctaagtcccgatcagcaagctgatcccgcaggtgacggatgtcccttcttagttcatttattctatctccatccgcaacccaagcgttggtcctgtgttgcaactccgcttgaagtcggcttactcgggcttcaagatctcctattgggtcattactcccgctgctactgttctcatgtcgaggggccagttgatgccggggcacaccga

SEQ ID NO: 31582 - DNA, 489 bp, Zea Mays
ttgacatgtcagtgcttcatcactgcagtgggcaaggccaccactactgccggtgtgtgtcagtgtgtgtatataaatacaggcgactgaggtcacttggccactgagcaggacaaataaaccaccagcacctggttcttcaattgatttcgatcagcacagcacaacacaggaggaggtcgatgaagatgagggctcctgtcgtggcctttgctgctcttctcatgctgctgctggtggctacaagagcacatggtatgcttgctaaggccatagccacctcctccaccagtgctccttgtgagatgtatatgtgtatccgtcctggactgatctgaccatgtatattcctccctgtttcattctccgatcgagcaggaatcaggctggacaggctgttacatgatgcgatcaacagcagcaaggtcagtacagtatatatacgagctacgactgtgatccaatccaacaagcacttcttcgatccct

SEQ ID NO: 31583 - DNA, 311 bp, Zea Mays
tcaggatatgctgagagcttgtgcacttcagcatggaggtggttgggacaagagtctaccatatgttgagttctcttataataataactaccaggccagtctgaagatgtcaccatttgaagctttatatggcaagaagtgcaggactcctctacattgggatcagactggagaaagatagttctttgggcctgaacttattcaagaggcagaagaacaagtccgtacgatccgggagaacttgagggtacatagaccaggcaaaagagctatgctgataattgaagaaggccactggagtttgaggacga

SEQ ID NO: 31584 - DNA, 600 bp, Zea Mays
acccttcggtagtgatccctttttgccattttttcttgaagtccgagctagaccctccggtgatcatatgaatcactcccctgaagggtggatcagcgaagtcttcttgctttggtgggggtggtaggtgttgatttggatgttgtggtggtggtggtggcagagctaacctttcttggtgttgaaggcattgttgctatggaaagagattggggttttgctgttgggtagtatgggtgttcgatttggtattgatgctggtggtaatgttgcggttgataggtatgaacgatgtctgtttagttgtctgccggggtggcctagcaattcggtcctttgtcgccttggtctcggcacaatccctagttgggtgtgctaagtcttcaccatgaaatatatagtacaatcttttcggttgttgagggcctcgacctctgccgctgcccctggtcacgttgccaccatggccttgttacgggggacagcgatgacgacgagggggttctctcctagttgctgctagtttgcgatgctatgcacctggtgttgaccatgctcttgctgggctaggtcctgctacggaggcctgatccatgtccc

SEQ ID NO: 31585 - DNA, 622 bp, Zea Mays
ctgatgagagctttttcgacctatctaacatccatctctcttcgcatgcggtaaccgctaccatttctatgcgcgcggatgcgattcagtggcaaatcacggtggtgtacggacctcaaagcgatgacgacaagatgcagttcctccaggaactcaaaaacatcaacccaccgtcgcatgggcgctggctaatccttggtgatttcaacctaatctatcaggcggaagataaaaataattccaacctcaaccgccgtttaatgacctccttcaagtcgaccattgatgatctggggctgacagagattaagctaaacgggcgtcggttcacttggagtaatgagcaacaaaatccaacaatgactcgaattgacaggctgctatgcactcccgaatgggaactgctcttcccagcatgctttctacactccctgccttcactcatgtctgaccacacacctctcctgcttctaggggatttggagcacttccacaaccctttcttccgctttgaaaatttctggacaaaaatggacggcttcttccaggcggtacaggaggcttgggacaggccgttgtccacgacgttgcccatcaagcggcttcatatcaagctatccag

SEQ ID NO: 31586 - DNA, 643 bp, Zea Mays
cgatgaccacactgcgtcttggtgagtacggtcgggtccatatggtttgaggccccagtgagcccagtgatacgcccctatatctgccccgttgaattgtaccacccctagatagtgaaaacgagctatagatcccaacactgtgttaactggtgtccggtgacctttgccactccatgccacctccacccagctcctctctcctgcagggtttatgaccctacgttggtccaagggttgtgtctgtggaactctaagggaccgccaaaacctacaaaattgtaaattgtgcactggtaataatatcaatccaacaaaaaatagaactcatcgtcaaaataaaattacctgaagttcgttgcctgtgttgttgtaacaacctcgtcatcggcctctccatcggcctctccatcgtagtcctgcccatagtcatcatcatcatgcatcggtgaatcttggcgtgccagctcgtcctcctgcctaggtgcattgtggtctgccgcctcgtgcgcttgctcaaatgcattgtggtcctgctctagcataggtccacttgagtctatcgcctcacgctctggctcaagtgcattctggcctgccacctcgcgctcttgcccaggtgcactatggcctgccacctcgc

SEQ ID NO: 31587 - DNA, 337 bp, Zea Mays
cccggcgaccagaggacttctagtgcaattgcgtgggtcggtgagcatcacagagttatgagaaggctcaaacgagggagagaggaggatgaactgaccggaaagggggctggccgcggtgaggtcagtttcgggtggcggaaacccgaattgggggaaaaccggaattagggctcgctggtgatcggctgggggcaatactggttggggtggtgcgtgataatgtggtggagctagccgcgggctcaatttatagaagaagcgagcggtggtcgtgaatttgggcgctgacgcgcggcggccggaggtgaagaagaatttaggcgctgtgaattcg

SEQ ID NO: 31588 - DNA, 350 bp, Zea Mays
cagtggatggagaatagaaccgcttgtaccttgtactctagacgcactattctttaattacatccatccatcgagctgctgcgttcattcaaaaggaaaagttgacgcgcgcactgtttgcagattccggatccaataattccaagagggacagcatgagtccatccatgtctctaggttattatagctcccctccctttgtagccgcctcgagctggagagtagtgatcagcgtacgaaatccagttgctcattctctctgaggggcctacatgttccataccatacgtacgtgtgtgtgcgtgcgtgcccacacacatgcttgcacgatgcccacattttccctgcag

SEQ ID NO: 31589 - DNA, 443 bp, Zea Mays
actattatacccattaaagatacctaagtggaagtgggaagagattggtatggacttcatgactggattgcctcgcaccccgagaggatatgattcgatatgggttattgtggatagactgaccaaagtggctcatttcattccggtcaaagactacttataagtgatctcaactggcagagttatatatggaacggattatgtctctacacagtgtaccaaaaaaatcgatttggatagaggatcacagtttacccccagattttggaaaagtttttatgagaatatggatgtgaagttgaatttagttcggcctacctcagactgatggacagactgaaaggactaatcaagtattggaaggcatgttgagagcttgtgcccttcagcatggtagaagttgggataaaagtctaccttatgctgagttatcatataataat

SEQ ID NO: 31590 - DNA, 364 bp, Zea Mays
gcgttgactcggtttgatgtaaccgaaggagagaaacaaggaagatggttgcggcgcgctagggtttgatgtaactgaaggagaaaaacaaggaagatggttgcggcgcgctagggtttgatgtaatcgaaagagaaaacaaggaagaaagaaggatggtgagaaaaaacacaatgcgaccagcaacaaatgacgcgaaagcgcacaaattcaacaatgcagattattgaaagaaggtgcgaggctcaaaagggtgctggtataaggtctaacctgaatttttatgtggttttgtggactgtaggagaaaaaacactcgataaactcaccgatcaacctggaaatctgataccacttgatagag

SEQ ID NO: 31591 - DNA, 1142 bp, Zea Mays
catctatcaacaaagataaagcatggtaaggatcaactcacctgaaggttagaaaggaacagaggaaatcccaaggccggaggcgttgagatactatcaaatagagggacactagtacaggcaatatcgagagcaggtttgagcgctagagaaggattgtaactcatgctcagggcgacgcctagtggaatctcggctccaacagcacgcagtggatcctcaacacccggattactcacctctaaagtagccgggccggcaagagcagtaggaagatcaagacttgtcaccgcagcttcctcagactgaaccggtggtgacccaacatgaacaaccatagaagcagcagaagaagagccaagttcaagaccctcgggggctagaccaccttcagtaacaccctcgggggctgggttatcctcaatcgtaccctcgggggctggataaccctcacgtgtaacattagggaccgaagtgtcctcgcaaatcagacatccctcaaaggtcgaagatgcatgggaaactgcccgggttatttcttgcccagcaagaaggctagctgaaggaacatcatctgggacctctacacggatgccagcatccccagcttctggaagttccaataagagaccttctggaatgatctcctccagtgcatggtcaatagcagacatcatcatcccctagaggctaaccagccttgatagagcctgaattaggacatcgttgctggctttgctacaacgattcatgcgaaccaaaggaggaacatcctcctcaccctcatccacttcctcctcatctgaaacatgcccaccagctctgatgccaccacaactctcaatgtcatcttcgagatcggtactcgtcgggtcaccaccaaggtctagagcggcagagtcaacctccagctctaagccagatgagtgccaaagcttcctacccgttcaccaaacagtcacaagaattcaatagcggttcaagcctcccagaaatgagtcagatgtctggcgccgtttctcataacatggcaccagatggaatcaaaatcaaccgctaagacgcagtattacacctctccgtcgcatcaagttactatttcaggactacacgatggacatctttcactgggcagacaccca

SEQ ID NO: 31592 - DNA, 301 bp, Zea Mays
gacagaatagaattaggaggtaaagtggcgtaccatgtgaacgcggttcctattaaagacaatgaaaataaatgcacgcgaaatgcttctatgtcggccaattctcctaattgtgctaagaactggcctatgtgttcgcgcgtgttttttccttggtcacccgaaaattttgcgaattcggctatcctggttccctgggggtatgagtggtgatcaaatcggctatcataagatttccgatatgattgccccccaggcaccatgcttactccgagcttatcttggaatgccccggctattt

SEQ ID NO: 31593 - DNA, 366 bp, Zea Mays
gggagcggggaacccaatggtgggggctgaaacagggtagcggcaccggagggtgaggtccatgatggggttgctcagcggcggtgctgggaactccgacgagcaatcacgtgcaacagagaacaagggaggggaatggagggggcaggggaggttccttacctcaaggcaagacccaggatcccctcgaaggcgacaacgacatggtggcggcttggttcgacgatggcggctctgggactgcacggggaatgacgattgagcgtgggtagagcaaaccagagggagaaatggaattgggggcgagttccgagcggctggcaccgaggcgaagctcaccgtgacaagggcgacgacaggagatca

SEQ ID NO: 31594 - DNA, 332 bp, Zea Mays
attaatccggcaggagggttcgggagctacatgttcgcgatgagtgagaggattagcgagcaatcgggggagacatgggatgcgcacaacatcaagaaccccggtctgggctggatgatcggtttcctcttcatcgtcagcttcctcggcctcttctccgtcgtgcctctcaggaaggtacgaacgcacgcgcacccacaaactctgtgtccgacgtttattcatcacatcatgatatgatgccggccggctgtgttcagataatgatcatcgactacaagctcatctacccgagcggcaccgcgactgcccacctcatcaacagcttccac

SEQ ID NO: 31595 - DNA, 395 bp, Zea Mays
gagaatgtgatcgtcaagggcgtagcggcaaagagcgagcagcaccatgtcacaccatgtggggtacttggtggtcgagagatcaaggacgatcgtgaccaaggcgcggatgtcctggatcatggttgtctgagtgtggaggtgcgcgatgactgcagtgtcacaggcggtagttgtgtcgtctctatccttggtgggtgtcgctgctttctgggcatcgagcaggtggcgttccatggcgcggatagcgtcttgttccttctctagggaaagagcaatggcatgtgcacgctgccaagcgacctccaaatcaggcgtgccttctccacggtggcgcgagcaggcgcctgttcttgctcttgtttcttggtggtagcagttgctttctattcgtc

SEQ ID NO: 31596 - DNA, 463 bp, Zea Mays
ggaatgcatcgataggtgtttatgtgaaaagtgtatttgttttatgcatgtgatcggtgaatgtgatagtcgatgcgaatgaggagtatgattagtcctgttggagacacttgtgctgttggtgtcatgtgcataatgtggggggcacgtatgtgtgtgtgtgccgaaatatcataatagtggttgcgttagagttgtctgaagtatttcggatgcatgccgaaatatggttgcattcgaaatagggaaggagatgtgttgtgtgatgtaaaggctagattgattttataggttgtataaaaatgttctgttaagtgtatacatcgagtgtgttaaatggatcctacgtctctagagtgtagtgtattggctaggcgaagagttttggaatagaagagtatgaggcgtgcagttaagccaagatttaagtgcaaatcctatgcaatgtgatgggattcgtgat

SEQ ID NO: 31597 - DNA, 336 bp, Zea Mays
ggatcacaacataccttggtcaaggcatactctaccactttcatcgcccaaagatgccaatttgaatatcaaatgaaacgccacttaacaccaattgaaggctaaatgaaaggttgactaaatacaacaatgcacgcctcagtggcacctaagccaattgaatactcacaggaagtctaacatttacgcaacttgtacatgcttcatacttaactatcattgcatataccaattgaagatcaacacaatcatgtatataaagcgaaatatctaagcatgtcataattaagaaggtttcttaggtacaccaaaagaaacaacattttaaggcataag

SEQ ID NO: 31598 - DNA, 353 bp, Zea Mays
gatgcaagcgagatggcgtgtgtagtgaacgacccgatgcgacacaacgagtgtgtccaactctcaaaggcaagaggcgatgagcggacagatgaggcacgttgtgggcagcgagcgaccggacatgcacgaccgagcttacacgaacgggggtgtcaaaagggtagggcacatgagctgatatagggacacaacgactaaattctgatttggggaacatcctccaatgggtcacatgtgggattgtgggctccacaatgtctagattttctattcttcaaaggacaaagtgtcctagtgctatgttctttagcttcacctttccatctctccactttctgttctcattctga

SEQ ID NO: 31599 - DNA, 303 bp, Zea Mays
gaatcacacaaaaatgcatgttgtgcacttgaacatggcgtgctggtatgacgttcgccggtgggagcaccgcttgttacccagcgatgtatgcctccaacaacgcatcatcgatgacatggagaacttcacgcatattgtggatgcaaagagaaacaatttgctccataccattttttagataatggaaatatcatctgaccttggcctcaaatgaggttacggccaattattacatctagcgtcagcatagtgccaagacccctcctatgactataccaaagaacaccaactatggagcca

SEQ ID NO: 31600 - DNA, 574 bp, Zea Mays
caacaaccaaaatcttgaggacctaatcatcaaacaatgtattctgctagcccactcaaaccaatgtctaacagttttacttatctcacctcgtatttcaaactcaacacagtaaactgtgactgtgagtgtacggtgcaacatttgtaaagtcttgttgcacgaacatattgtacaataattcaggctttggtgttgatattggtagagcggcaggctgtatgtgcttccgcagtgcatacctcactgattgatgtccgtatggcgtgacagcgctggttggcccgacagcaacgcagatgcaacgaatggccgctgcactgttcggcagtatactggaaccagttgatggatcattgatccagcgacagaagtgtgcttcctcttgctgaaacaaagagcacggtgtttaggacccgacgggcgcaagcgcaacgtccctggcttcacggatcaaccaaaagatgcacggcacgcactgtcgcagtcacagacgagctggagccggcgccgcgccgcggcccatatcggcggggcacgtgcgcgccacccacccatccgtcgcggattccta

SEQ ID NO: 31601 - DNA, 1158 bp, Zea Mays
catcaatctaccagtgtgtcaacgagtttgcatactggatttctgcgttctcgaagtacctcgggtggcttgctagcttaacacattcatgataacattagttactcaagccttttaccttttatttacagttacactgtcatgcctgtcttttataggattgcctaggcaaccttcatatactactggatttgggactgctttaaatatagagacacttgttgctgccgcggaacaaagagatacaccaattgaggttggttttgttttctgagtttcctcttttgggttaatacataactcatcccgtgctaatagacttctcttaacctagacacctccacctgaagttcaggacaagattctttttatgatcaacaatatatccatctcaaatatggaagctaaggcaaaggaatttaatgaggtcatacaggaacagtattatacttggtttgcacaatacatggtcatgaaaaggtatcattctcaattactgattttgtatagatttgtctgacaatgctgaggtatacaaatcactgctcatcttaacagggcaagcattgaaccaaatttccatgatctgtatctgaagttctttgataaagtaaactcaaaatccatgaacaaggaaatactgaaagccacatatgagaactgcaaggtttttgttctctctaatttgtctgccctgtttttatttttttgctagccattttgtttaaacttggatacttttgctgcaggtcttgttaagatcagaccttatcaaatctagttccgaggagcgctccttgctaaaaaacctaggcagttggttgggaaagttcaccattggtaggaatcaggcactaagggctaaggagattgatccaaaatctcttatcgtggaggtactgcttctctgcattaaactcattggtagttggagacttggagttccaaaagctcccttaggctgtctagatcctttatttagtattgctctatattatttaatatgatatttctgtttcacctgtgttttttggtaaaatttatgtgcttcctgaggtgtacaattcacttcaatcgattcaatttgtctgctcataatctttggagaattttttcttcaggcatatgagaaaggattgatgattgcggtcataccat

SEQ ID NO: 31602 - DNA, 573 bp, Zea Mays
ctggtggagcacggcggcgtttccgcccccatagcggcgaatcgccggtgtagagccagtaaagccctcaggatccccaattcgaccctatgcacgaggattcatgtcgagggtgcaaaaagggacttatccagctaggttctagcgcgattggtgaagcggggagctccgcccacggcggcggacagcagcgtgaacccactgcccggtggcacgacgcccggtgccgcgccataaccggacaatgtgctctactcagacataggactacgacatacatggggcgatgcttaccgagagtccaaaactgagggaagaagttggtcgcgatgaggatgacggcgagagtccatggctgcgaggaattgccccggtgatgcttcaccttgtggccgacaccaatgcccccacccgcgaggtgctgaggagaacctaacgggcagacatagagtcggggagccggcgaaattccgagtgcagtagaggcggcccggcgttcactctgtttctctcgtacggctttggtggtgaatgggagggaggaggggaggagcaggccttcatatcccaccg

SEQ ID NO: 31603 - DNA, 366 bp, Zea Mays
cagatcaagtagtcaatttagtccgctcacgtggtggtaacaagacataacacgtacatccaaacactcgaaggtggtcatatcgttgaggtgtcccaaaaagaacttaccaggtgttttgccataagaaacagcttcagccaaaaaaatgtgaaggaacaaaagaagataccaaaagagtgcgtgcactctctataatatgacaatgtttgcgttcatcaatgccattttgggcatgagcaccagggcaagaaagttgagctactgtaccctctaaggtcaataactggtgaaaattatcagataaaaattcaccaccagaattagaaccaaaatttttaatgggagcagaaaactggctgtgaa

SEQ ID NO: 31604 - DNA, 286 bp, Zea Mays
gtaaaagtgcaccaaaaccaaatgatacacctaggatgaggaataggaattctggccgtacgcaatgtaaggctggaatcaaattaaaaaatatatgatgatgaaaaagaaaatgtggtagctgcaaagattgaactggtgaatttagaacataacaatgagttcataactgacgaagcagagaaacaacatctacgttgcaacaaaaggcgggatgtggaattcataaattttgttgatgcaatgcatgatagccgagtgccccagcattgcatagttgatttta

SEQ ID NO: 31605 - DNA, 459 bp, Zea Mays
caggactggtgtcaagtctgctttacgccataagggtcagattaccatgcactttttaccatacttatcgctttttcaaccactacgactcagacgtctcgttcacaagatgggctaggtacacatcttagcccccaaccctggccttggttctctgcttagtaaaaatacgggatacaggggccggaaactctccttcgatcaaaggtaacagccaggacatgggctcgggctcgcctcttatccatattacgacaacccttgtacacctaggttccctccttgcagctataaaaggagtccggggcctccaagggacaagaggacaacacttcaccgtttgccctccacgttcggtattggcactagcctcaatcactcgcagagacttgggatccactccctctctcgaccagcttgtaccccctactacaagcacttaggtgcaagataatataa

SEQ ID NO: 31606 - DNA, 411 bp, Zea Mays
cgttcgattacatcgacggtctagattacgccctagcgaatcaatacgcgcgggatgagcacgtccgtccgataggatccgatggccagatccgctagctaatcacagccgtccatctacccatccacggtacagacctactcccctacctctcgcgccggagcgcggcggcgcacagaccagggccgcgaactccggcgaaccgcccaggtgcaaccccgccctattacacaccccaattactactacatggtcaccgagttaaagcgaaaggggtggtaggagactcaccggagataacgccccgacgagcactgaccgcgacaggggggcgaatccgcggtggagagtacctccggcgagaaatctccaagccaccgagtccttacgagcttcaaatccctcacgaac

SEQ ID NO: 31607 - DNA, 545 bp, Zea Mays
atttttggcttccactgccagtgttgtactgacagccctactgtaggtgagatccaagcatgttgccattttcagttgaagcctgtcattaagtaccctcatgaaacaattctttttcttcagatcagtattcacttggtcgatatcatactgggatagatggttgaatttgttgagatattgcgtgatagtatctcccccttgctttaactggatgaactcttcttgcttcatatggacactccctctagaacatagtgttcatggaatgctaacttgaattcctcccaagtgatctgatgtccagctggttgaattgctacaaaatttgcccaccatgtactggcaggtcctctcagctgttgggcagcaaacaatggcttctgcgtctctgtgcagcgaatcaatccaaacttttgttccatgactcttaccgactcatccgcttctaaaggttctttagctttaacaaagagcgtgggtcgagtctcagaaaattctgaatatctagtatcgcgcagtccttgaggaggagctctgcctcc

SEQ ID NO: 31608 - DNA, 516 bp, Zea Mays
cgttggtctgcaagaattgtctctggcaaattttgatcagactctcgaagatatggtccctgaggatctgctgtccgagccgatagatggtggaatgatggaagtttgcgctgatatgcctgatgttgggttagagttatcccgagcagcgtctcgtgcctcatcgacctaggagcgcggtcttaagagtcaagaggctgatctagattgctccgtccccatagaagtggttgaaaatccttcagccttagaggtggctgctacagagaacccggtccctgaggatggcgctagcgtttacccagcccccaagggtgttgtcggtgatgatcaggctcgggtgggcagtgcgagctatgacccagcccccgagggtgtccgagcgggttccccttctcatacttccatggatgtccatgtcgggtcttctcctccacattctggttgcgtggctgcagcacaagcttcgggtcaggaagtcgccttagaggccggcgcacctggtgctagagtttt

SEQ ID NO: 31609 - DNA, 434 bp, Zea Mays
gttgttatagagttgctcgtgacatggaccttgctagaaacatagagttgggtggctacacacagatggcaaggtggggcggtgcggcgaacgacaagaagaataggtgggatggccagcaggagcccagatgtcatggagaacgctaaggcgacatggtcgcgatggtgcctagtcatggcacagatgtggagctaggtgatgctgcatagacagagaggtgggggcgctgcacggcgatgacaaagaagatggacaggtgtgatggctggcagatgttgaagaagggcacgacagttgggtgggtacgtgcctatggtaagcgacccccacgctagggaagactataatgggcagatggagagtgtgatgactgttatgaccaattatttttagcatctagttggggagcatgtttgttggtccaatccgta

SEQ ID NO: 31610 - DNA, 406 bp, Zea Mays
ggccgactcgcgaaatcacctcaccactgcgggtcgccggtgagagttgggggtcgtcgggtgatggatggagcagccccggcaatggcaatcgccgtggtccgcttggactccgctgctggcgttttcctaggaggaaaagaacgcctggtttgcagatcagagagctgacggtttgggatcgccttctccctcaacgaattagtgaaggagtttatccactgcaccaacctgtggctttcccgccgcgtgcgccattggcagaggaggagaaagaatggcgccgccgctgtgctcgtgcgcgctattgccgtgcgggggaaaggagatgttggtcctgccgttggattcttatccaacagtggtgattagatagggagatgacctttcgatggattggatccgg

SEQ ID NO: 31611 - DNA, 325 bp, Zea Mays
caaaactcacctaacttggcctagtaaacaacaccgctaggccacttggtgctctgcgctcgtgtctgacggccactggcgggcggaccccacgctgtcagccatagtagcgtgcgcattagcaacctcaccacgccgccaggtgggctcggttgtcagccgtcgtccccaaacagaataccgcaactaacgccatgcccgcgcgaggagaccgggccgatgcaattgcgctttcttcccctctgatccttaccctactccgctataaagaccggacctggcgacctcggccagccctccctattccccatgggaagctcctccg

SEQ ID NO: 31612 - DNA, 350 bp, Zea Mays
cgcgctacgcttggggatccgcaagaagcccgaatatgtctggaaggagtaccgtgaaaatggaatagaaaagtgctctatggcggtctacttgggagaaagccggaactacccaaaccaccctcccttccaaattaccttcatcgggcaccgcttcccagacacttgccagagcgttgctcgaaaagccctcaaacaactgtgccaaaactatagccgagagatctctgagacccccctccggtatttcccacccagcaacaaaaacacccccacctggaggaaaagactccaggctctgtcaggaggaaatcccacagaagatgaccccactatcgtctacatggccg

SEQ ID NO: 31613 - DNA, 277 bp, Zea Mays
cagaggtacaagtgccacccatacaaaggaaaggatttaacaccctggtttcacttgtggcttggatgatgtggaaacatcggaatgcatgtgtctttgataaggctccaccaagcattgccaagatcatccaggaagtcagagatgaggcttctctttggtgtttggctggagcagcagggctgcgtggtctttggccataactgttatgtaatgtggtaaaggtcctctattgttttgtatcctagatgagtccttttaggttcctttgttttcg

SEQ ID NO: 31614 - DNA, 838 bp, Zea Mays
ctcgcatggaaccatttgagctcctgaactgctacgatttagaagctcatatcctggtagagaaacaaactgcacatgctgactacacgtagcttgtgttgcgatcacaatttgggtttttttcaccatcatcatgcaaagatagatccagacaaccaacgcgatacaaactgctaactgccacatctctccagtacattgaaaaactggaaatcatagcaagcttaggctctgcaaagttcttgggagaagaagctactcctagcaaggtagaaacgtaggcacggtataatgtttgaggtggtggtagctagttgaaatagcttcatgagatggtgaaaagcaaggaatgacttagcaggcaaggaccaaccagtagaccaattacgaatctgacggtgaaaggaggcgaggactcgtcagcaagtgatcaggtcaatcgcaggtgctagtttttttcaaccacctagaaattgcagaacagaatggcaacaaatgcgttaaaattggcctgtgctcatgtaagtgagaggtctcgatctctcatagacaataatattggcctatgctcgcctaatgaatcaggtgatgaacgtacgcacgcagcaaactaccaccaaaagatatagtcctatgatcaaatcggcaacccaagaacttgtgagcaatccgcatcgacccaagaaccctagcaccaagatttctagatcatggccagtagatgtaaaggagttagaggaggagtggaggacaacataagtaccagcaagaagcatccaccgaagggatagcatcgatcccgtcgttcccctcgtggacgtaggctagtcggtgtcga

SEQ ID NO: 31615 - DNA, 755 bp, Zea Mays
tggggtcttttgattttggattggctttctggtgtggatgagggcgagaggctcacgtgatatatacccggagcccagatgataaggatcccaggctgccggatttctccgcatcctaacaatccggctcctgttacgctttatcgggtacaacagagaggaacgcactggtgccgcgtccccacccgcagccacggaggatcaccaggacccacatgcaagagatgacgtcaaagtgaagcatccatgcggcatgcccaggaacgacgctagttgttgagagaataccggagagcgtttgttgcgatctgttgtggtccgtaggacggagggaaggagatgacttccacatcctggccccacgcaccagctgttctaaatcggaagtggatgcaagatgggtgaggggatgaccactgggtcccgccagcaagtgagccgagtacgtagaaaatggcagggaaatacgagtgactccaggctgatggaaataataaaacaaaaaaatcaaaggggtggcatcggtggagtgtggtgtggggctgcatgaaggaaaaatacgcatcctcttcctcgttttttttctatttcattttcattctctattttcatttctactaattttctagttttaaatctaatttcaatcttaagtttagttcaattttagatgcacaaacaaagtcccacatgagatgtagatatcttttacttatttgtttatgtaaatgcttctagatgtaatattaatggaa

SEQ ID NO: 31616 - DNA, 494 bp, Zea Mays
ccacggggcaagggcagtgacagtgagaagggtggtgctggtgctggttgcgcctatgcgttgtatcttttcccgatacggtcaggtcagccatggggtgctgctagtgctaggggccagcttgctaccacaagtgcgcctccactccctagtgctttgattgctatccagcgtctgggctttggttggcttcgaattgatctgtggatgaatgggacaacgcgggtgtgtctgctggtactagtgtggagacgtcgctttgctccccgccttttaggcagggttcttggaatcttggtgcaggactgcgggccgagtgcgatggaggccttgttgaatggtgggtgttcttgtcggtctgccgtctgcgttctgcacagaggttgttctgtggaattttttgtgtttggattgtgacaacatgataaaaaagcagctactttttggccagaatttttaaaaaggctgatcaggaattgggtggcagagggggt

SEQ ID NO: 31617 - DNA, 342 bp, Zea Mays
gcgccattcaacttgtcgggcctgtattccactgttatatcatacccaaacagtttgctgacccaagtatgctgagggattgttgacagccgctgatcgagcaagaattttaagctatagtggttagtgcggactgtaaagggtcggccccagacatatggccgccagtgtcgaactgcctttaccaatccagtcaactcccgctcatatgctggcaatttttggtgatgaagggacaccggcctgctgaagaaggctatggcaccatcgccttggtgcaggactgctccaaatccagagccagaggcatcacagtcaatgaaaaaccttttgtcgaaatcc

SEQ ID NO: 31618 - DNA, 523 bp, Zea Mays
aaaatggatgccacaaaacattaatttttaattagcaggtgctagagctctatattgggacagctcaagttgagatatacgaatgtcatatccagcccatcagggcccataagatgaaggggataaaaataacacatgttcttccttagggacagcactgttgagttatctatttccttcagtttagagatacattatttacgattcaagcagcaaaaccacaggcagcaggggtagagatgattggctgggactgggaataccttgctttatgataaggtgacaggctcatccttgggatgatttgaaccttacctaatcaatgacagcttaacttaccaagcatcccttattcaaagagtaaacaaatagtttggcccctccaacaacccctgttgctgctttagaatgtatatgcaaggcattagcctgataggctggtacccgcatgtaacaagcatctacaatacatactgtcggaggggtgaatcctccgaccgggtggcgggttgcacccgcccta

SEQ ID NO: 31619 - DNA, 390 bp, Zea Mays
gttgtgcgatgtcagccgttcgatcccgcccaccagccccagcaccgaagtctatcgtgccctggcttccccttctgcgattccgtcgctcgcatatgtcgaccctcgatcgcaacttctcttctctccactcccccacgccaccacatcctacagccgtcacccagcccacaacaaccgccggccgccgccgtctctcgcgcttcgcctggtccatccgcctcgctcgcaacctcccacctgcgccagccctcatatgattcctccaccatgaaagccacgacgcatccaatccaccacgacaccaccgccccgccagatccgatcgagttgtgtgctgcagtcggtggatgagttggacacgagcaagaagagccaaggcgatggtgg

SEQ ID NO: 31620 - DNA, 294 bp, Zea Mays
tgtgaccaagccccatgtagccggtacagtctgtggtatggcccttttactcgttgttgacttatgccgtgaggggatgtctggttcctgtatttgcatctttaactacgtagggcgctgaggccagagccggggctcggtcatgtacccaagcctgtctgttggggaaactgtcccagtaatagtggttgaagcagtggtgagtatggcgaaaagctcttggtaatacgtcagctctgctgtttctggtgacgtaggacgctccttcgttggtattatcgaggctgaagccat

SEQ ID NO: 31621 - DNA, 315 bp, Zea Mays
cgtacggtccaaccctagggttatgaaggttggggagcataatagtgactaatagtgactctctctcccccttgcagatggcttcggataaaaccacgcctgccgcctccgggattggagcagggtttcccctgagagctgaaagggaagccgatagagaggaaactgagacccacctccccgcacctccagaactacccttagatctagccctagttctagccaaccaaacccgactcatcgaggtcctcactcgaagtctggaaaatcaacgtccgaatggtggaagaccataagacaggatgggagatttcc

SEQ ID NO: 31622 - DNA, 324 bp, Zea Mays
ctctagcgaaggtggtctagtttatctaagatacacctaccgctatagaagttaatttgacgagccgaatgatgattggcttgaggctgttgaggctactagcgatgagctgttgggaggttatacaaaggcagaggacgaagccctgacaactccttcggcgctcgcggcaagatgagactaaacagagttttcgatgtgatcaattttttatcctgattattgctttcctgcccgaaaacaagggtcgaaaagaaaaatggcaacttcatcctctttcaccgcgcctaagccgaaaagagctaaggttttgactcacaggcc

SEQ ID NO: 31623 - DNA, 327 bp, Zea Mays
attaattggtcctctttcttggtgtagttgttaagaatttcattgcacattgtctcgatcatttctagccactctttgcatggcttcttgaattgtttctcaaatttaaatcggtaagggagccgaacaagttcgtactttttacccccttctttttcttaggcattccccagccactagaggtcagaaatattctatttgccaagtactcttgcactaaatctctagtgatgatttcagctgctaccactctgaactctaattcggctacctagcatggggagccaagctgcatgtggcacaagggccttgtcatcccgaagctca

SEQ ID NO: 31624 - DNA, 526 bp, Zea Mays
tgagcatctacagcacacaggggtattgaaacgagagcgaggagggcatgatcggacctgtagagagctggccacggcgagctcactcactgcggtgttcttgactgatttgggggaaactctaaattagagctctctgggggacaatccgaggcacgggctggtgtgttgggtgtgtgattactcagcggagctcactagggcggcaatttataggttccatcggcggtggcggctaattttgagaagacgcgtggcggccggagaggagggaggtcactagcgcaagtgattcgtggctcttactgtggcaaggcctcaggcgatggatgggctatctatggtgattaattgtgatgtggtaagatggctgacggcgtggcataaccgtgaggaatggcggcacgacagcgatggtcgcacggccacatcgccgggcaagtgggcacagcaaccaggcgaaacagtggcctaagttcatcctcaacgcgatatttcttaccccgagtagttatctgcacttcac

SEQ ID NO: 31625 - DNA, 410 bp, Zea Mays
catattcagaattcacccaggcatattcagaattcaaacatattcagaacggtcaacaaggcccactcgtcagtcgtggacgttaccaggtgggacattttgacaaagacaagcgagcagaacggtctaactgtgattacatggacatccaaacaaatgacattcggctggcacaataccaatttctaaattctatacctatttcatgattcatgcattccaatgtctccatcaacacttttgggcatccttatcgctaaatttgaacaaagataccaaaattttggatggtcttcactacaaatctagaatcaccacataaggttgactccagcagctatactatatcatcccctattttaaacttcagtctataaacaccgtaatctagagccataatattttatttt

SEQ ID NO: 31626 - DNA, 305 bp, Zea Mays
cccgcctccgtatcacggggatctgggccaatcgtcctcttaccctccgccccaggatccctctggcagtgctcctcccccgacccaatctgggaaagaacactttgcctctgacctggcgcaccacctctttgctcctcatcatcctcctccccactggtgatcattggattggcgcttctctctctctttttggttcttgttgccaaaaagggggagaaggtttattatgcagtacccctttatttttgtaatgaacaatcggtctgtaataactatttggtctctcgtatgatgcatgcatg

SEQ ID NO: 31627 - DNA, 467 bp, Zea Mays
ggacaagaagacattacaagatctgcccgtttctaggaagcaagccaatggacatttaatgtagcgaggagtgctaattatctggtgagagtgctcccttagagctaaagcaccataatgcatgaggaaggtggcatgagttggtggggctcgatacacgagtcgttgccactatggggccatgtgtcatgtgatcctttaggaaacaagctatgatgcaattaatacaaggtgagtggaggggtgctgggtacctagtaaaggtgggcccttagagccaaattggcacattacgatttggatgttggtgcatgcttataaaaggttgtcttgcacctacttgtgtttaccttaccattcttgccttgtcctcctgatgccattctttccttcttctccttgtttctaccttgcttgtgtacataagcaccctaccagcaaaactgatgaatagagcactaatgttc

SEQ ID NO: 31628 - DNA, 339 bp, Zea Mays
ctgtgatccccgggattgcacatgagtgacatgcggcggcggcagcggtttgggatctaatgtccagcacaattatcaactaatcaccctgtaaatcgtcagtgttagtataataatctctactacgtgccagagtttaaacaacgggagtatgcgactttctgtagcatcacgagaccggccgaacccaacaacatacgtcaaacgaaatcggtacacctccaaaatcctgcggggcccgcacgcatttttcagttccattcccaacagccccaccacgcccaacccaacgcacacaccccgtctctgccaccggccgcagggcccagtggacaatgg

SEQ ID NO: 31629 - DNA, 482 bp, Zea Mays
cggaggggcggaaatccgatttgggggaagagagaaattggagagctatggtgactaatcggaggcaggagcgggtgctctggcttcgtgattacctaatggagcttgtggtatgctcaatttatagagtccaagggcggtggctcctaattttggcatggcgtgctggcggccagagagaaggaaggttactagtggcccaatcgtggcgtgctggcattccacggttactactacgcagtaaagagccacagcgtggcataattgaggtcgtcggagtaccacggcgataccggcggtccggccatgtcgcactgctacaggcgcaggtgataagcttcaccccgcgaccaaatccacttctcttccaatctttccccccggtactatcctacccgagtcctgcacgaatcaccgcgatcagcgtgaatccttgcgcagaggtcaccggcgacgagggggatgaatctgaagattttttt

SEQ ID NO: 31630 - DNA, 437 bp, Zea Mays
gccctgccttcgccattgatttacaagggcgggacctagccgccttcattcgagaggtggagtcggaggcgattaagattgttggaaaatatgtgctgaagatggtgatgttgaggagctgggatatccttggttccaacgtcacattgaaccgggattttgaattgaacagcttgcgctacggtccttacccagagggggactctgtggatgctggggacgaccgaggaaaacaggtgaagtcccagtttgaagagggcacctcaaagggaaaggctatggtcacagcaactcgaaagaggaaaatagatgtgcaaggtacggaggggggaaaagatggggccgaatgcctctaggcttttgttgaggagttggcggggacgtgcgatgggcctgaggaggttatgacttcgcccgagctccaaaaaatatcttcg

SEQ ID NO: 31631 - DNA, 395 bp, Zea Mays
gtgttccacttggttggcatacaaggcgcaattcaaggctcctcctacactaggcacaaaccaaacttaatttggcaaacatatgcagaaaacgaatacaagctcttcactttgattttagtgcaacataaaaccctaagcgcagataatttggcgttgtcggttggccaacccatgatgtatgtgtgctaagtattgtatttgggccctcaagactgtaggacacctttgcttgcagtgcccctttgcccatgcggtctagaacctggttagcaccacaattagttgctggtgggagaaaacacccataggatcccaaaagacaagaggcacatttgtattggtatggtcatgtaatatttggaattgggaataacataaccgaagcatctttg

SEQ ID NO: 31632 - DNA, 381 bp, Zea Mays
gtgggttagataaaacacgatcagaaactgcagggtgagaccgtggagcagtaggaaattgctatcatagaggcatatcttgagagggtagttttcctttatagctaatcatacatgggtgcgggccaacaggtcgggtttataggggcagaccctaccgggttggcatacccgtgcgcactacctagttacaaaaggaaaaaacttcgacccctcagacttgctctatagataaaacttacagagatattttgacacttggggaggcattccttcagtcgtagcgagacagttgcccttgggtcggggtactcccattaccatgaagggtccttcccagctggaggagtgttacagagccctaatttggtctggtacctt

SEQ ID NO: 31633 - DNA, 386 bp, Zea Mays
ccgaaggtgcctacagtcgggccagccgaagccaaggatgatacggccagagagccagaagtggaaaaaacaatggtgatgccaatgattttgagcccaccagcagaggcagaattaccgaagacgacaaaggctcctgccacaactcccaagagatggaggatggccagcgtgctagacgttgtcaaggagaccacaaaagccttgacccctgctcctattaaggaaattgctgaagctatcaaagtccaagccgaaaccgaagctgggcctttagtgcccattaagacgaaagctaccgcgcctgaagataaagctaagaaacaaacttatgatactggcatagcagcggggcaagataagatagaaaaagcaaaatctcctgc

SEQ ID NO: 31634 - DNA, 317 bp, Zea Mays
acatacacacggcgagggcatcatatattacattggctcaaccttcgagatgatacccatctccctgtaattgaacagcattatcctcaattcctcaccctcaaaaagatttcgcagatccccctcacctatgctcgccccaatcggcgaagacaacaattctcgtttaccaacccggtctacccgaagacggccacgctccatccccatatgacggcgcctaccacttcgcgaaaactcacccacactgtgtttcgacaccacccttcgccgcctatactcagtactcgcactaggaagatccccgacaccctcca

SEQ ID NO: 31635 - DNA, 413 bp, Zea Mays
gaagatgtacgatgaggaggaggaggtggaggaggagggtggtgatggtaaccagagccagaaggccgcgggtcaccaggaatgggtcccggacccgggtagggaggaggaggatagtgaccagagtcggacggtctggggtcaccgggagtgggtccctggcccgagtagggatgaggaggatgaggaggatccgaggtgtagaaggggtcatcaaagtcctcgacctcatcctccggggtaatgaatggcacaccaaactcctgttggtgccactcattaaggtctgcggggaaggtaggggttggaggtggaggggacctgggagggagaggatgacctgtctcggctgcataacgaagaaaatcctcatgcagtcggtcagtcctgcgacggcgcacagactcctcgac

SEQ ID NO: 31636 - DNA, 547 bp, Zea Mays
gccgcaccggttagtaaaccctagggcgtacttgctttcgcagctgcctccagcccgcagtatatatatagttcaatctagtcttttccgtcgtcgacgcagcctcaaaatggacccagcggatgccatcgcagcgcggctcaaggcacgtacactagcagagcggctggcaatagcgcggctcatgcatctccaccacctcgagctccgtcgccagtcgaggctcaatcattaagacgtcgtacgtcatatttttgtgtgtgcctcaagagttctctcgaagcgtagccgccgtcgtcaacgcgtcattgtgggctcctcggcttcgacgaatgcatgtgaggttgtctccgcgcccgtgcatctagagccggtagcgccagtcatcatcctctccgataatgaagatgagatcgattggacggcactgatggacgacgacgacgacgagtagaaattacgatatatgctcctaatcttagtatgatggatgacgtactatatatctaagaactttggtttgatgcctaacttgccacactttgcc

SEQ ID NO: 31637 - DNA, 379 bp, Zea Mays
gtcagtctcaagtttgtgacgatctccccctacgaataaaaatgcagttctttgctggtccaccgttgcatgcttttgtttacggacttagtggcttgctagaattttagaggtaatggccaagtgatgcttgtgatcttcacttttccgagttatgatctggcacctttgtgcccgacttatcgggccaactcatatttatgctgatgtatcatgagttccgaaccctaattctcgctttttcctctgccgcttctctgtttcctgagctcttgagcccgcccgcttcgcttgagatattgcgatggctcccaagaggaagagacaaagtgttgctgttccaattatcctaccaatcgatcctaacaaccaacttcca

SEQ ID NO: 31638 - DNA, 274 bp, Zea Mays
cgccgcgtacgggcgaaggccacaccgttcaatggtggggcctaggctgcgctctatctccttttgggccgatttgtaagccatcctcatggtaggtttcatagtatgtctaatcagattgtacttctcgtcactgtaatgaccccgtaagggggaatattctgggtgtagcaggtaaccgggggcataacagtacttagaggatccattcacctgccctgttaccaataaatacctctgtcactgtacatggatgggacaagcttaataagac

SEQ ID NO: 31639 - DNA, 453 bp, Zea Mays
agccactcttggcagggctccttgaactgcttctcaaacttaaagcgataaggcaatcgcacaagctcaagtgtcttcttcgttccctttagcttcggcatgctaaattcacttaacattggagacgtcctgttagccaagtattcttgaactagatctctagtactaatttgttcagccaccaccctgaattctaatacagacagttggcatgctgaccctggcttcatgttgcacaaaggcatggtcattccgaagcttaaggacagcgggctcatcaccatcgtcatcagtttccctcttttcttctcatcggccttaatataaaaccactcactcttctagccggttggccacttggtgcaatagctgaggaccggagccttcgtatccttgcgatacacgaagttataacaaccaaaattttcatgtagcccgtcttctctggccttt

SEQ ID NO: 31640 - DNA, 368 bp, Zea Mays
cgctaaaaggtgaggggctcttcagcaaaataccacggtcgaaggggtatcgtggttccaaggccgatggattcgatgtgaacggaacagaataaatctagcgcccgccaaccctgctagtaaccccggccacccgatctaatttctgcggcatggattcaatacgacgaagaggtatccggcatctaatcccagccgtccctttggatctaacatccacacaacttctcccctattcccgctttctcccaccggtgccagctcgacggcgcaagacagaggcacggcggcgccattgatggggacagacccatccccacacggactcaagaactcccatcccgattatgctacgcattgcggaggcc

SEQ ID NO: 31641 - DNA, 587 bp, Zea Mays
aaaatatctagtttaattttctagtcctccatataggttctagtttttgctggggttccttttctttataattttctcctccactttaaaacacttctcattatcatcacatttgttaaaccactttgtaaatattcttgatccttctaatcgcagcaccctgattgaaatcttggacatataattgttgatttattccagtaagttttctgtttggttgctgggatggaatgttttggacttttggtaatgtgctatttctgtattctgttcaattgcatgaaaataaatatgttaaatatatttcactgggcagactagtttttgaagttgatttgaacaaaacatatggctagtaatttgtttttttacttgcttggtactaaaaggcttagttgttgtaaactgacactacttgccacacaggtcaaaatattgcacataagggattgtaaaggactacaaaagcttgtactgcatgtattgttctttactatgcttgtagagtaagctaaatgtaggacccataatgctgtgacttaagtgtgtgggtttggttagagatgtttgggcagagatgttggaag

SEQ ID NO: 31642 - DNA, 469 bp, Zea Mays
caaaaagccttttcggagtttatcaatttccttgatggcccagtaaggcaaatcaatagccattgcagtataaattatttttgcagtcataacaaactgaacgtatactgccctgccagctcggttcatcatctcagctttccaccctgggagcatggatgccactttattgatcaacatacagatctgggatcgaggcaacttatataacgctaaggggaggcccagataggtgcaagggaaagcagagaactcacaaggaagcatacttttagccacaacaaccgtatcacttgagcaatgatttggaagcacattacttttctggacattagttttgaggcctgaagctgtaccaaacagttgaagaatgttcagcaacaaacttatgtcaggagggtcgggccgcaggaaaatcatcacatcatccgcataaagagaaatgcgatgttgcaatggttttgaggac

SEQ ID NO: 31643 - DNA, 276 bp, Zea Mays
acagcccgctagacagcatacacgtcggcttgcctattattatcacaattcgaggtacaacatatatataataatcacttaacacaatcaactcctacctaacatgagttggctaatgccgtgactatttcccaattaccatcacacaccacctttcgccatttttggataaccggcacgacacacagctattgtaatacatctcaagttcattcaacccatcagtggagcactagcatatttcagaaaatttcctgagactacgacgacaaggca

SEQ ID NO: 31644 - DNA, 685 bp, Zea Mays
ctggggatatctatgtcgtgcgccacctattcctcccctgctcgcccataaacctgttgaccctgaggtatccaccgtctcggtcgaccaggaggatagccggggggagcgccataggttcacagccaccgagagaaaaaaaatacgacagggtagtgtagcttcggcgcagaaggtcatcgtggcattcagcttcgctcgcgtggtgccacacctccgcaaatcttcgtacggcacgaagtctcgtccacgggttcgcctagccggggaacaggggcaccgtcgttggcgttgtgagatctacggcgcgctgcaagtctccgtgatcggctacacctgtgcctcgaatgcggtaagaaatcatcctcgattcaccactcgtcgttaaatcctcagcacattggtgttatccacacttcgacccacaactgcaagtagctgttcatcgctcgccagggcttggcttcctggctctggcaatggccgccctttggaagctaggtagaagacgaaccccggcccctcgatttcgcagtgtgcggctacgattagatcgtgccgtaacggttcgtttggacgagggaaaaccatagatcgatgatcgtggggctgtgggtgattcgggtttcatagaatccggttcatcagatcttaatccaagggctgtcctcgcgtatcacttcac

SEQ ID NO: 31645 - DNA, 365 bp, Zea Mays
ctcgtgcctcgtcgaccttggaaagcggtcttcggagtcaagaggttggtcaaggttgttcagttcccatggaggtgattaagagtcctttagccttagaggtggttgttgcggtgaacccagtcctcaaggatggtgtcagcggttgcccagcccccgagggtgttgtcggtaatgatccggcttgggtgggtagcgcgagctgcgacccagcctccgagggtgttgcggtggtgatccggctccgatgggcagtgtgggctacaacccagcccccgagggtatccaagtaggctccccttctcatacctccatggatgtccacgttgggtcttctcctccacgttccgatggcatggtaacag

SEQ ID NO: 31646 - DNA, 579 bp, Zea Mays
atgtcccaggatcatactgtctttggatggcccgccacatccttttgcctcaagataggattaggcttagccagcatgagcccttgactcctccgagggaccctcgagccccaaagggtatgggccagagacgtctgagtacgatgacgaaaacttaaaggcccagagcaactaagtgtagcatgtgctcgggtcggtctgcactggggcacaaggggttgggggcctataccatcaggcgccttcaggcgtgaggggccccagaagcatatgtaccctagggcacaaggggtccctggggcttataccgttacgtgcctcaggtaacaaggagcctcgggggcttatactatcaagtgctctagtgtgtgaggggccccgctggcttagaccttaaggtgccctgggcgcgaggggctcaggtagcttacaccgtcaggtgccccgaggcgtgaggggccttagggattatgccctaagagtagtggtccctctacaataggccacgaagtcaatctcttcagtcagggccctagagcgcatcgtggcggttgccgggtatggcctttgctacgcgct

SEQ ID NO: 31647 - DNA, 583 bp, Zea Mays
aaaaaacaaatacaatagcagtaggtaatcaaagtattagatgcttacagaaacataccagaagagtagcagtagcagtcaccttcagaagtgtagcagtagcagacgatagatgttagacgtcagagatgttcttcagttcttgcttagcagttctacactcgggaaacagttggaggcttggagcagagtagcagacggccagacgccatggtccagacttgagacagatttcctcaagaacttaggataggaaggaggaagggaggagtcagccagccagattgaagaaagcaagtagcagaagtgaaaaggaaatgtgccttggttttggaaacgaggcgccagtgaggcaacgaggcaatcaatgagccaatcagtatttaatacggcacctaaaaggaaacaaaatgtttcaggcgccaaaaaggggtcaccagaccgacatttccaattccaggtttctggtcgctgtattcatgacatggacgattaatagtgattacaagacgattaatcgaacgtctagacgaccaactaacctaatctggtcgttgacccttatcgctagccactgaccgac

SEQ ID NO: 31648 - DNA, 476 bp, Zea Mays
tatgcaggcttagtggtctttttttcgaatgaaagtaaatctcggatactataaaagtaacagcatccacgtttacagggtctccccattatttccgaatccgtcccaatattatggcgacgtcaatgtcaaactaaaatccataataaattatttacgcacaatgactcaacgttttacgccaaacggtatatactgtttatgcaactattatgccgtttcggttttatgccatagctttcaacatcttatgctacatttttttaccttccgccattacttcccatgcaagatccataaattacgcgcccacgtatcatagtaatcacgtttgcatgtggaaacttttccctttaattccgcgtcgttcccttaccattcaaacacccgcgtaacggtgccgtctatcctgcatgccgcctctcagccccacgttaaacacaggcgcgcctgtaccagcgacccgacctcggaac

SEQ ID NO: 31649 - DNA, 440 bp, Zea Mays
gctacgcgaagggctcgaaggcctaccgcatccttgatccaagaacactgcgtgtgcgcacagcgcgcgacgtagtgtttgacgaagggcgaggatgggcctgggacaaggtggtggacgacggcacgactccgacgtacaacgacttcaccatcaactccgtccactttgagggagccgggggagtagacgacccttcaccgagtaggcctaccccagtccccaagtctccaccgactccagcgccacgctctccagctccggctacaatgagctcttcaccaccacgcaatccagccatgactccggctccagcgagctctccatcaccacatactccagcaccgacggtaccctctccgggaacgtcctctccgacgctagctcgtggagctcgttgatctccctcatggacatcgcgcgatcacccttaagtgggt

SEQ ID NO: 31650 - DNA, 322 bp, Zea Mays
agagaaataaaaattacattgagtgtgtatgaaagttttttgattgagcccctctgttgcttcagtaaatgtgtcttcattctggtacaatgttgttgactgtccgagctttggacacttcacgtgcgtcgcgttgttgctgaatttggcagtgcctttctggctgttgattgtgagacgaagttggagccatgactggtggtggtggtggcagggcccatgcagctggggagtggcttgccaaagctactgatattgtcggttgtgaaaatggttgttgattgcccacatactcaggaatgtacggggaatagcacgaagc

SEQ ID NO: 31651 - DNA, 383 bp, Zea Mays
agatgctctgatggagatcgccatggtacagtacctgcaaaagatcgttggtgcactgaacctcgccgccggtgactcccacgctcggattcgcgtcagtgctgcgattcgtgcccagtggcgcgcagatatcttcgcagggtgaaagatctttggcaagagatgaagatgggacactgtggtcgctctgtcaccgtgcccacttgcgccgcgacgtggccgcgcgaacatcaccgtcgtgccgccgttcctcgcggtcatgccacaccgtcagccattttaccatgtcgcaatagaccatagttgatagccagtctatcacctaagtcattacctcagtgaaagccacgacagcttgcgctagtgaactccctccctcctcg

SEQ ID NO: 31652 - DNA, 453 bp, Zea Mays
ctggggtaccatagtcgaagcgaccatggggcggtgaacggtaagggtgctgaatgccgataggggcgggagaaccaccatccagatagtggcatgctgcgcacttagcatgtaattccgcaacctccgcccaaaccttgcccaactcatcgagggcgtggtccaactctgtgttgagcacgacagccaagttgaccatgctgttcagcctcgaattgccctcaccaactagcgaggcaatcacacctccagcactgccggtcaaacgacgagggtagtacttcaggtcgaggccatcagctaccccgatgaacaacgagcaatactgagaaagtgcccgtcgtgctgcatcttgcatggctgccttgacagtatccctctcagtaatagaatagtgctctgagaaggcctctgcaccccggagatcatcgtctggacggcgcaccaagcaag

SEQ ID NO: 31653 - DNA, 300 bp, Zea Mays
atctgatgcatatatattttcatttttatcttctatgatttttttggtgggatttacaagttcgttttgtttgagattcatgatgaaagggaaggcatcatttagctggcaatcatcttattcagttattatagcctagttactgtgaatgatatgccgttacgtcgccaatgtctgaatggatcgtcccttgagctgtgtgccatgtttgttgtactctgatcttgtctgattgtccatgtctatctgatcatctgtatgggccggtgagggggccggctggctggcgtttccatgagg

SEQ ID NO: 31654 - DNA, 405 bp, Zea Mays
tataaagcttcgaatggtaacatctttagattggcctgttaactattatgagaactcagcataaggtagactcttgtcccaactactaccatgctgaagggcacaagttctcaacatgtcctccaatacttgattagccctttcagtctgtccatcagtatgaggtaggccgaactaaaattcaacttcgcatccgtattctcatgaaaacttttccaaaatctgggggtaaactgtgatcctctatccaaaatgatcttcttcggtacaccgtgtagagacacaatccgagccatatatcactctaccaattgagatcccttataagtagtcttgaccggaatgaaatgagccggccagtctatccacaataacccatatagaatcatatcctttcgatgtgcg

SEQ ID NO: 31655 - DNA, 570 bp, Zea Mays
ggtttatacagcaacatccaatagccatactggttgacagtggtagttctcatacattcttgagtgagaatatgcggcccttgttacaaggtgtgatcgaggtacccaatgctttgaaagtgcaggtggctaatggtgaagtattacaatgtcaatacaaaccataacaagcacagtagcatatacaaggttgcacatttgtgtcagacatctcttttctacccctaccctgctatgacatggtagtaggtatggattggttatagtctttcagccccatggagatagattgggatcgtaaatggctagctataccatacaaaggctccacggtggtgttacaagggcataatgctaagggatctgtatgtgctatggtggaattcatgatgtctcaagcggtacctgctgatcctcaggctgacctgcatcatcctcagattcaggaaatattacaacagtatgctgatatatttgaggattcccaaggtctacctccacccagggactgtgatcatgtgattcctctggtagaaggagccacaccttttaatataaagccatacagat

SEQ ID NO: 31656 - DNA, 570 bp, Zea Mays
gccataccaagggtacaactatgcacgatcctacggagggactacacgacgaccgtgagtagttgatctccctctcgccctctctctttggtagaaaaccaatcaccagtataagattcaacccttgagctataaaagggcaagctctctttcttctcaacacacaagcgcacaagttgtaacatttctttttgcaatactacgatcaagcaattcactggactagggctctggcctgaaccagtataaaccccgcgtctccagttcaccgttcgagtcctcgcgattcaccattcggagcgagtccgcgctagcatcccccgctgagtacaaatcttactacccttggtttccgaaccacgatagttgacacgccaggtaggggagccgttagtgtgctaagagacaccttttgctccaatggcccagtcatcagcattcatcggtggtgagaccttcgcccaaggagacgcatcacatttggcacccttgacttccttccttgccaccgccaccgacgaactctgcctcaccacccccgatgtgccagccaccatgggcatacagtcc

SEQ ID NO: 31657 - DNA, 314 bp, Zea Mays
aaatggctagcttttatcctctggcaagtgtcacactcggatatgtacttggcaatttcccttttcattctggtccaccaatataaagatcggagatcatggtacatcttgttgctaacagggtgcatggagaatttggaaagatgagcttcatctagtatcttctttctgagctcagggtccttgggaacaaccaatcgatctccaaaccatagaattcccttgctgtcttgccggaagcacttgtatttttcgtccttttgcttgatcatttccttgataacctgaacacccttatcctcaatctgtgccct

SEQ ID NO: 31658 - DNA, 826 bp, Zea Mays
acagtccacctattatgactttgttgggccaacccaaagatacatgtgggccgcctgatggctttgatggatggtcttctggggctcttgccccagtttcgccccagcaccaagaatctggtgctgggctgctggaatgggccagctcaagttcgccccatcctgctgaacatccagcctggaggactgccaatccctgaagaaatccctctagaagtatattcaagaaagagactcaaaaacaagcagagtcagatgatgatcggggtttcgttgcagagacgcctaccctgcctccatcaacccccctggctaactcagaagctgggacagtagcagacctccaacctgatgaagaaagaagagatgaagcaggaagaaatgtgtttttcatgaagatcaccaagcaaacatcaagcttactgccttgtccaagaactgaaatgcaaacattacccccatcttctccacctgctgtttttgtggcaagacgaagtcgccgagttgcaggtgtaggattggaattcgatgtgcaggacttggggagtagaaccatcaagaaagtcatgaaatccttgcaggtaatttcagaaaatgagggcattagtcagtaggccttggaggaatatgccagattgtttaagcaccccttgtcccataatgaggtggaggctctttcagctttgtttggctggagcattccagagtttagtaagggccttttctgcctgatagttagttgtgttagattatccgtcccctttgtaatgggccaggcccaatacctaagtctattaataccacacccaaccctgattagggttag

SEQ ID NO: 31659 - DNA, 373 bp, Zea Mays
gggacaagagaagccatgaggccgatccgcgaggagacctgggtcgattcgagatgtgtccggagggtcgaggcaagaggtgccccggcgcgaggtgcactgtggcgcgaagggaccagggactgaaaccgtaaggtgtcctaactcctaagcccaacccggcgagaacagtacctgcggtgctatagcatgtataatactcgcagctactatagcatggtactatagcacatgagcccaatttagtaaatagttaaaatagagattgcttaggagctaagattgagtaggtttaggaaataggattggtttgttaggagagtccaaatctataaggatttctcctctagtttgtttaggagccaagtccttt

SEQ ID NO: 31660 - DNA, 397 bp, Zea Mays
taactatgtagggtgaaaaatctagcgctggggatgagcttgggacactgttccgccctggccgctatacccacttgcctcacagtcggtccagataacttcgctggagttggccacctgccgctcgggtgccacgtgcctaagcgcaataccacgtcgcagtgactcgccttagcatgtccggtcatcgtcggtggtcttgccacggtgaagtgccacggtaaccctgcaccggtaactctcttcctctccggtcgccagcgcgcaattccaaaaacaagagccaccgccctcgggcactataaattaagcatgccatcagctctgttgggtcatcacgaagcaagagcacccgctcctacctccgattagccaccagagagttccaatttctttc

SEQ ID NO: 31661 - DNA, 281 bp, Zea Mays
ctagaagccatctgggttgatgacctctcttttcacctagatctagtaaatctttacctttgtgaatcgtgttgtggctttatcatccgaatctctggatccttcatcgattctgccctgttatctggttatctgctataacccgttctcaagcatcagatgttgatttgcctaaatctctcatttctggtcattctcatacccccttctccgaggatcatgacgcttgttttatcaacttatctctaaatggcatatccatgtggattaatggatgttgc

SEQ ID NO: 31662 - DNA, 731 bp, Zea Mays
agcaattgtagctagtatcttaccatatgcgttcaagcgaaatcttgagttctttaagagatcatatgttcaatattcgtttttattttgaaaataaatttaacacattcaaacaagctcaaaagtttcttgttgccataaactttgagtccgctttgaatgtcttctatattaatttcaaaataaaatctatttgtgaccatgcgctttattaaagaactttatatttcacttggcatgtatgtaaagttacatgataaaatactatggaccatgaatttagattctctccagcaacgtctcctaaatttcatcctccaagaaatattttatgtcatttacagtactccctaaaagatagcgttctctatattttcaccatctctagcataatcctctaaatttcatcctttacatctcatcatctacaacataccaactatattaacaaaacgttttttattgaccaactactattaaataaaggcaaaatcaacaatgcttaaaattgtttaacaatttacatcaagcacgcgaggtcgcaacgtcggagcaaggtttaatgaaaacacacatcaacaaaaatgtattgcatgctctgtggcgaagacaagagccacaccatgaaatcgtggcaaatcaccatacagaagaagtaggagctagtagctgcagaacaaaggaatcaaccaaaagaagtataccaccgcatctttgatagtcgtttagag

SEQ ID NO: 31663 - DNA, 416 bp, Zea Mays
ccatgctcgtcctcgccctaggctataaatctggccccgcgacctattctcctcaccccatcccagtaggaagcgccccgccagaaatagagagagggagaacggagaacctccaccgtcgaaccaggggaagtgtagcgccgccgtgggtggaaccgtggagtaccatcgctcgggctcttgggcagagaacttcgccgaaccccagtgatttgctcctggacatctcggatggggaaactaccttggctcgcccggatttcttgacggggttggtgccccgccgttgacccgctgtgctgtgtgggcaacatcgctactgccaccctatccaagtaagcccaaaccgtaatcagttcaatatgctccgtagaacgtgtattacctatcggcacagggaatcgtgctctagggcg

SEQ ID NO: 31664 - DNA, 531 bp, Zea Mays
ctgagattagggtgctgcaaaccgtgatgtcagatgctctgaatgactctgtgatggtacagtagcagaaatatccctgggttcagtccccctcgccgccggtgatccgcgtgcccggattcgtgctggttgccgtgattcgtgcctggcacacagtggatatccacggggaggtaaaagatctcgctggggagcatatgtggtcgcatgggaggcttatcaccgcgcctgtatccgttgcaacatggccagaccgccgggttgccgtggaaactccgatgacctcggttgtgccacgccgtggcttgttactgtgcggtagtaatcgtggcacacttaagagtacaacctttgagccattgctccggtgaacgccacgaatcctttgcgccagtactcttccccctctccggtcgccgcgcgtcttctccaaattagcctccaccgctcatgaatcctataaattgtgtgtgccatcagctccgctaggtagttgtgcatccagtgaaccagctctcacctccaatgatc

SEQ ID NO: 31665 - DNA, 397 bp, Zea Mays
tgatctaatctcatccacgcaaccacgatccaatggtccacattctttcccccagccagtccgtagagcacggtggcgctacccgcgagacaaggcggcagacagccgtaattggtcgaactgacgccccgatgagacaactagaccatggatgcgtctagttcgtgtgtaacgatgagccgaactggtttatgtggcgaagagtaggtcggccatggtgtgcggcggattccgcggcggtgatggactacatcgagcaattgaggtagcgtccggtgatcctagagctcaaggtgcttctaagcatttcccccaaggcctccactgcgccgagctggtcttcggggttggaacggcggttgaggcgagaaccgaccgtggtggtgtgagctccttc

SEQ ID NO: 31666 - DNA, 375 bp, Zea Mays
gtggccctccctacatgggtgggcaagcaagcgggtagaatggtggatacgtaggtcgatacataggtggatatgcaggtggtggacatgtatgtggtggacatgcatgtggtgaataatcaaaaggtgttgtccatggtgcccgtggtgtaggtggaactagctgtactaccttttgggctagtttggtcggtcgtgtttctttttcctgtctttctaaagttggtggatgaggtcgctttgttggacgatctataggagtggtcttcttattgacatatttagaaagaagctaatcaaaaataggacaagtactaataatctgactagatgctttggatgtgttttgtttccccgtacctatttctgatcatc

SEQ ID NO: 31667 - DNA, 355 bp, Zea Mays
tatgccatcttgtccatctgggtgtgtgtgcttgccaacacttccgttatctccccaaccttcttctcgattcccggcctccacctctaaaactcaccccgatcggtcatcagaccttgcacggtgagatccatctactccatggttgagtgcatcacatccatatgtcgtcacgtctccttgttaccctcatcgattttggcgattagctgcaccaacgaatcctccacccgtggacgtgccatctctctagccttggcttgaaacctggtgttgtacgcgtggtgaggatccagatcggctccgattaccaactgttaacaccacacaatcacacaatctcgcaaacactcac

SEQ ID NO: 31668 - DNA, 289 bp, Zea Mays
acggctaatgtcagacggagaaccctatgaggtgtactactaatgcttcctagctaaaagttgtgtacagatccagatcccggcgaggttgcctcccgaggattgttgacaacctttttcagaaacgctggtatccaacctcaacacatcaagcctgcatcccaggcgggggccaggtactaaggaggagtcaacaacatcgcacacaacaggaacaggcgttacacagataagtgctaaatgctgcttagaaggcaatatttatttctttacaaaaataggggaaggc

SEQ ID NO: 31669 - DNA, 298 bp, Zea Mays
cagggatactaccagccaagcgatatcaacgaggccaagcgcctcaaacaccgaagccgggacttcgcactcattgagggacagctttacaagaagggggtcagtcaacccatgcttaaatgcgtcaccgagaccgaaggcgtccagatcctgcgcgatgtccacagcggaacttgcggctctcacgcagggcccagggccctagctgccaaagtgattcgttaaggcttttactggtctgctatgatttgcgccgcgaatcgggtgacgaggtcctgcgaagcctgtcagaaatttt

SEQ ID NO: 31670 - DNA, 379 bp, Zea Mays
ggtatatgacgaagacggggaggaccgggaagcgaggtggaaggatctgacagacgaggaggaggacgagctggagtcgctgtgggagcaccaggatctggtagagcagctgaagctcgagctgaaaaaggttcggtcgtcggtcgggctgcccacgatcctcgaggagtcggacacaccaaaggctccggtggaggacctcaagccatggagtatggatgctaagttccttcgcgaggaccccatggacgagctgaacaagttctacaagagctacagggagaggatgaggaagttggacattttgtgctaccagaagatgtacgcaataggtatgcttaattaatttctgttcaacgagagttaccttatctctgat

SEQ ID NO: 31671 - DNA, 411 bp, Zea Mays
gttgggtttatcaagtggcatcagattttaggttgctcggtgagagatctccatcttccttgttttatttacctacaatccacttttgcccaaagatatatttagagtagaaattcacctaaaacattttgagcctttgctttactacttagtttttgacttgttgaattcacggttgctgcatttgggtcgagttgctggtctaaagttttcttaccgctagagttttgagttcgcgccaccttgtttcaatcaccagtttagacctcttgctgcaattcaaccaaaaagaagagaaagcaaaaggcgagtgcataaaaaagccgcactaatcagcaaaacaaaaaaagacatgtgcaaaaaaagagaaacaccagttctgaattttggtagataaaatatgtaagtgca

SEQ ID NO: 31672 - DNA, 299 bp, Zea Mays
tcatactttttcccctcttctttcttcttcgccattccccaaccgcgagaggtcggaaatgtctggttcgctagatattcttgtactaaatctctagtgctgatttgctcagccacaaccctgaactccacttcagctagctgacaaggagaccccaactgcatattgcataggggccaagtcatgccgaagttcagtctcaacggactcatcaccatgctcataagtttttcccttctcttctagtcagctttcacgtaaaaccactcgcttgtccatcctgtcagccatttggtgtg

SEQ ID NO: 31673 - DNA, 633 bp, Zea Mays
ctcgtggtcatgtgtggagcaaaacaaatttgatatgaaatatctacttcaaaagctttcggcagggcattataaaacacacaatgaaacatcacaacactagtacacaacaatataagagtcaaataattacctttgagggcatgaacacagtgtgactgtgcatccaacgatccatgatctatgcaattctggcgtgcattgcttggcacaggctgtgcttgaaaaacaagcacctgatgagcacagattgacttatggagactttgctgtgagttatgaaagtgttagttgacaacctattccctggtgggcaattcctctgtcagcattgcatatgtttcatcacttggtttgcatttcatctgttctaacatggatatcatgtcatggcacatatctgcatgacccttccttatgaagccatcaattataactttccatacaatttcatcggtattgtactctttccatctcgaacttctgaaaatttctttagccctatctgcttgtccctcagcagtaagcccagaaagcagatactggtaaaatattaagtttggtaaaaaaccatgtccaatcatggaacaaagcaatgcccaagcatcagaatacatccttaatttgcaaaag

SEQ ID NO: 31674 - DNA, 475 bp, Zea Mays
gtaaaacgttccctagtctgtcatggactgcgtgttggtttgtaatatccctaggggctcttatgtaagatagccacgacaaaggggtacgggcaaaccccagccgcccgatctgatcctaacggctaggattaggttttcgtttaaaacgaatcggtacgcactagcagtcgtaggatcgaagatatccggcccggatctgaagtcgtgaaggggtatctactcatttattcctgggcgcacatcgatggatcaacggcccaaaactacccatgccatgatgtaatctcccttgcccgttctagatccgatggtcataagcaattggggcgaattgctttccttatctctaatctcagtcgcccatcaggcaattgatggctgagggcgtctccctcgtttcagtcgagcagagaggcgctgccctgctccccgcgatggaggttcgccggcgcgtagtgatctaggattctag

SEQ ID NO: 31675 - DNA, 322 bp, Zea Mays
tgccagatgcagcacgacgtgcactttctcagtattgctcgttgttcagcggggtagctgatggccttgacctgaagtactaccctcaccgttcgaccggtagtgctggaggtgtgattgtctcgcctgttggtgagggcattcccatgctgaacagcatggtcaacttggtcgctgtgctcaacacagagttggaccacgcccttgacaagttgggcaaggttcgggcgaaggttgcggaattgcgtgctgaatgcgcggcacgccactatcttgatggtggttctcccgcccctgttgggattcagcacccttaccgttc

SEQ ID NO: 31676 - DNA, 300 bp, Zea Mays
gtaagctgcagcaaggcatgacgtccggggtgtccaaggcgacgatgccaggtagtagaagatgtggtggtggcaaaaacagcagcagtgtcaggcgacgaggacgaagaagaggtggcatgcgggagccgaagggtgtagagggggccggtgctgtcacatctgaggagggggcaccgagttgccgagtccttcacagtaagaccagaagagtcaaactcgacagaacaagaattatcagcggtaaaacggcgaatagaaagaagattgtggaccaaagaaggagcgacaagaacatcg

SEQ ID NO: 31677 - DNA, 505 bp, Zea Mays
taacttgaagataaaaccatgaaaatagaggagagaaatgaatattattcaatataaaataatattataactaaataatttcaccatacgttgatgtgaccaaattgcatggttaacacgaatttgaatttgcacttatgttgaattcaaaatttgaattcaaattaattataaataaataaaaacaaaaaaaaataaaagaaaaagagaaggggacttacctgggcctcggatcttacttttggcccatctgcagaaacacgcgcgcgcggcctagcagagcactgcgtgcgtggtgcgctgacacaacaggcccgctcgccagtgtcggtattctcctatgcatcttccaactcctccgctcaacagaagcgcaacgggatccgccgcgtataccggagaatctccgacacgtccggcctcaccgttgcatccgtgaccaattcatgctgataaatacctcacgctcttccgtgtacatgggtttccctcaactgcgaaccaa

SEQ ID NO: 31678 - DNA, 973 bp, Zea Mays
gattgtgattgttgataatcaagtatgttatattggaggtcttgatctgtgctttggtcgctacgatagtcctgagcacaaagtcgctgattctcctccagagatgtggccaggaaaggactactacaatcccaggtattttgttgttatcttctacccattcagatgtatggggcaaagtccctaaatgtcacttcatctctgtaaatagggaatctgaacccaattcctgggaggacaccatgaaagatgagctggaccgtgataaatatccccgcatgccttggcatgatgttcagtgtgctctctatggcccaccttgccgtgatgtagcgaggcattttgttcagcgctggaattatgcaaaggttgcttatatccttgtggtctgcttatcatagaaagcggtaaactaattgtttttttttctttcagaggaacaaagctctaaatgagcaagcaattcccttactgatgcctcattaccacatggtaattccacactacaagggtagaagcaaagaaacaaatgatgaggctgagggtaaacaatacaatgataaggatgttgatattggaaagccagtcttgacatcacgcacatcatgtcaggatgttccattgctcttacctcaagagcttgaacctcgtgaattatccagttcagatttaagggtgaatgatttagatattaaccattcagatcgtttaaacaagaagaactttaatcagcctttgctcaaccgaaaggcaaaactggattcttctcatcaggatttacctatgagaagttttgtagacaatctcagttcccttgagccatcatctgttagacgttttgattcgtcaaaagatgataggaatcacattgacaaaaaatggtgggaaatgcaggagcgaggcaaccaagttgcttcattacttgatattggacaagttggtccaagggtaacatgtcgttgtcaggtcagta

SEQ ID NO: 31679 - DNA, 307 bp, Zea Mays
attgcaaagtccttcgatgatgattatattgtatatcttgtggatgacacaccaagtaccattgaagagaaatattcctctcctgatgttgacttttggaaggaagcaataaggagtgagatggattctattatgtctaatgaaacttgggaggtcgttgagcgtccttatgggtgtaagtctgttgggagtaaatgggtgttcaagaaaatgcttaggcctgatggtactatggaaagttacaaggggatgcttgtaattaaaggctattcacagaaggaatgtgaggatttctttgatacttatt

SEQ ID NO: 31680 - DNA, 481 bp, Zea Mays
ggagttgtcaagcttggcataccaggcacatggtgcttgtcgaagctcgtacagtgccttgatcaagtgttgcaatttgctttcgtgccccttaagaataaacccgggggttacttgacgaagacccgttcttgcagctcgtcgttgaggaaggccaatttaacatccatgtgatgaacaaaccagccttcgtttgcaacatatgcgagtagaagccacactgattctaggcatgccgccatcgcgaagacttcgtcgaaatcgatgccttgatgttgaacgtagcctttcgtgactagacgggccttgtgcttgacgatgaaaccgactgcatccttcttcatattgaagacccatttgagcccaatggctcgagtcctcggtggggggtcgatcagctcccatgccgcgtttgcctcgattgctgtcattttgtcgagcatggcgtggtgccaacactcatgttgctgtgcctcaacaa

SEQ ID NO: 31681 - DNA, 393 bp, Zea Mays
ataataatcaaaaatctatatgttgaaatacatgttataagtttgtgttaacacatatttctttattttatgtgattactgtctagtttgcatatgtcgggaagaaatcgtgagagtcgacacttttagttctatactacaaacttggagcgttttcttgccctttgtggagatagccgacccaggatataaatcatgtggtttatattatatttgaaaggaaagttgtttatatggattacaagtgttgtatatgtatgaaatattgttgcttctgcttctgattagtgttctcaatggtatgacgtaaaatcaatgctagccactctttctttcttctctgacgcacccactttccacatcgtaggaagaggaaacacaagaaaaaaattc

SEQ ID NO: 31682 - DNA, 323 bp, Zea Mays
actcattataaccctagcccatgggaatttccttccacctaaataaattggatcataatggtagtccttccattcggtgccaccaagttgtataccatacggattcgaatctaaaatgtgtatacaccgatggtgtagattgatcacatacagtgtccaatgtcccctactaagcataggtaccaatatatgttgatgagaaaagtaaatataggttacatgttgctgttacaatgtcatgataattaaaatgtacagttaatgtgctgatgaaactgggaacaaaatgttaatgagactcaccgacttgcatttatccagat

SEQ ID NO: 31683 - DNA, 445 bp, Zea Mays
ggtatgactctatatgggtgattgtggacaggctaactaaagtagcccactttatcccagtgaagaccacatattcaggatagcagagttatacatggctcagatagtttgtctacacggagtgcctaagaagatcgtgtcagactgaggatcttagtttacttctcggttttggtagaagttgcatgaatgcttggatacaagactgaatttcagctcggcctaccatcctcaaactgatggacagaccaagagaaccaaccaagtactcgaagatatgctaagagcatgtgctcttaaacatggtggcagttgggataagagtttaccatatgtggagttctcttacaataataattaccaggccagtttgaagatgtccccatttgaggctttatatggcagaaaatgcaagactccttttatattgggatcaaactggtga

SEQ ID NO: 31684 - DNA, 352 bp, Zea Mays
cttggagtcaggcgctggggcattcttggggccattcaccgagttggagtaagtaggtcctgatgccttcaactgggggtagttattcttggagtgactggggtctccgtagtgccaacaggcgttagctggtggttggttggttgtgactgagggggcctgaaaggagctctgactctgctaactgaaacgtgatggagtgggttctattggcttattgaagcttggtcccttgggtggaaacccaaaggatcgagttctctggtgccggtcttgctgctgagctcggaggacttggaatttcctcttgaggtgacctttttcttcttcccttgccctttccacttgtatg

SEQ ID NO: 31685 - DNA, 341 bp, Zea Mays
tagaagaatgaccaggtaacacatgtgacaatatgtcagcaccaaacaattccatcaatatgttggtcaacttttcaagcactgtgccatgtttcatgcccggagaatatacgagtcttttgcttggtcttgatcaagaagcctcaactgcacgaaaactacattttgatgaaccagtaaatgatacaacatttgggaatagagaagttttgttaccagttgagaatattccagttactgttattgttcgccatatataaattagaaaattgtgatctcctttattaccagtcgatcacagatcaacaggcttcgagtatgctccagatacaaccaattct

SEQ ID NO: 31686 - DNA, 483 bp, Zea Mays
tcaaatgcatattaaaatactgaagctgaaatccgtttaattcggtccgttgtttcttgcctcgatctaaatctttaaaagtaaattaacggtacgaattcatcagagtccggagtatttatcacatcaagtcccgtctaaaaattgaagtcgatctcgttttggtccaatctatttatacctctgttaaaccttaatccaagcgcccaatatattcataggattttgtaaacgaggtagagaaaaagacatttctcttttatcctctacatatctatctacttctatttttttccaacgtgagctgattttcttgatttttaaaaatatctcaccgtcgctgtgtacttcagaaatatccacggccgaactgactttcttatcccatcgctatctcttctcccattcagatttttcacagccgtgctctggacttctctttattccacgcgggccctcatcctctccctccctggaaaatat

SEQ ID NO: 31687 - DNA, 514 bp, Zea Mays
agacctatgcctacacatgatagaagttgatgtagaggggataatggaagacgaagttgtattgaagacatccctaaacctcaccacgagccaactcagcgggacccaccaagcaccactacgtctatatcacaatagctacaaaaacccatatggcgaatggacaagacgagacaacatacgaggggtacgacgacgcacgacctagcaaacgacattgtaagggctacgccacccgggagcaggaggccgaactccacccgggcataatataagatctcattgtaaagtctactcttgagctataaaagggcaagaccacccccatcttcaagaacaatgacacacaagcactcaactgtaacacgctccaagcaatactacgatcagcactacaatggactagggcgcaagcctgaaccagtataaacccatgtctcagatccaccttcgagcaccctatggctcaccatttggagtgagtctgcgctagcacccctgtcgaacataattc

SEQ ID NO: 31688 - DNA, 1169 bp, Zea Mays
gattgagtagaggagcgcagggaatagggcatgcagcgtggcggctgaggaacacgatcaccagggcgcgtgtgggtcgccattgtgatcaagcaaccgcccacgcaggtgcgacttcttttgataaaaaaccctattacaatctgaggcacccttatagctccggggcctaacaacttaggagattattaagagataagctccagagaacaacttaggagattattaaggagataagctccagggaggataagcctcctaaaacttctctaacactcagccaccatctaacaaatagctgggtctaattattctggcgcctggcatattgccggcccacaaaagagtctataacagagttccaaggactcacttgacagatactgagaatggaccccccaaggaggcaaggacgttcaagcaggtgacatcatgcaagcatcagcaaagcagaagtgaaacgtacaagtagaactggagcagtagccaaaattctcgcagaggaaacttgagcaagcctctccggctctcccacaagtccagagcccagctgcccacgatgaagccagaacagagtatagtacggaacaatggaagtaggagtatcagtgaaatccctgtcacgacttcgaatgcgtagccatgttcccgaagcacatcaatgcatagatcaatgaaaaacaaccaccaacacctagggaagcgaaccgaaaaacagcagtcagtgtcagtgtacctcttgcacagagcacagttgtgctcccatcactctctgcctctggctccacatgactctcatgcagccatgcacgggctcccgatcccgtagcaggatccgtcagtcgtcactcgtcagtcatcacgaaccaccatgaacggtgcacggatcgatccctaccattatcacaaggtcctctcaaaaaatggcagctggcagagccatcaagccagacctgcggtgcagtgcagaccatgaaacggacgcaacacgggtgacggaccggtgctatcaagccaggaacgctccgttgccgtgggccggggacgactgcggctcgggcgagttgcactccagcagcacgctgcggctgcagtgcgacctggacgtgctgctcgacgacggcagccaagaccgcgccgcgtcgccgctgaactggatcacgccgtcg

SEQ ID NO: 31689 - DNA, 407 bp, Zea Mays
cgccatgaaccacggcgaggcactcacaacttcattagtgagcacgattgaagccaaaattcacactgcctcctcctcctctccctaaattaagtgtacacggtgagtcagtagcaccttgcgatcgtgtagccccaatctcacctcctaatttcaccagagcccgtcgcggcaccaaattttccccttctcatcggcggtgagcagaatcctctgcgctccgtggccagccgatcccaggtccactcctgctctttttaattgtgttttagcacccgtgcatactcgtgatactcatcagctcaaccctttacgcttaaccatactcaatcaaccggaacgcttgaaattgtatccggaatccgccgtcgccatggtcgggctaagccggggtcataataacccaa

SEQ ID NO: 31690 - DNA, 312 bp, Zea Mays
atttgaaggaagagcaaaaatctgcaactttgtggacctttagacttggccttgggcccactcgtcatagacatagggaggtcttcttcttcctctagaacatgcacgcacagggtagatttgccgctgctgcatgtggctgtggctactgctcatccgggcctcgacgggaggtgcagggggcagggagaagtggatcccaggctgccggagttgaggaaggcaagctcagggggctaagtgccatggaggctagcggccatgggggctttgcgtctcggcgtccatggagggagaagcagagaggattgg

SEQ ID NO: 31691 - DNA, 332 bp, Zea Mays
cgccaggaacaactcttgcagaccaatgagggcagacaaagcaggagaaggaactccactactttcaccactggcgacgtactgccgactgttcttccgagtcagagggacctcatcctcttcctccccgtcgtcctcatcagcaacacagacaacacacccattggggtcagcagcaggtggagcacacccattggggtcagcagcaggtggagcagacccattggggtcagcagctggtggagcaccctcattaaggtcagcgtcagtaagctcaggcacgggaacttcctcagcagcaggagccgaaggaccagcatcctgatccaaac

SEQ ID NO: 31692 - DNA, 317 bp, Zea Mays
attctttccaagtttgcaatcatggtccgagataactcttttgcacaaagatggcagaagaaataggtcaactctgcaagcactagccagacatgcttagggacataacctcaaaccatcgctggaagaattcattcaatccatatgtggaagtcatgactcttcatccctaagactcacaaagtagataagttcacccccactcaggttagttgcatacccatcaaggaacattaatatcttgatccattgtagtacttccttcctctaggtgctgctcaagatgaaatcagccttaggccttctccatgtctttc

SEQ ID NO: 31693 - DNA, 322 bp, Zea Mays
gatctcagtggtggtgtcagtgggtccgagactccgagtgcaattaggacttggggcttaagcagtgaggtagcacggtggtgatagttcggtcgtgtgatgttggggagctgctccgttgaaacttgcaatgtacttcaatcagttgttgcttactcggcattgaccccccggaagatcactagcagaatagttgattgctgacatgttggtggtggggcgatgcattattgctaatgcttctatgttgcgattaccgattagctacttgtagttcctactgcttccattatgctttgacaaattcgaaaaatatcaactg

SEQ ID NO: 31694 - DNA, 463 bp, Zea Mays
ggcgaccgaattgggggaaaagccaaattcaggcgctgtgttggctaatcggagatgagggttggtgctctggctttgtaacaacctagcggagctagctgtgcactcaatttatattatccgcgagcggtggctccgaatttggaagaggaaaggtggcgggcgaagagagggggtgagtcaccgacgcgagctaccgtggtgttcactggggcaacgttacaggcgatggacagactacctatagtggtttactgcgatgtggtaacgcttctaagtatgtggtgtccgagcggcaagcagcagaatcctgcgaggccatcttgatcggccacagggcaagtgggtacgacggccagctcacggcctcatccgcggtcaagatcttttcaccgccgaccgttatctgcacctagagcgcacgaatcacagcgccgacgatgatcgtggtgcacgcccaccg

SEQ ID NO: 31695 - DNA, 396 bp, Zea Mays
tttgcatctataaaatcaccatttaaaactataccttaattttaagttcaaataaacctcagtttaactacctaatttaacgaaaacatgcgttacgaccaaataatattactaacatgtagttgaggttattacgaagttgctacgactgaaacgagtcgagacggactcgcagcgcaacatatatattgaataactagtgtttcttgaatttagactacgtggcacgattctattggtggaaggctaaccatacgatggaccacatgaaaaacggtcatagaagatgtgggatccattgtgagggctggtttctaggatctcgtggatgcatgtgggtggggccaggcaatttgcaagcacatacggaggtgtcgtttgcatcacatgcaaggg

SEQ ID NO: 31696 - DNA, 409 bp, Zea Mays
atcaggagcatccaaggatactgaaatgaggactcagaggacatgaacggacctgagatgcgctggccatggcaaggtcaaatcgctcggtgttcttgagtgttttgggggaaatcccaaattggggagttctaggggatgattcgaggcactggttgcttcactggttgcacaactacctagcagagcaggcggggtcatcaatttatagcaggcttgagcggtggcgtccaatttcacgacgatgcgctggcggccggagaggaagaaggtcactggcgctcggggttagtggctttcaccgtggcagccctccgtcgatcaccgggcatgcatgacatgtttcactgcgacgtggtctaacactttagcacgtggcgcacagcagtgagcgtccaacggcggcgag

SEQ ID NO: 31697 - DNA, 376 bp, Zea Mays
acttgtattactctgttaaacgacttagcttagttgtagagtactatggttatttgaatgatatccattgaataccaatagaaatatctcggctggccaggagagtactatggtcactcatcgccattactcggctgacctgcctgctacaaggttagtgaaagcagcagtgttatcctatgttctgaattgatataaccaatagaaatgattttgttcgtgtttttgttttccagaagtaaaaggtatgatttgaattcgtgaagtgaccaggagacattacttgtattgtatattagccatatatttctcacgttatcgaactgatttttttggtttcacggtatggctggggtactaataaagtgaatgtgag

SEQ ID NO: 31698 - DNA, 315 bp, Zea Mays
gttttaactaagttcaccctacactaaataaagaatgatagaccaacccaaccaatagagtcttgatggattgcatgatctgcctatccccacctaacatcaaacaaacttttgacctacatcatgtagtctatctcatccatatctaaaccatattccctagcccgataatatgcactaactcctaatcaatgagacaagaccgaagaagatgatcaactttatcaagaaaggatgagcaccaactcaagtcttcaaggatcaagtgaggtcaccaagatgagtcaagatccacaatcttggatggagtctttc

SEQ ID NO: 31699 - DNA, 285 bp, Zea Mays
cgctagcattagttatctacacgttatcgacgtccaatattaacacctttaaaaagacaacaacattttatttatttacgtaacacaactatgacgttacaggtatgcgcattttatttgtttggacacggtttttcattagttctcctattgatcacgcacaagcatcatcgacaacacaaattcaatagaggacataagcgtcaatgtctaaggaactcatatattgcaatcaattagagaagaaacatataaaacaagacacacatgtcatctcgagcctag

SEQ ID NO: 31700 - DNA, 274 bp, Zea Mays
ccaaatttaggcaccacagccggttcaatgtaacgcggccggtgggtcagaaccttcatctttttgcccttcggctcagctgaaatggccgaagcggcagtcttcctctttttctctttccctcgtagcggataatggtaatcagggtatacgaagccaatagcatcaaataccctgtttaatcttttcttgccccgacctccaaaggctgcggacagagcattatcttcggccttggagtatgctccaagtagctcatcactggtagcttcaa

SEQ ID NO: 31701 - DNA, 336 bp, Zea Mays
gtggtctggtgtcgaggagggagtcgagggcttccttgtgtgggcgcgtgcgcggtaacgtcaacctgggcgatcgagggccactggggtacccgtaattgctcgtcgtcgtgctcatcggacgacggatccgcgcagtgcgtgggtagtgatcttcttcgcctctatcctttggtgagtattgcccacccatttcgttatagctctgcgagtgtgtagcaacaatcggggagtatttgggtgcgggactgcgcctgggcgggtcaccggagtgttgccgccctcgctctacgcgccgccgtggcccagtgctggaggtaggagagggatcagggg

SEQ ID NO: 31702 - DNA, 332 bp, Zea Mays
cgatgatgcgacggtagatggcgacgacgaggcaaaaggcggtggcagcaagcgacagccattgtcgcgttgcgacggcacgatgagacccttgtgagagagtgagggcgggtggtgctgtgatgccaaggtggaatcccactaatagcctacccatccgccggtgcggactaaaaggcaaagtagctgtactgcgtgcaggataccgacatggtgatgagcaccacgactcgggtggggtgtgggctgagtagtgaagtgaagcaccgagaaaaagttagatcaaagtctagttttcattaaatttagtgcaacctactatataaaagttt

SEQ ID NO: 31703 - DNA, 688 bp, Zea Mays
ctcgggaggcgccaggtaggcgggggggaatactgttcttgtcactgctgagctgtgtgagagagaggcaatgagtagagagagagagagagagagagagagaggaggagggaggccgcccgcatttggagatggtggagagctcagctctgaatgaattcccttccctagctagtcaggcaggagggtggtccagtggtatcccgacgtgtagatctgatccgcccggaggccgttttcaggaaaagacaacaaaaacaaatacgcaaggatccattccattcccaaacggtggcgctgatatcaagccgtttacccattcacatcaccatattcaaactctaccatacagacagtaacacaagcagtagtatagtacctacaaatcatccatcgactgtttgccgtaacacacaggcagtagtgtagccgctgagcgaagcgcgctcgtcagttcggttcctccgacccctccgctagctacttgcatcgtgttatatcgaccatatatatatactccaaaattagttcaattattttaactattaaactgccatagtcgcagctgtgcagcggcttcttgcagaagcgaacgtccatagatcgaccatcaacgcaccatacaaaaaaaaataataaacccgtcgggcttgagagaggatccgcgtgcgcttttcgcaccctccag

SEQ ID NO: 31704 - DNA, 1520 bp, Zea Mays
cgctgcacctgactcgaacccacaccattgccaactctagaaagtgactaaggcttctgccaaaagtcacgatatgccgtttgaccaaggccgtgaggcgaaggaaaccataaaaaaaaccaagcaaactagaaaatgcgtgaatcaacgaacacgtaaactaccccataacatcagaagggatttgccaaaaaaaagtttaagaaacgtttgaaatcatttcgaatttatgtctcaagaactcacggttgtcttaaatcttatgcttgttcaaatattgtagacttcaatgtacttaaaggaagcgcaaaattctagtaacaagctgacgtgcccttactaaatttggttggagaaggatccttaatggcctctaggtaagggttgacttttggggcaacacctcacttttgattgaggtagtcttggctctcaaagataagagaatgtcttttgtggcatcttttgcgccaatgaaacaacattcataacatccatagagctccggattctctgaacattcaactgatctttcatcttctcaataaacttcttaaacttcatcgtgtgcatgtgctccatccgcatcatcctcgtcaccatctacttcctctttggcctctttctccactgggtctgcttctttttctttattatctgttcgctccttgatttcttcatcttcttcgatttctctgtcttctttatctacttcaggatatcaatcctctgataggtaagtaaaaaaagatgagagccttcatctcctcccctctctgcaaattcatgcaatttcttacattgctcccttctcccttatcgttttctcgaccgcttgctgcctgctttaagcctttcagagaatttcattctattataacagtcgtctgaatcctcaatcattggaggattctcctcatctacacctttagtacaagcatctcgtagaataatcctgatctctctgaaaactgctattgatgttcttacgttaacaccttcaagatcttctatccatggagtagctaacccagcaagtatgtttttatatttttcatgctctttttttcaataatacccatattctcggacccagaatgagttttttctatttagaactgacccggatgagttttcgactatgacatccaatgtaggctggtcagaagtcaaaaatgatctgcaaactgcattgtagacacattggatacgtgctgtctcagaaatatgaactacgaagattccaatagcacgtttgatatccctggacttttttcttggcaattgtatagactctcaaacgaatctcttagagcatcagggcccatcctagtttgcccaacgtccgtatctggattgagaaacctatagttctctgcaatatatatatatatatatatatatatataacaatgacatcttatagcatttaactttctatttcaaatgttccatacattccacccctccaacccttaaaatacaggtttcttcccgccagtaacaaagtaatatatcgc

SEQ ID NO: 31705 - DNA, 342 bp, Zea Mays
gcggatatttattcttgattgtcacttgattcaaagcccgataatccacacataacctcttgcttttatccttcttctccacaaacaacactggggaagcccaaggcaacctgctaggcctaatgaaacccttagctagcagatcatccaattcccgcttcaattcaacctgctcctttggagccatccgatacgaggccttatgaataggctgcgtacccgaaatcagcttgatttcaaaagctgcatcgcgctccggaggaatgcctggaagctctgctggaaatatgtcggcatagtcacacaccacccggatgtcttgcacccgcaaggtagcctcac

SEQ ID NO: 31706 - DNA, 390 bp, Zea Mays
caagccaacaacaagcaccaaggggcagagggtagaacaatagcatcacgcaaacataaagacaacaactaagaaacatcaataagataagagcatacaacatgtagtagatctaggcttccggcaacatcaagcatgacaatcaaaggcaaagaaagaagatcgaggactgtgaaggtaagaagtagtgaagtacactcaccgatggaggatgagctcaaaactagagaggcaatgagggagcataaggcttggtgtaatggtgtgcttgtgcctctcccttgatcctattttgtgtgttgtgtataaccctattagactgagaagccagaaacccagcccaatttttctctcctaagcccacttgagaatcctagagtggtcgctcca

SEQ ID NO: 31707 - DNA, 426 bp, Zea Mays
gcaggtcatagtcagctatgttggcaccactgttagcaaacgtgtccgctagtttcctcgaaagcaatgtaaggaattgctcatgtggagctgtgtagcgtggattgccaagggcctctctaagtccacggtgtatgtcatcggtgaagtagacccaatatttgtcaaacaaagcacgaacattgcaaacaggacagtgaatgacaatggtaacgaacagttgccgaagctgaaacgccgaggcagagactattgcctcatcaaatagaaggttccactcgttgtcaccttcgagtaaaccacgtgcttcgcacgcctctctgaacgtattgtacacaatatcctggaaggttcttacatcaacaaagctcgttgcaccggaaacaaacatcaagagcatgcgtagatagtatagctccccagctg

SEQ ID NO: 31708 - DNA, 306 bp, Zea Mays
gttttagaattttccaaaaattcatttgaactcaaattcctttaaagataggttctgacgattattctattacttgcaaattgtgtgaagggctccgataccagctctcacaacccaaccaagttatcgggcccacgtacaccaatcctttccctcaaggcctcggatagatatgtaagtggatcagataacttactcgaggtgccgagtttcgatgaactcgttcatttccaaggaccattcacgcaaagttgcaaatattacaataaccaatccagaacatagactttaaaaaaataggagttg

SEQ ID NO: 31709 - DNA, 331 bp, Zea Mays
caaatatttgatttgtatgagtaccctgctgagaagaaggcaaagttggcaacccttgaattcaaaggttatgccatcacatggtagaatcaaatccgtgcagaatatcatcgtgtgggataggatggtatcacttgggaagacatgaaaagggaaatgagatgccattttgttcctgcatattattcacgtgacttacatttgcggctcaaacgccttgtgcaaggtactcgtagtgttgatgaatattttcaagaaatggagatgtgcctactccgtacgggaattactgaggatgaggaatctacaatggctcgattcttggttggcc

SEQ ID NO: 31710 - DNA, 341 bp, Zea Mays
ccaaaccgaaacgctggatccgatctacgccgatgaatccacatccaacggacgacactaaccagaactcctcccagctggccccgacggcgccactactacccacggtggaggatcaccggagctagctccgatccggtgcattgatggcctagctgccgtgccaacaacggcaaagcgaagcgagccccatggcgaactcgtgagtgacgcgtccaccggtgataggaacgaatccgcggccgaccacggcggagactgactccacaacggcggcggaacgcccgagccaaatccccgcaaccaatcatccccctaagactaatcttgggtgtgccagt

SEQ ID NO: 31711 - DNA, 633 bp, Zea Mays
gtttcatatgctaaaatgccataccgaaggggtatgatcgcaccacgaccgcccgatctaagatctacgctgcagattagagccacattacactgaaccggtatgcaatctgagccacgagatcggacatcgacggtttggatttaaaacgtttggatcacttcgcggctgtccatttacgatctaagggctaggatccgatccagcgaagggttacgcgttgatctaatctacaccgtccgtaagcgaaccaacggtgcgcaccttatcttctacccccaacgcgacagcccaggaacacggcgtcgcgacgagtcagacggtggagtcctcgccggtgactacccaacccacggaatcaacgaaacatgctagctattacctagtgcaatcgaaagaggtgaaagaggcgaacgcaaccgtccaggactcaccagtgattatgtagcgcagtacgctgcccacggcgtgatgcggatctgcagtgccggcgagcaatcaccgatggcgtagccaatttgatgccgagctctaccccaggtaagcttccaccgcgtcaactgatgcccctgaatcccttcccgaagcccgggcgacgtcaacggcacacggtgccgacgacggatcttttcc

SEQ ID NO: 31712 - DNA, 453 bp, Zea Mays
cgtggattcacgccgccgcagtgattcgtgctcggtgtagttggataacgcagagggagtaagaaatatcaccagtggatgaactccggccactgttcattccggccgccgtgtctgcttagctcacattcgcttcggatctcccctcgctggagttagacacctcgcagccttgcgccacatgcctcgtcactttaaccacaccgccgtgactcgtgttagcccatccagtgatcaccggtgaggttgccacggtaatggccaccaatcgtgtgcgccagtgcaactcctctccgaccgccaccgcgcaagttcaaattcaccggccaccactcaagagccctataaattgagcacaccctcggctccgttgggtattccagcatccaatccacccgctcgtgcctccaattactcactagagcccacgaattgctcagttcccccaaatct

SEQ ID NO: 31713 - DNA, 553 bp, Zea Mays
ggcacatggaatttatggtgacatagaagaaagagaaatagagagagaagagaagtcgactgcttgctagtagccatcagaaagtggggttgctcatgaacttcattcaaatcattttgtgagaggaagaggtgaaagaagtgttaaatgtataacttatattatgagagatttattatatgactagacttttatttggttatatgtgacatcataaaacccattatgagccatattattaaccttgctctaatgcttccgcccgtgtctacatgattgatgcatgtatgatatagtggtctcgagcagtgtgatgtttgagttatggcgacagtgtgtctgttagactctaattacgcatatcatatttaatgtatgaaaaccttatctgaagcaccagcgttatgagaccgttaggagtagatttttgacgtggcatcctatctttggggttgtcatgcctttggtgggggacaactatatttctttgacttgcaattgccttttatattttatccgctataatgttgtctccatcattcttacatatccg

SEQ ID NO: 31714 - DNA, 497 bp, Zea Mays
gccttgattttttctgggttaatgccccggtatgaaaccaggaaacccagcagctttcctgcgaaaacgccgaagatgcatttctccgggttcagtttggtgcgggttgcccgcagcttgtcgaagaccagggttagatcttctactacagtcgacccccttctagtcttgaccacgatgtcatcgacgtaaacttccaccttgtcccggatcaggtccccaaaggtcttactcatcgcccgaacaaatgttggcagggcatttttcagaccataaggcatcacaacataacagtacaacccatctaccgttacaaaagcagtgtgcttcctatcttccctagacatccggatttgatgaaaaccggagtaggcatctaggaaagacaaaaagtcacaccctgaggtagagtccacgatctgatctatacgtggaagtgggtacgggtccttggggcatgccttattcaggctggtgtagtcgatgcacatccgaag

SEQ ID NO: 31715 - DNA, 366 bp, Zea Mays
attgaggattaatctggttttgggatttcctgaattcagtatggtcaaattccgcaaacaaattggagtactctggtgaagatcacaggcattaggggaagatggatgcaatgggagcactgcctcctgcttcatactggaggagccttttaaggggagttgagtggccggagtggcagtagtgggaagctatgcggttggttcggtgcaaggctacccgactgctccttttgtttgtgttgagcttgtggattagtggactgaaaaacgatagagatggcgtggatcatggaacaacgcggttgagaggtgagagaaataggagtttttcataggaagaggcgaagggaggtggcattggtttcc

SEQ ID NO: 31716 - DNA, 274 bp, Zea Mays
gccgtgccaagctgccccaagcgccatctctgggtaagtaaccttcccccacccttcttctacaccaattcggtctcaccgttggtaatttcagattgccagagtcgcccctcgtcaggacgccgtgtcctcacaacatccggccattacagtccctccctgagcccaaacctaggtgtagagcactcctaccctctccccgaagcccatgttagcctcagcgcgccggattattccccaccgcggcgggtattgctcgccggagtgacctcta

SEQ ID NO: 31717 - DNA, 555 bp, Zea Mays
cttgaactgaagtactaccctcgccattcgaccggcagtgttgaaggtgtgattgtctcgccagtaggtgagggcaatcccaggctgagcagcatggtcaacctggccatcgtgctcaacatagagttggaccacgcccttgacgagttgggcaaggttcgggcggaggttgcggaattgcgtgctgaatgcacagcacgccactatcttgatggtggttctcccgcccctgtagggattcaacacccttaccgttcaccgtcccatggtcgcttcgactatggtaccccagactgcaggacccgcatagatttagatccatagatcgatggagttggagtctgtaataatgtttaattcagtgtcatagtctagttagtcttagttagagttagtttgtttatcttatgttggatgcttgttatgatggacatgtaatgaagttggatctttgtaatgattgtcatcaagttgtgggtatcccctacaacttggtgtagttattaataaagtcagttatttagttgggtaatccatgtgtttccactttcctct

SEQ ID NO: 31718 - DNA, 476 bp, Zea Mays
ctgctggcgaagacttctatgaaatctgtattcttcacacagaatttgcataggtaccatataatctgtattccataggtaatattccttaatgacgccctgcacgatacttggtggcttttttggtacaaaaagattatattattcaatgcagtgtgtatagcagggtgagtcataatgaatatgggtaattccacgttagctaaaaacatacattttactatgtgcaggtaaaaaggaaaacctgttgctgtagggattctccagcaaggtgggcggtggaggagatatgccattgggataaaggagttatccgcagcagttgttgttcatgtctcgctaattgtgttgcttgcttttgtttgttttagtggaagaagagttttgtaggtgccattgaatagttaggactattttcagttatataaaatcaaagaaaattgcaagttaattcacatatatgtaataaagcttct

SEQ ID NO: 31719 - DNA, 357 bp, Zea Mays
gggatcactccaatcggcgtcgtcatgctcctcctccacaaagatggtatgtcccatctgacctagacctgcaagctcaaagacatgtgatggataaggtgcaacctcatcgaatgtaacctcacaagtctccatgttgtggttagtctccaggttaagaaaatgataagcacgagaaagtaacgcataactcaattttgtccaaattgccatgtttcaacacaaagcacctaacgccaaacaccctaaaatggctaaccttaggtggccatccaagacgcaactcatatgaagtcttgttcaagaaagctcgaagaaagatgcggttcgacacatggcagacaatgttgatcactt

SEQ ID NO: 31720 - DNA, 322 bp, Zea Mays
cgaaggaccaagtctcccactgcgaaggatcgatgtcgtatggccttatcatgatagcgcctcagggtttgctggtacctagctaactgaattactctattcaatcgttcttcctccaatatatcaatatcctccagtctagtagcttctgcctcagctatgttttcaaagatcagccttggtgccccaaacctgagatcagcaggtagtactgcctccaaaccatagaccatgaagaagggagtgtttccatgcaaagctcggctaggttgagttcttaagctccaaaccacatacggtaactctctgatccacttccctg

SEQ ID NO: 31721 - DNA, 312 bp, Zea Mays
gcgagactaccgtcgctccatccgggggcaacctgttcgtgtctgggcgctggtatgttcctagctgagtagatcgacgttatcttcacgttaggcgaattcgatccgtgcttcgtcgtggctgtatgcgcggcgttcgtcggggctgtgcgctaatggagttgcgacgccgcgtagtcgtcgaggtgaagaagaaggttcgtggccgttggatcagtggggaggctgcggtgtttgtgcctcgggccgttgatgttaggaggagcggccaggattaacttaaggaaacaccatgccctaatttctatccgg

SEQ ID NO: 31722 - DNA, 664 bp, Zea Mays
gcggacctggagacggcggtccatggtgtggtgactcacggcaccgcggaaaccgatttgagggaaatcgcgattgctctggctatggtgagtaatcggaggcgaggaacgatgcactgggtgcgtaacaagctaatggagcacgctgagcgctcaatttatagtgatcaacagcggtggcgcccaatttggggaagacacgctggcggccgaagagaagggggaagtcaccggcgagcgctatcgtggctttcactgaggcaaagcttcaggcaatggacgggcttcctattacggttcactgcgacgtggtaacgctcctaagcacgtggcacggctatgaaggcggcgaactccggggaggacacctcggttaatcatacagcaagtgggtacgatgaatagcccggtgatagggtccgagctcatcccagcgccaagatcttttaccccgagtcattatccgtgcgccaccgggcacgaatcgcagcgtcgacgaggatcgtggcgcagggtcatcagcggtgagatacactgaacccgcgatctttttttaggtaactgtaccatgggattctcatctgtgcgcctgacagaccaaattgaagggcttcattctctaatttttatgtgacaactcactgatccgtttgtaacaaagttg

SEQ ID NO: 31723 - DNA, 602 bp, Zea Mays
cgggaatccgtgttgacatcggattccgtcagatgagcttcgatgtcggcgcggagagtcacgatgcgtcgatcggaatcgatcgcctgggattccaaggcgccgacccgagattcccacttggtgtcgaaggactggaaccgcttatccagttcggtaagcagcgcccgggtctgatgctccaacgcaagcgtgagtgcagcatctggggtagtagtcgaaggagagtgagccatggatagaagccgaggaacgacggaatttgataccaattgttaggggatactggaggaaggggagagacagaggaaggagaggaacacgagagagagaaggtgaggaatttagtttaggtttttcttcttcgatacccttctcactgtccaggctggttcaaatacaactcacccaattcagaatacgtaatactgcctcatacgtgtacggtatacacacgtacacgtatggtacgccacacatctagacccactctggccctcggacgcggctgttgacgtgccgtttgcgtttgcctcgcacgcctgtgtcttgagtctgaatgtgatcttcttctccctctggcaaggctgaggtagtatctg

SEQ ID NO: 31724 - DNA, 520 bp, Zea Mays
cccaatcctcgcgccggcccatttacttctcatctgcgcaagcccactccctccccttttcttttctttcgcgctagctgacaggtgggaccccagcttagtctcttcaacgcgacgcgaactcatctctggtcgcctgaaccgtggggtcagctggtcagggtgttcttcctcctctgtgacgaattccgccccgctccaccattgccatcgccgtgtggacccatgccgcatgcacctctgctcaatccaccgcaccctcaccaaccactgttgggtgggaccagagcgtcagctctttcccctccactgaaaccaaacaaagccgaagcagccaccaaaacggaatccgcagaatcaccggtaaatcgagcaggatccggaaatgatttgggggaaatcggccgggcggatttctcgtgcaaatccaaacaacttgcgcctggattctctctgtcgcggtctataattgcgagccctcgcaacctcctccctcctcgaaccgagacaccgaaactcc

SEQ ID NO: 31725 - DNA, 359 bp, Zea Mays
agaatagctcaacatgccaaatagtttccacatttgcatagaaaaaaaagctacagattcagctacttgtattcgttgggcgaaatctactctgaccgaatgtcgtttttttcctgatctcttgaaagacagatccgatttaccacacaaaaactgttactctgtaaagcaaagaccaatcgtagtaactccggctggcaatagcaaagtctcgcttcaaccggcactcacacatctccttcacgctagcaggaaatttcatccctgtagtgggtcaaccatcaaaggataacactaacgactcctattcccaacgactacatctccatatcaccagttaacagaacagcgacgcggac

SEQ ID NO: 31726 - DNA, 301 bp, Zea Mays
cttgtatgtgaatgtgaatgaataatcgtgttttaagacttatgtgttgtgtgttaaaatttaagagtggacatgtatgagtgtatgaccaattatatgtagacaagattgtgttttgtgtacttttgtgaatgagacttgtatgtggatgtgaatgaacatctgtgtgtttaggatttgtttattgtgagcttttccgattacagttaccattttccgatcaatttcgagctattttgctcggatttatccgttttcgatataccggaatttaccggtcgttatccgtttccgactttcc

SEQ ID NO: 31727 - DNA, 502 bp, Zea Mays
ataacctggtgaagagcagcgatcggggtcttctctggcgtcacgaaatcaccgtgcgccatggccggccgggttagctcctccaaatgctggtaaggcctcacccactccgctcgccttgatgtcatctaatcttagtattaagtgccatcgactgccgcggatcgcgtggccgtggatttcctcgttggaggtttagtctagccgcggatccgcctgcgcgtaatgtgtcgtcttcatgcttgctatcggtgcgccgttccccggattgggttcgctatgatcttagacctataccatcgctaccagtttagggattaggccttggggcacctgatggctttgctccggcgaacccgccaccgtagtgcaggggcggcgctgccgcgtttggtgagggagagaagtcgaatcgtgcgccgtccgatccgcttcgaatgggcgagattagaagatgcggatacctgttcgtgatagggtctcggtcgttagtcccttgatg

SEQ ID NO: 31728 - DNA, 285 bp, Zea Mays
gaatgacagaaatgtgtgagtcactaaagcatactgtagtggcccattgagtccctcaatgaagtgttcctacttcctctcatcttcagccacttcatctggtgcatatcttgagagctaaatgaatcggtcacggtactcgctgactgacatgctcccctgcttccgcgacagaaactctttcttcttgatcttcatcagtccagcaggtatgtggttgttcctgaactgagtagcaaactccgcccatgtgatagtattagcagcatcgtgggcagcagtgta

SEQ ID NO: 31729 - DNA, 561 bp, Zea Mays
cggacgtccttcgaagctatgcatggcatcggcgggtcgagtgtgtcctcggcactgctctaatggctcaccggagcacggcagtcaccgtgggatcggtcctcgccgttggcaggcttactcactacacgattcacggtaaggtttccctcaaactgttcacctccatccatagatcgcatagcaacagttggagtggggatagagcatcgaggcaccgcaggggggacagctccggcgggcgcgccgcccggttcaggtccgtggggagaaggtggcctcctggccgttggatcgtcccctacggtggagattagacgactgtgcaccgattcgcaggaatagatctgtggcgttgattcagtaatgaacggtctaggtcagatcggggcaggagcgtccttcatccgttgatctaggatccgacggtcgagggtgagcgcggatgagtaacttgcctaaatctaatctggtgcgtctgctgtggatcggacggctaggatccggggataccccttcggccatgctactttgcacttaagcccctttcctttgccacaa

SEQ ID NO: 31730 - DNA, 507 bp, Zea Mays
agaaaattgctttgctgagtcttcatattcaccttcagaatcatgatgttcagtacccagcatgtcccacaactcctgaacagcatgcagttgcacatgagtgttgcacttgtgttccttggaccacttctcggcacagtactggcagagaccgcgtgcgcgacggtaagcccgtagggatgccactttgctatccatggaggatgttggtgtggtaatatgattcttctggttggccgtcagggatttgtcaggacgatgaggaggcttcagtgttgatcgttcatcgaatggcaccacactttggacagcctcgtggtgacgcgaagagtatgcctcctcctgcaataaggccaacgcacaggcaatatccaaatctctcggccgttgtacaagtataactgatttaatgtcatgacgcaaaccatcaatgaatctcatggtaaagtaaagagggcctgtggtgtgttcataagtaacaagcaaatcaactaattcacaaaaatg

SEQ ID NO: 31731 - DNA, 291 bp, Zea Mays
atttataggtaaccgagcgggtaggtgggtccccaagtaccattataccaccggttacttgctacattcccaaaatatttctctcaacggggtcattacagtgtagtgaagtagagtaactcagacatactgcggaatctaccccatgaggggccttacaagtgggctcgaacggacacggtgacgaggcagagactgggtcccaccgtaatctggcgtggctttcacctgcgagttgcaccctcgactgcgcgaagtcgcgcccttgacttcgttgggacttggacttcg

SEQ ID NO: 31732 - DNA, 283 bp, Zea Mays
aaaaggactaagtatgtctgctctgagctgcactagaccggtctggtgagcacccgactcggtacatagagagcatgttttttgggcatttgggacttggcacgccagactagtctggcatggcacctaaccagtcaccagactcgacacctagataggggtggtattttatatcaagctctcaaggagaacaaatgacaaccacaaaacaagcttaagcaaatccctaacctaagaaataatttaagtgtggaaaggaatggcactttgcccctaattcaaa

SEQ ID NO: 31733 - DNA, 282 bp, Zea Mays
tttacttgcgcaaggagcgttttcctgagcagcgcaaatccaaattgatgccacgagggaatggtccatttcgcgttcttgtcaagatcaatgataatgcatacaagatagatcttccaccaagctatggcgtgagcaacacgttcaatgttgctgacctcttaccatatacaagtgaagacacttcagagtcgaggacgactccttttcaaggggaggaggatgatacgaccatgctagtaagcaacacgttacaacccctaaggcatactgcatcaactc

SEQ ID NO: 31734 - DNA, 439 bp, Zea Mays
tgaggtacgcacattgcccagcgaataggtatccatcgttctcatcatcatcctcagcctcttcgaatatgacaccctcatcatcatcacctgaatcatgaaaatatgagccacgtaaaagacaagggcatctagggtgggggaaaatgtaacgtgaacaaagatttttaacgagtaccattggaaatgaacgttggcttcgtatgtgtatggtccactccttgttcaaccatgcctgcactcacatgtttagttggactacatgctatcgtcatcgtgcaatattcatttaaaattggttgtaattaccattggtgtggatctctgcagtcggatggggctgtgtccaatcgtctccttccatagcgtcacaaatagtatcctcggtcactgtagccacattccttccaatgtcgtcttcaaattgttggtttcgacg

SEQ ID NO: 31735 - DNA, 518 bp, Zea Mays
gagctgccaggtcaattgttacatccctctgtccatcctgtccaataagatttttgtagaagaggtccactgctgctgctttctcactatgctcagttagaatgtggctgccatcaactaacttggcaacaaaattcctcctcttgcggtgcctagcatgaatgtgaaaaaactttgtattcgcatcaccttctcctaaccatgtgatcctagatctcagccttgccatagtacgtttgaaagaagacagcaacaatgagtgttttttgaggcagttcttgaaccagttttcagctggggagagggctctttcgtcctgtgccatctcaaacctgtgaagcagttcttttgccaaggctaactgcaatctcacatggcccacctgtttgtcactccagccttgaagagatcttgctgttactccgagcttcaaatccaggttttggaatggacacctggtattgtgtaccgaatcccaagcagtctgtaccacctccaggaaaccttccaattttggc

SEQ ID NO: 31736 - DNA, 572 bp, Zea Mays
gccagacgtagtggttcctgatgatattatcgctgatgtcaaggctgcacctgatgcctcaagtcgaccttcttcctcgattgctcctgcggaaaatattgccaacagagatgtttcgatgcagtgacatcctgcgaaatactgagtgtactatgaattctatgtgtttgtgatggttgtttttgaatattttgtggatagggcactagagcgtgtccttggtgctgataattataacatcctcttttcctgaagtactgattgtttttgttgtcagggtataacagtcatcctgaacaattgtgaaagtaaatgtggtgcgctggctttggaacttttcctgacttatgccaatcgcttggccagttaggcatagtggtcgccttaggataggtagatgtatcatgctgccttaaatcattgctgactttgagtcaattgttccgctagcatggtataatggttctcctaagccaagtcaatgtgaacatgtaacgtcgtcttagatcgttgccgacctaagccgactgctccgttagtagggtatagtggtcaccctaagtcaagtaagc

SEQ ID NO: 31737 - DNA, 315 bp, Zea Mays
agtcagcgtcaggtactggagagccctcgccaagctcctgtactctgatgcatccttctctgacagtagatccccgtcggtcgcggatagcttggcgtgagtgtcaacaggtgtcgatgtcggatgacactcagccatgcctgcacgctgaagaagctcgaccgcgtactgtcgctgggagaggaagagaccatcggaggagcgcgtgacagcgatgccgaggaagtggtggagggcgccaagatccgtcatggcaaactcagagctcaaccgagtcataatgcgttgtaggagggccgacgatgaggcggtgag

SEQ ID NO: 31738 - DNA, 349 bp, Zea Mays
tgattgggtactcagcataagtcagatcatcttgaacactaaggtcctccattggtagttgctcctcaggtaccctgaggcacttctttagttgggacacatgaaacacatcatgtacatctgacagatgattgggtaactccagttgatatgcaacttctcccactcgctttaagatcaagaagggtccaataaagcgaggggacaactttcctttgactttgaatcttctcataccccgaattggtgacaccttcaaatagacatggtcaccctccttaaactccagtagtcttctcctgttatcagcatagctcttttgcctggattgtgcaattctcaaattttc

SEQ ID NO: 31739 - DNA, 926 bp, Zea Mays
ggaagaataataataatctatagttgaagaacatggcatagctaataaatcatcacaataggtgggtacatgcttcttgccttcatcacatggattagcaacttttttcaattgatcatataattcatgggatgaattctcactagttttattttctttactagaaatttcgttagtgagaaaagcatgctcttgtatcaaattttcatgagcaacactaagttcctcatgactcaattttagctcctcatgtgaacaagtaataacataaagtagatgtttttgttgttcacatgaatactttagaaatgagttttcactttccaaatttcttgttttatctttctcattttctaaatcaatgttcatgctagcaagtctatcaacaagctcatcatatgaatatgaatgattagtcacattagcattatataccttcgtattaccttgtgacatgaagcaatgtggtgtaatgaatgggcttgtagtagcgatatcatcgtccgagcatgaacaatcaccataatcatcaagtatgcttgagatagaacaatcatttgcatcacttgagtttgagccagcacaatcatcattatcaagtgaacttgtggtatgtctttcatcattatcatttgaccatgaggtggagcaatcttccacaaccaccgtgttgaggatgtgctccacatcctcgctagagatcctcccatatacgccatcaagatatgtccaaatatcatgggcggtctccatatacataatttccttaaacaccttatcacttatccattgatataaaatgttagtagcttggtgttcaagatgtaagcatttctctttttcttgggtgagatcttttgtgttctcatcaaagggtttataaaagcctacacttatgatccaccacaattttgcatcaattgtat

SEQ ID NO: 31740 - DNA, 410 bp, Zea Mays
gattcgactctcagaaccggagacacttgacgaaaggcaacgacacacaagacctgaagacctggaggctggagccaaggcttagcgtatgactctagtcatgtagtcttttaggtccacccacatataagagacttgggagctctctttccttctctcgcccgcttgtaacctgcttataacccctactacgagcatcgaataacaaaggtgtcggtagcacgagccatcgaagatcagatgtagggacgttctgctcgaaccagtataaaccttgcgcccgccaagcacacatccgtagcctaggacgcgcacatagaaatttattgtcagagcagaggttcgaaacaccgacggttggcatgccaggtaggggccttgcaagttctcgacgaactctcttggcttcg

SEQ ID NO: 31741 - DNA, 536 bp, Zea Mays
ggccgggcatcatgctatgctattgctatgctaacgacggcgaggacagtggttcgtgtgtcctccacagagcagagagcacaccacttttcactgtgtgataacgtgtgtgggcccggagttctgtgtacgagcctcgtgacttgtctggcgcgcacgtggcgtctccacagccactacctaggcccccagaacgtccgagtaccatgacgttggcgtcttcgttctcgtctgcaagggcgaagggcaatgcaaatgaccaccaacctggccttccgtgtgcacgagcactgcacgaccactgcctgcgtgcatcaccgcaggaaccagactgatgagtaatctaatgactcattgtgttgtctagggcaggcagaatattacgcacgcgtgttggagtatttttaaaggatctcacgttacatgtggaataacatcaacaaagttgggggggaaatgtcgagaggcaatttttttttggcacagagaaaaaagaagttgcaataggcggagcggagagaagctttagatacctt

SEQ ID NO: 31742 - DNA, 323 bp, Zea Mays
gcacggtgtgtgttcgtttcagctcatgtaactgatgggcccgttcactgtatatacgaggcatgcagctagaagcctagaatgttttcaattacaaccgtgtttcggagtccttaaccaaactatgggcccgtttggaatggggttttctggatccagttgctagtatgttgtacaaatttgaactaaaatcctaaaatctgttggaacaacctgtctaaaacgctaaaagggcatggtcaaggattcaggatagtagatgcactagttccagaatccagagctactaaacatttgacattgtggaccgtgctgtgtttcct

SEQ ID NO: 31743 - DNA, 715 bp, Zea Mays
cctcatgaagcaattctttttcttcaggtcagtgttcacttggttaatagcatattgggataaatggctaaacttgttgagatactgcattacagtatctcccccttgctttagtcgaataaactcctcttgttttatgtgaagcactccctctggaacatagtgttcacggaatgctagcttgaattcatcccaagtgacctgatgtccggctggttgaactgctacaaaattcacccaccaggtactggcagggcctctcagttgttgggcagcaaataacagcttctgtgtttctgtgcaactgactaatctgaacttctgctccattacccttatccactcatcagcttcaagagggtcttctgctttaacaaagagtggaggatgtgtctcagagaattccagatacgaggttttcacgcggtccttgtggaggaactctcccgccatgctgctggaattgattacccgccatctcacacaagaagcgggtattatctgcagtagcattgaccagggcattgatagccttagccagtgtcagtggtaccggcggtggattaggagtatcttcccgaccacgggaagtccccacactgtcgtgcgcgcaagtccgcgatggcatttgaggcaaagaaacatttgaaaaatataacatgtcaacacataccatcatattacattaccaaaatgtaattatacagactccagc

SEQ ID NO: 31744 - DNA, 361 bp, Zea Mays
atcgagggaacgccacataacagtgtgagcacaagatggccggaggcagaatcggcaaacctttgacatcaccaggagccacatagaaccaaaaatcccaccagttaccccatttgttcctagcgcagaggactatctccacaaccttagccgaagtcttcccagtcctcggcgtgaaggtgcacgatccaaaataggctatcttattccctattttcctcttctgccaatgcaggcaataattcttggcgaagacctccatagacggctgcccaccataggaagtaactgcccagacatacttcgcaagtgccaccactgtgttcgacgttaactggtggacttgcacctcaaaccttcg

SEQ ID NO: 31745 - DNA, 588 bp, Zea Mays
tccaacccagctgctcgtacgaagcgggttccctcacggtctggaggccctgcctcctcctctgagccacctcgccagcctccccaccatccttcctcctcccccccccccccgctgctgcctcgcgtccctctcctggccgcggctctcccatgccacgtgctcgtggtcgtggtcgtggtcgtggccgtgggatgggtgctcgctttgtccatgggtttgtggcatttttctccatgtgccgcaacgttgctgctgacgtccatgaggtggcacggcgtcagcgggagactgacgacaatcttcgtcgtcaggcttcctccatgggcatgccttttgcccctcgttcgcctgatgtgcctctccatcctcctcccccggagatcaatgagtggcaccagcaggcctacggggtgccttttatgtctgcagacgatgaagatgaagaagactatgttgatgatcgcgaggagtttgccccgcctccctaccatggggatccgggtcaatcctcctaccaccccccgcctccttacccgggtccgggacccattcctggtgaccctcggccatccggctctggttacc

SEQ ID NO: 31746 - DNA, 337 bp, Zea Mays
tccgaattgagcgcataagtacttgttggaaaggtatgacaaagctatacataattctcatactgtttatcactaattacccacgaaaaatccccagaaactgctaatactactgctgtacgcccacctgcagaaatctgtttctttggacagccacatacctggattcaaacggtgatatctcctaaaatataactccgaatcgagcgcataagtactcgttggaaaggtatgacaaagctctacatgattctcatactgattcccattaattacccacgaaaaattcccagaaactgctagaactactgatgttcgcccacccactaaatttctg

SEQ ID NO: 31747 - DNA, 640 bp, Zea Mays
ctcttgtcaaaggtcaacacacaagctctcaataaatcctcgaggactttgttgactctttctgtctgaccatctgactgggggtgataagcggtgctgaagtctagcttggtgcccaaagcttgctgaagactcatacagaattttgaggtgaactgtgttcccctgtctgacactatcttctgtggaataccatggagtctgactatttctttaagatatatccgagcaagggtggctcctctgaaggtagtttttactggaatgaagtgggctaccttggtaagacggtcgattataacccagatagaatcattccctttttgggtccgaggcagtccgattacgaaatccatgcctatttcttcccacttccatttgggcactgggaggggttgtagtagacctgcaggcttctgatgctctgccttagttcgctggcaagtgtcacaccgggccacatactgagctatctcctttttcatccctctccaccagtatctggtcttgaggtctaggtacatcttggtggtccctgggtggatagggtaggctgagttgtgagcttcatcgagcaggattcctcgtgcctctccctttggtatacacaaacggtccctgaaccaaagggttccttctt

SEQ ID NO: 31748 - DNA, 350 bp, Zea Mays
caagaatcttgataggctactccgtgtaagtcaaatctccctggacactaagctcttccattggtaactgttcctcagggacacggagacacttctttagttgagatacgtggaacacgttatgcacatccgatagactatccggtaactcaagttggtatgccatctctccaactctcctaaagatcaagaatggtccaatatagcgaggggacaatttgcccttaactttgaatctcctcattccacgaagtggtgacacctttagactggcctggtaattattattatatgagaactcagcataaggtaaacttttatcccaacttcctccatgctgaagggcacaa

SEQ ID NO: 31749 - DNA, 342 bp, Zea Mays
gtcttcctatgtgagagcaccctaacctatgttaaaggtgcaacctaacctaggagttttggcagtggtcgctggcccaagttatggttccaggattctccgcgcacttcccacaggcagacggtcaaatggatcatgaggtacattcctttcatacctaagttcgaattgtggtattcctcttctttcgtcctgtctttgcatggttactctgatgctgatttgtgtgttgcgcttggatcgcaagtccacttctaggactcgtcagtttttgggatctttgttggtctcatggtattctcgtaaacacccagtctaccaccgaggctgagtatgttgctg

SEQ ID NO: 31750 - DNA, 365 bp, Zea Mays
gttcctcaaaccgcaacacgagagtaaagcggtaactatcccacatccaacgcgattttctagccttattttccaaatattaaaccaacccagatctacgcacacactagtcacatatttacaatagaataaatgatctgacgtcacaataatatatggtttatgctcttattcttcatatgtgtatgcagtcataaacaccgattaaactttctagtcgccccacgtgatttgcgcgtcagccaaattcgtttgcatgtgttatgcactcgttttattctggcataaacaacgacacaatcatgtgggccatgtccctcaagattcgttgcatggattatgcaaattgtgtaattgggttattc

SEQ ID NO: 31751 - DNA, 287 bp, Zea Mays
aggccaacatgagtaggatgcaacagtcatattgaaaggcataccaagccgatacaaacatttttgcatcgccggtgaactttggatctaaggtgtcaagagacttttatgcatcaccatctaacgggtgcactattaacccatccttttgttcatacaatctttgtgccacctcatatgcatagtggtcttctttgagagaataaatgtttcactctaggagtgagaggcatgtaacgaagctgtttatgtgcaacctttgtcaccaccttctccccatattcatt

SEQ ID NO: 31752 - DNA, 322 bp, Zea Mays
cggcaatcctgcgttggctgcgagaagcggtggtgatgccttgcggagccccactaactgcagggtcagattgcatcccgacaacaatacaggaggtttacctggagatgtccagggcaagaatccttttgcaaagcgcaaggtggagaagtttgatatgtccaaccttgagtggataaacaagataccagagtgccctgtgtattgtcccaccaaggtggaattcgaggatcccattgcttatatacaaatgatttcacccgaggctgctaaatacggtacagttgcctatagcataatacgtattatgataatatctctc

SEQ ID NO: 31753 - DNA, 600 bp, Zea Mays
gtgctgttgctgatagaaccatgcctagagatatcccactcccagttgagggcaaagagaagaaaaggaggaggggtgtttcagctattgaatctagcttcaatttggatgttcggtgacagcttgatgaactaatagctagaatgttttacactggtggtctgccttttaatcttgcatgtaacctattttagacaggctttcatgtttgctgccaataatccaattggaggttatgtccctccaagctacaagttgaggacaagtattcttatgcaagagaggacacatgtggagagaatgctgcagcccgtgaaggaaacttggagctctaaaggcgtcagtattgtttcagatggatggtcagatgctcaaagacgcccactcttgaatttcttggctgttacagaagatggcacaatgtttcttagagcgatcaacactgaaggaatatccaagaccaaggagtatattgcagagaagatgttagcagtaattgatgaggttggggcacaaaatgttgtgcaagtgataactgacaatgctgccaattgcagagctgctgacatcatagttgaccagaagcaccctcatattttt

SEQ ID NO: 31754 - DNA, 451 bp, Zea Mays
agtgctctcgccgaccccaactggtggcgcgctatggaggagtatgaggccttacaggcgaaccacacttgggaactggtgccacacccctccagcgcaaatgtgatcactgggaaatggatcttcaagcataagctgaaggtgaatggttccttggagcggtacaatctcgttggttcctgcgaggcttcacccagcgccccgaggcggactgtgatgaaaccttcaaccctgtggtgaagcatggtaccattcagactgttctgaccctggctctctcacgggcttgacgagtccaaccatgtcatatttaacacttaaatttttccaccaccgacttgcgtagatttataaaaaatccataacaaaccatagttatatctacgattggggaccacagttataaaaaaccatagttataaaaatccataacaaaccaacagaccaggat

SEQ ID NO: 31755 - DNA, 397 bp, Zea Mays
ctctaattggttctcggtccactgcgcgacaaagccagcaaggacttgtgatttaattgtcgcccgtggggtgtaggagatcccatatcccatcaattcaagagcccacttggtgattctcccagaaatgtctggattgcgggtcacgtcgcccagggggaacggagtcaccatggtaataggatgcaacttgaagtaatgcctaagcttctttttagtgatcagaacgacgtacaataattttagtacctgggggatagtgattttttgtgccggtgaggacttcacttatgaagtatataggatgctgaagcaggcgcgtgccttctccttcctgcctctccacgacgagcactaagctgaccacctgggctgtccccacgacgtagagtaggag

SEQ ID NO: 31756 - DNA, 355 bp, Zea Mays
tgcaagcaaccaaccaccagcgaatgtgtgttggcactgcggagaccccagtcacttcaagaacaactgcccccagttgaaggcatcaggacctgcttactccaactcggtgaatggccccaagaatacctcagcacccgcccccaaggcaccctcctccatcatccagcagaacaagacctagtatcaaggaagggcttgagtaaatcacgtcgatgctcaagaggctcagcaagctccgggagtagtgctcggtgagttccttgttgaatttactcccgctactgtacttttcgattcaggagcatcccattcttttatagccactagttttgtggaaaagcatggcatcccc

SEQ ID NO: 31757 - DNA, 325 bp, Zea Mays
gggcaaggttcgggcggaggttgtggaattgcgtgctgagtgcgctgcacgccactatctggatggtggttctctcgcccctgtcaggattcagcacccttaccgttcaccgccccgtggtcgcttcgactatggtaccccagactgcaggacccggatagatttagatctatagatcgacggagtcggagtctgtaataatgcttaattcagtgtcttagtctagtcagtcttagttagtgttagtttgcttatcatgtgtcggaatgcttgttatgatggacatgtaatgaagttggatctttgtaatgattgtcaccaaggt

SEQ ID NO: 31758 - DNA, 467 bp, Zea Mays
ctgggccacttgcacttctattcatttgggtgttgctgctgcttttgctttttttggttgacagagaatgtcaattagctaggaattcagaatttgccttgttttacattaatccttctgccttgttattacccccccccccctccttgttttggctagactatatctcttctctctatctaaattaaaagatagagctcctaatgttaataaaaatatatatgcctttgagacaagaaactgaagttgtttttactcataaaacgtgaattgtgcccccttttccattgtttattattctacagatcctttacatatcataacaattcactggctagattactatgactccttatatgcactcaagaaaacctgcagtccctgatataccatcgttatgcctagaacacaaggggccaatgacacattaggttgtttatcactctgtatgtcatgtacccaagttt

SEQ ID NO: 31759 - DNA, 428 bp, Zea Mays
atgctttttcagaaagaaaaagagccttcggcaacggagaagcctgttgagcccaagaaacgtaggattattcaagtggccaaagtcatccagcagacaccgtcgcgggcatcggcgtcaaagataccacctattgagagcattggtgttgccgaagctgccgccaccgaagctgaaggtgccgaagctaaaaccgttgaaaatgtgaatctagaagccacacttggtgaaattgataccatgcttctggaagcggccgcggaagaagctaccgtagtcactggaaaaggaaagggtaaagccgaagatacttcggaagaagaagaattcaattttcaagatatacttggtcaagaattatcagaagctgaaaaaggagaactgaaggaatatgctatatcttgtggatacaaaccgggggctctgct

SEQ ID NO: 31760 - DNA, 294 bp, Zea Mays
tagaacgtgcaaggtgcaagtcattcaaatacttgatgcacaactttagggggagcacacataacttgtgtcttttgagactaactgttttttgagtgatcctatatagtctcaaggtggaaaagggaagataagcaaaaaatggagcaatcaggacttgggtacctccacaagtctagttattggtatctaaagttgtaagtaattacgtatttaaaggttgctcgtgctctataatagttggtgatcctagatgcttatcttgaaatatcatggagctatgcaagtgatgat

SEQ ID NO: 31761 - DNA, 485 bp, Zea Mays
caggaatcatggttgattgggaagtagaatttccagtctgcatgggagcccacattgtagttggaccttggccaggattaggaaaattcaggtaggccatcatgttgtaatccattggaggctgctgcatgaagcccgtaggccatatagggggttgagggggatattgctgcgcacttgatgtatttgacatcgactgcgaagttgtggcattgtttgttgggtccattctagtatatgtccacatggcatatataagtgaaatcgtgtaaactcaaagaaatctacactactaggaaaacataagaacagatgaagcatttaaaggagcacaatattatataaaggtcggcatgaactgtctgagtaccaacagcagcacattaacacaacagactgaacataatagacataaacgacaaaagcttacatcattgtagcttgtgatcagtaggttcgacttagacttagacatagatgacaac

SEQ ID NO: 31762 - DNA, 1256 bp, Zea Mays
gggctgggtgctgaaaaccaagttgagaaacaggacaatgtcagcgctcaacaaactaaccacagttcgagtaatggcaacttggaaaatggttcacactctaatggtgtgcatgagatctccagcagcagtgaaaccgtgacgaccattgcggacggactcaaactgatcacaaccatccgcgagggcaggcagcacatcttgccaagttggagtggctctcttgaccacgtttctggtggcagcacgagcacatctcaggttcatgaaattgaagttgagaaggaagtcagtaagggcgacgtcaaagttgaagagtatgatcttgagaagattctggacgagcaagaaacccatgacctctattgccccaactgcaaatcgtgcataactcgaagggtcatccttaaaaagagaaagagaacagtaaggcaagaaacaggcaaggaaccaccaaaaagaccacagcttgtagagcctcccgccaatgctccaagccaaacaatcaatcaagactcgccggaagtatttagatgcttgtcgtgcttcactttcttcatcccaacaggtatgtactatacctctcaacatgcctccacgcattatattatatgtgccttcctccttttcatcaactaatacctgagttattatgagcatttagattttttttgtctttttcttcttaatgcaaccatacacaactctcttgcgagtttgagatagattttttagtattattctcccaggcaatcatgctttcaattaagcttaattagcatcagtacatgagtacttatggctgtagatctacaaatagtaaatctgaaattatttcttctgcagtttgagatatgtagatcatggttaattaaacatgggtaccttaactgtacaagaagcaagactggaagccttgcatgatttgatccatacataagtaagttcctggttagaacaacgaaatagataaaacatatttagatatttgtgctatgccacctcagtgttggctgtagtttcctagcttagttttagagagaaaaaaagaataatcataactccatgtacctgtgcttctccagttattactagtactagatattatttctaatgtgccagtttaatatttatgttgccaccaggttgcgggtttaatatattccgcatatttgaaaggagggatgtagaccaacaagttcaatctcagcattcttctgcgtctgttgaaaattgtggaagttggcttctttctt

SEQ ID NO: 31763 - DNA, 323 bp, Zea Mays
gaacaagtctactaggtggtgcaaccgaataagtccccatcaagcaagtccgcgaagtggggcaaccgaccaagtccccgccgagcaagtctgcgaggcaaggcgaccgaccaagcccccgctaagcaagtctgcgaggtggggcgaacaaataagtccacgtcgagtggatccgcaaggaaggaacccgagccaatgttgtcggcccatgacggccacgacaagacataatgtcaccaaaccacgaccaggccatacctacagtaccaaaaggcatcagacagacacgatggagcacccccacgtgccccacggacatgccc

SEQ ID NO: 31764 - DNA, 407 bp, Zea Mays
aatgacagctgggccccacctgttgccgtggttcttcctctgtattgtggacccggcctgtcatcttcttcttctctccagcgaaacaaacggcaactccgtggcaattccaaacggaaatcgcgagcacctcggccgattcgcggaactcctccctagattcgggtcgatccgatcccgtgtccgcgccgcagcctggtagggtcgcgccgttatcctctttccccaaacaaatcccacatgcggaccgacattgccgtgttcgctgtgatccgtccgccgctgcgccacctgcgcgtcgacccgtgcgcgatttccgcgggcgcctcaaccaacctccaccggggcctataaaaccaggaaccattgatgtaggcacgaaccagatgccagaatatcacagcatc

SEQ ID NO: 31765 - DNA, 317 bp, Zea Mays
cacaaacgacgcccctttttataggccatgacaccatgaatataaaataaagagaaagtaacatcaatcacatcaccactgcaatgatcacttttcacacccccaaaaccgaggatagctttcggaccatccactggacttcgggatcgacacatcagattgagtctcaccctttggcaagtactatagggagacgacttaaggcatacctcaatcatgcttcaagttaacaataacttatcactgatccatggttgtgagcgtagggcatgaataccttgatcataacctgaaggggatttgtggaggcaacctcc

SEQ ID NO: 31766 - DNA, 556 bp, Zea Mays
ggattctgttggtcaactcctccaggcggcccttggcgggttcgcatctggctttgaggtgcttcagctcgctgaccgggtttttcggttttcggtttcctcgatggccgtggatttccatatttacaattccggatgcattgatcgtaaggaattcatggctttcttcaacctttggaattatggtggacctaactggaaacatgaattcaagatcttttcggaggaagaagcgtcttcttggcagcaggtgcggggcaaaaagagtttatcctttgcggatattgttaagctccctctcactggtgccaatgctattccgattcgtaacaacattaagtctcccagtggctttgagcgtcagcctcagactagaacgtctgtgttcagacgtttgagttcttcccctggtaatctggcctcaattgcaacgattggaggtttcccactggtgggcgttaacagtctcgccctagaatctcggtgttcaatcgcctgggcttgtcgtcttcatcctctcggccgagtgctgtgcctcatcggttctcgagctctg

SEQ ID NO: 31767 - DNA, 462 bp, Zea Mays
cttgtgccacctggggcaagccctggtgggttgacgcttgcattcatggaggggtttggtgtccggaagctgccataaagcgggcgcggagctcggcatcttgggacatgaatctgcctatacgcttttatgcgcccggcgttgtgtttcacaggcgccaggttgtattccacaatggcgttgtggcctggggccttctctgtcagacgggaatcattgctcggggaggcaccaccttttggtgtgcaaggatatctggtgatgatgatggcgagccgtaatgcagaaacgtttgtgttccgccgcatggggatgctccactgttgcttgttcaaggctggatgcttgtgctgttcacagtccatctgataccacgcttaaacaaacgggatttgaaggcctaacgaaacatcaagccgcttggtttggttcccacgcagtctgttttgtttctattctgct

SEQ ID NO: 31768 - DNA, 658 bp, Zea Mays
catcctcagtttctctaagggtggcggttcgccctcccggggtgcgagagtgtcatagttctgcgcttgggttgcccattctgctgacctccacaggatggttggtggaagacctccaaagggacctaggcgcagctatgtggccttggaggcggctaacactgaagtccagcgccttttggcgtacctggtggctcttaacgactcaggggcgggtaagtctccgtggtctggttcctaggctcatgacttcttgggttactaaatatctatagattccttgcatagttgaaactcgaagctttgagtcttgtgtgtagatcaggtcacaaggttcgttcgcactcgtggcaggaatcgcaatctacgcctccttgacaccctagaccatgttcacgaggccgtggagtttagggttcactagggcatggtagtggctcttaccattgtgcagctacacttcagtggtaacctccgcagtgccatcggcttgcctaagggttcgatggtggcagatcaagacctatttacgagtaattttgatgccaccatgaacgttgtactcggggtagtgttcgaggaggaaataatccacaaccttatgtagctctgcttgtgacctgaccgtttcggtattgcgacatgcatgggtttcggg

SEQ ID NO: 31769 - DNA, 353 bp, Zea Mays
caccttgatccatcgctaacctgatacacatcatgaataaagtaaattattaaccaaatcaaaaatcagtcgaagcaaaatgctagaataggcatggattactctttttcctgcaaactaaaagagtgtcaattttacataataggacgcccctttcataagtcgtcatagttacgtgtccgtgcgttgcaacgacgtacaaatacaaaatattcaacggttgcgcagggcaacatcaattattcagtttattgagaagtgcaatagcacaccacctccgaaaggtacaatatttatttattctggcaactttttattatctatgtactttatgtgaggaacaaacacagctt

SEQ ID NO: 31770 - DNA, 413 bp, Zea Mays
tggttgcctcatagctcatgaggatttgcttcgactcagagtgcccgtcatacatggggagttgtggaggtttgtacgaaggtggccatgaggtagtctacaactctgctgccaagggagaagcatcatcaaaagcaaagttactatggtaaaggtcatcataccatccatcattgttggttggactttcttgacgaagctctctgtgttgaggcccttgtccttgatcatcctgcgtgatgaggcgcatttgttcagtggcttcgtcgatcttcctctaaagttcggctagccgaatcatcttctcccttttcctctgtacctgctaatgtatagcttctaggtctctgatttcctgatccaactcctcttcctgtggtgtagggatggtagccttccttttctggctccta

SEQ ID NO: 31771 - DNA, 437 bp, Zea Mays
tattcaggtgttgaatggtccgatgtgtatccagcataagattttgtggggtcttctctttgtttggaatgaatgaacacaacccacatgtcactgcacgaaatgttgctaatttgctcaaggatatagaaggagatcctgatttggccgaaatagagttatacatttatccacagctcttcttaagtagattgggggttctccctatcgctggttggaccctaactgtgaaaagctttcttgttccagactctgttgtaatgcttaacattatgattttctttataacataggcatatgaaaataaagaagaggaagaaaatgttgaggatcgagaacattcaaactagtatattctgtggcgagatttgaattccacatgtacagccaaaaaattgaattcaaaagagagaaaactctactaagttatcacaaat

SEQ ID NO: 31772 - DNA, 457 bp, Zea Mays
cggggcgagatttctagaagcgagattggcgggcggggtttctagaagcgagaatggaaggtgccatgaatggcggctgggggctcgccgagattgccgcgggggagaggggagcgcttgccgagggagatggccacggtaggagagggaaggagtgcgatgaaaccgcggtcgtggcagaacgtgcaccagtggacgcctacaatgcacacttaagtagtagtagagaataggctgttggtaatggaagccatgggcttccgttaggcatgggaagctccagtcagggtagtggtcacgcgcgtggtcaggtcgggccagtggggcgcgtgcgtccgcgcgattgtagggcatgtttatgcatgtgtaaatatgtgttatgttttgtgtaaacagaaggtgcgcacgtggtgtggtcgagttgggatggacgaaggtgggccagcgtcgtgtttgc

SEQ ID NO: 31773 - DNA, 602 bp, Zea Mays
ttcatctaatctgatccgcacaatgagatccaatgatcgagatacaatctggtcaaaggggtgggttgcttctaatcctggccgatgatctactattcaacgacctagattttattatggctataccttatcacacctccacggcttagatcaaatcacccagatgatacgcctagcgccaaatcacggtcgttgcacgctggatcaacggcgcaagcttgcccccacctcacgtcatccaagcacggcggcgccaccagcctagacggcggagagatggccggagttcggccaccccgtccaggagggccttatactctaatctaaagtgtgaatcatatagtgcaaggcatggcgaacgcaggggaagagttctcaccggcagggacgaagcatagaggcccgaccgcggagagtgggtggtccgcggcggattcagtcaccgacgagaaattcaccgagccctggccgcccacggccccggaattccacacggcgacgtccgcaaaccttgacaaagctttcccgagcgcacgttttgccctaaatggacggtaatcaccgagggccgattacggcggtggtgctcggctttccctccc

SEQ ID NO: 31774 - DNA, 401 bp, Zea Mays
gatcgattagctaaaagaggcctaaaccaccctgagaaatgtcttctatgtgaccaagctgaagaaactctagatcatcttctgttggcttgctccttctcgagaatcttttggtaccatcttttccggaaatttgggctacactcccttaccccccagccggcggtcacctccttcttgaattggtgggaggaggtttcagatgtggtctcaggtgttaccagaaaaggacttaactcccttatcatcctgggtgcttggactatttggatccatcggaacaaatgtgtcttcgatggagtgtctccttgcctcacttatatccttgctttggcagatgaggagagaagtcattgggaagcagctggggcgaagggcctatgttctatggctgcctctgc

SEQ ID NO: 31775 - DNA, 330 bp, Zea Mays
ccggggaggccctcgccgcggtccgggtatggcatcgttggggctcctggtcgtgaaaggagatgagtgagggggtcgcgcctgaccattggatctggagccagcggtcccgattaaaccatcccatagcccttcacaggttagatcctgaccgtagatcgagcagggggcggtcaagtttagatcgtgaaaacattaagcctcgaccgttcgatgctagttgaatgcttgggatcgcgccgtgtatacccctacgtgcttccaatcccgaccgtggatctcggatccaacggctgtgggcctataccggttcgatgccgtcccgatgtg

SEQ ID NO: 31776 - DNA, 463 bp, Zea Mays
gagagaggtaccgccgtggtggattcgaagcctacgacgatgtcgagtagtcagaactggaccgggagcttctccgggacgcttgagtacttgggcgaccaccaatttggcatgaggtgcgggcgacggccgatgaatttctcaacagaatgatcgccgccaccacaaacgacactccaccggggccgtttgtctccgcgccgcaattgctggtaagaaccatgccgttgtgttcacctaggttccctttccgtgtagcagagtcgaatcgaagcgtagcaagtcggagggggcttcacggtgctgtgggaaggttgggcgatggaaacttcgggcgctggagcatgggaactccgaagtcgacgacaccaaggccttcggtattgcgtcaacatccttttcaagactggagaaggggggtggtggccgggctgcctggaattcatctccggcgccgctctaa

SEQ ID NO: 31777 - DNA, 378 bp, Zea Mays
gtgaaactacactttttgcagacccactgtaccaataaaggcactgcttgtggtcttaaaaagtaaacccaaacactcaaccgcataataccagtgtttgggaagttgccaccataccattagtgaaattgcacttttgtaaacactcaatcgagtgtgtatatgatattcgggagtaggctaccaactatgattacttcaagcaatgtgcaaattggcataaagaccttttccgagtaaccaaacaagggtaagttaggttccacgagtctgaatagactaatgcagcctagggtaagggaatcaattgtaggagcaacacttggagcgccaattcaccaggtatatatcggatgccgaaacttctctttggttaac

SEQ ID NO: 31778 - DNA, 563 bp, Zea Mays
gcgggatccgagatccacgaccacgatttaatgaagctagatctagtctgagccgagggatggcagatctacggtgcctgttgatcgcgcgaacgggtaagggaatacctaatctcgatcacccatcatcagatcaacggctagtggccatcatccaatcgtgatcgcccgagttaaatcggacggcgcaggcatagcctcaccaacccgacggcgaaacagaggcgccgctggtccttacggcggcggacactccggtgacggccatccggccaagcccccggccactccttacgcccacgaggctaaatgcagaacagaaagcgaagaacgcgtgagaacggttgataccaggatcagtggcgcgaagtcccctggccatggcagggtgatgtcccatggcggagagaagattccggcgagaaatcccccacgccaggccaagctccgggcacgaaaaattccgtggacaggtcctagacatcccggcgattctccatggtcacatcacgagtcttcaccgtcgaagccctctcagttccccgatggcggcaatcggcggc

SEQ ID NO: 31779 - DNA, 283 bp, Zea Mays
gcgacaacaaggataacatgaactttggagaacttcccaagaataccacctccctacccgatggctcctgtaataacgctgtcttccaaaaacaggatataactatgcgatactgagataatcaatccatacccaagataacatcaaatgccccaaggaaatcacaataagattagctgaaaagacctcatcagaaagaatgacggagcaaccctgacaaactgaacagctactaatggagccattaacagaactaaccataattgggtgacacaacctctgc

SEQ ID NO: 31780 - DNA, 282 bp, Zea Mays
cgtatgtgtgtgcgtgtcgtggtgtattatagtagtggttgcgtaagatatttgattgaggtgtgcgggtatatgctgtaatatggttatactcgcgacaaggaaagaagtatatattgtgtaacacgacgtttaggttgttattgtataatcgtgtgaaggatgctcatgatggtcatgtgacaaagggtggtgtagtggtgaagcgagagataagtttagtatttttaaacggttagttgatagcatctatcgatgtcgtcatgatttttgttatatggc

SEQ ID NO: 31781 - DNA, 819 bp, Zea Mays
agctggaggccgttactattctgcaaaaaatgcagtttctgaaagaaataaaggtttcaaacatctgaaaatatttaagggaaacacctctgtaatgctcgctgaagattttgtcccatttggtacacaatcacttcctttgaaaagcacaactgtggaacaagagctagaggagtcttgggaagatgaaatacttcgccggactagggaattcaataagatgtctcgtgaacgccctcacgatgaaaaagtttggctggctttcgctcaatttcaggtaccatgaatttctatggttttatttgtgatgtttctttgaagaagctatgcttattctgccctagtgctccattgtcagttattttgctcatttcgttctgggacaaatagtttgctcttacaaatgatttttacaattttgacacaccactagagttttgtttcagtcatcatttcacatttctgttctgtattatctctgccactgaactacaggacaaagttgctagcactcagccacaaaaggctgctcgtttacaaactaccgaaaggaaaattagcatattggagaaagctgtggagctcaatccagatagtgaggaattattgctttgccttctgaagtcatatggcaagagggacaacactgagactctattgactaaatgggagcaaatacttacgaagcacccagatagctctacgttgtggaaacagtatctgcttctgtgccaaggggaattctccagattcaaagtttctgaaattcggaagtcctacgtgtatgctgtacaggctctatctgcagcttgcaccaag

SEQ ID NO: 31782 - DNA, 627 bp, Zea Mays
ctcgacatcgcttcttggcggcatatgagcgcgagcttatcgacctagtcctcgccgtgcgccactggcggccgtacctttggggacgccgcttcctggtatgcactgaccacttcagtctcaaatttttgctcgaccagcgcctcaccaccattccgcagcatcactgcgtgggcaagctcctgggtttcgacttcacagtggagtacaaagcgggcagcaccaacacggtggccgacgctctgtccaagcacgacacagaagagccggtgctcctcgccatatcgggtcctaccttcaactttgtcgagcgtctacgccaagctcacgacaccgaccctgctctggtcaccctcaaggaggaactcatagcaggacaacgcacgggcgcatggtcgctggttgatgggctcgtcgcgttccaaggacgcctctacatcccaccagcatcgccactcctccacgagctcgtcaccgccatacatgatgatggccatgaaggcgtccagcgcaccctacaccgcctacgacgtgacttccactccccaaacctacggcggacggtccaggactacgtccgcgcctgcgccacatgtcaacgatacaagtcagaccacctacatccag

SEQ ID NO: 31783 - DNA, 669 bp, Zea Mays
cttaagaccatataaggaccggttcagacggcacacaaaatccggatgaacagcatcagtaaaaccagacggctgtgagcagtaaactgtctcagacaaagtcccatgtaagaaagtgttattgacgtcgagctgatgtatgggccaattgcgagaaagagctaaggataggactgtgcgcacagtggctggcttcacaacaggactgaaagtttcatcaaaatcaatactagggtgcggtgagaaaccgcggagaacccatcttgccttgtacctttcaagtgagccgtcggcgtgaaatttgtgtttgaagatccacttgccagaaacaacattggtagattggggacgaggaaccaggtcccatgtgtgattatccagtaaggcaaaaaactcttcctccatagcctgacgccaatttggatcagcaagcgcagtacgataactccgtggtacaggagacagagctgctacatgaaacaaggcggactggcgaaagcccgacttggcgcgggtggtcatacgatgatgattgaccacatgggagatcggaaccgccccacggcgaaggcgagttggaggtggtggagacccagacgcagctgcagaagtagccggtgcagtccgtcgggagtagacgatattatcgaaccgtcgtagagacggacc

SEQ ID NO: 31784 - DNA, 487 bp, Zea Mays
ttcattcagttgtccagatatgctcctgatgaggtggcagatgatgaaaggaagcaagagcacttcacagaaggactcaatgggaccctacagtatgcactggttgctcacacatttccatcattttagagactgctggataaggctcttgctattgaacacaagcgtgttcaactgggtgacttgaagaggaaggccattacctagggtaagggtagcagcagtgttcgtcctcgctacgttccacctcagggtaccccagcttgctcaggaggaggaccatgcccagttcagtatgctccataggggtctccacggacacctcccactcatcaggctgcccccactggcaccccggcgaggcctacgggacagaagactggccctacatgcttcaagtgcagtcaggttgggcactatgctaatgcttgtccgatggggaattctggtacaccagctcagaacaagcaacagactcctggcaagg

SEQ ID NO: 31785 - DNA, 340 bp, Zea Mays
gagtggtggtctgtgcaggcttacggtacgggaccagactaagcggctacactgaaccggaccaccccatggaacgagcccctgttctctagaactggaccccaagctatcggacctcccagctttcgtaagggggtcctaatctgcaagcctggctgctcaatccgggtgtcatcatgtcaggacagacgggaaccgtatgcgtgggttagataaaaaataatacccggaaactgcaggataaagttatggagcaggaagataaagctatcatagaagcagatctgagggggtaaatctcctttttataattcgacatgcacgggtgtaaaccaacagg

SEQ ID NO: 31786 - DNA, 340 bp, Zea Mays
aagtgtcgcactcagatacatacttagctatttccctcttcatcctggtccaccaatataaggatctgaggtcatgatacatcttgttactcccggggtgcatgaaaaacttggaaagatgagcttcgtccaatatttttttcctgagttctggatttttaggaacaaccaagcggtcttcaaaccatagaactcccttgctgtcctgacgaaagcatttgtacttatccaccttttgttcgagcatttccttaataacttgaacacccttgtcaccaatctgtgcgaggactatctgctcttgtagagttggctccacggagatataatccaaagtacc

SEQ ID NO: 31787 - DNA, 998 bp, Zea Mays
gcttgaagccgtccattttggtcatgacgacgtcgctgatcaccaggtcgaactggttcccgtccttcctctccctgagcatgtccagcgccgtctgggcatccgtcaccaccgtcgctgcgtcgcaccaccagaattcaaccgtaaaaacaaaatcacccgaaaaaatcatcgtctgacctaaaaattgtatcacaatcacaacggaatcggggaaatagggcggctaagaaggcaagaatacacactgttgtagttgcaacacttcagctgcctctctaggatcttgaggcagacgcggtcatcgtcgacggcgagcacgcgcagccccactgggaaggtgtctgcgtccatctcttctcctatatcgaaaacgtacacgatcagttccaaggaaacaactgccggccaaaaataatccccgcaaggaacccgagaagactcgaattttcttacctgctgcaatgttttccagccaagaacctctggggagcaacagaggcagagaaggaacgaagtaagcgagacgatttccgggcgaagagcaatgcagcgagtgcgagggggaggtgagatttattgcagggccaagggggatttggggaggagcggggatccgaatgcatgcggctgcaaagatggaaggtgttcatccttgcaatgtggaatttccctcccattaattcctgccttcagttatcttgtgcttccaccaccagctttgctgggtttgctcatcgcttgtgtgctgtggttcgcttcagtttcatgatggatggaaaactagccaaaccacacacgactcgcccatggtttaagaattgcggccggactcacactcaaccgtcttcgcgagggccgttactgagattttagggaattgggtggaattataaatctctactaacaattaagtcaatagtgtagaccatctcctgtgcctcgcctctccctctgcacgcacgcctccatcttcccttgcgaaagctgcaaccgcc

SEQ ID NO: 31788 - DNA, 388 bp, Zea Mays
ccaaggcgaggtactgggtctgatgtaacccttctctaacatctcatctatctgcttcttgagttctaccaactccggtccagacactcgataggctcttttggaaatgggggcagtaccagggataagctctatggcaaattcaacctttctctcgggtggcatgcctgttaattcttcgggaaacacatctggaaagtccgacacaaccctgatagcctcaagcggattggcctccttactatcaactgaaatctggtgacaatctccctctgctgttttaggcactcttagctcagccactacctcttctccggacggggacttcaatgttacgatcctcttgtcacagctaacattcacttcatatttcattaaccaattcatc

SEQ ID NO: 31789 - DNA, 776 bp, Zea Mays
gcacgtttaacctttcctgtcgtgtggcccagttaagccatgcgctccgtttgggcgttgtcctgtcaagtcgggcccacttgcagccactaaacacgcgcgcagtactaccgtggctaccaccgacgtgtggacccctcttgtcatggttgttcctcccgtgcggccatgccgttgcaacggcatcgtgcgtgaccgggggaatcgaggttggccgttacgggagttcaggataaagctctggtgcctccacggttttcccatcttccctgtcttccctcgcgcatgacctaaaacagtcgtcgcagccatgagatgaaggaaagcataaaccaccaccgccttcgatgccgaggtcgacatagcaggatagcacaccgttggcagtaagctatggtcaggagcggacttctggtcctcgtggatctaaccgtgcggactgcagactgtgggacgttggtttggagcggccgattcctcgttggagttccctgctagcagacagcaccaactctcgtcgtggaccgccttgtcactgccgtgaaccaaggtaaaatcgtcttctgcgtcttcgtgaggttcccttcagggtttagcatgagtcaatttagagtttgggactgattggggtggtgggtgtgttcgccggtgaaactccgccgtggtgagcgcagcggcgccgtccctggccggggtgatgggggtcttcgcgtatccgtcgaatctcgacgaacaaccaagatttaatctaggtgtgagtctgggtggaaacgttt

SEQ ID NO: 31790 - DNA, 309 bp, Zea Mays
tgtcgacctgcattttcatcaccggtgaaccctctatgtcgtgccctggtgcatcgccatgtctcgtggatgaagtctatggctatgccatgggggattggagaccaagggcccctgaatacctcaccggtgttatctctccaccgtcaagtcgcagacctccatagatcagcccatcacaattccaatcactggtaagtcggctacttgcatgctcaccatgtcatcctcaagcttgtagcggcttcggtttgggctaggctgtcaggttggctcggagccgagctctggtgggttcgccaccgccgg

SEQ ID NO: 31791 - DNA, 617 bp, Zea Mays
cccgtagcctatccaaatcattagcaattgcaacaccgacaaaaacatgatcttcatccgccaggaaactcttgaggttgtcggggatgtcaccagcaatgcccaccttgaagagaaggcacttcttatcgacgcatatttgaatgagggctatcctcttacggtcattttcaaaccattcggtatctaaacccacgatgaggggcttaggctcctcgccgcggacatcccgcaggaagcgctctaccgtcatggttgcagatgtgactgcgacttggacctcacttttaccgactatgatcatcttgtgttggtccgtgaaacaggagggatcgctatggagcttgggcaatgagtcactttctgccatcacagcctttcttttgtcaataggacgtgggcggtttatttcttccgccacttcggtcccttgtttgccgtgaggctgcgagccctgaggttggtcctgcaacactatccccccatttggaggtgggaaagactttgttgatgttgaattccttggaggtgcccccagtatgcttggagaaggtgtggaggaatcggacccctgcttctcatgagtgacagcaggtggcatcgcttccttttccttt

SEQ ID NO: 31792 - DNA, 510 bp, Zea Mays
catggtggcattggtgcccgttttcgggaaaattcagtaagctcgggctatggtggatgaactggggcattgagcggggtactaggtgcgtaacagataggcggagcaggggacactcaatttatagtgatcaatcgcgtgcttcatgaatttgggatgagaacattcacgacggcggcagtataattccaccgagacccgcccgtcgtggcacgcagtgaaacaatggccttggacaataactatctacccgccacaaccccttgcatcgctgtgaatcaatctatggcaaggcgcaaccgagaacaagggtggccaccacggtgacggccgctcggccaagtctccattcactccccctctgatctttccaccccccgcggtaatatctcactcaaaccgagcacgaatcctctcagcaggctcaaatcgcaacgcaagatgacaggtggcgatcaatggtgatgctaatcttgttcagtgcactgtttcagtttgaatccctccttg

SEQ ID NO: 31793 - DNA, 342 bp, Zea Mays
atgattgtaattttgtatgaaggtggttcatcttccctataaatagatgaacagtgccacgtataaggcaccttttgggagggccatagcttcgtatagcttagccttcgaagagccttcgtgccaccttgtgtaaggagctgaaggtatgcatgcgaactcattcaataaaaaagaatgtagaataagaatgctaaggcacttgagatgagttctatacaacacttcacattgtattttcatatcgttcccacttcctttgagaaccttcatccttcgcgctaatactttgaggaagtgttaaaccaaaggacaaaggtccaaatatttaacttgtgttgc

SEQ ID NO: 31794 - DNA, 426 bp, Zea Mays
gagagccctacctcgctgcactgaagcacatccttcgttacgtttgtggcactcttcatctcggcctgctgctccatccttctgcccagactgagctagtggtttactccgatgctgattgggctggctgtctagatacccgtgggtctactttaggctttgtcgtgttcctaggcgatagtttcgtttcctggtcctcgaagcgtcagcaaacaatatcccgctctagcgctgagactgagtaccgagctgttgctaacgccgtcgccgaggctacctggctttgacagctattacaggaacttcatgcccctctgcgccgcgcctccttggtttactgtgacaacatcagtactgtctacatgtcctctaaccctgttcagcaccagcgcaccaaacatttggagattgatcttcactatgttc

SEQ ID NO: 31795 - DNA, 355 bp, Zea Mays
atgcaattgaagttcaagttcgccccatgctagagtgctcgccaaaagggtggacgtgaagaccctgctgatcggcccatggagtctggtgtcgcctgctggtggcccaccccctagcacctaagctacttctctcgcctactctgtcttgtaataactcccttggacacgatctttacgtgacatgttgtatttactttgaaccttttgctcttcgaatctcggcctccgtggcgcctttggtgttcatagatttttgtgactatgattcctcctatgttgattagcgtgattttttggtaggtgtagacctttttaactgcttctcgcgaggcgcggcggcctggctatctgg

SEQ ID NO: 31796 - DNA, 388 bp, Zea Mays
cagccttatctgttgaagccaaatacacaaattctggaaagaataagggatttggtggtgagcggcctaatcagggccaggcaaagaaaccacggtttgtgattcgaccctcaaaccaaaatcgccctttttctcgtccaccttcatttcccttcaaacagcccattattatccgccccagcaatgcccccactaccccaaaacagccgggtgccccaggcactcgattccctgccttgcctagttcttcaactgggtgttttaattgcggcaaatcaggacattttatcaaggactgcccatatcctaggcaaaatcaatctaatgcttcgcaaggatctgggaaatcacttcagcccaaaggaaatgctgcggggaagaatacaaa

SEQ ID NO: 31797 - DNA, 548 bp, Zea Mays
ccacctcagcgaagaaagcttgcgccacggattccgtcgtgtaggggtgcgccagtgggatgaagtggcagtatttgctgaagcggtcgacaacggtgaggatgactgttttgccgtgcacccgaggcagcgcctcgatgaagtcgatgtcgatgtctgaccacacgccggagggaatcggaagaggctgtaggaggccggctggacgtaggtggtccgacttgtatctctggcacatgctgcaggcctggacgaactcctgcacaatacgacacatggccgaaaatggaagtcgcgcctaagtcgatgcagggtgcggtggacgccctcgtggccatcattgtgtaccgcggccatgatctcctgtagaaggggtgagtcggctgatatgtagaggtgaccctccatggcgaccatgccgcccacaatggaccaaggcgccttgcgcgtgcctgcgcggatctcatcgtagatggcgacgagggacaggtcggtggcttaggcctgccgtagacgctcgatgaagtcgaagtggggtgctgttacag

SEQ ID NO: 31798 - DNA, 410 bp, Zea Mays
ctcgcaagcacgttgttcctccagtggacgaataaagctgtggcagggcacaacgcaaatggattcgttcgctggaccaccgactatgtaaagaatcggatgactttgaatcgtctaagtgggcccacccacgcgcttgggcgccgcatccacggcgaggaccgaagtgcccccttggacccgctcgctggtaaatgtttggtccacaagtgcgacgtacacgagttacgggtacaaggccacgagtatagatgtcgtgacccgttatcacgacacaaagcacatttttttttggctcgaaactagcccagcctgaacagttacaggcccgcccgttgagccagcccgagcacaaccggtattagtcgaaccttgttaccaacccgctccacaaagaaaacggcacaacc

SEQ ID NO: 31799 - DNA, 354 bp, Zea Mays
tcttagttcaaattggaggctcggtaagcatcacagggtgacaagagtgctcaaacaagggagggtgagggatgaacggacctagaaaggactggccgcggcgagcagtttcttgcggtggcagaaacctgatttggggagaactccaaattcgcggattccagtgaatgactgtggctgattcgtggtggctggacagcttactagcctacggagctcggggaggggtcaatttatagggagggtaagcggcggtggcgaatttgaccgagcagtgctggcggtcggagctggagaagaacgtaggtgcggtgaacacgtatttatcgcggtggcaggctcatcgacgctgat

SEQ ID NO: 31800 - DNA, 327 bp, Zea Mays
agggctacgtgattgaccctttgatagtggtcgttcttttgccgttttgtgtcgaactcagagctggattctccggtaatcatgtgaataacccctcgaaagggttgtagcgaagtcctcttgttgttgtactggtggtggcagtaatggctggtttggatgctgtggtggtggtggaggcggtaaagctaggatctcttggttgttgtggcatatattgtgattttgctggtgaggatggaaatgttcattgtggaattggtgctggttgtactgatggggatggtaggtgtgggcgacaactctttggttgttagccggttggtt

SEQ ID NO: 31801 - DNA, 435 bp, Zea Mays
atcaatttggccgagccgtgctggcggccagagatgaagaagaacgcgggtgcggtgaatacgtgttcagtgtcgtggcagtaactccggtggtcgacgggaagttagagggagtcacggcgatgcggtggcgaggtttggacacgcggcgcaaggtcggacgacggctgtcgccggtgagtttatccgaagtggtcgtggcaagtacggtacggtggccggaattgtttatcggccggacttatccacgacgaggacccatacttgatcccaagtgttatccactcggtcagcacgaatcacggcggccaaaaacgcgaatccatgtgcggcggtagtcggcggcgaggtgcactgcatctctgatattttgctactgtaccatgggaaattcagtttatgacgcctgacagagcaacttcagggcaattcttc

SEQ ID NO: 31802 - DNA, 1862 bp, Zea Mays
aaaatttctgcgacagcgttgtccagagaaggaaccccattccttttcacttatatacaaaaacggagagcgctcacttgacttggtatgttcattgcaatgtccaagtcattttggtctgcaagtctgtagtccatttttcctcaccagcaccatatttttgaaaaacaatgaccagatctgcagcgatagagatcaagctgaaaactggtatctgggcttgagggccctattaccaactccttgtaatccatgttcatcaattgaatcaaggagcagtaggcagatcgacagttgtacaaatactcccagcagctatattcagcttaagagtaagttactaagtgtgcatggcacaccaaggcacatacaggttagttcaggaagttacattgtagcatctgaatgataacacttgtatagctcgctttggcatttttctctggtatttcatgtagcaacatttgttttttttctcgggaaaggggattcacgtggcaactacagggcagggactgtctgaatttgaaattcaggaggccaattgataaacacaacattcttaagttgtaccaacttatatcaatctcagcaaaccacacatctatgaattatgattgcaagggtactagtaaatgagatcaacattgaaatgattttgactttatgaacccaacaatttgtgtagtttaatcttgtccatatgtaagtaggcataccttactgatgcgcttttctgtttctaaacacttaattctcttggttaaattacagtcttctgtttgggtctaacaattcgtctaatgcacttcatgttaaggtatgttcatcgcaaaggaagcccaagaaggcacacggaacattttttggtggtagcgctgattgttcagaatcattattttacacaaggcagcgaacattctctgacataggtacctacttggaaaatcttacacgcaagatgtcaaatccagaaatacatgatttgaaggatgttatggttggtaaccaagaaaaggagcagaaaattacccaaacacctaaactgaaaacctttgaaggaccccgtgcagcatgtaggttagattctctgaaggatgtttttttctggggtgatgcttttggaagtattttagagtgtggtgatacctcaaaaccccttccaatgttagtggactcaacgaacatgcttgatgtacaaagcattgcttgcggagagactcatgcggccataatcactaagcaaggagaggtctactcctggggaaatgagagcagtggcagaattggaaatcaagtaaatatcaaagtctcccggcccaaggtcgttcaatctcttgcctctttacatgtgaaggatgtggcctatggatcaaagcacacttgtgcagtaactgtttctggtgaacttattgaatggggagaaggaccctatatgggccagttggacagctatgcgaggaatcaatggtttccgcataaattgtttagtccactggacggcatatctgttgtgaagattgcttgtggtccttggcacacagcaataataacgtcttctggtcagttatacacatatggggatggaacatttggtgttcttggtcatggagatacacaaggaactacccggcctaaagaagtagagtctttgaaaggctcaagagtgaaatgtgtggcatgtgggccatggcacacagctgccattgtggaagtgatcagtgatttcaagagcaattcaccaagaagcaagctgttcacatggggcgatgcagatcgggggaagctgggtcatgctgacaaaaagatgaagcttataccaacatgtgttgattcactcacagactatgattttattcagg

SEQ ID NO: 31803 - DNA, 283 bp, Zea Mays
tgctctattcaaattgcgaaaatcaatgcatactctaagcttacctgattctttcttctccactgacacaatattggagacccactctgcgtatctgcaaggtctaacaaaattagcttctagaagctggtgaatttcgtcctttatttgtgggagtaggtctagacgaaatgttctagctttctgcttgaaaggtctgaaatcagacttaatgggcagccgatgctctactatctctcggcttaatcctggcatctcagtgtaattccaagcaaagcaatca

SEQ ID NO: 31804 - DNA, 287 bp, Zea Mays
cacaccatcatattacattaccaaaatgtaataattatacagactccagcgtacaacttgacttcagtacttattttacataagtataacacctaaactatactattctagtcttcatcatcctttgttgcttcatttcctgttgcaagagaccgttcgtcagcaaggttcatggaacgagggggcctaaaaaggtccaactccccatcaggtccttcatttgttgttcctgatggtccagctcccattgcagcagcgtcggaaggcacatccgggtgcagtcgagc

SEQ ID NO: 31805 - DNA, 433 bp, Zea Mays
gtgaccttcaagaatctgggggtcttcagctctgatgggttgaatagggttggatgaagcgggctcttggatccgcagggctctacgttggttatgggttaccaagtaggcctccatcagcttctggacatgctcatccttggcttgcttcaaagcttcaacagcaatgacttcacgactttccaaggcagctacacgggcttgagctgtggtgagatccacatgaagcttatggttgagcttctctgcatcttctgctcgggcaatcatctgacggtggtgccgagccaagaaatcatattgtgcatccagggtgagcaggtatgcagtgaggtacacgactatggggtcgtcctcaagcagctgctgaccttccaatgcatgcatcctggccatccaagcgggacggtttctctgaaagggtggaaagaat

SEQ ID NO: 31806 - DNA, 573 bp, Zea Mays
cttctgtgctgacgtcgttaggtgcatagcgagccaattctgtgaatttgtgcacgtactcactgacagatcttccaccttaagttagttctcgaaattcatcttccttgagctgaacgatcccctggggcacatgatattctcggaaagcagcttcaaattctgcccaggtagcatatctgacggcagcgctgaaggtatcccaccaggatagggccatcccggaaaattgatgagcagccaggtaaatacgctggttctcagggcatccgatggcttctaacttcctttttattgtgcgcagccagtcatcagcgtcgagcgggttgctggatctagcgaatgtgggaggcttgagtcttagaaaatctcccatcctgtcctgaggccttccaccattcgggcgctggttctcaaggcttctggtgaggacttcaatgagtcgggtttggttggccagaacttgcgcttaaatctaatggcagctctggaggtgcggggaggtgggtctcactcccttctccaccggcttctccttcagctcctaggggaaaccttgctccaatcccagag

SEQ ID NO: 31807 - DNA, 526 bp, Zea Mays
cagtcctgtaactggagttcggcaacggcaagggagttaatggtgctgttgaacatggagcagaggtggttatccaggtgaccctggtttttgtcagcagcaccgcacaacatgttaaagtcaccgatcagtagccatggacctgagatgctggggaggaggtctgagagttcagcaaggaaggttggggagtcctggtggttggatggggcataaacgttggtgatggtgaggggcgcgtcggcaaggtgtgagctgaaggtggtggtgagggagaaagagcgagagatgctggacgtgagttcaagcacagcgctgtcccaggcggtcacggcgccccctggaaccgacagcgttgaggcagagaaagctgggtagatttttaggcaaaaacgagcgcgcttttagacagctgaggtcgcaaagtttggactcttgtaggcaagcaacggacggggagggaagggagataacatcacgaatgatagtgcatttatccggatcgcctaaaccacagacgttccac

SEQ ID NO: 31808 - DNA, 543 bp, Zea Mays
ggagaatacatctggtctccataagatcttcatatttctatcacaaattaccatcaccaatagcttagtggtcaagaattatggatcttccggcgccaaggaccaatgacatattaatgcccaatttcacttcaagctttgtggtaatatgggatttcatggctattttctactcttcttactcctggtagatcggagatatattacggtaagcatttcaaagggtggaattcaatgtagttctgctacataaactccaggtatatgcccaattaggactgacctttccatttagcttaaagctataccataccaatcaaaggaccatgccaagtcaatttagtgactataagtatttataattctgagagatgtatgcaacacaagcatagaggttctagacaggacgagtaaagtggttcgacgggaacacacaatggtttttttcacaccaacatagtgaaatttttctcagaataacctctcggtatactcacaacttcgtgttgctggcgattacatgtccttttatctcatagtttg

SEQ ID NO: 31809 - DNA, 293 bp, Zea Mays
cgataacccgctccggtgaatcacctcctctcttcggctgccagccttccctttcaaaattcggagccaccgctctcagacactataaattgagtgtgttgctagctccgttaggttgtcacgaagccagagcacccgccctcgcctccgatcgtccaccatagcgctttaattcgggtttcccccaaattggttctccgtgccgctgtggatagctcttccgtggccagcgtcgcctgaggtagttccatcccaattaccgtttgttctagctcccttagggtgtagtgatg

SEQ ID NO: 31810 - DNA, 1185 bp, Zea Mays
gaaattattcatcacaactgtcaaatggcctcccagaacctctttcatccttgggatatccaaatgccatctgtggaaaccaataccacagctcctcttctggcgctagcgagtgtagtgagtcccatcagagctattctaatttgagttctgtaactgaagtaagttcctattccggtaacaaagagtacaccaaaaatgatggcggtttactgagcataccggaggttggacacacttgtctgcaacaaaatcggactgataatggtaactcgaaaaataaatctgggcttaatattgctttaaagaagatagctgagcagttaagtttgggtgaagatgatgatgactatattttctcaaatcaagctcattctgtgggaggtaaaactagaaaatgtttttgtttattcctgcatttctttttagatccataggaggcaaaattcaaaaaatattttatgcacgcagtatagtgtttgatgctagttgttttatttttcttgcaggagtatgctagttgtatgtaagagatttttttaaaaaaaaggatgtcaagttcacaggcttgttatatgtgtaacttaggaaaacttcataatagctgaatttgatgaaaggaaaaaagattagtgttttgtactagagtgaaatctgtcaggattaggatggtgtcaatttttttgttaaagtttcatttttccctcttctctctgtgaggccaattgcaacctgtcctgtgatagtatgatgtgtagggccaagtttgcttctattatttctatgattatatcaatcaatacatttttgatgcacaagtgatgcacctacttgtggccttctggcaaacgtatatacaaagcatcatgctgttaggtgtcgaacttgctgacagttcaatttttgttaataaagtcaaattggtttactggccttattcaggcgacaaccaagtaaaacatattcaacaagaaggaacacagaaaggtttaagtaggaatatagcgccatcatgggaagatgtactgcagtccagttcaggtttaccaatttcatccatataccaggtgaggaaatcgtaacttgggattcttcttccttgtagaacacaaaaaactgatgcatgtggaattgtgaaaacaatctatgatagtcttttcaaagattcttaggtgggacgccttg

SEQ ID NO: 31811 - DNA, 278 bp, Zea Mays
ccataataaatgtacaatcagctcaagtccttagtgaatcaagtgaggaaatatgggagcaagagatgaacagaccatgaagtcgttcgactcatgctaaggtcatttactattttagatcttactcttgtttccttgatatgtgagaatcccaggtatacaaagatggtgcccgaagaggtatttggcaagtttgttagccatcgttagccatcaaatgatggttaaggatgccaagtatgtcaacgaccttaccaacgagaacatccccgccaccg

SEQ ID NO: 31812 - DNA, 390 bp, Zea Mays
cagattacaaaagcgctctcctaagcgcctgatagctttagctgaaagcgaggggggccctcacacttgtgctgacacatcaaacaattctttttttggcaagagccttgcctgaaaccagcccgggcgtcgtgaagcctcttacttctcctcaggtctgattccacaatagcaatattgggcttggaggaggttgtgtccgaagggacagaggtgtcatcagcagattcctcagaaacagccaaatcaaggaacttgtcctcaggacacttcctggggatgacaaaagggagtgacatagactctggctccaacaaagctgaaggaatatctgaggacaggaactttttggaccagctaaaggaatcctcgtgcatcaagttggataag

SEQ ID NO: 31813 - DNA, 357 bp, Zea Mays
cctaaacacgacagagtgccgagcaaccgggttcacacccttcctcctactatatggatctaaggccatgatgccgcaagaattaaagcacgggtccccccgaacaaacaaatcagccatccccgatgtcgacgaaccaacttccaaagacctcatcgacggagaccgcgtcttcgccctgcaggccctcgacaaatatcaggttcaaactaaggcctggcgcgacaacactgtcatcccaagagaattcaacgaatgggacctcgtactcgtaagaaccacccggacagagtcacggggcaagctagagccgaagtgggaaggtccattcatagtcaagacgaaggcatcccccag

SEQ ID NO: 31814 - DNA, 305 bp, Zea Mays
cctccgcgaagtccacagtggaacctgcggttcacactcaggaccaagggccctcgcagccaaagtgatccgtcaggggttttactggcccgcgataatctacacagcaaaccgagtcaccaggtcatgcgaagcatgccagaagttctctcctcgcttaggcaacccttcacaattcaccaagctcatcgcacacacatggccacttcaacgatgggggctggacattgttgggccactacctacagctcaagggaacctcacgttcaccttcgtcgctgttgaatatttcacaaagtggattg

SEQ ID NO: 31815 - DNA, 741 bp, Zea Mays
cacattatgagatgtatacccatgtcgatatgtatggttaaccacttcatctgttggcactgttactagaacatgcgaactgtcagtagctccaatagctccttggaaatagggccagaaacgttcctccttgatcctatcatgctcaatattgaaagtaggatctcttggtttaatattgtctttcgctaacttgcacaaacaattcagtacttcatgaaatttggtgtgaattgtctgtgatcgggtaaaattattttcagcttgtgaaaatgattgtggtcctccaacgatccacaaaaacgttgctagtgactccatcgatgatacattattatttgatgttaagctgtaactagagattagcaagtcatgcagtgtcatgaaaacaatgatttcaagtcggccgacttgctagtcgatccacctggcaaggtaagtctagttcggcttcacgatgtgaggagaggctagccgaggaaccaaactgacctgaagccttttccttttttatgtgttttattcataacactgcctctgttatctaactggcagtgcactgtgcactgttgtattattgctcactctatcaggatatactttactagctctgttcattttctttgtcattttatcttgtcaaagtgtgttttttgtttgtcgttatatgatttcaagagacatagttacattcccttaccatattgcttgcttgctacattttccaatatgcaattcctt

SEQ ID NO: 31816 - DNA, 506 bp, Zea Mays
gggcaaagcagcccgacttccaccaacgcctctaggtccttgtcggtgacagaggaaatgggccatgggtcgcggggagggagaacgtttggcttctcggccattgaaactacaggagaaagcgagaacgaggcgaggagctctttgcacgaagaaggcagacgacatgtaaggtaggaaagcgaaaacatcaaggtaaaaatctgaagcatccctctcgggcgaatttataggaacggacggagtcgccgagacgtgggtcgtgccattccaagccaaaacgaaccaggcaatagttgtttcaaaccccacgcgcacgcgcgccgcaaacggtcagctggcaggccgagatgtcccatcgcattaaatgaccgtgccccctccgggtgaaagcgcagcgagagttgtttcgcattacacctcaaaaggtacgccatcctcgctctgcctccccttccttttttcatcccctcacagacaatacgaagaaggcatcttctacctcg

SEQ ID NO: 31817 - DNA, 1317 bp, Zea Mays
gctagagaatggccagatcatgaatgtctggagattcgtccaggggcggggcagccgtgggtacagcaggcaggcaagcagtgctcgcaggtgccgactgtgaagatagtccctgcatcagaaaatcaagtgaggacggcacggaggccgccgaaggtgctgccgagaacgggaacacggactcatcaaatattacatggcgagagatgataatgcgacgggtggacatgccaaggcagcgatatcccttgtgggaggagggatagcctaagaagacacagggtgctgatcgtggggcgagtttgtggggagaggtggcggtgagattcggatagcaaaggcatcctaaaatgcgaagtgaggagtagtccgggaggcgtttgtggaggagttggtgaggtatctggttttggatggaggaggaaggacgcctattcaggagaaaaatggcagtagcgagggcctcagcccagtaggatggtggcatgaacgcatggaggagcatggtgcggatggtgttgtttgttgtgcgaagcatgcgttcagctttgccattttgtggtgaggtgtagggacacgagaggcgcagcgagatgccacagctagcgaggtatgaggtggtggcagtgttaacaaactcagtcccattatcggcttgaaatgatttgggtgtggtggcaaactgtgtctgagcataagcgatgaaatcgactatgtggcggtgtacttcagatttgtgtcgcagcgggaaggaccaacagtaatgtgaaaaatcatcaagtaggacaagataatatttaaatcctgaagtgctcagtacaggtgacgtccacacatcacagtgaactaaatcaaaaggagcagtggtcacagatgtagaatgactaaatggtagccgcacgtgcttgccaagctgacatgcatggcaaagggtggggggctcttattacatgaaatgaccgacatgctttgtagggtggcgaggctggaggatccggggtgaccgaggcggtggtgccaaagcgtggcggtaacggcgaggctgcagtggtgcaccgatggtgaagggaaggtgtataggtcgctgtcactattgcagcgaagaatcacgcgccccgtctggtggtccttgatagaaaaaccaaaggcgtcaaattcaataaaacaattattgtcatgagtgaattgacgaactgaaagaaggttgcggacaagggttggtgcaatcaagacatcagtaaggcgaaaggtggaagtgggagtggacagagtggagttgccacgacatgtgattgggatggtacagctgttgccaac

SEQ ID NO: 31818 - DNA, 534 bp, Zea Mays
tggaaacctagatccgagcaccttctgcaaagcaaggcgcataaacttcacaacttttgtcgccccacctcgtagcgcctgcccgcaccaaatgcctcgcagtccagtcgatattgtaccccgcgtcgcggagcgaggaaaaagaaggcgaatcgatgtgtggccggatctccgtggcgaagaataccagcaccgatgaccgaaccgggaggaggaaaggaacactgacacaaacaataacttgaacaccacgaacaccgccgcgacggatgggtgggtaaaaggcgacgaagaagaagagggcaaggatagggatgtggaggagagattggggaagccgcaagccaggaacagcaacgggaagggcaactgctcgaactgggacgattattacccacgcgctgcggcgctggggattgggtttggatcgctgctgccattgtgtgcagctaataaaaaccaaaccccgccttcccttttcgctcaggctttgtatttcttttgttttcttccgtggcagagtggagtgtgttt

SEQ ID NO: 31819 - DNA, 418 bp, Zea Mays
gtgactgaaggcgctgctgacgaagaatcacccgctgctgaaatcaagcaagcagatattggagagggtgatgctaatgaaggagagattgactataacatcattatgccatcgaagcccagccatctggatttcgggaaatcaactgtgtctgaagctgatatgactatgatgacgaagctaggctacttcagagaagccgagaaggggttggttcgttttggcgaggaagaaactatcccgaaaccagaagatgatgaagttgtagtttttaagagcttcttcaaagcagggttgagatttcccatgcacagaatgattgcagaagtcttggaaaaattcgggatttaccttcatcagctgacccctaacgccattgttaggctcagcgtgtacatttgggctctccgaagtcaag

SEQ ID NO: 31820 - DNA, 299 bp, Zea Mays
taaattctcattgtctgctttaatctttagctgtgatgacctttcaaaactcagaacaatctccttgtgaatcgacacgataggaaatttatcttgttcaaattttccaataacttcactagattgtactactttatgcaaataagagtttagaagacaccgtctcactgaattttctgtgtcattgttcacactaactaccttaactggagaaggatttgactctgtcctagataaaccaagcctctgactcaaagattgctttaatgatctcttataagaaagactcttaatatcac

SEQ ID NO: 31821 - DNA, 400 bp, Zea Mays
caagaagattgcaagatgccatggtctcaggatatgtacttcaaagggttcctgggagagatgcaggcattcctgactggtactctgtgtccgaaaccaaaactggtggcggtccgacctcacaaaatgttgctacaaaggaaagtgcagcattgtgagtaccttctcttgttattgtcagacatctcaagttttgcagtgaaatattttgcaactggaattgcatatttgatttcacagatgtattgaagacattgagatactccatggggaccttcaaggattaacagatacagtggactttttgaagagcttatctgaacttaatggaaatgatttgaagagccctaagaagcaagacctagagagaactgctgcatctgttctttttgactgggag

SEQ ID NO: 31822 - DNA, 569 bp, Zea Mays
ggaagtctggcaaagtgattgcaaagtgggacacaaaagcaacaaaggtttacatagaaatttgtgtagaagaggtcaatgcaggcaacatgtcgcataactttctaaatgcaaaagggtatgctaacctcattaggaagtttaaggaacgcactggccgcacgtacaccagggagcaaataaagaataggtgggactctttaaagagaatgtacacgcaatggaaaacacttaatcaatgggcaacaggtcttggttgagaccctcatactagatcaatcagtgcaccagatgagtgctgggctaagcaaaatgaagtaagtagccttttgtttttttgtagtttaggaatactgatcggcatctgaaagtaggaaattccattttactgcaggcaatgtcagggtgtattatgttcaaaactgccccacttgaaaatgaggacaacttaaagataatgtttggacccattgtgtgcaccaacgagacaacccttgttcatggagttgaggatgctaattcatcatctgatggtcacgaagaagacattttttggtgcgggtgaaagc

SEQ ID NO: 31823 - DNA, 677 bp, Zea Mays
gcgccgtcgggctggcaagcagctggttgatggtgaggaggctgctgcgacggaccaggacctggggtaccagtccccggaccaggtcatgaaggacctcatcgtcaactcttcctctgagtccgacgatgatgaccacaggaagaagttgtacatcatgtacggcgggagctggcagctggcctcatgcagggagatcaagtccctacgccgggaggtcctctcggctacccctggggtcccgaaggcagctccccaccagtggtggcacgacactagcatctcctttgggccctccgtctgcctggagaacatggcgggggtaggcatcctgccactggtcacctccccaaccatagccaacgtgatgctttatcacgtgctgatcgacgggggagctggcctcaacctcatcagctacgttgcgttcaagcagcttcagatcctggagtcccagctggtgccctcgcgcccgttctcaggggtgggtcccatgccagtcttcccattggggagcatcaccctgccggtgacgttcgggtccgaggaaaactttcgcacagagaacgtcatgttcgatgttgcggaggttaacctcccattcaatgccatcattggtaggctggccctgtaccagttcatgatcactgcccactatgggtacttggtcatgaaga

SEQ ID NO: 31824 - DNA, 1105 bp, Zea Mays
gaggaattgagtgggtagcagagtaagatctttataacaaacttgtagctggttctttggagaacaatattgatgtagacaagtgaccgagttgttacatgaaaaatagagaatgaagctctccaaatcgcgctgtcagagtgtgtgatgaagatcgccatggtacagtgaccataaagatctccggtgttgtgagctcgacgccggtgatctgccgccataattcgcgcccgcctaggagattcgtgccacgggaagagtagataacgtcgggacggggtgaaaatatctagcttggggtgaatccagtcgctggccggaccggtcgtcatgtcccgccgcggtcaatcgcgctggcatcaccggagttcgccgttatctggccaggctacatgcctcaaagccttaccacatcacagtagaccgccttaggtagcttgttcatcgcctgagataatgccccggtaaaagccacgatagcgcttgcgccagtgacttcccctctctccggccgccagcacacttccttcaaattggacgccaccgccgtaggactctataaattgttgcccccgtgagttctgctaggtaattgcacatccaacgcagcagccctagcctcggatcatccactagagactctcaatttcgtgttttccccaaatacgtttttcgtgccaccgtgaacacttagccgtggccagccctctgcaggttagttcaagcttctttgattggtgttctagcctccctcaagccccctgttgctcgtagacccattcgattaagctagaccgcaccaaatcgtgaacacctcggattgtctcggattttcgccgtcgtcgtgggcagagatattttggccgggattcatgcaattagtcgagggattagggtcgccaggggtagaatttagtgtcgaccgagtaaggagcttagcctttgcgtattccggccggtacaggctcaccggagagtgttcaccgccgttggtggtcggggacctgaccttgcgaagaaacaaaaagggaggggcctcggtgcgaatgtcagagacaaatgtgaatagtgcgcaaggattcttaattagttattcaaaaggtcg

SEQ ID NO: 31825 - DNA, 449 bp, Zea Mays
gcagtatcttgacaggcagcaagaaaatgggccacatgttcatgtggtgacccagttccattgaacttgctaaattgtggctaccgatagttgcttggaaaaggaaccatgtcaacttccgacggatatggtttcacataccctggacgcatggagtagtgtgtttgcatgtattgcgcccttacgccctcagaaatcatcctttgtatgcttttgagggagatttcaggtggagggtgaggaggaggacctccttggctagttgaggcattggcatcacttgttctatttctggtgttagccacttgctcacggagggcagccaactcttcttccttttgttgaagtgcagccatcatttgattcatttgctcttcaacggactgaccttgatttgtggtaagtacttgttcagcatcacgttcggattcactaggctcaccctcact

SEQ ID NO: 31826 - DNA, 338 bp, Zea Mays
gttaaattctatctcattcggggtctcttatgtaaaagatttcggctgaaggggaatcctaaagcttgggccctccgatctaaaatgaacatccacgattacaacacactaactccgaaccggtatttaacccaggccacaggattcgggatctacggccgaaaactgcccgaggcaatgttccaccatggtcgttggatggacgatcgatgatccgagttcaatgggtgaaagggtaatcagccgacttaaccctagccgcccacagaagatctagcggcccacggctaaagcggacgaaggggtatcacccggtctaatctggaccgttcattcac

SEQ ID NO: 31827 - DNA, 308 bp, Zea Mays
gtatcgtgtcatcccagccgtttgatcaaagtctagcggcccagattaggtccgcattattatgaaccagtacgcgatttacactgtaggatccgaagtcaacacacgaggttcgaccatgtcaatacccacaaactaccctcggatgaatgatcaacggttcagttttaatttgcaaaggggtatgacaacttctaattccagccattcaaaacagatcgtacggcagtggggccttcgtccaccccaaagccaggtgacggcggcggccgtgccctcatggtggcgccatcaccggcgtgagccga

SEQ ID NO: 31828 - DNA, 464 bp, Zea Mays
caaatccttattagcgacagaggagatggcccatgggtcgcgagggggaagaacgttgatcttcttgggcatcgggatggaggaagaagacagggagaatacaaagaactcttttttttacaaaaggcgagggcggcgtgtaaagcaggaaggctgaagcggtaaggtaacggtctgaagcatctgtctcgggcgaatttatagggacgggcaaagtcaccaaggtgcgaatcgtcacggccagacggttgttgtttcgaatcctgtgcgcatgcgcgctgcaaacggtcggctcactgacaggacgccccgtcacattaaataattgtgccccctccaagaaaaaatgtgtcgagcgccgttccgcgttcctcctcaaaaggtatgccctcttccctctacccctcttcccattatcccctcaacagttaaccagaagaaggcatcttctacctcgggcaact

SEQ ID NO: 31829 - DNA, 415 bp, Zea Mays
ctcgtacttgtccgcacaacccggacagagtcgcggggtaagctggagccaaagtgggaaggaccatttatcgtcaagacgaagtcgtctcccagcgcgtacagactaacaacgcaatctggcgaagacctggaacattcctggaatatagataatcttcgcaaattttttgtttgaatcctcagggccatcacgcccttgtaattcaccaaacattattattccggcccgcactcttttcctcccaggggggtgaggtttttaatgaggcggagccatgtaatatacaagcaaaaatcccccgcaaaaactaagacaatgtcgataaagaccgcatcgacggtcttcggcattcgaccacaccaaagtcaccgcgaggggcagcgctaactaccctcgcgtgcgacactccgcg

SEQ ID NO: 31830 - DNA, 312 bp, Zea Mays
aaaaagtccaaacaaacaagaccattatgtattcatcagtcattcgtcgtcgtcaatccacagatgcacatgctacacggaattgggacacgacaggagtgctgacgatgtactacactagcgcgtacgtacgtgtggaaaacaggtgaaaaaggtgagcggaaaatctagcaggattcgatcgacgatgctgcaggagctagctagctagctagtcagttgtgtggtggtggtcgtcgtcgtcggcgtcgtcaatgctccgcccgccattatcatatggctcatttttgtcttaatctattatctacttaa

SEQ ID NO: 31831 - DNA, 430 bp, Zea Mays
gtttgaagacagattggttgttcccaaaaacctagaactcaggaagaaaatattggacgagctcatatttccaagttttccatgcaccccggaagtaacaagatgtatcatgacctcagatccttatattggtggaccaggatgaagggggagatagcgaagtgtgtagctgagtgtgacacttgccaaagaatcaaagctagttatctgaaggtagcaggtaccttacagcctctccccatcccttcttggaagtgggaggacatttgaatggatttcgttgttggattaccaaacacctcccggcaccatgattctaattgggtcgttgtggataggttaaccaagacggctcatttcctgcctgtgcataccaccacaaggtggaaaagtatgcagagatttaaatcgaccaaatagtgcgtttgca

SEQ ID NO: 31832 - DNA, 494 bp, Zea Mays
gggatatagaagtcatccctatatgagtaatcgtaagcgcgtcagatcgccttgagttgctactggcttaagtcggttgcttttgttaatagggcttagtggtcaccctgagttatttaagcgcgagcatgttgcaccggcttaaggcgatgccgacttaagccgattgctccgtttagcagggtatagtggtcaccctgagttaagtaagcgtgagcatgttgcaccggtttaagtcatggccgacttaagccgattgctccgttagcagggcatagtggtcaccctgagttaagtaagcgtgagcatgttgcaccggtttaagtcatggccgacttaagccgattgctccgttagcagggcatagtggtcaccccgagttaagtaagcgtgagcatgttgcaccggtttaagtcgtggccgacttaagccgattgctccgttagcagggcatagtggtcaccccgagttaagtaagcgtgagcatgttgcac

SEQ ID NO: 31833 - DNA, 283 bp, Zea Mays
ttgatgcaaagagttggcttgctactgtatagaattgtgagtaaaatgcctttgagtatgatatgtcatacttggttgtgctatagctgtttcagttgtctgaaattggcaaatcagtgtaagtagttgatcttcgagccctgtagcttgggatccatacatcattggcccaaggttgctatagcaaatttgaagagctatgtatggtgaacaagtttcttgtggagtattgagtctggtgctgtgtaaaacctgcagtaaagtgctctcaaatttctgctac

SEQ ID NO: 31834 - DNA, 310 bp, Zea Mays
ggcgaagacaggcttggtgccgatggagaggcagaaatccctgaagtcctggctgtcaaactgtttgtcgttgtcgactgtgagcttagacgggactccgaatcggcaaacaatgttttgacagaagaacttttgggcggtcttcgacgttattgtggatactgccctggcctcgatccacttggtgaagtactcgacgacgacgaaggtgaatttgaggttcccttgagccgtaggtagtggtctgacaatatccagcccccagcgttgaagtggccatgtgtgggcgatcagcttagtgaactgcgaa

SEQ ID NO: 31835 - DNA, 315 bp, Zea Mays
cgactctttatgggcgcctcaacgaggaagtagggcaccttggtggtgtgagcgaacctcggtaaaaattgtgtgtcttgtgtgcttttgtgggtgtgattttgtctctcatcatctcagatctttgatctatctagttggttttaattcaactttctcgctgcatttattattggtagatctgagtagtttcatttaagttcgcagttgaacaggtgaattgctgttgaacgggcctccccggttgaactgtcgttcctcacaaaagttcgaagtttgtgttgagaattacaggtgtggcctattgaccccccc

SEQ ID NO: 31836 - DNA, 844 bp, Zea Mays
gggtcttggctgctagtgtacccatcaccagctgcccctcgctcttattttccttgggcagtcacgagccctttacggaccagcctttcgaaccccagagtccacaactatattgccatgagttttttggtcccctaaggaaatagagagtctaaggccttacccggtcagatgttcttggtgttcgcttggtcccttcgggtggatgtgttttgaagggcggtctgtccagctttagttttcttcggtttcctgaggtccggtgtcagttgcggggacaagaaaaagtaaggaggttcattagtgaggccatgcttgttaaaaagatgtaagggatgcataaaaaggtttggggaggctagttgtctcccttctcccttattcctactgtaggtcagcccagggggctgttctagggtcaggaggtaggaacggtccatggtgccaaagccttattgatggttcaatcgtcctaccctctcgatgtcctaggcgtcggctagcgtccttcctttttttctgccgtccaacctagtgcgtcatagccgggggtggtgctggcctgctgattgatacacgaaaggggaaacgggtccttcaggaatgcttttgtcgaggccggtgccaccctcacacgttcttcgtcgtacaatctccttctggtcagcgttgattgggacgcataccctgatcggcgcagacgccgattgcaaggaatttgcccgtcccctgcccaacggcgctttgtttgcgttcgtgaaaacgtcgcagccgtctatttctcaggctccattgccgagaacgacccatagaaagtgttcgctggcttacctcgggatatcgc

SEQ ID NO: 31837 - DNA, 413 bp, Zea Mays
ttgatgtcttgaccccaagaacaacaactgctaatgatctaaatagcaagaagaacaccgagaagattccaattgcaatgtacacagaagtcaacttaagagtactaacatcaggattctcgacattagtagccatccatgaattctgtgatatttggccacatacgaaaattatatgggaaataatacccagagaagcatagaagaagcctttattctgacgcaggtagagaatataaggcttgagaccagtatcacccatttctctttcttctgtcttaatcagttgatctgttggtgatggtttcaaagactctttgtatctgcttccatgaacatcaattgtcttcttgatcaatatttcattttctctatggggaggcaccctgttaagatctgaaacaccaatagtg

SEQ ID NO: 31838 - DNA, 276 bp, Zea Mays
caccattaccagcaggagggttggacacaaactcagaaaatgaccggtgaggtggcaaattctagacagaataggcaacaggagcaccaacatttgacactctgcccctcagaatcatgtccagtcggctcaccaaatcttcagtgggaattttcttgttggtaacccgggtagagtcattgacaccactgtacagataagatgggtatgccctatctttcaaaggttgaatattcttgaagacgaaatcagcgaccacagcttcagcagtcaaac

SEQ ID NO: 31839 - DNA, 482 bp, Zea Mays
ccaccacccaggtggtcaacgtcgtgctagtggaggaaaggaaaggcgagggtcacgtcctcaaggtacaaaagcctgtttacttcatcagtgaagtactcaccgagtccaaatcatgatacccccagctccagaaactgctctatgcggtcctcattgccaagcgaaagctaatccactacttcgaccggcaccccatatcggtggtgtcagcggttccccttggtgagatcgtgcgcaatcaggatgcgttcgagcgcatcgcaaaatggtccctcgatctcaacgaactcaacatcagctacgtccccagaacagtgatcaagtctcaggtgcccatcgactttatcacggaatggacgaaggcgcaagagtcaccccggtggaagacctagaatactggaccatgtattttgatggatgatacctcaagactggaagcggcatgggtgtcatccttatgtcaccctaggggcacaaac

SEQ ID NO: 31840 - DNA, 325 bp, Zea Mays
atgggaggttgagaacgtgcgactgcatgtaccatgatttcacgatgctgaacttgctcccggacgaagccatgtggaatgattggtgcaggatcaacccgatgatatgccattgttgtttggggaactggggttgaaagcaatgatcgtgaagcactcgacgatgggtgctagtattgagattgctcaacgacgcttctcgccaagggggttttgttgaacattggagtttgctttgtgactattgaagacgaaggggccttcctagagttgatcgcccagagtaattcttaaaggtagagaatgccagtggcccaccagctag

SEQ ID NO: 31841 - DNA, 635 bp, Zea Mays
atatcgagatagctgaataaatttgtccctatattcgctcacggacatacttccttgcttgagggatagaaactcctttcttttagtcttcatgagcccagcaggaatatggtaattcctgaattgagtagagaattctacccagataattttgttgacggcggcgtgagcagcgcaatacgcatcccaccaatctacagcgggaccagtaagacgacctgatgtgtagagcactttctctctgtctgagcactgagctatgttgagcatcttctctacagactttagccaatcatcagcgtccagtggatcaggagagttagcaaatgtatgtggcttgtggctcatgaactcccgatgcttgtctcgaggtggaactggtggtggtggtggtggaggcagtggtacttgttgatgttgctgttgcacccttctctcctggtatatctcctctcgctcttggcgcatctcctggtgtatatcctctcactcttggcacatctcttggcgttcctgccgcatctgcgcgtgcatatccaccatggtgtctgccatctgttgcattatccgcatttgggctgcaactgcgggatcagctccggctggtggaggctgtggaggatccatcttaggtt

SEQ ID NO: 31842 - DNA, 392 bp, Zea Mays
gaatgattaagcaaagaaatataaattcatatttcatacaaagagaaggtggaaggttgtatggaataacaaagatgggccaacatgagtatgatgatgccatttgaccaaaaggtgtgaaggcatcggtcgcgaggccgattcgaacattccttggatcagctgcaaagtcaggatcaaacgtgtcgagagccttccaagcatccccatctgaagggtgcacgattaggtcatcgttatcacggacaccttctttgtgccatcgcatgtgcatagcgttttttagatagaaacaactgtttcactcgaggagttagtggcaagtagcggagctgcttatgtgcaacatctgtcatcaccttgtcaccctcatcattaacaatttccacaaa

SEQ ID NO: 31843 - DNA, 378 bp, Zea Mays
aagagaactggccgagcacaaactgaatgtctatccccaggcgaggccgattcggcaaaaactacgtcacttgacgcccgacaagagagaggccattcgcgctgagctagcccgcttggtcgcggctggctttatcagagaggtgttacatcccgagtggttagccaacccagtccttgtactcaaaaagaataaagtggattggcgcatgtgcgtcgactacacggatctcaacaaacactgtccaaaggatcccttcgggcttcctaggatagattaggtggtagattccaccgctggatgttctatgctatctttcctggattgctactccggaaatcatcagattagcctggcaaaagaagacgaggaaaaaac

SEQ ID NO: 31844 - DNA, 943 bp, Zea Mays
tatatttattgatgtggcgagtagtttagaaaatgctcgtttgcgtggaggatgtatcgttaggacatgagtgtcggagttcatttatattagtgatcgcgccacattgcttgaagtgtctcgagtgcacgccatcatatggttgtatgcgagacagagttatgcgtatgatgagtttagtaaaaatcccatcggcgtcagttgtgttaagttgaagtttatttgtgcatgtaaagtagtaaggtatttaatgcttgcgactcttagtcgatggtagaaattgttttggcctaattagagaggtggtgacatgccaaagtagtcatcgctttctctatatttataagtcgagtcgtgtcgatgcatatcgcgcgttcgttaaattatgcttcgcatatagtgtatgattgtgctcacgatttcgagtagacacttcaagtaaatcaaataggatcgtgatacaagttgtgtaatgaagttagtcgctttagaataattattggaatgttctgttcatatgataaacgtgtatgtgttcacggtttgggaagcaaatgcatggtgatttcgatttggagattagtgggttacgattcgtatgctttggtcggtttgcgaaaatacttgtgaatataaatgtttataaaaatgttgtagtatatgttgtgtctcggattgtgataacaataggctatccgacgagtaggttgcatagaagggctagatcgttgctctagttagccaaattgttagagggctttagttaggctcgtagtcatgacgatttgcttgttgtagtctaaatgtgtatggttatgatcacgggtaaaaattagaagtgctcatgtggtgtctaagctaaaataagaactagtgggtgaaaagcgcttcgatatacatatatgccgaatttgatgattgtggtcaatgcgttgattagttg

SEQ ID NO: 31845 - DNA, 332 bp, Zea Mays
cgcctggaacctctctcgtttctcacgtgggactatcgtacccctactctacgtgtatctatatcgtgctcgtcacatgacacgcacaccacttgtcggtagacagacatcggcccccaagaaccgaagtgctacgccctctccccgaccactgcacactggtgcctgtcgcactgtatgagagatgcgtggctcggcaaattcggagcggattaatgtcgtcaccaagaaactagaaaccacttgcgttcgtcacctttcatggaccgcagcagctgcagcaatcctgccaacggaaacgcgcgcacatggtgcattagttcgcgctggac

SEQ ID NO: 31846 - DNA, 371 bp, Zea Mays
ctggggatgtttccattagcacctttaatccgaaccgcacgatcagaatggatggacgagaatagaagtagcattcggattcgggccagtgaatctgggccattgagatccaattgggtggatctgatgcgtccggggtattttaaatcaccactgtagatctcggatctaactaccgtagtcgcataccggttcattcgttggggatctaatctgggtcgtctgttttgatctgacgactcagatcaagtgtttcccctcgaccgcagatctcagatcgtgagcaccagaacagatcgcggcattttaaaatcggggccatcggatcatgatcgagcggcccataattcaccgtaccccttcggcctcgc

SEQ ID NO: 31847 - DNA, 476 bp, Zea Mays
gtttactctttcccgtaccacaccgaagtgcccaaagtcctcctgttcaacctgctcggcttcacgttctcgatcatggcgcccctcatactcccctttctgctcgtgtacttctgcctcggctacttggtgtatcggaaccaggtgtgacaattcttgaaactactctctgtgcatgtgacatgatactgataccggaagcttcagtcgctcatatctttgtctgtttgaccttgatgggtttcttgtcccgcatgcagattctgaacgtgtactacccaaagtacgaaatggggggcaagctgtggccggtcatgcacaacgccatcgtgttctcgctggtcctgacgcaggtgatcgcgctcggcgtcttcaccatcaagcgctcccccgtgacggcgggcttcaccatcctgctgctcgtcggcacggtcctcttcaacgagtactgccggcaccgcttctcccgcatcttc

SEQ ID NO: 31848 - DNA, 331 bp, Zea Mays
gaagaggatacgaccaagggaaaagtaggtaaagtacgatgctcaaattgagatggaaagggagaagattttaaatgccggtataagataaacctcaagtaagatatagagatgtctaaggtgaaggtgataataacaaaagtcatgacaaatgatagagttaaggaaagactcgcgtagtggcgaagtggagaaaacaatcaatggtaagacaggtgagggtgcaatagaatggttgaagtaagaactcattatcgagagaagttataaaggaacaacgagatcaccaaggatgggcgacatgaaatgatcgctcatggaccgttaagaa

SEQ ID NO: 31849 - DNA, 470 bp, Zea Mays
acgctccgagaattccaatatacgcaccggacgacactctaaagtcagatcctgctgcaccgcaattggttccatctcaatctgatggtccggatctcgcaagaacttcttcaacatagagacatgaaaaactgggtgtacccctgccatggaatccggcagtagcaagcgataagccaggctgcccactcgggccaagatagtgaacggtccaatgtatctcgggctgagctttccagagacaccgaaccgaacaactcctttagtaggtgataccctaagaaggacttggtcacccacaacaaattccagatcccgcctcctcacatcagcataactcttctgatggctctgagttgccaaaatattctgatgaatttcgcgaaccttttcagaagtctgctgaacccaatcaggaccaaccagggatctctctcccaaagtctcccagcacagaggggagatacacc

SEQ ID NO: 31850 - DNA, 1052 bp, Zea Mays
cgcatgatgatgacgtcacgatcccgttccctcgcgctgccaggtgtaacggctgcctctatataggaggaggaagactggaagaggacaggcagtaggtcccacgacccttccagggaagagagtgttcgtgacgcgggcggcccccaaatccgcataacaatctctgttgcccccccgccaaaatcctcagatccccttgctgcagtgcagatctctctataatccgcgctcgtggcgacctctcctccagcttccgttcctgaaatccatctctagtttcgccatttgggttttttctcgagggtttcgctcctcactcatctgatttaacgaagggagctgggtcacacccacaggccgcggcttctgaaattcgatggccgtggctgcagcgcgcctgacgctcccagatcgattcgacgaggtttacatagcctctgcccggtgaaaagatgggctcgtgggttatacgcgcctcgcacatgcacgagctgaatttcttctcgccttttcgatcatgacgtctttcgtttttttgacgtatatgattttccctggtgctagcgccgagcgcaactgtggttgagatccaatgctcctcgttactccgtccacctttacctatggaccagtttgcatgtagttgcagtctttttctaatgtcgataatctgatgttgtggctagttctcctcgagtggcaatataatattctccggatgcacatgatttggatcatccgctgtggagtttagggttttgttcaggttttacaggctctgctttctggtatctagcagtgtttgtttctttcgttctgaatctcgcttttcgttctgaatcatctctcgtttcgggacatcctgagtcatctaattttttccttttgaataacgtctcctactaagacgggtatacccttttcaagcattggatttatcagttattattacccatgtctctcctttttcttttcaagaatatatctcttacttattatttatatacatcatgataagcctcagcactaagagacaatgttcatatttg

SEQ ID NO: 31851 - DNA, 403 bp, Zea Mays
aggattcaccacgcgtgcaacagttaccttttcgcattctctcccaatcggttgcgcccctttgccttcgtgcttctctactccacacccgcgccaccgcactcgccatggctttgcttggtcatcccgaccactttcagtctgaggaagcgcttaacctggtgcgcgaccttcttaggtggagcacgccagggctcactggaagaatccatgctgtcgctgcccccttggtgatctcgccgtcgcagagtttgtgctgttcacctcctacatctcttgtgggttggtgctgccaattttgcccttctttctgctgctgctggaggagttcggactttagcttcaacacctcacgccccactccgtcctccaggcagccatcttcgtccacctctgcgagatg

SEQ ID NO: 31852 - DNA, 376 bp, Zea Mays
cgccgcttaacgccctgtaccgcgttgtcctcttcaaaaccccgggacatcagaagggcggttgtgatagcctcgaccggggagaaccgctgagcctagtgtaattcctcgtcgtcgctcagacacccgccaaagtgccatcctcgccctgcgcagggagctccgccccacacgagccggtactactctcttcccacgtctcgcattccacctggcattgtgtagaagtagtttgatcgggtttttgggcgtcggggtcgggatttggacgtctccggcgagtgctccgccgttgggggagacgacgtcgttgttggtatgactggtggggggatagaacatggtccgtcgatctagcagacaatggctgagatca

SEQ ID NO: 31853 - DNA, 317 bp, Zea Mays
catcctcgcttaccgtttcggtgtgggtgcagtctaatctgggcacccattgtggatcgtgttgctgagatatgaacttaccccttcgcgagtgaacgtttgcgtatgagaccctaagaaatactgtactaaacccgcagtccgttcctgtgactgccctgagtctgtggaaatcttgcgccagaccccctgcgcttaccagaaaatgacgcccagtccaaataattaataaaaccaggacaatcatttagaaaatagtttttagtacaaatttaattgcagaaacttgtttaattcatagaaaatgcatatgatct

SEQ ID NO: 31854 - DNA, 426 bp, Zea Mays
caactttgagcttcgtcgaatagacattctagattcaaatccttatgggacattgcttggaggcactacctggaaacaaatcgacaatgatcaattgctgataaatggaacgaaggtaccttggtccagattaataatgagaagacttagcattgcgttacatgaagctcgaccagattcaagtataccaaagtttggcaactacaagattggccttcttcccaattgtccaaccatgtctccagggtcaaatgattgtggttttttgtcgcaaacttcctccgatgctacgattttgatgatggcgacttatcagaatttgttgtaccggtatgtttactaaattagtgttttgatcatgcatatattactccttcatacttattcttagcattaattcatctattatgattatttcaggatgaa

SEQ ID NO: 31855 - DNA, 497 bp, Zea Mays
gattcaaacagcaatatctcctaaattataactccgaatcgaacgcataaatactcgttggaaaggtatgaaaaatctctacatgattctcatattggttatccctaattcccacgaaaaatccccagaaactgctcatactactgctgttcgcccacctgcagaaaatctgttttttggacagcaacatacccggattcaaacagcgatatcttctaaaatataattccgaatcgagcgcataagtactcgttggaaaggtatggcaaagttctacatgattctcccactgatccccactaattgcccacgaaaaattcccagaaatcactagaactactgctgttcgcccacccactaaatttctggacagcacctctaccaattcgcatacgtaacatctattcaatggaattgcagcacaaataaacaagagataatcacaaaaatcaccttgaattctcttttcctccttcccaccaattctccaatcggaa

SEQ ID NO: 31856 - DNA, 1244 bp, Zea Mays
agcaaacacatgttcttcacgtacgcttcaaggtcgcgatctcactccatgacaggtcgaacgagaagatgccggacttgttctggatctcatggacagtggaggccttggacgcgaaagcggtggacgcggtcgtggagctggacatgtcagcggactgcatgcagaaggccgtcccgtcttttgacatctgaaccgtgcagtctatgacgtcggcggcatctttgatcgcctgctggtaggcaaggtcggtgctgccggcgaacatgccgctcgcgccgttgtgggtgatgatcaacggcctggtgtcctctagatttgtgcacgggagtaagtaagtactcaacgacgacgatggtgataacagtagaaacaattcatagcttgagcttacttccaggaggtggtagaggattgcccttggaatgagccaagcaagctggggggaaaaaagagagagaaaaaaaaacttgagattttacaaaagagggagtgtggtttcagctcctttcagttccttccaacattggatagttcttaccaacagctcctgatgcggtgggcgggaagtccgtgatcacaccgtcgacagagaagtctggattgtcgatgaactgcaagtactcggcagtgggatcgtagctgtagttgtagctcaagatgatatcgttggcaaacccggaggcgtacacttccaggccgagggcatgagcatccttgaccaagctggtggatggcgccaagtactggtcctttttcagtggccagatgtacgtcttgggcacaaggacgccagctgcaaactccttgatggacttcagatctttcaggagctccccgtacgttttcttggtcgaaggctcctcgacgtcttcgttgaggaaccggaagatgagctttgtcttggcgttcctgagcttcccactcaagcttttcaggaacccaatctccggcgaggagatgtacgtgaggctaaaatcttttggtagctctagtatgtagtcctcgctgcttaacttgtgctccataaagaatgaattgtactgcaaaagtgaacaaattaaaaggtcgcatcacagtttatttagatggttgagagatgagaagagggggaggctgactggagtcagcgcatttttacctctacattcagccatatttgaggggggtggagttcaacgacatcatcgagcgtgtacatcccaaaggaggcatcgaatgtgctcgggcgagaaaagatgttc

SEQ ID NO: 31857 - DNA, 374 bp, Zea Mays
ggtaaatattcctaaggctctttctactctgtggtaggactgcgggttggtttatagaaaatccgaggactctttagcaaaacaaccagccgaacgggtatcggccaaggtgggccattggattacacacgaaaggcgcggattagaccgagtcaccagcgaaactgtacgcggcacagaccgtccaatccgcgatctatggcgcagatttaattattctggagtcgctctgctccacccgatccaaaatcaagcgcccggatctaatctagcgcgaagggtatgtggatcctaatctggaccattcactcctaaatcaacggcgcaaccctttgcctaccccgacagcatggacgaacagagcgatacggcgg

SEQ ID NO: 31858 - DNA, 271 bp, Zea Mays
tttgatcgaatcacccccctcacgtagttgctcggtgggagttggtagggacgcccacctcatccagttgctcagcgaggcatggttggtccgtccgcctcgcccacttccatggtgggacttggtcggtccgttcacctcgcctggtaactcggcgggacttggctggtcttactctcgtggcttcttgcctagttgggccaccataagtaatggatctactttggatacctcgttcctgagacccgttagcagcacccgagcttttgag

SEQ ID NO: 31859 - DNA, 293 bp, Zea Mays
cttgcaagaaatcaggaaccttaattgattttgttcacgcgcgaactgtccacgtcggcagcgtggaccatttggctgcccaattcagtgctcaacaatactctagttatctgctaggacggtaaatgtctttaggtatatcgagttggggtcgttttcctagctctttttcctgaaggaagtcctctttctctatctgatttcttaatccctagtcatcttggagcgctctgggtgatctgccgatcctggagcactctaagatatctaccccatagagtgagatctaggtt

SEQ ID NO: 31860 - DNA, 1558 bp, Zea Mays
ctttctatatctagcatgggcatggaataaggctgagtttgcatctccatccttgatccagctaatccgggatctcaatctggcaatagtacgcctcagagaggaaagggccaaacagtgcttcttgagggtgtttttgagccagacttcattttccacaagagctctgctaacttgagcaatctcgagttgatgaagaatctccttgaccaaccaccattggctctgcacatttcccaccttcttgtcactccaactctgaaggcctttggcagtggccttaagcttggaagaaagtgtcactaaggggcatgaacctgccaagactgaggaccaactagcagcaacagcctcctgaaaaccccccaacttaggccaaaaagcttcgaaatggaatatctttttaccatgcctaaaatcattcatccccaacacaaggggcaatggtcagagtcttgtgaagctgaactttgcacgaggcagttaggaaagtcttcccaatccacagaacaaaacaccctatccaatcttaccaaagtgggattagcctgcccattagaccaagtaaatttcctaccacgaagaggtacttctttgagagcaagatcattaatccatcttcgaaatctacccatcatagctcggtctacatttgaattattcttgtcttcaccttgaaaaatcatgttaaaatctccaaccaccacccaaggaccagaacatatattcctgacttccctgagttcctgcaaaaactgaatcttagcctcatttccttctgggccatatacacatgtaagccaccaaggagaaccttcatccaagccaaactggactgacactgagtgagaatcaattctgtaattgccctggtgactgatacgatcccgccaagcaactaaaatacctccactagtgcccaatgaaggcaagaccacaaaattgcagaaatacctccactagtcgcaacgtgtaattgtgtgtttggggctgttatgtttgtctatgtttctctcctcttgttatcccctgtaattcttgtgtggcctcttggctatgacttttgtgtttttgcttcttctattaatataaaaaatacgcaattccaaagttttgttaggcgctaggcggaatctaggcgatgacccttagcctagggactagtccagcctaggcttgcctaggcgatgctaggcgtttttctaggcgttttgccaacttatataatatatacatttatagataaaaaatagggaataaccgaggagacatacatttatcttgcactttcagattgaccctcaccctctgtcatctgagttctaaccaacagtcaacaaattacaaactgaatatgtatggattatgggaataaccgaggagagaaacaagattgggaggagagaaagcaggagccgcaggccttgagcaacagtcaacaaattacaggagagaacagagaagcagccaagcaggacaggagcaacagtcaacaaattacaagattgggaggagagaaggaggatttaccgcgtacaggagataagcaagcaggggt

SEQ ID NO: 31861 - DNA, 509 bp, Zea Mays
cgggtgttcccgacgatctaacgcggtttagcttaattgaatgggtcgaggagcatcaggagaatctaaggacactgaaacgggaaagcatagagcatgaacggacctggaacgagctagccacggcgatcaccggagagaagggggtgcactggcacaagcgattggtggcatttaccgtggcaagctcaccggcgatcaccggatgggctaagatgactcacggcggcatggttaaagccctgaggcacatggcgcaaggttgtgaggtggataactctggcgagcctatccaaagcggctgtgacttaggcgggtacggcggccggagtagaatagtggccagagttcatccacggtgcgatatttcttaccctctgcgttatccaactgcgccgagcacgaatcaccgcagcgggcacgaatccgggtgcacggtcgctggcggtgagtaatctgaactggcgatctgatctttacactgtaccatcgaagccctgattcagagt

SEQ ID NO: 31862 - DNA, 665 bp, Zea Mays
ctttgatgtagagtatcaatctagtcaccaaacaaaatctggagaaaattcgccccaaaccagctttgtcagaccaactgatgaagcctctaatggtacagtgcactgaaggagatcaagtgcagtgcacctcgctgccggttaaccgtgcgatcagattcgtgtcgatcgccgtgattcgtgtcgcctggaggtggattgcgtttggccgtataaagatcttgtcgtggatgtgttcgggacattgtggtcacgctgtccctcgaccatttgcgtcggcgacgtggcctaacggccgtcaccggagttggcgtccttcaccgcgattgtgccatgccctaggcctttaaccacgtcgctactaatcgcaacagctcgccaatgaccgtcgtagcccctcagtcggtgagtgccacggtaaaccacaccggtgactcatctcttctttccgaccgccgcgcgtctccatcgaattcactggccaccgctcaagcacgttataaattgagcacaccctcggctccgctaggtagtcaagcacctaatcctgcaactcgtgcctcaaatcatccacaagggctcaccaattcatgatttcccccaaatcggttctccgccgccgtagaaaggatctcaccgtggtcagtgcacttcaggtccgttca

SEQ ID NO: 31863 - DNA, 439 bp, Zea Mays
gacgggtcggctgaagaaggcgactgggtgccgatcctgtaccaggacggggccgaacccgtgggacgacgcatcacattcgacgatgaagagcatggcgaagtttggcatggccagaaccgaggctgtggtgaccgcggtcttgagggccacgaacgccgcggctgcttcgttgtcccaagagtaaccttcttgaggagggcagtgaggggcgctgtaacagtgccgtagttgtggacgaacttgcggtagtagcctgctaagccgaggaagccacggacggctcgagccgaacgaggagtcgaccagtcgaggatggccttcacattagctggatccatggcgactccatccgcagatatcacatggccgaggtaggcgactgaagaggcgccaaaggagcacttggctcgtttgacgaagagatggtgatggcgta

SEQ ID NO: 31864 - DNA, 288 bp, Zea Mays
ggaaaatggcaaactggaattcgatgctgtagagtagattgtcctttacctactctaagggcaaaaccaacacatgacaggaagagctatgttgtcgttttcttcccacgaacaaaaacttattcttgggtagacatgctacttgttcttccaatagaggaatgtcctttgccacttgtaaatggaactcatcgtaaatggagaaagctggtgaaggatttgaacattcctcgacgattcaacatgcaaaatcttgccgtttttatgataaatttaattgatgagctt

SEQ ID NO: 31865 - DNA, 349 bp, Zea Mays
cttctcgcgacgcttcgaggcgggagcaggggagtctgcctttaaagaggggttcatccctcgagtagtagccatgccttgcttctctcccactcgcggtgtcctttcgcctccgagctctctgcgcccctttgccttcaaggtctctgcttcgcgttgtcgtagtttgccatggccttgtgacttcatcccgagcgtgcccagactgagtgagtgctcgaaatggtataccgcctgcttggatggaatgcgccgacgctcggcgaaaggatttgcaccggtgttatccaccccgatgagcttgccgctagagagtttgtgccttttgtcctccccagcatgccgattc

SEQ ID NO: 31866 - DNA, 310 bp, Zea Mays
gccacgcgttattcctctgaaagtgaaagggatgcgtgtctccctttcagcaggtacgcagacgactcgatctgagccgggacgcatgcacaccgacgacgacgacgccttccaagcaaggcacgagaggtaccgaccgaccgaccgagtctggaaaagacgcggtccgtccgggcgaaggcgcgtactatcttagtccagatgatgatcgttccataaacatttgtaccaggtgatgatgctcgtacgtaagtatcctgttagcgtcatacagttcattatctatgcctcttcgctctactttgtcaat

SEQ ID NO: 31867 - DNA, 374 bp, Zea Mays
tttgctcatattacacaccagtccagacgctgaaccaaagctgtccaatattaccttaacacaattcagatcttccactataggtttaacaaacagaaccacatcgtcagcataaatagaaattctgtttaggacattcccttcctgaaggttatggagcagccctctatcttcagcgagcagaaacaaactgctaaggacgtccattattagcacaaatagcatgggggaaagaggatcaccttggcgaagccctctccgatgcctaataggaagaccaggagacccatttagcagcacttgagtggaagatgaagccagcagattcgaaatcaaatttcgccaaatatttccaaagccaaggtgagaaagca

SEQ ID NO: 31868 - DNA, 353 bp, Zea Mays
cgtggggatctcatctgtaagctacttgcctcgtcggggtcctgctgtcgggttgaggagcttcgcccgtgcccttgggaggttgggatagcatcaccgtggttgaagggaccaccatgtgccctaaatttctcacctggggtcagcatcgtcgcggtctgccgcatgctgtgtgcaggacccctgctgctccaatccgaggtatgcttcctaccacggcgatcgccttgttccatcctgtgcgtaaaacccatcgtctctggcactagaatacgcgggcggattgccctgaccatggcaccgccgggtatgggcaccgcaccgcagccctgtcgcccggggggaagaagaag

SEQ ID NO: 31869 - DNA, 472 bp, Zea Mays
cgaaggtaggccccggatagaatcccaaaattcctcctctgaaaatgggacttccaaaactgaaagatcatgttgctgcaccccaatctcaggaaaatcaagcgtgaaatccctatgagctgctgttccaagcagattttcatagaaatctgaaactgcttcatgtttttcctcttgtgtgactgcctgagagctttccgtttgcaacttggcaataaaattcttctttttcctgaaacgggcctgctggtggaagaacgaggtgttagcatcgccttcacgaagatataacttctagagcgcagccgggcaatggttcgttccagggaagataaaccaagacaatgcaatttgagttttttcctcaaccactcactatcagaaagctccctggaatccctagcaacttccagcctatgcaaaatctcttttgccatctcaagctggagctttatgtttcccacatttcttt

SEQ ID NO: 31870 - DNA, 461 bp, Zea Mays
acggcgtcacgagcttcgattcgacttcgattatcatcccctcatgctggcgacgctacttgactggaatcccgaccccgaacgccattccccattggattcgccctaggcggctattacctcactgcatatggcggtacagcgaaggaaaggggggcagggacctagttttatactccgagaggtgcgcgagatctgcggggagccatgaccacgcagagcacggaaatcacgggttgttggggaattgccatgagatccgatgggtgcggcaaggttgtgcagagaactccgtttcctgggcacgcgacgcggatgagacgggtctgacaccagggagcgattggggaattcgactttatactggagcagagccaagattgggaggtcgactagctagatttccgccccaggccgttgccggggatcttggctgcttcagttgaggtgtggtgacatcg

SEQ ID NO: 31871 - DNA, 539 bp, Zea Mays
aaataaaatgacatacacacattgatttatttattatgaacttgattgctcatcaaggttttgcctactcagtggggtacgaaggttccatggctagaccacacatgcccctcttatctgaaatatccttctccattctgaggtatccattctcgccccaagtcgtgccccatgagttcttcatcagccagtacttagtaccatcactggtctttccataaccaatggctgcaatcccatggtccaagtcagtgccacatgagccagtcatcacaccaccagagtagaactggaacgtcatgtctccgccatccactgccaccgagacaggctggtttgccacggccttcatcaaggcagcctcatcatttgccggcacatcctcgtagccctttatggttgcagcactatttgatccactcttgcacttgccatctgcagcagtgtaaggatagctggactccgtggttaggccgccgttcttgatgatgaacttgaaagcatcgtccatcaaaccaccctcacaaccttgatcctcg

SEQ ID NO: 31872 - DNA, 397 bp, Zea Mays
cggggacattttgagggcctctgtcatgcttgttagcttggacgacatactcgtctcccttttactacctcttcttctcggactgagcaggattttgaccgggttcattgtgatatatggacctcccctgtactcagtctctctggatataaatactatttggttattttgcatgatttttcctattttctatggacttttcctcttcggttgaagtctgacacttttaccaccctcactcacttcttcgcctgggtctccacccagttctgtcacctggtccgtgcactacagtgtgacaacgaccgcgagttcaacaaccacgcctcccggtcattcttcctcaccagtggcgtttagttgtgtatctcgtgcccgtacacctctgtctagaacg

SEQ ID NO: 31873 - DNA, 414 bp, Zea Mays
tgaagcttttgttaccttctgctttcttgtactccatgacctccgaatatgatgttgacctccctgtcaacgtgcgggaaagctccacccctccccccttctagctattgaggctgcctaggctcgctaggttctccttggggcgagggaggtggtagtggctggaacggtcggccatgcccaatggagtgtttgaagtctctgcagttccatagggtgtcgtgcatgtcattgtgatacggacactaggagttgaggatttcgtctagtgtctgcactcctccacggggtgcaccgtgggctcgagttgcaggtggctcggcggtgtgcacctcctcgcggggcctcttttcccagcgtttatctggttgctggttcatgtctcgtcacggcgcgggtggtacggaatttgtg

SEQ ID NO: 31874 - DNA, 300 bp, Zea Mays
aactggcacaaagtcagttatcgtcgttttgcccatatactgggcttctctgatgcagatattcagggcagcaacatgcgtgtgcatgacattcggctgcccatgcgggaagagacggaattcattcatgtctctactgagcgggagttctggacaaccgctaacatgcataggtactacaggtaccttaattctttgtaccggatgaccgttcttccgaagggcggaaatcaaatgaacgtccttggggagagtcgagtcttcctcctcctccttgctccaaacagtctcgcccgcatc

SEQ ID NO: 31875 - DNA, 314 bp, Zea Mays
tctgacccttgggatataaaagggaatgccctcttcgtctcagagggacacagacacacaggcacataagttgtaacacattccattgcaatactacgatcagcattacactgaactagggctccggccaaaaccagtataaacctcgtatgccaagttcttcattctagtcctagtgattcatcattcagagtgagtccgtgctagcatccccactgaagaaaacttattgtccctcggttttcgaaaccacgacactaggattctcatgaataagctttacaagattaggatcaatgacggtaaatgacctt

SEQ ID NO: 31876 - DNA, 515 bp, Zea Mays
ggatttcactgatccagaactcgcacttgctaagcttagcatacagctgacaatctcgtagcctctgaagtactttccccaaatgctcctcatgttcttgctcattctgggaatatataagaatatcatcaatgaacaccaccacaaacttgtcgaggtagtccatgaacacgctgtccatcaagtacatgaagtaggctagcgcattcgtcaaaccgaatgacataaccgtgaactcatatagtccatacttagtgatgaaggctatcttcggtatgtctgagggtcggattctgagctgatggtagcctgacctcagatctatctttgagaacacactggctcctctcaactgatcgaataaatcttcaattctgggcaagggatacttgttcttgatagtaacctcattcaaggatatgtagtcaatgcacatcctctttgtcccatccttcttttccacaaatagcactgaggctgccgaaggtgaggtactcagtctaatgtagcctttt

SEQ ID NO: 31877 - DNA, 498 bp, Zea Mays
gaaatagtctgcgccattccggcctcgtcagatttctttgaaactttagcctccgtcctaggcgcttcgacagaagcaagagttgatgttttcatagactccattatagcatctagcacattagtcattctcctttttcttggagttgctgcggggatgtttggcggcttcggcagttccattgcgcatggtggactcagtgccttcgactgctatgatgttttctccactttcggctcttctgtcacatttgtcctagctttgactggcacaaagcgacttggttgagagataggagtggccccctcaattagcttcggcacgacggccgtttcaatgcgcctaggtcgacgcgtcaaaactttaaccttttttgacctcgacgcgctagaagtcgtcaaggtagcagctttcctcttcttcccttgcttccacgaaggataacagtagtctgggtacacaaacccgatgacatcaaacaccctattcaatctcttt

SEQ ID NO: 31878 - DNA, 436 bp, Zea Mays
aaactatgttaatttggtgttgaattgatgtggtgtgtgaaaatccgagtattgttattcttttctagtgttaaaatggtctagaatttattatcaatggattacatctctctatgtgtgtgcgcgcacatctttttgctcgcgagctcgtaaacgagaagagtcgaactgagtctctggctccgttccttaatgagtcgagaagagttggcttgatatttgttctatccaagggtagataccgaattatattatatcacatatccctactactattaagaacgtaaggtgggcacctgtgctaccacgtcctcaccccgcgctgacacactggacccgctccatgcccctgcctcggtgtcatgccctgttggccccacactcaccacgctctcgaccactgtcctatggaccccagcggccacgtagccaccac

SEQ ID NO: 31879 - DNA, 386 bp, Zea Mays
ataattttagcctcgctgcggtttcgaagacatctcagtttcccttcgttaactccaccaaatagcatagccccaggcttatatccacaggatacgacatattttttaagctcttctttttcagcatctgttaattcttgtccaagtaaatcctgaaatttaaaatctccttcttccaaaacgtcttcaacttgctttttctccttttcagtagctgcgcttgccgcgactgcagcagcttcttcttcagccattttcaggagtatattatcaataacttcaagtgtgtcttccaggttcggatcttctgtggccccggcttcggccccgacagtttcggctccgccggtttcagcttcgggagtttccactctggtggcttcggc

SEQ ID NO: 31880 - DNA, 435 bp, Zea Mays
tttgccggacatggcgccgtcgggggaaggccctgtgtcgctgtgccggccgcctggggagggagatgatacgtaagccgtggagtggtaaacggacggctgggattcggtcgaggatgtagttcggcccggctccgatatccgtcgttggatcggcaatggatgggtgaggggtcgcggaccggtgatccatccgtgaacggtcgtgattaaaacgtcgacaccgttttgggtagatcacttccacatcgttcatcttcacgtctagggtcgagatcgggtccatgttactttgaatcgccaccctcggttccggatctatggtttcatataagtatactacggtgatctaatcggggtcgttcaattctgatctggcggctgagattgaagcataccccttcggcccgtacgttttacaaaagagaccccctg

SEQ ID NO: 31881 - DNA, 578 bp, Zea Mays
gactaagccggatccacaattttggattctccccctcaaacactggaaagtttaactgtggcaaccgacctctcatagcccactaacaccatctgacccaatcatctcaggcatagaagcaacaaactgctgagcagaggaagagcacataccctttaccgggggatggataagggcggtgaccgacccaaaaccatcctcccggtgaatcgattcgatgcagtgcccatggggcgaggcggctggagatccggcagcaggacgcgctcccactgatggcgatggggcaagtactcccgtcatcaggttgggttgatccagcagcgccctctcacaatgcttggcaattttgccaacctccagacgaagatcatcaaccacgccatcgatgcccatcttccattcctcaagcgcacccgtggcgtgctcaagggtacggacgcgagcatcctgcgccgccgtatggcccgaaaatagtgcctcctagcgcgcatcctgatcggtggcgcggcgatctaacttcgcttcctgctctgcgaaacgccgagcgatctcatccaaaataatttgagtatccg

SEQ ID NO: 31882 - DNA, 451 bp, Zea Mays
cagacacaaggtctatttgatgttcaatccctctcttaggtggtagccctagtggcacttcatcaggaagcacatcctcatattcctgtaatgcatcaaagacaatacttggcaaagtagagggtaagttgttagtagaaagaaggttgtccttgtacaggagcacaaagaacatggcattaggttcactcaattcttttagatcccccttcctagtcatcatgactaatccctcttttcccggtgtcttggttattggaggctgtggagttttatttggctttgaaaactcttccttactatttttgtggatcactctcaagtgcttctcgctctctcgctgtttcttctttagatcatccttcataatttcctccggtgtcaaaggaagcaaagagattcgctctcctttgtacaagaaagacaacttgttggttcttccaaaaatctg

SEQ ID NO: 31883 - DNA, 278 bp, Zea Mays
cccaaacgtaataccatataaaaattcagataaaggaaataggttaaatgtgatggacacttatactaaacgtatcaatctctgcattttccctgtttctttgttttttgattatttgttgcaacgatctggcattatttgtgaaaatatatataaataacttgctaattttttaaaatatgtgcccaaaatgatacaaatacaactcactccataaatgaaggtacaaataatagttcattaacattttttacaattcggctgaaggttcaagcaag

SEQ ID NO: 31884 - DNA, 2007 bp, Zea Mays
agccataataactgacgatcaatttcaggcttggtgataatacagcgaaagacactttgctgctatctgagaaacgtgagaaggatgccctgaaggaagcacttactgagtctgaatacaaaaatgaagagttactgataaaaactgaagaagccaacaaaaaagttgagcatcttcaaaacactataaattcgtatgtaccttaaacaattttttatagatattatattgcaagtataggcatgtagttctcccttttcagcatgagatgttttcttatttcctgaaatgaaattcaaaaggtaaaagaaacgtgtttccctatatgtttcaaatgaccaccccgttttactaaaccttctaattatcttaatagctgtgccaaattaatcgatttttttggaatttcttcccatgctacaagatcagtggtatgagacatgtgattccatactaaaaactgcacctatttgaccgtacatgctgttaatatagcaccgatgtctctctttatactaacatcatcaacaataacaacaacaaagcagaatggatcgtacacttatactaaacatagcttgacagttatattgtcatgatcagagactcttatatcacactacctttttacataattttagaatggatcaaggtcacatgttctaaaaagatatacatgcaaagggagacattgatggaacatatgtgccacatgcatgcagaatgtctttggatctcgcaagaatatcaaatttgaaggaatgataatagcagaaagtaaaaaatagaagtgcatttatgaatatctgagatagatggaaacagttcatcaatctagggctatgtggcatgcatcacaatgcctacgttttgtgcatttcctccttttttgcttaacccaaacagttcttccttttgtgcattactactattcaatgttatgaagctgtagtgttgtttttgctccataacaggcttaaggagaacatggcagcttctttggaagctgaaagacaagaaaatgaagcaatcaagaggtcccttgttgaagctcaggagagaaacgatgcattatttaagaaagttagggatagcgaatacagggcccaccagcttcaagatactgtccaaaagttggtatcttaaatatctttctctattgtcaactacaatgccttcattacagagtatttgtcatcatttcagagactaatgtttgtatcaattaggcttcaagtagatgccatatctagactgtctagctttgtaatggagagacaagatggtgatggtgtcaagaatgcacatactgaggttcatggaacaaatgaagatctaatgaggagaaatgaaaacctcctaaaaaggaatgatgacttggtgaagaagattgaagattctgctatacttgttactgagcttagagggaacttggaaaggtattttacctagacaaataactctctgttgcagtcattcatttaatttgtcttcatcttgtgcttatttgtggccaactttaaattgtttctgtccttccacaaatacaggttagaagggaaagctgctaatttagaggctgaaaatcaattgcttcgtcaacaagcaattgcaactcctccatcaacagcaaagtcttctcaagctgcatgctctaaaatcagtatgatccatgtaatatatcttcagtagtcttcaatttgaattgctgataatattctaatctgaactggtagatgcatttcaacagagatgtcaagaaagtggtcatattttaaatggcaacgtagcatatgctgaaatgaagtcctcaaccggtcaaacagaaatgagaccctcgatggtagtttaaccaagtatatggctgcatgccattcttttttctcatacacggctgcatctcattctgaattactttacaagtcaattgatgatcgcatattttattttaaacaatgcagggcagttcccttgatttgattaaccacaaggtttatgaaaatgggc

SEQ ID NO: 31885 - DNA, 335 bp, Zea Mays
gaggttttgagccctacagtaaaggcaacagtaccgaaggtacaaatgggttttgttggaactcctaagaggaggagaatggtaaatgtactggatgtgttagaaacaaccaaaaccttgagtcccgctccaataggaaaagttgtcgaagcttccaaggcgcaaaccgaagctgatactaagcaagtagaagtcgaagctgcagtaattgaggttgaaaccgatgatgggccttcagtgtctgctgagacgaagctcgccgcaaccgagcaaaagacagaagggaaatctccagatactggcatagtttttgagaaaagtgtggccaaagaagc

SEQ ID NO: 31886 - DNA, 813 bp, Zea Mays
agccgttcgatcagacgcggatggtccagattagatcctaaccattacaaaccagcaagcgctctagatcgtccgatcacaaatcgacgcccccgattttaaagtcatgctattgcctttcacccgtccgatctggatagatggcccggatccaatccaccgaaaagttatctccctatctaatctccaccgttggacaagaatccaatggcacaaccatcatcaccttcccccgctcatatgggcacggcggcccggccagtctaccacagcggcggcagaattacagggtcctgtcccctactcgatgccctaaatcgcgcacatacgatggaaatacatacgggacgatgcgatgaatcaattgggaagggtattacctgttgattgggtcgcgaagggggccggccacggcgtggggtggacggtcgccgtcgaacgaagtccggtgggaaattccgaggtgctggagcacgattcgcccacggaaagtagttgaccacccttcccaggaccgggcgaacccaattggacactctacgtgcgtacggtcgcgttgagctcgagattccagtgcggcagcaaactatgggttcctcactgacggcggcaccctctcctacaatggcggcgcaggttctccgcgcaattcgaggtggcgttggctttcagtattgtctgtggacgctagggcaacacgaccgggcacccagaaggcttttatccccaggacgccacggtcgcaaggtccgctcccggtttctcgcgaggtgggtgcaacgaccagccgaggaaggaggcgatcctggcatg

SEQ ID NO: 31887 - DNA, 318 bp, Zea Mays
tgtggcctttttttggcaatgtttttcaaactattattctatggcatactttgcctttcttattttatggtattgccatacaacattgccaaaaagaccatacaacatgtgtaggtgattacgaaaaaataaccttctttattttcggggctaagaagtgtacaagaagtgctaagtaacctttcaaataagaagtgccagcatgaaactgtctttcctattatatggcatattttgccataacctatctcagtcgtacatcactaaactgacatggaataacatacatatatttgatagttaaaaaaagggaaaagt

SEQ ID NO: 31888 - DNA, 514 bp, Zea Mays
cgtgatcttactccctagaggtgtcactgatcgagaagtaaagccacatagaccctaattagattcggaaacacataagggaagcatcatgtcactaaggacacaactgaaactgaagataaacacactcaagttactagtttatggccttggcaaccgattgatgagacagtggattcgcacatgcgtggaagtgcactgagccatagagccatccatccacgtaaacctctactctatcctgtcacctaaatcattactacaccaagagcacatagaacaccctaatttgagtaattgagtacctaggctgcatccagaccacagattacaacacagcaagctcggtcagggtccacggatcggaaccagatcagcagcagccaaatgaagctcatgtaacaagaaccgaatatgagaggcatttcaagccctaatggagcctcctttcgcccatccgaagggagaaacccaccgatccgagtgcggcgaggacgacgccggcgaggaagaa

SEQ ID NO: 31889 - DNA, 332 bp, Zea Mays
gttggtttcatcttggctccctaattggatcacatgtagtttaggtatacagtaatgttcctacgtctcctacaatcgaaagacagtggcaggatcacctctacacgcgcatggttcgttctctctggtccatcccttctgttcgtttgaccccaaaactaagggaactgtatggaggattaaatcccctgcaaggcaaaacccctctcaaacctctccaattcccttgattttgtaatcaaatgaacacggcaggctgctttccctttgcaagttcaatggagtaaaaagctctgctcatttgactgttcctttccagtgaatcttctgac

SEQ ID NO: 31890 - DNA, 346 bp, Zea Mays
gtgaaagaccgaggctcaccatcgtcgcatgcaagatgcaactctcctgccagaatgcgagacgcagggcccggcaccgacgggtcgatgagaaggccctccacccttcgatactgcaacggctcaccgtcgtagcacgcgtcgacgcgctcctcgtcatgggagagcggggtcacgagctccactgagtcgtgctcgacacgagctggtgtcggagaggacgttcccggagagggtaccgtcggtgctggagtacgtggtggtgaagagctcgctgtagccggagtcgtggctggagtgcgtggtggtgaagagctccttgtagccgaagctggagagcgtggcg

SEQ ID NO: 31891 - DNA, 509 bp, Zea Mays
agttcatccaacagctggcgtaaccaagtccgtaacaggagagcggtacaactgaaggccatgatccaaggtgccacgaatataccgaagaatgcgtttgaccaaggcgagatgaggctcacgagggtcatgcatgaagagacacacctgctgcacagcatatgcaatatctggacgagtgaaagtcaagtactacagcgcaccggccaggccacgataatgagtagcatcaacaacaggagcaccatcagaagagagcttagcgcatgtatcaaccggagtactgcatgacttgcagtcagacatccctgcgcgctcaagaatgtcctgcatatattgtctctgtgacaaaaataaacctccgttgtgctgggtgacagatacacctagaaaatgatggagattgcccagatccttcatagagaactccgttgtgagagcatcaataatacgacgaagtagcagtgtagaagaagcagtcaacacaatgtcatccacatagagcagaa

SEQ ID NO: 31892 - DNA, 427 bp, Zea Mays
gtaggttcggtcagtagttggccggtttggtagaacgccggcgaggggaccgccttggtcgcgtccacgccgccacgcccggttgcggaaggaggtagatgatccacgatcattggatctaagaatgatggacaagattagaatcctaggtaccgattcgatacattaaagcgtgatcgtcagttcagatcgaacggttcggatgggaagtgggcgtgatcggatcttagtcgcggatctcgcatccgacggttaagggtgagcgtgggtgagtagcgttcttagatctaatccgggcgcttgattcccgatcagacggctgaaatatgagggtaccccttcagctctggatttttgctaaagagacctttaaattaaatgaaattaacatatcgtccacgtgagggactctctgaatcttagaaat

SEQ ID NO: 31893 - DNA, 317 bp, Zea Mays
gtggttaccaccaaattagaatgaaattgggcgatgaatggaaaactgctttcaaaactaaaatcggcttgtatgagtggttaataatgccttttgggttaacgaatgcacctagtactttcatgagattgatgaacgaggttttacgcccctttattggtaaatttgtggtggtttactttgatgatatcttgatttacaacaagtcattagaggcacatatggatcagttacgtgctgtttttggcgctttgcgagctgcacgtttatttgctaacctcgagaagtgcaccttttgcatcaaacgagttttgttt

SEQ ID NO: 31894 - DNA, 492 bp, Zea Mays
agctggccgcgcgcacgcaaacacacatatatatacacacatttatatatagactcacctcaaacgttgtctgtccttgcagagaaaaaactgctttcagtttcacctgaggcggcgccacattccttatctcctttaaatcctcaaaaaactgatcagattctgataggctcataaatgaatagatgtacctatcttcgcatatattagactgcagggtcaaattaaagttttgtgttggtagatacgtcagctccctcattgtgacaacaagagtgtaagtggattttggtggcacaattccacttaggggcatccttacaaagatctgctgccaagactccattccgtcttctatactaagattaaaagccacatgttcatctgttttatttgttaggtgcagcgtgcacgggatcaacttgtgggcatggaagggaaagtggagtgtcagcgggtggacgtcaagcaaaagctcgcttgaccctgggg

SEQ ID NO: 31895 - DNA, 695 bp, Zea Mays
tacaaccacaattagcaaggtgctagaaccaatttcatgtcaaaatagaaggtgccacaatcacgtttaggttagttggagactcattggacgtatgctgtgaggcggaggggctcaagacgatatgttgtgaggcgtagggtctcaagaacttgatgttggaagtgctgctgctccagctcgtggctatcgtgggccgaggtgcataaggctggcaggacgacggttgggaacgcatgaaagcgaggatggcgagcctggtaaggttgtcgcatgtgttgaacgcgggttggcgagggtggagggcgcgataaggctgttgggtgagcacaaaatgcgtagatagcgggcgggcgaggatggcggtcgtggcatgcacggacacggtggcaagaatggagcacgacatggatttcgggaagccacggttggagcgcccgcggttacgggtgggttcatggtgagtagaggggttgcaagatttctagggtgctcgggctggttgctagctccacggtaatggaggcctggtggaggcggtgtagggagggaggtcacggggagatccggacgagcggaggcggcatggagagggagggcgcggggaggcggcgtggggaaagaggttagggatgatggtgtgggcccaaagggaggcaggacagagaagtgcataggacaccaagttgattcat

SEQ ID NO: 31896 - DNA, 274 bp, Zea Mays
cggctgaggcgaagctacagaagctgtagcaggaacttgccgacaaggccagcgacattgctcgcgccgaggaaaacctcaaggcgagggaagcttccttggcgaaacgggcaactgacctcacctgacaagaggaggacctcgccttcaaggaggagatgtgggcaaggcggaacaagctgctggatgagcttgagctccaggcagaggagaaagggaagcgtttggatgggaaagtgcgggcactggaggagcaggtccgccagttctaggc

SEQ ID NO: 31897 - DNA, 728 bp, Zea Mays
aggcagccgtcatcgacaagaaaggaaaagaggccttagcaaaagacaccctacatgacacagctgaaaactcgacagaggcagtcaaacaacaagcacccttggacggaagaccccctaccctggaaggaagcatgccagcatccatacatgtagctcaagagacctatcccgtgatgacccaccatcgggatttgctcctgcagcgcacctcattgctcaaggggtcgaagccatcctgcaagaaggcaaagacctaggaatctcagcggaagaccaaatcaagttgcaagctctccacataaaaaacaaccacctttagaagcaaagggaaatcctagagaccaaaaggtagagaaccaacatgcaggcccgtgtgagacaactaaccatggatgaagaggagaaagcgagaccactagagcaggaaattacagatatgtagtacgaagacccccctgtcaccaacggccagttgcagctgttaataatcaattttttatcatttccacaggcttgcccatatgcaatttgctttccaaggactaaactacctcgatgagtgaatccctctcttggcacagctccaagactctccatggtcgcacaactatagagcgggcacctatcccaactataatggcaatacagagccaatccaatacacaatgagttactaggtcgccatcatatcctcgagagaagattactccaccatgtctaagtca

SEQ ID NO: 31898 - DNA, 294 bp, Zea Mays
gtttggacctgggagatctcgttgccaaattgtcgtgagatgtttagacttggagtgtaatggcatcgactctatccaatccagtatgcgatccaagctctcaggactgttggggggagatattttgacatttgacacccaattcacatgtctttcaagatttgacaccccctatcacaatgacatacggggtcactgagtgatttacatgtgggccaggatgtcaaatctcgaaaagcatgcgaattaggtggccagcgcaatgcattggtggtgataaaatgtgacacttaa

SEQ ID NO: 31899 - DNA, 324 bp, Zea Mays
cggacacgcaacttggccacccggactaaaccctgcgagtcccgagcatgtatcaaaggatggctaatatcagacaggggaccctatgggtgtactactaacgctccctagccgaagctgtatacagatccagatcccggcgaggctgcctcccgagagttgttgacaactctttcagatacgctggtatccaacctcgacacatcaagcctgcatcccaggcggggggccaggtaccagggaggagtcaacaacataacatcacacacagcaggaacacgcggtacacataagtgctaacactgcttgataaatagtgctcaa

SEQ ID NO: 31900 - DNA, 511 bp, Zea Mays
gggggccaagcgaaacgaggggaagccactcgagtggattcctttcctggctcgagactgacctattataaatggttgaccacattaactacgcttgacactgaggcgtagtagagaaccgatccacctcccactcatgatatgtgagcccctcgacctgcgacatacttatgacctattgagactaagcctgagtgcacagaccatctacagggtccgcaacacgacgagcacgccgagacccatgctacccataatgagaacgagcagagacaattgggtgaccaagacgcatacggacaacatgacttcactagggtaaaacactctgttttatcatagtacaatagctccttctcgaggaagctacaagcgaccgacacccaccttggcctataaaaggaggagaacgatcacgacacaaggggagggaccgaagagaccaacacagggacaatcgacagaagacggccacacacgctcgacgagactagaagacctgaaggctaga

SEQ ID NO: 31901 - DNA, 321 bp, Zea Mays
tgaagagagatgtggctgcacatgtggctatgtgcgatgtatgccaaagagttaaggctgaacaccagaggccagccagactactgcatccactgaagatacctgagtggaaatgggaagaaattggcatggacttcattgttggattaccccgcacgtctgctggatatgattctatatgggtgattgtggacaggctaactaaagtagctcactttattccagtgaagaccacgtattcaggagccaagttggcagagttgtacatggcacgaattgtatgcctacatggtgtgccaaagaagattgtgtcagaccggg

SEQ ID NO: 31902 - DNA, 383 bp, Zea Mays
gctgtatccatgataacatcgaagactgcccagaaattcttctggcaaaacattgtttgccgcttcagagtcccgtccgaactcacagttgacaatggcaagcaatttgacagccaagacttcaaggatttatgcttctccatcggcaccaagcttgccttcgcctcagtgtaccacccgcaatccaacggagttgtggaacgcgccaacggtaaaattttcacagccgtcaagaaaatgctcctcgacgacaaaaaaggcaagtgggcagacctgttacctgaagcggtcttggcgctgaacacgactgagtgcagggcgactgggttcacccctttccgccttctatatggatcggaggccatgactccgcaagaaataaa

SEQ ID NO: 31903 - DNA, 495 bp, Zea Mays
gattcatgcccaatggcgcgcggataatgactcgggataaaagatcttggtgttgggatgagcttggaccctatcaccggactgttcatcgtacccacttgttgtacgattaaccgaggtgtcctcgccagagttcgccatcttcgtagccgtgccacatacttaggagtgttaccacgtcgcagtagatcgtcgttggtagcctgctcattgcctgggacattgcctcggtcaaagccacgatcgtgttcgtcggtgactcacctcctctctctggccgccagcactcttctccaattcggagccaccgctctcgtaggctataaattgagtgcatcgttagctccgttaggttgttacaaagccagaacaccagccctcgtctccgatcatccaccacaacatcctaatttgggatttcccccaaatcggttgtccgtgtcgccgtgtgatgccacgtcgtggaccgccatctccaggcccgctctcgccctc

SEQ ID NO: 31904 - DNA, 398 bp, Zea Mays
aaggtcgtgtgcctattctcttcattgaacaatttgtcaaaatacttatctctgtttgatcccatccttcaccaagaggcatttcatttcattcttaatgcacttagcttggttcaagtcccttgtcttcctctcatggaccttaaccattgtatatgtgtcctcttgttccttcatactcaaacattggtcccctaccctttgccacacttacaactttctttgcggtcttgtttgctaccttgcacttctgtgtgttatccacactcatgttatggtacaaatcgttggattgcctcttctctttcatatcaaaatgtaatgggcctagggcttagcccatgtacttgatatatatatgaagctagattcctttctctcctcccctcaccctcatc

SEQ ID NO: 31905 - DNA, 523 bp, Zea Mays
ggggtacttgccgaggtgatcgaagttaagccactgatcggctcgtctaaaggatattgtgtgtttcgaccatcggtatggggccatagcgctgtttgtggccaccagaacttgccgattagtgagtttatattgccttttgttctcttacgccccatgtcctccgaatatgacgttaacttcccgatcgatgcgtgggaatgctccgcctctacctccttcctactgttgaggctagcctagctcggtaggctctcctcagggagggggaggtggtagtggctggaatggttggccatgcccgacagagttcttgaaatctctttagttccccatggtgtgtcacatatccttgtggtatgggcactaagagtcaaggatctaatctagtgtccttactccaccacggggtgcaccacgggctcgagttgcaggtggcccagcggtgtgcacttcctcctggggcctcttttccaagcgcttgtctggttgctggttcatgtctttccgaggcaccgggggc

SEQ ID NO: 31906 - DNA, 563 bp, Zea Mays
accactcaagtatcctataaattgaagcctcagcatgttccgctaggtaatcgtgcgtccagtgaaccaactcgtagctccgatcgttccccacagctccccaatttgggatttcccccaaattggttgaagaacgccgcgaaatcaagctcgccgtggccagcgctcctcgggtcagtatctatcaaattactccctgttctagcttgattgtagcctcctattgctctcagtgccaaccaattgaaattcggctgaagcctttcaccggaacacgcgcctgctctgtagaacgccgctatgccaccctcaccgtcgacccgctcttcggttcttattctgcccaaaccaatgtgtgtacataacccctggtgaacccgcgaacccttccccagcctcaatttggtcatccccgccgtcgtttggctggaacgcgttcatccctataaccatccgccctgtcaccgtggactgattgattcaatgcccccttgatgaaattgatggaggggaagtgtgcggtaggagtctaattcggtctctgtcgctcaggagctcctgcc

SEQ ID NO: 31907 - DNA, 276 bp, Zea Mays
aacacctgtgagctacaacgtcgggtatgaaattgggcctgttcttaagagtactggatgtgcttgttccttgagatttgagaaccccagtgtaactacaccaagcatgcaatgctaactcagaatgagttggaaatgagaggttgcattcagattgttttggcatagctgtgggtgaatcctgtcataacttgataggggcttaggcactgtggtaactcaaatttctacactgttcttggtcgaaagataatttcagtttgtattgtatgcatt

SEQ ID NO: 31908 - DNA, 735 bp, Zea Mays
ccctgcactttgaatcgcttatgtcattgttagcaatcacataatatttttcttttctcttagatttaatttgtataatcatataatcattcatatattgttacaacaggatttggttcagcttctcactttgttttttaatgagaagaagcagacaacaaattatagtgaaggctcctctcgtcccccgtcgcttggtggatcacccccacggaaccagcctagccaaagacaggtatgtgcatgatgtcattcttggtagcctatcatcatctttagctcagagtgcttctatagtgaaatggatgtagtgcaagttttatttttattttctgctccagttgttttctatgctacttccttggtattagttcaccgtgcataagtgatctgcagcaaatgttcttcttcctaaccaattgtatatgctcttaattgtcctctaatctctactactctataagagtttagtgtgggcgtccacaccggtgcgccgtgcccccgcctccgtgattcgtgtccccgcgcccgctaatcgttcccctgcccccgccattcttgcccccacgcccgctctccgtcacgccattctagggatcctcggcgactgcccctaccaccattctagggaatctatgtggacaccctcaccattctcgcccctgtgcccgctctctatcgcgccattgcagaaaatctttcaggtcaccgccaccttccttgcccatatgcccg

SEQ ID NO: 31909 - DNA, 460 bp, Zea Mays
gtgcgtctcaaggtacctggcttttgcttcatggaggacctcgctgacgtagtagaccagcctctgaacggtccggacccctgccgagccctcaggttcctggccttccagtgccactggtctttttgtgccgtcctttcgacgaccagcaccatgctcactgcttctgcagccgtcgcgatgtataaatacaacggctccccaggttctggagctaccagtatcggtagggacaccaggtgctgcttcaactcttgaaaggcttgttttgcctcttcggtccaagagaatgggccggacttccgcaacagcttgaagaagggcagcgccctctcagccagccttgaaatgaagcggctaagggcggctaacgacctcgtaagcttctgaatgtccttgatgcgggccggaggcctcatcgcctcaatcgctttgatcttctccgggtttgcttcaatgc

SEQ ID NO: 31910 - DNA, 418 bp, Zea Mays
ctagacactattgaataaggcaattggccttgaaagcaaaagaaaggaattatctgaccataaaaggaagtttcaaggtcagtctagccggaacacccgcccgaacaacgctcaaggttagcagttccgctctagaaatcaaggcagaagcaattatcagatgcaacgctctggacagcaaggccagagaaataatcaaagccagaaccagcaaaggagcaactcctagaccaatcagaggtctggtgggagttcacagaatcgtcaaggtggcgccagtaacacgcaggccagaagcaacaacgcacctgtccaacccaatggttgtttcaagtgcggtgagctaggccactatgctaacaactgcccaaggcgcaaccagcagacaccccagaaaagcaatactcagaggaatgac

SEQ ID NO: 31911 - DNA, 274 bp, Zea Mays
gtctgacttccatggtttgaatggggctactaagtttggtgttggagttcctagggacccaccagttccatctataaccgctagtgccccattaacctctacatccccagctaccttgaaaccaccagaatcatttcctgtaaaaccagtttccaactcatcggttgttcctgtactctattctggtccatcaaaccttaaatcggacaaaaatgtcagtggtcctctgaatttagcacacactggaggtattttctagtcttactgtttgcag

SEQ ID NO: 31912 - DNA, 353 bp, Zea Mays
ggcattgcaggaaatgaagaaccaccttgtgaggctataaagaagcttgcaataggtgaagtgagacctcaagaaaaggatgatgaggaaggaaccttgtggatgaccaatgaggtttttgatgtgggcgcaaaggtggtgggtgataaatcctccacccaagcaaacccatcaacctcaagtcatccaagtcttgaagaaggtcatcaaccccaaaggatgccaaccgtggtagaagatgaacatgaaagtgttgatggtgaagtgcctcttgatcaagtggatgaggaggaggagcaaattcaaagacaaccatcagtgccccatcctcgagtccaccataccattcaaag

SEQ ID NO: 31913 - DNA, 318 bp, Zea Mays
gccgcatgttggcgatgacaggagcggtgatgagcggtagtacaccggcccctgccatgttgtcggggcagtcggatgccctgaaggagatggtggtgctcctccaccgttgatgcggagcagccttcaggacccccgggaccgccgaaaggacctcttggcgcagggacttgacgtttctgtgggaggtgagctcccaactctcgccgtacatgacgtacaacttcttccggcggtcgttgttgtcagtggagtcggagtcctcggtgaagacatcctttaggtccccctcaggtgattgatacccgaggtcccgtt

SEQ ID NO: 31914 - DNA, 644 bp, Zea Mays
ggggggtccaagccgaagttggtagcacagtatcacctatgatagtggtcgtgcttcaagggtcggtcagcttatcaatgggctcgttcgtatccccaatatctgacggttcaccatgcagtgtagtccatccatagtgtcgtttcctatatccgtacgagaggaatgagtgcttcatggttgatttagacgtaatggatgtggatgttagtcagaataggaacaacctccattcccctccatgttgtggcgaccgttatgatgacgaaggctaatcatggagtggtcatcctcattcttttgatcgttgacccgtgtgtggtttgtttgtgcctgtgtctagtttggtcatccccttaggctaggcacgattcgcctgacccctaggttgacttagggctcgttcaaccctttttcgttttgcccaacccctaggcgtccttgcttcacatcgggactaggggcaaacattagcggtttactcatgatccagaagcagattgggccttactcgagccttttcagagtatctttactcatcacgactcgtgggccttggggacccggttttgaccctgacaacagagttttgtctttcataagatgtgtatataatgaaattgatgatcaagattccaatgttt

SEQ ID NO: 31915 - DNA, 307 bp, Zea Mays
ttttgtgtgccatggatgtgccatgggaaaattgatagtgagaccatctcccttgaaagtaaagaatgaaatgcccaccttcttggaacgaatccagggagacatttgtggtccaattcaaccactttcaggaccttttcggtattttatggtcttaatcgatgcatcctcaaagtggtcgcatgtatgcttactatcaactcaaaaccatgcatttgcaaagttgatctcacagatcatcctaattaaaaatactttccctgaccaccgactaaagtccatcagaatggataatgctggagaattt

SEQ ID NO: 31916 - DNA, 445 bp, Zea Mays
actttattcgctctattcttctctgtgaatagcatcggtctgtagtcgaagtatgcagtagggcgggggttggatgtttctccggcggcgcctcctttctgctcggtcgcgagaaggaagacgagatgtgggtggtcgatggaccgatcaacggtccagagcgagccagcgtatgggagaaatctgggccgctggattagtcacgactcgtgcagatgcggtcataggtgttttaaatcgtggccgttggatttagatccgatggctatcggtgcgtaccgattcgatggaacctaaatctaatcaccaccgtcggttgtcgatcgggcagaccaaaactcaccataccccttcggccctggcacattttcttatgagcccctagatttaatggatatcaacccgcggtcctcgggcctgttctctgtgtcttagaagattttac

SEQ ID NO: 31917 - DNA, 480 bp, Zea Mays
tggacgctcaatctcaaccctcggttactcgatcaacggccatgtgcctcatccacaccacaactcttacccacggcggcgcagaacagggccccacgatagcgtattctcccctacggcggcgccatggtcgccgagcacccaaactctccccacagctccatcatcgacacgattgggaagaaaacaacgagaaggctactacggtttggatagtaggggacttaccagagttggtgaggtgatggcctgtagccacggcgatgggaggcgttgtggctgtgaaggccgacaagggattatcggccggtcaagctttaggagtcttcaatttagcgcgatgaagaacttgggcacaattttgagcgcagtatagaggcatggaaggggatcactaacggtggccgcaacctttctcttcgccccgctgatggctcactctgatccccaattgctcacgacggcggtggctattaactt

SEQ ID NO: 31918 - DNA, 818 bp, Zea Mays
ctgaagaagcactccatgatacagtacaccccaaactgaaacagatcgtggttcacccaccccctcctcgtcgccggtgatccgtcgtcgtgatggttgattgctcgtcgcgattcgtgcaccgtggtcagcagatatgcacgagcaagtaaaaatcttggcataggatcgactcgagctcggttgcgactaagcccgccgtaccccccttgctcatcggccgatcggataagagctcgccgccgttggttgatcactgtcgtgcgccgcgtgtccaggctctgtaccacgtcgcaattagttgtgttatgggatccggtgatcaccggaggaagcgccacggtgaaagccacccatcccatgcaccagtatccctgtttccctccggccgccagcacaacctcgtgaaattggacaccaccgacgatgtgaactataaattgagcaccccttcagctccgccatgtattcaagcagctactgcacccacctgcaccccaaaccccccaccagagagctctaattttggattctccccaaaacgcttaagaactcgctcggtttagcctcatcgcgattagcgcgactcaggttagttcatatcgcccgctcccttgtttaagtgtgctcatgtgcctgtgatgctcgtcgacccacccaattgaactaggagcccactagtcgtcgggaacgcgttcatccacccgcaacatccacggtcgccgtagccaaagcaaaccgggtagctattcgtggaattaagtgaggggaaacgttcattagatcccgaattaggtttaggccaaagaagggcgccg

SEQ ID NO: 31919 - DNA, 551 bp, Zea Mays
ggtaggagtggcggaggctacgggtgtgatggaagttgtgggtgtagctgcggtgcaggaaagctctggagtagtggaagtggtaggggtaggagtgcaagcggagctgaggctagtggagcagaagttggtggagtaggtgaggggtctaggacagccgggggagtgcgcagacgagaagactgttgttgtatctaaatggaagttgatcagcaccaatgtgaatttgccctccctactttgctcgctctgctgctgcaagcattgctcgagtagctctatccaacatgcgattttcttgcctccttgctgctctaggtagactgccttgctgcctagtagggcaaggtgggtcctaatcatcacctccacctgacggacccatgttcttgacatgggccatactaacactaaactgagtccaactctgaaactaccaatagctgactacccacacattgcccactcacgcgctgaggcacgtcacttgagggaatccaagcaaggggtaagagtcgctcaagtggacacatcgtctcacaagggggaag

SEQ ID NO: 31920 - DNA, 373 bp, Zea Mays
aacacaaggctgctgctgtaggtatatcagtgtgtcgcgaaaagtgcagaccttgtgttctactacgaagactgctcagctgctgtttttcgcgactaaaatggcggagaaggctgctgctgctcatctgctgttttaagactaaaatggcttttggcctcccagacagcatttaaaggactggctgactgctcgcgtctacccaggctgtatctgaagggattgggcgtcctttggcctcccccagacagcatttaagcctaaaatgccttttggactaccaggcttatcggctgatcgcccaacacggcgattaatcgctataaatcgcgattaggcggatgataaggacgatcagctaccctgatcgaat

SEQ ID NO: 31921 - DNA, 380 bp, Zea Mays
gttcgcatagctggtttttgacatgtgagattttgcttggtactgcaggaattggttctttgaataatttccacctatgagcatgattgagaggttgcactacctgtgctgttcttaaaccatgctgagcatttatctgccataaaattttcaacaacaagcatttaaggtgttccgtacgtaagcattttgagtttcgtcaatgtaacatgcacaccttgcctgtttcaaatattagatccctgcattgtgagaggatactgatggacttaggagctagctggaacaccccttcaccaaattgaatggttgataccttatgcatgtcaaagtttaccaggaaagccacacacccagaatctgttgcaaaaacatgcccc

SEQ ID NO: 31922 - DNA, 566 bp, Zea Mays
cagagaccgagctaaagctagtgccgaagtcagacctaggtttgatttcgagcagatgatatggtggagtctgagttgatgtgcatattggatcttaggagtttggatgagggacatcgagcccccgaaacatctaggacaagccctatattcttgagagcatcggtggcgaatctaaaggtgtcaataaaaatttcctctccttttgcaaacccatggttgccataaggtctccaatgatcagcttgacttcccctacctggtacgccaactgttgaatattatttggcaatgaatttatgaggggatcacgagaccaagaacagaaggtaaaggcacacgagactcgaagatttagacaaactttggctctcaatgagagataatatcctatatcttatgtgtggtggtgtctattgcctatgcaatatgattagatgacctaacctcttaggacgtcttggtgctccttttatagtccaaggagggtgatggttatagagaagggatctaggtcgatctccaaataaggatagtgatttgtcctagccgagtctatcccaaat

SEQ ID NO: 31923 - DNA, 467 bp, Zea Mays
gttcggcgccgtgctccatcaaggtgatggtgcaattgccttcttcagccgagcagttgcgccacatcaccagaagttgtccgcttatgagcgcgagctgatcggtcttgtcaaggtcgtgcgtaattggcgcccatatctctgggggcgtgcctttacagtgcgcactgatcattacaatttgaagtttatcctggaccagcggctctccaccattccccaacacacatgggtcagtaaattatttggctatgatttgactgtagaatatcgtccaggcaagttgaatggtgctgcagacgccttgtctcggagggaggaacccatgggcactctgcatagcatgtcaaaccaacattctcgttgtttgacaacctacgagatgaggggccactaattcccaagtggagactattcgtgctcagctggcagcaaggacggccaaagagggatggactgaagtagat

SEQ ID NO: 31924 - DNA, 454 bp, Zea Mays
gtacttcagtaaccagctgccgaactgcggtagatatctcagtcgaagtgaagacaatactttctcttcggcattcactgcattcatcacgctccaccatttctagagaaggataaagaccatgctggacacgtcttcagccatatattgaggatccatttcaccatatcccatggagattgcaggtcaaccaggccctctctaatatattcctaccctagctctcttcaacatttccaagcaaatttacacttacaagataacagtgtccaccaccttcatcgcattgtttacaaaccaggcaaatagtgtcagttagaactactatacgcttcaggttcattttaacagccaagctacagtggatcaggcgccaaacaaattgccttatgctttcaggtggtaagtaagtttcaaaatcttcatccgtatattccaattggttcgccatcac

SEQ ID NO: 31925 - DNA, 487 bp, Zea Mays
gcaggatatgaaacaacgtttagtgcattatttctcggaggaggcatgtccatttaatgtgaggggacgtcctgtcggtcagccgactgtttgtggcgcgcatgcgcgcaggattcaaaacgatcatcatccggccccagccgttacaatttgctccttggtggcttcgcctgtccctatataaagtcgaccaagacggaggcttcgtaccgttacctctgtcgctctagccttcctgcttccatacgtcatttttgccttttgcaaaaaagagcctttcaccttctccacgttttcttccacctccccgatggctgagaagattagcgttcttcctcctcgcgatccatggcccatctcctccatcaccgacgaggatttggaggcgctggttgaggccggcctactccgctcccgctccacgtggtttgcgcggggcgatgagcagatgctgaatccgctcgcaggctacatagtgagcttcacc

SEQ ID NO: 31926 - DNA, 452 bp, Zea Mays
cgagttatctcgcggaccgtttggggcacatggccgcaccgtccgaccgtgcttaggtgccaaatatggtgctcaacggatctagtagggttgggtggtgttcagagaatgtaagtacatttttatgattatcatgaccattagatcagcttgcatatgtctgcatgataacttgtccagaaagtattgtggtttatttgttggtgatggctaccgtgtcaacgcaacattggtccatacctttgatttgaaatatttgggtgctgttaacaaagtgtatacctccaagccaaggtagtaaatgttggacctgaagtgttaaaacatggctcagctggttgggtggtaggtgtggtcgtgcacccaatcaccgaaggtacaaggcctcggcttgaatttgggtgcctatttctctattttcatttttaattaaaaaaacgtctagtttcttc

SEQ ID NO: 31927 - DNA, 289 bp, Zea Mays
gcagctcgtgcactcggcagaaagcttcggcatctggactcatcccttggcttcggagggcccagatatatacgttgagtctaacaataccgtagggagttagctgatgaagatacatctcaaagttctttaaaactacccctatcatttcattcagggggaatcgcagccctgctctgaagaagctcttgaaaacgacaacttcatccttcttcggctccgggataatctcttctccagcaaatcgaataagtttgctctcagcctctccaaaatagcccaatttcat

SEQ ID NO: 31928 - DNA, 343 bp, Zea Mays
gccctaagcggcgttcggcgaacgacactacggcgttcaagtgaaccctgtgtggtagagttcaaacaggaaagcgcataagcttcacgatggcctatagaatgcgaaacacaagttaaacaactatgaccaaccttaggaaaggctgaccacgcaggtgcaccactcggcagcgctggtgaccaccgatggggaacaactggtgttcttggctaccgacggtggaacgggggaaacaaagggtggcatggatgcgtaacggagaggcgagactgagagcaggctcaatttaaagggagtcaccatgacggtggtcaatttgacagctgaatcacgacggcag

SEQ ID NO: 31929 - DNA, 402 bp, Zea Mays
tcggcttaagtcggcaatgacttaaggcggtgcaacatgctcaagcttacttgactcggggtgaccactatgccctgctaacggagcaatcggcttaagtcggcaacgacttaaggtggtgcaacagctcacgcttacttaactcggggtgaccactatgccctcctaacggagcaatcggcttaagtcggcaacgacttaaggcggtgcaacatgctcacgcttacttaactcagggtgaccactatgccctgctaacggagcaatcggcttaagttggcaacgacttaaggcggtgcaacatgctcgcgcttacttaactcggggtgaccactatgccctgctaacggagcaatcgtcttaagtcggcaatgacttaaggcggtgcaacatgctcgcgct

SEQ ID NO: 31930 - DNA, 1420 bp, Zea Mays
tggagatgttgtcttttgtgaacatttactatttaaatgttttctgcaattgaacaataggattattcttcagatttgatgttgctgctggtgctggagcctcaaaaagaacctgtgaagctggttgctactgttcaacagttcagaattaaaatagttgttactgtacaactgcattattgcaccccttcttgtcgtagcctctacatgaggtgagcccttcttgtcgtagcctctacatgaggtgagtttcaaagttggtgtatgaactgatgaaattagcgataatcaatgttcacatgtgctattgagttatttttgcacaccgtttggcagttatcatgcttattactatcctacaaaattattatcccatcttttgtatttatgccagatcgaagctaactgcctggggagcacaaaagcgaatgaatcatgctaataacaggttgtattttggcagttctcatctggacttccacctagaccaactgcatgacatgtagaataccaaaattataaccaggttgatagatttcagaagtatgctaataacagggaagttattcaaaatataagtaaaaacaagaagcaagactgcttgagcattactgtccataaatggattacattttggatacacaatgaaagcactgctaaccatttaagtattttttgtgcattgatagtattacctttataccagcatatatgagagataatttgggcagtgtaacaccaccgaatgttttttgtattaagattaacacctcaggcatgccatactttgacttcataccaaacacatccataatcttttagtattgacaacataataagaccacatgactgagaaagattgaagttaagctctgcaaccattatttatccatttactgcatcaaaataatggagaaaattcggttcaatgtaccactaggggaactcaaatgtgataaatggtctatgagaaatattttggctcaaatcatatctattatacacctatacaaattttgaatatgcgactgttgtactaatgtgatgttttacgtgcattgtccaaaactgctgtaatgtgatgatttactatgaagcctagctgctattattcccttgttagtagtaatgcatacctcatcatactaattttcattccagacttccagttagacatgtatcatatgcatgcttgtatgagggacacatttcttggtcagttttttcagaaacatgagaggattagtttcttctttaattgtgtacacttggattgcatcttagcaattttatgtctcagtgatagttttcctaataataaaatcaatacaattcatagacaatgctacttgctttgtctgttagaggtgacattcaaattatttcatgttcactggtccaacagatttgggaagcttca

SEQ ID NO: 31931 - DNA, 687 bp, Zea Mays
tggcacgagacgggacgatcaagaagtcaaaagacgtaaaagcgacgtttgacagataaatagtgacataggaagtttggaattcgaaatgaggcacgaaatgatatggaattgagccgatacttcacgaataggtttatataggtcaatatgagtgaagtgtgtgcttggtttgaatttaggcgaagaaatagggatttgggcactcggctcggaaacgatcgctcaaaacgggaattttggtgaaatttaagcctgggatctcggattggcgtgaaatttggcaagaatgttgctggaagtgttgtggaggtgcctgaaaaatttgggttcaattggagcaagtttggctggtttgggcatttcaccgagcacgtggtgtgcggggatttagggttttggtgaaacggtattttgaggtgggaaaaccctcccgaaggagctaggaacctgcaaggatgcttaaggcacacaggggaacacatttcacaaagggaaatcaccagaattcacaggatttagagttgttgcacaaagggaagaggtgggaggctctgctcaccagaacagagaagaactgagggagtgagagagcaagagttgctcaccgaggagaggagaggaggggagcccaaggtcaccagagcaccgccggagagggtggccgccagaggagatcgccggcgg

SEQ ID NO: 31932 - DNA, 335 bp, Zea Mays
cactttgtgaaatattcgacgacgacgaaggtgaatttgaggttcccttgagccgtaggcagtggtccaacgatgtccagcccccagcgttgaagtgaccatgtatgggcgatgagcttggtgaattgtgaagggctgtctgagcgaggggagaattttcggcatgcttcacacgacttcgtgacttgattggcggtacaaattattgtgggccagtagaatccttgacgaatcaccttggcagcgagggccatgggtcctgagtgggagccgcaagttccgatgtggacttcgcggaggatttgtatgccttcgatttcagttatgcacttcag

SEQ ID NO: 31933 - DNA, 671 bp, Zea Mays
gcattatttgtcactgttactggtaccagacccgctgttctcggctcggatgtgctggaggaagtgtcccgtcgttattgcatcaatattgatgatatgtctatccaccagtccatgccggaagacttccttatgtttttgccggatgaggaagtggcgacaagagtgcttaatgaaggaaagcctttcagaggccctatgttctcgctcgtgttcaagcaatggacaagatttgcacatgcctcggctacgtccttctctcacttgatggatattgagatccgtgggatcccagcgcacgcgtggggtctgaacacagccaagaagcttcttccctcggccatttaatcaggaggcgagatgtttgacctacaagattagcattgctgctattccggctccccttcagtttccctcggacagcagtctgcctccttcagatgagaatgagtttcatggtgaggaggatggagatgtccggggtccgtccaatccccggatccgacagccgtgccctttgcagcgttagcctatccaccatcgcctcggttcacatcagagagtgggcagagaacggtctgtagctatgcatggaaatatgatggaggcgccggttctagctctggtagatggtgctgctgtcagtgttggtgatgggctgctgacctcac

SEQ ID NO: 31934 - DNA, 331 bp, Zea Mays
caccgaggtccgcttcgtccaccgccgggtgtacccacaccatagtcaacaggcgccagccatttttcaccggtaagcaaacctcctccgagttcgcctctacccgctccacgtgtagaacccatccatgttcgattccgccccctcgttcgtccagttctcctgctcaccgtcgcggtgccgcgaggcgctgtggacggactgtcaccgcattcgtcaccaatgtggaaccctcccgtaaggttcacctggacctcctctccaccttctgcaaagaaataacgagtatcgagcctggctccccggatcgcctgaacaccagtgatgccgt

SEQ ID NO: 31935 - DNA, 304 bp, Zea Mays
gacatttgcccctgaaaaagtgttagggaaaacaccaaacatcgccggtctcaaagagggtagcgatcaccatgagaggaaaatcgtggttcgctagagaagtggaaccaaagtcactgcacggagtccttggccatatagcacatgcctaacgcccccaccggatacgaccaacctgtggtctcactgattgaggtctaacagcatgaggcaaagcacctctaggattatcaagatgtctttgaataggaagggtcatgggcatcatgagaagggcagttctgaaagggaaatttcccttggg

SEQ ID NO: 31936 - DNA, 346 bp, Zea Mays
cgggatttcatcgagaggtctgatccaagaaggtttcttttcaatcgttctaggcctaaccgaacaagacgtgatgtgtgacgaccatccttagctaccatcgatactgtgttatgctttgttcgagcgacgcgaacgaactatactatcaccttcatgtaataacattgttccactaccaattattgaatctgcagatgtttcttgttgtctctacgtgactaagcatgaaccaaaccttcactgacaccacacaaccctgacagcgtaagagtaccgtcgccggccggccagttgccgtcacacttaaacaaatcagaaccgcgccaatggggcgtcgatcgtt

SEQ ID NO: 31937 - DNA, 275 bp, Zea Mays
gagggcagcaccagctggtggggggcacgagcttggagatgcgccgtgggaggaagactgactacctcgacatcccactcaaggatagcatcaagggatggcgcctggaatggttcatcgtggagaatcatgggaattccctccccccacggtcagggagacagccggatgtccgcactccgagctggaccgaatcccccacagaccaggaggtggctgaggcaggggctctgctagctgaggttggattgttgaaagaaaggggtctgactgca

SEQ ID NO: 31938 - DNA, 646 bp, Zea Mays
agcttcgccgagtccccacggagctactggtcgtctgggcggaaggaggggaccactgggtgaccggaatttcgccgccgcgcaaccggatctgttctgcgccgtgggcagactatctcggtgcatcgattgctgttgagaacgccttctccaatctcgccatggcctagtagtgctatcgcgcctgtttaattagaaaatggggccagggttggcgagatcggacgactccggcgaggttggggcatggcgccgccgttctgtgggggaaggaaaggtggaagatgcacctgtgcggttcgatcgttgttgaacggccgagatcgattgataggataccccttcgtctcatttaatcctagaggtcggatctagatcgtgcgactcggtggctgatcaaggtattttagatctgagtcgtcagccatcgatcggacgactggcatggcatacagattcgcggtgagtcgaagctaatcctcaccgtccacttcaaatctggcggcccatcgtggcccgtaccccttcgcgagcacattagtcaaaagagaccctctatttctatataatcaacccgtcgtccactccgtagtattctgagtcttagaacattatgcgcagaagcccctggccttttatgaatttg

SEQ ID NO: 31939 - DNA, 528 bp, Zea Mays
gggatgcgtaggccatgaatgtgctgcagtctaaggggctagtaggtcatgagtgctttatgggtcgagcggttcataggtcatgattgggaggcagaccggcgcgcggcttagtgcctggcatagataatgcgacgagtcatttatgacgggtttgtctgaggctaggtgtaggatcaactcgagtggttacccttcggcacaccctccccctattaggttctgccatgcccgaccctgagctcggtgtcatggggttcatccagaggtgggttattctagggtagatgttacctatctcctctagctatctagcgagcctcatttgccagaggccttcccctagtgtgctcgttgaccgatggaccctagggacaagggatcatatccttgatagtatccctcgagcctccgagtggaggggtgagggtatctcgcctcgggggctagtctcaggtccagcactgctttttatcccagcatacttccatagttttgcgtatttggcactgagccatcacatctttt

SEQ ID NO: 31940 - DNA, 338 bp, Zea Mays
atgaattccgcccgccacggttgctccaggtgtcagctggcagtacgcgcacccttgctaaggtcaggagaagctccccaggctatcagagagagccgaccgagaccagggcacgaaatcgttgacggcgtggagcttcgcttccccggtgtcgcactgttctcaaccgcgcggggtggtcacgaagaagaagggaggaaggggcggaactgggacctcgaatcctttgtagacgccagggtactcagggcgcggtcactagaccagcaattatggcgcggtctcccgccgagttcggggaaatccgttgagggaggtgggagacggctgacttgccg

SEQ ID NO: 31941 - DNA, 549 bp, Zea Mays
gccacccctattctgagggttctatacgggtaggtgccacgccgccctgattgtgtcctacgatcagggcggtgctgttattactcattcaatttagtgttttctcgtactgaagcgttttttatggcgagatgcactagttatcgtagaattatgcgtcggcggagttgttacgtatgcatgtttcctgcagattacgagcattgtaccaccccttgcgcaaggtgctcgagcgcgacggcagtgccctgttttgatcccacttggtagatccgatctatcacagttagtctttggtctgtcaaagatctgttcaatatccatacagttaggccttgcatggtggatggacgttccgatgacgtgtggggcagttggcattggttcggagtggggattgttccgggagtcggctcaggccggcttttaggcctctgttccggacgacgttcgggtgtctgccacgatcattaaggccagccatgtgtaggacgttccggtcgtatggtgaagctttaaccgtagtggttcgaagcctgctcggtgcgg

SEQ ID NO: 31942 - DNA, 382 bp, Zea Mays
ctggaactacctgatcaccttgtggatgtacatgatgtcttccatgtatcacaattgaagaagtgtcccagggtacctgaagagcagctacctatggaggatcttactgtccaagatgatttgacttatactaaccttaactcgtgtcacaaggagtaaagtgataaaaatgtgcaaagtacaatggagccatcatggagaagatgaagctacttgggagagagaagaagaactgcgagttgactttccccaacactttcctagtccttccaaaatctcgaggacgagattctttgtaatgggggtaggatttgcaatacccaaattataaagcttaaaaaagttgatctccttagatgatttgatatttacttcttgagac

SEQ ID NO: 31943 - DNA, 851 bp, Zea Mays
gccggtgatctgccgccacaattcgtgtccgcctgggagattcatgccgcggggagagtagataacgtcggggtggggtgaaaatatcaagtgtggggtgaatctggtagctgaccggaccggccgtcgtgtcccaccgcagtcaatcgcgctggcatcaccggagttcactgttatctggctaggctacgtgcctcaaagccttaccacatcgtagtagacctccttaggtagcttgttcatcacatgagacactaccccggtaaaagccacggtagcgcttgcgccagtgacttcccctctctccggccgccagcatgccttctcgaaattagacgccaccaccgtaggactctataaattgcagccatagtgagttccgctaggtatttacgcatccaacacaccagcccttgcctcggatcatccaccagagtctcccaatttcgtgtttcccccaaatacgttttccatgccaccgtgaacacttcatcatggccaaccctctgcaggtcagttcaagcttccttgattggtgttctagcctccctcaagccccgtgttgctcgtagacccatttgattaagctagaccgcaccaaatcgtcgtgaacacctcggattatcttggatttttgccgtcgtcgtgggcagagagattttggtcgggattcatgcaattagttgagggattagggattatctcagatttttgtcgtcgtcgtgggcagagagattttggtcgggattcatgcaattagttgagggattagggtcgccaggggtagaatttggtgccgaccgagtaagaagcgtagcccttgcgtatttcggccggtacaggctcgccgg

SEQ ID NO: 31944 - DNA, 362 bp, Zea Mays
gaacaaatggcttggggtgacatctagggtgatgatgaatttgattgtgtgtctttttctttccagtctggtaggagatcatgtagtattgtcccctcttgtgataccattgcagctacatcctctgtcttggttttgtcttcacatctaaacagtgacactatctcttggtccaatgacgacttcaacgtcctaagttggtggcatgagcatatggttaaatgtcatattttatctcttcttgctaaaggtgtcatggttgttcatgcttctactatatcttctaaatcaacctttagtcttgttggtggagtgattgaggagtgccaccgacgcctcacaagtgatatggtggaggtttt

SEQ ID NO: 31945 - DNA, 511 bp, Zea Mays
gtgaagcggtatgggagtcctgatccggttcgtccatcctcgcatcaacggcggacaactctcttccactcgcccatcccccaaacgttggtcagcggcggcgcgtcactatctgcggcggcgccatggacggcagagccaaaagctctgattcccgatcgagcactcgaacggacagcgcagcaagcaacggagacgataacgaaactgaggggaggagtctcaccatagattgacgcgcaggtgacgcagaccacggtgagcggcggacccatggtgaaggactgctccgatgagcaattcccacgccgtcttggccaaatgcgcctgcaaatgacgacccccgcatccgatattcatcagcgaacatcctcacccgagcaccgagaccccatgccgcggcctcaccagagttcatggcggcaatgcactccgctgtactctaccggtcgctctctcgtcgccaggcagtagagaaggaagaggggaggtgcagatgtggcgatttccc

SEQ ID NO: 31946 - DNA, 404 bp, Zea Mays
gatgcccccctctccctacgactaccaacccatatacccacccatccatccatggaacgacgactgactctagttttaacttgccagcacacgctgtgttcttcggcttcactgacatgtgctgtgggtggggcgtgtaactaccgtttgcagagcgatctctggtaggagcatgtaactagcgtgcgtacgtgacgctgtcatgcctagctgctccttggccagcaaacgtactacacaccggagtatacgccaaatcgacatctactgtatcagtcagtcagtcagtttcatcatgcgagacgccggtcctggtcatcctcatcatcctcatgcaatgcatgcaccgtggacggaccgtccaaacgaaagaccgcagccagcgcggtccagacggatccctg

SEQ ID NO: 31947 - DNA, 387 bp, Zea Mays
cctaagttcatccttaacgcgatatttcttaccccgagcagttatctgcactccaccgagcacgaatctcgccaccgtgcgaatccgagcgcggggtcgccagcggcgagagggactgaacctaaagatcttttgtgcactataccatcagattcttattcagtctgcctgacaaagcaatttgtagggcctaaatctcagatttttacatgacaacctgttaatctgttagtagcaaagttgtttccctatgattcggctacaatcttgctatagcaaccatagtcaaacaatcactggagcatggtcgaatccaatctaaaagtttacctaacttcactgttaaccattattcagttcaacgactgactgtcagcctgacttcag

SEQ ID NO: 31948 - DNA, 441 bp, Zea Mays
aaaccatcagtggacaagcctagacgaacactcctagcgtctcttgcaaattctgggtcaaacgatccagagccttccaagcatcgccatctgatggatgcatcataatgtctcacgttctccttccttatgccacaacattagcttcacagtttctagggttaaaaatagacgtttaagccttggagtgatgggcatatatcgaagctgtttaactgccacttttgtagcaaaagtagctccatcctcttttagtacctccgcatatcttgatttaccgcatttctaacaatgggtggccgcttcatattccttccagaacaacatgcaattatcttcgcacacatcaatcttcttatacttcatgccaagaccggacacaatctttttagactggtataagtcttttggcatcttatggttcaatgggatgagattaat

SEQ ID NO: 31949 - DNA, 424 bp, Zea Mays
agtgctctatgtctcgagggtttcataggtcatgagtgggaggtagactggcgcctctgctgtggctcggtgctaggcgcagttaatgcggccgatcatttatgatgggtcagcctagggccaggcatgagatccacttcgagtggtttccctttggcacacctgaaccccctgtctagttccaccacgcctgaccccgagctcagtgccgcagggtttattcgagggcgagttcttcaaaggtagacattacctatctcctccgaatagccagtgggtcccagccataagaggcattttccctagggtactcgctaaccaatgggccctaaggactggggatcatatcttcgacagtagcccccgagcccctgaagggagaatatttcccattgggggctttccccgggtcaggcactacctt

SEQ ID NO: 31950 - DNA, 366 bp, Zea Mays
cagcagcatgcaagcaaagcaaggtatcgtacaataccctgccgtgtgatcgagtgtgcgcgttcttttgctttgttaattgttagttaggacggcaacacactgttatattagatggttggttcatcgcgttccattagccatgtaatcaatctccgatccaggaccaaatcactctccatcgtctccatccccaacgacgatccggataaaattgaaggtgcgtgcccttgcttcccatcgattttcctcgtcattttgttttatttgttcaatcgaatcgttaatttgattaattactagcagtagctaagaatttgattactactagcagtgtcgtcctccacgcgcgcggttgcatttccg

SEQ ID NO: 31951 - DNA, 340 bp, Zea Mays
tctcggtgcagtgtttccgtccgagtcgattaaggagagtagtgtgtgcccaactagcatgggttggagggtggagtactgtgctatcaggtggcccaaacccgttttggtcttggaccactcgaagattgggttgacatatgcaagggttaagtgcatcgtagttaagaagagaaatgagatctggtaaaatgaagacaatggtttggcaagtgtttgatctagattaggctaatctagatttaggagagagctaagttgataaattcaaatatggcttaaggatccacttctagtaagcttttatgcaaaggagttttttattcttgctataacctca

SEQ ID NO: 31952 - DNA, 606 bp, Zea Mays
gcaaaggagagtctcctgtcgcaaatcgccaatgggtcacaaatggtcaaactcgagaaggatccagatgcagcatttgctctagttattgatggaaaagctctggcatttgctttggaggatgacatgaagcatatgttcttgaacctggcaatcgagtgtgcttctgtcatatgttgtcgtgtgtctccaaagcagaaagcactggtagctttgcctctctccattggactatctgtcgtttctacataaagcaatgttgagtttgttctccttcactttgtaggtgactcggctcgttaaagaaggtataggacaaaccactttagcagtaggtgatggtgcaaacgatgtgggcatgattcaagaagctgatattggagttggaataagcggggtagagggcatgcaggtgagttgttcagattgtcatgatctaatccttatctagtgtaatgctatttccatctgacatcaaggattggtgattaggtgtgtgactaaaattggttattttcctttaccaggcggtgatggctagtgatttttctatttctcaatttcggtttcttgagcgacttcttgtcgttcatggacattggtgct

SEQ ID NO: 31953 - DNA, 295 bp, Zea Mays
atgtctaataatgcacactaataattgtaaatttgcaacccacttatccagctgattgatattgtgatcagttcacgttgcaagagtttctataaggtggtctgttatccacactacaatctacaaacttcatcagtacatcctcatacaagtgcagatcaaattgcatggtgaaatgtgtacttacaaattcgtttgtaagtgaacttagctaattatatggatactcacatagttttttggataccgatcataccaataatttacgaggaggtgcacccattcagcttcccag

SEQ ID NO: 31954 - DNA, 409 bp, Zea Mays
ggtagatgtcggagccactgcagcgtatcttgccccaggacaatgggcaagtgcgccgtcatcacgtccttcatcgccccggcggcccgagcggcagtcgtgtagacggccaactagccgcctaggtcctgcttgggctcgtacttgttgacgttggagaccttgaagttggggggccactggatggcccggagacgcggagtaagcgtggagactccccacgtgtcttcctgtcagcgttcgtgaggtcggtcctagggaggggagtcggtagtgtgttgtctcgaccgtcctcggaatgggccactagttgaggctacagccgactcagcacgggtagtgcgacttcatgtcgggacgccgtgatcccggtcatactcctcccggtgccttatctcattttcgtgcc

SEQ ID NO: 31955 - DNA, 323 bp, Zea Mays
gaagactttcattccatattccaaggctcttggtctcatgctttgtttcagcctgatcctgcgaaacggcttatggctaaatttaaaagggcaagaaaggtgatccatgggtggcagaaatccctacccaacctagctaagttgattgataaggtggaattgatcattcagcttatggattttattgaggaaagcagagacttaacgattcaagaatggaattttaaggatgttctagttcatcacctgcaggatctcctttccaatcagcgtgtctactggaaacagagaggccaaatcaaatgggctacgttgggggatgc

SEQ ID NO: 31956 - DNA, 727 bp, Zea Mays
gcaagaatgatggaacaaccctggtagactaaacagctacaaatggagccattagcagaactaaccacgattggatgacccatcctctgcactgaaagaccagcacgcgacataaaatcctccaaagcaaacaaatagctagtgactgagtaaaaaagagcatgggcaacaaacgaatcaactgagaccgtacctgtcaccatgtctccctgctctctgccatccgcagagggtagcacataagctccagaaacacctgcggaagaggaagctcccggagtgaaattaacagaagaaccccacagagtcgaaggatgaggcagtcgtggagctccaaactgggatggtacaggagtggttggtgcaggagtaggcgcggccaagtactgagggaaacctggcataggcaggaactgaggagtcccgggcatatagaactgctgctgaggggtggtatagaattgatgcttagcgattgacatcacgttgacagtgccctgcgaagaggaaggagtcactggctcccatttgagcttcccattgggattcctcctacacaccacatccttgtgatcctggctgcagataaagcacctgccactccactaacactcggcacggcgatgcgcttcaccacaacggaaacacaccaaacccagcccgggcttaggaacagccccatacctctgagtactcccttctgaagtactcgaatcagaggattttc

SEQ ID NO: 31957 - DNA, 378 bp, Zea Mays
atgggaagacgttcctgaggttctcgacgctcggggaggacaaagacggcaagtcaggaatggcgcaggcaaatccgacgaaggagggatcgacccacggcaagatcagatcgacgatgtcgtctatggtgaagagggctttgatcacatcgacggtgacgacgacggtggcacgatttggcactttgattaaaacaggtatgagtcgttctcctcctgcctacgtccttcgatctcaaagttactggatgctaggattcctcttcgttctctatactccttccccctcccacctctgcaacgcagcagcggtgcccgcatcggctgaatccggggatgacaaatctgtggcctatcgtctccttcgtacacacggta

SEQ ID NO: 31958 - DNA, 367 bp, Zea Mays
ctgcctcctgggagccgttgccaactcttttaggtatgctggtatccagcctcgacacgtcgagcctacatcccaggggggccagtgaccagggaagagtcggcaatgccacacacaacagggacaaatagtatgcagataagtgctaatacatcttgtagaggtaggtgatgatggctgcctgaaggatgaagcagggcgtgaagtgctgaggttggaggccgagctcctccagcagcagcacgaagaaagacgagatcggcagcgccaacccactagggaggttggagacgaagagcacgacctccccggcggcaagatcgccatgaggagaggcgccgacatggatccttccggcgaacgtcgg

SEQ ID NO: 31959 - DNA, 297 bp, Zea Mays
aacataaagcgaatcacgtccaggcttcgtcgagggttactcacagtgattcaaatcgctacgaactccacacacggcgcgcgatggatcttgtgcccggtgatgaaattctggccgccccaacggtcattccctccttctccggccacgagcgccccccaagcaacgtattgaagcccccagaccccctgtggaaccccgactgcaagctgaggccgagggcgacgttggtggtactctctgctcacagttctcccctcgatttggcgttggctctcggttccagcgatggcggcg

SEQ ID NO: 31960 - DNA, 296 bp, Zea Mays
aagggcttcccgagcgtggagaaaatttctgacaggcttcgcaggaccttgtgacccgatttgcggcgcaaatcatggtggtccagtagaaaccttgatgaatcacctttgctgctagggccctaggccctgcgtgggagccgcaagtcccgctgtggactttgcgcagaatttggacgccttcggtctcggtgacacacttaagcatcggttgactgacccccttcttgtatagttggcctttgattagtgcgaagtcccagcttcggtgtttgaggcgcttggcttcattgatg

SEQ ID NO: 31961 - DNA, 280 bp, Zea Mays
gaaggccgctgttgacctgggaattgctcatcgtggttggagaaagccgtgggtgacgcgaattgcgtcgaagctaggtgccaccgcccccaatttgaggtaaaaccactctcatccacttcgtcccactccccgatgcgcatagcacctttcggaggaagttttagggcactaaaacaggagcaccacgcccaaccgggactgctccgccgtgggcataccgttgctgccaggtgttatattctggaggaaggagaaagcaccgtgaccgtagatagga

SEQ ID NO: 31962 - DNA, 606 bp, Zea Mays
gtaatatagaacagttagcagtaataatattttaacatctgcataacaggacaaaaagttgtttatgtctaacctctgcatatccgaatggttcattagttttacgggggggggggcgtctgtcaccacgagccaactcttttatggtctcattgtcaaaaaacttaatgcgtggagtaccatatttgttaacaggagatgcagggtgatgtaggtgatcaagatagtaaatctgaaaaaaggaatgcacaaatatataaaattagtacataacaactatttgcatatcatatatatgcacattaaacaaaaaaatacttaccagaacaatgagtgagcatccatatattgttgctgtgatgtttgttttgttccttttatgccaacgtgcggcagcatcacacaaatccgtgtaaactagttgacaccagtcaatatcagacattcgtgccatgtttgaagtcatgagtacctcattgtttgtaatgccccaagaagcagaaggaaaaagaagccgattgaataaaatcagaaaaaaacatctaattgatagctcatcatcgttgccaagcactatcttgtcttgaagcttgacaacatcaaatt

SEQ ID NO: 31963 - DNA, 351 bp, Zea Mays
ctgaagttaccttcaaagatgtctaccattcacagtgtattccatgtatctcagctgaaaaagtgtgttccattgccgactgagatcatagcagagccagaattggagatagagccagatctatcataccaagagtacccctccaagattctggattgcaaagaaagatcaactcgggctaaatcgatcaagatgttcaaggtccagtggagtaatcactcagaggaggaagctacttgggaaaccgaggaattcctgagatccaacttccccgattgcctacctaaggaagctggtacgtaatcacccccaaccccctcctcctgcccttcgaatctaactttcaaaaat

SEQ ID NO: 31964 - DNA, 285 bp, Zea Mays
gttttgctggtggtgaacatgttatagatgagttatgggtgctgatggatgatatctcctatcaatctaatggcgacatggttgttatcagagggatgatgagagatatggatctattttttaggggtaccctcttagccttatataggcggccggagggatatccctttacaagatgtgaagcctatcaaattctatccgagtctatcttcgatgttgcaggtgctcctattcactcggagtccggtcgtctttcttccgagttatctttcgagtatctagctc

SEQ ID NO: 31965 - DNA, 296 bp, Zea Mays
gccagtctaaagatgtcactattcgagactctatgtggcaggaaatgcagaactcctctatattgggataagactagaggaagacagttcttcggatctgaacttattcaagaggcaaaagaacaagtctgtgtaatcacggagaacttgagggtagctcagaccaggcaaaagagctacgctgataatagaagaagaccactggagtttgaggaaggtgatcatgtgtacctcaagatgtcaccactttgtggaatgaggagatttaaagtcaagggcaaattgtcccctcgcgt

SEQ ID NO: 31966 - DNA, 271 bp, Zea Mays
cggcaaggaaacatatgtgggttgtagtttcacttaaaatagccatgatgtaatttttagttcttttgtctatcagatatctagagtggttatacttattcaatagcagcgcatagtacctttaaataatgttgttcattttttagtaaaaaggatgggaaaattaagattaatgatgtctgatttgcacatccttcgcgcacttcttatatgatagtactatgcatatgacatgtctatttaccaaatttgacattttcgttatatatct

SEQ ID NO: 31967 - DNA, 666 bp, Zea Mays
agagaatttgttgactgatgatcttgacctttccgttggactaccaagagaaggagtatatttgtgctgctatggccccttttgatcgtctcctcaactggcttgttggcattaacaagtctaggatcctagtaaatatcttggctctgtcgatggaccaagttcccaaaagtctagtattctcatagggttcagttctgggtggagttgggcattcatggtttgtgctagtttacattttgggtggcatatggaggcatttccccaataattcccccctgtatgagaatattgagcctgtggataacattcctcatcatatgcacgaccatgtagtgcatgggaactagaacatccctcaacattgggtgcacaggcaggtcggggcggctaatgaactgcaagcaaaaatagggatgaactaggaagatatgcaactagcggtggatgagttgttccctctgcaacatttggagggggcccggttgatgtggctcttcaagatccaatgaagttggaagcgaaaattgaagatcaaggggatattcaatcctaggactccataacttttaatcaatctggctcaattgcttgcttccttaggaccaaaagactagatgctacttttaccttagaagatataatcactagaaactatggaaatca

SEQ ID NO: 31968 - DNA, 428 bp, Zea Mays
gttaattgtaaaatagtagctctagtgttccaatgggtttggaatgtttattagtaaattaattgtatgttgattgatgtctagtctagatttcccgattttggtgcatgtctcactgagttaatgaattaatacgttaaagcataataagtagttttagtttcaatcaacattagcaaagtgtagttatatgatcaaaggaacgaagttgatggtctattactactctccactaattgcactgttaatcctgcatattactaaacaaccaacgtctatataattgtaagataagtatctattaagtaggtcatcgtctctagtgtgttttctttgatgtgtactaattgtagaacacgttgaatgattatttcatttagcccaagtctatctatagtctttagaaaccatagcggatgcggatgcac

SEQ ID NO: 31969 - DNA, 474 bp, Zea Mays
cggtggacgacggcacgactccgacgtacgacgacttcaccatcgagtacgtccactttgagggagccgggggagtaggcgacctttcttcgagtaggcctactccagcccccaagtctccaccgactacaacgccacgctctccagctccggctacaacgagctcttcgccaccacgccatccagccacgactccggctccagcgagctctccgtcaccacgtactccagcaccgacgataccctccccgggaacagcttctccgacgccagctcgtgtcgaacatgacccagtggagctcgtgaccccgctctcccacgacgaggagcgcgtcgacgcgtgctacgacggcgagccgttgcggtatcgaaaggtggagggccttctcatcgacccgtcaatgcccgggcccggcgtctcgcattttggcaggagagttgcatcttgcatgcgacgatggtgagcctcggtct

SEQ ID NO: 31970 - DNA, 643 bp, Zea Mays
gaaatgctatcgaatcctcctccagaattgatgcagcaattggcgatggcgagtgtgatgtctgttcaacagatgaccactccacagatgcaaataattccagcaactcaaacgtcggctgcaaccgagggtacgaccatcccaagctctgtcgcgtcaatgggaaataaggtccgctatccagttgatgacatcacaaggcctgtgtcatgcacactagttataagatatggtattaacaatcagcgtacaaagaaagtagccacaggccttgcgatcccaggacgcaagttccatggaaacgatattccagaagaatattgcagggtagaagtgacgacagtcgtccaaggatacgaggacgacatgctagacatccctgggcccgaaggtatcgagacacttggacaagctatcaagaattttatcctttggcctcgaagggatgtcgaattggttgattggtcgaattcgtcgcaggcccaaccgtctctgccttctcaaattgttgttcctattgtacatccatcatcacctcctcaaacttcacatgttgctcctcatcctctttctgaccctccttctcctcgtcctcatggtggcccaccgtctcagccacatacatcgcccttcagagatccac

SEQ ID NO: 31971 - DNA, 316 bp, Zea Mays
ctcaatggtatgacccttcactctcaatggccttgacaaacctaaggtaacagatgtcgggcgcataggatctgcatgacccacatagggcagggtggagaggcgacattgcgaaagaaggcacgccacccctgggtggtgctcccgccagaccatgggtaacattgaaatgggggaaacaccttcgtcagtaggcacagttggagaagactgtcatcgggcacccggcaacaagcaccgacacgaaggtcacgaggtgtacgcgacacaacccgccacccctcgatatctctagtggtcggagctaccgatcacc

SEQ ID NO: 31972 - DNA, 1157 bp, Zea Mays
gttccggtgaacaccgtatggtagagctagaattgagcgctcgggaggcatcaggaactcacggggaaacgattttgtgcgctggttcagctggagaagctcgaagataacgggtcgacgtagaaccgagatgcggcggtgatctccggtggcgcgacgacgttccaacgtaaccactgtggtagagttcaatcaacaatgtgtataagcaataggaggtgttaaggagctaagaacaatgaacaggatgtagagaaaagaatcacggtcgcctgtccacgggagacctgcccacggcggtgctctgcccgaccgtgaagacgacgacgacgtcgggagctctggtggatgaaacaagacgaggattggtttgtctgatgcgcaaagaatagacagaacgagtgcacactccaatttatagagagaaacaaggaggttggctaattttggccagaaagagagacgacgccgtcggccctagaagatccccgaagccgagcatggcatctctgttaacccaaacgtaagcactcatgtaattcgacaccttcactgcggcgtattccagtaaagcagctacgtgccaatgtagagacgcgagaagaacggcccatttgagtggctcgttcggttgaaattctgaagtggctgttggtttttagtcctacattgctggtttaagtggtacagaccaatttatatagttacgatcgttcttatgtttaaatagataaagtaatatgagaggaaaagagcatggtctatttcgcgtgtgcgcaaccgtggcgtgtcatttgagtggcttcgttaatttgtttttttactgtccgttgagattttaatatagattttactgccattaacttagttaattagcctgttgtcaatttatgggtgtattatggaaaaacggttccttgagagcagccacgtctattttaagacactgaatgcgttcgggttgtgatatacgaaaatcctattccatttcttcttcttcttcgtgcttggaaagttgtgctgtggcgattgagttgttgtatctcaccaaccctttttcttggcgtgcagtaaggaggagagcgagtgatatctttgaacccttgtcgttatgaagcttgcacgaggggcggcaataaagtttttgggcagcgcaa

SEQ ID NO: 31973 - DNA, 693 bp, Zea Mays
gcctccctctcctggttccccaagaaagcaatccagcacccgtgaaaaattgtggtgtcacagcatggtcaaataatcaaattagtttttttcttcaaaacactgatccgataggagaatagggagagaacgcagctaagagctggtacgaacctggaaactgtcttcgtattcatcgctgtaatgacccgcaaggtgagtaggtatagggaccaagaaaatgtaaacaatcaactagctgatgtactcatactcagcagatgtcaaaatcactccttcctggggtacatccaacaaccatatctaaacaaactaagatgatcaaatcaacaataccaatcctcctagcagctcacattcattaagccaatgcaggttgaaaaggataggtaccctgacacacatgcaacgaaacactcactctgggtgccgactgccaacacgagcaaaatctctgtaactactacttccttaacaacccatgacatgaaacagaatcgaaaagcaagccccgcagtgccggcattacctttgagccgacgatgacgacgccttaacaaccctcgatgtggctctgcaagcggaggcgctttacgccaaagccgcccatgaaccagtgtgcctccaatggttttgttggtattgaatccatggattgcgtcaaactgaaaacaacagggaagaacaatacta

SEQ ID NO: 31974 - DNA, 591 bp, Zea Mays
ggcgggtcagatgatgtctccagctgagagccagggctcactggttcgtcaagctcgccagttgtcagggacgagtcgcatcgtcgaggcaagcgaggtcggatctaccaagagcgggatggtgtcatgacgataccaaggtcaggacgttgggaaggggccagggtcaggcgacgttaggcgtcaagaaggaggcgacagtgtcaagaacggagcatctgggcagattggccccaacgggtcgggacgtcagaagaaatggggcctgatggatagatgcgagaactagaccaaagaggatgaaatttgagagaactgctcagggcaattttagcctatccaaaccttattttttatatactttacagtaggttaacatcaggtataagaggttataaaaattgagggggtccttctatggctccgacagcgtcggaaagaatgagactggatgaatagatgtgaggattagaccaagtaaaaggacaagagtcgaaagaactagactaattcgacaaggagacccataacagaactgttttagcctatctaaatcttcattttaaatatacttaacagtaaataaacatg

SEQ ID NO: 31975 - DNA, 386 bp, Zea Mays
tctaccctttatacagaggtcaccacaacctccttaattaccaggaatcgcccctgggacctctctacgtaccaccacttagagaactcacacgtaacgtgcgcgcctattactcctagttaacatggtaatctaggtgtggtattcaataatcaaataaacaaaaggcaaaattaaactgatgtttagaacacatcacaacacaatcgtgcatcatcgcaagtgacaagtcacacgatatttacaagaaaacgcgaaattcgagcgagcgagcgcgtgtgtgtggcaacctccgaagccctttatttgtctcatgtgaagagtagtgcacaccaacacatataagttggttctctcctacttagatgagcaatatgggattaaag

SEQ ID NO: 31976 - DNA, 868 bp, Zea Mays
gtcgggggtcactgttggtggtgttgcaaactccatagtgctgggtactgctggggtctacattgactgtgtaccacctggagtatctgctgaagattgcactggcatgtgctgtgctgtgggtggtgacctgaatggcccagccaagtctgtctccctgactggagtattgtccagctgaaagtcaccatcactctatataaaatcaacacagaagggattctcaccatctatcttctcggcatcactccagtcccatgcccggctttcttcaaacacagcatcatgggacaccactacccgctttatagcagggttgtaaaacctccaagccttgctcccatgctcatagccgatgaacaccatcggcgtgcttctgtcctccagcttcgacaagtgtttggccccctgtttgacatgtgccacgcatccaaacgtacgaaagtgtttaatagagggcttaaatccataccatacttcatgaggcgtgtgaccttcaacactctgagttagagatcgattcaatatgtagaccgctgttgatactacttccccccagagccatcctggcaacctcatagccttgagcatacttcttgccattcccatgacagtttggttccggcgttcaaccacgccgttctgttctagagtgtgtggtgcagtcaggtgtcgctgtataccctccctggtacagtgctcgacgaacgaacgcaccgtgaactcgccaccgcgatcggttcgaagagttcccagcttcgttcctaccttagattgcgccagtgcctgaaaggatatgaaggcccttatggtttggtccttcgtcaacatcagagtcacccatataaaccggcttagagtcacccac

SEQ ID NO: 31977 - DNA, 437 bp, Zea Mays
cgaggacaccttcattcttgcgaccgagaacaagagtagggtggttgggatgaacaccgatcgcatctctcagcccatcctccgcgtccatcacccacgcctcaacgaaataccggtcgcagctgatgccgagctctgcttccatcttctccgcctcaaacatatacagttcgcagctgatcaccgctgtgactttctgaagcgaacggaggtgctccaggccgaggttgccatggctaccttggcatttcatcagggaccacttcggctgggcgctaaacagaagctcttctaggtttggcatgacggccggcgcacttggacactcaccatccttctttccatagctcagcactagatcatctgtcccgttccacagggtaaacgagacactcgagtcctcgttgagcacaaacaggaccatcgaggtataaaac

SEQ ID NO: 31978 - DNA, 422 bp, Zea Mays
cagctagcacgggtatatcagtttttcagcgtttaacagaaggactcgcgagcaagctctccaatgatgagtggggaacggtcctgttgtgcttcaaagaatcagcatcacatacatttgttgtgtttgacaaaatagttaaaatgatgaaagtcattgaaattccagatagaaatgaatcttactctgaagctgagcaatattcagatcatgacatatacaatgatgaagaagaggaagccaatatggaaacggcgtcttatgctattgtcagaatgaagaatcatatggctttgcaactcttaatcgttgaggtacttaaactaaagtatagaattcatgtggcattttgttagttctactagttttcagtaatcccctgtattgtaagcctgctagattgagaccatgaaagaacaaaa

SEQ ID NO: 31979 - DNA, 307 bp, Zea Mays
acattttaatagacactaactctaactctcccaacccttttaagcacgcatcacccaaccaaacgactagccatcgttcactccgcccatccgtcaaacaatattttttgttaaatgttatatttatttatgatgtattgtaattgggtatcgtgttggtgttaatatcatataaaataaaatatggtcatgttttttgtcgggaatggagacccattagagacccgatactagaataggaatggggatgagatgaatcatatacccatggtgggtatggggatggagatatgtataatttcatagg

SEQ ID NO: 31980 - DNA, 588 bp, Zea Mays
cacgaggtggggtgaatgaccaaatccccacgcgagcgagtctgcgaggcggggcgaacgaccgagtctccaccgagcgggtctacaaggaaggaactcgagtcgacgctgtcggcccacgatagccgcgacaagacacaacgtcaccaaaccatggccagattgtacctacaagtaccaaaaggcgtcaaacagacacaatggaacgcccccacatgcacccacggataagccctcactgactcgcggggccggtcaactccagtcacaggggcctcagcacctaagtttctacaatggcccatacaccagaaaggacgagacaatacaccataccaggcgtatatctacgtgtgcttgatagtgacacaaggggtatgacagaagatgaagttgtaccagacatgaccttgaaccttaccataatccaactttgcaggacccgccagataccataaccagcaccaagcaagctacagggactcatataccgaacagacaagatggaacgccatactaggtgtacggtagtgcacgaccctacggacgacatcaggagactacgccatccagagacagcaagccgag

SEQ ID NO: 31981 - DNA, 464 bp, Zea Mays
cgggcacagtgctattaactatgcgagcttcagactgctctcaaaggtcacgttgttgttgaggccaaagacgcccttctggctgcttatcatgatttagggtgggcgccattggtgggggtggtggtaattgagcccaagaagcttgagagtgacttgctaaagctacagaagtcgtaggctgttggttgcctacgtattctgggatgtatggagaatagcatgaagtagtatggaggacctgcttcggctgattctgtcgtgcctcggcttcagcaatttccttttgcttttggatcatgacctggcacatcctcattgtgtgacccttgtcctcgccacaaaaaggtagaacaacttcctaggctgattaccgaaccttcctccactgaagcttcttcctcctctgcctctcggagctagtggtctgtaagatgtttgttgcatgcctgaagactatgagc

SEQ ID NO: 31982 - DNA, 333 bp, Zea Mays
ggtaaccataattttcaacaactagaaggaagaaagttaaggcacatgatatgcacctgatggcctgaacatctatattctgcagtacttttaaaagagctaatctagcagatggctctgctttgctccaggtgtctgtaggtgtctgctaggtgctactaaacatttgtacttttttgtggacggtgagcagtgccatgctaaataatggaaattcagaaaatctgaaaaaatgatatcaccatgcttgagtaattgtttgtagttcgtctttctccatctctgactgcccattttcacacatatcaatctcaaatatctctaccttgaaaa

SEQ ID NO: 31983 - DNA, 334 bp, Zea Mays
attgtacgaccatcccaagctctgtcgcatcaacgggaaataaggcccgctatccagttgatgacgtcacaaggcctgtcgcgtgcacactagttataatatatgctattaaaaatcattgtataaaaaagtaggcataggccttgtgaccccaggatgcaagttccatggaagcggcattccagaagaatattgtagggtagaagtggcgacagtcgtccaaggatccgaggacgacatgctagacatccctagacccaaaggtattgagaaacttggacaagctttcaagaatttcatcctttggcctcgaagggatgtcgaattggttgat

SEQ ID NO: 31984 - DNA, 274 bp, Zea Mays
ctgacgaagtgaagtcaagtcttcccaagtagccaaggatgccggtaattcagaccactgcactaagccttcaaggttacccttgggatcccagcggcgttgaagaattttttgcggaacttgcaacccatccagctgatccggtaactgggcaactgataccgacgatggcagagctttcttgagctgagaaacgtgaatgacagggtggatagaacatgactcaggcagtgccagtttataggcgacgagtcccagcttggcaatgattgga

SEQ ID NO: 31985 - DNA, 508 bp, Zea Mays
gtcggtccgggtgcctttaactgagggcagttattcttaaagtgactggggtccccgcagtgccaacaggcatttgctggcggttggttgcttgccacggagggtgcctgaagggagctctgactctgctgactatagcgcgatggggtgggtccagagggtttattgaagcttggtcccctgggtggaagcccaaagggtcgagctctctggtgacgttcttgctgttgagctcggagaacttggaatttcctcttgaggtgccctttttcttcctcttttgccctttccacttggatagccttgttggagaggtgagagaagttgtggaagtcttggctggcaaggatggtcttaagctcgggtcttaaccctctcagaaaacaggccatctttctggcctcggtgctgacatcctcaggcgcgtagcgggccagctctgtgaacttgtgcacatactcactgactgtcctcccgccttgagttagctcccggaattcatcctcct

SEQ ID NO: 31986 - DNA, 477 bp, Zea Mays
tgggaacgcgctggctataccccgtcgtggtgtgctctacgccgcaggtgggtcagccgatggggagaagaagctgggtgggccgttggatcggcaatggatgggcgaggggtcgcggaccggtgatccatcctgaacgatcgagattaaaacgtcgacaccgtttcgagttgatcgcttccacaacgttgatcttcacgtctagggtcgcgatcgagtccatgttactttgaatcgccaccctcggttccggatctatgggttcatataagcatactacggtgatctaatcggggtcgttcaattctgatcgggtggctgataataaaccatacttcttcggcctggtaatcttgctaaagagaccctgccttatttcaaaaacaacctgccatccttttctatagaatataggttaagaacagtccaggttattaatagaaactaccctgagtttagaaagatttgtggccgtcg

SEQ ID NO: 31987 - DNA, 609 bp, Zea Mays
tctcgagacattcccaggtagttatttccctctaatcagccttacctactgctctactgctctcgcttaccttttctcattatcttgcagcttgtcagtatccagttcaggatggtgcggacgaagaatgtcacaccatcaggggggaggagatgaccaggaccctcctcgccctttcaggcaggacaaggggaagactgtctaccttgagcagcaagggggcaagaagaagagatggttggacagagccacccgtgcagcgattgccattgtagcagcatcagatcaagtagagcaggtaggtcagttgaggatttcctctgataagatcgccttccgagtcagtcgcctctcgtctcagactcactcatccgctgctcgatccactccttcagacccagtcaccactccacctccctctttgccagctcctgccgctctcgagccttctgccacatccgctgtgaccacctcctccaccactccagcttccactgctcctgctcccgctttcgctccaccaattcctccacctcgctttcaagagcgtgacaagaccaaggtgcgaccactcgctgttgatcctcgacttcttgaccttcagcgggc

SEQ ID NO: 31988 - DNA, 521 bp, Zea Mays
ctaaagaagcctgggatatcctcaatagcatgtattcttctgcctcacgggctcgcattgttcagatccggatggatctcgctactatcaagaagcgggatctctctgctgctgattatttttgcaagataaagagctatgcatctgatttggcggctgctgctgcacctctccgtgaagatgaaaaagtggcctatcttcttgccggtcttggaccagaatacgactcattcgtcacagctatgactactaagagtgaggctctaacttttgatgatatttatgctcattttctgtcgtatgaagctcgtcagctccaacatcaagcggagacgcgtctcaacgttggcactatggccaactatgctgggcgaggaggctctcaacatcgtggtcgcggtcgtggtaattcacgtggccagagttcttttcatggacccggacatactggtcctactacccgcgacccctgtcagatttgtggcaagttgggtcacacggccctcaaatgctggcatcgc

SEQ ID NO: 31989 - DNA, 316 bp, Zea Mays
taccgattaacttaacgcaattaccactacaatgcacttcgatatacacgtccgacatcacagtgcttcgacaaaccccacacttccaatctacttgtcacatccaaccacaccacgtttgataacacacctttctaactaaacatatctcgtcttccaaacacccatcatatgtcacataatttacatttcccacttaatctaacctacaccaacgatgaatacataaatataattaccgtagactgactcatcagtcgactgcggaaatcactaagcatgctttgcactttattaattttttgccgtaactaac

SEQ ID NO: 31990 - DNA, 346 bp, Zea Mays
gaaagagttaatcagtgtttagagatgtatttgaggtgtgccatttctgattctccaacacagtggaagaagtggcttcctttggctgaattctggtacaattcctcataccattcagctctgaagtgttcacctttcaaagctttatatgggtatgaacctgtgtttgatgctgctcctgaggtggctaaagaaggggatcagttggtggatgagtggttggcagaaaggcaagcttatactgctttacttaagcaaaagttggcttctgctcagaacagaatgaaaatacaggctgataagaagaggactgatagagaattccaagttggtgaatttgtgtttg

SEQ ID NO: 31991 - DNA, 331 bp, Zea Mays
ggaacggatagaggtatgaccagtgccatgaacaagaattttggatccatcaccaacaataacatgcgaagaattaggcaataatgaagaataataaataggtaagttacccgaatggttggtcatgtgtgagctagctcccgtgtctagaaaccaatcactgggatgtgcttgctgttgaacagaagcagcctggagcgcgtgaacaagccccgaagtgtcccaagacggagcatgcagcggcgcagacatagattgtggctgctggaataccggataggcttgcgccggaggacgtgcaccaaggacgccagggccagaggtccctgtc

SEQ ID NO: 31992 - DNA, 525 bp, Zea Mays
atttcttggtcttttgaatcagatgtggctacaccttatattactgggacggagggagtatatgattatcagagtaaaccatgctttttgacatgtaaatgtaaactacctctgttgcaacctaaaaaatgaatgcagtcacttttttaaaactttgccacagatatacacaagggatattttgatttataatatggaaatgtcaacactagatttttcaccaagtaatgcccgaggtttttatcgcccaaaatgatagttaaatgaagatattttagggggggatatgtttgttaccagttaactttcgtatgttgattatcattctattggttagggctatgatagctaagattctactggtttgtttggtatgatgcatatggccattggtaattaaaaagattgtttatttctttaagtactcttcttgttgatgtaaaccgtggtcactaattcaaataagttacgatttgaaggatggccattcggacttttaaaatggaagactaatgtaggtaggac

SEQ ID NO: 31993 - DNA, 275 bp, Zea Mays
tgctcccttctaggtgactggtcgcttgcgtgccatgtctacgaaccgccaccacccaccattgttgaagctcaccggagtcccgttgtctttgaagcttctccccaccccgcgttctctgatgtggagccttgcacctctctgactacgctccgctagagggtgttcttcatatccagtgcattgtcagtagcccgaagaatcatcaccttcccaaacctggtgcctggcgaccgcaacgacgaacaaccaacaaggtgcaaggtacattcgta

SEQ ID NO: 31994 - DNA, 571 bp, Zea Mays
gttgttgttctgctgtccaaattcagcaagtatttaaatgactgttaatttgctcttgtttctttggcctccttgactctagcagttggttttctgatttgtgcaggatcagtacaaagacgatatcaagtatgaagaggttagtgcgactgcaattctcttgggtggttcatcagtttccaacaaggattccttttttgattccagcggtgtagtatgccagtttttcctaacataattctgcgcgattttttttgggcaggacttcttcgtgaattcacgtggaaagaagctcttcaattgcaggtggacaccgaggaaatcggagtgcaaagctttgatctttatctgccactgtagcgacatctccttacactcacttcctcccttggctatggtttgtttgagaactaacgagccgatctttcttctgtggctcaattttgctaggatacggagccgagtgcagcatatccatgggaggtaaaccttcaagtttcacttccatgttctttccatcagtgatgaactcatggcatcgattgcatactcacaaacttccataaaaaat

SEQ ID NO: 31995 - DNA, 3994 bp, Zea Mays
tactgagttctccataagagattccttgcattcagaccttggagttgggctaggacattcacgctctatatctttattatcagaagatacagcgaaaatgtgaggctgattaagtgaagcatttgatgcatccgcttcaattagtctttgctgattcacaaactcctccattttgcatgtatcagaagcagatgcagaagatcttgcaagaatttcaggcgccgctgatgttaatactgaattctccataagggattccttgcattcagaccttggagttgggctaggacattcacgctctatatctttagtatcagaagatacagcgaaagtgcgacactgattaagtgaagcatttggtgcatctgcttcaattggtctttgctgattcacaaactccattttgcatgtatcagaagcggatgcagaagatctttcaggtgccgctgatgttaatactgagttctccataagggattccttgcattcagaccttggagttgggctaggacattcacgctctatatctttattatcagaagatacagtgaaaatgtgaggctggttaagtgaagcattcgatgcgtccgcttcatttggtctttgctgcttcacaaactcctccattttgcatgtatcagaagcggatgcagaagatcttgcaagaatttcaggcgtcgctggtgttaatactgagttctccataagagattccttgcattcagaccttggagttgggctaggacattcgcgctctatatctttattatcagaagatatagcgaaaatgtgaggctggttaagtgaagcattcgatgcatctgcttcaattggtctttgctgattcacaaactccattttgcatgtatcagaagcggatgcagaagatattgcaagaatttcaggcgccgctgatgttaatactgagttctccataatagattccttgcattcagaccttggagttgggttaggacattcacgctctatatctttattatcagaagatatagcgaaaatgcgaggctggttaagtgaagcattcgatgcatctgcttcaattggtctttgctgattcacaaactccattttgcatgtatcagaagcggatacagaagatcttgcaatttcaggcaccgctgatgttaatactgagttctccataaaagattccttgcattcagaccttggagttggactaggacactcacgctctatatcttgattatcggaaggtacagcaaaaacatgaggctgattaagtgaagcatttgatgcatccgcttcaattggtttttgctgattcacaaactcctccgttttgcatttatcagaagcagaggcagaagatcttgctagaatttcaggcgccaaggatgttaatactgagttctccgtaagtgattccttgcattcagaccttggagttgggctaggacgttcacgctccatatcttgattatcggaagatacagcgaaaatgtgaggctgattaaatgaagcattcgatgcatccacttcaagtgctttttgctgattcgcaaactcctccattttgcatttatcagaggcagaagttgtcgctagcattccaggcaccactgatgttaatactgagttgtccacaagaggttccttactgtcagattttggatttgggctaggatgttcacactgattgtcttgattatcagaagatacacggaaaatgtgagaatgaggatgatgattaagtggagcatttgatgcatctgcttcaagcgcttttggctgatccactgactcctccattttgcatgtatcagaggctgcagaggctgtcgtctgaatttcagatggtcctgatgttaacacggagttgttcataagaggttccttagtgtcagatctttgagttgggcctggacattcacgctcaatatcttgcttgtcagaaggtactgagaaaatgtgagaatgaggagattgattaagtggagcatttgatgaatctgcttcaagggttttttgctgattcacaaactcctccattttgcttgtatcagaggctgatgcagttgtcgctgagttgttcataagagcttcctcactgtcagatcttggagttggacctggacattcacactcaatatcttgattgtcagaaggtaccaggaaactgtgagaatgaggaagttgatgaagtggagcatttgatgcatccgcttcaaatgtttttggctgattcactacctccattttgcatgtatcagaatcatgggttgaagttgtcgttagattttcaggagcagctgacgttgaaagtaaactatccaccgcaggattcttattctcgggccttggggttgaactggggtatttatgtttcgtatcttcattattagaagatacaggggaaactttagattgaggagaatggttatctgaagaattcgatacaacagccccaattacttgttgttgactcactacctcctccatcttgcatgtatctgaaacaggcaaattcgtagtaatattttcaggtgacgctggtgctaattctgagctgtccacagcaatgtccttattctcagatcttggaactggactaggaaactcgcggtcaatatcttggttatcaggagaggatacaggaaaagcccttgattcaggagactggttaactgaagcattcgatgtatccaccacaagtgttctttgctgattcatgatctcctccatcttgcacatatcagaagcagatgctaaaggggctgattgtggactgcagattggaactctttcttcatgacttagcatatctgatggtgaactagaacctctgtcttcaatgggggttgctggagcgcagctcttaggctttgcagaagcaatagaagaatgaagttcatcgagaaagcttgggttagttgttgaacttaagcaagacccttcctgttgacttgaagctgtcctcgactcggccggactccaagcaaacaaaggactggaaacatctttcccaatacgttgagcaggtaggtttttcgatagatcctgccttgaattcagatctttaacaaatcctccttgtgaaccatttttagattcatgttgactttctgaccaggaaacatgctgattctgatgagattccacgttaccacgtccacaactcacatgtgccactgtaggactccatagggctctactgctgtgatggtggtttgattcaccagagcatcctccctgtattccatcatggttcaagtctgtgtgcccatatgaactcccaggagattgaatgaaaacagaatgcttattctggcagtgtgcttggctattcacagtataagcatcctttggtggaaccgaactagttgacagcgacaagctatcatctggagagtacacactttccctttctggaacagaatacttattatactgaacaggtattccagaagaactaaccacgctatgaccaacaggggagaaagcattggtctgatccacactagggttgttccttgtatgtccagtgccaaccagtgttgccttgctacttgtatgtgatgcagcctgagtaaaatctttctgctgttttgaaagcacttcagtcaacagcaatgatctctcttcactctcaaatgtaagccatactctcagatcacgtgggaagtaacttgtccaatttgaaagttgcaaaagagtaaatggaccctgaacattcccagaaggatccttgtagtgccagactttctctggctctgtgtcgtttgtcattgttactacagaagatgaaagtggtccagctccatacatagttctgtttgctgtgctgttctccaaacttcttgctcctgatccacatattgcactttctgtggacaagctttttggaaggtggctagaatcagaaacttttttaggatggttttgcacagtgctaagatatctcgatatccttcgtgatatggttgtatctggtcttgtctgatttaccgacttt

SEQ ID NO: 31996 - DNA, 275 bp, Zea Mays
agatggcccgcttcctgaagggactcaggccagaactcaagacaattctggctagccaagacttcctcagtttctccacctctctaacaaggccatgcaagtggaaagggcaaaggaggaagaaaaagggcatctcaaaaggaaattccaagtcctccaggctcagcagcaagaccggcaccagaaaactcgatcctttggatttccacccaagggaccaagcttcagtagaccagctggacccaccccgtcacgattcagtcagcagagtcaga

SEQ ID NO: 31997 - DNA, 417 bp, Zea Mays
ttcagcaaaagaagatgaggagaagactgctttcatcaccccgtttggagctttctgctatacctccatgtcgttcggcctcaagaacgcgggagcgacttaccagagagccatccagacatgcttagccgatcactggggcaagcgagtggaagcctacatcgatggtgtggtaatcaaaatagaaaactcagaaaacttcatcgaagatttgcacttggtcttcaacagcctgaggcgctaccggtggaagctgaacccagaaaagtgtgtcttcagagtaccagccgggaagctactcggattcattgtcagccaccgaggaattgaagctaatccagaaaagatcgaggccatcatgagaatggaagcaccgcgatcacagaaaagggtgcagaggcttactggatgcatggc

SEQ ID NO: 31998 - DNA, 424 bp, Zea Mays
gaagcgggaccaaatggggcacataataaactccttgacatcctccctcgctactaagtcgttcttcacataaaaccattcctccatccaatttcttggccatcttttccgaaatgttggcactaggtagcttgagttgggacgggcgataaatccttaacaaccgaagttgttgtgatactgttcttttccagtggccttcgtttcatacataagttcgtgcatgctgcagaagcattttgcgtttgggtctataccttggctccttgttgcccagacgaagactcccatcctcaatatagcttcgggggtcagttgatgaaggaaaatttggaaggtttttaacactttaactacaaacctgctcagtgggaaccgaagccaactttaaagaagcttcagaagatcacaacttcattctcct

SEQ ID NO: 31999 - DNA, 392 bp, Zea Mays
gcgagtggaactaggcggtggttgaccgcgggcacgggggcacgcgcgggcgctggttggacgtacactgacgtgtcatccccaatcgagcgcgtggtgacagcccgtgtagtcatattcaaacgcctattggtcccaaatcttggcgaatttgggcaagatcattttgtatgatatcctcctctaactttcctctatttgttccttgtgcagattgaagcttttcttggcatgggtgaggagttgtcttgtcccaaaggttgatctgtctcaagggcccaaaccgagaggaacactagcgttttggcctgtcaaaaagcttggtcctaatgccatcttatgaaatgttataagtggggtagttcaacacaaatttgtcaattggagtccac

SEQ ID NO: 32000 - DNA, 400 bp, Zea Mays
atctcccacaccacgtggtcgtggtcgtggtcgtggtcgaggtcgtggtcgtggccgtgggatgggtgcccgcttggcccacgagtttgcggctttcttctccatgtgccgaaatattgctgcagatgtccatgaggtggctcgacgtcagcgggagaccgacgacaacctacgtcgtcaagcttccgctttggatactcccttcgcccctcgctctcctgatgtacctctccaccctcctcctccagatgtcaacgagtggtaccagcaggcatatggggtgcctttttcaacagctgatgacgtcgaagaagaagaaacttattttgatgatccggagcagtttgtcccgcctccgtatcatggggatccgggccaatcgtcctcttaccctccgccc

SEQ ID NO: 32001 - DNA, 297 bp, Zea Mays
gtgttttcacagatggcggctcctaatcatgtggtggtggacgagcatgggtttgcccactctgagtgtctgcattgggagggttttcccgctattttgtgggacctcttgaggactgtctgctacaccactcctccccactacgttggatatgagttcgaggagcacggagtgcctcgctgttgggtacaactcacattgtggtctcatccggtgtaccctaagtggccttctttggaggccgagacagagggctttcgcctcggcgacacatgggaggcatcagctttgcatgcg

SEQ ID NO: 32002 - DNA, 304 bp, Zea Mays
ggagtatcaggggcacactagaacgctaaaacgggagagcaaaggatatgagcggacctgagacgcgttggccatggctaggtcaaaccgagcggtgttcttgagtgatttagggaaaataagaaattggagctctctggtgaataattggaggcacgacttggtggcttggtgcgtgattaccctacggacccgacggtgcgctcaatttatagagtctgtgagtggtggccggtgaattagacgaagacgcgcggcggtcgaagaaacaggaagttactagcgcgcgtgattggtgtcctat

SEQ ID NO: 32003 - DNA, 378 bp, Zea Mays
gggggatgaagcttatattactcgcaccaaggtgcctgtagtaggggttacaagctaagtgagggagggaaggaccccaagtccctagaactgattgaggcaagtaccaataccgaatgacacaataaaactaccaagtgtccgcctgccccttggaagggtcatggactgccctatttatacacctagggggtacatgccattgttatcgggggctgctttgctaccgagcgagatgcccctgtgcccatttgacggtgtggccttgtactttgttgttgacttgaacttgtcggtttccctcttagagtcgaggttgtgggttcggcttgacaaccgagcccccccccgagggggctgcccataccatagtggttg

SEQ ID NO: 32004 - DNA, 737 bp, Zea Mays
aggacaatatttgatattgatgtggaaactgcatttgaggagaagccatggaaattccctggtgctgatatttcagacttttttaactttggccttgatgaagagaagtggaaagatttttgcaagcagctggtgattccatttcttacatttggtagtgcatacactttgtttactatataaaatcggtcaattaaataataattcttttatctccaggaccaacttcgactagaatccacaatgcaatctaggatacgggtgtacgaaagtggccgctctgaacaggtttattatgatcccattatggaaaacaatatcctgctctatctgtagtgatgatgaataattttttatctgcatccaggattatgacccagatttgccacctgagcttgctgctgtgactggtcatccagacatctctgctgacagtcgcaataaaatggttaacgggcatacagattttagtgcccaaggaagaggtccggcaaacgtacggacaccattggtattgagttcccctccatctctagaattttacaacagattcatgtttgcttttgaatcttttttgtcgtggtatggtttctcacattatgggcttatgggtatatgatagaccatgacttacaattattgacacatcatgttgtacctatgccacatattggtgttgcacacaattggcaacagagcaaacatgaatttataccatcaacaaccatccatctatg

SEQ ID NO: 32005 - DNA, 740 bp, Zea Mays
tagaattccacaaggcattttgaaatgttctttatttgactctaggtggcacacgtttgctgtagcaggaaaaaatgcaccatcatacatatgtctcccataaggccataacaaatcacgtgattgtaattaagcaaaggcaatcatctccatcacccaaaaaaattgcaaggaacaagcccgcaattattgacaaatgctagaagaaatatcatcacatagctccaactctaggactaatggttgtatgttataggcttatagcagccagatgctctaactaaatccagctaataaagagacatctcgtacacattaaaagtgatcggcagaatagcaacaaataatggaccagtttttaagatctaccacagcccataggcgggtgtggagggaggaacatccacgtatataaataagcccgtctgcaaacctcaaagtacgactcatcaaacagcggacgcgctgaactttcatcagcataacaacaatgaaactgttccaacaatgcgctctagggacatctcagcagatttaaaaacaggacgttgccaggcagccgtcggtgcaaggcaaaagtctctatcctgctctgacaaatcctctaaaagtcaacatgccaggaagattccactacagcattccttacttgccaaactatgcagtaattccacgtggacgagtcaacatgaatggttggatggatatgcacagctcgaagcggacactgctgccagcta

SEQ ID NO: 32006 - DNA, 418 bp, Zea Mays
aggtcgtcatggagctacaggccaagctgagtgccttcaataaaatcctggaggagcagcgggtccagtagaccgtggctgtggagagcctgcaaaggctgcagtgggagttggaggacaaggccagcagcattgccctagccgaggagaacctcaaggagaaggatgcctccctagataagcgggtgacggatctcgcctaacgggagaaggacctcgccttaagggaggaaatgtttgaaaagcgggagaagctgctggccgatcatgagctcgaggcggaggagaaggagcagacgctggaggagcgggtccaccagttccaggcggcgcaggcagcacaggcagcaccgggcccccaagcggtggaggtgatgaagaagacacttgaagatctccaggtggagcagcacgccgg

SEQ ID NO: 32007 - DNA, 499 bp, Zea Mays
acatcgtggtcaagactaagagagggtcgaccctagtggaagacttaaccctggtcttcgacaagctgcgggcaaccctcacaaagctgaacccggacaaatgcatttttggcattttcgctgggaagttgctgggattcctggtttcgtaccggggcattgaagcgaacccggagaagatcagagcgattgaggcaatgacgcccccggcccgagtcaaggacgtccagaagcttacgggatcattagccacccttagccgcttcattttgaggctggctgagagagcgctgcccttcttcaagctgctacgaaagtccgggcccttctcttggaccgaagaggcggagcaagccttccaggagttgaagcagcacttggtgtccctaccaatattggtagctctggaaccagaggagccgctgtatttatacatcgcggcagccatggaagcggtgagcatggtgctggtcgtcgagagaccggcaccagaaagcta

SEQ ID NO: 32008 - DNA, 309 bp, Zea Mays
atagctagacaaattataagagctcaagctaccaagttgatttgaaggctgaaatctgcatctacaagtatttgaagaacctcacaagtcacaactacacatggtaaacctgcaccgacttggcaacagagactggaaagcggtaaccctcgagtgccatcgcactatgcatagcttagcacaatttggtggcggagaagaatgactaccaataagaattacgacagcctcaaagataacatttacaaccgtgttatagaattcaatatagtgatgaaatggtggagacacacacacctctcgttcgct

SEQ ID NO: 32009 - DNA, 524 bp, Zea Mays
attgagcttgagagcttgtatgaacttgtgagcctgagttgggtctaagtgtgtctctcttgtatcgttgtgtgcctccccttttatagctcaagaggggcacatacaagggtgctgagccccgacatgcgggcccaggaacataacagatgtaatacttggagcaactaatgctagttgccagtgtaatctccttccgccctgatatccgcggtctgcgtagcattggcgtgcagcggaagcttccctggcaacgtacgagtgatgatgagcacagtacactccgcagcacgagcgtactgcctgccaacggaatagacaggcacgccgcctgcgagacggactggtcgccgtctgccagcggagtggacggggcacattaaatgccgaggcggcacatccctgccagtggaatggacagggctcattaaatgccgaggcggcacatcgcgtgtcaggcagtgcgtcttatccgcaataaatgcagaggacgtgcggcccagaagccttacgtcaggctccgc

SEQ ID NO: 32010 - DNA, 1031 bp, Zea Mays
cgagaaccgggttgctgatgccctgtccagaagacccaatatggatcaagatacggtcactgcacaactgaatacaacatcagtatctactattacacctgattggttgctgcaggttactcaaggttatgaccaagacccggtagcccagaaaatattaactcagctagctgttggtgggcaattggcacattatacgatcactcaaggtgttattcggttcaaaggaaggatttggctgggcagtaaccaagagatgcatcagaaggtgatgtcggcattacacgatagcgcagttggaggtcattctggatttccggttacctacagaaggattaaatctcattttgcatggccaggcatgaagcgccacgtccgtgaatttgttcaagggtgtcaaatctgtcaacaagctaaaccggaaagggttaagtacccaggattactattaccacttccggttctgaaacaagcatggcaaacggttagtcttgattttatttccggacttcctccaacaagcaaaggaaattgtattctggtggttgtggacaagctatccaagtatgctcattttatggttttgaaacaccctttcactgctctgacggtggctaaaatatttttggaccacgtatacagactgcatgggttgccgacagctatgatttcagatcgcgatcctatttttaccagtcgcttgtggcaagaacttttcaggctcactggtactcaattgtgccttagcagctcatatcatccgcagtcggacggacaaacagagagggtcaatcagtgtcttgaaacctatcttcgctgttttgttcactcctgtccacgccaatggcccatgtggttatcgcttgcggagttttggtacaacacctgccatcattcatctcttggcaagtctccatttgaagtgctttacggtcatttgccaacacaagtgggactggtcgctgctgaacaatgtgaagttccggatcttcaacagtttctggaagacagacaaaatgtgcttcaacagg

SEQ ID NO: 32011 - DNA, 315 bp, Zea Mays
cagggaatagctagctaaaagcgcaggtttttggaacatggaatacgctggtatgtaaggaccaaggagtagaaaattacaacaacttctatatatgttgcagaatgcagtggagtcgactgcgtagtgcgtactgcgcattatagtttccgcacgggtatatgttgcgtgaagattgttgattcttgagccatcgggatacgatcggaagctgtccccttccgtcttgaaattatgggtcacgataccgaccgatcaagccgccgcgccattgctcgttttctagcgtgaaagctactatactactagttcgag

SEQ ID NO: 32012 - DNA, 827 bp, Zea Mays
ctccgatgtttttatatcttggtaggaaaaatatgcgagcgatggattagtgaacatgtgtgtgtgtgccgtggtgcatcgtatttattgttgcactacgtggatcaagtgtctcgagtgcatgtcgcattatggttgtattcgtgacaaggaggtgtaggttttactcgattagaagtttggttgatgtggctaggaaatttgttttggcttaagtagagaggtggtggcaacgccaaagtagccgtcgctttctctatgtttataagtcaagtctatacacgttatgcgttccctaaattacgcttcacatatagtgtattttgtgtagtgtggattgattttgagtgcatgtgtcgcaagaaaggaattaatgcgcatataggcgataaatgggcgtattatagtggtggtggcgcaagatatttgattgaggtgtgcgggtatatgccataatatggttatactcgcaacgaagaaagatgtatgtcttgtataacacaacgtttagattgttgtcgtataaccgtgtgaaggatgctcccgatggtcatgtgactaaagggtgttgtagtggcgaagcgagaagtaagtctaatacttttaaatgattagttgataatgcctatcggcttcgtcatgatttttgtcgtatggcggatcgatgccttgtcgccgtagtcttgagcaattgtcggaaatgttctggtgctttaccgatggggttgaatgtacttgtgatgtattacaatagctgtgtgtcgcgcaagtacccaaaaatggtaaaatgtggtgtatgttggtatttagaaaatagtcacgtcatt

SEQ ID NO: 32013 - DNA, 657 bp, Zea Mays
gccgaagcgatgaatttgatgatgaaacagctgcattgccctgtactgattgcgtaccacaagaacgggtatttgtttgcaaccgatctaatccgataatgaacattggtagtttgtacaaggatgtgaaagaattcagactggctatgaggcagtatgcgattaataatgagtttgagttaggaattgagtcaagctcaccttggagatatcgaggttattgcaaaggaggtgattgtccatggagaatcaatgcaaggctacaaaatgtcgggtctcccactatcgttgtgagtatttttttagcacacattgtttgtactttcgattgttgatgaaattagggaagctcacaatggtactattttttttgcgcaggttacagttatcgtggatcagcacacatgcacttctagtggccgtcgaaatacaacaacacccaccagctcatgggttgcatccctagcactgccaatcctaactaagaaaccacatatgggagcaaaagaattgcaaactaccttgcaagagcagcacaattgcacaatttcttatgatacagtgtggaaaggtaaagagaaggcccttagagagttgtatggaacatgggaggacagcttcaaattactatttagatggagagaagctgttttggag

SEQ ID NO: 32014 - DNA, 310 bp, Zea Mays
gaatgggctgacccgagaagacaatggactcgagcccagattgttcgtcaaatcgtgcactaccccaagaaaccgtccgactttcccgcgactggcaccctcagatgttgggatggttcaaggaagagtcggcgagttttttgaagattatttaagtcggttcgctattagttaggagatatactggaagaacatcatcgccatgtacgtagggagtgccccacggtcatgtatataaggcccagagggaccccatcattttcatctcatctcattatcccttctccattcaagagacaccacttgtaac

SEQ ID NO: 32015 - DNA, 610 bp, Zea Mays
tgccaccgcaggccacttttgggtcggaacctttgccgagtcctcgattgggattctgggggcttcgctgcgatggtggtggcgccctcaccttgggattctagggctgggtgtgccggaatcgcacggtatgccgtgtgcctgcccggcgccatggtctgctctgttgccgtcctcggtttgggaaaggatcacgacaccacattctccatcatcgctggtacgtatagagctacttgaagcaaagctatagacccatgggcgggggtctggtgagttctggcaatggcgccgccaccaggttgctgcacgcgcctgtgttggtcgtcgtgggaggaagaaacccggtcagccgttggatcaatcggacggatggttttcacctgcgcggtataaaatccaggccgttgggttgtcatctgatggataggtgtgtataccgattgggttggggctcgatataatctacaccataggatgtcctgtggacggctgaaattagaaggcagataccccttcggtcggtgatgttgcaaaagagcccctgcacttagttgaaataaaccggtcgtccaccagtagggcaatctgagtctagggaatttttgta

SEQ ID NO: 32016 - DNA, 327 bp, Zea Mays
atgtgggccagtggcataccgactccaactaccataaacattgtctgcagtgcacaatgtgttccatgtatcccaattaaagaagtgccttcgggttcctgatcgaaccattgatgtggtggatgttaccttggaaccagacttaacatattcagaacatcccattcatgtcctggactcttaaattctataaggtacaatggaaccaacatgctgaagatgaagctacatgggaaacccaagacttcgtagaaaagaattttcctagctttttagcttcatgtaatttgtgagacatgtacaattgtttgtaaagatgaaatagac

SEQ ID NO: 32017 - DNA, 557 bp, Zea Mays
gcgatgaagaagccgagcaggagatctaggagcggccatggaagacgagcttgacgtggggaagaaggctggtgcgttcctgggcgcggggtagagaggaggtctcatggttgggagaagactcgtgtgctgggagggaggagtggcgtgggggagaaaagagaaagcagactgctgccatatatggaggagaagctctagagcacgactgccacgtctctccattgcagcaattcgtcgaacacgtggtagatgctatagtagcgactttgggcggcacattttggcattttctgtttggattaggatcttggtcactgtagcaaagtttcttcccgcgcaatgctctacatgtttgattaagggttctcagccatttgctaactagattaaaagataattaagtccaaagttgctactgtcagagggttaatttcacctaaagaatggatgtcaaaccttgtcaaaatgggtcggatgaatgccatctttcgatatgatgtgcctccattagttactaacaacttttatatttggtgaaactcaagttgtttaac

SEQ ID NO: 32018 - DNA, 427 bp, Zea Mays
tttgaatgcacatcattgttatcccttacctcagcaatgtagttgtcagctttacgaactgataaatgacttaaacctcttgttctgtcgtgtaggatatgcagaaccgacggtagaatccttccttgcaacttctgtgcaatcctcctccgcctgtgaaacatctccataatttcctcccttatccttccagccaaatcacaaacaggcagatccttccaatccttaatccaattgttgaaaacctcagcaatgttgttagtcatgtagtcgcacttgatgtccgtattgaagccacttctgtaccaaagatagtcatgatgctcatttagccaactactgaccctagggatttcttggatgctactaaaatagtggtcgaagacttctctcctataagccctagctgctggatacatgtacccag

SEQ ID NO: 32019 - DNA, 337 bp, Zea Mays
aacaactttattcccacttgttcctatccgacgagaatacccgaccagaaaattttatctccaacctagaaaattttcactcacaattagggatggcaatttttatccgtagatttggatatctatcgaatatccgaccagatggagcctcacatgcatatattttgactcgtgggttagacctatatccgacccaaagctaggcgagcatggatttagatattacctcccactcgcaggttacctgtcagatattcgaaatcggcgaatagtttttttcctagcccatattagacaataaggagcaaaacttaacaccctaagccccatgcctaac

SEQ ID NO: 32020 - DNA, 294 bp, Zea Mays
ctttcatatgcatattgtagcatagcgaataaaaatcatgtacgctatgctataatgttatcaatgatccttttatttatgtgcataggtatctaatgagattgaagggttctgttcatacaaaaagtcattgtgaaggatcaatcatggagtggtctatgtttactgaatgccttacattttgtgctcgctatttacatagcgggtctcaattgaaccatctagatgcaaatgatgaagattgtagtacaactcctttcttccatagaattggtcgtggattgtctcgaaaat

SEQ ID NO: 32021 - DNA, 571 bp, Zea Mays
tcaggaccacaaagatgtggtgtgtaggaggaatcccaatgggaagctcagatgggagccagtaacttcctcctcttctcagggcactatcaatatgatgtcgagtgctgagtagcagttttcagttcctcttcctccacagcagctttttgtgcctgggacttctcagttcgtgccgatgcaaggttttcctcagtatcaggctgtgcctactcctgcaccgtctacacctgtgctgactcagtttggagctccacgccagcctcctccggtggctcagtggggttcttctgttaatttcactccgagagcttcctcttccgcgggtatttctagagcttatgtgctacccgctacggatggcagggagcaaggagacgtggtgacaggtacgatttcagttgattcatttgcagcccatgctctttttgactatggcgctagctattcgtttgtttcggaggattttgtgtcgcgggctggtctttcggtgcagaggttgggtcacccaattttggtcagttccgctaatggctccattagtagctgtttagtttgtcaggggtgtttc

SEQ ID NO: 32022 - DNA, 411 bp, Zea Mays
gttcgaattcggcacgaggggtttagtctcctctggtcagctaggggtggcgctctccgcggacacggcggcgcagtcgccggaggtgagacagaccggggcttctagggcacttggggttggtctgggtagccagagaggttggggaggactcggcaagcactatggcatggtctgggtgccgagaacaggactaagatgggaaaacggtggagggggatcctcgggcgaacccaaggttactctggcgagcaatacccgtcgcggtgagggttaaaccggcgctctgcggtcggcataggctccggggagagggtggggggtgctctaggcctaagttcgggctcagggaggggttgcagtggtcgaacgccgtgaagatgctacggcccggcgaggggcaactttgac

SEQ ID NO: 32023 - DNA, 1096 bp, Zea Mays
ggctggttccactctgaaattcaggtgttcagtgtaacagagtcagctttgggtgtgaattcaagcttgatttattaagaattgaaccatggttgctatgacaaacttgtagctagtttatagctctacaatattgctgcagaaagttaattgagttgccatttgaaattgggagtaaatcagcgctaaacctgctctgtcaggcgctctgatgaagcagtgccatggtacagtgtccgatatggatcagactgccagcgttggatcctcatcgccggtgacctccctgcgcaaggattcgtgctgccaccgcccggattcgcgctagagactaacggataacatcgcggggagagggaatcttcgccaccggtgagctggactccactccggtgaccccccgcacttcccctctaccctgcggcttgagctgatatgctcgccagtgaaccgccgttctccggccttgcgtcgcgtgtcccaacctcgccaccgcatcgtcgtgactccctctagcttcccgtcgaccaccggaattactgccacgacattgaacacgtattcaccgcgccagggttctttcttatctccggccgcccgcgatgttcgatcaaattaagcgccaccgtcgaaacctcctataaattgagcccgagaccagctttgcaacatcatcacccatctcgccaccaagaatcactagcaatcgtgcaccagtgagctcgaatttcattttcccccaaatcagtcgaagagcaccgtgaaaccaagttcaccgtggccagtctgttctggtaaaactctgcccaattcaaaccttgtttaagtgctctcgtatgcctgtgatgtccatcgacccacttaattgcacggagtagcctctggttgccgggaacacgacggtatagccgttatgctcacggtcaccgtggccagagcaaaccattgggccatagatgaaattaggttgggggaaatgctcggggtaggtcttatttggtgtccatcgctcgggagcgccggtcatggccctgttcggccggtacagttgctcaccggagcgcggccgtgctccacgccgtcgaggacctccccc

SEQ ID NO: 32024 - DNA, 375 bp, Zea Mays
tggggtggagggagcgcaaacatactcacctggcgataggtattaaattgccgaacaagggtcagcccgtcagagttactcatctgaacttctgaagcattgatgatagcaggcatcaactccaaatctggcgagacatagtttcagaggctactcaaacaaacaagaggtcaacgattggagtagggacataacatgagaccaaaactgaatacttctgtcacacaaaattagaacgtctcaaaactattcgctagtagtataagcttgggtgattgcttcattgggtaagaaggacaaggaatcttaggataggtttatggcaagtgctccatacctaacagatgtgtggaatttcatgggttgctcagacgt

SEQ ID NO: 32025 - DNA, 346 bp, Zea Mays
atcagtttgaggatggtaggccgaactaaaattcaactatgtatccaagctctcatgcaacttcttccaaaactgagaagtaaattgtgatcctcggtctgacacgatcttcttaggcaccccatgtagacaaactatccgagtcatttacaattctactagcttggctcccgtgtaattagtcctcaccggtatgaaatgagccacttttgtcaatctgtccacaatcacccaaatggaatcataccctgcaggagtgcggggtagtccaacaatgaaatccatgccaatttcttcccatttccacttgggtatcttaagagggtgcaatggtccagctagtctt

SEQ ID NO: 32026 - DNA, 306 bp, Zea Mays
ataaagatgaatgttttgatgctctttgagtaaaattgggtcaagagctaggggattgtctcaggaattgtctgaaaaaaatggacaacctacctcgtaatgacaatcattcctcctctgtcttcccacatattttattgtggcagagacatcgaaataatctacctgatggaggagacattaaagtattcgtggcataactgttctttctcgtcgaatgtctgtagtacgtacggtgttcaggttgtttcgataaggcatcttgttgttgttaatatttaattttatgatgatattttgtggctg

SEQ ID NO: 32027 - DNA, 312 bp, Zea Mays
gttcgtgtgtgcttttcccaccttcaccagaaaacttagagaagtctggtattctagttccctgtggatatggcacggtgtcgaatcggtggctataaggcttccgatacgattgccctgtacctgacacactaacaccgagtttgtccctgaacacccccagctacttcgtctctgatcctctctgccatgtctggcgaccatccattgagtttgtgggtggaaatctcaggttgcctgacatcactctgtcgactttcctcccagggatgtttgaggtgtgtgttaggtgtcctattaatgtcaccagct

SEQ ID NO: 32028 - DNA, 402 bp, Zea Mays
tgctattctgccatggcgaaggggtactggaggatctgagccatccgatcgacaaccgatggcggtgattagatttaggttttgtcgaaacggtacgcaccgagagctattgggtctagatccaacgaccaacatcctacgatcccgagatccgaccctaaccgttcgatcagagatctacgcacctgacttggttatcccgacgcggccccaatattcaatctaggccggacagcacaagatcaacggcccacggtgaatctctccccggatctaatcctagccacacatcaaccttcctatggcaccggtcactttctcccacccaaacgacggagctcggcggcgacccgagccaccacggcggcggcatcaccggatcaagccaacctatgattccga

SEQ ID NO: 32029 - DNA, 484 bp, Zea Mays
gcactcatgtgcatatgttatcagattgttcttcaatgttttgcaaggactgactcatgaacgctactcgcctccaataattattgggctgtgataacgctcatataagacttctaatcgatcaacaagacatttatctatccaaagggaatggaatgcaataattgaccaagcaaggcatcgatcttatcatgcacataaaagcatcacaagcatatttacgccacctatcggttaacttgatcgacacactacacatgttcttcgcccttcaaaatttatctcacaaccgaatttatcccacctgctaatgacaccgacaagacctactgatatgttattcacatcacgagcacagttacacaccgcagactagtttctaacatgattttcacataactcgtaattcaactacttgctaacaataaatcacgcacgacaactaccacatcaaatgctttatgtatttggaacaccgcttagc

SEQ ID NO: 32030 - DNA, 401 bp, Zea Mays
cgaagacatttcttccattaggacatgtggaacacgtcgggcactgttgaaggtccttttggcaactgtaccttataagctataggtccaccaaaatctctgtttcaaaccttagtacctattgctaccttcagggtgaatggagtcccggacggcaacctaatcgcaattctacatccctttctggaggcaactagacaaatcttcggggaacacatccgagaactccctcacatcaggtatatcctttacttctttcacttaaactcctgatgtagacgaaccttattatttcctagaatagcctgactgcccatctccttatatccttcaaccaaactaattgccatcaggagctaaagtttcacattaagatcacgtaggatgtattactttttttc

SEQ ID NO: 32031 - DNA, 282 bp, Zea Mays
gtgccaatgaaggcacaaacattgctaaaggccttctggcatgcttcgacgtcaccttcaatagccaccttcggccttcggaggccaaagcgagaccatatgtggtgctagatgatttccttgatatctttcctttcaatcagatcatttttaacataaaaccactcctccatctaggccctgggccattttttccggtatgttggcaccaggtagcttgcattagagcgaacaatgaatccgtaacaaccgaagttgttgtggtactgttccttgccggta

SEQ ID NO: 32032 - DNA, 308 bp, Zea Mays
ctcgagaagggtcattaacccctgtgtacagataagcccggtagactctatctttcaaaggttgaatgttctggaaaacaaagtcgacaacaatagctttagcagttaggcctctattctttagtatagatatctcggcgagcaaaacccaggcctcagcaagctccaagtcagtcgggacctccgtccaactaggcgttcggacgtcaggttgtctcctcgagcgagcgggtagcgacttgttatgattctccatggtaaaccactcaaaatgccatcccttgatactgtctttcaaaggaatgtca

SEQ ID NO: 32033 - DNA, 272 bp, Zea Mays
ggatgatctgaggcgaggagtggtgcgctgggttcataactgagatacggagcaaggggaatgctcaatttataaaggccgggtatggttgctccaaatttggatgaatgggagctcatgttgatgaaagggtgagtcacaggagctcgactttcgtggcgctcactgaggtaaagacccagggcggcaaatggtcgtccaccatgacttactgcgacattgtatgatggcgtatagcacggaacgagtggggtaaacaacggcatgacgac

SEQ ID NO: 32034 - DNA, 338 bp, Zea Mays
ggtggaatgtcaagctcatctgtaacttaactccagccatggtaaacagttcagttcagaaatggcaagtgaaaaccgtgtcccggtcactgactatcgagcatggcaaaccatgaagtttgacaatttcatcaaagaaggcctttgcaactgatgcagctgaatatggatgccccaaagcaataaaatgcccatacttagagaaccgatcaaccattgttagaactattgacttgccaccaacctttggaaacccttcaataaagtccattgatatatcagcccacaccatagagggaattgacaagggttgaagtaggccgactgggtgaagatgc

SEQ ID NO: 32035 - DNA, 529 bp, Zea Mays
tttgcccacggtggcgggcgacactacgacccggctgcccgacggcgtggtgacttgtgacgtgctactactggtgaagtgttctacacatacacgagacgataacgagcgaggaatgttgcttaccaaaggccctagaagaggctagagccgatcgtgatgcagtcatagcttgcgcccacgcacagcatgaaatcggcaccggcacactctctctattcttcacaatctccctcacaacagcggtagtgaaaggaagggaagagagagagggttggcttcatatactgtggccgaggctcgcagcgaggagatctcgcccgggcggtttaccagctggaacagcggaggaggaggttatggcgtccgctctccgcgctccgcgctctagaagactgtctgtgtgttggggtccactgtccagtgagcgggaatatgacacggatgcggtatgtggctgacatgtgggtctgtggactttggcagtgtttgttccgtgcgcgagagagggaggctggcaagtgggtcc

SEQ ID NO: 32036 - DNA, 280 bp, Zea Mays
agcactggatcattttgctgattggaccacgtaaaacgacgtccatgcagggggatctccttgagagcaacatcctcaattagtcgtttgaagagattcatcatagcccggttaaggttagagttattcttatcagaagcttgtaaaatgagatttaaatccccagttaataaccatggcccattgtaagcgtccctaatggttctcaactcctgcaagaacaataacttctcctgtccatgcttataaattgtagatatgtgagaagaataatccgtct

SEQ ID NO: 32037 - DNA, 1060 bp, Zea Mays
aaaggaaacaatcctacacaatcctatcagggagatccttgcctattgagaccaattaaccaaataaggagcaggcgcagaaggcaacaagcccgtgcagccatgccacctaaactttgcctaaaatagcacacagtaacccccctcgccgcagtcagatcgtcagccactgcgcacgttcagactggtcctgaattcggtgaagacagaggatggaaggctcttggtgaagatgtcggcatactgtgatgtcgtcggcatttgtaggacacgaagatcaccagcggcaaccagttctctgacgaagtatagattaatctcaatgtgcttggtgcgttgatgctggacggggttggaggtcatgtagacggcactggtgttgtcacaatacaccagtgttgcgcggtgaagaggaatgtgaagttccaataggagctggcgcaaccatgtggcttctgcaactccattagccacatcgcgatactgcgctatactcggattcagcactagacctggagacggtgttctgacgcttggaggaccaggagatgaggttgtcaccaaggaacgcaacatagcccgaggtggacctgcgcgtatccgggcaaccaacccaatcaacatcagcgtagaccacaagatcagtcgctgtagacggtcgcaacaagaggccaagatcaagggtgccacaaatgtatcgcagaattcgtttcaacgcggcaaggtgtggttcccggggagagtgcatgtgaaggcaaacttgctgaacaacataggcggccaggtgaatgtcaaccactgcaaagcaccagcaagattgcgaaaatccgaagcgttagttaccggcgcaccatttgttgaagcaacctttggatttgtatcaacctgagtgaggcaaggcttgcactctgacatccctgcgcgatcaagaagctccaccatgtactgcttctgagagagaagaaggccatcgcctgagggctgaacatgcataccaaggaagtgttgtagcacactgagatccttcatggagaactcctgttgtagggccgaaatgatc

SEQ ID NO: 32038 - DNA, 601 bp, Zea Mays
atctgtatgaagtagaacgctcttagatggcggcgaggactgctgtgtggatgtataaacaggactgctactttagaactggctagtgtaataatcgatgttttactttctcttatttaaatgtttgtctgaacaaccgtagcttattctggagatagtgctcattgtaaatgttgacttatggttccagaaggcctctggtcacttaacaccaatgctttggatctgatacgtgtttagaagcatgaagttttcatacaatgaggataactggaaaaaagtaatccgtgcattggggaaaagcatgaattgagataatggatagtgtatagttgaactgtattcactctttgtacacattcctgtgacatgagatgtatgaaaatcctgtttaatagttataaatcaatagccatatgcggccgtatgaaaatcctggcttgtctgttgggatgagcatttgctgtgcagcctaggaggcagtgtagtaaatagcaggtcatgcacattggcagggctttcttgaggctaagacccagttatagtgggctaaaacagctaaactgaacgtgagtacaaataacggtttactgctcaaaac

SEQ ID NO: 32039 - DNA, 356 bp, Zea Mays
gaaatttgtttgaatgtaagtgtggaaataaggggatagtgtttcccgctaacctcatagtaatgggtactcagggaatagatgtcatcctagggatgaattggctagataagtattaggcagttatcagttgtgataagaggacaatcaagttggtgtcccaactaggagaggaagtggtgaccgagttagtcccgcctgagctaaagaaaggaagttgttatcagatggctgtcgaaagcagtgaagcggacccgattgagagtatcaaggttgtgtccgagttcccagatgtgtttccaaaggacttaccaggtatgccaccaaagcggaaagttgagtttgctatagagctt

SEQ ID NO: 32040 - DNA, 393 bp, Zea Mays
gctcgggaatgggatgaaactgagcacataccccggcggcggagtcgggtcagcctcgctcgagggggccatccactccggctgcagcccatcggagaggggacagagcagaccatcggcaacgagggtctccagatcctccacagcgacggtggagaaaggccacgagtcgcgtggcggaatgatggtcaccttatcagccatcgccgaacggaggtggtgggggaggaagggatgaggtgggtggtttccttttttctgtctgctctcttaggttgaggaaaccaaagaagagggcaagcgcaaatggcagggtaaagaaccaacaccggcccctcttccgggtatataaaggcccgggcgagatccacccaaggcttcgcccgtacccgc

SEQ ID NO: 32041 - DNA, 279 bp, Zea Mays
ggctgggaggtgcagggaggggagacgaccatggctgggggagggtgccatggggaagaaggaggagctccctcctcagccaaaacagagaagggaagggagtggtgtgtgggagaagggagagggtgggcagccatttatagagccaagctctagacatgtcagactgcaccagcagatggcaggcgatggcagagcgactttgggcgcccattttcgtcgttttccccttggaatcggatcaaggttactgtaggaaatatcttccttgatgtacac

SEQ ID NO: 32042 - DNA, 468 bp, Zea Mays
aaagaaaagagggggtaaggatgaagcgcattgtacaagatatttgcacatgtgatatttcggtgatgcaccaatctgaatgcccctgccagcacttcatcccaatcttcatctgattcccaggttggtcacggcaaggagggtaaatatcaagggtagatatttcagcttttctgaatcttcaacagataactgatccccccttcttcagtcagccctttctccatattttgattaagaacagggcaatcacaattaatagagcttgttcattagtccaaggtctaccaagtctctatagatttcatagacccaaacctcctagattagaggttatggcatccaaaagttgactgcaaaatctggttaccatttctgtttgcctgaaccaaattttagttgttcatcccattgccttctttctgacaggggcagtttgggcgccattatctcctaaatctatataac

SEQ ID NO: 32043 - DNA, 352 bp, Zea Mays
aaatgtgcatgcaagcactcaaatggaatcaaggaaggcatcggtgtcagcctccactagagctgtggaggtattctcttcggtggcaatcatcttcacaacacttgcaagatcaagaggcatgccaaatgattcaagtgtggggtcttcttccacggcttcattgttggttgccatagtgaagtgggcctcaggtttttgtttgtgcatgttctttgccttgtatgcttctatgacatgctttggtgattggcatattttagactaatgtccccacacgccacatttgtagcatgtttggtcttgaagtccgtatggcttatgttgtggcttctctttgcttgttttcttt

SEQ ID NO: 32044 - DNA, 522 bp, Zea Mays
acctttcaaccacatcatctcacatagagctaaagccattgctctatgttcggcctcagcagtagaccgagaaaccacaacttgtttcttgcttctccacgaaacaaggttacctcccacaaacacacaatatccagatgtggatctccgatcgtctctactacttgcccaatcagcgtcacaatagccctccagattcagatgttgatttgatctaaaccacaaccctttgctaggggttcccttcaggtacctcatgatttgattgaccaactccatatgtcttgttctaggatcatgcatatacctactcaccacactcactacataagcaatatccggtcttgtatgacaaagatatatcaaccgacccactatcctctgatatctttctcgattcaccgggtcacctgactcggcacaagtttggtgattcttatcaatgggtgagccacttggacgacacccaagcattcctgtctctgtcaacagatcaagaacatacttcctttgagagagaat

SEQ ID NO: 32045 - DNA, 350 bp, Zea Mays
tgatctgtatcatggttgacacaagcacctttgagcaatcaaggctgctatgttgttaaccttgctcttagaggacatggaaatggactcgaatatgtgaaatggactgctgacgaagggcgatgatgctcaaccttttcggagtcgcacgccattgagcaaccaaggcagctgcgtgtctggtagcctatttaataatccctttttgtttgtggttctgcctaggatggtcacctggatggatatatgacaaccaggacagttccactcacaataggatgagtagattgggcagaaagagaagggagggcctgatttctatgattgagcaaaggagatgctgagctgag

SEQ ID NO: 32046 - DNA, 343 bp, Zea Mays
cagtatgcgggtcactgtggcaactccggtgttgagttttcctgtagtgatgcttggcaggatccatgggtcaaagttatagcgcatcaagggtcgtacgcgagaacaccctgtcttgttgtcaaggactctcctcatcccaccagtgtgtcgtggcgttatccaaaacaatatttgtgtggcaacgtgtcatatcgtgaccagtgtgggggaacattacctgctttgtctccacgtcagtcgggtataggcgtgctccggacccatgcgtgtggtgtcggggcccacagatgtactagctctcgttcgtgggccttgtgcttctttgtctcgtagggttgct

SEQ ID NO: 32047 - DNA, 1098 bp, Zea Mays
tgcccatgaaacatgcttgccaagttgctcgccacagttactagtgctacaaacgtgaactcattgggtgtcatcccagagacacgaacctggttgaagagttttactgcctcttccccttgctcattctgtgtgtggccaaatatcatagcattccagatggccatgtccctgttttgcatcataaaaaacacagccttggcatcatccacaagggaagattttgaatatgcatcgattagagcacttcccacatagaggtcgactgaagttcctgatttgatgatgagaccatgaatctgcttactccattcaatagatgatagaagtgatgacatcccaaggagtgaaacaaaggttagtaggtttggccttatggagtaatatttcattttacggaatatatgaactgcttctgtaagatcaccttgccttgcatagccttcgatcatcgcattgtaagagactacgtcatcatgcgccaaggcatcaaatgccactcttgcagcagttaaatgggcacatttagcgtacatgtcaatgagagcattcttgacatactcatcattctccagattaacctttatggcatgggcatgtatctgtgttccttgtgaaatagcttccattgaaccacacgaattcaagatacttgtacaggcaaaagcatctggctgccatccagcctgacacatctgccagaacatctgtatggcttcagcatcaagtgaattctgcatataaccagcaatcattgtagtccaagacacgagattatgattcttcattcgatcaaatagcttacgagccactaacggtctggagcacttgcaatacaaatctatgagcgcgttgatcacggaagcatccacttctgctgcacttcgataagcgtagccatgtatttgcctgcctccctgtagaaaggcaagtgcagagcaggcactgacagcacttgctaacacaaacctgtcaggctggacgccttgagcgaccatcgtttgaaacaagcccagggctagttctccatggccaatccgagagtaaccagtgatgattgctgtccaagtaaccggattctttgttgggagagcatgg

SEQ ID NO: 32048 - DNA, 765 bp, Zea Mays
ggggtcttcggatgaagacttagactattttgcagcattggatgtggctgcagcggagacttctctgcgtgtgacgggtgaggatattccttgtgcgagtgctgggcgtaggcgtcgaagggcggtggcgaagcggagagtgagtgagttgtcacaaagtgatagacgtcatggtgaggtggagggtggtcgtcttcgagtggacgggactaccaaacgggaattgttgtcttcgccggctggggcgagtgtaggtgagggagagctgtgaaatctttttgagggtgaggaattgaggataatgttgttcaactacagggagatgggtatcatcccgaaggttgagccgttgtaatgtgtgatgccctcgctgtgtgtgtaactatgatttgtatgatgaggttgcgtgccttcgttgatccggccgcgcccgtaggcggcttgtgtccgggtgcttttggggaaatcttcgattttgcgcatttgttgagttagaccggctgcacccgtaggcgtattttgcgcggagtcttttggagaagacctcgattttgcgcacttgtgctattccggctgcacccgtgggcgacttttgctcggataatcttttggataagacttggatttcgtgcacttattgtgctgttccggctgcacccgtaggcgacttttgcgtggatagtcttttggaaaagacttcgatttttcgcacttattgtgctattccggctgcacccgtgggcgacttttgcgcggatagtcttt

SEQ ID NO: 32049 - DNA, 312 bp, Zea Mays
tgaggaatgaagctctcgctaaagataagaatttgctatctctggtcgaaaggctaaagtctagtgaagccaagatgtctgctcaagcagaagctcacaaagccgaagtagaagagctgaaaaggaaagttgccgtagcaactgaaaattttgatgttcaagtggtaaagcatgagatatgcaaaattgaaagatcaagagtacaaaagaatgttgatgagcttcgcgcaggcaaagaaaaatgctatgagatatccatggagtgcactaaaaatttaaagaacagtttctctaaagttggggccttctcct

SEQ ID NO: 32050 - DNA, 437 bp, Zea Mays
agtcaccgctgaccgtcttcgtctaattttatctaactctgtttgccacccgcctaacccagtcttcgtcgtacactgtgtcacataactcgtcgcacaactgtctctttcgctcgaccaggacgtgatctgcgacaaattttgcaaccgcctttcgcatcctatcttgtctataaaaacatccctagccgtcgcataacccctcgtctcgcctagatccagatcgcaggccgtgaagggcaacacttaccaggtacggggacatccctcctcttgtttccaatcgccaaaccgcctccgatttcccgagacccagatcacacgagcatgcccgttcggttaccggcgacgcaggtaagccttctcttctcccttttccttccggcgacgtgtagcagccctttcccccaacgaagcccctcccacggacgcctgtc

SEQ ID NO: 32051 - DNA, 634 bp, Zea Mays
agccatggtgccatcacgacacaataattgattgccactgattccagcaaggttctaataaatcttgtagatgcaacctcgctttgcctgccgccgccagtcttccgcctccgccacacacaaatgtccagtttctttgctgtagctgtagctttggtgctctcatctctcatccatggaaccacgatggccacagcgagcagcgaagagagcttcttccagaagtgcccagcgtccaggtgcagcgaaggagggccagagatccggttcccgttccgccttgcgaccagccctctgtcatgcggtgcgcccggcatggagctggtgtgctccaaagcagacaccgtcctggttcacccaaaccttggcttgtgtaaggtaactgccatctggtatggcggcagcactataaccatcgtcccactcgcagtcgcagcagaacccaagtgccctttccagaagatcatctccaccaatctatcaaccgatgtgtatagaccttatggggatagggcaaccttagtgagctgttcagcagagttcatagtaccaagccatccggccagccttgctggtcccatctcttgccttaccaacgctagccgccggttcgcttacttggtgccgtcttttc

SEQ ID NO: 32052 - DNA, 497 bp, Zea Mays
ttgtcatccaatcagccaggtactagcaaactctgaggcgctaccacgacaaagcagtatgacaccgatcctttacaataggagacctagtgctctgtcacgtattggcaggagaagggcgacacaaattatcaccgccatgggaaggaccattcatcattgcagaatgcagccaacctggatcctaccgacttacccagatggatggaacccaagtaggaaactcgtggaatattgagcacctcaggaaattctacccgtagcgatacctcaaactccagtcgacaagccacacattgtaaacaaagggtatcattatcaataaaactttcatgttcgtccacttgcaaacaaactctcaaaacaacgatcggtttaagtcagaaacgccttaagccagcacgcatacataacgaggggtgattactataccctactaacggagaaataaacttaagtcggatactccttaagtcggtgcgacatgctcacgcata

SEQ ID NO: 32053 - DNA, 898 bp, Zea Mays
tcgtgctgctgttgccgtgatctaggctcggcttggttggatagcactttgggtcacgtaaatatcctcgccgtggataactccggccataaacaagtccggccaccgtacatgcgtcaccgcggtggagatcgataagaacgccggtgaccgccgcctcctagccttgcgccgcgtggctttaacttcccatcgcgtcgccgtggcttcttactgccgtcaaatcattgccggcgagctcgccacgactgtggacacgcactcacgcggccagtgccttcttctctctttccggccgtcgcgcgtcctcctcaaaattcaccggccaccgcccttggagcctataaattgagggcggggatagttgcgccatgtaatcgtcaagctatagcacccactctcatctccaatcgttccccgtagctccccaatttgggattacccccaaatcgatcgaagaacgctgcgaaaccaagctcgccgtggtcagctcaattcgggtcagctcctcccctctgctcccttgtttaagcattcacatacatcggtgatactcgccaacccatccaattgaattaggagcccactcgtcgccgggaacgcgttcatccacccacaacatccatggtcgtcgtggccagtgcaaaccatagggtcattagtgaaattaggttggggaaatggatcagggtaggtccaattcggtgacaggcgctcgggagcgccggtcttggccccctccggccggtttagctcgccggagctaagctttccgcacggaccgccgccggggacttcactatgcaaagggaaagaagatgggggttcttagtgcaaatagtcagtgacttggttaaacagtgaaataacctgttctcggttagtaaaaacttcgggg

SEQ ID NO: 32054 - DNA, 351 bp, Zea Mays
cttgcatgtgttgggtgagaggtacaaggaagaacacatacactcgccttattgggtggggcaaaacggagggtccacacacacacgacatgcttgtgaatgtcagcacactgccaggtagggctcttgacatgttggcaagtgggacaccttcatctacaaaaggaaaaacatacacaccaaaggggatcaattaccattaccaggactcacttacttgttttccacgttcatctctctcttctctactacttctactgttcttcctcgcatgtatttcggttatgaacattgtggagattctgaactctgaatacagctacctcgttccccaatcctcttcttccttca

SEQ ID NO: 32055 - DNA, 323 bp, Zea Mays
ataaattgccgaccccacctgctccgctaagtagttgtgcaaccagtgaagcaacccgtgccttgaatcatccactaaagctccccaatttgggatttcccccaaacctgctttgtgccaccgtgaaagagacctcgtcgtggctagctcaccttaggtctgctcataccctctgctcttttgtttcaacgtccttgtgtgcccctgatgctccccgaccccgccaattaagctaggaccccttagatcgccgggaacatgttggtttggccgttgatcacacagtcaccgtggacagagcatgttagagcgtcgttagtgaa

SEQ ID NO: 32056 - DNA, 385 bp, Zea Mays
ccgcccgctgctgcgcactttgccttctcatcactcatcggctcgtcgactcgtcgggatcctacacacaacgttgatattttgcctcctagtatgcacagcacatgggcaagctgttggtgggatcatggcatcacctgtccctcgctaactcattagagtgccaccgcgccattgcaacacgacaatgggtgtcgcttgccgtcaccatcatctatcgctaccttgcctcctgcactcgctcctcctacttgtcgtcgtctcaccaacgctatctcacgacaaattcgatgactcaccggaacgacgcgctgatgcggctgctccgccctagtgcctcgtcctcagtcagtccacctattttctccctctagctctcctttcg

SEQ ID NO: 32057 - DNA, 289 bp, Zea Mays
gagtaggtatatatgagtacatatgggtgaagtgtgcgcttggtttgaaatttggcgaagaaagtgaatttttggcactccgctcagaatcaatcgtaataaatgaaaaatagtggtaaattggtgtctgggatatcggattgacgtgaaatttggtgaatatgttacttgaggtgtcatgaaggtgctggaaaaaatctggagtcgatttgagcaaatttagctggtttgggtatttcaccgagcaagtggcgtgcgggggtttaggttttgaatgaaatggctattt

SEQ ID NO: 32058 - DNA, 530 bp, Zea Mays
cggaccatcttgttgaagcccacttcatactctgtgacagacttcttctcctgcttgtaggactgcaaatcaatcttcattttctccaggaaggtgaccgggtagaatctcctttcaaactgcctgatgaagacatcccaagataagactcctggtgaggaggagtgcgctgcctgcacgcctctccaccaaatttgagcctctcccttcagcagctgtgtgccaaagcgaacccgatctccatacacaatctcgaagacattcatcttatcctccacgtaagttagccaatctgctgcctcgaccggagtaccactgccatcaaaagaatccaacttcatgcccatccactgcatcagagaaagaccactgactggaagaggcacctcggccccaccacctggagcagcacccgcagggtcagcgcccccgggcactcctccaccaccagcaccctgagcagcacccacaggggcaacaggaatagcttgcctcagaatggccaactcctgctgcatggcctgcatcgc

SEQ ID NO: 32059 - DNA, 369 bp, Zea Mays
ctagaactttgttacagagagattggcaagttgccacatagaatttcgagaaaatttgcccaaattatgctctgtcagttgttctgatgaacaatcccgatggtacagtgcacccaaatatctcagatacagagcatctcgccgtcggtgacccttcgccgcgattgacgtcgatcgtcgcgattcgtgcgccgtgacttgcggataatcgtggacaaggaaagatctcaactcgggaaagggatagaggcttatcgccggactgttcaccgtaacacttgccgcgtagtggacagaggtgtcctcgtcggagtttgccgtcgatcatagccacgccacgtgcttagaagatctaccacgtcgcagtag

SEQ ID NO: 32060 - DNA, 284 bp, Zea Mays
gtccgtgacaagcgaccatgcgacgcggagcgggcgaccaagttcctactgagccaccccacgaggcggagtggacgagcaaccccgcgtgtcaacctaaccaggggtcgacccaatgttgttgacctgcatcagcgtgtcaagatgtttcatcaccaaaccatggctggaccttaggtatggtgtcgaaaagtccctatcgaaacaccgactatacatcatcacgtactgtctcaagcaagcctccgctgacgtatggggccagtcaacctcagtcatagggg

SEQ ID NO: 32061 - DNA, 1028 bp, Zea Mays
cgacgtcgggcgaggagttactgaccaacgatggcgtagtattgttgtccccaccatgagcgtggatgtcgagcctgcaacgacactagcccaaccgacatgttagcaatacccaaacacttgattttgagagaattttggtggctttgatgcaaatttgtgaaagattttacgaggattcggaattagtctgctctttatgaacatagattctgctccgaactgatgagaaaaaatgaacaaataaaaaatcgtcgcctcagagattcgaactctcttcagtcgtgtgtgacgaactgacggttgtgggctcgtgggcggtcttcctcctcgccgtcatgcccgcggcctttcgcttccgccatccgtccttctaccagcggtgcccaggcttctattttagtctggctctaccactggatgtgatggtcatggctgtatctaggagaagacaatggggcgtgtcgaagacctacccgtagggcagcaacaattcctccattagtgcctgaagttcgatgagagctcgtgctgccacatatcaagtgcccacgtcgtgcttgtggtgggaacagacgcaatactagaatgtcatcgagagggcgtcgaactcctaaatgatggaccccaacattcggagctaaggtggacaacgccttgtaccgatgacgttcatacgcctgcgctgaggctcagccacatgcaagttggtgaggcattgaagttcaacgtcggaggcgagaggttggacgtggccactggtgaataggtccacctcgtgcctaggtgaggccatcgtagcaggacgagggtgaggaagcggtgctggtagtccactaccaaccctgtctgctgcagcagtttgtctatggtgttggagcggattggcgacccttagcatatgttgacgagctctgcgaagtgcgaccaagagactaagctgaaatcgctctccaaatagtaatccattgctatgccatccaaatacataacaatatccataccttctccatggtctggtgtgccgc

SEQ ID NO: 32062 - DNA, 445 bp, Zea Mays
cctcatcctcttttgccaggctgatctgatggtatccagggtagcattccaggaaggacaacataaaacatccggcggtcgaatctaccacctgatctattctaggaagtccgaaggtatccttcggacagtgtttgttgagatctgtatagtcgatgcacatgcgccaatccactttattctttttgagtacaagaacatgatttgctaaccactcaggatgcagtacctctctaatgaaccctgctgcaactaagcgagctagctcggcgcgaatagcttctctcttgtcaggtgtgaagcgacacaacttttgtcggatcggccttgcctggggatagaccttcagtttgtgctcggccagttctctcgggactcccggcatatccgcaggctgccatgcgaatatgtctcggttatcttatagaaactggccgagcgcgcc

SEQ ID NO: 32063 - DNA, 519 bp, Zea Mays
tagtgatcaaggccgagacagtgtgtgaggtggtgtacacttgcgaaagtgagaaaaaatcattcgaagctgcaagcagaatcccacccctagatccatttgcaggcagcatagcagtgttgttaaaaaatttctgacccaaggtgcgaaggatggttgcatcgtcgattgtagcgagtttagtctcctgcaagcaaacaatggtactaccagtatcccggaccagttcctgtacagaatcacgcctagccacttcattgagcccacgcagattccagctcaaaatttgcagttatgttgagacatcggtagacagctgagacccaagataaaacaaaccaagccaaggaagtggcaaattaattccattacactcgaaacagatccagaacagggggtactggcatgaaccttgaagttcccagaacactgcagatagtagacagacaagcacatgtgacgacgaacgacgacggctaagctgagtggtccagcagaatcgcagcaattgaaggcccc

SEQ ID NO: 32064 - DNA, 303 bp, Zea Mays
ctccgaaaatgcagtagggcaggcccgtgcaaatctgggctaaggaagacaaattcaagctgggctatgattgggcctctctccctgctaacatgatgggctcggctcatctagcacagggcacaccaaagaatggggctacttgacctgcaccaaggtacatgtgccaactgtttggtggcgagatgcagaattcgagaaattttgtcacgaggatccagcaggaggctcagattcaggttctgtcacggtactcatttttatccctctggcgcaatacctgaagcaagaatcttatccacg

SEQ ID NO: 32065 - DNA, 291 bp, Zea Mays
gcttagtacatggaaggccaaatttctatatacaggtggatggttggtcttacttaattttgtgttaagtagtttgcctactttatgatgtatttctttgagattccggcaggcgtcttgaagaaactagatgcatttgatccaaattattttggcggggaggaagcagtaaaatgaagtataggctggctaggtggaatattgtttgtcaacccaaaacgttaggaggtttaggtgtccgagcctggctgtaaaaaagataatcttactcaacaaatggctattcaaatt

SEQ ID NO: 32066 - DNA, 281 bp, Zea Mays
gttgcgcccttctttcttggcatatctcctctcgttcttggtgcagctcctggcgtatatcctctctctctcctggcgcatcttctggtgttcctgccgcatatgcgcgtgcatatccgccatggtatctgccatctgttgcatcatcctcatctgagctacaactgttaggtcaactccgactggtggaggcggtggtggaggatccatctctgctggttgtggctggggttgtctaaatatcctccgagtgtgtcgattgggaggtagatcaattccac

SEQ ID NO: 32067 - DNA, 394 bp, Zea Mays
acatgattctcatattgattatcactaatttcccaagaaaaatccccagaaactgctaatactactgctgttcgcccacctgcaaaaatctgtttttttttttggacagcaacatacccggattcaaacagcgatatctcctaagatataactccgaatcgagcgcataagtactcgttggaaaggtatgacaaagctctacatgattctcccattgattcccactaattacccacgaaaaattcccagaatctgctagaactactgctgttcgcccacccacaaaacttctagacagcacctctaccaattcgcatacgtaaacatctaatcgtttgaattgcagcacaaataaacaagagttaatcacaaaatcaccttgggttcctccttt

SEQ ID NO: 32068 - DNA, 347 bp, Zea Mays
gtcggaggcagaacacgtcagaggcagactactattgcagtcttaataagtagtagagaaatagaagtgaaatggagttagagcatctgaaagccagaggcttccatgcaggccacctaagcaataccttcctctatatttgcatgcccaagagtcacctgcacgtgtcacacggacccatcgccatttggataatgggtgccacgtgtgaaaaagcccagccaatgggatggaagcagagcctcacgccctatccatacgacaaccacaacccccctcccgcctcagtttcctccaccggacacctgctgccacccacacgatcaaaaacaaaaccaagctccaag

SEQ ID NO: 32069 - DNA, 611 bp, Zea Mays
gcgctctaaataaacagaagcacaggggctaactcgcaagattccatagactcagcgaatagtgaatggggacggcgggtggttttctggaaattgcaagggctctttaagaaaagtgttggccgaaggggtatggagagctctaggccatccgatctgcatcccgcggtgcagattagatcacgcaaggggggggggggttcaccaccgatctttagatcttgatccaagggcccagtactaaacgtgaagcggtacacagtacgagccgttagatgggcgatctagggacatgatgtaatggagacgtgcacaatccagaccgcccgaaccggatccgacggactagccttaatctaacccaaccggtatcactcctttcatcctagccgttcgtgccgaatcggacggcgtggaccccatctcccccatcacctcactctcctcccaacggcacggcgcgccaccgaggaacaaacgccaacgatgaggtcaatcaagcccgctactatgctattcctcaattaccaggttctacgcgctcgcaaggagaaaacaggtcggatggatgttacctcactagcgattagccgtcgcttgcagcagcccac

SEQ ID NO: 32070 - DNA, 350 bp, Zea Mays
gggatgaacaaatacgggttgtttaaatggatatgaaggtgggcgaggtgaagaatagttgggattgaaaggtcggattaccaaccttgttctctttttaggtccttgagttgatctttcacccgcatatccctttgactttccgtgtcccgcatttttggcttcaactgccaatgttgtactgactgccctgctgtatgtgaggtccaaacatgttgccatcttacgctagagtctgtcatttagtcccctcataaaacaattcttctttctcaggtttgtatccacgtgatcaatagcgtactgggagaggtgattgaatttattgagatactgcatcacagaatctc

SEQ ID NO: 32071 - DNA, 634 bp, Zea Mays
gcgaagtttctatctaaatatcatattgatgctgtgataaaggaggacgagggagaatgacgatttacatgaatatatggagaaccaaaagtggaagagagagttaaaacttggagcttctttgcatcctgaagaataaatataagaagacatggttgtgtgccggtgactttaaggaaattatgtttggatatgagaaggaaggcgaacagccaagaacgcagggtgctatggaaaaatttaaggaggttttcgaggagtacaacttacaagacctggggttcattggagatgcgtttacatggcaaaataaccaccatataactgttggttatataaaagagaggctggatcgtgttgtggcttgcggagattggaggagagtccatcctctatctcgggtagtaaatggagacccacgccattctgaccataggcctttgatcattgacacaggagaaaggggaagagtctgaatggaggatcatatgaatcataccttaagtttgaggcgaagtggctagaggaggaagattgtgtggaaagggtaaagaaagcatgggtcggtgcaatggaatagagttgtggaggcccaaaaaattctgctgagggagctccatgactgggataggaa

SEQ ID NO: 32072 - DNA, 337 bp, Zea Mays
atgctgctgggtccaacgaaggtggtttggtctatctgaagtacacattcaattacaggagccaattcgatgagccgaatgatgactggctagatgccatcaaagcaaccagcgatgagttgcttggtgcctactcaaaggccaaagatgatgccatgatggctgccttcggagggcaaggcaagaaaaggttaaatagagtttttgatgttattggttttgtttacccatactattgctatccctcacgaaagcagggaaagaagaggaaggctgctgattcagctatctctactacgccgaaggtgaaaaaggttaaagttttgacacatcggcc

SEQ ID NO: 32073 - DNA, 477 bp, Zea Mays
ctaccacacatatccagctttggctccttggtgccctggtctctcactctgagttcgacgtcgtggacttccttatttgtgagatcgaggacaccgttttggatgggattcgtgctcatcggcagttgccctatgctcactacttgtgccacatctttgcgcagctgattcagcctcctcggtttcagggcacacttgaggcctcacgcctcgtttttggatcctaccgtcctgcgcctgagactcctgtgccagcttctgttcctgtttttgactctcaggccaaggatgcagctcttcatcagttcgacactcaggctacagcagttgatgatgatgatgatgattttggggttcctcctccgcctcctatgcctccacgctcacatgatcatgaggctgggagttctagtgctgcccctgctgcccctctggctatggaccctgctcttgcttcgattctccagtctatcactc

SEQ ID NO: 32074 - DNA, 1482 bp, Zea Mays
ggcgccgggacctcaacgcactggtcagactcaccccgtccccctgttcttctgtcagtgctgatccttttagagctcttgggatcctgagcgtttgatatgtgctaacagctatgtgcggggaaatttccattgccttccttgaattcgattcgaggtgtgggactgccgaggaagccttcagaatttcattctgaagcgggcgggcaggcagtggttgtcatttagggtttggatttgattgattcatttgtttttaatgggtagctatttcatatttcaactctattttcgtcagtggactagcatttgttttttcagtaagcggtctagtgtctagtaattctgtgtttctgttcatcactttatttctgtaattctgtattttctatgtttcaaaatgttacttttcacttcacttcactttgtattagcttgaaaaacttggattttttccagtactttgcaatgcaagtggtttcatgatggagttcttttaggatcccacattggaggagtccgacggggaggatattggtgttccggaagttggtatggtgttcaataatcacacagaagtcaaccgattctaccgccggtatgcccgccgtgttggctttggtgtctcagtaaggaggtcttcgttctcacgagaagggacctgcttatatctggagcttatgtgctgcaaaggagggaggccacgttatgagccgaagtttcggaaaagggcttcatcgaccactaactgcccagccaaagtacgagtgaagttgtggggagataaattgttgcatatagagttggcgatccttgatcataatcacccagtgagccctgcaatggcaaggtttttgaactcttataagcagctctctggccctgcaaagaggcggttgcgtatgggtggccctgggactatgcctgttgaagagtcaagcaagatgcccatggataagctgggggagcttgagcagcttctgtttggtgagagcaagcacaacagctttgtggagaggggtcgtttgaagctccaacctggagattcggaggcccttcggcttttcttcactcggatgcaggccaaaaatgccaacttttttaatgtcattgacctggacgatgaaggctgtaccaggaatgttttctgggcagatgcacggtctagagccatgtgtgagtactatagtgatgtcatcacacttgatacatcatatgtggctagtaaatatgatatgcctcttgcaacatttattggggtgaatcatcatggacaatctgtcttgatggggtgtgccctgctttctgatgaaacagcagaaacctattcatggctacttaagtcttggatagcatgtatgtacggcaatcttccaaaggctattgtcactgactattgtaggggcatccaaagtgctgtagctgagattattccgggagtccgtcatagaatgtgtttgtttcagataatgaggaaggccg

SEQ ID NO: 32075 - DNA, 668 bp, Zea Mays
aagaatttaggtagaagacataaatatcacaagggtcagaggcgataacagacaagggtatgagagaaaagacaaaggcattgaagagctagtggtataagtacaacaaagaatggagttatgtcaaggcttacacacggtgaagaagaggatattgccaagggtgagataagtaaaacaccactctcaaattaggataagagattggagattttagataacagacataatgtaatcacaaggcaggatagagtgatgagaagggtaaaggaaataacaaacaaaaacacaacaaaggatagagttaaaaactcataggtgacaaagaagaggatacgaccaagggaaaagtaggtaaagtacgatgctcaaattgagatggaaagggagaagattttaaatgccagtataagataaacccaagtaagatatagaggtgtctaaggtgaaggtgataataacaaaagtcatgacaaatgatagagttaaggcaagactcgcgtagcggcgaagtggagaaaacaatcaagggtaagataggtgagggtgcaatagaatggttgaagtaagaactcattatcaagagaagttataaaggaacaacgagatcaccaaggatgggcgacataaaatgatcgctcatggaccgttaagaaacaggggtggtc

SEQ ID NO: 32076 - DNA, 614 bp, Zea Mays
agcctttggtgttattatttgtctgttctagattcccattgtgctatggtgttatcagttctgtgttcttacctcgtggtgggtgttcgtctaagactggaccgctctgtatcatgtgtttaatgcaaaattatttccaagtagagcgcactgttgactgcaggtcattataggttatatatactggaggtcattgtgggtagctggctagcagccaactaaattaatcccatcagtgaaaagaaattgcatttccatagcgcagaaagttggctgtactgactactgaagcagtagtgcaaatgggcacatgaaaggttatcatgttaaatatcaaaattatcgaggactttgtgtgccaccttgctgcatgtaggttaagggcatttattttgtgcttgttgctattatggttgggagtttgtatgtgaaaactgaaagcacaagttggagttggattacaaaataaatgatgaaaacattgaaccttaccaaaatccatgtcaggatattaagatcttattcggcatgactcttgcaattagctgtttataaatttgattcctgaatgagtgtcaacatttgtggtttaaactcagttcctccctcccaca

SEQ ID NO: 32077 - DNA, 354 bp, Zea Mays
aaaacacacgcactatgtcctcgaattggtaggaagattgcaggttccaatttacatggctatttacattcttgctaggaaaagaatgaacaaactgaatgagcgaatgtgtaaactgaacattgctgaagcatgtgtttgctaccgctgaagtattgagcaatttaactggtgttatgtgattatcacacttgaagctttgataatagggggttcatgtatgaaactcagtgctgctagctttaagactcaactttggagcataagaccatgtacaacacagacgtttagcaggctcttagagtcagtttcattgttttccttgtgattgtggaactgagcacaagcgcattg

SEQ ID NO: 32078 - DNA, 564 bp, Zea Mays
cgcaaagaccgattataggtgcagccggaccgacataataaacgtgctagaccaagtgcacaagtcccctacggacacggccggatcagcgaaggcacaccacctcatcatacaaattatagttacatacgtacagcgagggcatcacacattacattggttcaaccttcgggatgatacccatctccctatagttaaatagcattatcctcagctcctcaccctcaaaaagacttcgcaactccccctcacctacgctcaccccaaccggcgaggacaacaattcccgcttgccagccctgtccacacgaagacgaccaccctccacctcactcaccctacgcttcgccaccgcccttcgccgcctacgcccagcactcggaccgggaagaacttcaacatccatcacacgcggagaagcctccaccgcagccacatccaatgccgcaaaataatccaaatcctcatccgaagactcctccgtccacaccaccgaactcccagaaccatcagactcaaaaaacttagacacagaatcatccgaatcattttccgcaaccacgg

SEQ ID NO: 32079 - DNA, 416 bp, Zea Mays
cggtgctccaacatggctgatacctaattcaacccttaacaaccgtttcccctcgctcaattccaccattcggactcccaaactctctgctcacggcgtccgtgcaatacaagaacaacaccgagtgttcccggtgatctaataggttctagcttaatcgactgggtcggggagcatcagggacacacaaggatactaaaacgaaagagcagggggcatgagcggacctggagcacgctgaccatggcgaggtcacaaggcgcagtgtttcggactgaattgggggaaatcccaaattggggctctctggtgagtaattggaggcacgagcgggtagattggatgcttgaatacctaacggagccgacagtgtgctcaatttataggatttgggggcgatggcttgtgaattggag

SEQ ID NO: 32080 - DNA, 355 bp, Zea Mays
tggcgatgtttgccacctcttcctcttcttcggagctagaactctcttcatcggagttccattcttcaccaatgtgggcttggccatatttcttcttcttgaagtatcctttgttcttcccccccttttgaacttatcctttttgtactccttcttggcttcttgttcctttttgtttggacaatccgctatgaaatgaccggtttggccacattcataacatgccctcttctttacttttctttgatacttatcatttttcctcacaaacttcttgaaggttttgatgaacatagttgtgtcttcatcacttgagctatcttcatcacttgatgtttcgaccactttctttgcc

SEQ ID NO: 32081 - DNA, 414 bp, Zea Mays
ggaaagactcccaagtgtaatgcttaactgttctgcttgcaaaagacgttccattttaccgacccgcggcgattgttcagcctgaatattctatattctagatgtgataaaccacgtctctaatgtctccaaaacacataataacacactcaaatattgtgttgtatctgtctagacgagctcgcaggtactctacatcagccaacttcttatctcaatggaagtgcaagtctccaaatggtaaagctcgtcgtcagaatcgctgggcacacgagaacccgaatcctctggctcaaccaaattccttcaatcgtatatggattcatattggtcgtgatgctcattctctcctctggtcccacggcgtgaccttcctcaccaccctattgttgctgctcctccacctcgcggccc

SEQ ID NO: 32082 - DNA, 328 bp, Zea Mays
gtagtatactttgagttcggtgcacttgcatccgttcacaattctctttgtcatctacttgttttcatgttcttttccgaatataccattcaacacaaaggcaaacaccctttagtgcttgccgtcatattcttttccagttacatcggttgctctgtgagacaaccactcacttgcatttcttaagaagcattggtagttacctatagcagtcccatagtacctctcgcgtcaacaaacatgaaacaagttcttcttacccaatgatgaacaaagatatataacaacctagggagactgtctgcataagctcacttgaaatcagaac

SEQ ID NO: 32083 - DNA, 276 bp, Zea Mays
ggagtagtgccgacctggatcttccaggcgtgcaccggcacgctccatccgagcaggcggcgcaccgtgccgagtgccctcttggtctagaaacgctcgggatgaactagcaaagccatggcgactacggcgacgaaaagtagaatgcgagtgcagcagaggcgcagatgacccggaggtgaaaggacgcaacagttggagaaagtgcggaagcgtaactgctggtcacgggatgaatccccttctcaaagagggctctcctgctcgcaccccggg

SEQ ID NO: 32084 - DNA, 674 bp, Zea Mays
ctcgaggagaccgaggtcagccaaccacgaaatacatagtgatatgctcccacttcgactctggaatttccaacggctttcacatgctggcacacctcacaagctgccacatacttagaaacttcaaccttcattctcttccaccagaagttttgcttcaaatccctgtacattttggtttctccagggtggacggtgtcaggcattttatgagcttctctcaagatatccatcttcacctctgatttctatggcatacaaaggcggcccctgaaacgaaccaaatcattctcatcaatggcgacctcacggggtttaccatcgccgaccctctttcgagcttcccacaacaaacgatcctgctgctgagccacacacactctctccaaaagggaggattgaatgagcatccaagtctcctctctagcggtgccgacatagcacaatgcaacccccatacgatccagatcggcaatcaaaggcatggctacttttggaataccggtcctgctaagggcatcagccaccacatttgccttccccgagtgatattgaatggatagatcataatcctttatcaactcaagccaccgacactgcctcaaattcagctctttctgagtgaaaatatacttgagactcttatgatcggtgtaaatgtcgcaagattcgcc

SEQ ID NO: 32085 - DNA, 481 bp, Zea Mays
catggccacgacggctctagggctctagtgagtgcgttctgagcaaccaaatgcggtagcgtttaaattgaagctagggcgagtttcaccgattcaccagaggtcgggtacacatgcgaatttggacagaacgggggtgggagagtgggtcgacataagtacactctcgaatgtgttccgcggcggcgaggtgatgttctcgatgccctaccgtggtggtgttcaatcggttgagctgacgagctacattaacattcaaagatgctaaaacatggcacaaagggggatgaacagacatgggaatggctgatcatggcaggatgccttacggcggcgcgagtgaccaatttggggaaaaatccaattcctcgggctacaatggagggattgagaggaggagtggtgcgctgggtgcgtaacaagaatgtggagcagggagggccttcaatttatagtgactacacgagtgcttcgcgaattt

SEQ ID NO: 32086 - DNA, 490 bp, Zea Mays
gttgaacacgaggctctcatcggtgatgggggccccgagggtgcggagagtgtccgccatcgtcttcatctggtggcagtactcgtccacagagagatcgccttgagcaagctggcggaaaggtgtctcgagatatagaatccgagtctggcggttgccgagaaactgagcctcaagggcaccccagatccggtgagccgtatcgttgacacacgaacgatgccatgaagttcgaccgtgagggtgccatggatccaagaaagcaccacttcatccatcaggagccaatcctccgtcgggtaagggaccggggagaggacgtgctcggcgagggcgtagcggcggagggtctgctggacctagtcgtgccaccgagggtactgactggagtccggcacgagaacgtcggtgatggttgcccggatgcttgtaaaggccgccgcctgagcgtgaagagaggcgcgaagagttgaggctggggcgggcgcag

SEQ ID NO: 32087 - DNA, 435 bp, Zea Mays
gattgacggagatgatggtaactgcagcctgtatgccacactgccgacacgttggagtaccttgtaaggaccaaaatatatgtaggagagcttatggttggcgcgagtagccactgaattctggatataaggctgaagcttaagatacaccatgtcgccgacagcaaagacacgttccgataggcgtttgtccgcttgaggcttcatacgttgctgtgcacatagcagatgatgacggacatcatgggtcataagctccctctgctataaccatgattgcaagtctgacaagggaattgcatctactgtagatatacccaggtggtgtggatgatagccatacaacacctcaaacggagatttacccaaggaggaattgaatgaggagttgtaccaatactctgcaagaggcagccacttgctccattggctcgg

SEQ ID NO: 32088 - DNA, 425 bp, Zea Mays
cagcgagaaaaatggctggtgctcctttcttgaagatgaattcatccagggattgcacactgttgtcaacctctttcacaacttttttagtagcagcaagctccttaggatcttcctcatgctctgcattgatggccaaatcaaccaggggctttacctttttggttgctggtgcagcaacagtctggttttccttaaacactagaggaacgctgtcactgtcaaattcagcttcaccgaatattatgatattgtccaaccctggtggttcaccactgaaatcatcttcggtagaggtatcttcatcgacttcttccgctatcccagttccctgcaacctctgggctgcatcagcagtgcaattcccttcgttggactcatcaataccttcgtcgccctcgtcagtagagacgattcccccatcc

SEQ ID NO: 32089 - DNA, 707 bp, Zea Mays
gttgctgttctgctgtccaaattcagcaagtatttaaatgactgttaatttgctcttgtttctttggcctccttgactctagcagttcagttggttttctgatttgtgcagtatcagtacaaagacgatatcaagtatgaagaggttagtgcgactgcaattctcttgggtggttcatcagtttccatcaatgattccttttttgattccagcggtgtagtatgccagtttttcctaacatatttctccgcgatttttttgggcaggacttcttcgtgaattcacgcggaaacaagctcttcacttgcaggtggacatcgaggaaatcggagtgcaaagctttgatctttatctgccacggtagcgacatctccttacactcacttcctcccttggctatggtttgtttgagaactaacgagccgatctttcttctgtggctcaattttgctaggatatggagccgagtgcagcatatccatgggaggtaaaccttcaagtttcacttccatgttctttccatcagtgatgaactcatggcatcgattgcatactcacaaacttccataaaaaatacagacacggccgctcgattagtacaccatggatacgttgttcacggaatcgaccacgagggccacgacaaatcttcaggctcgaaaggctacctgtcgagcttcggcgacgtcgtcagagactgctcggac

SEQ ID NO: 32090 - DNA, 278 bp, Zea Mays
cctggacttcaaacctctgcaagacctccgccacgaaacgatgcgcaggtaggcgaaggccggcgatgaagaacgcctcaaacacgactaactcgcccgcaggctcaggaatctcttccgcccccaggacgcgcccaacaccgttcccaaagtaccccaactgctgcatatcctgcacgcgaaccgaggaaatcctcgaaacgccgaactccaccgtgtggcccggctgtaactccatcgccgccaaatcgctcaaggtatcttcggacgacgaatca

SEQ ID NO: 32091 - DNA, 291 bp, Zea Mays
tagaactctctcctttatttgggttggggatctcactcaattttcttttgtcagattcctctcttgtcttgcgagccatatcttaagtatgtatctcctctagagataatggaacaagaaccaccttcttgtcattatgaatgaaagtgtgtttgttagaccatccaaaatgcactggatccacatcaaattgctagggccgaccaagcagcaaatggcatgcttgcatggggacaatatcacaatcaacctctccatgataatcaccaatggaaaatgacaaacgaatca

SEQ ID NO: 32092 - DNA, 505 bp, Zea Mays
tccaccagttgtcttcttcctccatcagctcagcacggcggtggacgcagagttccacccagaccgcacaccgacacttgcgaaacattgacctacacacggatcctggccccggacccgaattaatcgaagtcccgaccatgctgaacctattgacctccatcacgccttggcctagcatgctaaaaagtcttgcacaacgcaccatggctccgcatagcgaccatgatggagagccccgacacagggcccccggcgccttcccaatttaatccaaagggcactaatcgtggcataggtgaactcgaaccgcttaaggagatggttaccgtgattatgggtgatggtgtggacacgagcccaaccgcggccatgcagtcccctctcttttcttctctgcgcttggtggcgaggcgtattatgggtcgaggtagccgtgatgcttgggttaaatagacgagcggagcggattagggaatccatgcatcgtccataaccataccgc

SEQ ID NO: 32093 - DNA, 334 bp, Zea Mays
gccggagtatgtattagcatgacatcaggtatgaggtcatctcgttggatctccagttcgctagcaaattggtcgttgaattctcttgcatgcatccgtttgctatcggcacgtacagggccatgcatgtcgggcggaaggacgctcgcgggcaccggctcgtggacatgtggggctctgctgtagcatctctatcctcgtaacaaccttgcgaccaaatcgctgcatgccgcacaagatgctagccaggtaccaccagccgatctccccctctggtgcataaatacttgaggcatacagccatcaccatctaccgctcgtacccttgccgaga

SEQ ID NO: 32094 - DNA, 931 bp, Zea Mays
ttggtcttggctatgtgttgatacaggaaggcagagtgattgcttatggctcaaggcagttcaggaagcatgaggggaattatccaactcatgatcttgaattggttgcggtggtttttgctctaaagtcgtggaggcattatctttatggcgaggcttgtgacatttacaccgatcataaaagtctcaagtatattttcactcagaaggagctgaatttgaggcagcatcggtgtctcgagttgattaaagattatgatttgtccattcattatcacccggggaaggcaaatgtggtggctgatgcccttagcaggtccggggttccaaaagtggccttgtcgttgatcgctgatctagaccgtttgggggtcgctttgtgctatgtcggcaacgctattgaggagactcgtatgcttattcaatcttccctcatggagagagtgtgtgcgactcagcagcaggatcatttattgcaggaagctcgaaagagggttggcccaggagttctccattgatgagaatgatttggttcgtttcaggggccacctttgtgtgcctcagaaatcagaggtgaagatggatatcttgagagaagctcataaaacgccttacaccgttcaccctagcgaaaccaaaatgtaccgagatctgaagcaaaacttctggtggaagcggatgaaggttgacgtttctaagtacgtggccgcctgtgaagtatgtcagcgcgtgaaggccgagcataagaggcctgtaggtttgctaaagccattggaaattctggagtggaagtgggagcatatcaccatggattttgtggtgggcttacctcgttctcctcagggcagggatgctatttgggtggtagtggatcgcttgactaagtctgcgcactttattcccatgaagaccaccaattcagcttcagaat

SEQ ID NO: 32095 - DNA, 389 bp, Zea Mays
ggcacatgagcttggcacagtcgttttgcctcctacttggtctcccttgactttgttgacgccaagtagtacacgtccttgttcatcatttgacacgatgacaacaccatctacctcctgttctacgtcaacgacgacgtgctcacggtgtccagtgccgccctcattcagcatacgatcgcttccctaaagtgagagtccaagatgaaggacttgggccctctccacaacttcctaggggccaccatggagtgccaccccgagggcgtcttccttcaccagcagtagtgcaccatcaacgttctggagcgggctagcatgtccatccgtatgccttgatccatgtttgttgacacctagggaatggtccctgacgatgatgcctcccc

SEQ ID NO: 32096 - DNA, 463 bp, Zea Mays
atcggagcaaagcaggaagaagcgcaacctccaacgctccgagaaaagaccaccttcagcaagataggagccaggggtccgtctacccggagaactccgctgtccacctctccgacggaaaaatggacacggatcacaaggaaaagggaagcaaatgaggcaaaggatcgtcaagctgctctttctgtgcctccgtcctcaaaggagggcagaaagagaatcgtcgcgacaactgttccattctaccccgacatcctcttcatcagaggaagagtggaatcaaatcctatctccgacgatgaaccgactgtaccaggagaagaacctcttcagcgggaatctcgccggcggaggaaccgacgccgaaatatttggcgacatcatgaagccggagaacgggatccggcgcagcccgtatcacaagacgaggtctcagaagtgggagaaactccagaagaatggg

SEQ ID NO: 32097 - DNA, 329 bp, Zea Mays
agcacatctagtacactagccatcctttttatcttggggttgttgttagacctttttgtgtcttcgacacctccactcctgccgaagggcttagaacttctagtgttttcgccccttcgattctcggttcttcaattttgtcagtcttcggcattgcagccggctcttcaatcctctgcgtaagagcaggtcctttggcttcaacaacagaagaagtctcaccgccaaattcaggcactgtggccggttcaatgtagcgcggtcggtgagtaaggaccttcaactttttcctcttcggtgcgggctcgcttgaagcagccgaagcagca

SEQ ID NO: 32098 - DNA, 467 bp, Zea Mays
gtaactcaatggttcatgccgggggcacgagaaagagagagtcgagcgagttttagcaggttcgggccgcttgaggagcgtaataccctactccctgggatgactttgtatgtgggaggtatttacaagtggtgtctattaagtggtgagctgctaatgccatgaaagtgatggggatcccccttggccttatatacacgatcgtagggcgcttcccgcgtacacactagtaacactcttccagcttatctcctagctaatagcgaatagactttgctatcccgaggaaaacctggcgcctccgctccgagctatctccgacgtttgaggatgtcgggcgctagaaaagcgaacaacttcgatgggatcatgcccaagccacgagtaatccgggcgtgggcccatcgccttcctaggtcggcccatttttgtcgttctctttgcccggcccatgacgtggcgtccct

SEQ ID NO: 32099 - DNA, 335 bp, Zea Mays
aaaaagcttggcaaactaaaaaaaaggcaggtcctggtaggtacgtacatctacattctatgcaggatgactgaagtgcctgcgagtttttacacaaccataattttagcgtaaagtcttcgtggagtgtttttcagactttaccgaatgttttagacactcgacaaagcaactgtttttggtagtgtaaggcctttgaagggattactggccatctgatcaattgaatccgtcattcttgtgtttgctagccatgtgctaccagttgatcggttgacagaggatataagctgtctccagcaacgtactctatatctatcatttatatccgtcct

SEQ ID NO: 32100 - DNA, 679 bp, Zea Mays
gtgtaaaagtcgcccaagggtgcagccggactagcacaacaagtgcgcaaaatcgaagtcttccccaaaagactatccatgcaaaagtcgcccaagggtgcagccggactagcacaactagtgcgcaaaatcgaagtcttctccaaaagactatccatgcaaaagtcgcctaagggtgcagccggactagcacaacaagtgcgcaaaatcgaagtctccctcaaaagactatccgtgcaaaaaccgactacaggtgcagccggaccaacataataaacgtgctagatcaagtgcacaagtcccccacgggcacggccggatcagcgaatgcacacagcctcatcatacaaatcatcataccaattaaatttacacacatacagcgagggcatcacaccttacattggttcaaccttcgggatgatacccatctccctgtagttaaacaacattatcctcagctcctcaccctcaaagagacttcacaattccccctcatctacactcgccccaactggcgaggacaacaattcccgcttgccagccctatccacacgaagacgcccacactccacctcactcactctacgcttcgccaccgcccttcgccgcctgcgcccagcactcggaccaggaaaaacttcagcatccatcacacgcggagaagcctccgccgcag

SEQ ID NO: 32101 - DNA, 340 bp, Zea Mays
ggaacccgcacaggaacaaacaacagcagacgtacagcggtgcaggcgcgcgcattgccctaacgggagagatctgcgcttcagggaatgaggtcaggaggcagtggggtggaccttgggggcctcgtcgatggcagaggagagctcggagaggaggtcgaagcagagcagcgcgtcgggggtcttctgcctggccgatgccactacggactccagctgggccaccagcgcgccgaaccgcgacagcggtatgggatccccgccaccgacgcccttcgccatgggagggtaggggcctagagggtgggagagggaatgcgtcactggtgctcgagtgttg

SEQ ID NO: 32102 - DNA, 428 bp, Zea Mays
tgtgctcccgcaatttgggtagccgtactagtccccacacaaatattggtattacgatgttatatgttttagtttacgaaacagtaatgcatgtgtcggtctatgggccatcgcgtagatttcatcccgcatattatgtgtatcgggcccacgatcccacccacgagtttgcagttatccagctcacctcacccgcaacgcacgcggcggcggaaccctagacatacccgccgtcgtcgccttcatcttctccaccgcagagagagcagaaatcggccggtcctcattccactccacacatcggtaagtccaccgccatctccttcattctctccgccgcattcgtgtcgtcgccttcatcttctccaccgctgtgagatcggaaatcggctggtcctcattcccctccacacaccggtcagtcctcc

SEQ ID NO: 32103 - DNA, 610 bp, Zea Mays
atttgtaagtaccacggggtctctttagcaatccagccaaggcgaaggggtatggaccaaagatatccgttggatcgcccacggacggcatagattagattgttatttaatcgaataactctttagcacgacccatccgatcaaatatctacggtggagattttacgagggctaatccagtatcgcccgtccaatctaaacggacggtgatgaactcccagatcaaagcgtcaagaaccgacccaatcttggtcgttcgttggccaatcaacgatccgaactctatctcctacctttggcagactgggcacgacagcgcccacacccaccgcggccatgacccgccgaagaaacgccacctaacgcgcccgcaaatgaaacccggctttgaccagagctacgcatagaggacggtaaggtgaacttagcaggggctcacataccgagagtcgagttgcgtagcacctaggctaccgaacacagcacgagtctgtggtggcaagcttcacttccgccacccgccacatcacccactgcccccgtccgtagaggatgaagacaccaaccatgcattctggcgtgccacgagactttctctaacgcctcgctg

SEQ ID NO: 32104 - DNA, 401 bp, Zea Mays
gccaggagccgattcccactcaggtgacgaccgaccggcggcggcattccacccacggcggcgcggcattaacgggccactagcttaatctccgatttctgcctacaacatgattctgatgcttgcataacaaagcagagagtatggggaatgtaatggagtgcatcataccgttctcggtggcgacagcagcactgcccacggtgacccacggcccgactgcctggatgaagaaccgatgagaaattccgccgcaccgcaggcctcagcgctggattaggcccgtgtacacgatctaccaaccctgtagaatgcctggaaccgcacaacggaggttgggaggcgacgatggctacaatcaatggcggcgttgcagattcgcacggctacagcgagcaatt

SEQ ID NO: 32105 - DNA, 539 bp, Zea Mays
caaatggagctgacacacacgaatgagaagtgttgggtcatgcacttcgatggctcgctgacgaaggaaagggtcggcgacggcctcatcttcacctcatccttgagggaacaatcacgatacaccgttctaattaccaagcgcaagctcgaacactattttgaatcgcaccgtgttgtggtgacaatgttccccttgggagaagtaatccacaacccggacaccaccgggaggataaccaaatgaggtctcgagctgatgggatatgtgatcttctatggcctactgatagctatcaagtcgcaaatcctcgccgacttcgtcatagaatggaccgaaacccaaatggagctgacacacacgaatgagaagtgttgggtcatgcacttcgatggctcgctgacgaaggaaagggtcggcgacggcctcatcttcacctcatccttgagggaacaatcgcgatatgccattcgaatctgcttccaagcctccaacaacgtgatggagtacatggccctcgtgaatggcctacgtatcac

SEQ ID NO: 32106 - DNA, 343 bp, Zea Mays
cgatgcacaggtggttgtgagaaggcgagatgagggaggggagagcggagcacggacaactgttgtggaggtggtgagatgtgggcgtcggtttttgaaacagaggcggtgtgggcacataccgagcaaggaggcagttatgaagacgaggaccaggaacgactatggtgggcgttgggcagctcacacgtggggcacgcgttgcagcagatactagcggggatgggtggagtgtgggaccctacgcttgcacgtgcacgcgtcagcggctaggcatgggcgtgggccgtcgaagggatgttgagtcgaggggccattgagggagggggtgcactgggttggg

SEQ ID NO: 32107 - DNA, 302 bp, Zea Mays
ggccgcccgagttgctcttctggtacctttgccctcaaagaaggacataaagaagtttgtcaccacaacaactcctttctaccctgacgtcctcttcatcgagggaagagtggaatcatctcccatctccgacgacgagccaaccgtgcctggggaagaacctcctaagtgggaagctcgtcgatgaaggaacccatgccggaatgttcggcgacatcatgaagctggagaacgagacccggcacagcctgtatcccaagatgagatcttggaggtgggagaaactcctaatgaacgagtct

SEQ ID NO: 32108 - DNA, 271 bp, Zea Mays
aaacaacactcaatttaagcagagccttaccagagcggttcggccacggtggggtgggttttacggtggcggagatcgatttgggggaaacttcgaattcgcggatctcagcgaacggtcggggctaattcgaggtggctggttagcttactaccctacggagctcggggcggggtcaatttatagacgtagcaagcggcggtggcgaattcgaccgagtagtgctggcggccggaggagagacgagctctgtgcgtggaataagtggctt

SEQ ID NO: 32109 - DNA, 320 bp, Zea Mays
agtcacagtggacatcaagttgctacatttatacattggaaggctgttagctactgattggaggcagacgaggaaggaagaaggagcacggtatggagagggtggaaggaaacagaggcaggaactggagttatgttattttattacttgttcgtcacaatccaagacatcgaggtatatatcactccctcctctcacagcgctgctaattataaagttaagcaccacattattggacccaattgccaccacacatgtgagttcatcatcattattgttcttgttaaaccggaaatccactcagatacctaataataaat

SEQ ID NO: 32110 - DNA, 890 bp, Zea Mays
tatgcctcacaattaacatataaacttgtgtaatctaactaattaacatatattctctgaagattacagcaggaacacccttttgcttggacgaactgccttgtgtggttccaaaatataaattaggggcacatcggatgagggggatgttgttctagggatgagggaagatcattgcagctaccacttctaacaattctgggccactgcattacaattctggacatgctgcctttttgaattggcacgaatgcatctagtcggtgcctctaggattattatcattggtaggaggagcagttcaaccagcgccctactacatgatttactacatgattctggatgcaaaggaaagaccgtcggagatatctgaacaaaagaatcaggaagggggaggaaaacgagctcacctggaagggacgtgatgggggatgcccgcccttgctctgtttgacctaaaaattatagaggggaggaggaagatggttgcgacctggaagggaagggattggggatggctgcccctgctccctttgacctaggaattatagagggtaggaggaagacgtggtggctggctaggaattacagaggggatgaggaagacgatgtggctgtccgtgctgcgcagcttaatctattgacagggaacgagaggggaggaggaagacgttgtggctgcccctgcttcgattcaggcggggttgttttagatcatgttaattctttttctgtctacacgcggggagaggtaggtattggcgccaatcagtgtggtcgtcgtgaaggcaacgttggattctatttttaacgaccacagaggtcagctcgctaacgatgacatgttttttggtcgtcggctggattggacagagcttgcactgtgccgc

SEQ ID NO: 32111 - DNA, 281 bp, Zea Mays
gaggaattgcattggaggtcaatcaagtaaagctaagccgccaggcatacgatcatatatagcattattgtatgtgtacgtacacgtgtataacaaacgcgcatgcatgcaactaattgcatatgcagtccagagaaaaacgaacaataatttgaaccacacatacacgtacgtgcagccgtactttgatcagatcagatcagatcatcctcacgcatgcaatttcttcaaactacacactacaataatatgcactctgttcccaaactgctgcctgctcg

SEQ ID NO: 32112 - DNA, 567 bp, Zea Mays
cgccacgcccgtcccatccgagcccatgagatcccctcctgatgctgaagcctccgttgatcctaccgctgttggtgacgatgagcacgactccaaggaggtcgttctgcgcaggtacttcctccaggagtgggagctggtctcagcgatcctccaccgtgtcgtcgccggcggcggcgttgccgaatccgccgatgtccataggatccgctctatcgtaagcactcttctatccctattttcaaatgctacctgccgctgaaccttagatctctgagagaagagggtgtagctctgagagcaacattgacttttgtttgtttattttaaaggatgtaatctgctttagcgtctgatttaaatgcacaacagccaaattcgaatacatcatgcacaatttcttgcaatcttttagtcgtctaggaggcattttaaactgtttggtcgaggtggttgaggttagtctgtgaatgcacattttattgctaatataggctagcaaaagctcatctgagatacaaatgacctacataaatcaatcctaggtcctagaatgacatgttattt

SEQ ID NO: 32113 - DNA, 341 bp, Zea Mays
ctagatttcagtccccaaaagatttgaaaagaaactatccaacagctcctgcatctggtcatggttagtcacagtcctgccctcatcctccaaatgagaaataaagtttctcttttttctaaagcaagcctacatatggaaaaatcttgtatttgcatccccttccttcaaatattggatccgagaccttaatcgggtgattgtcctttgtaaagaagttaggacgagacaatgttgtttcagttttcgcagcaaccaaacctcttctacagccagggtcctaatatcctgagcaatctccagcctgtgcaacacctcgcgagctaagcccaattgagtcc

SEQ ID NO: 32114 - DNA, 654 bp, Zea Mays
tcgttgcatacaatgctcatcaggaaagaacaaattgagtaggtagtgggctttgaacaagaaatgcattaagtggatggagtttaccatggtgctttgaactccgactggtcatggggacagaatcatagccgatttgggaatggatgcggcctatgtagagtcgacgttatctagtatttgccataagaattattcgttgaagaccttgtccggatgaaagaacgggggcagcaagcggctgctgccccgccatgaatgacaacacgagcccttggaagatgtgtagggaacaatttgaggttaggttaagacatagatctaggttttggagaggtcaacacggggcctagaaattgaagaggtagatgtagagagcttacatggagtctgaatccacattgacttgcccgctcgccgctggcgatgatgcggaggatgggcgacgaagaggaaggtgagcccgggggcgctaggcggcgagcggaaaggcacaaagcaaggctgagcagtgtagtggagtcgtggtcgggttcggagcaagcgttggtttctaggcgagcggagttcgtcctcgcgtgtagtggagatcgtgggagtctggagacaggggacgcgccgtgtctgggcgagcgatgtagtagagatgagttg

SEQ ID NO: 32115 - DNA, 543 bp, Zea Mays
cattcagctgaagaaatcagaaccagagagttccaagactgatcagcagccgaagatgacaagttctcggtggtgcaggggttgtcaagagtaacaaccgcttcagcagcaacgtctaggaaagggagaagaatggccagcgttctagacgttgttctgaggccttggatgatggttactcctactcctactaagatgtccaaagtcaaagctggagagttggaaaaagtatcaacgtgagtgctgttcctgatcacactaaagctggatcttcggaaattaggccaacagagcaagtaaaggagagtttgccagaaaaattatcaccgcctactcctaaagcagcatcaaccgaagatcttgaattcatcatcccccacgctttgagaaaacaactgacccagaggcaaattgcagaggctcaacactacgctagggatttgaattatcctcaaggatccctagtgtacgacggtgatgaagagaatgacttcctatactccttcctgacatcaaggaaattgacgtctgccgagaaatgat

SEQ ID NO: 32116 - DNA, 563 bp, Zea Mays
acgacgcaagtattctaagactcgatgaatagctggagtggatggcggggttaaatacgaaaaagagcaggggttctttaacaaaaggtcatggccgaaggggtatcggggcatgtgagccgctggattaaattcggaaggccacgattagatctacacctatccgaacagttaggtatctgcagccgttcgatcagaaacagacgcacctgattagttccaggcaagttacccatccgcgttcacccccgaccgtccgatcagaccccacgatcaggatccaaccacccgaaccggtgcgcgagatcaaatccgaagcgttcaagcgaagagcaacgaccgagagccaactgagcaaaaggggcaccctattccaatccacgccgttccttcattatccaacggccgaacccagttctaccccaacaccactccacacagcggcggcgtcgccgcgagcggcggcgaagttcaccggagaccctgattctggtgccccgagccccaaactatggtccacacaaccataccggaagcccggtatcatccgaagtcaacactct

SEQ ID NO: 32117 - DNA, 315 bp, Zea Mays
ccgaactaaaattcaatctcgtatccattgactcgtgtaacttcttccaataccgagaggtaaactgtgatccccggtctgatacaatcttctttggcacaccatgcaggcagacaatccgtgtcatgtacaactctgccaacttagctcctgaatatgtggtcttcactggaataaagtgggctactttagttagcctgtccacaatcacccatatagaatcatatccagcagacgtgcggggtaatccaacaatgaagtccatgccaatctcttcccatttccactcaggtatcttcagtgggtgcagtagtc

SEQ ID NO: 32118 - DNA, 439 bp, Zea Mays
ggaggtcatcaactcataacgagttgatttgtaagttttgtagcttccctttataatgaaaagtgatttcgctccacttctgtgtgcgttatgttgctttctcgctgttcgccaatcttatcaatgcacgaggagtatttgtgatcatcgaatcacatttctgattgccttatttgtaatgatggcgctttggtggttgcggccgagtcatccaaaatctcgtcgttgctttaagaatgacggccgagttatggcgggccgtgtcggtgttttagagataacggccgaacggttgctgatgataccggcgttttagaagtaacggccgaatcctttggagctaccttgccgatttagtgatagcggccgagtgatggatgtgacatcagtgttttagatgtaattagccgagtgactaatggcaatgtcggcgttttag

SEQ ID NO: 32119 - DNA, 524 bp, Zea Mays
ggagtaggcgcgaccaagtactgagggaaacctggcataggcacgaactgagaagccccgggcatatagaactgctgctgagggggtggtacagaaaattactgctaagcgattgacatcacgttgacagtgccctgcgaagaggaagaagtaactagctcccatatgagcttcccattgggattcctcctacacaccacatccttgtgatcctggctgcagatagagcacctgccactccactgacactcggcacggcgatgcgcttcaccacaacggaaacacaccaaccccagcccaggcttaggaacagcccgatacctctgagtactccctcctgaagtaccagaatcagaggattttccacgataggagtggtgacgctgctgttgcgactttcccctcttgtgggctggacccctagtgttggccctgctcgcgtcctggccacgagactgatcaacacccgaagacttctaagattccatggtatactgatgttgcatctccacgcccaatgcctg

SEQ ID NO: 32120 - DNA, 278 bp, Zea Mays
agtgagtgtgtgagcctaagttggggccgagtgagctcgccttgtaacaccgtgtgccctcccttttatagctcaaggggggcacgtacaaggatactgagccccgacatgtgggcccaggggcaattggaaggaagcactaatgcctgtaacgccagggtgaactccgagcgccataatgtccgtagcgtatacagtattgatatgtcatcgcagctttcttggtacgcgtgcgtcatgacgagtgcagcgcatgctgcagcatgggtgtatcgcct

SEQ ID NO: 32121 - DNA, 726 bp, Zea Mays
catgaagtaggcccttcctaccgccttagtggtgtcagagttgggctcctcagttgagtcgtggttcgagttatcctcgagaaggttggggacaaaagttggctagtggctgatgatagccatgaacgttgagggtgaggcttcctccaccttttgcttgatggcgatggtgagccggttatggtgctacttgagggtggcggcacgcctcttgaggtgctgcttctcttccttgctcctggcgatggtggagcgcacaggtcctcatgcgctcgccatggtgggcacatcgaaattgatgagacgaagcttaccaatggaggtggcaagaaagtcaagggagccgaagctaatgcgactccctggcacgaaggtctcgccaacagagagtgtggatagctgagccatcagagtgaacaaagttgattggcatgctaatggactcctacctagcgcgccaactgtcgtggttgcggaaaccatggacatagtagaatttgtgttcgatgggggaggctagcatgtactcactccgaatgatgaatcgagggattctaacatggggtttatattggtttaggcttgcgccctagtccaatgtagtgctggacgtaacattcactgaggaatgtgttacaacaggtgcttgtgtgggaatgagggagtggagaactctggctaaatgctcctcagccttttggctgtttgaccctccccttttatagt

SEQ ID NO: 32122 - DNA, 336 bp, Zea Mays
cgcacagccctgagtcgtagcaggggcttatcccctggtttatctctgtgtttgttggagtctgtttcagttatcccttaagtttagcagataagttgttaggccacctgagttataaaggaggccttagtttgtattagggtttttatctaagaagttgctgccggctggcacagctcttgggtcatcctggcgagtttcccatctcgccctggtgcccacagtcgcgtgtccatcgccggagtccctacaacatgcgttcttcttcccaatctaacctgctagtgcattcatcctggtgcactccccctagacctagcccaatccacataaccc

SEQ ID NO: 32123 - DNA, 286 bp, Zea Mays
gaaccctaattccgcgaattaagacgcgtgccgcaacgataacctcgaagctgacctggaggagctcagccatcgccgcacgaggcgacccaccaagacattgaacccgcctgtcgccggctggctggatggagctctcagccaccagggacaaccgcaacaagctaaggtagtccagctgcctccactacctatcgatgaggcggaaccgtcggctttggaggggctcagatccgatcaaatcgaaagcttcgagaagtttccattgggcatctcctggacggtg

SEQ ID NO: 32124 - DNA, 274 bp, Zea Mays
cggcgcgctgctccctctggagatccacgagtgtcttcctcatcgcctccactgcctaagggcctagggctgtctgtgccgcccgcgccgcctccaactggcggacccgctcccctagcgtccactccttctcctctagcatccgctccttctcctccgcctcgagctcatgatcggccagcagcttattccacctctcaaacatcccgccaggcgagatccatcgcccgcttatccagggagacatccttctccttgaggttctcttcggata

SEQ ID NO: 32125 - DNA, 458 bp, Zea Mays
cgatgttcaaggattttaacaaacacgtttgagtaaagacgcgtatgatattgagcatgcacttcaaccgttcatgcgaccggttcaactacaacgaacaataccaaactactaaactcaaacaatgttcgagacaaaacaagacagtttaagtgttgcaagcacctaaactacatagtatccttgaaaagatacacaagataatcaagaacggtgtgagattgattaaaaacatgaggaaataaggcaataccttgatctgatgattcaaccacagaaatcccaacgaaagtgagggagtcgatgaaggaggccgagagcaacaaatctctcacaaactcccaaggatttgatggcacaaatgggatttggagagtggtgtgagtgtgagagagagaggaaaagtagaggcgacggcggctgtaagaaatgaatgggtaaagagtgaaagaaggaag

SEQ ID NO: 32126 - DNA, 439 bp, Zea Mays
gaagcacgtaagatgtcgaagggaagccagaggtcaggctacaaagtccaatggtcagtgcatgcagatgtggacaaaaggagtaaaaatgacactcgaactcctgttcgccggtacaattcaccagtagtattgaagaggcacgaccagagatttagacggggaaaataatgacacatggtgagacttttacttatagagaactattccattttaccccagcacaatgatccctttcgggagcaaacatatgtaaccgaacccctccttgatctataaaaggaggaggaccggcctgacgaaagggaggccgaatagagaaccaacacacgctacatagatcctctagccaaacaacccttagagacttgggatccttccctttctcgcccgcttgtaacccctactacgagcaatcaggtgtcggtagcgtgagcca

SEQ ID NO: 32127 - DNA, 280 bp, Zea Mays
ccagactctagatggtgtgcgagaatacacaaacacttatcctggttcgggcagcacaaggtcctacttccatcaaagggggatgaggcttatattactcgcactaatgtgcctgtagtaggggttacaagcactgcgggagaggggaagtccccaagtccctagagatgattgaggcatgtgccaatatctaagaccgaggtggccgagtgaagagctgagtgttcggtggcctgcagcctcggggagccatactttaggtcggtgggtaagatggcct

SEQ ID NO: 32128 - DNA, 486 bp, Zea Mays
cacgaacctacttgattacttgaagcgtctactcgaaatcgtgagcacaatcatacactatatgcgaagcataatttaacgaacgcataatacgcatcgtctcaactcgacttataaacatagaggaagcgatgactactttggcatgtcaccacctctctatttaaaccaagacaatttctacctacaacgaccaaacattcatgtcgagcacaccttattttaccatgtctcgcatacaaccatattgtggcgtgcactcgagacacttcgatcatcgtagcgtaaccactaatatatgaactccgacactcatgtcttaacaatacatcctccacgcaaactagcattttctaaactactcgtcacatcaacaaatatatcccctatataaccacgaatctcatcacattgcataggatttgcacttcaatcttggcttaactgcacgcctcatactcgtctattccaaaactcttcgcctaa

SEQ ID NO: 32129 - DNA, 352 bp, Zea Mays
aagatgctttaggcaattggggcctagtggtcagttagaagaaataggtagcgtccatcctataagaacccgtccccggatgaaccccgcggcaccaagcccgggtcgggcgtggtagaactggataagggggcatgggcctaccgaagggaaaccactcgagtggatcccactcctggcccgagaccgaccgtcataaatgatcggccacattaattatgcctggtgtcgagccaaagctgatgtgttggtatgtatcccacacatgacctacggacccttcgggtcacagagcactcatgacctacgagccctcggactgcgacacatttatgacctacgcgtccccgag

SEQ ID NO: 32130 - DNA, 338 bp, Zea Mays
aataagcttctcatgaacacaattatgaaaaatgacaagaatagtattggatataagtctcttgtgcaaaagaaagcaatgaatcaaaacaagcctaaccaagatcctaagcctatcaagtgttatgagtgttgaaaaggacactttgctcacaactgcaacgccatagcaccaactcccttgtccaagcactcaagacctttcacattcaatgctcactacatacttagaaaagttacaagtgggaaggtcaaagtcacatttctaggtccacgtaacaagagtaggcctaaatatatttgggttgcaaagtccttggttgataaagtcatgacccc

SEQ ID NO: 32131 - DNA, 517 bp, Zea Mays
gtccgatccacaatcgatgatccggattagatcaaagctccgtgaaacggtacccagggatagccatcagattagatctcgacggcctcggtttaatgttacctacatcgatcacaagcgccagatctagatcggacgaaccagattggttcagccgaaccggtacgggtggactaatcctagccacccacaccaagatctacggccaagatccaattgcccgaatggatagtacccgctttaatcgcgtccgcccattagatcgaacggccccgggcattcttccacatcacgaccccctccctccagagcggtggcgcgttcacgtcacccgacggtggcctcgccggagagcacggtgccatgattctgtgccctaagctacgattcaaccggtgatacacgatggggcgaagataacgaactcgtgtgcaggttacttaccggtgctgagagcgtggagggggctagccatggcacggtgcggcccggagctgcccgccgagctccgatgagc

SEQ ID NO: 32132 - DNA, 373 bp, Zea Mays
ggcaatgactggcgttcctgagcggcggacaccaaattagacctactccgagcattttccctaagttaattgcacggttggtgacctactccgccctgcccacgagaacagcgaaggctaaggacctttgctcgtgttcctggcgattggtgagctctcagtccaaattggtggttcggcaagcatcacagagttatgagagtgctcaaacgagggagagggcggcatgaactgacctgaacagtgctggccacgacgagctcggttcttgcggtgcggcagaccgatttgggggcaaacagcgattctccggctaggggggctaatcggagacgggagtggtggctatggcttcgcaatttggagacgaagg

SEQ ID NO: 32133 - DNA, 318 bp, Zea Mays
ggggagggtcgtctgcacttggtattgctgtccgtggccgcaatcgaaaaggagtggccgtgggactgcggcaatttctcgtcgtcgactggtttgccgtcgcgggctacttcacaccgcgactgggtacttctacggcgtcgagtccggtatgtcacccatccatgagttcaccgtagcctccgcattgtgtcgatgccgttaaatttgggactaggttccttggtcacgggcgggcagctcaccggcgtaatcgccgctgcggtggagttctcagcggctgtgtacccagcgttgggggaagaagagggatcgtgg

SEQ ID NO: 32134 - DNA, 308 bp, Zea Mays
accttgcgccgtcgtgccccgtcgcgtgggggaagaaaggagttggccgatggatggaaagctagcggcctggatttggtgagagtacctgttcgtccggagtgtatccgagtcgtcgatctcagtctgatcggtcgggattagatcactgggactgcttcggggaaatcgcatcttgtacgtggatctcggatcagacggatgtgaatggggcttagtgtttaaaaatctggacagtcgatctttgatcctacggttagcgtgtcataccgcttcataagtgatgacgatctaatccggaccctcgg

SEQ ID NO: 32135 - DNA, 338 bp, Zea Mays
acgacattatgcttggttaactagtccatccccaagatcacatcaattccatgggatgacagtacgactaagtctgccaagaacactacccacttaaaagaatcctgacttggaagcatttgaggcagcatagaaggtctgaccctgggggtcgggtcaccaagggaatttctagatatgcagtgggaatgctatgcttttccacaaaaccagtggctatgaaagaatgagatgctcccgaatcaaaaagtacagcagcgggggtaaattcaactaggaactcaccgagcactactcccggggcttgctgagcctcttgagcgtcgacatggttcact

SEQ ID NO: 32136 - DNA, 312 bp, Zea Mays
aaaaaagttaaggtcttcagctgacttcttgtccaagacaaaattaaccacaagacgaacttggttaagaagaacgtgctctaagacccaacctgttatatctgtcacttggctactgaagatagcgaccacttgctcttcacctgcccctttgcgcgcgagttctggacaggcctaggggtgcagctggcgcacaacctctcttcatccaggccctgggaaaatgagctaccagactctattgcatgtgtgtacaaggttcctttcatccatctgtgttgctggctcatctggaaacacaagcacgaagtt

SEQ ID NO: 32137 - DNA, 526 bp, Zea Mays
taaatgtgtatatcgattgcgcccttcacacactaatttgcattttaacttgggcatcacatgaacactactaatttttacacgcgactgtaaccatacacatttagactacaacaagcaaatcatcgtgattacgagcttaactaacccatcaaacgtttcggctaactacagcaacgacatagcccgctaattaacatacacgtcggcttgcctactattatcactatctaaggcacaacatacaccacaacatttttataaacatacatattcacatgtatattcgcacattgaccaaagcatacgaatcgtaaaccactagtctacagttcgaaaccatcgtgcgcttatttcccaaatcatgaacacataacgtgtatcgacccgactctagatatagaggaagcgatgactacttacggcatgtcatcacctcactatataagccaaaacaatttctactatcgactaagagttctaagtattaaacacattattattttccacgcacaaataaacctca

SEQ ID NO: 32138 - DNA, 358 bp, Zea Mays
ctaattcctcagacccgaccatggcaattttcgtcgaaggtggccaacaaggtacaacaagatgggatggatgcacgaaggaatagcggcgctcggtgtttatacccgtgatgactccgtaacggctcgagaagaggtgaagatccggtcggtggagcgcgcgatgcgcacggcgtctgttacgggcagcaagcgaaggagaaggagcagctggtggcgtgggaatctggcaagggggtccgccctgccagagacagcacacgcgcgaggagtgctggtgggtcgtgcgggggaagaaagcagatatgggccgaaatgggtgtgtgcggcccacgatcagggtttgttcttttctttt

SEQ ID NO: 32139 - DNA, 405 bp, Zea Mays
gaacatgatcggacctgtggagcgctgaccgcgacgagctcacacacacagtgttcttgaccgatttgggggaaatcccaaattggtgagctctggtggatgatttgaggcacgagttggtgtattggctgtgtgactacctagcggagccaatggaacgctcaatttatagggcctgagggtgatggcccatgaatttgagatggcgcggtggcggccggagagaggggagagcactgtcgccaggaattggtggctttcaccgtggcgagctccccggcgatcaacggacatgcgtaatacgagttactgcgatgtggtaaggcacctaagcacgtggcgcgcggtggataggcggccaactcctgcgatcttatctgaaccggccgtgagtcaggcggacac

SEQ ID NO: 32140 - DNA, 627 bp, Zea Mays
tactggggttgtattggtcgtcttgctagagggctgcattgttggggtaccattgataggggtaacactaacatgattgttgccaagcaagttttcaccctcatcagagatttcatcctccacataagcttcatcttcatgaaactgagtaatattatgtgtttgatcaatatgttgtccagaccttgtgtcctaaaataaatatgagggtaataagtaataaatattccatagatttcaaaatgactctaagatgttcagctactttaccggatggtgtcgtgtattagaaccatcatgcgagatgatttccacatctctcatttcatgagccatcctttgctcctgcattttctcctccatttctactatgcgttgttctagagaagctttctcacgttcagcctttttgcgggctaggacttccatttggagtcttgtgggtgtgtaacttctcaagcccggggtaccaatatcttggggagttggtcctagacccaaaactcggacacgtcctcttggctctttctctccataaacagcagcaaaagcatcaccttcttgaattgttctttccttcaactctggatgggcctcaacatattctttaagtttgttctacccaaa

SEQ ID NO: 32141 - DNA, 689 bp, Zea Mays
atcatgagtgacactagataactataaatgattttgtctaaaatgatatcctctcaattttatctctctaatggtcattttgagtgaactttgtagaaaccattatcatgagtttaaatttaaaaatcccctcccttctctgttgttgacatcctaggcttgcctgacattcggcatgcgcccactccctttctccctatgtcgctcgctccaaggacccgcccattcgcccattagccgcatggagcaccattgctatcacactggctcgctcatcattgagtgtgtgcctcttccagctcccctccccttccttcaattggccacttgcgacatcatccatcaaatgcttgctaccattgtggataccatgctagtggccacaacagaatgtcgactgtgcccctgcttcctctcatccatttaagatactatcagccctcgcaaaccctagccctaactctatcctccactacctcattattgtcattggagttctctctcgttggcagcaatttgccctccccaccacccctctctttgatttgtcgcttgccgagcttcctcttattatcctcgtccttcctttgtagttatgtcctcttctctccactgaccatgccactgccatcattcttgttcgcctccgagctcctcttcatcatcgactatcttctagcctttcttct

SEQ ID NO: 32142 - DNA, 285 bp, Zea Mays
ttcggcctcggtctggctctttgcagcttcgtcttcggatggttttgcctcaatttgcgttttcggagcttcggcaggtttcttcggagtggtacttgaagactttatcgtctctagcacatctaatacattgaccatcctttttctctttggagtcgcagtgaggtctttttgtgccttcggcactatcatttctgccgaagggcttgtaacttctactatctttgttttcgtggcctctatttctttaacattatcagccttcggcatcatagccggatcttc

SEQ ID NO: 32143 - DNA, 597 bp, Zea Mays
ccgccggtgacttcgcgcccgaattcgcgccggtcgccgcgattcatgctcaacgcaaagtagaaaatcgaggggagtaaaagatcttggcgcctagataagcttggacccggtcactggacggttcaccgtacccacttgctctacagccagccgtgttaatcctcgtcggcgttggccgcttgccgcccgtgcgccacgtgcctaggagctttaacacgtcgcagtgaaccatagtagtgagtccgtccatcgtcggaggctttgccacggtgaaagccacgattacccgcgccagtgcatttcccttctctccggccgccagcgcgccttctcaaaattagacgtcaccgccgtaggactctataaattgatgccctagtgagttccgctatgtaattacgcatccaatgcaccagcccttgcctctgatcatccaccagagcctcctaatttcgtatttcccccaaatctgttttctgcaccaccgtgaacacttcgccgtggccagccctctgcaagtcagttcaagcttctttgattagtgttctagcctccctcaagcctcctgttgctcgtagacccattcgattaagc

SEQ ID NO: 32144 - DNA, 433 bp, Zea Mays
ggcggcgccacccgaagcgcggtggcccatggccggagttccttcagtccctcgctgcagcttcccaaaccccgattggatagagctacgtataaaggagacgatggcgaacgtgggcaacagagactcaccggtggttacgaagcacagatcgcaggccacggcgtgatgcggatccacagcgtatcccgatgtccggcgaggaattcctactgcgccaaagcccgaatcgtccctaccgaagcaggtacacgaagcggaaacaagcacgaagctattggaggattgctcactgagaatcgcccgcgaagatgccctgtccacggcgctaggcggtcccacgatggtgatagacctccggtgaggaatccggccagcagcagaagcccccgaacttcgaaaccacccccaacacgatccgcggaaccaggcg

SEQ ID NO: 32145 - DNA, 276 bp, Zea Mays
aaccgaggggaacgcgtgtacacatcacaaccgcacaactcaagatctacgactcaaccacagtcttctacctccggccagcagcgtggcgacgccagcatccatccccgacggatccacgttggcacacggccacccaccataccagcgctctaaccataccgataaatagtcctacgcgaagacgtgaacgctaaatcactggaggaggtactcaccgacgctataggcgatgcctgtgcagttcacgacccacgacggacatagcgctccgac

SEQ ID NO: 32146 - DNA, 555 bp, Zea Mays
atatatcctagatttacgtgtaagtattgcaagaaagagtcgaagaagcggtgctacacattttaaacaacaccatgcatcacgtgggggaaaagtgcagggttgtagcaacgttctgccggacatttctgattacttttggtggtacattgacaagggccaagataaaaggaaagcaagaatagtggtggaggtatggaggttggcattggtgggttcatctcgtggttttgatggtgacgacaacgacgagttgtaggccgcaatgcgtgtttcgttgtcgtcctctcaaaagcactacacggtattacccgtagtgcgttgtcggtaccaaacatcgacataacctccttttcccatgcgtgcttaccaactaatcatgtgggagtatgttgggagacgcctaggaacgagtccagaccccgccccctatatatatgaagtggtacggctgtggtggatacataccccctcggatcctcatggacactaaaacatatcatgggctgcctgataggtttcctgctgagtcgccatgtgggatgaactagtagg

SEQ ID NO: 32147 - DNA, 301 bp, Zea Mays
gatgaactaacctggaaagggctggccgcggtgatgggtggtttacggtggcggagagtcgatttgggggaaatatgaaattggggagctgtggggaatgatcggagctacgagcgggttctctggacgtgcgattacctaacggaacgggctgaggcttcaatttataggatacttaaacggtggtggccaatttggtcgagcaacgctggcagtcggagatggagaagaacctggcgcggtgaattcgtgtccatcgctgtggcaggctcaccggcgttgataagacagtggtagggag

SEQ ID NO: 32148 - DNA, 320 bp, Zea Mays
ggggggtccaaaaagaatgttggtgttggtactaaagctcagtccaaaccctttcaaatcctcgaagaaaatattttactagatcatgaatgctcttgaaaaaaacaacttttactccccactaaagtttcatcttggtttagctcagttttatcaaaacttgttcttcagtttcaaaaaccggttcaaccaggcctaaaaccggttcaaccgggtttctgcactgttcccctctgtcacagtctgacctgccagtctgcccgtcagaaaaagtcgtgcgcagatttttggaaaaccggttcaaccgaattctgaatccg

SEQ ID NO: 32149 - DNA, 373 bp, Zea Mays
gcgcggtggaagaagatgaagttgctatttttctttttgacccttgtttttgggtcggaaagtagtaatcaggataaaaaatccgatcacatcaaaaactctcttcagcctcctcttgtcgcgagcgccgaaggcagtagtcatggcttcgtcctttgccttcgtataagctcccaacatctcgtcactggtagcctcaacagcctcaagctagtaatcattcggctcgtcaaattgacttctatagcgataggtatatcttagataaaccagaccaccttcgctgaagccaacagcagtctcctttggcatttcctagtcattaacaagcggccacaccttataagcaatatgctcttgaaccaaatccctg

SEQ ID NO: 32150 - DNA, 387 bp, Zea Mays
gaagaatagaaatagaaatgtagataggaataggaaaatacaaaaagaaatggaaaaggcgaaaggaaactaccagcagtcagcggtcgctcgcattcgtggacacggcctagccgggcctgctcccacctcctccctttttcgtcacacgcacatcacagcctacaacaacttgcagctccaccacggtgtgctctctgtcgatcatatatgacctctatatcgacggctctaccaccttagcatccataagcgctggaagaaacgttgataggtgagccatcaaggtgttctctgataatcggatcataagttgaaaatgaaggatggaaaaaagataacccatcaaaaaaaatgcaaccttggtgtgcactaagtgcccgctcg

SEQ ID NO: 32151 - DNA, 309 bp, Zea Mays
gaggaattggaaaatggcgcagagacttacccggtccacgttccccggtgagcggaagaagtccggcgagggtaattcggggtctccggcgaagttctgctgggtctgagggcttggggagcttcatgggtctctagcgaagctaaccgagctgctatcgtggactgggaatggctggggtgggctggccacggtggccgaagctcaggtggcttggtgggaggtggcgcttgctctctacggcgatctcaggtgatctccggcttgtatgagagtgagggcgtgtgaggggatacggctaaggtcgtg

SEQ ID NO: 32152 - DNA, 406 bp, Zea Mays
ctgttgcgcgcgtatgttaggttggggaggggttgtcagccgttgatctctggtcgacggttgtgattagatgacagcgtaccgcttcgtgaagttgatcaatgccgtcagatggggatcagacgggtgttcgagcgcctcggttagtttgatccagtccgttgatcgaaaatctgatggctatttccgcgcgctggtttaggatatcggcgatctaatctgagccctaggattttgatcggacgcccagatttgagaataccccttcggcccggacgtttcgcaaatgaaccccccgattatttcagaatgaacccgcagtcctgcgatgtggcgctctgagtcattgtatatttcatgtataagcccctgcgcttcacagtaattgacgcccagtccagaacag

SEQ ID NO: 32153 - DNA, 287 bp, Zea Mays
cgtatatggaggaaataacttttctccttttatattatctcttacaaattacaaaatggttattacacaaatcatgctggtccatctctattttgacctccaatgggttctgatatgggtaatagtgatggcctctttgaaagagatgaccctcacacttatggaaggtttgatggagcaaaagctctccagcagcaaccaaagcttgctgctctcctaacttcacaaaatcccatggtaataatcttggtacagtagtgttgaatcttaatgaagcgaatagttca

SEQ ID NO: 32154 - DNA, 374 bp, Zea Mays
cttagatgaactctaccaccttggctgaggtcaaagtggctattggcttgtactctatccattttgtaaacttgtcaataactaccaacacatgtgtatatcctccttgagatttcttgaatggcccaatcatatctagccccagcatgcgaaggaccaggtgactggaatagtctgcaagtgatgtgctagtagatgctatttttggccaaggactgatagtcttcacatttgtgcatctttcttggtagttgtccagtacaaaccgactctgaatgccttcctgacaagtgttgttgatgctgcgtgtaccccacattgcccggcgtggatttcctccagtaggcatttttagcgcctatgtcaatgcattt

SEQ ID NO: 32155 - DNA, 800 bp, Zea Mays
gaccgattttgggtccctctgcaatggagaagaccaaggcgacggtggctcggtcaatgcgtaggagacgctgaagttgacggcgggttagactctgcgttggagacagtgaaggcgacgacgggtagaatctctagggttcggccgccgcggtggagcgaatgcggctcggtctctgcggtggagaagaacaaaggggcggtggctcggtctccgtgattccgggtccctctccggtgaagaagaccaagacgacggcggctcggtctatgcagtggagaagctgaaggcgacgacggtcggtctctgcgttggagacgctgaaggcgatgacgggtagaatctctagggttcggccgccgcggtggagaagaacaagcagacggcggcgataatgctagggttcggctgccgcgtgcgttacgggtgaggtgagctgaataactgcgtgctcgtgggtggattcatgggcccgatacacgtactctgctgggcgaaatctacgcgaaggcccatggaccgacacgtggattactgtttcgtaaacggaaacataagacatcgtaataccaatatttgtgtggggactagtacgactgcccagattgcgggaacacaatcttctcgtgggcccggatgcccgaaacatgcgcatacagaagtgtataaactgatacacaaattagcataacacgtaataatatttgacgtaagcaggtaggtacagtaagccaaaaagtgtacggtgcggtctgcgcacctggtcggtgggtggtcggggcttccaatagttatacaga

SEQ ID NO: 32156 - DNA, 405 bp, Zea Mays
cgggtgcagggtgtatacatatgcaggtagaggaggtagttgtccatacccatatatgacgatggtggtattggatcgggtggtagtgcccatgcactgtacaagtgttggtcacgtcgaggtggataactgtaactcgagccgactgagctatggctaccatcatcaacaagtccgcaaaccaaatgacataattgtgaatgaggtgctccccctagaactatatgctccagcgtcatatgttgggaggcatggctacccctagaactatatgctccagcgtcatatgttctagcatggctacccctagccccaacaccatatgctccagcatcacctccaccatcctcgtggctaacatcacagtcgtctccatcatcctcatggctatcatcattgttgtcg

SEQ ID NO: 32157 - DNA, 371 bp, Zea Mays
ccgtcgacgacgagcagagcaactggcgccgaggaaaggagcgacaatggtgaggtgcactggtggggcatagatgagaggggaggagtgcgtgggaggaataaggagagtgaatgtgtgactggagagcgggcctgggcttgaaaggaatttgaaactatggttatgggcacactggacagccaataggacaccgtcccgtgcacaccgaacaacctacatagaggtggtgcaaaactaaaaccaaatccaagcaccagacagtgtacaatacaacgtccagtgcacataggactgtccggtgatccaccagtgtggccgaacagagaaaattttgaaaatcttttcagaattgcacaccaaaccaaatc

SEQ ID NO: 32158 - DNA, 342 bp, Zea Mays
ttctcatgccattgctttggcgtctgcttgaggccatataaggatttccttagtctacacactatgttctcctgtccatgtgtcacaaatccctccgtctgcttcatatagatctccttgtcaagctcaccattaaggaaagttgtcttcacatccattgatggatgagtagatcatgactcgcagcaagtgctattagcacacgaattgtgatcaatctggcaactggtgaatatgtatcaaaataatcctcacctttcttttgggtaaatcccttggccataagcctagccatgtatttatcgacagtaccatgtggtttcagttttttcataaatatct

SEQ ID NO: 32159 - DNA, 307 bp, Zea Mays
tgaagctttggcgacaagttcaatgcacatccgaggaagtcgttctgcttattttgtggtgaagataggggccacacaacaagtagttgctaccacaccattaacaagcagaaagagatttctttgtcagcatctcaaccttctcagccaaaggaggtgttcagtacatctttgtactgttcacagtatgttccatagtacgttcatcctcaatcacaagagccaagtttgcttcaaccttcggcctcaaatgcttcgagtaaccctgtgatgagcgcatggttgccatgtgctaccttcttcctgt

SEQ ID NO: 32160 - DNA, 330 bp, Zea Mays
ggcatatctcctagatgtcctaagagctcttggcttcacccaaaagtggagagattggatagccaccatccttggttcatcttcttccaaaatcattattaatggtaaacaaactgaagcacatgcgaggggtacgtcagggagacccactattgccttttctcttcattctcgcaatggatccccttcagcgtatgattgaaatggcagcccatgaggggctcttgggccgggtattacctaatggggcgaagtttcgctgctccctatatgcagatgatgcgggggtgtttgttaaagcagataaaatagacctcaaagttctgaaaa

SEQ ID NO: 32161 - DNA, 276 bp, Zea Mays
gctgttttagctcacgttttacgctgaatccgcccgagccagaacccgcgcacgatcggctgcacgcgattttcactccataattttgggccccgtttgctgttacaaaacagatataggatttacgctaaatttcgtactcatttacactgttttagctcacgttttacgctggaatccgcaaccagaaccaaatcaggcgcgcgtggatatacatgactggggcttcccatagtaatggaagccggcttccattacctcttctctatatatcta

SEQ ID NO: 32162 - DNA, 339 bp, Zea Mays
gcacgatatgattggactaagggtgagtcacttcaatcactctttgaccggctaatggtgttggtcaacaaaataagagtgcttggaagtgaagattggagtgactccaaggtcactagactatttatgagagcatacaaagaaaggataagagtctagcaagaatgataagggaccgtgatgactatgaggaaatgacacctcaccaactatttgcaaagattcaacaacatgagtctaaagaagccccaatcaagacaagagacactcatgccttgatctcaaatgaacaagattccaccaagaagaacaaagatcacaagacaaagaaagtggtcg

SEQ ID NO: 32163 - DNA, 313 bp, Zea Mays
cccctatatgcaactttcagtagttcatatgtacatccatcatcacctcttcaaacttcacatgctactcatcatcctatttttgacccaccgtctccgccacaagcattgtcattcaggtctccaccaccttctcctcctcatcctcttggtgaccccctgtctacaccaccagcaagggatccacattctctatagccatcactggatccatggccatcatagaaatctaaaatttctataccaaaattggtgtccccgcatgagaaaaaagaagagtaattctaccactgctggcatagctcgatttttg

SEQ ID NO: 32164 - DNA, 273 bp, Zea Mays
cattagtcaaaatgtatcacagtggtcgaaggcatcaagctcctctgagaagtccacaaaggcatctacggttctcactcggggccttgggccatcgccgccaaggtcttgtgccaagggttctattagctagccattgtgtgcacagcaaatcgcgtagtctgctcatgcgaagcataccagaaattctcacctcgagtgggggcaccttcgtagttcacaaagctgatcacccacacctagcctctacaatggtggggcctcgacatagtg

SEQ ID NO: 32165 - DNA, 470 bp, Zea Mays
gcgtgggctagacgacgtgctactaccaaggggacgagaggctggtggtggctgcggagggaggatctagacgcctagggaggggcggggtggacctaggagacgtggcgatcagagttggttgctagggggaacgagaggcggggcgactgctgtggagtgaggaggctctcgttgctcgtgcggccgcggacgatgcggattgacacagacagtatagattgaagggggcagaacagggggaggcagcctacccccttaccttcttcatagtagtagagatatgtgcaccctcatagtgctactcaccaccctcatactgttactctccatcctcattctgctgctctccaccctttccatcctcatagtgatgatatccaccctctctaccctcacgttgcttttcatcttcatcatgtgatcttttaagtgattcccgactacaactcagcaatgccccgtgtcga

SEQ ID NO: 32166 - DNA, 469 bp, Zea Mays
caaatctggatcaagatatggcagagaagaagagagtgaccagataagagaagacgatgttggaggcagtgaggagggaacgagggacatcgtcgctggcttgtcgtgtcgaagggagacagggaggagaggagggggttaggatttgctaggagcatgaggggcgaccgtgcgatggggcgccaaggcggattttatgagatgactggcgaagcgggcgacgacgccgcgtcagaggcggtgaggtggagggagcgagggatggtgtcatcgactcgttgctcaccacgtcggaggaaggagaggtggggttagagattactaggtgcaagaggaggcgacctccacgagggatggattttatgcgacgacgggagagcgggcatcgagagatgacaaatttatccatgtcgtgcggcctagcccagcgttcggcccatgcgcaacacgtagattagtctaggccatc

SEQ ID NO: 32167 - DNA, 297 bp, Zea Mays
cgaatcaactgaccatacaacaatacacttcaaaccgttccatcacaacacccattattttgaacgtaagtattttatacgattacatacatcaaaattatgtacttgtttttcattatattgtgaactgagtatacatgtgattaaatgttgcactcattgcagcaattcaaaaggctttggtggcacagaacgatcgtcagtttgccgttagatatcttgatgaccaaaggcgtagatagagtctgtaacttttgcaaatctgaattttatgatggaatacatgtattgttattg

SEQ ID NO: 32168 - DNA, 709 bp, Zea Mays
ggagggcggccgagggcacccaacccaaccctagcaccatctgtccataaataccgcacgggtgggggtagccatctcgtcttcccgatccgccgccgccaacaatttctttatgtttttctgttttcttgttcagagaacacgcatgttccatccatgcccacttgcgcgttttttttgttgttgcagttcttcctcgtttgcagttcttcctcgggatttgatttgattgattggattgggttggtgcgggggcatgctgggggcagatgacgacatgcttacgaagcagaagctgctgcctccgtgacgaggcacgccgtgttgctcgtcttccatgactctgatgcctgcctgcttcgctcccaccaccccacaccttaatcgatggattaggaattaacctgcagcgcccgtccaggtctcgtgagagatttatatgtttggatcagattttagtttcttgaggcagatgacgacatgtgcatcctgcttgagatgcagaagctgcctcccagaggcttagccatgttgctcctcttccatgactctgatgcctcctcgtcctctcccatcatttgtgttttgttttgtattggtttttttttgctgtcttgctgtcagtgatggcccatcccctagcggttaaagctaacaaaacaaaacaggcgatgtttccttttcttgtcgtcactcaggccttgaaagc

SEQ ID NO: 32169 - DNA, 357 bp, Zea Mays
tggggaacccgcgggtggggattgaaattcgccccacacttgttcctattcggggccccaaacctgtggatccgcggggataaacgtggacccgcctcagcacctatcgggtccaaaacctatgcggacctgccctgaacccgcctcgctgccatccctataggtgtgcggtctgaatgacagcgcgggagttggtgtgtcaggtcaaaggcgtcatttgccacgacgtggaccttgtcaacagaccaaccaccctgtcataggaaagttaactaatgacgatgagtaatccgctgcatgacaagatggcacataactacaaccataacttcgctacaatactctgacgaaagaaag

SEQ ID NO: 32170 - DNA, 312 bp, Zea Mays
aatcaagatgccattgttccaacaaaagcaacatgtattttacatgagtcaagagatatgatctctgctgcatcacatagctacaataccatgggaatctcaaatacttctcactgaaacatgactgctatgcattcactctgatgaacctcttttaaaagaagagtttgtcacagcatttttttgtcactcagaaatccctctgttcagcaccaaggtcgtattcttttgtcacttcacaattgaaggggaagctaggaaatagagcattcttcaatcatggatttacggcgccctatcaggctacagctg

SEQ ID NO: 32171 - DNA, 578 bp, Zea Mays
ccacaccgtcgtgactcatgttagcccatccggtgatcgccggtgagcttgccacggtaattgccaccaatcgcgtgcgctagtgcacctccttctctccgaccgccaccgcgcaagttcaaattcactggccaccgctcatgggctctataaattgagcacaccctcggctccgttaggtattcaagcacccaatccacccgctcatgccaccaattactcaccagagcccctgaataagttcccccaattctatttttccgccatcgtgaataagctctcaccgtggtcagtgcaattcaggtccgttcttgccctctgctctcttgtttcagcactcttacatgccactaatgctcctcgacccattcaattaagctagactgccctagatcaccgggaacacttctgctcatccgttgttcgcactgtctccgtggacagggtgatttagagctcgaactatgcaattaatcgaggtgaaacgttcgttaggtgttgaattaggtctcagccaagttagggcaccgaccattgcttatcttggccggtacaggttcgccggagctcagttcttc

SEQ ID NO: 32172 - DNA, 496 bp, Zea Mays
cggcgtgcgagagttgcgccagatggtagtgtgcggaactttatagcaggcggagacggaggcgcggacgtgccatggtggccacgtcatcgcaatcggcgcacggaagaggcggatgtggaggaggggtatgggagtggcacagcgagcaatgagatgcgagagtggcggtctgatctcctctccatgccagcgatgtgagcatgaggtgtagtcgcggcacgagaaggcgagatggccacgatacttatatgcaggggaaggaacacggaggttgcgaggacctggagtcttcccgtgatccgcggcacaagccttcccccggcggccgcgtgatttcagcggattcagttatctgcccaggcaatggcgcaaggtggatgccggacctgagcagcggggcccgcaagtctgtggcacggggcgcgtgttctgttccgaggtggacggacgagctgacaatgggccccactaatcagtgtcgtgagcatcacca

SEQ ID NO: 32173 - DNA, 902 bp, Zea Mays
acttgaaaacatggacgactggagaagaaattgataagtagctaatgcagacgatagccaagtatgaggacgggcagccatggtcgatggaagttgttgatgtcaccgaaaagtaggagccgcacaagtcacggacacactaggggtgtcgtggtgatggtgccacataggaggaagtgccatagacgaagatggcaacgtagtcgaggcagtcaatgaaaaaggtctatgccgaagttgacattgtcgaaccatcatggccaaggcatgctaggtttgccaggtctgagaacacgtcggggatgaaggcatgcaccaatgttgttagtaccagacgtactaggtagagggctccaaccatgcgtcaacgtctgaaggaactagcagagaaggcctccacgatgattgcgatgcacagaagaatggcgaggaagaaggtatcgatgccgcccgcggttgttggagtggactaagtagacgaggacgagaggatggcattgcagatgaggttgtgctggacaaagtcgaagtatttgggtgacatatcgaggctcctggagtgtcagggctggggcgagagagctgcaccgcacaagcaaagccgcgatggtgctggagtgtcacgacatcgttgctcaaagaaggcgatgaagagcgcgaatagtcggggtagaccatgtgctagaggcgcacaacgatgaagtcgacaatgatgtagggccaacaatgaggatgacaacgggcggtgatggtgcaaacccgatcaccaatcagttagaataaaaggactcacaacaacaacaaatttggctgcggatctagggcgataacagagcccgtgggcttgagcggcctctccacaatcgtcaccactgttagctgatatatcagacatgtgtttc

SEQ ID NO: 32174 - DNA, 416 bp, Zea Mays
gtagaagcaacaagtgatgagatacttggagcgtattcgaagcagaagacgaagctatgacaactgccttcggtgctcgtggcaagaagagattgaacatggtgtttgatgttatcgggttcgtatacccagactactggtatcctacgtgaaagcaagggaagaaaaggaaagcctctacctcggcatcttctggtgtgtcgaggtcgaagaagattaaagttttgacgcaccgactcaggcgcattgagacggccgaagtgccgaaactaagtgaaagggtggaaacaactcccccggccatagaggctattcctgttgtgcctactggaattattgcagacccggccagagagctagtgccagtaacataaaaagtactagagcatccgaatatgaaagtagcaatattgtcg

SEQ ID NO: 32175 - DNA, 628 bp, Zea Mays
gcggctgaccgaattgggggaaattaggaattcgggggctgtggggatattcgagagcgaggaatggtgcactggctttgtaacaagctagcggagtaggcagggacatcaatttatagtgactagaagcgatggctccaaatttggggggataagcttgtggccggagcgaaggtgagtcaccggagttcgctcaatgtggaatttactagggtagagtcctggggtagtaactaaccatctcgcacgacactttgcgacgtggtaacatggtcagtaacgtggcggatccggggtaacggcgaccctcacgactacggtcgcgcggccatgtcgcggggcaagtgggtacggcgaggctgactctatccactctccttcggatctttttacccccctgcgactatccactcgccacagagcacaaatcgtagcaccgacacggagatcactagcggcgagattcactgaatttggcgatcttgttcagtccactcttcatcactgaacaccactccgagctgcctgacagaccaagtttgggagcaatttaatccaaaagttgtatagcaccaggcctagctcagtataacaaatttgttcaccaatattagggcttcaatttttc

SEQ ID NO: 32176 - DNA, 402 bp, Zea Mays
aaatattcacaaaaattcttggatggaacccgtgaattgaactcatcgactacagtcaatcatgctaattatattttttccccccggcaccaagtgaaatctaccagaagcaaagctttcttgaaactgtcacattttttatttctttgatttgacaaatcagagtagataaaaaataaaagaaagatatacttgtgcctaatagttagaaatttcatgaattactttgcgtataccacttatgaagctccacatctaccaaaaaagttagaagctatgaatttcaaagtgtgctttacagctaaacttatgatctcccagtcaataatataagaatccataaaagcattgttcttgatccttgcacaactcaatatataagttactgaccacctaaaaaac

SEQ ID NO: 32177 - DNA, 712 bp, Zea Mays
tcccgcgggcggggccggctcctgctcgtctctcggcgcaatccactccggctgcgacccatggagatgggggcggagcagctcggcatccaccaacgcatgcaggtcgttgtgggtgatggaggagaccgaccataggtcgcggggaggaagcacgttcactttctcggccatcagagcaggggaagaagaccgggggagagcacgaaagcttttttgaggctaggagaaagggtggctagggcaggaaaacaggagcagaaggtaaggagccgaagtgtccatctcggacgaatttatagggcaggcggagtcaccgagtcttgggccaagccacctagagacaaaccaagaacgggccgggacgcttcgaattccttgcatgcgtacgacaacggtcggcctgcgggcatacgcgtctcgtcgcatttaatgcccgcccctcctgtcagctgacgtcaggcagcaagcgccgctttgtattacgcatcgaaaggtgtgtcgttccctcttcccaccttttccatctccttgcatgtaacgagaaaaagtgtctcccgcctcgggcatccttcctcaaggaaaagggtgagaagaataatactgttcgggggttcgaaggtcaggccctcataagggttcgggagatcgcctcaggacgactgggttccgggccctttactggttaggggttcgaaggttggcccctcgg

SEQ ID NO: 32178 - DNA, 823 bp, Zea Mays
aaacggccatacaagcccaacagagcggtgtatgggccggactggactcattaggagagtatatttaatccttttgccagcttcgttagggttaggcgaggcagacaattggctgggcgaatcagataggccggctgcgtccggatctggagtgtgttgagaggttttcttttctagttgctactctggatttctgtaaacaaagaacttcgtgagagggagagtaccgggagcggtgctcatcgtcgctaaatccctgtgagtgattacaccgcgcccagcaggtaggtaggtggcgacgacaagcttcgaaaattaaaccagcggtcagtttacagtagtcgcgatctaacctagcgagaagggtgagcaacatcgaaacgacgtcagcaagtgctgagaaggggcttaattttggcaacacagaggagtgttagtggtatgcccttttctgcttaggttgtagctgtgtgtggtaggtggccgctccttgagcggttggcgatgagaggaggccgtggttctcacagccagggaaagacaacaggaaaagagaaactagggcagggcggcggctgattaacaatatgttgatcacagcctgttctcattttatttcaattaagttataaataacctcctattacagattaacctaaaaggtctttagcctctttattctactgctaaaagggccttgctaacagcccacttagcctaagccggttcagccccctaattaggactaccagccttgttgcggcgcctgtactggacgcccaccataacatctctcggctcctcgagaaacagctcgtcctcg

SEQ ID NO: 32179 - DNA, 290 bp, Zea Mays
atcccgaccctcgagatcatgctctaaggtcgacgaggcacgggacgacctcaatccagcatcgggcatggcagcacaagcctctgttgcatcatcatccacaggctccaacaacaagtcctccgggaccatatcctctagagtttgatcaaagttggccaggaacagttcttgcaaaccaataagggcagataatgcaggagaaggaactccactactttcaccactggtgacgaactgccgactattcttccgagttaatggagcctcattttcttcctcctcatctt

SEQ ID NO: 32180 - DNA, 387 bp, Zea Mays
cgagggctcaaaaggtggaagggcacaatgcatgaggggagaacgaaggcatggccactgcccaggggatcgatcccccttttataggcagacctcctcacttgcaccccttagcgtcacgggcaaaatctccactgacatactccagggttctccccctacgacacgggggctaggacccacatgtcatacgagctgatccgaagcacgaagaaggcgaaccgccgcacgcgaggcatgtaaccgtcccatggttacaagcgctctcccatcttcgcagaaactgatggtcgaaagggtggactgccacacaacaggcatccaactgcgccgcaactgtgcgccccttcggcttcgtccacgtctggcaggccagcacaaaggaag

SEQ ID NO: 32181 - DNA, 307 bp, Zea Mays
aggaggatgaagcttcgaaggaagatacaactcccaaccaagaagattgttctgcctgttctgtggagaggataagggacacacaacaaggacttgccaagtcacaatacaaaagcagaaggacatagctgaggccaaagcacggtagaatcagccgaagcaagttcttcacactgcttcgtactactctccatacatcctagagtacgtgcgtaaccagcagccacttccatagtccacagcttcagttgcttcaacaagtcattctctagctaggtgggccttatctcaaccacacgcaccagtc

SEQ ID NO: 32182 - DNA, 541 bp, Zea Mays
cccaaatagcatccctgccccgaggagaacgaggtaagcccaccacaaaatccatggtgatatgctcccatttccactctggaatttccaatggcttcagcaaacttgtaggcctcttatgctcggccttcacgcgttgacatacttcacaggcagccacgtacttagaaacgccaaccttcatccgcttccactagaagttttgcttcagatcttggtacattttggtttcgccagggtgaatggtgtaaggcgttttataagcttctctcaagatatccatcttcacctctgatttttgaggcacacaaaggcgacccctgaaacgaatcaaatcattctcatcaatggagaactcccggggtttaccatcgccaaccctcttttgagcttcctgcaataaacgatcctgctgctgagccgcacacactctctccatgagggaagatttaataagcatacgagtctcctcactagcagtgttgacaaagcacaaagcgatccccaaatggtccagatcagcaatcaactacaaggccac

SEQ ID NO: 32183 - DNA, 783 bp, Zea Mays
gtgtcggtggaactctaagggaccgccgaaacctacaaaattgtaaattgtgcactggtaataatatcaatccaacaaaaaatagaactccccgtcaaaataaaattacttgaagttcgttgcctgtgtcgttgtaacaacctcgtcatcagcctctccatcggcctctccatcgtagtcctccccatagtcatcatcacgcatcgatgaaccttggcgtgccagctcgtcctcctgcctaggtgcattgtggtctgccgcctcgcgcgcttgctcaaatgcattgtggtcctgctgtagcataggtccacttgagcctatcgcctcatgctctggctcaagtgcattgtggcctgccacctcgcgctcttgctcaggtgcactatggcctgccacctcgcactcttgcccaggtgcactatggcttgccacttcgcgcccctgctcctccatgcaaccaaggagctgctctagccattgccttgacgctgtagagccctacaaacataatcaacaatgagatatatcaagtactcgaaaataaggtgataatactattgcatatgtagaagaaaataaaataaaacaaattaaatacctggaacaacaaagaggatgtatccccaccacctgaacccctagtcgaccgtgacctcgaggagtcaccacggtctccgcgcttcttccctttgagcttgtccatgaccctcatcatctgcacaaatttcattacaagaatttaattatatatacttttagtattgaaataggaatgcatataca

SEQ ID NO: 32184 - DNA, 324 bp, Zea Mays
cataaagcaacatcaccgtggcggtgacctgttataaccctacgtgatgagaatatgtttagtggtaggatttcatcgcatccaactgactgacttgaacaaattaaatgagtaactatttaaatatcaatattatgctatatgtgcacctaccatgactctgttggatcagcatctagagagatcagcatactagaaaaatccttggcagggttgaacaaagtccatatgttaattaaaggttggactaagttttctccagttgacgatccgttctgcaagttttgacacttattatatttactttagaaatcattatttttc

SEQ ID NO: 32185 - DNA, 388 bp, Zea Mays
ggatccctgatggccggttcggatttaaaatgatcagatcgatctgcgtccgcccgatcaaaaatctagggccccgatctaaaacacgcgaagggttatgcctaggctaatctgggccgcacactcatgattcaacggccatcgcctatctcccccacccagccgcacagccggcggcgcgcgagtacagacgtggtggcgccatgtctggagagccccagatcccgacatcgtgcacggagctttgatctacgaaattctacatggtgctctctacaagggaatcacggtggtcggtaactcacctcgcaatacgccacagggagcacgggtcatggtgcacggcaacccacggcctcagctggacaccggcgcgaagctggtcgat

SEQ ID NO: 32186 - DNA, 405 bp, Zea Mays
gaccgaccaacatgggcgcgtgttcctgttcccactaacacgatgtctgtgtacatcatgcgcaaccactttctaccgcaaattaacgcgcctcgccgtgcaactgtgcaagcgaaaataaagctggacggacgagtaacgaacgggaataagcggccaagcagccggatacgagacgagccatgccagaccaagcgctagcgaacaaaacaaccaggccggccgctttattacttcggcacagcgaatctcgcacagtatctatcgcgtatcgtcgtcagcacagtaaatgttaaacatgaggggtgagcgcagtgctcgttgcccatgctcttcagtgacgtcctttgtagctagagtacatgccagcaccagcagggactatatatgcgttgcacgtaccgg

SEQ ID NO: 32187 - DNA, 409 bp, Zea Mays
aactgcgctaccagtgtccttggggtctctttgactaatctgggcgcctcactgagtccctggggatgtgcccgtggcgccgtcacaaggaatcagggcctatatgaccggaatagcgtgacaatgggggggcagaccgtcacggtgttgggtctcgccgtggtcagggtgcaccacatcaccatctctggtaagacctactaactgaatcatagtagacttctcatggtttttcacccaagcgtatagagggtagaggtgtggggagagttcgtgtgttcggtagccatgtcgccgccgcatggatgtgtgtgccgccgtgggagtccgtcgggaggaggaagaggcatccgtggccctcgatctggtagcaggcgggtgagatcgggtcaccagataccccttcggt

SEQ ID NO: 32188 - DNA, 485 bp, Zea Mays
ccggaatagcacaacaagtgcgttaatcgaaatcttctgtttaaaagacactccacgcaaaagtcgcccacgggtgcagccggatcaacacaggcgcgcgaatacggccaacaggccacatcatacaaattacagttacatacactcggtgagggcatcatatattacatcggctcaaccttcgggatgatacccatctccctgtaattgaacaacattatcctcaattcctcaccctcaaaaagatttcgcagatccccttcacctatgctcgccccaatcggcgaggataacaattcttgtttaccaatccggtccactcgaagacgaccacactccatccccatacgacggcgcctaccacttcgcgaaaattcacccacactatgtttcgccaccacccttcgccgcctatacccagtactcgcactaggaagatccccggcaccctacacacgcggcgaagtgtccgccgcagccacatc

SEQ ID NO: 32189 - DNA, 363 bp, Zea Mays
taggaaaacggattgaaactaacagtaccgatgaaatactcattgtttccttcaagttggggtagttctgggaacggtgttagatggaatgtatattttggaaaatcttgtggatcctcatttacttcctcaagcaaagtctttggatgtagcctgatcatatactttccatgcacaggtttgaaggatagctttgcgttgtcaacataaatttttctcatgattaaaatcttgctttcctgtagtcgtggttgaagtgtatatatagcttcttgaggaacttcagcgtacatcgcagtcccctataaagttaaattgttatagatttaagttgtgctaaacgataagacatttttatgcata

SEQ ID NO: 32190 - DNA, 484 bp, Zea Mays
taaagttccttctcattctgtcatattgtgctattttttgaatcaggaaaaatgagtaccccaaaaaaccaccaaaattctatgaagttacaaataactcaaaggagagaccagatgtttggattgaaagtcctgataagtaagtttttttttaattctttgattgagagccattttcttagatataggaagcacatgatatgctaaatcactaattgcattttcaggtcagtcataatatctgtaacaagtgacattcgtacaatcaagtctgaggtatttgatttaaagaatcaaatacttatatgttctgcagttctgtctttaaaagcattaattcttggactgatttctcttgtgcagtcagctggtgtattttctcttctaacttacttttaatgttttcaaccttatgcaggtatttgctgctccatactgtttgaggttcccccgtattcagcgagtgagatatgacaagccatgg

SEQ ID NO: 32191 - DNA, 369 bp, Zea Mays
cgcgcgctgaggcggaagcgaaaaaaaggggaaaggatcggtcggtagacctaggtctgtgataccatgtgagtgagcaggattgaggaagaactattgtatattgaatgagggcagactgtgtacatatatattggagaggaggaagagaggtaaaaggaaacccctatgtctatggaagctaataatatacaggatcaatcagatccagactcctctccctaatttcctctatctataatagtagtggccgaccggcacagggttgccaggctcaggcccttccatatgtagcagattctctaacattttctatcggcaagcttggttcaacattctcataacagtcggcctccagaacctttctcc

SEQ ID NO: 32192 - DNA, 418 bp, Zea Mays
agaaatggtagtgccatgtactactagctagcagcaggagttagtgattggataattttgttgaaacatagaaggattaacaaatgcttaattagctatctgacgaggtggtgctgcttttgagaagatcaagttgggagacaggttaacagattacaggattctaggttggaaatgcagagcaagaaactttcaccaactggagtgtatagtactccttgccaaacttgacatagaagcatgtctgcatagtataccacaacagaacatctcgtgatctcaacagtggatatcaaataacttctccttactggagcttgcaatgaatcttactcatgatgcattttgtctccctgcataaaaaaggcgaatgtttgcaagcataaactaggcaacaaggaaatatttcttatgttag

SEQ ID NO: 32193 - DNA, 292 bp, Zea Mays
tgggccttaacatgtacatcactcttcagaaatttcggctccacattcttgcccctctccagggtgacacaaacttcctacagtggtggaaacgtattgctgatattgtgtcagatatgaccaagaagggggtaaattcacttttgattctgggagcctggatgatctggaagttcagaaacagagtggtgtttgacggcccaccccccatatcactacaatcttagaggccactgctgaggaaagggagaaatggatggttgcaggagctaagggtctttcctttttagct

SEQ ID NO: 32194 - DNA, 667 bp, Zea Mays
gccatgcataggatagcaacgtatctcggctgagacgctgcaaccgatatacgcacgcaaaaaggtatgtggaaatgtgcataactcatgcataaatggaaaagtttctgccacgaatcacgggaacgaatatttgcatgtgcatgccggtttacgattgcataacgctgtgagacatgatagcgtaaaccatgcaacatttaaaatctcccaccggtttgagataaggaaagacgtgctcttcgtgcgcgtaaataaaaccgcagttacgggaggaaacaaatacaaggttagctcgtccacgttcgctcgtccacgtctttatctcaggtattggcggcggttagcggcggcggaagttagaggtacggccggcggcgagaaaatgtccagcaccggagctggcgatgacatgccacctgtagcatctgtaaatacgccagcaggtacgtctatttcaatggacatgcatcctatagcgtctgcaatcgccccgtacacagagggtgtctccgttactcccccggcagcattgagggcacctggatatatcgatgagcacacaaaaacggcagatgtggtcggcgcagagaagcacatccccatgagacatattgggccgcatgaataggcacacctcatattcttcaaagccatgtaagttctc

SEQ ID NO: 32195 - DNA, 467 bp, Zea Mays
tggggaagcactgtacagaaggggcgcgacatgagtcctcatgaagtgcattctttcggctaccgggaagcaactactagatgagatccacgccgggcaatgcgggatacacgcagcatccaggactctagttgggaaggtcttcaggtctggtttctactggccaacagcaaagagtgatgcagccaagctagtccagaggtgtgaagcttgccaatacttatcaaagcagcagcatttaccagcacagcaactgtagaccatacccgtaacatggcgatttgtgtgctggggactggacatgattggaccattcaagaaagctcaaggaggatacactcacgtgctggttgccattgacaaattcactaaatggatagagtacaaatccatcgcttctctgacttcagctaaggcagtggaattcatacaagatataatattcaggttcggaataccaaatagca

SEQ ID NO: 32196 - DNA, 506 bp, Zea Mays
tagtacatgtctcaacaggttgaaggagaatagcaaatggtagtgctacgaagcagtaatgccgattggattgaattgcatcaccattattttggggaacattttatctacaatgtaaatttgaatggcataaaaccacactactcaaggaccaagacatggggtttgaatatcggttttgtacaggactatgttttgctgaataaaaatgcacctcttaccatatttctcatttttctaaaagagagtggcaggagctctgccttgcattgaagggaaataagatggttttgtctgaatggcagacacgcctcaacataaaataggacaaccacaaatttcatgagagagccaacctgcaaagaaacaaaaacaagacacaattgttgtggcggccaatgatgtcggtgtcacggcgggagagggcgtggtcgaccgtatggagacaactggggcagtattacaccgtgaagttgaagccgaacaacttgctcacccactggtgc

SEQ ID NO: 32197 - DNA, 390 bp, Zea Mays
cgccgcctaataccatccgactaacatcacaacacaccgagcaaacgtcaaggagtcagcatagacaggacagggcaccccccgcatacgaccacgaacatccccaacactgcattatgggacccacaggagtctgcggcagagtcagagtcctcagatggtacacgacggtataacatataagggtgaaaacggccggtaacggtcggaaaaaacctctcaccgttttcacctgcataaatttttgttcggtccgaatcggtaaacgggaaagtcggaaacggataacgaccggtaaattccggtatatcgaaaacggataaatccgagcaaaatagctcgaaattgatcgggaaacgttaactgtaattggaaaagctcacaataaac

SEQ ID NO: 32198 - DNA, 296 bp, Zea Mays
tgtaaggaggagaaagtctgtgttaagggacgatgtctcaccatcagtatgtacacacgacgcggccaaatcagacaagtaatcagccgcgtaatcacaacactaatgtgacaatcaatcacaattaatgcgtagcaaaaggaagtcgcgcaccgcaaggtcggaagcgagaaatcgacggagcattcctgcgcatgctgtgagcccgtgcccattgccccgcccggtccggcgaggtaggcgagtgagcgtgcgcgtgggttctccttttcctctcatcaatggcttcaaccacg

SEQ ID NO: 32199 - DNA, 388 bp, Zea Mays
ggccgtgtccggtcatcggcgccgctcccctccgttcaaccacaccgcactgatgtgactgcgttactgtcgcagcggggacgtggcaagcccgtaagaatggctatcgcttgacgccgccgttgatcgccagcaaagacttgcaatggttatcaccatggccatggcagtggcttactgcgcctataaattcatcgcctcctcactctctccgttcaaatcaactgagcacaactcttcgtctctaaattgcgaagccgtagcacccgcctacaccctcaattagccaccatagccggagaatcgctcacttcccccaatcacagtttccgctgccgtgaaaccaacctcaccgtggcctgtgcaattgaggtcagttcaaaccttc

SEQ ID NO: 32200 - DNA, 850 bp, Zea Mays
catctttttgccttcccggcggttcgggggcggccgcctcctctggtcccttcaaccctttatttttctccgatggcgatgggcgatggccgatggcagacgcagaggcagctggctagcagatcaaacctaagctccccgctctcacatgtggcatggcgtcttctcttgtcctctgcgattggtaaggttatttcgcaatggagcgcgtggatctggtattggcacgaggaggaaggactaggtgggagcggggggaattggattggaccgcccgggctggtagtggtagtggtagaacagaacagcggaggagagcgagacctggaccgggagaggcagaagcagaagcaagttgtactagactagaagtgaggctcctctcctccccatagatggatgatgcatggagcttgggaaaaaagtccaagcgtagaaacaacggaggaacggcactattgtcgggtcaaaatgtgaaatcaaaccgctcgttgtcgacagcgttggcaggccatgctttctcaatttttactactcgggatggctcattttatggttgacttgactgcggcagcttccaacgagctcaggctcaggaggaagaggaagaactttccagttttcatcttctgacgaaaattcctcaggacaggagacgataatgctctctgttccggaccaggtatgtcatgccgcgtggtacggtccaaaccggaaatacgtgcacatgtgaagttggtgtatatattatacatatgttaattaaatcaccattggccatcttaatttaatgtctccagatacattttgcaatgaacacattccaccgttcactactttggctgtgttt

SEQ ID NO: 32201 - DNA, 531 bp, Zea Mays
aggggggaattttgggtcgggatcctcggtattcccagctccggccaagctccgccgcggctctggtcaacgccgctggcaatggctggaggggggaagagggcgcttagcccttggatgggaaaggtgcggttaggattagatcaggggggcaggtggattctgaccgttgatctaagatcgaacggtcgggagcttggggcgggattcgaagtcagtaaccgttagatcgacatcctggggctctagttgtgggccgatctgttgtggcgatgatctaatcagagccgttcgtttgtaatcgtatggctctcggcgttggataccccttcgcgttggcgttttgcataaaagtacccacagtagttgagtatcaacccgcggtccatccccctgggccctgtgtcttaatatttttagccccgagatccctggcctttctgaaaattgatgcccagtccagaaaggatttaaaatagagaaatgattatagaatttagtttttaatacaaaaacaaatctagaaacttg

SEQ ID NO: 32202 - DNA, 378 bp, Zea Mays
ggaggagtttagtcatcagagtgcgtgggtggacgcattgaaaaccgggcgtaagtggcattaatgtctgcggcagggcaaggcgcgcgcgggggtggtggtcagcgacgcagccttgtccggcgcacactgtagctagcacggagaagaagatgccaagaggaaggcggaggaagacgacccaggccgtggcgttgcactgcactgcagtactgggagtaggattgatacgcgcggcgcgtaggagtaattgggttccgaacaaacaagcaaacggatcgaacagtgcgtggcgagagcgagacgacctcgatcgagcacatgtgatgctctggagtcacgcctggtgaagttgcaactggcggagtaatgggggga

SEQ ID NO: 32203 - DNA, 371 bp, Zea Mays
ggaagagtgcattgtcgatggtggggcacatgtgactcggtctaggcaaatgagtcaaaggaattcataccgcttgtcgctaggtcgaaggatgtaggaggtcgtcgcggcatccgaacaaggaagcgacaactccggcacatcatggcatcggagggcgggaacgtcctccactttgatacgttcctcgcaagacacctccgtcgtcgtcgaggtctccatagctggccatctagctttgggggaacctaccatcgatagagtgggccggtagatttgtagcaccaaagcgtgcgggctccatcttacactcccagtcggggacaccgccactgccacctcctcctccatcgccgctcaagcaacacccg

SEQ ID NO: 32204 - DNA, 291 bp, Zea Mays
tacggccggacggtccgttcttaggtgtgaacggtccttgattagatcgaattaggcgtaactaatccctttttccgtgtgtgtttatccctctaaacttgtggtcgctattgagagacgcctagaaacgggttcagaccctcctatatatatgaaggggtacgaccgattgcgaacaccaataatcgaactacaatcaatatatctttcgttctttaccttttgccctaagagtagacagtaacgtagctttctccctttaatcttaatctctcttcggctctacgtcgt

SEQ ID NO: 32205 - DNA, 651 bp, Zea Mays
cttaatactggcgggacctatgtcaaaggctttcgtcaggcatcgttcgggtgcgtttggccatgcatcggcaccatacctctgcctggacaagaggcaggcccggaaataagcaatgacatggcactcctaggccttctctgatcgtgggctcagacctctcccgatggggtccaggcgctggacgcacttgtccgtatacgtggcgacatcggacctcacctggcatgaggtttggatggtattttctagcctcgaagccactccgaaggctcggtgctgaagccagagagtgtcttcttctccggggctttgtgctcccttcggactcctttctccatggatctgatgggtccacaaagaggtccgggttctatttgcaggatccgtgatctatagctgaagttattgattcctccctttatggggcttaatggagattgtgatccagcccaggagacgggtctggcttggccacgactccatatggtgggccttaaccccgtgttgggctagttgctcgtgaaatcctcaatggtggccaccagggtttcactttgacatagcaggggtgggtatcccatatttagggtaccgactatgggcctcaaccccacgttgggcgagttgcccgtgaaatcctcaatggtg

SEQ ID NO: 32206 - DNA, 308 bp, Zea Mays
gaaaaacataccttggtcgagcatatgataatggatcctatgcacttggagctgaattgatagcaaaacccttcctctttttccggatgcttgagacctttcatagagatcccaagtatgtccggggttataaggtcagctcttaccggactggaccacagagggcgacagagatcgagtttatacgaacgacctcatcggactatgaaccgtttgtgatcaaaccgggcttacagggccggacccctactagactattcctgatgtgaacacctccaactatgtttatcagattccctttccttttc

SEQ ID NO: 32207 - DNA, 397 bp, Zea Mays
ggaccctgagctcagaaagaagatattggatgaagctcacctttcaaaattctccatgcaccccgacagcaacaagatgtatcaggatctcagatccttatactggtggaccagaatgaagagggagattgccaagtacgtatccgagtgtggcacctgccagaggatcaaagccagtcatttgaaggcagcaggccctttgcaaccccttcccataccatcttggaaatgggaggacatttgcatggacttcatcgtgggattgcccaacacctccaggcaccatgattccatttgggtcattgtggacagattgaccaagtcatctcatttcttgccagtacacaccacccacaggacggagaagtatgcagaaatctacattgaccagatagtt

SEQ ID NO: 32208 - DNA, 387 bp, Zea Mays
ggataccgtcttcgtgaccgtggtaccattgaacctccagatcgctatggttttccacgggctggtgtagcaattgttgaacccactacatatcaggaagcttctgggattcttgagtggcagctagctatgattgataaattggctgctcttgaacgcactggtacatgggatattgttcctttaccctcgcatgttgttcctatcacatgtaaatgggtcttcaaagttaagacaaaatcagatggttctattgagaggtatagagctcgtcttgtggcccatggttttcaacagactcaaggacttgattatgatgagacttttgcacttgttgcgcatatgactactgttcgaaccttgattgcagttgcagcctcatcttct

SEQ ID NO: 32209 - DNA, 277 bp, Zea Mays
ctgaacacaagtagaatcttactgtagtgtgacaactctttatcaaaataactgttttaattgattctacttttttgtggcaacacattcttaaccagttggctaaaccagatcatacatagcattcccttttttctttcatctttctaatcacataattttagtatgcactaggtgctattaagagataacaaatttaatctttgctcacgtatcatgcaggccgttcaaagaatgtgtgggaatcgccaccaggctgtctcatgttctctttcac

SEQ ID NO: 32210 - DNA, 312 bp, Zea Mays
gttgatgtatgtgtcagtgtgcgttattctgtaagcaattttatcgtggtttcgggaaccgggtgacattaagatctgtattcagtaggggtactagggcaactcactccgaatggtgaaccacaggggctcgaaggtggatctaagacaggggttatactggttcaggtcggagtcctagtccagtgtagtgctgatcgtagtattgcttagagcgtgttacagttgagtgcttatgtgtagtccatgttctcccttgaagatggggttgtcttgccattttatagctcaagggtagactttacaatgatg

SEQ ID NO: 32211 - DNA, 993 bp, Zea Mays
agtgtgccttttggctgtccgaagtggctttcctggggcatgtgattaatcagcagggcattgcggttgatcccaagaatgttgcggctgtggtggagtggaagagaccctctagtgtctctgaaattcgaagtttcttggggctcgctggatattatcggcgcttcgtaccaaatttttccagcattgctaagcctttgactagactcttggagaagggtgttctcttcgtctagtccagcgattgcgaggtcagttatcagacattgaagagcaagttggtggacgcccctatcctagctttgcctgagagcggtaagcgtttcacagtttatacggatgcttcgcgaattggtcttggccgtgtattgatgcaggaaggcagagtgattgcttatggctcaaggcagttgaggaagcatgaggggaattatccaactcatgatcttgaattggccgcggtggtttttgctctaaagtcgtggaggcattatctttatggcgaggcttgtgacatttacaccgatcataaaagtctcaagtatattttcactcagaaggagctgaatttgaggcagcgttggtggctcgaattgattaaagattatgatttgtccattcattatcactaggggaaggcaaatgtggtggctgatgcccttagcaggtccggggttccaaaagtggccttgtcgttgatcgctgatctggaccgtttggggatcgctttgtgctatgtcggcaacgctagtgaggagactcgtatgcttattcaatcttccctcatggagagagtgtgtgcggctcagcagcaggatcgtttattgcagcaagctcgaaagagggttggcaatggtaaaccccgggagttctccattgatgagaatgatttggtttgtttcaggggtcacctttgtgtgcctcagaaatcagaggtgaagatggatatcttgagagaagctcataaaacgccttacaccgttcaccctagcg

SEQ ID NO: 32212 - DNA, 574 bp, Zea Mays
atttgcctaggattgctattccaagattatagctggatcctagaaccataactttgctaatgagtgatgatcatgttaccacataaaattaagagaaaattcgccctaaacattgactgacagcctgtctgaatgagcttcgccatggtacagtgctctgaaatagatcatgccgccagctcagcttctcgtagccgacgatctccaccgcaattcgtgccgccgccgtctcgattcgtgctccggttgatcggataacgctcggagtcacgccgccgtggataggctttggccagttaattattccggccaccgtaccgagctcgccgcggtggaattagataagccgccttccggccttgtgccacgtgtctaggcatctccatcgcatcgtcgtgatctgctttagctctccgttgatcaccggagtgaatgccacgattgatgccacgaatccactacgccagtgaactccctctcctctaaccgcagcgtgtcatcgctgcaattcccggccaccactgttgcgctctataaattgaggccaccgtgagctccgtagggtagtcaagca

SEQ ID NO: 32213 - DNA, 589 bp, Zea Mays
cacacaaggacactgaaacgaaagagcagagggcatgagcggacctggagtaggatggccatggcgaggttgtaaggtgtgggattttggaccaaattgggggaaatccgaaattggggcttgctcgtgagtaattggaggcacgacttggtggatcagtgcttgattaccctacggacccgtcagtgtgctcaatttatagtgtgcttgagcggtggtgtttaatttggacgaattgcgctggcgaccgagaggggaatgagtcacgacggcgatctaccgtggcaatcgcagagcgactgaactacggcggtcactggatggtcactacgactcataccgatgcgataaacttcctaaggcatggcgccctcacggtgaatggcgaacacgccggtggtagccgctcggccatgtcgccgatgtgcactgatgaaccatcaagcacacagtgcatcccagctcatctgcggcaagatctttcatcccgtgatcgctatccgcatttaattcaggcgtgaatcacgacgatagcacgaatccgcgcacgtggtcgccggcggtgaggtctctgagctggcgatctgat

SEQ ID NO: 32214 - DNA, 374 bp, Zea Mays
aacttatcaacaactcggatcaagaacactctagcaaggcacttaatctctctagctcggatcactttgatttggcacttggaggctttgaatgcgtgggagttgttgcacttgttgtatggatgttaggtgtagctctcgtgtcttcaatatgctggttaggggtatttatatccccaaccaccccacatagccattggagttgagtggagaaaactacacttttttgtgtcacaccggtccatgaacagtgctggtctggtggcgcaccagaccctgtcagtctgtctcggcaggtgaccgttctgacgaagctctgacctgttagtggcactaaacctgtccaatgtgccacggacctccgccatgtcatc

SEQ ID NO: 32215 - DNA, 310 bp, Zea Mays
tatccctcagcatcataatgacccgaaaaggatggtatagtaaatttaatcttagcataagggtcctcaggagcacgaatgttattaccttgctggcggtgtggcataccttctgtgttatgatgaagatggtgacgtaggcgcaaatctctggtggccggttcatcatagttaccttctgcatcaaacactgcatcatcgggacgacatggacgaggaggtggtggtggcggtgcttgttgttgcgtctccaacatagcaagtctgtcaacgatgtcggacaatcatcgatccagcctctcataagtct

SEQ ID NO: 32216 - DNA, 434 bp, Zea Mays
tgaatttgtggtcttcatgggaataaagtgcgtagacttagtcaagcgatccagtaccacccatatagcattcctgcccagaggagaatgaggtaggcccaccacaaaatccatggtgatatgctcccacttccactctagaatttccaatggcttcagtaaacctgtaggcctcttatgctcggccttcatgcgctgacatacttcacaggcgaccacatacttagaaacgtaaaccttcatccgcttccaccagaagttttgcttcaaatctctgtacatttcggtttcgcctgggtgaacggtgtaaggcgttttatgagcttctctcaagatatccatcttcacctctgatttctgaggcacacaaagacagcccctgaaacgaaccaaatcattctcatcaatggtgaactcccggggtttaccatcgc

SEQ ID NO: 32217 - DNA, 575 bp, Zea Mays
aaagttgttgtcgtcgatctggatatctctcagcaccggcgtctcctttccgagccccggcgggagctctccgctgaggctgttgctccacagccacaagtataccaaggacggtagctgggctatgcttgccggtatctcgccgacgagattgttgtcgtgcaaaatgaggagccttagcttcgtcaagcttccgaagcttcctgggatggtcccagtcagcatgttctcggacaggtcaacctctaccaaacctgccgctcctatcgtcccgttgttgatgacgatgtcgccggagaggttgttggtgtacaggtacagattcgtcagcttctggaggttccatatcccggacggtatgtttccggtgagtccattcatggacaggtcgagccactccatctccgccagctccgcgacatagctcgggatctcgccggtgaggttgcacttggccagccagacggtcgttagcttggtcaagttcttgaacgactccggcagcgtgccggcactgaagggagtcctctcgagcttgagcgtccgaaggttaaccagctggccgagctccggcg

SEQ ID NO: 32218 - DNA, 344 bp, Zea Mays
agtcttctcccgaggcaggagcagtcttcgggcgaggcagagttctctcccgagggtgaggctatgctcagacatgtgcatgtcccattcgaagttgtttgagaatagtgcctggagtgggggagcagagtctgttattctcgagtgtgcgtcatcgtatttggcgaaagtagatgggatcatggtcccatcatcccatgtttgattgtggtgtcacatggagcagatcgatttgcctgaggggatgaacacttctaccaggggtgatgccatggaatggtgtggccccagcctagacctaggactgcctgattcccatgagctccaaggttacaacgtagatg

SEQ ID NO: 32219 - DNA, 627 bp, Zea Mays
ccggtgatcatgtggatgactccgcgatacggctgctcggcgaagtcttcctactttggtgcttggggtgattttggtggtgtgggttcgggtgatgcggaggcggaggcgggggtggaacaacttgtacttcctgatggtggtgatatgcgtggttgggtagatgttggacgtggtcgttgttgtagggttggtggtggtggtggtggtatgtgtgcgcgatgactcgctggttgtcggttggctatgctcgagacatcctatccctggtggcctttgtttccgggcaataacttgttgggtgcgcgcagtcctcgccatgaaacaggcagtaaaatctgcgtggttgttgcacccgtccttggccccgccctcttgtgcctgccttgaagttggcggatcacggtgatgcttgaagttgcagagcctgcgagcttcgctcatccaggtagttgatcccttggaaagcggtaacatgcgggatgaagggcccgcgctgaggtatgaagaggtctccggctgggacgtgctgttggagggcggtccgtgatgcaggtcatgctggccttcgctttgcatgagcgcgatttcttgctcgagctcccaagctcgctactcatcgtctcg

SEQ ID NO: 32220 - DNA, 325 bp, Zea Mays
aattaatagtcgataatggcaagcagttcgacaaccaagacttctgagaattctgcagctccatcggaacgaaggcagtgttcacctctgtctaccacccacagtccaacggtgtagtcgaacgtgccaacggcaagatctccagcgctatcaaaaaaaggctccttgatgacaaaaagggcaaatgggcagaccaactacccgaagtcatatgggagttgaacacgacagagtccagagcaaccaggttcacaccctttcgcttgatgtatggatccgaggcaatgacactgcaagagttaaagcatggatccccacgaacaag

SEQ ID NO: 32221 - DNA, 1092 bp, Zea Mays
tataacgcgtttaaacgtcaaaacgcgacgtttaaacgacgttttacgacgaatcgtaaaacgttgtcgtttcactttctgtcagcgttttatagtttaaacgacgtttaaacgtcgttttaacgtcgttttaataagcatgttaatttctatttgtttaagttagtgatatgtgtttactttgcatttgcagtcataaaaactttttgcagtttatgactgaaaatggtatgtctactggtgttatcttatatgatggcgtagaggattgtatgacaacagttactggaagagaaatgggtctaaactttctaaattacatttttaataaatttaaggaaagaaagtgctggagtgatggctgggaattaagtgatatggaaatagaaattgaggcaggaagaaagtttgtcattaccaagtaggctgacgcagatcttactgttgaagagggcacacaaaatttatttgtttatcttggtctcctggtaccgtattataagaaagaaaactcaattctagcatttttttattccttgagaaaaaatatcttatactttcatgattttaagaaatttctaataaaatggaaaatgtttgtcaaactcattagatcagtgttagctttaaaagcgtctttgatcagatcgaccttaatctgtgagatgtccacagttatcgcattgcagcttaaattatctaattctgcatatcatcaagtgttatcaaaaaatgtcaatattggcgtgcttcaataaaatgggttatgccacacggacaggtctaccactacaggaacaatatctctttaatgtattcctatgataagtggtgttgtaacttatggcacgtaatgtggtattgaagaaacttccttcagcatttcctctactcttttacgtaggtcaggacatgcttaacgaagtttcttaaataccacattacgtgtcataagttacaacaccacttatcataaaaataccttaaagagatattgttcctgtagtggtagacctgtctgtgtggcataacccattttactgaagcacgtcaatcttgacatttttttataatacttaataatatgcagaa

SEQ ID NO: 32222 - DNA, 340 bp, Zea Mays
gcgaaggtgatgtactggaaccttcacaactttgtggatagggacatcgtgcagcaaggtgtgatcgataggcagttccccctcaggatagaaagctacggcccagaaacaacctcgtcttggagtagaggggcacatccctcctatcaagaaggacacatgttcccatgaaggaccgccttggaggcatctgcgatatctgacacatcatcgacaataggtgttgggagtaggaagaagtcgagcagccgcacaaaagtaggcgcgagcgcaaccccaacccgcttggaccaggatcgcgtgccttcgggcatgagatcaggattgcgcatttccccct

SEQ ID NO: 32223 - DNA, 668 bp, Zea Mays
ctaagcaccatgtgttaccttggtgttgtgacctacaacaccgagcccagggtccaaaacaggaattaaaacacacagggtacaaatgtgaataacctttcaaaaaaggctaaaaaaataaaaaaatcagcagatttgctctgtgggagtaacaagtttattgctactgttgtttcttgtgttgtagctttatcttgatttggcatatccagagaagttgttgaattgccttgagaaagctattcaaattgattcaaggtatataattgtttttgtcatctgcccaactggattttttttttctgaaatttgtttagtcacttatttaatttgttcgattattcccaggttcgcaaaagcttaccatctgcgtggaattctctaccatggaatgggtcgacataggtatcctttttttgctgatttttatttctcgtttgtcatagacatacttctcaagcgtggcactgtttaacaatgaaacatattaagttgttttacttctctgctgcctgtttattgttagaccttttcttaggtgggtataattgtatctgtacctttagccatcgtttcttaatggcccgggtgtctttttcttgctggtgtgatactggaattcctataggaatgctgttttcgatgcgattaaacgctttactatcttt

SEQ ID NO: 32224 - DNA, 672 bp, Zea Mays
gccggatccctgtccctgaccagcgacaaagccacctgctccaccgtgctgttgatgacctgaagcatacccgcttgcacccccggattgctgatggtctctaccactgccatggcctccaagatcactgccaagcaccattgtatgccttgctgcgtccacgtatgagatggtggctgacttcctgagagttgaatgaactacccgagcactagtcacccaggtgcccgtacgtgcaaaaagggaagccagccctggcgtaggtctgtaaggaattccagggctgagtttcagctgctgggctctcccaaatctacgcctaccatacacatacaaactatggctccttgtatccggaaatgaagatgtgagcgattcctgcagatttgcccgatctccagcctttccaaataaacaaggaagcaaatttgaagctgcctccggcggccccactaacacagccgtacattccgccttcttcaacccttgaacacgacgcccatcgtcgtaacttggtttccggcgctcttgcgccattgataggacatctccaagtgtgagcttcggcgaacaccgtggcgatggcaacttgccctgccatggcttcaccttactcctagaagaagaggtcaaaggaggaggatgaagcggactatgaacaggcgtccgcat

SEQ ID NO: 32225 - DNA, 387 bp, Zea Mays
ttgatggctgcgccttcgcacgagcgaacaacactaggggccagggcgcccagtaagcgacatgtgcggactgggtcacgctagggcgatcggctataggcgcagacactcggtacctcggcgaacgacaatgctagcgtgcaacagattggtgttggcgtgctgctctattgctgcatagatcatggcaacaaagtatgtgggccatgttttacctagcaagaaacatggtgtcgcctcgacgcggtggatctcggcaccaatgtctaccatggtggacccacacgtccttctcgcactccctctatttctctcatgatcgtgctctaatgcttatccgccaccacgctcgcatggctcaccatctccccaccgcctccccacctc

SEQ ID NO: 32226 - DNA, 562 bp, Zea Mays
gaacacagtgttcatgacatcaatagtcctgaaaagaatgcacctcctatacataaacccaagaagtctaaggaacaaaactttactggccctgaagatcttctcctttgcacaacctagttgcaaataagcagtgaccctgttgtgcacactggccaacatagggagggcctttgggctagaattgaaaaaagatacaacgaacagaggggcaagtttccttgtagagtcaacagagcgcttagcagcagatgggacaagattagagcagatgttagtaagttcgctggctactacgcaagagttctaagagagaaacaaagtgggttaactgatgacgacaaggtaacccaaattttacagactttaaatcatgtacaaatgattgtatacatgttcacacatttgtaaaatgaaaccataatttgtacagacatcgaaggcggcaacattatttgcacacgaggagaacaaacctttccagtacatgcattgctggcaccaactaaagggagaacccaaatgggagagcatttgtagtggacaatcattccgcggattg

SEQ ID NO: 32227 - DNA, 569 bp, Zea Mays
ggggcccacactttcagtggcattctccccatggattgtgcgctatgtagttcgctcatgggccccacccgttagggtcatctccatcttctattgcgttcaccaccccggcggacgccatgaaactaaatctcaacagtgaccgagaaaaccgtgtgatccccgttcgatccccccacacgccttggactcaatcccaataaaatgtgggcccctcatgaactctgcaagccgttgggagccaccatcgacgagcagagaagggcgtaggtcatcactgtcatagggatcgaacgtgactgcacctctatccatgaatgagagccctagagcatcactggtccatggcacaacttctcggggcggtgggactcacgagggaccaacggggtggccggaattcctccccatcgcttatgcaccgccgctaaacgcacctcaccatggcctgtgttgcctgcgcaccgattgatgctaatacgcaatgcaccgagatcaccttcttctccacttagtgtagcacccatttgtttagacgagggagtcctggtgcaccgcgtcaccgttct

SEQ ID NO: 32228 - DNA, 316 bp, Zea Mays
cttttaagtggggtagtgttcttggcagacttaaccgtcttgccatcccaagggattgatgtgatcttagggatggattggttgaccaaacacaaaggtatcatcagttgcgcaaacaagacagtccttctcacagaccaccaagggaagtcagtctcttgtcaggctcagccacccgccaatgatccaatgatgtttagtctagcaacagaaaacatatcagtggtagaagaattcatggatgtgttcccagaagagttaccaggaatgccactggaaagagaagtggaattctacatagatctgattcctggaa

SEQ ID NO: 32229 - DNA, 531 bp, Zea Mays
atctgggtttttgtgatgacatggagaatatttctctcgaggatgcctgcaattatgcaaagttatttgattccgggctttcgagtgcacatgtggctgctttggcagctttgtttggttgggaggtccctcaggtgggggcgatctgatttgtttccaatggagaataactgttttcttatttggaatgtgaggggtctaaatgatcgtgccaggagggactcggttaaatctctggtccttgatatcaagccttccattgtttgtctacaggaaaccaaattgtgtactatctcggactttgacatgctgtctattcttgggactgatttcagtaattttgtgtatagtcccgcccaggggactagaggaggagtactaattgcttggcgtgatgggtcttttgtctctgtggcttcggttgtgaagaatttctctgtctcagtccagtttcaggatgagtctggttcttcctggtggttcacaggtgtgtatggacctcaccaggatatttttaagcaggagtttatc

SEQ ID NO: 32230 - DNA, 461 bp, Zea Mays
tatcagtccaatgattttataaaataacatttcgagacctcgaagttcaaccgtacaagtggtctggtgcactaggccgccaaagcgcccgagtctggactctggcaaatcggtccggtgagtcccagacggtgaccgacaacaatgaagttccgccaacccacaacggccacggcagtaccagcagaggtggtgaacctgattattgtcttgtacctacgttgtttggcgggtgatcgacccaagacttggttatagtggcttcctttggctgaattttttttataatacctcataccaaactgttgtcaaatgtactccattcagaattgtgtatggtcgtgatcctccaaccatgttatcctataagccagggatggccaatgtggctgcagtagaccagcaactccaggatcggtacgttttcttggaagacatcaaacaaaggttactccaagctc

SEQ ID NO: 32231 - DNA, 425 bp, Zea Mays
cataaggacactacttatactacactactctaattatcttcgtccttggtcgctcctgctccactgccagcttcgggagaacgttcatctgcgaggttcatggaaggaggggctccgaaaagatccaactccccatcaggtcctccactagctactctagatgttctggctcccattgttgcaacctcacatggtacattcgaatgcaaccggtcgtataacacgtgcacttcctcatgcatagtgttacagtatgcttgcagattctctagagctgcgcttagttccgctaccaggctaaagcatttgcctcgcaatccctggcgaaagagcgtgaatttacaacccagacgatagtcgtatctcgttccatgatttcctgctacaagcgattaacctctgctgacagctcagcaatgcggcgg

SEQ ID NO: 32232 - DNA, 388 bp, Zea Mays
cttgatcagctctaaccatcttcgctgacggaggttgagatcaggttgagtgaatatgtacctcagactcttgtgatcggtgaaaatatggcatttgtttccgattaggtaatgtctccatatttttaaggcatgcactatggctaccaattccagatcatgggtggggtaattctgctcgtgcggcttgagtaggcgtgatgcgtaagcaatgactctttcgttctgcattagtacacaccctaagccttgccttgaggcatcacagaagacgacaaaatcttgatgaatatctggcagtgatagaacgggtgccgttgtgagtttctcttttatgatttggaaactcccttcacattttggggtccacacaaatttgtgatctttc

SEQ ID NO: 32233 - DNA, 949 bp, Zea Mays
attgaagactgttaaatcaagaacaaaccttattaaggaattttgcccggttattcacaagaatcatgagagctagtcggtggaagggggacggttcaggcgactgacgaagatgtgccatggtacagtgccccgatggatcagaccgccagctaagctcgtcgtcgatgatcgccgtccggattcatgcacggtatagaaggataacgccgggaaaagggtgaaccgtacgtggcgccatctcctgtgctcagccggagtgattcaccggcggccatcgcgtcaatcctttccgccgcggtgtcctcggcaccgtgattcttcctcactgtaccaaatctctacgtgcttggcatgcgcttgtgatggtattcgagccgtgaggtgatcgccggacctccgcggctataaatagcccatggttcgcggcgaggctcggtcatcacacacataccagtgaaccaaatcaagtcaaattcgcactgccctctccacctttgcccaaattgattgtgcacagtgaaagcacagcctcttacggtcctttagccctgatcccatctcccaatttcgctcagagccgccgcgaccccattttcccccccttttccgtctccggcaagcacgaaataccgcgctccgtggccatatcaccctggtaaggctctgcccagatcaaatgttgtttctgcaactccgtttgcttgtgaagctcatcgtggcgtccgattactcaatccggccccggttgtgcgggaactcgtgcccgtggtcacggtttccgccgtgcacgtggacatgtcgttctcagtgcattcatgtcaaattgatgcgtgttccgaggtcacctattgtcggttatgctttcccgatcattagtccgggcagtcgtcgccggccatggccggtacagacctcgtccgagacgttcgaccagcgcgccgcggtc

SEQ ID NO: 32234 - DNA, 336 bp, Zea Mays
ggtgaattaagatatatctcggtggagcccacattgcaagagcaaatagtccaagcacagattggggataaaggtgttcaggttatcaaagacatgctcaagcagaaggcagaaaaatacaagtgctttcgctaggatagtaagggaattttgtggtttggagatcgactggttattcccaaggaccctgagctcagaaagaagatactggatgaagctcacctttcaaaattctccatgcaccctggtagcaacaagatgtatcatgatctcagatctttgtactggtggaccagaatgaagagggaaattgccaagtatatatccgagtgtgac

SEQ ID NO: 32235 - DNA, 361 bp, Zea Mays
gccaagaatagaagatctgtttgaccaactcagaggtgccagcatattctcgaagatagatatgagatcaggttaccatcaactcagaatctgaccctcggacataccgaagacagcattcatcaccaagtatgggttatatgagtatacagttatgtcttttggtttgacaaatgtgtcagccttttttatgtatctgatgaacagtgtgttcatggactacctagacaagtttgtggtagtgttcatcgacgatattctcatatattccaaaagtgaggaagaacatgtggagcatttgaagatggtattgcaaaggctacgagagcatcagttgtatgccaaactgagcaaatgcgag

SEQ ID NO: 32236 - DNA, 562 bp, Zea Mays
gtgacaaatgtcatcttctgaacgtctgcttccttgattctcagctggtgatatcctgaccttagatcaatcttggagaaatacttggccccttgaagctggtcgaagaggtcgtcaatctgaggtagtggatacttgttttttattgtaacttcatttaaggatcggtagtcaatgcacattctcatgcttccatccttcttggtgacgaacaagactggtgctccctaaggagatgaactgggacgaatgtaccctttctgttgaagttctgcgatctggagcttcagttctgccaattctgtgggagccatgcagtatggtctttttgcgattggtgcggtgcctgtgatcagatcaatgtagaattctacctctctttccggaggcattcctggcaattcttctgggaacacatccatgaactcttctaccacagatatactttttgctgctaggctaaacaccattggatcttgggttggtggctgagccttacacgaaactgattttccttgatggtcagtgagaagaatagtcttatctgcgcaacttatgatgc

SEQ ID NO: 32237 - DNA, 317 bp, Zea Mays
gctggactcagcttagatgttgtagcgttggtctactcactgttacataatgtttaggactactataaaattaaactttttgaggcccctctagaatgttggaccacgtgccgtcacacttggcacacatgcctaggccctcccatcacctagggatggtgaagagggtgagagacgaaataaaaaaatgtgtgggagtgggagggtggggcgaaccagaggagcagagtgagaatgatgaaaagaacaaagagtgagagtaaaaataacaataggagtgagaagtgtggagtaagaatgatcaaataatatatgtt

SEQ ID NO: 32238 - DNA, 371 bp, Zea Mays
gggctttggacctgtttggtacaatttactctgcaagttgttgtgcacctcttccactagagtgcttgttaatggtgaacagagtgaattgatctgccaccagaagggccttcgtcagggtgaccctctgtccgctactccgctatgttgttcatcttagtgatggatgttctgaactacattattgtaaaagcttgggaggagggtctgctgcaacctttgctgaacaggggtaatggtcagaggctctatttatatgctgatgatgtagtgctgttcatatgaacctgtgctgaagaattactgttgatcaaggaaatcattagggtcttcagtgaagcatctaacttggtcacaatatcggaaagagt

SEQ ID NO: 32239 - DNA, 396 bp, Zea Mays
tcatcagcttccaacgggtcctcagccttgacaaatagtggtggacgggtttcagagaaatccagatatgtggtttcacgggggccttgctgataaccccttccaccctgctgctggaattgttggcccgccatttctctaagaaagcgggtattgtctgcagttgcgttcaccaaggcggcaatcgcctcggccaatgtgggaggaacccggaggtggatttggggtaacatcccttcccccagaagttcctgctgcatcctgtcctcgagtcctggtaggcatctgaggcaaagaacatttgaaataaatataaactgccagagaaaccttccattttacattactatcaaaagtaatgatacagactcgatgttatacaacaggatacattac

SEQ ID NO: 32240 - DNA, 628 bp, Zea Mays
acggtggcgtgtgggcgatgtggtggctgcgcgcggaagcctcagttccggttgaattcctcaccggattcatgttggtcgtagatccactttgactggaaacaacgatgtcgctgggcgttggacaagctccctccacggcttcaacggccggtaagtcagctacttacatactcaccatgtcatcctcagtacgggttgcggcttcggtttggacgaggctgacaatggcgccgccgtccttttgttttgcgtcgtcgggttggcaccggtggaagagagagaggaataagggaagaagaaagacaggagccgtccattcgttgatggacgggcgagattagaatgaggctatatcaagccggtttgatgtcttagccctcagatcgggatccgatggctcgaaatcagtcgcgtccatttttaaatcataacctttggccttcaatccgacagctaaatgcgcataccggttttgtgtggcgccagatatgatctgggccctcggtcttgatccaacggctggaaatcaccgatacccttcgcgagccatctttacataagagaccctatggaattttgaaatcaacccgtcatccatcctaagccaatacaaattgcagctgag

SEQ ID NO: 32241 - DNA, 293 bp, Zea Mays
tttctccacgcgattaaggttctcattgttgtgtagctcccagataagctgatcataaaatagcttccactcagcaacattctttggtctcaacgacaatatgcttcttattgccacaagggctaattgcagaccatcacatttctccacaatgctttcaccacactggcgtaactctgaagggcagatatggttttcaactttaggaaatgccttcctacaaaatacaagccaggaatcatggtcaccaagaggttctactttgatcttacaactatcctcagctagtgaag

SEQ ID NO: 32242 - DNA, 327 bp, Zea Mays
gttggattctcaggagttggatgaattcatcaaggatgatgaatttattccttcccctgcccaagataaaaagaaaatgcatctgagtaatgttgaggaagctagcaagattgctggtggtaaaaaatgtggtcctatggaaggcgaagttactgaaggagtgagaaggtgcagcaggttggaatcgtctgaggaagtgaaaattgctgataaagctgctgcaagagctatggctaaagatgctttcatcaacaaaggtacgtcctacaatcctttctcggttttgaatactgataatgatgttctcatggatgtggctcacaaaat

SEQ ID NO: 32243 - DNA, 382 bp, Zea Mays
attagtccaaaaatcaagggtctctttttttcattagtgagtgattaggagagcatgggtatatatatgtatagtcattttattatagaagatgggtaggttagggtaagaatagccaggggtaagaaagtttatggtgagaaagaactccttgttgggtggtaatgcctctgaaggttgagtttgtcttggtctcattgattcgaagttagtgtatatcatcggagttggggaatatggttaagacatatatggatgagatagactacatgaggtagatcaaggtcttgtttgatgttaggtggggattgtcaaattatgcaattcatcatgactctactggttgagttagatttcatgcatgtggctgagttggtttaag

SEQ ID NO: 32244 - DNA, 558 bp, Zea Mays
ttaaatgtgcaataaaaactaatttctaaataatattcctgattttatcaattatttggaccgcgcgccaaatgccagagacaacaggggcccaggtgcaactaatcctaagacttagatgacccaccaggtggactgcgggttcaaaatcttaaacctgaggggcatatctacaaaacggacacggcgaacgggtatcggggaatgctgaccgtcagatccaatttctacgcgcctgattagatccgtagatccgtgaactagaaatggacaggtactgcccgatcgaggatcgtcggcccagatctagtgttggtcgaatcaatacggatcgcccgatttaacaccaacgcccaggatcaatgcttcctgaaccggtattccatttctaatctcggtagcacctctcctatccaacggttcgcaaccgcacacccacacccgggccggagcagggcggcgggactgagctccacggcggagcttcaccggagcgcaagcgattcgaggcactggtgcgcaattcccttaaccgaataggcctacacgacacgggcg

SEQ ID NO: 32245 - DNA, 329 bp, Zea Mays
aatttcatgaggtgttctatgttccatgagtttccaatttccgtgccatcaatctgagtgagacgatatgatcccggccgagtgacttctgctactatgaatggtccttcccatagaggtgacaacttatgtcgtccctcccccgttagaatttggcggaggacgagatctcccactgcaaaggatcgacatcgcatggccttatcgtggtaacgcctcaaagtttgctggtaccgcgctgattgaattactgtgtttagtcgttcttcttcgagtatatcaatatcctctagcctagtagcctcggcttctgctatgctttcaaagac

SEQ ID NO: 32246 - DNA, 279 bp, Zea Mays
attcgcgccctgaccatcattgtgggtggtaaaagtagattagactgtggtcacgtcgtcctttgttgactttggcgccttcagtgaggcaggtggtcatatggactacatcagtttacgcgcgttctggggtcggagtggttgggcaaggcgggcatgtcccgaagcgttgcccgagaggccctcggcgagtcagaaatgtgtttcctgcccgaggttggcctcggacgagtcgtgattttaggttccgcgtgcccttggagcatgtttgcttgtgac

SEQ ID NO: 32247 - DNA, 714 bp, Zea Mays
gccggtgacttttcgccgggattgttgacggatcgccacgatttgtgcaccgtgggcagcagataagctcgggctggtaaatatctggcgcccggattgagttgagcctcgtggcggctaagctcgtcgtacttcctccccagctcatcggtcgaacggataacctcgccgccatcgagctgttgtcgttgcgcgccacgtgcttaagcactagtcctcatcgtggtgactcacggtgtgcatgttcagtgatcgtcggaccagtgcggctataaatagcccatgatccgcggcaaggtatgaacatcacgcacaccgtaagttgatccgaagcaaaaattcgtgctgcctctgccccctcctcccaaattggttgtgcacagtaaaaatagaaccccttatggccgtatagccccaagccccgccctcaattccactcgtgaacgccgctgcgccattttcccccaattcagtccgccgcgccgccatgaacaactcgtccgtggccagaccactctggtaaagctctgcatctctcaagtgttgttctagcagctatgtaggcacgtaaagctcaccgtagcatccgtttgaccaattcgggcgtagataattaagaacacggaatcgacaccgcggattccgccgtgcatgtggacaggccattctcagtgcgttcgggtcaaattgatgtgtgttctgaagccatcttag

SEQ ID NO: 32248 - DNA, 326 bp, Zea Mays
caacaatatgaatctgagtccaagcctaatccatgttatggttggagtagtagtctgagtagtactcgagtccaagtcacggtcgaagtggagtctgagtctaagtcgatgttgagagatctaatcgacatagattcggtgagatgaacattgaatcttcaaaatcttgatcatatagtgttgggattgtcgatggatctaggacgagcctgagattatcgagtgagtcagtgatgaatcttagggcaccaaagttgaattcctctcctagagcaaaactcatgtttgccacaaactctcagttgattagcgcgatgggtccctac

SEQ ID NO: 32249 - DNA, 655 bp, Zea Mays
tggagctagtgctgacccggacggtggttacgatgctggatctgctggagctggagctggcatagagacaaccacgaccgaagtggcgacaacaaacgctggaggcactagtggctgagcactgactggtccgacgacgtaggtagagaaatccagggtgaccgacctgagtggagagatggctagaccaaaggagtgtagctgggtcctgattgaatggctagcacaactgcagcctgaagagcaggagatggagcagactatacttgaggaataggaacaccagtgtgttgaaggatatgagtcatgaacgcccggtgctctgccctgactgtcaagggctactgctggagggtgtcctagcggttctaaatagtctagaacatagacaacatccgctcggacatctgttgctggatggctgcctgacgagcctgctctactgccagatgagcgtgctgctgagcgagagactgaagtatggcggccaaagtagggtcaatcgctggaggagcagcactggagccaccagcctcatgatcatgggaacgaggtggcacaggaggtggtggcagaatccccagatcctcatcatctgaagaggtgtcagtagtggcaccctgatcctcaaactgacggatggcctcatcgtcat

SEQ ID NO: 32250 - DNA, 341 bp, Zea Mays
cacctcggtctcatctcgctcccggaagcgggcaggtggaataggtggagcgaaaaggggagcgggaggaggagcagtggaagctggagtagtggcggtggtaggtatggttgaggtggtggatggcgcaggagtgactggagcaggcgaagtgggtggtggagtggtagtagtggcgggagtggaaggtgcggaggagccaggccgagaggcgagacgatgaactcggtaagcaatctgatgtgaagaaatccgcagctgatctcctctctcagcctgctctgctgctgctgctgctagagctgctcgggctgctctatccaaacaccgcttcttgcggc

SEQ ID NO: 32251 - DNA, 292 bp, Zea Mays
ccagaagcgctgccttccctacatcgtcgatggatggggcagccttcgaaatagctcgcttgggagccatcgcgggttgtttttcatagcacgaacggtgggcgccaaatgttgggaacctttccgtccgggcaggttaatccaacggggaaatggaaagtgtgttcgtaaggtttagtatggaatgccaaaagattttctcattcctgttgcgggcactgtacgggggtatttataggcactcgagtggccgactgtcccttgtcaaagacatttatgccctcgagtaccc

SEQ ID NO: 32252 - DNA, 600 bp, Zea Mays
tggcggactcggcccgagcgtggctggaaatttgaggccccaatgtatctagagctaggccgaccttgaagaagtttttgtcagaaatttctagggcacgtacatacatcttggcaacccaagaatccccaaggaccaccagtagaagccggataagaccgtgagggattacatctgacgcttctcacgatagtgcaatgagctgactaatctcgtcgatgccgacgttatcgacgcattcatttcaggaaccacgagtgagactctagtacacaagttgggggtaaaagcccacgaaccacaaatgaactcctggatatcacaactagtcatgcatcgggggaagatgtggtgggagcgatcttcgaccaccacaagaatggggccaaacacaataaagagaccgatggcagcaccaatagacaacctaagaaaagaaagaagaatggcaagcaacgacacaatgacatgctagtagccttgatgagccagaaggagaggaagttttcaacctaagaggccattaaccatttcgagaagattctcaagtgcgaacacaaggttgacttgtcccttgtggttcgggttgatgagtgattg

SEQ ID NO: 32253 - DNA, 376 bp, Zea Mays
ggatttggaggattcatttctgtttgctgttgcgtgattatctttcctttcctggtattgacaattaaaagcatatgggaatatagttttgcaaggaaacgtatttggtaagaagaatacataggccagtaactggttatgatctgaagattctttgacatagcttaatctgttgttttatatcaagctttgggtaactatatggtgtaggtagatcaaaatctctgatgagttaaatggaggggttatgcaaccatcgaatggttaaggtggttgcataaggtcaggttgttgtatgtggtctagtcttaattggaaccttagtttaacttggattaaaacatatttataagagtaggatccaatcttattttac

SEQ ID NO: 32254 - DNA, 332 bp, Zea Mays
accaagtgagaactaacaagtggacttactaatttttatccgtgtcattatgagcactagaagtaccatatttaattaacaacgcattctccccgataatcgatatcgaagtgttgttcacacaataatttgcattttaacttagacctcacatgagcactaatacttttcatccgtgaccacaaccatacgtatttagactacaacaagcaaatcatcgtgaccacgagcttaactaaagtcatctaacaagttggttaaccagtataaaacttagcaagtattttagacttcgcaactcaaaaacataggtgggagcaggttaattagtt

SEQ ID NO: 32255 - DNA, 288 bp, Zea Mays
cgacactatagtctttggaactccgtgcagactaagaatacaagcaatgtacaattgggcatagacagtaaccgggtgatctgtcttgactggcagaaaatgagcaattttcgtaagccgatcaactataacccaaatagaatcatacccttttgctgtcctgggcaatcccacaataaagtccatacttatatcctcccatttccatgttggtataggtagagattgtattggaccagtagctttcatatgtatggctttgacacgtctacaagtgtcacatcttgc

SEQ ID NO: 32256 - DNA, 962 bp, Zea Mays
cggctggctgtaggtccagacaaggtccacgcggccttactctcctgtgacacgcccgcaaggaaagagcaatggggatcctgcacgagccaggatttggacttcccatcaccgctaccatagcctggtgactgatcaagagcgccaggtgtgtgagtggagacatactgatcagcaaaaggggaagtaagtgccaacaagtctgtcggcatgcccaacggcagcccttctggacccaaacccgttcctagcattgtcccattaacaatctgattctcaagctgagacaccaaccccatgtcacaggccccatcttgaggcttcttagaatcaccatgcaaagagttatcttccatgacagtatcttctgctagctcctccagctgaaaagaatcatttccatgtttctcagagtaatcttcatcctctccttgctccttatcatctccgtctcgattacccatgttatctgtatctgtccacttccccgctatgagaaccttgtcaactttgaaaaaaatctcatataacccttcaccaactactatttcagcagactccggaatatgatttacattagtcactgccaccaaaatacgaaccacccccattttcctagtgtagcgcatatcaactttctgagtagcacccaaaatagtgcctattgcccataaaggaagaaaggagcggatttcaaaaggaaccccataaacattcacccaagccttctgcagataagaaataggctctattttttgattaacctcctgaatcactaagataccttctcctcccaacgtatgaacatatttcatagcaatcatacgttgaagctcaacactgcatgggaacggtactataaagccgtcagcatgcctttggaccgaccaattccacttcactggtataagtcttgagagctctgacttaacgagatcagcagagacattaccttccttcac

SEQ ID NO: 32257 - DNA, 312 bp, Zea Mays
tcagtaatagtctggaactccaacaattgttgcacttgttccttcttgatcatgaaacccaattgtcccccattcaggctttaacaagtctgaacctttggtaacacaccctccaagtggactctcttctgatcatagtcaaactccaaccattttacagcctagtgaactgacataggatagtggcattctagccagtccataccaagaatcatgtcataaccccctagtggaatgaatttgaagtccattgtgaaagtggtgccccccacacaaccatttacagtctggtaactagtgtttgctccaaag

SEQ ID NO: 32258 - DNA, 453 bp, Zea Mays
cgcgggggtcgccgaggggccctcgcccgcataggatggcagcgccagttccacccccgacgcctcgggcaacgtgctgtccagatcactaaggtcctcaacctcttcgtcatgcgccatctacagcaaaagcacacccattcagcaaaccacacatacccacacacataatcacacaaatgcacctttacctgatccatcgcccggtcagacctctcccggacagtctctcagtcgtaagggccccacatcctatcaaaaagagccgcagccgaccgcttcatcaccgggtcctcgacctggaagatttcgcgctcgaagccttcgtcagactggtcgaaggcctcgaagtgcccgcacccctcgcgggacaaggcattcacggccccctcgcaggtgacaagggaggcaaatgacatgaggcccgttacaatggtcgggagcacctccagc

SEQ ID NO: 32259 - DNA, 321 bp, Zea Mays
gcattatgaacaatgagatcctaatgacatcaaacatggaccggatggctgagattaattggtgtcaactagtttatactgatttgtgtgatgctggcagtcgttggcacaagaggaacagaacaaacattactgcaacagtatatggatgttcactcattgttcttgtaagtaactctctgtttaccaagtatatatatgttatccaaatatttgttttgtactaattatatatgattgattttctttttttgttcagatatactatcttgaccacttacaccaccctgcatcacctgagaacaagtatggtactccccg

SEQ ID NO: 32260 - DNA, 348 bp, Zea Mays
cgcgtgggagcgtggcagcgcgcgaaagctcgagaaatgcacgcgccaatacgtagcacgggtgtagcagctagggaaaatcacacgacagaagaaagggcaagacgcaaagagagagccaaagaggacctaggcgcctggcgatggcgaacttagctgtcggtttaggttctggcgacgacaaacctaggcgtctggcagcggcggacctaggcatcaggtggcttgctcgccgtctccctcggtcctcagctcaggtacctcctcgacttccccatcctctgctatcttcctctcggactctcccggctggcatgctcccttttctctactccctttgttcttgtc

SEQ ID NO: 32261 - DNA, 328 bp, Zea Mays
gttgtgtgcacactctgtttgtctaatttacatgcagtggcaactttgttgtagtgttgcggttctaaagtactactgtatttcagttcgaagacctgggagaaaattttggttcacctgaataaagtacaaacaaaaaattcaagaaatggccatcccgatgctgctttatttaatgcgtgaaatttggaagacattttatactaagactttaatcaaactgccatactacagattcagagaagtgagcactcaaaaccgaaacctaaggtgatatcaatttctagatttgagcaccagtcactctataagagcatggctaaaatcc

SEQ ID NO: 32262 - DNA, 426 bp, Zea Mays
atgaaaatgaaatatggcaccgggaggaatacgaccgagatcatggtgtgccagcacacaaccgcgcatctaggatcgaatcagcggcaccctctactaacagtccgatctagggacggtcgaggcgacatgacactcactcccctccctgggatcgatagcatgatcatcgacaagaggagacgtgcggggtctccgcgttcacccctcggctctaggccatccaatggcccccaaattcaaagtctccaatgttgacaaatacgaacccaagaaggacccaggggttggctagccgtctacacatccgtcgcccggctgctagggcaacaaaggacgtcatgacggtgtacctacccatcgttctagggcaggacacactacaatggctccgacatctacctcgacattacatcgacgattggg

SEQ ID NO: 32263 - DNA, 309 bp, Zea Mays
cggatatctctgtcgggatggcatggggatggagccacgcagactgttgtgttgcttcctgctttcaccattttagtacagggtgtacaggatatccgagatatgtcgtagtgtccttgagatgtggtgctccgtcatgttaagctatccgcagcctaactattataacttagggaacatgcaaacaaattcttccgtgcaaccgtgcaaacttataatctaaaacacattgatattgatccaaggggacgcgtgggagtagataatgttgcacttaaccacctgctcttaatcacacttttacaaatc

SEQ ID NO: 32264 - DNA, 337 bp, Zea Mays
cgggcatcaaagctgaatgagtggccctggacgcaccactgaaaccatggaagataagcactgtagtagtggagtccatgagagtaccatcagttattgagtacctgagcaattcacaagtagcttgtggatgttagacttgagcaaccaaagtgtcatggataaaagtagccacactgcctgaatctcataatgtcaggatctcttatttaccaacaaagcctctaaatctcatagttttgtgccgcttaactgaagtagactagggtcaaatggactttgttcctgaacaactagaataacttgggcagtcccagattcgagatcactaaaaacc

SEQ ID NO: 32265 - DNA, 293 bp, Zea Mays
ttttaacgaacaataattcatgttgtttgttgataggttggtcgcattattatggcaggggttgtggggcaatgaaaataagtcatttgaagcaataagaacaaattggttttatgtggtgcatgttagttgagaaatggtatttgaaaattttataggaatccaaaatcctaaatccaaattgtatatttaataattggaagcagtttctctcggtaaacctcagcttcgcttcttcatgtatattgtttaaaaaatggtagttcaacatgatatgaaatattcaccatctt

SEQ ID NO: 32266 - DNA, 358 bp, Zea Mays
ccgcgatgtgtgtcggggtgcgattcgtcccgcccgcttgggctcggcccccggggttcacgccagcgacagccacgacgcgtcttcggtcttcacaaacgtgtccatgactgccacgtggtttccccaattccacaacaggttatttgctcgtttccaatgaagagatcgatctcgctctcaccgcgacaggcgctagggctatcttcaccaactcttttttatctccttctattttaaactatactttaagaacaatattatatatacaatacaaaacaatgttttacatgatcatatacatgctctacaggacatagtctaacaatcatacgtgagtctattaatccgtgcccaa

SEQ ID NO: 32267 - DNA, 504 bp, Zea Mays
tgacttgttgatatccaagccaacacttcttttaggaagagagaatcccatttagtgacctatagtagtggctaacactcaagttaggttgactttgtcctcacaagaagataggattaacgagcatgtttggattgtgaggtgatacctaaggagtgtgttgtctctcaacataagcttgtggtggcgaacatagtgggttggatacaaggtgtaggcccaataggaacaatagactctaacccttagccacaatacatgactatgaagcttcagaagtttccgaagccaacacgtctcggctacaccattagccaaaacacaatattcggtcttcgcactcgagcggaggacgactggctgccgcttcgacgttaaggagatgaggttgttgcctaggaagttgacgtagccaaaagtagaatgacgtgtggccaagcaacccacccccagtcagtgtcgaggtaggtgatgagtactaatgttgaggagcatcggagaagg

SEQ ID NO: 32268 - DNA, 720 bp, Zea Mays
gattatcttgacattcctctcaaggacaccatcaaggggtggcgccttgattggtttattgtggagaaccactacaaatctctccccctcagtcagggagacagccagatgttcgcacacctagctggatagtgtctccaacctcttcggagaaaacagaggccaatgtgttgtttgtcgagatctgctcgctgaaggatagaggtctaactacagaagctgtagttgctgactttgtattcaagaacattcaacccttaaaggatagggcttaccccacttacttgtatagcggtgtcaaagattctacccgggttacgaacagaagaattcccactgaagatctgttgagtcgactggacatgatcctaaggggaagagtctcaaatgctggtgctcctgtggcctattatgcatggaacctgccaccacttaggccattctctgagattgtatccaaccctcccgctcgtgacggtagccagggtcttagagtgtgaccctctcttgaggatattgaggctttgattgctccacttcggagtcttcctgaggatgtgaggcagactcaatttgagatgccagctagcactgatgacgcggagatagatgttgtgcttagcttgctggccggggaatcatccgactcaacccacaccgagccgatggccatcaaaactaggcaagaacttggtgaagaggtggaaactcggaaacccg

SEQ ID NO: 32269 - DNA, 442 bp, Zea Mays
gagatttgtaagaaaagggaatacaaaaggattggtttgcaatttagcttttaatttctaaatcaagggtctctcttttttattattagtaagtgataggagagcatgggtattatatgtatgtccactttattatgtaggatagaagatgtctttagggtatatataggtttgggtaagaaagagtggggtaaagaaagactccatccaagattgtggatcttgactcatcttcttccttgtcgaggttgagctgttcttttcagaccttggtgtcttcattcttggggttgccaccagagttagggactttgattttgtgggtgacaagtaggtagagcagctagtttagtgggtggcttaggagttaaatgagattggtcaaaatttggtttggttgtttgcctctagattggttggataggtcatgtaacctattatg

SEQ ID NO: 32270 - DNA, 471 bp, Zea Mays
gaacttgcacgatctagtgctggggattgatccggggtggatagcttcgaacgtggcatgatttcgcgaacccggtcgaccgtggccggagatagtcaccggcggccaccgtgactcagccagttttgctgcggtgtcatccatgccccgattctacctcactgtatctcttctttacgtgtaagcttgcgctaacaaggttatccgtggccgtgaagtgatcgccggaccgccgcggctataaatagccttgtggtccacgacgaggtatgaacatcacacacattgagttgaatcgaagccaaattcgcgctgcctatgccccgtcctctcaaattgattgtgcacggtaaaactagagtcccttgcggccgtatagccccaagctccaccctcaatttcacccgagcacgccacgacgccgttttcccccaaatcggtcagtcgcgccgccgagaacagcttgtccgt

SEQ ID NO: 32271 - DNA, 325 bp, Zea Mays
cctacatttgctatgttgtgtagcatgaggaactgaccgggtccgttcctgcaattttttctccagattttgtaccgcagagagttgcagccgaagatgctttgaaggcaatgacgagcaacaactcgtaaccgattatgctagactagattgttagtcctctactcctctatttaggcacggcagtgttttttctccagcatgtacaaggaaacctgtagtactgactcattactgaattctatatttgatctgcatttcaggcagaacagctgatgcaccgtaccctgtggtttctgtccaatttatgatttattaccccgag

SEQ ID NO: 32272 - DNA, 444 bp, Zea Mays
gagcgaccggcttaagtcgtaaacgccttaagtcggtgcgacatgctcgcgcttgcataattcagggtgattactatacccaaccaacgaaacgatcgatttagcagcacaaactcagggcggatactatgtcgtactagcataacacactcaacgaggacgtaaagtaactcaacattcgagaagagttcagcaaaccacaaaaaatgaccatctcgatgaaaagttgtcctctgtttgaacgaaccaatattcggtttcactctctggttactgtgcaagagcatcctcgcgaggaaccttgtccacaggttcgctagaagcagacggattacccgaagtacccgatgcagcgagtacgttagctacaatgtcatcaagcaccacgacgtcgggcctcttcatcaaaattcggtcagcctagaccaccttatccatcgcttt

SEQ ID NO: 32273 - DNA, 419 bp, Zea Mays
caaacgttgggagaagaggcctcgtgacgaggttcacactgccggaccgcctgtctctcgtgcctgaggggcaccccgtggaggcaaacaaactttggacgacatcctcgatgcccaatgttcgtaccacaaggacatgcgccatacccttcggaactgcagagacttcaagcactccatcgggaacggtcgacccttccaacctctaccacctcccccaccacgaggaggaaccggagaaccacgacaacctcagcagcaggaagggggaggtggagcattcccccgtgtcgacggagaagtcaacgtcatcttcggtggacatgggtctcaagagagcaagaggcaacagaagctcaacgaccgttagatactggtggcggccaccggtcctcccgccccgtaccgatggtccgaac

SEQ ID NO: 32274 - DNA, 310 bp, Zea Mays
gcaccgcacaagtgagaatatggccttgcatctttcggcgacatgattggggctggcgatctctccaggttcttgatagaggagggggtgactgccgatggagcacgcacatttggtgcacgaggacgagggtagagcatgcatagcatggagccatggattgagttgagtgatgataacagtagtgtgctatcatatatacacctagggagggagacaggggccatgccaattggcatgtggaggccggagacgccatgccgagtgattggagggaacgaatgtcttctgctgccgcttgtgctatgac

SEQ ID NO: 32275 - DNA, 328 bp, Zea Mays
gctcggggtaagtatccagagacacagtgcatagtgactaatggacggcgggttctatttcgaataaaaagaggggttcaagtgtaaatcgcgcagccgaaggggtatggagctctgctggccgctggattagactttagcggccaggattagatctacttaataccgagccggtattcaacaggcgcccctagatccgaatctaacggtcactatcttatgagagcgagatcggatcgggtccgtccgatttcatccaacggcgcacgatcacaatccgaaaaggtatccctggtttctaatctcaaccactcatctcgagatcgac

SEQ ID NO: 32276 - DNA, 509 bp, Zea Mays
gcaagactcaggcaggataataccgggagggtgaaaagatcggaaggggagtggatttggtcgcgggatgaagcttatcaaccgcgcctatagccggcgacgtggccggaccaccggtaccgtcgttgagctgcggcgacctaaattatgccacgccgtggctctttactgtgcagtagtaaccgtggcatgcctaggcttaccatctcagaactgctgcaccggtgaacgccacgactgagccaccagtgacctttctctccggctgccagcgcgccattccaaaattgagtgccaccacccttggacactataaattggtgccccagcctgctccgctaagtaattgtgcacccagtgaaccagccctcacctccaatcgtcccccataactcctcaatttgggatttcccccaaatcagtcaagaaccctgccgtgtgtaagctcgccgtggccagctctccaaaggtccgatcacgccctcctcgctcttgttttagcactcttg

SEQ ID NO: 32277 - DNA, 491 bp, Zea Mays
aatgatttgtccttgttcaaaactaaaaccgatgctgtgtgggaaaggttaacacatgtatgttagttgatctttttatgttgaatgtaactataatatgctagatgtttttcttttgcatggttaattaggcaaatagtaaacagggggaaactaatacactggttctacatatccgacgctgtcaggtatgtttgtcggacaacaatttcttgcgcatggtctcgtaggacatgcccgacattgacctagctgacgccattaggctttctggcgggtaacagtttgccgcacaaagtcctgttgggcatgaccggacgtcagtcaagcttgtcgggcaccagtttgcggcacacctccttttgttggacatgctagttgattttttatgttgcatgtgactataatatgctaactgtttttttgcatggcttattaggcaaatggtgatggagtttttgttgattgtaactttgtgcctacagattcta

SEQ ID NO: 32278 - DNA, 481 bp, Zea Mays
aaagtttggaatgataaaagaaggcagtgccagtggttcaaggctagaaaagtccaaaatggatactggacaccctttgttggccaaagcagagttagtcgcatagtggacaataggttgactgggagcatatcatgcacaatggatgacaccatggtgttgcagggccgagcttgcagtctaaccaagtaatttgcttctgcattagtgggtccatagcctggtgctgtgggggtgtgtaagtggtagaaaatagatagcaacaactcgaatttgttcaatatgatctgggaggagcttaaggttgcttcacccctggactaggtaagggaaaggttatttgacattaatgacctgatgtcatatcaagtaaaatatatttgcaacttccgagtccttcagaatctaaccctgtgctgtgcatgttgtttttttctttccttttcggcttgtcattctgtagtgtacaatatgaactccc

SEQ ID NO: 32279 - DNA, 533 bp, Zea Mays
cgttcttgtctcgtctctggtctcttccgtgttcctcgcgttctagctttcgaggtggttggatttcttctccgtttcgtcctccggcggtagaagaagagtggcccctcctgggtcgtgattctgctgcgcctcagatggatccaaagaacaggaaccctagctgggatcgatgggggccaaaggatgctcctcagggttcacactcttggggggaaaacaggaatcatagctggagattaaagtcagccgctggaaaacccgagaacaaggatgacatcttgacttcttcctctggcgatgacggtcaatcaggtatcctcaaaacccgcccacccattttgaaaaaatagaatgaaatggtccgtcgctttttctgtcaaaagtgctatgcggaggggcatcatgctagggattgctttaaaactttatggtgcgacatctgtcgtaaagaaacccataacactgctagatgtgtccttcccaagcaaaacaaaccttgcatgcctattgttggtatggctgtggacggg

SEQ ID NO: 32280 - DNA, 398 bp, Zea Mays
cccactgggagttctgggggttctttccttttggatccatagcagcgattttcgaagggctacgaagaacaccagaacccagacgcggccactcctcctcaaccaccggaggacgaaaggacgaaacgcaccaacccccaccaaaactagacctcaccgaggacgggagagaccagaggtgcgagaggaaggcggcacagtgaggaaaagaatacgcaccaacaaaatccagaggaaaccctagcgaggaagagggttttgcgggcggagaagacagcgaacgaagcgactcacccgagtggggaagcagacgcgaagagaccggcgacacccccggactccatccgatccaaggaaaacgcgccttcaggggccgctccgccgaatacgtcgggata

SEQ ID NO: 32281 - DNA, 350 bp, Zea Mays
gtcattgcggcggcttagccatgattcttcttgcgctgatagacttggcccaccataacatctctcgtccctcgacaaacagcttgtcctcaagctggaatgatggatgagttgctcagaacgcttgactcccaagtggcttcttccagcagctgcccatcccattgtaccagcacgtgccacacacccatgtggagctgtgtgcacgacatgtatagtgacctggaaggcatgtccatgctacatcggacggaacatcggtggaacagctggaggtgtcccatggaacggcttgaacacccctccatggaagacatcgtggatgtgcgccccttctcgcagcatggata

SEQ ID NO: 32282 - DNA, 338 bp, Zea Mays
cgagaacggcttgtccacgagcacggcggaaaccgcggtgtcgatcccgtgttcctaatcacctatgcccgaatcggtcaaacggatgctacggtgagctttacgtgcctacatagctgctagaacaacacttgagaggggcagagctttaccagagtggtctggccatggatgagctgttcttggcggcgcggcggaccgaattgggggaaaacggcatcgcggtggctctgtttgaaattggggttggagattgaggctactcggccataagaagctgtgctttcaccgtgcgcaatcaatttgggagaaggtggagagggcagtgcgaatttgac

SEQ ID NO: 32283 - DNA, 359 bp, Zea Mays
gaaaacttttccaaaatctggggggtaaactgtgatcctctatccaaaatgatcttcttcggtacaccatgtagatacacaatccgagccatatatactcttccaattgagatcccttataagtagtcttgaccagaatgaaatgagccactttggtcagtctatccacaataacccaaatagagtcatatcctgctggagtgcggggtagtccaacaatgaagtccataccaatttcttcccatttccactcaggtttcttcaatgggtgcaatagttcagctggtatttgatgttcggccttgactctttgacacacatcacacttagccacgtgtgcagcaacatctcttttcaat

SEQ ID NO: 32284 - DNA, 574 bp, Zea Mays
ctcgttgtatcttccttggatactcttcagactacaagtgtcataagtgcctcgatctcctcatgcaccacattatcatctctcgacgtgtggtctttgatgaggaagtctttccccttattggctcctccccacctcccgatcttgacaccctcctggatgttgaccctatcatcgtccctcctctttctttaccctatgtcccgtcgacactgtccttgccacatgtggcctcatcgcctctgtatgtgccatgcatggccctattgcctttgctcgtgttctacgcggctctgccttgccggacacccatgattcatttcgttgttcccatgtgtgtcactaatgatgtgtgcagcctagtacatgggtcccctctcgtgatgtgctgctggtgtaccacctcgtcgccatccatcgagacccccgccacatccacccaatggtcatgtggcggtcggccgatattcttggtttcgttgactggctggtgttcatggcccccaccactttgtctccctcacctgtaccatcctgcagtgtgcttgctgacccgcattggtgttgcgctatg

SEQ ID NO: 32285 - DNA, 444 bp, Zea Mays
gttgtgtgtcatatggccaaggacatcgtgctagtggctttggttcctacttccctagcggaccatggtttccttctcatggtgattgcttcccccttcgggaccgatgatgtttggtgttttccataacactttttaggggtaaatgccgcatcaatggtattattctaagtatcctaaccctagtgttgtgccatttgctcaccatgtgtgtttctattgatgcaggatggaagcttggaaaacacgtggctcatggattccgattgttcgcgccacatgatcgagagctccaaatggttttccaacctcgaccccatgattggtaaggaatacgtcacattcgggcataagtcgaggggtaagtgaaaggtgccatagggccatttctacatgttttggtgattaaatgctcaacacgcaatcttggactaactacatcca

SEQ ID NO: 32286 - DNA, 451 bp, Zea Mays
gatccagattgacatgatgttgccttctcccaaaccgagaatcgtcagttgaccctccagcgggccccatgcagagtggaggctcgaggacgaaaaactctagggagacgatgggcgaacgttcgcctgagtttatcaagaagaaagaagggcatgtccccaccccaagtgggacgggacgcgttcaaggcagcacgatccgcgagggatagctgtcatgaccaattgggatgtggatgggtggacgtcgctcgaccgaaaaaagaaaggaaagcctactatcagggataagatctccgatccctaaggtcattcggttagtgatcgcgctggggaaaagcctctagcaacttcgtccgtcggtcaacaggaggagaaagggaaggtctgccctagaagcacacgtcctcggacgaacctcatggcaccgatcccggggtcggacgtggcg

SEQ ID NO: 32287 - DNA, 413 bp, Zea Mays
ctagaatcgtggacatgccccgccggggagtcctccaccgtgtgctgtgaccgcgccgccgttcgtgaagagggatgcgggtggccgacgtccattcattggatcatgaatggacaagattagggcctagggatctaatcggtatgattgaatcctaaccgttggttctgttgccgacgtatccgatcagatcgagagaaacttaaatcaggatcgtagatgagagatcggacgatcggtgcgtgcatcagactccattaaatcataaacgtagatctaggatctgagggcccatgtggcgtgctggttcgtttaaagatcaaatgaatcagtgctgtccaaacctaatccaatggccagatgctgccgataccccttcggctgatcaatttgcataagaaaccctaactttt

SEQ ID NO: 32288 - DNA, 2092 bp, Zea Mays
tcttgttaggtcaaacttgtttctgcatcgaaaccgcaggacacaatccattgatgaggtcagtgctgctaacaaatcccccccatctggtttgacttaatttcagctgtttttctctatgcacttgtagttccgttaattataaaccttgcaaatttgtaacgacatttagttcaaaaggtcactatagattctcgttcatacatctgcttgcaggctaggtaaggaaaagttagtcaaaaggtgcataaaacaaatatttatactttaggtactctgcatcacggatgtgtgtggcacaccattttttttatggttattaaggtgtcacttaagcattagaacagtcttggtcttgggtcaccacagaggcaaggacgcaatgcaaggtaaagcttcgtcgcattaggcatatgtggtcatcctcttgattccgccgtttccccctcatttttcttctgcccactcgattttgctcctggccctcttgtttctgctgctgttaacttgatttgccatctcccgcttgtcaaccccttgatttggatggggatctcagcgtctgtcgatctgagggggcacatattggtctgggaagtgaagggaagcagcagagaggacgagatagggaaacttaagccagaggggcagatgtgtaacagcagcactgaagaacgggagaggagcggctgtgctgaggacaagagagaggagagttgtgggcactggagtgaggggatcgggactttgtatgccaggaggttagaggcacatgtgctgcgtgttggactgggctagcccacttactcctttctttttctttttccgtcttccacggctctaacctgcactttcctttggatgtaaggtgttgcctccctcacgccatagccacttaagtgtaatgctaaggctgtagttggtcgccatgcctcgccttaccaccttgataacgatgctctttttagctgcaagaatatcttcaaccatccaaccaggcaaccactagaaaatcctactactttgcctgtagtccatgttaaacttaaatcaaactatcatgaactattgtacaaaaatatatccgttctttgttatactccttgtgacttgagtacttgctgaaattttgaaggataacctaatttgctgcctttttattaattatgaccagagcatggtgtgcaactgcaagccaccccaagatggccgaatgggttgtagagatggatgtttgaacaggatgctcaacattgaatgtgtcaagcggacatgtccatgtggagaacaatgctctaatcagaaggtcactgcttctcagttatccttaatttagttaatttcttctcttcttcattgattttgactgtaaaatctgtgaaacagttccagcggcgtagctatgcaaaactgagatggttccattctggcaagaaaggctatggattgcagttgcaagaagacgttactgaaggaagatttcttattgaatatgttggagaggtactgttgtcgtccgttattttccgtgtttgtgtccttgtacataacccgttattatgttagtgtgatgattgttgattatgactaatgagctcttttgactctatacttaatgatttctttcaggtccttgacataacatcctatgaatcccgccaaagatattatgcttgcaaaggccagaaacatttctatttcatggctctaaatggtggtgaggtatgctttttagtttttatattttgtccataaactatttatctttttcagatttactattttattgcacttgcatattacatgccaccatttttagtgcaagttctttcacttttgtattaaatttatattcagtgaagaactattcgatcacctccttttattcccttcccttttcatctagtgtattatgttgactttgtgtggtattcacttttcttaatatacccatcatgatgttgacaattgaatacattcttttaatcattttttttgtttcaactgttccaggtaattgatgcttgcactaagggaaacttgggccgattcatcaatcatagctgcagccctaactgttgcacagagaagg

SEQ ID NO: 32289 - DNA, 334 bp, Zea Mays
agattatcactacaaaacaataatcttacaggtaccattgaggaatggatcggaaagatgacaaatctacaatttttaacactacagtcaaacaacttcatagggaaaattccaccttcaattggcaatcttacacagttgatagatatcttctctgtagccaaaaacaatttatctggttttgtaccatctaacttctggaatcttaaaatatcgaagttggaccttagccataacaatttccaagggagcatacctgttcaatttagtaacttagaactcatctggctaaatctttcatcaaacaaatttagtggtgaaattcctggaactt

SEQ ID NO: 32290 - DNA, 433 bp, Zea Mays
tggtaattgaaattattgaaggagagagtaacaaaaatggtcagaacacaaacgtagtgtactagtctgctattgaagacgttaacgtttttgtgagatgggacacaaatggactgttatgaacttgcaaatgaattgttacctgcaaggaaaaatcaacttcgttactactgtaacttgccatgaagcttaagctgaggactgtaatctatcagttgagcacctctacacagtcatgttgacttgcgccagagcaaaaatttatgcacagtgtctctgctttcaagcgatattgttttcagttaacacctatacgtactatcaactcatagaaaagttaggcctcagctgtggttactagtcaatacatcaacggttgtaacatgtagtacatgtctggtaaatatggcgacatagtaagtataaacagaag

SEQ ID NO: 32291 - DNA, 383 bp, Zea Mays
caccagtaccctttgtgatgcgacgagtagccaagaaaaacacacttagcggaacggggatcaagtttgtggctagtggtggcagataggttgggatagcaagtgcaaccgaacacgcgaaggtgttcataggagggtacagttttgaagagggcgaagtgaggagtagaaaaatgaagggtcttggtgggtagaacgttgagaagaagtgttgccgtgtggagtgcttcaacccagaaggttggtgggatgctggcctgaaagagaagagagcgaatggtgttattggtagtacggatgatgcgctcagctttaccattctgagatgaggtgtaggggcagaacatgcgtaggaggacaccgtgggtgaggaagaatgttcg

SEQ ID NO: 32292 - DNA, 631 bp, Zea Mays
gctcccatttccactctagaatttctaatggcttcaggaaaccagcaggccgcttatgctcggccttcacgcgctgacatacttcacaagcggccacatacttagaaacgtcaaccttcattcgcttccaccagaagttttgcttcaaatctcggtacattttggtttcaccaggatggacggtgtaaggcgttttatgagcttctctcaagatatccatcttcacctctgatttctgaggcacacaaagacggcccctgaaacgaaccaaatcattctcatcaatggtgaactcccgtggtttaccatcaccaaccctctttcgagcttcctgcaatagacgatcctgctgctgagccgcacgcactctctccatgagagaggattgaataagcatccgagtctcctcgctagtggtaccgacataacacaaagcgattccaaaatggtccagatcagcgatcaacggcaaggccacctttggaaccccggacctgctaagggcatcagccactacattagccttccccgggtgataatgaatggacaaatcataatctttaatcaattccagccaccgacgctgcctcaaattcagctccttctgagtaaaaatatacttgagactttt

SEQ ID NO: 32293 - DNA, 359 bp, Zea Mays
aatttttttgtttgttcaaggtcttttgtggtggagaaggtggagcccttgatggcaatgctactggtagagacaatggtcataaagaggatgagggggtggagaaggtggagcccttaatggtgatggtggtggtggggacaatgggttagaaagaggataagaaggtggcaatggtaggtcaaaaggaagagactgggtagcaggtgaagattgacgaggtgaggatggtttgttagcaataggatctgcatgtgatgacccttgagttagggggcatgagaatatgatgatggtggctcgaccaattggacatcccatcgaggccaaaggatgaaattcttcatagcctgttcaag

SEQ ID NO: 32294 - DNA, 653 bp, Zea Mays
tccttttatagtcgcaaggaggaggcccacacatacaggtgtagctacgttattgttgtggtcgtcggaggcgtgtccgagccctggagcagcatggctgggagaacgacctttggaggaggcgtgtccaagccatgtagcagcatggctggcgggatggcctggtcctttgtgtcgtctttggtcagcagcctgacacatgatccatgttacctgtcctttttgaggtagagagccgaggctaggtcgggagcatgagcaggtgtctgagcccatcctggacgagacatttgttgagtcgtagttgttaaaacagtgcttgccatggtgaaaaagtgtggtgatctggtctgggcgtcatccacgacggcggaaagtagattggacaacagtcttgttgtttatgtagccatcctatcttcagcgtgttttccgggatagcaggcggcatcatgtgcttccctgcgaagcagttggccgaggctgggctcgggcgaggcggagatttctctcgaggccgaggccgaggtaaaacactacacgtagtcatgtttggagtggttgaaacagcggtcggagtgggggaagaatgcccagtatttgcgctccaaccatcgttgtggacggtaaaagtagattagaccatagtcgtg

SEQ ID NO: 32295 - DNA, 756 bp, Zea Mays
aagattaatggaggtactttgatcggttctgtttgtcctcctgaagaacaaaaaacaaaaatggttttgtagcattcacttggaaacataaaaaagtgcatcattatcaggcgtttttttgtgacagcaaaggttacactaaattcaccccaattttacgaatttctgcttgtaaaggccccccttgtttacagctctgcttatcatcattgtgtttgtctatctcagcaagccaccctttattccaggtaatattggtagaagctgctccacttgaaactgcttgcaattctattttgcaaaacctttccaaggcctcttaccgtttgccattctgaaggatctactggtaggattattttcaagctatttggcacggaacgcacaatgcctaggaaccttcgtgatgatgtatgaccattttcttattttagcaagacacattgcagatgcagccttgttttgccctgcattctatgcctttcttaagattatgcaccctagctctctacatagtgtttttcagtcctcaacatgtacttagcagtggtaacacatcatgatccaaatgtttcttcataatggagtagttctgcatttttagcatgtctactgggatgatgaaatgaggaaaaattgtctaaactgtctactatattgtataccaagatcctcaccttttaaatggcttgtaggtctgtcaccaagagctggagttcaattctgcattttgctgcattttagatggcctgtaac

SEQ ID NO: 32296 - DNA, 339 bp, Zea Mays
ttggggcaccgagattaatcttcgaaaacatagcagaagctgaggctactagactggaggatgttgatatactagaagaagaacgattgaatactgtgattcagtcagcccggtatcagcaaactctgaggcgctatcatgataaggtcatacggcatcgatccttcgcagtgggagacctcgtcctccgtcgagttctaacgggggagggacggcacaaattgtcgccactatgggaagggccattcatagtagcagaagtcactcagcctggatcatatcgtcttactcaagtggacggcacggaaattgggaactcgtggaatatagaacatctca

SEQ ID NO: 32297 - DNA, 366 bp, Zea Mays
ctcggaacgggtactaaaattatctaaattttcgaatacggatacgtgtattttttgtcggtaaggatacgggtactacgcagatattgaactcccagatacgggtaggatacgtaatcgttgttacccagcaactacccggataccctgggtcggatacgggtaaaattcggtcgggtacccgggctggcgcagtacagtgtacatcggtgcccatctgccttgtgcgttggcctgctacagtgctggcccaaagtccaatggcccattatcaatacgtgcccaagcggccaagcccaaagcaaatctgcaaaaggccaaaagcattaggttctagggtttcacttgctatctggtatatcggac

SEQ ID NO: 32298 - DNA, 515 bp, Zea Mays
tcatcaccccgtgtggctggccaacccagtcgtcgtgccgaaggccaacgggaagcttcggatgtgcatcgactacaccagcctgaataaggcatgccccaaggacctgtatccactaccgcgcatagattagattatggactctacttcggggtgcgacctcttatccttcttggacgcttactctggtttccaccaaatccggatggctaaggaggataggaggcataccgcttttgtgacagtagatggactatactgttatgttgtaatgccctacggtctgcggaatgccttgccaacttttgtccgggcgatgagcaagaccttcggggacctgatccgggataaggtggagatttacgtcgatgacatcgtggtcaagactagggaaggatcgggtatagtggaagacctgaccctggttttcggcaagctgcgggcaacccgcaccaagctgaacccggagaaatgcatcttcggtgtctctgcagagaagttgctggggttcctgg

SEQ ID NO: 32299 - DNA, 703 bp, Zea Mays
tggcgattggcgtccttatcgccaatcatagtcagggctatggaggaaaagacagcgaagaaggcggcgtcgaacaaatctgaagttcatcccttgaacgtggtcaaggtcacgatggaggaccttacagaggcggaccggaaggagattgaagaagaaatcgcacgagagatggaggagaaacggaacgagagattggcttgctttcgaaaaaccaagaatggtgtgatcaaacagattggtggggcaagcacgtctagcaagaaggtaagttcatctgtcacttgtgaagaactagctcacatgattgataccgctgtagctagcaaatatgggactgatgtcacagaaataacacacatgatttctgagggagtgcgcaattcttttgacacatttagatctgagtttaagcaagatatgaataataataatatgcctagacagatccgatatatagttcaacaggttcaaggagaattgcagggtaagcgtgtagaaaatctttcatatgcgcctagttataacggagcagttgcgcgtaatgatgtaaaccaaactgttaatgagaggagtggggattcagtaatgaactttaacctacagcagccatattatcagagtatggcatacgggccatctattccacctatagggaacaagatcccacaaggatttgttccaaatgattacaggattgggg

SEQ ID NO: 32300 - DNA, 585 bp, Zea Mays
gaaggctatttctaaataatgaacaactcaccaatcgtttagacgtctgctaggtgcaaaggaccttagcctctttcgagattgatcccctatgaccccggaggtacacgttgctgtccattttacgaattttcactttatttaaaaaaacaagggggctgacggtgggccgctacaaggcctggaggtcgagcagcccaccggaaagcgctggtaaaaaaccagctagggcacctcctgcgtgtgtccagaaacaggaacagagagcggcggcggaggctgaacggcttggccggcttgcacggtcgcctctgtcgtttctcttagttcaacggccttcgaatttggtgctcggtctgctccataagtatgggtgcgtttcccctctctctggcgctggctgagcagtctgatgttcttcttcctctcttcgtgtgggttgctccggtgagaactggaactaccagttcgttccctggtattctggtggcgattcttgctgggagtggttcaaagtgggaggaagtggtgctgtgcttgcgcagcgtgatttacctctgctctgttgccagaatcatgcacttc

SEQ ID NO: 32301 - DNA, 278 bp, Zea Mays
aacattcgcttagagactttgctagagtacactacaactttgaacacagagcatgatgctgccctaatagagcttgactacataaggaggaagtatgccagactatagacttagctggataacggaggacaacaccaaccagatatggatccagcaaactcaccagagcacccagctctcccataccatcacttcgatgtctgtacccatctaggtttcccttgagatgtaataggagcagggctaaggaataaaagtgtattagaacaatgttgcta

SEQ ID NO: 32302 - DNA, 958 bp, Zea Mays
accaaatactgtgaggcgtattcggagggaacttctgatgatgaacatctttatacgtaagacaggtgcatcctatctcagtgacgagctcctcaaggcttggatcacagaagtgagaatactggcctaccgtgtcgagaacataatcgacaacttttcataccactctcttcaattcaagcaagaccctaaagggaaaaagttggcgaatggattaagctacggtctagtgtttagtgggattgctgctgatctagctcagatagagaaggaaatagagcatgtttcgaagttgaagaatctctggttgaactcagtccatgagcttcttcatactcaagttagcagtgctgaacagcaattccctcaatacagtttgccccaaattctaaaagatgaaaacctggtggggttaaaggaagaaagagagcagttaaaggaatggttgattcccaatgcacctgtcaacatgacaaatataccagctctcaaggtggtaactttgtcgggtatgggtgggatgggaaagaccaccctgctcactagtgtgtatgataagctgaaagatatcttcgaaatccatgcttggctcactgtctcacagacatacagaagtgtcgatactttgctgaaggagctactaaagattgttagtgcctctgagcacacaactcttgttaacaatgactatcagaaggaagtgattgtaccagttgatattgatataagagacaagaaacagctgaaaccagatgtcatcgacaagatgggcatcttagacttgaagagtactttaaaagcagtcctgaaacataagagatatatagttgtgttagatgatgtatggaatcgttgtgttcacgatggaataagcgatgtgtttgaagattgtgggaaggaaagtcgcattgtcatcacaacaaggaaacaagatgtagctgcacttgccacaccaggt

SEQ ID NO: 32303 - DNA, 463 bp, Zea Mays
cacccaaccccgcggcctggtcaagggtacgctctatgattctcatcctgctccattcaatgatgatttagatccatggcggggcaacgagtgggatgggggccatgagggtggacgttctgggcaaggaaatttaccacgtgtgaattttcctcagttcaatggagacaacccgcaattgtggaaaacacgttgtgaaaattactttgatatgtacgacgttgatccgtccaagtgtattcgtgtcgcatatatgcatttcgagggccgagcagcttgctggttgcaatcggtcaagcggagagtgcgctactggtcctggcaggaattttgtgcccaaattcatgaccgctttggtcgtgaacaacatgagtcccttattcgccatctctttcggattcgtcaaaccacttcagtagcagattatgtagaacggttttctactttggttgatcacctatcc

SEQ ID NO: 32304 - DNA, 531 bp, Zea Mays
aagtggaatctagtgtggtggagaaagtgggcgcattaggtgtggtggaaggctcaagaggggcaggagctgacatagtggaggaaggaggagtggtgactgggtctgagggatcgaatcgagcaggggtggagcgagccagagacgagaggcgatggactcggaaggcaatctgatcggaggcaatcctcaacgagcatccttgctctgcctgatctgctgctactgcggcggcaactgttgcacgagtggctatgtccaactgtctcttttcttgccccctgctgctcaagatatactgccttgcccttgtcatgtctgaaagggcgaggagggttctgatcatctcctcccctgacggtgtgacattatttgtcttcaccatcctgcactgatcaatgacacgctacacgataatgaggaaaggtaagcaagtgcaatagagcagcaggtaagtaaatatgtagaatggattagctacctgggtacgtctcgagagagaataactaggcaggagaggagtctcgcagg

SEQ ID NO: 32305 - DNA, 286 bp, Zea Mays
atcccttatacgagaagcttcccctgcacgccgatgctatgcagatctcggatgtcagggttcaagaagattgctccagcagcaaacattagtggctccagtactatatccattgtgttcttgggcccacatgtcagggctcagttcccttgtacatgccccccttagctataaaaggggaggcatgcaatgttgacagggggctctcagacccaacatagactctcagctctcaagcttccacagcaatccaacacacagtggagtagggtattacgctccggcg

SEQ ID NO: 32306 - DNA, 405 bp, Zea Mays
gcgagcggttagaagtaccgcgtatagcagtttctgaacttggggatacttcatttttcagggcccgagaacatcgctgatgaagtagaccgaatgctgcaccgggtatgtatgtccttcctccacccgctcgactactaatgcagtgcttaccacgtgagtcgtgcaggagatgtatagcaacagatcttctgctggctgatttggcgtggctcggcgtggtggcttgagtactggtggtgtattcatgtgcctctttggtccactgaaacttgtccacctttttgagcaatttgtagaatgacatgcctttctcgcctagccttgatatgaacctgctcagggctgccatgcatcccgtaagcctctgtacctttttctgtgatcgtggcactttcattctca

SEQ ID NO: 32307 - DNA, 651 bp, Zea Mays
gttttaccctcactgtcggggtgccttgcgcatcggaggactgggaattcctcaccgtcgttgggcctccgccgcgggactgcgccatcgcgtggcctgggaattcttcgccgcgaatcgaggtaatcggtgtaccatcttcttcgcttttcactggtcgaggtgtagggtagttgagtttggggattagagctccgaggcgtggaattaacggtagtccggcgatgttccgccgtgttgggcggcggcgccgctgttctggcgtcgggagaaggaagatgggcgatggccgttggatcgtgaatgtgcggcccagattagcttaggcataccccttcgcgtgtgttagatcggggccctagatttctgatcgggcggacgcagatcgatctggtcgttttaaatccgaaccagtcatcagggatccgagggcctgggttgaacgcggatgtgtaaaccgccgggatctaatctggtgcgtccgtttggaatcggacggccagggtcgttggataccccttcggctgggctgttttgcataagagtccctcggtttacttgaaatcaacccgccgtccaccctgtacagcgctctgagtcataggatattttgccgtctagcccctgcagtttcctataattgaggcccag

SEQ ID NO: 32308 - DNA, 654 bp, Zea Mays
gtaaccccagagcatggcgcggatcatccatggctctgttctgcatagctgggtgagggtttcttgaattggactaccttggattgaggaacacgacagaatagaattttccatctagatggtttgaaattcatatatatcagttcatatcttgcaggtggatgtgatttgtctcgtgcggatgggaaatggtcgtaggatcctttataggttattattgaactgccccccacagttaattggtgggtcttgtctattattgttaggtccttcttgcattccattttctactaaatacaagggcgcaggtgaagacatggattgatgctttagctctaaacgttgatttgttttgaataggcttgcttggtctggcgtaatgttagtcagggtattaatcctcatatggagactagagtccccatcaagccatctagtccggtacttgaacttacatatgctgtttttctttatttggcatatccacatatcccgattctgtaacggttcgacaattccattaaatattctaagttggttatgcggtatagtttatagaagtgcaccttccccgtgtgcctggatgttactcctgaaagatacttagctgctggactgttaattcatttaacaaatatcacaagatggagttgc

SEQ ID NO: 32309 - DNA, 482 bp, Zea Mays
gcgtgctaagtgcgcagcacgccactatctggatggtggttctcccgcccctgtcggaattcagcacccttaccgttcaccgccccgtggtcgcttcgactatggtaccctagactgcaggacccggatagatttggatccctagatcgacagattcggagtctgtaataatgctcagtttagtgtcttagtctagtcagtcttagttagagttagtttgcttattttatgtttgatgcttgttatgatggacatgtactaaagttggatctttgtaatgattgtcaccaaggtgtgggtatcccctgcaacttggtgtagttattaataaagtcagttatttagttgggtaatctatttgtttccactctcctctttatctgagaagctaacagtgaagttggtcaatttttcagttctatgaagatcttctatacatctcttcttatgctgaaagactgcagagtcagatttgatatatg

SEQ ID NO: 32310 - DNA, 623 bp, Zea Mays
tgctagacagagggagcccacaaccacctgtggcaaaacacatgcgtaaacaaatcataagactgcctctagccgcctcagcatttgtgcatcctggcaagccccacctacaccctctgccctgagacaaccttgtcgtgcacgccgagctgctatattaaagtgttgggttgcagatcttgaagtgatacctcagtgcagaaagccactccggcaagacctcatgcacccgcctgagcacacaccagtcacttgtcacagtcacaactaaatgaatgccccaccatgagccaagttaccctgccaacctcgggatgttgcgactgcactgtggcaacgtcgccactcatagtacgtcggtcaagactccctccattataaattgtcgttcctccgcctataaatattgatgcccttgccgcggaacctcacagtccagccaccatatcattgtcaccccacatccgaacaacgcgtgccttactcttcaaaccagagaacaagccatcaccgtcgatttgaatcgtaggtgagcatgccataatcttcgacctctccctccatcgaagtcattcttaaactatagaagttatgcccttaccatcgattaagacaactttccc

SEQ ID NO: 32311 - DNA, 548 bp, Zea Mays
ggcatctaccactgacatgggggcccacgcaccagccatctctcaagcacacgtgcgtgctactgtcttcgctggcttgtgggtcgtcccgtcaggcgcgcgttacccggacctccactcactgatgatgcgggccccgtctgtcatcccttcccccttcgttgtgacacgcgagcagaattctgtggggatctcaacggaatcggcaggtgctgtttcgtccgcccgggattcttgcgccatgatccgctctcttcgcttgggctgcacctaatatctggtggggtcaacctgtcaaccctcctcccgtgaccaccacatgcccaacggatttctgtttgagaagatcgtgccggctcacctgggaatcctaccgaccggatgcctttgggctcttataaattcctgaccgcctagtcgtagccaccgccgtatgcatctgtgtcgagatgagagagaggaatcgaagggtgagagagagaccacggggtagaaggtaatcccgtgcgcggccgtgggggcgattctatcggcgccatcgattcagt

SEQ ID NO: 32312 - DNA, 666 bp, Zea Mays
tcaggcgctgaaggatgccttagtctctgctccggtcttggctttgccaaactttgctctgccgttctgtttggaaacggatgcaagcaatcagggagtgggcgctgttttgatggggtcatccaatcgcttatttgagtaaggcattggggccaaaatctcaagggctttctacttatgagaaggaatttttggcgatccttactgcaattgatcattggcggcattatctgcaactgaaggagttccatattgtcacggaccatcgcagtttggctcagctggatgaacagcgtcttcataccccatggcagaaaaagatgttttctcgtctgttgggccttcaataccgtatcatgtacaagaaaggctctgaaaatggagcagccgatgcactgtccaggcatcctcagttgacacagacctgtctcgctgtgtcctcttgcacaccgcagtggcttacaaatattatggattcgtattctcacgatgatatgtcacgagaaataatagctaagttggcagttgacgcagctgcagttccacattactcttggcatgacggtcttttgcgttacaagaatcggatttgggtggggtcagatattcccttacagactcggctgattgaggcttttcattcaacggctgtcggtggtcattcgg

SEQ ID NO: 32313 - DNA, 463 bp, Zea Mays
ggtcactgatgtaggctcaacaagaactatgttggtgtcgggcaatgggggaggaattgggtgccatcaaggagaatgattcctggacactcatggagcgcacacctaggaggcatggtattaggctcatgtgggccttcaaggtcaaaagggatgagcatgggcagtggtgcgacataaggtgcaacttgtcgcgaaggcatatgcacaacatcatacgatcgactacaacaaggtctacgctcctgtggcgatgcgacataaggcgcaacttgtcgtgaaggcatatgcacaacgtcatgggttcgactacgacaaggtctacgctcctgtggcgtgtatggaggttgtgcacttgctgttggtcttagctacacaagaaggatggcaagtccaccatatggatgtcaaaatagcatttctgaatagtaacctttaggaggaggtgaatgtgcaacaggcg

SEQ ID NO: 32314 - DNA, 300 bp, Zea Mays
catttgaactcgactcacaaaactacacagtcttcggtcacatcggacacatttggtggtgcaccgaacatggcactattcacttgcctggtcagaagctattatgaaaagttgtcaatgtcagactgttgcatatggcactagatatgtctgacgtgccgccggagattccacatcatcagaccgttggatctgcccgttgtcgaccatttgatatactatgtatctggtgttacaccagatacgtccggtgcaccaagtcaaaactgctccacaacatgttgtatgtatgccttgccc

SEQ ID NO: 32315 - DNA, 398 bp, Zea Mays
ggtagatgtccaaaagctcctcatttttattctctgtccatgtgcaagaaatggagactaggtgccagctaatcataacaggttggtgttccatgtatgttagtgcgacaaggttgaggccacatttgttagtagaagatccaatgcatttgaagatggtgaaaagggccacatacaatagtgccaaattggggaatggacggtgggcaaccaaagttcgagtatgagactgaagcttgaactaaaccttttctccatctaggaagtgaaaatctcagacatgtccaaaatagcacatagtttcatcttgttttgtgctcttaacaacaaatctggaaattgttttcgctcctgtagcatttcagaagtcacttatgtgtgccttcagacaaaacagg

SEQ ID NO: 32316 - DNA, 309 bp, Zea Mays
ccactctcacgatcgttttcttcaccaaatagcacaaccgctttctcttccccagtcacgccggtgagaaattaaccctccaccagcgcctccaccttgacttgcccccacgccctacaagaagtgccccatgcccccaaatcctgcccaaagctccattcgctctcctaagccctctctcgctctgctcgcatgcgtcacccacgttcgccgtggttagagccacctagagcacctctatcatcgtcgtgtccctcctcaagctccttgtcaccccgtctcgtaaccctagagctcactgcattgccc

SEQ ID NO: 32317 - DNA, 361 bp, Zea Mays
aaccagcagcccgacaaacgctgggagaagaggcctcgtgaagaggtccacgccgccggaccgcctgcctcacgctcccgaggaggacctcgcggaggcgaatgcacgctggacgacatcctcgatgcccagtgcttgtaccacaaggacatgcgccacaccctccggaactgcagagacttcaagcattccgtggggaaactagaagacaaatttgagggcctagattttcaagcattccgtgcagagacttcaagcattccgacccttccaacctctacctcctcccccaccacgaggaggaccaggagaaccgcgacaaccccagcaacaggagaagggaggaggaggagccttcccg

SEQ ID NO: 32318 - DNA, 415 bp, Zea Mays
ctgatctgaaccgtttggggctcgctttgtgctatgttggcaccactagtgaggagattcggatgcttattcaatcctccctcatggagagagtgcgtgcggctcggcagcaggatcgtttattgcaggaagctcaaaagagggttgcgatggcaaaccccgggagttcaccattgatgagaatgatttggttcatttcaggggccgtctttgtatgcctcaaaaatcagaggtgaagatggatatcttgagagaagctcataaaacgccttacaccgttcaccctagtgaaaccaaaatgtacagagatctgaagcaaaactttcggtggaagcggatgaaggttgacgtttctaagtatgtggccgcctgtgaagtatgtcagcacgtgaaggccgagcataagcggcctaca

SEQ ID NO: 32319 - DNA, 485 bp, Zea Mays
atcgggtgttcggaccattgatacggggcgggaggaccggtggccgccactagtatctgacggtcgttgagcttctgctgcctcttgctttcttgcgacccatgtccgccgaagatgacatcgacttctccgtcgacgcgcgggaatgctccgcctcctccccttcctactattgaggttgtcgaggttcttcgggtcctcctcgtggtgggggaggtggtagaggttggaagggtcggtcgttcccgacggagtgcttgaagtctctgcagtttcggagggtgtggtgcatgtccttatggtacggacactgggcgtcgaggatgtcgttcaatgtacgttcgcctccgcggggtgctcctcgggcgcgagaggcgggtggtccggcggtgtggacttcttcgcgaggcctcttctcccaacgcttgtcgggttgttggttcgcgtcgtgtcgtggtgccggcggtgcaggctttgctcctccg

SEQ ID NO: 32320 - DNA, 331 bp, Zea Mays
ctgactttggagtgtcgtccggtgcgtatcttggagacctcggagcgtgttttgaggaagagatcaatcaagtatgttaaggtcttgtggactaattagtctgagcgcgaggctacttgggagcttgaggaacagatgcggcagaagtatccggaacttttcgttgagggtgagtgttattgattcattattttattttttctcttttgtcgttccgatagaagcgtcagaattcgaggtcgaattctttttaaggggggtagagtgtgaaacccagtttgcaaagaagagtagtggaggtcattctttcttttttattcttctctctttc

SEQ ID NO: 32321 - DNA, 418 bp, Zea Mays
ggcctttataattagtcgtctccctcccaacgactttgccgaatgtggcgggggcatgccgtgaatcccagtgtccgttgagggaccctacctgacttcccccttccacataagttgcgccctctcctcttctctcgtatacctcacgggctcaactcggtcgcaaggttctagctaccaccaccgcttgactagaaggtccgcatcgccccgtgggtaccacatcaaggggacctcgttgacagtctgacgctggtcgttgcaccccctgggtgactccaacacccccgctcagggcgagttgtcgcctagaagccatcaattgcacaccggagtccctgcgccccgtggatctgcataaccgcgagaggagaagaagtggccgcgcggctctcgataataagtccatccatacttc

SEQ ID NO: 32322 - DNA, 372 bp, Zea Mays
ggaaaagataccgctggtacgatccttgcagtggaggatgttacactgcctgctgtggttacgaccataccgagaggtctgaaggttgatccggcggctacagtcgtgacaccttcggcaattgtggtggccgaagataaaaattggttcttcaaagcctacgacagcagaggacatgggtaaagggcctacaaggaacgaagatgccaagaaggccattgaagatgacacaccccttggtgaagggcccttcgatcaagaatttggcggtcgaaagtacatggttcatcaagcggctgggaaaactatgggtgccaagcagctaaccgaggctattggctttgccgaacaactgggtaccctttgagggct

SEQ ID NO: 32323 - DNA, 538 bp, Zea Mays
acctaagtaagcaccgttgataatcctccacgtctggggtccacgggaggccattggctatctgctccagtactcctccaacttcagtcggcgtgttcaatgctcgggcgaagtcagggtacaagtttcgggcgagaagcatattctcccgttggagcctagcatcttgttcagctagttcccactctcgttcttaagcctgacgacgatcgcgggggcgggagttgcgtcgttctcgatgtgttctttcgtcgggggtttcccccatctctgaggcttcgtcgcgagagacaggttgtgtcgggtcccgttctccggcttcgtgatgtcgtcgcacgttttggcacctatttctccatcgccgagcatcacgctggggaggttcctcccccagcatggtgggttcattgttagagatgggtgatgactccagtctcccctgaatgaagaggacgttggggtagaaaggagcaggtacggtggtgtgcttcttctcatcctcctttgagggcggaggtgttgggaggattgctcgttg

SEQ ID NO: 32324 - DNA, 591 bp, Zea Mays
ggtgttcatagcctgtacgcgctgggggacgccttcgtcttgacaatgaatggaccctcccatttcggctctagcttgccccgtgactctgtccgggtggttcggacgagtacgaggtctccttcgttgaactctcttgggacgaccacgttgtcacgccagaccttggtttgagcttggtatttgttgaaggcctgcatggcgaggacgcggtctccgtcgatgaggtctttagacgttggttcgtcgatgtcggggactactgatgtgcttgttcggggcgacccatgctttatctcctgcggcgtcatggcctccgatccatataatagacgaaaaggtgtgaatccggttgcccggcattcggtcgtgtttaaggcccagactacttcaggtagttggttggcccatttacccttcttgtcgtcgagaagtctttcttgatggcagtgaaaatcttgctgttggcgcgctcgacgatgccgttggattgcgggtggtatatcaaggcgaaggcaggcttggtgccgatggagaggcaaaagtccctaaagtcctggttgtcaaactgtttgccgttgtcgactgtga

SEQ ID NO: 32325 - DNA, 310 bp, Zea Mays
gtggcgtccaatttgaaggaagtgtgctggcagctggagagaggggaagtcactggcgcaagtgttatcatggctgtcacaggctaagggtctacgacggtcaccggtgagctattacggctggtaacgacgtggtgaaagggtcactacatggcgcaatcgcaatgaatggtgtacatcccgacgacgaccgatcgaccacgttgccggtaagatgggcgacaaagcggccacagtgctccgagttcatccacggcgagatcttttcaccaggggtcgttatccgcgcgttacttggcatgaatcgcag

SEQ ID NO: 32326 - DNA, 570 bp, Zea Mays
atcagattaaacttatgaacaagtcattatatagaatcacatgtgcactagaaaattccatatgcctaattttctgccgcataaagtgggtaccgaaacagctgcaccagacgcatcaacaacaaatgggctttctcagtcccatccatatcatggtatgccgatgaattcatatcaaggcaaccgctgccatcgtcctcgatgtatgataagttgttgttgagtatggtcacatagtccatgtataatctcgaaccgtccgacccctgtgcggatcgtctggccatacataccaaactatctggatacgtctacatagaacaaggtgctgcacagaatacacaaattttctacccaccacaatagcactactgttccgcacctgtgtaacaccaaagtcatattataccaccaccaccattagtatgcaacatgcagtcagttatgggtatggccggacaatccgagtactgcctcgaaccattcgaccacctcgtggacctccaacaactttcgtcggactgtccacagatacaccgagcctgacacgtggcaccaagccaatacccc

SEQ ID NO: 32327 - DNA, 298 bp, Zea Mays
cgcattgaaaaactggttcgaaatgttgaagtacacaatcctgccccgagcacagcaggattgggctcgccttaggtttgccgatttcaaatctgtggccgaatataattcggcattacacttaatttgtaccaacttatccctttgtggtaagaatatcacgaaagaggaaaagattgaaaaaaccttgtccactttccacccgagcgccattcaaagtgctcacaactatcgtcaggatgcttacaagctgtacaacgacctgattgacattatgcaagttgttgaagcaaaggct

SEQ ID NO: 32328 - DNA, 369 bp, Zea Mays
tgagaactcagcataaggtagactcttgtcccaactactaccgtgctgaaaggcataagctatcaacatgtctttcaatacttgattagtcctttcagtctgaggtaggccgaactaaaattcaactttgcattcatattctcatgaaaacttttccaaaatccgggggtaaactgtgatcctctatccaaaatgatctacttcggtacaccgtgtagagacacaatcagagccatatataactctgctagctgagaacctttataagtagtcttgaaagaaatgaagtgagctactttagtcaatatatccacaatcacccatatagcatcatatcctttctgggtgcgaggcaatccagtaatgaaa

SEQ ID NO: 32329 - DNA, 409 bp, Zea Mays
gtctaagggcaaacttcttacaagagacaatttggtgaaaagaaaacatctaaatgataagtcctgccttttctgttcggaagaggaatcaatttatcacctttttcgactgttgtattgctaagaggatgtggagtgtggttaataacttgttgaattggaatgtgggggaggatctggaatctgtagcaagatggtggattagcaataagagatacaaggtgcaaaatacaatttgtgctgctgttttgtggtccttatggaaaacccgtaatgctttgtgttttcaggggaaaaactggatgtgtgtgaagcaggtgctgtgcagggcgtctcagatgctgagaaactggaaacctctcttcaagtcaaaaagttgggaggagctggatttatacactggtgcttt

SEQ ID NO: 32330 - DNA, 543 bp, Zea Mays
cggccacagacaaataactatttgttgagctttcaacaaactggatttgtctgggctctaacctatgaacacttgaacttccttttacatgtgtaattgcattactgaagcattcagttgatacttgtgaaactaactctgatatttttatttttgcatcttccaggttcgcaggacccaaattctgttttccaagtgtttcttgtgcctgctccaaaactgcttgtaggtatttcccttgtgcttcaattcgtagttgtagatgcctttgcacctgtttccaatttgaatttcagatcagaatcactgcagcagcagcacaactccattttatagacactataagtgggactttgctggaccattaaaatcagtagcagactttggactccaatattgggtgtgtgaatccaaagaaaataatttaggatgccgccactcacaatcatgaccctgaaccttcacttctataatctgcctaatgatcagacagaagacgctgaggtggttaacactgtgtgatcaaagggaaccctatttgta

SEQ ID NO: 32331 - DNA, 297 bp, Zea Mays
gtttcagattagcgcatgaacataccccattgcgacaataagatttggccgtcgatcggttagctagtggttatgttgtcacgtgggcctcggaccgtagatccccgatctgaggactcgtatagcatactgatcttctcaccgctccaatctaacctgaatcgtctgtgttcgttctggtggcccatatgcgatggtaccccttcagccatccagctatacaaaatagcccctagtgcttttacttatcaacccacactccaggttattgataaaaccattacacatgagtcctgg

SEQ ID NO: 32332 - DNA, 289 bp, Zea Mays
gtcaacaagactccagggtgcagctgggttgaggttaatggaaaagttcttgaattctatgcaagcactgaaccacagcatggtgcggaagatatgtatcaactcatgggcgtactggtaaatgagatgagactaaagggatatgttccaaaccttgatctggtgtagcacgtaataaagcatatttcctgttcttcttggagcaaaaggaatgacttatgctaattcacaggaggaggaaaatcgcaaaatgaaataaacagaggaacgacaagaacagcagcagcca

SEQ ID NO: 32333 - DNA, 365 bp, Zea Mays
gccaggcagcgaagagcggatcgacaacgacggtggatggggcgacgacgaggaggtggacggatggggcgacgacgaggaggtggacggatggggctgtggcgacgaggatggggcggtggatgcggcggcgaggtggacggatggcgcggtggatgcggttggaggcggtggatgcagcagtgaggtggacgatggggctgtggcgacgaggatggggcggtggatgcggcggcgaggtggacggatggcgtggtggatgcggttggttgtagaatttcttttaggtttagagttaaaggcgatggtgtatatagattacgctagaatttggtggcgggtggctgatttggtgtgattatttg

SEQ ID NO: 32334 - DNA, 286 bp, Zea Mays
gcccttcacgagttgggcaaggttcgggcggaggttgcggaattgcgtgctgagtgcgcggcacaccactatctagatggtggttctcccgccctagtcaggattcagcacccttaccgttcaccaccccgtggtcgcttcgactatggtacccctaactgcaggacccagatagatttggatccatagatcgacggagtcggagtctgtaataatgcttaattcaatgtcttagtctagtcagtcttagttagagttagtttgcttatcataagttggatgcttg

SEQ ID NO: 32335 - DNA, 375 bp, Zea Mays
gttcgagtaagggtgaacatgtttgatctttggaaaagggttggttttggacttagaaaaattctgattttccttttatgctcaaccctttggtgaaccttttggggtttttctaaaaaattggggtcactttcttactattttttgtagggtattaagtgtactacatcttttataattggcccaagtcatgatcatgtggttttcatagccttttggtcatactcacttctagggctccaattgtccaaaagggtttgaattagggtttgggcaattctcccccctatatgtgcatgataagccaaggcatgacttctaagatgggttgcacttacttaggatcttgatttccatgtttggtgtactttgctc

SEQ ID NO: 32336 - DNA, 465 bp, Zea Mays
gagggggtgcccgcggcggtgcagagaacgaatttgggggaaaacccgaattaaggcgctacggtggacgatcgggagcgaggagtggttcactgggttcgtaacgagtagacaaaacaggctgaggcatcaatttatagaggacggccgcgaggagggcgaatttggacggggaagcgctcgtggtgagaaagggggaagagtcaccggagttgctaatgtggcgctcactggtttacggtctacggcggtcactgccgagtcttcacggcttgcgacgagtggtgagatgacttaaggcatgtcacaaccaagctagacgacggcacaacggcgacgtcgcgcagccacgttgccggtgcaagtgggtacggcgacagggcaaaatagtgccccaaagtcatccatgcgcaagatcttttcaccgtcgaccgttatccgcacgccagagcgcacgaattgcaa

SEQ ID NO: 32337 - DNA, 470 bp, Zea Mays
gagcatgttgcaccgccttaagtcgttgccgacttaagccgattgctccgttagcagggcatagtggtcaccccgggttaagtaagaatgcaagtcaatcgtgaacaaactgagtatttttgaaacccccttttttattgatgacatatttccactttacagagtacatcgtcgtcccgatagctttttgaaatacagctagggataaaacttcctgaggtgttctatgttccaggagttcccgacatctgtgccatccatctgagtgagacgatatgatccgggccgagtgacttctgctactatgaagggtccctcccacaagggcgataacttgtgccgtccctcccccgttagaattcgacggaggacgagatctcctactgagaaggatcgctgtcgcacaaccttgtcgtgatagcgccttagagtctgctggtaccgtgccgattgaattaccgcattcaatc

SEQ ID NO: 32338 - DNA, 373 bp, Zea Mays
gcagaatccttttgtccccaacgattccaagagggattggggatgttcttgttcttcggatccatcccgccaagaatcttgctactacggacagctccagaccccaaccgaggccactcttcttcagacaccggtgagcgcagggaagttacgcaccaaccaccatgaaaaccagatcgagtggagacagggagcgaccaaagacgcgagaggaaggcggcgcagtgagggaaagagtgcgaacccacaaagtcagcaggaaaccctaacctcgacttgggaatcgcagagccaggagacgcggcaggaggaagaacccacgacgaatgggctagggttgagacgagcggcgtaatcccctgactccaacccg

SEQ ID NO: 32339 - DNA, 658 bp, Zea Mays
catcgttgatcgccagctagggccggcaatggttatcaccgtggccgcggctgtgcttcaccgcgcctataaattcaccccgtcctcgctcccttcactcaaatcaaccgagctccgaccttcgtctccaaattgtgaagccatagccaccactcccgtctccgattagcccccctagccggagaatcgttgtttgcccccaaatcggtccgccgcaccgcaagaaccgagctcgtcgtggccagcaccgttcaggtcagttcatgccgccctctccctcgtttgagcactctcataactctgtgatgcttgccgaaccaccaatttggactgagagctcactaatcgccaggaacacgagcaaaggtccttagccttcgctgttctcgtgggcagggcggagtaggtcaccaatcgtgcaattaacttagggaaaatgcttggagtaggtctaatttggtgtccgccgctcgggaacgccgttaggccgatctgctagctcaccggagctccaccgagctcaccatcgtcgtggacctccccctgcgaagaattagaatatggagggtttatgtgcaaaccgtcagtgacacaatgaaatagtaaaagaacccgttcccagttagccaaaaccccgagggcgtttctgcaaaatccc

SEQ ID NO: 32340 - DNA, 410 bp, Zea Mays
gcagaaagttccaaacggggtgatgaatgttgttttttccttgtcttcttttgccaagctgatctgatgatacccagagtagcaatctaagaaggacaacacagaacacccgctggtcgagtctaccacctggtctattctaggaagtccgaagggatccttcggacagtgtttgttgagatccgtatagtcgacacacatgcgccaatccactttattctttttgagtacaagaacaggatttgctaaccactcgggatgtagtacttctctaatgaatcctgccgcgaccaagcgagccatctcagcacggatggcttctctcttgtcgggcgtgaaacaacgtaacttttgtcggattggcctcgcctggggatagaccttcagtttgtgctcgaccagctctttag

SEQ ID NO: 32341 - DNA, 276 bp, Zea Mays
gaaggtctacccccaagcgaggccgatctgacaaaaattacgtcgcttcacgcccgacaagagagaagccatccgtgctgagctggctcgcttggtcgcgtccggattcattagagaggtgttacatcctgagtggttagccaaccctattcttgtactcaaaaagaataaagtggattggcgcatgtgcgtcgactatacggatctcaacaaacactgtccgaaggatctcttcggacttcctaggatagaccaggtgatggactcgaccgccgg

SEQ ID NO: 32342 - DNA, 641 bp, Zea Mays
aagaaaccatgtatctgctccatgttttctaaaggagatatgtcatcctcttttgcgtactgggcagcagcttcaagtgctcatgaaccttctaaagtattgcaatctggctgctactgaaggagatgtttatccctctcgtaatatcattcatatggagggggttctcccgtggtttgatacaccaattgagtcttcaatgaattcatttacattttcaaaaagtgctatagaggcattaacatgcaaaagggatgctatgtacaagttgatgatggagaagctccaacattttttctctaatgttgaggtctagtcacattaactgaattacactctgcattttatctccaacttcgacttgtctgattttttctctaacagaagcaagaatacttgctttcccaaaagtcttgctgattctatgtttggggttgtatccgttcaccttctattcctcataacctttgtttctgtttgcaaatatgttatgtttcaggtgattgcttttgatactgcatcaaatttcctacataaaaggaccgaccttgtagatgcatctgtttcagatgctgagttattctatggggacagcgacgctgtactaccttgcaatatgtatgtcctcatttcacttttct

SEQ ID NO: 32343 - DNA, 535 bp, Zea Mays
cgcccatgccacgtcgactcctgtcgatttgttgccttagccggagcactctggaaacctctttcctttccccgtgattccatagcaatctcttccctccccgacacatatttctttcctgtctacatcaccatcaaaggaaagtcagctaaatcttcgatctctcggatccgcgccgattcagagtccaatttgtccttgtttctcccctataagaatcgccctgagctccgccattgattcgacgcaatcatgccttaaaccactctcttctgctccctacccatgctcgtcgtcgcacccgcacctttgtcgctcatggccaggcacctccagctcttccccatcgatgcagaggccacctacatgatcatcatagcacactgccacttccctgagccttccctaccttagtctagccccaacatgatgtcccgaccttgccggagctcaacaagccaatgtcgcccatggctagagtgtttgcgtgatccacgtcgccagcaaaagcgcttttgagaacctacatcgttcc

SEQ ID NO: 32344 - DNA, 324 bp, Zea Mays
ggaggcctactgtgacgaagtttggcgcttggaagataagctctatgggttggaactcaaccatgttgctcgacggtacaacgagactgcagatgagctggctaaaatagcctcgggacggacgacggttcccccgaatgtcttctctagggacatatatcaaccatccaccaatctcaactacgcacccgaacccgaagggacctcggcccagctcgaggtaccctcggccgccgagggtgaggccctgcgtgtcgagatagagcggaatgaggtcacaccaaacctaaactggcagaccccttacctggaatatctcctccg

SEQ ID NO: 32345 - DNA, 282 bp, Zea Mays
cgtgcgaggacgtggtggagcgtgccgtgtcgctggcgcgattgaggatcttccggtggtggaggggggagtggggcgttaaaatttgaatatgcccggggcaacctcctgtcgccaacgagcgaggtggagggtggaggatggatctgctcgggactacctcttgttgctagtgagcggggtggaggcgagagcaaactcatcagcttcaacaaatgtctatccatgtgttgctatagatggagtgctagcatatcttctctacacttttaaagcacgagg

SEQ ID NO: 32346 - DNA, 469 bp, Zea Mays
taggccactatgccaaagattatcctcggaacaagccaaagccagctcaaaatgcaaatcagaatcagggaaggaaggagaaattgcaagtgagcagggcaaattgaacttcaccaccttagctgaacttcccgtgggagcacccgtcatgattggtacctttaccatttttaatcatcctgctcttgttttgtttgattctggcacatcacataacttcgtcagtccaaagttcagtgtcaagtgccaactaccctttttccacactaaagttgcaatcatgaccgcaacgctagggggcaatattgcatctaaccaaattgttcggcacacacctataaaaatgggaactaaaatcttcaaaactgatctcattattttagggatagaaaatgtggacattatcttgggaactgcttggatgacacaacactaggttctgctggatgtcatagcccgagcacttgaa

SEQ ID NO: 32347 - DNA, 294 bp, Zea Mays
cggttctatacaatgggcagattcagaaaactgaagtcgagtttcattgatttctagcgaactttggcgctctccgtgttggatccgtgaagaattccatcatggttcttatgccaaagtgaaagagcatcgatcagtgtacaactttgattaaggccgatttacatgttgcttagcgattgtcagagaaaaattcgtttgaaattgggctgttaggccggctgggaacttaggttcagtcgtctgctgttgggtgtttttttctctagtggaggatgtgtgattcggttctgg

SEQ ID NO: 32348 - DNA, 500 bp, Zea Mays
tctttatgtatctaataattggctccctccagtcatttggatttgtctttgcctgatccactgctttgcattcctcagcgggccctgtcatgatgctcggctatcgtacctcttgaacaaagacgccagatggatcctggccccgattggaccctaactttgacagtgcatctgctgctgcattgtgatccctctctatgtggtggaattctaagccctcgaatttgtcttcaagcattcgcactgtagcgcagtagctatccattgagtctgtggagcaatcccaatctttgttcacctgactaatgactactaggcagtcacaatatgccatcagttaattgatgcccagtgacacaacgatattgagtccatgaattaaggcctcatactctgctgcattgttggaagctgggaacaggagctgaagcacgtatttgagttggtctcctctaggggtgatgaaaatgattcctacccctactttctgtagtttcaat

SEQ ID NO: 32349 - DNA, 301 bp, Zea Mays
aagccactaagcttgagcgccagtgaccttcttcccctccggccgccagcacatcttcgtggaattagacgccaccgccctagaacctataaattgccgctcttgtccgctccgctatgtagttgtgtaaccagtgaagcaacatgtgcctcaaatcctcccctagaactccccaatttgggatttcccccaaatccctcaagaacactgggcagtttgacctcgccgtggccaacgcgtctcaggtccgctcataccctctgccctcccgttttagcgttcttgtgtgcccctgatactc

SEQ ID NO: 32350 - DNA, 289 bp, Zea Mays
acgccacccttcactcgacgacttctactttgagctgcgtggacgaagaccgtatccgcaggacccgccggacagaccaagggcgctgaccaaacggaggcttgttcagctccccttcgctccgatgagacaagacgaaggccccaacgaagaccacaggacctcccacttcctcagtgcagagagaggcccatatacaatttggcccacaaagcagggccccgcgtgagcatgtgtgggttgggccgcgtctgtaataaagtacaccgtaatgactagttgtaacctc

SEQ ID NO: 32351 - DNA, 332 bp, Zea Mays
gagagaactaaagacaaaagcaaaatccattgaaccgaatggatacactgtttagagatacagttgataaaacaagcgtcatgatcctcggagaagggggtatgagaatgaccagaaatgagagatttaggcaagatcaacattcgatacttgagaacaggttatagcagataaccagataacgaggaaaaatcaatgaaggatacagagatttggatgataaggccacaacatgattcacaaggaaaatgattaccagattcaggtgaaaaagagaggtcatcaaacaagatcagttaggatgatcaacagaaatgctaggaagttttttt

SEQ ID NO: 32352 - DNA, 325 bp, Zea Mays
ccgctactttccccactagctatgtaacgttggttgttcttctgaatcagagggatttcatcctcttcttcatcatcttcatcaacaacacggacagtacacccattggggtcaacttcagcaggatcacacccattggggtcagcagcagtcgggtcacacccattgggttcagcctcagcaaattcaggcactggcacttcctcagcaacaggaacagaaggaccggcaccctgatccaagctagacactcgatgaagacgtctcttcttcttcttctgcccctcagcaggagaagtgggttgatcggctcggcgagaacgtt

SEQ ID NO: 32353 - DNA, 376 bp, Zea Mays
caaaattggtggagaggcgtgcaggcagctcactcttcttcaccaagagtcctgtcctgggatgttttcatcaagcaatttgagaggaggttctacccggtcaccttcctggagaaaatgaagatttatttgcaatcctacaagcaagagaagaagtctgtcacagagtatgaagtgggcttcaacaagatggtccgctttgttcctcatgtggcttacaatgagatggagaaggtgagccagttctgttagggcctgaaaccttctatcaggcatgccttgggagcctttccgttggtggattttcatactacagtggagcaggcattgggtgtggagatgcaacaccagtacaccatggagtcacagaagtctt

SEQ ID NO: 32354 - DNA, 649 bp, Zea Mays
aagcttttcaccgccgtcaagccttcgtcgttgcccgccgcgtggctctgcctttacaccacgtcgccgtgactctctagggccgtcccatcatcgccggtgagctcgccacgactgaggacacgcacccacggcgctagagtcctttcttatctccggccgccgcgttgttcgatcaaattgagtgccaccgacaaagctgcctataaattgagcccgtaactagctttgcaacatcattgcgcacccccacacctagtattgctcccagccgatcactagcaagctccaatttcgtattcccccaaatcagtcgaagaacaccgtgaaaccaagttcactgtggccagcctgttctggtaaaactctgcccaattcaaaccttgtttaagtgctctcgtatgcctatgatgcccatcgacccacttaattgcacggagtagcctctggtcgccgagaacacgactgtcttgccgtaatactctcggtcaccgtggcccgagcaaaccaatagctcatcgatgaaattgggttgggggaaatgatcgaggtagctccaatttcgtgtcagtcactcagagaacctagtcgttgccccaatcggtcggtccagacggctcgtcggagctcggccgtgctccacgccgtc

SEQ ID NO: 32355 - DNA, 518 bp, Zea Mays
gaaaaccatccggacccggagctctatctgaaggtaggcagaaaactgcaaaccggacctcttcctctgagatggggaggtccaatacacctagatcgcccatgtccctgtggcaagatcccaagtttagtgtgaattctctatgtttagccacccccaacaggttggtatagaaatcattcaaagcttcatgcttctgctcatgagaggtgaccacctgatcaccgactgtcaaactagagatgaagtttattttcttgcggtagcaagcctgcaagtgaaaaaaagaagtgtttgcacccccctccttcagatatctaacacgggatctgagatgagccactgtcctatctaaagaagcgagggccaaacaatgttgcttaagcctcctcatgagccataattcctcaggagacagcagcctgctatcctgagccatctcgagtctgtgaaggatttcccttgctaaagccaattgggacttcacattgcctgcattcttgtgcccccaggactgc

SEQ ID NO: 32356 - DNA, 362 bp, Zea Mays
agattctcgagaaggagcaagccaccagaagattatctagagtttcttcagcttggtcacatagaagacatttctcagggtggtttaggcctcttttagctaatcgatctgctgtccagcatctattatggacagcaagctaaatgaaaaatcgacactttggtggagcccaagttttccaaacccttgtgtagtgcccaaaagaaactgaacccatgaacagtccattataagcggattttgcagagtactttccatctggggcaatactgaaaatatgtctgtcttcaattccaggctgcaactcaatggctgaaagcatctcccatagctggaggtaatcaatcaacacaccgactgag

SEQ ID NO: 32357 - DNA, 271 bp, Zea Mays
aagcacttaagtaggatgtcgttgactgttcggcggtagagttcatcactcatcaaaacatacttgaaagttgtacgcgcgaatgttcttatctgtcctaacattgggatttcgtaaataattagttatgggcgtcctccaatcacttgcatcggcttcattatcagtcgaatcgattaggagaactttcctggtaaccccggacggtccgacgtcttcacgcggacggtccgcgacctgggaattggccctacaccggttatcagatttt

SEQ ID NO: 32358 - DNA, 624 bp, Zea Mays
gaagtctagtataacatcagttcaagcactaggtacagcatctgcaaactgcatcacgtccattacccggtccttgggtcgccagttggagacgaggccgctggtagagagcgcggcggtggtagcttcgtcgatcccctcgtggcgatagtcgcacagcacgaccacctggggcaggtacgcctcggacgccggcttctccacctcggggacctccaacccgttcttgggctccggcccgctggcgacggggaggtcatccgcgacgtggttctggtggtggttgtggtggtgatggggtagcggcggcaccggggccaatgacggcgacggcgaggacgaggagtggccgaacctggacgccatgagatctcccaatgccatcgacgtttgctgggttggtgggggaggggtttagggttagggtttagatgcggctgggaggatggagagagggggggtgtaggtaggtgggaggagaagcggcgtctcggactctcggtgcgggaggaagcaggcgacgccgagcaaggagagcgattgacgacgagaaagtaaaataaaactgctataaaactaaaactagtagcttactcgcgccttattcgaatttttttcctaaac

SEQ ID NO: 32359 - DNA, 413 bp, Zea Mays
aggtgcatcaggcgtcctcatgaagtgcattctctcatctactgggaagcaacttctaaaggaggtccatgctgggcaatgtggaatacatgcagcgttcaagacactagtcgggaaggtcttcaggccaggattctattggccaacagcgaagagtgatgcaaccgatttagttcagaggtgcgaagcttgccagtacttgtcgaagcaacaacatctaccggcacagcaactgcagaccataccagtgacttggcccttcgcatgctggggactcgatatgattggacctttcaagaaggctcaaggaggatacactcatgtactggtagcaatcgacaaattcaccaaatggatagaattcaaacccattgcttccttaacctcagctaaagccgtggaattcatacaag

SEQ ID NO: 32360 - DNA, 385 bp, Zea Mays
gaatgacttgttgaagcaactgatgttgtgggttgcccacatactcagggatatatggcgaacaacatgaagtagtgtgcaggacctgtttcggctgattctgccgtgcttcggcttcagctatctccttttgctttaggatggtgacttggcacgtcccttatcctcccacagaataaacagaacaaccttgtgggttgggagttgaaccttccttcgaagcttgttcctcctctgccccttggagctggtgatctgtaagagctttgttacattcctgaggattggaagctttgttggttgccttgagtgtggtttgccctatcatcgtttgagttgggattatggattgttctgacatgtctagggtggagccttcctccga

SEQ ID NO: 32361 - DNA, 305 bp, Zea Mays
tgttggttcagttaggtttgcaatcgtcgtcgtccctcgcagatcatcacagggtggcgaggagatactaacagtgtatggacggtgagtctgaggagaccatcatgcctttgtcgttcagagccgggctagcacttgactgattggcctgcagagcggaaatggaaagccagagccaaaccctgctctgctcaccgtcggagataagagctcgcattgcatcagccggtctcttccgcgcacagccggactctcttcaccaaggcacacggccacacgggtcacgaggaaagtttcctttaaat

SEQ ID NO: 32362 - DNA, 570 bp, Zea Mays
gaccaattcagcgtcaccagcagaaatcaaaactctatcatcaggtgcgccggcctctaaggcgacctcctgacccgaagctcgtgctgctgccatgcaaccagaatgtggaggagaagatccgacgtgaacatccatggaagtatgagaaggagaacccgctcggacaccctcgggggctgggtcatagctcgcgctgcccacccgagccggatgatcaccggcaacaccctcgggggctgggtaatcgcaagcgccatccttggggaccgagttctctgtagcagccacctctaaggctgaaggattttcagccacttccatgggaacggagcaatccagatcagcctcttgactcctaaaaccgcgctccaaggtcgatgaggcacgagacgctgctcgggataactctaacccgacagcaggcacatcagcacaaatttccatcatcccaccatctgccggctccgacaacagatcttcggggaccatatcttcgagagtctgatcaaaatttgccagagacaattcttgcagaccaacgagagcagacaaagctggagaaggaac

SEQ ID NO: 32363 - DNA, 319 bp, Zea Mays
gtgttcttcttcatctccggccacccgcactgcccgatcaaatcacgcgccaccacctaagccctctataaattgatggccgaacctgctgcgctaggtcattgcgaagccatagcacccactcccgtccacgattagccaccccagccagagaatcgctatttgcccccaaatcggtccgccacaccgcaagaaccgagctcgtcgtggccagcaccgtttaggtcagttcatgtcgccttctccttcgtttgagtgctctcatatacccgtgatgcccatcgacccactcaattgcactgggtagccttagatcacc

SEQ ID NO: 32364 - DNA, 402 bp, Zea Mays
gccggggatggataactcgtacgtggcgccatctcccgagtccagccgaagttcttcaccggcggccaccgtgaccagtaaattttgccgcggtggcactcatgccgtgatctccctcactgtgtctcctaccgacgtggtcgacatgcgctcgcgatgcaatccgtggccatcaggtgatcgctggaccgccgcggctataaatagccctatgattccctgcgaggcacgaccatcacacacaccgtgggttgaatcgaagccaaattcgtgatgtctctgccccctcctctcaaattggttgtgcacagtaaaactagaacctcttgcggtcgtgtagccccaagctccgtcctcaattccacccgagcacgccgcgacgccattttcccccaaatccga

SEQ ID NO: 32365 - DNA, 399 bp, Zea Mays
accaggtgaaggaggactttgcctcgccgtcgatcgcgtgatatagggctgagattagacttctggatgctgcgcgcctgggccgttaggtgggtgatgtgtggtatggatcggaatccgcataacggttcgcggggccggtctcgtgccgtccgatccgatcgaacgggatcggagtaaatgtatcgcgatactttagatcgccgatccaacggtttccatcgcataccggttcgggttgaatccagatctaatctgaaccgttcgtttcagatccagtggctggggtaatcttgtatccgttcagttagggagttttgtacccgagtccctgtacaataaggaaactaacccgtggtccaaggaatcctgttcgccgagtcttggtgatcttgcggg

SEQ ID NO: 32366 - DNA, 751 bp, Zea Mays
caaacagatcaatggactgcgggttgattacgaaaaagggcaggggctctttagaaaaacgaccagggccgaaggggtatcttgcatcctgaaccgcccgatccaaacccgacgcaccggattagatcgcgcatcataaaacatagacatttttttaccgttagatccaacatccatggatgagagtgagcccgacccgactcacccatcaccgcccgatatcgcgccaacgttctagattgcatccgaccgaaggggtaagctgcttctaatcctggccgttttcgcaagatccgacggtcgcgacgcgcgttgtcttttccccccaacagagcaaccggacggcggcgccgcccagtgacacggcggatccacgccggagacaagcgagccagccaccccggatcctaattctttaatcgaacggtgctacacgttgagggaagcgaggcgattcgattggggaggactttaccggtcgattgtgtcgcgcagggggtcgaccacggtttcccgcggagctacggcggcggaggaaacacgacgagaaatcactgactcacagagaatccatcccgcatagttaggccacaatcatcttcagtgccgcccgatggagctccccggatccttccctaaggccgagagccggtagggccgccgttcccgtgtggcctcccggttttatagaggtaagggcggagtccgccatggagctcggtcgaggggctccgcacttcgcgcggccgag

SEQ ID NO: 32367 - DNA, 359 bp, Zea Mays
gggaaatgctctgtctcctcccccttcctgctgctgaggttgtcgaggttctctgggtcctcctcgcggcgcgggaggtggtagaggttggaagggtcggtcgttcccaacggagtgcttgaagtctctgtagttctgaagggtgtggcgcatgtctttatggtacggacattaggcgtcgagaatgtcatccaatgttcgttcgcctctgcggggtgcccctcgggcacgagagacaggtggtccggtgacgtgaaccacgtcgcgatgcctcttctcccaacgcttgtcgggttgctggttcgcgtcgcgtcgtggtgccggtggtgcagcctttgctcctccgatgaggtcctgag

SEQ ID NO: 32368 - DNA, 307 bp, Zea Mays
cgagcctccagtacgtccatgtgtgtaacaagttcagcaactcgtcgatcaagctgctcataggatgtcgccgcagagtcctggtatttttaaaaagcttcagtcatcgcgcgcatcatctccttcaattccatctgagagacacactcatcgtcgttaagcttaggccccttgtccttgtccatttgattctttggtcctgtcattgttagcacaaaacagagacaaaaaggcaacaaacaatgtgaacactacaactatctctcagggtggtggtggaatacaaattatgaagcgtcttaccccg

SEQ ID NO: 32369 - DNA, 646 bp, Zea Mays
atctccatcaactatatgttaagaaaacatctattagagacatcatatccaccacaccacatcttattttgatgttatagtagaagatatgagagttattaaaagtaagatatggctgatgccacactaagccataatggctcctccaccgctgttgtccggcaaaccatcacattctgtgacgcgggacgtcgagcaactcctgacttggggcactctggtcccatatgacaaaatccaccattcccattcagccattcctatcgtgcaagccatcacacactccggacgttgggcccacattgcagactacggacgcccacatgacagccaccattagttttgcacacaccggacccacgtctgctcgcgcaaaaagttgcctcaatttgacattagcaggagcatttgaccatgattgctttctctaaagaaggaaggcttataagccgtagaagctatgttggctggccggtatggtcataaaaatgtgcaagccgtgatgacgacataggtcgcgtgggttgtgtttctttggtgcggcccaagtagctaccaggaggccgcacgcttcttaccctgacccagcttggctttagggtcagtctcccttgctttctctgcccagcgagccctcgccctctag

SEQ ID NO: 32370 - DNA, 640 bp, Zea Mays
gcctcctcatctcctcagacgttagtttatcccatctcagtgaccgtttctcgcggtggatccgccgatgttgggcccgcctatgtcaccgtcgttgaacaactccgatgaggaccttgagtgggatcctaactggcggcgtaggcattggttcacttgtccatctttctttgtttgggcactggtgcatgcgcggcttaggcccaggacccatgtatctacgactaatggcggaccagttgatgccttggctcctccgatcgcctcggatgttgagctggtggcgcctgggttctcgccccctcggctgatgctgctccggttgtggtaattgattccactctcaccgcctcgtttcccgccctgccccacgcttttaaggcaccagaagtttgggggcctttgggagatttattggaagcagtcgtttctccgactaatggcggaccagttgatgccctagctcctccgatcgcctcatatgttgagctggtggcgcctgagttctcgcccccatcggctgttgctgctctggtgatggcaattgattccactcccaccccctcgattcctgccctgccccatcggctgttgctgctctgatgacccctcgggtgccgctacgacatctgcagttatg

SEQ ID NO: 32371 - DNA, 390 bp, Zea Mays
aaatggatcatgacatcggcctttgtcatattctctgaagcgttgtattcttgatgtcagattgttgagtgttagaggtcaatggatagggatgtaagtctcatattttgggttattggtccttccagaacttgataaaagaaactaaagtggcatgccacctgattaatttagcatttaggtggagaactgaatcttctgaaatcaatgtatggtgtgctgacattctcaatactgaatagcactggatctgatgttttcaattttttcaccaatttaaagacacttctatgctctccatcaaggatttccctgttttgctgcattcattatatacttaaaagaagggaattttatagtaaaaagtcacaagttataacaatttaagag

SEQ ID NO: 32372 - DNA, 491 bp, Zea Mays
cgggccatttctggccgtccgattaggcgtggacgcgcgagattagatccatccttgatcgaaacggtacgcaatgctgcacatcggattcgagatcgacggcagatatctaatgttgcacaatctattctaggccgcccgatctcgatcagacgatccccggccccatggcccaatcgttgcctcgcgctaaactgtggccgtcgatcaataaacgaacggcccagacttttccccccaatcccagtccgacaacggcggcgcccagggttgcccacggcggagccatggccggcgctgcccaattccgccactctcgcccccattccccaattcgatcacctctacgcgatacagggatgacaatgaacatgatcgagcaatcgtaccagaggaaattcgttgcgcagggtaccggtctcaggcaagcggcggagtcggatcccggcgagcaattccccgagtcccaggggtgctcggcccaaattgac

SEQ ID NO: 32373 - DNA, 340 bp, Zea Mays
tgtgactctgaaaacagccctgattcaagctccggtattagctatcccaaacttccgcaaataatttatcattgaaacagatgccagcgggggaggaattggtgcagttctacaacaggaaggacaccctattgcatttatcagccgagctttagggccaaagaatctgggattgtccatttatgagaaggaatgcatggctattctctttgcaatggaacaatggcgctcttatttgcaacatggtgaattcataattaaaactgatcaccagagtttaacccatttggatgaccaaagattgtctactccatggcaacaaaaggcattaaccaaattg

SEQ ID NO: 32374 - DNA, 407 bp, Zea Mays
gtttctgatatcatcagctgagaaggcgaactctggctgagctacagccttaggatgatcgcaaccagccttctccaagatggatgtggccccacgggcgccagcaaaagcacaaaaatctcctcgatcactaagaacttctttgaaagcttcaacttcgctatttatccattgaatgacttcattaggattttccacgaataaatttttgctcggaggaataggctctaaccttagcaaagttgttccttaaattcttagcgcatttcatggatatttcataacatttttctttggcgacacaaaagctcatcgacatttttttgtgctcttgatctttcaatttcacatatatcatgcttcaccacttcaacttcaaagttctcagttgcttcgacaaccttccc

SEQ ID NO: 32375 - DNA, 499 bp, Zea Mays
caatattgtttgtacattgtactggatggtagaacgtgtgagcttcaaagatggcgtcgacttactgctcaaaaaaatggcgtcgacttcacattatctgagctattgggctgcaaagaaaggcccagcccatcaaggccgtcagagtgctgtgtcctgcgggccatgtgggaaggtgttcagactgagtacactgaagcaagcacgaacaaacccggggatggtgtttaggtcccacaccgcttagcctagaggggattagccaacaacacacgtcttatacagcggtagctgaagctgatgaacccaagcagctgcgtggtgagcacaaagcgaactattctttcgccttttactaaagaataccgtgtgcacaccacgataagcagcatactctaatttttggagggtgttttctctttaggggaaatgcccaacaagacaaattcataacgttgttaatgttcgacctctctcatgattattacggacaattctc

SEQ ID NO: 32376 - DNA, 818 bp, Zea Mays
gttaacatatatctttctcaagggatgggggactaggggagtcactagcattgattgtgcaccttgaatccctttcttttcttatataaggaggtatcctctacactaaactacgaacaagtatcagagacactctctgtcaggtgtctgcaatggacaacctcaaaacccattctgaatatgccgatcaacctcaggggccacaagcaaatgccgtttctttcgctttaccaacaggtcaggtcttagacttagatagtcatatgattggccaacagcacacgaatctgtcatcattctggttctcccttgagcagcacaggctgcagttggatcaggcccttcaactccatgtaagtgttttttcgcccaccattttggttctgaattttactctgacgctgtctaacctgtgctccttatttcatttttttttcttgaaaaaaaatcagaaccaacagttgcaggtgtcactgcagcagcaaatatctatgcagaactcaactctactgaaccttgtggaatctatgacaagagatgtgctgatgcaaaagaatgatgagatagccagcctgcgagtagagttgcagaggaaccaagaggatctagaaacaacactgcatgacagagatgagtggatgaaggtcgctatggccgcttatgaaattaatcagacacttatccgcatgcttcgtaccgtgcagctggaagcgaattctcatgtttcatctaatgatctagatgctccaagttatagtgaagcatcgagcatggcgaggacagcattggagacagcacagcccaatctgatctgcaag

SEQ ID NO: 32377 - DNA, 632 bp, Zea Mays
tccacgacagcgttcctgggtgacaacgcgtcttccttaagctatggcgcggtagcgttcaattggccgagatcaggagcttcactggtagtaaggaatgctaaaacatgagtccggaaggcatgaactgacctgggaatagctagccacggcgcgatgcctcacggcgacgacggtgaccaaagttgggggaaattctgaattctcgagctacggtgattggtttgaggcgaggagtggtgctctgggcacgtaacaaaaagacggagcagggagagccttcaattttatagtgatcactcgtgcgcttcgcgaatttgggatgagagcgttcacagcagtgccctgatttctttttctacggccgagcgtcatggtagacaatggcgcgatggcatggctagctttctacagccatgagagtatgacacaagagcatggacaccatgtagtatagaggcatagtgagggagagccctgccgccggtgacacggtgacatgaagcactcaagggagtgccacgcgacggcctcatcttttacccccccccaactcaatctgcggagcagtgaatctgtccacagttatccactctccccaggtacgaatctcccaggtgagcgcgaatctc

SEQ ID NO: 32378 - DNA, 451 bp, Zea Mays
ctatgtgtatatttactccccgattttgagttccaaaacatgttattagaaacatgagctattgaaatggtccctgtagttccgcatcatcttatgatgaaaaaaacttgacctgttgggggtaagatagcccctggaacattgtattaagaagaattgacattgtattaagaataactcatgcaggttgaggaaactcctgaacccttatctcacccatacacagcagcaccataatacccatataagaacgaccgcgatcagggccagaccttagacttgtgctttgtcgtgggatggacgaaggaattttttaagcccagtctaaaatttgctcacacgaggagtcgaattcaggagctgaagagtgctacttagactacctaatcatctcagccatttagctcttctctccatccctctcgctcccccctctcttgggataactctg

SEQ ID NO: 32379 - DNA, 487 bp, Zea Mays
ctctgtggccgccctgacgtcgtacctacttgccggcgacgtggctgcgtggtcgtcgtcatggctgtcgccgttcactcggtcgcaccacaccttaggatgttttaccacgtcgccttgagccatggaggttaaccagtgatagccgtatgcctttgtccagtgaatgccacggtagatcgccacggtgactcatcccctctcctcggccgttagcttctctcctcaaattcagagccaacgttcatgaaaactataaattgagcattcagcgtgctccgctaggttgttacgcgcctagtgcatcgctcctcgcctccaatcattcatcatagctccttaattcgtgattccccccaaatcggttttccgcgccgttgtgagcttctctccgtggccagccatctacaggttggttcatgcctctctgcttggtgttctagcatcccatgagtctcctgttgctcgtagacccgattgattgaac

SEQ ID NO: 32380 - DNA, 380 bp, Zea Mays
cataccatgtgtactccattccctttgcaggtggttgtacaacacagtgagctccagcagccatggctggtgaaacataagcaccaacaccaataatgcttgtactagtcccacctggagcacccacagtgttcaaagccggtccattgtttccggcgctactaataaatataatgcgatgtttgtccacaacctgtgaaacaatatagaccttcagccacatttccatgagcattctaattctaaaatataatattgtaaccaaacaattgatgaaataacactgcagtaaaggatcccacctcattagaaagatcaatgaatctgccatagtcaggaagaagggtaggctctccatagctcatgttaatcagatcaca

SEQ ID NO: 32381 - DNA, 340 bp, Zea Mays
catgaattcaagcaggattgagcacaaaatcgggagtaaacagccctacaaatcactctgtcaggtgactgaatgggctttcccatggtacagtaacctaaaacggatcagatcaagcgctcagctcatcgccgacgatctccgccatgatttgtgtcgccggtgtctcgattcgtgctcggggtaagtggataacatctcgggtagaaagatcatcaccgccgttgagctggacaccaatctggctagccgtcgtacctcccccttgttcaccgatcgctcgggtagggtctcaccgccgcagatccctcactgccgtccgccgcgtgtccattcactt

SEQ ID NO: 32382 - DNA, 394 bp, Zea Mays
catgttgtcggggcagtcggatgccccgaaggagatggtggtgctcctccatcgttgatgtggggcagccttcgagacccctagagttgccgacaggacctcacggcgtagggacttgacattcctgcgggaggtgagttcctagctcccgccgtacatgacgtacaacttcttgcggtggtcgctgtcatccccggagtcggaatctccagtgaagacgtccttgaggtccccctctagtgattgatacccgagttctcgctctcccgcggccacttcgtcatcgttgaccctctccttaccaggtcggcgatagggcagggagccgtccttggacgactgctcgcatcgctcactgacgcgttttgtgagcttgatgatctcgtggcattcc

SEQ ID NO: 32383 - DNA, 347 bp, Zea Mays
attgtttatgaaggttgcacataatgtgactttagagggcttgaacaactcaccacgatccacgcgagtataagctctagcgtctgctgtcaacgggtgtgcggccatcagggctacgacaacacaacaagccttcgtaataagcgcaacaggcacaattatggctcagtaattggggtacacaataagtccacacaacgtgcacaacaggcgtaattgtggctcgatgatcacggctgacagacaatgcctacagggcatgcaaaaaatacgcgactcagcgatggcgatctgactcaacaggagcgatccgattaatagagagcgcgacatagcaatcacatgaa

SEQ ID NO: 32384 - DNA, 383 bp, Zea Mays
actcttctaatataagaaaccatagtctaatcaatgtaactcagattcatttgtgttatagagaaactaaaaacagtggtaaaaatgatgagttgatgactctctgctgcgagcccacctgatcgagatgccctgtaattttatcatgtagtcagtaattccgtagttatataagccgtaggagatcaaagctattgacatgtagggggaagatcagtgtgtccattattcttgacatgatgcatgaaatttctgtcctttccaatggtttaattacatgcaataacttatgtagtcttgttttttgtacctgattaactgaagttatgatgtaaattaagcagtaaaacatgtcataattcacccgaggtagctaacaaaac

SEQ ID NO: 32385 - DNA, 275 bp, Zea Mays
gtcaaaggctcctgccacaactccaaagaggagaatggccagcgtgctagacgctgtcatagaaaccacaaaagcattaactcctactcccgcgaaaaaagttgccgaagctgctacggccgaggctgaagccgaagttgtgccttcagtgtctgttgagatgaagcccgctgcaactgaggaaggggctgaacaagaatctctagggtttggcataactacggagaaagaaatagccgaagaagctaaatctcctggtcccgaagctctatccg

SEQ ID NO: 32386 - DNA, 325 bp, Zea Mays
gtatctaatgaattctgttttcatgcctgaactagacaagtttgttgtggttttcatcgatgatatcttggtgtactcaaagaacaaagaagagcatgccggtcatttgcatgtagtgcttcaacgtctgcgagagcaccgtctttatgccaaattgtcaaaatgtgatttttggctaaaggaaattaaattcttgggtcacactatctctcaggcaggcatagctattgatcttgataaggtgcaagaggtgatgaactggaagacgccaacaactgtccgtcagattcgaagttttctgggattggctggttattatcgaaga

SEQ ID NO: 32387 - DNA, 1154 bp, Zea Mays
gaactgatgaaattagcgataatcaatgttcacatgtgctattgagttatttttgcacaccgtttggcagttatcatgcttattactatcctacaaaattattatcccatcttttgtatttatgccagatcgaagctaactgcctggggagcacaaaagcgaatgaatcatgctaataacaggttgtattttggcagttctcatctggacttccacctagaccaactgcatgacatgtagaataccaaaattataaccaggttgatagatttcagaagtatgctaataacagggaagttattcaaaatataagtaaaaacaagaagcaagactgcttgagcattactgtccataaatggattacattttggatacacaatgaaagcactgctaaccatttaagtattttttgtgcattgatagtattacctttataccagcatatatgagagataatttgggcagtgtaacaccaccgaatgttttttgtattaagattaacacctcaggcatgccatactttgacttcataccaaacacatccataatcttttagtattgacaacataataagaccacatgactgagaaagattgaagttaagctctgcaaccattatttatccatttactgcatcaaaataatggagaaaattcggttcaatgtaccactaggggaactcaaatgtgataaatggtctatgagaaatattttggctcaaatcatatctattatacacctatacaaattttgaatatgcgactgttgtactaatgtgatgttttacgtgcattgtccaaaactgctgtaatgtgatgatttactatgaagcctagctgctattattcccttgttagtagtaatgcatacctcatcatactaattttcattccagacttccagttagacatgtatcatatgcatgcttgtatgagggacacatttcttggtcagttttttcagaaacatgagaggattagtttcttctttaattgtgtacacttggattgcatcttagcaattttatgtctcagtgatagttttcctaataataaaatcaatacaattcatagacaatgctacttgctttgtctgttagaggtgacattcaaattatttcatgttcactggtccaacagatttgggaagcttca

SEQ ID NO: 32388 - DNA, 448 bp, Zea Mays
cttcactgcaggtaccaccagcaaccttggccttccaccggttgctcctacgacgaacttgatttgatccaccagcggaccggtcggtgacccccgtacaccgggtgttctgctcattgggcctgctacttaagccggccctcctgatggaccttcctggcgctcatcgacgtccggggcaccaccgggtttctctcccagcagctccacatcgccttctgctgctgggaagagcaccactgtcggttctccaccaagctcttctactatcggctgcacatcaccaccagccgctggacagcacccctctgtcaacccagggccttctggtcgcttccttggccaggtctactctcgatggcagaccaacaccgcggcgccaacttcaccgacacctagtccctgcattccggcttctgagtcctcgcctccaccatcggtccccgct

SEQ ID NO: 32389 - DNA, 570 bp, Zea Mays
aagcgaccgttcctctgcagtaacaccgccaccgcgccattaatggccaatgaagctctaccggcgtccgttacaccttcccacacctctacaaaactcgaccgtgcccccatagagccagtccccatccgtcccaagcccactccgagctccccagccgcacctccatcgaactccctcctccgtggcttggtcctcgccgttcaccgctgaccggagccgctcccgatagctgttgtgttgtcgacaccagagccgctcgccgctggagccgttaaccgtcgaccggaactccgaagtcgacgctgcgtcccgacgaccttcccccgacacctgactacctgccccattcgtcctcgttcactgcataagagaaaggagaggtagaaaaagaatattttgctgtctaatccctatagatagattattttgcgtgagattatttcttagttcaaaagagttagttaatcacgatctaacttctgtggcgaattataatttttagttgtgaattttgagtctgaaatcatgtttatactgaacgattaatttcatatgtatgtgatgatc

SEQ ID NO: 32390 - DNA, 309 bp, Zea Mays
caacaccatagaccaagcagaaatagatcccaacgactggagggagccaattaccaggtacataaaaatgaggaagaacccgatgacaaggccgcggcagaacgcatcgcaaggcagtcggcccactataccatcatagggggtctgctatatagaagaggtgttggaggagtcctcatgaaatgtattcattcggctacaggaaggcagctactggatgaaatccacgcagggcagtgtggcatacatgcagcatcaaaaactttggtagggaaagccttcagttccggtttctattggccaacaaca

SEQ ID NO: 32391 - DNA, 437 bp, Zea Mays
gttgaacaccatctctgcatcacgttgctaggagtcaataaaggggggataaacatcttaaccacggacgtacatgcaacctaaaccctaatcatgacatggatatgcaacggatccggaaaagcacaatacgagaatgcgatgggggagacgaagatggtacctgcgaagacgccgagatgcgaaaggggggaagtgtccaaggttgacgatggcagtgggagttgacgacggagttgcggctcctcggtcaaaaccctagcgcagtgaagggtgacggagccatcaaaacgactgcggcaatggtcagggcccttttcgaaacgaggcagccgggggaggaggacgagcggatacgaaacggaatgcaaatgaaccgcgtacctgaggaggaatgcggtggatgagcaaatgggagtgtggtcatggcccccgag

SEQ ID NO: 32392 - DNA, 298 bp, Zea Mays
gacaaattacacgggagccaagctagcagaattgtatatgactcggatagtttgtctacatggagtgcctaagaagatcgtgtctgatcgaggatcacagtttacttctcggttttggaagaagttgcatgagagcttggatacatagttaaatttcagttcggcctaccatccacagactgatggatagacagagaggactaaccaagtgctggaggatatgttaagagcttgttgctcttaaacatggtggaagttgggataagagcttaccatatgcggagttctcttataataa

SEQ ID NO: 32393 - DNA, 429 bp, Zea Mays
tcgagggaatatatctgagtggaagtggagatgttcctaggcacgattgctacgcgggcgatggaactaaagcagagagagagagaaacgagagcgggtagaacatacatatagtgcgctctttgctgccgcctgccggccagccgtcgttgccccctccccgtcggccgcccttattcccggtcccatcgctaacacacaccacccagcacttcctccagtcctagctagtgctccttgtctcctctctgatgtggaggtcaccgcaggatgataccgcaattatgtgttttgtagctcacagcctcccgccgtacgtacacatgcacgtaactagcagtagccatcgtgtgtgcgacgtataagtgcaatcatccatgtatctaaattaagtactatcttattatacctccctggtagcgccaactc

SEQ ID NO: 32394 - DNA, 346 bp, Zea Mays
catggacggaggagtcttcagatgaggacttggattattttgcagcgttggatgtggctgcagcggagccttcgccgcgcgcggagggttccgaggagctcccgggcgcgagtactgggtataggcggcgaagggcggtggcgaaacggagagtgagtcaattgtcgcgaagtggttggcattatcgtagtgagatggagagtggtcgtcttcgcgtggacgagactggtaagcgagaattgttgtcctcgccgattggggtgagtgtaggtgagggggagctgcaaaatctttttaagggtgaggaattgaggataatgttgttcaactacagggagatgggtat

SEQ ID NO: 32395 - DNA, 389 bp, Zea Mays
gcacaccaaacaatattctaatacaacaatggtacattttttagcgatccaaccctaaggggcgcccagcacaacttaattatcagtctctatggcagtctctctagggcattctttatcatctggctgaggcaatgcaggaggtgtgggtgatgctagttcacaaatccttctacggggctagaacaggtacgatggggttccttcaagcacaacagttccattggagttctaggggtgatggtctttgcgcttggcacgatctgtcagggagatgttcgtgaggagctcgctatagtggttggtttgctcccgaagattatcttctgcaagggtgacatggcttttggtgttagccacacgagcttctatctaggccaagtccaacc

SEQ ID NO: 32396 - DNA, 457 bp, Zea Mays
gtcaaaggtgataataggcaaggatataaaggaagaggtaaatgtgcataaaaacaggaatctagatacaaccaagaatagagttaagataagtcttgcaagtggtaaagtataggatataaccacgggtgcgataagtaagagaccatgcttgaactaaggtgggagattggaggttttagataacgaacatagcgtaatcaccaaggtaagattgagagatcggaaaggtcaaggcaacgctaaacagaggcacaaccaaggatggagttgaagactcacaagcgatgaggaagaggatacgaccaagggaaaagtaggtaaagtacaacactcagattgagatggaaaagaggaggttttaaagggccagtataagataaacatcaaggtaagatatagaggtgataagggtaaatgtgataaggatgaaaagcataatccatggacagagtca

SEQ ID NO: 32397 - DNA, 346 bp, Zea Mays
acttgcattatcaaccgttatagtcattgtttttgtctaaacctcattaaaccaagcttttcatcaagcatttcccaatgttgtcccccttatgtccctttaccttgaaaaaactaatgactttcttgtgttgagtccaattctgatcaataaaacttgctatgtaagaaatcttatgatgtgtaagaaactaaaaatgcatgcatgcatggtgtcatatatctcgttactccttattctcgtggatcagacacgtatgaagaatgagatctaactaaaccttctactctcctctcaataggaaggataatgatgtgcaagagcaagacaaaccaaaccaagcgac

SEQ ID NO: 32398 - DNA, 351 bp, Zea Mays
ttcactcgagattatcaaggttgtgtcagaatttccatatgtgttctcggaagatttaccaggcatgccacctgagcggaaagttgagtttgccatagagcttcttcctggcaccgcccccatttctaaaagatcctacagagtgtctggaccagagttggttgagcttaagaagcagatcgatgagctatcagagaaaggttatataaggccaagcacctcgccttgggccacccctgtcctgttcgtggagaagaaagatggcactaggaggatgtgcatcgattatcgagctctgaatgaggtcacgatcaagaacaagtaccccttgcccagaatagaagatctgtt

SEQ ID NO: 32399 - DNA, 516 bp, Zea Mays
ggttaatctacaaaaattcccgtgactcagaaaaccccgaggatggaccgcgggtcaattatttaatttcttaggttctcttttggaataaggctggccgaaggggtatcgagcgaccacagccgtccgatctgatccacggtccggattaaatctccgccctcgcgaaccggcacgcgtttcagaccattggatcgcgatccgttggacgtgggacggccacaccacgatccgatctaaaccactcattaccgaatcaacgccccagatttaatgtcgcaaagaggtatcccacgatctaatcttacgcgtcggcaacagatccaacggtgaggatccccaccaacctaaacgttatctggtgattaaatcctgagcgcatgatggctgatcaacggtcgagaaaagcccaagctgaatcggtgcacagatctaatcgcagcccttcattaaagaatcaacggccacccgattctcttcctccccaaccgaacactggcgacccatcacgccgcg

SEQ ID NO: 32400 - DNA, 330 bp, Zea Mays
gaaggttgctgtcggtaaggctggaggcgacgcggacaagtgtaggaagtatgcccaggtgtatggcaaaggaggcagcggatgatggaacggcagagggcaacccggtgatgaggtgagaggcacttgaagcaccgtcctttaaaggtctccagagcttgaacaccaaacgacttctccaggcggcgtctctgcttctgtgtgcggcgactctccacgagtgtgaaaccatcacgatccaccagaggcttctgaagcctgggctgaaccaaagagcgcagtggggaagaccgacggacaaaccgtccaccatcaccagaggaattctgc

SEQ ID NO: 32401 - DNA, 961 bp, Zea Mays
cattgtactacagtttggccaggttgcccagttattataatcaaaatgcagtgaacgtgtggtagtggatttttttgacattgatacactgaatttgtgtaacaattgggaactcagtaactcactagttttgggggtgtggtcgctttggtctaatgtggtcctgttggtatgtctgatgtttgatactttaattaaacgccagacatgcatgcgacaataatctttgtaatggtatttgatcggaggtagaagtgatgtgattaatgttgatgtttgtggtggtgattgtgtcctgtggccttgagatcaatcttggtgggacattttaaatgaatgattgtgccttggcttatgtggcaatcagatggggagcagttgttaacccatatgttcatggaatatcatgtttcatatatttttctacatgaggtcttttttcccctcatgtattgttgtttgagatatcagtagttttattttttgagctagtttatgtgtttacaaattacaatctgtagtgattatgttttttactggtggacttagattagcattttgcataggcagtcatctgttagggtaaatgtgctcgatggctttagcttttcggtatgtcctccaaaggggaggatgtcatcaaattgtagagcaaccaaatctctgtgttgcctactctgttgtagaattgaatacatagcagcttctattaagagtgaatcacatcataattttgtaactcacctgatcttgatgtgtggttgttatgtttttacagtgtatttaatcttcatccatgttaatatgaagtctgcatttgttatactattctcaaactactccatccgttccaaattgtaagatgttttgacttttctagattcataggtttttctatgcacctggacatatagttgctagggatcaggatctggtgggttgataggattgcagatcctgc

SEQ ID NO: 32402 - DNA, 397 bp, Zea Mays
accgccttaagtcattgccgacttaagtcgattgctccgttaatagggcatagtggtcaccctaggttaagtaagcgtgagcatgtcacaccgccttaagtaattgctgacttaagccgattgctccattagtagggcatagtggtcaccctgagttaagtaatcgtgagcatgtcaccccgccttaagtcattgccgacttaagccgattgctccgtttgtagggtatagtggtcaccctgggttaagtaagcgtgagcatgtcacgccgccttaagtcgttgccgacttaagccgattgctttgtttgtagggtatagtggtcaccctgggttaagtaagcgtgagcatgtcacaccgccttaagtcgttgccgatttaagccgattgcttcgtt

SEQ ID NO: 32403 - DNA, 438 bp, Zea Mays
aagtaaatgcatggtgatttcgagttagagattggtggtttacgattcgtataaattggtcgatgtgcgaatatgggtgtgaatatgttgtatgtggatcgaaattcatggaggagaaagtggtacacgtaggtgtggttgcgtttgaaaagccaacgagtgtatgtgtggatgcatagggagcttaaggaaatgaatgtgtcatgcttgtttgatgtgacgagtaatgtagaaaatgctcttttgcagggtggatgtatcgataaaatgtgtgctggagttcatatattagttgttgcgccacattgattgaagtgtctcgagtgcatgccacaatatggttgtatgcgagatggggttatgcacatgatgagtttagtaaaaatccatcggtgtcactggtgttaagttgaggtttatttgtgcgtggaagtaata

SEQ ID NO: 32404 - DNA, 593 bp, Zea Mays
gttttttactctgtgtattcttttggtaatgttgtccaaatttatttcaggttaactttgattatgatgctacgcttttgataagctggcgggcaacgagaatgcatctcattcaaaatcatgcttgttacctttcctcccctctgtgtattggcagaagaaaaacctactcttttgtacatatcaactgcccgttgttaaaatcttttgccagatcgcatggctacaaaatgtgttctaggtattggtgtggctaaagtattttggcaacccagaaatgcattttattccacaactcatttatatgttaccactgttttatttattggctattgcgacaaattacaactgatatgcctcccattctgtctgtggtgctttggtgctcaacacaagcacttgttttctttgcagggccacttgcaatgtgtgatatttcatttgcagttcctctagagtggtggcccatgtcttagttaattagttactggacctgttgtgtcatggacagctcatgcgtgctttgtaaatatcatgaactctttggacccaaccctgagatgcgatgttggggatgactgatagctgaccac

SEQ ID NO: 32405 - DNA, 1479 bp, Zea Mays
caagaccggcgctcccgagcggcggacacaaccttggatctaccccgaccgtttccccaaagcgaattgcacgggtggcgacccacaccgccctgcccacgggaacagcggaggcatcggataaaactgcgtgttcccagagattggtggcggtataattcaattgggtgggtcggtgagcttaaggaggatccaagaatgctagaacaagcagcaaagggacttgagctcacctaaaccgagctggccacggtgaggtcttctttgcggtggcagaaagttgatttgggggaaaacaacgattctccggctaggggggctaatcgagggggagagtgggtgctatggcttcgtggtaacttggcgcaacagccccggccatcaatttataggaaggtaaagcggtggccagtgattttggggaggacgcgcggcggccggaaatgaagaagaaggctctggcgcatgacacaggtggccattcaccgtggcaggtgctccggtggtcaccggacatgcaccacatgattcaccgtgacgagagccagcgctaaggcacgtggggcgcaacggtgacaacacgacggcggcgaggatatccaaccgacgatgagctgggggatgaagtacggcatgcttagccgcaaccgagctcgagtggatcagacgccaagatctttactggactgtgcttatccatggccacggcgcacgaatcacggcaagcacgatcaacggcgacggtccaccggtgacgagcaggggggtggaatcgggatcttattcagtttaacattcactgtaccatggcaattgcaggcagccggtctgacagagcactttggagcccgattttctcttaatttcaaatggcaacataagtcaagctctgcaacaaaccggtagagcattataccatctacaatgttgccatatgattctgccacaaaaacccattggagcatgcttaaatttaggcttaaagttgatgtcagttcactgctagtctgaaaattcagaccttagcagcctgacagcctgattttgagcatgattatcttcaatttgttcctaacaactatgctcacaaccttaagcaaagttgttctcctttgtttgctctataactttgttatagcaatccaaggtagattcccactgaatcttagtctaaatggctctcaatcttggatcaaaatcactgtccatctgaagttcagtctatatcagcctgacagtccaactttgggcaagattatcttcaaatttctcacaagaacatggcttgcactcttaagcaaacttgttatccattaataggtctacaagtttcatgtggtaccctagggcaaaaaccctatattttaaaagttgcaaggctccaaagttgagctcatcaatctgaaattcagacttagcatgaaatcaccactaggggcctttttgcaaatgaattcaaatctcagggtttggcttcca

SEQ ID NO: 32406 - DNA, 382 bp, Zea Mays
gaggaatcacccgatggtgcatcgatctgatggtggattccgggatttgtccatccaggcgacattggtcttcttcccccttcctaggagaaactgcgaagtcctcttcgcagatccggtgcaaatcccagtttctccactctctgtgtgatggggttgcggcggacggaacattgagatggaagattgcagcggcgagaagaatacggcaggcggcaggctctaaatggcggcgagggcacaaaagcacaggcacagttgcgcgacctggatggcgcgagattgggaaagtgcgagagcgggagggcgggagatcgagctggcacaaaatggcgagttggagcacctcggcaaagatagccagggaactgaacgcgatacc

SEQ ID NO: 32407 - DNA, 352 bp, Zea Mays
gaagcctcgcgatggtacagtaactggattaggacaccagcgcagagaagctcaccgccggcgatcgtgcgcccggattcacgccgccgttgtgattcgtgctcaccggtgaccgaataacgcttttgggtaaaagatcttcgcctggggataacaccggcggctggccgccgtatcccttagctttgcggctggctcagataagttcaccgggattggccgcccgtcgatcggatgccacgtgccttgaagcttcaccacgtcgtcgtaagccgctctatagccctggctcatcgccggttagtctgccatggtgaaagccactaatcgtttgcgctagtgcccctcttcc

SEQ ID NO: 32408 - DNA, 440 bp, Zea Mays
tcagaccagattattatggcctaactcagtgacaagggagttcaaatcatcaaggagaatcttcatcagaaagcggagaagtataagtgttttcgccaagatagcaaggggatattgtggattgaagacagaatggtggttcctaaaaatagagacctcaagaagagaatcttggatgaggctcatctctccaaattctctatgcacccaggaagcaccaagatgtaccatgatctgaagcccctatattggtggacctgaatgaagagggagatagcccaatatgtatcggaatgtgacacatgtcagaggataaaagcaagccacttaaaatctgctggtgccttgcgaccccaatcaataccttcatggaaatgggatgacatcatcatggatttcaatgtgagcctgcccaatacctctcggcatcatgattcaat

SEQ ID NO: 32409 - DNA, 465 bp, Zea Mays
cgaacatttgtcaactctcaactttgctccaagttacacaacactcaggtggttcctataccgttacatgtgagattggccaatggagatatgttgcactgtcaggacaaatgggtgcaagtgcagtggcaggttcagggatgcaccttcttttccgatattcctttcctgccattgacatgttatgacatggtggttggaatggattgtcttcaacaattcagtcctatgaaggttgattggaataaaaaatggttatctatctcttatcaaggatcgagtgtggtgttgtatgggcgatcatcagtcattccagattgcaccgtagttgaaatctgtttggtgagtgacaactcttcctcggctgcaaataattcagttccaccccagattcagtcacttctaaaacagtatgttgttttgttcgaagaccccaccggactgcctcccagtcgtgactgtgat

SEQ ID NO: 32410 - DNA, 372 bp, Zea Mays
gatttgtacaatatatacaacgcagaagatatctttaagaatctatataacataaaaagaagagcaggaaggctagtgtggttgtgagtgctatctcactgcatcacggattcaaatcaacctctccgcatttgacgggagaaggcttgctttagtttatcccttccatgaaccccacttatgtggaagcctccaacactgggtttgcccctttttaaaagggcactgctacacgtacaactccaatggtagactcttgtgcgaccagggtcatataatagctcatgattcattactcattagttcaaaacttaggtaacaacagccgtagattaatgttagtcgtactcgagtcatacgagtgggtcgtag

SEQ ID NO: 32411 - DNA, 660 bp, Zea Mays
gccaggtccgaagagctacactagcacaagatagagtctcagcgaaaacccaaggaatctccgcagaccagcaaaacatgggtcaggccgacgcagtccgattccgactggcaaaaccgcaaccagcaacaagtgaacaccatcaccaaccaacacctccccggagacacagctcgtcgtcaggagtaccccgcacaacaaaaccgtggcaccaacaccagaggaagagtcagaggtcgagcatagcagccgcgaaggttttactgcctgtttcatggcgaagaatgtgcgcaccccactagggattgccctgaaaccaaggccaccaacgataggatagcctggaatcagccagctgacaatgagtaagttgtcgcacacacttatcacccccaatagtactactagcaaccataccacaacgaatagatccttcaccaacctaatcacttgtaccatcatcattaagagatccaactcctccctcctccaccgcatcatcaaaatcctccacatcaaaaccctccaccaccagcacccaaacaagaggactttgccgagtagcctttccgcggggtcattcacatgattaccgaggggtccagcgtagacttcaacaccaaacgatagaaaaaggatcactgccatagtgttaaccac

SEQ ID NO: 32412 - DNA, 547 bp, Zea Mays
cagtgtttttttcacaaaattccgaagggacctcatttggagagcacttgtagaaaataagtgcaaggtcttctcctggatcccaattaagggaaaactactaatggaagataacatggaaaaaagggttggctgcacgaggaacactatgttctctgcaacgggcctttggagacccggctgcacccatgcttttgctacccatttgataaggcagcttggaatcaaatccttgcttgagagcactttgacagagtgacagaccattgggacagcaacaggctgacccctcaaagatcatatagtggtgggaaattgcctcaagtaaggtgtattgtagtgaatgaagatggttgagtggcatggtgatttatatattctggaacctctagaaagagaaacagaagaatcttcaataacgcctatgaaacagtgatgcaggtggccgcaagaattaatagagcagagaagaagagtgatagcggactatttatcttttgtgtgatctttcttgctcctgccccagaggggtgtggtatttttgctt

SEQ ID NO: 32413 - DNA, 347 bp, Zea Mays
aaagacatcatgaacatccgcaagatgatccggtaactccaattgatatgccacctctcccactcgctttaagattaagaagggtccaataaagcgaggggacaactttcctttgactttaaatcttctcatacccctgagtggtgacaccttcaaatagacataatttccctccttaaactcgagcagtcttctccgggtatcagcatagcttttctgccatgactgtgcagttctcaaattctcccttatttgatggacttgttcttctgcttcttgtataatctcaggcccaaacaactgcctttcaccagtttgatcccaatacagtggagtcctgcactttc

SEQ ID NO: 32414 - DNA, 407 bp, Zea Mays
gtttagtgcagtagcgggcccgattggccatcaccgtcgtcacgtgttcgtcggcggtggaggggtgtcgtcggggaagatgagttgctaggagagggaagaagaagaacgaccgtggaccgtctatctgcttgtgtacggtctggattagatgttggcgtatcgattgggggaagggctgtggatcgtccgatcggaatcggatggagatcggtcctttgggcttcattaaatcctgagcgttggattcaaatctaggggctcttgtcgtataccgattcatcagctcaccgttctaatcgtgcgcgttgccgctcgatccgacggccagaaaacatccataccccttcgcggtgcacttttgcataagagcccctcaggaagtaggaaatagaacccaccgtcca

SEQ ID NO: 32415 - DNA, 718 bp, Zea Mays
caagaatctttactggcttttctcggtactgaagatccttctgaatctggattgtctattcttcgatgtgattttctagtacttgcaggcatttgcggagctaggacacgtgaaacacattgtggatatctgacatggattctggcaatttcaaggcggtatgttgcgggtcctactctgccaatgataggataggggccgacgaaccacggagctagcttccctttcacttgaaaccttttgactccgcgcatcggggagaccttgaggtagacgaagtatctttcctcaaacctgagttctctccgcctgttgtccgcataactcttctgccgactctgagcttcaagtaatcttttgcggatcagggcaaccttctcttctgactctttaacgaaggcaggtccttctagtgtcttttcccctacgttgtaccacattagaggggtctgacacttccatccatacaacgcttcgaacgatgacatcttgatactggcctggtagttgttgttatacgagaactctgcatatggcaaactggactcccaatttctgtcaaacgttaacacataggctcttaataaatcctcgaggaccttgttgaccctttctgtctgaccatctgactgggggtgataggcggtgctgaagtctagcttggtgcccatagcttgctgaaggctcatccaaaattttgaggtgaactgtgttcccc

SEQ ID NO: 32416 - DNA, 293 bp, Zea Mays
agttacctgaagattagaaaagaatgagggcaatcccaagtcatgagaaactgtgttgtagctcaacaaaggaagatcaactggaacaatctgaagagtatcatcgggggttgattcagctccaccagcagatattagaattctggcatccggctcgccgacctccaaggcgactccctcactcaaagctaaagaagtatgcatcgctatcactccatcagatcatggtggagacgacccgacgtggacgtccatggaagtgtgggaaggagagctcgctcggacaccctcgg

SEQ ID NO: 32417 - DNA, 672 bp, Zea Mays
gtcggatggaaaatctacgcatcatattagaatgcccataccttaaactggtatccaatcctcgccctttgatcaagatctaacggcccaaggaatctcatgccttgctctcatccgatccgaccgcgactgaaacaacggtccagattccattaacctgtgatctaattgtgcccatccattgtgtgatcagcggctcagattcaacacctatcaggatctaatcgaatctgtcctagagatggctaccagtgattcttcaaatcatgaccacggagcgtgatggtgtgacggcatcgcggttgcgccatcgtcggtgcgaaacacatctattcacccaccgctctatgctcgaatttactcggtgcaagagaaataggataggaaggcaaatgttatggcatgcttcttactcgagattatggcgacgaccctactacccacaaaccaaagctatcccgctgtgcgttcgccaccacgacgagaaattcaccagtgttattgtcacaaatccacctgggtgtggccacgaccaccacccaggggacgtaatgaacctttcagacccgcactcgcgtcccgaacggcgacagaggcgaggttccacggcgcacggtggcatggtgactccgcctaatcaccagagtgtgattcctcgcagaccaatcgtag

SEQ ID NO: 32418 - DNA, 453 bp, Zea Mays
cttaccttttacttctctcctctgtgcgcaaaaggccaacttcaccggcatgtcgcgatgaagcactccctcctctcctcgtctcaccattgcacaccaaatctctcaccaatacaagtagtctctccatctagtgggattcatcctcccattagaaccagggggagatcaaggccccaaggatctgctgctgctcctcttttccaatcaatccaaggtattgtgttgatgtctcaacccctagcccttgttttgttgaatctcaatgcctctttgggtggactatgtagatgttgatcaaatacgtgtaaccatatgattagttgcatgggtttgagattctagagttgaaaaaacacactggtgcatgtagtagtgttggattagagcgtggtagtgccgcacctaggcagtgtcgggcctctgggcgataatgttgggccacgttatgac

SEQ ID NO: 32419 - DNA, 331 bp, Zea Mays
ttgatggggaggttacccggtttacatccaaagagttctgtataaagttctaaattctcctgggcagccccaaaacaaaacacttcactcttatggaagttgatctttaggcctgaagcttgttcaaatgcaaatagaagaagcttcatattgcacgctttgtccggatcatgatccataaagagtatagtatcatctgcgtactggagaattgagagcccgccatcaacaaggtgagggatcattcccacaacctgctcatccgttttggccctactaatgaacacttgtagcatgtctgccattatattgaacaagaggggagataagg

SEQ ID NO: 32420 - DNA, 271 bp, Zea Mays
ctggccaccgctcaagccttctataaattgagtgcacccacggcttcgtaggataattacacatccattgcaccagtccttgctccggattatccaccagagcctcccaatttctctcttcccctaatttggttctccgtgccgccgtgtgtcggctcaccgtggtcagcgaactccaggtctgttcgtgctccctgcacacttgtttcagcaccaatacctgccccggatactcctcgaccaactcaatgagctaagctaccttagatcg

SEQ ID NO: 32421 - DNA, 348 bp, Zea Mays
gctagtgaaggtgcacggtgtgaccctctggagtcttcgacgacgatccgctcctgcaacctcgaaactaggcgcttgcggaaagatatccggtcgtagttggccgggtcggcgctggccttggtgagccttttcttttctctctctatgtctctgcggtattacagaagctatcaaggattccattgccggacagcaggggcagggttgggcgtgcgctttggatctagacagtgttggcagattcttgcgaggtccgatcgccggtaaaacttacctgctcaagttcgtcgttgtagtagttttgtgtagcactttttagtttgggtaaatgattattgaatcgtc

SEQ ID NO: 32422 - DNA, 742 bp, Zea Mays
cgggaacttcctcttccacgggtggcagcgttgacggagtaggagtctgactcgcgtaggagatccagccgttgctcataactgagcagttgggagtacacctccccaatggtgagcggatcagctcgcgcgacgagggaggtgatgaccggattgtagtcgtagtcgaggccggtgatgatgtacgaaatgagctcgtcgtcgtcgatcggcttgccggagtttgccatctcatctcccagggccctcatcttgccgacatattcagcaattgtgaggtcccctttcttggtggtggcgagggcgattcttgtgttgatggagcgtgccttggtcatggaggagtaaattgtttcgatgaccttccaggtttctgtggcagttttgcatgccgctacctgggtgagggcttccttggtcatggatgacagcaagaatcctaggacctgttggtctgtggtcttccagtcctcccatgccggattgggaacgtcgacgtccttgtccttgatggtggtcgccagagctgcagcagcacccgtgaggtaaccctccaggcgcacacccctgacggcggctaggacttgcatcttccagagttgatagttccccttggccagtttctcagaaacagcttgaccgacgaggggattgataattgcagcagtgctcgacatgatgattctctggtggattttggtgtttatggattggctctgattaccataaagaatatcagagg

SEQ ID NO: 32423 - DNA, 516 bp, Zea Mays
cttgcaagcatacaaggtctggacaggtagagtcaatcataacccgcactgcatcatgcctagccttcttgttcagccccctcaaattccaaatcagtatttttgataaatccattggaaaaacaatagaaaaaacaaccggaaggagagggagattagtacaagtcctccgggttatatccccagagacaaccagcacctccagagcagcgtcgacctcatcaggaactgaccatccgaacagcgccgccagagcaggaatatgtgactgatagagtggtttagtgaagagtcttccatactcgtcaagggcttcctgactgaaagcctcactgtcaacagatatgcccagacgtcggccaaggtctgcctgaatttgcctgcttgcaatgtccaaagttttattaccacgcttggctatacgagagctccagcgcggcacaaagtctgaaggtagctgcttagttcttctcttctgaatgcaagggtagggaagtaagcacgtgactggcttcg

SEQ ID NO: 32424 - DNA, 318 bp, Zea Mays
ggtgtcccgccccaccataggcaagccaatgataagtgtttatcattgtgacacgcccttgccctgcgactcgacgcgggtgccccgtcagccatcatggtacttcctatctccctgtcacgagacactgactattccacaaagggtttgggtctaagggtgagctaaggtggggcagacgtcgtggcatgtattgtgatactagcagaagtttcttctgaattttcagcgagggggaagtggtgccttgttgtgttggttgcaaggcactagggactagtgatcctatccccgatagtgacaataactcaaaccaac

SEQ ID NO: 32425 - DNA, 597 bp, Zea Mays
gcgtcgacactccgtcagctcgaacagcggtgtcgatctcagcgccggtccgaatcgaaggttgagaagttccttgaagcgaccccagggcggcgtgccctcatcctcctggagttggaggaaccacagctgggccacgtcgtccatgttgtaagacgccatccataccttttcctccggcatggtgcgttgatgtcgaaagtacgactcgcacttgttgatgaagatcagcgggtcggacttgccgtcatagcgcgggaactccatcctctggaacttcggcgggtgatccatgcggtgctgcccatcttggtggccgccgtagtcggccgcggaggcgaccttctcctgcatgatatccatgtcggactgcatcttggacatgttggaggacagggtctgtagcatcttcatgacgtcggccatggagggttgagcgtcgtcaccgatggtgatgaacctggacgtagcggtggacggggaggtgggggctggtggtggtggtgcggctgcggtggctgaagggctgggggtggtggtgggggatcgtcgacttcctgataccaggttgtcaagggcatcggccccgagggtagg

SEQ ID NO: 32426 - DNA, 694 bp, Zea Mays
cgggatgtgtgtgtatatgcatgcatgatgattgagtcatgatgaaatccagactttgaaacgcggggcacggaaaggcatgcgagggtggtgatggtgatttgatacttgcatgggagttagggtttagggttgtgtcgccggcaaagcgagcaagctagctactctacctgctttctgtgcgcttctggcccgtcgtgtccgtgtccgtcctgcctttcttgtttggaaattgtaacttggagatccctttttgcgcgcttgagattttattttctggaccatctatccatcctgacccgcccgaccggggaagagagatgtacagagacagaaaccgggtcaccacacacgtgaattgccggctacgtacgtccttggttctaaaataaatacaactaatattactactagtattatttctacaagcctatcttttcagtataagcagccagatcgatgtccggttgtctcgggacggacacccgtggcgcgcgcctcctggtcgttctgggagcacgagaagaagacaaaagccagtctccttttggcctcggaatccgcaccctgcagggctatgctatgctgccccagctcagctctcctctccgtctagtatctcgatccgtggatccccacctgttcacgtgatgacatgatatagcgtgtctcgcgagctgcacgtacgtacggc

SEQ ID NO: 32427 - DNA, 447 bp, Zea Mays
aaacatcaccgtgggtgagggaaaatcgggccaccatcgtgggacagccaccttggcgtcgtctggcatccaaaaatcggtctgggggtgtgcgcatcagctcaggggtgttctccggtgagacattttgtgccgtggggtatggttcaacaacgatttctcaccggacatgggattccaccgcagaaccactccttaccgtggccggtgcgtctaggggcacggactgtgtcatgggtcccctggcctcgatcgccttgtcactctcgtcgtgttgcaccatcaacgtcgaggtttgggctgctgtgtggggatcctgtaggttgcggccatggcaccaccacgatggcgatggcgtcaccgcctggtctcggcgtggggaggaagacacacgatcgccgttgatcttctgatgagtgggttagattaaaacaaggtaacgcttcg

SEQ ID NO: 32428 - DNA, 325 bp, Zea Mays
ttgtctttttgggattctttcctctttcgtcattaaattgctaccatctggcgaaatgtagtcctttggtattgacatgcttgtatccctttaatactttggtttcaaatacttgcctctaaatttctactgcctacttagacatttcagttaacatgtccttgaccacctctgtttcttaatgatccatgagcggtcattttattttgcacatccttggtgatctcgttctttccttgtaacttccttgggtaattaatttttacttcaacccttctgctggaaccatacctatcttacccttgattattttctccacttcgcc

SEQ ID NO: 32429 - DNA, 329 bp, Zea Mays
cttcggtgcgccagtgtggcgtgtcacgtgtcaatgaatccaacacgaaatggtgacggtgaggtgataacaggcgagggttagcgagggcaggcgatgatgcggcggtacatggcagaggcagcaagcggcagccattgccgcgttgcaacgacatagtgagacccagtgagatagtgagcataggtggcatcatggtgctaaggcaagatcctaccgatagcctacccatctactggtgcggactatgaggcaaggtagcggcactgcgtgcaagatcctgattaggctttatttgggtactctagtatccatcccgatccacatgt

SEQ ID NO: 32430 - DNA, 360 bp, Zea Mays
ccaccacaaaggcaggacttcgcaccaactggtcgcccagggttggcatccgacggtggcacacgtcgcccagtacccaaccttgtgccaagggccacactccatagccgataaattcctcaaccaagtcgtgcccgctactcaagcgggcagcatatcgaagggccccttcgtcctcgtcttcctccgccacctcgaatcgagggaacgccacatagtagtgtgagcacagaatggccggagagaggccaggcaggtctttgatatcaccaggagccatatagaaccaaaaatcccactagttgccccatttgttcctagcacaagggactatctccacgacttcagccgaagtcttcc

SEQ ID NO: 32431 - DNA, 309 bp, Zea Mays
aatcatgaatgaaagaaagcgcaaagagatggaagaccagaagcgtaagatgagtggaccccagtcaaggagcaacagtcacccccatttcttagacagttcatctcagcagtacaagaatggacacccatagagatatcagcagcagaaccagagtcagaaccagcagtagactcagaggcagtattagcggtcgcagcaataccatcagaacagccaaccatgaggaaatcagtactagaggaagagcaatcaggcacctcgcctttctgccccagcatctcatcagaacaaccaggcagcccccag

SEQ ID NO: 32432 - DNA, 424 bp, Zea Mays
tgggtcctctgcgtcgtcaattcgtggtcgccggcgtgaccgccgccgtccattgggggggcttgaccgcgtggcctggcgctgctttgggacgacgactggtctgtcgtcggatggccactggacggattagattagatcatgcacaccggttggaccttagcccttggatcgggatcggtcgaatcgaaggaacctttgctattttaaatctgcaccattgattctggatccgatggtcgcgggtttgtaccggttcgctttagtacagatttaatcttgcgcgctgaattcggatccaacggcccacatctaaggataccccttcgcgacacatttttattaaagaacccttacagttttagagaatagaacccgcggtccatggaccctattccctgagtctcggtaaacttacgccagg

SEQ ID NO: 32433 - DNA, 482 bp, Zea Mays
ggaggcaatttcacctttagattgttgtgagtctcggtcccgccatggtacggtgcggcaccgcggcaacaccccccctccgatgaacgattcccatcaagagcgctacctaggtcaagtatgcaggacggctacacaacctagcgatgagggcggagattcggaggtgattttaccggaggatggcagcgcaggggctccgctccacgtgatggcgcctctctaccatggttcttggacttcgacgagcacacacttgacccccggacgccaaacctccataacgagctcccagacactatcctcagggcgcggcggggcttctaagatcgattcaatggcggcctcgcgagcaccttccactcttcctcacgacgcagatgcacacagcggcggtggatcttttctctctcctcccctcattttggcttgctcggaattcatggcgacgtgcggtacccacggttggggcacgacttata

SEQ ID NO: 32434 - DNA, 657 bp, Zea Mays
tggataggatcgcgagtgggaatttatcgccgtgattatagccgctgcgacgtggccggactaccggagtcgtcgtggaagcaccggtgaccttggttgtgccacgaccgaagcttgttactgcgtgttagcaagcgtggcacccttaggagtattctccttgcgccgttacaccggcgactgccacggttacagccaccgtgttcttctctgtctccggccgcccgtactgcccgatgaaatcacgcgccaccgcctaagccctctataaattgatggctgaacctgctgcgctaggtcattgcaaagccatagcagccactcccgtccccgattagccaccccagccggagaatcgttgtttgcccccaaatcgatccgccgcaccgcaagaaccgagctcgtcgtggccagcaccgttcaggtcagttcatgccgccttctccctcgtttgagtgctctcatatacccatgatgcccattgacccactcaattgcactgggtagccttagatcaccgggaacgcactcatctgtctgcaacaccctcggtcatcgtggccagagtaaaccatgtggtcattgatgaaattaggttaggggaatggttcagggagggtccaattcggtgttagccgctcggggaccccagtcgtt

SEQ ID NO: 32435 - DNA, 307 bp, Zea Mays
aacaatcttcatatcaaaggaataaaaagttaagaattttaccttaaagttagcataaattaggctaccagcgatatgctgccgccggtacctgctgaggtctgcctcaaccttcgggaggccaacactcttcgatagagtgccgacaaccttcgccctagtgtggtcctgaaggcatcctaagctttcttcgttgactcccccgaagagtaacgcacctggtctgtacccgcaagatatagcatactctttcagttcttctttttcagcctttgacaattcttgctgtggcagaaccacccaaatt

SEQ ID NO: 32436 - DNA, 453 bp, Zea Mays
ggccggtgtcgtcgtcgtcgtagactcgtaggtatgaaaataattgtacggcggtcagatcatttccgtctcgatcgatcgtccttgggttgtccgtttttagtttttactactacgtactgtacatgcgagcgtttaccttaaaagcatcgaaacgctcgtcgttagcctgctgcgtcaagtgcagtgagtacctccactccgatccaggcggctgcatcaagcagcaaatgcaagctagaagggatgccccaagcacactagctagctagtactagtccacaaatacgcagctcacaccttgccatatatcccggtcatatcatacgtgtaccacccacccttaccgtatccgtgtatgcgggcgggggtgggtcacccattaattgccggcgatattttggcggtaacgtggcgccgcgaaccaggctagcagggagccaggggctaggc

SEQ ID NO: 32437 - DNA, 302 bp, Zea Mays
cgccgctatccacgcctcgcagcaatccagcacgcaggaatcccatcgtcgacgacgcgcaggaccaccccgcccaatcgttcttcccatgcaccgcggatgccccgcccatatcctccacgccccaaacgcaatccacgtctcgccgccatggaaggaatcgcaacccaatcccctcatcgccatccagcgcacaggaccaccatcggcccgcatcccatcgcaagtttgcaggaccacccctgccacctcattcttcccattctacgcgccagccctgcttgaaccttccgatgctcgag

SEQ ID NO: 32438 - DNA, 616 bp, Zea Mays
aagcttttcaccgccgtcaagccttcgccgttgcccgcctcgtggctctgcctttacaccacgtcgtcgtgactctctagggtcgtcccatcgtcgccggtgagctcgccacgactgaggacacgcacccacggcgctagagtcctttcttatctccgcccgccgcgttgttcgatctaattgagtgccaccgacgaagctgcctataaattgagcccgtaactagcttcgcaacatcattgcgcacccccacacctagtattcctcccagccgatcaccagcaagctccaattccgtattccccccaaatcagtcgaagaacaccgtgaaaccaagttcaccatggccagcctgttctggtaaaactctgcccaattcaaaccttgtttaagtgctctcgtatgcctgtgatgcccatcgacccacttaattgcacggagtagcctttggtcgccgggaacacgactgtcttgccgtaatactctcggtcaccgtggcccgagcaaaccaatagctcatcgatgaaattgggttgggggaaatgatcgaggtagctccaatttcgtgtcagtcactcggagaacctagccgttgccccaatcggtcggtccagac

SEQ ID NO: 32439 - DNA, 694 bp, Zea Mays
gtggtcagttcagaagaacactgaagatcaaaccctgacaaatatctgatgaacgcgataagatcagggccactgttgaatcggatgggctctcgcgatccagtgaggagaatcaatccggggatggataacttccaacatggtgcaattccgcgaacccagtcaagagtggccggggttagtcgccggcagtcaccgtgactcagttaacttttgtcgcggtgtcacccatgcctcgatctccctcactgtgcctcttccctacatggtatacatgcgccaacgcagttatccgtggccatagatagctagctggaccgccatggctataaattgcaccgtgatccacaacggggtatgcacacctccactcagtgagttgatcgtaatccaaaattcacgctgcctcagctccctcttcccaaattgattgtgcatggtgaaactacagtatcttacggctgtatagccccaatcccacccccaatttcacctagagccgccgcgacaccattttcccccttcctttgtcaccagcaagccaaagtctccgcgctccgtggccagcccactctggtaaggctctacgcctctcgtgtgttgttttagcagctcggtgtgcccaggaaactcatcttggcaaccgtttggtcaattcagccatgattgagcaggaacgcgagctcgaggtcac

SEQ ID NO: 32440 - DNA, 413 bp, Zea Mays
ggttgttaggatctcgaataactggtgcataaatatgtgggagctacccctttccatcccccttgttatcccagccattgcaacaccaaggaacatccaccaagcaccaccatggtgaggatcgggccaccgtctagtcacgtgctcacaacatcgttgggggcttacttgcgggtctaagaactccaccgcgcctctaggattgagctcgaggtcttcgcaggcgaaggggtgctctggtccacgaccaatttctcatcggagtgtgcaccgctacggatccttacccaaccgtgggcagccctcacggctaccccatcaccggtaaggcttgtcttcatagcttcaccctatcctcctcatcgcataggacctatctgcactcgaattggctcgccagagcgctatgtcgg

SEQ ID NO: 32441 - DNA, 299 bp, Zea Mays
tgatatacctgaggttcgtgatgtagacatgggtaagaacagcagggcgagtgaccggtgagccccaagcactagtagtccctccctgtgatccatagatggaaggtggaggaaatccgagttatgaaaacactaagataggaaccgtctcatggcttcaagaacatatcccggctgactcaatctcatcccgtaaggctaaaaatgtttaggcacctgctaaaagcattgctggaccacttaccgactcaaccctagcccccgaggctgaaaaggttgagacatcgattgaagttact

SEQ ID NO: 32442 - DNA, 281 bp, Zea Mays
cttggcctcgggtgagttgtaactttgtatcccaccggggttggcctcaggcgagctgtaactgtgtatcccacccggggggttggcgttgggcgagtcatgattgtctgtcccgcccgcggatgacctcaggtgagtcgttacagcctgtcccgcctaggcttggcctcggacgagtcgtgactgtgtctcccgtccgagagtggtctaggaagagtcgtgactgcctgtcctgttttggctttgcctcgggcaagtcataactgcccctcccaccgagg

SEQ ID NO: 32443 - DNA, 352 bp, Zea Mays
aaataatattaaggctcattctactctgtggtaggactgcgggttggtttatagaaaatccgaggactctttagcaaaacaaccagtcgaacgggtatcggccaaggtgggccattggattacgcacaaacggcgcggattagaccgagtcaccagcgaagctgtacgcggcacagaccgtccaatccgcgacctatggcgcagatttaattattatggagtcgctctgctccacccgatccacaatcaagcaccacgatctaatctagcgggaagggtatgtggatcctaatctggaccgttcactcctaaatcaatgacgcaaccctttgcctaccccgacggcgtggac

SEQ ID NO: 32444 - DNA, 819 bp, Zea Mays
gcacatgaacagtttcgtttccgcatggattcatacaagaagaaagataaagtacaactctcatttcatttgttacttaagttcagatcatggccagtgttaggtttgttgacgtccctttctctattcatgtgttttagctgcaggaaagaatgcctaggaaagtggggtctagtgctacatctatgaaccaagtcaaaggtagacctcttattgtaaccaatgttacctttgacatttatatctctattaaaatcttattgaccaatcttcacaaaaaaaagatacgtgtttttccttgtcaattcatagctagaacttccctttgcaaactcattctctgatttagttgataaaaaactataatgggtgatttctttcccaaaatagaagcatgcttctgcttgcatatccacacctcaaactttctttttcaaagcacattttctgattttatttacacacagttataacgtgtgattttcccagtggtaacttactggctttttgaacatgttgcaggtgaaagcagacactataaagaactgaaatccaatataaagcaaacatcagaaagcagttctaatccttcattagggccaactaaagttggtgttctctccagaggaaactcaggagcaaacaataatttgccccgttgtaatagtgatgatactgtcgttgtacggtttataggctctgctttggttgggaagtcagagactgaagatgcctgtcaccacggcctagttgagccaactataaacactaaagaggctttggatgccattaatagcatgtttatggagccactggaac

SEQ ID NO: 32445 - DNA, 302 bp, Zea Mays
caccccatggaacgggcacccgttctttaaaaccggcccccaggctgtcgggccctcctgttttcgcagagaggtcctaaactgcaagcctggctgttcaattcggatgtcatcatgtctgatggaatgggaactgcttgggtgggttagataaaataacatccggaaaactgcaaggtaagaccatggagcagtaggataaaactatcatagaggcacatctgagggggtaaatcttttctttataacctatcatgcatgggtgcagaccaacaggacgagcttatgagggcggacctcac

SEQ ID NO: 32446 - DNA, 473 bp, Zea Mays
aaaattttaccccaaaaactgattattaagagtaggctaaaaagttttaagagtgaattatgttggatactccaacagttcctttaaatgtgacatgtggcacaatatgtacagtcgtcgggaggctatggatgatctgatacgttgaggaatggattggggagggatgaaacacaccaaaatataagagagatgaggctgtggatgcgggacgctaattttttgggggaagaattagggagctgttggagtaagaaaaaccattattattgactagtatctgttttggggttagtttacacgttcttttggagttgctctaaggggactcactgcactctgtgtgtggtggatatttgagagcacctagagggaagggggagggggtgtgaataggtgatcctgcaaaatataacttaaaacacacaaacatggtctaaaagttagagttagtgcaaattaaaccaagtttg

SEQ ID NO: 32447 - DNA, 414 bp, Zea Mays
ctcacatccagctctggctccttggtgccctggtctctcactcagagttcgatgttgtggatttccttatttgtgagatcgaggacaccgttctagatggtctgcgtgctcgtcgacagcttccttatgctcactatctgtgtcacatttttgctcagctgattcggcctccacagttccagggcacacttgaggcctcacgcctcctctttgggtcctaccgtccagcgcctgaggatcctgtgccagcacctgctccagtatttgacactcaggccgaggatactgctcttcatcagttcgaagctcaggacgcagcagttgatgatgatgatgatgatgattttgggattccacctccgcctccacctcctatgcctccatgctcacatgatcatgaggctgggagtctcg

SEQ ID NO: 32448 - DNA, 339 bp, Zea Mays
ggctgtcgtgtgctaacactcagttcccatcaagactccagatggctggctttcaccaccccttgaggcttggcacggtgatcgggtttgggagtctggagttcatgtcgctcaggatcaagtacgacatggtgctcctcccccgggtcccctggctgacactcaggaacgttcaagcgtttgtcctcgtccttctcgttgtaggacaagagacggagcaactgtaaccgcaccacctgttgcgccccatgtcctagcgaggctcctgtgctgaccgatgatgcagactcccttgtgagggacctggccaatgtcactatcacacctagagcaccacca

SEQ ID NO: 32449 - DNA, 485 bp, Zea Mays
gggatgagctcgtgggttgtggccgtggccctgcttggcggagaggagcctcgggttgagggcaatttctcgctggtgcttagatgccaccatggagctcctacgcaccatcaatagaagctatcgcgatgtaattcaaggtaaggtatatgccctatcgttcatcatactcccttgcatgttctgcgcttgtgttggagcgggtcgaggtgttgggtaatgtggtggtgccttgccgcggttgagcgccgccgtggcaccacgcggtgtcgtagtcaagaatttgagctcgatgttaggatttgtgcgttaggccatgtgattcggggtggtcatggcttcgttcaccctgggtctgttgtgagattagaacctagagtcgcctatccatgtgccccagttgggtttgcggtggtgctctagctcactgtcacagtggacggagggaagaagaagacgagactcagattgttgatacgatgatg

SEQ ID NO: 32450 - DNA, 440 bp, Zea Mays
cccggccccgaggccttggcagaagtctaccactatgtcgaaaaggtccttcagctcggtgatcttttggtccatggcccgggagagtgtccgggaggtctcaatggaggtgtcccagtcccaccgaagctctagaggataatcgagacactgagccagggccgacaaaaaccaaatagacaaggaggaggtaacaacgtgtacatcctatttgggccttcaggcttctagcctcagatcgctcagcctccggatcctttgcgagggagtcagctcgggaaaaggcctcggtggcttggcaccaagactcgtctcattcgccggtcaccgccaggaggtcttccctcaaatgccacacctcctcctccagcggcgacaccttcccctttagcagccgcacctcctcctccagcggtgccacctttacacgcacgaccgtg

SEQ ID NO: 32451 - DNA, 678 bp, Zea Mays
cacgggttgagccgcggggagatctcgacgactctctgtgctgcgtgggagtcttcggctggatatcaccagcgccgcgggccacgtctcgccctcggccagcaagggtgtcgtcacgtttcccaaccacaagctcgttccgtctgggcattggtacgtactcaactcggtagaatcgtcgctatctctgcattaagaaacccttgtccggactccgtcgtgccttgcatgaacggcaatggctggctctggatcctgtttacgctaggggagtacggcgtgttcgtcgggaggaagaagatggcttttcgttcgtagatctggaagcggacggcttagataggggcacgcagatcggttgggctaggtgaaatccggaccgtcggatccgatcgggtggatctcagtgacgctggcttaataaaatctgaaccgttccttgcaaatcgtgtgatccgcgttgcataccggttcggtgcgggggaaagggtaatccgaaccctcgatgcctgatcggatggctcacatgccgcgataccccttcgcgggtctcttttgtataagagtccctggggaaaacgctaatgaacccgcagtccaccctgtacagcatctgtgtcttgaattcttttacgcttgagaccctgcgctttccagaattagaggcccagtccagag

SEQ ID NO: 32452 - DNA, 272 bp, Zea Mays
gcacagtttgaagcactgtatggatgacgatgccgaacacccttaaattggtctgagccaggagaacggtggtttttcatacctgacttggtcaaagaaacagaggaaaaagttcaacggataagacacaacttgaaagaagctcaagctcggcagaaaagttatgcggataaatgacgccgacctttgatctttcaagtcaaggattatgtatgcctgaaaatatcgccgatgaagggtgttaatcgattcagggtaaaaggaaagttggc

SEQ ID NO: 32453 - DNA, 325 bp, Zea Mays
ggttctcccacccctgtcgggattcagcaaccttaccattcaccgccccatggtcgcttcgactatggtacccaacactgcaggacccagatagatttagatccatagatcgacagagtcagagtctgtaataattcttactttagtgtcttagtctagttagtcttagttcgagttagtttgcttatcgtatgttggaatgcttgtcatgatgaacatgtaatgaagttggatctttgtaatgattgtcaccaaggtgtgggtatcccctacaacttggtgtagttattaataaagtcagttatttagttgggtaatccattta

SEQ ID NO: 32454 - DNA, 305 bp, Zea Mays
gttttagtagcagtaacaccaggggtgttacatcctttcccccaaaaaagaatctcgtcccgagattaaaagtcctagggtagataatggaaaaggaaatgcttcacatttttatttccttatttttggtacaaggcaggggtgggttgggactcactccattattacaacaatgttgtatactttacaaattacaagaggctaaaaagcctggaaaattcttatttaaaaagtcttgagtttcccaagtagcctcatcttcggaatgttggttccacagtatcttgtaaaacttgagagttttt

SEQ ID NO: 32455 - DNA, 430 bp, Zea Mays
cgagatttggcgaccgctgtgccagaacaccatctaatgatcatggatgttctagaggatgggtcccaaggcacgcaggaaggtgaccctgatcatgaggtcgtaacctcctagcggaatggcatagcaggtgatggggaaaccgtcgaggctcccgcgcatgtcaaaatccagggcccggccgaagtaaggcaccttatcaccgttggcgatgacaacacgaatggaagagttgttagtgaagaagggggccgaccgtggtcgcgatgtcggtgttgatgaatttgtgcgtggagctagtatccatgagagagttaagctagtgcccatgaatggataccacgacctacatggtgtccgatgtgtgcaccctatccagggcatggagagacattgtgggctacacggtctctggtggagactcctctag

SEQ ID NO: 32456 - DNA, 385 bp, Zea Mays
ccccagaacgcgcggcggaagagcgaatctacggcggcagcctgacttggccttttgcgtcggtggagaaggtgtgaggtttgtatggtcgctggctcaaaaggggtgagaaggtgaggatgcgctggtacttatgcaggggaagaccaaagccacatctgggatctcggagcaccctccccacgttcaaccaccatgccctgccattgtcacgttctgttgcgccggcccgaaaggatgtagctgaggagctggtcccgcatgtcattgactgggatcaacacgcacgcgcgtgtggacggcctgccatcgggacccacccgacggtgtccgagagagagggagaggcattgtgtggctgctcagtgtgcccgctgggtcggcg

SEQ ID NO: 32457 - DNA, 465 bp, Zea Mays
gcaaaaatcgcctacggacgcggctggatcaacgaaggcgcgcaaccttatcatataaattacggttacatatacacagcgagggcatcatacaacacattggctcaaccttcgggatgatacccatctccctagagttgaacaacattatcctcaattcctcaccctcaaaaagatttcgtagctccccctcacctacactcaccccaatcggcgaggacaacaattctcgcttaccagtcccgtccacatgaagacacccactctccaactcaccacgttgccgtctaccactttgcgacaatccactcaccctccatttctccaccgcccgtcgccgcctatacccagtactcgcgcacgggggctcctcggaaccctccgcgcgcggggagggctccgttgcagccacatccaacgccgcaaaataatccaagtcctcatccgaagactcctccgtccatg

SEQ ID NO: 32458 - DNA, 277 bp, Zea Mays
gtgcctgatgcctggttggagttatcccgagcggcgtctcgtgcctcatcgaccttggagcgcggtcttaagagtcaggaggctagtatggattgctctattcccatggaagtggttgaaggtccttcagccttagaggtggctgttacagagggctcggtcctcaaggatggcgctagcgtttacccagcccccgagggtgttgccggagatgatccggctcgaatgggtagcacgagctatgacccagcccccgagggtgtccgagttggttctc

SEQ ID NO: 32459 - DNA, 368 bp, Zea Mays
cgccgattagccaccacaactctccaatttcccatttccccaattcggtttccaccgccgtggtagagccctcaccgtggtcagcgtattccaggtctgttcatgctccctgctcccttgtttcagcatccttaggttcccctgatgctccccgaccctgccaattggactaggaccccttagatcaccgggaacgcgttcgattgtccttggtgcccgctgtcaccgtggacagagcgagttagagctccgctagtgaaattagttgaggggaaacacttgttagggcttgaattaggtcccagccaaagtagagcacctatcatcgagtgatccgacaggtataagtcgccggagttcggtttccc

SEQ ID NO: 32460 - DNA, 298 bp, Zea Mays
atggtcttcgaacgcgcatacctcgggagcagcatggccctagggcatatggtctcgcactttgacgagatcgacgcaccgtgatcgtggagggttatgccaccgagcggagtgaggaggaactggacgctgtcgggttatgggtccaccctcatgcccagtcgctcgcaagctgagtcgatgtgaagctcctcctgaccagttccttgagtccggaagcttccgccggtaatctggatgccccctcttagactgtgctttcccttttagatgtaatgaacttttgggtgacttgcaa

SEQ ID NO: 32461 - DNA, 327 bp, Zea Mays
caatctagccttttcatcgcacaacatgactctttccctatttggaatgcaaccatattcggcatgcattcaaaatacttcaaatgactctaacgcaatcactattataatacatcgacatacatgtgcaatagtacaccctacacacaaacctacaatttttaaatttacacatcacgtccaatcaacataactcagttatttctccgattcgcacacttgtgcacgccactacacatgaataataaactctaccaacattcaacacattacaatatatatcgcctaatattagttggaaaacaaaaagggacatcttactcttca

SEQ ID NO: 32462 - DNA, 460 bp, Zea Mays
cgacgatagtgggccgttggattactatcgagcggatcagattagattcaaaccccaccgaaccggtatgcagctccagccgtccgattttgatcaaacggctaggaacaccccacaccatgatctcatctgattcatccgtgggtcgatcgacggcacggattaatctcaggaaaggggtatgtgcacatcaactgcaaccgcggatttcaagatccacggccacagtacttcttctccacgtgaataccaggtgtggcagcgccatccccccctacggcggacgccatagccagaccacccattcaccactcccgggcccgaaattctaatctgaggtacgctacgcgcaaataagacgtaggggaataggatgaaggctccataccggggtattatcgacagtgaatcgcggatcacaccggcaacagccactctggatgccgacgctgagctccca

SEQ ID NO: 32463 - DNA, 376 bp, Zea Mays
acccgatgtggtagcaatgggagctggaccatctggaacaacaaatggaggatctgatggggggattgacctttttggagcccctccttccatgaatcttgcagattaacagtctcaagaagtaggcaacggaacaactaaggatgaagaagatttgagtagtatagtctaagtaatgtacttatgtaaaataagtaaggcagttgagttgtataatggagtatgtatagttattactgttctgcaatgaaatagagatggtgtatgtttgacatgttatatttccaaatgtttctttgcctcagatgccatcccggacccgtgctcatgatggggcaggtacatcccgcggcggggaggacaatcccaatccgcc

SEQ ID NO: 32464 - DNA, 308 bp, Zea Mays
ggactaaaggagtggatagcattcacttgcgtgctttggttaaaaaccaggtgtttctattgttggtggattcaggcagttcagcaactttcatcaattccacgtttgtccaacaagcagggttgtttcctcaacctgtttccactattcgagtcaagactgctagtgggcaagaactggtgagcactactatggtgaaggcagtagagtggtggtgtggtggacacactttcaccactgacatgagggtattggatttggggccttatgatgccattttagggtgtgattggttgaaacaaaatagt

SEQ ID NO: 32465 - DNA, 382 bp, Zea Mays
tcaagccggcgcagtccgattccggtaggcaaaaccgcaacgagcaacaagtgaacaccatcgccagccaacaccccaccggagacacaactcgtcgtcaggagtaccccgtagaataaaactgtggcaccaacaccagaggaagaggctgagcccagcagccgtgaaggttttactgcctgtttcatggcaaagactgcgctcaccccaccagggattgcccttaaaccaaggccaccaaagatagaatggccagaaatcagccagctgacaaccagcgagttgtcgcacatacttatcacccccagtagtaccacctgcaaccataccacaacgaacagatccttcaccaacctaatcacttgtaccatgatcatcaaga

SEQ ID NO: 32466 - DNA, 367 bp, Zea Mays
cggtacaaagagtaagaactcacctgcgtagccggagcacctgagtcacctgagtggttgcgagcaccaccgcgaggagcaggagcaccgttgttgggctaagaggatgctaggatggggattatggttcgagatgtgagagtagggaaggggatgaggaggaagagaagagattctagagtatagatgtctaaacaaaccgtcgccggcaatcgtcactcgtcacccgtcgctcgtcgtcgggcagtcgggcctggagaggcgatgtcactagccgccaaaagaggagggagagggatttagggtttccacaacggacacaacgagggagacgggggagtcggccagtcaagtgtggccgtgtggg

SEQ ID NO: 32467 - DNA, 734 bp, Zea Mays
gtaatttggagttcatataaattttctatgaattaactaagttctaggaattgtttttgtattaaaaatacatttactaattcatttatacattttaaacgggttctggactcggcatcattttccagagagtgcaggggttctggcgtaagtttaccgagacacaacgaaaagtactcagaggaccgcgggttcaaaaccctaaacccgagggttttatatgcaatatgcgcgactgcaaggggttcggatggatctcggccattggatctccacgcgacggctaagattagaaggtcattttaaacgaaacggtatccattccacgccatcggattcgaatctgacggtggttattttatgaaagcgatatcggatcgggtccgtgagatcccatccaacggttcacgatcaataaccgaaagggtatccccgtgctctatctcgaccgtaagatggttatcggacggtcctgatcactgcccgatctaatcttctctcctagctctctctcacggccacagcggtgacccacggcggcgccatggccggctcccacaatccaggtgccccggccccaaaactcgaatacaaactacgctacgcgttgagggaaatgaaacgaacaagatggccaaggacttaccacaaattactacgcggacgccactggccacgcggtgtggtctcggtcgaagtccgacgagaaatctccagctcgcagagcctcaatc

SEQ ID NO: 32468 - DNA, 382 bp, Zea Mays
gtcagggttgttagggtctggtcctttgtggccctcctggtagacctcaatgtcactaggtttttggccacgcgtagcttcctgtataaacaaaatacattcataagcaatcacactatttggtgatcgaaatagctagatcaaacttaccattcttttagcttttcggagcatgtcatcaccgccaaacttgtggttaggattcattcctcgacattgcctgtgatgcactgacgctttctggaagccttcggaagcccaatatcgacaccaagcatagtacgcatcaggcacgggtgccatccatggaaccatcacctgcacacacaatgttacatattatatcaatcacaacaatcaataaaaagggtaaaacaaattg

SEQ ID NO: 32469 - DNA, 1430 bp, Zea Mays
  misc_feature (1)..(60): n is a, c, g, or t
nnnnnnnnnnnnnnnnnnnnnnnnnnnnnnnnnnnnnnnnnnnnnnnnnnnnnnnnnnnncccgacgcctccttctatcccccgcaatgagctagcatcacacgagtgggtataccttccattgccgccaccgagcttccatagtaggtggctgacctccatagtatgcggtaagtttccaatcagcgcctccgccccccatccatatataataccccattccaaccttggcgcaacctttcaacgacgatgcctaccttccactcaacatgcccaccattactgcttttaaaggaaggacacaggtgatgccgccaacccacccccattccccatgcatcttccctgtcatggatccacatgaacaaggtactgccagtttgttttgaattgtgttctactttctgcattttagatctgatgcacaaacctgattttgactgtcccctgcgcagctaagttcaaacctgaaaagctagaggggtggatgataatttgatgatagctattgaaactggtggatgatagttcaaacctgaaacgagacaccaatttattctacactgcaatgaaattttaacatgtggttactaaattttgttggattcatcaaacaaattatatgtgaatccctgtaatgcttcgtcttaattggtcactaagatgaaatgcctaattttttggtttgagtactttatattgttctcctgagatgttttttagttcctgtcccagagtgtctcgatgtattatgaatttgtgttatgccagaaacatgcattgtgttgaaactgtgttatgccagaaacatagcagtgtgatttgcttccagcctctatgcttaacctgtgagatgaacatgatgtttgtctctctcactctctccgtctctttgtcacaatagttataatttctgtcaatgattttttatgctttattaacctataaatggttcactgctctgaaccaccatgtgtcaatcactcagtcttcaacatatttgaggatggacaaaatgttaatcaaagtttggttgtcaatttacttgaggccaatattctaaaaaagatagttgaaccaaagtctatgccagactacacaactcgattgaaggactaaaaaatcctcctacattttccatttgaagtatattaaaaaatatagattagatgctctatatgcaataaacagtttcacaatgcatgtttttttggctaggcagtagtatgtgatatggaatgtgattattaacatttcaatttcttgtcttcacaacctttatactctgcagggtgtggtcgtttttttgtttaattcgtttcgtcattttcaaatgatgtagactaaaaatgcgaatgtaaactacaaatagcttacagatcaaaattgtcatgttatttttacaaaatttcaggttggccctacccctg

SEQ ID NO: 32470 - DNA, 299 bp, Zea Mays
tggctttgctttttgatgaggagtcttcaatggaatccagcaaacagagtgtacctttcgttactcagactctttgttcacaactttccaccatctagctttcacttgttataaatgacaagttgctaccatatttgggaatcagataatattatttctgtaataaaaatacaggattgcattgaattcatagttagattggtcatttcaggcgatcaaataccagatgtagagaagtccttgctttaaccacctcaaatttctttgttttagattgcaattactgtagcacatgagct

SEQ ID NO: 32471 - DNA, 424 bp, Zea Mays
atgggaacatgtactatgctaacgattctgttctgattaggcccaattgaccaacttatgcactctaactttctttatttgtaagaacaagcgagtagtctagtggtaacactgattcaaagcaaggtgcaagtctctggttcgaagctccgcgggagcaatttttttgccaaataaatcttagcacatgcgtcgccgggccgcgagtcgccaggcgggggttgtgtcccactttaccaaaaaaatgcgacccatgtaggccaaggatctcacgccgtcaagtgttgtacacgtggggcgttttttactaaaactcatctgtgactaatttatttcatcattacgtcagccaaacatggcaaattagcgatgacgatatcaaatctaatctgtgacgaaattgttgcgtccaaaatttgtgtct

SEQ ID NO: 32472 - DNA, 307 bp, Zea Mays
agacagcggccacctccgaagtgagaggtgtgttatatgtcttctggttcaacgtctggtcaaggttcaatgcgatgtgatagtcagcaaggttctcaacatgacccatgctcctaaggtgctcagagtacggatttccacgaagtatgccaactatctgtttaataacctcttggtctttctgaatctgatcttcacgacacttacggagtcgatgctcgagactgggatcatcatcgtaaaagtaaagctttaggtgtttatgctctaccccacattcactaccgaatgacttgatattatggta

SEQ ID NO: 32473 - DNA, 313 bp, Zea Mays
gggatacaaagttacaactcgcccgaggccaagccaagacagaataggcagtccgcccaaggcaaccctcaggtcagagaggcagtcacgactctccctaggccaagcccaggcaggacaggcagccacgactagcccgaggccatcctctggcgagacaggcagtcacgattcgccagaagccaacccccaatgggagacacaatcacgactcacccgagaccaagccctgcctggacagttagccacgactcgcttgaggccatcctcgggtgggataggcagtcacgactcactcgagaacaaccccggc

SEQ ID NO: 32474 - DNA, 302 bp, Zea Mays
cttttgcgaagcatacaagccgaagggagtatcgctgtactggggccactagatcaattctggacggcccggattaggccgtggcttttatgaaaggggtatgttgaacccaccgtgggatcaagatcggatgctcacaattaactcgaagctcatccgaatcagtatgcaatcacgatcgtacgatctaagatctatggttaacaatgcacccagcaagattcaatctgaaccgcccatagccgatcgaatggccaggcggtttcttctacctacgcaccagcgcacgacggttgcgccgc

SEQ ID NO: 32475 - DNA, 366 bp, Zea Mays
aactgtgttctttgatccaacactatcttctttgcatgccatgaaaacgtacaacctgggacatgtataactcagctagtgttgctccagtgtgcgttgtcttcacatgccaccttggttaagctgtccacaaccaccgagatggagtcatagccagcccgggtatgaggtaggccaactatgaaatccatctcgatctcatcccacttccactgagggacttgcaatggctgtaaaagttcggctagcttttgatgctaggctttggttctctgacagctatcacacatgatgacatattctgcgatctctcttttcataccgtaccaccaaaacctccttttcaaatcctgatacaccttctca

SEQ ID NO: 32476 - DNA, 342 bp, Zea Mays
agaagccttcaggtactccgaggtgacaaggagctttggtggaagattcaatccaatacacgtcagaacaattcaccacccaagccaaagtgaagacaaaacaaccataattaagggcaacataatcactcccaatcaacaggggctcaacagagattcttcagaccgccaaccccaagaggaggaaggggaggaagaagcttcgaagggagatacaacattcagccaagaagactattctgcttattttatggagaagataagggcacacaacaagaacctaccaggttacaattcaaaagcagaaagaaattgccaaagctgaggcaaggcagaatcagc

SEQ ID NO: 32477 - DNA, 313 bp, Zea Mays
cggccggagcagcagctttcctcttcttcccttgcccccacagcgagtagcggtagtcagggtagacgaagccaatagcatcaaaaactatgttcaatctcttctttcctcgacttccgaaggctttggataaaacattatcttctgccttggaatatgatccaagcagttcatcacttgtaacttcgatgcattttagccagtcatcgtttggttcatcaaatttatccccatatctgaatgtatacttcagccggaccagttcaccttcgctagacttggtgatggtctccttcggcatttcccagctctc

SEQ ID NO: 32478 - DNA, 328 bp, Zea Mays
cttaccaacgattatatataactgcactgcaatttagtttcaaatctgtcgagcatgctttgcttccatgagatcaccctcatcaattcctttgcaaagtcatcgatttaagatttttgcgggtgcttttgcatttgtgagtcgtgtgcgtgggtttcaagatcaaaacgtactcaaacttatatgccgtccgatcccgttctagatatatgtttttatagtatgaattcaattagttcgcattgatttgcatgttaattcggttttatgtacatgtttcgatctgatgaactgaagctttcttaatgtaggcaaaaattaatattac

SEQ ID NO: 32479 - DNA, 443 bp, Zea Mays
gtgagagaggaaggggtcacgccgtcacggtgaagcaacagcagtctgacggactaggttacatctcctggacctgaagcgtgacagctgacatatatatatattttttgaaccaatgtgacagctaccatgggtgagagaagtgaaattttagtttacagggcagggcacgtcacgatgcagagaacgggtctagcgggcggcggaccggattcggctgggggagcggataaggacgagctcggccgcgactgggcatgacacgaacacagagcatccttctcctgctggtaaattcactaccactagcgcgcgctagcctaccactaccggtgctgcgatacttgtcgttgctgctgcctgctttttccccggtctacaaagacctcagctttcctacctccacttcttctttcttccaaagccttcgcctttttcctctc

SEQ ID NO: 32480 - DNA, 287 bp, Zea Mays
tcaggaagacttccgcctcgcctgagcaaggctctgacctcgataaaagcagccaggaatctcgacatcatcccgcgcaaggacgctgacgcaccccgtaagcaggcctttagcccataccctgacgctgttacaacaactacggtatgggtagcctctcccccgggggctcgggcgtacggacaacccctcggcctttgcctcggctctcagcaggaaaccagcaggcactagtcaataatgcagtgcaccatcatgtcggctggcagggcgccaagacatctctc

SEQ ID NO: 32481 - DNA, 453 bp, Zea Mays
cagccgataacacccgctttctgcgggaaatggcgggacagcaaatgcaacagcaaggtgggcgagcgtatccgcaaggaccccgtgaaacttcatatctggatttctcagagacgcgtcccccgctatttgtcaaggctgaagatcctcttgaagcagatgagtggatccgggttatcgaacaaaagtttgggcttctccgatgcacggagactcaaaagcccttatttgcggtgcaacaattgcgaggccctgccagtacctggttgggaaattatgtggctatccagcctgctggtcatcaaattacctaggacgaattcaaactggcttttcgggtgcactatattcctgaaggagtgctccatatgaaacaggaagaatttatgaaggtcaaacaatgtggggatactgtcactcagtatcttaacaaattcaaccacttgtcctagt

SEQ ID NO: 32482 - DNA, 418 bp, Zea Mays
ggacgatttaacagcacaacgcaacagagagagagagggcagacgtgaaatgtcgaagtttgaatcgtgcgaagacaacaatgggagtacagtatacacagaaaattgaatgaaactgtaccagttgccctgggtcatccaggccttgtcacagacaacccccgtagcagtacagcaatgggcaggttgccacatgccaaccatgcatctgcgccgttcgcctagcatgctcctgcagtcctccgtccattattgccaacttcaggtctagtccttagtcctggcgctggaaatggtggttccatggcatttaggtttggagagttcaggcaacgcaaccactagatccaaaaatgcacacccagcaccagaatggacaaggccgaccactactcgaccagtttggtatctgttcgac

SEQ ID NO: 32483 - DNA, 494 bp, Zea Mays
gttttcaacgaggtgaactcgagggagatggagagggtgaacgtgttccgaggcatcctggacaacaacgtgttcgtcatggtcctcggcagcaccgtcgtgttccagttcgtgatcgtgcagtgcctcggtagcttcgccaacacgacccctctcagcctcgcgcagtgggtcgcctgcgtcgccatcgggttcgtaggcatgcctatcgccgtggcggtgaagatggtgccggtggagtaggccggccttcagtggaggcagccaggcagttttggccgttgttgcttgccctcgtcatacagacatcttcctcgcttatgatctagacttctctggaggtcgagccgccatggcgatcggctcgattctgaaaagtgttgggtagaatcttgtagctttgaaagtttcagtttcagttttttttttgttcccagacgttcttcatttggaagtagtaactgttggcttgaaatgtttattacagatgtact

SEQ ID NO: 32484 - DNA, 497 bp, Zea Mays
tttcgccagcctctgaaggaccggaagttgagatgcccataacgggcatgcaaatgccaagacgcctgttctgcttttgctgctagggacacgagatgctccaccctgatctctagaatgtacagacgactggacgaacgttgtaccttcctcaagagctggccacgatcgctgtaaatgcgcaggggtccctcttgatgacaatgccacagccgtcctcatccaactgaccaagacttatttcgtccatttggttacctgtatatgagcgtgcaaggcccacgtggtgcaaaattccgatggtccatgttgtttggtaacctggatggcggtcggagccaggcccgattggtgcaataccccggtctcaaccaggcccgactcatacgaccaatttccatgtcgctcaggagcctggttgcgcacgttcactccactcgcctttacctcaccccgccgcattcgctcgcgtagcagagactggagagtgagcgaac

SEQ ID NO: 32485 - DNA, 324 bp, Zea Mays
cgtggttgggtgggtgctggatgtggacgttgttgtatggttgatggtggtgataggtgtgcgcgacaattctttgattgtcggctggttgcgtccgagacatcctgtccctggtggcctttgtttccgggcaatcccttattgggcgcgcacagtcttcgccatgaaacaggcagtaatatctacgcggctgctgcgcccgtccctggccctggccacgcgtgccattactacggccctaggggggatagtcttgatgtcaagtggcttcgccggcggggtgctggttggctatgttatgcacttgctgctgactgcggttgt

SEQ ID NO: 32486 - DNA, 337 bp, Zea Mays
ggagaacttgagggtagctcagaccaggcaaaagagctatgctgataatcgaagaagaccactggagtttgaggaaggtgatcatgtgtacctcaaagtgtcaccacttcgtggaatgaggagattcaaagttaagggcaagttatcccctcgctttattagaccattcagaatctttaggcaagttggggagatggcctaccaactcgagctacctgatcatctatctgatgtgcatgatgtattccacgtgtctcagctcaagaagtgtttatgtgtccctgtggaacagctatcaatggaagagctcactgttcagggtgatttgacttataca

SEQ ID NO: 32487 - DNA, 548 bp, Zea Mays
attctcatgcttatcgtgttcttaacctagagactaaccgcattatggagacttgtgaggttacattcgatgagactgcaccttgtccatcacctgtctttgagcctgcaggtccagattagatgggatagaccatctttgttgaggaggagcacgacaacgatgattgggttgctctcaagccaactccaccagccgccctagttgagcctgcttccactactatggctgacgaacccgaccccactccttccaccacttggggttcgcatgagccagctccttctgggactggaggagttgaagctactgttgagggggaggccacttcctcaagggaggctccacaacatattcagcgccatcacccacctcagcagatgatcggggagcttcacgagcgagtcactcgctctaagtcacaacacatttctcattttgctcactcagcttttgttgctacttttgagccccgagatgttggacatgctttatctgatcctaactgggttaatgctaggcatgaggagcttgaaaattttgaaagg

SEQ ID NO: 32488 - DNA, 738 bp, Zea Mays
caagcctcttatgcgtggatggacctacagactatgggactagggttctaagttaagccttggacgtcgcgccttagctctagcctctaggtcttctgatcttgtcgagtatgtgtgttcgtcttccgtcgagtgtcctgattgacctccttttataggccaaggtgggggtcggccactagtagcttccttgagaaggagaaactatgatgtggtaaaatggagtgttctacctgtggtaaggttgcatttgtccatatatgtctcggtcatctaggtttccttgatcctgctctttatggcgggtggtgtgggcagcgaagagtccctgcaccatcattgtcgtctttgtgccgtgtcgacccctggccgctatagcctaggcctcggtgctgctcatcgtgttgaggggtctgtaggcggccagcgcacttaggtctagcctcaatatgtcataagtgggccacaagcctagaagcccgtaggttgagtgcaaagtggatcgactcaccctctatggctcgatgtcaagcacagttaatgcgacatagaggatcagtcctggttaggcatggaatccactcgagtgacttccccttgatccacctgaccccccttgctgctccgcctcgcccgacccttggctcggtgcctcggtttatcggggggcgagtccttccggggtggacctttcccatgtccttctactgatttgtgggccttggggggttgggaatc

SEQ ID NO: 32489 - DNA, 322 bp, Zea Mays
cccaggaacgagtggaacctagtttaccacttattcctggtcaccatctcatttccatgccaggtagaagattgagggaaggaagtctaaactagatggtttatttttggaccagttcaaaacgaacatctacaccagactaaatcagattctagactgtactgatttattccgtctgaaagaggcagggaatagcggatccacccaaaacgaacgaggccttataaagaatagtctatacttaaatctcacctgaagcacgatgtgtttgggccgttagtccgacgcggtccaactttcagctctatagaacgaaaaaggc

SEQ ID NO: 32490 - DNA, 577 bp, Zea Mays
ccatgcgttcccgacggtcagtggacccctagtccaattggacgggtcagcaagcatcgtagacatgtgataatgcttaaacgagggagagggagggttggactgaccggagtatggctggccgcggtgaggttgggcttcgggtggcggagaacagatttggggcgaacgtgaaattggagagctgtggggagtaatcggagctacgcgtgggttctctggatgcacaattacctagcggcactggccgaggctccaatttataggcagcttcgacggtggctgggaattttaacggcgatgtgtggcggtcgaagataaggaagaggtctggcgttgtggttacgtgtccccagtcgtggcgagctcatcgacgatgatgggacggcagtagggaatcacgacggtgccgtggaaaggctcggacatgcggcgggcacagagatggcatgacgacggcgagcggccttatctacggcggtgagcaaaagggggaaagtattacggctgaccggggtggcttccagctcgacggcgacgacgatctttttttccacgcagcgttatccggttgcca

SEQ ID NO: 32491 - DNA, 307 bp, Zea Mays
cgacactatagtcttcggaacaccatgcaaactgagaatacgggcaatgtacaactccgcataggtaagtaccgggtaatacgtcttgaccgacagaaagtgagtaattttcgtgagctgatcaacaataacccagatagaatcataccctttggcagtcctggacagtcccacaataaagtccatactaatgtcttcccatttccatgttggtattggtagagactgtaatggaccagcagttttcatgtatgtggccttgacacgtttacaagtgtcacacctagccacgtagcgtgcaatttca

SEQ ID NO: 32492 - DNA, 277 bp, Zea Mays
aacatttccatcttgttacatgccaattcactatccttaggagctagaccctttgtgagactatcagctaactgattacaagacttgacatatttcaacttcaaagcccctctgtcaatcttctccttgatgaagaatctatcaatctccacatgtttcatacggtcaaactggactggattatttgctatatttagtgctgcaacattatcacaatgaagtaacattgtctcatctttcaacactcgaagctcctttagaagacctttcaacaaca

SEQ ID NO: 32493 - DNA, 366 bp, Zea Mays
ctcgaatattgtttttcttgaaaaaaatggtatggactcaccaaaaagaatgttatatttgttgcaatgaagagtcaaagactagtgacgagtgccaatatttctgtggtggtgtttgctttggttttttagcttctgaccgctagaagctgctacatacggtcaaatgtttagcttttcagttcacgtttgtaagaatcactttggtgaaaatcgtccaaacgtggacacataatcgtgcgagacttcgcgatagtaggaatctgtaactttctagattctaaaccctacagcccccttttatcttcctgacacctagaggggtgaataggtgatcctgcaaaacttgtttcaaacaacataaac

SEQ ID NO: 32494 - DNA, 476 bp, Zea Mays
ccgcactgatgttacggttatgcgggtatcacgtagggctccgtcgctatccaaattgctcgtcggagattgaattggtgtccccgcaacccacctcgtcgtggccggggcgtgtcccagcctgagggaccaagtggataccctcatcgcgttcgccataggctctgcatggttcgagcaatagggatttgggttcggcgtcgtccttctcgggtttgcctcacgacggtgagtgcgccgccgcatgggtgaccggcgtgtggtgtttgggtagcgcgtgaggaagacgaccgtggaacgtgcgatctgcgcggacgaccgagattaggccggggatcccccttcgcgcctggaccgttgatacgagatgagcggctgtgatctgatcgcagtataccgagtcgatgggatgatctgaagcgttcgttttggatcaatcacgtacgcttctatctgggttcataaaaccagggccg

SEQ ID NO: 32495 - DNA, 286 bp, Zea Mays
atagtttcctcttcaaaggatagtttgatatattatgcttttccacaaatgactttgttacgaaagagtgagatgctccagaatcaaataaaactgatgcaggtatggagttaataaggaacataccatacaccacatcggcatccttaggagctatttctgccgtcacatgattaattcttcccttaccctggttctgaggggtcttgttctgtgcagttccacgagcaggtgtattctgatcaactctttgactgctgttcctttggggtgtctatgggttgcg

SEQ ID NO: 32496 - DNA, 398 bp, Zea Mays
aatgagatttgggcactcggctcggaaacgatcgctcgaaacggggaatttggtgaaattaaagcctggaatatcggatgggcgtgaaattttgcgaatatgttactggaggtgttgcgaaggtgactgaaaaatttgggttcaatttgagcatttttggctgtttgggcatttcaccgaacacgtggagcgcggagttttagggttttggagaaatggctattagagactgtgaaaccctccctaaggagctgagaacctacaaggatgttcaaggcacacagatgaatacatttcaccacttggtttcactggaattcacaggaatttgaaatgggcacaaaggggtggaagaggggagctcactacccagagaaatggagagagagagagagata

SEQ ID NO: 32497 - DNA, 425 bp, Zea Mays
ggcgggtgggcgcgcggatgtgagcgcctaataggttggctcgaggcgggttgtggaactgacacgcggggcccacagttcagcggtgtgctgagggtgtgggggcgctggcctctagatctcaatcgaacggttctggttccacggaagcgcaaattgttacccgcgcaactgagccatcagatcaagactggacggttaggatcgggcgccagggtctttatcctctctagttagccaggggcggcgctttccgcggtctcggcggctcagttccggaggcgaggtagactggggcttctaggatgctggggtggtctggatacctagaaaggttggggaggatcggcgagccctatagcatggtcggtgttgcaagaacgggactgagacgtgcatacggtggagggggaacctcgggcaga

SEQ ID NO: 32498 - DNA, 377 bp, Zea Mays
gcacggttggtttgtcgttggagatgggggacgattccactctccccccaatgaagaggacgtcggggtagaatggagttgccgtgacaacaagcttctttctgttctcctttgagggcggaggtgccagaagagcagcttgacgggcctttatctcatttgcttctcttttccttgtaatccgtgtccatctttccgtggatgaggtggacaacggggttctccgggtaaacaaattctctgctcctggcttgcaggaggtagtctttgcccggagcgctggaggttgcgttatttcctgctttgttccggctttttcagagattttcaaggaaggtttcttctccggtggatccactatacgatgtagaatccct

SEQ ID NO: 32499 - DNA, 305 bp, Zea Mays
tactgcagcaactcaaggttgaaagctcatagattacgaattattgtgcctcaaagtggggtgaaaatgctgaatcatggttttactaagtgaataaggttaagcatttccctagactgacaactcgacttcgagcagaattttctgtcgatttgaagtaaaaacaggagaatccatattaacaaaaaccactctccaaccttccttctaacaacttgctatagctacacagggttaaaaacacattgatagaaagttataatgccccaaagatgtgccaaaccaattgaactttcttgttttag

SEQ ID NO: 32500 - DNA, 339 bp, Zea Mays
gagcgtgttggtacccttctggctgctggcttcgggccagagtaggtgctagcggtggtggtggtgggagctaggcctaggaagcttgagagtggcttgccgaagcgacagaggtcgtaggctgttgattacctacgtactctgggacgtagggagaatagcatgaagcagtatataggacttgcttcggctgattctgcgtgcttcaacttcgccaatctctttctgcttctgaattgtgacttggcacgttcttttggtatggcctttgtcttcgccgcagaacaaacaaaacagtctcctaggctgatctctgtatcttcctccgaagcttcttcc

SEQ ID NO: 32501 - DNA, 292 bp, Zea Mays
aaaaaccaaattacctggagattggagaagaacgaaggaacccccaaatcatgggaattcagttggtgacttgatgaaggatcaccaaccgaagcaatctgcagagcatcagtggggaccaattcagcgtcaccagcagaaatcaaaactttgtcatcaggtgcgccggcctctaaggcgacctcctgacccgaagcccgtgctgctgccatgcaaccagaatgtggaggagaagacccgacgtgaacatccatggaagtatgagaaggagaacccgctcggacaccctcgg

SEQ ID NO: 32502 - DNA, 337 bp, Zea Mays
gttggggtcttatttcctgatcaccaggtgcatatacaacatggtatatcatagtttgcctccaagttaccattatcagtattatgccaatcaagtagcactatctgaaattttgattgtgtggctggtattatcaaccagaatggttggttaatggttagtgctggaaaggaacaaaaatgaatctgtttgatggaagcaggtaagtattatttgtgatccctatgtttcccagttccccttatatgccaattattcagtatgcaaatctgaaatgctaaatcctaattcatgtgggcacaaagcaacagagttatattagtatcacagcttgctt

SEQ ID NO: 32503 - DNA, 299 bp, Zea Mays
gtgtttccgacgatctaacgtggtctagttcaattggctaggtcgatgagcatccatagcacataggggtgttgaaacgagagcgaggagggcgtcaacggacctgcagaaggctagccacggcgagctcactcacggcagcgtggagaactgaattaggggaacctctaaattagagctctctggtggacaatccgagacacgggtgggtgcgctggatgcgtgattacctaacgtagctagtggtatgctcaatttatagagtccaagggcggtggctcctaattttggaatggcgt

SEQ ID NO: 32504 - DNA, 287 bp, Zea Mays
gaatttgaatgatgacttacgtcagttatctattggacgcgtaaatgccaaaagctatggacattacaacgtcaatggatatcgctttcgatcaagcattttcgaatctagtcatcctatggccgccactcaaatagtggagtcgttaccagggcaaccgatatggaaggacatgaagcctgctattacgggaaaatcaaaaatataatcgagattacctttgttggaaataagcctttagcgctagttttctttgagtgtaaatggtattataggaccgaatttgg

SEQ ID NO: 32505 - DNA, 490 bp, Zea Mays
gaaggcatacaaatcctccgcgaggtccatagcggaacttgtggctcccactcaggacccagggccctcgctgccaaggtgatttgttagggattttactggcccgcaataatttgtactgccaaccgagtcacaaggtcatgcgaagcatgccaaaagttctcccctcgcttaggcagcccttcgcaattcaccaagctcatcgcccatacatggccacttcaacgctgggggctggacatcgttggaccactgcctatagctcaagggaacctcaagttcaccttcatcgccgtcgagtatttcacaaagtggattgaggccagggcagtatccacaataacatcgaagaccgctcaaaaattcttctggcaaaacattgtttgccgcttcagagtcccgtccgaactcacagttgacaacggcaaacagttcgacaaccaagacttcaggtatttctgcttttccatcggcaccaagcttgtctttg

SEQ ID NO: 32506 - DNA, 734 bp, Zea Mays
attttgtttggatgctgatctgctctaggtagcagccagcaggtaatgcagactatgcagtacttttagtttttactgaattactgcaagtaattatgccaatattactttcagtttggactttggatgaattcaattttacacttttactgaattactgctagtctgctactaattatgcctatattattgcagaaatgcagtgtttatatagttaatatatagttatatacaaatacatatgtccttaaatccatagaacgactaacggacgaccagaggtcgaccaggaccgattaggtcgactaatcgtcgccctaatcgcgattagtcgcctggtcgcccctctcactcgaccagctggtcgcccgacttgtaaacattgaccacaactactctccttcgtacaagggggtctgctggcctcgccacaatctgctccagccacaccaccctctgcgtactagtggccgcggggccatgaggggctgcactgcacaggatccacttgcacctccgaaggttgttgtgtctttacctctgtggttccagctcgcgccatcctcttcgctgtgcaacgtttccttgggacacagaatgatgcttgcagttgcaatatatctagaataattaaaagatgtgttgatatgtaaaaggttcatttttcggtgataggttaggtcattacaggtcgtttgttggatgttgcagctcgaggacgagctgcttgtcca

SEQ ID NO: 32507 - DNA, 343 bp, Zea Mays
tggacatgatactgaggggcaaggtatcaaatgttcgtgctcctattgcctattctgcttggaatctgtcacctcataggtcatttttcaatttcttgtccaaccctcctgctagtgatagtggtatgggtcttagagtgcgaccctctcctgaagacattgaggctctggttgctccccttcgtgatcttcccaatgatgagagacaagttcactttgagatgtcggcaagtccggatgatgcagaaatagatgttgtactcaatatgttggctggagaatcttctgactcggcccatgctgaaccgatggttgttatagttggacaagagcttgacaaaac

SEQ ID NO: 32508 - DNA, 379 bp, Zea Mays
gttggttacctaaaattccgagggctctttaacaaaagtgacccacgaaggggtatggagcgttaatggccgtccgatctggttcagtggcgctgattagattggtccatcactctctcccccactcacctgcagacgtaggatgccagatcaacggccaggaggttgtcttcttccctggcgttatatgccgccgcgcgctccatgtagactcagccgcccgtggtcgaaggcatccccaaatgcacgctaccacgcgcccctgctacgagtagtacgccggccctagttggatctaggtgctacgccgcgaaggacaggtagaacgagtatgcagggggatggttccttaccgagatgcccaccagccgcaacccgc

SEQ ID NO: 32509 - DNA, 763 bp, Zea Mays
caagaatgcctttcttcataggaatctcactgagacctactgcaatcaatctactggctttgttgatcatgttcaccttgatattgtatggaaactcaacaagtccctctatggtctgaaacaagcccctcacacttggtacagacgcttcaccacatatctgctctctcttgattttgtcgaggccaagtcggacacatctcaattcatctatcgacgtgttaatgacactgtatacctgctcctctgtgttgatgacatcatgctcactacctgctcttcggctctcctacaccggatcaccgccgctcttcagcattagttcgccatgaaggatttggggccccttcatcactttcagggaattgtcgttgagcgtcgctccaagggcctcttcctccagtagtggcagtacatcctgccatcctggacatcctcaagcgggctagcatgctgaactacaaaccctgtgtgacctcggtggacacgcaggccaagctctctagagatggcgctcctgtcagtgaccccattgcctaccgtagcctcgccgatgcagcgatgcttatcagtatctcaccttcaccaggctcgacatcgcatatgtcgttcaacaatcttcgtgagccacacttgggtgtggtcaagtagatccttcggtatctttggagtactatcaactacgacctccaccttcgacgctccacccatgagctaatcatctacactgatgccgactgggccaggtgcctggatacccatc

SEQ ID NO: 32510 - DNA, 583 bp, Zea Mays
aacatcctctgtcaggcactctaaagatgactctcatggtacagtagcctgatcggatcaggttcagtgaacttcaccgccgatgaccgtcgcgccatgattcacgtcgatcgctgggattcgtgcgctatggattgtggataactgtgggcgggtaaagatttggtgcctggatcaacttgagtctggccgcggctaagctcagcgtaccccttgctcatcgatcgatcgggataagacctcgccgccgttggccgattgccgccgtgcaccacgtgctaaagcactttaccatgtcacagtggcttggcttgcgatatttgctcatcgccagtgagttcaccacgatggaagacacgaatccactgcgctagtaactttctgttttctccgactgccgcacgtctctcccaaattcaccggccaccgctcttgccttctataaattgagcacatcgcctggttcgtattataatcacgcaccaagccaccaagtatttcctccaatcgtatacccgagagctctaattttggattccccccaaactgagtttccgccaccgcagagacaccttcaccgcgg

SEQ ID NO: 32511 - DNA, 613 bp, Zea Mays
agtgggttgggggaaatgcgaaattggagctctctggtggaggatctgaggtgcgggtgggtgcgctagctgcttgaatacataacgaagtcgatgatgcacttaatttataggcttcgggggcggtggctctcaatttgatcacagcgtgctggcggccggagatagggaagaatacgagtggttgtgaccgtggcgttcaccggtgcaacgacgcaaggataacactcctaagggagccatgattagtatcgcatagtaataagttatggcgtggcacaaccggggtaactggagcatccacggcgacgctggtggtccagccacgtcgcgacggctatcggcacagtgataaacttcaattcgcgatcaaatccattcccccgtgagatcttttaccttcccgtggatatcctctgcgccaagcacgaatcacggcgaccaacgcaaattcggacgcgcggatcgccggcggcgagggactgagctggcggcctgatccaatcactgtaccatcacgaagtgtatttagtcggtctgacagagcaaattcaaggcagcttctctccaatttttatgtgacaatctcataattcatctgtatcaaagctat

SEQ ID NO: 32512 - DNA, 470 bp, Zea Mays
tagcggcctatattgttgctctagttagccgaattgttagatgacttggttaagctcgtaatcacggtgaattgcttgttgtggtctaaatgtgtatggttacggtcgcgggtaaaaaaaagtagtagtgctcatgtgatgtctaatttaaaacgcaaattgttgggtgattatcgtggagaatgcgttgttaattggtcgtagtaattttagtgcactaatgatttgaataaaatttgcaagtcgaattgttggttctaatttgattgtcttaactcgaacaaatagtaaagcgttagagtaattcaagtctctcgagcgcggcgattcttgaattatatgtgagctgaaatttattgattgctgttttgggctgcacacactgttttagttgtgctgtttgtttgatgaaccaaatcatgttttctgtagaaaagtcatatagaagagttgtagataacattattata

SEQ ID NO: 32513 - DNA, 482 bp, Zea Mays
ataacaacttcattttcctcaggagcaggggcagtgctgtctcctccaaccctcacaatagacatgtcgcgaaaatatctctctctcatggcgtcgatatgactttgtttaatgctcgatttctcgaagatggtatggcttggccgcaagggctgatcttcagaatcttcatctccactctccacatcataactatcaatgtcatcagaatctttagacaaaccctccattatctccttagtaattttctctctattcgtttttttccatagactcataaaacccatcaataaaaggatccgcaactttcttctcttcatatagtttcttctcctcggtgagcttcttctcctcagtcatcttttcctcggtcatattcttctcctcagacatgaagcaagcacgtctttaaaccgaagctcgaaaatcaagcaagagctggtaagcaagagttaaaaatttgagaaaataacgcaaacaac

SEQ ID NO: 32514 - DNA, 475 bp, Zea Mays
ttgggaccctattggtaagagactgttcgtgagtatggatgtaacatttcgagaggaagacccatactatagaaacaaagttgatctagatcaaatcctagaggacttctctccggttgatggaggtgaccgtagagagggggaggatgacaatggtcgaggtagtgattatgatgaggctagtggtgatgaggctagtggagcttcaggaggggtgattgttggaggtatgattccactagaagtggagatagggataactacataggcattgagtaatgatgaaagtagtgggggttatggtgatccaactattaatattcaggaggagacagaggatgatgatgcagtgattattggatcaatcccatgtcctactgcagggaagttgaatgagaaacaggggagcaacatgattgttccattggggtaaaggtgaatgacaaatagggggagcaacctatagtatactatc

SEQ ID NO: 32515 - DNA, 358 bp, Zea Mays
caaccagccggagtgcaggaccaacatttttgatgcactgcgccctgccccaacgcctcggcccacttttaacatccaacttccatcaatcaaagagatgatgtcaagtaagatcaacgatctcccacctcgtcatcgatctaaattcacagacattcttgctgcatatgacttggaggttgacaagtcatgcatagccataaaagacagcattgacaaaattattgagaagcaatacgacatagcagacaagtttatagagttgatcgacgaggtactacgtgccgagtctgataatttagaaaatgagacagatgagccacaacatccgagggattcggctgattcagcaagtcag

SEQ ID NO: 32516 - DNA, 288 bp, Zea Mays
tggggcgccagaggtgacgaacatgtagaggtgtcccaacgggtactctccatcattcggcacgatgccgaagaaggaggtgtccgactgggtgaggtcaacgatcgaaattccctgggcatgaactgtccgagggaaggtgacattgatgctgttgccaccatccaccagcacctccttgactcggctttcccgaatcactagaccaacaagcaggggcatttgccagggtgatcaaagttgagccactggtcggctcgactgaaggagatggtgtgttctaaccac

SEQ ID NO: 32517 - DNA, 346 bp, Zea Mays
agattcttagcgacaaccgagtggcacgacttatacccgacagctgatcttcaggccttttgcaccttgacctcggatcactgccccttgatcatgcaaggttactcttcctatgacttctacaaggggtttagatttgaatcgttctggataaatattgagggtttcaaagaggtgatacaacaagcctggacaccaagagtgaactctacagataacatcttacgtctacatgtgaaaatgattcgcacggccaaagctttgaagatttggaggcaaaagagagtaggaaacatcaaggtgcaaatgactattatacaaattgtcctaaccctattggagaaag

SEQ ID NO: 32518 - DNA, 558 bp, Zea Mays
cggatatgttctgtttgataaatactattgcactaagtctctagtactaatgtgctcggctaccactctaaattctactttggccagctggcagggtaaccccaattgcatattgcataagggtcaagtcatgccgaagttcaaccttaacggactcataaccatgctcattagcttctccctcattttctcacccgatttcatgtaaaaccattcattagtccatccagtcggccacttggtacgatagccaataaccggagccttcgtatccttccgatacgcaaaattgtagcagccaaagttcctgcgaaggccaactgctctagccttcgtctgtagtgaagttcgtgcacccggcagaaagcttcggcattcgcatccataccctggcttcggagagcccatttgtagacactaagtctaacaatagcattgggggtaagctgatgaaggtatatttcaaagttctttagaacctcccctatcatgtcatttagcgggaaccgaagccctgttctgaagaagctcttaaagacgataacttcgtcatccctc

SEQ ID NO: 32519 - DNA, 357 bp, Zea Mays
gagtaaccctcttcacgatgcatcacatcaaaactcgggtatggtgttaaatagataaggactaggtcagcacccccttggtgaagcgttgtgtcgcaatgtagacattgtgtcaataggatcgagttgctactttcttagtagtgtgccacatcgacacttaggtgtagtaaaaaaatgcctaatcataccaactaggatatgtttagatagttggattataggaccacttacatgtaagttaagagagttatctgagatagcagccatgagatgtgtaaatatcttacgcatataaaacactaaatgaaagggtcaaaaggtaaagaaggtgaatggtaccgacttcaagctttg

SEQ ID NO: 32520 - DNA, 277 bp, Zea Mays
ggccacggtgcggtgtttcacggcggcgtagatgaccaatttgggggaaaatccaaatttggtcactacagtggctaatcggcggtgagcaatgatgctttgagttcgtgataagttagcggagcaagctgaacactcaatttatagagggcgactgagagtacgacaaattttaatggagaagagcacacagtgatgagagaatgagtcaccggagctatcagtcgtggttctcactgatacaacggttcaaggatggtaattccaagcttaccac

SEQ ID NO: 32521 - DNA, 630 bp, Zea Mays
ctttgctagaatagcgaaagtcaatgacaaatggggcccaccaagttgcaatgcactaggcgtataaatagaaacccacagcagcggcatttggtatgccatttctgttgcttgcgttgttttctcaaattttaattctcttgctgtcagctcttgcttgattttcgagcttcgtgaaatactgaagttttgaagaaatgtctgaggagaagaaggtgtctgaggtgacgaacgtggtcgaggataagaaggttgtggacccttttattgctgggttttacgaatctatggcaaaaacaaatacagagaagattaccagggagataatggcggatttatctgaagattctgatgacagtgatgattttgatgtggaaagtggagatgaagattccgaagaccgaccctggcggccaagccatactattttcggaaagtcgaccattaaacaaaatcaggttgatgccatgaggggaaggtactttcgtgatatgtctattgtgagggttggaggaaacaacaccgcccctgctcctgaagaaaatgaagttgttgtttaccgaagctttatgaaggcaggccttcggttcccattgagcaaatttgtggttgaagtgttgaagatattct

SEQ ID NO: 32522 - DNA, 532 bp, Zea Mays
gtctgacaggaaatcaaatggaaaaaacccctacgtgacagcataaagatggagcgattaaccaaatctcttctcctttccaacaaacactgtcagactccaacaaggattgcatttacatcacacaaatatataatgctgctgtttcatcacaccaccacacccatcttgatctaccatatcctgaggcaccttcttcccacacacacctcctacctactccctacccacacatgccaaaagtccaatgcgcactatcaagtcccatcttggacagacatcatacaccttagagaataataacattagtagccctgcaaaccagttggaaacagccatcagcaattcagcacatggtgatacgatcataacgacaaaagatgcaaacaagttatagctcaaacatcatgtagcaatattgaatacatgaacaattacaactgaatgggggctaacaccaaaaatccccaaaaaaagcaaaagcaaaattatatcacacgactgaactatggtagtgcagttaagatcaagg

SEQ ID NO: 32523 - DNA, 876 bp, Zea Mays
cgccggagagatcggatctccccaacaacctccggccgcaaatcgtgctgagctaaccgtctccacgcgagccgccctgctacgtataagtcagttccccatacctttggaccgatccaaccaagccaccgaatcgctggatttcgtcgtggggggaagctcggtggaggtgtgtgcgccgcctcggtgaattcgcattggcgcccgcgtcgggttccttggacggggcagggagcttcgtttcgtcttcctgtggctgttgatcgccttcgagggagaaggggaccactcgcttggtggtaattcctcaccggaatttcatcgccgtcacataatcgcactgctccgtgagcagtcgactctactgctcggcgtccggtatgaacgcagcctttgcattctccgttaccctctcttgatttgtactcgctccgtaccccgataggacacctagatgcgggacctgggctcaccgtcggggcgccgccgcggctgaaatcacgtcaccgtggtatgagttgggagatagaagaaggctaggcgtcgtcggtttagtagtcaacggtgcagatcaatctaggaagtagcctttcgcagggggcgatctggtccattagatcataaatggacagccgcgaagtgatcctaacgttttaaatccaaaccgtcgatgtccgatctcgcggctgcgattgcataccggttcagtgtaatgtggctctaatctggagcgtagatcttagatcgggcggtcagaaacgctcgatacccccttcgcggtgcacttttgcataagagcccctcggtaagtaggaaatagaacccgccgtccaccctcactgcgctctgtgtctatagatttttaccgctgggccc

SEQ ID NO: 32524 - DNA, 338 bp, Zea Mays
ctttaaagcatcttctcatgtcaacttcgaccttccctacctctcttctcattgctatcacgcattaggatcccactacgtactagtgcctctagagatctccgttagacatgtccaaaccatctcaaccggtgtttgataatcctgacacatgattcaaaaatatttatatggcaaccagctgttatgttcgaccctagttcaatgccagaagttagcatttgtgtcagtattctgaacagtttgctctagctctattcagtcactcagacttccatttagaaagctacagagcaagccatcaacccatcttacctcttcaccgatttcaatccgga

SEQ ID NO: 32525 - DNA, 381 bp, Zea Mays
cactagaagtctggagaatcaacgcccgaatggtggaagaccacaagacaggatgggagattttctgagactcaagcctcccacattcgctagatccagcaatcccctcgatgctgatgactggctgcacacgataaaaaggaatttagaagccatcggatgcctagagaatcagcgtgttcaattggctgctcatcaacttttcgggatggccctagcatggtgggataccttcagcactgccgtcagagatgctacctggacagagtttgaaactgctttccgagagcaccatgtgccccaagggaacgttcagcttaaggaagatgaatttcaggaactaactcaaggtggaagatctgttagtgagtacgtgcacaa

SEQ ID NO: 32526 - DNA, 425 bp, Zea Mays
cgacgtcggagttttagagataactgccgagcgactgaagacgacgtcggcgttttagagataactgccgagtgaatgatggtaacgtcggcgttttagaaataacagccgagttagaacgggctgcgtcggccactttgaggataatagtcgagtgatgatgtggcataccggtgccttagaagtagccgccgggtgatgacatggtacgctagtgttttagaagtaattgtcgggtgatgactgggcgctttttggaaacggtatctgacccgggaatatcccatatatattgcgctttcagctgcctctactttccgtgccctagttcttgctttcctgcctctagatcttttctgtccttttgcaattcggctctcgctctgttcatcgttagagttgagatggcgcccaagcgaaaggcc

SEQ ID NO: 32527 - DNA, 462 bp, Zea Mays
ctgggtcatagctcgcgctacccatccgagccagatcatccccggcgacaccctcgggggctgggtaagcgctagcgccatccttgagggccgagctctctataacagccacctctaaggctgaaggaccttcacccacttccatgggagcagaacaatccagaccagcctcctgacccttaagaccgcgctctaaggtcgacgaggcacgggacgctgctcgagttaactccagcccggcatcaggcacatcagcacaaatatccatcattccaccgtttgccggctctgacaacagatcttctgggaccatatcttcaagagtctgatcaaagttcgctagagacaattcttgcagaccaatgagggcagacaaagctggggaaggaacaccactgctttccccgctggctatgtagcgtcggctgttcttccgaactagagggatttcatcctcctctt

SEQ ID NO: 32528 - DNA, 823 bp, Zea Mays
agagcaacaagaaggaaagatcaaataaggcaaactacgaactcatcgggatgtgatgaacgtggacgtctccgacagcaacatgctcatggatgaagtgaagatgaatctcaacatgctttgtatgctggtgttgggcgaggttgacgaagaggtagacggtgctgacgttgtcgcaatagacaagcatgctcctggtgagggctatgaaactcctgaaggagatggcgcaactagctcgtctcagacaccacactagcgacagcccggtactcagcctcagcactgaagcaggagaccacaacctaacgcttggaggaccaagatatgagcttggcctaagaaacaccgtacaaccggagacagagtgccgacaagactgcattagacagtgggtcgttgacagaggcaccatcaccaaagaccttggcatgtgtgtccaccaatgtcgcacatggcttgcaatctagcatgccagtgcgctctaggacatctagggtgtactaacattgctaaagattcgagcgacgctcaacgacatccccaggaaatgatgaagaggacccagatccttcattgtgacttcttgctatgatgatacggtgcaacatgaccgaagaagaggtagtgagcacaatgtcatcaacatacaggaggaggtacatagtggcactgctatgccaagagatgcacaaagatgtccgacttagccacaacaaagcttagggagagcggatatgtagcaaacttgctataccaagcgtgcggggggtgcttcataccatagagaacttgttgagcttgtagaccatgtcaggatgag

SEQ ID NO: 32529 - DNA, 284 bp, Zea Mays
aggggcgccaacatttgataccttgcctctaagtatcatttcgagccggctcaccaagtccacagcaggaattcttctgttggttacccgggttgagtcagctaggcctcggtacagatatgccgggtatgccctgtccttcagtggctgaatattcttgaagacaaagtcagcaaccacagcctctgcagtcagacccctctccttcaacaatccaacttcagctagcagagcccctgcctcagccacctcctggtttgtgggggattcggtccagctcggag

SEQ ID NO: 32530 - DNA, 850 bp, Zea Mays
catccgtgttcctcacatttattgttggtcaacactgccacccctcccctccagccgccggccaggccaccacccctctcctgaccctccagccgttggctagtggccatccctcccttctagccgccagcagtttccagcctctttccgctagccggctaggcagccttccatctttcccctccatcaggtattcgccaacccctcccctctagtcggttgctaatgatctagaattctagatgttgaggataactatggccaagcaccgcctactccacacggtggcgcttcaagtgatgagaatgagggtggcctaaatgatatggacttagatgtcggttaggtgatggtctactattctatacctcatcatgtttgagttattgagtttatttgtttgattatgacattggacttttagtttgtttggttgctatggaccgtttgtcaatgtggatttatcgcctatatctgtttgctatgaagtatgaacttgtactcttaatctctattctctaaattgctagtgattactaagtagtaactaccgaccttctattccgctggagtgttgatgcctaattggtgcctatcgccgtggctccgtgataaccatggactttcctctaatggcatatagtggacaagatccatgctcattaaattctagatgagctttggcatcaccgctagaaacataatgacataagtaagcatgctaatcataaactgtgactcttgtttgttgggtggcatccaataccccggttcccaacatcatttcgaaggcccaaatttgatttgattggcttgttaagcaaaccaacattatgcatggagatgtgcg

SEQ ID NO: 32531 - DNA, 371 bp, Zea Mays
gtcatctacgggtgcgctagtacagaagattcggactttcggaggcaactgccatccaacaattcccccagcaacgctacgcccactgacgtgtgaacccagccatagcctgggaccacgcgtcatacatgccatacgagccgtctcgtccccgccgcgtgtgagcaaaccgacctgcgtcacgcgcgcgttctggaaggacctgcaacgcgccaagcgactcactgacaaacggccccacttgtacctgggcctaccagtcatgcaacaggtcgagtccgcgtccaagaaatgtccgcatcctcctcctccgttccccttctggtatatataacgacgagcaagagccttgagccatcaaacaaaaaaat

SEQ ID NO: 32532 - DNA, 428 bp, Zea Mays
gtcgtgtcccgccgtggtcaatcgcgctggcatcaccggtgttcgctgttatccggccaggctacgtgcctcaacgctttactacatcgcggtgagtcaccataaaccgccccatggtcctggctcgtcgccggtgggtctgccacggtgaaggccacgaatcaccgcgctagtgactcatttcttcttcgaccgccaccgtgcccaacccaaattcactagccactgctcaagcatgctataaattgagtgcacccgcggctccgttaggtaattacgcatccattgcaccagtccttgccccggattatccaccagagcctcccaatttctctcttcccccaatttggttctccgcgctgccgtgtgttggctcaccgtggtcagcatactccaggtctgttcgtgctccctgccctcttgtttca

SEQ ID NO: 32533 - DNA, 819 bp, Zea Mays
tgtaacagtagattgcaacgcgggttgcaagttcacggaccaacaagcagttacttagctattgggagttcatttgactcttctgcgataacacagtgagagatggacgggttcatggcaagtgcagcgacaggggtgatgagctcccttctcgccaagctcgctgagctgcttggggaggactacaagatgcagaggggcatgaggcgcgagatcgcgttcctcaaggatgagctgggcagcatgaacgcgctgctggagaggctagccggctcggaggcgctcgatccgcagaccaaggagtggagggaccaggtgagggagatgagctacgacatcgaggactgtgtcgatggttacatgcgtcagctgcagcacgagccgcagaggaacagtggaatcacgggattcttccttgggtatgtgcagaaggtgaaggatctcgttacccgtcacgagattgccgagcagattcaggagctcaaggctcggatcgttgaggctagccacagaaggaagaggtacaagattgatgacacagctaattctggtgccgccaatgtgatccctgtggaccgtcggttgccagcgctctatgcagaattgggtagccttgttggtagcgatgttcctagagatgagattatcaagctacttgatgatggggcgctggccgtaaaggtggtgtctattgtgggctgtggaggactgggaaagactactgtcgtgaatcaggtttacataaacatcgccgagaaatttgattgccaagcctctgtgtccttgtcccaaaatcctgatatggtgaacatattccgg

SEQ ID NO: 32534 - DNA, 303 bp, Zea Mays
ctttgcattattgagttcattataaccacacaaggtctaattagctactagttccaatacattcatcaaagtattaattcccaaactaataggtttagagcacacattaagaaagaaaaactcaaccatgtgcaacaagacatttggataaacatttcacatgtcataagtcttcatcactcaagaatcaaaaactgattactcctacttagccaaataggaatcaaatcaaataccccaacacaacgatcatgttctccaacttactcgaacctaatccgaacattaagaaacatacatatg

SEQ ID NO: 32535 - DNA, 359 bp, Zea Mays
tgctcctgcggcacttgtttcgcccccggggcaccttggcattagggacatcccggtgtggcgtggaccaacagccatcagacgagaaggcatagggatccttgcagttgcacactgcatagcatcgtcacattccatcactagcctttatgaggacgtctccgttggttgttgcaactgctcccaggtctcgacacccaatagactacgccataagatcaaggtgattgtacacatatcacttcgtcaccatgggaacatcaacatctgcaagcatggccaccaacacagcttgaggatgatgtgtcttgcaggagtagaatagtgttatggcaagtggagctgtttggatagataag

SEQ ID NO: 32536 - DNA, 814 bp, Zea Mays
aaaaagagagattaacaagacatcatatgaaaaatcgagattcgagcactgtaaaatgatctgtcaggaagactgatggtgtcacgccatggtacagtgcaccgggggggatcaggttcagaacctcgccgccgatgaccgatctgcaccgtgatttgtgtcagggtcgggctgagttattgacgggcatctcctcgcgacgatattcttgaagcaggataagatcgccgcggtaggggggtgattattccggccgccacacggtcactgatctttccggccatgcttggtcaccagcgccgctcttctctgttcgtccacgccatcaccgatttgactgctttacggtcgcggttgaacgtggcaagctccaagagaagtaccgcgctcggtgtcgtcgttgatcgccagtagggtccggtgatggttatcaccgtgaccgccgtgatgctcacggagcctataaatccaccctgctctcacttcgttcgtctcaaatcaaccaagcccagctcttcattcctcagttgcgaatccaacaagccactagccatcacgttctatcccccatcctatgtgatcaacggaatttccctgaaccggtttcttccgccgccgtgaagaactcttccgaggccagcactcctcgggttagtgcatacccaattgattcgagttcttgcttgttttagccccctgttgctctcagagccggccaattggagtttacctgagtctcatcaccggaacacccctctgcgccgtagaacgccgccgcgacgccctctttgtcgacccgcctttctactcttgc

SEQ ID NO: 32537 - DNA, 405 bp, Zea Mays
ccccaccctattcctcctggatcgacaccccttaatgccaagaagatcacggcggctcccatcactcccccagtcacgctactctcgttgttgctccctccttccaattaatggcacagagctatataagctgccctagcatgctctactcacctcagatcaagctcctagccactcgatcaccctgtccattcacccagtcccattaccattgctcataagctccccagaagtgttttgcttccatctgaggcccttcgtctccaacactgtcaccttcttcttatgtttgtttgggacacccgtgatgcaccccggaggaatctctaccgacatatatgccctagacccatgataacctaacctcatagtgccctcactaaagtcgatcgctacacttcatca

SEQ ID NO: 32538 - DNA, 271 bp, Zea Mays
ggtcagtcaacccatgcttaaatgtgtcaccgagaccgaaggcgtccaaatcctgcgcgaagtccacagcgggacttgcggctctcacgcagggcctagggccctagccgcaaaggtgatccgtcaaggtttctactggtccgccatgatctgcgccgcaaatcgggtcacaaggtcctgcgaagcctgccagaagttttctccacgctcgggaagcccttcacaattcacaaagctaatcgcccacacgtggcctcttcagcgctggggc

SEQ ID NO: 32539 - DNA, 453 bp, Zea Mays
ctcgctttgtcacagccaccagaccgcatgaattcgtgggcaatctggtctaccgcctctgcgtcaggtatgacaccatgaattgattcgcctaacacgtagcagcatgtagcacctatctgcatttcctaagtcactatggcaccgtggggtactctcaccggcgaagtcgccaccatggtgggtctaggcgccaccgtggtgtgggtttcaggaagaagataacgtgatggtcgtctgttccatggatgtgcggtcacaattaaatccctgagtcactacgccacaaccgttgatgctagattggacgcttgtgattggaacctgcataccccttcgggttttaaatctaggccgcagatctggtgatcgatggcgcgcgttcaaccgtggcgtgtaatgcctcgggccgctagatcacaccacgttaatgaagtctcaatctaatccgca

SEQ ID NO: 32540 - DNA, 648 bp, Zea Mays
tgcaggcaattgtgaccttggactctcatattctcatagaaagatgacagaagagttgaagctgattggatttaatgacagtgacatagggggcgatgtcgatcgtaggaagagcacctttggcatggtcttcttgctaggttcttgccccatctcttggcagtcgcagaagtagcagattgtagctccacttgtgaggccgagtacattgctggagcagttgcagcctgtcaaagagtctgactgggacggttgctgagtgagatcactggacaggtagtgccgccactggttctcaggatcgacaacaagtcggccattgaattggccaaaaatcccgtccttcacagccgcaacaagcacataaatatcaagtttcacctcatcagggactgcgtggaaaagggtcaggtcatcctggagcaaattggaacgggacaacaactcgcaaatgtgttcaccaatccactgggaaagatcaactttgagaaactcaagacccaggtgggcatagtggagattaaacaagagcacccacattaaggggaagagatgttagaattaatgtatgtgctcttgcgcttaatgtactagaatagtatagatgagtctttagacttctagacagtcagctgttgctgacagctg

SEQ ID NO: 32541 - DNA, 393 bp, Zea Mays
gtcgcagatatccccaaggcggtccttcatggggacacacgtactcacggatcatgagggttgtcctcccctgctctaagacgagaccatttttgggtcgtagctctcggtcccaagggggaactatcgatcaatctcggcttgctgcacatcggccctttccacgaagttatggaggtttcggtacatcattttgcctctggtttgctgagctctgggatggattagagaatcatggtgttgcgaggcactgtcgcaactttcagcaagctggtcacataccttccttggggcctctcagcttcaaggcgcttccgcttgacatcgccatagatgcgatcgagtttttgcacgagggcgtcgagctcctccttctgctaacggaggtagtcc

SEQ ID NO: 32542 - DNA, 317 bp, Zea Mays
cacgaacctactgcacagtacgccgtcgcgtcaggcgccaagcaactcttcttcgaatacaagacaaaacttcactaaggacgcccccttggcatataaatagggtaggggaccctccatggatgagggatccacagatcgacatcaacgccacacgcccacaacacacgtagacgaactctcactctctcattctgtcttagatattggcacttgcctcaatcatctctagggacttggggacttcccctctcccgttgtgcttgtaatcccctactacaggcaccatggtgtgagtaatataagcctcatcttct

SEQ ID NO: 32543 - DNA, 320 bp, Zea Mays
gagaaaatggcgtgcttaatttggaaccgtgtgttgggatgaaatttagagatgaggttcaggcttggaaattatgggtagagtatggaggctatatgggattctcagtcagaaaaaggtacaacaataaaaggaaggttgatggcaaaattacatcatgtcgttatgtttgttccaatgaaggtcatcgagcacgagacaaaagagatcatctagtaaaatgtcctagagctgaaactagaactgattgtgaagtccgcatgtgtcttaaaatggagggagagggttatgtagtatatgagctatttctggagcataac

SEQ ID NO: 32544 - DNA, 342 bp, Zea Mays
ggccggctctagtgatcggccaccaaagcggtctcgcttacccacccaggagcgacagcaggttaggccgattagaccacctcaccaatcggaaaggacgggaggtcataatgtccaactaagatctaacgtacacgcaaggacacctccactcccatacacacctatgtcatatcattatacatacataccaccaccaccatatatcccgaatcagatgtggggtatgccaccatatcctttcgggataccacaatactccgcttggggggcaccccagtcatctgtctttgccaggttgacgcctccagtacaagaccgattgagagcccctcaatctgg

SEQ ID NO: 32545 - DNA, 321 bp, Zea Mays
ctggtgaaagggaccccgctgccttcaccactggggtattaccccatctgcaaatgatcacacatagctttagctcatttcaggagtatcactgagatctatttttttgggtgggggtggagtggtgcatcagcaatgcattgactgtgtatcatcacaccccctcgctcacagtggttctgtttcaggacttctttttttgctgtattttacctaataacttttgactggcttcgtcactcgggtgtgtaactgtgtatcatcacacccctcgctcacacacgtgctggaggttgaagaagaggagataagagaatacac

SEQ ID NO: 32546 - DNA, 807 bp, Zea Mays
aggttctacagtagaggctggagctagtgctgactctgacactggctacggtgtaggaactaccggagctggagtagtcacagaaatagccatgactgcagtggtaacagtagacgctagtggcattggtggttgagcactgataggtccgatgacatggatcgagaaatccagagtgaccggcctgagcgaagagatgaaaggaccaaaagagtggagctagggtcctgactgaatagctggcacaacagtagcctgaagagctggaggaggagcagactgcactagaggtatcggaacgccggtgtgctagaaaatgtgagtcatgaacgcctggtactctaccctgtctgctaggagctgctaccgtagagtgtcctggcggtcctgaatagtctggaacatcgatagcatccgctcagacatctgctgctaaatagctacctgtctggtcttctctgcggccaaatgagcctctgctaagtgtgtgactggagaatggcagccaaagcagggtcaattactggaggagcagctgaataagcagcactggagctaccagcctcgtgatcatgggaacaaggtggcacatgaggtggtggcagaatccccagatcctcatcatcattggaagaagtatccacaactgcaccctgatcctcaaactgtcggatggcctcgtcctcaaccctaatatctgatgctggagctggagctggaactgtgtccttaggagatgggcgatagaagacaaactgaagtcgagaggcctcgagggtggcctggaactgaggaggccgaatcagc

SEQ ID NO: 32547 - DNA, 377 bp, Zea Mays
ccacccctcctcgcccttcaattcgcgtacaacaagctggccttgtccttcgcacaagttgtcagtgagctccaagtgtcattcaaaatctgaacaaaaatctccttcaacatccatgtgccagaaatctgaataaaaacagatctccttcgtccatctgaacatattgcatgaaacctgcgagcttggttgtgcaaattataatttgtctctagccatgaaataaaccagtacaagtttggtgaatatgaacaggtatatccacacctaccttgagcatattgtaagttgtgcatgaatcctcggtctcagtgggcagagcttcagctaagcgctttcgatcggacccgatacaagccaccttatggtttcagaca

SEQ ID NO: 32548 - DNA, 462 bp, Zea Mays
cgatattgagagcaagggatattggctgggagcatgctgtggatcttgatggaaataaaagacggtggcaatgcaagttctgttctctatgtcgaagtggtggtgtaactactttgaaggctcatctcattgatgacagctgcccaaacgttccaaaggaaatttcaaagaaagtatcaaacttcattgaagagaaaagagcaacacgccttcttttgaataattatgtctttaatgttgatgaggacttcaacacaatacttcaagaagggactgtagaatatgtaaatgaacaacaaccttcaagaaaggctacatatgtgcaaacattatctaagtgtgctattaatgaggtatcgttgctgtccttttgtattcatcttacagttttgttttatcattgatgcccaatgtagtagccatgtcatagggaaagaaaaggagaattatgaggattatcag

SEQ ID NO: 32549 - DNA, 615 bp, Zea Mays
gctttgatcacatacaaagtttggagaaaaataagctcaaagttgtgctgtcagtcactctactgactgaattttggtcaccagtgacattggccagacttttgggtcgaattagagtaagatctattgctcgattgagggtagttgctatagaagaattgtagctggtatgaagggctacaagtttgctacagatgtattggcaagttgttgcacaaaaattcaagatctagaattcggtctgtaaggcgctctgaatcgggtttcaatggtacagttaccagatcagaacgccagctcagagaactcacagccggcgatcgtgcgctcggattcgtgcccgccgtggtgattcgtgctcggcgcagttagataacgcagaggggtaaggaaatatcgcgccgtggatgaactttggccactattctactccggccgccgtacccgcctgagtcacagccgctgtggataggttcgccggagttagccacctcacgaccttgcgccacgtgccctggcatcttaccacgtcgcagtagctcgcgttatgcatatccggtgatcgccggtgagctcgccacggtgaaagccactaatcgcttgcgccagtgcatc

SEQ ID NO: 32550 - DNA, 488 bp, Zea Mays
gtccaaatctttgttggcagagctgtttgaaatgagaccatgacaatggtggtgcatcacgctggagctgtccatacgggcgacccctgtcatgtgataggaggcaaccagccttctcttctatcgtgcgttggccgtcgaagaactggtcacactgtggtggtggtgtatgcgacggcggaggtttggatgggctgcgggggtaaggatccctcagggactactgtggctggcagcaggccgccgtaccctggcatgccgtaggggcagccaaatggatgtgtatcagctgaggttcctgggtttttttccatggccgtgacgcgagatgagatgaaggacatctgggagttgaacttccccagctggcgttgcatgtcggctagcatcgtggtgatcgactccatcgatggcggcaccgtggcggaggccaaactatcgccggcgttggaccctggcatctccgatatcaggttggtatgatctct

SEQ ID NO: 32551 - DNA, 443 bp, Zea Mays
ggagagtgagcgggttcgatggtggtcggcttcgtgtgggtagggctggcaggcaggaattgttgtcctcgccagttggggcgagtgtgggtgagggggagttgcgaaggctttttgagggtgaggagctgaggataatgctatttaactatagggagatggggatcattccgaaggttgaaccaatgtaaggtgtgatgccctcgctgtacgcgtgtaactgtagtttgtgtgataaggttgactgccttcgcgcatctggctatgttcgtaaggcgttgcgcacctggtctagcacgtttattatgtcggtccggctgtgcctgtagactttcggactgatgtaatgcgcctacgattttttgcactcgttatgctagtccggctgcacccttaggcgacttttgcgcggatagtctttttgagaagactttgaatttacg

SEQ ID NO: 32552 - DNA, 324 bp, Zea Mays
tgtatcagaagagcctgttgccgaaggtactctgactgccgaagttgagggaatcacagttggagagggaagtgataatgaagacaaagaagattataccgtcttgatcccagaaaaacctagtcaccttgactttggtagatctactgtgacggcagatgatatggttataatgaaaaaattgggttactttggagaagccgagagcaggctcgttcgttttgctggcgaagaagtggttccagagccgaaggatgatgaagttattgtgtttaaaagcttcttcagggcggggcttcggttccctctctatgatattatagg

SEQ ID NO: 32553 - DNA, 294 bp, Zea Mays
gccgaagtttagctctaacggactcataaccatgctcattagcttctccctctttttctcatctgttttcatatagaaccattcattagtccatccagtcggccacttggtacgatagtcaataactggggccttcgtatcctttcgatacacaaaattgtagcagccaaagttcctatgaaggccatctgcttcgtctggtagtgaagttcatgcactcggcagaaagcttcagcattcgcatccattccctggcttcgaagagcccatatgtacacactaagtttaacaatg

SEQ ID NO: 32554 - DNA, 364 bp, Zea Mays
gtttgcgtcggggattttaatcacattatttaggcgcttttatttgtgaatcgaatcgatcggggccagatgtacatgtgccttatctagctgcggctttggttccccacatatatatacactatactatattactatcactatttctgatagcattagaaatttctccaatgaatatatgcaacgatgctggatgcgtggttctcctgcgcattctcgaagaagagaaaaaggctgtcgatcgaattcagaatataatcttgaagaaccacgccatctagccgcgcgctttgaatctagaaatgcccaccacactatcgaactgatagttcatgggttgatgtcaacctgcacaacctttttt

SEQ ID NO: 32555 - DNA, 282 bp, Zea Mays
ccgatatatacggtaacttcagcttcgtgggtgcgctaatcacggtggtgtgtggacccacctgaacgaaccaatgaaaggtttgttggcgctctcctgttatgcaagtctgaaccattaaatatggtagcataaacacgagtaggaaccaactacccgaccagcgaacacgacgttggcccaccttcgtccatcccaactcgaccccaccacgtgcgtaccttctgtttacgcaaaatataacacatgtttacacatgcataaacgtgccccacaatcgcg

SEQ ID NO: 32556 - DNA, 305 bp, Zea Mays
gtaataaccactctttctatattgtacctgttaatgtaaattaagttatttttactctttccgcttttactccgatgttgtgtgatgtctatgatatgggacgtacgctcttgggagatgaatgagatacaggaacttggtcttgacaagcgattgggtgcatctgcatgagtgtctaatgttcttggtacaaggatagctataggtgggcctaatatcttgggaggttctgttacagctcgcactatccttctcaccgccatgtaggtccgcaatatccgcctcccacggactatccacatgct

SEQ ID NO: 32557 - DNA, 524 bp, Zea Mays
caaaactgaaaaaagtcttggaaggtggcagattccaggaagaatatgcaacaggagcaccaatattcgacactttgcctctaaggatcatctccaaccggcttaccaaatccatagcaggaatcctcctgttggtaacccgggttgaatcagtgacaccactatacaaataagccaggtatgctctgtccttcagtggctgaatgttcttaaaaacaaagtctgcaactaccgcatcggcagtcagacctctctccttcaacaaaccaacttcggcaagcagaaccctggactcaactatctccaagtctgtgggggattcagtccaacttggagcacgaacatctggttgcctccctgaccgaggggcagggacttgccatgattctccacaataaaccactccaagcgccatcctttgatgatgtccttgagtgggatgtcgaggtactctgtcttccttccacggcgcatctccaaactcgcgccacccatgagctggtgctgccccccggccattctag

SEQ ID NO: 32558 - DNA, 483 bp, Zea Mays
ctgtcgcgatagcttcatcgaacgtgtcatcgtcggagaagacaattagtgatttggcggcagtagtggagttgttaccggggcatattgtggagtttgggacatcaaggatctactcgggccacgtgcaggagacgcatcgtttggggtattttagggatggtgtggggcacgctcctggagccgaagtggtcccggagccggaggggaagttggttgtttttgtggtgtctttcactgcaggacttcgcttgcccgtgtatcggtttgtcgtccaagtgttgcaacgcttcgaagtttagattcatcagcttacatcgaatgccatggtggcattagcgaaatttgtgtgggcagcgacttcgtatggcggggagccctaggtcgaggtttcaactagaattattggctccattggcagaagaaagttattggttgcaagattgcacagtttatacatgcactttcatgccaaggactggg

SEQ ID NO: 32559 - DNA, 284 bp, Zea Mays
gcgccgaccacgtctgccgtttttgtgtgctcttcgatatgtccaggtgccctcaatgccgccggaggagtaacagagacaccctctgtgtatggggcgattgcagacgctacaggatgcatgtccattgaaacagacgtacctgctggcttatgcacagatgttacaggcagaatgtcatcgccagcgccggtggtggacatcttctcgccgcccatcgccggccggacctctcacttccgccgccgctaaccgccgccaatatttcagatggacgagcgaac

SEQ ID NO: 32560 - DNA, 424 bp, Zea Mays
ctttgctgaaccatattctaagtgttgtgatggcagaggatgggtaaaatttcatgttaatgatggttttttgttccgagctaacaaactgtgcattccagaatgttccgttcgaattttacttttgcaggaagctcatgcaggaggacttatgggtcatttttgcaccaagaagacggagcaagtgcttgccgatcatttcttttggcctaaaatgagaaggggtgaggagcgacatgtccttcgatgtgaatcatgtcataaagctaagtttcgtttaaaccctcatggcttatacactccactacctattcctagtgtgccttgggaagacatatccatggattttgttcttggtttaccacgaaccaagcagggaagggattccatttttgttgtggttgattgatttagcaaaatggca

SEQ ID NO: 32561 - DNA, 705 bp, Zea Mays
cgaataaaatggaatttgggcactcggctcggaaacgatcgctcgaaacagggaaatgagtgaaattgaagcctggtatatcggattggcgtgaaatttggcgaatatgctactgaaggtgttgtgaaggtgcctgaaaattttgggttcaatcggagcatttttttgctggtttggacatttcaccgaacacgtggtatgcggtgagttaggttttttgacatattgccatttgaggattgaaaccctcccaaagggagctagaaacctgcagggatactcaagcgacacaaaagaacacattccaccacttggattcactggaattaacaagaatttgaattgggcacaaagggtggattggagttcactgctcaacaaaatagagagggggaaagtcagagggaggtagggctgctcaccgagaggagggcaggagaggagcacttggtcaccggaggattgccgccggtgaggagatcgccggagaggaggtttggatcgccagagagatggagaggagctgggaatagagaggaatggaggcttctggctcaggcgcgagttggggggcctttttttaaaacgcgatacgggcgcaccggatagtctacagtgcatatctggtgcacaccggacagcgcacagtagctgtccgatgaaccaccggacaacgcacaggagaaggggaagttgcgcgcgcgc

SEQ ID NO: 32562 - DNA, 466 bp, Zea Mays
ccgggacctcctcatggtgggggagatggtagaggctagaacagtaggctatgtctgatggagtgcttgaagtccctacagttccgtagggtgtggcgcatattcttgtggtagaggcactaggtgtcgaggatgtcatccagtgtctgttcgcctccgtggggcgtacctcgggctcgagcaacgggtggtccattggcatgtacctgctcacgaggcctcttctcccagcgcctgtcaggttgctggttcgtgtcgcgtcgtggtgccggttgtgtaggttttgtacctccaatgaggtcctgggcttgctcgtcagtggtgatgtagaggtctgcctctcgaaatagttgctcagaggtggtcgacgcttcctgcagtatggctcggacgaaggccgagtcattggatcctcgatagaaatcttcaatcaccgctgcctcggtgacttcggggatgcggtttc

SEQ ID NO: 32563 - DNA, 296 bp, Zea Mays
gcgccaagagcgagaggagatacgccaggagagaagggcgcaacagcaatagcagcaagcaccactgccaccacctccaccaccagtttcaccccaggacaagcaccgagagttcatgagccataagccaccgtgctaactctcctgatccactagacgcggatgattggctgaagtctgtagagaagatgctgaatattgctcagtgctctgtctgggagaaggttctttatgcttctggtcgtctgacaggtcctgccgctgattggtgggattcatacactactgcccacgat

SEQ ID NO: 32564 - DNA, 824 bp, Zea Mays
gatggttctgatagatgctgcaaaaggatgtgcaactgaaccaccaaacttgaccctgtatcccgctgattttgttgtctgttcattttacaaggtaatccatgtgcaaccatttttgttttcaaatgccttgtcctagcatgtaacgaattgttatcttttggcaaacttgcagatatttggctatccaactggtcttggtgccttaattgtaaaaaatggtaggcaacacgctgttatcatgtatgatggcatttatttccttctatttggcatattataggctataagctacacatctaaatgataagataaattatgtagctacaacaaattactacatagatgctggtgatcggcttcccaagcaaggagcaagatctctaatgatttcttccctattttttattcaatggcagaggctgctagtttactgaacaagacatacttcagtggaggtttgcacttagcaatgcactgcttttaagttttaatgttggtttctttgtttgttttcttattttttagtaaccttgtggaatacttatgacataggaacggtagctgcttcaattgctgacatcgactttgttcagaaaagaaaaggcattgagcaaactcttgaggatggaacaatctcattcttgagcatatcttctcttcgatatggctttaagataattgatatcctaactatctcagctattgcacggtactatcagagataggttttgctcttgttattccgtttatgatatacttctcatcggagttctcctgtaggcatactgcatctcttgctacttatgtgagaaacaaaatgc

SEQ ID NO: 32565 - DNA, 431 bp, Zea Mays
gtccatatatgagcatcaaatcagatttgaaattcaaaatcagaaagtgaacagaatttgaaaaattgagtatcaggccacggaccgtccgcccatgggccgcggaccgtccgcagtatcaggatctttacagtccggtcagaagtgcagacagtctgaagttatcagggcgcggaccgtccgccgcccctgcgcggactgtccgcgacaggcagtaaaaatgggcagaggcagtcaacttctcatttctgctcatttcctctcacgctctccactcgccaaaaggtcactttcgtcgattgtgcgcggacggtgaagagaagttgcgcacggacagtccgaaagcctgtggaaagttcaacaaacatgtcttcatcccggtatttcataatctcatgtattttatcaattttttttttcaaatttgggat

SEQ ID NO: 32566 - DNA, 605 bp, Zea Mays
tcgttgttcgctgggtaaaagaaacaaacgcacctatatttcctttttcctagcgtttgctcatacgcggaaggcggtctgaactctaggagcatctggaaggacggtctggactctcgactctaggggcatctggagaaggacgatgtgtgttgttcttttgccgttgcaatgaaatccaacggttgagagctggcaaaatgacgtggacaccctagtttctcgtctttgcgtcacactctattatatagaatagcacaggagctcccttacaaagtgttcagttgacgcacgcggatgcaaccagagttgcccgatcagccactaacgacccagattggatcttattcatactgagtcggtacacgaccgaggccgtaggacccaagatcgatgactcacattaacctatacgaatcataagctccaccagatcctggccgctcatcccatgctccacggcacacactccttcccgaatcggtatgctacgacgttcgccagatcagaaatcaacggctaccgagcgtcttctctaatcagcgcgagtacacggcggcgatggactttcctcgtggtggcgccatcaccggcgcgatacgccc

SEQ ID NO: 32567 - DNA, 311 bp, Zea Mays
ctgccacggagctggtgcccttgcggattctgcagtcagacatcatttgtcgcctgataactgccttttttactcaaacaaagtaaagtaaaagggaaggatgggtttacatttcttctgtaatgcaaatgagaacagctgaactgaaaaaaatctattcagttgtgcctttgaccctcccgtttattctgtacctttcttttatgtggaatagtagtatatctactaataagccaagtgtgcatgatgtgaagattagaatatttaattagattcgtatttcagcgttgaactacatatttagaatgctg

SEQ ID NO: 32568 - DNA, 286 bp, Zea Mays
ggatatgcgtcataccctccggaactgcagagacttcaagcactccgtcgggaatggccgacccttccaacctctaccacctcccccaccacgaggaggatccggagaacctcgacaacctcagcagcgggaagggggagaaggcggagcgttctagcgcatcgatggagaagtcatcatcatctttggcggacacgggtcacaagagaacaaaaggcagcagaagctcaacgatcgccagatactggtggcggccaccagtgctcccgccccgtatcgatggtca

SEQ ID NO: 32569 - DNA, 308 bp, Zea Mays
acacgattaaacatccaagtaggtttggaccaatcgtgattaatcgacaacttaaaacattgatggaggtacggtgtgttggctacttggtttcatgttacacctatgtacccaggcttgtgatactttagcgtttgtttgattagctgcatgtataggtgtggcttggcccagatatattgtttatctagattagcaaggtaggcatggcatagtggttattgtatattgtcttccatccaacaagttgcgagtttaagtcttaccatgcgtattgattttttaccttacttttattttgtcgtccg

SEQ ID NO: 32570 - DNA, 283 bp, Zea Mays
tctaaccgagcaacttgtagagcctcattctcaaatttttgtgtgacaacccactgacctgcatgtatcaaagttgttgtccaatgtaccagttgtaacgttgttacaaagaccttgatcaaacatccactaaatcccccgcaaattgatctcaaagttcatccaagttcactgatagtcaagattcagtcttaaggttgactgatagtccaacttcatgtctattttcctctgatttctgtacagttcttgggctagatcatctaatcaaacttgaactact

SEQ ID NO: 32571 - DNA, 1564 bp, Zea Mays
cgctcctggcgcttggtttctattggatgcggtgagttcctttgtaacccctctcagatcccctccaagcttaaagaccatatagaaacacaatccgtattcagctgttagcttaaagcttattgaatggttggactggctccaagatccaacgtcatcttctaggatttatagcattgtgctaatttttgggaaattgaagggtcagtttaaactaaaaaaactcggatttacaatagcatagctaaaccaactcttcttttttcttggtgagttggtggactgtcgcttatgaagttctccctttttccaatcatgctgaataagagaggaaactcggaacttgctaacttactgtttcttgtgttcattaagttgtatgtagccttgtagctaggtgtacaatttaccaagctcatgaaatattcgatgaccattccctccaagtccaaccacaaaaagtgatgtttatggttgtctaatgtcaaccactccaaactttaactattatttacttttttatatattgagcttcaatgtttgaaagagcagaattctctttaaaaatagtttcataaaaattcacattttctatatttatagttatattagaagaaaaggtagaggccaaactttggaacttgatttcatacaacttcagaacgagggaatgtcatctaggatcccaccctattcatcaaatttgtgattactgcattcgggcatgataagttctaaactttccttggatccataaattagtatatgtgcagtcgtgtactagctaatttgtaacacattatgcttcgttttcatgtacaccttcaccattctagttttcaataggtaaagttgtggatcctaaaatttacagctaggcatagccttatatgtgcactacagaagtaatgtctatttttatttttttgcataattatagaataagttgtcatgtgcttgtcaaaacagggtgtgatgcagttaggggcaccaaagaaattgaaccatcagttcgataagagtacataaaaggtagagacaatattttacttttgtcctacatatacaattatatatatgtattctataagggtccacctaatgctaattaaaaggaacctgacatctgattatcttatgagtagggtatgttcatgtacactaacagatcctaggcatgctgttataaactttgctctttcagcttgtccgtcagaggaaaaataatttctttcatttttcgagtctctggtaaatcattgtgttggctgcgcatccaccttaacattttgttttttcccttttaggatcaatgcatttcaacactgagaagaagccaacagttcaatggcagagggtgttgttggcatccttattctgaagcttggttcagccttgtttttagaggcttgcaggcttggcacaaaacagctctaccatgaagcttcagcccttggcaggctctttggtgagatccgtgatatcaaggaggaattggagagcatgcaatcttttctacaaggagctgagagattcaaagatactgacaacaacactgccaact

SEQ ID NO: 32572 - DNA, 569 bp, Zea Mays
gttgataaaggtcgtcataggcttgacctcgggctctactaaccgctcgctttgcatacttcttcgctatcctgtacttctctacgttgtctgcacacttgtcatgatgtaagtgtttgtagcaatctttcttctccttgatagccttttggacatcttcgttccaccaccaagtgtctttaacttcccttctgtttccttgactcaacccaaactcttatgaagctatctttcggatgcatgttgtcatcttcctccacatgatgtttgtgtctccctcttctacccaagggcccacctcgataactctctccttgaaagtttgggccacatcccctttaagcttccaccattttgttctagtgaccttgttatgcttatgatttttaggtataactctagccatagttggctataacgggtgctctgccactgcctaaggccacattcttctaagagctctagccccagccataccccacaaaatagcatcttctctgatgttctattgaatgatgctacagtttggagatgccccataaaaaaatacatgaattcctatgtttcca

SEQ ID NO: 32573 - DNA, 285 bp, Zea Mays
taagaaagtaaccccaaaaagatttcagaaaaaccccaaaagattcacaaaagggttgagcataagagaaaaatcagaattcttctaagtccaaacatgttcaccttgatcccaaacttaaaaccacttggtgcaattgacaaagtggcgccaaaatacctctagaacaccctagaaaagattgaacccaaccctaagtcgtttgacatgacttggcacaagttttgtctcggtttggacagctaggacaaagacaacttcccacccccatatctctctaacccg

SEQ ID NO: 32574 - DNA, 617 bp, Zea Mays
ggggccgaaacagaagtttttcccagactcagacaactcatgtgatggactgggggttgatttaaaatgagacgaggggttcttttgaataatttagcacccgaaagggtaacttcaatcctgagccgtccgatcaaactcgcacgacccagattagatcgagtacccttccgaaccggtactcacgggtgatcgtgagatgggcgatcgatggtggagattttaaacaacgctgccagccgcacgaccgaacgatccaagatcgacggcccgcgcacgaagggtataacgtttataatcacagccgccaaccgcgagatctatggtctggatcccaccccatcaaagcggtacgtttctcagaatcctggccgttaagtatccgatcgacgactgagcgcccttcttctacctaacgttgggcacggcggagtcctggcctgaccagcggcaaacacgccggtgaacaaccatcccgcccaacagacattcatccctaaatccgaaaggtgttacgcaaagtggaagaagatatgagttcactagaggtgcccttaccagcaatcgcgtagccgaagccctgctctattttctctcttcttgcatctctctcctcc

SEQ ID NO: 32575 - DNA, 393 bp, Zea Mays
gctttgacaacgtcagagtatcatacaagagaaatttcaatgcaattgatgactccgacaaggtaactacttttcaacacatccgataatacccatatagatatcaatatatgtacttaatatttttaattaacctatattgctccttcttttacaggaagaaacacatggtgctgaccaactttcagtctttgcaaaaagaccaaagatgaagaacaattagataccttctacatagctactcttttgagaccttgcatctattgttcaatggaaatagatcggttgtggttctacttacgagaacaacaaaatttggcttctcgcaaccaaaactcttttgcagtatgtataaacatatgactgtttgcaagcaacgtagcagcagttctg

SEQ ID NO: 32576 - DNA, 311 bp, Zea Mays
cttcctctcgttgagcccgttctagatctcgtgtccttttcgtgagatcgtgaaccacctctctcgctcgatcaggatgtgagcctcaataaaattggcaaccacgtcctacgtcctctcctttatatatatttgtctttctctcggcgagcataatatccaaaatccgcaaaccattcctcacataccacatcacaatcgttgccgcaccatccacaacgcatttgtgtcgcccttcagacccatttgtcatatgcccacatcttctttaatctctactttcgtccaacatccaaacttcccttgactca

SEQ ID NO: 32577 - DNA, 335 bp, Zea Mays
gtcacatatacatgaaacatctgtgggcatgttaattctttttctttttttaatacacatatagcttgtataattcaaattcttaggcttaatgattaaaagtagacattcctttatgtgtgaatgttctgttttggtgtttttgatcgaatatacaccttagtggagtgctgaactgccgtttcatgacattggcactggcaactcttgtgtttattgtaccctgaaaggctgaaactagacataccattttggtgagatgggatgttgacctcactgataaagttgatgctacagtagagatgcagtggcagaggaacgtttgtaagtgatca

SEQ ID NO: 32578 - DNA, 398 bp, Zea Mays
tgaggtcatggaagatgtaattcattgctagttggtacattgctcctacattcttgaggccaaaggtcattaccacccattcaaacaatttgatggatctagagcatctgaaagcagttttgtacacatactattcggccacgaatatctgattgtaccaagtgttgccattgagggaactcatcatcttgtggctggttaccacatcaataaacatacttgtgattgtgttaggtactcgtccttcagagtggatttgatgaggtccttgaagtctatgcagacaccacttgatcgttcttttcctaactagcacaatgctcgaaatccatgtagcgtacctgcatggtctgataaactgactctggtcatcttctcagtctcttctttgatctctt

SEQ ID NO: 32579 - DNA, 300 bp, Zea Mays
tgatatggcgatgtttagtccatggattagagcttcatactcggctgcattgttggaggctggaaataacaactggagggcatacttgaggtgctcgcctctaggtgcgatgaagagaattcccgcgcctgccccctgcagcttcagcgagccatcaaaatacattcgccatacttctgcagtttctgggttttctggtacttgttgttcagtccattctgatacaaagtcaaccaatgcttgggttttaatggaagtgcgaggtcgaaattcgatgtcatgagatcccatttcgcaggc

SEQ ID NO: 32580 - DNA, 327 bp, Zea Mays
cgagtccgtagggtcggggcgttaaatgtcgtgcttgcccacgaaccctccaccctaaaaccacacgaaaccagccgtcctccccatgaccgagagagctcccccatgcatgccgccgccggctaaaaccacaccgcgtgggtgaccgaccgtagcaaggtatccggagtgttcgcaggtgaccacggaagcgttctgcagcacattagggcggaatagcccatcagaccgccacgaattcctcgacgtcgttcaatctccaccacggtaccgcactgtcacgtgggcagggcagtcgccatcccgatttgaggtagatccactccc

SEQ ID NO: 32581 - DNA, 275 bp, Zea Mays
gtatctcaatttcatccaaagcatgaaccaccctattattccatacaataagagctgggatgtttatggattgtcccagccttccgatgcgatcaacctagattccattccaacaacgtgtgttgatggttgcattcagacgagaaatcgcatgaaatgcctacataattcaaactctccagtagggacaaattgatgtcgcaaacaaacagtcgcgacccagcgaaatcaaacgcattcacgtaaatcgaatcgcttccgcactatcacgacgc

SEQ ID NO: 32582 - DNA, 471 bp, Zea Mays
caaacgggcataaaggtatgtgaacgttatcatatgcatgtaaaaaaaatgattgacacataaaaaaataccgagcaatgtccaaatgcttcttctcctttgcgtatcttgcccttgtcagctcttgtcagggcttgaataatattcctatcaaagtatttgattcatggtgttccacgtttgttctggggtgccgctgagtcatgaagatgatccaaataatacagctgcaaaaagcataacatgagtcattataagacataacaaaagcataatctacgtgtatatggattttgcatacaagattatgggtacatataacagacaaaaaggatatgcttacaagaataacgatggaacatccatagatggttgtagaaacgttcgtaacgctcctagtatgccacttcttggcagcttggcataaatcattgaaaataagctggcaccagtccatctggtggaaacgat

SEQ ID NO: 32583 - DNA, 447 bp, Zea Mays
gctagatctaagggtaattgcggaggtgcggggaggtgggtttcactttcctctctatcagcttccccttcagctctcaggggaaaccctgctccaatcccggaggcggtaggcgtggttttatccgaagccatctgccaggggagggagtcactattatgcatatgcaaattgttttcaaccaagttattttattcattacaccagtacatttcaagcatatgactactacaagttgtactacacgagagcgttccctgaggtactaccgaactctttctctaaggtatccccaaactccttgagaagatcatcaaggcttgctagggatatatcctcggcgtcggaccaatcatctaccctggggggaggtggggctggaggggtcttcttcttcttctccatttggcatcctcggttggtggtcttcttctggattttcttctt

SEQ ID NO: 32584 - DNA, 275 bp, Zea Mays
ttcatccacaaggcgatatttactacccgagcaactatctgtactccgttgagcactaatcgtagcgtcaggcgcgaatccttgcacgtggtctccggcggtgagatgatctgaacctgggatattttcgatactgtaccatcagtttctcatttagtcatcttgacagaccactttgtagagcctagatctcaaattttcatgtgaatacttactaatccgtctttaacaaagttgtagctcaaccaaccagctacaaatcgactatagtaact

SEQ ID NO: 32585 - DNA, 520 bp, Zea Mays
gtcgaggtcgtcggtggccaggatgcggtcggcgatgcgtttgacgaggtaagacgggagcaacgaccagtccgccattgcagaaaggtcggagcacaatgttagtaatccggcctctaggatgatcaacgcacacacactcgggtggacacaggagagtcttgttgctgccaagcgatggcttttctggtgagtgttcattgctttataaactaagtacatgcagtaatataaggatacaaataactgagccaatcacggcatgatcgtgattgattgctgccatcccaacaatctgggtcatgccgtgagcacttcctctaattgtgctggctgatttctaccttctatctttaggacttattcaaacacacaagcgcacagggttcacggttgcgggacgaattgaattgaatatactggaggctcggagctgagattgggagaaatggtttgtggagtggttaatacaaatgatttgtcttccgtgcattaacccatcgtggaactccaaacgtcc

SEQ ID NO: 32586 - DNA, 366 bp, Zea Mays
ctttgttaagctctattacgagcgtaccacctctcggattcgggtctgggcgtgtttggagcgatcttgccgtgcaccagttatgatctgccgcagccatggcgctgcgccgccgtgcgtagtgttggattgggggaagaagtttggaccgtgcgtagtgacaatggcgctgcgccgccgtgcatagtgacaatggccgcgattagatctaggataacgcttcggttagaatcaatgtggcctgtagataattgattatatattctttggtctcaactcgcccaagattcactttaatccgttgatcgccgatttgatgtctcacgctgcgtaccgattcgatgtaagggcgatctaatatgggcc

SEQ ID NO: 32587 - DNA, 380 bp, Zea Mays
cgttgctactgtgagactttgactagctcggttgaggatgggaggtgcggcggtgttggcatcctctctgatatgacactggatgtcatgtgccttcgcgcgtgcgcccccagcaagggttttgtctatggcttccctctctagcgcttgtcgtagctactactgctgctgttgttcctccctgagcttgtcgtgtagctctcagagttgcttgaggtgagccaagtggctcccaagagggtctgggccccgcctggttccactgcttcctgaacgcatagtggaggctggtctcctattcgtggcatgccaaggtgatcgccttcgtcagggatctccaagtcaacgtggaggcactcccgggttgggtcatagccttc

SEQ ID NO: 32588 - DNA, 300 bp, Zea Mays
cgcgggcggatttcgcgagggaagagcgcgcgagaggcacacgagatcccccatgaaacgatgccggtcacagtgggagtttcacgggatttcacacgtcttggaaacgagttagcacagtttcgtggggatgaaactagttccttctcttccctcatttaatcagtgccatgtcatcagaaaagctgatgtgtcatagtaattaatgccatgaaactactcatgaaacctccattgtgattagccttaactttgtggctccagcagtcgtagtcttttcctcctttatccttggaaaaa

SEQ ID NO: 32589 - DNA, 391 bp, Zea Mays
cgggctaccgggtgtcggtggtggaagctcaccagacgttggcatggcgccaccgtgggaagaaaagccccgacgccgtcactgttgatcggagatgaccgggggtccgtctgccattggatggtgaacggatggacgggattaaaaagggagaataccggtttaggtttttagatccgagccgttgattccgtagcgtgtgcatcggattagatctggcttatttgaaatagtgaccgtagatcgggggatcaacggtgttcggtggaagcggatcgagtaactatcggttttgatctgggcccttggtttctaatccaacggctcagagagaaccgtaccccttcggctagagcaatttgcaaaagagaccccacaatcttaggtaatc

SEQ ID NO: 32590 - DNA, 443 bp, Zea Mays
gggaagagtagaggatgtgcccatcttcgatgatgagaccactgtatcgggggaggagccccacagcgtgaggcacgccaacgtcgaaacatgcgccataacattcggcattaccatgagcccagggaacatgaccccgctcagtccgtatgctgggacgtggcatctaaagcaggagcaactcctgacgatagggcgttccgtgagcaccgcaattcctgacgccacgatcgttgccacgcctaggagcgcgaggaggaaggagcagagcatgatgccagactccaacacgagaacccactccttccctggaatctgccacctaactttgctcaagccctaaacacgccgagtgatgttggcagggtcctagcttagatcgccaacggcttgccatgtaccccgaacgcggaaggctaccgacagattctcacctagccgac

SEQ ID NO: 32591 - DNA, 348 bp, Zea Mays
tgcccatctagtgtaatgcctcaatattctataaacacacaaaagccaaactgaacctgtcattcagtgtgtactcctgtgtatgtggagtttgccaaaaatcgttgaggagtaaccaaataggtttaaatgcttctacctgatatagatgtggatatactagggattaatatcatatccacatttgacttattggcatttgatctattccgcagggacgcctacgaatatgatccatcaaccttagtcaaagcatatgttctaattgcagattcacgtggtctgtaataactctcctccgatgaactcgccctgctggtgatttgcctcacgaagaggttcatcttg

SEQ ID NO: 32592 - DNA, 312 bp, Zea Mays
aaatcgtccgattagccatctctggtcgaccagtgtgcggcgggctaggtgtactattgggcatcaccgtttttttcgcctagtagccgcataaatctgttggcaccccaaaaccctaaagcctcccctgtgcctgcgcccctctcctaaactttctgtcctctgccggcggcggctgctccagcctccagggctctccaccatctaccagctctggcgtctccagcagtccagctcatccttgaaggtcgtccctgccccctgctcatctacaaggcacaagatgagctcgtcatccgaaggtcatccctg

SEQ ID NO: 32593 - DNA, 509 bp, Zea Mays
gaagagctttaggaggacctagggatgctagaacaagccacgaagagacttgaactgacctgagctgagctggtcgtggcgaggtcgttttcacggtggcggaaaactaaattgggggaaatccggaattggtgctctgcagtgaacgattgctggtgattcttggtggctggatgcttaactatcctatggagctcatcgtggcttcaatttattggaaggaagagcggtggcgctcaatttggctgagcagtgctggcggccggagaaggagaagagcactggcgcagtggattggtgtccaacaccgtggcaatcgctctggtgatcaacggagagcgagagcagactacggcgatgcggtggaaagggttagacacgcggcggacaatggtggcggcttaacggcggtgagaatccttgtccgagggtggtgagcaaggggagaggtactgcggctagccagagtggcgtccagctcaccggcggcgaagattttcttatcccgc

SEQ ID NO: 32594 - DNA, 641 bp, Zea Mays
cagatgcaaataattccagcagctaaattgccggcttccaccgattgtacgaccgtcccaagctctatgacgtcaacggaaataaggtccgttatccagttgatgacatcacaaggcctgagcagtgcacactgattataagatatggtattaacaatcatcgtacgaagaaagtagaaacatgtgttgtgatcctaggatgcaagtttcatggaagctacattttagatgattattgcagggtagaagtgacgacggtcgtccaaggatccaaggatgacatgctaaacatccctgggcccgaaggtatcgagacacttggacaagccataaacaattccatacgttggcctcaaagggatgtcgaattggttgatccaccaacgccgtcgtcgtcgcatccccaaccatctctgcctcctcaaactttaatacctattgtacatccataatcacctcctcaatattcacatgctgctctcatcctctttctaacctaccgcctccgccacaagcatcaacatttaggactccaccttctcctcatcctcttggagacccgctgtctacgccaccagcaagggatccaccttctccatagccatcaagggattcacggccatcaaagaaatctaaattcc

SEQ ID NO: 32595 - DNA, 383 bp, Zea Mays
cttggctcacattttgtggaggcatccagtcgcgtacagctttgatcttttcttcatctacctccacaccttgtcctgatacaacaaatccaagaaacactaccttgtcggtgcaaaaggtgcacttctcaaggttagcatacaatttttgttctcgaaggacagcaagtacgtatcggatatgttcaacatgatcatcaagggttttactataaattagtatgtcatcaaaatagacaacaacaaatttgccaatgaaatttctaagaacatgattcattaatctcataaatgtactgggtgcatttgttaacccgaagggcatcaccaaccattcatacaacccaaattttgttttaaaggttgttttccattcatctccc

SEQ ID NO: 32596 - DNA, 299 bp, Zea Mays
atccggctagccgccgtacctcccccttgttcaccgattgctcgggtaggatctcaccgccgttgatccctcactgccgtccgccgcatgtccaaacactttaccatgtcgcagctaactgtgctacgcacgtccgatgatcgccggaggagcagccacgttaatagccacgttgcgcggccaccagtgactcacccagttcatacctatcgcaatccaccgctcaaattcgctgtactcgtgatcgatctctataaattaaagccaccataagctccgcaagatcatcacacacccag

SEQ ID NO: 32597 - DNA, 347 bp, Zea Mays
tgacatctttgccaattattttgctttatttgatcacatgcttttggatgtccaaatccaaacagctcatattcatgtacatccaaagcaggcagggttaatttggagccctgactaccaacctttaacagcaacagcttatagaagtgaaatgaccattattttgctttatttgattatagaacactcgtatgttgtagacacaaacctccaacaaacctgtctccaccaaccaccatcgctgccagttatgtttgtagacttgtagtatcatcttccaatgagttcctctctgcagcaaacaccctcttgagatttagtatattagaataccaaaacagtttcat

SEQ ID NO: 32598 - DNA, 410 bp, Zea Mays
tagaaacttcatttgaccaccccttcagcttctatgcaagccaggatagtcatgctcttcgatctagattttttttaaaatttttttgcactgcatgttctgactcctgtcctggaagtatcttttggatgatttttgttagtgcttcaatcttgctactatctgctagaaatattttgacgattccttttgtttattttgttcatttaatgctgctatatgtagataagattagaaagaattaccaatgagtgtgctgagtaatgactagtgtgcgtggtgtctattcctctctatgggtttgtccgggatggctggtcatcgtggtggtgggtgtgcgtgtccttcggtgcgttttgctgcctgctgtgctggttggtttatgcggcaaatggatgaataggttgcag

SEQ ID NO: 32599 - DNA, 331 bp, Zea Mays
gtgaaggggtatcggccatgatgggccatcggatcagacccgaacggcccagattaggtatgtgcacttaagtgatcagtctgcaacccgagtccttggatcgggatcctacggcccatagctaatccgtgggttggaacgcagagccaaatctatccgtctgttcccaaaccattggttctgatttaaagaaatccatcgccgccccagcactaatctcaagtgcccaaccaggatccaacgacccaggttacaactcagccgaaagcgcgcacatccgatcctggccgctggcttctaatcgtatggccaggaacccttctcctaccta

SEQ ID NO: 32600 - DNA, 292 bp, Zea Mays
gatgaacatggaagttgtttcccaagtacattggattatatctcagttgagccaaccttacaagagcagataatcatggcacagattggtgacaagggtgttcaaatcattaaggaaatgctcaatcaaaaagtggataagtataaatgctttcgtcaggaccgcaagggtgtcctatggtttgaggacagactggttgttcccaaaaacccagcactcaggaagaaaatattggacgaagctcatctttccaagttttccatgcaccccggaagtaacaagatgtatcatg

SEQ ID NO: 32601 - DNA, 426 bp, Zea Mays
cagcgatattccctcctaagccttgtcggcactcgtcagcctacaagggctttcaatatcaggctttgatcaggcactggaagaggtcatttccgaagatattgtatcagagcctcttaaggctgacattccgaccatatgttcagcggtcccggatggtggtctttcactgcatgattcttctgggcaagaggtatcccgggtggtatctcgtgcatcgtcgaccttagaaggcagtctttgatgcaaaagtgctgatccgagtcaaccagctcctatggatgtggctgaggggccttcagccctagatgtggctgctacaaaaaacccagcccccgagggtggtggagcgggctccctctctgctgcttccatggatgtccatgttgcatcaccgcagtccggtccgaggaggctacagtgacg

SEQ ID NO: 32602 - DNA, 575 bp, Zea Mays
ccgctcaagcaaactataaattgagcacaccgacgggtccgtagggtagtcaagcaccaagccaccaagtcgtgccctcaattgttcaccagagctcgccaattccaaatttcccccaaatctgctctccaccaccgtgaaagaggcctcaccgtggctagctcatctcaggtccactcataccctctgctctttcgtttcaatgtccttgtgtgcccctgatgctccccgacctcgccaattaagctaggaccccttagatcatcgggaacgcgttggattgtccgttgatcacacggtcaccgtggacagagcgcgctagagcttcgttagtgaaattagttgaggggaaactcttgttagggcttgaatttggtctcagtcgaagtagaataccagtcatcaagtgatccggccggtatgagctcgccggagctcggttctccgccgtgcagcgccgtggactgtaggatgtgaagaaatcaaagtgcgggggtgtatttgtaaaggtcaatgagacagagaaatagtgggaaggactctttatagcatttcaaaccgtcagggttccctgc

SEQ ID NO: 32603 - DNA, 349 bp, Zea Mays
gatgtattgatatgatcatcatcgcaacacaataagtagctgatcagcacaaaaaataacggagcagacaaacatggaacagcatctcataaccagattagtaattagacagattatgtagcaacagtcatgaaaaaaagaactaaatgttcagaattgccatgtttctgaaatccattaagtaggctggcacaaatcaccaaacagcaatgttttataataataattcagaatacaccaacaagaaaacaaagtatagggttgcttccatcaatatgatggagagagatatacaaaatataagattggttccatcatcaatataatggaggcagcagtagctcccaac

SEQ ID NO: 32604 - DNA, 388 bp, Zea Mays
gggtgagtcactagtggccgcgcaacgtggcttttaccgtggcggcacctctggcgatcaccggaacatgcgaagcacggttagccacaacgtggtaaagcgtctggacacgcggcggacggcggtgatggttcaacggcggtgagaatcttatccgagggatcggtgagcaaggggaaaggtacggcggctagccggagtggtgtccagctcaacggcggtgctgatccttctacccgagatgttatccacttgccacgagcacgaatctagacgcaggcgacacgaatcgcggcggagatatcgtcgacggtgagatctctgcgctggcggcctgatcccaagtctggtactgtaccatggcgaatcccattcagatgaactgaca

SEQ ID NO: 32605 - DNA, 348 bp, Zea Mays
aaagaacccacagaaacgtacaacaggctcaagaccccggtgaaccaaataaggaactatggaagcacaagatggatggatcacaatgtctaggtgcatgtgtgatacggaagaagtggaagtggccaacagtgatcacagctacgctccctgtggaacgcgcacccatcctccgcgacggcctccagacatctcccccttacacgatgttggcgttccccaacctaacacccgttgctccagctggcgccgctctcggcctcgaacaccgtgcccggtagatctagacgatgcgctctatgtcgcttgccactgtcgctagtgatcttgttagttacacactactcg

SEQ ID NO: 32606 - DNA, 296 bp, Zea Mays
tttggcttgaagagctgcattgaacttcggaatttgttattgggcaaaggaatgcatgcagactcagtaaagcttggcctcagtagggataaatttgttggttcttctcttgttgggttatactctaagcttgccagaatggatgattcacagaaggcatttgaagagattctggacaaggacatcgtttcttacacctcgatgatcactggttattctgaaaatatggattctacttcatggaatgcatttaaaattgttagtgacatgtcgtggagcaacttggaagtaaatcg

SEQ ID NO: 32607 - DNA, 373 bp, Zea Mays
gggccatgggtcccaggagagcaaaaggcaggagaagctcaccgaccggtaggtcctagtggcaacccatagtgccccgacgctgtatcgatggtcggagcactccatcacgttcaatcgagccaaccagtggcttaactttgatcacctcgataagtatcctctgcttgtcaaccctatgatctaagagagtcgggtcaagaaggttctagtggatggcaatagcagcatcaatgtcaccttcgccagaacactccaagccttggggatcctgactaccgacctcattgagatgtataccccattctttggcattgtaccgactaaaggagagtactcgctagagcacctcttcatgccattcaccttcgac

SEQ ID NO: 32608 - DNA, 482 bp, Zea Mays
atttgctcgcgctcttgttccgcctgtcggttttctcttcttttcttcaatggcagatctagtagtatccagtaatccagctagacccgacgcttcatttggtgtttttttcttggctctcttcttcgccgatttccctgcgccgtagttgcttttcatcgtcaaatgtggtgtaccgtctcgtctggtgatttccgccacacgcgaatgtgcctttcttcagatggtgtttcatgtctgtaaatcctcaaattcggaccgtaacggccactccgtctctcacagctgcatgccacacgcgtcggttcatgagcttgcgctcgattcggcaacagagaataatagattttcgatttttaattaattaacgatggatgtcgccattgacagatctgggccgaacgagtcccccatcagcaggggcaggccgagcacggcgtcctccaaccaccgcccctccacgccgtcctccaaccaccgcc

SEQ ID NO: 32609 - DNA, 297 bp, Zea Mays
catgccttcgatctgacgattgcatcttggtgggtcagtcactctcgatctatggtagaggcgctacaaacctttttctcccaattcatcctctagggtttcgcgtgtcttgcattccatcaccaccactccgtgctgccaccccctactttccatgagtccatgtcgctaccctcctatctcgggtgatcatgggattctagagccgctccttggtcgatcaaggtcacctggatgcgcttattttccgtgggctcctctgtgagggagactacctgctcctcgactttgaataag

SEQ ID NO: 32610 - DNA, 352 bp, Zea Mays
gcgagtcaaggtctttgaagcaggcatagcaaaacgctgtggcacgagttgggtgatggtgagttcgcccggaggagcagcgacggctgggcaggaggtctgatgaggccacaacaaggaggagctagggttcggagttcggacgagatggggctcgggaccgcgagggatgcccaaatgaatctgcttggggtcgcagcgaggatcgcaggttggtttgcaaaaaaattggagggctttctgaggctacggagtagatgttttgggccggaaatgtgggcatgagcggggttgaagttttaataactttcatagaatactcgaacggagagattccagaagccactccacc

SEQ ID NO: 32611 - DNA, 346 bp, Zea Mays
caaaaaggcccgacgacctccaaacaactcttctaggaggctaacatctacatcactgctgacgattggccccacagtcttgttgatcaaccaaggtctgcacctcagtaggaggggaacccacaacaggataagcgctgggacaacaggctgagggttgaagtccatgccatggggtcgcggtgactcgggcgcgtggcaccccctcaacagcaacccacgaatgatggacaaaattatcaatggcttgtgtccctagcataaggagatgcaccatactctgtgcaactgtagagacttcaagaattcgatcgaccatggtggacctttctagtcgctgcctccg

SEQ ID NO: 32612 - DNA, 344 bp, Zea Mays
cggacgatcccgagctaaagaagcgaaggagtatgtttgatctgatctcggccgcacaacacaagatcagtggccccggcgcatcttcaacctccctcgactccgccgcgacggtgcgcacacaatccacggcggcgccatcgccagagagtcccaaacccgaagcccgcgcctcaaacttcgatcacgacagtgctacgcgtagcagaggctacaacaattcaccagaggaggtactcaccgtgaatcaccccgtgtagagccctgcctacggcgctagtcggtcccgcggcggcggtagacttcggcaagaaagtacgccatcctcagatgcccccgaccca

SEQ ID NO: 32613 - DNA, 413 bp, Zea Mays
aacaactttggttgttatggtttcattgcccgctctaatgcaagccacccagtgccaacattccggaaaatatggcccggggcctggatgggggagtggttttacgtaaaaatgatttgattaaaagagaagacatcaagggaattatccagcgccccatctggtctcgcttcggcctccgaaggccgaaggtggatattgatgacaatgctgaagcatgtcagaaggcctttagtactgtatgtgccttcattggcacgagggatttaattcaagagcacatatccttcagggtgtggccacttgtggagagctgggatatgccgaaggaaactgctgccgaatccagtgaaggtggcttggttcgattgaagtataccttcagatttagagagaagtttgatgagccaaat

SEQ ID NO: 32614 - DNA, 367 bp, Zea Mays
tttcgatctccagatctaatcttaaccattttatcaaaatagcttctgtaactgatatcatttacttaccattgctatctgaattcttgtgcaggagagatacgtgtactgaggtggatctagatcactcccaacgatcgtagcttggttgggacgtggctacagcgttgcttactctcattcttgtccttatgcaggcgtgctttgcacaattcttaaacggcaggttcctagcctagacggccgcctgcccagggctttggtccggcacttgcctgagtggtggggtgggcacggggaggattgatggaacacctaaaatggcgagtgcttgtattgaatgagcaggcttgagctcactgtagca

SEQ ID NO: 32615 - DNA, 451 bp, Zea Mays
gaggcaaagatgatgaagttgatctcccttctgccaacgcacccattatccaggggttggttcttcacagggcggatgcctgacgctctgccaatgagccagtcactgatttcactgccagcggagggtatgcccttctccaagacatccgcttccaaaatcctacattacgtgttcgtgatgttaggatcgatggtaatcggttctggaccctccaacatgttgatttctataattctgtgattcttcccaagaagcaccagccaatcctacatcagcgatatattaactgggaaggatgtgaagcaattggtgatcccgagatgacacaggcattgagggcctatgagaggaagaggatgaagaacataatgacattccaatacgattggaatgatgaagttatcgctcaattctattctaccctttggatcaagctggctgatgagga

SEQ ID NO: 32616 - DNA, 402 bp, Zea Mays
cacagggagtttcagataggtgaaaaagtgttgttgaagcttcaaccttatgctcagcagactgtggtgaatcgaccatgtcccaaactagctttcaagttttttggaccatacacagttgtcgctcgcgttgggccagttgcttataaactggggttacctgcagatgcccaagttcacccggtgttccacgtttctcagctcaagccttttcatcccaattatacaccggtattcacacatctgcccaggttggctgatctctctaaaacaggggtagttcctattgcagtcctggatcgtcgtttggtgcgcaaaggcagtcaggctgttccacaagttttgattcaatggtcagacattccaaaggaagctgctacctgggaagactattatgtggta

SEQ ID NO: 32617 - DNA, 429 bp, Zea Mays
agcaaatgcaagcaaaatacgaatggcttctaagcgagcaacaggagcaaaagtttcaccataatcaataccctctttttgagaaaaaccctgagcaaccagcctagctttattcctaacaacatgaccatcttccccttgtttgttcttaaaaacccatttagtcccaattggtttacaagaaggtggaggatcaaccaaaacccaaacctgattccgttcaaaattttctaactcctcatgcatggcattgacccagttagaatcagataaagcatgtccaacatctcggggttcaaaagaggcaacaaaagcagtatgcgcgaagacacagtaatttttatttttcatacctctgttccttgttgtgcgctcatccaaattacctattatgttcttgggaggatgacgatcctgaatgtgtcgtgg

SEQ ID NO: 32618 - DNA, 419 bp, Zea Mays
aaaagttgcaagcggcggtcggtcgttcatttatggtactagtacactagctcagatgcagctggcccaaaaccatcactgaactggtggtgattgcttatgatcatgcctccgtggaagaggcagtcgatggcatctttagcgtctgagcaagaaaccaccttgatcgcatggacgagtcacgcgaccacaacaacacgggggagaaactacgccaacatcgtgacacagacacccccaactatgtgatagaagaatgatcgctaccgtcgaccaaccaacctaaggtccatgacccatgcacccaccacatggtccctgcgagcagcacaaacagtgtgacaaaaaaacatggccatcgtgaagcttggccgatttgaaaaactcatgaataatgcacctataccacaccatttccc

SEQ ID NO: 32619 - DNA, 337 bp, Zea Mays
gttccccactcgatataaaagttccttttcagacagtctttagcaaggaagaaccaaagattaggagcaatatgttatctaaaggtttcatgtcatttgcgtctggatggaactctgttgatgttgactctgaagttagctagttacctgattacgctaataaagcacatgttcacatacttggctgtgaacttgacactataagtggctcattcctttcaaattgtgctagaatgcgctacttagaagcattactagacagaggagtctaagatggcttagtaaagattaaaaatggcttgttgaagccttgcagcatgggaagctaacctctaca

SEQ ID NO: 32620 - DNA, 459 bp, Zea Mays
gggcggcccaaggtgaggtgcttggtctgatgtaacctttctctgacagctcatctatttgcttcttgaattcaaccaactcgggtccagataccctataagctcttttagaaatgggggtggttccaggaagaagctctatggcaaactcaactttccgcttaggtggcatacctggtaaatcttttgggaacacatccggaaactctaacacaaccttgacagtctcgagtaaatctgcctccttgctatcaatagccatctgatgacaacctcctttccttggatcgggtgagactaactcagccaccacttcttctcctagtggggacaccaacttagttatcctcttatcacagttgataactgcttggtacttatctagccaatttatccctaggataacatctattccctgagtacccattactatgaggttagcgggaaactctatccccc

SEQ ID NO: 32621 - DNA, 437 bp, Zea Mays
atcgcgcaatggacgacaaacgtcttgggaggatggttcgcccgctatcggttgatcaggtcgatgacgtgtgaggcggagacgacgatggtgatgtcaaaggtggagcctcctgatcggtggtggcgacgacgagccgatatagatggacgtgcagacgaagaggcgcgacataggcaggcattccggttacgtcgcatgtcacgccagttgcaccgtcgaagaaaatgaggaagccgtgttgttgaagccgatgtcgaggacgcgcgagtcgattgatggtgggcgacgcaaacccgatctctgatcggaaaaaagaggaaaatatacataacaacaacaacaaatctaggtagaaactctcgttgtgcatacacccatctccactcgtttctccacatcacgttcagccccaaatagacaaaatcaatggagag

SEQ ID NO: 32622 - DNA, 491 bp, Zea Mays
gaggaattgcatgctaagtgcgctgcacgccactatcttgatggtggttctcttgcccctgtcaggattcagcacccttaccgttcaccgccccatggtcgcttcgactatggtaccccagactgcaggacccggatagatttggatccctagatcgacagagtcgaagtctgtaataatgcttagttcagtgtcttagcctaagtcagttttagttagagttagtttgcttatcttatgttggatgcttgttatgatggacatgtatcgaagttggatatttgtaatgattgtcaccaaggtgtgggtatcccctacaacttggtgtagttattaataaagtcagttatttagttgggtaatccatttatttcccctttcctctttatctgagaagctgtcagtgaagatggtcatttgttcagtattatggagattttctatacatctttccttatgctgaaagacaacagagtcaattctgatatgtg

SEQ ID NO: 32623 - DNA, 686 bp, Zea Mays
attttctatgaattaaacaagtttctgcaattaaatttgtactaaaaaccattttctaaatgattttcctggttttattaattatttggaccgggcatcattttctggaaagtgcaggggttagctggtaaaatatcctagactcagtgcgcagcacagggtggacggcgggtttattcatcaatactacgaggactcttttgcaagatgagctatgcgaaagggtatggtgagttctgggccgtccgattagatttcaatgctcccgattagacttagactacttcctgtagcgacacgcggatatggtcgttggatttgggatcgacggtcgcattttaatgaagcaaggcgcaatccgcgccgtaggattgaagatccacggtgcccacttacctacgcgaagggattcatctactctaaccacagccgcacatcacgaaacggacggcggatatctcatccccaagctcgtgaccccgccagtacagcgccgccggaggccacggccagcgcactccagcgagcaaattccggtaactccaggccctactcctagctcgaattgacaccaggcagagtgtagatgaaagcggagcggtcagggggtgagcttaccaacgacggcggccgaagagtctctgcccacgaggtgggggtatcccgcggcgagcttctcacaccgg

SEQ ID NO: 32624 - DNA, 431 bp, Zea Mays
gttgactctggctccgcgctccgcttctaagcttgttcatgagaatagtgagttggagcatgaggtggatcaaatcgtggattacgagcgtttccatcgagttaacgaactcgtggccccatcgtccaacggatctcggcctcatgttcatggtttggaagatctccacgggaatagattctgggcaatttcgagcgacggcgcggattctgagttagatgtcgatgaggagattcacgtacctgataccctggaaattttgaaggctgccgtccaggggtgttctatgcatgatctgcgggaggcagacgatgatgagcggtgtaagatgggaaaaaattattgatctagttgccgggcacattaggaaaaacccaaaggcccgtggcttgaagccgtgggttggggtcctgcctggtcctcgggtttcg

SEQ ID NO: 32625 - DNA, 479 bp, Zea Mays
tttggggccagtcaagttcggtcgtcggatgacctcagtaccatactctcagcagtgacccaaatacctggaaggattggacagtatgccataccggatgtatgtctacaacacgttgaaggatgacgtagggcccatgacgacgggacgaaccatgtttcgtacgaccgcgccgtgagactgatccgcgagacccacacacactatcacgaagacatgtagcagactcgctacagggacctgtatggcggatgaacaggacggagcgccataccaaaggtacgacaacgcacgaccctacagacgacgtcaggaggaccatgccacccagaggcagcaagccaagctccctcccagtagaatacgagatcatactgtaaagtcctcccttgagttataaaagggcagggcaaccttctttctacacacaagcacacaagctataacacgatctattgcaattccagcactatactgga

SEQ ID NO: 32626 - DNA, 648 bp, Zea Mays
tgcgtcgcccgtccccgacgtagacgaccctacttcgaaggatctcatcgacggagatcgcgtcttcgccctacaagctctgaacaaataccaagctcagacaaaagcatggcgcgaccacacagtcatcccgagggaattcaacgaaggagacctcgtactcgtccagacagctcggacagagtcccggggcaagttggagccaaaatgggagggccctttcatcgtcaagacgaaggcgtcccccagcgcgtacaggctcacaacgccatccggcgaagacttagaacattcttggaacattgataatcttcgcaaattttttgtttaactcctcagggccacttcacccttgtaatccgcagaacagtttttaagctggcctgcactcttttcctcccggggggtgaggtttttaacaaggcggagccatgtaatatatacgcgaaaaatcccccgcaaaaactacgtcgaaaaagaccgcatcaacggtcttcgacattcgactgacacaaaagtcaccgcgaggggcagcgatggccaccctcgcgtgcgacagtccgcgcaaaagtcgcccaagggtgcagccggactagcacaacaagtgcgtaaatcgaagtcttctccaaaagacaatccgtgcaaaaa

SEQ ID NO: 32627 - DNA, 314 bp, Zea Mays
tcgcaataaacctcaaagggtttggtgttgtcaggctgagctaacacgggtgctgttgtcagatgctgcctcaatgcatgaaaggcatcttcacatttctgactccattcgtactttactcctttcttcaataattcagtcattggcttggcatacctggagaaatctggaataaatcgccgataataccctgccaatcccagaaaactatggatctgccgtactgtggtaggaggtttccaatccatcacttcttgtaccttctcaggatcaactgataccccatcctaagagatggtgtgacccaaaaattt

SEQ ID NO: 32628 - DNA, 284 bp, Zea Mays
ccgagagggcccctttgatgtcagagatccatcttttatttaggagagcctcctgaacagttcttctttttgtgatcctcctgggaatacactgaaaaagcctgggagcaatgtcacatattctctgcccttagatccatttatcagtccagaatagggtgttggcgccatttccaacttctgaaacaagaacagtggagaagaaagcccgaaccttattaggcacatgaaaaaggagctgcgctcagggacgagttggatcagttttatgcagccataaccat

SEQ ID NO: 32629 - DNA, 2052 bp, Zea Mays
ctttacttaatgttgtctgctatgtcctgaggaagcgtgcatagatgcaagagattgacaaagtccttgttgctacttggatacctgcagctgatgtctaaccctaacctaatgaggatggcgtctgagagtatgaagaacatgaagcctgaggacttaaggcgagctgcagagcaactgaatcaaacaagaccggaggatatgcgtgatatgaccgagaaaatcgccaacactactccggaggagtttgctgctatgaaggcgcaagcagatgctcaaatgtcctatgcgatgtctggtgctaagatgttaaagaagcaggttagtgaaaaaatgtgcatcattttgtttctgttatttgtttgttatgattagcaagcttatctgttgtgaatttgtgatgagtctccgtggctcatattatatatatttgtagaatatgctagtacttttattgctttcagtgctttcgttttggctcacacagaacaaattttctcttatctgttgtgaatttgtgatgagtctccgtggctcatattatatatatttgtagaatatgctagtacttttattgctttcagtgctttcgttttggctcacacagaacaaattttcattgctcagacagacctcaaaaaaaaagacaaaatcacatagaaaatgcactatgttaactgaatttgtgagtgttatttggagacctgtctttgaaacaatattatcttcagtttgtgctatcaaagtgaaggtaggcctcacatattaatgtttgttttggatttaaattgtcatgtcatgggccagacatggtcatgtctatcgctagtcggagggacaagtcttgaatatttgttgttcacttgcttgagtgttgggggatgtgtttttcctggatttggacattaatgatgaaaatagaactacatgttcctgtataacttaagaaattaaaccacacaggttatggattgacatcttccttatattaatcttgctatacttataatttttgtgctgactagctcttgttcactagataattgtatttttatatgtttattttttgctgacttattgcatttttgcacctattgagtttgtatcaatgatcttgtttctatcaagatcctgcatcaaacaagtaacacagttaatttgatataggggtttccaggtttctatatatgttgccaatttccattgtctcacctttctgatttttcttgactttagggaaacggacttcataaccagggaaagtattcagatgctgctagtaaatataagcttgtgagttttgaacaacaatattccattaaaataatgttgatatgcttttcagatgacctaaaactaacagttaaactatatgcaatgttcttgatcaggctaaggataacttaaaaagcataccatcgtctacggcgcatactctgcagttgcaatgtacacttaatttaatggcttgttacttgaagacaggccagtttgatgaatgcataagtgaaggtacagaggtatgcttacgtcatgtagtatcttactaccttttcattcaaatattatttcctagtacaagatagtttggcattcttaacgaagtcttctttctgtcatagcctacagttctagtaataaaatgttgtccatcaaatatggtgttttttttctatcattcgaatttcatgactggtgcaaatttactgctttagcaaactatatgcgctaaaatgtgtgaattctgtaaaataagtttttcccctaagattactaactgaaggcaaaataaatccggttcaatgtttttgacctggtagtatgtgtgactaaacgtcatagtactacataccttactgcatggttgataattcgcatacctttggctagtaatttatttttttcctagattttttaggaaaaagtatgttgtctattgaatcacccaggacatttcagttcttctttgacatgacatactggctgatctatatctaatggattacaggttctaagttatgattcaaacaatgtcaaagcatattatcggag

SEQ ID NO: 32630 - DNA, 525 bp, Zea Mays
agcaaatgcagcaacacaagatgagaccggtcctggttactgactctatatttaaaaattaaaataggattggttgatgtatcggctcttgatttggaacttcaaaagtttggatatagtccttccattgcaccgatttcctagaatagtgaactcaatattttgctagctaatatgaatgaacattttttgcttccgcctgtccaaacaggccataaatctttcgctcagcatttgtccatttgccaactctactgcaagccccatttccaaattgctgggacgcttcacaaggggggaacacctctaccagtattgagtcttcaaattccaacccagccttgccatacaacattcaatgaactaaaaaaacatatcccattcagtttggcatcaatctcaacacgggagttctccagaatgagtatactgcatccctgtcgctgatcattcagagaaattcgttccaaaggggattcagcaccacgctgcaagaatttcatcaaacagtaagtcatagccaag

SEQ ID NO: 32631 - DNA, 308 bp, Zea Mays
ggatgatcatcttcgaaccttgtggaacggaatctaaaaccattgacatcataccgaccataacgtctgccagttactgctcctagggataattgtagaaggtacgggtgtatattgtcatttttatctacataatctcgaaaccaacacaagaaattaagtcccccatcttttccctctcgacgaatctggtcacgttcacagccagagatgcaattttgagaatcaaattccctgttagtacaaggaaacaaaccttttagtatcacaacaaaccttctagcggcaatgactaaaataaagtttac

SEQ ID NO: 32632 - DNA, 369 bp, Zea Mays
agtgagactgggtgcatggatgggcagagtgtgttgtggcatgtttggaggaggcgctgacgtgataagagtgctaaggtgggaagaatggatggcaagaaaattatgctaggaggtgggcaggggatggaggggaggggatgttgcttttggtatgaatatttttgggctggaatgtgtatgacctgccttaaccataagctgcgacacacctgtgccaaggtcttcctctcttatgtgtaaggcctcatatggatcttaaggtgcaatccatgtatttcatgaatgaaatccccaatctcttctcctgccatcctcatccgcacatggtcaaccaaccgtgcaccagcggcagaccttcccaacagc

SEQ ID NO: 32633 - DNA, 333 bp, Zea Mays
aagcagtatggtatcgaattctcccaccaatagtgagcctacatttgatggcgtcatgaaatttcgtcttcatagtatgacaggatcattccctataaattatccctgtgtgttcacagatccaaacaagagatttgcgaagtagtacatctggcgagttcaagtcgattataacaacttaacatccacatatccaacaaaacaatcaacataaggacaggctgaacagcagtaaaaaccaacagacagttgaagacaaagtgtgcctgaaaagagcagggaggttacacttgagtacaaaatacgtgtggatggttagatgatctgctccag

SEQ ID NO: 32634 - DNA, 272 bp, Zea Mays
gttaattttagtgggtagaacatcacaaccaaattggagaccaaaatttagtttgttagaaggtggcacgagccaaaccgaccattgatcaccttgatccttttcaatccccacaaaacctaataagaccttgttgggttgggctcatccctagtgcataactcaatatgatcatgaaccatgaatcttgaaaatatctaatggagataggctcatctctcatcattgtctcatagcttgaatgagtgatgtagcactcgagtctagatttg

SEQ ID NO: 32635 - DNA, 387 bp, Zea Mays
tgaaaccttacggcttaacgcatctgccacaacattggctttgcctgggtgataatggatttccagttcatagtccttaataagctcaagccatcgtctctgcctcatattcaattccgattgggtgaagatgtacttcaaactcttatgatctgtatagatatgacaaacatttcccagcaaatagtgacgccaaatttttagggcatgaaccatagtagctagctccagatcatgagttgggtaatgctcctcatgtcggcgcaactgccgtgaagcatacgcaattactcggccctcttgcattaatacacagccgagtccactgccagatgcatcacaatatacatcaaaaggcttggtgatgtccggttgagccaataccgg

SEQ ID NO: 32636 - DNA, 427 bp, Zea Mays
acaaatgaggaagtcaacaacatcaaactctgagtgagagaccagggcaccaagtagccagagctagatatgagtggcagcctccctgtaacccatccacggcagaagcgtccgtctcatgagctaatataaaaacttggccgctgtagtgaaatctgccggagaacgtcacgacccatctgagaagggcagtcggaacaaagccgcgacgtgagctgtaccaggagcaactccgccatgagggcgacgaggaggattagaggtgctgtagcacaagctgtgaagacgagtcgatgattcgttgaatccaaacagctggtgaatctggctggcatgaagtgtaacatcctctcgctcaaagcggaacctcatccactggtgattagggtcgatccatacaaaagcatagaaaaatcggacccattcc

SEQ ID NO: 32637 - DNA, 348 bp, Zea Mays
attctagcacctggcatgttacttaaacaaatatgctaaaaggttcctttagttgccattccgcctataatgtaatccaccactcatttctcctttgggggatctcttttaacattgtttccgtacatctggcattagaaatatcgaagggcggacctgatgtagcggtaagagctgtctcagccaccaggttccagacccaattacccactgtaaataaactcttgcgttatccatagcagcaactagcaacctgtaaagctgtcactgtccatcggctaatttatccatctattgatccacaggctttactcaggtgggtgccagcactctcagtgactgaatcct

SEQ ID NO: 32638 - DNA, 348 bp, Zea Mays
ggctacatggtcgcaaagtgctactgattcaccgggtacacttaatttggggagaggaggaggcagtgcgaattttggcttcaatcgtgctcactgatgaagttgtgagtgcctcgccgtggttcatggtgctatttataagcacggtgatccggctaacgatccatagccgcggattgcattgttcacgcatggttaccacgtaaagaagaggcacagtaagggggaagcgaggcatgagcgacaccgcggcggaagtgatcgagccacggcgatcactggtggaatatctccggacacgcatggctaggttcgcgggatggtgccacgtttgaagttatctccccg

SEQ ID NO: 32639 - DNA, 434 bp, Zea Mays
gcgagagtgtgcatccatactagtgttcgaatgctagaactagcggtgtgggtgttccattgctcatccccctgattgtgggttgctctcgtccttgtatagactaaggcaggagtggccctattacaagtgtctgaggtcgggtgaagcagatgaggatcaggtgttgttatatagttagttgtccatcggggtttctgtcagtcaagcgaagtcgtggataacatctactccttatgtaaggataatgtagccatgcgtggggcatcttgaagcctttcgttacactttgtcacgtcctgcaaagggttgtccatcatcctttgttgatttctcagtgagggagtggttgagatggtgccagtatccatatcttgatggacagtctccatgacctaacatacttgctcccgtgccatcattcgggttccaca

SEQ ID NO: 32640 - DNA, 580 bp, Zea Mays
gtaagccagaagcctcggagacagtccgggaacggcaggacttcatccatgaggaggttcggaaactgttgcacgctggcttcattgaagaggttcaccaccccgtgtggctggccaacccagtcatcgtgccaaaagcaaacaggaaactccggatgtgcatcgattacaccagcctgaataaggcatgccccaaggacccgtacccacttccacgtatagatcagatcgtggactctaccttagggtgtgactttttgtctttcctagatgcctactccggttttcatcaaattcagatgtctagggaagataggaagcacactgcttttgtaacggtagatgggttgtactgttatgttgtgatgccttatggtctgaaaaacgccctgccaacatttgtttgggcgatgagtaagacctttggggacctgatctgggacaaggtggaagtttacgtcgatgacatcatggtcaagactagaagggggtcgactgtagtagaagatctaaccctggtcttcgacaagctgcgggcaacccgcaccaaactgaacccggagaaatgcatcttcggcgt

SEQ ID NO: 32641 - DNA, 361 bp, Zea Mays
tcagatttggagccatcctttctgagttctgaacaagagtttatttccaaagaagtgcagtctagcaagcatgagaagagcaacatcacattccaaagcggtgaagataagttcactgtccaggagctgctttcatcggcaccagaagttgctcctcctgtttcatcagcaccagaagctgctcattctattccagccacaaaaggaacactattggattcacccacttctcttcagtcatggaagaaacatgtagtttctcatttaaaccctccagttgatgatgctctacagactataagacacagcactttctgtctcagtgatgagcagccaacacaaggaagtgttcaaagagaag

SEQ ID NO: 32642 - DNA, 281 bp, Zea Mays
ccgaggggtcttttgtatctttaatagataaggcagcttcggtttgcgccaaggattttacatgttcgcaacctatcttctccaaaatagccgcaattcccctagcacctgagaaggcgcagacatctccacggccacgcaatacttcctcaaaggcttcagcttcgccgttgatccagtcgattggaccttcaggatcgcccaatacgaagttgtcatcatttgaatatgcgccaatattggcgaagctagattttatcttttgcacacattctatggat

SEQ ID NO: 32643 - DNA, 309 bp, Zea Mays
tcagtgaaaatgtcggagtaggaaatgagcagagcgtccagaaccggccttgaatccagcaactgttgcccaccaatgcctgtccaatgtacccggtggccctggtgccaaaactccatcgccagtttggagaagttccacagaatcggaccaagggagcgcaaccactgcacccctaagacgtaagaccatgtcgaagccgccgtccagaggtaggggatagcaggttgcagtgaagattgtcccctcgattgatagagtagccttgtcacaaattccattgcttgccacctgatcaccatttgctat

SEQ ID NO: 32644 - DNA, 323 bp, Zea Mays
aaaccctgggcgctctaaggactggagctctaagtgttgtaggacattctaggataaagtaaaatgtgtcctttaaggccccttgtaccccgaggcactatttcagcgatataaaaccctagagccccgcatgtcctgaggcgttatgaagagtacatgtgcttagagcagtttggtccctatatcacttggacacttggggccttctgcggtcatcgccctcggattacgagcgttgccagccctccaacccttcgaggcttgaagccccattggaacaaggaacttagtggatctaagtataaccccatcataggatagaa

SEQ ID NO: 32645 - DNA, 467 bp, Zea Mays
ctcatgatgacgggagacgcctcgtttcacgcgatcgctccgatggactgatccgcgggacccacacacactatcacaaagacatcagcagcatactcgctacagggaccatatggcggatgaacaggatggagtgctataccacgggaacgacaacacacgaccctatggacgacgtcaggagaaccacgcatccagaggcagcgggccaagctctcttccagtagaatacaaattcctattgtaatgtcctcccttgatttataaaatggcatgacagtctcttttctacacacgagcacaccagttgtaacacgcccttagcaatactatgatcagcactacactagactagggcgcaagcctgaaccagtataacccaccgtctcaaatccattgcttgagtcctgacggctcaccattcggagtgagtccgcgctaacttctcctccgaacacaaatcttac

SEQ ID NO: 32646 - DNA, 366 bp, Zea Mays
tcatgcagtttctctttctacctggttgattacccgcaccattccatcctgaatcatcgcgtgcgttgacttttctgtacacgaggaacgattactgcatgagtggatgcaaaataagtcgttttgaggccatccacctgcatctgtatatacgccagatatggtcgtacctggccggccaggctcgcgtgggactggctgtgcgggcgcagtaaaccaatcaggcactttgtgttcggggtcacttggctaatgtagctaaaaactgcagattttacggcaaacttcatgaggtgtcagtgcttaactgcttaagttagagtgctacctttagagtgcaatggagtgtcatctgcacaaatgatc

SEQ ID NO: 32647 - DNA, 661 bp, Zea Mays
agaaggaccatgcacaaccaaggtagcctcctcctcatctggtgcgtcctccaccaaaacatgttttgtattgtcctcaaccatagaatgagaagtatcgtcttcaatgacagtaagaaagatggggcctcaaaagtagtttgtttggacaaccaaggtagcttcctcatcatctgatgcatcctccaccacaacaacatcctcaacagaggtgacaacctgaagcaacgtggaggtctctgaaggcaccttaatggtctgcttggtggacatcatttggcgagaatctgcttcaaatgcccctatgaccacctcatttgaggtaaggtccgtctctctatgaatctccgtaccagagatccttgtgggcatctcgccaaggatggggattgtggtgtttgcaatggtgtcctcacacaccaaggagtcggcattcgtgtaggctaccgcgagagaagcaagaatcgatgatggcgaatcatgcttcactggagaacaggggtcaaagagcttgggcaagtcagagacaaaagcatgctccccatgtgcatccgcatgctccaaatggttggccacacgtgctagccacaacttgatgatagatgcctcctccttgagaggttgcaacacttccttcaaaagagttgaaaacatatgttga

SEQ ID NO: 32648 - DNA, 510 bp, Zea Mays
ggaggatgtagtcgcctgggagaggtgattccagcagctgccttctctgggcggaggggaggaggacctgctcaccaaggatggttgagaaaattgcagtagggcaaaaggaggaggatgtggtcacctgggaggggagatgcttgctgctgcctcctacgggcagaggggggaggatcttggtcgccgaagagattagggatgggttctcccgttgctgctgctatgaatttcgaatctgtgcaatgaaggagatcgagagaggaaggggaggagatcagggcctaatgaatctgcgtataagcagttaccaaatatgcttcgtgtgagggaaaccaagcccgggaatctgttaatttttcgcgccttgtttcggttagttttggtcgtcggtcactattcgtacatatggccattatacatcattagcgaccagtcttatttgaaaacaacgatcacattttttttggtcgtcggttcatttggatgtggcgatgttgtgcctccaac

SEQ ID NO: 32649 - DNA, 477 bp, Zea Mays
ctttcgagtactcgccgccgccgctgttttgcccttttccacgccgtcgctgctgcggcaggtactcccagagctcttcatctccatttccacggctcaggtaatccaatgattccatttccacgctggcctgtattgcttcgttctcctccacagaaaaggatgcaccgccagaaatggagtccccccagaactggatgaccaagctcttgattggccctcgccggaaatggagtccccgccaggcgcaaccaaccttatccctctcaacgagatagttgtcgacatcaatggaacatttgtgccttcactgagtgctcccgcgccaaccaacacaggcttctccctcaccattgatgaggtagacaacacctggttggaggcaccaccagcagctgaagcacccccttctctcgttactccccaggaacacggtcacttggtaagacattttatctgagtttacagaatgattat

SEQ ID NO: 32650 - DNA, 683 bp, Zea Mays
ctattgactaggtgcacttgtacaagggaaggaccgaaccctacaacaagcagactgcagaccaaatcaccgattagtatgctgaggtaaaaggatatcagataaaccgcgagccccagcactacaccaaaaatgagactcatccataacccaattgatgaccttgctagccctaggctgttctccgttgaagacacatcgattgcgatgaatccaaatggcccaagcccctaatatgataagggagttagacccttgtgcagcttcttattggaagggccaataagggtcaggcttacttcctcccaccagtcatcaaaggaagtagaattaagactaggagtgagatgctgcaaaccaacagctttcaggatattaaataagacttcccttgagaatatgtaggatactagcaaatgattcatagtttcttcctcctggtcacataacagacagctttgagggtaaggcaggcctttcctcgccagccggtcagcggtccagcaacgcccgtgcgccacaagccacatgaagaatttacattttccaggagcccagcttttccaaatcctcccccatgacctaaaagttgttgatccaatgaagaaaccatcataagctgacttggaggtatattttcatgagctggagagcagccatatatgcttatcctcctgttccgg

SEQ ID NO: 32651 - DNA, 652 bp, Zea Mays
ccacattatctacatatgtagctttaccttgtaatagattcataatgactcatatcttttgttcaacttaaatcacccatttgggatttgctattggagatcagtcttaacaaatggtatagttgaacctagtcccatgggaccgaccaggcgattaatcacgatagttgcctaccagtccgattagtcgagcctatcatagttgttcatatagtcatcctgtatatcaggacatatacccactatatatacacatactatatagtagacttgtgagagctttctgcactgtccagaactccatattcctgtcccaaacttcattttttttgctgacttgctgctggaataccaaagaagaccataattagcaacacatgtagtcttggtcttgattaacttataattataattagagcaactcaacatcagcactgctgcattagcaaataactagcatttatcagaccatagcagctacacacccagcatattgcataaccaaacgagttcagtacttcagaacatattacataggctgaaaagcagcctgctagccacctagataagttaagtgttcaacacaaacattgacattcaatagttcaacacaagtaggcaactagccatctaattaagcaaatcatcattc

SEQ ID NO: 32652 - DNA, 429 bp, Zea Mays
cttggtgatttttttgtttccttgtaacttccctcggtaatgaatttttacttcaactctttcgttacccttgattgctttctccacttcgccacttcacgagacttgccttaactctatccttggttatgtttttcacggttttcatccttacccttgtcacatctatatcttaccctgaagcttatattatacatgtcgtctaaaacattctctcttccatctcaactttaaagttatatcttacccatttcccttggtcgtatcctcttcctcgttgtttgcgagtttccaactccatcctttgtggtgcttctgtttagtgttgcttttacctttcccatttctagatcataccttggtgattatgttatgtatgttatctaaaaatctccaatcccctagcccaattggagggcgatgttttac

SEQ ID NO: 32653 - DNA, 1314 bp, Zea Mays
gccggcgtcattgcggatggcgacggtacgggcgccgagggttctctgggtggtagcttcctcatttccgggagcttcattggcacgcagaacggcaaggaggctgctgcgtcaggtgatttcgtgctcgtttcagatggtgctgtgctgaaggatgatgacaagcagggggaggaggttggcaatgacgctgcgtctgagcctttaatgatgcatgttgccggtgtcgatgacctgggcaccgtggatgttttggaggggatgcttgatcgtgaggttgctgaattgcttcctattcccagtgctacagaaggagatggtgctggtgctgaaattcacagcagtgagtccgatgcagaagctagtacaaccaatgttgatgctagtcctgattatgctgccacacgagatgtcacatctgatgtcgcgcgagttcatggtaaagttgatgacccagactccattgcagacgatggtcatgataaggtagatgaggaagctgatggtgaccatgaagcttctgatgaccttaaattcatgccgatctcttcaagtgaggatgctgtggaacttgcaaaagaattggaggacaacatgcctacttccaaaggcatgcactttggtgtggatgactcagatgatgtggagatctatggtgatgatgaatttgtagaggggatggatggaaaggagatcgagctttttgattatgcagctttaatcaagcttctaagggctgcaagcagctcacctgaacaaggcaaggctaaggttttcccagttgaatcttccgaacccaggcgtctgcctcctactgtagcaagcaatactaggacgagtgtggcttctgctcctgtgccagaagtaactgctgaccttgagaaagagatgacagatgaggaaaataagatatacagaaaggtggacatggcacgaatcaagtacatgcgtcttgttcatagattggggtatgatattaaccatcaggtaccagtacaagtgttgtatcggcttagtcttgttgaaggttttaagcgcggaaggatgacaaaccattcctcagagaccgagaatgcctggaagagggctttgcagcatgaggcagaggcaattgatgaccttgaattctcctgcaatgttttggtccttgggaagactggagtggggaagagtgcaacaataaattccatcttcggggaagataaatgcaaaacaaatgcttttctaccggcaacatcatctgtgaaggagattactggagttgttgatggtgttaagtttcgtgtcattgacacccctgggcttgggacttcg

SEQ ID NO: 32654 - DNA, 285 bp, Zea Mays
aaagacttcaggccttatcagggagagatcctaatgaggatgaccccaccatagtctacatggccggatatctccacacccttgacaaccactatgacgaccttttctcccactacacccacctaaattcccgggtggaaagcctagagcaacaaatcaaggaattaaaagaggaaaaggcgtccctccaagaaagtctcaaaatagaagaaggcgaagaagccaacactcatgaggcctaccgaactctgaagatggactacgctaagaagttaaagaagctcg

SEQ ID NO: 32655 - DNA, 310 bp, Zea Mays
cttttttagatacattgcctttactatatatctagacagagtatatctaagtgcttagcaattgctatgaatctagaaaagccaaaacgtaaggagagagtataccaaacaactactacctccattcattaaacgatgtcgtttcagataagtaaaacaagcatagtacaagtttcgctctactgtctaaaccatcatcttttagtgagtggaggcctctccagtcatagataagtgaagttttgtggctgtcttaagtagtcatttacaaaccttgattacaaacagtcgtgttgggtttgaatgtttg

SEQ ID NO: 32656 - DNA, 345 bp, Zea Mays
cagatggttagtgggtaggggtcgcatagaatgagtcttgacatgtcataatctagcttcctttggggtctagcttgattcctattcttctttaatgagattgatctcttccttcttcagtctttgtctcattgattcgacgttagtgtatttttggagttagggaatatggttaagatagatattggtgagatggactataggtcaaaagtttgtttgatgttaggtgggggttgatagattatgcaatccatcgtgactctatgggttgggttagacctcatgcatgtggctgagttggtctagggcactagtttaagttaaccctagctagtagggtctaat

SEQ ID NO: 32657 - DNA, 501 bp, Zea Mays
tagagcactagcacattttagaaaatttcctgagactacgacgacaaggcattgatcttatcatgcacataaaagcatcacaagcgtgtttacggaacctatcggttaacttgatcgacacactacccatgttctttgcctttcagaatttatcacacaataggaatcatccccatttgccaatgacaccaacaatacctactgacctattattcaccacacgaacacagttacacgccacactctagtttctaacatgattctcacataactcgtaattcaactactcactaacaataaatcacgcacgacaactaccacatcaaccgatttatttatttagaacaccacctgcctagcgtaccactagtaccccacattttgactcaagctcaataatacagcctttattcgattatacaacagcgacctaagcgttgcgttacccaatgcatacatccttcctcgtcgcgagaataaccatattacgacatatacccg

SEQ ID NO: 32658 - DNA, 310 bp, Zea Mays
ccgagtaacaactatttatatttctctctctcaattttaaagctcattcttcatatagcatacgcttatttacattggtactttatatgttattttctatagttactttctcagcaccaccatctacgaactaaacctgctcagtttggttctgcttcctgatcttcttccacacatagctgtctgcttgacaaatgggatcttgtgacatatataagccaagctaaccctacgtgcttccacagttccatatgttgtgacctttgatccaccccaagttgttagtgtgtcctgttttcgccaccctttt

SEQ ID NO: 32659 - DNA, 477 bp, Zea Mays
gttcggcggacgggcagaggcaaaggcacgtcaagtcttcaattcttgcacacagccctttcaactgatgcagattcttttagcctgtacagtagagatcaactgtgtaaagctctactatgactacgctacagctggggcttttgtatgtcgtggtggcggtcaagcggtggcaggctgtcatcatcctcaccataaatcgaagattcagagagggttcagaaggggattcagttcagtgaagtaaggtcgtgtttagatgagataaacgtattaaacatcctggattatgctcttatacgaattatgcattatctctcaagttacggtggaatctttctccacaacacttcctttctgctgaagtctgcttgtataggaaagttgtatcatatatgtttctaggggttcaacatgaatttacttggaggcacggaagaatttcatgcctgtgcagttctgaaactgtgatgtaca

SEQ ID NO: 32660 - DNA, 518 bp, Zea Mays
cgccctttaaatgccaaccgttcgatatccatcatgtcgtcctatcttaccaacctctctgatatcagcagcgagcctcctctctcggtctttctggaagcgacgtcggactcgagactcagctccactcaccaacgaggaatctggatagggcgacaagggttttgtcccggccaagacgcaacccatcccgcggtcatcaacagcatctccgatcgcgccaggttcgttcccgttgcctcgcctcgcatgtaatttgttcgctcgttcttctactctatcgtggctccgctgatgtcgtggctccgctgacgtcgttgtcgtgcagacgtggccactgctttcgtttctagttcacatgtgctcgcccgccacacgttggtttgcgactctcaaaacttacgttcaccatcttgtctcgtatgcctgctgtgtaaatggtaagcactccgcacactcaggttgttcgatgaaatgtgccaacaatattttttttgctcgtctaggacatcaaagta

SEQ ID NO: 32661 - DNA, 437 bp, Zea Mays
tgtatgaagagcggcacgtttaacctttaatatttgtaaattatttgtagaattaatgacaggtcctgtaatgtcttcacccccttgttcaagttccctacatctagatgcattaggtggaaataatgttaatgaggtgagttgtgcttcatatatgtaaatattttgagcttaggattatatgtaactgcacttagtatttacttgtcatccaggacaatgataaggtacaagacaaatcgagattagattgggaatctatggtattatgtgattttttggaggaggaaggtagtcgtgatgttctaagtgagatgcagatgtattctcaactaggactcaatgagggggaaaatgcacaggataatacaagagctgaagccggtttaggtggtacaagtaatttggatcaatcggatacggttaattttggagac

SEQ ID NO: 32662 - DNA, 585 bp, Zea Mays
ccaaaacctatacagagcacacaaacagcctagagaacggcaaccccacacacaaagcccaactagagttatcattgccaagctcgacacaagggataagcagctccgactccataagatgggctgacagacaacaggcggttggattgggacatcaacacggcgacaccataccaaactcagcacaacgacgacagagtaacacgccgaagcgaacaccaccaccacgcaaacaacacacccaacaaaacactacaccaccacaaactgggagaggaagagaaagaagccgtcgtgaactgcgccgtcgtcgccaacgctgtgccacgccaaaagccgcagcccgctgcaagcctcagcgacacctgcaactcctccaccatgggaaatcaccctcaagccacacgcacggtcgtcgatcgctcagcacacactcatctgccaaggacttagaaatctccgcccaccggcactcctctactgctgtgcgcgagcaacaccaccaaccaaccaccgccactacctgaccaagatgggcctcagatgcggcacctctaaggagggcacgacgccaatgacgccacc

SEQ ID NO: 32663 - DNA, 458 bp, Zea Mays
gatagcggggacccatcgctcctccggccagactccgcggcaaaacgacggtgcacgcatctccctgcgacttagtcttcccttcctctctcctggatcctctcggtcgcggtgtacctgacgtatgctcgtctcttcaattcgtggtgacacaagacagatgaggatcgggctcagactttatagccgtgagggataggctagctggcgtaacaaactttcgctcgttacggaaggcggttcatcgatcagcgtttgagaggaatacgtcgcgaggttgttacgctacgcaggaggcagtgactatcgaggcaagaattgggttacgtcatgatgcttagcatcacgtgggtttgtggcaagggaataaacaaatgaagaaaagagaaaaaaataaaataaagggacgtgggttgacagcctgcactagggataggctgagagaggattcggccgac

SEQ ID NO: 32664 - DNA, 296 bp, Zea Mays
ccccactggcgacatattgtcggctgttcttccgagtcagagggacctcatcttcttcctccctgttgtcttcatcagcgacacagacaacacccccattgggatcagcagcagatggagcacaagcattgggatcagcgacacagacaacacccccattgggatcagcagcagatggagcacacccattgggatcagcgacagatggatcacccccattggggtcagcgtcagtaaattcaggcacaggtacttcctcagcagcaggaaccgaaggaccaacgtcccgatccaaa

SEQ ID NO: 32665 - DNA, 308 bp, Zea Mays
ccaaacccagccacttagattttgggaagtcgactgtctccgaagctgatatgccgatgatgacaaaactaggctacttcggggaagctgagaagaagctgattcgcttttgcggggaggagaccatcccgaggccagaaaatgatgaggtggtagtttttaagagcttcttcaaagcagggttgagatttcctctgcatggaatgattgcagatgttttggaaaatttcgaaatttatcttcatcagctgactcctaacgctatcgttaggctcagcgtctttatctgggctctccgaagccaagga

SEQ ID NO: 32666 - DNA, 356 bp, Zea Mays
tttcggaccaatttgggggaaatccgaaattggggagctctggtgagcaattggaggcacaacttggtggattgggtgcttgactaccttacggccccgacgacacactcaatttataggctccaagggcggtggccaatgaatttggagttggcgcggtggcggccggagagaagagttgcactggcgcaaggattagtggctttcaccgtggcgggctcaccggcgatcaccggacatgcataacgcgagtgactgcgacgtggtaaatgccgaggcatgtagcgcaagaccgcgaggtggctaactccggtgaacctatccaaagcggccatgacacgctcgggtacggcggc

SEQ ID NO: 32667 - DNA, 477 bp, Zea Mays
caaagaaattccactatcctactggtgaatgtttttcttccaaaatttccaaatccccaaagcgcatcaaccgaatgggaaaaaaacaaaaacaacaaaaaaaagaataacctccaacttctcttctttgcgaaccgggtatcacactctaccccccttaaaaagaattcgacctcgaaatctgacgcttctatcggaacgacaaaaggaaagattaataaatcaacaacacttacccacaccgaaaagttccggatatttttgccgcatcagctcctcaagttcccaagtagcctcacgctcagactgattagaccacacaaccttaacatacttgattgatctcttcctcaatacacgctccgagaattccaatatacgcaccggacgacactccaaagtcagatcctgctgcacagcaattggttccatctcaatctgatggtccggatcccgcaagaacttcctcaacataga

SEQ ID NO: 32668 - DNA, 487 bp, Zea Mays
aacaataggcctaggctaaagcaggggtgcaaggggaggacatacgagactaggagttgtgatccaccatgatagagctagtgtataccatggcttatccactcccaaggtactacctctaaactttgttgccatgcttggtgtagcggccagttgatagccattgcctctacctgcctaaaagtcaaagcattgggcagcaatgatgccacatgtctctagaatttcaaagagtcatatgttgagcttagggatggcaattctgctcgcgggcacggatatccgcgggtttcgtacccgatgggcatggatacgggtaagaaatctcgcccacgggtaaggatacgggcaacacttctcacccgcgggtaattgacggatataaaattttgcccgcgggtattacccgttacccgcttaatttactagcccatcaaaatattgcccatgtgttcattttatcctaaaacattatgttgtaataatt

SEQ ID NO: 32669 - DNA, 271 bp, Zea Mays
gccatgccgtagtggttgtaaacagcgtcagattaagggccaaagactgcatacggggcgcgtcatcatcctggcgcatgatgacatcgagattccttgcaccattcattgagatcagagcccctgcctggttgatgctgaagtcttcccgaggcgctggccgagctgtccctcgacgtgcgctacagtcaggcgaagtggctatctacaggattcgtggcgcagtcggtgtccgaggccgagcatgggcgaggcagagaacttatccgag

SEQ ID NO: 32670 - DNA, 363 bp, Zea Mays
ccttatggccgtatagccccaagccccgccctcaattccactcgtgaacaccacggcgccattttcccccaaatcggtccgccacaccgtggagaacagcccgcccgtggccagcttgttctggtaagtcgctgtccaatccacatgttgttttcatgcctttgcatgcttgcgaagcctacggtggtgctcgttttcttgattccgctatggtcgtgtgggaacacaagctcgtagacacggtgtccgccatgcacgtgagcagatcattcttcaagtattcaagctaaattcgcacacgttcctaggccgccttaggtcagtgatgcctccccggttgttggccgtgacaaccatcgccgg

SEQ ID NO: 32671 - DNA, 292 bp, Zea Mays
gactaactcggctgcatcactctttgttgttggccagtagaaacccgacctgaagaccttcccaaccagggtcctggatgctgcgtgtaccccgcattgcccagcatggacctcatccagaagttgttttccagtagctgagagaatgcatttcatgaggactcctgatgcgcctcttctatatagcgtttccccaatgagagtgtaatgagctgactgcctcgcaatgcgttcggctgcatttttgtcatctggttcctcctcattctttatatacctgatgatcggctcc

SEQ ID NO: 32672 - DNA, 437 bp, Zea Mays
ggtatgactaccactttcatgttcgccacctgtccctctccgttttgcacaaggtcgcgtaagaattagggctccttggagcgctcggggttcgtggccggcggcgccgccgcaacagtgctacatcaccaaccgtgctcgagctaggggagaaataacgctagtgcgtagatcggggaacggacgactcagattgattgagcgaaccatttcggtagagcacacctaggtcgtcgatctgatactaaacgaggacggttagagaatggtataccccttcgtgcgatcaacttcgggtcgtagatccttggtcgggcggctgccgtgcaatcacgcaacgtaaaaccctagcggtctgattcaaatccaagggtctacgtagcacgacgtgtcccattatcgtggatctaatcctggccacacgaattagatctgac

SEQ ID NO: 32673 - DNA, 525 bp, Zea Mays
agccaagtcagtttctgctttggctaagcggcctgcacgatcggtgtcacctgtagtgggtgataaaccttgtatcatgcgatggactcagcagatgaccagagcagaggatgatctttagaaggcagtggtgattactgttatcagcgatcatgagaaggtcccggttgaagagattgctgagttgattgctcctaggctagagttggaagatagctccttgataattcgacagtcttcagagtcaagctacatcatgtttctacccaactgtggcatggtggatttgtgggtgggcagttgggccttttctcagggcagccactttcactatcacctgtaagaaaaggtctcgttttttgaattccaaaggtgttgtgttacctaccttattggacgtagagcttcagggaatccccatccttgcttgggaagccaagaccgtggaacaattgcttagtccttttgctagtgttcatcatgttcatccagacaccttggagctaaaggatgtggttgtttatc

SEQ ID NO: 32674 - DNA, 406 bp, Zea Mays
aggaggcgcgaccgctgcttgcctggatctgctcctgcctccgcccctctaacgtcctctccccgtcccacctggcccagtaagcgaatgatttccatccccttgtccaatcgtgctgttgcacccttttttggctgtggtagtggtggtgattgctgctgaggccgatttcgctgcggcattgctgtggtatgcgacgaaatggtaggctagttgttgggagattcgggcagctggggccaatctatggtggagttactgcgaattctcggggaggctaggtgcaatagggttgtaggggagtgtttgtgtctctaactctatgggcgcgaaatgttggtaattagtggcaaatgcctgtgttgcgttgaggatttagtgagagattgtggccccatattgataa

SEQ ID NO: 32675 - DNA, 483 bp, Zea Mays
ccctcgagggcctatctctaacatggtattcaagattaccaccattatcaattgattcctagaagacactccacgacaaattcttgctaaattttcaaagctatagaccctaaatggacccactgatagaactctcactttgtaggaagcaagagaaggaaagtcttcgtgactattacaaaaagttcctcatattgaaatcgcagatgccctcggtcgatgactagatagtcatgcattatgcaatcagcggccttcgggcaagtgtcctatacagtcacttcacaagggacccttcgaccaacttttaggaattgtatcaactttttgaaaaatttgtctgttcagaggagctcctgcaaagtcgagtcacaatgaaagccaaaaaagacttctagaccagcaggacatggaccaggcctttgcagcaagacccagcccatcaagagtgtgaccaactacaagtccacaacattgcaaacc

SEQ ID NO: 32676 - DNA, 387 bp, Zea Mays
cacgcagttccctgatggtggaatccttggtggacaacaactggccaagtcgagatacctcatcctgagatgcctgcagctcgtggcgatgatggtctaagtcagacatggtgaagcgatggctcctctccaggatggtcaaggagttactagcgtaaaggtacagcctgtccagattatcatgggaagcaacaagtgtttgttttttcgtcctgtaagcaaagaacaacattcaacatcgaggcaaggagagcaaagcaggaccagccaaggaaatttacctcgtgtgccatcttcttagaatcaagttgtgcattcagagaggaattcaggaaacgagcactatccagaaaagcagaagtctgagctaagttggcctagctctga

SEQ ID NO: 32677 - DNA, 634 bp, Zea Mays
ggaggcagggcataaggtagaaggtgatggcgatggagaggtagaggtagaagaagatgaaaatactgagattgtgttatgtggagacaatgaaaacaatggggaggttgaggggtcatttgaaattactgaggaaggaggggaaaatgaaacaagtgaagaagcaaaacaggatgtgatgcccagtacaacaatgccattattaccaaacttgcttcagtgttgggtgacgccactatcaggcttgcttcgttgttgtggggaacatggcagccctcaagagagcaccaactcatacataaaagaaatgttgcaagtatccaagtttcttcgtgtcatcaatctacaaggcatcgagatcggtgagagcttaccaacaactattgggaatgtagcacaccttcagtacctcggtgtcactgcttgttccttgaaatatatcccatcgacaattgaaaaccttaaaaatcttcagacgttggatgttcgagacacgtttgtttataaacttccagaagcattttggagtataacgacactgcggcatgtatttggtgagggtcttttcttgcctaagcaggtgggtgacttgaaacacctgcagacacttgaaagcatagatcctgataaggat

SEQ ID NO: 32678 - DNA, 308 bp, Zea Mays
gtgaacttggcagctctcatctgagccagagttggtgggcatcatgctttgggggtttggtcaaggcattcttacgtcgtgtccactcctcattccatgtaccaatggttagcgatgatttaactaggcattgatgtttaccggagtgtgtgccttatcgaaagatcagaaagtagtgtgacagtcgttctggtttgggagcccccaccagttcggttcctcatccaccttttaacaccgagcctctttctccgcacaaccatcgcctctccgagttctccgttgtcccttcccttcactcattctcg

SEQ ID NO: 32679 - DNA, 302 bp, Zea Mays
actatgtcgcactctcatttaatcggactgctcccgttgagtcgaaccgcaatcgtcgagtcacacatttttcgcagccctgtaggcactatccgtctgtcgtgatcatcgagccacaattgcgcctgttgcgcacgttgtgtggatttatcgtgtaccccgactaccgagccacaattgcgcttgttataaaggcttgttgtgttgttgtagccctaatggccgcacatatgttgacgccagatacgctagagcttgtactcgcgtggaatgtggtgggttattcaagcccctaaagtcac

SEQ ID NO: 32680 - DNA, 481 bp, Zea Mays
tagccggaaaccaggaagccaccaagtcctcttcaacgggggtgcttcgttgccatgtcaatctgcgccatggtccatccttgcttatgctggtgactcgacccgagtgcgagaccagtggggagccagcagcacagaagttcgtcgctatgctatgacggggaaactcgtgtcaattccgctgcggtgcttgccggggctggtcgtcctcatcagacgttgccagcggccatcatcccgccaccatctcgatctccagcacgtcacctacatatgagtcttgtaccgtgtagcctgtgcctttagtaccgcggtggttggtcacatgcgcaccgtgggcactggtcgctggtgtactcatcgccgtggggtgggctatcgacgtcagccatgaagagagagaaaggatagtagcttggggtcgtaaggaagaagacaacacgtccaccgttgatcctctaaccaacggctaggattagtc

SEQ ID NO: 32681 - DNA, 335 bp, Zea Mays
caaggatcggatatgtgtccctgagattgaaagccttcatgagactatactgaaggaagcccatgactcggattattctagtcatactgggagtacgaagatgtatcaggatttgaagtagaagttctggtggtatggactgaagagatatgtggctgcacatgtggctatgtgtgatgcgtgtcaaagagttaatgccgaacaccaaagaccagctagactattatacccattaaagatacccgaatggaagtgggaagagattggtatggacttcattactggattgcctcacaccccgaaaggatatgattcgatatgggttattgtggata

SEQ ID NO: 32682 - DNA, 368 bp, Zea Mays
ttctaacgaatgtttaactcacgtaaattcaacacatgtttctgatgaaggtttaactcatgtttggaacagtatatccatgcgctggtgctattgcagttgttaagtgtaccttaaatcctcatgttcagatgttaacaatacgataatttggacatttaagcatatagacttcagaaacttatatttaataatccggtcagtcaaacacctagattctaatcatcacccaacttcttcctacactagcttttttctacaaccagcttcttagaaaagctcatcagaaaaaagtcgaaccaaagatgccagcttcattgctcttgcctacccgtatttctaaccttcggaatagaattgcacgtgca

SEQ ID NO: 32683 - DNA, 462 bp, Zea Mays
gcaaagggctattaaggatacgaaggtttgtttcaagtgcctcctccttgacaaaggtgcagccaacatcaagggatttaaaatagagaagagggttgcaaagcgagctatgagtgtggcaaagggaccgacgtatgatgatctttatcagcgactaggcacaaaggaggaagagaatgacatttataggatggctaggatacatgagaggaagacaagggacatcaaacaaatcaaatgcgttaaggatgagacagatggacttctagtgaaggataaggagatcaaggacaaatggtgagagtacttcgacaagttgtttaatggggagaatgatggtcctaccctcgagttggatgactcatttgatgatacgaacaaacgctttgtaaggataaatcaggaggcgaagatcatggaggctttgaaaagcatgaagtggggtaaagcgatggccctgat

SEQ ID NO: 32684 - DNA, 281 bp, Zea Mays
cggtgcacgcctcgacgtgtggtcgccgcaccatgcttcgcgccgcgctttgtccgcacgcatgggcaagcatgcagcagcgcctgctccatttcaccaagtgctcagcaacctacagttgtccctctgctctcgtctcgctgtcactcaccctctcactcgcctcgcctcgcttccttcttcctcgtcgcgccgaaccgccatggccgacgcgagctaagctcgtggccgcttttccatctgcctgccattgtccaaatcgagccccgcaaccacttcat

SEQ ID NO: 32685 - DNA, 337 bp, Zea Mays
taccacgacttcaccctccgcgctgacacactaggcccgcccaccacaccgcgcaaaaaaatagtgcagagcgtgcactcgaacccacaccccccctactccagaaatttggggttaaccaccaaaccacattgaacttagtgtttgagtgaactttatcaaaacaggagatgcaaatacgactttctttcatgcgcaagccaggttcaggaaaaagaagaactttattcatacactgatggttgacgagaacattgtttcttctcaagaggctaaacagcaggttatgttttagttttataaggatctgattggtaaagtgtttgagcgaaatttt

SEQ ID NO: 32686 - DNA, 345 bp, Zea Mays
agcggcccaaattgctcgctgaaatctcgacttcgccccaatccgcgattggcctccactgtcatccatctctggtaaggaaaccctgcattgtactcacccggatcttgcggtagtgtagaacctgacgaattagggttttgggcgttggtgccgtagattggcttcctccagcgacgtctccgctgtggctggcactcgcgccgccagacttggctgcctgggaggaagaagagacgaccgtcgtcgatctattgatggagggcggagattagatgatagcgtacctatttgcgcattcgcgcgattgaatcatgagcgtagatctgggatccctcagttcgg

SEQ ID NO: 32687 - DNA, 554 bp, Zea Mays
tttcttccattacatttacaattcatcgtttcttttgttctttaactttctcctttgtagtcgaaggctattctttcctctataaaaattttgtcagttctgatcccagaggacttagcaacttgaagggcggggattcagtcattaccttcagaatttccgctacttcggtggcaaagggcgtcggaggagcttcttctcctgtctcatccaccttcagctcagaagagggcgttgtgtcaagcttttgctttttagagattgttgccttcggctctggagctgtttttgttttcttcaaaactttttcatcttccttcactagctgagcagcttgcctactcaggatgttgacaatcctttttcctttcaccccttcggcccctttgtcaagcctctcataatccgggtattcgaagtttaatgcgtccatcacctgatttagccttcgtttcgaccgggtgccgaaggcagcagtcattaattggtcttccttcttggtgtagttgccaagaatttcgttacacatcgtttcaatcatttctagccactct

SEQ ID NO: 32688 - DNA, 334 bp, Zea Mays
ttggtactccatgcaagcagacaatctgggacatgtataactttgccaacattgcactgctgtagctggtcttgacttgtatgaaatgagccacctttgttaagcggtccactactacctagatggagtcataaccggctcgggtgcgaggcaaaccgactataaagtccaccccgatctcatcccacttacattgaggaatttgcaatggctgcaacaaacctacgggcctttgatgctctaccttaattctttgacaactgtcgcatatggcaacatactccacgttctcccttttcataccgtaccaccaaaatatctttttcaggtcttg

SEQ ID NO: 32689 - DNA, 648 bp, Zea Mays
gttaatagtaagacagctataaacatactccactcgataacataaaaacatactcgacagcaggcaaccttgagcacagttagggtagaataaaggtctagaacacacttctccacatcaagtagaagcacacggccaaatttagaagaaaaaaaacaagagagagagtcgtaccacagctccccgtcgtaccacacggccaaaataaatttcatgttacatccaatgatatcagaaaaaaaatattatcactttagaagcactcggtgccatgtttttgtctttggaatagaaggagtgctgaaacgatgtcagcaactaactgggcaaaagaatactggtaccatgcattgtggcctctgcacctcaaccatgcctgcatcgtgcatccatccaccggagacctcagcccatcatccttcccttccctgatcccctcccctttcttcttgtatataaatcatccaaactgctccttgtccgcgcaagagcaagcagtgatgactaatccgactccctagctcccacactaccaccatcccattcccatccaaccagctttaaaaagcccccaccaggccaccactacatcctgcgctgcacgccaagctcgcctcgcctctgttcagctcacggtggaagaggagg

SEQ ID NO: 32690 - DNA, 407 bp, Zea Mays
aaggaacccccaaatcatgggaaatcagttgatggctcgatgaaggatcaccaaccggagcaatccgcaatgcatcagtggagaccaattcagcgtcatcagtagaaaccaaaactctgtcatcaggagcgccagcctctaaggcgacttcctgacccaaagctcgtgccgctgccatgcaaccagaatgcggaggagaagatcctacatgaacatccatggaagtatgagagggagaacccactcggacaccctcaggggctgggtcatagctcgcgctacccatccgagccggatcatctccggcaacaccctcgggggctgggaaaacactagcaccatccttgaggaccgagctctctgtggcagccacctctaagactgaaggaccttcaacaacttccatg

SEQ ID NO: 32691 - DNA, 650 bp, Zea Mays
aacccgttacatcctcgatcgtcaatttggggagtccaacatagtctccattgctaaggcgacctgcatatatttcttcgggacgcggacgaacttctctatggattccttctcatcgatgttgtcattgccgtatcacgtcatctgatgcatcaggctggagagacagagaacaaagtcgttgacgtcctcgctcggtcagaacgccaggcaatcccactcctaacacaacttttcttggtggctctgcgggcgcggttgctacttataagtgccacgtctggcatcctaggtgttcttggtagtctccttgcccgtgaggacagacatcatctctgacgggatagcaacaaggagggcctccatcgcctgccgatcctcgtggaagttgtcgtcaccgtactgcaccgcatcccacatccgtcaagcatgcaacttcaccttcataaccaagcttcgctcatagttggcattggtgagcatgggccatctacctgccgaactcctttacgaggtcttgatgacggggggagctgtgtcagccatggtggacacgacgttgctccggtgaagaggagacatggcgatgtctgtggggcgtctgcgtgtccctgctccacgcgctcatgtcctgcagatcccgctcccgc

SEQ ID NO: 32692 - DNA, 282 bp, Zea Mays
gcaagtgctgcacgagcggctctgtccatacatcgcttctttctgtcctccagctgttcaaggtaaactgtcttccctttgacctgcctgaaggggcgaggagggtcatcgttgtctcctcccctaatgatgagacattctttgtccgcaccatcctgaccggactgctgcacgatagagtgaaaagataagcaggagtagagagcagccgataggatctcaaatgaagcgatagctacctggaaacctcacgagagagagaaaatccaggcaggacaggag

SEQ ID NO: 32693 - DNA, 613 bp, Zea Mays
atttgattacagctttattattcttcaacctccagtcatgcaaaactctaaccaaatcattgcatacttcataaacttgaggtacttgctggaggattgtcttaattgtcatcctcaagtgatgggtgagtctacttactgaaaccaatgatcttgcatccacggcaaaaacagtggggtaaatttctgcatatgaatggaattcttctctgagcctttgtacaagtgtggcaattggctgtagcccttctggcagatgagctaccttgtcataatgggtgagaactatagttacactgggaagaaataattgtgagactctcttagaatttgaaaccaaaaacttaagccaatatattagctccagttcaatctgctctatgcttttgggatacctattagcaggcttcagaaccaaactagatacaatcatgaaaaagcatggaccaccatgcaccagaaacataaaatcatgtgagggaaaaccctcctcttgtccatcaagattgtacattgtcatttttgtgttgccatcaaagaaaacactacttttattctcattggtgtactccatttgcaaaaccggattcatcaaagtacttgttatatttat

SEQ ID NO: 32694 - DNA, 297 bp, Zea Mays
gggtctcgcccgcggcgggcaccagatccgtggtggagccataaatcctgatgagaaaacttgtccccaccgtccgcccaacagcttctgcggtgaccactcactacacgatgactaactccgtgcgtgcgcttggaacagggtgggtgaggctggcatgcgataaataaacataggtaggcggcgcatggaattactatatactcgacgatgatatctccttgccatgcgcggacgttggagtctcccgtgaatacggcagtccgttcacaacaacccagtcagcaggggaggggc

SEQ ID NO: 32695 - DNA, 696 bp, Zea Mays
ctcgtgggcgcccgtcgtcctcccgtaagctattacccggccaccctctcggattttgtttctactccgattcaaccctccacaacatctgattgtatgtagaatgctgtcgaattcggtgaccgatgcactgtgaatagcttgttgggtagatgttaaacttgtccaggttattgatgaggaattggcttcataaatcatagtgaaattaacccgctgtactgcacctcagcatatatgcctataatcttcaaactgtgataataccatttcaagcagttatagaatgcatgatgatttgattaaggtctgtctaatatttttgtagagtctgaatgaatttgttcgttaatttggagctttgcttcagagatgcttctcatagcaatgctgattggtggaggttaaaaaaaccagtaaaaataaaatgggtaattagggaagcctgtgagcttgcaactctcagcactgatggatcactgttcggaacctaggtttttattccctgcattgggtggtctccttttcggctatgatattggcgcaacctctggagcaaccatctctgtgcaagttagtatatgatttggttgttgttttttgcaaatttttttctagtcagcatagtctcactaccactgggtgaattcctcttcagtctcctgatctcagtggcactgattggttcagcttgtc

SEQ ID NO: 32696 - DNA, 388 bp, Zea Mays
ctcaagcttgcctggtggccttcaacactgtgtgcagttacattagcaccagggacttggtacaaaaacacatagctttcaaagtatggccccttgttaacaaatgggaaatgtcgaaggagatcactgatagctcaagcgaaggtggcctggtttatttgaaatatacataccgttacataagtcagtttggggagcaagatgacgaatggctcgaggctattcaggcgacaactgatgatctgttaggggcatatacgaaggctgaagacgaagccatgaatactgccttcggtgcccgtggaaagaaaaggttgaatagagtgttcgacgttattggttttgtgcaccccgattattgctttcaggctcggaagcaagggacgaa

SEQ ID NO: 32697 - DNA, 488 bp, Zea Mays
gtggatgggggaacctgtccgcataagttatcgaagtatcttgtaatactctagtgtcatgtacggatcctggccatcctgtgacaacaaatgtaaacctcatatcgaagtcacaaacgaccattacattctgcgatgcgtaaccgtgccggccaatatatttggcttgctccgaggccgggactgacgctggaaagtgactaccatcaattgctcctatgcaatccttgaagtgtggccaaaatctcacctctcgcaaacgaggatgaatctcgatgaaatttgggtctttgggcttgattatgtcagatgacatcttatacagtgcattaaggactacttcactatacttgcgactaattgtttccaaggagtgaccaaacttattccttatctgactaaatgattgtggacccccacatgcccacaagaaaatgcctagagcttccatagtactgacaccccggcttggaagcagaccataattt

SEQ ID NO: 32698 - DNA, 363 bp, Zea Mays
aagaagttgtatgaagagaagaaagttgtggatccttttattgctgggttttatgagtctatggcaaaaacgaatatagacaaaattactaaggagatattggagggtttgtctgaagattctgatgacaatgatagttatgatgtggaaagtggagatgaagattctaaggaccggccctagcggccaagccataccatcttcagaaaatcgaccattaaacaaagtcatattgatgccatgagagggagatatttttgcgacatgtctattgtgagggttggaggagacaacactgcccctgctcctgagaaaaatgaagttgttatttaccgaagcttcttgaaggcaagccttcggttc

SEQ ID NO: 32699 - DNA, 452 bp, Zea Mays
gaagtctcttccaaatgacttcgtgcagaagtctcctacgggagcgacctgatcaacgaaagcatgcagcttcatcacacaaaattatgtgatacacacagcgagggcatcacatataacattggctcaaccttcaggatgatacccatctccctgtagttgaacaacattatcctcagttcctcaccctcgaacagatttcgcagctccccctcacctacactcaccccaatcggcgaggacaacaattctcgcttcccagtcccatccacgcgaagacgacctctctccacctcgccatgataacgcctacaacttcgcgacaattcactcactctccgcttcgccaccgccctccgccgcctatacccagtactcgcgcccagaagttcctcggaaccctccacgcgtggcgaaggctccgctgcagccacatccaacaccgcaaaata

SEQ ID NO: 32700 - DNA, 601 bp, Zea Mays
cggctctggtgacgacaacgaccgtcgcaagaagctgtatgtgatgtacggcgggagctaggagctcacctcccgtaggaacgtcaagtccctgcgctgagaggtcctttcggcggtcccaggggtcccgaaggctgctccacatcagcggtggaggagcaccactatctccttcggggcatccgactgccccaaaaacatggcaggggtcggtatactaccgctcatcatcgcccctgtcatcgccaacatgcggctgcaccatgttctgattgacggtggggctgggctcaacgtcatcagccatgctgccttcaaacagctgcagatcccagggtcccgactgggaccctcccgtccattctctggagtgggcccacaaccggtgtatccctttggagcatcgcactctcggtaacattcgggattgaggagaacttccgcacagagaacgtccagtttgacgtcgcggaggttaacctccccttcaatgccatcattggcaggtcggccatgtaccggttcatagccattgcccattatgggtatttggtcctcaagatgccgtccccgactggggtccttaccgtgcggggcgacc

SEQ ID NO: 32701 - DNA, 515 bp, Zea Mays
gtgatcactggatatgatgtgaaggagattaagaaattgaaggaaaagctaagtagagcctttgaggtaaaggatcttggaccacttcgattcttttttgtgattgagattgctaggtcagctaagggaattattctctcccagaggaagtatgtcctcgatctattgacagtgacatgaatgcttgggtgccacccatgtggctcacccattgataagaatcaccaaacttgtgctgggttaggtaaccctgtggaccgggaaatatgttagaggatagttggtcgactaatatacctttgtcatacaagatcggacattgcttatgcagtgagtgtggtgagtaggtatatgcatgatcctagagctgggcatatggagttagtttatcaaatcctaagatacctgaagggaacccttggcaaaggattgtggtttagagcaaaccaacacctaaatctggaagggtattgtgatgctggctagaagcaagaaggaagatatggtgtctcggt

SEQ ID NO: 32702 - DNA, 459 bp, Zea Mays
gaagcgcaggggcaattccgcaagtattcctaagacacagattgtcccacgtgtggacggcgggtttaaaatggtaaaagctcagggttctatttgcaaagcgtgcaagccaaagggggtatcgcgaaatcaggaccgtccgatccagaacccacgcgccagattagatctagagccctggggacgatccggaattagtatgtgatcgtagccgtcggatcacaaatccaaggctaataattcattcaggccgcagaatcatcccagcccacggatcgacgattgacggcccgagttctaataacgcgaagtggtaaatgctaactgatctcagcccttcatcaagggaccaacggtcaggggccatcttctacctcccgcagcccaggcagagacacatgcgctaggtacggcggagcctcgccggaatacaggtcatccagggcctcgacgccccaa

SEQ ID NO: 32703 - DNA, 687 bp, Zea Mays
cgagagcgacggccggagaaggttgttggttcgtcatggtgagctcctccagagtgagatcctcgcgggacgtcgaggaagaaagggaagggtcgagcacgacgaaggagggcaccgacgtgggtgaagcactcgttgagacccggatcacgttgaggacgagggtgcggtcggagacgactttacccagggcgttgaggtcatcagccatcttgaggcaacgacagtactcgacaatgggaaggtcgccctggatgaagttgtgaaaccgtgtctcaagccggatggcgtgtatctcccggttcccaaagaactaggactcgacagcgagccaggtgtcccgagcagtgccaccctgggaaacgttctcggcgaggttgtcggtgagggagccgagaatccaggacttgaggacgcagtccattcgatcccaatccggggaggggaccagagcgtcaaagtggacgtgaacctggagagagaacttgtagagggtcagtaaaaattgatcgcgccaacggttgaagctgacggagtcgatgtcgaggacgatagggacgaggctccggatgttgttgacgtgatggcctgggcatggaggctgaggagggcggctgcctcctgcagcagcatggcgtcgtggagatctgctagcaggtgcaggggagtcgccttcatcggacaaag

SEQ ID NO: 32704 - DNA, 634 bp, Zea Mays
tttgagtgtgaattaaaccttgatccagtgcccaaatgagttcaatctctatagtcgaattgtagctggtatgtagcactacaactttgatgcagagctttgggtgagttgccatgaaacatttggagaaaacctgccctaaatattgactgtcaggtgcacagaatagaaattctgatggtacagtgcccaccggatcataccgccagcgcggctgtcttcaccgccgacgaccgatcttcgccgcgattcgcgccatcgccgttgtgattcacgtcgacgatgacccgataaggccgccaagtaaaagccatgcacttggggataactccggtgactcaccgccgtacccctcgtactccgcggctatggaggataagttcaccgacgagagccaccttccggccttgtgccacgtgcctgagtacctccaccgcaccgccgtaagccttagtaactctccgttgatcgccggaacgaccgccacggtagaagccacgaatccattgcgccagtgctttcttccacctccggccgccgcgcgtcctcctcaaaattcacgaccaccgtcttaccccccctataaattgagcccgtgactagctccgtgaggtcgtcagctaactagccaccg

SEQ ID NO: 32705 - DNA, 385 bp, Zea Mays
gccagaatgaagatggtttccccaagttgctgagagcatgcacaattcgtctcggaatcaggagccagccagagtatgatggtcgtgaatttgtcgagcatggcacagagaagtgtgccgtgactgtatacattggatctagtctgcaccatgtggaatggagtgtcactgctgcggggcacagattcaaagacacctgccaagtcgtcgctcgcaagacattgagggccctgtgtcaaatttatgaagaagaagtgaccgacaccccgctcagattctatccgccctttcagagaagccatcctgtttggatggccaagatgtgtgcattggaaggacaacagctgcttgaggatgaccccacagtcgtgtacctcactgcata

SEQ ID NO: 32706 - DNA, 342 bp, Zea Mays
atggcagatgtcatagccactgcagtgcgtcttgtcctagaacgatgtgcaaatacgctatcattacgtcttccatcaccccggcggcccgagcaccggtcgtgtagacgaccaaccagccccccgggtcctgcttgggctcgtacttgtcgacgttggagactttgaagttgggggccactggatggcccgaagacgcggagtaagcgcggagaccccgcatgtgtcttcctgtcagcgtttgtgaggtcagtcccggggaggggagctggtgacgtgtcgtctcgaccgtccccgggtcgggccactgtcaaggccgcagccgactcaactcaggtggcg

SEQ ID NO: 32707 - DNA, 391 bp, Zea Mays
gattgctctaatcacacaagccagttaacaagtagtggcaggagtgttgattcactggaagtaagctaaacctaaagttgcattaaaatgatcacattaaacttattcacataaccaacaaagccattaaaccccaataaactggcagtttctttgcacaccaattaaactggcagttttcttgcacacctctggatgactcaggctttatctatgtttttcataatcataactactggatgtctaggaatgctttccttggagtaaatgtaaaaaacaaattgctagtacttcaaatacacaactaaaccactgtgatgcatcaatgctactttgtggtagaattattctgaattccaatgtttatacttctaaatgggcttgattggat

SEQ ID NO: 32708 - DNA, 1257 bp, Zea Mays
ctgcatcgccccctccggcaaatggcattccaccatacccaccttcaggaaggtttcctgctattcctcctgccacttcaggtaaaattcccctctctgaaagtacatcaaatcactcaggcaacatatatctcttgtcatttcccatttcttgaacagcagtcccacctccagccacatcacctgttattgcacaagcaccacagcgacgagcagatcctccaagtagagattataagaacggtgaggataaaatcacccagtttcatacatctgattgtgttttaatcccttttgtacttaatattggatgaatatttaggaaacgcagtgccgccagcaaatacttaccctcctacaaatctcaagaagcatcatgttccacatgcatcccctccaaagggatccactggtcaaactgtcccaggtcacaaatcaccagttacaggtaatctcagctattaaacttaggctgtgtccatttgaacattacaatgtagaattgtagattgacaaccaaaactacttgtttcaggatctgcgcctgcaacaagtcctttgccccagaacacaaacatgccttcaatcccgaagaatgcttcatcagtgccacatgcccatccctcaccaccaagtatagctccagaattggcacccactggtagatctcatgctcagggatggaaatccagtaatcccaataacaaaacaaatagattacatgccccatcttatccaccgcctcgtgctcaaggtttgacaatgaacttctatcggcagcctaaatattgtcacttctcaacattgatctaaaagactttgcattacagggcccgaggtctcacgaaccccaagacagactgggactaaaaactatactcaccatgcgcctccaccattccctcaaggtaatctacgctaacatgcgggtttaaagattgcattcatttcacttactaacaactttcacattgttcttttctgtccaggacaccctagctttcctgtacactccccatccccttcaccagcctcatcgaggggtcctgcgaacgcgaagaaaagtactttcagtgccttgtctctttgcttcacttattgttgtcttttcctcttgtcaatagaaatttacagaactgctggattccacaggaaatcatatttctcctactcttccttcaatccctcccctaccagagccaaaagcaccgtcagcgcatcctatttggacattacctccaccaccacctaattcag

SEQ ID NO: 32709 - DNA, 386 bp, Zea Mays
taccgacaacccgctctatggttttagaggaaaggggacatttccacttgacaagatagagctccctctttccatcgacacaaaccccaatgcaaggtcagagcaggtgactttcgacatagtcaacatggtctacccatacaacaccataatgggtagagggtccaataataaacttgaagcagcaatccacagtgttaacctatgcatgaaagtcccaggacctctcagcgcaataacaatttacggggaccaacagactgctcacaacatcgaaagggacaattcgtcccaggacaacgcaacatccattgccttatctatgaggatgaaggccatgtagttccgcgccccgagaaagcagcatcaaccaaagccaaaattca

SEQ ID NO: 32710 - DNA, 363 bp, Zea Mays
tacagatatagaattccattggagtgttaagtgtatgtcaaggcacatcctataggaccatacaacagatgaggcttgaggctctccatatatagttgtcattccactagtggagatcattctctcaaatcccaaggttagtaacatggtataatagcaaggattagggttaggttaggattagttcaatcctccaccatgatccaaatcaattcggcaaccaatttttttgcacgcaacacgcatttcttctggcttgcggcccgttggccggcgtttctttgtaggcgactgtcacagatgtttgtctggtcaccaatagtcgatgatcactgttcatggatatcttttgtttctgttatt

SEQ ID NO: 32711 - DNA, 354 bp, Zea Mays
tgtggcttcggagtagtttcttctccaccgaagcgaatcagctattttttatcttcactaaagtagcccgacttcaccatcttaggaaaatcagctttggagatggtcgactttccgaagtccaggtggctaggcttgctcggcactgcaatgttgtaatcatcttcagaatcggtctcttcaatatctgcttgctctgcttcaacagcagggacgtcttccggtgtcatcaacccagatcgcttcattgcttccgagataggaacagtttccacagcttcggtttcgtctccctcgcgatcgactcttgcagtagagcggactctggccatttgattatgatttacttgaaat

SEQ ID NO: 32712 - DNA, 381 bp, Zea Mays
ttgtggagcgggatagggctattggctgggctataaattcatgatctatagcctaggattgtgaggcgactgcccgagcccgggtggaagagctaagcgtagccctggaaaatctacaagggtataataatgctctgcacgaggaagtgcacgtgttgtatgaccagctacatccgaacgtttcaccggaagttgcgacgatgggagctagtgcatcaggagcagctggcggaggaccttatggggagttggatctctttggagcccctccttccatgaacatcgtgcatgatcgttctcccgaagctagcagtggagcgggagcagccaaagatgtggatgactagattactatagaagtcctcgacatgaggggaccag

SEQ ID NO: 32713 - DNA, 1421 bp, Zea Mays
atctggtggcactgtcgatccggtgagggtgctcttcgttttacttcatcctttcctgtgctcgagtatattttcctagttctactgttttttttgggatgttcagtatgcaatgtgtgttcttctgtttctattagcaaaggaacaaattatgcaattctagttaaaatttgtcctagtatatttgaggatagcataggtattgttgaaatttatatatagttaatgcatgcaattttgaagttgtaatttagcattgaaatgtatgtgcgatgtctgtgccttgacggagatgaatgagtgtgagatgtctgtgcgaactgtgatgtggttctttttaaaggaaatctaggttgctgcctggattctctcttgggtccatcagccagtgattcagacttacatatatatgatgcaactatgtctggtactatataaataggcaaataaaaaaaaagattaagtatagccgtatatataggaacaacactgtaactgaagaacagtggcaagtgttgtgatcttttattgtgaagcagcagacagctactttttttgtggtgatggtgcatactaatgcagagagggacggagagaaccaagagctgatacagattgaagaactgaattgggtgtatcctagcttgttgtttggggatttggaataaagggagcttgatggaggaagcttgaacattttttaggctcatctgctcctggaactggacaagatgatgtcctggtcaattattaactccattaacttgctgctactgttgggttattcctgtcctggttcattaaattgccactgttgattatacactagctactagctgcatctttctgattcatgcgtgcattttgaggcatgtcttgtctcttggtctgcaagccaggaggcaaagtggcttcagagctacaaaaaatgattttatatgggatggagctgcggagtttaattatagccgtggagcagctcattcttgttttttcagttttttgtttgattttttccttatgttatctcatgttaatgtcccttaggagttttttttgtttggagtaggttccattatatccaggatttgcatcattgataatttgttttgtgtttattgtttaggtaaataatctaagctagctaagtatagttgtgtggagttataaaatgtattttctcagtatatttagttcttagaaattgtttatttatatttagttttttatttacattttttgttatttttgcagggcatcatttcctctcctatggttaagttgattgaaacttttgctgttttttgcaagtctcaggtagtttgttcttttttatcttcttttttttatgtacaagttctcaattgtatattttttatatacatttttttcatgtggtttttgtttatttttttgttact

SEQ ID NO: 32714 - DNA, 525 bp, Zea Mays
ctttggatagattcactgctcggcggattgtgtcgggggggagggttaaaagatcgggctcgcacgcggcactctcttaagtgcttcatgccgcagtgtcaccagcggtcgagctcttcctcactatgcctctctcctatgtggtgtccatgcgcttggctcgtactctcgtgaccgtagatagccaaccatgccatcgcgcaattgtctaccacgacgcccggccgtagtgaaagaaatccgagcaccgttgtgaacactttcatcccaaattcacgaagcacatgtgtgatcactataaattgaaggctctctctgctccaccttcttgttacgaacccaacacaccactcctcactcccgatcatgaaccatagctcgtgaagtacagattcccccccaaatcggccagaacgttgtcgtgcggcatcgcgctatggccagccattctcaggtacgttcacatccctctgaaccatgtttttgcatcctctagtgctagtgaagctcacagtcttagtcaat

SEQ ID NO: 32715 - DNA, 351 bp, Zea Mays
caaacagtggggagaaaaccagctcataatgaagaagatgtcaccccattctgtgtgtgtttctttgctttcccgtcgcttctcttcccattgatcgtgcttacgcttaatgtagctgttgttcttggatgtaatgcttgagtaacgacttagaatcgtcgggtcgcattttagatttgcctgcatattcgtagagaaaaaacgtctgatttattgttagtattttcagaggtggtaaccgagtggttctccccctttttttgttgcgacgtcggtgttttggaggtaacagccgagtccttttgaaccacgtcgtcgctttaggaataacggccgagtgattgctggtga

SEQ ID NO: 32716 - DNA, 464 bp, Zea Mays
aacaagtcaacaaagaagccaactacgcccagcatgactacttcatggggtttggtcctgtcgtcgaacattacacatcaatgttcgagacggggcagttccccaacctgctgcaagaagtgctgcacacgctaggaacctacgtccgccccttgtacgaaacaaggcgagtgagcgagcctccctgggcttgctaccacatcactcgcatccacgtcagggtgatggatgcagcggataggggattcaggactctgtctgctcatgagtccctgacaccgctatccacctacgctgcttcggtcagcgatgctgccagacggaccctgtggtctcttacccacacctactggcaacagctgcatgacatgaggttcaggcatctccctctgtgtctgagtggaggatgccagaccagcatcgttccaggtggagctggtgaggagcgtctcaacaccctagct

SEQ ID NO: 32717 - DNA, 275 bp, Zea Mays
agacgatggaggtgttggatgagctcgatgtcgttctatgccgattagagccagatattggatgtaatgagtcaacagatgttagtgatgatgaggaagacaaggtaataatattccagatgtttttagtgttatactatttgtaacataaattatgcatagtaacatgttatttgtaccaggaagtagaattgaataaaaataatgttggcgatgggatggaagatgacaatacaattacatgccataaaaaggtatgtaaaagataaatatat

SEQ ID NO: 32718 - DNA, 853 bp, Zea Mays
aggacaggtcgaacctgtgatggtcaaatttatcgtttggtgactggaacattttatagcagtttaaatgatcatgaatatcctgccattttgagatgctccttaagggagcaagtgctcatggtttgttgtgcagagcccagatcgataagcgaccctagttgtaattctttttctctgcagctcaaccagccttaaatccttaattcatgcctgttctcgtgatttatttatgttatgctcgttcattgttttaaatttgaagcaatctatgattgtccctggtgagtttgacgctgtccctttttttcacaccttcaaagtgtgaccttgacacttgaatttcataattctatatttgtatcaaattacacatagatttaacacaatggaggtgctttttttatgaagaatacatcagtactatatttgtctcaaaagataccacacactggatgtacttcttttatgaaggatacatcaatagtatattcgtgtgattaattcagaaacttgtgtatatatttgtggtcaattttttggctacctagttaggttaagataaactcttactatgttttttcttcagcacttctgcaaagagttcttaatccaccagatccagatgctattgaagaagcgctagaatcactagttcaaattcatgcattggagaagacagcttctggacgctacgaacccactttttatggctgtttgctcaatagtttgccattgtcatttgattcttctgttcttgcccttaaattttgtgagcttggtgctatccatgaaggaattctaataagcatcatgctggacatccagccgcttcctatcttgcacacttttg

SEQ ID NO: 32719 - DNA, 369 bp, Zea Mays
caggccacacgctacaccgtaagagccgctctcacagcattgcgcgcatggacagcgcccatcacgactgaccgttggctcgagtggtggactgtcaggagcacagtccagcagcgtcagcataggtcaatcggcatttaatgcagtgcacggatatggaatggctgctactatagctggtacgcggaggacacggattcgccaactcgggccgacaatacggacgcacaacacgtctggtcggaggcttggcacggagaccaagagaagatttgttccacattgaaggaggaggagatctcagtctgaccggaggcatttattgctccatgtactatgtatttattactatattcctgggcccatcta

SEQ ID NO: 32720 - DNA, 277 bp, Zea Mays
atggaaaccccttgggaaaatagacagtcccaaactagccttaatgtagagagatagaattgggaagacaccacacccaatgaggggggtgatctctcatatatatagccaaggtaacttggagtacaagtatacaatctcctaaacagggaaagctatatgcctatacaaggaagactataatcagtctatactagtctatatacggcagtgctgtccatatatggctgcacacggctgtgctgtccatatatggctgtaatgtccatatatgtct

SEQ ID NO: 32721 - DNA, 461 bp, Zea Mays
ggagcacacaacggcccaacaatgatgcagtgcagggccaagtgggtggcacgccgcgacgtgtgggctaccaggcgcgtaaccatggtggagcagggcaaggcggcgatgcacgcgcgaggcacacataagatgagtggcacgaggaaggcagatggcgcgggggacgcgactaggtggcatacgagagggaggaatatgatgaccagacatgtgagagaggcgacaaggcgttgtattgggcaaattttgattaacttttgatgcttaactctatgaccatcgaaagttaacatggccatcgaaagtcacattgtttcctaatatgtccacctttgattttggtccatctcgataatcctatagcattagttgtgtatcatattttaaaacttattgcctagaataaatatcgagatatatttttgttaactacaaatcaagttggttaaatgaagtcc

SEQ ID NO: 32722 - DNA, 350 bp, Zea Mays
aaaaaaactcaacctaatcggccttggtctaggttagatattcaggtgcatccaaatgttgcagctatgtttgcaatctcggtggtgactttagttgggaatggggaaagtactcttttctggacggacaaatggttgcacgggggctccttggaccaaatggctccggagctctcccagctcattccaaagagggttttcaaagaaaggacagttaaggatgccttgctaaataggcagtggatggattaaggatattagggggtctgcatgtgcaggccttgattgagtttctattgctctgggatgttttgcttggcattcaactcatgcccggggtgccagaccac

SEQ ID NO: 32723 - DNA, 316 bp, Zea Mays
ttgtgattcgatatgcgggacgattcggtctgaatgatcagaaccgtcggatccaaatcgcgcgactgtgattggaagccaacttaatggtcagggactgatcgaggatcgttggtcacaaatccggtggtctggtgagcatgttgatttgggttgtgtgcattgttgttcccgaaacgggcatgccagattagacccgagatacccccattaccaggttccgatctaaccgttgatcctagatcaagcgggtcctattcaatctggggtgctttaaacctatgtcattgatcttcgatctaatggacattgtcgc

SEQ ID NO: 32724 - DNA, 712 bp, Zea Mays
cttcttctctacgataggactggagcggcccaaggcgaggtattaggtttgatataacccttctctaacagttcatctatctatttcttgagttacaccatttctgatccgaacactctgtaggatcttttagagatgggggttgtaccggggataagctctatagcaaactcgaccttccttcccagtggcatgcccgatagctcctcggagaacacatctggaaactctgacactaccctggtggcctcgagcgggttggcttccttgttatccgtggtcaactgatggcaatcttctatttctgactcaggcattcttagctcagctactatttcctctccggatggggatatcaacctcatagtcctcttatcacagctgatatttgcttgagacttcctgagccaattcatccctaggatcatgtctatcccatacgtactcatcactattaggctagcgcggaactctatcccccttatttccacttctaccttcaaacatatcttattcatctagactttcccaccaactgaattaattttcattggggttgtcatggtatagttggaaggttatgtgtttctacccattttgcaaaaataaatgaatgagttgcactagtatcaaatagtacttttgccgtacaggattcgactaagaacatacctactgccatgtctggagcatcttggtctgcttcggccta

SEQ ID NO: 32725 - DNA, 501 bp, Zea Mays
gatcgccctaagatgagtgatcgtaagcatgtttatactaagtcaagtgaacatgtgcatgttgcaccgccttaagtcattgctgacttaagccgattgctccgttagtagggtatagtggtcaccctaagttaagtaagcgtgagcatgtcgcaccgtcttaagtcactgccgacttaagccgattgctccgttagtagggtatagtggtcaccctaagttaagtaagcatgagcatgttgcaccgtcttaagtccctatcgacttaagctgattgctcccttagtagggtatagtggtcaccctaagttaagtaagcgtgagcatattgcaccgtcttaagtcacttccgacttaagttgattgctccgttagtagggtatagtggtcaccctaagttgagtgggcatgcagattgatagtaagtggttcgagtgcctttgagaatgaagactttttattgatgatgtattttctgattacagaatacaatgttgccct

SEQ ID NO: 32726 - DNA, 679 bp, Zea Mays
gtcgtatgggaatggagcgtggccgtttccgagtagaccgggttggtaaacgagaattgttgtcctcgccgattggggcgagcataggcgaggggatcttctgaagctttttgagggtgaggaattgaggataatgctgtttgattacagggagatgggtatcatcccgaaggttgagccgatgtaatatgtgatgccctcgccgtgtgtatgtaattgtaatttgtatggtgatgtggcctattggtcgtattcgtacgcctgtgttggtccagttgcgcccgtgggcgactctgtgcggagtgtctttttaatgagagacttcgattaacgctattccggctgctcccttaggcgactgctgcgtggagtgtcttgtaaatgaaagacttcgattaacgcacttgttatgctgttccggctgcacccttaggagacttttgtgtggagtgtcttttaaataaaggacttcgattgacgcacttgttgtgctattccggctgcacccttaggcgacttttgtgcggattgtcttttaaataaaagactttgattgacgcacttgttgtgctattccggctgcacccttaggcgacttttacgcggagtgtcttttaaataaaagacttcgattgacgcacttgttgtgctattccgactgcacccttaggcgactttt

SEQ ID NO: 32727 - DNA, 477 bp, Zea Mays
aatcggaaacagggttcgtccccttcgctcgtcttcctccacggagcggcatatcggtgcgtcaccagctcctcacgtcccggctcaccatcggcggccacggggacgtgacagttggtatcagaggtagtcgattctcgacattttcctcggtttcgtccttggtgctcgcgacgatggctgagacggcacaatgggatgaagcgcgctgggagttggttatgaagaagctgagttgtctagtccagaagatggagtcgttggtgggggtcaggcagatctagcagcagcagtggcacagcaagcggcggaggatctgcccgttctgcctcagttcgttcgatctgcgggcaacaccacggcgccagtctttgacgagggacctgtcttcgacgacgagctgcccatcgacttcggttcctgggggaagaccgtgtccatggcagcagcacgcgccatggaggtccccggatccac

SEQ ID NO: 32728 - DNA, 271 bp, Zea Mays
caagatctgaaacaaaaatactggtggtatggattgaaaagggatgttgcttcacatgtggcagtgtgtgatgtttgccagagggtaaaagctgaacatcagagaccaactggattacttcaaccactgagggtacccgagtggaaatgggaagaaattggcatggacttcattgttggtctaccccgcacttctgcagggtatgactctatttgggtgattgtggacaaactaacaaaagtggctcacttcattcctgtgaggactaatt

SEQ ID NO: 32729 - DNA, 465 bp, Zea Mays
acctcaagctctaagcaagaaattgtcatgttcagcagaccacacaaacatgtgaggcctagctgtcctgagcctctttattttgagacatttgctgtaagtaaatgatggtatatgtaaagggtaggtagaagcaactcaatgaatagcatgtcataacaactaatggttgttctttaaaagtaaaaacagattactatttttcttctgctcagtcgacagcagcggctggtgtttctcggatatgctagttgttctggtaggtccatctcaatgtaattcccccaagttctaaaataaattttgtgcgagctcacctgtaggctgggatatgcatcatgtttgttgtatttacagtgttttgtgtctgctctgatttgcaactggacgatccttctcccttcactgaagctactcctgaacgtcgcacgggagacgacgtcactcgtgggattttggaactcg

SEQ ID NO: 32730 - DNA, 1580 bp, Zea Mays
ctggcagaccggcctctcgtcgctggagttgttggaacgcctgatgtagcctccctggttgctttggcgccctccggaccaactagcacggccaccacgagatgacccgcggccaccacgctggccacgaccaccactgcctccacgttgatttccacggccaccgcgaccagccatatttgctgatccttgatgctgctcgcctccacctctcatgagatccaacttggtctcaaaattcagcaactgagagtagaggtcttcaagtgagattggatctaccctcgtgacaagggcagacaccatcggtaggaattcttcctccaggccggtgaggatgtactcgaccatctcttcatcttgcagcggtcttcctgctgcagccatctcatcgccgtagcccttcattttggtgtagtactcggcgacggtcatactacctttttttgtagttgacagagcaaggcgaagattcacagcccgggctcgggtctgtgatgcgaacatggcctcgatggagtgccatgcctccgccgcagtcttggctgaggtgacttgaatctgcacctctctgcttatagatgagaggagatagctaaggatctgttgatccttcgcctcccattcttcaaaagcaggattggggctcttcttgcccgcgttgtcgacagtctcctcatcaggcatcttggttgcgccggtgaggtatccctccagacgtgcgccgcgcatggcagcacgtacctgggccttccacaaggcatggttggccctggtaagcttctcagaaacgggatgtgcaacaagtgcggcggaggaagcactggacgacatgatgagggttttggtagatggtttaggctctgattaccatgtaaaatcagagggcaataggttaaagcgtgctgcctcgttggagggccgccctacatgtttatataggcataaacaacatgcgcaggatttacaggatcgtaacaaactagagaagcttcaggaattctagttacaacagaatatccctatctttatcttcccagagatgcttactcttgtttgttacagatatttgtttacaatctaatcttatcttctaacactcataatcttctcaagagtaacttatttcagattatttttggtaaaagacccagcacccatggttatgtgaactgaaattacgttaatctgccatcctattttttacccgttcgtctctcaagccatcccgccgcccctcacaagcatcccacgccgcctcccgaaaaccactgtccgccccttggagattagcatcccacgcgcctccctggtaatctatactgccaccgctccccaaccaaggtgatggctcgccagcaccagcacaggtgaccgctccccagccccagccccagcccaggtatccataccaccatcgcccttgtaaaccctcatacatcccacgccgccgctccttggaaaatcctaccaccggctccacaggagcatctcgccgcccctcgtacatcccgccagctccatggacgacctcgacgccgaggaaaacctggctggagccttgaagtataggagcacct

SEQ ID NO: 32731 - DNA, 392 bp, Zea Mays
caacactccaaggtcagatcctgctgcaccacaattggttccatctcaatccgatggtccggatcccgcaagacatgaaaaactgggtgtaccccaccatggaatccggcaattgcaagcgataagccaagctgcccacccaggccaagatagtgaacggtccaatatatctcgggctaagctttccggagacaccgaactgaataactcctttagtgggtgataccctgagaaggacttggtcacccactacaaattccaaatcccgccttctcacatcagcataactcttctaacggctctgagcggccaaaatattctgacgaatttcccgaaccttttcagaagtctgctatacccaatcatgaccaaccagggatctctctcccaag

SEQ ID NO: 32732 - DNA, 665 bp, Zea Mays
gcggcggcggcggagcctttcttcctcgccattgctcgctcgacctccgtgacgccacggccatacgcggttccggcgatggagcatttgatgaactccatggagttgcaggtgagagtgccggttttgtccgtgaggatggtgtcgacctggcccagctcctcgttgaggttggacgtcctggcgtgggctggcgtgtccgtctcctcgtggtacatgtggatgtcgtggttgatgaacagcgcctgcagcagcttcacgatctcgatggagatgtacagggagatggggatgaagtagccgtagagcattatggccgtgaagaagtggagcaccgctgccaccgctggccgtttcgggtcgtagtagatctcagtgtcgtcgggcctaaggtaccatctcctcatggtcctgccgtggtctctggtggcgatgccgaagaagacggagctgacgaccgagatgacgatgagcgagaagaggaggaggtacatgacccggtccatcttcttctccacgttgctccgcttggacgggaccttcatggagttctgcatcaccttggtgtcctgccccgtgaacacgacgacgccgtacacgaagtcggtgttgcggagcttggagtccctgagcaggagctgctgcggcgacagggggtgctgccg

SEQ ID NO: 32733 - DNA, 1359 bp, Zea Mays
agagaaccgagtttcaggcatgcgtaacaacatcatgaaaaccctccaacttagtccagaatgcctcaaagtggaatctgcctttactgaaatcatgcatccccagcagctacgggcaaatgatcagagtcatgggaagtcgaactctgcaagatacaagctagaaaccgctcttcccaatctgtagtacaaaacactctgaccagcttcaccaaagtgtgcccattcgaccagatgaacttatgacccactagcgccacttctttaagagccatgtcatcagcccaactcctaaacatacacatcatgacttgatctagattagagttgttcttatcttcatcgttgcaccttcgaccgcccgctgggtaaaaaggcttagaagcaggggacaggggaataaacgacgcctcgcgaggggtggaggtagtgaccacatgggtatgaaccgtggaaggaacaatggccgtcggggccggggtaggcgccggtgggggggggggggggtgggcgggaggcggagaggttgggagccgaacggggcaacatgccatctactgtattatagtaactttgattcacagctacactgttatgatgtcttttttaggattaccgaggcagccttcatatactactggatttgggactgctttgaatatagagacgcttgttgcagcagcggaacaaagagatataccaattgaggttggttttgtattactcttttggggtaatacatgatttgttctgtgctaatggacttctcttaacctagacacctccacctgaagttcaggacaagattctttttatgatcaacaatatatccatctcaaacatggaagctaaggcaaaggaatttaatgaggtcatacaggaacaacattatccttggtttgcacaatacatggtcatgaaaaggtatcattcttgattatagatttctctgacaatgctgaggtatacaaattacttctcatcttggcagggcaagcattgaaccaaatttccatgatctgtatttgaagttctttgataaattaaactcaaaatccttgaacaaggaaatgctgaaggctacgtatgagaactgcaaggtttttgttcaccccaattcgtctgccctgttcatattttttgctagcgattttgtttaaacttgatacttctgctgcaggtcttgttaagatcagaccttatcaaatctagttctgaggagcgttccttgctaaaaaacttaggcagctggttgggcaagttcaccattggtaggaaccaggcactaagggctaaggagattgacccaaaatctcttattgtggaggtactgctcctctgcattttttcttgaacatg

SEQ ID NO: 32734 - DNA, 528 bp, Zea Mays
agaggttttctgtggagaggccgcaaagaagctagaggtggccattgtcttgttgcctggggaaaagtctgccgccccctagaccttggagggcttggtatttctagtttccagaattatgttgggcacttcgacttagatggctttggctagaaaagactgatcactcccgcccctggtctggtcttcaaatacaagttcctaaaaaggctagagctttcttttctaaagtagtgaccactgaagtaggggatggaaccaataccaaattttggaaggataaatggctgaatggaaaaagaattgcagatctattcccaaggctgtacagcgcaattccgaagcgggtaatcaattgtaggacagttcaggaagcaattgttagcgccaaatggatttctggtatcagaggagttttgtcagtgggggttttgacagattaccttcagctttgggatttgatttctggcatcgagcagcagaccaaggttgaggataagcatatcttcagtattgccccgaatagtg

SEQ ID NO: 32735 - DNA, 432 bp, Zea Mays
tcacaccatcagggggaggagatgacaaggaccctcctcgccccttcagacaggtcaagcggaagattgcctatcttgagcagcaagagggcaggaagaagagaaatatggacacagccacatgtgcagcacttgcagcggcagcagtagcaaaccaggctgagcagagaggccagctctagatttcttctgatcagattgcctatcaggttcatcgcctcgcgtctcggcctcgctccactgctcccccactccttccgccgtagtctccactccacctcccactttgctagctcctgtcgctcccgagccatctaccacgcccgctgtgtccaccacctccaccactccagctctcggtcccgcttccgctccgcccattcctccaccttgctttagggagcgtgacgagaccgaggtgagaccgcttgc

SEQ ID NO: 32736 - DNA, 670 bp, Zea Mays
gtcgagactgcgcgccaaataaaaagaaactcaggggccagagcgcaaggttccctagactcagcgaacagtgagcggggacggcgggttgattagctaaaacagcaggggcctaatagctaaatcgttcagccgaaggggtacgggacagtgaccgtgggatcacagatcgatgaccatgatttaatgaaaccgcgatctaatcctatccctctgcaaccgatccaacggaccacactacatcgcatgaacatctacgccagatcgaaccccaaccgtacatctgaggatcaacggtttagaattggtcgcgcgaaggggaaagagataacctgatcccgaccgcaccttactagatctacggtcagggcacttcctcttccccaacggtgtagcacggtgcgccagtactccccacggcggaatacgccggcgaggcacccaatcaaccgtacccgagcgtctaacacaaattgaaccggcgtaacgcggacctaggtgcatggggaaacaggaaattgagacttaccgagggttgggcggtggagtgaagctgtccacgacgcgagtggttacgcggcggagcgacgcttccgatgagaaattctgttggagctggtggctttcaccgtccgaaggcgccacaacgagaatcgaaacaatcatgcgg

SEQ ID NO: 32737 - DNA, 771 bp, Zea Mays
gccggagcggagaaggaccaacagggggtcctgacagaatcgatggcacaactggagcgtgaagttggcacaggagcctcaggcgcaggatggtaggatccaaaaacgaggcgtcaggcctcaagagtgccctgaaaccgaggaggctgaatcagctgcgcaaagatgtggcataagtagtgagcatatggcaactgtcgacaagcacgaatcccatccaaaacggtgtcctcgatctcacaaataaggaagtccacgacgtcaaactcagagtgagagaccagggcaccaaggagccagagctggatatgagtggtagcctccctgtatcccatcctcggcagaagagttcgtctgataaactcaaataaatacttggctgctgtagtaaagtctgccggtgaacgtcgcgacccatctgaaaagggcgggcggaacagagccgcgacgtgagctgtacccggagccacaccaccatgagggcgacgaggagggtcagaagtgccatagcagaggctgtgaagacgagtcgtcgactcgggaaatccaaagagctggcggatctgactggcagtaatggtgacatcctctcgctcaaaacgaaacctcatccagtgatgatccgggtctatccatacagaggcgtaaaagactcgtacccactcctcaacatacctgtcgctggtagtcaaaagggtcagaaggccaggcagatatgtgaggtgcgcctcagagtcagcaccggctgcaagcagaaaggctggaagatcc

SEQ ID NO: 32738 - DNA, 295 bp, Zea Mays
catttggactttggaaagtccaccatctctgaagctgaccttccaaaaatgatgaagctaggctacttcagcgaagcaaaaaaggagttggttcgttttggcggagaggaaactactccgaagccagaaaagaatgaggtggtagtgttcaaaagcttctttaaagcaggattaagatttcctttgaatgggatgattgctaatgttttgaagaaatttggggtttaccttcatcagctgacccctaatgccattgttagattaagtgtttatatttgggcccttcgtagtcaag

SEQ ID NO: 32739 - DNA, 302 bp, Zea Mays
tgtttcgactgcacttggcttttgtcaccgtagtacctaactccttggatgggacaatgatttccttaaaatactttcaagaatcagctcgctttcctctctttaccttgcacttagaaggagacaactgaacaccatccttcaatatttttcttcatctagctgtattttgacccatttgacacatgatctttattttgctcctcctggcttccaccatcagctgaaggtaagcttacagataattcatcattcatatcatagctattctcttcctccttttctcctgaaacagactctag

SEQ ID NO: 32740 - DNA, 306 bp, Zea Mays
tatcaacggagcaatcgacttaagtcggcaacgacttaaggcggtgcaacatgctcacgcttacttaacccggggtgaccactatgccctactaacggagcaatcgacttaagtcagcaacgacttaaggcggtgcaacatgctcacgcttacttaactcggggtgaccactatgccctactaataaaacaatcgacttaagtcagcagtgatttgaggcgatctgacataattagaattactcatacaaggatgacttctatatcctgcaaacaaatttcataaccattgcgcgccatttcacta

SEQ ID NO: 32741 - DNA, 382 bp, Zea Mays
tgtacctcttggacgaagacacccggtggagcctgcgctcggcttgatcctagcttggataaagccttaattgtcatgttgcgtctctctttatatggtggaactccactccttcaaatttgtcctcaacttcctgactacggcgtagtaaatgctcattgattccgtggaacagtcctaatctttttgacttggcgaatgacaaccaaagatcttcgcataccataaatcttttgatcccaagtgacacgacaatattaagcccatgtatcaaagcttcatattctgcaacattgttggaggtaggaaataggagttacaatgcatacttgagctgatattgtccaagggtgataaaaaggacgcctgcccctactccttg

SEQ ID NO: 32742 - DNA, 337 bp, Zea Mays
ttcaaggatttctccttctccattggcaccaagcttgccttcgcctcagtgtatcacccgcaatccaacggagttgtggaacacgccaatggtaaaattttcatagctatcaagaaaatgctcctcgacgacaaaaaaggcaagtgggccaacctgttacctgaagcggtctgggcactaaacacaaccgagtgcagggcgaccgggttcacccctttccgccttctatatggatcggaggccatgaccccgcaagaaataaaacattggtcaccatggacagttccgtcagccgtccccgacgtggacgagcctacttcgaaggacctcatcgacg

SEQ ID NO: 32743 - DNA, 460 bp, Zea Mays
gccgccggtaaccctcgcgccatgatccgcgtcatcgccacgattcgtgctctctagcgaggagattatcacgatagggtaaaaatcttggcaccggataggctcggacccggtcgacggtgagctcgtcgtacccacttgggctgcggtcgggcaaaatggtcctcgccggagttggccgcctaccgaccgtgtgccacatgccttagggcattaccacatcgtagtaaaccactaaagcatgtctggtcatcgctggtgaccttgccacgatgaaatccaagaatcctttgcgccagtgctctcccctctctacggtcgcgagcgcgccattccaaattcaagagccacctccctcgggccctataaattaagggtgccatcagctccgctaggtaatcacacacccaacgcactagcccgtgccttagattgtccaccatagcgctccaattttgaa

SEQ ID NO: 32744 - DNA, 426 bp, Zea Mays
ggggaggagagtcgtgtgggtggaggtggtgggtagcacgggtagaggcatagacaacggggtagcgcgtggcagaggcgacagacccgcatgcggcgcaaaagagggcaggagaaggggaggaacgccgactcaatcgacatcgagggaatcaaggtcgggaggagctagcaaaggggaaacatcctcatcaaatgcaacatgacgagagatgatgatgcgatgggtgagaagatctaggcaccggtaccccttgtgatcattgtacccgatcgtggtgaaagtttgaggagcgtggcagaggtgttgggatagcaggcacactcgaaggtgctcataggaggggatggtgtcgaagagggcgaagaacggagtgggatggggaccgccttggagggaagacgattgaggaggtaggtggctgtg

SEQ ID NO: 32745 - DNA, 493 bp, Zea Mays
gtgaggccgggcccccgtgtcataggatgggaaccctgttgcgcattgggggagactttgcctgtgacgcttcgggacacgagcgggggaatcttcctttaaaaaaggggttcatccctcgagtagcagccatgccttgcttctctcccactcgtggtgccctttcgccttcaagctctctgcgtccctttgccttcaaggtttctgctttgtgtcgccatagtttaccatggccttgtaagttcatctcgagcatgcccagactgagtgcgtgctcgacatggtgtaccgcctacttggatgggatgcgccggcgtttggcgaaaggatttgcgccggcgccatcctccccggcgaacttgccaccaaatagttcatgctctttgtcctccctagcgggttggtgctgccggtcttgtctttcctctgctggaggtgcgcggccttgtgggagcggcgctcttccaccggtgcttggcttcaaggatgttca

SEQ ID NO: 32746 - DNA, 963 bp, Zea Mays
ttaaacacactctagtatttatttttgcattaaaaagtattttccaaatgaatttatttgattttctaactatctggaccgagcactaaatctataaaaacacggggggcgaaaacataagtgttccctagactcagcccaaccctagggtggacggcgggttcaaattctggcaagtgggggggctctttagaaacgttgcagcgccaaaggggtatgagggtacctgagccgtccgatctcggctgaacggcccagattacaaacgcatccatccgaacgggtacgtaatctcagtcgatggattcgcgaccaatggctcagattcgacatacgcggtatcaaactctagacgctggatccgaatccaacgctcctagttaattcagccgaaacggcaccacgagctgatcctagccgttaactcccaatctgacggctatccaatcctcgtcaccgcccgatacccgagctgtcgcggccgcgacggatggtggcggtcttccccccctccggcgagcaattgccaacgaaacagaccccaaatttcatcccggcaagacctactcgatgattacggtctagtgaattggggaagacgaagattacctgctaatattcgacgttgagcccaggtcacgatgcgcagcggacatgcggtcagatgcaacaccgacgacaaattcccgggtccctagcgactaatccttggtggcgggtctttggagacctttcccccggcaatgcgaagcttgcgggcgagtgaatggcacaccagcggaggcggtgatgggaatcccatggtggcggccccaatcgctccctcacccggttcggcgtgggcgtagactaccagtacgagacggaaaagggcgcgcgacggctgagggacttatagctgaggtgtggccgagtcaaacgcagcaagtgggggggattggttgaacggaaccgcgaggtcac

SEQ ID NO: 32747 - DNA, 349 bp, Zea Mays
ggcccaggtatatgtctcaagcaactcgttgctagtagcttcaatgcatttcaaccagtcatcatttggttcgtcaaacttctctctgaatctgaaggtatatttcaatcgaactagtccaccttcgcaggattcagcagtagtctccttcggcatctcccagctatccacaagtggccacacccaataggctatgtgttcttggattatatctcttgtgccaatgaaagcacggacattgctaaaagcctcctgacacgcttcggcatcactttcaatagtcaccttcggccttcgaagaccgaagcgagaccagatggggcgctcgataatttccttaatatcctcc

SEQ ID NO: 32748 - DNA, 350 bp, Zea Mays
attctgatcctgaacattatctcctggataaattccactgcccttgctgaggtcaaggaagaaatgggcttgtattctatccacttcgtaaatttgtcaattgcaaccagtatatgagtataacctccttgagccttcctaaaaggtccaatcatctccagcccccagcatgcaaatggtcaagttataggaattgtctacagctgctgcgcaggcaagtaatactattttcacaagaattggcacgcctcacacttctagactaactcagcagcatcacttttggtggttggccagtaaaagccggatctggaagcttttcccactaaagtcctcgatgcagcatgcac

SEQ ID NO: 32749 - DNA, 937 bp, Zea Mays
agaatagcagccgcccctattgccgccgttggtaatgcccgcgcatggggttctctggctttggtcggctgcttcggttgcatcgcctagagccttgtgattccacgccggtgcgaactcattgtcgcgcctggagagagatgagattgagggagacggtggatgcttctgtgcgactgaagttatgattgcacgatggcgacatgcgcccgaccgcacccacgctgcagggtcgtgaagactggtcaggtgtggagtcctcttcctgggacggtgaccccgggttcacccaccgttgagccttgctgcgtggtcagaccccccaccattaatcatttcttcggtaagacgccatatctagttcattataaattctgtgtcgcgtagctagaggttgcggtatagttggggcgcttggttgcggaaccgtgtgtttgctggtgggaaaacgtcgagtgctttggcgtcgctgctgtgccggcgttcgagggtgggagacgccagtcgccggcgagcgcacctccgcgaacgacctgggccttttatcgctcggcctcggttggggaagaagttcccccagccgtggattctaggatgagcggtggagattagaccacgcgcataccctctcgctaaattcatctcggcagtaggatcgtgatcggagggttagggtcggatctcgggatcgtagaatactggccgttggatctagatccaatagttctcggtgcgtaccgtttcgacaaaacctaaatctaatccccgccatcggttgtcgatcagatggctcagatcctagtgtaccccttcggccatgcctatttacgtaagagccctcctgaaattttggatctaacccacagtccagccctactgtgctctgtgtctagggaaaattaggatttggcccctgtgttatctgtaaatagtgcgc

SEQ ID NO: 32750 - DNA, 344 bp, Zea Mays
tgaaccaaaatgcatagaaacttctatcaacatcgtgaagaacaacaaaaggaatagaaaaatgtttggatacatgagtagtccacctcaaccacaggcaaaagccccaaaacacatggatacccaaacagaagaatcaagtcaggctcagccatttgagatacagacacccaatcaaccctcacccccggttggtcaaacaaagttgacacgcaaataattcaaagcaagatgtgcttgctattattgcaaaaatgaaggacatcttattcacgaatgccccaagaagcgtctagaccaaataaagaataaagctgccaagcatgacctaagcaatagtttag

SEQ ID NO: 32751 - DNA, 808 bp, Zea Mays
agacaagtcaggtagcaccatggtagtgtataacaagtgctcaactgaattgacttgagaccacaaacaaggagaagggaaggcctgggtagcactaacacaaatggatgggaagatgggatgtaaggttcatctccaatggcgtgcgcgtcacccaggacgacttcattggtgcacaggaacacgaaaagcccaacgaacataacaagtggtaataaggttaattggtccaattctgccagcaagtgtctaaattaattcagatcagaagagggagggaactaatgacagttgtcggttatcagtaacatggtaaaagagatgacatcgtatctaaagttgtgcaggtaaagaatgaaggcaggtctgcagtctgcttgaaccaccccagctgcaaaaggaatgggagaagtcaatgcatagtgccatactgccatcaaatgcatgagagttaggtaaaatcagaattgatacctgaatacctctaaacatacgccatgagattttacaatctaaggaccagatgtcctcttaaaatttaaggagcagatgacatcctaaagtttaaggaccagatcaattaatagtcggataaagtccaaatccaaaagaaagatgtaacccattggttagattagctatacttttcagctcaagtgaacactattcacgaatgatgaaaaaatagcaaacatagtatagcatataagcaagctagattcttgaattgatgtggcacctgcacctcccatggtacgattccaccccttcccactcggctcccactgatgtcgttgtggagctacat

SEQ ID NO: 32752 - DNA, 298 bp, Zea Mays
atgagatcatcaagctcgcgaaacacgtcagtgagtgacgcgagcagtcgtccaaggacggctccccgccccatcgtcggcctggtaaggagagggtcgacgatggcgaagtggccgcagaagaacgagagctcgggtatcaatcacccgagggggacctcaaggacgtcttcactggagattccgactccggggatgacagcaaccgccgcaagaagttgtacgtcatgtacgatgggagctgggaactcacctcccgcaggaacgtcaagtccctacgtcgtgaggtcctaccggc

SEQ ID NO: 32753 - DNA, 408 bp, Zea Mays
cagcgctaaactctctagatgcaagaaaactacaaaccatcccaacttgagattgaaccaacttattagttttgaaaaaacaagattgtgtacttctaccaaattgtaaaatatttttaacaaatcagagttattttcatgtgtagcattttaacttgattacttcctccaataatgttgttcatagcaccaataatgtatataaaaatgtttgaatgtaattcagttatgcaaatgttgtattttactgttttgcatttatagaaaagtcaattcccaaacaaaaatcatgaaagcaccatgtggcaaaggatacataatggaaggtcagaaaacttttcaatttaacttggtggataaaggtgagtccccccagactgctcatagctttcagggccatggttcctc

SEQ ID NO: 32754 - DNA, 868 bp, Zea Mays
cgaggggttgtggtgcttacttatgtacgccacgccatgtggcctcacaggctaagctagtgatacccttgtataagtcgtagtcagtgtcgaagtcttccatttaggggtcgtggtgcttacttatgtacgccacgccatgtggcctcacaggctaagctagtgatacccttgtataagtcgtagtcagtgtcgaagtcttccatttcttgagatcaggagaggtcccgagagcggtgacttccatcatggaccttgaagcagtcttctggacagggattattgagcgcgtcatggtagcagtcgagggtatgttctttctgtggggaaagatacgctgttcttgtgtgttacatgcaaggggagtgggtgatggtgagttaaaaatagtgagcacacggtgatgctaataagttatttccctgctatttttcctgcaatgttttttggtggtagattatcgttacaatctccttatttccctgctatttttcctgtgattttcagcacgatgacacatcttggtggtaatgcatccaccgccagcatagacaatgatgtgctggacagaagcagaaacttttacgagagaagaagggaaggcaagaagatggtagcggtagctattgtaacccagtaagtaagcaaaaagaaaagcctggctggcctgcattccctccctgacgcttctgaaaaccagagatgaaaggctgcagttatgttctgtcgtctgtttgagttcgtcattagcctgttgttctggaattcataattagtgtgtggttcatgtttgcatgattgtaaccctagaacagcacagcatctgcaggcgtgaaccacaaacttattacgagctccaggatagcac

SEQ ID NO: 32755 - DNA, 492 bp, Zea Mays
gcgtactcagcctggaatctgcctccttccaaggcctttaccagttttgtgtcgaatcctcctgccggtgatagcggtttgggccttagagtgcgaccctctcccaaagaggttaatgctttggttgcctgactggaagaaattcctgacgatgagaggcaggttcattttgagatgcctttgaatcccactgatgcagagataagtgtcatgctggatatgttagctgaggattcttctgatgccgctcctgctgaaacactggtggtggcgcccatccctgaggccggcaaagctttggatgctcagaggtctgacagtgttcgcccgaagtgttttcgccgagccgatcagcccacttctcctgctgaggggcagaaaaagaagaagagatgtcttcgtcgagtgtctagcttggatcaagatgccggcccttctgttcctgctactgaggaagtgcttgtgcctgaatttgctgaagctgaccccaat

SEQ ID NO: 32756 - DNA, 409 bp, Zea Mays
agatcaatgatttacgctaaaagttgtactcatttatgttatttaagttcatgttttacgctgaaatccacccgtgccagaacccacgcatgattggacgtgcgtgatttacacgccgtaatttccggcccaatcgctattacgaaacaaatctacgatttacgctaaaatttgtacacatttacgctattttggtttacgttttacgctgaaatccacccgtgccagaacccacgcatgattggacgtgcgtgatttacacgccgtaatttctggcccaatcgacgttacgaaacaaatctacgatttacgctaaaattcgtactcatttacgttgttttggtttatgttttacgctgaaatccacccgtgccagaacccacgcatgattggacgtgcgtgatttaca

SEQ ID NO: 32757 - DNA, 442 bp, Zea Mays
catcctcttcatttgagttgtcttttgatgagtcccattgatgtccaatgtgtggttcccctctatatcttccattttgtcaaatcccttctctccctctctcttatgttcttgttgtctttcttcgtgagggcacaaagcaattaaatgttcggtgctcccacaattgtaataacttctccttttcttatttggaaaccttctcttcactaccttgtatctgtccttcttaagacccttgtgatacttcttgacaaacaaagcaatgtcactaattttctcatgttgcgcaccttcactatcgctttcgctagaggaagatggagtttctatcttttcctttgctttcttgtgtgtttttagcttatttgttgacatagctttgctaaaatttaacttcctgctatgtgaatgcttggaaaccttgtaagctttaaatgca

SEQ ID NO: 32758 - DNA, 462 bp, Zea Mays
caccggtagataagatcattagtagagatagatttctactagtgttcctatattaaaggagctatttggttagttgctagattaaaggagcctatcactccagttagttgggtcggtcggcatgtatatatacggggagacgatcaatcaataaaggcaaccgagatattactcctctagtgtcctatctctctctcaatcaagcatgcggctaagggactaaccttgccagagaagacggatcaaggctaagaactacgtagccaaggtccagctacccgagggcttaatgcccttgacaacctggtatcatgaccccgacgatcctcgccttcccaaccaacctcaccacaagccgccgccaccccacctccatctgcgccgccaacatcttcatcgacatctgtcgcatcgtgtgccaccaacatggatgacgtcagtgacctcaaggacaccgccaag

SEQ ID NO: 32759 - DNA, 408 bp, Zea Mays
gtgcaggagggggaacggatctttcgggcacaccttattcaggctggtgtaatcgacgcacattctccacttctcgcttttcttttggaccatcacggtattggtcagccactcggggtggtaatctctcggataaaaccggtagtgaggagcttactaatctcttccccgatggccttgtgtttttctttgtcaaagaggcacagccgctgcttcgctggcttcaatctgagattgactcgtaaatagtgcttgacaacctccctaaggatgcacttcatgtaagagggcttccaagcaaaaatgtcattttccgcttggaggaagtcgatgagcgcactttcctattttggagagaggttggatccgatgcgcaccgtccgtccgtcggcacattcaggatccaag

SEQ ID NO: 32760 - DNA, 360 bp, Zea Mays
gttagggtcgggtactatttgtgtgtctggccaagggcatcgccggtgtctttgccatgtgacgtagccggtcaatcgaggagtctgtgcacaggcgtcagactaaggcgttgcaggaggacttcatcattacgtcgcctccacgagtcatcccttgcctccgcgctctcctccgcctccgacccctgcctacccggagaacgttaacgagtggcaccaacaggagtatggtgtgtcattcgttacccctgaggatgaggccgaggagtttgacgactccttctacacatctgctcctccttacccagatccgagacccattcctggtgatctcaggacatctggttgtggtcactttcc

SEQ ID NO: 32761 - DNA, 351 bp, Zea Mays
ggagtatcaggggcacacaagaacactaaaacgaaagggcagagggtatgagcggacctgagacgagctgaccacggtgaggtcacaccgctcggtgttcttgagtgatttgggggaaatcccaaattggggagctctagtggatgattcgaggcacgggttgctacactggttgcacaactacttagcggagtaggcggggtcaacaatttatagcaggcttgagcggtggccagtgaatttgagagagacacgcggcggccggagaagaagaaggttactggcgcgcacgattggtggcaattaccgtggcaagctccccggcgaccaccggacgagctaacgtgagtc

SEQ ID NO: 32762 - DNA, 488 bp, Zea Mays
gccgagtaggcaacagaggcaccaacatttgataccttgcctctaagtatcatttcgagccggctcaccaagtccacagcaggaattcttctattggtgacccgggtggagttagctaggcctcggtacagataggccgggtatgccctgtccttcaatggctgaatattcttgaagacaaagtcagcaaccacagcctctgcagtcagacccctctccttcaaaaatccaacttcagctagcagaactcctgcctcagccacatcctcgtctgtgggggattcggtccagctcgaagtgcgaacatccggctatctccctgaccgtggggggagagaatttccgtgattctcaatgataaaccactccaagcgccatcctttaatgctgtccttgagggggatgtcgagataatcagtcttccttcctcgacgcatctccaagctcgcaccccccaccagctgatgctgtcctccggccatcccagg

SEQ ID NO: 32763 - DNA, 519 bp, Zea Mays
gtaccatgtcaacttctggtggatatggtttcacataccctggacgcatggaataatgtgtttgcatgtattgtgctctcacaccctcaaaaatcattctttgtatcgcctcaagagtgagtgcaggttcagaacgttgttggttatggctggtagaggcatccctttcattattatggttgtggttagccacttgttcacgagccatttgttcacgaagagcaaccaattcatcttccttttgttgaagagtagccataagttgggccatttgctgctcaactgagtggccatcatttgctgcaaggacttgctccacacggcttggcccatcgtcattatttagcggggaacacaagtcgtcgttgcttatggcatttgaatcatctgaacgacagcctaacaaactctgagttatcgggcgatgaccagaaggaatttgcttgcgaggcttctttcttttgaaatgagttgaagcagaggaagactgactagcatcgctatacttttcagtgatcc

SEQ ID NO: 32764 - DNA, 1570 bp, Zea Mays
ttaggacatgttaatgtggcccctcgtcatttgacagctgaagctgaaacattactttcagctactctaatacacgaggttatgcatgttctagggtttgatcctcatgccttcacacattttcgtgatgaaaggaaaaggagacgtggtcaggtactcaacaatgtatttcccacttcagtattgtgatatattttcttttgcttaaaatagaccctaatgctcaaaatgtcagtgcattaccttatttaaatttgggttgcacttcgacctgcttttaatgtttctatgactaaagcgctagaaattcgatgggtgatgtcaactttgctggtttatggaataatcgctttggcaattaccactatatggtggtaatacaagggcagttaagcggataatcctaaaaaatggttagatataatttaggttgcaggtgcttataagttggagtcttgggagttacgtgtagacctcatcggtctgctgtaagctttgtcacatcacatgttgggcaaccagctcacgatgacatttatgttaaaatgtatgccagcaactcaatgattgctgaagaatttgagaacatgacctccatacttgtgtgtgaatatgtactggacaaaaagaataaaattccacacagtgtggcatgcttagcttaacaaccaatattcttctctaatctatgtttatctatttgttccttcaggttactgctcaaagtttggataaaaagcttggaagaatggttactcgtgttgtcctaccacgagttgtcatgcacgcgagacatcattatggagtaagttctaactaaagatgtggaaaaagttaattgagtcattggcgacagttatttattttcatgctctttacttagaaaaccccttcatataaactaaccaatttgttttcatgctctttacttagaaaatcacttcatataaactaaccggtttttgtcttgtactcttgtgctaggcattttcccaaaacttcactgggttagaattggaagacgggggaggccggggcacctcaggtagataacatgcaccctttatggtcttaatttttatttttctttctttccttttttcatttgctgttatatgtatgcatcatgcaagtttccaaacacattcatttgttttgatgtttgatatactattaggttcacattgggagaagaggctcttaatgaatgagatcatgactgggtcagtggatacgagatctgtggtttcaagaatgactttagcattactggaggacagtggatggtatcaagctaattacagcatggctgaacatttagattggggtcagaatcagggaacagagtttgttatatctccttgcaactcatggaaaggggcataccattgcaatacaactcaattatcaggatgcacatataatagggaggcagaaggttactgccctatagtaaactatagtggggacttgcccaagtgggctcaatattttccccaagccaataaaggtatgcccaaatgtagcataaattattatgtttatgacattaaacaggatgctgaattat

SEQ ID NO: 32765 - DNA, 885 bp, Zea Mays
cggcgggacacggatcgggggttagcttgagttggttgggttagggtttgtgctagctattgagattcggtgggttttgctttcttgcggcggctgggggcactgctttagccggggtcgacgcgcgaatcgggatgagttacgctactgcatctttgcgatttcactttctgatcgcggtttaggcttcggatggagtgttggatggtttgatcgagctgatatttgtgggttgttggagatcattgactcgccatctttcggttttgctgggggcgccttctggtttttgaatcttttgacctggaatggatcgctggacatgtagatttaggactatttattcggtctttcctagtttgaggctaagtttcttcgtttttctgtgtggcttcgtggggttagctcgatcatttttgtttggatttgtactcgttgggaatttcatacgattcttgaccttttcctctgctcttcgtcactgaggtttggggttgtagttcatggtaaactcaaaccgaacttcagcaatgcgtgatttatcacttgtaggataccgtcaggtcaaaaaatgtatagaacttgatcaaactctttttccatagtctcatgtagcacaatgagcattccttcctagcttagttacatcaatagtgtgagcaagaggacgcataacagttctggacttgaggattcacttgtttgttagtattgattaaatggatcgtcaccttattgaacgtgcttctattggttcatgcaacctgaaagcagaatctatataattttcttatttcttgtagtaaatagtaccaaactgctggtgtaagtatggcctatttcagtttgatctatcaccgtctggttatagaattaaggaaagac

SEQ ID NO: 32766 - DNA, 368 bp, Zea Mays
gtaatatttaataccatgtaagggatgggccttcgagggcaatgataaacgatttggccatggtggcgtcgtccaccttgaagaagcaactgtgacctagtagctcaagatgtattggttgaattttgatgtcgttgtactttgggtgggtgcttgctctgtaattttgtagccacgggggtagcatggagctgtgatgagagagggcttcgctcatcaaagtagttcagtccttgaaaagcagctggtgcgaaggctggcctctagaaatggtgaatgttttggttagccgtgccagccaactgctggtggtgggcgtcctcgcgctgcatttcagcaatttcttgctccagtgctctggctttttg

SEQ ID NO: 32767 - DNA, 548 bp, Zea Mays
tgcgtgagtatagcgttccacaagaaagttttacctgttcccaccatgtccacatacaaaaaataggcccagccgaggaggagagcgcagattcaatcagcatttcaaaaatgaatcgttggtcagcatttagctgcgagacagcagcaacagcagcatggtcacacaatagtaatggttcaggccttagttcgtcgtctatcagtcggttgccaaacacttcatcaccatgggccgataagattggcacgtcataatcagctatgttggcaccactgttagcaacgtgtttgctagtttcctcgaaagcaacgtgaggagttgttcatgtggagctgtgtagtgcgggttgccaagggcttctttaagtccacgatgtatgtcatcggtaaagtagatccaatatttgtcgagcagagcacgaacattgcaaacaggacaatgaacgacaatggtaatgaacagctgacgaagctgagacgccgaggcagagactaccgcctcatcaaatagaaggttccactcattgtcaccttcgagcaaaccac

SEQ ID NO: 32768 - DNA, 437 bp, Zea Mays
accaaagtgcatatatcaaagtggtagagtaacaaaagttaagcaacttttacatttggagatttccaagttttatggaacaaattggagtaaatttcaaaaaggtcccaaaggcacccaaatgcttaactctgaaaaacagtgatattgggctgattttaggtccttgtatcccttaatctaggaagaatttgccatgggtcacttcaacaaatttgtagagctactatagtagtacaagtttgattaattgattgagagaagtacagaaattggagcaaaatggcctggaagttgggctggcagccatgtgatggtctgaaagttagactgacagtgacattggatcgactttagaaccaaattgtgcttgctcgagtggatgtatgagcaagaaccttataaaaaagttgaagctggtatgatgcgcaacaact

SEQ ID NO: 32769 - DNA, 457 bp, Zea Mays
ctgatacttcctctgatgatgatgaggatctggggtttccgccaccacctcatgtgccacctcgttcccatgatcacaaggctggtggctctagtggtgctcccccagctcatcctccagcgatagaccccgctctagctaccacccttcagtcactcactcagcagcagactcacatggccgcagagcaggcccgtcaggaagtagagcaggccaagcaggtagccatttagtagtagttcttcgagtggatgttgtcgatgttctagactattcaggaccaccaggacactctccagcagcaacttctagcagatagggcaaagcaccaggcttttatgactcatattcttcagcacaccggtgtttcgattcctccaatgcagtctgctccacctctagcactttaggctgttgttgtgccagccattcaattaggaccccagctccactcttt

SEQ ID NO: 32770 - DNA, 430 bp, Zea Mays
tgtaaacaaaaccaatggcataaaaaactctgttcaatctcttttttcctcggcccccgaaggatgtggataatgcattatcttcggctttggaatacgagccaagcaattcatcacttgtaacttcgatacatttcagccagtcgtcatttggttcatcaaatttatctccatatatgaatgtatacttcagtcgaaccaggtcaccttcgccagactcggtgacagtctccttcagcatctcccagttctctacaagcggccatactctgaatgctatatgttcttgaattaagtctcttgtaccaatgaagaagcatacagtaccaaaggccttctgcatgcttcggcgacttcatcgatttcaaccatcggctttcgaaggccgaagcaggaccatatgggacgcataataacatccttaacatcc

SEQ ID NO: 32771 - DNA, 355 bp, Zea Mays
gtacagtatcccgattagactgccagctcggtcagctcgccaccggcgatcagcgtccggattggtgctggtcgtcgggattcgtgctttgcacgcagaatatttctacgagaaggtaaaaatctcacggggggttggataggatcgcggattggagtttatcatcgtgcctatagccgttgcgacgtggccgaactaccggtgtcgtcgtggaagcgccggtgacctcggttgcgccacgccgtagcttgttactatgcggtagtaatcgtggcacccttaggagtattatccttgcgtcgttgcaccggtgaacgccacggttacagccaccgtgttcttccctatctccgac

SEQ ID NO: 32772 - DNA, 274 bp, Zea Mays
gagcaaagtacactttaagtattcagtcggctagatgatttgtttgattagtgccataccgaccactgagagagacggaacgtggcttaagcgttgacgtggatcatgtgttgctcactctaactcctccagctctagtgccacactgatgtgtgtctttttacgcggggttgcttgggtgatttggagggtgtacggccggtggggcccacatgtaggaggcatgtacgaccggtgggggcaggtagatggcagaacataggtcccagggttc

SEQ ID NO: 32773 - DNA, 348 bp, Zea Mays
gagacactcctagagagacgccttctcttgcttaagctctttgacttgctgctctaggctttccacccgagagtttaggtgggtgcagtgggaggagagatcatcgtagtggttgtcgagggtgtggaggtatccggccatgtagacgatggtggggtcatcttctgtggggtctcctcctgacagagcctggagtcttttcctccaggtgggggtatttttgttgctgggtggaaaatatcgaagggggtctcagagatctctcggctgtagttttgacacagctgtttaagggcttttcgggcaacactctggcaagtgtctgggaagcgatgcccgatgaaggtg

SEQ ID NO: 32774 - DNA, 735 bp, Zea Mays
ctggatcctgttagggttaatgtggtgcagccaaatcttgtagtggtgaaggaaccctaccagaaggcgaccttgcttggccacaagcggctccaaaatgccatagttttcagagtaaggcaaataaagatgtcagggaacaaagaaaggggctctatgttataaggcgaacaagaagagccatacgcggagcaactcgaccaacaagaaatggcacctaagatggaaataaggaaacacccctagatacccctcacacagcgccacaaaggttgccatgtgctggatcctgttagggttaaggtggtgcagccaaatcttgtagtggtgaaggaaccctaccagaaggcgaccttgcttggccacaagcggctccaaaatgccatagtttttagagcaaggcaaataaagatgtcagggaacaaagaaaggggctctgtgttaaaaggcgaataagaagccaaacaaagtgatgcccccagacctggaacgaccgacctgctatcacacgatcgcttaacaatatgacccgataagcactaacgactatttaagacactaccgactatatgagcacggttcgattaggattgcgcccggaccctaaggcgtggtaattaccaagtccgattcagacaaaggatgtcaaccacccaaaaccgacacaatgacaagacccaaccactgtgcgatcacgactaggtaaggtagcctgctccactccacccattcatg

SEQ ID NO: 32775 - DNA, 315 bp, Zea Mays
aaaaaatcccgctgtcctagaatccttgtttagcctttgcaatttcgttttcagtttggctttgttcagttcgtgtccgtggtcgagtcgagttgctggtttagggtgtatcttcatcgtagttcaactgcaccttcgccgctatcccatccaccattacccagatcacaagtcaatccaccttgtgtgacttctcgctagccgtcttgtgtgacttctcgccgcgccagccctagataggttgcgagccgccttgagtcttctgcctgcaccgcagcccttccttattcatctggcacaatcgccttgagccgc

SEQ ID NO: 32776 - DNA, 645 bp, Zea Mays
ctgttgtacaacagtaataattaaatttggttcagtttgaaagatggctagacaccatgctaataaaagtttgaacaattattccgattccagaaaaccaagaaaccattcaagcatcttcaaaacacattatcatgattcactagtgaattagtaatcatatattctagtacataccctcttgaaggtcgtattccattcatcaccatctattacacccagagatgataagttgaagctatcactagtgtcacttgaagacgatacttgcagatcatcaatgctgtcactggaggaaaagcataacatcttctcagattcactgtaagcagagctccatagctgttcaggttctttttgattgagtatatctgaacagcacagttgcttttctcgaatcaatgcattacttaacaaagcctgtgaatgtctttccaatgaggaattaaggtgttcatgaaccttatctttacttagcaggtgagctgctcccctaggattcacaattttgtttcttcgattcaaagcactgatacggctttggttctgatgattatcaccatgccgtggtcgacgcagaaaagacattttctcagaaagggaacagtttgtgctggttaaacccatctttggcaaagctgacct

SEQ ID NO: 32777 - DNA, 435 bp, Zea Mays
gatgccggagttggagtaggatgccgagagccggagcgggaagccggaggcgtgagccgaaaactgcagcagctagaggcccagagcagcggagtgccggcgcgacagtggtcctgtgcggcagagagatggatcggcatggctgtggcagatctatgcgacgacacggcgcgacagcgcttgtgtccagtctccctctcgcgacggcacggctcgctcggtaacgacgcgacatggattgatgtgctacgcgctacgcgacttcgctcggttctctctgacctggacttgggggcagccgccactcacctaggagagaaagtgcagaggagaaatgagggcgctaggctttgggagagaggagggcaggcgggccttgccgagcgagtactaaaagcagcatgccttctcacatgaacaatatatgtctcgagt

SEQ ID NO: 32778 - DNA, 380 bp, Zea Mays
ccggcatcgagcctaaccccgccggtatgccgccggtgagctggttatggcttaagttcatctgcgacatgccactgagcgacgcaatgctctgtgggattgccccagacagctggttcgccgacaggtccagctcctgcagaaggggcatcgcagcggtgaaccccggtggtatgtcgccggagaacaagttgttgctggcgtggaaccgcttgagattagtagccgatgcaggaatcggtccggtgaactggttgttgtcgatgctaagcctcgacaggttccagtacagcttctccggcaggctcccgcccaaccgtccattgttctccaacgacacggtcagaagcttcggcaccgtccatagagcggccggcacc

SEQ ID NO: 32779 - DNA, 389 bp, Zea Mays
gtcgatcacgggatcaacggtccgaaagtcatccaccccctaaatagccagcgccacacgatcctgatgccacgacacggattttatgatccgggaactaatagggaccgtactaatcacattgaacggaccagattgatccgaccgaagcggtacccccttctaatccccaccgtagaaacccagatcaacggtccacggtgatcgcctacctctagaccgcacaaacggcggtgatcgagcatggacgcggtggcgccatagtcagctccccccatgctaggccccaatgcccgaatccccgatttgacggacgctatacgtatagaggatgcttgcgaacccgagggaggtacacaccattgatggaaggcggagaggaaagctag

SEQ ID NO: 32780 - DNA, 318 bp, Zea Mays
cggagacagtccgtggagcgacaggacttcatccgtgaggaggtctggaagctgttgcatgctggcttcatcgaagaggttcatcaccccgtatggctggccaacccagtcatcgtgccaaaggcaaacgggaagcttcggatgtgcatcgactacaccagcctgaataaggcatgtccaaaggacccgtatccactgttgtgtatagatcatatcgtagactctacctcggggtgtgaccttttgtccttcttgggcgcctactctggtttccatcaaatccggatggctaaggaggataggaggcataccgctttt

SEQ ID NO: 32781 - DNA, 595 bp, Zea Mays
actagcaccttatcgttccatgtttctatataagctcgacaaaaatgattaagatcattaaacctatagactatgggatctcgacaagggcaaatacgctttatttttcattttggtgactggtcagagaatagctacgctagagaaactagtttcgagttcagagtaaaagttagggtagaagggatccctatccactgttggggtgaggatgttgcagcaagagcattgggtagaagttgtgctattcactttgttcaggagagctccagacgtagagagcgcactaggtcctttgatctgtgggcctggtgctctgatccctgcgatattcctaaggaagtgtggctaactgtcactgagccagatagtgagttaccttctgtggacattcctttaactctggctggttcccatcttgagggcccatctgatctgaaaaggggtcatgtgtacacgctgtgcaaccatattgaggtagttgaggatctcactttcattcgtggtaggggcagtagggtggtcctcccaaccgtttgcctcggcgtgagtttgtatggagttatggtgccccagattctgttggcgagaaaaa

SEQ ID NO: 32782 - DNA, 908 bp, Zea Mays
gtccgtccgatgaacatgagcgtcatcgggaggagaggaatagaaaacaacgagaataccgtgcaagaagaaaggctgaagaaaccaacgaagaaagggaggcgagaaataaaagaatgtgtgattaccgagcgatgaagaaggctgacacaggtacttcctgcccataattaacattgtcctattttttagttactaatactcattcttcctgttgtagtactatactcgcccagacagacgcaggcttatgctactggatcttcgatcgtaatacaaaccaacacaaaggtggcagagccggtaacacctgttgttgcgaggggctctttacaccaactgccaacatcagtggaaccattttcaaccatttctcaaccttcaacctataatcaatccggtaggtattcgttgttgtaattactatttacataatttattaatttgatttccttttgtcttcagcaattactgcatctaccatgggcaacctcataatgaaccgagcgaggtacatcaatatggatgatgcagatagagaaattctactgcataagcgacgtgaatacaaaaagttgagacaatgtgtacaagacgacacgataactggtgagtacaagtgaatcattcaaaaaataaatgtgtctcctcttaaggcttaccatggctttctacgatgccagatactctatcaggtgctccattatcaatccagacacaacaacatattgttcatgacacacctacccatgaacctgaattgagagattatgatactgtattaattgagcctacacaaccaagcctagaaggccatatgggtataatattcgatctgcacattcgttatttacctttacatcattaacacatttctaatgtttggtttacacatcagagcatccaat

SEQ ID NO: 32783 - DNA, 312 bp, Zea Mays
atggccactataccctactaacggagcaatcgacttaagtcggcaatgacttaagacggtgcaacatgctcacgcttactcgacttagggtgaccactataccctactaacagagcaatcggcctaagtcggcaatgatttaagtctgtgcaacatgctcacaactactcgtcataaggcgacctctatgccttaccatttgatcaaatggcataaattaggataagattccaaaactagcatgccacacttacttctgcaatcgttcatgatgactgttgaattctaacaagagaggcaagatgttatagc

SEQ ID NO: 32784 - DNA, 635 bp, Zea Mays
ttgggacattactttcaatcagaataaggaagctctgaatcactatagtaaggacttattagtttatctaagctaattacttgttagaaggtttccgtttttgcaccttaatggtgcaaatatatttttgcatgtcaagttttaactgatgtacttttttcttctgtccaacattagtacaagagtcatcatatccttcccatgagaaagtaccaactgattcctcggtagaagtagagggtacagacgatacaactgcaacaggtcaagttttgaaagcaaggtctttaaaaattcttgagcattcacctgatgatgaagtagaaggagagatggtatacttacaatctaggctgcttgacaatgctgttgttctgaagcacagatatggtaagagtaatttttcgaatgtccttcaatgtttgagtataaagaatgctaaaatctatttgccttcttcattgctcttgttccaagattctcacttctaagcgtgtccatgaaaccgtcccacaaattaagtggtttgattcttcaggaacttcaacacagtgcatgcaacttcccctgagtgcagctgtcatttaattaatttcttgaaatctcttctttcatgcagaaaaattgatagcaaa

SEQ ID NO: 32785 - DNA, 304 bp, Zea Mays
ctcaaatggtctaactagactctggacagtccagcgtgcataggatctcaaatggtctaactagactccggacagtccgacgtgcatcgtcggatagtccgctactagtccacagagtctggagttatacacagaatgtctggccatatatggtgctgcctgggtggtgtgcgcatagctcagtgttggaccggtcgatctggtaaaggatgtcggatggttacgaggtggtcggattgtcagagattaggctcggacggttcggccatgcctagagccagccatgtgttaggtgctagcggtg

SEQ ID NO: 32786 - DNA, 534 bp, Zea Mays
gtccattgcctcggtaagctccgccttatcgcccgcaacacgggacacccctcggttcgccccccttcctccggatcgcctggtccgcgctcacccaggctttctttgcagccgaagagccgctaccgtcgacccaagcccttgccgtgcctcggacaccgttcgtgagccccagaatctctcctcaaggtaaccgacctaacgccgcccctaatttcccctgtcttgcacttactctcctgcgattgctcgctggagtgctcctcggtctgactgcccctccaccgtctagccacctcaccccctttcctgttgtcccgaccctgccatcggattcaccgagtcctccccaacctccctggttacctagaccaccctcgcgcccataggagccccagtctacttcgccgccggttgtgccgtcgcgggcgcgtattgtgctgcctgtggccagccggagaggacaaactccctagcgcccgatcctaaccgtccagtcttgatcggatggcccggatgcgtggataacgattt

SEQ ID NO: 32787 - DNA, 324 bp, Zea Mays
atttgtgcgtgctgtaaaaaaacaacaacatttgtgcccagaattgttcagcgtgtacaattatacgtatataaaatagaataaaaggccaacctagccaatcaaaaaagaaaagagatggtaagtcagagtcagaggaagcgagagagggcgcgagtgtgcactgggcctgttgggcaggtcacgacatgtgccagtagcctatcggctatctatcgcccagcggatcctccaaacgacaaaccaggcccaagtctaggcagctcagcagcctgcgcgggccgcgtcctcgagcaccttcaccgattctgggctggatcgacg

SEQ ID NO: 32788 - DNA, 295 bp, Zea Mays
ccgcacaagattcaagtttgcgatgagctcgagagatgaagagaaagggagaatcgagatgaaatcaacagcgagttagatcgacttcacctcacaccaagggtccttcaaacaattgaaggagatgcgatttcgggtgtgagaggtgaattgaatgctcttgtttgaaggttggtcaaccaagaattcgtggagagggcagaagtgaatgaagagagagagtgtgaggggtatataaaggatcccccaaaagctggcacccgttgggaaaagtggactcaaaaccggttgaacc

SEQ ID NO: 32789 - DNA, 339 bp, Zea Mays
gtctccaacttccttggaggtaacagaggctagagttctgcttggtgagatctgtctgctgaaggagagaggtctgactgccgaagctgtggttgctgactttgttttcaagaacattcagcctttgaaagacaaggcgtatccatcttacttgtacagtggtattactgactctacccgggtcaccaacaagaaaattcctactgaggatctggtgagccgactagacatgatcctgaggggcaagatatcaaatgttggtgctcctgttgcctattctgcttggaatctaccacctcataggtcatttttcaatttcgtgtccaaccctcctactag

SEQ ID NO: 32790 - DNA, 491 bp, Zea Mays
gcgggatcccaaaatcatcatcatcatcatcagggacagctgtgccctgggtctcgaactggtggaatgccgcatcctcagcctgagtgtctggcactggatctggtactaacactaggtcctcaggggctggacgataggatccaaactggaggcatgaggcctcgagggtgccctggaactgaggcggccagatcagctacgcgaagatgcagcaaagatagtgcgcatacggcagctgtcggcgagcacgaagaccatccaacatcgtgtcctcgatctcacagataagaaaataaaccacatcaaactctgaatgtgagatcaaggcaccaagtagccagagctgaatgtgggtggtggcctctctataacccatccagggcagtagtgtccgtctcatcacctgatataagtactttgctgcagaggtgaaatcagctggtgagcgccacgacccatctgtgaaaggcggtctgaacagggccacg

SEQ ID NO: 32791 - DNA, 344 bp, Zea Mays
gctggatcctcaagctatcaagtgcattttcgtgggttatgcctctactcagaaaggatacaagtgttgggatcatattgggaggagactctttgtgaatatggatgtgacattccgtgaggaggaaccatactacacaagaaaggttgacctagaaaaatttctagaggacttctctccagtcaatggaagtgaccgtagagagggggagaatgatagtgaccaggatgattgtgaccaaggtagtgatttagttagtaagacttcaggaggggtgattgttggaggtatggttccaccataaatgagggaagtgataaccacagagattgtgagtaatgatg

SEQ ID NO: 32792 - DNA, 856 bp, Zea Mays
gtttgatcttcttatacgttcatctggtgtggatgtttcaccatttaattaaaatgaattgttgaagttggtaagggttgtgcttagtgcatattaccccttcataaaagagtgtcgttttaagacattgatgctgatgtatggctgcatccaaattcgatgttgtgaaatcgtagtgttgattgcatctatgacttgctttgagcttcattgcatgttgtttcatgcttgttgtcaggttgtgtagcttccttagaccattagtccgaggtagaagttcttgtgttgattaataccaataatggacccatgttttgaatggtggtgctatttggggtaccttggatgttttgctgggagtggtcgaattcgaggacgaattctttttaaggggggtagagtgtaatatcccaaaaaaattattgaccaaaagttgatcttcgatgtgtggatgtgggaaaatgtttgtgggccattggaagttcggagtccgcagatgtgaagatctcatttaaacgatatcatttgagtattcatttgtctaactcggggcatggatgggggatttggttgtgagccgtcggtttcgcatcaagggcatcgggggcatcgcaccctcctcttctcaaaaaccctcgctgcccctgcccttccctcatagcagcagccgctcccctccttccctcatttttgcagcagccgccgcccccccttcttccacattgcagccgctcctctcctccccaaggtgctgcactcacttccctctaaaccctagccacccccatggttcctcctttggtgtgctgcattctccattggtggattggtgggaggaagaagaaagaaagaaaat

SEQ ID NO: 32793 - DNA, 519 bp, Zea Mays
gagaaaaggaaagagggaaacaaacatataccttcgcacttcatatatgactcaagaattttgaaactgttgcattataatagtagagatacagatgttccgcacccactcgtcaatgcgcagtctgggtcgttgtttcccgtatctatctattgacaaaactacaaagacaaatacctgtagctgtagctgctactctactcaagtgggcagcaaatgaaatgtaaaccctcgtacctgacgcgcgcggcgctatagatacgggcggcgcacacttcgtccttgtttcttctttctcaggtcgtcttcttcgtcaggatgtccccagccggccgggcagccccgcccacgctgccctcgatgatgtgtgcgctgcttcagttagcaggacacacacgcccgatcgattaggaatctgcccacacaaacacacacattttctctttggttctccaggcgcacgccggtgccatgcctaccttctttctctctcacctcattgtgccagtggcgttgcag

SEQ ID NO: 32794 - DNA, 429 bp, Zea Mays
ttggagagtgcgccggagacaacacttggtggttggaccagagttgaatcaaggaaggcgaagaagcgtcgccttcgtgcactgcgggcacgtcgcccggtgccaaatgacttgaaaggtcgctgtttcaattgcttcgcggataatcacctcgctgctttctgccaccttgagccaaggtgttttcgttgcaagacagttggtcatcgctcctactactgccccgggcctgtgaaagctgacaggaaggttcctgtacatcgacggctgttgagaggaacggtttggaacagactttcgacagttgagccaacgatcgctgatcgtgttccgcagtatcagttgcctcgggtcccggtctggaagagacttcagccttctgtgcccctttcatgcaagaagaaggtctgtatctggcgtagaatctcc

SEQ ID NO: 32795 - DNA, 341 bp, Zea Mays
tagttgtctccgaaggtcttcaacctcagccttttgagcttcggcttgagcattgtatttagtctcgtcttcttttattttatctaccaatgaattcaaaatcttgtctttctctagaccttcatttcttagctcaatcacctcggcccgaaggttgttaagagctattgcacagctttcgtcctcggcgcttttctgtgccctcaaagcattactaagaattaagccctgcaaagaagaagaaagacttgagcatggcaataaactacttcattttctagcttcaaagtcaacttttatacctttatactgttgtacgcgaggctatcagcaagatcatc

SEQ ID NO: 32796 - DNA, 367 bp, Zea Mays
tattctgctacgaatcaaagagctagtccaattacatcacatcaaggtgcaattatcagaaaattagcaggttagttacacgtaccagatgacctagaaaattttggaagtgcagtatgtggaaatccccgagctgtgtggctcggacccctgaatctgaggattagcgaccatgcagccagacagcaaataatcaatgctataacagtagacaaaacaacaatagcaatgaggctgccattcacttttctcttgggacttcttacatcgaccccaaggggcttcacggcccttgcatttctgttgttgccaaacgccccatccccaacaccttgccctgaaggtggtgaaggaggaagccctgcac

SEQ ID NO: 32797 - DNA, 1759 bp, Zea Mays
tttgcgaccaagaaaccaaggtggaggaccatcgctccctttgttgccaggcccttccggggttgtccaagatccatttgcatcgtccacgtttggaagcagcgatggcttctctacatcctttgactgagctgctcatggtatgaaactttacaattttccatcgatttacatgtactgttaaattttcatgttactgtgttagtctgtaagttaagcgtgtctgatcaaatttgaattagcatatgttgtgatttgaggagagtttgtagttacaaaacatgaatgtaataggataatagctattgcagtgttgtcgcattaatttgtttttgtccatgtcagttgtttataacttgattagaattgtgatggtatgttatttggttgtccctcatttacattcttgttgatggtgaattctggcaatgcgaaattgttaattcttacctttacacatacaattttggttcctgaattgtctttgtttctgaattttgtgtttctgaattgtggtttctgaatttttttctgcttatctttatccgtgcatggtatgaattctggtttctgaattgtctgtgtttcctagtgcatgacacttgcaaagagatggacatcccccatctagagtctcattaatctgtccaaagtagaatgttaggactatcaaggtgtagcagcatgtagtaagattatttactaaccaagatatgcatattattaaagggtctgattgattcctgaagggagctttatacagactctacagtggttatatcatgctattccaattgaatttaccatgtagcatgtaactactgaacagtacacattagttgtagcacttgttacattcttttcttatgatgtttatgttcaagtcatatcaactggatggttctctgttagctacttcattatatcccatgatattgagtgccaaatggctattgcgcattcacttagttgtaccacttgtatgttgcttcattcaaaaacttgttattatgttgacttgtgaccgaactttgatttatgcactgaacacctaacctatatctagcttatgtacccttttttagatgtagttctaggcaatggatacttttcaaacttgactatggatgacaatagtcaaggggatgttcatgctaataagcaacacatgtcctgatattcagtctcagtcaatgcaagctggagcaacagcccccacgacgaggccaaatcataagagataaaaaaaaatcagtggtcaggatgatgaagtttaggtgttagcttggttatatattagtttagatcatgtggttggcaaatataaaaaagtaggaaggtattggtctcgtatctacgagtacttaaatgaacataaaccatgtcaatcacagcgtacctttaattctcttatgcaccgatgggagacaattcagaaatgtgttaacaagttttgtggttgtttatcaaggattgagttaagacgacagagtggtagtacaatgcaagacatggtaataactaatcattatgaagtatcatatttgtagtattttttacttgttcctaacatatgcaaaactctggacaggttgcacaggcatgttcgttgtgcaaaactctggacaggttgcaaaactctggacaggatgcaaaatcactatttgctgtcacggctaccagtttgcatttgtgacttcggttcctgtaatggtgggcgagagaaagtaggtgtcagtaactgtgtggtaattattag

SEQ ID NO: 32798 - DNA, 600 bp, Zea Mays
tcggtagcttgtcacatagaaatcacatagaaatcaaaggaaaacacccctgaatctgctccgtcagatagactaaagaagatcctgatggtacaatgaacgaaaagatcttcaggtgcagtgaatgtgccgccagtgaactccgcgttgtgatcctcgctggcgtcgcgattcgtgcgctctgagtgcagatatcagccggcggtgaaaagatcttgactgcaaatgaggtcgtgagatggccgccatgcccacttgcctagcggccggtccagatgacttcaccggagtttgctgcttgccgcccggatgccacatactaagaagcattaccacgtcacagtaaactgccttaggtagcttgttcatcgcttgagacactgcccaggtgaaagccatgacagctcgcaccagtgaacttcccctctctccggcctctagcgcgccttcttcaaattggacgccaccgtcgatagattctataaattgctgccctagtgagctccgctaggttattacgcacccagtgaaccagccctcgcctccaatcgttcaccatagctcctcaatttggaatttcccccaaatcgggttttccac

SEQ ID NO: 32799 - DNA, 956 bp, Zea Mays
atcggttgggatttagggtttcggaatacagtttggattctgcgcactggaggctgctccccagtgtatctctgcttctgctgctcgattttgattagagctggggtcgagtcacgtccctcacctgaaaattttaatccatttgacattcatacgatcgacccctaacaaagagcatcatagattaattagattttagttggattgccctgtttagggcaaggcatgttgatcaatagccacgttctaaattgacttcgtctcatgaactgcaggagtgacactgagactgtgagaggtattccatgtaatgccataatttgtgatggcatttttcagcaactccgggagcaaggccgattcagaagggtacaacttgaatgaaaaggccgatgatgatggcatacacgagtcaatccgggatgggaatgatggcctgaactctaggcagtggaacttaaatgagaaagcagaggatgcttaccacagcgaagcagagcaatatgagtctggccagtcaggtttgtacgcatcaaggcagcatgttcagagaggaggcagatcgtctggtggtccatggggcacaaattttctgaaggattccaggtccaaacagacggccaaggaagttgcatcaaatagcggtagaggaatggatgctgctaactcgcatgatgacatggatggtagcagagaggatgatgaactgaatagagcaaatggtgaggtgcctgctgaggaaatgctctcagatgactattacgagcaggacggagaggatcagattgaatcgttgcatcgtggcgggatgaagcagtcaagctgttccacttctggtggagcagcaaagtctggctcacgacaaatgaagaagatgtcaaagtacaatgcttatgataacgatgagtataatgatgagaatgatgatgacagcgatgcagatggtatattgaaac

SEQ ID NO: 32800 - DNA, 291 bp, Zea Mays
cgagagcaggaggtgacccagaaggagaaagggctggtcaagaagaaggaacacttggaccaaagggaggaggtcatcacggtgttccataaaaagctgaaagcctataatatgatgctggagaaacagcaggatgagcaggctgcgactgaggtgaagatgcagaagctacaacaggaacttgacgacaaggctagcaacattgctcgcgccgaggaaagcctcaaggcgaaggatgcctccctggagaaacaagctcctgatctcgcctggcaggagaaggacctcgcc

SEQ ID NO: 32801 - DNA, 420 bp, Zea Mays
ccgcacccgagtcccgcgccgcgccgaagcccatgcccagccacgccgatcgttccctcggcgttacgactgcagctcgaccgtttcctctccccttctcagtggcagtttctaccatcaatgcttgcagccgtttcttcgatggagtaatgtggttcttcaattcagcaatgaagcgcataaatctggctgaacccctctcctcccctctctaaaatgcagcagcctctcccttctcccaccatcacgtccgccttcaatatccgtttctgacgactgctctgcttcctgcgaccagcgcccctcgccctcctccttcggctataaaaactacacccaatagagtcctcctccctcaactgctcgccctcttctcgtgcactcgcccctctgtctgctcctcaatgtacaacctctcac

SEQ ID NO: 32802 - DNA, 339 bp, Zea Mays
gacaaaggaagatggatttcatccaattcataagtacctgtgtgccagttgatagtacttttcattactttccagataatgctgcgaagaggaaattacacttgagtaaatatcaaacatgaaagaatcagaaatctatataccagaaaactatgtaacctgtggctggtagctctcatcttcaatgtcgtttgcagtgtcactcttatcagtaacaaaagatgagcggccatctgtggactttgcactctgtaatttgttcccaagtttctgaagatatttctcagtttcacgcaatagttgcttgacacgatcagattttgcatcctacaatgtagc

SEQ ID NO: 32803 - DNA, 383 bp, Zea Mays
tcttgggtatggattggttatctcagtatcacgcagttatatcctgtttttggaagacagtgttattgcaggcgccgtcgggtagggaggtggtattcttgggaagttccccaaagtacacgttatccttgttggcgcaattgcttccggatcgccggtcaaggaagtcgggaatctttttctccatggtggtggagggtgaggcttccttgtgggtgcaggacatccgtgtggtgtgtgactttgctaacgtgtttccggcagaacttccaggcattcctccggagcgcgatgcaacttttgagatcaagctgataccgagtacgcagcctattcataacgccctgtatcggatggccccaaaggagcaggttgaatcgaag

SEQ ID NO: 32804 - DNA, 290 bp, Zea Mays
gactgaaggggatgagcctccaaagtcagccagactcggcaacgaggtacccgatgctcctcatacaattgcaccgtgtacaaagggggcgtagggtaaccggcggagttaagcacttcccacaagatgaaaggaaagccatcatgagaaaggaagtcagagctaaaacgagtgtctcctccgatggcgggggtgggtgaattcatctgcaaaagggtatcaaaggtaaagattatggtggaaggaagaaaaataaaagagcctggatggttttaaaaagaagcgggcta

SEQ ID NO: 32805 - DNA, 828 bp, Zea Mays
aacacgctggtgtctggatttgcaagaagtggtgacctcgttgctgctctgcatctgtttgacgagatgcggcaaagaggtgtcgacccgggagtcaattcttggaattgcatcatctcgggctgtgtgcagaatgcactgtatgaagaggctttggaggtttttctggagatgtgtgagagtgagaggcctgatgcggtgactgtggctagtattctccctgcttgtgctggcttgcaggcactaggcattggaaagcagctgcattcttatgttttgcggtgtggaatcaagatcaatgtgtatgttggagcatctttgattagcttgtactctgagtgcggagaatttgatgatgcgagagttgtcttttccaccattcaggagaagaatgtcaatgtgtggaatgagttagttcaatcatataccagagaggggaggatggacaaagcttgggatgtttttgacttgatgcaggaggatggattgaagcctgacattgtcacctataacactttaattgctgcatatgctaaagtgggtcagaatgaacaaacatatgaactgttttcacgcatggctgacgtcggcttaaagcctaatgtggtctcaatgaatgcattgatttgtggtttgcatcaacatggcctttacacagatgcacttgaagctttcagatacatgcagcgttccagtgatggaaaagcaaagggttggacatttcttgataatcgtggcccaattcaaccaactggcacaaccattactggtctcctctcattattggcagacctcaagttagatcgtcttgggaaggaagtacactgc

SEQ ID NO: 32806 - DNA, 332 bp, Zea Mays
actgaatccagcgaaggtgagctagttcgattgaagtataccttcagattcagagaccgatttgacgaaccaaatggtgactggttgaaatgcattgaggctactagagacgagttgcttggggcatataccagagccaaggatgatgccttgtcctcagccttcgggggtcggggcaagaaaagattgaacaaggtttttgatgcaattggcttcatatatcctgattactgctaccccttgagaaggcaaggaaaaaggaggaaaattgctgcttcagcctccactgctgtaccgaagggcaagaaaataaaggttttgacccaccggcc

SEQ ID NO: 32807 - DNA, 450 bp, Zea Mays
attggcttcgctaacctttactgtatctaccaaggaaagcagaattttgtccttttctattgcttcattcctcaatctgataacctccgactgaaggttcccaagggctatttggcagctttcgtcttcagcattcttttgtgcccttaaagcattgttcaagattaagccctacaaaaaagaggagggtcagcactttggtataagatacaaaaataatctgtttgtaagtcagaacatttttaccctttagactgttacaagggaggctatatgcaaggtcatcctttgacattgcagagaggccaagctcgagcttttgaaaccccatgttccttgccgtctcccggcaaacagataactccttgttgtccggaaagcagtacagaaagtcatcttcatcagtgccattgtacaccaaggatccttttgggtactttaattccttgg

SEQ ID NO: 32808 - DNA, 464 bp, Zea Mays
gctcgctgaagatcgagcatgcgaggatcagcagcaagtggttgcaccacggtcttgtcacgctcctagaagcgaggtggaggaataggtggagtggaagcgtgagcgggagcagtggaagcaggagtggtggaggtggtggtagcagtgggagtggtggacggctcgagagcgacaggagctggtgaagtgggaggtagagtggagactaggtcagaaggagtggaacgagcagtggaggagtgactccaagacgcgagacgacggacttggaaggcaatctgattagaagatatccgcagctgacctccccgctctgcctgatctgctgctgctgctgcaatcgctgcacgagtggctctgtcgagacgtctcttctttttgcccccttggtgctcaaggtagacagtcttcaccctgacctgtctgaaggagcgaggagggtcctggtcatctcctccccc

SEQ ID NO: 32809 - DNA, 428 bp, Zea Mays
ctttggttcagtttttgctttccaaatggaacagattttcattgtgcagaagtttgttgagaactgaatgttatatgcgttgcttgcactatactgtccatcagtcgtccatctccaagagatggtatcctccaagttattaagctcgtgcatgttactgatagcctgccaaagggttacaaagtcttttatttcgtcttctcgtatgcatggcagacataactgaatccagctattggttctaagagcatgaaaaactgagatgtttttcttccttgctttcttgaacagatttggtgctatattcttaggcgcctgaccatggatccaactagatttccaaaaacttgcggttctcccattacccacgttgaccaccgtggatgcattgaagagttcttcatctatttgtcgcatggtgattgcag

SEQ ID NO: 32810 - DNA, 300 bp, Zea Mays
attgacgttgccatcaacctcgagtagtggcgaatccacctccaagaagtgccaccaacaaaagacggttaaatcaaactatattcgatcctctttcaattactctcgcattcctcacaatacgactactcccttactatcggctccacttggaaaactaccacattttgatggtgaagactattcttggcggagccacaaagtgaaggtgttcttgttgaattaggatgaagataccgaatagtgacgactactactacaatccagtggaggcgaagcaaatcatacactgcaactcgc

SEQ ID NO: 32811 - DNA, 357 bp, Zea Mays
gcgttttgggatcgaagatgggaggtgcgcgactgcatcttggggaccgggttgccgagctcctggtcgttcctctgtggtccgatgaccaggactgggattgcatagatagagaggaaatttagggttagggatttcggaaaacttgagaaagagatggagcgaacaataggaggggaacaagctgcagctcaccactgtgtcattggctgccttcctccgtggtccggccgcggggcgcagactggggcgccctccaccgtgtccgttgtgctcccccgtggcaaggaagttggcgcccctccactgcgtgtagggagcatcgtggaggcccaaggcggacctccgtgcggcaat

SEQ ID NO: 32812 - DNA, 423 bp, Zea Mays
ccctgccagcatcgactagagaggaaaaccagcctcatgcataatcgtggccatgtgtcaacctttcattggcctttctggtctgtgggatcttctgtggccgcaaccatgtaaccctctgtgtgacctatttctcgtccaatagaatcatgccacgtcgcactaaacccgcggtttattaattatgtgttaccttttgtgttagacgtccgaattattcggcttcaactccattataaggtcgtacgcctgttaaaaacattattctatcgcaacacatgtttctgtttagttaataattatttgttcgacgcttataaaaataacaatataaataaaactaatttataatttacgctttgtaaacatgtgttaatgtgattaacgtcaacttaaatgttttgatttaatacttatttaatg

SEQ ID NO: 32813 - DNA, 531 bp, Zea Mays
tttgtgctatgtcggcaccgctagtgaggagacttgtttgcttattcaatcttccctcatggagagagtgtgtgcggctcagcagcaggattgtttattgcaggaagctcgaaagagggttggcgatggtaaatcccgggagttctccattaatgagaatgatttggttcgtttcaggggtcgcctttgtgtgcctcagaataagaggtgaagatggatatcttgagagaagctcataaaacgccttacaccgttcaccctggcgaaaccaaaatataccgagatctgaagcaaaacttctggtggaagcggatgaaggttgacgtttctaagtatgtggccgcctgtgaagtatgtcagcgcgtgaaggtcgagcataagaggtctgttggtttgttgaagccattggaaattccggagtggaagtgggagcatatcaccatggattttgtggtgggcttacctcgttctcctcggggcagggatgccatttgggtggtagtggatcgcttgactaagtatgcacacttt

SEQ ID NO: 32814 - DNA, 394 bp, Zea Mays
caaacagatcttggccgccgagattcgatccgaaggccggaacgcatgactcatctagatctaattgtggcggttgattcctatccccacggctcagacctattcaagccgcaaaactaactgtggtcacaggttccaaatccaacggccaagctctattcttcttcctcagtccgagctgggtgacgccttgccccaaccgaggcggcccctgaccgagcacctgaccacagatgccccgatgaccactggtgcacggaacccaattgttgtgatggcccgagcactagcctaaccacagtcgtagacccaggaaacggagacagtgccaacacaggcggaaaagcactcaccgatgacaagccggcaaagacgccgaccacagctcgccgcg

SEQ ID NO: 32815 - DNA, 353 bp, Zea Mays
atccttcacactcacccaccatacccacacacttgaaaaaccacacaacgtcatccttgctaacgctctaggatgtgctgctctacaccacctctcgtgactacactagagccacacgtacgctgacatgtccctagcatgttggtctgccaaccgcttgaatgcatcaaattcagcactagtggtgccatctagaactgaatccgtagctgcgacaggcacagatggtactcatgtgctagcttcacaaccaacagcatcgggcccaagaccaatgaagtgcccaccgatgccttgcctgtgatgccaccatgcaccttcttgaaccgcacccacatccgcctaaagtcaca

SEQ ID NO: 32816 - DNA, 368 bp, Zea Mays
atcggatctcgccgtgcaccgccgctgattccacccaccgctccgcacgcatttgcaccccaactcctcacagatctccccagatctacgcgctccacgcactgccattttcccgctccgattcttcccccactccagtctacgccgcgcttaatcgcccgcccgctgtttcacttccgttgaccgattcccgctcgcatttccacaccctgcgcttggttcggaattggtctcgatggagtaaagtccttgcaatggcggaagacgcgcacgagttgttcgattcctccccgccgcgggaggagggctccgacgagcagctcgcggccgtaccgctcggcgacgaggcgggcgtcgtcgaggaggag

SEQ ID NO: 32817 - DNA, 310 bp, Zea Mays
acgagcctggtcattagtagtaagacggtgaagacccaccatccacatgttccttggaagagcattttttactgagtgattcttcctccttgcaagcctgaagcagctaggggctatgtccataggtgttgtaccattaatccacctatccttccagaaatttatcctttccccatttcctagagtgagaactgtacatggccggaagagtgccatttcagcttcggtggcggcatgaggtaaagtggcctatggtttgcatgtgtcagcccatttataccaaagccatcgaagcctgagtgctctgttg

SEQ ID NO: 32818 - DNA, 414 bp, Zea Mays
gaagctgtctcaacatcatgtacattgagacctttgatgttttggacagtgcgtgctcagcgttgtgccctagctcgatgctattccatggcgtcatcctaagccatcaggtctatccccttgggtggatcaccctccccgtcacattcagggacctcaccaacttccgcaccgaacaactacagttcgaggtggtggatttcttaggatgctacaacgctatcctcgggagaccatgctatgccaagttcatggttgtgcccaactacacgaacttgatgttgaagatgcctgggccgcgtagagtcatcacagccacctctttgtttaaggcagtgtacgcctgcgcgcgtgccagctccgagctagtcccgacgctcatcaaatcccagggaggcgacagtctgggcacca

SEQ ID NO: 32819 - DNA, 492 bp, Zea Mays
gtttttcggaccattttcacgaaccagcatccattttcacgctgttaaggctggctccaataacggatagccatattgcccagccattttcctgtttacctacactctgcattttacatggacagcgataggcgtctagtttgcaacaaggaagccaaattggctgtgaccgatggcccatttgctttcgcgccaaatcaccgaagcatcctgctcgtcgattccctcacagggtcccagctgacggttgtcagagggaaatgcctagcgtgtcaatgccagccaatttgactcttctctccttccatgtattttgcccgaccgagatagctgccttattggaggcgctacagtcctagttgagcaactaaactagctttgcctggtctgatagctgggcctcaggcctcagccagcctaaggagaccaacccgatcgagtataccgcgctgggtgcaagctgatgccaatctctcacgatatatggcccgt

SEQ ID NO: 32820 - DNA, 284 bp, Zea Mays
caaaaacatatttgtctcaccttttcaagcaaacacaaatcgagcctgtgacttgaaccatttcaccatatatgagctcaactcatggcttcaagtcaccttactgatgcatcaacacaatataactcttcaatgctgattgattcatcgacttagtgcaagtactctcttcttcaccttagccatggtacctcgatccataagtcgtcgcttggccttcaccttcacttagtccctcgaagccctttccttgctatcttcaccctatcaagccattcttgtgt

SEQ ID NO: 32821 - DNA, 406 bp, Zea Mays
cttctagaggccacatagctgcatgggctgatgacgtgcagtgaggaggattttctagaaatgatctgtattctggataaaagggagatgaaaatggttgataaatcaaagaagaagctagtgcgtggaggggataaagcttacggtacaaaatgcttgaacggcggtgagatagtaaaagaggattttccctttattattaaagataaagaaacacatttttacacgtattttgattttaggattgagtttgagaggtttaaatggaccaaattaaaatgctacacaggctaagatacgattttccacatctatgaatagagaagcaattattggggtttggttctgagtaccctggtctcgtttattttgtatcaaaaaccttagtcatcgaattctaataaat

SEQ ID NO: 32822 - DNA, 320 bp, Zea Mays
ggtcgtcattagagcggaatccacggaattaaattatgacacggggggagatgatgggggcataattgcgatgctacggttctctccaccagtgattagcagcagctggttcgtcccagtttacaccgttacagctgatttggtgatccgggatctcgggagaattggtgggtattgaggggaaactggccacgccattccgtcatccatgttgcaatttgacgacccatgctggttcacggtgaaaacagagctataatggccgtcattagagcggaatccacgaaattaaattatgacacggggggagatgatggggg

SEQ ID NO: 32823 - DNA, 543 bp, Zea Mays
taacgtaatcaccaaggtaagatccagagatgagaagggtaaaggaaataagaaacaaaagcacaacaaagtatggggttacaaactcgcgggccaaagaagaggatacgaccaagagaaagaagatatgatacggaagaggggcaattttaaagggcaggtatggacaaacatcaacgtaggatatacaggtgtcaagggtatatatgataataattaaaagcataacctaggatatagttgaggcaagaattgtgaagcgacgaagtggagaaaacaatcaagggtaagataggtaaggttccaacagaagggttgatgtaaagattccttaccgagggaagttataagaaagcaacgagatcaccaatcatgtgcgagatagaatgatcgttcatggatcgttaagaaacaagggtggtcaagggcatgttaactgaaatgtcttgaacagtcattggggtatgcaagattccaatggtacgaacataccaagaccaagagagtagaaattgccaaacgatagcgacttaacaatagaat

SEQ ID NO: 32824 - DNA, 816 bp, Zea Mays
attaaatcgaaccgttattcattcatagtcgtcggatgcagatccgatggtcccgtgatgtcaatccctcgatccaactgaggccatcggatagacacccagcgatcaggaatatatcatcacaacgctactttagttcaaatcgtggccatacactggtgaatcaacggcagacgagctaccggggctgggatcatatccacaccattggctacccatcccacgcgtgcgctatcatcactcttccctcgcacacaccaccaggcaaaagcgggcagagacactagcaccgcggcggtgccatgactggaacgacagcgagcccgcccgggaatgctatttcctaatcgaactaggattataccaaattgggggcatgaggaagctacaggacaggcactcaccgggattcacaaggtaatttctcatggccacggcgcgctgcggattgttgatgaagttgaacaacggcgagccattcggcgagttctgaccgaacacacggccgggaagcaacttgccataactccataccttcatgcgatgcttccagaccacacgcagaggaccatggcttcatagattgagaattgagattgaggtcaagctacggcggcggcggtgctcaccgcccaaccctggtcgcagaggaaatcacgtgcgcatccacgtgctcccgcaaaccgccccaccgatttcaatccaagcccaagcggtagcaccgacacatcatgtgtgaggcggccgccatggcatcaaccattgcttgcaaggctatgctccgtggaggcactcccttacccgctcactccccgc

SEQ ID NO: 32825 - DNA, 1625 bp, Zea Mays
attcagccaaaaagcagattaatcaagtagccaaggaggaaacaaaaggcactaaccagcatttgccatctccaaatcatatacccgctgctgaagcagcactagattccaatgtgttagagacagagctcttgccgggacagaggcaccctgcgatctcagctgaccagccatctcgtcaaccaaagcgtgacattaaaaacaaatgagtgcaaagacagtatttcacccggagtatagtcagatcgggaaaagctaaattacctggagattggagaagaacgaaggaagccccaaatcatgagaagtcagttggtgacttgacggaggattatcaaccgaggcaatctgcagagcatcattggggaccaactcagcatcaccagcagaaatcaaaactctagcatcaggtgcgctggcctctaaggcgacttcctgacccaaggcacgtgctgctgccatacaatcagaatgtggaggagaagacccgacgtggacatccatggaagtatgagaaggggaacccgctcggacaccctcgggggctgggtcatagctcgcgcttcccacccgagccggatcattaccgacaacaccgtcgggggctgggtaaacgctggcgccatccttggggaccgggttctctgcagcagccacctctaaggctaaaggattttcagccacttccatgggaacggagcaatctagatcagcctcttgactcttaagatcgtgctccaaggtcgatgaggcacgagacgctgctcgggataattctaattcgacatcaggcatatcaatgcaaacgtccatcataccaccatatgtcggctcggacagcagatcttcagggaccacatcctcaagagcctggtcaaaatttgccagagacaattcttgcagaccaacgagagcagacaaagctggagaaggaatatcactgctctctccactgactatataacgccgactgtttttccgaattaaggggatttcctcctcttcttcctcatcctcatcaataatacgaacaacacacccattgggatcagctctggccggattgcacccattgggtttagcatcatcaaggtcacacccattggggtcagcatcagccgggtcacacccattgggatcagctccagtaaaaatctccactggcacttcctcggcagcaggagcagaagggtcggcatcctgattcaagcatgacactcgccgaagccgtctctttttctttttcttcccctcagcaggagaaattggatgactggcctggcgaggatgcttcgggcgagtgctatcagatctttgagtgtccaaggtttttccaggctctgggatagttgctacagctagtgtttcagtagggaccgaatcagaggaatcctcagccaacatgtccagcatagcacttatttctgcatcgctcgggtttataggcatctcaaaatgaacctgcctctcatcattggggatttcaccaagcgaaacaaccaaagcctcaacctcttcgagagagggtcgtactctaagacccaaaccattgtcaccagcaggaggatttgacacaaaactgatgaaagtcttgggaggaggcagattccaggcagaatacgcaa

SEQ ID NO: 32826 - DNA, 402 bp, Zea Mays
ttcgttgagacgaccagacgtccaccatgcgaccggccgaccaccatacgtcacttgtggagtatgcctaaaagaggggatatgctgctgatttttttttgaaattgtgtttttagttctataatgaacttgtggttagtaacttgaattgtatgtgtccattttgtcaatatttggcttttcatcaagacggactatctgactaatatccgttatctatccgggtaatatccgatatacgtttcttacccgccctatttattacccgatcccgtcctgtatccgtcccggattttaactatccgtatccgatcctgtatccaagaaaattgtattagggtaggatatgagatgacctagtatccgtctgtatccgtcccgttttcacccctagggttttcc

SEQ ID NO: 32827 - DNA, 1519 bp, Zea Mays
acgacggagccaacgggtgacgcggcccaacgtccggctcttgggccgtgagtgggtgaagtgattaggcccagacctgtgatacggagggggggagaatatttgcggcagcggagaggaggagaggacagactggcatttggaacctgaacccggctgcgtccggcgaaccgacggtgtgccgtcgtgtaaccatcgtacctgctacctccataacttcgagagaggatccgagcgccgggagcggtgctcaactcattcccaccaccgtgttctaacatttggtattcagagccttcgatcccgagctggagttcccgaagcacgagtacttcaccaggttgcaagccaaggcaggggatatggcgcctacgcgaatcgaagacccgatgatgcaactcatggtcaaaatcgatgaaggtaacaaggagatgcagaagaggatggaccagttgcagaccacgatgactggtatggaggtcaccatgaaaggagtagtaagcgatcaaatcggatttcagaagtggaaaccagagatggaaacgagggtgaaggatctaacggagacattgaaggatgtccagatgaaggtagatcaagtcgctctgaatataccagtgattcagtctgctggtggggttcagatcgagaaggggatgcctgcttccgctcatctggaagcatcggcgtcagggacggcgcccggaccaaatcgccatcactttgctgatatacaccggaggccgggtgttacggagaatctccgcacacccgctccggtcgaaggtacgcaacaacctgctggatactttccgtctttcattgattgggggtctgtaggaagaaattctatagccaactggtctcaggtgtcgggtccggccattcctaacatgaattttccagtgttcgatggaactaatcctaaactgtggaagcatagatgtgagacttatttcgagttctatgcagtacctgtcgaggtgtgggttaggatggctaccatgtatttcgagggatctgcagtgttctgggttcagtccatggagagtaggattagggaaatgaattgggaatctctgtgtgctgcccttagtgctaggtttggccgagaccagcataatatgcttatccgtcagttttatcacatccaccaaactgcctcagtagctgaatatgtagagaattttgatcaactgatgcaccaattgctagctcatgagaatagtctaactgcaaatatgataactgcacgatttgttgatgggttaaaagatgagataaaaactgttgttaccattcagcgaccgtccgatttggatactgcttgttcccttgcattattgcaggaagacgtgctgctgcacatgggtcgcagagaattcagaagaccagagttcagcagtgtgtctagaacaccagtcaaagcagttccaatgcctttactgttgccaccggttgttgcaactcggattggtggtaccaccgaagaccggaaaagcagtggaaggtaccagag

SEQ ID NO: 32828 - DNA, 410 bp, Zea Mays
tggagggcgagcagcactgcagcagacgcgatcggaagaaaaggcgtgcggcgtggaggaaggaattgaagtcaaatcttttcagcgtacgtaggaagaggagaggaggacccggccagccacgaccacgagtcgaaagaggttgggacgtcgtcggccctgcatgcagatgcagcccgccatggcgccatgcatggtcgatggatcaatagggtcatggatggatggacgcgcctgcatgctctgctgatagaacgaccgaccgactgaagtgacctctcttggaaagcccttgatgcaaccaccaccgtttaccctcttcactagctgcctacttttgtttcctactactagcttttacctggcccggggggcccccacggatcgatatccgagcccccccagctcgg

SEQ ID NO: 32829 - DNA, 558 bp, Zea Mays
gccagggcaatctatcaaaattcctccatattgataatggatgaagcaacttctgctttggatatcagatctgagctgctactgaaagaagcgcttagtaatctaattgcaaaacactcagtaactgtaagttcttgtatgtgtggtcaggccattcctgcatcggcgtgctttccgatatcaattattgctaagtaacttcttcccttgctgtgactgaatacaggttatcatcattgctcatcgacaggaaatggtcctaatggctgacaggattatttcactagagcgcggtgaattgcgagagatgtcgaaacaggcatttttgtctcaagatggtcacttcagcttaccaaggatcaggagtccaaattagggtgtccaaactagggtgagacttggcatgggtaatggtagtttctctcgtgaagatttgttcatatatttggccatggaagaaaacgattgatagaatcacatttcttgcctgagccctgctcagaactttggcttcttggaaccttgtttcatcccaacagcaacaaatctgtcaacatt

SEQ ID NO: 32830 - DNA, 709 bp, Zea Mays
aacaaatgcatcctggtagattcttctattccagtctaactgctttgcaaggaaaatgttccatgtggtcacggtgaaggggtgaaaaggaagaaaatcaatctggatttgcctgctttctacaagctgtcgagttgcttcagttgttcgatctgactcttgcccgggctgaacttgtcagctttcatcctctctctgaacccatagggtgtaacctgggcactggcataagctgcaagtaacaaattatagggcagagttcttgcagggaagttggtctgctttaccctatcaaatatcttctccgcgttatggatatcgcccttttctgcgtatgcctttagtaagattacatatgagctgaaaaggggatgtctgtcaggattatcttctgtgacattcatcagaaacgagtcggcctttgacaactcgcctaaattcacataaagcttgacaactgcatcccaggtaagagggccgattgtacacccatccaaacacatcctttctataaactttttgcttttgtccagaagtttattttccgcatacacctccaacatagcattaaagtacttggaagtgagtttcggaaacgtctttaccaacacgtcaaagatctcttccgctctttcgatatgtccaagtttactccatgccttaattgcagccaaaaagtcctccaactttggttcagcgcacaagttcc

SEQ ID NO: 32831 - DNA, 472 bp, Zea Mays
ggatggtgtaggaagtacagaggtattgcaagtgtcagcggttcagctgatcaggtggatgaagggaaatgaagtgtgggcttttgtgatgctcgaagcaatacaggaggaaggtgctgaaaaggaacaggagccgctgaggcagatacttaaggagtttgaagatgtgtttgttgtgcccactggactgcctccggttagaatgtatgaccatcatataccattgcttccagggtctattccggtgaattccaggccttataggtattcacctttccacaagacagaaattgaaaggcaagtgacagagttattaactgcagggctgatagtacccaatgccagtccatttgcatctcctgtattactggttcagaagaaagatggcagctggaggttttgtatcgattatagaaggttgaactccatgaccatcaagaaccgatttcccatgcccttggtggatgagatt

SEQ ID NO: 32832 - DNA, 285 bp, Zea Mays
ttcttgcttagtaatgactcaaactcacattgggatctttagctccaacatacaagaaggctagataaacttggctcctcacaggttgaatattgcaaaaacaacgtcaatcacatcagcttgagtcgttagccattttctttcagactcaatttcagcgagaagagcaacagcttcggtggtctcttgatcagttggtgcctcttcccaactaggtagttttgtgttggggcgtcttcctgactaaactggcagaagttctcatgattctccatagtaaaccac

SEQ ID NO: 32833 - DNA, 455 bp, Zea Mays
tatagcttccctctcgtcattcagcagctcagacccaaactctacaatgtcgtcagcaactcgcttctgtttcgtccgctgttaatgcgtacggtttccagtcctctagccaggctaggcaaggtttggtaaatgaactaaacatatccaatgtagcattttcctgtgattgtttataatatgtaaattgtaaatgatgctactgtgaggacttggatgattcaacgaaatttctcaaattcattttttaatttcttgtagctttgatcgtgattggaagagtatgtcggctcaaagactgctattggttaacaactttccccttttatttgccattaacttttttctctacatttttattggatcgtttcatttgcgttgaggactccttgctctcatgctcaacttaattcatcaaatccttattataatctgtagctgtaatttctgacatg

SEQ ID NO: 32834 - DNA, 696 bp, Zea Mays
aaacaaaccgccattgccagccaaggagaaatcattgtcgccattgccagccaaggagaaatcattgtcgccatcatcttcaccccctcctctgcctctccttcccttccccatcagctacttcgcctccccttccccatcagctacttcgcctacccttcaccatgctctgcttcactcggcgcaccgccctgctctgctctgctccactgccctgctctgctctgcctttggactttgtcattctactaccaagtatcttcagtttcgccttcactccctttagttgccccacacacctctgaggccaccttccatgtgtaggttgccatcttctttcacatgttgtttatgtattcttccttccaaatgccctctttgatggtcttttccttgaagacctctgctttctcccctccactttccactactttgttctcgcaattttggcttgtttatctctatgggcccgcacctagaaataaaagaccgtcaccacaagcttatgttgaaatacagttccaggtatcagcttacaatccaagcatggttgtttatcctcttttctcatgaggacaaagtcaatcttactagtgttggccactaatataggtcactaaatggaggtctcttcctaaagaaagtgttggctattaacatgtcaaagctaccgcaaagtccaagattcctcttcct

SEQ ID NO: 32835 - DNA, 426 bp, Zea Mays
ggcaataaaagagaagaaataatgttacaggagcttgttccatgacaggagcgtggtcaacatagagaggtataaggtggcaaagaagactgcaaagcgagctgtgactgaggcaaagggtcgagcctatgatgatctttaccgaagactaagtacaaaagaaagggagaaagatgtctataagatagctaggattcgagaaaggaagacgagggagctcaaccaagttaaatgcattaaggatgagatggatcaactcttggtgaaaggacaagacatcaaagagaggtgccagaggtattttgacaatcttttcaatggtgagaatgagactatggacatctaattggatgactcctttgatgatttaaatagatgctttgtacacaagatctaagaatcagaggtcaaaaaagctttaaagag

SEQ ID NO: 32836 - DNA, 429 bp, Zea Mays
cttggaacaaagtttgttaataaaggaagacgtttggatgtgattgctcggaggacagttactactaatgagccaaaatggatagaaaggattaggttctcactcccttcatgcttttagctaaagataaaatattttttcttttgttctccctttcttgtctttgcttgcaccgtaccaccatggtctacatcctgttccccatatgtcatttgtatcggctgtggattgggtggtaacacacactgatgatctgatctggtcgtatctagaatgttgtgtgcattgagttcgagcattctgcttaggttgccccgcaaaccattgtttggggtgtggttttagtgcatttattggtatttttattttacaggaataatgagttgctgctttttagtctctatatagcctgtactatttataactcca

SEQ ID NO: 32837 - DNA, 432 bp, Zea Mays
gccccacgcagagattatcaagtcaacgattagtatctgattagatatagaggggaaaacgatcagaagatcaaattggtaggccttcgacagatatgaggaaaccaaaggcattaaattcaagaaaacaattgggcattcctttcctaggttagattgagaaagcaacaatgtgattctcatggagaagcaaagcaggatagaaacatcagcttacaccaaccaaaataaggtgaagcttagaagaaaaacatgaccactgaagagtcacgcattaaacgacgagaacatgtactcaagatccttgtcttaagctcatgtgcatctattttctatgagaagattacctaaacacctatttagataagcttgatcctaatgtaacgatggaaattcagactcgtccacttttggaaactgggaaaaaatttc

SEQ ID NO: 32838 - DNA, 399 bp, Zea Mays
attgagcttaacctaactaactctgcctaacctcgcgcccttgatcggagaggccaccctaaccatggttgcagcttccggtcacacatcaccatatagaaggattaaggaggcggcatgattagccaacgctaactactagcaccaaaaccctaatccacaattctagagaggtccccatcgcataggcttcgtagtgattggaagagttgtgatctatagcgtcggacaacaacggcccaggatccgagcctcttccacatgagaaccaagacaccggcaaccacgctcctcctctaacgcgccaagatccacctccaccactacaagattcagaagaatcctaggacactacacacctcaccaacctttttccttaatcaaaggcagacggtacgc

SEQ ID NO: 32839 - DNA, 342 bp, Zea Mays
agagtctagacgatttagccaattagtcggacgacttactatcgattagtcgtccaagttgcccgataagtcagctgaatcgacttatcggtgtgctctggcgactcaaaccgtctcaatgacaaaaacattggacatgagtaaaaagtggaataagtctacttccaaaggggatagcagtgaacttggcatgtgacatgggattccattgaacccccaatatgtctaaaacaaatcttcacctgtcttggttccaaggcatatgggatcaatttagacaaatttcacacgcacttacaaattggcaactaacaaagttcagcatgtccaagcacattttgg

SEQ ID NO: 32840 - DNA, 404 bp, Zea Mays
gtggagtgaatcttggactaataggcgagcgagtggccctctcgtctagtcatctcctccccttttgccagcccggagataaaataacaacgcctgagtggcccctctcgtctagtcatcgggagcgagggaagttgcaaggaagctgcgcgcgtgactggctggaacgggtaaggaggttgtttggtctggttcggtcgccgtggaggtggatctgcccgcccgcccatccctctattctattgcaacgggatcagccacacccgcatggtacagtccagtacagtacccgcccggtgtcggtgcggtgggaggccgttaaagcctcgccagccaggctggccctgcgcctccccagatccaacacgtcccaggtcccgccccgctcctaccctctctctctc

SEQ ID NO: 32841 - DNA, 465 bp, Zea Mays
tcttcagcaacttcatcaggtgcatatctggataaatgaataaacttgtcacggtactcgctgactgacatgcttccctgcttcagcgataggaattccttcttaatcttcatcagtccagctggtatatgatagttcctgaactgcgtactaaactctgcccaagtaatagtatcagcagcatcgtgggcagtagtatatgaatcccaccaatcagcagcaggacctatctgacgaccagaagcatataaaaccttctcccggtcagtgcactgagcaatgttcaacatcttctctatggacttcagccaatcatctgcgtccagtggatcagaagaactagcaaatgtcggtggcttatgactcatgaactccccgtgcttatctcggggtggaactggtggtggtggaggaggcaatggtgcttgctgttgttgctgttgcagctgttgcgcccttctctcc

SEQ ID NO: 32842 - DNA, 347 bp, Zea Mays
ggtcaatgcccctagcctcgataacgtgcgggtaatagtaaaagtcgcatgttacaatcatagtgtgttgcacacatttaatgtggcggatacgctacacactgctagcgtgagtaagtatgtgtcccatctgtactcgatgctagcgggcccaatgtcagaggcttttgccaggcatagtccgatggcttactctaggggcgtctagccacgtgttagcgtcgaacccctgcttgggtgaggggcagaattagggatagctggtgacacttttttcccaagtctttcccaatcgtgggcttgacccgcactcgagggggtccaagctcctgcctggacacgtggcg

SEQ ID NO: 32843 - DNA, 392 bp, Zea Mays
tcgcgctggagggcggcccactgctacaggagcgcggcgtgtcttgcgagggacgacgtccttcaggttcacaggtagggtttcctatcgatttccttgggtcgcattcctttccccatctcgcttcgcgtctttctcgcttctggtcgcttccgtgttcgtcgcgagaaagtttctgtggagggtggatctcctctccgtttcgcccgccttcgcttggtgaggagtggcctcttccgggccgctctggtgtgtcggctctgatggatgcgaaaaatcgaaaccctaactgggatcgatggggtccgaaggaggcgccgcaaggatctcagtcgtggggaaagaatcggaacctcagctggcgattgaagactggatctggaaaatctgag

SEQ ID NO: 32844 - DNA, 508 bp, Zea Mays
tgaagatctccaaatcgtgttgtcagaacttctgatgaagattaccatggtacaatgaccagaaaagatctccggtgtcgtgagctcaacgacggtgatctgccgccacaattcgtgcccgcctgggagattcgtgccgcgggaggagtagataacgtcggggcggggtgaaaatatccgatgaggggtgaatctagtcgctggccggaccagccgtcgtgtcccgccgcggtcagtcgcgctggcatcaccggagctcatcatttttttcggccgtgacacataataaccactccttcgcgtcgtaagggtcgtggcaagctgccagttatcgttcacagaccagttccctcttgtgcgccatggtgagcaagccactgtgaaatatcctagctggataaccgtgatctcaatcccaaaaatcttgtccagttcgatcgggacctataaattgaggatgccctctgctccgcttcatagttacgcatccaacccatccccagctagc

SEQ ID NO: 32845 - DNA, 461 bp, Zea Mays
ggccgccaatccacagcagggaggtccccggatcagtccccgacgcacagcgagacttacagggccgaattcttggacacgacggcggtgaacacaaaaccgggccggcggcggtgctgcttcttctctctctgcgctcggtaatggcggaactgggtgcattgggttggggagaacgatgatactgcgacgcccgatttatactccagtagcgaagtccgagcgaggcacaaggagcgagatccccggcgaggtaatcggcgttctgttgcaatggcatcatgagacggatcttgccccggtttcgcgcaacaggtgaacagaatccgttgaagacgacgagtcagcgatccggccccacgtggcggcgacagtagcacaatggaagcacggagtctaattgggatgcgtggaggtggtttcgcccgcgcgcttgcggagctgagcacgttcggttacag

SEQ ID NO: 32846 - DNA, 344 bp, Zea Mays
ggggaatggaacctcatttttccttattattaaaccagaatcgtaccctcatttctctggccatcgggattcccaaattggacggcggccaccgcgtcagcgaagacgaggaagaggtaattcctctttcgtattccccattcaatctcgagttctaggttttctcttgactgttcctgcattgcgacttggccttgccctcgatgcgtcacttcactcgtcgtcatccttgtcttcggtctcggtcgtcctggagtacacgttgtgctgtgccgtgagctacgcgctagcctttccccctcccttctatccaagccggcacctagaagaggatgtcgttgtgg

SEQ ID NO: 32847 - DNA, 339 bp, Zea Mays
tctcaagtatcttgccctaagcagatgccattttgtaggagacccgctggtggttctagcatctactgtaccgaacatcacatatctgagacttaacaatatacctagtccacctactttggaccttctggaaggatccttcccacaactgaagacgctagttttgaagaacatgaatgatgtcagccttctgaaaattagtagcggtgcacttccagtcatagaatgtctatatatcacatcactgcccaaattgcagacagtccctcgaggcatcaaatccttgagctccttgaaaaagctctggcttctgggtctccacagtaacttcaaggctcg

SEQ ID NO: 32848 - DNA, 287 bp, Zea Mays
gtgagatgtctacctggaaagcgcacactggaggtgacgatccaggcagaacggaagacggcacacacaaagtcactgaaatgacagaagaggtgagcacgtattagtcacatagtcataagcatatgaaatgtgaacaaatacatacacaaagagatatggcacgagacggaacgatcgataagtcaaaaaccgtgaaaacgacgtttgacggacaaatagagacatgggatgattggaattcaaaatgaggcacaaaacgatatgggattgagccgatacttcac

SEQ ID NO: 32849 - DNA, 475 bp, Zea Mays
cccaaggtgaggtacttggtctgatgtaacctttctctgacagctcatctatttgcttcttgagctcaaccaactctggtttagataccttgtaggctcttttagaaatgggggcggtgccaggaataagccctatggcaaactcaacttttcgctcaggtggcatgcctggtaaatcttttgggaacacatccagaaattctgacacaaccttgatagtctcgagtggatctgcctccttgctatcaatagtcatctggtgacaacctcctttacttagctcgggtgagactagctcagtcaccacttcttctcctagtggggacaccaacttaattgtcctcttatcacaactgataactgcttggtacttatctagccaatttatccctagataacaactattccctgagtacccattactatgaggttagcggggaactatatcccccttatttccacacttacattcaag

SEQ ID NO: 32850 - DNA, 561 bp, Zea Mays
gcaaattataggcgcattgtggtcccagaaggcacggcggtggcatgattttatcatcctgacttgttcgcagtcccccttcactcgagataacaccgcggtggcacaactgatcaggagctgcttctcgtctttcctggggcctttggttgatgggcgctcctgctccgtagcaaacagaggagttgcgaatctgctggggcagagttctgatgaaaaagcacacaggcttgctgtagctccagggtttctctacatgagatcctgccggttatttccaaacaacacctttgtttgtgaagagatcttggaggtggtcattgagagagcccatgcgctagcaaatgaccgcagttctgacagacctgcccgtttgaggtcagagtgtttgccgctatcagctgcgtcatccttggtagagcagatagcatcacttgcagcgactatgctttgccacgctggcggggtgaatctgattcgtctcctctacgagcagatcatgcccaccctgctgctttcaggtggagaagctaagctcggttccggtggtatggtatgcag

SEQ ID NO: 32851 - DNA, 490 bp, Zea Mays
agcgtgagcatgtcacaccgccttaagtcatcgccgacttaagtcgattgctccgttagtagggtatagtggtcaccctgagtcgagtaagcatgcagattgacaataaacagtttgagtgcctttgagaatgaagtctttttattgatggtgtattttccaattacagaatacaatgctgtcccgatagcttttgagatctagctaggggtaaaacttcctgagatgctctatattccatgagttccctatttctgtgccatccatttgagtaagacgatatgatccaggccgagtgacctctgttactatgaatggtccttcccatagtggtgacaatttgtgtcgtccttcccccgttagaattcagtggaggacaagatctcccaccgcaaaggatcgatgtcgtatggccttatcatgatagcgcctcagagtttgctggtacctggctgactgaatcactgtattcaatcgttcttcttctagt

SEQ ID NO: 32852 - DNA, 328 bp, Zea Mays
gacagtgtggggcctgggcgtcattgttcgagctatgccgatccctggcctctgtagcctaggtctcggcgcgacttttcttgttgtgccttgtagacaacatgcgcgctcaggcctagccctgataggtcatgagtgtgccgcatgccgagggcgcgcgggccataaatgtgccacaattcgagggattcataggtcatgagtgcgctgcagcccgaggggctcgtaggtcatgagtgggagacggaccggcacctctaccgcgtctcgacgcttggcgtagttaatgcagacagtcacttacggtgggccagtctcgggccgggcg

SEQ ID NO: 32853 - DNA, 839 bp, Zea Mays
cccagtcacttcaagaacaactgtccgcaactgaagccaccaggacccgcctactccaactcggtgaatggccccaagaatacctcggcatccgcccccaaggcgccctcctccgtcagccagcagaacaagaccccgtacctaggaagggcacgagtgaatcacgtcgatgcccaggaggctcagcaagctccgggagtagtgctcggtgagttccttgttgaatttactcctgctaccgtacttttcgattctggagcatcccactctttcatagccactagttttgtggaaaagcatggcattccctctactcctctagagattcccttggtcactcgaaccccagggtccgaccttctatgccagctcaaatgctcccaagtcagaatccttttaagtggggtagtattcttggcagacttaaccgtcttgccatccaaaggaattgatgtgatcctagggatggattggctaactaaacacaaaggcataatcagttgcgcagacaagacagtcctcctcaccgaccaacagggaaagtcagtctcttgtcaggcacagccacccgccagtgacccaatgatgttcaatctagcaacagaaagtatatcagtggtagaagaattcatggatgtgtttccagaagaattaccaggaatgccaccagaaagagaagtggagttctacatagatctgatccctggaacggcacccatcgcaaagagaccataccgcatggctccaaccgagttagcagaactgaagcttcaaatcgcagatcttcagcaaaagggatacatttgtcccagctcatccccttggggagcaccagtcct

SEQ ID NO: 32854 - DNA, 690 bp, Zea Mays
attttcggtaatcgacacaaaatctccatgtgccatctttcttttgcacaaggaggactggggaggcaaagggactcatactgggaacaattagaccggtgtctaagaggtgttgaacttgtttctctatttcagttttgtggagaggtgaatatctatagggcctggtgttgacaggaatggctccggggagcaggggaatggaatggtcatagactctatgtggaggtaaaactgaggggatagcaaaaaggttttggaagtcaaggaggaggtgagagatctcaggaggcaccacctctggagtagtggaagtagtgtgatcgagtaagacacatgaccaaatatcattggtgttgaataactggtgaagttgaggccctgaaatttcagtgagtgcacatgcttgaggaactgtctcaccttgcaattgtaccatcaccccttgatccacaaattgcaacagcttctgatcccaattgcaatgcatgggactgtgactagtgagccaatcaaagcctaagatagcatcatatggtcccaggttcaggactctcatatctgtgcgaaaaatatgtccactagccttccattcgattgccttgaccatagcatcagaaatgactgtgtctcctgtggcaactgtgacttgcactggaggacatggaatagcacataagccagccttgg

SEQ ID NO: 32855 - DNA, 422 bp, Zea Mays
tttcgattaagcaaatggtgataactgcttggcaacagcgaaacaagactgttatccgtctgggaccaggcttcaacaacagatagtagtgctctcataagaagaaatcatcaggagtagagaggatacaataggtctccacaagatcttcatatttctatcacaaattatcatcactagtagtctagtggtcaagacatatggctcttctggctccaaggaccaaggacatattaatgtctaatttagcttcaagctcagtggtgatgtgggatttcatagctagtttctactcttcttactcctagtagatcagagatagattacggtaagcatttcaaaggtggaatccaatgtagttctgctacataaattccaggtatatgtccattcaggactgacctttaccatttggctgaaaa

SEQ ID NO: 32856 - DNA, 336 bp, Zea Mays
tgaaataatattatgttagtagttgttaagtgtagtgttgtagataagaaattgaaaggggcactaggccacatcttcttcgtcaggttaaggtttagatttttgctagtcatgatacatgtgttcatacgcatattgcttattcactacgaagtagtagaatctctatttatgtcgaaataatatagccatgattatgtttactatagtccaagttagtagtttacattagttttaaaatagtaaggttatgtgatttataaataacattgtaacgatacgtataatttccatttaagatttaaagaataaaactaaaactttgactcgtgtttt

SEQ ID NO: 32857 - DNA, 366 bp, Zea Mays
ggccttcgtctttcaaaggtcctcaaaaacatgtttaaccattattaagtgtcacaggagtttcagcgacaaaacaccttcgatgcgggacgtggagcaggatgaagctatgtgatactcggtttgcaaagaggagaagtggaggttattctttttgttctttttcctcattcgagtgatgcgctttgggaatttggaatttgtggaaaatattcacctgtaagacagtagaatttctttggttagttgtttgcgacggggtcgggagctatcatgggcgagttgggccttgaaccttgattcggcccattagtctcccctaaccctagccgccgcccccctttccccttgggatttttgtagcca

SEQ ID NO: 32858 - DNA, 354 bp, Zea Mays
aacgatgccagccgtaggatgggatatcgacgatccagattagaaaccggggttcggttaatcgggaatcgtggatgcaggatctaagggcgcagattcgatctggggttggggcaccgtggtccgtcgatcttagatcgggtggatcctgtcgcgtaccgtttcgggttaagttagatgtaatctgagccgtccgcactggatcgtgtgtcccagatgtgtggataccctttcggctctcgaatcttactaaagagtccctgggcaatttaataataaacccgccgtccaccctgactgtactcagagtcttaggaatttttacgcgccagcccctgcacttctctgtatttg

SEQ ID NO: 32859 - DNA, 524 bp, Zea Mays
caagaaactgctggccatggagcccccatccgcccaggcgatgtccgcgactgacgacttccaggacaaggccgtcgacgagtggtaaggggactcgactgctccctccaaaccccgatccttctcgtttccgctttctcctttacgagttatatatgaccgacggcggtccgccgtttgtttggttgcagttgctcttgctgctacgattgctgctccagcatcctggacttcctgtgctgctcgtcctgatcgatcgatgcctgccctttcgacggccccgtggaatttctcagggaaccggaggccttaccgtggcccactgatcttggattctagatgccgtgggattcgtgtgttctttaggtccttcggtgacgatgtttgtaatccggattcgaatcatcggtaacagtaaaggaaacttgatagactgctgaacagccgagttatcttcaaccctgcggtgtgtttcctctgataaagcttttctgcgcgtttgcagatcgattcgctgtttggaa

SEQ ID NO: 32860 - DNA, 507 bp, Zea Mays
gcggggggtaatctcacctagtgtccaaccatgtgctaggggccaaaccccataggcaataaactcctcgaccaagtcgagtcctctacttaggcgggccacataccgaagagccccctcgtcttcatcttcttctgccacctcaaattgtggaaaggcccatagcattgtgaacacaggatggcagggggcaaactcggcaacccttcgatatccccgggagccacataaaaccaaacgtcccaccaattgccccacttattcctagcacatggaacaatctcaacaacttcagccgaggtcttcccagtcctcggcgtgaaagtgcatgatccaaattgagctatcttatcacctatttttctcttctgccagtgcagacaataattctttgcgaagacctccacagatggctgcccgccgtatgaggagacgacccagacatacttcgcgagccccgccacaacatttggtgtcaactgatgaacttgtacctcgaacctccac

SEQ ID NO: 32861 - DNA, 901 bp, Zea Mays
tccagtataaactcccttctaatacacaaaaagaattataacatctaaattaagaacattccagttactactttccagttcagtagttcactcaaagtggagtgttccaatagcaaaccaaacaccttcccatacttaaaattacgaaaacagaaacccatgacaaaacaaacagaaaagcaatactatgttttgctcgattctatgtggcagcaatcgttgcacgtaaaagtagcaaaaggatgccacttgctattttgctgaaaggaagaatacctcaacacctcagctgagcacctcccattctaagctcacctctaacactcaaaatcacgacaaaggatgcttgcagtgtagctaacaaaagaaataactgtaagctctgctctaagtggcacatacccaccttgcagccaaatccaattgctgtgtaacaaattgagagcaaagggcacgagatgaggtagcaatgccaattctcctgctaaatacctattattctaaccacatttccagtacccgatcaccaaaacgggaaccatgacaaaacaaacaaaaaaaaaagtaacactgcgttttgtactattctgtgtggtagcaacccttgcacctaacaatagcaagaggatgccacttgctatttcacagaaaggaagtgtactctaacagctaaaattagcacctaccagtctaagctcgttactgtaagaaacaaaatcatgaccgcggatgcttacaacatatagctaacaaaaagaagtaacggtaatatttgtacgattctaagtggcacagagcagtccttgcaaccagatgaaactggctgcgtgacgaatgtgaaatggaagcatatatggaataaggtggtacagaccagttcctgccaagaaactcctcggcg

SEQ ID NO: 32862 - DNA, 855 bp, Zea Mays
gataaatgtgtcataaaaaacttgaattaaatccttggatttggaatttaaaactgaaaagaaaaagaaatagagaaaaagaaaagaaaggaaattaaaaagaagagaaaccacctacctgggccgatttctctccctggcggcccatttaactgtttcgtgcagcccaccccgctcgtcagcaagctccttccacgcgccaaaccctagccgccgttctcgtgtgagtctctatcacgtgggacccccgtgtcatcttcagttccctacgcgccttgcccgcagaggtttctagacgggcccgctggctagtcgcccgcgcgcgccgcacatatcaaactcgtgacaccgtctggtgggaccatccaatcaactctatccctctcctctcaaccacttcctcggatgctcggctgaaaactcgctggaagactcggcaacggaccgcgcggggcccatcacgaccgcacctcccatgcggtataaaacccctcctcgcagtgttccaaccccccctccccgcttcatccttcttgccctcatatcatccctagcggtcgcgccgtgccgtcgaccttgggccaccccattccagtgccttccgtccgccacgacgttgcaccaaccacccctaaacatgtgaatcaccgcctagcctcactccgtcggtatcgccgcacccgtactacttcagaattgtcggggacctagccgtcggtcacctgtttgccgcaccagttcgcatcgtgggtagactgcatctctcctcgcgtcgcgtggcaaaaacttcgcgttgtcctcgtccggcctcgtccgtgcctcgtcgtcggtgagtcttcctcatgtcgtgctcgc

SEQ ID NO: 32863 - DNA, 417 bp, Zea Mays
ggataaggtaatcatgattttgaatctatcttcgtccgggctagtgagttctacggtccccttagcataatgtataactgcttttgctttcctcaaccaggacatgccaagaattaagtctataccactttcatctaacactatgggcatggaccaaattccctccccatgattgttattattaatcgggttttcataagatttgcttcaataggtcctttaggtgtgataactaccatgggtttttgcatagtacggagaggcaaatcattcaaatttacataacgagtagaaatgaacaaatgcgttgctgtagaatcaaatgatatagatgcgagaactaaattaataaggaacgtaccaatggcgacgtcagatccatcagcggtagcttcaccactgatctgattaatcctg

SEQ ID NO: 32864 - DNA, 500 bp, Zea Mays
agccaatgctagaagatctcatatgcaaggctcaacgcctggacgcagagacaaccagacttatggaaagagctcgcaaggagcaacttccgaatcttaggacagatgaacaaggagtcctttggttcaagaaccgtctgtgtgtaccaaagggagaggcacggaaagtcctgctcaatgaagcccacagttcagcttactccatccacccaggaaccagcaagatgtacctggacctcaaaaccagatactggtggaaagggatgaagaaggaaatagcacagtatgtggcccggtgtgacacctgccagcgaacaaaggccgaacatcagaagcctgcaggcctgctgcaacccctcccagtacctgaatggaagtgggaagaaataggcatggatttcgtaaccggactaccccgaacgcagaaagggaatgattctatctgggtaataatcaatcgtctcaccaaggtggcccacttcattccagtaaaaaccact

SEQ ID NO: 32865 - DNA, 891 bp, Zea Mays
agccggatcattaccggcaacaccctcgggggctgggcaaccgctggcaccatccttgaggactaggttctccgcaacagccatctctaaggctgaaggactttcagtcacctccatgggaattgaacaaccctgaccaacctcttggctccggagatcgccttccaaggtcgacgaggcacgaaacactactcgggataactctaatcccacatctggaatgtcagaacaaatgtccatcatatcaccatcagttggctcggacaacatatcttcaggaacgacatcctcgagagcctgatcaaagttggctatggataattcttgcagaccaacaagagtagacaaagctggagaaggaatatcgctactccccccactgactctgtaacgccgactgttcttccgagtccctcttcttcttcctcatcctcgtcaacaatacggacaataaatggctcagggtcacacccattgggatcagctctggcagggtcacacccactgggatcagctctggcagggtcacacccattgggatcaacatcagcaaggccacacccattgggatcagctctggcagggtcacacccattgggatcagctccagtaaagagttccaccggtacttcttcagcagcaggagcagaaaggccagcatcttggtccaaacatgacactcaccaaagccgtctctttttctttttcttcccctcggcaggtgcagttggatgactggcctggcggaggcgtttcgggtgagtaccatcaagctttttagtgttcacggtttttttaggctctggggatagtcgtaacagccattgtttcaatagggaccgagtcagatgaatcctcagccaacatgtccagcatagcacttatctctgc

SEQ ID NO: 32866 - DNA, 497 bp, Zea Mays
cttttgttgtactagtttggctgcgcccttaggcggcttctgcgcggagtcttcgcgagagacatcggaatttttcgcacttgatgtgtttagtccggctgcacccttaggcgacttctgcgcggatggtcttcacgatagacattggaatttttccgcacttgttgtgctgagtccggctgcacccttaggcgacttctgcgcggatagtcttcgcgatagacatcggaattttttcgcacttgttgtgctgagtccggctgcacccctaggcgacttctgcgcggatagtcttcgcgatagacatcggaattttttcgcacttgttgtgctgagtccggctgcacccttaggcgacttctgcgcggacttgtcgcacgcgagggtggctagcgcttagcctcgcggtgacttcgaattggtcgaatgccgaagaccgttgtcgcggtcttttttcgacacatgtttttgcgggggattttttttcacatatatta

SEQ ID NO: 32867 - DNA, 392 bp, Zea Mays
ccagccaaacaagtcgtatctccaagctgtccagggaggccaagtcatggaagcgcgctaccccggtgaccctcgggcgcggcctgcaagagcagtctgtgccatctcggcgaccgggtcgatccgtcgtcgtagagatgagttaatcagtaaggcagtggtttgctcttttgatggaaacagtcatgaggtggatgtgctgtcagcaggggatatgctgagagaggcttttgatcttcaccacggtcagtatcaacttgtcaagcactttccagagcagttttttatcatcttctctgagtcaagaatcaagcaatgggcgctggataggaggtcggtctcctatcgtggtcgagtgttccactttggggactggtcagaggagagctatg

SEQ ID NO: 32868 - DNA, 326 bp, Zea Mays
aattaatcaggcacttgtgcaactgatcttatgacttctgggaatgagatggcagaatagagaaagactggtgaaagagctgtaagctctgagatgctcttttagggcccgtttggttggagagccaggggagtggagcggttccattccagatttagagggtggagcagctgcattccagattctgagagcggagtagaatcgttccattttctgtttggacccaccgcaaagagatagggagaagttgaacggtaggattccaccgttttttggagcgagcttgttccaaatccggtgggaatattcctgatttagagccgttc

SEQ ID NO: 32869 - DNA, 496 bp, Zea Mays
actagcccaactccacaagacaaagagctagaccaagaaatcagcaacctggaagctattcatcaacaggtggaaaataaaagagagaagatgcttcgggtggttgagctccaaaagaagattgatgaagcagtcgaggagatgcgacatattgcacatgatactgagttgcaggccctaatccaggggctgttcttgctcccctgtacacatattgcaatggtgccaggggctgttcttgctcccctgtacaccaaccatgatacaattgctctagtaatagccttttacatgctcgcatacaactgtctcaagtaacaaaacatcattctgtgccccaatgcaagcacaatagtcaccgcgggaggataatacttcgttaaaagcttccacctctccctctatccacttcaccgccctagaggcatctcgacgcacaaattctttttagctcaaaaaagctccaatggagacgatggtattcctcaacttttca

SEQ ID NO: 32870 - DNA, 356 bp, Zea Mays
gggcggcgaactccagcgaggacacctcggttaatcacgcggcaagtgggtacggtgaacagtccggtgataaggctccaatcccttccctgcgacgagatctttcaccgccatccgttatcagcacaccagggcgcacgaatcgcgacgccggtaaggatcgcggagcagagtttaccggtgacggtgcactgaacctggtgatctttgttaggctactgtaccatcaggaccttcatcagtctatctgacagagcatcttcaggggtgtttttcacaaatttttatgtggcaactccctaatccgtctgttacaaagttaatctcctatataccagctccaattcgaccatagg

SEQ ID NO: 32871 - DNA, 470 bp, Zea Mays
cggctgtacagtacttgcccatagaatcagtcgagcaatcccagtctttatttatctggcttatgaccaccagtgaatctccgtataccatcaacctcttaatgcctagtgatatggcaatgttcaacccatggatcagagcctcatattctgctgcattatttgatgctgggaatgataactgaagagcgtacttgagatgttcacctctaggggcaatgaagaggatccctgcgcctgccccctgtagtttcagcgagccatcgaaatacattcgccatacttcagtagcctccaggttgttaggaacttgttgctctgtccactctgatacgaagtcaaccagtgcttgagtctttactgctatgcgaggccgaaactctatgtcgtgagctcctagttcgtaggcccacttggctattcttccaatgacttctttgttgtgaaggatattccctattggaaacccg

SEQ ID NO: 32872 - DNA, 512 bp, Zea Mays
ccggaaagctacttgggtttattgtcagtcatcagggaatagaagtaaatccagaaaagattgaggccattatgaggatggaaccgccacggtcatagaagaaggtacaaagactcactagatgcatgacagcgctaagcagattcatatcaaggctaggcgagaaaggaatgccattctataaattgcttatgaaggtggacaaatttcagtggaccacagaagcataggaggccctggatgcactgaagaagttcttgaccactccgccagtactgaagccaccacgccgagctacgcccggtcagtcggcagaagatttgctactatatatttcgtacacgactcacgtggtaagcaccacgttagtagtcgagcgggcagaggaagggcacacatacccagtgcaacatctggtttactttatcagcgaagtcctcgggccctcaaagataaggtatcctcaagttcagaagctattatatggggtacttctaaccgctcgcaagctc

SEQ ID NO: 32873 - DNA, 369 bp, Zea Mays
ggaggtgacagaggagccctcagccttagaggtggctactacagaagacccagccctcgagggtggtgctggcggttacccagcccccgagggtgttgccggtagtgatccggctctagtgggtagcgcaagctgcaacccagcccccgagggtgttcaggtgggctctccttcccacacctccatggacgtccatgttgggtcgtctccacctcggtccgatggggcgacggcagtgcatgcttccacagctttgaacaagcaagtcgccttagaggtcggcgagctagatgcgagaagtctgttatctactggcggggctgagatcacccctgacaatgcccttcaaattgttcctgctgatcttcc

SEQ ID NO: 32874 - DNA, 324 bp, Zea Mays
gcaaaaactacgtcgcttcacgcccgacaagagagaggccattcgcgctgagctagctcgcttggtcgcggcagggtttattagagaggtgttacatcccgagtggttagccaaccctgttcttgtactcaaaaagaataaagtggattggcgcatgtgtgtcgactatatggatctcgacaaacattgtccaaaggatccctttgggctccctaggatagatcaggtggtagactccaccgctgggtgttctgtgctgtctttcctggactgctattccggatatcatcagattagcttggcaaaggaagacgaggataaaac

SEQ ID NO: 32875 - DNA, 320 bp, Zea Mays
cgccggtgacaggcttctccctccctggtgggtctacgcgtggtaaaaaggatgcagagggattgaagggaccttaccagtgccgattccatcctgagttccttccgcggagggtgcaatcaagcggcaccaacttcatcaattgcagcttagattcaagcaccgggctgcaccatggccaccactgcttcatccaccccgccgtcacgtatgagcccagctgttcacggtgaaaacgcgaccacaacgacctccccagccccagtggcatctatcccgacggcatgctcgacgatgaagatctgcaccgggtgttcttt

SEQ ID NO: 32876 - DNA, 298 bp, Zea Mays
gcatggcgtactcggtcacaccacatcggatcgtccctcttttcaatggggaagagtctgagagggtgcatcatcatctctagtgggtgatatccgtagaaggtcgtcagagcattcaaggctgcggcctcagtggtgtcctccgctctgaatccaactatctcagtctagcgaatgccaacctggctgtagggggtgaggctccaaggttatccaaaccctgaaatgtggcactctgtgctcctcgtacatctgcattgtgtacagacgttgtgcggggtacccagctgcgctcaac

SEQ ID NO: 32877 - DNA, 407 bp, Zea Mays
agaaatgggagatcttaagcaaatcaacatccgatacttgagaacgggttatagcagataaccagataatagggcagaataattaaaggatctagatattcgaatgatacagccagcatgattcaccaggaaaaggattaccggatccaggtgaaaggagaggtaggcaacaagattagctggatgatcaacaaaatgctatgaagttttagggacaaggatttatggaaggaaacatggcttggtcatggtttgcgcaactagacaacaaacgatgttttttttgacataaccacgtgcttaaggaagtttcggtttggctagctgttaagctatgagggtctacaagttgtgtaggtgtaatgtcaaggataaaacacacaagggctagaaaataccaacacaag

SEQ ID NO: 32878 - DNA, 343 bp, Zea Mays
gtggaagcgaaacaagctgaggaagctgcagaacgtgaaagacgtttaggtattgtttcgtgacttttagcttcggcatttgatttttagcttcgaactaattaacttttcctattgtagctgaactatctcccccaccggaaccatttgatcccctggccgacccagagacaaaaagagcattggagattattaatatagccgaatctattattgacgaagtcgttaacaagttactaaatgaagttgcagagaaggtcctgaaggaagactagtagttattgtaaaaacatttttagacgattaatgtaacatttgctggactaagactgtaatatttgat

SEQ ID NO: 32879 - DNA, 619 bp, Zea Mays
ggttgaatgtacttgtgatgtattagaataactgtgtatcgtacgagtatccaaaaatggtgaaagttggtgtatgttagtaattagaaaatagtcacgacattaaccaatagccaagcttatgccgaaatttaaattatgggcagtttgagttgaaattatgctgatctaggtgtgtggattactaatactaattggaaggacagtcgttcaaattggtcagtccaattaagaatgttttgtgtgtgaggtgaggtggtgacatgccaaagtagtcatcgcttccctatgtttataagtcgagtcaataccattaggcgttcatgaaatttcacgttgcatatagtgtatggttgtattcgtgacaaggaggtgtaggttttactcaattagaagtttggttgatgtggctaggaaatttgtttcggcttgggtaatgaagtagtgacgtgaccaagtagtccccccggttatgagtcgggtctagatgtgttatgccttcgccgtgatacccatcgtatatgctaactggatgtatataagaaatgaaatagacgcatcatatgatttagtggtgctggtattgtgatctaagtacattatatatgtgtgataaatg

SEQ ID NO: 32880 - DNA, 413 bp, Zea Mays
cgccgaagaaaaacgacagcgatttccaggcttttggctggcaccagggaggcggcccacctcgtccatccggcccttgattctgcttcagtccggggatcagaccttataggcggcgtaggtccacagcatgccggcgaccaatatagctctggaggtggaggggatggcgtgcctttgctacagggctccttgggttggctgctaaggcgcacacggtcttcggtccactccaagtctcccaacaaccccagatgtgggattaggctggcctagacgccgccctgaaccatctgacactacaaaacgacgattgggtgctggattcatgcgtctccagccacatggcatctacggatggtatactcctttcccgtctccatcccactccccatcaccattggcaacggtca

SEQ ID NO: 32881 - DNA, 357 bp, Zea Mays
tcagattggagattctagcacgagatcggaggttggtaatttccggccatggcttccgccgtgggggtactgtgcggtgccgccggcgcagtgtctggtaggggatgggtttctggccgtcggatccaaacctgtggttgagattaaacgtcacgtgccggtccggtcggatgtggcgtgggccgttcgattccgatcgatcggacgtgagtgggattaggttatttaaatctggaacgtccaagtttgatcgaaaggcttagattgcgtaccggttcgcaggatagtggatttaatcagggcgctccgtagtcgatcggacagatgcaaatgtattgagagataattgaatctgta

SEQ ID NO: 32882 - DNA, 349 bp, Zea Mays
ataacagcttaacaacagccatcaactgcggcatcacttgtttccttttcccctgtctttcggccattgctatccttttccccccaattttgatctttagtattttctgaactcgaaaaacttgcctggctcttagggttgatgcatatacatgtgttgctattgcttgcttgctccttgtcgacgatggtacagatagcagtagcactgctatacacaagcagcaagcaacaccccacctccttgcattgactgttgcatttttatgaaacctaaagccgtgtttccatctaattgtaggcccatttggctctagtctccggtctctctctccactctaactgcaggc

SEQ ID NO: 32883 - DNA, 322 bp, Zea Mays
cccagattcaacttctccatttcttgacatatagtggtgtcaggtgctcttactgtaagacaatgacaaaaagtcttgcgacttaaaccatctgccaccacattggcttttcctgggtgataatggatttccaagtcataatctttgatcagctcaagccaccttctctatctcatatttagttatgactgggtaaagatatacttcaaacttttgtgatccgtatacaaatggcaagtattacccagtagataatgacaccaaatcttgagggcatgaacgactgcagctagttccaagtcaggagttgggtagtgttctt

SEQ ID NO: 32884 - DNA, 342 bp, Zea Mays
cggagaaggaggcggctcgcacaagtgtggagggataaaaaagatagggtggacaagaaggtgtggagggccgagtgtcagatgcgtagggaccacggtgctgagaccgacttgaccaatgaagatgagaacgacgacaatgatgcgagtgcgggctctaaccttggggccattccgaattcctcccttgccgtgtcaacagctgactccgtctcggtctttactagcagggcggcaagtgccttctcgatcatggaggagaccgacttcccagaactcctcgccctattctctgggccgatgactttggtggtactcattccctcacccactaagcccccg

SEQ ID NO: 32885 - DNA, 385 bp, Zea Mays
tatttttttccttctctccttgtccattattccccccatatccctgacgctcggagcatgcggcccttgccctcgcatcagtcaccctcatctctacacaagtgtcgcccttgactctctacaccactgcccctccccccgcacccattacaaggctagcctattggtaccctcacttctgccactccactcgacattccatgacctcgaagcgatatcgtgccctgtgtggggctcagccaccaacatccctcaccttcgacgccgtaggtaatcacgtgtgatccatctctccttctgacatgctcacaccaacagatagtcatgtcccttatcatccatcttcatcctctaattttgaggtaccacaaacgacatctaaaga

SEQ ID NO: 32886 - DNA, 421 bp, Zea Mays
cggtggaagaggaagtgctgctgcagggggagggtgctgctgctacgactagtggaggtggtggtgctacagaggttgaaggtactactgattgagagaagggaaggaagcttggttcgtcttagtgtttgcaaacattgatgatgatgagtttagaggagactagagcaaaaaggttggaggaagaggctggaaaaagagcaatgattcgtggtgataagaaagaagaggatccactaatcacaaaaagtgagatgagaaatgagatgaggagtctgattcaggaactcatggggctaggtatgattggtcccaagactttgcctatctcatctgaaataaagttggaactcgttccaaatgatgtgaagctagaagggagcaagaattacttgagttggtctaggagagtgcgagtgct

SEQ ID NO: 32887 - DNA, 393 bp, Zea Mays
cgcagctcagcctcacactcggtaaccttcaccgccaggtgggccccgcttgacaggtcttcttctccccaaaacggactcacgcatggtgggcggtaacaaccccataccggcgccatgggatttctccggatgattcgctaatatcgttgcaacaaccctgcggactccatcctacatctatataagtctgttgcggggttccttgcctccaggaccatgcgtgggaactagcgctcgccaccgattctcttgtcgccgggggcatgtgcggaagttccgccgccgtccatcccatccgtgcgccgccgctgggagccataggaggggtcaggggcgttcgcctgcaaccaaggtgcgtgtgcgggcttgcaatcgggagtaggtgtcgcc

SEQ ID NO: 32888 - DNA, 594 bp, Zea Mays
tactgaggatgaccccaccatcgtctacatggccggatatctccacactctcgataaccactatgatgacctttcctcccactgcacccacctaaactcccaggtggaaagcttagagcaacatgtcaaggaacttaaaaaggagaaggcgtccctccaagagagcctcgaaatagcagaaggtgaataggccaacactcgtgaagcctactgaaccctgaagatggattacgataagaagctgaagaagctttcccccacgaagaaaatccgaaagaagaccaagagccaaggatgccagactgagcggaagaaggaatcccctccagtgctacctccctccatgatagagaatttgtccgacgtcgaggatatgtccctagctagccttgacgaccttctcaaggaatttggggacactttagaaagggggttcggaagtaccttagaaagcgctcgcgtgtagtgcgacctgtggtaactgtatgcttgtaatgaacttgtgtgatgaataaaataacttggttgaaaaaaaattggcatatgcatagtagtaattctctccccctggcagatggcttcggataaaaccac

SEQ ID NO: 32889 - DNA, 428 bp, Zea Mays
ccggtgggtctccgccgtgttttcctgggcggcgccgccgcggcgtgccgttggggagaaagaaggtgttgggggccctagctgtaggatttgtgatggacggccctgattataagattgggtaacgattcaaaccagtgaatcgtggccgttgatctatctgcgtacgaataggattagatcaggttaagatgaaatcgggaccgttgtttttaaatccggtggtatagattgtgtatcacttcgtgaagtaatctgaaccctagatctctaatccaacggcctgtggtgtgtcctgattcagttttaagtaaatctaatcggggccctcggtgtaagatccaacggccagatgtgatgcataccccttcgacctgtaaatctttccaaagagcccccgaagtatttagatatcaacccgcggtccg

SEQ ID NO: 32890 - DNA, 278 bp, Zea Mays
tcaagtaatgatatttgttgaataagctggttaatgaatcggaagctcaatgttcgagcgctaaatctctttacccatttcgaactctctgattacttttgcataaatgttagtttcattaatcttactttaagctttatttgccctagttaattctgtgttagcattagtcgtggttgtttatgggtgtttggcgctaagtattgaccagtttgtggaagtcatatcattggtaccttctatcaaaaaaggttacatattgttttcgtttaatgcca

SEQ ID NO: 32891 - DNA, 420 bp, Zea Mays
ctttgttcctcatgtggcttacaatgaaatggagaaggcgagccagttccatcagggcctgaaaccttctatcaggcatgctctgggagccttttcgttggtggatttccgtactacagtggagcaggcattgggtgtggagatgcaacaccagtacaccatggagtcacagaagtcttcgggtgttgatcagcctcgtggccaggacacgaggaggggcaacactaggggtccagcccacaagaggggcaagtcacaacactagcgccaccacccctaccgtggcaaaccctctgaatcgggtacttcaggaggaagtactcagaggtatcgagctattcctaagcccgggctggggctggtgtgtttccgttgtggtgatgcgcatcgccgtgccgagtgtcagtggagtggcaggtg

SEQ ID NO: 32892 - DNA, 287 bp, Zea Mays
cacttattgaagatgagaaagaacacatgtctcacataccgtattctaatgctgttggaaatcttatgtatgttgtgatctgtacaagacccgatttggctcatgttgttagtgtggttagcagatttatgcacaatcctggtaaagaacattggaatgcagtaaagtggattcttcgctacttgaaaggtacttctcattttggattattatttgacaagaattcagtgaatgaaattggtgttatgggatttgttgagggaattattgattttgactttgctggt

SEQ ID NO: 32893 - DNA, 293 bp, Zea Mays
aacatggcctcttggaatctcgatcataaattatttgcattgaccttagatgatgcatcttccaatgatgtttgtgtggacaccgtcgtttccaccctaaagaatcaaggttctgttctttgtggtggcaagttctttcatgtgcgttgtgttgctcatattattaaccttattgctagcgatggtgtgagtacaattttagatgtgattgcaaacattcgtagcctagtagttgttgtcaagagctcacctttgcaagaggagatattttttaagtaggctgctgctttggg

SEQ ID NO: 32894 - DNA, 311 bp, Zea Mays
agcatgtcaaggttgcggctcagccgaaatttgttgtgtcggtggaagccactaaggacccttcggatgaggcttctacactgggcggtagattctactccgatgtgtggatgaagggcggtcgtgagatggctgatgaagcaattagaaaaatgaaaaagaatctcacgacgcccaagaagaagctaagcgggttgcagaagctactgagcgcgcaaggcttataggtactgttactgagattcagcttcggagtttgtttttagcttcgaaattaatcgtcatattctttattgcagctgaactttcac

SEQ ID NO: 32895 - DNA, 411 bp, Zea Mays
cacatacagcgagggcatcacacattacatcgtctcaaccttcgggatgatacccatctccctatagttgaacaacattatcctcaattcctcacccgcaaacagacttcgtagctccccctcacccacactcaccccagccggcgaggacaacaattctcgtttgccagtcccatccacacgaagacgaccaccctccatctcaccatgatgacgcctttcaccttgcggcgactcacccactctccgtttcgccaccgctcttcgccgcctacgcccagcactcgcacccagatgatcctcagcacccatcacacgtggaggagtctccgccgcagccacatccaacgctgcgaaataatccaagtcctcttccgaagacccctccgtccacacaatcgaactcccaga

SEQ ID NO: 32896 - DNA, 832 bp, Zea Mays
ctcagctaccttcggccctactacttcaggcttcctctttttggagactgtcgcctttggctcaggagtagattttgccctcattgaaatcttctcattctcctttaccagttctggcagcctattttgtttaaaatactaacaatccttttccttttcaaaccttcgacacccttgtcaaatctttcatagtccggatattcaaaatttagcgcgtccatcaggcgattcagccttcgttttggccgggtgccgaaggcagtaatcattagctagtcctctttctttgtgtagttgccaaagatttcattgcacgtagtttcaatcatttctagccactcttggcatggctttttaaactctttctcaatcttgaaacagtaggggagccgaacaagttcgtgctttttgctcccatccttcttcttgggcatcccccagccactagaggtcgggaatactttgtttgccaagaattcctgcaccagatccctagtgctgacttcggccgctaccactctaaactccacttcggctacttggcatggggagccaagctgcatatggcacaagggccttgtcattccaatgctcaaagtcagtggactcaaccatagtcattagcttctccctctctttatcgtctgcttcagataaaaccattcactcttcaaccagttggccacttggtaaggtagctaagaactgatgccttgtatcctttcgatacgcaaaattgtagcaaccaaaattctcatgaaggccatctgccctggctttcgtctggtattgtagctcgtggacccgacaaaaagcttcggcattaggactc

SEQ ID NO: 32897 - DNA, 274 bp, Zea Mays
gccgttcagatcagatccagaggccaggattatatcacaattactttaaaaagggtcgcacactgactaccactggatcatgatcggacagcgcactatctctcacccgccctcgaccgcaggatcactgatccacagcccaaaccgaaatctcgaatcggtaagcttcggttcaatcgtaaccgtacaacccgagatcaacggctccagctctctcccctaaccaggcggtcaactcagcggccccgccccgccaacgacagcgaagcacgcc

SEQ ID NO: 32898 - DNA, 337 bp, Zea Mays
gagcaatcggcttaagtcggcaacgacttaagacggtgcaacatgctcgcgctcttacttaactcggggtgaccactatgccctgctaacggagcaatcggcttaagtcagcaacgacttaagacggcgcaacatgctcgcgctcttacttaactcggggtgaccactatgccctgctaacggagcaatcggcttaagtcggcaacgacttaagacggtgcaacatgctcgcacttacttaactcggggtgaccactatgccctgctaacggagcaatcagcttaagtcggcaacgacttaaaacggtgcaacatgctcacgcttacttaactcggg

SEQ ID NO: 32899 - DNA, 661 bp, Zea Mays
tgtctggttgcctggggaagggtgtgcagacccctccatttgggagggttgagtatttctagtttaaaggaactatgctgggcccttcgtatgagatggttatggcttcataaaactgatccagaaaaaccttgggcaaacctccctatccaagttccaaaaaaggcagaagctttcttctccactgttttggtctctaaggttggaaatggagcacacactttgttttggacagataaatggatcttgggacagaatgtgtgtagtctggcgcctaggttatttgccatcattcctaaaaggattgcaaatagaagaactgtgcttgaggctctttccaacagaaaatggatatctgatataaagggtgctctgtctgtgggagttctagtggattatttgaatctttgggagcttctatcagaaatagtgttgcagcctgaagtggaggataagcatatttttagtattgcggcagatggtaaatactcggctaagtcggcatatgaaggcctctttgctggatcaacgtcctttggtcactatcacctggtttggaaaacctgggcacctccaaagtgtcggttttttctttggctggtggctaacaagagatgctggactgctgacaggcttgcaaagagaggcttggatcatccag

SEQ ID NO: 32900 - DNA, 489 bp, Zea Mays
gtttttttaaataaatggacctattgttattattttcattcacctaatattttgtcacaaccaagccatttaaaatcattacttcagttattatgtaggattgtagtatcattggttgtggactcctttgtgggacaccagcaccgttgtcaacctaagcaacagcccagctcaagctgtggctatgcgacgtcagcagcatgcaaaacagaatggtggtaacgggagggaaattaggaaggattgttaggtaagtttgttgattaggaggtgcatctaaattataatggagcaccttagtttggattgtaagcatcgaagacacttcctgtgtcggggtgtcggatgtgggttttctcttcaacggtggcgtcagagttttccactgctgccgccatcaaccatgactccatcagttcctcgctattccctgcgtaccttgcctccccatctactcctacttattgtccacgccatatcaatttggaa

SEQ ID NO: 32901 - DNA, 723 bp, Zea Mays
cacggtagaaagactcctgggtccgagtactgaagagaggagcgactgtaggatttctctgagctggaaaccaggactccactggcacgtgtttgaaatggcaaactctagtggaagtggccctctgaaggtcaaaaagtcggggatcctcagcaattggtcgaacctctttctcgtcgcgctctcgaaaacgatgtggaggtactggtggagtggtagagggagcgagagcagtgggagtaggtgtggtggaggctttaggtgtagcgagtgtggaagtgggcaatggagtggcggaggctggcatagtggaggaaggtggagtggtagtggtagtggtggaggctcgcatagtgggtcaaaccgagctagagtggagtgagttcgagacgagaggtaataaacatgaagacattttgattagatccaatcctcaactggcctccctactctactctcttagctactattgctgcttctgcaactgctcgagtggcgctatccaactttctcttcttcttgcctccctactgctcaaggtagacatccttgcccttgtcctgtctgaaagggcgaggagggtcctgatcatcgcctccccctgctgaggtgacattttcggtcctcaccatcctgactgatcactaacatgctgcatgagaaccagagagataagcaagagtagcaaagtaggagataaggatggagaaggaaagagctagc

SEQ ID NO: 32902 - DNA, 358 bp, Zea Mays
gaaatattatcaccgaaaaggtgtaggcctaggacccagccaaccgatcccaacaaggaatcactttagtattcgataaggcagatcagattagggagaagaaataggagatctagttagagatagattggataagtattggagtaaaaataggagatccggttatgaactggtcttagcagaaggaagccatctctatataaatggcctagtttgtacctagggaaagctaagcagaagcaacttatttgttgccggcttccctcggggagctgggactcctagctgcctcctctcgctcgcagccccaccccgcgaacagtacttgcagcactgtagcgcggtactgtagcacccc

SEQ ID NO: 32903 - DNA, 344 bp, Zea Mays
gtttgatgatcaaatcgccatccactatgcaatcagtagcctttgcgcaggcgtcctatacagtcattgcacaaggaaccccttgtccaacctcaaggagttgtatcagcttttcgaaaaatatgcccgatcagaataactccaccacagaaaagtcgagtcacatcgaaagcccaaagagatcccgcaaatcaacaagacatggaccaagccccgcagccagagtctacccctcaagaccacaaccagcaactccaggtcacaacatcgcaaatcagccgcagccaggcgaaggcaacccccgatgccagaactactatccacaacaaggtcgcaatggcaat

SEQ ID NO: 32904 - DNA, 362 bp, Zea Mays
tggggtgctagcaattagtcattgccaactttagctgataagccgaagcgtcggtgtcagacatgttttgtgtttgtttcctttgaagagatgtgacatccctcgagttaagaacctaataattattcggatgaagcttaattattcctaatttcttagtggggaaataatttggtaattctcatgattctccagcgaaaactcgaccaagggaacatgatgaagctatgacatcacatatggcgagaatcttatgtgtaatcatcgtagtggttggacaattactcctgtagcctattatatcgcatggatcgcctttttacatgggtgatgcggcgctttgggttcttcacctagttaac

SEQ ID NO: 32905 - DNA, 289 bp, Zea Mays
gtgagaacgtctgtggaccggacgttcatactggaccgaaaatcaacaaaaattgtagtagggagacccttggtgaagatatttgtgaactaggaggatgtcgggacatggagaacatgaaccgcgccggcgttgacacgctcacggacaaaatgaaggtctatctcgatgtgtttggtgcattgatgttgcaccgggttggtcaagaggtagactgcactcacattatcacaatagacaagtgtggcatgctccaaaggttggcctaattcctgaaggagctgtcgta

SEQ ID NO: 32906 - DNA, 359 bp, Zea Mays
gtgccataagcatgatgaccatggggtggcaagcggtaaaggtgcttaatcccgacaggaacgggggaaccatcctcctgatggtggcgctacgcgcgctcagcacgcagttccgcaatcttcgcccgagccttgctcaactcatcaagggcgtggtctagcttggtgttgagcacggcgaccaagttgaccatgctactcaatctgggataggcctcaccaactggtgagacaatctcacctctggtactaccgatcaaacgacgggggtaatacttcaggtcgaggccgtcagctaccccgctgaacaacgaacagtactgtgaaagcgcacaccttgcatcctcctgcattgctgc

SEQ ID NO: 32907 - DNA, 340 bp, Zea Mays
ctttgggactttttgcaatttactccaatttgttccacaaaacttggaaatctccaaatgtaaaagttgcttaatttttgttactctaccactttgatatatgcactttggtccaaaagtgtatagaaattaatctcatctcatagagcactaattagggtttccagagtccttattagggtttgagtgttcttagggtttaagtggcacttaactttccaaatttagtctctctttaacatctccactaacttttgaggtcatactcaaattattatttcacacacctacatacttctaatccttgggtaagtaccctaccctagggtgaaagatcaag

SEQ ID NO: 32908 - DNA, 391 bp, Zea Mays
cacggcaccaacctgctttttcaagccaagatctgtgggaggtactccctcccacacaacggaactgtgaactcccccacccagggccctcgagaggagtctattggataagggcagggcgcaccatcagccccgttcctaacacttacgccttatgcccacagttcgtggtgccgcttacgggagaccaccttttgggccggtacccacaaggcgtatgttatgcacggaaattcccaaagcgctgttaacccatcttggtccttacatggcaagggcttgcctcctctaagaacggttgccaccctcaatggtgggccactcactccatccacctttctcgttccacaatcactcacaggggatgtcttagtcatcccctaaatatttt

SEQ ID NO: 32909 - DNA, 817 bp, Zea Mays
acgctgctcgggatgaccccaacccgacatcgggcacatcagcacaaacatccatcgcgccaccatctgccggctctgacaacagatcttccgggaccatgtcttcaatagtttgatcaaagttcgtcagagataattcttgcagaccaatgagggcagacaaagcaggagaaggaacaccgctactttccccactagctatgtaacgccggctgttcttccgaatcagagggatttcatcctcttcttcatcatcttcatcaacaacacggatagtacacccattggggtcaacttcagcaggatcacacccattgggatccacagcagtcgggtcacacccattggggtcagcttcagcaaattcaggcactggaacttcctcagcaataggaacataaggaccggcatcctgatccaagctagacactcgacgaagacgtctcttcttctttttcttaccctcagcaggagaagtgggttgattgtctcggcgagaacgcttcgggcgaacactgtcagacctctgagcatccaaagctttgccggcctcagggatggacgccaccaccagtgtttcaggaggagcggcatcagaagaatcctcagctaacatatccagcatggcacttatctctgcatcacttggattcaaaggcacctcaaaatgaacctgcctctcgtcgtcaggaatttctccgagtgaggcaaccaaagcactaacttcttcgggagagggtcgcactctaaggcccaaaccgctatcaccagcaggaggatttgacatgaaaccgataaagacctgggaaggaggcag

SEQ ID NO: 32910 - DNA, 430 bp, Zea Mays
cttgcattcaagtcatttttcacataaaaccattcctccatctaggccctgggccaccttttccggtatattggcaccgggtagcttgcgttggggcgggcgacaaatccataacaaccgaagttgttatgatactgttctttccctgtggcctttgtctcatacaaaagttcgtgcatgctacaaaagcacttcgcacttggttctatcccttggcttcttgttgcccagacaaagattcccatcctcaatatagcttcggggatcagctggtggagaaaaacttggtagatcttcaatacttcaactacaaacttactcagcgaaaaccaaagcccagctttgaagaagcttcgaaaaatcacaacttcgttttcctcaggggctgggacgttgttgtctccgccagccctcacaatagatatatctc

SEQ ID NO: 32911 - DNA, 331 bp, Zea Mays
cttgttgcatcacgagctagctagtattcagttggtcatccaccttggcgtcagcacaccaggaagtgggttgtacgtgttttggtcccagagatggctagagatggactagactgatcccgtccatgatagctagcattcggatggaggacgagctaggaaggaatccatctatacccgtgtccactccagcagtgtgtgcgtacggacctcagaagcccagggaagataagcaggttggaccgtacatgacggttaaacttgatcctgccatgcactgcgcccatctcatctttacttcgtcctccttcccaccaacacaaaattgttc

SEQ ID NO: 32912 - DNA, 579 bp, Zea Mays
tggatgcagacagccacatggtgtacagggggctggagctatcatagctgacgagaaggctccaagtagtgagatcctttatggacatgccaaaaatatcaaactcaatagagcaaagttacctatggtaaactgatgaacagataaaagattttgaatgatatgagagatgacaagaacattgcgaagatagaagggcctagcaagaaccgaatcacttacagaggtgaccaggagaatgttcacattgcccacaatgataggtgaaggatgagatgggagagatgggtgggaaaagtataccagggtccatagtggtgtgataggaagtgtcggaataagtgacccagtcagtgacaacatgagccagggtcattgtgctgaacgagctagcaactgactgttgatcccacccaacagaccacgggttccaggacggaactgagtggggtgataggggtagaagcggtggttgaggtgccggtggcacaaagggaagtgggccgagaggataccccgggtcaagcatcgtcaagtgagccgggtagggtggaggcagacatggtgaaggtccaccag

SEQ ID NO: 32913 - DNA, 279 bp, Zea Mays
ctcggatatgtacttggcaatttccctcttcattctagatctgagatcatgatacattttgttgctaccagggtgcatggagaacttggaaaggtgagcttcgtccaatatcttctttgtgagctcagggtccttgggaacaaccaatcgatctccaaaccatagaattcccttgctgtcctgacggaagcacttgtatttctctgccttctgcttgatcatttccttgataacctgaacacccttatcttcaatctgtgccctgactatttgctcttg

SEQ ID NO: 32914 - DNA, 726 bp, Zea Mays
cgataatccactcataacctcttgcttttatctttcttctcaacaaacaatactggggaagcccatggagacctgctaggcctaatgaaacccttagccagcagatcatccaattgccgcttcaattcaacctgctcctttggggccatccgatacggtgccttatgaatagactgcgtacccggaatcagcttgatttcaaaagctgcatcgcgctccggaggaacgcctggaagctctgccggaaacacatcggcaaagtcacacaccacccggatgtcctgcacccgcaaggcagcctcaccctccaccaccatggagaaaaagattcccgacttccttgaccggtgatctggaagcaattgcgccaacaaggataatgtgaactttgcggagcttcccaagaataccacctccctacccgacggcgcctgcaataacactgtcttccataaacaggatataactgcacgatactgagataaccaatccatacgcaagataacatcgaaagcccccaaggaaaacacaacaagattggccgaaaagacctcatcagcaaggatgacggaacacccctgacaaactgagcagctactaatggagccattagcagaactaaccaaaattgggtgacccaacctctgcaccgaaagaccagcccacaacacaaaattctctgaaacaaacgaatagctagcgccagagtcaaaaagagcatgggcc

SEQ ID NO: 32915 - DNA, 341 bp, Zea Mays
gttgatgcccttagcaggaccgatgttccaaaagtggccatgcctttgattgcagatctggaacgtatgggggttgcattgtgctatgtcagcaccactagagaggagactcggatgctcattcaatcctcccttctggagagagtgcgcgtggctcagccgcaggatcgtttgttgcaggaagcttgaaagagggtcggcgatggtaaaccccgtgagttcaccattgatgagaatgatttggttcgtttcaggggccgcctttgtgtgccacagaaatcagaggtgaagatggatatcttgagagaagctcataaaatgccttacaccgtccaccctgg

SEQ ID NO: 32916 - DNA, 564 bp, Zea Mays
cgcaacttagaatacatgaaaacatccatgaacgagcacctaaaaaggccaccacctacacagacccgacgcaccagcccagcaccagacaatatcttcatctatgatgctatcaactgctccctctaccagacccctgtaagacacctggaatgggagctgtgagaagagcaagatgtttggcccccgcgaacgtccataaatcaatatcttcttcagctcttcttttagctacctctagacttggtttaattctgtcaaagacacacccatttctatggttccagagagtccatagcccgagggtgattaaagaattaagccctttttagcaatcccctgcagctgctcactggttctatcccaccactgcatagtgttctcttccccccagctgaggagcaaaactaggcagattgacttgtccaagcagctggaaccaaaagttcctagcaaagacacaacccaccaaaatatggtctgtgctttcttgatcttggtcacacaaaggacttttgtcaggatggcttaaacctcttttctctagacggtctgctgtccaac

SEQ ID NO: 32917 - DNA, 554 bp, Zea Mays
gtgccggtgacccgcccccggcttgggtttttgagggatggatgggaatcaactccggtggccggcctggaggatgcaaaaccggcttcagcgcggctagattttgcaaaaccgtaccgggtatgcatgaaggtggtggtaaggagctgctgctgctgcactgatatcatatataggttgactttggcagacgatggagatcgacgacgttgttgtagtagtatacgtggtggatcgattgcgggcgagccttccggtagcgtgatgatgacgatgacctgtactgaaagcgacggcgaatggacggaccacccaccagccttgccttcctagttttggatatgatctgcatgtctcagcacgcctcgccccgccccgcctataattgcatatcgcatttgtacctgctgatttcccggttcaacttcagccttccaggttccaaattccatctagatcgatgctacgaattccttgcagttgttgtccatgcattgtgtacttgagtactcaacggacccaagtctttctccatgaacgtacgcctgccctgc

SEQ ID NO: 32918 - DNA, 409 bp, Zea Mays
ggcacccggggcgcattgtagaagacattcccgggtggctgagcgacctgggaggacgaatttcttgctggggttgtctctccgtcgtgcggtcgatgcgtgacgtgggcagctccaccaacgtcccaaccttgggtaagtaatcctctggttgactccctttagcccctggaatctataggaccccgcagtagggtgtgtgcatcgcgtgtctgccgacaattgctcgccggagcacttcggctaggccaaaaccgccgtgcgccatggccaggttactccggtgctcctagagtgtaagtatccctaccatctgattctccatgggtagggcagcgtgtgggggctatcgaagtggggtatcgcgtacctgggcgaccgaggccttcttctccggcgtgcctgtgag

SEQ ID NO: 32919 - DNA, 365 bp, Zea Mays
gctgcacctagatacttgtatctcctttcttgtgccttggtccaactgttctattacattttctaggctagcaactaggacgagtacttggaacacttattcaacattgctatctgttactgacttgtgtgccacacatatatatatttagtcagccttcccatagctccagttttctctcgagcagaacaggtactcctttgcaatcacatccacgctcgttggacagtcacaccggtcaccgtttgccacctgcagtgctggtaagaatgttgtaagagcggggtaagacgcttcataatttgtattccaccacctccaccaccaccctgagagatagttatagggttcatattgtttgttgc

SEQ ID NO: 32920 - DNA, 437 bp, Zea Mays
cagtactgaggacaacgaccgcatcagcctgcctaccagtagggatgaaaacggacggaaaaaatctcgtcccgacccaccccattttccacatttaatccgcccatttttggatttccaaaaaaatacgggttcgggacgggttacgggttggccgtcgacgggagcgggacggaaacgagaaatattatttttcgtttggattatcgggatcccgtattcggtcgggatatttccatatttattccggatttaacccgaagcggcgtcaccagtcaaggcccaaatctgccaagcccaacccaacaggcaacatgcctccatgcctccactcggtgactcgtcatgctaaagtgaaaccctaagtccatctttcttctagctggtcgccgacactcacgaagtcatggactcacctagtcacctgtccggccgtc

SEQ ID NO: 32921 - DNA, 435 bp, Zea Mays
cgccgccggtgacctggaagccactccggctagccgtaatcccttccccttgctcacctcccgtggataaagcttttcaccaccgtcaagccttcgcgggttgtccgccgcgtggctctacctttacaccacgtcgccgtgactctctagggccgtcccatcgtcgccggtgaggtcgccacgacgttagccacgggttcatgtgcactagaacctccctgcccctttccgaccaccgcgcatcgtcatccaaattcccggccaccgtctaagccacctataaattgagccctcccctagctccgcagcatcatcacccaccccgacaccaagaatcgttagcaaccgtgcatctgagagcttgaattttggtttctccccaattcgggtttccgctaccgcgaactaacctcaccgcggccagccccctttccg

SEQ ID NO: 32922 - DNA, 310 bp, Zea Mays
cagtcattgaactgaatattggttaacagtgaagttaggtgaactttgagattggattcgaccatgatcagtgattgtttgactatggttgctataacaagattgtagctggattatagggcaacaactgcgtaaggattcgcgctgatcgtgatgattcgtgctggactcgggcaggatagtgccgggagggtgaaaagatcagaaggggagcggatttggtcgcggggtgaagcttatcaaccgtgcctgtagccgtgtgacgtggtcgaaccgccggtgtcattgtggaaactccagcgacctcaat

SEQ ID NO: 32923 - DNA, 319 bp, Zea Mays
ctcaacgttgaagcgtctgtagctatgatgcagctcgaaacctttgaatttctcttctagccttcgtacctcgccgtagtatgcgcacatccgtgggtcgcgcggctccatcgccttcatgacttggtcgacgactaaattggagtctcccctgaccaggagccacctggcccccacttcggccacgatccggagcccgttgacaagggcctcgtattcggcgacgttgttggtggcatcgaagtgaaggcagatctcgtagtggagtttgtgtccttgaggcgatgtgaggacgacgctcgtgccgcttccggtcttg

SEQ ID NO: 32924 - DNA, 460 bp, Zea Mays
ccctctaggtgctctcaccaaccaacttacattttatgaagaggataaagtactagaatacgatgatcacaatcgcccgctatacatagaaggaaacattgtttcaccgcatctgcggcgtgtacttattgaccaagactctgcagtgaatatcttgccggtccgtagcctaacccgggctggatacactttggatgaccttgaccccactgaagtggtgatttgtggcttcaacaatcaagggacttctgccctcggctccatcactgtgaaggtgcaaatgtcctcatttagcttcaaggcatggttcttcatcattgattcaaatacatcatattcggccctcttgggtagaccttggatacataagtaccatgtagtcccctcaactttacatcagtgtttaaagttcttggataataaaggagagcaacatcgaatagcggctaatccaatgcct

SEQ ID NO: 32925 - DNA, 343 bp, Zea Mays
ttcagggcgcgagcggggaaatctgcattttaaaaaggggttcacccctcgagtagcagccatgtcttgcttctctcccactcgcggcgtcctttctcctccgagctccttgcgcccctttgccttcaaggactctgcttcgagttgccgtagtttgccatggccttgtgactccatctcgagcacgcccagactgagtgagtgctcgaaatggtatacgacctgctcggatggaatgcgctggtacttgccggaaggatttgtgccgacgttatccactccgatgagcttgtcgctagagagttcatgccttttgtcctccctagcgggccggtgctatcgg

SEQ ID NO: 32926 - DNA, 296 bp, Zea Mays
aaacaatttcatttccaaacttgaggaagatggaaaattggctaccaatcatgatgacatgcagcaaattcttgaagagtatttttgtaatctgctgggggctgatttgcagaggccttttactattgatctaagtaattgtcacagggctgcgatggatctaagtgttttggagcagccttgttcagagaaggaggttagggacactattgcttgtctcccttctgataaggctcctgggcctgatggttttacaggaaaattttacaagacatgctgggacatcattaaagtcg

SEQ ID NO: 32927 - DNA, 416 bp, Zea Mays
catgaacacagctatggcagagacttgggcttcgggtgaattccttccttcaagttgagcttcgagggctgcaatccttgcatgtgcgtcttcaagttattcgtgtaaccttgagatgtccagggtagcactgtccaggttagtattaagaccagccaccacacctacaagggtgttgaggggatcttctctagcttcacatggaatcacacttgtcaggcttttaccacgaagacgtaggggaaggtgcatgtacatcgtgtcgtgcagttgttgctgataggtgtggctgagggaccacatagctctctgagcaacattgctgaccgaggaggctcaaacactcgccttgtgtcatatagaggtcgaacataggtccccaacgcatgcaacacatcctgcagcaaatttggaaa

SEQ ID NO: 32928 - DNA, 273 bp, Zea Mays
gggagtacctgttaggccacctcgtcatgccagtcacctttagcgctccagacagctaccagaccaaattcctacacttcgaggtagctcggttcgactgcggatacaatgctatcattgggaggccgagctgggcaaattcatggtcatctcgtactacccgtacatgatactcaagatgccttgacctcagggtatcatcaccgtccgatctgacttctagggagccacataatgcttttggggggctatctagacggaccctggatggca

SEQ ID NO: 32929 - DNA, 340 bp, Zea Mays
tggcaatctcgtagcctctgtagtactttcctcaagtgctcttcatgctcttgctcattctgggaatatacaaggatatcatcaatgaacaccactacgaacttgtcgaggtagtccatgaacacacagttcacatgaagtaagcttgcgcattcattagaccaaacgacatgacagtgaactcatatagtccatacttggtgataaatgttgtcttcggtatatccgagggtcggatcctaagctgatggtaacctgaccttagatctatctttgtgaacacacctgctcctctcaactgatcgaatatgtcttcaattctaggtagggggtacatgtt

SEQ ID NO: 32930 - DNA, 766 bp, Zea Mays
gctggactagcacaacaactgcgcaaaactagtcttccccaaaaagactatccatgcaaaagtcgcctaagggtgcagccggactagcacaacaagtgcgcaaaattgaagtcttcctcaaaatactatccgtgcaaaagtagcctaagggtgcagccggactagcacaacaagtgcgcaaaatcgaagtcttcctcaaaagactatccgtgcaaaagtcgcctaagggtgcagccggactagcacaacaagcgcgcaaaatcgaagtctccctcaaaagactatccgtgcaaagaccgactacaggtgcagccggaccgacataataaatgcgctaaacctagtgcacaagtcccctacgggcatgaccggatcagcgaaggtacacagcctcatcatacaaattatagttacatacgtacaacgagggcatcacaccttacattggttcaacctttgggatgatacccatctccctatagttaaacagcattatcctcagctcctcaccctcaaaaagacttcgcaattccccctcacctacactcgccccaacaggcgaggacaacaattcccgcttgccagccctgtccacacgaagacgaccaccatccacctcactcactctacgcttcgccaccgcccttcgccacttacgcccaacactcggactaggcaaaacttcagcatccgtcacacgcggagatgcctccaccgcaaccacatccaaggccacaaagtaatccaagtcctcatccgaagactc

SEQ ID NO: 32931 - DNA, 340 bp, Zea Mays
attcgcatggcaacctacggatatgccgagagtcccgagagagctggccgagcacaaactgaatgtctatccccaggcgaggtcgatccgacaaaagttgcgtcgtttcacgcccgacaagagagaagccatccgtgctgagctagctcgcctagtcacggcaggattcattagagaagtactgcatcctaagtggttagcaaatcctgttcttgtactcaaaaagaataaagtggattggcgcatgtgcgtcgactatacggatctcaacaaacattgtacgaaggatcccttcggacttcctaggatagaccaggtggtagactcgaccgccgggtgt

SEQ ID NO: 32932 - DNA, 793 bp, Zea Mays
caaaattgagagcacatcaaaatctgaaatagaacaaagtttggtttcctgcaggcaaataaccgaaggtctaatatcaaccaccaaagatttaacagaatctctcttcacacgatcattcagccctctcacattccagattaaaaagcagcttgaatccattcaaacaaagatcaaacaccaccagcaaaccagccccaccacacctaaacaggtccattcagcggcaccgtccagccaaacagcgctgccaaagcagcaatatggacgctagagagcccagaaacaaatagcttcgcataattaccggcatcctggacagaaataacttcattatcatcacagaaacccaaatgcatgcagacctgggcagcagcctccgaaccgagttctggaggaaatttggccaccctcctgctccgccttggcataaaattactaggtagaggcttcttccttctctttggaatctgtggagttggcagcaaggcatccactggtttagtgaccaaacactggaactcgcacaagggcgaagaaatcaccatagaattatcaagacccgactgaaccaacggaccatcctgatcatccaaaatagaaggtctcaacctcctggagtagactctaaaaacaggcggcttcaaattccatctagcagaagaagcactgacaacacaactcactgccaaaatcgaatcctccctcaacacagcagccaaatcagcagagggaccatcaggagaataatcaggaaccacaacatcacacaaggccagaacaccaggcgccg

SEQ ID NO: 32933 - DNA, 337 bp, Zea Mays
tgaggaggacaaggtcgcgccagcgagcgtagttggaggacgctgggtcaaggtcaaccatgactagcaaccagatgttctggatactagccacctgagcatgaaagttggcgatgacaaaggtttcgtaagtgacgggggcctcgacatcgtcggagtcgaagggcgggtagtcgacagcgacccccaagctaacgctcagtctccgcgagctggcaggcaagagcatccatagaggtggcccgctcatgctcccgcgtggtggcaacggtggacttggtcacgacaagagcagcgataagggtagaatggacaatagacacctcaccatgagaag

SEQ ID NO: 32934 - DNA, 567 bp, Zea Mays
gagcagggaactgtgttagtggtacaatgacaacaagaggttacaacttgataaaggaagaattctttgctaagactggccttaaacatgacagaaaacaattcaagaatagatggactcagtgtaagtccatgtattctttttggttgtttcttaacaatcaaagtggcctgggtagaagggctgacggtgtagttatagcttcagagtccttttggaagactcatactgaggttagttcactatgtgtcttgtctttcttaggatgcatgtaactgtttagtaatgttagctaaaagggcgtgttacatttgattgcagaaaagaactgagtgcaggaagtttcaatatgggattcctacatacatggaacacttagcagagatgtttcatggaatcgtggttgatgggtctagttcttgtatccctggaagtgacaacagacaatcagaagaagtgtatgaagaaggagatgatggagatggtgaaggattcctaaactccacacccactagtagcagccgcaaaagggctagtagtacaacagacacagccactagtccacct

SEQ ID NO: 32935 - DNA, 399 bp, Zea Mays
tatagaaataggctccccctaaagatatgcatcaagaaattgaatgaattggatagatgcactcacttttaaagacaaatagggagaagtattattcatcttgatcaaggcttataaaatttgcaataaacaatttatgcctagtattctcacaatgaaaaagatttagaatgcttacaaccacaccattgatgttttgaggatcttattatccaagtaggtgttgttgttcttgatgtcctcccttttcatttgagtgtcctcccttgtagttgactctttttcattccaaacttattgaaaatactcaagagagatgttaatagcacaagggagtaaaagatgaaggatgatttcttttagataataaatgtaagtaattcaccatccactagtcac

SEQ ID NO: 32936 - DNA, 350 bp, Zea Mays
tctttatgatctgccatggcgttggtgctcgaccctgttgagctcctcgtcgttttgcgcgttcgtcctctctcgccggtgacagctctgtcgctcttccttctcccagttgagatgtcacacccatgtcctcggtggcgacactttcgtcgtcctccctagcgagttattgcgcccgcgtccacgatggctgtggggtcgtcctcctcgtcgacggcccacacactcgtgctcctccccgtcgatcggccacgcgagctcatcctcgtcaccagcgattcgtcgcgcgagctactccacgtctccgacgatttgccgcacgtgctacttctcgtctccgacgattcgtg

SEQ ID NO: 32937 - DNA, 377 bp, Zea Mays
tttgcgttgagaaacctcttacaacaagtatctgatgacgagttgtatactacttgatgacgattgacgagttgagccttttttctcatcatacggagatgaactcttgcggttcttgttcaaagagtaagaaaccgatttgtgaacctgggttctcctggttgcccagacacaaagaaacagtgacctgcggggagcagtatacgcttccctcgggtgcccgtccgtcctagcaaaagcaccaagcggaagcagtctcgttgtgggggagaggagacgagttcaaaccaaccaataattggtggatgcatctaccatatgggctgtggacgtacgtggactgctgctgccactgctggctattggcgtttgcgtgt

SEQ ID NO: 32938 - DNA, 452 bp, Zea Mays
gttgtaccttggtctcatcatgctctcggaaacgaggtgaagaaacaggtggagtagtgaagggagtgggagtgggggaagcaggcgtggtggaagctattggtgtagcgagggtagttgtaggtactagagtagataaggctggagtggtagtggtggctggagcagagggctgtagtgaggggtcaagtctagctggagtggagcgtaaccaaaatgactaatgtctgacaatgtaagcaatttgatcagagccaatatgcatttgtcctccctgctctactctctcagccgatgctgctgcaaccgctactcgaatagctttatcaagtttgcacttcttcttgcctccctatcgctcaaggtagattgcattgcccttgtcctggcgaaaagggtgaggaaggatccggatcatcccctcctcttagagtggcattcttcgtccgaac

SEQ ID NO: 32939 - DNA, 757 bp, Zea Mays
gaagaccctacgtgaacatccatggaagtgtgggagggagaacccactcggacaccctcgggggctgggtcacagctcgcgttacccattcgagccggatcatctccggcaacaccctcgggggctaggtaagcgccagcaccatccttgatggccgagttctctgcagcagccacctctaaggctgaaggtccctcagtcacttccatgggagcagtgcaatccagaccagcctcctaaccctcaagaccgcgctccaaggtcgatgaggcgcgggacgctgcccgggatgaccccaacccggcatcgggcacatcagcacaaacacccatcgtgccaccatctgccggctctgacaacagatcttctggaaccatgtcttcaagagtttgatcaaagtttgccagagataattcttgcagaccaatgagggcagacaagacaggagaaggaacaccactactttccccactagctatgtaacgccggctgttcttccgaatcagagggatttcatcttcttcttcatcatcttcatcaacaacacggagagtacacccattggggtcagcttcagcagggtcacacccattggggtcagctttagcaaattcaggcactggcacttcctcagcaacaggaacagaaggaccggcaccctgatccaagctagacactcgacgaagacgtctcttcttctttttctgcccctcagcaggaaaagtgggttgatcagctcggcgagaacgtttcgagc

SEQ ID NO: 32940 - DNA, 321 bp, Zea Mays
gttttttatgatccaaagggcacacgagaatttgaaaaacaaggtatgacaaatcaagattttggttagtactttccatagttggaagaaaatagaaatgatgctacaaggtgcactctgtgactgtaagctgctcaatagatttaatattccttttatgtgccatgcgaaataatagaattttgatggaattgaaatcatgaatcgtgtactgaatgagttaaggaaaatagtaatgttaaacaactggaggttcaaagctcatggaaatgttcttctgtgaagtctacaggtgacaggtcaaccaattttatttttctt

SEQ ID NO: 32941 - DNA, 431 bp, Zea Mays
tatgttggggaatgcatcgataggtgtctacgtgaaaaatgtatttgttttatgcatatgatcgacgattgtgatagtcgatgcgaatgaggagtatgattaatcctgttagagtcactggtgcggttgatgtcttgtgcgtaatatgggaacacgtatgtgcgtgtgtgccgtggtgtattatagtggtggtggcttaagatatttgattgaggtgtgcgggtatatgccgtaatgtggttatactcacgacgaggaaagatgtatgtcttgttaacacaacgtttaggttgctgttgtataaccgtgtgaaggatgctcccgatggtcatgtgactaaagggtgttgtagtgggcaaagcgagaagtaagtttaacattttttaaatggattagtttgatagcgcctatcggcatcgtcatgatttttg

SEQ ID NO: 32942 - DNA, 320 bp, Zea Mays
cgtggcctaacataacttggttgttacctctgaaacgctgacgttgccaagcaccacttggtcgttacctctagaacgccaacgtggcccagcataactcggcagttacttctaaaagacgccagcaatgtctgccataactcagccgttttctccatgtaaacgccgacagaaccaaatacgacttagcaattaccagtcattactcgggtgttatctctaagaacgacgacaacgctgggcatgaatgcaagctatcgattaactataaaagaacaatggaaaagcaaaggaaatactcaaaacaagctgaaattttc

SEQ ID NO: 32943 - DNA, 603 bp, Zea Mays
cgactgggtgatcgactccggtgcctcgtaccacaccactcccacgacaggcacgctctctcgctctcaccccccctcccctctcacccatcctcgatcgtcgttggcaacggttccactctgccagtcacctcagtaggtgcctcggttctccctgggtcgttctacctcaacgatgttctcgtagctccccacatcactcataatcttctctttgtccgtcgatacaccactgataactcatgttccatcgagtttgacccctctggtttttctgtgaaggatctggccaccaggacccttctcgcccgctgtgacagctcggggccgctctacacgctccagccctccaccgccggcgcgtctccacctcctgtcctggtctccaccacctcctccaccacttggcatcgtcgtctcggccatccaggacccgacgtcatgaccaagattaccagtggtctcgatccttcatgtagtaggggacattttgagggtctctgtcatgcttgtcagttaggccgacatactcgtctcccatttactacttcttctcgggctgagcaggcttttgacctggttcactgtgatctttggacctcc

SEQ ID NO: 32944 - DNA, 326 bp, Zea Mays
tagagcttcatcaaaacggtacacgctaaagaccgtcgatcccgagatctgcatcacagatttaatgaagtttttatttcctatggatcgtccgatcaccaccccacggcccagatttatcctccgaggaggcatctctacttctcatcataaccgcgagtcccgagatggacggtgcatagggcattttcttcatccgtgccaagacgcattagccgagcacggtggtgccacagctagcgcggcgacgctctctcaccggcgcaagtgcgccccacctccggccatcatcttccaaaggaagcatcacaacaggaagagggaat

SEQ ID NO: 32945 - DNA, 566 bp, Zea Mays
gagactgatgcatttttgttttacctgaatctgcagttgccttgtttgttgttatcttcgcctgggtaagatagagctctgtatcaaagatcttactgtgtccaaatgtgtttgtagggttcccagtactgaataccttcacgtctgcatcggtttcacctgctaacaatggcgaccaaggttctgacggaagctctggtgatccaagatgctgcccagcgtgtctaggcaggaattcgattgccaaggcggcatctgcagttggtcctgctgttgtaaacatttcttctatgcatggtgagaacatatccgtctatttgaaaactgtcaaattcctcaccagtgttgtggctatgtgcagtgaacttctcgaattaccttttgtagatatgcatggatgggtaaacgagcagagcattggatctggaactataatagatccagatgggactatattgacatgtgcgcatgttgttgcagattttcaaagcacaaaagcaattgtgaggagaaaggttgctaacttggcactacacaacccttacatgttaactgtgtaaacacac

SEQ ID NO: 32946 - DNA, 543 bp, Zea Mays
atttgtagcaagtctttggagacactggcttcaggtttcttacactacaaaaatgaggaacggataaaaataaatactatgcaacatctaaacttaagttagaaaaaagataggcatggaggaaattacatgctcgtggaaccactgcatgaaggacggaccaccgtgtaaccctttcaagcgtaggtcatccaactgcttttgagtaagttgtttgttgggtttatatatgctatcaaagatttggaaataaggatgaagttccggcatattgacatacaagaaaagcaaggtcttgttacgctcaatcgttcccacaagatttgatgtgtaagctccgacacctttgccgtcccacttaaaagcacttagatcggtgattggagcatgctcggcaacatggtaccgtgtcgtttgcgcattcacgttgtttgtgtctaaaaaatatttgcttgagaataatgtgatctctctggctgcgaatgcctctacaatacacccctcaacccttgccttattctgcaccattcctctaagtttttt

SEQ ID NO: 32947 - DNA, 334 bp, Zea Mays
gcgggctaggaccgctgactgcaacccaggattgtcgcagagcggtgaaatcccctgggggagcatcaaggattcagggataaaagcctcgtcggtgaccccctcaccgaaagttccaactcctcccaagtcagatcggtcccaggcccgcggtggatcctaccaatgttgctgggaccggtgaactagcaactcagacgcggcctcccctgtagcggcatgactcggcgcttcaagaaatcctcgagtacgtgcatcaaggtcaagcctccaaccaccagttccctaatcctgtccaagatgggcccaaactccagcgcgaggcatggtttca

SEQ ID NO: 32948 - DNA, 514 bp, Zea Mays
aaaacggcgtgaccgggatgtccaagtcgttggtgccatagggtagatgcaagaagagcagaggccgggaaccgcagggggtatagtggaccagagctgttacatctgaagatctcgcgccgagtgggtagatccttcacagagcagccaaaaggatcaaattcaacagagcaattattatcagtggtaaattgacggacagaaatcagatccttaatgagggagggggaaactaaaacattgtgaagagaaagattatagggaagacgggtggtgccagtggaggtaacagggattagatgaccgttgccaacgacaatatgagcaggaagatgctgggaagaggggggatgagatattataccagcgtcagatgtcatgtgactggaggcaccagtatcaaaatgccactcttgttgaggcggctgctgaagagtgacagtttggaagttggcagcgagggtgtgttgatcccagacgggtgcaggcgtagaaggatcggcgtaggcagggg

SEQ ID NO: 32949 - DNA, 702 bp, Zea Mays
aaatattgttcagagtttcaaaggttagacctttgatagggttcgacaaaaccaccttaggacaccattacccatgaagaaaaagctgctgaactgtttaaaacttacaaagaaagatttttggagtttaaaaatatggtttggaaacatgaaactctcaaaacgaggggctggctcacatatatccattcaaaaaggcaccgttgacatccacctggaaaaagcttaaaatcctttgaagcatcaaaggctaaaaggatcctaatggcctctaaacgggaaatggggcaaaggtctccccataatcaataccctctttctttctggcaaaacccttgggcaaccaacctcgtctcgtatgtcactaccaacccatcctcacattgtttatttttgaaaactcattttgtacctatgtggtggcagtttgaaggaggtggcaccaaaacccaaacctgatttctcttaaaattttcgagctcctcgtgcataacattgaccgagttaggatctgtcaggtgtgataattaggggtatccagattatccctctaaaacgcgctcaggaaaggtcaagacataaccccgaaggaaaccaaccaagacaccttctagcccgaggcccactgcggatgtcttccctacaggtaccgagtcccctccccgagggtctcctacctcaggtaaatctctgtctcgcccg

SEQ ID NO: 32950 - DNA, 315 bp, Zea Mays
gtccgcattgttgatgaagatgagaaagaggaggatgaaatccctctagttcagaagaacagccgacgctacatagccagcggggaaagcagtggtgttccttctctagctttatctgccctcattggtctacaagaattgtctctggccaactttgaccagactcttgaagatatggtcccataagatctgttgtcagagctggcagatggtggaatgatggatatttgtgctgatgtgcctgatgccaggctggagttatctcgagcagcgtcccgtgcctcatcgaccttagagcgtggtcttaaggatcag

SEQ ID NO: 32951 - DNA, 350 bp, Zea Mays
gaaattgggaggctatggtggacgatcagaggcgagagctggtgcactaggtgcgtaataacctagcggagctcactggggcatcaatttataaatttcatcagcggtggcgtccaatttggagaaggcgtgctggcggctggagagaggggaagttcactggcgcgggttaccgtggcattcactggagcaacgactcagtcgatatataggccgtctatagcgacctacgacgacgtggtaacaaggcagtagtgtggcgtgctcaggttgacagcgatcatcaccgcgacggccaccagccacgtcgcgacgtaagtggatgaggtgacaaagcggccacagtgctc

SEQ ID NO: 32952 - DNA, 430 bp, Zea Mays
tgagactgctctgatgaagtggtcgagggtgtaggggaggtcttgacggtcacaccgatgtgcggatcgtctccggcgatggtcggagtgggtcggtccacgcgcgcaggcgggcgagctcgtctgtggcgagggctttggcctatccagggcggtacagttcaattgaactggttagtgagcttcacgagaggttagggaagacatatgcgcgaggaattggaaaatggctcaccagatagctcggttcacgcgcggtggcgggtgaccgaagttcggcgagggcgattctgcttctccggtgaggcaatgccttggctcaagcttggagaagcttcacaggctcttggggaagctatctaagggctcagttgaggctaaaggtctctggaaatggttggccacggtagccggcgctcgggtggctcgg

SEQ ID NO: 32953 - DNA, 1384 bp, Zea Mays
ttatattttgctaaacttggaaacgatatcataatatggaaacgacatggaatggtattgaatttcccaaacctgctttcatccctacataaggaagcaattagcaactgataaccacaggttggcgatattaactctgctactaaaatctatctcatcatctaggccttgcttctagcccataccttctctgctctgcctgctgcccaggtgttgagtgacacattatctgccaccaggagatccacgggaggcattggcagaggagagtaggtgggattgcaacagtgtgagtaggtgaaggtgccatggcaaggatgcttcaccaatccctactggaaccaaccatggcacagctcaagcaagtttgaagtgatttaattcaaaaccgattggatttaggtctaattgatgattgatatcgagctgcagcagcagcttgggagcgattcaatttcttggttgtacctatgtttgcggattcaatttggaagagagatttagttgacctctgaactggattctaatctgcactgttgtgaagaagtctatctgatggtcagggtcagggcaagttatctggagagcgacacaagctggctgagagaggaatgtgtgtgatcagacattatggtggaaaatactccttagacacgtcgcagtagcagtagtctgaaaacaatgaaataatgaatggtggaggaataagtgctcaggcacctgtttatggtgaagaagacatgctaaatggagacagcaagagatggacataactttatggagattgtcggagtggtacattgttagcactaatcctgacatgcatgcgtgcgatgggtcggttagcttctagaattgttagctgctgcatgggcgcatgcaaaggatgctcaccatgttgtgcggatgagcggcatgtgtgatcgtcgtgatccgtcattggaggatctacatgcggtgagtttgttgcgatccgtcgggcggcgtcggacgcgcacgacaagctggcaagcgtggagttcgtgctagcatgtctgtccagctatataatcatgtgtactgctcgattgtggttatagaaagcaatacagaagctgtgtgtgtgtgtgcagtcagggagtgtgagcgccatagccattacttgttctagctactgttcatcttccttctctagcgtcctatgttctcgagtgttttgagcgcctgagatttccaacatttggtatcagagccagtttgagggtgaagatagcagtcgagggatccatttccttcatcggaggcatgctggtggtggccggcatgtggcggtgctgaagctccggagtgtgtgccgcctggaaagaaggcgtgtgtcgctcgaaacgaaggcgtatgtgcgccg

SEQ ID NO: 32954 - DNA, 550 bp, Zea Mays
caggtccactttgaggtgcccctgaatcctagcgatgcagagataagtgctatgcttgatttgctgtccgaggactcttctgatgctgctcctgctgggacatcggtggtggcgcccctcccagaggctgatacaactttggatattcagaagcctgccagtactcgcccgaggcgcccttgccgagccaatcagcctgatccttctgctgatgagcagaaaaagaaaaggagacgcctccggcgagtatccagtttggatcgggacgttggtacttcggttcctgctgctgaagaagtgcctgtgactgaatttactgatgctgaccccaatgggtgtacccagtctgctgctgatcccaatgtgggtgcaccatctgttgttgatcccaatgggggtgctccatctgttgttgatcccaatgggggtgctccatctgttgctaacgtggacgtcgaggaggaagaagatgaagttcctttgactcggaaaaacagtcggcagttcattgctagtggtgaaagtagtggagtcccttctccggctttgt

SEQ ID NO: 32955 - DNA, 527 bp, Zea Mays
aacctaggtatatttctgacaatgttctataaaccattattttgtagtaatcacctttgaccaacatatcatttttgtacctaatatttataggcacacgaaggtctacatagatggggtagctggatttattgagtttgcgtttagcaattctataggtggaaatagaattctatgtccttgtagaaaatgtgttaattctctatggctttcaagagggatacaaaaggtggacttatcatggagaaacagactctatgcctattaatagtcatgactatagtgatatagaggctgcaaacaattcagatgaagatgacatagccaatttggttcaagacatggctggtggtctagatgataaaggggattttgaagtatctgatggttcagatgaaactgatgtagatttagaagccatcaattagttagtgatagataatgcccaagagctatacccagggtgtaagaagttctcaaagttgcatttcttaataagaattcttcacttgaaattgcttggaggg

SEQ ID NO: 32956 - DNA, 374 bp, Zea Mays
aaagaatcccaaccatcatccctaatttgctgaaatttctgctttattaatttcacctctaacttggcctccaagatgtctttatctttcctctgcgatgataaggacaaacaatttgcatgtcctaaaataagcaacattaattgcaagtggaacacaaagtcaaagtccttgagataatctagtagaccacgtgcttgacgttttttagaatcatttggaccttccttttcaacatattggagaacttcaataacttcagggaatagattacttaggctcttgagagttttataatgtgaaccccaacgtgtatctccagctctttggagggattgttcttgatttaatccagttccactgcttagttttcc

SEQ ID NO: 32957 - DNA, 341 bp, Zea Mays
aatgaagcgaggggacaactttcctttaactttaaatctcctcataccccggatcggtgacaccttcagatacacgtgatcaccctccttaaactccagtagtcttctcctattatcagcatagctcttttgtcttgattgtgcaattctcaaattctcccttatcattcgaacttgttcctctgcctcttgaataagttcaggcccaaagaactgtctttctccagtttgatcccaatacagtggtgtcctgcattttctaccatatagagcttcaaatggtgacatcttcaaactggcctgatagctattattataagaaaactcagcatatggtaagc

SEQ ID NO: 32958 - DNA, 363 bp, Zea Mays
ggcaaatacctgtgagtagtgtgactccccagcatccatgtggtctgtgtgctgaatcgagtcaagcaccccctttgcaaatatatgcaggcttgtcacattgttaacataaccatctttcaaaaccctgttttggctctcagatctctgggtggaagtcattcgcccacaatacatgcctttgaaatatgttgctttccatatcttccttttctgccacaatgcaacaattgcagggtgttctcttatgccacattcatccaccagcttattccactccacctcaaactgtgtgggccccagaggatagtttatcagggactgcagcttctcctttagattattatcattgtgcaatttgta

SEQ ID NO: 32959 - DNA, 498 bp, Zea Mays
gagtaaagagcatgcaaaaagttttttgtagaaaagagagacctttaatgagaaggtatctagtggatctgatgtcaaaatcatatccttggagttgtgggcgatactgaaagatgggcttgtgatatcttaatgtattggccttgtaagattacaaggattaatagattgattttaggtgatatgatgttacacatatataggcaaggatgggcgatggtttataaaaacagaaccaatcaactgggatccttgcctaatagaggtcaatctatctattctagccatataggcactaggcctaaatagaggtgtggaggcccagcaaggggctgccacaccctctgtctaacaggtctcctggtttgttcaaacagtttgtgatgtggctccaggtgtgtcaggacctggagtgactgggtaagggttgtgatggtattgctctaggagatggatggttctgttaggactccacagggggctttgtgctacataatt

SEQ ID NO: 32960 - DNA, 717 bp, Zea Mays
ggaaaatatatgttaattgtagtttcactttctttatggccataccaatctgaaaaagatggtgagtgactaagcgtacctgaactgatttctatctgtattatttattagttggaacttggaagtggaacagttgtttcttgacattatgcatttccctcatgatatgatactgatattgatgagatgtatgtattgattcaaggaataatttttcttgacctactgggtataaataaaaacatagaattttctgtggtaagatttatggccttttttttgttaactcacagtgaagcttctagttctagcactgatagcttaggtacagccacattagttaatgaacttgcactctgaaatggccagtcaaaatcagtcacaaattagaaaaaatatatgttgaaactgaaaataatgtatggtaatttgataggctgtgcctgtgcgtgtggtaatttatatcagtagttataggataggtaaattgggctgggccggcatgccgtgctgaggcagtagcctaggcacgaccttctcatcgggtcgggccggtcctaggctggctaaaagctcaggccataggtttggccatcaggcctcgggacttttggccaactatagctcagcccccttttgttaataccctgcactttcccaccattcctgatttttctccttctcatgcattcttttgccccatttcttgtttttcca

SEQ ID NO: 32961 - DNA, 282 bp, Zea Mays
aataagtgctgtaacaactcaccgaacgacacgagaaggcgaaggaaaagtacctatcacacttcacggtggatcgccaccagaagatcatccgtcaaggggagatcgatatggaacctctcctaccttcgcctcaggctcccactgtaagtattctagattaatctttcaaggctttcatagaacaacggggggatcagttaaaacaatatatggatgaatctgttaaaggatagacacatttgtatgaaaaaactactgtccctagttttccctcgcatc

SEQ ID NO: 32962 - DNA, 365 bp, Zea Mays
atgttaccagctgggatcagaagcatgatggcattggagcagttagaaggtgttgatgtcttcaagcaaacaaatgtctttgcccaagaacttggccatctcacatatcttaggagaataagcttctttttgcgtcataaggatcccaaggaatttgatacagtgggaagcgaagatttgaggtttccatatgatcacaaagacagaacctaagagaaacatttggccaagttgtttactaaataaacattcaaatcaagtacataaaacatagagtacatcacttgaagaccatggctgttatagaaattcctcaaactactaagctaatgaggaaatccaagatgaatcaggatgaataaaga

SEQ ID NO: 32963 - DNA, 316 bp, Zea Mays
accagatcgctgctaacacagcttgatcagggaatttagggttcagtcagttttggtgatggctctcgggtgaaaatccaaggtatgggttctgtagtgatgcaagatcacgactctggtcataaggtacttactgatgtttactatattcctaagatgaaaagtaacatagtaagtttgggacaactagaggaaaaaggttttacttatgatgggggcaatgggagactatgtgtgtatgatcaagaacacaaactgcttatttctgctcctagaacaacgaataggttgtatattgcaaaatttggtatgtctt

SEQ ID NO: 32964 - DNA, 734 bp, Zea Mays
cgtcgctccaccctcaatccgatcgcacaccggccaccatgtcgtatctagcctcacctcctcctccccatttcccccttatctttccctgccttcacatctaggcaatggtggtcgccgctccgcccccgatctagctcctccgtgtttccccgttctccttcgggtcatgccatcacctcctcgtcaccgtatcagccctacatttcgcccaaatccaatcaatggtggcacatcgctccacccctgatctggctcctccccatttccccacctcgttcgaccgcgccctcaccttctcctcctctccgcacgtggcccacatccgacaacagtggtagtcctcaatgtggctcctttttatttccccattctcttttggctgcaccatcgcctcctctctacatccatcccgcatccgaccggcactagttcatccctgatccatccgcacctccaccaccacgcctttgatcaagtcgtacccctgccaccatggcgcatcgagcctcgcctcgcctcctcctcgtttcacacttctccttcatcgcttgcacattcattcaccatggatcctctcccaccgctcaagccaccctcccctactccacgtccattgcaacaaccttgaccatgatttgagatggcaatcgccttgaccatgccatagacccatgaacaagtgcacaagctacactaccctcacacattaaaaagtagcaacactgctcccg

SEQ ID NO: 32965 - DNA, 619 bp, Zea Mays
ggtgttgtgggtaatatggatgttcgttttggtagtgatggtggtggtatggatggggttggtaggtatgagcgatggctctatggttgtattttggggcagctctggccatctggtccttggtttccttagtttccgggcagtctctagttgggtgctctgagtcttcatcatggaagatgtagtagaactttcttggctgctagggacctctgcctctgcctttgcctcaagttgcgttgccattgtagccttattgtggagggtagttttggtgccggggtggccctctgtcggttgtagctggtttgtgatgttatggacttggagttgctgaccacactctataagggcagagtcttcctacgggggccttgtccatgtcctgctggtttgtggagtctcttttggattccgttgtgactcaacttttatgtggtggagttcttttgaccgggcatatttttcaaaaagctgatacaactcctggaggttggacggagggtcccttgtgcagtgactatatagtacgcttccacaaaggccactgattgcatagtggatggcaatttgttcatcaactgagggaagctatgatttcaagaggagaaattttttg

SEQ ID NO: 32966 - DNA, 327 bp, Zea Mays
gaacaaaaagaataacctccacttctcctctttgcaaaccgggtatcacactctacctcccttaaaaagaattcgacctcgaattctgacgcttctatcggaacgacaaaagggaaaaattaatgaatcaacaacacttacccacaacaaaaagttccggatatttctgctgcatcagctcctcaagttcccacgtagcctcgcgctcagactgattagtccataagaccttgacatacttaattgatctcttcctcaaaacacgctccgaggattccaagatacgcaccggacgacactccaaggtcagatcctgctgcaccgcaa

SEQ ID NO: 32967 - DNA, 3110 bp, Zea Mays
gcgagtcgtgactgcatctcctgcccgaggttggcctcgggcgagtggtgactgcgcctcccgcccaaagatggccttaggcaagtcatgactgcgtctcctgctcgaggatggccttaggcgagtcatgtatacctctctagctcgagcttggcctcgcgcgagtcatgactgtgtctcctgccctgtgttggccttgagtgagtcgtgactgcgtctctcacctgaggttggcctcaagcgagtagtgatggtgtatcccacccggggatggtctagggcgagtcgtgaccgcccgggaatggtctcagatgagtcatgactgagcatcccgcccgaggatggcctcgggcgagtggtgacaacatctccagcatgggtatggcctcaggctagtcgtgactgcatctcccgctcgggaatggtctcaggtgagtcgtgactgcctctcccacccgggcttggcctcgggcaagtcgtgactacgtctcccacccagggttggactgagacgagtcataactgcatttcccgcccgaggttggcctcgggcgagtcgtgactgtgtctcccgcccagggatggcctcgggtgagtcgtgactgcctctcccacccggacttggccttgggcgagtcgtgactatgtctcccacccaaggttggcctcaggcgactcatgactgcatctcccactcaaggttgacctcgggtgagttaagattatgtttcctgtccgaggtttgcttcaggcgagtcgtgactacgtccctcgctttgggatggcctcgagcgagtcgtgacggtgtctcccgcccgaggatggcctcggatgagtcgtgactgtgtctcctgcccgaggttggcctcatgcgagtcgtgactacgtatcccgcccagggatggcctcgggcgagttgtgactgcgtctcactgctcgaggttggcctcggtcgagtcgtgaccgtgtatcccacccgagattggcctcgggcgagccatgactacctgtcccacctgaggttggcctcgggcgagtggtgactaaatctcctgcatgaggttcgccttgggcgagtcgtgactgtgtctctcgccgaggttgacctcgggagagtcatgactgcttctctcctaggggtggtctcgggcgagtcatgactgcctgtcctgcctgaggatggcctcaagcgagttgtgactgcctctttcgcccaaggctagcctagggcgactcgtgattgcctctctcacccgaggatgacctcaggcgagccatgactgcgtctcccacctaaggttagcctcgggtgagtcgtggctgtgtcctgcccaaggttggcctcgggcgggtcgtgtccgttttctgccagggatggcctcggatgagtcgtgactacatgtctcaaccgaggttggcctcgggcgagtcgtgactaccagtcccacccaaggttggcctcgaggcgagtggtgagtgcatctcccgcccaaggttggcctccgacgagtcatgactatgtctccttcccggggttagccttgggtgagtcatgactgtgtgtccctcctgaggttggcctcgggaggttggtgattgtgtttcccgcccggcgatgcccttgggcgagtcatggctgtgtgtcccgccagggatggcctcgggcgagtcatggctgcctcttccacccgagcgtggtctcgagcgagtcgtgactctgtctcccacccggggatggcctcaggtgtgtcatgcttgtgcatcccacccaaggatggctcaagcgagtcatgactgtgtctcccacccgaggttggcctcgagcgagtcgtgactatatctcctgacataggtttgcctctggcaaatcgtgactgcttctctagcccgaggttggcctcgggcgagtcgtgacagtgtctcctacacgggattggcttctggagagccgtgactacatctcccctaaggttggcctcaagcaagtggtgactacgtctcgtgttgtggtatgacctcgggagagtcatgactatgtctcctgcccgaagatggcctcgggtgagttgtgactgcctctcccgcccgggcttggcctcaggcgagtcgtgactatgtctcccacctagggttggcctcgggcgagtcataactgtatctcccgctcggggatggcctcgggcgagtcgtgaatacctctatcgctcgcggatgacctcgggtgagtcatgaccccgtgtgccacccgaggttggcctcatgcgagccgtgactacccctacgacccaaagatgacctaggacgagtcgtggctatgtctcccgctcgaggttggcctcggggcgagtggtgatcgtctcacacctggggatggcctcaggcgagtcatgactacctctccatcctgaagttggccttgggcgagtcgtgactgtgtctcctacccgggctggccttgggagagtcgtgattgtgtctcccacccgaggttggcctcagacgagtggtgactgcgtctccctcccaggtatggcctcgggcgagtcgtgacagcgtctcccgcccagggatggcctcggataagttgtgactgcctctcccgcccgggcttggcctcgagcgactcgtgactacgtctccgacccagggttggcctcaagcgagtcgtgactgcgtctgttgcctgaggttggcctcgggcgagtcgtgactgcgtctcctacctggggatggccttgggtgagtcgttactgtctttctcgcccatggatgacctcgagcgagtcatgactatctctcccacctgaggttggcctcggacgagtcatgactgcccctcccgcctgtggatgacctcaggcaagtcatcactgtgtgcctcacccgaggttggcctcgagtgactcgtgactgtgtctcccaccttaggttggcctgagccatgtcgtgactatgtctagcgcccgaggttggcttcaggtgaattgtgactgtgtctccagctcggggatggcctcgggcgagtcgtgatggtgtcttccacccgaggatggcctcgagcgagttgtgactgcgtctcccacccgaggttggcctcaggcgagtcatga

SEQ ID NO: 32968 - DNA, 659 bp, Zea Mays
atctgcgcttaacagagcgtgaatcgcggcgctggcgcgaatccgaacgcaaggtcaccggcggcgaggtgctctacaccagaaatatttctggcactgtaccatcagggggtcattcaaagtatctgacaacacgatttgaagtgccctaatctcatatttttgtgtgagaatgtgttaacctctctgcaacaaaatcgtagccctataatccagctacaatcttgctatagtaactatactcaatttatcactagatctcacttcaattcgacctcaaagtcctgccaatgttactggtaaccataattcagttatcagtgcaactgatagttcaactttgtgctcattttactccaaactttgtatgtgatcaaggcttagttacttaagcaaagttgcactcctattatagctctacaagtttgatgtgttgaccctaggcaaatttcttgtatttttagaactacagagctccaaagtcagccctattcaactgattttggacttaggcacatgaggggtatagggtgtctttttgcaaataagcccaaatctcataatttgatttgcaaatcctcaaatgtgtgaaacatatgaattgaggtgccctaatatctttgtttttgcactttggtccaaaagtgcaccaattttac

SEQ ID NO: 32969 - DNA, 1096 bp, Zea Mays
agaattatgaatgtgtgcagtattagccttactggtcatcagcctacgaacatccgcatttgagaccaccacatgcctttcttcaaattcttggtttgacccctcatcaaatattttatcaaaaaatgcatggtctgcagcaaccgtatggatctcatgccagatgagagctgaataagacgtttccctagatactttgagaccaccacaaacagacagcactaatgcattgttatgcacctgcttgcactgcatctggtcatccatctcttcaactagctgctctcgtaagccatgtgaattactgaagccatcacactcacagaaaactggcacatcatgcacatggatgagatttagaacatggacaacaatctgatttctatctagaatcaactcattgctatctaaatactcttcccccccccccggagttgccgagattgcatgcatttgctcaaagtagtcacttcctcatcccagataaccacgtcacatagctcagcattcgtgtctgtctcgccaaccatacactctccttgagctactagtttcaataaacagttatgtaactgaagaccttgcggtaactcatcatcccacagaatagggctagaaattgcatcaaacactctatgggcttcactcatggatgtcatgggtaccttgaacaatgcctggtcatgctgctgcaatagcacatgtggatcagaaccatgctgcaattccatagcaagctctagaaacaatggcgcattactggaaggaataagcacgacattggcatcaagctctgcagtatgctttgtcttctcgtaatgcacatactctgcaccacatgctagctgttgtcataagccatcatgcgccacttgagttgaaatctcatcccacactacacctgtaggatatatttcctccagtgtagctgcatcatcccgaaaagacaattcatcaaacagctaagtggaagcaactggcgccatccttaaatccttgaacatcaccatattaggacaggccacatcatcatcccaacggggcatatcattgcatactttctcgacaactacttccgccatcgcagtagcagcca

SEQ ID NO: 32970 - DNA, 293 bp, Zea Mays
cagaccttcggtttctgttgagcaaatttgtggttgaagtgttaaagatattccaaatctttcttcatcggattaccctcgaagctataattaggatggggatgtatgtttgggctgtaaggagccaggggctggagccgagcgcgaagtgcttctgcaatatgcacgagctattatacgagacgaaggctaccggcaaagaacaataccacaacaacttcggttgttatgggtttattgcccgctctaatgcaagctacccggtgccaacataccggaaaagatggtccagg

SEQ ID NO: 32971 - DNA, 381 bp, Zea Mays
tagctcaaatggtgataggggaaatcatacttaggggcatcagcacagctatcagtcatcaggaacacaacaaagctcctttaggccaccatctccaagaggcagaggaagaagaagcttcgagtggaaggttcagctcccaaccaagaaggttgttttgtttattctgtggagaagacaaaggacatacaacaaggacgtgccaagtcatgatccagaaacaaaaggaaatggctgaagctgaagcatggaacaatcagccaaagcaggtcctacatactgcttcgtgctattccccatacatccctgagtatgtgggcaaccaacagtccacagcatatgttgctttggcaagccattcacaagatgcatggaccccac

SEQ ID NO: 32972 - DNA, 629 bp, Zea Mays
gtggagggcaaacgatgaagcacgacgattagggcgagtgggggcggtgggggtggtcgtcgatggcgatcgtaggagcgggtgacggcgacggcgaggagcggaattttgagggtttcggtggggccgcgatgagtgggttgattgtggtcgggtgggtcttggacattgaccatattggctcggtcggctagtggggagcgacgcataactgtggggacccatagtgtgcgcacgatcagttggtcagtgtgtgtacgtcgtgttcatatgaagcataaagtgttgtgcaaaggatcgtaaatagtttatacaagcattaatcccgaaccacaccccggatgtggtataaattgttgtgtgtacatcgtgttcatatggagcataatttgttgtgtaaaggatcataaacactgtgcgtctgattgatatgtagttgttatcatcaatttatacaagcataaaccccgaaccacaaccccacagcgacccgaccacaccgctacaacaatttatgtaaccattgtcgtcaaaatacacatgcataaacgcggcacacccccacgcgcgaccccaccacaaccccggtgcacccgcgcggaacccccgccacggcaccacccgacccg

SEQ ID NO: 32973 - DNA, 527 bp, Zea Mays
acggcggtcagcgcagcgcaccatctccggtgagtcactcgccctccacgctatctttgtttgcagctggtactcgggagcgggcgacgataacagggtggggagtagacctggggtcggagaacgggccggggtacctctgtcgggtcaagggcaagcgtcggatggccggtatctggcgggagaagtagggtagcggtcggctggactggtgtcgtgaggttgaagatgatgggatagccatggatcataggatggacggctgggatcggatcgcagtccggatggggctgctggatcatcatggtcgttggtaggaagagcaacggtcgagatcataacgtgtcataccccttcgccatgtttagtcagggccgtcgatctagatctgacggataaaatttaacctagggcaataaaatccccaccgttgaatctcaatcttgcggttctggtcgcataccgattcattcgtggcacaaccaaatctcggccgcatgtcttggatctaacgactatcacacgcg

SEQ ID NO: 32974 - DNA, 1591 bp, Zea Mays
gttcagggtttattgtgtggggtttgggtttaggatttagagttcgtcgtttactgtttagtgttgtgtttttgggttttgagttttaagtttgaggtttgtgttttggagttcggggtcttgttttagggttcagggtatagggttcacaagttagtcaccggaggctaaaaaccgcgcttcctgtttcagtggccaaaacatagagtgtggacgagaggcatgaaattgttgttcgacgatgaaaacatgtgtcgcgggaggccaaaaatagccttaccggcctccaaggccaaaaatgtgtacaatggttcggacactagtgtactatggtttggacactaaattggttgttcggccatgaaaacttgtgttgtagctcacgcgaggcccaaaacagccttactttactttttagggttgtgttttagggtttggagtttggggtttggagtttagggtttacagtgacactagtgtactatggtttggacactaaattggttgttcggccatgaaaacgtgtgttgtagctcaagcgaggccaaaaacagccttactttactgtttagtgttgtgtttttgggtttggagttgtgttttggtgttcgggttttcgttttagggtttggggtatagggttcacaatttagggttcagggttcagggttcgggctttagggtttggggctctgtgtttagagtttgggcgggaggcatgaaatcgttgttcgacgacgaaaacatgtgtcgcgggaggccaaaaatagccttaccggcctccggggccaaatgcgtgtacaatggttcggacactagtgtactatggtttggacactaaattggttgttcggccatgaaaacgtgtgttgtagctcacgcgaggccaaaaacagccttacattactttttagggttgtgttttagggtttgaagtttggggtttggagttttgtgttttggtggtcgggtctttgatttagggttcgaggtatagggttcacaaattagggtttggggttcaatgttcaggccttagcgtttggggctcgaggtttagagcttaggcttttgggattcgagatttcgggtttcgatttgagggttagcgtttggggtttaatgtttagggtttggagtttgggatttgtgattttgtgttttgggggtcgggttttagtctaagggttcgcggttacgggttcatggtttagggtttggggctcggggtttaggatttaagtgttttgtgtgatgtagctcaatagatgctaaaaacaacctttcccatgccagtagccaaaacatgtttggcgggcgggaggcatgaaattgttgttcgacgaagaaaacatgtgtcgcgggacgccaaaaatagccttacaggcctccggggacaaaaatgtgtactatggttttaacactagtgtactatggttggacactaaattggttgttcggccatgaaaacatgtgttgtagctcacgcgaggccaaaaacagccttacctgtcttagtggccaaaacaagggtggcgaacgggtggcatcaaattgttgttcaacgacaaaaacatgtgtcgcgggaggc

SEQ ID NO: 32975 - DNA, 322 bp, Zea Mays
atactatggtggcgtcatcctcattaggatctcttcttgacagggcctgaagtcttttcctccaggtaggggtatttttgttgctgggtggaaagtaacgaaggggtgtctcgaagacttccctgctgtagttttggcatagctggcggagggctttttgggcaacattttggcaagtgtctgggaagcggtgtccagtgaaggtgacttggaaaggagggtgatttgggtaatttcggctttctcccaggtagactgccatagagcatttcttaattccattctcgcggtattctatccagatgtactacggcttcttgcg

SEQ ID NO: 32976 - DNA, 355 bp, Zea Mays
taaacatcaaggtaagatatagaggtaataagggtaaaggtggtaatgatgaaaagcataaccatggatagagttaaggcaagacttacaaagtggagaaaacaagcaagggtaagataggtaaggttccaacaaaatggttgaagtaaagaaaattaattaccaagtggagtgacaaggagacaacgagattaccaaggatatgcaaaataaaacgaccgctcatggatcattaaaaacaagggtggtcaagggcacgttgactgaaatgtcttaaacagatattgagatataaaggtaagcacatataaaaataagagtatgcaagattccaatggtatgagcgtaccaagac

SEQ ID NO: 32977 - DNA, 337 bp, Zea Mays
ctatttatagacaaaaactagggtttcagacatatgggccacatgggccttcctggcccaagaaaggtttcttaacactcccccttggcccaatgccgcaagatgcatatgtcccaaaactccataaaaaccagtgggaaaaattggagaaagagtacatagctcacgcttgttgtgtcgcacgaattgcctcatcaaaaaccttagtgagaaactttcatgaaaactcacataagggaaaaagagtacaattcacccaatataacaatttaatcttctagattatttgggtacataaaatttatgtttaagatttatttgggtgtgtgtgaagttt

SEQ ID NO: 32978 - DNA, 408 bp, Zea Mays
ggtagttctagctgatatgcaacttctcccactcgctttaagatcaagaaaggtccaatgaagcgaggggacaactttcctttaactttaaacctcctcataccccagattggtgacaccttcagatacacgtgatcaccctccttaaactccattagtcttctccaggtatcagcatagctcttctgtcttgattgtgcaattctcaaattctctcttatcattcacacttgttcttctgcctcttgaataagttcaggcccaaagaactgtctttctccagtctgatcccaatatagaggagtcatgcacttcctgccatataaagcctcaaatggtgacatcttcaaactgatctggtagctattattataagataactatgcatatggtaagctcttatcccaa

SEQ ID NO: 32979 - DNA, 497 bp, Zea Mays
cgaatctaagtattgaaataagggggatagactttctcgctaacctagtagtaatgggtactcaagggttagatgtcatcctagggatgaattgtctacacagaaacaaagccaccgtcagttgcgataagaggacagtcaagttggtgtctatgggggacagatatcccccgagtccactagaaggctagaaggcctcgcgaatagctttgggcctattgtttcgcaaggccatcccttcgtgggccaggggagaattgatggcagaatgggccgacgctgggaatgagcgaacgtgagccaaggcggctcgcgaggttttgagcgttatccacagctctgaattattctcccgtgcgaccaccttagacatcagaaccaagtgaggataagtcggcaagattgtagcaagataagtttggccggttcactattacttaggagtatatcgttatcatacacgcatgtaagtgccccacggtcggatatataaagcc

SEQ ID NO: 32980 - DNA, 305 bp, Zea Mays
cgaaagggtacggtgaggtttgggccatccgatccacacctaacacactagattagatctatgctagctatttaaccacagtcgctcttggtcgtcggatctgacatccgcgttccacgacgcacgatcccttcactctctctcagtcacacgatcgttgatctacagtcgtgattgaatgggctgaagcgttatgctgattctaatcatggccatccaaaaccaatcgacggcacacgagcgtcgtctccactaccgtcatgcggagcggccgggtgcgcgtttgccagctgcgactcccccgc

SEQ ID NO: 32981 - DNA, 273 bp, Zea Mays
ccgggagccgaagaggtccccgagccagagggggatttggttgtctttgaggcgtttttcactgtcagactttgctttcctgcacatcggtttgtcgtcgaagtgttgtgacgcttcgaagttcagattcatcagcttacgccgaacgctatggtggcactggcgaagtttgtgtaggaaactacttcgtatgatggggagccctcagtcgaggtcttcgccaagaactattgtctccattggatgaagaaggtttttggtggcaagattgca

SEQ ID NO: 32982 - DNA, 558 bp, Zea Mays
gcagtataagaatcccaccagtcagtagcaggacctgtcagacgacctgaggcataaagaactttctcccggtctgagattgggcaatgttgagcatcttctcaattgacttcaaccaatcatctgcatcaagtggatctggcgaactggcaaaggtcggtggcttatgactcataaactcctggtgcttatcacgaggtggaactggtggtggtggtggaggcaatggcacttgttgctgttgctactgttgttgaagttgttgttgcagctgttgttgttgcgcccttctctcctggcgtatctcctctctctcctggcgcaactcctggcgtatatcttctctttcctgacgcatctcctagcgttcttgctgcatctaggcacgcatatcagccatagtgtcagccatttgctgcatcaccgccatctgagctgcaaccagtggatcaactccgcctggtggaggattaggaggattcatctccgctggctgtggctgaggttgtctatatatccttcgagtgtgttgattaggaggcaaatcaattccaccac

SEQ ID NO: 32983 - DNA, 486 bp, Zea Mays
agtcctggcatagatgggtgacaagggtgttcaagtcattaaagagatgctcgaacgaaaggtggataagtacaaatgctttcgtcaggacagcaagggagttctatggtttgaagaccgattggttgttcctaagaatctagaactcaggcagaaaatattggatgaagctcatctttccaaattttccatgcaccccggcagtaacaagatgtatcatgatctcagatctttgtattggtggaccagaatgaagagggaaattgctaagtatgtacctgaatgcgacacttgccaaagaatcaaggctagtcatttgaaggtagcaggtaccttacagcctcttcccgttccctcttggaaatgggaggatatttgcatgtattttattgtgtgtttgcccaacacctcccggcaccacgattctatttgggtcattgtggataggttaaccaagacagctcatttcttgccaatacataccac

SEQ ID NO: 32984 - DNA, 353 bp, Zea Mays
ctccgctactgttcttcgctttaaagcccttttagaaatcatttggatcaggattggacagtgttcagccacagttttaccaagaagccaacgatcagtacttaaagcgttctgctgaagattgtctgaaagccatcacatcatcatttggatcttactgattagtatatgattcctttggtttccatgaggacactgcatgcattatcctccccttccatccttgtatcagccatctgctatcttcgtcgatgacaaagtcttcatgataatgcttgtctttttcatctattgatctcttcatgattgctttatcaacaggaagttgcttgaacccagccttgagacatctc

SEQ ID NO: 32985 - DNA, 323 bp, Zea Mays
tctcgcccttgagatttaggctggatttgagaaaagataagggtattccctcctcatggagtcctcactctcccaggtagcttcctcttctccttctctgctccactgaactttacagagcttcacctctgaggtgcgggtctttctgactgctgaatcaagaatcttcactggcttctcacggtactgaaggtctttctgaatctgcactgtctcttcttcgatgtgactttctggtgcttgcaggcatttgcggagctgggatacgtgaaacacattgtggatgtcggacatggattccggtaattccagacggtatgctg

SEQ ID NO: 32986 - DNA, 513 bp, Zea Mays
tgacagagggagttgatggaagatgaagtcgtactgaacacgtgcctcaatcttaccaggagcacgttttgcgggacccatctggtacgatggataggcatagagtaagctacatagccttacacaacagatggatggggtagagctccatgcgaggaatatggaggcacatgacccattaggaggagccacaccgtgagcaggcacgcccctagaagggcccgctgcgcactatagcttagggctctggttgaagaactttctctttctgtgtctctccctttctttctcccactctcacatgtaaggactatcccttgaagtataaaagggagtccctctcccctcgtacgcacaccagttgtaacacgctccactgcaatactacgatcaacattacactggactagggctttggcctgaagcagtataaacccttgtgtctcagtcccttgcttgattctccgtgatccaccatccggagtgagtccttgcttgcatcctcactgaaca

SEQ ID NO: 32987 - DNA, 1283 bp, Zea Mays
caatgagatttgaaggtgaagaagtgaaggctctggctcttggtgctggatgggttgctgcagtcacaagcttaaattttttgcgcattttcaccgaaggaggcttgcaggttatattaactttcctaacatctacaattggaaccttctaaatttatctagttttattcctgtctggaacataatgaagatctttttgcttggaggaagctgcctccattttagttcccacatacaaatgaactatgttattaatttcatgttcacagcttcctacatgtgctccctaggtctgaaatttttaaggtattaaattgttgacaacattttgctttgtaccactcttcattctctctcaaagtccacaaccataaggactgggtggtattcgatgttctgtttttcgttgaagactgtaaaggatatacgacagctgtagactcttgtagagagatcttttagtttagcagatattgtctatgtgaggtggcaaatggtaatagttgtctaaaatagtggaaaagagaagtccaatcagttaatgagtttgagcaaaaaaattgtataagatatgatagaatccaaggtcaagttgaggtccatgtactattagtaggatttagccttatagattatcttaagatgtgtaaaagatcgactcaagtaatggagaaatacatttccatatgtccagttgccatcacccttatttccattttctactgtcactccacatctctaattgcaagcaatgtaatctgactctgaatttattacaatacaaagcatggttctcgttcttatctcttatgcaagacaaatcagaatcacaacactaaccgtccaaatttattccacagatgcatatcctctcagttagtggcccggttgttacagcagcaggttatgaagaccagctagctattgtgtcacatgcttctgattgtttgccctctggagatcaggtatttgtcaggattttaatttgctctaatgttgagctaaacagtgatcttatatatcgtgccaaagctactttatggttttaagtagtgagtagtgacctatctgtccctttagtgttacacatatttttcgatgagaaatgatgctggaataactaagtatttgtgacggatactgacaggtgctggatgttaaagtattcaacatatctgaggggacacaatcaatgtccggtcgccttgttttgacaccattgtctcgattatcttggtttggattcagtgagaatggccaacttagttcatatgattccaagg

SEQ ID NO: 32988 - DNA, 336 bp, Zea Mays
gctgcaggtactatacctgctcgtgtttgcacaaacaatatatgacagcagatcgacagctaggtttttagactgcactggtggccggcactgaaccgattgatttctccaactgtcgctgtaaaaactagttagctccaagtatgcatgcatatgccttgttaatttggaactagctagctgcaaactgactcatgtaaatgccctgacacagtgtaacttaaaagctagccagagacttttgatttgttgtatacatggggatgaagtgtgtgatccatgtatatattttagaaattagaactgtatatgtgctactagctcgtttgacaaaaa

SEQ ID NO: 32989 - DNA, 310 bp, Zea Mays
gagggagagttagagcaaagaaagacaacagtgtgtatgcacataaatatatacgcggagacaacatccaaagttgtagattaatgatattaagggcatcataattaaagttggtagttccgtcatatgtactagatgttgttgaccaccatatgtgctacatggtgaggctggacggtctgggccgtagacggtccgcatctaggcgcggatggtccgcgattggatcgatcagaaggtttaatccattttttgtgcgtgtttgtccatctaaacccacatattctattagggaacgtctaggaacgag

SEQ ID NO: 32990 - DNA, 709 bp, Zea Mays
atctatgtgcttaatttaggggcaaggttattagaatgctaatcactaagcttactatttgacatttttattcaagatactcttcgtgcacaagatatgcagagcatgcgagggttcgtgaatagtatttctagcctctaggaatgagtgcaaaaaaaaacaatcatgttcttgccttcactcctctcaatcattttctttctcttaaagcaatgggggttggggaattcggtgcttgtgttacataccggtgatgaagaaaggtggtgtgaagtatggagaacttgaaagctcgctcttcaccttaactttgttggcatgtcctaatttagaagttagcatatccattgtcatggttgtcattgtgtttgcggactcatgtcaagatacttaggcagagcatggtgctaacagtacgagtaaagtcgactgtggttgatgggattttttggggtagggcaacattactgtccccctccctctcatttattggtgtatgctgttgaaaggatggccatagaaagcaggcctcaacagtgcacctatgctaatgcttagatgagtcatgagacacacgaggtaaaagggtcaaagagcattgcaccatggagcctgcttaacaatggcctattggtgggctcacagacaaacctgtcgcgtcctgatgttcaatgccctaggttcattgtctccacaacttggacgacgt

SEQ ID NO: 32991 - DNA, 372 bp, Zea Mays
cagggatagcgcccccgcgaacacctccaataccggcaccctgagcaccagtaggagcaattggaatggcttgcctcagaatggccaactcctgctgcatggctcgcatcacggctaacattgccgccggactcatagaatccccattatgatcttgcgggctgccacgagtccttctaagcggcatagctgcagccacaggaggaaataaaagtaccacaacatcaacttgaagtaaatcaaacaagcactaacaattcctgttatagcaatattaaagcaagcaacccatcctatatgtgcagtgtgtcaatttatcaccattttcttgcaagaatcaaccgactatccctctgttaccaactgtaacac

SEQ ID NO: 32992 - DNA, 358 bp, Zea Mays
ccgaaatctgaacatcaaatgtcacaggataatcgttagtaagcagttgtcaaattgtcttgattatagggggaagtattaaccacagacgtcgatgcaacctaaaccctaattagtacatgggggatgaccggatccgtaacagcacatcggggaggagacagggtacacatggaagttacgaatgtacctgcgaagacgaggagttgggatacgggaggagtccaaccttgcagacgaactggcggcggcacgggcaaaaccctagcgacgtcaacgatcagggaagttttcgaaacgaggcagcatggggaggacgacgagcggatacggaacggaatggacgaaatgatccgcg

SEQ ID NO: 32993 - DNA, 316 bp, Zea Mays
attggggggcccaggggggaaattgacgaggtgcatctggccgtcgatttgaaattggcggcttggattagatccgggggaagacacgcgtgcaccgtatattcacggatgagtggctgggattggctcgcgcgtaccgtttcggccaaaccgatctggttcgtccgatccaaatcatgcgtgcgtgaatccacgtgggcaacttaaactccgggtcgtcgatcgttgatccaaggggccagcatgacttgtcgatctgttagaagactagtctaatctccaccgtgcgtgatagatccaacaggcgagatccaat

SEQ ID NO: 32994 - DNA, 369 bp, Zea Mays
tgcctctggctccaaccaaggtggcttggtttatattaggtacaccttcctatacagaagccaatttgatgagccaaatgatgactggctagacgttatagaggccacaagtgatgagctactcagagcctactcgaggacagaagacgaggccatgacagttgccttcggcgctcgcgggaaaaagaggctaaacaaggtgttcgatgttattgggtttgtttacccagattactgctttcctgtccgaaaacaagggggaaaaataaaaactgctgcttcaacgtcttctatcgcgctgaagccgaagagagccaaggtcttgacacataggccgaagcctattggaatggcccaagtgccgaagct

SEQ ID NO: 32995 - DNA, 437 bp, Zea Mays
cttgttcgatttgctggagaagagactaccccagagccgaagaaagatgaagttgtggttttcaagagcttcttcagagcggggctgcgatttcccttgaacgagatgataggggaagtcctaaagaacttcgaaatatatcttcattagttgacccctaatgctatttttaggctcaatgtctttatctaggcccttcgaagccaagggatgagaccagatgccgaagctttctatcgagtgcatgagctgcactatcagacgaaggccaggacagatggtcttcatgaaaattttggttgttataattttgcgtactgaaaggatacgaaggcaccagtcctcagctaccgcacaaagtggccaacctgctggaaaaatgaatgattttatatgaaggctgatgagaaaaacagggagaagctgatgaccatggt

SEQ ID NO: 32996 - DNA, 491 bp, Zea Mays
tacaaggccatagctcttgaacacaagcgtgttcagcttggcgagatgaagaggaaggccatcacctagggccagggcagcagcagcatccgtccttgctatgctccaccccagggtacactagctcgtcctagaggaggacaacagtctctccagcgccctgttcagcagacacctcaggctacgcctaagatttcatgtccttgtcaagctacccccactagcacccaggcgagacctgctggccagaacactactactggcactacctgcttcaagtgcggcgaggttgggcactacgccaatgtttgtcctaagaggaaccccaacaccccaattgaggcagtaatcagggcaagcagactcatactctaggcaataaccgtggatataatattgctagggttaatcaaatcaatgctgaagctactgctgatggttctaacatcatcattggtacgttcttcattaattccgtactaggttctata

SEQ ID NO: 32997 - DNA, 291 bp, Zea Mays
ctttggaagagggttggttttggacttagaaaaattctgattttccttttatgctcaactctttggtgaaccttttggggtttttctgaaacctttttggggtcacattcttactatttttagtagggtattaggtgtactacaatcgttataattggcccaagtcagatcatgtgatttttatagccttttggtcatactcacttatagtgctccaattgtccaaaggggtttgcattagggtttgggcaattctccccattatatgtgcatgataagccaaggcatgac

SEQ ID NO: 32998 - DNA, 537 bp, Zea Mays
gggagacgagacggatggcagctgcagcctggaagacggcggatcaaggactccgaggatggttgtacgaaggggagaaagggctttgtgaaatgtcagtgggggttgagatacgagggaacaagtattgggccgctcgtccctgggtctcaaatttactgctcttgagattaggccctaaattttttttgatgaattctattgaaatagggccaccgttggacctcatttttctggatgaagcctcatatttcaaattgtttatgagtttagggcctctattggagttgctcttacaaataataaatttatagtgttggctggatctagagtagcctcaagagacttagccaccctctttcgacctagtcggtgcgtggaggggtcgtcgagctatgaatggttggtcctccttatttttagcttgcgacgactatgtcgtcgacgtatgtgaaaatgttgcgacccatctagttctctagaatgcttttggttagccttaagaatgtggagcctgtgtttttcaagccttgggca

SEQ ID NO: 32999 - DNA, 705 bp, Zea Mays
tccccctctgtatacctctccggctcaggtattgcttattccatcaaatgcccaatctgttgttgttttcacttgccatgttttgtatgccatatgcatgttattttctatgtttccttccttgcacacctctaaatcttgtatgtcaaactgatattttaactgtaaaaaaattggtcttacagtttcctttgttgcacagtttcctttgtttgacatttaaaagctcaaaaattatttaaaagtacatgaatagcataatcgatgcctacttatgtgcagatcatagtatcaaaattcatgaatgcagtttcgacttgaaggagcaatgtgagtgtcactttttctcatatttgggtgtggtaaaaaccatctgaatattctaaggcaatacttggactatattttttagtgcttcttcccttaagctggttgattctattagttctgttgtttcttataagcgatgtcttaacagggactggtcccattgatgattcaaattattgaaggcttgcattgtgatcccaaaacaaattcttgaagcctcttcttggactgcgaatggatggagtagatgacttcaggttttctgcttaatcaattgcttgcatgttgcgatggtcattgtttcttccaggatgtctcattctggtgtgtaaggtgatgtgcagctcctcctacatcagcgcaatgtaaacatag

SEQ ID NO: 33000 - DNA, 393 bp, Zea Mays
tgagggtgggagcgggtgctttggtttcgtgatgacatagcgcagccgactcggccttcaatttatagagggcttaagcggtggtgctcaatttggccaagcagtgctggcggccggaggggagaaagagtactggcgcaacgaattcgtgtcccacgccgtggcagttactctggtgatcaacagagagcgagagcaggtcacgacaatgcggtggaaaggtataaacacgcggcacgaggccgagaggcggcggtcaccggcgtgcttatcggatttcactacagtgagcctggtacagcggccggatttatttactggccgaagttatccacggcgatgatctttacacgacttcaagtgttatccagccgatctggtcacgaaacacgg

SEQ ID NO: 33001 - DNA, 324 bp, Zea Mays
gttatttcttgttttcctccttaaccatgctttattcttgtatgtatgcaatctgaatttattttgttgattctttatgcttcgttgtgaaagctgaaatgggcgcggataattctatggtttgatactctgaatttgattgtgtgagtcgggacatgggatagataggatatacattttccacatgttctatatggattataatctggccagctttatttttctcccttgtattttttcctaggagactgcgtaatcctttcatttgtacccattgtgtgatcgaatgatcctagatttgaatggtcttcatgtaccttccgg

SEQ ID NO: 33002 - DNA, 2120 bp, Zea Mays
ggcttgtcgtcaggctgaagaaaggcataaaccttcctgcaatggatccatgggtatgatgatgcgtagttgtgcatgctgctgaatagtcattatatttatattaagccgcattctctagtggatcactacaacgtttttatgtttggagttattaatcaaagtgctacttttctactctaacaattcccttagccaattcttttgttttcagggtactagtgatccttatgtaattctacaactgaatggccaaactgcaaaaagccaaattaaatgggcgtgagttactcatactttttttttgtgtatgctgggtctgggtgtgctattataaataagaatttcctttacatatgcaaattaaattgacttatgcactatataatgagtgttttatttcattcgggataacatgacacttgtgggtattctgttttgagcaaaatggcctctagctgagttagtttggtggcttgagtagtgttagagtagacgcactaactaaatgaacccaaaagattaagctattaaaaagtggtgagcaatacactttcacacttcaacacaggaggacttaagttgcatttacacaggggcggagctacaactagttaccggtgtcagctgacaccgatagattttagaaaatatagtgtaaagtactgtttaaatattgtttttaatgttgatgacactcatataaaatgatcttgacaccgacaaatctcaaggctggctttgccgctgatttactaggatcgaactcgagaactttgacttagataccatattaagttacataccaataagttcagcctaaaaggttatgctaatgggaaatcttaagtcattggagaaaggtaggtaatccacttatacactttaattttaacaagtagcactccttaggtcatcaattcaactctacatgggatcaaattttcaagttggggttaaaaatccactctttcgttccacgccaaagcataggtctaaggcctgattcttttcttggaaagcgagggagagctgcgattcattaattatagagaggaaaaaaggttcccaaacaacctccctctcatacgggaaccaattatgaggggcggaaaatacacccaactagctacaggacataaaccacaaaacccgaccacaccccaacaaattaggttgccccttttagacctaggccttggagttttttagctcccgccatgcaccacaagctgtgctcatcctttaatatcctaatcctaattattctcacataggctgtgatgtcgctatgtatgggcggggcaagggttcgggggtttctcgccttatgtgagaatgttttattttttaatgcaatgctcgggacagtcttacccctcgctggtcgagttttttggatgattttctagagaaaacttgaatatttctagtcctttgcattgttgattcgaagtgtgatttcatgaattgatcactgtaggacaaaggagccaacatggaatgaagatttcacgtttaacattagaaaatctcgtgaaaatcttctgcaggtatcaagaagttataacttcatgccccccccccaccccattctagccccccttttcatttattcaagggacgttccggttattctatactatctgtcttgttaaacacctctccctataggcccattaatcttcctcttatcttggcaaagaaactgctgcatactttaagtaatattagactcactttaggtattataaatttgttttggaagttggatggatcaactccagtgaagcttaaactgagttggaaacatttatggcaaagatcgtaacaagcggaaatacatatatatagctttcaggatggcatagtacatggtcaagactatttctatttatgcaacttaaaggaatagatatgaaatagcaagcgatagtaaacaaatacatgattttgttcttcttttaattttcgttttaatcatgtactttgctatatcttggttttactttgaatgatttctgtggcttttggcatctggtgccatgtcgctcaataggttgcagcttgggatgcaaaccttgttaccccacacaaacgcatgggaaatgctggattat

SEQ ID NO: 33003 - DNA, 340 bp, Zea Mays
acaggctgtgcgtacccgacggtcgctgatcactatacgtaccattgatcggttggttgttccggccagcactgcatacgatacgtacacgtacgcagggaaaggattagatagagacgtggatccatcgagtctgcagaggtcattgctctcgcgccgcgcgcggcgttgcgtttcgtgctgggggaaggaagggtagatagatggagatacacatgcgtacgacacgacagtacatgcgccaccagcccttccttttgtaggcgccctgccctgccctgccctctctctccatcggccgccagccagccatggcgtcctctcctctcccgtccctccc

SEQ ID NO: 33004 - DNA, 326 bp, Zea Mays
agagactgaacaccacatgtctgacagagagaatttcagcacgttttactccaacttttgtgcagcaccacgtcacactggcttaaagaaacttgttcactattagatgatcttcaactttgatatagaaaatacagtctaaaaccacatagattaatcacaacagagctctaaactgagcactattcactaaaattcaggttttagttctgaacaaaaactcagtccaagtaacctgacagtccatatttaggcaaccttttctcctagttccaagtagctttaggggtatgatccttaaccaaacgtatacaccaacacatgat

SEQ ID NO: 33005 - DNA, 1129 bp, Zea Mays
tattgttcgttgtagttgaaccgctcacatgaacggttgaagtgcatgctcaatatcatacacgtctctactcaagcgtggttgttaagatccttgctcatcataggttctatcttatctttttaaggatggtgcatagaaggaatccttctgtggttgaatccgactcctctgacgaccaagagattcatggagatactcccccacgctccagatccaagcgtgggcgaggaagtggcaacatcatgcagggtggtgaggcctccgggtctcatggtggtcgtggtcggatggcccggaatccatccggtcgatcccgacccgcgacaaaccctcatgcatgggaaacaacaagtgatgatgagggtgggaaagacgatgaggttgatcttccccctgcccatgcccctgttattcgaggtttggtcctccaccgggcggaggcccgtcgcgctggcaatgagccagtgactgatttcactgccagtggaggttttgctcttctgcaggacatccgtttccagaatcctgcattacgcattcgtgatgccaggattgatgggaaccgtttttggacgcttcatcatgtggatttttacaacactgtgatcctccccaagaaacatcaacccatacttcatcaacgctatatcaactgggaaggatgtgaggcaattggggacccagagatgacacaggcattgagggcctgtgaaaggaagaaaatgaaggatataatgacattccaatatgattggaatgatgaagtcattgcccagttttactcaactctgtgggtcaagctggcggatgaggacagtccatacaactatccttatcttaacttctacattgagggaagctggtacaaggtgagctaccgtcggtttgctcacattcttggattcactgacaatgatatttctggggataagataaagatccatgatttccgccaacctactagagatgaagccagagaccttcatctctctaagtctgggaaatactgggagtccaccaacgtacacaagtattacagatacatcaactccctcagcaggatgaccctcattccaaaagggggtaatcagatgaatattcttggagagagcaaggttttgctctc

SEQ ID NO: 33006 - DNA, 432 bp, Zea Mays
ttgtttgacagttgattttccaaaaacaacatggctcggcctccacgaccgatctttgacatcttcattctcactctccacgtcaaaactttcgctatcgctggagtcctcatacaacccagccaacatctcattggtgatcttttctgtgttggtcttctccatagcttcataaaacccagacagtgtggggcccatgatcttcttctcctcagccattcgggagatgattacgacaaatgccgaagcccaaaagttcatcgagctcgtgaaagagaagaaggctaaaatggaaaatacagcgcaaacaactagatggcatgaaaaatatttgcgacacagccttctatatatatactcaacgccccacagctcggtgggtcccacggttcagaatgattcgctattctagcgaagggaaggtgttttttt

SEQ ID NO: 33007 - DNA, 356 bp, Zea Mays
gacgtttgtattgtgtcacggattatgcaggtatcgtcacagataaggatttgtgacgaatttgtgatgatttcaatttggtcatagaggtcgcgtcacatttgttgtgttgtgacggactgcccattttcgtcatcgatgtgtatccattctatgacgaaatacgcgttgtcatggaagtgatttcattctatgacgatcaggtttggtcatggaggaaggcacttttccgtcataatccgtcgtctgcccgggcaagctgacggcgtcgttaacgtcgtttgctttctgtgacggtacggtatcgtcatagatagagccgtgttttggtcattaacagccgtttggaagggtcc

SEQ ID NO: 33008 - DNA, 513 bp, Zea Mays
catgtctagccattctttgcaaggcttcttgaattgtttttcaaatttgaaacggtaagcaagacgaacaagttcatgcttcttccccacttctttcctcttcggcattccctagccacttgacgttgaatatgttatgttcgccaagtattcttgcaccaagtccctggtactgatctgctcagctaccactctaaattctacttcagccaattgacagggtgaccccagttgcatattgcataagggcctagtcattccgaagctcaaactcagtggactcatgaccatggtcatcagcttctccctctttttctcgtcagccttcatatagaaccactcatttttccaactagttggccacttcgtccggtagctaaggactggtgcctttgtatcctttcgatacacaaagttgtaacaaccaaaattttcatgaaggccatctgccctggcctttgtctgatagtgcagctcgtgcacccggcagaaagctttggcatctgggctcat

SEQ ID NO: 33009 - DNA, 447 bp, Zea Mays
atctttggtctatgtgcatctgcaactaaggtgcttgtgttcttagcaatgggtggatgattgaggagaaaccattggcgatgtgtgatgcttggatgggagatagaagaggtgatcgatgatgtttttgtgggagaacggaagggaagagcggtgacacttcagtggtcggttagagttagcactttggtcttgagtggaggtagtgcttggagaatttggggcaagcacgggctcccaactcgaaggcggcgcaaagacctacacgtctcgacttaggattgatgaggaatatactacatagaatttttttagggttgagagaatggatggatgcatgaacttctatagcagatggacggccagatgaatccatgatgaactaccttaatggggctccatatggaatgactacgatgaatgctcctcggcctcgaccatgccaaa

SEQ ID NO: 33010 - DNA, 314 bp, Zea Mays
tgaatcctatcgtcaccgtttgttggtgatcggaccactcctaggcagttttgggtaggaaggatttatggccgttggatcgtgattgcgcagatgtaggatggcgcatctgtcatggctcatcgtggccgttcatcgatgaatggaagggcgaggggtaaccctggcgttttaaaatccagagcattgatatcaaatcctagggctctagatgcatacctcttcattttctaatctgggcccttgatcttagatcatgcggccagaaactgtggataccccttcgttggcttatttgttaaagagaccctggc

SEQ ID NO: 33011 - DNA, 462 bp, Zea Mays
ttaggatttttctaccattttctataattgttttggctctggaataaaaagaaaaggaaaaaccggggaatagtactgggccagaaggagcccatacggcccagccactcagagaaacggggcgcgcccgcgcccgcgttggcagtcttgcggaagagcccccatggtttttgaataacccgaagaagtccaaacactattaaacccagtcgctgacactttgcagaaatgccctcgtacttctatttctttacaccgactgatctccgacggcgaaccgcgcggaagccatgctccgacgagctggactgggcggagcacgcaaggattggtgctcaccgacgactgactccagattccgacctaacccgaggtttcccctcattcaatttcacgaatggctactaggtttgctctggccgcaatgaccgtggaccttgcggacagatgaacgcgttcccg

SEQ ID NO: 33012 - DNA, 627 bp, Zea Mays
ttcaatttctccttttaggttatcctccacaaattacaagttgggtattacatccagctcacagcgcctcccctgccgttccaccatcattgctggagttgtgccatcgtctcggccacggtgagcttctgtgcaccgagaatcctcggtggttttcccttccaccaatccctctgcccggtctgcgctcaacccctcccctacgtaggttggagttcgccgccacgatttcttgtcgtcaggccaactggagccccatcgcgctgtgccaaactgccctaagcgccgcctctaggtaagtaaccttcccccaaccttcttctgcactaaatctgtctcaccatgggtaattttggctcaccggagttgcccctcatcagactgccgcgtcttcacggcgtccggccggtacaacccttccccatgcccaaacctaggcgtagagtattcctaccctctcacagaagcccataccggcctcaatgcgccggattattccccatcgtggtgggtattgctcgccggagtggcctccattctgcccgaggttctcctccatcgtctacccgtcccagccccgttcttgcggcccaggcgtcgccatagtgttcgcaaggtcctccccaa

SEQ ID NO: 33013 - DNA, 614 bp, Zea Mays
cctgggttaagtaagcgtgagcatgtcgcaccgccttaagtcattgccgacttaagccgattgctccgtttgtagggtatagtggtcaccctcggttaagtaagcgtgagcatgtcacaccgccttaagtcactgccgacttaagccgattgctccgtttgtagggtataatggtcactctgagtcgagtaagcatgcagattgacaataaacggttcgagtgcctttgagaatgaagtctttttattgatggtgtatttcccaattacagaatacaatgccatcccaatagcttttgaaatctagctaggggtaaaacttcttgagatgttctatattccatgagttccctattttcatgccatccatttgagtaagacgaaatgatccaggccgagtgacttatgctactatgaatggtccttcccatagtggcgataatttgtgccgcccctcccccgctagaattcggcggaggacaagatctcccactgcaaaggaccgatgccgtatggccttatcatgatagcgccttagagtttgctaatacctggctgactgaatcactgtattcaatcgttcttcttctagtatatcaacgtcctccagtctag

SEQ ID NO: 33014 - DNA, 641 bp, Zea Mays
aaagaagcaccggtggcgaagggcgatgctctggcaaggggcaacagggactcgttgtcacgctgttcatgggaagcagagctctggcaagacgacgaccgacgggcagggagcagcaggcacggtgttgcaatttcagtggtggggacgacggcaagcatcgagcagcagcagcagcaggcacggaggcgagtgtgatctcggcgttgcgaacggcgacgtagtgcgtgcaaggcgcaggtgggcagaaaagtcagagcgagcgggagagaaaggagaacgaggctgtagggacaaagagcgccattgatgggcgcccctccgctacccatgtgtacgccgctgccccaccattgatcgcatctttgcctgctgcagtggagcagccgccgcctccttttctccccttccccactgagtcgtcctcctccatcgcgccattaatggcgtcgacgcttgccgcttccttccctggcaccgttactctttccctggcttataaatcgtgctgtcgcgacctcgtcgatccatttctctaattctcgatcctgctacatgcccttgccgtgctatccaacgcggccacagttccgtactcacgtcgttcaccaccgcgcgccagtcctcatcgtcaatggacg

SEQ ID NO: 33015 - DNA, 359 bp, Zea Mays
ggcgcgtggggcaggtttagagtgtcaacgcggagggtgtagccatggtaacaccagatgcccacattaggttcttaatagattaacttggtatgtgtccgtgtgttaccacgaggcggaggagcgtagggagcgacgcctaggctacaaatatattttttgtttatttgtaaacactaaggtacgtgtggtttggtggtcagctctaaatttctggagcagagggttgtaggttcaagtgctcgttctacactgttcttacggacattgggcgtggggagggtgaagccgtggtagcaccaggtgtccacattatgtatgtggacgtgcgttgccacgagacgggggagcgtggggag

SEQ ID NO: 33016 - DNA, 278 bp, Zea Mays
aagatgtccccgtttgaggctctatatggcagaaagtgcaggactcctttgtattgggatcaaactggtgaaggcagttctttgggccagaaattatacaagaggcagaagaacaagtgcgaatgataagggagaatttgagaactgcgcagtcaaggcagaaaagctatgcggatacccggagaagactgctagagtttaaggagggtgatcacgtgtatctgaaggtgtcaccaattcggcgtatgcaaagatttaaggttaaagggaagttgtcc

SEQ ID NO: 33017 - DNA, 541 bp, Zea Mays
tttaccgaacacttcccctccatcaatttcaccaagggggcactaaatcgatcagttcacggtgaccgggcggatgggcaaggggatgaatgtgttctgaccaaacaacggcgtggataaccaaattgaggctggggaaaggttcacggattcgctagaggttaggtacacacttggatttgggcgaaataggaatcaaagagtgggtcgacagaggggtagtcatggcggcgttttacagagcaagggtgcgttccggtgatgggcttcggccgaccttcaattcgccgctttcgagagcaataagagatcaaagactaactaaaacagggaacaatttgataaatactaacccgaggagcgctggccacgggtgttgcttcacggcggagcaagaacagaggagagagggatttgtggtttcttcggtgaaattgagccgagtgctcgatcgcggaggtgcgggatgtgataaagaagtagaacccgggcgcaatttataggccaacgactggaattggatgaggaccgcggactttag

SEQ ID NO: 33018 - DNA, 512 bp, Zea Mays
ccctcatgatttgcttgaaacttttgatgaggagggccacttcttattcatcgagccccaaaccttcactttgttccttcttgcttagagcctcctcctcctcatttgttgcctttaaggcaattgattgtagctcaatagaggtgtttccttgggcaatgttgtcgatgtatttggagtcctccatcagctcatggcttaggaattttccaaacacctcctatggtgtcatcttcttgtacctaggatttccatgaattagtgtaactaaagtggcatttattaccatgaaagctcagagcatcaatttgaccacttcatggttggtccatttcttgctctggtatttgtggatcttattgatcattgcctttagccggttgtacattttttgtggactctcccttgatcatggcaaaccttcaaagtcccccttcaagaagctccatcttggcaatcttggtgatcttgttaccttcacgtgtgatcccgagggtgtcccaaatttcctt

SEQ ID NO: 33019 - DNA, 283 bp, Zea Mays
gccgaagatgcctatagccaaggaagttgaaacgaaggttgataaggctgataaaccagaaattgaagaaataatgaaaatgccagatattttgagtgctccaacaagggcgacagtactgaaggtacaaacgggctctatcgtgactcctaaaaggagaaggatggtaaatgtattagatgtattggaaacaaccgactccataagtcccgctcccacagggaaggttgccgaagctgacaaaacacaacctaaaactgatactaagcaaatagaagttgaa

SEQ ID NO: 33020 - DNA, 288 bp, Zea Mays
caggagtgtggggtaatccaacaatgaaatccatgccaatttcttcccatttccactcgggtatcttaagcgggtgcagtagtccagctggtctttggtgttcgaccttgactctttgacacacatcacacttagccacgtgtgcagccacatctctcttcagcccatactaccagtacttctgcttcaaatcctgatacatcttagtgctaccagggtggatagagtaatcagaatcatgggcttccttcaatatagtctcacgaaggctatcaatctcaggaacac

SEQ ID NO: 33021 - DNA, 292 bp, Zea Mays
gtagttgccggcgacggagcggacactcgcggggaaggaggagcagcggcgtgcagtaggcttcgctttccagatctccgcccaggcgcccacagagaagctagcgggccaacctttttttccttttgactgggaactggcagccttatgtggaagcgtcccgtggtgtggccagcaggccaccattttttccgtttgactgggaacctggcagccttgtctggaagcatcccagggtctggggaatctcatattcacgtgctgcatcttggacgtacacgacaaatcaaac

SEQ ID NO: 33022 - DNA, 610 bp, Zea Mays
atcaacaaacaggaacaggctaaaacctcacgcaacccgaacaggttccaaaaagaacagcatactcaacacaggaaagaagtgtgcaggatgaaaaggtagtgaattacatggctgatggtgggcgccggatgtactcgcgtgtgtccgcttggtaaactcgtgtgtggcctccctttggccttttaattgtgctcggatcagatccatggatttttggaatcacttaaagatgcttcaaaaatccaagagcagatatgcttaagagtagtgtgtcagtttgtcagctaagcatacactatacagcaggccaacccttctatcattcaaaggacaaaattcttttcacataatttgcagctaaaaattagtgtttcaatacctacaccagaaattgattgccatatttcacacaagacacacggccaaggcgaataattgcatctgttaccgacaccaatcgccaaaaaacagcataatggacaagtaaacctacaaattggtcttactccaaggattccgcggccgcgccaactgtcaactaaccagtacggagattaaacagcaacgaacagtcttaaggtataagaacatttcatgggcacatttc

SEQ ID NO: 33023 - DNA, 364 bp, Zea Mays
gccctgttcacgccgtggtccgagcgggggtaggagggaatatcgtgagccattggttttggctcggacggtggagattaggaaataacgattcgactcactgcgcgtgtgcgatcagatctgggccgttgagttagatcggtgcggctctggatgtctacgtgttatgaccgtagatccacaatcctacggtgtaaatcacataccgttcataataatacagatctaatcttgactatctgatctagatcggaccgctaggatcacaagataacgcttcgtcgaggtagttttgtaaatgagaccctcaaaaaattgttaatcaacccactgtcccctagaagtcaaaaggagtcgtgtcagg

SEQ ID NO: 33024 - DNA, 366 bp, Zea Mays
agggttgtgcttagtgcatattaccccttcataaaagagtgttgttttaagacattgatgttgatgtataactgcatccaaattcgatggtgtgaaatcgtagtgttgattgcatctatgacttgctttgagcttcattgcatgttgtttcatgtttgatatcaggttgtgtagtttccttagacaattagtccgaggtagaggttcttttgttaattaagaccaataatggacccatgttttgaatggtggtgctatatgggataccttggatgctttgcttcgacgtggtcgaattcgaggattaattctttttaaggggggtagagtgtgataccccaattttctgaaaagaagttaaatttc

SEQ ID NO: 33025 - DNA, 393 bp, Zea Mays
gacttaacgaatctcaatgcgaatatgaagttgatatgtgtccttatagttcgagtttatcatgagtgattatcagcgatgtagtatattggggttgagtcggatggaccaaacgagacatgagtatgtgcaacgtgtctctcgacttgtggtgcgcaagtgtgaagtctaaaggcagtggttaatgacgaaggtgaaggccatgcagcttcgtgccaattgaccgagagcggtgaaagacaagcgatgggacttgaccgtgtggattatgtaactgacgtggttggggactagtggcacacatgttaagaacgtacgggacaaatatagggtatactacctattgtggtttggtggttgagcctcaaaaccccccaacgacaatttcacaag

SEQ ID NO: 33026 - DNA, 551 bp, Zea Mays
cgacttcttggatgcagggtctttgtgcgcctgctcacagaaccggagcaagaactttgtcgaggttgcagtcttggcagtcgcccttcccctttgtgcacttccggctccggatcttgggcctacatggcgacaagccgacgacgggagactgaagtcaccgaactggaggaggaggggatgcccgctgtggcctcgacatgcggtggagcgcgctactgagcttgcacgggaagccattggagttatggaccatggacgcctagctggggacagatgctgctatggcgggctggcggcgatggtggactgtcgagtggcgactgcggcgtgaccagtgacacatgagcttaagtgacggcgtcagcattaacagtctaggttttcgatttaggactgtgagttgccgaacccgaattggcccttggcggcttgaccaatgtctagtgactgatcatctggtgccctggtggagactccacccgtacgggagttgggctgggcttgtggcctgggcacctgccgcatggacatttggtttgggcctggac

SEQ ID NO: 33027 - DNA, 330 bp, Zea Mays
gttggtacatcgaaccaggtctggtgtgctccggaccgggtttggaagcagaagatttaatgattcgttgacatgacaaatctaatgcaccctgataagctaacacctttacctataagtcattgactaggtagaaaacaatcattggtctggtgcatcagacctggctacagtgaaaggtctagtgtgactagtttctaggcaagtttgttagtggatttcctcttgtgccatgctttagggtgttcttccttcgaggcttggtgttggggcatggttaaacaaatacaccattgtgttacgttgtttctctcgataactctctaggca

SEQ ID NO: 33028 - DNA, 271 bp, Zea Mays
cctctttcatattttgatctgtgtcattttttgaatccataattgcgacattgctcttcacatatccatccttcttgccctctaggtctatgtctaccagtgctaatcctatttcgtgtccaatcacaatcctacaataaattaacatattgtgtgcattgcactgagttaagattggaggaggtaatccatgcataggctcaatggaaaactcttccactatctataattatgatcttcacattgaaagaaacatggtcaaagaaagaac

SEQ ID NO: 33029 - DNA, 543 bp, Zea Mays
ctgagttatataagcgcgagcatgttgcaccggcttaaggcgctgccgacttaagccgattgctctgtttagcagggcatagtggccaccccgagttaagtaagcgtgagcatgttgcaccggtttaagtcgttgccgacttaagccgattgctccattcagcagggcatagtggtcaccccgagttaagtaagcgtgagcatgttgcaccggtttgagtcgttgccgacttaagccaattgctctgttcagcagggcatagtggtcaccccgagttaagtaagcgtgagcatgttgcaccggtttgagtcgttgccgacttaagccgattgctctgttcagcagggcatagtggtcaccccgagttaagtaagcgtgagcatgtcgcaccgccttaagtcattgccgacttaagtcgattgctccgtttgcagggcatagtggtcaccccgagttaagtaagcgcgagcatgttgcaccagtttgagtcgttgccgacttaagccgattgctccgtttgcagggcatagtggtcaccccgag

SEQ ID NO: 33030 - DNA, 402 bp, Zea Mays
gcccaaatctcttatgtgtgcttagacctaaggattacgaatatggttctctctactaagccttgggcatcgtggtggttcactccttggcttcagcctcggtagtcctccgggtcttctggtgtggtcatctatgtgtctcatgtgcgtgttagttgcatacttctgcctcttttatcttttggctgacctcccctttttataggccaaggtgggggttagctaccggtagcttctcaaggaaggagctacggtgccatggtaaacggggtgttctgccctagttaagtcgtgcttgtccacatgtgcctcggtcgtctgggcttccctggtcgcgctctttatggctgggggcatgggagacaaagagctccagtatcatcattactgtctttgtgccac

SEQ ID NO: 33031 - DNA, 411 bp, Zea Mays
cgaatcggtagatgtgttgttctgaaattttgtgggtgggcgaacaatagtagttctagtgatttctggtaatttttcgtaggtaattagtggggatcagtgagtgaatcatgtagagctttgtcatacctttccaacgagtacttatgcgctcgattcgaagttatattttaggagatatcgttgttcgaatcctggtatgttgctgtccaaaaaaacaaatttctgcaggtgggcgaacaacagtagtattagcagtttcggaggatttttcgtaggaaattagtgataataagtatgataataatgtagtgctttgtcacacctttccaatgagtacttatgcgctcgattcggagttatgcattaggagatatcgttgtttgaacccggctagattgttgtccaaaa

SEQ ID NO: 33032 - DNA, 338 bp, Zea Mays
ggacctcgtcgtcctcatttttgcttctgtgaaatagatgatccaggcatcggagcatcctcgtgtttcgtgtagaacatgcatcctctttcttctcttcatttgaaatctatatattgaaacaattaatggtctttcatatatgaacattaaaatttagatgctataaaatttaagttattaggcatatttctagttacatcttcatagttgggaatatagtcggcatcaagctcatctgaagtttttttcttccttggaggtataggaggaaaaggattgtcatcactagaactatcctcctccccgctgccttcaccggagctgctcgttgtctg

SEQ ID NO: 33033 - DNA, 496 bp, Zea Mays
atatacaatggataacaaacttggtggcgtaagtgtcaacatcaaacccacgagaaactagctgagcaccttccgcactggaacagtgcaaagggattataaaaatcaacgatttgagttctctgggccaaaagaaagcaggcgtgcaatgcatacatttgagctggaacaattgagtccagttgatgctgctacgcaacaataagcagcagtaatgataatgccctcaggtttgaagtgcggaatttaaggcgtgaaggtgtgacagctgaaagggccataaataaaacttcgcataaattcgttccactaggaaacgtccgtgtgaagcgttaagccatcctggaaacgttgagactggaccaggaaaggttcatataccagcaaaatctttaaaggtggcagtaggcacgccaagttgtcgactttaattaagttgtcagctcaaaggggaaaggcgtaataatagtaataattaataatataaaataaaagc

SEQ ID NO: 33034 - DNA, 296 bp, Zea Mays
gtatcgcgcggttataccctgcttctggaagacaatgttattgcaggcgccgtcgggtaaggaggtggtgttcttggggagttccccgaagttctctctatccttgttggcgcaattgcttcctgatcgctggtcaaggaagtcagggatctttttctccatggtggtggagggtgaggctgccttgcgggtgcaggacatccgggtggtgtgtgactttgctgacgtgtttccggcggagcttccaggcattcctccggagcgcgatgcagcttttgagattaagctgatcccgg

SEQ ID NO: 33035 - DNA, 409 bp, Zea Mays
ggaaatgcgaaattggggcgcggtggtgcacgataggagctagctggggatgggttggatgcataactaagaagcggagcagagggcatcctcaatttataggtcccgatcgaactagacaagaattttgggattgagatcacgattatccggctaggatatttcacagtggcttgatcaccgtggtgcacaagaggaaactggcttgcgatcgataaccggtggcttgccacaacccatacgatgcggaggagtggttgttacgtgtcacgaccgaaaaaacgacgagctctggtgatgccagcgcgactgaccgcggcgggacacgacggccggtccgaccagcgactggattcacacccccactggatattttcaccccgccccgacgttatctactcctcccgcg

SEQ ID NO: 33036 - DNA, 317 bp, Zea Mays
ccgatgcattggacgagtacgtatgcattggagaatccaccgcacatgaggcccttcaacacttcctgtaaggccatgactacatttggtggtcattacctccgtgtgtcgacacccgatgatatcacgcgactactccaagtcggtgagtcacgtgggtttaatgggatgtttggaagcataaattgcatgcattgtgagtggtgaaactaccccaccgcatggaagagtatgttcactaggcaagggaaacaccctaccatgatctaagaagcagttgcatcgcacgacctatggatacgacatgcatacttcga

SEQ ID NO: 33037 - DNA, 434 bp, Zea Mays
gacgaactgggatggatgtaccctttttgttgcagctctgcaatctagagttttaattctgctaactttgtgggggccatgcggtatggtctctttgcgatgggcgcagtgccaagaatgagatctatatagaactccactcctctttctggtggcattccaggcaactcttccggaaatacatcctcaaactcttcgattacggacatgttttctgctaccagattaaacatcattggatcgtttgcgggtggctgggcttgacaggaaactgcttttccttggcgatcggtgagaaggacggtcttacttgcgcagctgatgatacccttgtgcttagttagctagtccattcctaggatcacatcaatcccttgggatggcaagacggttaagtctgccaggaacactaccccacttaagagaattctgac

SEQ ID NO: 33038 - DNA, 580 bp, Zea Mays
ttcaaaaattgtgtctgtaccgaactcctttctccactgcagcatgtccgcccacatctgtgctgctttttcaaaatcgaacttccttgcttttaaaaatctacagcagagaactgaaaatcaacaactggcattatatagctgaaaataacaatatgagcatatttcctcaggtgtcagatctcaacctaagcatcgtgtggtaattatcatgcttgactggtagcaagcccctagcaaacaaaacctcccgaaacgagttcactgcttgctcttcttcagcatccctgacatcttctatagctatccttggcactctgcagtccacttttctcttccccctcttcttcagggagtgtgtgagtcttgtcgatgcatgcaaggctttcttcttcagtgaccgcatcctggtgtgccttggctcgtcctccgagatctcggcatctgccctattcctcctctcatcgttactaacagatatctggatgctatccacattaccctctgcaacagagcatggccgacgccagaacgttagctgcattgcatgaccgactcattaaaactgaagcaacgacaa

SEQ ID NO: 33039 - DNA, 343 bp, Zea Mays
tatggatcctgagaaggtagcaacattagagacttagtcgcagcccagaactttaagggtgctacgtggtttccttgggcttacaggatattaccggaagttcattgcaagctatggcgaaatcgcagcaccattaactgtcctattgaagaaggaatcatttcagtggtcggaggcatcaacaaaggcattcctcgcactcaaacaggcacacatgaccgtctccttgctgcagatgcctgacttgagcaagagttttgtggttgttccgacgcgtcaggttccaggtttggggcagttctccaccaaggtgcacgagcgtgtggcatattttagtaaagcg

SEQ ID NO: 33040 - DNA, 501 bp, Zea Mays
aaagaaccgagtgagtagtttataaatccaaaacggaaagcctcgcactgcatgtgccaacaaacaacaggactgcgccccgcccccgcgtgagaaacatcaccattcaaatcccagcagggctgacacaccctctccattccaagagtgcaattggacagatgttacgatgggccatgaaaatgttctagccaaagcggatgagaaaaaaaaaagaacaagctttaaaacacatcaagctccagtgaatacaaaccctcctgaacccgagcactccaacggcagcactaaatgcaatgcaactactggtgatcattgccgctgttcaaatattcaatcaaggtaactgctacacgagcagctaatgcgaatgatcattgaggtggttgaagcaggacagtccactccaaaggcaaaggcaagagaagaggcacggaacaaaaggcagccggaagctgagcaagcgcatcttgcttccaccgcacaacgcagctgctcccg

SEQ ID NO: 33041 - DNA, 387 bp, Zea Mays
ggaaataggaccgagaacacgccaagagaacctactctattgatgatgcactgaagaaggtcagcaactatgacaaataaaagggggggagaggatcaccctgtcgaacccctctcttgcatttgaaacttttttcgggaacaccattcaagagaacagctgaggaacctgaatacaacagacttgatctaacaaattcatttctcaaggaagccaagagatctgtgcattgcaataatggcattatgctcaatagtatatgttatgagcggcagatggttgtgagggttagagggcaatagctagggttaggggggcgacggctagggttacggccttaggggcgctggggaggccgaccgcagggctttgcccacagccgtcaag

SEQ ID NO: 33042 - DNA, 325 bp, Zea Mays
ggaaaatgtactttgatggctcattaagattgcagggggcaggagcagggatccttttcgttgcccctggaggtgaccaactcaagtacgcgctttagttcctgtttccagcatccaacaatgtcgcggagtacgaggccctggttcacgggctgagcatcaccatttcactaggcatcaaaaggttaatggtataagatgactcactagtagtcatcagccaggtaaacaaggactgggactgctcaaccgactcaatgaacagatactgttctatggtgcaaaagctagaagacaaattcgagggtttagaatttcaccacgt

SEQ ID NO: 33043 - DNA, 440 bp, Zea Mays
tagaaatcggtgccgcccactatcggctcatcgccagcctcagcggcaacccaggatcgggtcaggggggaatgaccatcagcctcagcggcgacctaggatcgggtcgctaggccgtgtggtggtcgttcgttggcacgacgggggaaatgaccatcaggctcggtgaattagcctttggtgtgtgtttggcgccacgtttctacctttttccccctcgtcatggatggtgcgactgcgcgcatgattctcggtaatagtcgcttgcccaaactcgtttttatcactgtgtcgtgtagggcctacttggttgaggtttggggcaccggagccgtagttgagcccctccggtcatggctccaccatgggttgggcagaggcgccgtcgtgtttaggggttggaaggggacaacgatcagggaccgttggatcaagtgtag

SEQ ID NO: 33044 - DNA, 452 bp, Zea Mays
ggataaatgatctttggctagcaaataaaggcgcatcacgacaaattggtgttagtggatttgtgaccatgggttatgagattgttgcaagaatgaactgcgaagatgggttgaaaacaccaaatcaagagccatgggaaggggaggatgagaaattcaagcagggtaaatccatacttctgcacactgcacgtttgcaataaatccacctttgactaaatccaaccaattcgcttcataccgttttggtccaattagaaaattcagatcagtctatcacaagggtagatatcataatattaacatagttaatttataatacaccaaggcaaatagtgaaatcatgcaggattatatgatgggaacataccagtaagaccaagcttgaagtgagatttagtaatgctgatgacttttctgaacatatgtgcagggacaacatgaacatgaaa

SEQ ID NO: 33045 - DNA, 287 bp, Zea Mays
ggaaaacccacagtcgtgtacctcactgcatacctgctcaccctggatgcacaatatgatttcttggctttgcaccaccgtcagatgattgctcgagcagaagatgcagagaagctcaaccgtaagctccatgtggacctcaccacagctcaagcccgtgtagctgccttggaatgtcgtgaagtcattgctgttgaagccctgaagcaagccaaggatgagcacgtccaaaagttgatggaggcctacttggtaacccataaccaacgtagagccctgcggatcca

SEQ ID NO: 33046 - DNA, 479 bp, Zea Mays
gtgagctcgggtcatgtttagttcaccgtacccacttgcacgccgacgtggtcgggcgatcatcgccgtggtggccaccgtcctttgtggttgcgccatgctgtgaccctttcaccacgtagctataaccatggcaagcctggagttactgcccttgaaccgttgtaccggctagcgccacgacgaactcatccaataaaacatcccatcgccgctgtgatcatcttcgactcaaattggcgaagcacgtagctggttcctttaaattgagcactaccagcgctccgcctctctgttacgcgctcataccaacctcggatagcctctctcgtgcaccgtagcccccagccactggatttcctcaaatcaggtcactcccgcagccgtgaggcaccctaccgtgatcagccgttcccaggtccgttcatccccctctgtgccatgttttagcatccttgaatgttaacgtagctcgtcgg

SEQ ID NO: 33047 - DNA, 382 bp, Zea Mays
cagccttctccagaattgccacaatccctcgggcaccggtgaaagcacaaatgtccccgtgatcactgaggatctcttcaaaagcttctgcttccccgcttatccaattaataacaccctcggggtcacctcgaatgaaattctctttggaagaataagcaccctctctagcaaagctggttttcaattttcttacgcaatccaaggatttctcgaagcacctctccttggattcgcgaagctcctcaacatttttctccagcctagtgttcgaccattcacttatttctcgactagcttttgcaacttcaaaattttccttagcttcaggaagctttttctgaaggttttcaacttcggctttatgagcttcggattgagc

SEQ ID NO: 33048 - DNA, 326 bp, Zea Mays
atggatgctctggcttggtgataacatagcggagcagaccgtgccgtcaatttataagggcgctaagcggcggtgccgaattttgaaagggaaaggccggcggtcgaagggagaggtgagtcaccggcgtgaactatcatggcgttccccggggtaatgcctcaggcgacgaatagacctcatacggatatctactatgacgtggtagttcttctaagcacgtggtgcggctacgaacgacggcgaactccggtgaggacacctttgtccaatgcgcggcaagtgtcatagtgaatagtccggtgataaggctctactcctttcct

SEQ ID NO: 33049 - DNA, 289 bp, Zea Mays
ccgtaaaccaccacacgttagaattagttatctacacgtcatcgggcatacgtagtcgctatcactggaaggatgacgacgcttactttacttaaccaatacaaacatgaccacacaagcatgagcacaagtgtttaccacgttcactttaatcatccattagttacttaatcattaagttagttaagtacctaagttcgctactactgatatgtagacagacttagttgaaagggaactagacacttaattgggctttacaattatttactaggcaaacacttattag

SEQ ID NO: 33050 - DNA, 289 bp, Zea Mays
tcgcttcagcaggccctgtttctatgggcactgaaggcccagtatcgacttcagcatgaattgtagtagcttcgatagtctccttcgcaggagcaggagttgacgcccttgtcgattccaagactgcgaccagcacgtcggccatcctccttctcttgggagttatcgcaggagctttggataccttcagcagttccggctctggtagcgggctcaagatttttggtagtcctgtcggctcccctagctctagctcttcggccgcttttctttgccttcggcaaaacgc

SEQ ID NO: 33051 - DNA, 407 bp, Zea Mays
cgcgtgtgtccacacgacgttcgtgcgtgctgttcacgtgtcatcgttcgcgcgagtcgcgattcgcgcgctttaataaaattgtttattacctatgaattgttagctattccatatataatgcgccataatcctgtttctattcgtttcagtggctttaacttcgtaacctcgtcgtcaacctgctagtaacgttatttcctcgcgcgtgtcgtcgcgcgtgctattcgcacgcgttgccgcgggttgttttcgcacattgtcgcttgtcgcgcgctgtccgcgcgtaatattaaatcaacggttcagtaaatacacgtgaacttttatggtcgtccgatttactctattctaattgtttcaccttcacaataatattatgtacacgttaaaatattattttatcg

SEQ ID NO: 33052 - DNA, 321 bp, Zea Mays
acaagaaggcctctccacatgattggtcggcaaagcaacctcatttgctagcattagaaaggcaagcaaaagaaacatgactgacagaaacaacccaaaaggtagtctagttagttccaccaacgccattggcaccatggatagcaccaccagtctatccacttacctacccacctacatatccactctcctatccacttggttacccgcccacacactacactccaaacccaatatggggagggataattccacacccgcattatccatatgggctatcatattacctagcctaaggggtaccacaaacctcagtatttg

SEQ ID NO: 33053 - DNA, 395 bp, Zea Mays
tatggcgccatagctgcacccctcacggctcttctcaagcgtgaggctttccgttggtccgaagttgcggaagaggcatttctccaactcaagcaggctctcatctctacaccactgttacagatgctagatttctctaaacaatttgtggtggactgtgatgcgtcagggactggttttggtgcagtacttcaccaaggggatggggccattgcgtatttcagtcgtgccgtggcaccacatcatcagaaactaccagcgtatgagagggaactgattggtttagtcaaagcagtgaggaattggaggccatatttatggggaagagcttttttggtgcggaccgatcactatagtctaaaattccttctggatcaacgcttgtctacaatacc

SEQ ID NO: 33054 - DNA, 556 bp, Zea Mays
gggatatgggccaagggccgcttacggggtacgtcatcatcctggcgcgcgatgacgtcgagattctctatagcattcatcgagataagagcctttgtttagttgatgcagaagccttcccgaggcgctagccgagtcatctctcaatgtgcgctacagtcgggcagagtggctgtctacgggatctgtggcgtagtcattgatcgaggctgagctcgggcgaggcggagagcttgtccgagggctgagcttggatcgggcgaggtggagaccccgaagactcgtccacccagcttgtcgtatttatgcatcccattagatggtgccaggtggcgtgcgcacactgttgggcataatcgtaatcataccgctatgcttagacgtgatcactgtcttatccaccactgtgctcctctgccacagcgcggtttggcacatgcattaaatgagcctgtcccctgcctatgtccgagcgcccttgtcttatctacacgggaccgactcgggcgagacagactgggctgaggcgaactcgggcaaggcgaccttgggcggg

SEQ ID NO: 33055 - DNA, 361 bp, Zea Mays
gaaaatgagagaaatcacccaggatgaccagatagtttttgtaaccagagaggctgaagagggaagatggccaaagatcacaatgaacaaaatgaaagacttgagtagttttggacgtggaaatagaaaaaggaagacaagaatggcgaccaagctgacatgcatgacaaaggctctcagaggggcgcccctgctacaagatatatctgagctacttgagagcttggacatgatgtcaggtccagggtgaccaagacgacgatgccaaatggtgatggtggtggtagtaggcagagcatggggggaggacgcgccagtggggaaagcggatggtcggagcgtggctagggcatagggtaag

SEQ ID NO: 33056 - DNA, 459 bp, Zea Mays
gaagatcctatgtgaacatccatggaagtgtgagagggagaaccaactcggacaccctcgggggttgggtcatagctcgcgctacccatccgagtcggatcatccccggcgacaccctcgggggctgggtaagcgctagcgccatccttgagggtcgagctctctgtaacgaccacctctaaggctaaaggaccttcaccctcttccatgggagcagaacaatccagactagcctcttgacccttaagattgcgctctaaggtcgatgaggcacgggacgctgctcgagataaatccaacccggcatcaggcacatcagcgcaaacatccatcattccaccatctgccggctctaacaacagatcttctgggaccatgtcttcaagagtctgatcaaagtttgccagagacaattcttgcagaccaatgagggcagacaaagctggagaaggaacacca

SEQ ID NO: 33057 - DNA, 345 bp, Zea Mays
tttctgaccacatcgaagatactttccttgcatccgtaacaaacatagcagggcccgaagatgagctcaactgttggaagaacggtgcattatgttttactcgaataggcaacaagtcattattgtggactatccatgatttgcatacatctctgcacattcctatttgtgctagatgtgcacatatatctactcccttggcccccctattaatgtggatgtggtcctgtccacaaaagactcttgtgtcacatcgaggaggaggatgcattcgggattgttaaacacccccacgtcctgcttaggatataagtcttgatcatagcacttttacaataattttag

SEQ ID NO: 33058 - DNA, 881 bp, Zea Mays
acaactaaccaagcctgttcccgttgggtctgggttagacttggtagggagatcccatccccaccccctgttgcgagacattgctccagactttagtttgagcgagatatttgcctgttgtcccagagctgaaacccgatgtgaaatttgtttcgcctgtgtccttaatttcaccttcagccgaaggctacgtttgttttggtaggatgctgtttactgttgcgagagatccctgactgtcactcccaagtgccaatttgattgaatttgaggtagggtgtctccggatggggtctatggttatgtgggtgctatagcttgaacccagttagatctggcctgaacttcagcttgaaccatcaaggttgtatgtttttcatcagtagttctagccttcactgttacacaaattgcttttggtggtttccagattataggttttaatatggttgcacgatacctttatgctgactcatctactgtcagctgcatgtgcatcacaagttgatgcaaagaaaaaaaatcaagggtaatcgatcacatgattggttgagaagttgtcattcagtaagacaaaatggactttgataatttgttgccatcttttgcactaagagattgtgacaaacaaatcaagttgcggttgccaaagtttatttgcggttctctgtaattgcttctctattcaagaggacaagataacaaggctgtggctgtgctttgttttggtcagtaatgatatctaagtgctctattgctatagatacagatggtgcttttggtcttggtcattgtcatgtggagtagcgtgcacagatgtgattctctcaagattgcttgtgctcatattgtcgtgggactattggtagcttttgtgttgg

SEQ ID NO: 33059 - DNA, 275 bp, Zea Mays
cttcccctctgcgtcgtctcctccgcatcaccagccatgccgctgacgcgtccaggacccctccctcgcatctccatcacaccctgccatgtggcctagcctccacttcccctctgcgccgctgtttcctctgcataaccagccatgctgccgacttgcctaggacggagcccgcccgaccaaccatgctaggtgccacgccgtcccctccgcgtcgtcctctccgcggtgtggccggccgtctcggagccctcgcgtcccctagcccatgcacc

SEQ ID NO: 33060 - DNA, 586 bp, Zea Mays
ggcaaatgatggccatgggaaaagctgtcttaattgatgctaaggtcataacttctatagtttaagaatgacttcggggggaggaagaggtcaaagatcatggcatgctcacctatggctcaaatcgacggtgagggcttgtcctctggtttgaagagtaaggcacgcgttgttcggatgtgagggtgacaatgagatggtggctggactgtgaggttctgcggcaagggcatcgatatttataggcagaggaacgacagtttataatggagggagtctcgaccggcgtactgtgattggcgacgttgccacagtgcagtcgcaacatcccgaggttggtagggtaacttggctcatggtggggcattcatttagttgtgattatgacaagtgactggcgtgtgctcagacgggtgcacgaggtcttgtcgtagtgactttctgcactgaggtatcacttcaaggtctgcaacccggccctttaatatagcagtttggcgtgcatgacaaggctgtctcagggcagagggtgtaggtggggcttgccaggacgcacaaatgccaaggcagctagaggcaggcttat

SEQ ID NO: 33061 - DNA, 324 bp, Zea Mays
gtcgtttcacgtaacacgacaccattgggactgaggtcaactgcttggacgatatgattacaccccacggtcacgtcaagttactactcagggacattttgctaaacgctcagcgcaccaaactgtcccttggttacacccattggggaggggacgtccagggattttcaatagattttcccaagcagtcacatccatacagtatacgcaatgaatgaatcaagaaagaagaaagatatctatagagatcggaggaaagccaaaaatagctactgaaatacaagtctaatcaacaaaagcattgaagcacgaagcgaaatgaag

SEQ ID NO: 33062 - DNA, 513 bp, Zea Mays
ccggaatggagagaaagagaggtcgtcgcggggaaaagaaagaggaggaaggggttcacctctggacggtgcacgactgggagggatcgtggatgtagcttgctccggcgtgcagtgcttcgatggtgagctcaatggggctccgcgcgcgggagttcaactgcgcatgacaacgacgacgtgtgtggcacgaccttctttgcttgacgatggtgggcgtagcatagcttcctctgcacactatgacaagtgcggcgcaacggcgatggtcgcgagggagaaaactgaagaggagaggttgtcgacgttgacgggagcacaagcagaggtgttgggggcatggctgctccatgtcagtagttgccatggctagtgctactgcgcacgggaaagaggtgcaagaaagaggtctcatgagctgcacgaaactgcataggacatgaccttcttttatggatgcgagaggttgtgggcgaggtggataggcgcgaaggtgaggtagttgcagttgca

SEQ ID NO: 33063 - DNA, 501 bp, Zea Mays
cgctgacggaggttgaggtatggctgagtgaagatgtattttagacttttatggtctgtgaacactttacacttgttctcgatcaagtaatgtctccctatcttgagagcatgcactatggctgccaattccaaatcgtgggttagataattctgctcatgtggcttgagtagtcgagatgcatacgcgatgactttctcattctgcataagtacaaacttgttgtctttcttaaggagttctgtcaggggtttggcaatgctggagaatcccttgataaaacggtggtaataccctaccattcccaataagctttggatctcactaacattggtaggttgcttccacttggacactgcttctacctttgatgggtccacctctatcccttctacagtcaagatatgcccgaggaaagctatcttctctagccaaaactcacatttactaaagttggaatagagttgatgcgtcctgagtctcctagggacaatccggaga

SEQ ID NO: 33064 - DNA, 791 bp, Zea Mays
ggaatagatggtgcagtacgacagtcagtcaaccctggacccaagtcctcaagagattgttgcttcaaccttgactgaatgatatttcgattatttagtcaggtataaaataaaagctgcatgcttagatttgacatgaaagctttgtacgaatatggtatatcagtaatccgtatccattgtgttaaggtatgtctttagaacagcatggcagctacaagaattgacagccctgaagaacaaaacccaagaaagccattgctgagcgaaccagctagccgacaatggtacatagaacctggagagaatgaagtaccctctgtttctcttctcctgctcgcgccagtgaagatcggcaggagccagcagctgagtgggaggagaggaggcaaagcaacgaactggaggcaggaagagccgatgattagcgatgcaatctgcaacaacccctcgatttctgtctgtgctaaatggtttgagtgaaaattgaaagaagaagaaaacaccgcattcaaagacattagcggtgaaaaaaaaacagagagacagagcatgaaagcatctcaagctgggttatgtacccttcatctggtctaacttctgaattttttgttgcactaagatgctccctactcagccatggtttcagttttaatcagcctctcctctttgcactaaagatttgtatgcatcatgcagggctgcataatgtttgcaagaggataatgtggttgcatctagtacacacatcaaactactaatggatctcctggaaagctcgacccttttta

SEQ ID NO: 33065 - DNA, 301 bp, Zea Mays
cttatattgtcaatatacatcgtccatgttcatatgcatagcactggctgaaattgtgtttattcaaaggttgagggttatggctcagttgcactgatgaattttggcagcttttccttgtttttcaatcagccagtcacctgttacatgaagctatttgtatgaaaacaaagaacttagttgatctattagataatctactccaaatgttgtcttgtttattgccaagttcactataggtgcatagtaaacactgttgcgttacctctgaacttcattaatggagattgcatggacattg

SEQ ID NO: 33066 - DNA, 450 bp, Zea Mays
atctggagcatcaggtttagtccagatggccggtacctcgcgagtgctggggaagactgcgtgatccatgtctgggaagtgtcagagttcgataggaaacgcgaggagaacggagcgtgcaatccttttgttgcgatggtgtgcaacggttcgccggagccaacattagccgtggctagcagtgtggatgggagcaatcgtgagaagaagcgtcgggcaaggttcttggagggtcgtaggtctgtgagctcagaccggctaatgctgccagagcatgtgtttgcgctgtcagaaaaaccgattcggaccttcatggggcactcagaagatgtgcctcatgaccaatttagtttgctgtgaatttgacgtgtggggtccaatttaatggaaggggattttgtcacactttgtgatgatggccaaaattacctaaccttgagcgtgataaat

SEQ ID NO: 33067 - DNA, 467 bp, Zea Mays
ggcgagagcggacctggagatggatgtccacggcgcggcgtcacatggtggcgcggacgaccgatttggtggaaaaactaaattagggcgctatggtggctaatcggaggcgagggttggtgctctggcttcgtaacaacctagcggagctagctgtgcactcaatttatagcatcccatagcggtggctccgaatttggaagaggaaagctagcggccggagagagggggtgagtcactggcgcgaattaccgtggctttcaccagggcaatgtctcaggtgatggacaggctacctacggtgatctactgcgacgtggtaactcttctaagtatgtggcacgactacgaagggcgacgaattccagtgaggacacctcagtcaatcgcgcggcaagtggcacggtgaacaatccggtgataaggctccaactcttccctgcgatgagatctttcaccgccagccg

SEQ ID NO: 33068 - DNA, 309 bp, Zea Mays
gttggggtcgatgggaggaatgaccaccgcagcagaattatggttcttccgcttgggagccatcgcaatctcgtcggcggattgaacagaagcgaaatcagagggaaacagaggaatggcttgaggcggaaatgtgaagttagggctcagaacgcagaggcgtgcggcgacgagatataaatggggttttcccgggttggacaccgtttctaaaaagggctaagtcatcactcaggaaaacaagatttctgacataactcggctgtcacctctaaaatgccgatgtcgcccagcataactcggttgtta

SEQ ID NO: 33069 - DNA, 1056 bp, Zea Mays
ataggaggggaggttggaggagatagagtagggggcgaagagatcgtgaaacagggaagaagagaagctacgggaatagaccgtgaaacagggaagaagagaagctaaatgatgacgcgtaactagcggcgttgtggataatttacctacaacttcatgaggaggtattttcggtaccctaaatatggggtacccaatgcggttgggtcaaggcaggacccctgtggctacacgtagccgtggatgacgagcgacctaccctgactctgaacttgggcctgtccgacaggaccaatggcctccagatcggtgctaccacaggtccctgcggcgggattactcggtaactacagtctgggaccgacctccagcaggacagtctcgagcccccatgtgtgccatctagacctcccctcctatgttgccacatgtccagaccatcacagatgggacctagaccccccacaagtaccatccgggcccccagacaagggtggtccagagctgccacgtctgcgtgcacctctagccattattccttgctcaggtggagacctggtgttgtcgcgtgtcctatgacgcgtgacgtaagcccctagcacagggggtcactcgcgttcaatgcgggcagggcgcacgattgttcacacctgtaacaggtggcgcgcattgcacattgaatgtgggtggtgtgtgcagtccgtaaggcctaaaacgcatcagtaacccgcgcgttaccgaggcaaagaccattgacccagtgttgcgcgtgggtaacttccatcatgacttctactgttcccgctgcagcgccaggcgaagagatatgcggaggggatagggcgacatcgtccacctactcccataagcaagatgacgacccacctactcccctacgtaaagacgatgggctaggctacaccgcaacctaaaagccttcacccacacactgacgggacgggacaaaggcgagtcaggccagaggagcccgcatggtgaccgagtgaagacaccttcccatcgtgagaagatgccttggttcaccaactcttcctg

SEQ ID NO: 33070 - DNA, 326 bp, Zea Mays
gcagatcaagatcctgcaatgccaattgctctgagaattgtatttccaaaaacaattcacagactgtgtttatggcatgtccagaacagatttatgccattcttaaatgaattatatgcaaggtttgctgataaggattttaaaacaacattccaatctattatacatcatccattaactcctcatgagtttgaatgtgcctgggaaatgatgctagaagaattcaatctgcatgaagatatgactctatgcaaattatatgaaataaggaaagaatggataccagcattttttaaaaatgacttctatggggtaatggtgtctac

SEQ ID NO: 33071 - DNA, 575 bp, Zea Mays
cctcgccgcgggtggaggttggcgaggtggctgatcttcctagtgcgaggaccaagtgccggcgacgaagggtggtgttgaagcatagcgtgggcgaggtttcgcaaagtggtaggcaccgtcgaatggggatggagcaggaccgtcttcgagtagaccggtttggtaaacaagagctattgtcttcgccgattgggacgagcattggtgagggggatctgcagaatctttttgagggtgagtaattgaaaataatgttgttcaattatagggaggcgggcatcatcccgaaggttgagccgatttagtatgtggttccttcgctgagtgtatgtaactgcaacttgtattgtaatgtggcctgttggccgttttcgcgcacttgtgctaatccggctgcacccttaggcgacttttgcgtggagtgtcgattgacacacttattgcgcttatccggctgcacccttgggtgacttttgcacagagtgtctttttagtaaaagattttgattgacgcacttattgtgcttgtccggctgcacccttaggcgacttttgcatggagtgtcttttta

SEQ ID NO: 33072 - DNA, 575 bp, Zea Mays
ggtttccactctatctttcaagactcttggaatcagcctatctttcaaccagaccctgctaaaaggctcatggcaaagtttaaaagggcacgcaagcacatccatggctggtgtaagtctctccccaacttaacaaaattgattgataaggtcaagttggtggtgcaactgttagacttcattgaggagagcagagacttaaccattcaggaatggaacttcaaagaaatcatgcttctccatttacaagatcttttagctaaacaacagatttattggaagcaaagatgccaaatcaaatgggccacccttggagatgccggcactaaattctttcacgccaatgccactgtcaagcacagacataaccttatctcctctcttaaagatgataatggaaatatggctctctcccataatgaaaaagaagttgtgctttttaatgccttcaagaaccgtttggggacttctcagcaaactactatggttttcaacttacctgctttgattcagccaattggtaatctatccgagcttgaacaacctttctctagcctggagatcgatcaaatcat

SEQ ID NO: 33073 - DNA, 629 bp, Zea Mays
gtgattcgtgttttaaagacgagatgtgcgaatgatcggttagtgtttcacttgtctagtcgataaacattgtcataaataattatgctaaaatttggcatgagaatgcattggggacacatatgtgcgtgtgtgctgtggtgtattgtagtggtggtggcataagatatttgattgaggtgtgcgggtatatgccgtaatatggttatactcgcggcgaggaaagatgtacgcattgggtaacacgacgcttaggtcgctgttgtataatcgaataaatgatgtattattgagcttgagtcaaaatgtgggatactagtggtacgctaggcaggcggtgttccaaataaataaatcggtggatgtggttgttgtcgtgcgtgatttattgttagtgagtagtttgaataacgagttatatgaggattatgttagaaactagtatacggcgtgtaactgtgcttgtgatgtgaataatatatcagtaggtatttgtaggtgtcattggcaagtgggatgatttcggttgtgcgataaattttgaagggcgaagaacatgtgtagtgtgtcgatcaagttaaccgataggttccgtaaatatgcttgtgatgcttttatgtgcatgataa

SEQ ID NO: 33074 - DNA, 444 bp, Zea Mays
acctcctgtccttcctagatgcttactctggtttccatcagatccagatgtctaggcaagataggaagcataccgcttttgtaacagtggatgggctttactgttatgttgtaatgccttatgatctgaaaaatgccttgccaacatttgtacgggcgatgagtaagatttttggtgacctgattagggacatggtagaggtatacgttgatgacatcatggtcaagactaagagagggtcgaccctagtggaagacttaaccctggtctttgacaagctgcgggcaacacgcacgaagctgaacctagaaaagtgtgtctttggtgtctccgcagggaagttgctgggattcctggtttcgcaccagggcattgaagcaaacccagagaagatcaaagcaattgagacaatgaggcctccggcccgcatcaaggacgtccaga

SEQ ID NO: 33075 - DNA, 570 bp, Zea Mays
ccaaggacggtctggagctgtcacgaggaagggtggtcccagtcactactccccacacaaggcgaggcctggtgctgccacgtgttctacgacgcgtgacataagccaccggggaaagcctaacgtcaacctccgagtcaaaggcttctctcattaactgcggatgagacgtatacctgcccgccccagtggcatgcggcgcgtccgcagtacacaggccgcaaagtaactcgcgtgttaccgaggcaagaccattgactccctgcgccgcttgggttgctgtcattatgactcccactgtagcccgcgcgttaccgaggcgaagggaggcaggcggagaagataggacgccgtcgcctgagcacccctacatgaagtagcacttcagcctacgccgcaacctacacctgcgccctgctccgattagatatggcaagggcatgacaagccaggagatttacacggagaccaagaggaggtatccgttctccacgaaccgtcgctccagttactccatatctagcactagatcaatgggcccacttgccgggctcggtcaccatgtacgtg

SEQ ID NO: 33076 - DNA, 959 bp, Zea Mays
atgaattcctgagtgaccacccacagcgctgtcatgcacagcagctaccaatttagtcctcagtgccgagttgttgcctacccaaatcagattgccttttcgaatcacgccctgagacaacgagtaaccatgttcatcggggctctgcacacataatcgtgccaaaagatgttgagcgtcagtatctgtcacatatgaatttatgacctcctgaatccaaagaggttggacctcactcactgctgtcaaagccatggcatgacctatcctggacagggcatcagcaactttgttttctcgaccttgtttgtacacaactcggaactgcatacccataagcttcgacatagccttacgttgtaagtcggactgaaggtcctgagtccccaagaagctgagagccttatggtctgtccgaatctcaaattctcccatttgaagataatttctccaacgatcaactaccataattaaggcaagaaactctttttcgtagatggatagcttttgagtcttgatccccaacgacttactcagatatgcaataggccgaccttgctgcattaatactgctccgactcctttttcacaagcgtcggtctcaacagcaaaaggcaagtgaaaatctggtagtgccagcactggggtagtgaccatggcctgtttcaagtgttcaaacgccatttcagcctcctctgaccagtgaaaagctcccttctgaagcaaattcgtcaatggatgggctatcaccccataattctgcacaaatcgacgatagtaacccgttagaccaagaaaccccctaagatcagtgacattcctaggtctgggccaattcaccattgctgctgtcttctgtggatcagtggccacaccccggacagagataatatgtcccaagtatgttagctcctgtttgccaaacacacacttcttctgcttaaggtagaacttatgct

SEQ ID NO: 33077 - DNA, 449 bp, Zea Mays
attgttggattaggtgcttgactacttagcagagccgagggtgtgcgcaatttatagtgtgcttgagcggtggccagtgaattggatggagacgcgcggcggccagagaggaggaggggcactggcgcacacgattagtggctttcaccgtggcagactcaccagcgacgagccagggctatagagcggtttacggcgacgtggtgaagctttagggcatgtggcatccgatcaacggcggcaaatcccggtgaacttatctgagccgaccgcaaagcaaagggatacggcgaccagccgccggtgttatccccaggcgatgatcttttacccagaagcgttatccattcatcggtgagcacgaatcacaacggcggcgtgaatccgggcgcacggtcgcctgcggtgagcttctctacgctagcgtcctaatccggttactgtaccat

SEQ ID NO: 33078 - DNA, 272 bp, Zea Mays
gtgatatcgatctacctgctcgtattcatcaaaggagagcagttgtcaatccacaaccggagatgaatcctcctccgaatcctccgcccgcagggactgatgttgtgattgtcactcagatgtagctgctgcaacatatggctaacacgatggcggagatgcaagcctagatccactaggagcgacatcagccaccacctccaccaccaacagcaccacctaggcacaagcatcgggagttcatgagtcttaagccacccaccttctctagc

SEQ ID NO: 33079 - DNA, 318 bp, Zea Mays
gtcccctcttactcgcactgtcgccgttaccgtcaattcatcctattgcgcgtcatcgttgacccttctctaaaacccaccatcaaaatcaccttcgttatctcttatccttcattccccacgtttccaccgtcccctatatattactcgcacaccgtcgctactgccgtcaatctatcctcttacgttgtcctgacccctctctaagatcgtaacgataggctataggctaataaagagtatatgcaatataatgttagctcgaactatatgatagtaaagagtatgatatcaatattaacatgtgctatatgctaa

SEQ ID NO: 33080 - DNA, 719 bp, Zea Mays
ccggcaagagcctaataatgaaccccaaatataagcatctggctcaaagggcatgtcacttatgagatcatatgcctcatcaagcttgccagcacgtcctagaagagtaaccatacatgcataatgttccatcctcggagaaacaccatactcattatgcatttctttgaaataatgacgcccttcctctgtgaggccagcttgcgtgcaagcagcaagcaagcaggtgaaggtgaccatgtcaggcttttgtttgcacttcagcattgagtgaaacatccaaactgcattcacagcctctccatacatagcatagccaccgatcatcgcattccatgacaccacattccgagataccattgtatcgaatattattctcgcatccttaaccctgccacactttgcatacatgtccaccaaagcactgctcacataaacatcatggagaaagcccttcctgagagcaaaacagtgcgctgacctcccatgcatcagagctgcaacattggcaaacgctggcagcacacaagggatcgtgacagagtttggttcagtcccttgtgcctgcatctccctgaaaaactcgacagcttccaaatccttaccattctgcacacaacaagcaacaatcgaggtccaggacacgacattcagctcaactccccggtcaacaaactctttgaacaaccttagtgcctcgcagacttgcgcgttccgag

SEQ ID NO: 33081 - DNA, 731 bp, Zea Mays
ctcaaccacctatctatccaaaagagagtatcattaccgtttcccacatgggaggtcactgaaatggcaaccaacgccttgacttgaggctgtacagggatatcaagaccaatccaggacctgttagggtcggttttctgtagccacaaccacctggcttgtagcgcccaccttctgtaaagcagatttgggaggccaagaccaccaggatgtagcggcctaataaccttctcccaagccacaaggcagctaccaccatttatctcctttctacccttccagaggaaagcccgtctaattttatcaatagctttgatcacccacttgggaatgctcatagcaatgagaagatagactggaatggctgagaggacgaaacgaaccaaggctgttctcccaacgagattaagaagggggatgccttccagttaggcaacctcacagcaatcttttcaacccaatcaataaggtcacttcttcgcagtttcttgttggagatcggcaaggccaaataagtgcatgggaaggcagaagtagctaattttgggtagtacagttttgaaagcaccttcaacgctgctctggtttttggcttttatctttctgctgtttgaaatggtgaaaataaagagtgtttcaagaaaaatagagataggaggtgatttttatacttgtttgaatcaaacaacttacaacttttctatgacccacaatctacagtagcttttttc

SEQ ID NO: 33082 - DNA, 466 bp, Zea Mays
catcgtcgacatggtctacccttacaatgccataatggggcatggatccatcaataagttcgaggcagcaatacacagactttatctgtgcatgaaaatacaaggccctcaaggcataatcacagtatatggaaaccaacaagcagcaaggaacatagaaagagacttcatcccggggcagcgcaacattcattgcctaacagcagagtgtgaagacaacaatagtcctcgcccaactaaacacaaaaaagtcaaggcacaactgcagagcaacgagggaactaagacagtcccccttgacctcgcaactcccaagcaaactgtcttgatcaacgaagacctttcaccaaacgaagaagcaagacttctctcctgtctcaaccgtaacaaggacgtcttcgcctggtccgctctagacctagttggggtcagtcgcaccatcatcgaacatagtctgggcatcgac

SEQ ID NO: 33083 - DNA, 420 bp, Zea Mays
gtgctctgggttcatgataaactaacggagctggctgtgcactcaatttatagcagctggccacggttgtcccgaatttggagatttggatcacggtggtgataagatgttgcactggtgagctcgtcgtggcgttcaatggcactatgactcaagggtggcaactcttagcttgccacgacttcatgtgcgtggtgaaaggactacggcatgacgcaatcgcggtgaacggcgatctccatggcgatgaccgtccgaccacgtcgctgcgcaagtgggtacgacgactgggtagtaacagtgccccgacttcatcccctgcgcaagatctttcaccctgcgtagttatccgcacaccaccgggcacgaatcgcaacgccggcgaggatcacggcgcggagttcaccggcagcacgttca

SEQ ID NO: 33084 - DNA, 442 bp, Zea Mays
gttgtatgtcatttcattaaggtggaaaaaaagtacacgagtctagaaggacccaaacctgagtacaggaacaccacacacaccaacaccccaggaaatagattacagtagcaccacaggctacaagaaaaaaaacgaccaacaatcacagggcgagcaacctaattaggaacggaaagattactaatgtgtgcacaaattaacaagcagggtcacattagcatttcaattccgattctaccagaataactatgaaaaccattgttccgccactctgaattcagtaatggttgaaaagaaattgcaacagcaaacagagaaaaaaagctaagaacctgaagcaattctgaagctgattttgggagctccacaaaaataacattctgagcagatgagaagtctaagccaacaccaccagcagtaattccaattattgcaacct

SEQ ID NO: 33085 - DNA, 497 bp, Zea Mays
cacgccagccgtccgcagcccagaggggctccaaataaccaatgacagcgagggccaccgcatagtcaacctcatcatgaccgaagactggcgggcaccaataaccttgttcctgcaggggtactatcatccaaccgatatcaacgaggtcaagcgcctcaaacatcgaagccgggacttcgcactaatcgaaggtcagctttacaagaagggggtcagtcaacgcatgctcaaatgtgtcaccgagaccgaaggcgtccaaatcctacgcgaagtccacagcgggacttgcggctctcacgcagggcctagggccctagccgcaaaggtgatccgtcaaggtttctactggcccgccatgatctgcgccgcaaatcgggtcacaaggtcttgtgaagcctgccagaagttctctccacgttcgggaaggccttcgcaattcacaaagctaatcgcccacacgtggccccttcaacgctggggcctgtacattgttg

SEQ ID NO: 33086 - DNA, 326 bp, Zea Mays
ggataacaaattgaacacaaggccgcaccacctgggcccgaagccaagatgagataacacttctaggagaaagacccaggacactgagtcaaaagcttttgtaatatctagctttagaaataggctagcgatcttcttcctgtgaaaggcattgatagagtgctgaaccaacatgtagttgtcatgaatggagcgacccttgacaaaggcactttgatttgtagccaccagattatgaaggtgtggtgctaaacgattagccaagactttggataccaatttggcaaagctgtgaataagactaattggcctgtaatctccagctg

SEQ ID NO: 33087 - DNA, 481 bp, Zea Mays
caagaagcatatgggggaggagcaccaaacagggagtggatgtaggagggtataatatggagcaacaaatggaagaggagcaccgtatgatccataaggaggagcatcatatggataccaatatgggcatgaaggaatgtatgtataagagaaaggttgagagggagcgttgatgatagaagctttagtggtaggaggaacgttgatggtaggaactttagtaataggaggagaagcatcgatggtaggattttcattggtaggacaaggagcatccatggatgatcgttgtggatacaaagggggaggatatggatatagaaacaaagtttgtagactcggcgaacgtggatgaacaggaacatcctcctaatgatgatggacgagagaaagacaatcaaggaagacctgcccctacactctacaaagccaatataaatctaacgcaatgttccaatgtcaatctaacacaatatttcgt

SEQ ID NO: 33088 - DNA, 403 bp, Zea Mays
gcagcttgtgaatggcttgctgaagcaactgatgctgtggactgctggttgctcacatactcggggatatatggggagtagcacgaagtagtatgtaggacctgcttcagttttttgtgtcgtgctttggcttcagctatttccttttgtttatggatcgtgacttggcacgtccttattgtatgtcccttatcttctccacagaataagcaaaacaaccttcttggttgggagctgaaccttccaccaaagcttcttcctcctctgcctcttggaggtggtggcctgaatgagctttgttgtgttcctgatgactgagagttgtgttgatgcccttgagtatgattgcccctatcatcacttgagctagggttatgaatcgtcctgacatgcctagggtgga

SEQ ID NO: 33089 - DNA, 326 bp, Zea Mays
gtggtgttacactgcccaaattatctctcatatatgctggtataaaggtaatactatcgatgcacaaaaaatacttaaatggttagcagtgcttttattgtgtatccaaaatgtaatccatttatggacagtaatgctcaagcagtcctgcttcttgtttttacttataatttgcatagcttccctgttattagcatacttctgaaatctatcaacctggttataattttggtattctacatgtcatgtagttggtccaggtggaagttcagatgagaactgccaaaatacaacctgtcactacaccaaaatagtaaacttcctag

SEQ ID NO: 33090 - DNA, 490 bp, Zea Mays
gtgacatcgccttctcccacgttagtgtattttattccaaggtgatatccacgatcaccgtaggggaaaagcagcaggtactgcaaggccatgtaggacgggtgcaagcacgaaacatgtttgaggccaccctctctagcgtgcacgaggacatcatacttgtattgtgaagataagcaatcacccactattatagcagcgagctcaccattggctggtaagttgtattgtgcgtcatgacgtgtgttacagcctaacaatcgcaacatcaccttttggtcaccttcttcgtctaaatgttctttagcaaagcgaaatgtcgcgaccagcttgttatgcttatctagcatgttaagtaataaacgggccacctctggatccggacgatcatggacatcagcctcattctcaaacatgcccaacctgttttgcacctcatgttcagtggcatatatgtaaagttgtgcaaactgtggtcacaatccatgac

SEQ ID NO: 33091 - DNA, 469 bp, Zea Mays
tgatactgtgcttgagaagaatgagaaactggagggccagatggttgctctgtccacttctttccagtccatgaaggtaaactcactatttaatggcaattctgctgcacagatatttagcgagccgctgctctgtaatttcttagttttgcctcactttgagagacgtccatgattgtgtatttagcagtagcaaccatcggtgtactgatagaacactgcttgtgcattggactgtatgtgcaggaagagttgctcctgcagagaatggaagaacaccctctgctgatgctagcgcaagagccttgggaaggtgacaagcgagaagccggtggtgcgaacaaggctttggtggtgtgtgcaggcgaccagctggccggcgctgatgccttcgatggcagcttcagcagcaaccacagtgcctatggtgacgagaagatggtgctgaggaaacgtatctgcgtgcggg

SEQ ID NO: 33092 - DNA, 305 bp, Zea Mays
aacagactatgttgatgttggtggattctgggagttccatcaattttattagtcagcatatggtgcaaaagttggggttagctgtgacatcttgtccatctatttctgttaaggtggccaatggggaatctatgatcagccaggctatggtgaagaatttggaatggtgggcacaagagcatttttatcacactgacatgagaattctacctttgggggcttttgatgctattttgggttatcagtggttaaggcaacacagtcctatggagtgtgattaggtcaataaagtgttgcagtttaag

SEQ ID NO: 33093 - DNA, 416 bp, Zea Mays
agattcaggtccccgtgaacgtttcccctaagttaatttcaggaacggctatctaaatgtttctggccacggtgagcgtgcggatgaactaacaacctacatgttcccggtgattcatgggatcctagctcaattggacgggttggcgagtatcgcagacgtatgtgaatgcttaaacaagggagcagagggaaggagctgacctgaactgagctgaccacggcgggcttggttccgcggtgttcttcgatcgatttgggggtaatcccaaattggggagctgtggggaacgattggagctaagagttggttcactggatgtatgactacctagcggaacgtgctgaggcttcaatttatagagctagtgggcggtggccgcgaatttgaatgaagacgtgcggcggccggaggta

SEQ ID NO: 33094 - DNA, 497 bp, Zea Mays
gagctatgctgataatagaaggagaccattggaatttgaggaaggtgatcctgtgtacctcaaggtgtcaccacttcgtggaatgaggagatttaaagttaagggcaaattgtcccctcgctatattggaccattcagagtttttaggcaagttggagagatggcctatcaactcgagctacctgataatctatctgatgtgcataatgtgttccatgtgtctcaacttaagaagtgtcttcgtgtccctgaggaacagttaccaatggaagagctcagcgttcatggtgatttgatttatacggagtatcatgtcaagattattgatactttgacacgagttacatgaaataaggtgataaagatgtgccaagtgcaatggagtcaccacggggaagataaagctacgtgggagagagaagaagagcttcgcatagattttccccatcttttccctagtccttcctaaatctcgaggacgagattctttgtaaggg

SEQ ID NO: 33095 - DNA, 304 bp, Zea Mays
ctgcattagagacgaagctggattgggggtaggaccaccgcagatctcaattaggcagatacactgccaataaaatcctatgatcatggaaagataagcaaaaaagctagtttgccagtaagaacagtaaaaaagcaaaagttgactcacctgaagattggagaggaacaggggaagacccaaagcaggaagagtcggtgcattgctcgatgaggggagatcagcaggaatgatatcaacatcatgactcagaggaacttcaaccccatcagcaggcggtaggctcctggcatctggttcactg

SEQ ID NO: 33096 - DNA, 391 bp, Zea Mays
ttgttagcaatgttgcgaagttctgcctccatgttcctctacaagttctccatgttcctctgagctccaagaaattaggcgaagaactactctggtgtgaatggcggaggtggaggaagtggtgcttcttggtcaccctcctagttaccactacccgaagctctagtggcccccgagttaatgcggcgagtagtcaccatctgcacatttttactacgagtaagcggcgagtcacgttgcacatatgtgaaataaggaaatcatgacgtacaacatatcatagaagaaaacttcatgtgaaaaattgtaaggcaagaatcacatcccaacatgcacaacaacaacaacacatacttcataatatataaatgcacatacaagcaaattgttc

SEQ ID NO: 33097 - DNA, 327 bp, Zea Mays
tctcagtcgaggctacctctagggggccaccgccaaactctttctcaggtatgctggtctgcagcctcgacaaatcgagcctacatctcaggggggccaggtaccaaggaaggatcagttacaccacgcgcaacagggacaagtggtacacagataagtgctaatactgcttgataaatagtactcaaatgtaccttacaaaaagcaaaaatattacatctgcttcaagtggagccctagctccatctctactctacaggtatgaactacctccacaccagtagggccgtgtggtagctaactccgcgcgactcgccagctgtggcg

SEQ ID NO: 33098 - DNA, 504 bp, Zea Mays
cgccgaatagggttggtatatgcaggtaattggtcgttgtgcagcgtaggtacagggtcgttggttgtttgaatcgtacttcgtgagcagttagtgctgttgatcggttcaggatctcgtatctggtagaaggcacggatcaggcatgcagactgtacgaggcctcatgcttggtagactggtagtcgtctgtagctaaagacaggtatggtttttactggacttgaaaatgttgttagctagctagtctatcgatgttagtttcgtagagagtcaacgcaaatcacctttgctaatggtcaattgtatactccgaagtccaaacacaccttttttatcacttacagtacgtcgcaagtctgtcaaaacggcgcccagttcagacagtgctgttcgttttcactctgagcttccatgaattgctcactcttttgctaacagtattggaacccaagggccagtgatcttcatttagctgttatgttaattatttgaaacattcca

SEQ ID NO: 33099 - DNA, 327 bp, Zea Mays
cctggatcaacttgggtccggtcgcggctaggctcaccgtatccccttgctcaccgatcgattgggatagatctcaccgccgttggccgattaccgccgtgcgccacgtgctaaagcactttaccacgttgcagtagctcggcttgcgatatttgctcatcgccggtgagttcgccacgacggaagacactaatcacgcgcgccagtaactttctatttccccggccgccgcacgtcttcgtccaaatccccggccaccgcttagcgatcctataaattgatggccaggtctgttgcgccatgttatcatgaagccaacgcacccac

SEQ ID NO: 33100 - DNA, 427 bp, Zea Mays
atttcatagtttcatgagattggccccagcgtgcatcgtctctcccaaccacctcgctcacgatcccccacgctcgcgatctgcccgcccccgctcgtgtccccctcgcatctaccccactcgtatcaattgtgtacttttcgagattggaaccgtccttgatagatttcatctccatcctagtgaagaccttggtaacctacgacaacgactcacgcttagatgagaagagcaggcacacctgttttgggttcacataggtcgccatgagaaactttctgatcatgaataacgacagttttgttgtaccaagtgcctcgatgcgctcatgcaacacgtcagtgatggcagggaccagatgacatggttgtttccatgaccagttaacgacgctactatttttctctttcttcttattagctgtcgc

SEQ ID NO: 33101 - DNA, 297 bp, Zea Mays
tgaaaagactaactccccctcagtctatgcatagatacatgtcaaagaatattctagtgataccaaatgaagaatttaaaaacatatgcatatttggcaacatggggggcataagatgtaaaattgacatagcctattgaaaggttggagaagacatgtaaatgataccaatcgaaagatttggatgatgatttatggaactcttgtagtggaagtgtgttgtctttctccatgactccattttccttcaatgagactactacacacataatagacttgaaatgttgtgttagtctc

SEQ ID NO: 33102 - DNA, 306 bp, Zea Mays
agaagaccctatgtgaacatccatggaagtgtgagagggagaaccaactcggacaccctcgggggctgggtcatagctcgcgctacccatccgagccggatcatccccggcaacacccttgggggctgggtaagcgctagcgccatccttgagggccgatctctctgtaacagccacctctaaggctgaaggaccttcacccacttccatgggagcagaacaatccagaccagcctcctgacccttaagaccgcgctctaaggtcgatgaggcacgggacgctgctcgagataactccaacccggc

SEQ ID NO: 33103 - DNA, 280 bp, Zea Mays
ctatcatttgactgaaactttcccttgcattctttagcccatatggcatctaaaggtagcaatatgttccctttggcatgacaaactaagtcttaggttcttcctatcctgtcatctaaatatgatgatagatagaataacagtcaagcaacctcaccattttggctattattgttgtatagactagggagtctatgcgtggtagtgggaattcatcctttagatgggctttgtttagatcgatgaaatcaatgcacaccctcaacttgcaagagctata

SEQ ID NO: 33104 - DNA, 421 bp, Zea Mays
cgcggagatagatgctgtgcttagcttgctggctggggaatcatccgactcaacccacaccgagccaatggctatcatagctgggcaagaacttggtgaagaagtggagactcggaaacccgaaggtgcccgcccaaagcatccacgccgagtgagtcgtccgactgcacctgttgaggaaaacaggaagaagaggcgacttcggtgactgtcatgcttggtccaggttgcaggcccttatgctccggttcctgatgatgtactggcagaagcccttcctgaggttgatgccaagggttgtgatcatgcacaggctgctgtttgcctatttgacgaggacgaagaggaagaagaagaagtcccgctgatccacaagaacagccggcactatagaggtagcgaggggggtagtgatattccc

SEQ ID NO: 33105 - DNA, 449 bp, Zea Mays
ggtcgtcgaggacggaggggcttgcgtcggtggtggcgagcttatcgtttaccgcaactgtacatgacaagacactgtatttacctatagtagtaccttatgcactccttcacacgcgctgtgggccaactcgctggcacgagattgacaatgctagctttaagccacgcggagcgatgcccgatggtgacgcgcgttgactgtgaggtcgtcgatgacggaggggcttgcgtcggtggcggcgagcttatcgtttacctaaactctacaagacatggcattatatttacctataattgtactttacacacgccttcacgctggtgtggaccatgcgcatctacgagcaaatctgtccacatcgttgttccccatctggatgctgctagcttgtccctcgggcgccggttgaatgctgcgcttattcagttaaccacttttacaggaat

SEQ ID NO: 33106 - DNA, 540 bp, Zea Mays
gcgttgcttaaagacattggaagcacttcatagtgatggaaaacttacacctatgggcaaggcaatggcacagtaccccatgagcccaagacattctcgtcttcttcttacagtgattaagaatttgaagaataagcagcaaggctttgctagatctaacttcatattaggatatgctgctgctgctgcatcaggtttgaattttactaatccttttctcaagcaattggatgaatgtgacacttatggtgaatcagtagaaaacactaatctggaagctaatggtccatgggaaaggaagagacagaagaagctcaaggctgtggttagagaggcacgggaaaagttttctaaccctagcagtgatgctttaaccatcgctcgtgccctgcagttctttgagttgtcagaaaacccagtggaattctgcagagccaattcacttcatcttaaaaccatggaagagatgtcaaagttgagaaagcagcttctgcagttaatatttcgccatagcaaatggtgcgaggagtttgcttggaa

SEQ ID NO: 33107 - DNA, 367 bp, Zea Mays
tcatcattaaccacatatccttgaatgcaagaaaggcaatttggtccgaaccaataaaagcatggtctggtatatgcacactaatggcgtcaatgccaactgatgatgcacacatgtaccagtcatgcaaccttttaataccagcagggaccttcctcagtttctcaagagttagtagccttttctgcagacctgcctggcacatattgtttaggcacatttttataatctaccttagttgggatctttatctttgtggccattgccttagccttttctgcagactcctcgtgctcggccaaatcaacaatatgtgatgtgaggtcccatgcaatccctttcaaaaattgagctatgccaacagtag

SEQ ID NO: 33108 - DNA, 330 bp, Zea Mays
gggggggggggggggtagacgtcatgtccctctttataagcttgggtgagtgcctttctgtagtcgttctgcagtctttatattccaactcacacctcgcatgagctccacctatgggctagtcgatgagtctcggatcgagaagaggttgcgccacaatggattggggtcggggtgaggtttgtacctcttcgaaccctctccttgttccacgggtgatcctgacgcccaccttccttgtcgcaggacgacttcagctaccttcggccgtgaggcatcaccttccatcgagtcatcgtggtcgggcccattagaccctctgcctcttcc

SEQ ID NO: 33109 - DNA, 521 bp, Zea Mays
gagcgcacgggctaaagccctgacatgtgtcagcaccggacccttgcctagtccagggtatcccccgtcccgtgaccttgctgtgggtggcccagatctcactcagaggggtccgaaccccatccaaggggtccagaatgcttacccaggggtcccgaaccgtacccgggactgttctttgtgcggctagagatagccacacaggcaccgtgtcttcatactgtagtaaggggtacccctgattcaaggtaccgacagtggcccccgggcccgcctcaggggaggaacgagcctgcaggtggggccaaagtttgattggtgattggcacgctggttctgcgtgcccactgtcgtaattactgcttgttcacctttgatcgcgccaactgttacgcctatccccgcggctgactgacccgtgacttctgtacttgacggctttgctgggccatgcgcggggtgccttgttactgccgcattagtttcgaaaatttaacctctccatcttctgcggcggcccc

SEQ ID NO: 33110 - DNA, 472 bp, Zea Mays
gtcgagcaagttcatgaggcggagccaccgaccaagtctataccgagcaagtccacgaggcgaagcgatcgaccaggtccctatcgagcaagtccacgaggcggagcgatcgacgaggccctactgagcaagtccatgaggcggagcgaccgactagatccctgtcgagcaattccataaggaggagccaccgaccaggtccctgccgaccaagtctgtgaggcaaagccaccgaccaggtccctgtcgagcaagtccgcgaggtgaagcaaccgactaggcccatgtcaagaaagtcaataaggcacaaacccaagtcaaacatcatgaagtccatgccgactaagacaagacatgacaccccaagccatggccagccacatgaacgacagaccgagggcacaccgagtgatcgctatcgacatgacaacaccttcccaagtacggccctagacgcgccccactatcttaa

SEQ ID NO: 33111 - DNA, 345 bp, Zea Mays
ctccgtcgatgaggtccttcgaagtaggctcatctacgtcggggacggcggacgcgactgtgcgtggtgacccatgttttatttcttgcgggttcatggcctcagatccatatagaaggcggaaagggtgaacccagtcgccctgcactcagtcgtgttcagcgcccagaccgcttcaggtaacaggtcggcccacttgcctttcttgtcgtcgaggagcattttcttgacggctgtgaaaattttaccattggcgcgttccatgactccgttggattgcgggtggtacactgaggcgaaggcaagcttggtgccaatggagaagcagaaatccttgaaatcttg

SEQ ID NO: 33112 - DNA, 394 bp, Zea Mays
taaattaagtaatgatcgtgatagaaagaataccctagctttttatgcatcttcaccttgaaaaaggttctaaaaccttagcacccccccttgagccattaaacccccaagcattggattagtgagaaggataagcaaatgaccatttcatgacttaaaccctttaccaaagttgaagtacatttatatatctacaagaaataggaaggcaaatattacaaaaaggtcccacaaaacccccaaatcaagcccccaagtggagagcaccctagagcaatccaattcttctctaagtcaaaaatcagcccactcccaaagattggagatgttcattaaattgctggcgccaaatccttaaggtccaaataacaaaaagagccaaactaccctaggc

SEQ ID NO: 33113 - DNA, 348 bp, Zea Mays
tcaagctcatctgatgttttttcttccttggaggtataggagtacaaggattgtcgtcactagaactatcctctgcgctcccttcactagagctgctcgttgtctgccattcaagtttggtcgcgtcttcatcaactttgttagacgcaccggtgcagaccacatccatcctagtaggtacctagtgcacaactggttccatcgataaagggatatactgttagtctgatatactggttccatcaataagggaacttggagaaaaggtgattcaaaagaaatcgagcccaaacccgccttcgtgtccctcctttactccccaaacagaaagcccaaacccgcctccgg

SEQ ID NO: 33114 - DNA, 287 bp, Zea Mays
tgaattttcttcataaaagggctaaaatgcaaaaaacaggttcttggcacactggaccaatctcgtgtgcatcaggctgttaggactcaacgatcagcttcaggttccaacgactagatgacatggcgacacatgtgacggagtttggtgcccctaacacctaatagaccagtcagaacagtcattggaacaatagcgtggtagaaggtccattgtgcactggacctacaacacatcagagtggtagcaggacaaattccatcttgactgactatgtctcacatcat

SEQ ID NO: 33115 - DNA, 385 bp, Zea Mays
gagatcggcagcgccaacccgtaggagatgtaggaggtgaacaacacgaactccccggcagcaagatcgccaagggggatggcgccggtgcggattcttccggcaagccctggcgcgctccacccaagcaggtcgcgcaccaggttgagcgcctcctcagactgaaaacggtcaggatgaccaagcgaagtcatggcttgtgcggcggcgtgtggaacagaggagcacgaaggcaaaggggtgcaggtgattgggagagaatgcgaaaaggtaactgttgcaggcggcgtgaatcctttttcaaggaaacctgagtccttgttcagggaaacccttccgcgcgcccccgaattgccacaggaaatccacccgacgcgcacctagg

SEQ ID NO: 33116 - DNA, 334 bp, Zea Mays
aacaacattatcctcaattcctcaccctcaaacagatttcgcagctccccctcacctacactcaccccaatcagcgaggacaacaattctcgcttactagtcccgtccacgcgaagatcacctctctccacctcgctacgataacgcctaccacttcgcgacaattcactcactctccgcttcgccaccgcccttcgccgcctatacccagtactcgcgcccgggagttcctcggaaccctccgctcgcggcgaaggctccgctgcagccacatccaacgctgcaaaataatccaagtcctcatctgaagactcatccatccacgcaatcgaac

SEQ ID NO: 33117 - DNA, 278 bp, Zea Mays
gtcgtcctgtagctcttgttgcagatagctgtaggtgaatatgtaatgattttacgtccgtgaaggctaatcggaagatggaatttcttgaatccttcactgcttcactgtgtcgtatgcagtttgcagtacagcgtgttcgctatcgggttaattttctggcatctccttcactctccaatataaatcaccaatgatttatgtcgggatatctgaagaacttttgttcatcactggccacagaaaaaacgagtggacttcttccactactactgatg

SEQ ID NO: 33118 - DNA, 351 bp, Zea Mays
tcccaatgggtgtgctccatctgttgctgatcccaatgggtgtgctgtctgtgttgctgatgaaaatgaggaggaggaagaagatgagatccctctgactcggaaaaacagtcggcgatacgtagccagtggggaaagtagtggagttccctctcctgctctgtctgccctcattggtctacaagaattgtctctggcaaactttgatcagactcttgaagatatggttccagaggatctgttatcagagccggcggatggtgacgcgatggatgtttgtgctgatgtgttcgacgtcggattggggtcatcccgggtagcgtcccgtgcctcatcgaccttggagcgcgg

SEQ ID NO: 33119 - DNA, 335 bp, Zea Mays
tatgcacattcgatagactagcaggtaactcgagttggtatgccatctccccaactcgcctaaagatcatgaatggtccaataaagcgaggggacaatttgcccttaactttgaatctctgcattccacgaagtggtgacaccttgaggtacacataatctccttcctcaaattccagcggtctccttctattatcagcatagctcttttgcctggtttgagctaccctcaaattctcccgaattatacggacttgttcttctgcctcttgaatcagttcaggcccaaagaactatctttccccagtctgatcccaatatagaggagtcctgcac

SEQ ID NO: 33120 - DNA, 708 bp, Zea Mays
gaacttcagtgtaacagagctaactttggacttggatttaaacatgatccagtgcaagtttgggcatgattcccataacaaatttgtagctggtatgtagctccacaattttgctgcagagatctggacgagttgctatatgaatatgagagaaagtgaggcccaaactctgtctgtcagaccgactgatgaacatatcccatggtacagtactggaaatatcaccggagtggataactctcgccgccgccgaccaccgtgcacggatttgcgtattgggtcgccatgattcgtgctgaccgagtggatagtaatgggatcaagcaagggtccctgccgtggataaactccagccgataaagaattccggccaccgtaccatgttcaccgcggtggaaacagataagaacgccggtgactcccgtcgcacggccttgtgccacgtatccaaacacctctgtcacgtcgccgtgactctttacagccgtcaaatcgtcgccggtgagcttgccacgactgaggacacgaacccactgcgccatgatccttccctatttctggccgccagctctgcccggccaaattgagcgccaccgtcgaagccctctataaattgaaggcccgagcaactgcgctagatcatcccaaagccatagcacccgctcccaccctcgattattcaccagcgcttgcaaatttcaaattctc

SEQ ID NO: 33121 - DNA, 2636 bp, Zea Mays
ggaggtgcggcgaggctgagaagagggcatcggcgccacgagatgtggtgatgagggacgacatgctggggaagctggaggaggagaaggccgctgtccagtgtaagctcaagtggaaggatgagcagttcaggcacctcgaggaggcactcaagaaggttcaggatgacttcagggctgccaagaaggagtggggctcagatagatcaactttggttgatcggattgacactcttgaggctgatttggattccaagatcagggttgcagaggatttccggtccaggctggatatgtgcagccaggcattagcccatgaggaaggccgcaggaagcgagtggaaacagagatgtctgagttgcgccacatgtatggcaatgtgatctctgaatatcaaggggccaaatcaatggtcgagtcgttgagctccaagacagatggggatattgcatatttgagaagctcactggctgagaaggccacaatgctcaaggaaatagaatacagtaaggcacgtattgaacaagaaaatgaggatttgcggtcaaagctcaaggagtatcaggaggcacagattggtggtgcagatgctgttgtatcattgaaaagtctgcgggagaagttccgagccctggagcagacacatagaagttgcaccgagaagctaagaggtaaggaagaagaatggagactgcagatgacaaagcttgtgaatgacttggatggatgcttatcgcagttagaatccaaagatattcttatcgtgcaactgcagaatgagttgctgggtagtcataggtcccttgagctacaaacagtggataattgggaagcattgataatacttactgttgtacagacaaaattttatgagtcctgctcatttgttgatactgctaaactgaatatgcagcatcactgtgaagaaattgagaaggaaatatcttctgccaagaaacagttagaagaacaatcttgcattattgcccagtctcaagctgaacagaaacaacaatctggggttataacaaaattgcatgcaagaattgaggagctagagcatatggaacaagaacataagaagatgcaaagacaacttgatgcatacaaagagatgagggacaacatgttaagagatgctcactgcctaaaagatgaaacttcaaagaaggaaagcaccctgcaggtgaaattgagggaggcattaagtgctcttgatgaagcaaactgtgcccttgctgacaggaagcgtgagctgagccagttagaaatcagtctccatcaccaaaaggaagcgattgagcatttggaaaaactgaaagttgatatggaagctgaagccaagagctatatgtgtgacaaccgtatcctgaagagagatctggatactgctcttactgccaaagtggaagctgaggagttgcttaggcaagaaaaaatgcagttaacatgtgctcttgatgaggcaaaatataccctttctgagaggaacagtgagctgacccaatttgagatcaattttcatcagcaaaagcaagcactggcgaacttagagaaggtgaaggttgatatgggaactgaactcaaaacatgtatggatgaaaattgtgtgctgaagagagatttgggtgttgctcttattgccaaaatggaggctgaggagtgtcatacaaaagaaaaggaggagttttgtggcataattaaagagaaaggaatgatgattgataaacttcagcaatacgtcgctgtgctagaagaagaaaacatggtcaagaaacttgatttgggaagtcttatcaagatggagtgtgacaagtccattcgtgaagtgaagaactggtattctgaaattgttgagatctctgacaaaaagcttttggagctggaagaaaggcttagattcgctgagcagaaattttcatgcagggagcaggagatcatgaatatgtttgatcaagaggaatcagattggtatacactaattgcagagaaagaaattgctatttctgatattcaacaaactgttgaatctgttcagcttgacatcaagcaccttcttgaggcagcagcagcaaaagtggcagaagttcagctagaggtgaatcaactttatggttttgctgaaactctgaattcacttaacatcatccaagagcatgatactgttttcaaggatatgctcattgcagagtgcgaaagagaacttgactccctgcaggtgaatttagtgcaagagaagcatcagtcaagaaatttgaagaatcttattgaacagctcgaagctcaaactgcttcagaaatgtcagaaaaggcagaggagcatctagaagttacgaataagctgaaatcattggaggggagaaatgaaacgttagatgagcatctgcgagagcttaagtctagaacaactgatatgtctaaagctgtactacaagagaggaatcagttggtcaatgagctgactggactaaccaataccatcggggaggtaatttatggaggtgaaagtatgatgtcaaatttgagaaggatcatgcagaaagttaatgaggaaccttgcaatgacaggcttacctcagaaaaaactaatggtagaagttcttcacctttgatcaggcacaaatcagggcatgtc

SEQ ID NO: 33122 - DNA, 280 bp, Zea Mays
attcataatttgaagaaagctcaagctcgtcagaagagttacgcagacacacaccggatacccttgtactttccagttcgagactatgtctacctaaaagtttcaccaatgaagggtataccatgtttcggggtaaaagggaagcttgcaccccggtatattggtccttttcctatccttgaaagatacggaccagtggcataccgacttcagttacccgaaaccttgtctgcagtacataatgtgttccacgtgtctcagttgaaggagtgtcttcggg

SEQ ID NO: 33123 - DNA, 341 bp, Zea Mays
ggggaattgtacctttttaagccccctccttctatgaacctggctaacgagcggtctcctacagtaaacagtgaagcaacaaaagacgatgaagactagaatagtacagtttagttattgtacttgtgtaaaataagtactaaattctagttgtacgctggagtctgtataattacattttggtaatgtaatgtgatggtatatgttggcatgtcatatttttcccaaatgtttctctgcctcagatgccatcacagactcgcgcacacgatggtgcaggaacttcccatggtcgggaagctactcctaacccaccacctgtaccaccaacgttggccaag

SEQ ID NO: 33124 - DNA, 344 bp, Zea Mays
gggatctgcacaaagtactcatcgataagggcagccagacagacatcatttttctgcatgcctttgaccgcatggacataagtcatagcttgctcaagccagcagacaaccccctctatggctttgaaggaaaaggaacatttccactcggctaaaatgaattaccattgccactcggcactgcaccaaactcaagaagtgagccgatcatctttgacagagttgatatggtttacccatacaacgccatcatggggcgaggatccatcaataaactagaagcagccatacatggattatacctgtgcaagaagatcctaggcccccaaggcataatcaccata

SEQ ID NO: 33125 - DNA, 442 bp, Zea Mays
agcaattctacacttctggcatttcctgttcattttctttgtaccttttgctcccaatttaataaccttttgttcactcccctttattgttcttcctttgggttttgagttatttggtcttgccaagcttatctcatcgactgcaaaatccagtttctgcaattcaaaagtatatattttttcagcacataatattatgcagtcccacattcagtctaataccattattacctttctggcatgatcattttgttcatggtcaccactctcattcatatccgcgtgatcctgcaaattaacttgtacccgccaacacattttaaagctcaatcataagccaataacacaaaccaataaatcatttgtatgtacaaccgcaaatcaatatagttgttaaagttattacctcttcaaatgaacgtatcagtataggtatttgaac

SEQ ID NO: 33126 - DNA, 536 bp, Zea Mays
atgcggccaaatccaacgcagcaaagtagtctaaatcctcctcagaggactcctcaatccacgaaaaagggctcccaaaattatcctcgtccgaagaccacgactcagtttcagaaccctcagacacatttccattaaaagacgttgcattcgcaaccgtcaaaatattagtatcaacatcatcgggggttgcttgcgcaggcccggccgtcgaaacctacgcaacaaccgacctttagtatcacaaagagaaacccaaaacccaacaaccctaacatgtcccttccacctgcgccggagcagacgccgctgcagggtcttcatcagggccagcttgaggcgctgagtgcccttcagctcccgcctccgcgccatctgttcgggtcatcgagctatcaagaccaccgaagtcttcgacttgttcttcattcatcatctacaaagacaacaaaaattttcaaaaataaatgaatatatagagacaaaaataattgcgccagtgctcgatcggccctctcccggacagtgtcacgatc

SEQ ID NO: 33127 - DNA, 341 bp, Zea Mays
cccatctgagcttcccattgggattcctcctacacatcacatccttatgatcttggctgtagatagagcatctgccactccactgacactcggcacggcgatgtgcatcaccacaacgaaaacacaccagccctagcccgggcttaggaacagcccgatacctctgagtacttcctcccaaagtacccgattcagaggatttgccacggtagggatggtggcgctggtgctgaggcttgcccctcttgtgggctggacccccagtgttgcccctccttgcgtcctggccacgaggctgatcaacacccgaagacttctttgactccatggtgtactggtgt

SEQ ID NO: 33128 - DNA, 292 bp, Zea Mays
gatagagcgggtgaggggcgagtcacattcactgccccagcccacctactgccaaaaatttctgactccaaagctttcattccaccgctacttccaaagctaactttgacaaaacatcttcagggtgcagttctcttggatggccagaatccgtacaatggctaggatactttggatgtgccagtttctttggaggcgcttcagcaagagggtgatactttggatactgtgccattttctacgacactgatctttgaagtcatgagggcttgtcatcaatgaactctgtaga

SEQ ID NO: 33129 - DNA, 507 bp, Zea Mays
gtgtaaatcaactatgttttcaattttacatttttgagtattacatctggccgcagtgaccgtggaccatgcggacagatgcacacgttcccgacgattggtggcggtctagttcaatcaaaggggtcgaagagcttgaggagagcctaaggatgctagaacaagcgacggagaaacttgaactgacctgaattgagctggccacggtgaggctaaaccgagcggagttcggacgggatttggggagaatccaaaattagagctctctggtggaggatttgaggtgcgggtgggtgcgttagctgcttgaatacatggcggagccgagggggtgctcaatttataggcctagtgagcggtggccgggaattcgagcgatggcgcgcggcggtcggaggagggaaagttcactggcgcgtgtgattggtggcaaaccccgtggcaaggccttaggtaatagaaggacggtgtgttgcgatcgactgcgacgtggtaagatggctcacg

SEQ ID NO: 33130 - DNA, 340 bp, Zea Mays
acaggggaaccgttgccatagaccttgacctgcgtgtccacctgtgttgtgcaaggcttgcactccagcatcccagcacgctccaggatatctagggtgtactgatgttgctgaagaatcaagccattcggcgatgctcaacaacaatccctagaaaatgaagaggacccaaatccttcatggcgaacttgtgctaaagggttctaatgatccggtgcagtaggcccgaggaagagacaatgatcacaatgtcatcaatgtatagaagaaggcatatagtgttactaccgtgctgatagatgaacagagaggtgtccaacttagcctcagtaaaacccag

SEQ ID NO: 33131 - DNA, 421 bp, Zea Mays
catttgtagaagtaaaatgcagtgtgatggtttttgaaatttcatcatggggcacagaagttgccctaagatgggtgattgcgaacgtgccaagcgtgcagtgccaatttaaatcagcgtcaatttaaaccgactgctccgctagtagggcatagtggtcaccccgagtttagataagcgtgagcatgtcgcaccgtcttaagtcattgccaacttaagccaattgctccgttagtagggcatagtggtcaccccgagttaagtatgcgtgagcatgtcgctccgccttaatcattgccgacttaagccgattgctccgttagtagggcatagtggtcaccccgagttaagtatgagtgagcatgtcgcaccgccttaagtcattgccgacttaagccgattgctccattagtagggcata

SEQ ID NO: 33132 - DNA, 419 bp, Zea Mays
atggagccatgccagctcaatagggtttgttttcattatgacaacagcataaaacatttaggtatcagccaactacagaacaggaaacttcgaatgtatgttaagctatcctaacattgtaccttctctcccattcatgcaccccttaccaaccccaaccaaattgttatggacatatagttgctgcagacaagctatttagaggataaaataaactaatggaagttccagatgtgttcctgttgagaactctctatgtcactgtgtatactaccttgttccagtgcaggggcacttggttggggaatggggattcagctgaaccccaaaaggtgttggtgttggaaaataaactataaacgcacctgcgatttaactgccatgtaccaagaagtcctatggagtaaaccaatgacgac

SEQ ID NO: 33133 - DNA, 371 bp, Zea Mays
gtaaaagaaaagggaaaagaaggaatagtgctgggctgaaaccagcccaaaccggcccttcaacaggagaaacgtgcccgcgcgcgcccgcgtaggtgattttgcgtagaggccctcagcgattcgaataacgggttaagaatccctacgcactattcatctgtctcactgacgtttgcactaaaccccttgcacttctatttcttcataggtccagatcccagacggtgaacggcggcgtgcgcgccctccagcgaactggtactggccgagatgcacaacaaccggtgccctaacttagttaacacctaaccccacccctggcgaccctaatccctccatcaattgcacgaatccggcccggagttctt

SEQ ID NO: 33134 - DNA, 297 bp, Zea Mays
gtcccaagtgattcttggagctgctcccaaaagcgtgccacaaacagtgctcctcggtcagatacaatggtcttcggaatgccatgcaaacgcactatttgatcaacatagatttctgcatacttttttgtcttgtgggtggtgtgtaccggcaagaaatgagctgtcttggtcaatctgtccacaatgacccaaatggaatcatggtgctgggaggtattgggcaatcccacgatgaaatccatgcaaatatcctcccatttccaagatggtatgggaaggggttgcaaagggcct

SEQ ID NO: 33135 - DNA, 373 bp, Zea Mays
gtgaagcttaccgcaccctcaaattggactacgacaagaaactgaagaagctcgcccccgcaagaaaaacccgcaagaagaccaaaagccaaggatgtcagactgagcagcaggaagagaaccctcccaggaaccagtccgaccccgaggacatgtccctggccagtcttgatgaccttctcttggaatttggtgacaccttagagaaagagttcgggggtaccctaggtagcactcgtgtgtaataagcttgtggtagtggtatgctatgtaatgtaatggcttgatgtaatgaataaaataactagaaaaaaaatggcatgtgcataatagcaactctcttcccatggcagatggcttcggatagaaccac

SEQ ID NO: 33136 - DNA, 297 bp, Zea Mays
cacattgaattctcatgtcccctgtagcctttggctgaggcctgactcggggttgtcttccttactcaagatgtgctagggcgaggcagaaacggtggttccgtggagaggggacctcgggctggacgaggatttctccgagtatgtccctcgtccgagggtaggctcggacgaggcggagttttgagtggccgccgagtggatcctcgggcaaattgtggttcacactttcttgacctcgagggatgtgtctgatggtagccttagggttaagcgcattttaggggcgtaatccag

SEQ ID NO: 33137 - DNA, 474 bp, Zea Mays
atttccataggatattcaatatgattatttccctgtggtgctttgaataggcctaggcagtttattcatttttttcacatgtggattggagcctgatgacagtggctctgagttttattaggttttctggattgtttgttgaaacagtgttgttttactatcttttgattctttgttgttggctgctgtggtggaggttgatgatatggttttgtcgccccagtcttagatccggacttcccgtatctgtgctgattgacatcttatcgaatctgactccattgtatcaatttgcagtcaagtctgcttacgtagtctgttctttttctcatttacatccgattggttcatgacatgtttttcttcatttacacatcatcggttcatgacatgttttagttgcattgcaagagcttaaactcacctggatccgacaccttgatcgttggcttttgttgtttctttgaatttcag

SEQ ID NO: 33138 - DNA, 313 bp, Zea Mays
gagattaacaagttgctacatagaaatcagagattaatgccctgcagatgaccctgtcaaactgactgaatggggttctgatggtatagtgccacagaaagatctcaggattcagtccccctcgccgccagtaaccttgcgcacggattcacgccggtcaccgtgattcatgtttagcacgcaatggatactcacggggaggtaaaaagatctcgcgaggaagcggattgggtcacgacagaagcttatcaccgcgcctgtagccgtgcgacgtggctggaccgctgatgttgccatggaaactttggtgacc

SEQ ID NO: 33139 - DNA, 293 bp, Zea Mays
atatcttcaggcattcctgaagtatcttgtttgagcaagcttgaataagtttccaacattttggcctcctcttccttagctacctgcaaagaaattttattggcctcaatcttgtcattgtcttgcatttctagagccttcatatgattggctgcgacattgttttgaattttctcaaatctatcaagttcttccacatttatccctcttgctttatattttatttttccttcatgtgcaactcttttagctgccttttgtccaattggtctaggtctctaggaaggtcacca

SEQ ID NO: 33140 - DNA, 528 bp, Zea Mays
aggtccagctaagatgggacaaaccatctttgtggaggaggagcacgacgacgccgattgggttgctctcgagccaactccaccatccgccccagccgagcctgcttccactactacggctgatggacccaaccccactacttccaccacttggggtccgctcgagccagctcctactgagactggaggagttgaagctgctattgagggggaggccacttcctcaagggaggctccacaacatattcagcgctgtcacccacctcagcagatgatcggggtgcttcacgagcgagtcactcgctctaggtcacaacacatttctcattttgctcactcagcttttgttgctacttttgagccccgagatgttggacatgctttatttgatcctaactgggttaatgctatgcatcaggagcttgaaaattttgaaagaaatcaggtttgggttttggtgccacctccttctaactgtcatcccatcggtacaaaatgggttttcaaaaacaaacagagtgaggatgg

SEQ ID NO: 33141 - DNA, 383 bp, Zea Mays
agataatcgaggcggagtaaaaatcttgacaccggatatgctcgaacccggtcactggtgggttcaccgtacccacttgacctgcaaccgaccgagatggccctcaccggcgttggctgcttaccgaccgtgaaccacgtgcctagtagctgtaacacatcgcagtaaaccgttgatgcaggtctgtccttcgccggaggccttgccatggtgaaagccacgatcacccgcggagtgcacttctcctctctccggccgctagcacaacttctcaaaaattagcctccaccgctctcggacactataaattgaaggtgccgctagctccattaggttgtcacgaagccagagcacccgcccctgccttcgattagccccataac

SEQ ID NO: 33142 - DNA, 296 bp, Zea Mays
gtggaaactatcagggattcggtcctcggcccctagagcccataggtcaacaagcacatggaggaaaggcctctagtcactagggaccattgttcagcaggaggagatggataaggtctaccctggaggtgctccgcccccggacgaaccccgtgtcaccgagcatagggtcgggcatggcagaacccaatagggtgccgggcgtgtcagagggaaaccactcgattggatcccgtgcccgatccaagattggcccatcataaatgatcgactgcattaaatacgtcaggcctcga

SEQ ID NO: 33143 - DNA, 613 bp, Zea Mays
cttatcaccgcgcatgtagccattgcggcgtggccggaccgctggtgtcgccgtggaaactctggtgacctcggttgtgccacgccgtggcttgttactgtgcggtagtgaccgtggcgcacttaagagtacaatcgtggagccattgcaccggtgaacgccacgaattctttgcgccattgctcttccccctctccggccgccgcgcctctccttcaaattagctgccaccgctcaagggccctataaattgagcacaccctcggctccgctaggtattcaagcacccagcacacccactcgtgcctccaattgttcacttgagtccccgaatagctcatttcccccaaatctggtttccgccaccgtaaaaaggtcctcgccgtggctagctcgtttcaggtccgatcttgtcctctgctctcttgtttcagcactcttacataccactgatgcccctcgacccattcaattaagctagaccgtgctagatcgccgggaacacttctgttcatccatagttcgcactgtctccatggacagggcgatttagggctcaaattgtgcaattgagcgaggggaaacgattattaggtgtcgaattaggtgacag

SEQ ID NO: 33144 - DNA, 306 bp, Zea Mays
tgcagttgattgcttgatcaagctctattttatagagctaaatcaaggtgttgtctcccataatgttagatccctgagtcactcttgtgtctgcttttgatcatgtagcttgtgagaactatcaactaaatgattttgttgttcaatgatagtaagctgtaccttttagtgctttagatttaatattagtatatttgtattgtatttgttctttgcagcggcaacttcatatttaatgctcattgttccaaaatgcgttattaattgtacgcctaggcgcgccccatgtttaagtgtgagttggag

SEQ ID NO: 33145 - DNA, 338 bp, Zea Mays
acctaatcttcggggcaccaagattaactttcgaaagcatagccaaagaagaagcaaccaggctagaagatatcgacgtgctgtaggaagaacgattgaacacagtaattcagtcggctaggtactagtagaccttgaggcgctatcattataaagttgtgcgtcactgatcctttgcagtgggagacttggtccttcaccgaattctaacgggggaagggaagcacaagttatcaccactatgggaaggaccgttcattgtatcagaggtcacacggctaggatcataccggcttactcagatggacggcacagaagtggggaactcgtggaacata

SEQ ID NO: 33146 - DNA, 374 bp, Zea Mays
gtagaattcagtcgttggatcggcatttgagggctcggattagatcaccatcatctgtgaaccgatattcaatctaggccgcaggatccaggatccatggtccagatttcatgggtgaagggttatgtggtcgctctaatcacacccgcacatcgtccgatcgacgccccagatctaactgtacgaaggggtatctagatatctaatctccaccacccacatccggatggacgacagagagattgtcttcctcgcagccctccatagccacgacggcgcgacctaatacccggcggcgccatggccggggcaatccgcccgcgttttctagtgcccgactaccatgcagataggtgcctaccgaagaggagatc

SEQ ID NO: 33147 - DNA, 276 bp, Zea Mays
ctgccgctgcaagtgctgcacgagcggctctgtccatacgacactttttcttgccctcttgttgctcgaggtaaacagtcttccccttgacctgcctgaaggggcaaggagggtcctcatcgtctcctccccctgacgatgagacgttctacgtccgcaccatcctgacctgactgctgcacgagtgagtgaaaagataagcagaagtagagagcagccgataggatctcaaatgaagtcatagctacctagaaatctcacgagagagagaaaaga

SEQ ID NO: 33148 - DNA, 444 bp, Zea Mays
tgagaatgtgttgcgtaagttcttccctgaagacaaggggccaatcactaagattgatcctataggaaactctcctgtcattattgagaaggtgagctgttttcttcaatgtacacaaagcatctacttgaaattacagaaatgatcctattactttcatctttttctaggaatctcttggaaggattgcaccgacttggatgaatgtttcattagcaatgaaaaaagatcctgacgcagataaatcttttggctgggttcttgaaatgtaatgtcatgcaatcaatttttattgtctaaatattttggtctgtttatgcatcccatgttctatgctattttattcataatgtgagtagggatctaattttttttgtattgtgtttttggggaacaggtatgcctatgccgtggcatctgctctccatggagtgggcaacatct

SEQ ID NO: 33149 - DNA, 603 bp, Zea Mays
gccattcactgagttggagtaggtaggtccgggtgccttcaactgggggcagttattcttgaagtgactggggtctccgtagtgccaacaggcatttgctggcggttggttgcttgcaacggagggggcctgaagggagttctgactctgctgactgtagcgggacggagtgggtccagatggtttattgaagcttggtcccctgggtggaagcccaaagggtcgagctctctggtgacgatcttgctgctgagcttggagaacttggaatttcctcttgaggtgccctttttcttcctcttttgccctttccacttggatggctttgttggagaggtgagaaaagttgaggaagtcttggctggcgaggatggtcttaagctcgggtcttagtcctttcagaaaacgagccatcttcctggactcggtgctgacatcgtcaggcgcgtaatgggccaactctgtgaacttgtgcacatactcactgactgttctcccaccttgagttagctcccggaactcatcttccttgagttgaactatcccctggggtacatggtgctcacggaaggctgtttcgaattctgcccaggtagcatctct

SEQ ID NO: 33150 - DNA, 894 bp, Zea Mays
actgtaatagcttgaaactagtttccaaagaaggataattatgactcaattttaattaatgaatccctttatgttcatatacttggatgatcaactctgcagattactaattcttcatgggggactgtttatttatttactatgccgatgctggcaatagggcgaatttaaaatgttgatgaagccctaagcagtctactctcctgttgttattagttaatgtttgttttagatcaaatacataatctatgtccctagcatgagagaaacactactgtagtttatttattagctaatgatgatctattatacctttggtggcgacatcatttttcctgcttaaacaaggcattgtacggatccctgtgcagagtatgaacttacgacatgagcctttcaatcaaaggggagaaagttggaagatgatgtctagccatgtaaagagaatgagaattggccaatgtccataactcttccaagatttgagccagagggcagggggtgggggtggagttaaagagttcattgctggcaaaccatttagccttaggggatgatcattgctgctaatctccaccttaatttagtagtgttcatgttaattaggctacaaatcctgtggcgaaggtctaacacaagcttggataagtaagagaagtgagtgtcaaaatggcacattatttcatttttagtttcatggagatacccagtttgagcagtatctaggtacgaggagttacaaatttgtttatgttatgtattgtgctcttgcgtcatactgataagagaaccgtgatgacaaaatccacctgttttggtgtttaccttgagccttgtaaaggttttcattaacatttcatcatgcttcacaatcagatgtgtttcattttcaag

SEQ ID NO: 33151 - DNA, 341 bp, Zea Mays
taaaaaatttgtttgtaaagatttatgttgacaatcaaactgatggatcacgtggtaagtgaagttttttatattaataatcttattactgcaatagattctgatttctatgcatgttttgttatttgtattacattttggtgatgttcaatactgtttctatgttccctatgcctgctgtgtctcttttactgaagtttctagtagccttgtgtagttctctacatcatgccgtactattttggaaagtttcatttaaactggttgtttgagatactggttataatgacgttgtcttcttttttgtggatggatgcaggagagatgaagaacaatacatg

SEQ ID NO: 33152 - DNA, 421 bp, Zea Mays
gatttgagccccccgagttctgctgattgttggacttattctgcctcagatatgggcagtctttgataaaatgaccagacttcccacagttgaagcagccagttgaagagctagggagggcggggaaacgagcacgaggggtactcggctgatttgtagaagtgggggtagtggcagggcaaatgaaaacaggctgtttaaatggataggagggtggacgaggcgaagaacaattctgattgaaaggtcggattaccaaccttgttcgcttctcaggtccctgattggacctgtcacctccaaatcccttggattttccttggcctgtattcttggcttctactgccagcgtcgtgctgacagacctgctgtgtgtaagatctaggtaggtggccattttcctttggagccggtcgttgag

SEQ ID NO: 33153 - DNA, 338 bp, Zea Mays
tcgaagacggccacgctccatccccatacgacggcgcctaccacttcgcgaaaattcacccacactgtgcttcgacaccacccttcgctgcctatacccagtactcacaataggaagatccccggcaccctccacacgcggcgaagactccgctgcagccacatctagcacagcaaaataatccaagccttcatccgaggactcctccgaccaggaaaacgaactcctagattcaccattagactcaaaacactcaaacacagagccaaataaattatcatcggcaggcactacggttgaggccgccacaaaatcagtattgccagcagcggttgctt

SEQ ID NO: 33154 - DNA, 573 bp, Zea Mays
agtggctcctattcaccccctttggtcgccgcatgttctgccattcccattctctgttatcccatttccattcccattccccattctctctcaagcttcggctgccattcccattctctgcctttcccattccccgtcctctctctcgtgcccactgccattcccattctctccctttccgtttcccctggttctgctaccagtcgataaaatggccaaaaaagggacgcctatagggatcaaactctgaccaatacaaacagcaaacacaactcaatgcttctaacgaataacactgttgttctttcctcttatatgaaggagctttcattcatctatttctaggctttctcagaaccatcattcttccacacctcgcaatcaacgatgcagaaccgctggctccctctcagtcttgcgtccatccatccctccacgatctccactcgcccctctccctagtcacctagcacggcacacggcgacgacgcggcccgctccatctaccactacttcccacctcatcgacgatctcgtagctacgacgcacatggtgagcgagaccatctccga

SEQ ID NO: 33155 - DNA, 286 bp, Zea Mays
atgaaaccgaggccactgaaacatcaccgatttcagaagtaatgaggcgatcaggtctgattgtggctgatgaaggtgcttctaatgccgaagctgaactgactatggttgagggtgaagatgttgagagtgaagaagactacaacattctgatcccaacgaagcctagtcatctagattttgaaaaatctactgtgactgaagatgacatgcctatgatgatgaaattgggctattttggagaggctgagagtaagcttattcgatttgttggagaagagactat

SEQ ID NO: 33156 - DNA, 329 bp, Zea Mays
ctgccttgtagttatctttaccggtttgccgccaattctggacgcatgtcaagtcaagaacgccgcctgcttagttgttttagctaatgcatactggagttgcattgcatgcctaatgtaatgatcgagacatatgctgctctgctcccttctggagggatatagctagatcagctagtgtggtatatatacgtagttgggtgtgtctgctgtatgacaggcagtggtgcttaaggagtgagcttcttcttccctgggatctttaggacaagtagagctttctgctgcatgctccatgaggatgtgccaatctaaagcatgcatggtgc

SEQ ID NO: 33157 - DNA, 532 bp, Zea Mays
gttgggatgaccttgtatttcaattatcattacccaaagcccttgataaaacacagtactgtgctagtgttctgttgcttgtttttttttgagaaaggggataaccccctatttcattacgaaatagaaagagacataagttcttacaataccacatgagcacccagaattttaaagctgacaaaacacacaactatcagctaaaaaggaccaaaccctgaccaaaccaaactactagtagcaacacaaaaagtaacacagagctgaccaacatcaaagttcacacagatcacaccaaagcagcaagcagcatttctatctcatagtttttcctgtagctaggcgctacaagggagaagaagtagaacgaccgcacagttattgaaccaaaataaccagataacaaaacatgtttcatttcatcggattcgtctgtcaactggcctccaaccacgagtcttgttgtagatctcacacgccatctttttgattttgagacttccgagctccaccaattttcttgccttctttt

SEQ ID NO: 33158 - DNA, 498 bp, Zea Mays
agacaaatcaactgaattggtgaaaggatcttctttgctgaatgttcctattgaagtatccacagcagtaccagagatctatgagatagaagctgccgaggaggataaatcaaacgctgctccatcatttgtcaacaagctatatcaaatgtttaatagtaaaccaaaagatacagaagcttctgccccacttccctccaagctgaacgacccttcagatattgccgaagaaacactgtcaaccagctctgaagctcctgagaagcaggatcatgatgtcagtgcaactatgacctttgatgagctactaaaggccttcggttctcagcatgaagggaaagaaatgcctgaaaatttgtctggtggagttgttcttgatcaagtttatgctgttgcaccgagtgacctgaacacacttcttttctctccaagttcagactttctgcagtcacttgcggagattcaaggaactacaggtcttgaaattcaacaatggcg

SEQ ID NO: 33159 - DNA, 554 bp, Zea Mays
tgataacattgtgaaacgctcattgagcatttctatatattaaagcagggagcaattctgctttcaggtgcctccacgtcagcactctgtgttttagccgcatgatccaaatccaacggtaaagcagggagcaattatgctttcaggtgcctccgcgtcagcactttctgttttaaccgcatgatccaaatccaacggtaaagcagggagcaattctgctttcaggtgcctccacgtcagcactttctgttttagccgcatgatccaaatccaacggtcataatcacatctcacgcatcccagcggtctctaacacacgctctttctcctccaagcgaaggaccattctagatgatgcacgaaggagccatcaagcgaccgtttccgtataacccccagctacccctatggccctatccggtgtctccatttgccgtgaaggttctagacagtccactccccgccctcaaacgccgttacctaggtgcttcgtcgtcccctccacccccgtcaagagctctcccaagcgtcggcgcacaccgccacctcgccgt

SEQ ID NO: 33160 - DNA, 284 bp, Zea Mays
catgaaacgcctagtggaggcttttgagtcacgttccatgaccactaacaagtccatcacctctgctgagaccgaccctgttcgtgttgaggttgctgctcagttgcaacaagtgatcgaagatggttcaccggaaggcagcgacttacatttctttgccactcatttgttgatgcagaaaaagtatagagatgtttttgcaacactgaagaccaaagaaggaaggaacgcttggctgcgccgtgctttcgagatgaatgttaagtccagttagatggtggtcg

SEQ ID NO: 33161 - DNA, 378 bp, Zea Mays
ggaaaacataattgagggaaaaaggaaattgggatgctatggtggacgatcaggggcgagagctggtgcactaggtgcataataacctagcggacctggttgatcactcaatttatagaagccaacagtggtgacgtccaatttggagaaggcgtgctggcggccggagaaagggggagtttactgacgcgagctatcgtggtggtcacttgctgaggagctacaacggtaattgttgagttattatggctagcaacgacgtggtgaaagggtcacggcgtggcagaatcacaacgaccggcgtacacctcggcgatggccgctcggccatatcgccgacaagtgggtgcggtgtctaagcaaccacagtgccccgac

SEQ ID NO: 33162 - DNA, 514 bp, Zea Mays
gatgcctaccgtacccttcccctcaaccaatttcacgaacgacgatctaccctgctctgtccacggtgacagcgggcaccacgggtaatcaatctcgttcccggcgattggtggcggtttagctcaattgggtggatggatgagcatcagggaagcctacttatgctgaaacaaggtaacagagggcatgaatgaacctggaagtggctggccacggcgagcttggttttgcggcgttcttcgaccgatttgggggtaatcccaaattagggagctgtggggaacgatcggagctgagagttggtttactggatgcataattacctagcggaacatgctgaggcttcaatttatagaactagtgggtggtggccgtgaatttgaaggaagacgcgcgacggccggaggggaaaaggggtttggagcatgacatagtggcctttcaccgtggcaggtgctccggtgatcaccggacatgcaccacatgattcaccgtgacgagagccagcgctaa

SEQ ID NO: 33163 - DNA, 985 bp, Zea Mays
gtggcggacagatgagcgtgttcccggtgaccagagggttcttagcgcaattacgtgggtcggcaagcatcgtggagttatgaggaaactcaaacgagggagaggggaggttgaactgaccggaatggggctggccgcggtgagctgttccttgcggtggcggaaacttgatttggggagagtttgaaatttcagagctcgggtgaatgattacgggtgggagtgggtgctaaggcttcacgatgacatagcgcagctacccgggggctcaatttatagaaggagcgagcggtggccgggaattttacgaaggacgcgcgacggtcggaggtagaagaaggtactagcgcacgtgaatatgtggcatctaccgtggcagttactccgacgagccacgaagaggcacaagggttcacggcgatgcagtggaggggctgagccacgcggcgcaaggccgggaggcagttgtcgccggcgagcatatccaaaaccgtcgtggtgagtgcagtacggcgcccggaattgtttactgcccggagttatccacgacgacgatatttttgtgaccccgcagcgctatccactccatccgagcaccaatcgtggcgacgacggcacgaatcacggcggcaggtcaccggcggtgatgacagctgcgttggcgatctgatcctcctgatagcactgtaccatggagagttacattcagacagcctgacagtcaagtttggagcccaattttctctcaattcctaatgataatccatgtcaagctctatagcaaaattgtagagtaatgtaccatctacaatgttgccatttggtgttgccactaaaagccattgaatcatacttgaaattgggcttgaagttgatggtagttcactgttagcctgatttcagtcctttatcagtctgacagccagactttgagcatgattatcttcaaatttctcacaagaacatggcttgccctcttcagcaa

SEQ ID NO: 33164 - DNA, 574 bp, Zea Mays
acgcgagcacgaccacctcgtcgtccccaggatggggcactttccccttgctctccagtctctacgttaaaacatccttcgggggaatgaaccctttcttctctaggccacggaggcgactctctcggatcgagctgtctaggaatgacgccataggcgcagagggcaagtcggaatggcacaaagaggaagaacaacaagggaggtttcgagaggcagaacgcaagggtatggtaagcaaaaactaaccctgagcgcactcctcctttatttatgcgaatgggcaaggggcagccacaaacaaattgtgaaggaactgccccttcaaccaagggacgccttgggtatcgagcaaagagaccatgtgttttgcaggacctcgctgcctagggcagagcaccaggacaatgcgccgcgagaagtacaacggtaacgggcggggaggttgactagaccaccaagcaacccaaccatgacatagcagacgaaccatttcgcgtcccatcagacctcccatgccaaacaacatcatcatggccacccattattaccacaccacagcagtacccctgcc

SEQ ID NO: 33165 - DNA, 423 bp, Zea Mays
gtgatctcgttgtctccttgtaactccactcggtaatgaatctttacttcaacccttctgttggaaccttacctatcttacccttgattgttttctccactttgtcgtttcgcgagtctcgccttaactatatcctttgttatgcttttaattattatcatatgcacccttgacacctctatatcctacatcgatgtttgtctcatacctgtcctttaaaatcgcccctcttccgtctcataccttctttctcttgatcatatcctcttctttggctcgcgagtttgtaacctcatcctttgttgtgcttttgtctcttattgcatttacccttctcatctctcaatcttaccttggtaattatgctatgttcgttatctaaaacctccaatctcccaccttagttcaagtgtggtctcttac

SEQ ID NO: 33166 - DNA, 386 bp, Zea Mays
cgatttcgggtacacagattctcttcttaaaccatactgtgccttgttcatcttccgtgaaatctggggctttacccaaaccaatcaaagttttaatttccttaatcttctcatcagattcttgtcctttacgaatctcttcttctaaagtagattcgacttccatcaccgttgcttctacattattgagcaatccaaggttgagtcgttctatttcccagcacaattcttgtgacatcaaatgagtagtgatgttattcacttgacccttatggctcaaagcatcagctactacatttgcttttccggggtgatattgtatctccaaatcatagtctttaatcaactcaagccatcttctctgtctgaggttgagttccttctga

SEQ ID NO: 33167 - DNA, 331 bp, Zea Mays
tcggatttgttggctgaaggatggggatgcgaatagtgctttatttcactctcatgcgaggtatcgcaaagctaagagcttcatccctagaattgtctcagaggatggaaaggttttcactgcccaggaggagaaggcggacttgttcacggatttctatatgaatctgcttggttctgcaattaatagaggggctgcggttgatttggaacagcttggagttcccacatttgatctagaagctcttgacagccctttctcggcggatgaggtctggaatacaattattagtcttcctctggataaggcgccaggtccagacgggttcaca

SEQ ID NO: 33168 - DNA, 355 bp, Zea Mays
tggcgaccttgcatcggaggcccaagtccaacacaactagcttcagtttggtacacctggtggctcgacagtccggcaacaattagcaacaacaacatgcacatagaagcggcggttgagtttaaccgcagaaacaaccccagccccagcagtgtgtagctggcggcaagtctcccaagcaacgcaatggctttttattgcctctcacttacaagtatagttgtagtatctcttcatgtatatacacactcacaccaaaacgcacaccaactcacccctacagtatacaagcagaccatgactccaccctcccccaggcccgcacacgctcgccaatacccgcatcgcctccaac

SEQ ID NO: 33169 - DNA, 379 bp, Zea Mays
ggaatttagaaatttccttaaatgttagtcatgcgggtctgtagtccatatgccattgacatattaaatgcatatatgatggattaggaaatagttgcagtgacatataaggaatcaccaataacaaaatcgtgatgtttcagagtttccctcatgttgcactaacgtcttggtccagatgtggttagacttttgcaggtctgcctctctaggatgttaatgtcaaatgccatagatcttgtatctatcagttctttagtactttcaaaggtcagtcggtatgtcctgcatgaagtgtatgaagttaccaaagacttcagttgctttggctttgttatgtgtaaagagatatactgggatgaaaggtcatatgctaaat

SEQ ID NO: 33170 - DNA, 741 bp, Zea Mays
tgtttggtgaattacaagggcacgtaggccctgaggatttaaacaaaaaatttgcagagattgtcaatattccaagaatggtctaggtcttcgctggatggcgttgttagcctgtatgcgctgggggatgccttcgacttgacgatgaacggaccctcacactttggctccagcttgccccgtgactctgtccaggtggttcggacgagtacgaggtctccttcgttgaactctcttgggacgactgcttgttcgcgccaggccttcgtttgagcttggtatttgttgaggccctgcagggcgaagacatggtctccatcgatgaggtctttggacgttggtttgtctacatcggggacggctgatgcgcttgttcgagatgacccgtgctttatttcctgcggggtcatggcctccgaaccatatagtagacgaaaaggagtgaatccagtcgcccgacatttggtcgtgtttagcgcccatactgcttcaggtagatggtcggccatttacccttgctgtcatcgagtagccttttcttgatagcagtgaaaatcttaccgttggcgcgctcgacgacgccattagattgcgggtgatatactgaggcaaaggcgagcttggtgccgatggagaagcagaaatccctgaagtcctggctgtcaaactgtttgccattgtcgattgtgagctcggacgggactccgaatcggaaaacaatgttttgccagaagaatttct

SEQ ID NO: 33171 - DNA, 451 bp, Zea Mays
atataccaatgaggtcttggggagaggaacatgaagttctatcaacaactgacgtaaccaggatactttagcaactgcattggcaacagcgtggtactcagcttcgtcactggagcgtgagaccgtgttttggcgcttggaggaccaagagacgaggttagcaccgaggaagacagcataaccagaagtagacctcctagtgtttggatagccagcccaatcagcatcagagtaaaccacaagttccatttgcgaagaggggctgaggtgaaggcccaactgaagagtgcctcggacatagcgcatgatacgcttgagggctgccaaatggggttcccgaggatcgtgcatgtggagacagacttgttgaacagcatacgtaatatccggacgggtgaaagtgaggtactataatgcgcctacaagactacagaattccgtgggatctgag

SEQ ID NO: 33172 - DNA, 562 bp, Zea Mays
ccactgggagtaggggtcaatgcatcgccatggtgtaatgtcaactactcatgctcaaccctaattcacaaacaaccgtcacaacctaaaggtcgaggctccaaaccgtaaaagtcactcacgttcagcaggaccccgcaaattcatggaatagaaactaaacaaattgtcaacaaagtggaaggatgtacaaatgcaatggtcaatttgatgcatccattccagccaatgaaagatagcaatcttagagacatccatcccagcaaatgaaagatagcagtcttagaggcatgcatcgaagcgggctagggtttccttaccaacaaaagtagaagtcggtccaaatctagatagatctccaatccgcactgagaaacaatatgtgaggatgtggacaacgacgagaagggacttcgagctttaggttttgcggaacagaatcggaagaaggcggtcgtcaggcaagagtaaagagaaagggtgcctgtaacggcctccagtatcaagaaaccgactctgatactggatctttctcgcgctatatgctatagtcttgacctct

SEQ ID NO: 33173 - DNA, 371 bp, Zea Mays
aaagtaaaaatggatgaagctaacttcaaggctcaatctgaagtccaaaggaatgaaattgaaaaccttcaaaaacaactagcggaagccaaattgaaatgcgctattgccgaagctgaccaagatgccagtgaatactggaaaaaatattgggaaaaaacagttgcagaacttcgctcatcaaaagaaagatgttttgaaaaatctgtagaatgcgtcaacaggataaaaactagcttcgccaacgtgtgcgcgtactcgagtgaagacaacttcataagaggcgatcctgagggcccaattgagtggatcagcagcgaagccgaagcttttgaggaaatcttgagtgaccgtggggatgtctgtgcctt

SEQ ID NO: 33174 - DNA, 288 bp, Zea Mays
gagaaaagctcagctcccgccgccgtgatcgtcgtcaggctcaggaacacgagcgggagcaggcagaacaagacgctaggctccggcgagagaacccgctcctcacccggaacttgtaccctgacttcgctcgggcactaaacacgccaagcgaggttggaggggtcctggcacaaatagccaacgtcttgcgcgaaccctagacgcggaaggctatcggtgagtactcactcaggcagctaatcatcttttacctctcgcccacccgccaaacgatctacatcatgc

SEQ ID NO: 33175 - DNA, 375 bp, Zea Mays
gccttttacagttaagcttttctatttttgttgagtaaactgaatcatcaacaaaagcatgccaagactgggaaaccaagcgtaaacacatgtgcaagtgtgtaagagaggtcaaaggtcacaattcaaaagacactttgttccatctgaagacgtcagcaaaaatagttaaaaaatgtaagataggtagcaaccttaatagatactgagcacaaagcacaccaacatccctagatatgagataatcaacgagtaccatgtgatcatagtgcagctgcagaatagtttcaatgaatgaaaaaaaatattatgctcaaaacaggcattatggagtgaaaggggaaaattttgaaagattaatagaagaaagtacta

SEQ ID NO: 33176 - DNA, 624 bp, Zea Mays
aacgagttgaaagatttggccggaaatgagataatggattcgccagatacggccaaagaggtgtcagtgaacttctcaatgtggcgcgtgtatgagcttgctcagtcactgctggacgaagcacaacgtttagaagatcttgaagctggtccttcgccaccattatctgaatgtttcaataaccattttgctgaagatgaagatatgggtggcggggaatgggcactggatgatgtggattctgaagagcttgtggatcgtcagatgaagtagagtagtatgtgtggtgtggaatgacactggatgttagctgtgtaaggttatttgtgtaagagttatctgtgttaccagtgtaaggttagtatgtgtggtgtggcagtgtaagagttatttgtgttagcagtgtaagagttatctgttcatggtatctgtgttagtatgtgttaactgaacttggaggttatctgtgtaactgaacttggaggttagtatgtgtggctgtgtaacttctcgcatttgttcaaacagccattcagctgtgttatctgtgttagtatgtgtgaattatttcagttatctgttcatggtatctgtgttagtatgtgtgaattatttcagttagac

SEQ ID NO: 33177 - DNA, 485 bp, Zea Mays
tgacgaggatgtcttcttgtttgtcaaagagtgccaccccaatctggacactctttaaagtgtcggtgtcgtcgaccagaatgtttttcatgtcttgcactgatttgaacgtgccagaaatgactttggaggcgtcaggcccaccatgcaggttgatgtgtctctgtagttcagctaactcccttgtgtcagcctatgttaatgcgagttcatagttggtttattcacacacataagccacttggaatgaggttgacatcataatgaccccgtgggggccgagcatctttgtcttgaggtatgcgtagttggggacgacgccaaattctacgtagcatggcctttctagaatggtgttgtatatcccctagaaatctactacctcgaattccagcgactcggtgcggaagttagacggatccctgaacgtgacgagtagaacaatttgcccgtgcagactggcgctaaagcctggcatgatgctg

SEQ ID NO: 33178 - DNA, 327 bp, Zea Mays
tcgctaggggcgccacattaggttcttaatagagttgtatagatatgtagtatatgagtattgtttcaaattgaatttaacttaatagactacatgttttatcaaaagcacaaacaaagaaaataaccaatattattgaaaccaatcattatttttatatacttaactattaaaaatgagtagtaattagtatgtatttatatgtttgtacaaaccttaggggggtcaaggcctctgctagcccccttgtctatgtcattggttgataggatcgtggtgatgtcgtcccctccgacgcccgctctccgccaccaccgcgccggcgtc

SEQ ID NO: 33179 - DNA, 397 bp, Zea Mays
ccacttcatactctgtgatagacttcttctcttgcttgaaagactgcaaatcaatcttcattttctcccggaaggtgaccgggtagaacctcctttcaaactgcctgatgaagacatcccaagtcaggactcttggtgaggaggagtgcgctgtctgcatgcctctccaccaaatttgagcctctcccttcagcagctgtgtgccaaagcaaacaagatccccatacacaatctcaaagacattcatcttatcctccacgtaagttagccaatctgctgcctcgaccggagtaccactgccatcaaaaggatccagcttcatgcccatccactgcatcagagaaagaccactaactggaagaggcacctcagcctcgccacctagagcagcacccgc

SEQ ID NO: 33180 - DNA, 504 bp, Zea Mays
cagggctcagtgcctttgtagtctccagtacagcatctagcacgttagccattctcctcctcttgggagttgcggcagaagttttttgcacattcggtaaacctgttgttctcagtggactcaggatttctggtatttttgtcactttttccatctgtggctctttggccttattatcttcaaccttggctggctcaactgtagtcatcttcggtactacactcggctctacagcgctctgcataattgaaacactctcttttgcttcgacaactgaagaagtaccttcgtcgagttcaggaatcacggctggttcaatgtaacacgaccggtgagtcagaaccttcatcttcttgcccttcggctcagctgtgatggccgaagcagcaatctttcctgaagcaataatctttctctttaaccctcgccctcgcagcgggtaacaatagtcagggtatacgaagccaatagcatcaaataccctattcaatcttttcttattcc

SEQ ID NO: 33181 - DNA, 349 bp, Zea Mays
aagatatagcatattcctttagttcttctttttcagcttttgataattcttgcccaagtatatcttgaaaattgaattcctcttcctccgaaatgtctttggctttaccctttccttttccagcgactgcggcagcctcttccgcagctgcatccagaagcatggtatcaattttagcaagtgtggcctctagattcacatcttcagtggtttcaccttcggcaccttcagcttcggtggctgcagcttcggcatcagcggtgctctcaatagctggtatctttgacgctgatgcccgcggcggtgtccgatgaatgacttcggccacttgaataatccttcgtttttt

SEQ ID NO: 33182 - DNA, 336 bp, Zea Mays
tgaaggggtacggttctttctgagccgttcgatatgaaactggtggtccagattagatctaatctctcttgaaccggtaccaaatagtggccgtccaataaagatcctacggtctagattagatctccctatttacacaaccagcgcgcatgatggccgcaggatctgcgatctaaggccctgatttaatgcatcccgcgatcctacttctaccgtttatcgcaagatcaacggttccgaattcgtggaacccgatcgctgcactcactctaatccgttcgcccatcaacgatccaacggccatcgctcttctctctcacctcgacccgagacgac

SEQ ID NO: 33183 - DNA, 395 bp, Zea Mays
gagaatccgcccaccctagagggcactttttgcacatgcagctctgagggactacctcgggcacctctaccaggcttcacctcccagaggctgacgacatcatcgaagacgacgaagtcctaggcatcttagtcgaggaccaactcaagttgtgatcccttcgcatcaagaacaaccacctatagaagcagaaggaaatactcatagccaagcgctaatgcatcaccatgcaggccaaggtaaggcagatggtactagatgaggaacagaaggcaaagtactggaacaacaaatagcagatatgaagacgaagacccccaccagctgcaacaaaaccctctccacataccagtactggccctagctactttccatggactaaactacattgatga

SEQ ID NO: 33184 - DNA, 410 bp, Zea Mays
tggagattatcgatattccaggaatgctctaggtcctcgccggatggcgttatcagcctgtacgcgctgggggacacctttgtcttgacgatgaagggacgctcccactttggctccagtttgccccgtgactctgtccgagttgtccggacgagtacaaggtccccttcgtcgaattctcttgggatgacggtgtggtcgcgccaggccttcgtttgagcttggtatttgttcagagcctgcagggcgaagacacggtctccgtcgatgaggtctttggaggttggttcgtcgacgtcagggacggctgaagcgcttgtccgtggtgacccatgtttgatttactgcggggtcatggcctccgatccgtatagcaggcggaagggagtgaacccagtcgcctagcattt

SEQ ID NO: 33185 - DNA, 305 bp, Zea Mays
ggtgcagccggacttagcacaacaagtgcgaaaaattccgatgtctatcgcgaagattatccgcgcagaagtcgcctaagggtgcagccggacttagcacaacaagtgcgaaaaattctgatgcctatcgcaaagactccgcgcaagagccgcccaagggcgcagccgacccagtacaacgaaagcagaaacgacagcaagaccaactgtaatcacaccggcacagcataatcaaccataccagacaaagtacacagcgccctcgcaggcgcaggcacgcgagggcacacaactccattttacaa

SEQ ID NO: 33186 - DNA, 554 bp, Zea Mays
gcgcagggacatggcatgcaaggcgctgggacagggcaaacccaggggctagggagggaagctacacaaacctgaaggcacgaagaccaccccacacatgcagagaaactagggctacagctcaaggtctcaaggacagggaagaggattcactgatccaggttctaaagcaaccaggataggggcagatgtcctcgagttcagctggactggtggagaagtatgaagtcggctagaacttgggggaaatctcaggttgtgttcttgtatgccccaaacaaggacagcagttgcagctagcttggacttccctttggggtcatatatagagggtaaaagggagccaacatgctccatctttctcctgcatgactaccacgtcaaagagaaacacagtgtgaccaggagtactctttcactgcatgttggacagcactacaaatagttcaagcagctgagtcaccactagatagttctctaagttgttagttgtatcttcattaaaaagggactgcacaagatggaaaatatcccccccttcaacccatctgttt

SEQ ID NO: 33187 - DNA, 381 bp, Zea Mays
cggattatgcttttcatcattatcatctttacccttgtcacctctatatcttacttgatgcttatgttatacctgtcctttaaaatgttctctcttccatctcaattttatagttgtattttacccattttccattggttgtatcctcttccttgtcgcttgcgagtttttaactccatcctttgttgtgcttcggttgggtattatctttacctttctcatctctagatcttaccttggtgattacactttgttcattctctaaaatctccaacctcctatcccaatttgagagcggtgttttacttatcctacccttggcaatatcctcttcttatcgcgtgaaagcctggatgtgacctcctttgtttgttgtactca

SEQ ID NO: 33188 - DNA, 275 bp, Zea Mays
aaagaattggttatccaagcctgcaatgaacttcaaaaaatctcaaatattccattgcttgaagttttgatagtccttggttgctcgcggttgaaggatgtcactgaagtccaccttagtcatgcccgcattgtagatagagacataagagaacttccagattgggttgctactaatgcatacatgctgcagacattcactatagttggcagagcagaactgcttcaaagattacttcccaaccatgaagactgggaaatcatccgtcacataag

SEQ ID NO: 33189 - DNA, 317 bp, Zea Mays
aacggcggcgtcgagcgctatcctttcctacgagcttgccatgtcccgccgtgacagtaacgcggtcaaatcagtgagggcatggatgaacggagaggagcggtgccgatgactggatatggccggagtgattactggccgcgtggcggccgaaatcatcacgctccaccgcggcgatcttacccggatcaagaagatcttttgcgaggagatgcacaccgcgcgcccatcccgaccctggcgcaaatcacggagcggatcggtcgtcggtggcgagggtcaagcttatcctcccaggcactgtaccatggcaatgt

SEQ ID NO: 33190 - DNA, 566 bp, Zea Mays
gttccggatgggtgctcgacgtgcatctcttcgtcatgatctttgtggactgggtaagatcgccatcgtggtgcgcgaacgcctaggccgccacacgactgttggcccttatgaccgtattgggtcgccggtgccgcttcactccatcggtccacggaatcgccaatttacccacgtcatagcgggtgggacgtgtctggtccctagaaaagaaccgagcccggcgtcaccggtgaaggccagcgaggtccggtgaagcttatcgcttgtgccatcatcgtgggtcgtcggtcctttaaaattcacggcgtacttacccccatcgtccaaattgaccgtgcactgatctccgcctcccagttacagagctaacgacccaccggtgatcccttctcgtccaccatcgaccgatatcactggatttccttggaaacggtcatcgtcgccaccgtggggggtctctccgtggccaggtcagatagggctggtatcctttcagtaaaaacatcccaaggctagacaatgaacatgttgatgtgttggctaagtctatcgccttggggctc

SEQ ID NO: 33191 - DNA, 283 bp, Zea Mays
gccggggggaaatccggtgggaagtcatcgcacagcgggttgtatctacagccatactgatgatggatagaggtggaatcagccgaaagtgggtacaatgggggaggcattgtgagatcaaagagggttccagccaacggagtggttgaggagtagagatgagcagcggttgggaagtagaggtgagtatagaaaagaaatgcagcagctgctgctgccacaatggtcttggcgctcatctgcatacatgaactgagctcactatttggtcgttggatttggg

SEQ ID NO: 33192 - DNA, 446 bp, Zea Mays
ctgatctcaagtttggggcaccaagactgatcttcgaaagcgtagctgaagccgaggccactagattggaggatgttgatatactggaagaagaacgattgaatacagtgattcagtcagccaggtaccagcaaactctgaggcgctatcatgataatgtcatacgacatcgatccttcgcagtgggagatcttgtcctccgcccaattctaacgggggaaggacgacacaaattgtcgccactatgggaaggaccattcatagtagcagaagtcactcggcctggatcatatcgtcttactcaaatggatggcacagaaatagggaactcatggaatatagagcatctcaggacattttacccctagctagatttcaaaaagctatcggagcagcattgtattctgtaattggaaaatacaccatcaataaaaagacttcattct

SEQ ID NO: 33193 - DNA, 629 bp, Zea Mays
attgctaaagagatgaacgaagctttgaataatgggaagcgggctaggtcgttgtacctagatgacgatgtactcattgaaaggtctattttcaagtgatgttttcactcaatccaaggtatccaaaacagaggcaggtaaaaaagcatatgacattgttttctctcaagaattttggaattcaattgaggattgtcttagagcttctttaccgcttcttgtcgtgctgagattggttgatggtgatgagaagccaacgttggctgaggttgctgcagccatgactatagcaaagaataagattacctcctcattttctactcaaaacaagaaagcatgtctgaaacgtatcatgagcattgtggatcgacgttgggcgaatcaaaacaagaaccctggaaaattctacaacatcaaagcaggtgatgatgaaggctatgttggagagctaaggggttgctttaatgatgtgcttgtcaaaatggtggtatatgaggaacctagagagaagattgatgcccaagttgttctttatgagaaccaaagagaggcatttgcaaatccaatggctataaaaaatgcacaaacaaggaatccacgtaagtattctaaaattgatagccttccct

SEQ ID NO: 33194 - DNA, 353 bp, Zea Mays
tatctttaaattctccctatacccccaccaaatcataaagtatcattttctacatctatttatcatccaatatcaatttttcctaactaccaaactccaatgtgcactatagcgcacaggaagggggtgggggtcgacaccctcacgctagatctggcggatccttgtatgctctcctagtactgtagcgcaaggaggacccattagagtgcaacgattctgctctagagccataccagatacgccctaactctcgaaacagaaaaagaatggcggcaattttccctccatccacctgcatcctctcccactacggatgcgtgcatcgcttatatcctccctagtttcgtcgt

SEQ ID NO: 33195 - DNA, 665 bp, Zea Mays
aaaaattggagaaaactactcctcaacttgggctgtcagaacgactgaaggtggtggccatggtacagtactaaaaaaatcttcagattcatccccctcgccgttggtgacctccgcgcaaggattcacgctaatcgcggtgatttgtgcaggactcggacaggatagtaccagggggtgaaaagatcggaaggggagtggatttggtcgcggggtgaagcttatcaaccgcacttgtagccatgcgacgtggccggaccgccggtgtcgtcatggtactccagcaacctcagctacgccacgccgtagctctttaccacgtagtagtaatcgtggtgcgcctggacttgccatttcaagagacgttgcaccggcaagcgccacgactgaaccgctagtgatcttccttctctctggccgctagctttcatttccaaaattcggagcctcctcttaattcccctataaattgatggcccggtctgctgcgccatgttgtcatgaagccagagcaccgactcccgccttcgattagccaccatagccggagaatttcattcttcccccaaatcagttgtctgcgccaccgtgagatgtcgcgccgtgcccagccacctccaggtccgccctcgctctccctgttcatgttttagcacccacgcgtg

SEQ ID NO: 33196 - DNA, 352 bp, Zea Mays
atatgctttatcttagtagcccatcctttgattcattactggatccactactattacaaataccacttgtcaaaacttttttccctccacgccattctatcgacattatgtttttagggttaattgctatgggagccctaagatgttttcaaaattggagtggtatatttctaattaacccttttcaggtttttatgctgagggagccctaagatgtgggcatctggccgacaggaattttaccgattactgttgtggaccgggcacaaaaacaatgcccatcttacctgtggacatagctaacataaatggagaccgtgttgaccttgatggatcgccatctcaccatcac

SEQ ID NO: 33197 - DNA, 378 bp, Zea Mays
ccgcccgccataaggcacgctagacagagggagcccacaaccacctgtggcaaaacacatgcataaagaaatcgtaagcctgcctctagctgccttggcgtttgtgcatcctggcaagccccacctacaccctctgccctaagatagcctagtcgtgcacgccgagctgctatattaaagtgttgggttgtagaccttgaagtgatacctcagtgcagaaatccactccggcaagacctcgtgcacttgcctgagcacacgtcagtcacttgtcacaatcacaactaaatgaatgcccccaccataagccaagttaccctgccaacctcaggatgttgcgactacactgtggcaacgttgccactcacagtacgccgg

SEQ ID NO: 33198 - DNA, 273 bp, Zea Mays
gccttgggttaccggaatttacttgccggggtgcactggccgtgggctacgacagcgctatcctggcgaggtcacaaggttagggatgagatattcgccgtccatctcgtgatgtgcagctacgattagagtggacgtatcccttcgcgtaggtgagtgagcaccgtggatctttgatccttcggcgcagattacgtcttgcttcattgaaacgcgaccgtcgatctctgatcttgcaggcagcgttgttcagtaccggttcaatcgggtgac

SEQ ID NO: 33199 - DNA, 380 bp, Zea Mays
gtgggaaggagtgatcaatcagattcataaagacaaaagaagggcttcaacagtgctatcatctttagggcatggtgcctttggcttcttaggaaccgggtgatctttcatttggcttcttaggaaccgggtgatcttccatgaggagtccccttccattatgaaggtgctgagatccttctttaatgatctcgcttgctaggttctagctcgggccaagcagttatggagcattaggttggctgaccgtgtttttgctttgtaaccgtcggggtctacgtggctggtctccctgtcctggtgtgtgctttagaagagtgtgtgtgttggtttgggtgtgtgtttgtgttatgtacttttttcctttgtgggtgcttttc

SEQ ID NO: 33200 - DNA, 352 bp, Zea Mays
cattccgaaggttgagccaatgtaataggcgatgcccttgccgtgtgtatgtaattgtaatttgtatggcgatgtggcctgttggctgtattcgtacgcttgtattggtccggctgcgtacgtgggcgactttgtgcagagtgtctttgtaatgagagacttcgattaatgttattccggctgcgcccttaatcagctattgcgctgagtgtcttttgaataaaagactagcgcacttgtgctattccggctgcacccttagacgacttttgctcggagtgtcttgtaaataaaagacttcgattaacgctcttgttgagctattccggctgcacccttaggcgacttttgc

SEQ ID NO: 33201 - DNA, 412 bp, Zea Mays
cggtcagacacgatcttcttaggcactccatgtagacaaactatctgagtcatatacaattctgctaacttggctcccgtgtaattagtcctcactggtatgaaatgagccacttttgccaatctgtccacaattacccaaatagagtcatatcttgccgtagtgcggggtagtccaacaatgaagtcgataccaatttttcccatttccactcgggtatcttcaatgggtgcaatagtccagctggtctttgatgttcggccttaaccctttgacacacatcacacttagccacatgtgcagcaacatcccttttcaatccataccaccagtatttctgtttcaaatcctgatacatcttagtgctaccagggtggatagagtaatcagaatcatgggcttccttcaatat

SEQ ID NO: 33202 - DNA, 287 bp, Zea Mays
gcgaagtattcaaatattgaagccgtgaaggatgctgtaaagaaatgggctgtgtcattaaggagagaattttgagttgtcaaatctggcagtaaggagtacgaggtgaagtgtttgaaggacgatgggtgcccatggagagtacatgcctacaagggtagatggaaaactcactgggtatgttctattgttacggagcatacctgtgtgttggatggcgtttagaaaatacaccaaaatatgacatcggactttgtcgcccaagaagtatatggtttgatcctcga

SEQ ID NO: 33203 - DNA, 344 bp, Zea Mays
cgagggtttatataggttcgggccgctagaatgcatatcactctacttcctgtctagggtgtgtattggaatttcactggtgtacacggattataggtgagttgagggtggtggaggatgagttctcctatcgatctagtagcgtgtggttgctacaagagggctaatgagttatgaggtggtgctgggatgtgacgagatgagatgctttcatatgggtacccctcggccttatatagatgaccagagggttatctctttaaaagttgtgatcactatctaactctacctgaatcctcttttaacgctgcatgcattcatgcttatccggagtttgatcgctt

SEQ ID NO: 33204 - DNA, 477 bp, Zea Mays
cagaggttactgaagtatggcgaatgtacttcgatggctcgctgaagctgcagggagcaggtgcagggatcctcttcattgctcctggaggtgaacaactcaagtatgcactccagctattatttccagcatcaaatattgcagtagaatatgaagcactgatccacgggttgaacatcgccatgtcactgggcgttaagaagttgatggtatacggagattcactagtggtcataagccagataaataaagattgggattgctcgactgattctatgggcaagtactgtgcagccatccgaaaattagaaaacaaatttgaagggttggaattccaccacgtggaaaagagaccacaacacagcagcagacacgttgtcgaagctggggtccagtcgggcccaggtcccacccagaatcttcgtccaagaagtgtcacgcctgagtattctctcaaatcaggcagaagaatgcaac

SEQ ID NO: 33205 - DNA, 926 bp, Zea Mays
gcgggtgcaaaaacaggaaagtgtaggggcttctgcgcaagaaataatagactcaggctacagtcatagtggactgcgggttgatctttataaagtccaggggctcttatgcataaaggctcggtgaaggggtacgctaggatccaagccgtccgatcaaacgctaacgaatcagattagaatcccaaccccacaagtcgttacacgcccgcagccaatgaatcacgatccctgatccatcccgaggcgggacaccaggctctgatctcagccgtagcttcacagatccacgctccggatctaatgcggcgaagggttatcttagcgttgaatcccagccaaccgtcacgcatctaacgaccgagggcttgtcttcttcacccaaacaccagggcggcaaagtaaagaaggtgcggcggcgcatttaagggcgcggtggcaccgtgggcatggttttcgatccggtgggccgaggccctaatccaaacaccgagacctaaaaaatgaagatggggaggagtcgattgcgatagcgctgtcttacctgtgaataatcaatgccctggtagacggtggttcgggcggcggtcaggacatcccgacaagaaattccccactaccagctagaatttgtcaacgtcgttgatcttcacacgtcataccgacacgcgtgaacatcctagggcaatccataccccaggggaatggcgcagaggaggtggtcatcgtcaacgcacggttcagcggcggatgcagtgctccaacgagccattgcaacgacacctagccaccacaccgcatggggatgctatgagagtggtcgatataccccgaccatcatccccgagctcccggtgaacacacaacgacagcaaccacgaggattggccatggcgccgtttgtcacctctgttccgatctcagcg

SEQ ID NO: 33206 - DNA, 483 bp, Zea Mays
aggaggtgttgatctacccgcatgaattcgtcgaagaagggttggagctaatccagtgccagaaatgaatcctccactgaatccctcgcatgttgatgacatgactactactcaaatgcgactactacaacaaatggccaacagaatgacagaaatgaaagcatagatccatcaggaacgataggaaatgagacaagaacgtcaagaaatgcgccaagaacggcaggaacgacatcaactgccacctccaccaccaccagctctgcccagggataagcaccgggagtttatgagtcataaccaccgacattctctaactcctccgacccactacaagctgatgactggctaaaatctatggacaagatgctcaatatagctcagtgcactgaaagggagaaagtgctatatgcatcgggtcgccttactggccccgctgcggattggtgggatgcatattgcgctgctcacgctactgccaac

SEQ ID NO: 33207 - DNA, 387 bp, Zea Mays
atacaaaccttgccaagagttccgggggcttcatacaaaccttgccaagagttccggctccccaattcattgcccggctgaggccctggcccttactgcagatgtgctgtcatgtcagattaaggagtttccctgcacttatcttgggctgccactatgtatccatacaccaacaagaatggggtcatgcctcgtattgataaaattgcagatcatctcccgggttggaaggcccccctaatgaataaggctggacaccttgttatggtacggacggttctgactgccaccccaatccatcatttgattgctcttgaccttccaaaatgggtgttaaaagctattgacaaaaggcgtaagggtttcctttggaaagaacaggagcat

SEQ ID NO: 33208 - DNA, 360 bp, Zea Mays
ctggccgtaggacgcagccctgaccttaaaaacttgccctaaaaagaaaatacctcttaccccaagaaaagttttctcttctcttccccgattttaacaagacccttcttttcctattccagatggaagactctctggccattaggacatcctactgctcagaggtggaagggttcccgcatctcttgtgaagccgtgcgcttcgcatgggaatccgcaaaaagccagaatacgtctggacggagatcgaaggcggaatagagaaatgctctatggcagtctacctgggagaaagccgaaactatccaaaccatccttccttccaagtcactgttaccggataccgtttccccgatactt

SEQ ID NO: 33209 - DNA, 452 bp, Zea Mays
cagcaagcggtctcacctcggtctcgtcacgctctcagaattgaggtggaggaataggtggagtggaagcgggagtgggagcagtggaagcaagagtagtggcggtggtggaaacaacgagagtggtggacgactcgagagcggcaggagttggcgaagtgggaggtggagtggagactgggtcagatggagtggagcgagcagtggaggagcgagtctgagacgtgaggcgacaaactcgataagcgatctgatcaaaggaaatctgtaactggcctccctgctctgcctgatctgctgctgctgttgcaagcgctacatgagcggctctgtccagacacctcttctttctgccctcttgctgctcaagatagacagtcttgcccttgacctatctgaaggggcgaggcgggtccttgtcatctcctccctctgacggtgtgacattcttt

SEQ ID NO: 33210 - DNA, 480 bp, Zea Mays
gacagcggcaacaatggaccactaagcgtgttcccgatgatctaaggcagctcagttcaattgggcgggtcggtgagcatccagagcatgcaagggtattgaaacaataacacagagggcgagatcgaacctgaatttggctggccacggcgagatcaaaattgtgcggtgttcttgagtaaattggggaaatcctaaattgaagctctctggtgatccattgagcacaatacttggtggctgggggcgtgatgatcctacagagctcatggtggcctcaatttataggaggcaagagcgatggccgggaattcgagcgatgacacgcggcggtcggaggagtggaaggttactagcgcagcggattggtgtcctatcaccatggcagtcattccggcgatcaacggagagttacaacgggtcacggcgatgcggtggaggtgccaaggcacgtggcacaagatcgtgaggaggcagtca

SEQ ID NO: 33211 - DNA, 341 bp, Zea Mays
tttactattgttatatattttttctcatgttttaaagctgggctcaagttttcttcattacttctcaagcatgagctagacacattaccacttacgagataatataacagaaaaggctagcatcatattcttggtttgagatgataacaggaagaacttatgggaatatctctgtcataaatggaacatgctgttgcttctttccattgtatttcattttgcagttcacagcatagtgcatataatgatacttatgaatgaacaatgatacaggtttgcttatctttgaatataagcttaattagcataggctggttggatgacacacctttacttatggc

SEQ ID NO: 33212 - DNA, 354 bp, Zea Mays
atccaagattttcttcttgagatccttgtttttaggaactaccaatctgctttcaaaccacaatataccctttccatcttggcagaaatatttatacttctcagtcttctgatggagattctccttaataatctgcactcccttgtcacagagctgggccatgatgatctggtcttgcaaggctggctcaacagaaatgtcagacaaagcaccataaggaatcacttcaaccttcatcttgctcaactcatcacacaaggtgtcaatgcaagaattcatcataacacagttgcattgcaacttctgactcaaggcatctgctaccacattggcttttcccaggtgataatgtac

SEQ ID NO: 33213 - DNA, 688 bp, Zea Mays
tgagcttcgagaggagtcaccattgaaagaggtaaaccttctatattgaatgtttaaaaagttaagtttaaacaatatgaagcggagaatatcaattaaactattttcttcttttagattgatgatcttaaaagcataattgggatgagcaaaagagaggtaggtaactctactataaatatttgttttggaaacaatcaaagtattgtaattcaaaaaatgttgcatcgtcgctggagatggtggtgcatatctgttagtcaagtatgtgttctaggtgatgttagcacgcatggtagaaaagctgagttgctgccttctgctttctgttccgttcagatcgacaagatgatgtcaaagttgatttcggactcggagatgaacgagtaagggttgtattgatctcttcccacttaggaaaggaggagaaggtcatagttctaaatttaaatatcgatgcttgttgttatcagatcgctgtggaatccagatgattttgggtgttgcttgtgagaatattctgatgttttgtttttttaaaaaaaattacaggaatgtcttctctacgtataggttttatacaggaatgtcttgtctacgtaacgtataagttttgtttttaaaaaaagaatataatcgggtggaaggctttcaggtttgctgtattagacaaaaacctatcagttac

SEQ ID NO: 33214 - DNA, 379 bp, Zea Mays
cgaagcacgtgctccaccacggactcggactccgccgctatgctataaaactcgaggccaacctctcctatccaaacagacacgatgacaaacgagattgcctgagcaccggcgcctgagaagatgtgagagaccgagggagagagaataagaacgccctgtgcggatctccctcaaacgcgagacgccgggatggatgacctcggggccgcgccacctgagccatcgctctgcaccggtcgggcttcttcatcaagggatcttgaagctattggcgtcgtgaccggttcgtactaggtgccagcaccggtgagaccctctcctaatgactcgatctctccatcaccatagccgcgcataatggaagtagatgaagctg

SEQ ID NO: 33215 - DNA, 437 bp, Zea Mays
gcgatggacttcgcgctgggccgcgccaccttcacttcctgccttgggtccaccaacctgacaggggcccggtgcttcttccgctgcgcgtcctggcgatctttctccatcactgctggtacaacagcaccaatgttcctttcataatggaaaatctttaggtcacgggctaatcgagacgtaaaaaaatcttcgccagctgcccggggtatcggaacattcctaggccagcgaccccgataaccttcaacattcgcgtcgaggtttctaggacctcgggcgaagacatcgtttccccgggagctgcacacgtctctagcaattccccaacaaaacgaccagaagccctcagccccaaatcctcagccgttgtacctaattttctctttctagcgaccgcacccggagccttatcccatgaggggccttcatcgacc

SEQ ID NO: 33216 - DNA, 342 bp, Zea Mays
taagtccacgacggtggacggcgacgacacacctccggtaaactcgtactggccggagaacgcaacgactagacttctcctttgcttgtcacttaattcaaccctccccaacactaatccctcagctaatttcactgatccagaccagagcacatctgctcacgacgacgacggaaaccgaggataatccaaggtgttctaggcaatttatggcggtctagttcaatcgaataggtcggtgagcttcaggggacatgaggaaagctagaacaccaattaagaaagcttgaactgacctgcagaagggtggccacggcgaggtgttcacgcggcggtattttg

SEQ ID NO: 33217 - DNA, 282 bp, Zea Mays
attagccccgtgcacatcacaaccgatagatatgagatcaatgtcacatattcaaccaacgaaggggtaagcgcctagtctaattgcagccgtacgattttgatccaacgactttgatcactctgaccgaaccgtcaagctgatctaatcccaaccgtttctccgtgaatcaacggcccatgattgtcatccttctactgacatgagctccgcggcggagccggggtatctacgacggcccatcgctggagttgggcgcccctcccaactctgaacacccca

SEQ ID NO: 33218 - DNA, 425 bp, Zea Mays
agcagcttaaaattcagttttcaaatgcgaaacttatccaaacagactctgattgagctgaaattccttgacaaatgagtttccaaggtctccacaaaatttgaaattaaacggatttgttaatcaatcgcatatcagaaaacacatttgtcggtaccctaaatcaggggtaccctctcctacagcatgaagacaccgcacccatgcgacgtctcctagccacgcagaggaccgcgcctgaccccaccggatgggcaggccaaagggcgccacgcggcaagaaaaggcaccacacctcagtaagtctagacccccacagaaggacaccaggcccctatatacatacaagtccggagcccccgggtaggtccgaactccagcagggtcccggaacgagaaggaccctggtgtgtgcaggggtccgg

SEQ ID NO: 33219 - DNA, 431 bp, Zea Mays
tgcagtgtcggtggaccacaactcaggaccttgtcttgtcggtggaccacaacctgtttttatttcagcagcgggcccccgagcgtgacggtggtggtgactggtgagaggttactgaaaattattccgccattctccatgattaatctccaacatggttgcttatagcttgcttgtggcttgtgcgtgctagggccagtttagaacacctaaagatagtcagctaataaattattagttaggttaagccagctaataaactaattatgagttgtgaggtcgttaacaattagttacagtattagttggggtgtttgatagccagctaacaaggcgtgttctctctaatcatacatacctcgatgcagtagtatagagaaaaataaatacattttttagtctttgaacaacttacgtcttatattgagtgt

SEQ ID NO: 33220 - DNA, 410 bp, Zea Mays
catcggtatgatgccctccatagtgtttgggtagagattggtgctttcatcttttcatcatgtagaactgggttgggtagagattggtgctcggtggcatgagaatggctcactccggcgatagcgctgccacgggtgtcttcacaccgccgtttggtatttatcacggggaagaatggatgagggtcatggatcgacggatgaacgggccggatcaaaccagggaataccggttcagtccatggttccaccaccgttgatgcgcgaatcagtggatggggatttgaatccggcttgattgaattggggccgaggatctaggatccaacagtccatagtgcgtaccgtttcgtgttaggaagaacctaatctaggccatagacttttgatcgtgcggatcacgatcgccg

SEQ ID NO: 33221 - DNA, 415 bp, Zea Mays
ctgatgcaacttggcattggtgctggcgtgctgtagatcagttttccgtatattttgtacactgccccctttgttgttcttaaacgtctcctatagcaaagtttgatggctttagtctttgtttagatggctaatttttctttatgttggaaagctaaaattcgaccagtacatacattcgagtggcatcgacccaaacaccttattagctgtgcctgcttattagtaccactgtatcagctagtagcccgtgcgttgacattagtcggatcaaacttgttagcaaagtaggaaacaactagcagcaatactagtagataaatggctactttggttgttgatgtccttgatgactttagaggattaatcagttgtccatggtagtttctttgtgattttattgacatgataagca

SEQ ID NO: 33222 - DNA, 272 bp, Zea Mays
aacttattactacggcaatccagtaatcctttcaaccgtaagaaatttcatccgaaaagaaacgatgaatccccagttcacaaatttccgcggatctggtctgccttttagggttacacaattgtaaggtagtcacccgctgaatgtccttcatacttggtcgaactaaatttggttgtgcttagtattagggccagaggttcttcaccttccattattttgtaatccctacactacggactagcttccatactgccttcaagtgtagtctt

SEQ ID NO: 33223 - DNA, 559 bp, Zea Mays
ccagaacctgattcacctgcatttgaaggagcaaagttgagaagagattgatcaagcttcttctccaaatgcttcgagtatgcctcacaacgcttcatatgtctcgacaatgtggatgttgtagacccttgtatgcaagcatacattttcttacaatacttgcactttgcttttaataccttttttccctcctcggatgcacctccaactgtcactttatcaaacacttcccaaactatggatttagagttgcagttgctgcccactttcttcctcttacgccttttcttgccttttcttttaccatcatcatcatctgatccatcaccaacatctcttccacctagaacggtgatctcatcctcagacatgtcatcgttcttatcaaatgaattgctttctgaatctatctcatcatcatgagtttgactcatctccttccctttcacagtagattccataacctagaaattaaaatgatcagataacaacaaatgagtacataataacaactataaagaacttaataaatagataaatgaagcaaacaacttggttg

SEQ ID NO: 33224 - DNA, 300 bp, Zea Mays
ccgattttgtaaaatttcactcgcggatgagaatacgggtatataattctaccgaccggctagccgcggacgcaacaactcacttgttgataggggtagtgctgctcgctgcccaacggtagtgttcaaactacacgacagacgacagtgccgctgaaactccgaggtagtgccactccatgaaaggcgaagtatcctgtgcacataaaggtttggtgcacatagcgcacatataatatcttagtctctaatcttcgatcaaacggttgcctcttccacctcggcattttatcagaaaac

SEQ ID NO: 33225 - DNA, 549 bp, Zea Mays
cggagagcatcgtagacctatgagagtacttaaacggggaagaagatggtatgagcggacctgaatggtgctggccacgacgagattgagttcacggtgttctagaaccgaattggggagaattcaaaatttgtgctcgctagtgggggatttgggatgcaggtgggtgcggtagctgctgggatacatggcgaagccgaagggaggctcaatttatagatcaattgagcagtggccgggaatttggggttgaatgcggtggcggtcagagaagaagcgagtcaccggcggggtgattcgtggcagttcacgggatgagaagccacgacagtcactgggtaatgatcatagttcacggtgatgtggtcactgatcggaagcatggcacaatcgcggcggaggacgcaaactccggcgacggccgcacagccatgttgccgatgcacgtggtcgggataccgcgaggccacggcagcccgaacatatccacgacgcgatctttccatggctgggcgtaatccactcacccgcagcacgaatcacggcgat

SEQ ID NO: 33226 - DNA, 360 bp, Zea Mays
aaaaacttgagtcagctttcacttattctttctccagtttcacataaacttgagtcaatactttattaccaccattgttatgtttttgggggaaaacgagagagataagcaatgtctaaatatacttgcttacaaagtgtgcagatgtttagtacaaacattaaaattacaatactattttccccagtagatgatacaggctgcttcgtcactagatgacatggtgacgatcctccgtgtccctgtccttagtgaaggaatagaagaagtgagggatgtaaggactaatgggctggtgagtctgggggcattagcaattgaaatgaggccaggagggcatgaggtcggaatggcctcata

SEQ ID NO: 33227 - DNA, 429 bp, Zea Mays
aagcctttgaagaaattttgagtggtcgcggggatgtctgcgccttctcaggtgccaggggaatcgtggctattttggagaaactaggctgtgaccacgtgaaagctttggccgaaaccgaagctaccttatctattgaagatacaaaagacccctcagccgaagcaagcttagttggcgggaaattcttcactgacatctgggaaaatggcagccgagagatggcgcatgatataataaaaaagagtgtaaagattctcatgatgcaaaagaagcgacgaaggcagctgagaaagctgcggaacttgaaaggcggataggtattgcttaattgcttttgactttgtgttttgtttctgtgacttcaaacttatttttgttttgtatcgcagctgagctatctcctcccccggagccctttgagccaac

SEQ ID NO: 33228 - DNA, 337 bp, Zea Mays
gtggaatcggccacgggacgactagggataggagccctagccgcagtcattgacgcaactagaacatctgcaataatatcgtcgggaaccacaatgtcgggtctcttcatcagaagatggccagcgtggaccgccttatccatcgctttttcataccccaccttcataatttcacgatcgttttctaagaccttgatatttcgtcgggcagtctccaactcctgcgacacaaacttttttgaggcacgaagatatttgatggtagaatccttggaagacagcgacctgctgagcactgacacctcctcctaggactccttcagctcattcctcttgc

SEQ ID NO: 33229 - DNA, 863 bp, Zea Mays
ccgcaacaaacctcctctggcgcggacttgctctggcccataaaacgtggccccgaatcttcctcggtcgtctcttcccatgccatatcatgccgaaactgtggacgctatcactgagcaccgctgagagagagaaaaatagctcattgccgctggtgtgtcctcacctgtgttgtcgtcgtggacgcttggaccggtgtggtaggactgccttggtgcacaacgcgtgtgtgcgccggttgcgtgctcgggtggagtctcatcatcggccaattcctcgccggagatgggggaaatcgttgttgtccgcctctcgccgtggtcagcctatcttctacacctatcgccggtaaggagtcatcaattacgttcgccatgccttacggtgtgtttatcgccgttcggtgtgacagattagtgcgtcttggtgcgggttggccgtggatcagtgaatcgccgccatggggcgcgggcggtgccgccgtctggggttgctggagaagaaagccctcgggaccgtcgatcgtggatgaacagctacgatcagagcgtagtgtaccggttcgtcattgcacatgggtcgtccaatcagtaataaaggcttaggattagatctcgttccataaaaccttggccattgatcacgatcgcgtaccgattcacttaaagagaagatctaatctgtgccaacgatttcggagacaacggctgatcttcgtcaataccctttcggtcatgtaacaattgcataagagagcccagattcctacataatcaacctgccatcctggttaggtcgaagagaagttaaactaagcccctgtattttgcagtctagcccttgcgcttctcatgatttcaag

SEQ ID NO: 33230 - DNA, 377 bp, Zea Mays
gggatgtcagcaacaaagaaaactacatgggaggcgtaggcaaggatggaggacacaaggtgctgcaaggaaatgttctggccgtcgtgtgtccaagcccagtgcgcagtacccgtcggacatatagtccgtgtaaggagagggcgagggagatatttagactaaggtcatgtctgtgaacatcaccaaataagaatacagaaaccctcctcctatcttcacccttcccgagctatactttcctctcctccgtagccgtcataattggtcgttaacagtcgcgtccgtgtgctcgtgccgtcatgcggctctccccactcccctggcctcctctccagctgtccagaaggcagcaagcaggctaggatgattgccac

SEQ ID NO: 33231 - DNA, 468 bp, Zea Mays
gtcgtgagtttgataactcccacgcacgagctttctttctatcccacgatgttcacctttgtatgtcgtgtccctatacctcccagcagaatggtcgagcagaacgtgtcctccgcactgtcaacaacatcattcgttccttactctttcaagctcacctccctacttcttattgggttgaggctcttcacaccgccacataccttctcaatctccaccccactagcaccctcaattactccactccccaccttgcactctttggccgcccccatcttacgaccatctcaatgtctttggctttaagtgctatcccaacatctctgccactgccgcccataaactcgctccccgctccaccatgtgtgtcttccttggttactcgtccgaacacaaaggctaccgttgtcttgatctctccactaatcgtatcatcatctcccgccatgttgtgttcgacgaatcctc

SEQ ID NO: 33232 - DNA, 626 bp, Zea Mays
cctgtccgcataagttatcaaagtattttgtaatactctagtgtcatgtacggatcctggccatcctgtgacaacaaatgtgaacctcatatcgaagtcacaaacggccattacattctgcgatgcgtaaccgtgccgtccaatatatttggcttgctccgaggccgagactaccgctggaaagtgactaccatcaattgctcctatgcaatccttgaagtgtggccaaaatctcgcctctcgcaaacgaggatgaatatcgatgaaatatgggtctttgggcttaattatgtcagatgacatcttgaacagtgcatcaaggacttcagtatacttgcgactaattgtttccaaggagtgaccaaacttattccttatctgcctaaatgattgtggacccccacatgcccacaagaaaatgccaagtgcttccatagtactaacaccccggcttggaagtagaccataattgtccaccaatgtgtcatgcaatcgtctaaaaatagttcgtcgcatgcgaaacatatcgaagcagtcgttactattctccaacgttctctccacccattgaataccagtttcaaccaatgttcttctaggaacctgactgaaagtcctgccccaaa

SEQ ID NO: 33233 - DNA, 449 bp, Zea Mays
gttaactttcgatagaagttgggaatccagtttgccctatgcggagttctcgtataataacagccatcaggccagcatcaagatgtcaccgtttgaagcattgtacggacaaaaatgccagacccctctcatgtggtccaacgtaggggaaaaggcactagaaggacctgtctttgtcaaagaggctgaggagaaagttaccctgatccgtaggagattacttgaagctcagagtcggcagaagagttatgcggacaacaggcggagagaactcagatttgaggaaggagacttcgtctaccttaaggtctccccgatgcgtggtgtcagaaggttccaagtgaaaggaaagctagcaccgcgattcgtcggtccctatcccatcatcggcagagtaggaaccgcagcatatcgtcttgaactaccagagtccatgtctgacatccaca

SEQ ID NO: 33234 - DNA, 472 bp, Zea Mays
gagatccacaccggacagtgcgggatacacgcaacatccaggactctggttgggaaggtcttcaggtctggtttctactggccgacagcaaagagtgatgcagcagagttagtccagaggtgtgaagcttgccaattcttatcaaagcagcagcatttaccagcacagcaactgcagaccatacccgtaacatggccatttgcgtgctggggactggacatgattggacccgtcaagaaagctcagggaggatacactcacgtgctggtcgccatcgacaaattcaccacatagatagaatacaaacccattgcttctctaacctcagccaaggcagtgtaattcatacaagatataatattcaggtttggaataccgaatagcatcataaccgacctgggatccaatttcactagctctgaattctttgattttgcgaacaacgaagcatccagatcaaatatgtgttagt

SEQ ID NO: 33235 - DNA, 333 bp, Zea Mays
aaagaagagacggggtcgccagaccgaggatactcgctcatagtgctcgcgaaagcgagttgttgcctggatggagaggtcgatggagccatggtactggcgctgtcgcgttgaccatgcaccattactctactagtagtctgatgggccatggatctttggctgatgcccctcgtgtcaaatcttggcaccctgccaattgaaccagcactttatgtgggcctcatgttggccagaaatagtaccatccgcgtttcggattccgattggttcggtcgcctggtcgatcgctcacagtcatagcctgcaggtcggtcgcttcgtcgcctcctc

SEQ ID NO: 33236 - DNA, 338 bp, Zea Mays
ccggagtttacacaccgtgtcgtcctcggagcggaggagaagtggaggtgggggctgcaacgcgatctccagacccacctgaagtcgttgctagaggcgctgcggaagcttcaggactacaatctcaccgcagctggagttgtcgtggccttccattggtggcgagtgctgctgctagccgaccgtcgactccgactcgatgtgatgaccctcgagggattcgtggaaagttcttggatggcctcggacgccctctccactgacaaacttctccagcaggtgaagggaacagtggggaaggcagattattctgccgtagtgctgatgcgccccgagca

SEQ ID NO: 33237 - DNA, 780 bp, Zea Mays
ccgaggccgagcctggcaaagaaacaaccggtggacccagaatttttcaccggagttgaagcttcacggtggtgccgctcgtcaccgtagataagaccgcccctgcatcaatcaccggtaatcgccacagtacctaactcgtaatcctctgtacttcatcagtagccttggtcgggctgggtgagtgcctgtagcgtcgttgggagctcgccagagatttctgtcgtggctggtaatgtgccgtcgtcggctggcctggggaagaagatgagagacagtcccgttagatgcgctatggacggtatggattcgaagtcaccataccgtttcactttgacttgtcgcggtcgtcggttttcagatatgcggcccagattagagtggtcgtactggtttagctgggattgatccgagccctcgatctattatcggacgggtgcagttagatcacgcgttaatacaaccccgtccatggatcttggatccgacggacccgatggcgtaccgtttcatatggtggctggttgtatccgtgtcattggcctttgatccaacggatctcatttgatcataccccttcatccagacacattagcataggggtccttataattccttgaaaccaacccgccgtcctgcgtagtaaggctctgagtcttgaggattttcacgcgggggcccctggactctctgctatttgtgcgcccggttcaggaattagaaaacctagaaaaattaaatggaagatgatttttaatgtaaaaataattactagaactt

SEQ ID NO: 33238 - DNA, 451 bp, Zea Mays
cagaggcaaaaggcaagaactttgtcatgaggtgcaaatatatatatttatttatttatttcataattattattaatattattttcttttaccaattttgggctttacactaagcctccggcggtaactcgggcagatgagtgaagagggttccagagatgtaggaagacgattcgctacaaactgggacatatgcgaatggattacatttatcacttgtgcggggatagccatcctcgatcgtgtatataaggtcgggaggcacctgtaccattttcatctcacctcagcccaccgtacccatagttcatagcttgtaatctcatcccaataccaagatcgtcacaggacgtagagtgttacgccattctcgcggtctaaacctgtattagcctacatgtctccctgtcgtgtcaccacacaaaccatcgagtcgcgatcaacaacgcca

SEQ ID NO: 33239 - DNA, 481 bp, Zea Mays
aacctgtagatggttggccacggtgagaagctcacggcggcgcagaaaacggaattgggggaaaagcgaaattggggcacggtggtgcacgatagtagctagctggtgatgggttggacgcgtaacaaagaggcggagcagagggtatcctcaatttatagatcctgattgaactaggcacgaattttggattgggatcacagttaccacgaccaagatatttcacagtggcttgctcgccgtggcgcgcgagaggggactggtccgcggatgataatcggctgcttgccacgacccttacgatgcggaggagtggtcattacgtgtcatggccggaaaaatggtgagctcaggtgatgccagcgtgactgaccgcggtgggacacgacgaccggtctggccagcgactggattcacccctcctcggatactttcaccctgccccgacattatcttcctctcccgcagcatgaatctccca

SEQ ID NO: 33240 - DNA, 337 bp, Zea Mays
ctgggcctcaattaaacaggaacacaggggctaactcgcaagatctcttagactcagtgaatagttactctctggatggcgggtttagttcctgaaaacagggggtcttatgtgcaaatttgacccacgaaggggtatcgttgcttcacagccatcagatcttaacttgacggcacagattaaaagggatgaagggttactctaagttctaatccgcaccgcacataagcgatctaacggtcacgataaacatttccccacccccaatcttagccgcacaaacgatatcctacggttcggcaacacaccagaaacagctgaccactgaccattagat

SEQ ID NO: 33241 - DNA, 490 bp, Zea Mays
ccattccacccagatatcaagaactttacgaaaggtgtcgtagtgacaaatcgcccacctgcaatgatgactggtgccgaagttcatcaacagatagatggtctcgtggccaatccagaaggttgttttgtgggatatggtgagaaacatatgtggacacataagtcgggtcgaagtactacagtggatcaagatgttgatgttccctgatgggtataaaactaacctgagtaggggtgaacttatctactctacgagtcttagggatgaagagtcatgacttccacatatggattgaacggattcttccggcgatggttcaaggttatgtccctgagcttatctggctagcgcttgcagagttgagctatttcttccttcagctttgtgcaaaagagttatcttggaccgtgattgtagacttggaaagattggcacctgtgttactgtgtaagcttgagaagatatttccacccgacttcttcaatcc

SEQ ID NO: 33242 - DNA, 483 bp, Zea Mays
agaacaggggctccctgagctcgccggcgcgatgcgtagaggcatccctggtgctccaattcatggacgaacaggtgttatacaaaatatgaataagtgcaaatgaatgaaggtaaaaattaccggtgaatacatagcactgcaccccagccacggtggcacggtggcagcgatatgccgatgagaaattccccacgcgcagaacaccaatcagccgaggcgagctcccaatcgtacccagcatggcccggcgatgctcccacgcagtggatttggttccttggtgggggctggtgggcaatcgacgatcaaccgcggcggacagtagcgctccatttttttctctccctccccggatccatggcaacaccatggctacgaccctgtttggaggtcgaggaccaccgcacggtagcagcgaagcaacggaacctagttttatagtctggactccgaatcctacccaacgcgagaagatctcaa

SEQ ID NO: 33243 - DNA, 291 bp, Zea Mays
ggccaattgtcaaggatgggtttgttgtgttgaaacaagatgaaccatcggctagtgacaatgaaaacattcttacaaatgatcaagccatgaatgtattctatgatgctcttgatataaatgagttcaaccgtatcaagaatctcacaacgactcatgagatttggattaagctaatggaaattcatgaaggaactacaattgtgaagagtgcaaagctatatgtgtgcaaaggaaaatttgagcaattcattatgaaagaagaagaaagtgggtccgatatgttcaacc

SEQ ID NO: 33244 - DNA, 493 bp, Zea Mays
gtacgtatctgtcaaatgtcaatccttgaaagactggggcaccgagaagagggtagtgtcaggcgtcgtgatgatgagaagtagggtgagggtgtcgcgagggtttggggtctcgctaagttcttgctggccgaaatgatgccgtacgtatctgtcgaatgtctatccttgaacgactggggcaccgagaagagggcagtgtcgggcgtcatgatgatgagaagtagggtgagggtgtcgcgagggtttggggtctcgctaagttcttgctggccgaaatgatgccgtacgtatctgtcgaatgtctatccttgaatgactggggcaccgagaagagggcagtgtcgggcgtcatgatgatgagaagtagggtgagggtgtcgcgagggtttggggtcccgctaagttcttgctggtcgaaatgatgtcgtacgtatctgtcgaatgtctatccttgaacgactggggcacggagaagagggccgtgtcaggc

SEQ ID NO: 33245 - DNA, 411 bp, Zea Mays
agaaattggcatggatttcattgttggattaccccgcacccctgctaggtatgactctatttgggtgattgtggacagattgacaaaagtggctcatttcatacctgtgaggactaattacacgggagccaagctagcagaattgtatatgactcggatagtttgtctacatggggtgcctaagaagatcgtgtcagaccgaggattgcaatttacttctcggttttggaagaagttgcatgagagcttggatacacagttgaattttagttcagcctaccatcctcaaactgatgggtagaccgagaggacaaatcaagtgctggaggatacgttaagagcttgtgctcttaaacatggtggcagttgggataagagcctaccatatgtggagttctcatacaataatag

SEQ ID NO: 33246 - DNA, 314 bp, Zea Mays
gtatgtaccttcagcactacagttggctcttccacgctctgcataatctgactagcttgtcatgcttcggcagttgaagaggccccttcgccaagttcaggcactacgtccggttcaatataccgcggccggtgggtcagaaccttcacctttttgctcttcggcacagctacaatggctgaagcggcagtctttctcttttccccttgcccttgtagcgggtaatgataatcagggtatatgaagccaatcacatcaaataccctgttcaatctttttttgccccgacccccgaaagctgcggacaaagcatt

SEQ ID NO: 33247 - DNA, 412 bp, Zea Mays
cgaattctgaagaagatcacttcctctctgttaggttactcgagtattggatggagtcaaggttgagatacatgactatgggtctaggggccttatttgctgctgggaaaatagcagatttggactgttttggtgggcagtgaggccttatctgttggatctgtggtggaattaactagacagcaaaaatccagtggtttcacgccttcaccccagtagcaaatatcaagttttggaccatagtgcatacccaagtgggagacttatctactccctttcctatctgtttaccgaacgaagggatggatattttgtctgtgtgagatagactaaatgcggtgtatttgagctgtggttatgagcctatgtggtgtgggtgcatgggagccacgtacaataggtcatgcagtgc

SEQ ID NO: 33248 - DNA, 863 bp, Zea Mays
ttcaggatgacgcttcttctgggccctccgtcatccgggaaaaccacacttatgcgagctctaaccgggaagcctgctaagaatctcaaggttgcatgtttattcatgtggcataatatagcttcttatgattatgcacgcaggccatatgcctcatcacttgtttgctgctacaggtgtctgggaaaatcacgtactgtggccatgagttttccgagttctatcctgagaggactagtgcatatgtcagtcagtatgatctacacaacggggagatgactgtaagagagacaatggacttctccagaagatgtctaggcattggtgccagatatgatatgttgtcagaattagctagacgggaacgaaatgctggcattaagcctgaccccgagattgatgctttcatgaaggcaactgcagttgaaggaaaggagaccaatgtcataacagatcttatactcaaggtgtgtccccgtatcttcttaagttcactttcacgagcagattcttttaacctagcctaaaattcactctcatgagagtcgaactcaggacctgaggggtgctaaccaactcagttagaggtctttcgcttctaactactctttttatgaagtgctttcataacaactatttcataactactcttttatgaagaaattgttatgaaagcacgtttccttaatatatacaactttcttataacaggaactaggcttatcactgtgacagttacacataaatttaatcttgatatcacccatggtttgttccatgatgattgagtttataaatgaccacaggttcttgggcttgacatttgtgctgatattattgttggtgatgagatgaaaagaggc

SEQ ID NO: 33249 - DNA, 600 bp, Zea Mays
cctgcatggggcagaggtcagttgaggtgtccatgctttggagttcgtcggagtagtccttcctagggtcccgtgcaaagagtctacgttcacggtcggagccaacgtagaagattccttcttgggtggatccagtgtgggaaacctccccggtgttgaagatgatatgggtgttgaagacgattgccatggaatcatcgtgaatcaacgtcgcacctcgtacctgtcatgctagctatcagtgtttatgacccgactacgcactacagggtagcccagatggtgcttttgtgttggacggtgtcattgatcgcgactagattgtacgtgcggaagcacgtcggaacacaagagagttatacaagtttgggccaccggaatgcgtaataccctacgtcctgttggtgttgagtattgagtttgctgatggtgttcgagttacaaatgagtagtgtgtggcgatggaagaattatccctatcaatctaatggtggcacagttgctacgagagggatgatgagatcgttctgtaggggtaccccctcagccttatataggtgaccggagggatattcctttacaagccatgaagtctatcta

SEQ ID NO: 33250 - DNA, 484 bp, Zea Mays
atcgtagtagccttgctccaaaaacagtggaaggattgatgtgcatgcaagcgtggtcacgtgctgacatgctaggtgataaatcttgctttattaatgcattaatggctcgtttggaagatgaggaggatgaaatggtaagaacaaacacttactctttagcatcttttattgttacatttgtttgttaaatattaacatggatttatctattttcactctttttactgttaggatgatcctaatagtatgataactgactgaaaattggaaagcaagcaacaagtcagcaatctacattcaggtcagttttccctagttttttgttcatttaatcatttttgaccttcaagcaggttattaaattatgcaacatattttctttgttgcaggtcacctagagctggagtgtattgtggactattgttgctgctgtgcttgaagtatgggtgtatctgtatatgatgcctgaagcagaaacttt

SEQ ID NO: 33251 - DNA, 384 bp, Zea Mays
cgggaccctggtgacggtgggtccgattcctttggtggctgccttcagttctctctcggcgagggtacaagcggtagatggtgatggctgtatgcctcgagtatttatgcacgagagggggagatcggctggtacctggctagcatccggtgcggcgtgcagcgatttggtcgcaaggttgttatgaggatagagatgctacagcagggccccacatgtcatgcagaccagggcacgagccggtgcccgcgagcgtccttccgcccgacatgcatggccctgtacgtgtcgatcgcaaacggatgcatgcaagagaattcaacgaccaatttgctagcgaactggagatgcaacgagatgacctcatacctgatgtcatgctaa

SEQ ID NO: 33252 - DNA, 922 bp, Zea Mays
tctgaatttccagtcagagatgggcaagctgcaatgtcggtggctgggcgtttctccatctcctccttggcttttgccctttgctgcgactttctaactgaaaacgctgcttcggatgtctgcgtgtctatttatctgctctacactgcataaatgtgacgggcatttccgtgccccgtacttgcattgcatcatcatcattgcaccagttctgcggtacggtacagtatactgatgactgtaaaacttgttggtggggggcagcgtacataattgcaatccttgccatgaactcgtcttctttacttcgatctaggcaccactctgtccccttctccggccgccactgattctcctgcaaaccaaggacaggcttctagtcctcctcaatctgcatttgctcttggtccagtagctgttccaactggtagtagctctgaacttcctatgcgtttgtgacattatgctgtcagaccataatcagcactggagtgtaacgccttactgcattgcttcgtttcagcgccgaccactccatcggcgagtccttccccggagaaagccgcggctgtaagtcctgctgctcccacggagccacgaattgccccggctccagtggctcctcctaaaggtaactcatcttcctccgattctgctgttgtccctggagtcagatatgatcttccagtcctaatggctgcactgcaaactttatgttattgtagagtatagtgcacctcctccagttgaggttgcacccactgatcccaccgatgaggttcctccaccagtagctccaccacaagctgcagttggaaatcccactccaattcttcctgggacacctgcattgctaccttatgttcaggctcctgctccatctgtcgttctcaagcctaatccaccagtcgtggtgtcacct

SEQ ID NO: 33253 - DNA, 386 bp, Zea Mays
cgccatctcaaattcacgggccaccgccctcgggtcctataaattgagcgtgccatcagctccgctaggtagtcaagcatccaatacaccaacccgtgcctcagatcgtccaccagagctccccaatttaagatttcccccaaatcggtcaagaacactgcgtgtgtgagctcgccgtggccagctctccacaggtctgatcatgccctcctcgctcttgttttagcatccctatgtgcttgtgatgcttctcgacccggtcaattgagctagaacccataggatcaccgggaacacttcgagttgtccgttgatcgcgctgtcaccgtgggcagagagattaggggctagaaccttgaaattggttgaggggaaatggttattag

SEQ ID NO: 33254 - DNA, 367 bp, Zea Mays
atcatttcccatacctttacgagcggagtggatgcttatagttgatttagacgtaacaggatgtcctccattattctccatgttgcgatgactattgtgatgatgggggctgagtacagagcggtaagcctcgcacgttcgtcccttgaattgtgtgtggttcgcccgcccatgttcgatttggccaacctctttagcctcggtgcaattcactcgaccctcttccgtctcgtctgacccctaggtgcaggggcgacgacagggaggcaatgtcccccctaatgctcccctaattctataagagatgttagtttttaagctaattctcatgtaaatgcttctaacagctcccctaatctaatttggc

SEQ ID NO: 33255 - DNA, 359 bp, Zea Mays
ctcgtggtacatatttcacatatgctccattaaattattttgaagctgatcatgcaccgagtttgaatggattgtggtctcacgctaaaggatgattgtaaagcctctcggtgcttcgaggtgacagttggtgctgcaatgggggactcgactacctcatagtcgttaatgtcgtatgatccttcacactcatcctcaataatcatattgtgcagaatggtacatgcatgtatgatcacactgagtacatggcggtaaatggaacgacctggggtagctacaatatgcaatcaagccttgaacaccacaaatgctctcttctcacatcctttcatgcatcctcctggcatgcagcaaac

SEQ ID NO: 33256 - DNA, 483 bp, Zea Mays
gcggatatttattcttgattgtcacttgattcaaagcccgataatccacacataacctcttgcttttatccttcttctcaacaaacagtactggggaagcccaaggcgacctgctaggcctaatgaaacccttagccagcagatcatccaattgccgcttcaattccacctgctcctttggagccatccgatatggggccttactaataggctgtgtacccggaatcagtttgatttcgaaagctgcatcgtgatccggtggaaggcctggaagctctgctagaaatacgtcggcaaagtcacacaccaccccgatgtcctgcacccacaaggcaacctcaccctccaccaccatggagaaaaagattcctgacttccttgaccggtgatccggaagcaattgcgccaacaaggataacatgaactttggggaacttcccaagaataccacctccctacccgacggcgcctgcaataacactg

SEQ ID NO: 33257 - DNA, 402 bp, Zea Mays
aggcacagccagacccaatcgccaacgttgaaacgaaggtcgcggtggttcttgtcgtagaagcgtttatatacagcctgagcctgttccaggcgactgcgggcatctgccagaaattcatcgcgctcggtcatgctcttgacgacagcagcaactcgtgtctcgccctgttcataagaccgaatggttggagggtctcgaccatagatgatcctgaacggtgtggtcttgagggcggtttgataagcggtgttatagataaactccgcccaaggtaaccaacgaagccattgacgcggtctgtcacctgtgaagcatcttaggtacattatgatgaccttgttggcggcttccgtctgtccatcagactgtgggtgaaatgctgaagacatatgcagcttg

SEQ ID NO: 33258 - DNA, 348 bp, Zea Mays
caaatatgtggactcatcaaagtttcatatgtcaaactgaatttgacatagcaccagcttcaaatcagtcttgctaatcacataagtaaccatttaattatgccatatggacaacaaactggaactgagcaaacaaaatatgcccccaaatctagggttcgtatgatcgcgggcggcagaccaatcccccacggatgcatcatccagattgatgttaaataccctcaatctaccaccggagcagatccatgtacacttatgtcaaaggttgatgaagtgtgttaagaaaaccttaaccgatagagcagatccatgtacactagtgctgctcatactattcgaacccgg

SEQ ID NO: 33259 - DNA, 313 bp, Zea Mays
accatctcgtcaagggagctataccacggcgagtaagcagccgctgaagtgcaataccattgtgcaagggtccgacgcgtgtgtgtgcctctgttatgtggggtcggctatgccttgctgctgcgaagggcttatgtattgtggagtgttgcttgtgaagggcatcaaacaaacaggtaatacaatttcagtcgattcctctgtgtgctatcttcttccttccccatcctctctgcttctcccatccttactccttcctctccaaagttccacttccagatagtgtagcctgctaacaccaagcttttcgtag

SEQ ID NO: 33260 - DNA, 559 bp, Zea Mays
gcgggcgaaacattagctagatctaatctagtgcgttcatcggaagatcaacgatggataacgggtctagtcgaaccattaccacgacctaatctcggccaccagtcctatatctgatggctagcacattttctcccaacacgatccaccgtgtggcggcgctgggcattccacggaggaggccattgctgccgacggtggccctctgccgcagctccccagacttctattggacagagctacacataaaggagattatggcgaacgcgtgcaacgtagactcaccgacatggactcgacgctgatccctggccccggtgcaggcgacccgatggtggcgcccaagcaacaacgacagatttccccctcccttgctcgctacgcttcgatttgaattctgcaacacagaaaggggatataggtgaacacaatggcatgattcttacccgcgattatggcgtggaggcacatggccacaagccacggtggccccgcggtcttctacgcactgcgaagagctctggtccggtgaggtgctgaccacccaggtgtccgcgag

SEQ ID NO: 33261 - DNA, 426 bp, Zea Mays
ctcgaatccacgaatgaacgggcgctacgtgatgtacgggtgatatagaatgtcatggatgtggtcttacccgatcccatgacacagagagctccacccatggcgcacgacgacttcttggtgactgggttactccgatgagcgattaccggcttcccgcccatcaatcttgcctgatatcatttcagacttcttccacgcagcacagagaagcatctcgtcgcactcccgatgcttccacgcgggtgtagccgagccccacccgcggcggcttcacgacatggtggatgctccagcgagcaattccattccaccaaggggcttcacgtgtgattacaactttcgacgaccttcacgggccctagagaagccccacgatgacttgccccaggtgaaccggctgctccctttttctttcgtcccagc

SEQ ID NO: 33262 - DNA, 740 bp, Zea Mays
tggggacgggcatggcagaactagagaggggggtcgggcaaaccgaagggaaaaccactcgagtggacccctcgcccggcccgagaccaacccgtcataagtgactggccacattaactatgcctggcaccgagccatgacagaggtgttggtccacccctctccaatcatggcctacgagtccctcgggctgcagggcactcataaactacgaacccctcggactgtggtgcatttatggctcgcgccccagcccgcggtgcacttatgacctatcggactaagcatgagtgtgcagatcgcttacagagcacacaagacaagccacgtcgagccacaagctacggaggccaggggttggcttagctcgaatgatagcactcggtccccacgctgctcgcgccatccgctataaagaatatgagacaaccagaccaccccggagcccacaggcgcacatggctagcttcaccccatggtggaacgcttggttttaccatcgcccggttactccttgaggacaccaccgctggcggcccccctccttggcctataaaaggatgaggtcgatccccagatgaatgagaggacagtgagacaagagagacccaggcagacattcagacgcgaagacgatgggccgacgagaggaaggaggacgcactgacgaggacccacaaaccggagccccgcctcactctgtagcccttagtgtcaccacctccacaacaagagacttg

SEQ ID NO: 33263 - DNA, 360 bp, Zea Mays
gcaggaggagctacaacacagcaatcagcattctggtttgtcgtctgacagctccactggtgctgctcagcttgcaccccccgcgaatggtcaccatgttgtaaatggtcatgctctgattgggaacggaatggaaatcaatgctgaccccttcaatgggccacaggaagttgatggaccaccacctcaggtggattaggcccaggatttggaggttgtgccccctcaggtccaggttgatgtgcctaacaacattcaccatcagaatctggagatgaatctcatgctacaccaggactggcagcctgaccccgtctttcagttgattgaggagagaaatagagctgtccagttctctag

SEQ ID NO: 33264 - DNA, 539 bp, Zea Mays
gaaaaggcttaaacgagagagagaagaagatgagctgaccggagtacggctggccgcggtgaggttgagtttcgggtggcggagaatggatttgggggaaatcttaaattcgagctctcggaggcacggttgctaacgattgctggtgactgggtgggtgatgatgttacgcagctaggggagggctcaatttataggcggcttcgtcggtggcgcacaatttggtcgagcaacgcggcggccggaggtgaagaggattactggcgcgcgtgaatcgctgtctcatgccgtggcaagctctccggcgttgattagacaacagtgggggtttacggcaatgcagtggaaaggttgagccacgcggcgcacggccgggaagcggcggtcgccggtgagcttatctgttccagtcgtagagtagagggggaagcacgggaaggtcaccggagtggagcccagctcacggcggtgaagatctttactgggcgatgcttacctgctggccacggcgcacgaatcacgacgagcggcaatcgacg

SEQ ID NO: 33265 - DNA, 286 bp, Zea Mays
gtggattggacacaaaaagggtgaaatctttgggaggaggaaggttccaagccgagtatgcaacgggagcaccaacatttgaaactttacccctgaggatcatctcaagtcggcttaccaagtcaacagaaggaattctcctatcggtaacccgggttgagtcggctagcccttgatacagatatgccggataggccctgtcttttagcggctgaatgttcttgaaaacaaaatctgttaccacagcttcagcagtcagacctctctctttcagtaatccgacttc

SEQ ID NO: 33266 - DNA, 603 bp, Zea Mays
catcgactcgattcaataatactaaccataagtgtttatcacatgaacggagcattgcaacaagcaacccaaaacaaactaactccttcacacaaattgcattatggacctactcgatcactcgaagcgtctactcaatgtcatgaacacaaacatacactatatgtgaagcgtagttcaacgaacatataatacacactaacctgactcataaacacagaggagtgatgactacttcggcatgtccccacctctctatccaatccaaatcaatttctaactacactgatcaaaccatcatatcgcgcaacacccatacttcactgtcttgtgtataaccatgttgcgacaagcactcgagacacttccatcaaacctaacgtaaccacttatataatgtgctctgacacactgattcaccgatacgtccttcacatacaccgacgtttctcactctacttatcacatcaaacgaatacaatcatccatttctctcactcacctacgcgcttactctcctagtatgaatgagaaacttcgcaaaacacttaatacacatcacaaaatatcagataataagagtctgaaaaacataaaagaaat

SEQ ID NO: 33267 - DNA, 402 bp, Zea Mays
gttgaagggagcgtcggtgagctgaagagggtgcggtccgagcgtcggacgccgggtagagcgcgcgacgtaggaggagctcaagcacgctggctagggagagaggagcagggagctatcggcgtgtggagaagaagtcagagagctcgagcagaagagcatgactagagagagcagaaacggtccagtgagggagatgacgcctgagtagagggtttgggcggcggtatgctctccaggtgaagagcgacagcaccagggagaagataaggccaaggagggagaaggagatgcacgggggagaagaagaccgcgtgtagaggagcttcgacggcggccaggagattgaagataagggaatcgcgcgtgtggaaggagataaggcagaggaaggaatcagcg

SEQ ID NO: 33268 - DNA, 338 bp, Zea Mays
gaagaccctacgtgaacatccatggaagtgtgggagggagaacccactcggacaccctcgggggctgggtcacagctcgtgttacccatccgagccggatcatctccggcaacaccctcgggggctgggtaagcgctagcgccatccatgggggccgagttctctgcaacagccacctctaaggttgaaggaccctcagtcactttcgtgggggcagagcaatccagaccagcctcctgaccctcaagaccgcgctctaaggtcgatgaggcgcgggacgctgcccaggatgaccccaactcgacatcgggcacatcagcacaaacaaccatcgtgca

SEQ ID NO: 33269 - DNA, 277 bp, Zea Mays
caaatgtcgttgaaagccatattcggataacgtggcgatgcaagcaccttcggtttggcacattttttatatcctcccggtgcacatattaaaatctgcgctttcccagtcagtttacgtgatgcttttgattgcggaaatgcatgtgtgatgggatgggagtagaccaggaacgtttgcagcgggccgggagatgactgctgcggttcgatcggttcctctatcctttccttcttgtcgacggtcatggttgtggcttatggtatttgttggggcg

SEQ ID NO: 33270 - DNA, 708 bp, Zea Mays
ctctcatgataatatatttctgaaccatatgcaagaatgccacgttccagtttcccctaattaaactggtccgatcctccgatgaccaagtaggtgttcctgatcaatattattacacacaggcgacgacagaaagtccaaataaataaaagtactagaatacgatgtgcagcgcgcgcttattcagtctctcactgcaccattatatttagtgagcggccggctccgacccctacttgctgccggaaggaccagcacagttggaagagggaacgctgtaaggactggcatcatcgtcctttgatgtatcagcaccgtcggaagggatggcagtgttggaaggactgctggcagcagcttcatgggaagaaggaccggcagcagccctattcgaaggcccagcaccgctgttgccgcccctctcgttctcctgcattcctttgttgatcacgtcgtaaagctccgccttctcgcgcttgtacatttccatcttctgcttcacggcgaacagccccctcgggccaaccctagccgcagtctgctggagcttcgtgatcttcctgttgatgcagttgacctggtggtacgtagtggggcatcatgcatgtcatcgatcaacaacaaccaaatcaaacgacgtggatgatgaacgagctacgtacgtacgtacgtaccctgcgcgaatacagccgatacgtagcgtctttt

SEQ ID NO: 33271 - DNA, 420 bp, Zea Mays
ggacaggaatgtgtgcgataccagttgatattgtaggggtccaatgaaaccgtccagaaagagctcctgcttcttctcatcgtcttcaacatccctaggagcatatcgagatagctgaataaatttgtccctatattcgctcatggacatacttccttgcttgagggatagaaactcctttcttttaatcttcatgagtcccgcaggaatatggtaattcctgaattgagtagagaattctgcttaggtaattgtgttgatggcggcatgagcagcgcaataccatcccaccaatccgcagctggacccgtaagacgacctgatgcgtacaacactttctctctgtccgagcaatgagctatgttgagcatcttctctatagactttagccaatcatcagcgtccagtggatcatgagag

SEQ ID NO: 33272 - DNA, 283 bp, Zea Mays
gtgattcttgccttacaatttttcacatgaagttttcttctatgagatattgtacgacatgatttccttacttcacatatgtgcaacgtgactcgctgcttactcgtaaggaaaatgtgtagatggtgactactcgccgcattaacccaggggtcgctggagcttctggtagtggtaactaggagggtgaccatgaagcaccacttcctccacctccaccattcacacctgagcagttcttcgcataatttcttggagctcagaggaacatggagaacttgca

SEQ ID NO: 33273 - DNA, 1744 bp, Zea Mays
ggcgtcggcgtgatctgagatgagattggacccggctgcgcggtattcgctgcggaggtagacggccatgacgaccaacaccaagcgcgcctacaagctccgtatcctcgtcgcttcgtttgcgctatttcgcttcctttttttaattccttgtcggggttgctgcatagtggtttttgtatgaccgatccatcgctgctgccgcggtcgttcaaccagtagaggggaacatttgggtcagcaagtttgagaaggagctcccgactcttaattttctgtttctgttgagttgttaaataggtattttgtggttgcgagattcggcaggtcacatttagctgttggtgattatcgagtagtcgttactgatttgtcgtttattatcctagaagtgcgattgctggcattccggcatgtatgtgaaaatgtctgaagtggtacattgatgcaaataatatcagtcatcgagggagattgggctgttaaattcgcacacattggaatgccttgacttgcatttggtgtagaggagtttgtggcgcactcgtccaatgttaactgcctcaagattgggaggaagacctcgcgggttcttgtcacaggaggagaggaccataaggtcaatctttgggctattgggaagcccaattcaatactggtaagactgtttttctagttctgtttctacgtatggactgattgtaaactgcggctccacagttgggtaggaaaacaaaactcttaactcacttgaaaaactattggctgacctaagtggttacaagatgagaacttcaccttttcaaccgctaacagatttttatgtagcacagttctccttatgccagtattcaattaatagaaagatacttttaagttagttatatcaacctaccgcacagcaatgcgttttgaggatggttcgtttatatagttaaaataggtgtcatgaataatgtttcttaaggacggagtactttatttaatccactttaactttttggtggccgtacagagcttatcaggtcacacaagtgctgtggagtcggttggttttgattccacggaagtgtttgtggctgcaggagcagccagtggaacaataaagctatgggatttggaggaggcaaagagtatgcagatatgaatatttaacttactatatgtgtatatgtatgaatcgttcagtaattgcatctcttggctcattttctatgcagttgtccgcactcttactggacatagatcaaactgcatgtcagttgattttcatccgtttggggaattctttgcctctgggtcactggacactaatctgaagatatgggatataagaaggaagaattgcatccatacatacaaaggtcacacacgaggggtgaacactattagatttacacccgatgggcggtgggttgtgtctggtggcgaagataatatagtaaaggtaagaatttgccaataactctatgctgtgtgtgttcaattgctagttcttctgctggaatttgatttttcttttgccttaatatttctaatgaaaaaaatcctttttttcccgaacatattacaatatgtttttctttggcagctctgggatctgacagctggaaagttattacatgaattcaagtgtcatgagggtcagatccagtgcatagatttccacccccacgagttccttctggcaacaggttagattcagaatttacaatgcttatctgtttcttgactgttatctttt

SEQ ID NO: 33274 - DNA, 473 bp, Zea Mays
gaactctcgtgctggtattacaaggtgatttgaagtatttatataggagagggagtggaaggcctagttacatggagattttgatgcagtgtgccattccttgtctttgcgcgtgcatcgcctcatgcgcttcttgaaggcctttcgtagccggtgcgcatgctcccaaggcactatcaatcctgagctgactagaccataagagcacttgagtcttgaaggtgtctaaagccttgtcgtagggtacatttctagcaacatacgagtggtttgcctcatagtcctcttctcttctcttgtctagttttgttgacttccttacaccagaggcaaggcccaccatgtcctgcgggtccttgttcatacttctaagggtgaggtagctaggcaagggagtctttagagtcattcgtattatacctacctagtctagcgtaagagggaccaaagagtcttctctcgtctccatctac

SEQ ID NO: 33275 - DNA, 386 bp, Zea Mays
taaaaaaatcacttttgtcagggatacgacccccggtccctaggagccaccggtgagagagcgcattgggaaaaggcctctggcaagtggggttcgttggttacctagaagatatggataacgtctgccctgaaagaacctgccccggtcaaaccacgcgacaccgagcctagggtcgagcatggcggaacctaataggggatgggcgtgtcggaggcaaaccactcgagtggatcccgcgctcggcccctgactgactcgtcgtaaataaccgaccgcattaactactctagacaccgagccacaacagaggctccagtccgctttccactcaagacctatgaacccctcggaccacacagcactcatgacctacgaacccatcg

SEQ ID NO: 33276 - DNA, 351 bp, Zea Mays
ttttctttttctttgttgttccatgctctttcagaacaacatttcatatctgttaaacacataccttctatagcgaggagggtgggcttcttcagcgagcgatctgcttagagttggcaaacaggagcagaaaatagggtttcttcataggctccgttgctgcactaaaataaacaaacaacagtagaaagcaatggcaaggagttggcaaaatgaagaaaatcatatgtctagcgctaggaggtagaaaattcacataacttccaacacagagcaggacgaccaatccgttctaggccctgccatcgcctccgccacatcgtcgcaccagaaaagtagcaaaaatatgaa

SEQ ID NO: 33277 - DNA, 879 bp, Zea Mays
cattgacaaaaacaaggagccgaatccggcttatgcaacctggctggcacaagaccagcaagttttcggctacatcgtcaactcgctctccaaggagatgatgaagcagatctctcactgcaacacctcggcgtctctctggaaggcgctggaggaactctgtgcgtcgcaaaccagggcgcgcgcagtgaacacgcgtattgccctggctaccacgaagaaggggaccatgagcatcaacgaatacgttggtaagatgaaagcgtatgctgatgaattagcagctgcaggcaaagcacttgatgatgaagaactcatctccttcatcatcaccagcctcgatctcgactacaatccggtcatctccaccgctctcggacgtgctgatccgatcagcgtcatcgagttcacatcacaactgctcgcctttgaacaacgcctgaacctctatcaagggtcatcctcctcgtcaagcttctccaccaacatggcctcacggggtcgtggaggcggacgcatgttccgtggtcgcggtgcacgtggccgtggaaacggtggccggggacgcgggagtttcaacaacaactccagctccagcaagcagaaggtccagtgccagatctgcaagaaggtgggcgtccacacagcattcgaatgctggcaccgttttgatgagaattttgtccctgaagacaagagcgtcaacattgccaattatggtgagtatggtgtagattcaaactggtacacagatactggcgcctcggatcatgtcataggagagatggacaagatggtgatccgtgaccgctatcatggtggtgatcaggtccacacggcaaatggagcaggtatggacattaaacacattggtcatgt

SEQ ID NO: 33278 - DNA, 538 bp, Zea Mays
attttcagggaggaagacaagaacaattccaatattaacagggctatgctgggggacttccataggcttattaattccttggatctaaaagagattcatttgaagggaaggaggtatacttggtccaaccagagggatgctccaactcttgttaagctggaccatgttttttgcactagctgttgggaagatctatttccggacacttctcttcatagtaacgctaccacatcttcagatcattgtcctttgaccctcaaggtcagagatggctgcatggggaaaagatggtttcactttgaaagtttttggcccaaaattcctggttttctggaggtggtgggtgcgtcttggagcatgccagttgggagctcctgcccgttggagcaagtgtcattgaagcttaaaaggttacctcgcgcattgcagtcctgggggcataaagaagtgggtaatgtgaggatgcagctggggcttgtcagagaagtgttgcataggctggaaatggcgcaggatatcaaaattttgtccagtgggg

SEQ ID NO: 33279 - DNA, 501 bp, Zea Mays
tcactagaaattcgtagaagtcgtcgtgggtacggaacgccgtcttgttgatgtcagctagacgcatgcggacttgatgatagctcgagtgcaggtcgagtttggtgaagaacttggcgctgtggagttcatcgaggagctcgtccatgacggggatgggaaaagcatccttgacagtgatggcgttcaaggcgcggtaatcgacgcagaacctccacgagccatctggtttcttgacgaggaggatgggtgaggagaacgtcgaggagctccgacgaacgagcccttgctcgagcatggtggtgcactgtcgttccagctcgtccttgtgggacgctgggtagcggtaggggcgcaccgcgaccggctccgagccgtggacgagagtgatgccgtggtcgcgggagtgtatcggtgggagcccctacggtttggagaagacgccggtgaaggacgcgagtagctcgtccagtaaggatggtgacaccgatgtggtgcgaa

SEQ ID NO: 33280 - DNA, 397 bp, Zea Mays
acgccaccgctgttggagcctataaattgccgcccccgcctgctccgctatgtaattgtgcatccagtaaaccagctctcacctctgatcgtccgccagaactctccaatttgagatttcccccaaatcaaccaagaacaccgtgcattgagccctcaccgtggtcagcgaatcccaggtttgttcatgctccctgctatcttgtttcaacatccttgggttctcctgatgctcctcgaccctgccaattggactaggaccccttagatcaccgggaacgcgctcgattgcccgtagtgcccgctgtcaccgtggatagggcgtgttagtgcgccattagtgaaattagttgaggggaaactctcattaggacttgaattcggtctctgccaaagta

SEQ ID NO: 33281 - DNA, 597 bp, Zea Mays
ggaaagagaagtgtgtgcccctgagacttgcataaccgtgggggaacgaccaatgaccactccgccctgaaaggagatggtaggagcacaaagcatcacaccaagctacttcttcctagatatcttcttcatcccaggaagagtggaggacacacctgtttctgacgacaagcccaccatactaggggaggatcccccagcgtgacgcacgccaacgccgtaataggcgccacaacatacgacatcacaatgaagccagggaacaggatcctatgcaacccgtctctcatgacgaagcctctaaagtagggaaaacccctgacgacagagcgctctgcgagcgccgcaactcctatcgccgcaatcatcgccacgcctaggaatacgaacgacagcaagctgagtaggacgccaagctccgacacgagaactcgcttctcctctttgaacctgctgcctgactttgctcgaccattgaatacgtcgagttaagtcgggggagtcctggctcaaatcaccaacggcttaccgcgcaccccagacgcggaaggctattggcagatcctaacctacgcagcgaaccatcttcttcccctc

SEQ ID NO: 33282 - DNA, 527 bp, Zea Mays
ccgaatcacctcaagtcttgtataagatttgtagagtatacatcaagaaacatatcttttgcagtgatccaggtccgattccaaacaaaaaaggacgaaaaatgccgcccgatgttggcactgtcacagctgccactgctcactgtcaccagacatgtccagagctcctgctctataaatggcagcagcatgccttctcccttctccccccacgccactcctccctcccagcacacgagtcttctcccaaccatgagacctcctctctaccccgcgcctaggaacacaccagccttcttccccacgtcgagctcgtcacccatggcccctcctagatcttctgcacgacttcttcatcgtcgtgctcccctctactcgcacccagccgactgagagtggctgcctaggaccggctaagcccctcccaacgtgcagtggcccttggctgagcgccatgtgccatggccgaaccccctccatgccatgttcctgtacgtacgtgagatggaggaagaagaagacccccc

SEQ ID NO: 33283 - DNA, 360 bp, Zea Mays
ggtggcaaatgcagttgctgagaccacctagcttcgtcagctcctacacgaaatgcatattaccctgaagcacgccactattatcttctgtgacaatgttagtgcaatctacctctccttgaacgcaatgaatcatcagcgtacgaagcacattgagatcgatctacacttcgttcgcaaacgagtcgcggtcggtacagttcgagtattgcatgtctctacctcctctcagtatgctgatatcttcaccaagggattgccttcgtctgtattcactgagtacaagtccagtctgaacgttcttcagtgcggctgaccaagttcatcctacaaggggggtgttggattactatgtttagg

SEQ ID NO: 33284 - DNA, 354 bp, Zea Mays
agggtcaccaccctgcttgttacgattttcagggaacctaatcatgttgaaatcaccaaggaaaatccaaagtttgtcgtcatcagtttcaaggttagaaaaccaggcaagaaaagcttctctaccatgaggagagcaaggggcataaatgttagagagccaccagacttgcccatatagattggattggaaacgaatagtgtgcccaaacgggttttgatcaactatctcagtctcaaagagggagcttttccagatggtgatgaatcctccagaggcaccaatggaagggtcgagggcaaatttatcaaaatggcgattgcagaagagacgaatataagcgtcatcgaagga

SEQ ID NO: 33285 - DNA, 995 bp, Zea Mays
catttagggaggtcaaccgccaacatttgataaatgggggaggctgttagaacagcacgtaccatgaccaaacgacccgctctattcattaaagaggctttccaacccggcaagtaatcagagactttgtccacaagccgctgtagggcttccttaggtggtttatgaatagaaagaggcaggccaaggtaggtaataggaaaatcagtgatagaacaggccaaaatttcctcagtttggagcctttcttcatcggtacagtgtataggagccactgaactttttgataaattggtctgcagccctgagacatgaccaaagagctcaagaatggctttgataaccagcaggtccatccggtcaggccttagaaaaatcactgcgtcatcagcataaaaagaaatccggtgtctgccgtgctgaatagcaatagggcttaacatattattcctcatagcataatcaaccagataattaagcatatccattaccaagatgaagaccatgggagaaagggggtctccctgacgaagtccacgccatggtggacaggcataccaggttcaccgttgacaagaattcgggtggatgaagtggaaaggagcaaacaaatgaggttgcaccaacgctgtgcaaaacccacatatttcatggtctctagcactagcagaaagggccaagaaatggagtcgaatgccttagagatatcaagtttgaggagcacatgagcttctttcttgtgcaaggccctgaccatctgctgtacaaaaatataattatcatgtatgtttcgacccctggtgaaagcactttggttggctgagatcaaagaaggtagcagaggtgccaatctgtttgataggatctttgtcactagttttgcaaagctgtgaatcagactaatgggcctgtagtctactagtctttcacttgtgaggcgtcaactttcttgggaaggagggagatgaaggcagaattaagtaacctgaacttgg

SEQ ID NO: 33286 - DNA, 355 bp, Zea Mays
taacgccacattgttctttgcccgagttgaaggatgaacaacttcacgatgattactaagaaacctgagataaatcttggactttctaggtgccaaagaagattacatgcctaattgcttggatgaacgagagacaaaattttctctcatatcattaatagggatagaattggccctagttaaaactttttatctaacaacatcagcatatggaagttttctcggattcttgctcaccaacattccaagaagaatcttcttcggagcaataggcatcaaattcatgagcccaattaggtccaccagaattccagagatgaaaataagctttgaagttatcacaggcaaatgattt

SEQ ID NO: 33287 - DNA, 515 bp, Zea Mays
atttctcagggtactccactatggatccaaggggttgttgcaagctacaatgatgatccgcaggcgcaggacctcttgaccaaactgtctgtatccgcaaccgctgctgctccatacaccctatctcagggaatcattcgttataaaggacgcgtgtggctggggagtagcccggatatacaacgccaaatcatttcggcccttcatgattcacctattggcggccactcaggttttccagtgacttacagcagaattaaacatctgttctattggaaaggaatgaaacaagcagtgcgaaattatgttcagtcgtgcagcacctgccaacaggccaaaccagatagatctcgttatccaggactgctggctcctctaccggttcctcctcatgcgtggcattccatttccatggacttcattgagggacttccgaggtctggtacagtggattgtatactggtggtagtggaccgtttttccaagtatggacactttctagctttgtctcaccc

SEQ ID NO: 33288 - DNA, 343 bp, Zea Mays
aaaacatggaatcaaacattgatccaaatacaccaagcattacctgggaggtgccaatttgatgaggccatacacataattccttcagtgaggaatgtctgttaagaatgatagtgcaaaaccaattgaacaaccaaattactcaaaatctatcagatcatgcacaagcaatgctatcctgaagaaatgtgagggtaaagcttctaagttttcatgtgctttttacaagtctgaggataccacacatgtgaacacaccaaacaactttatctgaaatctttacctgatataacaggtttgacgcctctgagaatgagcgtgacgacaaacagtgagcagagat

SEQ ID NO: 33289 - DNA, 531 bp, Zea Mays
caccattcttctcagtggtttttgcaggaaaggtaagattttgcctgcgttagtcatcttgcagatgatgttggagaaaggagtagtccctgatactgttgcgtatacctgcttgctgaatgggttgatcaatgaaggccaagtgaaagctgcttcttacgttttccatgagatcatatgcaaggaaggcctgtatgcagattgtattgcctataattcgttgatgaatgggtacctcaagagtcgaaatgtgaataccataaaaaggatgatgtctgatatgtatcagaatgaggtttatccaaactctgctagctataacatacttatgcatgggtatgtcaagaggggacaattttcaaagtcattatatctgtacaaatatatggtgaggaaaggaatcaggccagacaatgttacatatcgtttgctcattcttgggctttctgagtgtgggttgattgacattgcagttaagtttttggagaagatggtcttagaaggcattttccctgatcggttagttttcga

SEQ ID NO: 33290 - DNA, 643 bp, Zea Mays
caaatagtgtcataggatgtttggaattcgaattgaggcacgaaatgatatggaattgagccgatacttcacgaataggttcatataggtgaatatgagtgaagtgtgtgcttggtttgaatttaggcgaagaaaaaggaatttgggcactcggctcggaaacgatcgctcaaaacgggaaatttggtgaaatttaagcctgggatctcggattggcgtgaaatttggcaaggaggttactggaagtgttgtgaaggtgcctgaaaaatttgggttcaattggagcaagtttggctggtttgggcatttcaccgagcacgtggtgtgcggggatttagggtttcggtgaaacggttatttgaggtgggaaaaccctcccgaaggagctaggaacctgcagggaggcttaaggcacacaggggaacacatttcacaaggggaaatcaccagaattcacaggatttagagttgttgcacaaagggaagaggtgggaggctctgctcaccagaacagagaagaactgagggagtgagagagcaagagttgctcaccgaggagaggagaggaggggagccctaggtcaccggagcaccgccggagagggtggccgccagaggagatcgccggcgggggggaaatcgc

SEQ ID NO: 33291 - DNA, 352 bp, Zea Mays
gtccgggtgcccattcaccttagccgcccaagggcatgcagcagcgacggcggcgcaccatggttggacaacatggtcacgccgatctgcccaacgagcccacccatcatcggccggttactccgtcttgtttgatactcttaccttgtgattggtaagctgcaaacattcatctagaccgaacacatgcgttgactaagaagcaaccactgtttggttaactacatagagtgagattaaggctgcacccgcagatgcaacgtagataaaaaaacgtattccctggttgcatgcgcggatacgctgggacattccgtttctcactgtccaggctcgccagagccaggcgccg

SEQ ID NO: 33292 - DNA, 505 bp, Zea Mays
ccctttctggattgaccccaataatctagcagggcggttgaggaaggctcctgcaagctctcgtgagcaaactacagctggtccctctcgtccttctcctggtcattgctctcccacaccatgtggtcgtggtcgaggtcgtggtcgcggcatgggagcaaggttggctcatgggatagcaaacttttatccatgtgtaggaatatctctattgatgttcacgagctggccaggcggcagcgggagacggatgacaatctctgtcgtcagtctatctccaagggaatcctttttgctccccgctctcctgacgtgcctctccatgcacctcctccagaaataaatgaatggcatcaacaaacttatggagttccattcatgtcggctgaagatgaagatgcagaagaagaattctttgatgacagggatcagtttgtcccgcctccccaccagggtgatccaggtccctcttcatcttatcctcccccccaggatccttcaggaa

SEQ ID NO: 33293 - DNA, 416 bp, Zea Mays
cgttcccagatagccaatgtgccgagacgcgtctgtacagagggccgtgcgtggagatgctgtgcgccgccgcttgcctggtgcagatgcgccatggcggacactgcaggggaaacttcgtcaagggccgctgctactgcctctcgtgctcttgatagtcgcctagtgagacgttcgttcacgttcgtgccgcgaatacgtacagcgatgatggaatattggaatggaataagaataatcatagactcttcagcagttcatctccagaggaactcaacagggctggacttggtgcatgcacgtcgttctcccatcccatgcatgcatcccacaggatgggcccgaaccgcgccgtctcgcgctattcttcttgctcctgaacacggccttgtagctcatcttctcctagctcgtcg

SEQ ID NO: 33294 - DNA, 576 bp, Zea Mays
cactttcaagaacaagatcactcttcgcccaggagctatgttccgttttggaaccatctcatgcatagtagacgaagaggaaactctacaccacgtagcagatccacccaagaaaaagcttttctccggaatcccgagagaagccagagcaagaccggtcagggtttcgcttacccgaaaaactccgttgtccaccttgcctactaaggagtggacacaaatcactcgaaagaagaagttaaacgtcccgagtcagggtatgagaacatgtcgagccacctttccgatacctccgccctcaaaggaggatgggaagaaggacaccatcgcgccggctcctttgtaccccgacatcctcttcatccaggggagattggagtcagcgcccatcttcgatgatgagcctaccatggaaggggaggaacctccccagcatgaagcacggcgacggaggaacaaacgcaggaacgtgcggcgacatcatgaagcctgggaacggggtccggcacagcccatatcccgagacgaagcctcaaaagtgggagaaactcccgacgaacgagtacaccgagaaag

SEQ ID NO: 33295 - DNA, 541 bp, Zea Mays
gtcagggaaaaaagtcctcatcgtgtcctcctcaaaagtggagtcccgaggtggctcatcagccgcagaaaaaacagatgtcgaagatgtacgatgatcaggaggaggtggagggtggtggtggtaaccagagccggatggcctagggtcaccaggaatgggtcccggacccgggtaaggaggcggagggtgggaggatgattgacccgaatccccatggtagggaggcggggcaaactcctcgcgatcatcaacataggcttcttcttcgtcatcgtctgcagacataaaaggcaccccgtaggcctgctggtgccactcattgatctccgggggaggaggatggagaggcacatcaggcgaacgagggacaaaaggcatgcccatggaggaagcttgacgacgaagattgtcgtcagtctcccgctgacgcgtgccacctcatggacatcagcagaaatgttgcggcacatggagaaaaatgtcgcaaacccatggaccaagcgagcacccatcccgcggccacgacctcgaccacgac

SEQ ID NO: 33296 - DNA, 352 bp, Zea Mays
acgagttcatacactttgccacatgtctttctggtcttcagtgtgaaagtgcagctcccaaactggatcaccctaccaccaatagtcttcttctgccaatgaaggaagtaatgcttcccaaagacttgaattgaaggctctccaccatatgtagtcatctcccacatatatttagacaatgccacaatggcattcgacgctagttgatgcaattgaacgctgaaacgtttcagcacttcaccacgaacaggtggcatggaaatcaaagaccatccttaaaaataccttgaacactacgatctcccctcatgggtttagagtctgctcagtactaggcacacgccgatcctcg

SEQ ID NO: 33297 - DNA, 285 bp, Zea Mays
gctggatctgaggacgacgacaatctgtcatcacctagaccacaagtattcccttcgtatggagcttcagtgctattgcccattcaattccggtaccatctcagaacagaaaactgaatattgtttcctgcatatttttgggactacgcagattctttgtatggagtttcaagtgcatgttggagtgaaatttgatggtagtgtagatggttattctggtggaagggttggttaaatgagatttatggagccacaaggggttgattggtttataatgcaggaaaa

SEQ ID NO: 33298 - DNA, 357 bp, Zea Mays
gcgtcctgtcctagaataatgggcaagtacgctgtcatgacgtcctccgttgcccctgcagcccgggcggcggttgtgtagatggtcagccaaccccctgggtcctgcttgggttcgtatttgtcgacgttagagactttgaaattgggaggccattggatggcccggaggcgaggggtgagcgcagagaccccacgtgtatcctcgtgtcgatgatcatgtcgtcgatcctagggaggggagcgagtattaggtcgtctcgactgtccctagagcgcactattagtagaggctgctactgactcgatcctggttgcacggctatgtgtcagtacaccatggtctcggtcgtattcc

SEQ ID NO: 33299 - DNA, 337 bp, Zea Mays
tgtcgcaccgtcttaagtcgtcgccgacttaagccgatcgctctgttagtagggtatagtggtcatcctaagtcgagtaagcgtgagcatgtcgcaccgacttaagtcgtcgccgacttaagccgattgctccgttagtagggtatagtggtcaccctaagtcgagtaagcgtgagcatgtcgcaccgacttaagtcgtcgccgacttaagccgattgctccattagtagggtatagtggtcaccctaagtcgagtaagcgtgagcatgtcgcaccgacttaagtcgtcaccgacttaagccgattgctccgttagtagggtatagtggtcacccta

SEQ ID NO: 33300 - DNA, 384 bp, Zea Mays
ggaccttcaactttttactcttcggcgcaggctcgcttggagcagccgaagcagcaacctttccagaagttacaccctttcttttctgcccccgtggcgggtagcgatagtcagggtacacaaatccaatagcatcaaaaaccctatttaatcttttcttttttcggctcctgaaggccgcagatagtgcattatcttcggacttggaatatgctccaagtaactcatcgctagtattttcaatacactttagccagtcatcatctggttcgacaaacttgtccccaaacctgaaggtgtatttcaatcgaaccaggccgccttcgctagggttagtgatggtttctttcggcatttcccagctgtctataagtggccatatcc

SEQ ID NO: 33301 - DNA, 349 bp, Zea Mays
gtacgcccaagccgcagtagaaagccccatggaatcatccgagtcctcggatgacgccgggggagaagccgaagcgggtgagcaatctgacttggaggatgcctcctccgagtactctgagtcccccaaagtcctccgagggggactcgcggcatgcttgcacttgttgtcagcacagcgaggccaaccacgacccctcctgcctctacccatggttggttggagaaggagagaaagaagaagaaagcaacagatgatcgaaggatgagtgaagagaacaacggtgcaagcagactatttatagaggccaggggtgaccgtccacttcctaccacgctcgccgaacaga

SEQ ID NO: 33302 - DNA, 435 bp, Zea Mays
cttgaaccctttagctagcttcagctgagaaacatgcacaatagggtgaatacgactggaagcaggtaagtccaggcgataagctaccttgccaacacgggccaacacacggtagggaccaaaatatttaaaactgagcttgtgatgggcgcggggcagcacagaagattgcacatatggttggagtttcatgtagacccagtcatcaatagcaaaggagcgttcagacctgtgtttgtccgcttggcgctgcatgcgagcctgagcacgcaagaggtgctgatggatgaggtcctgcatgtgggagcgctcctggagccagtccgaaatagactctgggatggcactgtctgaagaaatgcccaaggatcttggttgacgaccgtagagaacctcaaaaggtgaacatcctaagagtgtaggcttgtgttgtac

SEQ ID NO: 33303 - DNA, 548 bp, Zea Mays
aggcgggtgagtgagttgccacacaaaaattgaagaacaaggccctgcaagttgctcggacagagggactgacgaagatagccatggtacagtggcgggaaagatctccagtgccgtgagcctgacgccggtcatcttctgccgcaattcacgctcgcctgggagattcgtgccgcaggagtgatagataacaccgagtcaaggtgaaaatatccgggaggggtaaacccagtcactggctggaccggccatcgtgtcccgccgcggtcagtcacgttggcatcaccggagcacaccatttctctgaccatgacacgcaatgatctctactccgtgccgtaagggtcatggaaagcgaccggttatcatccctggaccaattccctcccgcgcgccacggtgagttggccaccgtaaaatatcctggccgcggtaaccttgatctcaatccaaaattcgtgatagcttggtcggagtctataaattggaagcaccccctattccgcctactcattacaaactcagtgaaccactcctcacctccgaat

SEQ ID NO: 33304 - DNA, 347 bp, Zea Mays
tagaattccattttttcccattgaattaaacatagctttgttctacaaacacacacatgtatgagcatttcatgtaaaacaatgttaccgcttttcttcatattcaatatctaggacatttagcttctctaggttcctgtgtaaataaaagcgtgtggtaatactcctggccactgagggtcggcactaatggccctgcatgttttagctcccagcagaatttaggttcacatacaatttgcattcacacacataaggtgctggatcttgctagcttctagacccaaagccattccagttccagtcagttttgtgcatggctgactgtcaccaagccaaaagctctg

SEQ ID NO: 33305 - DNA, 1749 bp, Zea Mays
gtttcgacgtcagcaacgcctgcaggaccgacggtcgagtatgctacaccgccaaccgtggatgtggaggatttggacgcggatcatgaagatgacgtaccccttcggttccgtctcctagacaagatcgcaggaccggcaacgtcccgagggctcgttcaccgctttctggatgaagacgaggatctactgctggctgaagaggacgagccgaggaccttcgagcaggcgcagcaacatgactgctggaggctcgccatgctggatgagatgacatccatcgaggcgaatggcacctgggagctggtggatctgccaccacatcaccgtccgatcgggctcaagtgggtgtacaaggcaaagaagaatgccatggggattgtcacgaagcataaggctcgtctcgtcgcaaaggggtatgtgcagcgtcaaggcattgactttgaagatgtgtttgccccagtggcacgacttgagtccgtaagactcttgttagcgctggcggcgagcgaaggatggactgtccaccatatggacgtgaagtcagcctttctcaacggcgtgctgaaggaagaggtgtacgtcgctcagcctccggggttcgtcgtctccggcgaagaagggaaggttctgcgccttgtcaaggcgctctacggtcttcgtcaggcaccgcgcgcgtggtacgccaagctggatgcttctctggcatctcttggttttcggcgcagcatcaatgaacatgctgtgtacactcgagggaaaggccaacatcggctgatcgttggtgtgtatgttgatgatcttgtcatcactggtggagatgtggccgtaatcaagcacttcaagcaggagatgaagagcacatttcaaatgagcgatctgggattgctcagttactacctcgggctggaagtaaagcaatgcaagggcgggatcgccatcagccaaggggcgttcgctcagaagattgttgaagaagcaggcctgaagaattgtaatccaagtgccacgcccatggagacacgcccaggactgagtaagtcgagtacctgtccagctgttgattctactgcatacaggcgcatagtaggtgctcttcggtacctggtgaacacaagaccggacatagcatttgctgtgggatttgtctcacgttttatggagaagcctactaccgagcatctgcttgctgtgaagcgagtgctgcggtacgtagcaggtacttcggactatggctgctactatcagagaaggaagaaaccagcaggcttgaccgggtacagtgacagtgaccatgcgggtgatgttgatactcgcaagagcacgacaggagtggtcttcttccttggtggcagtctcattacttggcaatcacagaagcagaaaatagtggccttgtcaagctgcgaagctgaatatattgcagcagctgtcgcctcctgtcagggtgtttggctggcacggttgcttgctgaactgcgaggagaagaagctgaaccggtgatgctcttcatcgacaacagatcggcaatagaattgtccaagaatcctgtgtttcatgagcgaagtaaacacattgatacaaggtaccattatatcagggagtgtgttgaggaaaacaggatgaggattgagccgattgacactaataatcaattggctgacatattgacgaaggcattggggcgcggtcggttcgtccatctgcgttccaggcttgggatcgtcgacacaaggctgttgtgcaag

SEQ ID NO: 33306 - DNA, 399 bp, Zea Mays
aaggtactctggtggggggaggatcatacttggaagtctcgacgatggcggtattggcactggtgtgagggctcggggtctaagaaggttgtagagctcttggtgaagtaagcatggggtgccatgggtcaacttttagagggccatgccattgatgatggggaggggtgatgacaagggtagcacggctagggccattgttttatgctagtgaaatcgcttgagtttatggcacgggcatccgacgaggaaaatgggggagcaacgaccaaggtgaagacatgaggtctctactgctagatgacgggcgcgagagtggtgtcctagtcaggggcaaaatcagcgttgatgtgtgcgccgttgaatagagagcaagcaggaggtcgtggatgactgccg

SEQ ID NO: 33307 - DNA, 307 bp, Zea Mays
gagggaagaagttactggcgcaagcaattcgtggatgttaccgtggcaagaccaccggcgacgaatagacatgctaaggcgatgtactgcgatgtggtaaaagggtcatagcgtgtcgcgatcacagcggacaacgtatacctcaatgacagtcgcttgaccacgtcgccggcgcaagtggacgagtgacagcgcggccacagtgtcccgagctcatctgcgacgagatctttttaccgttgagcgtaatccatacatccgaggcacgaatcgcgatggctggcgtgaatccgggcgcacggcttac

SEQ ID NO: 33308 - DNA, 438 bp, Zea Mays
ctttttcgtttttcctccgtcggttgcctgcgttgggtgcgcaccagcagctggatgccgacatgccgtgcgtgtctgtccccttccttctcgccagtcgccccgcagcacaccgtcggtacgtagcgcaggcaagtgggaaatgccgccttcaattcatccatcgtacaaacatcaccgagcctacgcagatatatcttcatcattctatctattatacgcatccctactcctgcgcgcgggtggttatatacgcacatgcacctgcaaaaacctatttcgcatgattggtttccctgctacccgcgtccatgtcctccgcatgcgtgcaaacccctgattggttgtatgcacagacacgtgcggtacaatgcatgccgctttttcactgattggatgcatgagcggggacgggagattcctagatcccagcctgtc

SEQ ID NO: 33309 - DNA, 432 bp, Zea Mays
gctgactttgtttttaagaatattcagcctttgaaggacagggcatatccagcttacttgtacagtggcattactgactcgactcgggttaccaacaggaaaattccttctgaggatctggtgagccgactagacatgatcctgaggggcaaagtatcaaatgttggtgctcctgttgcctactctgcttggaatctgccacctcctaggtcctttttcaatttcgtgtccaaccctcctgttggtgatagtggtctgggtcttagagtgcgaccctctcctgaagacattgaggctctggttgctcctctttgtgatcttcccaatgatgagaggaaagttcattttgagatgccggcaagtccagatgatgcagaaatagatgttgtactcaatatgttggctggagaatcttctgactcggcccatgct

SEQ ID NO: 33310 - DNA, 409 bp, Zea Mays
ggtgaccgtgccatgcatggtgcagggccgacataggaggtgttgtcgcaggtggagtgccatggaacttcttgagaacgcccacgtggaagacgtcgtgaatgcgagcatgggcgggcagctctaggcggacagcgacggtgttgatgatctccgtcacccggtatggcccgtagtaccggggcttcaatttgccgatgatatcggtggccagcgacgatggggaacggtggcaaagtcggagcaacacccattcacccacctgatagatgatgtcgcggtgcgccttatcatagtgcttcttctgtaccgcctgggcctgctccaggcgatgtcgaacgtcagccaggaactcctcccgctcttccatcgtgcgtgcaacagctgccacgcgtgtttcccccggctc

SEQ ID NO: 33311 - DNA, 346 bp, Zea Mays
tgagcacacgaaagtgaccgtccttgtatttgtgactcgacttatggctattaagtctaagtttgcattctcaaacaactgttacaaggagcttctgaacttgatcagtgatgtacttccggagaatcacaagatgccaaaggacatgtatcagtccaaaaagttgctctctggtctcggtatggactacaaaaaaatcgatgtctgtgacaataactgtatgcttttctggaaggagaccgcgactgagatgaagtgtactataaatatggtgagcgtagattcctagaggttgaaaatgacgatggtttgaccgtaacgacgaagattgcacgtaagaagcttc

SEQ ID NO: 33312 - DNA, 342 bp, Zea Mays
gaagaaggagcgagtagggcgagttcttttcagtctcctattttggcccaagtagaagtgtgctttagcgagttgggtcttgtagtttggtgaatttatatgtacccactgctgtttatggaaggtgtccaaatcagtcaggttgtgatgttgtagacaacatggaagctgtagctggataaggatgctgactgctgacagggtgttcaccatgcacatgatttgcattttggctatgcagatacgtgcacctctattagttgggccacttgtatatgtatggttgataggcatcattgcacctatgaaccattcctatttgaaagattggcaatgtttatc

SEQ ID NO: 33313 - DNA, 290 bp, Zea Mays
ggaatattttcttttgttttggcagccgaggaggtcccttcgtcaaattcaggttcgcggccggttcggtgtaacgcggccggtgagttaggaccttcaacttttttcccttcggcacaggctcatctggggtggtcgaagtagaagctttcctctttttcccctgtccacgcagtgggtagcggtagttggggtaaacaaagccaatcgcgtcaaaaactctgttcagtctcttctttccccgacctccgaaggctgcggatagtgcattatcttctgccttggaatat

SEQ ID NO: 33314 - DNA, 337 bp, Zea Mays
acggaattgatctacctgctaacccattcaaccagagggtgcttagacaacaacaagcagaaatggatcctctaaatcctccaccaactgggactgatctagtggttgcatctcagatgcagatgctgcaacaaatggcgaatacaatgacggatatgtaggcgcagatgcgacaggagcatcaagagatgcggtaggagagacaagagatgagggagcagatgcatcaagagcgaatggtgcgacaacagcaagcgccaatgcctccaccaccaccactagttacaccccgggacaagcaccaggagttcatgagccacaagccaccgatgttcgc

SEQ ID NO: 33315 - DNA, 376 bp, Zea Mays
cttttgagccactggaatatcaatattttccctggaaaagattggaagttttttagagtcaaaggcaactatgaacataagtgaaaaatgagatgaaaatttgcagtgtcagatcctatgcaagatcagaagctcacaaaataaatagtactataaatgattaaatgatttatcaaataattacaggacttgggaagtgctctatacataacaccttttccacctttttaatgatacaaatagttcttagcatcttttaaaatgtgtccctaagcttgcatgcacgattgttaatggccagatttttgggaaggtctttgctgttggtaattgtaagtacaatcttgaatatcagtttgaaccatgtttaggctgc

SEQ ID NO: 33316 - DNA, 356 bp, Zea Mays
ggccaatcacagctacccgatcagatttcagtggccaagattagatgtacctattaagtgaaccggtattcaatgccgaccagacaatcaaagatccacggccgacgatcgtccacgattataactcaccttggccatcagatcatagatctatgcggggagttcaatatgatgaagggggtatagaacttccaatctaggtcgtttgtacctagatcaagggcttacagccaacactctccctcactgtcccccttccgaccacccgtgcggccaggaacagggctccaaggcggcaccccccggtgagcaatcgaaagcgcccatgtgacccaatttgacctaggcacggtgtg

SEQ ID NO: 33317 - DNA, 810 bp, Zea Mays
gtagtagatgtttatatggagctaacgcaactagaacgggtcaattcggagtttaaattggaaagttatgaatttccaaatatttttatgtatttgatatgggattgattaagagatcaattttattattattttcatgtaaaaacagaggcaataggtgataaacaacattgttacaaaattatagagactgaaatgggtcaatttggaccaagtatgcattttatataaattaaacaagttctagcatttatttttacactaaaaagtattttcctaatgaatttatctgattttctaattatctggactgagcgcaccattaccagaaagtccaggggccttggtgcaataaatcctcagactcagtaaacaccccgaggggatggcgggttgattcctaggtttgccagggttccaaatgcaaaactgtgcccgcaaggggggtatggcgaactctaggccgccagatccaaatcctacggacgagattagatcactcataatatgaagcggtacgcgaccggcaccgtccgatcctcacccgacgctccagatttaattatcccaggatcgcccacacccgatcgatcccaatcggacggtatccgcgacttagaccgaaacagcacccgacttcaaatctggaccggacattgccagatcaacggcgcattcaactaaacaaaggggtatcaccatgatttaatctcaaccgttcattgcaggacctacggttcccaggttatcttccacccctcgccggctcgccccatatcttctctctgctcgtcagcatcagggtgactg

SEQ ID NO: 33318 - DNA, 386 bp, Zea Mays
tgactcatctaatccctctcacgctcacctgcttcagacttgccactagcccagtaccagtggcaactggtcaaatacagcaagtactatgtttccaatgaataaatgcaggggcaatgccatctttgaacttatgttacataacttttgacttctgatagtattgcttatgttgagggccgttacatctactgaaatagtcaaatgtacattgtacatagcaacttgaaatagttatgcttgtaaaattcttcgtggcctggacactttatccatgcaatgtactcctctttttataggagctgtaggttcttcatgttctaaggtggtagttgttgttggatgtataacctgaatatctctgcactgtaggatagcactctcac

SEQ ID NO: 33319 - DNA, 556 bp, Zea Mays
ttatagtcaatagtgggtgatttgcagagcataggtatccagccacttattatgtaggatataagagatggataggtttgtgtaagaatacctaggggtaagaaagtttatgatgaggaagaactccgtgttgggtggtaatgcatttgaagattgagtttgacttctctccttccttgacgaggttgatcttttcttctctagtcttggtctcattgattcatgtttagtgtatatcatcggttggggaatatggttaagatagatatggatgagatagactacatgatgtaggtcaaaggtttgtttgatgataggtggggataggcagattatgcaatccatcataactctattggttgggttggtctgtcattctttatttagtgtagggtgaactaggttaaaacatgcagatagggtctaatctatttcacaagtattaactcacctatttgattgagttacattaggttagtttagattagatggaaactatattagtttagcgtaactagatttgactaaataagatctaattaatttgaattagacc

SEQ ID NO: 33320 - DNA, 569 bp, Zea Mays
gccgcatggtcaagtactgcaagactacacacgccccaccgccctattgccggtcatgttgcatgaatcaaaggataagaaataccaactagcggaccttatgggcgcgctactaaggatacctggcctaggccgtgtgcaggtaaggtcccaatagggattgcccgttgggggtgatggcaccaatgccaccttaagaatcctggcatccggccctgacgtgtcgaggccatatcccagggggccaagtactgggaaagaagctggcaacaatgcacacagcagaggaaaaatggcttacagataagttgtaatgtcaccgacaagtagtacctaaagagtaccttacaaaatcaaagacatattgcaacccgctccccagcggaaccctcgtttttctccatgcagacctggctactcatcgtcaacaggatcccccgaccaccgtgtccacaacatcctgaacgccctcccgggcagcatcttcggtgtcggccaccggacctgcaataaccggccctaaggagatagtcgggtcatggctccggaagcatgtcaagacatacttg

SEQ ID NO: 33321 - DNA, 357 bp, Zea Mays
gtttggatccttagatttagattcttgcctactgttttttttcttcttttcattagccccttttcattgctgcagctggaacaagagcacgcgtgctcatcctgtagttctgttcccacgaatcagcagttggagaaatcttcggctggagttagagtgagcattttacttctctgtcctgaactactctatcatagtctgcattggatatttaggaggggatgcatgctcatatccctaaattcaaattctgcattagtgatttgtttggatattgaccgtaagcaccttcccatccagattgagccaaagggtgtgaacttatctcggtccattgacatcgatcagcagtcggag

SEQ ID NO: 33322 - DNA, 374 bp, Zea Mays
gtaatcgcaaaagaagctagtgaaggggtatcgttggatatgggccgcccgatcaggattctacgaccacgattaaatcggtaccaactggaacgatatccagcagcggccctaagatctgatatcgagggtatggatttaaaataacagagatctaatgggattcacatgatcatggatcgatgactcacatttattcgcgaaggggtatctggcaatatgatctcagccgttcactcagcatcccacggttccgattcaacagaacgatgaggtgttcccagtatgatctccaccatccggtaaagcatcaacagaccaggcatgttcatcttcctcacacccctgcctaatcccacgccggtggctgggtg

SEQ ID NO: 33323 - DNA, 881 bp, Zea Mays
ggaacacaaggatgtggtgtgtaggaggaaacccaatgggaagctcagatgggaacgagcgacttcctcctcttcttagggcactgtcaacatgatgtcaagcgttgagcagcaaatttcagttccactccctccgcagcagttctatgtgcctgggacttctcagtccgtgccgatgcagggttttcctcagtatttggccatgcctactcctgcaccgactacttcaataccacttcagtttggagctctgtgtctgcctcattcgtcgactcagtggagttcttctgttaacttcactccgggagcttcctcttctgcgggtatttccagagcatatgcgctaccctctgcggatggcagagagtagggagacgtggtgacaggtacgatctcagttgattcgtttgtggcccatgctctttttgactctggccctagctattcgtttgtttcagagaattttgtgtcgcgggctggtctttcggtgcagaggttgggtcacccaattttggttagttctgctagtggctccattagtagctgttcagtttgttaggggtgttccgtcattcttgctgatgaggtcttttaggccaatcttgttgtgatttccttgggggcattcgatgttatcttgggtatggattggttatctcagtatcgcgcagttatattatgtttttggaagacagtgttattgcaggcgccgtcgggtagggaggtgatattcttgggaagttctccaaagttcacgttatcctcgttgtcgcaattgcttctggatcttcggtcaaggaagtcgggaattctttactccatggtggtggagggtgaggctgccttgcgggtgcaggacatccgtgtggtgtgtgactttg

SEQ ID NO: 33324 - DNA, 383 bp, Zea Mays
cacagctttagctaggaagctttagtagtgcacccataggacccactaactggtatcttttatcctttgattcacgcaacaggacctgcaggatttagaccaggaagccaatccatgtgtccggaccccttggatgatagctccaattactagggcacccgtcgcagagtgatggagcgtgcaggcttagggtattgtaccaggctaagcagctacacagctccggaccaccctaggggacgtgtgtccgttctctagaaccagaccccaggttgccagacccacaagactatagttccaaatactagcttaccagtcacagagtggtggagcatgcaggcttagggtacacaaccaagctaaacggctacacagcttcggac

SEQ ID NO: 33325 - DNA, 505 bp, Zea Mays
caaacaccgcacttaccagcaggcggcagccctgtctgggcgccaaacatggtaatgccccccaccaggtagtcatcaatagacaactcctgggcggtccctctagtctccgacaccgtcgtttcaacggcgtgctgtggcgaagatgccttcgtgggtgccactggtaccgcaggagggggcatcgctgcagccggagtggaccccttcgcgctgggctagttgaagcgggccttccgtttcttctgatgggcctcttggcgatccttatccataactgctgacacaatagcaccaatatttcttccgtaagggaagatttttcaactgacgagccatatgagacgtaaaatagtcatcatcggtggcccaaggaatagggtctttcctatgccatcgacccccagtaaccttcaacattcgcgaagatgtttcctggagttcgggagaaatcataacctccccaggcccagcacatgtccccgtcaattcctcaacaaaaaac

SEQ ID NO: 33326 - DNA, 441 bp, Zea Mays
gctcaacgaagtactgattgttgctcggggtagtaaatatcatcgtgtggatgaacttgagccactgttcactccggccaccgtgtccgcctagctcacggccgattcggatgaactcaccacagttagccgctcaacgatcgtgcgccacgtgccttggtgtcttaccacatcgcagtagctcatattacacatatctggtgatcgtcggtctgcccgccacggtaaaagccaccaatctcttgcgatagtgctcttttctttctccaaccgccaccgcgccatctcaaattcacgggccaccgctcggggatcctataaattgagcatgctgtcagttccgcaaggtagtcaagcacccaacccatcaactcgtgccttcaattgttcaccagagccccctaattgctcacttccccaaatcagttttccgccgccgtg

SEQ ID NO: 33327 - DNA, 306 bp, Zea Mays
aaagggtccaacacagagtttgagaacaaatgatagaagaaagaccactaccgaggggtcaatcatgttgcccccattagccccatggtctagatgaagtggtatcacaccccactcaccttcaacgcaagaaacgacaacctttgcagcgcacccccacacagatgcaatagtgataaattatagtgtcacagggtgggacctgcacaaagtcctcgtcgataacggcagccgagttgacatcatatttctgcacgccttcgaccacatgagcacaaaccatagcttgctcaagccagctgataa

SEQ ID NO: 33328 - DNA, 494 bp, Zea Mays
ttcactatataaaaatatcattagagttatcgttcgaatgcctccattaagttgtaccaatggacaaagttgcatctcatagacaatgaaaagtcaaaaactttattaagtagaaaagaaaggatgtggtttttttagaacaacgcaggagatctgtgagtcattaagaaagaaagataaaagactaccgaaaggtgagcccccggtacaatggttggctatgacctgaacgcctatatgatatcctcaaggccaccaaaacaacagaccccacacccaaccactaacaccacaaccaatttccaaggttgaactgacgtgccaggagctcttggagggcactggcaccttccctacaccaaatggcaccttcataagcagcttcctgaataacagcagaaacagaaggccttttcccctcgagagatagtcatttaggtcaaacacttaaactaatgaaaaaggttaaatgtcaacattgcctgagattttac

SEQ ID NO: 33329 - DNA, 631 bp, Zea Mays
ggatagtgtgtgggaacttgggattaccttctgtggatgatagcacttgacatgtggatatggtctaccattaatggtagatcgggaacaacatcaggatagggggctgcatttttcgctagggcatggggatgatgtgaatggaggtgcttgatgccttgatggtctttttaatttgggattgagctttaattggctgattgctcatttatactcatattttccttttctggctgatatttatgtatgtgcttttaaaatacaaatttagtttagttgtgtatggcgccacctccctttgtgccataagtgcctaggtggtataaagtgggttatctccttaccacaccttactgccttaaaaacttcctcaatcctcttcataccttatccctccataatttcctacaccatctctatgctccctacccagtccctgcttaccctcactcgcgaccctgttcctcttacccatatgtgttcttctagccctacatgctcccttcgctgattagagatctgttacagccttacaggcatatactttactaaacttaccagatctgagatcatttttccatacatagtttattttgaatctaggatcagttcatgtctcagaaatgtccac

SEQ ID NO: 33330 - DNA, 305 bp, Zea Mays
cggcggaccaacccagacctaaaactgaaagccactccagtcccaggctctcaaggcctgtttgattgacggctgaaaaatgctgcctgagccaggcagcccaggccctccaaacatgccatcgaagaagccccaatcacccgatccagtcccaatcacccgatccagctgtgcgcaagttactggtgtgcccggtgcgcgggccgcgtacatcctgcacagccgaaccacaaagccccccacccgaccatggaccaccagtccaccgcaaggcacactcctgtctccaccctgctccgctcttt

SEQ ID NO: 33331 - DNA, 429 bp, Zea Mays
ccgggaaccaatggggaagtgacgggggaggctcattgtggcaccagactggatgcgtggaggggcgacgacaacatgaactgaagaaccaggagcaactgggtgggcgactggtgtaggattgaggtgtaggcaagaagggacagccacaagcatagtaaggggcggcctacgcggtgcggggtgcaaccacgggcactagagcttggaaggggcagccctcggccacgccagctgtgctacagcctgtaggacatggatgggggcacggggcacaatgtagaaagccaacaaggctagaaggggtggccaatggtggggaattgggagcgttatgtgtggggtttatgcagttagggtttgctctttactgtgtgatatgggctaggacaaaacataaactatgagtcgatttcggttatcaaacgg

SEQ ID NO: 33332 - DNA, 549 bp, Zea Mays
cgggttcgtggtcgaaatcagagggcaaggggccttttcccttaccttctcctccttctggggatcggaatgtgtcatccaactctgataaacgtccagtgccaccgtctaagtcagtggatgagcgactgggtgcactgcgggctttccgtagggccaaaggcttgtgcgacagatgtgcagaaaagtggcataagggccatacttgtgcagcaacggtgcagcttcaggccatgcaggaggtatgggagttgtttacccctgaggagttgccagagcagcctgagtctgaatctgtacatgaagaccaactgtttttagtggtgttatctgaggctgtgagtggtggtccagctaaaaaggctttccaattgttgggttggctgcaccagcgggaggtttccatcttaattgattcaggcagtacacattcttttgtgaatcagtgcttaattcaacaattacctactgccctgttagtggaagcacagataaaggttaaggtggctaatggaggtattatgcactgctcttccgttttacctcgag

SEQ ID NO: 33333 - DNA, 640 bp, Zea Mays
cgtgccacaggaagagtggataacatcgggcttggtgagaatatccagtgtggggtgaatccggtcgctggccggaccgatcgccgtgttccgccgtggttaatcgcgctggcatcaccggagttcaccgttatctgaccaggctacattcctcgatgccttaccacgtcgcaataatccgctctaggtagctcgttcatcgcctaagccactgccccagtaaaagccacgaatcacggcgccagtgactcagtccctctctctgggcgccgcgcgtcttctcaaaattagccgccaccgccgatggcacctataaattgtcgccccagtgagctccgctaagtaatcacacacccaacgcacccgcccgtgcctcagattgtccaccagagcgctctaattttgaagttcccccaaatcagttagaactctgtcgtgtgtgagctcgtcgtggccagctctccacaggtccgatcacgcgctcccagctcttgttttagcactcttgtgtgctcttgatgcttctcgacctggccaattgaactagaccacgctagatcatcgggaacgcctcgattcatccgtagttcgtgctatcaccgtggacagagagattaggagctagaactttgcaattgat

SEQ ID NO: 33334 - DNA, 389 bp, Zea Mays
cgtttccacggtacacaacctagtcgataaaatgttagagcacaatgattacacgaaaatgaataacacatatattattatgaacgtcataggtagctgatcactgaaaatgatggaatgattggtgtttacacaaagttatacaatgttaccagtaatataaaatgttggacacaattagacacattccttgttgccatatttatattttatctgaattgtagggttcatatcatggtttaaaaggcggctaggcagaactaggcgcccagccaccgcctgaacgcctaggcgacttaggcgggcgcctaggcgacgccttagtagccaaataccaagcaaccaaacaactgttacagctcataaactagaaatcatcacaaatttac

SEQ ID NO: 33335 - DNA, 708 bp, Zea Mays
caccgccttaagtcattgctgacttaagtcgattgctccgttagtagggtatagtggtcaccctgagttaagtaagtatgccaattgacagcaaacgatttgagtgcctttgaagtctttttattgatgatatgtttctcaatttccagaataatcatcgtcccaatagcttctgggatgtagctaggggtaaaactttctgaggtgttctatgttccatgagttcccaatttccgtgctgtccatctgagtgagacgatatgatcccggccgagtgacttcagctactatgaatggtccttcccatagaggtgacaatttgtgccgtccctcccccgttagaattcggcggaggacgagatctcccactacgaaggatcgatgtcgtatgggccttatcgtgatagcgcctcagagtttgctgatatcgtgctgattgaatcaccgtatttagtcgctcttcttcgagtacatcaacatcctccagcctagtagcttcagcttctgctatgttttcaaagattaacctttggtgccccgaacttgagatcagcaggtagtactgcctccgaaccatagaccatgaagaaaggtgtgtttccatgcagagctcgactaggttgagttctcaggctccaaacaacatacgacagctctctgatccactttcctgcgaacttttcattcttgtcgaagactttctttctg

SEQ ID NO: 33336 - DNA, 501 bp, Zea Mays
cgataatgatgagagtctgctgctactgggctggttgtacgatagtactactagtgatggacgatagctagcttctctgctctggtcttctctattctacgtccccgatcaaacgagagagggatggcccacgcagacgcagctgcgtcctactgtttgcatgggctataaaatggaccaccacctcaatcgatatggacggtcgggtcacaatcgccactaccatacccgctagtacatactagagcagctgatggcctcctcctccgtttcgctgctcgtcaccatcatgttgttgctgcttctgccgacgtcacttgtttgctcctcgttgagttgcaggcttgacttcaccagcgtggcgctactctcctgcgaggagacggcaccacaaaaccctactgcctcatgctgcgacgccctcctctattccatcgacatatggccaattcatgaaatggaaaaaggtctttgctgcctatgtgtgtacatggtttaaac

SEQ ID NO: 33337 - DNA, 326 bp, Zea Mays
ttggaaacaaaattcaagcgtgccaagctgcttataacacagtatgcacgtacataggcatcagggacttagtccaagagcatattgcttatagagtgtggccactctcaagtgggtgggagatgccgaaggaaactactgctggtgagagcacctagaggggggtgaataggtgaccctacgaatttcaacactaaatagccaacactcggttatgaaatgttagtgcaattaaaaccaagttcctaaagtgtgaattctagaagaaagccaatcacaaataagatggacacaagacgcagtgatttatcccgtggttcggccaa

SEQ ID NO: 33338 - DNA, 420 bp, Zea Mays
agaaataaggagaaaagaaaatagaaaagaagaaaaatgggaaagtagcgcacttgggccaatttcgctttgctcggcccatttcctttcccttcccccacgaccgtgcatcccaatcccttgaaattcggtgccgacgcgtggggcagggctgtcagccccacaatgcttgtcgcgcacgatcgcttccacgccttgcgtcgctattccgcaggcccccctggcagtcaccacacctcacctgcatgtgtatggattaactacggacttcctctattgtgtgggcccgggactccacgcgttgttcatcttctagccggagagtattcgaccggatggcgcggaggttgttacaaccgcctctagccccgcctcggccgcagcttggggcattaataccagggggagcccttgttgtct

SEQ ID NO: 33339 - DNA, 390 bp, Zea Mays
ggcaagttgtcttaatgttgagacccctctaggtgcaactgaggaggacacagttctggaatccttttcagtgaacttgatcctttctgaagtgacattgatggcatcagatgcaaccctgcagcgtggtgacatacctcgcggtgttgcatatgaggttgatggcctgtctagtccatcagcaagatctgagccttttgatacagtgccaacaccatcagaggctaattgaagtcttggtgaaatccctcgtgagaccgctgaagaggttgatggcctgttagcgtaatcaccaaagtccatgcctttggttacaccacttatgccatcagaagcaagccttcttcgtggagacgtcccatgtgatatggaagatgaggtggatggcct

SEQ ID NO: 33340 - DNA, 500 bp, Zea Mays
atatcataacttagaggtcataattattttaacttagtaatagtctcatgctctcataaaacatggaatacacaaataaacaaccactagaatttcttatcgagtccacaatgaagccacacaggggtagtttattcccatctcgtcctgttaatattcgggggcccacccagttagccccgtagaggagaaaccatcctcgtaccctccctgaacaggtcagatccccgtggggaattttgctatccctaattccaaacgacacacgaagggtaatgggaaaagaaaaacgaaggttgcttcgtcgtctccacaaggagaggatgccatcaaacttaacgaaaacaatggcgggtacggtccctgacccctccactgccaccttccttgtgtgttgcatttgcctttgtctcgccgcttctcacatgtacgaactatcctcttctatcgggcttccttggattagaagtcattgtgtgttagggttgcttccttgcgtt

SEQ ID NO: 33341 - DNA, 518 bp, Zea Mays
ctcgcctcagcaatggccgagctcccgaggaccacccctcaggacgctgccagcacacccgacgttggcttcgacaccctcaagtccgccgagggcgaggaggacgccccgactagcgctgccgacatcttgaagtgtgcgtggatcggtgcaacatcccccaacgaatagacaggagcaaaggcaacagcaaggaggtcgcataggcccttagtaggcagggtttgtaagaaaatgactccacctagtgcgagttgcgaatcatgtatttactaaggaaaaatcaatgagaatcgggggatgcacgttaacaactccacctagtgtgaccccatcgaccagtccggtgcgaacacctcccttcccaactccactctcgataacagaacttgacgaccaaatcgccagggcaaccagatccccatgttcccctcgggggggaggagtgtgtaccattccaccttttcaagtaacacacatcccctcgccacaggccatcccaagaagaacccataccc

SEQ ID NO: 33342 - DNA, 656 bp, Zea Mays
ctccggtgagccacggagggttcagaggaggtcatggcgacacggtgaaagtgtagagccacgcggcgaacgccggtgatggctcaacggcggtgaaatccttatccgagggatcggtgagcaagggggaatggactacggcggaccgaggtggcatccagttcaccggcgacaaagatctttaccgggcggaacttatccgatggccaccgagcacgaatcacgacgaacgacgatcgacggcgacggctatcggcgacgagcacgggggggggggggggggggtgaacctgcgatcttcttcagttaagcggtcactgtaccatgggaataccggttcagagtgactgagagtccagtttccagagcccataacttccaattttgtgcagcaactcgattgcctttcttaaacaaaattgtagagtaatataccatctaaaattcgactataggacttgaacatatttgggcactggatcatgcttgaatctgagctagaagttgatgtcagttcactgctaaacagaatttcagttcaaaacaacctgacagtcgaactttgatggggtttttctctaagtttctcataacaactatgcctgcactctttagcaaagttgttctcctataattgagcttcaactttgatgtgg

SEQ ID NO: 33343 - DNA, 932 bp, Zea Mays
cttatggtggggatgaggaggcattcttgaagaaagtggttacacctttctatagagtcatcagaaaggtactttgataaatcatcactgaaaaatgagcagttttttttgttaaatacggataattgtgattatttgcaggaggcaggcaaatcacaacatgggaagacaccacattctgcgtggtctaactatgatgacctaaatgagtacttctggtctgttcactgctttattttcttagtacatatctactccttcgtgttttttaaagaaacagaaggggtagccccctactggttaaaatgtatttataatagaagcaaaaggagtttgtaagcaacataattcatgaagcataaagggacacaaagaatattaaaaagatcacaatgtattgcgtgtaacaagtcctactccattcactcaggacatctgattgtttctcgcttgggtggcctatgcgggatgatggtgactttttcaaatccgtgcatgattcaaggcctgtaacaacggtacaaatttgatattcgtatgtgttctgtcaatatttcttgacaacaaatttgattgggattgctttgtgacaaactttatttgtaggctggaagctcaccacaaaaggattccacgaaaagtacagggaagacaaatttcgttgagactagaacattttggcacatcttccgaagttttgaccgaatgtggactttctatattttggctctacaggtactatactgaaattgtatatggatgttcttttatcttgactacagtttgacacctgctaatattctagtatcttatttaacaggcaatgctgatttttgcttggaatgattattcagtgaccgaaatccttcggaaagaccttttgtattatctatctagtgtattcgtcactgcagcatttctacagttcctcc

SEQ ID NO: 33344 - DNA, 2166 bp, Zea Mays
atttagtgtcagtaagcaatccatgaatgcataatttctgctccagtatttgtgttttaactaagttagattctggtttagatgcctatatgacactacattcttgttaagttgatcatttaattagtttggtacctccagcaaatactgtaaatatgtttatggaatatgttaaatacttctgtatgtttgcttgccttatattttgtattttttctgtatagggctttgtaaacctgtcatcctttggataggagtgcatgaaaatctgcaatccatgtgtctgaatcatgacctgctattacttttactttatcttcctaagcattaaccttgcttctttgtatccccttaactggtggcttgataacactttgtattatgcattaaccttgcttctttgtatccccttaattagtggctcttggtaatgctttgtacacctgcattacattatagtcaagtattatgtttcataccttgcagtctgcactaacttgtaaaatagttcagataattggcacaagaacgaaactggcttatgcccttgcaaagcaatggtttggaatatacacaagtgcagaggagtccagtgacggtaattcatctctagctgttaatttatgtagctatttcttattattacataggtaaaacactgttgccaaacaatatcctgcatgaacagaatggcttttggatggtttggctggttttctaactgagttattatcaagcgttaccttgggaataacgaggcgcgttataggcgtttcaagattcgtcttttaccaaaaacatttgttattctgattcttgttaccactgaatgatcaatcatacgaatattttgaatagcacatctatagaataagtgaataaggtttgtttaccattttatttttttcacgtaggagagctgagtgtctttgtcttatagagagaatgggggaggagccctgtacaaagcaacctcccaacctcatcaagtggcatgagatgacatgcagttctgctgcatcgttcaagaaaaaaatacagcttgagagtaatcacctgttaaattataataaggacaacctaatgcagaaggcctcactctagaccctcctctaatggcgaatctagacaccatcttattataggtttattgaggattgcatatcaatttgtggttttcatctagcaacatttccttctgccattaatatacacaattcattaactaggtcttattttcataagaattgaagatcatgattaacatcttcttttgtatttgtaataggctaactgctcagtatgtgaatctgatgttagtggtgcaactgctttgagctctactgctgcttcaagtgatttatatggaactcaagcaatcggttcatatgggaaagttcgttcattgaaagctgtaagttttgagcatttcaagtaccatactggtctatatatgtattcttctctctaattttctcttgaattttgaacaggtagctgttttcaaatgttggagaagcagatgggaccagactcatttcggaaggtattttcatctttgatacggctattttctcatagttatttttttgtctaaataattgcaacactttggctaagcaactaaatcgatgtggagatgtacaagactattcatgatatgagttactgtgtttcagatactaatcatccttttttttatctatatccatagttgaaaattctagatagtatctgggtaggagtaaagtacctattggctgttttttttgtacgcggttatttcttaattgaagattatgtatatatagattgcttctgatagatttcaattgttcacaatttcagattttgcaggtgatagtggctccaagtcgtgcataaaatctagtaagatgtgacctatatttattgttagatgcattccatcttatcagtttatgcttggtaggagcaaaatggtttgatatgattagttatgaacatacatggtgaccttcatggaaataagctagtctgttcaagatagtttttttaggttaactagactgaatagttttgtagacctgtttgctggtctaatgctaatgctttattcattcagtgccgaaatttacagtggtgacttgtttgcatgatgtttagacaatttgtctgataagtgga

SEQ ID NO: 33345 - DNA, 476 bp, Zea Mays
ctacggtggacgatcgggcgcgaggagtggttcactgggttcaatttatagaggacgaccgagaggagggaaaatttggacggggaagcgctcgcggtgagaagggggaagagtcaccggaggtcgctaacgtggcgctcactggctaactatctacgacggtcactgccgagtccttatagcttgcgacgacgtggtgaatcgactacggcgtggcgcaatcacagtgaacggcgatctccacggcgatgaccgtctggccacgtcgctacgcaagtgggtacgacaactgggcagtaatagtgccccgacttcatcccctgcgcgatatctttcaccctacgtagttatccgcacgccaccaggcacaaatcgcaacgccgacgaggatcacgacgcgggatcaccggtggcggtgcactgaacctagcgatcttcgtcaggttactgtaccatgcgagttcctttcagtgtgc

SEQ ID NO: 33346 - DNA, 428 bp, Zea Mays
cagacagcgacggcggcggtacctccccacggcggagcgccataaccgcgattcggcccgatccacgcagtaatcaagcttcaagtaggaactactacacgatatagagataagggagagactagctgcggggtcctcaccgagattcgccagcacaggaggaccgccaacgacacaaggtggtccatagcggtgcccagtaactccggcgaggaaatctacttcaaccagccatcctcctgacttggcacggccctgagcaccgcgagcgccggcgagaccaaaagagtcatcaaggagcatggccgagggcacgggatggctaggcgagatctggtggtcacgagctggttttatgcaccgggacgcggagtccgaactcagtcctaacaaccaccacgactgagccaaacgcagcggcacccgat

SEQ ID NO: 33347 - DNA, 734 bp, Zea Mays
cgggggggttagctgaaagttattatctgaaagactgcgaggtgggaccatggagcagcaagatgggactatcacaagagcacgactgagggggtagtttcttcttcataacttgtcgtgcatgtgtgcagaccaatagtccgggttcatgggggcagaccccactgggttatcatacacgtatgtgtcatttagttataaaaaaggaaacagactcgacccccttgtcttgctctatggatagaacttacagagatatttggcatcagggtaaggtactcctccactcgtagctagatagttacccctgggtcggtgcactcccgttaccttggagggtccttcccagctgggggagagatgcggagcacctctcggtgtggcacttgccgccgacccagggtttctatccgcatttgacacgggaacccctgtctctggctgtgatcacttctgcatgtacctgtctgcagctcggacccgtgggaggtccggaagggcctccggaggaaggcgtgcttcagcttcgtagaccgggggagacagagttcccctgaggtccatctagttgtcttcaccggagtaggagcctccggcaaagatatccttcaggtccccctcgggcgactgatacccgaggtctcgttcagccgcggccacctcaccgtcgttcgccttttccttgccgggccggcggggagccgtctttggaggactgctcgcgccgctcgctg

SEQ ID NO: 33348 - DNA, 572 bp, Zea Mays
ttcggtcaccggtaggctgggcggtctcatccggcgggattcgggggtggagctctgcctcgccgtcgtgcgcagactgcctgtggtgagggaggaaagccgggaccgttgactcctcaatctacggtggagattggtctggggtaccgcttctggttgcggtgatctttaccgtcgatcgaccgatggagggattagggccgatcgtggtatggcttatcgtgggccatgggatcttgggtgtgtggccaagattgggagtgggcaatgtagatcgtggttgttggatcgcttatgtgctgtgcagatgagatcctagtgtaaccctgcatctcttctaatcggcgccatcggatccgtatcgtgcggtcctgattagaagccacatagtgtgtcctcctctgttgatctcggccataaatctagcatcgggtggctgatatggaataccggttcatttaaaggccaaacagatctgtgccatccggatctaatctaacgaccagaacggatcgataccccttcgctacgtcacatttgctaaagagtccctgtgcttaattgaaataaac

SEQ ID NO: 33349 - DNA, 423 bp, Zea Mays
gaacatatttgtttgtaagcatatttactatcttgagaaattttgcggctatagatctaaaagagacgctttggaatttcactttttatacaggtaaagacaacagttcagaacgaggatgaaagctttcctttttttccggaagggtgtgagccagcagatgattctaagaaaccctgctcactccatttacttccaacgttagcttaatcacagagcacaccagatcaacatcgagccaggcatggctgctaggtaccgttcgaacactaaagtagtgtaaaattgtaaattcatccagtcctcaagcaaacagtaccgagtgatgtccgatccaattgccaagtcaaacaacagtctcttagcacatcaaacacggaagcagcagtgagagcacggaagctaaccaaaaggtcaacatga

SEQ ID NO: 33350 - DNA, 411 bp, Zea Mays
aaattgggaggctatggtggacgatcagaggcaagagctggtgcactcggtgcgtaataacctagcagagatcactgggaatcaatttataaagtccatcagcggtggcgtccaatttggagaaggcgtgctggcggccggagagaggggaagttcacaaacgcgagttagcgtggcattcactagagcaatgactcagccgatagacaggccatctatagcgacctacggcgacgtggtaacaaggcagtagcgtggcgtgctcgggttgacgacgatcatcaccgtgatggccacgcggccacgtcgcggcgcaagtggatgaggtgacagagcggccacagtgcttcgacttcatcccgtgccaaagatctttcaccccgagccattatccagacgcccatgggcgtg

SEQ ID NO: 33351 - DNA, 427 bp, Zea Mays
gagctccccacggtggaaagctcgccggcgcacggccaaccagcgaccccgcaccctaaactcacgaacaacaaatgctacacgacgcagagagccaatcgaacaaagactgtgatgtcttatcggtgggagaagatgtcagcaggtccgaccatggtgtacggtgggctaaagacggagctcggttgatggcaggggcacgggttcccaacaacgacccaatatctcaagctcgctctccttcagttcaacgttggtgcggctcccacgagctttcctgaactcctggaccgcatgtcgggaacggaacgacggcgaggtcgagctccgctgcgaccggtcccccatctctctcatcacaaccaatggttcggccacggcttggcttacttgatggataagagggtagcagcaccaccatttttat

SEQ ID NO: 33352 - DNA, 353 bp, Zea Mays
atatccgaggaggagaagttgtatgaggagaagaaagttgcagacccttttcttgctaggttttacgaatctatggcaaaaacaaatacataaaagatcacaaagaaaataatggcggatttgtctgaagattctgatgatagcgatgactatgatgtgcaaagtggggatgaagattctgaggaccggccctggcgaccaagccataccatcttcgaaaagtcaaccattaagcaaagtcatattgacgccatgaagggaagatatttttgtgacatgtctattgtgagggttggaggaggcagcactgcccctgctcatgaagaaaatgaggttgttgtctacaaaagctt

SEQ ID NO: 33353 - DNA, 454 bp, Zea Mays
gcgcggcgaaggggtatcggaccataacagccactcgatcgaaaactgacggtccagattagatttaaccccgccaacacaccagagccgcccgattaaatcctacggttccaatcgtaaatgcccagatctaatgacgcacacccgatcctgatcgaacaactcacgctctggttgcccctagatccaatccggtgcgcacaacacggatccaacggcccagatcaacttatgccatgatctaatcctatccgcttatccccgatcggacggacagtatccagtcaccctcacccggttgtattagacggcgccgccgcccgatgtccacggtggtgaccccgccggagccacgccgtccggtcgattctaggctcccacaacgccattcgaaggtcctacacacaattcggaagatggcgaaatatactagggactcaccgtaggtagagat

SEQ ID NO: 33354 - DNA, 489 bp, Zea Mays
caatcaagttggtcggggagaatcaggggcacacaagaatactaaaacgagagggcagagggcatgagcagacctgaatcgagctggccacggtgaggatacattcacggtggcggaaacttagtttgggggaagtgagcaattcgtagtctctggtggataattggaggcaagcgtggtgcgttgacttcgtgataacatggcgcaacagacccgaccatcaatttataggatcgctaagcgatggctagggatttggacgaagaggcgcgacggtcgggggaataggaggtcactagtgctcgggttagtggctttcaccgtggcagtacaccggcgatcaccgtgcatgcgagacgcgacttacagcgacgtggtctaacgctttagcacgtggcagacgatcgacgggcaggcaacaccggtgaactgatctgcgctggccgcaaggcatgagggtaaggcggccagctgccggagttatcccca

SEQ ID NO: 33355 - DNA, 522 bp, Zea Mays
ggggaaatagatgatgacgtggtagcatgaagattcattatcttctttggttgaaagacaccagctttggcacgtgtagtcatgtggtgctgtgtaatagcaggatgagcaaagcgaaaaacagagggagaagaagtcagagtggaatccaccgtgggacgtgcaggtgtggtcacatcgcgcgaggacgtggatgggagagatgatgttgtacccgcactgtctgtaggatatgggtgtgcgtcagagaggggttgttgactggggactggacctgctgcatgtgaactggggaacgtggtgctacaggaccgcgccgggtattgcgccgaacagggaccaggtcccatcctgagacaggaggatttgttgcgaatgtgtggggtagggaggctgtggccgggtgtgtggcaaatggaaaaatagactcatcaaaaacaacatgccttgagataataattttcatagtgtctaagttcaagcacctgtaacctttgtgctcaaagggatagcctagaaaaa

SEQ ID NO: 33356 - DNA, 515 bp, Zea Mays
aacttatatttccttaggaatgacatcatgaagcaatatgagatagaaaagaaaaaatccattgctttcatggcaggaaacaactctagggttgctatcactactgatatgtggactgcagacaactaaaagaaaggctacatggttatcacaacccattgatcaatcatggaagcttaggagcattgtgatgaggtaatatgacttgttcatggaatcatggaaccaatttttactattgtatgtttactgttgtatgttcactattgtaggttcatttatgtgccaagtccacatactgctgaggttatcgctgaagagttgaatgaatccttaattgcatggaatcttgatgagaaggtatcaactatgactgttgacaattgttctacaaatgataaggttatagacttgttagtgagaaagatagggaaaggtaaacttatgttaaagggtagcacattacacatgcggtgttgcgcccatattctcaacttgattgtgaaggatggttt

SEQ ID NO: 33357 - DNA, 282 bp, Zea Mays
gtcaaacgatgtcccgtacagtaagtactcccgtgtaactagacaactgttccttaattacggtgttgtgcagtatatagcggaaatgtagtgtttgggcccgcttgatcaagtcccaacacgcacgtcgctctcggagtgtacatccgtgacacgtggtccttatagcaggaggcgatgtatagctagcaatgtgacggagggatcgatccgtcggcaggcatgaccgtgccgtgtacccaagtcaccgtcgtccgtttaggtgcccgtgcgttgctacgg

SEQ ID NO: 33358 - DNA, 295 bp, Zea Mays
atcaatactattatttgatttgaaatatattattggtaaggtcgcgtctctatctatctataataaagaagagaacagcgtgagatgccgcgtctccctccggcagccgtcgcctcctcgcccaaaatatcagccgtcgcctcgcctcgcctcgccgctagaacattcctccgtttcgttaccttctctttgcccaacctacttgattacatataaatacaataaataccactagtatccttttttggggggccttgctcagatcaagagaagaggcaagggcaaccaactccag

SEQ ID NO: 33359 - DNA, 406 bp, Zea Mays
gaagccgatcaacaaaaatgcatataaagcatatttgtgatgcataaaactagaagtccagaaattaaaacacaagccaaggtcaactagccgcatggaggaaagagtttgtttggatttgtctcctactagataggataagtcagttttattaggctaaacagtttcctattgtttaggctagaatatttcccgttatttagattaaatcagttgttgcatgctcgatcagaaggcttatataagcctactgtacgctacagtaaagaggaggcaaaaaagaattcttcattacttttctggtttacttgtcattatttctttctctgttttcctttggtgttttgccgagaaaaacacccgaaatcatctccgcgaaagtgagatccatccaatccaattatcg

SEQ ID NO: 33360 - DNA, 292 bp, Zea Mays
ggtccttacccagagggggattctgctgatgctggggatggccgagggaaaaaggtgaagatccggtctgacgaaggcacctcaaaggggaaggcggtgattgcggtgacttggaagaggaaaatggaggcaaaaggtatgaagagggcaatggtggggccaagggcttctaggtgttttgttgaggaattggtggagacatgtgctgggcctggggagattatgacttcacccgatctccgggaaacatcttcgcgaatgttgaaggtgaccgggggtcaatggcatagga

SEQ ID NO: 33361 - DNA, 482 bp, Zea Mays
cccagacttccttctcagcccagcgagccactccctgctgccaccgccaaacgaaccagcaaacccccctcgtgttcctcctcaagctcggtcttctcagagcaaccgccctgctattcctctggcacgcagcacgctccacgacctccacttcttccggttgagggcgcaataatgaagataaatagtgaccatgctgcagttcgtcgacgtcgcccagatcgactccattgcctcccaccatctccaaaatttgtggcggagcactcgccaacaccagagctgcaggggttcctcgccgccttgaccacccacacctttctccatcggcgcgacggcttcagagccttctccaaaatctgtggcagagcgctcgctgatgccagagccacagtgcttcatcgccgcctcagccacccacaccctcctcctccatcggtgcggcagcagcggcttcacgcacggtaaaatcctaattcacc

SEQ ID NO: 33362 - DNA, 379 bp, Zea Mays
cttcttctattctctgcattcagcaacacgcctcatttcttactcgtcttcccgttgttgctcggcagcaagctcctctcgtcttttctccatcctctctttgtcctctgcatcccactttttaagattctccaaccacttcttgtctttctgtgatatttctgtgtcaatccactgctgaaaatcacaaaacggtggagtctacaaaacatgcaatgattagtagacaaagaaaacatgcatctctcgagtcttcaaattgttaacatattaaaagactattctcaccattaaattcatccggcgctgaacaatcgttgtctcaaatgcatagttagcacacattcaatacctctgtcgataggtgtcatgatcctca

SEQ ID NO: 33363 - DNA, 400 bp, Zea Mays
ttgggtctccatccagttccgtcgcccggttcgtgcactccagtgtgataacggctatgagttcgacaactccgcctctccatcctttctctcccaccgcatgcagttgcgaccctcgtgcccctacgcttccccccagaacggccgggccaaacagattattcgcaccaccaacaacatgatctattgcctcctctttgaggcatctcttcccgccaactattggacagaggccttgaacactactacccatctcctcaactatcttccctccagggcagtgagccaccccacccccagttcgtcttgtatggcacaaccccctcctatgcccaccttcgtgtctttggttgtacatgctatcccaatacctctgtcactgctcatcataagctctccc

SEQ ID NO: 33364 - DNA, 528 bp, Zea Mays
ggatgtggctgaggtggagacttctccgcgtgttatggatgctattcccggtccgagtgctgggtgtaggcggcgaagggtggtggcgaagcgtagggtgagtgaggttgagggtggtcgtcttcgtgtggacagggctagcaagcgggaattgttggcctcgccggctggggtgagcgtaggtgagggggagttgcgaaatctttttgagggtgaagagctgaggataatgctgtttaactatagggagatgggtatcatcccgaaagttgaaccaatgtaatgtgtggtgccctcgatgcacgtatgtaactgtaatttgtatgatgagtctgtgtgccttcgctgatccagccgtgcctgtgggggacttgtgcatttgatctagcgcgtttattatgccggtccggctgcacctgtaatcggtctttgcgcggatagtttttcgacgaagattttcgcacggatgtgccttcgattttgcgcacttgttgtgctagtccggctgcacccttgggtgacttttgc

SEQ ID NO: 33365 - DNA, 321 bp, Zea Mays
tgtcatttagatagaatacccatgtgaatcttgagaattcatctactatgacaaaaccatatttattgccaccaatgcttgtatatcaggtaggttcaaatgatttaatatgcaacaattctaatggcctactaatgtccatcatgatcttgttaggatgagtgttccaacttaatttttagcttgacacgagctacataatctatctcaaatttcatatccttcaacccccttgactagatcatgtttgatgggtctatctagttgttttatgcttacatgtgtcaattttctatgccaaagccagcctaaacttgattt

SEQ ID NO: 33366 - DNA, 422 bp, Zea Mays
gtatcccaaacctgaatattatgtcttgtatgaactccactgccttggctaaggttaaagaagcaataggcttgtattctatccatttggtgaacttgtcaatggcaaccagcatgtgggtatagcctccctgagctttcttgaagggtccaatcatgtccaatccctagcatgcaaatggccatgttacaggtatagtctgcagctgctgtgccgataaatattgttgctttgacaagaattggcaagcttcacatctctggactaactcagcgacatcactctttgctgttggccaatagaaaccggacctgaagactttcccaaccagaggtctggatgttgcatgtattacgcattgtccaacgtggatttcatccaatagctgtttcccagtagttgaggaaatgcacttcatgagg

SEQ ID NO: 33367 - DNA, 633 bp, Zea Mays
cggcggggttgtgtaatgtgttagccagatgacgcttcattccaatattttctgcgcctctgtggcctgtgggctccgtggtctggcttcagcataggcccatgctatgcacgcaagcagtgtacgctgatgcgtgtaccttgttgagtaaattgctgcatggcatctgcctctgcctggccatgaatggatatcaaaatcctcaaccagatgtgaccacactctgaaaggagacaaaccattaaaggccacagagttgaaggactccatatgttgacctacctgcccactgctcgatcagcaccatggaccaaatccttgcatacaaacacctcgcttttggtaaactatgggtaaattactgcagcagacggtctaatggttatagtatccgattcacgcgcgcaaggaaggtttgccaacgcacgcaggtggtgttcagtagtgggactcattcggcggcgtgggatgtggtcaccagtgtcagcgaatcacgctgcattatacgtacatttggttccggactaccggcgtaggagtgagataatgctagggcatggagggacgctgtgttattaaacgccgttacttgttgagacaaacaacttcgccgtacgctggctgcaacttcat

SEQ ID NO: 33368 - DNA, 302 bp, Zea Mays
agcaaccagacagtggagtttcggggtcagggagacgggcgatttggggaagacgactgaagatgaggagagttgtgatgactgtgagcagcaaagcaaatgcctccgatgcaaggcgtacggacgaggaagagggaggagcaggcaggcaggcagaggccacccagagccggggcagtaaatgggggatggtgacggtgatggcgcccctccctttttcctttgtcctcacccttttgggactgccatttccggcgtggctatctgacgacctccattattgcgcttggtgctcccctccc

SEQ ID NO: 33369 - DNA, 540 bp, Zea Mays
ctggaaccatatcttcaagagtctgatcaaagtttgccagggacaattcttgtagaccaatgagggcagacagagcaggagaaggaactccactactttccccactggcgacatactgtcgactgttcttccgagtcaaagggacctcatcctcttcctccccgtcgttttcatcagcaacacagacaacacacccattggggtcagcagcagatggagtacccccattggggtcagcagaagatggagcacccccattggggtcagcagcaggtggaacacacccattggggtcaacgtcagtaaattcaggcacaggcacttcttcagcagcaggaactgaaggaccaacgtcctgatccaaactagatactcgccgaaggcgtctctttttcttcttctgctcatcaccagaaggatcaagttgattggctcggcaagggcattttgggcgaacactgacaggtctctgaatatccaaggctgtatcagtttctgggagaggagccaccaccagtgtcccagcaggagcagtgtcag

SEQ ID NO: 33370 - DNA, 514 bp, Zea Mays
agttggtttacctcttttgacaggagcaaagaaagacactgaacctgaggcaaaactaacagcagccacgaaaatatctggtggcaggcctgtggaatcatcaaacaaattggttaacgcagctcctaccaggtgctcctcacagcgtgcaaggcaagaaactgcaggcagtggtaacttgagcgaggaattagacaagaagaaacaacaagagtgggataaggaaactacagaaggtcatgcagtgagccagcatgaagctggagcagaactagacatgaccatgattgtgcagtctatgaagcgcggaaagcgttcagcccggcgcaggagacagagttctgcacaactgcttgggtttaacgtcagaaacatggcgaaggcaggtcgaaatgatcaggctattggctcaaagaagatgaaaagaactcgtaggggcaccaggtcgttgtgcgtgcataataggggagctaaggaaaagaagtgtgttggaggtgaaagtgatgcaagtcac

SEQ ID NO: 33371 - DNA, 278 bp, Zea Mays
gtttatatgtccatgatcatcctgtcttttgagaccctttcctattctgttgttaagtcggtatctttcggcaattcgtactcccttggtcttggtatgctcgcaccttcataatcttgcatacttttactttttatataaatgcttacctttgtaccctaatgtctgtttaaaacatttcagtttacatactcttgaccacctttgtttcttcatgatccatgagcgatcgttccattcctcacatccttaatgatctcatcgtttccatataactt

SEQ ID NO: 33372 - DNA, 388 bp, Zea Mays
gcaggagatgacctctcaccaaagttcacgaatggagagtactggaaaaaggtccatggaccggtattcatgtatcttaattccagttgggatgcaagtgacccaactatgctatgggaagatgcaaaagttcaggtgattatatttctgacacgtaagtgcttgaggatagtacagccagagccagcgagtaactacttcggtgctgcctatctatctgcatgtcatgagtattactgaactgtggaagtcgctttgttttctttatttatgttttgccttgtgtaatcagatgatgattgagaaaggaaactggccgtactgttttgcactttcagaggattttcagaagacagagcaaaggggttgtgtctctggtagattacta

SEQ ID NO: 33373 - DNA, 416 bp, Zea Mays
ttccaccgcatcgtcgtgacctcctctagcttcccgtcgatcaccagagttactgccacgtcgtggaacacgtattcactgcaaccgtcttcttcttcatttccggccgccgcgcgtcctcccaaaattcactggccaccgccttgccctcctataaattgagcccgtgaccagctccgtagggttatcagctaaccagccaccgccaattagccacaatcgttcgccggagctcgggaatttcgcgttcgccccaaatcgggtttccgccaccgtagaatcaagctcaccgcggccagcccattctaggtcagttcatccctccttctcctttgttcgagcactcttgtcacttagtgatgttgaccgaaccgccaattgggacgagatagctctagatcaccgggaatgcattc

SEQ ID NO: 33374 - DNA, 863 bp, Zea Mays
atccacaattgttgaaacaagacagcagagagcatgaacagacctgggattcgctgaccacggtgagggttctaccacggcggcggaaatagaattgggggaagaaggaaattctccggctatggtggctaattgaaggcggtaatgggtgctctggcttcatgatagtatggtgcaacatgccaggccatcaatttataggagcgcaaggcggtggtattcaatttcgcgatgacgcgctggcggccggagagggagaaggctactggcgcagttgattcgtggagaataccgtggcggactcaccggcgatgatcggatggctaacgtgagtcacggcggtgcggttaaaggatggaggcgtggcgcaaccgcggtgagtatcgcggattctgatgacggccgtaaggccacgtcgccggcgcggggaaccgagggacagcatggccacagtaacttgaacccattcgcgacgagatctttttgctggcgaactcaatccacagcccagacgcatgaatcgcgacgagcagcactaatcccggcgaagggtcaccggcggccagctcactgaatctgcggattgtttttggttactgtacccatcacgatctccttcagtctttctgacaaacagatttgtgacgccaaaatcttgaattttcgcataagaacttactaatccgtttgtagcaaacctatagccctaagatctagctataaaccgactgtggtaaccatgctcaaacatccacgggatcatcttcaaaatggcccccaaagttcatcctatgccactgaataccataattcaggttttagaccgactgacaacccaactttgggcacatttatctcaaaat

SEQ ID NO: 33375 - DNA, 354 bp, Zea Mays
tcattccttaaaccaaacaccccataaaagaatgacttgagccctctcgacagaccatcagcagtagaggggtccgcatacataagagcaatttcatggtctgtcaggtttctctcatcatgaatctcactgaagctcctatcatcagagccaaaacccaacagacgagcaaaggtgacatagtccagcctatagtgccttccttcagtcattcaatgcatcacatcacaggatgtctcacagtagtaggtagctgagaactgatacataatctcaatgttccaattgtgctggaatcccatgatgtcatagaggccaaatctcttgcaggcattcacaatgttcttcaatact

SEQ ID NO: 33376 - DNA, 800 bp, Zea Mays
gccatggctacccaagaagaaaccatggtaactgaatcatcaccctctagtgattcatctatcactattgggttggccgtgagcagctccaagtccagcaagtatgcagtgaattgggctctgaaaaacttcggtaccagacagaggataaggttcatgctcattcatgtccggcaaaaggtcacactcgttccaaccccgagtaagtaggcattcttcagttcaaatgtgtacattttcttgcagctgcaaatctagttggcaaacaaaatttcttgtttctttgtagtgggcaactatgttcctgttgatcaagtgagggatgacattgccagtgcatatgaaaaagaagtcgaatgtgaggcccaaaatatgctccttatgtacaagaacatgtgtgatggcaaggtttgagcctccttttttagacatattttcttcttttgaaaatttcacattctcaagtgtacagtcaaaccaaaaagatatagcgtgaataacaagaatgggcaacaataattaggcatgctttatgaattgatcaatagtaatttcaagcataaatttatgaaagcaggaagtggcgttagcaagcaataatactatgaaatttgaacaacctgctttacatttgtgatatcttgttaaggggcattagcaaacaataatactatgaagtttgaatggcctgctttacatttgcgataccttgttcaggttgaagctgaagtattggttgtcaagggtgatgatgtggcagaaactatttcaggtgttgtcttagcatgccaaattcacaa

SEQ ID NO: 33377 - DNA, 671 bp, Zea Mays
ccaaacttcctcctcggaaaaaggcgcatctaacccacttaactcatgttgctgcatcccaagaacatcaagatcaatggtacaattcttgccctctctagtaccgatcagacttgtgtagaaatcccacataacatcagctttatcaccacgatttgttgctatacgatctcctgcctatagtctagcaatcaagttctttctcttcatgtgccctacatgtaggtgaaacaaacttgtgttggcgtctccatctttcagccttaatggagaacttatttatactcatcctcttagtatacttgttgtaggtgaaacaaacttggtaggcccgggtaccctatctctactcctcgacccattatgatcagcaaattagtttgtattatgagtataaatactaagaggatgaaagaataaagcagacagggatcaacatagagttgatctattactgcagccagttatctgtgttccatctaatctattcctcagattcaccatgcgacagcatggcacctcctagccgcaggaccttacgtccccggccaaccattaatcactggtataatctatgacgagggagaggtcctaccaatctggtatcagctatgccgggatcagacgacaccaccagcgagatcgcatcagctactacggccgtgccgacc

SEQ ID NO: 33378 - DNA, 343 bp, Zea Mays
cacgcacgcatgttaccatctccggaaggaaagtatgcctactgcacgcatgtccggtctagaatagagagttagagacaaagtagcagtacgtacctagccagtgcagaggaaggcaaagcgaggaacatgagcgggtatcatccgaacgcgaagcaggatgccatacctatagagcacagagaagacatcaattgacggcaaactaaaagaaacatcaactgggaggaggcagaaccacaaccaacaacttggacgatgttttgcgacaggtaatggacggagaaaggaggcaatgccgcaaacaccacggaaaggcaaggcgtgagcagctggaatgagg

SEQ ID NO: 33379 - DNA, 444 bp, Zea Mays
tatccgttgtcgggtgatgtgcgcaaggacgacattcaggccttgcaggggtgagatcgacacagggggtgttcactattgaacaatgaacacgagcaggaggtcagggatgacacgtaggctccacactctagagggagagagggcgtgcattcatggattgcaactgaccagccggtcccacgtattagcaagcgtgggcatgggggactggcgttcggatgataaatgcggacctcgcccacgaccccctccctccgtgctcacatctagcgatcgtacgcattgaaacctcgaagatcggtgggtaggagattggtgagcgccaccacgacagatttgggcggtctgcactgtcgggacgctgttgttggggcagagaggatcactggtgcaagctgcttgcgatagaaacctcccgaggccggatcgtgagcagggcag

SEQ ID NO: 33380 - DNA, 316 bp, Zea Mays
tccaagaccaagacaacgacgattaggtgtcaacctgctggaagggctcctgctaggaacgacgtcgcctgcaagcacaagctcatcttggtggacgcatgacactaagggccacaacacgctctccacatcgacgatggctttgtgccccgcactagcctcttcggctacgccaccggcactgccaagcattggcggatctagagggtggatggggtgggccctgggaaccaccctcttattttgatatgctaaattatacaaataattttgatttatttatctcttttgattctcgtgtatcatagaacttaaa

SEQ ID NO: 33381 - DNA, 308 bp, Zea Mays
acagggatggattggagcatcatggccgttgcagccatgttctgtctaggatcgaggatgtactaggcactatcgcttccctaggctagttggtcgtagatttgtcatgcatgaggctttttagcctcaagaagctgcattatgtcgttgtagactctaccgatccttcgaacgagggcgtcaagctcttcttgctattttcggagactttactcgtgggcaagaactctcgcctgttgctggcaatggtactcatcttcttggttgggggcctcctcgccccacaccgttgttgtctcgtggcggcg

SEQ ID NO: 33382 - DNA, 437 bp, Zea Mays
ttggtgttccggagtgtaggcttcggtgaagtttaattggctggctccgagagcaatagaaggttgaagataaggtagaacaggaagcaatttggtaggtactaacctgatgagtgctggccacggaggagtccttcacggcggtgcgaagaacagggccgaatggatttgtggactgtgtgagttctccggtgaaattgagtcgattgctcaagtgcttgtgtgcgtgatgtggtgaagaagcaggatctaggctcaatttataggccgatggccggagttggatgaggctcacggagctataaacgcgctgacaagctcacccacgtgggcagagccacggcgatggtccggcggccgccgattaaccgggcagtgccaccgcaacgttttaacgccacgtcgcggatgatctttaccatggccgcagacccatt

SEQ ID NO: 33383 - DNA, 348 bp, Zea Mays
cgaggaaggctggccacggagatgttcttcgcggcggagttaaaacagagaggaaacaggctcgggggttattccggtgagctcgagtcgagtgactagttatcgatgcgcggaatgcaacgacgaagcaacgccagggtccaatttatagtcggccggccgaggagggatgagatccctgagctgtgactgcgctggcgagcacacccgcgcggcggattccggtgacagcgcggtgaccgccgtttaaccggggcttgccacctcagggagactttgacacgtcgccggtaacttttgccgtggccgccgacgtcttacccgagccacggcggcatccttatcgcc

SEQ ID NO: 33384 - DNA, 432 bp, Zea Mays
caatgagatgctggctgggttatctgaagattccgacgatagtgaaagttttgacttagaaagtggaaacgaaggtgccgaaaatcggccctggcggctgagtcataccatcttcgggaaatcaaccatcaaacagagttagattgatgcaatgaaaggatgatacttctgcgatatttctatcgtgagggctggaggagatagcagtgcccctatgccagaagatgacgaagtggttgtgtacaagagcttcatgaaagcagggttcgattccccctgaacaaatttttagttgaggtcttgaagacttttgaaatttaccttcatcagatcacccccgaagttatcattagaatggggattttcatttgggccctgagaagccagggtttagagccgaatgcaaaatgcttctgtaacatgcatgagctg

SEQ ID NO: 33385 - DNA, 337 bp, Zea Mays
agggcgccgtgtgctttgtctggtgtgattgattatgctgtgccagtatgattataattggtcttggtgtcgtttctgcttttgttgtactgggtcggctgcgcccttgggcggctcttgcgcgaagtctttgcgatgggcttcggatttttgcgcgcttgtgctaggtccggctgcacctttaggcgacttctgcgcggatagtctttgcgatggacgtcggaattttttcgcacttgttgtgctaggtccggctgcacccttaggcgacttctgcgcggatagtcttcgcgatagacgtcggaattttttcgcacttgttgtgctaagtccggct

SEQ ID NO: 33386 - DNA, 456 bp, Zea Mays
gcatgaagctgaagtggggaatttgagtcataaaataaacattgtgtttttgtccctcgtaaatatctaagcacacgaagtaagtgcccataatgaactgatgtaggagcagagacaaactgactcaaaatgtgaaccgcatgagcaatatctggcctggtgacagtaatgtaaactaagctgccaacaagatgtctatatcgagatggatcctccaaaggtgccccatcagtcggacgaagaaataagtgaagatccataggcgtggcaacagtgcgagtatcactaagaccagaacgatcaagaaggtcttggatgtacttggcctgagagagataaataccattttgagtctgcaaaacctcaatgcccaagaaatagctgagtgcccccaagtcagacatttgaaattccttactcagatacgccttcacatgagcaatatggtctggatca

SEQ ID NO: 33387 - DNA, 328 bp, Zea Mays
accaactccaattgccagaagcattatctgtagtgcacgacgtgttccatgtatctcaattgaagaaatgccttcgggtttcggatcgaaccattgatatagaggatgttatcttagaaccagacttgacctatttagaacatcctatttgagtcttggatcagatggacaggatcacccgaaaaaggactcttaagttctataagatacaatggaaccaacatactgaagatgaagctacctgggagactcaagacttcttggaaaagaattttcctaggttcttagcttcatgtaacttgtaaaatgtgtacattggattgtaaag

SEQ ID NO: 33388 - DNA, 585 bp, Zea Mays
gtgatcgtcttcgtctcaaattgaagaagcacatagcggattcctttaaattgagcgctaccctcgctttgcatctctattacacgctcataccaccctcagttagcctctctcgtgcaccatagcccccagtcaccggatttcccccaaatcggtcactcgcgccaccgtgaggcatccttccatggtcagccatttccagctctgttcatccccctatgtgacatgttttagcatccttaaatgttaacgtagctcgtcggccgaactgattgaacgctaccgcgatagggcttcgagaacatcatctcgccgccgcgaaacacctccgagagcgcacttacgttgacccactcttccacccccgttctgtccaaattcacgcatgtaccccgacctttggtgaactagtgaaactcaccctagcttcaatttaaacgctaccgcgtttggttgcttagaacgcactcaccggagccctagcaccgctgtggctatgaacaagcatcgattaaggtcggactagtccaattgagtgagggtttatgctcgggtagacctgtgcatgatgttcgtatgcttgtt

SEQ ID NO: 33389 - DNA, 322 bp, Zea Mays
tatagtctggggaagtgaaggcaacaatactgtgttgaagctacacacagtggcttacgacagaggcaaggatctctcctttactcccttccccccttcggttactcttaaataggtagggaaaagatcatgcgatgtctgggttcatgggattacagcaaagggagctctggaggtgccagtgaacgcatgggtatggatgcatggctcaaccctaaagatccacgccggtctcctgagcacagcaagacagggatatggtagagtttaccacggcagagggtaggcagataaggtttcactgaagcagatattcttttcg

SEQ ID NO: 33390 - DNA, 682 bp, Zea Mays
accccacaatcccaactaacaaaataactctaaccgaacttggcatttagccgatcgattcctaacccatttttcataccaccactacacgacatgcctaatacgttaaatgacttgttcacaattcacatacatctttaccaaaacattcccacatcgcttgcaacttagcctaagcttcactacacaatttcaagacatctacttaattcatgaatatcatcgtcacacacatcgactcgattcgaattaaccacacatgtctatcacataaatggagcatttcaacaaatatcctaaaacaaactaacttcatcacacatcttgcattacaaccctacttgacttatttgaactgtctactcaaaaccgtgagcacaatcatacactatatgcgaagcataattttaatgaacgcataatacgcatcgtcacgacttgacctataaatatagagaaagcgatgactactctggcatgtcaccacctctctatttaagccaagacaatttctaccatcgactaatagttctaagtattaaataccttactactttacacacacaataaacctcaacttaacacaagtgacaccgatggaatttttactaaactcatcatgcgcataaccttgtctcgcatacaaccatatggtggcgtgcactcgagacacttcaatcaa

SEQ ID NO: 33391 - DNA, 535 bp, Zea Mays
aaatctatatgcaacttggagaaaaggtttcccaaagaagggttggcagatttctagagtttcagaccaggaacagtaagtctgaatttcagtattggtggttgttttagagttccatttgtggctgatctgaaatgtttggactatggagtctatagagaaattgaagaccataagttggaggacaaatggccttaagggtgatggtcatgattctacatggaaaatggagtaaagttagttccaaaagcagttgtcaggtttgcactaattgaatgtttgatcagctgctgaaaactgaaatcagtaatggatgcatagtttggaggctattggtgactgatttatgtggttttagattaagagttatatagcaaacttggagaccagtgttaggagagtaatatttaataagggttatgcccttaaaactgcttagaattgggagaaaaagctattccaagttgtgctgtcagactcaagggatatgaatctagttaactgttgctggcaacataagtgtgtttttaaccac

SEQ ID NO: 33392 - DNA, 358 bp, Zea Mays
aagctgtgtgctgccctggtgaacggatggaaggtgcgtcacgtcgtcgcagagtcggaaggttgccttcttgtagggggtgaaaggatgaagtacctgggcagcgaggcggcatttgaggcgggcagggggtgggtggctcctagttgtggaggctcctccctagttccgggttcgcggctagcggcagtgctagggccactggaggtggtcctgcagcctggagggagcgctagaggagtgtgagagaagggaccaaaggatcgacataggcgtgaagaactggaggctcttggcaagctggatttgggggcaaaaggaatggacgtgacgtgacgcatcgtgatgtttctaggag

SEQ ID NO: 33393 - DNA, 480 bp, Zea Mays
ccaaggatcaactctgctaccgtcagaaaatacaagtacgtgctcctaggttacttgctaactcgtacgcattgagtagatgcctccagtatggagaacggggaaccaaggtgtcgaggcatttgctctaccattgcgggcactgtggaggactccctcgccgcgcgagccgcgaggccctctctgtgattctgcactctctctctgctcgattcaacggacacatcacgtgatggacgtacatccgcgtgaatgtggtgagccgtgggcgatgggggtggaggatcccacagcgatcttcaccaccggtctcactatcctcgtcaggtccaggtcggatgggagtggtttgaaacggatgctgtgcttgacagtcggggggaggaagaagcacgttagccgtttgatcttcaacggatggccggatcggttgttgcgctccgtcaggttcggccagcgagggaagaagatgagggcgcg

SEQ ID NO: 33394 - DNA, 796 bp, Zea Mays
ttgcttgcgcgagctcttacgcatcttcttctcttcgagccttccacagttctacctcccgcccgctggtccctagccgtcaagagattccacgctactggctttcttgccccacgccgtatggttatcgtccagcacgagcggagaaactgaaacacgatcccaaccaattcagaacccgatttggtgatcacctccattctcggtagcacttaattccagggacagcaataagaattgctcctctccaagttcttttggagcgtaatcttatccgtttgggtcggattgatatttgataacttgattgccatttggggagttgcgggagagagagagagatgggccagagcaaggcggagttcttgaagcagttcggtggggactacggttacccggacgcgcctaggggcatcgacgagctgcgggccgccgagttcaagcgcctggaaggtgtgatttcgcgatctcctaaattcattccgcgaccttcttttattaggaagtttgagctttgttgatgtggctaagaggagttatgtcaattttgacgacgtgactgagaatgtatttcgttaagaggataattttaagcttaacatgtatagaagtttgcagcttgctactttgctagtttctaaagatgtgtttgttttgaggagcagggatggtttacctggaccatgctggtgcgacactgtactcagaggcacagatgacggatgttgctagagaccttatgtctaatgtctatgggaatcctcgtatccttaaatttgggaggtctgttcacaag

SEQ ID NO: 33395 - DNA, 298 bp, Zea Mays
gatggagtgatttctgaaaccaaatacctcctaaggctggctccaacaacaaacagctatattgcccagctatttcatggtttacctgctccctgtattttacctggtcaacgatgggcctcctgtttgcaacagaacaggcaaactggctgtgaccattggtacaatctgtttttgcgccaaagaaacaaagtatgctattggtccaaaagaaatggttgttgtgccaaagacaagccaatttgcctgttctctctcctcgcatgcaatttgcctgggctagatagctggtccattg

SEQ ID NO: 33396 - DNA, 501 bp, Zea Mays
tgaaccaccatcagatcatcctcggagcactggatcgggaacacattagatttctgctcattattatggagccctgaagctttgccaaataaatccaagagattcatggtaatggaaatatccactgcagtggggtgcagaaagaggacaacatcatcggcatacaaagagatcctatgaaatttagtccttcctgacaattgttgcagcagccctacttcttcagccctagaaaagagaaggcccagaatgtccatcaccaaaataaataacatcggggagaggggatctccctacctgagccctcttctgtgtataatatgtttcccaggaaagccattaagcaagacttgagtaggagatcttaatctcatttataaggattctgacaagaacaagaataacttcagcagggctatgatgggtcgttttagaagattgattgatgatcttgtgctcaaagagatacctctccatggccgtcgttttacttggtccaac

SEQ ID NO: 33397 - DNA, 345 bp, Zea Mays
ccgggagaaggtgttttatgtttctggtcgtcttactggacccgctgctgattggtgggattcttatactgctgcccatgatgctgctaatactatcacctgggcagaattcaccacacagttcagaaattatcacattcctgctggactgatgaagattaaaaagaaggaatttctgtcaataaaacagggcaatatgtcagttagtgagtaccatgacaaatttatttagctatcacggtataatccagatgaagtggctgatgatgagagaaagtaagagcacttcatagagggactcaatgggccactacagtatgcactggttgctcacacttttccatc

SEQ ID NO: 33398 - DNA, 352 bp, Zea Mays
gaaattgctccatgtatgacgtcacctcttcaaggttggtcaatatatatagcatgatatggcgccactcttcatgtctcagggtcttggtggtcgaaccactcacgcttccgagttgccctcgaaaaatgctgaggttcgattcattgctgccatcattgtaacgagggggtggattatgcacgctcggcagtttgtcaccatagtaagttgttgtgaagtttgacacctcctccagtatgtatgcctctgcatggaagcctcgattttgcatttatttctacatttctttcggatagtctttagacatctctcgattggatagcaccaacgtccctgcacggcccccccc

SEQ ID NO: 33399 - DNA, 288 bp, Zea Mays
tggtggagacgacccgatgtggacatccatggaggtatgggaaggagagctcgctcgcactgcccatcggagccagatcactaccggcaacaccctcgagggctgggttgcagcttgtgatacccacccgagctgtatcattaccggtaacaccctcaggggctgggtaatcgccagcaccacccttgggagctgggttttctgcaacagccacctctacggctgaaggatcctcagtcacctccatgggagtcgggcaatctggaccaacctcttgacaccgaagac

SEQ ID NO: 33400 - DNA, 539 bp, Zea Mays
gaattacacgagagcgttccccgaggtactagcgaattccttatctaaggtgtccccaaatgccttgagaagatcatcgaggcttgctagggatacatcctcgtcgtcggaccaatcatctattctggggggaggtagggctagaggggccttcttcttcttcttcttctctgtctggcatccttggttggtggtcttcttctgtattttcttcttgggggcgagtttctttagcttcttatcatagtccatcttcaaagtccgataggcttcacgggtgttggcttcctcgccttctgctatgttgagactttcctggagggatgccttctcttgcttaagttctttgacttgctgctcgaggctttccactcgggagtttaggtggttgcagtgggaggagagctcgtcatagtggttgtcgagggtgtggaggtatctggccatgtagacgatagtggggtcatcttctgtggggtttcctcctgacagagcctggagtcttttcctccaggtgggggtgtttttgttgctgggtg

SEQ ID NO: 33401 - DNA, 673 bp, Zea Mays
gtctccactcagttccatcgaccggtgcatggcctccagtgcgacaacgtccacgagtttgacaactctacctctcgctcctttctctcccacgacgttcagttgcgactctcctacccctatacttcccctcagaatggtcgggctgaacgtattattcgcaccaccgctaacatgatctactgcctccttttcaggcgtctcttcccgcccactattgggcagaggccataacactgctagtcatctcctcaaccgccttcccttcaaggtagtcaatcactgcacccccacttcaccatgtatggcacatgctcctcctataccaacgctctgctacttctccacataagctctccccctgccccactcgctgtcatttcctcggtaactcccctgaccacaaggggtactgatgccttgacctcctcactcgttgtatcatcatctctcatcatgttgtctttgataaggaggttttcccccttggtgactcctctccaccccacgacctcgatactcctctttcgctgccctctttcacgccgcccatgaccacgtcgccttctattgtgccacgcgcggcccagctgcctctgcttcttcttgtgccgcgtgaaccatgcatggccctgtcaaccccgcccgcgccatgcatggcccagtcaacctt

SEQ ID NO: 33402 - DNA, 374 bp, Zea Mays
tgcaatggtacaagtctttcggcatgttatgattcggtgggctgatatcaataatcagtttcacaatatcgttgtaacagttgttggagaaggtgtactttgacttcatcgccataagacgtgttaccacctgcagtacgctcacactggttccttcatgcactttagcctctgaggcttcaagaagcttgtagaactctctcacatcctctggaaaagcttgattactctgtagttctgggtactcatttctaatatcttccaatatctcttccattcggtctacatcctggtccccatccgactcaatagtatggtccacctctccatgctcatgccataccaaatagttcggcataaagccatgtttgaaa

SEQ ID NO: 33403 - DNA, 280 bp, Zea Mays
aacaaaaccacctacggatacaaccaagcacgtgtcttcggcacccacacattgccgcagcaggcgaagtccccatctcatttcacaacaaacaatatcatagtttacatacacacagcaaaaggccaccagccacattgcacaaataaatacctatcttatcttgttaccctccctctttatcgcaagccaggggagggcagcgttttcactcactaccgcaatacaagagcgagggcagcataaacgctatattggctcagccttcgggataaggcct

SEQ ID NO: 33404 - DNA, 653 bp, Zea Mays
cttcctggaaaccagttctgggagaggatacaacttcttttcatcacgcctcaaagacgctacaagtatgccttgttagctgtagtaatttttcatgtcttgtcaccttaggttacctatgaagaaaggacgtgtgtgctcaaccaacagttttgatctaggaagccagacataggagtgctcatttgtctgttttaactctggcagggttcttgaaggagcacatgcatccttcatggagtcagtgcctttcaacacaatatgcaccttcacactcttccagctaatctatctgttgatcgtctttgggatgacatggataccagtagcaggaatcctcttcccactgctcttcttcttcctcattatcatcaggcagcacttcatcccgaaatattttgatccgagccacctgagggaattagatgcagccgagtacgaagaactgaaaggttttacacctgatccatcagtggtaagaagtcttgatctacctggttttatcaattgctgttagcatatactattcaacaaaggctacttcattcatctgtgtattgttaacatgccccttctcacgcagtgtgaggacgagtctgttcgcagcggagatgctcagcctggatatgcttccgaaatactcgaggaattca

SEQ ID NO: 33405 - DNA, 365 bp, Zea Mays
gacgcactggtggaagaagatcggagcgtgtagaggggacctgaactgtcacatcgggcgagaggggtcttggtggccagatctttcacagaaaaaccagagcggtcaaactcaatggaacgagagttgtcagtggtgaaccgacggacagaaagaagattatgagtgatatgaggggctacgagaacgtcgttgagatagaacgacccagggagaaccgaggcacctacaaaggtgaccgacagagtggaaccatttccaacgatgatcgaggagggatggaggagtgggtgggatgggagcgagagagcgtacctgcagtggggttggtgtggtaggatgcaccggagttgaccacccagtcg

SEQ ID NO: 33406 - DNA, 305 bp, Zea Mays
cttccattctgtctcatgaaatgattggatcccatcatacacctcaaccttcctattgttcacttctatgtcctatgtaaaagaagggcaaacaaattcagttcagtaaatattaaacaaaataatgtgtatatattgctgggaaattacttcaacacaatatgttttggttcaaatttcattaccacagcagaaatagcttaaatagatttatgttaattaaagaaaattttgtgtgggtatccaagagaaaaaggaaacacatttgctgaggccttatcaacacagcttgataagagatagga

SEQ ID NO: 33407 - DNA, 326 bp, Zea Mays
caaaagccaaaacaacctataatttgggatggagggagtatcatccaatgacacacatgggagtttacacatcatcacctaacatacatcaaaagaacttgaatttacaaaattattgctatattcatagatcattcatcaaaggcttatctaaccaaaaaatattaaaccagaatttgaagaatcccttagcatttagtggaatgtattactcgaaatattttaaggaccagttcaaatctctaaatttgcaaaaagtttgatatcatatgtgtttatatagctcatatcctcaatgttagaattatctgtcaaatgagtttaca

SEQ ID NO: 33408 - DNA, 318 bp, Zea Mays
gtcgttattccgggatgggagcttgccgccttgtgtacgccgccgcgaattggtcgcagctgctcggtggcgctggggaagaagaaaggtgggataccgtctgatcgggcaccaacgatggagattaggtcatgcataccggttgggcaacggggcgatcgcgcccgtcgatcgacggttgaacgccagagattagatcttaggtttttaaatcgggagcgttgtgcttggatcggacgactgctatggcataccacttcatcgcgctaggatctaatccagaccacaggatctggatcgtccggcccacaatagaag

SEQ ID NO: 33409 - DNA, 2251 bp, Zea Mays
agagaaaaagtgaggcggaagacgagggacatacttcaagcgcccgcggcccgcagcctgctcgcccaggtcttcgccggcgacgagcacccaccaggtccttctcttccctacctgctgtgcgaaaccgatcacccgaaaccctaacttaagcgatctgtctacttgaacctggatctgatccaattactatttgtctgttgtctctggatctgatctaacgaagcgtatatacgtgcgccctaacagcttcaattctttctttttttggcacaaattaatgtgcgcacacccaggtccgctcagtccatctctccagaaatccccagatgttccacagcaagtcgctccctaggcccaaggacacatcggtggtggtggtcgtccttgagacgacagaagtgtacattgtgatcagcttgtcgacgaggagagacacccaggtcgtatacgtcgatccgaccaccggcgccctgcgctacctggggaagcatggggaggacgtctttgattcggaggcggcggcgctgaaccacatcaccaacggatcaagggttctatccaagagcactacatatgccaaggcagtgctgggatacgcggtgttaggaagccatgctctgctcttggtcgcgacacagttgagcgcgtcggtccccaatctgccgggaggcgggtgcatatacacattggcagagagccagtggataaagatccagctgcagaatcctcagccccaggggactggagaacagaagaacatacgtgagctggccaatctagacattgatggcaagttcttcttttgcgagacaagggatgttaccaggcccttcccgagtcctattacactacgggaaccagatgaggaatttgtttggaacgagtggctgtcaaagccctttaaggacattggtttgccaggacactgtgtcattcttctgcaggggttcgctgagtgccggaactttggaggtgctgggcagcaaggtgggttagtcgcccttattgcacgccgaagtcggttgcatcctggaactcgctatttggcccgtggactgaacgcatgttcaggcacaggcaatgaggtagagtgcgagcaactcgtttgggttccacggaagggcggacagcgcatcccttttagctcgtatatctggcgccgtggaactattccaatatggtggggcgcagaaataaaaaacgcggtgtcagtggaggctgaaatttacgttgccaacgatccttacaacggaagcttacagtactaccaacggttgggtaaaagatatgggaataaatcatctgaagcgaacgtgtccaggcaaaaaagttctggaagggttcccattatttgtgttaacttgctaagatacggcgaaggaaaaacagagtcagttcttgttgatcatttcaaagaatctatacggtacatgaactctactggaaagctgggaagcacgtggattcagttaataaattatgactggcatgccactgtgaagttaaaagggcagcagcagacagttgagggcctatggaggcatcttaaaccacctacaatggtcattggcttcagtgaagggaattactatgatgcaagacagcagcttaatgaatgtaaaggatcagttatctgcaatgacgatgtaaatggtgggttttgcatggaatctattcaaaatggggtgatacgattcaactgtgcagactctcttgatcgaaccaatgctgctagttactttggtgcacttcaagtttttgttgaacagtgtagtcgattgagcatctcgcttgacatagatgcaatgtttgggttgtcaagtagatattctgaatatgatggtagaaacactcgttctttgccccctggatgggaggagcgctttgactctgtaacagggaaatcattttatattgatcataatacacgtactaccacatgggaacatccatgccaggaggctccacagaagccctggaagagatttgatatgacatttgatcagttcaaaggctcaacaatgcttgctccagtgaaccagcttgctgaactttttcttttggcaggcgatatccatgctacgttgtacactggctcaaaagctatgcacagtgatattctgaacatattcaaggaggaaacaggaaagtttagtaaattctcagctgttgagaatgtgaaaattacggtgctaagaaggtaccaaaattttatgaatgatagttcccgtcaaaagcagttagagat

SEQ ID NO: 33410 - DNA, 272 bp, Zea Mays
taaaacatgagatagatgaactgccaatagttctactctttggataagttcaaaataccccgaggaatgtattaaacacttccaaaaaggttggaaagctcggaatcaacatatcactattttggagctagtttgagcaaaagaagaaatatgaatgaaagaatcaaaatgttcataatccatgacttagactagatggaaagccacttgagatacttttctaagtcataggatcactctcaagtttagccaaagcaacttggagaagattg

SEQ ID NO: 33411 - DNA, 526 bp, Zea Mays
gatcagctttgtaaattgcgaggggctgcctgatcgaggagaaaacttctggcaggcttcgcaggaccttgtgacccgatttgcgacgtagatcattgcgggccagtagaaaccttggcggatcacctttgtggctagggcccttggccctgcgtgagagccgcaggtaccactgtggacttcgcacaggatctggacgccttcagtttcggtgacgcatttaagcattggctgacggacccccttcttgtagagttggccctcaatcagtgcgaagtcccggcttcgatgtttgaggcgcttggcctcgttgatgtcggttgggtggtagtacccctgtaggaacagagttattggtgcccgccaatcttcggtcatgataaggttgactatgcggtggccctcgctgtcattggttatttggagcccttcggggctccggacggcgggcgtgccgatgacatggtagaacacgtcggagggcagggactcgcctctggcggcagccttggccaatgcgtcggcc

SEQ ID NO: 33412 - DNA, 563 bp, Zea Mays
gaagctagaagccgtagagggtagagtggtccggggctgttacatttgatgatctcgcgccgagtgggaagatccttcacagaacaaccaaaatgatcaaattcgacacaacaattgttatcagtggtaaattggcgaacataaatcaaatctttcatgagggatggagaaactagaacattatgaagagaaagattataagggagatgagtagtgccggtggaggtgacatgtatgagattaccgttgccaacgataatgtgagtggggagatgctgggaggaggtatgagagattataccagcatcagacgtcatgtgactggaggcaccggtgtcgaagtgccactcatgttgaggtggctgttgaagagtgacagtttggaaattggcagcgagggtttgttgatcccagacaggagttgttggaggtgagtcgatgtaggcaggtggcggcccataggcagcaggaggtgctgcccattgtccaggagtgccagcgacgaaggcatgcggtggctgtgccggagcagcaggtggacgttggccaggccacatgtagat

SEQ ID NO: 33413 - DNA, 400 bp, Zea Mays
agatcgggcacctcagctacatcaattggtatcagatttccaggttgatcggtgagtttatcgagtgtttttttccctacagtccacaaaaccacataaaattcaggttagaccttatcccagcacccttttgagcctcgcactttctttcaataatctgcattgttgaatttgtgtgctttcgcgtcatttgttgctggttgcattgtgttcttccaccattcaaatcctagcgccgccaccatctcccctttgatcacgccacaaaccgagtcaacattgtttccttgtttttctccttcggttacgtcaaaaaaaaaacagaaaaaacaaaccgagtcaacggccgtttccttgtttttctccttcggttacgaaaaaaaaacagaaaaaaaaccga

SEQ ID NO: 33414 - DNA, 289 bp, Zea Mays
gtgggggttgtatggctcctgaatagctccaactctgcctgagacgacaacccgtggctcgccgccacggagtccggcatctctccgtcacccagcgggtaggttagcagctgttagaactccggcgaggaggatgacacacgtgaaatgaacacagagtacacccagctggtgcttagtaccgacgaagtcgacgtcgatcagcttcctgttgcagcattcccggatgaaatgaaacttcacatctatgtgcttgctccggtcatgatggacagggttcttcatcagt

SEQ ID NO: 33415 - DNA, 327 bp, Zea Mays
aatcacaaactccacatccctctctggaggtagtccaggtaaatcttcaggaaatacatccgaaaactcacacacaactgaaatgtcttgtatttcttgcaccacggcttcaaaaacttgtccagataccgtaactgggatatatgcagggatggacaacttgacttcttcttgtccatgacttagctgaatagtcctttcatcagcattgataacagccttattctaggctaaccaattcatgcgtagaattacatctacatctttcccctttataactatcatgttggtagggaatacatatccagctaaactcacgggtacgtg

SEQ ID NO: 33416 - DNA, 501 bp, Zea Mays
agtcgccatcaccaattctcctgtcattcggtgttgttggcataggtgtgatgaattgttgttcagtgtgaacaattccatcacttgtgaccacgttggtgtgaaggatttgtggtctcgccttgaagccatgaatgatagacaatcagggaatgaattccctagtcaagttgccacgacacatggatgggatccgaagatccttgaagcatctatttgtccacctcggttggtagtcaaggattgtagttggcaggccacttccgatgggttctatttcatattgaggtcagttggagtcactagtttccatctcggcattgtgttggtcgaagagccaggtaaggtggtgtttggtcttttggtcatgtaaggtcattgttttggtcatgtaaggtcttgttgggtgatggctggagctaagcagctaggtagtcttgctttagctgacaccctcttggcacccgggtagctcctagtggttgtagtgcgttgtgtgcg

SEQ ID NO: 33417 - DNA, 469 bp, Zea Mays
ggcctaggccacttgggccatggcccatggtgtggtccgtgtagtgataattgagtagggtggggagatggtcctagggtttcacttctccactacagaaacaatagatcatgattgcatgagctaacgaggggcaatggcatgcaggtagacggcgattggggcacacaggcaggcaatggcacgcggataactgcacggacggtggtggtgcagggcacacaggcagatgcagcgacactggcgcgtgaggcactatgtggctgcgtagacaacagtggtagagggcacatgggcagccgagcaactggttgcaggcagcatgtaaggtgtattctatatagaaatttcattgtatccaatagactgacctagggcatgatctaatcctagatctgcccttgattatgcttatatagttttatcttcttttctccactactttgcataatctccagtactctccaat

SEQ ID NO: 33418 - DNA, 286 bp, Zea Mays
aatcgctagagtaacctcctccaccaaatcgaaattatccacctcaccaaaagatcgggcactccagttctatcaagtggtatcaaatttttaggttgctcggtgagtgttattgagttttatccctttagtttgagagtgtttattgtcccaacgtccaccagaaaaagctacaaaaaactttttaggctagaacattgttctagaaccatttggccttgcattttctttcagtaatattgtattattgaatttgtgagcatttgcatcaagtgttgctggttgc

SEQ ID NO: 33419 - DNA, 2022 bp, Zea Mays
agctgcttgagtatgcccaaagtatcatttcaggactgaagagaaatgctgacattgtgaggtgatagaatagaacctgctaattacctgttaatatattatattgagaagttgcagcttcttctggtaggttaattacaaatatttttttgcagtacttgccttgattttcttggaaactaatcacaaaaaaggaacaaactgtacaaactaaacaataaccatacctgaaggcctctaccaaatctctgaaatatcaaatattgtggactgcacacaaaataattgtgtattctgctacagtagaaggcccaaacacttcgatatatgcttttgtctatggtttctgggtacattagcttattctggagcttatattttatttcaggatagatgctgaaaccctagaattgcagagaaaactagacgagaagcagaaatcacgaggtcaatcacctgaatatcaagataaaacgtcagataagattgctgctgcaaatcttgaggtaatactactactgttacatctggtgcttcttgttttggacatacatgtggccgaactttctaaatttttgctaccaatactggaaattagttagaaaatatgaaaattgcatgtggatttgttattagaagtactatcatacaattgcaaattatgaaatgtaaacattccttcgtaatagtgcatacatatgctacaccaacttaccgcctagtatcagaattggtgattaaagtgttcaatattctgttctatttttgctgttctagtcatatttattttattaaggtctaaaataagatgattatgatccctgtattcttcaggtcttcaaagaagcacttggtgaactccgcttatgctctagagttgaagaacttctgctgaagaagaaatcaatcactcttggtgactccctggagattcattctcagaaggcatgtttgtgttttatatttagatgctttcagttttgagttgaggtcccttgaattgttatggagtaagtataattttggctactaatcatggccaagttttagcacatttattcgaactttctttggcttaccctatgttttcagttgttattttagaagcacccctttactggaatgactctggattgttagctgtaaaccttcagtgatcttcttagcatctgacttcttatgaagtgtggacttcaggcttccatacgagatctgataataataggagtatgcagtctcctgctgatacttttattggttgcattatatgatgattcctacttttaataacatagttgtagtactttacaacaaaagattgacaaaaaaccacttgtgtctttgatggagctgtccctaatgtgatctcagtattgagttgagtggaggggtccctgctgctagctgcaggagagcttatggagaagctggctggaaaacatgttttggccctgttaggctgtgtttttgttgttcactataatgttttggtccggtttcttatggactagtgacctctactttctcttttctattgacctctactttctctcttctataatgaaatgaaactcagtgtcctgtgttctctagaaaaaagtatgtattcttaggtagtttcgcttggttagagtttatgtggcccatagctttgtctggttcttttattttgttattgttgattgctgtaggactttcaggcctacctaaatattctagttgatgctctgtaatgctaacagcactcacaaattaccaggtagataaactaaaggttttagcagattccctggcatgttcatcctccaaagcagaacagcgtattttggagcacaggttttgcttctgaagttgttttttcttggttcctgtatagaataattttgtcatggcacttacagaatctcatgtgaacaaaatatatttcatccttggatgtttgctttgattttattctttggttgaaactcttctctattgttgtatattacttgctcacaatttatttttatcatcaatgac

SEQ ID NO: 33420 - DNA, 317 bp, Zea Mays
aaaagaatgaaaggcaccctgcatccttcatgatctggttcagctatttcttttacaagtaatttgtacctgctactactaccgtgtaatatctaatttatggtacggtacattagattcagaatatgagatgataacagagatatgcagggcttgtttggttctagcgcttgagcttgcctcgtcttactaagcgatgaaacagatgaggatacttgtttagttgctgggtgagtatttttggggctttgagctatcaagcttttgcttgcttgcttaggaaagctattttggctccagcaaggcaaggtttgctt

SEQ ID NO: 33421 - DNA, 315 bp, Zea Mays
ccgatcgcgcggcaagtggcgcggtgaatagtctagcgataaggctccaactcctctccgtgttgagatcttttaccccaacaattatccgcgcgccactggccacgaatcacaacgccggcgtggatcgcggcgcgggttcaccggcggcgggttcagtgaatctgtgatctttttcaggcactgtaccatagcaatcttcttcagtgtgcctgaccgagcgactttagaggcatttttctgcgatttccatacaacaaactaccaactcgattataccaaagatgttgccctatataccaacttcaactttgt

SEQ ID NO: 33422 - DNA, 275 bp, Zea Mays
gatgtctatgcatacagcagcaaggtctacttgggtttatagttgtgtaggtaacttaattggttatagtgaatcaggtattggtctcaaggtgttttccgtttcttagaaactgaagtatgtagtacggatttatagtttgatagtgtcagcatcaggggaatgccataaaaggaaggggtggagcagtgtagaggggggtgggtatggtaaggcagtctgaagctatgaggatcagaacaagatagacaaaatgtgaactaggaaccaattaa

SEQ ID NO: 33423 - DNA, 574 bp, Zea Mays
ggccagtcaacccctatcatgggggacctaagtaccagagtctctacagtaaccagtataccgagaaggacaagagtatacaccataccgggtgtatggctacgcacgatggagggtgacacagggtttatgacgaaagtcgagactacgccgtgcatcataccacgagtctaccccttaggagccacgaagcgccactatgaggacatcaacatcggactcgctatagggacccatataccggacagacaaagcatcgcaccatgccaggagtacggccacgcacgaccctatggacgatgttagagggactacgccaactagaggcaacatatcacacccttaccaagtaggaaacaagtcttctctgtaaggtcctacccttgagctataaacgggcataccatcctcctttttcgcacacatgcaccggatgtaacacaatcctcaagcaatactatgaccagcgctacacttagttaggacgaaagcttgaaccagtatgactctctgtctcaaacgctctattcgaatcatttgtggttcaccattcagagtgaatccacgatagcat

SEQ ID NO: 33424 - DNA, 429 bp, Zea Mays
aacacttcaaccacaaatttgctcaatgggaaccgaaggtctgccttcaaaaagctttggtaaacaacaacttcattttcttcaggagcaggggcggtgctgtctcctccaaccctcacaatagacatgtcatgaaagtatcttcctatcatggtgtcaatatgactttgcttaatggtcgacttttcgaagatggtatggcttggccgccagggccgatcctcagaatcttcatctccactttccacatcataatcatcgctgtcattggaatcttcacacaaatccgccattatttcctttgtgatcttttttatgtttgtatttgccatagattcgtaaaacccagcaagaaaagggtccgcaactttcttctcctcatacagcttctcctcctcggatatcttcttctcctcagacatcttcttc

SEQ ID NO: 33425 - DNA, 1026 bp, Zea Mays
tggactacaggtgattaacactggcacagctacacatctccattaatcataagagcaaaatcagaaaatgatgcacccagaaaggctgtctaattagaatgtaaaattggtcaaaataggcaagctccttgcaatggaggtagtagtagtaagtgacaactttagtgaggactgaggagacagaaaattgtggactttccataagacctgtgtcatggctaaaaaacaggtaagaggggtacaagctagtaactccaaagaggacagaacacataaatttgcatgtcctccaaaatagaagactaataagaagattgttttagcccacacagttgctaactgaaaacatctagttgatctaagatcaaagatatgtcatacaagtaaaacatgcttaccttcacatttttcacaggcaatatagatatcctcttcattatagcatttttcacacaagcagcatactgggttgacttcagaaatttcagcatcttctgatggaaaaactactctttctttcctgaaacttcttgctcgttcatcatgtggattttgtgaccatcggaggccattcaaccagtatgaatactgtgaaacagtcctcttcctcttgctagagctagctgcattctcggatacatttgagttacttttcatgtatttatcatgtaatcgttttgatatacgtttcactggttcatttttggaaacatttgatggttcactttcatggatctttgatggttcattctttgacagatccgttgggttcttcctgggccggccacgcttaccctttttgccaattttcgttttgcatttcagaactatctgattcctcctggtctcaatcttgcgtgattgtttcttttgtttcttctgcttctttttgggagacagcttctttggtgcagtctttttctgaggagactccacctttagaaccttctcatctaagcacttattacaaacataaacagcatttgtagcacctctagggaccttgaaatgttttctatggaaaag

SEQ ID NO: 33426 - DNA, 406 bp, Zea Mays
ctggccgccgtacccccttgccttacggccggtttagttaagctcaccggagttggccgcctgccgattgggtgccacgtgccttgaagcttcaccacgtcgcagtaagccgctctagagtgccggttcgttgccggtaagcctgccacggtgaaagccacgcaactcttgcgcctgtgctctttcacctctccgtccgccagcgtgccatctcaaatttacgggccaccgccctcgggtcctataaattgagcgtgccatcagctccactaggtagtcaagcattgagcgcacccactcgtgtttcggattgtccaccagagagctctaatttgggatttcccccaattctgtcaagaacaccgcgtgtgtgagcttgccgtggccagctctccacaggtccgat

SEQ ID NO: 33427 - DNA, 608 bp, Zea Mays
tgaggacctcggcctgtaggtcatggactctccacgaggtatgctcccatgtaatggacagcaataatccacttagcagtagattttttgcatttttgttgcaatggactgctataaatataagtctcatggtttttgtactgttatttggtaaaatgcaaatacacattagggattgataacgttgtagtaggtgcggcattgtctctgtctctgactgaagaaaatgtgcaattgttgttcggccgtggcgtgtcgccaaccaatgaaatgactgcaccgcgctgcgaagaggaagattggagtttagcttgtattggccaggacgatcgcgtcacatttggtacctcggtgagtaatgtatttgtgatgctctttagtttgatccaaatatgtactaattatgagtttgtgttgtgtagggaaattgtaatccaagtgaatatgttgattgggattcaatcgaagttgaagacaggtggaccgaggaaggaagacagaatgttactagtgaacaagcattgtatatccagctgggtttgcataatgaggatgtgtttgaatctgctcaaagggaagaagaatcagctcgtcatgttagatggagt

SEQ ID NO: 33428 - DNA, 344 bp, Zea Mays
gtccgggtctaagttataatcttcatcgttaggaacaggtaacctctcgtgcggcgataccttatacacaacatcctaacccttaagatgttctttcgtttggcacgcatatgggagataatacacttgtgtggcctgttgggccacgatatagacatcgtctcctggtaaggtggaatcttgtcaaatttcgactatcccaagattagaatgtgtccgtctcgtcacttgagggtcaaaccaatgacatttgaatatcactggagtaagaggtttggaaccataaaaaaatgagttcatatatttcttcgattcgtccaaaataatcgacatcgtcaaggccg

SEQ ID NO: 33429 - DNA, 581 bp, Zea Mays
ccaaggacgatctaagaacacccatttatttgacctaaaccctactgggaacagtctgtccacgatcatggaggaaaccgagttcgtgagcacgtgttcccgccaaaccatggccgaattgagtaaacgggcgccacagtgagcttcacaagcatgcagagtcatgaaaacaatacgtgaattggacagtgtcttaccagagcgggctggccacgggcgggctgttcttggtggcgcggcggaccgatttgggggaaatcggtgattcaccgactatggtggctaatcgagggtgggagcgggtgcttcggcttcgcaatttagagacgaagagctgtgctcggttgatttgaatggagggggtgaggatgcggtgaatttataggcgcagtgagccacagccatggccatggtgataaccatcgctggccttagctggcgatcaacggcggcgtcaagcgctatcctttcatacgagcttgccacattcccgccacgacagtaacgcggtcaaatcagtgagggcgtggatgaacgaggaggagcggcgccgatgaccggatatggccggagtgattagt

SEQ ID NO: 33430 - DNA, 388 bp, Zea Mays
cgagggcgtaggggaggtcgtgacggtcacaccgatgtgaggatcgtctccgtggatagtcgaagtaggccggtccacgtgcacaggcggggaagctcgtcagcggcgagggctctggcctatccagggcggtagagtttaattaaaccggtcggtgagcttcactaggtatcagggaaggcatggacgcgaggaattgaagaatggctcacctgatagctcggtctacacgtagtggcgggcggccgaagttcggcgacggtgatctcgttgttccggtgaggcagggcctcaatccttgcttagagaagcttcacggcttcccggggaagttgtccagaggctcgggtgaggctagggttctctggaaatggctggtcgtggtggc

SEQ ID NO: 33431 - DNA, 572 bp, Zea Mays
gcgcggtatagtttaattggtggggttgccgagtatcataagcatactagagtactaaaacatgaaccaggagggcgagagcgaacctgtagacggctaaccgcgacgaggtgactcgcggtggcgcagagagtggatttgggggaaaacaaaattggggcgctacggtggatgatcggaggcgagggctggtgctctaggtttgtaacaagtagatagaacaggccgaggcatcaatttatagaggacgactgcgaggagggcgaatttggacggggaagtgctcgcattaagaagggggaggagtcaccaaaggccgctaatgtggcgctcacaggctaactatctacgacggtcactaccgagtccttacagcttgcgacgatgtggtgaatcgactacggcgtggcacactcgcggtgaacggcgatctccatggcaatgatcgtccggccacgtcgcagcgcaagtgggtacggtgatagggcagccacaatgcaccgacttcatcccttgcatgagatcttttaccctgagtcattatccgcgtgccattgggcacgaatcacagc

SEQ ID NO: 33432 - DNA, 542 bp, Zea Mays
ccgtggccagcctctacgacgccctaatcaccggtgagagataccccctctatactgtccgcccagaattttattttagcgcattcggatcggggtccgtgctcgggggagtgtttcgcgcggtggccgccatggcgccaccgccgagcctagcgcgccgccggggctcgcgaccaaagccacataaacggctttggccgttgattatgagttaggcggtggagattagaaccactcatacccttacattctagtgaatcgtagccgcagatctcgaaaccgagggttaggtgttgtggggtatgctggccgttgatctaagattcgagggtcacggttacagacccctttcatttaaaacgcgatctaatctcggccttcagatttgatccaacggccgagatccatggatacccctttgcgggtatgttttataaacgagaccctgcctttcatgtatatcaacccgccgtccacgccagggactctctgagtcttagaaacacttacaccgagacccctgctgttttctgttattgagg

SEQ ID NO: 33433 - DNA, 336 bp, Zea Mays
ctgaatggaataaaggacattgttgtcaagcacccaacagagcttaaactgcacaaggttgctataattgagaagctgcaggagagaatatgtgatactgacaaggtggtccgtgaatcgttatacaatatactgcagtctctgatcttcccatctttgaaagaggtatatctctttctccgcttttctgtacttttgcttgattagaaatgtattcttttaattgaaatggttattcatgatgttcttacacgttgcattgcattttgacattccagttttctgtaaatatgccagtaaaaaataatattgcttgtgtgatatcatgatttctac

SEQ ID NO: 33434 - DNA, 450 bp, Zea Mays
acagggactccagggagcgtcgacgcgatgcagagattgggagcgacacatcaggtacttccatggaggtgaagcggatgaggggggagtggatcgcgcggatcgacattccagagatagattgggcacagcagatcgggtacttgcatggaggtgaggcagatcggggggtttggatcgcgcagatcgaccttcaagggagagatagggtattagggtggggggagtggatcgcgcgcacgcgccatcgggtgggcaaggagatttcggttgcacgaggggagctagggctcggatcggggatgggggaggagatcatggtcggttaggcgaggagatttcggatcgggaatgggggaggagattacggtgctacatgcacgaggggagccaggacgggggtgggggcatgcttcaccaagcgagatccacggcgagggaaggggcgcg

SEQ ID NO: 33435 - DNA, 475 bp, Zea Mays
gtggaattcatattaaagcaggaggggagggggagcttgttgatgattgagcacgtacgtaaaactccttgttctagctaactgctctttctctaaagctgcatgcagctctggcttggtcgatctatcaaggccaacaacgctggctttaatcggacccccccccccccccgtcccctcgaaacagatggcggcagctgcatcgtacacgtacgcatgggccagcacaaaaccaatgcggacacgtccgctccgcgccatgcatgagggaattgcagcactgcaccacctgctgcgtgcatgcgagctagtagtagtggtcctcctctacctcttggctttttgctcacccgtctctactactccctcactttccttcgattctagtagcgcggtacagtactcccctatgtatgttgtgtgaattgtgatgatgctccttcaccatatatatgcaacttgccatattattcac

SEQ ID NO: 33436 - DNA, 699 bp, Zea Mays
tggtgataatttgtttgaaggtctccaggggcaaagaatcaaccagctccttcagaatagatggatctgacccaaccttcgttcttcgagaatagacattgagacaacagcgatcaggacgccatctctggtcaaacaagttctgagtaggaagaacaagaacagggctgctgctggccgaagcaatagcaaacaagggtgcatcatccaccggtccatggggctcaacaggaacaacctcctcaacagggacaacaacgtcctggatgagcattgcttctggagtcacggtgaccgtctctagcacaccatcaagaacaaggcctgagctgttgagggcaacatttgtgctgtccacaacaagaacagggctgctgctggctgaattaatagcatacaagggtgcatctcccaccggtccaaggggctcaacaggaccaacctcctcaacaggaacaacaacgtcctggaggagcactgcttctggggccacggtgaccgcctcaagcacaccatcaagatcaaggcttgaactgttgagagcaacatttgtggtgtcagaaaccgatccatacagctccacaggaacaagctcctcgacagggacagaattgccctggggaagctctgatcccagaaccgtcattacagaagaggtcacccaagcatcaccaggaagatctcctgcagaaacacccg

SEQ ID NO: 33437 - DNA, 342 bp, Zea Mays
ggcgtatggatacttgtatgggtacgaaggatgacacatataagtgaaacgttgtggaggacgagcatcagtggaagaggcttcattaatgctaggaggataaggatatggaggaggagcatacgagtaaagaaagagaggttgaggagttagccacggggacgaacatgaccttcctctcgctgatggttgacaggagaaagaccgttgaagaatacttgtcccacattaacaagggtatcgggacattgtagagattgctcgttgaacaagtccgtgaatgtttcatagttgggactccacctttgatccatatcgaaaaagaggttggaaagacgtgaa

SEQ ID NO: 33438 - DNA, 412 bp, Zea Mays
actaagggtagtcccggagggtccgacttgatccagcaatagtgagtaccccaatcttgaggtaccgacagtggcccccgggcccacctcgtgtgaggtggcaaatccgtaggtggggccataaccgtgctttgcttctaaaaaggtatcatgtatatggcccccacacctagtgacctaaataaaaaaggtgtccctgcacatggctccataatggtgctcagtgccgcctcagtggtatacctacggggtcctcatcctgattgcattcaatcttctgcattatgtttctagaccttatcgatcaggattgcaagaacctgtcccttggtaaggataaggtttaggcctctaggggacaagtcctaggtactagaacaactattataggacagtggagggcttatggagc

SEQ ID NO: 33439 - DNA, 697 bp, Zea Mays
cctccctcctcacgatggacgctgggcaacgaagcgcctagcgcagcggtgtcctcgccggagtaccgcgcgccggcaaccccagtgcccaaaactgacgccgccaagtgaacaaaaagggcaggaaagatggcgatcctgatggagtcacacataccgtgattcgcgcaacgcgggccccagcagcagcgctgggcggaaatcagattacgacgggcaatcgccggtcctaggtgccaccttcttcactctgttcgccgcccgctggcttcgatggatgcctacgaatgcccctgacgccaaaatcgagcaccccacaccggcgagattgcaggtcgacggcggcaattgccttgacccacacggtggaggggatttctccgatgaagtgctcagccacccgattaatcatgcgagattggatcccttgtgttgctgatcgggggagaggaaaagaagtttggttttatagctgtagtccggatggaggagcaatcttttcccaccggaaagctcggccgccgcccgcctggtttgttgcggtccgatggggaaggttctgacgggttggccccatgcgtcagaggaggctgccggctgaggttaaatggatgagggggcatgaggtctagtctttatatcctgcgcaaagcccgactctggtgcacagcccaacccatgaacgcgctaatggcgg

SEQ ID NO: 33440 - DNA, 480 bp, Zea Mays
cacaacagtcttcccaccaaagggcagcccaggccgtcccattatatcacgcatgttattgtctagcgcctcaattgcttgtctcttagtcattgatgcctcgttccagataatgagcgatgctttttgtagcaactttgttgtcccgctttgtttcatgaagctacatacaacaccatcatcaatagtaagtggtatcttgaagcgagtgggcagtcctccccccaggcaatatggaagccgcaacaccagatgtagctgttgcaactgcaatcttgtcctgactgcgtagtgccgcaagcagtgtcttatacagataggtctttccagtcccaccaggcccatccacaaagaacactacaccgttattggtgtcaacgacggatatgatcttatcataggtagacctctgctccttgtttagggtttctttcatagcaacgtcttctgccgtcggctcgatactttcctcctcgtaaa

SEQ ID NO: 33441 - DNA, 360 bp, Zea Mays
ataaaaaatgacgaatggacttggcggacagccgcattctagtatagtgcagacgtgcccggctgcatcaccgatctctctccctccctcgctcgtcgcttccgcaggggcagccgcagcaccgcagctacctacctacccacacacgcgattcacgcaagcacacgcagccgctccttccgtcctcaaaccacaggcggaccctgacgagacgtacaagaacctccaccaggccattgagcccttgaccgtgtacgcaaacgaacacgaagcctagctcctccccaatggcctcccatcctcctcctgcggagccgtcttctaagtcaaacaaggtacggatggacgggcatcccctcc

SEQ ID NO: 33442 - DNA, 358 bp, Zea Mays
gcgctctggagggccgaattcgctatctccggcaaacccgccgccgtgaggtgacctgcgcgccgtgaatcaacgccgaaggatggtgacggtcttctgaccatagattgaagaggggaggcgcagattagatattaggatagcgtttcgcccgagtagtggggtccgttcgataccgatctcgcgtatgtgggtcgatcgcgatattcttaatggtctgggccgttgacctggcatcctacgcctgcgggtgagtgcaggaggtattgatggaccaatctaatccgggccggtcatcgctgatctagtgaccgagatcaaaccgtacccttcgccgagagattttcacttgaacccc

SEQ ID NO: 33443 - DNA, 283 bp, Zea Mays
taactacaccaagttgcaggggatacccacaccttggtgacaatcattacaaagatccaacttcattacatgtccatcataacaagcatccaacataagataagcaaactaactctaactaagactgaatagactaagacactgaactaaacattattacagactccgactctgtcgatctagggatccaaatctatctaggtcctgtagtctggggtaccatagtcgaagtgaccacggggcggtgaacggtaagggtgctgaatcccgacaggggcgggag

SEQ ID NO: 33444 - DNA, 282 bp, Zea Mays
gatatccgcggatatcgggcaacccgttacccgccagaaaataccatacgagtatgtggtcatgttcatttcaccaagaacatcaacaacttaacagacataatataatggcaaagaacatagttcaaacttcaaagtccacaaacatgatcgatcatccacaaacataagtctcaaacataagtccacaaacatgatcgactgtgttgtggcctgtgggcctgtggcatggggatattttgataggctagtaaattaagtaggtaacgagtaataccaacg

SEQ ID NO: 33445 - DNA, 337 bp, Zea Mays
gtggaaaatgcccacacggaggcttagtctgcccgcaagcgtgttgctgacttggagctagagttgaagaatatgcgcagccaccgcgagaagacagagtctgccacccatgcttttcatggatgcgtaccgtgaccttggcgcgcaaaccgcccccttcgacaaatcaggggaggaggtggggacccacgttttgggggtggctgcaggatgagctagagtcactcccatccattgtgatgggcctcatgtcctatgcgtctctcgtgacctacgaaggtgctgcgaatgccttgtcccgcgagggatgcaggcacttcgaggccttcgaccaagc

SEQ ID NO: 33446 - DNA, 913 bp, Zea Mays
gtctggtgcaattggaggttttctagatgtagcatttaatttcaatactcaagccttcttagaggacaatcttcttggttagaacctctctgtacctccctactcatttcgtactaattgcaacttctgttacagtgttactgcctatagttcgtgtatgtccttttgtgttttgtattccctgttggtatatgtttcaatgtatgcatcatacttcacaaatgtgcagatcagcttcatatgattggtttgaagttagtgatgctgggagatgagacatggatcaaattgttcccaaccctattcactagacaagatggagtgagcagtttttatgtaagtctttttatctgttgcatgtttttcatacatatggttgaaggataatatgataatgtctgtcacctgagcctaccagttactttagagattgcattattgcttccctgttttattttgtaggaatctgccaacattactggaaccactagccaaaaagccagtagaccaaacatgggcatgtattttagattttgcttgtaattggccgttccataccatttgttcggcatacttttatccactatataccaaaacctcattattctcctgatgatgatacaacattctctaatgagagcatcagctactttgggctgtacttgcaaatatatgcatatgcggtacttaagcttgtcttgaactcttgatgctggccagtgacaacgttttagttattcttagcagtttaagtgttttatcaataaaattttgttcaaatgtttgtaactatctgtcaggtgaaagatacagttgaggttgatttcaacgtttcacgccacttagaatttgagcttgctgcaaaagactggagtgtcttggtacgcttttgctcttaaattggtggctgttt

SEQ ID NO: 33447 - DNA, 312 bp, Zea Mays
agcaattcacggtcttcacatgtgcatgaaaatcctagaacctctcggcacaataacaatttacggagaccaacatactgctcgcaacattgaaagggacctcgtcctaggacaatgcaacatccagtaccttatttctgagaacgaaagccacgttgtcccacaccctgagaaagcagtgccaaccaaagcctagattcaaagcaccgaccaggccaaaaaagtccctctagaagccacagtaccaaatcagacagtgttaatcagcgaagacctcacccaagatagagaggccaagctgttgtcctgcct

SEQ ID NO: 33448 - DNA, 873 bp, Zea Mays
acgatatggaggtgctatggtagtatgatcacataaattatatccctgggcaacctgcagctcatcagaattgctagcataataaagcacagaagtatcaggactggctagaggcgacgagacatgtggagggacaatggaacgacgagtatagacacgagtaataggtagtcgatgtgatgaagctggtggtgaatatgtctctggtggagatataggcaaaaggggaccaggcaagtgcggatataaaacagtgtcattacttgaaggaaaacacaaaaaaagatgtggtctctactggagaatacgaagaggaagtagaggaattataaaagaaaagacaattttcaacaaatgccacaccacgtgagatacgcatgcggcgagctgaataatcatagcagtgatagccattatgctcataactgtatcctaaaaagacactcgacagattgaacagttaatttggtgcgctcgcggggtgctagcagaacataacagatgcaaccaaaaactcgaagatgatcatgactagtaccaaagagtacctcacccggatatttgttgactaatttagttgatggttgtctgttgattagataaacaacagtagacacaacttcaccccagaagtgagatggaacaaaggaagcaataagaaaggtgcgagctgtttctataatattgcaacgcttccgttcaaccacaccattctgatcatgagctccaagacatgagagttgggcaagagtacccttggatgtcaagaactgacggaacctatcagacaagtattcaccaccagagtcagagcgaaattttttaattgggccagagaactgagtatgtatcattcgtgtgaaagattgataa

SEQ ID NO: 33449 - DNA, 376 bp, Zea Mays
gtaaaatgtggtagccctagtgcagatttctgtaatttggttcgaaaaacggggtcgaccactgctggtccagacggtccgcactcaggcgtggacggtccggtcgtgcgcagatcggtggatttacccccaatctgtgcaggaggctacgattgttgaggatatgtgtccgccgacatcccataaagtggttgggattggtcatgccaaattgtagcgatggatcgcatgtattttccatagtcttactctcgtgtgatggaaaattagtaacattcaatttatcgaatgcacgtgctagcctcttataatcctctcacataccccctagtattagttgcatttgttcttgttgcttgtctacgtaatatctcac

SEQ ID NO: 33450 - DNA, 460 bp, Zea Mays
ccctaattagcgtatttatcccactctagaataacaaccatgagctaacccaaccaatagagtcttgatggattgcataatctattaacccccacctgaccaaccagattttgacctgcatcatgtagtccatctcacccataactattctaaccatatttccccaactccgataatatacactaacctcgaatcaatgagctcaagaccggagaagaaaagatcaacctcgtcaaggaaggagagaagtcaaactcaacattcggatgcattaccacccaacacagagttcttcctcaccataaacgttcttacctctgcctattcttgccctatcctatccatctcttatattctacataataggtagctgatacctctgctctactaatcacccattattgactaaaaaatgagactctagatttttggaaacaattatagaaaaaaaatgaactac

SEQ ID NO: 33451 - DNA, 470 bp, Zea Mays
tcagcttcgacctaaaccaaattcattacctaacaaacgtttcccctaatttaattgtgcaaatggtggcctattctatcctgcccacgagaaccgcgaaggccatgagcatttgatcgcgttctcgatgattggtggtctctcagttcgaattggtgactcggtaagcatcacagagctatgagagtgctcaaacgaggaagcaggggacagggactgaccggaaaggggttggccgcggtgaagctgttcttcgcggtggcggcgacaaatttgggggaagtttgaaattccagagctcgggtgaaatattacgggtgggagtgggtgctaaggcttcacgatgacatagcgcagctgccccgaccatcaatttatagagggcttcgacggtggcgctcaatttggccgggcagagctggcggctggagacagagatgaaacatggcacagtgggttcgtgtcctcag

SEQ ID NO: 33452 - DNA, 354 bp, Zea Mays
gcaatctaggatagcctattctggaggcccacttatgtgtggggaagacctagtgatatccacataattgcctgaccatgagcttggccctcgtgtgggcatcattgcgaggggctcgaacaaggaccagagaaaatcttgagtgcttctcgataccttggtaaaaatactagagatgttgatgggagtttgtatctctatcaccttttagattttgcaattatggtgtgtgcctttgttgtgtgttttgcattcctaacttggttgataggctagttgttagtgtaagtccccttttcccaagaacatgatctaaatgtcatctaaatagggtgaataggcgaataaaaatta

SEQ ID NO: 33453 - DNA, 275 bp, Zea Mays
ggttctgcccaatcacaacatccatcgactcagtgcgggcagagtaagatgattacccagccagcatgctgagaacagtgtccatctcaacctcgttagtgttggtcggcatctcaaagtgggtctgcctctcagcctcaggaagaccccagaacggagcaatgaaagcctcgatatcatccaatgagggtcgcactctatgacccggactcccatcttgaacaagagggttggaaatgtattcagaaaaaggactcggcagaggcaggttccag

SEQ ID NO: 33454 - DNA, 533 bp, Zea Mays
aggctgaacaacatggtcaacctggctgccgtgctcaacacagagttggaccacgcccttgacgagttgggcaaggttcgagcggaggttgtggaattgcgtgctgagtgcgtagcacgccactatctggatggtggttctcccgcccctatcgggattcaacacccttaccgttcaccgccctgtggtcatttcgactatggtaccccagactacaggacccggatagatttggatccatagatcgacagagtcggagtctgcaataatgcttaattcagtgtcttagtctagtcagtcttagttagagttaatttgcttatcttatgttggatgcttgttatgatggacatgtaatgaagttgaatctttgtaatgattgtcaccaaggtgtgggtatcccctgcaacttggtgtagttattaataaagtcagttatttagttgggtaatccatttatttccacttctctctttatctgagaagctgtcagtgaagatggtcatttgttcagtgctatgaagattttctat

SEQ ID NO: 33455 - DNA, 377 bp, Zea Mays
ggtgagtgcgggagagtctgcctagaaaaggattcatacagtgtattgcggttacctttccgcatttgcttcatctccaaacatgcgctcttcctcgtcctttgtttgcgccgccaccaacgtcatggcttcccttattcatcctcgccgattccaaacccaatgcgaccttgataaggtgtgtcgtctgctggggtggacttcaccggagcacgccagcagaatccatgcggggatgctaccattgggtgccttgtagccaagggagttcgtcctttttatctccaacatgtctgcttggcttgcactaccaattcctccttctttatgctactgctggatgagtacgacctccaacttcaacaccttacccccca

SEQ ID NO: 33456 - DNA, 510 bp, Zea Mays
caacctccgggggctggggcaagaaaagattgaacagggtttttgatgcgattggcttcatatatcctgaatactactacccctcgcgaaggcaagggaaaaagaggaaaactgccgcttcggccaccactgctgcgccgaagggcaagaaaataaaggttttgacccaccggccgcgatatattgaaacggtcgtagttcctgaatttggtgaagggacctcttctgctgccgaagcagagcaagctgctcccaccgttcggagcgctgaaggatcgactgcagtgccgaaggtgcctatagtcgggtcagccaaagccaaagatggtgttgccaaagagctagagttggaaaaaaacagtgatgctgccaaaaattctgagtccaccggcagaggcagaactgtcgaaggtgacaaaggctctcaccacaactcctaagaggaggagaatggccagcgtgctagacgctgtcatggaaaccacaaaggcattaactcctgcccccgcg

SEQ ID NO: 33457 - DNA, 385 bp, Zea Mays
tgacgttgtaacagtagatgagtgtgacacactcgagggggttgtggagcttccgaagaagctgacggagctaggaggcctcggccacgccattggccacaacgcgatactcgacctctgagctagagcgggagacaacttgctgccgctttgaagaccaggagacgaggttggcgccagaaacacggcgtagccggatgtggaattgcgcgtgtcggggcagccgacctagttggcattggtgtagaccaccggctcccatgaggtgtgtatgtggaggcacatgttgaacgccgtaggaatgtcgggccgggtgaacgtgatgcactagaggacgccaatgtggctccgggatactgtcggagagcttcgcttgagtgttgac

SEQ ID NO: 33458 - DNA, 352 bp, Zea Mays
tacaaggtggtcattggtgatgtcagtgttcttcatgttccaacgacatcacaattcgctgatattttcactaaaggccttcctacttcggttttctctgattttcggtctagtctcgacgtctgccgcagctagagttggaactgcagggggcgttagaattcttgtattaggcctttggtgtgagtggggtcggactgtcatatgcttatgcacagacccggcccagggatgttgcgccatccccctctataggaggttttccctgtgctgctaccctgccttctagagtggatgcccttccttctaggcggtttccttatggagcctttcctcctagaaggcttccctc

SEQ ID NO: 33459 - DNA, 513 bp, Zea Mays
ggtgggggaagcagggcgccgccgggtgccgtgaccgaggttaggggaatagccctcgccgtggatcgtcgcatggacgaccacgattagaagcggagtaccggttcggccaagggagtgttggccgtccgatcggtatcgtacaggtctggggcatgttccaccattttagatctagaccgcagatccgccatcgtctggtgctggaccgatctctggtcgtagcgaatctcagccattaatcattaatcatactgttaatgtgtcataccgcttcgggttgaggacattctaatctgggccgtcggcttgtaattcgatggttccgatcaagggatagcccttcggcccgacccctttgctaaaatgcccctatgtttccagggaaccaacccgcggtccagtcctgtgcgctatgtgtcttaagaatttttacccggagacccctgtgcttcgcagtatttggcgcccagtccagagatttgtaacacccagtaaaagtaattagaaaat

SEQ ID NO: 33460 - DNA, 367 bp, Zea Mays
atttcctaggactcgaacgcaaactagaaatgcccttggagcttgtgcgctagggtcctggctgctagtatgcccgcttctgaccaaccctcactttgttgggagtggtcacgagccctagtgggccgaccttcaaactccaattgctaaggggcccactcagggtccattggtgattgtccgcgtgggtcatggagtcttattcctatgaagaaaaaggaaaaacaaatgaaaagatgtgggcaagaggtcttattagggcgcggttacacgatcatggggtcgtaacaggtttaatgaaggacttacttgattcgctgttgatgcgtaatcatggcagacatgtgtggttgacatctcttgccta

SEQ ID NO: 33461 - DNA, 386 bp, Zea Mays
attttgtttataagtaattttagattagataatgaacttcgtcttctatagatttgtagtttttgtgtcatcacattactgcaatcgtaatatcttggacaaagcgtgggtggtgacagtatgttcctcaaaaaaattgtaacgcctcatgtttagaaatacaaccatttaatcattagataagatatatgatgtgaagagttagagggagaaagagaaggccaagaagtattaaactccctaaagtttacctaaactctaggcttagttcatttaaatgttggtctgtgatgtctactaactcgagcacaatttctaaagcagttgtgatatatggttgaatggaaagcgagaaatctttcctaaccatagaaactacatatgtt

SEQ ID NO: 33462 - DNA, 481 bp, Zea Mays
ggagcagctgccgacccccaccccgttggccgagtccctggccttcgcagctgggtcatcgacgtcagcatcgttggcaccagcctttcaagcacctgcacctggaggcgacgaccccgacgactccggagatggcaatgacgaggatgacgacgacgacgacgatggagaggatgagcacgtcaaccaggaagctgactacgcctagcaggaccacttcatggggattggtccatttgtcgaacattacacatcaatgttcgagacagggcacttccccaacctgctgcaagcagtgctgcacgagctaggagcctacgtccgccccctgtacgagacgaggcgagtgagcgagcctccccgggcttgctattacatcactcgcatccatgtcagggtaatggatgcaggtgacaggggattcaggactctgtctgctcacgagtccctgataccgctgtccacctacgctgcctcggtc

SEQ ID NO: 33463 - DNA, 837 bp, Zea Mays
ctaacctttgcacatccttccgcaatctgtgcaagtgtaatgagcgcagcatggtgcttctgccactcagcagaagacaggtactgtggtagcagctcagaagcaattggtacaattgcgttcccaccaatggcgatggaaaggcggtcaaggcactcctgcgccactccatagttgttcccttcccctgcgtcctcatcttcagtttcagcagagtgccaagcagggtcatcctcgacatcaagcagcatctgcatcagcactgcaaacagcctaccaacaaactgcgggagtcgccgcatcattcctggtgcacgctctctagcctcagctagagtaatcacaaactccaccgccaagtgtctggtcccatcttccagctgtgtagcctcagcaacttgcaacattgcccctaccacatcagcaatctgcctcctcaggaaccttggctcggcgccagcgagctccaccagcagctccagtgcctcctgcgcagagacttcctggccagagtttaggcaatcagtgagcgccctcatcattgctgggagcaaatcctgcatcttatccctgtcggagttggttggcaggcactgaacaaggttgactgcggcacccagggccgcaatccgaacatcaggagacgtgggatgcgccagggctgaggcgaggaggttgtggatagtcatgagatggtcgaggagagattctgcgatgtaatccgccagcctcgcgaagatgagcagcgctgactcctgaaggttgtgcgcatcaggccccgacgcggcgcggaagaggaacggcagcagctcgggccaggcgttctcaggcagcagc

SEQ ID NO: 33464 - DNA, 334 bp, Zea Mays
ttgatatactcgaagaagaatggttgaacacggtaattcaatcagcatggtaccaacaaactctgaggcgctatcacgataagaccatgcgacatcgatccttcacagtaggagatctcgtcctccgccgaattctaacgggggaaggacgacacaagttgtcacctctatgggaaggaccgttcatagtagcagaagtcactcggtcgggatcatatcgcctcactcagatggacgacacggaaatcaggaactcatggaacatagaacacctcaggaagttttacccctagccatatttcaaaagctattgggacgacaatgtactctgtaa

SEQ ID NO: 33465 - DNA, 338 bp, Zea Mays
catcatttgggtaagattggagagctcatagtgcatcacatatagttgttgcatcttgtggtactagctggttacactcattttactcttggtaattgtcgtctcctagacgacctagactttgttggatcgttgagcagctattgaagattgttttcgattatgctcatcattatgaggggctcttgtgctcgttcccacgggatattcgcaaaaacaactctagcaaaatcttggcttgttgaagtgcccctctagtgtggttcttacggtgccctgattatgggcttggcatgtgatgcccattagcgcatgaaaacacctatcttggactcgct

SEQ ID NO: 33466 - DNA, 439 bp, Zea Mays
gccaaaggcttgtgtgatagatgcgcagaaaagtggcataagggccatacttgtgcagcaacggtgcagctctaggccatgcaggaggtatgggagttgtttacccctgaggagttgccagagcagcccgagtctgaatctgtacatgaagaccaaatgtttttagtggtgttgtctgaggctgtgagtggtggtccagctaaaaaggctttccaattgttgggttggctacaccagcgggaggtttccatcttaattgattcaggcagtacacattcttttgtgaaccagtgcttgattcaacaattacctactgccctgttagtggaagcacatatcaaggttaaggtggctaatggaggtattatgcactgctcttccgttttacctcgagctgaatggacgatacagggttatgtttttcaccaagatttgaagg

SEQ ID NO: 33467 - DNA, 328 bp, Zea Mays
ctcgaccgtggggcgttacatgcgggtatgataactatgtgctcctaagtaatagtgaaccgactgaacttatctccctattatcctgccgacttatcctcgttcagttccgacgtctgagggcgctgcgcgggagaatcggattaaagctgcggataacatttaaatccactcgagccgcctgggctcgagttgatccaatcttgcgtcaatccattctgttagtgattcctcccctagcccacgaagggttggacttgcggaataatgggcctggagtctttcgcgaggccttccaaccttctagtggacccaggggatatctgtc

SEQ ID NO: 33468 - DNA, 395 bp, Zea Mays
gtagctaggtggctatttatataggccataaaggctactactactattaataaggatgctatagcaagcacccgaagagtagttaggtctgagaagacgactagaatgagcatgcgtcatgattgtcgcataataattgtctcttgtgcaccaacctgcttctctcacctttattccaataataaaaacttgtgattaatgtgatgtactgctatgttagaaatgccttaccccgtgtcagattggtaagtcttgttagttcgtgctatgtgtttgtcttgtcttgctagctaggtggtattgtaattgttcaaccctctttgccaataaaaattgttgcctgttttgcccataaaaagacccctccaaacaaccttgagtttagcaagtgaaac

SEQ ID NO: 33469 - DNA, 383 bp, Zea Mays
attttaccttcttcgttttaaataatgaactcaaagagaggtgctttttggatcttcggcataggacccttcgaagcagatttaacgatttgagctcgttatagaaaataaactaatcaaatgtttgaaagatggattactccgcttcaagaacaggatttggcttggcaacaacactagtgttcatcacagggtaatggctctgctcttcttctcccccgggtggccaagttgaagaaactatttttgtgcaaatgcatgaaaaaggatatgtatacattcctttgtcacccggttgtgacatctgttagaaagcaccttccgttttctggcagctactatacctctccaagatgacaaaaaacatttcttagaaggttttg

SEQ ID NO: 33470 - DNA, 553 bp, Zea Mays
gaaagggggggttcccccgctatgcagccaaaataagtgacaaaaggcacttgggcattacagggctcaagaccgaggacatgtccgagcaatcccacgatcacaacgacatgtgatcacgccctagctaaggggaaccattcatgacatcctccagcagaaggaggtcgaccacgacatcgcgtgacaacgctgaagtcatccttcacaacctctagagcaccgccagcaatgtcctctgacaggtcaccaacaccgcaaagctcgaagcctgactagaactagacgaaagctagagcatcggcagcaccgcgatgggcaccacgatgaacagcttgaagaacccagttcgaggcatcgagaagacgctcttctcggtcggcaccttgggcatgaacaagggcaacgaccctatctgcaccctcttggagacccgacacctccaactctagctctgggtaaaacatagaaaaggagggacagtcagaataactaagagaaatctcaataagaggaaaagatgtcactaacctgcaccacgacggtctgcctc

SEQ ID NO: 33471 - DNA, 379 bp, Zea Mays
ggtcaatataggaatggacgactcagattagctcgagccataccggttcgcgggcgtgtgggagccattgatcttggatcaatcggttgagactcgtataggcgctggatccatttggaccgtaggatcggaatctgaccgtgctagtctcacatcagttatccgcgggatgaatctaatctgggccatcctttcttcatcggtcggctccgatgggccgataccctttcggctgttggttttgcgtatgagtccctgtaaatagttgaaaccaacccgcagtccatcgacaggtagttttgagtcttagatacttttgcgccgttgcccctgatttctctggaatttgtggcccagtccagagaattataaaatctag

SEQ ID NO: 33472 - DNA, 337 bp, Zea Mays
cgatcaggtcaacactgatctgaagaagagaaattgttttatgagaggcctcaatgaccggctgcagcgaaaaatggccacctgcctcgatctatcttatagcatggctgtcagcatggcactagcagtcgaagccaaatatgcaggcccgggaaaatcgaagggctatggaggcgataggcccaaccgggggcttgagaagagacaaaggttggtgattcgaccttttaatcagaatcgttcttcaccacgtccaccctcctaccctttcaaacaacctgtctttatccgtcctgccactgcccccacctcaacaaatcagccgagtgcccctggt

SEQ ID NO: 33473 - DNA, 308 bp, Zea Mays
gcagtggattggtgtcctataccgtggcattcactccggtgatcaacggagagttaaagcaggtcacggcgatgcggtggagatgcctagacacacggcacaaggccggaaggcggcggtcaccggtgaattcatcctaatccaccgcggcgagctcggtacggtggccgaaataatttactggccggagcttatccacggcggcgtgacttcgagcgttatccgatcaacccgagcacgaatcgatacggcagcggcacgaatcgcggtgaagagatcgtcagcggcgagaaaaaactgagctggcg

SEQ ID NO: 33474 - DNA, 584 bp, Zea Mays
cacagggagaggtccacgacggcggtgggcgcagggatgctccggcgaggttctggaccggccgattggggctatgtctgggttctccgagcggcggacactaaatcagtactaccccgagcatctcccccaaatcaattgcaaggatggctactaggtttgctctggccgcagtgaccgtggactttgcgggcagatgaatgtgttcccgtcgattcatggcagttaagttaattggatggtttggagagcatcaagggcacatgagaatgttagaacaagactgaggatgacagtatcggacctgatttgcgctggccgcggcgaggctcgtttcacggtggcggagaacgaagttgggggaaattggaaattcaagctcgctggtagatgattgaggctgattagcggtggctagttagctgacgacctcacggagctagtcacgggctcaatttataggcggagtgagcggtggcgcttgaatcgacgatggcgcggtggcggccggagatgaggaagaagcctggcgcggtgaatacgtgtcctatagcgtggcagtaactccggtgagccacggagag

SEQ ID NO: 33475 - DNA, 880 bp, Zea Mays
ggagattgtcccaggattttccctctatcggggcctatatgaacttggtcagtatgcattctcgggaagcagtataggaactactggtatgacctggagaagtctgaaagatcccctcaatggaatgcgtgatgttatgatcgtaatgagtgtagaatgggcagtgctgctcatattagcattctatttagatcaaacctctttgctaggcggtggtgtcaggaaaaatccttttttctgcttcagatgtttacagaagaaatgtgcaacatcattgcatgaacctagctttgtccaacaggattccaaagtcattctcgatatggagaaatctgatgttgctctagaagtaggttatccctcacactgatatttcttatacttctctacatacagtacatatgaatgacatttcattcgttgacattctatttcagagaaaagtagttgagcaatttttgatagatcccaatgcaaaccaagctatcatctgtgataacctcaggaaggtttatcatggaagggatggaaaccctgacaagctggctgttagaggtttatctcttgtccttcaaaagggccagtgctttggaatgcttggtccaaatggagccgggaaaacatctttcattaatatggtatggtacgattgaaaaatggatgttgtttcgttcttttaacgaaaggtgcataatgtattttatcttataatgcaacttgattttttcccttagatgattggactcattaaacctacatctggtactgcttatgtccacggaatggatataaatatggacatgggtgacatatatacaaatatgggagtgtgcccacaacagaagtatttactcttgtctagtattaacctggccaaaag

SEQ ID NO: 33476 - DNA, 361 bp, Zea Mays
gattttaagtccttcaacagaagcaacaacgctgaaggcagaaaagagttctgccacaactcctaagagaaggaggatggtaaatgtattagatattttagaaacaaccgactccataagtccttctcccacggggaaggttgccgaagctaacaaaacgcaacccaaagctgatactaagcaaaaagaagttgagactacaataacccaggctgaaaccgaggcagggcccatagtgactactgagacgaagcttgccgccaccgagcagaaggccgaaggaataactccaaatattaatatagcttttgagaagagtgcagccaaagaggccgaatcccttgcccctgaagcactctcc

SEQ ID NO: 33477 - DNA, 434 bp, Zea Mays
ggcggagagaggcgaggaaggaagaaatcgacgaggggattggattggactgcgactgttgttgattctctcttgcacgcggcggtcctcctccagagtccagacccaatcccaaatccctaatcctacagagggatcccaaatccggcgtccagtccagtccaacctgtagtagatatccccgccggcttggccgtccgtccttgccccaattccgattgaccggagaggagttggatcagggagcattggaatggccgccgccgcataggatggagctggattcctccggccgctgctcggttgctcccgtgaatgctgtgatcgtcgcgattggaggtggaggcgaaggttctcttcagtaagagcttcaagagctgtgatctagctgattgggtatggaggagagtggcggcagctgcggaaagcgggag

SEQ ID NO: 33478 - DNA, 319 bp, Zea Mays
ctttgcttggttgactagtaaaccatgctgctggtgctcttgcggtcttcaacatctccagctatatcgctgtcaatgtatccaataacctccggcctctgttttcctctccctgcgccataccagacgtccaattcacagttccagccacatgccgcaagatgtgtttcactgcaactaagtgttcttctctgggtgcctccataaaatgactcacatataccagagtaagcaagatcaggccaggtgtttaccagatatctgagactcctgacgatgctgctgtagttggttgtgtcggctgccagagttgtaccag

SEQ ID NO: 33479 - DNA, 504 bp, Zea Mays
cgggtagggaggtggtattcttgggaagttccccaaagttcacgttatccttgttggcgcaattgcttccggatcgccggtcaaggaagtcgggaatttttttcctccatggtggtggagggtgtgactgccttgcgggtgcaggacatccgagtggtgtgtgactttgccaatgttttcccagcaaagcttctaggccttccactgaatcgcgatgcaactttcgaaatcaagctgattccgggtacgcaggctattcataaggccccgtatcggatggctccgaaggagcaggttgaattgaagcggcaattggatgatctgctggctaagggtttcattgggcctagcaggtcgcgttgggcttccctagtgctgtttgttgagaagaaggataagagcaaatggttatgtgtggattaccggtctttgaatcatgtaacaatcaagaataaatatccgctaccccgtattgaagtcctctttgaacagttgaagggtgcc

SEQ ID NO: 33480 - DNA, 395 bp, Zea Mays
gaaaaaagtcttgttaatttgcatgcctcatgtcttggtagcagtatcagattccttcaaccgtggtcaaaccaactgaaagattacagaacagtgggaaaacgaactcactataagtcgagacctttttgttctacacttgtcctttacatgagaaacatatatattatcttatcatcggctgctcttaccacagcatgctatctagagttccaaacaacaactccaataataatttcaaatccaataacaacaaccagtgtaataagatatctcagaacattttcaaattttgatatagctgctttgtattttttccaatacctaatagaaaaaataccgttatactttgtttcaactaatatcagtttgttgatgtaattaaatactttcat

SEQ ID NO: 33481 - DNA, 1465 bp, Zea Mays
attagggcgacgattggtcgacctaatcggtcttggtcgacctctagtcgtccgttagttgtcctatagatttaaggacatatgtatatgtatataactatatattaactatataaacactgtatttctacaataatataggcataattagtagcagactagcagtaattcagtaaaagtgtaaaactgaatccatccaaagtccaaagtccaaactgaaagtaatattagcataattacttgcagtaattcagtaaaaagtattgtattacctgttggctgctacctagagcagatcagcatccaaacaaaatgcatcagcagcagcaccatcttcgtccatgtatccagttgcttcttgggtttgttgttgttctgcttgtgctgcagcaacaccatcttcttgatcatcactatcctcttctccaatatcttgagctgctgtatttctagaatgcttccttgtcctaacatatgttcgttgaggctgagaagacgaaccagcacctgcaggctgcagcagctattcttggcaagtttctgcctcgaagagcctgagttgctcctaatgcctcatccacagcatgtcatatgttgttgtcaccatcatcttcattttcttcaacccattcattttcccacatgaactcttcaagcatcagtgggttgcgtctttttcctttggatcccagctcccttagtgtttgaaacctattttccatcttcctgttgtaactggcatagaccaatttattaagcctctggtgttctagtcggttcctcttttttgtttggatctgaaaatgcacaattgcaagacatcattttcagcaaataaagggctgacccatcataatctgccagcttcttgaattgacgacattcaatggaatcttgttctcatatagaaaatcaactacatggtcgtcaacaatttgctttgcttctgttcctttctttgtgcaatgctcaagagtgatctgagaagttttatttttatgtctctctgctacaacttcctctggagtcttgcaaagcatggcactcactgatttgcttgccttctgtgtatttggttttataggagctgctacaacaaatgaagacatggaagcttgagcaatttgcttttttgcttgcttggtttttgtcccagaacttggtaggggacatacatcaatctgctccccttcctcttcaccttcatcaccatcagcagtaatcataaccctcatgttccttctcagataggtgtgcatctcctttgaaaccacttctggtactctagcacacttcatggtgtcaccaaacccaccggctagatgctgcttaaacctcttgattccagatggcacaatcttcttacagaagacacactgaacaaaatccttctttgttgtgtctggccaccacccaaactgccatcctgggtcttgtgaccttgcctttctcttggggtcatttg

SEQ ID NO: 33482 - DNA, 308 bp, Zea Mays
cttccaccattttccgagtgaaccgactgcgatggtcacttaaaagcctgccacttgtgctaaaagctgattcagatgcgactgtagtgattggaatagctaaaatgtctctagcaaccagcctcaaagtgggataacgacttccctccaacttccaccaaccaaggatgtcaaagttgtcattgtcataattaggaagagtttcttcctccaaatatcgatccagctcattcttacttctaacaaaagtagtggtcttcttatttgcagcaagtgacttgaaaattgataatacagcagttgcacta

SEQ ID NO: 33483 - DNA, 376 bp, Zea Mays
tacgctaagctgtttggcaggtgggcggccagtttgtgggcagtatttgggaggcctttaggtcttctttgggtaccccgttctcagatactcgacagcagccctcgagcctttgtgtaactccttggagttgcatagaggtttttcttatgcgatttctcttttgggtgcgcgcaagtgcatctgttagatgtatcccccgagctcttgagtaatccatgtggatggctcggcggtttatgcagtgtaaggggcggaccctttcatacgatggtttgccatgcaccgggcgtgagtccatcggtctctcgggtgcgcgtgagcgtatatgctagatgtaatccttcagcccctgagtaatccatgtggattgctt

SEQ ID NO: 33484 - DNA, 534 bp, Zea Mays
agttgatgtcttcgccgattgggacgagcattggtgagggggatctacggaatctttttgagggtgaggaattgaaaataatgttgttcaattatagggaggcaggcatcatcccgaaggttgagccgatgtagtatgtggtgccctcgcgttgtccggcggtaatggagggcgtagttgtctttatttgtgcggtgggtctagtgaccattcgctgagtgtatgtaactgcaacttgtattataatgtggcctgatggccttctttgagtgagatacttcgtatcacacacttgttgtgctaattcggctgcacccttaggcgacttttgcacgaggtgtccttttagtaaaaaacttcgtatcgcgcacttgttgtgctaatccggctgcacccttaggcgacttttgcacggagtgtccttttagtaaaagacttcaattgacgcacttgttgtgcttatacggctgcacccttgggcgacttttgcacggagtgagacttcgtatcgcgcacttgttgtgctaatccggc

SEQ ID NO: 33485 - DNA, 313 bp, Zea Mays
gtttggatgtatatgttatgtcttgttaccaccacgtgagcggaccaaattgactgctcaatctatagagtgtgtatttcttagatatagtcctgaacgttgttatgatccatctactcgtcgtattcgaatttctagagatgtgagttccaatgaaaatcgccccttctttcacaactagtctactcactcctcatattatcccacagaatctacttcttccatgtgtcttctttccattcctgcatgtgaaccatcatcttctacatccacatatgatgttctcattcccataacaccaccttccacctcc

SEQ ID NO: 33486 - DNA, 423 bp, Zea Mays
gtgtcgaagtcggcgctggaccccccagtgatcatatgaatgactccgcgatacagctgatcgacgaagtcctcttgctttggggcttggggtggttggggtggtggatgttttgctgttgatggtgtggaggtgggggtgggggaggtacaatttgtacctcctggtggtgttggtatgtgtggtgcggtggaagcggagcggggccgtggttgtatggctgagggggttgctgatatgtgtgcgcgacaactctagggttgtcggctggttgcgcccgtgccatcctatctctggtggccttcgtctctgggcaatctcttgtaggatgcacgcagtcttcgtcgtggaacaggcagtaaaatctgcgtggctgctgcgcacgcccccggccccgaccacgagttccgtttccacggccct

SEQ ID NO: 33487 - DNA, 724 bp, Zea Mays
ggagcgtggaggcacaggaggaggaggcggaatcccaaaatcttattcttcatcatcatcagcagcaagaaccactgtgacctgagtctcgaactgatggtaggtcgtatcctctgcctgagtgtcgatcactggatcaggtaccagcattgggtcctcaggggctggacggtaggagccaaagtggaggcgtgaggcctcaagagtgccctggaactgcggtggctggatcagctatgcaaaaatgtggcacagataatgagcatatggcagctgtcgccgggcacgaagtccatccaataccatgtcctcgatctcacatataaggaagtcaacaacatcaaactctgaatgagagatcagggcaccaagtagccagagctggatatgagtggtggcctctctataacccatccgaggcagtagcgttcgtctcatgagctgatataagtacttggccgctggagtgaaatcttccggtgagcgtcgcgatccatctttgaaaggtggtcagaacagggccgcgacgtgagctgtagatggagcaactccgccgaggaggatcagaagtaccataagacaagctgtgaagatgagtcgatgactcggtgaatccaaagatctgatgaatctggctagcatgaagtgtaacatcctctcgctcaaagcggaacctcatccactggtgattggggtcgatccatactgacgcatagaacactcg

SEQ ID NO: 33488 - DNA, 380 bp, Zea Mays
gaggtctttggaagttggtttgtccacgtcggggacgactgatgcacttgtccgaggtgacccatgcttaatttccttcggggtcatggcctccaatccatatagtagacgaaaaggagtaaatccagttgctcggcattcggtcgtgtttagtgcccagactacttcaggtagctggtcggcccatttacccttcctgtcgtcgagaagccttttcttgatggcagtgaaaatattgccattggcgcgctcgacgacgccgttagattgcgggtgatatactgaggcgaaggcaagcttggtgccgatggagaagcagaagtccctgaagtcctggctgtcaaactgtttgccattgtcgactgtgagctcggacggga

SEQ ID NO: 33489 - DNA, 387 bp, Zea Mays
atggactaaacaaacaaatcttgctgagtaactcagcgaggccgagaagcaaaggccaacgaagggggttagtacactggtgtgccccagtgccatatcctcgtgtcatgcgcacggcaggagcacgcctgtaccctagctgacgcggaggcaagaccgacactgttagcccgcgccagccacggtaaggcacgtcgctacacacgcacacaccatctcggatgacgtcacagcacactagtgggatgaaagagtgtccgacaacaggtcagggcatagccacatacgaccattagtgtcctccgactctgccccatgggtcccctaggcgccgcaacaaggagccttggcatcggagtttctgtagtcacccatgttggttacttg

SEQ ID NO: 33490 - DNA, 282 bp, Zea Mays
gttataatctggtcggtagcttgtcacatagaaatcaaagaaaaacacccctgaatctgcttcgtcagacagactgaaaaagatcctgatggtacagtgaacgaaaagatcttcaggtgtagtgaatgtgccatcggtgaactccgcgccatgatcctcgccggtgtcgcgattcgtgcgctctgagtgcagatattagccggtggtgaaaagatcttgactgcggatgaggtcgtgagctggccgccatacccacttgcctagcggccggtctagatgact

SEQ ID NO: 33491 - DNA, 348 bp, Zea Mays
gctcgatgaggggagatcagcaggaataatctcaagagcatgacttagaggaacatcagccccatcagcaggcggcaggctcctggcgtctggttcactggcttctaaagcgacttgaccagcgagagccgtagaaatgtgcgtcaccgcagcctcctcagaccaaactgggggcgatccaacgtggacgtccatggaagccgcagagagggagcccgctccaacacccttgggggctgggtcgctaccagcgccaccgtcgggggctaggttttctgtagcagccacctctagggctgaaggccccttagccacatccatatgagctggatgactcagattagcgct

SEQ ID NO: 33492 - DNA, 348 bp, Zea Mays
ctgccgaacaaggctgcaagacggagtaagaccacgagacggagcggtcgaccgggtccctaccaaggaagagaagcaagatggaaatccaagtcaaatgtcgtaaagtccacgccaaccaagataagacatgacatccaaggccatggagtcatccgaacgggcaggctgcaagcacgcgagcgtccgctaatgacatgattgcacctccctgagtatggccctagacgtgctcccacagcttcgaaggaccagacagctctatttataaagtacctcatcattagagcttctacagtgacctaaatatcgagtaaagcgtgatagatacaccatactaggtgtatg

SEQ ID NO: 33493 - DNA, 367 bp, Zea Mays
tcgtcatgcttggagatgtcgcgggcaatgccacctccatctccgcgctcgatctctgactcccaagtatccgcttgatctcctctctttcctcgttctagccccctcttttataacttttcgacgtcgtcggcgttgcagctgaaccaagttgctccccatcggcagtgttgctgcgttgacctccagaagcttctgaggcagcgtaggagagaacaggaggaggcggcgtgcgctcgtgaacagttgatagcaagcagtctccactccactaaatgttgcaaacgaggaatttatgctatattttagcagaagttttagcatttcttgttggagctatactggacatgtaaaacctatatatcta

SEQ ID NO: 33494 - DNA, 319 bp, Zea Mays
gaagcgctcaatttataaaagccgaccacggttgctccgaatttgaatgagatttggatcacggcggtgacagaatattgtgactaaagcgagttcactgtggcacgtactggggcaaggtattacgacggtcactaggtactatccacgactcgtgacgacgtggtaatacgacctatggcgtggcacgactgagatcgccggcgtcccccgtcgacatcggccgctcagccatgtcgcaaggcaattgagtgcgatcgataagcttacatccgagaccaaatccacctcccttccgatctttttacctctcgcagtt

SEQ ID NO: 33495 - DNA, 433 bp, Zea Mays
gccggctgaagcggttctcgccctgcttgctttccctccggccaacattattttggagggaaacaatgtcgagggaccggatgacatgcaaattgaagacaacatcaatgtgggcctaatgttacacttggatcaaaccgtccctgaccctgcgcttgaagatttcctgggtagaaagcgttcctcctcttgggctggtttgttccctgacaatggggactcagtttctattccaaagatttgggctgctttcttcatgggccttttaatgaggcctgattcgtttgattgggccaggaaattccttttgtccggagctatctcggcattcgtcgcacctagcatggacatcatttcattcagaattccccctccacccagttaggattcccctgataagcctcaactccctccccagttagaggcaactccc

SEQ ID NO: 33496 - DNA, 746 bp, Zea Mays
tgatggtccaggcttcgcctcacttcttatttaccgttagttaatttcggttgcaacaagaacaatgtttactccgatgatataataactttaagtatttatttaaatttgtggtattatgttttattgtatttctttgtgtctcaccttcatgtgagcaaatggtactcgatccctgggtaagtggcttcaatcggactagattcgaggaattgacagtttattccgtcttaagtgtgggtcattgcccttagggtgagaccaaacacttaagctagaataatccaggcggttccgccacaacgggcgaccgagtccctgcagggcaaccttgcgagccggaacgaatgaccaagtccctaccgaacaaccttacgaggtggagcgggcgatcaagtccttgtcgagcaaccttgtgaggcgaagagggcgactaagtccctgctgagcaaccttacgaggtggagcgaacgaccagatccctgttgaacaaccttactagagactagcgtaagggaatgtcgacccaatgatatgagcctgtgtcgacaggacaagacgggtcatcactttaccagaggtagaattgaagacacggtggcctagcgcaccggaccgtttactagggaggtcagaattgaagacttaatggccttgcgcaccgaaacttagggttgtctagaaatactgagggtgactcagggaaactcgtgggagtggtatggccaagggagagctgtcaagaa

SEQ ID NO: 33497 - DNA, 352 bp, Zea Mays
aatggtcttccccattgcagtgtttgacatatttcaatctgtagcatgtatgcatctctggtgcacactgccgcaccccgacccgcatgcacaggaagcctctgtgcttcagcccacctctagtcaaaaccacggcacaacagctcctccacccaaagctgtcacaaactcacaacgtagctcagatgtactcaatgccaaagtcgggtgcctcagctcagatctactcaacgccaaaggcagcatcgagagatgattctggagctcagatagctcaaatcagaaggatctcttcatgcccaaatcgcaaccctcccacccacacacacaaaactaactgtacaaaataaag

SEQ ID NO: 33498 - DNA, 397 bp, Zea Mays
agaacacgtaggatcaccgggaacgcttcgggttgtccgttgatcgcgttgtcaccgtgggtagagagattaggggataaaaccttgaaattggttgaggggtaatggttattaggggtcgaattaggtgtcaaccgctccagagcaacggtcattgcgttttccggacggtcttggctcgccggagccgctgctccgccgtcctcagtcggggacttcaattcgtgaagaattagaaagtgaagggcctctacgcaaagtgtcagtgacacataggaatagtgcacaggactctttacgggttattcgaacagccagggtcctctgtgcaaagacgccagcgcgggcgcgcgtgggcgcatttcgcctgggtatgggccgtatcgggctggttcca

SEQ ID NO: 33499 - DNA, 444 bp, Zea Mays
aaacaaggtgtatgcataagatgaaagaaaatctaagggagttcttggaattagaggatgaaaaaggggagggggtagtttagtgtttcaaacctaggttaggatttttgggatgttacaaacctaccccacttaaaggaatctcgccctcgagattcagacggggctcaagaaaaggtaagggtattccttcctcagagaatcctcactttcctaggtggcttcctcttcactatctctgctccattgaaccttacagagtcttacttctgagttgcgggtccttctgactgctgagtcgagaatcttcactggcttttcccggtactggagatccttttgaatctgaattgcatctgtctcgatgtggttttctggtacttttaggcatttgcggagctgagacacatggaacacattgtgaatatctgacatggattctgg

SEQ ID NO: 33500 - DNA, 727 bp, Zea Mays
tcccgtggctcccaaccaaacggaccctaagttacacccatgccagcacatgcctcttgaactcttttggctaaccatgtgaaatttaaccatttggttttagtgaatgtgtaaatttacttggaaatgcagggtaaaaaatcatcctctgtttttattcacttgatctagttcctgagtcctgaccatgtaactgtacagtggtttactgttggttgtattcacaaatcaggtaaggactacaaataaatgtattaatgtaatatcaactctgtaaatgaagaaatactgttccagagtcagtttttcccttactggaagatattacttaactgctgatctgctctcttgggcagagactttgagcgttgcatgggcgtttgtgctatctgaaagagtgaagaatcccaaaatacagacaatctgtattcaatatgttttcaacttattgtatgtgcataattcataattgaacacttagttggtgggttccttctagcacaggtttcatatgctagatctatttttgaatgaaagaatgtctgtaagtgtgttttaggtgctgctttgtcattctacctgccctacatggtggagaattagctgtgtctgcgagaatgggtctccttgcagccctaagcaattgggggtggagggcctacgctaatgatcaggttggataaatatgaatcataaacatgaattaaggcttcatatggctatgtcc

SEQ ID NO: 33501 - DNA, 296 bp, Zea Mays
gccagagctagaggaaacaatagggctaccaaaaatcttgagcctgccaccgaagctagaattgccgaaagtatcaaaagctcctgcaataactcccaagaggaggaggatggctagcgtgctagacgctgtcatggagttgacaagggcatcaactcctgcttctgcaaagagactgccaaagctgctacagctcgcgttgaaaccgaagctgggccctcagttcccactgaagcagagcctgctggaagtgaggagagaattgaacaaggatcttcagacattggtttggctct

SEQ ID NO: 33502 - DNA, 413 bp, Zea Mays
gcaggtgtaggtgttgtgacttggtgtgcagcatgagacaatgatgacctagtacggagcatgagtagtgttggtgatggctataacaggacacattggtgtccaaagtgaggtgcatcaatgatagtttgtgcaagaagaaggtgataagatagaattgggattaacgataggtgtttaagacttgaatcactaaataacgtacctaataggttatcgttcaatttaacactaaagagaattgtttcatggatatgtgtttgggactacagcgggatgacctcgtggtatgatacaagcactatggcctctccgtaagtggcacataagccataatttgttgttgtgagatgtacgtttctcacatggtgagaagaattgacgatttccgtaagatcttttatgagattttt

SEQ ID NO: 33503 - DNA, 891 bp, Zea Mays
gcaagctgctcaagagtttacaccgaaatggaaatgaagaggtcatacaaccattgctatgtgatttcattaaaatccatggcctgcttgatctgacaatgataaatatgctgtcctgttatctcagcgaaaaagatattagcaaaactatttggttttctaattacatggacaaaggtagtgttcctgtcagtgttctgagaggagctgtctttgctctaaagaagcaaggtgaagttctggacgcatgtaactttttgaaggtagctgaacaaagtgggttttcagtagatctaactatgtattccatagtggtggatggcctttgtaagggtgggtatcttgaaaaagcgctagacctttgtgaaggcatgaaaaaagagggatttcaacctaacattgtcattcataactcagttctcagtggtttgtgtcatcaaggatgccttactgaagctttcaggctctttgactacttagaaaacagcaagatgcttccaacaataatcacctatactattcttataggtgctttgtgtagagaaggtttattagatgatgcagatcagttattccaaaaaatgtccaccaaaggtatcaaacccactacccgtgtttacaacttgctgataagtggtcattgtaactttggattaactggaaaggcccttgagcttatgtctcatatggaggaactctttatacttccagattgttttacacttggtgcaattatcaatggactttgtctgaaaggtgagactgaagctgcattaagattctttaatgaataccgccataggaatatagatcctgattttgttggtttcatgagccttatcaaaggactctatgcaaaaggaaggatggaagaatccaggggcatcttga

SEQ ID NO: 33504 - DNA, 689 bp, Zea Mays
ctgttggaaggaggtgccttggaggtaggtgccgagggaatcttggggccattcaccgagttggagtaggtaggtccgggtgccttcaactaggggcagttattcttaaagtgactggggtctctgcagtgtcaacaagcatttgctagcggttggttgcttgcaacagagggggcctgaagggagctctgactctgctgactgtagcgggacggagtgggtctagatggtttattgaagcttggtcccctgggtggaagcccaaagggtcgagctctctggtgacgttcttgctgctgagctcggagaacttggaatttcctcttgaggtgccctttttcttccacttttgccctttccacttggatggctttgttggagaggtgagaaaagttgaggaagtcttggctggcgaggatggtcttaagctcgggtcttagtcctttcagaaaatgggccatcttcctggactcggtgctgacatcgtcaggcgcgtaacgggccaactctgtgaacttgtgcacatactcactgactgttctcccaccttgagttagctcccagaactcatcttccttgagttgaactatcccctggggtacatggtgctcagggaaggctgtctcgaattctgcccaggtagcatctctgatggccttactgaaggtgtcccaccatgctaaggccat

SEQ ID NO: 33505 - DNA, 360 bp, Zea Mays
aaagcttcaatgtcttcaggggagggtcgcactctaagacccagaccaccatcacgggcaggaggattagacacaaactcgaaaagggatctatgtgatggcagtttctaggcaggataagcaataggagcaccagcattcgaaactctgcccctcaagatcatattcagtcggctcagcagatcggtattgggaattctcttgtttgtcacccgggtgccatcattgatgccgctgtacagatatgccgggaattctcttgtttttcacccgggtgccatcattgatgccgctgtacagatatgtcgggtgccatcattgaaaggctggatattcttgaagacgaaatcggcaaccaca

SEQ ID NO: 33506 - DNA, 403 bp, Zea Mays
gggtaatatggctccggtggaggtgaaagttcagctacatcataaaaaatatttgttaattccgaagctgaaaacgaatttcgaagctaaacctcagtaaaggtacctataagccttgcatgcttggtagcttcttcagttcatttagcttcttcttgagcgtcgtgagattgtttttcatttttctaatcgcttcatcagctatctcacggccgcccttcatccaaacctcggagtaaaatatccagcctagcacagaagcttcagccgaagggtctttgatgtcatccgccgagaaaacaaatcctggctaaactatagccttagcatgttcgcagccagctttctctaagatctacgtggccctcgtgtgccagcgaatgcgcagaagtctcctcggtca

SEQ ID NO: 33507 - DNA, 359 bp, Zea Mays
aaggaaggcaaccggccatacgagcctgaagagtgttgctaaaacgccgagttttttctattttgttacttataagtagtggcttctctacaataatactattaaattgagcttctctataatgatgtttacaaattacaagtgaacaatttatgtataacagtattttgctattattttatccattctgtttttcttttcttgtaacctatcacatgcaaacggacgagttcactttagttttaacttgttggaaatgaaaatacaatgttttttcattcataaaaaaagcaaaatagaaaagggaaatgttttttatattttttatttatctggccagcctccccaaaaaatctcgt

SEQ ID NO: 33508 - DNA, 317 bp, Zea Mays
tggaaatagtggcacagcttcctggacgcaataagcacagcatagaaaagtttgtgcgtctcaaggtacctggactttgccttgtggaggacctccctgacgtagtagaccggcttctgaacggtccagacccctgtagccagtcccgagccctcaggttcctggtcttcttgtaccgtcctctcgacgaccagcaccatgctcaccgctttcgcagccgtcgcgatgtataaatacaacagctccctaggctctggggctaccagtattggtagggacaccaggtgctgcttcaactcttggaaggcttgttctgc

SEQ ID NO: 33509 - DNA, 544 bp, Zea Mays
ctcctctatgtgttgattccatcggatctccatccctcccctcccccggccaccctcaaacgcacccacgttttgtcggagtggagtggatccgggtggagcaccagctaaaggcccatcaatttcagtggatggatagtggacaattgagggctcggctatcagcaagagaaaggagttagcagacctgcacacgagttgccattaataactaactagtaagttccaagttcactagaattctatatattaagcgccaacgcatatccggtgtctccttgagccacgtcacctccaagaatcttagtcatcgaatcttatacgtgcggcttcatcgcttagcaacgctcaactacggtttggaactctcccacgtaccacgccacacgacaagtcgcgatgcttcgaccttccccctcccctcctaaaaccatgtcatcgtgttggtgctgcctgtcgctcggagcgtcttcctctccccactccactcaaaggtcgacatcttctatccattcgaagtggctccgggtggagcaccaatccc

SEQ ID NO: 33510 - DNA, 504 bp, Zea Mays
ttgttactcaacattggaataaacaagcaattctagaagtgattttcttttggggctggcgtagtatttcttttaaggtactgttggagatgctctaactgtaactgtgctgattgtcacgtccaaatgatcttcctaggcagaaccacaaacaaaaagcgctgattaaatatgcttcaggaggatagagggtcagctctagttaggtactcgcagctgcctcgcttgctcaatggcatgcaattcaggaaaaggtagaacatccttgccttccatcagcaatccattcataggttcaggctcatttccatgcccagcacggtcaccctaagcaaatttcacttgcaatggccactaggtaatttcatcaaagcttttaaaccaccactttatatatcatcatcacatatcctgatcccatttgcactgcctaacacctacattcagagcaaagcagatcaaagcacacagaactgaaggcgcgggtcaagtaaaggacatggg

SEQ ID NO: 33511 - DNA, 369 bp, Zea Mays
gcgggggaaccaccatcctgatagtttcgtgctgcgcgctcagcacacagttccgcaatctccgctcgagccttgcccaacttgtcaagggcgtggtctagctcggtgttgagcacggtgaccaggttgaccatgttgttcatcatgggattgccctcaccaacgggtaagacaatcacacctccagcactatcagtcgaacggcgagggtagtgctttagatcgaggtcgtcagctaccccgctgaacaacgagcagtactgcaaaacgcatgccatgcaacatcttgcatggatgcctcgacagtgtcccttttagtaatagaatagtgctataagaaggcctctgcaccccggatatcatcatccg

SEQ ID NO: 33512 - DNA, 457 bp, Zea Mays
gggctgtcaggctatctgggactgaattctggtatgacagtgtaatgaagccatatttgagcttaaatttggtcatgatccagtcattatctggttatgattactataacaagattaaagctgaataatagagctacaacttctttaaagacagattgtcaagtcattacatgggaaagggagatttctgctctgcaaatctgggtgtcagtccaactgaatggagtttaccatggtacagtgcctgaacaagatcagaccgccagcgcatctcaccgccgacgatccccgccacgattcgtgtcgccgccgtcctgatttgtgtgcggtatggagtggataacgccgggggtggataactcgtacgtggcgtcattccccgagtccaaccggagtcctcaccggcggccaccgtgaccagtaaattttgctgcggtggcactcatgccatgatctc

SEQ ID NO: 33513 - DNA, 390 bp, Zea Mays
atccgtcgaagctagacctaacctatgaccttgcttagctgatcgtattatcattcccctgtagatgcttcagcacttaggatttggtatggggagaagaagcaaatcaccttgagggcctatccgtatgcggtgaagggagtaggcaaacgaagggaaatgggatggagaagaagccgttcaatttcttatgctctagttatctcacctccgcctctgcacatcccactccatggctaaccgctcccatctttgtcgttgcggcagcgccatcttccactggtaccttttctcctccccaccacgcaaccctaggacaaagcgcaggggagcagggacactgaggaaccacagtcgctgctcccgacggcgatggtgccatgactcgac

SEQ ID NO: 33514 - DNA, 366 bp, Zea Mays
gtctgatcaaaatttgccagagacaattcttccagaccaacgtgagcagacaaagctagagaaggaacaccactactctccccgctagctatgtagcgtcggctgttcttccgaatcaagggaatttcctcctcctcttccacatcttcatcaataatacagacagtacacccattgggatcaactttggctggattacacccattggggtcaacatcatcaaggtcacacccattgggtgcagcatcagtcgggtcacacccattgggttcagcttcagcaaaaatcggcactagcacttcctcagcagcaggagcagaagggacggcatcctgattcaagcatgacactcgccgaagacgtctc

SEQ ID NO: 33515 - DNA, 386 bp, Zea Mays
ggggataaaaatatcataaagagtagagcgaagataacaggccacgacacatggaatccaaccatgcaaacctttgcttcctcattgccacctcgccctaatatgccctcagtgtggacggacgcctgtcgctcaaaccgaaagcggggacgagactcgtcgtggatgaggcgtcgacggtcgtgacaatccccaatgatgggtcagatgaagcaaacacttccatgccaactgaccctgggtgacgataatgaagcctgacaaaagtaagctgggaggtgtagggaccaccggtggaggcgtctgtcttgcggatcaaaacagattgaccttcgtggcaccaagggaagatgtgttagttgcttcttccacaaagggcgcaaaaa

SEQ ID NO: 33516 - DNA, 291 bp, Zea Mays
tctttgttgctctgtacctgggccctgactgtctactctttgactaggcgagggcccctagggtcttcgttcccggtggtgagacaatgtacgttgctggtcggggacgaagtctttctcgatgtttttctagcgaactgttggtcctcatatacgattatcacaccctaaggacctaggattttcatgcacaggtacaggccgtgtatagctgccttgagtttgtttatcgatccttgtcccatgatggcattgtatgggtagatcatataaactatgtcgaaagtgatc

SEQ ID NO: 33517 - DNA, 295 bp, Zea Mays
tgatcttcttattgatgccagaaacatctccaaagtctgacatgcgaagtatgttcataattcatcaccacaaatcgcccgcaatttgcaatcgaaatggagtaaacattatgagtgaaaaagttaacaaatgaagcacataaagagaaaaacctatcaactgaaggcgagtacttctgcttgggatcagaaggaaaatatggatggctgtcggtcactgaaaatcagaaacacggaccaatcttttcttcatcacatccaatgcggattcagacaacaaaaagaaatcagaaac

SEQ ID NO: 33518 - DNA, 546 bp, Zea Mays
gaggtattaaaaaaatctgaatcgtcacctctctagtacccgacgctttctttgggtgtcacttcaccaaaaccccaaactgctccctctccggccgctggttggcgatcttcgcttcccgtctcgatggcgtataggcgtgtcgatcccgagcccttccttccgccgggcttcagcgcttcggtggtcctgcaccgggaggttatggccaggtcagtgactcggcgccttccgccattacatgaggattgggccatcatcaatattcaacctttgcctgatcatgaggtcactttctcggcggtgagagacgtggtcagagaatatttggtggagcaccgtcggcttggggtgcgggatattcagcggtcgcacctggggcaggtcctgattcagtttagtagtgtgcttgagagagacaatctagtcctgcttggcccgcagaactacctggatgccaccttcactgctctgtggcacaatgatgcctggaaccacagagcccttttctttaattgtgaatgctggctcatgttgttgggattc

SEQ ID NO: 33519 - DNA, 605 bp, Zea Mays
aagacaccagcggtaatggcatgtagaaccatgtctcctacaaaacgcagcagcagcaacacaaggtctattcagcccttcacccgctagactcggcggaggagctcagaagttggtacacctgagtcatcacatcgcatgacccactcgagtgcaatgaaatatcttagacagaatgatattaaaggtgaatctgatcagtatgctatagctaatgaagtacttaaagacgaagcaaatttggatgcattcgcctggctgccagacattaaggaaaggatgggtttcgtgcttcgaacctggaacgtaaaggtaagccaaacatctaatgtgttcatgttttaattttccagctgtatttgttcaaccttactgttctcaaagtaggtgcatggtagcctgaacgcaggggacatgaactcttgagcgcctgcctgctggtaagccaatgtcttgctagcatatttttcccctgctgatcctttgctagtatttaggttctgcagttacagccctcccatactgcaactcatcatttgtttcttgccgctttcttagttcctttgcattttagtttcattgatgattagtagctcagtgctttg

SEQ ID NO: 33520 - DNA, 332 bp, Zea Mays
attgtccgtgtgctggtttttggtggtgtggtgtctaggttcaacctatcacttacctgctacacctccgatccactctctctaatgagtttatattttatttttgtgtacttgtttacatactccggtgtctaaggataattagcgggaatgtaggtttccaagagcaccgagaaagaaacagcggagtttgaaaggcgggcgggcagtgggcagggagtacgagagatttgtctttggggacagaggccactgggctgggtataccccgtatgcatgtgcatagccataggggggcaaaggcaaggaatgatggcctggaaatgggcatc

SEQ ID NO: 33521 - DNA, 341 bp, Zea Mays
taagccgtcgtaacacatgacaaccgactagactagtgttttttttaaaaaaagagttaaacaaaatccggcctcccccacggtctcactgacccctcgtctcgtttaatgggccaagtcagtgcgcgcgcaagatttctagtggcaggctggaacgagaaggtccgttaaaggcctacctgcaaccaaaaggacatacgtactgcgaagtaaccctaacgcctggtgccagccgccgcgctctcgctcgctctaacgccgacgcctggtgccgactgccgaggccttcgctggttactagcaccgccccagctccttctcccttttccggcggaggtgaa

SEQ ID NO: 33522 - DNA, 486 bp, Zea Mays
ggtaggatgaggctggaactgctgcaattttaactgtggagcttgatgctgcgcttggaggacgtgctgtccagtaccgggaatcacaaggcaatgaaactgaaaggtttctctcatattttaggccttgcatcatgccacaatcaggaggggtagtttctgggttcaaccatgtagaagtcaatgatcagaagcatgttacccgattatatgtgtgccgaggaaaacatgttgtccatgttaaagaggtgagctatctaaagcactatatttttccaactagaaaggtttgctcattttctgattatgctttctattttataactaggttccttttactcgttcatcccttaaccatgaggacatatttattttggataccaagtcaaaaattttccagttcaatggttctaactcatgcattcaggagagagcaaaagctcttgaagttgtacagtatatcagagatactttccatgagggcaa

SEQ ID NO: 33523 - DNA, 381 bp, Zea Mays
ggattgcgcaccgatgtgagctcgtgccgcgattccaccatgcttcgtcgcacggtcgtcctgttgtgcatcacgcagtgagaacccttcctcctctagctcgtcacactcttttatgtgcctagcctgccgatggtgagcactctcaacactccgccttgttcctatccttgcatagcacatctcaggttggggaatagtggtcagagggccggattcgccgttcgtcggcgagcagagagccatgaagagagagaaagggggatggtagggcgcggggaggaagaagacggccatggtccgttgggtgagagatagacggtgtctgggccgttggattcacatggggtggcggtgatctggttggtgcgtatcatttcc

SEQ ID NO: 33524 - DNA, 378 bp, Zea Mays
tgtccataggtagatcttttactgatgcccatacctcttcagcagtgaaaggagcatctaaatgagataagtcctgctggaataatgggtggaagtctgccaagttgaaggagtaatttctcagatcaccagaacttcgcagatgttcataaaaatcatccactacttcttgtttctcctcttgagtaacatagattctgtcttccacctgtagcttagcaataaaatttttcttctttctaaaccgagtgtgctgatggaaaaaatttgtatttgcatctccttcctgtaaaaacagcaccctagaatgcaaacgggcaatggtgtgttccaaagaagtcaagcccaaacaatgcatcttgagttttcttcgcaacc

SEQ ID NO: 33525 - DNA, 844 bp, Zea Mays
gactacgttgaaggagaatttgataataatagcaatacatgtcctgatattcagccacaatcaatgcaagttggaccaatagtccccacatcgaggccaaaccataagagatcaaaaaatttcagtgatcaagaagatgaaattttggtttcagcgtggttgaatatcagtatggatcctgtggtaggtaaagatcaaaaagtaggaaggtattggtctcgtatctatgagtacttcaatgaacataaaccatgccaatcacaacgtactgttaattctctaatgcatcaatgggagacaattcagaaatgtgttaacaagttttgtgattgtttaacaaggattcagttaagacgacagagtggtactacaatgcaagacatggtaattaatcatcatgcagtatcacattttctttcatttttagtatttgagcctaacacatgcaaatgttttgcccaggttgcacaggcatgtgcgttgtacaagtccgaagatgaacatgaaaaaggatttcaattcatgcactgctggaataagctcagattacaacccaaatggcttggtaaagtagatgatttggctgctcctaaaccttcaaacaagaaacaaaagaccactcgtgaaggggatgccaatggaacattaccatatgaaaccaaagaatctcaagttcaagtcgtagagaattatcaattgaccaggcctcccgggaagaaaacagctaaagcagcactagtacaagagaagaggaaaagtgtgactgtagcaatagaaaatttgtgggctgcaaagaaagaaagtgatgctgagaaagagcagaagaaagaggagagattcaata

SEQ ID NO: 33526 - DNA, 384 bp, Zea Mays
gacgactagaatgagcatgcatcatgattgtcgcattttcattgtctcttgtgcaccaacatgcttccctcacccttattccaataataagaacttgtgaataatgtgatgtactgctatgttagaaatgccttacctcgtgtcagattggtaagtgttgttaggtcctgctatgtgtttatcttgtcttgctatctaggtggtattgtaattgttcaaccctttttacaaaaaaatgttgtctgttctgttcataaaaagaccccaatccaaacaaccttgagtttagcaagtgaaacctcttaaaaatcatgatggtgttggtattttctaacccttgtgtgttttacccttgaatttacacctacacagcttgtagattcc

SEQ ID NO: 33527 - DNA, 326 bp, Zea Mays
gggtggaactggtggtggtggtggtggaagtggtgcttgttgctgtagctgctgcgcccttctctcctggcgtatctcctctcgctcttggcgcatctcctggcgtatatcctctcgctcttggtgtatatccaagcgttcctgccgcatctgcgcgtgcatatccgccatggtgttagccatctgctgcattatcctcatctgtgctgcaacagatgggtcagctccggctggtggaggttgtggaggatccatctcaggttgttgttgttgtggttgtctaaatatcctctgagtgtgtcgattgggaggtagatcaattccac

SEQ ID NO: 33528 - DNA, 296 bp, Zea Mays
cccagggagaaggagcggtttggagcttggggcgtcggccatggggtagagaagagcccctgctggcgtgctgcgtcgaggggcgagtggagggagacgcagggagcgtgcgtcggctgaaggagaagaggaaaatggttgtggcggctgtggtttttccaggggtgggagtgcaaaaatgcctccacttgcaaggggatggctcctatttatagagaggcactagggctagggttttcttagtgggctgggccgggttagaatgggcttggcccaaaacatgaaatcgggtcgcg

SEQ ID NO: 33529 - DNA, 281 bp, Zea Mays
aggtactgtgccaaaggtccaaaaataccttccttgagtgcattattggaaattgggttacataaatatgtaaatgtgtggtgctacagaaacttgctacaacggtccacgaacttggcattgctctttgaatcttgcgcctttttcctatataacttagttgaccccatccgaccaataggacatttatttctgcgacccgcctgttgccattgaattttctgcctctgatgcttgttcactcctcttgctttctgtgagctttgaagactcgagctttt

SEQ ID NO: 33530 - DNA, 285 bp, Zea Mays
atgcctgtgcgcacacaacagcaagaacagggacggcgacgtcgtgtggatagagcggcgaggcaggctgcgtgcgggctgcagcagagcccaagggcctggtcgtcgtggtcgctcggtgtcgaggctgaggaggcacccgacagtgggtgcggccatggtgggtgccgagcgcacaggagctgggcgcgcggaggtgaggtgcggctatggtggagcatgctgattccttcgccaaaatgtcgcagagctttcacaatgaaacaaagggagaagaacagcaag

SEQ ID NO: 33531 - DNA, 344 bp, Zea Mays
gaagatcagtgccatcacactcgtggacgacgtccaccagctcaatagtgaccaatccaaggatctaagagattactacactatccatctaacactaggagaggagagtaagagacagtgtgccaatgaaaacatggacaacatagcgttgtagcgtgaggacgaggctacgttagcgggtataagaggaccccggttcaaggacggagattagggagcaaatgttccaaataccctacacctacacgtgaaggttggtgatgacgacagcctcatatactaaggggtgtcgaccatcgggtatgccgagggagtcaatgtcgaaacagccaaacagatggcgc

SEQ ID NO: 33532 - DNA, 483 bp, Zea Mays
tgagtggtcccactgggggctcgacccattggaggaatctcattgagtccttccttattcgatcctgtatcggccctttgttcggtatggccgaccaaagaggggccccatggccaccccgtccgacgggttaccataggagaatgtgaggtacgaccttggacgtgggcacaagcaaatgaccgatgggctggtgacctagcttgcggctcactgggagcttactcggtccacccctcgctctacgtgagaagttggggtgagtttcggtttttgatctggtcgatatgaggtagttattgtggcgcgtggtaaatgaggtgtccatcatgacgttgttcggcgcgggtggcttgatgggacatgaaacaacttattcactgtatcatgtgcaggtggcatgatgggtggttagctgccttgcttgttagtggtgtaccccctgcagtgatgcacttctgaagccgtgataataccagaaat

SEQ ID NO: 33533 - DNA, 416 bp, Zea Mays
caactctaatgccataggcaacatcaccaagtgggccgcagagctcgctgagtttcagctggacttccagcctcgccacgttgtcaagagccaggtcctggctgacttcatcgtggagtggacacctcccccgagtgctcctgggggtccggatcccgattcggaccccacacctgtggagcccaggggtccggtcttcaccgagccccactggccgctcttcttcgacggatccgcccatcaacaagttggtggagctggggtggtcctcatcgaccccaacggaggtcaagtgaagtacatggtgcaccttgagttcaaggccaccaacaatatggcagagtacgaaaaattgatctttggcttgtcagccgccctatccctggggatccgccagctcctcataaagggggact

SEQ ID NO: 33534 - DNA, 384 bp, Zea Mays
gaatagggtccatggactgcgggttctattctctaaaactgtaagggttctttaataaaaatgtgttgcgaaggggtatccgtagatgcgggccgttggattagatccggacggcgcagatgattctatcatcatacagaacccgcatgttacgctagccgttggatcggtgatctgtggccccgatttaaaataccccagctagatcctacgcgtccgatcatgatccgacgcccccgagtctccctagccgaatcgttacggtgaaagtaatcacagccgcccatcacagatcctacggcgcccgacaaacacaccatctaacccaaccagtcggcagcgcaccagacggaacccggcggcgccatcgccggcgagcgcgcg

SEQ ID NO: 33535 - DNA, 645 bp, Zea Mays
ccgtcgtcaagaacggcctcccattcacaaatttaggaggaacatcctccttcttgtatatcgggatattgattttaagacgtaatgattctcgagtatgaatcattccatcttcttcccatacttcgaaattgtctatttggaaccatgtgcgtactccacgagatgctgattccgcttttgattgatttgtcataactctccgcaatttatgtaggtagcgtgccactgattctgatagtttcttgacatcgttagtggcgattcgctgatgaattttctttgaaatagttggcccttcaacattggtgttaacctttgcttccttttttatgtttgcatcgacattctgaggaacaattttgtctacgtccccctcgtcgagttccttcgcaagaggtgatatgattgtttcaacgatttttgtggaggtcggtgccatattttcctgcaccatggggtatggaatgatcgaactatctttctgttgcattgatgttgaattcggcgttggtgacttatgacgcgatacacggcttaagatcggctcatcacccaacttgatgtcgcgtcgatgccaaaggaccaactcgttcattgcctcctgcaaagttatgatcccctcaactggaaagtctatctccc

SEQ ID NO: 33536 - DNA, 287 bp, Zea Mays
ctagtaggtcgttgcgtcactgaccgggtcgacaacgctcgtcggagaccttcgtctgagcatcaacaggcatggagtagggcttgtagtatgacatgttggcccactccagaacgttgatggcatactggcgctggtgaaggaagattccgtgggagcggcgctcaacagtgaccctgaggaagtggtggagagggcccaagtccttcatcacgaactcacgctccaatgcagcaatcgtgtgctcgaggagtatgacattggacaccatgagcacggtgtcgttg

SEQ ID NO: 33537 - DNA, 277 bp, Zea Mays
tccaatcgcatcgaagcacatatgcccaaaactggcatgtcacaggctcatagccacgactcctcgcactgtcgcgccgccaagcacaccaattgcacaatcttcagttgaccatgtacaatcgattcttggagtgctttaccttgatgaggagacaacactcatggatgtgcagggtcgtcgttgactgaattgacacatgcactcgtcaatctggtcgatgcttgagtagagccttaggatgtagtacacatccgtcaatgctgatgcttgtcat

SEQ ID NO: 33538 - DNA, 447 bp, Zea Mays
cttaacatatcctccagcacttggttagtcctctcggtctgcccatcagtttgaggatggtaggccgaactaaaattcaactgtgtgtccatgcactcgtgcaacttcttccaaaaccgagaagtaaactatgatcctcggtctgacacgatcttcttaggcaccccaagtaaacatactatccgagtcatatacaattctgctagcttggatcccgtgtaattagtcctcacaggtatgaagtgagccacttttgtcagtctgtccacaatcacccaaatggagtcataccctccaggagtgcggggtagtccaacaatgaaatccatgccaatttattcccatttccacttgggtatcttaagcaggtgcaatagtccagctggtctttgatgtttggccttgactctttgacacacatcacacttagccacatgtgcagcaaca

SEQ ID NO: 33539 - DNA, 340 bp, Zea Mays
ctgggtactccctccgtctagacgggtcagaacgaagaccaccgagaattctgaaggctgagcgcgaggaacgtgaagaccacgtgttgtgacctgctctttattgtaataaggggcccacatataaccggcccatgttgcagggtcccacctataagacgctatgagggtagggttgttagtgcatctatccatgcttgtaattaattacgctataatgacccgctgtaaccccccaaggaagaatattccggaggataacgtagctaaccgagggaaaaatcatctttgacagggcagagctgaccctcggttacctataaatacccacttacagcac

SEQ ID NO: 33540 - DNA, 321 bp, Zea Mays
agtgccactgccaatttcagttagcaaggctgtagagaagaaacacttaaccttttcagggaacttcatgggcaagaaggaccaagatttcccgggatctgttttggatagccacaaccatctcattcgaagggcccagcccatttccttgaggctaaaaattcctaatcccccaagctcaattggtctacaaacctttccccatgccactagtcagtgtcctcctctgatctcctttctgccctgccaaaggaaacccttcctaatcttgtcaatggcctttaaggggcccaagggggtagctcaactgccatagcaagg

SEQ ID NO: 33541 - DNA, 363 bp, Zea Mays
tctgacaatattggcttccatcaaagcggtcattaagtcttgtgcatcactataacgctggttatttgggtggttgggggctataaatacactctcaatcagtctattcaatacacaagagctgagtattcattcccacattcaatagcaacactccaaagagatcaaaagcctcccaagtgtcattgtagtgagaattgagttagtgccctgcatgagtgagttaaagaaagtgtgtgttgcgttgttgtgcggagttgtaactcctattcatttgtaaaggctagcgagaggctcccagtttgtggagtacctcgtggagactccggtctctcatccgatcaaatagaggagtcaagctcg

SEQ ID NO: 33542 - DNA, 369 bp, Zea Mays
gttgatttgtaagttctgtagcttcccttttatgaagaatgatttcgtcttctcctgccttaattactttgcctcccggtcagttgacgattccatggatgttggtgtcgcagaagtagtggccgagtcattcgggatcatcttgtcgctttttggggtaacagccgagttattgttgacaatgtcggcgcttctgaagtagtgcccgagtgatagcggggccacttcggtgtttttaaaattaacaaccgagtggttactggtgacatcagcgttatagaggtaaccaccgagtgactgatggcaacgtcagcgttttagaggtaacggccgagtgactgatggtggcgtcggcgttttagaggtaac

SEQ ID NO: 33543 - DNA, 371 bp, Zea Mays
gtcgggtgtctagcttggatcaggatgccggtccttctgctcctgttgctgaagaagtgccagtgcctgaatttactgaagctgatcccaatgggtgtgacccatctgacgctgatcccaatgagtgtgttgtccgtgttgttgatgaggatgatgaagaagaggacaaaatccctctgattcggaagaacagccggcgttacatagctagtggggaaagtagtggtgttccttctcctgccttatcttccctcattggtctgcaagaattatctctggtgaactttgatcaaactcttgaagacatggttccagaagatatgttatcagaaccggcagatggtggcgcgatggatgtttgtgctggtgtg

SEQ ID NO: 33544 - DNA, 417 bp, Zea Mays
atcttctctacttcgattggagcccgtcaggatggagttctgagcggatttcgggctatgggttctagccggggacatcctccgtcgcgttcagcgatgccgcgccgccgcaatgtcgtctgggcggggaagacggccttctggccgttgatcttggcgtgtgcgctgtagatcgtggcgcactgagcggctgcgatggctcggtgcttacgttgaccgggaccgtaggatcggaattgatcgggcacgattagatcaggggaaattaaatccgagccgttggattgtgatcgggtggtcctgggcggctgataccccttcgcggtgcgggttttgcaaaagaacccttacggttttggagattagaacccgccgtccactgcgcattaggcctgtgtctgtgtggcttttgcgccg

SEQ ID NO: 33545 - DNA, 369 bp, Zea Mays
gaaaatactaaaagattagttcacaagtctaaaactgaggtacagaatggagaaggttcatgctaaaaaacagttcgccataaaacaattatgcaacaatggtctagttctacaatatctgccaatagtacatgcaaacctaccatgacattatgcacaataaatgattggtagaagtaccttaatggttcagcgcagaccatcagttctcagctcttagaggaacaggagtcacataccctggagaaccttgtacatgctctaaacatcgctggaggtgcgacatctcttcagactgcttgttttagtcttgatcatctcatctctcttacggacattatcaaaactcaagagaaaatacacttgcct

SEQ ID NO: 33546 - DNA, 322 bp, Zea Mays
ggtggtcaaaccagctacggttcgcacagtcctctcgctagctctgtcaagggattgacctatacaccaacttgatgtcaagaatgtgtttcttcatgggactctttctgagacaatctattgcaaccagcctgcaggttttgttgactctgttcatcccacttatgtctgtcgtctcaacaagtccctttatggcctgaagcaagccccacgagcctggtacagttgttttgcttcccacatgaagtctctgggttttgttgaagccaaagcatatacctccctgtttattttccacaatggcactgagacagcttacttc

SEQ ID NO: 33547 - DNA, 408 bp, Zea Mays
caaccatcaccggagttacggcataagtgtaatacgtgtttcattgtcgtttacgtattttgtaataaggttggtccactgtcaggccgtagggctttctgttaagacttgtataaggtgaacctcgtggggagggacagacagaaaagaaaaatagaaatacctgctccacaaacttgtgttccaagttggtcggagggtgagcaccgccgagcaccctcacgtcgcggttctcaccgccgttggccacgggcgtgtatcacaggtggtatcagacgtcagcccttcctcggccgcgctccactcgcggttcgattcgttcctggtgttttcccctcttcagcaccacggcgccgcctcccgttaagccgtcgaagcagacccagctgctcctcgacgctatggcgg

SEQ ID NO: 33548 - DNA, 503 bp, Zea Mays
aagctctcaacatgtcttccaatacttgattagtccttttagtttgtccatcagtctgaggttggtaggccgaattaaaattcaacttcgcatccacattctcatgaaaacttttccaaaatctaggggtaaactgtgatcctctatccaaaatgatcctcttcggtacactgtgtagagacacaatccaagccatatataactctgccaattaagatcccttatacgtagtcttaaccggaatgatatgagccactttggtcagtctatccacaataacccatatcgaatcatatcctttcgaggtgcgaggcaatctagtaatgaagttcataccaatctcttcccacttccactagggtatctttagtggatggagtagtccagttggcctctggtgttcagccttaactctttgacacacatcgcgcatagccacatgtgcagccacatctctcttcagtccataccaccagtacttctgcttcaaatcttgatgcatc

SEQ ID NO: 33549 - DNA, 619 bp, Zea Mays
ctggatttgtggattgcagttgtaagacccttctcaaaccttcaaaaaattctagtctggctccatcttgttatattattgtaattttttttttgatattaatatattccctggcattaggttggtggagttcattcacaccttattgcaagaatacagagagacaagaatcgtgctggcttttctatttctcagactgaaatcatgaccactgtgtttccactgtttcagcaatacattgaaccacatcttgtccatgctcatgttggtacaagaaacataattgttgacctatttttttcaccttacataaactgttcaacattctgctgttattacacatccattaagtttgtgtacttatgcattgctatttttcacttgcttggcagcttaagattcaaaacgattttgatcctgtgctctctcctgaaagctcactttttgtgttaaaaagtaaaaaacaggtaaacacacaactttcaattcccacattttttatgttcacacttggcactaggtgatagttgggaggcagatcattgctttgtacttaataggtgattggtatgcttagctgactgccctagggggatggtgtcaggggtggtaatgagcc

SEQ ID NO: 33550 - DNA, 281 bp, Zea Mays
taactttgtccatggattatgcttttcatcatcatcacttttatccttatcacctatatatcttaccttgatgtttatcttataccggccctttaaaatctcctcttttcatctcaatctgagtgttgtactttatctattttcccttggtcgtatccccttccttgtcgcatgcgagtttttaactccatcctttgttgtgctctggttgggtattacttttacctttctcatctctcgatcttaccttggtgattacactatgtccgttctctaaaatc

SEQ ID NO: 33551 - DNA, 566 bp, Zea Mays
ttttccctgactccccacgggggtctagaccacatcccgttccctcgggccctcgatgtgtggtgctggtgctggggtgttatcattcctgggcatgccaagctggttctctccttcatgctcctcatgcttagcgtagaagcattctcgagttgggtcataaccctcgtcgtcgaagttgtagtcgttggagacatcgaagaggtagtagtcacacacagacaagaagtgccacatggaatcggggtcacagagcccaaaaaagtctaggtcgggatccatgtcatcttcttcctcagagtccccgtgctccgaggttggagtggttgcgagcaggtctagtgttgaccacagatggtgtcctagaagctcaatgtatgcactcacgtgagtacctattgaagaggagtagcctgtggcgacattgctcatcctgaaagggaaagagtgtgacatcgatcctacttcctggatcacgagaggaggggctgatggacttgtcatgggatctatgtgtgtagtcgtcgtcattcctggcgcgaggctaacgccagacaagtccctcg

SEQ ID NO: 33552 - DNA, 420 bp, Zea Mays
ctgagccatccgatcaggaatctagggctcaaaatagatcaagtgttatatgaaccggtattgaataatggccactggatcaagatccgagggcccgaagccaagacgccgcccagatctaatcgtgtgcgtcgactatggatccaacggccacaaatctaaataccccaaatcaaacctaagccgatcatccacagatcgacggcgcacaacggttaggatgaaacggtacgcgatcttctaatccgagccgtcgatcaacagacggacggcccagatgtctcccccaattcctttgtcgagctacggtggcgccgcccagggcacacggcggaccatcgccggacttgtgcgattcggccacacgccgcccgagtttccaatccaaccaagccacactaagccaaaggtagggcgaac

SEQ ID NO: 33553 - DNA, 321 bp, Zea Mays
caattatgctccggtattcagttttgttcactgcatgtgcttcacttcttttggacaactgaatccaaggctccatgggtgttgcacatccattacagtttgccattcctacattctcaagcaacttctttgcataagcttcctcttttaactccaatctcttagctatctagcgcacttcaattccaagataatatgacagtaatcccaagtctatcatccaaaacactctctgcatttctttcttgaattcattaatttgtgtgcctgactccccaacaatcaacaagtcatcaacatacactccaaccacaattctct

SEQ ID NO: 33554 - DNA, 517 bp, Zea Mays
cttcggtaaagtttaattggtcggctccgagagcaatagaaggccagagtcaagctagaacaagaagtaatttgtcatgtactgacccgaggagtgctggccacggaggggttcttcacagcggcggaagaaaccgattcaagggaactccgatgatcactgagggtggtggacagaacagagtgactagtgattcgttggcttcacaatgaagggacgaagagctgtgctcggttgatttggatgaagggggaagagagcgcggtgaatttataggcccagtgagccaccgcgaaggccatggtgataaccatcaccggaccttgctggcgaccaacgacgacatcggcgctggccttttctaagagtttgccacgttccgccgcgacagtaatgccgtcagatcggtgatggcgtggatggacagagaagagcggcgacggtgaccaagcttggtcggaaggatcagtggccgtgtggcggtcggaataattatcttccaccgcgacgatcttac

SEQ ID NO: 33555 - DNA, 716 bp, Zea Mays
cggagacaataatcctacagacatcatgcgcaagcctacccgagcaaaagccctcactcaattggatgggtttgacccaaatcgatgcttgttcacggtcatggcggcacaagggctccggtgagcgtgttccgggcaacaaaacgcggtagggtctaaattgaagcttgggtgagtttcacaaattcacgagaggtcgagtatacgcactaatttggaccaagcgaggggggtggaagagtgagtcgacgtgagcatgctctcagaggtgttccgtggcgtcgagatggtgttctcgataccagaatgcggtagtgctcaatcggttaggccgatgagcaacgttaatagtcaaggatgataaaacatggtacagaaggggattaacagacctgagatcggcaggccacggcgagatgcctcacaacggcgagtttggctaatttgggggaaaaactaaattcgctgtctatggtggctaatcggaggtgagagttggtgtcctggcttcgcaacaggctaacggagcaggctgcacactcaatttataccgtttgcaagtggtggctccgaatttgggaaaggcaagcaggcggctggagcaaagatgagtcaccagagttgcttatcgtggcattcactgggcaaagggtttacgacggtcacgacttagtcttcacggcctgcgacgacatggtgaaacggcttaaggcgtg

SEQ ID NO: 33556 - DNA, 465 bp, Zea Mays
agaacgcatacatctcatcctcatcacagattctaaacatatcaccctgatccctattatccttattttcagcattctcaataataaagctactccaatcaatagacatggtgtcatcatcattaccatccatgatgcgagcacgcaattgtcaccacctatttctagtgttagcacaaattattacacataatgatgaaacaaatgctgcaaaataaggtgttgccacaagagctgcgacagagggaagtacctgcagaaggaagtggcgcgacaggatcctatcacaggcttggacgaccccctatttccaccagctcgacgccggctcacaccagctcgccgatgtgccgcagcgaagaaagggttcgccgttgagtgcgttcgcgtcgtccggagaaggaggcagagaagagaagaaaggaaaatgaaggaagaagacggaaggagacggcgttgcgttca

SEQ ID NO: 33557 - DNA, 296 bp, Zea Mays
ctttcaaggagagagttattgaggagggcccttgggcagaagagggagacgcaaacatcatgtggaggaagatggcgacatgcatcctaaagatagcttcagaagagtttgggttgagtcaaggaaacaaaagggaagttaaagacacttggtggtggaacgaagatgtccaaaaggctatcaaggagaagaaagactgctacaaacgcttacatcatgacaagtgtgcaaacaacatagagaagtacaggatagcgaagaagtctgcaaagcgagcgattagtagagcccggggt

SEQ ID NO: 33558 - DNA, 681 bp, Zea Mays
ccttcagctcccagtcgttgatggacaagggttccccttggcctccgataggtgatgatcgggatgatgagtcggcagggcaaagtcacgacccttttgcctcgtgaccagctggcgggcatggagatatggactctaatgagcctaccttggatggaggggatggcgcgaccagtgagggtgaggaggcccaatgtccggtgcatgagcgcttgggtcgtcgagcttctccttcccatcacatggaggctctcgacgtatcatgcatgggtggcagcacagaggaggcctctgcccctattttctctagcgaagacgatctccaactgacttgtaagccgccttctccagatagggcgggtccatgtttgggggtggcagtcacgacccctattgtcctctcgtatgatgtcctgaagtcgccagtcaagattgtttactctagaagacctgcgacacagtgcacctccgctgcactcacccttgagacgcaggagggtgcaattgattttggggttgttgatgcccatgtcctaccagtagctttggtggatgatgcgacgcagctgagaggtttgtcctcctcctccctaggacccacttccatggagttggtcgatctccccgttgccataggtaaggataggttcattcaatctattgcttgctggtccaacaagt

SEQ ID NO: 33559 - DNA, 583 bp, Zea Mays
atcatatccagccccaacatgcaaaagtgcaggttacagggatagtttgcagatgttgggcgggtaagtgctattgctttgataggaactggcatgcttcgctcttctggactaagtccgctgcacctttctttgatgtaggccaatagaaacctgacctgaaagcctttcctaccaaggtctttgatgttgcgtgtattctgcactgccccacatggatttttttccagcagttgtcttctcgtagccgagtgaatgcatttcatggggactcctcctgcatctctcctaatgtggacatgcctagcattcactcatcttcaaatgaaactccacttgatatagctggtccaattacaaggagtagagctaaacaattgcagaaggaaattcattcaccggtgaacgctaaccttatgtttaataatcagtctatgttgaatgagcgtatgcttttgagttcttgtttcaatgtcctcaggaatgatggagtgtatgaaccaacatgggatcaagatgaattcaagcctctggacatctgaaccaagaagcctatggtgtgcatgaataaaatggtggttca

SEQ ID NO: 33560 - DNA, 352 bp, Zea Mays
ggaattagggagctatggtggctaatcggaggcaggagcaggtgctctggcttcgtgattacctaacggagctagtggtatgctcaatttatagtgtccaagggcagtggctcctaattttggaatggcgcgctggtggccgaagagaaggaagagtcaccggagtaggttatcgtggcagtcaccgtggcaaggcctccggcgatggatgggcttgcaacacaggtttactacgacttgttaaacctctcagacgcgtggcacccaagcggcgggcgacaaactccggcgaggcaatctagaccgacgataagtcaagtgggtacgatggctagctcctgatctcatctgc

SEQ ID NO: 33561 - DNA, 398 bp, Zea Mays
ggcgttgtaagtgcatgccctacctgtaccggatatcatgggcgtcgtgcggacatgtggcctattgctaaaaatttggagcgtgagaggaggagcaagatctccatgatgctacaaaagatgtgggaaggcacgacgcacatcttggattatcgtggtcatagacaccatggcagatgaagagggtgatctggaacgtaacagccatagcaagtaccatccatgttaccataagggttgtgggaagatgtggcataggccacgcacgttgccacaactgccacacgggtggcacaccttagattaccagggcctaacagctagcaaatgggcacgatgctattacagttgctctagttccatatcgaataggtgcgccacgtcccctgactctgcca

SEQ ID NO: 33562 - DNA, 471 bp, Zea Mays
tggaaattatgtgttgatgaggagtgcccatcacctgtggaggagcctattgaagttcaatctgaacaactcttcatgtctatttctcaatcagcttggtcaggttccacgcatcatcagacactgaaatttcaaggatgtattcagcaacagtcgttactcatccttctggacagtggcagttcacatacatttctcagtgataaattgctacctgttctgcaaggagtccaacctgtgtctcgtgctttccaagtgcaagtggctaatggttctgttgtgtcttgtcagcatcaactattaagagcatcctggacaatacaaggctgtgaattcgtgtctgatatgatatttctgcccctaccgtgttatgacatggtactaggcatggattggttggcatcttttagtcctatgcgagtggattgggaacagaaatggttggctattcccttccaaggatctactatg

SEQ ID NO: 33563 - DNA, 754 bp, Zea Mays
aaaatgtcgatggataggaccaacaagcctgcattcctccatgctaagaacctgaagatgaggaacgtattttccaagagttctgccccaatcttctctgccactactacttatgtccacgccatcaaggtagagctctctcagatttgtgaggtttgacaatagtgtctcgaaacttggttcttgtaggaccaaaaggttatagctgtcaaaaagattatacaatgtgtctatttcagcaccatcaatgttatggattgaagaaatatccagcgatatgagactcgggagtttgcctattacaaccggaatgtgtccatagaaacctgcgtaagaaaggttgaggtgtgtgagtaccgaaagcctctcaaagccagccgccggaataggggatccaccgaagtcattcttgctcaggtcgagtcgctggagtgaggtgaggttgaagagcgcgccgtcaagactgtagctgtacaagccacggccaccgaggtcaagaacagtgacatggccggagacactgtcgcatccaacaccctcccagaggcagcagtccgtgcctgcttcccatgaagcaagggtggtggtggagtagtcgaagagaaaggatcgcttgagctggaggagtgctgcagcatggtctggatggcaccaaggagctgtgaggttaccataccaagtggatgaagctagtgatgagcggaggtggtgtatcagtatcaggaagaggggaaggagataactagcacgagcc

SEQ ID NO: 33564 - DNA, 568 bp, Zea Mays
ctttttctgattcgttgctccttttccgagggtggttgcccgaggcagaagacacttctttccagttcgattgctcaagggataaagggcagtgaagtcgaggggagagggtgtaccttttgagacgggatgcggaacggcgctcagggtgtttttcctcagaggggacatggtcatttaatgcgtctggacgtcttgcctgtcagcaaaccgttcgtggcacacgtgcgtgtgggattcgaaacaaccgtcgcccaaccattttcgaatcacaccttggtggctccgtccgtccaataaactaacagggaggggggcttcagaccattacctttgcttagccctttgccttctaatgtcgttttcgccttctgctcaaagagcccttcgtcttcctctcaccctttcgtccgtctcgatggtggaaaagatcactgtccttcctccccgcgacccatggcccgtgtcctccatcaccgatggggatctagaggcactgattgatgctggcctgctccggcccggaaccaccatcccgcagcccgagtggatcgcgtcgcacgatgag

SEQ ID NO: 33565 - DNA, 419 bp, Zea Mays
atccaatccagtgaataagaacttgtgatatcttcagtttagcttgctaacaaactaggcaagattgaacaaaagtcttgacttgcttcttcatcttaggccaagcaaagattgctttgatccttctgtaccttaccggaaaacccgagtgctctccaagaacattgtcatgtagggttgtcatgatagtgttatgcatttcagtattagaacatgcctgctcttcgtgataaggcatttgtcacttgattatcaacacccttcttatatagtatatgaatctgtaaacccataagctttgtgaatgccttctgctgccaatgagtcgacaacctctaaccatcgaggtgtataaggttttgttgatccgtttgaataaggaaatcgctatgttgaagataggatcgccactgctgaac

SEQ ID NO: 33566 - DNA, 678 bp, Zea Mays
gcaagcttataccgaccggatcactcgatgaccggtgctctacttcggctgagaccaaattcaaaccctaacaagagtttcccctcaactaatttcactaacggcgctctaacacgctctgtccacggtggcagcgggcacgacgaacaatcaaacgcgttcctgacgatctaaggggtcttagtctaattggcggggttggggagcatgaggggcacacaagaacactgaaacgaaagggcagagggtatgagcggacctgagacgagctagccacgacgaggcctctttcacggtggcggaaagcaggtttgggggaagtgggaaattggtgagctctagtgatcaattgagggcacgacttggtggcttggtgcttgactaccctacggagctcatggcgtgctcaacttatagagttcgtgagcggtgttgcttaatttcgacgaattgcgctggcggtcgagaggggaatgagtcacggcggtgatctaccgtggcaaccgcagagcgactgaactacggcggtcattggatggtcacttcggctcatactgacgcgataaacctcctaaggcgttggcgtccacccggtgaatggtgaacacgccagtgattgccgctcggccatgtcgtcggtgtgcactgatgaaccatcaagcacatagtacattccag

SEQ ID NO: 33567 - DNA, 479 bp, Zea Mays
atgaacaggttgtagaaaacatgtaatacagtgtatggacagccaacccataaatgacaatgaggtacaaaattaattcacaaggtgttgcacttgttgtactataatgccaatgatcaatcaagtttatcagttcctatataaactatcagattgcattctacaatatagaagtgttagtattctataaaatacatgcactaaagaccagaacactgcatctaaaccttgcaacagaaatactcatgcacaactaagcatttgagcatatcgacattcctaaaggcttgttgcagacatacttcagctcaagcacaaacaccagttggacactaaaggctcgctgcagaaaaactaaatattcgtgcacaaaagaaataccatgcacaaaagaaatactaaaggctcgctgtagcacagacatcagtgaatttcttaaacagcaaaaatatcttgatgccaccaaaaaaacaagaaag

SEQ ID NO: 33568 - DNA, 399 bp, Zea Mays
ctggctgaaatgtatcaaagctacaagtgatgaactgcttgggccgtattccaaagcggaagataatgccttatccacatccttcgggggccggggaaaaaagagattaaacagagtttttgatgccattggttttctttaccccgactactgctacccgctgcaaggacggggaaagaagaggaaggctgttgcttcggccgcccccgatgagcctgcgccgaagagcaaaaactgaaagtccttacccaccggccacgttatattgagccgaccgtggtacctgagcttggcggggagacttctttagctgctgaaccaaaggagcccattcctcctacgcagaaggctgaagaaccggctaccatgccgaaggcacactcagccgagcaagctgag

SEQ ID NO: 33569 - DNA, 449 bp, Zea Mays
cgatgttctggactgatttggcggaagtctcaaattggggagatgtaggggatgattagaggtgagagttggttcactggatgcacaactacctagcggagctgatggcacgctcaatttataggattcatgagcggtggcggctaatttgaagaagacgcgtagtggcccgagagggggaagagcactggcgcaaaggattcatggcgttcatcagcgcaatggatcaaagattgtactcctaagtgtaccacgattactactgcatagtaacaagccacggcgtggcacaatcgaggtcaccggagtttccacggcaatactggcagtccgccacgtcgcaacggctataggcgcggtgataagcctcccccgtgaccacatctgctccccgcgagatcttttacctccccgtggatatccactgggtgccaggcacgaatcacggc

SEQ ID NO: 33570 - DNA, 366 bp, Zea Mays
tcgatcgccataactctcgatttctgtgccataacactctgtgtatgtatttattcacaattcatatacttatgactatgtgactaatatgtgctcacctcttctgtcatttcagtgcccttgcctgcccgtgagccatctcctgtcctgcctggattctctccctctcgtgtgagatttccaggtagctcttcgctcttttgtcattctatcgactgttatcttcttgtgcttagcttctctctctcatttccagttgtcaggtcaggatgccgtgcacgaagaatgtgtcggcgtcagggggaggagatgacgaggaccctcctcgccccttcaggcaggtcaaggggaagactgtttatttgg

SEQ ID NO: 33571 - DNA, 273 bp, Zea Mays
aactcgaaacacatagtggcctgtgtgtgtctggaaggcaatcttttgtgactcttctgctttgagtaagatctggtggaagcccgctcttagatctaatatggagaaccaggaggcaccaaacagctcatcaagtaactcatcgatgatgggaacatggcacttggatttaactgtaagggtgtttaaatgtctgtaatccacgcagaaacgccatgaattatccttctttttgaccagcaacactggggatgagaatgcactgtcactgtg

SEQ ID NO: 33572 - DNA, 296 bp, Zea Mays
tagagtactggtagaggagcagcaaggtgagacaatcccttggccccagccacaacccacttccttgtttcatcatcagcaagccgaagaagcaggttcaggcttggaggcaaatgataaaaaacacatctgttacgatgttaagcccccataattatcagggagtccaccctttcttgatcagtcatgttacaacatcagaagcctcttcccacccgtccaagaagatctcagatccctgtagaggagcaagagagtggataccatattttctcagcagaaggtcctagcaaaca

SEQ ID NO: 33573 - DNA, 407 bp, Zea Mays
agattgaaattttgcattgcttgaggtacttttatattatgttgattgtgtagaggatcgtaggataagactatttgttcttagattgtcccattacacctcttagaatgctctaattattacacatttatgtccactagtctaggctctaatatcaaggcactatgccaataatagctagggaaaatcttatgtgtaaaccatggcgatttcaaggcatataccaatagtaccagcaacatccaatctttgtgagctactcataagttcaaatatagagaggctacctcagaacttgtgtctccttgccttgtatgagcacataattgtggctcaatagattgccttgggtccttttgatatattgcattatcaagatgcaatattgttaatgcataatattgtcc

SEQ ID NO: 33574 - DNA, 353 bp, Zea Mays
tttcctcgagtcgggtcacgctgtgcccacgctgccttttgcaccgaaaaggggtgaaaaggctcgcagctttgcggccaatcacaaaagctgaaccatacgagaacagtcgggatattgatttttgggcctaatcggcaggtagttaaacacatgaggaatgtctagccacatcgtggaccacgaactagcccaaatggcccaacaaaacggtagcatgatctaattttggtcacttgatcagtgctcaagctgctatggattgttagagcatctccaacaggcctcaactgctattttcaaaacaatagttttttaagatgaaggtgagaaaactcaatctaagttactga

SEQ ID NO: 33575 - DNA, 499 bp, Zea Mays
ggtggattcacgcaacgaccggtgctcccgagcggctatcaccgaattgaaccttccccgagtgtttctcgcaacttaatttgaagattggtaacctaatttgccctggccacggcgaccgaagaccatgcggacaaaggaacgtgttcccggcgataggtgatggtccagttcaattgaaggggtcgaagagcttaaggaggacctagggatgctagaacaagccacggagagacttgaactgacctgagctgagctggccacggcgaggtcgttttcatggtggctgaaaactaaattgggggaaatccagaattggtgctctgcagtgaacgattgctagtgattcttggtggctggatgcttaactatcctacggagctcgtcgtggcttcaatttataggagggaagagcggtggcactcaatttggccgagcaatgctggcggccggagaatgagaagagcactggcgcagtggattggtgtcctccgtcgtg

SEQ ID NO: 33576 - DNA, 352 bp, Zea Mays
gtcagcaagctccatgggaggtcggtgatgcggtctaccgaaggaattgaatggaggcaggctgtggaggcgggtccgtgtgcaccagcagaacctttgactccggtgaggtcaattccactattccattgaggtagagtttgggctcgagctcgaggaggctttacggaccattggggaagctaatggtggagctggattgggtggaacgtcaccggagtgggctgaccatggtggccggtgctcagaggcaagggtggtgtgtgcggagctcatcggatctggacgctggcttgggaaggtgtggcaaagggctaagagagcaacggagggcatgaccaaggtcttggct

SEQ ID NO: 33577 - DNA, 715 bp, Zea Mays
gcaggatctgtggaaactgctgctggacgacaacatgctcgaagcgggggacaaaatggaggggtgggaattcatggagtcgttggccaactgcagcaagctaaatcttttcggtctgggtggcaacgatttcaccggagatcttcctgcttcggttgctaagctctcgacaacacttgagtggctttacctagaaaaccttgcgatctccgggagcatcccctcggagatcggaaacctggtcggcctgaaagtacttgttctgacggatactgacatctcaggagcaattcctgatagcatcgggaggatggagaacctggttgagctacacctggacaacaatagcctgtcggggccggtaccgtcatcggtggggaatctcaccaagctcatgaagctatcggcgagcggcaacagcctgggaggatcaatcccgaggaatctcggaaagctcaccgacctcaccagccttgatctttcaagcaaccacctgaacggctcgatccctgaagaaacattccagctgcagtctctttcgctgctcctggacttgtcacacaactccctctccggaccactccctcccaacgtcggaaggctggccaacctcaacacgctgagactgtcaggaaaccagctgtccggccagctaccggcaggcatcagagactgcgtggttctggaggagctcctgctggacagcaactcgttc

SEQ ID NO: 33578 - DNA, 346 bp, Zea Mays
gtagacaacttagaatggacgatagaggcacagaaggccctcgatagcctcaaggacctcttgactagggcccccgttcttgtcccaccagatgatggcgagtgtctcttgctctacatagtggcgatcgcctaggtggtcagttcgttgctcgtcgtcgagggacgaggggaaaggatgtgcacgcccgctacagtgccccatctacttcataagcgaggtcttaacaggcgcaaaaactcactaccccaggtacaaaagctcctatatgttgtcctcattactaagcgaaagcttaagcagtacttcgaatcacaccccgttactgtagtaacaatgtttcccc

SEQ ID NO: 33579 - DNA, 456 bp, Zea Mays
ggtaaggtaggttctcagccgtccgatcctgatccgacagatccgatataacggtgaaggggtacgctctattgaccactagatcaagatgcggtggtgaggatttcaccaacctaaacgctatattgcgattaaatcctgagcgcaagatggccgatccacggtcgagagaagccttggacgaatcaatactccgatctaatcgcagccctcgcctaaagatccaacggccaggaggccttctcccaccactgtccaagccgagcgacagcaccaggagctccccacgatggagctgtcgccggagatagccatctctcgccccgagaccttcccacactgcctgactagcgctacacgaaccagagggcatggcaaatcccgagaagcaaatctcaccgagtttggaggtgtggaattccctgcccatggagaggcgcggctgtggcagacgcc

SEQ ID NO: 33580 - DNA, 470 bp, Zea Mays
gccttggggaccccaaagaggttggggaccgacaattcatattatgcaaggtcgagggcctcggaccccaaagaggttgggtaggtcatttgttctaaacatgaactgctttcacaccgaacatctggtcccaaatttacctgcattgttaggctgctgtaaattccaggatttccttcctgtggtcaactacgtctacagtggttgctacaaattccaaagatttccttccggtggtcatctacttccacgcgtgcgaagctatatatccacgaggacccctagatccacaaaattaaagctggaagctcgtttgtctctcctcccctcccctgcaaaattgctaagtagaaagggggttgcaaattgcaaccggccgtgggctgagaacgactttcgtgttttgcagccagccaagccacatatgtccggctccccaaaacaaacggaccatcggaaccctagaaacc

SEQ ID NO: 33581 - DNA, 328 bp, Zea Mays
cgaccttctccttctccttcacagcctctggagctcttgagcttgtcatggtatgagaaggagcctggattggggtagggaggcgcttggagccagacacgaaggtatctttaaaggagcaaggcacctgggaagaaccaccagacgaggagtcatgaccagcgtcactccaacgttgtgtctttgaacgcccaccttgtcgagcctggtagctgaaaggtccttcaccttgagaggtacgcagggaggttgttggggtggtcgccgagtccgaagtggaagtcagtgagaagccttggctatggttgaaaatggcgttgggaggtga

SEQ ID NO: 33582 - DNA, 569 bp, Zea Mays
agactacctatggcggtctactgcgatgtggtaacaccactgactatgtgacacacgggcggtaagcggccaacaccggcggggatcatctcggccagccgcagaataagtgggtacggtgaaccatccaatgaccgggtccgagattatcctagcgccaagatcttttactccccgcgattatccactttgcgccgagcacgaatcgtggcggccggcgtgaatacaagtgcggggatcaccggcggcaaggttaagtgaacacaagatcttcttcagactattgtaccattgaaaccttccttcagggcgcctgacagagcgaattagagggcttagttcttcaatttttatgtgacaacttgaccagccctctgtagcaaagttgttaatctataatccagctacaattcgactataggaaccttggccatttgcttactcgattaagctcaaatcaattccaaagttcatcagtgttcactgtcagccatgttcagtcttcagtagtgactgacagccagactttaagtccatctatctccaatttttatacagcatcaatgctt

SEQ ID NO: 33583 - DNA, 279 bp, Zea Mays
cgccacggtcggccttcgaaggccgaagcgagaccagatggggcgttggatgatccccttgatgtcctccctttcaatcagattattcttaacatagaaccactcctccatccaggacccaggccaccttttccaaaatgttggaaccgggtagcttgcattagagcaagcaatgaatccataacaaacgaagttgttgtgatactgctctttgccagtggccttcgtctcgtacaacagttcgtgcatgctgcaaaaacacttcgcgctcggttccag

SEQ ID NO: 33584 - DNA, 417 bp, Zea Mays
cgcaaaatgagaagagtaaaaccctaatccatcagccgccatacccacaataggcatacaaggtttgttctgcttaggcaacacacatcgggcagtcatgtgggtttctttatgacaaatgtcacaccacagggaccagaagcaataacgagcatgatggccatcaactccacacttttgacagaaaggacgacgcgcaacctcaatctcttttttcataatcgcgggaggggttttgaggatacctgtgtgacctccctcaccagcagacgaagcaccaatgtcttccttgacttcagcttttccaataatcggcttcaatctccagctgggattacgaatcttgttccacgactgggaaccttgaggattctctttctgattccaccgatcccagttagggtttcttcccttcgg

SEQ ID NO: 33585 - DNA, 780 bp, Zea Mays
ttgacagcatcgcagatgtagaaaaattttacaaaggttatgcacatgatggtgggttctcagttcgtattggacaacataagaaggttaatgatgaaattaaaggcaaatatttttattgtgcaagagaagggtatagagtacataaggacaaaaaagatattgatcagtctggaaaaaagagaaagaagagacataacgtgatggaaacaaggtgtgggtgtgcggcaaacatctatgtgaaccttggtaccaacaagaagtacacgatttcttcaatggttgagcagcataatcatggtcttgtatcgccgctccaccgacattttcttcgatccaaccgtcatgttacagagagggcgaagagtactttgtacaattgccataaagctagtattggcacatcctttgcattcagattgatgcatgttagtgatgggggatttcaaaatgttgggtgtacactgagtgatctcaaaaactattaccgtgacctaaggacaaaaatcaaggatgcagatgcccagatatttgtgtctcagctcgagaggaagaaggaagtcaattctgcatttttttatgactttgaagtggatgatcatggaagactaatgcgagtgttttgggttgatgccataagtaggaaaaattatagtatttttggtgatgtggtttctcttgatgcaacatattctactaaccaatataacatgaagtttgtgccgttcactggagtgaaccaccacttgcaaagtattttccttggagcggcattcatgg

SEQ ID NO: 33586 - DNA, 578 bp, Zea Mays
ccagtctgcaccatgtggaatggagtgtcactgctgctgggcacagattcaaagacacctgccaagtcgtcgcccgcaaggcattgagggccctgtgtcagatctatgaagaagaagtggccgacacaccgctcagattctttccgccctttcagagagaccgtccagtttggatggccaggatgcgtgcattggaagggaagcagctgcttgaggatgagcccacagtcgtgcacctcactgcatacctgctcaccctagatgcacaatatgatttcttggctcggcaccaccgtcagatgattgcctgagcagaagatgcagagaagcgcaactgtcagctccatgtggatctcaccatagctcaagcccgtgcaactgcattggaaagtcgtgaagtcattgcggttgaagccctgaagcaagccaaggatgagcatgtatagaagttgatggaggcctacttggtcacccctaaccaacgtagagcccgcctcatcgaacccagttcaacccatgagagctaaagatccctagattcttgaaagtcacccggtctctaccagaggagaaaagaa

SEQ ID NO: 33587 - DNA, 417 bp, Zea Mays
ctattgaagaaacatgtattgtttgtctggaccagcgagcacgatcaagcatttcaggcattaaagtcagctctttcttctgcgccggttttggctttacccgactttaccaaaccatttgccatggaaacagatgcttccggcactggcataggagctgtgcttacacaggagggccaccccttagcatttgtcagtcgcgcactgggtgtcaagaatcagggactttccacttatgagaaagaatatctcgctatcctcttagccgtcgatcaatggcggccatacctgcaacatgctgagttcatcatttatacggatcagcgcagtttgtcacacttgactgagcagcggctgcatacaccttggcaacagcgagtcttcaccaaattactgggcctccaatacaagatcgtg

SEQ ID NO: 33588 - DNA, 334 bp, Zea Mays
atatctgggtagatgtccggatatccgaaatatgaaatccggatagttatccgagaagatatccggatatccgaaatccgaaggatatcagtcataccatatccgtatccgatatccgaactgtagtatccgaattcgaatccgaaatccgaaaattctgcggatatccgaaaaaacctattcaaccgaataattagcctcttcggacggtcggatggtcggataatatccgtaccgtttacacccctaagtgtcggtaaagacgtgggaacgatgaatgatgggctgagcggagcaggcagcgcatgatcttggtcagacagtccaacctgtg

SEQ ID NO: 33589 - DNA, 522 bp, Zea Mays
tgtatttttgcttggcctgatcgtgccttcgccacatagtttgcttcagttttgcatctgccattcacacggttggcatgaacttctcatgcagtgataacaactggagggtgattgcctagcaaactgactggtgactgcgcatttaattgacagtgttgtttggcggcgagatgtttttgttgggactacacctctgtgttactaccatgtgcattaatagtttttttgaacgcgtatttggaccgagaacactaaatgcaatcgcacatcaaatggcataatattatttttatgatttttttgggtctgattattgactgatgatgtcactttttgtgatggagatgttggcctgatgttacatcagtgtttgagctacatgattttcacttgcacaatttgtggtcattccaacttttgtacagtagcaaatatgtgctcataaaactctgattctgctagaatgttaattgaagtgtgagacttttatcaaaagtgtgtgcaacttttgataaacgc

SEQ ID NO: 33590 - DNA, 402 bp, Zea Mays
cacacacagagatggtcgccgttcgtgtcctccggggggtgctgccggccggcctgttttgcagctggacgtgcagctgcactgcagccatgcgtttgcagatttgtgtttaaggttcatgctacacactgtggaactgttctacgccactggctgtgccaagctgtgtacgacaggagcataggctggcgtcttatgtaggctgcagtacacaggttcagatgtttcttacaacaacagaacccatcaggaagtcaccagaccctgaaaaccactacccccctgccagcctcagccctcagccattgacgatttagtttagttacatctgtctgtttttgttgatagaatctaaggaggtcaatttgagattactgcaattgatacgacaataacagacgc

SEQ ID NO: 33591 - DNA, 829 bp, Zea Mays
cttcagcaacttcattaggcgcatatctggatatctggatgaacttatcacggtactcgctgactgacatgcttccctgctttagtgacagaaattctttcttcttaatcttcatcaatccagctagtatatgatgattcctgaactgcgtcgtgaactccgcccatgtgatagtgtcagcagcattgtgggcagcagtgtatgaatcccaccaagcagcagcaggatctatcagacggccagaagcatataataccttctcctggtcagtacactgagcaatgttcaacatcttctctatgggcttcagccaatcatctgcgtacaatggatcaggagaactagaaaatgtcgatggcttatggctcatgaactccctgtgcttatctcggggtagaactggtggtggtggtagaggcagtggtgcttgctgatgttgctgttgttgttgttgttgctgttgtgccctcctttcctggcgtatctcttctcattcttggcgcagctctcgacgtatctcctcccgctcttggcgcatctcctggtgttcctgctgcatctgagcatgcatatctaccatagtgtcagccatttgttgcatcatcctcatctgagctgcaaccagtgggtcaactcctgctcgtggaggcggtggtggaggatccatctctgctggttgtggctggggttgtctaaatatcctctgagtgtgtcgattggtaggtaaatcaattccaccacccttcctagtattgaccatctgagttagaaacatatggtaagagagaatagtagacaaggcaggtgattacgaatcaagttactttgg

SEQ ID NO: 33592 - DNA, 677 bp, Zea Mays
gaaacacatagcccattgcttgctgacataatctctgtcagccttagacttagtgcatgtttccatggtggtttgattgtgtgaccctgaggagcgcctctcatccacaacttgtttaggagatcttcgaagcatggatgcaattttccctttttctttttccttgtttgatgtctgtggctgtgcagctgttctaaactgaaatgcagctctcttccttttggcagctgtccccgagctattttattgcatagatgtggtggaatcctcttcgccttgctgcccctgaccatcatgatgatgatcatcaaggaaaataggcctagacctcttgttcttgtccaaatatgccttcatttcttttctaatctcagttatagtcttagaacacattaatgcaatatgtccaaatatgccttcatgttcttttaacctcttgattcctctcattgtcacggtcttgcaaaggttgcatgcgaccttatctcgattctcaacctccgtgcaatatccatagttccatccaggatcattagactttgctctgctctttggatctgccatagggccagtgtttgaatccacaggcacagaggcgggagcagagcctgcgctctccatcattgacctacaaaggtaattggaaatattaagttgcatgcaccaaccagttcaac

SEQ ID NO: 33593 - DNA, 563 bp, Zea Mays
ctcaaatttgaagcggaaggggagtcgaacaagttcatatttctttcccccttccttcttcttcggcatcccccagccgctagaagttggaaatgttttattcgccaggtattcctgcaccaagtccctagtgctaatttcagcagccaccactctgaattcgacttcggccacctggcatagggagccgagttgcatattgcataatggccttgtcatcccgaagctcaacctcagaggactcataaccatagtgatgagttttccctcttttcccgtcagctttcacgtagaaccattcatttgtccacccggtcgaccacttggtgcggtagctgattaccagggccttggtgtcctttcggtatgcaaaattatagcatccaaagttcttgtgaagaccatccgctccggccttcgtctgatagtgcaacttgtgcactcggtagaaaccttcggcattggcacttctgccctggcttcggagagcccatatgtaggcgctcaacctgacaatgtcatttggtgtcaaattgtcgagtaccgtaattaggggtaccccc

SEQ ID NO: 33594 - DNA, 340 bp, Zea Mays
cggctcgggtatccgccgaagaaatgcgtgtgctgatcgcgacagctgcgcccgaaccggggggcccaagattggacgggtcggcagccttctacgtgatggaatgactgatgggtatgctcgcgtcgtcgttgtcggtgcctgttcccgtctgtatttttggagggagtactatactcgtagtccggaagctagtgctgaggcctagcgtttctacttgtggtagcctatgtccacgctgggtgtacttggtgaacagtggggatcccgatcagggggtcgacgatgagaggggattataaacgctgttcacttccggaggcaggattctttgttaccg

SEQ ID NO: 33595 - DNA, 338 bp, Zea Mays
ggagtacgaggggggcagtgcgcactactggagggttgcagttcagtcggaggtggctggcgctgcccacggctgcaagcagaacgacggcggccatggacgggagctcgcaagaatgggagggacaacgctgggagcgtggagaaggaatggagaacattggggagtgctctggcgccgtttatatagatgggggaggcagagaagggtcagacaggaaggggcaatggcaggtgcgagctctgctcattggtgggcgtgggcggctgcctgccagagcaccagtctgcacagcgacagaagaaggcacgcattggacgaacgtttttggcattttc

SEQ ID NO: 33596 - DNA, 555 bp, Zea Mays
gtcgttctggagagtcatcaaatttgtcgtgagatggcgttggtgagacgacgacaggtgggaggagcgagtgcaggaggcgaggtagcgatagatgacggtgacggcaagcgacagccattgtcgtgttgcgacggcgcgcagagacccaatgagttagcgagagataggtgacgccacgatcccaccaacagcttgcccatctgctgatgcggactaggaggcaaaatatcaatgttgtgtgcaggatcccgacgagtcgatgagttgatgggtgctgaaaaggcaaggtgcgctacagcgggcgggttaggtcactgacttactggtcagtcgatgaccgaataagtgagtgagccacgagtgggcttgcgctagggaagataatcaaatggctcaggtgaagagtggactgagcagtgaaacatcgagagaaaaatagatcaaaatctagtttttattagatttgtccacgctaactatacgaaagtttgtttattttgctgtgtacctaaacctaggtataagtggttaaaaaattgaggtggggccatg

SEQ ID NO: 33597 - DNA, 521 bp, Zea Mays
cgagctatagagggatggtcaatccctaatcaatcaagtagcttttgtacccacattatctccactattgcatttggtagtgcactggtactttgcattctgtttctgtacttgaccatgagactgtcgcttcgcttctgcacaccacaaaatcaaatttgaccaaacaagcacatcagaaaccactagtcgatctccgaacatcagagagcatccttctcagtatgcatttgaaaaaggcacccaccatcatgcatggatgcaaaccttctcattccaaaccctaaatttagagccgtcactcctaaagagttcgaagaaggagacctcgtcctcatcaggatcgatagaacgaaatccaaagacaaactcgagccgaagtggaaaggatccttcatcgtcaaaaataaaacgtccccgaatgcatacatgcttgcaaatcaaacatgcggagacctcgaacattcttggaacatagaaaatttgagaaaactctatctgtaagacgacacatagtcagg

SEQ ID NO: 33598 - DNA, 539 bp, Zea Mays
cgttacaccatgctaagtttatggtgaaccaatggagtaagttcttacccgcaaccgagcagcacagaggccagtcaatggtgtgtagtggcccaacaacgtcgatccaacataaatgagaggttccggcaccctcggtccccaatcgcacccggcaaggtcacatgtacgtccaacgtgatcatctgaatccccttgaccaccggatggagtttctacagcggtatatgcatgggtcgacgtcggcggccacccgtgaccccgacgtgaaatccactgagccctggtcaccaatcctacttggcaacacaccacgtacatcaatgtgcgacccggtgacaccctcgaacccctaatgtagcttgggtgacgacgtgcacgagtagaaatggcggcggcacaccgaccctcccttggcggcaacacactcccctcaacacacggcgcggggttccccggtgctagcgtcaatggatgagatgggagttagcggtcagtttatatggcccgcagatgagggaatctcggctaggtaactc

SEQ ID NO: 33599 - DNA, 351 bp, Zea Mays
ctcgaaagaagacacaacactcacttctgaaattctctgctgcacatctgtgatttcccttgcacctaccttggtcttccagtcaccattcacaagcctgctaaagcagatttactacccttggttgacaaggttgcagaatgcagacaacctccctggatggaaggcctctctcatgaacaaggcaggataactggttgctatggatctttgcccaaatggctaattaaggcaattgagaagaggcgtcgcggttttctgtggaaagggcaggaataggctaacactggtaactgtatgatttcttgggcacatgttcagaagccactacaatttgggctgcagggcaag

SEQ ID NO: 33600 - DNA, 334 bp, Zea Mays
ccgggggttggttacttgcaactgagggggcatggaaagagctctaactctgctgactgaaccgtgacggggcgggtccagctagtctactgaagtttggtcctttgggcgggaatccaaattatcgagtcttctggtgctggtcttgctactgagcccggaggacttggaactttcttttgagatgccctttttcttcctcatttgccctttcaacttgcatggccttgttggaaaggtgagagaaactgaggaagtcttggctagccataattgtcttgagttctggcctgagtccctttaggaagcgggccatcctcttgacttcggtact

SEQ ID NO: 33601 - DNA, 307 bp, Zea Mays
gagacattatacagaaggggtgcatcaggagtcctcatgaagtgtattctcccgtccactgggaagcaacttctggaggaggtccatgctgggcaatgtggaatacatgcagcctccagaacactggtcgggaaggtcttcaggtcaggattctattggccaacaacgaagaacgatgcagccgagttagttcagaggtgcgaagcttgccaatacttgtcaaagcaacaacacatgccagcacagcaattgcagaccataccagttacttggcctttcgcatgatggggactggatatgattggac

SEQ ID NO: 33602 - DNA, 321 bp, Zea Mays
catattcatccccctcgccgccggtgacccgtgcgcccggattcgcgcctgcgccgtgattcgtgccctttgtgacatggattacgatcgaccatggaaaaatcttcgccctagatgaactcagaaccctatagccgctctgtcacccattcacttcccgacgacgtggccgcacgaccattaccgcggccaccgccgttttcctcggtcgtgccatgccatgacccttttaccacgtcgctgctagccgtagtagcttactggtaacagtcgtagctcctcaaccagtgatcgccacggtgaaggccgcacatccttgcg

SEQ ID NO: 33603 - DNA, 350 bp, Zea Mays
attacatacatcaatataactttttataccattgtcgacaatctcccgcttatccatatgtttccagcactctgccctggaaatagatggtttaggagcactttgcactagcacatcagctcgtaaggaggaactaccactacaaacaggtacaccttcacccccgtctgctggtaaggaagaactaccaccatctactggtaaggaggcattagcaccagcactacacacatgtacacctactccacaatcagatctaccttccacggttggggcgagttcgcaaggactggtggaaccatctaacctcctactagcataaggttttcgagtagctgtcctcttactcc

SEQ ID NO: 33604 - DNA, 273 bp, Zea Mays
cgcgcgtgccagccaccagttcgaagtctacggaggatagccggagacaaacgtatgtggcgagggctagctgacagtgatctcgtcacccctctccaggccgcagctacactgaccagagacggtcctgcacgaagctcccgtccctttgggttgccgtatgggacgtgtaccgcctcctgtccttgcgttgcgcccgtcatcaggatagtggtggccttagttatgtcacgtatccgcagctaaatttatctccctatatcacttttttgg

SEQ ID NO: 33605 - DNA, 336 bp, Zea Mays
acagagtcctgcagacaggactgcgggttattttctcagaagcatagggtctctttagtaaatatgccaaggcgaaagggtatctcccgcccagagccgcccgattagacatcaacggctcagactaaaaccgatcccccccttgaaacggtactgaatcacagtcaccggatcacgatccgaggcttcccgagatggccacgcctacaccagatcccaagcgtccatcaacggatctacgaacagattttaatgttgccaagaggtatcgcccgtctaatccacgccgcccaccgacagatctacggtccatagtctctctgacccagatcaaat

SEQ ID NO: 33606 - DNA, 488 bp, Zea Mays
aattatactaataacattttcccccttagaaagatgccgccacacacaaggctaacggcacgcaagtcaactggaccaatcggtgtgccccggcatcaactggcccctcgacatgaaagcaggagcagtgggagtaatgaccccataggagatcttgaagcccgagtgagtcgacttcaagcggcgctgcaacacaggaccgatgcttgggtcgcagacggagatagaataaatgaactaagaagggacatccgtcacctgcaggatcagcttgctgatcgggacttagcacttgactgggtagtacagtcccgtttgctggcatgtgctaaggaagcaagggctcaggcccgaattaaggaacttagctcaattgtcgatgacctgcaggtctattgcaatacgttgcatgaggaagtccatgtactgtactcgcaattacaccctagtgcacctgcacaccctgctgaggcggaagccggaccctc

SEQ ID NO: 33607 - DNA, 851 bp, Zea Mays
ccttcaagtggacaccagaagctgaggttgcttttcagcgtctgaagcaggccatggtttccacgccggtcttggcattacctgattttaatataccctttgctgttgaaactgacgcctgtgatgacggggtaggagcggtgttgatgcagcagggcagacctatcgctttcttgagcaaggcgttgggagtttccaatcagaagctttcaatctatgagaaggagttcatcgccctgattatggctgtggatcgttggcgtcattatctccaacggagcgagtttgaaatccggacggatcacaaggctctcagtttcttgggcagtcaggagctgcattctgagttgcaacgtaaagccatggcaaagcttatggggatgcagtttaaagtaatctacaagccgggcaaggagaacaaagtcgctgatgctctttctcgggtgggctgtgtgatggcgttgacagcagtcagtgaagttcaacctcgctggattcaagaagttaccaattcttatgtgactaattctgatgcgcagtcgctgttgactcggttgtgtgtccacagcccggatgagtatggttactctctttctcagggagtcatcaggaagggcactttaatttgggttggccacaattcagctctccggacgaagttggtggcagcattgcatgacagtgccacaggtggtcactcgggggtgcacgccacttatcatcgattgaagaaattgtttgtgtggaagggcatgaagaccgatgtggaggattttgtcaaacagtgtcaaatttgtcaaaaggccaaaggagaaagagttcacccggctggtttattgcaaccacttccg

SEQ ID NO: 33608 - DNA, 273 bp, Zea Mays
gtgaagtgtgccctcgccagatgcctaccttgggcgagcagctggtgcgaagtcctaccttcgctttgtatttgcgtgaccgggacccagccacgttcgtgcgtgaagtggaggatggggctatgaggattgtggggcggtatgcgtcaaggacggaggctctacgcagttgggatattcgtggatccaatgttcacttgaaccgtgtcttcgagttaaatcatctgccatatggcggttaccctggagacgacgctactgctgctatcgatc

SEQ ID NO: 33609 - DNA, 354 bp, Zea Mays
ggagcgctggccacgaaggagttcttcacggcggagcaagaacagaggagagagggatttgtgggttctttggtgaaattgagccgagtgctcgatcgcggaggtgcggtatgtgataaacaagtggaacccgggcgcaatttataggccaacggccagaattggatgaggaccacagactttagattgcgcaggcgagctcaccgcgcgacggaacccggtgatggcacggtggccgccgtttaaccggagcctgccacctcagtgatttgctgccacgttgccgaggatatttaccgcggccgccagcccatcccgaccgccgtggcgttcttatcgccggcgagggctgac

SEQ ID NO: 33610 - DNA, 354 bp, Zea Mays
ggattcctctgagtttgaagattacaagtgattgtgggaggtggaagatgaagttgcctatcaatttaatggagtgttctcactttcttgtaggggtacctctacaaccttatatagctgactggatagatatcccctttatagatcattgagtccactcgagtctacttcctgttgctacacgtattcctattctttcggtgcttggttattatctgaatgatccggcgctcgaccatgcttgggatgcgtcttcagagttcaggcgatccctccgagggacacacaaggtgatccctccgtgggacacgcgcaccaccggtatacccgtgcagtacccttcgagattttcag

SEQ ID NO: 33611 - DNA, 416 bp, Zea Mays
gcacctagaattgtgaaggatcaaccactagaatacgagattgggtattgcagacatggcgccgccgcgctggccctgttcatcgcggcggaggaagggggcgtcagggggggagacgatccggatcggaccgatcgttatccagcgactgagattagatctagggtagtctggggtcgtggccactgatcgtgtaacggccgaccgagatagggtcatagcgtaccacttcgcgggatttaatctgggcggtcggtccgatcgaacgatcgggatttggagtggggcttggggtcggtcgaccgtaggatcttgattcgaggaacaacactacgtaccgatctagactaacaacaacctaatccgggacgtgtgctatagatccaacagccatggtcctcgtgtgccccttcgac

SEQ ID NO: 33612 - DNA, 295 bp, Zea Mays
agatcctcaacacccggattactgacctctgaagtagccgagccagcaagagcagtaggaagatcatgactcatcaccacaacttcctcagactgaaccagtgatgacacaacatgaacatccatagaagcagctgaagaagagctaagttcagaaccttctcggtgtgtccgcttcgtctcaggagacacagccagataacctgctcggtgtgtccgcttgtgatgaacaccatcggggctgcaaactctctcctccccgccaaatgcacgcccagctgcgacactcgccgact

SEQ ID NO: 33613 - DNA, 484 bp, Zea Mays
gcattggtaagcccaaagggcatcaccttgaactggtagtgtccctgatgagttttgaaggccgttttatactcatcactttcccccattcgtatctgatgatagccagcagttaagtctaaactagagaagtattgagtcccagcaagctcatcgataatctcttccacaagtggcataggaaaacgattcttgatcgtcatatcattcaacttgcggtaatcaatgcagaaccaccatgatccgtccttcttttggaccagcaaaaccggagaagcaaacggactgacgctaggaacaattagtcctgcagcaagcaatgctgtcacttggttctctatttccgttttgtgatgaggagaataacgatagggtcgagcatttactggtatagaaccagggaaaagagggatatgatgatcaaatgctcgagaaggaggcaatgaagtcggaacagcaaacacatcctggaactcatccacca

SEQ ID NO: 33614 - DNA, 303 bp, Zea Mays
cttttgagaaaagtgtggccaaagaagccgaatcccttactcccgaagcattctccgaaggtcttgattatattgttagacatgctttaggaaaaagactatccgaagaagaaatttctgaaaccaaacattatgctcgggaattgcagtatccgaagggggccctagtgtttaatggtacaaccgaagatgactttttgtactgcctcctggacaacaaagaattatccgtctaccgggagatggccagaagtatgggcttcccgaagctcgaagctggcctttgcgccatgacgaaggccg

SEQ ID NO: 33615 - DNA, 482 bp, Zea Mays
cacagttgtctcaatttatatgctataacattttcaggatgcaaggcttaatttaagttcatgttatatggtgtcattttctcatgtttatgaatgtagaaggataaaaaattgaacaaaactaaaataaaaagggttcatacaacatatttaaaggagcaatgaaagtttagaacaagttatcttgtgagcaagcatattttgataagtaaacaaggatgcaaaatacagtttgtgttatagcatctcctcagcagggtgctcctccccacaaagcccctccctgccgcgggcacctctcttcatcaccgagcccctcgatgccactgaacctctccccaccaagccaatccctgaacatcggtggaagatgggagaaaaagaaaagaaaacacacgccactggtagaagggtcccaattgtcattaaaaaagtagggtcgcaaatttgaggcttgttgctagagttggagcagaaatttg

SEQ ID NO: 33616 - DNA, 342 bp, Zea Mays
caaaaacccatgtgcaactctaaggtgttacatgaaagctcggggcggctgtcgagtactcgggaaccaagtacaataaataggccctttaaaactgaccaactccgatgaccaactctgtgaggcggactgactgaccaactctccgatgaccaactccgatgaccaactctccggtgaccaactctaacgaacaactccgatgaacaactctccaatgaccaacttcaatgacccactctgatgaccttcttcgatgaccaactccaccaaccaactctgtgaggcgaaccagctaacaactccccgatgaccaactatctgccaatctgctccgcccga

SEQ ID NO: 33617 - DNA, 586 bp, Zea Mays
gatagttgacttagaaaagctgttacaggcacaagctctgataatacagaaagcatctcaactcacctcctcataccaacaagtgttggcaagtcgaaacgtcactagaaatgaaacaactaatgaacagacacaaaaggatgcacaccaacagacaaatgatcttggaacatgttgttgttgtgagtactatggaattccttgtcgccagatcagtacgaacgaaagtgaaactacaaaacagaagaaccggattttattttctggtataaaaagtcaatggtcttcccaagaacaactaatagcagatgcactgtcagacgatgaattgccaggttttccaaaaaggaaacatcacaaggatgcccagctccaaaaagaagcaaatgagtgttacattgatggatggactatcacctgcacacagtttcagccccgtcgctgcatcaggaccaagagacgaaaagagaaacatggaaaaagtcaagaaataactccaagaaaagcttgttatcaatgtggacgtgaaggtcattacttccgtaactgtcctgagaagagttcactaccggatacctctgagata

SEQ ID NO: 33618 - DNA, 442 bp, Zea Mays
cgttgtagcgctcatcgaatcgattgtagcacttctaggcagggtgccccttgatgccacagatctggcacttgacaccatcctggtactcggggaaaggagttcgagtacctgtgcgaccgcccttggggccacggttgaagcctccacgaccaccattagggcggccaccacttccttgatttggcttgaagttgttgcgattccccttcgcagcaacgttggcggatgactggcttccaccgcttctcatctccaccctctgctcatgactcaccagttggctgtacatttccccaatagagattggctgagtcctattactcacgcccgtgacgatcgagtcatactcagggtcatttagcccggtgaggatgtaggctacaagttgatcgtcttcaattcttttgccgaccgatgccatgtcatcagccaagctctt

SEQ ID NO: 33619 - DNA, 321 bp, Zea Mays
tgcggactcctcgagctcggccaaatcaacagtgtctgacgtgaggctccgtctaatccctttcaaaaaaacaagctgtgccagtagtggttttactcttctttttcttctcgaacggggacactaattttggtatagaaactttaaatttctttgatggtcgtggatcccttgatggctgtggagaaggtggatccctgaagggcgatgtatgtggcggagacggtgggccaccatgaggatgaggagaaggagggtcaaaaagaggatgaggagcagcgtgaagtttgaggaggtgatgatggatgtacaataggaaca

SEQ ID NO: 33620 - DNA, 360 bp, Zea Mays
ctgagacttaaccgagggaccagagaagtcgggtgactagccgtggaggctaacacctgcgacacgcattgacgcgaggccgtggcagagcgaatcatgtcaccggcatggtcaaggactagtgagacacgtggccaaaacgtgggggacgtgcatgcggtgtgctactcatggcggttttgtggttgagcctcaaaaccacccagcgctatagatggcaggttttactgactttgggcctcaaaacttagcggtgcgggtcaggaaggaatcgaaggtggcacatggcgtcatcacgaaggttgcatcaaggcgaagcaacttcatgtgaatcacgtggccgtgagatgtatattccag

SEQ ID NO: 33621 - DNA, 393 bp, Zea Mays
acgactgaatgcagtgatccaatcagcacggtaccagcaaactctaaggcgttatcacgacaaggccgtacgacaacgcttcttttcgataggagacctcgtcctccgccgaattctaacgggggagggacggcacaagttatcacccttatgggaagggcctttcatagtagcagaggttactcggcccggatcgtatcgcctcacccagatggatggcacagaagttgggaactcctggaacatagagcacctcagaaagttttacccctagctgtatttcaaaacagctggggcgaccatgtattctgtaaaatggaaatacatcatcaataaagagagacttcaaagatactcggctcatttacgactgacttgcacgcttacttaact

SEQ ID NO: 33622 - DNA, 329 bp, Zea Mays
gcagggggcgaatcagtacgcacttgtaatcctaaccgtcgatgatcaatcagacgaccgagattatccaccatccctggcgacgaaacgcgacgacggcgcggacagcacccacgacggcaaggcatgcctggcgaccccaagctctcggtacaacgcctaacgccctattttgacggtgctacatgatgctctacatccaacgaatgcaatcaatgaccaattacctcgcagtttgtcgcagacgaacccgaccacggcgagtggcggaatggtgggatcggttgagctccggcgaggaattcagtcgacgtccgaggcagtcccag

SEQ ID NO: 33623 - DNA, 318 bp, Zea Mays
gacgggacaagggcaaggaggtctaccctgagcagcagggaggagaaaagaagagaaaattggacggagccattagagcagcagtagctgagagagcagagcagggaggacatatgagaattggtttagatcagatagtcttccatgttcgtcgcctctcatttcgggtatgctccactccaaccagattcgacccctctgctctagtcaccactaccactccaccctccactaccacgccagcttccgccactacagtgcctacctctccacttgctacacctatagcctccaccacacctgcttccaccgctcccg

SEQ ID NO: 33624 - DNA, 273 bp, Zea Mays
ttggtgcacttacccaagcagaataggccgcgcagatcttcggcatgcttctctgcatggcacaggaattccgttcacgatccactgtttccgtctcgaattggcgtcctacttcgctctacattttgccgtagcgacatggttgaacggagaagcaggccgtgcgccgtagaaatggaacgatcccgtgactccatcctttagttttactacaattttctgacttagctgttgccagtttatgtacgacatggtcacaggttttggcattgc

SEQ ID NO: 33625 - DNA, 289 bp, Zea Mays
tggttcaagagatttaattcaagagcatataacattcagagtatggccgcttgtagaaagctgggaaatgccgaaggagaccatcaccaagtctagcgaaggtgaactggtccggctgaagtatacattcaggtatggggataagttcgatgaaccaaacgatgactggctgaaatgcattgaagctacaagtgttgaactgcttggaccatattccaaggcagaggataatgcactatccgcagccttcggaggtcggggaaagaagagattaaacatagtttttgat

SEQ ID NO: 33626 - DNA, 397 bp, Zea Mays
caagtgcgaaaaatcgaagtcttccgcgaagactatccgtgcagaagtcgcctaagggtgcagccggactagcacaacaagtgcgaaagatcgtggtcttccgcacagactatctgtgcagaagtcgcctacgggtgcagccgggctagcacaacaaatgcgaaaaatcgaagtcttccgcgaagactatccgtgcaacagttacctaagggcgcagccggacgaagcttaacaagtgcgaaaacgactacaccaaactatccgcgcaaagaccaactacatgcgcaccagaccaacataacaaatacaccaaatcaagtacgtaacgccttcgcgagcatagccgaatgtgcgaaggcacacaacctcatcatacaagccattacacatgtacaag

SEQ ID NO: 33627 - DNA, 295 bp, Zea Mays
gggtaatccaccatggccagataatcgaatgaatagtcgtaacatgtaatttggcacacaagttagaagtagctttataacacaatggtcagtaatcaaatgaaggtcaaagaaaacatgtagtactatgcattatatgaaagtataataatggcaaacagagggagggatctgatcagcttattaacccatatcaccaactaaaatgcaaacataaatagctaacaaaatgtatacagttggaggtcaacaatttggtactaaatgataaataaaagccaatattagttactcc

SEQ ID NO: 33628 - DNA, 366 bp, Zea Mays
atctatgaggtgtgagctgctagaggtaaaacttgctgaaatagttatgatctgaaatagtcatgtatcttgtgatattaacaattcctcacattatttgactatttgtattgtagcaactactccttttgcttcgtgtagtactaaatttactgttgcttgtttaaaagaaaaatttaggttccatttgcaatagtagatatgttttcactgtctgatgaatgctgttgggatatttggtttttcttttgtcaaactccaattaatatattttccttgtattgtatgaattgcgatgttcagaagcacaaagatattagtaaagtcgagaaggacatcgttctcaggtgtgttcttatgtttact

SEQ ID NO: 33629 - DNA, 308 bp, Zea Mays
ctcaccacctcatttatttccaagtccatgagacaaatttgtatccacagtaaggtaccatgaagtggaaaataattcaacacttctttccggtgagcaaggctatctctgcaacattgtatcactcaacaagatccagtttgagcatactcgtgctctgctatggccatagtcttttggatcacttggagcgcatatacaattgatgagatgtatgtgtcaacacttgtagcttttaaataacacaattctccagttgacatgaagtcatttcttatgcacccttatgatttctcgtgaaatcccaa

SEQ ID NO: 33630 - DNA, 303 bp, Zea Mays
atacatacttgtgtaggtgcttgtcgaatgggggtatcctggaggatcgaagctaaaccggaaggggacagaattgaataccgatggtacctcccgactcactggtggagccagcacctctcgacccacaggaggggagccggtgaagttggcacctcccaatccgtgggaaggggagccggtggagtcagcgttggagcaacgtatgttgatgtcgatgcttcgagtatgaagctaacgcacgacaggtccctcgcaagggagtccgcattgtcagtctgcctagaagcaccggttgggcgt

SEQ ID NO: 33631 - DNA, 329 bp, Zea Mays
ctctaactaagactgactagactaagacactgaattaagcattattatagactccgactctatcgatcttgggatccaaatctatccgggtcctgcagtctggggtaccatagtcgaagcaaccacggggcggtgaacggtaagggtgctgaatcccgacaggggcgagagaaccaccatacagatagtggcgtgctgcgcactcagcacgaaattctgcaacctccgcccgaaccttgcccaactcgtcaagggcgttgtccaactctgtgttgagcacgacagccaagttgaccatgttgttcagtctgggattgtcctcaccaact

SEQ ID NO: 33632 - DNA, 505 bp, Zea Mays
tccaaacccccgttcatggaacgaggtgaagctcactatgtagcccgcacacggattcgacatctgtaggccggtggagcgggggcggagcagaccggcttcaaccagcgcctccaaatccttatcggtgacggagagatgggccatgggttgcgaggaggaagaacgctgatcttttctgccatagggaagaaggaagaaaggaggagaaggcgaaaggctctttttgcagaaggtgagaatggtgtatgaaagcaagaaggctgaagaggtaaaggtaacagtccgaagcatcagtcttggtcgactttataggaatgggcgaagccaccgaagtgtaaatcgtaaaggccggatgacggttgtttcgaatcccgcgcgcacgcgcgccgcaaacgataggatgaccgataggacgtcccgtcgcattgaatggtcgtgcccccttcaagaagaaacatgccgagcaccgttccgcattccacctcaaaaggtacgccctccg

SEQ ID NO: 33633 - DNA, 360 bp, Zea Mays
cacggtggtggatgatcggaggtgaggacaggtgtactgagcgcgtaataacctaacagagctcactaaggcatcaatttatagagagcgatcgcgagtgcgacgaatttgggaggagaagagctggcggtaagaaaggggaggagtcaccatagaccgctcaatgtggcattcactgagctaagtccccggcgacagaggggctatctaccacgatctactacgacgtggtaacaaggtaagtagcgtggcatgctcgggttaacgacgatcatcaccacgacgaccgcgcggccacgtcgcaacgcaagtgggtatggcaacagggcggccacagtgccccgacctcatccacgtcaa

SEQ ID NO: 33634 - DNA, 278 bp, Zea Mays
gctgatggggaggcgtcgctggcatacaggtcctaaaaggggaacaatgtgagtgcaatgcccctcttctccctctacccctctgcgcttttcttcctcctcaatttccttggttgacagtgtggcatggatttgtgcctcattgatgtcgcaactcaaactaaactagcactaggtcggctcatgtcgtagctagatgttgggattgccttgttgagcttctcaattttgtttggtcattgttgtctccaaaaaatagttgatgatttggttttctc

SEQ ID NO: 33635 - DNA, 339 bp, Zea Mays
tgaagtttcaaacgactcacaaaatttggccgtagccaaatgaggatatcctgcccatgtgaccatcagatctgagcagtgacctcccttctggttgggttaaaacgccattcttcaatgctatcatggttttactgcaaaggttccccatggtttcacaaaaggtaccatcacctaaagcacacacttgagtgagactgtccttacagaccaaacacaaagcgaccaaaatgtcacagtgccagtcagaagtccagttcacctgaatatgctgcttagttactggtgcactactctggaagacagtcatgcatgcttaatgattcagtgagcaaacca

SEQ ID NO: 33636 - DNA, 493 bp, Zea Mays
acttgtgctctaaaaactcataggcgattgttcgcgtctgtttgtggtcccaaagcagctatggcctctggccgcttgccccctgcactcgctgtagctagcccccaccccaccgcgctctcccgcgccggtctggccgcgcgcgtctttgctgctcttgtcaaacacgtcttcaatccgctgccccctgccctggtaaaaaaagaggaagaaggagacgctgatgctaaccgccgcactactctactggtgcgtctgctgcgcatgcgcgggtaaatacgatcggtatcgaggggggatactttggtcgctctctgcacatatacatataccatgaacttgtacaagacgatcccacacccacatacatgaactgtcatatgcatgatggtttacagagcaacagatgctacccggcgtacaaacacgcaagcagttccagatcgacgaggcatggcactactggcgggtcacagcgactctgaaccgatca

SEQ ID NO: 33637 - DNA, 441 bp, Zea Mays
ctcgctttcctttttcttttctcaacgaaatgctgtcctagcatacgaactgctagccacaaatgcataaattatttgcagagtggaatgatactagcagattcatcaaaagtatgtatgcgttattgtattttcaaaaccatagcaaacatccaaatgctcaaaggtgtgtgatggagacaatgctggtgtcaaaacaataattaaaagaaggaggtactttttgaataggcgtcaactgtggtctatggagttaggatcgaaccttgcatgacatgccatatgaggctctatgcatttacttcttagttccaaacgtactttgctgtgtaggaagagatcttcagatcgttgccatggtttgaggcctgattagtgtttttactgatttgtaatgcatacttttctttagtactttattcttgtagtggtaacacttct

SEQ ID NO: 33638 - DNA, 481 bp, Zea Mays
ttcacagtgttcttgaactggattggggagaacgtgaaattggagcttggtggtgatcggctgggagtaatactaggtgtgggggtgcgcaatgatgttgcgaggctagtcacagactcaatttataggcagcttcgttggtggcgctcaatttggtcgagcaacgcggcggccggagataagagagaaccgtggcgcagtgaattcgtggctaacgccgtggcaacttcaccggcgttgataagacagtggtagggagttacagtgacgcggtgtaaagatagagccacgcggcgcacggccgggaggcggcggtcaccggcgaagccatcggatttcaccgtggtgaacgcttgtatggtggccggaatattttatcggctggagttatccacggcgatgatctccaagcgttgtccacttaccccgagcacaagttgggccagcgacggcacgaatcgcggtggaatcggtcgtcggc

SEQ ID NO: 33639 - DNA, 439 bp, Zea Mays
cgctacggttcctaccaatttgtgcccttgaaaaccataacttgaggtaccttccataaaacgggcataacttttcactcggtgctccgtttgagctcaaatttttacagcagattcctgactccattctggggtgacccaaactggcctaaggcctgtttggttcggtcaaaaaattcaaaaagatcatgaagataattaaaaaatttgtttaagtgtttttaggaatttcagagatcctttttgattttctctaggccacaatacaactctgtttcaagtgaaattttgtgtgcttccatcttttgtgattttggatcagtgataaaaaaattcagaatatttcgagctcttttgttggtactcctttggaaacgcgcccttgatttctactagtgctgaaaaatctgcactatttacagaactgtcattctgctgg

SEQ ID NO: 33640 - DNA, 1751 bp, Zea Mays
acagtggtgttcttcccaacagcagatggcgatgtagagctacttggagagaaacctggtggtgtgccggtagtggtggacgtcgatgagcgctaagaaggtccagcaggagggccggctgaagtagcaggcctaatgagcggaacacccggtgtacgggggtcaccggctggtccgctggtggacccaatcgagttcagcgtaggggcaaccggtggaaggccaaggttgctggtggtagctgcagtgaagaaaggtgacagctcgaatggaactgaaaccatgttaggtatgtcgtccaaaaaatcaaaagttgtgcttgtggatctcttcgaagaccacatggcgagagatgatgatgcggtgagagagacgaccaaggccgaggtatcctttgtggtggggagaatacccaaggaagacacatagggtagagcgaggagataatttgtggggtgtagtgggggtgagattaggatagcacttgcagccgaaaacacgaaggtgttcgtacgaggggtgtttgccaagtaaggcgaagtggggtgtgccggaagcaagtgtatttgtgggaaggatattgagaagatatgtggcagtacgagagcagcagcccagaaagtgggagggatgctggcttggaagagaagcgtgcagacgacattattgatggagcgaattatgcattcggccttgctgttttggggggaagtgtaaggacaagacatgcgtaaaagaactccatgggaggagaaaaacttgcgagcgttgaggttgtcgaattcgcgaccattgtcacattggacaccctggatggtgacaccaaattgggtgcgaacataagcgaaaaaatttgtaagggtggaaaaggtgttaatacttaaggcgcaagggaaacgtccacaagtagtgtgaacagtcgtccaaaatgtccagataatatttatgaccggaaacactagtgattggtgaagtccaaagatcacaatgtattaattgaaaattgcgagtggcatgtgatgaagaagaatggaaaggtagacgaacgtgacgtcctagctggcatgcatggcatatgggggtgtttttattcgggggtacaagggatgacagaagactgagctagctgagtgaggaccgcagatcctggatgtccaagtcgttgatgccacaacgaagaggtggtagcatggagagaagatgtcgtgctcctaagtgggtagagtgggtcggagctatcacaccgaaggatcacgcgccgagtgggaagatccttcacagagcagccaagagggtcaaattccatagaacaattattgtcagtggtgaactggcgaacagaaattaaatctttaatgagagaaggtgaaacaaggacattgttaagacaaaagttatgagaaagttgagtggtgccagtggaagtgacaggaagaaggttgccattgccaacaacaatgttagagggtagatgatgagaagaagagaggtgggaaagtataccagcgtcgaaagtcatgtgactggaggcacctgtgtcgaagaaccactcttgctgctggggatgttgaagagtggtggtttggaaattggtggcgagttgttggatatcccaaccaggagggggtggagcagcgccagtgtagtcaggggccggcccatatgcttgaggggggggggccaggagcctgcccactggctgggaggaccagcaagaaaggcctaaggcggttgagttggagcaggaggcc

SEQ ID NO: 33641 - DNA, 289 bp, Zea Mays
ggatgccctcggcttcgaatatccagattatgataacttaacgaagaggccgggggagtaaagaagaaaattgttgtaagtatcctgaaaagacaagcaataaaatccatcgagaaggataaaaagaaaaggctatcaaaaagactgaaggtttatgaagaaactaaaatttctaagatgtcaccgaaaccttcggtacctaagaaatggaaaattgtggagtcgagccatgatgaagaagcaaagtctcctccaccgaagcactctgtcgaaactccttcgacatctt

SEQ ID NO: 33642 - DNA, 417 bp, Zea Mays
gccaaacttagtaccacatcaggcactaaactgtgcacacacctgcttataagtttcaatgcagacacaacctatgtagtcttggttgggtgcgatctttgaccccacacaactagcttttttgttaaaatttggtcacttgcgcagagtttggcaatggaaaacggacgtgaaatgaagaagaggtcacagttgtgggacccacatgtcagagcggtgcacggagtttgggaatgggaaacgacgagggtgtggatgggaatgagaaatgggaaacgaccagggtgtggatgggaatgagaaatgccacgggtgtgggaaatgttgtacgggggcataggaatgagaatgggaatgatgacagaaccaggaatgacagcctacctcttactgccttaatagtagtaaatatatctc

SEQ ID NO: 33643 - DNA, 381 bp, Zea Mays
gtggaaggctatggttatgacagcaaggaagaagaaaaagttgaagttgaggtgaaagttacaacaaagaaatctggggctatgggggcctcggagggttttgttgaggaattagcggagacgtgcgctgagcctagggaggtcatgacttcgcacgacctccagaaatcatcttcacgaatgctgaaggtgaacgggggtgagtggcataaaaaagatcctatcccaatggccttcggcgaagattattttatgtcccgtttggttcgagattttaaaatttttccttatggtagaaacattggtgttgttgtaacagtagtgatggaaaaggactgccagaaatctgcgcggaagaagcagaaggcgccgctacggttg

SEQ ID NO: 33644 - DNA, 346 bp, Zea Mays
gaattttggattcgccccaaatctctttccgccgccgtgaaccacaccctgtcgtggccagccttccccaggtccgctcattccctccttgtccatgttctagcatccttacttgatggtgatgctccccgatcccttcaattgaaccggaccgccagggatcgccgggaacacgcaccattttcttcctcatccgcggttcacgtgggcagaaccggatagtttacttaatgagaaattaagttgggggaatcagttggggagggttcaatccggggtacgtcgctcgggggcaccggtcgttgcgtaaatccgccagtgcaacctcaccggagttcattctccg

SEQ ID NO: 33645 - DNA, 317 bp, Zea Mays
aaaattgaaaggacattgcttgtttgcgacgaaatctgatgttaatgaattatttgcttccacttctgttgcctacgccttggtatgcaaggatgctttgatttcaattcaagatatgcagcattctttgcctcctgttgttgctaacattttgtaggagtattctgatgtatttccatgtgagataccagaggggctgccacctatacgagggattgagcaccaaattgatcttattcctggtgcatctttgccaaatcgtgctccatataggacaaatccggaggaaacaaaagaaattcagtgacaagtgcaag

SEQ ID NO: 33646 - DNA, 339 bp, Zea Mays
tacccggcctaccacagcgaggtagcagctgcagtggtggatcgatgtgaggcgcgtgattggatggacgcgccaatccaaccatgcactatgcatgcgcgccccgagatgttatgagcaggcgtacacttgcatgagcgagcgggagatggccgatcactgtgcaggggttaggccggccgtgtgtgcgtcttgcttgtctcgaatagatttatggtgcggtgcagctagccagctctccgcccgatcgctgcgtggttggtctcgtgcgtacggacccatgtgtgcggggggcccagacattattgcaggaatagaaaccctacccctatcttctct

SEQ ID NO: 33647 - DNA, 508 bp, Zea Mays
cttcctcatactaatcatgagtcgatagatccacaacccctatgcaaggttctagtatatagctcgagaggaactgaagatcgaaaatgggggtgatcaaggagggagtagtctagaggattactgcgaaaagggagggagaggttagttttaatagaggatgggaggagagatgacgggtctatggctgtgttgttactgtggctgctggctatgtgtcgtcgacttggggaagaggaggaagaaacagtcggcgtgtgagttctgagggagggagctcgccgcaacagtggagaaattgtttatcccaaagaaagccgaaagcggtggcgaggtgaagacatgaaatagcaatgctaagctaatcccatggcacatgtcgtcagctttgacgagtggtggtggtgccaatgccactgctttcacctccttgatccttgcattcctattatttcccgttgacacaagggaaacctctctgctcatgagcttgagcaaaaaaaagtta

SEQ ID NO: 33648 - DNA, 584 bp, Zea Mays
gtgatttggaggctgagatctcatgtgatgtcctcctggagaaaggaatgcatggactcggaatccacaagtgccaccagagatgcagagctgatgcacaccttcagccacatcgtgacaccaacatcaattccaacgagggcatgtaagatacccaaattagcagccgcaatatcttcttcctcatcgtcgtctagtgctaataagaacacccctgtggatgcgcatttgtgctcgggtgtgaacttctcgttgcagtgatataattcaccactagctcgtttggctgcaagctcctctgctgacatccgtttaaactgtggatggttggtctaggccgactttgctagtactgtttgtgtgccgaacttgaatgttgatatcgttggcttggtgttggcctttgtggctttgtccatcttgttgggtccgcgtcccggcgttcataggctcgtgtcaaactcatggttgtctgtgggagcaatggggactgaagctccatgtctttgcgcaatggttcgcccagccctgcgatgaagagattcacatgctgcaatgtggaaagatcatcgcagcgacacagg

SEQ ID NO: 33649 - DNA, 285 bp, Zea Mays
tggatagccacgtaatttccccaccaagtgttggtagggcctcacaactgttgcgccgcaaataagggcttttgagtctccgtgcatcggagaagcccaaacttttgttcgataacccggatccactcatccgcttcaagaggatcttcagccttgacaaataatgggggacgtgtctccgaaaagtccaaatatgaagtttcgcagggtccttgcggatacgctcgcccgccttgctgttgcatttgttgtcccgccatttcccatagaaagcgggtgttattg

SEQ ID NO: 33650 - DNA, 635 bp, Zea Mays
cgtactcaccggattcctggaaccgtggcggagattgcgccatcgcgtggaccggagtcttgcgctgccttccttgggtgagattccctctgcgccttcgcctctgtcccctcgtagcttagcaccgaacattgtattcattagggcgcagtggatcgagaatttatcgcggagttgtgacgccgccgcggaactcagtgcgattgtggccagaccggggtgctgcgcgatcactagtgtgattctcctcctcggattcgccgttgttaaccgttcgtgtagcgctagctgtaatcgagtttggggcgccggtccgagtgttggctatgggtggcaattgtgccgttgcggtcgactgtgcctgggcgccgtgaggtagaagaaggccatttgccgtgcgatccgttttaaacgatcaggattagatctaggcgtcgggaaatgtggcgcgtgggtaatcgatcgaacggtgctggaagcgtaccgtttcactctgtataacagttaatcttaagcgcttagatcggatcagacgaccgacgtcaattcgtacccccttcagtgaggcgtttttctaaaagaacccctgtagaatccattaaccaacccgccgtccacattgaaggtagtctgag

SEQ ID NO: 33651 - DNA, 364 bp, Zea Mays
gaaggaaatgtgccacttttgttaatcggtccacaacgacctagattgaatcatgatgtcgagaggtgttgggcagacccataatgaaatccatgctgatgtcatcccatttccatgatggtatcgataagggttgcaaggcaccagctaatttgaagtggcttgcctttatcctctgacatgtgtcacattccgatacatattgagctatttccctcttcattctggtccaccaatataggggcttcagatcatggtacatcttggtgcttcccgggtgcatggagaatttggagagatgagcctcatctaagattttcttcttgaggtctctatttttaggaaccaccaatctatcttcaaa

SEQ ID NO: 33652 - DNA, 539 bp, Zea Mays
gtggggaggtgggtctcactcccttctccaccggcttctccttcagctcctaggggaaaccttgctcccatcccggaggcagtaggcgtggttttatctgaagccatctgccagggggagagaattactactatgaagatgccaatttttttcttcaaccatgttattttattcatcacacaagttcattacaagcatacagttaccacaagtcacactacacgcgagtgctttctaaggtgcttctgaactccctttctaaagtgtccccaaattccttgagaaggtcgtcaaggctagctagggacatatcctcgatgtcggacaagttctctatcctggagggaggcagtgctggtggggcttcctttttccgctcagtctggcatccttggctcttgctcctcttccggatcttcttagtggtggcgatcttctttaacttcttgtcgtaatccatcttcagggttcggtaggctacacgagtgttggcctcttcaccttctactatttcgagactttcttggagagacgccttc

SEQ ID NO: 33653 - DNA, 363 bp, Zea Mays
aaatctgggctaactacgctgctcgatcagcagtggccaacagatgggactgaactgctccctgcaactcctattttagccccttgatgaaatgagccacacaatagtctcatccaatcccaggttgtgcactgaagtggcatagtgggcaccttcaaattccttgagataatcttccaccgactccttctgatagagattcatcaagtcacacatcgcctgtgaatattcctttgcaccaaactttgcttgcactaccctccccaaactcaccccaagttcccaatccatgccgctgcttatatatctgaaaccaacgggaagcattcccctccatgtgcatagaagaatatgtaacccaca

SEQ ID NO: 33654 - DNA, 1095 bp, Zea Mays
cggtgacagagaattcttttcggcgcatattccccggttacatgattcggctcgcttgcttgggctctcgctcttctctgcttttctagaattgtggctcgtccgacctcggtgggtgcaaccgatcctttttcgttcccatgggtgctgttatgaccccaatgattggctggtctcctctcgattatatgctgcttgtgctagagctcagggttttcctgatccttgagggctgtgcgggcatacctggtctctccgaattgtccagttttttggtgtctgtccgccgggttcttgagctggcttggggatctgtagctttgagagcttcatcggggaattcctgcggcttgggggggttcttgcggttgtgttgagtggcctttcttgtggaagtgcaggtattgagctcaggctgctgaattcatggtcctcatttacctcaaaattcttgaacctttttaattaaaattcttgattttttatgtgggtgctcggggaaaccatccccacttctcaacctgggctcataattcttgcttaatttcttgaattcagcgtttcttggtggtgcttgattattgccgtctgatattgcacagtcctgagtttctagttgcttcgtcagcaaccggtagaggtgtcttttttgcgggatgatagaattgagcttgattgcggtggagcccttttggatttgcagccgattcttgaatcttttcttttctctctctccttggatgcctgcatgaaagccatgctcttaaagcacggttccttttcttttcttcctatcagtttactcatttcttttctggaggtggctcttgtgttggattactcccttaattactctcttatatactttatatgacaaaaatcttagctccttttttttatccaatccgagttgagtcttattttcattgtctgtgaaaacaaagttttgcctaggacatttctcctgatctcacctctttcatatcattaaaaaactgaaagttacagctgcttcagtcatttgaacaagacatccccgtcttttctaggtaacttcgaactagagatctcatgctatttcatctctcctttcag

SEQ ID NO: 33655 - DNA, 350 bp, Zea Mays
tccgtgcgtctcaaatttgggtcttgttgtgctgttgttttgtatgtataatcctatgatatgtacaaaatttgagtaagggataaaagaatatgttttcgggagtttcgtagccaccgcatgctaggcccatacatattactctggtacacattatttgtgcaataaccaggaggttgttcggagtatttttaattggttatatagacaacatggtagctacactacactacaccttatcacaccctgaaagctatcacctagctagtgactgatcggatcatatcacacatgcatgatgcacaaaggatccagccaaacacatgcatggtatccatccacaatgggcc

SEQ ID NO: 33656 - DNA, 344 bp, Zea Mays
cgaggctagtcactggaatgagatgacataggcagcgaaggaactatgggacctcaacagaggcgagaggccaaactctgtgtcgccattgaggtggtacgcaaatagttttgttcctgggctttgcagaggtggagcctttggaccatgatgggggagaccttgctaagggctttgtagcatggttgcccacagagttggccaaccttcccgaggtggtgaaaggcctcacgacattcttggccctcatgcatcacataaaaggacaaccttaccaaggagtgtatgacgttgacaaccctgctctgcaaaaggcggctgacgagtaaagatgtccaaacggg

SEQ ID NO: 33657 - DNA, 272 bp, Zea Mays
tttgtagatgccccctgaccataaccttcttgtctttttgggattctttcctctttcgtcattaaattgctaccatatggcgaactctagtcctttggtattgacatgcttgtatccctttagtactcttgttttgaatacttgcctctaaatttctactacctacttaggcatttcagtttatatgtccatgatcttcctgtcttttgagaccctttcctcttctgttgttaagtcgctatctttcggcaatttcttgtctcttggtattg

SEQ ID NO: 33658 - DNA, 404 bp, Zea Mays
ccttcaaacttgtcttctagctttcggacggcagtgcagtatttccccatggaatcattcgagcaatctcattctttgtttatctgacttatgaccaccagagaatccccatataccatcagtctcttgatgcccagtgatatggcaatgttcagtccatgaatcaaagcttcgtattctgctgcattgttggacgctgggaatagcacttgaagagcatatttgagttgttcacctccaggtgcaatgaagaggatccctgcacctgccccctgcagcttcaacgagccatcaaaatacattcgccatacttccgcagtttccgggttatctggcacttgttgctcggtccattctgatacgaagtcaactagtgcttgagtcttgattgcggtacgaggtcg

SEQ ID NO: 33659 - DNA, 551 bp, Zea Mays
gcgttgccttgctcaggaatttcctcagcaacccacagttcttataggcatgtcggaccggatagtagtggttcagacatggggcctcatgcagtttcttgaaatggtcggtggcttcctcgatcgacggttcccttcctttctaacctgctgcggctactagcacttcttcgtgcctccgcttgtctgtctttctaacctgttgcggatactagcacttcgtcgtgcctccgtcgggctctttgtcgcacttggttttttgcttgcgatggttgaaaatcgcccttactgcaacctgccccgatgcgtgggttgtcgcgatgtctagaagttccttcgtggttcgcgggcttttgcgctctagcttatgcaccagagatgatgattctcatctgtcatcgtcttatcaccctcctcatgatccttcaggtagtgatcctgctccctctcagcctggtgattagggatttgctgcaaatttagcctttcaattatttagtcctccccctcctggtggcggtccttttggtgaatggtgattgaatccattt

SEQ ID NO: 33660 - DNA, 447 bp, Zea Mays
agcagactgaaccggaggtactgagataccagaatgctgaagcataagtgccatgaatgccctagtctcagcccgatcctgaagtagctgctgctgaagggcatcctgcctgtcctgcatgttctgaaacatcgagagcatcctctcggataaccgggcctgctcggccgccaggttggccagaatcgtagcaagagcagggtccatagccggaggaggagcaggagcagcactagaactcccagcctcatgatcgtgtgagcgtggaggcataggaggcggaggcggaggaggaacaccaaaatcatcatcatcatcagcagcagcagctgctgtaccctgagtgtcaaactgtcgaagagctgcatcctcggcctgagagtcaaacacagaagcagaagctggcacaggaatctcaggtgcagggcggtaagatccaaaaacaag

SEQ ID NO: 33661 - DNA, 437 bp, Zea Mays
gagagagaaggtgaggaatttagtttaggtttttcttcttcgatatccttctcactgtccaggctggttcaaatacaactcacccaattcagaatacgtaatactgcctcatacgtgtacggtatacacacgtacacgtatggtacgccacacatctagacccactctggccctcggacgcggctgttgacgtgccgtttgcgtttgcctcgcacgcctgtgtcttgagtctgaatgtgatcttcttctccctctggcaaggctgaggtagtatctgtagtggtaacattcccctccccttgaaaattcgcttgaccccaagcgggtgccattggaaaacattggcgcaaggcttcgcggtcttcccaagttgccagatcacgaggtaaaccggaccactccaccaaaacctattgcaccaatctattacctttagt

SEQ ID NO: 33662 - DNA, 360 bp, Zea Mays
gttgaagtgttggccatgttcccctttccttgattggagttcccagagagctgctaaaagttggatttattttgcttcggatatgggcagtccttgatgaaatgtctggactttccacagttgaagcacacactggaagagctggggagggcaggaaaacgagtaccaggggcactcggctgattggtaggagcaagggcagtagtgggacgaataaagacaggctgcttgaatggatatgaaggtgggcgaggcgaagaacgattttgattgaaaggtcagattaccaaccttgttctcttctcaggtccttgatttgatctctcacccgcatatccctttgattttccgtgtcctgca

SEQ ID NO: 33663 - DNA, 296 bp, Zea Mays
ggcccctcactttctattccttcgcgaattgaagtccccgaccgtggacggcgaagcagtggctccagcgagcctaccctggccggaaaaggcaacaactatgcttcttatttgaaacaagagcaaggaagacaagaacagacctgtagcgagctagccacggtgagcactcacacggcggtgttcttgactaatttgggggaaatcccaaattagagctctctggtggacaatccgagacactagtgggtgtgctggatgcgtgactacctagcgaagccaatggcacactcaat

SEQ ID NO: 33664 - DNA, 458 bp, Zea Mays
gaggggataggggagaaggagcgcgtgcgctcggcttttatccaccgagcccacggagtcggggtcgtggcctaactcacgcgaagcaaggaagtaagctgcgtatggcgctcgggttgttgacgtggatgcgaaacagacacagcgaagaagggggaagagatagagatgacaggcaggtcccacctgtaagccatgcggggaaaggaagagtgaggtgccctggctgacgtacgggcccagcttgacagtgatacagatgagcgcgcgcgggtgagtacgtagttgcccgggaaaccgacatgtgggtcccacgcgccagtgagtccgggcgcggtggcgatgggctggcggggagagcatgggtagtgggccgaattggttaggaaccggcccaaacaacatgttgacctttttctttttattttcccaccttcttttcttcattttcaatttca

SEQ ID NO: 33665 - DNA, 548 bp, Zea Mays
tcgaaggagaaggagcaggcggaggagagaatagatggattggggctgcggtaggaggaggaagggagggaagcagaggcggggtttgcggggaggttgcgggagggcgccgtgtgacgatgggtgaggcgaagcgaggtgacgaccgagccatacgagagagagggagaggaggtggccggtttctctagaagcattgcgtggctgcacaggctgccggtagaaaaaggtgatagagccgcgtcgccgattcacgatcgagcggcttgaaatttttctgccgacgtggatactcccagcatcgccgttttgcaccggctttaaagaatagtctagaagcattgcgtggctgcacaggctgccggtagaaaaaggtgatagagccgcatcgccgattcacgatcgagcggcttgaaatttttctgccgacgtggatactcccagcatcgccgttttgcaccggctttaaagaatagaaatatgagaacattttggtgacgagctctagaaggcgactgaggcctaagcttgtgtagaagcgcccaaag

SEQ ID NO: 33666 - DNA, 358 bp, Zea Mays
gttatatcaagcaacaccttagaccatgtttagatcccatgtgctagcacatcttgatgagctaagctgctatttttggacaaggaaggtatattaatttcaagtgcattacaacaagatgaagcaaagtcttgaaacaagcatctcccgacctctgttccatatagaatacacagcctaaagccaaacacccctagtgactatcaacccttatactagatcgccacaagtggcggagaactcagtgtggctcggtgtggcactcgccatacctcgataccggcgcgtgtagcatcatggagtcactgatccaaacgccgtcaacatagcgccactgttttttattcaagaaaccatg

SEQ ID NO: 33667 - DNA, 617 bp, Zea Mays
caccgatcgaagtccgcgacgcatcacgggggcgaccctcaacagagactccattgcagctaaatctaacgccgcaaaataatctaaaccatcctccgaggattcgttatctatccaagaaaaagggctccccaactttccaccttccgaagacaacgacccaacatcagattcgccagatgcgtcactactaggaaacactgcatttccatccatcaaaatatcatcaatcgtgtcatcgtcacggtttgcttgtgtaggcccagacaccggaacctgcgcagcaatcgatcttcagtatcacgcacaaaacgaacactgtcagtctattccctattacactctcgcaacctacaccgaagcgtctgccattgcaggaccctcagctccacctccttggagcaaggattgctcttctgctcccgcctccactgcagcatccttccgggtcaccgagctttcacggttggcgaggtcctccacatattcttcgttcatcgcctgcgaagacaacacaataacatttcaaacaacgaacacacacaacacccctcgccaaacccaaaacatacctgcgccagcgctcggtctgctacttttggtgttcaacacatttc

SEQ ID NO: 33668 - DNA, 311 bp, Zea Mays
gtcatctaaaactggcgttctgattcggacactgtaccattgaaaacctgattcagggcgcctgacagacagatttgtagtgtccagatcttggattttcgtataagagcttgctaattcatctgtagcaaacttgtagccctatgatccagctacaaatcgactatagcaactaccctcaatcgagcaatagatcttactctaatttgacccaaaagtttggccaatgtcttgggtgacctaaattcagtcatcagagtgactgacagcacaactttgagcttatttttctccaaactttgtatgtgatc

SEQ ID NO: 33669 - DNA, 421 bp, Zea Mays
gcggtctcccaggaagcatgcggagatgattggaccgtggtggaatccaggcgttcgaggaagcagcgcgtgaagttggaacgtcagtgtgttctgccgttggacctcgtcgggcgatgctttaactgcctcgcccaggggcacttcgccttccaatgtttgaagaggaccagatgcttccgttgtcgtgagcttgggcatcgttcctaccagtgtgtgagggccaaagctcctgtctggcggagaatttctgccgccgggtcgtcgtcgcggtacggtgatccttctcgacctgagtcccaaggctcggtctggaggaggatcagccccactgcggacgtctcggccagtgcttgctgtgggggcggttttcctcgacctgaggcaagagcttcggtctggaggagaatcaccccaccgg

SEQ ID NO: 33670 - DNA, 340 bp, Zea Mays
tactctccaaatatgctaacaaggtccttccacgtgatcgaacaatgaagaaaccccaatcacccacgaaagcaacacgaccgactaaagtggcctaaaaggcgacactagcccgctcatcaccaatatattgccctattcaaatatggaatagcacgatgatgaacccatattatatgcatagtccctttgcttatttgggctaaggggcctgcaattctataccttttgactcgttgatcaaatggtcatgatcgagaaagatgcaattataaacaacctttatgcaagaatgccattaaatagctatcatgatatttgaaagagtcggtaacttaca

SEQ ID NO: 33671 - DNA, 313 bp, Zea Mays
gcggaggagcagttggtgcctgttgagtttgctgcccggaactgccacgagctggtgtacatggagtggtggtatagccaggacggaaactacttctaggctgtccttggttagcagcccttcttttctctccaaactcacacctcttgttttccacagcaatagctttgtcaagtaatcgttgaaaggacggaaatgtgtgtgatactagttgatattgtaggggtccaatcaaaccatccagaaagagctcctacttcttctcatcatcctcaacatccctaggagcatatcgagatagctgaataaattt

SEQ ID NO: 33672 - DNA, 366 bp, Zea Mays
gcacaaagaaaggcaaggagaccaagcagatcgttgatgaccacgttgccgatatcttgtacgagaacaagatttcgttggacatggtcaactcaagaagctgggagatcgtgttggagtcaatagggcagtatagtcctgaataccacgacgttagaattccatggcttgaaagggttgtcgagaggacatcgtcgctaaggtccaagcatgaagaatcgtggaaggagtatggctgctcattgatgtcagattcatggacagatattagaggatgacatctcatcaactttctcgcaaaaaagtccaatagggacatactttttttgctctattgatgcatcaagtgagatagctaatgccaac

SEQ ID NO: 33673 - DNA, 300 bp, Zea Mays
cctaactccactcgtcccacggcgccgccaatctctctcgttcctcctcttctccgatggcgactccgacgagaggcaagaaacggctggtcgtcgacgtcgatctcgagttggacagtgagaccgaagtggctgccgccttcagtcgtttgtcagtgtcaatcctcgccaagcctacaggcgacggtagcggcaaggagcactccaccagcaagcccgtcacctgtgtggccacatcaggcacgttccacacccagcaaactcaccagcaacatcccgaatccaacaacagccagatgc

SEQ ID NO: 33674 - DNA, 294 bp, Zea Mays
ggttgaagtgttaaagatattctagatctttcttcatcagatcacccccgaagctagaattaggatggggatgtttgtctgggctgtaagaagcccggggctagagtcgagcgcgaagtgcttctgcaatatgcatgagctattatacgagacgaaggctaccgacaaagaacagtaccacaacaacttcggttgttacagattcattgcccgctctaatgcaagctacccggtgccaacataccagaaaagatggcccggggcctgaatggaggagtggttttatgttaaaaa

SEQ ID NO: 33675 - DNA, 289 bp, Zea Mays
atgtccgcgcttcatggaggctttgcccatcaacagatcgacgcgtggatggctgcgcggacgtgaatattttctagactacatctgatttctcctcagtcctcacccccgtgcttcacgcctaataccacatctccaaagcctgttggctgtgtccattcgtgccaggccagggacaggcacatactgtgtgaggcactgaggcatggacacgtcttgagtgatggctaaggccatgatgtggggtccgcctatgctcccaccacactcacgtctcatctccactcca

SEQ ID NO: 33676 - DNA, 448 bp, Zea Mays
agaccaagattgtttccaaaggagtcaggccagagtcctttgtaggccaagattgtttccacaagagtcagaccggagtccctacgatggcctatggaaactaaaaaccatctgcgtggagattttttccattatgaaacatggcacgctcggcttcatcgaaacggaggttttgggagggattcgacaatttggaaacccacacgatgcatagacgctgctatggactcaaaatctctcttaggcgccttgaacaaccattaatcctccgccatcaaaatcagtttgtgctggtgtagccgccgcccgtgagtcccccccttaactcttattcgttcccattctctacagtagatgcttccgattgtgagatctcctcgattgtagtctagatcccaggcttggagtactagttgttgttaccatctctccccattccccatttctg

SEQ ID NO: 33677 - DNA, 1450 bp, Zea Mays
gtgaacgaacacggcaatttgaagcactgagatgggattcagatgcgtaagattgagagaataaaaatcaaggaggccacgaaagaagggagaaaccggcaaagccaatcctctgatgaggaaaggcgcgaacataaccgtctcgtgagtatcctctgtcgggtcggtaattccccaccagatccgccaggagcataactctttggacggcagaacaccgacttcgacgaggtggagaaggtcattttcagaaataacttgtgtgtaatatatttgatatgcattttttatgaataaattgtctgcaatatatttgatatgcattttacattgcaatatacaaaagataccaacaatgttctatcaaattcttaaaattttcaaatgtttgaagcattttccaatcgaaaattatcattttccggcggaaaagccgaaaaatccgaatttgaatttgaattctcctttcagtcaaaaaatttgaagtttcgatcgtgatttcgtttccagtgggatacagaaaatggtttcaaatcagaaaggtaaaccctggtcaacgggaagtgtagtcttagtgtcaaaggtgtagctctcatcatagcgatactagcaatcaagggcaatatgccctaccttgtcacagacttgacagatcttgtcagtgcgccaagattgtggacgcagacgaatatgacgatggatttggtagccaccacaggcaccaggagggccaccacaccctctgcctcgaccatggttgcagcaacggttcatgttttcgtgccctcgcccagcagcattagcagacgcttgataacctccataaagtagatccatcctaatgtcaaagctaagaagctagaaggtggatttagctatggtgacctgcgcaacacggaccattagagtagatatcaccaagttatactcttcatcaagtctcgatagaaagtataggacaagttcttcatcattatcagtcttctatgcaaatgccatctcacctacaagagatttcatcttgacaatatattcaaccattatcatattacattttcttgaagttgtcagggcaatccatgtgttcacgattcgggctcgaaagcgacgtgtaggtcttctgcaggtttgaccacacctcatggggtgtttcgtgtgtttcatagatggcaacctaacccacgacttcttgagtcatggatgacatatggaagccaaggacccgttgttggagcgtgatccatcgaatgtacattgggttgacatggtcgatcatcttaccatcctacttgatagagatcttggtgaacgttacaactgtgccatttaggtagccttgtggctaggcacctctaagaatggacaaaacttgcgcttccaaaacgcgaagttggtctcgttgagctttacatcgacactttgtccttggagaggtgtcggtactgcagag

SEQ ID NO: 33678 - DNA, 498 bp, Zea Mays
ttgatcctagctaattttctgttatgttgccatgcctgaatttcacaaatgaaagacttctcgtggcaaagtcaaggattgcaaaaccaaggcccagatttgtctagagaagacacaaccaattagaatgtgctgaagggtctcatcggcttggtcacacaagggacaggaatctgggtgaggaatgcctcgtttggcaagcttatctgcagtctaatcagcctactctgctttctttgagcggtctctcaagtccagaccttggagattaatttggaagagttgggctcctctccactgcaagttctttctttggcttgccaagaacactggggaattagaggacggctgctccagcagttcccctatttctttatcatctttcccccattttttcttccttctgtatacacattacccgttcaaactctatttcaacatcataatgattcaaactcatgccatacacaatcaataatattttaaattcgtggttta

SEQ ID NO: 33679 - DNA, 549 bp, Zea Mays
aacgcagttagtgtttatgaacgggtaatgaccacgacattcgtatggataagactatgtattatgcatttatattgagacttgtttgtggatgtaaatgaacaattttgtgtggttaaaactcattcagtgtgagtttttctgatttaagttatcattttccgatcaattccgagatattttgtctagatttatatgttttcggtataccagaatttaccgatcataatccgtttccgactttctcgttttctgatttcgaccgaacaaaaattatacgggtgaaatggcgagagggtttttccgactgttaccaacctttttcacccttagtacgggtcaagttgtttgcgcttattgtttaattcgagtatttcattgtatatgcattgtgctcatatttgctatgccacttgtaacacaagtggttctggaccaatatatatcaaagatcctagttcttcctccaattcgatgtctgtgcttttttcacaactctctcacctctcaactgggcttgagctatgcttggagaactggcccgaggca

SEQ ID NO: 33680 - DNA, 550 bp, Zea Mays
tgtaaagcatgttcagcaagtttttaattctttgggcattcatgtcttagcacagactgttagagatgttatttcaccaaaaaagaaagagggaagagggaaggctatagattctgacaatgattacgatccatgctctgacattgaaaaccaatctgacactaatgatgactatgatgatgacctcaataatgaggtcaatactgaggtgagatgcattgctaaccaaattcacatggtcatggcctgcctatttcatacatatactccattttacctaataaaacatatacttctttcataattactcacctacatttttcctcttgataggcgacacagatggttccaggaactcgccctcaccaaaagaagcaaaaggcaggaacaatgccggctgccaaccaccagccaccatgcacaccagtcagattgacaaggcaaagtgcagccatgcctttgcctggaggccgcccgccacctaagccaagacatcccttgcctcctaagaccacttcgaaagccacccctaaaagaaatgccatttcca

SEQ ID NO: 33681 - DNA, 298 bp, Zea Mays
aaaacatggaatcaaacattgatccaaatacaccaagcataccatctaagtcttcctagaatagtctcttagcactctcattgtgtcgtacttgggggcaaactcactaattacgttcaagaccaaacacccacaagaagcttgactaagataattctatccacctactttctcgcatccaccacaacgttattgagactcttattaatcaaaactccaccatttctatttgcagatgtccctatgctatataccaaagcttgaagttgatatttcacaagacaagcaaaattctaac

SEQ ID NO: 33682 - DNA, 479 bp, Zea Mays
agtttgaagaaatacacgaaaagcaacaacaaatgcgtcgtgcatttgagggctgccctgacgatttggagacgaacataaccccaaatgccgaaaaccaggtattttatgcagtctgattatggttacattacatgttaatttcccattctcatccaaaatattagagaaaaccataataatgtatacaggatttctgttttaatgttggcaataatatgccgagcgacacaaacatgtctcatcgacatgtaccagactgcaatcctatgagctcatttccgtcttcccacttgccgatgtttgacgccacaccgcaaaaacatgtatatgtttcagctttgttttatccattgttatctcaattatggattatatttaattgacacatgattgaggcttaaaacatagtaccattgtttctttgggtcagggaggagacattggtccatctcatgacactcctactttcacgggcc

SEQ ID NO: 33683 - DNA, 458 bp, Zea Mays
atttttttctcctgcatcaatccattctctaaccaacactcttattgtacgcttattactgcaacctggttgttcggcccacgtgtgatgctctcccctacagtggccattcatcacaacaccgggaccgactacacgctgattcacaatcatttcagtcctatgtttcctatcctagctagcagaattattcatttgttgtgtaaccactacatcaaacttcatacacttgcttctcatccctcaacctccaccactttggagcctgctctcctgtaatctgtttgtcctagcagcagctatgtgttcctgtcctatgtttggcttggctgctacttcttcgccgttctttgtgaaattctttgtgacagccacctgaccattctgcttagccatctctgtctgggggccttctgcaacatttaatatgtcgcactccactgttcccactatgactt

SEQ ID NO: 33684 - DNA, 570 bp, Zea Mays
atggattttatctatggggccatttattgttctttatttgggcaatattccatctcaccttcgctactgaaatctttgctggaatgatggaatccagattcaaacacttttttattccacgatggcgagcgtactgtaatactcttatatttgcattatattatgggtttaccaatggatggggaattttatgaggagtatgtcccttcacatcatgagcgtgaaccatccatgttattatatcccaagtgcttatcacaacttttggaggtttgggatgaattacaagtggggggagaagtatcgctgcaagaatggtgtgactgttttcataacggaccaaggggactttcacactctgatgatatggaactttcgcttatttacaaagcagctttcatagcgatatggctttgcagctttgctattatcggagggggaccacaaattcgtcgcgggttattggtgatggcttcatggatagctttggggcgacgttttgctttggcacaaccagctttgtgttccttatattactccctgagattaatcagtacagacccggttggc

SEQ ID NO: 33685 - DNA, 885 bp, Zea Mays
tgtcattcgtagcatgttcttatccatgaaacaaaaatcatctgaaataaaatggtccaagttcaagcaagcactgtgtatcctcataccttttctaggtctccacccctagcttctcaaggtggctttttatagcagccatctggtatgcctttttggcttgcagtattggagacgccatgccaaggacctcatactacttggagttgttgctcctccttggagcatgcccaaacatgtatttcaatcacacgacaattcccatgcaatcctaaaaagagagataaaactcaactaaatcaactaaagaaaagtagcctaaaatcacctattgaaatattcattctatagcagaccttgaaagacaaacaattttgggatattgagttttttatttgcagttgtctttggtgtaagaaatagatagttcactttgctgtgtgaatgaaatgtttctctgattttggatgtaatcaagtttacatcacacaattgtctgtactgcaccatttcacactttctaagctattgtattatggtccttcaagaatcaagtatgaactacaattgtacggatgattcatgttgatccctgtgttttagatctgattaattaatctaaaacgttaatgcaaatacttatcatgtggtacaaccccatcttcctccctccccaagattctacttggagccacgcactaccacacgccaatatccagccactttccctggtgacttgcagcaactgctccaaatcttcaagtattatagttcattgtttactgaaacttttggtgggtatctctgtgctaacggtgatccatctcgctttctcggatggcggtttactgaaactttttcgtggatctctccccaccctccctg

SEQ ID NO: 33686 - DNA, 1315 bp, Zea Mays
gcgggattgtggagagtcgcttgtcgaggaggaacttgagactatagtggtctgtccgtatgatgaagcggcgtccccacaaatatggccgccagtgtcgtactgcttgtacgagaccaataagctctctttcatatgctgctaatttgtggtgtcttgctgcaaaaggacgactgaaaaatgcaatggctcatgttccttgatgaaggactgccccaaagcctgtgccggatgcatcacaatcaaccatgaagtctttggtgaatgatggtagctggagtacaggtgctttctgttaatgctgttttgagggctgcaaaggcggactcggctgtttcagtccatttgaagccttctttgcgcaaaagctgtgtaaggggtgctgctatgactccgaagttatgtataaatttcctgtagtaccctgcgagacccagaaatccacgcaaccctcgaacggagagtggctgcggccaggtaatgattgcttctaccttatctggatccatggccactccttgtgctgatattacatgtcccaaatatgcaatggagctagccccaaatatgcatttggatcgtttgacaaataggctattgctccggagggtgaccaagactgctgcaacatggcgtaaatgctcggtccaagtagtactaaaaatcagtatatcatcaaaaaatacgagcacaaaccgccgcaggaatggccctaggacttcattcatcaagctttgaaatgttgagggagcattggacagtccaaatggcataaccagaaattcgaagtgaccatgatgagtacgaaaagttgttttctccacatcctcgggatgtacccgtacttgatgataccccgagcggaggtccaatttggtgaagtagtgtgccccatggagttcatctaagagttcatcaaccacgagtattgggtatttatcttttattgtgcagtcattcaaagctctataatctatacaaaagcgccaagaattgtctgctttttttaccaaaaggacaggagcagaaaatgctgatgtgctgggtcgaataatcccttgtgtgagcatagttgtgcactgtcgttccaattcatctttctgcagttgtggatacttgtacggtctaacagccactgactgtgtccctgtttttaggtgaatcctgtgatcacagtggcgggctgggggaaatccttgtggttcttgaaacactgattcaaatgactgcaatagttgctccatcatctgagggtctgccatatgtagtgaacgagtggctggttcatggatgtcattgcgtggtgacccaagtc

SEQ ID NO: 33687 - DNA, 283 bp, Zea Mays
cataatgtagctgggttaggcgagcctgatccaagacgacaaagaccgacgtccgagttaggcgctactgaagcattgatatctcgggtggtgcagatgcaagcacccggggagctatgcattcagcgataactcgggtgacaaggcaatcaagactatgaatatataggactacaatccacgacaaagaaggggataagtgaagtagatagtgatcacaacttgtaaagggataactctctagtcatgtatataaggtcgaggggaaacccctacaaaatca

SEQ ID NO: 33688 - DNA, 395 bp, Zea Mays
tggaatctgagccgcccgatccagaaccgaggacccagattaaaagcccgctacgacgaaccggtacgtattgtgtgtcgttcgatcagggaccaacgcccaggatttaaatagccgagagagaatcccgtacatccgattagatccaacggtcagactctgacacatgaagggggtacgcgacgcacgatcacatccatccatagccgaatcaacggtccacccatcttcttccttaaaccatcccgacggcgacaccgctagccctaacggcggcgccatgaccagcgaatccgccaccgcgcctgggtgcactaattgataaagtaaaatgcgctaaacgactctaatgccagcgcgaatcgaataggaggaaacttaccggaattggtgcg

SEQ ID NO: 33689 - DNA, 474 bp, Zea Mays
atgaaaaacttgcatcttttcattactgatctgcttaactgaacttaactgacctgaacttaactaaacttaactgaaaaacctgcatagtttttcagtgatgtactttcatattagtatataactgatttttggtggatatctgattggtccatgttttggatgaaaaacttgcatcttttcattactgatctgcttaactgaacttaactgacctgaacttaactgaatattacttggatcttttcatatcttttcattactttcatattagttaagccatctttcaatattactatctgtttggtccatgttttgccatgtttatttattgacttaactaaatttaacatgtttgtcatgcttgtcttgtttaatttaatggattatgcaactagcataatctgtctattatattaagtagctagttgttcctcttttcttctccccctcttaccttcatctattcctgtt

SEQ ID NO: 33690 - DNA, 342 bp, Zea Mays
gtgataagaatatggggaggataaatcataggatgatccaacggtttaatcgcactctggatgatctacaattaattgaactttcactcaatgggaaacgtttcacttggagcaatggccatgacacccccactatgtctaagatcgaccactgctttgccactcttgaatggttggatctgttcccacgttccgacctgcaagcgatcacctcccttatctcagactattcaccactattccttcaaggggacgtcaattttgatttctatcggggttttaggtttgaggctttttcgacaacaatgtcggggttccttgatctggtggagcacaactgga

SEQ ID NO: 33691 - DNA, 423 bp, Zea Mays
aaagagggttgtgagtattctcaaaaggcagaccattcgatccgtcaaagaagatcagagggctgttaagaagcataaagttctagcagagtcgaaggattcggctcccatagaacgaaagcttgttaggatggctactgcagagatgaaggtacaagatgtaccagaaaagactgcgggtccttctccgtcttcctctatcgatgtttcagaaatactgaaggtaatgactgaacccttcctggttgcaatgctaagtcccctggggtcatatttgactagcctattgcaatcaaaggagaagggatttgaacaaagctcgggaggaaagaagactgcttcggctaccgagggaaatgtcgggggtcagaagaaacgacgaatgatggacgtaatgcaagccatccaaaagaccccgccctc

SEQ ID NO: 33692 - DNA, 356 bp, Zea Mays
ccaccagcgaggtaagagtcccttccaaggtttcgatgtgttccccgccctcataacagcgttttggatggtgttggctccctgggcgtggtcagggatcccatccatggcgcccctaaggtgggttggccaccgccgtcttggcctggggtctgatgatggaggggaaacaacggtgaccgtagatctgtggatgaacgcgcgggattaggatttcatcttaccccttcgactggatggaaccccatccgtcgatctcagatccaacgactatcatcgcgtaccagtcactttaagggaggcctaatctacacccttgatggcggatcaaatgactcagaccgagcacagattct

SEQ ID NO: 33693 - DNA, 334 bp, Zea Mays
tgccgatggaccaggagcagcgaaggttgagcaatgagtattgatcgaggctctagagaagcggagtgactggcacctatgggacagcgacaggcacaaggacatggcggagcgaatcgtgtcatcgacacggtcgcaaaccggtaggacacatgttaagacgtggtgacgcgtttgagcacgctacccgcggtggtttcgatggttgaggctcaaaaccactcagtgatagttcgcgggtttcattgaatttaggcctcaaaatccggcagtgtggttccagaaggaatcagaggagacatgtggcccattttgacgctgactgagtggatat

SEQ ID NO: 33694 - DNA, 447 bp, Zea Mays
cccataatgaaaagttcggggtacttctgccgcatcagctcctcaagttcccaagtagcctcgcgctcggactaattagtccacaagaccttagcatacttaattgatctccttctcatgacatgctccgaggactccaagatacacaccggacgacactctagagtcagatcctgctgcacagcaatcggttccaacttgatttgatggtccggatcccacaaaaacttcctcaacatagagacatggaataccgggtgtacccctgccatggaatccggcaattgcaagcgataagccaagatgccaacctgggctaagatagagaatagtccaatgtatctcgggctaagcttcccggagacaccgaactgaacaactcctttagtaggtgataccctgagaaggacttgatcccccactgcaaactccaagtcccgccttctc

SEQ ID NO: 33695 - DNA, 345 bp, Zea Mays
acatatttataaccctagggtctgcactacacactacacaaagttgctgtcccctagtctgcaacactagagagtagagatgctatcctgttgtcctttagatgttaaaggaggacaaccaaaagactcctgctgtcctctagatgctaaaggagtagatgttaaaggaggacagtcaaaagactgttgtccttcacaaggctgaaaagagatgctgctgtccctacaacgaagactaagatgctctaaggaatgagatgccatgcaacaaaagattgagatgctgctgtccctgcagtcctccacaagaccatgctgctgtctctgcagtcctccacaagacca

SEQ ID NO: 33696 - DNA, 352 bp, Zea Mays
gggatggtgggttgatatgtaaaaagggcaggggctcttttacaaaatgggatcggtgaaggggtaaggagtgcactgggccattagatccagtacgcatggtctcgatttaaattaaccgaggcacgaaccgacccgagatatgcccacgccagaacctagtcctagccctctgattcaatcttaatggctctagattaaatcagcgggaggtatttaattatttaatcctgggcgcacaatgacggatcaacggccccgcaactctcttcttcctctgacctgctatagcggtagagacgggcaccacggcagctcccacgccggtgaacccgactcagttccccccgag

SEQ ID NO: 33697 - DNA, 2057 bp, Zea Mays
atcaaattgttatgttatttttgttgccgtagatctcgttgccgcatgcaaacttcctcagctgtcaacaagctttactcgatactgaattgctgagcttgtttatttcagataaaggacttcatgcaagattttgtttcaaaccatatcatcccctacatggaacaaaagatccgtgtcctcaatcagcaggtacacagttgagagtttggtatatcattatgttcatcttatcatttcccaacaagattcagtaccgttttaggtagccacaacaagaaagggttttagaaatcagatcaagaacttgtggtggagaaaaagagatgatgtcccagaagctccaaatgggccaatgcaagtgattattctagattttgctgcttttcactgtatatatctgtaatttctaatattctgtaactttattttctccatcaggtatacattcacctccatagaatcacagatcagagtacttggtgatttcgccttcatgttacgggactacgagcttgccttgtcaaactacagactactcgctactgattataagcttgataaggcttggaagcgatttgctggtgtacaggtacaagaatttttttgactcgttttgctgaactttctctgtggatatacatattaatagtctgtttagcgtttttaattgtgttgtaaaagcaaaattatgattgctattctgaaggaatatcccggtatgtatgccaaacatgttggtcttgtttacactaaaagcaatgggcagttccattaccaacccagctttcctacaaatatggcgtttggcctagaaaacatcagatgatacatgtccactatgttgcagggtttctggattgtttttacttgagtctggaatcaccttaatgtgtttcacatattaacttcatgttgataattgatatacatatattctcttttgcaggagatgagtggactttgctatttcattttggatcagtcgaggaaggacgcggagtattgcatggaaaatgccttcagtacatatttggtatttatttagaaattcacatcttggtttcctggcacatgcaaataattatttcctttatattgcttattacttaatcttttggatattgttctgtggtcttgtgctgttaccccatgcttcttatacagaacaataaggagcccaaaacccattttgcatggaacatctttttcgtgtttatcagttcttaacttcttattgaatgctcaattcaagtcttatttaagcaacaatcataacaaacagctacaattctgggccacatcgccacatattcatttcattctagtttcttgttacaacctctgggccatgttgccacatattcatttgggaagggaaagggatgacattttagactggctacaagttctgggccacattgccacatattcatttcattctagtttctggtttctttcggaaacgtgtcctgagtcaagaaaagtcagaatgtacagggtccaccctgatttaaaactaccctcttcaatatcaaatggtttattatgcacattctgatactagctgtacaaatctgaatatcctgaggtatggtgcgtttagaagaatgcacaaataagtgaaatatgtgcccatgacaagatactacacttatgatatgtagatagtagactctttagttttcttgattgaacttcttgtagccttctttcattcaaagtgtaattcaccttttcatatatgcagagaattggatcttctggccagagaaatgctactagatgtggcctttggtgggctgaaatgcttaaaacaagaggacagtatagggaagcatctaatgtgtatttccgtgtttctaatgaggtagatttcctgtttgtcgtggaaaatttttagctgattagatgtattattgattgattgagcatctctgctactcaggaaccttctttgcattctgctgtactgcttgagcaagccgcttgttgctatctattatgcaatccacccatgcttcggaaatacggatttcacctaatcttagctggga

SEQ ID NO: 33698 - DNA, 279 bp, Zea Mays
gcgactgaagctcgacatagtccagatcgcaggccctcgccaccacactcttggcaatgctctcgttccaagcgtgaaggggaatcccctccaggcatagccggacgtgatacctgaggtccacagggtctgcttgggtcatcggaagccaccgccgaacgcggatgtcgaggttgccgaagaggaattccctgcgctccaaagccgtctccctgtggtgctgatgggagaaggtgacaacgaagtccgctgggtgatgtcttgctacggagatgtcgt

SEQ ID NO: 33699 - DNA, 843 bp, Zea Mays
ccactgacactcagcacggcgatgcgcatcaccacaacaaaaacacaccagccccagcccgggcttaggaacagcctgatacctctgagtagttcctcccgaactacccgattcagaagatttgccatggtaggggtggtggcgctggtgctgagacttgcccctcttgtgggctggacctctagtgttgccccttctcgcgtcctggccatgaggctgatcaacacccgaagacttctatgactccatggtgtactggtgttgcatctccacacccaatgcgtgctccactgtagtatagaaatccaccaacggaaaggctcccaaggcatgcctgatagaaggttttaggccctgacggaactggcacgccttctccatctcattgtaagccacatgaggaacaaggcggaccatcttgttgaagcccacttcatactctgtgatagacttcttctcttgcttgtaggattgcaaatcaatcttcattttctctaggaaggtgaccgggtagaacctcctctcaaactgcctgatgaaaacatcccaggataggactcctggtgaagaagagtgagctgcctgcacgcccctccactagatttgagcctctcccttgagcagctgtatgccaaagcgaacacgatcaccatacacaatctcaaagacattcatattatcctccacgtatgttagccaatccgccgccccgaccggagtaccactgccatcaaaagtgtccaacttcatgctcatccactgcatcagcgaaagaccactgacgggaagaggcacctcaaccccgccatctggagcagcacccgcgggaacagcgcccccggg

SEQ ID NO: 33700 - DNA, 307 bp, Zea Mays
ggaacttgggtacagagccagctgatccgtagtgcccacatgctcggcgtcgtgactgtgttactgtcgtcgtgatctgtcggtcccccttgctatgccatgcgtagtcttgtttcaccccgtcattgtgagcgtggtgagtggtgaaacaagttcacgagtcactatggtacctgcgcgccacggtgaatacgctgtcatgaaatatcctaccgttgtcgtaggtgatcttatcccaaattcacgaagccagtgaccggtccctttaaattggagactctccctgctccgcctctctgttacgcac

SEQ ID NO: 33701 - DNA, 440 bp, Zea Mays
caaggcctactgggatctgttttctgcagccatggccaacgagcccccaaaacccaaccgaggttctttaaatcactaatcccaagaccagtagaccacccagctccttgggacgggtaaccttaggccaagccaggaggcaatgaccaccacagaactctttcctgtccctccagaggaagcccttcctctgtttatcaattgctttgatggcccagacaggaaggtcaagtgccaaagctgcataaatcatctttgccgtcatgacgaactgcacatgaatagctctaccagccttggtcatgagctcagctttccatcctggcagaaggctggccaccctatcaacaacggcctagacctggtcccttgtgagtttcttgggagacaaaggcaaaccgaggtacttacagggaaaatctgaaatattacatggcagc

SEQ ID NO: 33702 - DNA, 300 bp, Zea Mays
ctctaggcgtgtagcttgctgctctccgtgaagaagaggaagggagagggagagatgttcgtagtgtctgatgaatgaggaggaggtggcgacgaggtataaatacctgcgcgtgctaatgctcgtcggggaaggtgattagtgcgtgggggaggtggcgggcgcgtcggtcacttgattcgcgggaaactcggccgttgtactactagttttatcgtcacttgagtccagcgtaaatagtttgaccggttgaacgggctccgctgtgtgcggcttgaccggcccacttggcgttgcttg

SEQ ID NO: 33703 - DNA, 272 bp, Zea Mays
agaaccctagaccatcagctgccatacctactatgggcatattcggtttgctctgttttggtagcacacatcttgctgtaacatgagtatccttgcgacatatatcacaccataaagcattgaaacaatttctagcatgatgcccttcaaccccacatttttggcaaaaagcgggacgagcaggttcaatctctttcttcaaagaagatggagataagatgggattacctgattgaatgccatctccagaggaagaagacatcaatccatct

SEQ ID NO: 33704 - DNA, 811 bp, Zea Mays
gccgtagaaccgcggcttcagcttgccagcggacgagtcgggcatagaggccgtcgggcgctggcgtagacgaagcagtacccactcgccgacctgcatgtcgatgtcacgatgtagacgatcataatgatgtttctggacagcctgggcctactctagccggtgtcggatatctgtcaggaactccgcgcgctcctccaaagtcctggccaaccgtaggcaccctcgttgccccctgctcgtaggagcgaagtgagggagggtcgcggccatagacgacgtggaacggcgtgtcacgcagggacgactgaaaagcggtgttgaagatatattccgcccatgggagccagcgcaaccagtcgcggggtcgatctcccgtcaagcacctgtgatacatgatgatgaccttgttcgccgattcggactggccgtctgactggggatgaaatgtcatggtcatctgtagcttggtactgctcaagcgcatcagctcgctccagaagttggaggtgaacaccgagtctcgatcagagacgatcgactggggaatgccgtggagacggacgatgtcggtgaagaatgcctgcgccacagactcggccgtgtacgggtgcaccaggggaacgaaatgtgcatacttgctgagcggtctatcaccatcaagatgacggtcttgccgcggacgcgaggcagcgcttcgacgaaatccatggcgatgtccgtccataccccttgcggcactggcaggggcaacagcaagccggccgggtgctgatggtcgggcttgttgcgttggcagactgcacagcca

SEQ ID NO: 33705 - DNA, 561 bp, Zea Mays
gaaacgcctgtgctcaatctgtcccggaagcaggggatagggaaacatcagccctctgtcttgaattcgttgccacagagccgcgagaccggatccgaaaatggttatttgcagttttgcacgatgtatcacgatcgcttcagtaccactgatgtgtcacctcgggttttgtcagatttaggatgcgcttaaaacccactcgtagatctaggatgcccctaaaacccactcgtatatctaggatgcccctaaaacccactcgtagattcacacatgcagtcttggtgttaaatgatttagggtgcagtgtgtagatcagtagatgttcaatccacttgtctactgcaagttgcatgagcaagctctggtcgctcacagcgtgtttggtttgcatcacaaaaccattccatggcgtgtgctgcagtttggtttaagttgcagaatcaatcagtctttcatggagttgttctacgtagagaccccccgttggctattcctaaggaacaaacacattcctccaaaaagttcagaccatgcctcactggtacatgcggttttgga

SEQ ID NO: 33706 - DNA, 326 bp, Zea Mays
catagagagtgttctacccatgtacacggcggaaaccgtgacgtcgagcccacgttcccgttcaatcatgcccgaattggtccaatggctaccatggcaagctttacgggtatacaaagctactaaaacaacactcaaaaagtacatagccatacccgagtggtccggccacggaagggctatctatggcggcgcgaagatccaatttgggggaaaacccgaattgaagtgctacagtggatgattggagacgagagtgggtgctctagcttggtgatgacccgcagtagaccgtgccgtcaatttatagtggggctaagcggtgg

SEQ ID NO: 33707 - DNA, 665 bp, Zea Mays
ccatgcttgattttgtggacttggtaccaacgggcagcattctctttcatgtgtaacgaggcagatacgacccaaatgtcctgtgggattctgtatatactaaagtaagtgagacagtgatcaatccataccaccgggtcacgacccacaaactcgggaaactgcatcttgggaagcgaaggtggtggtgggtcatgccgaagaccagttcttcctcttcttggtcgctgggggcgtcttggggaatttgaaaggtgaagactttctgtcctgggggtaaaagaagcatcttgatggtgcatccgacggtgatggggatgagggtcaccctgtgatccctgatcagagtcaagctgtgctgccagtcgctcgagccgcatctgcgctaccaccttgccggtctcttcaatctgccgagacatcaacgacctctctctggcggcttcttgtgcaactccagcggcgagatcagcttgtgccatgagttgctgctgaactccatccatcgttaacatccgttgttccaaagaatccaacttttgaaaaacccgatcccatcgcgtctcctccctctgcgaatccgacgccatagcgtgaaggatcagctgagtttggagcgagggtttacctggtggagccgtggcggatgatcgagggtggtctcg

SEQ ID NO: 33708 - DNA, 410 bp, Zea Mays
cggttagtccacacgactcaacccaagacgctagtctttagcaaccactcatcacaacctaaacaacaagggaaaatatcaaccttgtgttcgcaatctctcctatgatgagtgcattgtcaacaccaccacataaacacaagaatcggcataaaataaggaaggaaaaagagagcactcacccaaatgacaaacagccaaacaaaggccaagtccaaatcatcaaaagtgagaaaagcatggtccccaaagatatggggaatggctcaacacaaccaagcaaaaaatggctagcccttaggaaaagacagaaatgggatcaacaccactagccgtagattagagccaaatcagagcaaaagatggcaatgacgcaatgatgctaaactaatccctctagaaagaggcaa

SEQ ID NO: 33709 - DNA, 312 bp, Zea Mays
ctcgcacctactgactggtgggccccccgttgcagctgctcattctgctgtgtgtgggtcgtggttcctcctcaccaaccggtgggacccgtgctctagtctccctccctttctgttccgcgcatgcacatgagcatgatgtcgcggccagtggaccccgcgccgaagactcacctcctaccccgtaacaatccccaacgaagcagcggagctctcggcgggtcccctcgatccgaaaccagtgccgaaggtctcgggctacacccgccgccctcgtggctcttactgggagcatataaactagcccctgcg

SEQ ID NO: 33710 - DNA, 449 bp, Zea Mays
gttttctcgcctttcatgacggggtcgcgcctggccgtcgtcttctccatgttcctgcgtggttgacatcgatgcttgcttggcttgcttctcttcccgacctgctgcctcctcttgaagtgctggtttgacattccccctcccttgaggcgctgcttgtccccaagccggcgcgcacgggaaacgctccttcaatgcggttgtgtcctcccaggtggccagagccggatccaggtcggaccaggtgactttcacttgcgccaccgtcagtcctccacgttgaatcatccggcgctgcaggatctgcatgggcacctgcattgaatctgttgtcgattgtagattctggacggccacttgctgacggccgagggcagccttaagctgggacacatggaatagtgggtggatctgggaggatgctggcagctgtaatttgtatgccacgg

SEQ ID NO: 33711 - DNA, 280 bp, Zea Mays
taattataggagaacaactttgcttaagagtgtaagcacagttgttaagaaaatattggagataatcaagtctgaagttaagctgacaggctgttatggtctgaattttcagactgacagtgacattggatcatctttggaaacagtttatgactaatctagcaagattttgcccatggctgctgtaacaaagatgaagatggtataatggacaacaactttgctgcagaactttaagtatgttaccatagagatttgtgagcaaatcgggcctaaatac

SEQ ID NO: 33712 - DNA, 310 bp, Zea Mays
gcaaatgacagtcagcgtatagctaagttgtcagccgaagtcggccgcttgcagtttgagctcctcgaacgagactcggccattgattgggccatctactcgcgctcgatcgcctgacatcgtgaagcaaaagctcgagctcgtgtggatgaactcagcacggcccttgataacctgcacgtatattgtaataccctacatgaggaagtacatgtactatatggtcgactacacccggacgtgcctgccgaccctgttggaatgggagccggacccttggggacaacaggtgaaggacctgatggggaac

SEQ ID NO: 33713 - DNA, 403 bp, Zea Mays
cgggtgctccgaccatcggtatggggcgggaggaccggtggtcgccaccagtatttggcgatcattgagcttttgttgtctcttgttctcctgtgatccatgtccgccgaagatgacgttgacctctctgtcgacacgcgggaaggctccacctcctccctcctcctgttgctaaggttgtcgcggttctcctagtcctccccgcggcggaggaggaggtagaggttggaagggttggccgtgcccgacggagtgcttgaagtctctgtagttccgaagggtgtggcgcatgtccttgtggtacgggcactgagtgtcgaggatgtcgtccaacatgcgtttgcctccacgaggtcctccccgggcgcgagaagcaggtggtccggcggcgtggacttcttcg

SEQ ID NO: 33714 - DNA, 360 bp, Zea Mays
gcaatgcattgaagcacaatacgttcttgaggtacatagccaggttgtctacaaattgtgattagaattaaataggtagaggtagaaaaaatagtgcagttatttctatgagtgagtacatgatttcacacttctacaacaggtgacgattgtgccctctagtagcatgattttatctttttcacagaactatctgtgaatttggaatctggagcatgctcttgcctcaaattttcagtccaaactgcatttacctagaattaatgaccatgctgatctttgctcattgttgttatttatccatcttctgtaggctatatcatctctctatgtgttaaaattttttatttaatatgtcac

SEQ ID NO: 33715 - DNA, 327 bp, Zea Mays
cgaatcagctgagcaaagatgtgacacaaatagtgagcataaggcagttgtcgatgagcatgtagaccatccagtacggtgtcctcgatctcacaaatgagaaaatccacaacatcaaactctgagtgagaaactagggcaccaaggagccaaagctgaatatgagtggaagcctccctgtaacccatccgtggcagaagcgtctgtctcatgagctgatatagaaacctggccgctgtggtgaagtctaccggagaacgtcgcgacccatcagagaagggtggtcggaacaaagccgcgacgtgagatgtaccaggagcaactccg

SEQ ID NO: 33716 - DNA, 482 bp, Zea Mays
accccatgcctggtacagtcggtttgctacttatttgctctcaatgggttttctggaggccaagtcagatacctccctctttatatatcgttgtggtgctgagacaacttatatgctcctttatgttgatgacattgttctactgcttctagttctgagttaatattgtgtaccatctctgctttacaacgggaatttgctatgaaggatccaggtcagcttcatcatttcttggccatcactgttcagaggaactccactggacttctcttgcattaacgtcagtatacataggagatcattagtcgggcgggcttggcaggttgcaaaccctgcaacactccgatcgacacacctgccaagatttctggtacctctggtacaccactcagtaaccctactcgttacagaagtttggctggagcattgcagtacattacattcactcgccctgacatcacatatgcactccagcaagtgtg

SEQ ID NO: 33717 - DNA, 381 bp, Zea Mays
aaactaagaaacttattacagctgttaccttggatccagacagtcataagaattatacattaacttcgggtattctgaggtttaaaggccgtgtgtgggtggggaataacgcattggctcagcaaaacattttacaggcacttcattcaagtgggattggaggtcattctggtattcaaggtacctatcatcgtgtgaagcaactttttgcttggcctgctctaaaaaaatcagtgcaacaatatgtccaatcttgtgagatttgtcagcaagctaaaacagaacatgtgaaatacccgggattattacagccactgcccattcctcaacaagcttgggagatagtgagtttggattttattgaaggcttgccatcctcag

SEQ ID NO: 33718 - DNA, 859 bp, Zea Mays
cgatcctatgggacttcgaacgtctatcaatgacgttctggaaacaaggacgcatggtgtgctggacagggatgggtagctcaaaaccccgctgttgtgtagtttcagagggcaatgaattattggacaacttgctacaatcatacgaagatttgtttgaagaaccttgtggcctaccaccagcttgacgccatgatcaccacatcagactactacccggcatcgcgccaatagctgtggagccataccgctaaccctagctcttaaaggatgagatcgagaagcaatgtgaggacatgctgcagcaaggaattataagggaatgcacatcctcattctcttccccagtacttctagtgaagaaatcagatggaacatgtcgattctgtgtggactaccgggagctcaatgggaagactgtgaaggaccgttaccccataccagtagtggatgagttgctagatgagctccaaggttccagattcttcaccaagatggacctttggagtgggtaccaccaggtgataatgcactccgaagatgttgacaaaacaacattcagaacacaccgaggccactttgagttcctcatcatgccattcagtctcaccaacgccccgtcaacattccagagcttgatgaatgatatcctcaacccattcatatgcaagtttgtgctggtattttttgatgacatcctaatttatagcaagacgtgggcggctcaccttcaacaggtcaaacaagtgttccaaacactaagagcacataagttggcattgaagcactccaagtgttttttggggtcactagtgtgtcatatttgggccatatcatctcggcatctggagtggcaatg

SEQ ID NO: 33719 - DNA, 340 bp, Zea Mays
cacgctttagagggcaggaggtctgaactggctgcatccaagaatcagccaccacatctaagaaatcagcaatctttagtccagaaactttcaaagtgaaatctgcgctttcccttaaaatcttctttgagactgagagttaaagggcagagatctgaaagcctcgtggcactgctgcggagaatacagtccgggtagagttgttcccagcaagctgtgcaaaacaagtgatcaagcttaacaagagttggggatgacctttcgttggaccaagtgtactttctacccatgagaggtatatctttcagccccatatcatttataaatctcctgaacctgc

SEQ ID NO: 33720 - DNA, 392 bp, Zea Mays
gaccggtgctcgttgtcgaccttgatcggaaacagatggatggcagtagctgtacagggaagcgggtaggtgaggggaatctaagtggttgggtcgtagggcagttgtctatcagactgatagtagatgattaatttgcttgcgttggcaaacaaactgcatttgtgtacattatgggttgtgcactggtgatactgtttacgtgtgtgaagagcacctgacgttagacggggactgtatggtgcggtactccgtactctacctatgctgggggagtgaacagtgtatgctgggtgagcgaacagtgtatgctgactagatgccaggtaccaggtggtggatgcttcgtacctgaaaaaaagttaaccaactttgaaataactgaactggca

SEQ ID NO: 33721 - DNA, 305 bp, Zea Mays
ttgcaggctttgcattctttgttgttgtaagctttgttggcgacacatccaaatctttgttgctgccaaggttgaagtcagcctgctcacttgtgctctccccaagcaacatagcaagccccctgcaaaaatgattgaattagaatgcagttaccattagctgcaacactagaatgcagttcacaaatagtgcagaccttctagtcaatctaataggctatcttgtaatattgtttctctatttggtctgataggacttgatatgatagcatttgcctcttgcacattttggtctgcattagctg

SEQ ID NO: 33722 - DNA, 382 bp, Zea Mays
cccgaggccctcgccgccgagcttgtcgccgcagccgagaagcgcaacccccaaactcctcaagggggatcgggagtcctcgacaaaatgttgaaggaatcattcccttaccactagggctcggacaagcattccctcgacaagtgtgacatgctacggtgcttatacaacaaacccgaccccttggcagaaggaagcaacaagaaggctcccgacaatgcagacggcgataagggcgacggctcccccgacgtgcacatttgctacatgatctttgggggtgataccatcaaactttcttcgacaaggcgtaagcaagagcgtcgggaagttttctcagtcaaggtggagaccccaatctacctagattggtctggacgcg

SEQ ID NO: 33723 - DNA, 363 bp, Zea Mays
cgacttatgaatgctatttgcttccaataattgtttgggctgcgacaacgctaatacaagatttgtaatcgatcaacaagacatttatttatccaatgggcatggaaggtaatgattgataaagcgaagcatcacattgccatacaacaaaaatcatgaccgtcgtgagcatccttcactcgattatacaacagagacctaagcgtcgtgttaccaaatgcatacatttttcctcgtcacgagtataaccatattatggcatatacccgcacacctcaaacaaacatcttacgccaccactaccataatacaccacggcacacacacatacgtgcactaattcaatcctcacatcaattgtat

SEQ ID NO: 33724 - DNA, 286 bp, Zea Mays
gggaaattggcatggcgttaactagtgaaaatttgtagacacgtttgtggcttaagatggcttacactcaaagggctcgagcttatgttggttcagacaacgcgtgccctctctacgtccacttcgtgatgtcttctcgtgctcgggcctccctcttgaggggcttggttaaagtgagatgtttgtgagagggagtggatgtaggagaaaggaaaaagtctttggcccatcaagctttgcccttcgtccaaatcctgtccaggatgaagcaggactgtcatcgtag

SEQ ID NO: 33725 - DNA, 348 bp, Zea Mays
caacaggcaacacaaatttattatctctcatatgcatgccaaaccaaagagcatcttaaggattggtatgttgtgcacaaggtattgccgcacggtaaactacctgtcccaaatgatgaagattataacttagacccaaacacatatgacggagagttctttcaagaagaggggctagaagggaggtttgagatagacttaactggagagatcgaaattgaagtagacattgaaatggctgtggatgaggagggagatgaggtgcaaaatgtgaaggacttacaaattcttgagcaattacatttagacaatgacaatgacaacattgattcttcagatagtgttgat

SEQ ID NO: 33726 - DNA, 326 bp, Zea Mays
aattcgggtagggtcgttgaccccggtgtacagataagctgggtaaactctatccttcaggggctggatgttcttgaaaacaaagtcagcgaccacagcttcaacagtcagacctttgtctttcagcgagcatatctcagcaagcagcaccttggactcggttagctctgaaccggtgggggactctgtctagctgggcttgcgaacgtcgggccacctccccgaccgaggggggagagacttgttgtggtcctccatggtaaaccacttaaggcgccatcctttaatgctgtccttcagggggatgtcaaggtactctattttcc

SEQ ID NO: 33727 - DNA, 599 bp, Zea Mays
agtctgatgattctgggagttcgattgtgtggacggaggagtcttcagacgaggaattggattattttgcgtcgttggacgtggctgcggcggagacttcgccacgtgtggtgggtgttgaggatccttcaggtgcgagtactgggtgtaggcggcgaagggcggtggcgaaacggagagtgagtgaattgtcgcgaagtaataggcatcattgtggtgagatggagagtggtcgtcttcgtgtggacgggactggtaagtgggaattgttgtcctcgccggctggggctagtgtgggtgaaggggagctgcgaaatctttttgagggtgaggaattgaggataatgctgttcaactatagggagatgggtatcatcccgaaggttgagccaatgtaatatgtgatgccctcgctgtgtgtatgtaaccataatttgtatgataaggctgcgcgccttcgttgatatagccgcgtccataggccactgctgcgcggagtcttttgggagcgacttcgattgtgcgcacctattattccggctgcacccttaggcgactttggcacggagagtccgactgcacccttaggcgacttttgc

SEQ ID NO: 33728 - DNA, 419 bp, Zea Mays
cagtgctcgtggatggtagcggcgctggttgcgaggggagagtgctcgggtggctaggggttcgaattggggtgagtatagggtatagggggtctccactaatactcgtgcgctattgattcgagggcggtggctccagtgtgagcaacgaggtcgtgctccagttgaatgcctgtgagcccacaccattaaattgcatggtgtcgggggaggaagagggggagaaacatctgccttgaatgctcatcacgaccactatcgagtgatggggaatatcggtgctcatgcgagggatgactcgatcgacgatggcgtgcccaagtccgggagcagagagatgtgatagattagggatggcttgttgggcattcgtggcagcgacttgggtcagggagcgtggagtgaggttgacatgtggg

SEQ ID NO: 33729 - DNA, 351 bp, Zea Mays
ttggaggcaagcgtgggtgcgttggcttcgtggtaacttggcgcaacagccccggccatcaatttataggagggtaaagcggtggccagtgaatttggggaggacgcgcggcggccggaaatgaagaagaaggcgggtgcggtgaattcgtgtccagtggcgtggcagttgttccggcgatcaacggggagtgggggtaagtcgcggcgatgcggtggaaaggggtaaacacgcggcacaaggccggaaggcggcggtcaccggcgggcttatctgctcaaccgtagggtagaggggaaaagcacgggggtcgccggaatggagcccagctcatcggcggtgaagattctc

SEQ ID NO: 33730 - DNA, 366 bp, Zea Mays
ccctcactatcccctccttgtaacagatggatagtgcggtcctcttctagatcctctagacgatcaccattgagatgcatggcattgtttatgagtgtggtggaaatgccagtcaagtctagatttccaataaggagtagatccttggcaacagtgaggctcatactctccatctttatgcaaccattcgaactgttgtctagggtagctctccatcattgagtactttcgccagatgaaaggcatggcaacctccctctgtgagcttaagcgacctatcttcgatcaaacgctcatcctcaaccttctctaaggcctcaacgagttctatgatcacctccaaacttggatcactcactcggtccc

SEQ ID NO: 33731 - DNA, 359 bp, Zea Mays
ccatacaggaagagggatgtttgtttcagcttaaaatcggattttggccgtcagaatcgacttctatcagccaaacgttttgcttctcagcccacttctatgagaatcgctttggtgaaaattatccaaatcaacatgaacatagaatccgtcgagctgtcgcgatgggaggaatccgtcacttagatcctaaaccctatggacgccttcatctttctcttcacgtaagccccacgatattaagatatttcccacaaccagattctccaggaatccagattcagaaaaaagctgaaccaaacaggcccaaggtatcgagaccggaacgatggtatatgtgataggctaggggtagcact

SEQ ID NO: 33732 - DNA, 437 bp, Zea Mays
cgcacgcaagggtagtctgcgctgcctctcgcggtgacttcggagtggtcgaatgccgaagaccgtcgatgcggtctttttcgacatgttgcgtcggagtttttgcgggggatttttgcaggtatattacatggctccgccttattaaaaacctcaccccccgggaggaaaagagtgcgggccgaaatagtattgtttggtggattacaagggcgcgtgggccctgagggtttaaacaaaaaatttacggagattgtcaatattccaggaatgctctaggtctttgccggatggcgttgtcagcctatacgcgctgggggacgccttcgatttgacgatgaatggaccctcccacttcggctccagtttgccccgtgactctgtccgggtggtccggacgagtacgaggtctccttcgttgaactctcttgggacga

SEQ ID NO: 33733 - DNA, 437 bp, Zea Mays
ccggtcgccagagcccggagggagagcgctgagaagcagcggtagctggggaccgggggctcagcttcatcatttcccaaagcccccgagctagcagagggagtggtgcgaggtacatcgaatgggggggaattaggtcatggatgcgaggtacattatgctcccagattccctccgtcttcttcggcaacttgttcttttttgtttgtttcccccagtataatataaggcatgaaaccatctcctatcgacaacatgtgtatgattgacgcatcatgccatggcgatacctgctattattattatgacagactagagtagtactaacttactcatgtcatgccgttgcagggtctcattggacgatttggttcttcaaacaagaagaacatcaccatacttaagaatgtcaatggtatcctcaagccatccaggta

SEQ ID NO: 33734 - DNA, 303 bp, Zea Mays
tggtggtacggtctaaagagggatgttgcttcacatgtagcattgtgtgatgtttgccagagggtgaaagttgaacatcagaaacctaccggtttgctacatccgcttaagatatctgaatggaagtgggaagaaattggtattgacttcatcgttggtctacctcgcacatctactgggtatgactatatttgggtaattatagatagactcactaaggtgggccactttatcccagtgaagaccacatattcaggtgccagactagcagagttgtacatggcacggatagtttgtctacac

SEQ ID NO: 33735 - DNA, 640 bp, Zea Mays
aaccttcttacacaatagaaaacataaagcactgatcagcatgttcagtgatgtgtcatatgaggtttggtaatttaacccaacaacagacttggatgtgtatacaatacacatgaataacatgtcatcatcgtgggatgactgatgagcctttgcctttctatctacactaatgccgatgacatgttaccttttagcagccttgcatctcatccatgaataaatgctagaaagttttcgtgttgcttgtctccgttctcttctttattgattgatgtttcttgcgccccctggccctttgtcaatgtctcgaagtttttttattgattgattttattctttgggggattgttaattttcttcattcgtttttgcattggtatacaattatacattaatcagaacttactccatgacacaatggttaaattgttcaccaattagttttgtattcttttcctaatatgtgttccaaacctttcaggtggcaggaatcattgtttcgatttaaacatatattcggcctgaatgatcaaagaacaaagcaacagatccctatctactaccttccaggaaatcatgatattggttactcagcatttcattcagtccatcctgaggtgattaaccacagttgctt

SEQ ID NO: 33736 - DNA, 708 bp, Zea Mays
tgcataaggtgaagtctcttaactgaataaaatgttgtatgtagaaatctgcttaaactgaatatagtgaggtctgtaaactgaataaattttacaaactaaaaaaatgtcaagtatgcaatctgaataaaatacacaaaatgaaaactggttaaaggttactgaaactgacaatgtacaggttgcatagactgaataaaggtttgtttggaactgtagcaatgcaatctataaactgtagacgctgataaacattatggaccacaatctataccattttcatgaatgtggagtgccatctctaaaaagagaatagtataaaaattatggaccacaacctggatggggtatatctgatgacacacttcatgcattaactatatatgtgcaaatttgcagagcaaacatagaacaatagtcaaaacacctgaattggtaattcatgaaaaaatttgagacttgccaagcaatagaaatctcacgtagccaggtagtatcaatcagtgcgcgaagggtctattcagattgacataatgtaatcaatagtaagacaagataatgaaggggaaaatcattatagagtgtccggtagcagtaaattccaacagtgaagtaaaaagtttaatatagaactaaaagatctcctagattcacattactgcactgtttcaatggatatgtgcgaagtcggccgctcttatactaaac

SEQ ID NO: 33737 - DNA, 393 bp, Zea Mays
cgcaaatgaggagaaggggaagggaagggatgagggatgattcaaataaagtagtttatggggaagggagatgagttatccaactatctggaccgttgattttgatagtgtgttaagtttgagtacaatatgtttggtgaatttagtgggataatgagtatggggtgacttggttgtgtgacttttgcaaagtttaaactgatggattatatagtggtaagagcataactcttttcgattatataaatatatgtaactttctatcttcaacatatacaactttatatctaactttctatctttaacgtacataccattctattattaacgcaagttttttattattattattttcccggccggtcccccctcccctcatcacctgtgcttccg

SEQ ID NO: 33738 - DNA, 394 bp, Zea Mays
ttccacataatatatcccttaataatgtcgttgtctcaccatccctcattaaggatttgatttttgtttgtcaattcaccatcgataacaattgttctgttgaatttgactcgcttggttgctctgtgaaggatcttcctactcggcgcgagatcctcagatgtgatagctctaggcccctatacccccttcggctaccggctaccacccttcatgcatcaacatctactacgtccctgtggcaccggcgtcttggggaccctggtcacgttgtcttatcacatctagcccagtcatccgtcatttcttgtaataagagtgccactgctcctttatgtcatgcttgtcaattaggacatcatgttcgtcttccttttcatacatccacctccag

SEQ ID NO: 33739 - DNA, 462 bp, Zea Mays
ccgtggggtggggtcgtggggagctcgacgccgcctttgctggccgccatggaggtagccgcggtgagaaggataaaggagaggcagtcctggctatcgatatgaaaatagatggtctcgattacatcgggcaagtaccggttgagatttttgatccaggccgtcgttccaggatcgaagcgttgtgagtcgattgatgcgtgggtggtgtacggaccatggatcgcggatccgttggacagaatggcttaccgtttcgtttacaagatcagacggatatgcgccgtgggcttctgatccaatggccggtgatcactcataccccttcgccgtgtcctttttgctaaagagcccctgtcctttctccatataaacccgccatccacgcatatgtaaagaccattgcatcctgaccctgatttttgcaagttagaccctgaggaatttataaatagtggtcgc

SEQ ID NO: 33740 - DNA, 337 bp, Zea Mays
ttgacaccggccgtgtgtatatttcccgcgatgtcatctttgatgaagccatctttccctttgctcaactttcatccaacgttgcacattcatccacgggcgacttcagttttaatttgaacactaaccttttgcttgatttgcttcctactcgttctgttgatgcatcacatcatggcgtagaaaatcctaccggtacaacgacggagtacgcgccgcatctgtcatcactggctaatgatccggtgcccacggaaactattgcgctgcctgatccggtgccacctggagctgttaatgtctcggtacctcacgcggctgtacctgaaggcgacgc

SEQ ID NO: 33741 - DNA, 1098 bp, Zea Mays
gtcggtggtcggagagatggggcaacaacgcacgttggtgtatagcttcgtggcgcgaggcaccatcgtcctagcggaccatgctgaggtctccggcaactttgcctccgttgctgcacaatgcctacagaaactccccgccaacaacaatcgcttcaactacaattgtgatgggcacacattcaactaccacatttatgatggattcagtaatgcaccttgttcttgcttcgctctctctctcccacacgcttataagtcaacaaatgtgatcctattgcctatgcaagttttacttgatgacacaagtaattaaaacctggcatcttacaatcttttacttgataatgataatgaagaaagcaagtccaaagttgcattgtagccccgcagggggttgtttttaattatatcaacaagcgtggctttaattgtagtgtcaaactttgcccaaggtgtttgaattgatcaatgtcgttagcatgataatatcctattatttttctacgaacgaggttaaatgtcatggtatggttgacatgtgtaggtcgtgaggcaagttttagatattttttttaaaaaaatgatgaagaagcttacggttttcataacaataatgttcaggttcctttggcggtcttttgtaatagattcaaacgtttacagtattgtgggtaaagataactctgacacaagtagttaacattgttttttttacaatattcttttatgtcaagttttgtagaacatacgaggaatgtcacaaagttcatatctcataccgatctagaatgtagtcatgcacgcaaaaaattatatttgagtttggatcataagtttatccttttatatgggcacaagctgtgcatgtcttacgatgagtgttcctggccagcagcttgatcgttggattaagaaggaacactcacgatttaaagtgctcacatgagcacggacgtcgcgtgagcacgagatacgttcccttcagtagtaacaagatatagcagcatcactctaccgaataacaaattgtagaagcgttgtgcatgtttttcatgtgacgatgcctttgatctgcagcgtactgcgttgttgcta

SEQ ID NO: 33742 - DNA, 346 bp, Zea Mays
cgcatgtggtcgaacgagaggttagagatttgggatggctcaaggagtctgggactgttgggtgtcaaatagttatttggctcctcttgtattttaacccatcagcgttcttctcctcatgtctctaacttggttcatttttgttgagtttgtgtctgtccatggcagatgctttgatcctcaagcacctccccatgcccatgtgtttaacagagagggagatccttggttgggtttccccaccactctcaggttgtgttcggcctatggttcacctagcacaactcccacaagatgatgacatcatatgatttatatgcccaccatgttgtagggtccacttccc

SEQ ID NO: 33743 - DNA, 1296 bp, Zea Mays
ccggagtggcgagccgagcgcctccggcagatgcatggggaggtgaggacacactcccgtgcctcggcgtggtgatgaggattggttttttcgttgttaggccatagggcatgtacccgtaccctagaacggttttctaaatacaaaagacaagtacaatcctatttaatatgtagtctcctgtgggttttctagtaggctaattgaagaaaaatacaagatacgagttcttgttaagagaccgtctttacatggctcttcatacacattgtctcttaactgcatttatagtatagaggctcagagttttatcatgcgatcttttaaatgtctcttgtacttagaaaaccaaaccaccatcctagttctgtacatgcctgagattgtatggtacaactctgagcctctataaatacagaaaattgtgaagagacgcctcttcgtgaagagcccgtcttttgatatttttcacccctagagatttcttaagagatatatcaattaatggggttgtacatgcccttatgttgcccccttgctgatggaattcatgggtcgcgatgccacgatatgcttttatattaaatttataatatgctttgaactctgcatttcagattttaccagcagcttgattaatatcgatcaagattcctagatagtattacctcaatggtcgatttggctttggtttttctagatgagctttttaccccgatttctgtgcctccttaatattttttgatgttttaatggccaagttaatgtctacagtcctgtagttttcccatgctttattgtcctatttccacagttccaaactctgattgctgcttgcttttgctgcactggtggaactgctagttggatccattatgaaacacaatttggtttcatctcttctcatacaatctatatagcttagtttgatgtcaaggatatcagttgtcgtactgtttttctctctgctcacattgataaactttgtctgttgtgctgtgcggttagcttgagattcatggtgtcagtaaatttgctccacttgttgtacacatcaaataagctcttgctcgctttgtagtagttacttacaatgttttgcatgctcacaatcttcaggtggaaaaggtcgatgagaatgaatggtggaacaagattgggcaattaagagaagggtcccagcaggagctagtagtcaagcggaattttggacgggatggacaaaatatacttgcaaacatggctcagagacaaggaatttacttgtatggatcaatcatgactgttcttcacttc

SEQ ID NO: 33744 - DNA, 534 bp, Zea Mays
ttgttttggccgagtatttgccatctctagctaaactgaatatatgattatcctctacttcaggttgtaacaccacttctgatagcaaatcccacaactgcaagtagtccactatggctccaactgaaagagcccctctgatgtcagagatccattttctgttggttaaagcctctgaaacagttatattatttgcaattcttttggtataattgcaaacaacctaggagccagatcacttactctttgacccaagatccacttgtctgtctagaacagatcaacagagtgtgggctccattctccacttctgaaatcaaaacagtggaaagaaagcctttgccttttttggaacttggataggaagatttgcccaagtacgtcctggatcagatttatgcaagcaaagtcatctcatgcgaagggctcaatacaattcctttaagctagatattccaagacctcctaattgtagaggccgacacactcttccccaggctatcaaacaatgttctcccttggcatctttgcgac

SEQ ID NO: 33745 - DNA, 341 bp, Zea Mays
gatgttctacccggtcaccttcctggagaaaatgaagattgatttgcagtcctacaagcaagagaagaagtcggtcacagagtatgaagtgggcttataatgagatggagaaggcgagccagttccgtcaaggtctgaaaccttctatcaggcatgccctgggagcctttccgttggtggacttccgtactacagtggagcaggcactaggtgtgaagatgcaacaccagtataccatggaatcgtagaagtcttcgggtgctgatcagcctcgtggccaggatgcgaggaggggtaacactggaggtccagcccacaagaggggcaagtctcagcatcag

SEQ ID NO: 33746 - DNA, 382 bp, Zea Mays
cggcaggtccactttgaggtgcccctagatcctagtgacgcagaaataagtgctatgcttgatttgctggctgaggactcttctgatgctgctcctgctgggacgttggtggtggcacctccccagaaactgatataaccttggatattcagaagcctgtcagtactcgcccaagacgcccttctcgggccaatcaacttgatcctcctgctgacgagcagaaaaagaaaaagagacgtctccggcgggtatctagtttggatcgggatgctggtccttcggctcctgctgctgaggaagttcccgtgcctgagcttactgacgctaaccttaatgagggtgctccacccgctgctgaccccaatgggggtgctccacctgc

SEQ ID NO: 33747 - DNA, 325 bp, Zea Mays
gaacatcaagcaaggatgcttgaactaacctgtaggcgtctggccacgacaaggtgttcacaggtgcggaaaactgatttgggggaagaaagaaattggagctctctggtggctaatcggaggcagtaacggatgctttggcttcgtgatgacttaacggagctaggggtgtgctcaatttatagtatcccagagcggtggctcccaatttggtcatggcgtgctggcggccggagagagggaagagcactggcgcaatagctgcgtgtctttcaccgtggcaggcttaccggcgacgagctagcaatataaagcggcttactgc

SEQ ID NO: 33748 - DNA, 329 bp, Zea Mays
ctggtagaaaaagaaaaagagaaagaatgaatagtaacgggctgaaacccacccgatacggcccatgtccaggcgaaagcgcgcccatgcgcgcccacgaggttagctttacacagaggaccccggcctttcaaacaactaataaagaatcctgcgcactattcacatgtgtctctgacatttgcaccaaggcccctccctttctatttcttcacaaggtcaggtccccgaccacggatggtggagcagcggctccagcgagcttataccggccggaaaacgcaacgactaggcccttccattgcttaacatctaattccaccctcggc

SEQ ID NO: 33749 - DNA, 316 bp, Zea Mays
cgtgccctcgcatcatccctagcagtcgcgtcacgccgttgaccttgagccaccccattccagagccttccgtccgccaactccgttcccgtccgcggccacttccagagccttccgtgccgcctcgggctacttcgcagcgctgctggggagcgctcgtgaccggctgggggtgtttcgacctcggcagcgaccggaatttctcatcggaagcgtcgctccgccgcgtaaccactcgcgccgtggacagcttcactccaccgcccaaccctcggtaagtctcaatttcctgtttctccatgcacctaggtccgcg

SEQ ID NO: 33750 - DNA, 325 bp, Zea Mays
gggagccgtcgcagatgcctgggatccccagggaggtgatcgagcaccatatgaagatcaaccctgacgccaagccggtgagtcacaagcctcgcagacagtctatcgagcggcaggacttcatctgaaaggaggtctggaagctgctagacgccagcttcatcgaagaggttcatcacccagtgtggctggccaacccagtcatcatccctaaggcgaatgggaagcttcagatgtgcatcgattacaccagccttaataaggcttgtcccaaggacccgtatccacttccgcgaatagatcaaatcgtggattctacctccgg

SEQ ID NO: 33751 - DNA, 297 bp, Zea Mays
gccagggttctgcttgccgaaattggtttgttgaaggagagaggtctgactgctgaagctgtagttgcagactttgtttttaagaacattcagtcactgaaggacagagcgtacccggcttatttgtatagtggtgtcactgactcaacccgagttaccaacaagaggattcctgttgtggatttggtaagccggctggagatgatcctcagaggcaaagtgtcgaatattggtgctcctgttgcatattctgcctggaatctgccaccttccaagacttttttcaattttgtgtcc

SEQ ID NO: 33752 - DNA, 439 bp, Zea Mays
tgctcccaccgctcggagcgttgaggaatcgactatagtgctgaaggtgcctatatttgagccagtcaaagccgaagatagggcggccaaaaagccagagtttgaaaaaacaatagtgctgccagaaattctgagcccaccagtacaagcagaattaccgaaggttgcaaaagctcctgccacaactcccaagaggagaagaatggctagcatactagacgctgtcatggagacaacaagagcattaactcctgctcctgtaaaaaaggttgctgaagctgctacgactcatattgaaaccgaagttgggccttcaatgcctgctgagacaaagcctaccgtaactgaggaaagagctaagcaaaaatctccagatattggcatagctatggagaatgaagtggccaaagaagctaaatctcctgctcccaaagcaccg

SEQ ID NO: 33753 - DNA, 806 bp, Zea Mays
cctccaagcatttaagagttatgtcatggttttgaaatcccaggattatagattagtgttcgctgtggatgcaagcgcagactcattccgaatggttaatcacgtagaatcgagcagggaaccggacactaggtttatactggttcaagttttcgccctagtccaatgtagtgctcactgtagtattactttgaggcgtgtgttacaactggtgtgcttgtgtgcgtacgaggagagagggattctcttttatacttcaagggacggtccttacaagtgtgtgtgagagagagttcttcagctacaatgcgcagtggacccctctagggtcaatcttgggtcatgcctgcgcacggtatggctccttctaacaggtcgtgtgcttccgtattcctcgcatccatctgtcgtgcaagaccctgtaccttgctctatgcccatgccgcaataccagatgggtcccacagaacgtgctctcggtaaggttgaggttcgtgttcagtacggcttcatcttccttgaactcccttgcgtcagcatgtgcgagcatgcactatgtgtgtcgtcatgtcctttctggtatgtgggtggaggcttcgatgccgtgacccccttggtgcagtacacacgacgtggacatggtttggtggtggtgtgtcctgttacggtcgtcgtggacccataacgttgatccaagttccctccttaccaatctgtttggttgtttgcccttcctcgcagacttgcttggcgggagcttggtcgtttgtcccgcctcgcagacttgttcaacaacgacatggtcg

SEQ ID NO: 33754 - DNA, 277 bp, Zea Mays
ggtcaggacccgggggagcgacggccgggcttgggcgtgctttaccgctcccgcgccccgtgtacaaatcggcgccggtttcaagcgggagctcgtcggattcagacgaggtggtggacaacacaaatttcaggtacaaaatgctgcatttaagcgggatacgtgctggatcgcagcttccttcattgccgtaatctgtacgtcggtgtgagtacaacgaaaacgatgcgattagtctatgtcaaagactcaaatgtcgatgcatgattacatagat

SEQ ID NO: 33755 - DNA, 346 bp, Zea Mays
tcgctttgatgaaccaacatcgtcggcaccaaagtacctaataccaagatggaagccatgttcaccgtaaggaaacaacagcgggtattgcaaaggcatgtatgctggatgcaagcatgaaacacatttgaggccacactctctatcatgcacaagaacatcgtatgtgtattccccagccgtgtagtcaccaactataatggcagcgatctcgccatttgagggaaggttgtattgtacatcatggcgtgtgttgcagcctagcaatctgagtgttatcttttgatcaccctcacgctcaaggcgctctctcgcgtatcggaacgctttgacaagcgagttgttt

SEQ ID NO: 33756 - DNA, 1111 bp, Zea Mays
gtcagggttccatttccaggtaatggagtccaacacctgtggttgaaggtggaaatcatggagtctaatctagagggagacgaattcctcgatctgaaccatggaggtaatcttgcttctcaacgacctgatccaattcccgtcattgatttcattagcaaccgacttgttctttcttgagactagctcgaagaggtgtggtgctaggtttcttggcaccatgtcatcaagccaactgtcatgccagaatttggctgtcttgccatctccaacggtgacgatggtggaggcgctaaagaggagccttccgtaaggttacaaggcacatcaaaccctttccaagggtgatcctctcctgtccagctcttccaaagccatcttagccggagggcgcagctgaatttgtcgaggttgaggatgcccagaccgccaagggctttgggcttgctgactagcggccaagccatatgacaatgaccttcatttgattcaacctttcctttccaaaggaaggagcggcggatcctgtcgatgcgtttacgggcccatgtcgcgaggggaaagaccgacaagtggtatgtgggcatagtggacatgacggaagacataagcgtgagacggccagcccgatttagcatgcttcctttccatccggccaagcggttcccgattttctcgatcagaggttggacatgaattctctagagcgcccgggtgtgaagttggaggctaaggtaacggcacgggaaggtcccccgggtcccttggaacggctggagcatgtggtctaggtcagtgttttcacatcttagcgggtggatagagctcttctcaaggttagtgaccaagcccgaggcacatccaaaagcgtgttggatgtctttgaccgccaggaggtcttctctagaggggttgataaagatagcagcgtcatcatcatagagagaagtccttagttttgctgtagttagcgaaacgggggaaaggatcccatttctggctgcaaggtccaggatacgctgcagcggatcaatggcgaggatgaacaacataggggaaagggggtctcgctgcctaacacctctcctgtgctggatggttgctctttatc

SEQ ID NO: 33757 - DNA, 272 bp, Zea Mays
acaagttacagttacatacacacggcgagggcaccatatactacatcggctcaaccttcgggatgatacccatctccctataattgaatagcattatcctcaactcctcacactcaaaaagatttcgcagatccccctcacctatgctcgccccagtcgacgaggataacaattctcgtttaccaatccggtctactcgaagacggccatgctccatccccatacgacggcgcctaccacttcgcgaaaactcacccacactgtgtttcgac

SEQ ID NO: 33758 - DNA, 418 bp, Zea Mays
caggagttcttcttgctcccctgctgctgctgaccgcgtggtctgttcttccgcggccttgttgcttggagaggcagcagtgacgaggattgggagagggagttggagttggaattggaactggatggtggtgccaggggatgatctctgtcgacccaagtgagggcatcgcatcgcacaaaagtctttgtcttgctttatttattaatcatcaatccaggatcgtgtggtgtggacgcatgtgtactgtttgtctggactctggacgcttgtttgcttcttggtgtgcgcagaaaagtttacattttccatttaactactagcggttgacgacggccacaagtcagaaaagaagaagaatgatgaaaagaccgcatgtcggcgaggaggaggaaggcgcaaagccgaagcaaagcaa

SEQ ID NO: 33759 - DNA, 290 bp, Zea Mays
gaaaaatttaacccctcagagttgcttctatggactgaacttactgagataggaaggggtacttcttcagctatagcaaagttggcatccctcgggttggcatatttccatcgccttgaggggttcctccctgctgggggagaggttgcggatcccctcttggttcagtactttgccacaattttaggtcccgaccctgggttccctactatgtacgaactgtcggccatagttcttgggcgcctggttacgatgtgcatttcgggttgcaacttgacacctgagtccgc

SEQ ID NO: 33760 - DNA, 462 bp, Zea Mays
caactagctagctgaactagagggggaaaaatgccatctgttttccagagaagacggcaataactttgtgtctttgtctgctggacaacagtcgaaccagtttgtcgggagggagagtctctggtcagctagacagacgtaggagtaaatagtacgtaaacatcaagaggaagaatagtagtaaaatataggcatggacaaggacaaacgtgtacgccagcaggcacgcatacgcatccatgttcgaccgaccttcacgcgaggcaacggtgtaaaaatcatgcatggtgctctcgtcgtgccgaacttgatcgtcgtcgtgttcgtgtagcggaggctctagagggagctgaacagggcgagcagcaatagctgaacaagcgcgaacttgaaaatgactccaaacatccccacgcgttccagccaactccaaaacgtcccatccaagttctacaaaaaaat

SEQ ID NO: 33761 - DNA, 499 bp, Zea Mays
gaagcatcacaagcacacagggatgctaaaacaagagcgaggagggcatgatcggacctgtggagagctggccacggcgagctcacacacggcggagttttgactaatttggtggaaatcccaaattagagctctctggtggacaatccgaaacacgggtgggtgcgctggatgcttgactacctagtggagctgatggcatgctcaatttatagggcccgagggcggtggctcatgaatttggaatcgctcggtagcgaccggagagaggggagagcactagtggcttaatcgtggcattcaccagtgcaacggctcaaagattgtaatcctcattgtgccacggttactaccgcgcagtaacgagccacgacatggcataactgagatcaccggagtttccacggcaacaccggcggtccggccacgtcgcactgctacaggcgcggtgataagcttcctccgcgaccaaatccgctcccccgcgagatctttttac

SEQ ID NO: 33762 - DNA, 542 bp, Zea Mays
cttgaattactctaacgctttactatttattcaagttaagacaatcaaattagaaccaacaagtcgacttgcaaattttattcaagtcatttagtgcactaaaattactacaaccaattaacaacacattctccacgataatcacccaacaatttacattttaaattagtcattacatgagcactactactttttacccgcgaccgtaaccatacacatttagaccacaacaagcaattcaccgtgattacgagcttaaccaagtcatctaacaattcggctaactagagcaacaatataggccgctatacatcacacacgtcggctagtctattattatcgaaatccgagacacaacattgtatataacaatcacttaacgcaatcgactcctgcttaacacgagttggctaatgacgtgactatttcccaattaccaacatacaccacctttcgccatttttggataacctgcgcgacacacagctattgtaatacatctcaacttcattcaaccccatcagtagagcactagcacattt

SEQ ID NO: 33763 - DNA, 354 bp, Zea Mays
ccattcatgccaatcagattcgtcaggtgtttggattcaacgagtcatcaactcgtcttcacagcatgtgctatggcacctctgaccctcctcgtcgccctcacagcggagttgctcctggtacagctcatgtcgcggctttgttccgaccgcccttctcagatgtgtcgcgatgatctccggtagacttcaccacagcggccagatttctatatcagctcatgagacggacgcttctgccacggatgggttacagggaggctgccactcatattcaactttggctccttggtgccctagtttctcactcagagtttgatgttgtggattttctcatttgtgagatcgaggaca

SEQ ID NO: 33764 - DNA, 369 bp, Zea Mays
acttgcaaattttattcaagtcattagtgcactaaaattactacaaccaattaacaacgcattctccacgataatcacccaacaatttgcgttttaaattagacatcacatgagcactactactttttacccgcgaccgtaaccatacacatttagaccacaacaaacaattcaccgtgattacgagcttaaccaagtcatctaacaattcggctaactagagcaacaatataggccgctatacatcacacacgtcggctagtctattattatcgaaatccgagacacaacatgtatataacaatcacttaacgcaatcgactcctgcttaacacgagttggctaatgacgtgactatttcccaattac

SEQ ID NO: 33765 - DNA, 353 bp, Zea Mays
gaaatataccttcatcaattgacacctaacgcaattgttaggcttagtgtctacatctgggccctccgaagccaggggatgggtcctaatgctgaagctttctaccaggtgcacaagctgcattaccagacgaaggccagggcagatggccttcatgaaaattttggctgctacaattttgcgtatcatagggatacaaaggcaccagttcttagctaccgcaccaagtggccaattggttggaagagtgaatggttttacatgaaagcagacgagaaaaagagggagaagctaatgagtatggttatgagtccactgactttaaacttcggaatgacgaggcccttgtgcca

SEQ ID NO: 33766 - DNA, 667 bp, Zea Mays
tatctgctccaaacggtttgggtagtgctactcatgcccgcgacggagtagtcgtcgtaggcgaggcaacttcgggttctagggggtccggggtcgtttgggtaggccataggcatcgggggtgacccaagggaccttatggtggcgctccgatcatgagagagagaccgaaggtgggggagcggtggtgaggtgatttgggtgggacgggaggtgctccgtcaagaaatcccgaccgcggtgagggccgatcctgtgaactaaggcctacatgagcttcaatgtggggtcaggtgcgccggtggctaagaaatggacaaggagcagggctgcattggctgggcgacgtggaggtgcgatggtccagcgtgcaacgacttcgatgagcccgaattcactacagtgacgcacaattaagaaaaaggggctgggtagagttccttacccagggtggtgctcaaggagacctagcgcgatgctggggggctctattagtcagctggacgatgaggaggcgcggttgcactgctggtgctctgggtggggaaaatggccagcatgaattaaaatggggaggggggctggaggtacagggtcttcacttgaagcttgggcggtggttatccatgcagaacgcgggaagtgggcgcggccacggcagagtggg

SEQ ID NO: 33767 - DNA, 341 bp, Zea Mays
agcggttggattggatgctggattacctaacgaagccgagggtgtgctcaatttatagtgtgtttgagcggtggatagtgaattttatggggacgcgcgacggccggagaggaggaggtgcactagcgcacacgattggtggccataaccgtggcaacctcaccggcgatcacaggataggttaatatgagtcacgacagtgtggttaaagtgccgaggcacgtggcacaagaccgcgaggtgtctaactccggcgagggtagattcgaacgaccggggctaagcggacacggcggccggatggaacagtgcccatggctcaatagcggtgaagatctttc

SEQ ID NO: 33768 - DNA, 598 bp, Zea Mays
atgtcaaaaagcttttggtactgtctgtttttttattggtacaagagatttaatccaggagcatatagcatttagagtatggccacttgtagagaactgggaaatgctgaaggaaactgtcaccaagtctggcaaaggtgagctggttcgactgaaatacaccttcaggtacagagataaatttgatgaactgaatgatgactggataaaatgtatcgaagctacaagtgatgaactgcttgggctgtattccaaagcagaagataatgcattatccgaatcctttggtggccggggaaaaaagagattgaatagagttttcgatgccattggttttgtttaccccgactactgctacccgctgcggggatggggaaagaaaaggaaaactgctgcttcggccactccagatgagcctgcgccgaagagcaagaagttgaaggtccttacccaccggccatgttatattgagccggccgtggtgcctgagttttgcggggagacatcttcagctattgaaccaaatgagcccattcctcctacgtataaggttgaagattcgactataatgccgaagataccttcatccaaggtagtt

SEQ ID NO: 33769 - DNA, 474 bp, Zea Mays
caaccgaccaggtccttgtcgagcaagtccgcgaggtggggcgaccgatctggtccctaccgagcaagtccacgaggcaggacgaccgactaggtacctaccaagcaagtctgcgaggtggaaacctaagtccagcatcgcgagtctgcgtcaactatgataagatgcgtcaacctaggccgcagccaggcatgtgaacggtaggtcgagggcacaccgaggggtcactatcgacatgactgcaccttctcaagtacgacccgtggtgcaccccactgccctgaggggtcagtcgaccctgttcattgagacctcagcaccagagcttctacagtgactcaaatacccaatagtgcgcagccgatactccataccgggtgtatgcctatgcatgatggtgagtgacataatgagtcccggtggttcaccattcagagtgagtccatgctagcttcccctacgaacacaaatatt

SEQ ID NO: 33770 - DNA, 384 bp, Zea Mays
gtccgagtgctgggtgtaggcggcgaagggcggtggcgaagcgtagagtgagtgaagtggatggtggtcggcttcgtgtgggcagggctggcaagcgggaattgttgtcctcgtcgtttggggcgagtgtaggtgagggggagttgtgaagtctttttgagggtgaggagctgaggataatgttgtttaactatagggagatgagaatcattccgaaggttgaaccaatgtaaggtgtgaggccctcgctgtacgtgtgtaactatagtttgtatgatgaggctgtgcgccttcacgcatttggctatgtccttaggggcgttacacacttggtctagcacgtttattatgtcggtccggctgcgcctgtagtcggtctttgcg

SEQ ID NO: 33771 - DNA, 374 bp, Zea Mays
cgctcaataacatttcgtagcgatgagtgtgcatagttgaatacttctttgctcccaataggttgcctcgcattttgccattccgtaatgtggtacttctgacccttataaggtgcaaggtacccctttctatttggataacccgaatcgacaagatagtatttacctgcacaaacataaaatacaaatgttacatacatatgacataaaatagtattgtattctacaaatgtacaaaatatttatataccttccggtggatgggggaacctgtccgcataagttattaaagtatcctgtagtactcttgtgtcatgtacggaacctggccatcctgtcacaacaaatgtgaacctcaatcgaagtcacaaacg

SEQ ID NO: 33772 - DNA, 362 bp, Zea Mays
gtcttgtgggtttctttgtgacaaatgtcacaccacaaggaccgaaagcaatcacgagcatggtggccatcaaccccacatttttgacaaaaaggacgacgcacaacctcaacctcttttttcagagccgcgagaggggttttgaggatacttgtgtgacctccctcgccagcagacgaagcgccaatgtcttccttgacgtctgattttcccataatcggcttcaatctccagctgggattccggatcttgttccacgattgggaaccttgaggagtctctttctgattccaccggtcccagttagggtttcgccccttcggatccatctttgacaccgacaccgcgcgagacagcgccga

SEQ ID NO: 33773 - DNA, 449 bp, Zea Mays
gaaagatgtgcagaggaatggccaacaatatatatatatacacaacaaggacatagtgcaaccattacaggaataaaataaaaatacgaaatgacagtgaaagccgttaatttttcaatgagaacgtgcgtccgcactaatcacgtctcattgtcatctttgacttcgtccacaaaaagaactccactggatgatgcccggtgttcagccagcagctgtgactcagcgtggctggaacattaataggaaggagctgatcaaccgcaactgggagacagagagactagttaaatcccagcacatgattcacagaccaaataaccagccagattgaacatatactactttgatccctccccgatcagtgtgtgtgagcaactttgttaatctccacttgaacaggagcgggagacgccgtcagcctcggcaaaagtagcgtagacatgttc

SEQ ID NO: 33774 - DNA, 277 bp, Zea Mays
ccttctccatcgatgtcctagaaaccttgtcgtctctggcctaggaaagagataatcgatcgttggacaagcttgatttcattctagacttgttatgactatccttgatactctaattatccgcaactaacacctggaggaccatggccatcactagccatatcaggccaaacatagtcgactatgggcgcccctggcctatccctggtcatttgtggcctagccctgcttggttgctggtggtcaaggcaagattcccctagttcccttgccacga

SEQ ID NO: 33775 - DNA, 460 bp, Zea Mays
gcacttccccttgctactttatttcggatgaaatgggttccgtgcgattcgcttcgttcttccactcgcatatctcgggttggataaagggccttggatggttggggtgcgcactccggcgggggcgcgccgtgcgggcggaacagggcgccgccgtgcctaggcgtgcagaggaaggagacgacaccgggaaccgctgatctaaccaccaacggtcgcgattggcgcacgtaccggttcggccggaattgatctgggccgttgaatccctggcaatcggttaggattagatccacggcagggatgcccttggccgtcggattctgatgagcgctcttgattaaaaaggaacttaccccttcatcattttaaatctgcaccattggatttgatctgtgcggtcggcatgcaaccataccccttcacccgcctattatgcataagagcccctcgcgttctt

SEQ ID NO: 33776 - DNA, 631 bp, Zea Mays
cttgcttctacggtagatacaaatgggcaactttctgctgaagtgatggaacgtgtaacagcagcagcagcagctgagccttatggatctgtcagacatgcatttgtatcttatgggagctgtatttcggatctttcagaagggtggaagtacagaacccgattgtggtatggtgtatgcatccctcccaaatctaatgtgtttggtggtggggggagtggttgggtgtcatggaagtccgttcttgagaaggactccgatggaaactggattgaacttccattggtaaagaagtcagtagcgatgctgcaggcacttcttttagattctggacttggtggttgcctcgatagtggagttggatttgggcctggcatgggtgttatgggtgcctttaatcagttgttagatagtgatcagccatttttttgcatgctccggttgatccttgtttcaatgagggaggatgacagtggggaggatgacattttcatgaggaacattagcatgaagaatgtgatttcagaagtattaggctgtcaaactggaagcatgctgggacttggtggtaactccagtgcatctatgagaaaacgtccagctgcacttttgtggaggtacaacctattcg

SEQ ID NO: 33777 - DNA, 314 bp, Zea Mays
cacgggtgtgccgacgtgtggaacccaactctcggacccgaccttttcattggattcaatagagggagtgcttgcattcgtgttccaaccttcgcctgcacacgcctcgccaccgcgtcgtcgccctccttggctagaaccgcaggcgccgcaccctccctgctacctcgcccctctacgatctcatccatgtctatgtcgtccacgcgcattagaggaactttacagcgccgtcgctcttccccatccgtgtcgcgggaggaggaatccagctcaacgcctgtcgtgctcgagttcagcatcgtcatcaggag

SEQ ID NO: 33778 - DNA, 273 bp, Zea Mays
ccttgccccgacgttatctactcttcctgtggcacaaatctcccaggcgggcgcaaattgtagcggcagatcatcgatgttgagctcacggcaccggagatctttatggtcactgtaccatggcgatcttcatgagacattctgacagcgcgatttggagagctttgttctcccatttttatgtaacaactcggtcccttgtctgtatgaatattgtcgtccaaagaaccaactacaaatttgttataaagatcttactcagttactcactta

SEQ ID NO: 33779 - DNA, 339 bp, Zea Mays
ctaccctttagggtggattcaggtatttgtgttgtgaattcattggtttctatctcaacttttaccattttatccgcctctatcattgcatatgttcatatacaagcaatctatgcctatttctcaccatgttctcacggtcctctctatagcctgtcttgcagtgtgccatccacaccatgaggtcagaattggacatctccttagcctctatcgacagatttaattttatccaaggtttgatggagatgatctccacatcataccacctcaacccttttaaaccttgaatttgcgagatcctttctccttggtcccatgtatttatgttgtttctag

SEQ ID NO: 33780 - DNA, 285 bp, Zea Mays
acctggtggaggagtttattgcctatgaggtgtggcccttggcacatggttgggcgttgggcgaagtgaccccccgctggatgcttaccctgggcggccagatggtgcaaagtccggccttcgcagtggatctatgcggtcacgacgcgaccttgtttgtgcgtgaagccgaggctgaggccgtgaaaattgtagggaagtacgtaccatagacgaagactttaaggagttaggacattcgcggttcaaacgttaggctgaaccatgtttttgagttaaaccatt

SEQ ID NO: 33781 - DNA, 305 bp, Zea Mays
gtcttgggcggcctagattggatttggccgtgcgacgtctgtagtcgtaggatcgctggcttacggtcccgatctgaccagtgtaccccttcacccagcggaattagaactgtagatctcggatcaagtggctacgattagatcttggtacttaaaatttacatcgttagatccaaatccgagggccagggctgcgtaccggttcagagttgtaaaaatctaatctggaccgtatccttttaatccaacggctctggttgttccttacctcttcgccgttggctttttgcttaagagccccttgg

SEQ ID NO: 33782 - DNA, 849 bp, Zea Mays
aggggagctggagtacaggggagggagcgacactaagcaggggaaagtacatgatatgtcagcagtcaagtgtgttgaacagttattagacaaacaaaagcaatagcaatatctaagatttactggatcagaaggacaacttgcctggaaggctccatgtctaacactgtaatgcatttcctcctctatacaatgaagaagaaaagctataacatttgattcttcctgctcatgtgatggtcctgaaaagcccatattgatacaaaatgtgatagcataatactttccatttgaataaggacagcttttcttgccttttaagaagataatacagtagacttgtgcagtatgtaaataatgaaaaatgagaaaactacgaaagaacattatttaaaattcaggaataagggctaaccagcacagcaatcctcagtgagaaccgcaaagacatccaaagtaggtggcacttttgaaaaagctgtctccaagcaacttagaacagtaacctgttgtgcactcatgtaaggaacagggcacccaagaccactggttcttcaatacaggaattatcaaaaaaactaaccagcacggcataatgttcagtcttattcgagtgtttgttcagtaatctactgcacaatactttaatgactgttggcaacaattcctttggcatccgagcgtacctgttcatctaacatattattaactatacaaaatcgattagagaaaataaaaaaacaggtgtgtcaagatcatacggtgtagcagatatcaaaagaatgagaactctgaataatgccgcaagcaaagtagcttgagtttcacgctgtatcaagtacagtgctc

SEQ ID NO: 33783 - DNA, 386 bp, Zea Mays
ctgaaactgaaacagatcatttgatttttccccttcgccgccggtgatccaccgtcacagttagcgcctgtctgatagattcgtgccactaggggaatggataacgccgaggacggtaagaatatcctacgccgggtgaatccggtcactggccggacctgtcgccgtgtcccgtcgtagatagttgtgctggcatcatcggcgttcgttgttattcagccgaactacgtgccacgaaactattctacatcgcggggagtcactaggagccgctttgtagcataagttcgtcaccggtgaggccgccacggtgatggccacgaatcaccgcacctgtgacttatcccatatccgattgccactgcgctcaactcaaattcactggc

SEQ ID NO: 33784 - DNA, 338 bp, Zea Mays
ggcgactctggctccaggacgacaggaaccatgagacgaatgttctggacactcccagcctgaggcctcctttggtagcttgggcatagaaacccaagggagtcggcacccatgggggcaaaatccctggtatctagattccctaggtgggaaccgtccgacggggcaaccctctcgtgttgctctttggcagtcagcagcaaggatgtcaacaaggctaataaactacacgcatacacaagactccacacatgctaataattttcgatgagcttgatatgttagtgagagagaagctaaggatcagctgccataatactacatgaacacacttgcta

SEQ ID NO: 33785 - DNA, 1257 bp, Zea Mays
tgcctgatgaatctccacgtgccatacttgaggttaaattttaccctgttcgtgatattgtggtgaagccttgtacaattgatttgaagtgttaatgcattgtgctttttgaacagataatgaccagccattatattcctggaggacacttgctctcacccctcaaggaaaatgttctagaattgaaacaaaagcctaaagtgatggtaaaacaagaagcacctgaatttcaagtcaaagtagaattgcatggagactggggctgtacaacctctgctactctggataacaaagataagtgtaccaaggaaatcaagtctgatgaaaagaaagacaagatccccattttcaggagttcaaaaatcagagttaacaaaccatctgctgtgaataagggaactaagcctttacaggatgttttagatgataccggttcaaacttgttgcctacaattgtaaatacagaacatacagttgaggagccagcgaaatttacaggtgcaatttcagataaaatgaagggatcgaaggatggtgcatcaaaaggacacattagtggcaagaacaaaaacattaaggaggaaccttcgcttgatcatggattttctcgtaaaaacagatgtgattctgatgagtacaatggtaaacctcatgccagttcatgtcagttgcaaaacattcccaacaaaacttcgccactggagagggacaaagggaaagtattgcatatggaagatgaaccatctcagtacaaaagcaaggaaaatggagacctgtttagtgcagattccatggctgtcatggtaggaaatgttgatagaaattctttagggatgatgaaagggaagaagaaagtttcttctttgcaagccaccctgtctgggaagttcaagttcaaggcaaaaaaacaattgaatgacaacattgatagaaaaaaatatggtgaagacgagcattatgctttagaccatagaattggtttggataattcatatcaaatagataagagtgtgaggcttgagaaaaagaccatctcatctggggagattgataacaagtcagatgttggaaatgatggtggtgtcaatatctctgccatgtttgatgagaaatcagatgttttgccattagcatctgcatccctgcctgctccagaacccattttaataaatgaacaatgggtgtgctgcgacaagtgtgagaattggcgccttttaccctatgggatgaatccagatatacttcccaaaaaatggc

SEQ ID NO: 33786 - DNA, 444 bp, Zea Mays
ctagtctagtaattttttttatttacaagtgtattatttatttatgcctatactaacttcgtttccccccttttttttgattttgatcgacccatagccaattccagagcaaccaaccgcaagggcatgtgacaaactgccgcctgcggtgccttcgccccaggcaatgtgctccgacatggatcagcgcgaccaccacgcaaccaggtcatccccttggaccctcgctcgctcttctcgcgttaagcttaatcctcagccgcctctgcctctggcctagcttgagttataattaaccagttcattagattaacgaatttgctttactttgcttgcttcgatgtttagctttcctcccctcctcaatcaggttgtccaggtgtatcattcatgttacttagtggacctctgacagaacataatactctcccgtaccttagctct

SEQ ID NO: 33787 - DNA, 321 bp, Zea Mays
attttgtcgaaggtgtctttgtcttgaggaccctcggcagagaagaatacccccaacactctctggatacaaatactacctggacattctagacgacttctcccatttcctatggacttttccacttcggctgaagtccgacacattcaccaccctcatccacttcttctcttgggtctctacccaattctgtcgcccggtccatgccctctagtgtgataatggtcgcgagctgagttcgacaacaacgcctctcgctccttcttcctcacccatggcgttcaactacgtctctcgtgccccgacacctcttatgagaac

SEQ ID NO: 33788 - DNA, 340 bp, Zea Mays
ggagagggtaaaagatgtaagactaggaaaacatactaaaagcaaaaagagaaagagggaagtagaaggtcaatgttggaagcgaagatcatgtctatgggatttgccatattggtcaagtttgaagttgcgccacaatcttgatgtaatgcacattgaaaaaatatatgtgagtactttcttggtacatttcttggcattgttggaaagaaaaaggacaccattaatgctaggcttgatttggaggacatggaaataaggaaacatttacacttaaagcataatggggactcatacagtgttccgcatgcaccatacacaatgaataaaacacagaagg

SEQ ID NO: 33789 - DNA, 278 bp, Zea Mays
aggagataccaatgggagaagcatcgatggtgttatcctcttcttagaagatatgcatgtgtcttagcaatctcagaaacaagatgagctcaacttatgaagcaaagtatacaacagacatgactagagtatgctagactgtgtggctagggatggcaacgggtaaactatccgcggatagtgtctctggacatccatatccgtgacttatatccgatatccgaacccgtacccgttacccgctatggataacaaatagtatccacatccgttacccg

SEQ ID NO: 33790 - DNA, 417 bp, Zea Mays
ccggcgacatgtagatatatcgacagctaacacgcgttcatcgatcccattaaatgatttaatggagctttcgccacaagctaggagggagaggaggtccatggccatggatgggtgagtctgatcgatctggtcggcaccatcactcacatgtgcaggccgtgtccgggtcccggccggcccctagctagttgttgttatgtgtaaaactgcctctgcctaggtatctttatccatcacatgtcaagacatttatacaagtacctgtgtcaacaaccatactacgtactgaaggcctgactgactgaaccagatgaagaagctggcaagaaggtgcagatggagcaggtgggcgctcaggtgaggagaagcagtcgggttcctacacccaataccaaatacgacagcaagacctgg

SEQ ID NO: 33791 - DNA, 556 bp, Zea Mays
cggcggggaactcgtcggagacgaaggaagcgggggttccaggggtcctcgggcagttggtgtggtctagggaggtcggagagggtttggggagttcagcggcgagggccaaacctgggtggtagcactgaaggtcggaggtccatggtgaggctgcaaggcggcgacgctagtagctccggcgagcacttgcacatgacaaagatcaagggtggggcctagagggggcttaagaagttccttacctcaaggcaagactcgggatcccctcggaggcagcaacgacatggtggttgcttggaatgatggtggcggctccgaaactacacaatgaagaggttaagcatggccaaggcagagaggctaggaaaaggggaaaccaatgcgggttcccggtgcatcgcactcaggcggagctcattgtggcaaagtagacaacagtggcttagtggcgatgacagaacagcctttgtggcgatggcggcgctcctgtgtgctgggtgggtaaaataggcaaggagactgtgaatgagaagcggggggcactggaggtctg

SEQ ID NO: 33792 - DNA, 329 bp, Zea Mays
acctggcaaggacgactggcgtggcctgggcaccagagctgagctcgcgtcggagcggccagtggcgcagagggcggagcacggccaaaagagcataggaagctcacatcggcgtctggcaggcacacgccatggatggagcatggaggcgaggagaacgagagcggagtgaggcgagcgtccaagagctgtgtggggagaacgagagcggagtgagcttgtcaaggaactgaacgtacaaggaagaacaagttcgtacgtgagggagatgagagcctagcgttgggtcttggcgagttgctggaagcaacgaacggtgcagaagttcg

SEQ ID NO: 33793 - DNA, 280 bp, Zea Mays
gtcgagtaccgaaggcagcagtcattagctggtcctccttcttcgtagaattgccaaggatctcattgcacattgtctcgatcatttctagccactcattgcatggtttcttgaactgtttctcaaatttgaatccataagggagccgaacaagctcatacttttcccccttcctttttcttcggcatcccccaaccgctagaggttggaaacgttctattcgccaagtattcctgcactagatccctagtgctaatctcggcagctactactctaaatt

SEQ ID NO: 33794 - DNA, 424 bp, Zea Mays
ctgagttcacctaggccgtgcagactctgagtcaggttggtgacgtgctggcttagatggcgaacgatctaccttgcatgcctgacaacgagggttaccgatagatcctcactcgaacggtaaaccacctccttccaccagctcatccagatgacgaaattcaccatcatatcaatagccgacgcgataggcgaaccagcatcgaggcatcacacgcccgacaacatgaagaagaaatgaggcaccgagaggggtacgatcgggaccacggcgccccgagccgtgggtcgagcggacttcgttgttgctttgacaaacaggacgacaccacgctagtcggctcgtgaccggcttggggagtgttcgtggcctcaaccttcagccctcggttgtgcatggtttagttcccacctaacttcaaggt

SEQ ID NO: 33795 - DNA, 336 bp, Zea Mays
ctgtcatcagtgtctccgggtttaaatactatttggttatccttgatgatttttcacattattcttggacttttcctctgcgcctcaaatctgacaccttttcaaccatttctcatttttctcttatgtccatactcagtttgggcgcacgatcaagcaagtccaatgtgataatggtcgggagtttgacaactcctctacccggaccttctttctcaccaatggtgtgaagcttcgtatgtcttgcccctatacatcgccacaaaacggtaaagccgaacgcatgctccgcaccaccaacaatatgatctgcaccttgctgatccaagcatccat

SEQ ID NO: 33796 - DNA, 396 bp, Zea Mays
ggccgaaccacatttctgacactgtgctcaggctactggactgatagagagtcttatcctagttgtgttgttatagtgtgctggctgacctcgggtccactccatcgtgacatggagctcttagcttgctactagacaacgaggctaagcaaatcccgtaccttgcgctaggttctgcgcccgtttggcgtgttggcttcaagaagcttatcaaggaggtccatcgtgaccataatgttctggctcccttaagggactgtagtggtccgctatcatcttccataatctgttggtgatcgtctcatgccatggcatgcacgcgcccaccactttgccctggtttcgtcatccaccgttgtggcatatcttacccaccccttggatagcattggtcgc

SEQ ID NO: 33797 - DNA, 485 bp, Zea Mays
ctggaatcagtttgatttcaaaagctgcatcgcgctccggaggaatgcctggatgctctgctggaaacacgtcggcaaagtgacacaccacacggatgtcctgcacccgcaaggcagcctcaccctccaccaccatggagaaaaaaattcccgacttcctggaccaatgatctgaaagcaattgcaacaacaaggataacgtaaacattggagaacttcccaagaataccacctccctacccaacggcgcctgcaacaacattgtcttccaaaaacaggatataactgcgcgatactgagataaccaatccatacccaagataacatcaaatgcccctaaggaaatcaccacaagattagctgaaaagaccttgtcagcaagaatgatggaacaaccctgacaaactgaacaactactaatggagccattagcagaactaaccataattgggtgacccaacctctgcaccgaaagactagcctgc

SEQ ID NO: 33798 - DNA, 355 bp, Zea Mays
cttcgcgatggtacagtgatcgtattgggccgccagctcaaagacctcgccgctggtgatctcgcgctcaaatctgcatcggcgttgcgattcacgcccgaccaaactcggataagcgctcctcggtaagaaatatcacgctggagataaactccggccactgttctcaccgccgtcgtgtctcaccatggttagtcgcgttggcatcaccgatgttcgctgttatctggcctggctacatgcctcaacgtttcaccacgtcgtagtgaatcactgtaagccactggttcgtcgccggtgaggccgccacggtgaaggccacgaatcaccacaccagtgactcattccttctccg

SEQ ID NO: 33799 - DNA, 347 bp, Zea Mays
ggaatatgatgtagatggcataagcttattgcgtccaattaatgcaaggccaaagggaaggacaataaaaactagtgaacaaagagttctaaaactgggtgcgaaaggagaaaagaagaagactcgaaagtgccaaaaatgtggcattgctgatggacacaatagtcgaacctgcttgtctgtagaggaaaatagggttaaattggctagccttgccgatagaaaaagaggacgaccgcctgggtctagaaacaaaaattcaacaatggtcccacagtggaatgagacatccacatcaaaaaaacataaacatactgattctgaagaacatggttcggatgacgata

SEQ ID NO: 33800 - DNA, 451 bp, Zea Mays
ccgccatcgacgctatcatctgatggatgcgcgatctacatcatcttcccactcattgggtctccaatcagagtcgtggtgaatgtggacggcagaggctggaagagggtgtctgcttctcctcgtggcatcatctgtagagctagaggtgaaggcatcatcgatctgctcgatggtgcacacgaggtggatgcggtagcgttgccatgggggaaggagacacacaatgacagcaaggcaaaggcaaaacagagggaatgcgaaggtagaaccctcttaatgtaagtagaggtttactcttttctctgattcgatgcttaatctaattagagagtctagccaatcgcatgtcgacatgtcctccattggcctgcatctagcaaagacatcaacaaactattccacaatctcctccatcgtgtcacaactcttcgtgacatctcagctcctc

SEQ ID NO: 33801 - DNA, 688 bp, Zea Mays
atgtcgttgctggttcgctaattcttatggtttttttcccagtgatttgggtgcttgcgtgcttgctgcttgggggaattttatcacaacttggagaagacccctcgccattttgcatttccaatcgtcggttagtttgtgtgcctaagcgcctgccctgttttttatgtgttgtttgttacaaaccaatttttcaccaatgttacgtgatgttcttccatgctatgcgatatatagtgctatgcctgattctcgccatgacccgaagcgcctgaggcacggtgcagttgcgcagggttagtgctcatagtatcgcttctttgtttatgcgcgcaacggccgatacccatcctaattttttatgcttctcttgcgggccaaaaaatatgcaacctctttagattgcccggtctttgagacagctgatggccatcgcattatggatggtgaagacgaaatagccccgtctaaccttccgggaccttctaaccagccgatacctacgctacaaggaacacgtgcgtacaaccgtgtttgggcagccattactgcagcaaaaaaatatggtgttagtgatacttatgtcatcacaggtagtagatctataatgtcgttcccttcagcgcttgccacatccaataggctacaccgacgcaatagagtacgtcacatggtaactgaccagcca

SEQ ID NO: 33802 - DNA, 478 bp, Zea Mays
ctacagcaacacagttgggtacaatattttcgttttgtatggattttattattaatacagaaataatcagtgtcatagagtaaaagagtaatgccacatgcaatttatacaccctggcaacatgtccaaacacttatgcaggagaagatactaggttgtggcaagcaataactaatttcatcatttcattattgtcctgctcgcaagagtagcgagcagaacgttacatgtgccatgacttccggggcctattagctaacttctagctaacgtattcagtaagagttgatagatagtgttcagtttccaggtaccataatcaattcacacgaccagcagctgcacccaatttgccgttttttagtttggtcggctaactgatatcctaagaatgtcccacccaattcacacgaccagcagctgcacccaatttgccatttttaagctcggtcagctaactcatatcctaagaatgtcc

SEQ ID NO: 33803 - DNA, 335 bp, Zea Mays
ttcacatttcatatacttatgactatgtgactaatacgtgctcacctcttctatcatttcagtgatcttgcctgcctgtgagccatctcctgtcttgcctggattctctccctctcgtgtgagatttccaggtagctcttcgctcttttgtcattctatcgactgttatcttcttgtgcttagcttctctctctcatttgcagtcgtcaggtcaggatgccacgcacgaagaatgtgtcggcgctaggggaggagatgacgaggatcctcctcgccccttcaagcaggtcaaggggaagacagtttacttggagctgcaggaaggctgcaagaag

SEQ ID NO: 33804 - DNA, 439 bp, Zea Mays
aaagcacatgttgtgttaaccctctgttttggttatagtatcacacttgtcaccaactaaacgtttgtgtcctacaataagaagaaccatctgtgctagagaaaggaacagagggacctaacactatccttacaaattacaatcaactttgggattcgatgagcttcctattttcacttttccacttttcttgtttgtagacattttgatggtataattctataactacactctatgtgaagttagttttgttgattatccttactaatataaatcacgagtttcgtcgtgcgtctttccccctccccacgcgcgtaccaagtgtcgccagcgtttcccgcacgccagcgaaatatcaaaaaaagttcaactatcaggattcgaaccgtggtctctgggaagagagcactcgcttctaaccactgcagctcatattggt

SEQ ID NO: 33805 - DNA, 361 bp, Zea Mays
ttctgggtcaaaacgatccagagccttccaagcatcgccatctgatggatgcatcataatgtctggatcttggctctcacggtctccttccttatgccacaacattagcttcgcagtttctggggttaaaaacagacgtttaagccttggggtgatgggcatatatcgaagttgtttaactgccacttttgtagcaaaagtagctccatcttcttttagtacctccgcatatcttgatttaccgcatatctgataatgggtggccgcttcatattccttccagaacaacatgcaattatcttcgcacacatcaatcttcttatacttcatcccaagaccggacacgatctttttagactgg

SEQ ID NO: 33806 - DNA, 455 bp, Zea Mays
ggatgctgctactcatatccagcgttggctacttggtgccctagtctctcactcagagtttgatgttgtggatttcctcatttgtgagatcgaggacaccgtactggatggtctacgcgcccagcgacagctaccatatgctcactatttctaccacatctttgctcagctgattcggcctccacagttccagggcactcttgaggcctctcgcctcctctttaggtcctaccgtccagctcctgaggatcctgtgccggcacctgctctagtgattgatactcaggccgaggataccacttttcaccagttcgagactcagggcgcagcagtccctgacgatgatgatgattattttggggtttcgcctccgcctccgcctcctatgcctccacgcactcatgatcatgaggctaggagttctattggtgttgcccctactgccctccttccat

SEQ ID NO: 33807 - DNA, 310 bp, Zea Mays
gtttagggccataatgcatttggtgggactaaacacatcctttttatcttgtggacatgattacacttacccgtaacaagtcccttgttcctatgagagcctcgggcctaggggtttgggggccaactattcatttccttatctttaaagctggacggaaacatcgtctataacgttttccgcgtcggctcaaatatttctagacgtcggatttccaatcaacggctacatcatgacgacacagtcttgccttggacgcatcgcgaacctccttgttctgtacgctcctcgatccttctggtcggtacta

SEQ ID NO: 33808 - DNA, 608 bp, Zea Mays
tcgagtcaaaatattcactgtaagctattgctaatctattgtgtaattagtgctgaataagacaaatgcgtactggttcaaatagtacaaattgcttgaaaaccacagctggcagcttaaataaagtggcgaaaagaatgcactgatagtaaaattcaagagtaaactccgtaccatttgtgaggattgaggaaaaaacatctgggatagcacaaaataaaaaacaccttacacatgttgctgttgaatattttcttttggttcaatgatgtaggatttttttgctccacgaatgtgtggcataaattcacttatagcctaaagctctgcagtgttcttctatttttttgagaagcatgtatgaatgttgaccaatttgcaatcattaaacttttgtgagctgagatattcccaaataagattgatacatcttctaaaacaatgtcttgaactttttttcactttctgcgagcagtcccaattaacgtgttctagacaatcaacatcacattctgcattgacaagacagcggttcaaaataagaagtcgacttttggaagatgcttttgatcagctaagtttgctttctgaagaagatctcaaaggac

SEQ ID NO: 33809 - DNA, 432 bp, Zea Mays
gggtcttcgtactgtatatctgcaatttcttgctctagcactcttgttctttccttctcgtccgtgatcaaattgtctcactcttgggatatggtggatgagaagggctgaatgagggtgggttggcgtgtaaaagatatgcggagtgaggggagtgctcaatttaaaggaaccgatcgtgtgcttcatgaatttgggcgagagtgttcataacgacggtagaatatttccacagagacccaaccatcgtggcacgcggtgaaacaatggcctcgggcagtaactatctacccagcactactcctagcattgtggtagatcggctcatggcatggtgcaaccgaggaagccagcagctaccaagggggacgactgttcagccacgtcgccggtaagtggacacagccgtgcagagcgtcaattctaccccgc

SEQ ID NO: 33810 - DNA, 369 bp, Zea Mays
ggtacctcgaccttggtcgtagtggtacaaatgcatccaaataaattaggaacttctgtgttatgtctgtgatgcatgcgtaaccgatgtaggactgcttgaagctaatgttccttttgtaagaaccttatgtccaatgcttcatccttttgtacgaaattatgtgaaatgctgcatccttctgatcattttctgtgacccttatgtgcaatgaattcgagtttgtattttatagtccaagtttgttatctgttgtccaacttaatgtatctatgtatttcattccagaatggctgagaacaacacaaatacaccttttcgaccacctgctgccagccccaattcaggtaaccaaatcttccccccacc

SEQ ID NO: 33811 - DNA, 565 bp, Zea Mays
gaaccgacgagcatcaccagtaaatagaggtgtggaaacatgaacaaagagaacaagaacggacctagaattggcggtccatggcgcgacgagacacggaggcgcggagaagtgaattgggggaaatgcaaaattggagcacggtggtgcacgataggagctagctagggatgggttggacacgtaactaagaagcggagtagagggcatcctcaatttataggtcccgatcgaattggacaagaattttgggattgagatcatggttatccggctagaatatttcaccatggcctgctcaccgtggcgcataaagggggaactggtatgcagtcgataaccgatggcttgccatgacccttacgacgcggaggggtggttactacgtgtcacggccggaaaaacgacgagctccggtgatgccaacatgactgaccgcggcgggacagaacgaccagtccggccagcgactagattcaccccccaccagatattttcacgccaccccgacgttatctactcctcccaaggcacgaatctcctaggcgggtgcgaattgtggcgg

SEQ ID NO: 33812 - DNA, 362 bp, Zea Mays
tgcattaccatcatggcaaggccaatgttgtggcagatgccttaagtcggaaggcacagtgtaactgtgtgagtatggatgcaaaaatcaccaccctgtgtgatgagttgtgcaagctgaacatagaagttgttccctccggtgctttgagttatatttcagtggagcccaccttacatgagcaaatagtcatggcacagattggtgacaagggtgttcaagtcattaaggaaatgatcgaacaaagtgtggacaaatacaaatgcttccgtcaggacagcaaaggaattctatggtttggagactgattggttgttcccaagaaccccgagcttaaaaagaaaatattggatgaagcccac

SEQ ID NO: 33813 - DNA, 440 bp, Zea Mays
cgaagttatggtgcgcgggatagttaaaaatctcgaagggtactgcacgggtataccggtggtgcgcgtgtcccacagagggatcacctcgtgtgtcccgcggagggatcacctgaactctgaagacgcatcccgagcatggtcgagggccggatcattcagatgataaccaagcaccgaaagaattggaatacttgtagcaacaggaagtagactcgagtggactcaatgatctataaagggatatctcttcagtcagctatataaggttccagaggtacccctacaagaaagagagaacactccattaaattgataggcaacttcatcttccacctcccacaatcacttgtaatcttcaaactcagaggaatccaatactcagcaccacacagtacgtagggtaatacgcacttgcgcaacccgaacctgtataaatc

SEQ ID NO: 33814 - DNA, 272 bp, Zea Mays
ccgaggttgacctgcgcgtatccgagcaaccagcccaatcaacatcaatgtagaccacaagatcagtcgttgtagatgggcacaacaggaggccaagataaagggtgccacaaatgtatcatagaattcgtttcagcgtggcaaggtgtggttcccggggagagtgcatgtgaaggaaacttgttgaacaacataggcaatatcaggtcgggtgaatgtcaaccactgcaaagcaccaacaagactgcgaaaatccgaagcgtcagttaccg

SEQ ID NO: 33815 - DNA, 778 bp, Zea Mays
cggatgagtctgcgtttaagttttctgattttgatgactctgggagttcggttgagtggacggaagagtcttcggatgaggacttggattactttacggccttggatgtggctgcggcggaggcttctccgcatgttacagatgctgaagttttgcctggtccaagtgctgggcgtaggcggtggtgaagcgtagagtgagtgaagtggatggcggtcggcttcgtgtgggcagggctggcaagcgggaattattgtcctcgccggttggggcgagtgtaggtgagggggaattgcgaagtctttttgagggtgaggagcttaggataatgctatttaactatagggagatgggaatcattccgaaggttgaaccaatgtaaggtgtgatgccctcgctgtacatatgtaactatagtttgtatgatgaggctgtgcgccttcgcgcatccggctatgtccataggggcgttgtgcacttggtctagcatgtttattatgtcggtccggctgcacctgtagtcagtctttgcacggacagtttcttggtgtagacttttgcacgggtagtcttttgaggtagacttcggttttgcgcatttgttgtgctagtccggttgcacccttaggcgacttttgcacggatagtcttttgaggaagacttcgatttttgcgcacttgttgtgctagtccggctgcacccttaggcgacttttgcacggatagtcttttgaggaagacttcgattttgtgcacttgttgtgctagtccggctgca

SEQ ID NO: 33816 - DNA, 366 bp, Zea Mays
ggatagcttgccctcaactttgaatcttctcatcccacgaattggtgatacgttgaggtacacgtggtcaccctcttcgaattccagtggtcttctccggttatcagcataactcttttgccgagtctgtgctaccctcaatttctcctggatcataagaacctgttcttctgtctcttgaataatcttagacccaaagaactgtctttctccagtttgatcccaatagagaggagttttgcactttctgccatataaagcttcaaatggtgacatcttgagactggcctggtaactattattataagagaactcagcatatggtagactcttgtcccaactgcctccatgcttaagggcataagc

SEQ ID NO: 33817 - DNA, 402 bp, Zea Mays
acatattgggctatctcccttttcatcctggtccaccaatacaggggcttcagatcatggtacatcttggtgcttcccgggtgcatggagaatttggagagatgagcctcatccaagattctcttcttgaggtctctatttttaggaaccaccaatctgtcttcaaaccacaatatccccttgctgtcttggcgaaagcacttatacttctccactttttgattaagattctctttgatgatttgcacttcctcgtcaccgagttgggccataataatctggtctaacaaggttggctcgatggagatgtgagacaaggtaccagaaggaatcacttcgatcctcatcttactcaactcatcacacaggttattgatgcgagaatccatcaccatacagttg

SEQ ID NO: 33818 - DNA, 812 bp, Zea Mays
tttgtgcaggtcctagtctgtgacattacaatttatcaccagtgcatctgaatggggcgtgctatgaaggtcggtgtcccttgcatcgaaggtaaggggaatgtgtgaccactttgtttggaccactgggtcagtgagagcgacatgattcacccttcggtagtgatctttcttctgtcgtttgttttcaaactctatgctggatcctccggtgatcatatgtattaccccctaaaaggtgggttggagaactcttcttcttgttttggcggcggagggggttgctggaaaggtttgtggttttgttgtggtagcggagggggtggcgactgtgctaatctctcttggtcatgtatccttggaaattgagcaggaatttgtcacagagggttttccatgagtcgaccgatagcggtggtagccttgtgtaccacgtgaggattgggccttcgagaccaatgatgaatgactttgccaaggtggaatcctctccccatgaagatgccatggcaacttggtagctcattatgtactgggttggatctgtattgttattgtactttgggtaggtgcctgctcaatagttttgcggccatggggaggcctagagttgtgctgatagggggctttgctcgtcaaggtactttatccttggaaagcaatttgcatgtgggctagcctgtggtgataaacatgattagctgctccaattgcttgctggtgaggggggtcttcgcgttacatgtcggtgatttcctgctctagtgcccttgatttttcctcctcgtccatgatcagttgcctcactctgg

SEQ ID NO: 33819 - DNA, 295 bp, Zea Mays
tggaaattgaatataccgcttaaaattaaggtttttctgtggtatcttggcaggggggtcatcctgactaaagataacttgacgcgtaggaactggaaagggaataagctttgtgtgttttgttccaatagggaaacgatcagacaccggttctttgagtgtcattacgctcgtttcatttggagggccttgttagccgcttttggtctgccgatctctcgggacatggagcacgttgctgggaattggttgatgggtttcagtaatcatgacaaatacctagttatgacggggg

SEQ ID NO: 33820 - DNA, 438 bp, Zea Mays
gcctagtgttgtgcgcgacggagcgagaaggtgggtcgggtggatcgagaggaagccactcgagtggattccacacttgacctaggactggcccgtcgtaagtgactgatcgcattaactatgcatggcgctgagccgcagtgggagagtttgtcctccttccactcatgacgtacagaccctaggcctatgacccacaaatgacatatcaaccctaggtcttagtgcactaaccgtctacaaggcccgcaacacaacgagccacaccgagacccagactacgaaggcaatgggtcggctcgacatagagatggtaatgatgatgctggagctcttcaccatccatgtcgctagccataaagagcatgaccaagcaagcccaaacgatcgaggcacatgtagacaagcacgactttactagggtagaacaccccattc

SEQ ID NO: 33821 - DNA, 510 bp, Zea Mays
aacgtgccaatggtaaaattttcacagccgtcaagaaaatgctcctcgacgacaagaaaggcaagtggaccgacctgttacctgaagcggtctgggcgctgaacacgactgagtgcagggcgactcggttcacccctttctgccttctatatggatcggaggccatgaccccgcaagaaataaaacatgggtcaccacggacagtcacgtcagccgtccccgacatagacgagcccacttcgaaggacctcatcgacggagaccgcgtcttcgccctacaggctttaaacaaataccaagctcaaacaaaagcatggcgcgaccacacagtcatcccgagggaattcagcgaaggagacctcgtactcgtccggacagctcggacagagtcccggggcaagctagagccaaagtgggaggggcctttcatcgtcaagacgaaggtgtcccccagcgcgtacaggctcacaacgccatccggcgaagacttagagcattcttggaacattg

SEQ ID NO: 33822 - DNA, 530 bp, Zea Mays
cgttagagcaactccaaaacgttactaaatttttttttccaaaaactatgtattgggatcttcactaaacattttttttccaaaaccttgtcttcatgcagcaattccctaataatcaattccccaatagtttaaacttatcacaaatcaacaattgattcatcttgtaccggtaatagagtacacatggaacttaaattaattggcacatagctcctttaccgtgacccgtgagtacacatgcaacttgacctcgagaaactagaagccagagaagcaagagaatcccactctcacacgcctgtccttgtcaccgctctcgccccctgttgcttatcgccgacctcgccgcctccgacgccaccgagttcgtgtaggccgccgcgtcccagtcaagctcccgtctccacctcctgcgcgccaaacatgggcagcatacgttagggatgattgggggagatctgcctcccgcaaatatacgggagatgaaggtgtagatgtgggacgccaaaaaaattggggaagatacg

SEQ ID NO: 33823 - DNA, 423 bp, Zea Mays
gcgggccccaccggcagccgctattccagtttcttctttcttgcccaccgtggtagcttgtcgcgggcccacggagcaaccacacaccaccctaactggatcacctccatgtcggccccgatggtcagaagcttcttccacctatgacggatggcgttccatccgtgaggtctgtgggatctcccgattaccacgtgcggaactgtagttatcagttgggaaacaaactccgtaattcgcggtacagacaaaatcaaaacagactccgcgagtcttgcatggattccggtcccggcttcgttccttctctccctgtataaaaccggacgccgtcatgacccgctgtgcaccgacgtcgtctgtcaccggtcagccgccggggatctcgggtccggtcccgccaccatcccaccttgaagcctg

SEQ ID NO: 33824 - DNA, 575 bp, Zea Mays
ttttacggggttgcatctagtcctagctttcatggagcttgcgcatccagggaaaaggaccggcacgtctctaaaagcacaggctcgttagatagaggaaggaaaagctggggtagtggtagctccacattagcctctgcctcggcatggtgacagctcgagacggaggggattagatctcggcctatttacagctcagaccgtagcagtacctggctctggctgtagaggactaccacgtactttccaagtccacgctgtacagcagcactgcgtgcatccctcacacacaccacaccgtatcgggctactaccggagcatacatacacacacacagacatgagtggtagggaagcttgccaggaaattattccaggcgggcccctgacacgagagcatgattgcagcgggcccaggcttgtaggtgacggaccccccaagtggaaacaaaagagacctgttgtttccagaagcgaaaaaaaaaacagaaagcgaagaggagaaatgtggcgggggtaaagaaaccgttattcctggcaaatcaatgccgcgctgcctctctggggcatggggc

SEQ ID NO: 33825 - DNA, 381 bp, Zea Mays
gcagggagcatcgcccgtgcacatacagtctttgaacgtatggacgtgcaggagcgggatgtggtcgtttggagtgctttgattggtggttacggggtgcatggtcatgtcaaggaggctgttgccctgttcgatgacatgaagcatgctggggtgaaaccgaatgatgtgacattcctgggcctcctgtcagcttgcaaccatgccggtgctgtggatgaagggtggagctacttccattcaatgaaacgtgactatggaattgagccccggcaccagcattatgcctgcatagtggacctgcttgctcgtgctggtcatcttgatagggcttaccggtttataatggacatgcccatcaagccagaaatgagtgtgtgg

SEQ ID NO: 33826 - DNA, 1119 bp, Zea Mays
atttaatcataaaaaattagtagttgcaaaaactaaaattattttgagaaccaaatattatataaatattcctcttgtcgatctcgttctgggtctcacccttttttgtgagaccgtcaaaccgctattctccttgtgaacatcgtgctgtttgggtctacatcgtctacccccgcctaccacattgcctcgcctcatcgcgtagtgcctcacgtgttgtgcgcgcaaccattttcccctcacttgttcctctcgctgtcattccgagctcgcgtgtcgtcttcacctcctcaaactgttgtcgttttcgcacgtgctagtctcactcggacacagccgtaaccaccccgcctctgtgcctgaataccttgcctatattcactcgcaaggccatttcatgcgcgcctgacccatcagccgaacctcccaagtttcttgtcccacgcttaggactacccgatgaagcccacccatcatcttcctccttgtaacctccagtcccgcttggatcagccacatcctaaggaggtcgacaaccacttgccagttctctttcaaaccacttgcttaaatgccctgctccctcacacaacatcacctcccatacacctgcattgccctacccccacctctacacacagcctatgcactgaagtgcatgctgatctcgctatcgtgcccaaagaattgtcgtcgatcctcacatacatgtgagttctctcccttccacctttcttcctactgtcgagtcacccaagcgtgatgccactctctaggcgcgacctcctcttatcgtaggcctctgcgtgcccgctgcactgttggtcgtccacaggtgagaatggacgcccgaaatccccactgccttcccatgtcatgtgcttcccttgtgtgcaacactaggtttcccatcccctcccctcgatgcggcaaggcgcagtcgcagtagatctgttgctgctgccatggccccctcacgcaagagtcccttgtacacctcagtaggctggggccctccttgtggcaagggatgacgagcaatcgagcttccctactgttgcatacagagcgagccaatctctcccctctgctgcttgctgcgcgcgcactccaccgggc

SEQ ID NO: 33827 - DNA, 997 bp, Zea Mays
cgagaacagctcgtcctcgagctgaaaatgggggtaggaagacgtgaactgttgcaatggctcccaagtagcttctgtcggctgtgttccactccattgtacctgaacatgccagacacctcgttgtattcttgctttgagcaccttctctggtgagggcagcagtcgaccattttccattgctagaagagcaggaggtagcactggtgggacgcctctgtatggtttgaggagaccaacgtgaaagacgtcatggatgtatgctcccgttgggagttccaggcggtaggcgacctcgccgattcgttccgtgatacggaagggtccagcatagcgaggtcccaacttgcctttgggtcgacgcaccagggactgagcttgacggttgagcagacggagccaaacccagtcgtccactgagaactctaagtctcaatgatgtgctcaaagatcaatctaaaaagagtattgctccttgccacattctgtctcagccatgcaccagcacgactccctctcgccctcaatcgtcaaggcctcgccctactacccactcatacaacctcagaagtcgagatcattacaatatggtatcagatatgtcaggtcacgatgaggaagatagcacgacagccactgccctccagccgtccctggcgtccatcgccgcgacactaggtgaagtccaacgtcagctcatcgactttgcccagcagatgtcctccatctcctcccatgttgcggctgtcgaggcatgtccatctgcatccacgccagccaccccacaggacattccctatggcctgtcgggatacggcggcatccccaaagtactgttgaacatcgatcctttgccagtcacgacacatcctacccccacagccccctttccaatccatcgtctaccccttcctcattccccatcaccactaccatcattcccccaccaccaccggaatattcaggagcaccattctcgcaaccagcgacgagtgtt

SEQ ID NO: 33828 - DNA, 900 bp, Zea Mays
tcccagggcctatttctccactagcgctggtacaccatcgacatcctcgagcgtgatggcattgctgactgtaagccctacatgactccggtgggcactgagggcaaggtctcctccgacgtagccccatggtggctgatcccactagcgaccgaagtcttgtcggggcgctgttgtacctcgtcttcacccagcccgacatcgcctacgtcgtctagcaggtgtgtctcaatatgcatgccccgcgggagccacatctcaccagtatgaagcggatcctgcaatacctctagggcactaccgactttggcctcctccttcgacgatcagcgaccaccgacctcgtcgtctacaccgatgtcgactgggtcggctgtccggacacgcgtcggtccacctccgattttgatgtgttccttagcgacagtcttgtctcctggtcctcgcacatgggtggattggctttcatgggcagagtattgctataatacttccttccacaccgctcttcggacgacaccttttgaggtggtgtatggcaggccgcccccgcccttgtagtcgtactcgcctggcacatcacgcacggaggctatggatactctcctacagaaccgcgacgacatattgactgaggttcgccagcgccttcttcaagctcaggagctgtccaagaaacactatgacaccgaccatcatcccttggagttcgctgttggggactgggtgtggctacgtcttctccaccacaccactcagtctatagaggccggcgcacggaagaagctcacgcctaagtacgcgggatcatttcgggtactaaagcgcatcagctccatggcttataaactgcagctatcggccgactcacgccttcacgacgtcttccatgtgggctcg

SEQ ID NO: 33829 - DNA, 558 bp, Zea Mays
gcaacttcgggggcagcctgtctcgcctatcgattggaggtgagcaactactcatctggtttgccttgctctcctctccgcataggggcttctggtgcgcggtttggggctcggtgatggctggatacgtctacatctatggcgccgccgctgggttcctgtgcacagccgtgttgttcgtcggggagagaggaggggaggaagaaaggatttagtccgttagatgtcgatccggcggccatgatcgcgtgtagcgtatcccttcgtcaaatgtatctgagccgtaggatggtagttcaaagaccgagattagatcctgtcctcgtaaaaattctagccgcaagattttaatctgatgccccacgttgcgtaccggttcgtagtgaattgggatctaatccgcaccgtccattcgcgatcgtgcgacccagatttgatcataccccttcgcgggtatggtttactaaagagtccctgtccttttaacaaatgaacccgcagtacacccagggtcgctctgtatcttagagacgcttacactagggcccctgtgttttc

SEQ ID NO: 33830 - DNA, 730 bp, Zea Mays
ttatgacttgcccgaggcaaagccaaaataggacaggcagtcacgactcttcctagaccactctcgggcgagagacacagtcacgactcgtccgaggccaagcctaggcgggacaggcaataacgactcgcctgaggtcatccgcgggcgggacagacagtcacgacttgcccaacgccaacccccgggtgggatacacagttacagctcgcctgaggccaaccccggtgggtacaaagttacaactcgcccgaggccaaggcaagatagaacaggcaatccgcccgaggcaaccctcaggtgggagaggcagtcacgactcgcccgaggccaagcccaggcaggacaggcagccatgactagcccgaggccatcctctggcgagacaggcagtcacgactcgccagaagccaacccccgacgggagacacagtcacgactcacccgagaccaagccctggctggacagttagccacgactcaccggaggccatcctcaggtgggataggcagtcacgactcgcccgattacaacccggggtgggagaagtagtcacgactcgcccgtggccatcatcaggcgggacaggtagtcaccactcgcccgaggccaacccccagcgtgatacgtagtcacgactcgctcgaggccattcttgagcgggagaggatgtcaagaatcgcccaaggccaagcccggatgggagatgtagttacgactcgcccgagg

SEQ ID NO: 33831 - DNA, 346 bp, Zea Mays
agctagcttagcaggagggagcatgctaactcataatgccttgtaattactgaatactgatgaaccagcagagccatacctcattgacatcctcaagtagctctgacaaacaaattaggggacactacctctgcgtatctgcataagggtccaagagaggtggggcccggccataggaacggagctctcagttcccacaccatgcaccagtgaatgtgagcagctggtctggccttccagtaatccgatctgcatgcagtgtgatccaggattcacgtggataaggatgaaatcaagagagcgctagctaggatcacacgccaatagcacaaggaaggaaggaatg

SEQ ID NO: 33832 - DNA, 685 bp, Zea Mays
catttcatatacttatgactatgtgactaatacatgctcacctcttctatcattttagtgatctcacctgcccgtgtgcccatcacctgtcctgcctagatcttctctctgtctcatgagatttccaggtagcgatcatttatgatcttatcagctactatctactcctgcttaacttttcactcactcatgcagctctcaggtcaggatggtgtggacaaagaacgtctcagcgctagggggaggagacaacgaggaccctccttgccccttcaggcaggtcaaggggaagacggtttaccgtgagcagtaggagggccggaagaagtcatatggatagagtcgctcgtgcagcacttgcatcggcagcagcagccgagcaggcagagcgaggaggacagttgcagatttcctctgatcagatagcctacagaatttgtcgcctcgcatctcggccttgctccactgctccctccacaccttccgccacagtgtctactccacctccaacttcaccagctcctatcgctccagagccatccaccacttccgctacacccaccacctccaccactctggcttccattgttccccctcctgctcccattttcgctccgcccattccaccaccttgcttcagcgagcgtgacgagactgaggtgcgacccctcgctgctgatccccg

SEQ ID NO: 33833 - DNA, 312 bp, Zea Mays
gtccagctggcttattgaagcttggtcccttgggtggaaacccaaaggatcgagttctctggtgtcggtcttgctgctgagctcggaggacttggaatttcctcttgaggtgacctttttcttcttcccttgccctttccacttgtatggctttgtttgagaggtgcgagaagctgaggaaatcttggttggcgaggatggccttgagttctggtcttagccctttcaaaaagcgggccatcttcttggcttctatgctgacgtcgtcaggcgcgtagcgagccaattctgtgaatttgtgcacatactcac

SEQ ID NO: 33834 - DNA, 359 bp, Zea Mays
tcagaacgaaatgacaggagctctgcctttcaattaatataggaaaaagagtttatgtacaggcagtagccagattagctgggccaacaacagaaaacgccaaacacgaaactcgggatatggaagaaagttccccagtcttcttttgttcttgaagcgacttaggtggaatgagacataacagtgctattatgagcacagcacaagttcagtagggcatatggtcatcttctgttgctttctgttgattcattattttccaacagtcgtaatctttatgaactttgaagtgccaatctgagtgaagttttatctcatacctactgcacagtgcacacaagcaatattcttcctgttcg

SEQ ID NO: 33835 - DNA, 347 bp, Zea Mays
atgaaagtttgtcattttctttttttagcgcaactgtttccttattagttaattccataaatgtgggaaagtcctgtgtcgactgttttaagttttccgtattatagttgtacggtacagttcctgactgtttccattcattttcattcctagtggaaaaccattaacagccactagtagagtgcccgtgctaacgctacggcagtatttcagggatgcacatgaaaacaaccaaatgacgatatttatttccatagtttaagtttcacgcaattgtttgtaacagacaataaatagtagtgtggacgtgctaacgctacagtaaaatacaaaacaagataaaattt

SEQ ID NO: 33836 - DNA, 356 bp, Zea Mays
agtttgtccatcggactgtgggtgataagcggaactcatgtgcaaggatacatcagctagggaaaacagatgcttccatagttggctggtgaaaatccggtctctatccgacacaataactgatggcatgccatggagccgatagacttgttgcatgaaggctttggccacaacagaagctgtgaagggatgcttgagaggaataaaatgcccaaatttggaaaagcgatccacaacaactagaatgcagtttttgccacctgaaactggtaacccttcaacgaaatccatggagattgattgccacgcaccagcaggaatgggcaaaggttgcaacaatcccggatacttgaccc

SEQ ID NO: 33837 - DNA, 535 bp, Zea Mays
gcagttttgatacttaatctttttttgttctgcatgtcaattatgtttacactgaaagcaacataattcgttttctcattagattggctaagttttcgaacttaaagaaagagggatcatcctttgctggaagggttgttgaaccagtgctgcggcttttaaatcaaaatggtctagtagctgtatggtctactcttttcattcttatggcttatttgtttgagttcaaccactcaatggtaatatgtgtaaattatatctatttctgcaggacgaagcaattgatttgctgaggacagttattaaattgtacccatcctctgtaaaccggcactacaataaagtacatcttatttttatttcctaatcatttcctattctgggttagtatgtagttatgataggcttatattagttagggtgggaaccatggattgtagtggaaggaggtctgagggtgaggaacgctggaacggggactcaagtgatgtcctgttgttgcctgcggctagggtagccggcagtggcacaggat

SEQ ID NO: 33838 - DNA, 277 bp, Zea Mays
cgaacttgtcgaggtagtccatgaacacgctgttcattagatacatgaagtaagctggcgcattcgtcaatccgaatgacataaccatgaactcatatagtccatacttggtgatgaatgttgtcttcggtatgtctgaagttcggattctgagctgatggtaacctgacctcagatctaactttgagaacacactggctcctctcaactgatcaaataggtcttcaattcgaggcagagggtacttgttcttgatagtgacttcattcaaagctct

SEQ ID NO: 33839 - DNA, 338 bp, Zea Mays
agctaattaagttatatttcaaatgtcttcagtacttcgaccaacatcttatgcaagggaaagcgaagcccagccttcataaaacttttaaataccaccacttcgtctgcttcaggaagaggaacattactctcttttctggccctcactatagatatatcatggaaatatttgcccttcattgcttcaatttgctcttgcttaacagtggatttcccaaaaacaacatgacttggcctccatggccgatcttcggcatcttcgttctcactctcaacatcaaaactctcgctgtcgcttgagtccccagacaacccaactaacattttatcaatgat

SEQ ID NO: 33840 - DNA, 815 bp, Zea Mays
caacaagtgcgttaatcaaagtcttttatttaaaagacactctgcgcaaaagtcgcctaagggtgcagccaaaatagcacaataagtgcgttaatcaaagtcttttatttaaaagacactccacgcaaaagttgcctaagggtgcagccagaatagcacaataagtgcgctaatcgaagtcttttatttaaaagacacttcgcgcaaaaagtcgcctaagggtgcagccggaatagcacaacaagagcgttaatcgaagtcttctatttaaaagacactccgcgcaacattcgcctacgggtgcagccggaatagcgtcaatcgaattctctcattaaaaagacactccgcacagagtcgcccacgagcgcagccggaccaacacaagcgtacgaatacggccaacaggccacatcaccatacaaattacaattacatacacatggtgagggcatcacatattacatcagctcaaccttcaggatgatacccatctccctgtaattaaacagcattatcctcaattcctcaccctcaaaaagcttccgaagatccccctcgcctatgctcgccccagtcggcgaggacaacaactctcgtttaccaacccggtctactcggagacggccacgctccatccccatacgacggcgcctgccacttcgcgaaaattcacccacactatgttttcccaccacccttcactgcctacacccagtactcgcaccaggaagatccccagcaccctccacatgcggcgaagtctccaccgtagccacatccaacgcaacaaaataatccaagccttcatccga

SEQ ID NO: 33841 - DNA, 296 bp, Zea Mays
aaaaagtaatgatacagactcgatattacataacaggatacaatacccattatacaaaggttcaacctattatacaacagtacaccctacaataccctactactctacttttacttctattacactcttattcctgcttgccattactcttggcggcttcatcgtcaggtgtgggagtccagacatcaaccaacctcaaagaaggaggaggctcaaaaaggtctaactccccacccagcgcacgtcccgcaacgtgagatggtccagcttccgcctcagcaggtggtgcaggctca

SEQ ID NO: 33842 - DNA, 613 bp, Zea Mays
tgctttagcaggggccgagtcagaagattctccagccaacatattgagtacaacatctatttctccatcatctggactcgctggcatctcaaaatgaacttgcctctcatcattaggaagatcacaaagaggagcaaccagagcctcaatatcttcaggagagggtcgcactctaagacccagaccactatcaccagcaggagggttggacacgaaattgaaaaaggacttaggagatggcagattccaagtagagtaggcaacaggagcatcaacatttgatactttgcctctcaagatcatgtctagtcggctcaccagatcctcagtaggaattctcctattggtaacccgagtcgagtcagtaatgccactgtacaaataagctgggtatgctctatcctccaagggctgaatattcttaaaaacaaagtcagcaaccacggcctcggcggtcagacctctctccttcagcagacagatttcagcaagcagaaccctagcttctgttacctccaaggcagtaggagactcaacccaacttagagtgcgcacatctggctgtctccccaaccaaggggggagggacttgtcgtggttttccacaataaac

SEQ ID NO: 33843 - DNA, 274 bp, Zea Mays
ataggtgaaaccatcttacacaagactagcaattcaaggctttgtccatagcaaagtcgtgaggaggtgaatcctgtactgcaagatgtagctcaactcgtatcgggtctgcactgtaaagctggtatatgaaagcgtagagattgagtcaattggataccttggctttggtggggattgttggaattaggcccactagtgtgtggcccaattcaataaggaagacaaggtggtgtgtagagatggcacgagactttagtcccatatcgcccat

SEQ ID NO: 33844 - DNA, 275 bp, Zea Mays
taactatgtagggtgaaaaatctggcactagggatgagcttgggacactgttccgccctagccgtcgtacccacttgcctcacgaccggtccagataacctcgccggagttggccgcctactgctcgggtgccacgtgcctaagcgcaataccacgtcgcagtgactcgccttagcatgtccggtcatcgccggtggtcttgcgatggtgaagtgccacggtaaccctacaccagtaactctccccctccccggtcgccagcgcgccattccaaa

SEQ ID NO: 33845 - DNA, 446 bp, Zea Mays
gataacaccatcgatatcctagagaaccagctccatgatgtgcaggaagagcttgcggaggccaaaattcacctagaaatacaccaccaagacatgagcactaatgaggcaggcagtgagggaaaggtggatcctgaggaaatagagccagcttccggtccgaacgcggctccctccagagtgccccctacacctgcatccaatgttgcctctaccaatcatggttagacgggttagatttaacatgttagaagaatggagaacccacgcgagcttagttttggcaccaacttttgaactaggtttagggtggatctcctaatgtgttgtaacccggagaaacttgtatgaacgatgcaatgaatggatggctatcctcatttggttcaattttatgtctttttcttttcatgatataaagtctttgtttagatccccgaatcgag

SEQ ID NO: 33846 - DNA, 406 bp, Zea Mays
ctcattatcatctaggaaaatagctcttttccttcttttggattccaagtaatccctcatctcctttctaattgcagtagtggtctttgaacatatctttgtatctccatagccacctgctagatgttgctttagcctttttatccctccggaaactatgatgtcacaaagggtgcatgtcacttgatctctatttgccaaatttgcccaataaccatacttccaacctggatcatttgagctagccttccttgctttgtctgtctttggatcatagttgacattgtttactgaagatgggctagccattaattgatgaaggtggcagggtgctgttggcctgaggaagcagtagagcagtcagtagatgaactgaggaagcagagccacagaggaagaggaagag

SEQ ID NO: 33847 - DNA, 453 bp, Zea Mays
gacgaagaatgtctcagcgccagggggaggagacgacgaggaccctccttgccccttcaggcaggtcaaggggaagactgtttaccttgagcagcaggagggctagaagaagcgtcgtatgaacagagccgctcgtgcagcacttgcagcagcagcggcagcagagcaggcagagtggggaggacagttgcagatctcctctaatcagattgacgacatattttgtcgcctcgcatctcggcctcactccactactccctccacacctccgccatagtgtatactccacctcccacttcaccagctcctgtctagagtcatccaccacttccgctatacccaccacctccaccactccatcctccactattccccctcccgctcccatttctgctccgcccattccaccacctcgctttagggagcgtgacaagactgaggtgcgaccccgag

SEQ ID NO: 33848 - DNA, 328 bp, Zea Mays
gggtacccggtgctcctcgaacaactgaaccgcgtactggggaggcgtagcgtaaccggctccctgcagcacctcccacaaaatgcggggaaagccctctcgtgcaagcccgtctgtgtgggaatgcatgtttcctccttccgtggatacgtgagaagtcatctttgtaagggaaaatgtaagcgaaaaagagaaagaatcccaaaaataaaaggaagctagtgcttggcttttcccatggttaagttgagatcttcgatgtagacttaaaatcttattatgggtgtctctttgcttatgtagctttttattaatattgacattttac

SEQ ID NO: 33849 - DNA, 391 bp, Zea Mays
ctcgctacgatctcggcgaggatctcggacccggttccctaacctcgtcgttgccgggtataaatgtgtgctagctgggggcccttgctccatcttcaaccgaccaagattcaccgtcaaaatggagaaagacagctcgcgccgccgccatagatttgccccgcggtcgacttcccggtcgtggcagttagcctaggggcgccagagggttccgccgcacgcgttggacacctcgttgggcaaaagtcaccaccggagggctggtgtttcctcgctgtcgtttatccccaatcgcggttccgtcgggcatcacgggtggaggacacctctaggtttaccttggtgagtcacccttcgacgtgttcgctattgcgttcgccttctttttatg

SEQ ID NO: 33850 - DNA, 1324 bp, Zea Mays
ttgctgctgctgcattaaatggcacaccgcattcataaaaccacaaagcccattgcatatccacataatccttctcctctttggacttcatcttggctggaattgtgggttgagaacaccctttacgcctttcatcaactacatctttaggtgatttccgaagcatctccacaattgagttttgcttgcttgcttgatttgccttggtcttgattgatgttggagtcttatacagatatgttgcacgtctttgattggctgcagtccctggacttggttgtaccttagagccttgggattctataggcgcatcttgttgaacttgaacagattcagctgttgcatccaccaccattacatcctcctcctcctcttgctgctcattatcatctaggaaaatagctcttttccttctattggatttccaataatccctcatctcctttataattgcagtagtggtctttgaacatatctttgtatcttcatagccaccttctagatgctgctttagcctttttatccctctagaaactgtggtgtcacaaaggttgcatgtcacttgatccctatttttcaaatttgcccaataaccatacttccaacctgaatcatttgagctagccttccttgttttttctgtctttggatcatagttgccattgttgccagaagatgggctagccattaattgattttagttagtgctgctgctgcataaaaaataggagggtgatccaaagcacatgaggcagtaaggcaagcactaaggcagtaaggcagggacgcagggtgatccaaatcacatgaggcaggcagacaggcagcagcagcagcatgaaaaatgggactacacaccagggcagtaaggcactaaggcaggcagcagcagacaggcagcaccgcagcagtaagacacacgagggcagcaaagcactatatatcaactcaagcacgagcacactggagtgaccatcaacacctaacagactagcacaaataactagctcaagcacgagcacaagtcaaagtccaagaggcaagcacaagcaagcaggcagtatatccaagagattcagaacagagagaacagaggaagaaggtgcaagaagagtagctttgatccgatgggaaggacgctagcagggaggccgaaggtgtggatcgatgggcggggatccaatcggaggggcgaatccgctccaatcgaagggcaaatcggcgggtggaactccaatcggaggggcgaatggaggctgacggtcggatggaggcggacgaccgcgcggactgtagctgctagcgccgccctcttttgtcttct

SEQ ID NO: 33851 - DNA, 317 bp, Zea Mays
ggagaatgtcagagacctaccagcgccagcacaagatggaaggagcgcgggaggaaaggagccaaatgaaggtgttcaaatggtgggccgtcgtattcgcaggcctaatctctgagtcaaaggagcagaatagatcgagcaatgggccttaggccataactatagcagcaatataaagcaaggcgtgtaatcagaagtggacagggaaaaacaacaagaatagaatcattctactcctttacctttctgtgttcctccctttctattaccttcttcctttccctcgccgagacaaaatggtactcgaccaacacaac

SEQ ID NO: 33852 - DNA, 379 bp, Zea Mays
tggaggatagcccggaggagtttcttcctacgcccaccctattgacagaatcactagccttcgtagctggatcatcagcttcagcacagccagcaccagcagtccaagcccctactcgtggaggtgacgacccagatgactctggtgacgatgatgaagacgacaaggaagaagaagaagatgaggaaaacctcaacgatcaagccaacgaagaaaagtaggaccactacgtggggttatggcctgtcactgaacattacacctcaatgttcgagacaaggcacttccctaacctgttgcaggatgttctgcacgcgttgggaacctacgtccgacccctgtacgagaccaggcgagtgtacgagcctccttgggcttg

SEQ ID NO: 33853 - DNA, 327 bp, Zea Mays
cggagacaagctaccgagaccaaccctttggaccacatagaaccagaattgtctagagaaaacacatcctaccaataggtggatgattgtttccttcttttgatcacacaacaagaaagaagatgcatgtggcaggtttctatgtgctgccagccagaggaagagggcacatttggggtgcccatgatttccagatcttgtccaaagcatcctaggagacagtgccttaaaacatagcttcataagcagatttagcacaataggcctttgaactagataacctccatacatgtcgatcagccaccccagggatgagctcttcctcag

SEQ ID NO: 33854 - DNA, 591 bp, Zea Mays
gggccattcatcgagttggagtaagcaggtcctgatgccttcaactgggggcagttgttcttgaagtgactagggtctccacagtgccaacaggcatttgctggtggttggttgcttgcaactgagggggcctgaaaggagctctgactctgctgactgaaatgtgacggagtgggtcccactggtctattgaagcttggtcccttgggtggaaacccaaaagatcgagttctctggtgccggtcctgttgctgagctcgaaggacttggaatttcctcttgaggtgacccttttcttcttcctttgccctttccacttgtatgactttgtttgagaggtgtgagaagctgaggaaatcttggctggctaggatggtcttgagttctggtctgagccctttcaagaagcgggccatcttcttagcttctatgctgacgtcatcaggcacgtagcgggctaattctgtgaatttgtgcacgtactcgctgacagatcttccaccctgagttagttctcgaaattcatcttccttgggctgaacgatcccttggggcacatggtgctcttggaaagcagtttcaaactttgtc

SEQ ID NO: 33855 - DNA, 321 bp, Zea Mays
cctcattgcccttggaggtgaacaactcaaatatgctcttcagttgtcattctcagcatcaaataatgcagaatatgaatctctgatccacagattgaacattgccatatcactgagcattaagaggttgatagtatatagagattcactggtggtcataagaaagataaataaagactgcgattgctcgaataattctattggcaagtactatacagctgtccgaaaattagaagacaaatttgaagggttggaatttcatcacatggaaagagatcgcaacgcagcaacagacgcgttgtcgaaagtaggatccagtcg

SEQ ID NO: 33856 - DNA, 363 bp, Zea Mays
gccatcggagccactcacatggtctgtctcccaccaagcaccgcaggtacatgaggatgacgtagttggccgactcagactgcccatcgggctaggggtgaaacgccatggtcatatgcagcttagtccccatcatctgcatcaactcctaccagaatgttgacgtgaacaccatgtttcggtcggagaccatggactgtggaacaccgtggaggcggacaatgtcgttgaagaaagcttgggcgacggattcagcggagtacgagtgtgccaatggaatgaaatggcagtacttgctgaacctatccaccatggtgaggatcactgtctcaccgacttgccacagacccgtggcagcgcctc

SEQ ID NO: 33857 - DNA, 399 bp, Zea Mays
gattttgaactgcaattgaactttacttgaactgtttagaagattttgaactgcacttgaactgtaaactactttctggacacccgcatctgactagtttgtctgaaacatttaacagctggtagtggaaccgaaacattgacaagcaaacttgtgggttcaagctcttctcataatcaaaagaatagatgctggctacacataaagaaatatttcttccatgagaataagaaatatttacattataccataatctcctgatagagactaggaaacaagaagcagacgaatcacttgaagaggaaacgggacggatgacaagcgtggtgcgtcggtggctgggtagaggagcggctaacgccgacggtatgaggctgtccgcgggtggggagctggccg

SEQ ID NO: 33858 - DNA, 545 bp, Zea Mays
tttcactgaatcatatgtttatctggtggcaatatacatgggataagtcaaactgcagtgtagaataaatttgagggctacattcaatggtagctgtctatctttcatgttccttggttacaaatgttgttcattgattaccgtgtcaattttaccatgtgcagattacatgatctaagatagctctgcccttgtggcattctgattactgagttatagttaatctccagatctagagctggttgtattcttgggctgaagaatgtcatattgctggcttgttatcctccctgaaacatcattattagtggcaccacattttttatttattttttccttgaacgacaggggcagagatgcatttcatgtcatttagaagaagaacaaaaggggtacaaggaaaaatcggagacctctccctgacccacactacattcacgccttgtatttcttaacaagcacgacaacagcataatcacctactcaagtcagggatactgggatgaacaacctaatggggagctcactaagagccaatactccaa

SEQ ID NO: 33859 - DNA, 410 bp, Zea Mays
tgtgtttcatcttgcatcaatccatctgggcagggacacgcagcgtcaaattcactagtcggttgagggtcctcgtgggtccaaaacgccgacacttggcgtgggcagcctgatgggacgcgaaatggttcgtctgctgcgttgcgcttgggttgcatgggggtctggttaaccttccactcgtcacagctgcatttgttgcggcgtatctccctggcgctctaccttaggtagtgtggtccgtgcccctacgttctgcctctcagagaccccctcctattgttcttctttcttgtgtcgttttggcttactccccgcgtttatggcgtcattcccagctagctcgatcaaagagagtcgtctctgtggtctagagaagaaagggctcatccccccaaaggatgtctcga

SEQ ID NO: 33860 - DNA, 325 bp, Zea Mays
gcgtcgtggtctgggcaaagataacggtggaaatgggccgacccaggaaggcgatgggctcacgtctggattattcgtggcttgggcgtgatcccgttgatgctgttcgcttttcccgcgcccgacgtccttgaacgccagggatggctcggaacggaggcgccgggttttcctcgggataagtgaagtctgttcactattagctaagagataagctggaagagtgtgatcagcatgtgcgcgggaagtgccctatggtcgtgtatataaggctaagggggatcctcatcactttcatctcattagcacctcaccacttgtaaac

SEQ ID NO: 33861 - DNA, 300 bp, Zea Mays
gcacgaatatctgcatgtgctagacgtttacgactgcataacgttgtgatacatgatagcgtaaaccatgcaaacgtttacgacaggatttgggataaggcaagacgtgattttcgtgcgcgtaaataaagacgcagttacggcaggaaactaatacaactttacagccgcgtccacgttcgctcgtccatctgaattattggcggcggttagcggcggcggaagtgagaggtccggccggcgatgggcggcgagaatatgtccaccaccggcgctggcgatgacatcctgcctgtaaca

SEQ ID NO: 33862 - DNA, 673 bp, Zea Mays
tggctctcgggtgtgctaccgaagcatacttgacctgaatgctttttttgctcgcagaaatcgaagaactctgaacttgtgaagttggatcccaggtcggttatgatactgttcggtattccgaacctgaatattatgccttgtatgaattccacggctttagctgaggttaaagaagcaatgagtttgaactctatccatttagtgaatttgtcgattgctaccagcacgtgagtgtatcctccttgcgatttcttgaaaggtccaatcatatctagcccccagcatgcgaagggccaagtcaccggtatggtctgcagttgttgtgctggtagatgttgttgctttgacaagtactggcaagcttcgcacctccgaactaactcggttgcatcacttttcgctgttggccaatagaatcccgacctgaagaccttcccgactagtgtcttggacgctgcgtgtattccacattgtccagcatggacctcatctagaagtcgcttcccagtagatgagagaatgcatttcatgaagatgcctgatgcgccccttctgtatagtgtctccccaatgagtgtgtagtgagctgactgtctagcgatgcgctcggctgcatttttatcgtttggttcctcttcattctttatatatctgatgatcggccttgtcc

SEQ ID NO: 33863 - DNA, 706 bp, Zea Mays
aactgggatgggactcagctccggcaaagtccgagtggatggaacgttgcagtccgttggtgaaggcgcaatgggggtctgcaggtcgggacctgtgcggacgcctgttcatagtccgcttcattctcctcctttgaccccttcttctaggagtaaggtgaagccatggcagggcaagttgctgtcgccacggtgttcgccaaagctcacacttggagatgtcctatcaatggcgcaagagcgccggaaaccaaattacaacaatgggcgtcgtgttcaggggatgaagaaggcggaatgtacggctgggttagtggggcagccggaggcagtttcaaatttgcttccttgtttatttggaaaggatggagatcgggaaaatctgcaggaatcgctcacatcttcatttccggatacaaggagccatagtacgtatgtgtatggtaggcgtagatttgggagagcccagcagctgaaactcagccctaggattccttacagacctacgccagggctggcttccctttttgcacgtacgggcacatgggtgactagtgcccgggcagttcattcaactctcaggaagtcagccaccatctcatacgtggacgcagcgaggaatacaatggtgtttggcggtgatcagggaggccggggtggtggtagaggccatcagcaatccgggggtgcagacgggtatgcttca

SEQ ID NO: 33864 - DNA, 296 bp, Zea Mays
aaaccgaggtacctcggcgtcgagccctggggatctggcagtgaagctttgtcggatcacgcgggtggttgtggtgttcggattgggggtgcgaaagtgacctgaggagggtgaattcgggccgagctcgggattctacccctttgccgctaagcatcaaaattgatccccgcctctacacgatcgctagtaaattaaccattcgcatgttctctgtaatctccgcatcactatgcgtgcttcagcgaattacttggagcaccggggcgcctaatcggctgtctccggcaagctac

SEQ ID NO: 33865 - DNA, 295 bp, Zea Mays
aatcctctggaataggccatgccatctctcaagttgtcaatgagttacatgttcctctcctatcatttgcggcgacggatccaactctctctgcatcagagtatccttacttcttaaggacaaccacaagtgattatttccaaatgaatgctgttgctagcattgttgattactatcaatggaaaagggtgactgctgtatacatcgacgacgagtatgggcgaggtggcgtctcggctctcggtgatgcgcttgcattgaagagggcacaagtttcatataaagcaactattcc

SEQ ID NO: 33866 - DNA, 321 bp, Zea Mays
gtcattcactccacccttatctcaactcgagcacacaagtgaagcacagtagggagagaaagatttcttcactttccaacccaatcactgaaatcgactgaaacatcactgctgctccactccacccctctctgtttagtgaatattatctcacaatttcacatggcaagaaatctcgcatacttaaccaaagacattctccaactataactctatcatttttgtacaacacccccaggctgaaaccacacagaacaaaagctatctggcaccaaggtagggccaaggtactgaaaagctcagtttcagtttaactgaaac

SEQ ID NO: 33867 - DNA, 471 bp, Zea Mays
cacgggcacatgaggtggccagctcttcggcagctgcggccactggcacgtgtgatgcttctgtggcttcaatggtttattcgcgcatgcgaggctccatgagacagtggtgatggactgatggtgtctcgtgatgcgcttggcgaggcagctatggccggcggagcagatggaggcggcacaactatgtggggttgaggcaagttcccttcgtaacttcagcccgtgtgtgccgccctgctgccaacgacatgtgatgttggtaacccatccctcctggtgggatttgaggttccagtttcccaaacccaaacccaaacccacagtatatcccaatccataaaaccaaacatgggttatgaggccattgggttatgatattcctttcccatcctttctatcccatgaaccaaacgccaccacattagtgccacatttcaatgttttacattatatcactgtgcctgtctt

SEQ ID NO: 33868 - DNA, 464 bp, Zea Mays
ctgcgagcgagctaactgggagctcgcctaggtactggctgatcgccaggacaccatcctggaacatcaacaacatggtggaccccccccgaccgacaccacagacagccccaagtgaccacagatcgacgcgtagctaggcatgagggccacaagaggagacacgcagaaaactggggttgtaacagaacgactccatctagtgcaaatcacggacccagtgctcactaccaaggattgatgaagaatcaaggaatatgtagcaacatttttacttaatatggctccattgatcggatcaaggctcattctgatccatgcaccttcctccccccgggctccactcttcggaaacaaagcatgccgaccaaactaccgggcaacctagtcaccacgctatgctcgggaggacaggaaatagggaacactctcccaagaaagatacataccatacgacggaaggc

SEQ ID NO: 33869 - DNA, 296 bp, Zea Mays
cccgaatctatttacgatccaatcgatatatatgccaagaacaacgagcaattttcaaaattgttttagtatgaggggagagggggggattaattgacggccaaatttaacaaccaagaacgtattaaggtagagatatatagctgtagcctcgtggatggatcgtactgcacctgggatgggggttgttcttgatggacttctgcccgtacttcctccacctgtacccgtcgctcggcgtcttgccgccacagctcctcaccttcgtcgtgtgcctctccggtgcccgacccgcc

SEQ ID NO: 33870 - DNA, 477 bp, Zea Mays
cttcgatacatgtggatcgggatggatactagagcatccaaataaaacctaatcaagatcttgcacacagtgccgctaccttgtgtcatagtccgcaccagtagatgggtaggctatcggtaggatctttccttggcaccatgacgccatctacgctcactatctcactaggtctcactatgccgttgcaacgcggcaatggctgccgcttgctgccgctgccatgtaccgacgcatcatcgtcagccctcgctaaccctcgcatgttgtcacctcaccgtcaccgtttcgcgttggattcattgacatgtgacacgccacactgatgcaccgaagcggccgctctgccctagcacactgccaccaccggcctacctctttgccctctccaactctcatttaagatgaccaaaaaggtttttttatattcatgtcattttagaacacttctcgtattatcacttaaccaccgtaaat

SEQ ID NO: 33871 - DNA, 347 bp, Zea Mays
gccgggtcgagaagcatcaagagcacacaagagagctgaaacaagagcgaggagggcgtgatcggacctgtggagagctggccacagcgagctcacacactgcggtgttcttgacagatttgggggaaatcccaaattggggagctgtgggggacgattggaggtgagggctggttcactgggtgcacaactacttagcggagctcactagggcggcaatttataggttgcatcggcggtggtggctaattttggagaagacgcgcgacggccggagagaggggtggtcactggcgcaactaattcgtggctttcaccgtggcctgaccaccggcgatgaccggaca

SEQ ID NO: 33872 - DNA, 582 bp, Zea Mays
gttctatccgtgttttcttttttacgtgtatgtgttcttattgtttatgtatttacttgttcttattatttacaattgttgcttcaggaatttgcaacgtgcttccctttctgcccacgtgctcgctccaccgaatacgttgcatatcaggtatgtcgcaggttctgcgtgctccattttatttcctatactttggttaattgttatggtttacttgttacatttgcacttgcttcatacatccatactctgtggtgggatcatggtatactgttggcaggttttccctcttgctactgtgctcgctctctgatcatgtgcttctgttgtgtcggtgccatggtgttgtgtttcttttgtatttgtgtagtcttagctccgaggcagagttacctcagttcccacgtgtggctttttgggagtcagttttcgtgtgttgttgacccctgcaggttactctattcaaagttctgaaagtttagcttattaggatatgcatctacatgtgcgttgaccgcaaacatctagctattgcgtgtaaggggtttctgcaaagagtaaaagggttcgcatataaatttg

SEQ ID NO: 33873 - DNA, 385 bp, Zea Mays
tggttctgcaatactgtaatgctccacatcaattacagatgctgatggactctgttgttctgtacctatccagtcccaagctttggcctcttcgaatatcacatctcttgatatatgaagcttcttggctactggatcatacaccctgtaacctttagtacctttctcataaccaatgaagaccatgggtgtcgatctgttggtcagcttggatatgcccggccctactttattcacatggacaacacaaccaaaagttctcaagtggtgcacactaggttttctgttgtaccaagcttcataaggtgttctgccttgaagacttttggtaggggcacggtttagcaggtatactgcagttgtgacagcctctccccaaaattct

SEQ ID NO: 33874 - DNA, 720 bp, Zea Mays
gtgcggcggatggtcgccgacgggtgcgcgccagaccggttcactatgtcagccgtgctgccggtgtgcacgtctgcgcgctggggcagggagcttcattgctatgccgtcagagattggatgtgtggggacgatgatttccatgtgagcagcggcctggtgtccatgtactgcagggttggccacccggactctgcaagaactgttttcaataggatggcacgaaggaacgttgtttgctggacagccatggtgggagggtacatagagaatggcatgtttgatgatgccgtggattgtttccgggcaatgtggcttattgatgccattccaccgaacaggattacgttgatcactgtgctctcggccattgaggccctctcgagcttagcagaggggaaacaggtgcatggttttgcagtaagaatgatgatgcacgcagagatgtcgctgaacaatgctttgattgatacatacgcaaagtgtggggccttgcattatgcaaggcggatctttgatgataccagttggtgcaaagatgtgatctcatggggtgcaatgattttgggttatggcattcatggtatgggtgtggaagcagttgctttgttcgatcagatgctttcatctggggttaaacctgacagcattattggacttggtgttctttcagcttgttgccatgcaggtttggtgttgaagggccttaatacatacagc

SEQ ID NO: 33875 - DNA, 598 bp, Zea Mays
ggggtatgccacgccgagccttggatcagagaataacggtggtgattttaaaatactggagatcagttcctgatcgtggataaacggatcaacggctgcgatcccctggtccgaaccggtacccttctcccaatcacgcacgtctgattagcaaatcaacggtcacaagatcttcttccccaaggcgacagccaggttgcatagggccgagccccatcctcccgagcggcgtgagcacccaaggtggccgcgcccggcgatgcccaggcaccggtacagaaatccctgtgcctggttctcaatcgcccgcagacgacacacccatacctcatgaagtccggcaatccccctcgatgccccccagaacccagcgacggcagcatccccaccgaacgcaccacagcaaggcgaggcgaacaacgatggcagcggcttcaaggtcaaccccccagcccacactttgatttattcacggtgtttggccgacctcccagaccgcaccgcagagaaccacacgaccgaggcaacaccagtgatggttttctttccctctctctttcttcttgcgtggctaacttggggctgctaatggttggat

SEQ ID NO: 33876 - DNA, 332 bp, Zea Mays
ctagtttccagggggttctttaacaaaagtgcccgcgaaggggtatggcagaacatgggtcgttcgattcacattcgagggctcagattagatttgacttataccgaaacggtaagcgctgttagccgctggatccaagatccatggccacggtttaatgaagctagatcttgcctgagccgaaggatggcaaatctacggtgcccgtttgattgcgcgaacgggtaaggggatacctaatctcggccgttcacaacctatccgacggctcgcaccattcttccttccctcgacagcttgcgaccaggccgcccccaaccgagtaccacggc

SEQ ID NO: 33877 - DNA, 324 bp, Zea Mays
cacacaaaagaagaaaaagtagattcctgaacagcagtagcacatctctattgatcacataggtttcaagtgagggagttcagaagacatcagaatagctacatttcttaaaaatggacaggaaccaaatatccacacagattatttatgccctcggacaaagctacattacagtctccccgatcgaagcaaactaatggaacaaatgctagtaaatgacagcctgcaagctaaggtacgaactatgtctgcacgattataactatcaatagtggatttaattctatgtatgaagtggtaactatatcctcccctgcatgatta

SEQ ID NO: 33878 - DNA, 441 bp, Zea Mays
aactaatccaagtcctgtacttaaagctcaatccgcatcatcaacaacagttgtcgaagcgacaccgttttcttttcttttgcgtgggggcacagattcgatgatagtatactggagtacgtggcagtagctgtagctagtatgcctgccccaccagctagtccaccaccaaccgcgtaactttcctgggctgttgagcatcgggatcgagctgctactgccctccattcaaacgccggggaatgtctggcgtcctcgaatgatcctgctgatccgtttttgctgcgtgcctgatgcctacggcctaccggagtttggcggccacctgtatctgtatctgtatttgtatcggctggggatattgcctgtcttcatcatggctcctcgatctggcaggcaccaattaatttccgtgcaaatccttcaacgattcggttcggt

SEQ ID NO: 33879 - DNA, 359 bp, Zea Mays
cggcccacaaggagatagtctatagtttcaagctcctgatcacataaagggcatattgagccctcttctttgcagcctatatgttgtccaacatcttcctaaagcagctagccacaagaaaaaaattacatttggggcgaccaagacttccaaattctttctgagtgctcaaattgagttgatccaataaagagaccctcatatgctactttggctgaatattttccttccggagccaatctgaagatatgcttatcctctcgatctgggtgtaaagcaattgcctcaagagaataccatgggtcaaataagtcagcaagtatcccactgtcaaggtccctttaatatttgtcaaccac

SEQ ID NO: 33880 - DNA, 273 bp, Zea Mays
ccaacttcttggaagattggaagaaagaatcagctcagctgaatgcatgtctgggagacaatggcagcctagaagtcaagccaatgctagaagacctcatatgcaaggctcaacgcctggacactgagacagctggtcttatggaaaaagttcgcaaggaaccacttctagattttaggacaaatgaggaaggaatcctttggttcaaaaaccatctatgtgtaccaagaggagaagcacaagaagttctgcttgacgaagctcacaactcag

SEQ ID NO: 33881 - DNA, 404 bp, Zea Mays
acagggtgagcgtgcccaaaagctgggagagcgctgcctagccttttggttgcctcaaaaggaggagcgccccgtgctgtcgtctcatggagtagtcaaaagaaaataaagaaaggaatgcgaagctgacactacggctgtacctgtacgcgcagcggtggacatcggcggctgtgcgagtgtgcgtgcaggagtggcccgtgctgtactgctgtgaggccgcaacggcagcatgtgcctccggaacgagactggggaccgctcccgcgccttattgcctcaagtctaggcacactgtagacacctagacggacggctccagtgggatcggacggaacagatccgagcaaaaaccccataccgttactgccgtgccgtgtggacagttcgaacccatcatcgcc

SEQ ID NO: 33882 - DNA, 485 bp, Zea Mays
atttttgttttggagatttaccccacctgaacagtgagactgtgcgagccaagggcagccattacaacatttttgtgtttagattttacaacaaactggagtagtttaaacctatataattctaatatcggaagtccaaactcactaaatctaccaatggcactgcaatagatgacagttcatgagcttatgtcaaacaaaatgccgatgttatgagcgccatcagcagtggtgcaaagtagaatgtgtacttttactcctatcgccacattctattgtatcacccaactggctttgaccaaatcacagcaattgatgatcaaacagatattaacaataactgggtgcacatttactgccttggtaaacttgttagtcatgttagcctgttcgctgcggctttaatccaccggcttgtttttgttgctacttaaagatgactgattgttgcacaatgttgctttttatgaaagaatgcactgatt

SEQ ID NO: 33883 - DNA, 330 bp, Zea Mays
gaacaaccttgatgatgacaggagtcctaaacctaatataaggggtgtagcatagtgttgttcgtaatggcgatgtgagctcctcagatgagcctacaccatgggagtttttttcatgccctccactttacgccatagtccgcttgctaggtcttcctccgtttctcgtacgagagcaataggcttctacagttggcctagattcaaaggagtgtggggcttgatcggaaaaaggatgggtcccacccttgccatatcgtgccaactagagcaatagtgggggtggataaagggtggtagtacgattaccctatccataccagacccgac

SEQ ID NO: 33884 - DNA, 888 bp, Zea Mays
gttcctctcatcgcctgttccgccgcgccgccttctccacccttcgcgcaccgtgttcttgtcacttgtcggcacacatcttgctacggtgttctacgcgggatttgctgtctgtgtttctctttcattgtcttccatgtaggtttgatctacgcgccgccctttcattttggttcctgatgctttcttccatgattccgcttgcggttcgcctgatcggtattgacgaggaggtagtatgatggcgatgacgaaaaactatggttcgctcgtctgatcggcggcggggtttaatccccactgccttgctgagcttaaaagtagtccgagccactcgtttccttcctctgaacccagatctggtccgcttttttccgatatgtggctttctgtgcggttctgccgtgatccgcggtctccaatctgtggttttctgagttgttctgcggcgttcgggttcttaattttttttggtattggtgttgcgatgatgatttctcatcagcttagagatctgctcgatgagcttgggaaatgatcttgcattgtttcctcctgagcggttacctgagcaacccaacaatccttatccttgatttgtgattttgcatcgatgtagatgacattgttttggcaatgaaaaagccccataaatagggatccagacgattcgttttccaagtactatcatgcttgacagagttcactgaatttcaatatacaagtacacagacgcgggcaacgcatctgcgacatgaatattttttgttgcgatgatgagttctcatcagctgagagctctgctcgatgggcttgggaaatgatcctgcattgtttcctcctgagcggttacctgagcaacccaacaatccccatctttgattcctg

SEQ ID NO: 33885 - DNA, 662 bp, Zea Mays
gaagaggagggggctccggtgctctgcgtgaagaagagaaggtcgtcatgcgtgagccaccgtgcgcgaggaagagaagcatgaagaagaggaggcagctgtgcgtgagctgccgtgcgcaaggaagaggagggaccgagcgacagtgggtgcgcgattgcaagggagaagaggcagtggacggcggcgggttcgagaggggagacaattgccattatgaaacaaaagagatgcggtttcgacgaaatggaggtgttggggatgacttatatgttttggagacgcacccatcatacctactccaaaatggacaagtgataggcatttagggctgcgcaaacagaaaccagggttcctttcaccattaccgtcgccgtgctcagacgccgtctgtcgtcgtcttctccccttcgcggctaagcggattggatagttgtcgcggctgagtcttctccccttcgcttggacagttctcggtgcttggagatctcgcggcggtgagttctcgtcgcccttcttacccatccatctctctcccttctgttcttcctctgactggcactggatttgcgtttaggctttgtctgagttcggttcgatggatttagatccacccgaaatctctgcagtatgcatcactcgtatgaactcccccgatctac

SEQ ID NO: 33886 - DNA, 408 bp, Zea Mays
cacctgaagattggagaagaacaatggtaaacccaagtcagagggagcgagatcatggctcgacggaggagtatcagcaggaacaatttgaagaacgttgtcaggagtaagctcagccccatcagcagatactagacctcttgcgtctagctcgccgacctccaaggcgacttgtttgttcgaagttacagaagcatgcatccccgtcgccccatcggactgtggtggagatgacccaacatggacgtccatggaggtgtgggaaggagagctcacctgaacaccctcgggggctgggttgcagctcgcgccacccaccagagccggatcattaccggcaacacctctaggggctgggttgcagcttgcgctacccaccagagccggatcactaccggcgacaccctc

SEQ ID NO: 33887 - DNA, 274 bp, Zea Mays
gcgaggaacgcccgggcacagattagtgtcctagtgactggagtaggctgtgtcgtgcttgcggatcatctccgcgcagtggcctggctatccaaattccggttacacctaccgaagaagtatgacagtatgtataacccatcggaattcctgtaggtctacgtcaccactatcatggtggttggcaaaaatggcgccatcatgacgagctacttccatgtagccttggctgggttggcctagacttcgttcatgaacctcaccctaggattga

SEQ ID NO: 33888 - DNA, 323 bp, Zea Mays
cagcaattacatccctgaagactcctcaaggacctaaccatgtctatgtaatcaaacacatgcaaggcccccctaggatgcaagcaaatcaaatgaactatttacaatctattaccaattttttggtagcttaagtgctataacttctccatattatcaagcaagaaacaaaacaggtcattaccacattgcggcaatggatcatcaaggcttaacttttccaacagggaaaatagggctgtgattattaaatcactacaaaaatactcaaatctagatcgttagaagtgttttcaagcatcagatattcagatagattgtct

SEQ ID NO: 33889 - DNA, 346 bp, Zea Mays
ccagccgcacgtggacgaggactccacagcaagactccggtcgagacggccgcaatcaacagcaagtgcacaacatcgccaaccaacaccccgctgctgacgcccctcgccgccaggaatatcccccccagggccgcggaaatggaactcgcggtaggggtcgggggcgtgcgcagccgccgcgccgattctactgtctcttccatggcgaagactgcacccaccaaaccagagactgcccagagatgaaggccaccaaagacaggatggcacgggcacagccagccgacaaccctagagttgtcgcgcacacttaccagcaaccccctccaccatatatccacgc

SEQ ID NO: 33890 - DNA, 658 bp, Zea Mays
cccaagcctaagagtgtccgggggaaagtgacgttgatgctgcttcccccgtccaccaacaccttttttaccctgctctctcagatcaccagatcgacgaggagtgggtactttcccggatgatcgaagttgagccattgatctgcccgagtgaaggtgattgggtgttcggaccatcgatacggggcgagagcactggtggccgccaccagtatctggcgatcgttgagcttctgctatcttttgttctcttgtgacccgtgtccgccgaagatgacgttgaattctccatcgatgcgtgggaatgctccgcctcctcccccttcctactgctgaggttgtcgaggttctccgggtcctcctcgttgtgggggaggtggtagaggttggaaaggtcggccattcccgatggagtgcttgaagtccctgcagttccgaagagtatgacacatatccttgtggtacgggcactgggcgtcgaggatgtcatccaatgttcattcgcctccgcggagtgcccctcaggcacgagagacgggtggtccagcggcatggatttcttcgcgaggcctcttctcccagcgcttgtcggtttgctggttcgcgtcgcgccgtggtgcgggtggagcaggcttcgttcctccgatgaggtcctggg

SEQ ID NO: 33891 - DNA, 706 bp, Zea Mays
gagcagatcttggaagccatggaaggtgaggccgtcggccatggggagggaggagggagggacgaccatggggagctgcagggaaggagctcggctgggtgagcgtcgcgcggggaagagagtggcctgcgtgaagggagcagcggccatggcgaggtggagatccggttgtttggggagagagaggagttggacgcgagatcgtggagaaggatgaggctgaggaaaacagcggcagatgaattttctaaagacgcatacgtgcactagataaggattagttggagatggacatgtagaggcaagaaaattcagattttctcttctctcttttctatacaaatatacacagataaatacaatttcagcaactaggattttaaagatgcattgggtgtgagatggcctccggcggcggtgattcttggggttcggagtccatgattattgggcggcggtggtcgttcccgagggaggcattgggtgtgtatggtgagaaggcgtcgcgggatggaaacaaaatgatagcgatttgtatatatcatcaactcaaggtgatttcactatttgctacatttttcatatatgtcttgtcagactatcatgtgaagacggttccatatttataagtgtctagtatactcactaacatctatgacggttcttatagtctagacgactcttagtattcttatttgagatggtt

SEQ ID NO: 33892 - DNA, 335 bp, Zea Mays
caaagaccagcaagtacaaatcactgctaagctttaattggagagaaattgaccttctttgacagctggactatgcattcatcaaaagccatgcggagtttgtcattccactttaccacctccaaatcgttgctgccaagagctaaatgcagtgtctttttcatatgcctcacaaggtcacttatagcaactatggttgctgctgaagcctgagctcttgattgttctgcaagagcagttatcacttcgacaatgctgagttgcatctcaggttgtttcagtatggccttgtgttcgagatgcttaactagtactgatatcatcaaattaatgtt

SEQ ID NO: 33893 - DNA, 357 bp, Zea Mays
tttcgatacctaacactcatcagtccatggtcactcgacttcctgttggaaccttggtccccaactccacatttccttcaggagttagtgatcaaaggatggcatctcaacaatattccagtctggatggcctcgctaaccaacctcacctacctggacgttgaggttaaagttagacaagaaactctccagatcctcggagatttccctgccttacaattcctgaaggtgtcctcaaatgcagcaggatctgaggcaatgtgccttgtcgtcagcaacgatggattccgatgtctgaagaagttcagtttcgttggctgggtaaacatgatgttcaaagaaggagctgttccagcg

SEQ ID NO: 33894 - DNA, 557 bp, Zea Mays
gaagtccacagcggaacttgcgcctcccattcaggacccagggccctcgctgccaaggtaatccgtcaaggattttactagcccgcgataatctgtactgcgaatcgagtcacgaggtcttgtgaagcatgccagaagttttccccccgctcaagcaacccttcgcagtacaccaagctgatccccacacatggccacttcaacgctggggtctggatattgtcggaccactacctacggctcaagggaaccacaaattcaccttcgttgccgtcgagtatttcaccaagtggatcgaggccagagcagtatccacaataacgtcgaagaccgcccaaaagttcttctggcaaaacattgtctgccaattcggagtcccgtccgaactcacagtcgacaacggcaaacagtttgacagccaggacttcagggacttcagtttctccatcggcaccaagcccgtcttcgcctcggtataccacccgcaatccaacggtgtcgtcgagcgcgccaacggcaagattttcactgccatcaagaaaagatttctcgacaac

SEQ ID NO: 33895 - DNA, 291 bp, Zea Mays
aggttagggaagtgccctgtctcgaacattgaggtgtaatgttcagtgacagtccataaccccacgtagtggtcctgctgttcttcgttagcttcctcgttgaggttttcctcatcttcttcttcttcctcatcgtcttcattatcgtcactagagttgtctgggtcgtcgcctccgggagaaggggcttggactattggtgctagcggtgctgaagctgacgatccagctgcgaaggctagtgattctgccaacggggtgggtgtaggcagaaactcctccgagctgtcc

SEQ ID NO: 33896 - DNA, 295 bp, Zea Mays
cttctcggttttggaagaagttgcatgagagcttggatacacagttgaattttagctcggcctaccatcctcaaaccgatgggcagaccgagaggactaaccaagtgctggaggatatgttaagagcttgtgctcttaaacatggttgtagttgggataagagcttaccatatgagaagttctcttacaataatagctaccaggtcagtttgaagatgtcaccatttgaggctttatatggcaggaagtgcaggactcctctatattgggatcagactggagaaagacagttctt

SEQ ID NO: 33897 - DNA, 610 bp, Zea Mays
tataaaaaattccagtgttcctatcagtgcattggatgatatgagacattctgaaatgttttcgagctgcctttcctctgagcattttgagaaatcaattatatctcctgctacagcttccagcttaaatatgcatcatctcaaagccaagtgtgagaacattcatcttgatctacaggtattcattttgtctgtactggtactggtacatcagggcttcttagtccatgcatcattttagtttcaccaagcttggtatttgatattttttcttgttgatatctgcagacttatccaaaaaatgtaaggctcaaggcatcaattgcccaaattaaacttgatgaatactaccacgccggaaacaatatttcagatgattcaaaccttggtaatcacttcttgaacaataacttgcggcaaggagttcaagcttccctccctcagtgcctgtttgctgttggagatcattcggtggaaacctatgaattttgtggcaatagttcaactgaattgactagagttgaattgctaaaaacttttggcgagtgcacattctgttatgatgtcagtaccaaagatcaagatggcaatttagtgagctcaacttcca

SEQ ID NO: 33898 - DNA, 298 bp, Zea Mays
cagggaatggataggatcgcgaatttgagtttatcgccgtgattatagtcgctgcgacgtggccggactaccggagtcgccgtggaagcgccggtgaccttggttgcgccacgccgaagctggttactacgcggtagtaagcgtggcacccttaggagtattctccttgcgccgttacaccagtgactgtcacggttacaaccaccgtgttcttccctatctccggccgccagcactgctcggccaaattgagccccaccgcctaagccctctataaattgaaggccgaggcagctgc

SEQ ID NO: 33899 - DNA, 369 bp, Zea Mays
caggcctttcaacgacacagcactcacaggctaccttagcatgggaagatgttcgggtcaagcatttataatgcaacataaaaccaacaccaaatcctaggatctagacaatccattctccagaatgcccgtgcctattgtcaatacggttctcccacagcaaaggcacctaatccaggttactattcaaccaaacccagtgtgcgtattttttctcaaggggttaaaactgactgggtacatcccatattctgtaaacactaaaatctcccgaagcaaccaagcgtctcgcattgctaggtgcaaaccaaaacgagaaatcatccacagttccacaccagtatccacatacaccaagatctacacgca

SEQ ID NO: 33900 - DNA, 355 bp, Zea Mays
cttaagtcgtcgccgacttaagtcgattgctccgttagtagggtatagtggtcaccctgagttaagtaagtgtgagcatgtcacaccgccttaagtcgttgccaacttaagttgattgctccgttagtagggaatagtggtcaccctgagttaagtaagcatgcaggttgacagtaaacaatttgagcgcctttgagaatgaagtctttttattgatgatatatttcccagtttacataatacaaggccgtcccaatagcttttgaaatatagctaggggtaaaacttcctgagatgttctatattccatgagttcccaatttctgtgtcatccatttgagtaagacgatatgat

SEQ ID NO: 33901 - DNA, 366 bp, Zea Mays
gaaggatactgcccagatgtccgacaatacacagccacaatacgccagcacaatacacagccacaaacaaagagggaaccaagcacaatacacagccaagatacacaaccatctccaatacaaggggcgagatgtccgacaatacacaggcacaatacacagccagaccttagtttcagaaagataaccagccacaatacagacacataacaagatacatttagtttcatccataccagacataaagacagatacattgctccagactacatgtggagcattacatacaaaataacttcatccattccaaacactgcctcacaactacatgttacgatcaattatttcttcgaacctgtagtttat

SEQ ID NO: 33902 - DNA, 455 bp, Zea Mays
atcactatttctagcgaaggtgacttggtccggctgaagtatacattcaggtttggagataagtttgatgaaccaaatgatgattggctaaagtgtatcgaagctacaagtgatgaattgcttggagcgtactccaaaaaggaaaacaatgccttgtccgcaaccttcggtggtcggaataagaagaggttaaatagggtatttgatgctattggcttcgtgtaccctgactattgttacccgctgcgagggcaaggggtaaaaaggaagattgctgctactggaaaagcagctgcttcggccatcacggctgagccaaagaggaagaagatgaaggttctgactcaccggccgcgttacatcaaaccggctgtgatacctgaatttggcgaagaggcctcctcggtcgccaaaacaaaagaaactgctcctcccacgtagaggactgaagatcc

SEQ ID NO: 33903 - DNA, 582 bp, Zea Mays
ggtagattgatggtggaaagtgaaagatgttgatattattaaactacttgtggccttgctgatcataatacctttctgttagcctgcaaccatgctacaaccacatggagcatctgctggcctgcaaatgctctgatcatgcttgttggaactgcacatctgacccatttgcatgcatatgtattgacctgagcaccagatcataagctagcagttggtcctgctaaattaaacaatgcatccaataagtgaggcctcttttgtctcaagataattttataggaaaaatgtaggattctgattttcatagggatcattgtcgtagcatcctctggttcataggactgaacctcaataaatttggggataaaaaactttgttaccaatttcatgaagaaagttagtaagatatgatgttgacttgcaagttgcaaccaccaaataatttgttggacgtccatagctagaatgctacattttgtgtagaataactaaacatgattaatgttttcagtgtggtgtagaccaactaaaaatgattaatgttttcagttttagaatgtgatcaagccatgttctgtt

SEQ ID NO: 33904 - DNA, 456 bp, Zea Mays
atcacatcaatcccttaggatggcaagacagttaagtctgccaggaacactaccccacttaagagaattctgacttgggagcacctgagttggcataggaggtctgatcccggggttcgggtgaccaaagggatagctaggggtgtagaggggatgccatgcttttccacaaacttagtggctataaaggaatgggatgctcctcaatcaaaaagcacagtagcgggagtaaattcaacaaggaactcaccgagcactactcccggggcttgctgggcttcttgagcgttgacgtggttgactcgtgctctgccctggtactgagtcctgctctgctggctgttggaaggaggtgccttggaggtaggtgctgagggaatcttggggccattcaccgagttggagtaggtcggcccgggtgccttcaactgaggacagttattcttgaagtgactg

SEQ ID NO: 33905 - DNA, 373 bp, Zea Mays
gacaaacacacctatatgcctttcgcgctctgcggcttcttcagcttttcttgcttcctctgaagcaagttgagattcttcttcgctcttcctgatagcttcgttttttatatctcttccaccgttcatccacactttagaataaaatttcccgtcaagggcggtaggttcggttgaaggttctctaatgtcatttgccgaaattgagaattctggctgaattacaacctttgcatgttaacaacctactttttcgagtagcgacacagcccctcgagcgcccacacaggcacaaaagtccccctctcggttaagacttcgtcaaatgctttaatctcacccacaatccatttgatcacaccctcgggatctc

SEQ ID NO: 33906 - DNA, 349 bp, Zea Mays
gaaaggtagtagtgttcatgtgatgtctaagttaaaatgcaaattactatgtgaagagcgcatcgatatacacatatataccgggtttgattattgtggtgaatacgttgttgattgtatatggtaattctagcgtacaggataacttgtataaaattagtaagtctacttgttggtcctaatttgattgattttactctaacagatggtaaagtgttagaatggttcaagtctccagaacgcggcaattcttgaagtaaataggagctgaattttattagttactgttttgggctgcacgcactgtttttgtcgtgctgtttgtttaatgaactaaatcatgttttct

SEQ ID NO: 33907 - DNA, 450 bp, Zea Mays
tttaatcaaacatcacttatctgtatgctatttgtcctcgctgtgtgtagcgttaccaacttctccctggtacctggcccccctaggatgtaagctcgacgtgttgaggctggatactagtatacctaaggaagaatcacttgtccggtccataggaggtagtccctacggtttgagactacctgcatctggattgggacctagacctgcacacaacttcggctttgaagtgttagtagcacacccataggacccatcatctagtatctgccatcctttgattcatgcaacaggacctacaggatttagtctgggaagccaagccgtatgctcggacccttgaatcaaagttccaaatactaggacacccgtcgcagagtggtggagcctgtaggcttagggtacgggaccatgctaagcggctacacagctccagaccatccaccccag

SEQ ID NO: 33908 - DNA, 426 bp, Zea Mays
ttgggtttcggacttggtacagttaaataaacctaaattttagtgagtttgctcaactttggagctttcttgtgactaatctgtgatgttattgtccacaatctctatagaaaagtgttagagggtagtgtggcgagcagtctctgttaagctggatctccctgaatttgcttagaattgggagaaattgttgttcttagttgagatgtgcggcaagttgtgcactgaacattgttcagttagctggtgtagaatcagtgttttcgtctcgttttggagcacaataactcttcatccgtgagccttaggccttggattgctgtagaaaatttgtagatctatgttttgggaataagtttagttaacttaggttggtcttttattgcttggaatagtgaggtttgaaggggtagaaatgagagttca

SEQ ID NO: 33909 - DNA, 1238 bp, Zea Mays
gcggctccgctgcatgtgggagctcggctccgtgctcaacttcctccacgtgcgtgctctgcccttaacactctcgcgctccggcggtggacggtcgccgtgccctggagttcgggggtttaggcttctgtgtcgtggtttggacttggcagctagggtttcagtttgacgccgccgttgcactgtctttttggtgggcgcaggtgttccgacctctgctgaacatcactggggagttcacggctgaggacgtcgaggcggcgcttatcactcccaacgagattctagatgatgtgcatatgccactgctaaaggtgggctccttggttgttcggcttgagcttgttttccctttccttcatctcgctgtggtgtggaacgaggtgtatgtgtgtgtgctcttcctcttagtctactttttttatttgctgcatggtgcatgctgttaattgcttcatgaacaaatactgaaatgtgtttaatttttttttctgcaatgaccaaatttgttcattttttaggcttgcctgtattgtgttaccaagtttggaatgggatgctgccttcagtttatagaagcttgcggttgttttttctgcttaactggccacatgcaatattggtatcatgtaccattattattgttttgtgattttgtcactcaataaattcatgaccccaaattacatctttgtaactgatcatacatactagctgcttgcttagagccctttagacagttttgtacagtacattttttgccatgcaaacattttccttgattctcatgcttattggtcatatctgcagtcaattcctcctgtaactcgcatggctatgggacgtggaacctgggtgaccgtcctatgcagaaagctgaaggattggtggcattgggtacacaatatatctcatattgcaaacaactttagatagatatgaataacagtattccatttggtttggacctaataagatcctaaactgcaggttgcagaaggtgatctgccaattgttgcatctcatgggttagcctcgcacataggacattcttgagtaaagcttgcactgcagcttcacattgataaaaatttccaatcgtttcatcttgcagaactgaaattgagacatacaaaacactagaaccagctattcgtttattaattttgaaagcgatatgtgatatccgtgttgaggtatgtactgattttattttaatttaacgatgaaccaaaaga

SEQ ID NO: 33910 - DNA, 518 bp, Zea Mays
gctggacgctggcgtcctccagtgcgaactggtgtaccctggggtggaacatagcaagggcgaacgatgctgctcctctaaccctaggtgatcgccttcctcttcatgtcccctagctgaacacgcttgtgttcaatggctagggccttgtctagcagcctctggaacgacgaaaaggtatgagccactatagcatactgcaaaggcccattgagtccttcgatgaagtgatcttgcttcctctcatcttcagccacctcatccggtgcatatctagaggagctgaatgaatctgtcgcggtactcgctgactgacatgctcccttgcttcagtgatagaaattctttcttctttatcttcatcagtccagcaggtatgttatagttcctgaactgagtagcaaattccgcccaggtgatagtatcagcagcatcgtgggcagcggtgtaagaatcccaccaatcaacagcaggaccagtaagacgaccagaagcatagagaaccttctcttggtcag

SEQ ID NO: 33911 - DNA, 585 bp, Zea Mays
ccctttgattgtgttccaatagtctttataaaacctcccagtgaaaccatcaggccctagggccttatcagaaggaaggtttctgatggtatcccatacttcctgatctgaacaaggggaatccaaatccgagaggtcatgatatggtagtccaagagcctctagatcaatagttctctctgtgaattcagactgtccaatgaggttgttgtagaattggtccaccagagctgttttttcaggatggttaatacagatattttctctatctcagcctggtcaccaaatttttcttttttcggtatctggcatgcatatgaaaaaatttagtgtccgcatccccttcctttagccatgagattcttgatcttaaccttgtcattgttcttctaaaggaggctaacatcaaggactgcttcttgagtttattccttagccataattcagcaggtgtaagagccctatgatcctgggcaatctcaaatttatgcaatagcttctttgccaaagaaagctaggaagccacatgcccgacctgcctgtcactccaactctgtaatcttgtagctgtctccttaattttcc

SEQ ID NO: 33912 - DNA, 501 bp, Zea Mays
accccgacatcctcttcatacaggggagattagagtcagcacctgtcttcgacgatgagcctaccatgcaaggggaggtgcctccccagcgtgaagcgcggtgacggtggaacagacgccggaacatgcggtgacatcatgaagccggggaacaggatccggcgcagcccgtataccgagacgaggcctcataagtgggagaaactctcgacgaacgagtataccgagaaaggcgtaactctcgccatcgcgatcgccgacaagctcaagaccgggagcgagagctagctgagcaggatgcccggctacgacgagaaaaccttctcttcgctcgaaacctgtatcccgattttgctcaagcaatgaacacaccgagtgaagtcagaggggtactggcacagatagctgacggtctcccgcgaaccccagacgcggaaggctaccggtggcttcttactcaggcagctaatcaccttctacccctcgctcatcctgtgaacg

SEQ ID NO: 33913 - DNA, 660 bp, Zea Mays
gtcagggttgttttcgctaatttcggggtctctgcgtaatactctttaagaagggatggatggagggttggtttgttataaacttgagggctcatctgcaaatttacaaggccgaagaggtatggttgtatcatagccacatgatctgatctgagcggccaagattagatcaagtcgattttctaaccggtacgcaaccggaaccgtccgatttaaaatcgagggctacgatcacattggccgaaagagttcttttatctttaatcctaaccactcgatcctttcctaatggttatgatctattccccgaaccagtatctagtcgatcaaatctcagtcgttgaataggatccaacggccatcgtgcaaccctaccccgctcgcaccacaccggccgcgaacagcggcggcaccagcttccctatggcggcgccatgccggcttaaccccaatccggattccgtgcccataattccacaccgagatgttctacacggcctacaggttcccgcgaattcatagggagaacccttactgacgaaagtggcgtaggatcggtgatttcccatgtggtgcggatgacggcgcaatataatctccggtgaagaattgagggtactccaagcatccccggccttgatgaagccacaggcagccacc

SEQ ID NO: 33914 - DNA, 756 bp, Zea Mays
aaaaaaattatgaaaaacatctctgaagttgctctgtcaggcgctctgatgaacggtttcgatggtacagtagactgagaaagatcttcaggtgcatcacccctcgccgccggtgaccctcgcgccgtgatctgtgtcggtgctgcgattcgtgctcactggtgaggagataatcgcggtggagtaaaaatcttgacaccggataggctcggacccggtcactggtgggttcaccgtacccacttgacctgcgaccggccgagatggccctcgtcggcattggccacttaccgaccgtgcgccacgtgcctagtagctgtaacacgtcgctgtaaaccgttaacgcaggtccgtccatcgctggaggccttgccatagtgaaggccacgatcacccgcgccagtgcacttctcctctctccggccgccagcacaacttctcaaaaattagccgccacctctctcggacactacaaattgaaggtgtcgctagctctgttaggttgtcatgaagccagagcacccgcccctgcctccgattagccaccatagcgccctaatttctttcttcccccaattcggttcttcgtgccaccgtgagccgtcgcgtcgtggaccgccatttccaggtccgttcataccctccttgctctcgtttcagcaccttggtgtgctatggatgcttatcggcccagccaattgaactagaccatgctggattgtcgggaacacctcgagtcatcctcggttcttgccg

SEQ ID NO: 33915 - DNA, 350 bp, Zea Mays
attcgagccagaacctgcgcactcggtcgcacataattttcacgctgtaatctcgggacctatttgttgttacgaaacagataaatgatttacgctaaatttcgtattaatttacgttgctttagctcacgttttacgctggaatccgcccgagccagaacccgtgcacgatcggctgcacacaattttcacgccgtaattttaggcttcatttgctgttacaaaacatatataagatttacgctaaattctgtactcatttacgttgttttagctcacggtttacgctggaatcggcccgagcaaggacccgcgcacgatcggttgcacgcgattttcacgccgtaatt

SEQ ID NO: 33916 - DNA, 323 bp, Zea Mays
ccttaggcgacttctgcttggactgtgcttgtcgcacgcaatgactgttgagactggccattgcggtgactgtattagcgtcgaatgccaaagaccgactccacggtcttttttgacatcccgctgtcatggtgccgcttttattttttgggggggatttttgcggcgatttattacatggctccgcctagttaaaaacctcaccccctgcgaggaaaatagtgcgggcctgactgaaataatgtctgtggaagttacaaaagcgcgaaggccttgggatttggtgtcttagacaaaaaaattctcaggttgtctatattcca

SEQ ID NO: 33917 - DNA, 312 bp, Zea Mays
agtatcctgccaatccaagaaaacttctgatcttggacgcatcctttggttgcttccaatttagtatctcacttatctttcctaggtccactttaattccaccatcggtaacgatatgccctaagaaagcaacttccttcaaccaaaaatcacacttcgagaacttcgcatatagctggttatcacaaagcttttgtaggactagccttaggtgatcttcatgtgtttcttcatttggagagtatatcagtatgtcgtcaatgaatacgaccacaaactaatccagatattccataaatactttattcatca

SEQ ID NO: 33918 - DNA, 420 bp, Zea Mays
gagattttgagcccttcatcagaggtaacagtgccaaaggcacaaaaggggtctgccgcaactcccaagaggagaaggatggcaaatgtgctagatgttgtgttagaaacagcaaaaaccttgagtcctgctccttcaagaaaaattgtcgaagcttccaaagcgtaacccgaagctgaaatgaagcaggcagaagttgaagctgcaacaattcaagctgaaaccgaatttgggccttcagaacccactgagatagagcctgccgtagttgaagaaaaggcgacagagcaaattgcgtctgaaaaggttgaagctcctgcttccgaagcttcaaaagaaagcactgattacatcattcgtcatacttcggggaagagactttctcaagaagaaaaactagaagcagtacactatgcccaa

SEQ ID NO: 33919 - DNA, 376 bp, Zea Mays
ggagggagtggaggccctatgcgccgccaccgcgtgaatcgtgggtcgccgtgaccgctcctcgcctgcgcaccttcgggcggcgcatagtacttggagtgcgtggaatcgtcctcgctctgcgccggtgtcgcgctcacggagccggagatttgccgcggaaccacgcagcaggtcaagctgggagcgacattaacctcggtgagtatctcgcctcgttactagggtatttcggctatcaataccactcggcgaggtggagtacgagcgcaagaattggataccgagggtagattggagaggatcgcgctgggtttgggtttgcgcagcaccgggttgcgcacggtcggcgtcgtggctgacgaacaggacgaag

SEQ ID NO: 33920 - DNA, 439 bp, Zea Mays
cgagaaacgagtaccatgggcactcgactgattgttttgagcaggggcagtaatgggacagatgaaaactaattgattgaaaggataagcgggtgaacgaggaaaagagcgatttgggttaaagggacggatcaccaaccttgaccgcttcttggatccttgagaggatccttcaccccattcacacccaaatctctttgtctttccctgccccgaattcttggcctccaccgaaagtgttgtgctcatgaccctactgtaagtgagatctaaacaagtggccatcttccgctgtagtcgatcattcagacctctcataaaacagttcttctttttcaggtccgtgtcaacttgctctatagcatattgggagagatggttgaatttggcaaggtattgcatcaccgagtctcctccttgctttaagcgaacaaactct

SEQ ID NO: 33921 - DNA, 740 bp, Zea Mays
ctcgacggtggcttggagggtttgtacggccttggtgaggttctcgacggtggtcttgaggtcgtcccccatggtcggcgcggcgtaggaagtagcagagcctggtgaagaagggttgatggctgatgatggcgaagtgggtggcgcaggcgaggatcgccgggatcgtgataccaggttgtcaagggcgtcaaacccctgactggccagaccacagctacgtagctcatagtcgtcgtccgtcttctccagtgaggatcaacacctcaaccgcaggcttgagagaatagtagtagtgtaggagatagtttattgcttgcctcctccctgtggtttacaaggatatatatagccctcagcccattaatttaggagctgataataggaaagaccccactactttggtaactaataaaaaggaaggaacagccccccaatctaggagctaataataggaaggaatcagcccactaatttaggagctaataatacgaaggaatcagcccactaatttaggagctaataataggaagctatctctctttcctagttagccactttccctgccttcctgttcactcgtgcctgctgtgcgcaccgcgtgctccgctacgcgtcgcacatcccgtgcccgacacctcgtgtacgtctggcctctggacatgacactgcagtgtaaactaagcagcatagttccgcatgactgaacgcagcacacaacctttcattaaaacatgcac

SEQ ID NO: 33922 - DNA, 876 bp, Zea Mays
gggaggtccccgacggcgttcatgcacggccgagctccggcgagcatccataccggccgaatggggctattaccggcgctcccgagcggcggatatcacatcagacctaccccgagcatttcccccaacctaattgcgcgaatggcgacctattaagctctgtccgcgtgaaccgagagcgttgcggatgggtgaagatgttcccggcgatccctggcggttcggttcaattaaaggggtcggggagcatcaccaacatgtaaggatgctagaacaggaacaggaagggaatgaacagacctggggaaggctggccgcggtgaggttagttcacggtggcgggaacccgaattggggagaactagaaattcgcgcgtgctggtggataatcgagggtgggagcgggtgctatagctttgggatgacttagcgcagtagcccgagccatcaatttataggaagcttcatcggtggcgcggaatttggccgggccgtgcgggtggccggagataaggaagaacacgggtgcggtgaatccgtagctaacggcgtggcaacctccctggcgacgatgggacagccctagggagtcacggcgacgcggtggaaaggctaagccacgcggcgcacggccgggaggtggcggttaccggcgagcacatctgttccagccgtaaagcagaagggcggccatggtgagtcaccgaagttaacccagggggtggcttttacctggcaatcatatcgggtcatcggcgacgcgaattctacagcggtggagtgaatcacggcaagggtcaccggcggtgaagatttctttgcggcggccgatcctatccgatcagttactgtaccatggcgacaactcattcagac

SEQ ID NO: 33923 - DNA, 331 bp, Zea Mays
aaaagaaaggctgaagaaaccaacaaagaaagggaggcgagaaataaaagaatgcgtgattaccgagcgaggaagaaggctgacacgggtacttcctgcccataattaacattgtcctatttttagttactaatacttattcttcctattgtagtactatactcgcccagacagacacaggcttatgctactagatcttcgatcgtaatacaaaccaacacacaggtggcagagccggtaacgcctgttgttgcaaggggctctttgcaccaactgccaacatcagtggaaccattttcaaccatttctcaaccttcaacctataatcaat

SEQ ID NO: 33924 - DNA, 386 bp, Zea Mays
cccccacaagggtcgaccctaccttagtcttgacaatgaagtcatcgacatacaccttgactatgcccctgatcaaattgccgaaggtcttattcatggcttgcgcaaaagtagacaaggcattttcagatcataaggcattacaaacatagcaatataacccatccaccgtcacaaaagctgtgtgtttcctatcttccctagacatctgtatctagtggaatccaaagtaagcatctaggaaagacaacatgccacacccagaagtggaatccacgatctgatagatccgtgggagtggataggggtccttgggacatgccttattgaggctggtgtagtcaatgcacatacgaagcttcccatcgaccttagggatgatgacc

SEQ ID NO: 33925 - DNA, 449 bp, Zea Mays
ggatgcttaatgaatgtcttagctctttgctgattgtgcgtttaatggtgcctctccaaatctccatgaagtgctgcagtccgaatttaataaagatttttttgcggtgtacagaagggcctaatcatcttcatatgctcttcttgagatttttttttcttgggattggttgtcttttatttttcctagcttgtgagttgtaactgtgaggcggttaggccttagggaatatatacgaacaccccttttcttcctctttaatgaaataagagtaaaatacaccggtggttcctaaacttgtagcattgtatcatctcgatccttaaactcccaaagtgcacatctaggttcctaagcttgtaaagttgtatcgtcccgatccctaacctctcaacatgcatgttatggtccctaaactcacaaagtgcacatctaggttcctaaacttg

SEQ ID NO: 33926 - DNA, 398 bp, Zea Mays
gagctctcctcggcggcgacatcgaccgaattgggggaaaaactaaattcaggcgctacggcggctaatcggaggcgagagttggtgttctggtttcgtaataagctaacggagccggccgcacactcaaattatagtgtccgcaagcggtggctccaaattcgggaaaggtaagctagcggccggagaggaggtgagtcactagagcaaaactaccgtggcgttcaccggggcaatgtctcaggcaatagatgggctatctactgtagtctactgcgacgtggtaacgcttctaaatacatggcatccttacggcaagcggcgaactccggcgatggtcatctcgaccggtcgcggggcaagtgggcatagcggccagctcacgatctcatccgcgg

SEQ ID NO: 33927 - DNA, 470 bp, Zea Mays
gaagtttggagcagtggcggagccaggaataaaatataacaggccaaacaacccctatttatacattgttatagaaatttcaacaattatagatttcaaccatatgttggtatatagcaaaagacatcgaaattatttcactaattctgtgtgcgtaatttaaaatttaacaagaaaaatataatgataaaaagtgacggtgaaaagaaataacatgatttatcttagttgtactctgcgtatcagagttgtgtcgaagtcatcaataagtttatctgttgtaaattcaattgctatctccttctaaatgtaagttattaagcaatcccttaagaactcatcctccatcttatttcaaatccttgtcttaccaagtttcattattaaatcaaaaaataaaacaatataattgtgaactaaagtaaaaaattatgtataaaaaataacgtagtttgtgtagtcgatgtggg

SEQ ID NO: 33928 - DNA, 493 bp, Zea Mays
cggtaatgatgctatttggaattccaaacctgaatattatgtcttgtatgaattccactgccttggctgaggttaaagaggcaatgggcttacactctatccattttgtgaatttgtcaatggcaaccagtacgtgagtatagcctccctgagctttcttaaaaggtccgatcatgtccagcccccagcatgcaaatggccatgttataggaatggtctgtagatgctgtgcaggtaaatgttgttgctttgataagaattggaaagcttcacatctctggactaacttggcagcatcactcttcgttgttggccaatagaaaccagatctgaaagccttcctgaccagagttctggacgctgcatgtacttcgcactacccggcatggatttcatctaacagttgcttcccaatagccgagtgaatgcacttcatgaggactcccgtcgcacctcttctatacagtgtaccccctatgagggtgtagtgggc

SEQ ID NO: 33929 - DNA, 283 bp, Zea Mays
caccttcggcactacaatcgattcttcagcgctctgcatgacgggggccgcttgttttgcttcggcagttgaagagatccctttgccaaattcaggcactacggtcggttcaatatatcgcgaccggtgggttagaactttaatcttcttacccttcggcacagccggcacagcagtggtggccgaagcgacattttttcttttccttccttgccttcgcagttggtaatgataatcagggtatacgaagccaattgcatcaaacaccccattcaatcttttc

SEQ ID NO: 33930 - DNA, 315 bp, Zea Mays
actgaatttgtaaaaagcttaactcctaaactgtcagacctatggctgtcaaattttagtacaagcaagataatcatgttatctacaactcttctatatgacttttctacagaaaacatgatttggtttattaaacaaacagcacaacgaaaacaatgcgtgcagcccaaaacagcaactaattaatttcagctcctatacaattcaagaattgccgcgttctaagtacttgaattattctaacactttaccattcgttagagttgaattaattaaatgaggactaacaagtagacttacaaattttatccaaat

SEQ ID NO: 33931 - DNA, 316 bp, Zea Mays
taataagcaggggcatggtccgtacttatgaggagaaagcgtaccttaggttagtctggtagcagatcaatgtctgtccagaatgactagcttgactaatcgagcacataggtctctagattactgcttatactttgcctgtcaccatgcaccaaggctcaagaggtctgacacgcatctgaagccaatcaatgctgcttctgactaaaacttggcagaactgtacgtagttcaggggctaatctgttggtgtcatagttcagaggcaaatgttgctgcagaagttctccatgcagcttgtaagataagttgggcg

SEQ ID NO: 33932 - DNA, 392 bp, Zea Mays
aatgaatccagcatgatgaaagtcttatttttaatctattaatttgtttaaacaaataactcatacacatggaattaaataaacaagaatttgttctaatcacatagttaaaacactcctttattccttccaaatttttgggtattacatggcaacatcgtgaatgtcttatgtaacgtttttattttggaactattaatgttcggttaacattttaacatgtttgaatgtcttgtgtattcatctttcctaactaatctgaagtaagattgaaataaatgttttcctttctattttctatgtttttgtatgaaaagggctagccacatttcatttgtttatactcataatcgtcatatcccaaattagttgcttattgttcatctgtatat

SEQ ID NO: 33933 - DNA, 413 bp, Zea Mays
atttaataagacctgtccattccgctggcaggcggcatgcctgtctattccattggcaggcggcacgcctatgctgccgcatgcactatattcatcgtcactcatacgtaccaaggaagctactgttgtgtatcaacactgcgcaggcagcggacatcggggtgccagaagatctctcaggcgtcacctgtattagttgctccgtgtattccttccattatgtctctgggcccacatatcaggctcaacaaccttgtacgtgcctcccttgagctataaaagggaagacacacaacgttacaaggatcctcactcagactcacttagaccctcaggaagttctccaagctctcgagcaatacaacacacagtggagtggggtattacgctctggctgctcgaaccactctaaa

SEQ ID NO: 33934 - DNA, 389 bp, Zea Mays
cgatgtcagggtcttctaagaatcctgtctctctatcgcgtgccacacatgaagtctccggactcggggtgatgtccgtttgtcacgaggctgatacaggtggaccgagtgtacctgctgatctagaggccacgcgcgcacctggagtgcatgatgctgcgcgtggcattgaagctcctactgtcttgcgaccacgaacgcgtctgcaagcaggtattcgacaacccaaacaatttaaagatggtacggtaaggtatggccttctcaccactacaggcgagcctaacaatttagatgaagcttttgggaatccaaattggaagagagcaatggatgaagaattcatggcattgcaaagcaacaagacttggcgacttgttccacaggtt

SEQ ID NO: 33935 - DNA, 348 bp, Zea Mays
gcggagctgacgggaacagtgcctgcaggtgcagccaccctgaccctgcagactttggttttggaaagggccatctgcccttgcgagcggagcgagcgaccaaacccccccacagtcgttagtcggatgaacaaaacttatcttttaagttgtttcaggtgttcatagtcatagctgttctggtctccggcccccagggccccaggtagagactgctcagcaatcgatgcgaaagcactgttgcttcatatatctaacctgccgcagtcccggcctgttcttgcgtgtggctctcctgcatgccaggtctcctgaaactcgtccgccatctatctatagtcctactcc

SEQ ID NO: 33936 - DNA, 458 bp, Zea Mays
gacataggcacaaaacaatagatcaaagctctgtctaagatccttcagtttatgactagctactaggctatctgtgttgcctactaaattattccccttacaaaactatcttatcatatgtctctaactcatatggttaatacaaggaggggaggaggtgttgatctaccccgcacgaattcgtcgaagaagggctgtaaataatcggaaccagaaaagaatcccacgccagctgatgacgtggttgctgctcaaatgcgactactacaacaaatggccaacagaatgatagaaatgcaagcacagattcggtaagaacgacaagaaatgcgtcaagaacgtcaagaaatgtgtcaagagcggcaggaacgacaacaactaccacctccaccaccaccagctccgtctagggataagcactgggagtttatgagtcacaagccacctaaattctctaa

SEQ ID NO: 33937 - DNA, 387 bp, Zea Mays
ctggcactgttgccctgcttcgacccaatcgtgcttcgtccaccatatgggagccgcatgggaccgatccaccttcaccttctgcatgggagccggtctgccgctgctatggtggcccctggctccgtgcggacccacgtgcagctgcagcaagcaggggatgcagccctttgtgtgatcctcgtcggtgaacccggcaccccacggctgcatacgcttcagcactgcagcgacatagtcgccgacgctgttgtcctctccacagaaactgggttagtaccttccttcagtttattattagccgccctacacctcgtccctacttgacattttagagacctacctctaccgtcgtcctcagtacagctcttctttattttgtggttc

SEQ ID NO: 33938 - DNA, 298 bp, Zea Mays
ctcgccaccagtggcctccacgctcggattcgcgccgaccgccatgattcatgccctctgatgtgtggatgacgatcgacagtgaaaatatcttcaccgtggatgagtttggggcactgtactggcctgtcgccgtacccacttgcccaacgacatggccgcacgatcgtcgtcgtggctaccgctgttccctcggttgcgccacgccttaggcggtttaccacatcgcttcgagctgtgggggttaaccagtggtagccgtacgcctttgtccagtgaatgccacagtagaacgcca

SEQ ID NO: 33939 - DNA, 470 bp, Zea Mays
tagtcacatagtcataagtatatgaaatgtgaataaatacatacatagagagttatgacacaaaactgagtgatttggataaacagaggtcaaatggcgcgagaacagcgtttgaacggtgaattgtgccatagagagtttgaaattcgaaatgaggcatgtaatgacttgaaattgagccgatacttcacgaataggtatatatgagtgaataggagtgaagtgtgtgcttggtttgaagttttgcggagaaaacgaattcttggcacttgactcaaaaaggattgctataaaagggaagtgggggaataaccggtgtctgggatatcgaatagttgtgaaatttggcgagagagttactggtagtggtcggagggtgttggaaaaaattggggtcgatttgagcaattttgactggtttgggtatttcactaaacacgtggtgtgcgggttttgagttgagggtgaaa

SEQ ID NO: 33940 - DNA, 444 bp, Zea Mays
atgctagatgcagatagtgtgtctagcttgtcgacatactccaattacactcactttgctctgccatatggaatggctacctggtcccaaatatacgtgtatgtaggtcgacgatgaggaggaacaccatggaaccacgggtgaggagggaacacatgtggacgacccacgagtatctgaaaccacatctagagttggaggaggtacacacaaccaccgatagaggacgaggatgaggtccaccgacacgcctcacaaagctggcagtatagaaaagacagcaccacggagtcctaactaaactaatatgttgtgtcccagtcgatgaggcaaggaatgtgcatccacgacgtgtagtccccagttgtgtctaggaataggacgcatgcaaacaagtggaggatccatgctcaacagtaggactgaactgtgtcctcgtcagca

SEQ ID NO: 33941 - DNA, 351 bp, Zea Mays
gcgggatatcaaagtttctacaaaaagcatcgctcattatctgggacaaggcatcaatgactaagtgacaagcaattgaggcgctagacaatagcatgcgtgatgtaatgggacgacctaggctgccctttggtgggaagagtgtagtgttcgggggtgatttcagacaagtactccctgttgtacgcaaggggtcaagggctcagatagttgctgcctctctacggagttcttacctctgggaatccatgtgccacctaaagcgtgttcaaaacatgagggcacagagcgactcatggtttgctgaatatttgttgcgcgtcggaggtggaactgaggaagcgaacaacg

SEQ ID NO: 33942 - DNA, 393 bp, Zea Mays
gagagagagcctccgcaactattacaacaagttcttgtcactcaaatcttagctatcgtcggtggagtatggaattgccatccactacgtcatcagtggccttcgtgcaggccagttatacatccattgcacccgagatcccccaacgaccctcctagccatttgagaagtatgcatgatccgaggatctccactatcgcaagaatgaggcacaatgcaaaccaagggagccctgacacccatgaaactccaaaacatggtcaagagaacaatagcctccgtcgcccaaccagaaagtcaataaaatcaaccaccagcaacaatttgaggaccccctcgcaactatgaccacaaccagcaatcaggaataggaggtagagcaccaagcgatag

SEQ ID NO: 33943 - DNA, 423 bp, Zea Mays
cttggatcatactcctccccaccaagacagatgtgaagtcaagtgtgttcctctccctggtctgaatgaaaaaataaaaactcccagcaacagcaactcctgaagactttctatatgagtaacctggcaaatgaagtaacttgtgccatcccaaagaacccccagtctagaaacaacaacaaataatatgaaaatggaggacgtcatggttgcagtagcaccatgcagcgcctgctgaattgcagctgctctgttggtgacggcaaaaatgttttttgattggcacaaccaccacatcaaacagcagatttgagaataatggcatacgaatttcagaaaataatacggtggatatgttacgcatttcagagatcaatatgatagcgacacttcacaaaatgaagacttactgctgcaaagtgc

SEQ ID NO: 33944 - DNA, 379 bp, Zea Mays
cttacatggctttgaagaatatgaggtgtgtcctgttcatgcggcctaatatgtctcatggggatgtgcttctccgcgccgaccacatctgccgtttttgtttgctcatcgatatgtccaggtgccctcaatgctgccgggggagtaacggagacaccctctgtgtatggggcgatcacagacactacaggatttatgtctattgaaacagacgtacctgctggcgtatttacagatgctacaggtggcatgtcatcgccagctccggtgctcgacattttctcgccgccggccgtacctctaacttccgccgccgctaaacgccgccaatacctgagataaagacgtggacgagcgaacgtggacgagctaaccttgt

SEQ ID NO: 33945 - DNA, 413 bp, Zea Mays
cacgatgcaccttctcaggacctcggcgggtggagattggataggcggggtggtggattgctcgtcggtaagtagctcggcgcagacgtccgcatcgccgtgtggcccgcatcacgcaatcaccgattgaaggtaaggaggccgtcgttgaattcacctaagtcatctctgcgcgtgggcgtgtcgtgggcagagtgggattcctaggaggtcacgatgggcgggtcgccggcgtagctctgccagggcttgcggcggcgcttcctcgggttggcaaggggaggaggacgattagccagggccgttggatcctggccaacggtggagatgtgagcgacttgataccggttcggagaattgatcggaaccgtttagaaaagatcgtacggttagcattgaagataacgaactcc

SEQ ID NO: 33946 - DNA, 342 bp, Zea Mays
aggggtctgactgcagaagctgtggtcactaactttgttttcaagaacattcagccgctgaaagacagagcatatccgtcctatctgtatcgaggcctggctgattcaacccgggtaaccaacagaagaattcctgctgtggacttggtgagccggctcgagatgatactcagaggcaaggtgtcgaacatcggcgctcctgttgcatactcggcctagaatctgcctccttccaaggcctttaccaatttcgtttcaaatcctcctgctggtgatagcggtttgggccttagagtgtgaccctctcccgaagaagttagtgctttggttgcctcactcgaa

SEQ ID NO: 33947 - DNA, 310 bp, Zea Mays
gtgagggggatgaaactgaaatgactgaaacaatgcctatatcagaaatgatgaggcgctcaggtctagttgtgcaagagggacctactgccaaagatagccccaatgtcgaagttgaacaaactgaggctgaggtcgggagtgacaatgagagtgaagaggacaacatcattctgagcccaaccaaacctagtcacattgaatttagaagatccaccgtgatagcagaggacttggctgtgatgaagaagctagggtactttggagaaaatgaagatggattgattcgctttgctggggaagaagtaat

SEQ ID NO: 33948 - DNA, 271 bp, Zea Mays
gttggcgaggtgtctgatcttcctagtgcgaggaccaagtgctggcgacgaagggtggtgtcgaagcatagcgttggcgaggtttcgcgaagtggtaggcgccatcggatggggatggagcgggatcgtcttcgagtagatcggtttggtaaacgagagctactgtcttcgccgattggaacgagcattggtgagggggatctgtggaatctttttgagggtgagaaattgaaaataatgttgttcaattatagggaggcagtcatcatcc

SEQ ID NO: 33949 - DNA, 462 bp, Zea Mays
acaaattaaagaaaatcagggagctggaatgggctgacaaccaccatagcgtcccactgtccatcagaaaactgcgcccacgaataagctctacggtcgacgtctccattttgaaataaacaccctataatttaaactaactacacccgaacttctgctactactcctatgtgtcgtaggcattagcatcaatgcccctccctttccttgaatctacaataggaagtcctcgacacagtccggtaccagcaccagcgaactgtggtcaaggcgaccgaaacaactatcttatacgcaaggaagggcatcacaacgctcatcatatcctcaagaacatgcacgtatgctataacagcagctagaccacggaagtcacagattcaccaacaatgatggacactaaagtccggcggcgcacctcctgttccggtgcacaacatgccgtagagtttaaagaaagca

SEQ ID NO: 33950 - DNA, 329 bp, Zea Mays
atggttgtgagttttgccttgtattttgaatccatgtgtgtatttagtctctttgagcatgtagtgtgaatgtgagttaatttatagtattctaatttggtttctgattaccgttgtaatttttcaggcaactttgccaaggttaccaactacaattttggtttcctttttttccctgttgccaataccactgttgccacaggatgtttttacttttcagtccgggagctattttatttggtttcatggataagcatccttgccagcattgtttacaaaaagaacattctactaccaaagctgcacaaaattagtggtttgagttctcg

SEQ ID NO: 33951 - DNA, 353 bp, Zea Mays
ttgttaccgtgacagaagtgattgaaacaacaccaccaagagctccagctctgaagatgccggtaattgaaatcatgacagctactgaagctgtaccttcggaggctgccgcagaagaggccagagccgaagatgctaactccgaaggtattaatttagagagcatagccgctgatatagataaaatgctgctaaacatggccgctgaagaaactactgcagccaccgaagagaccacggctgccaaacccgagaaagaaggaataaccgaagatacctcggaggatgaaacttttgacttccgaaacatagttggccaggagctgactgaagctgaaaaagaggaattaaaa

SEQ ID NO: 33952 - DNA, 324 bp, Zea Mays
ggcaaatggtcgagcgagtcatcaaccgtccaggtgttgataggtcgatgctcacatcatattttgaggcgaataggctacacgaggaggctcgtggcatcctatatcgtgacttccctgagtggtacacttggcagagtggtaagggaaaagtatggcaacggaggaaacgagatacaagtggacaagtcggtaggatagtctctgctcatccggctgagggggagcgctactatcttcgtgttctcctaaaccacgtgactggcgccgcctcctatgtggatctaaggacagttgatggtgtcaccctaccgacctttcgtg

SEQ ID NO: 33953 - DNA, 482 bp, Zea Mays
ggcctgatggctgttattgtatgagaattcggcgtacgacaaactggactcccaatccctgtcgaacgttaacacacatgctcttagtaaatcttcgaggatcttgttgactctttttgtttggccatctgactgggggtgataagcggtgctgaaatctaacttggtgcacattgcttgctgaaggcctttccaaaattttgagatgaactgtgttcctctgtctgacactatcttccgcggaatgccatggagtctgactatctccttaaggtatattcgggcaagggcggctcctccaaaagtggtttttactggaacgaagtgggccaccttggtgagacgatcgattattacccagatagaatcattccctttttgcgttcggggcagtccggttacgaaatccatgcctatttcttcccacttccattcaggtactgggaggggttgcagcaggcctgcaggcttctgatgttcgg

SEQ ID NO: 33954 - DNA, 391 bp, Zea Mays
aagctcttgaaaacgacaacttcgtcttcttttggttccggaataatttcctccctagcaaaccggacaagcttgctttcagcctccccgaaataaccaagttttctcatcataaccatatcaacttccgttacagtagacttcccaaactcaatgtgactaggctttgttgggttcaggatgttgttatcttcttcactctcattgtcactttcgcctccaactacaatctattcagcttcggtattggaggcaccttcggcagcaacttcctctaacacaaccagacccggctgcttcatcacttctgaaattggtgctgtctcggcggtttcggtcgcctctccttcatgagataccctagcagtggatctcaccctggccatttgtg

SEQ ID NO: 33955 - DNA, 384 bp, Zea Mays
ccgggggtgagcgtggatactccgcatgtttcctcctatcgatgatcatgctgccagtcccggggaggggagcgagtctcatgtcacctcgaccgtccccggaccggactgttggtggaggctgccgccaactcgatcctagttacacggtcacgtgcttgtgtaccatgatcctagtcgtattccttccggtgcgttatttcattttcatgtcgacgatcgcatgaagcactgacattgctccgcgcgtctcattggttgttgatggcatgacatggatcgttcgaggatgggcgaggggtagaagatgattggccgcttgagtgagcactcgccgatagcccttcacgtctagggttcgcggaggccaaaggctatctacgc

SEQ ID NO: 33956 - DNA, 271 bp, Zea Mays
gggctgtcagcttgtcgcgtgactggatgacgacgacgggtccgagcagcgatgacatgaacacatggaaagcagaggcactggacgagacaagcgcgaccagcgaacctcggcgaggggagacgtggtcggcagagagctgcacgacagtggtctacagagccgagggcacacacaagaccatggcaaggagccgtgcgctggagtaggtgttgtgcactgtgcgtatggcgacctaagcgcagagaagagcagcgacatgagatccgcc

SEQ ID NO: 33957 - DNA, 318 bp, Zea Mays
ggcgaaagggcacagcgagtgggagagaagcaacgcatggctgctactcgagggatgaacccctttttaaaggcagactcccccgctcgcgccccgaaacgccacgagaagtctcccccgatgcacaccggagtacccatcctatgacacgggggcccggccccacaagtcatatagctggcgcgctgatctccgagtgcgaagaaggcgaaccgccacgcaaggagcgtactgttgacccgtggtggcgtgcctcttcatctccgccgtgaccaacgacccagtctctggcgcaggggcccgagcccaagagtcatc

SEQ ID NO: 33958 - DNA, 558 bp, Zea Mays
ctggccacgatgagggtgttcttgcggtgggttagagcagatttggggaaaatttgaaattcaagctctcggttgcaagattggaggcaatattgggtggtgtggtgcgtgatgatcttgcggagcttacggagggctcaatttatactaagcgagagcggtggccgagaattggaacgatgacgcgcggcggtcggaggagggggggtttcactggcgcagtggattggtgtcctataccgtggcattcactccagtgatcaacagagagctaaagcaggtcatggcgatgcggtggagatgcctagacacgcgacacaaggccggaaggcggcggtcaccggcgaactcatccgattacaccgtggcgagtgcggtacaatagacggaatagtttactggccggagttatccacgtcgacgacatttacgcgaccttgagcgctatctgatcaacccgagcacgaatcgaaacggcggcggcacgaatcgcggcggagagatcgtcgacggcgagaaactgagttggcggtctgatctacttcagatactgtacca

SEQ ID NO: 33959 - DNA, 314 bp, Zea Mays
gcagactctgctatacagtgatgagcgcgacatagcctcctcctctcagcgatgtcggtcccttcttcacgatgacgaacgacgcgacgtcgagtccgacgtgcgtaaagatgtcaatggagaattacccaccggggattaactccccagacccgtacccatgaacgtcgacccgcccccatccccgaacccaaacccgacctcaggtacgaaaatcttcccatacccatccccgaccgggtactaaatacccatggggacccatacccgacccgactattcaacatttcagaatttcagcatatagattatgg

SEQ ID NO: 33960 - DNA, 443 bp, Zea Mays
gccgaacaacaccaccgcagggccgcaactcactgcattcagaggtgtctgtgcctctagggtcggtgagtatctacccttgcgatttgtcattatctgctcgatgtatagcactttttgtctaaaagcttgaatcctgatgtcggatctggcgaacaccgacgatgtcgccaccacggtgatgcccctcgccgccgtggtttgggatcgggtggggacaatggcttttgggccgttgattccacaggaacagttaggattacaatagaacgtaccggttggggtaggatggatctgcatcgctggatggggatcaaatgtgtatgattttatcttggacattttagatcctgatcgtcggtctggagttgagcggctgagatttgtttgtcttaccggattcggggtgcgcgcagatcagtcgttggatcgtgggcgtagag

SEQ ID NO: 33961 - DNA, 613 bp, Zea Mays
catccttggcttgtggttttcttccggattttctttgtgggggcgagcttcttaagcttcttatcatagtccatctttaaggttcgataggcctcacgggtgttggcctcctcaccttctgctatgtcgagacactcttggagagatgccttctccttcttaagctctttgacttgctgctctaggctttccacccgggagtttaggtgggtgcagtgggaggagagatcatcgtagtgggtatcgagggtgtggaggtatccgaccatgtagacaatggtggggtcatcctcggtggggtccctccctgagagagcctgaagtcttttcctccaggtgggggtatttttattggtgggtgggaaataacaaagaggggtttcaaagatttctctgctgtagttttggcatagctgtttgagggcctttcgggcaacactttggcaagtgtctgggaagcggtgcccgatgaaggtgacttggaagggggggtggtttgggtagcttcggctatctcccaggtaaactgccatagagcatttctccattccatgttcgcggtattccttccagacatattcgggcttcttgcggatccccatgcgcagtccgc

SEQ ID NO: 33962 - DNA, 285 bp, Zea Mays
tccggccatgtacggtgcgatctgtgtgttttgtgtgcgggtctgcatcgggtcggacggtccggcgaaacacgtcggacggtccgcggtataaccggaccgtctaagatgatgctcggacggtccggtcgtgtccagtacctgccgcgtgcctagtggttgcggctgtgatggtggcacgaaagcgtgcatcggcataccatatgatggttgggtcaaaggtgacccatttatagccgatgtgtttgacgcgggtggttctgtattagactctcgtgatggaaa

SEQ ID NO: 33963 - DNA, 282 bp, Zea Mays
ggcagtgacaatgacagtcacaacgaaaatgatcattgagagccaactcaaaatgaccaagatgctgcagaaaaagtgattgatgatgaagatgaatctggagctgctggtgatcaattcaagctggatgatgatctcatataggtgttgccttcttggaccttagtcatagtctactaatctactggtctggtaagttgtagacttgtagtttcatagtcttatataaataataaacttgttgttgtgttgttatggactatttgagtatttatactgctg

SEQ ID NO: 33964 - DNA, 362 bp, Zea Mays
cttgaataagtttaggcccaaagaactgtctttctccagtctgatcccaatatagaggagtcatgcgcttcctgccatatgaagcctcaaatggtgacatcttcagactgtcctggtaactgttattatatgagaactcagcatatggtagactcttgtcccaactgcctccatgctgaagggcacaagctctcaacatatcttccaatacttaattcatcctttcagtctatccatcagtctgaggatgataggccgaactgaggttcaacttcatatccatattctcatgaaagcttttccaaaatatagaggtaaactgtgatcctctatctgaaacgatcttctttggaactccatgt

SEQ ID NO: 33965 - DNA, 426 bp, Zea Mays
cttttaaggtgctatatgggtatgatccagtgtttgctgcagcaccagtattgtctgaggcaaaggatcaatcagtccatgatttgttaatggaaagacaacagtgttcagaaatattgaagtctcggttagcagcagcacaaaatcaaatgaaaattcaagctgacaagagaagatctgatcgagtgtttcaagaaggggaattggtcttgctcaaattgcaaccttatgtacaaagttcagtggttaatcgtccttgccctaaactagcctataagtactttgggccattcaaggtgttgaataagattggttcagtggcatatttattggaactgtctgagaattctttggtacatccggtattccatgtttcacagttgaaagctttcacaccaaatgcagctcctgtgttttcggatctat

SEQ ID NO: 33966 - DNA, 1456 bp, Zea Mays
cacgtgccgacgcgaaagagggcaatagaagagtattgacgcactcatcatcgaggagggaatcgaggtcaggggtggggaggagtcagcaaggtggaaaacctcctcatcaaagacaacatgacgagagatgatgtggtgggtaaggagatcagggtagaggtacccctggtcaagggagtaaccgaggaaatgacagcgagtggagcgggggaggggggtagcttgtgaggagcagtggcggaggtgttgggataggagacatagccaaagactcgaaggtgcgcataggaggggttgttccatacagagcgaagtgggagtgggtgactcaccgccttgaagggaaggtggttgagttgatgagtagcagtgttcagggcctctgtccaatagctagcaggaagagacgccagcaaaaggaggtagcgaatcatgttggcggtggtgtgaataatccgtttgactcgaccattttgaggggaagtgtaggggcacgagagtcgcaactgaacgtcgtgggagagaaacaaggagcgagaggcggagttgtcaaactcgcgttcgtatcgcactggagggcatgaaccaggtgacagaactgtatggagacccaagaaaagaagtgcgagagtgtggaatgtaccagactttaatcgcagagcaaaagtccaaagaaagtgagagaagtcattcagaatgactaggtagtatttgtaactagagaggttgaagacaggagatgtccagagatcacaatgaacaagatgaaatgcctgagcagctctggatgtggaagtagaaaagggaagacgcgaatggcggctgagctgacatgcatgacaaaggttctaagaggggcccttggtccaagatatatttgagctactggagagtttggacatgacgtcaggtccaggatgaccaagacgacgatgtcaaatggtggaggtggtggtagtagccagagcatgaggggaggacacgtcggtggggcaagcagatggctggagcgtgtccagggcataggctagggcaacacaagaggagggaggtgggtcaagacaagagatagagtatagtggaacggagatgtcatatcgagcgagcacgacatgggtggtatagtgtcgtatagggagtccctagagatcgaactacataggacaacagttgtcagtagtgaagggacgaaccaagagaaggggttgaatcatatgaggggcaacaaggacgtcgttaaggtagaacaatcccggaaaaaccgaatcaactactgaggtgactaagagggtggaaccgttccccacaaagatcgaggaaaggatgagaggggtagggaggcgccggagtcgaccacccaatcggtgggaggagggggtggcgaagacatagggtgcgagaagagagccacgagatgtgcccctatagagccactagaaggtgggggagacaa

SEQ ID NO: 33967 - DNA, 280 bp, Zea Mays
gtttagttgagcttgcatacctgcaccaaatgtttgccatgccctttttaaacaagctttgaagtgtcgattcaaatgcccagtgccaccagcagaatctgcactcaactcagttttacaatagtgacatatagcaatataactttttataccattctcgataatctcccgcttatccatatgcttccagcactctgccctagaaacagatggtttagcaccctttgctggcacatcaacaccaatatccccatctgctggtaaggaactagaaccagac

SEQ ID NO: 33968 - DNA, 399 bp, Zea Mays
tgttcttcgaattgtggattgttattgatctcaattggctagaaaatgttgaatacctatagttgtgatgtgttttgtgatgatggtactgtaggtgcatctacattgccgcccctgccaaatagacagtgaacaatgacaattattgttatatcatatgaggtactatacttctctgaaaaagaggttgataacacactataatttgctgatgtagattaatggtgaatcactatatcctaaatggctagataaagataggtagcacaatagagaaaagagcaacctaattaatttaggggtcctactaacaacccctctcaaccttacctgaaaacaagtagagatccttcgcaactaaaccataccttgcatactcaagttactccttccataatc

SEQ ID NO: 33969 - DNA, 485 bp, Zea Mays
aacaaagctcacaatcttcgggaatgcggcaaacctcttacaggccactagccccaagaggcagagggggagaagcttctgaggaaggtttgacactcagcccaggagattgttctgcttattctatggggaggataagggacacacaacaaggacgtgccaagtcatgatccaaaagcagaaggagatcgctgaagccgaagcaggtcttgcatactgcctcatgatattcgccatatatccctgaatatgtgggcaaccagcaacccacgacatcagttgcttcggcaagtcattctcaagctgcttgggctcagttaccaccactaccaccattggcgcctaccttggttcatactcagcagccagaagggcatcgccaggcgcaacaacaacgcgacactcgggaggagtccgaagcttgcacagtcaatagcactatgcccgaatcaagacacatttactaaagtagcacaggggctcgg

SEQ ID NO: 33970 - DNA, 688 bp, Zea Mays
gcaaaccaacccagatgccaaatcggcagatcgctttccttgtctcattgttttttgtgaagtagtttagcccttcgcccttcctttgaaaaaatccttcgtccgtgggcgagatctggaaagctgtccaggttctctagtagatgtactcactgcatttgagccaagttgaaaaatccttagactcacagctaattaaaatacaaatcagattacacgatctctggggagaggaggtctgaagctagcacccttgtcgattagttcacagaacagcttattcagatacaaatcagattacacgatctcggggaggaggggggtctgaagctagcagagcaatctatatgaaggaatagagaactagggaaggaggggagaaaaggatgaggaggagtgcaaagctagaagaagaataggacatgaactgaatgccctcccccttgctgatgtctctcctcttgtagttgctgcgatttgttacacaggcgaatgggccatggcccacacgagaggtagcccatttgatgcaaatacctgtcattaccctcttcttgagaagctgattgccccaagcagctgtacgaaaaccttggagatatcttgtcttaaagccggtttgcagagacatccattgttacttcaattgtcccctggatatctctattgtttcctggtatgaaatgat

SEQ ID NO: 33971 - DNA, 451 bp, Zea Mays
gcgcccaaaaaccggcgaccggattgacgcccaagagccccaacaactaccccggatggcgctacacgtattcgagacaaagacgaaacgatggaagcagttcttaccaagcttggcggcgtggaattcctcggccacagagaaggcggatctgcggcagagttacagctccggcgagcgattcacaaactcagaagaggttatgcgcccgcccctgccgtcaagcaagccccaccagttcacgtggtgatctccgagcagttgccaaggccagaaacaacccacacccgagatggtcaacggcggcggcaacctcaattcgcttttcactaaactcttcttttgccgatgggtgagtttcaagcgcgagggtcagggttcaatgcgatggtccgcgacccggccttaaatagtcgaaggtgggagcgaagtccgcgcgtttgttacaccg

SEQ ID NO: 33972 - DNA, 333 bp, Zea Mays
cattgaaattgaaattcactgcacactttagcctgcaacacacagtagaatggtattaacatattgtacatttagcctacaacacacattggctagagcactggctggtgtctgcttcactgcggcactgcgcactggctggagattcctggccgagcagtgccttactgccttcattccggcagggcagctatggcgccaatgtctatgaacattatatgacgtctgtggcattcagtattaccacagaatgccatgttcagtattgccgcgccatgtctatagctaggcagctagaatacacatctctctagctagctctctctctctctc

SEQ ID NO: 33973 - DNA, 403 bp, Zea Mays
tctagttcaatgtggcggggaccgtcgatctcgctatgggtggctaagattagaggcttgtaccggttcggctcggctcgatctcgaccgtagatcggtgtgtaagcgggcacagttggtttggggctgttttaaatcatggtcgtcgatctcgtgatccgcggctcggatgtattggtgggttgggatctaatccgatccctgaattcaggatcggacggctgtgattagctcgtaccccttcgccccggcatttattcaaaagagtccttatgttattagaatatagatcccgccgtccactctggtgaatcgctgtgtctaggacgcttttgcgctttagcccctttccttttatataatcatgcgagcaatccaggaaaataagaaaacagagaaatac

SEQ ID NO: 33974 - DNA, 324 bp, Zea Mays
cttgacgcccgcaacctgaagattgtcacactactgcgacagccaggtggtgtacggtgctgtcgagaatcggatgtctagaagctgaaagttgtcgccgcgacttcgacgtcttgtacgggaccacttcgacggtatggagtcagatgatgaattcaatcagtttgtaatgaacgacctgatggatccgtcatcttcagatgatgagaatgatctgttttttgatgtcgcgcacgtgatcgttgatggtttagttaatcatccgagatgaattggttctgttgagggacacgcggtagtgcatcgtgacagactgttacacca

SEQ ID NO: 33975 - DNA, 326 bp, Zea Mays
gattcacaccaagcacattggtaagctatttgttttctataaagcgttgctctacaacctgttttacatacttgtgtctacgcctatattttttcattacaaaacagcacccttcgctagaaataccacatttcatcaacagcacagtacttggggaattcatctaaacttggacactcaaacgtctatttactttccttttatcctttaaccatcatacaattcataagtgagttctttttttgctctgtatctatttcaactaatggatcactatcaacttatcaatttgcacctataacagcttgatgccatttagattttat

SEQ ID NO: 33976 - DNA, 669 bp, Zea Mays
gtgaagctcaagaagcagctgacgcagccaagtagcttcagcaacaccatttgccacagcaagatattcagcttcagcgcttgacctggagaccgtatgctgacgcttagaagaccaggacaccaagttatccccgagaaatactgcgtagccagaggtcgaccgacgagtatcaggacaaccagcccaatcggcatccgtgtaaacaacaagctctgtaggtgaagatcgacgcatggtcagcccaagtgctagtgtgccctgcaagtaacgcatgattcgcttgagagtagcgaggtgtggttcccgtggaccatgcatgtagaggcatatctgctgaactgcaaaagcgatgtctggtcgggtgaaggtcagatactgcagggcgccagctaggctgcgatactgtgtagcgtcagcaacaggtggtccatcagcagatagtttggagtgtagatcaacaggcgtgctgcacggcttgcacgcactcatcccggcgcgctccaaaatatcctgactgtactgccgctgagaaaggaacaggccatctgcagagtgtgtcacagaaattcccagaaagtgatgtagctgacccatgtccatcatggcaaattcacgttggagagcttcaatgatgtacttgagaaatccagcagaggaggcagtgag

SEQ ID NO: 33977 - DNA, 374 bp, Zea Mays
ggagatcgattagttgttcccaaggaccatgagctcaaaaagaagatattggatgaagctcacctttcaaaattctccatgcacccgggcagcaacaagatgtaccatgatctcagatccctatactggtggaccagaatgaagagggaaattgccaagtacatatccgagtgtgacacctgccaaaggattaaagccagtcatttgaaggcagcaggccctttgcaaccccttcccataccatcttggaaatgggaggacatttgcatggactttatcgtgggactacccaacacctccaggcaccatgattcaatttgggttgttgtggacagattgaccaagaccgctcatttcttgccagtgcataccac

SEQ ID NO: 33978 - DNA, 329 bp, Zea Mays
gccatttctactgagtgctcatgagcaatctgtttttcttctctctatgtttccataaataattctaacatggcaccccttactatctatctatgtcatcttattatactctctcttggggacctcaatcgtgcgcatttaagctcgataggctcttgtcgcactgagccatattgcaaccgattagagaatggttccacaagtcctccgctccacgtaaaattaagcatgagtgctctgtgtcgacatgatcctgtgtttgagttgagaacgtcgtcccccgttggcagagggtgacgtgctagtctctataaaaaaacacaaatact

SEQ ID NO: 33979 - DNA, 533 bp, Zea Mays
agaccgtacccatttagcccgaagcccagtacccaaataattcgtgcgggtaacaaaacttaatactcgattttaattcgggcctaatcaggtatcacgttatggtacctgaaatacccgtttggcccgatttgttgctcctgctcgactgctttgcagtggcagatgtccgtttagttcctgctcaccttcctactacaatgttgccttgttgttgtgtgctgcacccgcacttctgccttgcttttgctgcgagttgcctgttgtgcatgtgagactgtgagtgtggacagtggatcaacgatgtgtgagaccgtgattagtgatgtgtggctatgtagaccgtgagctgtgatcagtgatcattgatgctcggctgctttgatgtgagtgatgctacgtgaaaaaaatttaaactaaatgcttattgtgcaggtttgcttcctggttttcattgtatatttacgttaaatattatattgtttgctgccggaatgtacaaagctaactacagtgaagcaatgtagcggata

SEQ ID NO: 33980 - DNA, 341 bp, Zea Mays
cagtcctcgtggttccgcgaagacgtcggcgtaggagtcgagtaacgcgggtagcaagtcctgcgtcccgacgatggcgttgcaccggggtgtagggcctcccacccctgtccatgtcacggtgcggccgtgacgccagagcgtcatggttagggcgttgaagttccagagtagggagcgaagccattggacccccagaaccacgtcgaagccggcgagaggtagaacgtagcaggtgtggtcgaagtcctctgcatcaatggagacgcgtagcatggggcagacaccttggctggtgactctttcgccattggccaccttgacggtgaggcccgggcgtg

SEQ ID NO: 33981 - DNA, 463 bp, Zea Mays
cccatcccctctaatctagaccctattcctccacttgaaccccaccgttggcgtgaacaccgagcgaagaaccaaaagaaagtcgccgccaccgctgtacttcctcctcaccgtcgttcaatgcgccgacattagctgttgggcttcgcgatgtcaacggggcgggaatcagagcctcgccaggggagattgggaagcggggttgaggtttcgctctcgaaattaagactcatgaccgattcgaccgagtcctagaccatcagcgtcgctgcttcctccgccgttgaggtaaccttcatcatgtccactctcgtctccgccttctctaggtcctgttaggacgcgtgattaggtacggttgggagcttaattgctcgccggtggcgggcagagtcaccgtgtcaccttgttcgggcgcagggggggtttgagcgggcagatccatacgggttggctagcggcg

SEQ ID NO: 33982 - DNA, 323 bp, Zea Mays
atggcctccaccgaaccgctctctacagtcttcactatcgagtttccggacaaaccaccatgggttgttgttcccttttgtacattatggtggccgcaccacaaatgtggttgatgtggtcttgcaagagtacaagtatttttagtacaataatgatgcatgcagcactgagtggtaagaggtatgcaaactttactaaacactagacctaaacctagaccaagtgcatagatatggtctaactagcctaagcacttcacaaaagcacctacactgaacgcactagaatggaccaccaactcctttggtgtgttccacagctg

SEQ ID NO: 33983 - DNA, 499 bp, Zea Mays
gatggctcctagccgtcgaaccgttgatggagggatcggattagaacttcgcataacctttcatttaggttagtcggagccattgagatctggatgggtggatgcgatctgattaggcatgggcaactaccagccgtggatcgtggatcggtcaggccggattggattgcgatctcatcaaaccgatatggtgtctcggccctcagatcatgatcgggtggtcctggttggatcacgtttcattaaaacacaaccgttagatggtgatcgggtggcccaggtggcgtatccgttcgagtgggatctaatcctgatcgtctagggcagatcggatggctcgaggcggatctacgtaattactacgcgcgcacttttattaatcagcccctggactctgcctcaattaacccgctgtccttgtgatgttgcatgtagtttaaacggagcccctggatcttgcaaatcagcccctaatcttttgcagaatagtgcccccatt

SEQ ID NO: 33984 - DNA, 662 bp, Zea Mays
gagccgttttgagggagatgatcgagcagggttttgagggagaaagcatcgagaccgaggagagtttcagatggtcggagctgagattgcgaaaaagctcaagcggtcacctctagctgccagaacagtgggaagacagttatgtataagaccaaacatcgagttttggaggaatactcgggatcgagaccttctggacgagacaatgggagctctgtggtggagctaccagcatctagatgagcaggtcaggcgatgcttttcttattgcagtatttttcccaggaggcattggctggaccctgagtatttagtcaggttgtgggtggcagaaggatttgtcaccagccgcaatacaggggaggaactggaggctgttggtcgaggctactttgatgagttagtgtcagcctcatttctgcaaccagtagatggtgacaaggaacgctatacgatccatgatctgttgcatgacttggtaagtaaagtagctggaagtgactgcttcagagctgacaatggctgggaaggagaatttcctcaggatgtccgtcatctttgggttgagaactgtaaactagacttgattgcccacaagattaccagactgaaaaagctacgcaccctgatcatttctgctggtgagaatgacacgccagttg

SEQ ID NO: 33985 - DNA, 434 bp, Zea Mays
gcgtatagcagtttctggacttggggatacttcatctttgagggcctgagaacttcgctaatgaagtagaccggatgctgcaccaggtatgtatgtccttcctccacccactcgactactaacgtggtgcataccacgtgagtcgtgcagaatatgtataacaacagatcttctactggctgattcggtgtggctcggcgtggtggcttgagtactggtggtgtagtcaggaactttttcagtgcctctagagcttcctatgcctctatggtccactgaaacttgtccacctttttgagcagtttgtagaatggcatgtctttctcgcctagccttgatatgaacctgctcagggctgccatgcatccagtaagcctctgtacctttttctgtgatcgcggtgcttccattctcatgatgacctcgattttttc

SEQ ID NO: 33986 - DNA, 392 bp, Zea Mays
gttggatcgagtagatgtgagcacgccgtgccgatttaagtcactaccgacttaaaccgactgctctgttagtagggtatagtggtcaccctgagttacgcgtgagcatgtcacaccgccttaagtcgtcgccgacttaagtcgattgctccgttagtagggtatagtggtcaccctgagttaagtaagcgtgagcatgttacaccaccttaagtcgtcgctgacttaagtcgattgctccgttagtagggtatagtggtcaccctgagttaagtaagtgtgagcatgtcacaccgccttaagtcgtcgctgacttaagtcgattgctccattagtagggtatagtggtcaccctgagttaagtaagcgtgagcatgtcacaccgccttaag

SEQ ID NO: 33987 - DNA, 355 bp, Zea Mays
atgcttggaacttggaagaggacaaatcagagtgcttataatcttaggaattcactagggcggttctgggtgacgcctaagcgtccacgtcgaaatgcctagcgtggcaggtgggcccctagcttgaattaggcgaggcataggcctatggcgaccacgaccgagcaattggacgcctagacgatgccttaataaccgtggtatggcatctgttagccctgcctaggtagcaggcgcacttgtccgctagagagaagaggtcaccaacattaacctagaccgaccttttttttcctctgagtctgacttagacggagggcataacctagatgctttgatctatcctagatattcc

SEQ ID NO: 33988 - DNA, 478 bp, Zea Mays
agttataaaacaacaattcccacctttctacaaccattcaaacatgtttgcaacaaatccaaaaaaaagaaacaagtcatatctacaaaacttcggttgttggcatggagggagggaggagctctagtgctatggtgcttggtgtggagggcaagtcggcatggggcgggaggctagctggcgtacgaggcacctgcgtggaggagggcggcaaccaacatgggaaaggcacgaggagggcagcatatagagaggatagggcagcatgcgacatagggagggaaggcacatgcatggagggcaggctagcatgagatgcgcagctaattggcattggaggtgcctgtgtggaagagggcgacaagtgtcatggggaggggtggtgcctgcatggagggcaactggtattggagaaggcatagggatggcgatgacatcaaaggtggggagggtggagtccgacatggggagggcagtg

SEQ ID NO: 33989 - DNA, 388 bp, Zea Mays
gacagacccatttccagatgtcgactagagctggtgaggctaaggtgaacgttgttcttagtatgctggctagagaatcgtctgactctgcccatactgagtcgatggctattgcgttgggtaggaccttggtgaagacgaaggagttcaaaattcttaaagtgttcgtcgcaagtgatcgcgccggacgagctatccaaccgtgcctgatgagaagaagagaaagaaaagacttcagcagttgtcatgcttagaacaagatgctgatccctcgacatcactcctcggtggtggcccgcgagcaccacccttgaggacgatatcagaggttgtgatgatgccagagttggcggtcgtgtgcttgatgaggacgaagaggaggaagaag

SEQ ID NO: 33990 - DNA, 418 bp, Zea Mays
cgccagctcagtcatctcaccgccgatgaagcctcgtcgtgattcgtgtcaccggcgccaggattcgcgctcggggtggattgataacgtcgcggggataaggatcctcgccgacggtgagctggaggtcactctggtgactcaccgtggctccccttctgctttacggctggaggcagttagctcgccggtgaaccgccattgctcggttgtgcgccacgtatccgagcacttctgtcgcgtcactgtgcctctttacagccgttaaatcaacgccggtgagctcgccacgactgtggacacgcacccacggcaccagagttctttcccctctccggccgccagcacccctcggccgaattcgtcaccgaccctcgatgcgcctataaattgcgtgtgtcactagctccgtagggta

SEQ ID NO: 33991 - DNA, 275 bp, Zea Mays
gtggaaagtggggatgaagactttgaggatcagctgtggcacccaagccatactatcttcggaaagtcgactatcaaacagagtcatattgacgccatgagggggaggtattttcgtgacatgcctattatcagagttggatgagatagtactgcccctgctccggaggaaaacgaagttgttatataccgaagcttcctaaaggcaagtcttcggtttccgctgagcaggtttgtggttgaagtgctgaagatatacaagatcttccttcatca

SEQ ID NO: 33992 - DNA, 290 bp, Zea Mays
acgacaaacgacgctggcaatagggtgtcttgtcaaggccatcagattagctcaattatgatatggggctcattttgggcaactttaggtacactctaccctatgactccgcaggctcactaaggtatctcttcatatggacttggtgtttgacaacagtgcactttgcactcttatcgagcaacgtgcaaattggtaggagcccaagcaaataaggatgacaattaaaagcacaacttacggaaccaccagaagacaaaccatgccttgtagtcgaggcaacgttgccg

SEQ ID NO: 33993 - DNA, 391 bp, Zea Mays
agaatctaaatacatgattggatggctgggtgtgcgaagccaggtgggcgtgagcctaactgggccaataccctcgtttctaccgtatggatggagacagtcaaatgatcttaaaataaattattttgtatccactcatatagttcgggtcttccacatacatgtaatcaaatatatactcgtataaagtcaacgcacgcagtcagaacaagatgatgcgggtaaccaatcaagcggaaaaagtcggatgcaagtacagttcagttatgcagttcagttatgctctcgatacattatatatagaaagaatttgtactagtgatacattactatgtaaaatagagataggtttcataaaccgtatcaaataattccaggccacttaagttgt

SEQ ID NO: 33994 - DNA, 493 bp, Zea Mays
cggctgagacctaattcaagccctaacaagagtttcccctcaattaatttcactaacggagctctaacacgctctgtccacggtgacagcgggcacgacggacaatcagacacgttcccggcgatctaaggggtcctagtctaattggcgtggtcggggagcatcagggacacacaagaacactgaaacgaaagggcagaggacatgagcgaacctgagacgagctagccacggcgaggcctctttcacggtggcggaaagcaggtttgggggcaatctagaatttgcgagctctggtgaacaattgggggcacgacttggtgcttgactaccctacggacccgtcggtgtgctcaatttatagtgtgcttgagtggtggtgcttaatttggacgaattgcgctggagaccgagaggggaatgagtcatggcggcgatctactgtggtaatcgcagggcgactgaactacagtggtcattggatggtcactac

SEQ ID NO: 33995 - DNA, 429 bp, Zea Mays
ggcaggggtctctgcgcaaattacttaagacacagagaacagttccactggacggggggttctaaatcctaaaaacataaggtttcttttgtaaagtgtacccgcgaaggggtaccttctaatctgagccctccgatcaggaatctagggttcaaaatagatcaagtgttatgaaccggtattgaacccgagccgcaggatcttgatccaaccgtccagattcaatgatgcttgacctaacctaaaccgtaggatccccgatctacgcttctaattcaatatcgcgtataggtttgtttccatctattcacagccgcgcgatgccaatcggacggccccgacgacgactccctaacacaaccacgccccgacgacggagcagagctccccacggtggcgccactccggcgagcgcgcttcaagcccccc

SEQ ID NO: 33996 - DNA, 377 bp, Zea Mays
ctctaatttgttgggcctcggccaaccccacctaggttgggtgtatcatctggtaccagaactaaggcccattttaagaaggtgggaatgatgaggacatcctccactattacccgttggcaaagacgcaattggcccagttggcccaattgtagtcggacggtgaccgtgtaagcctcagaattatcccacatcgcttaacttgggaggaggagccactttaaaagggagagccacccttcccccattggactagtcttttggggcgattgggcctttccctaagttaggtgtgcttaatgaactgttgagctccgggcaactctaatttgttgggcctcgaccaaccccacctaggctaggtgtatcaccttcta

SEQ ID NO: 33997 - DNA, 381 bp, Zea Mays
cgcctctcggccttgtgtcgcgtggctttgcctttccaccgcgacgccgtgactcgctacggctgtccaatcgtcgccggtgaggtcgccacgacggtggacatgaattcatgcacgccagtaactccctgcccttccgaccgtcgtgtgtcgccgttaaaattcccagccgccgctcttgcttcctataaattgagccctccaccagccccacaaggtcatcagccacccagccaccaagaatcgctagcaatcgtgcatcagtgagcttgaatttcggttttcccccaaatcaagcttccgccaccctgaaaccaacctcaccgcggccagccccattccggtcagttcatcctcccctctccctcgtttaagctttct

SEQ ID NO: 33998 - DNA, 271 bp, Zea Mays
gagccatatgagacgtaaaatagtcatcgtcggcggccaagggaataggatccttcctatgccaccgacccccggtcacctttaacatttgtgaagatgtttcccggagttcgagcaaagtcataacctccccaggcccagcgcatgtccccgtcaattcctcaacgaaaaatctagaggcctttggccccgttgtttccctcttcgtacctttcacctctatcttccgagtcaccgcaatcacaacctttcccttctaggtgccctctac

SEQ ID NO: 33999 - DNA, 440 bp, Zea Mays
cagaaaggttcactccggaaggactagccttcggttagtcctaagacatcgagcccggggtcatacgagacggagacaaaagggggtcaagagggtcgagaagaaggcacatgactaacccatcataaataaccgaccacattaattgcgcttggcaccgagccacaaagggacagtcggaccaccttccactcatgacctatcgagcctagacttgagtgcgttggccatcaacaagacccgtaacacgacaagatgcgtcgagacccaggctacgacagctaggggtcggtgtggcacatggacgataatgttgatgtctgagctctccgcccgccataaagagcgtgaccagggaagcctagacgaccgaggcataaacggacaaacgcaactttaacaagatagaacactctattttaccacagcgcagcaactcc

SEQ ID NO: 34000 - DNA, 488 bp, Zea Mays
gtgggtttatactggtttcggtagaacatccctacatccaattaggtcgctcatgttaccttgcactagtttgtagtagggggtttccaacgggcgagagggatcgagctcccaagtatctgcagtgtggatgtgcttgccgttgcaagtgctctatgttttgacttgtgctagtggtgtgttcgcgtgattgctcatgtcttggatcgtggtcctttaccttccctttataggctaaggtgggagaagcaccctcttacaaaagtctaagagttaggcgaagcatatgaaggccgggcattgtcgcgtagcccattgtcctttagggttcctactggtcgagggacgtcgtgagtaatgtctccttcccccgtcgacatattgtagccatgcctaggccacttcgaagcctatcgttatgctccatcacttcccgcaatggtttatccgaaatcctttgtccactccctagccattgagtggttgcg

SEQ ID NO: 34001 - DNA, 390 bp, Zea Mays
atcgctttgcctttgcttgtcggcaggtcagaagtggacaagggagttaggccaaccgtttagcttaaggaacgtgacggggtgcgattctgggagctcgtgtctctcctcacgtgacgcctccatgaaaattagctttgctgcagaggcagccggtttcggccaagaatttgtccattcgtcactgcacgtggcacaaccacaaccaggttctcaggtttagcagatcctcacctctcaacaaaactctaccgcttcggcttgctacggctttaatttagctgcggtttcacaaccagccgaataagccgatgctcaccaatattcgttagatgctcttttcttttctccgataaagatctccgttcccattcttttcaccaatacttc

SEQ ID NO: 34002 - DNA, 433 bp, Zea Mays
cgagtggtgactacctgtcccgcctgatgatggccacgggcgagacgtggctacttctcccaccccgggttgtcctcgggcaagtcgtgactgcctatcccacccgaggatggcctcaggtgagtcgtggctaactgtccagccagggtttggtctcgggtgagtcgtgattgtgtctcccgtcgggggttggcttctggcgagtcgtgactgcctgtctcaccagaggatggcctcgggctagtcgtggttgcctgtcctgcctgggcttggccccgggcgagtcgtgactgcctctcccacccgagggttgcctcgggcggactacctgttctgtcttgccttggcctcgggcgagttgtaactttgtatcccaccggggttggcctcaggcgagctgtaactgtgtatcccacccgggggttggcgttgg

SEQ ID NO: 34003 - DNA, 508 bp, Zea Mays
aattagtggattgtaggatttggtaaaaccctagcaaagtatagagcaaacataggtggagtttcctagctttttgggtccagcactgtgtggtgacaacctgatgcaaaacaatgattcagtgaagagctaatccttagatcttcatgcccctaatctgtagcagctgattcacatcttcccctttcatctagtgtccccagtgtctgttgcagactccaatgcaaatagtaaatggttgcttgagctgcatatccacttcacaatttatctgtttacatctaatcatttccatttcatgatttagctccttttattccatattttgtgtatttctatttcccaaaagattcttttactaccttaaagatatcatggtttatcctggtttcataggaggtatgctgcatgtgcagtgtgcatggtttttgaggcattgtggcatccagtggcgctggggtacgcctggatgctaggcaatatggcataacgaaaaccttgtggctcc

SEQ ID NO: 34004 - DNA, 421 bp, Zea Mays
ccaagattcatcacccttcgctgccggtgatccatcgtcacaattcacgctcgcctgggagattcgtgctacgagaagtgtggataatgtcgggcgtggtgagaatatccagtgcagggtgaatctggtcgctggccggaccggtcgccgtgtcccgccgtggttaatcgcgctggcatcaccggagttcgccattatccggctaggctacgtgcctcgacgccttaccacgtcgaaataaaccgctctaggtagctcgttcatcgcctcagccactgccccgataaaagccacgaatcaccacgccagtgactcagtccctttctccgaccgccaacgcgccattccaaattcaagagccaccgccctcgagtcctataaattaagtgtgccatcagctccgctaggtagtcatgcatcc

SEQ ID NO: 34005 - DNA, 279 bp, Zea Mays
caagcaactcacgagccgcggtgccggtgaaagtgaccgtcggcgtcgacccagtgaccgcccacctgcatccgcagcatcctcagccttacgttccgtcgccgccataaagcctgcagctgctgcagttgtgcgcgcgaacgaacagagatgaatgatctagtatacatgcaagaaataaataaagcgtggacatggcaatgtgcatgcagtatagttcgcgtgtatacaagctcaattaactacattaacgctgtagaagtgctacgcatatatacg

SEQ ID NO: 34006 - DNA, 497 bp, Zea Mays
cagccacaggggactccctgggaagcaacacctcgcagtcagccacagagcccagatttccatccagaacacaaacctgctgacaaccaatctgattgtaatcttcatgacatccgttcatctgcccattgccaggacctttaagcacagaaatctgcccacccccctgctgacttccaatctgacagagttcctcaggacacccaatcaactgcccactgccagggcactcatgcacagagaactgtccacccccttgcaagctggagcactcggcagagacagcgcaggaagaaaccacaggaccgtgactctggatctgggcatcaacttctctgaactccacgttgctgaattccaccagtacagcctcatcagctaagacctgagaacaatcattcgtttgatccccatttcctactcttgggcctatccggtcgtgaactgaacgacgctccgatctctgacccctaacatgatgcccctgaacaaactca

SEQ ID NO: 34007 - DNA, 777 bp, Zea Mays
caaaaagcgaagccatgtagcccagattgaaatgcaaaacaatgatcaggtaaacaaatcgtagagactggagaaggtctctgccctgctaccattatgtgtgtcagaatcagtctttggagggatgcatgagaatcagtgaagaagcacatgggaaagttgaggccacgcagatagtggaggcatgctgctggccatgcttgtcatcattcccatgctcacatacccatggtccgttttggtgctccatttaatttgggatttaatttggtgggaggttgaagcaaagggaaagagatgtgaaaagggttaggaaccaaacatgagaacgttacttgccatgccttgctcagctaggttgggaaaagcttgccaacaacctgcctaagctacactagcaaaagatccaaacacgccctaaatggcaggaaaaacatgctggcatggtggcacctcattcgccattccaatagtttgcactgatagaagggagtacaaagtaggcccattttctcttgtgagacaagcttggaaattgtagctcgctatgcattgggcagaccagaaattatgttggtttggacattacaatcatcaagaatatatatatcaatgacaagtgttcccaaaagtgcctgaatcactttcaaatcttccattgcaccaggaagtaataaggaaattggtttgggcagacaagtaaaacttccaaaaaatggtaggtcagatgggagggggaaactggacaatgcatccttctctagtggtcacccttga

SEQ ID NO: 34008 - DNA, 341 bp, Zea Mays
gggaattctagggttgtaacacttcaccctcttccctaagcttgatctggttaaggtatgatttctagggtgacaaggcttgttaaggcttggctcctcaagtttggtgccttaagctcaagctaaaccacatgtgataacatgccacaaatgtaggtactgaggggaaaccctaagtaacacctggggtgttacaccatcacggcggaccccaactccctcgcccccccgcgctttcgggtactgctcctagctgttttacagtcaggacagagcggctacggtgtccacataaataccccgcaacgatgagaagatgagcatgcaccggtcggatcaag

SEQ ID NO: 34009 - DNA, 546 bp, Zea Mays
ctctggtggaagagcgctgtgcctcggggtgccttcacgtgggagtcatcatcggatctagcgctgatggcatgggagactcccttggacgcggggattctgcttgatgcttgattggcgcggcaaatcctatgggcgtcgtggccagcttctccgatgcttcctccgctggtgagaactaattctagtaatccgattttgtctctgcgtcgtgttggaatggtagtaatgagagttggggtggaattgcacggaattggtgcgctggtaatggcgccaccatagatgtcgtcacggcgccagttggcctatgcgcgagaggaagatgatggcatgccatccgtcgatctgccagggaacgatcaagattagaagcgtggtgcaccgattcgggtttagttctcggtcatccgatacaaatcgggcgggtgagatgggattcgactataataaaatcgggggcattggtctccgatcctgtggtctctggcgcataccggttcacttaaagaaataggtggtctatgccgcggaattctaatccga

SEQ ID NO: 34010 - DNA, 271 bp, Zea Mays
cggaactgggtggagacccaggcgaagaaatgggtgagggtgtgaaaggtgtcggacttaaaccgtagaggaaaggtccagagaaaatgggattgtgtggcgtccacctcagctgtgccttgtgctgatataggtcagctttagtcgcttctcaatcggagtgtggtctgggttgcagtcgaccagtctacctagctcgatgatgcgcttggtgtaggtggtctgaccgagagatgtcgatgttgtcctagtgcaactcgatgccaaggta

SEQ ID NO: 34011 - DNA, 426 bp, Zea Mays
gcgggtagatttctataaactacagggactcttttgaatgtttgctcggccgaaggggtacggggtgatcaccgccgttggattggatatgggcgcgccagattaaaacactactccagcgaaccggtactcagtgtgaccccttggattcaaatccgacgacctagattttaaacacacagatctcaccgtagccgcaggatatgagatctacgattcattttccccacgcgcgaggggttacggaagatctaatccaagccgcataatgtcgatctaacggctagaggctttccccccactcccctttctcctaccggcgtcaacacgacggcgcctgactgaggcacagcggcgccattacctcggacccgaatcccatcaccctgtgcccgaagctcaaatctactaggtgcaacaccatca

SEQ ID NO: 34012 - DNA, 652 bp, Zea Mays
aatgtggatacagcttagactcagatgatatctgagctacccagtgagaacggccctaactaccacttagaatctgaatgtctacccctagagagaatgatattgaaccctttttacgttgctctacatattccttttatagcacaagagatgagagagtcattcatacatagagaagatagcgggctctgctcaatagaggtccatctaattttgatttgtcttagttgtcccaccatacatggagcacacatctgacgtgtcacaagagtgagtgtgacatgctgcagtagcaggtagctgctgaagggtacacaatgtatagtgctcttggttcatctatggtctgaggcctggctacaatggagcattttaaccgaccgctatgtcacctctctcaaaagaatgtgatagacaaaaacattatcttaatcggtcgatcgccattggagaaaggggctttagacccctagcattggtacagattgagttagaacctacactgacgcaagcatcaatatggattctaattgtcaggacaaagtattggtattgctcaatgactctaaacggtagtaatgccccttctttagtaccgtatggagccacaaccaatgctaatccctcgagagcatagattagtacagctcga

SEQ ID NO: 34013 - DNA, 272 bp, Zea Mays
cttagaatcagaccaaatatcgtgagacaaagggaacaacacatacataatgttgtgatggtttgcctgatatgatctttatgtatatataggagttgacatgttttgctagaggtcgttgttattggaccatgtaggagcattcgggccatgtttatgtgtacgtgaacctatatggtcacacacttaaagggttggaagcttaattcggatgggatttggattagactaggtttaggattactaataggcctttgattcgtgagcccaac

SEQ ID NO: 34014 - DNA, 627 bp, Zea Mays
tttagtttttgtcaaactacaaccatatgttcagatgtccctcgctcgtcgttcaaacaacaaactctcgttccgttattttgggccataccgtgtactggctaaagtgggaacaacagcttacaaactggacttgccatcatcttcgtcaattcacccggttttccatgtttccctgctgaaacaatctgtgcatcctccaagtcaggtaactcctgcattgccagacctagctgattcatttacagtacctatggcagtgctgcagcgcaggattgtctatcgtggagtgaaggcaatcccacaagctcttatccaatggtcctctcttccaccatccctggcaacttgggaggatattgaagctatgcgtcagcactttcccttagcacccgcttggaggcaagctggtgctcctggagggggtaatgtcagcacacaagaagatgtaatagcacaagacaagactgttgaagaaacaggcaatcaccaaatccaccgccacgcccctgctcgccgatggaaggtctccacgcgcaatccgtcgcctgccatcgccagcgcgcaatccttttcatccacgcccgcaacgcccgcccctgcgccaaatccgccgcccctgcgcca

SEQ ID NO: 34015 - DNA, 573 bp, Zea Mays
ctcggttgcgccacgccgtagcttgttactatgcggtagtaatcgtggcacccttaggagtgtcgttgcaccggtgaacgccacggtcacagccacccgtgttcttccctatctccggccgccagcacgccatgaccaaattgagagccaccgaccccgaatcctataaattgagcgcgccctcggctccgccatgtagtcaagcactcaacgcacccactcgtgcctccgattagtcaccagagaagtccaatttgggattttccccaaatcggtcaagaacatcgcagaagtgagctcaccatggccagctctccacaggtccgatcgtgttcccctcgctcttgttctagcattcctgtgtgttcttaaagctcatcggcccgaccaattgctctaaaccagagtagatcgtcgggaacactttgatttgtccccggattgcgcggtcaccgtggacagagtgattaggagttagaatcttgcaattaggtgaggggaaatgattgtcaggggtagaattaggtgccagccgagcctacggtccggtccttgtgtatctcggccggcaca

SEQ ID NO: 34016 - DNA, 321 bp, Zea Mays
cgcggttctggcctgcaagagtagtatcttctgaaagaaattactgtccgaattcctttgtgagttgccgcattatccaatgcaaaaatctcttgagaatatctgggttcctagaatttgggtgaaaccaaacgctgcctggtctcggatttatttccacacgttttatgcaaaggacatgtcccaaccttttctttacctggggaaaaaaacacggcgccgctttgttagtgtgtagtacgacgcaagcagaagggtatagcaaggtaggctgctaggtatttttgttcaggtccatcccattattgtcgcttgttgtca

SEQ ID NO: 34017 - DNA, 1688 bp, Zea Mays
aaaacttgaaggatttgttagaaactatgtcagagatgtatatagtgatctttcagaaattatattgaagatgacaaagaggggcgtacaacgtaattgcattcttgtttcttgtttctttaatgtacctttttctgaaagttcagccttaacatgaattactctgtgcaactgttttgccactgtttatcaatatttttaactcagcctttatggtttataaatcattttgttgataagaagtgtatctataattactactgtgttatttatgaggtgtatgccaatatttatcactttatcagttcactaaataaaatactaaactcaactccgggaagaagatgacacctgcacaacctttatgtagacacacgacctttgaccacctgggtttgaactggggtcagcggcctctcgattgaaggctaatgattgagccattgcacgatttggcaatttacattattaggtagagacacacttgttcttagtgtgttcttgagctatctatgatactgtccaaaaatgtatatgatgtgttttatttttacattgttaaaattaaaactagttgaatattgttttctcaaacaagaatgttgtttgtactttgtagctacaaaaccaactaatatagtgcaaagtcatttattaaatgtacttatatgatatttataccagacgtttcttgactaattattggtcaaaacatacaaagattaaatcttctgaaagcatgcacactgtacctgactgtatggagtatcaatttctgaagtgtattaaatatgatttgttgatcttcctgtcatattttatatttatatccgtctatacaggacatattggtgaggacttcgctgaggatctgcaagatgggttattaacatccaaagtttattttcttatcaaatctcttatggggtataggtgagaaaatagtttactcccattgcctttgaagtagcgattcgccatacatgcaaatctaattccactaaagttgtctatccaaataaatgtacacaagcttgtcctatagatcttatagtgttatgaacccgaatgtccagctggatggcaatggcggagcgtgacataaaatcaagaggggaccaattctataaactcatgctacacctagctagctgttactgcctttcaggttgtgctttgttcacgcacaagagaagtcagcaagtaagatgaagtgcttgtggcttgtttgatgacattgtgtatgagctcctaagttagtcaatacaatgctttaataacagcaaaaagtttaacagctgcattgagcagcaaatgcaggagagcagtaggtgtcggacatattgtctttcttagtaattgttgtacgcaaatcaagcaactgacatggggatccaaataatatataacacctaaaactgatatggggagctgaaaattgttctctcattgttaccataggtgattaatctctcgttccctcttgcaggcatatgcaagatttgagatgcattgtttttgtcgaaagagttattacaagcattgtgttggaggcccttctgtcaactattaatcaaatgtctggatggagtgttagatacatggcatcagggcgtaattgtggtttgcaacatcagagtaggaataagcatgtggaaatcgttgattcatttcggagtggaaaggtc

SEQ ID NO: 34018 - DNA, 437 bp, Zea Mays
aataactgactttattaataactacaccaagtggcaggggatgcccacaccttggtgacaatcattacaaagatccaacttcatcacgagttcatgacgacagacatagaaaaacatgataagtaaactagcactaactaaaactaagactaagacattgaattaaacattattatagactccgactctatcgatctatggctccaaatctatctaggtcctgcagtcaggggtgccataagcataacgaccatggggcgacgagcagtaagggtgctgaatcctgaccggagcgggggaaccaccatcctgatagtggcacgcaacgcactctgcacgcagttccacaatcttcggtcgagccttgcccaactcgtcaagggcgtggtccagctcggtgttgagcacgacggccaggttgaccatgttgttcagct

SEQ ID NO: 34019 - DNA, 583 bp, Zea Mays
ggaaaatccctattaagaggaaaggccagtcagatggccaggccctgatttgttcagaatgattggtgtgatttggaattgtcaggggctcggtaaaagtgtgaaaagtgaattccttcgtgatgttatcatgaaagagaaggttaacttcattggtcttcaagaaaccaataagaaagattttgatgattcttggttgaatttcattagtggaaatagtaatttcgtctgggtttggtctccccctaatggtaggtcaggtggattgctggttggttttgattccgacatgtttgatgttagagaaaaagagttgggggaatttatgattcggttgttggtgattcaaaaagattcaggttttatttggaattttattaatgtctatggtgctgctcaaaatgatcaaaaacagaaattcttgagcgagttatccgctttctgttcaaattgttctcaccctttattgattggcggtgattttaatattctcagaagagaatcggataagaacaaacctagggggactaacaaatggagttctctttttaattctattattgatgttcatgatttgattgag

SEQ ID NO: 34020 - DNA, 433 bp, Zea Mays
gttttatccaaaaatagtaacctgacgtgatgggcgggtaatgatgcgtctgagcagttggcattacttcccctatggtgcctgtttcccaatggttgtcagtgatctgctcccttgcttggaaacctaagtggctattgaagtcctcgtgactgtttggtgtacgggtgtgaggtgaagggttgcctcttgccctctttaaatagactgcctacttgtgaccggttccttcactcgctcttgctatccttttgcattcttcatcatcttccactcaccagaaacacaatggctaccaacaaaggcggcaagggaaagcatggccaaggtgagggaaagcaaaagcgccctccgactcctccgtcggaggacttcgctgtctcggagttcttggacgagcacttctctcagggcgacgactctccactgccaa

SEQ ID NO: 34021 - DNA, 376 bp, Zea Mays
gagtagtgctcgatgagttccttgttgaatttactcccgctgcggtactttttgattcaggtacatcccattcttttatatccactagttttgtagaaaaacatggcatcccctctacccctctagagatacccttggtcacccgaaccccagggtcagaccttctatgccagctcaaatgctcccaagtcagaattcttttaagtggggtagtgttcttggcagacttaaccgtcttgccatcccaagggattgatttgatcttaggaatggattggttaaccaagcataaaggtatcataagttgcgcaaacaagacagtccttctcacagaccaccaaggaaagtcaatctcttatcaggctcagccacccgc

SEQ ID NO: 34022 - DNA, 363 bp, Zea Mays
tttaatcaaagcttcgggagtaagctgatgaaggtatatctcaaatgtattcagtacttcgattaacatcttatgcaagggaaaccgaagcccagccttcataaaacttttgaataccactactccgtctgcttcaagaagaggaacagtactctctcccccagccctcactatggatatatcatggaaatatttgccattcatcgcttcaatctgcccttgcttaacagtggattttccgaaaactacatgacttggcctccatggccgatctttggcatcttcattctcactctcaacatcaaaactctcgctgtcgttggaatcccagacagcccatctaacatttcatcaatgattttc

SEQ ID NO: 34023 - DNA, 393 bp, Zea Mays
gaaccaaccatgagatcaggattgatgagcttttagagacatcagaaaaccaaggacaacagcaacatccattgaactaaatggatacactgtttaaagataaaatttgataaaacaacgtcatgatcctcggagaagggggtatgagactgaccagaaatgagagatttaggcagatcaacatacgatacttgagaacaggttatagcagataaccagataatagggcagaatcattaaaggatccggagatttggatgataaggccacaacatgattcacaaggaaaatgattaccagatttggaaaggagaggtaggaaaacaagatctgctaggatgagcagaacaaatgctatgaagattcgggacatgatcgatggaaagaaacacg

SEQ ID NO: 34024 - DNA, 277 bp, Zea Mays
ctcctcttcctctcaaacgggaagcctggcaactgcagttagctatcttcacaggattctctccgtcacgtaatttcctcacgcgctacctctcgtggaacacaggtaccagaacgggcgccagaacagcaatgcgcatccgttacggtgcatggcccagagagatgagtcctaacacggagcaaccgttccgaactgaccaagccacctcaggtcagctgttaacaacacgacgagcataccaggacatgcatacgcgaccacaaagggcgagccc

SEQ ID NO: 34025 - DNA, 320 bp, Zea Mays
agcagttggagccgacaccaccccaggaaacttgtctagcaagattgcaacctcaggcaacaatgatggtgttgaaggcttcacctctggataggacactgaagcaatatgaatcagcaactcctcactcttattgtgccctgcaccaaacaaacatacagtggtaccctggtatgtaatagacaaccatttctgacgccaatgaatctccatagggctatgattttccaaccaatccatcccaagaattagatcataactctgaatgggtagcacttttaaatcttggtgaaacaaataatcctgaatggacaactcag

SEQ ID NO: 34026 - DNA, 400 bp, Zea Mays
gatcaacgggccggaccaaccacagtgcctgttgggcccccgtatgccaaaagggtgagaaaacgtaatgcgaaagtgtatgggccagcctgggtgaattgaggagaagaacagtagaataaatagtagctcgcgtggagttttgagttatgcggtaacagaactatgaattacttcttcttgtcgtccaagtatcaatacagccgccttccctctcctcctctcaatatctgattctgcctctctcttctcgagtccttctggtaggagaggttaacaattggtatcagattcgtcgatcctcgggttgcgtatttcttgcgctggattttccggtttctcatccgtactgcactcgttttcgtcggcaacaagttctgatgaatccagacactcaaat

SEQ ID NO: 34027 - DNA, 562 bp, Zea Mays
cttcttcaacttgccatagaactgattctcccttagggcacccagaacgagacggagatgctgctcatgctcagcctcggtcttagaataaatcagaatgtcatccaggaacacgaccacaaagtcgtccaagaactcatgcaacatcctattcattgcttccataaaagcagcaggggcattagttaagccaaaagacatgactatgaactcataatgcccatacctggtgcaaaaagcggtcttctcaatatcctcctcacgaatcctcagttgatgataaccagagttcaaatcaattttggagaacacatgggcacccctcaactgttcaaagagaacctcaatacgggggagtggatatttattcttgatagtcacttgattcaaagcgcgataatccacacatagccgctttcttttatccttcatctcaacaaacaatactggggaagcccatggagacctgctaggcctaatgaaacccttagccagcaaatcatccaattgccgcttcaattcaacctgctcctttggggccattcgatacggagccttatga

SEQ ID NO: 34028 - DNA, 507 bp, Zea Mays
caccgacctagtcgatgcagggaaagtggttgtcgatctccaaacgagttatccaagtgagattagaccaccatttggttggtttggtctcggcgagtggtcccactggggggctcgacccgctagaggcatctcatttactccttccttattcaatcatgtctcgaccctttggtcggtctgtccaaccaaagaggggccccgtggccaccctgacagctgagttttagtaggagaatgtgaggttcggccttagacatggatgtgagcaaatgacctatgggtcggtcatgtagcgtgcgcctcattaggagcttgcttggtccagccctcgctttgcgtgataattttaggtgagttcaagtttttacttggttggtatggtgtagttactgctgtagcatggtgaagggggtgatcatcatgacaccgctcgacgcaggcggcttgagaggacacgaaatggcctgcctgcccccatcacgctggggtggcatggtggcttgg

SEQ ID NO: 34029 - DNA, 332 bp, Zea Mays
aatagataagagtcgatagtcagctacaagattaacactataggctaacaagaagaaaaatgaattatctgaatggtgatcagattatgtgaagaactaaatttgtgaactaaatataaaacccccaaattccaagaaaaaggatactacaaacaacaactattcaaaaatcaactgcaaaaattctctgaacatcagggctatggaaaacaacatgcaacttgcatttcctgttgtcagattgatactatgctctagtaaaaaaagtatcatgcatatatactttttttactaatccctttgcatacaaattcacaactacagaaccaaac

SEQ ID NO: 34030 - DNA, 319 bp, Zea Mays
aactctagggacattaccatccatccgatctcaacgaggctaaaaggctgaaacacaggagcagggacttcgcaagagtcgagggccaactttacaaaaagggtatcaaccagcctatgctgaaatgcataactgaaatcgaaggcctagagatcctccgcgaagtccacgacagagcctacgggtcacactcaagacccagggccctcgcagccaaggtgattcgtcagggattttattggcccgagataatatgcacgaccaaccgagtcaccagatcatgcgaagcatgccaaaaatgttctcctcgctcacgtgc

SEQ ID NO: 34031 - DNA, 453 bp, Zea Mays
aaaacagcagcatctaccagcgcagcagctgcagactatacccataacctggtcgttcgcatgctggggattggatatgattggacctttcaagaaagctcaaggaggatacactcatgtactggtggctatcgataaattcactaaatggatagaattcaaacccattgcttctctaacttcagctaaggcagtagaattcatacaagatataatattcaggttcgggataccaaataacatcataactgacctaggatccaacttcaccagttcagaattcttcgatttctgtgagcaaaagagcattcagatcaaatatgcctcggtggcgcatccaagagccaacgggcaagtagaaagggccaacgggatgatattagaagcactcagaaagaaagtcttcgacaagaatgaaaagttcacaggaaaatggatcagagagttgccata

SEQ ID NO: 34032 - DNA, 461 bp, Zea Mays
tacttcttaggttctgtcgatgcatcaagtgagatagcaaatgccaatatgttggcagatctattggagaagcaaataatgaaggtggggaaagaacatgtggtccaggtgatcactgacaatggagtcaatttcaaagcagcggggatgatccttatggacagaattccccatctgttttggactcattgtgctgcgcattgcttggatttgttgttggaggatattggcaagatcaaggagttcaacacttgcatcaacatggccaagaaggtttcgaggttcctgtacaagcatgggcgacttcacagcctaatgagagaaaagctaggtggggaccttgttaggccaggtgtgactcgatttgcaacaccattcttgactttggcaagcatgtataagcataagagtaaattacaaggcttgtttgttagtgatgaatggaacgggtctaaatttgt

SEQ ID NO: 34033 - DNA, 396 bp, Zea Mays
agaacaggcaagggttcggtattgacacgtgtccgggcttcgacctgtgcgctcccgctccccgctcaggcggagacccgatgctgccacgtagcatatcgcccgtgacataagccagcgggtggagcatgacgtaaggcctctgggccatgctgcctctgcatttaatgtggataagacgcgccgcctatctatcccgctgaccgacgatgtgcctcctcagcatttaatgtgtcatgtccactccactggcaggcggcgtccaggccatcctgcagaccgcatgcctgtctagtctgttgtcaagcagtacgcccatgctgcgaggtgcattgtttccatcatcacttatacgttgctagggaagcttcccctgcacgccaatactgcgcagat

SEQ ID NO: 34034 - DNA, 299 bp, Zea Mays
tcgatggttgtgatcctagccgctggtgggtgatctaagggttgaggttggatcaccgcgtaggtgtattgcggactgtacgatttagatccgagggctcgtatcgcgcatcggttgacttggttatgagatctaacctcgtccgtggagtttcgatcgggtagctcccatgtgcgggtaccccttcggtgcgggcgaacttgtaaaagggaccctgaacaattggctaatcaacccgcaatactggtcatttacaagatccttacgcagagacctagaatccttacagaatacaccat

SEQ ID NO: 34035 - DNA, 352 bp, Zea Mays
actagctgctgtcgaccggttcggaggccttgtcgggctgtgtcctccatgtcggtcttatcgggctgtgtcctgctgcggaggcctgatccatgtcccgctgcattgaggggtctccttaggctttcgctgagacttgacttttctttggtggagctcttccgatcgggcatacttttcaaaaagccggtagaactcctgcaggttagttggtggatcccttatgtggtggttgtacaagacgcctgcccgaaggccactgattgcatagttgatggttatatggtcatcagccgaaggcagctgtgatttcaacaggagaaactttttgtaatattctcgaatactttcc

SEQ ID NO: 34036 - DNA, 328 bp, Zea Mays
acttccacgtatagatcaaatcgtggattctacctccgggtgcaacctattgtcgttcctagatgcttactctggtttccatcaaatccagatgtctagggaagataggaagcataccgcttttgtaacagtggacgggctttactgctatgttgttatgccttacagtctgaaaaacgccttgccgacattcgtgcagacgatgagtaagactttcagggacctaatagggacatagtggaagtctacgtcgatgacatcatggtcaagactaagagagggtcgaccctagtggaagacttaaccctggtcttcgacaagctgcggg

SEQ ID NO: 34037 - DNA, 537 bp, Zea Mays
ctcccttactgtacctcttctatacgtggttaccatgcgtaagcaaagccttccacaatcgctgatcgttagccggaccaccgtggctataaagggcgccatgaaccacggcgaagtactcacatctccactagtgagtttgattgtagcccaaaattcgcactgcccctgccacctcttcccaaattgagtgtgcacagtgaaactatagttccttacggtcgtgtagccccaatctcacctcccaatttcacccagagccgtcgcggtgccattttcccctttctctgtcaccggcgagcacaagtctccgtgctccatggccggaccactctggtaagactctgcacctctcgagtgttgttttagcagctctgtatacccgtgaagctcatcatagtagccatttgaccaattcgggcgtgagtgaatgggaacgcaggctcgacatcacggtttccgccgtgcgcgtgggtaggaccttctctaagtatgcaaaccaaaattaaaggctgttcttgagccgcctggggtcgg

SEQ ID NO: 34038 - DNA, 349 bp, Zea Mays
ctgcatcactctttgctgttggtcagtaaaaaccagacttgaagaccttcccaatcagagtcctggatgttgcgtgtatcccgcattacccggcgtggatctcatctagtatttgcttcccagtagccgaaagaatgcacttcatgaggactcctgttgtgcccctcctgtacagtgctttcccaatgagactgtagtgagctgactgccttgcgatgcgttctgctgcagttttgtcatccggctcctcttcattctttataatatctgatgattggctccctccagtcatcagaatctaactctggctggcttagaacattgcactcttctgcccgatctaaggaaa

SEQ ID NO: 34039 - DNA, 398 bp, Zea Mays
ttcccagatccttgctgagcatttgcttgattctgcttgggatatgggcagtccttgatgaaatgtccagacttgccacaattaaaacacccggttgaagagctaggcaaagcagggaatcgagtgtcgggggcactcgactgacttggggcagtgggggctttgttgggacgaataattatcggctgcttgaaagggaaggatggtgcacgtggaggagtctggttagaaggccggagaataaaccgttgcctttttgcctggccctcattagacttttcaccaccaaatcccttgttctttctggaacctgcatattttgcttcaacagatagggttgtgctgacagcctttccatatgtgagatctatgcaggcggccatttttctctgcaatcg

SEQ ID NO: 34040 - DNA, 389 bp, Zea Mays
ctgggatctccgcagtgccaacatgcattcgccgggggttggttgcttgcaactgagggggcatggaaagagctctgactctgctgactgaaccgtgatggggtgggtccagctggtctactgaagcttggtcccttgggtggaaatccaaaggatcgagtcttccggtgccggtcttgctgctgagcccagaggacttggaatttccttttgatatgccctttttcttcctcctttgccctttcaacttgcatggccttgttggagaggtgagagaaactgaggaagtcttggctagccagaattgtattgagttctggcctgagtcccttcaggaaacatgccatcttcttgccctcggtactgacgtcatctggcgcgtagcgggc

SEQ ID NO: 34041 - DNA, 1948 bp, Zea Mays
gggcggcggcgtccgcgccaaggaggcggaggtgtgcccgcccgagtacgacaactacgtgccctgctactacaacatcacggacgccgtcgacgtctcggatctgggggccggcgtcgtcataagctacgaccgccagtgcacgcgcgacggcagggtcacttgcctcgtcgcgccgccgcggagctaccgggttcccgtgcgatggcccagcggcaagggcttcatctggaaggacaacgtgcggatcagcgggcaggagttctcgtccggaagcctgttcaagaggtgcgcgaacaaaacttgctccgtcgctaaaattccaggtggtgggtttggtgtactggttgtgaatttggtggttgctcattgataacaggatgatggtggaggaggaccagatctcgttcccgtcggacgcgcacatggccgacggtgtggaggattatgcccatcaaatcgctgagatgattgggttgcggaatgaattcaatttcaatgaggctggggtgagttattgccatatgttcagtttaacctatgctattactagtaattacctatttgacttccaaatctagtgaaggcatacccagaagccagaactagctgaagtatgcaactgaaccaatgatatttctgtcaacgaggtgtcattcacccattcttttggcacaaaacctaattattaaaagagtcactcgctcttggtagtgctctttgtcaacacaacaccctacgaatttgctggcttctgccaaaattttctgtccactttgttttttttttcttttcaggattcaggacacctgtactttatagtggttccataagtaacccttgtgatttccgttgagcattttctttgggttcgatgttttttaaagtatttaaaatttctacttcattattttcgataaattcatggcacagttttaagcacataattgttttttttaaaaaataagtagcaggagctctgctattcatataagatcggagaagggtttcaaaaacataggtaggttaagcacataattgttgatcagttattttggggcaaatattctatttatttgggaaacagtatttcatttcattcataagttgtttccctgtctgatttatcgtttaaaatgacccttcacatcatgatttgttattcagcaacacttgtctgtcgtggtctttccacttggcggtactttagaaatcttgcatgttgagtgggctggctggaaagtgccggtctatttctacttaatttgacttgggaaactctgcatgcccaatgtgctggaaagtgtatatcagagcttactactgtgcctgcaaaagtatgttggcaggaccttaggatctccactacgatatattattaaagcacagttgtttttaaagatcatcatacaaaatacatctggacatactatgtagatcactttatgctctgattggctgaagtaagactttgggtaattgttatgtttacaggaactcttatttctgatggtgtttcttgctatgccattttcaggttaggacagtccttgacatagaatgtggatttggtacctttggggcgcatctttttgagagagatctcttgaccatgtgcattgctaactatgaagcatcaggtagccaagtccaaattacactggagagaggcattcctgcaatgattggttcatttgcaacgaagcagcttccgtatccctatctttcctttgatatggtgcattgtgctaaatgcaatattgaatggtacaaaaatggtatgtgtgaaagtcttctttcacatgccctggccctcattgacgattataatgttattcagcaatgtcttaagttggcacttcacatgtaaagatcggtacatgcctagctgaatattaaatatttaaggatatacagttgtgggtgacttttggttgacttgtaaccc

SEQ ID NO: 34042 - DNA, 374 bp, Zea Mays
attctggtgacagcgatgattatgatgtggaaagtggagatgaagattctgaggaccggccctagtggccaagccataccatcttcggaaagtcgaccattaagcaaagtcatattgacaccatgagaggaagatactttcgtgacatgtctattgtgagggttggaggagacagcaccgcccctgcttctgaagaaaatgaagttgttgtttaccgaagctttttgaaggcaggccttcggttcccattgagcaaatttgtggttgaagtgttgaagatattctagatctttcttcatcaaactactcccgaagctataattaggatggggatgtttgtttgggttgtaagaagccaagggctggaaccaagc

SEQ ID NO: 34043 - DNA, 382 bp, Zea Mays
accgggtcaagtatcctggtctcctgctgccactaccagttccaacacatgcctggcatactgttagcttggatttttatcaccggattgcctcagtccaatcggtctaattgcatcttagtggtggtggacaagttttctaagtatgctcactttcttcccttggctcatccctttacagctcttttagtggctaaactatatttgtcagaagtctatcggctacatgggttgccagctgctatgatttcagacagggacccggtctttacgagtcacttgtggcaagaactgttcaaaatggctggtactcagttatgcttaagcagtgcatatcaccctcagtcggatggacaaacagagcgagtgaatcagtgtctgg

SEQ ID NO: 34044 - DNA, 2142 bp, Zea Mays
aattatcgtgtttccagagttacaatccttcaacttaactttatctcatctgaatcctcagtggatgttaggaaattattgccagtccgtcaatagaatatttggttgccatccaaagttgcttattgatcaaaatgtgcttgcagacccagaattgggtcattattgtgcaattctctcagcaaaaagtagtttcagaaactctgttggtgaagctgtatctgcaaagttatctaagctttcatttgcagtggctgcatgtgccttgaataagtgcggactacctgtaagtttaccctgtgctggctaacttcttttcacctgtccaccctttgtatctgcatattttgtatctattattttgcattattctaattgttgaattttttcccactcattagcttgaagcactagaatgcttgtctactaactcgagcatagatggcaaggatagcataatcgcacatggtgatggagaccacaagattttttatggaatactgagccctgtctctgcttctaagaattggctgtcttcatctgtcattagtggcattgagtccaaccttaaactaactatggcttcaaaatatctatctagccttctgagaaagcactcactctgttcacaattgaacgcaccattatctgaagaaaaggtccttaatgagtacaacaatcatcaaattgaaaaactgacgtgtgatattacaacagtaatctcaatatttgataaaaggttctccctcaaatttgctgatatagctgagaaggtaacgctggtagataacagtttcttttattttgataatttctggtgaactttgaatggtatttcatccaatttcccccctcttttgttgcagatcctaatcttttgtagccatgatggtttattgtttctagcgtatgttttgttatggggtactaggtcaccagatgttgcaactgataattatattcttgaatgtcaccctctctgcccaattgattatctgttattgttttcattcaaagagagctgcaagttttttagtcgatatgttgtcctctcctccatgtgttctgttctgaatatggaggacaccaattctactgcatgggcacttaaagagagacataagtacattgtaataagtttgtcaaattacctgaatgtcagcaggttacttcttaaacatgacaaaagtggaaattatattctggatgacaggtcagctatgctggcagttatggatctgtttgagtacattatagagttttctttttcttggttgtattatgacataaaatcattacttatcatgataaatccagtcctagctacttctgttaatggggattcctttcaagtactattagatcaactgatgcatgctatatgccacaaaaatcatgatatatcatcaagtacaggaggaatgccccatgctgcattgagtaaaacacaactgaaaaagagtgtgaattcaaatcttttagcagatgagaagtggcatttgataggcgcttctgtgtgggttcggttgatatctgtgcttgaacatcgtctaagggaattctttgagaaagagggacttgaacatgaagctggtgttagtggttcagaattcaggggtcttatcacttctgttgctgcaaagtttgttatggattccattcattttgtgtcatcttcattagtaccactgcatgcatcgttcttgaggaagaatttaccgatgaattcaagttcaagtttgctcttctggttagagtccaagttgcctcagcaactcccagtcagtgatagctatgatcacctctcgaggatttcacagctttcaaacagtgagaatatggaggcattgtttaatattttgtgggaaatatctgttaatcctgtggatgtttgtaatgcctttgtgagtgaaggagttaattgtttttccttaagcaacacgaatgtcactagatcttggaaggacataagatgtcctgtggttgagtgtgataaaattattactgaaagaagtggagaggaacatgaacacagacttggctccaagagattgggacagggattcgctgaaaaagcctcttataatggtgaagtgttgtatgaaactaaaaggagggagttgatcatacaaaaagagtttc

SEQ ID NO: 34045 - DNA, 353 bp, Zea Mays
tcaaataattatactggcattaaagtgcttataaatgcactgtagtttactcactattcatgttgccatgaaaaagaaatacatccatcttcatctagctaaatatttgaaggagtatcataaattcttatatgttcagcttattttcttgttagctataaagtggtgcttcccagtggtatgcatgatcatatccatgcattaataggattgtcagaattgggtaatggtataagtaacatattctttttgaaatgtgattctgagcttgtgtagataaatgttcctcattgaactatgaattacacatcaagctctaaatttacatgttgtgctgttgagtctaaactaca

SEQ ID NO: 34046 - DNA, 478 bp, Zea Mays
ccgagtaaggcatggatgaatctagttgatgagcgtcttagtactgaatgtttggatggcctgacttcaaaaaaaatctttatttagatggagtcgccaagttcttggattatgcattcagtaggtcaggtgatgggggtaaaattaggtgttcctgcatcaagtgttgtaatacatacaacatgtcccgtgatgtagtctattcgcatctgacagcctatggaataataagaagctataccttttggtatcatcatggagaagttcttggataaactgagaatgagttggaagtggaagatgatgatgaatcacatgatggaatgcaggagctgatggaggatttgttcccttcggctaaccatcctggccacgatacaatgacagaaccaacccctagtgatttttttgaagatcaaccaattggtgaagttgttaagttctacaacttgcttaatgatttgaacctgcctcttta

SEQ ID NO: 34047 - DNA, 339 bp, Zea Mays
tgggtgagtactgacaggcttctgaatatccaaggttatatcagtttctgggggaggtgccaccaccaatgtcccagcaggagcagcatcagaagagtcctcagccagcaaatcaagcatagcacttatctctgcgtcactaggatccaaaggtacctcaaagtggacttgccgctcatcatcaggaatttccccgagcgaggcaaccaaagcgttaacttcttcagcagagggtcgcactctaaggcccaaactgccatcagcaacagttggatttgaaacaaaatgagtgaaggctttggaaggaggcaggttccaggtcgagtatgccaccggggc

SEQ ID NO: 34048 - DNA, 565 bp, Zea Mays
ttgcaagagccctgcaaggatagagtgataaaaagattgggcttgtgacttcccagcttgctctagtaagagaaatactacaccaatttgaagttgcccacgatatgcaactactgtcgctagtgaaagaatggctaaagcaggggcttaaaaagcattcttttgctctatcctctcttaaatgcaccatttcccgtttgagatcaagaattaattggctaaaggtcggggatgccaacaccaaactcttccgtatgcatgctagatacaagaaaataaagaattttattgccaagctagtttcaggtaataacacatacactaatcacgcgagatgggcaatctagttgatgaatgctataataagctcttaggcagcagggtggacatatccatatccattgatccgaactacttggggctgccttcttatgacttggagaaattggactcaccatttactgaaaacgaggtctaggaatccattaaacagctaccatcagataatcgaggcctagatgagttcacaggcaaattttacaaggtgtgttggccgattatcaag

SEQ ID NO: 34049 - DNA, 995 bp, Zea Mays
ataaaacgcgcccagactcagccaaccaccaagtggaccgcgggttgatatcctataaatccagggactcttatgcaaaatcacacagccgaaggggggtacgctctaatctggaccgtcagattgattccaacggtcgggattagatcctccataacccgaaccggtaatggatggtggccactggatcaatatccgacggcccggattttatgaagtctaaactgttctcacccctccgatctatgttctacggcagagaagcaccctggccgatctgttagttagccaccagatctaagccgctcattccctgatcaacgctccagctctcatccacttcccatgactctgcccaggcggcgccgccaagccctcacggcggcaacctgagcccacggcggcggccatggtcggtgctagccagcctgttgccccaatgccccgttttcaaacgaataagctagaaacacatcggggaagacagaggacccaagtgcgtacctcacttcccaccacggcgacgcagaacctgaccacggtggagagtccatacgacggaatccccacactccggcaagaaattccccgctctgcagctgcccccacgctgatacttagccaaacgaagaacccacatataatggagagacccagagccatgctaagaagacaagacggtggcatagccaggggttggcattagcggcgtctccatatccttcctggtctgcttgctccgctcgtcgcttcctcccttcttagttatggttaaagcttggttgcacaatggaacgagagaaggcaagtacttatacccggttctggcacccagcaacccgctccaagcgcaacaacccagcttgcctggcgcggaagttacggggaagagattcgtgttcgttatagagggagaagacggatttgtggacatggccccatgtttcaggcgaacccgcggcaaaagaggccccacatgtgaaccagagtccgcg

SEQ ID NO: 34050 - DNA, 284 bp, Zea Mays
gctcctcacccgtgccattgtcggggtcctccccgccgaactcagcatcaactttctctcctcgtgtgacttctccgcctccctgccgaagtccagtgtcaggtccaagcaagccacgggcgcccatcgttgccagtccctatgccaccacaccttcccttgacatgtctccacatcccgtgtcaatggcggcgaaggggtaagacgccagtattagcatacgactcccagcttttggaagtgagcctggtgagcgtgtacacgtacaggccgtcggcgaaggc

SEQ ID NO: 34051 - DNA, 394 bp, Zea Mays
gctggattacttcacccgctaaagatacccgagtggaagtgggaacaaattggtatggacttcatcgttggtctaccccacacttctgcaggttatgactctatttgtgtaatcatggacagactaaccaaagtagctcacttcatccttgtgagaactacttacacgggtgtcaagctagccgagttgtatacgcgcctcatcgcaccccgagcggaggcatgttgcttcgctcttgagacgctcggccttacctcgaagagcgaagagctcacgatccctctcctccaagtgggtgacttccaccatcagcctctccacctcccgctatgcggccaatagcacctccctctaggccgacgaccaagagtagagacaatgcaaagaatggctc

SEQ ID NO: 34052 - DNA, 343 bp, Zea Mays
ggaactcatcaatcaactcacaagatgaaatggttgatcaggtggtcgggatactactgcccttccatgttggaagattgcttcaaatactacaaaggatgtcaggcatgtcaagggtttgggaaaatacagatggtgtcggcatcagaattgaaccccattgtgaaaccatagccatttaggggttgggggatggacatgatagggaaaatcaacccctcgtacagtaaaggccatcagtggattttagctatcacagactatttcacaaagtgggtggagctcgtccccatgaagtcagtaacgacaaaagacgtgatcagcttcgtcagggagcatgtca

SEQ ID NO: 34053 - DNA, 346 bp, Zea Mays
cttgcggccttcctgctgctctaaatagatggtcttgcccttgacctacctgaaggagcgaggagggtcctcgttgtctcctccccggctccccctggcaccgacacattcttcgtgcacaccattttgacctgaaaactgcatagaagagagataaactaagcacgagacgatagcagccgataggattacaaaagagtggagaactacctggaaatctcacgagagagggagagaatccagtcaggacaggagatggctcacgggcaggcaaggtcactgaaatgacagaagatgtgaacacgtattaatcacatagtcataagtatatgaaatgtgaataaat

SEQ ID NO: 34054 - DNA, 1428 bp, Zea Mays
ggaagtcccaaataagtgcaaggaaaagctttaactgaacaagagagagtttccacagtaagagccagctcatcatcggaacaatgaataggggagaccgagcttttagccaggttggtccggaggcctgaggcgtgaccaaataaatcaaggatgcgtctgaccgcaatcagatccagaatgtgaggcctcaagaaaaccacaacatcatcagcatagaaggaaacatgatgcctgacctgctgaacaacaataggttgtagcaaacccaacgaagtggcataattgattaaagaattcagagtatccatgactaggataaagagcattggagaaagaggatctccctgcccgagaccgcgacgatgaataatgatgtctccaggctctccattgactaaaatctgagtggatgaagtagacagtaataaacaaaggagatcccgccaacgctgaccaaatcccattttacttaaaacctccaaaaggaacgaccaagaaatagagtcaaaagccttggagatgtccaacttaagaaggatatgtggttctttcttcctgtgcagcgacttcacaatttgttggacaagcataaagttatcatgaatcctcctccccctcacaaaggcactctggttcacagaaaccagtgagggaagcaaaggggtcagtcgagtagccatgagcttagctaccaatttggcaaaactatgaatcaaacttataggccggaaatccttaacctcaacagcatccatcttcttaggcactaaggagatataagccgtgttaagcaggcgaaatttgaaaacatggccacgctggatgacatccaaagccatcaacacatcacctttaataatattccaacaggatttataaaatagacctgtgaaaccatccggccccggggccttatccggaggcaaatcttttacaacagcccacatctcctcctcaataaacggagcatctaatgcagataaatcatgattgtggatggccaactcatccaagtcaagagtgtagctcctctcctcagccttacccaaaatgttctcatagaaatcaaaaacagccttctgtttatcttcttgtgaggtgaccacctgatcaccaacgtgcagcttaggaatgaagttcttctttttcctgtatttagcctgctgatgaaaaaaggaggtgttggcatcaccctcctgaatatacaaaatccgagaacgcagccgggcgatggttctcaccagagaggccaaaccaagacaatgaagcttcaacttccgtctcagccactcctcatcatcagcaagagccctttcatctctttcaatttcccaacgatggagaagctctttagcaatttctaattgtgatatgatgctcccaactttcctctggccccacttttgcaggctcctgctgagccgc

SEQ ID NO: 34055 - DNA, 479 bp, Zea Mays
gagtattcgaggaagacacaacgactggagcgggacactaacttatggggagcaatggaggtgagattagggtagcaagcgcacccaaagacacgaagatgatcataggaggggtggatgccgaaaagagagaagtaaggagtggggtgggaaaccgccttggtgggaagacggttgaggaggtaggtggtagtggtgagggcctcggcctagtagtgagtaggaagggaagattgaaaaagcagagagcgcatgacatcgttcgttgtgcgaatcatgcgctcagccctaccgttctgaggagacgtgtaggggcacgacatgtgaaggtggacgccgcgagagaggaacaagtcacaagacgcattgttatagaactcgcgcccattgtcacaatggatactccggatggtgcgaccgaactgagtggagacccaagtgaagaagtgagacatggtgggataagtgttcgacttctg

SEQ ID NO: 34056 - DNA, 354 bp, Zea Mays
ccagcctaggcttgcctaggcgatgctaggcgtttttctaggcgttttgccaacttatataatatatacatttatatataaaaaaataggcaacactcatctgagttcaagccaacagtcaataaattagaaactgaaaatgggaataagagaggagatgagaggagagaagcaggggacgaggaaaaaagcaagcagctacaggggtctggcgtacaggaaaaaagcaagcagctacagggtctggcgtacaggaaaaaaacaagcagctacaggggtctggcgtacaggaaaaaagcaagcagctacaggggtcttctctaccgcgtgttttctctctttccttcctttttt

SEQ ID NO: 34057 - DNA, 276 bp, Zea Mays
caaatgtcttcaaaactttgaccagcattttgtggagcggaatgcgaagcccagctttcatgaagctcctgaagaccaccacttcatcaccttctgggaggggaacggtgtcttctcccctagccctcactatatggacacatcatgaaaatatttgcctttcatcgcttcaatttgcccttgtctgatagttgatttcccaaaaacaacgtggcttggtctacacgaccgatctttggcatcttcattctcactctcaacatcgaagctttcgct

SEQ ID NO: 34058 - DNA, 438 bp, Zea Mays
gttggggaaggcaacgataggtgtctacgtgaaaagtgtttttgttttatgcatgtgatcagcgattgggatagtcgaggcgaatgtggagtatgattaatcttgttggggtcactggtgtggttgatgtcttgtgcgtagtatggggacacgtatgtgcgtgtgccgtggtgtattgtagtggtggtggcgtaagatatttgattgaggtgtgcgggtatatgccgtaatatggttatactcgcgacgaagaaagatgcatgtattgtgtaacccaacgtttaggttgctgtcgtataatcatgcgaaggatgctcatgatggtcgtgtgattgaggaggtttgtagtggcaagcgagaagtaagttgagtttttcaaacggttagtggatagtatctatcggtgttgtcatgatttttgttgtatggtaatgtgat

SEQ ID NO: 34059 - DNA, 525 bp, Zea Mays
ctaaaccgtaatgtacctatccagttggggagcaatattttcaaaaccaccctcctgattatgagattggaaagtgtagacattatcttgggaaaagactggatgatccaacaccatgttctactaaatgtagtcgcacgagcccttaagatccattccccaacctttggagaactaacattgtacttgcctagccaagggagtactcggtcgtgtgaatatttaatggtagaactgtccttggagaagattccagtggtctgtgaatatgccgatgttttcaaaaatgacttgcctgttatgccattagaccgagacatagagtttacatagaactgcaaccgggtaccacacctatctctaagagaccctatagaatgcaaccagtcgaactaacataattgaagaaacaattgcaagaattgctggataagggattcatccgcccaagcacttcaccttagagatgtccagccttgttcatgaagaagaaggatgaaagtctaaggttgtgcatagattact

SEQ ID NO: 34060 - DNA, 484 bp, Zea Mays
cacgacatgcgtgtgaatggttcgacgatttctcgcttccggccttgagggtgcacgactttcttttgctacttgatattttgcatgtccggagaaaagtacgctgacctattttggtaagcaattattctcgcattaattgtgattgattgtcatgttagtgctgtaattacgtggctgattatttgtctgctttggccacgtcaagtgtacatatcaagggtgagacgtcgttcctcagtaaatacttttctcctcacaccagagcgctacactgccttcgtcttccccatcccgctgccgatgtgccatcgagtcgggagagtaggatctccgaaccctatgccccctcgtgtcactgcatagggtaaggtccatatcaggtttttagaaagcgtcgtcacgactgctcgctgtttgtctgctttctctacgacgacgtcgtcgtgctcgctggtctactacgtctactcttgtgcttgtt

SEQ ID NO: 34061 - DNA, 470 bp, Zea Mays
caacaatcccgtatggcatcgaggctgggagatcgtagcatagagctgagcatcaaaaccaaaggaagaggacggagagagatcgagagagagaatggccgccaccgacgaaccgtggtctggctgccgtgatgactccatggtggttcccggggacctcgcaaggcttcgggagtccgctcggcgcccaatcaaactggaagcatgggcatggcgcgtaccttgctagacgacacattccatggcggatctgtactgcgctgctgtcgactccaccggccggtgagtctttacacccataaaattcgcctccatatattctcatcgtgggggccgttgcatgggagaattgggggctgtgggcgagcggggctcaactaaattctcgccggagcgctgtcgcttccgtggaactgccctcttcgtagacatcaccccctacgtctgcattgccggtaagaagaagtacc

SEQ ID NO: 34062 - DNA, 359 bp, Zea Mays
cttcggagggcccatatgtagacgctaagcctaacgatggcgttaggagttagctgatgaagataaatcccaaacttcttcaaaacatcagcaattatctcattcaaaggaaatcttaatcctgctttgaagaagcttttaaagactaccacctcatccttttccggcttcggagtattttcctctctgccaaagcgaattagctcctttttgtcctcactgaaatagcctaacttcatcaacttaggcatatcatcttcggtaacggtggacctcccaaactctaggtgcctgggtttagatggcacggcactataatcatcttcagattcatcttcctcagcaccaacctgctcagc

SEQ ID NO: 34063 - DNA, 422 bp, Zea Mays
ctgggggtgatttgggtggtggatgtttggctgatgcgggtgcggaggcgggagtggaggtggtacgacttgtacctcctggtggtgttggtatgcctggttaggtggatgctgagcggggccgtggttgtatggttgtgggaggtagtgttgatatgtgtgcgcgacaactcttgggttgtcggctggttgcgcccgagacatcatgtccctggtagccttcgtttctgggcaatccctcgttgggtgcgcgtagtcttcgccgtgaaacaggcagtaaaatctgcatggctgttgagccagtcctcggccctgaccacgagtgccattgccgtggccctgggggggataatcttgacggcgaggggcctcaccggcggggtgctggttggcaatgttatgcacctgctgctgactgcggc

SEQ ID NO: 34064 - DNA, 305 bp, Zea Mays
aatgctaccgtttatgctctatgaggcactaagttttacacttatcaagttcattgacccctcttaatagcacgactgtctatcctattaatacgatcaatttcttctctaaacacctattgaccggcaaaagcaaaaacctatgttttacctttgccttcacttgatccacaattaatggttatgagtcccaaagactttactatttcatgtggttcagtcctacattcttatttctccaagaattattagtccacaatcagttgtcattaattaccaaaacaccacttaggagcctagatgat

SEQ ID NO: 34065 - DNA, 671 bp, Zea Mays
cgatttccggtaagaagcaaccccgctatgctcgtttgatgctcttctgcgcataaagttgatccggtgaggtttggggcgcctggcgaggctttggtgcgctctggcggggtctgccgccgcgggtgtgtgttgcgccgccgttagtcactagcgtgaggtaggtggcgccagcacgttccttgacctagagatggacggctacagtattgtttggtgcatctgttcggcggcatcgtgttcgggtctaggctgggtgcacgctggtgaaccatcggagaaagagagagttccagggagagcgcggcgtctaacctgggcggaatggctggggagaagtcttaggttgaagatgatcccggtccgttggttctcagatgtgtggatgagagatagtcaagctgtagtgtcttcaggattaaatctgggccgtatattaggaatccgatggtgtctggtgagagagggtttaaaatagttcgatctaatcgtgatcgttcacagtggatcgggcggccgagaatgcgccatacccccttcgtgggtcacttttgttaaagaaccctcgggcttttagtgaatcaacccgccgtccagtgcacagttccctgagtcttagatttaattgcgccgtagcccctgcgctttgcagtaattgatgcgaaatccag

SEQ ID NO: 34066 - DNA, 304 bp, Zea Mays
gggaatatcaaaaattgcataataaattctttacttctcttggcatcgctcatcgagtgtcatgtcctcatgctcatcaacaaaatgggtctgttgaacggaaacatcaccatatagtagaaactggtctagccttacatgcacatgccgatgttcctctcagattttgggatgaggccttcacaaccgcaacatatctcataaacagattacccacccgactacttaacaatttatcccctcttgagcgcctcttcaaaatccaacccaactattccctcctcaaaattttcggttgtgcctg

SEQ ID NO: 34067 - DNA, 351 bp, Zea Mays
catggccaacccaaactatacatatctgaagttgtagatgcctggaccagcaggcgtcatcatcattggccccacgtatcgccacgcctacaagtgcgacgtcgagtgcgtcgaatacgctgaggcactcgtagtgtccgaggcgctcatcgccaacttggagaacctcatcgaagaggttattggccccaagaagcatgccggcagcttcgagccagcaaaagtcacaaagactgtccccctcgaccctagcggctccggtgagaagacgttgcggatcagctcccaattcgagcccaaataggaagtggtgctcgtcgactttctccacgcgaatgccaagatatttgt

SEQ ID NO: 34068 - DNA, 324 bp, Zea Mays
ggaaaatggattagagagttgtcgtatgtcgtttggagcctgagaactcaacctaaccgagctctgcatggaaatagtcctttcttcatggtatacggttcggaggcagtgctacccgctgatctcaagtttggggcaccgaggttgatctttgaaaacatagcagaagctgaggctaccagactggaggatgttgatatactagaagaagagcggttgaacacggtgattcagtcagcacggtatcagcaaactctgaggcgctatcacgacaagaccatacggcatcgatccttcgcagtgggagacctcatcctccggcga

SEQ ID NO: 34069 - DNA, 479 bp, Zea Mays
tttggttctgcttggcccccagcaatatttagatgctactttcaccgcggttcgtcataatgacgcctggaatcatcgggccctttttttcaaccacgagtgttggcttatgcttctggggtttccgctggattaccgttcttctgagtacttgcaagctgccattgggtcgtttggaaggttgattctttgggaggaggatcggagtaatgtctctagaactttgcttcgtgttcgtgtcacttcccttgaggaagtcccccaattcattgttttttcggaggctgagggcttcgctggtgactcttggactgttcagtgtgaaattattcagcaaaacatgcttggcaggcaggctcaagatgaagaccccattcccccagctccggaggatggccagcagcttcccctggttttcttcgggctgggtcagcccatgcctccggctgggcttgacctaaacttccctccggagcctg

SEQ ID NO: 34070 - DNA, 467 bp, Zea Mays
aattgatgtcccgctgcatcgacagtcgtcaaatacatcagacccagaatctccaatatctccattgttgacttctgatccaaaaaatgagcgctcccactcaaaaactttcagccggcctcttgtcatctttgatagttttcatgctgaggattccaagcagcagcacacaaaagcaccatctttttggaggcttgcagagcttagttttgcggaatatttttatgctctgttaggaagtgctggggctgcttgtttcggttcatttaatcctcttcttgcttatacaatatctcttatagtagtggcctactacaaaataggggtccgtgatgtacatgccgaagtgaataagtactgctcattcattgttggcatgggtataattactgtactagccaacttcttgcagcacttctactttggtataatgggagagaaaatgaccgagcgtgtcagaaggatga

SEQ ID NO: 34071 - DNA, 415 bp, Zea Mays
aactagtattgactgaggcgaagactggtgcctaggcgagagcccgggcgcaagccaaacatcgaggtcgaggactccgtccaccccaacttttcgagggtccctcggcacaggctacgatcctgcaaggagcgaggggtcccaatgtgcgaaggctacgtgacaacaaaggctttaggaaagaagacatgtctgagttaccaagccactatgggggctacccggagagcccatgtgtaagtgtaaccatagggtaaaattgtgagtgcatgtgtccactaggcacgacggtgttgtaattactcgctacatagaatattgtaggaatgtagttggtaaccgggggtacggatgcactttaggccacctaccctagattgccctatcttattgctggacaggacacgtataatga

SEQ ID NO: 34072 - DNA, 412 bp, Zea Mays
cttcagtgtagaaaggtattcccaagtagccaaagagctgggcataccagaccatttcaccaagatttggtgtgtcccttcagaactgaaacggcgctagagtatgcgttctggcacttgcaaacctgtcaaagatgctagtcatttagcaactggagtagatggtggaatagctttctttaaccgcgatacatggaaaacgggatggatactcgtagtagatggcaaggctaacttataagccaccaaacccactttgtccagaactgaaaagggcccaaaaaccgaaaggctaacttttgattggcgcggggaactagtgaagactatacgtatggttgaagcttcacaaacactttatcacccaccacaaactggtgctctgatctatgtttatctgcttggattttca

SEQ ID NO: 34073 - DNA, 407 bp, Zea Mays
gaaaactccatccagatggggaacatccctgtacctcaaaatctagaggacgcgtgtgtccactcccgatgctctttgagtccatctgtgtgggcaattgggcatcctctagacatgtgaacagggagcaggtgggcaatgcagtggcgcagtagggaggtggcgcctaggcaggggcagcgaacagcacagatacaggtcaatgctgaggagggccgtcgtcactatgggcaggtgggtgggaggtgcaccaccaggtggaagcagctagggcaggctgagacgcccatagcagatggaggcgggctggtgtgtacgaacaaaggaagggaggaagaagtaaaaggtggctgatatctgcggcccacattgacggcaaccaacgaatccaaaacggtccatccatc

SEQ ID NO: 34074 - DNA, 330 bp, Zea Mays
caacattgggcataaggtgcccaattggaagaccatagtggtcaagaatacaatggaaaaagtgagagagagggaagtgaactctgactgtaagatgatgatgatagaatatggtgtactcatcaacctcctcctatgggagacataatggaaaggttgcaagatgaatgttacccgagagcggtggtgggacctacctaagtatctctcataccttgtctaaccatttatcatttagaacacacgctcgtgggagatggtcaaggatggaatgatccaccttcacgcacggataagattgtagtgggcatctcatgcatgggaaagagg

SEQ ID NO: 34075 - DNA, 601 bp, Zea Mays
gggcgacggcaattgctcgccgtcttttgcatttcgcctggaatccgcagctcgccgtggaccagggtctgtgcagctcaaaaccttggtatgtcgcctgcttcgagttccttaccttctggctatggtgtatcatcgtcgaaattgggaatagttcgttcggggggggtcggatagccgtcgccggtgagttctccgccgaggggatcgacggcgctgcagtactctgcgactaggtgaagaagacgggggcccagccgtccgatttcgcaccggcggctgagattagcttagcgaacccgttagagtagattagatcgggctgtagattttggatcctacggctgtgattacgcccaacgaaacggttcgtccagtgtgcaccaggaccgttcgatcgcgatcgggcgattcctattgaataccagttcgagatgttaagcgatctaatcggggccatctgacggagatccaacggtccgaaacacttgatagcccttcggcctcggctttttattaaagaacccctgggtttattgagattcaacccgcagtccatatagcagtaatctgagtctaggaatttatgcgagcagccccc

SEQ ID NO: 34076 - DNA, 341 bp, Zea Mays
ctcactttgttcctactgaagaggatacatcgcatgagaagtctgtgcctggtcctcaatttgttcatgaaacatgggaaacatcacttgaggatttttttcagatacctggtaatgagttctctgaagctaaaactatatttgctgatggtacttttttagagattgctgataccacaaagataggcagagtttttggactggatctgttgcaagaaatgatttaacctcataacgcgggattaagttggaatggacagtttgacgttagtacaatagttgtcattgatggggtccgtgctgaaatccgtgcaccttattgtgacaagttctctaaaaag

SEQ ID NO: 34077 - DNA, 407 bp, Zea Mays
aaacagaggggttcgtatgacaaactgccagctcaagcggtatgagccgattctggtcgatggatcagagattagcgtcccagattagatctcccggttactgaaccggtacctgttcctgaccctcagatttgaaataagctctcgagatctgaccacgccatagcctaatcacagccctcagatgtatgactcacggctcgaatttaatgtgttaaaaggacacgccccaagtttattctccaccattagatcaatgataaagggttcgaattaagcttgcctacggtcaactttcatccacacgatccaggacacatggctcagatctgatctagcaaaaaggtatgcgcccctctaatctggaccatatgtggtctgatcgacggccccggattggatttttc

SEQ ID NO: 34078 - DNA, 548 bp, Zea Mays
ggacgacgggttaaatattgtaaactcgaaggtctcttttgaatatttgcacaaccgaaggggtatgggtgaacgtgaaccacccagattagatccaatggtgcagattagatctgggcgctttatgaaccggtaggcgacggagatcgtcgaccctaagatcaacagccatgaggcagccacgatctgacacctttctgcaccctccatcgacaatcatatggcccagatcaaaccacaaagcggtatatgatggttctaatctcagccataggctagagatctaatggacaagattttattaaacgctaacaaacctccatgatccaacactagattgatggtgcagatttacctgaccgaaaccatctgcacgatcaaacctgaaccgttttgtatgatccaatggtcaaaactctatcttccccaactcgccaggaatcacggcggccaccccccgcccgcgcgctgcgctcacagtggtgcacgccggagctctcggcactggtactctatccctcattccaaaacgttctacaccattctca

SEQ ID NO: 34079 - DNA, 858 bp, Zea Mays
tgtcgccgtgacctcctctgaactctccgtggctcaccggagttactgccacgctataggacacgtaatcgcgcgccaaggttcttcttcccctccggccgccagcacaacttgctcgaattgatcgccgccgctatcgctccctataaattgagccccccaccagttccctaaggtcctaagctaaccagccaccttgaattagccccgatcgttcgctgaggtccgtgaattcggagtttcccccaaatccgatttctgccaccgtgaaacaagctcaccgtcaccagccatactccggtcagttcccgtcttctgctcccttgtttaagcattcacatacgtcggtgatacttgccaacccatcgaattgaactaagagccctctggtcgccgggaacacgaccgtatagtcgccatactcacggccatcgtggccagagccccatagttgatcaatagcacaattaagttaggggaaatggttaggctagccccaatttcatgtccgccgctcggagaacccagccgttgccccgttcggccggtgtaagtgctcgccggagcgcggccgtgcgtgaacggcgtcgaggacgtgtcgggtgaagaaatagaacatcaggggcatttctgcaaaccgtcagcgactcagtgaatagtgctacggatctacttcgggttgttctgaaacgcgaggccctttctgtaaaaccgccagggcgcgggcgcgcgcgggcgcgttttaccctggacctgggccgcctgggctgaatccggcccatcactattgaaaccttttcctttttcttttacaacagagctttagaaatatgtagaaaaatgtagaaaaatgctaaa

SEQ ID NO: 34080 - DNA, 321 bp, Zea Mays
cgcttcgcggtccgatcctctctagactcgtgtgccggtaacaggttgcacctaggatcaggtcatctagcttacgaccctcgttatatctgtaacttatatttactcttttgggtatgttcggtaacccagtgtcataatgcaatgacaacatcttttatgtgggcgatttttaagggaactatctgctgctacggttttagacattgctgaagtgtgattatcaaacaaagaagtcttttcatttagcgagcagaaaactaatgaccactatgttggaggtgttcatgtcccatggataaaaaattgataatagattct

SEQ ID NO: 34081 - DNA, 348 bp, Zea Mays
gccaaagctttcactacaactttcttctgcttcgaaaccttggttaccacaacttctttttcgaccgccttctcaggctctgattctgcgattatcctttcgatagcagccatggtagtcccatcagcacctctgttatctttggcttcctgacccgcctcagcaggcatgaccacttcaacattttcctaagcaatcgaagctttcttcttcacctctgctggtggggtcttgtcattacctctagtatctatgtaataccaacagataaagccgagggagttttagtaaccttctttggtaatgctgaaggtttcttgcatgcatggttaggcttcgtcactttct

SEQ ID NO: 34082 - DNA, 337 bp, Zea Mays
cgcgggaggagcttaactccgacgactggcgagtgagagggggcgcgatgggagacgtgtgccgtcggattttgtggcaacgctccagattagatcgtggccatttcgtttcaccaccgtggatcaatcaacggacggtcttgatttaatcaggcgtactgtttcgatctggcgcgccctgaccgtcgatcggcgatcgatcggtttctgggtgattcgttctgcttaggatccatgccgttgatttttaatcctgtggccgagctgatgtagccatccgcatgatgatcagatctaatctgatcccttaagttttgatctgacggtcctggacaac

SEQ ID NO: 34083 - DNA, 422 bp, Zea Mays
cgcgttagaaccaaaatcaaagaaggtcactgcagacctgaagcctagcaactaagttgtgcctaaaaggtctcttcagccaaaaccccgcaagctcagttttccattgagaagatgcctggagattgcagggtggacagctgttgatgaggttccgaggtatctgctgctttttagacaagattaccctcttcctttatgtggtttttgctcaggtcatgctcgtctgttctttctctggcatcaaccatttccttcaacaagtagattttacattcgttcttctctaggaggactatatggcatactgaagatccaatcagtaaagaaacatatatttttatccttcagcctttggtatgttagtttcaccctctttaaaaagttcattttcaagtaattgtcacagatttcctttcctc

SEQ ID NO: 34084 - DNA, 457 bp, Zea Mays
ttttgcagtttatcttggcagtaatcttgtgccctggagtgctagaaagcagccaacggtgtcaaggtcaagtaccgaagctgaatacaaggctattgccaatgctactgcagaattaatgtggatacaatctcttctgtatgagctaaaggtcccctgtccacctgctgctagaatctggtgtgataatataggggctacttatctcacaacgaatccaatgttccatggccaggtaaagcatatcgaaattgattttcactttgtcagagaaagagtagctagaaagctcttagaagtgagactcatctccactgaagatcagattgcagatggttttactaaggccttaactatgaagaaattggcatcctttagagacaatctcaacttatgcaagttatgattgaggggggatgttagattgaatagcttgtaatctggccgtaggcctctg

SEQ ID NO: 34085 - DNA, 340 bp, Zea Mays
aagtgatgctgtggtataaagtgttgttgcgtgttgtgtacattgtgccaatctaagtgctatacactggactattcgtggtaggttattggatggcctagtatagggccggacggtcccagattatactcagacgattcgaccgtgatcatgggcgttgacacatcaattggtgttgtgggggcagcagttgccctaggtatgcatttatcggcatatcatataatggctgagactacgtaggcctatttgttgtcgatgcatctagcaagttcacctctattgcgacatcacagggatggaaactggaaatagtagattttttgaatgcacatgtgtg

SEQ ID NO: 34086 - DNA, 422 bp, Zea Mays
tcggcttcgtgtgggcagggatggcaggcgggaattgttgtcctcgccggttggggtgagtgtaggtgagggggagttgcgaagtctttttgagggtgaggagctgaggatgatgctatttaactatagggagatgggtatcattctgaaggttgaaccaatgtaaggtgtgatgccctcgctatacgtatgtaactgtaatttgtgtgaagaggctgagtgccttcgctgatctggtcgtgcccgtagtcggttgttgcacgtttattatgccctcgctgtacgaggtctagcgcgtttattaggttggtccggcggcacctgtagtcggttgttgcacgggtagtcttttgagagagacttcggtttttgcgcacttgttgtgctagtccggctgcacccttaggcgtcttttgcacgga

SEQ ID NO: 34087 - DNA, 407 bp, Zea Mays
tgagaaaatggtgctgtatgtactagaacctcctgagccttgcttgcatctgagtcccgcacattagtacatatatctccaggagtatttgcattagtgccaactggatgatcattaggcaataaggaagtagctgtaaattgatgtcccctattttcaaagttagataaaggtagcaaggtggaagggagaagattaatctcagcctgtaggcgcgcaccagcattagcatgcaatttggtgaaagagaggactgcttcatcgaaaaccacttgagatgcaaggatttagcaggggtatcaataacagcattaccaatattgctaatgttcatacctgcccgctgactgtgaggatctgatctggtcccttgtatgcgttttggcctgtcaacttttccagttctg

SEQ ID NO: 34088 - DNA, 442 bp, Zea Mays
tgtaaaacattctagctattagttcatcaagctgtcttcgaacatccaaattgaagctagattcaatagctgaaacaccccttctcttcctcttctcattgccctcaactggaagtgggatatctctaggcaaggttctgttagcaacaacactggctgcagtaacttcagctttcaattgttcaagaacatgtattgtcaccactcgacaaaacttcaccccaaaaccaggaatttccaacagatgtgctttaactctagaatagcttccattccaaacatggttacagagtctacacctaatcctcacattgccccccaaaccctttccagttctttcaagtatctcagcatacctccacaacagttttttctcatcctcatctggaggaacaatacgaacagcagtcaagacttgtcttgcgatggcagggttattggc

SEQ ID NO: 34089 - DNA, 462 bp, Zea Mays
tattagggaagaaggggccgttgttgaggaagtttgtgagataaagtagaccaaactgggagctgtgcaatgggacactgatgtcagggaagttgattcagtgtttgggataggaaattgaggaagatttttctccctttcctgtgctccactggtgtgctcgagttgggatacgggtggggtgcaaaaccaaggatctagtgacttcagctctgcttcaaaatatctagttttggattgtttgggagatgtggacaaaagagatcatatctgttttgtctactatctgcagatatctactacctgcagatttggaccaagtgatatttgtgtgttgggggcattaaagtttctttgctggttatttgaggtaataaaaaggggagctgaacttgaggtttcagtcgagtagaacagcaggagcagttttagaataatctgatgaaagtatctccatccacc

SEQ ID NO: 34090 - DNA, 441 bp, Zea Mays
taagttatgtgtatgcaagtatgttgtgttggtttaagttgtttctgacttaaacttcttgctagttgagagtttgtatgcggacgaacacagaagctttattgataatgaaaccttttgtttacaaagtgcggcttgccgactggagttttgatgtactgctacgggtagaatttcctgaggtgctcaatattccacaagtttcccacttcggttccgtccatctaggtaagtcggtaggatcctgaccgagtgacctctgcaatgatgaatggtccttcccatggaggtgacaatttgtgtcgctcttctcccgtcagcacccggtggagcactaggtgccctattgcaaaggatcggtgccgcactgccttgtcgtggtagcgcctcaaagtttgctggtacctagtcgattggataacaacattcagacattcttcc

SEQ ID NO: 34091 - DNA, 446 bp, Zea Mays
cacaaatgtgtggatgtgcatgtctccacaaatacaatgttttttcaaagtttagcataacagcaaataattggtcagagatcgccaccaagttgtgactaccatcaatatcctcactaagccctgggatgaatatactagtcctgttgacaactccgaatggcataacagcatcaacatttgatcaccctcatattaatctaaaactcttgattgcagtttaccagatttaaacaagcagccgatacagttgatagaagaatgtttctggaactgaaggatataacatgaagtttccagaaagttatgctgctaatacaagccacctccaaaattgcaattttctaaagatggactggagtaaaaggcgtgtgaaccccatacagaatatagaccactagaaataaagatagcttataatattctcctatgaaccttttgtgccc

SEQ ID NO: 34092 - DNA, 283 bp, Zea Mays
aggttctacccggtcaccttcctggagaaaatgaagattgatttgcagtcctacaagcaagagaagaagtctgtcacaaactatgaagtaggcttcaacaagatggtctgctttgtccctcatgtggcttataatgagatggagaaggcgagccagttccgtcagggcctaaaaccttctatcaggcatgccctgggagcctttccgttggtggatttccgtactacagtggagcaggcattgggtgtggagatgcaacaccagtacaccatggagtcacaga

SEQ ID NO: 34093 - DNA, 659 bp, Zea Mays
gatactttgaaattgggaggccattggatggctcgaagacgacgggtgagcccggagatcccacacgtatcctcctgtcaatgatcacgccgtcgatcccagggaggggagcgagtgttaggtcacctcgaccgtccccggactggactgttagtggaggctgctgctaattcaatcctggtcgtgcggctgtgtgtcgttacaccatgatcgcggtcgtattcctcccggtaccttatttcattctcatgccgatgattgcatgaagaactgatgttgctccgtgcgcctcgtcggctgttgatggcatgacgtagatcgtttggtgggtgggcgagaggtagaagatgattggccgtctgagtaagcacccaccgatagccctccgcgtctagggttcgcgggaggccgtcgactatctacgctaggacccctccaactttgctcggcgtgttcaatgctcgggcaaagtcagggtacatgttttaggcaaggagcgaattttcccatcgaagcctagcatcttgctcatctagctgccgctcgcattccagagcttgacgacagtctcggcggcgggagttgcgccgttctcgatgtgttctttcatcaggagtctcccccatctctgaggcttcgtaccgagagacaggttgtgc

SEQ ID NO: 34094 - DNA, 1408 bp, Zea Mays
atttcagagcattagactgtgtcattgttatttgttataagaactgtgtatatatagagtaagtgtttgtgtgaacgatcatagacaaagagaaatacgaattaatgtaaggagaatggtgaaagtggctattgctgctttcgctgctagacgacggcttctttttgagctctcattttgcatctgtgtgatcttctttcccctgagcgagcagcgacagcaggccggcttgctgatcgctcgctctcaggagcctttacgcgagagcaagtcaccactgtgttctaatattttacagatgcactgcaataaccctgaaactgtaactttgtgagaccgtaaatacaagatctgttaaacagccaactctgtttatatacactacctctgcatcatgacctacaaagcaaagcatgtgggatgtcaaacgaaattactgattgtacattcgctcattcagtagcatattatacaacaggcactaccagtagctctgagctccaatgcatcgaaagtttcagtcgctaggcacattttaatcagatgcattgaacaccgatggtatggttgacaaacaaaaaacctatctcctctctatctatcagtgtgaggagtagtcatgtgtaaatctatagcacattattggaaactggagcatgtactaaaatatgcactccagcactaaatcagttgcaaacttccagtaggttatgcatcaaggaaaatatataataatggtgtcagtgtgaaggagcagtcatgtgtacatgtgtagcacgttattgaaaatggagcttatattaaaaaaatctgcattccagcacattactggaaatcggagtatattatactaaaatctgtattccaaatatctatttaggcatttgatcgaacatcttgcgcgcatggtgcacaccagcaacagctcgcttccaatagcagtaggagacatgtgagctctccgcccttcgccttgtcgcagctccatcattcagatccgacatggactgacttcctctcgtccgggttaaggagaagagcgagggcgaaggcgacattcacggcggcaaatattcgagactttggaaaaccatagataccggtacacactactgaggaagaagaaaaggcaataataaggtgttggatgaaccagcttcaggcacgggctgactccctatcatctgggttagggagaagagcgaggacgagggcgacattgacggccgcgaagatcgatagactggaaaatcgtagatactggtttgcgctactgaggaagaaaaaatggtcataaggtgttggatgaacctgcagaagctatggaggcgaacgcagcgcacaaggagcgaggacgcacggccgttggtctccggcgtcgtcgtcgccctcgctggagacgccaggc

SEQ ID NO: 34095 - DNA, 347 bp, Zea Mays
cgacgagttcgctggtgagcagttcgggcggtgccattgtggtgttagttgagaggagagagaggtgaagcaaataagccctggtcgtgcattttatgatggacggtctagattggattggagagtacccacttcgcttcattaaatcagcaccgtcagatcgagatcttgtggtcccagtttcgtagcgagtcgtttaggctacaatctaatcgcagccaccaaaatttggtcggacgtctcacattcactaatacctcttcggtgtggctcgtttacaatagatccctcaagttttatgaataccaacccgtcgttcacatatatacaaagatccttgcagatta

SEQ ID NO: 34096 - DNA, 320 bp, Zea Mays
caaaaactagacacttctggattctgattgtggaatatttttgtaaacccatggccagtatcaaacgtcacccaatgcattagataaactaatgaaccagattgattcacctccaaaagcaaattctgagacagattgttgtgcccaaagtacgtcagatttggacctttatgacggacatccagtgacctgttttcttttccatattgctactgcaatgatacctgtacaccagattcaatgggccaaatgaagcaccccgcctgccgccttcctgtcatctgcgtgtcatggtgtcgcacaccatgagcaccaagccg

SEQ ID NO: 34097 - DNA, 514 bp, Zea Mays
ttgcaatccaaactaaatacaagatgtttgaaaattattcggaacaatttggtggacgcttagagttcacattgagatggacaagaatgtccttgtgttcgtcaatggagaaatccacccatatcaaaacaatatcgagatgcaggaagctaagtggcaataacacgacatcatcttattttacatttcgatatagaggcaacacaacatgacactattattttgctgctcgagaaccagaagaaagaaggttaggaaccaaccaacctagcaacctacctaccacgcgtgcagagtcccgttggcgaacaccacgcatgtagtgtctggggcggtgcaacgcaatctcgtcggcgaacaccgccggcacaggcggcctcggatgttgctgctggtcgttgaactggaacactatcgtggacggggacgaggagccgtggacgacagcgacacagaggtggaggaagccatggtggccaagaagcaggtctggcagatgttgttgctgcccgag

SEQ ID NO: 34098 - DNA, 479 bp, Zea Mays
gagaatctccttaaaaatggttgtctacctttctgtctatttacacctcacctgtctggtcctatttcttcacgagtatgtttaaaatgccaatggcctgctctacagaacaataacggcactgtggaaggcaaggtccttgacccctgaacaaaaggtagagcttgtagaagaggaatcagaaacagaagagttccaaaacgtggaaggagaatctttcttagggatagaggatgcccaaatgtcaggagtgttctcatccacaaaaccttttgatgtaaggttccttattctattgagagataatgtgcgatcgaccatgttctccataaagaatgaaagagttacagctttacattgtaataactttgtgtcactaggtaacaacactcatgggcatatttgagggtggtcctttggagtgccgggtgatggagaaagttggctgtatggactactctgttacagcatgggaacct

SEQ ID NO: 34099 - DNA, 298 bp, Zea Mays
ccagaatcatagctagtgtgcccccctaaactccatatgtgattcaccttgatctacaagattcccttaacaagaagttaagaaacacctgtgcctgcaaaagttgctctgatgtcttgaactctgccttcaaaactatagtgtgaaaatcatctccaagatcctcacaaatcgtctcaagtatctaataggttcgctcattcaccttgaccgggctggtttcttgaaggggagctatatccaaaaacttcatctaggcccttgagctaatccaatgttgccacaaacataaaaaaac

SEQ ID NO: 34100 - DNA, 458 bp, Zea Mays
gctggtgggggtcgggaccaacaccggtgcactctgcgtgtggtggtgatcctcctgggcaagctcaatggtcggagccaaccgaattgctcgtcagagctttccaacactgccgccctcccctcgtcgtggttgtggcccttactagaccaccatcggtatgcttgcgccctcataatctatattgtttagcaatccgaatagttgccatcgtgaaggctctcgtgtccttgtcacgaaaatcgagtgcctcgccggagttctccgcggtgcttggaattgtgccgctgtcgcctggccagggggaggaagatgagagatagtccctgttagatgctccatggacggcggtgattgaatcgggtgaatcgatttggccggggttgggttgtaaccgtggatcgtagatcggaggggcgagagcactcggggattcgggatcgatcagaccgttggat

SEQ ID NO: 34101 - DNA, 375 bp, Zea Mays
ctgttattcgccaaattgaggttgtctactctgtcatctcagtctagtgacaagttcctaaactggtggagtagagctgttaaaacagatccaaagaagttgagaaaaggccttaacacactcatcatgttggctgcttgggaaatctggaagcatcggaatgattgtgtattcgaagggcaacagcctggtgttcatactgttttgcaggttgtggccaatgaatgtaccctttggtgtgctgcgggtgcctctgctcttcctgagctcctcacttgccaacccgctcttagggtttaatttgagtcgctggtagctgtgtgtcctgtgtaggtgtgtgtttctgtaaagtggctgtttgggtggctgttgatg

SEQ ID NO: 34102 - DNA, 411 bp, Zea Mays
tcttctaattgaacttctgaattttcctatgattatggactgcgcctcaatttctatagaagacaggggcctctgcgcaagtattcccgtgactcaggcgaatccttatgtggacgacgggttattctggaattaccgaggggctcatatgctaaaaggtctgggtgaaggggtatggttctttctgagccgttggattagaaaccaagggctaggattagatctcacataaaacgaatcggtatgcaactagagccattggatatgggatctatggtccatattcagcataatcgcactctattcttgtccgcccaatcgcaaatccacgatccagaacccatcatgcgaaagggaatacagtgtcataatctcgtccctccatcgcctatccgacgacctacctttctt

SEQ ID NO: 34103 - DNA, 273 bp, Zea Mays
attgaagagagatgtggctgcacatgtggctatgtgcgatgcgtgtcaaagagttaaaggctgaacaccagagaccagctggactactgcacccactaaagatacctgaatggaaggtgaaaaagattggtatggacttcattactggattgcctcgcacctcgaaaagatatgattctatatgggttattgtagatagactgaccaaagtggctcatttcatttcggtcaagactacttataagttatctcaattggcagagttatatatgg

SEQ ID NO: 34104 - DNA, 446 bp, Zea Mays
atgaaccaaaacctctgtcacatggtccttggccatatgatacacaaccagcatcccgtcaggcacgaccaccacgtggtttcactacctgagtcctagcggcaagaggcaaaacacctctaggcctcccaggacgtctctaaacaggctgagcatgaacaccatgagaggggcggttcatgtccttcctgctcgactcagaaacccaccgctcatctctcttcctcctaaagcaaaaataagctagatgcccatccctctcacaatattcacaatggtacctcacctctctcttgggtggattttgtttgtggaagggggctttcttttcggatggctgaggggctctaggaaggggatcgctagagatgtcgggaaaggtgtcaagggtgttcctaagatggttaggttttggaagccacacttgtttctgaggaggatctctc

SEQ ID NO: 34105 - DNA, 359 bp, Zea Mays
acttcgcctaatgtccaaccatgtgccaagggccacaccccgtaggcaatgaattcctccaccaggtcacgccccgctacctaggcgggccgcatatcggagggccccttcgtctctgtcttctttcgccaccttgaatcgaggaaactccacattacaatgtgagcacaggatggcaggaggcagactcgacaagccttcgacatccccgggggccacatagaaccaaaagtcccacagttgccccacttattcctagcatagaggactatctcgacaacctcagccaaggtcttcccagtcctcggggtgaaggtgcatgatccaaattgggctatcttattacctatctttctctt

SEQ ID NO: 34106 - DNA, 438 bp, Zea Mays
ttatctctggtggggcatggccggcgcgccagtgctctagttcttgtcacgttgggggaagaactaccggcaccgggcagccaggaagggagagaaaaggaagtaggagggtgcagggaggaagaaacgtagggaaccgtcagatctagggcatgcgatggtgatgagaggatgtcggtgtgtgctgggagtcgtggatccggtattgggcgacccagattagaagtagaaaagctattcgggcacgttagttctgggtcgtcgatcggggatcgaaaggctaagattaactcgcgatgtgggtggttttggtgcgcggattccggatctaacggccagggttgcgcgcggggttgacgtgtgccaaagctaatatgtgctcttagattttaatcgaacggtccacaggaaccgataccccttcgccgcatcattttg

SEQ ID NO: 34107 - DNA, 497 bp, Zea Mays
gtttaatcagtggtgctaccaactttgatgcagtaccggacccattgtcgcaaggagctgaggctagagaagctaacaacgaattggcttccatattgagggccaccaagctatcaacttgcataggtgtggtttggtttccattattgttggtcttcgtcacaaaagaattattaatgtttctctgcttgttagcagcatggtcggtattttcctttcttcggtcagcatcctcatttcctccattgtctcgcccactatttggggtaggattaggggttatcgccggtataaaatcttgtgactccggtgtgaatgtaatatcatatccaacattgtgaaacacaacatctgttgttagtggtagttggcccttgtctatgacacccactaataaacggataacccccttccttctgtaggtcagcatatccacttccaaagttgttccaatcatggttccaattgcccaaaaccccagataatgtcgccaagca

SEQ ID NO: 34108 - DNA, 423 bp, Zea Mays
atcaatcatgacaagaggactttgaagattaaagaatttgaacattggtggagatggtgcagaagctgctcaggaggagcacgaaaatgtggcagataatgagaacaatgaaagtttacagtcccctcctaatgttgatggtttattagtccgcctgccacaccaacctcgaagtccaattaagatcatatgtaagtttcaggtttgttcttgtatatcttggtacaatgtgaaatcttacattttcatatatgcagggccaaatggagaggttagacaaattataggggaattcacactttcaaatttactagcattacaaggaggaaaggtaattgtagatacagatgaaaatggtgtcccaaatgaaaggtcagcctccatccttgggcaacaccttggccatgtagcagaaagcccaac

SEQ ID NO: 34109 - DNA, 428 bp, Zea Mays
tgatcgttaatagatcactcgaaccatttgctactgcaactcatcacggaattctcgtgggctattcattatccagggcgagtcgtttgcgtttgctcggggctaaaaatggcgtctcgtagttcataactccctttccagcgccgcggcatgtattttatgtaatttcagcataatgttggcggttttggagagattaagcaagccgttgcctttgaatcgttctcgtagtttaatccgatttctatgttttttcttcgaaaaaaacgagctaggaattcataacttggagaatctgcttggattggggctcgtgagcggcatgaattgcagctgataattggtacgggaaacctgcaactctttttagtgccgaaaattcccggtgctttttttttggctgtattaggcgattcctttgattccga

SEQ ID NO: 34110 - DNA, 291 bp, Zea Mays
ttccgcataaaagttccaaacacaaaacctaaactacttagagcaagtataataacaggctctaaacagactaaatgctgacatagaggatagaaagatgaggagagagtaaaaacgggctacaaacttacagccaggttagacacatgaaccaagaaactttatgagagagacaaatgagccataaattaattgtgaagagttatctactatacatataggctaaaaggtaggccgcaaagatccttatagtcaacagcgagctatattattaatcttgctcttagagat

SEQ ID NO: 34111 - DNA, 336 bp, Zea Mays
atacccgagtggaaatgggaagaaattggtatggattttattgttggactaccccgcacccctgctgggtatgactctatttgggtgattgtggataggttgacaaaggtggctcatttcataccggtgaggaccaattacacgggagccaagctagcagaattgtatatgactcggatagtttgtctacatggagtgcctaagaagatcgtgtctgatcgaggatcacattttcttctcgattttggaagaagttgcatgagagcttggatacaaagttgaattttagttcagcctaccatcctcagactgatgggcagacagagaggactaacc

SEQ ID NO: 34112 - DNA, 303 bp, Zea Mays
cgaaagcccaagtgaccaactaaagcggcccctcaggatatctccaacagctctactatcctatctcctatttaaaactccactccataaacaatgttgtctacagtacaaaactgtattttgcagtatcatatacatgatctgttgtacatatcttcatggcctcactcagcagagcgccagagcataggtcacaatacgtcacgtcaacactcatcagcacctagcgagtcctcaggaccaggaaccctaaaccactaaaacatacttaccgtcctcatccctaggcctagctgacacccg

SEQ ID NO: 34113 - DNA, 318 bp, Zea Mays
caaaaagcatagcccccgatttgtatccgcaggatatggcatattttctcaactcctctttttcggcgtccgttaattcttgtccgagcaaatcttgaaagttaaaatcttcttcttctgaaatttcatcaatttgctccttccccttctccgttgccgtattcactgtagccacggcagcttcctcttcagccattttcagcagtatgctgtcaataacctcaagtgtggtttccaggttcgactcttcggtggctctggcttcggccccggtagcttcggctttgccggattcagcttcagcagttttcatttcag

SEQ ID NO: 34114 - DNA, 534 bp, Zea Mays
ggtacactgaggcgaagacaggcttggtgctgatggagaaacagaaatccctgaagtcttggctgtcaaactgtttgccgttatcgactgtgagttcggacgagactccaaatcggcaaacaatgttttgccagaagaacttttgagtggtcttcgatgttattgtggatactgctctggcctcgatccacttggtgaagtactcgatggcaacgaaggtgaatttgaggttcccttgagccgtaggcagcggtccgacaatatccagcccccagcgttgaagtggccatgtgtgggcatttagcttggtgaattgcgaagggttgctcgagcgaggggaaaacttttggcatgcttcgcaagacctcgtgactcgatttgtagtatagattattgcgggccagtaaaatccttgacggatcaccttggcagcaagggccctgggtcctgagtgggagccgcaagttccgctgtggacttcgcgaaggatttgaatgccttcggtttcggtcacgcactttagcatgggctgac

SEQ ID NO: 34115 - DNA, 364 bp, Zea Mays
tacttcagtcacaccatgccataggcagtttcaccccatcgtcacgagtcgtggagagtaatcagtgaccaccataagcctttgccctgtgagcgccacggtagttatgctccggtgactcaccttcgctccggccgcaagcttactttccccaaattcggagccaccgctcttggtcactataaattgacgctcccgcctgctccactagattgttacgaacccagagaaccattcctcgccctcgattagccactgtagccggagaatttagattttccaccaatttggtcgccatcactgccgaggagaactcttctgtggccagcttcgcctaaggtagttccaggccaactactgtccg

SEQ ID NO: 34116 - DNA, 432 bp, Zea Mays
gggcattccagcggtccgaccagaggtagaagcttcagattagcactaggcgcatactcacccgcgcactcccctggccgacggatccgagatcgatggccaatatcacgctacatcaagatccaatctctaccggacgatttgtatcctacggtcaagttttaatgaagcgaagagttatcttggcttctaatcgcagccgatcgagaaggatcggacggccctcgagtcctcttcttcccccagcattgacgcacgacggcgcaacccaccgcgcggcggcaagaccaccggagttgcgaatccggtcaccctgcccgccatttcctaattcattcgttcctcgcctaattgatgacgttatgaactcgcttcccccaccaatttctgccctcgacgagcgtagagccctgcccacggcgcgccacggcg

SEQ ID NO: 34117 - DNA, 287 bp, Zea Mays
aggaaacctcgacattcctctcaaggatagcattaaagggtggcaccttgagtggttcattatggaaaaccactgcaagtccctccccctcggtcggggagaaagccagatgtatgcactccgagctgggttgagtctcccacttccttggaggtaacggaggctagagttctgcttgctgagatctgactgctgaaggagaggggtctgactaccgaagctgtggttgctgacttcattttcaagaatattcagcctttgaaagacggggcttatccagcttattt

SEQ ID NO: 34118 - DNA, 332 bp, Zea Mays
gcttcatgtcatgagctgagaaagtatattctggctgggctacggccttaatatgttcgcaatcggccttttccaaaattgttgcaacccctcgtgcacctgcgaatgcacagaaatccccgcgatcatcgagtatttcatcgaaagcttcgacttcttcaccaatccactggataactccttcgagatccccacagataaatctttgttccaaagagtacgttcccacctttgcaaagctatctttcagtttcttcgcgcattctatggatgtttcctagcatttctccttcgaatcctggagctcttcaacattcttttgcaccctggat

SEQ ID NO: 34119 - DNA, 716 bp, Zea Mays
ctgcattagttcgctctctcgcctcctctttgttgagtcctcccttcctacttgtagtgacaccagcactgctctacctttcatccgctcgctctcttgccatctctccacatctggctgacggtggcttgccgctccaccccaaatttgaccacacccttaccatcataccgcatttggcctcacctccctgtttccccttctttcctgcccctgtttccacctccttttgccacaccctcacctcctctttgcattcgcccacattcagtttgcggtggctcgtcgctccactcccgatctagctcctcctagtttcctttttcctttggatgcacttttgcctcctcttcacatccgtccaacagtggctcatcgttcacccttgatcgagctatgccactgccaccatgcccatgattcttccctgtcccatccaccatgtcacatccggccttgccacctcatcgtttccccttctcctttctcgtccctgcacccattcaccatgaagcctctctcaccgctccaaacaccctcccctaccccacgactattgtacctgccctaaccataatttaagatggcaaccgccttgaccacacaaaagacccatgaactagtgcataagctccactgccctcatgccttcaaaagtagcagcatcgccctcggttcctaactcgcatagagaagatgccatcgctgcacgtcag

SEQ ID NO: 34120 - DNA, 437 bp, Zea Mays
tagcagggcatagtggtcaccccgagttaagtaagaatgcaggtcgaccatgaacaatatgggtattcttgaggtctctttattgatgatatatttccagtttacagagtacattgtcgtccagatagcttttgaaatacagctaggggtaaaacttcctgaggtgttctatgttccatgagttcctaatttctgtgtcgtccatttgagtgagacgatatgatcccggccgagtgacctctgctactatgaatggtccttcccatagaggtgacaacttgtggcgtccctcccccattagaattcggcggaggacgaggtctcccactgcgaaggatcgacatcgcatggtcttatcgtgataacgcctcaaagtttgctggtaccgtgctgattgaactaccgtgttcagccgttcttcttcgagtacatcaaca

SEQ ID NO: 34121 - DNA, 352 bp, Zea Mays
gtagttgctatgatgtggatggataaacactgcctcactagtaagaaatcaagctcttacaagttctcaccacgcaaagcaagtggcgctggcaaatagcaagaacaacaacggtggctgctagcacaacctggtggtgttgtagaaaaatttgttgatttataggtggctgctaaaacaatagttccaaggaatagctagtaccacgttagccacaacaagttgaataaacgttccacaatggtgttgtgctggtcctagtccaaaccgtaatagagacgtgagccgttacacaaatgaaatcaccaaacactcaaaacagcaagctgacttataaaattgtgaaacggtg

SEQ ID NO: 34122 - DNA, 557 bp, Zea Mays
gtcttcgacaagaatgaaaagttcgtagggaagtggatcagagaattaccttatgtggtttggagcctaagaactcaacccagtcgagctctgcatggaaacacccccttcttcatggtctatggttcagaggcagtgctacctttcaacctcaggtttggggcactaaggttggtcttcgaaaacatagctgaagcggaagcaaccaggctagaagatattgacgtactggaagaagagcggttgaatacagtaattcagtcaactagatactagcagaccctgaggcgctatcatgataagactatacgacatcgatcctttgtagtgggagacgtggtccttcgccgaattctaactggagaaggacgacacaaattatcgccgctatgggaagggccattcatggtgtcggaggtcactcgaccaggatcatatcggcttactcaaatgaatggcacggaagtagggaattcatggaatatagagcacctcaagaagttttatccttagcaagaactattagagcaacattgtattctgtaattggaaaatac

SEQ ID NO: 34123 - DNA, 381 bp, Zea Mays
aacttttatgcaaagaatgatgaatgcactatgcatgtcaacaacatgagtccgccccaaatagcatgtgttaaacatatacttccaccccttccaaataataatcaatatgtgtaacttgatcaaaccacactctcaacatatgtaattaatagaacatgaatgtcatcaagcaacggtacccaacaagaaatatgaggatgaacacaattgacataaatataatcaagtataggacacattaatcaaccgacgagataaccatccctattttacttgccttcaccggggaatttggacaaagccctaagtgtgatacggaagtccaccacctgtttttgacacataacttattgcacaaatccacataacaaactctca

SEQ ID NO: 34124 - DNA, 499 bp, Zea Mays
cagatacttaagtacatggaaagtttcgagctaacttttcccagattgaaacattttgttattgtaacaaagtagcaccagatgggcagtcaggagccacacatatcccctctccatccaacataaacaagctcgaaaccttggcaccaaggcagacgatatgaccaaataaaatgcaatacatttctactatacgatggctgaggcaatgcaagcaataaatatcacctcataaacaggcaaaatcttgaagaactttaagcaaagcaccctcttctccagccgaaaaaagtttcaccaatccggacccaaacaacagaatcaaaccaagaaaacccctgccctcaccaagcaatcgttccgaggaatgccacgacgtcgaatggctcaggtgcgaaatcaatcggaaagaaccacatttcatcgattcgcccatcgtgtgaaccgcggccggcggaacggatcaagaaaccctacagtgtcgaagcgggaattggtc

SEQ ID NO: 34125 - DNA, 509 bp, Zea Mays
cgaagtccagctcgtcctcgagctgaaagtctgggtacctgacgcggaaatcgtcgaggtcttcccatgttgctgatgtatcaggctcgtctttccactggacaagcacctggcgaatgtcgcgtgccaggcgagcttgcgtgacacttgcgggctctggcacaaccgcaccatggactttatggggcattggtggagtagtggctggtggggtgccgacgaacttcttgagcatgccgacatggaacacatcgtgaagacgggctcccgacggaagctgcagacacacggctacgtcgttgatgacttccgtgatgcggtatggtccgacgtaacaaggcttgagttttcccttggacgcatgcggcagggatgtggctgggcgctgacggagctgaagaagagcctagttgccctcctggtaggacacctggcggtgatgcttgtcgtagtgtttcttctgtactgcttgtgcttgttcgagtcggtacctgacatcgtcgaggacg

SEQ ID NO: 34126 - DNA, 357 bp, Zea Mays
acgatcagcaagattccccaacatctgtttctcggctctagccgcctcccattcccttgcatcttgtgctctcttctcatttgccaccttcaatctcctctgctctgcacgcatcgggctgtcaaaactcattgattttacgaacctacgcaagtcctgtatgcattgttaatgtacgaatcgacgagccaagatccacaacacatcttctgtctcattagtctcttggactttattgtacgcatcatctctcctttgttgtcgtaactctcccaaccgtatttcctcgtctcctacaaaaaatagagtaagtacgggtgcaacattgcagctgatgcaaacaaaaaataaatacca

SEQ ID NO: 34127 - DNA, 514 bp, Zea Mays
ctcgagcgcaagaatatggtaagcgaaaccaacctcgagcactccccctctctatttatgcaggggacaggggtgacacttgaaaagtggggccaccccaaacatcatcggaagatctgcccccttcaaccaaggccacattggatatcgggcagaaacgatcgtatgccttacaggttcccaccacctaggataaagttctaacagggtacactgcaaaggatgccccaacaatgggcagggtggttaaccaagccactatgtcatcccagtgttatagggcaggcagaccgtttcgcgtcccaccaagccacccgctcccgactgtgtcatgatggccatccccttttaccatgctgagccagtgaccacatcataccaaccaggtaaaaaacttgaactcaccttaatttattaggcagagtgaggggtggaccaagtaagctcccaatgagtcgcaagctagctgaccggcccataggtcatttgctcgcatccacatccaaggtcgaac

SEQ ID NO: 34128 - DNA, 429 bp, Zea Mays
gtcacgatcgctaggcctaatacatgtaggatgttccggctgtgtggtgaaactttaatcgttgtgggttggacctgcctagtgtggacgaaggagggtttcaagggccattgactccgcgcgccactgaggcatggattcagtttgagcctggggagagcgatcagctccttacaaccgatattactcggggagccgaacatgactctgactggcgtttgcacatgtttctgtatgcagggaacctattcggagcacgtcaacaccatcctgatcgggtataggttaggtggcacgccaggggaaccttgaagccctgccatacgctaggatctaggtcatgccatacgctaggatctgggccgttgaccgaaggaccaggcccgccagccatcccgggagcctctcggctccttgtgttgcctgtcg

SEQ ID NO: 34129 - DNA, 282 bp, Zea Mays
tccttacaccgttgcaattttcattcaatataccactctacatttggagcacactcttacgacaaagttgctaaacacatccacctttttcttttgatatgcactacatccacatgttcacacaatacataacacaacatattttcagttttattcgtagagctacattttttctaagcaagcaaacacggttctattttaaggggcttgcattatacttagcagttagcactacagctagaaatcaaaattgacctcacaagcgaactctgcacaaggaag

SEQ ID NO: 34130 - DNA, 711 bp, Zea Mays
aaccgagggggcatgaaaggatctctgactctgctgactaaaacgtgacggagtgggtccagctggtctaatgaagcttggtcccttgggtggaaacccaaaggatcgagttctttggtgccggtcttgctgctgagctcggaggacttggaatttccacttgaggtgacctttttcttcttcccttgccctttccacttgtatggctttgtttgagaggtgcgagaagctgaggaaatcttggctggctaggatggtcttgacttctggtctgagccccttcaaaaagcgggccatcttcttgacttcggtgctgacgtcatccggcgcatagcgggccaattctgtgattttgtgcacgtattcactgaccgatcttccatcttgagttagttcccggaattcatcttccttgagctgaacgatcccttagggcacatggtgctctcggaaagtagtttcaaactctgtccaggtagcatctctgatggcagcattgaaagtatcccaccaagctaaggccattccaggaagtagatgagcagccagttgaacacgctgattctccgggcatccgatggcttctagcttccttttaatcgtgcacagccaatcgtcagcatcgaggggattgctagatccagcgaatgtgggaggcgtgagcctcaggaaatctcccatcctgtcttgtggtcttccaccatttgggcg

SEQ ID NO: 34131 - DNA, 606 bp, Zea Mays
atgatgcggagcgaagatatgatgcgccaggtgagatgcaaagtgttcttccccagactgatctaggggaggaacacttcctgaaggatcatggggcggaggatgagaagaggattgacccggatccccctgatagggaggcggggcaaactgctcacgatcatcaaagtattcttcttcttcttcatcgtcagctaacataaaaggcaccctataggcctgctggtgccactcattgatttctggaggaggcggatggagaggcacgtcaggcgagcgaggggcaaaaggcatacccatagaggaagcttgacgacgaagattgtcgtcagtctccctctgacgccttgccagctcatgcacatctgcagaaatattccggcacatagaaaagaatgctgcaatcccatgggccaggcgggcacccatccctcgaccacgacctcgaccacgaccacgaccacgtggcgtgggagatccgcgaccaggggagggacgcgaggcaccggcagcagcagcagcaggaccagcagaagtatgtgcacgagagctggaaggggctttcctcaaacgccctgctggattgtttggatcaatccagaaggg

SEQ ID NO: 34132 - DNA, 285 bp, Zea Mays
gtgctccggcgacctggtgctcttcttccccctcggtgaggagcctcgttttctcccctgcctctctatctctctgtctcttagacagtcttttaaattcttgtcgaatccagtgaatcccaacggtggaatgtgttcaattgtctccattatgaatccctgcaggatcctagctccttcgggagggttttcccacctcaaatagccgtttcaccgaaaccctaattccccgcacgccacatgctcggtgaaatgcccaaaccagccaaaaatgctccaattgaa

SEQ ID NO: 34133 - DNA, 373 bp, Zea Mays
gtctgaataccagaatcagatgtggactccactaggaccatggcccaaatgtcatttcctgtcacccatttctgcacttgtagtgctgatacttcctaaattgctaaaacctgatgcacatcatcaccatataaagttacagattgccctacatccagaaacttcagcactttgtgtaccaatcacatgccataggactatgttgcattaaccattcatagcctaatatagaatcaaaatcttccaaaggtagaactctcatgtcagtatagtagaaatggtcatgagcccaccattccacatttcgtaccatagagttgcaaatcatcttgtgcccactagccaccttaacttgcacagagggacactcttc

SEQ ID NO: 34134 - DNA, 510 bp, Zea Mays
aaaacgcctacgactcagggaacagtgtataggatggcgggttgattctgcgaaatcttggggtctctttagtaaaaagacacggccgatggggtatccgatgatcttagccgtcagattaggaacggacgccccagattaaatctgaccaacccgaaccggtatgcgtcacgagcgctcagatctatatccaacggctcgaatttaatgaagccgagatctcgccgcagccctcggatctagatcaacggctaccgctacccgagtccgaatcgttaccctggatcaaatcgcggccgtatatcatgagatccacggtccatacactaactgaccctgagctgttcatcctgagatcaacgacactggtgttttctcctttcttccgctcatccggtgagccgagcacccaggcagagaacgcccacgaccgcgccatatggccgacgaggtccgcagccccaaacccaaatcaaactagtctagtcccaaatggaacccaaggcgaac

SEQ ID NO: 34135 - DNA, 287 bp, Zea Mays
attgggggcacagtaagctttagcaacataccaggactcaagaacaagatctaggaaggtaggtggaaggatagaacagcgggtcgatggaggaggtgttcatggcggcgcagagagtggatttgggggaaattccaaattagggcgctatagtggacgattgggcacgaggagtggttcactgggtttgtaacaagtaggcggaacaggccgaggcatcaatttatagaggacggtcatgaggagggcgaatttggacggggaagagtgcgcggtgagaaggggga

SEQ ID NO: 34136 - DNA, 417 bp, Zea Mays
gtgatggtggtctggtccgactgaagtataccttcagatttagggagaagtttgatgagccaaacgacgactggctgaagtgtattgaagctaccagtgatgagctacttggagcatactccaaggccgaagataatgctttgtccgcagccttcggaggccgggggaagaaaagactgaacagggtctttgatgcgattggcttcatataccccgattattgcttcccgctgcgagggcaaggaaaaaagagtaagactgccgcttcggccactgtagctgagccgaagggcaaaaagatgaaggttctgactcaccggccgcgttatattgaaccggccgtggtgcctaaatttatcgaaggagcctcttcaactgctgaagcaagacaagctgcttcaattgcatagagcattg

SEQ ID NO: 34137 - DNA, 400 bp, Zea Mays
gagccgcgcaggtctccaataaatccgcagcaaaacgatcagaagcccccaacccctcagctgttgtacctaatttcctcttcttggcggccgcagccggcactgctccccgtgaaggcccttcgtcaaccgcagcgaccaccttttttccctggcggtcagcatcatcggcatcgtcgtcccccgggtagccagcatatggcagacggttcaactcaaaaatgtggttcaaccaaacattcgaaccgcggatatcccaactccgtagggtctcagtatttggcacatatcttcctacaatcttcgtgacctcggcctccacttcgcgcacaaatgccgccgggttccgaccccgtaaatccacaacaaaggcaggacttcacaacaaccggtcgcccag

SEQ ID NO: 34138 - DNA, 344 bp, Zea Mays
cacaacacctaattctacccctaacaaccatttcccctcactcaattgcaaggttctagctcacaatcactctgtccacggtgacggcgcaacccgaggataatccaagatgttcccagtgatctagcgtggtctagttcaattggccaggctgctaagcatctacagcacacagggatgttgaaacgagagtgaggaaggcatgatcggacctgtggagagctgaccacagtgagctcactcacggcggagttttgactgaattgggggaacattgaaattggagcactctggtggacgatctaaggcacgagcttgtgcgttgggtgcgtgactacctagcg

SEQ ID NO: 34139 - DNA, 290 bp, Zea Mays
ggcaaaagaagaaaataggagataagattgcacaatttgggtcatgcaccttcacgccgaggaccggaaagacttcggcggaagtcgtggaaatagtcccttgtgcccggaacaagtggggcaactggtgggacttttggttttatgtctcttgtagggaagttgaagatctccctgggctccctgcagccattatgtgctctcactgctatgtggtgttcccaccgttcgaggtggcggaggacgatgaagacgaaggggcccttcggtacgctgtccgcctgagtagc

SEQ ID NO: 34140 - DNA, 431 bp, Zea Mays
cctctcaaggacaacattaagggtggtgccttgaatggtttattgtggaaaaccacggcaagtcccttccccctcgatcggggagacaaccagatgtacatactccgagttgggttgagtctcctactgccttggaggtgatagaatctagggttctgcttgctgagacatgtctgctgaaggaaagaggtctaactgccgaagctgtggttgctgacttcgttttcaagaatattcagcctttgaaagatagggcgtgtccagcttacttgtatagtggtattactgattccactcgggttaccgacaagaaaattcctactgaggatgtggtgagacgaatagacatgatcctgaggggcaaggtatcaaatgttggtgctcctgttgcttattctgcttggaatctgccacctcctaggtcatttttt

SEQ ID NO: 34141 - DNA, 271 bp, Zea Mays
gaatgatacaaaggatccctcagctgaagcgagtttaatgggcaggaaattttacaatgacatctgggtaaatggtggtcgagagatggctcacgagattatgaagaaaagtgagaaagacatccatgacgcccgagtacaagcaaaacaagctgaagaagctgcagagcgtgagagacgcatatgtattgtttcgcggtatctagcttcggcatttgtttttgtggcttcggactgattaattttttccactgtagctgaattatctccg

SEQ ID NO: 34142 - DNA, 419 bp, Zea Mays
cagtacatgagtgtatcctccttgagctttcttaaaaggtccaatcatatctagtccccagcatgcgaagggccaagttactggtatggtctgcaattgctgtgctggtaaatggtgttgctttgacaagtactggcaagcttcgcacctctgaactaactcggctgcatcgtttttcgctgttggccaatagaatcctgacctgaagaccttcccgactagtgtcttggatgctgcgtgtattccacattgcccagcatggaccccatctagaagttgcttcccagtggatgagagaatgcacttcatgaagacgcctgatgtaccccttctgtacaatgtttctccaatgagtgtgtagtgggctgactgtctggcgatgcgttcggctgcatttttgtcatctggttcctcttcat

SEQ ID NO: 34143 - DNA, 719 bp, Zea Mays
caggatcaatggcaggagggccagcaggagcagcactggaacccccggcctcatgatcatgtgagcatgaaggcataggaggcggaggcagaggcggaatcccaaaatcatcatcatcatcaggaacgactatgccctgagtctcgaactgatggaatgtcgtatcctttgcctgagtgtctgtcattggatcaggaactggcactgggtccttaggggctggacgataggagccaaagtggaggcgtgaggcctcaagagtgccctggaactgtggtggccggatcagctatgtgaagatgtagcggagataatgagcatatggccgttgtcggcgagcacgaagaccatccaataccgtgtcatcgatctcacgtataaggaaatcaaccacatcaaactctgaatgtgagatcagggcaccaagtagccggagctagatgtgagtggtagcctccctataacccatccagggcagtagcgtccttctcatgagctgatataggtacttggccgctggagtgaaatctgctggagagcgtcgcgacccatttgtgaaaggtggtcggaacaggcccgcgacgtgagctatggctggagcgactccaccgtgagggcgtcgaggtggatcagaagtgccatagcacaagctatgaaggcgagtggacgactcgtgaaatccaaacagctggcgaatttggctggaatgaatagtgaca

SEQ ID NO: 34144 - DNA, 285 bp, Zea Mays
ctgatctatacgcggcagtggatacgggtccttgggacatgccttattcaggctggtgtagtcgatgcacatctgaagcttcccgtttgcctttggcacgatgactgggttggccagccacatggggtgatgaacctctttgataaagccagcatgcaacagcttccggacgtcctcatggatgaagtcttgtcgctccacggactgtctccgtggcttctggcttaccggcttggcgtccgggtagacctttagctggtgctcaatcacctccctggggatccc

SEQ ID NO: 34145 - DNA, 408 bp, Zea Mays
ccgatacgaagtcttgcacagatcctacgctgctagggactataggtggactcatgtggcctggctttagttcaaatgatatgcattctgttttcttcattttgttcatcatgtcattaatagccttttgtaccctttcatcaatagtctcttcaagggtccttttcgacttctcgtgtttcctatatgacgccgcatactctggatatgcctctctctaggaaatcttagaagagattccccgagcccgtccagtgtgtttaggattgcctagttctgcagttagtatgtcattctctctccgaggcttaaattcgcccttctttctctgttctgcatattcttgaatttttgtcgaaacttcgcctaccaattctggatgcaaaagtttgtcgtcctcagtcaaac

SEQ ID NO: 34146 - DNA, 1508 bp, Zea Mays
cataagtgagaagagagcaagtgtatatatcaggtgcaccaacctcatcgaggtcttcaaaagtttcattatcaattgttagtgttttccccaggcgaagcaaacttgtgatatctttatgatcctttccactttcagctatctccttatgtgcgtaaacgccatcaaaaattttcagggtaagtgtcaaaaatgatggtcccctggagcttggtcggattaacttctcaccatgctctttatctgataaaaactgttttaagagaatagtttagataaagactggcatagcttaccataagaggagatgcaaagcgcacaaactgagtttaacaaggcagcagacctgcatggcttcttcagctgtcaggttctgaaagtggggatgaacaatcattcggggcttgaaatgcttctttgcaagttccttttgtttccgagccttatcttctacagtttgtgaggtcatgtcttgttcatgatagtaaggatcctgctcacctctagagaatggccttctcctcatctcgctagccttgcatgttaggtaaaccatgaatctatttttattcacgtttcgaattttgccagttaatacatcgccttcacgtaactgtgatgattctggatcaaaaccctcatcagaatagttgtctgccataactatggctttcaaacccgaatcaaaggtgcaaattattttgttatcttgtatattgcgaacagtaacttgaacaatccttccctcagatatggtatcatcagtttcaccagaaagcaaccagaattcctcgtctgggcttggctcggtatagggaatcctccagtcagaaaaaccgcacagcagctcaaactttatatcacgcagagtttccagtttacggtattcttctgtaatgctctttatatattccacaattttaagacttcgaagcatgcttggcctttctctaacatgctcaatagccatctcttgctcctcatcgtccatttcatttatttcatgttgtgcatcctcaacatagacatccttagctaaattttttgccaatacatatgattcaggatggatccttgtatcctcaagcagatcaatgagttgagcgctggctgcagctgcaccactccgccgaacacgtaaaaatccagaagcattcatgaatactttcctgcctagaggttttacaagctctttgcgactaaaaatggatccctctcttaccagatctttctgcaaagctgaagctttacgcggacccaaaccagcaataaattgtagagtagaaaaatgccactcatggctagcagcaagattgacatcaaaacctatctgatttgttgcatcaaccattacttgctcaacaatttcatacttctcatcaggagttagaaactgttccagagcatgcagtttccaagaaagtatctctttcccaggtccacacagtgttgcaatcattgccaacgggttctgaaggtaacgtccaagcgccacagcccgcttcaca

SEQ ID NO: 34147 - DNA, 271 bp, Zea Mays
acatggaatacgaggatgaacacaattgacatggatataatcaagtataggacacataaatcaaccaacgggataaaccatcactattttacttgccttcacaggggaatttggacaaaaccctaggtacgatctagaagtccaccacctgtttttgacacacaacttagtgcacaaatcctcataacaaacactcataaatgacgccacacctacgcacaattccaaacccgtcgcgagcgacatctctccccatcacccaccaaactgc

SEQ ID NO: 34148 - DNA, 411 bp, Zea Mays
cacctcttcactgttagtagcaagaaatttcaagatctcaatgaaattgcccctgttgctagactctttgctttcatcatgtccacggaatgccaacccttgatgcaaaagatatttcaaacatctaattgaataagtaagtcttatcttatacaaacaaaggtccccatcactccacttctcaatttggttatcaattgatgcattaggattcatatagccaatgtatttctcttgagctgtcttgtgtgccatagaacccgcatgtttcaaaagtgatttgcttcctatattccaatttctccatccacccacagtaaatgcatctgtgcccttacccttacttttcttatttttgaataaatagcacacaaaacaaaagactgcatcattcttgatactatattcaac

SEQ ID NO: 34149 - DNA, 719 bp, Zea Mays
gcgtctcagggtctgctggtatctagctgactgaattactgtattcaatcgctcttcatccagtacgtcaatatcttctagcctggtagcttctgcttcagctatgctttcgaagaccagccttggtgccccaaacctgaggtcggcaggtagcactgcctccgaaccatagaccatgaagaagggggtgtttccatgcacagcttgattgtgttgagttcttagcctccaaaccacataaggtaactctctgatccacttccctgcgaacttttcattcttgtcgaagactttcttcctgagtgcttccaatatcattccattagccctttccacctgaccattggctcttgggtgtgctaccgatgcatatttgatctggatgctccgttgttcgcagaaatcaaagaacagagctagtcaaattggatcccaggtcggttatgatgctattcggtatcccaaacctgaatattatatcttgtatgaattccactgccttggctgaagttagagaagcaatgggtttgtattctatccatttggtgaatttatcaatggcgaccaacaagtgagtatagcctccctgagctttcttgaagggtccaatcatgtccagtccccagcacgcaaacggccatgttacaggtatggtatgtagttgctatgctggtaaatgttgttgctttgacaagaattggcaaacttcacatctctgg

SEQ ID NO: 34150 - DNA, 480 bp, Zea Mays
cgcgtgctggaggttcggtttattattattatagtgggtggcggtgttgttacaaccctctacgtctgtgcttgcattcactaaacatctattcgttttggcgtaattgctcatgcgcgtgattaggtggtagactgttaaaggactgtctttgaccgcactcacatgtctagaggattgatttgattgaaatatttagcaatgctggcttgtttgctctaggtgaggggagctgcctattttactctttcgaacttcctaatctttgctgagtttatcatgtggaggtgttttttagtgaggaagaagcatcgtcgattggggaagttcacacttttcatgtacaatggcggatgtctcttagtgaattgggaacacatttttcatgtaagaaaagatagggaaggacaattagttgcacttcctgtttacccagacaatgctgtcttgttgtgctgtacaacttgtgtaagatttggc

SEQ ID NO: 34151 - DNA, 390 bp, Zea Mays
ggctacatgagatgctaaagtctattgtttcagatcgggatccggtgttcactagtaccttctggcaaaatctttttaagcgttgtggcacacaactcctcacttcttcctcgtatcacccttagacggatggccagacagaggtggtcaatcgtactatcgagatgtaacttcgctgtttagccaccgagtgaccatccacttgggctcaatggttaccttgggctgaattttgttataattcctcgtatcacctgcacttcagttgactccttttgaattggtatatggtcgcaaaccccctccattggtcccttacagccaaggaactactattgtggatgcggttgatagttggttggtggatcgtgatgccttactagatcgagc

SEQ ID NO: 34152 - DNA, 400 bp, Zea Mays
aaggctggaaataccaagaggctgttggcacattaacgatttctgatattgggccggttcacacggtgaagcctaacataagcccagcctgatgctggcccgtcgccgttccgggagtcttgatctcgggctctcggcccatctaacagcatcaagcgaataaaccggtcacaccgtgaccacgagatcggcatgtccacgaaatcgtggttcattttgaacttcccatcccaacctaatggctatgctatgtgagaatttttatttttgaaaaaagagtttcttcgagactctacgcgtgcatacttttagaccaagttttatcaagcataactatggtccagtaacgatttgtgtggaaggagaactggagaaggactgtttcaaatagagtcgaaac

SEQ ID NO: 34153 - DNA, 318 bp, Zea Mays
gaaatgttcattgtggacttggtgttggttgtactcatggggatggtaggtgtgggcgacgactctttggttgtcagtcggttggtttctagccattcgatcctttgttgccttagttttggggcaatccctggttgggtgtgtcgaggcttagccatggaaaagacaatagaatcttcactgttgcgggcctcagcctcttcctctaattgcattactgtcgcggccttgctgcagagggtaatcgtgatgatgagcagtgtccccagtttgctgctaatttgctatgttgtgcacctcggactgggtgcagtcttg

SEQ ID NO: 34154 - DNA, 293 bp, Zea Mays
gtcgtgcaagagatgtataatagcagatcttctgctagttgagtcggcgtggctcggtgtggcagtttcagcactagtggtgttgtcaagaattttttcagcgcatctagagcttcttgtgcttctgaagtccactaaaatttgtccaccttcttgagtaatttatagaatggtaagcctttttctcccacccttgatatgaacctgcttagggctgccatacacccggtgagtctttgaactttcttttgtgatcgtggtgcttccatcctcatgatagcttcgatcttttc

SEQ ID NO: 34155 - DNA, 429 bp, Zea Mays
gccccatctaatcttcacgtatccagcccctcctctcctctatttgaatgacaggtgggcccgccttctctctcttcctgcctcatttcttttctctcccactcggtcgttcttgtttcagctgggagctgcacggatgtccgagcgagcagtctgtgccacgatccctgcagtgtggagctccaccacaaccgcgatctcttcaggcagtaacaggcgacgttatggctaaagccataaatggcattttgattgccgccgcaagctctcccacaccggcgttctcttccctcctctcgcgaccgttctgattcttgtgtccgacttttgcttcaaatctccatcaatggagcagttacgacttccgtttctctgtgaatcaatatggcacaacaattgacatcgaggagcattgattcctgctttaat

SEQ ID NO: 34156 - DNA, 617 bp, Zea Mays
tcgcaggaacgatagctctctgcccagccaccagttttgagttgtattgagagcaaaaattcacatgctttccgaatgcaaatattgttctcataatttctcccagcagcaactaagccatttatcgcatggagggtcccatagataaaacatattccccaagtgccataccttgcaggtaatttctgatttagttacagtttagacataagggaaaaaaccgataatctgtacaaattagaagatgttttcatacaaaccaggatccatccttgttttgattactctcgataaatatggcagctttgtcaacattttcttttatttctttactgcggtactctgaattgaagtcaccaaataataccaaagcctgcaacactgaggatgtacattcaaccgttctgccaatagatgaattgagtgacttaattagtttgcaaggcaaatcgacatggcagcatgaaattcagatttagaagagtggccgttgttcttacgggtaatcggcgacaatatttcgaaaactctccgcaggattcagaatctaggatgccaaatcaaacaaagtcagtctacatggatctatagtatctacatatataaattactcgttc

SEQ ID NO: 34157 - DNA, 334 bp, Zea Mays
cagagcaaataagcgacaaatctgttgtatcaagctctgggggcctgcttcggaccatagagggacttgttgagcttgcagaccatatcatcggtgggctagcagcaatagatggtctctataagagtcccaggaggaacacattcttgacgttcatctagacaagccaagaatgggatacgaatagtgagagaacggcacagacggtagaaggcttcaccattggactaaacgtctcatcatagttagctccagggtgctgagtggagcctcggagaacccaacgagtcttgtacctgtccagggaacccatccaccttcctcttatatgtcc

SEQ ID NO: 34158 - DNA, 680 bp, Zea Mays
ctactgcagctgctgtatagttgctaaggtctgaccaattgcctggactgcttgggtctgcatcacaaacatttgctcaatagtcatcgggggtggaggtggcaaatgttgctgcgggtctgcctcctcttggggtgcctgttgttctggctgagcatgcctcgcacctatgtgcctgttctcagacatctatagaaatcacacacatatatcaaatctgactctgcagtctttcagcataagaaaagatgtatagaaaatcttcatagtactgaacaaatgaccatcttcactgacagcttcttagataaagaggaaagtggaaataaatggattacccaactaaataactgactttattaataactacaccaagttgcaggggatacccacaccttggtgacaatcattacaaagatccaacttcattacatgtccatcataacaagcatccaacataagataagaaaactaactctaactaagactgaatagactaagacactaaactaagcattattagagactccgactctgtcgatctagggatccaaatctatccgggtcctgcagtttggggtaccatagtcgaagcgaccacggggcggtaaacggtaagggtgctgaatcccgacaagggcggaagaaccaccatccagatagtggcgtgcggcgcactc

SEQ ID NO: 34159 - DNA, 810 bp, Zea Mays
gccgccgctgccgtagtagttcgcccccagcattgtccgggtagggccggtttcgggtcgataaggtgcgcgcgaacctgagtatcgtgctcctgacagcaatcgggggccggagttggtagtttgaggacaatttctcgccgccgattgtgctccgccgcagattgcgtggttccgtggacggggggttcttctgcgccactgctggtaagttttccattcccgtattcatcatcatgtgcgcttcacgccaacgctagcgggctcgggggtagtgtccttgggcacggaacagggggttcaccggtgtatcgccgtcgtggtcaacacggctgcagccgtggtgtttctgggaagaagatgacgggttcgtggccgtcggatcgtctgatctggtttagacggctgggtctacccaggttgaggatggcgcaggaccgtaggatcttaagggacgactgcaattagatccgggttcccttctcgcgcggtcgatctctgccctccatcggaaatcgatcgtcggagagcgtgtcttcaccgttttcgaatccggaccgtagttggctaatcgtagggctgtagcgtgatcggtggagtgaatcgatcttggccgttgtccatcgatcggacggttgcgggtgaacgtcggctcaggatgaagatcggtctaatcaggggcgcacactaccgatcttgcggccgagttctaacgataccctttcgccatggtaaactgcaaaagagccctcggattgtaatgaaatcaacccgccgtccatccggcttgattctgagtcttaggtcttt

SEQ ID NO: 34160 - DNA, 415 bp, Zea Mays
atggagaagatgtaagatgatcatgtgtgtgtcgctgcaaaggagactcggtacgtccgtggggtgatcatggttggccccagccccagcaatgagcatcgacaagacctcaccgagactcctagctacctcagtatgtgacgccaaccacctcctcgctcgacacctgaacaatgagatgattacgtgcgtcggtgcagagacttgtgtagatgcccgcagccccaggtttgttgccaacaacgacgacgagtttctaggtctcctccccgccgagagtcgccgcgtgcgctctgcctacacagccaccgataacgacaccgaccatcgacgtttccacgctagccctatttgcctgctgtagcatcccttccgcatcatcactgccgagaagctccccggccttatcttctat

SEQ ID NO: 34161 - DNA, 455 bp, Zea Mays
aactaattcttgtgaattggctttaccactctgaaaccattctattcatcaaaactgattcaaagcaacaacagaatgaaggtaaccccgctaaccaccaacggcaattagatttgacctcaaataaaatcagttcacaacatagttggatctgtcaacccacatcatctagttctcaagaatcactaactccacaaaacaaaacgaactaagtatcacattaagcagcacaaaaataaggagacaaaagaaagcacacatgttaaataaaggctcagataaacaatgggtagaaagtttgcttgtcggcccaaagagagaaaatccctcattcagagtggtgcatgactttgcatcatcattgcccttacaacctagctttccgctgctttcctctgcatcccagaaagaaaaaggaacaacataagagataacagataaaaaatcaagcagtg

SEQ ID NO: 34162 - DNA, 728 bp, Zea Mays
gtgaaggtctctgtgatcatcgagtcacccaacaatgagaccctcaccatggacgagctgttcagcaagctcaattccaccaagattgacaaccagacccgagccaagattgagaaccctcgtgtacccaccatggccctggtctctggaggtggttcttcctctaactcttcacctgttatgttttctttgtcttctttgttgaccatcacagaggagcaggtggagagctgtggggatgaggagctgacgcttgtggctagctggttcacgtggtttcacaacaatcgccagaaccggtggcatagcggggtccaagaatggatgctacaactatagcaatcccgaccacttcatcgctagttgccccaagaagggcaagctataggctggctagcgcgaccaccactcttgtcgcgcaagggcaagcgtgagtacacctctggcacacaagtccaaggagacgtttgacaaggaggcgctcaagaagaagtacctgaagaaggccaaggtgaaggagcatgccttccttgcctccctcagtgacctcaaccatgactccagtgactcatcttcatccttgagcgacgagacaagctaaacggactctgcttcctcgccgacaccgtaggattcctctgcactgcacatggcacttggtgaggacacgttggccacggcaacaaggacattgatgacgactccacctctaaggtatctctttccgc

SEQ ID NO: 34163 - DNA, 272 bp, Zea Mays
gcaaatcagaaatgtagtaaatatccgtaattcatttctcttatctacatactaggataatgctcgtgcgttgcaacggcacacgatcatgtttaatgagtaagtttagtaattcatttagacaaagagtttaccttatgtgtatttcacttgcatacatgtgagttcgtgaattagtacatgacatcatgatcacgatagtagctctgatcactgtgctcgcgttctagctctctcacaatctcctcttcctctacatagtgccgctccgg

SEQ ID NO: 34164 - DNA, 305 bp, Zea Mays
ctttgattgtttgttttgtttgattgagtatcggatgcctaaatcattccattgatctgttacacctcaaaattgagcgcaacctggtttctgaagcatgtggacacattgccctggcaccaagatacgtcgggcattaaacaaacacaagtggttgacagtggaatctgatcacgccaataaatggccgaaccaaacagcaccttagcttcttgttatagacctagagctcatttttatctgatatgatacctataaaccaacagagtctatatcattttattgcttgtgaaaacatactcttt

SEQ ID NO: 34165 - DNA, 537 bp, Zea Mays
tactaatgcacacaaaagtatttatatccatcccatacaatattagtatattccaacaacaagctggtcattagatttccaatatgtattagcaattacaagcaacagcaactgttgtttgtaaactttgcgattgcaatcaaaaagagagttgaagttctggagccaaaatcatctctggacaatatatatgtgagcaaatacataactaaaccaccattgcataactttcacttgatgaaatctgaacatagcacagaagccctaaaagaataaaaaggtgctgctattggaacagccatggaataagttgatagcaatttaaatacatgtgttgcatagcttaaaacaagcatcatgtcctccacatatatcgccagtcgccacataactatgtaaaatcacatgacttccaatcaatatcaccacaagaaatacaaccgtgcatttagttgtaataaagaagattaatccttcaaaacgaaaaaagagatgtatccttcaaggtaaggaatcatcagcatcgcacagaacgcg

SEQ ID NO: 34166 - DNA, 483 bp, Zea Mays
gttaaccaagaaactgactgtacaatcttgccaaatttgcactttgagacccatcataccataagtggcgctaatccattgatcatgtccaataaaatgattgagccatgccacatccgatacagtgactatactccttgtcaagaccagaaccgagcaatggcctttcctagacaaaacatgacatacagagaaaggcattgtcctgtagagaatgagaaactgcattgtctcatcccagcaccaaaaggatatgtcacccctttctcttggcccaagagccgtgactatgttccatatgcaaatgctccgtataagagtctgacagttgagaaagctgttcagaactggatccaatatcagggagatgtgttcaaatttccaggaggaggaacaatgtttcccaatggagcgaatgcttaccttgatgaacttgcatccatcatcccactcgctgatggcactatcagaactgcacttgat

SEQ ID NO: 34167 - DNA, 552 bp, Zea Mays
tgacattatagatctactacctgtgccgacataagcatcactaacaccatattgttttttgctgaagcaatggctgaacaaacatggttgtacgcacgttttccctgtagcgcaggtattggctggttagaggtccccgaaaggttagatgggtctacttcgtcttcaccatgaaaaatgtgatgggcatcagttgtctcaaagactgggcaacctaaagaggatgcgtatttttggcacgcaagagaagtatcgcaaattaggatgggtaccggccatcgcatgcataaacaaagcaacgaacttgtgaggactaaccctgtgcaactacactgtgcctcgggcgcttcacttcatggcatctcgcgacacgcacacatggagaatcaagcatagctctatatatcgcatagtatggaagaacgtcacatacaattggtgaaccaaacgggccgtaacaaacaacacattataaaacagatcaggcgtataggcacaaactcaccgacgatcgaaaacgcaaaatggtgttatgtctcctccaagctgcga

SEQ ID NO: 34168 - DNA, 325 bp, Zea Mays
agactccaattcctgtgaaggcaactagacggaccaccagggggggcccgtgctacctggcctatggggctgaagcctgccttcccccggaaacccttctggactctccacgtgtccaacctttcgatgggtttgtgtaggggccactgcaacgcgaggacgtggaatcaagcggcggactcaggtgtcaagttgcaacccaaaatgcacatcgtaaccaggcacccaagaactatggccgacggttcgtgcatagtagggaacctagggttgggacctaatcctgcggtaaagtactgaaccaagaggggatccacaacctctc

SEQ ID NO: 34169 - DNA, 396 bp, Zea Mays
ccgctgtgcatgagaacccagaggatgctcatattgttcataagtgggtggaggataggagagtgactcattttttgaagaacctggatcctaaatttgaaaatataagggcaaccttttgtcaccaagagagtctccctactatgaatgagacggtgtcagctatgattaatgaggaaagcaggcttcgagtaatgactactggtgatcctgcaaaatcagcctacaccgcaattgatgatagagattgctattcttgtggtgagaagggacacttgagctacaattgtcctcatcctcgtggcagtggtggaaggtggtggagcttgtggaattactcgtgaagcctatggaggaggccatggaggctatggagggagacatggtggacttgct

SEQ ID NO: 34170 - DNA, 613 bp, Zea Mays
ctcacgcacctcctccaacaatgcaaacacccagatatcattccctcgcagccatttctccacctgtagatcttcctccaccacctgctgatgtattgtattgcccaccaactgaacttccacacctttgtccacaaagctaataaccttatcatcccaatcacaatgcataggactgtgtcgacgcaaccaatcatagcccaaaatagcattataggcgccgagccccaacaccctcatatcactctgatatgtatgcccattagcccaccattccaatgattgtaccatcgtgtcactatacataatctccccatttgccaccctcactttagctgaagaacaaggatgcactggcagccccattctatcgaccaactgcttgctaatgaaatttgtggagctccccaaatcaatcaacaccaacatcacctgattttgcaataaggctctcacagccatacactcctcatttgtggtaccactcagagcattaagtgacaacataaaattctcctcttcccctttctcctcctgctcaatctgtgtcaacgtttgctctgatagtgtcatactcaaatcctcggcagtgagggcatgcaattgcatctgg

SEQ ID NO: 34171 - DNA, 469 bp, Zea Mays
tggccgaactaggtaaacgagtgccaccgtgagcttcacaagcatacagagacatgaaaacaatgtttgatttggacggtgtcttaccagaatggattggccacggttgagctgctcttcgtgatggcggagaccagtttgggggaagtttgaaattcaagagttcaggtgaatgattaagggtgggagcgggtgctatggcttcacaaagaactctagttttacttcgcacacttaaattgagagaagggggcagaggtagcgtgaattcttggttcggttcaactcactgtgtgcgggatgttcatacctcgcagtggatcacgggctatttatagccgcgacggtccggcgatcacttcccagccatggataacttctttagtgcatgcctagcacgtagaggagaggtacaatgaggtaaatcgaagcatgtgtgacagcgcggcgagagctcactgagtcacgg

SEQ ID NO: 34172 - DNA, 285 bp, Zea Mays
tgcgtttgcattgatcagcaccccatctggggccccaatcagagtcaagaagaatctgcgcatatgcagagactgccatgtcgcattcaagtacatttcaaagatcgtttcaagggagattatcatcagagatatcaaccggttccatcatttcacaaatgggacatgttcttgcggtgattattggtgaaaatggttcagcagatgataatttagattttagcagcttgttgagaattctgatgttttagagcagttgcatgccttcatggaagtttatagttt

SEQ ID NO: 34173 - DNA, 290 bp, Zea Mays
cccgccgaacctggagggcacgacggtggacgaacacccaaccccattgccgcggcatccatccggtttgcactggcaaggaagcccatgaacagtagttggcggcgcagaacaccagtgaaagcagagaaacgaccacggcttcttgttttcctcccatcaatcgcaaatgcgatctcaatttctctctgtgctccgatcgatggaggtgcgccaggcacaagcttatatgcacaggaggagcggattagccgccatagccaaccgaacgccagggagatcggcgaagt

SEQ ID NO: 34174 - DNA, 378 bp, Zea Mays
gggacctagccgtgcgaagaaataggagtcggaggggtcttctgtaaaccgttagtggcccagtgaaacagtaaacaaacttgattcgagttagctattaaaccaagggcctctgtgcaaaactacctcaggctcgcgcgcgtgggcatgtttctgctgttgttgggccgacttggactgatttcagcccaagtctgttcattattttcctttttctatttttagccagctttagaaatctgttaaaaatggtagaaaaatgctaaaattgtgaaactaattttcctaggcttgttattttccctagaatttagtaaaaatagttttatgatttttagtggaaataagaaattttagggtatttaaagtagttaaaag

SEQ ID NO: 34175 - DNA, 299 bp, Zea Mays
actggaggaagaacgattaaatacagtaattcagtcagctaggtaccagcaaaccctgaggcgctatcatgataaggccatacgacatcgatccttcgcagtgggagacttggtccttcgccgaattctaacgggggaaggacggcataaattgtcgccactatgggaagggtcattcatggtagcataagtcactcggccaggatcatatcgacttactcaaatggatggcatcgaaatagggaattcatggaatatagagcatctcaggaagttttacccctagctagatttcaaaa

SEQ ID NO: 34176 - DNA, 343 bp, Zea Mays
gctgttgagggtgtttggcaaggcatcagggttgatcacaaacataaggaaatgcagtatgacacctattcagtgcgaggagcatatcattgttgctgctcaacagatgttaccctgcaatgttgttcctttcccatgtaaatacttaggtcttcctgtctctgttaaaaagctccctagaagttcctttcttgagcttattgacaaggttgcagcaaagcttcctggctggaaggctactaatcttaatccagccggaagggcaactttggttaaagttgtgctcactgctattcccatttatcacctcatagctttgcgatgtccaaggtgggtgatcaag

SEQ ID NO: 34177 - DNA, 530 bp, Zea Mays
ttctttaacaaaaggtcatggccgaaggggtattgagcgaccacagtcgcacgatcaagatccaatgcatcggattaaaccttgaatcagtacgcagcgcccatcgttagatccagatctgacggccgtgatttaatgaaaccgcgatctaatcctatccctctgcaaccgatccaacggaccacactacattgcatgaacatctacgccagatcgaaccccaaccgcacatccgaggatcaacggtttagaattggtcgcgcgaaggggaaagagataacctgatcccgaccgcaccttactagatctacggtcagggcacttcctcttccccaacggtgtagcacggtgcgccagtactccccacgacggaatacgccggcgagccctcccccaaaccgcgccagtaagcgattctcggctctaatcgactctactcgaagctatcgaggttgcgaacatgggagcacacacgtaccagagatggtgacgacaggaatccgaccccgcggctcgcgacatcttgcgac

SEQ ID NO: 34178 - DNA, 500 bp, Zea Mays
ggtagggatcttctcaattgattcgtttccctctgtagaccgtgtaggaccaatctgattagggggtatggctctggggtggcggcttggccgactccggcgggtcctccgccgcggggaaggcttgcgccgctgtcttggtggtcgtaatgagggagatgagctagagccgttggatcggaggggaacggctgagattagaacccgtgtaaggcttaggtcgggaaatcagatccgttcagatctgatcagatggatcaggagactctagtgtaaataaaatccacgccgtggattccagatcctggggccgggattacgtaccgattcgccggatgtatgatctaatctgtaccgcctgtttctaatccagcgactagaataccaccgtaccccttcgcgggtacgttttacaaaagaaaccccgccaaactttgaaaccaacccgccgtccagtggaactattccctgagtctgggttatcttgcgcagagaccctt

SEQ ID NO: 34179 - DNA, 1390 bp, Zea Mays
gtggtgtttcagttctactgtgtccggtgttttttaattgcagcaattaacgttgttgggttccacgcatgtgtatgcacatgcatggtttgcgccttttgggagttcctgcttgtcctattgctcctacatcacctgtgatttcagagaaggctactgacgagaaggtgctgcttgcagactatgatgatcgaatgtccccttatgagttatgactcagtttagtgcttacaggacttggttggatgaggatgtctgtgcccgtgctattcttgcctctagcatggaggatcgttttgttgctagagagatcctacaattgatgagttcttcacttagatgtatactatttgacgtcaacttgatactcttggtccccagttggccagttgtcaccgcatacttgtcaggcttgttagggtcaaaaggccggacttgagcttctacatacctacaacttcttgacatggctgtgacaaatttgagccccttcgtgctcagttggtcatcgtcatccttgtgtctctctgatggatgttcttgctagtgtccgtaatgaggagacccatttgtgtgttgttggcctgttgcagtctttgttggtcttggctactcattcttcgtcttcttgatcgcccgctactccattgacaatgtcatcttcagttgcgcctccctttgcgcatggggagcgtggtggccttcattgtgcttactgtgatcatgacagacatgtggaagcctattgtttcactaagaaggctttggctcgccgttcttcacagggtagtggtggtgctggtattgtaggatctcaggggagttcggctgcgactacggaggcccaattgctcatgctgcttcgtcgccttatggcttctacctatatgagccactgctcactggttctgtgactcagtcctctgcacctacaggttctgttgttggttctctgtcttccactaagggaccatctccttacactttaggtacttgtctatggattctagactctggtgcctcctttcatatgtctcctcattgcacccgtcttctgtttatgaatccttcatctcgttctctcaatgttcataccattgatagatctcccttttatgtttttggtcattatacccttgtgtctgactcttttcatgttactgatgttctgaccatgcaactcttgtctgttggctaaattactgatcatgattgtcgtgttattcttgatcttgacttttgttatgtctaggatcgacacatgagttgttttgttggtactggcccttgtcgtgattctcagcgcctctgggagcttgatcggctttgtctttctttcgctacgtttgttggtcttgctgggtctgttttggcagcgttgacttctttt

SEQ ID NO: 34180 - DNA, 805 bp, Zea Mays
cactcgcccactaaggccctagacaataagaccccatccggggcctagcactggggcaagccgacgatcagccacttctgcatcttcggttgcctagcatttgtcaaggagctcaaccacgccaacaagctcgacgatcggagtacgccaagggtcttcatcagctaagcgaaaggcgtcagggcctaccatatcctcaaccatgtgacacaacgtgtgcgcataacacgtgatgtcatgtttgaagaagagtgaggctgagaatgggcaagatggtggacgacatcttgacttcaacgatcagtgacttcgtcgtcaactacatccactttgagggagcagggggagtgaaagtgaactgctattcttcatcgggctcacctacccaacacctagttcgccactagctccagcgagtccttccacaaccaacagcaccagccacacctcactctcatgcaccgatgcccacacctcgagaaatcagcactggcaactttggtctgtgatggacaacacacggtggagttcaccattccattgtccaatgatgaggatcgtgccaacgcctaccacaatgacaaacctccgggctaccgcaccatggacagcgtcctcagcaagcaagaggggtcgactttgaagatgccatcacacatgtcaagcggatgggattcattagtgtcctcgcgctggcagcccaggagggttagcgcctcgccgcctctaacacatggatgtcaagtatgccttcctcaacgacaacttgaaggaggtctacattcgccatccgacaggattcatc

SEQ ID NO: 34181 - DNA, 330 bp, Zea Mays
gtttggaatgggtacaagccacagggaagaaacctaacattgggcatatggtccctgtactctgtctctctctactgttcttcaccgtgaaaaggatgcgcggctgagccgtgatatgaaacaaggatgtttgtctgtctgctgaaaattactgatatagaacagatttggcctcatttttatgacggggtgtagggatagaactttctttcctggaccaaaatcatcaaattaagagcgcatatttctggggggttggatctgactgtggctacagcctccatgaaataaaaagctatcctaattttgttgtcctagtttggtgctttg

SEQ ID NO: 34182 - DNA, 376 bp, Zea Mays
tggattcagaatggcgagaatgaggggatttggttcccatccattacacccaccatcacaaaggatgaaggcagagcctccacacatgacactatcaatggctcctcatcctatggccgatatgaggacatctctaaactgagcaacaatggcaaaaaggatgaacactaagacggctacaccaaatgttaggtggtccatctctctatttgtgattttcggtgtgattgctatgggaggcagttacatgagaggaagtcgaaagcatatataatgctaatcatcacctagactaaaaggtacaaacgaactagcccaccagggaagtcaaccacacaagccaccaaagattaacgggactgatgcgcccaccatc

SEQ ID NO: 34183 - DNA, 430 bp, Zea Mays
ggctaagagagctaatcctacctcaacaatatgtcggtgttttcgttcggccacgccattctgttgatgagcgtgagggcaggagactaaatgagtgatgccaattttccggaaaagagagttgagccgaacatactcaccaccccaatccgtttgcatagcaatgatcttacgattgaacatgcgttcaacaaggttttgaaactcatgaaatatagtgaatgcatctgatttgtgacgcaacaagtaaacccaagtgaatttactataatcatcaatgaaactgatataatatttattgttgccgaaagaatcaattgctggaccccaaacatcagaaaagatgagatccaggggagcactagacctactaaccgaaataggatatggaagctgtcgtgccttggcacgcatgcatgcatcacaaacg

SEQ ID NO: 34184 - DNA, 424 bp, Zea Mays
atttttgttgtatcctcagcgtctatctcctggtcgtgaccgcgtaggattatccgagcaccgaatcgaggaatgccagccatggcgccaccgtcgggcctagccgccaccgtggtgtagcgcgcctgggcgtactaaagctcggtgaaggagatgaccgtctgaccgttgatatgtgaaacaacggctgggatcggatcgcccttaccccttcgcttcaatgaatcgtggccgttgggcggatcggatggtccatattggatcacgtcccaatagatactgaccgtagatccaggatcctgtggccacgggcgcataccgtttcattatatagacgatctaagtgcggtcgtcagattgagatccagcggctgacgcgcttgcatacctcttcggcctgggcgttttgcgtaagagatccgag

SEQ ID NO: 34185 - DNA, 465 bp, Zea Mays
cttcgagaacaaaaattgtatgctaaccttgagaagtgcaccttttgcaccaacaaggtagtgtttcttggatttgttgtatcaggacaaggtgtggaggtagatgaagaaaagatcaatgctatacgcgactggatgcctccacaaaatgtgagccaagtgagaagcttccttgggctcgctgggttctaccggcggtttgtaaaagactttagtactgttgctactcccatcaacgaattgaccaaaaaagaagtacattcaaatggggagaagcacaacaaaaggcatttgaagaattgaaaacgaagttaacaacaaccccagttcttgcactctcagacttcggtaagacatttgaaattgaatgtgatgcgagtggaattgggatcggaggcgtgctcatgcaagaacgaagaccaattgcctacttcagtgaaaagctaagcggtccgactctaaatt

SEQ ID NO: 34186 - DNA, 274 bp, Zea Mays
gagatgcaacccagagaatcagtcgctccaaatgtacaacacgtatcacgacggaactgccataccttgcgagaagttatctccatcggtgacaggctctcgcattggcagatgggcggtgatggagctgacgactgctacagtagagcccccatgcgaggtgctttccaattcgtggaacctccccgacatccggcacccagcgacgcaggagtcaagtccgatctagcggcatccttgatctttggaggcggcgacggcgtccctgcttcct

SEQ ID NO: 34187 - DNA, 353 bp, Zea Mays
cacgccctcctagcgcattattcttgctcctgcgaaaaggattaaaccggccattgcgaccctgaccacgcgaaccagaaccaccatgacctcgacgggcagcaacattagctgatggctgggatcctccatacagcaaaaccatcctgctctcaaaattgaggagttgcgagtatgcctccccaactgagacagaatccttctgtgcaacaagggcagagaccacacagttgtattcttcatctagtcccgcaaggatgtaggagactagttcttattcatcaatgggcttccgagcagatgccatctcatctgcaagtgccttcatttttgcaacatactcagaaattgac

SEQ ID NO: 34188 - DNA, 1002 bp, Zea Mays
cttatgtgggaaaaagatgtccaccacacaccaaaaggtgcaaagaatgattttcaaaaagaaaaagctaacgcaccgtacatcttttgctaaggagatgctaactgaaggtattttgtactgtcaaatcacattacctggtaatttgaagtctttagtttttttttaagattatgcagacacaaagttctttgcactgagtcagtcaaacccaatcttccacatggcattaatggcctcagtcattgttttaattctcttactaaaagaaaactgttgcttgccatttcagctagtgggacatcatttgctatggaaggtcaaaataaatcatgtgaagctgagaattaccatggtattcgtggatactgtagtgttgtttttgttgctgttgaatccattactcatcatttccccctgttttcagttaagctaagaatcaagtcattcaacatcccagaattgttcattaaggtcccagaaaatgcaaccattggatcactgaaggtaaacactagatgggcatacagaagttattgctaagcaattgtgcattcctttggcatcccaatattctttttggtgatgctgttattaatttactatacagtgtaattgatgaaatctgcaaggttgcaagagcgcacttgagttcatagatttatctttttcattccacagttggtacgctggattcagttgactgtcatgttagatttctgcatttgaggtttattgcaatgtggaataatgagtcttcacaatagttttactggtaccctatacagagcaaataaataatttgtttagtaacagtttgtagttcgtctatgcctacagagagctgttatggatgttgtcaatagtataatggaaggtggcctacgcgttggtgttcttcttcaaggaaaagatatccaagacgacaacaagacactttgtcaggctgggatatgccacgataaaaagctaaataacatagacttcacgctggagtgcgag

SEQ ID NO: 34189 - DNA, 339 bp, Zea Mays
taatgaggtgtgatgccatgtgagaggtgcccccagagttcatgtaccattcaccagatggagggggcaactgtagtgtcatggtgttgaatgccctacctagagcccgtcggttccatggcccaagtgcgcctgtgctggcctgctagaggccctgatgttgtgtggcggttgacaatgacaagaggatgagtggagccggtctaggcaagaaccaggcctgtagtgtgtttttgtggagagagtaatacagattgcaaattgaatatctagttaggtgcattattgttcccgaggagcaaaccttcaccgcccgtgatgtgtcgcacacaaatccat

SEQ ID NO: 34190 - DNA, 291 bp, Zea Mays
gtggaagcgaaacaagctgaggaagctgcagagcgtgaaagacgtttatgtattgtttcgtggcctttagcttcggcatttgtttttatgacttcgaactaattaactttttctattgtagctgaattatctccgccaccggaaccgtttgatcccctggccgacccagagacgaagaaagcactggagattattaatatagccgaatctgttattgacgaagtcgttaacaaattgctaaatgaagttgcggagaaggtcctaaaggaagactagtagttattgtaaaaa

SEQ ID NO: 34191 - DNA, 497 bp, Zea Mays
gtctaatcgtcctaaggaacgcgcaaaacaacaattcatgctcacgtgaacatgatcgaaggtgtcttaccggatggcatggtgtggagggcactactctcggctcgcagcggaccgacgaaagaggttcagttctggtgagaaatttcggtgacaaagagtgccatcccgcccggcattgccataacgagcttctacgcgcctggagatccccgatgaccatgccacgcataccgaacgatggtagatgagcggaatcacgacgatggcaacccacgcaaaccctcctgctctcctcccccggtggtggtcgcgacatagctgtgaggcgcaggcgaatctaaccatgggtcaagggaaagcgcaggtggtcgtccatctatttacggctgggcaagcatcaaggtggagtggtggcagagtcggacccgagattcctggcggctccaccggattcagttgcaacaaaccgagtaagaagacggagtcagagacgc

SEQ ID NO: 34192 - DNA, 530 bp, Zea Mays
acggctgccaactctaagccatgagtagggtaattcgctcatgaggcctgagtgctctcgatgcgtgggcgatgactcgattgtcttgcatcaaaacacaacctagtccagtgctagaggcatcacaatacacatcaaatgacttgctgttgtcaggttgcgctaatacgggtgctgtggtcagatgttgcctcaaggtgtggaaagcattttcgcatttttgaccccattcgaattttgctcccctcttcaacaattcagtcatgggcttcgcaatttgagagaagtctggaatgaatcttcgataatacccggccaatcccagaaaacgttgaatatgaaggacagttgttggcggcttccaattcatcacctcttacactttatctggatcaacaactattccttcttgagagatagtgtgacccaagaatttgatttcttttagccaaaagtcacatttagacagtttggcataaaggcggtgttctctcagacgttggagtactacatgcaaatgactggcatgc

SEQ ID NO: 34193 - DNA, 399 bp, Zea Mays
caacactagaaactgactaatgatcacggactaacacagagaaaacacgacccacaatgctgttttaagccagcagctcttcgacctggaggaaagacagggccttggctccagtcaaggaccagagcaccgcctcttccctagccaccctaagggttgtgaccaagctaggattacatccatcaaagacagatctattcctatgcttccatatggtccaaacacctaggattactagagaattgaaacccttcctcagaagatcagatgttcgagagctgctagtcttccaccatgacttgaaggaatcctcgtgagctggacacagctcctgctgtcccactgaactaaggaaatcaaaccaaaactgcttggcaaaaacacatttgaccaacaagt

SEQ ID NO: 34194 - DNA, 482 bp, Zea Mays
gagttattgagagccaccagacaagctcgcacggtggcgttagctaatcccacaacgacacgagttgcgcctagatccctctggatatcgtccaccaatggtcccatagatgtcggaaggcaaacgacctggatggaggatcgtggcctccccgcgcctcgggggcgaccaccaccctgagaaaggtctaggaagattgaaaaggggggaaaggcctctttaaagttactaataaaggaggatagacattgtgcgatgacaggcgtacaaacaccgacggggggaatgaattgacgaagggagttcaaagggccccacaaacatagtcccgggtaggtcaaaaaaggcgatatgggaaaaataaaaaatgttttttcttcagcagcgatgggacacactacatcgtgagtcaatgagcgctgagcacgacgtcgtttgcagataattggtccacgacatggttgaccgcctcgtcataaccc

SEQ ID NO: 34195 - DNA, 501 bp, Zea Mays
gaggaacagagggacatttcttgacattcttccctctgcgggagatgctccttcaatcaggtaccacccccttccgctctcgtttctttacaatacttgcacttaaaacctgtgccaaccttctcttcgtgctgccacactagttctgtcatgttttctataaaatataaacatataattgattgagcatacacatttaacaataactaatacataaactattgggcattcacatttaacaataactaaatcaaaacatatttaacaataactaatccataaaccataaaccatcacatatgtaacaatattaacatacaacatatataaatctgaaatcctaattccgaaaacatattatcgagactaaatctgaaaccctaaacaccgcaaaactaaatctgagcaataaatacgtagtatagaactaaatatgggtactaaatccgttttactggaactaaaacacggtttacttgctccaatcgcggtaaactgccg

SEQ ID NO: 34196 - DNA, 459 bp, Zea Mays
caaacctgtaccggccggaatacgcaacgaccagtgccctaactcggtctacacctaattccactcctagtgatcctaatctatccctcaattgcacgaatccggcccgaagttcttctgcccacgacgatgatgagactcgagggaaaactgaagtgttctcgatgattctgcgtggtctagttcaatcaatcgggcctacgagcaacaagagacttaagggatgctaaaacaccaagcaaagaagcatgaaccaacctgtagatggttggccacggcgagatgctaacggcggtgcggagaagcgatttaggggaaataccgaattcgggcgctacggtgggtaatcgggggcgaggagcgatgctcggggttcgcaacatgctaacggagcaggctaggccatcaatttatagtgatcaacagcggtggcttcgaatttggggaaagaagctggcg

SEQ ID NO: 34197 - DNA, 483 bp, Zea Mays
gtcacattcatggtgctccgctgcagaatgggcagattcagaatgggcagattcctgatgatctggtggctgtggggccggtgcccaactttaatgcccccgccccctgccttgggcgacatccctatgattggaccccaggaggttgatggcccaccaattcagggtgttctgcatgtgcctggggatattgctatccctgttgctcagtcggtggaacctaacgttaatggccacaacaatgtgatgttgaactttatgttttcgcaagattggcagccggaccctgttttgctgagtcacttggaaaggaaaaggaatgcccagttctataggatctgggctaactattttgccccagctggtaattcggtgacctcggtgcaggttcccaagaaatgggcaccctttttcctatccaacttgctgcatgaagattcttttagttggtcaaaatctttcttgtcttcagatattccttct

SEQ ID NO: 34198 - DNA, 374 bp, Zea Mays
tcagcatgaacatggcaacaacaacatgttgcaaaacaataatcaagttgacagtgggggatgggatgtgtggcttaagcttgattaggttgatcacgccctggacaaccaagatgatcacttccctgatgatgatgatgtcgtgtcgtacgctccgacacccaaataacaactggtgatcaacaatcaatactctgcatgtttaccttcccagatcctcctctggattggaggacacccactggagaatgggcacgttgtaaatcaagtacttcacattggggtcatgcatcatgctgatggtccctgcttagcctccccgtgaaagacttcttgcttcacctggccatcttcaagaaatgggacaatttgtt

SEQ ID NO: 34199 - DNA, 364 bp, Zea Mays
gtgaaatctatgcatattcgccacttgccacttttcttcttgaccatgactacgttggcgagcaatgtggggtagtcgactagttcgataagcctagcttcgagcagtatgtggacttcggccttggatgcttcagtcttctcgtctgacattttacggagtttctgcttcttggccggaccaaagggtctatgcttagccttcgaagtgccttcgagctatttatcgtgtaaagccgaaggtatatttgtaattacatgttacgtacattccaaaagatgaagtgataagtgttaaggctgactatgagtaacatgttttacatttcactgttggtgtatcatacttactatctaatatttat

SEQ ID NO: 34200 - DNA, 373 bp, Zea Mays
gtcgcaagaaaagaattagtgcgcatataggcgatgaatgagtgtgatgaaatggtgacatgccttcttagtcatcatgtcgttggttggtgacctaactgaaggtcgtagagaaaggtcgattgcttatgtgttattattgtcactttgtggttctgtatgaattgcaatgtgaaatagtagactctgtatgtgatgctagacgttcgtgaattgtggtgcttggaccgtcgagatgaaggataagtcggtcgatgccgattaagtagttaaaatgattaagggaataatcatggggttaaactagaaactagtgttctcgcacccgtttgggatgttatagtctaaatgcgtatgtttatggtcgtgatga

SEQ ID NO: 34201 - DNA, 411 bp, Zea Mays
agaccaggtgaccttcaagaatctggggatcttcagctctcatgggttgaactgggttgggtgaagcgggctcttggatccgcatggctctacgttggttgtgggttaccaagtaggcctccatcagcttctggacgtgctcatccttggcttgcttcagggcttcaaccgcaatgacttcacgactttccaatgcagttgcacgggcttgagctatggtgagatccacatggagccgacggttgcgcttctctgcatcttctgctcgggcaatcatctgacggtggtgccgagccaagaaatcatattgtgcatctagggtgagaaggtatgcagtgaggtacacgactgtggggtcatcctcaagcagctacttcccttccaatgcacgcatccaggccatccaaactg

SEQ ID NO: 34202 - DNA, 376 bp, Zea Mays
tgactattggcaacatgaatcaggtaccgatgcaacatggtatgataagctgtcgtaaaagaaacactacaaattttgtgtgcctcggtcagagactggaagttgttgcaagccgcaacggtctgttcgtactttccagggtgtttcaacgtcgaaaaatttaccattgttctatggttcagaggctatagaataaatcatggcacactgaaattcctggactagggtgtatacacgtttgttttcacttcctcttgtgccagtgctagcagtagtgttagctcagcagcagcaagtggtagtgagatgaagtctgttgctgtccatgtctggaaaagcgaaactaattgatgaattgccaatcaattagtacgag

SEQ ID NO: 34203 - DNA, 299 bp, Zea Mays
ggcaaataaaatacttcattctcaaattcaaagtttaaagctcaacagtaagctctgttttttaaaaaagaagccaaagttagcgcagaaccattgaaatttaaaattaaatacgtcgaagaggcaaacgtcaaagtttataccttaaaattcgaatagaacaagctcccagtaatatgttgcctcctataattgctgagatctcattcgagcttcaggaatccgatgctccttgacaaagtattgatagtttttgctctggcacggttagggatgcaccctagaatctcttcgtcgac

SEQ ID NO: 34204 - DNA, 744 bp, Zea Mays
attgattaatctagctcctgtcaggcactgaactatttgttaagacagttttatgccaatttcacttcttctcaccagcacttaccaatgcatgtagctatgttatgctaactttgaattgaaatgtagcattgcagtgttctcacccttgatgtacattgttttgattaattgcagtgttctcaccctttatgtagtgatgtgtgattcctagcacattgcaggtgccctccactaacgtgccttgctgatatattgtaggttctgtgaattgaagcgtagttttagacattggtccaacctatctaacttcttgtgaattgaagtgtgaggtgcatcgagctgacgagggagatagctatgcaggcgcccctgtcgtgccacataagcagctgttgcacccaccgaccaatcatcttgtgtgaattttgcagtctacggtggagttatagttttgttctccctttgtttctatgcaaaataatcaagtggcgagaagacaaatatcgaatcaacgatgagttatttatgtacaaccgtaggggctaaattgacgtgaatgaaaactatcgtattgtaatctgaatgtggcaggtcaaccattgatcacctttggccttgctggtcagtgttttctgtcttcggcttgactagcctttctcactaatatttagtgcacattgcaaccacacaccacttgcgatgttttgttttaaggttttacaaaggtagtttttagttctc

SEQ ID NO: 34205 - DNA, 490 bp, Zea Mays
ccgaaggtggctattgaaggtgaggtcgaagcatgccagaaagcctttagcaatgtttgtgccttcattgccacaagagatataatccaagagcacatagcctatagggtgtggccacttgtggatagctaggaaatgtcgaaggagactactgttgaatccagtgaaggtggcctagttcgattgaaatataccttcagatttagagagaagtttgacaaaccaaacgatgactggttgaaatgcattgaagctaccagcgatgagctgcttgggacatattcgaaggccgaagatgatgtcttgtccgcagccttcgggggtcggggtaagaaaagattgaatagggtgtttgatgcaattggcttcgtataccctgattatcactacccattgtgaaggcaaggaaagaagagaaaaactgccgcttcggacaccactgatgtgtcgaagggcaagaaaatgaaggttcttacccaccgaccgcgat

SEQ ID NO: 34206 - DNA, 422 bp, Zea Mays
gcatgacaacaacatgagatcctccacccacatgtggtagacataaacttccacttcctcaaaatgataagacaacacgtgtaacatgctcaaaccacatcttcaacataaaaaaataatgtaacatgaataacttcgagccacatttcccacaatggagtacaagtatgaatacatttgacatggatgtgattaagcataggacacataaatcaatcaacggtataaaccaccactattttacttgtcttcaccggggagtttggacaaagccttgagcataatccggaagtccaccacctgttttggacacacaactcagtacacaaatttcacgtaacaacgctcataaacgacgccgcacctacgcacaatttcaaaccccgccgcgggtaacaactcttcccacacccaccaaactg

SEQ ID NO: 34207 - DNA, 273 bp, Zea Mays
gaagtggtgaagaagaggacttgccaccaaaggcagatggagctttcataagtgcaagctagacatgttgatgtagtagacacagagctgacaaagaatagtaaaagtatacaggagacgtgtcttcttttctagacagcaacgactacccttccggtgcttcagcgggactccaaggaaaacataaaaaggaacatactaaagaagttagggagtgtttggtttaaagaatcaattcattctagatgaggtggtgcatcatgagtccattcc

SEQ ID NO: 34208 - DNA, 462 bp, Zea Mays
gtcacagagcgggcaggctgtagggtgtgggaggcctcgctttgcaatccggtctacagtccacaccttatttttcagtgccaaccaaataaatagtttgcatttaggaggagcccaaggtaaccagaccctcttccaatgagcaaattgggttgttcctacaaagaaagcctcataagccgatttggtgtaggaccattctcagagagattccagaggtgttgatcagcgaccccttggtgtaggtgcaagctatccagcaagtcctacatcataagatactcactaagaacatgaatggtaaaggcgcctttaatgtcagccacccatcccctgtttagcagcacctgggacacagtctgatgcttaattattctcttgggaatggttttaaagaggttagcagcgagctcttggattgtcctgccctccaaccatctatcagcccaaaacaaagtattt

SEQ ID NO: 34209 - DNA, 384 bp, Zea Mays
ccgggagtaccgcaagacgtcgtaccgagtgcgcatggccatcttggtaacgcctatttccatctgtctgaatttattttatttattgctttattctctagtaagaaagagagctcgccatccaactagagtagaagcgacaaacaaaattaagaatacttcttagaacccgtactctggcaatgcaggcctcaaggaagcactactgtgtcaataaatttgcttgcgcgagcgacaacattgatgagaaatggtactgtacacagtatactagctcttacaaagtgtttgcattgtcattgctaaccgaacttctaaccgaactaccctcatcagcaagtcactgctagacaagactgttcaaggttgcccagaattcaagtg

SEQ ID NO: 34210 - DNA, 455 bp, Zea Mays
tcgaccccgctcctttcctccctcacggttttgtggcgcaacaagttgatcaccgggaaatcatggtacgcactatcacccgtccttaaccctccgcacatgaagattggggcatcgttcttgtgcaaccgctaccagagcacgaggttaattttcacttttttgatgacattatccgtgagtacctcatgggggttagacacgttcaggttaggagcatttagcgctcccatttgggtcaggctctggtgagattcaggtttgcttttgacagatacaatcttgtggctttgggcccgcagcaagccctgggtttttctttcactattattaggcacaatgaggcttggaaccagcatgtgctgtactttaaccatgagtgttggcttcttctactcggtttccctttggatttctggacacatgagcatatccagaatgcaatcgggtctttt

SEQ ID NO: 34211 - DNA, 406 bp, Zea Mays
ggtaatttggccacttttttctatttggtccaagtggttttggcgccagcacaagggtgaacacatttgatctttgggctaggggtggttttggggacttagagaattttgaatggctctagtgtgctccccacttggtgaattgttttggggtttttattgggcctttttgtaatacctctcttaatatattttgtagacttactaatatacttcatctttggtaaaggttcccttttgtgatttggccatttgcccactctttcccctttaatcccatggttagggtttaatggcttaagaggggaattagggttttagaaccttgtttatgggtgaaaattgtatgaaggctagggttcctttcttgtgatgatcaatacttggcttaaccatgcttctaagc

SEQ ID NO: 34212 - DNA, 290 bp, Zea Mays
ctagaatgcatttttacattatggatgaggcaacaactctatcggtaccccaaatatgtggtacccattcctactgggtcaaggctggacccctgtggctacccatagacatgggatgacgagtgatctatcatgactcagagcctgggcccgtcctatagggtcgatggcctccagacctatgttaccatgtgcctcgtcggtgggattgctcgacaactacagcctaggacctgacccccacgtgtgccaacgaaccttcgaccaagggaggtccgatgccgccatgt

SEQ ID NO: 34213 - DNA, 362 bp, Zea Mays
ctttgctgaacaaggcaattggccttgaaagtaaaaggaaagacctatcagatcacaagagaaagtaccaagggcagaccagtagaaatacccgtcagaacaactcccaaggttctcagttccgctccagaaatcagagtggaagcagcaactaccaagtacaacgctctggacaacaaggtcagaggagcaaccaataccaaaaccagcagagaagcagcactcagaccggtcaaaggtctaatgtccaacaacagaatcgtcaaggaagtgttgtgaacacaccggctaagaacaacaacacaaccaccccagttcaacctactgaatgtttcaagtgtggcaaacttggccactatgcc

SEQ ID NO: 34214 - DNA, 330 bp, Zea Mays
attatgagcatgggcatataaattggagtcagagagactagatatgtagaagggtggcttatattttcttgttgatggctcctactgaactcccctacgctttacctagattagtaatatccatcttctagatttttttagataatggaaacaaagtttgactttggcctcaaacaaggttacgaccaattattacaactgaaggcaacatattgccttgatccatcatacgacctcaccaaagaataccaactactaaatcaaagctactacaaagttaaacgtaacgaagaccccgtccaaaattgcgaaagaagtgtagtagcacca

SEQ ID NO: 34215 - DNA, 680 bp, Zea Mays
gataatttgatggattgtcaacatagcatgttaacatgtaaatgcgtaaatttcctttttgctgtatatgtgtcgctaagaagcagtttgagctattgctacaattcccttttaatccattttccatcatccctcatataaagtttcaaacttgcatgaaaataaggagtgcaatataacaaaggtccatgtagtcaatcgtccattaagatgataaattccagttaaccatctctcactcaaaatttcatcaatatctttcataaaggtggttcagagaacaaaaatggcagctctaagcctctaacccatataagccatcagtaactgtggacagaaagagtaatagagcattaacagactgttctagttctagttcgttcaaaattcaccaatttgcaagttgtatcagtttatttggagctgccatgtgatgtgttgttttccaaaatgttaggttattacagggtactaaacaagagcaaatggctacaaccgaaccagttcatccacattacagcaaatgagtaaactgcttagaaaactcaactttacatgggagaacctacagtcacatgtcacataggcttgcaaatgcaacttccctatttcaattggcaatattcctcaatcatcccacctatgcccctggcttaataaaatcagtatccccagttccc

SEQ ID NO: 34216 - DNA, 362 bp, Zea Mays
cacgatgggagagttatatgggatggataacgacacacaatgaggcgaccaagggagatctatttcgcttacagcacaactatcctttttgagagaagccatctataactggtccccccttggcatataaaaggagggggtcggcccgagaaaaaggagacccaagaaccactactcattacgtagatctagaagagcaatccttaaacacatgagatccttccctctctcacccgcttgtaacccctactaccagcaaacaggttttggtagtccatgccaccgaagactagaagtaggaatgttcagcccgaaccaacataaattttgcgcccagtgagcacaccatctggatctaaaac

SEQ ID NO: 34217 - DNA, 367 bp, Zea Mays
cagtacattagctgtagcaggacagcagtacactgattcagtggtgaacccaagatttcttgactgggtattcgagatcaagagatgtcctagggacattgccgtagtggcctagtggatcaggaggatagccgtggaaggcagaaactaatggatctgataagatcgtggaggaagttttaaagagtagagatagtgttgcatacataaatatactatatgctatttatattttgcaaaacagcgctggagggggggctctacagactacaatcgccgcgtgatggacgaggcgcagctgacgctcgagcagagggcttccggagcacagcagggcggtaggagaggagggcggcgacgatggaga

SEQ ID NO: 34218 - DNA, 303 bp, Zea Mays
attgtttggcgctgaagacttctgacattatgttatgccaagaaatggagaagttgaacctaggaatgagacaacacggaactgtaaatcacttgaggcttgagtcagtcctcctgcaaagaataattgacgcacaaagaaatgatgagggaatgaaacacattcatgagaagatggaggccggtaaagccaactgcttctgaagagatgatcaaggtgttgtatggtttaacaaccgcatagttgtgcctaagaatgaggagatccgccagcaaattctagatgaagcacatcttagtcgct

SEQ ID NO: 34219 - DNA, 498 bp, Zea Mays
cggactaggaatatgttgtagttaggactatttatatgtaactaagatctagagattactctcccacatatacttataacctttcagcctcaggcctaactcagctcaaaagatagcttagtcaccatgtggcccagaggtgttttctgaccacgcgctagctttggtaacccttgttagtgctggcagatccggtctagctttctatacctacgagtcggagccctaggtccaatatagcccacaacaaaccatagttattaggaccggaccaaacatcgaactgggagatcgtcagttcgctggttcactggccgttaagaacctgttgaactgctgtttcgataattttggaccggaataattgaagtgctcacaaatacgttataccgatgcaatataatagtgatatacaacatataattagcaacatgggctacagtgccgctgtgtatggtggggcagggatttgggagttttctcaagctatttgagaag

SEQ ID NO: 34220 - DNA, 277 bp, Zea Mays
cacgggattaggcggatacacggcggcggactccctgtctggcgagaaattgctgtccaaccatagctttctactccaaatttctcgccgtggaacgctcctcaagatagcgcgctatccccaagcccgatccttgattccggacgacgtcgagatggaagatccgtgttggtgacgaagtgctccacccggtgaacattccacagtactccgaacagacagcgccctcgatctccctgttctgcttggcttccatatcgacgccataggtcccagt

SEQ ID NO: 34221 - DNA, 1776 bp, Zea Mays
tcttcccgaggcgctagccaatccatctctcgacgtgcgctacagtcgggcggagtggctgtctgcgggattcgcggcccagtcggtggccgaggccaagctcgggcgaggcgaagaacttgcccgagggctgagcccggggtcgggcgaggctgagaggttacgcccgaaagctcgtccgctcggcttgtcgtattacggagtgggttgaggcggcctcaggcgaggcggagtgagtggtgttgacctcaggtgaggtggagccctgctcgaggtgggagaccctccggggacgtctcggttttttataggtggctcgactgtcaaccttcgggagtttagtccttatttatctgagtgcgtttgttagggggataattcgggtgtccctaattatcgcccccgacagtagccctcgagctttgcaaggaagtacttttggtacttgtttggaggctcaaccgcttgcccgcgagtgtgctgctttttgagagatatgacgtgtttgtattctgatgggtgcgcgcgagcgcacctgtcaggtgtagcccccgaggccccgaaggagtggttgactcctttggggcttttgttctttgataggtcccgttcgatctttggtcagatcgtgggagcctttttgcgtaatttgcgagggcagccctctagcccttgcacggagcaataggtcgatcgagggatgtctcaactattggttcatacgccccttcgtcgcctctctgcgaggaggaagagggggaatgcgtcatgctaccctcgatgggcaatgagcatgacgtttccatcaagctactaacaggtgatccgagcgggggtccaagctcctttcgattggagttagcttgaggtccggagacacgtcccaaaggcacctgcgggtgatttgcctggccccagacccgttcgatgggatccgagggctcgatgcctccctgcgatgggaaaccgtcacgaatcgctcccgtgggttctcggatatgtcttaaggtacctcgggtctcagcccgagctagggccgtgtacgggcgtacctatagccatccctgactctgtgctctggacggttttagagccctttcgaggggccaaccttcgaacccctgatcagtattgggctcggagccctgaagttctgaggcggttcgtctgaaccctgttgtgggccgagcctttgaacctctgaacccaagcgacagaccgaggtagaagacgactttttctgattcgctgctcctttcccgagggggttgcccgaggcagaagacacttctttccagttcggttgtcgagaggataaagggcagtgtagtcgaggggagagggcgtaccctttgaggcgggatgaggaacgacactcgacgtgtttttcctcggaggggacacgatcatttaatgcgacgagacatcctgcctgtcagccgaccgttcgcagcacgcgtgcgcgtgggattcgaaacggccgtcatccaaccgttttcgaatcacaccttggtggctccgtccgtcctataaagctgtccgagagggagggcttcggaccgttacctttacagtcttagttctttgccttctaacgtcgtttccaccttctgcccaaagagcccttcgtctttttctcgcccattcgtttcgtttcaatggcggaaaagatcaccatctttcctccccgcgacctgtggcccatgtcttcagtcaccgatgcagatctggaggcgctggttgacgccggcttgctccgaccccgaaccaccggcc

SEQ ID NO: 34222 - DNA, 834 bp, Zea Mays
ggaaaatggtggctgcggcggaggcgagggcctcctgtccaagatcgcatctgaacggcacacccgcacggtgattgggaacaccagagtgtgaggaaaactgccgaagtcactggcacccaactgcggctcctccgccagaagatctaattccgccggcaccagctctggctcgtcgcaccatgcactcaacttgaagactgaaagatcgccgccttccgcggagtcaggatgcacatctcgaatgaggcaatattcatcgagaagttgtgttgctgtttccaacccccagaggtgagcagggattcctctcaactcgatgtcaactggcactggtagctccctcccgccgacggccatggcatgtctggaccagcgtttgatgtgaagacgaacggtgggagagacaaaaggaatgccgccattgaagacccggcacgccacctcttcattggggagaaacgcgatgaatgaattcggcgcagcacgacggaggtcgagcgtctgcgcatcgaggttaaacctcacagcgagcgcgtcagacacgtccgcggcgcagccagaattcgattgatcaatgacagtgatgatcagggcccgccggaggttatcttctgcctgaagaatcatcctggagtgtttgatgatcctcctgggcctccccaatgcacgatcgtggcactgatcggccggacgttgggaaggcaccgcaacaattgcatcttgatcggcgctatccctcaggtttccagatcttctcctcctcagtccacggcgggtgcgcctcttcagtacgccaccgccatcttcacctccatccacgactcttccagc

SEQ ID NO: 34223 - DNA, 586 bp, Zea Mays
aaacaaggattaaatgagtaagaaggggcagtgcaacaaccaagcaaaatagataattgaactatatgatcgagcaaccatgtaaaaaatattaaaccatatgaccatgcaaccaacaaccaagtaaattggtctatagctctaaattacataattgaaccatatcaaagtctagaacagcaacaacttagagttcaaatgcatctaaatgacaaagagaataggatattcgtaaatttcatatttgaagcatctactaaacaagtagatcatcatccaattgaaagccttctctcccatctccagctgctgctgcaatagatggcccaactgcagcatgagcatcttcctccttctcatcagaatcatattctcctccatgtgttgctggtttattttcctccatctcctcattgtcctcttcaacaatatctagacctgcaactctagtattccttgcatgtttctgaaccctattgggtctaggccaaaattcctcaagaggccatgacataacgcatcgggcttagtcgttggccaccctagttggacgactagtcgtgattaactgattattctctgtcca

SEQ ID NO: 34224 - DNA, 510 bp, Zea Mays
cgcctccaccgagggatgatcaggatcgctttcctctgtttgggaccttgcagtcgtgagattgttggtgctgtaatctgcttcttcctccccctattccattgtgttagcgtgattttgtgcagcgaaacagtctgaggagagactgaggtttgccgtgcagtgatcttgcaaagtgtaaggatcgcatttcagagtctcctcaccgtatatcctactctttggcatgctagctgatcttccatccatcatagctgttctgcatcctgtgttccgatttgttctctcgtatttctagtgaaatgatttccaagatgaagtgcaaccaggttctccagcttccaaactgtcactggtggcttagctagatttaggagacatggacatcagggttttagaacgatgagcatcccaattgctcgtccatcctgttgcactgtggattggatagaccaaatgcttagttgattggaccatagggtcatcaagttgcctgtcacacaaatctcc

SEQ ID NO: 34225 - DNA, 471 bp, Zea Mays
ccacatgacatctctcccccctcgacgaccagctcgtcctcgagttgaaaggacgggtacttggcggtgaagtcgtccaggtcttcccatgtagctgcagaaactggctcgcccttctagcgcaccagctccttttgcacgccacgagccacttggtagcgcaccgcaagctctggagcaggcaccaacaccccattgtgcacctcgggcagcggaggaggaacgtctggtggcgcgcccacccattttttaagaggtcgacatggaagacatcatggagcttggcctgggccggtagttccagccgtacaactacctcattgatcatttctgagatgcggtatggactgaagaagcgaggctagagcttccccttcgacgcctgggacagagaagcaatcgactgattgcgcagccgcagcaggacccagtcacccacggcatatgtgactggtctgtgggacttgtcgt

SEQ ID NO: 34226 - DNA, 316 bp, Zea Mays
acgaccttagtttggtcggaacacgagcttgacaccacgtgaactgccctggtgattacccactcaaagttcagttggtccgagggcaattcttgtgagcgtcgtgttgcccacatcccactcgtgctccctatgccctcaatttgaaacatcctatgcttgagccaactgggtgagcgccacggtactgggctcccgccttgggcgtggtcatggcactctgtaagttggtgagtcaaatccatgcctatagttgctcggggtaggttagggtttggtctggtcgctatctaacagctgcccgggctctcctccg

SEQ ID NO: 34227 - DNA, 309 bp, Zea Mays
ttttaccacatttgtttgtagatgttgcaaggaagcaatacaatgcccttggctagtgacgatctctcattgactttataatgctaatatttctttcattgtcatttcctttgtgtagggagcaatttatgcttttatgcagtttccctctggatcttttactgaaagggttgtaactgacgtgactgatgatcttacaaattatacaatcactggccaactaggaaccctaaacagttgttctggagatgtagatatgttgaagaagcttgctgctatgtcaagtcagttgaatgtttgtaaagttgc

SEQ ID NO: 34228 - DNA, 565 bp, Zea Mays
cgagactcgagatggcatcatagcatcatgtagcctctaccgcatccacgtcggggttgcactcgcaccaatgaggcacattcatgccaaggagccatgtccatgctcgtgcgaggcccatggctttggaggtcgccaacattaggaagtgccgatatggtagcaccgctgtgccctcgcgaggctcgctacagaaacctggtgctagccaggatagatgctatagcgggtagttgggtatgtttaaggttcgcgcgcgagaaacccttaggccggccagaatggatgcacatttgatggttgggcggactccgaggcaacgatcgatggctacgaagctctcaaacaatgtcgaatctacacgagttgagtggtgctggtagggtaggttgcaaatacatgacgatctcgatgcatgccacccatctctatgcatcaatcggcgtttcggacccgcgaggaccgtcaaccgaccagtaaatttgttgttgcgtgtccctgcccagatgggttgatgcaagatggaacacaagaggcaaaatgaggcttatgttatctcgcaccg

SEQ ID NO: 34229 - DNA, 325 bp, Zea Mays
ctgcaccacgtccgggactcattcctagacatcctcctatcagggtcagaaggtggactcacgtccccgtctagagaggcaagatgcaaccatggttaggaatgcctcgcaaccaataggatgggagatcatcccccccacgaggggagctcaggtgaggcctcgcccatcactgtggcacgtactgtggtgtctgcccacctcagctgagaccgcttccccagggaccgccatcaggcccaagcctctcacgaagcagccaacaccccacaacaaaatgacaagaaagcccatgggagaggatgaggcaacatcgctaggcgat

SEQ ID NO: 34230 - DNA, 509 bp, Zea Mays
ggtggcaaaggtcgtcctggatatgagtccatcggcataccagaatatggctagggaaacccatttattgtcgatgtgtttggcgcaattgtttcggcgcctaatttatgtgataaaaaattaggcatgtgagtttttcctaatgcatgtgccaccctctctatatcctctgtgatacttttaatccgattatcaaaagaaattttaatagatggaatatcatcggctgacctggcatcacctatcgtggggagctgttgcagcacggctgacatatacttggcgtttatctccctctcttggacggtcttctggtggcaatctaccctgaagtgcgagaggaaccacttatccgccaccttgagcacctgatctttttgtcgctggacctcctcgtctattttcttcatgtcatcttctaatcttttatgctcagcggccgataaattagtcagccttgtgttgatgcttggagaagcaccgttgagatctttagaatcagccatgta

SEQ ID NO: 34231 - DNA, 459 bp, Zea Mays
ggatgattcgaggcacgggttgctttactggttacccaattacatagcgtagtaggcgagggcagcaatttatagaatccatcagctgtggcgcgtgaatttgagttagcgcgatggcggccgaagagtgaaaagagtactatcgcgagagctcagtggcatctaccgtggcgacctcaccggcgacgaaccagtgctaccgggcggtttctagtgactcaccgcgacgggctaaaccgtcgaggcatgtagcccggccggataacagcgaacgccggtgatgccagcgcgactaactacggtgagacacgacggcggtgagaacagtggtcggagtttatctccagcgtgatacttcataccgaggagtgcttatctgagttcggtcgggcgtgaatcgtgacgccggcgcgaatctaggcgcacaagtcgccggcggcgaggttctctgaacctgat

SEQ ID NO: 34232 - DNA, 451 bp, Zea Mays
gtgaccactataccctactaacggagcaatcggcctaagtcggcaatgacttaagacggtgcaacatgctcacaactactcgtcatagagcgacatctatgccttagcagccgatcaattggcgtaaatcaggaaaagactccaaaaccagcacgccgcacttacttccacgatcgttcataacgactgttgaattctaacaacagaaacaaaatgttagagttttcagcaccaagaacacattctagtaccctatccaccgagtatccgagcacactgatcacgcacacatataattcacgaatgcattcagtatcttctaaacacgtcgctatggcaaaacacctctatttggcaatgtctttcacaggggcaatcgaggaggaagggcgactcaaggcatcaggcgtagccttgacatcagcaacaatgtcatcaggaacaactacac

SEQ ID NO: 34233 - DNA, 317 bp, Zea Mays
cccaacaagagcaaagctttgcgggaaaaggtgaaataagctgatagtaaaggatgtcatatgagatcaacatcagggacgtccactccgaattcgttagcaaaatcatttggagtagcccaaagagaatctgtcgatatggaaattaccaaatttttatgtgctaacggtattccattcaatgtgttgaggagccctcaattttcacaaatgataatggcaaaaaaatagtccaaaagattataaaggtctgtcgagtgagaaggcaaggacaactctcctagatgcatacaagagaagtgtggagaccgacttag

SEQ ID NO: 34234 - DNA, 385 bp, Zea Mays
gatcctttttaatcaagcatgtgcatgaaaaagcttccaagactcaacatttaaggcctcgtttggatcctcggaattgaaatctattctgataatcataattcaggcacaaaccaattaagctaatatggttgtacgtggagtatatttatatactattgttggtcatacgaagaagatacttaaatgctatatttctgctatagcagagtgaaccaaagagcatgctataagttgctgagtagaagtatagcatggtgccatggtgatttatagaatcaatttctacctttcaccctatgaatttgagatatgtttatatgcgaacttcggaaagttgtggaatttcaacccaaatagcctagttcattaatgtaagaatgtg

SEQ ID NO: 34235 - DNA, 318 bp, Zea Mays
caaggattggtgcaatagatgtgtgattaccctatggagccacaagtgcactcaatttatagtgatcgtgagcggtggccagtgaatttgggttggagatcagctcacggcgacttggatattttaccgtgctctgcgtatcgtggcgcgcgtggagaaaacggtgccggaggggtaactggctatcctccacgatccctacgacgtggagaatgctttgcggcgtggcacgattgagtgaaacggcgagctccggtgaggataaactcggtcggccgcgcggcaagtggacaggatggccgaaccagctagcaatca

SEQ ID NO: 34236 - DNA, 411 bp, Zea Mays
caacttcggctacctagcatggggagccaagttgcatatggcacagggcctggtcattccgaagcttagtttcatgggcttcatgaccatagtcatcaatttctcccttttcttctcgtctgctttcacataaaaccattcatttgtccacccggttggtcatttagtgcgatagccaattactggagcctttgtatcttttttatatgcaaagttgtaatagccaaagttcttgtgaagaccatctgctctggccttcgtctgatagtgcagtttgtgcaccgggtggaaagcttcggcattagcgtccataccctggcttcggagagcccatataaaaacactgagcctaacaatagcattgggtgtcaattgatgaaggtatatctcaaagttctttaaaacttcccc

SEQ ID NO: 34237 - DNA, 302 bp, Zea Mays
ggcgctatcacgataagaccatgcgacatcgatccttcacagtaggagatctcgtcctccgccgaattctaacgggggaaggacagcacaagttgtcacctctatgggaaggaccggtcatagtagcagaagtcactcggccggggtcatatcgcctcactcagatggacgacacggaaattgggaactcatggaacatagaacacctcaggaagttttacccctagctgtatttcaaaagctattgggacgacaatgtactctgtaaactgggaaatatatcatcaataaaaagacttcaa

SEQ ID NO: 34238 - DNA, 325 bp, Zea Mays
cgcctgcgcgagatcactaaactgcttctcctcgcgaacaacatgtctattgcatctgctacctcttctacctcgtctaccctctgtctatcccctgtctaccctccgtctaccccatccatcaatctcacctcacgttgtctcgtcacgcaacgctcgtgcgtacaacctcctcccctccctcgttgtagagcatagacacaaccacctcacatgctcctctcgctaacacatcaggcccatgggtcaattctgtttttcctaaattgatgtctatttcatgcgcacgcatcagaatcagaatcgtgcgcgcaaccgcctcgcc

SEQ ID NO: 34239 - DNA, 586 bp, Zea Mays
aaaacccgagagtttatttaacaattttaccaggacgaaagggtaacttctgttgtgagccaaccgatcaaattttagtggctcggattagatcggcgtgattgcgaaccggtacgccataggggccctcggatctagatccaacagcccgggttttacacaactgagttctaatctcgtccgctcattcggatcgaacggcacagatccacccacagaactggtgcccacacattcaaatccgagccatccctccaagatccaatggcaccgggcacgtctcctttcccagctacccagccgacccaaactacggcggcgctcattgttcggccaccatgccccgccggagcacggtactgagccaacctggtggcctagaactaagtgaatccgctacatgatttgacgacgacatgatgaggaggttagtagccaacttactggccgttgaagttgtggttggagcctgcccaaacgcctcgcggcggctcggtccaatccaacaacgacgagaaattccccattacaagctagcggttatcaacgtcgttgatcttcacacgtcataccgacacgcgtgaac

SEQ ID NO: 34240 - DNA, 325 bp, Zea Mays
atacaatcggggggaaggatggcacaagctatcaccaccctaggaaggacccttcatagtcgtagaagtaactcgacccggttcatatcaactaactcagatggatggttcatatcgactaactcagatggatggtaactcgtggaacatcgagcatctcaggaagttttatccatagtagcaccataaactctagatggtaggctacaacatgtaattcttcaacttcattctcaataaagtttctactttttcccacatacaattgtactcttgcatgctgctaacggagcaatcggcttatcggcctaagtcggtgtcacat

SEQ ID NO: 34241 - DNA, 491 bp, Zea Mays
gctcagtgctggtctgttagataaagaatctacaaacccatatgggagtttaaatgttcttatattgattgtccatggccaaatcagtgctgtgaaattgtactcagagtttgtttctgccagaaactacacacatttttgttgatatactcttataagatattgtacataaacagctgcatagcttcacccattgttccctatttgaactaagcccgcccgatctatacatggttcaccatttctcccatctaacaagttacctatactcttcacttttttcagccaagtttaattacatagttatctatactcttcacccctttgtcagtcaagttcgattgcattgtgtaatgcttaagtagttattactatgattaaactttgttgcgtatcaattatctattgatatatgcaaaacagacattcgttccaggtttgttggcttgtaaagtcaagatctatttatataattgaagcatgtgtgtgca

SEQ ID NO: 34242 - DNA, 315 bp, Zea Mays
gaagaaaatgtctgagaatagaaagaaggttaagaaatagagagcgtaggatggagaatttaaatgaactcattcgtgagagtgatagaaaatgtattagtgagcttcgtatggatagaagaactttctttattttgtgtgagatgcttagagatgttggtgggctaaaggacacacgcaatatgaccctagaggagatagtggctcattttttgtatacgttggctcatcatttgaagaaccgaacaattggaaggtttttctttcgaagcggcgagacggttagtaggcagttcaacttatgccttctagctg

SEQ ID NO: 34243 - DNA, 668 bp, Zea Mays
gcaagaacagtacgcacttcagattttagaagacgttcaaaattcccgaattgctgagagatctaggatggagatggagatcagagtactgaaggcacaagtcagtagcatggagagacaagtgatgaacctggatcacttctctgaggtcaagtccagatctagtttgaaccaacaaatggtacatttgcacaaaccatacttctgaaactgtaatgggtttaaattttttgaaataaacacaaatccatgcaagttctctgtcccatcatcgactacctacctcctggaagtcggattgttttactcttaggtgagttccattttaaagtttaactctagcaaagaaaggtcctgcattctatcctaactcaaataatataagcgtcttgtttatgtgtaaagcaatccagtaggaagacggcatttttggtgaatttctgatgcaaatttcagtacaggttattccgaacctcctcccattatactgaatgattggatgcatgacggtgctagggcatgtctgggttatgcctgaatcctgatgacatgactaaactgcccaaggtgtcactagctcaaatcgatggtagttctgctgtctatcttttagattgacgataagctcggataatttggaacttctgtgcaccacatataaggtagaa

SEQ ID NO: 34244 - DNA, 451 bp, Zea Mays
gtttactgatcggtcttcaaggtattgaaccaacgatgcattgttgccaaaatgctgatatctctacgtgttaatgtggtagcctaaagctgatcaagcgttgctgcttttggcttctgtatgtgttaataaatgtcgatgtcttaaaggtcaagcttttaacgtgctgaattgtgtgattctgcaccaattgccaactggagaggccctaaagatactgataaggccttccctgtgttaatttatgtatatagataggcacgtgcaaaactattcagagcttctccatgtggatagtgttcattctgagcatttcataggtcttcttggtccacaatgaagtgagttaaatatttattctgctgtcttagttgtgatttatgtaaggatgatatatttgaatcttgcactcaagcatctgcatgggagattaaagttgagttatccatgc

SEQ ID NO: 34245 - DNA, 1364 bp, Zea Mays
gggtcgagcattcactggcactgatcctggcataagaggaatatgatggtcatatggcctgacaggtggcaaagccttaggtgactcaaagatgtccttgaactcatctaacaattcacccaatgggcctgtctctggaaacccctccttccctgccaccggttccaacaagacaaacacccacacctcattgcccttcaaccatttttgaaccttcagggcggaaacctggggcacttctgtcaccgcaactgaatctcccttcaaccaaatcctttccccttgatgatggaatgacaacactttctaatcccagtcacattccattggactatgagctcttaaccaatcaaacccaagtatagcatcatacaccccaatctccaacaccctcatggtagatacaaaagtgtgtccccctatccaccatctaatatccttcacccttctgtcacttctcaacacctctccattggccaccttgacagagacaggagaacagggttcagtggctagtttcaacttgtccaccatagcttggctgatgaaactggtagaactaccagaatctaccagcatcaacatcaactgattctgaatcaaggctctaaacctgatacactgtgaactatcagctccactgagggcatgaatagacaatctgtgattctcctcttcttgtacctcctccttttctatctgccccagctgctcctcagacaataccatctccaaatcttcagtagtcaatacattgagttgagggattgctcttcttggacatttagcctggtgccctagctcaaacttctcaccacaggtatagcagagtccatttatcctcctgtattctttcacttgtctctccttactccatactccttgatcccctaccttcccttcagtcctaactcctgtcactcccctacctccttggcctatcttactattccgaccactattcttgaccaaaatctcctactgcaccagcgccaacctaatagccctatcaacagtggaaggaatctgagactttacaggaccttgtatctcattctttaagccttccataaactgagcaacaaagaacacctcccccagttctggattatgtactgctgttgcatatctggtctcctcaaattcttctacatactcttcgacaccccctttctgttgcaggtgcaacattctttccatggcctttggatattcatccacaccgaatttctgcaacactattctagagaaatttggccaatctctcaagtctcccctcaacttcagaatctgcagccatctagctgcatttccctccatgttcatcgacgccgcaggtaccttcattgcacctgggacctgat

SEQ ID NO: 34246 - DNA, 300 bp, Zea Mays
gtagcctggaagtcaagccaatgctagaagacctcatatgcaaggctcaacgcctggacgcggagacaacaagacttatggaaagagctcgcaaggagcaacttccggaccttagggcagatgaacaaggagttctttggttcaagaaccgtctgtgtgtaccaaaaggagaggcacgagaagtcctgttcaatgaagcccacaactcagcctactccatccacccaggaaccaccaagatgtacctagacctcaaagccagatactggtggagagggatgaaaaaggagatagcacagt

SEQ ID NO: 34247 - DNA, 301 bp, Zea Mays
ttcttaccgaggagcactttctgtgttcgaccgtgcgtgaatcgcgacgccagcgtggatctgggcacaagatcactggcggtgagggggggtgaacctgcgatctctttcagtcactgtacaatcaaaacgccattcagtctatctgatagggctatttgcagggcattaatctccgttttttgtgtaacaactagttaatctctctacaacaaagttctagccctataatctagctacaattcgaatgtggccactatcctcaatcgagcaacatatcttactcaaaatcaagccctaa

SEQ ID NO: 34248 - DNA, 1038 bp, Zea Mays
aattgagtggttatggccctggcttagcctgaccacggtggcggggaataccgaacacaatttcatgcgttctgggtaattaagcgtggccaagcaaagagggtggatccgatgagtatcacgagcgtatatgggtgctgaaacacgattaagaagagcaagagcagacctgggagtggctggccacggagtgtggaggattttcgctcgctggtgactgaaaggggaaaaacggcgtcgcgacgggtcctggtggaattaggaggtgaggttggggctacacgatcgcaaaggactatggtttcaccgtgcactaccaattttgggagaggtggagaagattccacgaatttggggttcaaccgagctcactagcgaagatatgaatacctcgccgtgggtggcggggctatttaaaggcgtggtggtccggctagcgatccacgaccgcggattacatcattcgtgcatggttaccacgtaaagaagggacacagtgagggaggagcgaggcatgggtgacacggcggaaatgaccgagccacggtggccaccggtgaattatctctgactaggctcaggctaggtccgcgagatcgcgacacgtccaaagctacctccccgcgaatatccacggcgtgccaagcacgaatcacggcgaccggcacgaattcgggcacgtggatcaccggcggcaagggggtctgaatcctgggatatttcagtgtactgtaccattggaacccaattcagagtgcctgacaaccagagttgcaacgcctagagcttggatttctgtgcaagaacatgccaatccatctataacaaacttgtagccctaatataaactacaattctgctagagatcttgctcagttgcttactccattgagcatgaatcaagcctaaagttcttcaaaactcactgacagtcaatattcagtctctgtattatctgacagccaaactttagggccatttagctcctaattttgtgcaataccaagggttaagtacttaatcaaagttgttctcata

SEQ ID NO: 34249 - DNA, 600 bp, Zea Mays
caggggcagaggagattccgaagctggagggtgagattgttgtgttcgaggcattttttactgcgggccttcggttacccgtgcatcgttttgtggcggaggtgttgcagaggttagaggtgcagattcatcaattgacacctaatgtcgtggtagccctgatgaagtatgtctgggcattgacttcgtatggcggtcagccctccgtagaggtcttcgccaaaaattattgtttgcactgacagaagaggagagttggaaacaagtttgcacagtttgggtcatgcacctttacactgaggactggcaagacttcggcggaggatgtggagctggttccttgtggccgtaacaagtggggcaattggtatgattattggttttatgtggtgggaggcgaagtcgaagacctcccgggactcccgacggtcgtgatgtgctcgcactgctatgtggcgttcccgccgtttgacgtggtggaggatgatagtgacgaaggggcccttcgttgcgctgcctgcatgagtagcgggcgcgatttagttgaggaattcatcggctacacagtatggcccttggtgcatggctgggcgttgggcg

SEQ ID NO: 34250 - DNA, 457 bp, Zea Mays
atggccgttgcgtaggagatcaacggctaccctattgtcttcttcctctttcctaggcgcggtcagagagatggaggcgcgccgggcagcaccgtcataggcatttgcctcgccctggccctagcccactgagatcattgcggcgtcgaagcacccattggcgtgaatccgaccaaccctaaccaactagctcgagcaaggggacgatgccggtccacagaatggttagacacacggtggggaagattgctccagtgagcaattgcaggctccctaagctacaatccgacccttacctcagtgcaccagataaccacgataatgagaatttcggggagaggagtcgtaccggttgaatagccgagaagatgctcggccacgttcgtgcaaatccaccgcacccgccacactccgacgaggaggggcgtgccacgccggtcgattgctcacgctcggc

SEQ ID NO: 34251 - DNA, 612 bp, Zea Mays
catgcgggagagtggaggaggggtggagaacgcggtagcgaggagacggtgcgcgagggtgggggaggggcggagaacgcggaggtcgtgctgtggcgacgggagcgacgacgcgcggggggcagctgaggcgctaaccgtgcttcgacagtgagctttggtttgggccacaacaagcaaatgggcctcccagaaagcgtgtattccgtatttgcaagccaaacttagtaccacatcaggtactaaactgtgcacgcatctgtttataagtgccagtgcggatacaacattgtggtcttggttgggcggcaacctgtgtaggcttggctgtgcgcgagcttttattcctacacaactagattttttggtacaacttgctcaggtgcgcggcgcacgtgtgggaaacgacgagggtgtggatgagaatgtgggggataggaaacaacgagggtggggacatgggaatcgacaatggcagaacgctacgggtgggacatgggaatggcgccacgggacatgagaatcggaatggcaacgctacgggtgggacattggaatgacgccacgggacatgagaatgggaatgacagaatcaggaatggggcagcctac

SEQ ID NO: 34252 - DNA, 482 bp, Zea Mays
gcacctgatgtgcagactaaaatcaaaacattgagctcgatagcagaggagcacaacatcaaatgggagccaaaagcgtttgaggagaaactgcaacaaccaactgaaggtcatctggtaagtaaatgatttagtcttttcacctttctgtccttatttggatattgtggccctaacgattcgttatattatttgttagtatggttctgcaacatattctggaggaaatacttcaactatgggatcatctacttctagcatatcaacaccacagcctacatattcaggtgttagtgcggcacctgtggactcagccactatccatgtgccagcaaataaaactgcatatggcagtgccaattctaatactttttcgaaagaaagcattcataatagttccagtgcatcagtacctcctatctcccaacatgggccgtctgcttactcttcagcacaggttcctggttctaacaatatctcac

SEQ ID NO: 34253 - DNA, 350 bp, Zea Mays
cgcagccggctggtacgaggttggggaagagagggaactgccgtgtgcgacgtcctgagatatcggagaaggaaatacatatccctcccttatattattttttggcggtatcaaatttttatttttgatacatggcgctatcagaggtccaggcgtccggtccaccccactggccactaccacttcggcacggcagttccctaggccccagcgataacatatgcccaataggcaacaacaacactccttcaggcttcgccattgagcgattcagatttcagagaaccagagtagagagaagaagaacaaacaaagatttcaaaagaacagaacaaacttcgttctagtgg

SEQ ID NO: 34254 - DNA, 286 bp, Zea Mays
cccacactcgccccagccggcgaggacaacaattcccgtttgccagtcccatccacacgaagacgaccagcctccatctcaccacgatgacgcctttcacctcgtgacaactcacccactctccgtttcgccaccgctcttcgccgcctacgcctagcactcgcacccggatgatcctcagcacccatcacacacgaaggagtctccgccgcagccacatccaacgctgcaaaataatccaagtcctcttccgaagacccctccgtccacacaatcgaactcccag

SEQ ID NO: 34255 - DNA, 333 bp, Zea Mays
cgtcaagcaccactcggctgttacctctaaaatgccgacgtggcccagcataactcgactattacctctaaaacaccgacgtggcctagagcagctcggcagttacttctaagagacgccgacaatgcctgccataactcagccgttttctctatgtaagtgcctgcagagccaaatacgactcagcaattaccagtcgttactcgggtgttatctctaagaacaacggcagcactaggcatgaagacaaactatcgattgactataaaagaagaacgatggaaaagcgaaaaagatgctcagaacaagctgaaattttcttcaatatataaa

SEQ ID NO: 34256 - DNA, 286 bp, Zea Mays
ctgtcaccatttatcaataaatgacaaggagtccaatccgattgaggcaattaggattgtgtcagaattcctcgatgtattccctgaggaattaccaggcatgccacctgaaaggaaagttgaatttgccatagagcttatcccaggcaccacccttatttccaagatagcttatcgagtgtctggaccagagttggtggaactcaagaagcaaattgatgagttgttagagaaaggttatatcagaccaagtacctcaccttgggcagcttcagtactatttgtg

SEQ ID NO: 34257 - DNA, 954 bp, Zea Mays
attgatgcgttcactatggcagatcgtgagcctttccgcacaacgggtaaaatttggcgaaagtctcctccaagcacaataggtttgccaccaaatggtatgttcgcattttctgctttatgttccgatagaatatcacgcatagtcctatctagagcctcaaagcaatgcctatgggtcatcggcgcctcatcccatatgacaagagaagtccgttgtataagttcagacaacatggtacctctcttgacaccacaaacactactctcatctagatcaaaggggattttgaaacgcgaatgagcagtgcgcccttttggtaacagcagcgaagccacaccagaggacgctacagcaagcactattttttgtcgggatctcaaatgcgtgagtatagcgttccacaagaatgttttacccgtcccaccatgtccacacacaaaaaataggcccggcgagcaagcgagcgcagattcaatcaacatttcaaaaatgaatcgttgttcagcatttagctgcgagacagcggcagcggcagcatggtcacacaacagtaacggttcaggccttagttcgtcgtctatcagccggttgccaaacagttcatcaacacgtgccgataagattggcaggtcataatcagctacgttggcaccactattagcaaacgtatctgctagtttcctcaaaagcaacgtgagtagctgttcatgtggagctgtgtagtgtgggttgccaagggcttctttaagtccacgatgtatgtcatcggtaaagtagatccaatatttgtcgaacagagcacgaacattgcaaacaggacaatgaacgacaatggtaacgaacaactgacgaagttgagacgccgaggcagagactacagcctcatcaaatagaagggtccactcgttgtcaccttcgagcaaaccacgagcttcgcacgcctctctaaat

SEQ ID NO: 34258 - DNA, 639 bp, Zea Mays
ttggaggggtagcttgtaattttagtgtcctcttctacctctcgactttggcgtgtaggggagcagggaacggtggtcgtggggctttgtcgatgtcgcgacacactagacgcagactccgacgagcagatctacgatgaacttcagcgcgggtaggtaatcggcaacaggtacaacacaggcggcgagagtcagcaacattatggcgtgaacagcaggacataacagagaagcaggagagcaatagggcgacataacagagaagcggcgcacgacgacgacgagtgagtagagctgcgtgcaacgaacagagaacaagggatgggaggcgagctgggagaaaggctagcgagtggagggaggagagggtgcggcgtcgcgacgacatgagctacggagaggatcgtggacttgtcgacgcaatgtagacgatgactaggcgaacgacagcgtggatagcgcacgacaacagagctgtagcgaggagaggcgtgctcaaggctgtctatttaaccattctcagttcgttagaaaaaaactgaaacaaacggactatatggctagccacatcgcaccggcagctacctgctcgcctggctcctcactgtgcgacgtcacctaacatctgcctccctcccc

SEQ ID NO: 34259 - DNA, 558 bp, Zea Mays
cgagcttggtgtctattgtcatcggctctatgttagctatctggtgtgcatcggaaagtgtgttgttcactatttggtgtgcccataatcgtggtttcaaaatccttttcacacccgagcccacacgtgtgctgctctttctttgcatcttcgtgtgtgctctcctttctctagacttctcagcatcaccaccattgtgttcccagtgccacagtctctcctcgccgtgctgctctctagatcgtcaccggcggtctaccctcagcttcctcgccccctgttttccctcatctctagtgagctagtcctctcttcttcatctcatccatctggtctagtgagcttcatcccctatgcattctatgaaatctcgtgattcttgtgaatctctgtgaaccttgtgtggttgtggtgtgttgatgaagtctccttacagatgtcatctcccttcagtggtttccaatttaaagagcttgtttttccacctccactcagccatgcccccaactatttgtgaaaatgccccagccagttctctaagctagaactgcacttcgg

SEQ ID NO: 34260 - DNA, 556 bp, Zea Mays
gcgagccgcggggtacctttgtcgggtcttgcatggccagcgtcggtggatcaacgggagagagagaatgcgggagaggacgcggcatctgtgcctgggcagctaggggttgaagaaggccggtggatcattgatctcgacttcaacggtgacgattagatggatggttgagagtgtgggagccgtagatattagatggacggcctggatcgaatcttggcgtaccccttcgattcattaaaccagggccgtggattctgaatcggacggccaggggcatgcgcgggtgtgttgcgcgtctggatctaatcgggcacgtccgttgcggatcgagcggccaggacttcgcgataccccttcgctggcctcttttgcataagagtccctgggaaaaccactaatgaacccgcagtccaccctgtacaacactctgtgtctcggtttcttttacgcttgagcccctgcgctttctggaatttgaggccccgtccagagagttataaaatcaggaaaatgaattagaaaatgagttttaatataaaaaattcatagaatt

SEQ ID NO: 34261 - DNA, 403 bp, Zea Mays
ggaggggcgaatttggacgggggagcgctcgcggtgagaagggggaggagtcaccggaggccgctaatgtggcgctcacagcctaactatctacggcggtcactaccgagtccttacagcctgtgacgacgtggtgaatcgactatggtgtggcacactcgcagtgaacgacgatctccacggcgatgatcgtacgaccatgtcgcagcgcaagtgggtacggcgacagggcggccacagtgccccgacttcatcccttgcgcgagatcttttaccctgagtcattatccgcgcgccattaggcatgaatcacaacgccgacgaggatcgcggcacggggtcaccagcggcggtgcactgaacctggcgatctgattcagttactgtaccatcgtgctcttcc

SEQ ID NO: 34262 - DNA, 380 bp, Zea Mays
cggcggagtaaagatcttggcaccggataggttcggacccggtcactggggagttcgtcgtacccacttgggctgcagtcggccggagtggtcttcgccggcgttggccgcttaccgatcgtgtgccacgtgccttagggcgttaacacgtcgcagtaaaccactgaatcaagtcgtccatcgccggaggccttgccacggtgagagccacggtatcacctgcgccagtaaccttccttctctccggccgtcagcgcttctcttcccaattcaaagccaccgcccttggacactataaattgagcataccgctagctccgttaggtaatcacgaagccagagcgcccgcccctgtctccaaatagccaccatagctctct

SEQ ID NO: 34263 - DNA, 506 bp, Zea Mays
tacccttagcaaaatttcaaaaagctatcggggcagcattgtattctataattggaaaatacatcatcaataaaaagatttcattctcaaggacactcgaactgtttattatcaatcagcatgcttactcggtatagggtgaccactataccctactaacagagcaatcggcttaagtcggcaatgacttaagacggtgcaacatgctcgcgctcactcagcatagggtgaccactataccctactaatagagcaatcgacttaagtcggcaatgacttaagacgatgcaacatgctcgcgctcactcagcatagggtgaccactataccctactaacaaagcaatcggcttaagtcggcaatgacttaagacggtgcaacatgctcgcgcttactcggcatagggtgaccactataccctactaacagagcaatcggcttaagtcggcaatgacttaagacggtgcaacatgctcgcgcttactcagcttagggtgaccactata

SEQ ID NO: 34264 - DNA, 389 bp, Zea Mays
cagaatatgtcaagtctggttctagggcaacatccgttacgtcaatggttcgatcgggaacccgaagacacttcttcaattgtgacacgtggaacacattatgtactgcagacaaggtttcggctaactgaagtcggtatgccactggtccatattgttcaagaacaggaaaaggaccaatatactggggtgcaagcttccctttaatcccgaaacgtggtatacccttcattggtgaaactttcaggtagacatagtctccaactggaaagtacaagggtatccggtgtgtgtccgcgtaactcttctgacgagcttgagctttcttcaaattatgaattattcgttgaaccttctcttctgtctcttttaccatatcaggcctgaag

SEQ ID NO: 34265 - DNA, 288 bp, Zea Mays
cttgtggctagatccaactgtgctttcacttgatgtacttgtcccaatgacagatctgcctcctcccgcaccatcccctgtatcaccttgccagcagcttgatagaccatgttaaaatccccagccaatagccatggttcactactgagagctctgaaatctagaagttcccgaaggaattgaattttactctcatcttcttgcgggccataaacaccagtgaaccaccaattaccatccatcccagcaaactgaactgaaaccgagaaattatcaatacgagaggag

SEQ ID NO: 34266 - DNA, 303 bp, Zea Mays
gtaaaatttaatactgttattcacaaaagtaaaggcatattggattatgtgcatgctgatttgtggggaccctctagaaaaacttttcttggtggttgtcattatatgcttactattattgattattactccagaaggatgtggacttattttctaaaacataaatatgatgcttttaaagattgaaaagttatggtagaaaggtagaccgagaagaaggtaaaggttctgcatactgataatggcctggaattttgttcagatgcttttatgtctttctacagacaagaaggtattgtgagg

SEQ ID NO: 34267 - DNA, 502 bp, Zea Mays
ttaatggccgggcttatccccggcggtgtgctccgagtgcttatcaagtcatcctgagcacgagttgagacgacggcggcgcaaatcttagcgcagggagggtcgccggcggcgagcaggctatgctggcgttctgatccactcgggttactgtaccatcagaagttcagtttcagtttcttgctacatgcctgacagagcaacttcagaactctttttctccagattttctatggcaacgtgatccacactctgcagcaaatttgtagaggaatataccatctacaaatttgttatgggaatcatacccaaacttgcactggatcatgtttaaatccaagtccaaagttagctctgtttcactgtagttctgaatttcagaattccaccagcctgacagtccaacttcgggcttacttatctctggatttttcttaacaagtgagcttaccaccttaagcaaagttgttcttctataatcaggttacaattttgatgtggt

SEQ ID NO: 34268 - DNA, 279 bp, Zea Mays
atcggatttgtctatcctgactaccgttacccaatacggggtcaaaaaagaaaaggtacagcttctgtgaaggaagttgcttcggccgctcctagtgagccaacgccgaagagaaaaaagatgaaggttcttacacaccggccacgctatattgagccggccacagtgcccgagtttgtcggcgaggcttcttcggctgctgaagccaaaaaacctatacctgcgcagaaagctgaagagctatctgcaacaccgaaggctgaaagaactgaagagtcg

SEQ ID NO: 34269 - DNA, 781 bp, Zea Mays
ctcgaaacgccgacaaccctgtacgtagccactcagggctcgcatatggggccgcgggagcccgccctaggggatgtccaccatgtcgaggtcccgaaggaactccgccaccgcatcggacagctccctcagctcagtcacctttcgctccacggtttgtgacagagtccgagaggtctgggctgcggtatccatattcttctcaaggcctagaaagagaacgggagtgttaagccatagctcgaaaaagaagatcaaacctaaaaatgagataaggcttcggcaaaatgcctcctatccaggcctttaaggcttggccctcggaccgctcgacctttaggtgcttggagagggagtcaatgcagatggaagcttcaacgacctgacgccaagactcgtcccactccaccgtcaccgcctcaaggttttccttcatctgtcgcatctcctcctcgcgctagtctgcctctgccttcatgcagcgtacttcgtccgccagccgatgcatgccctcgcgatcagtcacgtcctcttctttcggtcccacgcaacaggatgtcaagtccaccacctcggcgctcctcagcgccagctgctcgttggaatgaagcagcgtgacccaaatgccccgaacaaagatggacttggccatctacctcgtcatgacctcctgcagaaggaaaactctcatcgttgcactgcaaagggcaaaggattcctaacataggaaagcaacgcccttacctaggtcaccgccctcagctcctcccatagctcccgc

SEQ ID NO: 34270 - DNA, 352 bp, Zea Mays
atcggagtcatggtcgaggtcgctcaacgaggcgaggaaggcgtgctccttgatcttcgctttctaaggtagttctggagtgcctccctatcgaacttccatttggacttgttctagcaggaggtgtgctcccacttgcccttgcaccgactagagtggtggtcgcactggcctgcctctaacttgccaatcttagggccactggcaatgaagtggtcggggttgccatagttgtagcatccatccttggacctgccaagccgtcgattcaggcggttgttgtggaacacgtgaacagattggccacaagcaccagctcctcagccccaaggccctccaactgctcctctat

SEQ ID NO: 34271 - DNA, 432 bp, Zea Mays
gtttaaggtggaatctctctctaaacttcctcttcctcaaacagaaccaaaaagataagatacccaacattgcattcaaaactgacacagtcccactatagctagcaggagcttcagctatctttcagcaggctgcagcgattatagtggatccatcatgtcctacgtatgttaccctttgcatccagccttgttattctgccttcaggagaatgctccatttcttcatatataagaattaaagcacgatgaacagggacaatgggtgaactcacaggtgtattcctaaagacgaccacatttcttaacagccaaaggcccaaacttatacatcccagcaagcatgccaaaacatcttctcttactagaactagaatgtaatatgctcaattgaaactcctctatactcattgggatggagttccatcccag

SEQ ID NO: 34272 - DNA, 473 bp, Zea Mays
tctttggcatgatgagtgaccattgtatggggtagttaaccttgtatacctttgactatcactttgatggtttcttgcttgcatatgttcaatgttgttttagtggtgaacctctattctttacatgcttaaaactgattcaaatgcatagaatttatacatcttgtgcatgtgatcagttcgagcatctcctaacacatccatatactgttgtgcacatcgcacaacaccacttagatcatttttacattctgattgctatactactaaagcccttgtatttctgcatctctttctgctcccatgcatatcctaacagggagaaccattttgagggggagttgctatttttgtggatttgagcagtgttttctaagtgcaattatcaacaaggggagaatttttacacatacatagacatcttgttgaggatgcattcttttataaggccttgagaatttcttcagggtgag

SEQ ID NO: 34273 - DNA, 404 bp, Zea Mays
tttttgttaggtttgcttggaaatgctgagctttgctaattactctggagacactgatagcaaaattgttcgagaagtttaggctagactccttgatcaggcacttactaaagggggtgttgcagaagcttgttttgttgtaaaaagagtaggctcgaaacttgatcttgcagatggagcttgtttacctttagatatcatatgccttcaccttgagaaggctgcaatggtaatgtgtattttctgtactttccgtacatgcatacttgagactacctgtgagagcattccacagtggtactcattatcctgctcttatctacaggatagattaagttcaggagaagaattagttggtgatgatgatgttgcaagagctcttcttggtgcctgtaaaggtcttc

SEQ ID NO: 34274 - DNA, 469 bp, Zea Mays
aagttgtgttcgagttcccagatgtgtttccaaaggacttaccaggtatgccacctgagcgaaaagttgagtttgccatatagcttcttcctggaaccgcccctatctttaagagagcttatagagtatctggaccagagttggttgaactcaagaagcagatcgatgagctgtcagagaaaggttacatctagccaagaacctcaccttgggccgcccctgtcctatttgtggagaagaaagatgacactaggaggatgtgtatcgattattgagccctgaatgaggtcacgatcaagaacaagtaccccttgtccagaatagaagatctgttcgaccagttgagaggagccagcgtgttttcaaagatagatctgaggtcaagttatcaccagctcaggatacgaccctcagacattctgaagacggcattcattaccaagtatgggttgtatgagttcactgtgat

SEQ ID NO: 34275 - DNA, 281 bp, Zea Mays
gaggccggggaaaaaagagattgaacaaagtttttgatgccattggctttgtttaccctgactaccgctatccgctgcgaggacagggaaagaagagaaaaactgccactttggccactccagacgagcctgcgccgaagggcaagccgaaggcaccttcggttgagctagttgaaatgaaggttgacaaagataaggctgaaaggtcaaaaactgaagaagtaacaaagttgccagggattttaagtccttcaacagaagcaacagcgctgaaggcagaa

SEQ ID NO: 34276 - DNA, 475 bp, Zea Mays
tcactctttgctagggcgcaaaacataaaactactgatcagcatcatgaaccaataaacttcagccaaaccaacgcaacagcacaacattaggggtgtaaaaacaggctaatacatcaagaagctgaccacttaataacttctgccacttgcttatcagcaaatcttcgtgccacaggtgggtttacagaagcacaaataacattgatctgatatacttcacatatacgaatactaatatcaaaacagaaaagatgcagatgtaacagcaatttagagaaatatagaagataataaaaaatcatgctaaatccaggtgtacctcttctcgatgcacttgtcaaaacatgtatgtgtaagtttgtagtgaaacaaagaccgaatatcagataaactggcagacataaattttggtttggtttggtttaagaacaaaagacaatgtcatgtagaagacaaattccagtggtataaat

SEQ ID NO: 34277 - DNA, 427 bp, Zea Mays
ttgcctcccgatgatccaggtaccacctgtgactatgctggatgacaaggcatcaatactctatcgacaagtggtgcctcccataggctcggtgtagcagtccgcaaagctcctcatggaagcggctcctagtggttgcatcccaagagatgggcaatgatccactcctcgtactcgtggtcctcggtatagttgttgggaagagggtcatccttgttgacatcgacatcatcatccccatctctagggtctcctccagcagtagcatccgatgtcagtgtaggggtgcctcctgctaggtggtcggggtggggtgctcagcagtagctagctcctcctactctactttgtcctactagagactctccaacttatgcgactatcctggcacgatcaatcgtagcaagtactcagcaaggcaggacag

SEQ ID NO: 34278 - DNA, 449 bp, Zea Mays
gcgagcagggaaatacgcaggcagagggagcagggattatgggcgcgagctgaagacgagctcgactggaaacaggaacgccgtgcagagggagctttgcgagctgggatccggcgctggggggaaggagagatggaaggagagggaagcaaggggagggcgcaggaaagagccacggcttggagaggagcgctcggcgtcaagataactatccaggagcagagcgacggccaggccttggttcattacccgatcgctgttcagcaatgaagaagaaatatcccagagagagatgagaacggctggatatttcataggcttgagaggcagaagatagagagaaagaagctcacgcgcgccaaagaaaatcagccgacggcggccacacaaaaatcaaacagaggacggcggtgcgcaaggaaaaaaatcaagctgcggttggaaaaatc

SEQ ID NO: 34279 - DNA, 360 bp, Zea Mays
gtcggatcaaggaggcgcggtcgcgcgttcctgccgtcgggcagccaggggaaggagtgctagaggcagagaccagaggggaagcagccaagtgggtggcagagcgttggaggctgaaggtcgtattcacacttttgcagcaccgtgtgtgtggcatggagcgggtgcctgcagggcagatgactcacggttaggataaattgggagcttgctaacctaggaaggagacgtcctactctgatgggtcgggatgaggtatggcacacgccatagcacgccataccgggtcctccgctgctgtatagaagcacactagttagttggttatgtaacttacattttattctggaacgatttcat

SEQ ID NO: 34280 - DNA, 530 bp, Zea Mays
catgattcgcacctagttttcttctcctattaaaaattttcgttctgattctggtggcgaatatttatttgataattttcccctgttattgacctaagagtgtactcttgctcggctttcttctcctggtgctcatgcacaaaatggtgtggctgaacgaaaacactgtcatgtcatagaaactgcatgcacccttttgatatcttcttttgttccttcacatttttggggtgaagttgtttctactgcggtttatctcatcaatagaaaatcgtcatccaaactctctggcaaaacacctggtgaactcatttttgggactcctccacgatatgaccatcttcgagttttggatgtacgtgttatgtcttgttagcacctcgtgagtggactaaattgactgctcaatctgttgagtgtgtttttcttggatacaaccttgaacataaaggctatcggtgttatgatccgtcttatcgtcgcagtcgcatttcacgagatgtgagctttaatgaaaatcaacccttctt

SEQ ID NO: 34281 - DNA, 550 bp, Zea Mays
agatagtaacgacactaacataaatcggtatgaagaataagaacaaagccaagtttgtgactgaacttcactcagttctatcctaccaatctagtgatccaaacagtttaacggcagagccagactccatgcagggagagagagagagagtaagaaggaaagagagagatctgtggtgccgctgctgttgccggcctctgtctggcgttggtgttggcgtgaggaagaagagaaccaacacatgcactctgcaatgcaatcttaattttttgtgataggtgacaaattttggaggcgcgaaaagagggagagcagatagaaactggggggtgtggctacatttatagccgatgaggacactgccgatttccaccttccatagttccatcaatagagaaagttggaaaggaaagagatccacacattcaaggaaacatagcagagaaaaatataggaagggatccacctcagctaaaattacggaggtaaatatgacattcgcactacagacataaggcaggagtatcttctaaatggagcaaaatcataa

SEQ ID NO: 34282 - DNA, 306 bp, Zea Mays
ggttgaggcaaggaaatcccttatcccctcttttgttcatccttgtcatggacgttcttaacagccttttcatcaaagctaatgagtgtgggctattgcaagcccttgctggtagaaatatcaaccaaagggtctcaatgtttgcggatgatgtagctgtctttatcctgccttacttccttagagactgggttcagagaggaactgcagctttggtttttggcaggtgccaagaacttgcgtactcttttttatcctggttagaggaaggtttttatcctctttatttgttgtggtgttagagta

SEQ ID NO: 34283 - DNA, 617 bp, Zea Mays
tagaagtgtcacaagtgacaccaagatcagccaagagccagcgcaaccaaataatttcagcagtggtagtagcaagtgcccgaagttcggcttcagcactagaacgagatatggtcgcttgcttcttggatttccaggcaatgggagatgatccaaggagaatacagtaacctgtagtagaacaacggtcaataggatcacttgcccaagtggcattagaatacgcatgaagctgaagtgggctatcagaagcatagagtaaacatctggatcttgttccgcgtaaatatcgaagcacacgaagcaaatgaccataatgaactgaagtaggtgttgatacaaattggctcaacatatgaacaacatgagcaatatcaggtctggtaatggtgagataaacaagactacccacaatatgacgataccgagttgggtctgctagtggtgtcccatccttcggacgaagttttaaatgaagatccattggtgttgcaacagtgcgtgtatcagtaagttcagagcgatcaagaagatcttgtatatatttggactgagacagataaaagccttttgagtctgctgaacttcaatgtccaagaaatagctaagcggtccca

SEQ ID NO: 34284 - DNA, 338 bp, Zea Mays
aagaaagaccaaagaagaccaatcacgtcaaagaaggataagcactcaagccttcaaagatcaagctaaatcatcagatgaatcaagatccacaaatcttggatggagtctttccttaccctactctttcttacccaaacctatctatgctttaaagatatccttgatcctgcataataatgtggctacgcccatatacacccatgccctcctaatcacccacgactgactataaaaaaataacgagactatggacttttgaaacaattatagactaaaagttgaattacaaacttattgtatcccttttcttacaaatctcgaggacgagattattt

SEQ ID NO: 34285 - DNA, 367 bp, Zea Mays
cacaaatcaagacggagtccttctaaggcaggcccgaagccagaagaggaaggccactagcccaactccacaagatgaagagctagatcaagagatcagcaacctggaaggcatacaacaacaggtggaaaagagaagggagaaaatgcttcggctggctgagctacaaaagaagattgacgaagcagccgaggagatacgacatatcgcacaagataatgagcaaggacatataccacaacaaagtgaccttctttaggagggccccagctatgatgatgtgtggtacgatgattttcatcatgacaacattgcttttgatgatgcttcttctctagctacagagttgcaggctgttccatggcca

SEQ ID NO: 34286 - DNA, 512 bp, Zea Mays
ctttgatcggtgaagccacccacaacgtggagccatcgcttacccaagtgcaaacacgagcagcgctgagtaaaaccagagcagcgcaagcaggctagtgtcaagatcaagtgtcgcacgtcgacaccatcagagttgctcatgccaccaccgctgtgcctcctccaccgccgctgctgccggagatgcccaacatggcagacaccactcaccccatcacaacaggtaaagaagcagcactcctgggactgtgtggatagaccttagcagcaactatgtggctcgattttagcttccaggaggcgacagcacaaaagcagatgaacaagggaagagaggaggggaggagggaggccactatcatatatggcgtgagtcccgtgagaagataaagacaattgagaaaatgttaatcctcccccaccgcctctctcctcaaatcagatacataagtataacaatcgttgcggtgtgttacatttaagaatcacgattttgtaatggtactcggc

SEQ ID NO: 34287 - DNA, 430 bp, Zea Mays
ggctgttcaattcagatgtcatcatgcctgataggatgggaactggtcgggtgggttagctaaaatataatccagaaactgtaggagaagaccttggggtagtaggataatactatcatagaggtacatctgagagggtagttttcttttataacttatcatgcatgggtgcggaccaacaggccgggtttatggggacagaccccatcgggttggtgtacacgtatgcgctacctagttaaaagggaaaaacttcgacccctcagacttgctctatagataaaacttacagagatattttagcactgggggaggcactccttcagttgtagctagatagttgtcctcgggtcgggggattcccattaccatgaagggtccttcccagctgggggagtgttacagagccctaatttggtctggtacttcc

SEQ ID NO: 34288 - DNA, 369 bp, Zea Mays
gaagggccagaagaatgtgaaaaattagcaccgaaaactcgccaaaaggggaaatctggcaaataagatccccatgggcatccaaaactcgagacaagccctttttaaagcgcacttcatagtcatcctcaaggagttgcgaaactgaaagcatattgaaatgcagattcgagaccaaagcaacatccttgagaataaagctctcgttcacccaaatggtgccacgagaaacaaccttacctcttgacttatccccgaatgtgatgtattacttaccaatcacggggtcgaggctggagaaccattttgagtttccgatcatgtggcgcgaacaaccggaatccatgagccatgtgttctctaggcctc

SEQ ID NO: 34289 - DNA, 340 bp, Zea Mays
tgggaagtcggtgatcctctccatcgtcgaccgcttcagcaagtattgccacttcatcgccctcggccacccatacaccgccgagtcagtggcgcaggccttcttcgctaacattgtacgcctccatggcgtgtcgcaatccatggtgtccgaccgcgacacggtgttcacctcgatgttctggcgtgagctcatgcggctcatgggcactaagctacacatgtcatccgccttccacccacagtcagacggccagacggaggcgaccaaccgcgtcatcattatgtacctccgctgtttcacaggcgaccgtcctcgacaatggcttcgctggctgccg

SEQ ID NO: 34290 - DNA, 514 bp, Zea Mays
cctcccgccacgacccggcagtcccgcggccaatccatgccccgacgcgctacacaccaatcgatatactattcgtgatgcaaggaacaacacgatcatggtggtggccaaagtacccctgggggtggcacaaccagcacatccctcggcaaaacatagagctgcggcgacattcaacaacgacgagaaattctcgaccctatatgacctaatccttcctacccgtcgattcaatacttagcttgcatgaaaacgaggtactagaagggctctcaccggtggagggggatgcaaggatctggttggcgtaaggggcagcttggcgctgagacaactccgtcgaggaattccacccgacccggtcccgctttccaccacaatcggtgacgtccacgctcagggcactccggggattacccaatgcacacaccgcgcagagagggtggtccttctcacttgtagacgacagtgtctcgctgttcctctcgcggcgctcgtcgtatggccctctgcg

SEQ ID NO: 34291 - DNA, 315 bp, Zea Mays
gtcgtgcacttcctgcgggttttcggctgcgtggctcacgtgaagatcaccaagccgaacgccgggaaacttgacgatcgaagcacgaagatggtaatgatcgggtacgaggctggttcgaaggcctattgggtgtatgaccccgtcgcgaaccgggtgcatgtcacccgtgacgcggtgtttgaagaaggcgcaacctgggattggaactcgtccgaaaaccgcgaccaggaaggctcctgcgacgatggagaccaggacatgtttgtggttgaagagtgggaggagcccactgctactttgccgacaagccac

SEQ ID NO: 34292 - DNA, 307 bp, Zea Mays
ctcagccaaggcacccacccgggtcaccgagctttcaaggccggtgaggtcatcaacttcttcctcattcatcacctgcgaagatagtacaacatgtcacggccgaaccaccaaaaaaaccttttcactgaaccaacaatatacctgtgcctgcgctcgatccgccctctcccgaacgatgccacaactgtggggaccccacatcctatcataaagcgccctgcagagtgctttagcacatcatcttcaatctagaacactccacgatcgaagtcctcgttcgcccgatcgaagacttcgaaatgcc

SEQ ID NO: 34293 - DNA, 272 bp, Zea Mays
tagaggcactgaagaaattcttgaccactccgccagtactcaagccaccgcaccgagctacgcccggtcagccggcagaagatctactcctatatatctcctgcatgactcacgtagtaagcaccgcattagtagtcgagcgggcgaaggaaggacatgcatacccggtgcaacatccagtttatttcatcagtgaagtccttgggccctcaaagataagatatcctcaagtccaaatgttgttgtacgtggtacttcttactgctcgcaag

SEQ ID NO: 34294 - DNA, 515 bp, Zea Mays
caccaaatcacctgatacacatcgagaaagagggtgggggaagtcctcatccattaagaatcctgacgacagcacggtgatgaccttgactggcgcttccattttagatagtgcgagcggcccagaggagtggtggtcaggatcattgatgccagaatactaatgcattggcccctagcgagccatcagaggttgaatttggtggtgcataaagacgtgcaccagtctcgcgctggtgagaccttgctacttcagcgtcttgagcgtcgtcagaagaggttccaccttgcccctcagactcggccttgcgccccacgattctagttgcccattgacaccggctcccgatcgatgaaacatggggcgttgtcggccgtattcctgacatagaaccactcgctctcataccacacggaggtagggagcgggatcttgaagtacccaaccttccagtcagattggagttggaagttgatcgaaccgacatacagttagtcgccacaacccaaggtcac

SEQ ID NO: 34295 - DNA, 342 bp, Zea Mays
ggttgaacaacttggttaaccatactatagttatgttcctgaggcatctatgtcttaattgagatacctttaggacccatcaccttaccccctttcatctttttcagtgtctttctaactttaaattcttggatcctatgcacaaagcccctatcggtgtcatcagaaaagtcatctaactaaaaagttgtccctattctccccattgaataatttgtcaatattttctccatctatgtatgatctcgtcctccttcaccaagagatgccatgtttcatccttaacacacttaacttagttgaagtccttcatactcaaatgttggtaaagatccgcatatg

SEQ ID NO: 34296 - DNA, 334 bp, Zea Mays
ccagtaccctatgaagaacggcgagcctaagccttcttgaatcagtagtcttccacatacccgtcacaatcacataagcacaatgaaaatcaccacgttccatgcacaaaaggcgcaactgaagacgacattgtcactgtagtagcaggtgatcgtgaagacaaagaactaacaaagactgcaacaggctagcattacacagacgagtctcttcattacagacactagcaagcacatcaatcagagagacacaatgatgatgagcgagcaactgagcacaaaggggttcaaactcattacgaagccgggtcaagaagtcgtacgtacgacgaag

SEQ ID NO: 34297 - DNA, 600 bp, Zea Mays
cagccgtatcccaggacgaagcttcagaagtagcagaaactccctacgagcgagtacaccgagaaaggcggaactctcgccgccatgatcgccgacaagctcaggaccgagaacaggagcaagccgagcatggtgcaaggctgcgccgagagaatcctctctttgctcaaaacctgtaccccgactttgctcgtgcaatgaacacaccaagtgaagtaggaggggtgctggcccagatagctaacggcctccagcaaaccccagacacggaaggttaccggcggctgcttacccgagcaactaatcaccttctacccatcgctcattctccgagcgacctatgccatgccatcaatagccagcgagatgcgcggagctccatcaacgcttcatgtgaccgacgacacgaaagtgagataaggcgccaggaggaatatgactcggatcacggcgtcccggcatgaagccgcgccacccgagctgagttggttgcggcctcgactagtggcccactctagggacggtcgagacgacacacaaatagctcccctccccgggaccgacctcacgaacgccgacaggaagacacgtgcggagtct

SEQ ID NO: 34298 - DNA, 334 bp, Zea Mays
ttgctttctatccttgttccgtatttttctctgatttcctgagtcagtgtgtatgtgccacgtaagtcggtgaaggacgcggcttcaactacgaaggttgattctgactcctccatccctcatgccccctacgctgggggaaacaactcctttggctgtcgtggccatttcgctagccgacgttgcattagccccacccgcgccgacctccttggttgtcctagagaaaccaagagcgttggttcctaccgtggccctcctcgtgctgccgtcccctacacccgcccaggagaggtctcgatagtcgaagtagccacccttggtgggatctcat

SEQ ID NO: 34299 - DNA, 314 bp, Zea Mays
caacgacagtgcagaagagcggcaggacagccgtaccacgcgttcctttcggcgtccgtgcagtgcagtgcagtgcaacgaacgaattgtgttccttccgctccagcacaccacaccacacatgtgttcgctcggctgtcggttgatgcgtcatgccatccatgtctgctccctcccctttggcggctttggcctgcctaaccgatgtgcgatgtgtgcgttggtcgttggacgaatgaaaccgagtaaccgatgcccgctcctaactctgccgaaccggaggccaacgagatggcttgctggactcgcacgac

SEQ ID NO: 34300 - DNA, 647 bp, Zea Mays
gggcaatctgtgctaacaactgtgctcaaaagaaggactcctgagtcctagtactgaatagagtcgctgctgcaggatccctctgagctggcaaccaggactccatgggtacatgtctgaacctacgtacccgggctatagtggcacgctgaaggtcaagcagtctaggatcagcagcgaggggtcacacctcagtctcgtctccctccctgaagcgaggtggtggaatgggcggagcagaaatgggagcgggaggtggaatagtggaagatggagtggtggaggtggtgggtatggtggaagtggtggatggctctggagcgacaggagcttttgaagtgggaggtggagtagaagctgtggcgaagggtgtagagggagcggaggagcgaggctgagatgcgaggcgacgaacactataggcaatctggtctgaggagatctgcaattggccaccccgctctgcctgctctgccgctgctgtcgctgcaagtcctgcacaggcggctctatccatacgccacttcttccggccttcctgctggtctaggtacactttcttgcccttgacctgcctgaacgggcgaggagggtcctcgtcatcgcctccccctggcgctgaaacattcttcgtccgcaccatcctg

SEQ ID NO: 34301 - DNA, 505 bp, Zea Mays
ggaggattggacacaaactcagaaaatggcctatgtggtggcaggttccaggcagaataggcaataggagcaccggtgattgaaactctgcccctcaagatcatatacagtcggctcatcagatcttcagtggggattctcttgttcgtaacccgggtagaatcgttgatgccactgtacaaataagcagggtaagctctatcctttaaaggatggatgttcttgaaaacgaaatcagcgaccacagccttagcagtcagacctctgtccttcagcaagcaaacctcggcaagcagtactttagcctctgttatctccaaagggatcgaagattctatccagctcggtgtgcggacatctggttgcctccctgaccgaggggggagggacttgcagtggttctccacaatgaaccactcgagacgccaccccttgatgctatccttgagggggatgtcgaggtactctattttcctcccgcgacgaagctacagattcgcgtcgc

SEQ ID NO: 34302 - DNA, 401 bp, Zea Mays
tggcccttatcaaattatgtagcgcatcggagaggtctcgtataagctacagctaccaaccaatgcaagaatccatgatgtcttccatgtggcacttctcaagaaattccaaggtgagccaccatcagcaccagtacttctgtcggcggttctccatggcaaggtactaccggtcccagcaaaagtcgtgaaggctcgcttgaatagaggtgtgtgggagctgctggtacaatggatggggcgcgtcgtccgatgctacctgggagcagtgtactgagttcaagaggcgttatccagaaatccaactcgaggacgagttgtttgtcggagaggagggaaatgttataaacacttttgtgggccgccagttcaccaggcgcaagaagaggcagcaaagccaa

SEQ ID NO: 34303 - DNA, 435 bp, Zea Mays
taatacgaaaaagccgacttgttatcaatcgaaccaagcaactatcgcttccgtcgccggcgagcctccttctccgcaaccaccgacgccgccgcgaaaggggaagcgatggggttcttggacggcttccgtcccgacacgctgctaaagcgcgtctgcaagtcgctgctcaagaagcggctgggggatctgatcctcggcgacctggacctcgatcagttcgacatccagcttggccacggcacgctgcagctcaacgacctcgctctcaacgctgagttcatcaaccgtaaggtgcgttttcttccctcccgcttgtgtattgttctcccctgtatattggagccgtcgcatgtgtattggagccgtcgcagtccgctttcaataaggcgcaggggaggctaggttttgcgatagtttcatcgccgattgcca

SEQ ID NO: 34304 - DNA, 986 bp, Zea Mays
tcatctacctgagtacctgacagattcctgacgccgatctcatcttgatcggccgattcctgtcacatgtgtgagtctgctccctgccgatccatctctgctgccttgtttttttttcttttttcctgtcgccatccctttttgcttcctgccggtcagctgctgtgtcgccatctccttggtgtcacacccatggccgaggcgtgttgacgtctgttttttattctgattctgacagtatatgtttttcgtgctgattctgcaggagaatatctttctgatgctcttcgccggtttctttctacgcaaggtactcttgctcagttttcttgtcctggcactcatgctcagaatggtattgctgagcgcaagcatcgtcatcttcttaagactgctcgtgctcttatgcgcgcttcctctgttcccccacatttttgggctgaggctgtttctacagcaaattatttgagtaacattcagccttcttccgctcttcagggtgggattccttttgagcgtctttgtggtaagacgcctaaccattctagtcttcatctttttggttgtgtgtgctacgtgttgctttcaccacgtgagcgtaccaaactgatggctcagtctgctgagtgtgtttttcttgggcacagtgctaagcataaggggtatcgttgttgggatccgatcgctcgtcgaatgaggacttctcgagatgtggttttttatgagactcgtcctttctatcctcgtccctcgtcttctgtgtcttctgtgtcattagttgaccccgtcttcattctgttctttcctgatacccctacttctactatatcggcttcacatccatcacaatcttgttctatgtcttctttggggtcttcttctttgcttcctgattattccctgaagcctccagtgacacaggtttacactcgccgcacaactatcccttctgatgcgccatcttcatctaataagccagctcctgc

SEQ ID NO: 34305 - DNA, 356 bp, Zea Mays
gtaatttaagtgcagaagaacggtatgatacggtgaggagactatggggacagccgaaacttgagtgagttcaggtgttgaactttaatacactatgagagggcataggagttatcggcttggttgaggcttcctttaggctttcagggggaataaccggtgctaacatgatcataatactatgcatggcgaccacgtagaggtagatgtacagggaaactgcagaggtggtaaattctcccatggacagcaaaccagcacagtacaagcaggtgagtcactgctgtcaggctgcaggttagtctaatccaaaaccttccccctttgggctgtaaaaatcgtccatgtgaccccct

SEQ ID NO: 34306 - DNA, 660 bp, Zea Mays
cttaatccatgaaggttttgccctaggtcaatacatcaaacttatagagctatgttaggggtacaattttgattaagagactaagcactgattctatttgaaaatgggagataattgggtctaaggttgggctgtcagtcatcattgaagattgaattttgaccaacagtgaaatcggatgaactttgcgaccaaattgcgggggatttagtggatgtttgcacaagatccttgtaacaatgttgtagttggtacattggacaacaactttgatacaagcagggtgagtgagttgccacacaaaaattgaagaacaaggccctgcaagttgcttggacagagggactgatgaagatagccatggtacagtgaccggaaagatctccggtgccgtgagcctgatgtcggtcatcttccgccgtaattcacgctcgcttgggaaattcgtgctgcgggagtgatagataacgtcgggtcaaggtgaaaatatccggggaggggtgaaccttgtcactggccggaccggccatcgtgtcccgtcgcggtcagtcgcgttggcatcaccggagctcaccatttgtccgacggtgacacgcaacgatctttactccgcatcataagggtcttggcaagcgaccgattatcatccctggactaatt

SEQ ID NO: 34307 - DNA, 744 bp, Zea Mays
atcctgcaccatcctttgtccgcatttttgatgaggacgaaaaagaagaagaagttccactaattcgcaagaatagccaacattacagaggtagtagaggggatagtgatattccttctccagctctgtctgctcttgttagcctgcaagaattatccataacagattttgatcaggcccttgaggatgtcgttcctgaggatatgctatcagagccgactgatggtgatatgatggatgtttgctctgacattccaaatgtgggattagaggtatcccgagcagcatctcgcgcgtcgtcgaccttagaaggcggtcttcgatgtcaagaggttggtcaggattgcccgactcccatggaggtgactgaggatccttcagcctttgaggtggctgttgtagaaaacccagcccccaagggtggtgctggcggttacccagcccccgagagtgttgccggtaatgatccgactcgggtgggtagcgcaagctgcaactcagccctcgagggtgttgccggtagtgatccggctctgatgggcagtgcgagctgcaacccagcccccgagggtgtccgagcaagctctccttcccatacctccatggatgtccacgtcgagtcgtctccaccacgttctgatggaatgatagcaatgcatacttctttagcttcaagtgagggagtcgccttagaggtcggcacaccggatgccagaattctgatatctgctagtggagctgaat

SEQ ID NO: 34308 - DNA, 507 bp, Zea Mays
atcttcttgaaagaacgtgcatacatacatacctcaccgattatcatcgtaccgccctccttaactctctgttaagtaagagccttgttcatgccacatggaaactgttcatcctagtcctagaggcggaagcagtggtcgatcgtcggtgcaaggctccctgccttcttcctccaatggtagatgtggatgcaagcaaaacccattccgatggccgattggatcggagggagagatcatccgcctgctccttattcagccaaaacagtttgacctcattcagaagacaaaaccaagttccaagacttgtacaaaaccttttgagccaaaatagtttgtccccctgatcctggttgagttctcattaaagaacgagaaagatgagtacagaatggattttgattgtactgaaagttgtgaaaggggagaagaacagcctaaacttaaaggtatttgtaaacctcaatacttaagttgacaatcatgcacgatggtcctgactatttt

SEQ ID NO: 34309 - DNA, 316 bp, Zea Mays
cgagtatgggcatcgaactcaacaaccccttcgatctcgtagtcctcaacagatacattgaggactgctcctccactagccacgccgacatccgccgccttcgtcggctgcacaacagccgctacggtcggcatcgtctcagtagcagctgcatccttccccctagactttgacccgttggtcgtggtcttgtggagcgccttcgtctcacggtgaggttctaccagccagagcgaagccttcctcttcttcgaggactcttttcgatccttgtccatcaaagcttccacaaaagcaccaatatttcgctaataag

SEQ ID NO: 34310 - DNA, 317 bp, Zea Mays
gcgccatccacggcataggatctcaaactgccaaatcggtggggaacgggggcatcattcccaaatcaggcctcagcgacccatggatggcggcgacctgtgccgggtgcatatgcatggtgcacgcagatggcagcgtgggggcgccaatttccaaatcagtggggaacgggggcatcatttccaaatcaaggaacggggatggagcagcgttgaggcaggggagtagcgccgatgggggagcgttaccgaggcggggggagtagcgtcgagggggagcggtgccgaggcgaagctagggttgagaacgcatgcac

SEQ ID NO: 34311 - DNA, 437 bp, Zea Mays
aatttacctaagggaaacaacctaccaactgcagagcttggcataaatataacattacaagaacataacacataggtgctacacgaatgcagagcgttgttaacttggtcattaccgattcatcttctcttgggattgcaggagacggcaggcaagattgtggccagaacaagctagtcctgatcgcaccaaccagctgcagcagcagacaaatgaggcatgcgctgaggagccaactgaatttgctcctctgccatctcatcttgtaatcctatggtatttgcttgcttgcacagctcaatggatcaccaaattaaccggccattggtacctcccccaatagggattaccacagctgcctaaaggatgcacaggaactaatagattcctcccctgcaggtacttctcacctcgagttcgaccttagttaattaatg

SEQ ID NO: 34312 - DNA, 296 bp, Zea Mays
cgtcgtcttctccggcgaggttatgcccctctgccgtcggcttagttgagagagggagcgattaggataatgatctttcttaattccaactcaggtctggttacaggaatatataggcccctaggcctaatcgcatggagctaactgctccctaattctaggcatgcaaacaacccttaaatctaggcatgcaaacaacccttaattctaggcatgcaaacaaacttatctagtttctgggcgtgctcacgctcgcacatcccgggcgccgttgcctgacgtagggccggccgtac

SEQ ID NO: 34313 - DNA, 365 bp, Zea Mays
cttcgttacatgcctcttatacctcggttgaaacgtttgtttatctccaagaatacagccagacacatgaggtggcacaaagaaggggtacgtgagaatccaaatgtcatggcgcacccagctgatacagatgcatggaaggcactagatgcttttgattccagctttgctgatgaagtgcgcaatgtccgcttcggtttggcaacagatggtttctcgcctttcaatctaactgcaacgtcctactcatgttggcccgtctttgctgttccatacaaccttccactagctctttgcatgaaatatgaatttattttcttgtgtcttgtaatacctggtccagatcatcctggaacaaagatcga

SEQ ID NO: 34314 - DNA, 585 bp, Zea Mays
aaaataacccagacacaggtttcccacgcattggacggcgggttcatttcggtgaaacccaggggctctttagcaagatgcaaccgcgaaggggtacaaagctttactagccgctggatcaccaatgtagggtccagattagatgcccatttacaacgaaccggtatttaacgccacccgtccgatcgaagatctatggtgaggatctttagacatcgagatcaactcagatccgctcattcaccgatcaacggcccagatgcgatggaacaaaaagttatctagaatctaatcgtagccctccattaagagaccgatggccagagaccatgtcttcctccccacgacggactgggcagcagcgcagctcacctcccgacggcgaacacaccggagcagcatgcccccacccaagtgcatagcttcccacacaatcgaatgctacacgagccaaaggacatggcgcattgaacggagaccttaccttgagcaaacatcaacgcaggaagctcgaccacgtcgccatgcggcttggtaatgaccagcaaagtccgacgagctatcccgggcgtccccggtgtcgat

SEQ ID NO: 34315 - DNA, 376 bp, Zea Mays
cttggaactaagaaaatactatgttcccaaacaggcccttcacagccaatttcagatataggacaccaataaataatttttcacctgaacaactacacctccgtcagaatagccctcctctctgataatgctaaatatcttctcaaacacaccctcaaatacaacaattttttgaatttcctggaatgaagagaattaaagtcaatttaattacaaaatagagtgttcaaaaaaatgccaatgacataacaaatcaacatctagtattagacaggtttaacctctgcatcccgagtcaaataagtaagaagtaacagtgcttcattccttatgacctgcaagtataataaaaatgggcaattacatgagtaataag

SEQ ID NO: 34316 - DNA, 2079 bp, Zea Mays
gcatgttgctctgttgaaatccattatcaaggatattgaggatgttgctagaactccatcaattgcactaggggtgaatccaggaggtggtcatccacaaattgttgaaggggtgggtatcgatttatacatgcatatttgatgttaatcacaaatattctatttcttttctttttatcctgtctgtttcatgcttttctttagtatattcttgaacattcatgtttctttctggtaggcatattcctggggattcgatatacgtagctggcaacgtcatcttaatcttcttacatggcctgagatattaagacagtttgctttatctgctggttctggaccccaattaaagaaaaggactgtggaagattctcactatcattatgataatgaggtatgtgctcctatacaacccacctgtctctaagattatttcagttcaaagtatatctctaatattatttactctcctaataatatgtatttctcactttaatcagtaagatatttgaattttgttataattttctccttaactgatacagtactttgtaaacgaatggtcaattgatatttgtgaaattcaaaataatctcgtggatgctgtcagcaacttaccagtaatactaaggctgacctgttttgtttgcagtccttccaaattttgtgtacttaaactacatcatgttgcatcaatttacggtactaaatagtaaatattcatgagcctggtaaattgctatcaagaaatgatgagattattaattacaaatataaattgattctagagataaccagtttgcttgtttctagcattaactgtaaaatgctggaaatttgtgatttggcaccttggttctagtggatcggatgaatgtcaaaagtcaaaactgaaaaggtattgttgaatgtactgaaataatgacaattctcatgaacaattttcatatatctgagccacatgcatataatattagttctcagaagcggtattccatgagttcacaccaaattctcagttttttacatgacaagaaaaaacttctaaatgtattttcacaaggtcgacacgaaatttattgcagggtcatgatggtgagaatgttatattggcacttcgaaatggtacagcagcagtgaatgctgttgctaagatgaaggaaagaggttacaccaatcgccgtagatcccgccaccgtctgactcctggaactgtgaaatttgccgctttccatgtgctctcgcttgaaggaagtaatggtctcacaatattggatgtagcagaaaaaattcaggtacacatatatatcctgaacccccctcctcccgcccctaaagtggttatcttcaattttctaagctgattattttcctgttcagaaatctggattgagagacctcacaacaagcaagacacctgaggcatccatagctgctgctttgtctagggatgcaaaactttttgagagaactgctccttcaacatattgtttgaagtcgccttatagaaaagatccagctgattctgaggccgtgttgtcagcagcgcgtgaaaaaattagggcctttcagaatgtgctttctgactctgaagctgaaaaggaggcagatgaagctgagagggatgatgattctgactgtgatgatgctgatgatgaccctgatggtgatgatgtgaatattgaggtggaagaagacaaggatcctcttcttgccgtcaaggcacaagacgaagtaccgagtacaactacagttattggcataaagaccaagttagatagtgtaggtaatgcattgaactcatcaagtagttttactaaatcagcaaaaggtgctcctctcccttatttaggcaggtccagtgcagcagatacttctaatgattcacctcttggaggcccatcagctaatcatgaagtaacccctggcgattctgaaaatactcaaattgatgaaagcaatcaaattgagccttgggtatgtgcactagcagaaggagactactgcgatcttagtgttgaagaacgccttaacgcactggttgctcttgttggtgttgccactgaagggaactctatt

SEQ ID NO: 34317 - DNA, 580 bp, Zea Mays
ggaagaggtgaaagtgcaggggaaccaagggtacgagtacaataaagaatgaagctaaggccaggctggcgcgtggcaaatatgaggttacgaccaaaaggcgggataagtagaataccactcccgaaatgagatgggaagttggagattttagataacagacataatgtcatcacaaggtaggatagagtgatgagaagggtaaaggagacgacaaacagaacacaacaaaggatagagttaaaactcgcaggtggcaaagaagaggatacgaccaaggaaaaagtaggtacagtacaatgctcagattgagatggaaaagaggatattttaaaggctggtataagataaacctcaaggtaagatacaaaggcgataagggtaaatgcgataatgatgaaaagcataaccatggacagagttcaggcaagactgacaaagtggagaaaacaagcaagggtaagataggtaaggttcaacaaaatggttgtagcaaagaaaattaattaccaagtggagttgcaaggagacaacgagattaccaaggatatgcaaagtaaaatgaccgttcatggatcat

SEQ ID NO: 34318 - DNA, 316 bp, Zea Mays
tgggagagaggtggggtcgttggatccctgatcgagggtgtgggctatagcacatgtaccagttcgactgggatcgcgtcagttgtagatctcccatcgtgtggttgcgattagattggggatagtgtttcaaaggatgtgatcgagacagttgggtggcaatcggagggttcgggttggatcacaacgtggatgtattgtgggtcgtgtgatttagatccaagggctaaggatgtgtaccggttcacttaaaactcgatctaatctggaccgctcagatcagatcatgcggccgagacttcaagataccccttcg

SEQ ID NO: 34319 - DNA, 337 bp, Zea Mays
ctcgaggttggcctttccgccatgtcgaaggatgaccacgcggacaaccttgcatacaacagcctgaaggtaaagaatttgtaaacttaaagtttaagaatttgggaataaagtttttattctcatgttaaacctttatccttctttttcgcagggcttaattctgagcaatgtcctgagagctcaaaagaatgcggaggatgaaagctgcacgatagctcttggcaaccttcgatcagaggtaattcagttgagaaacgaagccctggagaaggacaaaattctaatttcattggtgagtaaagtgaaggaagatgaggcgaaatacaacgcccag

SEQ ID NO: 34320 - DNA, 320 bp, Zea Mays
gtccatttcagtgaaaagttgtgtatcctactaaaacgaagttgttgccccttttttggaacaatatttttcttatattttatatacaagatcggagatccattactctagatgttggctacgatacaataagtcaagacgtcaagacatgttaccttgctgccatgatctacgacatagatctagaacctgtttgttttatacataaatcatgtagattgagaggtattggagtggattaaggatgattttgaatagtagtagatttattcaccttttatctctatggaattaggacaaaacaaacatgaccttaacga

SEQ ID NO: 34321 - DNA, 632 bp, Zea Mays
gcattgtccaagtccatgtaatcggtgtcggtcagaagcggaggattggtcgtgcttggttccattgtagccatgcttgagcaaccagctccatccttcaagttaggtggggtggtgaagcgagcttcatatccctgtccttcagcatttttgcccttaagagattgctggtacagtgccactaaatgacgaggaatgcgacactttttagtaggatggttgaagcatgcacacttcttacacttctcttgcttggaagtgggggtgtctttccttggagcctttgtattttgcttatctggacgcttgttgcgtttgcgcttctttgaattatcagagttcttgggatggtttttggggccatcccctttcttctcattcttcacagcatgatgtatttcaggcatatgagcagctccatcacgatgttgcttatgatttttcatcgtaagctcatcatgcttttctgcacgaagtagatcatgtatgagttcagagtaagtctgataattgcaagcacggtactgatgctgcaggaccctatcagatgggatcatagtttgaagtgttttttcaatcttatccgcatcttatggttccttgccgcaaaaacgcaagcgggcacagatctt

SEQ ID NO: 34322 - DNA, 362 bp, Zea Mays
ggcttatgcttgtaagatggcggaaattaccgatgcagggatttcgcgtaagttgcccagatcttgatgaatagtcatttagcaggaaaaatatgtggtggtggctgtgttttcttcctactatatttactggggatattcttactctttccagacaattccacttgaccattcaacttatgtttgtgaagtaaagatgttaagtaagtttattataataacttgcagttgtagaagatctgttcaagagaagggagccaatgccttcaatggatgcaatctactttcttcagccactgaaagaaaagtaatttttgacagatttgtgccttctcttttgtcttcttgagtttactatttcc

SEQ ID NO: 34323 - DNA, 421 bp, Zea Mays
ggcaaatacacaaaggatgtccagaagatgtttgacatgggagaggccaagcctctttcgacacccatgtccactacgatgacgttggatgtcgatgaggaatgtgagactgtggaccagaaggagtagatgagcatgatcggctccctccagtacttgtcggtgatgaggccatacatacactttgcagtttgtcggtgcgcttgattccaggcttccccacgcacctctcacagataggccgtcaaacgaattatctggtacctatgtttcactattgagtttagtttatggtactccgcttcgttcgctctatctttgtgcagttattcagatgctgattttgcgggatgacgcttggattacatgtccacttctgggacttgtcattttttgggttcctccctagtttcttggcctt

SEQ ID NO: 34324 - DNA, 390 bp, Zea Mays
tttgagcctcctccttctttgaggttggttgatgtctggactcccacacctaacgatgaggccgccaaaagtaatggaaagcaggaataagaatataatagagtaaagtagcgtattgcaggatgtactgttgtataataggttgtacttttgtgtaatgggtaatgtatcctgttatgtaatatcgagtctgtatcattacttttttatagtaatgtaaaatggaaggtctctttggcatattgtttacttcaaatgttttgcctcagatgccgaccaggactcgcggacaggacgcagccggaacttctggtggtcgggatgtcaccccaaatccacctccggttccacccacgttggccgaggcgattgccgccttggtaaacgcca

SEQ ID NO: 34325 - DNA, 306 bp, Zea Mays
tgtgggacatgggaagtcaaagggatatgcgggtgagaaatctactcaaggacctgaaaagagaacacggttggtgatccgaccttttaacccaaaccgttcttcgcctcgcccatcttcatacccatttaagcagcctgtatttattcgtcccactactgcccccgctcctaccaatcagccgagtgcccatggtactcattttcctgcccttcccagttcttccagtggttgcttcaattgtggaaagtccggacatttcatcaaggactgcccatatccgaagcaaaacaaatccaactttca

SEQ ID NO: 34326 - DNA, 1012 bp, Zea Mays
aattcttcacagcgatacgtccacgacgtcgcacggcggaggtccgagcaccggcgagtctagactggtcggatcacgcaaagactggtgccttactttgaccgagaccaaattcaagacctaaggatcgtttccccccactcaatttcacaaacggtgatctaaccggctctgtccacggtgacagcggggtatcgcggatattcacatgcattcccggcgatcctagggactccagcccaattgggttggttggggagtatcaggggcacacaagaatgttgaaacaagataacaaggggcatgaacagacctagaggtcgctgaccacggtgaggtcaatccgggcggtgctcttgagtgagttgggggaaatgcaaaattggagctctctggtggaggatctgaggtacgggtgggtgcgctagctgcttgaatacataatgaagccgatggtgcacttaatttataggctccgggggaggtggctctcaatttgattacggcgtgttggcggccggagatagggaagaatacgggtggctgtgaccatggcgttcaccggtgcaacagcgcaaggataatactcctaaggggccacgattactaccgcacaataacaagctacggcgtggcacaactggggtcaccgaagcttccacggcgacgctggcggtccagccacgtcgcgacggctacaggcacggtgataacttcaattcgcgatcaaatccattcccccgtgagatcttttaccttcccatggatatcttctgcgtaccaagcacgaatcatagcgaccagcgcaaatccggacgcgcggatcgccggcggcgagctcactgagctggcaatctgatcgggacactgtaccatcgtgaagtgcattcagtcggtctgacaaagcagattcaaggcagcttttctccaacttttatgtgacaaccacatacttcatctgcatcaaagttatagctctataatccatgttcacttttgctatagcaacaac

SEQ ID NO: 34327 - DNA, 381 bp, Zea Mays
gtaaaagctgattgcgacctccattttgttagtttgatttcaactttcctgagctttgattccttctgtggacagaaattggctagaaggcagattacaaataagtacacttttaacatttaaaatttattctagaataagtatttcagatcatggaccgccttgttttggtaggttttactactctccattttctaaagtgcaattaatagagcatcttttgtccactctcattcattatccccataaacctgtcatattaggggagatggactctgtttcttgctctcactttttgttttggtgataaaaaactcttcggctctctttaaataaacgagaaattacatctcccccactagcatggaacccacccaatac

SEQ ID NO: 34328 - DNA, 292 bp, Zea Mays
cgccgccttggagctctttgctctgagccgcatgggtgtttggaggaaggagatggatccagggccgctaatctggtgatggacggataagaatagaagtggcagtagccgtttcatctcgatcggtgattctggggccgtggccgctggatccgtaacagacgactgggatcgctcttggcataccggttcggtcggggtggctttgtggccatcgatcggtggatggaggggtgatattagagttcgcttcaatttaatctgcgccactgatcttctgattcgacggccg

SEQ ID NO: 34329 - DNA, 272 bp, Zea Mays
ctttgcgcggacagtttggtgtagtcgttttcgcacttgttaagcttcgtccggctgcacccttaggcaactgttgcacggacagttttcgcggaaaacttcgatttttcgcacttgttgtgctagcccggctgcacccttaggcgacttctacgagagacttcgatttttcgcacttggtgtgctagtccggttgcacccttaggcgacttctgcacggatagtcttcgcgaaagacttcgattttttcgcacttgttgtgctaacccggc

SEQ ID NO: 34330 - DNA, 340 bp, Zea Mays
gctagatctggccgtccgatccccaactgatggtgcagattagatttgaattcttctgaaagggtatgcaatatagggccttggatccagatctaatggtccgcgttgtatgaaaccagcccagatccgaaccacacgatgacgatccaatcgctcgaatcccgcggggcgaaggggtacgcaaaatctaatctgctccatccttttaaaatcctatggccctgggcttctacaacatgccttctaatcctaaccgtttaaggctggatcaacggtctcctagccatcttccacctcacgcacaagcatgcgtgctaccccagtggcagggccccctccc

SEQ ID NO: 34331 - DNA, 376 bp, Zea Mays
tctagagagatagcaggtaggagaaaggagatcagagattggagacttggagaagaagaagataggcaacacgacagttgtattgttattctattcatatccccaacaagagtcagccactgaatatatatatgtgtgactcgctaatggaccactacaaaatgagttacacaacccactgtgacccaatcacatacgaatacagcttccttatcctccgaacgtgcgactgcgacattgcctgtcttgttgttgctgaatcctccgcttcttttacgtgatcctcgccacctatccattccccacgtgcagatgtgctgacaccctggcgcctgcatcgggtcacgacatggggaagggctagagctgaactgag

SEQ ID NO: 34332 - DNA, 505 bp, Zea Mays
cttcggagagtcttagagcaaagttgtttgatttgctagggaagagataattccggagccgagggatgacaaagttatcatctttaagagcttcttcagagcgggcttcggttcccgctaaatgacatgataggggaggttctaaacaactttgaaatataccttcatcagctgaccccaatgccattgttagacttagtatgtacatatgggctctccgaagccagggaatggatgcgaatgctgaagctttctgccgggtgcacgaacttcactaccagacgaaggctagagcagatggccttcacaggaactttggctgctacaattttgcgtatcggaaggatacgaaggccccggttattggctatcgtaccaagtggccgactagatggactaatgaacggttctacataaaagcggatgagaaaaagagggagaagctaatgagcatggttatgagtctgttagagttaaacttcggcatgactcgacccttatgcaa

SEQ ID NO: 34333 - DNA, 467 bp, Zea Mays
ccctttgccttcgtgctcctctgctctacgcccgcgccaccacacatgccatggcttcgctcagacatcctgatcacttccaggctgaggaggagctcaatctggtgcgtggcctacttgggtggagcgcgctagggctcaccggaaggatccatgcgggcgctgccccacttggcaatctcgccgccggggagtttgtgatgttcaccttgtacatctcttgcgggttggtgctgtcgatttcgcccttcttcctgctactgctgggcttcagcttcaacacctcacgccccactccatcctccaggcagcgatcttcgtccacctctacgagatgtttgtaggtgtggccccctgcacttccctcttccgctatttcttcgtgctggtcaggtccgggaagactagggaccacatcggtgcctaccactttcagacgaagccagatccggctgtagtatacatcc

SEQ ID NO: 34334 - DNA, 381 bp, Zea Mays
gttgcagagtgcaggcgagggaggggctcccgctcgagtcctctcccaaaactgaggtggaggaggatgacgataatgatgacgacgaggggatggaggtccacgagggcttcagcccccaggccaggttcagttccgtgccagcctccatggatccttctgacggcgcagcccctcccttgtaggggctggcagcgtccttgtccggggtgtgggtatttgccgagcctgctcccgtccctgccaagatggaagaggcagaggtcgtggagggggaagtcgtacctcttcccgtggaagtcatcatcgtccctatgggtgcgccgacggggtcgccttagcagcctcccgctggagggaacacagaggacgggcctatca

SEQ ID NO: 34335 - DNA, 373 bp, Zea Mays
gaatgtgcgtgggttgaatggtgctgcaagacgtgccagcgtgcgtaatcttatttcttcctccggggcatctgtggtgtgtttgcaagaaacaaaaatctcacaatggaatgacttccttctaaaggaaactcttggtcaagctcttgcctcccagacagtgtgccttccggccaacgggactgctgggggcgttctgattgcagcctctgaccagcacttctcacttaatcacttgtacactacagaacacactattactgcaaatattttctccttagcagataatacaaatgggtccatcacgggcgtgtacggcccctaatccgacgaggataaagtgaattttcttgcagaatttgcttccatcaag

SEQ ID NO: 34336 - DNA, 487 bp, Zea Mays
aaacgacagttggtgccacaagtaggggccttgcgcgttctcgacgaacttttctaggctctatatggcgggacaccgattgaacccccgaggtggcgatccatttcaagaacctcgagttcgtccttgatggtgaaggggatatggttagggcactggaagtccgaccccttttagtcaggagtctcaacattgttgtgagtgcccacggtggccctcgtatcacttacacccccagagcaactgcccgctttgagggccttgacttcatcatcaatgaagaaggcgagatggtttgggcaccgcccacccgaaaacccttatgccgttgcggaggcacttggcggacttagcctcaccccgcaagggcaaggtataggacatggatcatcctcactctctaaggtcgacgagataaggcgacagattgcagtccacatgggacccaaccccttgtataacaatctatgtgccttcttctcatcct

SEQ ID NO: 34337 - DNA, 960 bp, Zea Mays
cttgttctacagttgcaggcaagggaggataagaagcgtcatggagttgggcatgtgaatgagaagagggttttggaagaaactagtatgattgatactggtgaattgaaatctgattcgactgttatggagattagcatggctgggttaagacaaggaacactcaaccaatgtgcttcaagttcggagaaggtgagaacaatttccgtttcaatgtatttttttttccgtttgaccaatagctgatgcatctcagtcacaggaagaagcagtgcaggagaagcatgatcagggattggtagatgaaaacacaaacagaggttcagctgacaatgatgcacttgaatgtggtggagtgaatcctgatgtggccataacaatgtttcatgaaactattcttacaacagaagctgtcaatatagctgggtctaaaatttcgtctgagaaccagcaaaaggaagcaccctttgaagtacactctataacagaagtcgaaggttctgaatcaaatgaatcatcaagaaaggagcctgaaggagctcttgctcttccacaagagcctggcaacctggtaaaagttaaacaagaaagtttggagaatgaaaccgagatgtccatttttagggagaatgacaaagtttctggaaaagatcaggcatcagcagagtttataattgatccttcaaatacggatgaacggagggagaatgatattgggcggcccgatgaatcagcaaaaggctgtgaaaggttaacttctgattctataaacacagttcactccaaatttggcaagtctagtaatgaagaggataagagaacacagaacaccaggtctacggatccaaaagatataaaggaatcattgggtagaattcgtgccgaaccatcaaacagggtacacacaaccagtgttgggtattactctcagcatgcagctcatgatccgatttcatcttg

SEQ ID NO: 34338 - DNA, 629 bp, Zea Mays
cgagaagcggtgtgttgggcgcgtaacaagtaggcggagcaggggttgcctccagtttatagaccctagctgagcttatcatgaatttcggattgggatcgagttcaccgcggcctggatatttctatggtggcctgttcaccgtggcacgcgagagggaaatggttcacggatggtaaccggttgcttgccatgaccacgaaagtacggtgaaataggcgactatgtgtctttcactgcgatcacggcaaacaccggcggtgatatttcactaaccgcacggcaagtgggcatggcgatgatctagctcaggcctacgttcttctcacccaagatcttttcaccctccatggttatccacttcacacagggcacaaatcgcggcggccggcgtgaatcgcagcgcggagatcaccggcgtgacagatgcactgaacccgtgatcttgtttagtccaatgtaccatcgcgatccttttcagtcgttttgacagagcaacttgtagggcctcattctctaattttcgtgtgacaacccactaacccgcctatatcaaagttgttgcctaatatgccagcttcgactttgttatagggttcttgattagattctcactgaattatgcgcaa

SEQ ID NO: 34339 - DNA, 380 bp, Zea Mays
tctacaagtgcaaataaaagtaaccaatgaagaactgaggataaaaaagtagtggcgaatagaaattgaataatttgactagctcacttacaaattcaaatgtactccaatttcgctcacaaccggatgatgaagcacaaagactaacaatccgtcttgcaaacttatataattcaatagtacgaccaccatatgcaagccaccaatcaactaaaatggcaagaacaaagaagattatatgttacatgctgaaaatggagggaaggctatcaattttagaatacttacgtggattccttgtttgtgcattttttatagccgttggatttgcaaatgcctctctttggtctcataaagaacagcttgtgcatcaatcttct

SEQ ID NO: 34340 - DNA, 410 bp, Zea Mays
cactattagacctctaactcactctgcccacggtgaccgtatgatcaaaagatattctaacgcgttctcggcgatctaaggcagcttagctcaattgagttggtcgaggagtattcggggcaggtatgggtgctgaaacaagagggcagggagcacgaacggacctagagtacgctgaccacggtgagccaacacacggcggcgcggagaaccaaattgggggaagagagaaattgggaggctctggtggataatccggggcaaggactggtgcaatggatgcgtaattatccaatggagtcgcgggtgcactcaatttatagcaggcttgagcggtggccagtgaatttgggttgggcgcggtggcgatcggagaaggaatgagtcactggtgcggtgattcgtggcat

SEQ ID NO: 34341 - DNA, 435 bp, Zea Mays
gaggagcgagtgcgggaggcaagatagcgatagatgacggtgacggcaagcgacactcattgtcgtgttgcaaccgcgcggtgggactctaatgagttagcgagggacaggtgacgccacggtctcaccaacaacttgcccatctgctggtgcggactaggaggcaaaatatcaacgttgtctgcaggatcctgacgagtcgacgagctgatgagtgatgagaaggcaaggtgcgctgcagcgggcggattaggtcaccgacttactggtcagtcgatgaccgaagaagcgagtgagccacgactgggcttgcgctagggaagagaatcaaatagctcaggtgaagagtggattgagcagtgaagtatcgacagaaaaatagatcaaaacctagttttcactagatttgttcacgctaactaaacaaaaatttgt

SEQ ID NO: 34342 - DNA, 329 bp, Zea Mays
tggtcatggtgaactgagaggaacaagtgtgtggtcaccagtttcaaggtcttcaaagacactaggggttttcttcgtggagggatggtgtcagttggctatcctggtgcacaatagtgatagcagctgatgctctatcaggtggtggttgaggagcccagagatattggacgtacccctttatgggagttgagagtggtggcaagaagtaaaaaggataaactctattggcctccacgtgttcacaggaggggtggatttgagaccccagtcagtgcatgaacatatgcacgtgtacagcctcaccatgacccacaccagtcccatgt

SEQ ID NO: 34343 - DNA, 992 bp, Zea Mays
ctgcctccttccaaggcctttaccagttttgtgtcgaatccttttgctggtgatagcggtttgggccttagagtgcaaccctctcccaaagaggttagtgctttggttgtctcacttggcgaaatccctgacgatgagaggcaggttcatttcgaggtacctttgaatccaagtgatgcagagataagtgccatgctggatatgttggctgaagattcctctgatgcagcccctgctgaaacactggctgtagcacccatcccagaggctggcaaagctttgtatattcagaggtctgatagtgttcgcccgaagcgtcctcgctgagccaatcaaccaacttctcctgctgaggggaagaaaaagaaaaagagacgtcttcgccgagtgtcatgcttggatcaggatgccggtccttctgctcctgctgttgaggaagtgccagtttttgctgaagctgatcccaatgggtgtgacccggctgatgctgatcccaatgggtgtgaccttgatgatgctgaacccaatgggtgtaatctggccacagctgatcccaatgggtgtaccgtccgcattgttgatgaagatgaggaagaggaggatgaaatccctctaattcggaagaacagccggcgctacatagccagcggggaaagtagtggtgttccttctccagctttgtctgccctcattggtctgcaagaattgtctctggcaaactttgatcagactcttgaagacatggtcccagaagatctgttgtcagagccagcagatggtggaatgatggaagtttgcgctgatgtgcctgatgccgggttggagttatcccgagcggcgtctcgtgcctcatcgaccttggagcgcggtcttaagggtcaggaggctggtctggattgctctgttcccatggaagtggttgaaggtccttcagccttagaggtggctgttacagagagctcgaccctcaaggatggcgctagcgcttaccc

SEQ ID NO: 34344 - DNA, 383 bp, Zea Mays
agctgacgaagtggttgttttcaaaggttttatgaaggctggtcttcgattccctttgtataaggtgctggtcgaacttcgacgaagtacttaaatattcaagatatatcttcattagctcaccccgaagctttaattaaaatcgtggtttcatccgagcaatgaggagctaagggttggaaccagacattgactgcttctgcaatatacatgaattatcttatcagacgaaggcaatggggaaggaacaatataataacaattttgtttgctattccttcgtatgccgctctgatgtgagacgccctgtcccaatgtttcagaagaaatggccaggatcttggatgaggcaatggttttatgttaagaatgatttggttgag

SEQ ID NO: 34345 - DNA, 441 bp, Zea Mays
gtagttgggtataaggagagaatatagggggaccgatgcgggagatgaaaaagtagaggtggaatctagctaaggtcgcacaaaagtaggatatatggggagaaatttaaagagaaccgctttgtatagcctaaccctctgccatcagccctcacgagtcatgcccctgcccctacatctgcacagctacccataaccttcgccgcctcattggccccacccctatccacgaggtgtcatgccccggtcgcacactcactctgccatccgaagaagcacggttctcatatcgttggtgccacctctaggctccagcaggtgtctgcctcctgggccacaaaaatgtggcttctaagactgtctgcagcggtctcctctttccctcccctacgggctcctctccgacgcggtccccttctctctcacgccagatgaagcggt

SEQ ID NO: 34346 - DNA, 283 bp, Zea Mays
gtgttcaggtaattaaggaaatgatcaagcagaaggcagaaaaatacaaatgcttccgtcaggacagcaaaggaatcctatggtttggagatcgattggttgttcccaagaaccctgagctcagaaagaagatattggatgaagctcacctttcaaaattcaacatgcacccgggcagcaataagatgtatcatgatctcagatccttatactggtggaccagaatgaagggaaattgctaagtatatatctgaatgtgacacctgccagagaatcaaggcca

SEQ ID NO: 34347 - DNA, 414 bp, Zea Mays
tagatgttggatgtggacatattctgggatgtatggagaataatacgaagcagtgtgaaggacctactttggcgaattctgtcttgcttcggcttcggcaatttctttttggttttgaattgtgactttgcaggttcttgttgtgtgcccgttgtcctttccacagactaagcagaatagtattcttggctgagaatcgtacctccccccaaaacttcttccaccccttccacctcttagagctggtggtatgaaggaactcttctgggttcctattgactgggcatgattttgttgccctggaggatggttatttttgtcttcgcctttgcttggattgtaaatggtcctgacatgccttggattgaatcgcccaccaaagccccttgtaatttcagagtatctgaaggcttc

SEQ ID NO: 34348 - DNA, 471 bp, Zea Mays
atttattgcttatggagtgtggcccttggcgcaatgctgggtattgggcgaagtgaccccccgtcggatgccaaccctaggcggccagctggtgcgaagtcctgcctttgtggtggatttacgcggtcgcaacccggccgcgtttatgcgtgaagtggaggccgaagccgcgaagattgtaggaaagtatgtgttgaagacagaaactttgaggagttgggatacccgtagttcaaatgttaggttgaatcatgtttttgagttaaaccgtctgtcgtatgccggctacctgagggacgactatgctgatgctgctgtccgccgggggaaaaaggcaatgacaacgaccgacgagggcccttcatagggaatagtgccgggcgcggccgccaagaagagaaaattaggtacaacagctgaggggtcgagggcttctgatcgttttgctgcggatttgctggagacctccgc

SEQ ID NO: 34349 - DNA, 438 bp, Zea Mays
gattctaggcttcgggattgtagtggagatggagactaggatgggtttatggtttgaagtaggacgtgggatggcgttcagggatatggaggggaaaagccgaacaactggatgttagagaaggcccgatctagcctggctagggtggggttagaacaacaattggaccaagtaaaggagcaaccgatgagggggagctccatcacacatatgtcgttgatggtggagttaaaggctgagcaaagcctgttgttgacacgaccagagcttttctcgttggggatcagacaaggtggaagtcgccaagtaagagctaggagccttggaccgagatgaagaggtcagagagctcagctaaggagggggagtctggatggtagccaggggcatagagattgtaatggtaattgagccgtcaaagagtgacgaggagagggt

SEQ ID NO: 34350 - DNA, 303 bp, Zea Mays
agcgtgagcagcgcaatatgcatcccaccaatccacagctagaccggtgaggcgacctgatgcatatagcaccttctctctatcagtacattgggctatgttgagcatcttgtccatgaactttagccagtcattagcttgtagtggatctgcggagttagagaatgtaggtggcttgtgagtcataaactcctggtgcttatccctgggcggagctggtggtggtggaggtggtagttgttgttgttcctgccatacttggcgcatttcttggcgttcttgcctcatttcctgtcgtatttc

SEQ ID NO: 34351 - DNA, 310 bp, Zea Mays
gagaggtagagttctacattgatctaattcccgacaccgcaccaatcgcaaaaagaccgtaccgcacggctcccaccgaattagcagaactaaaactccagatcgcagaacttcaacagaaagggtacatttgtcccagctcatctccttggggagcaccagttctgttcgtcaccaaaaaggatggaagtatgaggatgtgcattgactatcgatccttaaatgaagtcacaataaaaaacaagtacccactacctcggattgttgacctcttcgaccagcttcaaggggccaagtatttctccaagat

SEQ ID NO: 34352 - DNA, 358 bp, Zea Mays
ctaaaccttggagtagcagatttccatgggttgttgtatcgatggtgcttaagtacgggtaagctagatagggatgcaagtagcagattatgctagattcttgcatagggaaaattatgtagtattgtgggggtaacaagtaggttccttttttgaaggtacacgtgagcatgcctatactatgccagatgcttgatcagttcaaaaacatttgtgtgggggagctgtctttattcttgtttatttatcagttcaaacagattgtcatgaacatgcttgattgccttcgtttaacagagaaaccaatagtatataaaatcatgggcagaggtcctcgaaccatggtgtactatagtgg

SEQ ID NO: 34353 - DNA, 696 bp, Zea Mays
tgcttactgggggctatgcagcacttgaggatgttgcaaatgcaatgcgtgtgttttcttggatgaggggtactgggataaaaccaaattatatcacaatgataaatctccagggcacatgcaaatctttaggtgatttgcatagttatggaatgccactgcatgcatatgtaacacagactggattattatcagatgagtacattacaaactcattgatcacaatgtatgcaacctgtggtgatttggaatctagtactggtatattcagcagaatcaacaataaaagtgtcatttcgtggaatgccatcatagctgccaatgtgcggcatggccgtggagaggaagctataaagctcttcatggactcacagcatgctggaaataaacttgatcgtttttgtctagctgaatgtttgtcatccagtgcaaacttggcatcattagaagaaggcatgcagctacatggtcttagtgtgaaaaacgggctggattgtgatagtcatgttgttaatgccacaatggatatgtatgggaaatgtggaaagatggactgtatgttgaaaacgctgcctgatcctgcccatcggcctacgcagtgctggaacacattgatatcaggttatgcaagatatggctatttcaaggaagctgaggatacattcaagcacatggtctcagtggggcaaaagccag

SEQ ID NO: 34354 - DNA, 280 bp, Zea Mays
tgtataggggggaccgaagtcctgccctgaagaagcttctaaagactacaacttcgtcatctttcggctctagaatcacaccttccccagcaaaccgaactagcttatcatcattatctccaaaatatcctaattttttcattaaaaccagatcttcagctgtaattatggatttcccaaacccaatatggctgggtttgcttggacttaaaatgttgtcaccattctcgttttcactgccagcttcggcagtggttggttcaacttcggcatcaacaac

SEQ ID NO: 34355 - DNA, 446 bp, Zea Mays
cgatcagttcaatgagctgagaagcttgcatatatgtctctgtccgatccagtcccccactccatgaatggatgaattattttcacggcactgtggtggtccatactttataatatatacgctttataacatataagattcatgtagtccttgcgcgataattcctgtcactgaatacacctagatcaaataggtgttgccagtaagagattggattaggacaaagtagtgttgtatgcgaaggggttttatgaaggttaagttgagattggatggggatttagtgacatttgctgcttctgcttcctgatatgctctttcttgtctatctaatgtttcctttctatattatctttatgatttttcccatttctatgtgtgcttatacattgctacccacctcaatgtttaatatatttttttatttgagcttttactgattcggc

SEQ ID NO: 34356 - DNA, 356 bp, Zea Mays
aagtctgtgttgcaggtggttggtgatgaaaacgtgggtgataaagctgggtgtgagcctggtgcatcaaatgctttagtaagagttgaacatgtaagaatttatgcattataataattgcatttatgttaaatacaatagtaaattatgtatctctaatatggtgacaggatggcgttcgcaaaagtaaaatgctgggaggtgaaccccttttgcgtggaggaattggaatagaagattggggtggttgcgaaacagacaaacaatctaggaaggtaataaacgagaatacaatgttatatagataacaactaatatgttgaagggcacaactgagttgtatgatgtaataatgt

SEQ ID NO: 34357 - DNA, 1043 bp, Zea Mays
gacccaagtaagcaactgaggtggctccaaaggaccacttggactgtttgacaaaaagttggttaatgcgtaatgttttgagtaccgccttgacatgtcgaaggtgttgagaccaggatgcactgtagatgaggatatcatcaaaaaataccaatacacaacgacggaggtacgaccccaagacttcattcataagggcttggaaggttgctgacgcatttgaaagtccaaatggcatgactaggaattcaaaatggtcgtggtgtgtccgaaaggttgtcttatgaatatcctctgaatgaacccatacctaatggtatcctaagcgcagatgtagtttggtgaagaacttggccccgttgagtttgtctaggagctcatcaactactggtatggggtacttgtctttcactgtgcgctcattaagggctctgtagtcaatgcagaagcgccaagagttatctgccttcttaaccaataggactggagcggagaaggctgatgtactatgtcggattattccctgtttcagcattgctgcacactacgcctccagttcatctttctacagctgagggtatctataaggacataccgccactggtgctgtgcccggcatcaggtggatgcggtgatcacatggtcgtgctggagggaggcccgttgaggatgagaaaacatcatcaaattgctggactagggagtccatcattggtgtcgggtttgatgttgaaacacgtgctgaaattggcctgtgcatcatgctgcgagtagaattcaaccctttccacaaaacttggtaaccattcttctagaatgccatgctcatgttggctaagtcccagaggatgggaccaagagtgcgcaggaactgaacccccaagatgatgtcaaaggaatctagtggaatagcataagcatccatggtgaaaatatctggacgcatgcatagtctgagattgttggcaaggccatgacagtcgattttgtcgccatttgctacagctacccgaccttggcttgagcagacttccaattgcaat

SEQ ID NO: 34358 - DNA, 402 bp, Zea Mays
gtgcactgagcgtgtaacaagagggtggaacagggagggcactcaatttatagagactggctataggtgctacgaattttggaccgaggtgagctcacagcggtgaagagatgagtcatcggagctcgtctactatggcgctcaaaggggtaagggctcgggacagtaattggccatcccccatgacttactgcgatgtggtacggtggcgtatagcgaggcatgatcgggtaaacggcggtcatgacggtggcggtcgcgtggccacgtcgccgggcaaatgggtacgacgagatcagctcgatccactcccatcagatattttcatcttcgtggtaacatgtcacccgaatagagcacgaatcgctgcggccaacccaaatcaccgcgcggagatcgccg

SEQ ID NO: 34359 - DNA, 299 bp, Zea Mays
ctagcggctagtaccctgatgtacggagcgttaagggcgttaatagatcgtgttcgagttctaggagagtctgactcatggtttatcatagagagaggcagtgagccgtcggtttcgatcgaacagaatcaacaactatatgagttggcacccaaaactatgaggatagtcgaggaaagtgtgattctgctcacctcccctcatttcagagaaggggatgcgcgggggagagtaaataaaaaagacaagatgagccccccaaatggacctctagattgagcaggggctcgagggctcac

SEQ ID NO: 34360 - DNA, 394 bp, Zea Mays
cgggctaccgggtgtcggtggtggaagctcaccagacgttggcatggcgccaccgtgggaagaaaagccccggcgccgtcactgttgatcggagatgaccgggggtccgtctgccattggatggtgaacggatggacgggattaaaaagggagaataccggtttaggtgtttagatccgagccgttgattctgtagcttgtgcatcggattagatctggcttatttgaaagaatgaccgtagatcgggggatcaacggtgttcggtggaagcggatcgagtaactatcggttttgatctgggcccttggtttctaatccaacggctcagagagaaccgtaccccttcggctagcgcaatttgcaaaagagaccccacagtcttaggtaatcaac

SEQ ID NO: 34361 - DNA, 506 bp, Zea Mays
tcgaaactaggatccagttggacctaggccccacctagagtcttcgtccaagaagtaccacgctcgagtatttccttagatcgggtagaagagtgcaatgttctgagccagccagagtcagactctaatgactggtgggagcccatcatcagatatataaagaatgaaggggaaccggatgacaaagctacagcagaacgcatcgcaaggcaatcagctcactacaccctcattggggaggcactgtacagaaggggcgcaacaggagtcctcatgaagtgcattctttcggctactgggaagcaactgctagatgagatccacgccggacagtgcgggatacacgcaacatccaagactctggttggaaaggtcttccgatctggtttctactggccggccgcaaaaagtgatgcagccgagttagtccagaggtgtgaagcttgccaattcttatcaaagcagcagcatttaccagcacaacaactgcagaccatacccgtaac

SEQ ID NO: 34362 - DNA, 671 bp, Zea Mays
actcccagcctcatgatcatgtgagcgtggaggcataggaggcagaggcggaggaggaaccccaaaatcatcatcatcatcatcatcagctgctgtatcctgagtgtcgaactgacgaagagcagcgtcctcggcctgagagtcaaaaacaggagcagaagctggcacaggagcctcaggcgcaagacggtaggatcaaaaaacgaggcgtgaggcctcaagtgtgccctgaaaccgaggaggctgaatcagctgcgcaaagatgtggcataagtagtgagcatatggcaactgtctacgagcacgaatcccatccaaaacggtgtcctcgatctcacaaataaggaaatccacgacgtcaaactcagagtgggagaccagggcaccaaggagccagagctgaatatgtgtggtagcctccctgtatcccatcctcggcagaagagtccgtctgataagctcaaataagtacttggatgctgtagtaaagtctgccggtgaacgtcgcgacccatctgaaaagggcgggcggaacagagccgcgacgtgagctgtacccggagccacaccgtgagggcgacgaggagggtcagaagtgccgtagcagaggctgtgaagacgagtcgtcgactcgggaaatccaaagagctggcggatctgactggcagtaa

SEQ ID NO: 34363 - DNA, 394 bp, Zea Mays
aacacttcatgtggcagtcggtgcagaggttgagagtcacatcacttacctacctggtctatccacgctcttcgattttggtggtcgctatgttgaggagtgggtcaaagtattctatgctacagtctggattgacctcgatcaccagtggatgaggttttgctttgagagagagatgtcactttgcatgttgttcagctcagagagctgtttggttttcctgagtcgacgatgaggttacacaatctttgttatggttctgcagacccacctcgtcatcctcacgatgaagttgctcctagtactttggagagaaatctctaggcttggccttaattatttgtgcctggtattgaccttgataaagacattgtttgaagtatcgagaatcttt

SEQ ID NO: 34364 - DNA, 342 bp, Zea Mays
agcgggtcttcgcctgcgcggggagcggagagcaaggcctgcacacgtgtcagcaccggacccctgcataccccaaggtccttctcgttccggaaccctgccggggttcggacctacccgggggctccggacctgtatgtatataggggcccggtgaccctctgtgggggtccagccttactgaggcatggtgcctttcctcgccacatggcgccctttggcccgcccatctagtggagttaggcgtggtcctccgcgtggctaggagacgtcgcatgggtgtgatgcctttatgctgtaggagagggtatccgtgatttagggtaccgacagtggccctcg

SEQ ID NO: 34365 - DNA, 329 bp, Zea Mays
gttgttgaattctgaaagtgtgcttggctggtgtctgctgggattcatctttattttcatgtttggtggatcgatggcccctgtgtgggtgtttttctgttgtctttagaccttttggttgcctccgtggctgaggtggtttcaagtaaaattgggtgctggttggttgaggatagtctctgaatcagggaggtactctcttttggttaaactttgaatgttggtgggtcatggacgaatagcctaggtagtagtttgttccttgggatttctgttatgcatggtatgttcggatgtatttctgatatgaaaataatagaaatgaggtc

SEQ ID NO: 34366 - DNA, 380 bp, Zea Mays
agagcatggatataagaaccacaattgaagcagcatacctaggcggggaatggcctggatctgcgcggcatgcaagaatcccctccacccaaggcgttgatggtctagatctgcgcggttgccaaatcgctgacggcgggcgctgatggcgtctgggcttggagaccccgaattcgaggtggggaatggtgcgacaaccgcggacgggcttcccttgcaacccctggcatggccggttgttcttgacaagccctgcagatcagtagctgcatatcatggtccatggctacgaaactttaatggatccaaaccgacttgcatctgctcaacaaacgccaaacgtcgtaaaagggaacaatgtgaatcaaactttctagcga

SEQ ID NO: 34367 - DNA, 531 bp, Zea Mays
cggcttactgttttgttgtactgcatacatgtatgctcgttttaggattttttctggattaaatgtaggtgttaagcaatatagtcatttcgaaattttaattagccatccagctacctacttctgtcaaaaatgttgcgctggtgtttcttccttgggggtgggggatggcaatggtactatcaacaagttatctatgcattaggaggtaattactatttagtgttgttgtctgctgataactaagttatgtgcaagtctcacagtgaataatttggattgttgaatggatctacatgctaggttgaacctgatttcatgtactgtttattttattttcatttttacaaggactagtggagaagttagataaggcaggggcacggtggcagtagattcgagttgtttttactgagcccaactttcagaatgttaacgaggctgttaagaaccaatttgaattgtgacaaaaaatgcagcttgcaactgtagttagtttgttggctttatgcagtgagaataggcctagac

SEQ ID NO: 34368 - DNA, 583 bp, Zea Mays
gtccctctgagctagcaaccaggactccacgggtacgtgtctgaaccgacatacctgagctgcagtggcacgctgaaggtcgaggagacggggatcagcagctagtggtcgcacctcagtctcgtcacgctccctgaagcaaggtggtggaatgggcagagcggaaatgggagcgggacggggaacaatggaaactggagtggtggaggtggtgggtatagcggaagtggtggatggctctggagcgacaggagctggtgaagtgggaggtggagtagatattgtggcagaaggtgtggagggagcagtggagcgtggctgagatgcgaggcgacgaactctgtaggcaatcttatcagaggagatctgcaattgtcctccctgctctgcctgctatgttgttgttgtcgcgacaagtgctgcacgagcggctctcttcatacggcgcttcttttggccctcctgctgctcaaggtagaccgtcttccccttgacctgcctgaaggggcaaggagggtcctcgtcgtctcctccccctagcgctgagacattctttgtccgcaccatcctaacatgagtgctg

SEQ ID NO: 34369 - DNA, 317 bp, Zea Mays
tttgtgtatctgaaagtttcatctatgaagggagtaactcgttttggcatcaagggaaagctggcaccacgatatgttggtccttttgaaatactggcacagtgtggatccgaggcttacaaagtgaagctgcctgaacatttttcggccatacaaaatgtattccacgtatcccaactgaaagaaatgccttcaagtacctaacaaagtggtagaagtttctgatgttaatctggagccagatttaacttattccgagcaccctattaaggtcttagatcaaaaggaaagaattacccatagaaagactatcatat

SEQ ID NO: 34370 - DNA, 527 bp, Zea Mays
ttgtgctcttaaacacggtggtagttgggataagagcttaccatatgcagagttctcgtataataatagctaccaggccagttgaagatatcaccgtttgaggctctatatggcagaaagtgcaggactcctctatattgggaccagactggagaaagacagttctttgggcctaaacttatacaagaggcagaagaacaagttcgaatgataagagataatgtgagaattgcacaatcaaggcagaagagctacgctgatacccggagaaggctactggagtttaaggagtgtgatcacgtgtatttgaaggtgtcaccgatcaggggtatgaggagatttaaaggtaaaggaaagttgtcccctcgcttcattggaccgttcttgaccgtaaagtgagtgggagaagttgcatatcaactagaactacccgatcacctggcatatgtacatgatgtattccatgtatcccaactaaagaagtgcctcaggatacctgaggagcagctatcgatggaggatcttag

SEQ ID NO: 34371 - DNA, 368 bp, Zea Mays
gacggcgcgaggaagccacgttacaaaaagaaagacgacgacgactcggatgacgatgacaggaagaagcgctacgagaagaacgaccgccgccgccgccacgactatgacgattgagctatatgcatgcagtctcgtatatacacatgtgctcgagtcacgcgttatgcaatgtatcatccccattgcatctcctactagcagtactgtagtaaataagcgaagctgagatgcagggggatgcatatggtggacacagttttgatttcaagtgacgccgctttacagcctacttcttccttgtttttgttcttcaccttttgtactgttctgatggtaacctgtatactcgcgcggttacttgcgac

SEQ ID NO: 34372 - DNA, 401 bp, Zea Mays
ggggtttggaggctattgataaaattagaagaggttttctatggagaggccgcaaagaagctaaaggtggtcattgtcttgttgcctggggaaaagtttgccgccccctaaagcttggtggacttggtatttctagttttccagagttatgttgggcacttcgactaagatggctttggttacaaaagactgatcaatctcgcccctggtctggtcttcaaatacaagtcccaaaaaaggctagagccttcttttctaaagtagtgaccactgaagtggggaacggaaccaataccaaattctggaaggataaatggctgaatggaaaaagaattgcagatttgtttccaaagctgatcggcgcaattccgaagcggctaatcaattgtaggacagttcag

SEQ ID NO: 34373 - DNA, 349 bp, Zea Mays
gatgcaagggactgagcgtcccaagatggagtagtcggctgagccagcatgccgtgggtagcgcttccctacaaagggccggtctgcagagtgtgctgcagaggggcgcttccctgtccttgaagagcaccatgaacgtattgctgggtctggtgggccagcagcgcctggtgaggagcgatggagacaggagcagcgtagaaagcctgctgttgctgggccgtcggaggcagcagggcctggtgctgcgccaggagaccttgctgctgctgtggggtcggcgcccgtgggccgggccacatctggatggccccagtccaaggattttggagggagggtcacaggccgg

SEQ ID NO: 34374 - DNA, 543 bp, Zea Mays
ccgaaatgtcaggtgcgtcacccacctcccaaatcgagcgcagcgtgggcggactgtgcggactccgtgaatccgccgtagaatcggccacgggtctctcaaccgcctcaactaagtgccccaccccgcacgctcggacccgattgtctctagtgtgtggacccagccccgccactattcctcttccccggccgcaggactcggtacgagttgttgcgccgcccggatagccagctacggttcggtaccattggacctgcccataaaatggggccacgttgaactcctcactcgttcgtgcgcaccatcgccacaacgccgggttagccatcatgaacgtgagaggggggaaaagcaacgggtcgctagcacggtggaccaccgatgtcggaaatcggaaacccagtgagtttgggagtggaactcggctctgggtgatcctcgcacctcggggaaggtgtgcgcctcatcaactcaggcagagttcaccgaagccctgcgtaattgctcgccatcgaaccaaatccgccgcattccgccctg

SEQ ID NO: 34375 - DNA, 623 bp, Zea Mays
ctgattaggagggacctgacgtcaacttggctcatgattgactgagcgtgggggtggacctggtcttcgataacgtccaattacttgtcgctccggacactggcttagccctcggcgataatggtgacgtcgatctcgtcaaagtgagagaccatctggccaaggccgattccacccctcgacaaatgccctcggcgacggtgcgctctccacacaatcgggcagctcccagaggcgatcaaccagaggcgcctcagtcgacaacagaggagagagatgggcgcacaccatgctaacaaccagacgaatcacttggagtttggtgctcctttccgagagaagggcatccgcccggtgccccgcagcaacggcattttcgcgagcaagcaagagcttgcatgtattctccgtggctgtagccttcgcttcatcctccgcgaccttcgtatcccgcgcttgagtgagaattttgcggacctctgcgagaataagagcgtgaggcagtcagaggtggcaaatggtgaagaggtatgggtaagaaagggggctaacctctggtcgcgtcgcgctccatcacaagttttgagactgcttgcaccagacgaacctttgcctcccatgaa

SEQ ID NO: 34376 - DNA, 353 bp, Zea Mays
gtaagttcctgttcggcgcactagttgtagtacgatgtttttttaacctgccattaactatttcttgatttagttgacggcattgtaaaacggaaagatgctcctcaagagattaaaaaacaagtgtacatggaactgttgcgaagaagtagaaatggatcagtgctaccaaagaatgctactagagaagttgccgcaatgtttcttttacatattcgaactgttcaacgattttgggctgaaggtaaacgttcacgtccggatggcaatgcggttagttttgctagtaaaaagagaggtagatgtggtcgtaagccaagtacagtaaactatgaacagctgcgcaacgttcc

SEQ ID NO: 34377 - DNA, 827 bp, Zea Mays
ttgaagttctattccattacaccgactgatccccgacggcgttgagtgtggtcgagctccgacgagcacgtagaccgaccggaggaggccaagaccagtgctcccgagcagcgggcatagaattgaaccattcccgatcacttcccctaagtcaattttaccaatggctgcccaaaggcctctggccacagagaccgtgcggacaacccaatgatcaacacgttcccggggattggggatggtctagttcgattgggcgggtgggtgagcatcaccagcatacaaagatgctaaaacgagaacaaagagggcatgatcagacctgtggagggctggccacggcgagctcggttctgcggtggcggaaacttgatttgggggaagactaaaattcaagctctctgacgaacgattgctagcgattttcggtggctgggtgggtgatgaacttgcggggctggcgggggcttcaatttatagggcttagcggcggtggccaggaatttcagtggggacgcgcggtggtcggaggaggaagaagagtactggcgcagtggcttggtgtccagcgccatggcaattgcttcggcgatcaacggggagccactaaggcttacggcgatgcggtggaaagttagagccacgcggcggacaatggcgacggcttaacggcggtgagaatccttatccgagggcggtgagtaaggggtgaggtaccacggctagccggtgtggcgtccagctcaccggcggcgaagattctcttaccccgcgatgttatccatctgccacaagcgcgaatccttacgccggtgacacgaatcgcg

SEQ ID NO: 34378 - DNA, 654 bp, Zea Mays
cattgtgcttgttttgtaggcgtacacccacaactgttatggttcgtgagtcacatgttgaaaggatggggagtatacaagatgttccatatgaaattctgaatgttctagaattcaacaggtgagtttatttggtgtctttgtaagtgtaaatttaatgagatgaaatcatcgttttgttctttatattttactgtactaacagtacaagaaagcgacaatcggtggtttgccggttcacaaatggaagactagttctctattgcaaggtaatacaaggaagacgaccttggtttgacttctgttttgttcgttgcactaacctgacataatcttttgtgtaaatagggtgctgataatgttgtatatgaacgattggctgatggaaatcatgatatgaaaaagatcagtagagagcatctagagcaatttggttctgctggcttacgtacactttgtcttgcctatcgggatcttagtagggagcaatacgaaagctggaacgagaagtttgtacaagcaaagtcatctttacgagatcgtgataagaagcttgatgaggttaatgagttaccatcttttggttatatgacaattgacatgaactctgacagtgtattctgtatttgcttgaaaatgtggtcctttctgtta

SEQ ID NO: 34379 - DNA, 329 bp, Zea Mays
gaggatgataggctgagcttctaatcacgattgttccaagtgacttctgtagctgttcccagaaacgtgctacgaattgtgttcctctatctgagatgatggtccttggtattccatgcaagcgcactatttggtcaatatagatctctgcgtacctttctgccctgtgggttgtatgcactagcaagaaatgagttgtcttggttagcccatccacaatgacccatatggaatcatggtgtcaggaggtgttgggaaatcccacaataaagtccatgcaaatgtcctcccgtttccaagatggtatagggagtggctacaaggtacct

SEQ ID NO: 34380 - DNA, 300 bp, Zea Mays
atgaaatttgcatgattgatatttggttggttggatagcatatgatatgccaatctaaatatatattgaatcatcaatcatggccatcatacccagattcacattctctcacacatccttttcctatactagaacacatatccaccaccctcacccttatttcagacaggaaggaagataaatgagggacgttagatatgaaatagacgatcatgattcaatgtatatataccaaataaaggataatgtacacatgatatgcatgttttcttgttatatatatgcatacatgcaatgccc

SEQ ID NO: 34381 - DNA, 469 bp, Zea Mays
tcgaggagcatcaggggaacacaagaatgttgaaacaagatagcagggagcatgaacagacctagaagtcgctgaccacggtgagggctcaaggcacgatgttcttggttgatttgggggaaatcccaaattagggaaatctagtggacgattcgagtcacgggttgctgcactggttgcacaattacctagcggagcagacgggggcggcaatttatagcctccaacggtggtggcgtccaatttcacgaggatgtgctggtggccggaggggaaaagggatactggcgctcaggatgagtggctttcatcgtggcagtcctccggcgatcaccggatatgcataccatgattcaccgtgacgtgggctagcgcttaagcatgtggcgcacaacggtgagcgatcaacggcggcgaagtctatcccggccgcacgacgagcaagtgggtacggtgaatctcattcgcg

SEQ ID NO: 34382 - DNA, 278 bp, Zea Mays
aaatgacgttgcgacggctctggatgaaattgggaggcgagattggggctacacggccgtaaggaactctagtttcaccgtgcacactcaatttgaagagaggtggagaaggccgtgcgaattttgggtttttctcaagcttgcggttgaggctgtgagtgcctcgccgtggtccatgccgctatttaaagccacgacggaccgactagcgatcagcggccgcggatagcattgctagcgcatgttcaccacgtagaagagaggtacagtgagggaag

SEQ ID NO: 34383 - DNA, 488 bp, Zea Mays
gattaaccatattggtttgaatgcttctacctgatgtagatgtggatatacccgggattaatatcatatccacatttgacttattggcatttgatctattctgcggggacgcctgcggatatggtccattggccttagtcaaagcatatgttctgattgcagattcacgtggtctgtgataactctcctctgattaattcaccctgatggtgatttgcctcacgaagaggtttatcttgatgatgaaattcctagcaatgcgcgcaatatcattgtgctgggaatacggaacaatgaatctttcgttttgggaaatgacggagatcattattaaatgtgggagacaaatgtgtcgacacctatcttgcctctctagattgcaaagggatccaaaacaaagtcctaggcatgagtgctttaagctctcttatcgggtcattgataaatgcaatcagggttgaaccaataatcgcaaaatgaaagtcacg

SEQ ID NO: 34384 - DNA, 389 bp, Zea Mays
tttgtggatgggttacgtgctgatattcgcgcagctgtgtttgttcatcgtccctcttccttcgatactgcgtgcgtattggctttgttacaggaggaggtgactgcgccgacgcggcggccggaaggcgttcgaccgtcgtttccgatggctgccaaaggtccaccaagaggtgccttaccgctgccattaccacctaagatggagcagactggcgtcgtaccagaggaagtgaaacggggagattacaaccgtcatcgcgtcgaggataagttcgctgcactgagagcttaccatcgtgctcgtggactgtgccagcagtgtgctgaaaaatggaccaaggatcatcagtgtcctgcaacggtttagctgcatgcattacaagaggt

SEQ ID NO: 34385 - DNA, 409 bp, Zea Mays
tggtcaagtgtgtttttgctaagcagttctggtttgatttccttaattcagtggggctgcgggatctgtatccagctcatgaggaatcctttgagtcgtggtggaaatctagcagctcccgggcatcggatcttgtgagaaaaggtttcaattctgtagtgatcctaggtgcttggaccatttggaagtataggaataggtgtgtttttgatggttgtaatcccagcttggtcacggcccttaggatggctagggaagaggcggtgctctggtccatgactggtgccaaggccttgcccttcctccaagtcgatgagttgctggcttaaaacagcggtgtgggtcgtgtttcctccatgttttagtcggtgatccgtagttagtctctagtggtgtgtgtgctgtattg

SEQ ID NO: 34386 - DNA, 425 bp, Zea Mays
gctgaagatgtttcggatgattctgtgtctaagttttttgagtctgatgattctgggggttcggttgtgtggacagaagagtctttggatgaggacttggattattttgcggcactggatgtggctgcggcggaagcttctccgcgcgtgataggtgttgatgttcttcctggtgtagtgttgggcataggcggcgaagggcggtggcgaaacggagggtgagtgaggtggagggtggttgtcttcgtgtggacggggctagcaaatgggaattgttgtcctcgctggctggggcgagtgtaggtgagggggagttgcaaaatctttttgagggtgaggagctgaggataatgctgttcaactatagggagatgggtatcatcccaaaggttgagcaaatgtaaagtgtgatgccctcactgtat

SEQ ID NO: 34387 - DNA, 481 bp, Zea Mays
caaatcctttattagttgctgacttggcgtgttgtgtgtgttttcgacacgtgtcctgccgttgctagttttgtcagaattccatgcacgacgagcactttgacgatgacatactaaaacaggacaattgcttatctccggaacactcaagcacaacataggactggtagttaaggcatgcggttactggtctatcaaatctagctttcaaaaccttacgtgtttcgcatgcgatatgcttatgaagcacatgaaaggcatgcacttagatttgtgctgcgtgttacttttgaccagattattgttgttccctagaccggctgcagatctgctataatatttgtgtaatcaaagccatgaatgaaattgtatgtcctgcttcatgttctttgaacttctcaattttacctctatcgtctcactatgtggctgcataaaaaccatcaaacatcagaatctgtaatccaagggagcctatcac

SEQ ID NO: 34388 - DNA, 389 bp, Zea Mays
gttcatagcatggccaagctagtcactaaaattctagctaacagactgggggataagctacaagctatggtctctcaaaggcagagtgcatttattaaagaccggttcatccaagacaattttatgattgtgcagcaaactgccagactcctccatcagcaaagacatgcaagaatccttttgaagcttgacatcactaaagcttttgactcagtatcctggccattcctcctcgaagtgtttcaaaaactggggtttgggcagatttggacagatgttttgagtggactgctatctaccccgtccacacaagtgatgcttaatggagtagctggtgaaaaaattcagcttaaaaagggtttaaggcagggagaccccctctcacctat

SEQ ID NO: 34389 - DNA, 288 bp, Zea Mays
gaaggcgtgaggcctcaagtgtgccctagaactgtggaggccgaatcagctgagcaaaaatgtggcacaagtagtgagcatatggcagctgacgacgagcacgcataccatccattacggtgtcctcgatctcacaaataaggaaatcaacaacgtcaaactcagagtgagagaccagggcaccaaggagctagagctggatatgtgtggtagcctccctgtatcccatccgcggcagaagtgtccgtctcataagctgaaataggaacttggctgctgtagtgaaat

SEQ ID NO: 34390 - DNA, 283 bp, Zea Mays
ccgtggccgccgacgacctatccgagccacggcggcatccttatcgccggcgagaccgatccttatccacggcgtgatctttctgaaaaccgatgaacagtgcgccagattcagtaaagagcttatctgacagaccaggttggagctctattttctccaatttttatgtggtacctaagccaactttctgcatcaaagttacacacctataatccatcttcaactttgccacaacgcttaccatcaaatagtcactgaatcacattcaaaatcgagctcaaag

SEQ ID NO: 34391 - DNA, 351 bp, Zea Mays
ggttatgtttggacccattgtctgcaccaatgaaacaacccttgttcctggagttgaggatgcaaattcatcatctgatgatcacgtcgaagccaatttaggtgggggtgaaaacagcacacctgacccctgctcaaatgcgacagggaagcgtaaggtgttgcatgattctcctaaacctaagaagaaaaaagatacgaaggatgaatacatgaaacgcctagtcgaggcttttgagtcgcgttccatgaacactaacaagtccataacctcatttgagaccgacccagttcgtgtagaggttgttgctcagttgcaacaagtcattgaagatggttcagaggaaggaag

SEQ ID NO: 34392 - DNA, 558 bp, Zea Mays
ttcatgtatgggtggaagatcacataaagtttgaaatgataaattgacattttagtcctggttttatcacagtcatgtttagtatacgatctgaatatgtgaatcgtaaaggtctgttctcaaattgaagttttctacccgactccctaatatgcaccagttcaaagatctatcttatgctaagagtgagatggttttatacttatgctatacccgttcttgtgttgtgaggcatgaaatccttggtataccaaggaagggaagtgtagtgtagcatatttggaccattgatgagtcattgacagcctcggttggtctgatttggttctgttactgggtgatttgcagggcgttcagaactataaaagtttcaagaagacagtagcacgattggaagaggctgctgtatcatgccgtgggggtgaaagagttgaattgttgaaacgttggttaggagcattgcaagatgttgatgctgaaaatggaagttcagatttaaaggtgtctgaagctaatgacccttctggtgaaatggacactttgaaagcacaaactgtg

SEQ ID NO: 34393 - DNA, 330 bp, Zea Mays
gtaattggaggcacgacttggtgtctcgggtgcttgactaccttacggtcccgacggtgtgctcaatttataggacttggggcggtggcttgtgaatttgagttggcgcggtggcggccggagagtgaggagagcactgtcgcgagagctcggtggcatctactgtggcggcctcaccggcgacgaaccagtagtatagagtggtttacggtgactcactgcgatgtggtaaaggcgtcgaggcacgtagcctggccggataatgacgaactccggtgatgccaacgcgattaaccacggcgggacacggcgaccggtctggccagcgac

SEQ ID NO: 34394 - DNA, 319 bp, Zea Mays
tcgcgggtgatcgttgactaagctctaggatgaagtttgtgctcgatttttggtccctagtggggctccaagagttgaattaggtgttagaacaaaatggagcctggattatagggtatagtggtcggtataggatcgccggagtacttcacgctgccgtccgtgggtaaggacctggttgcgtgaaggaggaagaaggcaagggtttaagtgaaaatgtcagagactaagaaaatagtgccctgggctggtctgaggttgttcgaatacccaggggctccgttcgaaagtttcacgcgggcgcggatgtgttttcccg

SEQ ID NO: 34395 - DNA, 547 bp, Zea Mays
attttattcattacaccatcacattacaagcataagactactataggtgggactacacgagagcgttcttcgaggtactagcgagttccttgtctaaggtgtccccaaatgccttgagaagatcatcgaggctggctagagatacatcttcttcgtcggaccagtcatctattctggggggaggtagggctagaggggccttcttcttcttcttctctgtctggcatccctggttagtggtcttcttctggatcttctttctgggggcgagtgtctttagcttcttgtcaaagtctatcttcaaggtccgataggcctcacgggtgttggcttcctcgccttccactatgctgagactctcctggagagatgccttctcttgcttaagctctttgacttgctgctctaggctttccactcgggagtttaggtgggtacagtgggaggagagctcatcggagtgtttgtcgagggtgtggaggtatcagggcatgtagacgatagtgggatcatcttctatgggatctcctcctgacagagcatggag

SEQ ID NO: 34396 - DNA, 361 bp, Zea Mays
cggccggagagaggggagagcactggcgcaagaggtgcgtggctttcaccgcggcaaggttaccggcgatgaacggacatgccaaggcacgttactgcgacgtggtagagcacctaggcactttacaaccgatcaacaggcggccaactccggtgagcttatctgaaccggccgtgagttagggggacgcgacagccggggcgaaacagtggcctaagttcatcctgaatacgatatttcttaccccgagcggttatctctactctgtcgagcacgaattgtggcgcctggcgcgaatccgagcgtggggtcgccggcggcgaggttcactgaaccagaagatcttttcgctactgtacca

SEQ ID NO: 34397 - DNA, 594 bp, Zea Mays
agtgtttgagtccaaagagcagtttattcgtccagtaaccacaggcctgcggccacccaaaaaatctttgcctctgccgacaaatttattatttctttgagggcaccatgtaaactagttcaaggtatgttgctaccgagcttcacaatgatgccacacccttcgaatttccatggattcattttccctcatgcggttatgaatgtgatgtctactcagtgagtaggcaccacgaccggatgtcctatggctatgtcccacccgttgctggcagcgagatcaaattgcggacgtgagttaagcagagaaaaaacagaggcatctctatacgagtgctgggcccttactcaattacttgtttctgaatatctgctcccttctgctcaggacagagcattggcttttatgtattctcttaacacacttacatgtggaccctttcatgctcaataagccagcacaacttgcatgttttattgggctcactgcgggtgttatattaccaacccccagaaggacttgcttgtcctaatgattgtgtccaaactcactcaaatgatgcagatatagggacaattgttattgtgataatgg

SEQ ID NO: 34398 - DNA, 393 bp, Zea Mays
tataaattgagcccgccgttggctccgcaacctgatcacgtaccccagcatccagtatcgcccccaagcttccaaccataagctccaatttcaaatttgccccaactcggttctaaaacaccgcagggtcgagctcactgcggccagcccaattgaggtcagttcatgttgctctgttgcttgttctaacatccctaagctcttctcaaactccccaaccctttagatcgagctaaactgccattggtaactgggaacacacgattctattcgaagtctccgctgtcaccgtggtcaggagcatttgggtagccatccttgcaattgatgtgggggaaaagctcggggtaggactaatttggtgtccgctgcttggaaaccctagccgttggc

SEQ ID NO: 34399 - DNA, 361 bp, Zea Mays
ggcttcgtaagattacaaagagggagagaagaaggaacaacttcgtatgaagagtgacgcgtccagttccgatcgagagaaaaaatcccccctcaatgcatggcgttgttcatctatttataggcgcagagtacaactttagcgaatttacaaccatgccctagaacctatttaaactatcatacatgccgagggcaaagttgtcctttccttcttctatcctgtttactaagcttcgaaggcttcttatggttttattcagcttcttcaagtatgcacacatggtgattgcccgaaacttctgccttcgagtagatgcatatcaacagtttcgatcgaagcctaccttcagcattagtcc

SEQ ID NO: 34400 - DNA, 645 bp, Zea Mays
aagtggtggaggtcaagggatgagaagcaagcgtatgaagcttgatgtagtggctacactacaaatgagtaattctgctagctgggataggaaacacaaggctgaaatgattgcgaatcagcacgtagtcggtcccggtgttgtgatggatggccactgtagaggagagcatcacacgtgggccgaactaccaggttgcagtaataaatggacagcaagagggctggttagagagtggattgatgaaggagaaaaaaatgtgttgattggtgtcgcccagaatgcaggtcctgttagtcaagcttcagctggtggtgtgctggacgcgaggggcagaaaaaatcatggttcagttgcgcccggtacaaaaccagcaccgagatggtgtccacctgggttaagccgtacgcaaaagcgtcgtgtccagcggttgaggactatggaaatgacagaaaagatgaaagaggaggagcgtgacaggtggtttaacgaggataggccaatggttatccctaagaaaacgtggagggagaaacgattggccagggaggaaaaagatgataatagcagcagtggttctgataaagaagaaagcgctgaagcacaaggggacatggatataaacatggtgtttgttttacctac

SEQ ID NO: 34401 - DNA, 282 bp, Zea Mays
gattcttttcgaaagtatggattaaatgactagagttagttttgaagtttgaacttggatttttcttagggaagttcgtcaatatattatggacttgactattcacactgctaacactggtggtttgccagtagtgtcatccttgataagttgatatacagtaattagtcacatttacttctttagtatatgacctatttttaggtgtgagtttctgttgcacatcagcacacttcagtgttggatgagtgtgtcgcttgactactacatcttaggccctgt

SEQ ID NO: 34402 - DNA, 287 bp, Zea Mays
aatggtggaagaccacaagacaggatgggagaatttctgaggctcaagcctcccacgttcgctggatccagcaatcccctcgatgccgacgactggctgcgcgatcaagaggaaattagaagccattggatgccctgaaaatcagcctgttcaattggctgctcctcaactttctgggatgaccctaacatggcgggataccttcagcactatcgtcagggatgctacctgggcagaattcgaaactgctttccgtgagcaccatgtaccccaggggaccgttcagc

SEQ ID NO: 34403 - DNA, 407 bp, Zea Mays
cccccctctaggtgctctcaaatgtccttcaccattagccatgtgttgaaccgctgcttatgttgcttcattacccaatcagccgtatgcccaggattttgctcgtgaagctcattgatgtgttgttggataaatggctctattatcgctagctgatgtaggatgctgtgatgtgcctcaagtactgtattgtaatctagtgggatgaaagatttccgtcccatcctcccgcttccatacaatctaccctcgtgtcgtgacagaggtagacctattgcaacctggtcttttaggatactattgcaaaatggacctctggactcaatggcctcttcggtacagtacccctctatcatggatgcctcgggacgagcataggttgatacatagccattcagtattgacat

SEQ ID NO: 34404 - DNA, 477 bp, Zea Mays
gtcggccggaacgcctgctagctagggatcagatggacagacaggtcatggagcacttgtgcatgcactgactgggaatggagatggtttgcttgcccgcaataatctgcgaaaggcccaaagtcacatgccatccatcgagctccagctccagcgctggatcagaacaagatcctgtgacctcgaccgacctgaacagtgcagtatgctggggcaggggggcattagaaacttgaaactgaaagacgggcccggccgttctctgaatctccggcccaaaaggcctataacccgcaatatataaaagcacataatagcatggtaacactatcaatttcaagactagatcatctcatccgtgtatcctacagaagatatccaatgagcagtcgaggctataacctacaatggctttaagatcttctttccttccaaaaggttgaatctagcagcttacctaccaccatccgttctatt

SEQ ID NO: 34405 - DNA, 332 bp, Zea Mays
accggtgctctacttcggctgagacctaattcaagccctaacaagagtttcccctcaattaatttcactagcggagctctaactcgctctgtccacggtgacagcgggcacaatggacagcatgacgtgttcccgacgatctaaggggtcctagcctaattggtggggtcggggagcatcaggggcacacaaggaattgaaacaaaagagcagagggtatgagtggacctggagtaggatgaccacgacgagattgtaaggtgcggaattttggaccgaattggggagaaccggaattggagcttgctgttgagtaattaggggcacggctt

SEQ ID NO: 34406 - DNA, 624 bp, Zea Mays
catgggttgaagcaggttaattagtttttcttaaccatttctccacttgaattagttaacacacaagtcacttaaaataccatattttaggaggtctaacatggaggcatttacacatggcgtaaaactccataagactacatttgctactgacaccaatagtacctactaacctattattcaccatacgaacacaattactcgccgcctactagtttctaacataatccttacataactcgtaatcccactactaactaacaataaatcacgcacgacaactaccacatcaaccggttaatttatttggacaccgtctgcctagcttgccactagtaccccacattttgactaatgctcaaaaatacatcctttattcgattatacaacagcgacctaagcgtcatgttacccagtgcatacatctttcttcgtcgcgagtataaccatattacggcatacacccgcacacctcaatcaaatatcttacgccaccaccactataatacaccacggcacacacacgcatacgtgtccccactgcattctcatgaccaattttagcacaattaattatgacaatgtttatcgactagtcaagtgaaacactaaccgatccttcgc

SEQ ID NO: 34407 - DNA, 301 bp, Zea Mays
caattccagactgtaacatcaccttgatctgtctttcgatctcatccttcactgccgggggataccgatatggacgaaccttgacaggagaggctcccggtatcaatggaatactatgatcacagtaacgagaaggaggaagaccagaaggaggctcgaacactgtgagaaattcagacaacaatgccaacagaggtgaaggtaatttcaagtccgtcacagactgcgagacaggttccaactgatggacagcaaccactgaacctggagaacaaacagcagacaagccttgcaacaacac

SEQ ID NO: 34408 - DNA, 293 bp, Zea Mays
aagtcttgcaagaggtaaagtataggatataaccatgggtgagataagtaagagaccacgcatgatctaagatgggagattggaggttttagataacgaacatagcgtaatcaccaaggtaagattgagagatgcgaagggtaaaggcaataagaagcaaaagcacaacaaaggatgaggttacaaactcacgagccaaagaagaggatacaaccaagagaaagaaggtatgagacggaagaggggcgattttaaagggcaggtatgagacaaacatcaatgtaggatataga

SEQ ID NO: 34409 - DNA, 332 bp, Zea Mays
gcacatgatgcgtcccaatcataaccgacttggcttggaagaaagcgcctttcgtaccttctagtaggcgcgacgacacgtttgatcgccagatatttttcccgtgtgagaaacgctgcgtaatccacctggaatcgacgagtcgacgtagacgtacacccgtttatcggaatatccatctcaaattctgaccagcgaccacctcagctaatctagatgttctggacacgttcctatacatgctcacacgtatcaaattaaccccagcaaaacagaaagtgcaaagcgcaatttggactagctatctagctgacaaggattccactgttgcg

SEQ ID NO: 34410 - DNA, 431 bp, Zea Mays
atgggggtatcgaataatttataacagaattctacctactaaactgcagctgcttctgtcctccatcttgttctccacgtcttctcttcttatgtgtgtgttcttgtgatcgattgttaacatttggtatcagagggctcgatcttagccattccactctagatcctgctccaccccaccatcacttcactcgtcttcagcgtcgactcggaggtcggagcgatggatataaacacgaaattgatcctggacgaaatggaaaagaagttcgccgccatggatcagaaattggagatgaagttctctgagttggcggggtcacgcgatcagcggatcagtgtcctggaggagatgggcgcggagctgtcagcttggaaacccaaggtcgacaccgccttggatgatgtcaagctggagatccggaaactgaa

SEQ ID NO: 34411 - DNA, 297 bp, Zea Mays
gggggaagggaggcgacggacatggggtgttgtggtgggaaacggaggagccgatgaggggtgggaaggagcaagagaggtggtggactggtggttgacgagcgccggcattttaactcgagaagggagaggggaggggaggacgatggtgacgtgtctgcaagctgaggcgaggaggacggaggagctccaatccatgtgatgatcgaactcgtgatgatctggacctggacgtctgggacacaggagacactattggagccagttgttggaaccttttagccgtggaaaacgtgg

SEQ ID NO: 34412 - DNA, 906 bp, Zea Mays
tcttatctctatgtctaccagccctgacatgattgaagatgaggcatgtgaacatcgtgtccaacgcttgaaaatcagactaaatcgaggtcctctcaaaatcttgccaacattaagcacccttgttgtcgtagcttcgtcaggtagaaacagaagaaaatcttctggcttggtttgatgaatcttcatatcctcggtcttgatgttgaaactgtgagcaacttcctcgatcacctcagaatcagtcacagttggcctggttcccactattgtaacgaagagagccctcctgagatttgcctcttctcgtgccatgtcagcactgaactcaagaatacaggatgaccttgtcccccaacccatctctccctgatcaccaggcctcggatcaggggactggctaatcatcggagctatggcttcatcagacgaggtcagagacgcctgaccaggggcaacgataggcttctttgaacctttttcgtgcttcggccgtcttctctttcttttgttgcggaggcatctatgagactccccctcagcagccatcctaggggaatcctccatcttcgcaacaacctctggtgtgttgatcttaacccacaccaagcgtcgcctacgggggacagcacacgccgaggttgctgacgaggccccgcgctgcaccgagaggcgctgccacacagacccccttgcttgttgtttttccaatctctgccacactgtcttcttgctctgcacttctcgacggcctggacacctgacagcctgatgtccagtcttgaaacacttgaaacagcgcgtgggtcgacggcagacagcagcaaagtggtcggaggagaagcagttgaaacaccgaccccgaagatccacaggggactctcgacgaggccgatgatcacctcg

SEQ ID NO: 34413 - DNA, 301 bp, Zea Mays
gatagaccaatcgttcgtgttgcgaatatataaattacggtttatgttctttgtgtcgtttactatgcaacaagatctgttagctcctgataattgatttgagcgtatgctgtttttgtttttgcgttgtttgaagtgactgcatggttttagatgccataatgtccgcttatgtggtttgtttccctgttatgctggtagcctgatttgtgctagaattattttcaaaatgtgactatttatctcctcaccctcccattcagcttttattggattacactttacagtctatggtgcatcg

SEQ ID NO: 34414 - DNA, 669 bp, Zea Mays
gcaaaccacactattttatgggacgaggcagctctagtcgaaggcaacctcagcaccgaagcctccatagtaactggtatgacgaaaacgacaggacaaggcaccataccgaatggatgaatccatatgagcggaagcacaacttgggcccatgatgacgggaggaaaccatgtcatgtccgtcgagccacggggctgaaccatgggacccgccgcgcattaccacaaggacgttagccatgaacccaccgcagagatgggagtaaatgggcggcaccatactagaagcactacttcgtacgaccaggagaagggggcccaccacaacagtcgaaggactctttctctctttactctctctctctctctaaaagggacaacaatgcaaagtctgtcccttaagatataaaagggaaggctttccttttacacacatacacacaagttgtaacacattccattgcaataatatgatcaacactacattggactagagcttcttcttggaccagtataaaccccatgtcccaagttcttcgttcaagtcctagcgattcaccatttggagtgagtccatgctagtatccccaccaaacacaaatcttattgtcccctggtttccgaaaccacaacagttatcgcgctaggtaggggatcgtgaaagttgcc

SEQ ID NO: 34415 - DNA, 360 bp, Zea Mays
cacatgatctggactgaccctttgtgccacattaactactcctggcgttgagccacagagggtgagtcggtccacttaccactcataacctatggacccctaggcatgcgacccactcatgatctataaagccgaagcctgagtgcgctagccacctccacgccccacaacacgacgagcgtgccgagacccaggctacgacagcaaggggtcgcacggcatagaggcaacaatgatgactctgggacccttcaccgcccacactacatgtcataaaaagtacgaccagggaagcccagacgaccagggcatgcatggataaacacgaccttaccagggtaagacgtcctattttaccac

SEQ ID NO: 34416 - DNA, 557 bp, Zea Mays
ttctacacttttagtaccttgctttaactgctgcagttggtttaaaagatcacgtgcatagtaagatggaacaaatctagccctcatgatccgtttcaaaacatcccaagtttgtggcatgttatgaggatttttttgccatgttctatccaccaaacggaagaaaaatcagtgaattcactagttgaagccctaacacatgcatttttaggaaaatcatgacaagtaaacttttgttcaacagccatcttccaagtaagttaagcatccggatcatatttaccatctaaagagggaatcttaaattttatcttattgaaagcaatgtcattgttatgtacctcatgtggacgctgtccacccataccttgacggttacgacgtagacgtcgctggcctcgatcctcaacttcggtgtcagcagcataatcagcacctgtattttctacgccgtcctcatccccttcgcctcgtcctctatgctgatcatttgtcttcgcgtggagctcatcaaagcgccttagaagagcagcgagactcttgtccacgtgagcaac

SEQ ID NO: 34417 - DNA, 597 bp, Zea Mays
tccaagtgatagttcccattctgaaatccaacaccacatccagataccaccccgtttgctttctccgtgtcctgtttatcagtcagtgagccaagaatcccagttacaaactcgaggtttgcatctgattcaacaagcctcgattcaatcaacctggagtcgtgatgtccctccacaccttcagaacgtgcgggggtaaggacctccttataaacgagatttgcatactgaacattgttcttctatttaagtaagatgcagttatctatatctagttaagttgggtccaaagatccaagactatttactaaacaatacatgaaacataatgaaaagaggccgataacatctatccaatgctcatctgctttctttatcgtatcagccacatgaccactaaacaataggaagctaaaaaaggagccaaaatagataaataaaaggcaaaaatatcttcacctaaaaaccaaaataatcaagtgcattacaagttgttaattgtcatgcattcatcaatgtcagctacggcgtaaggacctccttataaacgatattcttcgtgtatgttgtgccatttatcgttgagttcctttcaac

SEQ ID NO: 34418 - DNA, 279 bp, Zea Mays
ggccggcgatgaccgtcccgcgcctccatgcaccaaccttctctcccaatggcgataaacttacactacagcatagcgaacatctttaataaccccttaccggcgattgatgacgcgaagtctcccagccacggcggcgtgtggttcccgggatccggtgagaaattgccatggattaacgccctccttcatcagactggtgatcgtagcgggttcaacgcatcctatcatccctccctgctcatctaccgattgtcaatcgacagtgaagcgagtttc

SEQ ID NO: 34419 - DNA, 317 bp, Zea Mays
tggtgatgtgtcgtctcgaccatccctgggtcgggccactagtggaggctgcagctgactcaactcgggtggcgcgacttcgagtcgggatgtcgtggtcccggtcatactcctcccggtgccttagctcactttcgtgccgtcggtcgcgtgaagcgatgatggagctccgcgcatatcgtcggctattgatggcgtggcgtaggtcactcgggggatgagcgatgggcagaaggtgattaactgctcgagtaagcagccgccggtagccatctgtgtctggagtttgtgggaggccatcaactatctggtccaac

SEQ ID NO: 34420 - DNA, 280 bp, Zea Mays
actttcgcagatgtgctatcccccttggccattgcccgagaggaagcggatgcatgaaagaaaaagtaagcgaaggctaagcatgagttaaagtataagaagaaagaggccactaatgcagctaataaggcaaagtctgccctgacgaaggttttgtttttaagaaaggaactagagagtgcaagggtagagcaatagaggacggcgagggagctttctgagcaccgacttcgtgcggatagcttcaaacaaagtgtgcaagtccatgtgtgggtggtct

SEQ ID NO: 34421 - DNA, 576 bp, Zea Mays
tagggatcgcaaatgatgttaaggtggtcattttcaactttggaggacaggtgagagaacttgcttaattctagtatctgattgatgcctgcccacaacacatttgtgttcaattgatttgcctatttccggactagtacaggtcaatctgaatcaactagtaatcacagataacgttcgtggtatatcgctactctatgatcagattttgcatgtgttgatgatgcataagcatcactatatattatttttctaacgcaaatggcaggagctctgcctgtcacttaatagggtgagttttatatacaagcatcaacttatattatacatgccacagtagttgaacttaatatcattattaaatttgggtactgatagttccattccatgtttcgacacaaggtagactatccaggaaaaaactggtcctcattttgtttaagttatttaaaaatattttctatctgtatgtaattgttctaattaggacaattgtacacattaataacatcgattttttttgctattttcttgtctagcctgccggatgggaactgaagaaagagtggttgcctg

SEQ ID NO: 34422 - DNA, 323 bp, Zea Mays
aaaactgtgaccgttggatggagatttggcggccttagtttagtactggttcggttagaggtagatgtaatctgatccgtgggttgcgaatcgtgtggttcccgtgcgatgataccccttcgcccgaaacaatttgctaaagagccctcgtattttaatggattcaacctgcagtccactgggactgttcacagagtcttaggaattttctgtactagccccctgaggtttccaggaattgacgctcgatccagagcccgtttaaaatgtataaatgaattagtaaatgtatttttaatacaaaaataattcctagaacttag

SEQ ID NO: 34423 - DNA, 752 bp, Zea Mays
ctcttcctgcttcatggtttcacctgctgccttctccttcctcgattgccgcagctgctatgggaataccatctttctacaaatgggtcgtcagcaagtacccaagcatcatctcccctgtgaaggacgaaccagaggagtgccctgatggcatcatctacgacaacctctacctcgacatgaattgcatcatccattgctgcttccacccacaggaccagctaacgcatgcagacatagatgtatccacacacctcaatccatgcgaatctggacggtataaatgtatgtgttgactgactgacacaccgttgcaggtgcgccctccgacgacggccaatgaggtgttcgagtccatgttcgagtacatggaccgcttgttccgcatcgtcaggccaacaagtctgctgtacttggcagtaggttcgtgcatagattgttacacatcaaactgaactgaattccgtgtttggtttgaggaacaaattctcacctctcactttttttatttggtttgtgaaatggaatgaaatgagttgatccatcatcatttcatttcttatatactaataattagtaactaataatatgaggaatgagtttattctattaccgcggtgtacattaacaaccagcaacaagtgttaaggatgatgtttgttaccttcagttatttgagcaacttagttacacatgcatgcacttccctatctgttccatctgcagacggcgttgctccttttgccaaaatg

SEQ ID NO: 34424 - DNA, 492 bp, Zea Mays
cgagtctgggagcacaaggtcgtgggctgtgggttttataggccggcgagggggaagctagagtgcctggcagggagtaatgggggaaggggagaaaacagccggtttgaagaagattgaaggccattaatggttaattagacgctgttaatagagggaggccgctcctcttgattcctcatagaaacggacgagcaagaaacttcagacattaatggtgtcgaagaaaggaagagtaacggctggacaggggagaggaaggggaagagctaggggatggtggctggcgctccaatcaaacagggaaacgagcgaacgggtctcagtggcacgagctggagaacaacggctcggaagcacaagcggcacacacaagccagacagaacagaggagctgtacaaaggttgaagacgagctgacctagggccccacaggtaagagagtgaaggaggagagtggagtggagcacggttaggctaattgggctggcg

SEQ ID NO: 34425 - DNA, 409 bp, Zea Mays
ccgacagacactatccactaaccgtttgaaaaactcaacttacttctcgcttgccattacatcactccccaatcacatgaccatcatgagcatccttcacatgattatataatagcgacctaagcgtcatgttacacaatacatacatctttcctcgtcgcgagtataaccatattacggcatatacctgcacacctcaaacaatatcttacgccaccaccactataatacaccccggtccccacacacatacgtgtccccatattacgcacaagacatcaacaacatagtgactccaacaggactaatcatacccttatttgcatcgactatcatcatcaccaaatcacatgcataaaaccaatgcacttctcacataaacatctatcgatgtattccctaaaacatg

SEQ ID NO: 34426 - DNA, 340 bp, Zea Mays
actattgacctaaagcagtagagcctcatccaattgaaaagcagcatcactagcagcccctccacctgactcagattcttcttcctcatcgacttctccttgagtttgtactggctgttcaactggatgatcactaccatcttcatcatcatgataactaccatcttcttctccaacatcttgagtattccttggacgcttcctagttcaaacaaaggtccttggatgaggctgagaagaagaggcccccctaaccagaccaccagcagccctaggtacattttggccccggagaccctctgttgcactcaatgcttcatcaacagcagcccaaagatta

SEQ ID NO: 34427 - DNA, 368 bp, Zea Mays
gtgaggcgggagcgcaccacccgttcaggctcgggcaccaccgctccaggtagcagctcagacagctccggggctgaggtcggtggcacgcctacccatttcttcaagagccccacatggaacacatcatgaatcttggcctgtggtggtagggcgaggcggaccactacgtcattgatgatttcggtgacgcaatagggcccaaagaacctgggctacaacttccccttctgtgccagggacatggaagccactagccggttgcggagatgcaaaaggacccagtcccccacgttgtagaccaccacctggtgcttgttgtcgtagaaccgtatctgcacagcctgagcctgctccaggcgatggcg

SEQ ID NO: 34428 - DNA, 679 bp, Zea Mays
acatccatgacaagaatgaaaagcataggggataggggatctccctgtcttagtccccttctatgctgaattcttttcccgggccagccatttagaataacctgagtagaggaggaaccaagcatcccacaaatgatgtctctccaaagatctctgaaacccatatgcttcataacttcaatcaagaaagcctaggaaatagaatcaaaggctttagaaatatccagcttaaaaaggaggcgtgccttgctttgggaatgaaaaagtcttgcagtttgttgcacaagcataaaattatcttgtatgaatttgcctttgatgaaagcactttgaataggagtcaccatattatttaacttttttcccaatctgttggcaagaattttggtgactaatttggcaaagctgtgaaccaaactaattggtttgaaatccttgacctgatcagccccctccacattaggaaccatagtgatataagaactattaagtttgtacaaattcaagaagtttctattccataaagctgccacagaattcatcacctcttttttaatgatattccaacaaactttatagaatctccctgtgaaaccatcgggacctggagccttgtcagaaggtatggtcttgatagtttcccatatttccagttcagaaacaggcagctcaagatcag

SEQ ID NO: 34429 - DNA, 400 bp, Zea Mays
gaaaggcgtcagtaacggatagggtggtttaccgcaccatcacgtcacttgtgcatgacacggtgagtgggtcgtttcgcgtctcgtcaagccagccacgccgagcgaagccatgataactcctatttttaccgcaacgccaccataactgcctcactccaggtaaaaaccaaaattcactccaactcctcgcgtagagtgaggggtgggctgagcaagctcctagagattcgcaagtcatgtgaccggcccataggtcatttgcttgattccacatctaaggtcgtacctcacattctcctgtggcaacgcggctgacggggtggccacggccccatccgaccgaccagattgacaggagggccaatacgagatagaataaggaaggacttaataagat

SEQ ID NO: 34430 - DNA, 442 bp, Zea Mays
attgatagtgacgatttggcgtacaacttcatatgaaattacaatcatgccctcatttcctatatatacaaactacaaaatccactaagggcattgtcgtctttttccttatagacgtgttgaacaagcattctggatttcccttcatctggccagtcaaagcctccatccaaccggtcaatagcttcgtattcgaatcgtaagactgaagtttccaacttcatcttcgtgcccgttgtcaagacgaaggtagctctaccatttcttcggctgaaataaacttagagaacgatcaatatcttagtgttttgaggaccttcggcaagagtaggctcccaatagccggtagctttacttggaagttgatgggcctagaggccgaatactctaaaacgcccgaaatgtgagttaaacatccaaagacaagcaccatgaaacagac

SEQ ID NO: 34431 - DNA, 507 bp, Zea Mays
caccaccctatgtgatgagttgtgcaaactaaacctggaagttgtttcctcgggtgctttaaattatatctcggtggagcccacattgcaagagcaaatagtcagggcacagattgaagacaagggtgttcaggtcattaaggaaatgatcaagcagaaggcagaaaaatacaaatgcttccggcaggacagcaaaggaatcctatggtttggagatcgattggttgttcccaaggaccctgagctcagaaagaagatattggatgaagctcacctttcaaaattctccatacacccgggcagcaataagatgtatcaggatctcagatccttatactggtggaccagaatgaagagggaaattgccaagtacatatccgaatgtgacacctgctagagaatcaaggccagtcatttgaaggtagcaggccctttgcaaccccttcccataccatcttggaaatgggaggacatctgtatggattttatcgtgggattgcccaatac

SEQ ID NO: 34432 - DNA, 337 bp, Zea Mays
cggcggcccggcaacacagggaaacaggggagcgccctcgcgcgcccacgtgctctctggcgtatttgcggaaaaaacctcagggtttgcactaattggaatccggtttctttactgttgcccagggtcactgacaacttacggacaggtccctctactttcttttcttccccacgagtacccttggccatggcgtgcacacagatcaaccctggtgcaacccgtactggtcatggcgggtgttgaatactacggctagcgatcgggaaggcattagcgactaacagggacctcagaacacccaacaatttggcacgaacaccctgagaacggcttg

SEQ ID NO: 34433 - DNA, 512 bp, Zea Mays
cggtctcgtctcgctcccggaagcgggttggtggaatgggtggagcggaaatgggagcgggagggggaacagtggaagcgggactggtggaggtggtgggtatggcggaagtgatggatggctcgagagcgactggagctggcgaagtgggaggtggagtagtagctctggtgggtgtagagggagtggaggtgcgaggccgagacgcgaggtgacgaaccctgtatgcaatctggtctaacgagatctacagctggccacctcgctctgcctgctctgctgctactgccactgcaagtgctgctcgggttgctctatccatacgccgcttcttgcggcatttctgctgcttgaggtaaaatgtcttgcccttgacctgcctgaaggggcaaggagggtcctcgtcgtctcctccccctggtgctgacacattcttcgtgcgcaccatcctgacctgagtgctgcataagtgagtgaaagactaagcacaagtagacaacaactgataagat

SEQ ID NO: 34434 - DNA, 433 bp, Zea Mays
ccagcctgggggcctcgcgcgccttgccgtgtttgcggccatgtgtcgaggaggactcccccttcttgaaaccctggcaggcctcccactgctcccgagtgagatgtagcttctcgctgatggtgataggcctagcgagagcctgtggttcgtcgccggcgacgaccttgagatgacatatcgcctcttcgatcatcatcgtggagaggtctagcagagattcgatcgagcgaccgatctgtttgtacttttcggggatgcaacagaagagcttctcaacagctctctcctcatcgtaggtgtcatcgttaaactgcaccatcttttgcgacagagtgttgaggcggagagcaaagtcatcaacatccttacctggcttgaatgccaggctctctcattccttgcgaagtgcttgcagtgtggtcttgtgggc

SEQ ID NO: 34435 - DNA, 519 bp, Zea Mays
aaacaatctgagctctaaatcggcctaccaacggagacagtgcgaactatggatgaacaaacgtgtccccagcgatctagggcaatctagtttaattcaatgggtcagggagcatcagtggcaagtaagaatgctaaaacaagagagcagagggtatgatcggacctgaaacgagctagccacggcgaagactctttcacggtggcggcaaacagatttgggggaactgagcaattcgtgggctcaggtgagtaattggaggtacgagcgggtggattggatgctggaatacctaatggagccgagggggtgctcaatttataggactcttgatcggtggctcgtgaatttgaaggagacgcgcggcggccggagagggggaagagtactggcgcaagcgattggtggcatttaccgtggcgggctcaccttagatgaccagacgtgctagagcgagtcactacaacgaagtacagcgtctaggcacgtgtcatccgagctgcaaacgactaactccgg

SEQ ID NO: 34436 - DNA, 710 bp, Zea Mays
gatcttccgagatgtttgcaatgttgtctttgcgatgcattgccagacgccacctcttgctcacaggtgagtccactttccagccaagcagtacacagtgttttttatgcaattgatgcttttgtggttgcttttccatggaactgtttaacatcgttaatctatctatgttttatgtgaaaacaaaatagatgcaagtttgccttttatacattgaacataacattgcatctatgtcatactcacagcaatgttatactggatcaattaacaaagtgccaaacttgcaagttgaatgatgtaacatagaaaagcatgtagaatcagctcatgtttgctctatagccggcatcttggtttgcaaactaattgctaatgcatgatactttttcacatccttgggtgttgttcttgatcgttttccttgatctaaggcattcaggactatctttgttcagttgtagtttgcaacagataattctatgttttcttttttgtcgttattgtactgtttgaagttgtaccatcaggaaaactgctatgccaagtttcattttagatctctatgacaaaaaatataattcatttgcatttgcagggacctaaaggtagaaaatgttcttgctgctgatggggcatggaaactatgtgattttggtagtgtatcgacaaatcataagtgctttgataaacctgaggagatgggcatt

SEQ ID NO: 34437 - DNA, 996 bp, Zea Mays
aactctaaggttcttgaatatccgaataggcatattgtcacttatactaatcaaagcaaatgcaattgccagcttctcactatgccgactaagagcaccctccttctcttcttcttcgatgtcaagcaaaacttccttcatgtctgggatgtaaccctcctccaatctaattctagtatcaatctcataccattttgacaaaatatcttttatgcgaggatgagagagatctccaacaatgaattgatgaataactccattaacctccacagtgctacaaccaggtgtcttgtcaactcccttttcacgcattaggtgcctgatttccctagcagaagcatgcctacctgatgcagcataaatgttagatagaagtacataagcgccacttttgtcaggttccaacaagatccaatgcttggcaacatactcggcgaattccacattcttgtgaaatctacaaccagccatcagagctccccagatcaaggcatcgggttccatgggcattttctgaatcatctctttggcctcataaagaaagccatttcgtgccaggaggtctaccatgcatccgtagtgctcaatctttggtttaatgccatactttctcaccatcgaatcgaaaagctctcggcccttgtcaaccaaccctgcatgtgtgcacgcacacaacacaccaatgaaggcaatgtcatccggtctgatacctgagctctccatctgagcgaagagcattacagcctccgaacctcgtccgtgcattgccagtccttttatcatagtagtccaagccagcacattcttgtactgcattctttcaaaaacgtccattgcgagctgcacctcaccacacttggaatacatatcaaccaaagcagtgccaaaaaacaggttgatcttaatgccatgagccttgaggtaaccatgcacccacttcccctgctccagtgccccgtgctgtgcacaagctgcgagcacccccacgagcactgt

SEQ ID NO: 34438 - DNA, 284 bp, Zea Mays
ctcttgaatgacgatggtttcggaggcctacttactctgtgtcttgtgcgcgcaagaacacatagtcagaaaaaacagaacgcagcgtcttatatagacgcacacgagaatttgaggagatgctgtcttatatagacgcacatgagaatttgaggagatgccatcatgtataactgcagtcataaactagtcatcaaaatgactgtgattagtaactccaagacataaaaatgttcgttactagtaagtcatcaaaatgtctgttactagtaacttatcattca

SEQ ID NO: 34439 - DNA, 406 bp, Zea Mays
gccgttcccgtacgcagcacatcgatcgatctgattgctacgctggacagtcagctgaaccaacgccaaaagggggaaaaaaaagaagaagaagaagagaagagaatctgcagccgccggcaggcaggcagacaccagcagcagtagcccccaccggccaccggagcacagaaaggtgggtggtttcaaccgtcctcctacctatctatccaagagacgggggggaccagggccacgcgcaagcagccaagccaagccatcatacgctcataacaggttgcccccagattatcctgattccctcggcgaattatgtgcaggcagtcggcagatggtgcaatccaatcccctcttccatgtcatgtcgtgtacagtacagccagtgcacaggcggacaggcctcacc

SEQ ID NO: 34440 - DNA, 296 bp, Zea Mays
aactttggctggaatatgcaatattgtatcatcactcaacaaactacaatattagaagtttaatacaccataaatcacacttcacaagtttaaaagttggcacaaacacataagttcttttaaaataccaacaacttacactatggcaacactttttctatcaacattcatcaatcgtcgaccccaaacatgtggatacataggacaagagggagtaccctgtacggttgtatgtaataggctaacatgataagatcaaagattatacaatcaagtcctaatcaacctgaccatca

SEQ ID NO: 34441 - DNA, 342 bp, Zea Mays
gaatccgtcagttgagaaggtgaagcacaagtcggctaggatgaggatcttcaggtcgtcaaacagtgagtagcaccattgaacagtaatggagtcggggagatcagctctgcattctgtaagttggtgaaggtgaaagtgaggaggaactagtccgaggccaaattgctgggcaactgtcacgggctggtaagattcataaccaggcttgatgatcctgttagaagtactcatgccaactgggaggaaaccaggttgggtcatgagtgagtataggtgttgagtgtcactgtaatcggtagaactatccacaacctaaaagaggtcgggttctcaaactca

SEQ ID NO: 34442 - DNA, 428 bp, Zea Mays
accgcagaagaagtagcattcgacatgcgtgtttcatgattctggtttggaggcgcatcgttcttgttacgacaaaaaagaggggaaacagagtctttcatccaaacctttcctcttgtttggtgtgttgtccatgcctgcacttgcactgcacgtagttactgcactgggccgcacggcctgatgcggcgcagttaaagccacgccatcagagtccggagctggggagtggtggatgaatcggtgcgcggttggtggtttcgctcatgtttccctgtccgtcgtcctccttgcttgcctggttctttccgtggggggaaaggaagaaatcaggcgtgctttgtcctgtgatccaaccacgtctctgtctccctttgcttcctatggtatggtaccgtaccgctgctttgttcctttctctgttcctg

SEQ ID NO: 34443 - DNA, 312 bp, Zea Mays
cctcgatctagccgaagacgggatcattccatccccatccgtcgacgcctcccacttcacgacatctcgccaacattgtgcttcgacaccacctttcgccggcggtgctcttcggccatcgccccagccaggggagcagacacttcacgcacttcaggctgcggcaaagacttcgccgcggccacatccaatgcagcaaaataatctaaatcttcatccggagactccttaatccacgaaaacgggctcccaaaatcacccccgtttgatgaccaagactcagtttcagaaccagacaaatttccactaaca

SEQ ID NO: 34444 - DNA, 308 bp, Zea Mays
cacactgtcggagctgaggtttcactgagtgctgacttgggtgcgagctctaatcctcctttggggctcgagtctgctctcaatattgcttctgcagtacccgccgtccgatacgtgtcggtgcctccggctttgggatttcctttgttcctttctaaccttcaggtgagctgacttttgccctgctttacttgttgacaaatagattcctttgctaattcttgtatttgcaaaatattctgagctctgtgtcggctcagttgaggtcttgtggtgtctctgttcccgatcaggttttgtccttgctg

SEQ ID NO: 34445 - DNA, 348 bp, Zea Mays
gcagtggtcagttactgagcaagagaaagaagagcagcaatacttgtttgctatccaggatcatcctcgactgtggaaaattgggggttgttttccctgtacagcacgatatgagtataacaatatggtattggttgtactggtgctcaacgggattgtggatttagtgagggctgcttggatacaactgaaggctatgtgcttaaggagaaatttccacatgctcttgcttgagggcaagcaagttttgcagcaggggaagatgtcatgactgctatggtcgctgacgaggaagtagaagctattagtgtatagagattctgtaatggtgtgatgggctttcaagcc

SEQ ID NO: 34446 - DNA, 353 bp, Zea Mays
caaagtttgagacatgaagagagtgtagccactcacggaccgtctggctgaggacaccagactgtccagtgcaccagggaacaatagcccaatggctagttcctggtggcaccgtggaggagagacaccagactgtctggtgcaaggctaacacgaggcaacgatcatctgcaacggtgaatccaatggctagtggagcaccggatagagagggaactctgccttgcttgaggtcggcctcgaccttagagaaaactacacctcgctcgacctcggctttgaccaactgcctcggcaacaactccccacgaatcctataggaagccactccgacaactgtactaacccctccc

SEQ ID NO: 34447 - DNA, 1098 bp, Zea Mays
gtgatcaggcgtgtcaaaggtgatgggtaggtacatgtgccctagtgagtactctccctaacctgttatgatgccaaataagggattgtttgactcttgaagttatgcaatggagatcccaagttcctaaagtgtcttcaggaaagtgacggtgagactgcttccatcatcgagcaacaccctcttgactcggctcctgtagaccactgggctaacaagtaatggatacttgcctaggtgatcaaacttgagccattggtcagctcagctgaaggagatcggaatctcagaccaatggtacgacgttggtgggtcggtcatagctaccaggacttagcggtcagacaactcctgctaccttttgttctctctggagtcgtggtctctaaaaattaagttgaccactctatcaatcttagggaacaataagatattgtcttgccatagtggtggttgtggttgtgggttatggttctgccttgaggtggtggtggtagctctgggaatagtcgaccatggccaattgagttcttgaactccttacagttacataggttatggcacatctccttgtggtaggtacacgagcaatcgaggatctcatctagtgatctcatgttgttgttgttgccatgagggggaccatgctaccttgcgggtggcagtcccatggcattgacttcttccctcaacctcttgtcatgcatcggtcttgccgtagggcatcttatttattcatggacatgtcgttttcgctagtcgatgaggtcgtgggctcgtttgttggcagtggtgtatatgtcggtgtcattgatgacgagctcatcacggaagtagagggtggttctggcaccgtagccatggtgaccacattagtagacttggtgatcacgatagcttcagaaagcttggagatcttgggtaggcatgatccgcatgagcatgaatccacgtgggatgcagcgctctgggctctgacgcaatgtcaccagcccaccaaatggcctttgagggtaatgatgatgacgagccctaattggagtctggcaggggcggtcttccctttgtcgacttatagtggttgtcgtggtgctggtg

SEQ ID NO: 34448 - DNA, 715 bp, Zea Mays
tggagatgatcttgagaggcaaagtatcaaatattggtgctcctgttgcatattctgcttggaatctgccaccttctaagtcctttttcaattttgtgtccaatcctcctgttggtgatagtggtttgggtcttaaagtgcgaccctctttcgaagatgttgaggtcctagatgcttcacttggtgatcttcccgatgatgagaggcaagttcacttcgagatgcctccgagtttaggtgatgcagagataagtgctatgctggacatgttggcttgggattcttctgactcgatccctgctgaaacaatggctgttgcaactatcccagagcttgaaaaaaccgtggacacccaaaatcctgagggtactcgcccgaaacgtctctgccaggtcagtcatccaactgcacctaccgaggggaagaagaagagacagcttcgacgagtgtcgtgtttggaccaggatgctggcccttctgctcctgccgctgaagaagtaccggtggaaatctttactggagctgaacccaatgggtgtgaccctattgatgctgatcccgatgggtgtgaccctactgatgcttaccctaatgggtgtgaccctaccagagctgatcccaatgggtgtgaccctgctagagctgatcccaatgggtgtgaccctgcgtcgtttattgtccgtattgttgacgaggacgaagaagaagaagagga

SEQ ID NO: 34449 - DNA, 459 bp, Zea Mays
ctgatgtacaaatattccctagactcagtgatcatcgcccacggatggcgggttgatttaagaaaagccgaggggctcatatgcaaaagatcatggccgaaagggtatcggacgaccctggccgatcgatcgcgcaccaaccgcccagattagatcttcaaacacgccgaaccggtatcctatcctggccatcggatcgccatccaatgattcgtattttaagtaccagagatcaacctgaaccatccgatcgacatcaaccggtcgcgggcaaaatgctacccagatttaatctaacggcccgcacatattctcccatcccactctcatctctcccctcaccagagcgtaaggcggcggcgcccccaagctgagtggtggcgccatggccggagcttgccgagagacgaccccgatgcccaacttcgatttaaacgcatgctacgcagagcggagagg

SEQ ID NO: 34450 - DNA, 303 bp, Zea Mays
gctctccttccggtgtagtggccacttgagtgtaataaattcgcccagtcttcttgacatttttgcccgctgaattattagccatgttccctttgccttgattggagctcccagagttctgctgattgttggacttattctgcctcggatatggacagtctttgataaaatgaccagacttcccacagttgaagcaaccagtagaggaagtaagaagggcggggaaacaagcaccaggggcactcggctgatttgtagaagtgggggcagtggtaggacgaatgaaaacaggctgtttgaacg

SEQ ID NO: 34451 - DNA, 549 bp, Zea Mays
cgagggatgaacttaggcactgttactgctcagttcgctgtacccacttgcacaacgacgtggctggacggtcatcaccatggtggtcgccgttcatcatgattgtgccacgctgtgacgatttcaccacgtagctatgaccgtggaaagcttggaattaccatccttgaacccttgtatcagcgagggccacgatagatagctccggtgactcattctctcatcaccgtgggctcttctccattcaaattcgtcgtactcgcagtcgccctctataaattgagtgttcggcctgctctgctaacttatcatgaactcaaagcaccattcctcactgccgattagccaccgtagtgctcgaatttggattttcccccaaattggtcatctgcaccgccatgagacaccgcgccgtggccagccacccacaggttcgttcgtgtccttcttgtttgtgtttctacaccctcttgtgcatgtgatgctcatcggctcaaccaaatgaactctaccacaccgtagcatcatgagcgtgacagtattgtctgg

SEQ ID NO: 34452 - DNA, 394 bp, Zea Mays
caccttcgcaggggaagcccgctgtcctcgtgccgtggtagcggcggtggatgtaggcaagccggtgacgacgagtagagtcagggggtgcgagcagtggacgagcggaacgggtgggtgcagatagattgaactgggactaggagaattggcacgccttgttatatagagcttagctagccattgtcagttgccatgcacgcgaatagatagagaccgatagatactagcatcgatctagacacggggacatgcatatgctagctccacgagccctatgcatgcatgagtattgagtagtatagtctctttcggacccaggagtgaaacttaaaaagttatacatggattcattagtctaattaagtttaacgggccaaagcccaaataaaac

SEQ ID NO: 34453 - DNA, 336 bp, Zea Mays
agaaaatcaactcgtaatgagttggtttttaagtttgtgaaaatacttcccctccttatataatgaagaagacttctcctcgttttgtgcgcgtttcttgcttttcttgcatttcttttgcaattgcccgatcgatagtatttgtgtttaaagtaaccgagtccttttgagccatctcggtgttttagatataacggtcgagtgattacgagtgacgtcggcattttagaagtaacggccgagttatactgagccatgttggcgttttagaaataacagccgagtgaagaccagtgacatcagcgctttagccgagttatattgagccatgtcggt

SEQ ID NO: 34454 - DNA, 719 bp, Zea Mays
tgatgaggatgaagaggaggaagaagaagagattctgttgatccgcaagaacatccgtcactatggagacaatgacgggggcagcgatattccctcccaagttctatcggcacttgtcagcctttaggggatttgaatatcggactttgatcaagcgctggaagaggtcattcctgaagacatcttatcagagcctcctgaggctgacattccaaccatctgttcagaggtcccagatggcggactttcgctgcttgattctgccgggcaagaggtaacccgggtggtgtctcgtgcatcgtcgaccttggagggcagtcttctatgcaaaaacactggtccaagccatccaactcttatggaggtggctgaggggccttcagccttagaggtggctgctgcagaagacccagcccccgagggtggcgctagtagtgacccagcccccgagggtggcgttggtggtaatctaggccccgagggtggcactggtggtaatccagcccccgagagtgttgaagcatgctctctctctactgcttccatggacgtccatattggatcgcccccagtccggtccgaggaggtgacggtgacacgcgtttctacggctttcactggtcaagtcgctatagaggtcagcgagccagatgtcaggagcctactgccagctggtggggttgaagtcaccccgagttgtgctcttgagattgttcctg

SEQ ID NO: 34455 - DNA, 326 bp, Zea Mays
gttcaggttatcaaggaaatgatcaagcagaaagcagaaaaatacaagtgcttccgtcaggactgcaaaggaattctctggtttggagatctattggttgttcccaaggtccttgagctcagaaagaaggtattggatgaagctcacctttcaaaattctccatgcaccccggcaacaagatgtatcatgatctcagatccttatactggtggaccagaatgaagagggaaattgccaagtacatatccgaatgtgacacctgccagagaatcaaggccagtcatttgaaggcagcaggccctttgcaaccccttcccataccatc

SEQ ID NO: 34456 - DNA, 355 bp, Zea Mays
cgcgattcatgccctgtgtgaagtggataactgcgggaggtaaaaagatctcgcgcgggggatgagcttgggcactattactcctcactcgccatacccacttgccggcgacgtggccgagcgaccatcaccgaggtcgacgtcattatagataaccgaacttgccgtgtcattacgcgcacctgcatgactgtctaagattcttaggacaaggacatctgtaggtgggcctaataccttgggaagttccgtcacagatccggagccacaccacctgttgtgggaattaaacttagtacaaacattcatatagcatttgctaataatcaacaccgctctacgcacaacccaacca

SEQ ID NO: 34457 - DNA, 356 bp, Zea Mays
cggcccccatgcagatggcaggtttattatgaaatactctgaggactctttagcaatattaccatggagaagggttatcgttaagtcctggctgctcgatttactacgcacggcctagattagacctgattctccctgaactggtatccaataatgaccgcgcgatcaaagatcgacggtccacccccacgatctaacctatgcccttggatttcgaactggtggtcctattttaatgggccgaaacggtgtaaaccctaacccctcatctcacacacccgctcaagatccaacggatctaagcatgtcctcaacctcaccttgctagagcgcggcagcgccatgttccgcggtgg

SEQ ID NO: 34458 - DNA, 345 bp, Zea Mays
acgggaaaattatgacttggccaggttgaagactttgtcacgaagggttagggagatggagagcctaggctattttcttgctagatacaggcgcgctgcgagagcgaagactacgtcaaggccgaacaacgaagtattggtcttcgagtggttgtttcttgatggtcttcacttgtcgtgtcatgattttttacttgaagtgctagagaagtttaaggttcaaattcatcagcttactctgaatgttatggtggctttaatcaattttttctaggcgacgaccacgtttggcaaaggcccatttgctgaggtcttcacaaaacactattacttgcactagtagaa

SEQ ID NO: 34459 - DNA, 337 bp, Zea Mays
ttcggagagcccagatgtagacgctaagcctaatgatggcattaggagttagctgatgaagataaatcccaaacttctccaaaacatccgcaatcatctcatcaaaggaaatcttaatcctgctttaaagaagcttttaaagactaccacctcatccttctctggcttcggagtaatttcctctctgccaaagcgaatcagcttctttttggcttcactgaaatagcctaacttcatcaacttaggcatatcatcttcggtaacagtggacctcccaaactccaggtggctgggtttagatggcagggcactgtaatcatcttcagattcaccttcc

SEQ ID NO: 34460 - DNA, 559 bp, Zea Mays
ctggattatagatcaacaactttgttacagatgaattaacacgttgtcacataaaaattagagaatgaaggcctctaactcgctctgccaggcgctctgatgggggttctgatggtacagtggcatgacaaagaccagcagatgcagtgcacctcaccgccgatgaccccgcgccgcgatcctcaccagcgctacgattcgtgcccgattgcgcacagataatgacccagggtaaaagatcttggtgctgggatgagctcggacccggccactggattattcaccgtacccacttgttgtacgaccaaccgaggtgtcctcgccggagatcgccgccttcgtagccgtgccacgttcttaggaatgttaccacgtcgcagtgaaccgtaagagggagtctgtccattgccgggagctttgcctcagtgaaagccaagttagcgctcgctggtgattccccccctctctggccgcccgcgtgtcttccccaaattggacgccaccactgttgatctctataaattgagcgctcagtgtgctccattaggttgttacgcac

SEQ ID NO: 34461 - DNA, 433 bp, Zea Mays
gggcggttgtgctgctggtgtggaggacgagcagaggtgccagaggagaccgacgacttgggaccgttggcctcgctgggtgcagaggcaacaacaagagctgctgcccgaggtgcgacgaaggtgaagatcgagcgcttgaaaacgctcgttgaggccgcagatgatattgagaacaagagttctgttggagatgggctcgcggagggcacagaggtcctcgacaagttttttgtagcaacgacaatactcagcagcaggaagatcaccctgagaaaaggagcgaaattcttggtcggcgttgagggcgcgcgtcatgagattctcgaggaactaagactcaatggtgatctatagaacgcgagcaggtgcaccgcgctgggagatcgtgttggcgaggtcgtcagagatggtgtcgaggatccaagtgcgg

SEQ ID NO: 34462 - DNA, 407 bp, Zea Mays
tgggggcataaagcggtcggcaatgtcagttctcggctgggctggctcgtaaggtgctgcacaggatggagatggcccaggatagcagggtgttgtcgtctgaggaagtgtggctgctgcgcaaattgaagcagcattgcattgtccttgcttctttggaaaggacagttgcacgtttaagatcccgggtccattatttgagggaaggagatgccaacactaaatttttccacttgcaggctcactaccgcaagaagaggaattttatctcccatttggaggatgagggaaggatagtcaccagccatgagcaaatgcaggaagttctggatgatttcttttccaaccttttgggttctattgtccagaggccttttactcttgatctggttagttgccatagaggt

SEQ ID NO: 34463 - DNA, 330 bp, Zea Mays
tttgtctacactataactgagaaggaataaaatggatcaacaccactgtatcagcccagtttgttgtggaagacaataaaaagcaatacgacccattaaaatgcaaagggtgccaaaaagatatccacccattgacagaaatactgagtatgcatgcatgctccgatatctattgttactaccatatatatttccacatcacatagatacttttcagcaatagctaacaattagaaattccacactcatacgtgatattagaagcttccttgggctgccctttgttgtcggatggtataacatgcaaagcacggctagcaaaagaagtaa

SEQ ID NO: 34464 - DNA, 632 bp, Zea Mays
ttgggcttctgtaactgaagattttttctctgttggctggacttcactagagtgctcgagttgtaacagagatagagtgtatgaccaaggatttagtgacctcatcactactgcgaaatatttagttttggactgttgtatggcctgtgagcagtaaaaatctcatctgctagctctgtggtggagtgcactggacaacaaaattctgaaagttttacccatgcagataatgtcaagttggatttatgtgagcctgtcctaggtggagttcttatctgccttctattgtttatgtaaaatgaaccaaattaagtgttttggctgcacccatgaacctgtgtggcactgtgattgtatgccacgtgtggagtccatgcagcgctagcaccatatagaccactctccactgcctgcgtggtgtgctcatggctgtttgctccctcgttcagccaccttagggtttggttttgtgaattttttcccctactcttgagctccaaatttgtggtcatcgtgtgagtgatgtggcagtgttcaggcctaggtaacctccctttcaaacccccaaatctgatttgctcttgtgctgtgtgccagctccctagttggtgaccacgcccactaaattcccc

SEQ ID NO: 34465 - DNA, 449 bp, Zea Mays
tcctatttcgtataccatatctcttccgagaacatacatgtgtcaattgtacaattgcaaagcttttgtaatttcctaggttcttgagggttgctctccactagaagccacctttcatctgtgcacccgacagtttgccatctgggtgcaactttttccccaaattaagttgacccacgcaatgtcctaagattccagtgttgatcgtgttgttggcgatcctcaccgaagcgcggatcatcgtcggagaagagtttgggtagcgccatcttgcttgatcatctgctgctggaggacatcggccatcgataggaacaggctgcgggtagtgtctggaaaatggtttcccatctgccaagagcccaagacacggttgggcaactctctaggtggggtgggggttctcctgcattaacaatgtcaaacgcagcagccatgtgcaccaaaca

SEQ ID NO: 34466 - DNA, 351 bp, Zea Mays
gacgtgtggggccgatagatcagtgaaacggttgagcaagggggtatgcttgtgctgctgacgggctggactcaagtcaggaacagtttcaggtgatttggtgcgcgcgacatggcacacaactgagctgaaccgggcgtgaggagttgtcgcgcgaggatgaaaagagaggtggttcgcgatgataaggtgtgtgtatatatagaaagaagagggcgcgaaagtcagttgcacgatttcgccacggctcgtgatgggaggcaagacgaggagaggctgttgaggctttgtccaagtcagacgcgtgcacgcgaaatagacaacttttagagaagataaagctgacacttg

SEQ ID NO: 34467 - DNA, 1582 bp, Zea Mays
ctgaagttgggaatggagctacaactctcttctggacggatagatggatcatgggtcagagggtcagagacattgctcctagactctttaatattatcccaaggtgatgtgcgaagaagaggactgttttggatgttgtttctaatggaaggtggatcttggacatcaagggagctcttactgtgggggctctagtggattaccttcacttatgggagctgatttcagagatggttttgcaaccagatattgaagataaacacattttcagtgtagctgcagatgggaactactctgctaaagcagcttatgagggtcttttctcaggatcaacctcttttgtccactataaaagggtgtggaaaacctgcccccctgacttcttgcagtctagtttctctctccccgcttttcttgttgtgaggatgttgtccataggttccttatgactctttttatgtttttatgttttcatcctccataaggaggctcttgtaactgggctgtttttctggccccataacctttatttcttcttaatataatgagacgcagtcctcctgtgtcttcgagaaaaaaaacaatcgacgcatctgatcagggaatagcttctggtgggcaacttgtgactgaaattcaaacatgaatttgataaacatgactgaggccttcatggagctgtgcagtcaaatcatattttgccaacaaactaccatgcacaagcaacatgatttgggacttattgtttctacattgtctgtgttccaactagcaaaaccacaaagaattccacctaggacagtcaagatcaatactcaaaccatcagatttatcgatatatttttgttctttgataatgagtctacaagttaagagcgaaaacttcatgttcaaggataccataatgtggcatccatcaacagtggtggaatgaacatgataagagaaatgaatgtcacctcaatatagaagcttacaatcaacttcattgctaaaagaataatccagaacatggtatacctgtcaggacaacaatgttcagtaattgagaaggatgcaatacaagacaagacaatgtgaagatgggttaacattttaacatacttgaagagggagaatgcaccttcgtgcatccctctaccaacaaataaccgaggctgcagacaaacatcgaatctttaaaaaaaagcatccacaatcttgaccgtctaattaacagcagaaaacaagaaatggaatgctacctgagaccaccacatcatgatcgttatgaccttaacatttgaactctctaggattcttctcataaatgggaaaagaaatagcatagaagcaagtatgtttggtgccatatatatcactactgccagtatatacaaagatggctgattctgaccatccccaagccagctttttattgttcttgcaagaccagtaggattctcccaagtgtacgcgtaagtcactggtaaaatcacaacccatgcagcagcagatattaatttcaagacatatcgtagcttgactgcaaatgacatgcttctttttgctttccagccaaatacgagatctaggattgctg

SEQ ID NO: 34468 - DNA, 306 bp, Zea Mays
gcccaatatcgacacttttccacctaccacctgttggtgctgtctgacatgtctagagcttagctctataaatggcagcacctgctctctcgcttcttcccccacacgccacttctcctctcctccctttctttggtttagtagtgagctcctccgctggccgaccgtagctccaacgcccgcgccctaggcttcatatgtgtcgcagcaccttcgtctcttgctcggcctcaccgtttccatggcacttagccccttgagcttgccttcctcaaccccggcagcccgagatccacttctccctgc

SEQ ID NO: 34469 - DNA, 272 bp, Zea Mays
taacggaaaacagcaggggtctcggtgtaagagtttctatgactctgagaatcccaggcatggatggagggtttattctataaacatggagaggcgcatgtgcaaatttgacccgcgaaggggtatcgacaaatctcggccgcccgatcaaaagagaacgctacggattagaccctcatccttataaactatcgtgcgatcacagccatcggttacagacctacggttctaatttaaagccctacggtttgatcacaagcgctcaaccgtag

SEQ ID NO: 34470 - DNA, 291 bp, Zea Mays
tgtggatctaaatccatgaaaccgaactcagagaaagcctaagcgcaaatccggtcacagtcagaggaagaacacaagggagagagagagttgaattggtaagaagggcgaatagagctcaccgccgcgagatctccaagacacgagaactctcctagccgcacagccgcgaccactatgcaaaccgctcagccgccgcgaaggggagaagacgacgacgacagacggcgcctgagcacggcgacggtaatggtgaaaggtacgctcgtttaagtttgcgcagtcctaaat

SEQ ID NO: 34471 - DNA, 2270 bp, Zea Mays
cacatattgaaaatcaatagtcttctgctgacaatgggatcgagtaaaagatgcatcaacaccgatgtgtttagtgagttcatgcttcactggatcatgagcaatctatatagcactcaagttatcacataacagaggtgtagaagtgtcacaagagacaccaagatcagccaagagccagcacaaccaaataatttcagcagtggtagtagcaagtgcccgaagttcggcttcagcactagaacgagatatggctgcttgcttcttggatttccaggcaacggggagatgatccaaggagaaaacagtaacctgtagtagaacaatggtcaacaggatcacttgcccaagtggcatcagaatacgcatgaagctgaagtgggctatcaaagcataaagtaaacatctggatcttgtcccgcgtaaatatcgaagcacacgaagcaaatgaccataatgaactgaagtaggtgttgatataaattggctcaacatatgaacagcatgagcaatatcaggtctggtgatggtgagataaacaagactaaccacaatatgacgataccgagttgggtctgctagtggtgccccatccttcggacaaagttttaaatgaatatcgattggtgttgcaacggtgtgtgtatcagtaagtcaagagcgatcaagaagatcttgtatatatttggactgagacagataaaagcctttttgagtctgttgaacatcaatgcccaagaaatagctaagcggtcccaaatcagacatctaaaattccttactaagatgttacttgacatgagaaatatgttctaagttgtcacctgtaatcagcatatcatccacatataatagaagtaaagtgcgaccttttggagagacatgaacaaacaatgcaggatcatgttcactagaagaaaaaccagcagttgtgatgacagagatgaatcgctcaaaccaagcatgaggagcttgtttcagcccatacaatgtgcgacggagacaacaaacatgccctgagggagtatcaaccccggaaggaggatgcatataaacttcttcttgtagatcaccattaagaaaagcattcttgacatccatctaggagatagtccaagaagatgagactgcaactgcgatcaaggttcgaacagtagtcatatgcgcaacaggtgcaaaagtctcatcgtaatcaagtccttgagtctgttgaaaatcatgagccactagacgagctttatacctctcaatggaaccatctgattttgtcttaactttgaagacccatttacatgtgataggaacaacatgcgagggtaaaggaacgatatcccatgtaccaatgcgttcaagagcagccaattcatcaatcatagctagctgccactcgagaatcccagaagcttcctaatatgtagtgggttcaacaattgccacatcagcccgtggaaaaccatagcgatctggaggttcaatggtaccacggtcacgaagacggtatccctgattaaaaacatcattagactcattattgtcagtacaagaatcaggtacatgatcagtaccaggactagccgtagaaatagagcgggaacaacgaatgtaggtttggatgacaggtggtttggaagagtaagaagaagatgatgtggaggtggaaggtggtgttatggtaatgagaacatcaaatgtggatgtagaagatgatggtgcagattaaggaatggaaggaagacacatgaaagaagtagattctatgggataatatgagaagtgagtagactggttgtgaaagaaggagcgattttcattgaaactcacatctctggaaattcgaatacgacgagtagaaggatcataacaacgatagcctttgtgttcaggattgtatccaaggaatacacattctacagattgagcagtcaatttggtctgctcacgtggtggtaacaagacataacatatacattcaaacacacgaagatgatcatatcgtggagcccagaaaggaacttcacccggggatttgccagaaagtttagatgatggttgtctattaatgagatacacagcagtggaaacagcttcactccaaaagtgtcaagaaacaaaagaagatatcaaaatagtacgagcactcgcaataatatgacggtgtttgcgttcagcaacaccattttaggcatgagcaccaggacaagaaagttgagaaagagtacgctctaaggtcaatagctggcggaaattgtcagataaaaattcaccaccag

SEQ ID NO: 34472 - DNA, 379 bp, Zea Mays
cgaggtttggtcctccaccgggcggaggcccgtcgcgctggcaatgagccagtgattgattttactgctagtggaggttctgctctccttcaggacatccgtttccagaatcctgcattgcgcattcatgatgccaggattgatgggaaccgtttctggacgctctagcatgtggatttttacaactcagtgatcctccccaagaaacatcagcccatacttcatcaacgctacatcaactgggaaggatgtgaggctattagggacccgaagatgacacaggcgttgagggcctgtgaaagaaagaagatgaagaatataatgacattccaatatgattggaatgatgaagtcattgcccagttttactcaactctgt

SEQ ID NO: 34473 - DNA, 384 bp, Zea Mays
gcgcggaggtcgtggggtctgtttacgccgcgctattcttgcggggaagaagaagaccggatagcgtgagggcccactggcagcggcagtagcggtagttgatgcgcggggtgactggctcagggcaacgactgtgtttgtttacgcgagatccacgtgcggatggcggaaattcgttgtgtcgtggactcaggggagaagacgacctccgatagcacggacccacgcattagagaaagagataacggtacgcatagcgagcgactgacaactaggacccaccagccagtgacagcgtgagacggcgctagatggtcccttacgtcggtcgtcactgtttccaggattgggccgcgcagaaggagatcgcaagatgggctgaat

SEQ ID NO: 34474 - DNA, 367 bp, Zea Mays
cccggacggctgcgtcacgaactggggaaacgtctagctcgcgtgtaggttgactaaccgcccaggagtatggatcggagcgtggatagaacctatgcagtaaggatgaaatgttgaattacatggatgtcttcttaccaagttcgaagcacaagtacagttgcccacggaggcttgcggcgtgatggcgattcctcaacaccgcccgcgaagctcccgatttctgacttggcgaatacgtgaatgagtcttcgcgcggtacggggtgatatcgcagcttgacaacgcccgcaagtcgttggagaacccggctcccaccgcacgacagagacgacgctcacaccctcactcacgacggcggtgaaac

SEQ ID NO: 34475 - DNA, 455 bp, Zea Mays
cggtcgtcgcagggctcggcctcgcgcggtgcaatccgggggagtacgcatcggctgggggctttcactggtgctcggtgatggttggctggggagctcggcctcgccgccggacgtgagtacgggagagagaagaggagcagtgggctgctgccgccatggacccttgtcgatggtgtccgcttgtgtgtgagggagctgtcgctcgtgccaccgtgggaaacactgccccattcctgatgaactattcgttggagtcctcggaccaccaccaaaccgcctcctgccatgattgttggtctccgcgacgtgatctccggtaataccctgaccagcgtgtccattcgattccccgctttgttttaagtcggattagattcccggtagtgcaccattcggggcggatcgacacacaccggtggcgccgccgccgtgaaggttcggttgacgccatc

SEQ ID NO: 34476 - DNA, 419 bp, Zea Mays
gcaatgttttgagccagccagagtcagactctaatgactggagggagcccatcatcagatatataaagaatgaagaggaaccgaatgataaagtcacagcagaacgcattgcaaggcagtcaacccactacaccctcattgggggcgcactgtacagaaggggagcaacaggagtcctcatgaagtgcattccctcggttactgggaagcaactgctagatgagatccacgccggatagtgcgggatacacccagcatctaggactctggttgggaaggtcttcaggtctggtttctactggccgacaacaaagagtgacgcagccgagttagtccagaggtgtgaagcttgccaattcttatcaaagcagcaacatttaccagcacagcaactgcagaccatacccataacatggcca

SEQ ID NO: 34477 - DNA, 344 bp, Zea Mays
ttgttcccattaccctggtggaactgctgctgctgtggaggctgattgttccttggagcgggggctagaaaacgagtgggtgcaggctactgctgaggtggcctgatcacacatatgcctgcctgctgctgaaatccccttctctagttgtgagaaagaatcctgaacctctgggcctgagcggatggtgctgccatcggtgcctttctcttcttctctgcccggtgagctacaatacagtcctcctgggagatggccaggttgaccaactcattgaagctatcagcccggactgtgttgagacgctcacgcaacttggtattgagacccctgcagaagcggtc

SEQ ID NO: 34478 - DNA, 441 bp, Zea Mays
atgttggatgctggaaataacaattgaatagcatatttgagttgttcacctccaggtgcaataaagaggatccctgcgcctgctccctgcagctttaatgagccatcaaaatacattcgccatacttctgcagtttccgggttatccggcacctgttgctcggtccactctgatacgaagtcaacccgtgcttgagttttgatggtagtgcgaggtcaaaattcaatgtcatgagatcccagttcacaggcccacttggctattcttccgatggcttctttattgtggagaatatcccctatcggaaatccagtgactactatgactttgtgatcgatgaaaaagtgacggagtttgcgtgcagttagaagtactacatataatagcttctgaacttaagggtatttcttcttcgaggggcccagaacttcactgatgaaa

SEQ ID NO: 34479 - DNA, 451 bp, Zea Mays
gtttctgggtcccctgctcgttgctcaatctgtttgcaagatgatgaccttgtttcttaaccaatggttgccacagacatacttgtattatctccatcgaacatgaccactcagacatccttgcttaaccaacaatgcatccctatttggccgacgtttccactaagacctcgtacgtatcatgtacatctattgggattatgatgcatcacacgctcattcttatgttctcctcttcgttgtgacctggtaaaacatagatgctagatcgttgttgcatttccctagagaggcttccacctccaatagacaccgtcgaattgaagtgagaaggcggacacgagcttgtacaacacaggctccatgctcgactctacccgctcctgctgttcctctaaaggactcctacattgctcgcttgaaaggtcccctgctaggcgctacagtctcc

SEQ ID NO: 34480 - DNA, 428 bp, Zea Mays
aaaaggattcaaaatgaaatctccgtttccgagtgtggttgtccttcaatcccaacaggaaaggacagtgatctgaatatggtgatttacatgaaaaagtttatatgcacccaccttcaagtgttgatattccttccggacatgtctgtcatcttcgtatagctttatatagtttgaaacaggctccttgtgcttggttttaaatgtttgtcaccgtaataagggttgctggtttttaccctagtgatcatgatcctgctttatttcttcatccctcttcacgaggacgcactttgctccttttatgtggatgttgattatgggcgatgatccagaacatatttctcaagtaaaacaacatcttactgagcaatttaagatgtctgattcgggccttctcggatatttcctgggttttgaggtattac

SEQ ID NO: 34481 - DNA, 947 bp, Zea Mays
attaacttgtatgaggattagacacaagcaggaattagacggaaacacttcctctcttgctcggccatgggcaagtccctcggccggctccggctccctctttctctctcccaaccctagctgccaccataacatctggtattagagatgttaggttccgatgaggatgacaagcaaccaaagaaggtgctgccgctgccaccggatcccattgccaaggtattggccaacctcacccaacagatggcatctctctgggcgtgtctagaggccctgaaatcctgaccgaggcaagaaggaattagaagcaaacaccttctctcatgttcaactgtggacaaagcccggccggtccccctctctcccaaccccatccgccaccataacatctgttatcatagacatcagctttcgatgaaggcgacaagcaaccaaaggtgctatcgccatcgtcgccggattccattgccaaagcattggacaacctcacctagtagatggcatctctctgggcacgcctagaggccatggatatctgaccgtcggtgaccaccaccaccatgccgctagtgttcccttgtggcttgctgggctatgggacgcgggacggcagtcgtctccatgccagattcaaagatgaaggattgtgtcaatgtagctgagtaagaagagtgcccactagttgtcggtgatggtgtggctgtaggctgctgcatggcctcctagcatgtcggtaggtgcaggagatgtgcgatctgcacctgatttagccccacaccccttcgcagcttctccaagttgcgcatcactgcgccgcattgggagggcatgcggttccacatgtgggaggcaggcaggttctttcccccgtggatggcgaacttggagtttgcggcagtggcggttggggagggtcacccctccctcatcgctgttctctatcggaa

SEQ ID NO: 34482 - DNA, 303 bp, Zea Mays
tcatacaaagcaaccaaacgtccagaatgtagcgacttgagtattgtacacatcttgcgggcaaaacatataaaccaattaacagatgcaagctaggtcgcccgtacctgcaaaagaagtagcttaggcgtcgcaaggggagcaccacggcggtggcgtccgccacgttgtggcattccctcaccgtgacgccagagatgaaactgcctttagcccttcacgacataccacgtgctccacatcaccgttgtggatggccagatgacgggagatacggcggccgcggtgagcgcggggccgaag

SEQ ID NO: 34483 - DNA, 502 bp, Zea Mays
cggatatgaagcaggtgtgcgggagcataggtttagggcttatatgccctcggggggagccttggggccgtgttgggagccgctggccatggcctccgccacggtcgtgctcacgcgccaccggtcagccatggagagagagagaaaaggaaataggagggcgtaggggggaagaagggtacggaccgtctgatgggtcttgggcggcctagattggatttggtcgcgcgacgtctgtagccgtaggatcgctggcttacggtcccgatctgatccagtgtaccccttcacccagcggaattagaaccgtagatctcggatccagtggctacgattagatcttggtacttaaaatttacatcgttagatccaaatccgagggccagggctgcgtgccggttcagagttgtaaaaatctaatctggaccgtatccttttaatccaacggctctggttgttccttacctcttcgccgttggctttttgcttaagagccccttgg

SEQ ID NO: 34484 - DNA, 307 bp, Zea Mays
ctggtcatctatataaggacaagggggtacccatgcatctcagatctcatctcgtcacattccatcaccacttcatagctcgttagccttctcatagcaaccacgcaaccactagattaataggagagctcaccctccaccacccatagctcatctgtaactcgtgtacgccagtaatactcaaatacttagcctcgacaggacatagggtgttacacattctagcagcctgaacctgtacaaatccttgtgtgatccgacgtgcatcagtgcgtaccatcgagtcacaatcaacgacgttgtcctg

SEQ ID NO: 34485 - DNA, 501 bp, Zea Mays
gtggttatgagacatgggttataatggttcagtgtagtgctaatcgtagtattgttctgaagcgtgttacactaagagtgtttgtgtgttcaataaagagagagagttcccttttatagtttcagggttggactttaaaatggggacttgttctctagggacttgtattctgcggggaggagatcgaccgatgggctttgggtagcgtggttcctctagtgttgtccgtagggttgttcgtggtcgtactccatcatggcgtactgtcttgtccactcgtcgtatgtgtcctttttgcttgtcttccgctgatattctcgtggtactacacgggggtcttgcaaatcagtcatatgagttggtgggtgtcgtgcgatattgcctatcgtcacgagcctacgtcacttattggcgtgcgtaagcatacatttggtatggtgtatctattgcacactacccgatattctggtcactgtagaagctctgatgctgagatacttc

SEQ ID NO: 34486 - DNA, 1175 bp, Zea Mays
ttgtactgaaaccctctcttttagattggaaaatggcaagttcacgcacaagatcatgcattcgaatacatttaatcctaccaaagcagttcctctctgcaacgtgaagcatgctccgtcgtataagttctttaagataactttcagcagtgtcttctaagctgcatgcccctttttgttcaataaatccttcagctatccacaatctaatcaatctctttctgtgtattagatagtcttctggaaacatagcacaatacaggaagcagttcttcaaatagtctggtaagtatttataacttagattcataattttctccacgcgattaaggttctcattgttgtgtagctcccagataagctggtcataaaatagcttccactcgtcaacattcttcggtctcagcgacaatatgcttcctattgccacaagggctaatggcaaaccatcacatttctccacaatgtttataccacactgacgcaactctggagggcagatatggttttcatctttcagaaatgccttcctacaaaatacatgccaggaatcatcgacacccagaggttctactttgatcttacaactacccttagctagtgaagctacctcctcaattcttgttgtgattattactctgcttccaaggccattatctacaagaacttctttaattttaaaaaaaacattagccatccagacatcatccagtatgatcaggtactgccttttgtctagagtttttgtcaattgctctcttagttctgcactatccattgttccaagatcaaattctatcttatctttcccgatgagatctgtcagcattttcttccatatatcttctagtctatatgactgagagatagaaacccatgcacggcagtcaaagttggatccttcatttttgtacacattatttacaagagtgctttttccaacgccacccataccccagacagcaatgatccgaagtgatggatcttcaaattttaatgaactaatcaaggtttgcttattttcatcaattcctgcaagctcctcgtcgctgattgtgtaatcatgtccaggaagatacatttccttttcagtttcatagcttcctgcaggtataccactcccgccatccaagggtttagtccagcggtctctactttccgagagttgtttaagc

SEQ ID NO: 34487 - DNA, 568 bp, Zea Mays
gttgcggtagaggtgttcgatccattgcctggcaggtttcgactggggtttggttcgcggtttagccggagctctgggctccgatggtgtgtgtttcagtcgccgcatgttaattagtggctccatctgatcacatgttagcagtggtgtggtagagcacggattgtgccttgagaaggaagaagaagataggaagtaggaggaaggcgacgcgtgttcactattgcagtattctgttttttcttaaacgtttacaaagacctgtgcctccttatattggagcactcacaagactcacgctacaacctagttcgggtcactcacacgagtgttgggctggcgcacacgcaagccacgtcgcggcccagtagtcacagattcaggtgtgtcgcgtgcagccatctcctgaacaccatcctctgtagcctgatcaccatcctcagcgctgacatcccccctgggagaaaacctgcttgtccccaagcaggggcaccgggaaacgattgctgtagagccacaaaatcttcccaagttaccaaggaggacgacatactggaccacttgatca

SEQ ID NO: 34488 - DNA, 333 bp, Zea Mays
cattcaaattgccagttcacacatatataccaaccatactttacttgaaatatagaactaacaatccataaactgtaagtaccgatcactgcataaaggaatgggatgggtggcgttctccgacgactgaggctctatgggtgaatggctggcgggcatacaacagtgggatctacatgggcgatggagccctcatccatggagtcgtaggcactggcttcggagggagcagcgtccgacctttccatggagcagtcgacacaacctacttcatctgtggattttgatgaggggattcaagcacaacatagagagaggaagaggagattcgag

SEQ ID NO: 34489 - DNA, 389 bp, Zea Mays
gctgagtatgggtcggttctgtgtcgttgaccaaacatcgggtgatcaaggatagatctgtagagttttagatctcaaccgttcattcaagatcatgtgtgtgggaagcaaatgaagtaaattgaatctgggctgtcaatctgtaatccgacggccacctctgcgtaccggttcgggtagcgccagacctaatttgtgccttccacgcttgatcgtgcggccgagaacccatcataactgttcggctatgtagatatgcagaagaacccctgagtttttactaaatcaacctgcagtccatcgcgggtgtgtcccgagtcctagaacttttacgtagtagcccctggtgttcggtatatttctgcgcgcagtacagagaaatagaaaat

SEQ ID NO: 34490 - DNA, 327 bp, Zea Mays
atggattggttaactcagtatcgcgcagttatatcctgtttttggaagacagtgttattgcaggcgccgtcgggtagggaggtggtattcttgggaagctctccaaagttcactctctccttgttgtcccaattacttccggatcgtcggtcaaggaagtcagaaatttttttctccatggtggtggagagtgagactgccttgcgggtgcaggacatccgtgtggtgtgtgattatgctgacgtgtttccagtggagctaccaggcattccaccggagcgtgatgcggcttttgaaatcaagctgattccgggtacgcagcctatt

SEQ ID NO: 34491 - DNA, 363 bp, Zea Mays
aggtaatgtggcataccatgcgaatgcgattcttattaaagataatgaaaataaacgcacacggaacgcctgtgtcagccaattctcctaattgtgctaaaaactggcttatgtgttcgtgtgtgctctttcctttgtcacccgaaaattttgcgaattcgggtatcctggtcccctgtgggcatgggtggtggtcaaattggttgtcataaggcctccgatttgactgtcccccagggaccatgcttactctgtgcttatctcggaacgccccggctatttcttcccttactatatcaatagcatccggtgggagaccactgactctttgtctcatcataggtgaggttgtttggacattag

SEQ ID NO: 34492 - DNA, 450 bp, Zea Mays
aagtccttctcagggtatcacctgagttgttcggttcggcgtctccagaaagcttagcccgagatacattggaccgttcactatcttggcccgggtgggcagcttggcttatcgcttgcaattgccggattccatggtaggggtgcacccagtatttcatgtctctatgttgaggaagtttttgcgggatccggaccatcagattgagatggaaccaattgcggtgcagcaggatctgactctggagtgtcgtccgatgcgtatcttggagtcctcggagcgtgttatgaggagaagatcaattaaatatgttaaggtcttgtggactaatcagtctgaacgagaggctacttgggaacttgaggagctgattgagcagaaatatcccgaacttttcgctttgggtgagttttgttaattcattaatcttgtggcggaactgcccgaatt

SEQ ID NO: 34493 - DNA, 637 bp, Zea Mays
gcgacaagcgatgcgggaacgcgaggaagggaagccacgccgaggacgcctgaatctgataccaggttgtgatggcccgtggccgccggcgagtggagatcgtcgtggcgtgagcgaggagaccgacaggatcaggtaacgagttatctggtaatatttcttcttcaattatttcttaacccctctccaagtctgagacaaaacttatatagttcgcttacatgggccagcccacaacgcaactcacgcacacaaccaaaacagcccatcaaggcgcacgaccacccctgcttcagacttcatctcctgctgactccactccctggctcactgcattctccgctatggcatccaccggtgtgacactcgtgaagcagggccgtaacgatctagggcgaatcatactccgccgccaaatccacaacaacttgctccatctggagtcctggcgcccacctggactcacctctgggccataataaccaagcaccgtgaccgcttcgcccctagccgtgctccaccaccacccctggaagaagagcagggctcgccgccaaacgtcgaggggcaaaaccacgccgtcggggttgcacttcgttccaccaacatcatcgtgcggcctgggggcataaccatc

SEQ ID NO: 34494 - DNA, 396 bp, Zea Mays
tccggccatcggcctatacattgagcccgggtcctgcttcttcaccacatcacgcacacgagcacttgagcaatcgactcaatttcaccggagaactcacacagtccacaaatccattccgtcttgttccgagcgccgccgtgaaggacctctccatggccagccctcttcgggttagtactcgctcaattgcctcgtgttctagcatgtccttagcttcctgttgctctcgacgccaatcaatcaaagtttaccaaagtcccaccaccagaacactccgttgctccgaagaatgccgccgtatgcaccctctctgtcgatctgcttctctatccccgttcggcctaatctcaatcatgtacctagttcctggtgaacccgtaaagccttcccaac

SEQ ID NO: 34495 - DNA, 613 bp, Zea Mays
caatttgataatgttcaatcgtaagtaaattttatgtaaaatttgataatatttcttttgaaatcatggaactgtgggcatcgttaaaaatcaactaagtcagtgacccataatgcagttatgcaagcctggaggttgaacaaacttcagcaattgacaaaacatagtggaagaccagcaaataacatggcaccagcaaaacacacactacattcttcaaagtgtaaatgtatgcactcattttcaaaccctcaccatttgcctctttgcgggggtgagtggcacaagattttccaccctggcacactgtcagtgactcagagtggcccacatgtggataaggtgggggattgcaacccaccttcagcggcgaaaaaataaataccgccattttcaaactcagtaaaaaatttagtgttctcccaagatgaaacattggtaaccacagagaccaggttgacaatgatagctacaaatgtccaactaaaaaaaccaagaatttcattatactttccatctactgggctttctgagtgttgatcttgtggcctctttaggctactttgttgaaacacttgagatcactccaaaactagcagtatatcaacatgga

SEQ ID NO: 34496 - DNA, 344 bp, Zea Mays
aattctatgacactcgaattcgtcattaattatgtctaaatacgtcacaatccatgatgttgtgccttgccacgtggctaattgcgtggcgagatgacatggcagttgatgtggcaggtgatgtggcgaaaatgttgtgacgaattcattcgtcacagatgttatgacgtggcatgccacatggcagatgatgtggcaaaatggtgtgacaaaaatatttgtcataaatatcgctgaggtggcagctgacgtggtaatatatttatgatggatttttcatcataaggcgcgctgaattcacatcgtcatggaatattatgaaatgacatgctaataaccaaaac

SEQ ID NO: 34497 - DNA, 451 bp, Zea Mays
tagcgccctctcagccagtcttgagatgaagcggctaagggcggccagtgaccccgtaagcttctgaacatccttgatgcgggccggaggtctcattgtcccaattgccttgatcttctctaggtttgcttcgatgccccgatgcgaaaccaggaatcccattaacttctctgcagagacaccaaagacgcacttgttcgggttcagcttcgtgcgtgttgcccgcagcttgtcaaagaccagggttaagtcttccaccagggtcgaccctctcttagtcttgaccacgatgtcatcaacgtaaacctccactctgtccctaatcaggtcaccaaaagtcttactcatcgcccgtacaaatgttggcaaggcgtttttcagatcgtaaggcattacaacataacagtaaagcccagccacagttacaaaagcggtatgcttcctatcttgc

SEQ ID NO: 34498 - DNA, 334 bp, Zea Mays
gcgagtttggagatgcgccgtgggaggaagactgactatcttgaaatcccactcaaggatagtatcaaaggatggcgcttggagtggtttattgttgagaaccacggaaattctctccccccacggtcagggagacagtcggatgttcgtactccgagttggaccgagtctcccacggaccaggaggtggctgaggcaggggctttgctggctgaggttggactgctgaaggagaggggtctgactgcagaggctgtggttgctgtagacttggtgaaccggcttgaaatgatactcagaggcaaggtatcaaatgttggcgcccctgtcgcat

SEQ ID NO: 34499 - DNA, 437 bp, Zea Mays
ggcaaatccagaagttctccccagacacagagaacaccgcgtaggatggcgggttgatttttgaaaaagacagggtctctttagcaaatcgtccaagacgaaggggtacaggtagaattcagccgttggatcggcgtttgagggctcagattagaaagacacatcacccaaccagtatgcaatcaccaccgttggatccggaatctatggtctatattcatcctgaagcggtacgcccagggatcgatcacagccgcccgcacaaatctgacggccacggctgactgggttctagatctaatcgtgtccgcccatccttggacggacggctcaggggctttcgtcatccaccgtgaggcaatagctgagcacggtggggcacaagctcgcgacggcggcgttcatgccgacgagatccaaatcgaagtccccccagc

SEQ ID NO: 34500 - DNA, 660 bp, Zea Mays
gtggtgcgacctttgggctctcaaggttttctagattcctgactaccttattgttcatcgtaggtccaaggcctgaagcgctaggcttttccctatgtgtagatcgagctacaagattcgtttgtgcatgggggagaaaacatatgtcgcatctccttaacatcccggagtgtgttcgcaaggctgtggagtttgggatcactgtggtgcattgacggcctttgacattgcgcagcttcactgtggtggctaccttcatgaggttgtcggcctacctgctgagacaacgtcattggacttggaactcctaacaatcggctttgacgccacgatgaactctgtgctcagtgtggtctcggtggaggaaataatttgtgatctcttgtagtctttctttgcgtcccatttgttcctacaatgtgtatggccgttgggtccttcaaacctcggttggtcataagctctctcatgatccgaggggcactatacgtgtgactttttcccattcaacatacccatgcgaggcgagccccgagcaaataatcgatgctgagatccatctggggggtcatcccatccttttgctttactctcctctgcctatcccttccacaacaatgaggggaggtgagcccaaccgcacattcctcattggtctag

SEQ ID NO: 34501 - DNA, 290 bp, Zea Mays
aagcttcatattctgtagtgttgctggaggcaggaaataggagttgcaatgcatatttgagttgatctcctttcacgcgatgaagaggatacctgccccggctccttgcaatctcagcgacccatcaaagtacatcttccatacttcccttgactcaggattcttaggaacctgttatttggtccactctgatatgaaatccaccagggccttagttttgatatctatacaaggtcggggtcatgagctctaagtttacatgcccatttggttgttctgcccactacttc

SEQ ID NO: 34502 - DNA, 436 bp, Zea Mays
gcagtttggaagagttatgttttgagtctgcatgagttgccatcacaacaattgactgcatgaaaacagtaatagcaagaaacaggacaaggacatcttcagtgttcccagtatcagggaagtaactgcatgatcactgtcttggggaatctctgtttccaatatcagattcgacttattttcttgcaagttgtctcttctcttgtgatcatgtttggctttctgttctttgatcatgtttggctttctgctcttttgaagcttggcttgtccagtgttgcctatcatattccaaatatcagaccattcttatttacttcgaccatcctggctgagagcgctttgacaagtatccctgatgtacaattgcattttgtgctaaaagaagattatttgtgaaagcatgagtccactccacttgcaaaaacgccaatgc

SEQ ID NO: 34503 - DNA, 417 bp, Zea Mays
tatgtccatcatttcggaatttgacctccttcatctcgttgacgttgggattttgcttccaaaagagctctgctcttagcgaatttgttgcggcgtcaccgttccgatagaggatacccatgaatctgtcgtttatgttccttttcttattcgtggtcttgctcttctcgtctccccctttttccgcggtctccttgatttctatgaattgaacttgacgcatcagaactctaattccattctacaaatttccattttcgtacatctgtgtgaggcctttctcggaattctcccccatttcgatctttggaaatacctttatcattgtcggcctgggatggctgggggacaacaccagcttgttggcgacacaagtctggagcttcgccggggaggaaagcagagtacctcgacatt

SEQ ID NO: 34504 - DNA, 879 bp, Zea Mays
gattgggaggtaggctgtcatcacatccttcattgcctcagcagctcgggcagccgtgaaataaacggccaaccagtcgctcggaccctattttgcctcacacgtgttgacattggagaccttgaagtttggtagccactgcaccgcgtgtagtcggccggtgaaggagaaaaccccaaacatgccccagctactgggttgctagcctctacatcatcatggtgttggtgtcgagacgacgactaggaacgatggctggccaaccattcattaactgagtgacaaggcgcatgactatttgttgatgccactgtagaagttattcgggccctgactcctcgctatgggtactgtggtcctggtcatactcttcttggcgtctcagttcttgttcatgtcatcacacacgtggtgcctcgatgctgctctgcatgttacgaaaactattgggtcggtggtgtgtgtccccctttggatgagccggaggaagaagatgattttcctctttcctaaggatttgccagtaggagtttccatctaatgagttagggaggtcgttgtcgatttgggccagcacaccttcgacttgacttggagtttgcatgaatcaagcaaagtcggtagcatcttacacggaaggaataattggccacgtggttgaaggtcgtccgctcggcaagctcacgctcgacatgctcgtgtcggtgctcatgctcgtgcatgaaatcttgaacatcatgtcgactctttcgtctagcattcatctgctcaaggaatcctcgctcgtctggggtcggatcatgttcgctggcgttatgatgacaccggatattctagcgctggttccagtgatggcgcctgttacgctactacaagtcc

SEQ ID NO: 34505 - DNA, 354 bp, Zea Mays
gccttgctgtctaggtgggattgtaattgttcaaccatttttgcaaaaaaaaattgttgtccgttctgctcatgagaagaccccctccaaacaaccttttggttcgcaagtaaaaccttaaaaaaattaccatatgctcgagttggaatttttaaccctggtgtgttttacccttgaagttacacctgcacaacttatagatacccatagcttgaccgctagaccaaccctagtctccttgtgcacttgtttggtgtctagttgcacaaaccctatcaaggccatgtttctttccatagatcttgtcccgaatcttcataacctttctagtgctcatcctaagcgatctcatgt

SEQ ID NO: 34506 - DNA, 350 bp, Zea Mays
tcgatggtgagctgggacgagtgtttttcttgggaggcgtcgtgggtgttgtcttcatcgcaggaacagtgggcgccaaatgttgggcactaacacacgtgggcgtgctgttaggtggacccaagcacttggaaagcaggtgagatctcaggtacgcgacaagacaaaatttggggaactgtagcatctcgttatgcgtgtcacaccccgctatatgacaggggtatttataggcttgtccaggggtaggtggtccaaagtacaatcctatccccgactaccacctatatcctagggacatcccatgtaactgagtaattaaagtgctactcgtacaacagacggtgcgc

SEQ ID NO: 34507 - DNA, 286 bp, Zea Mays
tcgagctacaaacagccgaaggcttattagtggacgatgaagcaaaaataacagaattaaattcgaagcttctttcccaatcagaaaattttgaacaagaaaagctgaagcttgatgcaaagcttgaagccgaagctcaaagaaactcggaactgaaagaatctttgaaaaatcttcagaataagtgcttggagttcagcactcgatgcattcatcagttaaagcaagtgttccattttgttggagccagtagtgaagagtttactccttcggctgaagacctgcc

SEQ ID NO: 34508 - DNA, 642 bp, Zea Mays
caactatttgtggactaacagttcttggagaaataagaatgcaggttggactacatagaacagaaaatcttagagacttataagcattggttgtggatcaagtgaaggcaaaggtataacataggtttttgtttttgccggtctccagaagtttagataagacatttgaccggattagtaggctagatggccgtactattaagaggggtcaatgactttagtctgtgtaaaacttagtgcctcatagagcatctagtggttgcatttgcatgaggtctaacagcgctttcagtttcgagagttaaaaatcttttcgaaagcgtgtttgaaaagttgctaagtcatgggtctggcggactgtccgggccaagtggccggaccatccgcgatctattcagaggggtccgaagtatgttcacttcggactggtcctgtatgtttgtactgcggaccgtccgcagtcctgaccagagagggtcgccttctgcacagtccctgtattattgtgcggactgtccggccggggtcggcggaacgtccgcagttgccaaattggtttgggcagggactgtgtgtttttcggcacttgtactacggaccgtccggggcctgagcccagacagtactaactcccaggtcgcg

SEQ ID NO: 34509 - DNA, 764 bp, Zea Mays
gtggcggacagatgagcgtgttcccggtgaccagagggttcttagcgctattacgtgggtcagcaagcatcgtggagttataaggaaactcaaacgagggtaaggggaggctgaactgaccggaatggggctggccacggtgagcagttccttgcggtggcggaaacttgatttggggggaattggaaattcacgcgtgctggtggatgatcgagggtgggagcgggcgctacagcttcacgacaacatggcgcagctacgggcgaggtcaatttatagagccctcaagcggtggtggccaatttggtcgagcaacgctggcagtcggagatggggaagaacctggcgcggtgagttcgtgtccatcgccgtggcaacctcaccggcgacgatgggacagccgtagcgagtcacggtgtcgcggtggaaagtaaagccacgcgacacaaggtcggacggcggcggtcgtcggcgttcttatcggttccaccgcggtgaacacggtacggcgaccgggatactttaatggtcgggcttatccacagcggtgtgtttcgagcgtttatcaagtcatcctgagcacgaattgagacggcggcggcgcgaatcttagcgcagggagggtcaccggcggcgagcaagccgcgctggcgtcctgatccactcgagctactgtaccatggcgatccccccattcagttgcctgacagcccatgtttaggtcacattttctctaaaatttgcatgtgaacttcatcaaacct

SEQ ID NO: 34510 - DNA, 430 bp, Zea Mays
gccggtattaagcactctcacttgtctgcggcaccctcaatttctcttagcacctaggtaatcgtggtatagcgcccggaatcactaggaagggttcgctggaaagactgccaccggagagttgtgtggcgccgccgcgtccacgcttgggatggggacgattttgctcggccgttggatggccagcggacgacggtgattgtaacgtaggataccccctcgcttgattaaaccatggccgtcgatatccgatctggtggtcgggtggcgtgttgcgtgggttcattaaaccgggacccttggatttggatccgatggcatagatcggataccagttcgatgtaatgtagagctaatcttcgcccttcaaatctaatcggatggccgcggtcgacccatacctcttcgtcctgtcaatttagcaattaag

SEQ ID NO: 34511 - DNA, 334 bp, Zea Mays
ttcaaaagatgctttctcctcatcttccctagacatactaatttagtggaaattggagtatgtgtctagaaaagataaatattcacaccaagaagtagagtatactaattgttctatgtgagtctctaggacaagccttttttagatcagtgtagtagatgcacatatgaagttgcccctagcctctggtactatgacagggttggccatccacttagggtgctagaatttgcaaatgaagttagcacataggagtttgtcgatcttggtgcagatcaactactaagactccatggactatctccatgtctattattgaatgggtcatgcttca

SEQ ID NO: 34512 - DNA, 455 bp, Zea Mays
agcaaacacccagaatggccaagcagccccagcacaagtaggagatcgtgcatgcttctactatggagaacaaaatcactgggtgaagaattgtccaaagaaagcagcccagcaaccaccgacagttaatgccccagcaagacaaggagcaccacagcaagcaccaggagtccgtggtcaggcctacaaccgtggaaaggtgaatcacctagaggccgaagcaatccaggatgctcaggacgtggcagtaggtatgtttccagtcgaatcctacccatcaaaagtactatttgatacttatgccacacattcttttgtttctgcatcttgggtagaatgacataacatccccatagaaccaatgatcccacctttaagagttaattcagttgggggaaaagttcagtccgataggatttgtccgaatctaaggattgaaataagggggatagcct

SEQ ID NO: 34513 - DNA, 347 bp, Zea Mays
ttactcggaatgttgtctgctgaggtgcgagggttcaagattagtccatgcagttttagggagcagtgggaattggtgctctggtgggtgctgcacaagtgcacgatgattttgtgctgtgaattgtttcaggagactggtgcttcaagagatttcacagattcaggggtgatcaccgagtagatggtgcctccattagaggaataccaatggattgaacgtttcgtgttgtgggttggagaatgagtgaactctgagttcatatgatagggtaatgtgacttactggaattggttatgccatggaaagggaagcatgcgttgcaaaatagtatctgtgacctttag

SEQ ID NO: 34514 - DNA, 376 bp, Zea Mays
ctatattccacacttgcactccacaagccgagagacatggttacacaacataaatacacacaccctagttattccacatgactcaacccaagacgctacccgttgacaatcactcatcgcaacccaaaccacatgggacaaatcaaccttgtgttcgcaatctcccccttaatgagtgcattgtcaacaccaccaagtgaacacataatcaacagaagaatgaagataaagaggagctcactcaaacgactaaaagttagaaaaaagccaaaataggtcatttagagtaagcaaagcttgatccccaaagaaatgagcaacgacttaacacatgcaagcaaaacatggctagtcctcaagaagaggcagaaagggg

SEQ ID NO: 34515 - DNA, 1144 bp, Zea Mays
ggaaatacagctggggtacattgaagggtgctgcaaccctcttgtatagatgatacatcgcagctaatagggatggcacaacttttctgcatattagagaacagtccagaagcagcaccaaagcaatccagaatgagtctaacacacctcagatctgcctcaattggcctgacaaatagaaccacatcatcagcataaatggagatccggtttctgacatttgcctcttctaagctttgcagcagtcctctgctttcagccatattaaaaaggctgctaaggacatccatcactaggacaaacagcataggggaaagaggatccccttgacggagacctctccgatccatgatatgatttccagggcagccatttaagagaacttgagtggaagaagtgcaaaggggattggaaataagattactccacataattccaaagccgaggtgagataaaacttccagcaggaaagcccaagaaaccgagtcaaaagccttacaaatatcctatttcaagaatagacttgaaagctttttcctgtgcagtgctttgatagactgttcgactaacatataattatcatggaccgatctccctctcacaaaggcacattgattggcagcaaccagatgactcaagtgtggagccaacctattcgcaaggattttggtgatcaatttagcaaaactgtgtaagactaatcggcctatagtcggctgcagatgcagcatccactttcttaggaataagtgtaagataagctgagttcagcagcaccaagtgatgagcattgccttgatgaaaaatagaaagagcagccatcaaatctgctttaattatatgccaacaagttttgtagaatctacccgtgaatccatccagcccaggagctttatccgaagggaggcatgcaatagtgtctctaacctctttctcggtgaaggggagatcaagggcagacaagtccaaagcaggcctatggcaatttgccaaattaagcgtaaattgcctttggaaatctgaacccaagggactagagaaatacccatgtaatacctcctccatctgatcatgagtggtaactgtcctgccagcatccagcagattggagatgaagttcctcttactccgaaagcgagcttgc

SEQ ID NO: 34516 - DNA, 408 bp, Zea Mays
taaaaaccgagcaccttgtagttgaaatcgagcttccttgcttgaatcgacgccttcacttcagaatccagcaccttgtgttgcaagttgacctccatatcgctgggtcaaggagttgacactgggatcaagtttattgttacacagacctgaaacctcaaaaaatacttgtttcttggtagcagaaggataggtggaaaacaatctacagttctgcacgagcgcaaatcagctgctctccggccagtgaaactcaagtccaaatcagtgctgctccttctcggatcaatcatcacaaactcaaatagatgctgcttccttccctgtggtggctcgaatagatgcaggaaccagccaggatccgatctccgccgcatgcctgagcaactgagtgcatatgcaggttct

SEQ ID NO: 34517 - DNA, 345 bp, Zea Mays
gccagaatgaagatggtttccccaagttgctgagagcatgcacagtccacctcggaatcaggagccaaccagagtatgatggtcgtgaattcgtcgagcatggcacagagaagtgtgtcatgactgtatacattggatccagtctgcaccatgtggaatggagtgtcactgctgtggggcatagattcagagacacctgccaagtcatcgctcgcaaggcattgagggccctatgttagatttatgaagaagaagtggccgacacccctctcagattctttccgccatttcagagagcccgtcctgtttggatggtcaggatgtgtgcattggaaggtcagcagc

SEQ ID NO: 34518 - DNA, 354 bp, Zea Mays
aaacctattgctccgatagatttgttgccccttccattgcaggaaagaaccaatatggaagcttccaagcgtgttgcatacataaaaaagatatatgagaagactaaggaagcaattgagctcaaagcagtgcgcaaggctacaagcatgatcaagcataggaagaaagtgttatttgaaccaggggacttagtttggattcacttgcgcaaggagcgttttcctgagcagcgcaaatccaaattgatgccacgaggggatggtccatttcgtgttcttgccaagatcattgataatgcatacaagatagatcttccaccaagctatggcgtgagcaacacgttcaatgttgct

SEQ ID NO: 34519 - DNA, 346 bp, Zea Mays
gccagcgtcaagacatgttgcagcaaggcatcatccgagagtgcacatcagcataatcctctccagtgctacttgtgaagaaggctgataagtcctggcgcttttgcatcgaatatcgtgccctaaaaaccaagacggtgaaggacgagttccccatcccggtcgtcgacgaactcttggatgagttacacggtgcctgcttcttcaccaagctaaacctccgcagtggatatcaccaagtgcgcatgcaccctgaggatattgagaagacagcgttccgcacacactggggtcacttcgagtttctggtaatgccattcggactcaccaatgcaccatctacatt

SEQ ID NO: 34520 - DNA, 381 bp, Zea Mays
atccgtgttgttgaaattgcttgctcgccatttcgcgcagaaagcacgtgttgtcggcggtggcgttgaccaaggcagcgatagcctcagccaaggtaggaggtaccggtggcggattgggagtgtcctccctgccgcgggatgtacctaccccatcctgtgcacgggtctggcatggcatccgaggcaaagaaacatttggaaagtataacatgccaaacatacaccatctttatttcattgcggaacagtaataattatacatactccattatacaactcgacttccatacttattttacataagtacattacttagactatactactctagtcttcttcatccttagttgttccgttgcctgcttcaggagaccgttc

SEQ ID NO: 34521 - DNA, 848 bp, Zea Mays
acccagtcaccttcctggagaaaatgaagattgatttgcagtcctacaagcaagagaagaagtctgtcacagagtatgaagtgggcttcaacaagatggtttgtccctcatgtggcttataatgagatggagaaggcgagctagttccgtcagggcctgaaaccttctatcaggcatgccctgggagcctttctgttggtggacttccgtactacagtggagcaggcactgggtgtggagatgcaacaccagtataccatggagtcgcagaagtcttcgggtgttgatcagcctcgtggccaggacgcgaggaggggcaacactggaggtccagcccacaagaggggcaagtctcagcatcagcgccaccatccctaccatggcaaatcttctgacttaggtacttcgggaggaagtactcagaggtttcgggctgttcctaagcccgggctagggctggtgtgtttccattgtggtgatgcgcatcgccgtgcagagtgccagtggaatggcaggtgttcaatctacagtcaagaccacaaggatgtggtgtgtaggaggaatcctaatgggaagctcagatgggagccagtgacttcctcctcttctcagggcactgtcaacatgatgtcaagcgctgagcaacaattttcagttccactccctccgcaacagttttatgtgcctgggacttctcagttcgtgccgatgcagggttttcctcagtatctggctgcgcctactcctgcaccgactactcctgtgtcgtctcagtttggagctccacgtctgcctcactcggcagctcagtggggttcttctgttaatttcactccgggagcttcctc

SEQ ID NO: 34522 - DNA, 679 bp, Zea Mays
gccgaaggcggtgacctccagcgccaccccacggttgtaggccacagaagccgcctccgcgagggcagcacaccatccatgctgatgtcaacccgtcgacatggctgtggcgagagaagtagaagctgcccattgtcatgctgaagtgcatccagttcctccggccatgcactttcgacacccccaacgacccctagcgcggaaggatccccttcgacggctcagaaatccaacggtgcagtaatgcgcaccactctttgtctcactccttgcgtgcgcttgctttcttggactaggaatcacctgcatctatgtgcaatttctatatattaaagcaggccccgacgctccaaatctagctacgccacgtcggtcatttttctcaaaccgtttgattgcatacctgtgatatatcctgtcgtccacgtgtaacgtgttcctctctattcaaccagtcttctccgacgcggactcctcaccttcctttttttaattgtacacatgatttctctggaatccacatgccctggactcttctagcaagcacccgattcacctcttcctggtgtgccaaatccttgacgtgcctcagccggctgcaaccccagaaactccattccaaattgcagggggcaaattgtgggggaagagacgaaggggtgcaggcttattatttttc

SEQ ID NO: 34523 - DNA, 282 bp, Zea Mays
tccgagctggaccgaatcccccacagaccaggaggtggctgaggcaggggttctattagtagaagttggattgttgaaagaaagggttctgactgcagaagctgtggtcgctgactttgttttcaagaacattcagccactgaaagacagagcatatccggcctatctataccgaggcttggctgattcaacccgggtgaccaacagaagaattcctgctgtggacttggtgagccggctcgagatgatactcagaggcaaagtgtcgaacatcgacgctcc

SEQ ID NO: 34524 - DNA, 423 bp, Zea Mays
ggcgttacgtagctagtggggaaagtagtggtgttccttctcctgccttgtctgccctcattggtctgcaagaattatttctggggaactttgatcaaactcttgaagacatggttccagaagatctgttatcagagccgacagatggtggcacgatggatgtttgtgttgatgtgctcgacgccgggttggggtcatctcgggcagcgtcccgcgcctcatcgaccttggagcgcggtcttgagggtcaggaagctgacttggattgctctgctcccatggaagtgacttagggaccttcagccttagaggtggctgctgcagagaacttggccctcaaggatggtgttggcactcacccaacccccgagggtgttgccggggatgattcggctcggatgggtagcgcaagctgcgacccag

SEQ ID NO: 34525 - DNA, 1001 bp, Zea Mays
gagaaagagagcatcttcagtatatgcagtgggtttaactagaataggcagaatagtaggatgattagaggatttaggatcttgtactttttctagagttttctcagcaaaagggaaaacatgctcatcaaaaattacatctctggaaatgtacaccctgccagtagtgtggtcaaaacatttgtaacctttgtgagaagaactatacccaagaaaggtgcactgttttgatctaaaactgagtttgttttgattatatggacgcaaatttggccaacaagcacacccaaacacacgaagtttagagtaatctggatttgttccaaacagtttgtgtagaggtgtgtcatgattaattgttttacttggcatcttatttatcaagaaactagctgtgctaaaagcttcatcccaaaatctcaagggaagttgagcttgtgcaagcagagtgagacctgtttctactatgtgcctgtgctttctttctactaaaccattttgttgatgtgtgtgtgggcatgtcactctgtgattaatgccagtggactgaaaatatttgtgtaagcgttggtactcccctccccaatcagattgaacagccttaattttagtgtttagcatgagctcaacatgtttttgaaactgaaggaaaacctgttcaacatcagatttgtttttcacaaagtatatccacacatatctactgaaatcatcaacaaaagagacataatactttgatttatttattgatgaaattgcaggaccccatacatcggtctgtacaagttccagaggtgcagtagacatatgcagagcatgaggaaaaggtagctgatgagattttcctagttgacaagcatggcaaatcaaggaaggagaaatctctgaatttacagctatgttattatcttgtaaaactctaatgatgattggagaggctggatgtccaagtcttctatgccacagatctgatgaactcttctctgtcagcagtgctaagc

SEQ ID NO: 34526 - DNA, 429 bp, Zea Mays
gcgggggtgtaggcgtgatatgcgttgaatttgggagcgtctcgggtactagcacgagggtagttttagagagttcttaagcatgatagattgataaacacagagttgaagaaaatatcatttgaacgtcatgtcctcctagctctcccttcacacttggttctggtgaaaatactaacctaataatcattggtttaacttcatgactgctcttaggagagtgtggatctaattcgatttagtatcatttgaacctcatgaaccggcctctaggtcatcggccttgcagttcatccccttaatgctactgtagtattctcttttatagattaaggaagggagaggattacgtattttggtggaatatggccccggtcggccatgacctaatgatcctaatcttggagacttggacgtggagtcatacgc

SEQ ID NO: 34527 - DNA, 667 bp, Zea Mays
gttgagttgctacatgaattttggagcaaatcacccccaaatatggtctgttaggcgctctgatgacgatcttgatggtaaagtgtctgcagaaatatcccagatcagcccccctcgccgttggtgaccttgcgctcggattcgcgccggcgccgtgattcacgccctgttaaacgcagatagcgatccccaggtgaaaagatctcgccgtggataaacttggagcacagtagtcgctttgtcgctcatctacttgccggtgacgtggctgcgcgaccatcaccgtcgtgccgccaatcctcgcggttatgccacaccgtcagccatcttaccacgtcgcaattgatcccaatacacagcccatatatcgcctaaggccttgccacggtaacatccacgatcaccgcgctagtgactcagtccttctctccggccaccgcacgtcttctcaaaattagccaccaccgccgatggcacatataaattgtcgccccagtgagctccactaagtaatcacacacccaacgcacctacccgtgcctcagattgtccaccagagcgctccaattttgaagttcccccaaatcagttagaactccgccgtgagtgagctcgtcgtggccagctctctgtaggtctgttcacgccttccttgctcttgtttcaa

SEQ ID NO: 34528 - DNA, 431 bp, Zea Mays
gtgggaggaggtggctgctgagtggcatttaagagctgctggaagaggaattagagtgcctggacaggattgtggtttgtagtgctcaaccgtttgttcctttactggtcggaagatttggttgctaggaatgtacaagtagcgtataagagtgctcaactggctaatgtggccgtaatttcgtagcatggtggcatcaagattcttccaagaagactgattccatgttgcatatttttctcttcagacatgatttctctggctgctcctaatctcccattagattgtgtcttctgttctccacacaattcagtgaattcactcaatctgtcagcctgatttacttatcgatccgggtactttggttatcgccttgcaatttatatcactccatccccaaaattacatcagttggatatttagtaatatta

SEQ ID NO: 34529 - DNA, 337 bp, Zea Mays
ggggagtcctactacccgctccgccacggtggccaagtgacgctgtaccaggacgcgcacatcagggaaggggacctgccagagattgagctcgacgacggcaagacgttccagcacaactcgtgctgggaggacatctgccacgccatcctggaggcgcaccacatgatatatatcgtcggctggtcggtgtatgataaggtgcgactcgtgcgcgaaccatcgccgtcgcggccattgcccgatggtggcgaccttacgcttggagacctgctcaagttcaagtcacaggaaggtgtcagagtgtgcctgctggtgtgggatgataaaacttcgc

SEQ ID NO: 34530 - DNA, 316 bp, Zea Mays
gtcgcttgcgcattggccgccagatggactgtgggttgggtcggtaggggcggggagcccttgaaaacggaggtgaaatcgatgtacgacaaggagcaccccagcatagaatccgtttccaactgtaatatatgagacacgatatttccaatttccttccagcaggctaaaatctggtcatatataagagcatcaatcatcatgtatgcccatcagctttcccgttcttgccaaccatgtctcatgttagattacgacacagaaaaccccatgcttcagagctgttagcttggataaaggtgtcgtcaccattaat

SEQ ID NO: 34531 - DNA, 276 bp, Zea Mays
gaaagtagtggaggggggtctcagagacttccctgttgtagttttggcatagctggtggatggctttttgggcagcattctggcaggtatctgggaagcggtggccagtagcggtgatctgaaagggagggtgattcgggtagctttggctttatcccaggtagactgccatagagcatttctcaatcccgttctcgcggtattcctaccagacatactccggcttcttgcggatccccatgcgaagcgcacaactccgaagaaggtgagggaatc

SEQ ID NO: 34532 - DNA, 285 bp, Zea Mays
gggcagggagcgccatggttagccgagagtggagctcgccggggcgctggccgccgggactggctgggtcggccagggggtcgctcgaccaacggggatggagagagggacgggaaaaaaggtagactggggttctcacctcggcacggaacgacagcgaccaaccaagctctatcgctcgtcatccccagccgactgaggtgtaccaggggctctcgcgtgagggggaccatggcagcaacaacagatcggctgcgaccgtgccttgccgcatcgacgggaggg

SEQ ID NO: 34533 - DNA, 563 bp, Zea Mays
gcctcttcttctttttctcttcaacgggtacggtaggccggctcactcggcgtggacgctttggatggacctcttggggttttcagaccctctccattccaaaaagttcttgcccgtccatgatagccattggcttggcatgtgtcgagtcagatgattccccagccagcaagttgagcacaacatttatctcctcgtcatccgtactagctgacatctcgaaatgagtctgtctctcaccttctgtgagactccggagtggggcaattaaagcttcaatgtcttcaggggagggtcgtactctaagacccagaccaccatcacgggcaggaggattagacacaaactcgaaaaaggatctatgcgatggcaggttccaggtagaataagcaacaggagcaccaacgttcgaaactctgcccctcaggatcatatcaagttggctcaacagatcggcagtgggaattctcttgtttgtcacccgggtgccatcattgatgccgctgtacagatatgcagggtacctgtccttcaaaggctggatattcttgaaaacgaaatcg

SEQ ID NO: 34534 - DNA, 364 bp, Zea Mays
atgtgtttgatattggagggattgacgagggagagttttatgttaagtttactctgtgtaataagagtgatgcttttaaatgggtgttggcagcggtttatggacctgcacaagtggataagaaggagcttttttggctgagttggtgcagtttactagtcatgcgactctgcccctcgccataggcggtgattttaatattcttaggaatcaaaacgagaaaaataaacctttgactgaccaacgttggcctttcctttttaatgtcgttattgatgggcttaacttaaaagagatagagatgtcgggtcgccagtttacttgggcaaataaccttccgaatcccacatacgagaaattagat

SEQ ID NO: 34535 - DNA, 325 bp, Zea Mays
ggggtcttcatatccttgcgatatgcaaagttgtaacagccaaagttatcatgcagcccgtcttctctggcctttgtctggtaatgcagctcatgcactcggcagaaagcttcagcattcgggtccattctctggcttcgaagagcccagatgaagacgctaaacctaacaatagcgttaggggtcagctgatgaagatagatctcataattatccaaaacttccccaatcatctcgttcaagggaaaccacaacccggctctgaaaaagctcttaaaaaccactacttcatcatttttgggctctggagtggtttcttctccgg
